United States Patent Application Publication US 2005/0228172 A9 - sequence listing, part 32

SEQ ID NO: 105669 - DNA, 534 bp, Homo sapiens
aaaaaatgtaagcagagatgtgaaaagtggatatgtaaaaagaacacgtgggtgggtgttaaaacttaggaccgaaatattaattctttttgtcacactataaaattttaccaaaacactgctataatatagagttctgctggatttttatcttggttgattttcagatatgagattttatatacacatacacagaaacatatatgcacatacacatatatacacacacacacacaaacatacatacatatatacatatgtggtgtataccttttttccagattacaaartaatgaatgcccaaagaaaaaagtttggaaaacattgaaaagtataaaaagaaaatttaagttactcatattacaactacacaaataaaatatgaaactatgactatttcacctaatcaaatccttatttaccattatactcagcacagagattaattgaatcttaacagcttgccacatttgcttatgtttatctgagttctctcagaaagatggaaagataggataagccctgcaagagatt

SEQ ID NO: 105670 - DNA, 598 bp, Homo sapiens
ccacctcgcctctctgctgagtcacctcatttgggtgagcaggggctagccctgcaactgctccacctccatcaggagtttctccaaccactagaccaggcatgtgtaagttatgctcctggaagaagagccccaaattctatggaaacctataccatcagggtctgaagcagtaagaacagacatgggtttctgcccatgttcatcrgctccaggtcatgcttgtgggttccacttggtcttgttcttgccctgtgttccaaatatctcctcttcccatgcatttaaaatagtcttagaaagactgcttgaccaacagatacaactgcgtatagccaactgcttgtaatatacccatgtacatgtctatgtatcagtgtatatgtacatgtatctatgtgtgcctgaatatacgtatgcatatcaatgtttatagggaaatatgtatttatatataaataaatgtgagtatatgctatgctgcttctgattgataaaccatttaaccaatatataaaactcatttacatgcactggaaacaatgcatagaagaactaaatgtatctcaatttagaactcaaaatatttaatattttc

SEQ ID NO: 105671 - DNA, 633 bp, Homo sapiens
caaattatgggaaaatgagcacacttttcagtgtaagtagtgtcatctctttgatagtatagatcctgttttagttttgtctttcatctatcattctgattggtacaattaactgcaaaagtcctcttaggggaccaatcaatgatgattccataggaattattttgcagtagcacaccatgatcagcaatgcaatctttccaaatcaatatttctaaatcctttgaccattgttgagattgttgacacctctcttttctggtcttaaattgttccagttggaccgaactctgtgaatgagccaggctccatccagaaagtaaatgataggatactggtctttgattatgacctgaagtcttaactagccaatgttgttgatagccttttaggcaaccgatagctggccctatgtaaagaggggggactgataacccatggacacatttattaacattccttcctcctctgggtgagagggcccatgagtatctgtaggctcaggcatccaaacactattattaacataaacctcaacygggggttccaacaaagtgacagacctaattaaaggcaggaatgggacatatgcccaataggtataattttggtctgctgtagtcacagggagac

SEQ ID NO: 105672 - DNA, 633 bp, Homo sapiens
caaattatgggaaaatgagcacacttttcagtgtaagtagtgtcatctctttgatagtatagatcctgttttagttttgtctttcatctatcattctgattggtacaattaactgcaaaagtcctcttaggggaccaatcaatgatgattccataggaattattttgcagtagcacaccatgatcagcaatgcaatctttccaaatcaatatttctaaatcctttgaccattgttgagattgttgacacctctcttttctggtcttaaattgttccagttggaccgaactctgtgaatgagccaggctccatccagaaagtaaatgataggatactggtctttgattatgacctgaagtcttaactagccaatgttgttgatagccttttaggcaaccgatagctggccctatgtaaagaggggggactgataacccatggacacatttattaacattccttcctcctctgggtgagagggcccatgagtatctgtaggctcaggcatccaaacactattattaacataaacctcaactgggggttccaacaaagtgacagacytaattaaaggcaggaatgggacatatgcccaataggtataattttggtctgctgtagtcacagggagac

SEQ ID NO: 105673 - DNA, 549 bp, Homo sapiens
tccccaaacacattcccttgcagtctgcacatctcagatgagagtgaatgtgtacttccgaaaacttagctgaacttgacagcacatattttaaatatgggaaatacattacattatttgtaagtgttgtaatttataatacatagagaaacgtacatgtatatgtgaaaagagtgagaagatacatcacttccaaatygtttttttttttttgagatgaattttcactcttatggctgaggctggagtgcaatgccatgatatcagctcactgcaacctctgtctcctgggatcaagggattctcctgcctcagactcccgagtagctgggatcacaatcgactttcaaaatgcttttgggttgtgggagaaaaatgtttgaagaccatgtccctatgggtctgtgcccccaggacctctctgacctcatctcctacctgtgccctcctctcttccactgttccagccccacgggccgctttccttttcctggggctgaggttgctcctgtctcagggccttcacttgagctgtccctctctctagga

SEQ ID NO: 105674 - DNA, 596 bp, Homo sapiens
tccccaaaaacacaatttggaatgaacagagaatcatacaggtgtgtaactcatatttaaatagttgaaagaactgaaagttttggggttgattataatgcgaattaaaaagactaatagtttgttccaagacttcagagagctgcgctggtgattttcctttgaatgacttgacaaagcctattctaaattggaacagaaaatgatccagtctacactcgtttgcaagcaaaagctagaaagtcaatcatattaagcatgacttaagccacccaccatcatttgatgcaatagatatacatagcagataaaactacatatcacatgatttaatggaatgtaagtcttctgtgatatagacatctgtaaatgcataagaaatgaaratatgtctgtttggctaacacttggaaaagaatatagttaataaattgtcttttaaaatgtgcttggtgagcaagtttaggacttttgtatttaagtgacattaaaagccatatttgaaatgctaacatcaatggggattatcagttaaaatttacttttgtcactttggcttcacaccatcatcagatttcctattctgtatgtaagac

SEQ ID NO: 105675 - DNA, 498 bp, Homo sapiens
aatagagaatacacttgaacagagaggcatatagatacatgtatatatatatatatagatagatagatagatacatgtgtatatatatatatgcgtgcatctatttatctctctctctctctctctctctctmtatatatatatatatgcatgtgtgtctatatatattcacacacatacacatatcatgactaggtctcctgaattgtctttcactaaaaaactactaagagaaaatgaagaaacacttgtcttttctcatggctatttctataatcaatgagcgtaatcacttgctaatttctaagtttattcattggtgatttacttttcctgaaaaagttctgaataataattacagtagttttactaccatttatgtattgaacactgtcacatgtcagattgtacactttcctctcctcaaatctatctcttgaaaaaatatatattatctttctttttcatagcaactgtgatttggaacaagttaagtga

SEQ ID NO: 105676 - DNA, 542 bp, Homo sapiens
ttgctcatttattcaacagaaaaaaaaaagccatctttcaccattttaaaagatattgacaaatcctttgataaaattaaatacctgttaacaacatcaacaacaacaamaaaaaaactttggggcaggtgcagtgtctcacccctgtaatagattgataaatagataaagaaaatatcaaaatatcaaaataaattgatagataaatggataaagaaaatatggcatatgcatgcaatggaatatggttctacctaaaaaaagaaaatcatgtcacacgccgcaataagcataaaactgtaggacattatgtgaggtgaaatgtatgatttcatttatgtgagctatcttaagtagtcaaactcataggaacagaaagtagaatggtatttgtcaagagccagggaaagggtgaaaggggcagttgttgcttaagggctactgagatttagttttgcaagatgtaaaagttctagacatctgcctcataacaatgaatatacttaatactactaaactgtacatgtaaaaaggtataagat

SEQ ID NO: 105677 - DNA, 542 bp, Homo sapiens
ttgctcatttattcaacagaaaaaaaaaagccatctttcaccattttaaaagatattgacaaatcctttgataaaattaaatacctgttaacaacatcaacaacaacaacaaaaaaactttggggcaggtgcagtgtctcacccctgtaatagattgataaatagataaagaaaatatcaaaatatcaaaataaattgatagataaatggataaagaaaatatggcatatgcatgcaatggaatatggttctacctaaaaaaagaaaatcatgtcacacgcygcaataagcataaaactgtaggacattatgtgaggtgaaatgtatgatttcatttatgtgagctatcttaagtagtcaaactcataggaacagaaagtagaatggtatttgtcaagagccagggaaagggtgaaaggggcagttgttgcttaagggctactgagatttagttttgcaagatgtaaaagttctagacatctgcctcataacaatgaatatacttaatactactaaactgtacatgtaaaaaggtataagat

SEQ ID NO: 105678 - DNA, 542 bp, Homo sapiens
ttgctcatttattcaacagaaaaaaaaaagccatctttcaccattttaaaagatattgacaaatcctttgataaaattaaatacctgttaacaacatcaacaacaacaacaaaaaaactttggggcaggtgcagtgtctcacccctgtaatagattgataaatagataaagaaaatatcaaaatatcaaaataaattgatagataaatggataaagaaaatatggcatatgcatgcaatggaatatggttctacctaaaaaaagaaaatcatgtcacacgccgcaataagcataaaactgtaggacattatgtgaggtgaaatgtatgatttcatttatgtgagctatcttaagtagtcaaactcataggaacagaaagtagaatggtatttgtcaagagccagggaaagggtgaaaggggcagttgttgcttaagggctactgagatttagttttgcaagatgtaaaagttctagacatctgcckcataacaatgaatatacttaatactactaaactgtacatgtaaaaaggtataagat

SEQ ID NO: 105679 - DNA, 548 bp, Homo sapiens
tagctggcttgaatgctttcctttctcattcctcccactccctatttgtgtttcctcttcatcccaaataaattattttcagtttaatccttggataacaagatcaactattgggagaattcaaactagccragttcacttttattcctgtgtgaaacctgacaattctttgccaagtacaaatatttattgtattaatttgttaaacaaaacaattttgaccaaccaaccactataccaatagtcttgttgttgttaatctcttttccaaaagctacagacttattacatactttagaaattatttcattcaatagttataccaaattgttgcccgtgattaacatggatcgccatctttccagattctaacaacagttttttccctacccctttccaaccttgaagccattgacacatagtttagattgtatattattgaaaaatcatattcatggtacaatttatgcattattcaggactggctacgttgtgctgcagtaattaatgatctccaaatctaatttgcttacagcagaagagattta

SEQ ID NO: 105680 - DNA, 548 bp, Homo sapiens
tagctggcttgaatgctttcctttctcattcctcccactccctatttgtgtttcctcttcatcccaaataaattattttcagtttaatccttggataacaagatcaactattgggagaattcaaactagccaagttcacttttattcctgtgtgaaacctgacaattctttgccaagtacaaatatttattgtattaatttgttaaacaaaacaattttgaccaaccaaccactrtaccaatagtcttgttgttgttaatctcttttccaaaagctacagacttattacatactttagaaattatttcattcaatagttataccaaattgttgcccgtgattaacatggatcgccatctttccagattctaacaacagttttttccctacccctttccaaccttgaagccattgacacatagtttagattgtatattattgaaaaatcatattcatggtacaatttatgcattattcaggactggctacgttgtgctgcagtaattaatgatctccaaatctaatttgcttacagcagaagagattta

SEQ ID NO: 105681 - DNA, 374 bp, Homo sapiens
cttgtctcagatgaaactttggactttgccttttgagttaatgctggaatgagttaagacttcaggggactgttggaagggcatgattgtgttttaaaatgtgaggacatgcatgagctttgggcggggccaggggcagaatgatatggtttgactgtgtccacacccaaattgcatcttgaattgtagttcccataatccccacatgtcataggaaggaccccttgggaagtaatttaatcatggtagcagttactctcatgmtgttctcatgatagtgagtgagttgtcatgagatctaatggctttataaggggctttcccccacccctttgcttataattcttgttgctgctgccatatgtagaaggaca

SEQ ID NO: 105682 - DNA, 574 bp, Homo sapiens
gccatcatatggacatgatacaaatgcttaatggaagtatttatttcattctgagatagggagaagtgtaaggtttctcagagataggaacactcatctggcttctatttacaccactttgttaatactctcctagtccagaatatcagagccatctgatttattctgcaccccacacctaacagaaaaagattagtagctaccatactctgaataactgctataggtgttacagtaggtagttagtcagatatgagcgggataggaaaggctcccaccaccactaggaatgtcacgcaattatcaggtgatggtcaggtggttattaaactgtctctctaaaataataattggccacagccagcaccaaggaaaagcggtctcccaataggtaaaaaccggaaattggtgattaacagcttcccaataaaatctcaggagttgggcaagtggactcaagaatgcastttaagaggcaaaatggcagagtttaactggtgtattacctactatatgaccttctagggacatatgattggtaagggaagaatgcctccagtgagcatgtgtacag

SEQ ID NO: 105683 - DNA, 565 bp, Homo sapiens
tccctcgaagttaggcagcccaacaccttctttgccacaccttcacaaaagaatcttttcagagtctaggagccttgatagcatgggttcaacctccctgggtataccatggtgctattcttcttcagggtactgccacatgcccagggcactgacagacttctgttctcttccaagtgtgagagactatcttctctgtcttgctattcctgtgtctccctcgcagtggccctggcctttgtgttcccagtctgccctgcccaccctcaaggaactcagatcyggaaaacaaggaaaccctgcttttgaccaccacaacagaaaactcccctgacatatgagaatgtaaggggcctgactacttttcgcagtaaaagaaagagaaaaatacaatcaagaaaaaattattaacaaccaaccactggtgtctggttaattgtagggaagaatgtcctagctatgtggctttgaatattagaatagatagggaggtgacagtctttccttcccaccccttggtattctacttcttaactctgcctattgttttcccctaatttttcta

SEQ ID NO: 105684 - DNA, 649 bp, Homo sapiens
ttacacaaacagaattttaaacatgagataartagtaaaatatgtgtgcacaaaaaacaaagagagagggctaccttgatctgccttggagaatcaaataatcttcaggaattaggatgtgttttgcaggtagagaacttgagggcttttttagacataagaagctgcatgtgcagagtcccaggaaaatgatagagtagtgtgtttttggaaaaattaaaatttgcagttgttagaatataaagtggaagtcaaatcttgaagaagagactgtcccgatggcgatagaatatgagggaaattttctagcaaggtagtagcatgattagatttccatgatagaaaaatcactaacatggaatggagggtggtttgaaagaaaggagcccactgagaatgcactagcagcagactctataggggataatgaaggcaggcctagcagcagatagtgatgggaagttattccaagaggtggctctagtgctcatgcagttcattcccctaaaacttctatgggaaaaaaatgcaggccccctcaaatgtaaaataagactcatgtagcctctaacataagactgaagacatctggggcatagtcacaatgttatttattctcataattggtaaaagtgtcatttgcatttta

SEQ ID NO: 105685 - DNA, 528 bp, Homo sapiens
caaaggaactgggaatgaaagtggtttccttgaggcctgggtggacagaggtgttgtttgaatttttccagtccctctaccttcagaaggataaatacttttcattttgaaatttaaaacwttttttcctcttttttttttttggcggggggcgggggaatgttctgacttaaacagtctcatcctgtattctttttttttttttttttcttgagatagtgtctggctctgtttcccaggctgtactgcaatggtgcaattatgtttcactgcagcctcaacctcctgggctcacatgatcctccctcctcagcctcccaaagtgctgagattatgggtgtgagccaccatgcccagccccctgtatttttaaaattggttttatactatattctaaaggggcttcgaaagatttaatgaagtggattctaatgaaaacataataaaatcaagtgaacgaaaagtccataaataaacaacaaaaggccacagcacttagatttgttccctttctgctttatgtgaaga

SEQ ID NO: 105686 - DNA, 528 bp, Homo sapiens
caaaggaactgggaatgaaagtggtttccttgaggcctgggtggacagaggtgttgtttgaatttttccagtccctctaccttcagaaggataaatacttttcattttgaaatttaaaactttttttcctcttttttttttttggcggggggcgggggaatgttctgacttaaacagtctcatcctgtattctttttttttttttttttcttgagatagtgtctggctctgtttcccaggctgtactgcaatggtgcaattatgtttcactgcagcctcaacctcctgggctcacatgatcctccctcctcagcctcccaaagtgctgagattatgggtgtgagccaccatgcccagccccctgtatttttaaaattggttttatactatattctaaaggggcttcgaaagatttaatgaagtggattctaatgaaaacataataaartcaagtgaacgaaaagtccataaataaacaacaaaaggccacagcacttagatttgttccctttctgctttatgtgaaga

SEQ ID NO: 105687 - DNA, 622 bp, Homo sapiens
ctccagaaccacaattaatgattactagttgaactctatttctattttcacatagattcaagtaagttttcagaaaaattcatcattatccaaacctctcactatcccatatctaaagggaaccaaataattcagatattcagatatcacagcatcctttaacatgtgaacacaactatccaaacaagttatctaaacccaggaacaagttatctaaacccaggaactgagtaaattcaaagaacaaaggttacttgtattaaataagacctagtataagaaagtgatatgtatggcatagatgaggtaaagagtatagactttatggacataaggaagatcagtggaagatagagaactaggtaacaaaagaaaaagacattacatttcactaactataggcaagaagagaaaagcatcatataggtgaaatgtaatttccaagagccattcgtcattcatcttcttgaaaagtctatgatttttttcctatatcatcctatcagatgtcttttctgtattgattaaatatggttaagaatatccacttgtttctwtggcagggtgctttcagtttaacagcttcagtcctacttacatgcattccagccatagtttggat

SEQ ID NO: 105688 - DNA, 620 bp, Homo sapiens
cttgtgcttttgaggtcacatacaaaaaaaaaaaaagcatctttgcccaggtcaatgtcaaggagcatttatcccattttcttctagaagtattacagtttgaggtcttacatttaagtctttatttttagttgatttttatatatagtgagagataaggccctaatttattttgcatatgaatatscagttgtttcaacaccatttgttgaagtgtgtgttcttggcaacttcgttgtagatcagttgaccacgaatgcaaggatttatttatgggctttgtattctgttctattagactacatacctgtcttgtacagtaccatgctgttttgattactatagctttattctctttgctcaagattgcattggcaatttggggtctttagtggtttcatatgaattttaaaattattttttctatttctataaaaaatgtccttgggattttgatagaaattgagttgaatctgtagatcactttgggtagcatggacagtttaagcaacattaattcttccaatctctgaacatgggatatcttttcatttatttgtgccttcaatttctttcatatatgttttctagttttcagtgtacatacacatcttttatct

SEQ ID NO: 105689 - DNA, 437 bp, Homo sapiens
cccacataaattctgacaatgcatatacagtggtgaggctaaaaggtttcaagggtgtgatggacaccaaaaagtactagaagcctgtactgaagaaacatggtaatcaagtttgtatctttgtcccttcccaaatcacatgttgaaatgtaatctccrttgttgcaggtgatgcctggtgggaggtgatgggatcatagaggagtattcctcgtgaatggtttagcacaatccccttggtgctaatcttgtaatagcaaatgagttctcatgagatctggtcatttataaatgtgtgccgcctcctccccactgctgtctctctcttataaattatccagtctaaggtatttatttatagcaatgcaaaaacagtttaatacacatgggacaggtaaaagtggtaattctctcatgagtagtgtaagcagtaaaca

SEQ ID NO: 105690 - DNA, 550 bp, Homo sapiens
acaatatgttatgtcttgtgggacttagtggaaatgggaagccattacaagatttttaaaatagaaattacatgatctggcatatttttaaaggttcatctggttgctctatgtagattagatttagagacagaggggtggctttcatagatcaaaatagagaaagtatttaggagactattcaataatgtaggccacaggaaatagcagtaaatgactgcattaaggtatttattgaaggtacagttgacaggctttgaggatgatttagatgtggtatatgagagaaagagggaagtcaaggacaaytccaagattctgggctgaatctactgaaagaatagagtttccactgattaagatggaaaggactataagaggaagggagcataaaatcaagtgcctggttttgaacttgctaattttaagaagctgtctgttttgtgttgctacaaaggaatatctgaggctaggtattcctcaaataaactgaaaggtgtatttgactcagggttgtagatggctgcaaagtttaagatttgacatctac

SEQ ID NO: 105691 - DNA, 550 bp, Homo sapiens
acaatatgttatgtcttgtgggacttagtggaaatgggaagccattacaagatttttaaaatagaaattacatgatctggcatatttttaaaggttcatctggttgctctatgtagattagatttagagacagaggggtggctttcatagatcaaaatagagaaagtatttaggagactattcaataatgtaggccacaggaaatagcagtaaatgactgcattaaggtatttattgaaggtacagttgacaggctttgaggatgatttagatgtggtatatgagagaaagagggaagtcaaggacaattccaagattytgggctgaatctactgaaagaatagagtttccactgattaagatggaaaggactataagaggaagggagcataaaatcaagtgcctggttttgaacttgctaattttaagaagctgtctgttttgtgttgctacaaaggaatatctgaggctaggtattcctcaaataaactgaaaggtgtatttgactcagggttgtagatggctgcaaagtttaagatttgacatctac

SEQ ID NO: 105692 - DNA, 550 bp, Homo sapiens
acaatatgttatgtcttgtgggacttagtggaaatgggaagccattacaagatttttaaaatagaaattacatgatctggcatatttttaaaggttcatctggttgctctatgtagattagatttagagacagaggggtggctttcatagatcaaaatagagaaagtatttaggagactattcaataatgtaggccacaggaaatagcagtaaatgactgcattaaggtatttattgaaggtacagttgacaggctttgaggatgatttagatgtggtatatgagagaaagagggaagtcaaggacaattccaagattctgggctgaatctactgaaagaatagagtttccactgattaagatggaaargactataagaggaagggagcataaaatcaagtgcctggttttgaacttgctaattttaagaagctgtctgttttgtgttgctacaaaggaatatctgaggctaggtattcctcaaataaactgaaaggtgtatttgactcagggttgtagatggctgcaaagtttaagatttgacatctac

SEQ ID NO: 105693 - DNA, 168 bp, Homo sapiens
gttccacaagcagccagagtgtcaatgcrtatgtcaactaaagaaaaaaaaagcttttaaagagttacggtgggttttatttataagttttattgaggactatagaccaaggcctatagcctggtggcagccctgtggagggtttttattagactgtttggcacagta

SEQ ID NO: 105694 - DNA, 416 bp, Homo sapiens
tcttatcatcctgtgcatgaaaccctttagtgactcctcacctcacagaagtaagaatgaacatctgactgggtcttcaattcctctgatctttctgattctatctcctactgccctcatcctgctcacagcagggagtctcagtggctgccttaatgtctcctcaatcatgccgggtactcacttccacctcaaggtggattggacatgaggccttcctctgcctggttcccattcctcatatatacgcatggcttgctcccttacctcctttaggaatttgtgttaatatcatcgtattattttcccatggctgctataacaaactaccacaaactcggtgkcataaaacaatagaaattccattctctcacagttctggaaggcagaatgaaatgtttcactgggcccaaatc

SEQ ID NO: 105695 - DNA, 586 bp, Homo sapiens
aggatataagtctaatctagataaaatttattaatgtttcacaaattccacctaaacccaattatgttaatgcacgggtttatcattctgttcataaatagcctatagtaatgattgaggagttaaggcttggagatagactttcataaaaatcttaatgacaagcatgccactcattttcattttttttccgggtattaaattgtatcccagggtcccaaagaattaatataactcaaaaccatcactgatgtattcctttctggatccaattacatggtctataataaagccctgtagctcccggaggtagaatgggggaataaaaagtaaatgcattctccacttaaaattcctacgtattccacagaccatcagaaaacttctgaagtcagcatctctgaactccaaatactgctgattcacagtgtctctttcacttatgaccctgacctatctatgcagaatttggggttcattttctttggaatgaccattcttagatgtaaaggtaaatttgactcccaaaaagagtaaggcaataactaacctygaaccattctgagtgtgacttctatagatctca

SEQ ID NO: 105696 - DNA, 555 bp, Homo sapiens
aagaaaacaatacgaaactcactacccactgtgggctgctttcaagctttaacttcagatcctcctgctagtttttacttttcagagtgtttaagtgcttgtttttgtttgtttgtttgtttgttttttgtagtttgttcagttttagtggtgaacagtgcattagatagattctagttggcttatttcatcttagcaatcatcgaaaacttagatattttatctttaaaattacaaaccaatatggactactacaaacatctattagagcgtcgctgcctttaaatatgattccctagrttgggtgtgatacttctgtattttagaaagttcccctgccccaataaatctaaaatgtaaggttaaaaaccctcatttcttctttatttgcctagttcagccaatttgactctcagttggattttgagaatctcagtgatgtttcagtttggaggtcagttcagaatagctttttattctaattttaatacctctattatcctgataaaagtgttgttgatgaaataattttgaatatctcaataaaaatctcaa

SEQ ID NO: 105697 - DNA, 433 bp, Homo sapiens
atttaaaaaacagtggagccagacgtagtggctcactcctgtaatcccagcactttgggaggctgaggtgggtggattacctgaggtcaagagttcaagaccagcctggccaacatggtgaaactctgtctctactaaaaataaaatttaaaaaaacctgggtgtggtggtgcatacctgtaatcccagctactttggaggctgaggcagaagactcgcttgaacccaggaggtggaggttgcagtgatcctagatcacaccattgcactccagcctgagcgacagagygagacctcatctcaaaagaaaaaaaaaaacacatatatttgcacacaaacatatacacaaatatatacccatacatacacatcataggattacctttagaattaaattaacaaatttacctaaagcatttagcacagtctctgc

SEQ ID NO: 105698 - DNA, 523 bp, Homo sapiens
gactggaaagatttttttaaataaatgtattgatattgtatcatagtcaaaacagcccaggccttggaataagaaagactagaatggccaacaaatatttattatgacttcatttggaatccactgaagagatggctatgaacaagactaagtacatgaccttaaaatattaacattccaatggtttgcatctcgtattttgctgctaaaaaattctgtaacctaggggaaatagtttaatttcactggggcttagtttcttatctaaacaatgaggttaatcctggttactttatagaatggtagaaattaaatgtgtcatagtatgaagcacataacatagagcctggaacacaccaaaactatttttactttgtaatttatagataattcctttacaagttttgttagcataaagaaacattttgaatcytactacttcttgctgaattgacaaaatgaaatttctgatccagcaagttgagaagatatgttttttttagacactgcccaagtttatgag

SEQ ID NO: 105699 - DNA, 604 bp, Homo sapiens
agacttctcaaacgctgcagttgctttatcagctaagtttttataatattctaaaacctttgtagtcctttcaacactgtttatgtatcatcttctctaggagtagatttcttctaaaaaaaaaaaaagaacactttctttgctcatttttaagaagcaactcctcatctgttcaagttttatcatgagattgcagcaattcgtcttcagcctccacttctcattccaattatcctgttatttccaccacatatggttagttcctccactgaagtcttgaatccttcacagtcatccatgagggttggaatcarcttctttcaaattcctattaatgttgctatttccacctcctcccatgaatcctgagtgttcttaatagcatatagaatggaaaatcctttccagcaagtttgcaatgtacttttctcagatctatcagaaaatcactatctctagcagctgtagccttactaaatatatttcttaaataagagaaaggtgaaattactccttggtccatgggccgcagaatgaatgttatcattgtgaaaggaacattcatcttcttgtacatcttcatcagagttcttggtgaccaggt

SEQ ID NO: 105700 - DNA, 630 bp, Homo sapiens
gatcatttaggttcttgtaatgtctttgtctgtttttggtattaggrtaatgcttgtcttatcaaaggagttaagaaacagttcctctgcttctaccatatcaaaaacatttagagaattggtacaattttttcttaaatttttggtagaatgtaccagtgaacctatctgggcctgctgctgtctgctttagaaagttattaattattgattcaatttctcttatagatacaggtctattcagattgtctgtttctttttgggtgagttttgacagattgtgtttttcaagttattggcccatctctcccaggctatttaatttgtgggcacagaatttttgatagtatttctttttatctttttaatgtgcatgaaatctttataatctgtattggtgtcccattttatttctgatattagtaatctgtgtcctatctatcttttagctagcctgtttagtgtctcatttattttatgtatttatttattgggttcattgatttttctctattttttttattttcaagtttggtgagcccagctgtaatttttattattcctttttttctgcttactttggattgaatttgttctcctttttctagtgtcttaaggttggttagtgct

SEQ ID NO: 105701 - DNA, 622 bp, Homo sapiens
ctgcttctaagccatgcttaggggccataggaatctttgttgacactgctcttggtccctcctgccaagccattctaccctttgatcttgcaaactctccagcaatgctaattgatacaaagagcagattgttgcaaatctcactaccttgaaatttcttcctcagctccttccccaaacttctaaataatggggaaatttttccagtgtggaagggaaacaccactctacagtacaatgtgttcaacatattttgtctatacccttgaatcaccttttttttttaaactcttccatcatttcttcaaattcttctagacttcagctttcagaaaacaaaatccagacagacttggagtctcctttgcattctgtccatacctggtctggtgtccacagtggaaaaatgyctcctaaacagaccaaagtaaaaggaaaatagaacatagaaaaacatacacagattaacattgtaaaattgtattaatccacaaaggtatcattgcacctttttaaaatttcactgaaatcattggaagtatatgaagcctcttaagaactccttactgttcttatcccaatgtattgtttttgcttttgtaagtaattattttagaaccag

SEQ ID NO: 105702 - DNA, 622 bp, Homo sapiens
ctgcttctaagccatgcttaggggccataggaatctttgttgacactgctcttggtccctcctgccaagccattctaccctttgatcttgcaaactctccagcaatgctaattgatacaaagagcagattgttgcaaatctcactaccttgaaatttcttcctcagctccttccccaaacttctaaataatggggaaatttttccagtgtggaagggaaacaccactctacagtacaatgtgttcaacatattttgtctatacccttgaatcaccttttttttttaaactcttccatcatttcttcaaattcttctagacttcagctttcagaaaacaaaatccagacagacttggagtctcctttgcattctgtccatacctggtctggtgtccacagtggaaaaatgcctcctaaacagaccaaagtaaaaggaaaatagaacatagaaaaacatacacagattaacattgtaaaattgtattaatccacaaaggtatcattgcacctttttaaaatttcactgaaatcattggaagtatatgaagcctcttaagaactccttactgttcttatcccaatgtattgkttttgcttttgtaagtaattattttagaaccag

SEQ ID NO: 105703 - DNA, 590 bp, Homo sapiens
ctgctgaatgagtctgaagtcatggctgaccagcatcatactaccctgaaacccattgatggcatctgccagggcgttgatggtctcaatatccaggtgattggtgggctcatccaggaagagcatgtrggggttctgccaggccagccaggccagacacacttggcacttctgcccatctgacaagttctggattgggctcacctgttgtttcccagtgagaccatatggcccaatgatcttcctcatttattccttttccttgatctctgggtagcacttcatgtactccaaagtcaagagatctaagtccagctgctcttgtaaatgctgatggtaatgccctatcttgacatgagagtgttttcagatcatgccatctgggggtagtagctctctagttaacagcttcagaagagttgactttcttgctccatggggccctaccagagccactcgtgtgtcaaggtcaattccaaattctagatcattgcagatgcaaagcccatcttttgtatacttgaagctcacattttgcaccataatgacaggtggagggttcttgccacatggtgggaaataaaatgaca

SEQ ID NO: 105704 - DNA, 562 bp, Homo sapiens
aaacttctaaatgcaggatattagttttcttgttatgacaacaaaccaaaatattgtcacaatgacaggaaacatttcagttttctgcaatttgctgagtataagcattacataacctttcccttattagaggatgagctttagaactttttgacataaactcctgttaatatcttcatctaaattttcgctaggttaggtcatcttttaagaggtcttcaattttaaagatawatgtaattgttgtaccctttattttataaatttaaaagttttttgtttaagctccagtgttgttctttgtagaatatttctttaagtcatcccaagaaaaagcaaactaattatgaacagaggtacattaacttttggttatcttttttacctattcagtattttctgttttaaaatgtacaattgaaaaatctttctataaaagacagccatgcaatattttcttttaaaaatattatctgtgactataaagaattttgccatatgttgtttctaaaaattatattgataataaaaagaaaaaaatttaaatctacttagatctttg

SEQ ID NO: 105705 - DNA, 584 bp, Homo sapiens
tttcctctggcccctttgttacgctgccctccctgctctccagacagccattccaagcagcttctaatgaggaaggtgccctctgcaacttcaaggagaaatgaaaaacagctagggtagctcaacaataatgcacatcttcaaatgccaacaagaatgcctcttgcagaaaatctctgttcaaacaaacttcatgacaaaatctaaatagtgcattctttattcatggttagcctatctgattattcagttattcatgcatctcattttatgaataattaatagtaattatcttattacctatcaggcactgaaaagacacagtttcttactttgaaggaaggcttcaatgagtctcaggcagaacayacactcctgctctctcccgagccccctgcatgggctgattggcgttggcactcttctcttccctcacagatacagcctcagtccttctctcctgcatgctgagaagccactaccaatcctcagagctgctatggaagcttatttgcaactctgctcacttataataactcatgtattcagttagtcaaaaagtatttattgaatgtctaccaagg

SEQ ID NO: 105706 - DNA, 588 bp, Homo sapiens
tgttttcttttaggagagtcatagtttgacaacttagatttaagtcttttctacattttgatttgatttttgtatatggcagagactgggggctagtttcattcttctgtatatggatgtccagttttcccagcaccatttactgaagagactgtcctttccccaatgtatcattcttggcaactttgttgaaaacgagttcactgtagatgtctggatctatttccaggttctctattctgttctattggtccatgtatctctttttatgccagaaccatactgttttggttactatccaccattgctttgttcctgccatggggagttaacctctytggtggggagtactccccatctccttgaccaagatccctcttcctcagccagtagagagaggctcccagtttgaaccttctctcaatttttctatctactgattgctgggtcccctcccctaagccacagggactgggaaaatagctgttgactccttcagaggaggagctccagaagagtgtaaacagagagctccccctaaaacttcctgctcagcactgccatcctgatgtccactgtctctgagtc

SEQ ID NO: 105707 - DNA, 573 bp, Homo sapiens
ttattttgtcatatgaaatttattttatttatactaatttttgaattttttttctattaaatcattgcaaagactgtcaaaccttctaaccgtagtattagtattaatttttctaaccatgcatgattcattcaatcccacagtagctgtagcttgcttgccttgttttttccctgaaattttcaaaaaagtatataaaaacacaataaatatctgctccatgtagcaagacagcagaaaaacttaagtccttaaaaattgttaacatttgattatrtcacccatggattttggagatacatacgtatatgacttatctgaactttctatgttgaatgtgcactgttgtataaactacttgttttttccctgcctgctctttgaagaagtcaattaggaataatgggaaacaaggggtaggcaaaacattgcagtgcagtgttatttctatctgtctgggaatatttcagccaaaagtttattttgggaaaaaaaaaagctgtaacgcactctctcacacacaaacccacaaatactttggctgcaaattattctgcaatgttgttgctgtgt

SEQ ID NO: 105708 - DNA, 573 bp, Homo sapiens
ttattttgtcatatgaaatttattttatttatactaatttttgaattttttttctattaaatcattgcaaagactgtcaaaccttctaaccgtagtattagtattaatttttctaaccatgcatgattcattcaatcccacagtagctgtagcttgcttgccttgttttttccctgaaattttcaaaaaagtatataaaaacacaataaatatctgctccatgtagcaagacagcagaaaaacttaagtccttaaaaattgttaacatttgattatatcayccatggattttggagatacatacgtatatgacttatctgaactttctatgttgaatgtgcactgttgtataaactacttgttttttccctgcctgctctttgaagaagtcaattaggaataatgggaaacaaggggtaggcaaaacattgcagtgcagtgttatttctatctgtctgggaatatttcagccaaaagtttattttgggaaaaaaaaaagctgtaacgcactctctcacacacaaacccacaaatactttggctgcaaattattctgcaatgttgttgctgtgt

SEQ ID NO: 105709 - DNA, 560 bp, Homo sapiens
gcatatatgcctgggctaatttaattctctgaagacattttaatccaagatagtacattcctcaaggcagggatagtgaaggactcttgattctacctgacatgcaatttaactcactttaattatttctctataatgagctatgaaacacatccctgcttggctcatatatttaataacctaagagttttatgaaaaataaaygcctaaaaattcagggaaaattctattgtggatgtattagagcagtgtcctaaaccatgcagtaactttcttttttctttctttttcttttctttttttttctttttcttaatttttttttttggcagagtttctgcattcaaattaagtccctcaagggaaggaacgaaaaagagcccagcatttcctaagtttcatctacgtgacagggcatttatttagtggaattacatacaggagggtcttggagattgcctttgcctttcacttgggatgaaaatttcctctgcagcatgcaaaacaggtgagagtgttcctgctgctacagagttcttttgcactaaaagaaaaatctt

SEQ ID NO: 105710 - DNA, 560 bp, Homo sapiens
gcatatatgcctgggctaatttaattctctgaagacattttaatccaagatagtacattcctcaaggcagggatagtgaaggactcttgattctacctgacatgcaatttaactcactttaattatttctctataatgagctatgaaacacatccctgcttggctcatatatttaataacctaagagttttatgaaaaataaatgcctaaaaattcagggaaaattctattgtggatgtattagagcagtgtcctaaaccatgcagtaactttcttttttctttctttttcttttctttttttttctttttcttaatttttttttttggcagagtttctgcattcaaattaagtccctcaagggaaggaacgaaaaagagcccagcatttcctaagtttcatctacgtgacagggcatttatttartggaattacatacaggagggtcttggagattgcctttgcctttcacttgggatgaaaatttcctctgcagcatgcaaaacaggtgagagtgttcctgctgctacagagttcttttgcactaaaagaaaaatctt

SEQ ID NO: 105711 - DNA, 631 bp, Homo sapiens
taaatattatataagagagtaaataatagagttgaatgaatgaaaaataataagtggattaaaataccatcaacagacatattcaagttagtatgatgtgcaagtaactagaaagcaaaatatactatacstctttagttattaaaaggttaccctaaatttcttttcatgtatcattagaaaaataaaatgaaaacaaatgatcaccataaaaaagatacaatgagataaaagatgatttctcattggagcgggaacttctctgagtccttctgtggacatgtctggccatttagactatgggattaggatggaattacaggtcaaggaaccacttccctataataacagaacatgtggacagggagaaacaaaggcaaatggggacaaaatgtttgaaactttttatcagtccaaggaactcaatggacaatcagaggtaagacactattaataagttaaaaataacgccagggtcataaaaccaaatatttggattaccaatatgggtggagaagtgacaaggcttgaagagtatcccaggtacattggaggcttaggagttgcagtctctcaggaaggaatatggtgagtgggcttgaagcacttaaatagcactttttaaaatgag

SEQ ID NO: 105712 - DNA, 631 bp, Homo sapiens
taaatattatataagagagtaaataatagagttgaatgaatgaaaaataataagtggattaaaataccatcaacagacatattcaagttagtatgatgtgcaagtaactagaaagcaaaatatactatacctctttagttattaaaaggttaccctaaatttcttttcatgtatcattagaaaaataaaatgaaaacaaatgatcaccataaaaaagatacaatgagataaaagatgatttctcattggagcgggaacttctctgagtccttctgtggacatgtctggccatttagactatgggattaggatggaattacaggtcaaggaaccacttccctataataacagaacatgtggacagggagaaacaaaggcaaatggggacaaaatgtttgaaactttttatcagtccaaggaactcaatggacaatcagaggtaagacactattaataagttaaaaataacgccagggtcataaaaccaaatatttggattaccaatatgggtggagaagtgacaaggcttgaagagtatcccaggtacattggaggcttaggagttgcaktctctcaggaaggaatatggtgagtgggcttgaagcacttaaatagcactttttaaaatgag

SEQ ID NO: 105713 - DNA, 588 bp, Homo sapiens
tggcctgtgtgagtaaaagagcatctctgatagtggcctctacgataaatttaaaaccaatgggagcttctttggtttgtcaggactatgagarcacagagttttcttcacgaaaggatttcttgatccttccctcatctttgaagaactgaggtcagatttccagacaaacctagaatatggaaatgactcttatacaattggatatagatggaaaataaagaaattagtaatttcctgtcacttgagtgttttggtacatattcatgttgaccacacacttgtttaacaaacctatattgatcaccaaaatgttttagttattttgcaagtcacgaggggtaagatcatgatcaagacatagctcctaattttaaagggtccacagtactggtgatacagagagaaggcaagaaaatactaggtagaaaagtgcgggctccactctcaagcctggacccatgccctaagtgagaatatacattcctgttttcctgcccaaatgttgccttttccaaaatcaccctggcctgccatgctccccatcctatacccataaaaactgcagcttccactggcagaggggca

SEQ ID NO: 105714 - DNA, 588 bp, Homo sapiens
tggcctgtgtgagtaaaagagcatctctgatagtggcctctacgataaatttaaaaccaatgggagcttctttggtttgtcaggactatgagagcacagagttttcttcacgaaaggatttcttgatccttccctcatctttgaagaactgaggtcagatttccagacaaacctagaatatggaaatgactcttrtacaattggatatagatggaaaataaagaaattagtaatttcctgtcacttgagtgttttggtacatattcatgttgaccacacacttgtttaacaaacctatattgatcaccaaaatgttttagttattttgcaagtcacgaggggtaagatcatgatcaagacatagctcctaattttaaagggtccacagtactggtgatacagagagaaggcaagaaaatactaggtagaaaagtgcgggctccactctcaagcctggacccatgccctaagtgagaatatacattcctgttttcctgcccaaatgttgccttttccaaaatcaccctggcctgccatgctccccatcctatacccataaaaactgcagcttccactggcagaggggca

SEQ ID NO: 105715 - DNA, 545 bp, Homo sapiens
gagttgtgtatttatcccctttgccctttctgagagaataactttgtaaatctcaacacttctacaatgttagcctaatttagatcaactagatacttatctctactacttctaccaatgattgtcatttattgagcattgactagatgccaggtaatttacaaaccttttttattcttacagctctgctataatagtcatgttttatcattttatttatgaaagaaaattgagactcaggaagtttaatttagcccagtgttgcatagctgggatattgtggatcaggtctttgaagcccatttttttataactttctaaggcctttatttgttttacaacaacataaggctagttcaataataattttacaattctctgagagaatgctaatttttgaaaaacaatagcaaccaaaaggagcccagtaaaatgtgtgaaatcatagtggatattcagaattattagttccctttcatttcacctgtggaccgcattatttgartataattaaaaaactgtaacatctttctggtgttcacaac

SEQ ID NO: 105716 - DNA, 643 bp, Homo sapiens
tcttaacttgaaagctagaaattgctattttcttactctccttagttggatcattgaaatgcatcctgaccacaccaagagaaacagtgacaaagttgaatcatggtcttgtcctattaaatgattataggaagggaatgttattagaacatttcattgccaggtatgcaacaacctctaggaccaaaaacacygaacgaggcttgtaatatctcaggcataatattttagtggctgaaatagcttatatcatcatgcaagcattttgagcacctttaatccatagatcaataaattattaccttgtcatattgcatcacaggggatgcacataaaataaattgatttcacaattgctcagttcagtcattataaaatactgaacgcaggtactatgtgatccttttggctaattcatttgctaccctgtttttttaattgtagagaatcaatcaaatattttctgccaacattttcccctacttcttccttcatcctgccctcatcagttatctgtatattttgttattaggatgtgcctaaatcacagtaggacagagaaagaaatcaaagatatgagattcccaacatagttgggaaacaagattaaaatagttaaggaagagtagctatgggtaccaaa

SEQ ID NO: 105717 - DNA, 606 bp, Homo sapiens
aagacttccctaggtcatacgctaatgctggtaggctgggttctttcttctgtggcaaattcactctgtcatttctgtgagtagtaagtagctgttaaccctcctacaccaactttctctagagggtttgaccttcctgtcataaagccttcttcattcaaatcttttctttgacgtgaatctaaatataatacaatcctcacaggcttatgagactgccttctaagtgaaatctcaggtgttcctaatattactgccaaaggattttaggaatagaaggattcacatggcatggaatgatgtgaggttggggagtcattttggtgcagggtagggcttaatggtagagtgggaagtagagtgggatgggaacatgtttagttggaatgccagcctcatcacacatgtaactaacttaatttctccgagatgcaacatcctcatctgcaaaatgaagtttatttaatcctatcttatatcatattataaggtttagaggcaatgtatgtgaaatgccttccaaccaaataggaaagactagacatttttagacccctggggagcckgtggttagaattcagtgtttgtaaattgtcacagaaaaaa

SEQ ID NO: 105718 - DNA, 513 bp, Homo sapiens
ttctgggatacatgtgctgaacgcgcaggtttgtaacataggtatacatgtgccatggtggtttgctgcacctatcaacccatcatctaggttttaagctccacatgcattaggtatttgtcttaatgctctcccttccctttctcccaaccccctgacaggccccagtgtgtgatgctcccctctctgtatccatgcattctcattgttcaatttccacttatgagtgagaacaggcaacctacttaatgggagaaaatttttgcaatctatctatctgacaaaggtctaatagccacatcttttatactgatgatccctccagcttgtaaccaggcatcctgccactgagagtagattacattagcctcaaatatcacaaacaccctcyaaatgtgatcccccttttatttttccattctgtacaaatctgtcattcataattatgcgaacatctttggcaatctctatttttaatcaggacaacactgttgcttaatgtattctcaaaat

SEQ ID NO: 105719 - DNA, 475 bp, Homo sapiens
tttgattatttaatgagagttgtgtgcaacatcatacatgcatatgcaccactaatgtacacattcactctgagagctattttttcaccatgataccatattggactagtttctgtatataggaaacagactacaccataggctgcactaatcttctaaaggtaatacttgctccttaggagaatttttttaaggaataaaagaacaacactaaggcacataaatctactgagaatgtggatcatagtaactgatgtcagccaatcaattatatagttyatattcaatgtcattaatctcttggacatgacaaatcttggtagcagaagggaataagttccagataatacacttttgaagtaatgaataaccctccctgtgcagtactttaatgactctctttgtcagatttaagattttattattaacattagaaaatggaagcccaaaaagatacagttgcaaatcaatttca

SEQ ID NO: 105720 - DNA, 403 bp, Homo sapiens
gaattccttggaatccctttcctgggacagaggggtagctatcttgatggtgggggttctgtgaagcttagcaaaaagtccaagtaatagatatgacatttgttctcaggaagcttactagttagcagctgtttttccggtggatacctgatgactatctttgacccagaaatgggggtgaagaaacagaaaaagaagtcttttcataaagaatgaatccaaatttgacaccaaatcctgragtggcatatccacattgaacaacttgatgacaaagtggttttgaaacagctggccctagatgtggagaggaccgaggaccctgttatctaaactggttactccgtgaggctcagctcattcagtcctgctttagtagtgtcctgttcttagtgctgtacta

SEQ ID NO: 105721 - DNA, 592 bp, Homo sapiens
cctatatctaaggagggatttttttacttggggtctgtaatacacataggtaaagtggagtgtacatgaacatgtatgcattcttctgggggttagacccatttttctttttttttttcggtggtagggggggattggagggggacggagtctagctctgtcacccaggctggagtgcaatggcatgatcttggctcagtggaacctctgcctcccaggttcaaatgattctcctgcctcagcctcaccagcagctgggattacaggcgcccaccaccccaccccgctatttttttgtatttttagtagagatgggggtttcaccatgttggccaygctgatcttgaactcctgacctcaagtgatctgcccgccttggcctcccaagcgcccggccctagacccatagctttctttaggttgtcaaagagtttcatgactgcaaaaaaggcagaaaaactattaaagctaacaagatgactgtatccaattaactatttatttcagtttttctaaatatcgcttaatagcctgaaacataaatttatcatgattctcttctctgcttcttaaaacccagatgccagtcaac

SEQ ID NO: 105722 - DNA, 411 bp, Homo sapiens
ctgtgtaatcaatatcagtttaaataggtcccttgacatgacagaggttcacaatcactttccacaagcctcaactgcatgctaatgagaaagactggggcaagagactggtgagaagagacccctcagtgacacaggcatgcatgaaatgatgggctgacaggcgtgaaacactgcccacttcctcagacctttctcttgtacaaagcaaagccactgggggagagatggcaaaccttcctgccctaatggcccaggcagagatccactgctcttgaaggacatgtaaaaacagtaatcttttgcccttgagaaaggcagaaaatcttgtgggcccaggatcctrtgccaataccaagcagagatccactctcactagaagtacagaaaatctctcctgttcaagaattc

SEQ ID NO: 105723 - DNA, 531 bp, Homo sapiens
ttttaccttttaaaacaaccagttcccggatattacggttcccataacatttagtgctcttccattcctccacacattggcagattcagcttcctctgcccagttccttttctcaaagagattgtagtctaatagacataaaaacaaataagtatgattgaatgtcatagataacataatgcaggtctaatcagagaaaaatgagaccaaaagtaaaaagtagtcataagtatcagaatacaagtaataagggctggggatgaggttggcatttcctgaaaagaaaatcttcatgagatagaagcttgaattgagtcttcaaaggcaaatagatccttctcaggaagactgaaggtagtgaatgcgcggagacactaagcagtgcttgtgtgggatatgsacagggctagggacaaggtcctgggcggaggcagctggatctgaaaatgtgcagaggcataggcatggaagatcactcagtgttatgggaactgtgaaatcaaggaactggatgttttaaaaggtaaaaaa

SEQ ID NO: 105724 - DNA, 531 bp, Homo sapiens
ttttaccttttaaaacaaccagttcccggatattacggttcccataacatttagtgctcttccattcctccacacattggcagattcagcttcctctgcccagttccttttctcaaagagattgtagtctaatagacataaaaacaaataagtatgattgaatgtcatagataacataatgcaggtctaatcagagaaaaatgagaccaaaagtaaaaagtagtcataagtatcagaatacaagtaataagggctggggatgaggttggcatttcctgaaaagaaaatcttcatgagatagaagcttgaattgagtcttcaaaggcaaatagatccttctcaggaagactgaaggtagtgaatgcgcggagacactaagcagtgcttgtgtgggatatgcacagggctagggacaaggtcctgggcrgaggcagctggatctgaaaatgtgcagaggcataggcatggaagatcactcagtgttatgggaactgtgaaatcaaggaactggatgttttaaaaggtaaaaaa

SEQ ID NO: 105725 - DNA, 595 bp, Homo sapiens
tttattggctaatttaatcagtattctcataagtatgtgattccttatactccagaaccaaaaattgaatatgaaaatatttcagctgggcatagtggctcacatctgtaatctcagcactttgggaggctgaagcaggaggattgtttgagcccaggagtttaagacyagcctggggaatatagcaagaccttgtctaaaaattagtgaagcacagcagtgcatgtctgtagtcccagcctctcagaagagtgaagatggagaatctcttgaacctaagaattcgaggctgcagtgagttatgatcattataatcacatcattgcactccatcctgggtgacagggcaagaccctctctctaaaaaacaaacaaaaaccaagaaggaaggaagaaggaaggaaagaaggaaggaaggaaggaaggagaaaaactatttcactcatagacacaacagctctatgatttttcccggagaccctcttcctttaggtctcagtgttccttttctgaactggactgctcttctcttgccagccacacagctgacaccttgtaaattctgtccatccctcacttgtgttggatgcactat

SEQ ID NO: 105726 - DNA, 574 bp, Homo sapiens
tattaggaaatgcagtaagtctgtcttcacaaaccttgcttctatcaacaatcacccaacagaattaataagcaccaatgtttctctatatgtccctgaaataaaatttccctgttatattatgtactaaatttaactggagaataactgagtaaaatcatgagttttgaaagaaatttacagattgaaagtcattatttcagtacttgatggcagtaacctcctcctggattttcacttctactttttcaaagaatattctctcattatctagctgtatttggtacagaatgggaggctgttctaaaaatcaacagttaaaaaccctagaaataatgcagaacactactgcaaataaatargtagtgttgctcatatcatttctatcatatttgtttcctaaaaatgccacaatacatatttctgaaataaaatatagactgaatgagcagctcttagaaggtaacaatacagtgggctttttaagaaaaaatattaaaataatttaactgagtaaaaagcattaagcttcattttaatatgtcgacatcaaccttatataatctttcactgt

SEQ ID NO: 105727 - DNA, 532 bp, Homo sapiens
caacatatgattaaaaaataaaatactttcagtaacaggctttttaatagattaaaagagaaaaataaaacgatcaattttaaataaattattataccaggcaatgcaaatgattccattgatttgtttttaaaacttaaaacattatgttggtacacgaacacacacactcaaacaaaattaaaaatgaaagacctaaaaataaagttaactttctaacacaagtgaggaaacaagctggtaggaaggtaacctagaagctgggcattatctrgtatggaaggtggaagtatagccaaggagtaggaggaaagctcagcccttcctacacactggggcagagaaaattcaaatatattggcctaggaaagaatccaatgtcccaggaacaactggacaattttttcttacaagtaatgttctgttacatgccagatggtgttcctgtacagaatttccacaccaatgcataaaggagaggtcttcaaatataattgtgtttttctccaagcatctatgagaataagacacc

SEQ ID NO: 105728 - DNA, 532 bp, Homo sapiens
caacatatgattaaaaaataaaatactttcagtaacaggctttttaatagattaaaagagaaaaataaaacgatcaattttaaataaattattataccaggcaatgcaaatgattccattgatttgtttttaaaacttaaaacattatgttggtacacgaacacacacactcaaacaaaattaaaaatgaaagacctaaaaataaagttaactttctaacacaagtgaggaaacaagctggtaggaaggtaacctagaagctgggcattatctagtatggaaggtggaagtatagccaaggagtaggaggaaagctcagcccttcctacacactggggcagagaaaattcaaatataytggcctaggaaagaatccaatgtcccaggaacaactggacaattttttcttacaagtaatgttctgttacatgccagatggtgttcctgtacagaatttccacaccaatgcataaaggagaggtcttcaaatataattgtgtttttctccaagcatctatgagaataagacacc

SEQ ID NO: 105729 - DNA, 532 bp, Homo sapiens
caacatatgattaaaaaataaaatactttcagtaacaggctttttaatagattaaaagagaaaaataaaacgatcaattttaaataaattattataccaggcaatgcaaatgattccattgatttgtttttaaaacttaaaacattatgttggtacacgaacacacacactcaaacaaaattaaaaatgaaagacctaaaaataaagttaactttctaacacaagtgaggaaacaagctggtaggaaggtaacctagaagctgggcattatctagtatggaaggtggaagtatagccaaggagtaggaggaaagctcagcccttcctacacactggggcagagaaaattcaaatatattggcctaggaaagaatccaatgtcccaggaacaactggacaattttttcttacaagtaatgttctgttacatgccagatggtgttcctgtacagaatttycacaccaatgcataaaggagaggtcttcaaatataattgtgtttttctccaagcatctatgagaataagacacc

SEQ ID NO: 105730 - DNA, 553 bp, Homo sapiens
aatttgattaaatacccatctggaccaagagagctacaatagcttgttaggtatttctgacctaataacagatttatttctgagtaagattatataataatacttaaatctaatgacgtttaagcttgattttttcacatatgaatccagtgtaactttttgattgattacgtgatggtgattattgatgggatgttcgttggtgtccaataatgtgttaaaattgggagcaaatatttagaagaccatactattaacaagaagctgtttataggatttcatctaaatctcatattgtgatatgcaagattctattcttattcacttcccacatcagggtaaagaaattaatttgccttcaatctcaggaaaaccagaagtagactagcactagttctcagrcaatgtcactgctgtgactgctgttctcttctaagtggatactgtagcacaacagagagtacatttattaatttgaatggtttggcacagctaagaggtctccccaccacctgcatctgtgaattagtaacataaactgaaacagaacctg

SEQ ID NO: 105731 - DNA, 615 bp, Homo sapiens
aatgagaagttagaatattcagacactgtgctaagcacttttccctaagcatcatcttatttaatcatcacaatataccatgaaatagttacaggatcccttcccatagcttttaaatatgctaaagtctcctctattctagaatgtttcttggatctcatataatctcccttctctgggtgctgtcccagatctttcagaaatttattttgtctcatactatgtwacccctactcatagtctcttaacattttcccccagactttatccctttcccatgttccttagcgccagtgaaggtctcaccctcccttttgctttcaacaaaactcaaaaccactgaatgaaaagggccacttctgccttctccactcacacagtggctcccctggctctcttatttgtgcacattcccagcatcaattcctgccttcccacagtcacaactcctttgattaactctctctgataccgtaagaattttccctcttagaatttgccattgtgtcactccaccctgatggctgctgctggaataattttctagaaaatgtttaatggctcccaattactataaaatgaagaaaacatgtcttattccagtattaaaggccc

SEQ ID NO: 105732 - DNA, 570 bp, Homo sapiens
gctatgctgtcttcaaaaatcaatctgttccatgcattgtgacatgtgaactacatttaattgatgtttaytgcaaggcaaaatgatttatagtgtctaataagcattcacaatttagagcctgttgttcataacagcttcctgaaataacagaatcttggggtatataagtctgtttataaaggctattaaaagcattgcatttatttagctgtggatctaattcagctatagacaggatgaaaaatcaagcaacagcaaatgctgctatggctaagtctggtaatggctaattgaaaggttgcagtgggtaagaaggcttaaatacggcccagattttaggcaaaggcatgcttccaatttctgaatgttcatttatatttccacaagctgcattactgggttggccaaaagaggcatatggagtttcaactactctttaagctgcacatttttaacttccacatgaaaacacattttaaaatttgttacatcaccttggatcatataccaggtctgaaaactctcttctagcacttccttaaattgttttgaaatgttggtataaaa

SEQ ID NO: 105733 - DNA, 570 bp, Homo sapiens
gctatgctgtcttcaaaaatcaatctgttccatgcattgtgacatgtgaactacatttaattgatgtttattgcaaggcaaaatgatttatagtgtctaataagcattcacaatttagagcctgttgttcataacagcttcctgaaataacagaatcttggggtatataagtctgtttataaaggctattaaaagcattgcatttatttagctgtggatctaattcagctatagacaggatgaaaaatcaagcaacagcaaatgctgctatggctaagtctggtwatggctaattgaaaggttgcagtgggtaagaaggcttaaatacggcccagattttaggcaaaggcatgcttccaatttctgaatgttcatttatatttccacaagctgcattactgggttggccaaaagaggcatatggagtttcaactactctttaagctgcacatttttaacttccacatgaaaacacattttaaaatttgttacatcaccttggatcatataccaggtctgaaaactctcttctagcacttccttaaattgttttgaaatgttggtataaaa

SEQ ID NO: 105734 - DNA, 599 bp, Homo sapiens
aaattaatttctttgttatacaaaacccctcaaccgtaacttcatgaagaaatgtgaagtggtatgaaaatgaccttacctcatattcaaagtcttctgttctgtctgcatcagcaggcaagctggaaatatactcattgtcctcataaaattcatgctccattggatgtagagaatggcagctatggggaatgtagcaatatgataggaatagattaaatgggttgttttccagattaaaactgattttagaatttcactttagtttgctctgctttggaataagatctgtagtgatctagtctttaaacaaactacagctgaggaaaagcaatagcttttctttctccctctaygtgaagtccatcaatttgcaatttctgagagaatgctaggaataagggcctatggtcagagttgtattctgtggaaagactgatgtgaaatctctgacagtccgtggtgctttattgatactttctggcctgcttccattccactgaatgtgacaagctccatacgtgggtgtgtggcatttgagattgcagtctactcaaagaggggtattttgtcataaagtactaccaatttcataatcc

SEQ ID NO: 105735 - DNA, 476 bp, Homo sapiens
cttacccctgtcaagctggaagtgactcagcctctccgtgccccaggttcctgagagggtgctcacatatgagctgagctgttagccctggggatgtgttagccttctggagaaatacctgcaactcctggcctgccttgggtgcagcagtgcaattggctgctgatgtcacatgaagtgcccctggcatcaaagaggcctgaatttgtcttcatacctggagaaccacatacatatgacccttgccttatagagctcacaatcccagatggcagacaatggcacgacctccacgggctaccacattgggagcagaaaagagacatgaatgccacagaatgtgctctctgcaggaatgtstctgggccttatctccatatttcagaaaccaagttcagggtcagtcacagggaagtcacctggtaagtaaatagttattgaaattaaccaacaaatattttgagtgtgtgccatgt

SEQ ID NO: 105736 - DNA, 596 bp, Homo sapiens
taattttagctggttgtgaacggccactaagctttttcgtgacaactgactgcttaacatcagtgggacattaagttactttgtgcttgaaaatccaccagggagtgtatatatgtgctctaaagctgcccactcagttctgtttgatcrcttgcagaaaaccaatagcttctcactgatgctgagaggagtattgcctccataacggattataatgaaatatttcaataaaaaccctttttaaaacttatttttttttaaatttgcacttccatgtgaataaatgactgaactccataaaatgagtaaacaggacactttcaagtgttcatggcagagaagtgatagggcagaagtgaaatagactaatcttttttggttctttttgtatttgtatgtccaaagagtttgataaaatttgcgacacaaccagagatgcaaacaaccagagaaaaaagaatagaaaatgttgtaaatgcttttgtagatgcagtaggcgaagcagaaaaattcaaattcaaattatatttggagtcacaccaagcagatgtaactagtatttgaaattattagtaatgcattgtattctcatttgt

SEQ ID NO: 105737 - DNA, 613 bp, Homo sapiens
agggccctttaattttcaaattattaaacaattaaaattttaaattattctgaactaaaatgcatgtttatgttatgtttctgatacagcaatctctttgctccgtttattttgtatttaatatttatcaataagtacaagacttcctaacaaatgtataattttttttccaygaatcttttagaatttgtgtgcgctacacaattttgtcacttggcacatttttattccttcttaaaaaggacaaaccatgagaatcctgatagactatacttgaaataaaataggaagtccacacaactgaaggtgaacaaataatgcaggctgaaatgagtatctcttcgaaagactacaagcttccttttgacattcaagcaattcagtaaggagggaaagcgaaattgaatttagctgatgcaaatgaaattaaaactaaattggttgtcacatcaaactgatgttaactatgtaaatgttttctgtttatgaaactacagtttagagtatataattctgcaaaaataagaatatttttgtgttcttttaaaatataaattaaaagggcagattatgaaattgtttaaaatccttgccacttacccacgtaatatca

SEQ ID NO: 105738 - DNA, 613 bp, Homo sapiens
agggccctttaattttcaaattattaaacaattaaaattttaaattattctgaactaaaatgcatgtttatgttatgtttctgatacagcaatctctttgctccgtttattttgtatttaatatttatcaataagtacaagacttcctaacaaatgtataattttttttccacgaatcttttagaatttgtgtgcgctacacaattttgtcacttggcacatttttattccttcttaaaaaggacaaaccatgagaatcctgatagactatacttgaaataaaataggaagtccacacaactgaaggtgaacaaataatgcaggctgaaatgagtatctcttcgaaagactacaagcttccttttgacattcaagcaattcagtaaggagggaaagcgaaattgaatttagcygatgcaaatgaaattaaaactaaattggttgtcacatcaaactgatgttaactatgtaaatgttttctgtttatgaaactacagtttagagtatataattctgcaaaaataagaatatttttgtgttcttttaaaatataaattaaaagggcagattatgaaattgtttaaaatccttgccacttacccacgtaatatca

SEQ ID NO: 105739 - DNA, 477 bp, Homo sapiens
gtcttgccttatgaaagccaatccaaaaaaaaaaaatggaagatgtgagtaaatgtgcagatattaacataagaacataagaaacatgagaaaacaagaaaacatgacacatccaaaagaacacaataattctccagcaacagatttcaataaaaataaatcactaaattcccaaaagagaattcaaaataatattaaagaagttaagtgagatacaagagaacacagatcaaacaatacaaagaaatcagaaaaacaatccatgatctgaatgaaaaattcaacagagatatgtatcataaaaatgaacaaaacagaaaatcttggactgaaaagtccaataactaaaataagaatacaaatgacagcttcaacaatagactagatctagccraaaaaataatttgtgaacttgaagacagttcttttgacataatctggtcggagaaaaaaaaaagaataaaaagaatgaacaga

SEQ ID NO: 105740 - DNA, 607 bp, Homo sapiens
ttgctattcatatgaatgttggcaacatttcattgtgggggtcaattatggtcatttaccatgatgacataataacaactgcaaaaatgtgaaagctaaagtagggttattattactgtttgtaaagtctgtgtcccagatgttcctgccaggagagaggaaagctggagtgcagagatagctgacaacartgctaaccattcaaatcgccaccagattgaacaatttacaagacagggatgtaacaagaggctaaagctggtactcaggttgccctgcctccctcaccttgaactgcaagacttttccttcttggcatgtcatgtcatacagaaacaaccctgcaccctagccccaggatgaaagaaaaagaagaaatacaggcagtgaatttgcccagagagatgggccaacagccagtgtcattctctgatatatagccgaggaggaatttatttccaactagtagaggattggggggctcataaaactgcatagcttcaacccaatgaaataaggttagtaaaatacataaactctgataaggcaccgtgaagtatgcctctagtcacctgcaattcaccaatggcttcatgatagatattct

SEQ ID NO: 105741 - DNA, 674 bp, Homo sapiens
actcttttgcacacttcttttagactagagattgaggaaagaaacatgaaaattgtacacctttattttttattcattactgtcttgaaagacttaaaatgttcttttttttttcataatggcagctggatgaacagctcatatgctgagttaaaatctgaatcaacatgaaatgactgaaattctaagcctaaaaaaattactgtttataatggaaactcaagcataatagtccatgatggaaattcagtcaccatagtcaggtggatggtgacgctgcaataaggaaatgtaattaagttgtctatatcaggaggagagttgactaatcattcatggggagccttattgctatcatttttwaaattaattttaatcttaattatccttagatatttcattttcagctacaacttaacgcagataaaacctacttctgatttctcttaattactaatgctgcaaaggtgttgcatcttttccaagctcacttacaaccaactttcaaatcaattaaggcatctcaaaagcatttctaaaataccagatgctctgtcagctgcacagaacaatgtgttaataattatatttctctttcttacagcagatcaaagccagagatgaggtgacatacacctaagatattcaaactccagcttgaaggtcaattggat

SEQ ID NO: 105742 - DNA, 525 bp, Homo sapiens
ccctgctgtctcagacaatgagtctattagggtagccaatatggactgaagatgagacgatgccccacagaacaacctggaatgtgtaggaccctagaattcttatatgacctaaggagtagattctcaaattatttctaacgtcattwttagaaacattttctctccattcaattaagaagggacttgaagcagttttatctgctttagaaaaataaaaatttttaaatatgatgattcttaaattccacacatttagaagagaatttacatttactatgtcatgaagcgtttcaatagtgactccataatggacactgacttatatttttagatacctcagtaagataggtgttattctaatcatgttacagatacggagaattaaactcaaagagatgtcatttgtcttgctccatgttttataactcataaattatgaagtcttaatttaaactccagtctcaagctacaaactcaagtttctgttattaactgtgctgctgttagaaatgggccaaaaga

SEQ ID NO: 105743 - DNA, 655 bp, Homo sapiens
cacaagctattttgatgcaagcatgtaatgcrtaataatcatatcagggtaaatgggatatccatcacctcatgcatttctcctatgtgttataaatgattcaattatactcttctttttaaatgtacaattaaattatttttgactagagtcacccattgtgctagcaaatactaagtcttattcattctttcattattttttgtggcctattctaactatttttgtgtcacaagcaacaaaagcacaaatagataaatgggataacttcagacaaaaagtttctgcacagcaaaggaaatagccaacagagtaaagacacaacccacagaatgggagggaatatttgcaaaccatatacctaataaggggtctatatccaaaatatataagaaactcaaacaactcaatagtaagaaaacaatccagttaaaactcgacaaaggtcctgaacagacatttctcaaaagaagacacacaaatggtcaatagatacattttaaaatgctcagtatcactcactaattagggaaatataaattaaaaccatgataagataaccttactcctgttaggatggcttttatttaaaagatgaagtataagcattagagaggatgcagagaaaaggcaatccttatacattgttggtagg

SEQ ID NO: 105744 - DNA, 628 bp, Homo sapiens
aagtttcctaaagctgacacctaaggtctggccatatgggactgtgtgtgttttgctgtttgtgaagttagaaggaatggcaggaaaggtgttgattgttctctaggtgatcaaccatctgggtttgccctttrcccatgacatgtgtcttagaccatgagggttgctataacaaaatataataaactgggtaacttataaacaatagacatttatttctcatggctctggaggctgggaagtctcaaatcaaagcactggcaatttgatgtctggtgagggccctcttcctcatagacaaccatctgctcactctaacctcacatggtggaaggggtgaggggtctctctggggcctctttcataagggtactaatccttttcatgagagctccaccccgatgatacaatcactccaaaaggcctcacctcctaatatcatcacattgcagtgaggatttcaacatatgaatttggggggatatgaacattcagatcatagcaacatgggactttcagtactaaaactggaaagtaccaaacaaacaaggatgaactggtcaccctgctttaaaataacattttggaactactctttctcctgtatttttatccccttctcacttag

SEQ ID NO: 105745 - DNA, 628 bp, Homo sapiens
aagtttcctaaagctgacacctaaggtctggccatatgggactgtgtgtgttttgctgtttgtgaagttagaaggaatggcaggaaaggtgttgattgttctctaggtgatcaaccatctgggtttgccctttacccatgacatgtgtcttagaccatgagggttgctataacaaaatataataaactgggtaacttataaacaatagacatttatttctcatggctctggaggytgggaagtctcaaatcaaagcactggcaatttgatgtctggtgagggccctcttcctcatagacaaccatctgctcactctaacctcacatggtggaaggggtgaggggtctctctggggcctctttcataagggtactaatccttttcatgagagctccaccccgatgatacaatcactccaaaaggcctcacctcctaatatcatcacattgcagtgaggatttcaacatatgaatttggggggatatgaacattcagatcatagcaacatgggactttcagtactaaaactggaaagtaccaaacaaacaaggatgaactggtcaccctgctttaaaataacattttggaactactctttctcctgtatttttatccccttctcacttag

SEQ ID NO: 105746 - DNA, 585 bp, Homo sapiens
ctctcacctactcatctttcaattgttcagaataatggtgtttatggcatgaaaatcaaattctttttagtactttagagatcaacaaagccactgtgaattgtgacacaaaagggatacacaggtgtgtatttagagctgtacttgaaactgtcttattttaccctgtaggattaaagatctcagaaagatagagmgtggtttgggaaataaattgtgtcaaatattatagttaaatataggccatagaaatctccagaaaataagtcagcttttagactgtaatttcaaatatgtaaattctattttaatatgtttattttaaattcctgtgggaaaaacagattgcatagtgacatgtaaaccctaaataaaatctctgaggtcagtaacttagtcttaaatatttttcagtgaacattgtgagggattactttgaagaaaagcaaaaaatctgatagacaaacacactgattttctaaactccttacctcacaatggaaataccaccaaaggtgaagcccatatttctgcaaattgagcatataacacagcgctattgttattgctggcaagagcccgtaa

SEQ ID NO: 105747 - DNA, 585 bp, Homo sapiens
ctctcacctactcatctttcaattgttcagaataatggtgtttatggcatgaaaatcaaattctttttagtactttagagatcaacaaagccactgtgaattgtgacacaaaagggatacacaggtgtgtatttagagctgtacttgaaactgtcttattttaccctgtaggattaaagatctcagaaagatagagagtggtttgggaaataaattgtgtcaaatattatagttaaatataggccatagaaatctccagaaaataagtcagcttttagactgtaatttcaaatatgtaaattctattttaatrtgtttattttaaattcctgtgggaaaaacagattgcatagtgacatgtaaaccctaaataaaatctctgaggtcagtaacttagtcttaaatatttttcagtgaacattgtgagggattactttgaagaaaagcaaaaaatctgatagacaaacacactgattttctaaactccttacctcacaatggaaataccaccaaaggtgaagcccatatttctgcaaattgagcatataacacagcgctattgttattgctggcaagagcccgtaa

SEQ ID NO: 105748 - DNA, 585 bp, Homo sapiens
ctctcacctactcatctttcaattgttcagaataatggtgtttatggcatgaaaatcaaattctttttagtactttagagatcaacaaagccactgtgaattgtgacacaaaagggatacacaggtgtgtatttagagctgtacttgaaactgtcttattttaccctgtaggattaaagatctcagaaagatagagagtggtttgggaaataaattgtgtcaaatattatagttaaatataggccatagaaatctccagaaaataagtcagcttttagactgtaatttcaaatatgtaaattctattttaatatgtttattttaaattcctgtgggaaaaacagattgcatagtgacatgtaaaccctaaataaaatctctgaggtcagtaacttagtcttaaatatttttcagtgaacattgtgagggattactttgaagaaaagcaaaaaatctgatagacaaacacactgattttctaaactccttacctcacaatggaaataccaccaaaggtgaagcccatatttctrcaaattgagcatataacacagcgctattgttattgctggcaagagcccgtaa

SEQ ID NO: 105749 - DNA, 588 bp, Homo sapiens
atctacttaccttactccttttttataataagttgaatttattaataaaatcccattcttaatcatttatttcatcatgattacagaatataatcatagacatgagatctcaataccttctgggaaagttcattttatttgagagtgwttaatgggcagacagtgcttccttttaccttcggagctgaaatctgcctcttagtcatttctttctaactaatggaagattccctactgctaacaaagagacttactgagagaaagatgtagaaatttcatgaaaagagtatgagtttgcatcatacttccaccacttcacttccagataatattttccttccttatcttgtgaaatgtctacaataataaccacatcttagggttgcttgaacactaaatgaaattattttaatgcatagtccctacttgataaattcaagttccaactatgagttacactattgctcctggtgaacctgacagtctagcttaagttaggaaagtcaagctttctctgacaaaaacttttattgctcatgctctttgatcatgcttcatttttagaagtttcctacactgagattttta

SEQ ID NO: 105750 - DNA, 459 bp, Homo sapiens
aaagagttgtctcacattcgtgcctctcatctacctcattccatgacagcagaaagaaattgactttttatttaaaatttcttggttttctaagtcattactttcattaaattgccttcataatataagactaacagctttttgataaacagaggtcaaaaacatgacttttatttttaaaaaattaatatatatcctaattttggctgcatttgaagaaagcacaaacacaaaataactcgcgggtatcctggccaatatgtttcaactgcaacttaactttctttttatgtacacaactggaaacaagtaggtgaaattttttaaaaagccraagaatgagagccaatggtctctcccttggtatatctgctcaatgtgcaaagggatcagaatttattcatgggaaactgctgtctcatttttctctggtgtcataagatatccttgcttgtaagg

SEQ ID NO: 105751 - DNA, 545 bp, Homo sapiens
ggagcgcgaaggccagaaaggtaaactcaatcggcattttaaagcgcttgctctagtgattgagcacatagccctctagaagcagccctacttcgccctccaaagagaatttcgtgtttcaaaaaaaagtaacgatttcctctggggaagagatctgcagtcctggggtccctttctcctggtgccaatggtagagttggggagaaagttcccgatagagagcataggaggaaatgcgccacstgtgcttgccttagagacatatgtgagttgagctctctctctcctctctctctctctctctctctctgtgtgtgtgtgtgtgtgtgtgtgtgtgtgtgtgtgtgtgtgtaggtggcgagtggagagggttaaggctgcttctttgctggggggaaaagaaaggcaaaagtgtgaggatacacagagcagggaacgagtggagtcccctctccaccggggcagtgtgagaacggagggcgtgcagtcagggggtcctaggacttgggtgggtgctgcagaagtgaccaggagggctgacaggg

SEQ ID NO: 105752 - DNA, 508 bp, Homo sapiens
tctcactgtgttgccctggctggtcttgaactccagggctcaagcgatcctcctgccttggcctcctaaagtgttggcattacagtgygagtcactgggcctggccccaaattgtgatttatttaaataatgaaatattgtacagcagtagcaataaatgaactaatgatgccctcattgatgtggataattgtcacaaataattatgttaagtgaaaaaacaaaatacagaagaatacatagggtataccggcataccatttacatacatttaaaaatgtagaaaatcaaactattttagggatatataaatctttagtaaaactgttatgaaaaacaaggcccttatatacatagaattcagaatactagttatttcttatgggtaagtaggcaaaaactggggaaagctatagcagaagttttaaaggtttatgtgtaatttcttgagcagattatttgacatgagtatcagtaattatacttaataaatggtaaaattattttg

SEQ ID NO: 105753 - DNA, 528 bp, Homo sapiens
tttgctaaatgttcaccgaaggaattaagctttatttaaatagcaccaagttctgcagtctacttcctgagttgtttatctttttaataatgaagcggcactgaaatctttccattacagtgatgttttcattgtgtgatacttgctgttggggcttagaagaatatttgtgctttctaatgtagaatgttttgttcatatatatatattttactgacaagctaaaggaaatagtaacacacaaaatgaaaaatataactagtttcaaaagctgaagcagtaaaagtcttttttattgcaaggataaagagctggaataagaagagagagtgaaacttattaatgaaataggatcaagtatgatgaggttgcactttaatattggctgaggatttgggctaagatgaagagtgcagagactgttcttgtctgtttttagagacagttgatcatttcattaaagtctgaggctgtttctcagtctgtaggaaaaaaaayagtttatccttctttatttgacatactcac

SEQ ID NO: 105754 - DNA, 572 bp, Homo sapiens
aggacatgcgaaatgaagtatagtaaaaggaaacatggggtatctgagtcaaacaccatctaagagattgatctactttcctgaaagagaaattttagtagagacttgacatatttctttcgggacacttgtttttattttgcagcayagattttccttcagaagatctttactgagcacctactatgtgcttgtactgaatctgtgctgctgtgttatgtggtttgcagcaagggatggaatttgggcctttctacactaagttgtatggttcctttaatgggtgtgagtgtatatacaatccaaagatgaaaatgtgcaaataatgaaggtctttaatcatgccttcaatatccatttaacaattacctatttcaaactcaaagcctgagtatttacctgaagtgcagtttataaaaacaagtggttttcatcctgcctctgaccagaaataaaaattttacaattcaaattctgatgacaatttagtgttaacatgagtgagataacagattcctcctctcccactgttctgttaatggaagaagaatgtagctaatacccacaagttg

SEQ ID NO: 105755 - DNA, 572 bp, Homo sapiens
aggacatgcgaaatgaagtatagtaaaaggaaacatggggtatctgagtcaaacaccatctaagagattgatctactttcctgaaagagaaattttagtagagacttgacatatttctttcgggacacttgtttttattttgcagcacagattttccttcagaagatctttactgagcacctactatgtgcttgtactgaatctgtgctgctgtgttatgtggtttgcagcaagggatggaatttgggcctttctacactaagttgtatggttcctttaatgggtgtgagtgtatatacaatccaaagatgaaaatgtgcaaataatgaaggtctttaatcatgccttcaatatccatttaacaattacctatttcaaactcaaagcctgagtatttacctgaagtgcagtttataaaaacaagtggttttcatcctgcctctgaccagaaataaaaattttrcaattcaaattctgatgacaatttagtgttaacatgagtgagataacagattcctcctctcccactgttctgttaatggaagaagaatgtagctaatacccacaagttg

SEQ ID NO: 105756 - DNA, 674 bp, Homo sapiens
ttaatacccatttcatttcaccagggcaaatgttagccatgaatgttaatgtaattttycaaaagtgaattgtatcaaactatttgcataacaaaaaatcactgtgaacaagtaccttgctgcctgcagttgtgttgtcaaaaagaaactgcaaaaacatcatctattttcctttcttttctttctttctttttcttttctctctctctttctctctctttctttctttcttcttcttcttttttttttttctttttttttttgacagagtctcaccctgttcaccaggctggagtgcagtggtgcaatcacagctcactgcaacctccgcctctcaggttcaagcaaatccccttcctcagcctcctgagtagcggggattgccggcatgtgccatcatgcctggctcatttttgtatttttagtagagatggggttttgccatgttggctaagctggtctggaaattccgacctcaggtgatctgcccaccttggcctcccaaagtgtgagattacaggcttgagtcaccgcacctggccctcatcgtcttctttcaaatctggtaactttgttcacctgtaaataattagttatcaaatatggttgactttcagtaaagtgaaacaactactgattaggaggaagtagtgggttcaaggagttgataatag

SEQ ID NO: 105757 - DNA, 674 bp, Homo sapiens
ttaatacccatttcatttcaccagggcaaatgttagccatgaatgttaatgtaattttccaaaagtgaattgtatcaaactatttgcataacaaaaaatcactgtgaacaagtaccttgctgcctgcagttgtgttgtcaaaaagaaactgcaaaaacatcatctattttcctttcttttctttctttctttttcttttctctctctctttctctctctttctttctttcttcttcttcttttttttttttctttttttttttgacagagtctcaccctgttcaccaggctggagtgcagtggtgcaatcacagctcactgcaacctccgcctctcaggttcaagcaaatccccttcctcagcctcctgagtagcggggattgccggcatgtgccatcatgcctggctcatttttgtatttttagtaragatggggttttgccatgttggctaagctggtctggaaattccgacctcaggtgatctgcccaccttggcctcccaaagtgtgagattacaggcttgagtcaccgcacctggccctcatcgtcttctttcaaatctggtaactttgttcacctgtaaataattagttatcaaatatggttgactttcagtaaagtgaaacaactactgattaggaggaagtagtgggttcaaggagttgataatag

SEQ ID NO: 105758 - DNA, 674 bp, Homo sapiens
ttaatacccatttcatttcaccagggcaaatgttagccatgaatgttaatgtaattttccaaaagtgaattgtatcaaactatttgcataacaaaaaatcactgtgaacaagtaccttgctgcctgcagttgtgttgtcaaaaagaaactgcaaaaacatcatctattttcctttcttttctttctttctttttcttttctctctctctttctctctctttctttctttcttcttcttcttttttttttttctttttttttttgacagagtctcaccctgttcaccaggctggagtgcagtggtgcaatcacagctcactgcaacctccgcctctcaggttcaagcaaatccccttcctcagcctcctgagtagcggggattgccggcatgtgccatcatgcctggctcatttttgtatttttagtagagatggggttttgccatgttggctaagctggtctggaaattcygacctcaggtgatctgcccaccttggcctcccaaagtgtgagattacaggcttgagtcaccgcacctggccctcatcgtcttctttcaaatctggtaactttgttcacctgtaaataattagttatcaaatatggttgactttcagtaaagtgaaacaactactgattaggaggaagtagtgggttcaaggagttgataatag

SEQ ID NO: 105759 - DNA, 604 bp, Homo sapiens
ttccagaggaggcctgagcttctgtacttgcagaagggcctaagaacacagttttgtgatgtgccaaatagcacggcaggattggtcgagcgtaaggttaatggatacatcactatctactgggcaggcctccaaaatattaattcctttccaatgaagtttataaaagagtctctgcaatcttgttccttatttccaatttctccgctgcctctccagtgactatcatcacagcttttgaatgcacccccattggaggacgctcggtgtctccctcagtttcctgccttgcatccaacttcaaacaggcaggttccctggagaacaagcccatcgccatcaaatccatgtctgggctctgggtgggggtcagcgggacscccacgggcagggtctccgccatggcactgggatgctgaaatagcagcatttgacacatttaaaacttgctgtttgtgcaatcactaaaaactgcaccattagctggattttcagattgcatgagtgcagatcattaagtgttattacagtattaattattagaaatgtcctgtactgcccaaattaaatagggatagtcaacgacctgcgagtttccaatacc

SEQ ID NO: 105760 - DNA, 550 bp, Homo sapiens
agcttgtgcagagaaaatgaagcaaacaacagggtgaagagacaattcacaacatgaaaaatatttgcaaactatgaatctgacaataagttacyatctcaaatatacatagaagtcacatcagtcaataaaaataaattactaatttgattaaaaaataagcaaaagacctgaatagacacttctcaaaagaagactatcagtgactaagaagtataattacaaaatgctcaaaatcactaatcatcagggaaatgcaaatcaaaactacaatgagatatcacatcacccctgttatggctattatcaaaaggcaaaaataacaagtgctagaaagtatgcagagaaagaagatcttttataaactgttgagggaaatgcaaattagtacaattagtaaggaaaacggtatggtagttcctcaaaaaatgaaaatagaactaccatattatacagcatttccattactgggtgtatatttaaataaactaagaagtcatagagatatctgtccttctatgtttacatcaacattattcatatacccaag

SEQ ID NO: 105761 - DNA, 477 bp, Homo sapiens
attatctgcaaatgataattatgtttttcattatatatatttaattacatatattatctgtattatatgtttacagatataattttttattgtgttgtatttgttagcatttgaaaacaacattacacacaatgatgggaatagttggaattccttccctagcttttttttttttttttttttttagacggagtctcgctctgtccctttcctagctttaatgaraatatctttagtgaattacagttaggcataatattggtggcttattttaccagaatatagtatttatcatgctaaagaaatgtcattcaatttgcatatattttattggaataaaatatattttattccaaatctatgttgaactctaccagatgccttttggcagatttttagatgaatatatggtgtttcttctttgatatattgatgaggtagcatattagtaggtttcttcacattgaatgatcctca

SEQ ID NO: 105762 - DNA, 477 bp, Homo sapiens
attatctgcaaatgataattatgtttttcattatatatatttaattacatatattatctgtattatatgtttacagatataattttttattgtgttgtatttgttagcatttgaaaacaacattacacacaatgatgggaatagttggaattccttccctagcttttttttttttttttttttttagacggagtctcgctctgtccctttcctagctttaatgagaatatctttagtgaattacagttaggcataatattggtggcttattttaccagaatatagtatttatcatgctaaaraaatgtcattcaatttgcatatattttattggaataaaatatattttattccaaatctatgttgaactctaccagatgccttttggcagatttttagatgaatatatggtgtttcttctttgatatattgatgaggtagcatattagtaggtttcttcacattgaatgatcctca

SEQ ID NO: 105763 - DNA, 477 bp, Homo sapiens
attatctgcaaatgataattatgtttttcattatatatatttaattacatatattatctgtattatatgtttacagatataattttttattgtgttgtatttgttagcatttgaaaacaacattacacacaatgatgggaatagttggaattccttccctagcttttttttttttttttttttttagacggagtctcgctctgtccctttcctagctttaatgagaatatctttagtgaattacagttaggcataatattggtggcttattttaccagaatatagtatttatcatgctaaagaaatgtcattcaatttgcatatattttattggaataaaatatattttattccaaatctatgttgaactctaccaratgccttttggcagatttttagatgaatatatggtgtttcttctttgatatattgatgaggtagcatattagtaggtttcttcacattgaatgatcctca

SEQ ID NO: 105764 - DNA, 477 bp, Homo sapiens
attatctgcaaatgataattatgtttttcattatatatatttaattacatatattatctgtattatatgtttacagatataattttttattgtgttgtatttgttagcatttgaaaacaacattacacacaatgatgggaatagttggaattccttccctagcttttttttttttttttttttttagacggagtctcgctctgtccctttcctagctttaatgagaatatctttagtgaattacagttaggcataatattggtggcttattttaccagaatatagtatttatcatgctaaagaaatgtcattcaatttgcatatattttattggaataaaatatattttattccaaatctatgttgaactctaccagatgccttttggcagatttttagatgaatatatggkgtttcttctttgatatattgatgaggtagcatattagtaggtttcttcacattgaatgatcctca

SEQ ID NO: 105765 - DNA, 591 bp, Homo sapiens
tttcctgactttttaatgatcaccattctaactggcctgagatggtaacttgttgtggttttgattttcatttctataatgaccagtgatgatgagctttttcccatatgtttgtgggctgcataatgtcttcttttgagaactgtctcttcatatccttcgcccactttctgatagggttgtttgtttttttcttgtaaatttstttaagttcttcgtagattctggatattagccctttgtcagatggatagattgcaaaaattttctcccattctgttcaggtcttgtccccatttttaatcccaggcttttcttgctattgagtttttaaatataatttggatattaactctttatcacatatatacaatgtataagaaatatgcagatatttcatatcattatgtagattgtctattttctctgttgactttcttttgctgtgcagagtcttttttgtttgatgcaatttcatttgtctatttttgcttttcttggctatgcttttgaggacttattttaaaaattatctataaaaagatgtcttcactctaatgtttattgcaggagtattaacaattgccaaga

SEQ ID NO: 105766 - DNA, 596 bp, Homo sapiens
aatatataactgtcaatctccattattatgatcgcgaaatatattggaagtccaaaaactcttgggtacatctagccaatatcaggaatgttattttcatcttcatttaktatttacaagaaaactgtattgactatttaaaaataatttgtagaacaatctgtttgcaatatattataatgtcagaggaagtagctccattttcaggaaacacactgcctgagagtgctaagctgctgggaaatgaaagctctattgaacatcacaattaggaagagtaacctggcagaaaacacaccatagacgttctgggctgtgacatctgacagactggttgaaaatcctcggtatatctcaggtccataacttcttatctaaaattttcccaataaaaaagacaatttttttttccaaaacacatttggtgaagaaatgaaatctgaactgatgtgagattatgtatagttcttacgtaccccatatactataaatattcatttattgatgtatttaaatacagagtgtatccagactatactgggagtgttctatattataaagtatataaatcacattagctttttgaaagctgaacc

SEQ ID NO: 105767 - DNA, 596 bp, Homo sapiens
aatatataactgtcaatctccattattatgatcgcgaaatatattggaagtccaaaaactcttgggtacatctagccaatatcaggaatgttattttcatcttcatttagtatttacaagaaaactgtattgactatttaaaaataatttgtagaacaatctgtttgcaatatattataatgtcagaggaagtagctccattttcaggaaacacactgcctgagagtgctaagctgctgggaaatgaaagctctattgaacatcacaattaggaagagtaacctggcagaaaacacaccatagacgttctgggctgtgacatctgacagactggttgaaaatcstcggtatatctcaggtccataacttcttatctaaaattttcccaataaaaaagacaatttttttttccaaaacacatttggtgaagaaatgaaatctgaactgatgtgagattatgtatagttcttacgtaccccatatactataaatattcatttattgatgtatttaaatacagagtgtatccagactatactgggagtgttctatattataaagtatataaatcacattagctttttgaaagctgaacc

SEQ ID NO: 105768 - DNA, 611 bp, Homo sapiens
gcaatatattataatgtcagaggaagtagctccattttcaggaaacacactgcctgagagtgctaagctgctgggaaatgaaagctctattgaacatcacaattaggaagagtaacctggcagaaaacacaccatagacgttctgggctgtgacatctgacagactggttgaaaatcctsggtatatctcaggtccataacttcttatctaaaattttcccaataaaaaagacaatttttttttccaaaacacatttggtgaagaaatgaaatctgaactgatgtgagattatgtatagttcttacgtaccccatatactataaatattcatttattgatgtatttaaatacagagtgtatccagactatactgggagtgttctatattataaagtatataaatcacattagctttttgaaagctgaaccattatgatgtgctaaacatattgatctgcaagattttgtagtaaagtcctttgaaataaagtcctttctcagtgtttttgtatttatgaacactctggccttggacaagcagctctgtttgcatttggcccagtttccccacgtataattgggacaatatgggatattgtaatacaggatg

SEQ ID NO: 105769 - DNA, 611 bp, Homo sapiens
gcaatatattataatgtcagaggaagtagctccattttcaggaaacacactgcctgagagtgctaagctgctgggaaatgaaagctctattgaacatcacaattaggaagagtaacctggcagaaaacacaccatagacgttctgggctgtgacatctgacagactggttgaaaatcctcggtatatctcaggtccataacttcttatctaaaattttcccaataaaaaagacaatttttttttccaaaacacatttggtgaagaaatgaaatctgaactgatgtgagattatgtatagttcttacgtaccccatatactataaatattcatttattgatgtatttaaatacagagtgtatccagactatactgggagtgttctatattataaagtatatamatcacattagctttttgaaagctgaaccattatgatgtgctaaacatattgatctgcaagattttgtagtaaagtcctttgaaataaagtcctttctcagtgtttttgtatttatgaacactctggccttggacaagcagctctgtttgcatttggcccagtttccccacgtataattgggacaatatgggatattgtaatacaggatg

SEQ ID NO: 105770 - DNA, 575 bp, Homo sapiens
gggagaacttgtgaaaacaagacaaaacaaacaaaacagacacagaaggaagaaggcttttattcctccccattcattcttgtgagttctctaagtattatctatgtcccatgagtgaaggccacttttcccacagggctcarccaaattttggtaaccccttcctctgtttgcctaaaattggtgaagctcacagctattaaacctaggcaactgcgctatccttcttcaccttccttgctcacacttttgtaaatagtcactatactaaaatctcctccaattatccaatttgagggcatgacctgtttcctgccatgacactcactgcctgacgcacaagcagctatgaaaattctagtaaaggagaaatgtgtcataaaagacaaaggtaaaagaatttccataggaactccataggaatgttcaataatgccaaatgttgcagaaaaatcaatttagatctgacaattaggaggttcttgataacctcggaaagttttcaactgagtgttagagaagtcatattactgtgaattaagaataggaaagaattgaagaagggcagacaaaag

SEQ ID NO: 105771 - DNA, 531 bp, Homo sapiens
ttatgatacagccccttctaccatggggtaagaatacaaacctggaaaaagtgtgtgaaaatagggaggcaacactgatttgtcaaaataaagagatgggccaagattctctgtgtgtatgtgtgtttagaggggcaaaaatgagaagatgagaagacagcataagatgaaagattaaataaatgttttagagaatatttaatgagaatcaagcataactgtattcyatttatcttcctcctccattgagtattcattttaaagtattatggcattactattttctaggattatggcttttaaaatcatttgattttcctcttttgttactttcttcattatttgcctaaaacagaaggaaaacagcatttctggtttttattctaaacagcataaagaggtttctaagagtgaagcgggtccaagggaaacataaccctcttagatatagatgttattgccattaaattactcctttaagtagatgtacatataggagatacagttaatttcacatgaagatgggaagga

SEQ ID NO: 105772 - DNA, 531 bp, Homo sapiens
ttatgatacagccccttctaccatggggtaagaatacaaacctggaaaaagtgtgtgaaaatagggaggcaacactgatttgtcaaaataaagagatgggccaagattctctgtgtgtatgtgtgtttagaggggcaaaaatgagaagatgagaagacagcataagatgaaagattaaataaatgttttagagaatatttaatgagaatcaagcataactgtattctatttatcttcctcctccattgagtattcattttaaagtattatggcattactattttctaggattatggcttttaaaatcatttgattttcctcttttgttactttcttcattatttgcytaaaacagaaggaaaacagcatttctggtttttattctaaacagcataaagaggtttctaagagtgaagcgggtccaagggaaacataaccctcttagatatagatgttattgccattaaattactcctttaagtagatgtacatataggagatacagttaatttcacatgaagatgggaagga

SEQ ID NO: 105773 - DNA, 531 bp, Homo sapiens
ttatgatacagccccttctaccatggggtaagaatacaaacctggaaaaagtgtgtgaaaatagggaggcaacactgatttgtcaaaataaagagatgggccaagattctctgtgtgtatgtgtgtttagaggggcaaaaatgagaagatgagaagacagcataagatgaaagattaaataaatgttttagagaatatttaatgagaatcaagcataactgtattctatttatcttcctcctccattgagtattcattttaaagtattatggcattactattttctaggattatggcttttaaaatcatttgattttcctcttttgttactttcttcattatttgcctaaaacagaaggaaaacagcatttctggtttttattctaaacagcataaagaggtttytaagagtgaagcgggtccaagggaaacataaccctcttagatatagatgttattgccattaaattactcctttaagtagatgtacatataggagatacagttaatttcacatgaagatgggaagga

SEQ ID NO: 105774 - DNA, 560 bp, Homo sapiens
tttttaattcactttctgtctttattgaatactactttttatgtttacttgactttatttatatatatatattttaagctccaaattgctgtaaagtatgtttttgcttatatattatgtatgtgatgtatataatgtatacatacataaaattatgtattggcatcaatacatatgtacagtcttgtgcacatacccagaagagtaactgccagatcataaggaatatacatttttcatttcactagattctgccagatcacttagaagcatgagaatattatttgtggtcacagagagagctactgaatttctttctctctacttccttgaaaataaattctaagaccccctctaattttcatggttctgatacatataggtaattgtttaatttgcattctctcatcattagtaagtctgagcatatcttcttatattttactagcatttgagygctgcttctgtgaattgactttttatattcctttccatgctctactggtgttctagtcattgtatttttggctcactagagttccttatatattctagatatt

SEQ ID NO: 105775 - DNA, 648 bp, Homo sapiens
atttatcttttctacaccttttggttctacagggcttctcaacaaattaggtgatacttataatgttggtgggagtggatcttctttactaagtccactcattcaaaacaaatctctttcagaaccaccctcatagacacaaccagaaataatgtattaccaactatctggacatttattatcctagtgaaattgacaaattaactatcacatggtatattacccatttagtttatcactagatccaatttgctcaatttttaataagaatttttgtatctatgccaggtagtagatagatctatagttttctttctgtgtaatatatttttttgattttgtaatcagggtaattctggcctcataaaatgcgttggcacctatgtctttctcttctactttctggaataatttatgaagaaaggatattatttctatcttaaatatatgatagaaatcaccaataaaatctgatttttatgtgatttcaatggttttaatttgttttgtagttataatgwtattcatgttacccatttacttcgaagtgagcactgaaaatttctatctctgaaagaattgtctattttatctaaattgttaaatttttggcaagaagtttttcataatattagcatttttttatta

SEQ ID NO: 105776 - DNA, 607 bp, Homo sapiens
cacaataaacttataaattttcatttatttttattatggcmtcttagatggtcttgtagaaaaggttcaaaattagttttgtcttaaagacaaaaatcaaactcagttaagctgggcttatgaaagcactaacactatacttgcttgttataatctgccttatatggaagacaggcaacaatttttagcttgctttgtactacattcagcctagcagcttgtgcaattaagcatatgcgaagtgtctagaatgatgaaggtgataatgatctgtcatgattatatatttccactgacctctgagcctcccttaaaatggcctttgtgaatatccattaattccatatgactcagaaaattttgtctccttcactccattgggtatattgtttccattaaaagtcacatatgtttattgttctgtttataggttaaaatcattttttatttcatcgctttgtcacatcacacatatcaatatataatatctgctttcatttatgaaaattgaatgttcatctcactgggacatcactatcaaactctgtatgcctcattctttttacataaaatgtgcacagtcactgtggataatttaatataaagt

SEQ ID NO: 105777 - DNA, 437 bp, Homo sapiens
agaaacacaacattttcaaggaaggtattatgmtctttacactaaaggaggtaataaagagtttccaagaacacttcaagatctattactgttatattacaggtgaaagtttattttaaataagagattatcttaagatatggaattagctaaaagatttaggaactctgatcacttattgaaaccaggtaatttgaatcaggattctcacacaagtttaggatggcctagtggtctggcaacatggcatcaagtgaaacagatttggcagttctgctgtgatccagactggtaattaagtcttcttttctgtgtgggctgttaattggtctacctgaagaattgccaatccccatttgtagtctgtagacagtattatttactgtcaacagatgtcagctattatagtgaccatccttagtcttcttaattacatc

SEQ ID NO: 105778 - DNA, 443 bp, Homo sapiens
agaaacacaacattttcaaggaaggtattatgatctttacactaaaggaggtaataaagagtttccaagaacacttcaagatctattactgttatattacaggtgaaagtttattttaaataagagattatcttaagatayggaattagctaaaagatttaggaactctgatcacttattgaaaccaggtaatttgaatcaggattctcacacaagtttaggatggcctagtggtctggcaacatggcatcaagtgaaacagatttggcagttctgctgtgatccagactggtaattaagtcttcttttctgtgtgggctgttaattggtctacctgaagaattgccaatccccatttgtagtctgtagacagtattatttactgtcaacagatgtcagctattatagtgaccatccttagtcttcttaattacatcataccc

SEQ ID NO: 105779 - DNA, 568 bp, Homo sapiens
caacacacatttgcttctggatatattatttgttacgcatgtccatcctagtcaatgtgggaggaactacagaagggtatgaatgccaagatgcattttggtggatgccttccacaaatccctacgtggttgtgtcctttgatttctggagcttttcatcctgtttctatcagtcagtcagttaatagcaacatcaaagctcaactaaagagacacctgacaacacagagacaatgtattagagatctgcatgcaagaaaacaatataatttgtacttgtcaatatcagtttctgcatgcatggagatctccttgggcttatcactgtgcctagcataaatacsaaatacttagaagtttctctgcaaatgtaatatttttgaatgagagaatgaaggaataaagaaagggattggtctttttgcctcatgaaactgagcattggctttgtgctgggacttacataaacaattttcagccttcagaaaagcacattaattttaatagcaaataattaaacatgctattaacttttacctttcatggtctaggtagatgcttattggat

SEQ ID NO: 105780 - DNA, 596 bp, Homo sapiens
cttagatcccaacatgagatctatcacagtaaaacaaagaactgggtggatattcaggcatcatacttgagctggtaacttatgactgagcctctgagcctgccttgacaacaagtgggactgtacagcatcaggcataaggcttgcatggtgaactcaatatctggcccacaccatcgccaggccgacatcaggggccctgggctctggatacctctcagtgacaggtaaccctcagcarcatgggcttctgatacaccagtgccactctgatcacatctacctggggcttctagtagcaccatgccagccacagcaggccccatgctcctgacctgtctcattgcttctcctgccacagtgagccctgagttttgagcagtaccatgcttgtcacagcttccctgggcttctggtacgtttgagcactgtgcctgtcacagggatttcccaggcagagccagtctatgaagactgaaataagtatctacttcttcaaatgcacagacattgacatacaaccacaaggatcaaaaacacccagggaaaaacaatatcaccaaatggacaaaatagagtgccaacaaccaacccta

SEQ ID NO: 105781 - DNA, 596 bp, Homo sapiens
cttagatcccaacatgagatctatcacagtaaaacaaagaactgggtggatattcaggcatcatacttgagctggtaacttatgactgagcctctgagcctgccttgacaacaagtgggactgtacagcatcaggcataaggcttgcatggtgaactcaatatctggcccacaccatcgccaggccgacatcaggggccctgggctctggatacctctcagtgacaggtaaccctcagcaacatgggcttctgatacaccagtgccactctgatcacatctacctggggcttctagtagcaccatgccagccacagcaggccccatgctcctgacctgtctcattgcttctcctgccacagtgagccctgagttttgagcagtaccatgcttgtcacagcttccctgggcttctggtaygtttgagcactgtgcctgtcacagggatttcccaggcagagccagtctatgaagactgaaataagtatctacttcttcaaatgcacagacattgacatacaaccacaaggatcaaaaacacccagggaaaaacaatatcaccaaatggacaaaatagagtgccaacaaccaacccta

SEQ ID NO: 105782 - DNA, 519 bp, Homo sapiens
taccactgacatcttttaaaaagattaaaaaaaaaaacttgttttaagaagtatgatgcatacaatgcaaaaccaattaaaatacatataatctatgaacaaatttcttgtcataaagaccacttttaaaatatctttataacgtgaaaatattctatagtaggttttttatgtacactgaaattagccctagaataaaatrctgttaagtagatggattcgaaagataggagtcttagaaaatatttaataatctgccataaccatcccttacatgactactaatagctagagttggtaaaaagaaaattaaaagtcaaaataaaaaaagcattttgagtcagaatttcagaaatgtatacaactgtcttccattttcactgctaaacagcaggatggttcagcagttttattttttaatatttggaatttggtagaggcatgttctagtctccctctggataaccatgctctcaagatttcttcaatatgagtaaattcttcaacatccatatgatt

SEQ ID NO: 105783 - DNA, 592 bp, Homo sapiens
ttgaatctttagtccaaccacggcagaacaacggtgacggagaacacaaagtgagttagatcactgtcctacatcttcataaacaagacatctaagtgccctcctcatcattttttatagtttctccacactccttaaggcatatgcagcaaacagaacacccccagcgtgtcattacaatgtttatcatgacccattggtaatagatgtacctgggttcaaatcctggctgtaagactttaggggagttacttaacctctctgagtctcaattgcctcaattacaattggaaataaagatactctycatgagggatagcattaggagatatacctaatgtaaacgacgagttaatgggtgcagcacaccaacatagcacatgtatacatatgtaacaaacctgcacgttgtgcacatgtaccctagaacttaaagtataataataataataaaaagatactctccatggggttgttttaaggccaaaatgcctgacatatttttctctgcagtatgtatgtgcaggctccatttgtattttttaggaagatctgtgagagaaaagataaatccatacctttggaaggggag

SEQ ID NO: 105784 - DNA, 539 bp, Homo sapiens
aagaaagttactccccactttgaaagagcctctgtgacatatgaccttgtccaatagaatggcccaaaaatgaaggtgtcagatatgtgtgttagacatccactggggtgaccacacagaccctctgtcaatgtgactcagagcratgtgctgccctttattcctctcctcacttccccacagcaggcactcacaggctatctccatcaccccaccccacacccacacccactgagcccaatgctctgatctagatgctagagcagctcagtgtatttcattcttgggcatgtctggtcagaagaagtaaggtcaataaaaagtcacagtgagattcagtgaaagatagtggaattggatagtactttactcttagaatcagaggaccgtcacaggcctcaccccaagagattctgatacagtaaatgagggatggagcagggagacaaaaatccatggtttttacgtttccctggtgattccgatggtcagctaaggaaggaaagttactcatcctccttgaccttcttggtggcagt

SEQ ID NO: 105785 - DNA, 521 bp, Homo sapiens
atttttttttgccattatgattggatgtataccttgcatcctaccagaatgctggtgtctgttcttccttccaggaaccagagaggggacactggctgctcttgagggttatttgttctagcctctggtggagattgatgaactattcttccttctgctttacaagatcttaacttcctgatgacatgagtcttccagatattgtatttgtcccctgtatgctggggattcttgacaaatcttaatattcacagcctcgctacatacctatccttctgtttgcactcattaatacgcactgtccttcttatttcaacattcagctattgctgagttcatgtgctattatttttcaagtacacagggagtagtggttccttagcacagagtctttggaatcagacagccctaggcagtggacatgctgataagaattgsctctttaacaacaaaaaagccctgattggtaatgcttgctgatttttgtggtgtaaatactcccattgcagccaatttcaagc

SEQ ID NO: 105786 - DNA, 599 bp, Homo sapiens
tatgtctttgtcttctgtcagagccctcacttgggtgtgcttctgacccatttaattctttatgcttccatgtcttgcttcatctttggatggtcacaacacttaatatcaggctttgtatagagtaggtgtctattacatgttcgtgaaattgaaaagctgtaaacagtccaccagattgctcttaagtaactagcattggaaatatagtaccaaaaaccaaaaagaacaacaacttgtgcttttaaaatacgttcttcttctctgacttttagccattcyaggatctctgttttcactgggactggagtcttatgttctggatcctgaaaacaaactgggatacatattttatctttcccttcatgctcagtccaaaataccctaccaactacttatattcaaaatgctgtaatgtgcaccataattttcctgtgaagcgggcaccaacacagctttcatttgcactgaaatggatgtcacatgcatattcttgaggtcctcctcaacatttggatgtgttcaagggttctgttttcttttgtgagtgcccatcagctatgctaattagttttctgtattaccaaacaggagggaac

SEQ ID NO: 105787 - DNA, 526 bp, Homo sapiens
ttctttagtaattcctgtggcttaaggaaaacaaaagctgtaatgctgtgtggttttttctggccggtacagagaactcttgcttaattccaggccaagcagttaaattcaatcaaatgcagcctacccccatgtctgaggtggagataccatcaggccggtgttcacttgcctctttgggtgagcaggaatgttgcttccttccagttcgctcagtcgcccaggctggagtgcattggcacgatctcggctcackgcaagctccgcctcccgagttcacgccattctcctgcctcagcctcccgagtagctgggactacaggcgcctgccaccacacccggctaattttttgtatttttagtagaaacggggtttcatcgtgttagccaggatggtctcgatttcctgacctcatgatccgcccgccttggcctcccaaagtgctggattacaggcgtgagccaccgtgcccggcctccagttcttttgagggagtccagggtggccctcattggtcatccaggc

SEQ ID NO: 105788 - DNA, 646 bp, Homo sapiens
acaacctttcttatatgagataccaactaaaactgcagcactctctagcagggccaactaactcatagtatacactgagatctttccctgcaagttgatcattctttattaatcagtgcaactggaaataaatcaagatatagtagcagtgggaaaattcarttactcataactaagctagaaatatcattttactaaagggaaactgaaagaagaagaggtgactgacattttatcaagctctttctatgtgctaagcagtggatatctctgcctgggatcatctgcctcttctctgttggcactattacctctccttcccctacctttttttttttttttttctttttaagagactaggtctcacactgttcacccaggctgctaggctggagtatggcctcaaactcctgggctcaagcaatcctcctgcctcgcctcagccttccaagtagctaggactataggcacgtgccaccacatccagataatttttaaattctttgtagagattgattctcactatgttgcccaggctggtctcaaactcttggtctcaagcaattctcctgcctcagcctcccaaagttctgggattataggtgtgagccaatgtgtccaacctccttccccttcttcagcacca

SEQ ID NO: 105789 - DNA, 646 bp, Homo sapiens
acaacctttcttatatgagataccaactaaaactgcagcactctctagcagggccaactaactcatagtatacactgagatctttccctgcaagttgatcattctttattaatcagtgcaactggaaataaatcaagatatagtagcagtgggaaaattcaattactcataactaagctagaaatatcattttactaaagggaaactgaaagaagaagaggtgactgacattttatcaagctctttctatgtgctaagcagtggatatctctgcctgggatcatctgcctcttctctgttggcactattacctctccttcccctacctttttttttttttttttctttttaagagactaggtctcacactgttcacccaggctgctaggctggagtatggcctcaaactcctgggctcaagcaatcctcctgcctcgcctcagccttccaagtagctaggactataggcacgtgccaccacatccagataatttttaaattctttgtagagattgattctcactatgttgcccaggctggtctcaaactcttggtctcaagcaatyctcctgcctcagcctcccaaagttctgggattataggtgtgagccaatgtgtccaacctccttccccttcttcagcacca

SEQ ID NO: 105790 - DNA, 544 bp, Homo sapiens
aattatagttttccatacttgccaattgctgcatattcaccgtgttctttactcaacagccattgctcaattttactacatggcaccaaaatgactgtcaaataaacactgacctcagttctcatcaccaaccaaaattgtggatttcagagaccctgctgtcagagacaatgaaagaatacatacggtcagacaaaagagagccataacatatcacaggctgacaaggaggcctgtggtgagatgaagtgctcaaagtcatagctccagagagcatgagctgttggaaatcacttttccaaccaattactgagatgagycactgagatggtggaggcttgcaattcccactgcatacagcaagctcctaatgaaggcagcaagcatcttagctctactaaatatgcaaaatgatacaagtaaaggggggacattaatgcagtggggttcccactacatttctcatgaatacggtgggatatatagcaaagttaacaatttctcttggagaaaacaacaatagaaagaacaagaacaaaaatta

SEQ ID NO: 105791 - DNA, 584 bp, Homo sapiens
atgcccatataaagaaaaatatatcttagaacaacaaaagtaagaaggaaaacacaggggtaaatttttgtgaccttggatttggcaatgggctgtttagacgcaaaagcaaaatcacaagcaatacaaataaaaaaaaaamctagactttattaaaattaaaatgaaaacccattgttcttcaaatgcccctatcaagaaagtaaaagacaagccaaatatttgtaaatcatatatctgacacaggtcttctatctagtacatataaataactattacaactcactaataagaagaaaaatagctcaattttgaagtacttaaacagacatttctccaaagaagacataccaatgacctaagaagaacatgaaatgttcaacatcattggccattaggcaaatgtaaatcgaaatcacaataagataccacttaacatccagtatgatggctaaatacaaaaagtcagatgagttttaaggagtgtgtggaaaaactgaaatgctcatagactgatagtgggatgtataatggtgcagccactttggaaaccagtagggaggttcctcaaaaaattaaacacg

SEQ ID NO: 105792 - DNA, 584 bp, Homo sapiens
atgcccatataaagaaaaatatatcttagaacaacaaaagtaagaaggaaaacacaggggtaaatttttgtgaccttggatttggcaatgggctgtttagacgcaaaagcaaaatcacaagcaatacaaataaaaaaaaaaactagactttattaaaattaaaatgaaaacccattgttcttcaaatgcccctatcaagaaagtaaaagacaagccaaatatttgtaaatcatatatctgacacrggtcttctatctagtacatataaataactattacaactcactaataagaagaaaaatagctcaattttgaagtacttaaacagacatttctccaaagaagacataccaatgacctaagaagaacatgaaatgttcaacatcattggccattaggcaaatgtaaatcgaaatcacaataagataccacttaacatccagtatgatggctaaatacaaaaagtcagatgagttttaaggagtgtgtggaaaaactgaaatgctcatagactgatagtgggatgtataatggtgcagccactttggaaaccagtagggaggttcctcaaaaaattaaacacg

SEQ ID NO: 105793 - DNA, 584 bp, Homo sapiens
atgcccatataaagaaaaatatatcttagaacaacaaaagtaagaaggaaaacacaggggtaaatttttgtgaccttggatttggcaatgggctgtttagacgcaaaagcaaaatcacaagcaatacaaataaaaaaaaaaactagactttattaaaattaaaatgaaaacccattgttcttcaaatgcccctatcaagaaagtaaaagacaagccaaatatttgtaaatcatatatctgacacaggtcttctatctagtacatataaataactattacaactcactaataagaagaaaaatagctcaattttgaagtacttaaacagacatttctccaaagaagacataccaatgacctaagaagaacatgaaatgttcaacatcattggccattaggcaaatgtaaatcgaaatcacaataagataccacttaacatccagtatgatggctaaawacaaaaagtcagatgagttttaaggagtgtgtggaaaaactgaaatgctcatagactgatagtgggatgtataatggtgcagccactttggaaaccagtagggaggttcctcaaaaaattaaacacg

SEQ ID NO: 105794 - DNA, 288 bp, Homo sapiens
tgaattcaacaaatattcattgaatccctactctaagccaggtttagatcaggggcataaacaaatgaggcagtgtcaggagctcagggcagagctgggagacagataygtaaatggtacattacattttagggtgttatgagtgttgtaattgggcaatcatggagcattttcgaggaataatatgtaatggagctgattagcaattctgtgacctttttctctcctgtggtggcttggcagcctaaaaagagcagttacaaccaaggactgcagggacccagagtt

SEQ ID NO: 105795 - DNA, 516 bp, Homo sapiens
tgtatcataatcttatggttcctgcagggatcctagcttttaatttcctgaacatacttaaaccctcaaccacagtgttagatgtcatggtatttgtagtatttcattttaagattaaaaaaaaaagttcaagaaatggaaggtactctatttacttgatcacaaatctaaggaaatttaggtagatatgatagatgccagctcaaagtcttatcgggacaaaggaaattggaaagggttatagaaaggggaaagtggtaatattaaaggtatatagaaaactggcctcaaaataaatcagcaagaaaagtaaagtgttgccttttccrttttaaaggtaaatgagaaattggtagtaattttatgactaaataatgtgactcatgtggaaagaacagattataatatcatatagcacataaaatatggggacaattttaattacatggtattcacaaggatgctcagcatttgaattgtttatcctactacaaaatacacgtttaaagtatagtt

SEQ ID NO: 105796 - DNA, 605 bp, Homo sapiens
ttaggtctgctcccagtgtggccaagggcccaaggcccaggttccttcattgttttgcacagaaacatctggttttaatgtgtactaccagccttctcacattctaaagttgaacagatgcccggtaacctacagaacccaatgtcagaacacactagccatgaattccttctttctggaagaaacagccctccaaactctaagctctttgaagctaatacttgtgccttattcatctttgtatctaatgaagtagagatgtgagatacatcttttggcactaagcaggaactctgcaaacatttgtgatacctratattgggcttattattacttcaaaaagaaaagatagaaaatatcttatatatgaacaagatgtgacctttgatctaagagtaaagaattgatgtttatagttgcaaaaatacaactggaatattaatttttcccagcattattgtaaaaggccataaggtggtgatattactccttgaaaaacctgttttgtttttttggcttaggaatgagaagaagctgaaaagtgctcttgtttttctgtctctcaatttcttttttttctttctgtctctatattcctctatttc

SEQ ID NO: 105797 - DNA, 605 bp, Homo sapiens
ttaggtctgctcccagtgtggccaagggcccaaggcccaggttccttcattgttttgcacagaaacatctggttttaatgtgtactaccagccttctcacattctaaagttgaacagatgcccggtaacctacagaacccaatgtcagaacacactagccatgaattccttctttctggaagaaacagccctccaaactctaagctctttgaagctaatacttgtgccttattcatctttgtatctaatgaagtagagatgtgagatacatcttttggcactaagcaggaactctgcaaacatttgtgatacctgatattgggcttattattacttcaaaaagaaaagatagaaaatatcttatatatgaacaagatgtgacctttgatctaagagtaaagaattgatgtttatagttgcaaaaatacaactggaatattaatttttcscagcattattgtaaaaggccataaggtggtgatattactccttgaaaaacctgttttgtttttttggcttaggaatgagaagaagctgaaaagtgctcttgtttttctgtctctcaatttcttttttttctttctgtctctatattcctctatttc

SEQ ID NO: 105798 - DNA, 470 bp, Homo sapiens
tcgcccacagatgcacaggctggtaggaaatggtcaccaggcccggcctcctctccagcaaccagggccccccaaggcttccacttctacagtctgttgcccccaaggcaacagactgtaaacacagctgagtagatggrgggtatccacggaggggttgcaagaaaatcagggtaacaacactcccctcctggggcgtgatactggctaagaaagccagctttggcacagagacaggcacttgggacttagcggcatcacctgctgtttgtgtgacctcggccaagtcctgtcccccctatatacccctgcgtcctcctcaagaagatgggaatgggaaatggctcctacctgacttgaggatgcactgagggaatccaagaaaagcctttagtctagcacttgataagcagtgactattgtgggcactactgttgtcacagcatagccctgggaagtcacctgaaaga

SEQ ID NO: 105799 - DNA, 615 bp, Homo sapiens
atcaaaatgcttaaaattcctgcagggctgggtgcagcaagcaagcaacatgcaaaatataagaaggcatcaactctcagactcagttcaacttttttttttttcttgaaacagaatcccactctgtcagcccggctggagtgcaatggcgcagtcttggctcgctgcaacmtctacctcccaggttcaagtgattctcctgcctcagcctcccaagtagctaggattacaggcttgcaccaccacacctggctaactttttgtgtttttagtagagacgggctttccctatgttggccagactggtctcaaactactggcctcaagtgatttacccaccttggcctcccaaatttctgggattacaggcatgagccaccgagcgcagtcctgactctgctcttgggatacctgagagtactgtgttatatgaatatctgatctacctatggattcagccgacctaaagttgttgaattcttaagccaccacccccttctcaccaggtaagccctgtattcatcataactttgactagattctcagacttagtgaataccagttcagatgcttgtcacatagatggacattatgtaactttctcttcccagcaca

SEQ ID NO: 105800 - DNA, 565 bp, Homo sapiens
  misc_feature (1)...(565): n = A,T,C or G
tcctgggtgaggatgggattggcttgttgtaaaaattccaggggctggcaagaaacggtaacctgttactcagggatgagcaggaactgttcctggtctccttgataaggaaggctgtgtggctagggaaccttataagcagaagcarggtggagaaggacacttgcaattaggccagatgaggttccctggtttctcccaggtgtcaaggcaccacttaatgttgggctttaattttagtccttaaataatacatgctttctttcatttgtttatcatactaagactgtgaagtaggtaatattgttgtaaaattttgaaaatcttaagagaatacaactgtcataataaaaaatgaattagaaggtgaaaagctttgggaggctgaggcaggtggatcgcctgaggtcaggagttcgagaacagcctgaccaacatggtgaaaccctgtctctactacaaatacaaaaaagtagctggatgtggtggtgcatgctgcaatcccagctacttgggaggctgaagcttaagaatcacttgaacncaggagggggaggttgcagtg

SEQ ID NO: 105801 - DNA, 565 bp, Homo sapiens
  misc_feature (1)...(565): n = A,T,C or G
tcctgggtgaggatgggattggcttgttgtaaaaattccaggggctggcaagaaacggtaacctgttactcagggatgagcaggaactgttcctggtctccttgataaggaaggctgtgtggctagggaaccttataagcagaagcaaggtggagaaggacacttgcaattaggccagatgaggttccctggtttctcccaggtgtcaaggcaccacttaatgttgggctttaattttagtccttaaataatacatgctttctttcatttgtttatcatactaagactgtgaagtaggtaatattgttgtaaaattttgaaaatcttaagagaatacaactgtcataataaaaaatgaattagaaggtgaaaagctttgggaggctgaggcaggtggatcgcctgaggtcaggagttcgagaacagcctgaccaacatggtgaaaccctgtctctactacaaatacaaaaaagtagctggrtgtggtggtgcatgctgcaatcccagctacttgggaggctgaagcttaagaatcacttgaacncaggagggggaggttgcagtg

SEQ ID NO: 105802 - DNA, 652 bp, Homo sapiens
  misc_feature (1)...(652): n = A,T,C or G
nnnnnnnnnnnnnnnnnnnnnnnnnnttgctgctggggagaaatccacacacatytggtgtcagaagtattttgagagagtgtagttgaagaaactgagtttgtttttccttttcaactatataactgccctcggatattcctaattcactggtaattaaacatttgcagaatgtgtatatggttgcacagcaaataatccttgcactatgtttaagtttagttcaaccagttttccaaatgctattcatcaatgtgtcatggcacctatcacttcagggaaaaaatacttggcatagtgtaaaaattatttctttaacagatagtatcagatttatttttatagaggaaaacaaattttgaggaaaacaccttgataagaaagtgagttaggagaaaatgcatgtggttataagttggcaaaagtcaagacagtagaagaaatagctaaaatgttctgcactaaaaataaatagaactctgatggtgaggaaagtgagagaacaaagaagagaggatgaagggcaagggggccaagaaacacaaccagggagtctggagctcaatttacagaaatagctacaggacttccataaacaggaatttcttacagtgaattttaaattgtatgtgttacttcactgcaaaattct

SEQ ID NO: 105803 - DNA, 652 bp, Homo sapiens
  misc_feature (1)...(652): n = A,T,C or G
nnnnnnnnnnnnnnnnnnnnnnnnnnttgctgctggggagaaatccacacacatctggtgtcagaagtattttgagagagtgtagttgaagaaactgagtttgtttttccytttcaactatataactgccctcggatattcctaattcactggtaattaaacatttgcagaatgtgtatatggttgcacagcaaataatccttgcactatgtttaagtttagttcaaccagttttccaaatgctattcatcaatgtgtcatggcacctatcacttcagggaaaaaatacttggcatagtgtaaaaattatttctttaacagatagtatcagatttatttttatagaggaaaacaaattttgaggaaaacaccttgataagaaagtgagttaggagaaaatgcatgtggttataagttggcaaaagtcaagacagtagaagaaatagctaaaatgttctgcactaaaaataaatagaactctgatggtgaggaaagtgagagaacaaagaagagaggatgaagggcaagggggccaagaaacacaaccagggagtctggagctcaatttacagaaatagctacaggacttccataaacaggaatttcttacagtgaattttaaattgtatgtgttacttcactgcaaaattct

SEQ ID NO: 105804 - DNA, 652 bp, Homo sapiens
  misc_feature (1)...(652): n = A,T,C or G
nnnnnnnnnnnnnnnnnnnnnnnnnnttgctgctggggagaaatccacacacatctggtgtcagaagtattttgagagagtgtagttgaagaaactgagtttgtttttccttttcaactatataactgccctcggatattcctaattcactggtaattaaacatttgcagaatgtgtatatggttgcacagcaaataatccttgcactatgtttaagtttagttcaaccagttttccaaatgctattcatcaatgtgtcatggcacctatcacttcagggaaaaaayacttggcatagtgtaaaaattatttctttaacagatagtatcagatttatttttatagaggaaaacaaattttgaggaaaacaccttgataagaaagtgagttaggagaaaatgcatgtggttataagttggcaaaagtcaagacagtagaagaaatagctaaaatgttctgcactaaaaataaatagaactctgatggtgaggaaagtgagagaacaaagaagagaggatgaagggcaagggggccaagaaacacaaccagggagtctggagctcaatttacagaaatagctacaggacttccataaacaggaatttcttacagtgaattttaaattgtatgtgttacttcactgcaaaattct

SEQ ID NO: 105805 - DNA, 403 bp, Homo sapiens
atttcacaagatctgtcttcaagttcaaaaattcagccacgcatggtggctcacacctgtaatcctggcactttgggaggccaaggcgggcagatcacttgagattaggagttcgataccaacctggctaacatggtgaaaccccatctctaccaaaaaatacaaaaattagctggatgtgatggcatgcccctgtagtcccagctactcaggaggactgaggrgggagaatcacttgagcccaggaggtggaggttgcagtgagctgagataatgccactgcactccagcctgggtgacagagtaagaacctgtctccaaaaaaataaataaataaaattctgcttggtctagtcttttggtaaagctctagcttgtacttatttacttattcattgaattc

SEQ ID NO: 105806 - DNA, 540 bp, Homo sapiens
gatgatggtttctcttcaaataatctgatcaatcttttattctttaattcatagtaccccctgtattttgctcctttttcctttttacctttgttagatgcccagcacacctcagtaccagctcacattcatttccttatttggaaagaggactaactttctagctcattacagacgccccttccccttcctctccacttgattttacgtgcccacctatctaaaaaaatcaaatgtttagccaactgggattagtttagattgtacgacccaaccccrgccaatggggggaaagggtacaggggcaggacttgcgtcaggaataaaggctctcatgcccctttgttcaggtgtgctctcatggcaactggccaaggaggcacccctctgtgcagaagtaaaattgctttgctaagaatcctttgttcgagtgttcaatgtcctcaggattttgagcattattcctaacacagtctaccctgtcagcatgtgtctttccagtcagactatgtgcccttcgcaaggcaggactgagtcctc

SEQ ID NO: 105807 - DNA, 551 bp, Homo sapiens
gttactataatctctaatgtagaggtggatttttaaaattaaatggcactaccaatgtatcacaaatgtctgaggacactgcaatgggtcaaaggttcaataagctcagaactgtrtaatttccaatcttttataattattagcaaatacttatgaaatgactacagtttttgatttggctgttcacaaaaacaatcttgctactttttcaagagtttggtgtactgtagagttgaaatggattatttatatattatacaagttcttttttgttttgcttcattttgcttttcacttctctggcatttgcccatattttcaattctctcatcattccaattaagctgtaaaattcatttgcataacaaaaaatgtttggctgtagcaactagtcaggtgttcatcatataataaaatttaagcagtgctcaatagaaatctgtaaaaggtaacaatttgcaatacatgttaatcatctataagcaaatttaaggaaatcaaataagtacttaaatcccaacttatttaaatagcgtatcagtgggataata

SEQ ID NO: 105808 - DNA, 513 bp, Homo sapiens
acatttataaaactatcagatcttgtgaaacttactgattatcaggagaacagtatgggggatcctcttccatgattcaattatctgcacctggctccacccttgacatgtggggattaccataattcaaggtgagatttgggtggggacacagccaaaccatgtcaattacttttgtaaaaaattatttaataaggaaaactactgtacyagctcatcttcctaccacaaaatgttgttgagaaattacactttgcatattttaataatgaatcattattattctggtataacatatctaaagccatcagtgaaaaatgctctgaagagttttctttggcaatatcacttaatggttgggtggaaatcaagaacttttaacacatattttttttgtgctcttctgcactttaaaacagtttccaggaatcgagagtattccaaatacttcacggaaaaatataacaggtgtgagtaatgtataacgtggaaaaagattaaggtttgtatcag

SEQ ID NO: 105809 - DNA, 630 bp, Homo sapiens
aatttgaaaaagaaaaatacttgatttctctggaaacaataaaaaaatcagggcaaaagtcaggtgccaaaatagttttatattctgcgaggattgttgccataaccccatttcaacaggagacttgggcagagggcagcaaactatggcttatgggtcacattcagccaccatatgtctttgtacagtttgagaactaacaattgttttaacatttgaagaaactgaaaataattaataaatgggtgagacatgaatattatatgaaattcaaatttgtgtccccaagtaaattgtcacgggacacagccatgcccattcgtttatgtgtagttacgtattagggctgcttttgatccacaatagcggtgttaagtagtcgtggcagagacctattggcctgcaaagcctaaaacatttaccatctggaccgttatagaaagtttgctgacctctgctctaggtgttcaaggagttgtggcccaacctccagtccatcyaagtcttggtcctgcctgtatttcagagccgctttaacgggtgagttggtgagtgcagtacagggcttcaatgtacgagaaataaaaaaacttttaaatgcagtatccattaatttacccaaattggaaa

SEQ ID NO: 105810 - DNA, 543 bp, Homo sapiens
ttctaaccttgaagagtttttcagaaactgatattttttcccccagcaccatctcttctgaattgatttatggtgctttcttcatgatattttaagtttctgcttgttgatctactgtagatttttgtgacagtaatgcacyatgtcaattattgcagctttaaaatatgtttaatttctggtaggttaacccgctctcccactttagttattctaacttatgtaatgtatcattcagtcaaattataaaacaattctcgctgaaaatttttaaatgggattgcattatatcaataagttaatttgtgaagaattactgcctttccaatataattctgctaaactttctgtatttacagtgttcttggacacagagtatctgggactcaatgggacactataaataattaagtacattttataattaaccttcagcatcaatttgaaagacagcatcttgcatatgattttatggatattaaccatatactaatttagaaaactcttaagaactctcagaataaatcatcacttaaacagtaa

SEQ ID NO: 105811 - DNA, 651 bp, Homo sapiens
gaatgacaatagcataataatattctggaggtggggtagggtcaaggaaaattctgggcatataagcactctaggactggcctctcctaccacactggactggttcctgtcacgagttgtgatttccaaaaataatctctcttttacctaatccctgagacctgaaatcactaagccagggaaagaggcttccattcagactcctaagaatgcaaaaacctctgtgagagaaaacctaggggttgaaattcacaattaagtgtgactgctaatatcacaacctttctggataataatcttggggagaataccaaggtacttgatgctctggcatgaggtgggatgggagaaattttctaacaggggtaaaaaagtctgtggtctggtgaaatgatctctgggcatgacatcaggatcctatgtttgaatcccagctctgctgtttattagctgtgtgaacttgggaaagtcttgtgtgacttcttgggtctcagcctcttcctctgtaccaaaggaattastcctttggtggaaaactaaaaactgtgctctggaaggtgtttttagcaagagaggactgatactcaggaagagcaaggatctcagcccattgccagtgtgggattctcttacccagtggccatttgtgca

SEQ ID NO: 105812 - DNA, 610 bp, Homo sapiens
atggaccataatggggaaaaaagggcaacttggtttgtaatataagatctgggaatggcatggtgaatggttatagactgcaatttagagtctgaatgcctgggctcaaatctcaactctatgcttaatggctataaaagttacttactctttttctgtctcagtgttttcattcataagacagagatgctaatgtctcatcggtttaaaactgtagagtgcttagaacagtgcccgacatacaataagcgttcagcgwttaaccttagctgttattacctgagtttgagttcttttcttttagatctatccctgactcacttgaagaaaagttgtgacctctttgggcctctggagaagtcatctgcaaaatgagaagttggccaacctttagcaatccagggccaacacctgtctcttgccaacttattctttccacctgacatggatctttgatttttaaaagattgcttggcaaacttcatttgttaaaacatcatcaaggtttctctcggactttacaaaatgctaggaacagctcacagtgctccttcctgtgcacttctagatcaagtgagatgaatccctttccactccagctttggacact

SEQ ID NO: 105813 - DNA, 612 bp, Homo sapiens
atatacatgccatcatatatgtaattaactggtgctatttttgtggtatcataataagatcagatgggaagactactatgaatctcagttaacatttacataagctgtaatacctatgcattcattgcacaacaactgcttataaaaagtccattcttcaatgtgaacacatgggcacagggaggggaacatcacacactgaggcctgtccaggcattgggggaaggggagggagagcattaggacaaatacctgatgcatgcagggcttaaaacctagatgacgggttgataggtacagcaaaccaccatggcacatgtatacctatgcaacaagcctgcatgttctgcacatgtatctcagaacttaaaaaaaaaaaaaagtccattctttttatgtcacagggtcaaaggacatataaaaaagtcacttcaggggcttctttttccttagaaatagttttaatccaagtagacctattatcgsctaatactactttagatacccacaaaaatatcatcaatcctatacatacttatgccctttttcttatttcttggttaaaagacaatatcaaaattgtttgcatttgaagcattattgcattgctaa

SEQ ID NO: 105814 - DNA, 475 bp, Homo sapiens
taaagaggtatttgagtttttaaaaaatcagagggttcgcaggtgatgaaatcttaaagcaaatactaattaaataataattctcaatagaagttccaaatgtggtatagagatgctggaagtctgtgaaacactgatataaaagaatccatgacatacagaggtgttttaaaaaaaacttcaaaatgttattaatagtcatgccatattaactggagaaaaattggacaattgagaaaattgagaaaaattaaagtcatcctccaccctacagggatgtgctgtgtatggctggtgatgttagcttggaggggtgtggacccaagctaaatttggaccccaagatggtacttccccggtgtccttgcaagcacatccagaacctggcctccggctggcttcaactgaaggtcaargccattgcagctgatgctgagacctttggctgtatgatacctggccagtggcgagggga

SEQ ID NO: 105815 - DNA, 581 bp, Homo sapiens
aacaagcccaggtaatttctgtatttttagtagacacggggttttgccatgttggccaggctggtctcgaactcctgacttcaggtgatccacccgcttcagcctcccaaagtgctgggattgcaggcgtgagccaccttgcctggcctctccttcttttctttaaatattgggacaacgatttccttcatctatagtctgctgccattatccacaatttcttcaaccagatgattactgtggtaattctagtaattccacttgtcaaaaagatcaacactataaaaggaattttggtatggttaattagttcaaataagaattctgctgagagctcctttcagtaccataaarctgtcaatgcaaataagaaaataaagttgttttgttcctacgacaaaaatattttttgaatgagcactgtaatgttgtctcgtggataatattctttttaatgatagtagctacatatgcatttaccaagaacactactaaagcaattgctacaataggtagtaaattagatgacatcaaatggtctttagctctaaaaacatatgcagttctttcagttcagttaa

SEQ ID NO: 105816 - DNA, 581 bp, Homo sapiens
aacaagcccaggtaatttctgtatttttagtagacacggggttttgccatgttggccaggctggtctcgaactcctgacttcaggtgatccacccgcttcagcctcccaaagtgctgggattgcaggcgtgagccaccttgcctggcctctccttcttttctttaaatattgggacaacgatttccttcatctatagtctgctgccattatccacaatttcttcaaccagatgattactgtggtaattctagtaattccacttgtcaaaaagatcaacactataaaaggaattttggtatggttaattagttcaaataagaattctgctgagagctcctttcagtaccataaaactgtcaatgcaaataagaaaataaagttgttttgttcctasgacaaaaatattttttgaatgagcactgtaatgttgtctcgtggataatattctttttaatgatagtagctacatatgcatttaccaagaacactactaaagcaattgctacaataggtagtaaattagatgacatcaaatggtctttagctctaaaaacatatgcagttctttcagttcagttaa

SEQ ID NO: 105817 - DNA, 473 bp, Homo sapiens
tatttttagtagagacagggtttcgtcacattggccaggctggtcttgaactcttgacctcgagtgatccgccagcctgggcctcccaaagtactgggcttaaaggcataagccaccatgcctgggcttatgtatatmcttttaaatttatcttattcatcttttggaatctttcaatccaagattttagaattatttcagccctggaatattgttttctatttttctttgcttccaataccccactaaacacatacccatatattatttacttgcagtacttcttttagcaatttcaggaatattttattatattaacaatatgtttttaaatataattttcttttattttagatcaggacaatctttccactcactcttctaactaatgtattcattctttagctaagcctattctttattccattatatcttacattttcatattttgacgatcggtttttatgtcatct

SEQ ID NO: 105818 - DNA, 473 bp, Homo sapiens
tatttttagtagagacagggtttcgtcacattggccaggctggtcttgaactcttgacctcgagtgatccgccagcctgggcctcccaaagtactgggcttaaaggcataagccaccatgcctgggcttatgtatatacttttaaatttatcttattcatcttttggaatctttcaatccaagattttagaattatttcagccctggaatattgttttctatttttctttgcttccaataccccaytaaacacatacccatatattatttacttgcagtacttcttttagcaatttcaggaatattttattatattaacaatatgtttttaaatataattttcttttattttagatcaggacaatctttccactcactcttctaactaatgtattcattctttagctaagcctattctttattccattatatcttacattttcatattttgacgatcggtttttatgtcatct

SEQ ID NO: 105819 - DNA, 473 bp, Homo sapiens
tatttttagtagagacagggtttcgtcacattggccaggctggtcttgaactcttgacctcgagtgatccgccagcctgggcctcccaaagtactgggcttaaaggcataagccaccatgcctgggcttatgtatatacttttaaatttatcttattcatcttttggaatctttcaatccaagattttagaattatttcagccctggaatattgttttctatttttctttgcttccaataccccactaaacacatacccatatattatttacttgcagtacttcttttagcaatttcaggaatattttattatattaacaatatgtttttaaatataattttcttttattttagatcaggacaatctttccactcactcttctaactaatgtattcattctttagytaagcctattctttattccattatatcttacattttcatattttgacgatcggtttttatgtcatct

SEQ ID NO: 105820 - DNA, 601 bp, Homo sapiens
ccagtttcagttttctgcatatggctagccagttttcccaacaccacttattaaataggaaatcttttccccagttcttgtttgtgtcaggtttgtcgaagatcagatggttgtagatgtgtggtggtatttctgagccctctgttctgttccattggtcgaattttaaagcagaaattcctgccttgttctcttgaaacaagactcacatttcaaggtatgccatggaagaaactccaggtaatgagagcatgaacaatttctgtattctctgggtactaaacacrctttagtttccatttgcacatcattcatgccatgtttcacggactttataaagacccatgctgtctgaaagtacccaagaagcattaaagtataacatgattttatagaaaataacaataattatggctttctttgatatcacctgtcaatttccacagtcaggaggaactgaaattatgtatagtcacagaaatgacttgttctgaatataattactagtaaaagatatgatttacattttaaaaatttacatcaagagcaatagccatttttaaaagtagtatgtatttttaattataaatcaaatgtgtgc

SEQ ID NO: 105821 - DNA, 590 bp, Homo sapiens
aggctgtggcttacctctttactttttcgtgatgtcttcaatgaacacaagttttaaattttaatgcagtaaaactgataatttcccccttaccacttaaataggtttaatgtgctatatgtgtctagtttaagaagtcttctatactgagtgaataaaatttaatttaaaagtgccccttaaggcattttagatggttaagatgaaacaggaaatattgctttttttttttttttwaaaaaaaggttgagtcaaaattggttgacacccagttaaaatatctcttatcaataccagtttactcaaagcagagcccactgtcataccttaattgccgtatgtatgaattttctgctcaatctcaatactatcatctgtaaatatgagagtttagggagggaaaaccatagatataacatcaattttcacagaattctgtagatttactcatgtgcacattccttcctgtacagaaagctcatggtaaccataagtaactcaaatgggccactactaactataatgaaggaagaagaagcctaggcttcggatacaatttcagccgagtgtccctgaggtgtttcattgct

SEQ ID NO: 105822 - DNA, 582 bp, Homo sapiens
atagcagggttctgctaaccttctagtcagatcaggtgagaagatcttccacaaatattttcacacagttattaagcataagttaggactaagtctcaagttctaaggacaacagactactgggatcactagatttttctaccctttccatgaaatgatgaaaagcccaacccactactattaattagagataacggtagtggaagcacttacagtagatactctgaaatgttggcacctgaatagaatctttcaacttctaactattcacacctagattatgtgtatttcaaatgataacaacccctagagtatatgaaaaaataatatatatatatacacaaagaacatatatatatacatatacataatacacatacaatgtcatgacaaatcatgacattgtaaattttatttgatgatgatgtattagatgataaattatactcagtataamaggaagcatggttcattccctgaggctggaagaagagacttctttcccttaacacattactctccccttgcgtaaataatactggggttctgttatcaaggccaacaatatatgcctgaaaccta

SEQ ID NO: 105823 - DNA, 600 bp, Homo sapiens
atcagaaagtctcacctatattaggttttctgacccagatcaaagccacctagattttcagtgtgtgtcaagggagtggtgggggttgaagggttgaagggaggggggattttgctttagttggagaaaataaccctgaggccaggaagtcactacttaggattaaggagtgtcagagccttgactttgctgcttaaaatgtckgagtgactttggaagtgttaactgctgtaaattgttaatggaggggaatataaaataagaacactttatagatttgtgaggtttgtatgctatgacgtctgcaaagttctaggcaaggggtgaggcatcaataaacaatagacattgttgttacttgtgattgccttgacatatcaggtttgtaccttaaacagggtctaggttaattatcgtacccagataaaaatacttaacaaatggaagatgaagcagagaaaaatgtatgaaactgtttagaacatcataactgtcaatgacaaagtgactattaaagttaaaattgtattaaattaattgattctttttttctcttccctcaggttgtatgtcatatacagaaaaaaaatgatgctaaca

SEQ ID NO: 105824 - DNA, 608 bp, Homo sapiens
catgatctggccattaattacctccttgcctcatctgctacttttctctccctcctatagagcactgcagccacattgtcctccttgttctgggaacatgccagcccaggcatgcctcaggggatttgccctttctgtggcctctttttggacaactcttctgtcatctatctgcctggttcactccctcatcccttcagacctttgcttgaatgtctctttcttagtgaggaatttcttgattataatatttaaaagtggaaataacagttgcactgcttagtattgaaatacrttttctagctttcattttctccattatatttcccattatctgatgactgaataggttacttatcactttccagtagaacataacctctatgaaggcagaaaaaaaaaaaagctttaatgttttgtttgctattgtctccccttggccttacttggtgtcttatgtaccataaacacccattaaataaataattgagttaggcattactaatagccgcattttagtagctgaattttagaggagaggaaacagaattaattagttagatagtaagttaggtcagtaaggaaccttcctaaggtcttacaactag

SEQ ID NO: 105825 - DNA, 608 bp, Homo sapiens
catgatctggccattaattacctccttgcctcatctgctacttttctctccctcctatagagcactgcagccacattgtcctccttgttctgggaacatgccagcccaggcatgcctcaggggatttgccctttctgtggcctctttttggacaactcttctgtcatctatctgcctggttcactccctcatcccttcagacctttgcttgaatgtctctttcttagtgaggaatttcttgattataatatttaaaagtggaaataacagttgcactgcttagtattgaaatacattttctagctttcattttctccattatatttcycattatctgatgactgaataggttacttatcactttccagtagaacataacctctatgaaggcagaaaaaaaaaaaagctttaatgttttgtttgctattgtctccccttggccttacttggtgtcttatgtaccataaacacccattaaataaataattgagttaggcattactaatagccgcattttagtagctgaattttagaggagaggaaacagaattaattagttagatagtaagttaggtcagtaaggaaccttcctaaggtcttacaactag

SEQ ID NO: 105826 - DNA, 517 bp, Homo sapiens
gaaaaattaaatcccttctattattattctgctgcacaaaataaatatgtatgtttgtgcacatctatgtacacatatacatatatatacatacacacatacatatgtatgtatataktcatctctttatgattttgtcctcattgcacttagccaacttaattttccactgccttcaatatgaaacttccttttttaaaaaaaaaaaaaaaacactggtctccccactgtccagagaatacatcatgttcaactgtgctgttgcctgtgttttttttttttttccttgagtggaatacctttatttttctctgcttatttaagttctacacacgcttccaggcctaacctacttccaccagctctgtaaagtctttttacactactcaatttttctttccttctgatcttctctgactatgcactcagtgttgtgtacatcttggtacttaatgatgcatttcatatgcattgcttactgtaaaactgtgtacttgtcttaggtccccattaaatg

SEQ ID NO: 105827 - DNA, 517 bp, Homo sapiens
gaaaaattaaatcccttctattattattctgctgcacaaaataaatatgtatgtttgtgcacatctatgtacacatatacatatatatacatacacacatacatatgtatgtatatattcatctctttatgattttgtcctcwttgcacttagccaacttaattttccactgccttcaatatgaaacttccttttttaaaaaaaaaaaaaaaacactggtctccccactgtccagagaatacatcatgttcaactgtgctgttgcctgtgttttttttttttttccttgagtggaatacctttatttttctctgcttatttaagttctacacacgcttccaggcctaacctacttccaccagctctgtaaagtctttttacactactcaatttttctttccttctgatcttctctgactatgcactcagtgttgtgtacatcttggtacttaatgatgcatttcatatgcattgcttactgtaaaactgtgtacttgtcttaggtccccattaaatg

SEQ ID NO: 105828 - DNA, 608 bp, Homo sapiens
aggtctcactctgtcacctgggctggagtgcagtggtgcgatcatagcttactttaaccttgtagttcattgagttatacagagagtgttcgaaatttttttttctatatcttatggagactagcaaaaggaagaaacctgttattttcctttaaattatctttctgggtaagtctagatttggttgacatagacaagaaataccaatattggaatcctgacttcatcctcttaacatgcagtcctccagtgtacttgaccaggagattgaggcctttgtcataattttgtaaatataacctagaaatataaagttatttctgaaactttaccaggttaagagtattattgtttaatatatttatttcaatagaactcccaaaattgatgaagattgtgtgtacagctcatgaggkcagagagcatatctgttttcctcaccctgtatcctcaaagtctatcacagtatctgattaggctctcaaaaaaatcgtgttaaatgcctgactgcctactttcaccaatttgttttgtaactggttcctaatgaagtaaaggatttaagagatataaataactattttgtgtttgataggctgtttgattgt

SEQ ID NO: 105829 - DNA, 385 bp, Homo sapiens
tactggagcagtgacattacacagttctctaagttactcatatgcccataagaagaagcaatctaaacaacataaaaatgacacctctaaatatttttatcctacaaaagcatgcattagatgacaagtgagttatgtgagtctgtaattaacataaactattttatttttgttctttttggtggggaatagagatgaagaaaactaggaaagtaagtgctttatgtaattcatagagaatagcacacagatttttaytggtgatgaggtaacagaatgagagtagtaagggagacaagggattaacttgctgtgtgtcagttcccaaatgagtgtgcatttacagttacagtatgggtcttgactatctcagttcccagaattc

SEQ ID NO: 105830 - DNA, 591 bp, Homo sapiens
ctagaattctatttcataatattaagtgttttaaacctttaacacattttataggattctcaaaatcaaatttcagctttgaaatggtcttttctgacctttaactttgggatgctacagagggcccctgaaacatccaaaagaggagtaaacaagattatttgacatgttaaggtacaagggaagcattgttaaaataaaaataatgtttaattttcaagttatattttagtaaattatattaatatatgttcctaaattttatgggattwctaaaattctaatgggggtccgagtatatgctatcaatcacaattatggctattatgttaagttattgtagaccatagcaataaccaaatttcctggttaattgtgtttttaactatatttaaagtcatttccacagttaattgcagtttatgaaaactttaaaagcatggtggtatcttttaggaggtccatgaaaggatggaaaggaccctgaaaagcattcttgaatacaggtttctaataactttagaatcatatctcttgaattgggtaaaaattcctggaactttaatgaaaagacttactgggttataaaac

SEQ ID NO: 105831 - DNA, 597 bp, Homo sapiens
atacttgggagtaagttgaaatataaatggaagtaagagtgaaggagaaaagcggtacagaggttaaataggtaacaaataattgctaggaggagcagattaagcagactattgacaacagtacaaatgttcgcttttattcctcctaccccaggtgtggacatgcacacacaggcttkgtctcacctgcaaaaaacagttctccaagctaactccaagtgtcttaaagccagtttgatattaaaatatcctgagtcctgtgagggaagacatgcaagaccatttttttcatcacacgtttaattgtaatttttatcttagttctcagaaaggcagttcaattacactgagtacgtggtacaagacaaattagcagcaccatatccattaggccacattatatttcaagagatgttcttagttcccacctgagcttctgtcagtctgctatcgtttggttttctctttgcatcttctaactcaagaagtcagtggggaggtggaaagggagatgaggggacatcagttactctttagattaaaatggaggtagatgtgtagatgctatccacaggtaatatatgtgtcttttatgcc

SEQ ID NO: 105832 - DNA, 597 bp, Homo sapiens
atacttgggagtaagttgaaatataaatggaagtaagagtgaaggagaaaagcggtacagaggttaaataggtaacaaataattgctaggaggagcagattaagcagactattgacaacagtacaaatgttcgcttttattcctcctaccccaggtgtggacatgcacacacaggctttgtctcacctgcaaaaaacagttctccaagctaactccaagtgtcttaaagccagtttgatattaaaatatcctgagtcctgtgagggaagacatgcaagaccatttttttcatcacacgtttaaytgtaatttttatcttagttctcagaaaggcagttcaattacactgagtacgtggtacaagacaaattagcagcaccatatccattaggccacattatatttcaagagatgttcttagttcccacctgagcttctgtcagtctgctatcgtttggttttctctttgcatcttctaactcaagaagtcagtggggaggtggaaagggagatgaggggacatcagttactctttagattaaaatggaggtagatgtgtagatgctatccacaggtaatatatgtgtcttttatgcc

SEQ ID NO: 105833 - DNA, 597 bp, Homo sapiens
atacttgggagtaagttgaaatataaatggaagtaagagtgaaggagaaaagcggtacagaggttaaataggtaacaaataattgctaggaggagcagattaagcagactattgacaacagtacaaatgttcgcttttattcctcctaccccaggtgtggacatgcacacacaggctttgtctcacctgcaaaaaacagttctccaagctaactccaagtgtcttaaagccagtttgatattaaaatatcctgagtcctgtgagggaagacatgcaagaccatttttttcatcacacgtttaattgtaatttttatcttagttctcagaaaggcagttcaattacactgagtacgtggtacaagacaaattagcagcaccatatccattaggccacattatatttcaagagatgttcttagttcccacctgagcttctgtcagtctgctatygtttggttttctctttgcatcttctaactcaagaagtcagtggggaggtggaaagggagatgaggggacatcagttactctttagattaaaatggaggtagatgtgtagatgctatccacaggtaatatatgtgtcttttatgcc

SEQ ID NO: 105834 - DNA, 601 bp, Homo sapiens
cctgtgttaaaagtttctgtaaagatgttcatccctaagtaacacctattttattaaaataaatatgcatgggctttagttagttaaatgggaagtgatttttcccttctatttacatagaaatgtggaatrtgggaagttaaagctggaggaatcagtataacagccaatgccctcagtaaatgatgagtaaactaaaatctcataaacagattgagcttgatgacaactgggactcagactgaattctcttgaatctaaattgttttcttaaagacagcagtgtttgaaacactttgggctactgatattttataatttgaaggtctgtcaaaccattgttaagattttctgtgctagtacaaacaatataatcttttatttttcctttaaaaacctggttctgttaaagaaaatcaaacaaaccacccctggaaaaaaaatgagtttttttctgattttattgatccaaatagagtcaaagagtcaatttcctaggatcataaataattatttaacatttctaatacacatttagaaggtgaactatgtggaactagtgaaatataagtcgcattattgtagctttaacttgtaataa

SEQ ID NO: 105835 - DNA, 608 bp, Homo sapiens
ttttagtaataatattctagagaggtcaaagtgttaaaaccaccattctctgtaatatcctttaaacacaatatgccattagtccaagttttaaaagatgtgaattacctcctctccacagagcttgtatttctttttactttaaaatttctcaatttttatcacagctcatccatcagaatcatatgtacctttatttttatactggtttctatactgttgttgtaaataatgtttcccttattaaaataataatacctgttcttaggtttattatagcattttaatttgaccaactaacagaatatcatgtgctataattagagtttttaatgtctttgtagacagtgccactgctttagtattttatttttcaaaaaatccaggctgattttaatgtaagtgtccacagccttgagaagattaataaatgatccatacaattayatattattgaaataaaccatcatttttaagacagtgtgaataagacttccataattttccttcagaatcacctataatattccattaccttttaatatatcttccatctgattgtaattttttaattaatattctggaaacctgtaagtttccatctgaat

SEQ ID NO: 105836 - DNA, 484 bp, Homo sapiens
tgggaatcctagaacttaaaaatgtggcaaattaatttagtaacaaattttatttgatccatcaaatataaaattgtatcaatccacatgtaacatttgacaaaatcagccatgtgctggattgtaaagcaagtcacaagcatgaaatgattgtattcattcagagaatattctcagagaacagtgtcattaagccagaaatcaataactaaaaaaaaagaaaatcttcctatacataatttaatctgcactacttcaaaataaatctacttgagaaacttgaattattttaacataaatgataaataacatgtgtacaataaaaattgcaagatgcaacaaaaacagtctttaygatatctataaaatatattatattatgtacaaaatatataaaaacaagttgcagacacttgacagcagccaatgtaaggctgctattcttgagctattctggagagacaaagtatttaaaagtcactcc

SEQ ID NO: 105837 - DNA, 693 bp, Homo sapiens
acatagtctaaccccactaaaatcaaacaaaaacatcgttccctttacagagatctttaaaaactttgagcaagcaaaaaaaaaaaacttctagtgttaaaaattaggttgtaaaaaataaataaattttatcttttaggacctaatttctcctattataagcatcttagattagtatggcacatttgttataatwaatgaccagtattgatacattattattaactaaagttcatacttaattcagatttatgtaattttccctaaagttcttttactattccagggccccatccaaaatgccacaccacatttagtcctcatgtctccttggactcctcttggttcttagtttctcagactttccttgtttttgatgcctttgacagttctgaggcatactggtcaggcattctgcagaataaatgtcttccacatgattagactgaggttatgggctttggggaagaagccacaaaagtaaagtactattttcaacacattgtatcaagctatatataaagtagatttttttaattgacactttttatgaattgcttactcatatccttggatgctaaattatattttaatgctttcaacctggtattaccagcatattcaatctgaagtaaacatttggacaagacttgagggcttcaattttataaatgaatggcattcttaaattaa

SEQ ID NO: 105838 - DNA, 558 bp, Homo sapiens
tttattcagcatgactaattgctgattgaaaataattctatggaaaagaaattgcttattctggatgcaaggaggataaagccagtagcttatattttgtccatttcttttgcttacaggtaagtgggtatttacttatttaacaaagttaatgtaacttagatgaaatatgttttcccctgaggtattatgctttgctrtaaagaaatatcaaagaaatttaaatgtgttctcaattaaatgcattggcccagattccagagctgagctgaatttctcaaattatagctcaaatgcatcaatcttcctatgaagtttattgttctgtaagggaattggctaagagaaacttcaacactggtgggctttaaggatgcagtaatagctcttgaatgaccatcatcatagaaaatggtttgagatagagattaaatttgacttaaactccttcaatatgcacaggtcaaaggactctgcacaggtcaaaggattctgagattttcctttaagagaaaaatctcaaaccaagtgataataataaaacacctccataagaat

SEQ ID NO: 105839 - DNA, 576 bp, Homo sapiens
ctcattatgtctgaatttgtagcaactttagcatctggaccaatctaacttgattcacagagacaatggcttcttcaaagtcttcctgaaagagccaggtaacacaatcaagaagcatggtagaatgccctaacatggactgtattttgaccagtgctggacaaagatgacagggaagttccatgaccttcctcccctaatggacttgactattcggtggcatgtgattttcatacrgctcctccagagatgttatataacagaatgggagctgtgatgttcatatgattatagtaaatttagtaacataccacctttcatttaatttccttgcatgcctacctcacttctctttgtacttcattctttctcccctgtaattatacctcacaaaagattagcaagtaagttttgcttcagactctggaagaaacccaaacacaaatatttaattttatttggaattgatttttcatgtgtattttaatagtatggccatctctcttttaggctgaacttatcaaagttgtctcactgtacttttcgcacttctttgcatttcagtggagaacaatg

SEQ ID NO: 105840 - DNA, 576 bp, Homo sapiens
ctcattatgtctgaatttgtagcaactttagcatctggaccaatctaacttgattcacagagacaatggcttcttcaaagtcttcctgaaagagccaggtaacacaatcaagaagcatggtagaatgccctaacatggactgtattttgaccagtgctggacaaagatgacagggaagttccatgaccttcctcccctaatggacttgactattcggtggcatgtgattttcatacggctcctccagagatgttatataacagaatgggagctgtgatgttcatatgattatagtaaatttagtaacmtaccacctttcatttaatttccttgcatgcctacctcacttctctttgtacttcattctttctcccctgtaattatacctcacaaaagattagcaagtaagttttgcttcagactctggaagaaacccaaacacaaatatttaattttatttggaattgatttttcatgtgtattttaatagtatggccatctctcttttaggctgaacttatcaaagttgtctcactgtacttttcgcacttctttgcatttcagtggagaacaatg

SEQ ID NO: 105841 - DNA, 576 bp, Homo sapiens
ctcattatgtctgaatttgtagcaactttagcatctggaccaatctaacttgattcacagagacaatggcttcttcaaagtcttcctgaaagagccaggtaacacaatcaagaagcatggtagaatgccctaacatggactgtattttgaccagtgctggacaaagatgacagggaagttccatgaccttcctcccctaatggacttgactattcggtggcatgtgattttcatacggctcctccagagatgttatataacagaatgggagctgtgatgttcatatgattatagtaaatttagtaacataccacctttcatttaatttccttgcatgcctacctcacttctctttgtacttcattctttmtcccctgtaattatacctcacaaaagattagcaagtaagttttgcttcagactctggaagaaacccaaacacaaatatttaattttatttggaattgatttttcatgtgtattttaatagtatggccatctctcttttaggctgaacttatcaaagttgtctcactgtacttttcgcacttctttgcatttcagtggagaacaatg

SEQ ID NO: 105842 - DNA, 529 bp, Homo sapiens
tgtaaattagtacggccactgtggaatacaggattacaattttcttaaaaaaagaaaaatagaactaccatacaatctagcaataccactactgggtatctagccgaaggaaaagaaatcagtatacgaaagggatacctacacttgcatgtttatggcagcactatccacaatagcacagatcagcaacaaacctaaatgtccacggatcccatggatgaatggataaagaaaatgtgaaccaacattgcatcccggggatgaaggctacttgatcatggaagattagtgttttgatgtgctgctggattcagtttgcaagtattttgttgaggattttcttcatcgatgttcatcagggatattggcctgaagttttttttcttttttgttttgtctctgccagrttttggtatcaagatgatgctggcctcatagaatgagttggggaggagtccatcctcctcaattttttggaatagtttctataggaatggtaccagcttttctttgtgcatctggtagaatt

SEQ ID NO: 105843 - DNA, 586 bp, Homo sapiens
aaaattacagaaatagtaaccttctttaccatcaatataactggctctgcagctacccttattactagattttgtttattgtcaactctagatacatattctctaattaaaattgaagtggaaaaagtaacatttacattcaaattttaaaatgaatgccctcagtctctttctttatagattctttttaccatggcattccaactgtgatgtttttcttttcccacccagaggtcgtatcttttcagaatgagggttagagtgtaccaatggtggaaagaagttgtgtgaaatggtcttttcattagatttcacttagagcggtctatttaatgttttatcatttgccaacatacataacagatattcaacatttatccacatttcaacacatgtcattgttgggagggaaaaactggcattttaatatgcacattgagcacagaaacatttataagatggttattggatacagaaacgtttttttatgtgcaccttagtgwctgcaatatatttaaggttgctaaatgttgacacagttgcctatgttacatgaacaagccagagaaagtaggcatgagagacc

SEQ ID NO: 105844 - DNA, 579 bp, Homo sapiens
ggaatggtacagaatggaatggtacagaatggaaacttggatgatggtcgtatttactattttattttttgaaacagctgagatcatttattttgagaacagaagctgcctaggtatgtagtgaggctgttttgtcattgtctctgcagatgttgattgacaatagttgtcctgaaagtagccacacagaccagtcttcttggcgaagacatcatagcaattaacaaattctagaccttagaggaacacayctagaaagacatgagaattcaaggttctttggaattcagaagatggttgtttctcctgttaaagctctattctgttcaacaaggcaaagtaacatcaatgaaatttgtttatataaaccccataactataaattgaaaaaaagagctagtttctctcaatgtagtatatatgtcatgactgaaagacttaattccttttcctgtgcatgtatttacatttcaacatagggtgaagcaaaatataagctacaaaatgtggaagactgagggacccgacatccctctgtcaatctcctggtcaaacaccttcaacagctaccaattacta

SEQ ID NO: 105845 - DNA, 558 bp, Homo sapiens
ggcattgcttcagagccctaggggcctgcattctgattctttcgcttgggcatccatcaactccaaactgtatctttccccactaacacattcagcaccatggggtccrccagatcatatgcctcaagtagtagggttgcttatactgcagcccatacatgctgcagagccctttcttgctttcttgctccaggcccactcaaagctgtgagacttctatgtagttcagtatatgggaccaaaaatattcctagatgtggaatgtgttgcctccaaaacacaaagaggcctaccaggtatcttgctctatttattgagattgagaatgtaagatacagcaatttaacttttacttgaaaatgcagtggtgggagtggtattctagcagactttcactactgaaccactaaaaactttaccgatgtggcatgttcctgaattttcacagggtttgtctctcaccctccagagtgtatgtgtcctaccaatgcctctaatgtattagacacttcttgttgactcttaatgacatctttgatgtaaatggatcaatgtgat

SEQ ID NO: 105846 - DNA, 632 bp, Homo sapiens
gcattcagtgtttaaaaaagaaaagtagaagagggacctttatcaatatcaaaaatagttttttgtgcaaccaaaagcaagcaagctattattatatatacacactcgctttaaaaacaacactaaagacattgagttgagctggaagcattgcatactctgagatacacagttgatattgttacccacagtgtcccttcaggaaagccagaggtcatctgtaacaccacaattaaggataaaaggaycttatattatcagaaatttcaatgtcttcataaaaattgtgtttatattcaatatctcccttatttagtgtgacaaatgttcatgtacgagtcatctcaagaaaaagagttactcagcttgctacgtattcattattctatggctctgctatgcaggggaaagtgcaaacagcaactgagagaaagcaggaatctaagacatgggactcaacttgccctttacacacggtgaatcctacactagtgacctttgtgttttaaggaagtttgcaaatatgtttaattggacaacatttcttcctttatctagcaagcactgagtatcttgccaggcactatgaaaaaagataaaactataaacatgagcaaggcacagccactgcc

SEQ ID NO: 105847 - DNA, 570 bp, Homo sapiens
tgaggaaaaaagtcacatccaaataaaagcaaatttaaaaaaaataagaagagatagcttatctggatgagaaggaaccagagaaataactcggaatgtatgaataaaatagagtgctacaacacccccaaaggatcacactaactctccagtaatggattctaaccaagatgaaatatttgaaatatcaggtaaagagctcaaaatattgatttttaaaaagctcaatgagatccaagaaaaaattgaaaaccaacayaaagaaaacaattcaggacatgcaagaagagatagataccactaaaataaaagaaacggacatttaaaaattattgaaggaaaaacaaaataaaagtgaaagcttcaacaataggctagaccaagtggaagaaagactttcagaactaaaagacatcttttgaattaaaccagtaagaaaaatatacagaaaaatgaattttaagaaatgcctagtgcctttgataaatacgggattatgtaaagcacccaaacctacaatttataggtatttcaaagggtgaagaagaaaaagtatggaaaacctatttg

SEQ ID NO: 105848 - DNA, 547 bp, Homo sapiens
agtaacgttctttggggggatgaaattagttgatgagaaaatatytttataacattagtaaataaagtattttcaaatctttagtcactgaaacaaaatcaaaacaatatggggatacctgtagaaggaaagaaggaaaaagaaaattgtttttgctaacttctttcaattattaccttattgcaaatttattaagggtttgttaacacagttttaacagacacataatttcccaaactgttaactctgaatgtggaattcttgagacaaagatgtgcagaaggcatgcaaattatcctgtcatcctctcccgaacacccctcacctcagccagaggaggactgtgcacagaaaaatgggtcaaggcttgtttctgacatcatcttgactttccgctgctttttaggatgatgagcagcaactggaaagtgaatgaaggtttgatgtcaacctacacctagactttgggcgcttccacaaccacgggcaggtgctcatatgagaacattttctgagtgtattagaatccatgatcgatacacaggct

SEQ ID NO: 105849 - DNA, 547 bp, Homo sapiens
agtaacgttctttggggggatgaaattagttgatgagaaaatatttttataacattagtaaataaagtattttcaaatctttagtcactgaaacaaaatcaaaacaatatggggatacctgtagaaggaaagaaggaaaaagaaaattgtttttgctaacttctttcaattattaccttattgcaaatttattaagggtttgttaacacagttttaacagacacataatttcccaaactgttaactctgaatgtggaattcttgagacaaagatgtgcagaaggcmtgcaaattatcctgtcatcctctcccgaacacccctcacctcagccagaggaggactgtgcacagaaaaatgggtcaaggcttgtttctgacatcatcttgactttccgctgctttttaggatgatgagcagcaactggaaagtgaatgaaggtttgatgtcaacctacacctagactttgggcgcttccacaaccacgggcaggtgctcatatgagaacattttctgagtgtattagaatccatgatcgatacacaggct

SEQ ID NO: 105850 - DNA, 575 bp, Homo sapiens
tgcattttcatatttactctgataagtaaatgtttaaaatatttgttagagaagaatgaaatagaccaaagaggaggtcatacagataatgaggttraaggtgagttacagcctctctccttagggaaagcataacactaaacaacaaataccaaaagcaacagaaaatcctgggcttaagaactcactaaaatgaacccctggtaagattttagaaattaaaacaaagcaaaatgaagtgaatgtgggaagttcctctgtttcttcacttgtagaatggggaagtaatagtccctgctttataaatagaaagggcactcagtaaaggtcacccccactttctgcatgtcttagatccatgaagctttctaaacagggctgctgtgatcatctaaacattgtcacctgtgtcagcctccaatcccaaccctgcaccctcatttaccttgttactatctatgttcttctgcttccattaaaatgtaaatcatacacagatagggagtttttttgtttggtgtggttattgatacatcttgagtaaccagaagagagactggcacaaaatatgttat

SEQ ID NO: 105851 - DNA, 550 bp, Homo sapiens
tttttggaatattgtagttacctgttttttttttttttgagaccaagtctcactcttgtcccccaggctggagtgccatggcacgatcccggttcactgcaacttccacctcctgggttcaagcaattctcctgcctcagcctcccgagtagctgggattacaggcgcctgccaccacgcctggctaatttttgtacttttagtatagayggtgtttcaccatgtcggccaggctggtctagaactcctcccctcaggtgattcacccatcttggcctcccaaagtgctgggattacaggcttgagccaccatacccagcctactttttacaaatcttatttttaaattttattttactataccttttgtctaaggcaggtgtccaatcttttggcttccctgggccacattggaagaggaagaattgttttgggccacacataaaatacactaagactaatgatagctgataagtaaaagaaaattgcaaaaaaatctcataatgttttaagaaagtttacaaacttgtgttgggccgcttcaaagctg

SEQ ID NO: 105852 - DNA, 621 bp, Homo sapiens
tctagttcttcctagtataatctaggagggttgtctgtttccagaaatttatccatctcctcttggttttctagtttatgtgtgtaaacgtgtttatcgtagccttcaatgatcttttgtatttctgtggtaatttcaattgtaatacctctcgtctcatttataattgaacttatttggatcttctctctttttgtggttagtctcactaatggtctatcaattttatttatgttttgaaagaaccaggtttttgtttcatttatcttttgtatttttgtttgtttctatttcatttagttctgctctgatcttcattatttcttttcttctgctgggtttgagtttagtttgttcttgtttctccagttcmttgaggtgtgaccttagattgtctctttgttctctttcagactttttgatgtaggcatttaaggctatgaactttccccttagcaccacctttgctgtattacagaggttttgataggttgtgtcactattatcattgagttcaatgaattttttaatttccatcttgatttcattgttggcccaatgatcattcaggagcagattgttaaatttccatgtatttgcatggttttgaaggttcttttg

SEQ ID NO: 105853 - DNA, 604 bp, Homo sapiens
attttgttatgtgtattttaccacaataaattaaaattgaggggaaaaaaagagagagaaaaaaacaacaatgtccaaggcatctgacaggctttttaataatgggaaagtcagccattttgtcctgtttagaccatcagcttattggatgaagcccattcacaactgagagaacaatctgctttactcaaaggtgcccgatttaaatgtaaatctcattcagaaacacctccacagacacacccagaataacgtttgaccaaatctgggcaccatgtagccataaaattaatcagcactgtggaaggaaggatggatggatagacagacagatagatagatagagagatagatagagagatagagatagtgtgtaaggatkagataggctttatctattgcaacataatttttagatgtggtcttgaaaatttttcttgcagtgaccttcacctatattctcttggcttttgtccctgatttctctacctttagatgtgctactgcaggaaaccttcctctgcagctcagctcctggcagtgtcttatcaggagtgcagaagctccagaaagaaatcagtgtccttaggggagcaggtttgaa

SEQ ID NO: 105854 - DNA, 542 bp, Homo sapiens
ttcctcccatgacacatgggaattattggagttacaattcaaaatgagatttggttggggacacagccaaactttttttttttttttaaagatgaacccataaaaatytgaagcaatatcatgaaacttcatactttaggaagctttgggcaagcatctagtgaattgatcctctgtctatagcctggaccagaaagatcttcctttcttctgaccctctcacacccctaatatcttttagaaatataggtgtaacagattttgtcctatgatgtgtgatctttttcacacattgtgtcctttggaaattgagtttgaggtaacatgattgcagctgcataatttcactaaaaagcaagacagctcctcttccagcaacatgtatttctctttccttgacatggttaagatcctaagaaagggatttgtggcacatttgtaagtttaaaacaaatgtcttttccaagctgtactggaactcagtttcatccttatggttgaccaggagaacaaaaaaatggctggaattcaggctattgttc

SEQ ID NO: 105855 - DNA, 529 bp, Homo sapiens
aaagaaaatatttgcaaatctcacacacgtgcaaggactcctacccagaatatagaaagagttgtcaaaactccaatgggggaaaaaaaatgatgctgtttaaaaaccagcaaaagacttgaacagacgcttcctcaaaagggctgtaaggaaccacttcaaaaggtgtcctatatctctcccctggrgaaatgtacatcaaatacaccttgaaatacaaccaggaagctattagaggggccactgtgacaatgactgaccatgtccggggctgcagaaaatgtggagcagctggaacactccgacagtgctggttggaatcaaaatggtacagcccaccaggagaatagttgattgttccatattcaatgcaatgggcactcaccactgaagccagccatcccacactgaaacagttgttctagagaaattagaattcatgttgacaaggctgagggcaaaggtttttagcagctgtcttcaccatacccaaaatgaaggggctttgtcatttattcaatagtaaata

SEQ ID NO: 105856 - DNA, 561 bp, Homo sapiens
tgcatttattctttcctaattattacacttttcatttcttctgtcttcagtgattttattagtatgtctatttattttatctttataaagaacaaattattctttgtttatcttccttatctttctgtaatagctcattaatttatcatgtcctgctttttacttcctagtaatttatctgggttaattctgtttgcattattaaataccacaattgggtacttggcatatttatatrcagcatttctatatttactaataaaccatttaagtttatgcattaattactaatttcaattttacctgcattccagtatcttgatatctagtattttgttatcattcactttttgtatgtaaatccattacaatttctttttactctatttaaaactgttgtttgatccttacattatttgaaaattaacttaatgtttaaggtttttacaatcagaatttaaattaatgtaagggttatttagttatttaagttatttaaattattaagtaatataagggtaatttaaatatttttgttaatttttaaggttttatagtcag

SEQ ID NO: 105857 - DNA, 561 bp, Homo sapiens
tgcatttattctttcctaattattacacttttcatttcttctgtcttcagtgattttattagtatgtctatttattttatctttataaagaacaaattattctttgtttatcttccttatctttctgtaatagctcattaatttatcatgtcctgctttttacttcctagtaatttatctgggttaattctgtttgcattattaaataccacaattgggtacttggcatatttatatacagcatttctatatttactaataaaccatttaagtttatgcattaattactaatttcaattttacctgcattccagtatcttgatayctagtattttgttatcattcactttttgtatgtaaatccattacaatttctttttactctatttaaaactgttgtttgatccttacattatttgaaaattaacttaatgtttaaggtttttacaatcagaatttaaattaatgtaagggttatttagttatttaagttatttaaattattaagtaatataagggtaatttaaatatttttgttaatttttaaggttttatagtcag

SEQ ID NO: 105858 - DNA, 467 bp, Homo sapiens
gatttgtggctatgtttgtacaatggaaggtttattgtctattttactactataaatttataccagccaggcgcagtggctcacgcctgtaatcccagcacagcactttgggaggccaaggtgggtggatcacctgaggtcaggagtttcagaccagcctggccaacatggcgaaaccccatctctactaaaaataacaaaaattagctgggcgtggtggtaagcacctgtaatcccagcgactcgggaggctgtggcgggagaatcacttgaacccaagaggtggaggttgcagtgagccaagatcgygccattgcactccagcctggacaacaagagtgaaactctgtctcaaataaataaataaataccatcaatattttttaatttaccccccttttcagcattttaaaattttattattttttctaacatgttatcttattctggggttatttctatatgcc

SEQ ID NO: 105859 - DNA, 599 bp, Homo sapiens
aatgtaagctgggttttgggtgatgatatgttaatgtagtttcactgattgtaataaatgtataattccggtgggggatgcgcaaaatgagggaggtagttggtatgtgggatcagtggtatatggtaaaatatatatatacacaaaatagatatattttcaaatgaaagaaaaattaaaatcataagatcccrgcacagctggactatttaaaaaatattcaggataaaacaaaatgataccaaatgagaattcagatcttctggaaagaaaagaatgcaccataaatcttaaatatcttgctaaatataatagagtatgctaacagagacatagaccaatggaacagaattgggattccagatgtaataccacacatctacaattagttcatctttgataaagctaacaaaattatgtaatggggaaaggacttcttattcaataaatggtgctgggataattggctagtcacatgcagaaaattgaaacttggccctctttttacatcatatacaaaaatcaactcaagatggattaaccacttaaatatgacatcccaaactataaaaacacctagaagataacctaggaaatat

SEQ ID NO: 105860 - DNA, 326 bp, Homo sapiens
ggagcgattgtccaaccacatctttgttgttctctccagaatgtttcctcatttttcataacatacaaatgctgagaaatttccaaatttttaagttctggtttccttttgcttaccacttctttcaatttatctttcttctctcacattttactgtaaacactaagtagaaaytaagctgctctttcaacactttgtttagaaaattcctcagctaaatatccaacttagttgcttgcaactaagttgcattccactagaacacaattcagcgaagttctttgtcactttataagaggaatcatcttccctccaatttccaataa

SEQ ID NO: 105861 - DNA, 606 bp, Homo sapiens
tctgtctgagaccaccagaatggcaccagaatggtataggtattgtccatacctataccaacattctgytcatgattattcacttattttctaagaagatgaaggctttctcttcaattctcttcttacctttctgagccctcaccagaatcatcgttaacatccatatttctatcaacagtcccttcacagtaatctaatgttttactagcatggtcctcaaaactccttcaaccaccccatctccaccaaaatctatattagtcagagttttccagagtaacagatcctgtgtgtgtgtgtatgtatgtgtgtgtgtgtatgtgtatgatttcttataagaaattgactcacatgattatagtggctgacaagtcccaagatcttcagctgacaagctggagacccaagacagctgatggtatagttctattatagtccaaaggccagtaagttcatgacgcaggaagaaccaatgattcaattttaatctgaaggcaggaagaaagctgttatcccagctgaagcagtcaggcaagaggaattccctcttccttgtaaaagggtcagccttctttctattcaggctttcaactgattgcatgg

SEQ ID NO: 105862 - DNA, 606 bp, Homo sapiens
tctgtctgagaccaccagaatggcaccagaatggtataggtattgtccatacctataccaacattctgctcatgattattcacttattttctaagaagatgraggctttctcttcaattctcttcttacctttctgagccctcaccagaatcatcgttaacatccatatttctatcaacagtcccttcacagtaatctaatgttttactagcatggtcctcaaaactccttcaaccaccccatctccaccaaaatctatattagtcagagttttccagagtaacagatcctgtgtgtgtgtgtatgtatgtgtgtgtgtgtatgtgtatgatttcttataagaaattgactcacatgattatagtggctgacaagtcccaagatcttcagctgacaagctggagacccaagacagctgatggtatagttctattatagtccaaaggccagtaagttcatgacgcaggaagaaccaatgattcaattttaatctgaaggcaggaagaaagctgttatcccagctgaagcagtcaggcaagaggaattccctcttccttgtaaaagggtcagccttctttctattcaggctttcaactgattgcatgg

SEQ ID NO: 105863 - DNA, 606 bp, Homo sapiens
tctgtctgagaccaccagaatggcaccagaatggtataggtattgtccatacctataccaacattctgctcatgattattcacttattttctaagaagatgaaggctttctcttcaattctcttcttacctttctgagccctcaccagaatcatcgttaacatccatatttctaycaacagtcccttcacagtaatctaatgttttactagcatggtcctcaaaactccttcaaccaccccatctccaccaaaatctatattagtcagagttttccagagtaacagatcctgtgtgtgtgtgtatgtatgtgtgtgtgtgtatgtgtatgatttcttataagaaattgactcacatgattatagtggctgacaagtcccaagatcttcagctgacaagctggagacccaagacagctgatggtatagttctattatagtccaaaggccagtaagttcatgacgcaggaagaaccaatgattcaattttaatctgaaggcaggaagaaagctgttatcccagctgaagcagtcaggcaagaggaattccctcttccttgtaaaagggtcagccttctttctattcaggctttcaactgattgcatgg

SEQ ID NO: 105864 - DNA, 537 bp, Homo sapiens
ttgtaaggttataattgacatatttttatgccaccccataacatatcagttcattttagtaattttgtatgatggcctccttaarataaataattaatgctcctctcaaccttctagatttgtgcagagttacaattggagactgttagaactaggaagaatctgagagcttaccctcaactcccattttgggagatgaggaaatagatgcagagcaatcccgtctcacctgaagccctgcctccaggcagccgacagagcctcacgactctatcagagaaagtctgtcttgttaggtatacagtgaagagactgtatacctttcaaaggagttgtccctcctctggccctatgtgtggagagaacccaagagcagacccggcagagtctagggacctggcaagtcaagaatctatcaataatatcgctacaacacatgagtacctgctgggggtcaggtgctagtcaaatgctttctttatttccttgacaattacttactgagaaactatcggccaggcactgttcaaagtcctt

SEQ ID NO: 105865 - DNA, 537 bp, Homo sapiens
ttgtaaggttataattgacatatttttatgccaccccataacatatcagttcattttagtaattttgtatgatggcctccttaaaataaataattaatgctcctctcaaccttctagatttgtgcagagttacaattggagactgttagaactaggaagaatctgagagcttaccctcaactcccattttgggagatgaggaaatagatgcagagcaatcccgtctcacctgaagccctgcctccaggcagccgacagagcctcacgactctatcagagaaagtctgtcttgttaggtatacagtgaagagactgtatacctttcaaaggagttgtccctcctctggccctatgtgtggagagracccaagagcagacccggcagagtctagggacctggcaagtcaagaatctatcaataatatcgctacaacacatgagtacctgctgggggtcaggtgctagtcaaatgctttctttatttccttgacaattacttactgagaaactatcggccaggcactgttcaaagtcctt

SEQ ID NO: 105866 - DNA, 537 bp, Homo sapiens
ttgtaaggttataattgacatatttttatgccaccccataacatatcagttcattttagtaattttgtatgatggcctccttaaaataaataattaatgctcctctcaaccttctagatttgtgcagagttacaattggagactgttagaactaggaagaatctgagagcttaccctcaactcccattttgggagatgaggaaatagatgcagagcaatcccgtctcacctgaagccctgcctccaggcagccgacagagcctcacgactctatcagagaaagtctgtcttgttaggtatacagtgaagagactgtatacctttcaaaggagttgtccctcctctggccctatgtgtggagagaacccaagagcagacccggcagagtctagggacctggcaagtcaagaatctatcaataatatcgctacaacacatgagtacctgctgggggtcaggtgctagtcaaatgctttctttatttccttgacaattacttactgagaaactatsggccaggcactgttcaaagtcctt

SEQ ID NO: 105867 - DNA, 527 bp, Homo sapiens
attgaatttactaaatatgtggctaaaatgtcataaaatgaatgctgatatataaaactcattttcaaatgttcttaggtaaagtaattgaatgggcatcttaatcactcttggtattctctatgacacatagattcccctatgaatataaaatagtagcaaatgcctattttaccttgcctctcttcacctatgagagagatggaaatgttgcagtcatattatatagtctgaaaatgttccatatgtaacacatgaattttatttgacatagagcacatattgtctctgatccactccttttcagatatcaaagtggtcatttaatccaggctytacttggagttcaaaagtccttccattccccaactactggtacttattaaaatgtgtcttctgagttgtaagaagaaatggagtctatttctggtagaaactccccaaagttatgttattcatacaaaatagactcaaaagaagtctcccattagagttgccaacatatttcattacatgttctattgaat

SEQ ID NO: 105868 - DNA, 589 bp, Homo sapiens
aacaataaaaagaaaatattttctgatcaaatttaaagttaaaaacaacatactctctcataagaaataagcttggacatgaccttttttagcataatgactactgtcatttcartgtcaacctttgaaagcatccattcttgttaaaaacatttgccactgctgacaatttcagaacaaaagttaagtgggaagaaacttaaatttgtcttctaataacaataccaacaaataattagtatgcaatttttgttcttctctataatccacgtgatttagagaaatatttattcagtcttcctgccacaattattggaccctgtatacttgctgatcaacagaattcattatactcagccttgtaatccaaggaagtaaaaatttgtaattatttaaagaaaaattagaacactgtattaaaacaatcacattgataacatggacttacatcatgaaagatagaaggtgttatagggaggtgataatatttatccaatatgtggggagattttggctttagaattttgtagagtcaaataagagagattataataatattttatagcaacttagagtagtgtagcaaggg

SEQ ID NO: 105869 - DNA, 607 bp, Homo sapiens
tttgtcatttgtttttgtgctttgtgttattactcttatacctccattatcgtgtgaatatttttaataaaataaaatatattcagcttttcctgggtaccttgtttataatatgaattagaaatattggtcaaaagacaccataactataaataagtgcaaagagaaggtccaaatgaaaactgaaaaaaatgctgtgtgtgtttcttcaaggtgacagaagaccagagtggtactaggagaccagccccggtgggacggcactgtgttatgactcagggtttcaggatacatctttataaagtagtttaacttccacctttcctcaaactcatgtgtttcaacattcagtttgatattttcatgtaagtccatcttctgtaattataatgactgtcaaggaaatgtagtacaggagtagagaataaagaaaragttgttgaatagaatagctctttccttcagtattatgtcttctccatcataatagtcaacatttatagggaggccttactatacaaatagtactgttctaagctgtgtacatgtatgaactcatttcatttttacagaaaccctatttagtgtctactactcttttcttcat

SEQ ID NO: 105870 - DNA, 535 bp, Homo sapiens
gctcactaaagttgagagggatgagaggaaagagaggagggagaaaatgagaatgtgactacagtgtctttgtttatttgtttataatcccaaatagaacctcacttaacacttggctcttggtgggtccaagtattattggttgattgaatgggtggtatacatgttgggaatataagcacagaattcacaaccttgaaggaatttaagttgctttcagttatgttactgagagcatctttcttcctcaatgtgtcttcctatttctgcctatatattatttaattgctgttgctttttgtcatagtttaatgtctcataggaattcttcatggataggagaataaggctgttttttcttagtgagaaaattgagagtaaatatatatttcctagttaaaagcagwgttgcatgactctgaaggggagcaattcacattccagtgtatgcagacgacattttctataaatgggcagtggccaagctgtgctctagactgtaaaacttactgggccagaaattttaccaaggtga

SEQ ID NO: 105871 - DNA, 512 bp, Homo sapiens
ataattgtttctgggtctgtaagccaaaaagtcaaaagcactctcatgttggttgaatattttatagattccaacagattttgagagtcattccacttcaaattaaaaatttagttgaataaaattaaagtataaattagattaattaaattttctgagtcttcttttgatttatctgaagctatggtctatgacattaaactytcaataacaatgtgtgtgtgtgtatatatgtgtatgtgtgtttctttgggtaaagatataggcttacaaataaataagccgtaattaagctggattctaattgaagacaaaactcttttttttccctggagatattgaaagtggcctgaaactctgtgtggtagtatcagcacagtattcttacaatccacggctgaaggacagaccaatgccctgtaaaggacatggacaagactgcacttcagaatcaagatacaaaatagataagaggttctactcccctgtttctctacctatattgtgagctt

SEQ ID NO: 105872 - DNA, 619 bp, Homo sapiens
caattcctttgagatattgctcataaaaaataaattgcatttgggtactgagtcacacacaytacctccacttgtaaatttacaatgcacattgtgtattaaagcctcttacaagtttcatttaaaacaaaaagggaaagtgcttatcttccaaatttgtcagttttctgaaaacatccagtttcatggaatacctttggtaaagtactgttcttagggcatcttttttaaaaaaaggaagaggtcacttaattgtttatctgaatttggtatgtgtatttttaaagtcatcactttagagtaatatatcacagtgtgttaagatggctaataaaaagaaaattatacttggatttacttttccatgtaaaactgaaggactgagatgtaagataccaatttggtgaaataaggatttagctcaacattgtatgtttttgagcttggccattatttaagacaacatttgagagttttgattacttgacatcctaatgtgctaaggtatcaacaactaaaaaataaagtatcatgaaaataagaatgtcttcatgaaagttaatggcagtttttctttcaatcaaggggaagtctgctgaaatgctgttgtctttgtaat

SEQ ID NO: 105873 - DNA, 608 bp, Homo sapiens
aaagagagtttggttaatggattcaagatacagttagaagcaataagatctagtgtttgatagcacaatgggaagactatagttaacaatagtttactgtatatttcaaaatagctaaaagatttggaatatcctcaacaaaaaagatgataaaatatttgaggttatggattacccaaatttgatcattacaaattgtatgcttgtaacaatgtatcacatatatcccrtaaatatataaaactattatgtatccataaaaattttaaaaggaaaacaatactacagaactgaaaaaaaaaacaattagctacctataaccaaggattttaatttaagttttttatagatgggttaagaatttaggaaaaacttggcaagtgattccaattaagtcaaatatcttagcatgatcctgaaccctcaagcccaaaccatatataaaatttttactatttagcagtggcatttcataagagtggccttacatgaataaaatggcaaaatttaactttcagatttcactaagtctgatatagtttttgaaatttattatataaaaatagagaatctaggccttatatgcagatgcaatatatgtaattcat

SEQ ID NO: 105874 - DNA, 595 bp, Homo sapiens
acatgtgacctccaacatcttgaattcagaccagcctatgtttgcatgcagctccctaacttagcaattccagtgctggtstttgttttgttttgctgtcaagccttctactatggtgtcttcttcactgaagtatttctacattacattgcccgggacaaagctattttgtatgcacagaaactcgcttcaggactttaaactattttctattctacagtggttaatttttcatttatgtggcatcttactgaagagtagtcagcagttaacaacacattgtgaaacaacaaatattttactggatatataatctccacagtttaaaagttttattttctgtgtggatctgtataaagctggaaatgttcacattttgtggatgcacatttttaataatacactctataatcactatcaaacaaatgacctgcactttaataggcactccaaacattagctgccatttctgctaaactcagtaaactctaataaaggtgttttatgggaagaggttttttttttttttaagaagatatattacttagatttcatcagcacataaaaatgttatcttgggaacactggaagattc

SEQ ID NO: 105875 - DNA, 586 bp, Homo sapiens
gaaaaacggaaagccaaataactcactggacacttattgcattccaagcatgatactacagatggttcccaacttgcgatgtttcaacttaacaattttttgattttatgakggtgcaaaagtgatatgcattcaatagaaaccatacttgaattctgaattttaatctttttccaggctagtgataggaggtacaatactctcttgtggttctgggtagcagcagggacccgcagcttccagttaatcctgtgatcacaagggtgagcaaccggttctctactgtgttgccagatgattttgcccacctatagtctaatgtaagtgttctgagcacatttaagctaggctaggtatttagcaggttgggtatattcactaggttgcgtatattaagtgcattttttacttaaagtatttcagcttacaatggctttgaaggattgtaaccttatcaagagtcaaggagcagctgtagatatttccgtgcattgttatcagaacttagtccttagcagaccctcataaataaggctgggatttttgttctgataacaagtaaggaaaatgagctcagaatcgtcca

SEQ ID NO: 105876 - DNA, 531 bp, Homo sapiens
tgaagtctctgaagctgaaaattagacagtcatctctgaattctttttawctatctctcacccttaacatctatttaattgctaaatcctgctgattttacttccaccttacctccatcctctttcattagcacctgcctagattgcaaaagcagcctcccagccatgcctctgaacttccagtcaacacaccttttggcagtgcccacctgtcctaccttacaggcaatgggatctagttgatttccctcgtcaaaccattcaatggttcttcatcacctttagtacagagcataacctacagtcatctcagtttatattgtaaaagcagagactattcagaaactggtaacagtagctgctttctgaaggggaacctgttgactgggggaatgggaagagacacttagttttcaccatgtaccctctttattttttgtaacttggtaccatagccaggtcttgcctattcaaaaaacattttttaacatatgccataagattctgcatattggcaataaaagggctaca

SEQ ID NO: 105877 - DNA, 579 bp, Homo sapiens
gtttcacactaagtatactcttcttagtcttccaacaatgctacaaagcttttaaaatatgatgctgtagattcaaaaatgctaatagactgggcacagtagctcacacctgtaatcccagcactttgggaggccaaggcaggcgggtcatgaggtcaggagtttgagaccagcctgcccaacatggtgaaaccccgtctctactaaaaatgcaaaaattagctgggtgtggtggtgggcacttgtaattccagatactcgggaggctgaggcaggagaattgtttgaacctgggaggcaggggttgcagtgagccgagatcgcaccgttgcactccagcctgggagacagcrcgagactctgcctcaaaaaaaaaaaaaaggctaataatttgcccaaggtagcagagctagcaagcaccacctgcaaacagcttcatcatggacaaaaacagcttatatttgcttagtgcttactgtgggtcagataccactctatatatttaacttgcttaattcatctaatcttcccccaaaccctagaagctaatactgttgcctaatttaagaaacctgaaga

SEQ ID NO: 105878 - DNA, 579 bp, Homo sapiens
gtttcacactaagtatactcttcttagtcttccaacaatgctacaaagcttttaaaatatgatgctgtagattcaaaaatgctaatagactgggcacagtagctcacacctgtaatcccagcactttgggaggccaaggcaggcgggtcatgaggtcaggagtttgagaccagcctgcccaacatggtgaaaccccgtctctactaaaaatgcaaaaattagctgggtgtggtggtgggcacttgtaattccagatactcgggaggctgaggcaggagaattgtttgaacctgggaggcaggggttgcagtgagccgagatcgcaccgttgcactccagcctgggagacagcaygagactctgcctcaaaaaaaaaaaaaaggctaataatttgcccaaggtagcagagctagcaagcaccacctgcaaacagcttcatcatggacaaaaacagcttatatttgcttagtgcttactgtgggtcagataccactctatatatttaacttgcttaattcatctaatcttcccccaaaccctagaagctaatactgttgcctaatttaagaaacctgaaga

SEQ ID NO: 105879 - DNA, 622 bp, Homo sapiens
attatatttcttggtgaaatttgatttcacactttcttagatgattattttgtaaattattctcactgcccatccatttgcctccactatacccctatttgccatctgataacccttcctcaaatttcactttaccaataaaatagaagaggaagatgacaaaagctaacactaaatcttggaagccacattctctttgcccacagttgtctttccacatgatgtaggaaatgcctcagtcttcctaactttggcctgcagctcttatgcttgggatcccatctactttgcctactgaataccctcgtttacacaaacaccctttcttttttatgattcattgaattcaccctcctagttcagtactccagtcatcttgcaaacgactataattccttccttgcaaccaatgccccccttcatttgcttgtccatstctagcaaattattttgctgtaattttctgtatcaatttacagcaaaattctttttgttattaaaaacaacttattgtttttatatttcttaaaaattttactttagacttggggcacctgttgcaagtttgttccattgtataatgctgaggtttgggcttctaatgatcctgtcacccaagtag

SEQ ID NO: 105880 - DNA, 544 bp, Homo sapiens
aagtaattgtgaaactttattacttatcattttaaaaattctcatttattataaaatataagtgtttggaacgtttccccttccctgtgtttatacaaaaacctgcctttgggagaattgcttgaacctgggggatggaggttgcagtgagcagagatcacgccccttcaccccagcctgggcaaaagagtgaaattctatctcaaaaaaaataaaagaaaaagaaaaaggaaggaaggaaggaaggaagraagaaagaaagaaagaaagaaagaaagaaagaaagaaagaaagaaagaaagaaagagagaaagaaaagcaagcaagcctgccttcagaaatatttattaccagaatgaagccctcactatatatcagaataatttcactggaagataaagacaggataataagtgctaatgattgtgccttacttatgtagtgccaggcactatgcttaagagctttacataatgagcaatcctgaggttagaaaagaaaaaatagatgtgaacacacacacttctgtgagtgaaattgcatg

SEQ ID NO: 105881 - DNA, 561 bp, Homo sapiens
cggcaactgggaggtttcagaggatttcacctgtcttcctcattaaaatattagggcccttttatgggtgttactccaaatgtattatatgtaagcataaatttcatacttgggaatcagagaaataagttgacaagcacgtgggcggtcagagagtggatccattataagccagaatttaacgggcactccatcaattacctggttccgtatgcatccactctaaccagagaacaatggtttgcatcatatcaatgtcaacttagatgtgtgtcccatagttcacacatggtctggatgttccctttttctcactgtgcagaaactgacatagtttctttgagtaaggaaaataattccaatatatatttgttggggtgcggcagagttcttccacctagagacctagctatcgctttagttcatgagttccagatttaaaactgggctgtttctcaaatggagcaagggacatagctggctacctaattaatgggtctcataattaacgggtctcaatgcaaatcaarttgtgaggtcccttattgaaaaagcagaaaa

SEQ ID NO: 105882 - DNA, 627 bp, Homo sapiens
tccctttgctcctccctgcgtgtgaccacccctagggggcaggaagtggacccagtggaggrgggtgctagagatggttgccctggggtgtcaccatctgctatgttgagtgtcaccaatgtagcccagcatttcacaacccaccccaaaagcccctctgaagggcagcctcctattcccaggcaactgcagaggagcctcaagggagaatccaagtggccaggatgattggaaacaggagaccaggtgtgcactagcttcagccacatctgcatggagaccaggcagttcacctgtggcaggtggcagctgagccttggccctggtgggcctgctgggggcccaacattagagatgtgggggcccctccttctcttggcagtgaaacagaaatattcacctggaaggagcagaaacaacaaatcattcaccaaacagactacggctgggaaaaagctaaattcactctgagaagacaagccaacgagggtcctatcccaggctctggaggctgcaaattccagtgccgctttaattggggctggctatgatgctcagtggggacccaggcagtgtgctggggatgggatggaattaaaatcagaatcattgtctttcctttttaaa

SEQ ID NO: 105883 - DNA, 627 bp, Homo sapiens
tccctttgctcctccctgcgtgtgaccacccctagggggcaggaagtggacccagtggaggggggtgctagagatggttgccctggggtgtcaccatctgctatgttgagtgtcaccaatgtagcccagcatttcacaacccaccccaaaagcccctctgaagggcagcctcctattcccaggcaactgcagaggagcctcaagggagaatccaagtggccaggatgattggaaacaggagaccaggtgtgcactagcttcagccacatctgcatggagaccaggcagttcacctgtggcaggtggcagctgagccttggccctggtgggcctgctgggggcccaacattagagatgtgggggcccctccttctcttggcagtgaaacagaaatattcacctggaaggagcagaaacaacaaatcattcaccaaacagactacggctgggaaaaagctaaattcactctgagaagacaagccaacgagggtcytatcccaggctctggaggctgcaaattccagtgccgctttaattggggctggctatgatgctcagtggggacccaggcagtgtgctggggatgggatggaattaaaatcagaatcattgtctttcctttttaaa

SEQ ID NO: 105884 - DNA, 532 bp, Homo sapiens
tggaatgcagagaaacttaagggtgtcagccttgaagactggtgtaatgcggccacaagccaaggaaagttggcagccccctgaaattggaagggagaatggggtgggttctcccctagagccgtcaaaggggccctgctgataacctcaactttaacgcagccatactgatttcaggcttctagcctccatggctgtgagaaaataaatttgcattgttttcaatatgtgtggtcatttgttacagcagccacaggaaaggaacccagatgcagggagagggagtgaggttactgggctacttagagaggacctgcagamagagagacgcagccaccagcagagccctggctgggcctggggggactctaactgcctcttcttacccctcctgctgcaatcacctgttggcgcctcccatgggctgaccccagccagaaggtgaaggacaggtaagggagccatgggtgatgcagtccatcgggccagcctccagggcacagaactggtggttgagggggacacatggctc

SEQ ID NO: 105885 - DNA, 588 bp, Homo sapiens
tattgcaccacttcattccagcctgggcgtgacagagagagacgatgactcaaaaaaaaaaaaaaaaaattaaacattagctaggcatggtggtcatggccaaactctgtcaacggttcctttcaggactaayactgtaatcccataaagagccaggtcaattcaaagatcagaagaaaggcgatgcctccgtctagagcatatatgcaagctcacataaggtttcaaatacacaaaggtttgctgacagagacaggatgttctgattctattttctatgttttagcttcaacagaaataatgtggtccacttgctataaagacttctctcatgtataacttctgatttaacatgaattacagttttacagttaaacttttaaaactggtagagaggagaggattatttattgagtgtgctaattaacaaaagttttggtttggtctattgtctttttattatcatcacccaagattcatacttgtacaaatatgctttggggaacagccttccagaggtttacctatgttaagtcccacatatgaaagagcggtgaatactttcctgaggcagcaaacactattgaa

SEQ ID NO: 105886 - DNA, 588 bp, Homo sapiens
tattgcaccacttcattccagcctgggcgtgacagagagagacgatgactcaaaaaaaaaaaaaaaaaattaaacattagctaggcatggtggtcatggccaaactctgtcaacggttcctttcaggactaatactgtaatcccataaagagccaggtcaattcaaagatcagaagaaaggcgatgcctccgtctagagcatatatgcaagctcacataaggtttcaaatacacaaaggtttgctgacagagacaggatgttctgattctattttctatgttttagcttcaacagaaataatgtggtccacttgctataaagacttctctcatgtataacttctgatttaacatgaattacagttttacagttaaacttttaaaactggtagagaggagaggattatttattgagtgtgctaattaacaaaagttttggtttggtctattgtctttttattatcatcacccaagattcatacttgtacaaatatgctttggggaacagccttccagaggtttacctatgttaagtcccacatrtgaaagagcggtgaatactttcctgaggcagcaaacactattgaa

SEQ ID NO: 105887 - DNA, 634 bp, Homo sapiens
tggaaatgaggcaatagatgcaatcaattctacagaaaaggaagagataaaaatatggtataaaacagaaggggaaaaagatgtaaaagaaartaaatttaaaggttaattttaggcaaagaactttgtacatttaagtgaacacaatgatcttattattacttaatgttcttttttaacttttaagtttaggggtccatgtgcaggtttgttatgtaggtgaaattgtgtcatgggggtttgttgtacagattatttcatcactcaggtattaaacctagtaccaattattttttctgatgctctcccttctcctaccttccaccctctgataagccccagtgtgtgtaaaatggtcttggactttttttctgttaattgacttttttttttttggcttctgtaaatttttttttggagtccatatgtgccaaattttttttgattgttctgaattagttttcttatgaaaagattaatataatggtgaaagagaataatcttagagatctcaaaatatcctcctcccaaacacttccccacaaaagtagagagtaataaaatgaatgtaaactacagactggaaatgttgtttctaacttttttaaagaaaacaaaaatatggagatatgtg

SEQ ID NO: 105888 - DNA, 634 bp, Homo sapiens
tggaaatgaggcaatagatgcaatcaattctacagaaaaggaagagataaaaatatggtataaaacagaaggggaaaaagatgtaaaagaaagtaaatttaaaggttaattttaggcaaagaactttgtacatttaagtgaacacaatgatcttattattacttaatgttcttttttaacttttaagtttaggggtccatgtgcaggtttgttatgtaggtgaaattgtgtcatgggggtttgttgtacagattatttcatcactcaggtattaaacctagtaccaattattttttctgatgctctcccttctcctaccttccaccctctgataagccccagtgtgtgtaaaatggtcttggactttttttctgttaattgacttttttttttttggcttctgtaaatttttttttgragtccatatgtgccaaattttttttgattgttctgaattagttttcttatgaaaagattaatataatggtgaaagagaataatcttagagatctcaaaatatcctcctcccaaacacttccccacaaaagtagagagtaataaaatgaatgtaaactacagactggaaatgttgtttctaacttttttaaagaaaacaaaaatatggagatatgtg

SEQ ID NO: 105889 - DNA, 559 bp, Homo sapiens
acgtggctggggaagcctcacagtcattgtaggaggtaaggaggagcaagtcatgtcttacatggatggcagcaggcaaagagagagagatcttgtgcaggggagygtctcttattaaaaccatcagatctcgtgaaacttattcactatcacaagaacagcacagaaaagacttatccccatgactcaattacctcccaccagttccctcccacaacatgggagaattcaagatgagatttggatggggacacagccaaaccatatcagtacttaatggactgaattcatcaagtgattacaagtaaatatttttctttttaaaaatttaacaaatatattatattcctatttgttattatttataaataatgaatatatcaagcaataattatcaaatgctatatttaaatgtctagtgtttttaggaatattgaatatcttattattgttatactttactgattaaaatgccatgaattaacatacattgtatacttgctttacatatttaggtatagaaccagaaaattaattgtctaaaatctactccacagtt

SEQ ID NO: 105890 - DNA, 559 bp, Homo sapiens
acgtggctggggaagcctcacagtcattgtaggaggtaaggaggagcaagtcatgtcttacatggatggcagcaggcaaagagagagagatcttgtgcaggggagcgtctcttattaaaaccatcagatctcgtgaaacttattcactatcacaagaacagcacagaaaagacttatccccatgactcaattacctcccaccagttccctcccacaacatgggagaattcaagatgagatttggatggggacacagccaaaccatatcagtacttaatggactgaattcatcaagtgattacaagtaaatatttttctttttaaaaatttaacaaatatattatattcctatttgttattatttataaataatgaatatrtcaagcaataattatcaaatgctatatttaaatgtctagtgtttttaggaatattgaatatcttattattgttatactttactgattaaaatgccatgaattaacatacattgtatacttgctttacatatttaggtatagaaccagaaaattaattgtctaaaatctactccacagtt

SEQ ID NO: 105891 - DNA, 550 bp, Homo sapiens
atcaaaactttacatcatactccataaatatatgtaattactacttatcaatttaaaaaaatgaaattaaaaacaatttcatttatagtagtatcaaaagggacacatttcttagaataaacttaaccaaaaaatacaagacttatacactgatgactacaaaacattgttgaaataaatgaaaggcctaactaaataaatagaaagatttcccaaggccatggataggaagacaatattattgagatgacaattctctccaaactgatctatagatctaacacaatctttaccaaaattctaaccagctctttttcagaaattattaacaagctgatcctaaaattcatgtgaaaatgctagggacccagaatagccaaaacaatctaggaaaagaacaaacttgaarttttcacacttcctgattttcaaacttattataaagctatagtaatcagaccatatggtactgacataaggaaaacatagatcaatgaaatgtaatcgagtgtccagaaataaaccctttatttatggtcaattgattttt

SEQ ID NO: 105892 - DNA, 489 bp, Homo sapiens
aggtattaggggctgaattgggtcccctcaaattcacatggtgaagtcctaacccccagcacctcagatcgtgactgtttggagacaaggcctttaaagagctgattaagataaaatgaggtctttagkgggggcctaatccaatccgactgttgtccttataagaagagatgaggacacacacacacacacacacacacacacacacacacacacacacacggaagaccatgtgagggagacagcccacgtggggagatggccatctccaagccacagagaggcctcagaggaaaccagccctgccaacgcctggctctcagcctcccacccagcctgggccactgtgttgggcagccccagcaggcgaactcatcaggtctctgccattgtctttgcttgcttcctgcctacaacaggctgagctttcactttgaatgaaaatcacacaagatatatgaacaactgaactatggtcatgaccatagt

SEQ ID NO: 105893 - DNA, 489 bp, Homo sapiens
aggtattaggggctgaattgggtcccctcaaattcacatggtgaagtcctaacccccagcacctcagatcgtgactgtttggagacaaggcctttaaagagctgattaagataaaatgaggtctttagtgggggcctaatccaatccgactgttgtccttataagaagagatgaggacacacacacacacacacacacacacacacacacacacacacacacggaagaccatgtgagggagacagcccacgtggggagatggccatctccaagccacagagaggcctcagaggaaaccagccctgccaacgcctggctctcagcctcccacccagcctrggccactgtgttgggcagccccagcaggcgaactcatcaggtctctgccattgtctttgcttgcttcctgcctacaacaggctgagctttcactttgaatgaaaatcacacaagatatatgaacaactgaactatggtcatgaccatagt

SEQ ID NO: 105894 - DNA, 572 bp, Homo sapiens
ttcttctcctaggtatatgcccaaaagaattgaaagcagggactggaagagatatttgtacattcatgttcatagcagcctcgtttataatagtcaaaaggtgaaagcaacccaagtccatcaacagatcaatagataaacaaaaattatggtggatgcatacgatggaacattattcagcctccaaaaggaaagaaattctaacacatgccacaacatagatgaactttgagaacattatgctaattgaaatgagccagtcacaaaggacaaagactatatgattccatttatatgaggtacctggaggagtcaaatgcagatagaaagttgaaagggggttaagaggaggcagaatggggagttagtgttcaatgggtacagaaagctgcctcaggcttacttcaccagatcataaaatttttaacttaaatctacttgagtcaccctcttcccacttggacgtccctgttcgcagggctgttcacagctgtgggtcatcggaccaggcaggagcctygtggtctgcatgtgtcacggtgaagccctccttcatcctgcccacagggccc

SEQ ID NO: 105895 - DNA, 621 bp, Homo sapiens
caaaagaatggttcaactctgtgagatgaatgcacacatcacacacaagtttctcaggatgcttctttctagtttttatgtggagatatttcctatttccccataggcctcaattggctcaaaaatatccctttgcagattctgcaaaatgaatgtctccaaactgcacaatcaaaagaaatattcaactctgtgagatgaatgcacaaatcacaaagatgtttcacagagtgcttcagtctagtttttatatgatgatgtttccttttcccacatagacctcaaagcgctccaaatatccacttgaagattcttcaaaaagcgtgtttcaaaactgctcaatcaaaagaaaggttyaactctctgagacgaatgcccacatcacaaaggaggttctgagaatgcttctgtctagtttttatgtgaagatatttccttttccacctgaggcctcaaagtgctccaaatatctattgcggagtctaccatagagtgtttcaaaattgctcaatcaaaataaagttttggctctgtgatatgaatgcacacatcaccaagaaatttatcagaatccttctgtctagtttttatgtgaagatatttcctttttcatgataggcc

SEQ ID NO: 105896 - DNA, 454 bp, Homo sapiens
acactgcccttggtactgaaaacaaggacattcaggtgccgtgggatagaatagatgaaattaggaccatcttggaaaatctggcacctgtgcttgctaaaacttgggatgtgttcagggatgggaaagtggtagggtttaagtcagtatatgagaagtgtgtagttgggacaatacagtagccaactagccacatgtggcattaagcactttgagtatgtcttatccaaattggggtgtagtctaagtgtgaaataaatgctagatttcaaagatcaagtataaaaaatgtaaaatagctcaataatttttatattgattacacattgaaatgtttctaaaattacatcttaaatatatttttaaagttaatttcacttttttttactttttaaaatgtggctactagaaagttttaaattatrtatatggctcacattatatttttattgga

SEQ ID NO: 105897 - DNA, 346 bp, Homo sapiens
ggctactatgaacacttacttctatgtatactatttagaaaatstagaagaaatggataaatttctgcaaatgtacaacctcccaagattgaaccaggaagaaattgaatccctgaacagatcaatatgagttcttaaattgaatcagtaatataaagcttaccatccagaaaaagctcaggaccagatggattcacagatgaattcgacctgatgtaaaacgaacaactggtactattccaaaaaattgaggcaagaccccctccttaactcattctataaggccagtatcatcttgacaccaaaacccagcagggacacaacaacaacaacaacaaactgtagg

SEQ ID NO: 105898 - DNA, 589 bp, Homo sapiens
tgctgtataatgtgagtgaagggcattctatctcctgtgtgcccttctgggtccactctccattgtgccctcaggtggctaatttcaagggatcacattggtgggcccttggccctctgatatgtggtgggttcagccatttggaaaccctggcaggtgactagagggagagagtgaggtggattttcacaatcagggtaccgtatttcttcccccttggttccgtctccagaggactaattacattgcttcggcaaaggccacggcacctatgagggcaactctccgtcctcggcattctctttatgctttcagtaatctctccgttccctacccaccccctgcccccaactgaggataataatggctacagggtactacactatcatttcaggtttctctagagctggctcacacctttttaaacaaaacttttggttyacccctccacaccttatcctaatttgggtgtactatttcctgctggaacactaatatctatgctattcactaagacatgctctgaggatatataatctgtgcctttaagaaactattattcttgaagttggagcagaagcaagaaaat

SEQ ID NO: 105899 - DNA, 515 bp, Homo sapiens
cactaattcccaatacaaatgtggttatatctgtccttcagtgtgtcaattatgaccaaagaaaaactgagtaaattatctacattggacttgggtgcctcccaggtcctacaattcaatgtatttaaaatctaccatgcaatatttcaatatttctacaaaaaacttgacctcctctaatcagctccattmcaacagatattaccagtcattcagttgctttgcctagaacactgaggtacctttggtagggcagacttataaaatataggaagccagttacatttgaatttctaacaaataatgaaattttttagcaaaggtgcagcccatgcagcatttgctcagactaaaaaaagttatctgaaattcaaattaaactaattctgtattttactaaaacaaaagcttgcatcctccacttctctgaccccctatattttgctaattaccaagtcctatggatgttgcctcctaacaattttaaaccttccactcttcatccccgctacgac

SEQ ID NO: 105900 - DNA, 645 bp, Homo sapiens
tgttctaatgttgattttctacttccctcattccttctacattttaaaattatttgaaattcttcggcagggacgatttattccttcactcccattaattaattagtaatatgtcttttaattaaaccatgtggttaacttacacttatgagattactaaagtatttggctttaaatctaccattttactagtactttctatttcagccacctgttccatatttccttttctcttggattttttactttaaaaattactcaatttcttagacaatagcaaaacaaatatgacaaaatgatataaaatccttttggtgtgataagtatgttcattattttattgtgattattgtttatttgtgtttacaaatgtcaaaactttgtcaaataycacagtttaaaagttgctgtctgttgtgatccagagcaatcagacaagagaaaaaaataaagggtatccaaatcagtaaagagaaaggcaaactgtcacttttcatcgatgatatgatcatatacccagaaaaccctcaagattcatccaaaaagatcctagatctgataaatgaattcagtagagtttcaggatacaaaatcagtgtacacaaattagtagcactgctatacaccaacaatgaccaagctgag

SEQ ID NO: 105901 - DNA, 566 bp, Homo sapiens
ttattaataattttcaatctggccttttttaaaaagtargcacagtcacggacagtaaaattaaaatatcaactatttcagtaatggtagggaagtatttacaaagtgccttttgtaaatatgaaatgtctcagatccactgcattatatgtggagtaagggtagataaaatttaatttagaaaaaatgtacccctgtcttcatttaaccactcacaaacatgggctactgatcaaaagaagaggagaatttctgctggttgagctgaacaaacccatttctaagcaaggggtggggggactgcatgtctgctaacagtggatcagtaaagatgagcagtcttgaatgagatagagaaattgtgagaatgttttgtgttctttgttttgttttacatagcaagaacaccagaatagaaaatcttcaagtctgcaagccatgggagcagtaattaacacagtggtgctgttggttttcttttctttcttctttttattctttttaatttgaggatggtagatcagacagaaagagatggaggattttataaacattcatgcagcacc

SEQ ID NO: 105902 - DNA, 679 bp, Homo sapiens
attatggatttaaatggcacatgaaagattcattcccacacacactgggctaagaacttcacatatatgatctcattttctccttacaactctgtaaagtaagacctatccatattttagagttgaaaaaccagtaagtacagagaaattaaatcacttatttaaatcatatgccaattagtggtagagctgggattcaaactcagatttagagtgttgggacccagctaaacaagttgggttcaagccagagtyatagctctattccagtccaagaactatcatccatgtaaacatgacaagagttagggagaggaggctgaaggtttcatccatgccataaaaggcaccaaaatagaatagttagagcctactcactggtaaaaggaaacagtctattctacctccctgtcttggtctagattgactcagtttggaaggagcagaaattattggtgccaggacttggtgactacagctgagcagaaatcaactaaaatccaagataataagaatcttaaataactgaatgggacagtctattgactggaatcttaggagaataggggaactctaagaatagacagaaactaagtgaaaactgaacaaaggctatagatcaaaatcctgtactctacagcttcataacaaattacaccaaaattttacaccaaacgta

SEQ ID NO: 105903 - DNA, 499 bp, Homo sapiens
ctgattttgctacttgctgattgtagacccccagggccctgagcaaacaagggcactttccagggagtggttacaaaaggccttgggtgagaccaagtgctgtgatggctttgggtctgaccccagtgcagccatagtggtcatggccacaggtgagcttgtgtcactccaccctcagctttagatggctcaaaacagagagaaagactctatttgttggggggaaagtaagggaggagaacaagaatctctgcctagtaatccagagaattctcccggaacttgtccaagacaatcaaggcagtatctctatgagtctctaagaaccacagcattactgggcttggggtgcctcctaaagcacacacaacttagatcacaacaccaaagccctttagaatatttggaaagccttcctaagaaggatgggtacaaatgaggccaaacagtgaagactamaataaataagacatactatttgatagtcaataataattta

SEQ ID NO: 105904 - DNA, 522 bp, Homo sapiens
acttgccttatggccaagcatgtggtgaaggcatgagtacccttcttgtgcagatgagaaaaacgtgtattctattattgtagagtggagtattctatagatgttttaggtctagttggtcaaatgtcaaatttaagtttagaaatactgttggcttcttttctgccctgaygtatctattgctgtcagtggggttatcattgtttggttgtctacatcatttcataggtctattcgtaattgttctataaatctgtgtactccaatattgaatacgtatatatttaagttagttatttattcttgtagtattaaacaaacccgttattattaagtaatgattttctttgtcctttttaatgttgctggcctaaattctgttctatctgacacaagaatagtgacccctgctctttcttgtttttcatttgcaggtaaatcttactccatctctttcctttgagcctgtaggtgtcgttacatgagagatgggtcccttgaaggaagcagatggttgggtgt

SEQ ID NO: 105905 - DNA, 661 bp, Homo sapiens
cttacaaaaaaaatgtttcaaaattattactagaggtttttgaaatttgtactatgagtttttataagccatcgatttctaawatattttgactataactttaaaactaacattattcttagtaaagaaccacgtccacacattatttatttatttatttttaatcaactaatgacctggcacacaactagtggactcatggaagtctgaaaccctattttaaaattgccaaccttagtcccagctactcggaagactgaggcaggagaattgcttgaacccaggagacaggagttgcagtgagccaaggtcttgctactgcactccagcctggctgagagtgagaccttgtatcccaaaaaaaagaaaaagaaaaaaaaaagaaaacattaccaatctttttgatgtttcatggaaaccatgttgaagttgtgtttccttatacattcagagaaaacttttgtcatgcattttatagattctagccagccaagaaataacataaattctgtgttaagaagaaaataataaatattgaatcaattaaaatatattaataatgagtttaaaatacagatagtctggttagaaatggggaatattacaaatattgacattgtgtgtggttagaaaatatggagaattatatatgtgctatgaa

SEQ ID NO: 105906 - DNA, 661 bp, Homo sapiens
cttacaaaaaaaatgtttcaaaattattactagaggtttttgaaatttgtactatgagtttttataagccatcgatttctaaaatattttgactataactttaaaactaacattattcttagtaaagaaccacgtccacacattatttatttatttatttttaatcaactaatgacctggcacacaactagtggactcatggaagtctgaaaccctattttaaaattgccaaccttagtcccagctactcggaagactgaggcaggagaattgcttgaacccaggagacaggrgttgcagtgagccaaggtcttgctactgcactccagcctggctgagagtgagaccttgtatcccaaaaaaaagaaaaagaaaaaaaaaagaaaacattaccaatctttttgatgtttcatggaaaccatgttgaagttgtgtttccttatacattcagagaaaacttttgtcatgcattttatagattctagccagccaagaaataacataaattctgtgttaagaagaaaataataaatattgaatcaattaaaatatattaataatgagtttaaaatacagatagtctggttagaaatggggaatattacaaatattgacattgtgtgtggttagaaaatatggagaattatatatgtgctatgaa

SEQ ID NO: 105907 - DNA, 661 bp, Homo sapiens
cttacaaaaaaaatgtttcaaaattattactagaggtttttgaaatttgtactatgagtttttataagccatcgatttctaaaatattttgactataactttaaaactaacattattcttagtaaagaaccacgtccacacattatttatttatttatttttaatcaactaatgacctggcacacaactagtggactcatggaagtctgaaaccctattttaaaattgccaaccttagtcccagctactcggaagactgaggcaggagaattgcttgaacccaggagacaggagttgcagtgagccaaggtcttgctactgcactccagcctggctgagagtgagaccttgtatcccaaaaaaaagaaaaagaaaaaaaaaagaaaacattaccaayctttttgatgtttcatggaaaccatgttgaagttgtgtttccttatacattcagagaaaacttttgtcatgcattttatagattctagccagccaagaaataacataaattctgtgttaagaagaaaataataaatattgaatcaattaaaatatattaataatgagtttaaaatacagatagtctggttagaaatggggaatattacaaatattgacattgtgtgtggttagaaaatatggagaattatatatgtgctatgaa

SEQ ID NO: 105908 - DNA, 661 bp, Homo sapiens
cttacaaaaaaaatgtttcaaaattattactagaggtttttgaaatttgtactatgagtttttataagccatcgatttctaaaatattttgactataactttaaaactaacattattcttagtaaagaaccacgtccacacattatttatttatttatttttaatcaactaatgacctggcacacaactagtggactcatggaagtctgaaaccctattttaaaattgccaaccttagtcccagctactcggaagactgaggcaggagaattgcttgaacccaggagacaggagttgcagtgagccaaggtcttgctactgcactccagcctggctgagagtgagaccttgtatcccaaaaaaaagaaaaagaaaaaaaaaagaaaacattaccaatctttttgatgtttcatggaaaccatgttgaagttgtgtttccttatacattcagagaaaacttttgtcatgcattttatagattctagccagccaagaaataacataaattctgtgttaagaagaaaataataaatattgaatcaattaaaatatattaataatgagtttaaaatacagatagtctggttagaaatrgggaatattacaaatattgacattgtgtgtggttagaaaatatggagaattatatatgtgctatgaa

SEQ ID NO: 105909 - DNA, 536 bp, Homo sapiens
attcttgtttttgttgcctgtgctttgaggtcatatttataaaatattcaggcacggtggctcatacctgtaatctcagcactatgggagactgaggcaggtggatcacttgacgtcaggagatcgagaccagcctggccaatacagtgacatcccgtctttactaaaaaataaaaaataaaamcaattagctaggtgtgatggtacatgcctgtaaacccagctactagggaggctgaggtaggagaatctcttgaaccagggaggttgcagtgagctgagattgtgcctctgcactccagcccgggtgacagagtgagactccatctcaaaaaaaaaaaaaaaaaaaaaaatccccagacaaatgacctgaagatttttgaattgattttttataaggtaaaaggtaggtctagtttcattttttctatgtgtggataaccaatttttcagcaccatttattgaagagactgtctttttcctaatgaaggttcttgacacctttttcgaaagtcatttagtagtaactacatgg

SEQ ID NO: 105910 - DNA, 637 bp, Homo sapiens
caacatcttgtttcaaagagaagggggggtaaaaaaaattctagctcacaaaatcttagggagttttataactaaatcttataagacatttttggagctgagtttactcttacaacagwgtccttgggttatttaagtgtaaatgaatcagaaaggtccagatcagatttcccttgaaatacacaaagtttagaaatggaaggagtggtggctcagccaaaagcactctctgtttgggcaaagccacagggtggctggaatcacagtatttgcagagatttcccacagagacacagaattggatcccagagaactgtgccattagacagcaatggggtcttggcaccttcctcaattcctgtgcccatgcccaggccacccaagggccttaggagttcctgggtaagtgatggccaaccgccaggagtacttctataaatgagcacctctggacataaaggaaagagagaagttgtactcccagcttagagccccttagtaaaataatggagaaaacgaggagacacaggatacgtcactaaaagagcaggcctctgtgccatggaagaggtccagcacaaactaagggcagcatcagagaaaattaaacaacttaaagaaatgtaagagcattgga

SEQ ID NO: 105911 - DNA, 609 bp, Homo sapiens
ttttctgtcttctgcttccaccatgcagcaacagggcagaatgaggcaatatgacatgacactctattcaatgatactctgcctcccccaatatccatatcagcaaggaccaaggaaaagctgaacttccactcccagctgccaacaacaagacacaataaggtagggctaggcaacattcatcaatacttttacttcctgcccaccccacatagtgttagtagggtgtagcagagagctaatatttaactccaaccaacttagcgagtgtcattgctgcagaaagaagccatgcaagtttgtggtagttcacctttcacctccctcctactctcctcttccctcytatcagagggagcagaatgtggagctgaatttcatgctctcaaacagaaacagtaagttctcaaacagaaacatatgagtcagtgatctaattttgcttagaggtgtaagcagggccaagaaggaaactgaatttcaaccaccactgcttgacaatgagacagggcaagatggtggaagttcaagctctgcatttgttaggatggtagcagtgaggcccagcagaaaactaaacatccgctttcacttcgacttgtgtgatat

SEQ ID NO: 105912 - DNA, 524 bp, Homo sapiens
ttttcctaaaacctattcttagaaataggctagaatccagtacatttgcttagacttcaatgtagtacgmtgttgaggtaatctcattttgctaagtgttgacgtggattttttcagcatgattccttttgatgttcagttggttgggacaagatatttccacagcactttgatgatctgaagaaagaataaatctaaagtgttcttgtacacttaaacaaatactcatgggcttcattttctttaaatccaagacttcccttagggtattgttgttttgtttgtgttttagtggaaatagcactgaactggtcttttagcctcaccagattctgtaaacagttcaactgtttacttagttgcagggacatggacaagtggtttaatgtcgctgaacatcatttatttcatctgtgagataacgctaacagtcctattctgctcattacataagatcactagtgaggaacacaaattgtgtaaacaagttttataagaattgccaaataaatgtaaggcattat

SEQ ID NO: 105913 - DNA, 547 bp, Homo sapiens
ctattatcctacataaatcaaagctctccattatgcattaccttccattttctttgtagttcagctagaagtagttttcttttttgcccatactttctaggtatttatgtaaattctcaattcccatggatgcttacagccttttccttttgaaggtgttctcagactagctctggtattctcaagagtaaagaggatgtgttgtacataytttgtatctcttcaagtgcctggtacagtgttctgtacacaatgaaaagtttttgttttttttttttgtggtggagtctccctctgtcgcccaggctggagtgcagtgacacgatctcggctcactgcaacctccgcctcctgggttcaagtgattctcctgcctcagcctcccgagtagctgggatttataggtgtgggccaccatgcccggctaatttttgtattttttttagtagagacgaggtttcaccaggctgatatccaactcctgacctcaggtgatccgcccgcctcggcctccaagagtgctgggattacaggagtgagccaccac

SEQ ID NO: 105914 - DNA, 572 bp, Homo sapiens
aaaaaaccaaaaaaaaaaacactgggcaaactctccaggatatcggcctgggcaaagatttcttgaggaataccccccaagcataggcaaccaaagcaaaaatggacaaatgggatcacatcaagttaaaaagctcttgcacaggaaatgaaacaacaaagtgaagagacaacccacagaatgggaaaaaatatttgcaaactacccttctgacaaaggattaataaccaaaaaacacaaggagctcaaacaactttatagggaaaaaacctaataatctgatttaaaaatgagcaaaagatctgaatagacatttcacaaaagaacctgtgcaaagggccaacggtatgtaaaaaartgcttagcgtccttcatcagagaactgcacatcaaaactgcaatgaaatatcatctcaccccagttaaaattgtttatatcaaaaagacagacaataagtgctggcaaggatgtagagaaaggggaaccctcatacattgttggtgggaatgtaaattagtgtaaccaccatggagaacagtttggaggttcctcaaaatctaaaaacagagct

SEQ ID NO: 105915 - DNA, 572 bp, Homo sapiens
aaaaaaccaaaaaaaaaaacactgggcaaactctccaggatatcggcctgggcaaagatttcttgaggaataccccccaagcataggcaaccaaagcaaaaatggacaaatgggatcacatcaagttaaaaagctcttgcacaggaaatgaaacaacaaagtgaagagacaacccacagaatgggaaaaaatatttgcaaactacccttctgacaaaggattaataaccaaaaaacacaaggagctcaaacaactttatagggaaaaaacctaataatctgatttaaaaatgagcaaaagatctgaatagacatttcacaaaagaacctgtgcaaagggccaacggtatgtaaaaaagtgcttagcrtccttcatcagagaactgcacatcaaaactgcaatgaaatatcatctcaccccagttaaaattgtttatatcaaaaagacagacaataagtgctggcaaggatgtagagaaaggggaaccctcatacattgttggtgggaatgtaaattagtgtaaccaccatggagaacagtttggaggttcctcaaaatctaaaaacagagct

SEQ ID NO: 105916 - DNA, 539 bp, Homo sapiens
ttatcctatcagctgggcattgtgcagtgccttgttcacactttttgrcaacattttcagataaatgtttggattgggggaaggaaaacacagtaaatgtctacaaaaagcctgggtcaatttcaatgaacaaataaataaataattagagaattataaattaaaataaagtagcacattttgctcataaaatttacagatttaaaaatattaacagtattccataagagtaaaagggtgcaaaaacagactcataaattgtcaatgggagtatataaattcagaatatccttttagaggataatagggcaggatacatataagatatttgagtgcacatatattataactcggcaagataggaatcaatcttatagaaatagttacataggagaaaaaagacatattaaaggctatccattgaaaaatttgaaaccgcttaactgttcatcaatagaggcatgatttagtgtattttggtgtatgaattaatgtctatacatgacatacaaagctctataaggcatattgctaagcaa

SEQ ID NO: 105917 - DNA, 539 bp, Homo sapiens
ttatcctatcagctgggcattgtgcagtgccttgttcacactttttggcaasattttcagataaatgtttggattgggggaaggaaaacacagtaaatgtctacaaaaagcctgggtcaatttcaatgaacaaataaataaataattagagaattataaattaaaataaagtagcacattttgctcataaaatttacagatttaaaaatattaacagtattccataagagtaaaagggtgcaaaaacagactcataaattgtcaatgggagtatataaattcagaatatccttttagaggataatagggcaggatacatataagatatttgagtgcacatatattataactcggcaagataggaatcaatcttatagaaatagttacataggagaaaaaagacatattaaaggctatccattgaaaaatttgaaaccgcttaactgttcatcaatagaggcatgatttagtgtattttggtgtatgaattaatgtctatacatgacatacaaagctctataaggcatattgctaagcaa

SEQ ID NO: 105918 - DNA, 665 bp, Homo sapiens
tttttttcccagtggtaggtagaaacatttcatcagtcaaatgttaaatagcaatttgaaatactcargaatgctttaagaacttgttataaatgcccttacatgtggaagactcaccctgaatcatgccaaacaccttaacagtcattcacatgaaacagattttggggggtgaaatgtatttaaaagtattcttcataattttgagtttgttaggaataaattattttgctcttatgtgttacggttttcaaatttctcatgtatttttggtgctctttggaaagctcactgtggctcttgtacccaatggacggaatcatcctgaagctataaagtttttatttctaaattttggaaagatatttctgttctcatgaacaagagtttaacatgatgtctctctactttggctgcacaacagaatcatagtagaaaacaaataaacaacaacaacaaaaatctattgatcaaatctttcctcccaaagattttgatttatgatgtaggaaggcgccacgtaccaggttttcaaagctccccagaccctgcagattctaatgtgtagccggggttgagaaccactgattcaacactaataaatctcaaataaataaatacataagaaagttaaaacttaaaaataaaatgatacatatccataa

SEQ ID NO: 105919 - DNA, 665 bp, Homo sapiens
tttttttcccagtggtaggtagaaacatttcatcagtcaaatgttaaatagcaatttgaaatactcaggaatgctttaagaacttgttataaatgcccttacatgtggaagactcaccctgaatcatgccaaacaccttaacagtcattcacatgaaacagattttgggrggtgaaatgtatttaaaagtattcttcataattttgagtttgttaggaataaattattttgctcttatgtgttacggttttcaaatttctcatgtatttttggtgctctttggaaagctcactgtggctcttgtacccaatggacggaatcatcctgaagctataaagtttttatttctaaattttggaaagatatttctgttctcatgaacaagagtttaacatgatgtctctctactttggctgcacaacagaatcatagtagaaaacaaataaacaacaacaacaaaaatctattgatcaaatctttcctcccaaagattttgatttatgatgtaggaaggcgccacgtaccaggttttcaaagctccccagaccctgcagattctaatgtgtagccggggttgagaaccactgattcaacactaataaatctcaaataaataaatacataagaaagttaaaacttaaaaataaaatgatacatatccataa

SEQ ID NO: 105920 - DNA, 587 bp, Homo sapiens
attccatcagcttgcccccttcaagaagaaatgatcacactgtcgaaaggctctaccgacttgcattgttcttcccccttagcaagtaccatgctgaagacttcaccagaccgcattcatctctgatggtaactgcttcagctgtcayatacttgatcctcacatcttattaaaatatacagcaagaaagagcaaagtttatgctagtctttatttctgagcagattgagtttcgcatcaaatatttcatctccttccaatatataagacaacctcttccaaaaatccattactgttttcattgtatattcatgcattgtaagaaatataaaaataaaaaaaaaaaccctgaaaaagccctaagtattggatcaaattcattccgtgctattttttattccttgaaatcactctaggtcaccttggcgaaaattgctatcacctgtgaaacattttaaatcccttgactcagaagtgcagtggtcaaacttgatttttactgagttattttagcagacattgccttatttctgtgatgtcgactctagttcaggggaaacagaactcatttctttcccagaggaaga

SEQ ID NO: 105921 - DNA, 595 bp, Homo sapiens
ttttaaatacagttctatttttatagggggggraaatcccaaaatagaataacaagcaggttttcttttactcagttaactattcctaagagaaaccttgatattctggatatttgaaccctgagactaatccaggcacccttttctcctggtagcagcttgtgcaatgaggtacatttgggaagaatgtaagaaccttggaagtgcaaccttaccaaatcaccctacagtgaaggataatattacaagcttaaaaaacaatggcccagattcttcgggaattaagaagagtccaacaggtgcagttcaaaagaacagcactcctaagaatactgtaatttaaagacaggaaacaaaccaggtaccatttacaccaaacacaggatctggaaataacacagtgatctagtaggtgccacagccccaccagccaccagaagagctttctcagtgaaacaaatggcacatttcatgatgtctcccagcatgtgaaaatctgctctacaaccagacaacaagatacgagagtgtccaagggcacgtgctggaaggcaataatgggattgagcagacagcatttgaaccaagacaaatt

SEQ ID NO: 105922 - DNA, 573 bp, Homo sapiens
tatagggggggaaaatcccaaaatagaataacaagcaggttttcttttactcagttaactattcctaagagaaaccttgatattctggatatttgaaccctgagactaatccaggcacccttttctcctggtagcagcttgtgcaatgaggtacatttgggaagaatgtaagaaccttggaagtgcaaccttaccaaatcaccctacagtgaaggataatattacaagcttaaaaaacaatggcccagattcttcgggaattaagaagagtccaacaggtgcagttcaaaagaacagcactcctaagaatactgtaatttaaagayaggaaacaaaccaggtaccatttacaccaaacacaggatctggaaataacacagtgatctagtaggtgccacagccccaccagccaccagaagagctttctcagtgaaacaaatggcacatttcatgatgtctcccagcatgtgaaaatctgctctacaaccagacaacaagatacgagagtgtccaagggcacgtgctggaaggcaataatgggattgagcagacagcatttgaaccaagacaaat

SEQ ID NO: 105923 - DNA, 402 bp, Homo sapiens
agggggttgtttctatatgatcttaactactccacactttggatcatcactatttctaatggctcccagacatcttatatcccaatacccagcccacaacttttccttgagccctacgtccatatgtcaaggtgccagctggcagctatgtgtccctcagacmcttcaaactcaatatatccccagctgagctcatcatggccccctatagtctctgccttccccattttctctatctgggtcactagtgccatcttttattcttgcctctccttacacactcatggggccaaccaaccattcagttctgtggacttcacctcccaaatagttctgggtgccttctctccaatccttaaatagttgctctggcctgactctgtgtctttagactttaatggg

SEQ ID NO: 105924 - DNA, 578 bp, Homo sapiens
atcaaagggctttgtaaactgcacagtctcataaaaggcattcgcttttactaagaacccttcctagttatccaagtgtctagcctttaaagggaactcaaaagtctatttgtcttctcacccaaggagcagcctcttctattcaggattaccacaaaggcaaattgattgactaagccctcatccggccctaaccataggggctccaagttactttgtgggaaacaattagcccccttactctctgtgctacacacctgctacttaatcatcacacctggcatgaccattactttccaagagacatttatctcgcctaccccaattagttcattgagggcagcaaccttgtcagacatctctggcactccctttagtcctgcaggcytcaccagttgcctcatgcccctgcttaaaatacattattggctccccacttctcgtagggtaaagtccaaattccttagccctgggccctgtcttccttcttgctacactcttcctgaagactttcatccactcaaaggctttaccctttaggtggtgactctcaaataaaacattgctagctatgactt

SEQ ID NO: 105925 - DNA, 578 bp, Homo sapiens
atcaaagggctttgtaaactgcacagtctcataaaaggcattcgcttttactaagaacccttcctagttatccaagtgtctagcctttaaagggaactcaaaagtctatttgtcttctcacccaaggagcagcctcttctattcaggattaccacaaaggcaaattgattgactaagccctcatccggccctaaccataggggctccaagttactttgtgggaaacaattagcccccttactctctgtgctacacacctgctacttaatcatcacacctggcatgaccattactttccaagagacatttatctcgcctaccccaattagttcattgagggcagcaaccttgtcagacatctctggcactccctttagtcctgcaggcttcaccagttgcctcatgcccctgcttaaaatacawtattggctccccacttctcgtagggtaaagtccaaattccttagccctgggccctgtcttccttcttgctacactcttcctgaagactttcatccactcaaaggctttaccctttaggtggtgactctcaaataaaacattgctagctatgactt

SEQ ID NO: 105926 - DNA, 585 bp, Homo sapiens
aaaaaaattggaacacaaaagcatgtgctgtctataagaaatcaacactaaatataaagtcaaagataagttaaaatgaaamagatgtaaaaaggtatatatgatgaaaatactaatcaaaagaaacctggagtatctatgttaatatcagaacaaggaataaaacccaggataaagaggtacatttcataataaaaagatcacttcctcaaaaagatataatagctttcaatgtgtgtcacataacagttttaaagtacaggaagcaaaaacatacagaagtgaaaggagaaatagataaatccataattagagttagaggtttcaacacccctctcttagtaattgatagaagtagactaaaaattcaacaaaaatacagaagacttgaacaacactatcaatcatcttgagctcattgatatttatagaacatatcaccccactcagtatcttctactcagagaacttacagtgtactctgaccataacagaatgaaattagaagtcaacaacataaagttatctgaatcaaaatatgttgaaattaaataaaattcttctaaataattaaggggtcaaata

SEQ ID NO: 105927 - DNA, 447 bp, Homo sapiens
ctttcctaattctcagaccaacaagtagtgttttcccattygtattgcttatcataaaatgagagagtcttctgtccatcatctttattgaaagttgaaccactgtaagcaaaaataccaaggagaggtctgatcccgctattgaaataaaaagaaccatgagggccctgcagaattcaactggaccttggggattactcactgaagaaggttttctattttgaatgtttattgtcttcctaccccagtctccccaacaagaaagacttggggtggaaggtgacatataacagcaaagtaagaactgtttgcatttttccttcttggtttgtaaaagacttgttcccaaattgtcctcaaaggtacataaatacatacatatgatatttgtatatatataaacacatatgtatagtaatatccttcatttaccttggggtgagactt

SEQ ID NO: 105928 - DNA, 539 bp, Homo sapiens
ggtataaacacagttcttcacataatttcaaagtattcatggaccaccctccacctgtgtgaagccaaggactcagaccctgagtccttaatagtactttgataaatgatagrtgtctctttgacaatggggcaagagagatcccacaataaacccctttagaaatacaccatagcaattctttattatctatgtccatatatttatttgtgaaatgacataattttcattttacaccaggttcttcagtactctctcacagtatacttagccaatgccaactgaattattggatataacacacatggtataggattaggaaggcaacacctcaataataacaaagaatttcaacaacataacttctaaattatgtagtttcttggttcatccatggcacatcttttaattaatatgacttgagaaatgtctgtagaaataaaaccaattttgtgaacatgcctatgatgtgcaaagcggatggggaagtataaggtccctatcatcaagaaattttaaaatttggtacttttagtact

SEQ ID NO: 105929 - DNA, 600 bp, Homo sapiens
ctaaactaacagacaggtgacagtgtcacctatctatctgtgccgtaacctactttgggaggagaagcagacaagagagaaaaagcagacacctctttttatccctcatctcctccttttttagctgagtcagtatgtctcaatacaccatgacaggactttttgtcttcctgggatttgtaacataatccccaaacaatggagaatgtagtttattaaactgaatacttaattgctggagaaacacgaaagacaggaatgtttggagtgtgtcaaggttgatgaaagtttcactgaaaaatggccttgtatatttcagaaaattcatgataaacatgaactggtttcattgagaggacgtagattagcagacagcatatcctgatccaggagaaccataagagcaagtgctaacttgagtgttttcataaactacctgtgcaaatgtcaagtgattcacatatttacattaaagaatttgtttgattacaaataaatttcaaaaatgatggagaggcaaatgaggcaggacaggaagacctttgatgtcagtctgyggaatttctatttgataatgtaggcaagagggagtcagtatag

SEQ ID NO: 105930 - DNA, 540 bp, Homo sapiens
tttattttaatcaaatgcattctgcaaacatctaatatctgatatgtaaaacaataactttatatctgcccatatatatacccatgcataaaaggaaaacatccacagcaaaagatgcatcacatcgtatttgtgcaaatcactgtctcctggagtcacatatttcattatataaaaatctcattatgaattttgcttgaatcactatattcttgactttttcttagcaaaacaatattaagttcaacataatattttagacaatatatgaaagatgtttgagataaaattaaatctatgccatatatgtatatacatacaagttgaattgaatataagttggtcttgtgtttttttactgtagatttttgatagggttcataataattcagaaggctctaagttagaatgtcagagcttttagttttgtagatagatggcaagacagatagataatcttgcatggtacaaggtacatgttcacatttcaagtttgtaacatggaagtaacagccygtggcttcattctgatatttggca

SEQ ID NO: 105931 - DNA, 349 bp, Homo sapiens
gcctgggagacagagtaagactctgtctcaaaacaaaaacaaaacaaaacaaaacaaacaaacaaacaaaatatatccgtaggattaatactttgaagactggtcctttacctggaattttcktattgggtggccttcctggctctctacttttcatgggctttcccttccagtttctactactgcagatatgtacccctttgtactgactctggctgcccacagtcctgtgctggatgtctcacctggatgcatcctatcaaaatagctgtgtgcccccttcttaacatacacttccctgccctcactgattttgccctatgtcctagccagccttgctgtgcaagaa

SEQ ID NO: 105932 - DNA, 349 bp, Homo sapiens
gcctgggagacagagtaagactctgtctcaaaacaaaaacaaaacaaaacaaaacaaacaaacaaacaaaatatatccgtaggattaatactttgaagactggtcctttacctggaattttcgtattgggtggccttcctggctctctacttttcatgggctttcccttccagtttctactactgcagatatgtacccctttgtactgaytctggctgcccacagtcctgtgctggatgtctcacctggatgcatcctatcaaaatagctgtgtgcccccttcttaacatacacttccctgccctcactgattttgccctatgtcctagccagccttgctgtgcaagaa

SEQ ID NO: 105933 - DNA, 349 bp, Homo sapiens
gcctgggagacagagtaagactctgtctcaaaacaaaaacaaaacaaaacaaaacaaacaaacaaacaaaatatatccgtaggattaatactttgaagactggtcctttacctggaattttcgtattgggtggccttcctggctctctacttttcatgggctttcccttccagtttctactactgcagatatgtacccctttgtactgactctggctgcccmcagtcctgtgctggatgtctcacctggatgcatcctatcaaaatagctgtgtgcccccttcttaacatacacttccctgccctcactgattttgccctatgtcctagccagccttgctgtgcaagaa

SEQ ID NO: 105934 - DNA, 597 bp, Homo sapiens
ccagggtttgctgcaaccctagtataaatattccaagacagctctgattctctaataaatgtaagtaaatagattctggtctataagatgtgatttatgaaacatacaaatctttccttgcaaaactattattttctcatcattttcccccatgcctgaaattacataccttaaggaataatcttttaatttagagataaattcattataggttgacatacatatatttcaaataggttccctattaaatctaatcagcaactcacacctaagtgtaaattaatttaattagatatactcagagaaaaatttaatgcaaactaaaagaaaggaagaaataacatttgttaggactaggcaattaaatacattttttcaagtagcccataaacctagtggattctgcatcattattaaaaaggactctggagttcaaactggctcaagttaaccctgctagtagcaaargcaatatatatccagttctgtgtcaatataagttaaatacacttgaagaagagaaagtaggaagaagaggaagaggaagagggagagaggaggagtcagaggattcagagatcagtgttgccaaaattt

SEQ ID NO: 105935 - DNA, 435 bp, Homo sapiens
tgcttctcttgggttcctctccatcttggtggctgtgggaatgttttaccctttaattcattggcaaaactaaaagcccctcccaaaacaattatattcttctgcaaaaaaaaaaaaaaaaagcagtagtctcttccacacgtcttccaaagagttgtttgtcctcctctctctctgtaaattttcttccacccaataagtagccttgtgggtggaggtcagacgtgccaaattaatttactttgttatttagcatccagatatctcacctgggcatctagctctgttaaaaaacactcccttcaggaagcaaactggtgtgattcattttctagttcatccaagtacagccaggctgctgctttcgcattcatgtcctgtstgtgtcatatctgcatggtctgttttcatatctgaaaatagatggtctcaagc

SEQ ID NO: 105936 - DNA, 516 bp, Homo sapiens
aatgtgtacatacaggatgtagctttttggatctgactttttttccttagtgtaattcatttgagattcatccatgttttagcaagtatctatggttttattgctgaataatactgtactttatattagtaccatgatgtgtttatccagtctstagttcagagacattcaaaatgtttccagtttggcggttaaaaataaagtaattttgaacattcacatacatttttgtgtgtagacatgattttcatttcactacgtaagagtggaatttcttgggtatatgtttagtgcatgtgtgtataaaaaactgccaaactgtctgccacaatggaagtaacattgtgcactctcactagtgagttgttaaagttctaggtgctctgcataatcactgtcatttggtattgtcattttcttttaaaattttagtcatttggatatgtgtctggcattatctaattgtgatttaatttgcactttccatctatctacctttttttttttttttttttt

SEQ ID NO: 105937 - DNA, 516 bp, Homo sapiens
aatgtgtacatacaggatgtagctttttggatctgactttttttccttagtgtaattcatttgagattcatccatgttttagcaagtatctatggttttattgctgaataatactgtactttatattagtaccatgatgtgtttatccagtctctagttcagagacattcaaaatgtttccagtttggcrgttaaaaataaagtaattttgaacattcacatacatttttgtgtgtagacatgattttcatttcactacgtaagagtggaatttcttgggtatatgtttagtgcatgtgtgtataaaaaactgccaaactgtctgccacaatggaagtaacattgtgcactctcactagtgagttgttaaagttctaggtgctctgcataatcactgtcatttggtattgtcattttcttttaaaattttagtcatttggatatgtgtctggcattatctaattgtgatttaatttgcactttccatctatctacctttttttttttttttttttt

SEQ ID NO: 105938 - DNA, 585 bp, Homo sapiens
tcaaaatgtttccagtttggcggttaaaaataaagtaattttgaacattcacatacatttttgtgtgtagacatgattttcatttcactacgtaagagtggaatttcttgggtatatgtttagtgcatgtgtgtataaaaaactgccaaactgtctgccacaatggaagtaacattgtgcactctcactagtgagttgttaaagttctaggtgctctgcataatcactgtcatttggtattgtcattttcttttaaaattttagtcatttggatatgtgtctggcattatctrattgtgatttaatttgcactttccatctatctaccttttttttttttttttttttttgacagcgtctcactccattgcccaggctggagtgcagtggtgcaatctccggctcactgcaacctccgtttcctggcttcaaacgattatcatgcctcagcctcatgagaagctgggattaaatttgcacttttgtaatgacaaattacattaagtattgtttcatgatttcaaattttcattttggaataatgtgagacttacggaaaatttctaaaatcttttaaagaataaa

SEQ ID NO: 105939 - DNA, 576 bp, Homo sapiens
  misc_feature (1)...(576): n = A,T,C or G
nnnnaagttcaatgaatttattcattttcatatgagaaattgaagcctagagagatgtgattttcccaaagtcattcagacagttacagagctgagattagacctacgtattctgacattcttctgctcgttttttttttcctgtagtccagagatttgaactctgagtttagcataatttggtttaattagattttacygaaagtctaacacatgccagccatatgctttgatgagcaatgctgaaataaattatggtccttaacctagtgaaaacatgggcatatacacagataattccaaagaagtcaagtgataatatacaggtacttgcccgttaagaaatacagggcactatgaaagcataagaagggcaactggcctgaccaaacaccttgctaggtattcagagatgttttcctgggtaggtgattcctgagatgatggaaagaatagcggggtttatccaggcagagaagacggagagattctgaaggaagggtggatgaaaggaaagaccattatttcaggctggctggaatagtagcagtaagactgtgcctttgagcaaggctg

SEQ ID NO: 105940 - DNA, 585 bp, Homo sapiens
aaagtttcatgcaaattagtatgaaccattcctcacagatattagctttcatactttatgtatatttgtayattgcatatatttaaacttttgtaagactgatttgttaataacaaaatcttcctatatttatctctgattttaaatctcatgtatgacttatacacagcattaaaaatatatttaattatagcactaaaagaaagaagcagcagcatcctaggtttattttgttataatttgtttttgtaattttattgaagccctcatttctgaattggaatagaaacacaagtgaacacttcaaagctcttgatataaacaactgacttcaaaaagctaaacgtgtgtaagctctgctataaacctgctccttaattatgttccattttgtgtttaaaaccatacatgcgtcattttatttcatttttcccgttctgtcaggagtgttattctttagtttattttcagtcttgctttgaccgataatattttttgatcaatgaaaaggctggtgtttccaaaagtaatggtatgtaataaaactgttctactctcacaattaagagcattttattgtgtaat

SEQ ID NO: 105941 - DNA, 573 bp, Homo sapiens
tttcttctcacaaggagattctgaatcataagcgtcagttgaattacgctttatttgagttcttcctggccatgtgtttgaacggtcagcattgaaagccagtctttctgccacttggttgtcagattgaaatattttgtacttttctatgaaatccagaggttgaaatttaaatactttctcatgacattccaagtgtttgtggcctggagaatgtctaaattcctcagcttcatctcatgccctgcttcatctttgcggtccactgtagattcagctctgggttccagtttaccaaaaatgtcaaattaattcctgttgctgtgcctttttgctcattaattctatcctgaatgtcttccctgccctacccattttctgtctacctagtgtttattcctcagtcaagacttckgaaatattattttgatcatctatggtaataagaatgcatgcagtatagggaaattgaagggaaaaaatcacacgaggcattgtttaaaatgcagattcatgaacctttcctgaattaccaaaacaaactcttaggacagggcctggaaatccatattt

SEQ ID NO: 105942 - DNA, 573 bp, Homo sapiens
tttcttctcacaaggagattctgaatcataagcgtcagttgaattacgctttatttgagttcttcctggccatgtgtttgaacggtcagcattgaaagccagtctttctgccacttggttgtcagattgaaatattttgtacttttctatgaaatccagaggttgaaatttaaatactttctcatgacattccaagtgtttgtggcctggagaatgtctaaattcctcagcttcatctcatgccctgcttcatctttgcggtccactgtagattcagctctgggttccagtttaccaaaaatgtcaaattaattcctgttgctgtgcctttttgctcattaattctatcctgaatgtcttccctgccctacccattttctgtctacctagtgtttattcctcagtcaagacttctgaaatattattttgatcatctatggtaataagaatgcatgcagtatagggaaattgaagggaaaaaatcacaygaggcattgtttaaaatgcagattcatgaacctttcctgaattaccaaaacaaactcttaggacagggcctggaaatccatattt

SEQ ID NO: 105943 - DNA, 602 bp, Homo sapiens
tgtcgatttttttttaaatgtataattcactggagctctgctgtcaggcaaccctctaaaatatggtgtttatgtgaattggggcacataytggaacttttactaagaatatttagttaccagaattatcaacaagaaaaacttattgctcattaattgcctttatgtagccaaaatatttgtaggagtggagattttggaaaaaaatatcatagttgccctctaattacattaatctcaacaagttgaattatattttatagactgtttacttctcttgataattctgtcagggatatataatataatatatacatttacctaaagaagctatttatatcattatgctgtacattgggtaacaaaagttcttaagtatgcattacagtaagaagcagtcttcatttatgttgtatatgcagggaataaatccagttcttattattgcagaaagcataagggttccattttagttccctaagaacacagtaagatatcaagaaagaagatatactgttgacacgtttgctttcagattagtcattaattctgagttcgtttgatagctaagaaaattaaatcatcaaaatgtccacactgaa

SEQ ID NO: 105944 - DNA, 602 bp, Homo sapiens
tgtcgatttttttttaaatgtataattcactggagctctgctgtcaggcaaccctctaaaatatggtgtttatgtgaattggggcacatactggaacttttactaagaatatttagttaccagaattatcaacaagaaaaacttattgctcattaattgcctttatgtagccaaaatatttgtaggagtggagattttggaaaaaaatatcatagttgccctctaattacattaatctcaacaagttgaattatattttatagactgtttacttctcttgataattctgtcagggatatataatataatatatamatttacctaaagaagctatttatatcattatgctgtacattgggtaacaaaagttcttaagtatgcattacagtaagaagcagtcttcatttatgttgtatatgcagggaataaatccagttcttattattgcagaaagcataagggttccattttagttccctaagaacacagtaagatatcaagaaagaagatatactgttgacacgtttgctttcagattagtcattaattctgagttcgtttgatagctaagaaaattaaatcatcaaaatgtccacactgaa

SEQ ID NO: 105945 - DNA, 514 bp, Homo sapiens
tgatctgtcagtggagtattgaagtcccccactattattgtgttgctgtttatctcatttcttaggtctattagtaattgttttataaatttgagagttccagtgttaggtacatatacatttaggattgtgatattttcctgttatacaaggccatttgtcattatataataacmctctttgtttttttttttttaactgttgttgctttaaagtttgttttgtttatcagaatagctacttcctcttgcttttggtgtacatttgcgtggaatgtctttttccatccctttacctttagtttatgtgagtcctatgtgttagatgtgtctcttgaaggtagcaaatagttggttggtgaattcttatccattctacaagtctgtatcttttaagtggaatatttaggccatttacattcaacgttcatattgagatgtgaggtaccatttcattcatcatgctatgtgttgcctgtatacctttttgtttgtttttttaattgtatttttgt

SEQ ID NO: 105946 - DNA, 514 bp, Homo sapiens
tgatctgtcagtggagtattgaagtcccccactattattgtgttgctgtttatctcatttcttaggtctattagtaattgttttataaatttgagagttccagtgttaggtacatatacatttaggattgtgatattttcctgttatacaaggccatttgtcattatataataacactctttgtttttttttttttaactgttgttgctttaaagtttgttttgtttatcagaatagctacttcctcttgcttttggtgtacatttgcgtggaatgtctttttccatccctttacctttagtttatgtgagtcctatgtgttaratgtgtctcttgaaggtagcaaatagttggttggtgaattcttatccattctacaagtctgtatcttttaagtggaatatttaggccatttacattcaacgttcatattgagatgtgaggtaccatttcattcatcatgctatgtgttgcctgtatacctttttgtttgtttttttaattgtatttttgt

SEQ ID NO: 105947 - DNA, 514 bp, Homo sapiens
tgatctgtcagtggagtattgaagtcccccactattattgtgttgctgtttatctcatttcttaggtctattagtaattgttttataaatttgagagttccagtgttaggtacatatacatttaggattgtgatattttcctgttatacaaggccatttgtcattatataataacactctttgtttttttttttttaactgttgttgctttaaagtttgttttgtttatcagaatagctacttcctcttgcttttggtgtacatttgcgtggaatgtctttttccatccctttacctttagtttatgtgagtcctatgtgttagatgtgtctcttgaaggtagcaaatagttggttggtgaattcttatccattctacaagtctgtatcttttaagtggaatatttaggccatttacattcaacgttmatattgagatgtgaggtaccatttcattcatcatgctatgtgttgcctgtatacctttttgtttgtttttttaattgtatttttgt

SEQ ID NO: 105948 - DNA, 446 bp, Homo sapiens
gtggattctttcaggtttcctggtatgttcctgtggtagttcttggagcaaaatttcataatgtgagtctccacattctgctttgtccatccaagtctgagtgggagctgcaacttagttctgcctcctatccaccattttaccatgtgcttccatctgttggtgttaatcttgatcasctggctgagttagtgtttgtcaggtttcatttctcctttaacactgtactttttggaaggaagtctttatatgtaacccgcatttaaggactggagaagtatgcaccaccttaagggtagaatatcaagtgaaattattttgaattcttctaaatgggacatttgtctcttctccccaatttatttaccattcaataatttatttacatcaatatatactcatggatattttatactttggtttataatccagtatttatttattta

SEQ ID NO: 105949 - DNA, 446 bp, Homo sapiens
gtggattctttcaggtttcctggtatgttcctgtggtagttcttggagcaaaatttcataatgtgagtctccacattctgctttgtccatccaagtctgagtgggagctgcaacttagttctgcctcctatccaccattttaccatgtgcttccatctgttggtgttaatcttgatcacctggctgagttagtgtttgtcaggtttcatttctcctttaacactgtactttttggaaggaagtctttatatgtaacccrcatttaaggactggagaagtatgcaccaccttaagggtagaatatcaagtgaaattattttgaattcttctaaatgggacatttgtctcttctccccaatttatttaccattcaataatttatttacatcaatatatactcatggatattttatactttggtttataatccagtatttatttattta

SEQ ID NO: 105950 - DNA, 446 bp, Homo sapiens
gtggattctttcaggtttcctggtatgttcctgtggtagttcttggagcaaaatttcataatgtgagtctccacattctgctttgtccatccaagtctgagtgggagctgcaacttagttctgcctcctatccaccattttaccatgtgcttccatctgttggtgttaatcttgatcacctggctgagttagtgtttgtcaggtttcatttctcctttaacactgtactttttggaaggaagtctttatatgtaacccgcatttaaggactggagaagtatgcaccaccttaagggtagaatatcaagtgaaattattttgaattcttctaaatgggacatttgtctcttctccccaatttatttaccattcaataatttatttacaycaatatatactcatggatattttatactttggtttataatccagtatttatttattta

SEQ ID NO: 105951 - DNA, 597 bp, Homo sapiens
gggggagccaatatcctattttctgtttcatggctggcagctctgtaactcagtccagcatctctacttacgccagcctccctgtggacccacatgaggctgtgcctcctctctcactagcaccgcagagagaaaggactgcagaagggaaaggacagaaacatcagtcaatttggcttagctttggtaaaagaatgaaatggttaaaaggaggtttagcattatgagtaggtttccatggagtgtgagtgtgctctctgaattgagaaagtcttactgaaaagacgcaggaacaaagaggcagtcatcamtgacactgaaatttgcttgtctcactggatgaaggcccatttgtgtccaggcccagtgtggtggctcacgcctgtaatcccagcactttgggaggctgaggtgggaggactgcttgaggccaggagtttgagaccagcctgggcaacacagtgagaccctgtctctattaaaaaaaataaaaataaaaacaaaaaaattagccaggtgtggtggcacatgcctgtagtcctagttacttgggaggctgaggttggaggatcacttgggtccaggagttcaaggtta

SEQ ID NO: 105952 - DNA, 609 bp, Homo sapiens
tcttcttattgaaaagagttgtcagagagcccctattctatcctacaatcatgccaatctgctttttactccaactttgcatttcatctctgttatttgatgtataagaatgaaagagctcctgggacatgtttgtaccctaatggctcagatgagatgtcctgggaaattatcaaaaatgtgcagggcaaagaaaggaaggctatcagatgacccacagacactctcctgccacccttcactgaacagagcataaacgtgtgctgtgtcacggttgcaggattcctgtaattcagacacctacaggtatttaggacagcacaggtcttacagcaattgatatttttggctgtttcacaggcacatatgctctgggaatttagatttttggagttagtcatatggcacatgacactgtgcacttgtcctgtattaataatttttaaaaacattawaacaaaagtgtacttcaacatcaagtaaacaaagttaattttcttttttattttttaaactactttacagaggaatgactgacatacaaggagctttacatatttaatccgtacaacctgatgagtttggagataagttacacttgtgaaaacc

SEQ ID NO: 105953 - DNA, 631 bp, Homo sapiens
tgacaagggtgctgatacgtttgggttttgcgccccacccaaatctcatcttgaattgtaatccccataatccccaggtgttgtgggaggatctaggtggaggtaattgaaccatgggggcagtgttctctatgttgttctcacaataatgagtgagctctcatgagatctgatggttttataagcatctggcatttcccctgctggcactcactctctcctgccaccttgtgaagaaggtgcctgcttctgcttcgctttctgccatgatggtaagttcgttgaggcctcttcagccatgcaaaattgtgtcaattaaacctcttttctttataaattacccagtctctggtatttctttatagcagtgtgagaatagactaacacaggtrccaagaatacacaacaggaaaaggacaatctcttcaataaatgtggttgggaaaactgggtatctattatcaaaagaatgaattggaccttgtcttacaccatacacaatgtaaaatggattaaaagcttaaatatgaaatctgaaaccataaaattttagaaaaacacatagagaaaatgcttcttgacattgatgttggcactgatttctttccatgtgacaccaaaagcgcaagca

SEQ ID NO: 105954 - DNA, 631 bp, Homo sapiens
tgacaagggtgctgatacgtttgggttttgcgccccacccaaatctcatcttgaattgtaatccccataatccccaggtgttgtgggaggatctaggtggaggtaattgaaccatgggggcagtgttctctatgttgttctcacaataatgagtgagctctcatgagatctgatggttttataagcatctggcatttcccctgctggcactcactctctcctgccaccttgtgaagaaggtgcctgcttctgcttcgctttctgccatgatggtaagttcgttgaggcctcttcagccatgcaaaattgtgtcaattaaacctcttttctttataaattacccagtctctggtatttctttatagcagtgtgagaatagactaacacaggtgccaagaatacacaacaggaaaaggacaatctyttcaataaatgtggttgggaaaactgggtatctattatcaaaagaatgaattggaccttgtcttacaccatacacaatgtaaaatggattaaaagcttaaatatgaaatctgaaaccataaaattttagaaaaacacatagagaaaatgcttcttgacattgatgttggcactgatttctttccatgtgacaccaaaagcgcaagca

SEQ ID NO: 105955 - DNA, 642 bp, Homo sapiens
aatcaaaaacccaaatctgaacaaacaaygatagcgtacttagacaactgggtgtggctgatagcattggtagaacttgtggatgggcatgatgctggggaaaaggtgacatggagtaaaaaaatcaagaaaacatcatgtctgcctcaggcatgtcgtagacagccacaacacgggagtctggctcaaacttgtgaattttcaagcacgcctgatatactcaggtggaaaagctctagatagttttgaagttaaaagctctgaagctcaagggagatagcttgatggattggagaaatttagggagatctcagcataaatgggggagagaggggatagcctgggagtttatagtctaaaatgggaggaagggatgaaacattgtggggaaaggaggattcctgatggggcctgagcactcaagcccttgtgaagtgatataaggccacttccagccttggaaagggggtgatctggtttggctgtgtcccctcccaaatctcatcttgaattgtagctcccataatctccacatgtcatgggagggacccagtggaaggtaattgaatcatggcgatgagtttttcccatgctgttctaatggtagtgaataagtctcaagagatcagatggttttataaa

SEQ ID NO: 105956 - DNA, 574 bp, Homo sapiens
agttgcttagctatattgaattttatatcctgcatcctttctaagcttccttatcatttctagtagtttttggtaggtttgattacatttcctacaaatatggacatacggtcatcaaataaagataatttcttcctttctttaaaatctggatgaattttatgtcctttcttgccttactgcacaggctgtaacttcaagtacaatgtaaaggagaaatggtraaatcagacatgcttttctgtttctgaccttaaggtaaaagcatttggtcattcatatagaccatttatttttaatgaagttactgatattattggcttgaaatctagcacttttctagttgatttctgcttgttcatcctcttttttttctgtcttttatattgactattttatgattccatttttttcctgctattggcttattgtttatatacttttaagcttttttttgtattggttgcactaaggtttacagtatacatctttaattgctcatgttctatcttcaaataatattaaattgcttcaggtgtagtgtacttaccttaggataatataatcccaattc

SEQ ID NO: 105957 - DNA, 523 bp, Homo sapiens
gcacttttcataatagctaagttatggaatcaacctaagtgttcatcaatagatgaatggataaggaaaatgcagtataagcgcacaatggaatactatttggcattaaaaagaaggaaattctgtcatttgcaacatcatggatggaattggagawcattattctatatgaaataagccagacacagaaagacaaatactgcatgttctcacttatatgtggaatctgaaacaactgaactcatagaaacagagtagcatggtggtaacagaggctgaggtagagggaggaatggggaaatgatgtttgaagggtacaaaatctcacacaggaagaataaggactgtttctggagttctgttgcacatcatggtgaatatagttaataatagtgtattgtacatttcaaaactgctacaagaataaatctcaaatgctctcaccatgaaacatggtatttgaggtgatggattctgatatgatttggctgtgtccctgcccaaatctcatcttgaattgtag

SEQ ID NO: 105958 - DNA, 364 bp, Homo sapiens
tacaaacagtaatgttgaccgttaaataaaaacagttgcacctataggagttaaaaatagttggaaaatgtccctattagctcaaacaataaggtgatgcttctgtttccagccatggatactctgactcctgcactaaagaacttactaagaattcagcaacctcaatttgtggattagaagagagtattgtaaagagatagaaagttggrggatatggattggggaaggtctcatttgaggttaaacactgaaaaggtattaagaaagaagagtgtgagctagtacacatttgttagtgttgtccattaggcctaggagacccctggacttggaaacattgcctgtggataacgtgaaacac

SEQ ID NO: 105959 - DNA, 556 bp, Homo sapiens
ttatcagatatgtcttttgcaaatattttcttccagtctatgccttgccttttcaacctcttgacagtgtattttgcagagcagaaatttttcatttcaatggagtataagttattaattccttctttcaaggattgtacctttagtgacatatctaaacgatcatttttctcacagtaggatagttgggaaaactacactaagttattaaaagtaaatttgtacaaaaataacaacaccgtaaagaggctagggcattggcttcctcccataaagaactaactgtcacagaaattgctctcccagtgatatagatgtataggtcaatgtaacagaatagggagttcagaaataaatggacacaaaaatagtcaactgatttttaataaaastgccaaaataattcaatggatataatattttcaacaaatgggactaaaataactagatatttatatggaaaatatgaacttaaaaaccttatatcatatatataaaagccagtcaactgtcaatgcattatagaggtaagtgtaagagataaaactataaaact

SEQ ID NO: 105960 - DNA, 522 bp, Homo sapiens
gcaatacgaaataatcagggagaatgaggtatttatccccctcatgaatttatcctttgtgttacaaaaaataccattacattcttttggttattttgaactatatgattaagttattattgactatagctatcttgttatgctatcaaatagtaggtctttttcattctttctatttctttttttacccattaaccatacccctctccctcctagccgcccccacatcccccactaaccttcccagcctctggtaaccattattctaatctctatatccatgtttaattgttttgatttttagatccctcagrtaagtgagaacatgtgatatttgtctttctgtgcctggctcaattcgcataacaatctccagttccacccacgttgttgcaaatgacagggctccatacattttatggctaaatagtcccttaacatggcataaaaagtcctacatgtcatctctcactcattgtgacacctgatcaacatctctagaagttaatccgtataaccaaa

SEQ ID NO: 105961 - DNA, 497 bp, Homo sapiens
ttcctatatttgctgaaaatatgtgctactagcaaagaagctcttgaagatctgtgatgacttaatagcctttccactaattctgatcacataaaaagttggaaaacttaaatatactacagttaggattcccttatttagcttctccacagtaaaatctcactttgtttcaaaataatagctgggctagctctgggaaggagggtttatagataamagtgatcacactgtaacctttagaatgtctgttgctatgtatatgcactcaaaatgtataattgtaccacgcaaagtgaaagaaacaataggaaagggaaaaatgatgaaacctgggaaccaaagaggaaacaaaaggcataggcagaatatatacagacattattgatgagaaagagataaacttttatcctttaaattgaatttatttgaagttgtaaaagtcactggtcttctgcttgatatgaatcttcagaatttatgacattttggcagacctt

SEQ ID NO: 105962 - DNA, 655 bp, Homo sapiens
cctaactacaaactctggtttctgagaagtttaaactgtagggagaccatttatcctcattaaatctagatgctggsctataacattgggtaaaccgagcccgtgtaacagttgggtctcttttagtgacaagcaacagaaaatccaactcaagtggttaaggaaagagagaatgtattagcttatacagctgaaaactccaagagtaaatttcacttcaggtgtagctgggttcagggcttcagcaaaatattttatttgtttacttttttggttaaggttattgagacgtaacttgggtatggtacccttttcgtacacagtttagtgagttttgataaacgtgcagttgtgtactcaccaacataatcgggatatagaacatttccacaatcccccctccctaatttttttcttgtccctttgtagtcaacttctcctgctaccctcagcccctgacaaccactcatctcttttcagtacctatagttttgcctttttcagaatatcttttaaatggaattaagtagtctagatgtactcataagattatgtgtctggcctctgttactcactatcctgcctttgtgtaggagtcatctgtgtaatcacacctctgatttctttttatcactgagtagcccattgtacagat

SEQ ID NO: 105963 - DNA, 655 bp, Homo sapiens
cctaactacaaactctggtttctgagaagtttaaactgtagggagaccatttatcctcattaaatctagatgctgggctataacattgggtaaaccgagcccgtgtaacagttgggtctcttttagtgacaagcaacagaaaatccaactcaagtggttaaggaaagagagaatgtattagcttatacagctgaaaactccaagagtaaatttcacttcaggtgtagctgggttcagggcttcagcaaaatattttatttgtttacttttttggttaaggttattgagacgtaacttgggtatggtacccttttcgtacacagtttagtgagttttgataaacgtgcagttgtgtactcaccaacataatcgggatatagaacatttccacaatcccccctccctaatttttttcttgtccctttgtagtcaacttctcctgctaccctcagcccctgacaaccactcatctcttttcagtacctatagttttgcctttttcagaatatcttttaaatggaattaagtagtctagatgtactcrtaagattatgtgtctggcctctgttactcactatcctgcctttgtgtaggagtcatctgtgtaatcacacctctgatttctttttatcactgagtagcccattgtacagat

SEQ ID NO: 105964 - DNA, 540 bp, Homo sapiens
tcctgccaactagtacaggaccttagaataattaatgaagctgttattcctattcatcctatcgtcccaaacccttacaccctttgtagataaattccatctaccacagcttggtttactgtacttgatcttaagaacaccttttcctgcattcctatatacccagatagctattttttttttttttttttttgcctttgaaaggcaaaacccagatactcaaataactcaacagttaacttggacagttctgtgccagggattcagagataacccccgcctttttggacaggccctagctaaagacctgtccaccctgcagcctctcccagatagcaatatactccagtatgtggatgacctactaatcygtagtcctaccaaggctgtttcagaccaaaatacagtatttgtaactaaacaaatttgctaactgtgggtacaaagaagtttcttccaaagtacaaatatctgcacaaagcattcaattttggggtcttagtttaacccccagtacaatgagcctttctagtgccagta

SEQ ID NO: 105965 - DNA, 573 bp, Homo sapiens
cattgtttccatgtgcaatacacttgccggactgcctctagtgcccatttagaaaacatgctcattctgtccatatgtaccctaactccatagcaagtctcaaacagtgagtaaaagtttcttaggttatttgaagcagttgccaccttttgcttcacaatctcattagaaaattttggtggcaagctggtttaatcatttttacatcacaactgtagagtkgtgtttcagctgaggtagtggaccccatttaaaactgttaatagctggacaaagtagagtaattaattgggttcaattacaaaatggttagtcatcaaggatgggcatcaaatggggagacttttcaaaatgcccctcagccctaatgaatccaagcttctttaaaacatttttttttgtagagctggggtctctctatgttgcccaggctggtcttcgaactcctagcctcaagcagtcctcccaccctggcctcccaaagtgctgggattacaagtgtgagctaatgtgtctggcccatgaatccaagattctacatggggtccagacatgtgtatttagaaaaaattt

SEQ ID NO: 105966 - DNA, 543 bp, Homo sapiens
aacagcacattgctagaggaaggaggaggttatgccagtcttacaggcagaaggatcaccaatttttgatcagagatggcctgagtcaatcaataaaacttttctagtgacctcctcccaagtagtacactttggccaagggttccaagatcctcatttatagggctgaaaatgtagaattactgggttggcgtgggcaaatgtaaaattttgcttagagaggaagtgctggtaggcaggcttctaccagctggttcctggccctacttggtctgaaccccaaatgaaaaaagggttcatggcctccctggaaggcttcaatcttctcttattttgaacctcaaatacaaaagggttttccagccctagagtcatggccrgtggcccacagtaagaggtgcactggctgaattcacactgtagcatcagaaaatgtacctatctcatctctccaggaatctgggattcccagagccttatttttcttgattatgaaacgagaataataattttgactttacccatctctaagactttttaaag

SEQ ID NO: 105967 - DNA, 552 bp, Homo sapiens
tctttttaaaggctgaataatattccattgtgtatatgtatacatacaaacacatatacatataatcyatatgtgtatatacacacatatgcatacatacagtggaatcatacatgtatatgtatgtatgtatgtatattatgtatatgtgtatatatgtatatgtgtgtgtgtctgtgtgtatatatatatatatatatatgtatacgcatacatacctacaccacacaatttctttatccatttgtcagcagacactgagattattttcatatcttggctactgtgaaaaatgctgcagtgaacatgggagcatgatatttttatgaggtggtgatttcatctcctttgggtgtataaccagaagtgggatcactgggtcaaatggcaattctattttcaatttctttaggagcctccacgttgttttctgtaatggttacccacatctacattcctactaacagtgtacatgagttcccttttctccacatctttcccaacatttattatctcttatctcctggataatagctatcctaatgtgagtaa

SEQ ID NO: 105968 - DNA, 472 bp, Homo sapiens
agacaaaaatacagaaaaaagaattttaataaatgaacaaagtctttgagaaawataagattatgtaaagcagccaaacctacaagttactggcattcctgaaacagaaaaagtaaacaacccaaaaaacatatttgaggaaataattcaagaaaatttccctaatctttgtccagatacaagaaatccagagaacacctgtgagatactgtacaaaatgaacatcaatcaccaaggcatatagtcaccagaatgtccaaggtcaacactaaagaaaaaatcttaaagagagctaaaggaaaaggtcagatcatgtacaaagagaaacccatcaagctaacagtagccttctcagcagaaacactacaagccaggagagattgggggcctattttcagcattcttaaagaaaaattcaaaccaagaatttcatatcacaccaaactaaattttatacatgaagaagagataa

SEQ ID NO: 105969 - DNA, 583 bp, Homo sapiens
ggggaggctgggaggagggagaagagcagaaaagataacttttgggtactgggcttaattcctgggtgatgcagtaatgtgtacaacaaccccccgtgacacgtgtttacctctgtaacaaaccttcacatgtacccctaaacctaaaatgaaaattagcaaaccaaaacaaaaaggtggtaagcaatgaaacatagtattgcatttggtaactactgacattaccaatatctcttagttatgtgatctgattaaattgggagatactgaaaaagaatacaggataagaactcactcagggtctaatatattatatgtagaatgagrtctctaaaggaatgttttcaaaggaaaggaattacatgatgtgctcacgcaggtattttgtgtcaaatcacagtttatgaaagataattatactcaattttgaacttataacacattgagtcataatattgtctgttttaatttttaaaaatattttatatgtaactctgtgtgtgtagaaagccaacacgtctgaattcaccagtcccttcttgagcacctctttgagctgtaggtacatcatggaactttacac

SEQ ID NO: 105970 - DNA, 391 bp, Homo sapiens
tgcagcatgactataaaagacgaacaagcacattattaacagtccaaggctgttgcattgcttagtacttatcataatgcctggtatatattgagtaacaaatgttagccattattgttattagcatgaaaaactttaactttcrtataaaattatgaaaagatgttatcaaaatatgtaaagtcactgtattagtctattctcatgctgctgataaagacataccagagactgggtaatttataaagaaaaagaggtttaacggactcacagttccacgtggctggggagacctcacactcatggtagaagagcaagggatgtcttacatggtggcaggtaagagagaatgggagccacacagaaggggaagcctcttataaaatcatta

SEQ ID NO: 105971 - DNA, 400 bp, Homo sapiens
agatctcacagcaatgtatcacatgccagagcatctgcagcatgactataaaagacgaacaagcacattattaacagtccaaggctgttgcattgcttagtacttatcataatgcctggtatatattgagtaacaaatgttagccattattgttattagcatgaaaaactttaactttcayataaaattatgaaaagatgttatcaaaatatgtaaagtcactgtattagtctattctcatgctgctgataaagacataccagagactgggtaatttataaagaaaaagaggtttaacggactcacagttccacgtggctggggagacctcacactcatggtagaagagcaagggatgtcttacatggtggcaggtaagagagaatgggagccacacaga

SEQ ID NO: 105972 - DNA, 585 bp, Homo sapiens
ggatcctcaaattctaacgcaacaatccccttcgtgtgccctaccggaagttcactccctcaaaccatgatttagtcttcacttgaccttataaagggcagtctgttggaagttccaaacccagtactcttcttttctttctctaatttctaaaaaaccttctaggtaaggttttgttttttttttttttttttttttggcaccaccaggcaaaaaaaaagggcaraaatcaaattcatcctgactggtaaaggaacttaaggaaaaaaaaaaaatggggcttggaaacagagttatgaagcagccatgcgtggcccacacaggccacatttaaacaagttgtatacttttgattggatatccaagtacaattgatattgtggacttgagtcaacaggcataggcaaaaaatgcgactctacttgtgtaatcctgggcaacaacctttctcattctcagttttgttatctgtacaatgggtatggtagtgtgtgactggcccactctgaaggttcttatggccagactatgaaacaaagtgtatgaatgacacatgaggcacctacatgctaaaggaagtgatga

SEQ ID NO: 105973 - DNA, 607 bp, Homo sapiens
tggctttcaaaactatagtaatcagtgtctggcttacttatatagactttattttaacctgagcctttatattatagtactgtaatgtccctctagaatcccattatagatctctagcctattatctttaagcaataataataatgatatcatcttattttttagaattatttagagtatttcaaagcacttccacacatatgaatggcctgcactggacctcacaagaaaacagagggtttcaactgtgcataacatcagagatgaccaggtgcaacctccatatattgaagacttagaaaatgagaaatataaaaattaaattactttgttttactttgtgcccacaagtctttttaytatacaagagtatatgcaaaaagactatacataaatatataaaatgctcaacatggtaaattgtttaataaattatggttcacatatagaatggggttctgttttcttagaatgagatttttagatgataaaatacatagagagatagacaggatggaaattattatatagttggtaaaggaaaagcatttactttgcatgtgtgcagaactatgattcaattcttgtaaaattaaaaaataagtac

SEQ ID NO: 105974 - DNA, 427 bp, Homo sapiens
gaattccattgccaaggacactaagaacactttggttactaaatcatgtgggcatatacatgtcacaattcaacagtaattatcattgttttgtagtgtttccctccctcttttccattggcttccttgacaccatattcttctacttctctggcctggccctctcttctcagtctttcttatgaatgctgcatgcaccattaaaatattaaatgttaatttccccagttgtttttttttkggggggggctatctcatttctcttctgtctgcatccactccttctgttggggtgacccactccataactcaaccttctataagctaataagtacaatcaccatttcaaacccacctccatttctcataagttcaacagttatctattcttgatttggacatttgggggccatatgacatctctaat

SEQ ID NO: 105975 - DNA, 506 bp, Homo sapiens
accaagttttaattttttctactagcagtattttggagaaggctcttgtttcccattgtatgtcaaaaacacaaaaggacaccaaaagagaaaaatgacattggctagcgtgaacttagattctaccgtaaaaaggtatttatttgagaatccttctgctaacatagattcccttaaaatctagccatttctttttaatcgaaagttgtaacagaaaatgatatctgatttacattttaaatttccacrtaactataaacttttatagtggtgaacagatgttgatgtgaattttacaaagctaagatatacttttcaaattcatgtcagaggaatgtcaaactgaaactaggaaaagaagttctaaaagatgagcaaaattgcagtgactactaggactgctttagtacgatgatatctttttcaactaacatcctaagtgactaatagttcaaagaagtcttcaagaatgtgaatctaagtttatagacacagtttgaaaccaa

SEQ ID NO: 105976 - DNA, 620 bp, Homo sapiens
tgcctactgtattcagtgcagtaacatgctgtacaggttggtggcctaggaacaataacctaggttagtagagtatgccacctaggtttgcataagtgcagtctatgattttcacacaatgaygaaatcatctaacaacacatttctcagaatgtgtccacatcattaagcaacatgagacagtaattgttttgtttctggctgctataaatgacaacatcagctgttgaacaaggctggtcttgattgtaatcataaaagtaaaatttgtaaatttaaaagaaaaaagcttatattttctatagaaggaagatttacatccaaaattgttattaagtaagttacaagtttaaagaaatgggcataatttaggtttcagatggatcccttttgactctcaacccaggagcggagaagtttacagtagagaaaatcttgggctagctgttactttgtgttgcaattttcttagattttcttgggtcttttacttaaagacttaagacattacataacaatgagcttggaaatagtgtttttctctttaatatataattctcttatgcacatacttagtttgcagttgtggagtctataattcagctctgcaatgacattgg

SEQ ID NO: 105977 - DNA, 620 bp, Homo sapiens
tgcctactgtattcagtgcagtaacatgctgtacaggttggtggcctaggaacaataacctaggttagtagagtatgccacctaggtttgcataagtgcagtctatgattttcacacaatgacgaaatcatctaacaacacatttctcagaatgtgtccacatcattaagcaacaygagacagtaattgttttgtttctggctgctataaatgacaacatcagctgttgaacaaggctggtcttgattgtaatcataaaagtaaaatttgtaaatttaaaagaaaaaagcttatattttctatagaaggaagatttacatccaaaattgttattaagtaagttacaagtttaaagaaatgggcataatttaggtttcagatggatcccttttgactctcaacccaggagcggagaagtttacagtagagaaaatcttgggctagctgttactttgtgttgcaattttcttagattttcttgggtcttttacttaaagacttaagacattacataacaatgagcttggaaatagtgtttttctctttaatatataattctcttatgcacatacttagtttgcagttgtggagtctataattcagctctgcaatgacattgg

SEQ ID NO: 105978 - DNA, 620 bp, Homo sapiens
tgcctactgtattcagtgcagtaacatgctgtacaggttggtggcctaggaacaataacctaggttagtagagtatgccacctaggtttgcataagtgcagtctatgattttcacacaatgacgaaatcatctaacaacacatttctcagaatgtgtccacatcattaagcaacatgagacwgtaattgttttgtttctggctgctataaatgacaacatcagctgttgaacaaggctggtcttgattgtaatcataaaagtaaaatttgtaaatttaaaagaaaaaagcttatattttctatagaaggaagatttacatccaaaattgttattaagtaagttacaagtttaaagaaatgggcataatttaggtttcagatggatcccttttgactctcaacccaggagcggagaagtttacagtagagaaaatcttgggctagctgttactttgtgttgcaattttcttagattttcttgggtcttttacttaaagacttaagacattacataacaatgagcttggaaatagtgtttttctctttaatatataattctcttatgcacatacttagtttgcagttgtggagtctataattcagctctgcaatgacattgg

SEQ ID NO: 105979 - DNA, 609 bp, Homo sapiens
aatgttagcttgtctggaaaacaaaagtaaataagcaacttccaattttggctatcatggtccaatgggtatcataactcataatgtaaataactataaaacctgacacaactaagtaaagcaacagttttcagccattgcacaattaatagtacatggccatcaaycttgacagcaagaaaacatgggtagagcaccatacctaccctggctttctgcctagggctactctcaaaatcgtagtacagaaaaggacagttccaacagacaagagaggtctagctaggtagaggacttagaattcagggctgctaaaaaggctagaatttgtcagaccacaaagtgatggaaaaaaactgcacagaaatctgcataaaggcccccttgagtctagctaaatactaagctatgcatgtccatgtaggcaatattccataagccttggcacaaaacagcttctgggattcaggagctgaaaacacattctggagatttcacagtgctgttagatgttggagttccgaccatcctttgtagagagagatatttctgaacctgctgaatactcagttgagataccaataagaatacaccttacaaatgagctcg

SEQ ID NO: 105980 - DNA, 609 bp, Homo sapiens
aatgttagcttgtctggaaaacaaaagtaaataagcaacttccaattttggctatcatggtccaatgggtatcataactcataatgtaaataactataaaacctgacacaactaagtaaagcaacagttttcagccattgcacaattaatagtacatggccatcaaccttgacagcaagaaaacatgggtagagcaccatacctaccctggctttctgcctagggstactctcaaaatcgtagtacagaaaaggacagttccaacagacaagagaggtctagctaggtagaggacttagaattcagggctgctaaaaaggctagaatttgtcagaccacaaagtgatggaaaaaaactgcacagaaatctgcataaaggcccccttgagtctagctaaatactaagctatgcatgtccatgtaggcaatattccataagccttggcacaaaacagcttctgggattcaggagctgaaaacacattctggagatttcacagtgctgttagatgttggagttccgaccatcctttgtagagagagatatttctgaacctgctgaatactcagttgagataccaataagaatacaccttacaaatgagctcg

SEQ ID NO: 105981 - DNA, 609 bp, Homo sapiens
aatgttagcttgtctggaaaacaaaagtaaataagcaacttccaattttggctatcatggtccaatgggtatcataactcataatgtaaataactataaaacctgacacaactaagtaaagcaacagttttcagccattgcacaattaatagtacatggccatcaaccttgacagcaagaaaacatgggtagagcaccatacctaccctggctttctgcctagggctactctcaaaatcgtagtacagaaaaggacagttccaacagacaagagaggtctagctaggtagaggacttagaattcagggctgctaaaaaggctagaatttgtcagaccacaaagtgatggaaaaaaactgcacagaaatctgcataaaggcccccttgagtctagctaaatactaagctatgcatgtccatgtaggcaatattccataagccttggcacaaaacagcttctgggattcaggagctgaaaacacattctggagatttcacagtgctgttagatgttggagttccgaccatcctttgtagagagagatatttctgaacctgctgaatactcarttgagataccaataagaatacaccttacaaatgagctcg

SEQ ID NO: 105982 - DNA, 507 bp, Homo sapiens
cagtggtcatcttgttcttcgtggagtgtattttcttgtacataagacctgtggtcacttaccccatagacaaggatatggctatttcctttactattgttgcacccatgttaaatcctctgatctataccctgaggggcatcaaggtaaaaaatgccataagaaaaatgtggatgaaacaggggaccctaggtggtcactakcttacatgctaagagtaaatttttaatgtaaaaccagtaaagttttaccctcctcattccctctaatccactggatacacaggagccaaaggcatttttttaaaaaatttcatttggagacagggtctcactttgtctcccaggctggagtgcagtggcacagtcaggtctcacttcagcctcagcatcccaagctcaagcaatcctcgtgcttcagcccccaagtagctgagaatacaggccatgtgccacaacatctggctaatttttttgtatttttagtagcaacgagggttttcaccat

SEQ ID NO: 105983 - DNA, 590 bp, Homo sapiens
aaatttaatgtataactctagatttgatgctgaactccccaaaaaatttctatagaaaacattattgggcccagggtggagtcacatacctatagtcccagcttctctggaggttaacgcaggaaaattgtgagttgaagctcagcctgggcaaaatggtgagaccctgtctgcaaatggaacaaaaagtaaaagaaaacattatggaaatagttgatgctatttgaataccgacatataatgggtaatagtgttgtatggattttacttaatttgataattctctgtttatgcaagtcaatgtctttgttcttacaggatatacatgttgaaatatttaggagtaaaaggtcatgytgtataatgtccaaaatatccaaaacaatcttgaaaaagaacttcctggtttccctactactgtaaaccacagtcatcaagacagtatgatattaggttagatgcatggatcagtggaacagaactcactgttgaaacaaaccctggcatttattgtcaactcattttttataagggtgtcaaggcaaactgaagggggaaaatagtcttttcaagaaatgatgatgaagata

SEQ ID NO: 105984 - DNA, 586 bp, Homo sapiens
tgctgggacagattcctgctgatgacacttggttcacatgtctggacttaaagaatgccttcttttgtttgaggctttctccccaaaatcagcctatatttgccttccagtgggggcaatcacaatatacctggacaaggctgccacaagggtttaagaattctcctaccatttttgaggaggctttggctacagatcttgaggctttgcgcaacctagtgacaattgtgtgctattacaatacattgctgattttgttattcgcagccctcaggagggaggaatgccttcaaggaagaaagaggcttcatcacctgctgtgtgaagctggttacaaagtgtccaaggacaaggcaaaacaagtctgttttcgggaagttagatatctaggattcatggtatcccaaggccagggcaggcttgaaagggcacgctaggaggctgtatgtgcattgcccaccmcagttaaaggcagcaggtcagggaatttctaggcgcggtgggattctgccgaatctggattctaaacttctaccctataacaaggcccttacatgagtctaccaaaggtgggaaaagagagccc

SEQ ID NO: 105985 - DNA, 568 bp, Homo sapiens
gacttgcccttctgtggtccccaatgtcattgaccactttatgtgtgatctcttcccattgttgaaacttgcctgcagagacacctacagacttgggatgctggtggcagccaacagtggagccatgtgcttgctcatcttttccctgctcgtcatctcctacatagtcatcctgagctccctgaaatcctatagctctgaaggacagcgcaaagccctctccacctgtggctcccactttactgtcgttgtactcttttttgtgccttgcatattcacctacatgcatcctgtggtcacctactctgtggacaagttggtgactgtgttctttgcaatcctcactcccatgttaaatcctataatttacactgtgagaaacacagaggtaaaaaatgycgtgaggagtttgttgaggaaaagagtaacagtttatgcataatggcaagaaagtgatgatatatataaacatggaggattatatctgtggtaaattgtgcaagagaattcacaaattttacagatcattgacaaaaactaaacaaacaagcaaacaatttaaaaaggt

SEQ ID NO: 105986 - DNA, 520 bp, Homo sapiens
aaaggaacacccaacaactctaagatcaaggagtagatgcagaggccaccctaagcaakgcaactttgatcagtgtttagtatcccaccccagatacattaggcgtcatgtcgaaaacaacaagacaaactgtagacccactgagtgctgagataaaggtaccatctaaaggacaggaggtggctacttcactctttcattgtagattttggtttcccaaggagacttctcagggacagggtgaaatgagacttctctagttcttcttttattctctcgcatgaaaacagtatttacttttcaggagatgaaaattccagagtgtttatgcctaaaactacttccactaacatgactaatttataagctttaaacatcaacaatgtattttagagtttaaaacattataacttaaggaaaaaaaactccctagaaaatatcccctcagtcaaaacacttagggatttttggaacctcctgctcgaagctaccttaaatccaaggtagcactagagatttc

SEQ ID NO: 105987 - DNA, 606 bp, Homo sapiens
gccctaatatgaattctgcccttataaaaatgggaaatttgaatatagacacactattggaaaacataacttacaatataatcttccaatttggaaaacctcttcacaaaggcagtagagaaaggaaacaattttattattgaataagcatttagccagaatatgatgcaygtaacaggtaatctgctaatatatttcaaagacagaaataaatcttaccgtttcacatatatgttcttttttttctttttttttttttttttttgagacagcatctcactctgttgccccggctagagtatagtggcgtgatctcggctcactgcaacctccgcctcccgggttcaagtgattctcctgcttcagcctcctgagtagctaggactacaggcacgcaccatcacgcccagctaatttttgtatttatagtagagatggggtttcaccatattggccaggctggtcttgaactcctgacctcgtgatccacccacctcagcctctcaaagtgctgcgattacaggcgtgagccactgtgcccagcttcacatgtatgttcttagggtaaatagtaattagtgctcaagagaacttgacaataccatt

SEQ ID NO: 105988 - DNA, 597 bp, Homo sapiens
attgacgttcatcaaggatattggcctgaaattttcttttttgttgcatctctgccaggttttggtatcaggatgatgctggyattatagaatgagtgagggagtagtctctccttttcaattttttggaaaagtttcaggagaaatggtgctagctgttctttgtacctctggtagtattcagctgtgaatccgtctggtcgtgggctttctttggttggtagggtatttattactgcctcaatttttgaactcattattggtctattcaaggactcaatttcttcctggtccagttgtgggagggtacatatgttcaggaatgccataggaccataaggcatcttttcccactactatcaccaccaaagggactgctagattgtataactcaagcaataaagctgtttgtaacacagtctgaatttgttgcacagtcctatcctctgggactgactcaaagtagcccaatacatggtcatgcttaatatgtataaatataaaatctgttaacttcggaagtcaaagactgttgtgcttccctaatcgtggtagggaatgaatgacgcagaaacttttactttggcatgaacctga

SEQ ID NO: 105989 - DNA, 597 bp, Homo sapiens
attgacgttcatcaaggatattggcctgaaattttcttttttgttgcatctctgccaggttttggtatcaggatgatgctggcattatagartgagtgagggagtagtctctccttttcaattttttggaaaagtttcaggagaaatggtgctagctgttctttgtacctctggtagtattcagctgtgaatccgtctggtcgtgggctttctttggttggtagggtatttattactgcctcaatttttgaactcattattggtctattcaaggactcaatttcttcctggtccagttgtgggagggtacatatgttcaggaatgccataggaccataaggcatcttttcccactactatcaccaccaaagggactgctagattgtataactcaagcaataaagctgtttgtaacacagtctgaatttgttgcacagtcctatcctctgggactgactcaaagtagcccaatacatggtcatgcttaatatgtataaatataaaatctgttaacttcggaagtcaaagactgttgtgcttccctaatcgtggtagggaatgaatgacgcagaaacttttactttggcatgaacctga

SEQ ID NO: 105990 - DNA, 597 bp, Homo sapiens
attgacgttcatcaaggatattggcctgaaattttcttttttgttgcatctctgccaggttttggtatcaggatgatgctggcattatagaatgagtgagggagtagtctctccttttcaattttttggaaaagtttcaggagaaatggtgctagctgttctttgtacctctggtagtattcagctgtgaatccgtctggtcrtgggctttctttggttggtagggtatttattactgcctcaatttttgaactcattattggtctattcaaggactcaatttcttcctggtccagttgtgggagggtacatatgttcaggaatgccataggaccataaggcatcttttcccactactatcaccaccaaagggactgctagattgtataactcaagcaataaagctgtttgtaacacagtctgaatttgttgcacagtcctatcctctgggactgactcaaagtagcccaatacatggtcatgcttaatatgtataaatataaaatctgttaacttcggaagtcaaagactgttgtgcttccctaatcgtggtagggaatgaatgacgcagaaacttttactttggcatgaacctga

SEQ ID NO: 105991 - DNA, 445 bp, Homo sapiens
tttaaaaacacccactgttctcactctttcatttgaatagcaccaaaggggcaccttttcccatcatttctatcagagagatagggttggatctcattaataaagagatgattttactccaaagagccctcagcattgagccctaacctagattagaactttgttaaacactgagccccmgccattgaaaggtcctcctgagctgtacccacacccagtgtcaccagagccgagatttcacccattgaaggaatggacagccagggtcaggctgtgccctcagttcccaaacctgcagatcatatgatgctctttgcctgacaggtctttcacctttaatcagctgtatttcacctgtatttcacagtggtcttctcacacctgacccttcaaacccaggggccttccacaagccatgcagctcggactgagatagtagggaaag

SEQ ID NO: 105992 - DNA, 505 bp, Homo sapiens
acagaagttgggaccaaataatttgcaatactatttataattcagacctcataatctaatgctaaacactcagcccattccctgccctcccctcaacaccaaactatgaaggagaatggaggaatgaattcttttcttattaattctccccaggcttattcctactccactcccgaacttctacaggtgcattttctatgaaagcagcttaccatacttcacatcattgtctttacctgcccgtttttcgcactacatgtgagatctcagatggcaggggtccctctaacatatcctgtacccccagcacttcccatggaggactgaggatgttctttctaagaaaatgcttgctgactaattgaacttcttggctgaactgacaatgwgcaaactcactcggcgtctttttgacatgcttttgtttattttaccaaatgtgcctctcatatcttctcatcagtttctctttcacttcttcacacataatctatcctgcatattc

SEQ ID NO: 105993 - DNA, 505 bp, Homo sapiens
acagaagttgggaccaaataatttgcaatactatttataattcagacctcataatctaatgctaaacactcagcccattccctgccctcccctcaacaccaaactatgaaggagaatggaggaatgaattcttttcttattaattctccccaggcttattcctactccactcccgaacttctacaggtgcattttctatgaaagcagcttaccatacttcacatcattgtctttacctgcccgtttttcgcactacatgtgagatctcagatggcaggggtccctctaacatatcctgtacccccagcacttcccatggaggactgaggatgttctttctaagaaaatgcttgctgactaattgaacttcttggctgaactgacaatgagcaaactcactcggcgtctttttgacatgcttttgtttattttaccaaatgtkcctctcatatcttctcatcagtttctctttcacttcttcacacataatctatcctgcatattc

SEQ ID NO: 105994 - DNA, 566 bp, Homo sapiens
ttcttagttttctccatgaaagacttagggccaattcttggaagtccagtaggaaggtagaacagagctattttctaaggaaactctatgtccagaatcaaaggctgagcaaagtgggtcggtggccagggttggcttctgagaagctcagcctggcttagaatgttggtattaggctccacacagccaggagctaaatgagccagaatggagattgcaccaaaggtcatagaaagtgctaaatatgcactttgggaggccaaggcaggtggatcatgaggtcaagagatcgagaccatcctggccaacatggtgaaaacccatctctactaaaaatacaaaaattagccgggtgtggtggcgcatgcctgtrgccccagctactcaggaggctgaggcaggagaatcccttgaacccaggaggtggaggttgcagttagctgagatcttgccactgctttccagcctggtgacagagtaggaccccaactaaaaaataaataaataaataaataagctaaatatcagaacctgtgaaagcaagcaccaacctgtatacccatagg

SEQ ID NO: 105995 - DNA, 554 bp, Homo sapiens
atgaagtttctaaatattagtttgtatgtcctatcaatcattatgaagaacatagtcttcatttttacaagacaaaagaaaatagcatccaagtttctcttctgtaagctaagcaygatgccttgagctgtagattgtttttctcaagcttatcaatattgctgatggacagagtgacatttataggaagaggccatatgggattctgtatccacttaagcacttattaagcatagcacttattaaacaaaaacagccagaattatcagggaaagattgtttccaagttgataagtaattattgtgaagtagcagtgtaaaaatcacctataaaatgtactaatggctgagtaggatgccagtgatttaagcatcattaatgtgatttggttttagctgctacattttagtaacaattttaggcatcattttcatatatattttcctcgtaaatattatttagaagcatcttctcttacttcacttataagcattatagtaagatagagtttattttctatgcaatctttattagttttcctagttttctcagc

SEQ ID NO: 105996 - DNA, 487 bp, Homo sapiens
ttttaaactatttgtgtctttatgcttaaaatagttttcttataggtaacatatacttgcatcttgcatgtcaactggattatttagatcacttactttcaatatgattattcatgtgtttaggttgaaatctatcatcttcctctttctcttctatttgtctcacctgttgtttcctttccccattttttgtcttctttytgattaaccgaatatttttcataatttcatttattgtcctttttgacataaaaaaactccttgtttcttcattttaagtggtttctttgttatcataatggtttatggcatatacctttcttttattgcaatttatgttgcgatattatgtcacttcacatatactataaaaaacttttgagagtatggctctatttctcttcccccagcctatgtctttgttatcatacattttacttttacacgttttaaatcccacattgtattattattatttttgtttaat

SEQ ID NO: 105997 - DNA, 625 bp, Homo sapiens
caacactgcagccaattccaacatgctgcagtttcctattagtatctctaattcatgagggtttggaccagctgttagacaatgttttagtcctaccatttctgttcctggaggtgggtggtgtgagtgagactgtccaatgtgtctcactaaattagtctttaaaactagttgagtggtaaaaaacaataaaaacacatcaatcagagtctatgattggcactccaaaatcattttacattttttcttggaatgcagaaatatatgtggcaaagcatgccacaactcatgcaatgccatcaaagacactcacgcaaaacctgaactcaaattccaatgcctactcttttgctgcccctagagttctagttagcaatgtgttatttactgccaggttrctttccagttatgttacttctctgtcctatagcctatatccttcctgatcactcacactcttctcccacagatatatgtcatattttcttcctgaccaccctccacacttcaacttgaaatccacagtgccttccccctcaagctgccagtgaggtgaatgcaatcaccgttatcagcaatgctttgtataagcaactcacaaaccctgctatgatggatttactgc

SEQ ID NO: 105998 - DNA, 527 bp, Homo sapiens
tgtcagcctagtacctgaggccatggtggccataaaggagctggagtgggactggaagctgagttccaggctgttggcctgatscctaagtctgtgggtctggcttggtattgggagggcatgaataataagtctgtggggccagcatgccacctggggccatggaggctggtttggcaattaaattgggcctgaagactgggtctatatatgctggcgtggttattagggctgcaagagccagactgatgctggggcaggcacaaacctgagccttaggggcccacctggcattgggttgggcctgaagctcagtccacagctaccagcctaaagtctggggctttgagggcctgaatagcaatagcatttacttgggctgacccactattggggtccaagacaaagttcagtgttcacttcattccctttcctctaggaggttatctttctccatgctgtgctgcctggggttaggagaggagtggtctggataatgtaaaactattctttctaccctcttgaat

SEQ ID NO: 105999 - DNA, 586 bp, Homo sapiens
agaagtataatatgaaataatagatgatagctacgtaaagtatttttgagaacacgggtaaagtttttctggagttaaatctatcagtttttgaatttgacatcgtgaaatttaatataactttccataaactgcctttgtattttcttggttttattttttgctgagagagagttttcaacctctgcaacctcccttataacaaagaaaaagattttaaagagataaagtcagttcagacagcaaaagaatggatcaacgcatttgttaacatgaatgggcaagagagaaactggagacccaaataagaacacctacaagataaaatgggttgcatatatccacctgcagagttcacatatatgggcattgctcctctatgccacttagcagacttcctagagaaagggatggatgtgaaggtgaataaaactgtgaatagacacccattttcaattttcaacattggggatttcgtattgctcaactgatagtataygatagacaatgaaacacattcaggaaaatatgattcttttactttgcaagtagcaaggacacagacaatacttttatcaccatgtta

SEQ ID NO: 106000 - DNA, 584 bp, Homo sapiens
caagtatagaactacttggctggcctggaagcttgtttcttagagttggcccacagggctgtttctcggggccaggaagaggcagcacatttcctaagctgtcctggggttttgtctgccaggagtggatatagggctgtttttcaggcctgtgacacagctrtactactgctcagttggcctgtgggtgtttctgctggggctagcccatgaggctgttttgtaggtccaggacacagacatgtggctgcttggttggcctgtgggtatgcctgccagaggtggcctttggagtatttcttaagccttgatattgatgcacagatgcttaccagggctaggggtgtcggccagaggtggcccatagggcagttttttgggcccactgtgtagatgcatggattcttggccagcttggagtatgtccaccagaagcgacccaccggacagttttttcaggcccagcgtgaaggtgcatggctgcttagccaacctgggatatgtccaccaggggttacacatagggctctttctcggctctgaaacatgggttcttggctactcgatggccttggcagcattcc

SEQ ID NO: 106001 - DNA, 622 bp, Homo sapiens
tgcgttttctttttagttgtttgtataagtgagtagaatatatatcccagatagatatttattaaaaattctatgtttgaggtgataatattattatttataaattttcaggtgaagttggtttatttctggactttttatttcattccactgatacatttgtctactcatgcacaaatactgcggttttaaatacagagactttataatgtttaatgttgggtagagctcagcctcctcataactttttacagaatgctagtatattacagagayaattttacatttttctgtcgtcaattaacagtatatttgggaaattactctgtctgtctttgtaaatatgttctaattttttcaggttaatagaactttattacatgggtataccacagtttaatcataagcatttttctgtttttactattttgaaactacaaacaatgctgcagtgaataatctgggtatatgtgtttcatatttttagaggtataccttcaagataaactatgtgaagtcgaattattttgccaaaagataggtgcttagctttttaaaatatatacagtttccccctaaagtgtctctaccagtttgcattcctctagcaataaatgagtgc

SEQ ID NO: 106002 - DNA, 632 bp, Homo sapiens
aaacttccctacccaactgctagccttaatgttttaggacatgcagacataactacctctttccccacagttccaaggtggggcaaatctagcaaattgggagtaattcccaaaaatgaatctggattatcaggaaaaaaaaaaaaaaaagagttctttctcctagaataagtaagctggtagaatgtaaacctaaggctactgttaccataaaacctcatgagaccacatagagagagtatgaatgaggatgtctactagagatgggaaaacagtgtctgggctatgtcatttgatgcctggatacacgtatatttgatatccactctggacttatcagttgtatggaccaatatatctgtactgagatatcaaagataaaggatgaatatccattttaaaaagtgtttacaaacgaattagaaaataacaggcaccttaagagaaaatgggcaaaagatatattgaagggttattcaatcaagtacaaatagtcagtcwagtgaaataatacaaaataaatgaaaattgtatagtctgtgatttttttgcattgcattgctttgggccttcaatattaacaaacataaaaaagaatttttaagtgcagacatggagagtgtttaggaaaa

SEQ ID NO: 106003 - DNA, 618 bp, Homo sapiens
aaaatattttaggaattcaggaaacaaaaggaggagaaagatggtataaaatgacaaaggaaatcaagagcaaaatttcaagcagattcagctgaatgaagggaccatgtggaatagcaygacacatttggccattaaggaaaatcatacaaatgagggtgagaaatggctggacaattttatggtagggggtaggaagagcatgtagagtgtggatgcataaagttcacaaagaagggaaatgggagaagagaggcttacagcaatctacctttattaggccaatgattactcctcacctagaaattgcttctcagcctataaaatatctgagattttaagtaaaaaggaaataccattgacaacttatgaatgttttaaatgaacagaatgtatgttctctttaaaagttttgagaaaacatttttaaatggaaactaaatttctgttgttttcgaaataatttctgtaagttaacttcattttgctgtgagacagataaaacttaaagtcagagcttaaaatttttgtcaaataagaataattaaaatgaatgtttttaacaaataaattttgttcttaatatatattaagaaaacataacacaaagcaagtaaa

SEQ ID NO: 106004 - DNA, 599 bp, Homo sapiens
ttttgctgtagtcactcattaatgagtggaggcagttgtagtcagaaattattttcctaccctattttttccagaattcacctttttctttcttttctgtattgttaaattcttccaaccattgatgatcaacaacatcttacaaaggaagttagcagatattatatatccttgaaataaataattttcaatgagatactggcttctattttgcttattggtttgaacatgactgaggattgcctgactctgtgccttgaggaggactcagaaatgctattataacgtcaaaaactgcaattacttttgtaccaacctaataaatgtagcagtagctctattgagcaatttgattttctacattgtaggaacaaaagcagttgtataaaattctaggctcattattttaaataaaaacrtctttctatttaaagggacacaggtggccttttatgccattgagttccaattaccctatcttctgctgagatctcaatgaattcctttaaaatctttctgaaataaacactgatattactattaataaataatttggcagcctaattcataaaagctttgagcaaatgtttctgaaagga

SEQ ID NO: 106005 - DNA, 530 bp, Homo sapiens
tttctttcaaaggaagcagcatacgaggctctgaagatcacatattttggaagtttatggctctttatcattcttgggtaggagtttcatgtctgcctctccagtcttgaaagaataagcccaggggaacccttaattcaaatgtgaccataggtctctcaaatatcttctagaccagtgytgtccaattgaaatataaaatataatgtgagttatgtgtgtaattttagatttcctattagccatatcaaaaagtaaaaagaaagatataaaacatactttaataatatattttatctaatctaatatatacaaaatatcatgtcaacatgtaatcaatatttttaaaattaacaataaaacattttacattccttttgggggtacaaatgtggtgtgtattttatacttaaaaaacatctcagttcagactagccacgttcaagtactccatacagccacatgtggtggtagctactgtactggacagcacagatccagaccgggagagagagagggctgagacagcg

SEQ ID NO: 106006 - DNA, 616 bp, Homo sapiens
atgcattgaaaactctcccttccaacaatgttttaattttggcttccaatagtcatacatatttctagaggacaaaatgggttattatatttacacaagatgtttacaattttctgttgctctttcttcattcctgaagttctgattctccctctggggtaatttcccttcaatctgaagaacttcctgtaactttctttttaagtaatttttttttttttagacagaatcttgctctgttgcccaggctgggtagagcggtgtgatctcagctcactgcagcctctgcctcccagttcaggtgattttcccacctcagcctcccaagtagctgggactacaggtgtgcacstccacgaccagctaatttttgtatttttaatagagacagggtttcgccatgttggccaggctggtctcgaactgctggcttcaagtgatccacccgcctcggcctccgaaagtgtcgggattgcaggcataagccactgcacctggcctaaagtaggtttattggtaatgaaatttgttagttttcttctgtctgagaacgtcttgatttcatgggatacagaattatgcgttgacagttcttttctttctagcttgaaaaaaa

SEQ ID NO: 106007 - DNA, 433 bp, Homo sapiens
gaattctgccaagcagtgacttgattcatgaacactcactggatgctgactctgttgctcttctgagtgctggggtagaggrgaggagaggtggagcacagttcttgcttttatgagcttatgttctaggaagttcaaacaagtattttttcaggtagtatgaaatagcaggaagaggaagcaggctaaagggacacagagtgattgggggctattttaagtagaatgataaggaagagcctgtctagagagctatttgaacagtgacctgactgaagggacaacagaaagcagtgctgacattacaggtagcaggatgactgccaagacagaaacgcatttcatatgtgttcgaggaacaaacagcaaggtgaccagcatggggagagtgaagaatgagggaaaccttgaatgagaataaagcaattccatc

SEQ ID NO: 106008 - DNA, 445 bp, Homo sapiens
actcactggatgctgactctgttgctcttctgagtgctggggtagaggagaggagaggtggagcacagttcttgcttttatgagcttatgttctaggaagttcaaacaagtattttttcaggtagtatgaaatagcaggaagaggaagcaggctaaagggacacagagtgattgggggctattttaagtagaatgataaggaagagcctgtctagagagctatttgaacagtgacctgactgaagggacaacagaaagcagtgctgacattacaggtagcaggatgactgccaagacagaaacgcatttcatatgtgttcgaggaacaaacagcaaggtgaccagcatggggagagtgaagaatgagggaaaccttgaatgagaataaagcaattccatcttggatgctaatctgcmatattctgattaatcccagttccaacaa

SEQ ID NO: 106009 - DNA, 561 bp, Homo sapiens
gtgcatttgaaacaaaattgtttataagctagttatgtgtacagaatgaaaagttaaattaaagataaagacattaatattctaaattagcactttccaaactgtgttctaaaaatcaagactaataacccaagaagatgagaataatgtacactggacagcccctgtggagctggtggtggtgttggttgttgttccttttaaaataaacttcatctcagggtgctctcaaagcgcatctttgtggcccatgaggtgctcatgcacaatgggagaaattcaaatgcagatacactgygttgccagaagaagaaaagctgttccttcttccaaggataatgtccaaagtagtgcacactgatttaggcctatgatgcattgaaaaactaagtttccacaagaaaacattcaataaagggaacctatccttctcactctgttcaacattgtctaaaggcataaaggcatcaaaaagatacactgtttctgggattgcttctttgctaactgatttttccttccaccacgacgtctaagattaaaagagaaactgatacttaa

SEQ ID NO: 106010 - DNA, 561 bp, Homo sapiens
gtgcatttgaaacaaaattgtttataagctagttatgtgtacagaatgaaaagttaaattaaagataaagacattaatattctaaattagcactttccaaactgtgttctaaaaatcaagactaataacccaagaagatgagaataatgtacactggacagcccctgtggagctggtggtggtgttggttgttgttccttttaaaataaacttcatctcagggtgctctcaaagcgcatctttgtggcccatgaggtgctcatgcacaatgggagaaattcaaatgcagatacactgcgktgccagaagaagaaaagctgttccttcttccaaggataatgtccaaagtagtgcacactgatttaggcctatgatgcattgaaaaactaagtttccacaagaaaacattcaataaagggaacctatccttctcactctgttcaacattgtctaaaggcataaaggcatcaaaaagatacactgtttctgggattgcttctttgctaactgatttttccttccaccacgacgtctaagattaaaagagaaactgatacttaa

SEQ ID NO: 106011 - DNA, 561 bp, Homo sapiens
gtgcatttgaaacaaaattgtttataagctagttatgtgtacagaatgaaaagttaaattaaagataaagacattaatattctaaattagcactttccaaactgtgttctaaaaatcaagactaataacccaagaagatgagaataatgtacactggacagcccctgtggagctggtggtggtgttggttgttgttccttttaaaataaacttcatctcagggtgctctcaaagcgcatctttgtggcccatgaggtgctcatgcacaatgggagaaattcaaatgcagatacactgcgttgccagaagaagaaaagctgttccttcttccaaggataatgtccaaagtagtgcacactgatttaggcctatgatgcattgaaaaactaagtttccacaagaaaacattcaataaagggaacctatccttctcactstgttcaacattgtctaaaggcataaaggcatcaaaaagatacactgtttctgggattgcttctttgctaactgatttttccttccaccacgacgtctaagattaaaagagaaactgatacttaa

SEQ ID NO: 106012 - DNA, 591 bp, Homo sapiens
acccctagttaatattagggcaagagaaggagatctgaggagaataagcaataacataaaatttaaaaaattgagtaaagtagaataaaataaattcatttattgaggctgtgtaagtagggtgcctaatttctctcctgtccataaggggaggcttttacaggggtgggtgatgacagagtcaaggaagccttagaatgtgttgtgcatgatttcccacaattttagaggttggtaggttagctagtcctgggtacttgcaactaacaagattagaatgtgtgtttarttgtatttcccacgtctctgcagaaaaacttctttcaagggaaatgtgatgacctcaatcttaaagcaatcactttctttagaaaatattattatcgaattagtcaggcctcattcccatggcactcaataggagggcaggatctttcacacttgaatagtgtgtaatggggtctccacaggacaaaaggagtttattaccagaagaatgttaaagagaaggtatgctggataaagaaaacctgtaaatagcatatagtcctttacatgtattcctggtgagaaaggatgaaggtttgaaat

SEQ ID NO: 106013 - DNA, 634 bp, Homo sapiens
gagttaagtgagatgcttacacacacatatgcacacacacacacacacacacacacacacacaygcacatacccctcattgctttgacatgaaagtttttcccaaaagtaaaatgaatgatattttgaacagctatcctcatttgattaaaattcactaaacaattttgagatgaagggttatatgataaattttaaataatcctggaaattcaaattttgggagtttgattgtcctgtcgtatctctgtgacataactgcatgcagtggccaattctgtgaaatgtgtccagctactagcctaatattaactcttattacatttctactcacaaatttttgtctcttggattctactttctcatacccatcatctgatggagatctacctctggcttttctacaaacctagtagattccaaactaactccatcatcgaccctcccagggacctcctcttctccctcttttaatgccactaccatccttgcaatcatttacgtgtgaaaccttcacatccttatttttcttacttctcacacgcaattgtcttactaatcccttggattcaacctctgcaacacactcacattcatcttctcttataagtcatatcttcttcagttgtcatttg

SEQ ID NO: 106014 - DNA, 304 bp, Homo sapiens
cgtaattaacatttaaatctgcgggctttgaataaaactcattatcctctataatatgtgtgagcctcatccaatcatttggaggccctaaaaaggggagtggagtggctccgcaaagatgaaggaattcttcctgtatgttgccagtccattccttaaaatcaatcagtctcttaccctcagtctctctccctaatacatgtgtatacrccgttctcctcttcctttcctttctttcccagctactccttactttctcttcttaatcttgacacactcagtcaaacatggacccttagctgaa

SEQ ID NO: 106015 - DNA, 591 bp, Homo sapiens
ttagtcactgagctgctgacgcaggcaaacatgctgtactcttggcaatcatcatttacattaaaacaggatgatttgtggagttggaggcccgggacccttccagacttccccacccacctcagtctgtccctgcaagcgccagagggctggggctgtgggttcttccttggcaaagagaaactggccttagtctgggggtacaggtgcccagagtcccagccctattttcttccaggtgcatatccttccaggctgtgggactgtaggagctgcctcagcctcccagagccatgctcaatgggggcagcctctcaggctgggctgggttcagtgtcagcatcacattgtatgtgtggtcttttttttcttggctgtttagtgtttggaaggaagggctttcaagcctccaattttcccatatwccagaggaagatgatgacaacaatgaacactgtatatatacagtgtcttcctccctttctctctctctcccttctttcccccctctctccattctctctctctctctccacacacacacacacacacacacacacacacacacacacacagacaccactcttacac

SEQ ID NO: 106016 - DNA, 355 bp, Homo sapiens
tttttttttttttttttttttggggagtgcgcaggcaaataaaggagccacacatttcagttgaatgaatgcaagagttaagcatttttaaaagttacaaattatgaagattgtgatgctacagaatgataccttttcagcttctgttgtcattaacttggaattataatggctactttgagtattgaaaatgagaatattgkgcaaatcggtcattccacccttcaaggatatggttagggttctttctaagattataaggcaatgattaagctggattatgctgaagcatctttcagaattgcaaaggtactttatgagtacagtgtggaaattttaagtttgaggatagcgc

SEQ ID NO: 106017 - DNA, 536 bp, Homo sapiens
actaaaaccaaaatgcttttcgaaacctaagataatgttctttcatatagactttatttttataataaaataatattatatcatgggaaaatatggtcctgtatgaagcaggtggttaaggagcaaataaattactagcagattcctaattataatatacttttagtcttttatgataaacgacagatgtatgtttacaaaaatgcattatagtagaatcaggtcaatagagtctaaatgaaaaaggcttaatttatctgtactcccttttgaattcaaagggatggccaatttaaaagagccaccatttaatataacrtgagttcaaaggagatttatttaaataggccaatgaatacttttttctttaattttccaaatagaagacaatttcagagttcaagtagacacagaggaaagtaacaaatcaaagcaaaacaaaatattagagtggatgcaaaaggagtctattgcaaaataatagagagctaataaaatcattctatttcctaaacactgctagtacattgaaatat

SEQ ID NO: 106018 - DNA, 584 bp, Homo sapiens
tcattaatgtgcgtatatatcagtgcatgttttatatgacccaattacctgtctcattcctttctcttatctcttatgttttcccacagagtaatttatacgtaattatggtttggaaaactgggacagagtctgtgaaagtcttaacacttgaagttttataatgttctgtttcaamttaaagttcagagagacattcttaacccaagtctgtctcttaaaaactctggttccaggataactggactataagaaagagcacgtatgagagatgcaaagaactgggaagtagcctaaatttagagattgaagacacaggattgggattatttccttcttcacagccaataatcaatcatatcctgagtattttataataaaaagagaattccaaaactactatttcctgtagtttcagaggcagcaaggcataatataatgaacaaaatcttgaatgtttattcaaactgacacaattgctaattaaattttgtaatttaattggtgggtgaatgtaggtaacttatctatgtgatagtctgattactcattaggaaaacgagcataatgttacctttcaggga

SEQ ID NO: 106019 - DNA, 626 bp, Homo sapiens
tgttttattcatttcagtttcatttatctctgcactaattgttattatttctattcttctactaattttgggtttgtttcagtcttggtttcctagttccttaagatgcatcattagtttgtttatttaaagtttttcttattttttgatgtacacactcactcatagctataagctttcctcttagtactgcttttgctgtatctgacagggtttcrtatatcaggtttccattatcatttgtttcaagaaatttttttagttttattaattttttcattgactcactggtcattcagcggcatattttttaatttttatgtgttgtatagtttccaaaattcatcttggttgttgatttctagttctattccattgtggtgagagaagatgcttgagagtattcagtattttgaatattttgagacttatttggtgacctaacatatggtctatccttgtgaatgatccattcttctctaaggagaagaatgcacattctacagccattggatgaaatattctgtaaatattcactaggtccatttggtctatggtgcagattaagtcagatgtttctttgttgattttctctctggaagatctatccaatgctaaaagttggg

SEQ ID NO: 106020 - DNA, 637 bp, Homo sapiens
atacctgactgaaattctcaatagaccaggaatcaaggatttaatgagaaaggaccaaagccatctgaaggcatcagaaaagacagagatgttcttagagtctgattgggctggtgttccctgcctctacctgacaggcttgccttcaaattaattaaaaagtcaaatttgactgtcatcccagtatctggtgaagsaacaagctgtccataaatcaccttgcgtttgcataaaaattgtatgcttttctaagtgctttatcatccattggctcatctgaacttcatggcaactctgcaaagtaggcaagcaaagaattggtgaaacagccatagaaaatgctggagccagactgtcagagttcaaactcttgctcagccttttcccagctgatgaccttggccaagtgactgacctctcagtacctctacctcctttctccataaaatgggcacaatcataatacctgcatcatagtgttttgggaggaaaaataaattagctgatatgtgtaaaacagttacaataatgcctggtagatttttttaaagctggaaaaaatatttgccttcaattattattggtctcactttatggttgtatcctcagctttagacccagaattaccactagctag

SEQ ID NO: 106021 - DNA, 585 bp, Homo sapiens
ttcatatagccttcttcaagctaacaaattctatttctgcttgatcaattctactgttgagagatgctgatgcatttttcagtttattgattgaatttttcaactacagatcttctgattgatttttattatttcaatatctattaaatttatctgatataattctgaattccttatctatgttatcttgaagtttattattaacaagtggaggtgtaaacagaccaaagctgacacctccagaaatgactgagtttcggccagtcaaatgtagccaactgtttgaaacatattcaaataaggcaaaaactgagctgtaaccaattcagctgtttctgtacatcacttccattttttggatatcactttcctttttyggtccataaatcttcttccaccaaatggctgtgctaaagtctctgagactaactaccctggctcagaaggccaccaaatctgcaaatcactcattgcaaaattaagctcccttaaatttaatttggctaaagattttcttttatctttttatctctgtcactccaggattgattactgggggagggatgctgtagacaatgcaagaat

SEQ ID NO: 106022 - DNA, 587 bp, Homo sapiens
ggttgaacttatgacctgcttccctcaatataaggcaggcagcagaatggactctcagtttcacacctagaatacgagaagtcttgcatgttttrctgtcttttggacccttacctctgttacaagtacagacctgagctatgtactgcaggatgagaaaccacatggcatagaagagccatcccattggaggccatcctaaactgtcccctagctgagttaccaccacatgacagtagatgtgtaatcaagcccagcagagatggattgaattaggcccaaagacccacataaaataataaatggtggttttttaggcaactaaaattttagagtaacttgtacaaggtatcaggcatgaaacaatacctgatatctgtgtattttgccatgaacatttccatcaatcccaatttatgtcctcttatttagtcttagtggccttccttgaagtcatgcttatgcttatttcaggaatttgtacctgttctttcctctgtctgcagtacacttacatgagatttttccatggacttttctcactttattctgcattctgttcatacataaccatcccccttccctag

SEQ ID NO: 106023 - DNA, 587 bp, Homo sapiens
ggttgaacttatgacctgcttccctcaatataaggcaggcagcagaatggactctcagtttcacacctagaatacgagaagtcttgcatgttttgctgtcttttggacccttacctctgttacaagtacagacctgagctatgtactgcaggatgagaaaccacatggcatagaagagccatcccattggaggccatcctaaactgtcccctagctgagttaccaccacrtgacagtagatgtgtaatcaagcccagcagagatggattgaattaggcccaaagacccacataaaataataaatggtggttttttaggcaactaaaattttagagtaacttgtacaaggtatcaggcatgaaacaatacctgatatctgtgtattttgccatgaacatttccatcaatcccaatttatgtcctcttatttagtcttagtggccttccttgaagtcatgcttatgcttatttcaggaatttgtacctgttctttcctctgtctgcagtacacttacatgagatttttccatggacttttctcactttattctgcattctgttcatacataaccatcccccttccctag

SEQ ID NO: 106024 - DNA, 536 bp, Homo sapiens
ttcagcaagccaccccaggaatgtgcaccgatagcctcattaaggcttgtagaagctgtgctacattatttctcaacacatcactcaatgtctccacattatttaattctttcaatgccatgtttatgacatgactcaggatatagagtatgggcactactaaaaagaaatgtggagtttgtgtcttagcaacgtttaattctagggtttttttttttcctttygaaagtatacagatgcatcagaaagattagcataagttttgccccatattaaagattaaggagacaggaatatagttgttttcatttcactgtgaagaaaaagaaggaaataattttaaagcaaacacatggatttagttaccttctgttctaagcccaatgccaataccaaatataacaagcagtaaagacgaatttggcaattcccacagccctttatacagtgttctcttctagtgtttgaagcacccagcatgttgcaataatcacaacatatatgttcaaaaaatcttaacagaatgagctttgatt

SEQ ID NO: 106025 - DNA, 495 bp, Homo sapiens
gaattcaatcagtaaacctttagaatgacaataacagttcttaaaggagaagccatattctcagaaatgaaaaaaaatggaccccaagaaaaatggacacttcaaagaacagaagcatatttctcccttttcagcactgagagccagagtggaattgtctccttcattgccactgccttcacgttttgtgtgtcgtatctgttttgtgatcactgagacccaagaacccccgacttgccgacatactatgtggccccgagagaggacttgagctctctgggtttcatcattaccatcaattaaataaacaggacagtagcttcttycttggattgttaatttaaggctctggataatacatgtaaccgccttatgatagagcagaatcgtaagtaggctcatggtagaatcgttcaatgacatttccctttcctttgggagaaacagaaattcacaggtctaattcttttcatattgatagttcctgaccattat

SEQ ID NO: 106026 - DNA, 630 bp, Homo sapiens
caatgtcaatatctttacattgggcagcccaaagagtcatgccactttatctgcagttctcaaggtatttcagaattcatcagaaagatttaatcaatttatcttccacaattgacctccatgactggtctattttaagtacagtggaaaaaacaagttatttaggtatctcattacccagataaaaatcctttatttgcctcttaatggttctatgaatttaactatctatgttacctacctctatttgtattctcctctgtaaataggtagaaataataacaattgttattgtaataaaatrggtaaaaatcatcctcatcatactcatcattatcattacctacctaatagaattattgcaaagattaaaggagatgagatactcacttttgattataaagggccatataatgttaaaaactaatgctgttcccagttagtattgtcctgtattttgagaggtgctcaaatgcaatctgagagtatgtattgttcttttgtttagatttcccttaaaaattattttagtgagtgagtgtgattatatcttgactatctcattaggagaaaaggaattcacatgctgacataagtaggtaagggatatggaaattatatcttaataac

SEQ ID NO: 106027 - DNA, 268 bp, Homo sapiens
ggagaaaaaggaaatgttttcatctctgtatagttaagtgttccttattctgatgacaatagaaagctatttcatagacattacatctaccctttctctagtctaaatggaaagcagaattacacagttaaccaaagatatattgagaaaggtttcttaaaacacactgaaagaaaattgtagtaatttattagctggtctcttagagtacatgtatatgtrtgtgactgcatgcaaatctgtatgcatgcaaaagtgaatgcaattc

SEQ ID NO: 106028 - DNA, 603 bp, Homo sapiens
gagcaagtggaactctaatatattgctggtgaaaatacaaaatggtacagccactttgtaaaccagtttgagagttttactgaagttaaacatatactttccatatgagtttaacaatactctttctaggtatctacctaagagaaatgaaatatgtctacacaaagatttgtayatgaatgttcacagcagcattcttcataatagcccaaaactagaaacgacccaagtgtctatcatagggttaagggataaacacattgtggtttatccatttggtgtggaatattactcagtaatgaaaagggacaacttatggatacagaaaacaacacggataaatctcaaaaacatcatgctaaatgaaagaagacaggcacagaagattgcatgatgagtattccatttatgagattctaggaaaggcaaactatagtgacaaaagtaggtggccaggggccagggttaggggagaggataggctgcatcagagcatgagaggactttggagtgatgaagtgttctacgtcagaattgggtggagcttatacaactgtgtacctgtgcccaactcacagaacctaagatgggtgaattttattg

SEQ ID NO: 106029 - DNA, 571 bp, Homo sapiens
gaattctccgtatgaggcaagagaaaagtgtgagggcatccaggttgggaagaaatgagagaagtctctgactatgaagaatgtgcccaatccgaagggaggaggttggaaagggagggtgtctrtgttctagtgtgggcacaagggtgaggaggccagccaggcacaagaaggagagtggccatagggagaaggcctgagagttgctgctggaatctcccggggcatgttgggtaacgtaaagcatcctcaggctggaaacgatctgaggtgagccagaatgaaaagcagttgagcattattggagagtaatgggacgagtgcagaatggcgcgaggcagacagaagtcgatcaaataccagctttattgtggacgaaaacctgctagagaacatagcttgaccctcagccaatagccccaaagaaaacttacctccccacgctgcaggcctcttccttggggatggcaccttccttgggagagaaacctgcctcagtgagtgcccttccgtccttccctgtgtgtgggtagcacagagctcaatcctgccccctgccatccagcgtgtg

SEQ ID NO: 106030 - DNA, 553 bp, Homo sapiens
agatccacttattatcccagataactatatttatttataatgttataacgtaccctcatccatttctaaagattatttcagatgacttatagtaacaaatatacaggaaccaaatcattaagacacaaacaaaaacttaaagaccacagatatggaggggaaagtatgatattcagccaagtgagatcctcaggtaaacgctatgtccagcagagattagttatcatcgtagcaatcattgcatctgccagttgttaccacatactctgttccagttgcttcatagacactatttcattaaagcctcctgacccacctgcaggtaggtattattgtccctggtttcaagatggagtagcagtccagtgawtatggtagtttgccaaatgccccagcttccgcaggtccccagcaattctgtcagcctgtgagatcagcttattcaagcgacacaaaactctatcccccagccttcttgccccacctacatctcaggaagcttctttctccagactttgcctcttagactgttggctcccgtcctgcccctgtt

SEQ ID NO: 106031 - DNA, 553 bp, Homo sapiens
agatccacttattatcccagataactatatttatttataatgttataacgtaccctcatccatttctaaagattatttcagatgacttatagtaacaaatatacaggaaccaaatcattaagacacaaacaaaaacttaaagaccacagatatggaggggaaagtatgatattcagccaagtgagatcctcaggtaaacgctatgtccagcagagattagttatcatcgtagcaatcattgcatctgccagttgttaccacatactctgttccagttgcttcatagacactatttcattaaagcctcctgacccacctgcaggtaggtattattgtccctggtttcaagatggagtagcagtccagtgattatggtagtttgccaaatgccccagcttccgcaggtccccagcaattctgtcrgcctgtgagatcagcttattcaagcgacacaaaactctatcccccagccttcttgccccacctacatctcaggaagcttctttctccagactttgcctcttagactgttggctcccgtcctgcccctgtt

SEQ ID NO: 106032 - DNA, 553 bp, Homo sapiens
agatccacttattatcccagataactatatttatttataatgttataacgtaccctcatccatttctaaagattatttcagatgacttatagtaacaaatatacaggaaccaaatcattaagacacaaacaaaaacttaaagaccacagatatggaggggaaagtatgatattcagccaagtgagatcctcaggtaaacgctatgtccagcagagattagttatcatcgtagcaatcattgcatctgccagttgttaccacatactctgttccagttgcttcatagacactatttcattaaagcctcctgacccacctgcaggtaggtattattgtccctggtttcaagatggagtagcagtccagtgattatggtagtttgccaaatgccccagcttccgcaggtccccagcaattctgtcagcctgtgagatcagcttattcaagcgacacaaaactctatcccccarccttcttgccccacctacatctcaggaagcttctttctccagactttgcctcttagactgttggctcccgtcctgcccctgtt

SEQ ID NO: 106033 - DNA, 620 bp, Homo sapiens
ggttaataagtcttttgcagctctaccaaaactcttgaaattctaaaaaatgtacataatgactctaaattwaaaaaataatttaatgttgaaattaatatttaattaaatgtctataacatgtaataccatgcctataattatacatgattatattcaacataggaaatataaactttaatctgctttgtattatgtgtcaagggttctccacgacttaaagaacttgggcatatgatggtttttcaaagctccaggtagctacagcctcaggcagacttaatcactttcaaattctatgcatctaaagccaattgcagtattctgttcttttttttcccttaaatcctttttcaaggcattccattgctaattctacaagaaacaagactgtattttacttttgtttttattatccaatgtattatactcagcacacttacttaacttgtattagcacttgtaagttataattacaattattatttttgttaatacttatgtagtgctgacttactagcttgtttgctctttgatgaacaacattaattcattattcatttaagtctttcaagcttatgtgtagtgcttttggggttgtaagtgacagaaaccaagcg

SEQ ID NO: 106034 - DNA, 620 bp, Homo sapiens
ggttaataagtcttttgcagctctaccaaaactcttgaaattctaaaaaatgtacataatgactctaaatttaaaaaataatttaatgttgaaattaatatttaattaaatgtctataacatgtaataccatgcctataattatacatgattatattcaacataggaaatataaactttaatctgctttgtattatgtgtcaagggttctccacracttaaagaacttgggcatatgatggtttttcaaagctccaggtagctacagcctcaggcagacttaatcactttcaaattctatgcatctaaagccaattgcagtattctgttcttttttttcccttaaatcctttttcaaggcattccattgctaattctacaagaaacaagactgtattttacttttgtttttattatccaatgtattatactcagcacacttacttaacttgtattagcacttgtaagttataattacaattattatttttgttaatacttatgtagtgctgacttactagcttgtttgctctttgatgaacaacattaattcattattcatttaagtctttcaagcttatgtgtagtgcttttggggttgtaagtgacagaaaccaagcg

SEQ ID NO: 106035 - DNA, 620 bp, Homo sapiens
ggttaataagtcttttgcagctctaccaaaactcttgaaattctaaaaaatgtacataatgactctaaatttaaaaaataatttaatgttgaaattaatatttaattaaatgtctataacatgtaataccatgcctataattatacatgattatattcaacataggaaatataaactttaatctgctttgtattatgtgtcaagggttctccacgacttaaagaacttggrcatatgatggtttttcaaagctccaggtagctacagcctcaggcagacttaatcactttcaaattctatgcatctaaagccaattgcagtattctgttcttttttttcccttaaatcctttttcaaggcattccattgctaattctacaagaaacaagactgtattttacttttgtttttattatccaatgtattatactcagcacacttacttaacttgtattagcacttgtaagttataattacaattattatttttgttaatacttatgtagtgctgacttactagcttgtttgctctttgatgaacaacattaattcattattcatttaagtctttcaagcttatgtgtagtgcttttggggttgtaagtgacagaaaccaagcg

SEQ ID NO: 106036 - DNA, 623 bp, Homo sapiens
gataaggtaagtgggagctggaatatatagggttgtgccattaagaaaaaatgttcaaatttatagactcagagcaattctaagaaaccgcaaagtttagatcaaaatcataagtgctggtagctgagtgttggyagtcatgggatgagaataagaaggtacattccattcattagtctgtctgttaagtatacctgtgttttgagtataaatgtgttttctaaaatcaaagaccaattcaagttcattctgaattatgatccaacattttatatgaatactctacatctattctatgctgagattaggaccatttgaagattagtgagcattccatttcaacaactttcacaaatgtaaaatctgagtttattttttgcatctactcagtattgcagcattgttgtttcacagttcaaagcccatacacatattatataaccatatatttattaagaatttattacatattaaatactgttctaggtgctgtttatacaacaaactacaatgtgataaaggttcagagggcaaattgtttccctaagtattaatattcttactctcaataatgccttcatttctaagtcatgtggaacacacggtaggcaacaattccaatg

SEQ ID NO: 106037 - DNA, 579 bp, Homo sapiens
gtggacatatttttagaataatcacagaacaatgagcaatgttcattacatttgtagcaaacagaattttaccttcacaatattatgcttctttctctccctagattaaacaatataacccctttcccaaagagaatcagcaatggactgagtgatctgaaaggctactctggcatagaagtggaaacartcttgggattccatttgggtattctgggttcaagtttgatttttgccacttaacatctaagtaaatgaatccacagcaacttaacccacaacacaagctacttgtgcattttaaaaaaggtgggtttttttttgtttgtttgttttgttttttgccgggcgtggtggcttacgcctgtgcctgtaatcccagcactttgagaggccaaggcaggcagaccccttgaggtcaggagttggagaccagcctggccaacatggggaaattaccctgtagtccctgctactcaggaggctgaggtaggagaatagcttgaaccccggaggcagaggttgcagtgaacctagctgtcgccacagcactccagcctgggtgacagagcgagactc

SEQ ID NO: 106038 - DNA, 579 bp, Homo sapiens
gtggacatatttttagaataatcacagaacaatgagcaatgttcattacatttgtagcaaacagaattttaccttcacaatattatgcttctttctctccctagattaaacaatataacccctttcccaaagagaatcagcaatggactgagtgatctgaaaggctactctggcatagaagtggaaacaatcttgggattccatttgggtattctgggttcaagtttgatttttgccacttaacatctaagtaaatgaatccacagcaacttaacccacaacacaagctacttgtgcattttaaaaaaggtgggtttttttttgtttgtttgttttrttttttgccgggcgtggtggcttacgcctgtgcctgtaatcccagcactttgagaggccaaggcaggcagaccccttgaggtcaggagttggagaccagcctggccaacatggggaaattaccctgtagtccctgctactcaggaggctgaggtaggagaatagcttgaaccccggaggcagaggttgcagtgaacctagctgtcgccacagcactccagcctgggtgacagagcgagactc

SEQ ID NO: 106039 - DNA, 554 bp, Homo sapiens
ctgatgattacattaggtctttaaaaagctctgcttgytaacattttttttagcctagtaaggcagaatattcttgaattaagactgagtaaatgtcctatgtattcagacttcttactcattgatttactgtacgagacagagtccaaaaaggaaacagaatcaacaccagtaattgatcagggaatatttaatagaaagaaatactaactggtagcaggtgagtagccactcagagggtataaaagagaattcagggaattcccttgaattctctgaaagtcccaaatgaagaaatacacttggagaagggggttcctctccagcactaagattcagacttcattggagtctaaattcattgtggctggacctactggatggcagagaagttggattgcttcaggccaaatctggtccatggccagctggctgggactggtgagctgggaaatctgggtaggaactggcattcagaaagctttccactggggtccaacaaaactggctggagggcatgtgccacgtcgcctcttggacacacacctccaact

SEQ ID NO: 106040 - DNA, 554 bp, Homo sapiens
ctgatgattacattaggtctttaaaaagctctgcttgctaacattttttttagcctagtaaggcagaatattcttgaattaagactgagtaaatgtcctatgtattcagacttcttactcattgatttactgtacgagacagrgtccaaaaaggaaacagaatcaacaccagtaattgatcagggaatatttaatagaaagaaatactaactggtagcaggtgagtagccactcagagggtataaaagagaattcagggaattcccttgaattctctgaaagtcccaaatgaagaaatacacttggagaagggggttcctctccagcactaagattcagacttcattggagtctaaattcattgtggctggacctactggatggcagagaagttggattgcttcaggccaaatctggtccatggccagctggctgggactggtgagctgggaaatctgggtaggaactggcattcagaaagctttccactggggtccaacaaaactggctggagggcatgtgccacgtcgcctcttggacacacacctccaact

SEQ ID NO: 106041 - DNA, 600 bp, Homo sapiens
cacccccaatgggtactcaagtctcctccgatgcttctaccaccactctggaaaatttctcaccagtcacttttcttcttgagatttaaagttcaaagtctcagacaagaacatttcatgggatgagcctatgtcacatgactggttctaaagagagaaacaaccatgtctcttaccacagctcatatagactgtgcgtgtgtgtgttgggggcctggggaggattcctcaaatacagaagccccttctccttacccccaccaccaagtaagactcatcaaatagcttccatgaaaacagaatatttgacagtgcattcaatttaatttagttggattgatgaatggaaatagctagaattcagttttcctgtttgatcttccatcacaaaacgaagatgtagggtgatggctgggggaggagaaaattgaggtggagagggctaatggtaaaggctctatagtccaagatttaaatctcagttacaacatttactatctttgaacttgggtaaatctattacagcttcatattggtgatgycaaaaacaaaaataaaaatgctgttcacctcatagatttattctgaggatgaaatgaa

SEQ ID NO: 106042 - DNA, 591 bp, Homo sapiens
atttttagtttgaaattacccatttgattctgctacaggaaaatgatgttagacaatttaagtaatagcaatcaaaattaatgaacatgctttcattaaattcacacgtactgaaaatattgtcattgaaatcacttttccccacacaaaaagaatattttattttgagtgttttccttctaataattttcactttaaatgccatagaataggccaagataacttcagtatattttaccaataatttcctaattgggrattgggtttgagtccatttttctttcataagaggatacatatctttcaaaacagaagggggaagtatctttaatgaaaacccatcacagataacttacatttgattaatattgttgatattagtggatctttttcctctaaacctagcagtttttttggcaaatcaaacattatttttctgtctctgaataaaaaataagtcaggttagtaaagaacagtcacagaaatcatataaactactaaatcaagatggacctaagctttcagccccttcttgggttacttaatcagaattttttaggcaaagtcacaatgggcctgcagggagtgac

SEQ ID NO: 106043 - DNA, 663 bp, Homo sapiens
cagagtaagtaacttatatttcaccagtatgtttaacagaatttctgttgttcagcacttgatattcttgctaacacttgataatatctaactttttaaattttaaccatattaattgggtgtataaaagtatctcattgttgttttaacttgtatttccctaattacaactgaaagtggataggttgttaacggtttctagtagttagaagacagagatgctgctaaatattctataaagcacaggacagctccacaacaaagaattatctggccacaaatgtcaatagtgctgaggttgaaaaactccgacctagaagacattcaaagatttctaaaatattacatgctacagatatgggtaacagtgagtttgtgctattttcatttataaatataattcatcaatcaaagaggatgaagcagtaagaattttagaaatcatataacttgaccttcttatttgatgattaaggaagcatgatatttaaaatgttgatttgcccacttagatatctgcttgatgctttatgaaaatgctttccattyctagagttatgttagcatcttgtgtaaccacaattcaatttactggatagcttcctgtttcagaaaaaaagattgcttcacttctacataataacattctcattagagttcaag

SEQ ID NO: 106044 - DNA, 663 bp, Homo sapiens
cagagtaagtaacttatatttcaccagtatgtttaacagaatttctgttgttcagcacttgatattcttgctaacacttgataatatctaactttttaaattttaaccatattaattgggtgtataaaagtatctcattgttgttttaacttgtatttccctaattacaactgaaagtggataggttgttaacggtttctagtagttagaagacagagatgctgctaaatattctataaagcacaggacagctccacaacaaagaattatctggccacaaatgtcaatagtgctgaggttgaaaaactccgacctagaagacattcaaagatttctaaaatattacatgctacagatatgggtaacagtgagtttgtgctattttcatttataaatataattcatcaatcaaagaggatgaagcagtaagaattttagaaatcatataacttgaccttcttatttgatgattaaggaagcatgatatttaaaatgttgatttgcccacttagatatctgcttgatgctttatgaaaatgctttccattcctagagttatgttagcatcttgtgtaaccacaattcaatttastggatagcttcctgtttcagaaaaaaagattgcttcacttctacataataacattctcattagagttcaag

SEQ ID NO: 106045 - DNA, 543 bp, Homo sapiens
taatcaccttggagagcagctgagaatttcaatcattattttttttcccgaggtcccatcaatcttgtccttcgaagtaatgtgatttttttttcctctgcatgaatactaaatcttcttagtggagaaaaatgatgctaggaaataaagtggaagaaactaatttttataggatatttaaacggaactcttgaagaactgttgttttaaaccactccattatacttccaatttaatgccttggggatgggaaaatgtctctctgagggcctcaattcttattgcttattgcagcaatttgagccaagcttaccactgaggtctagaggtggcacatattatggcgaagagccaggaattttgagacaattatctctggtttcaaatcctagtctaccatttacaaaccacaggaactttattcakttgccatccttgagactcagtcttctcatacctataaagggaaaatagtagtacatacttcagataaagaatgtgaaaattaaatggagtaaataatcttaagtacttagaacattt

SEQ ID NO: 106046 - DNA, 637 bp, Homo sapiens
caagggcggagactccatgactcatcttttatcagacaagaacttaaacagaatacacagtagatgcttaattgctttttactgaatgagaaaacagactcaagagtgaatgggaaatgccctaatgtcaggtcaaattagaactttatcctcgtgctcagtggatcccggatcctcataatactcagtggtattttgtcttcaagtgacccatytcacatgcaatgatacccataggctcaaagtaaagggataaagaaaaatctaccaagcaaatggaaaacagagaaaaatcagggtttctattctaatttcagataaaatagacattaaaacaacaatgatttaaaaagacaaagaagggcattagataatagtaaagagctcaattcaacaagaatattgaactcctaaatatatatgcacccacacaggagcacccagatttataaagaaagttaagagccttagactcccatacaataacagtgggagacttcaacactccactgacaatattagacaggtcatcgaggcataaaactaacaaagatatttaagacctgaatttaacacttgacaaaatggacctaataaatctacagaacacttcaccccagaacaacaaaatatacat

SEQ ID NO: 106047 - DNA, 637 bp, Homo sapiens
caagggcggagactccatgactcatcttttatcagacaagaacttaaacagaatacacagtagatgcttaattgctttttactgaatgagaaaacagactcaagagtgaatgggaaatgccctaatgtcaggtcaaattagaactttatcctcgtgctcagtggatcccggatcctcataatactcagtggtattttgtcttcaagtgacccatttcacatgcaatgatacccataggctcaaagtaaagggataaagaaaaatctaccaagcaaatggaaaacagagaaaaatcagggttkctattctaatttcagataaaatagacattaaaacaacaatgatttaaaaagacaaagaagggcattagataatagtaaagagctcaattcaacaagaatattgaactcctaaatatatatgcacccacacaggagcacccagatttataaagaaagttaagagccttagactcccatacaataacagtgggagacttcaacactccactgacaatattagacaggtcatcgaggcataaaactaacaaagatatttaagacctgaatttaacacttgacaaaatggacctaataaatctacagaacacttcaccccagaacaacaaaatatacat

SEQ ID NO: 106048 - DNA, 650 bp, Homo sapiens
ttagttttgcctttaatcacttatattttttaatttgccttacattttaaaatttgatgtatatgtctctgcaaactgtcaactcctggaagacagagacagtgtcatgcttctttcagaacctataaataacaaaaaacacaagagaattaaataaatatttgataaattacattcaacactggactgtaatcttcatgaaggcaagtgttgtgaccattttgttcacggtgatatttctaatgcttacaattattcytggtccattgctaagtgcttcacgaatatttgtttaatagatgaataaataacgttttcaaattgtaagttttattttcaactgaggttgaggttgcggtgaggagaaagaagagtggaagagggacatttcctgttcctggatcacatgagggccatcttttcacagttggttttctctaccttattggcctatgatcaaaaataagggcagatccaggaagcttgcatgagatctagctgtttctaaatcctcagagctgggatgtatgccaccactcactgccccattcccaattaccaattatttcatcaaaggatggacttgggctaaacatctccctttgttttggttaggaggatccgcttatattttctggttgagtaatatt

SEQ ID NO: 106049 - DNA, 650 bp, Homo sapiens
ttagttttgcctttaatcacttatattttttaatttgccttacattttaaaatttgatgtatatgtctctgcaaactgtcaactcctggaagacagagacagtgtcatgcttctttcagaacctataaataacaaaaaacacaagagaattaaataaatatttgataaattacattcaacactggactgtaatcttcatgaaggcaagtgttgtgaccattttgttcacggtgatatttctaatgcttacaattattcctggtccattgctaagtgcttcacgaatatttgtttaatagatgaataaataacgttttcaaattgtaagttttattttcaactgaggttgaggttgcggtgaggagaaagaagagtggaagagggacatttcctgttcctggatcacatgagggccatcttttcacagttggttttctctaccttattggyctatgatcaaaaataagggcagatccaggaagcttgcatgagatctagctgtttctaaatcctcagagctgggatgtatgccaccactcactgccccattcccaattaccaattatttcatcaaaggatggacttgggctaaacatctccctttgttttggttaggaggatccgcttatattttctggttgagtaatatt

SEQ ID NO: 106050 - DNA, 621 bp, Homo sapiens
tggcaactatatctatctatatatctatttttgattggtcttgcactaaatctgtaccattagcttgtgataattgatattttattacatataaaatttatattggaaatatagtatgcattctttgtttctctamataaaaatgcaaaatcccttaacattttaggccatattaatcatgcttgatacgtgtatgtttattttatcttggactttattaaattaaaaaataattctaatggtttgtcttaattgatttttttattttatagatagaagttataataaaaatgattgtttttctcccatttccaatattatttattttacttcttttacaaccaatacttttatcattttttattgcgtctatttgattcttctctcttttcttctttattagtcttgctagccgtctatcaattttgttgatcatttcaaaaaaccagctcctggattcattgatttttttgaagggttttttatgtctctatctccttcagttctgctctgatcttagttatttcttgccttctgctagcttttgaatgtgtttgctcttgcttctccagttcttttaattgtgatgttagggtgtcaattttagatctttcctgcttt

SEQ ID NO: 106051 - DNA, 486 bp, Homo sapiens
tctaaatattttttcaaatatcaacataagaaaatgttgacatgatatcaaactgtagtaatgaataaaacatagtatacatgaactgtacaaatartcttgtctactttgataattgtgttgaaaacattcaggtagtccaacatagatataagaagcagctaaaattcccactgggtaactctttttattgtatttattttaatacaggaaaaggctacaaatgcctgcttctaattctccctaaaattaaaaatttatgtgaagattcagcaaaaaaatagatagaaaggaaaatatgtgtacgtgatttctttagaaacaaattctgatctaattttagagatctggggtgtgtattactttaggaaatgtttgtttttaatatttacactttgtaatttttttccccaatcactaggatcctttaagtatgttaggataaatgtttatttagcagatacctagagtactaaaagtctagag

SEQ ID NO: 106052 - DNA, 537 bp, Homo sapiens
acacctcttgaagggaggtactgcaaagattgctattttgcaatatgctatatgtatacataatcaagaaagaagacatacatagctttcctttttccattacattttacccttcaattgaccactgtgacatggatttttacttgattccataggtacccactttttgagcagtgatccaaaatgatttttgagtccctagaagcattgatttggtctagtgtacggtcacctatcaaatgcaggcaggcatgtctcaggaagatctagaaaacttttacagtattcagttgtggcagtgttgaagagtactttctcaaaaggacccagtcttccttttgatcaaagaactccaagtctgtgaacgcctttaggttcrggaagtagatgagaaattgtgaatactcaagtccgatttctgcccatcaaacatagagttctcttattatgctgattaagtaacactttagaaatctgcttatctattttcctcctaagtcatttcatttctaaggaattaagtgagcatagacaaag

SEQ ID NO: 106053 - DNA, 616 bp, Homo sapiens
ctgctccaggctgcaagctgtaaaccccaggccstgcctgatcccctcagagcccaccttccatactacactcatacgttccacaaaacatagaggatctgtagaaggacatatctgaaactcattcagtactcatcacttgagaagctcttctggtttagataaattaaaaggtgagaatgaaacaggttaactttcttccacttagctttttgtaacctagctctccttcccaatattttgcagtgtttttactattaactttcagtttttaaaatatcttttttggaacccttgtgcattgctgctgggaatgtaaaatagagtagcccctgtggaaaacagcatggcagttccttaaaaaattaaacatagaattatcatgtgatccaacaattctactactagatatacacccaaaagaaacaagagtagagacttgagcaaatatttgtacacccatgttcttagcagtattattcacaacagccaaaaggtggaagcaacccaaatgtctattgatgaataaatagataaataaaatgtagcaaatacatacagtggaatagtattcagccttaacaaaaagaagttttgatacatgctacaatatcaa

SEQ ID NO: 106054 - DNA, 495 bp, Homo sapiens
agtttcataattaaggaaataactcacactttatctaaatggatttatatgatttttcatctattttcttaaaccattytcataacaatttttatgtactaaaattaacatatgttaacttagtcatgaagcttgtaaactacaaatgtgataatgaggattcagtgcaaggaaaaaagacagtattttcaagcaatcttcaatctgacttgtttagaggagctaatgaataaattaaaacagctattacgtaagcttaaaaaaatggaaaatgtaatattcctgaaacagaagatttagaaaggacaggatttaaaagtgttgtaagaagagtaaaagttgacagattgtcacttttacctgtctttacctgtcattgtacttgctgatttcattttctctttttatgagaaaaagcataaaaacataataggcagactaggtgaagatgaaaagctttcttcctcaatagttttgtactgagttgattttcct

SEQ ID NO: 106055 - DNA, 628 bp, Homo sapiens
ttagaaatatatattttttctttactatagcattgtcagctatatttaatgaattcctgtgaccttggagattgtattccacctccctctccttgacactcatcagaaatagaaagactcaagaaaaaaaaatgctgtatccatgatgggtagtttgaatgtaactcaacagacacatgtttcatgaacatggttttcttaacgaaatgcagggatatcttgttttattgcacttagctttattgcactctgtggatattgcatttttttacaaattgaaagtttgcggcaaccttacatccagcaagtctgttgagaccattttacaacagcatgggttcacttcctgtctctctgtgacatgttggtaattcttgcaagatttcaaacttcattattattatatcctatttgtgatctgcaatttgtggtctttgatgttactattataattgttttggggtgccactaattgtttgtatcacattgttccatggttcttagtctgttctgtgtttttcagtctttttcctgtttgcttttcagttttagttgcttttattgagatattcttaggctcagagattctttcctcggygtgtccagtctgctaataagcctatcacaa

SEQ ID NO: 106056 - DNA, 560 bp, Homo sapiens
gtttttaaaagacagggtctaattctagagcgcagtagcatgatcatagctcaatgcagcctcgaattcctgggatcagccaatcctcctgcctaagaaccatgaatttccagagaaggttggccaatatgaaaactgtggcagaaagcctgatgttccttgatgacctggggccaggctcatgtaacccatttcaagagtccaaaactcagtcacrtgcttagcaactaatgacaaaatccaaactcaaaatactggtagagtgcacaggaaagatattacatgaatctgtgtagaattcattaacaatatatttaaactatacaactctcttaataaaaatagaaaagtcaagatgctatgtaaatatcattggtgtattccaaagcaaaaattttggaaacatccatactttttaattgaaatattgatgaagaaggtgaagagtttgagatttagctttataatgtatattgcattttaaaaacagtcataagccattcttagaagaataggaagtgtctgtgattttaagatgctgcattatatgctcaatagta

SEQ ID NO: 106057 - DNA, 631 bp, Homo sapiens
aagggagggacacaagcctatttaccacctgctgcctgaaaaactcttgggccttgaaagaacaccaatgggagccagtcagtggtcatcacaggccttgggtgagacccagtgttgtgctggcttcagttctcaatcagtgcagtctaagttatggtggccacagagggacttgagtcacctctcccccagcttgaggcagctcagcacacagagagacagactctgtttgtttgagggaaataagggagaaaaaagtttctgcctggtaatccagggcattttcttggatctttcccaagaccaccaagacactgcttctacaagtctgcaagaatcacaatgttactggacttggggtaaccactaatgmagatatggctgcagtgacaaaggacttagatcacaacactaaattccctttgaatacttagaaagccttcccaagaaggagtacaaacaatccagactgtgagactacaataaatacccaaacattgacaaatattcacaagcatcaagactacccaggaaaatgtgacctcactaaacaaactaaataaggcaccagtgactaatctcagagtgacagagatatgtaatttttcagacagagaattttaaaatagct

SEQ ID NO: 106058 - DNA, 602 bp, Homo sapiens
gtgtataggcagactgttcatatagacactacataatgtgtcaagtattattcaaaatatttatttgaaataataaatgagcataatgggtgttgaataatcagatacatttttctcaaggcaaaatttcataaaatggcatttgcctctacttatgattaataatccataggttttaatagaagtctgaaacatgagaaaattgtagcatgaatcataggatatttttaacctcataaaacatagcctgaaaatatcatcacatatacagtaagcatagaacaattactgctcaaaattgaagactgtgtccctaaagagaaaaaataactaaagcagtatgtgtttctktgtaaatttagatactaatgggaagttaaccatatttttagatacagtacagattttaaatcatttatctaataccaaaactatatgagacttaagtatcatgatttctatactctcctgaaaattaagttttcaaaaccatctagattagtgactgactcaaatactactttaatctacattaagcattactatatgggtttcatagtggttagaaacattatagattaagaatatatcaacagagtgta

SEQ ID NO: 106059 - DNA, 506 bp, Homo sapiens
gaaaaacacacatagggtaaattaatttttcataaaactaccaaggtaattcaatgcataaaggatgaactttcaagacattttgatgaaactattaaatatctaaatgcataaaaatgaacctacatgttaccaaattctatacacaaaactaaatcagtataaataatggatctaagtgtaagggttacaactacaaaaaatatattaaaaaattgagcagaaatatttgtaggaagcaaatattttttgataggacacaatatttataaataataaaagataagagacagatgaacttaaattaattaaaacttaaattraaaacttttaaaatgtttttagctaagatacaataataggactagatttatcctttaccccaaaataacaataaaaccattaccacatgtgaaaccatagttgttaagacataggttatcagacaattaaggttagtgatctgagagagaaaataattgaacaaagtgagtcatatgttggcc

SEQ ID NO: 106060 - DNA, 548 bp, Homo sapiens
ttttaaaagtatatcccatatatcacatattaaaatgtataattaaatgtaaatttctgataaatggcaatgtttttatgatacatatgttgcaggctgtgtttggacatacttatatttaatttctaatttaactgaaatttcacacacacacacacatacacacacaaatctatatatattggaccatgacaaatgctatggagaaaaaatgtgcttgataattaattagaatacaaaatatcagggtgaggggactgaaattttatataggataggttagatagggagagtktactgagaagatttgagcaaagagctgaatgaagtaagtgagaaagcaagtcaaggttaatgtagaaaaaaaactttcttggcagaggagatggcaagtacaaaagactaaaccaggactaggtcaattttagaggattgactcaaattgccacagaaattctgaatgtaaaatgctgtcaaatagtatcgcatgctatggagaaatctttagtgaaaaaaaaaaaacagttggtcaatgcaaaaaagcatca

SEQ ID NO: 106061 - DNA, 641 bp, Homo sapiens
agcaaatttttatttatatcatgatagaaagaagccttatttctctgtagattaacataagactttccatcacattttgaaaatagttgtttttagaactttactcattaaatttccattttttatttctagctttctgtctacttttcattactctttaatgtcaatgataaacttttattagtaaataattgctttgcacttgaattaataatgtattatttttctgttgtkcaatgagtacaaaattcagttatgatggaaaaataagttatagagatctgcaacataatataatgcctgtagttaacaatatgatattgtgtacttcaaaatttgttaagagggtagatcccatgttaagtgttcttactataaaaacaatacaaaaacaaagggacacagagaaactttggaaagagttcatcatgcctattatcttgactatggttatgtcatcataggtatttctctccaaacccatcaaattgtatacagtaaatatgggcggttctttttacataaattatacctaaatgtagctgttagtaaaagaattatgtctttatccttcacattttcttggttaacatctcactatgccattggaattataattaactaaggctaaaatatgtcta

SEQ ID NO: 106062 - DNA, 641 bp, Homo sapiens
agcaaatttttatttatatcatgatagaaagaagccttatttctctgtagattaacataagactttccatcacattttgaaaatagttgtttttagaactttactcattaaatttccattttttatttctagctttctgtctacttttcattactctttaatgtcaatgataaacttttattagtaaataattgctttgcacttgaattaataatgtattatttttctgttgttcaatgagtacaaaattcagttatgatggaraaataagttatagagatctgcaacataatataatgcctgtagttaacaatatgatattgtgtacttcaaaatttgttaagagggtagatcccatgttaagtgttcttactataaaaacaatacaaaaacaaagggacacagagaaactttggaaagagttcatcatgcctattatcttgactatggttatgtcatcataggtatttctctccaaacccatcaaattgtatacagtaaatatgggcggttctttttacataaattatacctaaatgtagctgttagtaaaagaattatgtctttatccttcacattttcttggttaacatctcactatgccattggaattataattaactaaggctaaaatatgtcta

SEQ ID NO: 106063 - DNA, 509 bp, Homo sapiens
ctgggtaggagaagtccctctggaagggtgttcttcaaggctggtagaaaaacctgcactgagcagtgcccgctgtgggaggagagggagcaggcctttccccactccttgccaggggcatygccaaggtgtgtgcaccaggaagcccataccaccactcatacccactcccccctggccagtgagacccccccatgagaacccctgttacagggaggctgtgatccagacaggagggaagagtctaacagttctgcttttatcactaatgtggtgagatcttacatcgccaacaggaaggcctcccagagggctctgctcttctgatcccactgaagagtcctccctgctcctctcagccccatggtttatatctctggaaatctcctggttggcctgatattgatttggcttcgaaaaggagtcagtaagaaatacacacaccacaggtctgaaatagaatctgtcctttgcagttgcagcaaatactccccaaaagctgggtctgt

SEQ ID NO: 106064 - DNA, 509 bp, Homo sapiens
ctgggtaggagaagtccctctggaagggtgttcttcaaggctggtagaaaaacctgcactgagcagtgcccgctgtgggaggagagggagcaggcctttccccactccttgccaggggcatcgccaaggtgtgtgcaccaggaagcccataccaccactcatacccactcccccctggccagtgagacccccccatgagaacccctgttacagggaggctgtgatccagacaggagggaaragtctaacagttctgcttttatcactaatgtggtgagatcttacatcgccaacaggaaggcctcccagagggctctgctcttctgatcccactgaagagtcctccctgctcctctcagccccatggtttatatctctggaaatctcctggttggcctgatattgatttggcttcgaaaaggagtcagtaagaaatacacacaccacaggtctgaaatagaatctgtcctttgcagttgcagcaaatactccccaaaagctgggtctgt

SEQ ID NO: 106065 - DNA, 509 bp, Homo sapiens
ctgggtaggagaagtccctctggaagggtgttcttcaaggctggtagaaaaacctgcactgagcagtgcccgctgtgggaggagagggagcaggcctttccccactccttgccaggggcatcgccaaggtgtgtgcaccaggaagcccataccaccactcatacccactcccccctggccagtgagacccccccatgagaacccctgttacagggaggctgtgatccagacaggagggaagagtctaacagttctgcttttatcactaatgtggtgagatcttacatcgccaacaggaaggcctcccagagggctctgctcttctgatcccactgaagagtcctccctgctcctctcagccccatggtttatatctctggaaatctcctggttggcctgatattgatttggcttcgaaaargagtcagtaagaaatacacacaccacaggtctgaaatagaatctgtcctttgcagttgcagcaaatactccccaaaagctgggtctgt

SEQ ID NO: 106066 - DNA, 583 bp, Homo sapiens
agtagggaaagtgggatggcagccatttccctgctcctgaggtcaacatggcctaaggacttcagcaagcccaaatatgtacaacagtatccggcccactcgcgcctggagggggccatgctggtagactcagtccggstgcccagcaacagtgattctggctaatggctccccgttggagcagtttcctgaggttcctgctaatcctgttatttgcaaagagccaaagcccccataacagcagttttaaagcttgcttctggctgtattaagttagaccttgcaagggagatgaaggcagcagcatccgacactgaagaaatggctccagaggaaaagagccaatatccatgggtcctctgtattgatctctttctttgcctctcctggaacacccactttgctctcttttggctgctttaagtctattccaaataccaccagagaacatattaattcctttttagtctgaactggggttgggaaacttccttattcagaagaaatcaggtgtggtaactactattgattgccttgtatttattttccacttcatccctttccttccaaggaatgttgatat

SEQ ID NO: 106067 - DNA, 583 bp, Homo sapiens
agtagggaaagtgggatggcagccatttccctgctcctgaggtcaacatggcctaaggacttcagcaagcccaaatatgtacaacagtatccggcccactcgcgcctggagggggccatgctggtagactcagtccgggtgcccagcaacagtgattctggctaatggctccccgttggagcagtttcctgaggttcctgctaatcctgttatttgcaaagagccaaagcccccataacagcagttttaaagcttgcttctggctgtattaagttagaccttgcaagggagatgaaggcagcagcatccgacactgaagaaatggctccagaggaaaagagccaatatccatgggtcctctgtattgatctctttctttgcctctcctggaacacccactttgctctcttttggctgctttaagtctattccaaataccaccagagaacatattaattcctttttagtctgaactggggwtgggaaacttccttattcagaagaaatcaggtgtggtaactactattgattgccttgtatttattttccacttcatccctttccttccaaggaatgttgatat

SEQ ID NO: 106068 - DNA, 548 bp, Homo sapiens
agatgctcttcaataaatgttgtctttttcccaaatgaatgactctgcataggtttgttatataaagttttgattttgaatagaaaaatttaaaatactaaattgttactgaatatagaatacagtattaacatcattctgtttatatttgttaaagacccaatgtacctgttcttgtgtatgaaaaamcattattttccctcattttgaatttgtgatgttttatttcctcttttctgttttttatattgcacttccatttctcttctcttaaattttatttttattttcctcaattaatttaaatatttttggcttttcaatgaaaataaatagctcctacatcatcataaagaagtttttatcttagaaaatgatcttgaaactttcctgtgattttctgacactcaagtcaatcgtaatttcattttaatcattactgaaagtgaaaatgtctggatttcaaaagcttgaaaagaaatggcaatttctttgttttttggtaactgactgacattgccacacaagttgcctttgctgcaagtgat

SEQ ID NO: 106069 - DNA, 548 bp, Homo sapiens
agatgctcttcaataaatgttgtctttttcccaaatgaatgactctgcataggtttgttatataaagttttgattttgaatagaaaaatttaaaatactaaattgttactgaatatagaatacagtattaacatcattctgtttatatttgttaaagacccaatgtacctgttcttgtgtatgaaaaaacattattttccctcattttgaatttgtgatgttttatttcctcttttctgttttttatattgcacttccatttctcttctcttaaattttatttttattttcctcaattaatttaaatatttttggcttttcaatgaaaataaatagctcctacakcatcataaagaagtttttatcttagaaaatgatcttgaaactttcctgtgattttctgacactcaagtcaatcgtaatttcattttaatcattactgaaagtgaaaatgtctggatttcaaaagcttgaaaagaaatggcaatttctttgttttttggtaactgactgacattgccacacaagttgcctttgctgcaagtgat

SEQ ID NO: 106070 - DNA, 645 bp, Homo sapiens
tatcttctcactttactctctttgtcatggattggtaaactagttcccataggatggccaagtgttttgcaaattgagttttactggaacacagccatgctcattctttcaggcattgtctatgttgcttttctgctataatgacasttgagtagttgtgatagactcatggcccacaaagccaattgctatggattggcttcttcctttggaatcttaaagaaaaaattttaatgatcttaacgtcacttcatgttccaaaatggcttctgtaactccagaaatttttttattattttaaaatttttctgtagggacaagttctcactatgatgcccaggctgatctcaagctcctggcctcaagcaatccccctaccccggcctctcaaagtgtgagattacaggcctgagccaccatacctggccaaattcttttatataacttatagcagaaagaaggaaatgtagaaattcaggtcactcccttttaggaaattttctcagaagttccacgccacgctgcccttacatcttgagaactggccagaattcaataatatggctatcccaagcagcaaaggaagctgggaagtgtaatcttttattacgtgcagcaatgtgcccagctaaatgccgattagga

SEQ ID NO: 106071 - DNA, 556 bp, Homo sapiens
ggtgccaccaccttctcctttgtcagtgggggtccctgttagagaatgacactattatgcaacccaggtcataagggtggtgccctgatgcttataagaagagacatcaaagagtttatctctctctctctctctttctgtattcttgcaccaaggaaaggccatgtgaggtcacagtgagagggcactgacccacaagccaggaagagagccatgaccaaaaactaaccatgctggcatcttaatctcagacttccagcctccagaactgtgagaaaataagtttctgttgtttgagccgccaggtctgtggtctttygttatggcagcctgagcccactaagacatttgggttatgaacatcttccattcccacgttcatggtggtgtctcttatatgattatttttataagataatcttacaagaaatcttctattcaaaagtggtcaaacatatcaaccttctgttttctggtttgtttttttcatcttgtttaaaaatcctttcctatctgatgtcctgtgaattgtctcccctgttttctttggaaagat

SEQ ID NO: 106072 - DNA, 620 bp, Homo sapiens
atcaagggccacagtgggttgcagccttccctgctctctgctctcccaaggaagtctgtataatgatctgaagaactgaggaggggcgggcaggacagaccaaaacccaggaagtcacaagcccgaggtggcttcccaagcctggtctctgtgctgtggctttcaggaaccctgagccaaagataaagcctcttcaccaaaactttacatttgttaccaacagtcctgatgccatggatgttccatgctgtgtgcagtggccacacacgacaccacccaccaccaccccagcaaaggcctcctggttaccagggagagagtgggtgggagagagtagagctaagccaggagctcccagggaagccccytccttaggaagaggacgtggctacctgggtgctcagacctccagcctccccctccatcatggggatgatgagagcccaagcaggtgacttcctattgctcttgcttttgaaaagctcagtctgtgggtcaggttgtcagtctgtctgcctgtctggttctctctctggtcaggcagctacagaaggactagactgatgagataataaataccagctttggtcaccatgagtcagaggcacacagccagctga

SEQ ID NO: 106073 - DNA, 619 bp, Homo sapiens
tctatccacaggtatgaggggaattctaagaattagaaggtatcatttgggataacccctactgtttccaactagaaaaatgatttagaatgaaccaagaataatattcattaaatattgagtgctaagcagtggtctacygaaattcaagttaggagacaacaacgggttaggagaaacctagaagaaatgttctcggacagtcaaatataagcacaagcgacatcctatctataaattttcttgatttcttatcaacagaggaacaggaaatccagaaatggaaaatcaggaaattgttgataatttcctatctgtttctgctcatttaaattcagggcctccagccaaatgttgggaacgattgcctttaatccttattaaaagatctctactgtagcctctgttgcccacataatgccagagagaaaaggggcaggccacccttaggggtggaggtttcatggtgtgacactacacgtgtcaggaagggaagtctgtctgcagcacagactcccttaggcaactactctttccagtgctcctgcaaaaaggaagacattttatcagcagatccaggggctggtggccagaaaacacagactgcttggacggtccc

SEQ ID NO: 106074 - DNA, 628 bp, Homo sapiens
gtggtgagtacaaagcaacaagagtcaatcataaggagaaatcacrtgtgtgtcatcagttgatcttagattctggcatcagatagacctgggtttgaatgcctgtactgctacttactggcttgggttcatgactgtggccaatttaactaatcgtcatcagctttaattaaaaaagcttaataaaatccgccttccagaattgtagtgaggaatctgaataatacatatgactgcctggcatatggttaaggtaagccaggcagtgggaccagaatgagaatgacataaaagcagctatggagagggaaaggaagaagaaaggctatggttaaaacctaaggcagttaatagtcaaatgtgaacagcaaacaattaccagggagttttcaagggccttttgtattttaaagacctttatgcaagtaactgtcatcttttcttttctggggttattagtccttgttctttagtctttcctcctaatcatcactttccaaacctttaattatcattatggcttctctccacagtttcatatttctctctctggttgtaaaccccaagagtttgaacagtactctgtgcccatggagagggtgggaataacagtggcatcatacttgtt

SEQ ID NO: 106075 - DNA, 403 bp, Homo sapiens
gtcagtttagtaattcgtctttgtatttttcttccttccttccccatttttaatctgctcctcaggatcacttcaccaactaaatcctgcattcaggattttgtctaaacttctactttctgggaaactcaggctaagacagactatataaagatgctccatgacttagatggggttatgtcctgagaaacccataagttaaaagcattgtaagtcaagactgggtgttttgtagacatgatgggatgsaaaaccaaaaaacactatatccaaaaaatgctggcatcacagttacattgtagagtattggttgtttaccctcatgatcacttggctgactgggaggttttgcttgctgccgctgtccagcatttcgagaaagtacggaactgcatattgttag

SEQ ID NO: 106076 - DNA, 309 bp, Homo sapiens
gaattcctttgatgtagtgctaggtatagaatccagatttttgtggcttttgctctgctgcactttggctgtgacacacttctttccttctctttcaatcagacggtgraatttaatgtctgctcttagtatcttagtttaattgaaagttataaccacactaatgtataataacagtttgttaaatttttcctgaattttgctttgcttacgttgatgtcaattttcataaaaggcttcaaaatggatttatctttttttttaataaaagtggaaatttacatttagagaagttaagtgacttgtcaa

SEQ ID NO: 106077 - DNA, 455 bp, Homo sapiens
gattatttaatataaatttctgtgattattcattttcaagactttgtaattgttctttgttcctatttaatgatttttgtttcatttctgttttggtttcatcataaattatttctttaatattacatttttatttagctctttggagattatatatattctttcttaaattatctctccatctgttttatgattttaatttcatctggaattaaatggtttaattttctgattgtcaattcagttggctctcttyctcagcatttgatctcttcatgtgctttggctaatttagaatgacaactctttttcttcttctctctctctttctctctttctttctttctttcctggcttcttcgccttgctttatctactagtgaggcaaaaaatctcatgtcttcctgatgccccaattaaaaaccagggcttacattggtggtccagagatctta

SEQ ID NO: 106078 - DNA, 582 bp, Homo sapiens
gggtgaaaacctatgggggggaaaaaaaawctagtggttgaatttggggtatattttaaaggcagatctgctgactaattgagtatgaggtgtgagcacagatttctgacctgtaactggaagaagttcttcatttactgagacaggcaagactatgggaagagcaggttgggcatgaagatcgtgagcttggtttggagcttgttatcattgagatgcccatttgacatctatctttggatatccccacaagcagaccttgagacacacatttgagtgcaagtaatctacccgggagatgatcccaggaaacatcacagggaattgaagtgagatgggtaagaaacggactccagtaaagggtgtattaacaagccagttgataccataggcaactggaactcaatctctctggggaactctgagaaacagaagatacctcaaaacaaatgtctgtgcaggagcatagaagtccctgagaagtgaacgagctggagcattcatcctttagctcccatcagtcactggttgacagcagcttatggagggagttaactcagcctcatacacaggccaagtagg

SEQ ID NO: 106079 - DNA, 582 bp, Homo sapiens
gggtgaaaacctatgggggggaaaaaaaatctagtggttgaatttggggtatattttaaaggcagatctgctgactaattgagtatgaggtgtgagcacagatttctgacctgtaactggaagaagttcttcatttactgagacaggcaagactatgggaagagcaggttgggcatgaagatcgtgagcttggtttggrgcttgttatcattgagatgcccatttgacatctatctttggatatccccacaagcagaccttgagacacacatttgagtgcaagtaatctacccgggagatgatcccaggaaacatcacagggaattgaagtgagatgggtaagaaacggactccagtaaagggtgtattaacaagccagttgataccataggcaactggaactcaatctctctggggaactctgagaaacagaagatacctcaaaacaaatgtctgtgcaggagcatagaagtccctgagaagtgaacgagctggagcattcatcctttagctcccatcagtcactggttgacagcagcttatggagggagttaactcagcctcatacacaggccaagtagg

SEQ ID NO: 106080 - DNA, 585 bp, Homo sapiens
aatgcattaaaaagaccaagaaatgcatttagaatgaaaaaaaaaataccactataaaagtataagtgcacaatggaaatttattctcatgttcatttgaattctgtattaaaataaatagcaaggccagcacgcagtggctcatgctgataatcccagctcttcaggaggctgacacaggcagacacctgaagttgggagttcgagaccagtctggcaaacatggtgaaaccgtgtctcttctaaaaataccaaaaattagycaggcatggtgaggtgcttgcaagtccagctactcaggagtctgaggcatgagaattgcttgagcccaggaggcggaggggtgcagtgagctgtgatcacgccactgtactccatccagcctgggtgacacagcaagactccgtctcaaataaatagcaaattgaaaaacaaaacagaaactctttctcacttgtgataataaagtccttgctgaaggtttgcctttggacttcattcactcatgcacataaacacagatgctagtcctgaacacgctatgggactggctaaagtaagagctctcatttagacagatgtata

SEQ ID NO: 106081 - DNA, 598 bp, Homo sapiens
tctgccagatattcaaagaataattggtaactattctactgaaactattccaaaagacagagtaaaaaacaagttctccccaaatcattctatgaagccagtatcaccctaataccaaaaccaggaaaggagataacaaaaaaagaaaactacagaacaatatctctgatgaacatagatgcaaaaatcctcaacaacatactagctaaataatccaacaactcatcaaaaggataatacaccatgatcaagtgggttcatcctaragatgcagggatggtttaacacatgcaagtcaataaatatgatacatcacataaacggaattaaaacaaaaaccacatgatcatctcaatagatgcaggaaaagcatttgataaaatctagcagccctttatgataaaacccctcaagaaactaggtaaagaaggggcttacctcaaaataataaaagtcatctatgaaaaattcacagccaaaatcatactgaatggggaaaagttgatagcattcccactgagaattggaagaagataaggatgcccactttcagcacttctatttaacatagtactagaagttgcagccacagcaatca

SEQ ID NO: 106082 - DNA, 603 bp, Homo sapiens
gctgctttatttatttaataacatattgtactttattagagaccaaattttgaaagaaatactacacctgtacttgcatgatccttacagtgaaagcctccttaaattttggacctcagctccctcatttcccttagcgtcaaggatgagatgtggtggatgcgagcaagaacaaatctgacccaacgaacacaagctgaagcccaagaagacaagctgacattgatatccgtcctgtttgtttcttgccttgattttgagattgtcttgtataagttgggatccttcatcacaaagctaaacatacccagaccaagagtcagagaagctgatgaaggatcctctgaaaggtgargtatttgcagtgccagtcactgtgtcatgctaataaggtgaacaagcagagaactgacaaaatacatgaccaataaaatgcctgtggctttatttctgcctacgtaatgatctatttcatgatccttcccaacaggaaaggatattctaggaaatgtaggtcagcctagccaagtgaacctattgcaaacacacccacctctttttgtatttgttgaatacattaaaatatctgtattgacaaaatat

SEQ ID NO: 106083 - DNA, 603 bp, Homo sapiens
gctgctttatttatttaataacatattgtactttattagagaccaaattttgaaagaaatactacacctgtacttgcatgatccttacagtgaaagcctccttaaattttggacctcagctccctcatttcccttagcgtcaaggatgagatgtggtggatgcgagcaagaacaaatctgacccaacgaacacaagctgaagcccaagaagacaagctgacattgatatccgtcctgtttgtttcttgccttgattttgagattgtcttgtataagttgggatccttcatcacaaagctaaacatacccagaccaagagtcagagaagctgatgaaggatcctctgaaaggtgaggtatttgcagtgccagtcactgtgtcatgctaataaggtgaacaagcagagaactgacaaaatacatgaccaataaaatgcctgtggctttatttctgcctacgtaatgatctatttcatgatccttcccaacaggaaaggatattctaggaaatgtaggtcagcctagccaagtgaacctattgcaaacacacccacctmtttttgtatttgttgaatacattaaaatatctgtattgacaaaatat

SEQ ID NO: 106084 - DNA, 427 bp, Homo sapiens
tgcatttgctgaaggcctgagtttcttaaacttcggccagtgggttttgaaggccctcrtgctctcaaaaagtttgtatttattgttctctatttgatgaaataatatgaaaatgacagatataggcttatattttaaatcagctgcttgttgtctgataacagagtactgctatgtggctttagtgcaaagggattgcctaaagtgacagagttgttattaattcagtatttcccaaatcagggccctgaagtcttatattcccaagtttaagaaatccttgaataatattctctatgaagagtgtctctctctctctctctctctcgctctctctctctcgtgctcctttttttctgcctgctttatatccactgccagctgattagattgtgcccaccagattaagggtggatcttccttcccc

SEQ ID NO: 106085 - DNA, 427 bp, Homo sapiens
tgcatttgctgaaggcctgagtttcttaaacttcggccagtgggttttgaaggccctcatgctctcaaaaagtttgtatttattgttctctatttgatgaaataatatgaaaatgacagatataggcttatattttaaatcagctgcttgtygtctgataacagagtactgctatgtggctttagtgcaaagggattgcctaaagtgacagagttgttattaattcagtatttcccaaatcagggccctgaagtcttatattcccaagtttaagaaatccttgaataatattctctatgaagagtgtctctctctctctctctctctcgctctctctctctcgtgctcctttttttctgcctgctttatatccactgccagctgattagattgtgcccaccagattaagggtggatcttccttcccc

SEQ ID NO: 106086 - DNA, 566 bp, Homo sapiens
gtgtccccatttaaatctccatctctttgcttcaagggtgaattattactggcagctgcaggagtggtattctgtcagcaacattctccatcttgctccctgataaacttactagtgggtgtyttgtgattttttttattattgtattagatgaaactattcctctgcctagtgtccatctaccatcaaatatttatctagagcatctcaagtactccaaatgataacactgatttatggttatttgaagtttctttgaggcctgctgacagattacaaaaattgcttgatatatctgtcttaaaagagatcattgaactaagaatgagttgtcatgttgtttggaatagaatatgtgtattatcatatttgaagctaattcttaacaaaataattcctatgtaacatatggattaagtttaaatttgaatttaacctcatattcagaataaaaacattatttcttggggaagtaattatattattactctattaaattaacctgaggacttctgcttttggctaaattagagtggcttgtgacaaactgatgtttctttgaaaac

SEQ ID NO: 106087 - DNA, 579 bp, Homo sapiens
tatatagagaatttttgttaatttgagggggtggtattcagtcactgttttggagtgttggccacgtmtgctatatacagaacattaataatgctgaaaataatatctgctatttgttaaaatgtattatttatccaggcttggatatataggaactttgcacattacctttaatgacttgcaaaacagatgcgccagttttacagataaggaaacagactcagattaaatagcttccaaaaaagtcacacagagactgacctgtgactggaattttgggctgtttggttacacagcctgtacattggctgatctactgtgttccctctctaagttcaatttattcatttcttcaggtaatacaaacttgggaaacattcttactctccctcaccttctgtttgttcatccttaatatacacaggcattgttagattcatgtattcacctaaattttggtgcatattctgtctgcaagacactgtgctaagaatagggtgatgtataaattaataccagttctgcaaagaatgttggagttcaggggaagcacgtgggagagaagtaggtgaccagtga

SEQ ID NO: 106088 - DNA, 443 bp, Homo sapiens
gaattcttaattcctcaagtatgcccgatggaataccttgtctccactcctccacatacatgttacatattyatcgcatggatcgtaagacaactcaaccaggagaatcaagatttatgcttataactatagtatagttataattcatgcatgaacaacagtgacctcatgtggctaatgctttatgcctgaaactattaaactaagaacaacaaaaaaatgtctatgctatacatcaagacatgtcagagtaaatgattggagctgcctgtgccacacaacatactttcttttttaaggtgactgctcaaatctgtgtatgtttgtaaggttagattggtcaaaggttaacattatggaataagatatctgagggccaagtatcaaatcttacctccttgtattacccaaagcattcagtgctactctttgctcattgaaga

SEQ ID NO: 106089 - DNA, 604 bp, Homo sapiens
caaattcaataaatttgcaggatacaaaatcaacatataaaaatcaataacagcatttataaatgcaaacagtgaacaaactggaaaaggaatcaagaaagcaatcccatttacaataactgcaaaaatatgtaacatacctagcagtaaattcaacagcagaggtgaaagatctctacatgtamcactataaaatactgatgaaagaaattgaagaggacacaagtaaatggaaagatatgctcacagattggaataattaatattgttagaatgtcaataccatctaaagcaatctacaaattcaatgcaatccatatcaaaataacaatgatattcttcacagaaatagaaaaaaaaaaccctaaaatctgtatagagccacagatgaccccgaatacataaaacaatactgagcaaaaagaacaaatctggaggcatcacactagctgacttcaaaatatgctacaaagccatagtaaacaaagagcatggtactttcataaaaacagacacatggatcaattgaatagaataaagaattcagaaatgaaaatatgcatttatagccaactaattttcaacaaaggtgccaagatcacac

SEQ ID NO: 106090 - DNA, 558 bp, Homo sapiens
atggaaagaagaggaaggaagcagaattggtcataatgagaagtcaagctgtgatacaagacaagaatacatttggccaacctcacagtgacctgtgcaactaaactggactgtcagaatttaccaaattgggccaaaatgaccagacattcatatgccagccttgatcaytcattgcttgtgggcctccctgggaagtgtgacgctattactgaggcagctctttatagctgaggcaattcctgcagataacacttcagtagatgtgtggcacatccagcacaggagtcaatctcctttaacataaacttatacacccctggggttacccataagggtctgatatggtccacttgcaaggtttgtttagacctttgtcctcagggacctcttcagtgaactaagcagcctttttttaccttggttgggatagaatcagaattcagactgcagagtgatgggaatagctaaaacctcagtgacttctatcatcggcaatgaagcaacatgtttattcacatcagccctgttgcaagttcttaaatgtaccatttgtat

SEQ ID NO: 106091 - DNA, 558 bp, Homo sapiens
atggaaagaagaggaaggaagcagaattggtcataatgagaagtcaagctgtgatacaagacaagaatacatttggccaacctcacagtgacctgtgcaactaaactggactgtcagaatttaccaaattgggccaaaatgaccagacattcatatgccagccttgatcactcattgcttgtgggcctccctgggaagtgtgacgctattaytgaggcagctctttatagctgaggcaattcctgcagataacacttcagtagatgtgtggcacatccagcacaggagtcaatctcctttaacataaacttatacacccctggggttacccataagggtctgatatggtccacttgcaaggtttgtttagacctttgtcctcagggacctcttcagtgaactaagcagcctttttttaccttggttgggatagaatcagaattcagactgcagagtgatgggaatagctaaaacctcagtgacttctatcatcggcaatgaagcaacatgtttattcacatcagccctgttgcaagttcttaaatgtaccatttgtat

SEQ ID NO: 106092 - DNA, 558 bp, Homo sapiens
atggaaagaagaggaaggaagcagaattggtcataatgagaagtcaagctgtgatacaagacaagaatacatttggccaacctcacagtgacctgtgcaactaaactggactgtcagaatttaccaaattgggccaaaatgaccagacattcatatgccagccttgatcactcattgcttgtgggcctccctgggaagtgtgacgctattactgaggcagctctttatagctgaggcaattcctgcagataacacttcagtagatgtgtggcacatccagcacaggagtcaatytcctttaacataaacttatacacccctggggttacccataagggtctgatatggtccacttgcaaggtttgtttagacctttgtcctcagggacctcttcagtgaactaagcagcctttttttaccttggttgggatagaatcagaattcagactgcagagtgatgggaatagctaaaacctcagtgacttctatcatcggcaatgaagcaacatgtttattcacatcagccctgttgcaagttcttaaatgtaccatttgtat

SEQ ID NO: 106093 - DNA, 664 bp, Homo sapiens
ttaatttaattgtgttccccctctataatttccatatacggtttacctttgaaccatatgggtttgaactgcatgggttcacagatacatggattttcttctgcctctgccatccctgagacagcaagatcaatccctcctcttcttgtgcctcagcctactcaacatgaagatgatgwggatgaagacctttatgatgatccgtttccactcagtgaatagtgaagatcttgtaattctcttaataacattttctctcactttctttattgtgagaatgcagtgtataatacatataacatgcatgacatatgttaattgtttatgttattggaaaggcttctgatcaacagtaggctattattatattaccagcagttaaagtcaaaagtgatacagtgatttttgacttcatagaggtcagcaccctaaccactgtgttgttcaagggttaactgaaaacgcactggattgcatgagcataagataataatgagaccttaactactttccagctgaggtaggggaatttaaattctgcataatatctgctgtcaatagatttgcccagtaaagttttgtatcaaataagttctaagtcttatttcacatttttatctcagtttctaaatctgccattattacattggatttaggaggaaaa

SEQ ID NO: 106094 - DNA, 533 bp, Homo sapiens
cactcagtgaatagtgaagatcttgtaattctcttaataacattttctctcactttctttattgtgagaatgcagtgtataatacatataacatgcatgacatatgttaattgtwtatgttattggaaaggcttctgatcaacagtaggctattattatattaccagcagttaaagtcaaaagtgatacagtgatttttgacttcatagaggtcagcaccctaaccactgtgttgttcaagggttaactgaaaacgcactggattgcatgagcataagataataatgagaccttaactactttccagctgaggtaggggaatttaaattctgcataatatctgctgtcaatagatttgcccagtaaagttttgtatcaaataagttctaagtcttatttcacatttttatctcagtttctaaatctgccattattacattggatttaggaggaaaatccattataaaaaacctgttctaacaagaagactgttttttggtagtctcttaaacttcatattgggtgaagattat

SEQ ID NO: 106095 - DNA, 533 bp, Homo sapiens
cactcagtgaatagtgaagatcttgtaattctcttaataacattttctctcactttctttattgtgagaatgcagtgtataatacatataacatgcatgacatatgttaattgtttatgttattggaaaggcttctgatcaacagtaggctattattatattaccagcagttaaagtcaaaagtgatacagtgatttttgacttcatagaggtcagcaccctaaccactgtgttgttcaagggttaactgaaaacgcactggattgcatgagcataagataataatgagaccttaactactttccagctgaggtaggggaatttaaattctgcataatatctgctgtcaatagatttgcccagtaaagttttgtatcaaataagttctaagtcttatttcacatttttatctcagtttctaaatctgccattattacrttggatttaggaggaaaatccattataaaaaacctgttctaacaagaagactgttttttggtagtctcttaaacttcatattgggtgaagattat

SEQ ID NO: 106096 - DNA, 533 bp, Homo sapiens
cactcagtgaatagtgaagatcttgtaattctcttaataacattttctctcactttctttattgtgagaatgcagtgtataatacatataacatgcatgacatatgttaattgtttatgttattggaaaggcttctgatcaacagtaggctattattatattaccagcagttaaagtcaaaagtgatacagtgatttttgacttcatagaggtcagcaccctaaccactgtgttgttcaagggttaactgaaaacgcactggattgcatgagcataagataataatgagaccttaactactttccagctgaggtaggggaatttaaattctgcataatatctgctgtcaatagatttgcccagtaaagttttgtatcaaataagttctaagtcttatttcacatttttatctcagtttctaaatctgccattattacattggatttaggagsaaaatccattataaaaaacctgttctaacaagaagactgttttttggtagtctcttaaacttcatattgggtgaagattat

SEQ ID NO: 106097 - DNA, 490 bp, Homo sapiens
atgtaatgacaacatgctatagaggaaaaattattgatttgtgtaaataggcagatcttgtttgtattctagctccatcacttactaattttgtgatatgggcaatttatatcctatctgagcctgtgtttcctctacaatatgagataatttctactttgaagtactgttatgagggttaaatataaattactttctggtttatgatgttggtatatactatttccatgcatgatagttatttttatgaataagattttaacagtaagccatagaaaaatacaatgtaagactgattcttagtatctatcaaaacagattgtaaaaatgacttaaacatctagcatggcagtgactaacattttgaaaagcttaatttttccmttgagaactgtagcccaacacagtgtctgtgcctcagtgttcctcttatcaggaaggataatatctgtgatgcatggactaactctaatgaaaatttttattctta

SEQ ID NO: 106098 - DNA, 564 bp, Homo sapiens
aatattaagtatcagtttctcttttaatcttagacgtcgtggtggaaggaaaaatcagttagcaaagaagcaatcccagaaacagtgtatctttttgatgcctttatgcctttagacaatgttgaacacagtgagaaggataggttccctttaytgaatgttttttgtggaaacttagtttttcaatgcatcataggcctaaatcagtgtgcactactttggacattatccttggaagaaggaacagcttttcttcttctggcaccacagtgtatctgcatttgaatttctcccattgtgcatgagcacctcatgggccacaaagatgcgctttgagagcaccctgagatgaagtttattttaaaaggaacaacaaccaacaccaccaccagctccacaggggctgtccagtgtacattattctcatcttcttgggttattagtcttgatttttagaacacagtttggaaagtgctaatttagaatattaatgtctttatctttaatttaacttttcattctgtacacataactagcttataaacaattttgtttcaaatgcac

SEQ ID NO: 106099 - DNA, 459 bp, Homo sapiens
gtgcctactaaaatattgaagcaaattatttgtattttctttgttccttaagactctcataattcttaaatgattgagaatctcaaagagtatgtgtttatattgattatattgatatttagtgtggtagaattatacaattgaaattttttcaaaatctatttttagtttagatttcacagccttaccactgttgatattatgggctagataatgctttgttgtgaggactgtcttgtgcattgcagagagtttagcagtattcatggcctctaccaactagatrtccgtagtaacccatgacccaggttataacaacagaaaatattccttgagaacagtattgttaacagaattttttcattgaaaaataacttttctacaacaaaaagttgagtaaaaagtgcgtcatgtatttatattatttaaagtctctcatgttgagcttaataggagaca

SEQ ID NO: 106100 - DNA, 319 bp, Homo sapiens
tgtgaatctcctgattataactttcacagatggtctatctacagggttctgggataagaaacttgytgtctgtctacagaggaagctgttttcacttccagatagttctgaatatttgaaagtacttgctgattcagagtcaaattatgtcttgctgtaacatccacaatttctgaacttacatttgagataaaccaagattagactaaaccatgccttcaagtgacagactctcaaaaatgtgatgcattttttttcaaaaaaaactgcacgtccaggatactctacctggagaaaaacatagctctcattaaccttg

SEQ ID NO: 106101 - DNA, 319 bp, Homo sapiens
tgtgaatctcctgattataactttcacagatggtctatctacagggttctgggataagaaacttgctgtctgtctacagaggaagctgttttcacttccagatagttctgaatatttgaaagtacttgctgattcagagtcaaattatgtcttgctgtaacatccacaatttctgaacttacatttgagataaaccaagattagactaaaccatgccttcaagtgacagactctcaaaaatgtgatgcattttttttcaaaaaaaactgcacgtccaggatactctacctggagaaaaacrtagctctcattaaccttg

SEQ ID NO: 106102 - DNA, 560 bp, Homo sapiens
gtccaaactggttatgtgtctggtacaatgagaagcatgcttccccaacaccgcaaaaaagaaaggagagagtgagagcaagagatgagatgtccttaggacaactatttaccaggtaaagttgaattcagaaagactcataaggatttaaccatatgagaaaaagccaaaacattccttaaagccccagtatcatgacacatagacataggaagaaatatgcaaagcaactggaatttcattgatgttggagcaatgagcaccttcctatgcctacatgaytagatacaggtattagccctgtttagtccgaaatggattgggttaggtatttgaacctgatgaaaacacagtgataagtgagattcttattaacaaaaaaaaaaacttttattcaaccagcagcaatataacacaaaacacataattattatcttattcttcattgtatttcatttaacttttatcttgaactgccattaaatttgtagggaggccagaccatttcctaggaaaaattcccattttcagtgtagataaaagtcagaggacaattatag

SEQ ID NO: 106103 - DNA, 641 bp, Homo sapiens
atcaaatatttaataagaggaatttctcctgaaagaagaaaacaaagctttatgtttagaacaaactataaaactcagggtttttgtttgtttgtttgtttgttttagtccagagagcagccagccaasatttttagacgttgcactggaagcatgtatagatggaaaaagagtagacagtggaaatctcacagcttttcctggtttatagtttgcatcagataaatgttgtgaatagtcgatacagcagtaggcacaaaggttaattatacataagccattgtggtgatttatttgaagtttatatcaaattgtttaacttcagtttgtaggacctcaaaaaaagagagaagttttaattttaatgatttcaaggaagaaggataagataaagcttataaaccttagtccagagagtcacagtcatataatggaaaaaacagaaagttcagaattcagttcaaataataataacactcaaaaacaatgcctagaatctaataagtgcagtatagttttcttctgccacataatttttctctgtttcattcccccatttccaccaaaggtatttatgataaaactatttctttgtaaagtaaatttagttcattaacttgggatgattatttgcataaagt

SEQ ID NO: 106104 - DNA, 641 bp, Homo sapiens
atcaaatatttaataagaggaatttctcctgaaagaagaaaacaaagctttatgtttagaacaaactataaaactcagggtttttgtttgtttgtttgtttgttttagtccagagagcagccagccaagatttttagacgttgcactggaagcatgtatagatggaaaaagagtagacagtggaaatctcacagcttttcctggtttatagtttgcatcagataaatgttgtgaatagtcgatacagcagtaggcacaaaggttaattatacataagccattgtggtgatttatttgaagtttatatcaaattgtttaacttcagtttgtaggacctcaaaaaaagagagaagttttaattttaatgatttcaaggaagaaggataagataaagcttataaaccttagtccagagagtcacagtcatataatggaaaaaacagaaagttcagaattcagttcaaataataataacactcaaaaacaatgcctagaatctaataagtgcagtatagttttcttctgcmacataatttttctctgtttcattcccccatttccaccaaaggtatttatgataaaactatttctttgtaaagtaaatttagttcattaacttgggatgattatttgcataaagt

SEQ ID NO: 106105 - DNA, 620 bp, Homo sapiens
aaccaattaccacaaacttagtggctaaaaagagcaaaaatttattatccttcaattctgtatgtcagaagctcagcactggtctcatcagactcaaagcaaggtgttgataggctgtgtccctttttggaggttataaaggataattaattttttttgtcagctgagggacattttagtttccagaggccacagcttttcttggctcatgctctacttcctccatattcaaaatcaacaatgtttrgtagagcctttatcatttttcatctctttgactcactcttctatctacctcttctacttttacgaattcatgcaattagtattgtccctcccagaactctccttatctcaaggtccttaacattattcacatctgcaatgttcctattgtcatataagctaatcactttagtgaataggatgtgaataactttgggggacctattattctggttaccataggcttctgctggatttctgacctaaagaactataaggaaataaatttgcatggttttaagtcagtaaagttgtggtattttcttatggcagcaataaaatactaatacaagtgccaatagaatttttcagatattaaattgacatgtggttaa

SEQ ID NO: 106106 - DNA, 620 bp, Homo sapiens
aaccaattaccacaaacttagtggctaaaaagagcaaaaatttattatccttcaattctgtatgtcagaagctcagcactggtctcatcagactcaaagcaaggtgttgataggctgtgtccctttttggaggttataaaggataattaattttttttgtcagctgagggacattttagtttccagaggccacagcttttcttggctcatgctctacttcctccatattcaaaatcaacaatgtttagtagagcctttatcatttttcatctctttgactcactcttctatctacctcttctacttttacgaattcatgcaattagtattgtccctcccagaactctccttatctcaaggtccttaacattattcacatctgcaatgttcctattgtcatataagctaatcactttagtgaataggatgtgaataactttgggggrcctattattctggttaccataggcttctgctggatttctgacctaaagaactataaggaaataaatttgcatggttttaagtcagtaaagttgtggtattttcttatggcagcaataaaatactaatacaagtgccaatagaatttttcagatattaaattgacatgtggttaa

SEQ ID NO: 106107 - DNA, 620 bp, Homo sapiens
aaccaattaccacaaacttagtggctaaaaagagcaaaaatttattatccttcaattctgtatgtcagaagctcagcactggtctcatcagactcaaagcaaggtgttgataggctgtgtccctttttggaggttataaaggataattaattttttttgtcagctgagggacattttagtttccagaggccacagcttttcttggctcatgctctacttcctccatattcaaaatcaacaatgtttagtagagcctttatcatttttcatctctttgactcactcttctatctacctcttctacttttacgaattcatgcaattagtattgtccctcccagaactctccttatctcaaggtccttaacattattcacatctgcaatgttcctattgtcatataagctaatcactttagtgaataggatgtgaataactttgggggacctattattctggttaccataggcttctgctggatttctgacctaaagaactataaggaaataaatttgcatggttttaagtcagtaaagttgtggtawtttcttatggcagcaataaaatactaatacaagtgccaatagaatttttcagatattaaattgacatgtggttaa

SEQ ID NO: 106108 - DNA, 502 bp, Homo sapiens
ccttctttgttaagagaggactgtgttcccatccagcctcatccctccacttgagcactaagtccattcactttaactactcgagggcttcatttcactaatcctcccattctctcccacatcatccagtgttttaccttaattagatcattcccatagcatgtgttatagttcttcaatctttaagaaaaaataaacagaaacagaaaaacaacaaaaaacctcttgagcaatcttttctgtttactgcctcattttacaataaaatgcctcaaaatagtgtttgtagtcatcatataattttctcttgatttctttctaattacactttcaccactactacttccctgcaactaccttctttcctaccaccctacaaygatgcacattacttaacccagtgacaggttctcagctctcatcttacttagtatattactcaacgtttagaataattgatcactttgttccccttgaaacattttctctgcttttctggaca

SEQ ID NO: 106109 - DNA, 532 bp, Homo sapiens
acagagcacctgaccatgcagctccaaacgatgattatcagaaattacacaagaaagagatacatttgagatgaagcatgagtgggacaggcagacataagcaagcaacatgagcagataattcagaaccccatggcagcactattgcaccagcaactcctcccacaaccaggtcacataggaggtcaggtatgaccaactaataaagggggaagtgattttaatttggtttccagaagggtttttttttgtatgtgagtgtgagccaaaaatggacagcagctacactatagacttatactgtatgcttgaaagacagtagtgagggaaaattatttcagtgagtgagggctttaggcagtgcaactggtcttctacttcatgtggaaagagaagtggcacakaaagtagccaagaggtggcctatgcaaatggcctggaagcaaaaggctagactgtcacagacaaggatgaatgaggtagaaacacatcgatggacctataggattgcacaaaatgagaagatctacgt

SEQ ID NO: 106110 - DNA, 585 bp, Homo sapiens
tagcaaattcaccataagcatattgaaaattaatcatattgatcagagatcctgttaaagttcaggtttaaaataaacattaaaaatacaccctttggctgcrtgtactggttcatgcctgcaatcctaacaatttgggaggaagacatgggcagatcacttgagcctagcctgggcaacatggcaaaaccctgtctctacaaaaaaatacaaaaattagcctggcacacatctgtagttccagctactcgggaggctcaggtaggaggatcgcttaagggaggtgaaggttgcagtaagccaagatcacaccactgcactctagcctgggtgtcattccatctcaaaacaaaacaaaacacgcaaacaacaacaacaaaaaatccttttaaggatgaatagcaaacatatattaactatatatcagtaatataacaaatatgctttctctgttaatgtcacagtaagtaaattcagcatttgttcaggtcaatggaaaatgtcccaagaaagtaattataacaaataaggttatttaacacactaaactcatccaattaattattcatccatggttattgcatg

SEQ ID NO: 106111 - DNA, 430 bp, Homo sapiens
gtgtgtgatgaatcacatttattgatttgtgtgtgttgaacaaccttgcatcccagggaaaaagcctacttggtcatggtgaattagctttttgatgtgctgctgaatacagtttgctagtgttttgctgaaaatttttgcatcgaagttcatcgaggatattggcccaaagctttsttttttgttgtgtctctgccaggttttgatatcacaatgatgctggcctcatatcatgagttagagagaaatcccttctcaagtttttagaatcgtatcagtaagaatgttaccagcttttctttatacatctggtagaatttgactgtgaatacgtctggtcctcaggttttctggttggtaggctttttgttactgattccattttagaactcattattgttctgtccagggattcagtttcttcctggtt

SEQ ID NO: 106112 - DNA, 456 bp, Homo sapiens
gtgcttgggagacgctggactttcacataccatggaaaggggctgttcaaataaatctcctctatatcgcaaggaacagggagttgctggctgacagctgagctagagttgatgggtggaatgaataagacaatggatgaatgagtgaataaatgaacaaatgaatgaatgaatgaatgaatgggtggaagrcatccagtactgtgaagctagactggaggattttagcatggtacattcttcagtacttatagaatagattacgggaatgatgtttgagtgtcagagaccctaaagtctatttgactaaaaatgccttttgataatatttctagccactttagcatgagatttctagttattacgggcctaaaatcttaaggtcatcctttcctcctctacttccaagctgtcagtagatcctaatgattctacttcaagacctagctggaatcc

SEQ ID NO: 106113 - DNA, 456 bp, Homo sapiens
gtgcttgggagacgctggactttcacataccatggaaaggggctgttcaaataaatctcctctatatcgcaaggaacagggagttgctggctgacagctgagctagagttgatgggtggaatgaataagacaatggatgaatgagtgaataaatgaacaaatgaatgaatgaatgaatgaatgggtggaaggcatccrgtactgtgaagctagactggaggattttagcatggtacattcttcagtacttatagaatagattacgggaatgatgtttgagtgtcagagaccctaaagtctatttgactaaaaatgccttttgataatatttctagccactttagcatgagatttctagttattacgggcctaaaatcttaaggtcatcctttcctcctctacttccaagctgtcagtagatcctaatgattctacttcaagacctagctggaatcc

SEQ ID NO: 106114 - DNA, 533 bp, Homo sapiens
tgagtagagtttcttaggattcagttgttctgatacctgaaatagtgattcaaatgtgaaagataaattgggtggtcccctgtacactctaccattatgaaagatatactgtgctcatatatgaaagcatcaaataccacatttgggcacacttctttggctcagctgctgtgattatggtgtgcctttatgggkttttttatgcgtatttgcttgtggtccattatatttcatgaaactgtaaatttataattttcatcaaatttggaaacttttcagctattagtttttcaaatattttgcttccccttcctcacccaaccccatttttcctctccatttgggactccagttacatctaaagtaaactgcttgatttttttctcacatgatgcttttttcattttttcttcagacatttttctctctgtgttttaatttggactggtttattgtatgtcttcaaatgtattatttattaaccttttcttcaatgatgttaaatctgcagctaactccacccagtgtatttt

SEQ ID NO: 106115 - DNA, 626 bp, Homo sapiens
gctttacatatgtatagcacacaggctgtttgaataagtaaagttattttcccaaaacagttaacccttaagamaaatcactgtgggtaaattagatttttctcattagtaaaatcttatttcatatttccatatttggcatttaacataacttagatttagtttgaagtaagattctcttggaagtgaagttctcctaaaagttttgatctctacttttcttagtttttctcacctagacttagattatttattatttaattttatgaaacaaaaacttatggaagtttaggcaagatttttctttggatctgaaggacagtttttcttattctaaactattatcttttggtcaatgaagcatgagtcgttttctgtgtacattttctgtgttatttgtctcatttatataatttagaatgtgactactcagtaaatatgatattattattagggcaaccatatttatattcaacatataaactttgtgctaatattttatctcccattagaactgaaagaagatattagaagatacattttcataacagcaaaataatttcttcattgggaaaatactctacttgttaaattgataagatttttctttaaaaaatcattttatt

SEQ ID NO: 106116 - DNA, 626 bp, Homo sapiens
gctttacatatgtatagcacacaggctgtttgaataagtaaagttattttcccaaaacagttaacccttaagaaaaatcaytgtgggtaaattagatttttctcattagtaaaatcttatttcatatttccatatttggcatttaacataacttagatttagtttgaagtaagattctcttggaagtgaagttctcctaaaagttttgatctctacttttcttagtttttctcacctagacttagattatttattatttaattttatgaaacaaaaacttatggaagtttaggcaagatttttctttggatctgaaggacagtttttcttattctaaactattatcttttggtcaatgaagcatgagtcgttttctgtgtacattttctgtgttatttgtctcatttatataatttagaatgtgactactcagtaaatatgatattattattagggcaaccatatttatattcaacatataaactttgtgctaatattttatctcccattagaactgaaagaagatattagaagatacattttcataacagcaaaataatttcttcattgggaaaatactctacttgttaaattgataagatttttctttaaaaaatcattttatt

SEQ ID NO: 106117 - DNA, 548 bp, Homo sapiens
  misc_feature (1)...(548): n = A,T,C or G
atgtatataaccatatttcagtatatacacatgtatgtatttacacaaaggcatttatgtattaatatatgattagcccattctcacaatgccataaaagatacctgagactgggtaatttataaagaaaagaggtttaattgattcatggttctamaggttgtaaagggaacatagcagcttctgcttttggggaggcctcaggaagcttccactcatggcagaagacaaagnggaagcaggtgtcttacagggcaggggcaggaactagagagagctatgagggagatggtatacttaaacaaccagatctcatgagaattactataatgaggacagtaccaaagggatggtgctatgccattcataataaatctgacctcatgattcaattacctcccaccaggccttgcctccaacactgggcattacaattcaataagagatttggcaggaacacagatccaaatcataccagtatatatatgtatacacacacacacacacacacacacacacacacacacttcatttagccaatgctgtgt

SEQ ID NO: 106118 - DNA, 611 bp, Homo sapiens
gaaatttcatcagatttaaatgtttcggaaaatagataccagcaataaagattacatcatcagatagaatatctatcgattatctatcggctatctatatttttcctatattcttattagtaaagctytgaattctttacacaaagtccagtgtttcagcctagattaaaatccaattcaaaagctgggcataatcatcagcagttttctttttctatttatgaccttggctcaaagaataagattttcgtattttttgtgaaggttgaaaagttaactagaaagcgttatcatggagaaaacagattgtggcagatgtaaataatcaataattgaggaggaaagtgaaagtataccaaaagaatttgtagcaggatgtgcctctgtcatggggaaatgagtaattaaagtagtaagataatttgccctctccatactttctctatagtcctatagattattataatgctattttaccgaggttgtgaggcaaattttcatgaattttataattgaatatttaaaaatttaataaattttggctttcagaaataccattatcaaagttaaggatgatcataagcatgattgcacatctatctatctgcaga

SEQ ID NO: 106119 - DNA, 611 bp, Homo sapiens
gaaatttcatcagatttaaatgtttcggaaaatagataccagcaataaagattacatcatcagatagaatatctatcgattatctatcggctatctatatttttcctatattcttattagtaaagctttgaattctttacacaaagtccagtgtttcagcctagattaaaatccaattcaaaagctgggcataatcatcagcagttttctttttctatttatgaccttggctcaaagaataagattttcrtattttttgtgaaggttgaaaagttaactagaaagcgttatcatggagaaaacagattgtggcagatgtaaataatcaataattgaggaggaaagtgaaagtataccaaaagaatttgtagcaggatgtgcctctgtcatggggaaatgagtaattaaagtagtaagataatttgccctctccatactttctctatagtcctatagattattataatgctattttaccgaggttgtgaggcaaattttcatgaattttataattgaatatttaaaaatttaataaattttggctttcagaaataccattatcaaagttaaggatgatcataagcatgattgcacatctatctatctgcaga

SEQ ID NO: 106120 - DNA, 611 bp, Homo sapiens
gaaatttcatcagatttaaatgtttcggaaaatagataccagcaataaagattacatcatcagatagaatatctatcgattatctatcggctatctatatttttcctatattcttattagtaaagctttgaattctttacacaaagtccagtgtttcagcctagattaaaatccaattcaaaagctgggcataatcatcagcagttttctttttctatttatgaccttggctcaaagaataagattttcgtattttttgtgaaggttgaaaagttaactagaaagcgttatcatggagaaaacagattgtggcagatgtaaataatcaataattgaggaggaaagtgaaagtataccaaaagaatttgtagcaggatgtgcctctgtcatggggaaatgagtaattaaagtagtaagataatttgccctctccatactttctctatagtcctatagattattataatgctattttaccgaggttgtgaggcaaattttcatgaattttataattgaatatttaaaaatttaataaattttggctttcagaaataycattatcaaagttaaggatgatcataagcatgattgcacatctatctatctgcaga

SEQ ID NO: 106121 - DNA, 619 bp, Homo sapiens
gtgcatatgggtaaatctaagcaaagatcgatagtataacagataataagagtgatgatagttacaatgataatgaaatactaataaatcatcctggaattataataacaaagagtactacaattttggataacaaagacgagaagctagttatgagttccaaagaacttcacaaagttatttgtactgttcaaaaatggatgagagatattattaaactgtagtttggtttaatctataacataaagatcaatttaaaaaacttgaggttgcagaaagaccaaaagamaaaactgtatattgtggcagctatacaaatatcagattaagcagactaaaagggaaaaagaaaaatcaccacatattatcaatgatgtatttgctaaagtgacaaaataaagcaatgtaatagaataattagaatttttgtgcatctgataacatagcttcaaaatacataaggcaagtactgcaaaattgcaagggcaaactttgtgtcttaccactatgatgggagaagagttaaataaacaacataacaacaaactaacttatatactctggtgaacacctcgatctcatgataaaaggaatatacattattttcaagaactgatta

SEQ ID NO: 106122 - DNA, 602 bp, Homo sapiens
aacaaggcatacaatgactatttgtaaaacatgtcaaaaacccagtgacctgagtgccctgcctttcacatggatgaatgaaaaaaaaaacaagacacaaactttttttgttaataatatgacatacagtcatatcacttatttttctatgatcaaaaatgtatatgtataattattatattttgaaaattaaatattataaagttcttaatcatttccaatgtacctatggcctcagaatccaataacattrgaatgttctaaataaatacttatttatttttggtttttccactgtcattcaaaaagagaattagctgctctctatatgatgaaataaggagagggaataaaatgtttggtcgctgccatcacaaatgttgggaaaagtggaacccctattacactactggtggcataataaatttgtaagtcatttcaatggagaaatttattccatcctatttaaatatgtgtgcaatttgacccatatatttcatttctaatcatcattattgaaaaatatagtcttacatactctttcctttatatagaatgcttataatagtattgcttatattgtgaaaaaagttaactagcag

SEQ ID NO: 106123 - DNA, 602 bp, Homo sapiens
aacaaggcatacaatgactatttgtaaaacatgtcaaaaacccagtgacctgagtgccctgcctttcacatggatgaatgaaaaaaaaaacaagacacaaactttttttgttaataatatgacatacagtcatatcacttatttttctatgatcaaaaatgtatatgtataattattatattttgaaaattaaatattataaagttcttaatcatttccaatgtacctatggcctcagaatccaataacattagaatgttctaaataaatacttatttatttttggtttttccactgtcattcaaaaagagaattagctgctctctatatgatgaaataaggagagggaataaaatgtttggtcgctgccatcacaaatgttgggaaaagtggaacccctattacactactggtggcataataaatttstaagtcatttcaatggagaaatttattccatcctatttaaatatgtgtgcaatttgacccatatatttcatttctaatcatcattattgaaaaatatagtcttacatactctttcctttatatagaatgcttataatagtattgcttatattgtgaaaaaagttaactagcag

SEQ ID NO: 106124 - DNA, 602 bp, Homo sapiens
aacaaggcatacaatgactatttgtaaaacatgtcaaaaacccagtgacctgagtgccctgcctttcacatggatgaatgaaaaaaaaaacaagacacaaactttttttgttaataatatgacatacagtcatatcacttatttttctatgatcaaaaatgtatatgtataattattatattttgaaaattaaatattataaagttcttaatcatttccaatgtacctatggcctcagaatccaataacattagaatgttctaaataaatacttatttatttttggtttttccactgtcattcaaaaagagaattagctgctctctatatgatgaaataaggagagggaataaaatgtttggtcgctgccatcacaaatgttgggaaaagtggaacccctattacactactggtggcataataaatttgtamgtcatttcaatggagaaatttattccatcctatttaaatatgtgtgcaatttgacccatatatttcatttctaatcatcattattgaaaaatatagtcttacatactctttcctttatatagaatgcttataatagtattgcttatattgtgaaaaaagttaactagcag

SEQ ID NO: 106125 - DNA, 590 bp, Homo sapiens
ggaagaaagttccaaggtctgagatccaatatgggaattctgccagtaacaaagtatgtctattccaatctacattcaaaaactgggcaaataaatacaatgtaagtctttgagccaacttgagctaagactccgtctattacctgcaatcataatctctctgtttgacagacaggccacagtggcattttaggtccccagaaagtagacaattcagagtgagtatccaagtaatcttctcaaagatctgggtatttctttttctccggtacaaaatcaccataggtcctctaagaaaagcttggagaaagatttacatttatgtactttcaattctcaatgaggcaacaagactcagacccctttttaatcaaaaaggatttggggtttatgaattgacttagatctgaaaactgagtggaggctatgattctccactgtggtaactcaagtcaggtttttgacaaacatagctacagactttttaatattatatagatcaacmaatactctagtaaattgcccatctgttttgttcttaggggcactgtgatcaattagctaccaccaaggatcctgcagaataacac

SEQ ID NO: 106126 - DNA, 590 bp, Homo sapiens
ggaagaaagttccaaggtctgagatccaatatgggaattctgccagtaacaaagtatgtctattccaatctacattcaaaaactgggcaaataaatacaatgtaagtctttgagccaacttgagctaagactccgtctattacctgcaatcataatctctctgtttgacagacaggccacagtggcattttaggtccccagaaagtagacaattcagagtgagtatccaagtaatcttctcaaagatctgggtatttctttttctccggtacaaaatcaccataggtcctctaagaaaagcttggagaaagatttacatttatgtactttcaattctcaatgaggcaacaagactcagacccctttttaatcaaaaaggatttggggtttatgaattgacttagatctgaaaactgagtggaggctatgattctccactgtggtaactcaagtcaggtttttgacaaacatagctacagactttttaatattatatagatcaacaaatactctartaaattgcccatctgttttgttcttaggggcactgtgatcaattagctaccaccaaggatcctgcagaataacac

SEQ ID NO: 106127 - DNA, 246 bp, Homo sapiens
taaaaatgaacttgcatgcttggtagacatacaatttctgattctttccctgagattgtgattctgtaggtctaggctggagcttataaacctgtatattttgcaagtgcytcccaccctcaatcagtaggccacttcggaaaacatggctctaagacataagtcctagaagggtagtagggcttatgactggagatatatggcacatagtataacctcattaagttttgttaaatagatgaatga

SEQ ID NO: 106128 - DNA, 655 bp, Homo sapiens
tcttgaatgggatacaaaaggaagctatgaagagtacattactggaaattctttaaaagtagccaatggcatgattcacttggattgggaggtgaatgcaggaacatcaattttacttttcatctttgtcattaattgtatgattttggatacttaatccatcagcattttacaatcctcttttataaaaccataataataaagtagaatgccttaaaatgtgtaatactagaagtagttatttaaacaaaaggtcagaattaactaatcttgggtgggagctatactaggaacccttgaagaaaacaccactgcatttcttaggtgtttgaacatctgcctcccaggactaaacacttagaacttattaggtcaatttcagctttccaaaagctgggcttggacaaaatctatttatataatattctttatataaccattatgttttccatcacttttccagatatrcattctatagtttgtcaaatgtgtatgtagagtttctttctaaaacgtgatatttacataaacgtatttctaaaattattgttcaatgcaaagagttctcttaaaatagctacatacattgcaacttagaatctctgggttttcttattttgtggcatgaacattccctggagtcaataatttaagt

SEQ ID NO: 106129 - DNA, 567 bp, Homo sapiens
aatatcaagtgttttaaaccgctaacacatttaacaggcttctgaaaatcaaattcagtttcaaaattttctttcctgaygcctggctttttgatgcttcagagagcccttggagtatccaaaagagaggaaaacaggattatttgacatatttaggtatatgagattaccaaaatggtgttcaatattctttaggttatattttggtaaataatactaatatgtgtttcaaatttgtatgggattttaaaaattctaatgtctgagtatacgctatcataattaaggtttttatgttaaataattgtaaatgacagagataaccaagcttctttgtcaattgtgtttctaactgtaactaacctggacattttgttattcacagacaattttcttgttttaattcttttcaaaagatggcttataataagctgtagaactctgacaggtgctctcaaatacaggtttctgataactttggaataaagggaaaacacacagaactcatgaagagctaaaatattcacaaacccataaaaaaactgaggcaatctttttgacttttgc

SEQ ID NO: 106130 - DNA, 567 bp, Homo sapiens
aatatcaagtgttttaaaccgctaacacatttaacaggcttctgaaaatcaaattcagtttcaaaattttctttcctgatgcctggctttttgatgcttcagagagcccttggagtatccaaaagagaggaaaacaggattatttgacatatttaggtatatgagattrccaaaatggtgttcaatattctttaggttatattttggtaaataatactaatatgtgtttcaaatttgtatgggattttaaaaattctaatgtctgagtatacgctatcataattaaggtttttatgttaaataattgtaaatgacagagataaccaagcttctttgtcaattgtgtttctaactgtaactaacctggacattttgttattcacagacaattttcttgttttaattcttttcaaaagatggcttataataagctgtagaactctgacaggtgctctcaaatacaggtttctgataactttggaataaagggaaaacacacagaactcatgaagagctaaaatattcacaaacccataaaaaaactgaggcaatctttttgacttttgc

SEQ ID NO: 106131 - DNA, 679 bp, Homo sapiens
actgaattttaaaagcaccataactatctgaaactgaagcttatttaatccttgctaatggcaggtgtcctccaggtgattaaaactgtgacccagcccagcttgactcagttctaagaaaaaccrgaatgaacagaccctcaccctaactatcacaaatcacaggcttacagtctctttgaaataaaacaaaacaaaatgtcatactccaatcttcacaattatttaataaaaataatgcccataatataataatgataatatatacaaagaagcagaaaaatttgatctatcatcaaaagaaacacggtaagtggaatcagaaattggaaacccaaatatacatcaacagaataaggaaacaaacatagtacattttcccaataggatattgctagcattaaaagggaaaaactagggtacctattttatcatacatataaaaacattaatatacctcaaaaacattgtattgagcaaaacaagccacacacagaagaatacttgctgcatggttacatccatgtaaagttttagaatagggtctatttttgtttctggaaatcagaatagtggctacttctttgggtagaggaggatagacttacagaaaagtgacatgcaagaactttctgggaagatagaaatattatttatcttgcttggaatgtagactagt

SEQ ID NO: 106132 - DNA, 679 bp, Homo sapiens
actgaattttaaaagcaccataactatctgaaactgaagcttatttaatccttgctaatggcaggtgtcctccaggtgattaaaactgtgacccagcccagcttgactcagttctaagaaaaaccagaatgaacagaccctcaccctaactatcacaaatcayaggcttacagtctctttgaaataaaacaaaacaaaatgtcatactccaatcttcacaattatttaataaaaataatgcccataatataataatgataatatatacaaagaagcagaaaaatttgatctatcatcaaaagaaacacggtaagtggaatcagaaattggaaacccaaatatacatcaacagaataaggaaacaaacatagtacattttcccaataggatattgctagcattaaaagggaaaaactagggtacctattttatcatacatataaaaacattaatatacctcaaaaacattgtattgagcaaaacaagccacacacagaagaatacttgctgcatggttacatccatgtaaagttttagaatagggtctatttttgtttctggaaatcagaatagtggctacttctttgggtagaggaggatagacttacagaaaagtgacatgcaagaactttctgggaagatagaaatattatttatcttgcttggaatgtagactagt

SEQ ID NO: 106133 - DNA, 455 bp, Homo sapiens
ggtgccggcagaatctggggaaacttatgacaggaggctaaggcagcagctagtgaggtgggtatmctaaagccctatctgcagcaccaaattccgatgtggtgctatgtggagaaatttggagtagagaggcttctaccttctttcctctttgggactccgaaggttgataatttttttcttttgaatatttgggggcaactgcttcagaataaatacaaagtcattagacacagaaagaaacaatattaatactttttatttgctcccatatggcataaattttaatgtgtggcttctcagactttaatgtgtatacagatcaccttagcctcttgttaaaatgcaagttctgattcagttgttctaggtagggagcttcaatttctacatttcacacaagttcctacatgatgtgagtgaatctggaagcacaccttttgagttgcaagggc

SEQ ID NO: 106134 - DNA, 455 bp, Homo sapiens
ggtgccggcagaatctggggaaacttatgacaggaggctaaggcagcagctagtgaggtgggtatactaaagccctatctgcagcaccaaattccgatgtggtgctatgtggagaaatttggagtagagaggcttctaccttctttcctctttgggactccgaaggttgataatttttttcttttgaatatttgggrgcaactgcttcagaataaatacaaagtcattagacacagaaagaaacaatattaatactttttatttgctcccatatggcataaattttaatgtgtggcttctcagactttaatgtgtatacagatcaccttagcctcttgttaaaatgcaagttctgattcagttgttctaggtagggagcttcaatttctacatttcacacaagttcctacatgatgtgagtgaatctggaagcacaccttttgagttgcaagggc

SEQ ID NO: 106135 - DNA, 566 bp, Homo sapiens
catggtgccagcatctgcttagcgtctggtaagggactttgggtggttccactcatggcagaaggtgaagaggagctggcttgtgtagagatcacatggcgagaaaagaagccagagagtgagggaaggtgctagactctttttaacaactcagctctgtagagaatttccatgggaactaataaagcaagaactgagtccccctcctcccagggagggcattaatctattcatggagaatccacccccattacccaaacaccttccattaggcctcacttccaacagtggagatcaaatttcaataggacatttgaaggraacacacatccaaattatagcagactctatcttacactctgtacaaaaaaaataaaataaaataactagaaatggcttacagacttaaatgtaagatctgaaattataaccctcctagaagaaaacataggggtaagattctttgacattagtgttggcaataattttttggatatgacaccagaagcataggcaagaaaagaaaaaataaaaaagaatgagactacatcaatttaaaatgtttt

SEQ ID NO: 106136 - DNA, 436 bp, Homo sapiens
aaaacataggggtaagattctttgacattagkgttggcaataattttttggatatgacaccagaagcataggcaagaaaagaaaaaataaaaaagaatgagactacatcaatttaaaatgtttttgcacagaaaaggaaataatcaataaaatacaaaggcaacctacagagtgatagaaaatattttcaaaccagatatctgataaggggctaatattcaaaatatacaaagaactcatgtaattcaacagcaaaaaacctaacaacacaataataaattggtcaaagaacctgaatacacatgtttccaaggaagacatacaaatggtcaacagatgtaagaaaaggtgtctaacatcactaatcatcagagaaatgcaggtcaatacctcaatgagatataacctcacacctgttaacaaggctactctcaga

SEQ ID NO: 106137 - DNA, 436 bp, Homo sapiens
aaaacataggggtaagattctttgacattagtgttggcaatawttttttggatatgacaccagaagcataggcaagaaaagaaaaaataaaaaagaatgagactacatcaatttaaaatgtttttgcacagaaaaggaaataatcaataaaatacaaaggcaacctacagagtgatagaaaatattttcaaaccagatatctgataaggggctaatattcaaaatatacaaagaactcatgtaattcaacagcaaaaaacctaacaacacaataataaattggtcaaagaacctgaatacacatgtttccaaggaagacatacaaatggtcaacagatgtaagaaaaggtgtctaacatcactaatcatcagagaaatgcaggtcaatacctcaatgagatataacctcacacctgttaacaaggctactctcaga

SEQ ID NO: 106138 - DNA, 436 bp, Homo sapiens
aaaacataggggtaagattctttgacattagtgttggcaataattttttggatatgacaccagaagcataggcaagaaaagaaaaaataaaaaagaatgagactacatcaatttaaaatgtttttgcacagaaaaggaaataatcaataaaatacaaaggcaacctacaragtgatagaaaatattttcaaaccagatatctgataaggggctaatattcaaaatatacaaagaactcatgtaattcaacagcaaaaaacctaacaacacaataataaattggtcaaagaacctgaatacacatgtttccaaggaagacatacaaatggtcaacagatgtaagaaaaggtgtctaacatcactaatcatcagagaaatgcaggtcaatacctcaatgagatataacctcacacctgttaacaaggctactctcaga

SEQ ID NO: 106139 - DNA, 548 bp, Homo sapiens
ggtgcagactggccaacaaaagccctcgtggaacaaaagtcatgtcaccaaccatctccaacagcttttcaaataggttcacctttgagaactaattgaagttttgtttgggcttggaattgggggcaacaaaaacctttctagatttgctgataatttttaaggcacaatgcttgctaaagactttcagtggaatttaattatcacttcccctgagccccttagtaatatttgcccccaaaaggcacaataagagcagtattatttcacattaattcattatatttctttctgtagttagttctgtttttcccaagccattcttttttatggtctctcagtttgatctggaaaattactaagaatactggtaaaatttctgtatttatygtaacttttcttcttagagcaggtatatcctaaattattatgtctgtatatgttagaatatttatcattgcagttagggaaagaccaaagaggagtgtgattgctgccattcaatatttgaaggtctgtcgtatgaaaaggaaacatataccagttct

SEQ ID NO: 106140 - DNA, 569 bp, Homo sapiens
ctgctaggcaagtcctagtgagttgatgggcttcaatagacttgaaggcatgcaacctagtaagacaccagctggggtggctaagggagtgcttgtaccacccctccttcaaccacaggcagtgcagctcactcctccaaaaatagtccccttccttccacctgaggagaggagagggaaaagtaaagaggactttctcttgcarctttaataccagctcagccatattaggataaggcaacacacaaagccttaatgcccccattccaggccctagctcccagatagcactttctgacaccccctggaccagaaaggaacccattgccttgaaaggaagggctgagtcctggcaagattcatcatatgctgactgaagagccctttgacccttttcagcagtggtaaccaagtagcacatgctatgggccttggatgaaactctgaaacatgtgggcttcaggtatgacccagcacattaataatcatgatggctatgagcacagatgccttctgcttgaaaaaaaacagagagaggagtaaagaagactttgtcttgaacataggta

SEQ ID NO: 106141 - DNA, 628 bp, Homo sapiens
agtcagggatacatgatcaagatgatctggaataaaaggaaacagatctctaagccagagaccagctttgaggactacaggacaagccctaatgccatcagatagcccacaagaacactcctggcgggtrgagacatttaagtgttacagcagcgaccgtttagatgggtcaaagtatcctgtacttatatttttgggagtcaggttggtttttcagaagagcaattttaaatctgagatgggttaagcctggtacgagggaatttactgcactggtgcatccactcatttcactcatgtgtgatgaagctgcggggtgactccctgaagctttaaggcagcatgtgttgtcagaatcaccacgtatggccccattcgttttggacctaattgcctctctggactttgaaccttccagattttcagatatacctaatatcgatggacataaggatgcagaaccaggtctgtcggtgatggagaatcctggtttctataagctgcaagaacacgggccacgttcctaatatgtaacgcatattttagttgttccagttcctgtaggctcaaccacttccctgtggttgcctctgggattgatctcccatacattgaacaccgagttaaa

SEQ ID NO: 106142 - DNA, 628 bp, Homo sapiens
agtcagggatacatgatcaagatgatctggaataaaaggaaacagatctctaagccagagaccagctttgaggactacaggacaagccctaatgccatcagatagcccacaagaacactcctggcgggtagagacatttaagtgttayagcagcgaccgtttagatgggtcaaagtatcctgtacttatatttttgggagtcaggttggtttttcagaagagcaattttaaatctgagatgggttaagcctggtacgagggaatttactgcactggtgcatccactcatttcactcatgtgtgatgaagctgcggggtgactccctgaagctttaaggcagcatgtgttgtcagaatcaccacgtatggccccattcgttttggacctaattgcctctctggactttgaaccttccagattttcagatatacctaatatcgatggacataaggatgcagaaccaggtctgtcggtgatggagaatcctggtttctataagctgcaagaacacgggccacgttcctaatatgtaacgcatattttagttgttccagttcctgtaggctcaaccacttccctgtggttgcctctgggattgatctcccatacattgaacaccgagttaaa

SEQ ID NO: 106143 - DNA, 628 bp, Homo sapiens
agtcagggatacatgatcaagatgatctggaataaaaggaaacagatctctaagccagagaccagctttgaggactacaggacaagccctaatgccatcagatagcccacaagaacactcctggcgggtagagacatttaagtgttacagcagcgaccgtttagatgggtcaaagtatcctgtacttatatttttgggagtcaggttggtttttcagaagagcaattttaaatctgagatgggttaagcctggtacgagggaatttactgcactggtgcatccactcatttcactcatgtgtgatgaagctgyggggtgactccctgaagctttaaggcagcatgtgttgtcagaatcaccacgtatggccccattcgttttggacctaattgcctctctggactttgaaccttccagattttcagatatacctaatatcgatggacataaggatgcagaaccaggtctgtcggtgatggagaatcctggtttctataagctgcaagaacacgggccacgttcctaatatgtaacgcatattttagttgttccagttcctgtaggctcaaccacttccctgtggttgcctctgggattgatctcccatacattgaacaccgagttaaa

SEQ ID NO: 106144 - DNA, 448 bp, Homo sapiens
aattttatgagtatttaaagcaaatactagttgacttgtagttttataggtaactaccgaattactgaatctttcagacgttttctcagattattattatgtgtgctttcaagggtcttcttgggactttatttaatccatttaataacttagctgtgtccttgaaaaaataagacttcagatatgcagccattccaaaaatgttgtaatatttatagtttctgaaaaaaattctaaagaaaaacttaagctcaggcttataaagtttattttacagcatttacartatacaattgatatcaactcaagaaccaaaatgaaaaaagatgttatgcttatcaataaacaaaaaccagataaaggaataatcaaattatttatttctgttttccagcttagatacacagtaaactataaacagttaaaagtgaaattaattcccatatta

SEQ ID NO: 106145 - DNA, 448 bp, Homo sapiens
aattttatgagtatttaaagcaaatactagttgacttgtagttttataggtaactaccgaattactgaatctttcagacgttttctcagattattattatgtgtgctttcaagggtcttcttgggactttatttaatccatttaataacttagctgtgtccttgaaaaaataagacttcagatatgcagccattccaaaaatgttgtaatatttatagtttctgaaaaaaattctaaagaaaaacttaagctcaggcttataaagtttattttacagcatttacaatatacaattgatatcaactcaagaaccaaaatgaaaaaagatgttatgcttatcaataaacaaaaaccagataaaggaataatcaaattatttatttctgttttccagcttrgatacacagtaaactataaacagttaaaagtgaaattaattcccatatta

SEQ ID NO: 106146 - DNA, 448 bp, Homo sapiens
aattttatgagtatttaaagcaaatactagttgacttgtagttttataggtaactaccgaattactgaatctttcagacgttttctcagattattattatgtgtgctttcaagggtcttcttgggactttatttaatccatttaataacttagctgtgtccttgaaaaaataagacttcagatatgcagccattccaaaaatgttgtaatatttatagtttctgaaaaaaattctaaagaaaaacttaagctcaggcttataaagtttattttacagcatttacaatatacaattgatatcaactcaagaaccaaaatgaaaaaagatgttatgcttatcaataaacaaaaaccagataaaggaataatcaaattatttatttctgttttccagcttagatacrcagtaaactataaacagttaaaagtgaaattaattcccatatta

SEQ ID NO: 106147 - DNA, 505 bp, Homo sapiens
aatattctttatctttccgtgttttagttaagactaaagctgtttgcttgtaaagctgcattgatttgggattctttctggaccaaatgaattagaatcctggaaaggtaaggcccagatataattatatatttttgaagctgaccaaatgatttaaaaatgtatccacaggtgagaaccagagtccaataaatcttacaataaaattttaataatttacacaaataatcccttacagagtaagatgccctagaagacataatcttacttaagtgtaattttattgggggctatttaagttcaaatatatattacaagtaataaagactttaatggctattgtttyattgcattcactagcaatgttttactgtctgttggtggtagtgataaacagagaaaaacatactaatcatgaaaaaattcttggagtttttttggcattgcactcagtcatctgcgtattttacctccagagtctgcataaattaggtactgcttattg

SEQ ID NO: 106148 - DNA, 592 bp, Homo sapiens
gattattacataagcactgacatgtaacattttgatcactacattttttaaatatcaattttcctaggtattaattagatatgctgatgctattaaaatgacacaattaataatgactatagatctaataaaattgtttcactttctgatagtcaacacattgtctgcaacagacattcagtaacaccatgctctgaatacaccattggaatgacracttcacctacagaaaggcttatattcctacccacagtagaaagtaaagcaatggtattttctagttttttcattgaagacagtaatttctcagttaattctttgcctctcccctacctttttttgaactctgcaggtgcaagctctgagtcagtggtgctgatgcaatgccatattaagctttcatgaagtggaacagtcccaaacaaggtatgaaagagaatctaaggctgaatgagtcctgaaaggatcatcttcccctatgaagagcttccttaccttctaggaaaaaagcttaaaccaagatcaagataagcacttgacttcttcttttttttcagacagagtctgtctctgtcacccaggcaggagtgca

SEQ ID NO: 106149 - DNA, 489 bp, Homo sapiens
aaaggggctgagggggccgggcgtggtggctcacgcctgtaatcccagtactttgggaggccaaggtgggtggatcacctgaggtcaggagttcaagaccagcctgaccaacatagagaaaccctgtctctactaaaaatacaaaattaaccgggcatggtggcatatgcctgtgatcccagctacttgggaggctgaggcaggagaatcgcttgaacctgaaaggtggaggttgcggtgagccgatatcgtgccattttactccagcctgggcaacaagagtgaaactccgtctcaaaaaaataaaaaagaaaagaaaaaaargaggggggctgagggaaaggaaaactagtttactccagcctgggcaacaagagtgaaactccatctcaaaaaaataaaaaagaatagaaaaaaaggaggggggctgagggaaaggaaaactagctaatggcaggtacattcacaagcagataaaagaagaagtac

SEQ ID NO: 106150 - DNA, 556 bp, Homo sapiens
gaaccacactatttcaatcattgagtctccattttcaatagaattataaaaaccacacaaacaaaaacaacttttttctctattttgaaatcactcttctcttttatactaggtcccttctaagataatcatgagcaattctgtttcctcttcaggtaagactttcttatgaattacttacaatagttagtttaaatgttgtagagatttattatctattaggacagataatattgtttatrtgtgtgtgtatctgtattggggtcaatttatatcaatcttcctcttggaataaaaggatgaggctgagctgcaaggactcctttagttcttgctccaaatgttactgaaagaaccaaagacctacctgaggcagatgagaaaggacaacctgtttcaaaggtagtagtggtgccccaccttgtttagggcaggacagaactttgatcttctctttggtgttactcactgtttacttctcaccagtttctgtgtctgcctctttcccatttctcatcagcaatgaaggtagttaccagttaggcactccctaacg

SEQ ID NO: 106151 - DNA, 602 bp, Homo sapiens
gccttgcttttcagagaactgccctctgctttttaggcacccccctgccaactccacatccatggaaaaaatttgacttattatggttgttttaaaagagacattgttgacttcagacagaagctagactgcaatctaaggacccagaagtgagcagaacttctaagaagtgagtcaaaagtaaagcagcccatataccgtcagtgacaaagtcaaaaaataaaagcctcttaaaaatattttttgaagtcatacatgacattctatktctccaaaccatttacctgtaagtaacttttaaaaatctcccccaagaaagtatgcagttgaatcctacaatatgaggaatttgaggctttaattatgggaagataaatgtagggaaggggatcataggattctattttcctccctcagcacctaagctactgagaggcactcaactacttcagtcaagagggatgcaaagaccccccaagctagcttttgaatccataagacttcttggtagcgcaatatatgaagcttttccatgagggcttaggaagagaaagggacccatgtttcataaacttctctgcaaacacaattaagttgccaaa

SEQ ID NO: 106152 - DNA, 561 bp, Homo sapiens
tagctctggttaggtggggggaagacttaggaaaagaacctagtatcaatttcatctaagactctttccacaataatgtgctataaaaggtggtgataaaaatgaagccaaagataaagagaataaggacaatgaaacaggataataatcatttacattagctccatgctttatcacaccttcccttccactgtctacagtacaccctctatataagacaccaccatgccccagaatctaccaggctctttatttggtaacattactttcytagggaagaactccaaaagaaagataacttgggaagtgaaaagggaatagagaagaaatcataagatctaaatctttctaatcctaacattggataagtatctttactactctaagcctcaatttttacatctacaaaatatacttactaggcagttctgaagattaagtaaaataaatggatataaaagtcctttgaaaaacataaagaactcaataaatatttattattaggctacaaatatgtggtacaaaaactcacaataggtgtcttacataattgtgttaata

SEQ ID NO: 106153 - DNA, 426 bp, Homo sapiens
ccacttcttgccacagagccttaggggaccgtcctgggctcattgccatcctggctctcgctgtccttctcctggcagctgggctagcggcccaycttggcacaggccaacccaggaagggtgtgggtgggaggcggcctctccctccagcctgggctttctggggctggagtgccccttctgtccgggttgtgtctgctcccctcgtcctgccctggaatccagggaggaagctgcccagatcctcagaaggggagacactgttgccaccattgtctcaaaattcttgaagctcagcctgttctcagcagtagagaaatcactaggactactttttaccaaaagagaagcagtctgggccagatgccctgccaggaaagggacatggacccacgtgcttgaggcctggcagctgggccaagacag

SEQ ID NO: 106154 - DNA, 600 bp, Homo sapiens
tcacactcatagtgattaaataactcacccaaagatatataatgaggaagaggaataattgagattctaatcaagacttattccaaagcatgtgttctttcagacaacttatcaacatttttcaactgacctacctagaatggcagaagagaatgcattcacactcagggggatcaaaagcagtctactgaaagtaggaattttttgaattmtatattttaaaaattcatgaaaattttgcattctatttcttactttattttaatataaaaataatgttttaaatcattgaaattccccatccaagaagtaccatgtttctccagtgtctgcagtatgtcctggcacactgcccggttcctcgtgagagtacacagcactgtatcgtaattaccttctagtgcctggtacatagtaagcactcagtaatgagttggtgaattaatgtatgaatcaaagggccataaaagcaagctgcatgtaccttttactgagaaggcaacttcccatggaatgacttcaaatacttcaagacatggatgaagtttatatcctgtgacttacactgtggttagatgaggcacactaaggttgttctat

SEQ ID NO: 106155 - DNA, 578 bp, Homo sapiens
ttgcttgagactaggagtttgagaccagcctgggcaacatagagagatcccatttctccattaaaaaaatttaaaaattagccaggtgtgatggggcacacctgtagtcctagctactcaggaggctgagrtgaggggattgctcaaggctacgggtttgagcctagtgagctgtgatcacaccactgcactccaccttgggaaacagggcaagaccctatttcaaaaaagaaagaaagaaaaaagttaaaagacgaaagtggtaagagctgattaaatggagcctaaagaagaattttaaactgagggaataaaaataatgttgagtcactatttctcttttttgggtttcaagaatattttatggaatgacagggaaggcaaatcagatgtcattatttctccacattacaacccagaattccaaagattagatactttaaagttaagttgcataaaaattgtatttattgttcatactgataaccgtttttctttactatatttatttatttataaatattagaggaaggcttttttgtgaaaaaatgcaaataaagagtacctacaaattaaaa

SEQ ID NO: 106156 - DNA, 621 bp, Homo sapiens
atgctaagttatttcttcaagtaatattttaatctgtgaaatgtcaagtttaatatgtcaggagaaataagagtttaccaaaatagaaaaggtctgtgatttaaataagctaaaaataagattgctcttcaggacaatattctgctatcaacagtgagcaaataaccactatgatacacacatacagtgactataatacacataacacacgtacatcaattttaaatgcagggctgggcatggtggctcacacctgtaatcccagcactttgggaggccaaggygggtaaacacctgaggtcaggagttcgagaccagcctggccaacatggtgaaaccccgactctactaaaaatacaaaaattagccaggtgtgatggtgggcacctgtaatctcagctactcgggaggctgaggcaagagaattgcttgaactcaggaggcagagattgcagtgaacagagatcatgccactgccctccagcctgggcaacagagcaagactccatctcaaaaaaaaaaaaattaaatccagactgttagagagtaagactgaatccctcaatgctagccttatgtgcatgtataataaatacaatgcacatttatttgttaccacat

SEQ ID NO: 106157 - DNA, 621 bp, Homo sapiens
atgctaagttatttcttcaagtaatattttaatctgtgaaatgtcaagtttaatatgtcaggagaaataagagtttaccaaaatagaaaaggtctgtgatttaaataagctaaaaataagattgctcttcaggacaatattctgctatcaacagtgagcaaataaccactatgatacacacatacagtgactataatacacataacacacgtacatcaattttaaatgcagggctgggcatggtggctcacacctgtaatcccagcactttgggaggccaaggcgggtaaacacctgaggtcaggagttcgagaccagcytggccaacatggtgaaaccccgactctactaaaaatacaaaaattagccaggtgtgatggtgggcacctgtaatctcagctactcgggaggctgaggcaagagaattgcttgaactcaggaggcagagattgcagtgaacagagatcatgccactgccctccagcctgggcaacagagcaagactccatctcaaaaaaaaaaaaattaaatccagactgttagagagtaagactgaatccctcaatgctagccttatgtgcatgtataataaatacaatgcacatttatttgttaccacat

SEQ ID NO: 106158 - DNA, 562 bp, Homo sapiens
ggaatttggggttataatctctaacagtcctttaaaaggtacattgccataaattgaagcataagatttcctttgaggccctgtaactgaaagttattagaggaaattttgaatgagtgttgacatggtttggttgtgtccccacccaaatctcatcttgaaytgttgttgttctcataatccccatgtgtcattgcagggaccggtgggaagtaattgaatcatgggagcagtaacatccatgctgttttcatgataatgagttcccatgagctgtgatagttttacaaggggttttccccctgcttcactctgcacttctccgtgctgccgccatttgaagaaggatgtgtttgcttcccattccaccgtgattgtaggcttcctgaggcttcctcagccatgctgaacagtgagtcaattaaacctctttcctttacaaattacccagtctcaggtttgtctttcttagcagcatgaggactaatacagtaaattggtacttgtagagtgagttactgctgtaaagatacctggaaatgtggaaacaactttggaactg

SEQ ID NO: 106159 - DNA, 562 bp, Homo sapiens
ggaatttggggttataatctctaacagtcctttaaaaggtacattgccataaattgaagcataagatttcctttgaggccctgtaactgaaagttattagaggaaattttgaatgagtgttgacatggtttggttgtgtccccacccaaatctcatcttgaactgttgttgttctcataatccccatgtgtcattgcagggaccggtgggaagtaattgaatcatgggagcagtaacatccatgctgttttcatgataatgagttcccatgagctgtgatagttttacaaggggttttccccctgcttcactctgcacttctccgtgctgcygccatttgaagaaggatgtgtttgcttcccattccaccgtgattgtaggcttcctgaggcttcctcagccatgctgaacagtgagtcaattaaacctctttcctttacaaattacccagtctcaggtttgtctttcttagcagcatgaggactaatacagtaaattggtacttgtagagtgagttactgctgtaaagatacctggaaatgtggaaacaactttggaactg

SEQ ID NO: 106160 - DNA, 629 bp, Homo sapiens
ataatccccacatgtcatgagagggacatggtgagagttaattgaatcatgggggcagttacctccgtgctgttctcatgatagtgagttctcatgagacctaatggttttataaggggccttctcccttttgctctggacttctccttgctgctgccatgtgaagaaggatgtgtttgcttccccttccgccatgactgttagtgtcctgaggcctccccagccatactgaatgaactgtgagtcaattaaacctctttcctttataagttattcagtctygggtaggtctttactagcagcatgagaacagactaatagactgtaaacattaattgaggtcaaagttgtattattaaaagttttaataaccacacaacaatgtaaatcaattcaacttattttaaataaagaaaaaatggaaaccttattaattgttttcaaaaaactgaaatgactgatgatggtgagctgcttctctattaatatcaataaaacagaatgcaataagtatcacctaagcatcaaaagatgcagaaacatatttccaatccacctcactgacaaagaaaagcataatcctacttagctgttccacaaagttaaagaataatcaaatctgcctgaag

SEQ ID NO: 106161 - DNA, 426 bp, Homo sapiens
cagtcttgctgagttcaacattttttttctatttttttttattgtggtaaaatgtctataacacaaaatttaccattgaaatgatttttaaatgtaaaattcagtggtataggtaattcacatttttgttcaattattacaactatccatctccagagcttttttcatgttccccaactgaaacacygtatccgttgaacactaactactaattccctgctgccacagcccctgactgccaccaaactactttctgactctagacaccttatgtaagaagaatcatccaactgttcttttgtgactgacttatttcacttagcatgctgtctttaatgcttatccttgttgtatcatccatgttgtagcatgtgtcttcacttgaattattgctactaccatccataacaattttcctaggaattc

SEQ ID NO: 106162 - DNA, 564 bp, Homo sapiens
tgggccatttgttcattaaataattatttaattattgatattgatttgatgttgttaacaagatgagagtaatcaagacatatatgcagacaccaagaagtcagcaatctggttgaaaaatagatccacagaaaagattattctaagacaaactggaaagtaaaatgtgtactaagtacacatggtcatatgtggatgtgagtatttagaaagtgtacatcaccagccatggacaacaagtcatacagaccacttgagagcaggttaaaagcctaaggaacaggacagtgagaagataacataggtgtggaaaaaagaaacaatgtgrtatttgcatatatgtaggatagtaggatagggtaagttattcaaaattgtccaaacagaaaatacaacggaggaagtttaaaaaggtttgaagacacagataacatggagggtcacataatcattgcagtatggctttcacctataaattctaggttaaggggagccattgaatgctttccagcaaagaataagcatacttggattttatttttaggtagatctctggtggccatg

SEQ ID NO: 106163 - DNA, 647 bp, Homo sapiens
gaagataacataggtgtggaaaaaagaaacaatgtgatatttgcatatatgtaggatagtaggatagggtaagttattcaaaattgtccaaacagaaaatacaacggaggaagtttaaaaaggtttgaagacacagataacatggagggtcacataatcattgcagtatggctttcacctataaattctaggttaaggggagccattgaatgctttccagcaaagaataagcatacttggattttatttttaggtagatctctggtggccatgttgtaaatatgtctgagagcagaggatatrggaggagatgataagtaggagtctagatcagaaaagatgaaaggctaaaataaaacaatgaattaaaatatatagaagacaatgttaaatatttgcatggaaaaattaaataaaaagaacttaaaggtttatttgtatgggagaactaccaactaagactaattattcttttagttcaccgatgattccaacaacttagatagtcagtattggatatgagtttaagatgactgtgagttcctcaagtaaagatgagatgagctctgtactgagtctgaagtttaggagaagacactgaactacactagagactaggggactcatccacagagaagtagttacca

SEQ ID NO: 106164 - DNA, 566 bp, Homo sapiens
aagtcatattcttttgtctgttggaggattgtgcctctatggtgatggattcttactgatcagagtatcgttgctgaagattggagtgactgtggcagtttcttaaataagacaattaaatcagcctcatgggtttactttttttttttttcacaaacgatttatctgtagtgggcaataatgtgtgataacattttactcacaggagaacttttgtcaaaattggagtcaatttgaaaccctgctattgttttatcaagtaagcttatgtaatactctaaattatttattgtcattttgagaaagttcacaacatctttgccaggagtagattccatctgaagaaaccactttgtttsctcattcataagaaaaaaaaaactcatgcatttacatttgatcataaagttatagcaactcagtcacatcttaaggcttctcttttaatttgagtgttttgttatttccacaatatctgcagttactttcttcacttaagtcttgaattcctcaaagtcatccaggaggtttggaatcaacttcctccaaaacagtgttaacgttta

SEQ ID NO: 106165 - DNA, 564 bp, Homo sapiens
atagaaatgttgatgagaacttgtcaaattcttgttatcctttaaagtaactgattttaacataagaaaaagaaagaaactgagctgtgcttattttgaaaaaaattggctaaaaacaaattcatacataacagctcttttgtgataaatatcacraagtactaaaaattttaaaaataaatattttaaaatatccttttaataaatgtggtacaactgtaaaccatgaaaaatcataaaatatctgaagtctttgcacaacaaaatatctattatcttatctatactgacatttcacattattatgtatgttggaactgagatcattttggcacatataaaatatcttttgtgttctttaactatccagttgaacctcttcttttgatgtttgctattatcttactaactctaaacttttccaaatactgtttaaatttggttatatttctggttgactttgatggatgcagtttgtttgctataaaacaactagtgtttgtattgattagtagaaaaggcagcttcaaagatttgcatgaatatgacccaaatatgtattag

SEQ ID NO: 106166 - DNA, 609 bp, Homo sapiens
ggttgcaagtgaaaaacacaaacactctttacttgttttgaaattacttaggtaaagattacttaagtgaaaattgcatattcacataatgaaaatttgcaaagaccaaaaatcattcttcatgctactccctcaaatcgaaattcctttgaaatttggaatctagttccaatctcaatttcttcccatcttgatttcaacttctttaaaggagtgtctataatattttcttctctctctctaatgcttgcaagrattctgactaccagatgtccagaaaaatgtaataaataactacttatgttagaacaataggacttgaggtcagctcaaaatgtaatctaaatccagtgaattgggtgtaactttttagacatatacaaatttaatttaacattcattctgggaaaattgcagagatattttcacttaatgaaaaaaattaatcggtgttcaaatttaaaataggaaactgtttcacatttattccttaagacattttggttcaacaaagggaaaataagcagcacaattgggatacacatctaataaaatataatgcttatgttttatataaatggtaaacacattgaaatattagaaatgttc

SEQ ID NO: 106167 - DNA, 480 bp, Homo sapiens
agccaactaaggcataaatacagttgttactttgcaacaccttgagaagctacctcagcaaagattcaagttttttttttttctctttaacccaactctccatgtctcttagtaacaaattaaacactctaagaaattaaaatcttaaatgctctgaaacaaatttttcagtgttccagttttgcttcaggctctatgcttacccattctcatcaagaaatactatgctattatgaaattcattgtagtactgtccagggaaacagcagcagctccttctgcctcaactcgtaaccgtgagagtggaaaggagaatcacagtggccactggattccactttatcctatggtcaaatgcaccactggtatygcccaagacaggcttcgttcttgacacttgattaatggcaagccaagggagagagaacatgggggcagtctgccttgtcctaaaggaacattttatcattgacactaata

SEQ ID NO: 106168 - DNA, 604 bp, Homo sapiens
ctccaatcttgtttctgtaacccggtcaactttttatcacatttcagtgtacattttgggttgtctgctgagctatttccggggttcatagtatagtgcttagtggggaagaggagggaagaacagagaggaatagatctagatcattttctctggactgggagtttctcactgtacttcaaaggcaacaaaaatagaaacccatgagttcaagagttttgatttttatgttccacaagtaagtgaaaacatatgatgtttgtctttctgttcytggcttatttagtgactataatgaataataacctaattgtacagtttaaaataactaaaagagtatacacaaaggttaaatgcttaaaggcatggagacccccttctccataatgtgattatcatgcattgcatgcctgtgtcaaaatatctcatgtacccataaatatatgtacctactgtgcccccacaaaatttaaaaataaaaattaaaacaagaaatccaagaatatatacttcatgtatgtttttggataagaggacaactgtgacatcattctctatgaatatctaaaaaatcagtgttaacactgtggaagacacaactaca

SEQ ID NO: 106169 - DNA, 262 bp, Homo sapiens
aatggaatggtgcctaggtactcatgtttgtctaggtgaaaacagcttctaaatccaggtgcttacatcagaatkgctctcctggaaatttaggactgagacattgagtcacttacctgtagggtaacctgtagaatcagagatttctcaaatttgacctgtcttattttgataccatgtttcccagcaatgtaacctccccttaagtatcagtttttgtaaaatctcctaatcaatttcttatcagattatattatataaa

SEQ ID NO: 106170 - DNA, 359 bp, Homo sapiens
cttggcactaacacttcttatacaggcagactaaatattcagatcaacactactaatgacaaccactataaaaggaggttttwaaagtttaatacttatgataaaatttaattatcttaatctttttaaatgtcaacatgaaattatttttatcttggtgtcaatatttttaatattagtaataatcatttcactattttaattggacaagttttaaatttggtattaaatatatatattttatgagatggagtttccctcttgttgcccaggctggagtgcaatggcacaatctcggctcaccgcaacctccgcctcctgggttcaagcaattctcctgcctcagtctcctgactgaa

SEQ ID NO: 106171 - DNA, 359 bp, Homo sapiens
cttggcactaacacttcttatacaggcagactaaatattcagatcaacactactaatgacaaccactataaaaggaggtttttaaagtttaatacttatgataaaatttaatwatcttaatctttttaaatgtcaacatgaaattatttttatcttggtgtcaatatttttaatattagtaataatcatttcactattttaattggacaagttttaaatttggtattaaatatatatattttatgagatggagtttccctcttgttgcccaggctggagtgcaatggcacaatctcggctcaccgcaacctccgcctcctgggttcaagcaattctcctgcctcagtctcctgactgaa

SEQ ID NO: 106172 - DNA, 359 bp, Homo sapiens
cttggcactaacacttcttatacaggcagactaaatattcagatcaacactactaatgacaaccactataaaaggaggtttttaaagtttaatacttatgataaaatttaattatcttaatcwttttaaatgtcaacatgaaattatttttatcttggtgtcaatatttttaatattagtaataatcatttcactattttaattggacaagttttaaatttggtattaaatatatatattttatgagatggagtttccctcttgttgcccaggctggagtgcaatggcacaatctcggctcaccgcaacctccgcctcctgggttcaagcaattctcctgcctcagtctcctgactgaa

SEQ ID NO: 106173 - DNA, 447 bp, Homo sapiens
tcttgtcttatattagagatgcacttatttaaaaagttgaccaataatgggataatctatgtaaagtctctgttttagcacttagtgcttcatatgtagtcatcacttaatagatggttaagacatacayatacacacacacaggttaaattgtgctctcatatcatctaacagcattcacctaacagtttataaagcttctgatcagaatgatatgaagtttaaaaactatgtattgtattatatggcactttggatatcagcacatgtgtactaccccaagaaggtaatttaaaatatctgtttggacataagtgtatgtgctgactacaacgcagtataacactgctcattgtgatgctgctcttccaaacagtagtgctgacctgatggtgtagtacatgatttcccacctttgacaccttcatgttagtaaatattagctgt

SEQ ID NO: 106174 - DNA, 447 bp, Homo sapiens
tcttgtcttatattagagatgcacttatttaaaaagttgaccaataatgggataatctatgtaaagtctctgttttagcacttagtgcttcatatgtagtcatcacttaatagatggttaagacatacacatacacacacacaggttaaattgtgctctcatatcatctaacagcattcacctaacagtttataaagcttctgatcagaatgatatgaagtttaaaaactatgtattgtattatatggcactttggatatcagcayatgtgtactaccccaagaaggtaatttaaaatatctgtttggacataagtgtatgtgctgactacaacgcagtataacactgctcattgtgatgctgctcttccaaacagtagtgctgacctgatggtgtagtacatgatttcccacctttgacaccttcatgttagtaaatattagctgt

SEQ ID NO: 106175 - DNA, 447 bp, Homo sapiens
tcttgtcttatattagagatgcacttatttaaaaagttgaccaataatgggataatctatgtaaagtctctgttttagcacttagtgcttcatatgtagtcatcacttaatagatggttaagacatacacatacacacacacaggttaaattgtgctctcatatcatctaacagcattcacctaacagtttataaagcttctgatcagaatgatatgaagtttaaaaactatgtattgtattatatggcactttggatatcagcacatgtgtactaccccaagaaggtaatttaaaatatctgtttggacataagtgtatgtgctgactacaacgcagtataacactgctcwttgtgatgctgctcttccaaacagtagtgctgacctgatggtgtagtacatgatttcccacctttgacaccttcatgttagtaaatattagctgt

SEQ ID NO: 106176 - DNA, 405 bp, Homo sapiens
taaaccagggaaatctgctgcttctcaggtaagcacaactagcattttcaccaaggtgtagacatttatccatctactctcatgctgaaggacgacattcgtctcagccaaatgtgtcaggcttgtgaatttggaggcaaatctctcwcacacacacacacacacacacacacacacacacacacacatacacacagagcaaatgagtctatgtgtgggtcctaagcaggcagcctcaaaattatgttcaccattaacaggtatagcaaaatctcagatcaaccttcagtgatggaggctgatgaggtcaaaaatgatggaagaaatgtcaggaaagcctggtgcttatcatcaggtgacaatgggacaagtgcctcttttcccctatgcttggctaccagatct

SEQ ID NO: 106177 - DNA, 619 bp, Homo sapiens
tctcctcaaaaaaaggcaagaaaggagtaacagagaaacaacaataaaaacaataattttaaaaaacagataaatagaaaataaagagcaacaaattgctcctaaatccaatcatagcagtatttacattaaatggacaaaacattcataaatggactaaacactacattaaaaggcatagattgtcagacttaataaaaaagtgacaccaaactcttattgtaagagattcacttacatgaaaagacagaattagtttgaaagaaaaaagatagaaagcatataccatggaaacacttgtcataagaaagctgaagtattacacaaaacaatctataagataaggaaaggaatattaccagaggtagagacgtttcataatgctcaaaacataataataataaatgtgtatgtgcctgataacaaagttataaaatactgacagaactaaagagaagtataaacaaacccacaaacataactggatattttaatacccctaagttggtaaygggtaaacaaattggatgaaaaatcagtaaggataaagaagatctgaatgatattaccaaccatgttgaccaaacttaaattatacaacattatattcaacacctgg

SEQ ID NO: 106178 - DNA, 593 bp, Homo sapiens
tgggttcatagttttataaccttttatgccaaactctgacacttcaaaatatctagcagagataaaaattaacccagaaaaaaaaatgcatgctagcaattctgaagaatttctgtttttattttaccaacaattttaaaaccagcttatttattaaaagtttacttaagtcctgtgaatttgagaaatactttgggcttaatttatgaatgcttttttatttttaaaccaatttggtaggcacgacatataacataatamatgtacatacataagcacatccagacatgtatacatatgcataagcaaagatccaatagatttacctcagagctctagccataagataacaatacaaactcatcagtttacatggctacactttgttttccctgatagttaatccaatgaagggtgtagatcaacattatgggtaaagcagtctccatggcagtttgacttttaaaggctaaaccttcccaggctacacagaacactggggccaaacagcaccaaagaagaatgtcacacgctaaccaggcccgacactgtttagaagtactggagccaaacagtattacaaaggagtatca

SEQ ID NO: 106179 - DNA, 593 bp, Homo sapiens
tgggttcatagttttataaccttttatgccaaactctgacacttcaaaatatctagcagagataaaaattaacccagaaaaaaaaatgcatgctagcaattctgaagaatttctgtttttattttaccaacaattttaaaaccagcttatttattaaaagtttacttaagtcctgtgaatttgagaaatactttgggcttaatttatgaatgcttttttatttttaaaccaatttggtaggcacgacatataacataataaatgtacatacataagcacatccagacatgtatacatatgcataagcaaagatccaayagatttacctcagagctctagccataagataacaatacaaactcatcagtttacatggctacactttgttttccctgatagttaatccaatgaagggtgtagatcaacattatgggtaaagcagtctccatggcagtttgacttttaaaggctaaaccttcccaggctacacagaacactggggccaaacagcaccaaagaagaatgtcacacgctaaccaggcccgacactgtttagaagtactggagccaaacagtattacaaaggagtatca

SEQ ID NO: 106180 - DNA, 520 bp, Homo sapiens
agcagcctttagtatgccctcagtcatcaagggataaccacggtactggtaggactctcttccattctttctctgwccacacccctttatgaaagtccactattttcctttctagtcaattcctctactgttttcagtaagtccttgggacataacttactctacaaactaatccagtcaaattatgtctcctttgagggaagaatgtctgaagttattatttgatattttgagtgttcccctcagctgtcttattccccacttttcctgtaccaatcagtctgcgtcttgtataggctgtatctttgttagatacattgatcttttcccaattgactttcactacaatttccactgctcttaagagtgccattgggcttaaacttctccaaattctgttgcaaaaaaaaaaaaatgtcattttatttgggaagagactaggagctgtttatcttacatcctgctctcccctgaggaacatcccttatctagagctctagagctggagatgagaacattg

SEQ ID NO: 106181 - DNA, 520 bp, Homo sapiens
agcagcctttagtatgccctcagtcatcaagggataaccacggtactggtaggactctcttccattctttctctgtccacacccctttatgaaagtccactattttcctttctagtcaattcctctactgttttcagtaagtccttgggacataacttactctacaaactaatccagtcaaattatgtctcctttgagggaagaatgtctgaagttattatttgatattttgagtgttcccctcagctgtcttattccccacttttcctgtaccwatcagtctgcgtcttgtataggctgtatctttgttagatacattgatcttttcccaattgactttcactacaatttccactgctcttaagagtgccattgggcttaaacttctccaaattctgttgcaaaaaaaaaaaaatgtcattttatttgggaagagactaggagctgtttatcttacatcctgctctcccctgaggaacatcccttatctagagctctagagctggagatgagaacattg

SEQ ID NO: 106182 - DNA, 520 bp, Homo sapiens
agcagcctttagtatgccctcagtcatcaagggataaccacggtactggtaggactctcttccattctttctctgtccacacccctttatgaaagtccactattttcctttctagtcaattcctctactgttttcagtaagtccttgggacataacttactctacaaactaatccagtcaaattatgtctcctttgagggaagaatgtctgaagttattatttgatattttgagtgttcccctcagctgtcttattccccacttttcctgtaccaatcagtctgcgtcttgtataggctgtatctttgttagatacattgatcttttcccaattgactttcactacaatttccactgctcttaagagtgccattgggcttaaacttctccaaattctgttgcaaaaaaaaaaaaatgtcaktttatttgggaagagactaggagctgtttatcttacatcctgctctcccctgaggaacatcccttatctagagctctagagctggagatgagaacattg

SEQ ID NO: 106183 - DNA, 622 bp, Homo sapiens
agaatgaacatctgcatttttcttgtccatgattcttctacataatgctactgaagcgaagataatctttaattgtagaaacaagaagagaagcaaatatattactagtatccagaagctccttcacagttttcagataatgctaatgagctagttcctggtttgtatcacaaacttctcccaaattcttcccctaaacattccttcatggtggagctaattagactattgcagctccaccgttcattactgcttgtattttgtaaaaattagtgcatatgtcatgggcctagggatacatccattgcagggaaatgggagtagggcattcccagttttagctataattgaaaattattcttagggacgaaaatgccattgaataattctgccttttctcctccttgttctctctctctctctctctctgtctctctcatatctatcttctttctttctttctttctttctttctttctttctttctttctttctttctytctctctctctctctctctttactaagtctggaaacccttagagtttctcttgaatatatcaagctaattatttttatttttattcactacctttcatgcatttcctacttccaataatcct

SEQ ID NO: 106184 - DNA, 575 bp, Homo sapiens
tcaagctgtttataaaaaactaaaaaatgtctgaaacattaatatcaaatgactaaaaaggaagttgctcatttatctggtatcctcaactaaagtgctataaaaatatctggttgatgaggaattctgacaaataatagctttggcttcacatttaagaaaaacttccagtcatttgattccaaggtttacagtcataagagaacaaactcacaaatgaatttcaccarcagttaatattctgacataccctgtatatccaataatcctctgtccatctgatagcccgcttcatattataagaagagagaaattgcaaatatttgctcctaagctcttgtgataggcagaatgatgatcccacaaaaatgtctttgtcctaatcctcagaacttgtgaatatattacctttcaaggcaaaaaagacgtctgtatagatgtgattaagaatcttgatatagggagagtgttctagcttatcagaatgggtacaatgtgatcattaaagtttttataagtggaagagggagacagcagtgtcagagagagatctgaaattgctaccctgctgactg

SEQ ID NO: 106185 - DNA, 640 bp, Homo sapiens
ctagctagataaaaagaaaagactcaaccatctgctggcttcaagagacacatgtaatgtcacccagaggctcaaagtaaaatgatgcagaaagattaccatgtggaaaataaaaaagagcaggagtcactatctttatagcagataaaacagactttaaaaatagaatttttaataaaaagtaaggacaataaagagcattacatagtgacaaagatacaatacaacatgaagccttaactattctaaatatatatatgcatccaaatattggagcacccagatttataaaacaagtttcttcttggcctacagaaagacttagacaactacacgataacaatgggagaccccaacaccccattgatggcattagacagatcattgaggcaggaaactaatgaggaaaccttggacttaaactcaacacttgaccaattggacctaatagacatctacagaacacttcacccaactaccacataatacacattcttctcmtcagcacgtggaacatattctaagatcaaccacatgttcagtcataaagcaaatctcaataaattaaaaaaatgaaatcatatcaagcacactcttgaaccacagtgcaataaaaagagaaatgaatatcaagaatatc

SEQ ID NO: 106186 - DNA, 567 bp, Homo sapiens
taatagattagaatagcactctaatataatgctctaaaataatggatagggtcatataggattagaccaatgcaatctctgttatgtcaggcttagtatcagttctcttcaccactctattctcagactgagaaaactattttaaacttgaaagttattcaaaaaatatttgttgattgaaacattgaaagcagtctaacaaagatgacagttgacttgaccctggcctatagtaaattctcaaaagtgtcaaaaagtatttaccgtaattatcaaacatttatctactatggtgatttactatgtrccaagtattcttttaagcactttgcaaacgcaaacatagataaacctcataacaattatcaaccccattttccagatgggaacatagttctgctgagaggttgagcaatttgctacaaacagaatgtggcagagccaggactcaaacatatgcagtctggctccaggatctaggctcccaactaccacccaatgtttctgaagagtggcggaaggtccaggccaccttttccagtggcttgccacccaaaacatacattt

SEQ ID NO: 106187 - DNA, 583 bp, Homo sapiens
gaaaagaaattggtcctactgctgtcccctcaagctatttcttccgcttatcttaacaagaaaggcctagtggggctctgtgtgcaggcataaagcargcctggattttatggaatcacatggaaactgagtgaccaatgagacgctgttgctggggagagattgtaatatatgctaatgaaatctgagttgatatttagttttttaaagaaagaggaagaaaagaatctctctctctctctctttccctctcttttctctttttctctttcttaatctctatcatgggcttttgatattagatactctatgcttatatcaaaattacttttgccttttgtttatccagaccttgtttatcaactgtcctcactgtcatacacttcagacatttttttttcttttttgctactctatcagcttttctttctaccaataaaatcaccatctctcattctatcattgatacattgctggtgattttgttaatgttaaatcttaagataataaatttcacaccaagtatcaagtgttcaaggtgatagggaagagtgtgggggtctacattaggacagaggcctgg

SEQ ID NO: 106188 - DNA, 626 bp, Homo sapiens
gataggaataatgaactggcaattttaacaattgcttggggatgctgatgcagccgatctaggtacacagggagagaaccatggagatagaaggatatgcctggtccagttcacaccataactcacttctctgaacagccccttgggactgctgaattccaggtcagactctcctaggctacacccactgttacaacaattggtctaaggaccagccaagggctgctctctsccttggtctgatatgttctgctgaatagcaggcaaagttgagtctccagagtgatttagcaggaggagtactaattgatcttatttggaaaaacattggaacaggttcagctcagctgtttcttctttttatttgagcttagcaggagaggttctttctttctttctgagaaagggtcaggaagtccaatactgaaacaattagagaactatcaaagcatggtttccaaaatttaaaaatctggatttactgcaaatacacagttaacatacatcaaagattcacttaagacaataatgaagaaaataggagttggtaaggctggttcaaaggaatataagagagattaaagtatttatagctaatgaaagagaaaatccagaaataagattgc

SEQ ID NO: 106189 - DNA, 622 bp, Homo sapiens
gattgacctattatcctctatgagtctcatcatctgataaagatttattctcaattatataaaaatcatcagttattgttaaataagaaactcagtatatgtagactcctccagtttcttggatttacatatatagttttaattgtacaatattattgtaaaagttaatatcctttcaatgtatctgatttaaaattaccacagagcattgtgggattaaaggagtgctgtgtctagggaaaaaaaaaaaaaaaaaaaggaaagttttctcatcttttctggtgacactgtggctgacggtatctactttaaaatggaagtaagaaaactttcaggcagggggcacccggatttgaaccggggacctcttgatctgcagtcaaatgctctacccactgagctatacccccttcaactgttagaggttccttccttgtccacttatggtgactcartacaatcaagttccacccacactagagttctggcaagctttgtgttctaaagccccaccttcttaattatccatcatctgctttggcttgtcccttggccactaataaactgaaagggaacacttgaaaaatgacatcctgggctgggcacgatgtctcacgcttgt

SEQ ID NO: 106190 - DNA, 710 bp, Homo sapiens
taggggactattagaaaggcaagattgtgtttttaaatgtgagaagaacgtgagatttgggaggggccaggggtggaattatatggtttacctctgtgtcaccacccaaacttcatgtcaaattataatttccaatgttggggaggagccagtgggaggtgattgaatcatggaggtggatttccctcttgctgttcttatgatagtgagtgagttctcatgatatctggctgtttaaaagtatgtagcacttgcccctttgctctgtctctctgcaattccaccatgtgaagaaggtgcttgcttcctcttttcccttctgccatgattgtaagttttcagaggcccccgcccccagccatgttttctgtacagcatgtagaactgtgagtcaattaaacctcttttcyttttaaattatccattctcagctacttctttatagcaaggtgagaacagattaatacaccatccatccttcacttctcccaaatactctgtactgtattctctggaatacacatttcagcattaggaaatcccccttttatcttccacctctttccagaatgctctttgcacactctagctttcataaaaatccagctcttgggccaagtacagtgtctcacacctgtaatcccagcaatttgggaggctgaggcgggcagatcacttgaagtcatgaaatcaggatcagcctggccaac

SEQ ID NO: 106191 - DNA, 404 bp, Homo sapiens
tttgcagtatcttttatgaatcccaacaagtaaggttccttccaaactmgaatgttcatggcttgaccagtcagtgattacgatgttacacctgaaagtatcttgctttcattctgactctatcatcttaattacagttgaatatgaaaaaaataatttttgctattttgggattaatgttcttaacaactgatgcttgcagtctactgatgctaccttagaaaatattttagatccttgtcagtagcagacatgaactttacatgataaaatcactttcataaagttaatcattcatttactgttttgcaaaaaaaaattaaattaatgtttgtattataaagtcaattgttaagtaaaattgaagaaactttctcttcttgtaaatcaaacacacacaagtg

SEQ ID NO: 106192 - DNA, 404 bp, Homo sapiens
tttgcagtatcttttatgaatcccaacaagtaaggttccttccaaactcgaatgttcatggcttgaccaktcagtgattacgatgttacacctgaaagtatcttgctttcattctgactctatcatcttaattacagttgaatatgaaaaaaataatttttgctattttgggattaatgttcttaacaactgatgcttgcagtctactgatgctaccttagaaaatattttagatccttgtcagtagcagacatgaactttacatgataaaatcactttcataaagttaatcattcatttactgttttgcaaaaaaaaattaaattaatgtttgtattataaagtcaattgttaagtaaaattgaagaaactttctcttcttgtaaatcaaacacacacaagtg

SEQ ID NO: 106193 - DNA, 404 bp, Homo sapiens
tttgcagtatcttttatgaatcccaacaagtaaggttccttccaaactcgaatgttcatggcttgaccagtcagtgattacgatgttacacctgaaagtatcttgctttcattctgactctatcatcttaattacagttgaatatgaaaaaaataatttttgcyattttgggattaatgttcttaacaactgatgcttgcagtctactgatgctaccttagaaaatattttagatccttgtcagtagcagacatgaactttacatgataaaatcactttcataaagttaatcattcatttactgttttgcaaaaaaaaattaaattaatgtttgtattataaagtcaattgttaagtaaaattgaagaaactttctcttcttgtaaatcaaacacacacaagtg

SEQ ID NO: 106194 - DNA, 404 bp, Homo sapiens
tttgcagtatcttttatgaatcccaacaagtaaggttccttccaaactcgaatgttcatggcttgaccagtcagtgattacgatgttacacctgaaagtatcttgctttcattctgactctatcatcttaattacagttgaatatgaaaaaaataatttttgctattttgggattaatrttcttaacaactgatgcttgcagtctactgatgctaccttagaaaatattttagatccttgtcagtagcagacatgaactttacatgataaaatcactttcataaagttaatcattcatttactgttttgcaaaaaaaaattaaattaatgtttgtattataaagtcaattgttaagtaaaattgaagaaactttctcttcttgtaaatcaaacacacacaagtg

SEQ ID NO: 106195 - DNA, 521 bp, Homo sapiens
ttccaaaaggacaagagatcagagagtcacatatacgcctcttgttttattttcttgctttcaccggkattattgccaagaaaatcgtagggaaaaactttaaacttttcttttcagttgatccctttgacatcacctctcatgtttaaaatcaggaaaacacacccctaaaatttgcactctcttccgttttgaaaaagaaaacccacacacaaatgcacactattaccgtctttcaccctgcgctatatttccaaagtgtattataatccagatattgccccatctcaaacatgttaagtcagactgtgctgaaagactttccagggacggtcaacagggtatatgttcagtggctgccctgaaatcctggtggggatgaggatcacgcttcatcatcaaggggatgcccatcccctgataagctcccagtccttttggaagatttctttgaatgttaattgcattttcagttttgctcatttcccaccccaatgttttgtctgcaacatcgcttacac

SEQ ID NO: 106196 - DNA, 608 bp, Homo sapiens
atgcagtatttttctatgtctggtttatttcacttagcataatgtcttccagatcatacagtatttatctttctatgtctggtttatttcacttagcataatgtctttcagatttatccatgtcattttatccatgtcacacacaaatggcaggatttctctcctttttaaggctgaagagcgttccattatatacatttctccgcttttttaggatgaatatgtatatatatattcacacacaaatgcatgcacacacacacacagtatatatatatatatatatatatatatatatatatatatgcgtgtgtgtaagtgtgtgtaggtatatatatatagtagtctcctcgttatccacaactttgctttctgtggtttcagttacccacagttaaccacagtccaaaaatattacatacaataagatatttagagagaggtagagaaagatcacatttatataacatttatttaagtatactgttatacttgctctattttattattacttactgttgttaatctcttgctatgcmaaatttataaactctatcatagatatgtatatataggaaaaaacatagtatgtatagggtttgatagta

SEQ ID NO: 106197 - DNA, 559 bp, Homo sapiens
atactcatcctttgtctcatgttgatcttctctggcaagtgtggaargttccctactgtgacaaagcctttcctacccccccatccttgtgctcaggaagcctgagcaaagtaagtttagggttctgtgatgaggcaatcatccagctcatatagcaaaaggcaagaatcaattggaaaattgcctgtcatgaactggggcttagtcaccttgactctagaaagaatcatctttacccgactctcaactttccttgctgcttttgttgtctcaaatggaggtcctgggaagcatcattcagcaaaagtaattttagatgataacttcagtgctcttgaggggctgtttgtacctgatggcaagagctgcaaatagcgtgacatcatcagtaaccaataatgcagtcattggtgcagtctcttaccagggagagaaggtggtcctgggaattcttctcttggaattgccttttgaaagcttgcagcccactatgacttgggacaggctacttaaactctttgtgagccatctatgaaatggaggataacaatagttcctc

SEQ ID NO: 106198 - DNA, 602 bp, Homo sapiens
gataatgatatcatttggtgtcatttgaaaagaatatgtatttggaaaaatatgagggcagcaatgctgagttcattgattactgttaaattatattaamcttgccgaagaataatgaggaagtaagggctgttaaccagcagtaaatacctaattgtgaaagccagagagtttctgtctcagtttacaaaaatgcccttatacttggagtggaagggcagacacagttaaggttacaccaaaggcctagttgtcagaataacagaactcccgaggtatttgaatgctcagccacagcatgtctgctatatgaaagttagggccctggtaaggaacatttcaaatcctgaatcatggtatacagccaaccagatgaactgaccataagaatgttgtctctgtaacttccctgggtcttctgcgggtacagaagtgattcattcttccctagtcagagctagcatttcctctgtgccagaagatgctgcagaaacctgtctcattcaagggaacagaaggctccctctccccttagaagctgctcaccttctggcctgcatgccaagttgataactagggttatctcccagcataacccagta

SEQ ID NO: 106199 - DNA, 602 bp, Homo sapiens
gataatgatatcatttggtgtcatttgaaaagaatatgtatttggaaaaatatgagggcagcaatgctgagttcattgattactgttaaattatattaaacttgccgaagaataatgaggragtaagggctgttaaccagcagtaaatacctaattgtgaaagccagagagtttctgtctcagtttacaaaaatgcccttatacttggagtggaagggcagacacagttaaggttacaccaaaggcctagttgtcagaataacagaactcccgaggtatttgaatgctcagccacagcatgtctgctatatgaaagttagggccctggtaaggaacatttcaaatcctgaatcatggtatacagccaaccagatgaactgaccataagaatgttgtctctgtaacttccctgggtcttctgcgggtacagaagtgattcattcttccctagtcagagctagcatttcctctgtgccagaagatgctgcagaaacctgtctcattcaagggaacagaaggctccctctccccttagaagctgctcaccttctggcctgcatgccaagttgataactagggttatctcccagcataacccagta

SEQ ID NO: 106200 - DNA, 602 bp, Homo sapiens
gataatgatatcatttggtgtcatttgaaaagaatatgtatttggaaaaatatgagggcagcaatgctgagttcattgattactgttaaattatattaaacttgccgaagaataatgaggaagtaagggctgttaaccagcagtaaatacctaattgtgaaagccagagagtttctgtctcagtttacaaaaatgcccttatacttggagtggaagggcagacacagttaagkttacaccaaaggcctagttgtcagaataacagaactcccgaggtatttgaatgctcagccacagcatgtctgctatatgaaagttagggccctggtaaggaacatttcaaatcctgaatcatggtatacagccaaccagatgaactgaccataagaatgttgtctctgtaacttccctgggtcttctgcgggtacagaagtgattcattcttccctagtcagagctagcatttcctctgtgccagaagatgctgcagaaacctgtctcattcaagggaacagaaggctccctctccccttagaagctgctcaccttctggcctgcatgccaagttgataactagggttatctcccagcataacccagta

SEQ ID NO: 106201 - DNA, 602 bp, Homo sapiens
gataatgatatcatttggtgtcatttgaaaagaatatgtatttggaaaaatatgagggcagcaatgctgagttcattgattactgttaaattatattaaacttgccgaagaataatgaggaagtaagggctgttaaccagcagtaaatacctaattgtgaaagccagagagtttctgtctcagtttacaaaaatgcccttatacttggagtggaagggcagacacagttaaggttacaccaaaggcctagttgtcagaataacagaactcccgaggtatttgaatgctcagccacagcatgtctgctatatgaaagttagggccctggtaaggaacatttcaaatcctgaatcatggtatacagccaaccagatgaactgaccataagaatgttgtctctgtaacttccctgggtcttctgsgggtacagaagtgattcattcttccctagtcagagctagcatttcctctgtgccagaagatgctgcagaaacctgtctcattcaagggaacagaaggctccctctccccttagaagctgctcaccttctggcctgcatgccaagttgataactagggttatctcccagcataacccagta

SEQ ID NO: 106202 - DNA, 524 bp, Homo sapiens
ggaaaaaatctgagacaatataaaactttgagggggtaaaaaactgaggataagataaaggcaaatttagtgcaggaaacaaaatgaaagacaatttgatatttcaggataaaaacaaatctgcatgaaactttcaaaatcaaataaagcaaatacaagtaaatttggaatggtattatattaagtaaatataaatctaaagaaaatgtaaatttgaaatgatttcaaraaattgagttaaaaaaaaaagagagagaatccattttcacatggtgaacttgttcccatgagtgccctaggtttcctgagagtgaaactacttcaaagaacatagtacactatgtgactcagcatcaaataatatttgtggtttggcaatgttgttcatacatttccaactttaaagtcaatgtgtccgggcacggtggctcacacctgtaatcccagcactttcagaggttgaggcaggtggatcacctgaggttgggaattcaagaccagcctgaccaacatggagaaacccc

SEQ ID NO: 106203 - DNA, 524 bp, Homo sapiens
ggaaaaaatctgagacaatataaaactttgagggggtaaaaaactgaggataagataaaggcaaatttagtgcaggaaacaaaatgaaagacaatttgatatttcaggataaaaacaaatctgcatgaaactttcaaaatcaaataaagcaaatacaagtaaatttggaatggtattatattaagtaaatataaatctaaagaaaatgtaaatttgaaatgatttcaaamaattgagttaaaaaaaaaagagagagaatccattttcacatggtgaacttgttcccatgagtgccctaggtttcctgagagtgaaactacttcaaagaacatagtacactatgtgactcagcatcaaataatatttgtggtttggcaatgttgttcatacatttccaactttaaagtcaatgtgtccgggcacggtggctcacacctgtaatcccagcactttcagaggttgaggcaggtggatcacctgaggttgggaattcaagaccagcctgaccaacatggagaaacccc

SEQ ID NO: 106204 - DNA, 479 bp, Homo sapiens
ggtatttaatgttccttttctgatttcctgacttgtaaatatgttaagaactgtgtctttaaatatggcctggtgtattagataggatatagaatataaatttcttaaaatgttcttgaccaaagatgaaaaaatttccagatttaatgagatttatgttaagaacactggccagttgttgcaatgacaataaatgacacctgagtataagrtcaccaaaaatatgtcatcatatttcttgaggcaaattttaaagaaatatgctcttgtggttagtatgactgttggtgagactaagactgtcattgttctggctgagtaggcaaagtctgtgttacgtgttttgttgtatccaaggttcccaatacagtggagggctttgctaaatagccttttcaggggatgtggactttaaaaataaaggtgaactgtttgttcctttcctgtgaagtatcagctgcactctaaaataatgtaga

SEQ ID NO: 106205 - DNA, 498 bp, Homo sapiens
ctactgtgccttattcaaattccagacctacaaaatggcaaaggtaaccaactgcttgttggttatgttttaatcccactaaattttggggtggtggttatgcagcaataaatatctggaacaaagggaaatagtatcgtgtgactgcaagtccaaggtctcattttaaaatttaagacattgtcttcttttttcttttatctttgctcctgtctccattactcctcactgagaaaacaaaaaaacctacccactattggtttgctgtcatttaaatatccttgtctctgattgatcttctacccataggtcatcaaagtctgtaatactttccctgacaawccatgtagattttgcttaaaattaaaaaaagtttgcatacgaagtaatcaatattatgctttggttttactcttagaagttctactttcactcacctggtaagcctagaaacaaagaagctattatgcgcatcatacccagggtttttaattttaa

SEQ ID NO: 106206 - DNA, 583 bp, Homo sapiens
catctcttcttgcgtacttgcatctctttctgactaaagacaggaaagtttctctgcttgtaaagattcatgtgattgaattaggaatgcccagagaatacagaataatctcccagtctcaaggtccattaatttaataatcctgtaaactccttttarccatgtagtgtagcatattcacagatttcaatgattaagaaatggacttctttggagagtcattattctgcatatcacataagataaagactaaaccagctactacaaataagtttttaaaaatctaaaggaaaccatgtataaaaaagtaaagtacaagtactatttcaccagagaatatcactaaaaataaaaattgtgaaaagaaatcaaatagaattattgatgtggaaaaatacaataactgaattgtaagtttcaccagaaggattcaacagcagacttgagttggtagacgaaagagtaaattaacttcaaaagaggtcaaatatacattttgaaaataaagagaaaagaataaagaaaaagagaagaataaacagagcttcagaacctgtgaagtgctattatgtataccaacata

SEQ ID NO: 106207 - DNA, 583 bp, Homo sapiens
catctcttcttgcgtacttgcatctctttctgactaaagacaggaaagtttctctgcttgtaaagattcatgtgattgaattaggaatgcccagagaatacagaataatctcccagtctcaaggtccattaatttaataatcctgtaaactccttttaaccatgtagtgtagcatattcacagatttcaatgattaagaaatggacttctttggagagtcattattctgcatatcacataagataaagactaaaccagctactacaaataagtttttaaaaatctaaaggaaaccatgtataaaaaagtaaagtacaagtactatttcaccagagaatatcactaaaaataaaaattgtgaaaagaaatcaaatagaattattgatgtggaaaaatacaataactgaattgtaagtttcaccagaaggattcaacagcagacttgagttggtagamgaaagagtaaattaacttcaaaagaggtcaaatatacattttgaaaataaagagaaaagaataaagaaaaagagaagaataaacagagcttcagaacctgtgaagtgctattatgtataccaacata

SEQ ID NO: 106208 - DNA, 601 bp, Homo sapiens
aacaaatataaagagcccctctccccaaaattgaagaaatccaaatgtccatcaactgctaaatgaacaaaatgtggtttatctatgcaattgaatattattctgcaataaagtaaatgaatgaaggatacatgctgcaccatagaggaaccttgaaaacactgtgctcagtgaaagaatccagtcacaaaagaccacatgttgtattaatctacttatattaaaggtccagaataaataaatccatcagacagaaagtagacttggattgttaggggttgaatggagcgtaactgctaatggggtgataaaaaataggaaaattagagtggtgatggttgcacaattctgggaacattctaataaccactcaattgtatatttttaaattgtgagttttatgataggtaaattatatctcattgctgttattaaaatgttctaaaattatcaaatatcttttgcctacattctgcaaatttaycccatattttcccaatgtgcttctttctcacatagatagatatatagatatattcattacaggtaatgccaactttgattacttgagggcaaatttccctactttattattattttt

SEQ ID NO: 106209 - DNA, 617 bp, Homo sapiens
ctgggtcataaaacaggtccctaaaatttcaaagcaatgaaataatttgaagtatgttttctaaaaaatctgaaaagttaactagaaaattaaaaaatgtttagaaatttaaaatgacatttctgcagtaacacaaaggtctaagactacattataaattgataaatattttgagctgaacaatagtgaaaatcaagcagattgaacttgtagaatgtaactaatactgggcttagggagaaatttattactttaagctcatatgttggagaggaaaggttaaaatttatccaattatctcaagaaaatggagacacacaatattcaaaactgaggaaattagaataaaggaaatcataaaaataagaacagaaaataatgaaacacatatcaaacatatagcagaggaaagcacaaatccaaaagctagttcattaaaaatwttaataaaattaatcatcatctaatcaatctgttcaaggaaaaaaagagaaaaggtacaatttaccaaagtaagaaatgaaaaaggctaaccacaatagattatacaaacataaaaatataataagaaaacattacaaatttgtagcaatgaatttaaaaatgcagagcagtag

SEQ ID NO: 106210 - DNA, 507 bp, Homo sapiens
tgtcacactatattgcctaggctggtcttaaactcctgggctcaagtgatgctcccacctcagcctcctaaaatgttgggattataagcatgagccactgtgcctggcctacctattaatgtttctaataatattgatgaaatatcaattacaccttcaaagtccctttgccatgaaagaatcatatcccaggtcctggggttagkgtgcgggcatctttgggaggtcattcctcctaccacgaggctcagatcttcttaacaatcgattgcacctggaaaggtatctgattaggccatggcagaagaaggaggtgatgggaagtagtgccaaaaagctgaaaggaaaggagggcaggaaaggttcctggagcagctggcaaacaaggccagccaagctctccatggctgtaagcgtgatccactcacctgtagcacaggtaccactgctggaagcacagttatttgtgggatggaggcttggatgtgggcagaaaggggagttttt

SEQ ID NO: 106211 - DNA, 507 bp, Homo sapiens
tgtcacactatattgcctaggctggtcttaaactcctgggctcaagtgatgctcccacctcagcctcctaaaatgttgggattataagcatgagccactgtgcctggcctacctattaatgtttctaataatattgatgaaatatcaattacaccttcaaagtccctttgccatgaaagaatcatatcccaggtcctggggttagtgtgcgggcatctttgggaggtcattcctcctaccacgaggctcagatcttcttaacaatcgattgcacctggaaaggtatctgattaggccatggcagaagaaggaggtgatgggaagtagtgccaaaaagctgaaaggaaaggagggcaggaaaggttcctggagcagctggcaaacaaggccagccaagctctccatggctgtaagcgtgatccactcaccwgtagcacaggtaccactgctggaagcacagttatttgtgggatggaggcttggatgtgggcagaaaggggagttttt

SEQ ID NO: 106212 - DNA, 540 bp, Homo sapiens
agcattggaaggatgtgctcatcaacctagctcaaaagcctgagatttttgtaattatgttatgcaggtttaagacaaaagaccaggcgagatgagtggtgaagccatgaaaaaaaatgacacgcacaaccaaagcaaaaccagcaggcttstggagtttgccaattcttctttgtgaagaaaacgtctggcagtttgcctaaaatcttagccgtgaacagctgccactccagtttaaattgctgttaaaaaacaaaaccaaaaagcaaaacaaaacaaaacaaaaatctataccacctgtccagaaaattgcctgtgcctggagtcccgcaaactgaaaaaccggagcgcacacccctgcttcccttcactgttaggtcgaatctgtcctaagcctcagtttacctagcttgcagcccaaatgccaacaatcttggggccaaataactttctctgtggtttcagtctgggtagcagtgaccactttcaataaacttaagagtgagagatctttgtttaaacaatgaatgttatgaattc

SEQ ID NO: 106213 - DNA, 573 bp, Homo sapiens
gtctcactctgttgcccaggctggagtgcagtggtttgatcacagctcactgcagtcttaaactcctgggctcgaatgatcctcctacctcagcctccctagtagctggaactacaggcatgagccaccacacctggctagtttttgtattttttttttgtagagatggagtctcaccatattgcccaggatgatctccaattcctggcctcaagcaattctcctgcctcggcctcccaaagcactgggattacaggcatcggccattgcaccttgtcacaaaacygatttttaaacacgttagttttattcttaattttctaagtcctttctaactccaataagtgtaaggctaaatgaaagtctgccgaagggctagatctcagtgagagcctcacgaaaagacaaggaggcaagagtgaaggagaaggagctggggctgccaggcaggcagaggggacggaggccaacacacggaatccacgtattctcgcccccaactggagaaagggccaagaagcaaaggggcaggatgaagctggaacagaaaacatgagcccccttactggactc

SEQ ID NO: 106214 - DNA, 573 bp, Homo sapiens
gtctcactctgttgcccaggctggagtgcagtggtttgatcacagctcactgcagtcttaaactcctgggctcgaatgatcctcctacctcagcctccctagtagctggaactacaggcatgagccaccacacctggctagtttttgtattttttttttgtagagatggagtctcaccatattgcccaggatgatctccaattcctggcctcaagcaattctcctgcctcggcctcccaaagcactgggattacaggcatcggccattgcaccttgtcacaaaaccgatttttaaacacgttagttttattcttaattttctaagtcctttctaactccaataagtgtaaggctaaatgaaagtctgccgaagggctagatctcagtgagagcctcacgaaaagacaaggaggcaagagtgaaggagaaggagctggggctgccaggcaggcagaggggacggaggccaacacacggaatccamgtattctcgcccccaactggagaaagggccaagaagcaaaggggcaggatgaagctggaacagaaaacatgagcccccttactggactc

SEQ ID NO: 106215 - DNA, 534 bp, Homo sapiens
cacttcctttggttgcctcttccagggggccttgcagtcagtcaacctctgtgtggaggggacaccttcccttatacagtcttccacagtgtatgcagtatgatggtgtcccacctgctcctgcccttagctcctgtgatcaccttgggtgcagcgtgcctgaggcgtgttaggtcctgaaactgatgggatgtgatctacctacggccacactcctgggaagtgtggccaccttcccctcatcccgggagtgggagagcttggtgctccctgcagtctaatcctgcaccctgtgtgagctgtgatcaacaccacagtcttccaaatccacctgctygttagtgagtactcctgggttctttccttgctgctacagtttgaggcttttgattttaataaattaagaacaaaggcatgatataatgaaggtacaatatagaatatatggatacgcacataggcatacatataaactcccccctgtgtgttgtgttacatctcaaacccccaagaaatagaaaattgaaacaaggc

SEQ ID NO: 106216 - DNA, 649 bp, Homo sapiens
tcttcattacatggaggactcattacatgaagggactcagctcaaataagggagagcagagctgaagggtatgaggaagagcaagacctgactcaccagtgccacggacagcaagggcagcattgctgtaaccatgctacaagttgctttaattaattaatctggatgagagaggcatacctggtaggaatctattactgagacacaaaatagtccagccacttctgagggctgcctgtaatcccagcacttttggaggccgaggcgggtggatcacctaaggtcaggagttcgagactagcttgaccaatgtgaaaccccgtctctactaaaaatacaaaaattaactgggcatggtggccagcgtctgcagtcccagctactcgggaggctsaggcaggagaattgcatgaacctgaaaggtggaggtctcagtgagtcaagatcatgccactgcgctcaagcctggataacagaacgagactcactctcaaaaaaaaaaaaaaaaaaaaaggcagggaagtaagaatactgactgggagtatttcttctttcaaattaagccattattataaaaaacatctggcagtgaaataatgctgtgctaagttgaaatttagcaaaataaacataaaaaggagctattata

SEQ ID NO: 106217 - DNA, 649 bp, Homo sapiens
tcttcattacatggaggactcattacatgaagggactcagctcaaataagggagagcagagctgaagggtatgaggaagagcaagacctgactcaccagtgccacggacagcaagggcagcattgctgtaaccatgctacaagttgctttaattaattaatctggatgagagaggcatacctggtaggaatctattactgagacacaaaatagtccagccacttctgagggctgcctgtaatcccagcacttttggaggccgaggcgggtggatcacctaaggtcaggagttcgagactagcttgaccaatgtgaaaccccgtctctactaaaaatacaaaaattaactgggcatggtggccagcgtctgcagtcccagctactcgggaggctcaggcaggagaattgcatgaacctgaaaggtggaggtctcagtgagtcaagatcaygccactgcgctcaagcctggataacagaacgagactcactctcaaaaaaaaaaaaaaaaaaaaaggcagggaagtaagaatactgactgggagtatttcttctttcaaattaagccattattataaaaaacatctggcagtgaaataatgctgtgctaagttgaaatttagcaaaataaacataaaaaggagctattata

SEQ ID NO: 106218 - DNA, 559 bp, Homo sapiens
ataaagatgggggcatttttggtttagctcacactttatttgtggtacctagtacagtgtctgatacatagtaggcattcaataaacaacctatgaaatgatacctatttacctgtaaattcaccagttaatcttaattttatccgtgaaaactttcaaaacaattttatcttattgtggtagcaatttaaatggagttatctgtagagagacaactgattttcttctgtgttatttagggtcaggtttgcctttgacagaaaacataaagtaatagtagcattaaaaaagacagcagttaatttgtctcatgaggaagtctgaaggtaaacaatcacagcctgactccttgtgactcatgatgttgtccagtatctcttagaagttatcacaatagctactcctcctaaattccgcttatagacaaatttatttttaccagcttcagtcactctgtttacattctggccaccagtaaaaataaataaataaataacrttttcccaggagttttatacactacttctttatgcacttcattggtcatatgcacaaaact

SEQ ID NO: 106219 - DNA, 604 bp, Homo sapiens
tgcaaatggagcaaccaggaccgaaacggctgccagaaggaatgccaggggctcacccttcacttcctggaaagatccagaagattactgctatctttgagctgtctgtgggtgacgtttgaaattccatagtgtttgaatggctgattatttggagattatatatatatatatatatatatatatatatatatatatatatwtatttatttatttaacattggcacattaatctattgaaacttcttggggagaattcgctccaaatggtctcatggagagactctcaacttgcaactgggccctccatgctatcctgacttacttctgtctttcactctgataccagagtgtagtcattccagctctggccaccccattcctttcaccaaattgctcctaactggaagatcttactctcctgttgtggggcaggaactgatgccagtagagagggatgtgtcctgaaccattaatgactgcctttttttttaaaaaaaagaatggagctgtcaggaagagacatgccctcaatatgaaacagacaacatgcattacaactgtagtggaaagtggccactgtgactctctatgtaggaggagg

SEQ ID NO: 106220 - DNA, 604 bp, Homo sapiens
tgcaaatggagcaaccaggaccgaaacggctgccagaaggaatgccaggggctcacccttcacttcctggaaagatccagaagattactgctatctttgagctgtctgtgggtgacgtttgaaattccatagtgtttgaatggctgattatttggagattatatatatatatatatatatatatatatatatatatatatatttatttatttatttaacattggcacattaatctattgaaacttcttggggagaattcgctccaaatggtctcatggagagactctcaacttgcaactgggccctccatgctatcctgacttacttctgtctttcactctgataccagagtgtagtcattccagctctggccaccccattcctttcaccaaattgctcctaactggaagatcttactctcctgttgtggggcaggaactgatgccagtagagagggatgtgtcctgaaccattaatgactgccttttttttwaaaaaaaagaatggagctgtcaggaagagacatgccctcaatatgaaacagacaacatgcattacaactgtagtggaaagtggccactgtgactctctatgtaggaggagg

SEQ ID NO: 106221 - DNA, 604 bp, Homo sapiens
tgcaaatggagcaaccaggaccgaaacggctgccagaaggaatgccaggggctcacccttcacttcctggaaagatccagaagattactgctatctttgagctgtctgtgggtgacgtttgaaattccatagtgtttgaatggctgattatttggagattatatatatatatatatatatatatatatatatatatatatatttatttatttatttaacattggcacattaatctattgaaacttcttggggagaattcgctccaaatggtctcatggagagactctcaacttgcaactgggccctccatgctatcctgacttacttctgtctttcactctgataccagagtgtagtcattccagctctggccaccccattcctttcaccaaattgctcctaactggaagatcttactctcctgttgtggggcaggaactgatgccagtagagagggatgtgtcctgaaccattaatgactgcctttttttttaaaaaaaagaatggagctgtcaggaagrgacatgccctcaatatgaaacagacaacatgcattacaactgtagtggaaagtggccactgtgactctctatgtaggaggagg

SEQ ID NO: 106222 - DNA, 595 bp, Homo sapiens
gaaagtttcataacaggccattaagggcaaaaatgaaatgatggtaatagctaacatttattcagtgttcagtaaattccagcgaccttttttaaaggctttacatttattttatcatttacccttcaatatacctataagcaattagtagtcaagacactattgagctaacagatccttatggcttgtcctgtgtcccacaagtcactaagtgacagagccaggctctgcacgcaggcccaagcgacacaaagcctgtgctcctgacttcctcctccacaagaaactctctaagtagcatattgtcagtcaygtttaaaaaaaaaaaaaaaagtacacacacatttagaaaaaaaaaaaaattcccagctggaaatataccaaaaccttaatagcgcttgtctctgaatggtgggattacagatcacttttattttcttcttcaaattagtctctatttttaaatcattctggcaatgaacattcctcaacaatcaagaaaaaaaaattgatgaaacagaaagaccatcttcctacgcagatttgcaccacaccaaggggaaaaaaataataattcaaaaggcaaagctaaaaa

SEQ ID NO: 106223 - DNA, 591 bp, Homo sapiens
gtggaaacttaaatgcatattactaagtgaaacaagtcagtctgggccaggcgcagtggctcatgcctgtaatcccagcactttgggaggccgaagcaggtggatcacctgaggtcaggagttcaagaccagcctggccaacatggcaaaatcccatctctactaaaaaaaaaatacaaaaattagccaagtgtggtggcaggcacctgtaatcccagctacttgggaggctgaggcagggagaattgcttgaacccaggagacagaggttgcagtgagccgagatcccatcattgcactccagtctgggtgacagagcgagaytctgtctcacaaaaaaaaaaagtctgaaaagactaaatattttatgattccaaccacatgatattctggaaaaggcaaaactatggagaaagtaaaaagatcagtgcttgccaagggttgggtgaggatgtcaaacaggtgcagcacagaggatttttaggacagagaaactactctttgtgatactgtaattgtagacacatattatgcacttgtccaaacccacaaaatgtataacaccaggagtgaaccccaatgtcaactctg

SEQ ID NO: 106224 - DNA, 617 bp, Homo sapiens
cggatcaattcctagtatattcatccacgcatatttttatgcaaatgcaagcaaataaaggaataataaaaattgyattaatttttcctcctttcaattcaaatagaaacctactattcaaactacgatgcaccctgcctttttcagttgaaatagagcttgagatcaaactttaatactggacacatgtggaaaccagtgaagtaactctatctcaaattgctgtcatttaagtgcagagaatgaaaaaaaggatgaattcaagtaccttgcgaactcagtatattctgactctatacccttggtgtgatatgttttaaagataaaaagaactataaagaaatctgaatttttcttagtttatttgttgtttggtaatatgggggtagttattcttaaactattttgactgcattacagaacagagaaaaataaatttggaaaattgaatatggtcaggaatcaagggctcttatatgagagaagggaaattttcaaatgggtgagataacaatgaaccttgtgttgatgaattaaaatgaagaatataaagataaactagctctatgcacagacaaggtccaggactgtgtccatgctagaagtaatgagtacac

SEQ ID NO: 106225 - DNA, 626 bp, Homo sapiens
acaaacatggtgcagcaaggttattacacacatcagaggaggaaggtttttgtaagtcaagttcccaaatgagcttcttctttgtctagttttagtcattctgcagggaagtgggtggcatacaagtcttgagtataaaccagatcccaaattcagaggtccattgtaagaytgcaatatgccatcaggagcatgtataaatcattgttttttgagggtttgccatctacaagtgttttgagtgttgatgcagactagaaaactttctgaacacaacctccaatccttggtgtgtgatcctgtctgagtgagccatcctaggaaataaaagacaacgactcacttagttgcttctcaaaacttattcccctggtgggagctatttattatctatcaacccttagtcaggtatccttaacactgcagttatccccgcaggccaagacagtttgtctcaagtaatcacacactatggtgttcatattttaaaagaagaattaaaaatggatttctagagtagaagaaccaaagtaataaggaggttgagaagtcatcttttcccaggaatatttcgaggtctggcatgtttaattcaaaaagagagattaaagaaggaagatgatagt

SEQ ID NO: 106226 - DNA, 524 bp, Homo sapiens
  misc_feature (1)...(524): n = A,T,C or G
gttagtaaattctaagagttggtccaaagtcaagatcctacaatactagtaagtaatttttgacaaatctctatgaagtaataataagattttaatattttcttgttcataaaaatggatagaaaatagaatttattgttagatttttcaaattaagaaaaaaagcagaatgtgataatccatgaagaaaattaaaagtaatgaaataagaatacaaaatttatggtcatgcaaatgtatcatagcaaaaacaatgtgtgaaggtatatcaaagatkaaaaagatccaatagttacaaaaatgtaaatattgcacagaaagctgcaatattatgacttactgaaaactgaaggctattttttccaagaactcaaaatacacattttattataaaagaatttaaaacttttgcaaatctcaaagtagcataaaaggaaataaaaggaaagcattaaagcaatgagacaagaaaaggaaattagaaggtatatatattgaaaatgaagatgtacaannnnnnnnnn

SEQ ID NO: 106227 - DNA, 618 bp, Homo sapiens
cacttccattctccactaggacacagtctcatgcagtgaaaaacataaggcaaaatttaagctaatattgaaaatgagcaaagaaaccttgcatttgatttgttttattggcatctttctaatggtatgtgttctaattaatgttttgaatataatcacatcaggacaattgagttacccaaatggttaaattgctatattctaaaaatataaattataaagtatttttagattagtttagtataaaactartagtttttattaattagatttagtttaacattgtgttattgattgtgttttagaactctattattgattttgtttaaccaaaaaaggatttattgttagtgcagctctcccttccaaatttaaggagagatttttcacaaattcatgtgaatcagacaactgcctgagcaactcacttttagaaagtgccctgctcaactaacatctctgccttttttaaatgttgtgatttattcaatttttaactttatgaagtcctggaaaagcatgcaataataacatactttaccaaacacacttgaaaatagcatatttttaacttatatccttataaccttcaaaaatagaaaattagaacaaagaaaa

SEQ ID NO: 106228 - DNA, 541 bp, Homo sapiens
aaagaaatgctacatttaattctagtaaataaaaaaatgtctttttgctagccgttgatatatgagaatgtgggaaagccatgaaactccttgcgtatgaaacaaagtcttattgtacttttcttggggtacataaaaagtaccttaagaaaagggtacagcagcaggtgaaaaaccatttgaaatgaaagattgactagcactgataaaaaagtattaaaacaatgatgtcttttggatttatttttataaactgtctttgaaaatgtttattagtaaaagaatgatagttatgtattaggggtatagtggacagtagatttcaaagggaagacagtagaaacagaatgattacattttctaactsatgagaaggaagcaattagccaagccacagatggagaatataaagggagagatagattttagaaacattttaaagtcttggacttgctgactggccacctgtgagaatgagagtagtgaaatttatggcttgaacaatctgtagattttgtgacattaacagatagcaaccaca

SEQ ID NO: 106229 - DNA, 400 bp, Homo sapiens
tgcttatcaataattatttcattctgcctatcactgctcttttctcttaaatcagagttcttgtcaatattacatgaataaatactatgaagtggaagttgagcttgtggctttcttaagaaatctgaggtaaagatttaaagagacttaaaaggaaaactggctttcatccaagagagcyttaaatctgaatcatctttgaaaccataaatttgcgagacattactctgataaatatgtttctatgacacaaattgttgaacaccgtggaatgtatttatgtctatatataactctgttaaccttaaacaatttgtttattttatccatgtgtaattttaaaataagatttaagacatactacaaatttaagaaaaatacagaatagaaacataaatta

SEQ ID NO: 106230 - DNA, 592 bp, Homo sapiens
ttcatattccatgcttacaaagcaagttcttttttgtttaatatctgcatgaccttgtctagtctcttctcctttatgtattatcttaaattttcctttctctgagcayctgggaatttacctttggtaaagttcaaaagctggaaatggccatttggcctggctaaaatcaggtaataaaaaaattttaaaggactttattaaagagtgctatggttaaaagtcagcttaattaaaagatattcaagctttaacagcctggactccttgggaaaaatgggaggcaacagaaacccctttcctggccctgttcttccaagggctccactctaaagccaataaccgattaagaaacagaaaaactggcaaatgaaaaatcttacaactactgtagtaatctccttctgtctaattgtatatgtgttgtgtgtaatgtttatgtaaaagagctctaattaactggcttaaacaaaagtgcacaaaatctaatattttgaaagcaaaataaaaactataatgccttttagttcatgtaactttagtaatctttgggaaataaaaaaagcttttaagattattaataaaataaaga

SEQ ID NO: 106231 - DNA, 592 bp, Homo sapiens
ttcatattccatgcttacaaagcaagttcttttttgtttaatatctgcatgaccttgtctagtctcttctcctttatgtattatcttaaattttcctttctctgagcacctgggaatttacctttggtaaagttcaaaagctggaaatggccrtttggcctggctaaaatcaggtaataaaaaaattttaaaggactttattaaagagtgctatggttaaaagtcagcttaattaaaagatattcaagctttaacagcctggactccttgggaaaaatgggaggcaacagaaacccctttcctggccctgttcttccaagggctccactctaaagccaataaccgattaagaaacagaaaaactggcaaatgaaaaatcttacaactactgtagtaatctccttctgtctaattgtatatgtgttgtgtgtaatgtttatgtaaaagagctctaattaactggcttaaacaaaagtgcacaaaatctaatattttgaaagcaaaataaaaactataatgccttttagttcatgtaactttagtaatctttgggaaataaaaaaagcttttaagattattaataaaataaaga

SEQ ID NO: 106232 - DNA, 592 bp, Homo sapiens
ttcatattccatgcttacaaagcaagttcttttttgtttaatatctgcatgaccttgtctagtctcttctcctttatgtattatcttaaattttcctttctctgagcacctgggaatttacctttggtaaagttcaaaagctggaaatggccatttggcctggctaaaatcargtaataaaaaaattttaaaggactttattaaagagtgctatggttaaaagtcagcttaattaaaagatattcaagctttaacagcctggactccttgggaaaaatgggaggcaacagaaacccctttcctggccctgttcttccaagggctccactctaaagccaataaccgattaagaaacagaaaaactggcaaatgaaaaatcttacaactactgtagtaatctccttctgtctaattgtatatgtgttgtgtgtaatgtttatgtaaaagagctctaattaactggcttaaacaaaagtgcacaaaatctaatattttgaaagcaaaataaaaactataatgccttttagttcatgtaactttagtaatctttgggaaataaaaaaagcttttaagattattaataaaataaaga

SEQ ID NO: 106233 - DNA, 592 bp, Homo sapiens
ttcatattccatgcttacaaagcaagttcttttttgtttaatatctgcatgaccttgtctagtctcttctcctttatgtattatcttaaattttcctttctctgagcacctgggaatttacctttggtaaagttcaaaagctggaaatggccatttggcctggctaaaatcaggtaataaaaaaattttaarggactttattaaagagtgctatggttaaaagtcagcttaattaaaagatattcaagctttaacagcctggactccttgggaaaaatgggaggcaacagaaacccctttcctggccctgttcttccaagggctccactctaaagccaataaccgattaagaaacagaaaaactggcaaatgaaaaatcttacaactactgtagtaatctccttctgtctaattgtatatgtgttgtgtgtaatgtttatgtaaaagagctctaattaactggcttaaacaaaagtgcacaaaatctaatattttgaaagcaaaataaaaactataatgccttttagttcatgtaactttagtaatctttgggaaataaaaaaagcttttaagattattaataaaataaaga

SEQ ID NO: 106234 - DNA, 573 bp, Homo sapiens
tcactcatacaatcagaatcctggaagataggactattccagaagtggctaattcagttcaacaaagtcaacagaaattcaacaaagttgaattcaacaaagtcatcagaaattgaggttcaacaaagtcatcagaaattgagggtcttgccatttttctacttcatagttgcttgatgcttgtggcagcttcagacatcatatcctttcatactaatgtcaagagagagggaaaataaagaaatgtttccgtcctggtcttttttaagagaagaaaatgtttttgaagttcctcagcctacttcttatgtctcatcagacagaatttggtcagtgcccacaccaaamtaaatgtttgccaagggggataaataaccatggctggctctggccaatcaggagtcactgctggggatggagatgggtcctgtcttcccagaaggaaatattaggttggtgcaaaagtaattgtggttttgtaactgcccagtgagatcaccttgaccacggcctagacagagccgatttgtcaagacaagggaattgcaatggtgaaagaataattcacgcaaa

SEQ ID NO: 106235 - DNA, 539 bp, Homo sapiens
aagtgacattcttggccaggcgtggtggctcaagcctgtaatcccagcactttgggaggccaaggcaggcagatcacgaggtcaggagatggagaccatcctggctaacatggtgaaaccctgtttctattaaaaataccaaaaaaattagcggggcatggtagtgggtgcctgtagtcccagctactcaggaggctgaggcaggagaatggtgtgaacccgggaggtggagtttgcagtgagccgagatcaygccactgcactccagcctgggtgacaaagcaagactctgtctaaaaaagaaaaaaaaaaaaagtgacattctttactgaacatacatcaggaaccctgtacagagactacatagacgagggtatgagaccagtttctccatggggcttttattggctctgcaagttgagattgactccttaaagggaagcatacccttccagtcaaagccatgataaaataaccactttctccaattgtgtcctgttgcaaaataaaaatgaattcttatttgatttgtgcaaaca

SEQ ID NO: 106236 - DNA, 539 bp, Homo sapiens
aagtgacattcttggccaggcgtggtggctcaagcctgtaatcccagcactttgggaggccaaggcaggcagatcacgaggtcaggagatggagaccatcctggctaacatggtgaaaccctgtttctattaaaaataccaaaaaaattagcggggcatggtagtgggtgcctgtagtcccagctactcaggaggctgaggcaggagaatggtgtgaacccgggaggtggagtttgcagtgagccgagatcacgccactgcactccagcctgggtgacaaagcaagactctgtctaaaaaagaaaaaaaaaaaaagtgacattctttactgaacatacatcaggaaccctgtacagagactacatagacgagggtatgagaccagtttctccatggggcttttattggctctgcaagttgagattgactccttaaagggaagcatacccttccagtcaaagccatgataaaatarccactttctccaattgtgtcctgttgcaaaataaaaatgaattcttatttgatttgtgcaaaca

SEQ ID NO: 106237 - DNA, 592 bp, Homo sapiens
ggtggtgtaggcacccaagggaatctcctggtctgcaggttgtaaagaccctgggaaaagcatagtatctgagatggagtgcactgttcctcacagcacagtccctcagggcttcccttgattaggggagggagttccccaaccccttgcacttcccaggtgaggtgacactgcaccctacttttgctcaccctccgtgggctgcatccactgtctaagcagtcccattgagatgagtctggtacctcagttggaaatgttgaaatcacccaccttctgcattgatctcactgggagctgcagactggagctgttcctattcagccatcttgcccaggtatatcatcttttttttatactaccagtgatcaatctgagaatgaaattaagaaaacaaattcattcataatagcatcaaaaataacaaaatacttaggaatagatttagcaaaaggtggggstgactggtataccacaaactacaaaatatcattgagaaaaattagagaaattctaaataaatggagagatagtctatattcatggatttgaggctcagtattgttaagatgtcagctctctccagactgat

SEQ ID NO: 106238 - DNA, 575 bp, Homo sapiens
ttcaacattggggattacaactaagcatgagatttggagggggacacagatccaaaccatgtgacttggtctcttagtaatcacacagctggctttttggggaagaaagttacttatttcatrtgaacccaagcataaggaatctgcagatttttttccagcaatatcgatttatgtaaatactttatattccattcttggaggagacaagcatttcatttagtcattgttttcaatcatataaggtaactagagatcaaagttctttgaagaagatggttataagaaaatacccttgaattttaaaatgccttacacttttattagcatcacacaatgaatatttgtcattctgtggactgtaagcatagttttctctctgaaaatcctggcaagggaaatccttttttattgattctcctggtcacaaattattatgagaaatgcccttttttagacattatctctgactctaagaaactaaatgacaaaaagtgagaggacagtactgttttcaagtccacttaaaccacttgaaatttctctaggatgatgccaattcatagccccactct

SEQ ID NO: 106239 - DNA, 624 bp, Homo sapiens
aaatatttgagaattatataaagaatttatataatcatctagattcctaaaatgctaatagttaaaatttaatttattattctacatatacatacatacatgtgtgtatatctatatgtatatgtgtatgtattactatatatacctatgtttatttctacttatagattaagatagggtattagtctgttctcacattgctatgaagaaatacccaaaattgggtgatttatacaggaaagaggttcaattgactcacagttctacggggctggggaggcctcaggaaatttacaatcatagtggaaggggaagcaaacacatccttcttcccatgatagcaggaaggaaaagaaggagagcccagcaagggggataaccccttacaaaaccatcagatcttgtgagaactaactcactatcrtgagaacaggatgggggaacttgcccccatgattcatttatcttcacctggtccctcccacaatacatggggattatggaaactacaattcaagatgagatttgggtggggccactgccaaatcacatcaaattcataaatttagatatataaattacataaaattatattgattacgtattattttctaaaccatttga

SEQ ID NO: 106240 - DNA, 638 bp, Homo sapiens
ttctatttttactgacctgatgtttgagagcttggattatatgatttatttatttattgtttttgctttttctatttgatgataatggttttatcaccaattgtgtggtcagttttagagtatgtgctatgacaagatgggaagaatgtatattctgtttcaaggggtggagagttctatagatgtccattagatccatttggtcaagtgtgaagttcaaacccaaatatctttgttagttttctgccttgataatctaatactgttgctgtgaagttgaagtcttcttctattattgtgtaagtatatctgtagatatctaagaccttgttttatgaatatggatgctcctrtgttgggtgcacatatacttagaatagttggaccttcttgttgaattgaacactttatcaatatgtacccttctttgtcttttttgattgttcttggtttaaagtctgtttagtcttaaataagaagagtaacctctgcttttccctgttttctgtttgcttggtagatttttttcactatccctttactttgaactagtgggtgtcatttcatgtgaaataggtttctgaaagactgcatatagttggctctcacttctttatccaacttgatagtctgttcaa

SEQ ID NO: 106241 - DNA, 638 bp, Homo sapiens
ttctatttttactgacctgatgtttgagagcttggattatatgatttatttatttattgtttttgctttttctatttgatgataatggttttatcaccaattgtgtggtcagttttagagtatgtgctatgacaagatgggaagaatgtatattctgtttcaaggggtggagagttctatagatgtccattagatccatttggtcaagtgtgaagttcaaacccaaatatctttgttagttttctgccttgataatctaatactgttgctgtgaagttgaagtcttcttctattattgtgtaagtatatctgtagatatctaagaccttgttttatgaatatggatgctcctgtgttgggtgcacatatacttagaatagttggaccttcttgttgaattgaacactttatcaatatgtacccttctttgtcttttttgattgttcttggtttaaagtctgtttagtcttaaataagaagagtaacctctgcttttccctgttttcygtttgcttggtagatttttttcactatccctttactttgaactagtgggtgtcatttcatgtgaaataggtttctgaaagactgcatatagttggctctcacttctttatccaacttgatagtctgttcaa

SEQ ID NO: 106242 - DNA, 434 bp, Homo sapiens
atcttcctcctcgatttattatcctcgagaataataaatcttctcccttaaggagaagagctctaaaggagttctagactagcctggccaacaatggtgaaatcctgtctctactaaaaatatacaaaaatgtgctgggcgtggtgacgtgcacctgtaatcccagctactcggaaggctgagacggaagaatckcttgaacctgggaggcggcggttgcagtgagccaagatcgcaccattggactccagcctgggctacaagagcaaaactccgtctaaaacaaacaaacaaacaaaaagtctgagttataatccattattatactggagacttggtttattggttaggtgtgggaggacaggagtgtttctatagtcgtctgattacttcttagtccttcagtgggcctatgtatcacgagtgtggccctc

SEQ ID NO: 106243 - DNA, 612 bp, Homo sapiens
ttaatagtagtagtaactacctttttgggttattgtaaggaaacaattaatgaattaatacttgtaagcactctgaataatgcctgacccttagaaaacacttaagaaaaagttagmtcttagtatactagctattactagctattactgtcactactatcatcactaccaccaccactactgaaactaccagtgttactacgatcacgactactgccactaatactaccaatattactaccatcaccaccaccaccactaccataactactactatccctactagtactactactaccaccaccaccctactgaaactattaactattactaccattactactgccactaacactatccaacattactgcaatcaccaatactgccatcaccaatactgctaccatgataactactactactaccactactagtaccactactaccaccacaaactactactcattattactgccatctttatactaccatcacctctgtcactaccaacctcaccaccactattaccgctgttatcaccaccaacgctactaatagtattgcaatgaggtttcttctcctgaacccacaatttttaggtgatcacatttt

SEQ ID NO: 106244 - DNA, 405 bp, Homo sapiens
aagaccaaggcaggaagattgcttgagcccaggaattcgaggttgcagtgagctataatcgtgccacggcactgcagcctgaacgacagagcaaatatcttatctcaaaacaaaatgaaagaaaacaccaaataatccaaagcatacctcagttaattcttaaattaataccaaaatgaaaaactcayatttaaacttcctaccgttgaatcattaaaaaacactggtgaaaagagaaagatactgattagagtacagggaagaagaaagctggggagagcaaaagaactcaagggcaaatgagggcaggaagtagccagttgcaatggctcacgtgctgcttctgtccaaggcaagcagggtgatgggcagaaaactggggggagggactcagtgtcagaggtg

SEQ ID NO: 106245 - DNA, 572 bp, Homo sapiens
gaagcagcaacaagaataatataaattgagattaatccccttcatctcttaaatcaggtcattgtgagaggaatggtgcacttgactgaaataaggtcaaaaagtcagacagatatttaaatccctagttttgtaataaatattgtacttgtaactgtaccttttaatatatggcattttctaattgtcatattcttttctctttaaataacccaacactcgctttcctctaaagaagatcagcatgaaggcatatgaattgctcaagagacwtagttgagagtggggagaggacgtataatctgttatagcataaaaatatgtttgatattgaagcataaattactctgtagtttttcagccttaggagaaatgtattttacttcattataaaagtttctgttgattttctatatgctttgttgttttaacttattatcttggtcctttttctttctctatgctcaaaagaagaggacattgtccaacaaatagcctataaaaattgttttatttgaagtcagaaatttcatggattgttagaaaagaataaagtgtttatttatttattg

SEQ ID NO: 106246 - DNA, 572 bp, Homo sapiens
gaagcagcaacaagaataatataaattgagattaatccccttcatctcttaaatcaggtcattgtgagaggaatggtgcacttgactgaaataaggtcaaaaagtcagacagatatttaaatccctagttttgtaataaatattgtacttgtaactgtaccttttaatatatggcattttctaattgtcatattcttttctctttaaataacccaacactcgctttcctctaaagaagatcagcatgaaggcatatgaattgctcaagagacatagttgagagtggggagaggacgtataatctgttatagcataaaaatatgtttgatattgaagcataaattactctgtagtttttcagccttaggagaaatgtattttacttcattataaaagtttctgttgattttctatatgctttgttgttttaacttattatcttggtcctttttctttctctatgctcaaaagaagaggwcattgtccaacaaatagcctataaaaattgttttatttgaagtcagaaatttcatggattgttagaaaagaataaagtgtttatttatttattg

SEQ ID NO: 106247 - DNA, 591 bp, Homo sapiens
ctgggcttattgcattgtggggtaatatctttccctgtttcaggctcaaggtacagtcctttgttctgcttaagcttgtgcataaatagctatcaggcatttatccacttttcagtacatcagactctagtggggagggagagagctcattctactgccacaggagaagggtgtacataggctaactgtcctgtcagctgccaggagacccgctaccacaatgcacactatgggaactgattttattatgtctcttttctatgtgattataagagttattccagacagtgcttggctgtgttgtgtttttcttggttactctgataccaaaatgcagtgagcagaagtgtttggacattgattgctggtggctggcattgtaataatttttgctaccttctatgtagttggatacctctgccagcttcgacaacaagtacatgttgttatgctcaacagttactctgataccaaagccagtaaagataaaacaagaaaagaaaacygcagacaaatatcccttattaacattgaagcaaaaatcctcaataaaatactagcaaacagaattcaacagtatttttaaatggt

SEQ ID NO: 106248 - DNA, 607 bp, Homo sapiens
ccattcagaactgggaagactgcgaaagacctttggagaaacaaaacctttttgttcatctcgctatttcttaaaattttttctaaatgtgaaatttgggaaaatgtaatgtatcagcttgataagaaattttgcgacatcttaaacatgaatgagaagatggtggatatgatggtgactgttttcattcaaataaagccaacgagacagatgaaaggtaagagggtagtactgtgtcccgttccaaatgtgatttctgtcacttcttttctacatgtgcaaagtgatgacaagttatttgtggattccttgaactgtgatttgctcaagttaggacatggcatgtgtgtgtgtgtgtgtgtgtgtgwgagagagagagagagagagagagagaaaggcagttgataaactaaatttttttttagacttaaatattgtcactgactcaggcaagaattcatgattaggcatagaactctaacatcttggggaggcaagagaacatgaggaggtgcctcatgaatgtaaataatgcaaaaatacattgatttataagaaattcagaagttagagattagaggtcttgcctaaatttatgctactgttc

SEQ ID NO: 106249 - DNA, 598 bp, Homo sapiens
tattggaagaaggaatgtactgcatggtatttctagagaccattgcttctcaactaggagtgcttttggccccaggggacatttggcctggtctccatttttgatagtcccaactccagactaggggactgcttctagcatctagtaggtggaggccagagattcttctaagcatcttatcatgagtatgtcattccccacagtgaagaattacccagtcccaaatatcagtagtgtggcaattgagaaaccctgctctgtatggaaaaaataatttgaatcttaagtatgaatttaaatttttacagaatgcttaaatkataatttataggtgagagagggtttcctcatttcaaccacatgcatataagctatccctccatggtaaggcatatatgtaagatttatgcattcatatcaccttccccattctgcccaagtaattggctcttgtgatctaagcaattttaaaccatccattttttttttgtatatgagaaggtatacattattagcactttatgtaatgagtattcaattggattatgtagatagtttgctttttttttttagacttcagagtgaatagaacaagaaa

SEQ ID NO: 106250 - DNA, 598 bp, Homo sapiens
tattggaagaaggaatgtactgcatggtatttctagagaccattgcttctcaactaggagtgcttttggccccaggggacatttggcctggtctccatttttgatagtcccaactccagactaggggactgcttctagcatctagtaggtggaggccagagattcttctaagcatcttatcatgagtatgtcattccccacagtgaagaattacccagtcccaaatatcagtagtgtggcaattgagaaaccctgctctgtatggaaaaaataatttgaatcttaagtatgaatttaaatttttacagaatgcttaaattataatttataggtgagagagggtttcctcatttcaaccacatgcatataagctatccctccatggtaaggcatatatgtaagatttatgcattcatatcaccttccccattctgcccaagtaattggctcttgtgatctaagcaattttaaaccrtccattttttttttgtatatgagaaggtatacattattagcactttatgtaatgagtattcaattggattatgtagatagtttgctttttttttttagacttcagagtgaatagaacaagaaa

SEQ ID NO: 106251 - DNA, 593 bp, Homo sapiens
ttgcccttttttatggttcttgattacatgttatccaaggggtggattattaatgagttttccaggaaaggggtggttaattcccagaactgagtgttcctcccctttttagaccatgtagggtaacttcctgacattgtcatgacatttgtaaactgtcatgggagtgtcttttaacatgctaatccattataattagcgtataatgagcagtgaggacgaccagaggtcactctccttgctatcttgcttttggtgggttttgatgtatatcttgtgctgacctcctatttcatcckgtgacttagaatgcctaacctcctgggaatgcagcccagcagatctcagccttattttacccagcccctattcaagatggagtcgttctagttcaaatgcctccgacaacttaaaagtataaagctttctccaaccagtggcagaagaacaagccagaaagatttgaagcaagtttattatgaaagtaaaggaataaaagaatggctactccatgggcagaacagccccaacagctgctggttgcccatttttatgattcttgattacacattaaacaagaggtgaattattca

SEQ ID NO: 106252 - DNA, 593 bp, Homo sapiens
ttgcccttttttatggttcttgattacatgttatccaaggggtggattattaatgagttttccaggaaaggggtggttaattcccagaactgagtgttcctcccctttttagaccatgtagggtaacttcctgacattgtcatgacatttgtaaactgtcatgggagtgtcttttaacatgctaatccattataattagcgtataatgagcagtgaggacgaccagaggtcactctccttgctatcttgcttttggtgggttttgatgtatatcttgtgctgacctcctatttcatcctgtgacttagaatgcctaacctcctgggaatgcagcccagcagatctcagccttattttacccagcccctattcaagatggagtcgttctagttcaaatgcctccgacaacttraaagtataaagctttctccaaccagtggcagaagaacaagccagaaagatttgaagcaagtttattatgaaagtaaaggaataaaagaatggctactccatgggcagaacagccccaacagctgctggttgcccatttttatgattcttgattacacattaaacaagaggtgaattattca

SEQ ID NO: 106253 - DNA, 593 bp, Homo sapiens
ttgcccttttttatggttcttgattacatgttatccaaggggtggattattaatgagttttccaggaaaggggtggttaattcccagaactgagtgttcctcccctttttagaccatgtagggtaacttcctgacattgtcatgacatttgtaaactgtcatgggagtgtcttttaacatgctaatccattataattagcgtataatgagcagtgaggacgaccagaggtcactctccttgctatcttgcttttggtgggttttgatgtatatcttgtgctgacctcctatttcatcctgtgacttagaatgcctaacctcctgggaatgcagcccagcagatctcagccttattttacccagcccctattcaagatggagtcgttctagttcaaatgcctccgacaacttaaaagtataaagctttctccaaccagtggcagaagaacaagccagaaagatttgaagcaagtttattatgaaagtaaaggaataaaagaatggctactccatgggcagaacagccccaacagctgctggttgcccatktttatgattcttgattacacattaaacaagaggtgaattattca

SEQ ID NO: 106254 - DNA, 593 bp, Homo sapiens
ttgcccttttttatggttcttgattacatgttatccaaggggtggattattaatgagttttccaggaaaggggtggttaattcccagaactgagtgttcctcccctttttagaccatgtagggtaacttcctgacattgtcatgacatttgtaaactgtcatgggagtgtcttttaacatgctaatccattataattagcgtataatgagcagtgaggacgaccagaggtcactctccttgctatcttgcttttggtgggttttgatgtatatcttgtgctgacctcctatttcatcctgtgacttagaatgcctaacctcctgggaatgcagcccagcagatctcagccttattttacccagcccctattcaagatggagtcgttctagttcaaatgcctccgacaacttaaaagtataaagctttctccaaccagtggcagaagaacaagccagaaagatttgaagcaagtttattatgaaagtaaaggaataaaagaatggctactccatgggcagaacagccccaacagctgctggttgcccatttttatgrttcttgattacacattaaacaagaggtgaattattca

SEQ ID NO: 106255 - DNA, 604 bp, Homo sapiens
ctcaacattaacagtcagcagagaaatgcaaatttaaacaacagtcagatatcattacgtattcatcagcagcactaaaacttaaaaaactaacaccattaattatcggttagatgggcaacagccaacactctcaaacactgttggtcaatgtgtcaaatggtacagccgctttgggaaaagatttatcatttctaataaaactaaatataccatctaccytatgcctcagtaattccagccccacctaataggattgcaaatggaatacacaagttgaggatccctaatccgaaaatccaaaatccaaaatgctcaaaatccaaacctttttgaacattaacatgatgcccaaaggaaatgctcattgaagtatttcagatgtcagagtttcagatgagggatgctcaaccagtaagtataatttcgagtattccaaaatccaaaaacgcttctggtcccaagcatttcagataagaaatactcaatctgtaccacctaataataaaaaggatgaactattaatatactcaatatcttgaaaacgctgaaagaagtcttatacaaaagggtatatgccatatgtggcttcattaatataaag

SEQ ID NO: 106256 - DNA, 570 bp, Homo sapiens
tctccttttgggtttagagcagttctatagatctgagaatggtggaagactggtcagtcatcaggtgtccaaagttatcctctggtctaatactttgtgagataattttcttaaaagatttagccaggaatataactaagttgaagaacaaaacaatgctaatttggaaataattccatgaaaccaaaatacaaccaaatgatccccttagagaacttaataagtatcacattgaagacagaatcactagactcaccggttgtcagtgctgtgagctgggaagtgcggataaagggcacagagaagagcggcaatggaagaatttgatgtgctcaaagagtamctgcaaagtaagttcggtggggacagatgttattgattatattgcacatactttcaaggcattcttgagaatcaggaaactggggtataatagtaaggcatactgataagatgccctcataatacaagagtgtcagtggtgtgaacattccacttttcatttagtccttgggccatttcaagatcatcactatttaaagccaaagtaatatcccataaatgttaaat

SEQ ID NO: 106257 - DNA, 552 bp, Homo sapiens
taaaaaccaataacaggtatttctacccactcacccttcctcccgcggtgatagtgtgatatcctccctgaccttggttgtaaaattcagttatctcatgtgtttctttcccctgtgctggattaagctgattttttgttctttcaagtactgtaagtttttgaaagaaaacttgcagtatttgaagttataaagattttacctggaaataatgtatttggctattttaatggtatttgacaatatagttttcaatttctgttcatttctgttttgtagttgatgtcagtaacacccaaacaatgcccatgtttgttttcattaatttagcatattgctgtgaggactggttaagccagaaatacttatcatttagtgtgatcttggttaccatgtaaaacaatgrtttttgcctacttcaggagcttttgtaattaccaaaccgtctaccttcctaacttgctatattaatgctgacgcttgaaagtaagatctttggcatttatgcttacactttgcatgaggaataagttgagtacaagacgttatgtc

SEQ ID NO: 106258 - DNA, 568 bp, Homo sapiens
agggaattaggaaggatttatttttgtggctcttactcccagtggtttagaattagcttaacattttataatgctgcatggagggactgagccacgttttaaattccacctattctacctgagtgaatagagtttttcatgcatcatttctgattgccttgagaaataacacaaatcaacattagttcatatggatctgatgactcttgcataattgttctgtacattccctctcccattccttgatttaatcagactggtttagttttttttctactgatttatgcattgtcttatttttttagagacagggtcttgctcttttgcccaggctggagtgcagtggtgcaatcatggcttattatttcartctcagcctcttgggctcaagctactctcctgcctcagtcttctgagcagccaggattaaaggcacatgccaccacatccagctatttaaaaaaaaaaaattgtagagatgaggtctcactatgttgcccaggctgatatcaaactcctggcctcaagcactcaagcaatcaaatcactgagataacaggcatcatcc

SEQ ID NO: 106259 - DNA, 614 bp, Homo sapiens
caaatattcttcaggtgtgccataaaaaatcaaattaggaacatgtgaaatatagcaggcagttgctattatacttgggtctgtggttattagccgtgaagttgttcttcttctatttccttcccatcctccttttgttttgatgtggctacttgcagattgttatctgttttctcatctcccagatgccttctaaacatgtctgataatttcccttgtttagttcaatttatatgtatttgatctttttcttctttgattaaaagtcagcagcaattcagttagtagcacaaacattagcagtaccagtaagctgaggtcaaaagcacatgtgtttcatttttcagcttcctaaactcccattcctatacattattttggagaagattatactgtaattctaatgctacctttcttgttaaaataaaggcaaaaatatgtcccatgaggagcaataatgaatctttctggaactcatctattaatggaattcaaagcattcctggasaccagatcccaaggtggcaaaataaatcatatcatttagatatgtaagggcctttagaaatgctctacttgtgtatatgctgtttggaaagtctactgtggagtgg

SEQ ID NO: 106260 - DNA, 400 bp, Homo sapiens
tctatacctccctatttctaaattgggtaagggttgaggtctttttaaagcatagaactatttgtatttaaagagggccaactcatcttgattttatataactgctatcactcatagtcagtctaggtgagcctttgaagtcctgtgtatctgcttcttttatgccattgccatccgtgctgcacttgggcgcaggaacactcagatggagtcctggcatcttcaggactgcctccctcatgctctattctgccattccccttagacatctcctacattgaagtgatactgtttccactagttacagaaccacaaagwcacatcctattttgaatcttggaaaactttcctcactcatccataatcccaagacaagggggaagcctctggaaagagaatt

SEQ ID NO: 106261 - DNA, 439 bp, Homo sapiens
gagaaacatgggcattaaggtgggtatcatcctgggagcatctggagctgatggcctgtgcttctggccaaaagttgtaactgtgtcccttccctctgccatgtgatttcagcttttcgaggctggaaaggtccttgtgcctctggctccttatctgggtcctagctggtgactataattccacttcagtttcacccctttagtttgtttctaaactggtaaaatgcaaattcgccttaggagaggtgttaggaaagtgcttgaagtggctatcagttgttttacctgatgagcatctgagyagcggccttgagaaaggaggctggggaactaagttaaaatcagccaacacttatatagtgcctactgtgtactagcctacgacaaggggacagaggtaggaatgtcacaattcttgcccttatggggctccaagtca

SEQ ID NO: 106262 - DNA, 500 bp, Homo sapiens
ttcatttgatttttggcaaagtaactcccctgctgactatgaagtctccgagtctgtcaagcgcattagtcagtctaaacgtttatttgactgccccttcttaccgtgtctaaagatgaaagttatctaagatctatgtttaatgtcatacagagctaaataaaaagtggttctgcacagttgagttacgttactataaaggatgagaataagccttarccctaaggccaaaccttcactgatgctagcctctttccaatgagtgggttggaacataatgctgtgaccatttcttggcaaagacaacttgtcctaccttatgggggggcaagttaccaaaactctcaaagaaaacattaggcccagacactagatactttctttctttctcttaatggtgaaaatatggtgaattatttcccttaaatgactctcctttacaaataaggttgctgaagagattttggaaaaatctgctttaggtactaataggaattggc

SEQ ID NO: 106263 - DNA, 401 bp, Homo sapiens
gaattctttatatattctaaatgttggtctttgctaggtacgtgtaactggtgacatttgatgaacagatcttcattttagtgtagatactttatcaaccttttatattaaggttattgctttttaaaattgctagttaagaaattatttctcactcctaaggctagaacwttaatctacctgaaattaatttttgtttaattaaaaatgattttttttccctagagccatttaatgcaaatactttcctttaatcaatactcttcatgctatcttcatcaattatcaattggtctgtttctgggctcatttttttctgtttgattaaattttctctctttgggttaacattaaatttttcataatttatattgacttagggtaacttttgatatcttctt

SEQ ID NO: 106264 - DNA, 561 bp, Homo sapiens
gaacagatcttcattttagtgtagatactttatcaaccttttatattaaggttattgctttttaaaattgctagttaagaaattatttctcactcctaaggctagaacattaatctacctgaaattaatttttgtttaattaaaaatgattttttttccctagagccatttaatgcaaatactttcctttaatcaatactcttcatgctatcttcatcaattatcaattggtctgtttctgggctcatttttttctgtttgattaaattttctctctttgggttaacattaaatttttcataatttatattgacttagggtaacttttgatatcttcttcctatttctgaattctttctttccaaagtatctatcctataattggccctttgcctttccatataaattttagaacctgcttgcaattttcaaaataattccacaaacccctcaaaaagtagaagtttgattgagattatatagaatcaatatgtgtggtatagattttcattttatgataytgagtcttcgaatctaagagcaagcatattgctccattta

SEQ ID NO: 106265 - DNA, 588 bp, Homo sapiens
gttccctccttccttggtaaagtatcttcactggtatcaatacttatggagagccagctgctccctagaatacccacactttgtttcacctgttgatttttatgtagacttaagagtcaaatgtttgtttttatgccattaataccatttttacttgctattataaagtctatttacaaattaaaatgtctagtaagctcttactgctgaaaggagttgtcttgtgtaaagtaaagagaatactgtagaaaaagttaataaatttgagtagctaagagaatttgctgaaattatatgcagacaaggtaactgtgaaacaccagggaaaatgatcaaaatccagaattctgtgtggagatttctttaagtgtctttatattattgttctaatttcagaaaaaacaatctggaaaacatttatgggccattaggaatatgatttatattataaagatgacatggacatcccatgagaagacctgaaatcagaaaaaaaagcttagtcctacataaaaaaaatarcaaagaaatgattatgtataaattaagttaaacttacatattacatatatataagttccaaacact

SEQ ID NO: 106266 - DNA, 598 bp, Homo sapiens
aggaacaatacatgcaagtttctctcgtgttttttatttataagcttgtttcatataaaatgtgagctaagtatttaaagaagaggaaaatccttgtggttgggttagtcttggacagctttatgaggaaagtgtgcttcagaaagatcttgaagattgagttccwgttgagcttaatctcgtaggctgtctcataggtattaataaggtatgtatttactggaggtgggtatagtttaggatctcacaggatgacatcatgcttagttgcagttcagatcaaccctgaagtaagcttactgagatttcatcaagaaccaaatggaattagatatcatcatacatcatatcattttgatagttctatgtttattgaggatccagtcaatatctgggggggaaatgaatataaagaaagaggtgcattcattgttagttactggcctccagttgctcacaacacatgtaacaaatatttgttatgctttatgatacatgtcaagaagagagtaagccaggggtgtgatggatctgaggagtggacaagaggctgtgacaggggaggcttcagaaaggagccagcattttctgttctatg

SEQ ID NO: 106267 - DNA, 598 bp, Homo sapiens
aggaacaatacatgcaagtttctctcgtgttttttatttataagcttgtttcatataaaatgtgagctaagtatttaaagaagaggaaaatccttgtggttgggttagtcttggacagctttatgaggaaagtgtgcttcagaaagatcttgaagattgagttcctgttgagcttaatctcgtaggctgtctcataggtattaataaggtatgtatwtactggaggtgggtatagtttaggatctcacaggatgacatcatgcttagttgcagttcagatcaaccctgaagtaagcttactgagatttcatcaagaaccaaatggaattagatatcatcatacatcatatcattttgatagttctatgtttattgaggatccagtcaatatctgggggggaaatgaatataaagaaagaggtgcattcattgttagttactggcctccagttgctcacaacacatgtaacaaatatttgttatgctttatgatacatgtcaagaagagagtaagccaggggtgtgatggatctgaggagtggacaagaggctgtgacaggggaggcttcagaaaggagccagcattttctgttctatg

SEQ ID NO: 106268 - DNA, 598 bp, Homo sapiens
aggaacaatacatgcaagtttctctcgtgttttttatttataagcttgtttcatataaaatgtgagctaagtatttaaagaagaggaaaatccttgtggttgggttagtcttggacagctttatgaggaaagtgtgcttcagaaagatcttgaagattgagttcctgttgagcttaatctcgtaggctgtctcataggtattaataaggtatgtatttactggaggtgggtatagtttaggatctcacaggatgacatcatgcttagttgcagttcagatcaaccctgaagtaagcttactgagatttcatcaagaaccaaatggaattagatatcatcatacatcatatcattttgatagttctatgtttattgaggatccagtcaatatctgggggggaaatgaatataaagaaagaggtgcattcattgttagttactggcctccagttgctcacaacacatgtaacaaatatttgttatgctttatgatayatgtcaagaagagagtaagccaggggtgtgatggatctgaggagtggacaagaggctgtgacaggggaggcttcagaaaggagccagcattttctgttctatg

SEQ ID NO: 106269 - DNA, 647 bp, Homo sapiens
gcttcacaactttttcctttccaccaaatctaaagctatgatctgtgagtaaaaattgctaagataagtatcaatcagctaagagtctgtgggacaatcactctttttgactggcactttggtgtcattagagtttgtttcaaaaatggatttggggtttagatatctgagttagtcgaaaaacactttaaatcacaaataaagagagtgtcccaaactagtagtggatttaagcaaaaggtgtttctcattatatctaatagagattttcttcaattgttcatttattcttttattttttcaatcatttatgcacatacctaggctctgtacaattttttggctgatttagtaatgaacaagcaccatatattttttcatraattgtaagaatctagaatttttttacatagttgtaccacagaattgccagtctattgagtgataagactaattgtcatataggcagggatattgccattgcagtagagtattggatgaagaggcatcttacaataaggcaaattttgaagtacaatctaatttgtcataaatggaatgaattcaattaagacaacatatcaacataagtaagccacaagcccttaaacttgaggacagcacagtctaaattcaaatggtgacca

SEQ ID NO: 106270 - DNA, 594 bp, Homo sapiens
gagtaattattatatctcccttatatgagaaaggagaaaatttttcctttaagtttgaaattttaggaaatgcaaatcttgaaatgaaatcttgaaatattttcattaagtatgaaaatcatctctattggataataaagactatagagttataaaacataagggctggaaaaaaactgacatgtaatttggcccctaaattccactttataaattaagaatcagagatcctaggccattaattaattgacttggccaaaattggttatatagggacagtctgctgccaaaaatcaacctccataaggactctattcttagcatataaggtcaaagtttcttagattgcatttaacctcagaccactattatcacaatctaatgtcacaactgcgctaaacagcccaccattgcctgaacaaaatggactctctcctttctttatgtctttgcaaatgcttatctttatcttctrtctagaataccattcccattttatcaccctgacaaactcctactgaacttgcaagacccagctcaagtaccacttacccccgccttcattaccaccaaacgctgtatttggatgacccc

SEQ ID NO: 106271 - DNA, 594 bp, Homo sapiens
gagtaattattatatctcccttatatgagaaaggagaaaatttttcctttaagtttgaaattttaggaaatgcaaatcttgaaatgaaatcttgaaatattttcattaagtatgaaaatcatctctattggataataaagactatagagttataaaacataagggctggaaaaaaactgacatgtaatttggcccctaaattccactttataaattaagaatcagagatcctaggccattaattaattgacttggccaaaattggttatatagggacagtctgctgccaaaaatcaacctccataaggactctattcttagcatataaggtcaaagtttcttagattgcatttaacctcagaccactattatcacaatctaatgtcacaactgcgctaaacagcccaccattgcctgaacaaaatggactctctcctttctttatgtctttgcaaatgcttatctttatcttctatctagaataccrttcccattttatcaccctgacaaactcctactgaacttgcaagacccagctcaagtaccacttacccccgccttcattaccaccaaacgctgtatttggatgacccc

SEQ ID NO: 106272 - DNA, 594 bp, Homo sapiens
gagtaattattatatctcccttatatgagaaaggagaaaatttttcctttaagtttgaaattttaggaaatgcaaatcttgaaatgaaatcttgaaatattttcattaagtatgaaaatcatctctattggataataaagactatagagttataaaacataagggctggaaaaaaactgacatgtaatttggcccctaaattccactttataaattaagaatcagagatcctaggccattaattaattgacttggccaaaattggttatatagggacagtctgctgccaaaaatcaacctccataaggactctattcttagcatataaggtcaaagtttcttagattgcatttaacctcagaccactattatcacaatctaatgtcacaactgcgctaaacagcccaccattgcctgaacaaaatggactctctcctttctttatgtctttgcaaatgcttatctttatcttctatctagaataccattcccattttatcaccctgacaaactcctactgaacttgcaagacccagctcaagtaccacttaccccygccttcattaccaccaaacgctgtatttggatgacccc

SEQ ID NO: 106273 - DNA, 530 bp, Homo sapiens
cttattctagaattgaaagtcatttctgacctgcgactttagagtgagcaacattccaggttatctaagtaagatatcccaagtctcatctttgttaatgagactggtgctcctgcagactctttctgcacttcatgaaaatagggatgctaactcattagttttcctctcccttatttttattagttttattagttttcctctatttccaggacatctgtttaaaagttcttctgccttgaagcagagtagccagtgctgttaaatgattgtaaaatatcacataacatgaggatcctatacttaaccaagattgctttctgatagtatttctgtttgagcccctaccctctttatcctaacccagatcattttaaagagtttctcccttactataagatttactaattctctttttttgttgttccctatgtcggaattatyaaaacaaaccaaagtttccatgatcgtaaaccaaattgaacataaccaaatatgccaaatagctttcaaatatttatgttgttgtt

SEQ ID NO: 106274 - DNA, 358 bp, Homo sapiens
atcagggagtacatgtgcaggtttgttacaaaggtatattacgtgatgctgaggtttaggatatgactgtcacccaggtagtgagcacagtaccagataggtagtttttcagtccttgtcccacacccacctccactctagtaagccctatgtctatttttcccatctttatgtccatgggaacccaatgtttagctcccacttataactgagaacatgcggtacttggatttctgtttttgcattagttcccttagggtaatcactccagctgcatccaccttgctgcaaaggacatkattttcttcctttttatggctgcatagtattccatggtgtatatgtaccacattccctt

SEQ ID NO: 106275 - DNA, 604 bp, Homo sapiens
agaagaaatcatctatagtgtaaacaaaagatagagacctttgtgaaatatctccttcaaacacaacaatagagaagaatgttgtttttcccttgtaaaaagcaatgtcacttaaagacctggagttgtttcattaattctcttaggcaaattaaattatctaattcaacatgacatgaaataatgcaaaagtaaattactttatctggcttccaaaaatactaaaactacttttctcaagaaactaagcaatacttagaatacattctattaccagggtcaaccttgtttctgaattacagtgatgggatagtgaagacaggaggcagtctccctttgaaattctccaaccaacatgtattatctatcaatcagagaacagttaactgsattttcttttaagtttattgatgttgctgccagcctgcaatgtttgcatcaggacactctataccctgtttcaaacccatactaacaaaggaaaagggagacacgaaaaagggaaataatattcaaaaatatccagatcccactctgggctttttttcattaaattctcacgtttccaacttcagtttctccttaataaatatttgtggtggtg

SEQ ID NO: 106276 - DNA, 593 bp, Homo sapiens
gcttacaaactaagatgccattattgatacaccttccattataagcaaaagtggtataattaggcttgaacttggcaactctaccatagacctggtgggatrgtaactgctttactcaattattattataagcgttattcaggaaagaactgcttattaataagttggtcctacatatgcggatgacttccaaactgactacttacttcaaaagggtaagtcatagagatgaaacagtagccttgttctgtagctactactttaaatacactcagaatgtaagagaataatatctattccagtattgcaagaagcatatattatatgcttagagtctacatatcttatataaaatcatcatgttctctctagaagtaaggattaaaagagaaaacaagacccagaaaaatttctacagttttctaaaagttagatgacaatagagtgtggtgtatcctgttattcctctctggaatacatacattattacaggtcgaaacttgtcttgcacatagagaacagtgtctgtcacatgctttgtcaatgaaaatgtttcaatgaatgaatggatttagtttctaacttatctttct

SEQ ID NO: 106277 - DNA, 602 bp, Homo sapiens
tgtgttggcagtaaggagcagtgttagtagaaaagagatatattaattttcattgatctttctgaaaccctttaaagtatttttggttttagatcatattaaaggggtgattttaatgagctaatcacttgaagattattcttatctgtgtatgtgtgtgaagcaaagtattctggaaaacataaattcaggtagatattttgaatatatctagatgttaaaggtaattattatccacacaaaatatgttttgaactaatccattctaaatgtcttaagaaaagtacatttaccrtaatgttcaactaacttgggggaggaaaacatgaaagttaaaattttcacatcctgttaagacttcaatttattttaaacaaatccttagtcctttgttggtaatggctacatttatttttgtgcacagagatgtatgaaacagatttactctaaccccagcataaagaagttaggagccagagagttagctgtgaaacatctgattctcaagaagttccttcacctctctgagtcataagttttagaatttttaaagtagaactaattcaggagtgacatgctatggcactggatgacatattggc

SEQ ID NO: 106278 - DNA, 687 bp, Homo sapiens
ctttacaatgcagatgtccatgtggttttgggtaattatcaaaagtcttatttaatgtactttttataacttcatgtaatgtactttttataacttctcactttcagctgcctcatttttctcccctataaaaaacacaatccctgtgcttcgaatcacaatgtggcatctttttgtttattctagtgtcttgtctatacagcaaactgagacatgcaatacaccaacaatctcatcttctgctcagtttttagtcgtaggtgaggatgagatgattgtatayagcagccctgaggtaattaacagcgtcttagaaaaaaaactcgattttacatctcatagggcactttgccaacaaggataagatgttttgtttaataaacaaataaaaacataaagactctgcccaaccaggtaaggacacaaagaagcacaccctttcactatcagttctcaccagaggatcctgtgtatataaaagaccaggctttaagaaactcaaaatagctgccttaactgacatcatcttgcagtcattcatgataagaacttggcatctgccaccaaaggctctgccacatcgatgactctttcttacaagattgatggaaagccagctggaaacatgataacacctgtcccactaaccttcccctcctctgtggtacaaagagaggtgattctact

SEQ ID NO: 106279 - DNA, 533 bp, Homo sapiens
ataaaatgcagactccttgaatatgggaccctaacatgccttattcaactatgtggtttcattttctacttcagtgcctggcactgtgaagatagtcaaggtgtgattgagaaatgaaacaaatggtttaaaattggaacagatggctgtttgttgaggaggttaagaagtattccactgttgtcatagtagcagggagtcttatttgcagagttaacttgtatgtgaattagcagactcacaggtcatgtgagtagttgaaggaagctcattttcattttgccaatcatatgcgaaaaatcagtacaggtgacaaaaagacaggaaaaaatttcctactgttttttaaatgtgaaatttaggagaatttcaacagttgaattctcaagaaaacaatgatgamaaattacaagggaattgacaatcgtttttatctgcagaatataaatgtgacagaagaacacttagacacatactatgagaccacctaatgatgtgaaagaatggcagaaaattggcccccttaactaaat

SEQ ID NO: 106280 - DNA, 412 bp, Homo sapiens
gtaccttataatcccaccttaggtagggttagttgacgtgttttttaaaaaaaaaatccacaaagtaagagctatttaggccaggtgcggtggctcagacctgtaatcccagcagtttgggaggctgaggtgggaggattgcttgagcccataagtttgagaccagcctgggcagaagcatgasacctcatctctacaaaaaatacaaaaattagccaggcatggtggtacatgcttgtagtcccaactattcaggaggatgaggtgggaggatcacttgagcccaggaggcagaggctgcggtgagccaagatcacaccactgcactccacctaggcaacagagccagaccctgtctcaaaaaaaaaagaaaaaaagaaaaaaagaactatttagtagtattgtgaattcg

SEQ ID NO: 106281 - DNA, 583 bp, Homo sapiens
atcagatcttgaatccaggaatttcacacttttcctttattctgccaccagtttttacatgtgaggcttgattgttggcccctacccggcttaggtcttccaactttacctgtaagccccagggtcttgcctgtggccactgcccaactgaggctctgctcctgcctagagcctcttggcttcaagcctaaactctgacctgttcttgccctgcaggtgttttggcattcctggtctgactttggaaggagtccaggctttctctgatctctgggacactttacctaggccacgttctttgttttcagctactgtaatctttttcagaattccatgaaacagtttcatttttgttcctttcctttataatttgtaggaattaaaaagtcattcatgcatttgtttactcaatcaagcaaatatttattgagcgaagtcaaggccgcagcactgttactcacatgtacagaatatgctttaacggaacatatggattttttccaaattagctttttatgaacwaaaaattgagcttatgttactttaacattttttattgcacagttcgaagtaaaaagtaaaa

SEQ ID NO: 106282 - DNA, 523 bp, Homo sapiens
cttagatcattaaagattttgaacatggggtattttcttttaagtgtcccagtaacattgtctacacaacgcagaacacccatgtgaatccaaaatattcagttagccatctgtatgactccagacatggggtgtgtggcacactgccatcagagcatctgtatggctgatattttcctttcctaactgaatgtttagatagtgatatggaataacaaggacccaattagctagtactgtttctcactccttaccttagtcaagagcccatcccacacaaaggaaataataagaaaattattttgcccgcacatccattcaaaccaagtcaccgaaggcattcacttgaacagagtatatcctttaytgaagaataaggaagatgaacacacatttcttttagcataaaaaacattgaccagggtcaagtagcacattgctagctgagttgaggcccagcatggcttattaaggctgtttgctgagagagcttgtattaagtcactgggcttactttaaaatt

SEQ ID NO: 106283 - DNA, 581 bp, Homo sapiens
catggcattgtttgcgatgttcagtttttgttgttttaataaaactatctttaattatgtggtatgattaaaaagcactttaacagtcatcatattctgtatgcatttatcttcaaaacttttaatcaaaagaaatgtttctggctgtagctgacatccatctctataatatcttttgaaacttcttgatataacatgagaattaaatattgagtgtttaaaggaagttgattggctagtcagggaaacagttatttcagaaaataataaatttgactaatttttcccactctattagcaatatcatttctctttctattttactttttaaatgcacagacattataatgcataacattttgactaatatgtgaaattctaatacacagtatactcraacttgtgctttttaagaaaatcagaagaaaaatcaacataactcttcttcaggagtgtgtgtgtgtatgccttcctttcaagataattcagaggggaattctacttttttctgctttttcttctcaaaataatgtaagcaacaacaacaaaagtgaaggttaagggaataagcaaagtgatac

SEQ ID NO: 106284 - DNA, 581 bp, Homo sapiens
catggcattgtttgcgatgttcagtttttgttgttttaataaaactatctttaattatgtggtatgattaaaaagcactttaacagtcatcatattctgtatgcatttatcttcaaaacttttaatcaaaagaaatgtttctggctgtagctgacatccatctctataatatcttttgaaacttcttgatataacatgagaattaaatattgagtgtttaaaggaagttgattggctagtcagggaaacagttatttcagaaaataataaatttgactaatttttcccactctattagcaatatcatttctctttctattttactttttaaatgcacagacattataatgcataacattttgactaatatgtgaaattctaatacacagtatactcaracttgtgctttttaagaaaatcagaagaaaaatcaacataactcttcttcaggagtgtgtgtgtgtatgccttcctttcaagataattcagaggggaattctacttttttctgctttttcttctcaaaataatgtaagcaacaacaacaaaagtgaaggttaagggaataagcaaagtgatac

SEQ ID NO: 106285 - DNA, 556 bp, Homo sapiens
atgagagatctggccaatcaagaacagcacagaatgagcaaaaagatgagtggatggaaatcttacaagcaacagctaattaagtaaagaagaagaagagaaaaactgatcatcgaaaacctggcaaggagaagacccatatatcttcaaattcttaaagarctattacatagatgggcactctatgtagatcaagataacagaactgataatatcaaagagaagttagacatcaagtcttagggaaaagcttataatcttataaactgagagcttaaaagtttacaaactgagatgctcaataagagtgaatcctggttctttcttgtttattcgtgtaacctcctgagcactggggaatggtgagcttctaaagtttctcactcctatagataattcaggaattttaaagttgtatcagatgaactatgagattccttcaactaagatatccttttagtgaatctaaactcaaaacatttcttcctgcaagacatctcctcacgtggcctttacatactgctcttgtacttaatatgatccacacaagagtgtg

SEQ ID NO: 106286 - DNA, 631 bp, Homo sapiens
aggttatagccttatatattgcatttcagttcatcttggttacttataaaataaaagcattttatgttattaattattgaaagcaactcctaaaatatatattccaatctgaattttctttttctacctacaagtctaggcttctatgagtataattctccttaatagccaacatttaatacacaaataaaatcttacaaattcagagttgtctaatgataacactgaactggaatgaatctgtggatcagtgctgttcttcttcatctttgttccaagttgaaacacaaatattataggctaaatatcataactatgattaaacaaatttgcttttgtttgcataaatatatgctgtttggtagyggtgtttctctataatatatgaacttaactattttcttttgttaattattttgataatgataacataattgctggcaatgaaaattaggtgaattatttattaatggccattttaggttaatattttatatgcttgaggttgtttaatcatcaaaaaaagcatgtgaggtagacactatttatatacccctaaaacaaatgagaaaactgaggcaaaaattatatattagatctaatatataaaattaaaaaatagatttaaaca

SEQ ID NO: 106287 - DNA, 599 bp, Homo sapiens
attttatctcagacttagttttgtatttgacactactgaagagagatttaggagaagctgttggtcttctaaacataacagcatagaaatacttgatattcmttccttacactaataacaacattacatttttcagcctgagaaatgggcaggtgtcacagtgtgaatgaattgaacttaatgcactgataacttcagtctccaaaggtaaggaattcctgaaaattgttttaaagtatatatgaaatgaacatataacttaatctagctataagtaacactgttcatatgttggtttcactaaaattgccctctcaacaaactcatttttactaaatccagttcatatatgtttctgaatcctattagagcctctgcaacatttaaaaacatgatgttgcctgctttcctaaacaagtcttatcttagatttgctaatgttataaatggtcctggatttcttaccaaatttctggaagattcttgagactttcatgtttgtgttgcttctctgtctctccaggtctctaacattagcaaggtattcccaggccataagggtctgtatgtaaaaataaaatcatagcaatatagctgca

SEQ ID NO: 106288 - DNA, 599 bp, Homo sapiens
attttatctcagacttagttttgtatttgacactactgaagagagatttaggagaagctgttggtcttctaaacataacagcatagaaatacttgatattccttccttayactaataacaacattacatttttcagcctgagaaatgggcaggtgtcacagtgtgaatgaattgaacttaatgcactgataacttcagtctccaaaggtaaggaattcctgaaaattgttttaaagtatatatgaaatgaacatataacttaatctagctataagtaacactgttcatatgttggtttcactaaaattgccctctcaacaaactcatttttactaaatccagttcatatatgtttctgaatcctattagagcctctgcaacatttaaaaacatgatgttgcctgctttcctaaacaagtcttatcttagatttgctaatgttataaatggtcctggatttcttaccaaatttctggaagattcttgagactttcatgtttgtgttgcttctctgtctctccaggtctctaacattagcaaggtattcccaggccataagggtctgtatgtaaaaataaaatcatagcaatatagctgca

SEQ ID NO: 106289 - DNA, 599 bp, Homo sapiens
attttatctcagacttagttttgtatttgacactactgaagagagatttaggagaagctgttggtcttctaaacataacagcatagaaatacttgatattccttccttacactaataacaacattacatttttcagcctgagaaatgggcaggtgtcacagtgtgaatgaattgaacttaatgcactgataacttcagtctccaaaggtaaggaattcctgaaaattgttttaaagtatatatgaaatgaacatataacttaatctagctataagtaacactgttcatatgttggtttcactaaaattgccctctcaacaaactcatttttactaaatccagttcatatatgtttctgaawcctattagagcctctgcaacatttaaaaacatgatgttgcctgctttcctaaacaagtcttatcttagatttgctaatgttataaatggtcctggatttcttaccaaatttctggaagattcttgagactttcatgtttgtgttgcttctctgtctctccaggtctctaacattagcaaggtattcccaggccataagggtctgtatgtaaaaataaaatcatagcaatatagctgca

SEQ ID NO: 106290 - DNA, 560 bp, Homo sapiens
agcacaattccaactgtggtggtcacaggagtgctcacgttaccccttccccaaactccaagcagcctagcatagacagaaagagcctccatttgtttggagaatagtgaggaaagagaacaagagacgctgccttgtattcyaggaaattctcctggaccttacccaagctcaccaaagcaatacctctgttttgagtttgcaagagtcacagtgttacagggtttagagtgcctccagtggagatctgagtgcaatgaccaaagacttacatcaaaacactccattccctttgaagacttggaaagcctcctcaagaaggacaggcacagacaagcccagatgaaaagattagaatattgaactctttaatgcccagacatttatgaaaattgacaaacatcaagaacatccagggaaatgtgatctcaccaaatgaactaaataaggcaatagtgacaaattctggagtgacagatacgtgacctttcagacagagaattcacaatagctattttgagcacactcaatgaacttcaagatagcacagagaaggaatt

SEQ ID NO: 106291 - DNA, 636 bp, Homo sapiens
ttgtaatgtatgcattttccagtcactggcttgtggggctttaggtgagttatatttctctagcttaattttatcatctctcaaaggcttttttcgctgttcttttaaaaatctcacaagtccaactaagcttttctgcttattttgaaatattaatcactattgtttccaataaaatctttactaacagtaattttccagcaaattcatttgaaaatatgttaagtagttctagattttgaagctgttatatttattttccttatagaaattagccttattattttctcaaaaaaagtcctattgatttttataggcatcagaaagacacacattttcaaggtagcctctaatatcagagctattttggtacatgtgtacctattcgaatatatatatatatatatatatatatatatatacacacacacacacacacacacatatatggcatatatatatatacacacacatatatggcatatatatatatatacacacrcacacacacacacacacacatatggcatatatatatatatatatatatatatatatatatgccattgcccaaaccctgtggtgacacctttgtggatgccaaggcacacagggatacacacacacatacacaca

SEQ ID NO: 106292 - DNA, 417 bp, Homo sapiens
ccctatttcctaataatgtctcattctgaatgtcctgtggatgtgactatgggaggaacaaagggacaattttcaattcactacagatggattaccgctgacttttatttccttctctatgcaatagggtgtttcttcyatgtctgtatgttgtttttatagtcagaaattgtaacacttataatttgaaaaaatacctaatcagacatgggtattagagggtattaaattcaaaggtattgaatacatggataataaatacaaatattcagatggacattaaactggaaagtcctgttatgattggatgacacacaggatgtttaagccatcctctcagttttccttttccagggcactgcttcttgggacactgagtccagcttattattgatcatgaagagtttcaattttttc

SEQ ID NO: 106293 - DNA, 639 bp, Homo sapiens
aatttgataaaatttaaagtagctaacaatgcagttaatttagttccaccattttataattgatttcctttaggcttcttgttttctgtttctccttctgtgttttctttgagagtaactgaatatttaaaattctatttaatttatctttggaatgtttagctctgtatmtttgtattatatcatgatggttactctacaggttaacatatatatccataagtttgtataatctacttataattaatgttgtggtccttaatgggaaatatcaaaatcttttaatcatatagagttatctacctggtcttgtgtgtgtgtgtgtgtgtgtgtttgtatgtataattctacatacttaccatattcactacaacttgttgctttaaacaatttttaaaaaccttgaattttataaaatctggtaaaaccaaaaggtctccttggtagcaccagacaaccttaagtgggtgattgacaaaatcctttatggcataacacattccactaaggaccagttggttgcactattgagcaaaaattgtggagagacttttttgagacagcagtggatattactgtcacatgccttccttttaagcactgtatttctggaaagcatataaaagtaagatacagaga

SEQ ID NO: 106294 - DNA, 639 bp, Homo sapiens
aatttgataaaatttaaagtagctaacaatgcagttaatttagttccaccattttataattgatttcctttaggcttcttgttttctgtttctccttctgtgttttctttgagagtaactgaatatttaaaattctatttaatttatctttggaatgtttagctctgtatctttgtattatatcatgatggttactctacaggttaacatatatatccataagtttgtataatctacttataattaatgttgtggtccttaatgggaaatatcaaaatcttttaatcatatagagttatctacctggtcttgtgtgtgtgtgtgtgtgtgtgtttgtatgtataattctacatacttaccatattcactacaacttgttgctttaaacaatttttaaaaaccttgaattttataaaatctggtaaaaccaaaaggtctccttggtagcaccagacaaccttaagtgggtgattgacaaaatcctttatggcataacacattccactaaggaccagttggttgcactattgagcaaaaattgtggagagacttttttgagacagcagtggatattactgtcayatgccttccttttaagcactgtatttctggaaagcatataaaagtaagatacagaga

SEQ ID NO: 106295 - DNA, 568 bp, Homo sapiens
ttctagcttatacttttcaaaaattttgatttgtgaagtcatttgattatgaacacaataagaggcctcattttttttcctattaaatctcactgatgagatatgtgtatagattagatgactcagaatacccttaactttgtaatgatagccacaaattctayttgttttcacatattgaccctgactttgcattagcatcttcacagggtttaatgtcactttacctgtttactgagttagaactcagatggaaatatttacaggattattagttttatttctgattttcatggattttattatcctaattgagaaaaatacattaatagagctctttgcatattttgtcataagtatccaaatttctattgatgtgttaaaaagcaaggaaatataataaatataaagcctcttcctcataacaacattaacaagaattcataaatatcttgtccatatgtgtatatctataaatctatatagtttttgagaccaaatgactgttaatattgaagctttcaaacatacgtaattctaatttgggaaaaataattaaaatcagagg

SEQ ID NO: 106296 - DNA, 635 bp, Homo sapiens
tttcaattatcagtttttttttaataatagtaatgttgtcatttgtccttaaggtcatgaagtttaacattttataatatgcacattactagactgctacaatataaataagtaggtatcacaccctgacactagcacaagaaatacttgtgttaaaatattgacttcctggattatctacctattagacacctttttgaagtggagaaaatattgaatgctaaatgtgtataatcacccagagaaatgattaaagatacattgtatttttgcttttgctccccaagaagtaccttaaaaattgttgaacaaatcaatagcctgmagccttcccataaatacaatagcgacgtcgcgtaatgactcagcatttactctgggccaactttcccagacagatcctcaggaaatttaataagcatgcagtttagcagagtaagtacaatgagagtgcttaggagaggttcaattcactggaggtgcgtgattatcatacaatatatgtgcagtctgtgcacaacaaagaagaggctctgggcacagttcgcactttgctcgatgttctgtagctgttatagtagcaggatatgtgctcaagtgagaaaagcatggcaactgtatttgtcacatacaca

SEQ ID NO: 106297 - DNA, 604 bp, Homo sapiens
ttggatttaatgtcttaaaaataaaataaaataaaactttgcttgagccaatttccccatatttacagtgaacaaaaaagcaggatttgtcctaagtagagtttcccatattcacacatatccatatatgtgtgagtctttttctgagctctatgccaaaatactgacctatttgtctttcctttctttgatatcacactgttgaaattattgctgctttgcaattagtcttgatggaataattttcttatctaacatcattttcgataccttgcttgttttttaccctataaacttttagatgctcattttaaagtcaccctggcaatttccagaaaacaaaacaaagtaaaacgaaaaacctgctccaatgtcggctgtattagactgactcctcttagtcagtgtgggctgctttaacaaattaccacamcctggcaggcttaaacaacagaaatttaatatttctcaaggttctggagcttacaagtccaagtaaggactttcgtctgaattacagatcctgccttgtagtgggatctttacatggcgtcaagagggcaagagaggtctctggattgtcttttataagagtaataatccc

SEQ ID NO: 106298 - DNA, 566 bp, Homo sapiens
agtttacaatgagccatttcccagcacaaaagtgtgggaagattttgggaaaaatagattggtgggttttataacttttattgttctctgaaagaacagaactcaagtaaacttcagcattgtcacagcttataaatatttgcagtgagatagtttctgagagttgtacataatgttgttaattatttattactctatcttattttattttttacaaaattaatgaattatttaaatatattagcaatttttttccaaaacattttttcatagaaattccttctttggtcctaatctgttgggttcctttgatttcttgcctcagcatgcttttaaattatagtaatatatcattactcccaacagatgtgagctcatttttagggttagaaatgtgacttcaaaatgtgctaatatcatgaaaaatagacttgatgcttttgtttaatttcattagtaagcaagattcttttccttattatacatygaaatgaggttaactgatcagtttaaaatgtcttataaaataaatgaccataagtctgatttatagaagcaacacagaa

SEQ ID NO: 106299 - DNA, 567 bp, Homo sapiens
aagtttttcactttttgttggaagatggaagagtactagtcatttgaaagcaactgatttctttcctgaattccagtcttgaaatatgcattcatcaataatcaaataaatattcatgatccgtattggtgactcatttgatattttcagtggtttgttgtttgcttaaatatacaaatgttgtattgattttgatgtatcctcaaaatataaatgagaaaaaaatttgtatgtcaaaaggatttgagttttataacaaatttactcaaaagattaatattagtgcaacttcctgttcaaggtttagaactaagaagtgattttttttaattactaaattcagtcatggtggcttacaaagaaaattaattagtctgtacattttattaagtgggagtggcttgaattagatggtgatatctggataaagaaactaaaattcttaagcatcctgatttcaaataaaagtacagataaratcatcttttagagatatgttgtcaaattgaactaacataatgaataacaaattgtaagaaagacaatatgagcaataattacacgcag

SEQ ID NO: 106300 - DNA, 646 bp, Homo sapiens
gcatcactcatggaaatcaaagtaaaaatcaagtgggcgtctatattgaactgaaaccaagtatttcagtattttcaggttctttttctacttttcttgcttctatttgtctgcaattcttatcattcatgcctctcattagattacttttctccatagtgagcataacagactatagccacccacgtttggtaaatgaacaaaatttgtaagagaatagagataacattgttcccaccccaccccccaataggtcagcttcgcaaattcatggagtataccttttaytggttataggaaagtgttgaacaactgttgagtcaattttctggaacagagtattcttaaacaggataaatttttattctactaatattaaatgaataagtttttgttgctaaccatattaatgtcccagctattaccctgaaataatttatgaagcagtcacaaaggcagtgtttaaatatgctgtaagatataaggataattctgctattaaacattgatcaatcacatctgttatatatatacccatcacatcttaaatttttgaattatgagaggttgtactataaatctgaaattaaaacaacacaactttattagctcagatgcattttcattacaaaaatgtaactcattg

SEQ ID NO: 106301 - DNA, 646 bp, Homo sapiens
gcatcactcatggaaatcaaagtaaaaatcaagtgggcgtctatattgaactgaaaccaagtatttcagtattttcaggttctttttctacttttcttgcttctatttgtctgcaattcttatcattcatgcctctcattagattacttttctccatagtgagcataacagactatagccacccacgtttggtaaatgaacaaaatttgtaagagaatagagataacattgttcccaccccaccccccaataggtcagcttcgcaaattcatggagtataccttttattggttataggaaagtgttgaacaactgttgagtcaattttctggaacwgagtattcttaaacaggataaatttttattctactaatattaaatgaataagtttttgttgctaaccatattaatgtcccagctattaccctgaaataatttatgaagcagtcacaaaggcagtgtttaaatatgctgtaagatataaggataattctgctattaaacattgatcaatcacatctgttatatatatacccatcacatcttaaatttttgaattatgagaggttgtactataaatctgaaattaaaacaacacaactttattagctcagatgcattttcattacaaaaatgtaactcattg

SEQ ID NO: 106302 - DNA, 450 bp, Homo sapiens
gaatcatacccaaatgtccaatgcctaaaataataggactttaaaattagaatttgcaaacacaatggcacttcagtgaaatgaaatttcagtgaaatgaagcttcagtgaaaatgaaattacatctacgtggtatattctgtgaaatagaaaatgctctagtaagttttagaaaaagtttcagctatgaaaaaaggtaacagagccttccataatgaaggttttctgcttaagccttagacagccaaacaactaaattgacattatattgtcctgrctttcaaattatataggattttactgtacttttcaagttcagcaatatcagttctgagactctgtgtggagtcaataaaatgaagaacattaagttgactgtggctgtgcctactaaatatgcaccttacagggacattgtttccccttcagacagaattttattgaaatatt

SEQ ID NO: 106303 - DNA, 472 bp, Homo sapiens
aaacagggggaaagggctattctggtaccacatagtgccctgtgaccagtttttgggcacccatcgagagcaatggccgaatggaatacaggcctctgctattgctttgagcagtgggaaaagctcccaaggagtggcagcattctttgragggtgtggagatggtggggtccggagggctcactggatgcacccattgctcaggtgagttgggacagcatgagccaaggccctgtgggagtagcatgggcagggcctgcttgaacacacctgagacatgtgtggggagctctgaagtacctggaggagactcctcaagtggccaaggtcctcctgttatacgtggtcctcctgatatacatggtcttcctgatataagtgaaggcagcaagcctacagtctttgagtaataacaccaatgtaaatgtgtttgtgctcacaggctgggggcattcaggttgtgtgaaactct

SEQ ID NO: 106304 - DNA, 594 bp, Homo sapiens
tctttggcagctactataaagaacaaaagagttgtgtatggccagatcggctaggtcaggccacaaggccagacttatgtctgcaccttttgaggtacagtaatgtaccttttgaaactgtttctgtgttgcattttttctccttgattgggtctacctataatgaatgagatccaattttgcctgcagttgtgagagaacgcgatttctcctagtcaactctttcttatgggaagaataaattatttaaggaattcgagattactcacccctccagccttttccctctgaccctttcatctgtgtcacctcaaaaatacttgtaaataaacagctgggatgggatgtttttgttgaaaagttataactgacaagaaatttccaaatcctgctaactcagcactgtactttattgaagctgcttctattctttctgttggttgattccgcaccttgacttgaatttactttgaactccactatgggctcaagtttattgaaagtttgtgatattcaaagcatgagaaaactttagctrtgatggtggcacttgcttccctccccaagttgtttttttttttgttttttgttttt

SEQ ID NO: 106305 - DNA, 583 bp, Homo sapiens
tttctaatttacattgagtcaactcattccagtaaatctccaggatgataaaagagtgctcaagaaggtaaagaatctgttaatgaatttttttgctggtcgtatattcttgagcacttccagtctgggagagttggaaataagttcagaacttggctcaattatttgtctttatctcaatatgaatttcatttgaaactgaatcatggcactataccctatgctacttgtttccttggtagtctacccattcttcattttgtgcgtagctgaaatacaatctggatgccctcatgagttggattcatttttcctggtttaaagtttacatgactggaaaatgtcagtgatttaggtccacactgatagagtacaaaataatttttttccaccccatcractccatttgctttggatttaagctgagggacacagttattgatgaggccatagcaaaaagagtgttaagatttttgtagttcttggctaaacactccagctccctgctaccaactatcaccaaccaatctgtcccaattaaactccattgaattaagcttcttaatccaataggcaaattcac

SEQ ID NO: 106306 - DNA, 612 bp, Homo sapiens
gggtttccagcggctttaggaaattcctcaaaaacaggggagggggaaattatgtacaacttccattgtatctagccacaagaaggtggtctgttacccaccctttctttccctttaggcttttaactgttagcagtggcaattaatataaattagccaatgacattgtatgcttcattcttctggaaacagctagtttgttagtggttaggcctacttacctcccagagaaatctgtgggcgttctttatatgaagaaactctccaaaatcctcatgtttccacataagtgaggatcaaagtaagaattccattgtctcctgttaaattctgttcctcagactatagcctgagtagagtcatctttcattcaaattctccccacacatttctgaggtttaggcgctgtcatctacaagatttagagatttgcatgcattttatcrtgttttcaaaaattaagaggcaaattccctcagagcaattaccaagacttgtgtaagagtccctcaccttaggaaaagaaatcaccagcacacttgttcaaacaaaacccacgccagttttctttattttataatcttataaaaatgttttacttacaccatggga

SEQ ID NO: 106307 - DNA, 627 bp, Homo sapiens
actatccaattgataaataaaaatttattgaggaattcctaactgttcacagttagtattcagtaaagcacttttaaatttaaaaataaaggaatactaggcaagactgatttatcttttgatgattcaaaaagtacctcaggattctgcagcatttcaggctcattttgctgaaactccattatccctgttgttggcattcagtgctaggttatgttagattatcctgaaagttatttcatacacatatttatgtagcacaacgtagcattcagaattgcagcaggcccctaactaatgaaaatgtatgcttgcaagacagatgcatatggcagtaattattcaatttacaaagcattcacctttagaattcctttgcatggcatttagatttccaactacacctatagctttrtgaacatacttctggttcacggagttccttttgtctccctccagcataaccacacactcacacatgcatatccctatacagatactctaatttgtctgacgaacttccctcccaagtagtagtccctaagaataagatgaaaaagaatctcgttgctctcctatggccattctgccttcctcctagagtcaatatgctgcagtgaggtcttc

SEQ ID NO: 106308 - DNA, 627 bp, Homo sapiens
actatccaattgataaataaaaatttattgaggaattcctaactgttcacagttagtattcagtaaagcacttttaaatttaaaaataaaggaatactaggcaagactgatttatcttttgatgattcaaaaagtacctcaggattctgcagcatttcaggctcattttgctgaaactccattatccctgttgttggcattcagtgctaggttatgttagattatcctgaaagttatttcatacacatatttatgtagcacaacgtagcattcagaattgcagcaggcccctaactaatgaaaatgtatgcttgcaagacagatgcatatggcagtaattattcaatttacaaagcattcacctttagaattcctttgcatggcatttagatttccaactacacctatagctttgtgaacatacttctggttcacggagttccttttgtctccctccagcataaccacacactcacacatgcatatccctatacagatactctaatttgtctgacgaacttccctcccaagtagtagtccctaagaataagatgaaaaagaatctcgttgctctccyatggccattctgccttcctcctagagtcaatatgctgcagtgaggtcttc

SEQ ID NO: 106309 - DNA, 449 bp, Homo sapiens
aattcttttatgcagctattactacacagacatccaaagagcagggaaagaatctaaaaccacacagaagttaaaacccatgtggttttaataagaagaaaagaaagagatggtttaattaagtaataagactagactccctggtggttaataaggtaatttgccacatgattaaaggtatgtatatgcaagttgaatttctgcggtaacattattgctcaaatggaggctctttggaaactgggattgttagtcmcttaaatactataatcttttgaagcaatagaaggggaacaacaaagagtcacttttgagattctttcatcattatctcaatgtttcttaaaaaacagaggacgttatgcaagactacaatctagcagcgacactgtcagatttcagagtggatgtctcccctctgtgttctcagctctgggactgcagaggca

SEQ ID NO: 106310 - DNA, 292 bp, Homo sapiens
gcttcgtgccacactcacacacccttgtcaaagacacccactgatggctgcaatccctctatgcccagctgaccttggggacmcattgcttttggttcccagtgcccacatgcaactctgagctgtttccttccaaccaccagcaccctctagagtgctgggaacatatggctcaagttttaccactcttggatctgcccaccacccccctttccttgtcctgacttatggggaattccactcctttctgccttgaacacttctttttcaacacttagaagaaaaaaaaaaa

SEQ ID NO: 106311 - DNA, 610 bp, Homo sapiens
ttgcctctctgggcaccttcctcagctgctctctctgaacccattactcattgttcacccattcagtccacagaatggttagttcttagatgtgtttgcactcatctctgctttgcggtttaatctaggagaactggtctctttaagggggctggcctcatcccaggataccaacagaaggttctgtcttgtcatttggcacctgcaagcttccagtgatgcaagaagctagatgcgctgcatgttctgcatccaagtcsctcagccacgttgattctgggatgcagtcagtccctggcaaacctttggcttggcctgcagcttgattccatgttggtgccatgtaatgtttgccagtctcctgaataaagaaagattcaggacagcttctggtactgccaatcaaggcttaaactttccatcctatgtgagtgagccttggttggtcttacagctccctttaaattaaaatagccaagtgattaaatattcatgctttgcttatttcagtatatttaatttattatgtatcacttttcttgggttttatataaacttgcctgaggactttctttttttcagcttaaattctggcagaatgttccctttt

SEQ ID NO: 106312 - DNA, 545 bp, Homo sapiens
aataacaatatcacatagagttcttgaggtgatggattagaaggcctctaaaaatctgcctgacattcaagaaacatttgataaataagctccatgaaagtggagaccccatcccatatcttcattataatatccccagcatttagaacaaagactggcacaggtaatcattgcacagtacatatgtggcacataagagattaaatagtcatatttaatattcaacaaatattagtgatgtgactctcttccccttttttcactttctgagtgctctataccttcagagagtttgaggaaatcatggggctcagttttactgagagcccagtatgtcaccaatggcccctatactggttcctctacagtcatttctgccttatttctcccggmccatcctgcccatttgatttaggtggctgggtacctcagcaaggttaacattgttcatataaataaggaactcatacaaatctatggggaaaaaaaatgagaccccaaaaatgggggaaaaaagaataattaattagtaattaaacttaaat

SEQ ID NO: 106313 - DNA, 565 bp, Homo sapiens
atcactctgcatgggtaatcatattaacaactactatgattgggggggttacatatgacagacrtgttacatatacttgtttagatttcacaatagccctgccaagaaagtattattaacttgaggcccagagaggtaaggtaactcccctaaggccacacagctagtgaggcaaaatgtgatttgcccaatgaagtgtatgttgttctcaccatgctccaaggttatctacctcattataatccattgtccattcaagaccccaggctctacttttttgtccacaatcacagagctgcattaaggtggggcatttacaaaatactttcatagacattaaagagaaactcttcgaacaggttttgcctgatttccatgaagggatttggattatttagagttccaaattttccaaaggactaaagagtacattactaatagaataaatttaagggaaaaaaatatttactttataaccatactttacaatactaaataatccagttgcaaaagaacggaatcggtaaaggatggttctattcattagccatagggaagtatagaa

SEQ ID NO: 106314 - DNA, 613 bp, Homo sapiens
gggtcatttcagaaatgatacatttgtggcaaagaatcatttctataaaatcagcaattctttagatcccatttcagaattttttattctgttaaatttaagtagaattaaatatcatatttaacatggatamaatgtataataaatgtattatatttaaaatgatgcccatttttatatctattgccatgtgtacatatagaaagagataattttgtaagggtcacctaacggtaatgatgattatgtctgaaatttgggatgtttctatttcctttgtgcttttattcttttaagggattgcctattaggaatacttgccactgttaccaaaaaaactatttttttaaattaaacactattttttagagcagttttaggttcacagtaaaaatgagaggcaggtaccgaggtttcccatatacccactgacctcacacatgcacagcctttcccattatcaacagccccatcagactggtacatttgttacaattgatgaacctactttgacacatcataatcacccaaagcctgaagtttacactgatgttccctcttggtgttgtatattgtatggtgtttaacaaatgtatagtgctgtgtatccacc

SEQ ID NO: 106315 - DNA, 553 bp, Homo sapiens
ggaatgatgaatgactattactatgaagttgtgctctttcaaaagcatggtctcaacaagtttctcaatcttgcatgcaggagaagcttctaaagaacaaagaagcaatacagtatgccagaagacatttatttaaatgtcacttatgcattgggtaatgagaaatgaaggwgctccatttgagataataaaccaatttttgcaagagaagatgaagtaattaattattcaagggcaataacttctccttggacttcattttctcagaccacatttacccttagctgttggaataaaaaacagactgtacactacagtcacttgtacctacttaaagaagacaccaattgtaattcaattcaggaactcttattttgcgtgtctgttattctcaaaggatgtggccaggcatggggatgacatctgggtgaggtgggatccctgcccacccactgtgataatggtagtgtttgaacaggctgtggttccagcaaggtcagagtgacaaacagaggaggcattcttcagatccccagcaaaaggaagcttcctc

SEQ ID NO: 106316 - DNA, 553 bp, Homo sapiens
ggaatgatgaatgactattactatgaagttgtgctctttcaaaagcatggtctcaacaagtttctcaatcttgcatgcaggagaagcttctaaagaacaaagaagcaatacagtatgccagaagacatttatttaaatgtcacttatgcattgggtaatgagaaatgaaggagctccatttgagataataaaccaatttttgcaagagaagatgaagtaattaattattcaagggcaataacttctccttggacttcattttctcagaccacatttacccttagctgttggaataaaaaacagackgtacactacagtcacttgtacctacttaaagaagacaccaattgtaattcaattcaggaactcttattttgcgtgtctgttattctcaaaggatgtggccaggcatggggatgacatctgggtgaggtgggatccctgcccacccactgtgataatggtagtgtttgaacaggctgtggttccagcaaggtcagagtgacaaacagaggaggcattcttcagatccccagcaaaaggaagcttcctc

SEQ ID NO: 106317 - DNA, 498 bp, Homo sapiens
acactgtatacagaagtttcaggaaaataacagttagatctagaatattaccctagactacctatctttaattcacaaaaataaaatgacactaaccgaagttttacacaaagagaaagccaaatactagctaacacaaatccttcttgagtgrgggatgggaacaaaaaagaacttcggaaaaccaagaggccaacaggaaatctgtaagaacactaggcaatagaactcaagctaaaatgtacaggaactatggttgcaaaatgacatgtaaatgttataaaattacaacaacaagaaagcattattgctatagtttggatgttgtcccctcaaaacctcatgttgaaatttgatcctcaattttggaggtggggcctaatgagaggggtttgggccatggggacagattactcatgaatagattaatgccctccctgtgggccagcaagttcttactccactcattccagtgagagctagtggtccaaaagagcc

SEQ ID NO: 106318 - DNA, 498 bp, Homo sapiens
acactgtatacagaagtttcaggaaaataacagttagatctagaatattaccctagactacctatctttaattcacaaaaataaaatgacactaaccgaagttttacacaaagagaaagccaaatactagctaacacaaatccttcttgagtgggggatgggaacaaaaaagaacttcggaaaaccaagaggccaayaggaaatctgtaagaacactaggcaatagaactcaagctaaaatgtacaggaactatggttgcaaaatgacatgtaaatgttataaaattacaacaacaagaaagcattattgctatagtttggatgttgtcccctcaaaacctcatgttgaaatttgatcctcaattttggaggtggggcctaatgagaggggtttgggccatggggacagattactcatgaatagattaatgccctccctgtgggccagcaagttcttactccactcattccagtgagagctagtggtccaaaagagcc

SEQ ID NO: 106319 - DNA, 355 bp, Homo sapiens
tcattaaaaccacctacctttgcctcacctttcccaccttagctggtgcttttattaacaggaaattaaaatatctttcctctatctaactcatatagggatatttctgcctccaaaatcttatgcaatgggacttccttcagcaagctcttctgatgagactttgattatgatcttatctaaatacacagccagttgsatgctgcatgaaattgaacataattgaacaaaataactggtgaatgtagaccaaaatggcaggggtgattggctatgcagacagcatcttacccaaatggtacatggtctcattttctactctcagtagagaggcttttttgtcctcctttgaaag

SEQ ID NO: 106320 - DNA, 438 bp, Homo sapiens
tttaatgagcagaggagaggccaggagaaggaattcatccaagtcacatttaaaggcaagaacaactccacattacagttacatgaagtggggcagccaaggcctaaacagtgccttgtggctcatggaactcatgggtccagtgatcctcagctagagyctcatttcttcctggaggatgagagaagtttgattcctaccagaattcaaatggaatctattcaatttgaccaaaaaatggcacagataattctgaaacaacacctacaacatttcccctgctgtcccctgttgctgcttaatggagactataaacccagatagaatgctgggatgctgtgtggccattaatttctccacttgagtcaataaattttggtgttaaattatatcgcaaaatagtaaaaatgtacttctactaagagactgataagttcc

SEQ ID NO: 106321 - DNA, 532 bp, Homo sapiens
tattctaccctgataaataaaataaataaaatattytagcctaatgacatccaaacattacttccttctgagcccctaaagggcagattctaattccatctatagtaatatcagtcaaaatattcacaaatgcattcttctaaatgcctaatatttttacctaaataaggtatcaccaaaaacgtgatgggtcaatttattgagttttagataatagaatatctccccctaaaaattggacagggcaatggtgtacttgtggatacactgcttaagttcaaaaaataaaatcaatggcagttcattgtcatttgttgctaaaagaatgtgaaaataacatgaaggaaaatttttaaaggaaaaaagcatttatagttcaattgctctaatgtatctatttttgttaatatgtctgtttcatgtgatttaatgttgaacttgctcccatttatagcaagttttcataattatcattcttagaaagcataatattttattgaactaacatgccatgaattgtgaatttttatgt

SEQ ID NO: 106322 - DNA, 565 bp, Homo sapiens
ttttcactcataggtgagaacaatgagaacaaatggacacaggaaggggaacatcacactcgggggactgttgtgggttgggggagcggggagggatagcattgggagatatacctaatgctagatgacgagttagtgggtgcagcgcaccagcatggcacatgtatasatatgtaactaacctgcacattgtgcacatgtaccctaaaacttaaagtacagtaataataaataaataaataaataaatacgccaaaaaaataaaataaaataaatgcttggaacaagagatgagaaaactattttaatgtctccaaaggcaaacttatgtcattgttattgcaagaacagaacagaagcagaaaaaatattcaaaagggcttcagtcaagtcaaacaaaatatgaattagagtatggggacttttctctctttgggagattaaattaccaaaacccagttctggctttgattttttgacttccttcccaaaagtttcccattggcctgtgtcctctggaaaacaagatccgaccattcagataaacatccatctttcctcttct

SEQ ID NO: 106323 - DNA, 574 bp, Homo sapiens
tctccctttttgaaacagtaactgtggccacggtagtgaagagtttagagaaggacaagggtaaatgtgaaactaattatgaggcaagtatatttgtttttgtatttttgtgtattttygcaagacaggatgaattttattctgtttttaaaataagtaaatttatctttgttctttggaagacctctagtaaagaataaatgtcatgacatgttaatccttaaaattgttatagttgctcaaaaaagaaactcaaaaactaaaattggatcctatcaacccagataaaacactgaaaattatgaaactttcactcaaaatacagtgatgactgcagaaaagcagcaactatttaatcatgcccaccaacaatgtgcagtgtcctccatgggccaaacacactccaggtggcggccatggatggaggggaagaggactggggttttctatggggtgatggcagtgttttggagctcaaaagaggtggtggttgcacaatgtgaatgtgctgaatgaggcaagtatatttgaaaaagatggaggcagtcagtagaggtggtggtagaaattgaag

SEQ ID NO: 106324 - DNA, 574 bp, Homo sapiens
tctccctttttgaaacagtaactgtggccacggtagtgaagagtttagagaaggacaagggtaaatgtgaaactaattatgaggcaagtatatttgtttttgtatttttgtgtatttttgcaagacaggatgaattttattctgtttttaaaataagtaaatttatctttgttctttggaagacctctagtaaagaataaatgtcatgacatgttaatccttaaaattgttatagttgctcaaaaaagaaactcaaaaactaaaattggatcctatcaacccagataaaacactgaaaattatgaaactttcactcaaaatacagtgatractgcagaaaagcagcaactatttaatcatgcccaccaacaatgtgcagtgtcctccatgggccaaacacactccaggtggcggccatggatggaggggaagaggactggggttttctatggggtgatggcagtgttttggagctcaaaagaggtggtggttgcacaatgtgaatgtgctgaatgaggcaagtatatttgaaaaagatggaggcagtcagtagaggtggtggtagaaattgaag

SEQ ID NO: 106325 - DNA, 568 bp, Homo sapiens
ttattggtgatttctgcaatggccattgcagggttatgatggggaaggaaccatatttaaatatattgaatgtgaggcaggcatgaagaagagatgaggctttcttgctgtgtgttaagcatgccagccatccccctgccttgtggcgcctatacataccatctcctctgcctgtaatgctcttttgctagatatttatatttcttgccccaacacttccttcaagtcttttctcaaatatcaccttctcagtgaggccttccctgactagctattgaaaattacacccagtggggatggggagatattggttaaagrgttcaaagtctcagctaaacaagatcaataagatctggagatgtactgtatagcatggtgactgtaattaataataacatattgttcagttgtctctttatatctaggggagactagttccagctcaccctggagacaacaaaatcagcagatgctcaaccgcctcatataaaatggtgcagtatttgcatataacttacacacatccttccatgtagtttaaataatgtctacatttcttatagtagct

SEQ ID NO: 106326 - DNA, 590 bp, Homo sapiens
aaattaaataaatcaaatacagaataggaaaacaatagaaataatcgatgaaatataaaataatgttggcaaatcttagctagactaaccaagaaaaaatagagaagactcaaataaataaaatcagaaatgaaagaagaaacaatacaactcatgccataaaaatacaaatgatcataagggattactataaacaattatttgacaataaattggaaggccaagaagaaatgataaatttctggaaatrtacaccctactatgactgaatcatgaagaaaccaaaaatttaaacagaccaatagtgaataagaagattgcatcaccaataaaaaactgattaaaaacctctcagcaaagaagctcaggaagagatggctttgttaataaatgccaccaaacattttttaaaaataccagttctttatatactcttccaaattattgaagaaaaaccacatttccaaactcattaaatgaggctagtatttctgtgatatcaaagccaaagactttataagataagaaaattacaggtcaatattcttgatgaataaagatgcaaaaattctcaacaaacttaaatactc

SEQ ID NO: 106327 - DNA, 590 bp, Homo sapiens
aaattaaataaatcaaatacagaataggaaaacaatagaaataatcgatgaaatataaaataatgttggcaaatcttagctagactaaccaagaaaaaatagagaagactcaaataaataaaatcagaaatgaaagaagaaacaatacaactcatgccataaaaatacaaatgatcataagggattactataaacaattatttgacaataaattggaaggccaagaagaaatgataaatttctggaaatatacaccctmctatgactgaatcatgaagaaaccaaaaatttaaacagaccaatagtgaataagaagattgcatcaccaataaaaaactgattaaaaacctctcagcaaagaagctcaggaagagatggctttgttaataaatgccaccaaacattttttaaaaataccagttctttatatactcttccaaattattgaagaaaaaccacatttccaaactcattaaatgaggctagtatttctgtgatatcaaagccaaagactttataagataagaaaattacaggtcaatattcttgatgaataaagatgcaaaaattctcaacaaacttaaatactc

SEQ ID NO: 106328 - DNA, 590 bp, Homo sapiens
aaattaaataaatcaaatacagaataggaaaacaatagaaataatcgatgaaatataaaataatgttggcaaatcttagctagactaaccaagaaaaaatagagaagactcaaataaataaaatcagaaatgaaagaagaaacaatacaactcatgccataaaaatacaaatgatcataagggattactataaacaattatttgacaataaattggaaggccaagaagaaatgataaatttctggaaatatacaccctactatgactgaatcatgaagaaaccraaaatttaaacagaccaatagtgaataagaagattgcatcaccaataaaaaactgattaaaaacctctcagcaaagaagctcaggaagagatggctttgttaataaatgccaccaaacattttttaaaaataccagttctttatatactcttccaaattattgaagaaaaaccacatttccaaactcattaaatgaggctagtatttctgtgatatcaaagccaaagactttataagataagaaaattacaggtcaatattcttgatgaataaagatgcaaaaattctcaacaaacttaaatactc

SEQ ID NO: 106329 - DNA, 590 bp, Homo sapiens
aaattaaataaatcaaatacagaataggaaaacaatagaaataatcgatgaaatataaaataatgttggcaaatcttagctagactaaccaagaaaaaatagagaagactcaaataaataaaatcagaaatgaaagaagaaacaatacaactcatgccataaaaatacaaatgatcataagggattactataaacaattatttgacaataaattggaaggccaagaagaaatgataaatttctggaaatatacaccctactatgactgaatcatgaagaaaccaaaaatttaaacagaccaatagtgaataagaagattgmatcaccaataaaaaactgattaaaaacctctcagcaaagaagctcaggaagagatggctttgttaataaatgccaccaaacattttttaaaaataccagttctttatatactcttccaaattattgaagaaaaaccacatttccaaactcattaaatgaggctagtatttctgtgatatcaaagccaaagactttataagataagaaaattacaggtcaatattcttgatgaataaagatgcaaaaattctcaacaaacttaaatactc

SEQ ID NO: 106330 - DNA, 569 bp, Homo sapiens
ggttccctattctagcccatggctcttttatggcatttctggagcttctctgggccagaggggagcccatgtccatgaaaggtgattcccaggcatagcagcattcaccacaagctgactgaagagcctctgggccttaagtacacacaggtgggagtgtggcagttactcaccatagrcctgtgatggtggtggccacagggtcattctcctctgcctgtggaaggaagagggaagagtgggaagggctgtgtcttgtggcttgagggccagctcagttgcagtataatagaacaccaggtagacgtctaaggtttttgactccagtccctgggtaccagaaaacacctctagacctacttggggcctggaggactcgctgcatggaagggaaggactcaaacctggcctcaggtgatgtatctaatgtaaactacataatctataagaaatatgtaaataatattttcctatgatatataacctcagttcctaacacagatgtccagaggcaaatctttcaaattcacaagcaaaaattagatagaagcaagttacatgtgaacaaa

SEQ ID NO: 106331 - DNA, 569 bp, Homo sapiens
ggttccctattctagcccatggctcttttatggcatttctggagcttctctgggccagaggggagcccatgtccatgaaaggtgattcccaggcatagcagcattcaccacaagctgactgaagagcctctgggccttaagtacacacaggtgggagtgtggcagttactcaccataggcctgtgatggtggtggccacagggtcattctcctctgcctgtggaargaagagggaagagtgggaagggctgtgtcttgtggcttgagggccagctcagttgcagtataatagaacaccaggtagacgtctaaggtttttgactccagtccctgggtaccagaaaacacctctagacctacttggggcctggaggactcgctgcatggaagggaaggactcaaacctggcctcaggtgatgtatctaatgtaaactacataatctataagaaatatgtaaataatattttcctatgatatataacctcagttcctaacacagatgtccagaggcaaatctttcaaattcacaagcaaaaattagatagaagcaagttacatgtgaacaaa

SEQ ID NO: 106332 - DNA, 569 bp, Homo sapiens
ggttccctattctagcccatggctcttttatggcatttctggagcttctctgggccagaggggagcccatgtccatgaaaggtgattcccaggcatagcagcattcaccacaagctgactgaagagcctctgggccttaagtacacacaggtgggagtgtggcagttactcaccataggcctgtgatggtggtggccacagggtcattctcctctgcctgtggaaggaagagggaagagtgggaagggctgtgtcttgtggcttgagggccagctcagttgcagtataatagaacaccaggtagacgtctaaggtttttgactccagtccctgggtaccagamaacacctctagacctacttggggcctggaggactcgctgcatggaagggaaggactcaaacctggcctcaggtgatgtatctaatgtaaactacataatctataagaaatatgtaaataatattttcctatgatatataacctcagttcctaacacagatgtccagaggcaaatctttcaaattcacaagcaaaaattagatagaagcaagttacatgtgaacaaa

SEQ ID NO: 106333 - DNA, 569 bp, Homo sapiens
ggttccctattctagcccatggctcttttatggcatttctggagcttctctgggccagaggggagcccatgtccatgaaaggtgattcccaggcatagcagcattcaccacaagctgactgaagagcctctgggccttaagtacacacaggtgggagtgtggcagttactcaccataggcctgtgatggtggtggccacagggtcattctcctctgcctgtggaaggaagagggaagagtgggaagggctgtgtcttgtggcttgagggccagctcagttgcagtataatagaacaccaggtagacgtctaaggtttttgactccagtccctgggtaccagaaaacacctctagacctacttggggcctggaggactcgctgcatggaagggaaggactcaaacctggcctcaggtgatgtatctaatgtaaactacataatctataagaaatatgtaaataatattttcctatgatatataacctcagttcctmacacagatgtccagaggcaaatctttcaaattcacaagcaaaaattagatagaagcaagttacatgtgaacaaa

SEQ ID NO: 106334 - DNA, 566 bp, Homo sapiens
taggactagtcactttgcaggtgctcagtaaccacatgtgggtcgtggctagtgtactggacagtacaggttaaagagaggtctaaggactaaatacagacctcaaataatattgaggttaaacaaataytaaattgactttatttttcagaatgaagtttctttgcctggagagaacaagcatgctcttatttcacgtattttcctaattgaaatcatgattttggcaggggaaagaacccactgagtgtgctacatgttggaactagtgaccttacacatccatgctccatctcctgggaaagtctttcctgaagaattgtatcttcagtctgtttgtcctgatttgtcccaaactgacagaagtacctgcagagctggctaaaatttccctttcagacattgctgtttaggtgagagtacagagtggttgggagggtcaatcagttgtagaacaatacttaggtataatccaatttatatacccactcaaaacccagagattttgcttctatatgtacagaaagaggacttagaaatacatccaccaaactaaacacgttgct

SEQ ID NO: 106335 - DNA, 566 bp, Homo sapiens
taggactagtcactttgcaggtgctcagtaaccacatgtgggtcgtggctagtgtactggacagtacaggttaaagagaggtctaaggactaaatacagacctcaaataatattgaggttaaacaaatactaaattgactttatttttcagaatgaagtttctttgcctggagagaacaagcatgctcttatttcacgtattttcctaattgaaatcatgattttggmaggggaaagaacccactgagtgtgctacatgttggaactagtgaccttacacatccatgctccatctcctgggaaagtctttcctgaagaattgtatcttcagtctgtttgtcctgatttgtcccaaactgacagaagtacctgcagagctggctaaaatttccctttcagacattgctgtttaggtgagagtacagagtggttgggagggtcaatcagttgtagaacaatacttaggtataatccaatttatatacccactcaaaacccagagattttgcttctatatgtacagaaagaggacttagaaatacatccaccaaactaaacacgttgct

SEQ ID NO: 106336 - DNA, 562 bp, Homo sapiens
attatagctctttcggtaaaatgtaatggtgctaactaaataatttgaagatctgagtaattttgcagtgagtatattrttaaattttattatttaattagtatatttaatcttttcaattagagaattctatttaagcaaaatgtttttattactgtttctttcatgttttatagtagacatatttgatataattattgaatttattgagccatgcttttaaggtaaaaactcgggaggcttcataagccatgggattttcttgccatttgtatgaagtaaacaaacacaagacggtgctaggtgtgtaacaaatgctttacaattatcaggaaatatttctgctcgagtgagtttgtatcttcatataagagattaaaaacacccagagtgaagaagtggcattggttttgcatggtgagagaggaaatctgtagtcaggctgcacaactaactctaaatttagacagataaattctgcttcttttattttctaattatcttcagtttttctttcactgtctttttatcttcacccccaaatacatatgcattacagccc

SEQ ID NO: 106337 - DNA, 562 bp, Homo sapiens
attatagctctttcggtaaaatgtaatggtgctaactaaataatttgaagatctgagtaattttgcagtgagtatattgttaaattttattatttaattagtatatttaatcttttcaattagasaattctatttaagcaaaatgtttttattactgtttctttcatgttttatagtagacatatttgatataattattgaatttattgagccatgcttttaaggtaaaaactcgggaggcttcataagccatgggattttcttgccatttgtatgaagtaaacaaacacaagacggtgctaggtgtgtaacaaatgctttacaattatcaggaaatatttctgctcgagtgagtttgtatcttcatataagagattaaaaacacccagagtgaagaagtggcattggttttgcatggtgagagaggaaatctgtagtcaggctgcacaactaactctaaatttagacagataaattctgcttcttttattttctaattatcttcagtttttctttcactgtctttttatcttcacccccaaatacatatgcattacagccc

SEQ ID NO: 106338 - DNA, 633 bp, Homo sapiens
ttagtgttgtcagtttatgaagaatagtctaccgttattgggaaataaggtacataaagcctcagattgcatttatgttatgattagatagaaaaaggtattatttgaggaactcattgtgttggtctttctaaaaaataattgatttcctgattcaggcaccagagacagaaaaaaaaggaagtaattaagtgtaattaagtctgctttaatgataaatgcttattgacacatatcagaaagtgattaaacactatggactgtataataagcctttacatatgtttctttgaccaarcctagctttataatatggtcgtctctcagtatctgtcaggaattggttccaggaaccaccccccaaactcctgcccacatctcacttccatgaacactaaaatccacagactgaagtccctgatacaaaatgtcatagtatttgcatataaactatgcacatcttcccatatattttaaattatcattagattacttataatatctaataaatataaatcttatataaacacaagttgttataccatattgtttagggaataacaacaaagaaaaatctttacatgttgagtacagatgaaaccctacttttttttcccccaaatagtttcaatc

SEQ ID NO: 106339 - DNA, 644 bp, Homo sapiens
catttaaacactgattaaaaatcactgatctactccgctgtcttcatatatttgagaaggtaattaagttaaacctaatttcagtcagttgtygcaacgctggaattggaatccacgatttgtgcctgtttactacctccagtttgctgttcttttccccataatatcttacacaatttttaaaaatgtaagcactgtatttgcatttgatattatgatattgtttgttttaaacactgaaaacatcatatggctattaggtctctctcttaatttaatgaaaaattttcctcaaatcacatcattcctaatacatgtgaaaacgttgagaagggtggtggttcctttccagtgttaaaaggctatttcctttttagtgtaccaaaaatggtttcacttatagtaaagtataactaataaggtaatctgtcattgtagatttgtttctgcttaaagctgtaggatatttgttacacctgtacttaaagtaaaattcaaactccttatcctgtcctacaaggctccacctgatttgggccctgcctcatctctaacatcatcttatgccattttccttcttgttcaccaaagccacaccagctacctttctgtccctccttgttagacttgtttctgccttaagc

SEQ ID NO: 106340 - DNA, 614 bp, Homo sapiens
atttgtttccaagattcagctatgacaaataatgctgaaagcttattaatttatgtagaaatttgcaaaatacacaatatctgaaagaaatattctgaaagtgaaaatgctgagtcataaactgtgcacttttttttttttttttttgagacagagtctctctctgccrcccaggctggaatacagtggcatgatttcagctcactgcaacctccacctcccgggttcaagcgattctcctgcctcagcctcctgaatagctgggactacaggcacctgccatcacacccggctcatttttgcatttttagtagagatgggatttcaccatgttggccaggcgggcctcaaactcctgacctgaagtgatccacccacctcggcctcccaaagtgcagggattataggcgtgagccaccacacctggcctaagtgtgcacactttaaattttggtcaatatggccacattttcctccaaagaggtgtcagtgctttcctcattactgttgcttttctctctatccttggcaccaaggcctagcttttcacaagttcttcaaaatgagcttcacaaattattttagccacaatgttttatggcttcattatggtg

SEQ ID NO: 106341 - DNA, 614 bp, Homo sapiens
atttgtttccaagattcagctatgacaaataatgctgaaagcttattaatttatgtagaaatttgcaaaatacacaatatctgaaagaaatattctgaaagtgaaaatgctgagtcataaactgtgcacttttttttttttttttttgagacagagtctctctctgccacccaggctggaatacagtgrcatgatttcagctcactgcaacctccacctcccgggttcaagcgattctcctgcctcagcctcctgaatagctgggactacaggcacctgccatcacacccggctcatttttgcatttttagtagagatgggatttcaccatgttggccaggcgggcctcaaactcctgacctgaagtgatccacccacctcggcctcccaaagtgcagggattataggcgtgagccaccacacctggcctaagtgtgcacactttaaattttggtcaatatggccacattttcctccaaagaggtgtcagtgctttcctcattactgttgcttttctctctatccttggcaccaaggcctagcttttcacaagttcttcaaaatgagcttcacaaattattttagccacaatgttttatggcttcattatggtg

SEQ ID NO: 106342 - DNA, 614 bp, Homo sapiens
atttgtttccaagattcagctatgacaaataatgctgaaagcttattaatttatgtagaaatttgcaaaatacacaatatctgaaagaaatattctgaaagtgaaaatgctgagtcataaactgtgcacttttttttttttttttttgagacagagtctctctctgccacccaggctggaatacagtggcatgatttcagctcactgcaacctccacctcccgggttcaagcgattctcctgcctcagcctcctgaatagctgggactacaggcacctgccatcacacccggctcatttttgcatttttagtagagatgggatttcaccatgttggccaggcgggcctcaaactcctracctgaagtgatccacccacctcggcctcccaaagtgcagggattataggcgtgagccaccacacctggcctaagtgtgcacactttaaattttggtcaatatggccacattttcctccaaagaggtgtcagtgctttcctcattactgttgcttttctctctatccttggcaccaaggcctagcttttcacaagttcttcaaaatgagcttcacaaattattttagccacaatgttttatggcttcattatggtg

SEQ ID NO: 106343 - DNA, 522 bp, Homo sapiens
gctagtctgagctgttcttttttctggaggaaagacattagtaaactgaggtggggatagaattgtttcaagggctgtggtcagaggtgtctaagtgctgaaaaaataagtttgatgagttaaagcagagggcttccagagtggggtccayaggatcaatcaatagccttcaggaggttggtgagtccccagaaataacatgcaatattttgcatgcatttttttggggagagtctgtgttaaaactagattcttaaaggggtagagaccatgctgaagtaaagctactcctgccagctatctccaagtgcctattttacaggagcccatgagctctagctcaatttatttctcccctttcttcccagtcaccatccccttccctagtgggcacctactacttcatccctcttcatcctgcttcatcccctttccttctttctcccctttctattcttgatcccactgcctttcttatgtgtggaccttttaaaagaggatggtctaggtgctagccatata

SEQ ID NO: 106344 - DNA, 515 bp, Homo sapiens
aaatggggtgtggaacttttcagggatgaaggaagggaggggcgtccattgtttctcatctcctgacccccaaaagctctcagtggggaaaatggctccaatgtggggtgaaggactgtagggctgagctgacaggcaactatggattggctgtggacagcccacaatttttcttaattagccatggcatcttgcccatcatggaaataaataacaggtgtcccctaaggacagcacatgagaggcgccatttatcgccgttctgagaggaaactgacaacatgacgggtgacatagcagaaataatgaagaaaaatggtagtgggcaaggaaaggccctgtcagaggaaccttgcaatcagtccccaaagggaagacccctgcccagcacccctgggagggcagcacctccccagtgggcctgttcttcaggcaagagttccatctcccattagcactaggcaggcaccatacagtagcatttcagggtcaytggcaacccctcctgtaccatc

SEQ ID NO: 106345 - DNA, 592 bp, Homo sapiens
gaattctaaataatatcagtaccttggacacaaaacatatgttactaataaataaaacaatctcagtgaggtaaatgtatttgcatttatgtggcttccatggacaatctaaggtgatagttttgctatgatattgcataagagttaacacatagaccattacaaactctagtgaggaaattgaatgtccatacagagtgttgccgacatccaatgtgctgatgctcatgagggtgatgtgtgctcatcattgctgatacgcgcagaagtctttaggcattcaggattggaacataaaatagtttccttctaatcagcaaaaaacaaaacaaaaaaaaaaaacaaaaaaaacatgtatttgccttcaccaaacactatcttytgcataatgaaagaatagaagaaaaccatggaaatagccagcacctaatcagcagcaccttgttgacagtctcactgcttatcagtgagatctgaaggacatttggatcttgtagttagaaagactctgcataggctacacactgacaagcatgcaggactcctgaacgcccactagcgctacattcaatgtatcacagaaagataccaa

SEQ ID NO: 106346 - DNA, 320 bp, Homo sapiens
tcactccccaaacccattcccaggaggcagatctttctaggtgtttttctaccataagcataaacataaacagatggatggatggatggatagatatgcatagacagagatgtaagtaaatgtaatgggattatcttctatacattgttctgcatcctrcttgttttgttcaataaatgacatctttcatatagtacatgtggaaatctcatttttattttttaatctcattttttaaggaaatctgcatatttttccatagtacagaattatcataacttatctaattcttctcccatttgatattgcaatgaatatcc

SEQ ID NO: 106347 - DNA, 596 bp, Homo sapiens
tgcagagtactcaaccatctatacctgtgtgcatatgtacatgaggctgtgtgtgtgtgtgtgtgtgtgtgagtgattgtgtgtaaataaacaggacaagtatttgggaacaatttttgactctctgtactatctgatcactttgggatggggtcagtcaccttagtagcagtaagggacagagaaagaattccaagtagcaaacagccacatgctaaaacagcaagctatgttaaaaaaaaatctactactctcagtccctgmgtttccttacatatggctgagtccactagtagtttttcatttacactgacatgaaccatactatgtcaaaaaatagttcaggaacagccaagaagttcccaagatcacagacttcaaaaacccctgttacaaccctaaagcattgcctgaaactttatctttgcctgaagctttatgctttgcctgaagttctctcaaacttctcattggaattattctaaagcagctaaccaccgattgagcacacgtacagcctgttttaactttttgcatggacctttgtttaatagaccatcactgacttgaggaagagcctgcagccaaggccacag

SEQ ID NO: 106348 - DNA, 564 bp, Homo sapiens
aaaagcatagtagaacataattagcaagcaaaaaagaagaatgatacaagtatactaaagccagaaaaataataaaaaggaaaaagaaaacaatagcaaagtaaaataaacagctaacatgaaataaaatgcaagtaataaaaacaattatatcatttattgtatgcaatgtgagcaggctggatttcccaattagagatggataattgttgggatgggttaaaaacaaaatgtacacatatgttgtgtacaaaaaatataatkataaaagtaagttggaaataagagatggggaatagattcctagacaactatgaacaacataaaacagtcttggaaatattagagtgcaaggaaatctatgaaaaatggaaatattacagtgcagggaaatctatgaaaaaagcatttaataaggggaagagacacaatacataatgatcccaaaagtataaatttttgagaaaatgtaatagacctaaacctttatacattgaacaagatagcaaataactatataaagaaaacctcccaaaggtatttttttctaagtttagttatttt

SEQ ID NO: 106349 - DNA, 564 bp, Homo sapiens
aaaagcatagtagaacataattagcaagcaaaaaagaagaatgatacaagtatactaaagccagaaaaataataaaaaggaaaaagaaaacaatagcaaagtaaaataaacagctaacatgaaataaaatgcaagtaataaaaacaattatatcatttattgtatgcaatgtgagcaggctggatttcccaattagagatggataattgttgggatgggttaaaaacaaaatgtacacatatgttgtgtacaaaaaatataatgataaaagtaagttggaaataagagatggggaatagattcctagacaactatgaacaacataaaacagtcttggaaatattagagtgcaaggaaatctatgaaaaatggaaatattacagtgcagggaaatctatgaaaaaagcatttaataaggggaagagacacaatacataatgatcccaaaartataaatttttgagaaaatgtaatagacctaaacctttatacattgaacaagatagcaaataactatataaagaaaacctcccaaaggtatttttttctaagtttagttatttt

SEQ ID NO: 106350 - DNA, 596 bp, Homo sapiens
tcttgggctgatggatgccagagactttattcactgcttggtataaaatgagccaatgaaaaattttggctttcagcttgcccctggaaagagaaatagttgatccatgcttccagtaccccagattctctaaagatgtttaacaatctagcacctgtctcaccaatcctggtgctctgatgagtcaggcattattttgcaagctgtgggagaaagtggcaactggggttggtggattgcatagttcccccatttgccatctcctggctcagtacagagtgagtagacaaaaacacagctacctgactttctctagattgagaaagagttggaagaggccccagaatctctgackggactgatttgtacagatttttttcctgtacaaggccaagatgtgaagaatggaagaggtacgtgatttttccaatgcagagactcaaacacaaagagtcaaggaaaatgaagaatctggcaaagatatttcaataaatgaaacaaaattcagaagtggccttaataaatggagttgtatgattcatctgacacagaattaaaataactcttataaagatgctcacccaggtaaagagaat

SEQ ID NO: 106351 - DNA, 638 bp, Homo sapiens
gggagaaagtggcaactggggttggtggattgcatagttcccccatttgccatctcctggctcagtacagagtgagtagacaaaaacacagctacctgactttctctagattgagaaagagttggaagaggccccagaatctctgacgggactgatttgtacagatttttttcctgtacaaggccaagatgtgaagaatggaagaggtacgtgatttttccaatgcagagactcaaacacaaagagtcaaggaaaatgaagaatctggcaaagatatttcaataaatgaaacaaaattcagaagtggccttaataaatggagttgtatgattcatctgacacagaattaaaataactcttataaagatgctcacccaggtaaagagaataatgyatgaataatcagagcattttaacaaagaaatagaaaacattaagaagtaccgattagaaattgtgaggctgaaggacgtaataactgaatttaaaaattcgctagagtgttgaatagcagactaaagtataagaaaggatcacagacccaaagtctgttgactagagataattgagtgagaggagcaaaaagacaaagaaaattataaaacagagtgaagaaactttatgagaattatgggaca

SEQ ID NO: 106352 - DNA, 584 bp, Homo sapiens
tgaagtagagaatattgggcataattccatcctgatgttggaaggtgataggtgtgagtttagttctcatccctgcgacgcctctgggacgtcggttggtgaagagcatctgccttcctctagagagcctgagtcactttcacttaaaaggtttttcctctgtttttctttttttctctgattgctggtgtggtcatttccagcaacagctccgcggttctcttgtgcggtgtcccaccacttggaggctggaaggtgamgacatcagggaagaggaactgccttcaaccgtcattgactctgctcaccagcccaggtgtttgatttttactaagcaagttcccagaattgcacgtgggctgttttataattgacttatcttgaccacctctaaaagttctcttgaagttacagattcctgagatctttatctgggagagcaagcatttggttgaagtttgctttaaatgtttatagactgattatcgtgtattgatccttagagtacccctttcagattatgcaaataacacgcacttgtatagacaagcatgggcagaatccacaactgcttttgtggaggc

SEQ ID NO: 106353 - DNA, 562 bp, Homo sapiens
aagtgacttgctccactttaggaatcaagactgccagttatgaccccaaaaatctaatacccattttaatataaacattaggggtatagggggccgcagctatatgtatgattttcaaaacttaagcagattgacttggttaagtaaattcttgtactcataaagtctgtgacttaagatcctggaacatgcacacacacacacacacacacacmcactaactgtattctaaaatatttttgcacatattcattgaacaatttggaccaaaataggtaagccatgtttaagttactgtatgcattagtcacacacctttagttttgagcaactttttgcaaagtgtttatccttgcatttctaggctttgaagtccagcagctttttctttttccaaatcgtttatttgatcaacatttagtaagcaaatactgttgccaaatattactgtatgccctattacattgcttaaatggcccttagatgaattgttcattaatataaaatatctaaatggtaagattgcttttgggagaaacatattgctcataaaattttaaga

SEQ ID NO: 106354 - DNA, 573 bp, Homo sapiens
agagaaaagtggaaggattgtagatacattttagagaaatattccacagaatttattccttgagtggttttaggatttaagtaaaaaataaaaatgaagaatcactcctagattttgggcttgggaaactaataggtaatgatccaaaatacttagatggggaaagcttgaggaggagcacatttggcaatggatgatgatattaatagcactatttgggtcatgttaagtttaagatttctataggaaattcaaatgcatatgatgggaaggtagtgggatatawgaggatagagtccagcaaagaggtctgggctaatgatttaaacttggcagtctttagcatactgatgttatttcaagtgattggattacatattttcacctaaggtaaaaatgtaacaatagaaaaaaggagtcaaggtctgagcccaaggtaatctaagatttccttagatggcaataaaagaggctacagctcacaaagataaccttacggaagcatgtagtgaaggaagtgaaggaagaaaaacaaggtaagtgtggttaggagtaatgtcagcaagatggcag

SEQ ID NO: 106355 - DNA, 573 bp, Homo sapiens
agagaaaagtggaaggattgtagatacattttagagaaatattccacagaatttattccttgagtggttttaggatttaagtaaaaaataaaaatgaagaatcactcctagattttgggcttgggaaactaataggtaatgatccaaaatacttagatggggaaagcttgaggaggagcacatttggcaatggatgatgatattaatagcactatttgggtcatgttaagtttaagatttctataggaaattcaaatgcatatgatgggaaggtagtgggatataagaggatagagtccagcaaagaggtctgggctaatgatttaaacttggcagtcwttagcatactgatgttatttcaagtgattggattacatattttcacctaaggtaaaaatgtaacaatagaaaaaaggagtcaaggtctgagcccaaggtaatctaagatttccttagatggcaataaaagaggctacagctcacaaagataaccttacggaagcatgtagtgaaggaagtgaaggaagaaaaacaaggtaagtgtggttaggagtaatgtcagcaagatggcag

SEQ ID NO: 106356 - DNA, 620 bp, Homo sapiens
gtatgtatcagtagttttttttctttttattgctaaatcatattccaacagtattccatcatttgcatacatcacaattaatttaaccattcatttgtttttgagcatttgggtggtttccattgctgacaattctgaacaaaactgttcattgctgaatatttttttctggaaacatttctctttcattattattgcataactccaaggagtagaattgctagggtaaatggtatttgttttaccttttaagaaattgacraatttctcaaaaagattgtctcattttatatttcctcaagcaatatatcagagttccagttactccacatggtaccaatgcttggtaatttcagtctttttagtattagtcatttgagtggttgtacactggtatctcatagtggttttaattttctaatatctgacaaataaagatgttaagaatctttctgagagacaggcagagcaagagcaagagggtggaatagaaggctccaccaatcgtcctccgtgcaaggacaccaagtagttaataactatctacacagaaaaaaaaacaaaaacaccttcataaggaacaaaaatcagatgagcactcatagcactgggttttaact

SEQ ID NO: 106357 - DNA, 620 bp, Homo sapiens
gtatgtatcagtagttttttttctttttattgctaaatcatattccaacagtattccatcatttgcatacatcacaattaatttaaccattcatttgtttttgagcatttgggtggtttccattgctgacaattctgaacaaaactgttcattgctgaatatttttttctggaaacatttctctttcattattattgcataactccaaggagtagaattgctagggtaaatggtatttgttttaccttttaagaaattgacaaatttctcaaaaagattgtctcattttatatttcctcaagcaatatatcagagttccagttactccacatggtaccaatgcttggtaatktcagtctttttagtattagtcatttgagtggttgtacactggtatctcatagtggttttaattttctaatatctgacaaataaagatgttaagaatctttctgagagacaggcagagcaagagcaagagggtggaatagaaggctccaccaatcgtcctccgtgcaaggacaccaagtagttaataactatctacacagaaaaaaaaacaaaaacaccttcataaggaacaaaaatcagatgagcactcatagcactgggttttaact

SEQ ID NO: 106358 - DNA, 620 bp, Homo sapiens
gtatgtatcagtagttttttttctttttattgctaaatcatattccaacagtattccatcatttgcatacatcacaattaatttaaccattcatttgtttttgagcatttgggtggtttccattgctgacaattctgaacaaaactgttcattgctgaatatttttttctggaaacatttctctttcattattattgcataactccaaggagtagaattgctagggtaaatggtatttgttttaccttttaagaaattgacaaatttctcaaaaagattgtctcattttatatttcctcaagcaatatatcagagttccagttactccacatggtaccaatgcttggtaatttcagtctttttagtattagtcatttgagtggttgtacactggtatctcatagtggttttaattttctaatatctgacaaataaagatgttaagaatctttctgagagacaggcagagcaagagcaagagggtggaatagaaggctccaccaatcgtcctccgtgcaaggacaccaagtagttaataactatctacacagaaaaaaaaacaaaaacaccttcataaggaacaaaaatcagatgascactcatagcactgggttttaact

SEQ ID NO: 106359 - DNA, 595 bp, Homo sapiens
attgattatcagagaaatgcaaatcaaaactacaatgaaatatcatctcactccagttaaaatggcttatatacaaagagagccaataatatatgctggagagaatgtggagaaaaggaaacgcttacacactgttggtgggaatgtaaattagtgcaaccactatggagaacagtttggaggttcctcaaaaacctagaaatagagctaccatatgatctagccaycccactgctgggtatatacccaaaaaaagaaaatcagtatactgaagagttagctgaattcctatgtttgttgcagcactgtttacaatacctaagatttggaagcaacctatgtgtccatcaacagatgaatggataaagaaaatatggtacatatacagaatggagtactattcagccatatagaagaataagatccagtcatttgcaactacatagattaaattggagattattatgttgcatgaaataagctgggcacagaaagacaaacactgcatgttcttacttgtatatgagatctaaaaatcaacacaattgaactcacagagatagagagtagaagatggttaccagaagctgggaag

SEQ ID NO: 106360 - DNA, 632 bp, Homo sapiens
gatattgtctggacttggtgacatacaatttagagtatacacagacacaaacacatctctaacagtgctttacttcttaaggaaaactgtaaagcctttctttaattcaactatttgtactgtcttctggtaggaattgtttagactgcatttaaattgtggtcaaatttgcattctatattcctactcatgtttggtctcttaaggaaaaaagaagtaacracatgacaaccagtaattttctaatgatcctaagttgagatcaaaacaaaacaaagaataataataaactctgccatttattgtattacacttactagaattatatgtttaacttgagagttaccaccagttcacagaagattgcaaataatttttttttaaattgcctacttacaagttacttatttttctacaaaccaaacaaatactttgcaagtgaatgatgccaagattagatcatgaaagtcataaattttgtacaacacaaagaaaggatggctgcgagctggctcaattgcagtgtcagaccaggcaaatcaagaagaaatattagaaccattttgtttctgcactgaacttggaagagtcatttcaaatcaaatgagcaaacatgcattgaacacctgcaa

SEQ ID NO: 106361 - DNA, 227 bp, Homo sapiens
aaaccttcctcgttcaagtccctataggaccctatctgtccctgtctrtccctgcaagtttctgctggcttctgctagtctctactagtctttgctagtctctgctagtctttatctatccctatctgtccgtatggcccctgttagttcctgtgaattcctgcaaatccctgtctttccctacctatctctatttgtctctatctctatttatctctacttatttc

SEQ ID NO: 106362 - DNA, 552 bp, Homo sapiens
attcaaaaacttccccttctttgtatctctagggcactgaccagtacctttttagagcactgaacttatgttgctgccagcagacttgtaacggggtttgtcattcatctggttgattttagttttttctgttccagcaaaccttcctcgttcaagtccctataggaccctatctgtccctgtctatccctgcaagtttctgctggcttctgctagtctctactagtctttgctagtctctgctagtctttatctatccctatctgtccgtatggyccctgttagttcctgtgaattcctgcaaatccctgtctttccctacctatctctatttgtctctatctctatttatctctacttatttctatttatccctacttatctctgtttatccctgtaggcctcttcaggtcccttcaggtctcttcaggtctctgtttgtccctgatgtccctgtttgtccctgttcaggcgccacttgtggctgtctgccacaagtactatttgagaccatcactacgacagttactacttgagactgtcattacaaga

SEQ ID NO: 106363 - DNA, 599 bp, Homo sapiens
ctagactgatttgagtagaagaattaatgaaaagtaagaaaatggaaatagcagatgcaggactgacagtgggagggcaccagctagactgatttgagtaggaaaatgaatgaaaagtaagaaactagaaatagcattatgtaggactctgagcaaattattctttgagtaaagtgactgtatcttttataatcaattgtatacaacagggtaatctcacctaaccattgatcccacctgtattcatcagttctggctactataasaaagtaccacagacttggtaccttctagacaataaaaatttatctctcacagttctgaaggcaggaagtctgagggtgccagcatgactgggttctgctgagagccgtattctgggttacacatgaccatcttgttgtatccttacgtggctgaaagtgggcaagggagctctctggggtctctattataagaacactaatcccatttgtgagggtcccacactcatgacctaattaccttccaaaggcttcatcttttactaccatcacattgagtgttgggatttcaacatataaattttggggggacacaaacgttcaatccataacacc

SEQ ID NO: 106364 - DNA, 309 bp, Homo sapiens
tacaacctgtttttgagaaactcttagttcatgaaagttattaaaatgtgcttagatacacataggaaaaactttcaaaatacaattcctctaaaccttacaaagtttatttggttttaaataaggaacttttagaatgaaatccaagaattttttccatttctctttcacagagattcaaagtttatgtggtattttctctaatacattattaaaacaattctcaagcatacagcaargttgaaagaattttatagtaaacatctccatactcatcatctatattttaccatcaaagttttacatatt

SEQ ID NO: 106365 - DNA, 531 bp, Homo sapiens
ttctagctgaggactttctctagcagcacgggagcttgatactgggcatgaagtgggaagaaaaggtgagggtaactaagaagaatctccttggattcagtgatgtaattctgaggcatgttccacatagcttcccataaaattaagcctagatatctaacacaggaacttgcctcttaacacgtgtggtactggcttttctatctttcctgttttattttgttctctcttccttgtctcactttcgctgtgtcctcactcctgctttaagaatacccaaacaaatacattcatttattgttttagactctcagaacatagttgatagttgaacttgtaatctatgataatcagcttggatgctatactgacaggaagatagtgaactcacaatgtctaattaagataaaattaaaaagtatattgattcatgtccaaagatttaaaaaacctaagtggcagtgtcacaatttcttctttttagtttacatcgttttttaaaygcctacaattgctttaaaggaagccttg

SEQ ID NO: 106366 - DNA, 563 bp, Homo sapiens
gagctcatacccaactagctgtgcagctcatatttctctaaacagctgacctgattggtgggctgaattgtgtcccccaaaataagatataaagctttggtccccagtgtctcagaatgtgaccttatttggaaatagaatctttgcaagtggaagtagttaagatgaggtcatgctgaaggagggtggcccctaatccagtataagtgatgccctcctaaggagatggccaggtgaagagacagacacacaggaatgccacgtgatgatgaaggcagggattggagtcatgtggtggcaagctaagaaaagccaatgatggccagcaaactacctgaagtgagaccaaggcaaggaagcattccctaakggtttcagaaggacatggccctgagaacatcctactgtcagacttctagcccccacaacactgagatgatacatttgtgttattttaagtcacctagtttatgctacctcgttatagcaactctaggaaactaattcagagatcaacacaactgactactctgccagaaagatgtcctgggattttaatgtac

SEQ ID NO: 106367 - DNA, 531 bp, Homo sapiens
cctccgtaggagctcatggtgcagccctcatccatctccctagcaccgagctgtcctgtcctgctgcaaagctgtttgaggtcccttcttcccaccccaccacccctcttgcattttctctgttctgcattctttggcttgcagttttgacaacctgcaccatatccggttctttttccctggtttctcctgcaacccatttttcttttctcacgactggccrtctttctgctctcactcatatggcaggcatgctctcccttgagtactttataatttagatgtgagagaattgcgcttccttgaataatatcacctagatgatcatttctcagaaaacaatgcagccatcccctctgtgggatcacctgtttctccatttcatactggggatgctttttcctgctagaatcatctctcagattccttcacagcagcaaattttaagaaactcgtatcaaattaaattctcccaactttgttattggtcgttgagatgatacacattcagtaccactacataattatggt

SEQ ID NO: 106368 - DNA, 390 bp, Homo sapiens
gcttctcgcccggcgttccagggtggtcagttcaaatgatagttgattcctggctgctcttgttggcttgaatgggagattagataaaaatgtttgagaatttccctgtacttagtgtgggaatttgaagaaccagaatggtttagttacttcctgcttctcccactcctctgcctctgttcacccaaacgtacattgtcatctctttaatgtccatgaaatttgaaactgaaaggatggttaactggtctgcatgcttattttacacatgagaatacagaggtccaggctaggcaaatgacatgcacagggcggytcagtttggggcagacctagggttggaatcttccccagttttctggatccctatgtatagtccagaaagagttc

SEQ ID NO: 106369 - DNA, 564 bp, Homo sapiens
gacttgacctcaccccactgcagcagcccccagggtggtgggctcctgggagcttccaggggagggctcaggggactgttcacttctctccatgccctacctgcaatggcaatgggcgagagtggtgatgtggggccagggtctggagcagcagtgaatctgggcctggggccaggtcatgcctggctgtgtgagattgggggtggcacagtcagctgcctcagggatatggggcacagggtatataaggcacaggggacccactgctaccactgctgctcctgtcacaatggctgctccagatggcttgccacggccatcagtagtaaacgaaaagtaatctgcaagaatatttcattgttatcagaagcagagaaatggacaygcatggtgaatctggcccaggctgctccttggttatagagatcccatggaaattgtgaacaaatgctaccactgatattaataccatgatgatcatgactgccattaactgagcacctagcatggtaatagagactagtaaacattttgtctatgatgtttcatttatatttcacaagt

SEQ ID NO: 106370 - DNA, 609 bp, Homo sapiens
ttccctgcctagagtgctctcctcaccctatttccaacaaagtcatgctcatcctttagcacaaatatcacttattttgtgaatttgaaatatacctctatcagccttctgagctcctctcttgtctgtattcccacagcactttgcactcaactttattaagttacagatcaccttggagtttgataatgaatgaattgctgtttttctttactagaagaatatgagtctttacaagacaagatctattgcttatatccccagagtttagcccagtgcctggcacttagcattcaatgatatgttsatacttaaaatggacattcaactttcttatttccccataaattctatctttcccggtggcctcaaatctcctgtaatctccactgtgatgtgtattgcccttaaaacatgaaagataggccaggtgcagtggctcacacctgtaatcccagcactttggaaggctgaggcaggcagatcacaaggtcaggagatcgagaccatcctggctaacacggtgaaaccccatctctactaaaaatacaaaaaattagctgggcgtggtggtgggcacctgtaatcccagctactcgggaggctgag

SEQ ID NO: 106371 - DNA, 609 bp, Homo sapiens
ttccctgcctagagtgctctcctcaccctatttccaacaaagtcatgctcatcctttagcacaaatatcacttattttgtgaatttgaaatatacctctatcagccttctgagctcctctcttgtctgtattcccacagcactttgcactcaactttattaagttacagatcaccttggagtttgataatgaatgaattgctgtttttctttactagaagaatatgagtctttacaagacaagatctattgcttatatccccagagtttagcccagtgcctggcacttagcattcaatgatatgttgatacttaaaatggacattcaactttcttatttccccataaattctatctttccyggtggcctcaaatctcctgtaatctccactgtgatgtgtattgcccttaaaacatgaaagataggccaggtgcagtggctcacacctgtaatcccagcactttggaaggctgaggcaggcagatcacaaggtcaggagatcgagaccatcctggctaacacggtgaaaccccatctctactaaaaatacaaaaaattagctgggcgtggtggtgggcacctgtaatcccagctactcgggaggctgag

SEQ ID NO: 106372 - DNA, 489 bp, Homo sapiens
ttttttctttgttaatctagccagcgttctatcaatctttgtttttctttctttcttttttggtagaatctactactcttggatttattgatgttttgtatagttttgcatctcagtttcattaaattctcctctaatattaggtatttcttttcttctgctagttctaaggttgttttttttttctagttccttttggtgcagagttagatgattaatatgagacctttctaactttttgatgaggttgttttgggtataagctttcctcttattrctgcttttgtgacatcccaaagattttggtgaattgtgtccatattttcattaatttggaatatattttttgatttctgccttaatttcaatgttcacccagtacttattcaagagaaagttgttaaatttacatgtacctgtgttgtcaccagaaatcttctggatattgatttccagtttttattgtactatgagttgagagtgtgctta

SEQ ID NO: 106373 - DNA, 626 bp, Homo sapiens
ctttgttaatctagccagcgttctatcaatctttgtttttctttctttcttttttggtagaatctactactcttggatttattgatgttttgtatagttttgcatctcagtttcattaaattctcctctaatattaggtatttcttttcttctgctagttctaaggttgttttttttttctagttccttttggtgcagagttagatgattaatatgagacctttctaactttttgatgaggttgttttgggtataagctttcctcttattactgcttttgtgacatcccaaagattttggtgaattgtgtccatattttcattaatttggaatatattttttgatttctgccttaatttcaatgttcacccagtacttattcaagagaaagttgttaaatttacatgtacctgtgttgtcaccagaaatcttctggatattgatttccagtttttattgtactatgarttgagagtgtgcttagtatgattttcttttttaaaatttactgagacttgttttatgactgaatatgttgttgatcttagaatatgttccgtgtgcagattagaaaaatgcatattctttgattgttgggtggagtgttctgcagatgtctgttaggt

SEQ ID NO: 106374 - DNA, 645 bp, Homo sapiens
ccttttattttctactgaagcaccaatgtcttctggagcctacaggcattgggagaaaagccactcctttaggttttccatgggctattttgccctrttaaaggatctgccaggtgccataatcttaattgagtctgcacagttccatggggttatgggatccagtttcagtaccagatttattgagactagaaatgagagtggcattgtaagatcaacagttttggaagctctcttaatagtattatggctgagaatggactagggaaatgaatgtctccctagtgtgagaatggactagggaaatgaatgtcaattcagacactgtttctgttcattaaacaaatattcatgctatgcccctatattccagtaagcgtggggagtacaaaagttggaagacaaacagataagaagttgtgtgattttggtgaagaaagtgagactgtttgttctaaggcagtattcagaaggcagatttaaaaaggtttttctggcccaggcaatggcagatagtctaagacaaatgggtttcttttcctcattttgggctctggtccttggtgaatttcatctcctccaggctgctagagtttcctgtctcattttctctctgaagcatagaatatggcttattcaaaggag

SEQ ID NO: 106375 - DNA, 587 bp, Homo sapiens
caagtcattgtgccctgcttggtgaggagaggcacgggtggcttctgcattgtgtctgctcctcartaccatatctgtggcacctatcctgggggcatgtgaaagtccttgtcttcccttgttggaggggctgtggcagttggcactgaggtttttaaggatccaaggcccacagggctcctaacacatagtccagccagctctttgtgtaggtctggagtcctggggggaatcagatggctctcttgtgcccagggtagcagagatgcagaatggaaagtgtggatccttcagaggctctcacttattcaccttttctctgtgcaaaggagcttcccatggttctgcaccaattctgggcgggtgactgcctggctttgctattctctgttctccatgggtcccattgcttccttcataattcttgacattatctcataggcgattgacttgaagagctagtatttactcacctctttgtttcctctccatgagaatgactcacacaagcttcttctaaccagctactttgaaccagaacccttaatatgatccttgagacacctttttatcaatgtcctgctgca

SEQ ID NO: 106376 - DNA, 627 bp, Homo sapiens
gtggccatgagaaatgtctgacttggcccggtgcggtggctcatgcttgtaatcccagcactttgggaggctgaggcgggcagatcacttgaggtcaggagttcgagacccccttggccaacagggtgaaacccagtctttatttcaaaaatacaaaaaaattagctgggtgtggtggcacgtgcctgtaatcccagctactcaggaggttaaggcaggagaatcactggaacctgggaggcagatgttgcagtgagctgagatcgcaccactgcattccagcctgagcgacagagtggacagagtgagacaccatctcaaaaaaaaamaaaaaaacaaaaaaagaaatctctgacttatggctgggcacagtaactcacacctgtagttccagcactttgggaggccatggcaggaggattgcttgaggccaggagttcgaggctgccgtgagctatgtaagccatgattgcaccactgcactccagcctggacaacagagcaagaccctgtctcaaagccacagcaacaaatctcggacttattaatctgtccccaaataaatctcagccctcgtaagaatcccctgccaccagtggaggtttttttgccttattgcaaatctca

SEQ ID NO: 106377 - DNA, 597 bp, Homo sapiens
ctggtagagaaatgctcaatgaatgtcattgttattccatgcaaagccattcccatacccctgagccttggtttctccatccaggaaatgagtgtcagggtcctgtgaaacctttagcatgctagtcatttacctactgctttgtggctctagatccttccttttccctttgtactccataccttagggagtggtggctgcttccaacagttattactagctggattgcttcaatattccctttctcatcttctacaagtttgaaataaatccctgtattaaatcccctccayttgacataccttgagtggggttggaccctgacctggcccccatgtggcatagggagccctcatctgggccaggaagaccatacctgcagcttcttgagctgactgttgacagtggccaggtctcctccagggtccacgtcttgcagctggctctccatgtgaaggagcttcttgtccagctcagcaaagctctgcaccagctggtctgctttgctggcctcaaagagctgccgtgccttggcctgggtggtgctctccagctccgcccagcactggcggatctcgcccagcttcttccgcacgg

SEQ ID NO: 106378 - DNA, 398 bp, Homo sapiens
tctgaattctttgagtgttcacaagaaaaataaattcatgtatcacatgtcctataaaagaaaaaggggttggggttgcttttrcatataaagcaagctagtttcaaccgaactctctgtccactggagaaaagtgcttgccacagaaaactgtttttctggttcactgaggtataattgacaaataacaagtacatatatccaaggtgcacaatgtgatgttttgatataagtatacactgtgaaaggattattacaaccaatttgtagtaattaaacttgatgaattaacatattcatcaagtatatagtacattattattaactgtagtcaccatgctgtgctttccatctcagaaaacttagagtattaccctaaagttaactatgaccattta

SEQ ID NO: 106379 - DNA, 692 bp, Homo sapiens
gccttacaaaatgtgtttattaaataataaggcttgaaagtcaaaatgactccttgatacttgggctgcagaatggatgttgtgctggcaggcagggaaacaacattcaactccttgtccatctccatcagagctcttgcatgactaagtgtattgtcaatgagtagtaatattttgaaaggaatctttttttttctgagcagtagatatcaatagtgagcttaaaatatttagtaaaccatgctataaagagatgtgctgwcatccaggctttgttttttcattttttagacctcagacagaatacatttagcttaattcttaagagtcttaggattttcagaatgataagtaagtattggcttcaacttaaagtcacaagctgcattagcccctaacaagagttagtctgtcctttgaagctttgaagctaggcattggcttttcctttttagtaatgaaagtcatccatagcattctattccaatataaggctgtttatctgcattgaaaatctgctgaatctacattgaaatctacattgaaaatcaccttcatcaatgatctcagctagatcttctggataacttgctgcagcttctacatcagcacttgctcttcactttgcacttttatgtaatggagatgacttctttcctttaacctcatgaaccaatctccgctagctccta

SEQ ID NO: 106380 - DNA, 316 bp, Homo sapiens
ttttgtgaagataggagtcacaatatcttccagttgttgtctctgctcaaaaagctcattaatggaagcttctgtatgggtttccaaccactcattttttgcacggcatgcactgaggatggtattctagggacagaaatacagagtttgctctccacttatttattgaaaaataaaactcaacagtatctctaaaccagcacgtccaactgaactttctgtgatgatagaaatattctgtacctgcattgtccaatacagtagccattagatayaaatagctattgagcactagaaatgtggctagggtgactaa

SEQ ID NO: 106381 - DNA, 573 bp, Homo sapiens
aacagaagaactctgtggggatttaaccaagaactgtgatagaactgtagtagacaggtagaggcgagcagcccacagacgatgtctaacaccgaaagatcacactacaccagcgtactctatttggcattaattcagtcatattttcaaggtaaatacctaaggaaacagtttagcatttgcagaagcgcctctgaggactggcgctgggtgatggggcaggcaggagtaaggactgctggtcttcgttatgtgccttgtggaacgaattggctttttaagtcacatgtatatatcacttaaaaataaaaaacctttacagaaaactcatcattaaagaaaaatgttaatgagttaaatagatatttttaaccagagactcctatataaattagtgtattttctgcacccmcaaaagacacaaaccaagagtaaaggtgttggaatcagggcctagaatttgaacccttggaagagctttgccttccaggggcatgggctatagctaaggtgaacctcagtttcctcaactatggaatgggggaaaacataagctactttacatgggtttcg

SEQ ID NO: 106382 - DNA, 542 bp, Homo sapiens
tcagtaaaatggtaaagaatatttttaatactttgcttcactctccaaataaatataattgcaatctaatctagttttgtgctgatcttaattataagctgcctcctttccctgaaaacctcgagaaagtgcagtggtgtttgtccagcatgtgcccacattttagcatataaggaattacaattttgggtttctattaaaaagttaaagttaagggctgggcgcagtggctcatgcctgtaatcccagcactttgggaggctgagatgggcagatcacccgagatcaggagttcargaccagcctggccaacatggtgaaaacccatctctactaaaaacacaaaaattagccaggcatggtggtgcgcgcctgtaattccagctactcgggaggctgaggcaggagaatcacttgaacccaggaggcggagggtgcggcaaaccgagattgcgccactgcactcccgcctcggcaacagagcaagactctgtctcaaaaaaaaaaaaaaaaaagttaaaaagctttcttaaacataggaa

SEQ ID NO: 106383 - DNA, 542 bp, Homo sapiens
tcagtaaaatggtaaagaatatttttaatactttgcttcactctccaaataaatataattgcaatctaatctagttttgtgctgatcttaattataagctgcctcctttccctgaaaacctcgagaaagtgcagtggtgtttgtccagcatgtgcccacattttagcatataaggaattacaattttgggtttctattaaaaagttaaagttaagggctgggcgcagtggctcatgcctgtaatcccagcactttgggaggctgagatgggcagatcacccgagatcaggagttcaggaccagcctggccaacatggtgaaaacccatctctactaaaaacacaaaaattagccaggcatggtggtgcgcgcctgtaattccagctactcgggaggctgaggcaggagaatcacttgaacccaggaggcggagggtgcrgcaaaccgagattgcgccactgcactcccgcctcggcaacagagcaagactctgtctcaaaaaaaaaaaaaaaaaagttaaaaagctttcttaaacataggaa

SEQ ID NO: 106384 - DNA, 583 bp, Homo sapiens
atagggtgtagagttttagatctgagcgagtagggatgcacagccctgtgtggaaataaggagggtgaaatgggggacaggctgaggcagggatgaatgtcggggagtcaagaattctgtttcagacttttttgcagtgggattttcttcttttatttgtttatttttattgcttggtccacgttgcttcttggtgcatttccctacttatcggaccctcaggaaatgctgacagtacggcagttgaggtagaaggaaaaaaytgtcataacgaaataccaagaaaacaaattaaaaatattttagtgaaacaacatttcaaaaaagcattactttctgataattctataagaaaaacaagttactctatattgagcaatctcattttttagttaaggcacacatataattaatttaatcagccggctggcacggtggcttatgtctgtaattgcaggcactttgggaggctaaggcaggaggatcatttggactcaggagttcaaggccagcccgggcaagttagtgagacctggtctctactaaaaattaaaaaaaaaaattaggtgattgtggtggtgct

SEQ ID NO: 106385 - DNA, 630 bp, Homo sapiens
gttcctgtacattctttactcaatttgccctactgtaacatcttagattaccatggtgcatttgccaaactaagaaattaacactggtacaatactattttcattgtataaatgtaaggtgtataacatgaggttttgctatacatagccataatgaaatgattactataggtaagcaatttaacatatccatcactttccatatttttatttctatagtaagagcatctactctcagtaaattttcagtattgcaatacaatgttattaatgatagtcctcctactgtacagtagatctcttggtctgttcatcctatataaccrcaagtttgctccctttgacctatgtctcttcatttcctcctcttccctgtccatggtatgcaccattatactgttaaagcaaactaaatatggtctgagaaggactccatacttctatatatgagtccatgtggatgaactgtaacctagcttaaaagtcagacaaaactgaaaaccaagcttaggagtatgcacctgtaacaataactgagtcttggccaatcccagtggccatacttcagccactcatagactgctaagtgttcaaactgttcaaataaggcaaatgccaagctgtaaccat

SEQ ID NO: 106386 - DNA, 589 bp, Homo sapiens
taaaattctattataatattttatttcatattttacattgcatattattagtcagatatatgataaggttcatttccctttggtaatgttaagagagttgttttttaaagcaaatatgcaggtatattgccaatgttcagaaaaaaattatttaattcctatgttattctgtttcttgtttctgcttttattattttattttacccttggtttcttcattccaagaagaaactggataagttacttaaaagtggctagagctagagtaaacacatctattttaaaattatactattatgctaatactcagactaggcagaaaaactcatccaggggacaattccctagtaaaaatccctttgtaagcctgttgaggagcatgaacacaggggttgaaagtttctactaatcatattaaggaaggagttgggaagaattaggaagacagctgtagcttttagtaaaagtgggaaaaatgactttacaaaggatkaagcaaacaagatgagctggtccccagtgtgtagataggaaatgggatcgtttaatttagagatatgcttggacccaaccaggctttatgaacatc

SEQ ID NO: 106387 - DNA, 623 bp, Homo sapiens
gtgccactgcgctctagcctgggcagcaaagtgagatcctgtctcaaaaaaaaaaccaaaccaaaacaaaacaaaacaaaaaaaccctaaaacaaaaacaagaaactttctgagtaccaacatgatgctyaaaggaaatgctcattcgagcattttggattttggatttttggatttgggatgcccaacctgcataaactttaaagaattcttaaatcaagttatatgctgctaaaactaactgcctccttgccacactcctaataaggttctacatcttgcagaaatttttaaaagcctgatttagggtgtcagacctgggttcaaaatcttcgtcttctactcaaaagcaatctgatattggtgagcttcttattccatatctgtagaatgggataggggatggtaataataatcccatgtaccttgcaggatttttgtgaaactggataaggtcaggtatgtgtgaacagcaaatggagtgtctggcccattgtagctgtttagttaataacatttcctgttgtgacttgatatctggtttgagattctggcatcctgtaactcctcctcctcaccagccctgccctccatcagcctggtcccctgtacagtgtgacacc

SEQ ID NO: 106388 - DNA, 623 bp, Homo sapiens
gtgccactgcgctctagcctgggcagcaaagtgagatcctgtctcaaaaaaaaaaccaaaccaaaacaaaacaaaacaaaaaaaccctaaaacaaaaacaagaaactttctgagtaccaacatgatgcttaaaggaaatgctcattcgagcattttggattttggatttttggatttgggatgcccaacctgcataaactttaaagaattcttaaatcaagttatatgctgctaaaactaactgcctccttgccacaytcctaataaggttctacatcttgcagaaatttttaaaagcctgatttagggtgtcagacctgggttcaaaatcttcgtcttctactcaaaagcaatctgatattggtgagcttcttattccatatctgtagaatgggataggggatggtaataataatcccatgtaccttgcaggatttttgtgaaactggataaggtcaggtatgtgtgaacagcaaatggagtgtctggcccattgtagctgtttagttaataacatttcctgttgtgacttgatatctggtttgagattctggcatcctgtaactcctcctcctcaccagccctgccctccatcagcctggtcccctgtacagtgtgacacc

SEQ ID NO: 106389 - DNA, 580 bp, Homo sapiens
tggcacggtggctcacgcctgtaatcccagcactctggtaggccgaggtgggtgaatcacgaggtcaagaaatcaagaccatcctggccaatatggygaaaccccgtctctactaaaaatacaaaaattagctagggcttgatggtgcgtgcctgtagtcccagctactcaggaggctgaggcaggagaatcacttgaacccaggagacagaggttgcagatggccaagactgtgccactacattccagccttacgacagagcaagactctgtatttaaaaaaaaaaaaaaaaaaaaaaggctactcctttccaagtcctagcaatcccactaaggttggtaacttagtctgtttggctgccatacaaaatatgtgagactgggtgatttataaaggacagaaatttttcacagttctagaggctgacaagtccaaaatcaaggcactggcagttctgatgtctcgtaagagccccctttcctgcttccaagatggtgctttgttgctgtgtcctctagagaggaccagtactgtgtcatcacatagcagaaaatggaagggcaaaaggatccaggctgg

SEQ ID NO: 106390 - DNA, 645 bp, Homo sapiens
  misc_feature (1)...(645): n = A,T,C or G
gcagtattttttctctcagaaacctcagcttttgctcttaaggctgttcagttgattggatgaggcccactcacattatagagaatgatttcttttacttaaagtcaaatgattttagctgttaatcacatctacaacataccttcacagcaacaatgagattagtgggcaccagaacctagccaagtacacacgaaactgaccttacagataggaagggagctgctgccctgggtgatgccagcccactatatgttgagtgggaaggctgtggagaacccagtttttaataattgtttccctttctccagtcattttggagttagtgaaattaaatacctattcttcacctttttacaggcatttctcatcttccagttctttccatatgcttttctcttgagcctgacctcttaaatgattgcaaacccagaggccctgatcaccatatgggcccagaattgaaagacatgttctctgaaaggaggtttttaattgcctgcagcatttccgagtcagatactgaggcagccatctggcagaaagccgctgtggcctgtgatgctrgcaacagcagctccgacccttgagacaaggtgggacaaggctattgnctagtcacacacttcctcccaccccagacaa

SEQ ID NO: 106391 - DNA, 598 bp, Homo sapiens
gaaaaacaaatagaagtttattaacatgtatacagtgactttttctgtaacctctgcctccccccctcccaccatgtttatagacccctgcatttaaaccatctgggacttcaggttttaaacacgagctggctgaatcttcttgcttggtaccctgcaataaatgtatacatgggagacacccagggacaaatgaggaactctcaaagagatagtttagaattcaagcataaatactatcttcagctaaagacaaaacagagaatggtgtcagggaggacgaggtaactaggaaaagtacagtaaagragagtaagttttgtaatgcagatgtaagtcaataccttccccactgctaagagcctctagtgatttacccatctttctctttcttatacagagagggagacacacttaaaaaattgagatttactttataaatgcaaatttcccatagaaaagggtttacttctcctttattttcagagcttctcctgtgtctgctgtttctcaaaataattctgctaaagaggcatattttggggtgtcatattctggtctcctatatcattcacgctaaatcatggggcaggatgat

SEQ ID NO: 106392 - DNA, 604 bp, Homo sapiens
tgagctctgagaggctctagctgtcttctccctggagactcagaattctcattgctatccacgatagaacgtctctcaatgtataatgtgatagaaatatagcctgatttagaggaaagctggaattttattaaagtaaataaagcatacaatataaagatttacgtccagggtctcttcagagatccttcattaaatgcctatatgaaacccgatagcttttttccattcaaagtatacaatactagttgcaaaatgttttgtgggttgtgttctgcatggtaaattttaatccttgttttgccagtctaggtaaatataattttttattagccattgattttttagaacagcacaggacatcagcctttaattttcyagttgaagcaggaatggccagtttccctatgtcctttcctttctaccaaatgactgcttgacatctttatcagtatatttgaggctccacaggctgtccatcatcaccctgcccccacctgaagaaaaacatgtggagaagtcccaagattagagaatcaattcagggccaagtcacataaccaaaaccactcattgctttacaagaatgatttcaaatagtatt

SEQ ID NO: 106393 - DNA, 565 bp, Homo sapiens
ttgccatcattttctgtacctttaaaaattttgttggcatgttacataaagaataacttgtcacctcgttattctaagtgtgcccgcagaccagcagtcatcagcatcccctgggaacttactggaaatgcagagtcttagcgctgtcctcaactaactgaatcagaatcyacatttaaaagttctctcagtgattcatttacacattcaagtttcagaggtaaattttattcttgctaaacagtttagcaaaaataaagttaagttctttggtactctgccatagagatgctttcctcctacaaaaaatttcttagtggaattgtttgcaaagctctggtacagctgtattcagcactagccaatgagaaaatggcccatgataattttctagtcaattaactggtggaggagtgtagaatgagatatgcttccccatccatcatcctagtaaaaagcacaccaatttaggcaaacaataaaaagtcatttcaattaaacaacaaaaggacagtaagctcactagcaatgaaggatttaatttaacttctagctattgatagca

SEQ ID NO: 106394 - DNA, 565 bp, Homo sapiens
ttgccatcattttctgtacctttaaaaattttgttggcatgttacataaagaataacttgtcacctcgttattctaagtgtgcccgcagaccagcagtcatcagcatcccctgggaacttactggaaatgcagagtcttagcgctgtcctcaactaactgaatcagaatctrcatttaaaagttctctcagtgattcatttacacattcaagtttcagaggtaaattttattcttgctaaacagtttagcaaaaataaagttaagttctttggtactctgccatagagatgctttcctcctacaaaaaatttcttagtggaattgtttgcaaagctctggtacagctgtattcagcactagccaatgagaaaatggcccatgataattttctagtcaattaactggtggaggagtgtagaatgagatatgcttccccatccatcatcctagtaaaaagcacaccaatttaggcaaacaataaaaagtcatttcaattaaacaacaaaaggacagtaagctcactagcaatgaaggatttaatttaacttctagctattgatagca

SEQ ID NO: 106395 - DNA, 622 bp, Homo sapiens
cccttagccagttgcatgtgatgctccttacattatagtttaatgcttatggaataataaaattgtttttttttcttctacctttgttttttgttttgtttcatttgagatggagtctcactcactctgttgcccaggcatgagtgcagtggcacgatcttagctcactgcaacctccacctcctgggttcaagttattctcatgcctcagcttcccaagtagctggggttacrggcatgcgccaccaaacctagttaatttttgtatttttagtagagatcggatttctccatgttggccaggctggtctcaaactcctgcctcaagtgatctgcccaccttggcctcccaatgtgctgagattacaagtgtgagccactgcacccggcctctcttctacctttgtgaagggagagattttatggattggtaagagattttttttccatttcttttatttagatttctctgaaaattattaaaaaataagttactgtatttgtgtagtctatttctgggttccttattcagaggactgtaactgtataggtattttttaaaaatcagatagtatgaaccctccaacttatttctttttcagaattgtttgggctagtctat

SEQ ID NO: 106396 - DNA, 622 bp, Homo sapiens
cccttagccagttgcatgtgatgctccttacattatagtttaatgcttatggaataataaaattgtttttttttcttctacctttgttttttgttttgtttcatttgagatggagtctcactcactctgttgcccaggcatgagtgcagtggcacgatcttagctcactgcaacctccacctcctgggttcaagttattctcatgcctcagcttcccaagtagctggggttacaggcatgcgccaccaaacctagttaatttttgtatttttagtagagatcggatttctccatgttggccaggctggtctcaaactcctgcctcaagtgatctgcccaccttggcctcccaatgtgctgagattacaagtgtgagccactgcacccggcctctcttctacctttgtgaagggagagattttatggattggtaagagattttttttccatttcttttatttagatttctctgaaaattattaaaaaataagttactrtatttgtgtagtctatttctgggttccttattcagaggactgtaactgtataggtattttttaaaaatcagatagtatgaaccctccaacttatttctttttcagaattgtttgggctagtctat

SEQ ID NO: 106397 - DNA, 622 bp, Homo sapiens
cccttagccagttgcatgtgatgctccttacattatagtttaatgcttatggaataataaaattgtttttttttcttctacctttgttttttgttttgtttcatttgagatggagtctcactcactctgttgcccaggcatgagtgcagtggcacgatcttagctcactgcaacctccacctcctgggttcaagttattctcatgcctcagcttcccaagtagctggggttacaggcatgcgccaccaaacctagttaatttttgtatttttagtagagatcggatttctccatgttggccaggctggtctcaaactcctgcctcaagtgatctgcccaccttggcctcccaatgtgctgagattacaagtgtgagccactgcacccggcctctcttctacctttgtgaagggagagattttatggattggtaagagattttttttccatttcttttatttagatttctctgaaaattattaaaaaataagttactgtatttgtgtagtctatttctkggttccttattcagaggactgtaactgtataggtattttttaaaaatcagatagtatgaaccctccaacttatttctttttcagaattgtttgggctagtctat

SEQ ID NO: 106398 - DNA, 617 bp, Homo sapiens
tgttacttctttcattatcagtctttttattattctacatatggaagactatgaattttcctctgagcactgctttaaattgcactccttaggttctagtatatagttatttctaaattagtttttggcacagaattggattaatcatcatccttaatttatgttacactctcatcattggtaaatgcatagccatcttttgtttagttcttccattttttaacataatttttaaaatatgggcccatcacccaatgcgtcttgacaataaactccatctacctatattgcccctcccattccctccctctgcttctgtccatactactcctccaaccaccagagataaagatcatgctgaattctttttcatttccttgctttctttttcatatagcttcatakcttctatcttctatctttccttaaaacatatttttattttaaatttaaacattttcttattttctgaatattaggtttgattttgattttctttatgatccaagagttgctttaaaaagagttttggggtttttttcccagatattagaatatcttgttgttttattattttgttttattattaagatcgggctatattacatcatgaacag

SEQ ID NO: 106399 - DNA, 577 bp, Homo sapiens
agtgaggcttgccagaactcaagttccaaatgctgggatgagtgatgcccctctggctagggctcaatgctccctccgtggtcactgactgagatctgcctatgttgctttctgctgtgacagggcagcactgagttccaataccaaatcccacaatcactttactctccctcctgcaagcacacagattctgtgtctgtgtcacacagccattactggggaatgggagaaaagtgtatcagcaattcaagactgtctttcccaccctcttcagtgcctgttttggtgatatgaaggtagacacaggtactgtttctctcacctgacttttaggtcctatgcttttttgtgtggatagtgttcaatttggtgctcccatggaaaggaycatcactggaggcttcaaatcagccatcttgtccacctccccactactatttttttttaatattacatttccccacttcagaatatcactctggagttggaataaggtaagatttcaccaattcaattcttaatatattttcttataaaatagctgaaatctcaaatcagtaacaatgttgttattgtt

SEQ ID NO: 106400 - DNA, 415 bp, Homo sapiens
tatataagtgatgtaagtagagaatataagcagtaatcaaggcagatactgcctctgccctcatggagaaacattttggcatatgctattctcaacacctctcagcccacaccccttatatacaacatactatgtataataatgtagggttattatgtactgccaattcaaaaacagggcagagataaatctgtgtgtgaatatgaagactgaaagctgagcaggaacagaggcacagccatcaaaaggagaagcactgggcaaggggtaaaagagcagtgagagtaaagtagcaagtactgagccaggggatgaaagaaaaggaaggggcccatggaagagtagaattgaagaaggaaaaccaactctgtsccaacagactcagcaggttgagcccatattcctaggataagca

SEQ ID NO: 106401 - DNA, 536 bp, Homo sapiens
tgttgcttacatcctttcctggtgttggtattagggtgatgctggcttcatagaatgggttccctctttctctatgttgtggaatagtgtcaaaagaattggtcccaattcttctttgaatgctggtagaattctgctgtgaatccatctggtcctggacttctttttgttggtaatgtttgaattaccaactgcttgttaytggtctgtttagggtatctaattcttcctgatttaagctaggagggttgtatttttccaggaatttttccatctcttctaggttttctagtttatgtgcataaaggtgttcatagtagccttgaattatcttttgtatttcagtggtgtcagttgtaatagctctcgtttcatttcttaatgaggttatttggattttctctcttcttttcttggttaatcttggtaatggtctatcaattttatttattttttcaaagaaccagctttttgtttcatttatcttttgtactttttgtttgtttgtttcgatttcatttagttctgctctgatc

SEQ ID NO: 106402 - DNA, 649 bp, Homo sapiens
ttacccttatagaacttgactcagtgtatcatattctctatgtgtgtgtcaggttaggtcctctaagaaggagatgccaggagagaaatagacaagcaagagattaatctgggggaaataactacaaaaaataaagtgggaagagaacagagtaggtagaaagagctttcagactacgatgcagtttctacacttgtacaaagagagaggaaggaagaaggttgggtaggaaggrcctcagacttcagttgagccctgagaaagtttcacccaggaaatggggagctcgagaacaaagactgctcatcaaaggagttctgcattgggctggaatcacccatctctagttcccaaactattctgtcattggctgagagcagctctgagagaatgtagcctcagtgatgaatgctggtatggatcagaaggtatagcagctggaggatgtccaccaactacacttttgccaataggttctcttgcaggaagatttgagcagcatatgcccatggtcattagagtgtgacactggagaagttttatcatctctctgaactgcatttgcaaaatggagttaatgtcatttttgttaccaggttttgagaggactaaataagtaaaaagtatctggtatagtatgtggacttaa

SEQ ID NO: 106403 - DNA, 433 bp, Homo sapiens
ggttgtaggtgtgcagtcttatttctgagttctctattctgttccattggtctatgtgtttgtgtaaaatgtatcttttagaaaaagattttagrttttataaagctttccctaccacactgggaattgttcaaaggaaaactcccatattatcttctgagttaataagatactagttttttcctaccagtagcaatgactacaaaattggctctcaaaacaacaacaaaaagctctgaattgtagtatttgccaatttccaaagtgtaaatactcccatcatgtccaatttcaagctgcccatgtgacttcgctgaacacagagttaggaaaaaatgtgcacagttggctcatgccaagctgatatatgccagctcctagcacatcgcctgcaccagcaaatgtattttgacataagggttgagagagatcc

SEQ ID NO: 106404 - DNA, 416 bp, Homo sapiens
acgcatagtcgcaaacatagtcccaaacacatttactccatttgggttgtattgaaaggttgaaactaacctgatatkcctgggagtcccttaacctgtccactcttaacaagtcaaaatcacttctgtagtgaaaagttttaacagcagtcttaaagggaagctatgtgcgtgactgagaaccgaccattactaggggtcacaagttaatttttaaatagatgcataaatgcacagtatggtggtaaggtgagtggaaaaaaatcttcctctgtgattcatcttgactcctcaaatcactctctattctacctagcgatctcagaagagagaaatgacttgtcatatgtgcatgccacaaagaacctgttttcctgcagagctcattcataaaagctgagcaaaactaaaagaat

SEQ ID NO: 106405 - DNA, 434 bp, Homo sapiens
cgaattccatggaaaaaggcaaaggcagtatggtggttttctgttctaaccactgaggttatgtagtgtcactttcttcacattccactggactcctgacaagtctgtcattaaggacagttccagattcgagtggwagggaattagatcccagtcatcttcaaaacctccacacagccttccacactcaaaaccacgaaatagattggactcaaccctccacattgccctaattagttcctgttgagtccccctttgaaatggctcctggtttccttcctctgccctttgccaccaccctactttagtctcacatactttctcatctgaacttttgcaatgctctccctgcctctgggcactctgacctttccctctcttcagaattattttcctaggtcccattatcaccaccctgctgaaatagtcaaaga

SEQ ID NO: 106406 - DNA, 618 bp, Homo sapiens
ctgcaaacttttacatgggactttcagagtcttagtcacaaaatggttgctgcaactccagacattacatcaatattactatagggaagaattagggagaagccacagggactgaaaggataggtaccatgagttagtccctttcataaaacctccctgaaatggtatctatacctttgtgaaaaaataatttyaaaattacaccagttaaagaaaaagcaagttgacaacactaaattgcattggatatttagactataaatataaacagctttaagaaccaattattttaataatctatgtaagcatttgctactatagacctaaaagtttaaaatacaaattctaggagaaaaaaatgaattaacattttaaaaattctacttccttggtaatcctaccacccccctcccatcaccccaccaaaatttctgatgagttgggcagaaggatgccaaggcaaacacagattttcagcaatattttgttactaattagcctgagtttctgtatctatctgaaagcaacagaactgagtgaatttggtaatacatttcttaactttggctttcagaattttataattgttgaaaatagtatagtttagtaaaaatagtg

SEQ ID NO: 106407 - DNA, 618 bp, Homo sapiens
ctgcaaacttttacatgggactttcagagtcttagtcacaaaatggttgctgcaactccagacattacatcaatattactatagggaagaattagggagaagccacagggactgaaaggataggtaccatgagttagtccctttcataaaacctccctgaaatggtatctatacctttgtgaaaaaataatttcaaaattacaccagttaaagaaaaagcaagttgacaacactaaattgcattggatatttagactataaatataaacagctttaagaaccaattattttaataatctatgtaagcatttgctactatagacctaaaagtttaaaatacaaattctaggagaaaaaaatgaattaacattttaaaaattctacytccttggtaatcctaccacccccctcccatcaccccaccaaaatttctgatgagttgggcagaaggatgccaaggcaaacacagattttcagcaatattttgttactaattagcctgagtttctgtatctatctgaaagcaacagaactgagtgaatttggtaatacatttcttaactttggctttcagaattttataattgttgaaaatagtatagtttagtaaaaatagtg

SEQ ID NO: 106408 - DNA, 643 bp, Homo sapiens
ctgttgtggagactttcccatgcatcttgcatttctctaagtgtgtccttcatttccagaagttgtgattttttttaatctatgctatctatttcactggagatttatccattcatatcctgtatccttttttttttatttctttaagctgagcttcacttttctctggtgccttcttgaytagcataataatcaaccttctgaattatttttctggcaattcagagatttcatcttggtttggattcattgttaatgagctagtgtgattttttggggggtgttaaaaaaccttgttttgttgtgttaccagaattgtttttctggttccttctcatttgggtaggctatgtcagagaaaaggtctgggactcaagggctgctcttcagattcttttgtccctcgggctcctctcttgatgtgatgctctctcctatcccttagggatggggctttctgagagccaaactggagtgattgttatttctcttctgggtctagacacccagtggagctaccaggctctgggctggtactggggagtgtctgcaaaaaatcctgtgatgtgatacatcttcaggtctcttaaccatgggtaccagcacctgctctggtggaggtagcaggaaagtgaagtggact

SEQ ID NO: 106409 - DNA, 637 bp, Homo sapiens
ttccttgtcagatcctgtggtgccatcttaaatggctagatattttttcaggcatatgtggtagttttgaaaatcaaactgattactgttgacttgattctctatgcaatacaaagctgggtaatttttaagcagaaccttaagcagaaattcacatcagkgtgtctggttgcaaaacaacagaaaatgattctagctaaaagcctcgcctctttttgctactcataaggtttggctctgtgtccccacccaaatctcaccttgaattgtaataatccttacatgtcaagggtgggacaaggtggagataattgaatcacagaggtggtttcctccatgctgttctcaagagtgagtgaattctcatgagatctgatggttttataaggggcttcccccttcacttggcacgcattctttctactgccgcccctgaagaggtgccttctgccatgattgtgagtttcctgaggcctccccagccatgcggaactgtgagccaattaaatcttttttctttataaattacccagtctcaggtatttcttcatagcagcatgagaatggactaatacaactacttttctcaacaaaccttagctacttaatgagtgcttactatgagttactattcacg

SEQ ID NO: 106410 - DNA, 504 bp, Homo sapiens
gtatctggtgggaatcaggttaactcttttccctatcttgtgtcatcttggctaacagaatatctgggggttggtggaaagagagctcatgagattgccccagcttgagttccagtgcccctttaccccaacattgctaagcaatgaagcaacrgcagggcatcttgacttatagccagtaaccagcccaccccaccaagcaatggcagggcaccttgactgacagccagcctaccccactaagcaatggccgggcaccttgactgacagccgacataccccactaagcaatggccgggcaccttgactgacagccgacataccccactaagcaatggccgggcaccttgactgatagccagcctcccccactaagcaatggcagggcaccttgactgacagccagcctaccccactaagcaatggcagggcaccttgactgacagccagcccagtgcactaagcaatggcagggcacttgacttatagccagcccatcccact

SEQ ID NO: 106411 - DNA, 504 bp, Homo sapiens
gtatctggtgggaatcaggttaactcttttccctatcttgtgtcatcttggctaacagaatatctgggggttggtggaaagagagctcatgagattgccccagcttgagttccagtgcccctttaccccaacattgctaagcaatgaagcaacagcagggcatcttgacttatagccagtaaccagcccaccccaccaagcaatggcagggcaccttgamtgacagccagcctaccccactaagcaatggccgggcaccttgactgacagccgacataccccactaagcaatggccgggcaccttgactgacagccgacataccccactaagcaatggccgggcaccttgactgatagccagcctcccccactaagcaatggcagggcaccttgactgacagccagcctaccccactaagcaatggcagggcaccttgactgacagccagcccagtgcactaagcaatggcagggcacttgacttatagccagcccatcccact

SEQ ID NO: 106412 - DNA, 525 bp, Homo sapiens
ggcttgacctctcttagcatcatcaaaattagctatgaaattgggataattcctactcaatatgccttaaaattaatggaataatgtacaagtagataatacattaaaaggtttataataatattggtcccatctcttctctgtgtactacaaagacatagagccctgggtgatatctaaggatgcaactctaggcatagaagatgaaatgkagagtgcatatgaagaaccagcgccccagactaagtggcccgtttctagagctactctccaattctttctttatttaactttgcaataattgatgtcttgtcttctcatgtaaactcgaacacactctctaaaatgatctttcccagtaatcaaccttcattttttatgagttgttgtttatatagtaattctgtcttcagaatctacctacattatgccaaaattgtgtccaatgttattgaaaatttgaagatggtctatactcctttataagcaactttcattctcaccgcaaagtgaacaacaatgcat

SEQ ID NO: 106413 - DNA, 528 bp, Homo sapiens
caattttaatctgaaaagcagtatgagaagagttcctatgaagctgggatttacatacttcattctccgttcctggtcatttcatccacagcttgactgttgtcaatcatggttccttgcctttggagtggtactataaaggtacagagaatgcccatctcagtaccaaaatttcaccatgaaaaatcataacagaaatgacaaagcttaaagaaaagtacgccggatttcagaagtatttaccataataatttttaagaaagcttaccataaatacttccaaaaacaacaggctttacaaaatattatacaacatcctgtgtacagcagtaagtatctactcaggccatttgtcaagctgtttagtaattagtttctcatgtaccctcttgtctcaagaaggtcaataatcatctgatttcctctcyagctaatgatctgttgttagcctacttttaacaatggaagaaggaactggtatatgttttaagtcaaccagttctccttaagtctcatagtttctgtttc

SEQ ID NO: 106414 - DNA, 501 bp, Homo sapiens
aaaaaatattggagctagtcacagtggtggggacctgtagtcccagcttactttaaggagacttgtatatggagaggtattgctttgaggctcaggaaattggaagaccaatggtgggtagcatagcggagaccccatctctaatttaaacaaaaatctccttgcccagggaggtgtgtcacacacatgacatctgctgtcgtgtgtcgtggctaaataaaatacaggtgataattgccaacgtggaagagagaaatgtgaaccgtttaaggtggtagccactcttactcaaaatactgcaaaatacagaattctatgtttggggtaacttcagtcaagtgatttaattagtagaaggctgtagggctaggtggccttcaacattgctctttacctggaaattaagtttgtgattcaaaccttttattggttaagtcagggatttaaaatctgtagaaaagactcaagtgtccagcatgagwagaatggatgaacaaaatg

SEQ ID NO: 106415 - DNA, 574 bp, Homo sapiens
ctttttcttaggaactaaataatagatgtatgtcattattttgttattattccaaacaataaaaatattcagagaaaatagtgttcacttacaacttgaagcaaagagagatacccaaatcctacattatcaaagtttactttcacatttttccatcgagcagtctcatttctttctattagttttaggcaatcagtatgattattcacgtcttcgatgtcaaacctgtcaccagttgtggtgttaatacagtggtagaatttgccagcaaacaaatttacgcccatgatgctgaaaattagccagaatataagacaaaccagaagcacattcatgatggatggaattgctcctaaaagggcattcacaaccacctaatacacaaatggaaaaaaagaaaagtcagaattcttatctgttaataaagaaaaaaaattcccctrgtaatctctggtctttccattctttttttctatcaatgctatttattctaggatatgtaaaagcaaggttcaaaaaaatcttaaaattcatttttttttcttaagcaatacacttaggaaaacaactatag

SEQ ID NO: 106416 - DNA, 534 bp, Homo sapiens
cgtttagtagatgaggaaactgagggccaaacacatagttcaatgatattaaactgcataaggatttggaagaaggaacaggtctaggaccaatggctgttgtctcatgtttctcactcctgaaactgtaagtggaaatgcaatcttttcattttccccaaagttgatgttttttgtttgggccatttaataaggaatgtctgacaaaagtgaactgtctgactcaggtgcagtaattgccacagaaattggttttggtgtctttggggaattctgcagttgaacccagaaggcatccttatcaagtagcgtgttccaacacttttacaaattctaagarcctcagatatcactgttttcctttggagcgatattttgttattttagtaaactttcaaggggcactgccactttgctgcactggcttcctagtgagatacagtgttactatcttaagtctttttttaaaaaaattgagacagggtctcactgtatcgcctaagttggatggagtgcagtggtgtgatattggct

SEQ ID NO: 106417 - DNA, 392 bp, Homo sapiens
gaattcattgtatattgtataacgagaatgctcttaacttagatctccaagaaacattgttaaaaacaggtgcacaataatgtttataggatagtcagtgttatctgtgccaaaaagaaagggaatcatatacctctggaaggacacgtaagaaattgataacaaacgttgcagaagggaactgagtgacatgggcatgggtgggagcaagactttccactaggtattcgttctttcatctttgagccatgtaaatatattagctatctaacatttcaaattaaacacttggtaggccaatgttyatggcagcattgttcacaacagccaaataatggaaacaacctaaatgtccgtcaatgggtaaataaataaacacagtgtggtctagc

SEQ ID NO: 106418 - DNA, 407 bp, Homo sapiens
tgctcttaacttagatctccaagaaacattgttaaaaacaggtgcacaataatgtttataggatagtcagtgttatctgtgccaaaaagaaagggaatcatatacctctggaaggacacgtaagaaattgataacaaacgttgcagaagggaactgagtgacatgggcatgggtgggagcaagactttccactaggtattcgttctttcatctttgagccatgtaaatatattagctatctaacatttcaaattaaacacttggtaggccaatgttcatggcagcattgttcacaacagccaaataatggaaacaacctaaatgtccgtcaatgggtaaataaataaacacagtgtggtctagccgtaccatgcaatactaytcagcctcaaaaaggaagagaattc

SEQ ID NO: 106419 - DNA, 625 bp, Homo sapiens
ctttgtaaccaccacaggctctagctcagcaccacacacgtggcaggcattcartgatatttgtcaagttgagtgtaatttaaatgaggtcattcattcaggtctgtgccaggaaaaaaaaaaaaagtcaccttttctgagataagctggggtcacttgcataccaagtcagtccaaactgaaagtaacatcaaatgacaaataatcgtctatttcaaaactagaaaagtaatggattttgtttggaaaataagcataggaaggacgtttttccttctactcttccgtgttttcctgtattttgtaaataaatgtgtgctcattttacaataaaaataaattttcacatgagtaactcagaaaacagaaatcatattatcatttatgacattatgtccactggatactttctttcaaagtgctatgaaggcaaatatacttgtttcttcagcctgaaagaatcatttaccagtttcccgatgctatcagctaagtattccaccaaagagggaaaaatgacgcttggtccagctctgtgatagatggaagttaaacatctgaaagttcatcaacccacacgcccagctggccagcttccttgtctccagctgatccttggaattta

SEQ ID NO: 106420 - DNA, 604 bp, Homo sapiens
ctcacttgtttttccatagatgtgaagaattgatttcattccccatttaagcagtcacatagttgagattatttaatcttgccttctttttcattttaaaagtttactggaagctgtaacaaatagcagagtttataaaatgttaaataacacctgtatgtcttagctcactcaggctgctataacaaaactgggtaatttataaatgagaaatttctcatagttctagaggcctcgtgacctaattgtcacccaaagaccttacctcttaatactattgcattggggattaagtttcaacatacgaattttgtgggggatacacattcggaccatcgcactctctaacccccacttatgtcaataaccagcatccaagaagtgcctctgttggcccttccctcttccttcccagtatcctaacttttttggtattttcttcgtaagtatgtatcccttaactacatggtctagttttgttgttgcatatttttgttctggtyacttttgctcaacattgctgtaagattgagtcaacgttgtagtagctgtatttcattccttttcattgatatatgggattccattatgctgatagttcacg

SEQ ID NO: 106421 - DNA, 513 bp, Homo sapiens
acccaaattggataggaataagtaaaactatctctattcaagatgacatgaccttatatgtaggcaatgctaaagaatccacacacatacaatattattggagctaataaacaaatctagcaaagttgcataatacaaaatcaatatggaagaaaaatcagttttatttctatatgcttacaatgaacaattcaaaaacaaaattttaaaaatctcacaatagcatcaaaagaataaaatatctcggaataaatttaagcaaagaggtgcaagactggcacactgaaaactacaaaactttgctaaaagaaattaaagaagactaaataaatggaaggatatcctgtgtycatggcctggaagacttaacattgttaagatgatgataccacccaaagccatataaagattcaatgcaatccctatcaaaatcccaatagtggcttttgctgaaataaaaacagccatgtgaaaaatcatatggaatttgaaggaacccgggatcgccaaaaa

SEQ ID NO: 106422 - DNA, 358 bp, Homo sapiens
ccccactccattgctttgaggctagcagtatggctaccacatctgcagtggctccgatctctgttacaagtgttctgaggagaaagaagccacaacagaagccctttgcttatgagaagctgaaaaaaatcagtgagaactcactattaggacagttgcttacctacstcctcctctaatcatagcactggtgaattataatgtaagaaatgttcccacctaaaactgttattccctggggattggaagttaaagcttaaacatgaggagttgttttgtgggctaaggaggattgacagtggtgttctggttgccaaggcctttacacctctcccctttctcccttccctgagcttct

SEQ ID NO: 106423 - DNA, 563 bp, Homo sapiens
ccccccactccccgccccccgtcgtggctaaactgtcataaactgctgtcacttctcccctagcctttgggaatgtggctttcccttatccctccttgacatgccagccattcttaaagttcatccttgagggtggtggtggtgtttttggaactgatattcagagacaaagggatgagtaaaaaatccaacttacagaccctaaaattgkccctttgggaccttatttccctaacagtgattgcatcctaacttctcagccacttgcttttctaagaagagagtgctcagcctctgcacatagaatatcctaatcaaagcttaaacttcagtaatgtctttgctcaggcaggcgtgcaaagcaccagtgaccacctgctgtggaggatgctccccttgagttatcaagtctctcagctgttcattaattccaggaaaatgtgcaagccctcaattgctgtagcttaaacatgccctatgttagcacagctgtatataattttgaaaggtcagcatctctagtgggggtgagagaggctggggattattttcctttgggaatg

SEQ ID NO: 106424 - DNA, 541 bp, Homo sapiens
gttacagcctttaagatctaatgtctccaaggcagagaattgaaccaaaaaacaaacgacattttattttctttatttaagatttatgtgccttagtggtaaattaagaaaatttctgggtatatttaggtgccacccttgcttttgtccctacaatcttgttcctcaaagtgtggttcatggaccagcatatcagcattaccttagaacatgttagaattgcagaatctcaggccttgccccagacccgcagcatttgaatctgcattttaacaagtttttgtgtgatctgtgaacaatttcattttgagccctagctctggaggcagaccagaggctgatcctcctccacggctttctagctttgtgaccctggccaagtcacttaacgctaggggctcagttttctagtctgtaaaatgggatcacagtggcacttgttcttggaatgctgtgtgaaagaagacaatgtggcagagaagttatcacagagactggtrtaaggtattttgtcgttattgctttttgctgttactactgg

SEQ ID NO: 106425 - DNA, 561 bp, Homo sapiens
ttggttctctagttcttttaattatgatgttagagtgttagcttgagatctttctaattttttgatttgggcatttggtgctataaatttccctctttaacactgccttagatgtgtcccagagcttctggtatgccatatcttygctctcattagtttcagagaacttcttgattttgcctatgttagtcagggttctttagggtgacagaactaatgggatagatttctacatgaaggggagtttattaaggagtatcagttcacacgattacaaggtgaagtcccacaataggccatctgcaaactgaggaacaaggaagccagccggagtctcaaaacctcgaaagtaggaaagccaacagtgcagccttcagtctgtggccaaaggccagaaagcccatggcaaatcattggtataagtccaacagtccaaaagctgaagaacttggagtctgatgtttgagggcaggaagcatccagtatgggagaaagatggaagctgaagactcagcaagtctagtccttccattttcttctgcctgctttattctagccgtg

SEQ ID NO: 106426 - DNA, 629 bp, Homo sapiens
aagtcacgaacaatgaactatctgaaaaagaaatcaagaaaacatttccatttacaataattacaaaaaaaaatacttaggaataaatctaaccgggaggcaaaagatcagtataatgaaaactatagaacattgataarggaaattgaagaaaacatattggaagaaatgataatgttaaaatgttcataatacccaaagcaatccacagattcaatacaatctctaacaaaattccaatgacatatttcacagaaataggaaaaaaaatcttaaagttcatatagaaccacaaaaaacttcccaaatagtccaatcttgcgcaaaaggtacaaagttggaggcattacactacctcacttcaagctatattccaaagctatagtaactaaaaagaatctcacatcatattaaaaaatcaactaaaaatggataaaatatatggatatgatccttgcaattgtaaaaatactagaagaaaacagagaggaaaagctacatgacattggtctaggcaattatttttttgtatttgaccccaaaagttcaggtaacaaaagcaaaaatagacaaatggtattatgtcaaactaaaacaaaataaaaaaacaaacacaaaaaacccttttg

SEQ ID NO: 106427 - DNA, 629 bp, Homo sapiens
aagtcacgaacaatgaactatctgaaaaagaaatcaagaaaacatttccatttacaataattacaaaaaaaaatacttaggaataaatctaaccgggaggcaaaagatcagtataatgaaaactatagaacattgataaaggaaattgaagaaaacatattggaagaawtgataatgttaaaatgttcataatacccaaagcaatccacagattcaatacaatctctaacaaaattccaatgacatatttcacagaaataggaaaaaaaatcttaaagttcatatagaaccacaaaaaacttcccaaatagtccaatcttgcgcaaaaggtacaaagttggaggcattacactacctcacttcaagctatattccaaagctatagtaactaaaaagaatctcacatcatattaaaaaatcaactaaaaatggataaaatatatggatatgatccttgcaattgtaaaaatactagaagaaaacagagaggaaaagctacatgacattggtctaggcaattatttttttgtatttgaccccaaaagttcaggtaacaaaagcaaaaatagacaaatggtattatgtcaaactaaaacaaaataaaaaaacaaacacaaaaaacccttttg

SEQ ID NO: 106428 - DNA, 629 bp, Homo sapiens
aagtcacgaacaatgaactatctgaaaaagaaatcaagaaaacatttccatttacaataattacaaaaaaaaatacttaggaataaatctaaccgggaggcaaaagatcagtataatgaaaactatagaacattgataaaggaaattgaagaaaacatattggaagaaatgataatgttaaaatgttcataatacccaaagcaatccacagattcaatacaatctctaacaaaattccaatgacatatttcacagaaataggaaaaaaaatcttaaagttcatatagaaccacaaaaaacttcccaaatagtccaatcttgcgcaaaaggtacaaagttggaggcaytacactacctcacttcaagctatattccaaagctatagtaactaaaaagaatctcacatcatattaaaaaatcaactaaaaatggataaaatatatggatatgatccttgcaattgtaaaaatactagaagaaaacagagaggaaaagctacatgacattggtctaggcaattatttttttgtatttgaccccaaaagttcaggtaacaaaagcaaaaatagacaaatggtattatgtcaaactaaaacaaaataaaaaaacaaacacaaaaaacccttttg

SEQ ID NO: 106429 - DNA, 629 bp, Homo sapiens
aagtcacgaacaatgaactatctgaaaaagaaatcaagaaaacatttccatttacaataattacaaaaaaaaatacttaggaataaatctaaccgggaggcaaaagatcagtataatgaaaactatagaacattgataaaggaaattgaagaaaacatattggaagaaatgataatgttaaaatgttcataatacccaaagcaatccacagattcaatacaatctctaacaaaattccaatgacatatttcacagaaataggaaaaaaaatcttaaagttcatatagaaccacaaaaaacttcccaaatagtccaatcttgcgcaaaaggtacaaagttggaggcattacactacctcacttcaagctatattccaaagctatagtaactaaaaagaatctcacatcatattaaaaaatcaactaaaaatggataaaatatatggatatgatccttgcaattgtaaaaatactagaagaaaayagagaggaaaagctacatgacattggtctaggcaattatttttttgtatttgaccccaaaagttcaggtaacaaaagcaaaaatagacaaatggtattatgtcaaactaaaacaaaataaaaaaacaaacacaaaaaacccttttg

SEQ ID NO: 106430 - DNA, 602 bp, Homo sapiens
tttccttgctatttccaccacctctgcagttacctccttaaaatcttgaacccctcaaactcgtctataagggttgaaaccaatttctttcaaactcccgttaatgctgatattttgaccygctctcacgaaccacaaatgtggctaatggcatttagaatggtgtatcctttccagaaagttttctatgtactttctcagatttatcagtggaatcactatctggggaagctacaatcttacaaatatatttcttaaataataagacttgaaagttgaaattactctataatctaagggctgtagaatggatgttgtgttagtagctttgaaaacaacatgaacctcctgtacatcaccatcggagctcttgggtgaccaggtacattgacagagagcaataattttttgaaaggaatctttttttcagagcagtaggtctcaacagtgaggttgaatattgttattcagtagtccatgtgtaaacatatttgctgttatccagtctttgttgttccatttctaaagcacagcagggtaggcttagcataattcttaaggaccctagcatttttagaatggtaaatgagcactggcttcaa

SEQ ID NO: 106431 - DNA, 602 bp, Homo sapiens
tttccttgctatttccaccacctctgcagttacctccttaaaatcttgaacccctcaaactcgtctataagggttgaaaccaatttctttcaaactcccgttaatgctgatattttgacctgctctcacgaaccacaaatgtggctaatggcatttagaatggtgtatcctttccagaaagttttctatgtactttctcagatttatcagtggaatcactatctggggaagctacaatcttacaaatatatttcttaaataataagacttgaaagttgaaattactctataatctaagggctgtagaatggatgttgtgttagtagctttgaaaacaacatgaacctcctgtacatcaccatcggagctcttgggtgaccaggtacattgacagagagcaataatwttttgaaaggaatctttttttcagagcagtaggtctcaacagtgaggttgaatattgttattcagtagtccatgtgtaaacatatttgctgttatccagtctttgttgttccatttctaaagcacagcagggtaggcttagcataattcttaaggaccctagcatttttagaatggtaaatgagcactggcttcaa

SEQ ID NO: 106432 - DNA, 612 bp, Homo sapiens
cataaaagctcttattggaaagaaatgtaaagcactccaaaagctaaacaaatagaaaggaagcaaaaatagcctacatatcttttgagaacaacatgctcactgtttcttttgtttgttcatgttcctccatctgactgttctttaggaaacttcacttactcaacccatcctcagctctagtaaatttaatattttgatcctaccgwtacttatttatttctatcccaagcttcctatatttttgctttttacctgttggcattttcacaaccatgtttcagcagtttgggtatgtcaattctttaaaagtctattcggaatactcgtttcttctgtctaaacctatcttgctttgctagtacccctgccattagatctgccagaaatcttaaagtttatagtgtaacagcatgcacaagcttctctcttgactttatatgtgctttgttttgtactccattcagaacacgaacagcctctaacaaaggcttttagttgtctctgcctttagtggccatcattgctcctgttcacttggcactagctggtcagtcagcatgtgctcgatgagtcaactctgttacgaagtggattgctgacagccaatcc

SEQ ID NO: 106433 - DNA, 614 bp, Homo sapiens
gtgccagttaaggcctcacccagctcccacataaaccaaaggaccggtcttgcacccaccttcccccgcccaaacccctccaaaacagccccaagtctgtttccaggtggtggacgagatggactttakaacttgccccaggctaccacctcctagctgcaaaagaaaaaggcttggttcttcccacacctatggagtctgcacactggattcgcaccctcccctgaggtctggtcaggaggcttcttgacccattcaaataattgttacaaagttcagctggagattaacttctccctgtggtgtttcctgcccccctcaccccactcctctggccaccgtcctgttggatccctgtgattccaggcaggaatggcctgctttgggaactagcgagctcccagggtccttctgctgcttcctctacccctgtatttcgctcagctctctaaactgactcagcttcaagtaaggtcagaaacttctcccacaaacagaccttcagttattgcagtggggggatgtgtatttggaagaggaagctctccctttcccacttccacggcaggagcactcatagtgtttggactgtttcctgggtcctgcaggagccg

SEQ ID NO: 106434 - DNA, 461 bp, Homo sapiens
aggatagagaggaaaatataccmccatagaggaagctgacagtcataattgtactaatgcaggtatagacaaaatgccctctggagaaagagaagaattctcattggaggactattaaatcacgtggatgtggcagtattgattgttaacacttgggtttagcattacagcaaaaataactctaataaatcaaacccaacctgagaaaaaacctgagaccatctggcagggatagagaatactaatagatggaattaagatttctgctataaggtacccactttaggctgtggggaatgtgtattattacgctaaagtaaccctattatatcttttattgtcctaaatacataattattttctaaatgtatgctaaacatataagtgttttacttttcttagagttacttagagcactgcaaaactagctattccttatgatactctgacgaggcattact

SEQ ID NO: 106435 - DNA, 571 bp, Homo sapiens
taatcttcctaataacccattatgacatasaactgtattatcttaaacaactgaggagcagaatggttaaatgacttgtctatggaagaaatgctatgaacctgagtagtgagaacactgattgaatgtaggcagtctggctcctgaatccatgctccaaaacagctcttatactgtagctagcacaggatatatttcaatatagttttcaatgtattcacagcctattaatagacaatacccatgacactagaaaataattctgctgcttttagattattttgtaggtgcttacagcatgcacacacacacacatacacacacactgtaccctacctcactgggcaaatcacctcacttattcgtgcttcagcttcctctggtagtcaatgaggacagagtagttgcaaggattaaatacgtgcatacatgaaaatatttagaggagtggttgggatatactaggacctattatggtttttgttgttacctgaaataaaaagtcagagtatgttatacgatagatgctccttttatattttgcatttttatggtttgtaacaataattag

SEQ ID NO: 106436 - DNA, 571 bp, Homo sapiens
taatcttcctaataacccattatgacatagaactgtattatcttaaacaactgaggagcagaatggttaaatgacttgtctatggaagaaatgctatgaacctgagtagtgagaacactgattgaatgtaggcartctggctcctgaatccatgctccaaaacagctcttatactgtagctagcacaggatatatttcaatatagttttcaatgtattcacagcctattaatagacaatacccatgacactagaaaataattctgctgcttttagattattttgtaggtgcttacagcatgcacacacacacacatacacacacactgtaccctacctcactgggcaaatcacctcacttattcgtgcttcagcttcctctggtagtcaatgaggacagagtagttgcaaggattaaatacgtgcatacatgaaaatatttagaggagtggttgggatatactaggacctattatggtttttgttgttacctgaaataaaaagtcagagtatgttatacgatagatgctccttttatattttgcatttttatggtttgtaacaataattag

SEQ ID NO: 106437 - DNA, 571 bp, Homo sapiens
taatcttcctaataacccattatgacatagaactgtattatcttaaacaactgaggagcagaatggttaaatgacttgtctatggaagaaatgctatgaacctgagtagtgagaacactgattgaatgtaggcagtctggctcctgaatccatgctccaaaacagctcttatactgtagctagcacaggatatatttcaatatagttttyaatgtattcacagcctattaatagacaatacccatgacactagaaaataattctgctgcttttagattattttgtaggtgcttacagcatgcacacacacacacatacacacacactgtaccctacctcactgggcaaatcacctcacttattcgtgcttcagcttcctctggtagtcaatgaggacagagtagttgcaaggattaaatacgtgcatacatgaaaatatttagaggagtggttgggatatactaggacctattatggtttttgttgttacctgaaataaaaagtcagagtatgttatacgatagatgctccttttatattttgcatttttatggtttgtaacaataattag

SEQ ID NO: 106438 - DNA, 571 bp, Homo sapiens
taatcttcctaataacccattatgacatagaactgtattatcttaaacaactgaggagcagaatggttaaatgacttgtctatggaagaaatgctatgaacctgagtagtgagaacactgattgaatgtaggcagtctggctcctgaatccatgctccaaaacagctcttatactgtagctagcacaggatatatttcaatatagttttcaatgtattcacagcctattaatagacaatacccatgacactagaaaataattctgctgcttttagattattttgtaggtgcttacagcatgcacacacacacacatacacacacactgtaccctacctcactgggcaaatcacctcacttattcgtgcttcagcttcctctggtagtcartgaggacagagtagttgcaaggattaaatacgtgcatacatgaaaatatttagaggagtggttgggatatactaggacctattatggtttttgttgttacctgaaataaaaagtcagagtatgttatacgatagatgctccttttatattttgcatttttatggtttgtaacaataattag

SEQ ID NO: 106439 - DNA, 649 bp, Homo sapiens
cttgccttctttcacacagtctacggtttattcttctatatacgaatgattgttgtattagtttcttaatgttgctgtatcaatttaccacagatttagtggtttaaaacaacacaaatttactatcatacagtctggaggtcagaaatgcgacactgattttgtggcgctaaaatcaaggtttcagcagtactatgtttcttcaggaagctctgcaggaaaattcatttccttgcctttcccacttctaaggtccatctgcattccttggctccgaccccttactccatcctcaaagccagcagtttagcacctttaaattctcccttcctctctgacctctgcttccatcatcatattgtgctctctgactttattttctcaagggaaagaaagaggcaaagagtcagagagaggcccaccccactgatccaaaacaatctccccttttcaaaatccttaacttaatmacatgtacaatatttcatttgccatgcaaggtaatatattcacaggttacaggggttagaatgtggccatcaattgggaaccattattctgtctaccagaattgtgttctgatatcttctctgacaatgtctgatttaaatgcaaacctactaaagggctagggcctaaaatatatcat

SEQ ID NO: 106440 - DNA, 632 bp, Homo sapiens
gcttcctgttgttagctcagtcaaagtctgctttaggtacagaaagtcacttccctaataactatctttcttctccttgcttctggagaacccatgctacaaaatgtgttatcaacctgagaatgttcatagctcctttttttttcagcagttcccaacaggtcaagtttagatgccagttatggggaccactgttgcagtctagggtggaggtctgtcagccaggtgaagtagaaatacaaactgaagcaagagataaattcaagtcatgaatatgtagtctacatggtcatagagaaggtgaagacaggagttttcaaatagagagagtagagggtcaaatgattccatgaactataagtaaaggcatcagtagcaaagcttgactgggatatccaatatgaactttgctaaaaagttgtaaatatatattacaatgtaaaaatctacatatttcataagtaaagtacagcaaagctgccatagtgtttagaggatatcagtttagattgggtagaaggcatacttatacagattgatctgaractacaatgttgagggtatttattctagtttctttcttctctggattctcaaagccttaccaaacaaactaattttgagctaaatgt

SEQ ID NO: 106441 - DNA, 572 bp, Homo sapiens
actgtatcaaatattttctcagaaagtctcaaagagacaaaaatacaaacactgcatggaatccttggataacctacaatcagaygcctattttctcacagctggaaaaacttggtctttctcttttattttgaatattttcaaacaaaagcaaacttatcagtgttatggcaaaaggcagagctatatgcatttggctctgaatgattgctgttatagataacaatatcagtgagctagagaagtggaatggaactgtagtacttaaacttttgttttctggatggtaagatgaagctactgtctcaccaacacagaaatgtgaacttcgaagtttttgtttgtttgtttgtttgttttttgagatggagtttcgctcttgttgcccaggctggagtgcaatggcacgatctcaactcactgcaacctctgcctcccaggttcaagcgattctcctggctcagcctcccgagtagctgggattacaggcatgtgccaccacacccggctaattttgtatttttagtggagacggggtttctccatgttggtcaggctggtctcgaactgga

SEQ ID NO: 106442 - DNA, 606 bp, Homo sapiens
tatatagataggaatgcaagtttccaaaatcttgtactcctgaagcaaacacctagcttacttggtgatgtgtttaaaaatctttactattgatgatattagggaaaagcaagagaaaagatatgactatcctaagagtctcacatttttagttctattggaatgaatgtaaaagtgattgttttgcctttgccagcagtcttgtggtctcaagagtcacagaggatgtggagtatgaactttggggtgtggaattccctacgtagtaattacataaataatttttctttgctttgaccatgtaatgtattagacattaggtttcttttagacacaatgttttatcctcatataaactgttaaagctattaaccatttaactggtatttatttactattgacttcacactgttttaagtgcttgggataaatcagtgaggagaagaaagatcctagccatagtgaaatgtaaacattgtataaggaagagacaatcaacataataaagaagcaaattatgtgtgtacacacacacacacacacayataaaacacataagtaagtgtatttagctaattatttcattatagttaggcattgcagcat

SEQ ID NO: 106443 - DNA, 534 bp, Homo sapiens
ggaaagtccttttgcttaactttattcccccacagtatgtttgtagtttatcactgcaaccctccttcaacattatcatttcaaggcaaggtaastaagaagctccagcattgtgaaaagagtactaactatatattggaattacgtgagtgtataaatcctagaagtgtgcaggtatatttcatatatttgtatatttatttatacatatgtaactaaggtacctaatttttaagcttcatttgtaaattttgggaactaatgattacacaaaatattgtacatgtgtagaatagacattcatccaggtaaaggttagaggtatgaagtaatatacaggaatagaaaaaatggacttttaaacattaaaaataatctccttcactttttccattaatgtaaaattaaaattctataactagaaaaggtactagattcttcgaatttaatattcatcttgaagataagtttttacactgtccttgctaggagtgagtactggggaacaacttcaaagcatattcaacacttgtg

SEQ ID NO: 106444 - DNA, 584 bp, Homo sapiens
cacagccaaatcatatcagcaggagtacatctctttgatggtttttgttatgtattgacaaagattctttgcttggccaactttggtcaggcttctgaccaaaggcccatgtgtgcacttggaaccatcaaatgggttctttttgcctgctgctcagatagagacaattttccatgacaggggaaatacaataaggagtttagtttttcacacatagagctggctaaagaggagastagaattttattattattcaaattagcctccctgaaaatttggagactagggctcttcaaagatagtttttggaaaagatactggctagtgagtgggtgctgctgattggttgtgggagggggtatagctataggagtgtggaaaaaggtcttcatgcatgctgagtctacgcctgggtgaagccacaggactggttggcaaatttgagtggagaaagacatctcaaaaggccaatcttatgttctacaatagtgatgttctctgcaggagtaattggagaagttgcaaatcttgtgatctctggaataatagctgctaatcattgatgtctatacttaggagaattc

SEQ ID NO: 106445 - DNA, 638 bp, Homo sapiens
gggtttcttggaaagtatggtaagaatttaatatatccgatcataatttctrggtaccacaagtcccaagacaaacccttatttaacaatggtaattatcctgtagtgccagcactgtaaaaatcagcggagaacagagacaaacaggtcatcagatctgaaaaactcctagaaaagtcaaaggaagaaccacagaagagaaataagataatcagatcacagccaagagtcaaatatttcataaatgccaaggtcaaagcaaacatagacctaggaagagatacaacaaagtcagagccaaagggtgcaggaagaagacagacactgtactgtcgattgggaaacatttaggctggcaaaaagttaaaaattgcaaaaggctagtaggcaccagggtgaaatagttttaggaagccatggggataagataaaactttagaattaaatttctaggttcctttttctcataggaatgggtgctaggctggcctgtgggcagttgagaggcaatgattatttttcttgtggctgagtttacttctggcatttgccccacacaataactacatattctagatcctaactgaatgagtcaggttggactttacagagaaaaaattgagatccaaagacagaga

SEQ ID NO: 106446 - DNA, 638 bp, Homo sapiens
gggtttcttggaaagtatggtaagaatttaatatatccgatcataatttctaggtaccacaagtcccaagacaaacccttatttaacaatggtaattatcctgtagtgccagcactgtaaaaatcagcrgagaacagagacaaacaggtcatcagatctgaaaaactcctagaaaagtcaaaggaagaaccacagaagagaaataagataatcagatcacagccaagagtcaaatatttcataaatgccaaggtcaaagcaaacatagacctaggaagagatacaacaaagtcagagccaaagggtgcaggaagaagacagacactgtactgtcgattgggaaacatttaggctggcaaaaagttaaaaattgcaaaaggctagtaggcaccagggtgaaatagttttaggaagccatggggataagataaaactttagaattaaatttctaggttcctttttctcataggaatgggtgctaggctggcctgtgggcagttgagaggcaatgattatttttcttgtggctgagtttacttctggcatttgccccacacaataactacatattctagatcctaactgaatgagtcaggttggactttacagagaaaaaattgagatccaaagacagaga

SEQ ID NO: 106447 - DNA, 193 bp, Homo sapiens
agttgtcacattcttcaccctctctgctagyaaaggtaggttggaacacatttgtagaatatttgttgaatatttggtttctaagaaattgctattattatttttatgtcattaaacattttataccaatatacagaatatacagactagctttagtgaattgttttcaattaaatttatgattgaaataaca

SEQ ID NO: 106448 - DNA, 620 bp, Homo sapiens
gcaagcttcatcctggaccagaagtctggtttttcagccttcaggctgtttcaggtttgaaggcagggttctgctggagtggggggtacctaagctgcctctatcaataccaacctggacaacaagagctgcccatcctcaaggcacagttcttagcacactgttaccagtggaagagacctgaattacctaagtcactgttggcctatctgtatgggtctgtagcaacttcagtccttgcctcctcagtagaaagaattcaactgaggggcataaagcagaaaaagagatcaaggcaagttccagagaaggaatggaagtttattttaaaaggcctcagaacaggaaagaaaggaaaatttgcttgagagggacctaagtgggcacgcgaagattgaagagagaaggttgagtgccccatttaactgggatcctaggacttttatagacttgactctttcccatgattcttccctttgggtgagcttcctgcatgtatagtgctttccttacccttttccctttccagttgtaaaaagtaaagtagaggttcctcttcaaaaactttcctttccatctaaktaagaataaataataacttctcttagaagcaaaattta

SEQ ID NO: 106449 - DNA, 433 bp, Homo sapiens
ttgcctgctgccatgtgagacgagagtttgctcctcattcaccttctgccaggattgtgagccctccccagmcatgtggaactgagtccattaaacctgtttcctctataaattacccagtttcgggtatgtatttattagcagcgcgagaacagactaacacatttggaaggccttcccgagaaaaataagtacaaacaagcccagactgcaaagattataataaacaattaactcttcaatgcccagacatcaaagaacatccataagcatcacagccatccaggaaaacatgacctcaccaaacaaactaactaaggtaatagtgactaattctggaatgacagagatacgtgacttttcaggcagagaatttaaaatagttgttttgagttagcgcaacaaaatttaagataacacagagaaggaattc

SEQ ID NO: 106450 - DNA, 599 bp, Homo sapiens
caacctgtcggtggatctaccattctgggatctggaggacagtggccctcttctcacagctccaccaggcagtgccccaatggggactctgtgcaggggctaccccacattccccttccacagtgccctagcagaggttctccatgagggctcctcctctgcagcacacctcttcctgaatatccaggcatttccatacatcctctgaaatctaggtggaggtttccaaaccttaattcttgacttctgcgcacctgcaggcacaacaccatgtggaagctgccaaggcttggggcttgcactctctgaaaccacagcctgagcttggccccttttagccatggctagagtggctgggatgcagggcaccaggtccctaggctgcacacagcagggkggcctggacccggcccaggaaaccatttttcccttctagttctcctgacctgtgatggcaggggcttccatgaaggtctctgacatgccctggagacattttccccattgtctggctcctcattacttatgcaaatttatgcagcaagcttgaatgtctcctcagaaaaatggggtttttatttctattgcatcatcaggct

SEQ ID NO: 106451 - DNA, 585 bp, Homo sapiens
cagggggttttaagagtagattgaaaaaggcttacaatgttgygaagaaagcagcacttaaccataggaagtccatagccccaaataccagtgtgtgtggtgcagccaagccaggaaagggcaaaaaatgatgtcagtctgggctggagtcggtggggaggtgagacctgagatgttgtcaagaaggatggataaaattgagcagtggaagaatacttggcaggccttccagagagcaagggaaataatattggcattgaggaaatggctgggctctggagttccagatactttgattactgcccaaactgagtgtggacttggtacagttggtggggttctcagttttgtcatttattcactgaatgagtttaggcaggtgaattcccctccctgaaatgtggctttctcattcttaaaatgaaggcaataattttgcccttgactggcagttgtgagattttaatgagtcaatggatagaacacatacagcccaatgcctagcacataataaaaacttaacaagtttattggttttgaccaaagagtaactgagctgcatgtgaatgaggtggcttgcctgca

SEQ ID NO: 106452 - DNA, 610 bp, Homo sapiens
gtagagctgatcatgtggctcccttgtttacaacattgagtgattcttcatcatgttagccgggctgacttggctcttcatggtcgggctcctgcttgcatctcttgctacctctaccctttctcatcactctggcttctaagcattacaaattcattctttttccctaagcctatcttcatttgctctccttcctgttgatggaatgcctccctctgtcttattcacctttagatccagcttaagcatcactcagtctctaaagattccctgattctttcaccaggaagcattctttcctttgtgctttctttgtatcggtgattatcattgcacaaaaggattttttactgcctttatttcttcgcactatctatcttgccaaccaaaatgtgagctctgaggrcatggagtggtctctctctcatgtgtgctcatgcacacatacatgtgcatatgcacccccccacacacacagttaattttaattaacatttttttggttctgtatcagtgcctttcacaatgtctgacacaaggtagtttattagttaatgtgcattgaataaatgaagaaataataaatggaaagctatttcattggttgttt

SEQ ID NO: 106453 - DNA, 621 bp, Homo sapiens
gtacattcaaatataatccccatctttaagtgtgtaactgaccatttcttgatgtgactatgaaccctctcctagcttagttgggattactttccctgatgtgccacaggccatcttgagcaaaatgttgcgtaggtgcagccctatcctgttagtgtcatttataaatagtgtgtcatttataaatagtggtatggatttggattttcacaagggccttcccttaaggagtttaatgtgacattttcatgcaggctgttaggaaaaaaaatttttttttttttgaggtggagtcttrctctgtcgcccaagctgaagtgcagtggcgctatctcggctcactgcaagctccaccacccaggttcatgccattctcctgcctcagcttcccgagtagctgggattacaggcgcccactaccacacctggctaattttttgtatttttagtagagacagggtttcactgtgttagccagcatgatcttgatctcctgaccttgtgatccgcctgcctcagcctctcaaagtgttaggattacaggcgtgagacactgcgcccggccagaaaaagatttttagaatggtgtgctttggaacttcttgaatcacctggtggcag

SEQ ID NO: 106454 - DNA, 599 bp, Homo sapiens
gtcaggagatcctcagaaatgcaaattacccacttgaaataagaaggcacctattgttcagccttgattgcctctgcaggcctacaggcaaggaaaaaaatatatatttgaagaagaaaggagtctaagtaaactgcacacatagaagaaaaattaaaaatgaagccaaactccaacagggcttccatttaccatcgaagtgagaagagattatagagaaaaaccatttgtgattctcaatccttttaactttgtgtkgatttttgttgtctcctattttcttataggtgttgataaatctaaatatatattacagtagttccccttatcctagggagatatgttccaagacccctagtgcatgtgtggggtaattagagtgaacatgttgggtaattagagtgtatgtgtggggtaattcaagtaattacctcagtggacccctgaaaccacagatagtaaaaaacccaactgctgtcaatcagaacatgtttctgttcatgtcttccacaaatttaatgttttttccatcctaagcagttatcatgcgctacagccatacattttgcagtttcatgtgcaacagcaaaactagcata

SEQ ID NO: 106455 - DNA, 590 bp, Homo sapiens
gataaatttctagaagaaacattcctgtgagttgcagaagccttggtaaaatgtgtttaatccagtcaggagatcctcagaaatgcaaattacccacttgaaataagaaggcacctattgttcagccttgattgcctctgcaggcctacaggcaaggaaaaaaatatatatttgaagaagaaaggagtctaagtaaactgcacacatagaagaaaaattaaaaatgaagccaaactccaacagggcttccatttaccatcgaagtgagaagagattatagagaaaaaccatttgtgattctcaatccttttaactttgtgtggatttttgttgtctcctattttcttataggtgttgataaatctaaatatatattacagtagttccccttatcctagggagatatgttccaagacccctagtgcatgtgtggggtaattagagtgaacatgttgggtaattagagtgtatgtgtggggtaattcaagtaattacctcagtggacscctgaaaccacagatagtaaaaaacccaactgctgtcaatcagaacatgtttctgttcatgtcttccacaaatttaatgttttt

SEQ ID NO: 106456 - DNA, 610 bp, Homo sapiens
accaatgaatgtgccatgaaccaagggttatgagcaatccaattctgtgaacaagaaaaatcaaaagactagatgaagagatgaaggagcccaaggaatataaggatcttctttcaagcaactagactttgaaaggaaagaacgagggagatggagaagaatgtcaggggagatggattaaaagaggcttttaactagtagaactctaagaaaatttgctaaaaggaaagaggtagtagagagggaagatggaaaattttaaattgagagaaattaattggttgagtgatatcacagagttaggagggaatccagagtatagatgaaaagattagctttgcacatagggaaggacktctttttactgctccaagaggaaaagacataaaaataagtgggtttacatataaatttatgatggtggcaagtgaggagcttagaaattcctacttcattgcatttaaatttattttcctagtaaaacacagaaaaggtcatctgttgagcacgtgtgtgtggagtaggaggtatcagtgatggtgggatgaggaagagatatagaaggcttaagagtggtgaaaatttgaaatagctgctgaaagagaaggag

SEQ ID NO: 106457 - DNA, 594 bp, Homo sapiens
actgacctgcacagccttgggacactgctactcatatcccagctgctctggcttcagcctcagctcaaaggcgtccaggtacagctttagtcactactccaggggtacaagccattagctgtggtggcttccccatggttttaagtctgtaggcatgcagagtataagagtgaagcacgcttagcatcctccacttggattttagaagatttatgagaaaggatggatatccasgcagaagcctgctgcaggggtggagccctcacagagaacctctactagggaagaacaaatgggaaattttgggttggaagccccagagaatccccactagggcactgcctagtgaagatatgggaagggggccagtgtcccccagaccccaaaatggtagattcactggcagcttgcaacctacacctggaaaagctgcaggcactcaacaacctatgagagcagtctttgcagctgaactccacaaagctgcaggagtggagctgcccatgttcttgtgggcccagcccctgcatcagcatgccttagatgtgacacatggagtcaaaggatattcttttggagctttaagatttaatg

SEQ ID NO: 106458 - DNA, 567 bp, Homo sapiens
ggggtatatgtaataatgaaaaggccttattattgcagagtatctatgtgacagggattcaggagtggttgagatgtgtggttctggtacagtgtttctcataaagttgcagtcaaggtaccagctgggactgtcagtctgactgaagctagaggatttgtctacaagctggcgcattcacakgaggaggcctgggtttcttgacggctgctggaaatagacctctgttcctgaacacatgggtctttccatagagctgctggagtggcttcccccagagagaatgaccccagcagcagaaagaacaaggtggaagttacactgtcattttacaatctacatttcacagttgttctccatcatatctaccgtgttcttcttgttggaaggtagtcactaaatattgcccgcagagagaattaaggcttcaccagagggaggagtttcaaataatttctgggcatatactaaaccatcacgagttatttttatcatttcacagactgaccaaactaatttacttaggcatgatttctagtcattttttgtactataatatgtcagagc

SEQ ID NO: 106459 - DNA, 567 bp, Homo sapiens
ggggtatatgtaataatgaaaaggccttattattgcagagtatctatgtgacagggattcaggagtggttgagatgtgtggttctggtacagtgtttctcataaagttgcagtcaaggtaccagctgggactgtcagtctgactgaagctagaggatttgtctacaagctggcgcattcacatgaggaggcctgggtttcttgacggctgctggaaatagacctctgttcctgaacacatgggtctttccatagagctgctggagtggcttcccccagagagaatgaccccagcagcagaaagaacaaggtggaagttacactgtcattttacaatctacatttcacagttgttctccatcatatctaccgtgttcttcttgttggaaggtagtcactaaatattgcccgcagagagaattaaggcttcaccagagggaggagtttcaaataatttctgggcatatactaaaccatcacgagttattyttatcatttcacagactgaccaaactaatttacttaggcatgatttctagtcattttttgtactataatatgtcagagc

SEQ ID NO: 106460 - DNA, 510 bp, Homo sapiens
aattcattaattttggcaaaaggtatcttggtctacctaattcagcttctccatttaacagtgaggaatctgaggcaggttcacattatgattttagtgtgcatttttgctttggggaggcctyttcatttataaacaatattaaaaattatatcttacaatgtcaaattaaaaatatagacttgggtaagcaaagacttttattctaaaggagtattgcaatggagagaaagtgacttgcagtaggaggaaggggactattgcaattagaagaaaactttgatcctgagatatacaaacctctcaaaggttaggcagaaaaggtcttttcttttctaggaaggaataaacaatactggaagtaacaggatgtcgaaaagtggaatgagttagggtgaatgatcttacagtagaaaagagaaaattctaccctatgatcacccgattttcaggaggggctcttaaggaggggttgtatcatggctcaggcaaagggcaggtcaaagctca

SEQ ID NO: 106461 - DNA, 317 bp, Homo sapiens
taagttagatatctcggagacctctttgcctactgtctttccctcacattctatacttaatcgtttacatttatattttattgatgtctgcattttactgmtgcctgttacctgaggtgtaatacagatttcagctggtttagaactagattctaatgtggctaatacgtggagctagttttttcttctcatcttatctccatgacctctaattgttctgacagactgattttcaggaaaattgaggacactgatggtcgtaaagcatgaactctcttcacatttggagttcagacagggctgccaaattgagagtt

SEQ ID NO: 106462 - DNA, 618 bp, Homo sapiens
gtaacttttaattaaaaaaatgtttaattcaaagaaaacaattttttttaaaaaatgggacaaatagcacaaaataaattagtagaataaatctgaataaaatagtcattccaattacatattatcatatgtatactaatcaaaataaggttggtatgactatattatttttatatatgtatagttaataaaattttaaggcaaaaagccttggccccaatagaaaggtttataacttattaataaaggtttagttactggcaagagatgagcccagagaagtagggcaccaggacttggaagccgctaggtgagtgcttctcaatcctgagcgtgcaccagaatcacctgcagagtttgtttaattagagatttctgggccccactaccgaaaatacagatgtagtaggtctgggctaggktctagtaacttgcgtttccaaagcattcctagactatgcgggtactgctggcccagagcccatatttgaagtagcaagtacccacatttgggagcgtgagagaaaatgttgggtcaagagttacgggaaatttattagtaacgatatcattcattgagataatgaaccaaagagagaagatgctatgcttcatatt

SEQ ID NO: 106463 - DNA, 589 bp, Homo sapiens
tcctgtggcccagaggggctcattcattcggttaggggggtgcataggattctatttttgtttgaatgtccctttaatcatcacccaaactatgtcttttttcccttttttttytcacgttgaaaaattattctttgttataatctcctacttaaaagatttttgttgttgttacaaatggcacattccaggtacagtccaatagaaagtagggttaagatcatacctttaatgaatgtgtctggaaaagctttcatctcttgcttcttgtgacgctatactctcctggtttttctcctacttccctcaccaccacttctccgtttcctttcaggttccaccttttctacttgacctcaaaatgatggattgcttctgggcggagccaagagttgtctgtttatttattgtcattccataggtggtttctcttagtcctgtggatttaagtaccgtgtgatattgatgaatctaaatttctacacctctgatctcttctattagtttcaaacttgtatatacaatagcctacttgaaacctcaattaaatgtctgataagcaactcacatttaatatgtagaaatagga

SEQ ID NO: 106464 - DNA, 589 bp, Homo sapiens
tcctgtggcccagaggggctcattcattcggttaggggggtgcataggattctatttttgtttgaatgtccctttaatcatcacccaaactatgtcttttttcccttttttttttcacgttgaaaaattattctttgttayaatctcctacttaaaagatttttgttgttgttacaaatggcacattccaggtacagtccaatagaaagtagggttaagatcatacctttaatgaatgtgtctggaaaagctttcatctcttgcttcttgtgacgctatactctcctggtttttctcctacttccctcaccaccacttctccgtttcctttcaggttccaccttttctacttgacctcaaaatgatggattgcttctgggcggagccaagagttgtctgtttatttattgtcattccataggtggtttctcttagtcctgtggatttaagtaccgtgtgatattgatgaatctaaatttctacacctctgatctcttctattagtttcaaacttgtatatacaatagcctacttgaaacctcaattaaatgtctgataagcaactcacatttaatatgtagaaatagga

SEQ ID NO: 106465 - DNA, 589 bp, Homo sapiens
tcctgtggcccagaggggctcattcattcggttaggggggtgcataggattctatttttgtttgaatgtccctttaatcatcacccaaactatgtcttttttcccttttttttttcacgttgaaaaattattctttgttataatctcctacttaaaagatttttgttgttgttacaaatggcacattccaggtacagtccaatagaaagtagggttaagatcatacctttaatgaatgtgtctggaaaagctttcatctcttgcttcttgtgacgctatactctcctggtttttctcctacttccctcaccaccacttctccgtttcctttcaggttccaccttttctacttgacctcaaaatgatggattgcttctgggcggagycaagagttgtctgtttatttattgtcattccataggtggtttctcttagtcctgtggatttaagtaccgtgtgatattgatgaatctaaatttctacacctctgatctcttctattagtttcaaacttgtatatacaatagcctacttgaaacctcaattaaatgtctgataagcaactcacatttaatatgtagaaatagga

SEQ ID NO: 106466 - DNA, 557 bp, Homo sapiens
attgttaactgatatcatctccagaggactaataagtcaggcaaactttctccctctccatttcctgagttacctcaagagagcttagaaaggctaaacacctacctaatagttttcctttgttccttacattctaagccaatgatatctgtattcacatctggggttgtcagttgagagacaggtataacccctagcaaaggtggctagagatgagatatgtaaagcatgtatttatgcatcttgttctctggtatatacatttagcatctttttaggtttagcayaggatgccagaatccagttattcctatacatgtatgtcattctttaaaacttttgagtacagtcatgtactgcataacaatgttacagtcaacagtagatcacatatgcaacagtggtgtcataggattatattactatatttttctaaaccttttctatgtttagatacacaaatgccactgtgttacaactgcatatggtattcagtacagtaacatgctgtacaggtttgtagcctagaagcaataggctataggatatagcctagg

SEQ ID NO: 106467 - DNA, 394 bp, Homo sapiens
cacactcctcctgcatgggctctagagaagccacccagcccccatcctcaccctgtsccctgatgttgactgttctgtcacaaactagcaatatgcttaatataaaactgaatctgccatataattgtaaacaaaaagaagggctgcgagtctgttattctaaactaaggctgtcatttgtgatagttgttcctcaacatttaactggcttatatttaataatcttgttttttatagcagcttaatccatccagttagcatgcacttagcaatcagtttatcttggatggaactattccaacgataaatccttgtgctgttcagcaagttctctccttacacctaggtctgaggggtctctgacaggagccctgtgcatgagaggactggtatt

SEQ ID NO: 106468 - DNA, 394 bp, Homo sapiens
cacactcctcctgcatgggctctagagaagccacccagcccccatcctcaccctgtcccctgatgttgactgttctgtcacaaactagcaatatgcttaatataaaactgaatctgccayataattgtaaacaaaaagaagggctgcgagtctgttattctaaactaaggctgtcatttgtgatagttgttcctcaacatttaactggcttatatttaataatcttgttttttatagcagcttaatccatccagttagcatgcacttagcaatcagtttatcttggatggaactattccaacgataaatccttgtgctgttcagcaagttctctccttacacctaggtctgaggggtctctgacaggagccctgtgcatgagaggactggtatt

SEQ ID NO: 106469 - DNA, 394 bp, Homo sapiens
cacactcctcctgcatgggctctagagaagccacccagcccccatcctcaccctgtcccctgatgttgactgttctgtcacaaactagcaatatgcttaatataaaactgaatctgccatataattgtaaacaaaaagaagggctgcgagtctgttattctaaactaaggctgtcatttgtgatagttgttcctcaacatttaactggcttatatttaataatcttgttttttatagcagcttaatccatccagttarcatgcacttagcaatcagtttatcttggatggaactattccaacgataaatccttgtgctgttcagcaagttctctccttacacctaggtctgaggggtctctgacaggagccctgtgcatgagaggactggtatt

SEQ ID NO: 106470 - DNA, 394 bp, Homo sapiens
cacactcctcctgcatgggctctagagaagccacccagcccccatcctcaccctgtcccctgatgttgactgttctgtcacaaactagcaatatgcttaatataaaactgaatctgccatataattgtaaacaaaaagaagggctgcgagtctgttattctaaactaaggctgtcatttgtgatagttgttcctcaacatttaactggcttatatttaataatcttgttttttatagcagcttaatccatccagttagcatgcacttagcaatcagtttatcttggatggaactattccaacgayaaatccttgtgctgttcagcaagttctctccttacacctaggtctgaggggtctctgacaggagccctgtgcatgagaggactggtatt

SEQ ID NO: 106471 - DNA, 297 bp, Homo sapiens
atcttgcatcagcatgtatttaaaagccattaagcatcttgattagtttggaacatggtataaagactgttacattactggttgctgcagctgaatacyggttgcaatatttgtcacagtaaaatgcaccaatcagaaaatgtgggaaaattattatacacttcagtggttgatttggcctaggtattggacataatgagagtcatttaaagaaaagtattcaaagggttagatactatagaagggatagcagttcagctgtggtagatatgaccacaaaataaagcgtggaatttc

SEQ ID NO: 106472 - DNA, 297 bp, Homo sapiens
atcttgcatcagcatgtatttaaaagccattaagcatcttgattagtttggaacatggtataaagactgttacattactggttgctgcagctgaatactggttgcaatatttgtcacagtaaaatgcaccaatcagaaaatgtgggaaaattattatacacttcagtggttgatttggcctaggtattggacataatgagagtcatttaaagaaaagtattcaaagggttagatactatagaagggatagcagttcagctgtggtagayatgaccacaaaataaagcgtggaatttc

SEQ ID NO: 106473 - DNA, 644 bp, Homo sapiens
ggcctcagaatcagcctcaaagaaaaaatttttccctgaccttcccctgccctcctatctctaagtcccattctcccccaaagctagacatggaaattagaatccttcttccccaaggtgrgttacagaaaacagaatcccttttccccaaagccagccagaaaacctaaaaatatttttctaactttccctctaccttgctgtgtaaaaactggtcataaaaatttatctgacctaccttgtttgactgtaggtcataagacccccccactcaagagaggttcagatctacactcagaggaaaaagtgcatgttcagagaggccaagaacaatctggacagacatgccttgctgggtttccccactcagcatattagcattagatcatacacatttcgttcaattatatttctacatggatgtctgtattttgttgaacctaagcataaaaatggacaattttccctgtatgtttgggtcttcattctgaagacttctatgtgtatacattaaatgaatttggatgccttttctccaattaatatgccttttttgagtcgatttttcaatgaatcatcagagggccaaggggaactttccttttggtccctatagtttacatgtggtaaaaatcgcaggtgga

SEQ ID NO: 106474 - DNA, 644 bp, Homo sapiens
ggcctcagaatcagcctcaaagaaaaaatttttccctgaccttcccctgccctcctatctctaagtcccattctcccccaaagctagacatggaaattagaatccttcttccccaaggtgagttacagaaaacagaatcccttttccccaaagccagccagaaaacctaaaaatatttttctaactttccctctaccttgctgtgtaaaaactggtcataaaaatttatctgacctaccttgtttgactgtaggtcataagacccccccactcaagagaggttcagatctacactcagaggaaaaagtgcatgttcagagaggccaagaacaatctggacagacakgccttgctgggtttccccactcagcatattagcattagatcatacacatttcgttcaattatatttctacatggatgtctgtattttgttgaacctaagcataaaaatggacaattttccctgtatgtttgggtcttcattctgaagacttctatgtgtatacattaaatgaatttggatgccttttctccaattaatatgccttttttgagtcgatttttcaatgaatcatcagagggccaaggggaactttccttttggtccctatagtttacatgtggtaaaaatcgcaggtgga

SEQ ID NO: 106475 - DNA, 624 bp, Homo sapiens
acaaactgcacactaggagctttctgaacactttcaatgcccagaggtattttgtttggtcttttcaatctttttttaaaaatttaaatttgaatgcatttcatagagcatgcattttgtaattctagtttagtcgatacaagatcctgttgtcctaaacccctcttcagcctcttcatagatttatggtatccacctggcatctgagggatttgtgtttgagagcatggagttcaatccgtttgttttacacataagaaaactgaagctccaaaaaagctaaatgactcaaggaagtactgagagtcagtggtggagtttctacctggattccagcctcttgatgtcctgtctgagcttcttttgcagaggctgatagaccaaggagctcagtcactcttagataaacccgctttggctatcaacaaatatgtatgtttgtttttccttgagagaagttttataaaggaagatggaaggagttcaagattcytaggcaaagaagaggacagaggctgaaatgtgcttcctttttttcattttgcttggacctaaatggcaggaaatttcttaactaaaattaaaaagcaactagaatatctcttcccatctcatgaatacgtt

SEQ ID NO: 106476 - DNA, 645 bp, Homo sapiens
acagttgagcttttgatagaatgtggagtaagtctaaagttttacatatgccctcaaactatcctcaatgtgtgtttattcattcagaagccattcaattgacattatgcatgccagtcagtatagtggatgatggccatatgaaaattcctgccacttgaaagtttaatgtctgctcaaaccagatgcagctgatcacatagaatcagtgccctggagtatatcatcactttaatctagagtcaggaacctgccatatgactgtcaaccctatgtttgttagttaaccagcaaaagaacacatattcaattggtatctaaagttgtaaggaaaccaaagccatcattggtgtcatggccctgtggccttttcatggaggtatttacaaaaacaccacctcaaagggatattaaycaagacccagcacaacagtctgaaatcaagctgccatctcacagggggagctaggaaagaggggggactaaggtgacatttaaagaacatgcaggccagtgatggctagtgagaaagagatttgcaggagatgatggagagctggaagaatgttctgagtggaaacgcaggtgaacatagagcatagctaattggcctaacagttttgtttctctgagagttcaatgatt

SEQ ID NO: 106477 - DNA, 572 bp, Homo sapiens
agatagaagttatggtaagcctagaactcaagaagacatgcatatttccaatttctctcttgtatctcttctatcatcatgagaacatgctaggcccagctgctggacctggcaggaggataataagagatacatggaccacagctacctccagccaaatgcagtcayaaaaatgacctgagccaagaccaacaaaactgtctggctgagttcagcctagataagttgacttgaagattcatgaaaaataataacatataaactactgagttttagcatagctcattatacagcaatatgtaactaatatattctcccaatactttgccattttgcccctctatttgaatgccccacctcatcattttgcaagtttataaaccatgggagtgtgtcgacagttgaagtatttattcaaaccagaagttccaggtttactttaggtgttaagacctcttgtactctctaaagaactctttgaaaagcacatgacaaggagtaatccaatttcttcttactcaactctctctttaatcaagtaaattcatctcagtaacatcaagttattcaag

SEQ ID NO: 106478 - DNA, 519 bp, Homo sapiens
ggataagattagtaagtgcttttataattaaatataattaaactttatatatatgtgtatatatatatacaattataaaagcacttattaatctcatagtcactgatttgtaaaaataaatcaacactaccacataaaagcatgggaattatgaacagatacattgtttatattttacatctaaaagttccaattccagatattaaaaaataatttgttttattctatcatttttaattctcaactttcaaacttctatcagtaacaaggaaaacaatacaaaaaatttataaagaaaaaattagtaaaaataaatcctggactgaaatacaagtatatggctctagcttatatcacatcctggtaccaccacatgtcatctgataccccgcaactacagctgaagttagaatctgatatgtgtggatgccctctttataagagaggacataagaaactaagattttgygtatgctctttcaatagtaaaagcaccatttccagagtccaggagcaaaa

SEQ ID NO: 106479 - DNA, 375 bp, Homo sapiens
gatggtgactgtgccatgggcaaagtagacacttcagatgctaatcagcttgagcaatcttgtcagtacccaccctagagagctgttcatcaggacaagacctcactgaaagagccttcagcaaagaccacccaccttgagaactaaacacgctgactgtgcatagcaaggaacagtctgcaggtggatctcacaaaatsccactaaatcctcctagggattcacacatttgccccaaaggggccagcatttggacacctgctacagagagagcattgaacagcaacacccaacactggattgcaattccatacccagttaagttaaaaatatgtatcagtttttctcctaccatacccaaccccagaaaatcta

SEQ ID NO: 106480 - DNA, 623 bp, Homo sapiens
ttttaatttgcatttctctgatgattaatgacattgagcattttttatgtaactgttggttatttgtatgttttcttttgaaaaatgtctgttcagatcctttgcccattttttaattgtgttatttgttttcttgctattgagttgtttgagctccttatatatcttggatattaaccacgtatcagatgtatggctggcaaatgttttctcccattctgtaggttgtctcttcattctgttgataatttcctttgcacagaagcttgttagtttgatgtaatcccatttgtctatttttacttttgttgtttgtacttttggggtcatatccaaaaaatcattgccaagaccaatatagagcttttcctcaacttctaatagttttatagttacaggttttacatataagactttaatctattctgagttgatttttgtatatggtgtgagacaagggtccaattttattctcctgcatatggatatccagttttcccaaagccatttattgaagagactgtcctttccccatcgtgtgttcttggcatctttgttgaaattcacctggcttyttagtgttcttgtatttcatatgcttatcatgtcagtaggaccaagat

SEQ ID NO: 106481 - DNA, 587 bp, Homo sapiens
aacactcaatctggaagacgtccattttgtgcttataaccaggatggcctaagaatatttgtgaagaacttgggaaatctaataagaacaaattggcttgaaacaaagaaataaaagtagagctctacaattaaagtttaaattttgaatagtgcagatagaggctgagaggttgttagagttaaaatcagacctgctattcagtgttgcccagtctgtgatatcattagatacaatagatagtgagggacagtaattaaccagtactataaaagaaggtaaccaactagacaaggaagaagcctgagacatttcaattggtcattcctaggtaaggccttcaccagtccttgagataagacagactgggaggtaacctcaragccaaaccatgcttacagttgaacatgtttttgtagctcactccatttcagtccaaacacatttattcgaaatgtctatggcgataaatactacatttggcactcagaaataaaaagacgagtaatatatggtctgagccacaaaagagctcacattctagtgaggaagacagacatgtagacaagtaactacaaggctgtatg

SEQ ID NO: 106482 - DNA, 563 bp, Homo sapiens
ctgtggcatctagcttgagtgactggtaagagtgcagtgccatattctaatataaatcatgagagaaggagatttttttgagggaaaatgattgagtaatttcacattttttttttagtttggggagcccataagtctatccagagtggtttggcaatattagtcaagaggcatgggctcaagatatagatttgggatttaggtgcttataggtattaactgaaaccatggaggagatgagattctctgggaaggcaatgaagaaatagattgagcacagagcattagagaatacctatatttaatgggcaagcaaaaacaaaaggcacaatgaatggaaattgatagagaggaaggagactaactgaaagagattgcaaggcagatatttagaggcaaaggtgaacctgacagacccagcaatgaaatacttacgatgatacttctagttgcaagtagcagaaactcacttgaactaacttaggtagatgagaagaaactaataatagtgttcaaragtgttttacccaacctaaagtcagaccaagtgactgggcctcaca

SEQ ID NO: 106483 - DNA, 589 bp, Homo sapiens
tgatgatgtcttttgattgcctccctagatggagtaaagccttgccagttttacagttaaagatcagaactgtttttcttgaaagtatttatataacaatcaaaacattcagtgttggaaagctaaagtcccagttagcatgatytgcatttatttttaggcaaattatttattaaccaggtatacaccgtctttgtttacatccttttgatgcttttgtcaggacatctttagacctaaatttatttttattggctttccataatcatagactaaactttaatttctatactcaggtctttcataaacatcggaaccttttgttccgttgtaaaataagtatagctaagtgtttgaaagcataaactgcagtagaacaacttcaggttttgttcattaacttaacattccacaaatagttattggtttcctatgtggttcaggaaaatatcctgcacagtggttactgggacaggttttagctctcacagagcctagagttcaatagagatcaagacagcaaactaagaaacagcagcttgttcagtgacaagttgggagtttcttctcttcccttttctgcttggcc

SEQ ID NO: 106484 - DNA, 589 bp, Homo sapiens
tgatgatgtcttttgattgcctccctagatggagtaaagccttgccagttttacagttaaagatcagaactgtttttcttgaaagtatttatataacaatcaaaacattcagtgttggaaagctaaagtcccagttagcatgatctgcatttatttttaggcaaattatttattaaccaggtatacaccgtctttgtttacatccttttgatgcttttgtcaggacatctttagacctaaatttatttttattggctttccataatcatagactaaactttaatttctayactcaggtctttcataaacatcggaaccttttgttccgttgtaaaataagtatagctaagtgtttgaaagcataaactgcagtagaacaacttcaggttttgttcattaacttaacattccacaaatagttattggtttcctatgtggttcaggaaaatatcctgcacagtggttactgggacaggttttagctctcacagagcctagagttcaatagagatcaagacagcaaactaagaaacagcagcttgttcagtgacaagttgggagtttcttctcttcccttttctgcttggcc

SEQ ID NO: 106485 - DNA, 584 bp, Homo sapiens
ttatgcacttttataccacatcttcgtatacttaaaaacagatggcccttatatgtaatactatctctctggactcacacatattattaatatttgattattttgcagaattttataaaatggttttcctactctgactgtttttaaatgacatcatatgcctttggagaattttgaattggaggatattatcgttttttggccacttcaaatatattatgagttatatacaggaaactgattttaaagagtgatggatggatggatggatagcgtggatgagtaaataaatgaatacacaggyatatatttacatttgcacacatacacaccattttaataataaatgtattattttgtacagagacctgattgataaatgctacacgtgtacatctcattgagctcaaggacagagcttcccctctcctcactgtctgcagtgcctggtccaggcaggacctgccatcaagtcaatgctgaaaatgttggccacacaaaaacatctgcaccgtcggaaggaacagaagctccagaacaatgcctgggcttcaagatccaatggaactttgtcagttgaacgc

SEQ ID NO: 106486 - DNA, 607 bp, Homo sapiens
cccaacctgttgtactccagagagagagagtccctagtctgttcccagcactgcactcccggctccacaggcatcaatgctttatgggcctcacaccgggaatccctcgcatgagcacctggagggaggtgctttcattcttctcattttactgatttaaaacttggagctgagagggagggaataacttatccaaatgacagttcttgaaggcctgcatcccaagattagcaaatgtggatttagtaaccttgggatgggagcaggagttagaagaatgaaaaagccattacccctgatcctgatttcaaggggatcccagcctgggtcagctagttaaaactcttcttttccatcaaggaacatacgatggattcatcgacacaacaggtatttcttgagcactgacttgtcccaatcactgatccagacacagggggctgtgtgcccccagggactgagaggacagctgcaaagsctgtgttcttccccatgagccacagggtcccttgtgtatgcagagaaacgcagcagcgcatttgtacaataaaaagaccattttacagagttgtcactggatatctctaatctacttaaaaatgtaaac

SEQ ID NO: 106487 - DNA, 533 bp, Homo sapiens
ttttgtgcaaaagtggcaaatatggtctctcaatctgttgtcttctaactttttgcattgtatcttctgacataaaatatgtataattttatatattaaaatacaccagttggccacaggggctcacacctgtaatcccagtactttgggaggccaaggcgggaggatcacctgaggtcaagagtttgagactagcctggccaacatggcaaaaccccatctctatgaaaaatacaaaaattagctgggcatggtcatggttgcctrtaatcctagctattcaggaggttgaggcaggagaattgcttgaacctggaggtagaggttgcagtgagctgagattgtgtcactgcactccagcctgggtgacagagcaagactccatctaatctcaagaacaaacaaacaaacaaaaaacaaaataaacaaacaaatatgccaacattttctctctggtttctagttcttgtgaatagacttcataaattcaagttcttatgttaggaagacttgatgaattccaaaattttatc

SEQ ID NO: 106488 - DNA, 533 bp, Homo sapiens
ttttgtgcaaaagtggcaaatatggtctctcaatctgttgtcttctaactttttgcattgtatcttctgacataaaatatgtataattttatatattaaaatacaccagttggccacaggggctcacacctgtaatcccagtactttgggaggccaaggcgggaggatcacctgaggtcaagagtttgagactagcctggccaacatggcaaaaccccatctctatgaaaaatacaaaaattagctgggcatggtcatggttgcctgtaatcctagctattcaggaggttgaggcaggagaattgcttgaacctggaggtagaggttgcagtgagctgagattgtgycactgcactccagcctgggtgacagagcaagactccatctaatctcaagaacaaacaaacaaacaaaaaacaaaataaacaaacaaatatgccaacattttctctctggtttctagttcttgtgaatagacttcataaattcaagttcttatgttaggaagacttgatgaattccaaaattttatc

SEQ ID NO: 106489 - DNA, 476 bp, Homo sapiens
catgcaaggcagttcactaactccaacatactgaaatgataatcaaatttttgttatgtagtggctcattgtagaagagctgatcagatttaactatttcatgttgcaggtgaggacacaagaatgcttattcagattactttaacttgtgraacacaatggagaaaaacaatggcaacagccagagcaaaagccacacaaaacttaatcagggttgtcttctaccttaaaacatgtagcctgacttcccttcccctgactgtagaaatttagtttgtctgaattttcttcaatataagtttgcggcataggaataatttcattacttttgaacctaagtcactttcacacttaattcttcataaaaatgttctccagggtttaaagagaattataatttctcatgtttggactgtcttatagtaaagaggtggaaaatagaattaactgcagcgaaatgctatgttatgcatcgc

SEQ ID NO: 106490 - DNA, 540 bp, Homo sapiens
atgaatctaatgatatccagttatttgagaaaattaaacaatgttatgtttaaaattgatgaattatatccataatgaatgtttacatttacctgtacaactattaaaacaatgaaacaacaacagcaaaaaataaaaaccagcaaagatataaattgcagcaacataagtaaaaaccttactttcatatacacacacactggacccaaaagtgtgtgcactaagcagttgtaaagattccaccccaatggacttagaatacttattaaagattttacaacatcagttacataaaaatgctatatgttattattaaggttttaaaatatgtctatgaactgtctctgtstatttcactaaattttctcttggtaactcttctcttaaaaaagttttagatctctgcaatcacatctatgtctcagttctctgactttgccattttagatcccattgactggagtattctagatgattcctacccttctacagaccatattatgattcaacagtttgaaaaaacttcccttttttcttttt

SEQ ID NO: 106491 - DNA, 571 bp, Homo sapiens
ctaagaacattttattatttagtaaaaaatttaatgttagtttaggttttattttctttaattgctatcagaagttttaggggtttgaaataggagattagtaatttctctctaaggtcatgtagttataaaattaaagctaccaaactttactgtttaaattaaggaaaagtctaaaaagagcctcctttttccctcatttattataaaagcccccatastgattttacaattgagaaattcttgtgttgacttattaacatcttccacattaatctttccaaaatatagctgttatcatcacagcattttttgatagaacattttcagatccttcactatatcttaaataaactcgaaaaaattatcatctaatccatgccttcaataatgtgttttctatttattattctatcctactgaccattacttcttattcgtaaacaacagctctccaactaaatcaagctagttgccattgtgtaaatatacaattttttcttttggtgtatgctcactggtacttctacttgaaattcccatattacatacttcatagctcagctcaact

SEQ ID NO: 106492 - DNA, 571 bp, Homo sapiens
ctaagaacattttattatttagtaaaaaatttaatgttagtttaggttttattttctttaattgctatcagaagttttaggggtttgaaataggagattagtaatttctctctaaggtcatgtagttataaaattaaagctaccaaactttactgtttaaattaaggaaaagtctaaaaagagcctcctttttccctcatttattataaaagcccccatagtgattttacaattgagaaattcttgtgttgacttattaacatcttccacattaatctttccaaaatatagctgttatcatcacagcattttttgatagaacattttcagatccttcactatatcttaaataaactygaaaaaattatcatctaatccatgccttcaataatgtgttttctatttattattctatcctactgaccattacttcttattcgtaaacaacagctctccaactaaatcaagctagttgccattgtgtaaatatacaattttttcttttggtgtatgctcactggtacttctacttgaaattcccatattacatacttcatagctcagctcaact

SEQ ID NO: 106493 - DNA, 571 bp, Homo sapiens
cctgaagtgaaattttcagtcagtgtccaggattgtgcagctagactttgctttattaatacataaagaaatggaatatttcttcttgacttcgtgtattgatacttcttcacctactctctcactcttcacacttttttatgttctacattttctagtaggtgcatgtatcattttgggagatcaaaaacagttctatgagcaaaatccaattgtacaaattacacgtgatacccttatctctttgttttcaatgaacacaagctattcgtgactggaattttagaatgacaacatgtaggtaaaattgacgttaccaacgccaatatatattttctcartgattcatggcagtatgtagaactcactggaaataaaactatagctaattaatcctattttgaaatatagaaagtttgaagcaatgaacacatagtatttctcatacacactgtctttcttaattgtatgctcctctatagctttgacatgggtattactttcctcgacattagtgttattgtattattcagcttaagggattaataagcactacatttttgagaggtta

SEQ ID NO: 106494 - DNA, 506 bp, Homo sapiens
  misc_feature (1)...(506): n = A,T,C or G
agagctacaggccccatgcaagtccaaaacccagcaggcaaatcttaaagctccaaaatgacctcctttgactccatgtgtcacatctaggtgatgcaagaagtgggttcccagggtcttgggcagccccgcccctgtggctttgcagggtacagccccccttctggctgcattgagtgtctgcagcttttccaggcacacagtgcargctgtcagtggatctaccattctgggatctggaggatggtggcccttttctcacatctctgcttggcagtaccccagtgggaactctgtgtgggggctccaaccccatatttccctttgacactgccctaccagaggttatccatgagggccccccctcccccccgcagcaaactnttgcctggatttccaggcattttcatacatcttctgaaatctaggcgggaggtcatgaaccttaaattcttaacttcagagcatctgcaggcttaacaccacctagaacctgaaaggcttgg

SEQ ID NO: 106495 - DNA, 506 bp, Homo sapiens
  misc_feature (1)...(506): n = A,T,C or G
agagctacaggccccatgcaagtccaaaacccagcaggcaaatcttaaagctccaaaatgacctcctttgactccatgtgtcacatctaggtgatgcaagaagtgggttcccagggtcttgggcagccccgcccctgtggctttgcagggtacagccccccttctggctgcattgagtgtctgcagcttttccaggcacacagtgcaggctgtcagtggatctaccattctgggrtctggaggatggtggcccttttctcacatctctgcttggcagtaccccagtgggaactctgtgtgggggctccaaccccatatttccctttgacactgccctaccagaggttatccatgagggccccccctcccccccgcagcaaactnttgcctggatttccaggcattttcatacatcttctgaaatctaggcgggaggtcatgaaccttaaattcttaacttcagagcatctgcaggcttaacaccacctagaacctgaaaggcttgg

SEQ ID NO: 106496 - DNA, 506 bp, Homo sapiens
  misc_feature (1)...(506): n = A,T,C or G
agagctacaggccccatgcaagtccaaaacccagcaggcaaatcttaaagctccaaaatgacctcctttgactccatgtgtcacatctaggtgatgcaagaagtgggttcccagggtcttgggcagccccgcccctgtggctttgcagggtacagccccccttctggctgcattgagtgtctgcagcttttccaggcacacagtgcaggctgtcagtggatctaccattctgggatctggaggatggtggcccttttctcacakctctgcttggcagtaccccagtgggaactctgtgtgggggctccaaccccatatttccctttgacactgccctaccagaggttatccatgagggccccccctcccccccgcagcaaactnttgcctggatttccaggcattttcatacatcttctgaaatctaggcgggaggtcatgaaccttaaattcttaacttcagagcatctgcaggcttaacaccacctagaacctgaaaggcttgg

SEQ ID NO: 106497 - DNA, 506 bp, Homo sapiens
  misc_feature (1)...(506): n = A,T,C or G
agagctacaggccccatgcaagtccaaaacccagcaggcaaatcttaaagctccaaaatgacctcctttgactccatgtgtcacatctaggtgatgcaagaagtgggttcccagggtcttgggcagccccgcccctgtggctttgcagggtacagccccccttctggctgcattgagtgtctgcagcttttccaggcacacagtgcaggctgtcagtggatctaccattctgggatctggaggatggtggcccttttctcacatctctgcttggcagtaccccagtgggractctgtgtgggggctccaaccccatatttccctttgacactgccctaccagaggttatccatgagggccccccctcccccccgcagcaaactnttgcctggatttccaggcattttcatacatcttctgaaatctaggcgggaggtcatgaaccttaaattcttaacttcagagcatctgcaggcttaacaccacctagaacctgaaaggcttgg

SEQ ID NO: 106498 - DNA, 523 bp, Homo sapiens
tttctagtttttataaatgtgacatgtattagggatgtggggaaccagaatggcaacatggcaacctctgggtaaagctctgctgtcatatttcagttcatcctcaatttgcaaaggcaatgagaaaaattctgagagtgtacttccttttctaagcagtttagaataatattattgagtttggctaacactatcacttatttagcatcaatattaatgatttggaatgggagtaaaattacagtaatgaaattcatagctaatgctaagtcttcagctgttagaactgccaaagagagataaatatataaaatgacttgcattgcttagaaacttggtttataaattgcaatggaagttttaacaggcacttagacttttggtaacaagtagtagatatttctaaagaggaatgaaacttygaatcacagaatattattttaaaaccaatatcctaactaaaggaaggttagctcatttcatctgaataatattttgtggtttttccactctttgtaaagaa

SEQ ID NO: 106499 - DNA, 633 bp, Homo sapiens
tatagaatatttattttagcttatcaaaatgtattggttataagttacttgtatctacaggcacacaattattttaagagaaagctgttcttaacatattttatttattttcatcttctatttatatgcccattttaacgttgtgtgaaatgagagtcagctggtgaagatcattttgatgtgattttgacataaaagcattctttgccctaaaataaatgctatgatgataatgttaatgagtttggagtcygatagaattgcaaggaaaatattagaaagaaaaaaacaacagtattattactattaattttgtaattaccttccagttatttcaccattaaaacattttttactttcttttaaaaattagcatgtctatttgaaatggaaatttcaaaatcaagtcctataatgctattgtgttgtaatagtagaggtaagcagagctttaaaagatgcatctgtattaaaagaaaaaatatttctgttgttctccaaagttactcttagaagaaaggaagcattgagagtaaggaacaaatgccaatgatgacaacccaaacactatgtgagtaacatgcaaacttttatttctggatgacagtcactcagtgttacaggtagctgcag

SEQ ID NO: 106500 - DNA, 522 bp, Homo sapiens
gaagttctcctggataatatcctgaagagtgtttcctaacttggttccattctccccgtcactttcaggtacactaatcaaacataggtttggtctgttaacatagtcccttatttcttggaggatttkttctttccttttcattattttttctcaaatcttgtcttcacgcttatttcattaagttgatcttcaatctctgatatcttttctttcacttgatcacttcagctactgatacttgtgtatacttcccaaagtctcatgctgtgtttttcagccccatcaggtcatttatgttcttctctaaactggttattctagttagcaattcctctaacctgttttcaaggttcttagcttccttgcattggtttagaacatgctcctttagctcgggggagtttgttattgcccaccttctgaagcctacttctgtcaatttgtcaaactcatgctccatttagttttgttcccttgctggcgaggagttgtgatcctttagaagagaagaggtgttct

SEQ ID NO: 106501 - DNA, 522 bp, Homo sapiens
gaagttctcctggataatatcctgaagagtgtttcctaacttggttccattctccccgtcactttcaggtacactaatcaaacataggtttggtctgttaacatagtcccttatttcttggaggattttttctttccttttcattattttttctcaaatcttgtcttcacgcttatttcattaagttgatcttcaatctctgatatcttttctttcacttgatcacttcagctactgatacttgtgtatacttcccaaagtctcatgctgtgtttttcagccccatcaggtcatttatgttcttctctaaactggttattctagttagcaattcctctaacctgttttcaaggttcttagcttccttgcattggtttagaacatgctcctttagctcgggrgagtttgttattgcccaccttctgaagcctacttctgtcaatttgtcaaactcatgctccatttagttttgttcccttgctggcgaggagttgtgatcctttagaagagaagaggtgttct

SEQ ID NO: 106502 - DNA, 598 bp, Homo sapiens
tccataaattcctcactttactacaatctgacttgccttgcccagttacttcatgaaaccgttttaagatatactaaattgtttttaagatcattatgaccctaacacttaccaaatacaaaaaaccacaacacattattttgaacctctctgcagaatttgacatttctcatttaaattcttcctctcttggctctatcaaatcacttcttttgctacctcagataatttcgtgtgactcctttcagagggtcttcctttgctggcccttaaatattgctcttcccaggtgccatacttggcctctttttttctcatgctattcactgtcttcaggtggtcccatccactctcatttactcagtcaccatctccatattaggtgttctcacaaattcagcatcataaacccaattgttatattgttattttaagctcaaactcaagatatattaaaaaatgtaccatcatattctttcctaagctggttctccttccattatttgctctcrttttttttaacctccatccatccatccatccatccatccatccatccatccatccaaactagaattgtggtaggcaactttggttc

SEQ ID NO: 106503 - DNA, 655 bp, Homo sapiens
ataactcaacctctagcccctctcttctcccagatgttggggtatggtggggctgaaagttcccatcctctaatcacgtctctggtctttctggtgaccagtccttatcctaaaactgtccaaacccccgcacccccactcccgctccaagttaccttgttagcataaactcagatgtggtcaaaagggacttattatgagtaacaaaatatactcctaycatttaggaaatcccaagggttttagaagctgtgtgccaggaatcagggacaaagacaaaatatattttttattatgccacagagtgacagtgaagcagcctgcaatcctgaagttcaggtttcccattaagaatgagattagaaatatcaaacatttgatgaatcagattagctccagtacttcagggaaacatctggaagtgaagtgtgtgatgggtagttttcaagaatacttgagctttaaaaatgttaacccatgttcagtccctataatatacttcaacatttgcaggtctgagttgtaacttcatcaatgtatgtaaccagaatgaaaaatataaacgtgattaaaaagaaagatcatagacattctgtaggatagaaaaaagtaagtgtatgacagttgtttggcacaggcaggggagagaaaaaaa

SEQ ID NO: 106504 - DNA, 462 bp, Homo sapiens
ctgatggcagcacaaaacaggtgcagacatktaagttctcaacaacaacaaaagtaattgcccatatcattttccaggaagcagccagagggtagcttcccccaaagaagagaatgagccaagataaaggaagacatggaatatagaatattaagaagtccaacctagaaggaaatggaaatctctaggatgatgtaaatcttcagctgaacaacaataaaaaattctgcaatgacaaataagtgtagggcacagcaggcaccccagccagaacaggccgtgtgactctgaggcagcacgccactatcgatgtcactgcctcctcagcctcgtgccacctcctccctgggatgaaacaatgggaggatgtgctccaccaaccaaggagataaagtcaaaaaataggaagatgtgagatccaggaaacagagaatccaagcaggaaaaaggcagaaggaattc

SEQ ID NO: 106505 - DNA, 462 bp, Homo sapiens
ctgatggcagcacaaaacaggtgcagacatgtaagttctcaacaacaacaaaagtaattgcccatatcattttccaggaagcagccagagggtagcttcccccaaagaagagaatgagccaagataaaggaagacatggaatatagaatattaagaagtccaacctagaaggaaatggaaatctctaggatgatgtaaatcttcagctgaacaacaataaaaaattctgcaatgacaaataagtgtagggcacagcaggcaccccagccagaacaggccgtgtgactctgaggcagcaygccactatcgatgtcactgcctcctcagcctcgtgccacctcctccctgggatgaaacaatgggaggatgtgctccaccaaccaaggagataaagtcaaaaaataggaagatgtgagatccaggaaacagagaatccaagcaggaaaaaggcagaaggaattc

SEQ ID NO: 106506 - DNA, 428 bp, Homo sapiens
tctattccaataagatagttgctccttcaggcaggtctatagaactcatccatctcagttctaggtatttgattttacctttccagctgcctagaataccctccatacagtgtatggctatatgaattatgactcataagatcaatttctgtccacacatcctctctgcaccaacacatgagcattgattaatttgcatatcagtcaaattagctggccagataggtgggaaatatcaaagtcaataggttcactaatcttatctggatcaacaygtgagattagctacctcgcatagagcctcttctaggaaaggcatgaacagcaacaaccctgggacaaccaatcacagaaatggaattccctatgataaaatatagaaatcctaagcatgcactcctacattctcttaacacatgaatgtttaa

SEQ ID NO: 106507 - DNA, 586 bp, Homo sapiens
tagggctggaaaggtaggttggaatcagatgatgaatggacttgaatgacatgttaatggttcagatttttttttcataaaatgttgggaagtatcagtgtttcaaaagaagggaactgattaattagaatagtatttatgttagaaatacggtcttttgacagctcacagaataaattgaagagagaagttcaggtatccctcactgtatgaatgctcactctccaaatatttgctgtaaatatttgtaaaatttataygtaaaactcactactttagttgaaatacaagccaatatatcatcatacatgtgctagcaaaaatagtttaggttggaatctggacaagaggattcagagagcactgctttcatatcttctctgttctgataggaagacttttcatacttctgtttttaaaacattttgtgcattcttttacttatttgcttgacattatgaagtgaaaatatttttaatatattttttgaaacactctgcagaaacaaattttctagaaaagctcatatgcttaaaaagatgttggaggtggtaaagtctattgaacaaagtaaatgcataaaaca

SEQ ID NO: 106508 - DNA, 404 bp, Homo sapiens
gtatcatagaaaaccagaatattagagtgagaagtaactttaaagatgatctagtcttaccccgattttattttttattttattttttttctttcttttagacttcaaatatcgagtgtcctgttaattatatttcctagtggttcaatgatacttcgtcttgatgtcctcttgagtattttcccctttatcacccatctctctccattctccctttcccatgattgggtactcactctatgtmtttaaagatgtatgattctttgaaaaaattatgtcattattttatgcttacatgtgtttttaatttgcataagtacaggtactttatatctcattatttgtagttcttttcccatcaacattatgttttgtgtgtttgtatcctgtgttgcttctgacag

SEQ ID NO: 106509 - DNA, 621 bp, Homo sapiens
accaatgtacatattacatatactgattgatgtcatatgtctccctaaaatatataaaaccaagctatcacttgaacaccctgagcacatgaactcaggaccttctatgactgtgacaggggcatgtcctaaactttggcaaaatgaactaaattgattgagatctgtcttggatacttttggtttacagaccgcttacatgactccatacatgcaatcatcaaatatggcatagtggagcatgaggcggggctacagaacccattcaaatttactcaggtttcttgggtgtcctgcgaatgggctcacattttccctctggattttttcaaagcactaatgctgtgagagttcttcataggaccatacggtcctctttgcrgaatgtaagagtagactaaaaatactgatgctagataaatgtttccacttcttatctgaaaatattgacattatatgaccatagtcaaaagcagggcaccattacttgctctaaaatttaatttaggagactgtaaccgcccaatgggtttaccttgcccactgcctagacagagctggtttatcaagacagagaaattgcaatagagagagagctcatgcagagctgcctatatgaga

SEQ ID NO: 106510 - DNA, 611 bp, Homo sapiens
gctcctgaaagtctgtaagattgtcaaagaaataaatcttgcctcttttgttcagaatagtattcccagtcctagcataccacctgctaggcttctaaacaatatttatttatttattgtttttactagctattattgcttctctgacatctcactgcatgaaatgatagatgcaagcatttgatttaaagcttttcttttttactatattttaaaaatactaacaatttaaaacaattctctgaaacacaataaataagccatttttagatataaattcattagatccttctatctcttttctttaggatatttaattgagacttaagacttaatcaggataacaagaaaggtagttatggaatagaagtagaggggaagtatgaggatgtttagaggttgaatattacccaacagggatgagtgtggataaagcactaaacaaggtggcttagtaacattgaagccttggattgttgggatatgtgtcaccaagagaggagagaagaccactgttattttgatcagtrttatttctacctgaactatgaaactaccaaaacttactgagatgtaatagaaagaatctcagatagaaagttaaagaccct

SEQ ID NO: 106511 - DNA, 562 bp, Homo sapiens
gttggttgacatttaagtggtttccagcttgaggctattttgaataatgctgctataatcattcttataaatatagtgaacatatgcacctaggggtggaatcgctggttgataggatatgcatatgttcagctctactagatactgctaaataacacatatacctaattgtgaaatactgaaagcttgccatgttgactttctatttactggcgacacataggaaacaaaattttttaatgacacaattatccatagcttcttaaagcatcaattaagaattagttgattaaaagatatgcattatttttgtactgaaaattacaaaacatcattaagaagaatctatagaagaatattccatatttctgggatagaggagtcaattctataaagagatctatttcaacttccataaacttccatttctgtaaactcayaccatgcagactctacatgaatgaatgcactttcttttcttttgtggaatgcttgtgatgacagcaaccaccaaataacttgatagaattttaaaaaattgacaagaacaaatttagttcag

SEQ ID NO: 106512 - DNA, 438 bp, Homo sapiens
gaattcactactaaggaattaaccatgtaaccaaaaaccaattgtacccccaaaactattgaaataaaaaaaaagatttgcctccttgaagcatgttctttagacctttagtaatagcagctaccgtttactgggcactcatgtgctaggtaccatgctgcacacttcatgcatagtatctcatttaatctggattcctcccataagttcacatagatgtgaaataatcttcacttgatcttagccaaaaggccgagaagtgataggtgtgatatgatattaaagtgtcctttacttcttcactgtgatacctgtcacacttataaataattgttcmctctctgtcttctcttggatttttaagtcccatgagaatacaaatgtcttttcttgcatgatgctgaatccttcagcatgcagcccatatcacatgtgcca

SEQ ID NO: 106513 - DNA, 572 bp, Homo sapiens
cactgaattcatgtctcacaaacatacatgagtagtatgcacctacagatgtttttaaatttgcattactcaaatatgcaaaatttgtttttaaatttgcattagtgtttttaaatttttaaaaagtttttaaatttgcattactcaaatatrcaaaattatcttgaataattgcaaatatcttgaataattatcttctctgctcttatcacaacatagttgacaagacgtaaccacttgaaagaatggaagaatgcacaggtgcttctttcccttcctttcttctatgtttttcaagtgcctggaactcttactcatgttgttctggtgtggtgcagaagaggaaatcactatccctactagtttggcttgtgaagcagggagaattcttcacaggttttgagattgacctcagaatgtgtttttcaataaagaggcaaagttttatatgttcgagacatactgccatacagtaagtgattttgcatgttatattaactatacaacttggttttagtgagttcaccacaaaacttcattaacatccacaaaataaagtctctaaaagaaaa

SEQ ID NO: 106514 - DNA, 572 bp, Homo sapiens
cactgaattcatgtctcacaaacatacatgagtagtatgcacctacagatgtttttaaatttgcattactcaaatatgcaaaatttgtttttaaatttgcattagtgtttttaaatttttaaaaagtttttaaatttgcattactcaaatatgcaaaattatcttgaataattgcaaatatcttgaataattatcttctctgctcttatcacaacatagttgacaagacgtaaccacttgaaagaatggaagaatgcacaggtgcttctttcccttcctttcttctatgtttttcaagtgcctggaactcttactcatgttgttctggtgtggtgcagaagaggaaatcactatccctactagtttggcttgtgaagcagggagaattcttcacaggttttgagattgacctcagaatgtgtttttcaataaagaggcaaagttttatatgttygagacatactgccatacagtaagtgattttgcatgttatattaactatacaacttggttttagtgagttcaccacaaaacttcattaacatccacaaaataaagtctctaaaagaaaa

SEQ ID NO: 106515 - DNA, 615 bp, Homo sapiens
tattattaaggcagaaaaagatttgactatatccaacaccatcygcagtaaaaatttttggaaaattaatgctagaaaaaatattcatcattttctaaaaagcacctacaaagcctagaaataatatgagactttgtgatgagatactgggtggttttccctaagactggaaacaaagcaaggatgtcttcattcaccgctcctaattaatatcctactggaagttctagctaatgcaataagataagaaagtaaaataaaggtatgaagattaggaaggaagacaaaactgcctgtgtttgcaaatgaatgattatgtgtataaaaattccccaaaactgcccccccaaaatcccaaaacaacccacctagaactaatatatgagtttatcaaaatcacaaataaaacattaatataacagtcatttttgccatatataccagcaatagattactgaaatttgagtttttaaataacatagcacttacaatgatgtatttagttatacatctaaaaaagtctataaaaactataaaactctgatgaaacaaaatgaagaaaatctaaatgaagatattccatgttcatatattggtaaaaacaatttgttaata

SEQ ID NO: 106516 - DNA, 615 bp, Homo sapiens
tattattaaggcagaaaaagatttgactatatccaacaccatctgcagtaaaaatttttggaaaattaatgctagaaaaaatattcatcattttctaaaaagcacctacaaagcctagaaataatatgagactttgtgatgagatactgggtggttttccctaagactggaaacaaagcaaggatgtcttcattcaccgctcctaattaatatcctactggaagttctagctaatgcaataagatargaaagtaaaataaaggtatgaagattaggaaggaagacaaaactgcctgtgtttgcaaatgaatgattatgtgtataaaaattccccaaaactgcccccccaaaatcccaaaacaacccacctagaactaatatatgagtttatcaaaatcacaaataaaacattaatataacagtcatttttgccatatataccagcaatagattactgaaatttgagtttttaaataacatagcacttacaatgatgtatttagttatacatctaaaaaagtctataaaaactataaaactctgatgaaacaaaatgaagaaaatctaaatgaagatattccatgttcatatattggtaaaaacaatttgttaata

SEQ ID NO: 106517 - DNA, 594 bp, Homo sapiens
cctagcatacttgttctaatagaaatcagtggtctgttagtgagtttattataattatggcaccttactgctttgcctttattgagttgggagtcttcagccaaaccctcacggcacctaattcacaaaatctgggaaataactgactggtgcttggttctcaatattttcatatgacttaattaactccaktcatgtttttgatgttagacaattccaaaatttatgtcattttaagctatttttggaggcaggaatgtaaattacttttgccagttaaaaaaattctaactaaatcattgttaaaacatcaacttgttttgtgaacacatatttgcataaaaaataattatttgctaattctaatttctataactggtcctactattggttaaataacaaactattattatactatagatagtgggtaataaaccactcagaattttgacagaaaaaggaatcagaacaaaggatgtgcttacatttagaatctcagaaaagtttatcatgaaccatgtaaatatttgccagttttaatctagaaattacaaactgagcttgatttaatttatcatcaaatgtggatcatcc

SEQ ID NO: 106518 - DNA, 548 bp, Homo sapiens
tgactttctttccccaatagaatgagctggaagtgacagtgtgctagttcaagtctaggtctcaagaagccttggctctttccacatgtcttcccactccttccaaagccttgataacctgctcagactaacatgctggaggtggagacacatactggttgctccagtcaccttagccagggtcagctttgatcacctttcagtcagccaacccccgccaacatcagcatagttgacagatctcagacacatgagcaataaatacgtattgctgaaatgtgacaattttgtggcaatagtaaactaatggacacactattgatacttcattttactaagctttattaaacttttaccattattcaacctattaaattttacttatgtgtttattctactctttgatgtgaactccatgaaggcagaaaattytgtccaaaatgaaattggttccccataaacatttgttggatgcataaattcacaaattctttctgtaacttttgccagcatgcattgattatttcaggcacttgaatgacattgct

SEQ ID NO: 106519 - DNA, 567 bp, Homo sapiens
gtaagcacattagaaaaccatctatatttataaattgcctcctttatcccgtgtctccttctatttaccacttcatgtatttccttcaaactcatttcttccaagttgtcactcattcaatctcgacttcctcacttcctatcacttttcaacctatttaacctagttttcactttcattgttccatagaaatggctcttgacaagatcactctcgacttttmttctgataaaacaaattgacccagctctttcctcaacctactcattttctctttcttttctttaatttttgtgggtacatagtaggtgtacatacttatggggtacatgagatactttgatagacatgtaatacgtaataatcacatcatagtaaatgatgtgtccattgccacaagcatttatcctttgtgttacaatcaaattatattcttttagttattttaaaatgtacaattaaattattaaccatagtcaccctgctgtgctatcaaatactagtttttattcattctatgttttgtacccattaaccatctccacttccccctacccaccccctact

SEQ ID NO: 106520 - DNA, 567 bp, Homo sapiens
gtaagcacattagaaaaccatctatatttataaattgcctcctttatcccgtgtctccttctatttaccacttcatgtatttccttcaaactcatttcttccaagttgtcactcattcaatctcgacttcctcacttcctatcacttttcaacctatttaacctagttttcactttcattgttccatagaaatggctcttgacaagatcactctcgacttttcttctgataaaacaaattgacccagcwctttcctcaacctactcattttctctttcttttctttaatttttgtgggtacatagtaggtgtacatacttatggggtacatgagatactttgatagacatgtaatacgtaataatcacatcatagtaaatgatgtgtccattgccacaagcatttatcctttgtgttacaatcaaattatattcttttagttattttaaaatgtacaattaaattattaaccatagtcaccctgctgtgctatcaaatactagtttttattcattctatgttttgtacccattaaccatctccacttccccctacccaccccctact

SEQ ID NO: 106521 - DNA, 567 bp, Homo sapiens
gtaagcacattagaaaaccatctatatttataaattgcctcctttatcccgtgtctccttctatttaccacttcatgtatttccttcaaactcatttcttccaagttgtcactcattcaatctcgacttcctcacttcctatcacttttcaacctatttaacctagttttcactttcattgttccatagaaatggctcttgacaagatcactctcgacttttcttctgataaaacaaattgacccagctctttcctcaacctactcattttctctttcttttctttaatttttgtgggtacatagtaggtgtacatacttatggggtacatgagatactttgatagacatgtaatacgtaataatcacatcatagtaaatgatgtgtccattgccacaagcatttatcctttgtgttacaatcaaattatattcttttagttattttaaaatgtacaattaaattattaaccrtagtcaccctgctgtgctatcaaatactagtttttattcattctatgttttgtacccattaaccatctccacttccccctacccaccccctact

SEQ ID NO: 106522 - DNA, 504 bp, Homo sapiens
gcaaaacaaatagcaagaacaaaagacacagaggtaagaaacctcattatatattttaggagtggacatttgtgtcattcttttttttattattattattatactttaagttttagggtacatgtgcacaacgtgcaggttttgttacatatgtatacatstgccatgtttgaaatgatgagggtgtgttgtaataagatttctcatggagcactttataagtaaatcaccaacagaaatagaattctgatatttcactggattagtttcatttctattaactaagacatgcatgtgtccttgtaaaatatgtgcacacagcccccaccctgacttccatgtatggtttgtttttaaacatacattggtgagtagctttcgtgttagccagttctcattaaactcacggtaaaagagacagttggtgttgtggctttgatggaatgttcacacgagtgtccctgttattctaacttaagattcaaatgtggttttgtggtttcg

SEQ ID NO: 106523 - DNA, 650 bp, Homo sapiens
taatggattcttaaaaatttttattttgtgggaacacttaaggttatatctaccctcctaacaattttaagtgtacaatacagtattgttaactacaagcataatacatttttaataagaaaacatattagtaagataatttttaattgttcatatttcttttctctatagataaaagcagtgccagagacataatataaaatttgtgtattttgaatgaaaaataagataaacaattgttaatgaacttaatacttatataatcaacatatgttctttcgtcatagacaacttgagcacaagtgggcattgtttgattaagaacatcatgtttctttccttcctgcctctagggaagatggatagttagggaagcagggttgcttcttgcccaggagagaggctgcatttgaatcacaacatgaagcagaaagcatggttatttaccctcagaaagtataaagtcatgtaaaaaagccagtgtcaaatctcttttcacaaaacaaggttttgcctccaggaatcaactcaaatattatttttagagatttctatctgtccctgtctttactttttctattgttcccagatattactgarttcacagtctgtttagcacttggcagggattatttagcgtagtggcaggt

SEQ ID NO: 106524 - DNA, 409 bp, Homo sapiens
ttctaaacatctatgatttttccaaacatttgtgacttttcagatcttgtgactgcctttttaaaatttttctgacctgctaatcaggtcactgtcattttttgttttgtcagtctctctctctctctcccgccctctctatctctgtgtctctctccatatataaatggaaatatatatatatctgttatggtctgaatgtgtaccccaaaattcatgtgttggaaatttcgttttccatgcaacagtgttgggagatggagtttaatgggaggtgattcagtcatgagacactgccctcatgaatkgactcattccactaaaaaaagaactattctgctcctctgccatgtggggacacagcattcatccccttgttgtccatttgcctttcgtcatgtaagaattc

SEQ ID NO: 106525 - DNA, 618 bp, Homo sapiens
aaataaaatctgcaaaataataaactatatttatttacattaatctttaatgctagttgttttcattcccaacactagttttcccatcatatatttcaaatttggagttgttattaactagaaaaactgtggcaaagatttaggtagcgtaaacaagataggaaaatctagaaaccaaaatatactagaattcttaatgaatatttataaaaggaaaaaacagtgaggaaccaacytaattcatttattttattgctgtataatattttgttatatgaatatatcactgtttatccagtacacatttaatgatatttgatttacttatgattttgaactattataaataatgctgcaactaactttcttatacgtgtctttgatgcatatctgtatgcatttctgttacatatacacatgggagaaaatcctttggatcaaagcctttatgtttgttttggtacatatgtttagttttggtatacatgtttagttttggtacacactgacagttttcccatgtgtcacactgattttatcaacttaagccactaccagtgatggatgactccctattggtccaaatacttgccaatacttgttagtattacaaggctg

SEQ ID NO: 106526 - DNA, 593 bp, Homo sapiens
  misc_feature (1)...(593): n = A,T,C or G
atgttgtctgcaaacagggacaagttgacttcctcattttcaatttgaatrcccttaatttatttctcttgcctaattgctctgagtgggagtttcagtactatattaaacagaagtggcaaaagtgggcattctggtcttcttccagatcttagagganaggctttcaacatttcctctttcagtatgatgttagctgtgagtttgccatttgtgacttttattgttttgaggtacatttgttctatgcttaatttgttcagtttttatcaagatgttgaattttattaaatgtttttcctgtgtctattgagaagatcatatgattattgtccttcattctgttgatatgatctatcacatttattgacttatgtatgttaaaccatccttccatctctggaataaatcctacttgatcatggtgtataatctttttgatgtgctgttggatttgatttgctagtattttttttagaacatttgtgtctatgttcatcagtgatattggcctgtagctacctttgtttgtccttttctggttttgagatcagggtaatgctggcctcatagagtgtgcttagaagaattcc

SEQ ID NO: 106527 - DNA, 592 bp, Homo sapiens
cagaattggggagagatgcacacaattggctgtactgagtctatatgagtgggctccagcacgccactccattaaaatatgtgcataaggacctcgattgcaacattatcgtgatcccataactatgtcttcttctgtagtctctctatatggttagaattgttaaaaaaaaaaaaaaagcacttaatatttgtgtagtttttgwaattcttataagagttttaaagaataaaattcactatatgttttacagttaccgcataaaatatttcagtattttagaatctgatttatttggtcctggagtctcaaactcaatcagtcaagtgctctattactatttcctcatcatctcttagacattgtaaagaaatctgacagctctattaataaaatgaatctttagcacttcaaggttgccaaacgagtgatagataacttctttactaaccttggaggatgtgtgtgtgactatattaaggaagctgtcagatttccttttctgttttaaatgcactagaattcaagttccatgaggtcaaaagaccatgtttgccttatgcaccaacatttttttccagatgctggtgca

SEQ ID NO: 106528 - DNA, 445 bp, Homo sapiens
aaatcaccatttattgaaagaatgaatcaatgaaggaatgaatgcttatgcactagccatcaacagaacacttgtgggaataatttgcttctactagttagggctcatacacttttccctatcagagtagtaattacctgatgtggtaggtaggataatgggcttccaaagctgtacacatcatactccccagaacctgtgagtatgttaggctacatggmagatggaattaaggtttaagatcagctgatcttaaaacagaggtattaacttggatcatccagatgggcccaatgtaacagtccttaaaagggggaaaggaagaaaaacgagttgagtccaaggccatagtgatgagataaaaggggattttgacctgctgttgctgactttgaaaaggaacggggccatgaaccaaagaccatgggtggcctcttcagagtct

SEQ ID NO: 106529 - DNA, 550 bp, Homo sapiens
tacattgatcatctaaatatatacatatgtcttatctgttgctggagcactgaaagggaagccactgtaagaaaacacgaacctttttagaattctttggattcagaagacactggaaccagttacatagctgatattgagaataaaatttgataagcctggattacctactcatagactccctactttctccaaatgtctaaatttgagtttagcaaccttggtcctttcaaagtgcaacagccctggaatatcaaaagttaaactagtatgctttaataagtattgttagctggtttatagtgaggaaagagattaggctactaaactaaaataccagctatgggtcaggaactgaagtagatagtggagggatggggtgaggaaggcagagccagttttcaccctcatgaaccttattctcaagagcagagcagggagacccaggaaaacaggaagagaccaacagctgtrttgtttgattggctttcagaattgtgttccctgagatgagttttcctttgttggttaaatgggcttaagaccattt

SEQ ID NO: 106530 - DNA, 590 bp, Homo sapiens
catagtattatgctgaaagggttattagtaaaaaaaaacatgttgcgaggtgtttgtggtgagtcctagaggaaaattcagaacatagcccactgagtcctagaacaagactatgctatctgtagcaaataactatgtrtttattaaaaaaaattactcatctgtcaccaaaccctgatagagatggaatttttaaccattggacaccatgcgagcatggatgtggaactgcctaacatgagctcagacctttgacacccatcaagtcataaataagtctgggttatcctgcaataatcctttgtaagatgcaaattgcatgtttaatactaagtataagcagaaagaggggttataagtaagacacatgagcaggtattgccccatgctccatgtactccgtctgatccctccttgttcaatggagttttacttgttttccttcttcagcgcacaagaaggatatttttccaaatgatcacatgcataggataaaaaaatcctgagcttggcttatggatgagtttcccaggaagtaaatgtaagctaaaaatacagaatgactgtactacagctttgcacataaatgg

SEQ ID NO: 106531 - DNA, 550 bp, Homo sapiens
caaatgatattaagcagccaactccagaaacccccaaaccagtgaaagtactccatccttaatattctgttcccctagaatcacttctggcaccaaaatctggattagtcatggttccatagggaaacagaactaatgtatatatatatatacattatatatatatataatgtgtatatgtgtrtatatatatatatatatatatatatatatatatatataaatttggattgtgcttatctagattaagggtgggtgtgccttccccagtccactgactcaaaagttaatctcctttggcaacaccctcagagtcacacccaggatcaataccttcaattcaatcaagttgacgctcaatattaaccattgtaatgatataaaagtttggcaccagatacagttcacaaagaccttgctgataaaacagattgtggtaaagaagctagctaaaactcaccaaaaccaagatggcaacttctggtaatcctcactgctcattatatgctaattaattataattcattagcatgctgaaagacactcccat

SEQ ID NO: 106532 - DNA, 529 bp, Homo sapiens
agtttctcttggttcacccatggcatctagaatgttctactcttgcttcatttacatcatattgaatacatgtgttgatgttttattcattcccacttgactgtagagtttcttaaaacaagccctgtgtgttatttatatttctattctcaaagatttaaatacagcctgacataaagttgtgcacaaaaaatccattttaaggrttgccttcactaaacatcaaaagcattcagagacatgataaaaataagttaaaatagcaaatacaaatgtaggatggggacaagctgacatgtttcaataattataattattctaacagcagagaatggatatttcgaaatatgcaccagatagaacatctatacatatactttaaaattatattctctcacagtgaaagatgtccagtgggcctaattaacgttagtggtattcatcttgaatcatttagaatggagagtacagcaatcagatgtatgactcagttaaaaatatatgtgatggataaaacaaagcaaagcaa

SEQ ID NO: 106533 - DNA, 485 bp, Homo sapiens
cttgtattctttctgagttggccccacaaagcactgggattacaggcatgagtaaacatgcctggcctcctctagcatttagatgctaaattctgctggaaaaaggagtacaaaatgaatacaagtagtaagtagtatcttgagtattttcttcccatacacccatgggagtatttggtgcatcttactacctcacgtacaccattctttcatcaaactatccaagctaagtatttaaatttaattttttccctacaakaaactctatgctaaagctcattaagtttgattttgagagtctctgtttttgtatcacagttgtagaaaattaatcacattctttattttttgagacattatcattattgtttcctagaagtttctctctggttttacttatttatttaattcttttattccttttccctagccatagacaggcactctcatgtgtttgatataggttctttactcttaaagaattc

SEQ ID NO: 106534 - DNA, 669 bp, Homo sapiens
accactaaggagatggtggtaaatcaagcttgtttgactcacaccctgcaggctgaatgcagcccaggacagctttgaatgtggcccaacaagaaggtggcccaacacaaatttgtaagctttcttaaaacattatgagctttgtgtgtgcgtatgtgtgtgtgtgtgtgtctgtgtgtgtgtgtgtgagagagagagagagctcatcagctattgttagtgttagtgtattttatgtgtggcccaagatgactcttcttccaatgtggcccagggaagccaaaagactggacattcctgtgctaaaccgttcataagggatccaccccatgatctaatacctcccactgggtcccaccaccaacattggggaacgcatttcagcatgagatttggaggggacacacattcaaactatatcaggaatatacacccaacartaagacagttaggttgtagggcatgcataattttaaatgggtcctgccatattattttccaaaatgtttacaaccatttactttcccatccattgcccataaaggttgtttttcctcatatcctcatcacacaatatcatctataagttttatattttctaagcaagtggtgaagatacatatcacattttattcatgcacattggcatttgtcagagtgctgatatca

SEQ ID NO: 106535 - DNA, 587 bp, Homo sapiens
aatggcagtgctctacaccagaagagttatcattataatgttttctgtttggcatttcactaagtaaaatatcactgctgtatatctgggttttccagcaaaaaaagaaaagaaaatcttctcaaaggactaacctatgctgctatcaccaatgcaactcctacagtgttcttattatgctcatcaaagtccaaaatatttaagctgtaaacccytgaaatattgcaaatatatctcagttggttcttagtcaacagctttccaactgactcaaggctgggtctttcaagaccattaaagaaataagcaatgttgtttagttcacattgtcccccaaaaaaaatgcacagagagtagttacaaatgtcttttaggccattgacattttcatagagggaggaagattcaaatacatttcgatatattggggctggtgcatattttaattaaaatacgttgccaaacaagaagaaaaagccacatatttctgaaggggagttttctgaagcatattaaaaggaactggtaatatttatttcctattaaatcactaacagtgtccttaattggacaagttttaagaacat

SEQ ID NO: 106536 - DNA, 587 bp, Homo sapiens
aatggcagtgctctacaccagaagagttatcattataatgttttctgtttggcatttcactaagtaaaatatcactgctgtatatctgggttttccagcaaaaaaagaaaagaaaatcttctcaaaggactaacctatgctgctatcaccaatgcaactcctacagtgttcttattatgctcatcaaagtccaaaatatttaagctgtaaacccctgaaatattgcaaatatatctcagttggttcttagtcaacagctttccaactgactcaaggctgggtctttcaagaccattaaagaaataagcaatgttgtttagttcacattgtcccccaaaaaaaatgcacagagagtagttacaaatgtcttttaggccattgacattttcatagagggaggaagattcaaatacatttcgatatattggggctggtgcatattttaattaaaatacgttgccaaacaagaagaaaaagccacatatttctgaaggggagttttctgaagcatattaaaaggaactggtaatatttrtttcctattaaatcactaacagtgtccttaattggacaagttttaagaacat

SEQ ID NO: 106537 - DNA, 604 bp, Homo sapiens
actattaggcaaaccacaaagtaaaattgtctgaatccttgtaagcctcacaacatcaagcatgcatactttggcaaatgctatgcccctcattaagagataatatttgtataacatctacttgccataaatcccatgtgtctcattggacgtattaccactaaaaattattaatgcaatcacaattttgcaaaatgtttatcatctctagtaaaaccactatgtaattattatcatttcatagcttaacattaagcagcatttaccaattttgctgttagggtgatttaatggcatgtcaaatctctggaatggtgaaacaccttcaggtatgcagtatctttcatccacaaatccctgctatttacaactatcaaaacatatcattacaagcaaaaggcagggagatagaagggaacaaatacatgcattattcataaactgtatttctcttctgctagctttctcaaaaatcttcttttctttaggagatgcccagaagcatscatttagattagtttattaacaagatcattgatcagaaatccatgttgtaagacatcttgttgatcagcaagaaaaaaataagatacctatcagatgt

SEQ ID NO: 106538 - DNA, 555 bp, Homo sapiens
tggtggtcagaaaagatattttatatgattttgacattttttgaactttttgacctgttttgtggtctaacataatctatcatggagaatgtttcctgtactaatgagaggaatgtgtatttagcacttgaatgaaatgttctgtaaatgtcagttgggtctattttgtctaaagtgtcgtttacctccaatatttctttgttaatttccttcttgatgatctgtcttttactgaaaatggggcattgaagttcctgacttttattgtattgcagtctctctctctagatttagtaatatttgctttctatatttggtgttctggtgttgggtgcataaattgacagttgttatatcctcttatcaaattgattcctttataattacatcataaacttctttgcttctttttacagtttttgacttgaattatattttatttgatataagtatagctactgcygctctttacatcttccaggggaagattaccttccccctccatccccttttcagttccccttcccactgagagtcactttcaccggcaataaa

SEQ ID NO: 106539 - DNA, 474 bp, Homo sapiens
catttaagcttcctctttctcccacccccactgtaactcttctagctgctccttttgatgtctctcttagaccagtggggaatgatgaaagcaagaaggatctgctgagggtctgaaaaagaggacaggcacaacagggagcatgtgtcaaaatgctttcttcttggtaggcaaaaatggtacatgagagcctcttggatggagagaccaagcaacacaggaaagttcctgaaaaaagaggctggaaaaagtccagggtcaagaaaagagcgaggttcctcactgccttctttccctgactcctgcataccaccccatctacatatctgtatagcagatcgcatgttctctgaatcctccgtrgttccatccttcaggatagagtttactcattgcatcccaaggactccagcaaactcttacctccccagtatctgacagctgaattattgaccatttagctcatattgactc

SEQ ID NO: 106540 - DNA, 562 bp, Homo sapiens
gattgcttatcgatctatatcaaaatatgcatgctaataccaggcagcagagagtattttcaagtggagttaataatctgattgctgccctgtctggagcaattctctgaactcggagctctaatcagtccagggtcttgcagtcaaatgtactttgctgtttaaatttggatttgtgacattgattgaggagcccttgtaaaggtgttgacaaatcaaattgtttgttccagtagtgttttgccagagatcaagtccaaagtaatacacagtgaatttgttcattactagtagggtgaaaggaatgataaaattcacctgcatcattatcacagacataagcctaataaaagrtatgttctgtctgaagaaaatgtagttttgtgggtgcttttgtgagttatacagcggggtggcccttctagacctggaggatattaggtatgttttaagaaagctaggcaaataaatctattccatgtttaagatcagagcactttgtttacttggttgaaaaacaaactgaaaagatgggcagatagatgtcatgtgctatttgaag

SEQ ID NO: 106541 - DNA, 580 bp, Homo sapiens
tgtttcatatattttgtctgtttattttgattgttcaagcacgagggtaaatctgttactttatctatcttggccagaagtgtaaacttcctgtttaccatgtgactttaagcaatattaatgacacaatggttactattgaaaggtcatttaccctgctaacctacctatattttgcttcttttctggtcttctgcttctttttctgaaaatggatgtcacaattcctgctcagtccctcatggatatggtaaggattggttggtaataggtaagaagccatttttttgaacatcgtggtgatggtggcagtggtgaatgtcaaagttccctttatcaatacaatatatttcttatattcaaaacyccaagttctcaaaagtgtagtaggtgaaatcacttgggaattgtgttggaaatatggcttactgagccctgacatgtgagacatagagttcagtttttcagtccttccttttattcaagaatcccagacatttctaatgcccaagggttaagggttacactttgagaaagtctactctaggccactccttttgaagcagaatactttcccaca

SEQ ID NO: 106542 - DNA, 642 bp, Homo sapiens
cattaagcaaaatgaggatacaatgcagatgtcacaagtagttcaaaggagaatctgaagaacatccatggtattagcttgggaatattgaaatgaacttgaagatgaatgcaaaacagtctttccatagtgagggagggctgttccttcacaagacataatgtagttgcatgtctgtagaaagaacccttcgcattgccatgagttctctagtccttacaattaacggctagaaccagaaaacttggaggagggtgycaaaattgtacaaaattttccacgagagatacccggtgatcttttttgtttatttcaaatttcttttactcttcctcccaaggagagattattctgattaccaaataaggttgatttcattaacactggcctgattatttacatacgtggaacaagagtattcatttgagacaggagaataggatttggaggcagggaacctaaggccccaccctcacttcctagaactaattgaaaggaaaactctaactttccacacctaagtagcaaaaggaccagaagctactctctttgcgaacccccatgttttctgcatggcagatgggaaattgaaagtacctctgactggttgttttttgcaaccaatcagacctttgcatagct

SEQ ID NO: 106543 - DNA, 632 bp, Homo sapiens
agggatttgccctttaccaaataaacccacttaacccttccaataagattaactgttatttgtttccattaaataaaaatgaccatactaatatacatttaatagttctgtaacagttgcagaaagatcagctctcatgtggatatcttttgtagataaaacatacatgcrtataaataaaggaattatgacagcaactagataacctatgaggcagagggatgttttcacttccttcctccagtgtggggctatgaaagagaagccaacataaaatatagaagccagcgagtatcatactctcctgttcttcatttttacagtaaatagcactctagatataataaatggctgaatacacacaattattaagattcagagtctgtcctgtgacttctgccctcttatcactgtacattcttggagacagttttatagcttttaggctacccatttctaaagtctgtgtatgtatggtatacaaatataccctcactgagtagcactgtaattatgggaaatctgctggtggatggggaagaaatactgtttagtgatgctaatgtagaactacagttaacattttgggagttttgtctcctattttcatcttaaagatggccaaagttgtt

SEQ ID NO: 106544 - DNA, 405 bp, Homo sapiens
ctgaactcaaagacaagaataatgaaatgcctttgctacaacatctccactcaatccaaatctacaaacaacagtattcaaccatgaagttctcccatctctttggccagttacatttttatctcaagtaaatcataggaaatgcttttcggttcaccatggcatgtccatcaggacttaggaaagccaatccagtgcayagcagaataaaagtaaaaaatatataagcatgttgaagccccaaatttagtctgctggcattcttttatctctatacactaattatttgtcaggatttaagccagcattcctaaagtccagaggcagcaaatgacttgactgatttttggaataactttccgttctatggccctgtttgtttgtttgtatttgtttttttgacat

SEQ ID NO: 106545 - DNA, 505 bp, Homo sapiens
tgaattctaccaaacattcaaagaagaactggtaccaatcctactaaaactattccaaaagattgagaaagagggaatcctccctaattcattatatgaagctagtatcatcccaataccaaaaccaggaaaggacataataaaaaagaaaactacagaccaatatccctgatgaatatagatgcaaaaaccctcaacaaaatactagctaaccaaatccaacagcacatcaaaatgataatacaccatgatccagtgagtttcatcccagggatgcaggcatagtttaacatacacaagtcaatgtgtatacattatgtgatgtgatacatcacataaacagaattaaaaaccaaaaccatgtgatcatctcaacagatgcagaraaagcattcattaaattccagcattcctttatgataaaaaccctcaacaaactaggcatagaagggacttacctcaaaataataaaagtcatataagacaaatccacagccaacaccat

SEQ ID NO: 106546 - DNA, 561 bp, Homo sapiens
gtgatctgcttctgtctctacaattccattgatacggatgtggaaagacaaagaactttttatgttatttgaactctatgtggtagctgaactgttgtccactaactttttattacaactctcttgtgtttggcatttaagatagtcatatctgttagttttccgccttacttttctgaacattccttctcatttattcctattggatcatattcctcacagaggaatattagtgagaagctatgttccctagcataattccttgtactttttctcattctatattgcctcagataaccagtagtacacatacaggatratgggcaccaaaaataaattaagagatgatggtggcttgcaaggatggaagctgtaaagttggtgagagatgggcagagtctggaggatttgttgacactctggatattgggtacacaagcaagcgaggagtcaaagatgacagccatgttgttggcctaagaaaccggaaaaaaggcactgcagtttactgaggtacagatgactgatggagaagcaggtgctcaattgggaatctaagtt

SEQ ID NO: 106547 - DNA, 469 bp, Homo sapiens
ataacactaaacctacttattacagttgaactgataacgattattaatagatgtcagttccaagttgaacctggtattctgttaaatccagtaaagtgtactgattatagataacaggtttggagctacatttctggatttgaatccagtttccatggttatgagctgtgtcctggaataagttaactaacctctttgaggtataaaatgttacagatattttgtcatctgtaaattggggtaacaataggatcaatgtcacagagtggctttgaagattgtctggatcaatatacrtgtggaagccaatatagaggacagtacccagcatattataaacaatgagaaaattgttttctacttgaaagtgtcaatgtagagattcgagatcaatgctgtttatctcctaagtcctcagagagtgagctaacactcagaactggctcaagcattctgtggcatgcacaat

SEQ ID NO: 106548 - DNA, 465 bp, Homo sapiens
caacccaggatattaccttcctttgttgcaatgacatactcagtcactaattacaaagacattattcagacacattttatcttgtaatttgtgcccattaaccatagtagaaagaaaaatgatatcctatcctactgcttattttctctttaaatatagcaacagaaaacaataaatacagtattggtggagatayggactctccctcccaccaactctttccttatcctctagctctgtactctatgtagtatgtcttttacatttgtgttatttcaagcaataattacattaattttagtttaagacaacaaatactagtctaaacgtgtcccttcacttcatatttatttatcctcttctcctgatggattcagagcacactaccccaatataacactttggtatactgaatattttaagttgaaggaagctgagaaaattgcagaagcaggaaagtctgac

SEQ ID NO: 106549 - DNA, 534 bp, Homo sapiens
aatattacagactacgtacagcttagaaagcctatgtatatcaaaggcttccatctctgttgacctgtcgtagaatggattgaagmgacaactcccaaagctacttatgtggaaaatttgagagtgaaaaacattctgtggacttaaaaaaaagtagattcaaagcaaaatatgaatctgaatctcataaaattgtctgccttcatcagccagccaacagatcaaataaagtatacatcacccctcccttctgtctgattttaggtcatcagtttattaatgcaggtagagattttgcatggttgagtgatttgtacagatttgatttaaaaacaggaagagggccatagtttcactttggcaggaggactgaatatcaagtgaaatactcatcacagtcccaaagtccagactcataaatgtgaaggaaagttttatagaatcaaactgagctctcaaagatacttgtccaagtatcctaagttcacaaagctgtgtattccttcttaaaatataaattttagtccgcattct

SEQ ID NO: 106550 - DNA, 643 bp, Homo sapiens
tttaatctttgggatctggccaggtgcactggctcatgcctataatcccagcactttgtgagactgaggcaggtggatcatttgaggtcaagagttcaagaccagcctggccaacatggagaaaccccatctgtactaaaaatacaaaaattagccaggcatggtggcatgtacctgtagtctcagctactttggaggctgaggcagaagaaacacttgaacctgggagrtggaggttgcagtgagccgagattgcaccactgcactccagcctgggcgacagagtgagactctgtctatggaaaaaaaaaatctttgggaccttagaatcaaaattctgcagaaggctcagctcaaccattcctccaaaagtacttggcctaagcataaccaagacaggagacaaagagccttagatcaagaacctgtccaattctttctccatgtcagcttgcaggagggaaataaacttgacataaaaaattaccccagtgctgctctcccaataggatgctgacatttccccacattgcccataacattcttatggcagccacataaaacactagaacaaaatgttctgaagctcaaactagctaggcttgctgacattgtgttattgtgtatgcatatgagtgcatgt

SEQ ID NO: 106551 - DNA, 643 bp, Homo sapiens
tttaatctttgggatctggccaggtgcactggctcatgcctataatcccagcactttgtgagactgaggcaggtggatcatttgaggtcaagagttcaagaccagcctggccaacatggagaaaccccatctgtactaaaaatacaaaaattagccaggcatggtggcatgtacctgtagtctcagctactttggaggctgaggcagaagaaacacttgaacctgggagatggaggttgcagtgagccgagattgcaccactgcactccagcctgggcgacagagtgagactctgtctatggaaaaaaaaaatctttgggaccttagaatcaaaattctgcagaaggctcagctcaaccattcctccaaaagtacttggcctaagcataaccaagacaggagacaaagagccttagatcaagaacctgtccaattctttctccatgtcagcttkcaggagggaaataaacttgacataaaaaattaccccagtgctgctctcccaataggatgctgacatttccccacattgcccataacattcttatggcagccacataaaacactagaacaaaatgttctgaagctcaaactagctaggcttgctgacattgtgttattgtgtatgcatatgagtgcatgt

SEQ ID NO: 106552 - DNA, 564 bp, Homo sapiens
atgtggaactgtgagtcccctaaacctctttttctttgtaaattacccagtctcgagtatttcttcatagcagtatgaaaatggactaatacaccgtgataacagaataaattcattatccctcaaagtcattgcacctttgcttttttgtttatagagagtaaactagtgcatgcaaaaagacctttttctctgttttttttttttttaatcttttygtagtttcggattaatgttctctaatatcctctggtttcctgcctcactcatacagctatttctgaggaaagttgatcacatggttaaccaagctggccacagctgatcagataaagagtgggtaccaatatgcatcacaattgggatctcgggtgcaagtcagataaattgttaacttataagaaaagatattttggagggagcagataattggaaagctcataggatttacgggaagcttggaaaaccattcccccaaaaaaggagtgtaggggcagcagagaacactgcttacagcatgtcttaggaacagtctatttaagacaccactgctccagctatggg

SEQ ID NO: 106553 - DNA, 491 bp, Homo sapiens
agttccaggaccatttcttcctaattgcaaaattgtcctctcaatgaaaggcttcaattccaatcatgtaaccataagcaagacactgccatggctccacatccattactgcggttaactagatagtttggctttctttccaaaaatgtccccctacttatccttttgcctcctgggacatcttgtgcttaaaataatttattgaagcatgtgaggcatgtggctgaattgatgggaaatgagagagctttccccagcctgatctgtgtcccttcttgctctcggttctcccttatttagcagtctttatgccgtttgatttgtaccaggcttctggctattcccctgtttttccatgtgcactgrcaaattttacagggtactagctacataattgcccgctgcttttatgagctcagacatagcattgttggggccaggtgcttttcccaagtaacttttttttttgctgtgggtttcagatgtggttt

SEQ ID NO: 106554 - DNA, 626 bp, Homo sapiens
ttcttgtctctcatttattctctgtagcaagagtttggagtaatcatcagagaccatgcttttaaatagacaatgatcctggcatatctgataccagatgcaatatgaaatattatctcagttagtgaggtcgcatttttaagtaatctaatgcagataaagccatatctaaaaagtggatttaaaaagttttcaaattcttaactactacttgcattttttttaatggttgttgggcctagagttgttgcaatgtgtggtaataatattagtaattttaaaaataataataaacttttattatcctgaaactaaaaatgcatagatttcttcagcctaggcacaaaatttttttctgtgcattataggctttttaaaaaaacaaacaattctgttttagctttattggctgtctggcagagaagcagtataaaaattggaacaaagaaaacaggttttttttattttttagcatatagattagtattaattaccatgtaatgagctgaaaattcctgccaagaagctgaagtttgyggatcctttaatgagtattttcttcccaccgggtaaaataaaattttaaaagtgttagggatttgcacttggaaaacatctctaagcta

SEQ ID NO: 106555 - DNA, 577 bp, Homo sapiens
ggtttagcttaggactgtggagaaatgcttttcttcatttctgataaagctccatttgctgtttgatcctgtcttcttgatctcccaagttcctgataagtctacaaagctaaaacactcacagtttgatcattagtagtgtagatcttcctctcattcaatggaagtcttctcttggaggtcagcagtaaatgtctcattgccgtgacccactggtcagtccttatgcctcttcatctttgcacatgctgatccctttctcagaaagmaagtccctttagccaggcatcatctcctttgagaagctttcgctgacctcagactggagaactctattatagcatttgacactccccacaaaggggagaacagtaagttgcagtctgatgaagtcatatgatgcccgggctggcttatgagtaaagaggtgagaaggtctcctactgaaacagattttccctctttcttccccttacaatagcctttcaaagttcttgaaatgtccattaaggaattcctatactttacttttgatttcacaatttctcagtcaaaagctcaatatcattgcatagga

SEQ ID NO: 106556 - DNA, 527 bp, Homo sapiens
attgtagttttgatttgcatttctctgataaatagtaacattgagcagcttttcatacgcttgttgaccatttgtatctctttggagaaaggcttatttaattcatttgcctattttttaattggttcatttgattttttgtggttgagttgtagaagtttttatgtattctggatattaaccccttatcacatatatgatttgcaaatattttcttccattctgtaggttgccttgtcactttgttgattgcttcctttgatgaacaagaattgtttaaatttgatataatcccattcgtctattttatctttttttgcctgtgctattggtgttgtattcaagaaatcattgccaagtccaatgtcatggagmttttcccctaggttttcttctaggggttttatagttttgggtttttcatttggtctttaatccattttgagctagcttttgtgtatggtataagagaagggtccaactttattcttttgcatgtggctattcaattttcccaacactatttg

SEQ ID NO: 106557 - DNA, 532 bp, Homo sapiens
ccagagctctggtccatgctagttgcaatgaggtgctgtagtaggaggtcagtgtgtgccttgtgtagggcaaggtcagggatcaggtggctaaagacctctcccagggaagtgaggaggcaggaggaggtggggctgtctgtgaagtgaggctccaagccccagctcatgctccattgttcctttggrcttcatttacaaaacacaaaaaaaaatctattaagaatttcagggtagtgatgacagagcattaactcgcacgcatgggccctcctgttaagcacagggccctatgcaattgtacatgttgcaagcccatgaatctgcccttctctgtaagcttccctttttcttgtccatcatggtgacatcaactggtacacatctggctttccacataaaagcacatactgaagattacatatgattaaatagggaactggatagatgctcaggaagagaaaagaaagatcaggaaggaggaggatggtagaagcccagttaagttggctggggagaggaccagcgccat

SEQ ID NO: 106558 - DNA, 532 bp, Homo sapiens
ccagagctctggtccatgctagttgcaatgaggtgctgtagtaggaggtcagtgtgtgccttgtgtagggcaaggtcagggatcaggtggctaaagacctctcccagggaagtgaggaggcaggaggaggtggggctgtctgtgaagtgaggctccaagccccagctcatgctccattgttcctttgggcttcatttacaaaacacaaaaaaaaatctattaagaatttcagggtagtgatgacagagcattaactcgcacgcatgggccctcctgttaagcacagggccctatgcaattgtacatgttgcaagcccatgaatctgcccttctctgtaagcttccctttttcttgtccatcatggtgacatcaactggtacacatctggctttccacataaaagcacatactgaagattacatatgattaaatagggaactggawagatgctcaggaagagaaaagaaagatcaggaaggaggaggatggtagaagcccagttaagttggctggggagaggaccagcgccat

SEQ ID NO: 106559 - DNA, 617 bp, Homo sapiens
gatttaggcatttgttttggttatgtgccttgttaaatattcatcatgtcaaaatggtggtagtaacatgaacacaatcaagaaaatatgaagagagtgatataaattatatttggagctcagagaggggccaggaagactttacatgttggattgcttctgccttaggcagaaaagaagttgcagagcgttctaggaggagtgaaatacttgagtaggggctgggaagcaataaagcaagtggtattttcaagtttatgcatccacaagatcagtgttcaatatttaaaatgttcaatgtgtaaactctatcatggaaagatttttgaggaagtagcttgtaaaaagttgcatatttctatttgttgctagggttacctaaccaacaggttcttggctaagcaaaaaactacagtctgtaaattagatattctggaataaaaaatttggggaaagaggaaaaggactcatgctcccaagaaggccaagtgaaaagtgatatccttctgatagggraagaagtcatgagtcattagtctggactgctatagtaatgataataatagtaagaataataatagccaccatttgtggatcacttactgcaaaccaggaac

SEQ ID NO: 106560 - DNA, 624 bp, Homo sapiens
tggtgagagggaggggaacatgctggatttcagagcaaggtctctcaacctgaggtggcctgggtatgagacatgctacgcagaaaaaaacctagaaataactgagattaaaatagctaactaagctactgaatacttgcactgccaggcactgagctagatgctttactttggctaatcttcataggagccctaggaggtagatttcatcatcatcatcctcactstaactattattatcatctttgtcatccttcttctacagatgataaaattgagatttagagaagtaaagtaatatgtctaacatcatagtgggatggctgagctctgaacccattcaatctgactccaaatgcaaagattgaataactttgacagaataggtcccacttcctatggactgagtacacatggttgtgggggcataggttgcttcagtggccatcaggatgacctgggagtaacctaattttacgtgattataggcttaaccatctggttatcaggaaaaaaaaccatgtagagagcgcacgagagcccagaatcagtagctgggcctcctggtgtggaaaggatagaactcaaatctcatcgagggatggaagtctggatacactcctt

SEQ ID NO: 106561 - DNA, 681 bp, Homo sapiens
acatatatacttataggttatatttgtatataaatatayttttatatattttataaatatacaaatatatttttctaatattttataaacatacaatatataaaatacatttataaatatacaaatatataaatatactgtatatttttaaatcaaataaaatgattatattatatgtaaatatatttgtatatcatatatactttatatattttataaatatagaaatatatttatatatatatatatatatatatatttttttttttttttttttttgagacagagtctcactctgtcacccaggctggagtgcagtggcgcgatctcggctcactgcaagctccgccctcctgggttcacgccattctcctgtctcagcctcccgagtaggtgggactacagcacccaccaccatgcgcagctaattttttgtatttatagtagagatggggtttcaccatgttaaccacgatggtctcgatctcctgacctcatgatccacccgcctccacctattatatataattaaacatataaaatatattttatattttatataaatatatttatatataaatttatgaatataaatataaattaatgtaatatataaataataaatttaatttataaattaaatttataaatttaaaatatatttatatagaactatatatt

SEQ ID NO: 106562 - DNA, 681 bp, Homo sapiens
acatatatacttataggttatatttgtatataaatatacttttatatattttataaatatacaaatatatttttctaatattttataaacatacaatatataaaatacatttataaatatacaaatatataaatatactgtatatttttaaatcaaataaaatgattatattatatgtaaatatatttgtatatcatatatactttatatattttataaatatagaaatatatttatatatatatatatatatatatatwtttttttttttttttttttgagacagagtctcactctgtcacccaggctggagtgcagtggcgcgatctcggctcactgcaagctccgccctcctgggttcacgccattctcctgtctcagcctcccgagtaggtgggactacagcacccaccaccatgcgcagctaattttttgtatttatagtagagatggggtttcaccatgttaaccacgatggtctcgatctcctgacctcatgatccacccgcctccacctattatatataattaaacatataaaatatattttatattttatataaatatatttatatataaatttatgaatataaatataaattaatgtaatatataaataataaatttaatttataaattaaatttataaatttaaaatatatttatatagaactatatatt

SEQ ID NO: 106563 - DNA, 521 bp, Homo sapiens
aaagacggaggaagcagtgacactggtattaccataagagtcacctttgcaggtgtccacttcaggtggagtcactgcttaacctttaaattctcagctctaatacatctctgacctacaccctggctctgtgttctaccagttggtgcactgaacctgctattctgtctagtttggttcatttaaatttgacatgccccaaaacattaaagggtaagcctctctctcacagacagtgggctattggaatgctagatgtttcttttcaaagagcatgtgaagagtattattagaaagtaattagtccctgaccacatcaattttctttgggaccagaaatgtcacctcctctgaggatttgtggaagcagaggcaggtggctgcctgaagagctgttgtwtaatgtgctctagctgcagggagaatcggagagccatggtacaggtagactttgagctctttgacaactccagaattttataaatctatgttatcttaagcaagaacatttttttttattt

SEQ ID NO: 106564 - DNA, 599 bp, Homo sapiens
gttttgccttctcttgaaatgtttaaggagagaaaggtaacattgagcagaacgatgtagaggaaagggccatgcacatcacaaaagcctatcaataacatttgtgagccrccacttaattgtctgcaaaatggatggcatggcggggttgtggtgaagcatagattcaacatacaaacatgacctcgctttgcaccatgcatctagatccttaataataatagtgagataaagattacttatatcaaaccattcttggagttttccctgactctggtcagtgaagtcaatcctagcttaacctcctagtcctgtttcccttccttgctctccatggaatggtggaccttgcaagacatggtcctcatggccacatgaaacacaaccatgagaaaaagagaggtgaagaaaggcaggaggtaatgggcctaggagtgcagaaggtgaggtaggccatgtgggttcaggaaaggcatgaatgtgactatcgtatatgaagaaagataggagagagaagacctaagcataattgctgtggtctgcttacattctttatgctgtttgtgaaaaggaagcgaagggtaaactactgtaaaatt

SEQ ID NO: 106565 - DNA, 464 bp, Homo sapiens
ttgtcgaagttactcaaatcatcgtgcttccgcttatagaattacctgccaatatacaagggtttaggaaataatctatcagttggcccttccaataaataatatttatttctgcasgagagctcacctgcattagcagttggaggtttgttctttggaagacagtggagtaggtttctgtaagaagttaatagttagatcactacttcctattacgctctcagtagctgaacactgtagttgcttccagttgtatcacaggttggaaattatttacagaaacaaatgcattgcctctccaaacctaaatcagtgatgataaggaactatgaagaagggagccctgtttataagagacacaattttatctttaattgaaaaacttattcctttcaactttgtttcaaatataactaaaccaagatagtaacaatgtaggaaatgtaagacagagataggaattc

SEQ ID NO: 106566 - DNA, 450 bp, Homo sapiens
caaatcatcgtgcttccgcttatagaattacctgccaatatacaagggtttaggaaataatctatcagttggcccttccaataaataatatttatttctgcaggagagctcacctgcattagcagttggaggtttgttctttggaagacagtggagtaggtttctgtaagaagttaatagttagatcactacttcctattacrctctcagtagctgaacactgtagttgcttccagttgtatcacaggttggaaattatttacagaaacaaatgcattgcctctccaaacctaaatcagtgatgataaggaactatgaagaagggagccctgtttataagagacacaattttatctttaattgaaaaacttattcctttcaactttgtttcaaatataactaaaccaagatagtaacaatgtaggaaatgtaagacagagataggaattc

SEQ ID NO: 106567 - DNA, 631 bp, Homo sapiens
agaaataaagcagatttggttggtggagggagacagcagcagaagctatggaagcatgtaatttgtgtacaagatgtattaaggaacactatgcagcaattaaatcagattttcaaaaacaattgaatagcatggattagggctcatatcaagtgagaaaagtaactggggatgtaagttgatcccatgtttggaaaaactgtgtgtctaagattagatgaaagtatacagacatgttgggtartagttcttaaattttataaaatatactgtttaagtaatcagaaggattccatcaatgggctttggtttgatatactattttctgtaagccagatatacatagttgtgatgttggccagtcattctcaacatttcctaacactgctgccccttttccccgaccccctaccctgctatgagacggtgacctggtctctattttctgccctggaatctatgtgctcaataaatactccctgaaataccacacttggaaagagacctcctttttacaatgtgaaatgaagaaacaatgacttcctctcgaagttatcttccaaacattgattcttacaaaattgggatatgatctaactgcaagcccatagcaatgtctaaatttgaatgt

SEQ ID NO: 106568 - DNA, 495 bp, Homo sapiens
aattaaaaaaggaaattatgaaaacaattccacttataatagcatcaaacataataaaatacttaggaattaatttaaccaagaagatgacagactagtataatgaaaactataaaatactgctgaaagaaattaatgaagacatgaataaatggaaccacatcccatgttcacagattggaggacttaatattgttaacatgttaataccacacaaggtgatctatagatcaatgtattccctataaaagttccaatgacattgtttgcagaaataaaaaaaccctcattttaaaatttatatgcaatctcaagagacctggaatagcaaaaacaatcttgaaaaataacaaagctggaagactgacactttcttattccaaaacttactgcaaagccacagtaatcaaaacagtgttgtactgtcttaaagacagacrtagagaccaatagaataaactagagagatcagaaataaatcctcacatacatggt

SEQ ID NO: 106569 - DNA, 566 bp, Homo sapiens
ggcgcctgtagtcccagctacttgggaagctgaggcagaagaatggcgtgaacccgggaggcggarcttgcagtgagccaagatagcaccattgcactccggcctgggcaaaagagtgcaactccatctcaaaaaagaaaaaaaaatggtgaacaccagctctgttaatcatacagctttggacagtgtgaggagaccaatcacttcaaattgccctcaaaaatattggcaggatagagagttagcagcattttggacttgtctgagaattaaaatgtccttttaatttattttccaatttaaaaaatttgtggtaaaacacacataatgtaaagtttaccatcttaatcattttcaagtgtacagttcagtggtattaaatacattcataatgtgtcactatcgccaccatccatctcctgaaccctttttatcttgtaaaactgaaatcctacactcattaaataataacttcctattactcccttaaccttggcacttggcaacaaccattctactttctgcctctatgattttgactatgctgagtacatcatattagtgca

SEQ ID NO: 106570 - DNA, 566 bp, Homo sapiens
ggcgcctgtagtcccagctacttgggaagctgaggcagaagaatggcgtgaacccgggaggcggagcttgcagtgagccaagatagcaccattgcactccggcctgggcaaaagagtgcaactccatctcaaaaaagaaaaaaaaatggtgaacaccagctctgttaatcatacagctttggacagtgtgaggagaccaatcacttcaaattgccctcaaaaatattggcaggatagagagttagcagcattttggacttgtctgagaattaaaatgtccttttaatttattttccaatttaaaaaatttgtggtaaaacacacataatgtaaagtttaccatcttaatcattttcaagtgtacagttcagtggtattaaatacattcataatgtgtcactatcrccaccatccatctcctgaaccctttttatcttgtaaaactgaaatcctacactcattaaataataacttcctattactcccttaaccttggcacttggcaacaaccattctactttctgcctctatgattttgactatgctgagtacatcatattagtgca

SEQ ID NO: 106571 - DNA, 566 bp, Homo sapiens
ggcgcctgtagtcccagctacttgggaagctgaggcagaagaatggcgtgaacccgggaggcggagcttgcagtgagccaagatagcaccattgcactccggcctgggcaaaagagtgcaactccatctcaaaaaagaaaaaaaaatggtgaacaccagctctgttaatcatacagctttggacagtgtgaggagaccaatcacttcaaattgccctcaaaaatattggcaggatagagagttagcagcattttggacttgtctgagaattaaaatgtccttttaatttattttccaatttaaaaaatttgtggtaaaacacacataatgtaaagtttaccatcttaatcattttcaagtgtacagttcagtggtattaaatacattcataatgtgtcactatcgccaccatccatctcctgaaccctttttatcttgtaaaactgaaatcctacactcattaaataataacttcctattactcccttaaccttggcacttggcaacmaccattctactttctgcctctatgattttgactatgctgagtacatcatattagtgca

SEQ ID NO: 106572 - DNA, 503 bp, Homo sapiens
cccataagctttcagcgtatagtcgtctcctccagggcagtcctggcaacactctatcctggctattttaacatctatctttagatctgtcttttcttacgggttcccaactgtacagtgaagcaagatcaagcagttccttcattgcacagatgacctccaccctaagtgaagagtgaatctgaggggacaaacggaagttatctgtacatcaagctaacaatggatttttaaacagaaatcagaacaatcttttagaggtaatggatacatgtacacttctttaatggcagtgatggttttgtggaatatatttcaagactyatggaattgtacattttaaattgattggttctttgtgaaattgattatacttcaaaaacccttaaagaaatttaaatactaacacacctgggaatttgagcactttatactgatcaacataaaatataaataaaccattcatattgcaaaacgtattatggagtcataatgaggaattc

SEQ ID NO: 106573 - DNA, 605 bp, Homo sapiens
gtttccttttcatctccctaacatctaatgtagatcacctttcatgtgcttgcttaccatttgtatatcttctttggagaaatgtctgttcaagtccattgcccatttttggttcaattgttaaggtttctgtacttaaactggaagagttctttatattttctgggtacaagattcttatcaaattcatcacttgccaatatttcctgcaattctgtgagtggtcttttcactctcttgacagtgtcctttgatatacaaaagtttttaattttgatgatgcccaatttatctgttttttttcttttactgctagtgttttgtatgacatgttaagaaactaatccaaatccaaggtcatacacatttgcccctatattttttttctaagacctatagttttagctctcacatttagttgtttcatcatttaaggtttwtatagcttgtttgattaatatacaacttcactcattcattcatttattactaatcttatatgtctgcatgtgtaaggagatacatcttccagttaggggataattatatttgtttcttatagggaatttacattattttccaaattatatcaaataataacagca

SEQ ID NO: 106574 - DNA, 638 bp, Homo sapiens
taagtaactttgtcacccaagttatcctatttgaatgtttaactctagatagactatttttatattagttatctattgctaacaaattacctcaatatatagcagcttaaataacagcattgattatttcagtttcagtgggtcaggaatcctggcataaattagatggtacccatgtcttgagggtttcttgaaaggctgtagtccaggcattggctgaggttgcatcctcatctgaaagtttgactgggtgagaatctacttccgagctcacaaatgtggttgttggcagttaagaatcttacaagctattggactaagctcccagttccccaagagctattggccagatgtctttctcagttccttgccaygtgggccactacgtagggtatcttacaacatggtggttagcttcatcagagtaagcaataaagaagacagaagagagaataaaggtggccctatgtatctgtgggcactgcatctacagattcaatcaactgtgaatcaagaatactaaaaaaaataagtaatacaaataaaaacaatacagtataacaacatttacatagcatttaccttctattcagtattacacgtaagtattctagagatgattaaagtgtgtgagagaa

SEQ ID NO: 106575 - DNA, 366 bp, Homo sapiens
gctactttcattttcttttctaaccactgccctagaagaataacacctcacattctctggtagactgaagcctgcagctgcaaggatgctcagaaaaccagacttctattcattggccacttgctgcactttctgtccctcgatccttgcaatgtacctttgaggtaggcataaaaatccccatttayaagtgagaaaaccaaggcaaaagaggttcagtttatttcaggctcaaatgtgcttccaatagcttatagcctctacagctagtgtttgaacccaggtctgaaacaaataggattgacaaggggagggaaaagaggaacagaaattcttttctataagacaattgtttatgcagccagg

SEQ ID NO: 106576 - DNA, 562 bp, Homo sapiens
caatgcagcagagaagaaaagcctcaataattattatgacatggcatgttaggataccaagtaaattgcatttgtaaaatgtgattttctgttggtgttcacttctgctctactgacatttggtaagtattattgactgactgactaactaatgtggtcattagtcttcataaagaaaggctctctacaaaaayggagggatgccctttttctggcatttaatacgtaagaaattgcctccgatggaaaccagagttgcctgattactatcagcacaggagaaatgtattaatgtgcctttctagtaacaggtttttagaaagtcaaatataaacaaatctgtctgtttgtgtgtgtgcatgtggtggtggggagggaagaaaaaaggagggggagagaaagagaaataagaaccaagtttattatactgtattcagggggaaaacattttcccaaggtcctaacagaagagcaaagtgccactgtcaatagcctcagtagtgttagggttgcttttatttatttatttatttacttatttatttttcctttttttttcttt

SEQ ID NO: 106577 - DNA, 562 bp, Homo sapiens
caatgcagcagagaagaaaagcctcaataattattatgacatggcatgttaggataccaagtaaattgcatttgtaaaatgtgattttctgttggtgttcacttctgctctactgacatttggtaagtattattgactgactgactaactaatgtggtcattagtcttcataaagaaaggctctctacaaaaacggagsgatgccctttttctggcatttaatacgtaagaaattgcctccgatggaaaccagagttgcctgattactatcagcacaggagaaatgtattaatgtgcctttctagtaacaggtttttagaaagtcaaatataaacaaatctgtctgtttgtgtgtgtgcatgtggtggtggggagggaagaaaaaaggagggggagagaaagagaaataagaaccaagtttattatactgtattcagggggaaaacattttcccaaggtcctaacagaagagcaaagtgccactgtcaatagcctcagtagtgttagggttgcttttatttatttatttatttacttatttatttttcctttttttttcttt

SEQ ID NO: 106578 - DNA, 584 bp, Homo sapiens
cctcactcacttttctccttctgctattgctgctcattcattccagcttttaaaaattcatctttatccaggaacctcgcttctagaaaagtcatacaggtgcttccaggaggctacatgggcacccatatttttctagccacattcattagaccaatgcagcagagaagaaaagcctcaataattattatgacatggcatgttaggataccaagtaaattgcatttgtaaaatgtgattttctgttggtgttcacttctgctctactgacatttggtaagtattattgactgactgactaactaatgtggtcattagtcttcataaagaaaggctctctacaaaaacggagggatgccctttttctggcatttaatacgtaagaaattgcctccgatggaaaccagagttgcctgattactatcagcacaggagaaatgtattaatgtgcctttctagtaacaggtttttagaaagtcaaatataaacaaatctgtctrtttgtgtgtgtgcatgtggtggtggggagggaagaaaaaaggagggggagagaaagagaaataagaaccaagtttattatactg

SEQ ID NO: 106579 - DNA, 584 bp, Homo sapiens
cctcactcacttttctccttctgctattgctgctcattcattccagcttttaaaaattcatctttatccaggaacctcgcttctagaaaagtcatacaggtgcttccaggaggctacatgggcacccatatttttctagccacattcattagaccaatgcagcagagaagaaaagcctcaataattattatgacatggcatgttaggataccaagtaaattgcatttgtaaaatgtgattttctgttggtgttcacttctgctctactgacatttggtaagtattattgactgactgactaactaatgtggtcattagtcttcataaagaaaggctctctacaaaaacggagggatgccctttttctggcatttaatacgtaagaaattgcctccgatggaaaccagagttgcctgattactatcagcacaggagaaatgtattaatgtgcctttctagtaacaggtttttagaaagtcaaatataaacaaatctgtctgtttgtgtgtgtgcatgtggtrgtggggagggaagaaaaaaggagggggagagaaagagaaataagaaccaagtttattatactg

SEQ ID NO: 106580 - DNA, 562 bp, Homo sapiens
caatgcagcagagaagaaaagcctcaataattattatgacatggcatgttaggataccaagtaaattgcatttgtaaaatgtgattttctgttggtgttcacttctgctctactgacatttggtaagtattattgactgactgactaactaatgtggtcattagtcttcataaagaaaggctctctacaaaaacggagggatgccctttttctggcatttaatacgtaagaaattgcctccgatggaaaccagagttgcctgattactatcagcacaggagaaatgtattaatgtgcctttctagtaacaggtttttagaaagtcaaatataaacaaatctgtctgtttgtgtgtgtgcatgtggtggtggggagggaagaaaaaaggagggggagagaaagagaaataagaaccaagtttattatactgtattcagggggaaaamattttcccaaggtcctaacagaagagcaaagtgccactgtcaatagcctcagtagtgttagggttgcttttatttatttatttatttacttatttatttttcctttttttttcttt

SEQ ID NO: 106581 - DNA, 562 bp, Homo sapiens
caatgcagcagagaagaaaagcctcaataattattatgacatggcatgttaggataccaagtaaattgcatttgtaaaatgtgattttctgttggtgttcacttctgctctactgacatttggtaagtattattgactgactgactaactaatgtggtcattagtcttcataaagaaaggctctctacaaaaacggagggatgccctttttctggcatttaatacgtaagaaattgcctccgatggaaaccagagttgcctgattactatcagcacaggagaaatgtattaatgtgcctttctagtaacaggtttttagaaagtcaaatataaacaaatctgtctgtttgtgtgtgtgcatgtggtggtggggagggaagaaaaaaggagggggagagaaagagaaataagaaccaagtttattatactgtattcagggggaaaacawtttcccaaggtcctaacagaagagcaaagtgccactgtcaatagcctcagtagtgttagggttgcttttatttatttatttatttacttatttatttttcctttttttttcttt

SEQ ID NO: 106582 - DNA, 571 bp, Homo sapiens
agatttttatataccaaccttgatcagaccatggatgtaggccttcagggaagaacattactttgggtgaagtgaccctctatagctgacacaatcccagtagcccagaccacaagtccttgcaggggaacctagagagcacattagccttctgttgctaatcttaccaatggcctaagccaatccacatgactctagcctttcaaacttctaacaaggatgcctttttttccccaaatactatgaaacttgcctgtacaagtatgtccctgtggcacaaattaatttagagaaccaaaaaaatacagaccacagtttataatcttgactcttctctttaagctatacagtgtcctgaaagttgtcagagctagagagaatccctctcacttgagaacagagaatgaccttctctcatcatctccatgggggcaagctgcctggctttagtagtytggaagattgagagtttttgttccaaagagtagggacatgaatgcattctggaaaacttatctccatgatcacaagatagagttgtctcctcttctaaattatctgtggtagagtt

SEQ ID NO: 106583 - DNA, 645 bp, Homo sapiens
gcctgatatgggccattcattcaccagctattgtttgacaccctgatactattctcagcacttggaaatatattagaggcaaaaagaaacaaaaactcttgcctttgtgaaacttacaaatgtattattggtagaaaaaactgaccaaaaacaatgaacattataaagtaaattatgtaggatgttaagaggtgatgagtactatagagcaaatwaaagacactcacttgagcaaggtaaagggaagagaatgctggggtccagcaggtcaggttacagccttatatattctcattgaggaaatgaaatctgagccaagacttcaaagaagggaggggccggccagtggatatttgggtgaagagcatcaaagcacatatcaagaccctgaagggatttttgtctaagaaatgtgaggaggccagtgtagctagcttgcagtgagcaaagagataagaagggggtaaagagggcccatgagtattgcaaacccttaagagttttggcttaatctgagtgcaacggtttcaccttcaattctatatatgtagaaaaggaacttagactggattcttcctaagatctcttcgtttttaaattcaagaatgttcttatcattttgtctgtgatagctggcatgggctg

SEQ ID NO: 106584 - DNA, 547 bp, Homo sapiens
gtaagggactcatataccaaatatacaaggcactcaaacaacacaacagcaaaaaaaaatctgattttaaaatgatcagagaacctgcatagatatttctcaaaagaagatacgcaaatggccaagaagtatatgaaaatatgctcagcatcactaatcctcagggaaatgcaaatcaaaaccacaatgagatattacttcaccaagttagaatggctatcatgctaacaaaagacaaaaaataatgaatactggcaaggatgtggagaaaagggaactcttacacactgttcgtgggaatataaattagtaaagccacaatggagaacagtatggagcttcctcaaaaacctacaaatagaaytaccatatgatccagcaatctcactagtgggcatttatccaaaggaaaataaatcactatattgaagagatatctgcaccctcatgtttactggattgaagcacttttcgcaatagcaaagatatgggatcaacctaaatgtccatggacagataaatggataaatgtggcacacacaatgga

SEQ ID NO: 106585 - DNA, 612 bp, Homo sapiens
gtggtggctcacgcctataatcccagcattttgggaggccaaggcaggtgggtcacttgagctcaggagttcgaaaccagcctaggcaacatggcgaaaccctgtctctacaaaaaaatacaaaaaattagccaggtgtggtggcagcacctgtggtcccagctacttgagaggctgagacaggaggatcacttgagccggaaggggacaggggacagagttttagtgagccaagatcgcaccactgtactccagcctgggtgacagagcgagactctgtctcaaacaacaataacaacaatgtttttaggtatttattaaatgtttatttaatggtggtgtggttgtgactaaaaggagtaatttctgttttttatgtagtaataatttctactttcccagaagcaggagcaacgtacattttsctagttacaaaagatagctgtggaaagtagaggtagttggtatatatttcgtctctctctctcacacacatatatgttcctgcaatacttgggtgaatctttgtggatttgttgagctagcctgatgctcaatctggctctgaatgccaggtttcccttgtatcagttagcagttgctgaataacaa

SEQ ID NO: 106586 - DNA, 565 bp, Homo sapiens
agatacataaattagggactttttgaaaaaggcttaggccaataatgcactaagttccataaaatgttttggaattatcttaaactcacacctgtcacagctgctttcatgtagcaaataatcttccagtaagaacactgatctttatttcagtaactgaaaactacttttcagcctgggtccaaaagtatcaccagactccctaacattataaaggggaagaagcaaccaagatacttgtattaggaacttttcttgtgtgtttttaagctttttgccaataaatgcactgagtgccataaaaggttctgcaaattctcttaaaactcacacatgtcaaagctactggatcgtatttaacatgttactgtttgctccatattttgaaattcacagcacatgcattttaagaacatcccaccttggaacwcccttgtacattttgaataaagaatagaatcagctcatgtcaggccatgaggtcttatctctcatctacataaacgttgagcttcaacggatatcctatttttacattcgttaaacttaaatcttgtgttaaaaa

SEQ ID NO: 106587 - DNA, 510 bp, Homo sapiens
atttcgtaaaatgatcatttcccttaaagtaagaatccataaatattagctgaataaataaaatccatatttaccacaacctacctgaaccacatgtctgatggaaccaatcaccactggcttatcagactctgcttcttcgtgcctttccamaatgtcttctataccccagagaccagagagttccaattctccttcttctaaggggatggagtgcccttcaaaatttggttgctcatacaaaatccaactaacaataaaacacagcaaaaccattagtcagtcttcgtgagagaggttttgattactcaaataacctggctaattgccattttatatatatatatagaatattagcagccaattatctagcaattaaaatagcttaaactctccctaacactaatattttactgggtataattaagcctctgataactcatgaactatatcaggatcttagagaactttggagttacctatatgaatgctatagagctactaatgttc

SEQ ID NO: 106588 - DNA, 402 bp, Homo sapiens
agtgagagcaattttgttgtcactttggaatggtgtccctggggttaggaacccaatcggtcccctatctttccttatcagattaggtcaccagaactgtgccacaagaatattgctgcatctgcttcagtgcacgttttcacacgaggacagagggacaggacccatgttgctgacagggttgttgacaaaaataaactctgtaaataaagaggtttttttttttttttttttttttttttttgkgagccagtgtgagttactatggcctggggaacagtctcaagaggtcctgagaaagtgggcctgtcgtggtgaggttacacattgtttttatacactttagagaggcagaaattgtaggtaaaatcatgaatcaatacatgaaaggtatacattggt

SEQ ID NO: 106589 - DNA, 516 bp, Homo sapiens
ttcctgtctcccatagttgggcccattcacccagccctcagagccccatgttctgactccatagtgtgaatgtgaattcagagccatcatctcacccatctgycctgacctgcttcttgtgggcctccaacctggcacctgattggtcgtgataagctttcaaggttgctgttcttactcccacagctgatccagggcttcatcccattctgtccatcagtttcttaaagggaggacttgtagcagagagaggggaagaagagtgttatgagaccatttcgcatctctctgcctcccagcagcctacggctgggcagccaagaggctttggctgctgccatggcagtgggctctaggacactgcacagcagcctcttggtctccctcgcacttcaagaatgggaaaaataaattgttcaaagagtctctttaccgcttgggaactaaggattatgctgaaactttattattactttgaataaataaattactctcttgaggccagatgaaaacatg

SEQ ID NO: 106590 - DNA, 556 bp, Homo sapiens
cccattcacccagccctcagagccccatgttctgactccatagtgtgaatgtgaattcagagccatcatctcacccatctgccctgacctgcttcttgtgggcctccaacctggcacctgattggtcgtgataagctttcaaggttgctgttcttactcccacagctgatccagggcttcatcccattctgtccatcagtttcttaaagggaggacttgtagcagagagaggggaagaagagtgttatgagaccatttcgcatctctctgcctcccagcagcctacggctgggcagccaagaggctttggctgctgccatggcagtgggctctaggacacygcacagcagcctcttggtctccctcgcacttcaagaatgggaaaaataaattgttcaaagagtctctttaccgcttgggaactaaggattatgctgaaactttattattactttgaataaataaattactctcttgaggccagatgaaaacatgctcttattaatttttttaaagaaggaaaggaattggaggggaataaaatcaaaggtgccca

SEQ ID NO: 106591 - DNA, 522 bp, Homo sapiens
tactcattttaacatgattcttcaatgaatctggcttttttggggagaaggctctcatttcctattccttgagtaaatcaggtgcagttgactttaaaaaaaaatacagtacataaaatgcttttgatcttggaaaagtttcttataaaggtacttcattctctggatcagaatactgagttatctttcgtggttccacttgacttattttaatggrccacttactaactatgtatttagaagaaatagatttaatgattaatcttggcagttggtgctttagatgacttctttttcctcttcccagcatttgctgtaccacaggcatagcatttaagggcatatatcaatacaaaccgagaataactctaaatgtgtaatgaaattgatcttgttacatctatactctttagatacttatcacctacaaaatctaatcactgtattcagtagtgtaaaattcattcagtagaatgtgtaaaatcaatactcacagatgccaaagcctttccaagtgcatca

SEQ ID NO: 106592 - DNA, 601 bp, Homo sapiens
gggaggctgacttgaggccaggagttcaagaccagcctgggcaacataagagacccccatctctacaaaaatgttstaaaattaacctatgtgggtgtgtgtgcctgtagtcctagctacttggaaggctgaagcaggaggattgaacccaagagttcaaggctatcgagcgccactgcattccagcctggacaacagatcaagaccctgtcattcataaataaatgagaacataaaacacatgcatacagtcttagtagaacctaaatgggatttaaggctctcttctgggctttctccatgtgtttcaacaaaatgaaatagttaccatttgatggctatttatgtattttctttatacacaaagtgtacaaaatgtgcttcatttctatattacataggtagaggctgttgagtctcagtaaaaaatttcattgacattttgtttttcttaatctgaataggattaagtcttggtaattttaaatatactgacttcagtttgctgtattcagcaaatatattcacagctaaatgtctcaaaatgtattaaacaagtgtttacactttggttttataactgtacatcatctttattaca

SEQ ID NO: 106593 - DNA, 577 bp, Homo sapiens
gagtaatcaaagtggtttatagagctcttattatttgctttctgccccctaggaactcttcatttcactaactgatgtcttctagtatcttgggagcagggaaggaaatatatagatgccatttttacccctatcattactcccactttgatgcattcttaagcttatttctcacttcttatcgtggcatgagggagttgaatacatgaagcttctccatcccctctctctaccttgttggcagacttacagagtcacccaggactctcccacggctaggtgaagactgcartcaggctcatctcaccattttcagcaaaactttcccaaagtttaggctcagaaagttaatggcatcatgttccccctggctgaagagggaagcctatggctatgccgggatccaccctgatgggtccggttctcaccaaagggctccaggctatagaattttccttcttcctttcttatcaagttttcctcctaaatctcatataccatctgggttctgatattaagcttgctaatatcaaaaattaattcacactcaagtgttagggctttaccgcagtttatt

SEQ ID NO: 106594 - DNA, 577 bp, Homo sapiens
gagtaatcaaagtggtttatagagctcttattatttgctttctgccccctaggaactcttcatttcactaactgatgtcttctagtatcttgggagcagggaaggaaatatatagatgccatttttacccctatcattactcccactttgatgcattcttaagcttatttctcacttcttatcgtggcatgagggagttgaatacatgaagcttctccatcccctctctctaccttgttggcagacttacagagtcacccaggactctcccacggctaggtgaagactgcagtcaggctcatctcaccattttcagcaaaactttcccaaagtttrggctcagaaagttaatggcatcatgttccccctggctgaagagggaagcctatggctatgccgggatccaccctgatgggtccggttctcaccaaagggctccaggctatagaattttccttcttcctttcttatcaagttttcctcctaaatctcatataccatctgggttctgatattaagcttgctaatatcaaaaattaattcacactcaagtgttagggctttaccgcagtttatt

SEQ ID NO: 106595 - DNA, 577 bp, Homo sapiens
gagtaatcaaagtggtttatagagctcttattatttgctttctgccccctaggaactcttcatttcactaactgatgtcttctagtatcttgggagcagggaaggaaatatatagatgccatttttacccctatcattactcccactttgatgcattcttaagcttatttctcacttcttatcgtggcatgagggagttgaatacatgaagcttctccatcccctctctctaccttgttggcagacttacagagtcacccaggactctcccacggctaggtgaagactgcagtcaggctcatctcaccattttcagcaaaactttcccaaagtttaggctcagaaagttaatggcatcatgttccccctggctgaagagggaagcctatggctatgccgggatccaccctgatggrtccggttctcaccaaagggctccaggctatagaattttccttcttcctttcttatcaagttttcctcctaaatctcatataccatctgggttctgatattaagcttgctaatatcaaaaattaattcacactcaagtgttagggctttaccgcagtttatt

SEQ ID NO: 106596 - DNA, 577 bp, Homo sapiens
atctggattctacttgaggacagtatatgaaaggacgtgttgatggaaagttgaagttaaaggacagtaggcagaagcctatcagaaggtaagaaggagaaaacaagccagcacaaaaatccttcttccccattcaatcactgaacttttcamagactcctttgattcctttttccagtctttgcatttgtacctctttaaaagccttctcatgactttcgaagaagtcccattcatattaatttcccatttgtcaaatggcccaactcctttaaaatctttttcaaaatgttatcttttattggaaacttactacaataatacaaaaatacctgacatttattgaatggtctgcctgtgctccgaagtgaagaccacagattgatggccacctatcaccatcacatagctactcctccctcacaaagccagatatgcactgtgactgtattcttcctgtggcactgactgttctaaagagcgtggagtttgaagttagtctaagctcaagtcctggctccacatcttaatagtcatgcctcattgggcatgactattgactttgtttagtttccat

SEQ ID NO: 106597 - DNA, 526 bp, Homo sapiens
tgtactccctaaatctaaaatgaaggttgaaattattattaaaaaaaattggagacaaaagtcaacagaattttttaatgaattggattgggggaatgggattaaaggaataggaaaagtgaaactcatagatgactctaatgtttttgacctgagcaactgggaaatcaaagttgagacccatcaaggatgggaaggcagaaggaacargattcaaaatgagagagatcaggaattctgttttaggcatgtgatgtgaaatgtctattagatatggacagggaggtgttgaacaggtagtcaaatatattagtctacagtccacagcagaggcctaggctggagatacaaatctaagagtcatcagcttacagtaagattatgaagtgacaactctggatgagatcaccaggaaagtgggtgtacacagaaaggagaagtgatccaataacagaaccctggggttctccggttctccagtattaagagttagagtagaagaggaagaatcagaaaggaggaatca

SEQ ID NO: 106598 - DNA, 531 bp, Homo sapiens
ccaatctacaattacttattctgtacttgtctaataattgagctgctcaaaaaattactttggctggaaactcattttcatgttttatatgtgtgaagaaattctcgtttgaggagatatttcattttaaatttcctaatttttcttacygctgctttgttgtaacttgtgagtattgtgatgaaggcttagtcttgtaatgcccatgtacacagtgttcttttagcacagctactgtgtcactgctataagccacaatgttttgccatctaattagattttaaaataatagtccacacttcactgtgcattaaaagcatgacgttcaaagtccacctttctcttttttttttcttttgccatggtggctaaagaatttaaatgctttaaaaaattgttttgatgttgcactatggcaacatgtgtggcacctgaaaccctgttgagttaaaactctatcactacaatttatagtacaccaagcagcagtgcagtgatgagagcaccgtatatggtctccatggcaatgac

SEQ ID NO: 106599 - DNA, 608 bp, Homo sapiens
ttttgtgttactatcttcttttgtgtttagatgatttttgatgtgaaatgttttaattcacttttcttctttggggygtacattctatacctcatttttgtggttaccacagggattatacttaacatcctaaagttataacattttaacttgaatttattggaccttaacttccataaaacacaaaacattgtttctgtacagctctgtccccacccttttcagttattgatatcatgtagttataattttatacattgcatatcctgaaacataatctagtaattattttttaatgcacaatttcttaaattatataaaaaacaagatgcagtattataaaccaaaattacagtttttggcttttagactaacacttaaaaaaaattttattggtctcttaaatcatgtagaaaacaaaaagtggagatacagactgttgttacaataatactagcttttctaattgccagggtatttacctttactgagatctttatttctttatatagctgtcggttattgtctactgtctagtgtcttttcatttaaagctgcaggacatttttggctttttagcatttcttgcagagcaggtttagtagtaa

SEQ ID NO: 106600 - DNA, 610 bp, Homo sapiens
ccaattgttaattcaacaagtatgtatccatttttaattacatattgaaattgaaaatctattacaccaagctgaacatgattaaataatggtgcaaaagtatgaacaatgcatagtgaatctaactcagaccctcaaatcctccatctgcagggacatcagaaatatgctttacatatcaaatgatatgtgtaaatatttttcttacaaaaatagggcattatatactttgctcttccccttgattttatcacttataaatatatctttgagattactccttgttagtacagtgttccattgtatgagtgcaccatggtttatttaatcagaccccagctaaakacttggctttaagtcttttgtcaagataagcaataccactacagacacccttgtacatgccccttttgcacgtgggcaatgcacagttatatctggaggacaaactagaagcagagcggctggatcaaagggcacctgtgttctatcacctgactgatagaacaaatccccctgcagggcggggcagaacctcctccctctactctagtcaccccgtgtcctcatcaaacgttgtgatctttgccagcctactgaatgaaaaata

SEQ ID NO: 106601 - DNA, 586 bp, Homo sapiens
catggttttcacatcttcagatcttatgtgagcagctccttacctctcccaccaggcttgcctgtaatatcaaaccatgctcatccttcaagctgacatgcaaatgccatctctttagtgaagtcttctttcctgaacttgttcttcctccatgaaaaaccattgctttactctgagccctcacaatatattacataggtaatcctcccgattgtggctttaccatgttccaactrtatggacttggaaaggtctccacctccgcaggcctctgtgtccccatctttttgatggtaatcacacgcccaccatgagtgtcataagaaccaaaagggagagctaggtgcctggtgcttagtatccgtcactgtttgtactctctgccacaagaagggtaaggatggtggctagttcattgttagggatggggtgactcccaaatctcttggtttttaaaaggttatcaagtgattctgacgtgcagctacatttggagaccacaagtctaaaccagacagtgtaagagagaaaacagggttccagaaagtgggggtggggaagaaaggtcaacatcacaaacaagagt

SEQ ID NO: 106602 - DNA, 519 bp, Homo sapiens
gtgtctttttttcatactagttagagtcatccaactgaggaatctggataaatcagagtgaaacacaatccattattctctaaatgttgccatggttagacacagtagaagatagaggcataggaggctggataattgtagcttgagatggcagctacacagtagctatatctgcccatagacctcaccataagtttgccttyccagtcccactataacagtttcatgtgcttggtatttcaatttccttgcacgctctgatttttcagtcatgatcagcactttagagaaagcaattagtgactatttctctgatcctctgagccctccttccagtttacttcctcagctgcttctacatgtctgtaaaatacagcttttataattaaattatttattaccatattaccccatagtgtttccatttccagactgagagactgtctctaagaagatgccatttaaactgaacctgtaggaagaaataaaaatccaggtataaagacaattaaatgaaga

SEQ ID NO: 106603 - DNA, 569 bp, Homo sapiens
ggaagaatatgagctcagccaaaatattctcagaacacaagggcagggggcaggggagggtaaagtgtcattcccatttgctaagagaaaatagaggccccaaatgggcaatgcaatagttctagggcacaacatttgtctgataattcacctgacttctgatatctcatctgtcttcatagactacaagctaattctaggcataagagttgggatggaggcttctaacatgtttttttgacaaagaggctagagctggaagtaggtgggtggtgtcaagacttacagaagctttgtctagaatctcaaggccttgcaccctgtaaacttgctagctggtcttacatttataaccggagttgctatagatgtggctaaggaaacagcattcaatactgcagcaagttggactgtggcttaagatacagatattgcatgccagtgaagaggcaagaccttggagcccttgatagtctttgtgcacatgttgagcctgcagwgatcagtggtcatatatagatgccctgaccatagttgtgatctataggacaatgtatgaccaatgaaaa

SEQ ID NO: 106604 - DNA, 604 bp, Homo sapiens
ggtaataattaatataggacatgatgaatggttatatctttttttttttttttttttttgagacagagtctcactctgtcgcccaggctggagtgcagtggcgcgatctcagctcactgcaagctctgcctcccgggttcatgccattctcctgcctcagcctcccaagtaactgggactacaggtgcccgctaccacacctggctaattttttttttttttgtatttttagtagagacggggtttccccgtgttagccaggatggtctcgatctcctgacctcgtgatccgcccatctcggcctcccmaagtgctgggattacaggcgtgagccaccgcgcctcgccgataaattattatatctatgaaaggagggttaggcaagctgagagagaaacataagattcttatgtactagcaatattctatttcgtaaattagagtgcagtacatatatgtatgttttattttttaaagatgttatgtctttgttgaaatggtcttttcattaacgttctttatgcatttgtttattttttggacatattaatcacagatattttggagtctttttctgctacttgtaatattttgagtttacct

SEQ ID NO: 106605 - DNA, 609 bp, Homo sapiens
tttttgttagttttcttccttgatgatttgtctaatgctgtcaatgggtgatgaagtccttgacaattattatctagctgtttttttgtaggtctagaagtacttgttttatgaaactggatgctccaatattggatgtttatatatttaagttagttaagtcttcttgttgaatygaattatttatctatatgtaatgttcttttttgtccttttctactgttgttaattcaaagtctgttttatctcatatgaaaatagtgaccctgatctttttgttttctatttgcataatagttcttactccaaccctttactttgagtctttgggtgtttctatgtgtgaggcaggtctcttgaagacaaaaaacagatgagtcttgttttttatccaacttgccactgtatcatttttatcttctaatttttgtcgttatttttgtgtggatagcatttctttttacttttcctatatttccctataatgttgttgttgttattattattattaattttctttcccttttctttttcctcctccttagggggtgtgactgtagataatgctgagtagggtcttttggctttgtttctattatcctgtgaaat

SEQ ID NO: 106606 - DNA, 609 bp, Homo sapiens
tttttgttagttttcttccttgatgatttgtctaatgctgtcaatgggtgatgaagtccttgacaattattatctagctgtttttttgtaggtctagaagtacttgttttatgaaactggatgctccaatattggatgtttatatatttaagttagttaagtcttcttgttgaattgaattatttatctatatgtaatgttcttttttgtccttttctactgttgttaattcaaagtctgttttatctcatatgaaaatagtgaccctgatctttttgttttctatttgcataatagttcttactccaaccctttactttgagtctttgggtgtttctatgtgtgaggcaggtctcttgaagacaaaaaacagatgagtcttgttttttatccaacttgccactgtatcatttttatcttctaatttttgtcgttatttttgtgtggatagcatttctttttacttttcctatatttccctataatgttgttgttgttattattattattaattttctttcccttttcyttttcctcctccttagggggtgtgactgtagataatgctgagtagggtcttttggctttgtttctattatcctgtgaaat

SEQ ID NO: 106607 - DNA, 267 bp, Homo sapiens
aatgacacccttagggactgaccttctttcactgtatcaaaagcctakacagaattgcaggagggagcgtttcacaacaccagagaccttgtgtaaacctcccaaccaaaagtcatagaacatgctaaagtgacaatcataactcttttcttgccatcgaacaccaacaaagcagtaagaagacatagactgagtagctaaatcatcagccgcttggtgaaacctttcaaatagtagaccttgttttctaccatcgtgtttgatttc

SEQ ID NO: 106608 - DNA, 267 bp, Homo sapiens
aatgacacccttagggactgaccttctttcactgtatcaaaagcctagacagaattgcaggagggagcgtttcacaacaccagagaccttgtgtaaayctcccaaccaaaagtcatagaacatgctaaagtgacaatcataactcttttcttgccatcgaacaccaacaaagcagtaagaagacatagactgagtagctaaatcatcagccgcttggtgaaacctttcaaatagtagaccttgttttctaccatcgtgtttgatttc

SEQ ID NO: 106609 - DNA, 540 bp, Homo sapiens
tgagatattgtattgtatacttgagagttctatgcaaaggagacatcgtctctgtgatacagcagtttacaatcttgcaaatatcaaaagcatgtgacatcaaggaaccttgaagtcttacatattctctacctatttgccaaaaaagtacttattatttctctcaattgtgtttccactgtcatgaatcacaatattccaaagttggatatcccatatttcccttgccatcttgtcacaacaggcaagtgagagtaatatgtacattatctctgctgcagcatgggttgtccaaatccaagggccactacagtgtttttattccrcatcttataatatttaaatttttttcgcctgacagtatagccatttcttgtaaagcctcacaaagtctcattttgatatcacagtagtccaagaataaatcagaaattagattagaaagcgtgggtcttcctccctagctgtatcatccacatggactctcaggatgcagcaagatgtctctgtgataaagcacttgtgaatggaaaaccctgt

SEQ ID NO: 106610 - DNA, 380 bp, Homo sapiens
ggaaagagagtaggtcttcaagctaatacagaaggcactttaatgtttagacatcaagacaagagggtagaaagttgaaatagacaatgaatgtatagaagaaccagtagaagtggtgttcctgaagccatgtaaagaaagttgttcaagaagattagaaggatttattgaatcagaggttactaaaaggtttagtaagatgacaactaggatttagcaattgagttggtcagctaattgctttgacaacagcgcagttggtgaaatggcagagtttaaaatctgattggagtgcrtacaagagaaaatttaagggaattaagggcagataatacacatagataactctttggacgaaatatgctattaggagaaaaaaa

SEQ ID NO: 106611 - DNA, 571 bp, Homo sapiens
ttctctcaatctgtaggttgtctgtttaatctgttgataatgtcttttgatgtgcaggagctctttagtttaattaggtctcacttgtcaatttttgtttttattgtaattgcttttgatgtctttctcatgaaatctttgcctggttctatgtccagaatagtatatcctagaattgttacttttcaagggtttttatagttttaggttttacttttaagttctttagacctgtgcatttgtcttggattgtgagggctggagtcatatttaagaaagacttaatgaattgggcattgagcttggaagggtgsgaatgtgtcttcctctaagaagcacacatttctgcaaagtgatattagtttttttcattcttgggtgtgggagtgattgatatttctagagtgatattttgagacactttacataaataaatagaaattttacctgaggacccatgatcttgtgtacatgtaactaacacttcttaatgccagtggctgtccttcagtggaataacctgaaagaaaatatgcattaaaagcatataatttatatttaggaaaatctt

SEQ ID NO: 106612 - DNA, 605 bp, Homo sapiens
ttgttttccacttcagtgtcttacaaggctgcagtcaaagtgtcagttacgtcttggtttttatccagctttgtctaagaaaggatcttcttccaagttcatatggatattgacataattcaattctttacagcctgtaatgatgagggtattagtttcttgctgttagccagcagccggtctcagttccttgccacatgggcctctccagcatgcctgcttgtttcatcaaagttaaggagaaagtgtctcctagcaagaggggtatttaaccttatgcaacgtaatcagcaaagtgacattccattacctttaccataatatattgtttagaaacaaatcctgtgccctgccaaagggaaggaatgacacaaacaggcaggagtatgaggagagagaaatyattgggagtcatctgacagttttgtcacatgtgtccatgaaatgggaatcaatggctcttgcctagtttatggctctattctgatagtgcccagaaacatgctacttgattttcagaaaggtgacttttcagttcaaaatgtgtatttccagtggttcctgaattagatttaatggactagtaaaatttgattgagaagatg

SEQ ID NO: 106613 - DNA, 624 bp, Homo sapiens
ctctgggtttctcacaacttccatttcactgattctgtattaatccgttttcacactgctgtaaagacataccagagactgggtaatttataaagaaaatgagatttaatgcactcacagttccatgtggctggggatgcctcacaatcatggcagaagacaaaagtcatgttttacatggtggcaggcaagagagaatgagagccaagtgaaaaaggaaaccccttataaaaccatcaggtctcatgagacttatacaccaccacaagaatagtatggaggaaaccacctccctttcaattatctctcaccaggtccctcccacaatacgtgggaattatgggagctacaactcaagatgagatttgggtgaggacacagccaaaccatatcagatttatttccattgctctttttatacaaacttttacttctgacaatggcctaccaagctctacatacctagtacctgcctaactcttcaaactcattacgaatcaatctgcccactgcatacaaygcttcattcactctggctttttaaaatttacgatccaggaagtcaaggcttttccagttttcagtctttggacttgtttctctgcctacgccattgttccccta

SEQ ID NO: 106614 - DNA, 523 bp, Homo sapiens
gaatatagctgccacaggtagtgatttctttaatggatcttgggagagcacactgaaaatcttcgggaaagtactcagcattccagatgccattaagaacattcatgattcatgaaaagaggtcaaaatatcaacattaacaggagtttggaagaagttcatttcaaccatcatggatgactttgacggcttcaagatttcagtgaaggaaataaatgcagatatgatgaaaacagcaagagaactagaattagaagtggtgtctaaagctgtaatcaaattkttgcactcttgtgataaaatttgaatggttagggagttgtttcttatggataaataaataaagtggtttcttgagatgaaatgtactcctggtgaagatgctgtgaatatttttgaaatgataacaaataatttataatattacataaaatttagttgataaagcatcagaagggtttgaaagttttactgtgggtaaaatgctatcaaacagcatcttacactacaaaaaaaaaaaaaa

SEQ ID NO: 106615 - DNA, 687 bp, Homo sapiens
tgcttgtttcattgtcttgggcatttttctggtgagtcaaagagtcaaacaataattttaagtatctaatatgaatctagcactgttctagatgtcatagatcaagtttatatatatatakagagatctttaaacaatatacatatatatttatatctatatatcactatagataaggatataaatcagacgtggatcagtcacaaatacaatacctattccaaatatttcaaacagaaaattatttattacaagaattcacttgttttcaggagactgaaagacagaagacataaatgtaaaaactgctattacatctctgatttacaggtacattttaggggatgataagtgatgatctcagcagattcaatcactaagtcaggtaatttacaaaaaaaattgtttatgcaaaatctcacatctgctgaaacccattcatttgctttcagtagccagaatacaaatatgggttttgcctctcatcttctttccaaattttttaagcccagggagcaaacattaggtggttgagaaaagacattgactgataccaactaaattagtcatacatatctgctagataattgagtttcctccgcagtgggtccctttacattttgtcaattccaagggatacatccatattctttaggaagatttacttgtcaacaattcgccagtcct

SEQ ID NO: 106616 - DNA, 641 bp, Homo sapiens
ttgcacatgcctatgtcctgaatggtattgcctaggttttattgtagggtttttatgattttasgtctaacaattaagtctttaatccatcttgaattaatttttgtgtaaggtgtaaggaagggatccagtttcagctttctacatatggctagccaccaccatttattaaatagggaatcctttctccatttcttatttttatcaggtttgtcaaagatcagatggttgtaaataagtagtgttatttctgagggctctgttctgttccattggtctatatctctgttttggtaccagtaccatgctgttttggttactgtagccttgtagtatagtttgaagtcaggtagcgtgatgcctccagctttgttcttttggcttaggattgtcgtggcaatgtgggctcttttttggttccatatgaactttaaagtagttttttccagttctgtgaagaaagtcattggtagcttgatggggatggcattggatctataaattaccttgggcagtatggccattttcatgatattgattcttcctatccatgagcatggaatgttcttccatttgtttatgtcctcttttatttcattgagctgtggtttgtagttctccctgaagaggtccttcacatc

SEQ ID NO: 106617 - DNA, 530 bp, Homo sapiens
gaaggatataaataagaaattcagcaaagagagaatctggacaaccaaagacatcaaaagatgcgcaacctcagtatatatcagggagacaaataacataagaatggaacatttaaaaaggaaaacaagttgatagtactaagacttgacaagaatatgcattagtaggacctcttagacacagttgggrgaatttaaatcggtacaaaatactttggaaaataaatggcagtatctgtttagattggagacgttcgttattctgtgacccaacaattccacttctagcagaacaccctagagaaactgtacatacagggagtcaagggtaagaattttcattctagcattgtttgtaatggcaaaaaacagaaacctaaataaccaacaggagaatatattaaaattgtgatatattcataccttcaaataccatatagcagttaaaatgaatgaagtagagatccgtgtcacaacataaaaatctgaaaatggctgtgtttagcgtggcagtatgttagatattgtat

SEQ ID NO: 106618 - DNA, 530 bp, Homo sapiens
gaaggatataaataagaaattcagcaaagagagaatctggacaaccaaagacatcaaaagatgcgcaacctcagtatatatcagggagacaaataacataagaatggaacatttaaaaaggaaaacaagttgatagtactaagacttgacaagaatatgcattagtaggacctcttagacacagttgggagaatttaaatyggtacaaaatactttggaaaataaatggcagtatctgtttagattggagacgttcgttattctgtgacccaacaattccacttctagcagaacaccctagagaaactgtacatacagggagtcaagggtaagaattttcattctagcattgtttgtaatggcaaaaaacagaaacctaaataaccaacaggagaatatattaaaattgtgatatattcataccttcaaataccatatagcagttaaaatgaatgaagtagagatccgtgtcacaacataaaaatctgaaaatggctgtgtttagcgtggcagtatgttagatattgtat

SEQ ID NO: 106619 - DNA, 433 bp, Homo sapiens
gaattcctgataattagcgactgtttaaaaagatatattgcatccctctaacggaagagtttatagctgttaagtatcaggttttagaagactattgagtgaacaaagaaagcactcacaaaaacaggctataatataacatagcctatatgattccaattttgagaaaataaacatgttgtgtccctgtcagtagctggagttgcatgaaaatgtaatagcgattatttctrctgccattcaaaacacgcttcattttgtaatttacatttttatatttgtttttcaaattttgcccatgagtatatttttctcttaaatgtcagcgagaaaaagataataaattttgaaaagagaaaataaatgttctctaaaacatgctaaatttaaaacaaactgggaaataatgtttgcgacataaagacaagatttt

SEQ ID NO: 106620 - DNA, 472 bp, Homo sapiens
gaattcctgataattagcgactgtttaaaaagatatattgcatccctctaacggaagagtttatagctgttaagtatcaggttttagaagactattgagtgaacaaagaaagcactcacaaaaacaggctataatataacatagcctatatgattccaattttgagaaaataaacatgttgtgtccctgtcagtagctggagttgcatgaaaatgtaatagcgattatttctgctgccattcaaaacacgcttcattttgtaatttacatttttatatttgtttttcaaattttgcccatgagtatatttttctcttaaatgtcagmgagaaaaagataataaattttgaaaagagaaaataaatgttctctaaaacatgctaaatttaaaacaaactgggaaataatgtttgcgacataaagacaagattttaatatctttaatctagaaagatattttataaattaagaa

SEQ ID NO: 106621 - DNA, 299 bp, Homo sapiens
gtgtcagtaaactgctaaggggctatcaatatccctctggcatacaccaaaagtagacagcaagctamattctactataccagataaaaataccttgggttgcaaaggatggaagaccaataagaaatcaattgaacagttaggaaattcttatttttacatttaaaattctagatctagtcaatgcaggactggaacagtagctcaataattccattgaaaactcagactctttttaatctttctgtattttcccttctagcgtggtagctactaccacctgattataagagtcctgt

SEQ ID NO: 106622 - DNA, 559 bp, Homo sapiens
gtgctcatgccatcattttgccagtacaaaggaagtatagaaatctcatctacgattactgtctgccctcccctgtttataatgtaattgtacttttatgatatgattgttgtatttacctattcacttatttattttgctgtttccctgttctttcttcactcttgacattcctgtattctgtgttttgtcatgtctttcttgtttagagaacttcctttagcctttcctttatggtagatctgctggcaaagcattttcttttttttttttttccccacctcaraatgttttgccttcccctccattcctgaggggtatttttgcttgacaagtgatattggttgacagtttcttcttttagcacttgaacaatgctttgccccacttcatctttccttcatggtttctgatagaaaatctgctgtcatatgaattcttttccacccataggtaaggtggtgtttctctttgaatactttaattattttcatttgccattagtttacagaagtttaactgcgatttgtcttggtgctgttttatttgggtttaccct

SEQ ID NO: 106623 - DNA, 559 bp, Homo sapiens
gtgctcatgccatcattttgccagtacaaaggaagtatagaaatctcatctacgattactgtctgccctcccctgtttataatgtaattgtacttttatgatatgattgttgtatttacctattcacttatttattttgctgtttccctgttctttcttcactcttgacattcctgtattctgtgttttgtcatgtctttcttgtttagagaacttcctttagcctttcctttatggtagatctgctggcaaagcattttcttttttttttttttccccacctcagaatgttttgccttcccctccattcctgaggggtatttttgcttgacaagtgatattggttgacagtttcttcttttagcacttgaacaatgctttgccccacttcatctttccttcatggtttctgataraaaatctgctgtcatatgaattcttttccacccataggtaaggtggtgtttctctttgaatactttaattattttcatttgccattagtttacagaagtttaactgcgatttgtcttggtgctgttttatttgggtttaccct

SEQ ID NO: 106624 - DNA, 518 bp, Homo sapiens
tggctgtttgtggtaaaatacaggatatattattattaactatagtcaccatgctgtgcaatggatctcaaaaaatgcattccttctgtctaaatatatgtmcccctttaatcatcattttctcatttcccccatccccttgttcgctacttccaaaagtttgacttttttagattctgcataaaagacaaaagataacatttggtgaggatgtggagtaaagtaaacccttctatactgttggtgggaatgaatgtaaaacagtacagccattaaggaaaacagtatggacgtttcctaaaaaactaaaaatagaattacctcatgatccagcaattccacttctgggtatgtattcaaataagttgaaatctgtatgttgaacagatatctgcactctcatgtttattgcaatattattcacaataaccaagatatggaatcaatctaagtgtctatcaacagatgaataaagaaaatgtggtatacacacacacacacacacacgcacacataca

SEQ ID NO: 106625 - DNA, 518 bp, Homo sapiens
tggctgtttgtggtaaaatacaggatatattattattaactatagtcaccatgctgtgcaatggatctcaaaaaatgcattccttctgtctaaatatatgtccccctttaatcatcattttckcatttcccccatccccttgttcgctacttccaaaagtttgacttttttagattctgcataaaagacaaaagataacatttggtgaggatgtggagtaaagtaaacccttctatactgttggtgggaatgaatgtaaaacagtacagccattaaggaaaacagtatggacgtttcctaaaaaactaaaaatagaattacctcatgatccagcaattccacttctgggtatgtattcaaataagttgaaatctgtatgttgaacagatatctgcactctcatgtttattgcaatattattcacaataaccaagatatggaatcaatctaagtgtctatcaacagatgaataaagaaaatgtggtatacacacacacacacacacacgcacacataca

SEQ ID NO: 106626 - DNA, 518 bp, Homo sapiens
tggctgtttgtggtaaaatacaggatatattattattaactatagtcaccatgctgtgcaatggatctcaaaaaatgcattccttctgtctaaatatatgtccccctttaatcatcattttctcatttcccccatccccttgttcgctacttccaaaagtttgacttttttagattctgcataaaagacaaaagataacatttggtgaggatgtggagtaaagtaaacccttctatactgttggtgggaatgaatgtaaaacagtasagccattaaggaaaacagtatggacgtttcctaaaaaactaaaaatagaattacctcatgatccagcaattccacttctgggtatgtattcaaataagttgaaatctgtatgttgaacagatatctgcactctcatgtttattgcaatattattcacaataaccaagatatggaatcaatctaagtgtctatcaacagatgaataaagaaaatgtggtatacacacacacacacacacacgcacacataca

SEQ ID NO: 106627 - DNA, 541 bp, Homo sapiens
gccacagctggactccctcaaacccctcaacaccataatgtcttatgtaagatgttacaagacgtaattcaaggtcatggtgacctctagaaagaagagaggggactcaaccttggaaggctatgaaagacaatggttttgtaacgttttattttactagcaattagagaagcaattatgtttattatgtcttatatgtgcatatatctgaaatattttataatttaaagacaactaaytgtcggtctgcagctgatattaaatccacagttttgttccctagagaaaaattaggagcaggctcctgtacatgcctctagaggtttcccttgcacatacacaatgggtagctccagctatttcacgctctacttctgtctctatcttccctgtctctatctctttccatatcctacttttatccctatgccaatttccatcttcttctctattcttaattctgtactcttctctcttgacctctgtgtctttctctctcttgatctagctttctctacctttttatctacttttaaaaaat

SEQ ID NO: 106628 - DNA, 524 bp, Homo sapiens
gattaaatagataactgagaatagtttctgtaggatttctttgatggcctgttgcaggagagtgttcttgggtggaggggatcaggctggaggagagccaagggaggtgtatgtatacttcctgggtattcacttagcctttggcttttaaagtaatttaagcagattaaaaaaatgatatatttgccacacatcataaataactgataataaggttaaataaactcctttgaacattctagaattgggctgtttataaatatatatcatgaaaatgatcacaggctgcacttctgaaaatgtttttgtttaacttaagaagttcatgccatcattatagcctatctataaactgaaatcatatacccatattataattactgagtataaatatgtgcaccaaaaaataaaagaaaagaacaactcttggaaaaaacaaaaagacagactatgattaatgtaacaarctatttctaatctggatttttagatttttatttaatcatttagagattataacacta

SEQ ID NO: 106629 - DNA, 478 bp, Homo sapiens
gaattcatttgaattaatttttaaagacaaggcatgtaaatagtagaatttttttttttttttttttttcttgagatggagtctcactctgtcgcccaggctggagtgctatggcgtgatctcggctcactgcaagctcagcctcctgggttcacgccattctcctgcctcagcctcccgagtagctgggactacaggcgtctgcaaccacgcccagctratttttttttgtatttttagtagagacggggtttcaccgtgttggccaggatggtctcgatgtcctgacctcgtgatctgcccgcctcggcctcccaaagtgttgggattacaggtgtgagccaccgtgcctggccagaacatattttaatctaatacagtgaccacaacgtacaattgttctggaaagtcaatgaaggccccccgttagagagtggcagaggggtgggatcagaaaaggtgcacccctgaggtcact

SEQ ID NO: 106630 - DNA, 590 bp, Homo sapiens
ggtgttgatattctccctgcaagggaagacccttggcacatctgtatacaatgtgaagaaatgtggagatgtcaaaacccgggacacatgcmgcccagcacttgacaagcagagtgttattagcattggtaataagactacctgggtctgtctgcagaggtccttcagcttgagatcatttacattcactgcacacagcattcaaacctggctcctaaatgagacagctttagagaagacaatggaaatcctgacagtaaagtgaaaatttcaggtagaaatctattcatcctaattaagagaccctctcagacctgcctcttggcaattaacacagttgtgtgtggtcctgttatttaaactgacaatcttaggttctacaggctcagggagccctctctccttcagacctccactgtctgtaaatagattctctctgacttggaacagcaaacactttgaacatttgcatttcactcattacttgtgctgctacaggctgagcgtgaccctgccatggaaacaaatccagctgaaaaccacctaatggcattggttatataactattaggtttccttaaaacatactt

SEQ ID NO: 106631 - DNA, 490 bp, Homo sapiens
acgagggatttagacattgttaatttccttcctttcctttacctttaaagaggaagtattcaaaagaataggctgaagagattatgagattaaacagggtggttcatatagaaaaatgatacaaagatgaatcatgggaaatagttctattaattcaccaactatttgaattgaagctcacatcacttaaagtggcaagggtttatgtctctgctcttcctggctgtkatattgcatataaaaggcatttattatttctctcttgctgactatgcgtctgtatttcttgtatttgaagacacaatctggtactattctttcagactatctgaaagtcaaaaacaacttgaacccagcttgatggctcacattattttatggaattcttccctttttactgcaatttcttaccatgtcaagacatcctttaaatcagcagttcccaactttttgccaccagggactggttttgtggaatataatttttcca

SEQ ID NO: 106632 - DNA, 552 bp, Homo sapiens
tcattacggctgatattacagagtataaagaggcatatttccattttttaacaccaatacatctacttaatgtacttgttgaatttattcctaaaataattctttgaaatacttcataatgattgctttatcttcaaagcatatgcaggcatttaattatatgatggtatacrgtgctttgggggcttttttttggtaaacaaattgccaatcaggggactaaaacctgaaaattcaagtctcaactaattttatagtgtgggaaaatgactaacgtataagaaatgtttacaacaattacacagttgacttagcaattggcttcagaccattgtccaatttatggggaatgcacatttatctaatttctcaccatattagcaaaactatatattcagtgaatcaaagaatatagcctataaattgccttaagaatagttactgttgcctttccttaggcagactgttctagtatctatcaaagtgatgctttaaaaggaacaactcttcttaataattgcattaaaataatatggaattagaaattttcat

SEQ ID NO: 106633 - DNA, 552 bp, Homo sapiens
tcattacggctgatattacagagtataaagaggcatatttccattttttaacaccaatacatctacttaatgtacttgttgaatttattcctaaaataattctttgaaatacttcataatgattgctttatcttcaaagcatatgcaggcatttaattatatgatggtatacggtgctttgggggcttttttttggtaaayaaattgccaatcaggggactaaaacctgaaaattcaagtctcaactaattttatagtgtgggaaaatgactaacgtataagaaatgtttacaacaattacacagttgacttagcaattggcttcagaccattgtccaatttatggggaatgcacatttatctaatttctcaccatattagcaaaactatatattcagtgaatcaaagaatatagcctataaattgccttaagaatagttactgttgcctttccttaggcagactgttctagtatctatcaaagtgatgctttaaaaggaacaactcttcttaataattgcattaaaataatatggaattagaaattttcat

SEQ ID NO: 106634 - DNA, 552 bp, Homo sapiens
tcattacggctgatattacagagtataaagaggcatatttccattttttaacaccaatacatctacttaatgtacttgttgaatttattcctaaaataattctttgaaatacttcataatgattgctttatcttcaaagcatatgcaggcatttaattatatgatggtatacggtgctttgggggcttttttttggtaaacaaattgccaatcaggggactaaaacctgaaaattcaagtctcaactaattttatagtgtgggaaaatgactaacgtataagaaatgtttacaacaattacacagttgacttagcaattggcttcagaccattgtccaatttatggggaatgcacatttatctaatttctcaccatattagcaaractatatattcagtgaatcaaagaatatagcctataaattgccttaagaatagttactgttgcctttccttaggcagactgttctagtatctatcaaagtgatgctttaaaaggaacaactcttcttaataattgcattaaaataatatggaattagaaattttcat

SEQ ID NO: 106635 - DNA, 496 bp, Homo sapiens
gaagaaacagatgaaatgtatttgtataagatcattcagataccacctgttggaccagaatttaaaatggtttactttctgtaaggttagctgagagaaatgatgagagagacccaaggtcaggctagtaagtttattaacctgccaagctgcaacaccatagtcagaggaggcagccctgagcttacaaaaataaggggtttatatgggggagagagaccctggggttgtttgttggttaactttaccacacaacatctcgtgactggcttacaatataggaatttacaagacagtgtaacttargtttatccacgtttctggtgatgtcccccatgccacctggagggctgtaagcaagtgtggtaaccttgctgtagcacctagataagggtccaggaatgcagctgcagagtattcagggtaagggttagctgcattggcaagtgggttggggggcggggctggtcctggggcagcttgtccctaacacttt

SEQ ID NO: 106636 - DNA, 553 bp, Homo sapiens
ccgaacaaagatttgaaggtacactattaacctttttgctatgttactttgtgaggccatcatgcttttttccaaatttatatgcccttttggagcagatatatgcaaattacctttttttccttggtgatgagtaaatgtgtaatcataatcctagtagaaaactgtagatacactagaattgagtaatttaaggataatttaataagtcaattagatggaaacaggctgtaacaccacacatggctacttctattcacagggctgaagaagttaagtgggccgtggggttattggaaattataaaagaaggggatggtctggccaccactgtagcctctggcagagaaaagcaccaraaccagtggcctgcagggagcgtgtgggaaaacacaggtcaagttcttattcttttctcttcctccagtgagctgaacccaacagggaaccaaaggataaaagaccccaggggtatagtccacacagtcaggacagagagtaggttagaaaagggtggagacagaatcaggagaggaaataggatataggagag

SEQ ID NO: 106637 - DNA, 666 bp, Homo sapiens
tctatttatataggatatatgtgtgtatatacatctgtgtatatatcctatataaataagataaataaatatatataataggatatgtaaatatatatgtataaatatgatatatayatcatattaattgataagggacttattagagaaattggctcatgtgattatggaggctgagaagtcccacagcatgcagcctgcaagctggagaccccgtgatgagggtagtgtggctcagtccaagtctgaaagcctcagaacatgggaagctgatggtgtaactctcagtctgaggcccaaggtctgagaacctgggtgtcaggaggagtagcctggtataaatcctggagcctaaaggccatagaagctggagttgtgatgtccaagggcaggagaagaagaatgtctcagctccaggagagagagaggaaatcatttttctgcttccttttttgttctatcggggtctccagcagactggatattgcctgtccatactaggggcagatgcttctcaccaagtccacagactcacatgacaagctcctctagaaacaccctcacagacatgcccagaaataatgctttaccagttctctaggtattctttaatccagtcaagttgacacctaaaattaatcatcacacaattcttttacaaagata

SEQ ID NO: 106638 - DNA, 666 bp, Homo sapiens
tctatttatataggatatatgtgtgtatatacatctgtgtatatatcctatataaataagataaataaatatatataataggatatgtaaatatatatgtataaatatgatatatataycatattaattgataagggacttattagagaaattggctcatgtgattatggaggctgagaagtcccacagcatgcagcctgcaagctggagaccccgtgatgagggtagtgtggctcagtccaagtctgaaagcctcagaacatgggaagctgatggtgtaactctcagtctgaggcccaaggtctgagaacctgggtgtcaggaggagtagcctggtataaatcctggagcctaaaggccatagaagctggagttgtgatgtccaagggcaggagaagaagaatgtctcagctccaggagagagagaggaaatcatttttctgcttccttttttgttctatcggggtctccagcagactggatattgcctgtccatactaggggcagatgcttctcaccaagtccacagactcacatgacaagctcctctagaaacaccctcacagacatgcccagaaataatgctttaccagttctctaggtattctttaatccagtcaagttgacacctaaaattaatcatcacacaattcttttacaaagata

SEQ ID NO: 106639 - DNA, 502 bp, Homo sapiens
ggactctacctcttaattagagaagtggccaggaatttgtggcagtctctaatctatactatgtatctataaaatagaaagaggtaatactttatgtatggatttggaatcatttctagtacctattgttaagtgatgggtgtatatcagtacagtatagtgatacgtacataatataatatactatgtatgtatgcaraaagtatgggcacaggggaagatgcaagattaattacttacatattacattaatatctttagaaaatacacaagaaactgtgtagttaagcacaagagtgtaagaatggtcactaatttatctttgtgcctggtgaagtttgaataatatgaatgtattaccttattttaaaagttaaactctaaaaattataacaagtattataggctacatttcctgaactaaaaattaagagatatttggtagaaagcaggaaatttgaaatacattcctaaaatatctatcattttgatagtgattata

SEQ ID NO: 106640 - DNA, 589 bp, Homo sapiens
caccatggcacaagtatacctatgtaacaaacctggatattctgcacatgtatcccagaacaaagtataccaacaaaaaagttaaaatatggcagaattatgtaagctacaatagttatttcatataaattttttgtgtcttcagttcaaaatcagaattaatatgccaggcaatactggatatgatggctattacatacctttcatacttatattcaaatacttcatcattattggatttactgagaaaagaatacatacaatgyatactttaaacatgaattttaaagataacatcaagagatttggagattctgcaatcaaaatgtgtgccacttcaatttcataaccagagtaatgatataaattagtttaatacatagtgaattctttttaagttctaatatttaataagaaaggacaataataatatgcaacattattcagagtgtactatgtcccagaagctgtgctaagtgcatattctcataaataccattataatgttttacagttgagaagtttatgaagctgaggccctgaaaggttcaataaactgctcaagatgaaatgagaagtagtgagcaga

SEQ ID NO: 106641 - DNA, 614 bp, Homo sapiens
tttagacaaggatgctattttatgtattttctaagttacagctaaacatatgcctccagctcgaaaactcctgtggtgacagctagagctgggtaacagttccccttacgaaatgaaatatcttttgattgcctctgcatggattctctctactattctcacatgagagatttttttcttaactgacaataagtatataaaattttacaaaaagcaagtttctaccattttattttaaatgaaatttcaggagaaactattttattgaaaaayggtagactgtatataaatgaattgccataaccttaacatctcttcctttcccttctccaatgttttcatgttaaaatatcactgtttttattcctgagtgaaaaagtaatttcttccacaaatgtgtttcttgttttccaaaaatgtattaaatgtatttttaaagataaaagggatacaacatgaaaaagtcagtaatcttgttgatgaaaaaaatacatatatatacatacacacaaacacatacacacagacagagagagagagagggagacacacagtcttatatacattccatcattgaatttggttcattttattttgatataaaaagtatcaaa

SEQ ID NO: 106642 - DNA, 579 bp, Homo sapiens
ggattaatatccaaaatatatttgaaacgagaacaactcaatagcaaaaacaaaaagattaacctgatttaaaaatgagcaaaagacctgaataaatatttcccaaaagaagacattcaaatggccaacaggtgtatgaaaactggttcaacactgttaattatcagggaaatgagaactataatcacaatgagatatcacctcacacatgatagaatggctatcatcaacacaagaaaataagtgtcagtggggatgtggtgaaaagggaacccttgcacactgttaatggaaacgttaattcagtcayggaaaacagtatggatgttcctcaaaaaattaaaaatagaaatactatatgatccaacaatctcattattgggtgtatatccaaaggaaatgaaatcagtacatcaaagagatatttgagctcccacattcattgtagcattacttaacaatagccaagatatgaaaataactgaagtcctcatcaatggatgaatggataaaaacatatggcatatacaagttggcattcgtaatataacagcccaaattcaaaatgctccaaaatcc

SEQ ID NO: 106643 - DNA, 571 bp, Homo sapiens
aacagtaaaaaaataaataaataaaataaaataaaattttgacttttgtgacaaaatggatgaatcccaggacattacgttaaataaaattgcaaracacagaaagataaatgtggcattctatcatttatatgttgaattttaaaatgttaatctcatagaggtagatagtagaatggttattaccagagtctggggtgataggggtggtaaagtgttgaggagatattggtcatgggatataaaattacagttagatggaaggaataagcttaagagatctattgtatagcatatttactatagttgttgacaatatattatatacttaaaaaatgctaagagagtggatgtcatatcttctcaacgaaaataataactatgtgaggtaatgctcattttaattagctatgtttaatgattccacaatgtgtatacactccatggtgcatatgataaatacgtacaatttcatctgtcaatataaaataaatacatttgaaataaataaagacaataccaactttactgtttgtgtgaattaaataaaataatatcttaaaaattcagg

SEQ ID NO: 106644 - DNA, 564 bp, Homo sapiens
aagttgattatttctttgaatgaaatatcattttatctaagcaacagtaacatctgaaatacccttttttccccattgagctacatctctgttccagattattaagtgtaaaaccagcaattcaatcattttttatccttgataacatagtcttatctaatattttccttgtggatataatttgaaaggaagaatttcattaacatttaagctcagtgaacacatacagaaatgcagttcacttttgataaatattctaattttcataaatgtcctatcttattttctctgtagatttctatctgtgagaacatatattactgtgtatgttacagattaaaaacacagtgacataaatagttttaggcagtccaaatacaactttcctttttggtatttgctaatgcagctaaatgaatctaaatgccattgatatcttatggctagctaaatacattttccagaactcttaaagattgagggacaattatttaaataaggcaaagatgcctarcatatgtttataaattgagagccaaacacaaattgtagcaatgatctaaa

SEQ ID NO: 106645 - DNA, 546 bp, Homo sapiens
tttgcattgtgcaattggttttaattatgttgattcttacaagtgtatctaaaatgtacaaatggatagatttattttctagagttgtcattttcagtggctaaaattaacgtactattgggaaaatttttgtgatctccattgtcataaatattaagttgatgatgattttgtgaattcatactttctaatgtccaagtcactgcatatagaataattaaattaatagacagaatatctttaaacactaaatgccacaagggtaatattcagtgagctataaattgctgttagcctcagtccctggaggagatatttaatatgtgagtcatcaacttttaatgtatcatttcaaacaattttgtgttcactaaaaaattgtggctgggtgtggtggctcaygcctgtaataccagcactttgggagactgaggtgggtgaattgcttgagcccagcagttcgggctaagctgggcaacatggcaaaaccccttctctactgaaaatacaaaaattagtcaggcatggtagggcatgcctgtagtt

SEQ ID NO: 106646 - DNA, 573 bp, Homo sapiens
agggttgtggtcgattgagcaagcagggggtatgtgactgggggctgcatgcaccagtaatcagaayggaacagaacaggacagggatttttcacaatgcttttccatacaatgtctggaatctatagataacataactggttaggtcaggggtcgatctttaaacaggcccagagtgtggcgccaggctgtctgcctgtggatttcatttctgccttttagttttgacttattctttctttggaggcagaaattgggtataagacaatatgaggggtggtctcctcccttattcccctgctttgagaatttcacttattagtgtgagttctcactacccatgtcttcttgcaagacacatcaacagtgattaatatagtatacctgtgctgaaggattttggtgaactaaggtagcgatgaagttttttatcatttgaaaaagtacaggtagcaaacaagggagcagtaagcaggtttctattaccattataactcctattataagagttttaaatcctcctagcactgggaaccattttccaaacatagccccaggatcaaatccatgcca

SEQ ID NO: 106647 - DNA, 622 bp, Homo sapiens
cctttagtgaggttggggaagtttacatggatgatatcctgaaatatattttccaagttgtttgctgtctcatcatccctgtcaaggataccagtgatttgtagatttggcctctttatataatcccacatttctgaaagtttttgttcattcctcttcattcttgtttattttcatctcactatcttacttcagagagctagtcttcaagttccaggatcctgttctcagcttcatctattctgctgttaatacttgtgattgcattatgaaattattgtagtgtctctttcagctctatcagaccagttagatactttcttatactggctatttcatctgtcagcacaggtatcattttatggtgattcttagtttccttggattggcttttgctgttctcctgaatttcaatgatcttcattcctatccatctatktctgccatttcagccaatgagttggttaagaacccttctttgagaactagtgcagtcatttggaggacataagacactggccttttgagttaccagagttcttgtgttggttccttctcatctctgcatgtgggtgttcctttaactgcagtgaagattgagtaaaatcaatagacttcttga

SEQ ID NO: 106648 - DNA, 603 bp, Homo sapiens
ttaacagattgaattagaaaagtttcaagttaaggctgggcatggcggttcatgtctgtaatcctagcactttggaaggccgacctgggcagatcactttaggccaggagttygagaccagcctggacaacatggtgaaaccttgtctctacaaaaaacacaaaaattagccaggtaaagtggtggcaggcatctgtaatctaagctaattgggaggccaaggcaggagaatctcttgaaccctggaggttgtagcgagctgagatggggccactgcactccagcctgggtgacaaagtgagaccctgtctcaaaggaaaaaaaaaaaagaaaagttacaagttaagaaagcataatattatcccatatcattgaccctttaatcatcctatcttgtactaataatgaaattgaatttggtctactcttctttctctgataaatacatagcaagatttactatactgattgataatattggaaacattttgtagactttcaattataatttatgaaaaaaattaactaaaataaaatctttttgtacaatcctagctcagattgggataggaaaatgaatctacagataattatattttacca

SEQ ID NO: 106649 - DNA, 573 bp, Homo sapiens
tcaagacagagagttttaattttagtatctgacttaagaatcacaaagtaaatgctcagtcagtgtgactgaagtgcaaattagtgaaatagttatcaaattttgaatctcatttcattacagttcaaataattgatgcaaaatgcaatattttgttgatgctatagagaaacccatatattgtaagtttcagttttttcttacatatattttactcatgtactaattaataatctaaaaaattmtgattgtggaaggaaattaatcaatctattacatgcttatttacaaagacacaaacacttatagcatagttttcccttaaggaaatggagaaaaactctaagcacaaaaagaaaactggcaacacatataaacatttcaatttcaattgaatattactgacagttattgttatatggttttacataatgtagacatttatgtacattagaatgaaggatgctatcctgacaattaagacaatgtgtttcaaggtgggggggtaattaggcactgtaatgtgcccaaagtaatattaagctaaaactaaaatgatcaactggatttagt

SEQ ID NO: 106650 - DNA, 574 bp, Homo sapiens
agttttgcagtatataccaaaagcaaaacacaaaacaaaacaaaacaaacccccacatatttaaatttaataagtaaagttctcttggcagagttttaagtatctgcagtagaggaagcagctggctgcattatagctctgtaaatgaagaaatattaagccaaacaaaaataccaagatgaaacttatagttttatacctggcaatgctgagcatcaaggcagtgtgtgtgtgtgtctataaagttggctgtgtaaatagtctttgtatctgttcacagctctgttatacggcaatgttttccagaatatctcatttggtatttccattaactgtgaggaaaacccagccagtaaactggtatgcaaatgtaacaaaaaatgataatgattttgatgattaataaaagaaaagggaagagtatctgtaagattcatttacctaccatccctaactacawccttggtaataacatcctaagttttcagtgagtaccactttgtccaactctgaatctatgtcattgaaatgttgttaactaggtaggatcacccaggtttagtcaatgagaact

SEQ ID NO: 106651 - DNA, 557 bp, Homo sapiens
atgatcaccagcaatatcccagaactcaaatatgaaaatgagtcagttcctggggccatggagaagtgaaaaaaactctgagcagatggtaaaagaattggatttccatatctgcaagacccctcccctacatctgcccagcaccaagcatgcagaaaatttcttctgactcatggtttctacactggaaaaagtwagattgaggtggacaatcagcttccccactatcttgggtttactggcaggagacctgtttctgcctcaacacatgggcagcatcatgagtgcctgaagggaaaaatatctccgaggacatcaagagaaaaaggaggaaggtgagacttccatccagccctggaaaccctggtccgtaactcaggcaaaagagacaccaaatcagagtggctgttcagcaccaccaggctgtaggaagtatgttccacaggtcccatggacacaaatccctaaccagccttctcatactgctgcaatatgccctttgggacctcccacattctggaggaacagcgctctgattgtgtgctagagccaaggca

SEQ ID NO: 106652 - DNA, 609 bp, Homo sapiens
ttttcttttcccacagagccctgacagatgagaaccaggaattttttgttgaagagctttcatcctttagtcatggaattattctggagcattttttcctcttcttccaagtgttcaagtaataagaaagacagcaggatcttttatttcagaacaaacatgaagttatttaagattatgttattgaatagtcaaaagattactatggagactaaagagtgctttcaacctagaaaaatgactttgaattaagaaaaaaataccttaaacacttgtcctagataagagccagtgtgaattgcctaagcactgactatgtgatttttcagagtgctatttcgcaaagtcatcccacagccagatttctaaacatagaccttgtaaatmggagggaaaaatccagaagacatttttgtacactagggtcagatgaaaatttccactctgtagtactttgtcctctaaacaactttatctctctgccctttattttaaattttggagaatgggggtggagggttaattaagaaagtcaaacatttatagaaacatttaagtaatcaaattgttattatgtcttgacatctggtctttcccatcttacatctt

SEQ ID NO: 106653 - DNA, 543 bp, Homo sapiens
agatttattataaagtttatacataaaaaacatgatattaatgcaaagttagaaaaacagattcttggaacagaatagagacctcctaaaataataaggatgctcaaaaatttgatttgtgagagtctgcatattgaagatcagtggctaagggataagatactctataattaacctcaagaaactcaattatcagtatagaacacaatcaattccatataaaaacctaaatgagaaagataacttcataaaaataattttcatatagttaagaatttttttaaataaggctttaaraatcataaaagcttgatgaaactgtagtaaattttaattttcaatgaaacgaaaagacaacataagttttaaagagcaaactacaactttgttgaagatgtttgccatacttaagatgtaaaatttattccaaaaacatttaacatttagttcttgaaagaagcctggacctgtggatggaatcaatgctgaagagccatagaaaaagggaaaaggagttgaagttggagggtgcaagggtgcccc

SEQ ID NO: 106654 - DNA, 578 bp, Homo sapiens
gctatattccattgggattaatatgctgagcaatatttacatctccaaatatcaggtcacaatccctattatatgttgaagttagaatgataaattatatgttttgcatatcagagctggtatcacttttcccacagggaatgctgcctgaaattaacatattcccaagggtaaaatgcatattctctgaaatgcattttattatgacaatgcatgtatttactcataaaaacaataaacacagacaattctacactagctctcaatctgtggatttagaatttcaggttaaaatcagccatccaccttgtatagggagaagagttctgctagtgtttacaataaagtgattccttkgaattagaaatagtaatgctgtttttttttttattttgaagtgggttctacttatttatgattggttttaattctggcatttcatcttgccaactactatcctgtttaagcaatgttgtcagctaaaaggaatttctgattaaactaaagtggtccagtgataagttacatacacaccctactttgaataatcccagccaaattggagaaaaatgctacca

SEQ ID NO: 106655 - DNA, 578 bp, Homo sapiens
gctatattccattgggattaatatgctgagcaatatttacatctccaaatatcaggtcacaatccctattatatgttgaagttagaatgataaattatatgttttgcatatcagagctggtatcacttttcccacagggaatgctgcctgaaattaacatattcccaagggtaaaatgcatattctctgaaatgcattttattatgacaatgcatgtatttactcataaaaacaataaacacagacaattctacactagctctcaatctgtggatttagaatttcaggttaaaatcagccatccaccttgtatagggagaagagttctgctagtgtttacaataaagtgattcctttgaattagaaatagtaatgctgtttttttttttattttgaagtgggttctacttatttatgatkggttttaattctggcatttcatcttgccaactactatcctgtttaagcaatgttgtcagctaaaaggaatttctgattaaactaaagtggtccagtgataagttacatacacaccctactttgaataatcccagccaaattggagaaaaatgctacca

SEQ ID NO: 106656 - DNA, 608 bp, Homo sapiens
ctgcaatacaataatgtcccgctttcaacattggacagatctagaccaaaaatcaacaaggaaatattgaacttgaactatactttaagccaaatggacctaacaaatatttacagaaaacttcatccaacaacaattgaatatacatttttctcaattgcacatggagtattctccagggtagatcatatgrtatatcacaaagcaaatctcaacaaatttaagaagactgaaatcttatcaagtatttcttctgaccacaatggcacaaacctagaaatcaataacaggaggaatcttggaaaactctatgtggaaattaaataacatgcccttcaacaaccaatgagtcaaataaaaaattaaaaggaaaatttaaaaatatcttgagacaaaaaaaagaggaaactgatattgatgcaggattttttactccttagctcagctaggtctgggctcttgtctcatgaccaggaataattaggcacgcagacacttgaagagtgactggagtagaatttattaagcaaaaggaatgttctcagcaaagagaggggtcctgaaagcaggttagtcattgccccctcagagctgaatacaagggcttt

SEQ ID NO: 106657 - DNA, 558 bp, Homo sapiens
gaacaaggtagtgatggatctgatttgtattgttaaaagaacctggctgtgatatggagaatagactatagaaaagggcaagggcaaaggcagggaactcaggaggccacaggagcaatccagtgttggctaggggcagacaggggctgaggagcagagttggagggctccgatttgggaagtactttcatggtgaaccacctgtctactaagagaagacagtttggggcatgctgtgtttgtgacrcctgttagacatccatgcggacataatgagagggaggtcagctatagcagtcttgagtccaagagctgcagatttttttggttttttttttttgagacagagtttccctcttgttgcccaatatggagtacagtggtgcaatctcagttcactacaacctctgcttcctgggttcaattgattctcctgcctcagcccctgaaatatctgggatttcaagtgtgtgccaccatacccggctaattttgtattttttcagtagagacagggtttcaccatgttggtcggctggtctcgaactcctgacctca

SEQ ID NO: 106658 - DNA, 558 bp, Homo sapiens
gaacaaggtagtgatggatctgatttgtattgttaaaagaacctggctgtgatatggagaatagactatagaaaagggcaagggcaaaggcagggaactcaggaggccacaggagcaatccagtgttggctaggggcagacaggggctgaggagcagagttggagggctccgatttgggaagtactttcatggtgaaccacctgtctactaagagaagacagtttggggcatgctgtgtttgtgacgcctgttagacatccatgcggacataatgagagggaggtcagctatagcagtcttgagtccaagagctgcagatttttttggttttttttttttgagacagagtttccctcttgttgcccaatatggagtacagtggtgcaatctcagttcactacaacctctgcttcctgggttcaattgattctcctgcctcagcccctgaaatatctgggatttcaagtgtgtgccaccataccckgctaattttgtattttttcagtagagacagggtttcaccatgttggtcggctggtctcgaactcctgacctca

SEQ ID NO: 106659 - DNA, 448 bp, Homo sapiens
aggcttcaatgtgagacaaatctgggtttaaacccccactcagccacttcaaagccgtgtgaacttgtgtgaatttcccagcctcccctagcctcactttcctcacaggcgaaaaggataatgatacttatccacaaggtagttagttacaaggatgaaatgaaatgtgctatgtgtgtgtttggcactgtatgacctatgacaactgctattattgttttagaaatattatttattctggtgggtcttgggaataaggcagcttcctggaaatcatacctggggcaaaggccagagccaggcccaycacatgggtgaccagtcgcccagcccttcagtccctactgcctctggtagggctggggagaaaggaggattgtagatatgaggaattaggccaggtagaacagcagctccccaaaacctaagcataagttgtgaggaggtt

SEQ ID NO: 106660 - DNA, 622 bp, Homo sapiens
atttgaaaaacacatgtggcttacacaggaagcctcgaaaatactgagcctctgactggcaacagcattacaataagatgccataagccttgtcttcactggataaaattgagttctgaagaactgacaggtatccaaattgatctaaagctgctcacatggtaatggtacatccaggctttaagggtcaaccaggcctcctcaccaaggacattcacaagactgaaatagactcgccggaatttattctgaggacaagaacaatccatgccaatccaggtagatgggcccagtctggtctaatgtctagaataataccttgtttatagatggatcagctgccacracccaaggccagacccaacagacagcagcagcactcagacccaaggaccaaaaaatcccgaagacatcaggcaaatcactctctgcacagcatacagaattgattgcagttgttccacatcagacactcagtattagaaaatcaaaagaaaatttacattttatagattcatggatagttgcaagtggcatagccctatggtcatataaatggaaacgaaataatttcaaaattaatagtgaagacatatggtacaaatattactgggaggagata

SEQ ID NO: 106661 - DNA, 589 bp, Homo sapiens
actccaccctcttgcaaagctttattatgaagaggaaacatatctgctaatccttcatttactgattttaatggggttgaagtaatygatatgtatacataatagaaatggtgtattttaaacatcatgacatctaaccagccaagcagtaatatttgcaaactggacagcactctcttagttgatggtaaaagtgacacaaatttaagtaggcatagtcaactcatataaactgcatgtaatttggtaagagaaaatgaagaatgaaagagtagtctgactctcaacttacaaaatagcatttcattttacaaaatagcatttcattttgctcttgctagacttttctaatgaaagcttttcagctcagttaaaaattaatcatttaagatgcattctctacaatgccatatgactattttctaataggtatatttacacatacatattatatgccattctaatttgtaaataccttttgttggcacaacatgtttacattcatgatctcatgtgcccatcacagaagttgagaacaccaagcatttctatcattattttttttttttccagaggaataaatggtcac

SEQ ID NO: 106662 - DNA, 589 bp, Homo sapiens
actccaccctcttgcaaagctttattatgaagaggaaacatatctgctaatccttcatttactgattttaatggggttgaagtaatcgatatgtatacataatagaaatggtgtattttaaacatcatgacatctaaccagccaagcagtaatatttgcaaactggacagcactctcttagttgatggtaaaagtgacacaaatttaagtaggcatagtcaactcatataaactgcatgtaatttggtaagagaaaatgargaatgaaagagtagtctgactctcaacttacaaaatagcatttcattttacaaaatagcatttcattttgctcttgctagacttttctaatgaaagcttttcagctcagttaaaaattaatcatttaagatgcattctctacaatgccatatgactattttctaataggtatatttacacatacatattatatgccattctaatttgtaaataccttttgttggcacaacatgtttacattcatgatctcatgtgcccatcacagaagttgagaacaccaagcatttctatcattattttttttttttccagaggaataaatggtcac

SEQ ID NO: 106663 - DNA, 577 bp, Homo sapiens
ttgtaaaattcttaaaattttctatgctgtgcctgttcatcattcctcctaaccccctgaaaccactgatcatcttattgtctccatagttttgtcactttcagaatgtcacatagttataatagtakatggccttttaaaattggctcatttcacttaacaatatgcatgtaagacccttctacgtcttttcatggcttgatagctaatttccttttagcaatgaataaatattccgttgtctggaagtaccactacttatttatccactcacctactgaagagcatcttgattgttttggttgtttccaacctttgacaattataaatgaagcttacataaatatatgtgtgcagattttaattttaactcatttgtataaatagctaggaatatgattgctggatcttttggtaagaccatgtttagctatgtaagaaactgccaaactattttccaaagtagctgtacaatgtgcatttaaatcagaaccaaatgagagtttttgttgctccacatccctgctaacatttagtgttgtcagtgtcctgaattttagccattctaataggtgtg

SEQ ID NO: 106664 - DNA, 577 bp, Homo sapiens
ttgtaaaattcttaaaattttctatgctgtgcctgttcatcattcctcctaaccccctgaaaccactgatcatcttattgtctccatagttttgtcactttcagaatgtcacatagttataatagtatatggccttttaaaattggctcatttcacttaacaatatgcatgtaagacccttctaygtcttttcatggcttgatagctaatttccttttagcaatgaataaatattccgttgtctggaagtaccactacttatttatccactcacctactgaagagcatcttgattgttttggttgtttccaacctttgacaattataaatgaagcttacataaatatatgtgtgcagattttaattttaactcatttgtataaatagctaggaatatgattgctggatcttttggtaagaccatgtttagctatgtaagaaactgccaaactattttccaaagtagctgtacaatgtgcatttaaatcagaaccaaatgagagtttttgttgctccacatccctgctaacatttagtgttgtcagtgtcctgaattttagccattctaataggtgtg

SEQ ID NO: 106665 - DNA, 577 bp, Homo sapiens
ttgtaaaattcttaaaattttctatgctgtgcctgttcatcattcctcctaaccccctgaaaccactgatcatcttattgtctccatagttttgtcactttcagaatgtcacatagttataatagtatatggccttttaaaattggctcatttcacttaacaatatgcatgtaagacccttctacgtcttttcatggcttgatagctaatttccttttagcaatgaataaatattccgttgtctggaagtaccactacttatttatccactcacctactgaagagcatcttgattgttttggttgtttccaacctttgacaattataaatgaagcttacataaatatatgtgtrcagattttaattttaactcatttgtataaatagctaggaatatgattgctggatcttttggtaagaccatgtttagctatgtaagaaactgccaaactattttccaaagtagctgtacaatgtgcatttaaatcagaaccaaatgagagtttttgttgctccacatccctgctaacatttagtgttgtcagtgtcctgaattttagccattctaataggtgtg

SEQ ID NO: 106666 - DNA, 460 bp, Homo sapiens
ccacccgaaaacactaggttgaatcagcaagagagatggacatatattaaatctcagcaatgaaataaaattattaaaaaatgaaccagtaactttcagcttctggttctgcatgtaagaagcttagaagttgccactttatcttaacaacaagtataaagctaaagaaaatgaaaaattaacaattcctcttggatccctaagagaggtgaggatatagggcaaaccattgcmcccaggactggagagaaaaaaatggtgaatacagggagtaacagcttatcacagcagaaaagcagagactaacaagtaaaaaccaacctgggaactagtgcttgagtaggaaaatctgaattctagttgatgaattgcctgaggctcagtgtggacaggattgaaagttaaaaactccagaagtactcagccatgggtggggagaaaatgtgaaatttatctccag

SEQ ID NO: 106667 - DNA, 576 bp, Homo sapiens
ctgttactttcaatctatttgtgtttatgaatctaaattatgttttttatagaaagcatacatctggaaacttttaaaatccagtttgtttatttctctcttttgataggagtgtttgagccattcatgtggaatttaatgatattaatttaatacaattaatatctacttttagatgttgtgattagacttaagtttgtcatttgtaatttgttttctatatatctcacattttttgttactgtgtcttccatcctgcttcttctgtgaaacaaatrtactttagtctatcatttcagttcctctgatgaatttttaaaatgtatttttagttatttttcaaatggttgctttagtgatcaaaatttgcatcttaacttaccataatttactccagattaatgttgacaattcatataaaatacaagaactatgctccaatatagttccatatactcacatctctaaggctttgttatttctcttcaaccattttctctttgtttctcatacttctatttatctatcttcaagtttattgattctttcttctgccctcttaaatctactgttgtt

SEQ ID NO: 106668 - DNA, 576 bp, Homo sapiens
ctgttactttcaatctatttgtgtttatgaatctaaattatgttttttatagaaagcatacatctggaaacttttaaaatccagtttgtttatttctctcttttgataggagtgtttgagccattcatgtggaatttaatgatattaatttaatacaattaatatctacttttagatgttgtgattagacttaagtttgtcatttgtaatttgttttctatatatctcacattttttgttactgtgtcttccatcctgcttcttctgtgaaacaaatatactttagtstatcatttcagttcctctgatgaatttttaaaatgtatttttagttatttttcaaatggttgctttagtgatcaaaatttgcatcttaacttaccataatttactccagattaatgttgacaattcatataaaatacaagaactatgctccaatatagttccatatactcacatctctaaggctttgttatttctcttcaaccattttctctttgtttctcatacttctatttatctatcttcaagtttattgattctttcttctgccctcttaaatctactgttgtt

SEQ ID NO: 106669 - DNA, 576 bp, Homo sapiens
ctgttactttcaatctatttgtgtttatgaatctaaattatgttttttatagaaagcatacatctggaaacttttaaaatccagtttgtttatttctctcttttgataggagtgtttgagccattcatgtggaatttaatgatattaatttaatacaattaatatctacttttagatgttgtgattagacttaagtttgtcatttgtaatttgttttctatatatctcacattttttgttactgtgtcttccatcctgcttcttctgtgaaacaaatatactttagtctatcatttcagttcctctgatgaatttttaaaatgtatttttagttatttttcaaatggttgctttagtgatcaaaatttgcatcttaacttaccataatttactccagattaatrttgacaattcatataaaatacaagaactatgctccaatatagttccatatactcacatctctaaggctttgttatttctcttcaaccattttctctttgtttctcatacttctatttatctatcttcaagtttattgattctttcttctgccctcttaaatctactgttgtt

SEQ ID NO: 106670 - DNA, 599 bp, Homo sapiens
taagatgatttttgaaagcctcgtgataaccaaaagcaaaaacatactactatgttttatttttactcactaaaattggaaagaaacaaactaaaacatattacaaagaaattaaccacaaacgaagacagtaagaagggataaaaggaagaaataagttacaaaacaactagagaacatgtattaagatggcagcagtaagtccttatctatcaataataacaatgaatgyaaacagattaagttctatgatttaaagacacagatttgctgaatggattaaaagcaaccacaaagactcaactatatgctgcttacaagaaaccagcttaacctataaagacacacatagactgcaagtgaagggatgaaaaaaagtatattccatgcatctggaaaccaaaagagagaagaaatagctatgaaacattctccagaatagtgcatatactcatgttaggccactaaacaagtctcagaaattcaaaaatttggaggaggaggagaaaaaatcatatcaatatattttttaatcaaaatggaataaaaccagaattcaatatcaagagaaattatttaaacactacaaacacatggaa

SEQ ID NO: 106671 - DNA, 589 bp, Homo sapiens
gggtgcccatggaactcttgctgtctaaatgccttaaatttgtgacttcagatttagtcttttcctctatagtgaatgaatgagtttctattttttatatagcttttttatttccacttgtaaacttctgtttattatgtaggatcattgattaaatgccctagatgttatggggggaatatatagaaaaaaaagacaaaatgtaaaaactctgtgcaatacatattactaatactatttcatttaaccaagagccagttgtgggggtcagatggtactaattccatgtataagttaaaaaactaaaatttgaaggtttttattaatttaccaatgtcacwcagctaagaaatgggagaactatgattcgaactcaaatgtgtatgaatccaaagtccctgagtttttttctttttgtaaaagcaatacaagcttacagtagagaattgcaaaatgtaaaagacaaattgtagaaatgtcaccccaaattacaacatatagagacaactactgttaatatgttaatgtgcattaaaatgtacacacacaaaaaacagcataatcggtatcacactgccatatataattg

SEQ ID NO: 106672 - DNA, 482 bp, Homo sapiens
tcccattaatttataacatctatgacgctattagtcctttatatcatttgcatatatctctacatgaataagtaacaaagagcagggatcttaaaatatatgacaaatcaatatctattacaaaactcccactccccagcaaaaacggagtaagcagaggatatgctactaagcaacattaagaaattgcacatctgaactagaggaacgtttttacttagtgtcgctgaatggcacttatgrgagtaagaaatgacactctacttttaagagtatattctgttgatgaaaaatcatatttatttcaagcttgaagagaacaaattataccagaaaccgattcctggaaaaaaatctttacaaaaatattaaaagggaaatgagattatgttaatttttaaaaatgtaataatatttatctctaagaaaataaaaaaaagcagtctttctttccaccaatcagcaatgggcatgaattggct

SEQ ID NO: 106673 - DNA, 615 bp, Homo sapiens
ttattcatttattcatgaaggtatcaaatatttttcaatatctcctctctagtaggtattgagcatagactaattataatataacttcatttggtagtttccttayggtcagtattatttatatagatactgtgacatctctgcatcatggcaatgattccgaatttattttgaagggaaaggccagaaaaatatgaatatcttgagattaaaatgtatttaaaaaacaaaagtgaaatagcaaataagtggtacaattatagagatgaagattaaatatggattaaagggagggcatcagtttatgtaacattattacatatcactcagtagcactctttttctatactcaattgttgaagccagaaatctgagaatgaaaattggccttgctttcacccatgtaacccatttccaattagacatctgtcttgtcaattctaccatcataaaaaaatatttatgaagtgtttccttctctacctttggtttccttagggttcagccaataaaaaaaataaaaatgaacaaaactatgccatttaagagctgtatttttggaaccataaacaagatttatagaccactagctagattagcaaagaaataaaggaa

SEQ ID NO: 106674 - DNA, 615 bp, Homo sapiens
ttattcatttattcatgaaggtatcaaatatttttcaatatctcctctctagtaggtattgagcatagactaattataatataacttcatttggtagtttccttatggtcagtattatttatatagatactgtgacatctctgcatcatggcaatgattccgaatttattttgaagggaaaggccagaaaaatatgaatatcttgagattaaaatgtatttaaaaaacaaaagtgaaatagcaaataagtggtacaattatagagatgaagattaaatatggattaaagggagggcatcagtttatgtaacattattacatatcactcagtagcactctttttctatactcaattgttgaagccagaaatctgagaatgaaaattkgccttgctttcacccatgtaacccatttccaattagacatctgtcttgtcaattctaccatcataaaaaaatatttatgaagtgtttccttctctacctttggtttccttagggttcagccaataaaaaaaataaaaatgaacaaaactatgccatttaagagctgtatttttggaaccataaacaagatttatagaccactagctagattagcaaagaaataaaggaa

SEQ ID NO: 106675 - DNA, 615 bp, Homo sapiens
ttattcatttattcatgaaggtatcaaatatttttcaatatctcctctctagtaggtattgagcatagactaattataatataacttcatttggtagtttccttatggtcagtattatttatatagatactgtgacatctctgcatcatggcaatgattccgaatttattttgaagggaaaggccagaaaaatatgaatatcttgagattaaaatgtatttaaaaaacaaaagtgaaatagcaaataagtggtacaattatagagatgaagattaaatatggattaaagggagggcatcagtttatgtaacattattacatatcactcagtagcactctttttctatactcaattgttgaagccagaaatctgagaatgaaaattgkccttgctttcacccatgtaacccatttccaattagacatctgtcttgtcaattctaccatcataaaaaaatatttatgaagtgtttccttctctacctttggtttccttagggttcagccaataaaaaaaataaaaatgaacaaaactatgccatttaagagctgtatttttggaaccataaacaagatttatagaccactagctagattagcaaagaaataaaggaa

SEQ ID NO: 106676 - DNA, 470 bp, Homo sapiens
ttcaacatttcttttgattcagcaggttggaagcaccttttctgtagaatctgcaaagggatatttgggagtccattgaagcctttggtaaaaatcgatatcccatgataaaaactagaaagaagctatctgtcaaaatgctttgtgatgtgtgcattcatctcacagagtaaaacctttgttttgatccagcaggttggaaacactgtttctgtagattatcygcaaggtcatttgggagcccattgagtcctattgtgaaaatagatatcccacaataaaaactagaaagaagctatatgtgaaaataatttgtgatgtgtggactcatctcacagagttaaacatttcttttgattcagcaggttggaaacactctttctgtagaatctgtgcagggacttttaggagcccattgaggcccactgtgtaaaactgatatccagcgataaaaatgagaaagaagctat

SEQ ID NO: 106677 - DNA, 459 bp, Homo sapiens
ctaggaacaggggtactaccctgggccatacgtattggagtgcttcacatatataaacactgaaacacaaatacaaatgtaatttatatagtgtattaaataaaaatgcaaatatatatgtcattataatttttaagaattmtcttaagaaagtttgttgaatatttgtacttaatcaagcgaattaaatgttctggagatggactttggaggaggactttgcttgtcaggccacaggatttagtgatactgacaacacaagcagatgatgagaggaaagaactcgggtcacctacagagagtacctaaggaactcggttccaaagataaatggtgcttcatttctcccctctgttgtatggtggtgttttgggaagtgctgagtacagtacagtgtgagggacaggaatgctgaataatatgtggtatgagaaagggaaccagcctgccctgatttgc

SEQ ID NO: 106678 - DNA, 527 bp, Homo sapiens
tctatctacaaatttaatctgacagtttgacccttgcacatagggcaggatgtcaacatttcacttctactactccttcaaaaccagtatttgagttctaatagccaagtccatttttcwgttctattttaatttttaacattgtatctactcttaaattacctttatctctaatttcagaattaatctctgtcatctagattctatcatctttctaaattctcagagacctcacttcaccaattttccctcagatttgtttccttaaatcatgtctactttcaggcctttcacaatttaaaaaagacaaaatgatgcgctatcaacaatacacctttttctagtataaatcttacatttgaccattctccttcttttccttcacagctcatctttctgagttgaagcatctcctgtctcaacttccttgtggctcactcaatccttaaccctcttaaaaacacacctcttcacctgtctcacaagtgaaacatctcttggcaaaatcacaaattgtttccatctat

SEQ ID NO: 106679 - DNA, 563 bp, Homo sapiens
ttgatggaacagaagagagagcccagaaacaaacccgcataaatatagtcaactgatttttcacagaggagtaaaagcaatctggttaaaaaacatagtctttccaacaaatggtactgccacaactagacattcataatgcaaaaaaaaaaaaaaaaaaaaaaaaaaatctaaacacagactttatacccttcacaaaaattagctcaaaatggaccatagacctgaatgtaaaatacaagattataaaattcctagaacataacaagagaaatctagatgaccttgagtttagtgattactgtttagacaaaaacctaaggcacaatccatgaaacaaagaattggtaagctgggctttattaaaattaaaaatttctgctctgtgaaaagcactgctaacaaagtaaaaagaaaaccccaatgttgggagaaaatatttgtgaaagacgtatctgataaaggattgctattcaaaatatgcaaagaactaaaaactcaacaataagaaaacaaacaagccagttraaaaagaaagaaaaaagaaccatagaccttaatga

SEQ ID NO: 106680 - DNA, 571 bp, Homo sapiens
aaatgttagcaaattttatttctaaataattataaaactagtaatacaytaagatgcacaaaaaatatcataaaagatagtaataatgtttggctgtgtccccacctaaatctcatcttgagttgtagttcccataatccctacatgtagtgggagggacctggtgtgaggtaattgaatcatgggggtgttacttccatgctgttctcatgatagtgagtgagttctcatgagatctgatgattttataaggggctttccccgcttttgctcattcttctcctttctgccaccatttaagaaggatgtttgcttcacattttgccataattgcaagtttcctgtggcctccccagccatgtcgaactgtgagtcaatgaaacccttttcctttataaactacccgatctcaagtacctctttatcagcagcgtgataatgaactaatacagatagtgctgattttgtagtgttggtgtacaaataccatagatcagatgaaaatacaacaataattttgaaaatttaatgatttttatgtaactctatttacatcacagatgatttaaga

SEQ ID NO: 106681 - DNA, 517 bp, Homo sapiens
aggacccagtgtctatagttcccttttttcctatccatgtgtactcaaggtctagctcccacttgtaagtgaaaacatgtggtaattcatttactgtttctgtggtaacttacatggaataatggccttcatctctatccatgttgctgcaagaacatgatctcgttcttttttatagctgcattgtattccatcatgtatatttaccaaatttccttcatttagttcattgttgataggcatctaggttgattccgtgtctttgtattgtgaattgtggtgcaataaatatatacatgtatgtgcctttatggtaagaatgatttccatttctttgagtatatgccaagtaatgggattcctgtgtcaaacagtagttctattttaagttccttgagaaatcaccaaactgctttccacagtggctgaactattttacatrcccacttgctgtgtataagcattcccttttatgtacaaccagacaaacatctgttattttttgattttttaataa

SEQ ID NO: 106682 - DNA, 481 bp, Homo sapiens
ataaatagaattatactgtgtgtaacttttygggttggcatttttcactcagcgtaactctccagagattcacctaggttgttgcatatcaatagtttcttcatttttattgtagaataacattcgatgatatggatgtatcacagttgttttaaccattcagccatagagggatgcttggattgtttccaaatttgggctgttatgaataaaaatgttataacatattcatgtacaagtttttgtgtaagataaatttccatctttccaggataaatgctcaggagcacattgctagattgtattatagttgcaggtttagttatttaagaatcaagaagccttgctttttttaaatggaaaggaaaaagaaaggttttcagagttagatggtaattactgcagtaatattgatggaacagtactttctcaaatgtttgcactattttatagacaggactcaatttaagtttaatttttg

SEQ ID NO: 106683 - DNA, 532 bp, Homo sapiens
ataacatctctttcctgttgttttcaccgcaccctccagccccccgtctctggaaagtttacaataactgtgcctcatgacatagcwtaaggagtgagtgctttgatctgaaaacagacacacttgggttcaaatcctgactcagacctattcgagcagtgggatcttaggaaaattatctccggaaccttaaatttgcatacatttaatatgaataaacgttattaacatatcctctatgtcatagggttgtgaaatgctttgtgtactacctaggacagagtaaaatcaagaaacattgactgttaataataatgaagactggaataagacttctgggatgtgacattaaaaaacagcaaaattcttgccagttaaatgtaaaatttaccagagatgagaagagagtgtttttctattttgttttgtttagagggacagtgcgatatagcattttagttggaaaaagctgagctatggagacaataaagacctaagtttgaatccatgctctgtctctgattaagcccca

SEQ ID NO: 106684 - DNA, 535 bp, Homo sapiens
gggaagaatcatctggaggcatgttcatcagcatggctagagggtgatgttggctgtcagctaggacctgagcaggtctgtaggctggattgcctccatgtgccccctctgtgtgacctggcttcctccacagcagggcagcctcaggagagtggggcttctcacatgcagtccagagtttcagggatccaygtagaagttgcatcattttttgtgatctatccttgaaagttgcacagcatcattttattaccaaaatgccagaggtttggtctaagtcctgctgttcactccacagaaagccaatcactgagacaacaagtattgccagggaagaaggctttaatcaggtgctgctgttgaggatatgggagatcagtctcaaattcacttccctaactgactacaattaggggtttctaaagcagggaagaaatgtaaccatgtgcggggaaacaggaattagggagaggtagggaagaggagttcaccaacagaaagctggtgcttatttaagcagtcatgatgggtgagg

SEQ ID NO: 106685 - DNA, 589 bp, Homo sapiens
gagtaaagaaaaggcacttccatctatgtagcttcagacaagttgttgggatgggctctaattggctagactttgatcatgtgcccatccatgatccaatcactgtggcataagtagtgcaatgctgaggctgctgtgttaggccttagatatacacctaccttgaagtccagcactgtggaaaagtcattacacataaaccataaagaatgtgtctccctcactcccccctccaggaccatttacagagagaagaattgaaggcgggaatgcatatggacagtgaaaaaataatacatttcaacatcctctactcccagccagttggtgtgaaatccaggatttggacacagatwatctgtcccttcatccagtactattctgagaaagacttgtggtagcagagtcacagaatttacctcatttaacattcatcattacacctgggggtgaaaattattaaccccatgttataggtaaggaactcaagtatgcaagtaaagcaggcttgcctaagtttacagtgtttgtaagtgaccaagccagaaactaaacttaatgactatttgattttatttttggattcctt

SEQ ID NO: 106686 - DNA, 593 bp, Homo sapiens
agggctaaacttaaattattttggcttattccccttgaagtcactaattagcatttggtttgtttcttttcataacatcattctttaatcaacaaacatttccaagagcttttctgttatcagatctgatttgctggcttgtccaagagtgattccactaaggtgtytgatagagaagggagggggcttcctgcagggcagagaaggcttttctaggagcccaccacagagggtaccttttcacactttgcacaaggactttatgtggatgagctgcagcctgagtaataccatcatgtcactgcagtaaagcctacaccatggtttctcagaggttacaggaaggctttgtagtcggtgcaaagtaaaccctcaatacattttagctagcaattgagagagtactgtatgtgtgaaatgcaaactggtttccttttttggaagagaggaggagaggaagtaattgaagtaattcttgctgtgtttttggcttatcaaaaaaggtggatcactttgtgagagactgaaggagttagaagcaaaagtgatgtttttccctcatctaatgaggactgagacttggggagaaaatg

SEQ ID NO: 106687 - DNA, 593 bp, Homo sapiens
agggctaaacttaaattattttggcttattccccttgaagtcactaattagcatttggtttgtttcttttcataacatcattctttaatcaacaaacatttccaagagcttttctgttatcagatctgatttgctggcttgtccaagagtgattccactaaggtgtctgatagagaagggagggggcttcctgcagggcagagaaggcttttctaggagcccaccacagagggtaccttttcacactttgcacaaggactttatgtggatgagctgcagcctgagtaataccatcatgtcactgcagtaaagcctacaccatggyttctcagaggttacaggaaggctttgtagtcggtgcaaagtaaaccctcaatacattttagctagcaattgagagagtactgtatgtgtgaaatgcaaactggtttccttttttggaagagaggaggagaggaagtaattgaagtaattcttgctgtgtttttggcttatcaaaaaaggtggatcactttgtgagagactgaaggagttagaagcaaaagtgatgtttttccctcatctaatgaggactgagacttggggagaaaatg

SEQ ID NO: 106688 - DNA, 623 bp, Homo sapiens
catagtttgctactattttctcccattctgtaggttttctgtttatactgttggtattttctttttttctgtgcagaagctctttagtttaattaggtacctactacttgtttgtttttgtttgttgcaattgcttttgaggacttagtcataagttatttcccaaggccaatgtccggaatggcatttcctatgtttttttgtaggattcttacagtttgagattttacatttaaatcttcaattcatcttgagctaatttttgtttactgtaaaatgtaggggtccagtttcattcttctgcatatggctagccagctatcccagcaccatttatggaataggaagttctttctccattgcttatttttgttgatgttgttgaagatcagatgggtgtaggtrtgcagctttaattctgggttctgtattctattccattggtctatgtgtctgtttttgtaccagtaccatgctgttttggttattgtagccttatagtgtagtttgaagtcagataatgtgattcctccagctttgttctttttgcttagaatatctttggctattcttttttgttccatatgaattttagaatagttttttctaattctttaaaaaat

SEQ ID NO: 106689 - DNA, 410 bp, Homo sapiens
tttatcttttccaagatcaagacttaacttcgctgggctctctgattattgcaaatcatagaaacaatttcaaaagcagattacattggtgaattatctttaactacccatttttcttattataccttttgctccttcctttagttgttggtgatagtttcagcacttcctacaaaatgggagaaagactgcagggaatttgccagttattgttgttagatataattttatgtcctaagcattccatctaaagttctagtacttagaaaatattcagtttatttctcatgtgttacaaggccaataaaaagctaatagataattgtgggtcagaattttaaaggtcagcattatgtttttgcttataatttaycactttcttgattatcactcataagaacttaacatgc

SEQ ID NO: 106690 - DNA, 560 bp, Homo sapiens
atctcctttgactctatttctcacatccaggtcatgctgatgcaagaggtgggcccccatggctttggccagctccacctctgtggctttgctgggcacagccccactcttggctttcacgggctggtgttgagtgtctgcattttttccaggcacacggtgcaagctgtcagtgaatctaccactctggggtctggaggatggtggccctcttctcacagctccagtagacagtgccccagtgggaactctctgtgggggttccaaccccacgtttcccttctgtgctgccctagcagagkttcatccatgagggctccgtcccccagcaaacttctgcctggacatccatgcatttcatctgaaatctaggcgtagattcccaaacctcaattctttacttctctgcacctgcaggcccaacaccatgtggaagctgccaaggctcagggcttgcaccctctgaagccacagcccaagctgtaccatggctgaagcagctgggatgtaaggcaccaagtgtctaggctgcacacaacaaagagggcctgggcctggcc

SEQ ID NO: 106691 - DNA, 596 bp, Homo sapiens
actattttgcatttgttatttgtagcttgaaatgtactctatacagtacattttatcttagcagttgaaaataatttataaatgtaacattatctgtcctctttacatctcaataaactagacagaaaatttttgcaatgagagttggcagacagaaaacagagtcaaagaygggtgcatagcagtttaataatggccaagaaataattaatatggaagtgatggtgctttcctaaacgagatcaatagtgaacctaaagagactatttcatcttctacacatgtctatgcttttatttcaaactatgttgatctgataaattaaaatggatataaatgtcctttatttaatgcatgattattcttagctcagttttaccatgagacttcagtggtatatactaagagttgggggctggaagtttctgcctctgagaacaagagtaatttatcactggctctgttttgaattaactaatacatgtttataataaaaagttgaccaactttttgttgattttacaattgttttcaaattctttgtatataacccccttattctcagcccctgcgggagagtcctgctactatgttgc

SEQ ID NO: 106692 - DNA, 596 bp, Homo sapiens
actattttgcatttgttatttgtagcttgaaatgtactctatacagtacattttatcttagcagttgaaaataatttataaatgtaacattatctgtcctctttacatctcaataaactagacagaaaatttttgcaatgagagttggcagacagaaaacagagtcaaagacgggtgcatagcagtttaataatggccaagaaataattaatatggaagtgatggtgctttcctaaaygagatcaatagtgaacctaaagagactatttcatcttctacacatgtctatgcttttatttcaaactatgttgatctgataaattaaaatggatataaatgtcctttatttaatgcatgattattcttagctcagttttaccatgagacttcagtggtatatactaagagttgggggctggaagtttctgcctctgagaacaagagtaatttatcactggctctgttttgaattaactaatacatgtttataataaaaagttgaccaactttttgttgattttacaattgttttcaaattctttgtatataacccccttattctcagcccctgcgggagagtcctgctactatgttgc

SEQ ID NO: 106693 - DNA, 549 bp, Homo sapiens
aaatctgcattttaaacaactattgcatttgattctgctacagcaggactgcactttgatgaaatttggtttaagtatttatttgctcaatggcaaaggttttcaaagaaaactgtctattcaaccatgcctacatcaattaataaccattacagatttttgttttaaaaatgccaaaaatagtattcaagttcttgcttgagaattctaaaatttttattggtcacagagtgcagattaaagattgaagggttgaggctcagactatgaccagatcaactgggaccagatcatcccaaccatgtttgcgatggtagrgatgataacgttctaagtctgggacatgcaggcagtgggaattgagaggtctacttccttaggctatgatctgctcccactgaggtctagctctgtaactgactagcacacgtttacctgcataattccactcacattgtgctgctggatagagaattgtgatcatcctgttagtggggaactccagcagggctagagcctaaatatatctatcttgtgctatccaatata

SEQ ID NO: 106694 - DNA, 577 bp, Homo sapiens
tggctgcacaagagtctgtctgaatctgctgtgcttctggtgactgcccgatttacaaatcattctttgctcaattaaactctgttcaatttaatttgtctaaggttttcattttaacaaaatgaatgatttaataaaggcttgtgcaaagacttaacaatataaatcatttaaaaggcttgtgcagtttttttgtttgtttgtttgttttatgagacaaggtttcactctgctgcccaggctgagtgcagtggtaaaatcatagctcactgcagcctcaaactgggttcaagcaatcctcccgcctcagccttccaagtagctgggactacaggttcgcaccaccatgccctgctaatttttaaaattttggtagacatgaggtcttgctatgttgctcagactgtgtgcaaaatgttacgtatatcttaaaaggaccctcccctgttaccagcataaatattgttttggaattttctcttacctttttttgtctttgattattttaaattttttttggatattcaatgcwattgcatagttcaacatttctaaggtaaaacaaacagtgagaagt

SEQ ID NO: 106695 - DNA, 605 bp, Homo sapiens
atttattccctggatgcaattctctgccattctccagctgccccctagccctgatcactggctgcacgtggctgcagggactatatgggcctggcagtggcacacatggggttaattaatgctcctgctcttgtccagagacaaatgttttgtattgaagagttgctgctgggaaggaaaaggaggggggaaagaaagccccttttctattattctgaggtgcattttaatttgcacaagcaacgttgtgtctgtgatggatgacacagagggaaaaattacagcccaggaagcccagcaaaggagaaaaaaaataaaagagatctagcaaggattaaaaacagcccattgtgatgctgcattctgatcaggggctgggaaagctggggaggggtgtctgagtaggayggggagcagaggactggccaggagagacagagcagtggcaggagtagttgactgataggagaccagcctggaccacatggatcctggggcccagggatgttttctctatgaaacctggcaaggctgagtctgggcacctgagaaggaaggtgccaggcagagcaaggccttgacaaattgtaatgtatgggaacttt

SEQ ID NO: 106696 - DNA, 305 bp, Homo sapiens
ataatgtcctttatagcaattttttccccaggacaggatctcatgtggtgtctgttattgsatatccctttagtctcctttaatttggaacacttctacagtctgtctttgttttttaagacattgacacttttgaagagtacaacatacacacacacacacatacacaccctcactgccttttaaaaaatagatctctcctgatttggggtttgtctaatgtttcctcatgattcaatccagttaaatcacacattgctagctggaatacttacataagtgatgttgtgtccttgtcagagaat

SEQ ID NO: 106697 - DNA, 654 bp, Homo sapiens
atttggatcaaaaggttttaccccactgacaaatagcccatattagtccatttttacactgctgatggacataattgagactgggtaatttataaagaaaaagaggtttaatggactcacagttccacctggctggggaggcctcacaatcatggcagaaggcaaaagccatgtcttgcatggcagcaggcaaaagagaatgagagccaagtgaaagaggaaaccccttataaaaccatcagatctcgtgagacttattcactaccatgagaacaatatgcaggaaaccacccccatgactcaattatctcgccccaggtccctcccacaacatgtgggaattatgggagctacaattcaagatgagatttgggtggggacacagccaagccatgtcatagcctttctagggaatatataaaaagtcarcactaacataggaaatgttatctttgtatctgcttggctccattttccttcttcttaaataacatgctattttaaagaatctgtagataaagaatgcgatcagtggggatggtgaagattcaattcagattttgtaaatactcttaagaaagagaggtctcctgatcgttctgtttgaataagatacacatgaaagtgatgcaacccaatctttccgtaacggaa

SEQ ID NO: 106698 - DNA, 486 bp, Homo sapiens
ttaaaaacttggtcaaggatacataatcctttggtagggataataatgaaattaccttgctcagtccagcacacctttaagtgtacactaaggatttgctaagatttatcaaaatgaattgttcaccacccgtctgttttccattgatctctttccatcctagctggaaatagattagtagggtctaggttgacttctagagaacaagaaccctaamtacttttgtttgtttgtttgtttgactttgtatccctagacatagggtaggactagcacactggcacatagtcaagtttcattataccaagaatgtgtatatattaagttgttaaatcctagtggcaactcagtgaagttaggatttgagcccaagttatggtaaccacagaatctaagatcctaacccactgtggtatactgcctataagtacttagggaatattttatgcctcagatcttgtctgtataagtttagccaacctcgtc

SEQ ID NO: 106699 - DNA, 567 bp, Homo sapiens
accgtttcctccatgctgttcttttgatagtgagtggattttcatgagatctgatggttttatgaatggtagctttttctgtattgacacacacttgatctcttacctgctgccatgtaagacatgcctgcttcccattctgtcatgattgtaagtatcctgaggcctccccagccatgtggaattgtgagtcaattaaacctcttttctttgtaaattacccagtcttaggaagttccttatagcagtgtgagaatggactaatacagctcactacctgggtgatgggatccatacccctaacctcagcatcacgcaatatttccatacagtaacctgcacatgaaacccttgtatctaaaataaaagttgaaattcattttaaaaggttatggtctataaaactccatttatgtaactttttagaaatgaaaaacttatagaaattataataaactactgtcagggatttgtcaggggataaagaggtagtcrgagggtaacgggtgtggttataaaagagcaacaggaaaaagaatccctgtggggttggaacttgttctgtat

SEQ ID NO: 106700 - DNA, 649 bp, Homo sapiens
catggataacaaagatacccatatcactcaagaaattccaagagttaaaatgttacctcccaggaaatggggatgccagactaattcttcattacacaatgataaatacacaaatttaacaactttcttacagagcagaaaaacatktagctctttggatttctgtgtgtgaattttgaaatgaaatgagaaaaagttggatggccatagtttataaaatatctataaccttcattctccactacctttattaaaatagataaaacccaataccatactattcatttattagacttccacttttttaaaaaaggaggaattcctttctgctgccaaaccattaacataataataataatgtgagcaatatattttttgtctgaatcaaaagcttgaaaaatgaaagcataaactataagcttaagaatcaatgagaactcaaaattgatcaaagacttgaatttaatagctaaaaccataaacttttcagacaaaaacttagagggataatcttcatgtccctggatttggtaatgagttttcagatataataccaaaagtacaggcaacaacaacaaaagtagattaattgaacttatttaaaaatttttgtgcatcaaagattattatcaagagagtaaaaagacaa

SEQ ID NO: 106701 - DNA, 649 bp, Homo sapiens
catggataacaaagatacccatatcactcaagaaattccaagagttaaaatgttacctcccaggaaatggggatgccagactaattcttcattacacaatgataaatacacaaatttaacaactttcttacagagcagaaaaacatttagctctttggatttctgtgtgtgaattttgaaatgaaatgagaaaaagttggatggccatagtttataaaatatctataaccttcattctccactacctttattaaaatagataaaacccaataccatactattcatttattagacttccacttttttaaaaaaggaggaattcctttctgctgccaaaccattaacataataataataatgtgagcaatatattttttgtctgaatcaaaagcttgaaaaatgaaagcataaactataagcttaagaatcaatgagaactcaraattgatcaaagacttgaatttaatagctaaaaccataaacttttcagacaaaaacttagagggataatcttcatgtccctggatttggtaatgagttttcagatataataccaaaagtacaggcaacaacaacaaaagtagattaattgaacttatttaaaaatttttgtgcatcaaagattattatcaagagagtaaaaagacaa

SEQ ID NO: 106702 - DNA, 554 bp, Homo sapiens
gttctttttatgttagcctaaaaaaccccattgtttcataaaaacttagcatttacttgttgcaagacagtttggacttggtttatctaagattccactgtatgggttattgatgacagaaatattggagagccagagccagatcctattatttgtaacaattgttctgcgaatgttttttcatcaggcttcagaaaactgccagttctctggggccctttgatataactaggttagtgccacaaacaggtagtagtgcactggctttgagcttcgagtgtctgcaaagcaagataaaatctaggcagtttgatggcctgtatttccagctgtstgcctcctttgtgcatggagaaataaggttgacaccctgattattttcgttttccagaaagactatgggaaatgtgctcttttaaattacaatggcagttttacattaaatcttttgttaaggtctttacatttagtctccataaatcttgataggccacttaggtaggtgaactaagaatatgacatgcagtaatgcaacatgaggggcccaatgagga

SEQ ID NO: 106703 - DNA, 591 bp, Homo sapiens
ggttgtataggagatatctggggagcagggacattcaaaatgtagaacttctctttttattgttcatttattaatcaagctttattgattattctattagatgccagatgctgtttgaggtgctggtaggaagcctgagtaaagcctgttctctgccctcaaagatacgatagggactgttcaagttagggaagcaatttatctttgttcatttttcctcctgtagtataaatktattgataccatttttttaaaattgtctttaaaccagttagagttctaaatggagaagataatggagggagcaaaggtgggaaattcataaatcagagaagatagcatataaatgtaatggaatagggaagagctcaggtgtgcctttatttaacgccaacagaattcttgaacattagcaccagtgctgtgaggtaccaagcatacaagcatacttgacatcttccttttagcactcttattggtgacaataattattttagggggtatcatgttatatttagtaataatctttctgttgatttgttcttaataaaccaatttagaaagagaattacttgcaattgtaaagctatt

SEQ ID NO: 106704 - DNA, 591 bp, Homo sapiens
ggttgtataggagatatctggggagcagggacattcaaaatgtagaacttctctttttattgttcatttattaatcaagctttattgattattctattagatgccagatgctgtttgaggtgctggtaggaagcctgagtaaagcctgttctctgccctcaaagatacgatagggactgttcaagttagggaagcaatttatctttgttcatttttcctcctgtagtataaatgtattgatacmatttttttaaaattgtctttaaaccagttagagttctaaatggagaagataatggagggagcaaaggtgggaaattcataaatcagagaagatagcatataaatgtaatggaatagggaagagctcaggtgtgcctttatttaacgccaacagaattcttgaacattagcaccagtgctgtgaggtaccaagcatacaagcatacttgacatcttccttttagcactcttattggtgacaataattattttagggggtatcatgttatatttagtaataatctttctgttgatttgttcttaataaaccaatttagaaagagaattacttgcaattgtaaagctatt

SEQ ID NO: 106705 - DNA, 601 bp, Homo sapiens
gtctttcagtattttttaatgtgagtactttgctattttctctactaagtgtgaggtcccgaaggacagtaactttatcttgtttatccttgtatatttgcccatccttagctcagttttttgcacacagtgcatgccttcttaatgtttgctcagtgagtaaataaatataaacctgttactatttaaaacattttgtggagcacagtcctcatacgactgataatcaaaaagatataaaggaagaagttaatgagaaccaggaaaaatagggaattagcgatgggtgaamtacaatcataaagaaagaaaataaaatttgatgataggaattgcctatttaggagacatgttagtttaaaagacaggtaatttaatacaaagactttcaccgtgaagtcacagaacctcagtcctactatcaccaatgtgtatgtgtgtgcatgcatatatttatgcatagtctagttcttacaagctatcatatgtaaattatttatatatcattaattaattaatttacatagcacagcttataagaactaaaatatgcagtaaaattatgtaggcagaacagtcccagtttggttgctgttcagta

SEQ ID NO: 106706 - DNA, 595 bp, Homo sapiens
agtctctcagtcagtgagacttgcatttatttagtaaagattaattgacaaaagtcatgagtaaacatcactagagtgtaattgacattgcggacctcctgagtagaaagtaattaaacacccgcagtagatcaaaggttagtcttaggaccacatgagtaaacaagctagttaggtaaaytattctgccttcctttgtactaattttaagctatttacttaagttaaggatcaggttgccttcagccataacccttactaaagctatgcaaacttcttggccttccaaggtttgtggctattactataactatcttttatatttttcccatcagcctgattgaacacccacaatcggagtgaccaggcatcctacagaatgagagaaaatttttgcaatctatccatctgacaaagggctaatatccagaatctacaaaagcttaaatttacaagaaaataaaaaaacaagcccaccaaaaactgtgtgaaggatatgaacagacacttctcaaaagacatttatgaagccagcaaatatatgaaaaaaagctcatcatcattggtctttagagaaatgcaaatcaaaaccaca

SEQ ID NO: 106707 - DNA, 638 bp, Homo sapiens
gtaatctgcacacaggttcaagcctctcactgtatgcttttcaacaacttctggtcttttcagccaagctggactgtgctgtctccatttacttcttcttcaagtcataggggtcaagctttaaccctatgacacaagctacccataacctttaattcttaaatgcaatttacagttttcagtgttttttatgtgactttcatgtggtaattgacattgttagctgccactttgggaaaagcttttcctttgcctgayaccccactttctccttattttccttctactttttagcttgttctttatgtcaatcttctttgcaggattgtctgtctattccttctcatttggagttactgtttttcaggattatggattgattttcttcttcatcttccatttatctaatctattttctcagggtgatttcatctactcctaggcttcaactagaatcaacataatattgaccctcaactattaataaataagtcacaatgtagtttttcttgtttctgagttttatgcttatctctctatctactttatgaagatgcacacttgaattttccagatacctaaaataccacataataaaactgaactaattataagaccacttttacatgtccatttgg

SEQ ID NO: 106708 - DNA, 570 bp, Homo sapiens
tttctttcttgcattatttctgatgagaaatctggcgcaatcataacttatatttgttgttctgtacataatgtatcttttttttccctgcccctggttgtgttcaagattttctctttgtttctggttttcaacatgcctagttactttctgtttcttttttgtgtttatcatgcttgatgttctctgagcatcttggatctatagtttggagtttgtcattaactcagaaaaattttttcccattgtttcttaatttttttttgtcctatcttcttctctttttggtattttaattgcacacattttaaactgtttgatattgtttcattactctcagatgctctgctcacttattstttcacccatcattccctttgtgtctttttttttcttttggttaattcctattgacttatcttacttatcttaaatttcatttattctcttctctgcatcaagtctattgctgagcctattgaaggcattcttcatctctattatattttaatttcttggatttccacttgattttttgttgcagtttcagttctgttactgaaattacct

SEQ ID NO: 106709 - DNA, 597 bp, Homo sapiens
tatctgccaaagctaactttataacaaggaatcttgccagggatgaacagaaacattagaaaatgataaagaggtcaactcttcaagaaaaggtactaatccaaaacataataatccaaatatttatgcatttaacaacacggtttcaaaatacataaggtaaaaaccaatagaaatgaaaggaaaaatagatgaattcacaattacagttgaaaattttaattctcctttcttggtaattgaagaaataagtagacaaaggatatagaaacctaataccaacttagcctcactgatattttgtacaacactccacccaattacaacagaatacacatgattttcaagagtacaggaaacattcaccaagataggccatattttgggttataaaaaaaayttagcatatacaaaaaaattaaataaatatattctcaaacatcatataatcaaataaatgcacataaaaaaatgaatctacctactaacttggaaataattttttaatactaaaatacaattttggaaaaaactgctggaatagacacactcatgcacagctaatgggagtgtatattggcacgattattcaagaga

SEQ ID NO: 106710 - DNA, 617 bp, Homo sapiens
gaatgaaaattgtttttatcagagtttttaaggaattccttctgatgatggctgtggaaaaatatgatggcattcttaatcccaatcttttatatgcaatctgtttcattctgtgaataattttaggattgtctcattatcctgctggtatgaatttcatgagggcataccttggtttgggtctattttacttttttttcttctgctttttgtttttgtaaattaattattctaatccctcagaagtccctttcaatctcgagatttatgccttttattaatggaaattttcttgtattattttcttgagatttttttcccattttatttattgtctctttatagatcatctattagtcatctataatagatgggggatgtgttctcatccactataaaaactactggattgatctttgatttttctaagcttttctctcctttttaccttttcattctattttctaagaaatttccttgatttaacttccaagtagcatattgattttttttattatttyaggtatcatgttttattttctacaacttcattcttaattttcagtaatttacctttttagcatgtagttctttaatgaaaatgacatcatttcatt

SEQ ID NO: 106711 - DNA, 681 bp, Homo sapiens
ccttttggagaaaagtaagggaagagaacaaaagtctcagcctgctaatccagagaattctgccagctcttactcaagaccaacaagggagtacttctagaagtccccaataaccacagtattactgggcttagggtgcccctaatacagtgaccaaagacttagaacacaacacccaagtccctttaaattcttggaaagctttcccaagaaggacaagtacaaacaaactcaggctgtgaagactacaataaatacctaactcttcaatgcccagaaactgacaagcatccacaagtatcaagaycatccaggaaacatgacctcacccaataaactaaataaggcaccaaggaccaatcctggagagagagatatgtgacctttcacacagagaattcaaaatagctgttttgagaaagctcaacacaatttaagataacacagacaaggaattcagaatcctaccagataaatttaacaaagagattgaaataattaaaaagagtcaagcagaatttctggagctaaaaaatgcaattgacatatggaaaaatgcatcagagtctcttaacagcagaattcatcaaacagaagaaagtattcgtgagcaaatgttggaggccgaaggaatgagggtcatgatcaactcagtataccgctggaggctatatgagcaaa

SEQ ID NO: 106712 - DNA, 576 bp, Homo sapiens
atgtacatctataccacacatatgtatacatatttttttcctgagtgaataaagtggaggctatcagtggtcaccaaatatttatgtgatctcctacattttctagaactctgacaggtaggwtagaaagatgtaatcaatcctggctaatgaaatgtgagcagaattaatgtatatcatttctgggtcaagtagttaagaagtagatatgtctcccccatttttcttttctcctgcggtcatgatcttggaggacatatgttccagatggtataacaataaaatggaggagggaatcttgacttgcattgaacttgactgagttgcagtaagccactgagatattagtatttatttgttattatggcatagacttgccgattctagctaacacagtgcactgtgtcttactcataattatatcttctcctgaaggataatatttattcacctaatgaatctggtttagtaccctcaaaatatatgacagttgggtgggaattcctaacataaaacataatatttttatttagatgaaatataatacttctaataatagttcatatcaatacatcc

SEQ ID NO: 106713 - DNA, 570 bp, Homo sapiens
cttcctttaaagaatcccaatctctctcttagtaacatggaaaaaacacaaggaggcaatccattttctgaatggtggaaccatacattcaaagcatttaattagagctaatttaagaaggttttcttagtctttaggacaaaatccctcaagggaaatagtgaggcaattgtttgatgtctttcacttggtttgttggctcacctttggtgttcttagttatgtctggaaaaaaatcagacgggtgggcttgtcttgattctcatggaagcagcattgtcctgacagtctgatcactgttctagaaatcaagtttttccagctccaagttactgacaagtctgtctgcagctttaaggacagccttgcttagagagctattttctttgaagtggatgtcaaactaacacagtgatcatactgtaacaactcggttttttttttcctttattaaagycacaggtcgcaagaagttatctggatttcatgtgaaccatgagaagtgagaatttccaaagacttttttaaaggaacaaactaccaagaaatttttaattgaaaaaaaaaaaa

SEQ ID NO: 106714 - DNA, 573 bp, Homo sapiens
ccttcaagttcactaattgcttcctctcacatctattttctgctattgagcccttctagtgatgttttaaatttttattattctagttttctgttctaaaattttgtttgagtcttttttttttttttttggtatagcttctatttctttgctgaaaattctatctttccattgtttttaagaatgtttgcccttacttgttggagcacagttaaataactacttcagaggtttatttcctgataattccaacctttgagtcctcttgtagttggtgtctgttaactttcttttgcctgttagttgttcakatttttctaattctttgtatatggaatagttggggctgtatctgggacatttcaaatattatatcctgaggcactagatcctatttaaatcttctgtggaacattaatttttcgttttgtttaacaggcagtaaatacatatcctggcccatattctgtggtttatctttcccatatcaatttaattttcaaagaatctgcaattataactggtttgcccagtgtgtgagccactcagagttcaaactgaaacctggacatt

SEQ ID NO: 106715 - DNA, 573 bp, Homo sapiens
ccttcaagttcactaattgcttcctctcacatctattttctgctattgagcccttctagtgatgttttaaatttttattattctagttttctgttctaaaattttgtttgagtcttttttttttttttttggtatagcttctatttctttgctgaaaattctatctttccattgtttttaagaatgtttgcccttacttgttggagcacagttaaataactacttcagaggtttatttcctgataattccaacctttgagtcctcttgtagttggtgtctgttaactttcttttgcctgttagttgttcatatttttctaattctttgtatatggaatagttggggctgtatctgggacatttcaaatattatatcctgaggcactagatcctatttaaatcttctgtggaacattaatttttcgttttgtttaacaggcagtaaatacatatcctggcccatattctgtggtttatctttcccatatcaatttaattttcaaagaatmtgcaattataactggtttgcccagtgtgtgagccactcagagttcaaactgaaacctggacatt

SEQ ID NO: 106716 - DNA, 600 bp, Homo sapiens
tgattcgtggtagactctcagtgttaccctgaaaatggaagatgcacttaatttgtaatgcaacagtctgtgatgtttactattatattttagtctccctctctctctctcttttttaactgtctactcaggaaggaatagttgccctcacagattattcatttacttttcctttgagactagctcttcagcttttcatttaatatgaaaaaggtcatcttcaaagaaaattgttgtttgatgcttcagttatttaattctctagcragtcactgagaaacaaagttgcttcatgccaatcatttctttcccattaaagaaggaaagtcacttcactgtcaataatgattagtgaattttttctctagtctctacttcaggaccatttaaaactttagtggccaaaaatttgttgtttaagacttctaagttggctttgagtctgcttaggcagcaaattcatctaagggctgtgaacctctcagctttgcctagggtaataggtgaaaatggggaaaaaattattcacaaagaaagttgaagtgaaacaggtttggggagacaaatggactcagattgtgatgtgaattcatatgtttt

SEQ ID NO: 106717 - DNA, 559 bp, Homo sapiens
tgatttgttctggtcttatggggcctactgcaggtgcttccataaatggccttaaacaattgccattaaacaatggccaaccttccataaaacaatggccttctgtaaattttattttatacagagaaaccatgtaaaaaactgcagacaagaagatgaatgagacatatacccagctcttcatgagttcacaatctaacgggagtgttgaaagctggctccccaaaatatcactgatattacctttttggtaagacaaaacaagttcattgaggtatggagaataccacttcaacagagcctttgtagtgcctaaaaagaaggaaaagggtgggacatagttggaatatttgagattttcaagtctaatttaaggcagatctctcaatagggcaacttggctaagattgggtaaggatcatgatatgatagtttaggattgataaaatragatgtggcaagggattcaaagagtcctagtgtataaactattgattaatgctttctattgaagaattgatgtatcattccagatgctcctagaataaactaggagaca

SEQ ID NO: 106718 - DNA, 533 bp, Homo sapiens
tctaccaaacatttaaagaatgattagtaacaatccttcagaaactcttccaaaaaagtgaaaaggatggcatacttctcaattcattgtcaraggccagtattacccaaataccaaagccagacgaggatatcacaagggaagaaaagtataaaccaatgtaatatctattatgaatatagacaaaaaataatcaacagaataccaacaaaccaaatcaagcatcatattatacattctgaaggttatctaaggaaggcaaggttcatttaatatacaaatattaattaatgcaaacactatattaacaggataaaggacaaaaagcacaatattatatcaacagaagcagaaaaagcatttgacaaaatctaacgtcatttatgacaaaaaaattagaaattaggaatagaatggtgcttcctaaactagagtaagggcatctacaaaaaaacgatgtataatatcatatttaattgtgaaagactcaatgcattttctccaaattcaggaataaaacgatatctgctctc

SEQ ID NO: 106719 - DNA, 593 bp, Homo sapiens
ttgctggctaaacttgccttcttcactatgggtcaaaaataactggactcatttggagagtggccttaatcctacctcaattgtggrtttgcttacacccattctctttctctcaacccagtctgcttgtaaccaatgctgtgcctttgtaagatggctggctgaggttaagggtgcagtccatagccagaaaaccattttctccctctttgaataccagttggcctacccagagagtgaaccaactaccttgacctcataagcactacactgcaagcagctgagcattttgttttaattattattattatttatatttattttactttattttattttatttttgagacagagtctcgtactgtcgcccaggctgaaatgcagtggcgcgatctcagctcattgcaagctccacctcccgagttcacgccattctcctgcctcagcctcccgagtagctgggactacaggcgcccgccaccatgtctggctaatttttcgtatttttagtggagacggggtttcaccatcttagccaggatggtctccatctcctgaccttgtgatccgcccgcctcagtctcccaaagtgc

SEQ ID NO: 106720 - DNA, 560 bp, Homo sapiens
cttggccttccggtctgtgtccatttctttgccaattcacagagccatggtggccttttgtgcctcccacaagatggccagaagccatttttaaaaccacatttcctgacatggcccttcagagtcccatgctccagttatactcatcccacgtccactgaagatgctgccatggttttacttcttcctttgatgtagcaatcaaatcttttgaaagaaatgctttcttaaattctccacatcctttgtgacagcaaaaatctgttatgtttttaaagcacctactgatcacttcaacttagagagatctgtctgccctctgggttggcactttaagatcttacacttttcctcattctctytccaactagagttcaagcttttcggggccaggaccttggctaatactacttggtattccccacagcatttagcagggtgtccttcatcacacttaacacagtgttcaatgtttcttgtgactgtttggggaaataattgttttaaaactcactgagccacagttcaataaaattatgaacagttttctgtttcttctg

SEQ ID NO: 106721 - DNA, 530 bp, Homo sapiens
ttctggggaaaaggctgtggtctattctgtgttgccctgagaccaaaggaagaggtgcccctgscctgggccccatcctcgaggagtcccggcctgaccttccttgggatgcaagggggaaagagcctgagaggttaaggggacaaacccatctgaaggccaatccctcttttgagaccatgttccagatactgaggacactggaactcccaggctcgattccagataccgactgggttccttctctgagtttgtcccacttttgagcacttctagcctgtaggatggccaagggctggctgaactacccccagatatgcccttgaggctgcttgtgttgtgggatggacctgggagttatggaagtggggaagcagggggcatggatcagggagtgatctccccatgtcaccatgttccagtgcgaaattctggagtgtccaaggaggctgaatttgaacttgacctttcttgttattaagaagatatagttatcagagcaggagaataaaatatattttatttagcca

SEQ ID NO: 106722 - DNA, 358 bp, Homo sapiens
tggaatgaaagcatcactatcttcattttaggtctgatgcaaataaggatggtaaaaattaagtaacttacccaagatcgcatagttactacatggacaagccaagctactaacctagatctccctgattgtacaaccttaaacacagatagctaaacttctcacagggaaaaaaaaaaatatctatttccatagagaaaaattgtgcctgtgcacacatctgattttgtcactgcatgaatgcttctttagagcatagattttatttatctattttcgtatctatatctccaaagcagcctacttcaaatctaggcatacagattmaataaacatgtgttttatttctacataaatg

SEQ ID NO: 106723 - DNA, 647 bp, Homo sapiens
tggagaggtggattctctgtcagacatctgctaacttcttctgggaagtggacactggcttacttgtccatgtgtacattgactgaggcagattttttctaaggaggcactgaacaatgaaggtgaagaggacgtttcttactccatagctttgaaagaggtctgcccacagtggccctcgtgtctgctcttctgtgaccacctgcatgatctcaacatcaccttggggaccatgatgtgaggtttgggtctttcaacaggatttgaggttttgctggctgccaaaggacattaaatgtgagagacgtcgccttgcatggaggtccccagagaaaaaaggcagtgcttggattatacccagttcattgccacgacgtgaagtttcttctcatttgataataatgatatttttaaagtcatactaagtattgcaaaggcccttttccaagagcatgaaaaaacccttatgtttcctatcaaaaggagaacaaaaataaggctctacaatttctcacattagagctggtgtcatatayttctcttttgcagtgtttggcaaccttggtgtatttgcctttttattagttacattctcaagcccagcaaagatttggcttctcagcgtgttttgaattagattcatgaaa

SEQ ID NO: 106724 - DNA, 557 bp, Homo sapiens
cccagaacttatgtaatagtaaagcatattttcctaatgtgaaggctcatttccctcttctgcaaagacttctaagcctcatgactcaagtggtcaccttaggaagcttcctgccatgcaagactctgtctccacttagagcaatagcatattcactacattctccatgtaggatggatcctcaaaagtttatgctggtctttgtctcctaagcaagtctacatcttgtaccccacaacccagccacatatgacacatttaaaaatgccaacagagccayacaatgggaagaattttgtcctatcatgataaggcatttgcctgatggtggtaatttttttttccctttaagttgcagaaggccaggaggtaacaaaatggtacccaaattgattattgtcatgtagggctttcttcctattcctatattctattcttattttagtcttttaattttgtttaaaaacacaaacaggtttttattggatgtccattccatttacctgttatctttaatcaggagtttcagtctgttgtgttctgggatgtatgccaat

SEQ ID NO: 106725 - DNA, 603 bp, Homo sapiens
tgaggcttggatgaggctttgtcagtatcagaccagctccttcctattgggggctgaattcccttgggctctccatcagagagaccaacaggaagcaatcatgtagttcttccaacacactcagaagtcagtaggtccactccacaaataaattgtaattggccatatagtaaaatatttggtagtgttattcttgtccttttccatatgtacaagagagaaaaataaaacaacttcacatcctcctaagcragtgatcgagtttagatatttgtcccctccaaatctcatgttgaaatgcgacctcctcatgttggaggtggggcctcactggaggtgattgggtcataggttccctcccagtggtaatgagtgagttcttactctgttagttcatgcaagaattgatggtttaaaagagtctggtgattctctcccctctctcctgcctgtgctctcaccatgtgacatgtctattcctccttcaccttccagcatgattgcaagcttcctgagttcctgaccagaagcagatgctggcaccacactttgtgtatagcctttagaaccatgagccaaatcaaccacttttctttatgaatt

SEQ ID NO: 106726 - DNA, 603 bp, Homo sapiens
tgaggcttggatgaggctttgtcagtatcagaccagctccttcctattgggggctgaattcccttgggctctccatcagagagaccaacaggaagcaatcatgtagttcttccaacacactcagaagtcagtaggtccactccacaaataaattgtaattggccatatagtaaaatatttggtagtgttattcttgtccttttccatatgtacaagagagaaaaataaaacaacttcacatcctcctaagcaagtgatcgagtttagatatttgtcccctccaaatctcatgttgaaatgcgacctcctcatgttggaggtggggcctcactggaggtgattgggtcataggttccctcccagtggtaatgagtgagttcttactctgttagttcatgcaagaattgatggtttaaaagagtctggtgattctctcccctctctcctgcctgtgctctcaccatgtgacatgtctattcctccttcaccttccagcatgattgcaagcttcctgagttcctgaccagaagcagatgctggcaccacrctttgtgtatagcctttagaaccatgagccaaatcaaccacttttctttatgaatt

SEQ ID NO: 106727 - DNA, 498 bp, Homo sapiens
aggaacaggcatgctaggtgagatatggcagggaatattagtcagggttctccagagggacagaaccaatttgtgtgtgtgcgtgygtgtgtgtgtgtgtgtgtgtgtgtgtgtgtgtgtgtgtgtgacagagacagacagaaagagagtgctttagtttaaggaattggctcacaattatggagactggcaaatctaaaatcttcaggctgggttggcagtctagagactcaggaaaagctgatgttgcagtttaagttcataagatttctgttgtcagaattctctcttgtttggggagaggtcagtcttttgttctattcagatcttcaaccgattgaatcagccccactcaccttatggaggacaatttgcttgactcgaagttcattgatttaaatgtaaatcttgtctgaaaacaccctcctagaaatattcagaataacgtttgacaaaatatccagggaccagggaccatggcccagccaagttgacaca

SEQ ID NO: 106728 - DNA, 623 bp, Homo sapiens
gggcactgtgaagacactctctgtatcacctgagggctttatacagtatgtgagggagtggaaattctctatgacctttctacaaaaaggagactcaggatcttacccatttctctaagcttagctacaagagacagtatctcttctggtgactgttatgagagttattattgcacctgtcagccaggccaagatgtatgttacaatcccatttgtcagtagagagtgagcaggatggtcacatcacatgagtgctgggaaagggttatgtcacagtcatttttgaggccagggaccagggataaaagaaatatcaccttagtgctaggccaagggttatgttccactgttttctgtgggcaaggtgcaggcaaaacaaactcatcaccttgttrctgggcccagtgatatgtcacaattttcactgagggcaaagtggaggctaaaaacaagggtcatatctcttaggtcatgatgcagagatacatcacaaggcctcccgtgggcaggccacaggtagaaatcaccaatttcctaggtgttggagcctgtgatatgtcaaaacacacaatgtatgcagggcccatgcaggagagaagagtcatataacttaggtactgagc

SEQ ID NO: 106729 - DNA, 606 bp, Homo sapiens
tacctgcagagtcattccctgccttccagtccacctggttcaagccactacttcaatcttcctaaagcatctctctgatgacatcacctttctattttaaaacgttcaatagctcatagttgagttccagtctatctttttaaagagattactagttatctttcaaggcacagctcaraagacacttcctctaagatgcccactttcaccacctgtgagaagtcatcacaccctctttggaatccccaaacattctgtatgactaatgtggcatttgtaatcttcacttttgtattataattgtctgcatatgtacaaactctgtattctgtgtacatatctcacaagtgtacatatttaattacatgaattaatacataaaaatacatagaaaacaaaataatattcttgaattcagagattttataagaagaaaaataaatattcctaatatagcacttaagctgaatatatctttaggcaaacatcaaaaggtataggaaccataaatgaagtcaaatcagcctgagctgtaattcatatgtctatttaaacttatgtaaatgagggcatttaagtggaaacatctgtctctctatcgatcta

SEQ ID NO: 106730 - DNA, 538 bp, Homo sapiens
cttagtaaatatttgttgttaaaytgagcctcggttttctcagctgcaaaatgggagctagtaatatctgcaccatagggattcaacccccattccatgagagcctctggtgctgtactccgtgctcagcacttggttcaagaaacctataggatggaagggaaatgagtgacacctatcaacacacatgaagttatcatgtatcacttcaaagcttgaattctgaagtcaagcaaaccttagatcaaattccagctctgccacttactagctcagtgaccttgtgaaaattatttaacccatcttggcttccaattgtcagtcagtgaaatgtaataagaatagttcctactttatagggctactataaagattaaataaaatgacgcatttaaaactcttaagaaattgcctgcatataataagtactcaataaatcttagtcagtatcttggctgtacttaataaaaccaagtgcctagaatgaactcttcactacttttccctgatcaaatcatatctggaataatatttttat

SEQ ID NO: 106731 - DNA, 668 bp, Homo sapiens
gaaaaactcaaatcattagtctcaaagccacaaataccgtctatctacaatgtcatcaggcagtctctgcttggtcgatgtaaattgaataataatgtcctgtgctcaagcagttatacttcctggaagccacagttactgactgagaggaacggcattgttacttgggcagaatcagaactcagaataaaaacgtgcatttaaaactgtgctctgtgtaacccctcctcccatcagagttctgtcctttatctgttttattcatccatccttctgtgcgtatgttaagacagaaaacatttggaagaactactggacttcaattgaggccctggcttttggtcctagtcagattattaaactcactgtgttaatttggacaaattacttcatatattggctttgtcattgaacaaattatttcaagtgcctgctatacatgagaagctctaatggatggctggagatacacaggggatgacactgctctcccattcacaatagaaaagaaggagaaaaagaaagcagcccrtattacatgggatggtgttggtatgtcattcccgcaccactctcaggggaattgcaatcagttgtttgctcccacattgccaggtttttccatcatgacactttctccatcaaggtgacaaacatccctgtctctg

SEQ ID NO: 106732 - DNA, 560 bp, Homo sapiens
aggtggacatgccattaatacctgcgtaatcaacttggccctcagttaaaaggtccaatccttagcagagggccttgcacatactatgtgcttagtgaatgttagctaagttgaagagactaaacagagaacctttaagatctcatttaagaggtgactccayaggttctaattatactcccaggggttagaagatatacataaataaaggtagatgtggatgttgctagaggcagatttaaaagaaagatatgacatctgcccaattgtcaccaagggagaaaataaatagcaaaaaagtcatattttaaaagcacagtggtctgggggcattcaggaacaaagagccctatatattttcatagcttctacatagatcaataccaaaattgataaataaattaacaaatagaagactaagttgtattaggtgtactctttaagaaggcagagaaatttatatttcattttagaaatttagtcaaagagttaagtagaaatttaaaggtgttaattaattagaaaatatgaataaatgaaatatattatttctcagtgat

SEQ ID NO: 106733 - DNA, 403 bp, Homo sapiens
tagcacccactaaactaaactactcactgctctatggattcccataagcttttgctcaaccacttcttaactcattatcttccttggacctttcctgcctttgactgaaatgttcttcttttccttgaattgccctgtgaaaatctactctcttaagcccagttaaacttcaccataaaacctttstggggtatcacagccagcactgatttactgatttctctattttctgaattcctgaaatattttttaccatgctgatgtcacttctattcctgtgttcagcagacattttaaatgactgctgcactctaatttgaatggttatttaaaaatacaaatctgatcatatcattcatcctgttaaacaattcagtgacttttagataaactacaaacactt

SEQ ID NO: 106734 - DNA, 588 bp, Homo sapiens
cttctttatcttcatggattatccaaaattactacaatgggatgtgtaccttttatagtyaaaatagaagttattccaatgaactagttcacactacccattatacgcaaattgatgtacatctccaatgtgctttcagagcaactgcattattctgttatattctgtgtcacgagtttgctgttggcacacaatgacgtctattaagatgcacatcaattactataacctgcaattaataatgcatagtttaaatattactggtgaatagtcttcattattaaatctagatgtctatttccttcatgtttctaagatacttctacttcaagattaattcatttaatttaactgaacatcagctacatgtagggcactgtgttagtccctccagtggctacagggctaaatgaggtatggtttttgatcttaagaaatacattctaatagtgtattgtattgttctccaaaatattctctgcccttccttatggagagaatatatgtccccataccatgttggcccataacaaattgtgtgaaaaaaaaaaagatgtattcctcccccttttttcttaattaataaat

SEQ ID NO: 106735 - DNA, 588 bp, Homo sapiens
cttctttatcttcatggattatccaaaattactacaatgggatgtgtaccttttatagtcaaaatagaagttattccaatgaactagttcacactacccattatacgcaaattgatgtacatctccaatgtgctttcagagcaactgcattattctgttatattctgtgtcacgagtttgctgttggcacacaatgacgtctattaagatgcacatcaattactataacctgcaattaataatgcatagtttaratattactggtgaatagtcttcattattaaatctagatgtctatttccttcatgtttctaagatacttctacttcaagattaattcatttaatttaactgaacatcagctacatgtagggcactgtgttagtccctccagtggctacagggctaaatgaggtatggtttttgatcttaagaaatacattctaatagtgtattgtattgttctccaaaatattctctgcccttccttatggagagaatatatgtccccataccatgttggcccataacaaattgtgtgaaaaaaaaaaagatgtattcctcccccttttttcttaattaataaat

SEQ ID NO: 106736 - DNA, 588 bp, Homo sapiens
cttctttatcttcatggattatccaaaattactacaatgggatgtgtaccttttatagtcaaaatagaagttattccaatgaactagttcacactacccattatacgcaaattgatgtacatctccaatgtgctttcagagcaactgcattattctgttatattctgtgtcacgagtttgctgttggcacacaatgacgtctattaagatgcacatcaattactataacctgcaattaataatgcatagtttaaatattactggtgaatagtcttcattattaaatctagatgtctatttccttcatrtttctaagatacttctacttcaagattaattcatttaatttaactgaacatcagctacatgtagggcactgtgttagtccctccagtggctacagggctaaatgaggtatggtttttgatcttaagaaatacattctaatagtgtattgtattgttctccaaaatattctctgcccttccttatggagagaatatatgtccccataccatgttggcccataacaaattgtgtgaaaaaaaaaaagatgtattcctcccccttttttcttaattaataaat

SEQ ID NO: 106737 - DNA, 498 bp, Homo sapiens
ttgaatttagcaatagtatgttgggtttgaggtgccaataaactatccagrgagcaactgtctagtagtctacagtccagtagtgtgatattaggcaaaattatgaatctgagatttatcagtgcatagcaataactaaatccttgggtatggatgaggtcttcctagtgagaaaacttaggtgaggacagagtcaatgatggagcccaatgctcagggacccattgactgaccactgaggtgaggagaaagagagagagaactataagtagaaacgaaagataaagtaggaacttgactttatattattttaaaatgttaagagatttttataagccagaatatagccagtctattttggttgaatgtttcatgtccaatggaaaagattgtgtattctgctgttgttgggaggagtggtctataaatgtgaattatgctgagttggttgataatattgctcgggtgttctatatccttactgatttactatgtact

SEQ ID NO: 106738 - DNA, 498 bp, Homo sapiens
ttgaatttagcaatagtatgttgggtttgaggtgccaataaactatccagagagcaactgtctagtagtctacagtccagtagtgtgatattaggcaaaattatgaatctgagatttatcagtgcatagcaataactaaatccttgggtatggatgaggtcttcctagtgagaaaacttaggtgaggacagagtcaatgatggrgcccaatgctcagggacccattgactgaccactgaggtgaggagaaagagagagagaactataagtagaaacgaaagataaagtaggaacttgactttatattattttaaaatgttaagagatttttataagccagaatatagccagtctattttggttgaatgtttcatgtccaatggaaaagattgtgtattctgctgttgttgggaggagtggtctataaatgtgaattatgctgagttggttgataatattgctcgggtgttctatatccttactgatttactatgtact

SEQ ID NO: 106739 - DNA, 594 bp, Homo sapiens
ttggcaactatttttttgattaacacaaaaggcacaggcaacaaaaaataattttatcaatttttaaaaaactgtgtgtcaaaagacagtaacagcagagaaaaaaatggccacacacaaaacaggagaaaagatttacaaatcatatatttgataagggattaatatccaaaatgaatagagaactcctaaaattcaacagctaaaaaccagaagacctaatttaaaagtatgcaaaggacttagatagacatttctccaaggaagatatacgcatggccaaaaggcacatgaaaagatggtcaacatcactaatcagtagggaaatgaaaatcaaaattagagtgagataccatctcacacctattgggatggctactataaaataacataaaataacaagtgttggtgaggatgtagagaaactggwacacttgtacactgttggtgggaatgtaaaatgttacagccactataaaaagtagtatggtagttcctcaaaatattaaaaatagaattcctttatgatccagcaagtcaacctctgggcatatactcaaaagaattgaaagcagagtcttgaagtgatatttg

SEQ ID NO: 106740 - DNA, 590 bp, Homo sapiens
agtttaaccgacacagctaaccagcatcctacactgcatcagggatatgcagctstttttatcagggaaggaaacatgttcagataagcaaagatggatctctaaggtcacaaaacctctgatggaagagccagaaatagagctgcctctccttatatctgagatgtactcttcagttgaaataacttttcctaggtgtatgttccttaatatgtatgcatatgaatataaacccgtgtgcacatatgtgtgtatttgactatatatgcatatatgtttgtgtatacatgcatatgagtgtgcgtgtgtgtgtgtatttcagtgaaaaatcctatacctggcaaacaatatatgtttgttctcttaccttgtctcctgctgacaagagatcccaaatcttatcttcggattataattgtaatcaaggactagaatcattccccaatgccttcgttaccacaactgttatttctttttttttaaatttaaataacttaatattgtctgtttgcactggaattaggatctcaatctaaggaccttgtcttattcttcctgcacctaaattaaaatacctactgaatagccag

SEQ ID NO: 106741 - DNA, 249 bp, Homo sapiens
ttctggcagaaagaaatagagtgaagtaaaagaccagggggaaaaaaaaaaggaaaaatcgtttgagaaagagagargagagggcataactcatgtacatgcaaaatacgaaatatttctgtcagtggtggtttttgctactggaccacaaaaatggatcacatagctccttggagatcactagctggggtaaggaagatggttgctggtatttaaccacactaaaatattgccccaagatagcgtttt

SEQ ID NO: 106742 - DNA, 584 bp, Homo sapiens
aaccgtctctactaaatatataaaaattagctgggcatggtggtgcatgcctgtagttccagctacttgaggggatgaggcaggaagatcgcttgaatctgggatgttgaggctgcattgagccaatactgcaccactgcactccagcctgggtgacaaagtgggaygctgtctcaaaaaaaaaaggaaaaaaaaaattgaaaaaatgaacattttttcttctggaggatggacgcactatatggacgtttataaatagactcattgatttctatggaaataaaaatcaaaagagagtatgtatttgaggcaaactggggaaaatgcatcccaactttatcccaggcctacactgacttttgatatcttcataggctcactatttttttctattatttaaaatatttaacacactcttgccaaaatgtgtttgaggaaaatgtatagtctaagattctgaaaaatgaggagaaaataaaaaaataagggaagaaaaaaaggcggtgtggcagggtgtcttagatgcaattaaaatacactaaggaaattgtgaaaaagttgtaataaactggtagtgcattaaa

SEQ ID NO: 106743 - DNA, 590 bp, Homo sapiens
cttgcatattttctatgtatttacttatgtcattgctttttctggtactctttattctatctatcaggtgatttcaagttactgtttaatgtctaacatgaaggtttctttaatatttcttgacagatatgctagtgattaattcttgtagtattttatattctgggaataccctaatttcttcttaattcttgaaaggtagcttttgtggatttaaaattcttggttaatgatctgcacattgaatatatcatcccactgctttctggcctctatagtttctgatgagaagtcagctgttaattgtattgagcatcccttatatgtratgaataacttttgtgctactcctttcaagattctctcttcatctttggctctcaacagtttgactataatatgtctaggtgtagatctctttgaatttatcataatttggagtttgttgaacatgttgaatgtgtatattaatgcttttaaaatcaaatttgggaagttttgaccattatttgttcaaatattctttcagtccttgtctatatcttcaccatagggtatttcatttgatcccatggctttaaatggactcc

SEQ ID NO: 106744 - DNA, 615 bp, Homo sapiens
tatgttatgcatattttaccacaatttttttttaaaagaagcaggataacagagtcagggaggccccttcctctgtgctaatggtcccctgtctggaacacagggttctagactagtaggtaccttcttgggaagggaccacaaaaagagaggtcaaggatcctggggttgtgttcctgagaggacggaaccctgtcttctggcagctgaagggctgatgcctagatagacactgtgttgtgtcggaaacactggaacagacaagcagaagcctcagggagactagggggtttaattccaggaaggcttgactcaaaccaaagctggagaagcaactgatgggggttatgtagaaggggttcttgtgacagcaggaggttgtcccaactaacccccacaatccccacaatcacaggctctgacctcttaggtgccagactaattgcccttggtcatgtcctaygcaaggggcaggcagaaagcaattgaactgagaataaggagacccacagtctagtcctagctccatcagctattggccatttgaccttggatggatccccacgtccctgggcctctgtgcacccatctctgtaatcaacaccctgcctcccc

SEQ ID NO: 106745 - DNA, 442 bp, Homo sapiens
tcaggaattcaagaacagcctggccaacatggccaaaccctgtcttactaaaaatacaaaaattagccaggcatggtggtgtgcacctgtagtcccagctacttgggaagctgaggcaggagaatcgcttgaacccgggtggtagagattgcaktgagccgagatcatgccactgtactctagcctgggcaatagagtgagactgtgcctcaaataaataaataaataaataaataaataaataaataaataaacaaactgtatgccatgatgaatactttttaatttttaatggaaacaaaacattccattgtaatatggatatggaagttttaacagtttcttttgccattgcagcaatgtaccaaagaatatccttatagatatatctctatgttcttaagctgtaatttcagcaggtagttgccaaaagtgatattat

SEQ ID NO: 106746 - DNA, 519 bp, Homo sapiens
ggacagccatgtgcatgactcacagaatatcagcattttccacaattatctgaccatgaaactttttaataaaacatttatttatatctgatatctactgctacagaatattctgtggaaaactctctgtaattaatgaaaaaccctccaaagtatttgacagaaagtgccttgataagctctgtcttttagaaaatttaatgtagagtcatttcatagtttaggctaatgcgtaaaagattgaaaacattgatctcagctaagaaagtaatgcaatatctgaagtgaaagatgagaaaagtcataagtaatttgtataggcagtgttgaaaagactaacaatactagtaagtattaacaaaatatttctcagaaactatgagctaaagattatgttaagtatagtcataaggtttatttcatttaatcttctaaataaccctgtgaaggtaacctataaagtacccattttatagatttaaaaattgagraccaaaaatgttaaacaaactgtgcaag

SEQ ID NO: 106747 - DNA, 562 bp, Homo sapiens
gggtgggtgggtgtgtgtgtgtgtgtgtaagtgattccagttacaaaactagacaatatttaacaagggttcagaggtcaatcacctcaccaatatttcaatccrtaaatatacatatgtatgctctatgctagatattggaactataatgatgaggaagacattctctgccctcacagaactcaagttctcgtgggttcataagtagagttattaatatttagttgagatgataaacgtcgttggtttggagaccaagaagataaggtgattacctctgaattggggggatcagtgaagagttcaaagaactctaccatttaccaagtaagtgaccttgactacttattctctctgtgccttgggtacctctgtgtattaaccagagataatagcagcactatctaatggggttgtatgagaattaaatgagataatgcagcagagaactgaacatggtttctagcatagagtcatcccttaataaacatgagttgttgagaggagcagagcaagatgttcaaatagaagcctccactgagtgtcccccaacaggaacatc

SEQ ID NO: 106748 - DNA, 532 bp, Homo sapiens
attagcttttgctggctaacacaacagtctcagttgcaactactacggtgaaagcagcaatagacaatacatgaaagaatgcaactgtgtttcaattaaaccttatttatagccatggaaattggagtttcatataattttcatgtgaaattataattttatatgattttcatgttgttattcttttgatttactccctatgcacttaaaaaatgcataaaccattggaacttgtggacttcataaaaacagatggtggattgacccctgccctacaggaagaccatcatgacagcttttctcctgagttgtcaccacttgcttcrctcccctaataagtaattcagaaaattcaattccagttgttgaaaatgaaaatgttaaaccttagggataaaaaaatccctagcaatattagagttcagtttctccagcattcttatttaaggcaatcttagtagtctgcaccatctgaggacagccatttgcttgtggtttataagacgtaatggtgacagctcaggtaaggctc

SEQ ID NO: 106749 - DNA, 589 bp, Homo sapiens
ctgccctcacctgtagtaactcctcacaatcagccagtcagtctaaactgagtaataagatctttctccctgcaccttagcctcatctcttcgtgggttacctctgcccctttcctacacagcagccactctgaaatgcgtgtagttccgcaaatatgccagactattttatcccattttgactttgttcatgttatcatctttgctaggagtatttcatttcttatggagaacacctgtccatcattcaacgttcatttcaagtgaaaagttctttaaaacataccatgacctttacagaggacaaaacactgcagtccagcctctgttcataggttctataaagrcgttgttaaatatatgtgctagaaaaatcttgatatgataaacataagatacagataagaacttctactttttcaagacaatggttctgctttcaaccgactgcattcttcacagcactgccaattaagtgaagaagctctgtagttgtttgtgctttctctaccctataacattatttgatggttagtgtttatgctgtcagatctaactctgctgacctgatttcaaatacaatagagaa

SEQ ID NO: 106750 - DNA, 594 bp, Homo sapiens
tatcttttaacatctgtaattttactttatttcaaagttttctcataaatttttttgcatattcacttgatcttattttatttctatatctttattttatagtttctgttccttcttagatatttgtcttttgaccatctgcaaatactgctggagttattgattttgttggctgtcttttcagaattagttttcctaacatggcttgaattttcatttgcaggccaatttgcttttgtttttctccctgtgaacataatattgtaacagtttttttttttgttttgttttgtttttttttaccaatctcctcctagctcagggttactgaatctgaggagatattggggttatggcagatctagtcgcagaaacagaatgtaatttagattcattcctaatattcccagagtgcaaaggcaggaagcatgtctctgatgtccatccctcacacagtaattttaattcttcttacccatcaatgactgaacctktggttgttactgcttactgccagagcccagctaataactctatccctcactcttttatacttgtttcgttttttcactgctcataatttttactttatac

SEQ ID NO: 106751 - DNA, 567 bp, Homo sapiens
ttctgttctaccttctttgtttcttttttcttgcacacataggtagggaaaaataattgactaagttggtcaaggaaatctaagagccaaagtcaagattcaaggtaacaatggaatccttaatttctgaagaactgagtaatgtaccttctgactatgcctacaaaacatgtatawgtattaggtccaggagcagcaaatgcttatagaaatgacaaaattttactaaagctaattttaagtgacaatgaaatgttccaaacgcacaatactgcactttaagaaatgcatttgaaagtgagggctcctgaattagtctcatccagggatgcctactgatgtgtagaagcttctaagaatatttccatatttgtaggtttttttgacttcttataaaaggccaatgaaaagcttaagcaaccaattgttaagaaaaattaaatctgctaacactttggcatagttactatcccaccccaaagacaaaaagaaagctatcctagataaagtgtttataaggccctcaagtaaattaggtttgcttgtttttcggatctatccatgctg

SEQ ID NO: 106752 - DNA, 538 bp, Homo sapiens
aatgtgttttgaggcaaaaatcacatgaatagaattgattatgaaacattaatgggtgtttcttatgttcaatagaaagtgctaggtgatatgagtaaatagtaatgtaagatttctccccttctcctctggaggtcctagaggagaatccattkttcttgcctttcctggcttatgggggccacctgctttccttagctcaggccccttcctctaccttccagccaatcacttcaatctctgcttctggcaacacagcttctctctgacgttgaccctctttcttcttcttataaggagctttctaattactatatattcgtcttatctaataaaccaggaaaatctttccatctcaagattcctatttaatcacaactgaaaagtcccttttaccatgtaaacaaacatattcataggttccaagaattaggatgtgaccgtctttagggaccattttttctgttaccataaaggagaactcacccgagtctcatactatgatactactcagaggttctggaagtcatgcttttaa

SEQ ID NO: 106753 - DNA, 605 bp, Homo sapiens
tggctggttatactagaccttcttggcaagggctattgttggtttttctggtttctctttgaactgtcttgaggaaagcttccttcttaatatgtgtatttatgtacacatacccctgaccaaatttctaagaaagcagaagaaggcaagtgcttctctgcctctgacagtgactcacttattgattgttaagccatcttgtagcttcatggacatgttgttgtttcatgatggtcaacattttgtctacgtccttctttctaccttgattcatgtaaactgacattacaaatgctgactggtaggggtggtagaatgtatgaattaagaacacaaatttggagccagactttcttggtttcaattctaactctgctatttattagctgtgtaaacttgggctrattacttcactttgtctcagatttcttgtcttaaaagtatgataattatagctactttaggattattgtgaggattaaatggtaatctatataattaccacatagtaataactttctatgttagtttttattattcttcaaatgatctagtagaccgtatttccagattgctgatgggagatatcatggcatctatgaaga

SEQ ID NO: 106754 - DNA, 667 bp, Homo sapiens
tttatcgtttaataccatatccctctcgttgtttcattgtcaaatgtgagcagttggaggaaaaacacttggaatttctctcttatgcctggtctgtactcataagttgtttgctactcactaccctttattcatgccttccctgacagtacaacagcagaagggctgcagagaaattaacttcatcttaggttccacttgccattgagattgcccgccctccaccaaatttattttcttaaaaatggattaaaagtaacaagaagctatttctcctcctttgtaataaaaacttactgaggatgagtaattatgtcttattaggaccatagatgatgctgggagatatcatcagrtagcgacttaattacacatactctttgtgcacacattcaagtgtacacacagtgacttaattatcagacttacgcattatcgactgcatttctttagtcccagcttggctgttaccacttagcacagaaggtgtagtgtatggacattcacggaatgggcattcgtttaaaaggaggtaaatcttgcattagagcccttttttggttggggggtgggcaggaaggtgcacataatttgaacatggctaattcagaatttaggatctgttattctgggattgagatgagggatggtagattgcccaggttca

SEQ ID NO: 106755 - DNA, 387 bp, Homo sapiens
gatgtgctggttcacacgtagtgacagcacacacacagaaacaagtgcaacacatggcacacacacatacarccctgaggcaggtatgtcaattcctgctaacaaatgggatcagaggttagaaagcctgagatgcaagagcagaagaaggggggacctggccttgttcactgtggggttcatggtgcagaatttagtacactgtgagcagtagatgccaggggctgtcagcaactggagccaggttcactgctgaggtctgtgttgtcagaattcagtgccaggtagagggccatgacgatgaggcacttgccttcatttcaggggactgcaccaagagacctggacactggaggtcaagagctgacctcctgccaggatgacagt

SEQ ID NO: 106756 - DNA, 641 bp, Homo sapiens
tatatattaattatatagagtaaatgttgaaattatcttccatttagtggctagaaagatagtcagggacaaattaagtacatgaaactacaaacatctagacctacttttgcatcaaacttctattactcactaggtctgtgacttttcactcattgtatgaattccttaagacatgttcttatctgtgaaatgggattaagtagtttctsataggtatttattatcttgtgtgatagattgtattattgtgctcaattgtattagggtctagtcaggacaaaaaacacatcagtaatttgaacatgaaaattttggtatatctaaccataaactgacataaggtggttaaattgaaaaaaaaaaaaaaaacgataaaagaggactgtaaagggcacacacatagcaaatgcagggagcagctgccaccaaaatgagagagaacaaggaagtgacaaactgcttagaagactgtcccctcaagggtgagattcaaatgctttggagaaggtgtatctaccttaccacaggagtatgcatcctgttggtctgatttgaagcttgtatgcagagaaacttgctggggggtaagactgcagctagccagtggacctctgatgtgactgctaccatgcctccta

SEQ ID NO: 106757 - DNA, 587 bp, Homo sapiens
tcggggtaattttgtatgtgtggagatttttgattactgatttaatttccttactggttatagatttatttagattttctatctcttcataatttactgatggtaggttttataaatctagaattttttaaatttcatctaggttatccattttggggacacagaattgtttatagtactctaataatcaatgttattttgtcttagaattagtagactagtaatgcttccactttcatttctgattttagtaatttgaatcttctctcttcttagttcatctagctaaatatttgtaaattttgactttttaaaaaatcttttgattttcttgattttctttattgttttctagcctctatttcatttatgtctgctctaatacatatgatatcctttctactgcaagcatggatttagtatgctcttctttttctagtttcttaarttgtaaaaattaggttaagtaaaatcaaggtctttctttttcataatataagcatttatagctaaaaattccccactagcactgcttttttatgtgtgatatgcttttgtacgttatgttttcattttctttcatctca

SEQ ID NO: 106758 - DNA, 555 bp, Homo sapiens
agttgttagcacagatatacacattatgaaaacgctgaactgcagccttaaaatgtgtgcattttcttataagtaaawgattcctcaataaattatttagaaaataaagctgttagaaatgtatatatgagtcatctttcacatgtacatttttactgtaaattgacaatttatgaatgtagaaatgtatggggtacaaaattatttataatttatatttttgatttatgaatacaatgtgcaataattaaatcaaactcattaacatagctatcacctcacatacttaacaggttttgttgtgaatatttttgaaatttactttcctagcaattttgaaatgtatcatatgctattattaattacattcaagatgctgtacaatgtgactcaaaaaataaaaatatattcctacaacctaatggacattttgtatcctttgaccatcgtgtctgtactctcttcacctctggcctccataacaaccattctgccctctgcaactatgagactgattgttttagattccacatgtaaatgagaacatgcgatagc

SEQ ID NO: 106759 - DNA, 555 bp, Homo sapiens
agttgttagcacagatatacacattatgaaaacgctgaactgcagccttaaaatgtgtgcattttcttataagtaaaagattcctcaataaattatttagaaaataaagctgttagaaatgtatatatgagtcatctttcacatgtacatttttactgtaaattgacaatttatgaatgtagaaatgtatggggtacaaaattatttataatttatatttttgatttatgaatacaatgtgcaataattaaatcaaactcattaacatagctatcacctcacatacttaacaggttttgttgtgaawatttttgaaatttactttcctagcaattttgaaatgtatcatatgctattattaattacattcaagatgctgtacaatgtgactcaaaaaataaaaatatattcctacaacctaatggacattttgtatcctttgaccatcgtgtctgtactctcttcacctctggcctccataacaaccattctgccctctgcaactatgagactgattgttttagattccacatgtaaatgagaacatgcgatagc

SEQ ID NO: 106760 - DNA, 435 bp, Homo sapiens
gttgttttttatttctatgtggttggcaggaatgtccttgttgtcatttctaattgtgcttatttggaccttctttacttttttactttytttattagtgtagctaatggtctgtcaatcttatttcttctttcaaaaactaccaaatgcgttgatcttttctatggcttcttgcatctcaatttccatcagttcaactctggttttggttatttcttgtcttttgctatcattaggatgcattttcttttgtttctctagttactgtatgtattagtccgttttcatgctgctgataaagacatacacaagactgggtaatttataaagaaaaaaggtttcatggactcaaagttccatgtgactggggaggtctcacaatcatggaagaaggaaaaaggcacgacttacatgggggcaaacaagagacaactt

SEQ ID NO: 106761 - DNA, 488 bp, Homo sapiens
atggttgcatacactttttgtartaatctgcctacattgtattataaaaatagaaattacacattcagtcaaatggatgttttccttctagtggaagtgtttctagagtacatattgtaatttactaaaatgtttgacatcaaattcctttttctgtcattataatttctggcacatgcatttcacataaatgttggtcaaaggatgtttctagcacccctcccaccccaaaagttgctgcttctcaatgtttgtgaaacaaaattatatgcctttctttttcagagctgggtcatatgggctagtgagtttactcattggcatgtgatttggactttcatcaaaccagctaaccaagatgaaaatgtcaacttatttgaatgaacacgtctgtgttacttaaaaaaaaaaaaaagcatgttggcataacatacacaaacacgatattggatttatttttattctttggacttaaaaatgtagtcgat

SEQ ID NO: 106762 - DNA, 465 bp, Homo sapiens
aggacttagggtaactaactcatcctggtttgtctggcagttttctggttttaacactgaaagtcttgtgttctgggaacccccttagtcccaagcaaacccagacagttgtattagtgaggtactcagtgggaattgctggaggaagtaatgggattggggagggaataggatgttagaaaatttcccagaaaagaagaaatgtttaagctgcatctgaaaggctgaggtagaaaaagataggtatgctaggcagaataatggctcccgaaaataagcagggactaatcattagagcctgtgaatgttatcttatatygcaaaagggattttgcaaatgtgattaaattaagatcttgagacagagtgttctggattatctgggtgggcttctctgtaaacataaatgttcttataaaaaggagataatcctgctaacagagaagcagacagtggaagaggtga

SEQ ID NO: 106763 - DNA, 636 bp, Homo sapiens
tctcttccatgcgctatgtatatcttccccagagcactccactctccttggggataccatgtggtctgagcttcatctgcttccttcctaaaatcccagatcatttatgctgcctagtggcccatcctccatactaaatcccagaccctgcatgtgcacacccatcctcttctcagagctgggtcctgattttcagtcttcctggggttcagcctctactcaaatccccagtgcacttaatctcccatggacttctgaatgctgaccatttctgaattgctttgtctgtgcaaaattgcacatctagagagaggaagacttctttgggcttaagtttatccaggggtttgttcccctgattcacccattctggaaccagaagtttgcttctaaawctctggtaggggctcccagtttaagcatttacatttaacaatatagaacaatgaagacaagagttgaaacatcatgaagataacattgatgttttttagaatgaccaggaccatgttctctatggagaatcataccgaagaaacatcaagggcatagagtagctgggcttcctcctttcttttgcagttgatgggtttgtggcctttgacttcattttgggacatgttccagtgaattttg

SEQ ID NO: 106764 - DNA, 636 bp, Homo sapiens
tctcttccatgcgctatgtatatcttccccagagcactccactctccttggggataccatgtggtctgagcttcatctgcttccttcctaaaatcccagatcatttatgctgcctagtggcccatcctccatactaaatcccagaccctgcatgtgcacacccatcctcttctcagagctgggtcctgattttcagtcttcctggggttcagcctctactcaaatccccagtgcacttaatctcccatggacttctgaatgctgaccatttctgaattgctttgtctgtgcaaaattgcacatctagagagaggaagacttctttgggcttaagtttatccaggggtttgttcccctgattcacccattctggaaccagaagtttgcttctaaatctctggtaggggctcccagtttaagcatttacatttaacaatatagaacaatgaagacaagagttgaaacatcatgaagrtaacattgatgttttttagaatgaccaggaccatgttctctatggagaatcataccgaagaaacatcaagggcatagagtagctgggcttcctcctttcttttgcagttgatgggtttgtggcctttgacttcattttgggacatgttccagtgaattttg

SEQ ID NO: 106765 - DNA, 594 bp, Homo sapiens
tatacattgatgcctttctaatgccttttaaaactctactaccttggataatatttactgggggaacccaccccaatatttcaacataggttctattttccataagtgtcggctggctgagaaataaagagaaagagtacaaagagaggaattttacagctgggcctccaggggtgacatcacatatcagtaggactgtgatgcccaaaaccagcaagttttattaaggatttcaaaaagggagggggtgcaaaaacagggagtaggtcacaagatcacaygcttcaaagggcaaaaaggagaacaaagatcacatgcttctgaggaaacaggacaatggcaaattcaaaactactgataagggtctgttcagctgtgcacgtattgtcttgataaacatcttgaacaaaagaaaacagggttcgagagcagaaaactggtctgacctcaaatttaccagggtggggttttttccccaccctaataagcctgagggtactgcaggagaccagggcgttatttcagtccttatttcaactgaataagacagacactcccaggaatgcattccttccccagggtattaattattaa

SEQ ID NO: 106766 - DNA, 589 bp, Homo sapiens
ttcattcagcttgtggtgaatactgcctgacttggggctcacccttgagagcaatgggctcccctctggcccagggtaggtccagaaatgccatccaagaggcacgttctagaatcagggaccccaagagcccacttagtgctctacccacctgtggctgtgctggtacataaggtgtaagacaaaatcccctttactttcccctccacttttctcaagcagaaggagactcatcacatagcaatcacagctggtgatgtgmtaagtctcgacagaagccagcaagcctcagtgtctcacctaaagctctcaatgtagtatctgaatattgctgctggtcattcagggcctgtgggctcctcagttagctcattagacaatgaatgctgtcaggattcaggccttcccttcaagatagcggattcctttgtggcccaggctgtgtctagaaatgttttccaggagctaggtcctggaaaggtagcctcacaacactgaccagtaccgtatcctgctgtagctaagcttgtatccaagacgcaagacaagtcctccccattcttccttccccacccctcaagcagaagga

SEQ ID NO: 106767 - DNA, 589 bp, Homo sapiens
ttcattcagcttgtggtgaatactgcctgacttggggctcacccttgagagcaatgggctcccctctggcccagggtaggtccagaaatgccatccaagaggcacgttctagaatcagggaccccaagagcccacttagtgctctacccacctgtggctgtgctggtacataaggtgtaagacaaaatcccctttactttcccctccacttttctcaagcagaaggagactcatcacatagcaatcacagctggtgatgtgctaagtctcgacagaagccagcaagcctcagtgtctcacctaaagctctcaatgtagtatctgaatattgctgctggtcattcagggcctgtgggctcctcagttagctcattagacaatgaatgctgtcaggattcaggccttcccttcaagatagcggattcctttgtggcccaggctgtgtctagaaatgttttccaggagctaggtcctggaaaggtagcctcacaacactgaccagtaccgtatcctgctgtagmtaagcttgtatccaagacgcaagacaagtcctccccattcttccttccccacccctcaagcagaagga

SEQ ID NO: 106768 - DNA, 522 bp, Homo sapiens
ctttcagtgatatgaagttaaaaccaggtactrtgagtgataactgatttttggttcttatgaaggtggttttttgtgtgtagatagttgttaaattgtgtccttgaggggcagaccatcggtggagtcttctattgtgccattttgctcttcccctagtcccccgatggctgtcttctcattgtatcctcacgtggcatgagccaaagaaagatcctgatatcctgtgtctccacttctctttttagggacatttatcccatgcatgatggtcctaccttcaagacctaattatttcccaaagtctccacctccaaaaagcattactttggggattggacgtcaacatataaattttagggggggcacaaatattatatccataccacccagacaggggacttaatattttactgtggtgttttttgtttctgttttcgtttgccttcttgatagcattaggttggtgcaaaaataaaattacagttttaaccattactttttaatggcaaaaaccgcaat

SEQ ID NO: 106769 - DNA, 589 bp, Homo sapiens
attactttgcccatacgtatgtgtgtcttacgaatgatgactcctcttatataagcatattacaaaatcagaaatttccatatagacacaatgctaatttctactccatagttcataattttcacatatttttgcaaaaatgtctattatgactattttccccagtctaaaacaccatccaggaatatgcattaaatttagctgtcatgtttccttagtctattttatctggaacaatttcttcacattttttgtaattaatgacctgaatatttttaaaaagtataggctaataattttattgtgcattcataactttggcttgagtgatatttcctcttgtttttcttcttatttttcccagatgctagcagtggaaagatactgtaaccaaaaacatcatcattatgacaatgccaacacatgasatcaacttttggcatgtgatggctgattttattttattaacctctactatttaattgctctgcaactttagacaggtaacttaccctctaagcttcatttttttttcatttcaaattagaaattatattgactctgcaggatttggtggattaaaatagtt

SEQ ID NO: 106770 - DNA, 589 bp, Homo sapiens
attactttgcccatacgtatgtgtgtcttacgaatgatgactcctcttatataagcatattacaaaatcagaaatttccatatagacacaatgctaatttctactccatagttcataattttcacatatttttgcaaaaatgtctattatgactattttccccagtctaaaacaccatccaggaatatgcattaaatttagctgtcatgtttccttagtctattttatctggaacaatttcttcacattttttgtaattaatgacctgaatatttttaaaaagtataggctaataattttattgtgcattcataactttggcttgagtgatatttcctcttgtttttcttcttatttttcccagatgctagcagtggaaagatactgtaaccaaaaacatcatcattatgacaatgccaacacatgacatcaacttttggcatgtgatggctgattttattttattaacctctactatttaattgctctgcaactttagacaggtaacttaccctctaagcttcatttttttttmatttcaaattagaaattatattgactctgcaggatttggtggattaaaatagtt

SEQ ID NO: 106771 - DNA, 532 bp, Homo sapiens
ccacccaaatgaaagttgattcaaaaataagaagtgacagcacctccagatgagaagaaacttgcagaggaaccccaaaaccttgaagaaacagagggtcatgacacatgcaaagggccacactagctctctagcaataaatcctaaccaaaatgaaaattgaaatgtcagataaggaattgaaaatatggaatgttaggaacttartgagatccaagagaaagttgaaagcaaacataaagaaataagaaaacaacttagaagatgaatgacaagatagatatatttaaaaaaacaaatagaacttctagaaatgtactattcactaaaagaatttcaaaacatagttgatagctttaacaataaactagaacaaacagaagaaaaatttccagccttgtagacttgtctttcaaattaccccagtcagacaaaaataaataattttttataagtgaacaaatccttcaaagaatatgggattaatgaaagtttaaaaacctacaacttatatacattcttgagatagaag

SEQ ID NO: 106772 - DNA, 532 bp, Homo sapiens
ccacccaaatgaaagttgattcaaaaataagaagtgacagcacctccagatgagaagaaacttgcagaggaaccccaaaaccttgaagaaacagagggtcatgacacatgcaaagggccacactagctctctagcaataaatcctaaccaaaatgaaaattgaaatgtcagataaggaattgaaaatatggaatgttaggaacttagtgagatccaagagaaagttgaaagcaaacataaagaaataagaaaacaacttagaagatgaatgacaagatagatatatttaaaaaaacaaatagaacttctagaaatgtastattcactaaaagaatttcaaaacatagttgatagctttaacaataaactagaacaaacagaagaaaaatttccagccttgtagacttgtctttcaaattaccccagtcagacaaaaataaataattttttataagtgaacaaatccttcaaagaatatgggattaatgaaagtttaaaaacctacaacttatatacattcttgagatagaag

SEQ ID NO: 106773 - DNA, 600 bp, Homo sapiens
ctttcttttgggcaattgtacttctgttttggggtttttttttttgtttgcttgttttttttttttaactaatttcaaagtaacgttgcagacattttaatatatggaagataaataaataaactattttgacagacagaatctaagtttacctgcataaacctctatcttctcctctctctaccccaatgtatctatgcctatttctagtacttcttgcaattattaactttctggagaaactggggttgaagtragtgtagaatagggaaaattggttttaaggctttaattcagaacctgatgatatactgaccaatttagtggataaattattccacaaacaaacattctgctgtatatttttagtgatttacttttttgttatttatgtgctaataatgtttatatccttgtacccaggttgttttaaagcacaaactttctcattaaatatacttcagtttcagtgtcagctctgccactaactgggtgaccttgtgaatttgtgcacaaaacttaagtctttgggtgtcattgtctgtagcttcaaattggtgataacattactatcatacataaatgagataatgtttagaa

SEQ ID NO: 106774 - DNA, 630 bp, Homo sapiens
gctttctcaaatgcttgttatgctagcagtgaagttgtcttatggatagactcaggccctctggttagtcaggatgttttaggcagtggacttagctgttgttttctgcttcctgggaacagagttattctgtcatgagttgctgcagtggcctcagttggttggcctccagcaagaaggtggtrtattctagagagcaccagctgtggtagtagtagggagatctgagcttgccctaagttggtaacttttctgatttctcaggcaattgtggggccataaagctcccaagagtttctgtcttttgtattttgctacctgggtgggtagagaaataccatcaggtggggacagggctaagcgggtctgggctcaaactcttttgggcagggcttactgcagctatggtgggggatgagggtatatggttctcgacccaatgggtttatgttccagatggaattatggatgcctctgctgtgtgttataatttgccacagaagtgggggatagacagtagcaagaggcctcaccctcctcccatgcatttggcaagatcagtcctgctcctgcagtgccctactcagaccttgtgccaggccatgagcttctccactgagaaaacaagca

SEQ ID NO: 106775 - DNA, 630 bp, Homo sapiens
gctttctcaaatgcttgttatgctagcagtgaagttgtcttatggatagactcaggccctctggttagtcaggatgttttaggcagtggacttagctgttgttttctgcttcctgggaacagagttattctgtcatgagttgctgcagtggcctcagttggttggcctccagcaagaaggtggtatattctagagagcaccagctgtggtagtagtagggagatctgagcttgccctaagttggtaacttttctgatttctcaggcaattgtggggccataaagctcccaagagtttctgtcttttgtattttgctacctgggtgggtagagaaataccatcaggtggggacagggctaagcgggtctgggctcaaactcttttgggcagggcttactgcagctatggtgggggatgagggtatatggttctcgacccaatgggtttatgttccagatggaattatggatgcctctgctgtgtgttataatttgccacagaagtgggggatagacagtagcaagaggcctcaccctcctcccatgcatttggcaagatcagtcctrctcctgcagtgccctactcagaccttgtgccaggccatgagcttctccactgagaaaacaagca

SEQ ID NO: 106776 - DNA, 518 bp, Homo sapiens
tatcagcctccttttatatggtctttgtctagaatgtctttctccacaattctactatcaaatatttgtgtccttttttttaagatatctcttgcatatggcatatattttttttcttwttaaaatctgattttacagtcaacttgtaattaaaaaatttattattcaaattcaatgtaaaaacgtattgtttttaatctacctttttcccatttatttcaaattttgtttcatcagtcctttgatttctgacttctgttttaggtaaacagtcaattctaagacaatcttgtacatttttagggctaatactttttttgttgctctgcctttaaaaaaaatattttctgtgtttttggttttccctcattttaacatgatgactttctgatgtggtatctttactagggcttaaataactgagaatagttgtgtcatttgctaaaataggaagatttggatacttaatggaggaaactgaaggttaatttgagacatggtgacactgaatttcctat

SEQ ID NO: 106777 - DNA, 612 bp, Homo sapiens
taataattctaatttttattggtttcaatgacaaaatagtgaaaaaaaggaaatgaagtataattttttaaaagggaatggaaagaaatacttggaaggagagaaaatctgcctgaagtggcaaagagttttattatcatataacataaaattgtgggtttgcatatgtgcaaacatagatacactgtataattggaatttacatttggcacaaatgaaatataaaagagttgagacatyttctctgggttagtttcataatatttaagtagcagagatgattttttttgggaaatttaaaatatcagaactgtctaataattactttaaaaaacactttccaggaaaatatttcctttcaggtcacaaactatttgaaatatgctgttttttctaatacaaaatgcagaatactgtctccctgacttttagagaactatttattttcacaatatcacagtatttatattctcaggaattctgataatttcaattttacaacaacaataatatgtttaggagatgagaagctatgcaaatgttgaaaagttttcaggattttacatattataaatgtacatacaaacatgtcatatttataattacagatga

SEQ ID NO: 106778 - DNA, 612 bp, Homo sapiens
taataattctaatttttattggtttcaatgacaaaatagtgaaaaaaaggaaatgaagtataattttttaaaagggaatggaaagaaatacttggaaggagagaaaatctgcctgaagtggcaaagagttttattatcatataacataaaattgtgggtttgcatatgtgcaaacatagatacactgtataattggaatttacatttggcacaaatgaaatataaaagagttgagacattttctctgggttagtttcataatatttaagtagcagagatgattttytttgggaaatttaaaatatcagaactgtctaataattactttaaaaaacactttccaggaaaatatttcctttcaggtcacaaactatttgaaatatgctgttttttctaatacaaaatgcagaatactgtctccctgacttttagagaactatttattttcacaatatcacagtatttatattctcaggaattctgataatttcaattttacaacaacaataatatgtttaggagatgagaagctatgcaaatgttgaaaagttttcaggattttacatattataaatgtacatacaaacatgtcatatttataattacagatga

SEQ ID NO: 106779 - DNA, 643 bp, Homo sapiens
gtgcaaaacacaaactggattgttgtagtgaacacaggtataataaatattaatttgtatcctctcgtcttctaaggctttatctatttaacaatgttatctacctatttatatcattttgcaaatcacagacacacacacacacacacacacacacacacacaaatgaatgtgatagcagttcgttttaattactttgggctcagtggtgaaaacaaaaccatgctgtgttttaaggagacacwgttttacgtgtttatgtgttttaaggagataagatacactaggagtttacaaatcattgaaaggtttgccgtatcaggccctggttaggactcccaggaaccatgagcaacttcttagccaccatctgttcaccaccaaacagtgtgttcagtgtgttcagtaacattctacgagtctgttgatatagcggtctggaacctggaatgaggaaatgttccaaatccaagtggaagatgtaacttacttttagaaccctaactgtatggatgtctgggaaatgtaaacatcaattattcagcccatggaaatagaagctgagtgtccaacacatctagcaaaacattaaagcgtattttgaactgaattatgaatcagataatattttattgttttaata

SEQ ID NO: 106780 - DNA, 520 bp, Homo sapiens
ctatatgatttttatacaccatattgtgcattatattaaaattataartcaatatgataaatggaaacatgatcaaaaatagtacagacaatggaaatagaagagccagttattggaataataaaatgtggactttacttaatgactgtgaaaataacagggctgataactatagaaataatacaagctagaaaattaaaaaaagaatggaaagaatagatgaaaggatggataattttgaccaaaatttggatttaataaaaaagattcaaatgggcattctaaaactaaaaatataatatctaagattgatacaatgatggctttaacataagactatatacattagttttgaactaaatgacatgttaggacaaaaattcctaaacagaaacatatgccaaaaaaagaggaataaatgaaacagcacagatcattaaaaaaaagtgagaatatgcatgaaactttcaacatacatttaattggagtgtcatggttagaagagacagaaaatgtggca

SEQ ID NO: 106781 - DNA, 520 bp, Homo sapiens
ctatatgatttttatacaccatattgtgcattatattaaaattataagtcaatatgataaatggaaacatgatcaaaaatagtacagacaatggaaatagaagagccagttattggaataataaaatgtggactttacttaatgactgtgaaaataacagggctgataactatagaaataatacaagctagaaaattaaaaaaagaatggaaagaatagatgaaaggatggataattttgaccaaaatttggatttaataaaaaagattcaaatgggcattctaaaactaaaaatataatatctaagattgatacaatgatggctttaacataagactatatacattagttttgaactaaatgacatgttaggacaaaaattcctaaacagaaacatatgccaaaaaaagaggaataaatgaaacagcacagatcattaaaaaaaagtgagaatatgcatgaaactttcaacatacatttaaytggagtgtcatggttagaagagacagaaaatgtggca

SEQ ID NO: 106782 - DNA, 412 bp, Homo sapiens
aagtgggtggaaatgttctaagtgagatgttaaagtaatatacctgtcaatytagaaaaaggagtgaggaagagggttgtggagctaggtagatggtagagagctgtatggaatttaaaataactccacccatcgtctgctgtatgttgagtgaagttaccaaactgagaaatgcatgtcattagtagatgtgagtgtttaagagtgatgtgtgtttgaaggtgtgtatatgaaccagtgacggggctgggtacatatctgtactcgtggagggcaaaagtccacacagataggaaaacacacagtcagaagaaagcctgaggacctgtctcagcagctcccagagactgtgaggagggctctgtatagtcacagcctgaaattgtgtttcaggtcaggtttaaccagatct

SEQ ID NO: 106783 - DNA, 412 bp, Homo sapiens
aagtgggtggaaatgttctaagtgagatgttaaagtaatatacctgtcaatttagaaaaaggagtgaggaagagggttgtggagctaggtagatggtagagagctgtatggaatttaaaataactccacccatcgtctgctgtatgttgagtgaagttaccaaactgagaaatgcatgtcattagtagatgtgagtgtttaagagtgatgtgtgtttgaaggtgtgtatatgaaccagtgacggggctgggtacatatctgtactcgtggagggcaaaagtccacacagayaggaaaacacacagtcagaagaaagcctgaggacctgtctcagcagctcccagagactgtgaggagggctctgtatagtcacagcctgaaattgtgtttcaggtcaggtttaaccagatct

SEQ ID NO: 106784 - DNA, 576 bp, Homo sapiens
taattgacagcttggaaaaaatccactcggccagttagctttcctcattctgcaaacattaaatagcatatttttattacaaacttgacagccaggccttaagaataagctctgaaatgcctgcgattacatgtgtaggcagggactgctatgactggctgggtttcagatttgagtgtttgtttagacagagcaagaccaaaaggtgttagatcagacctaatctccaccagacagctcrgagggaggctacagatttcttcatttggtttcaccattgagtctacgtcccgtggaagccatgttattcaccttcacagacctcccacccatgaaaatagggacagccattccaagagaacaagaactagaattgccacccatggaataaagcacatttagtgatggttgggagcagcactgtttttctaaattaacaagcagaaggaagcaaagtgtgctactttcttggcttggcttatttctcacttatttatacacctgaatctccactgaaacaacacactattagctgaacagaatcaccctttagccagtgagagaaattagaaaaca

SEQ ID NO: 106785 - DNA, 576 bp, Homo sapiens
ctcattgcaggaatgtcagatgatcaaaaagagtgggtaccaactgagctatatacaagcaaagtgtcactgttaaaaaaaaaaaaaagaaaaaagaaaaatacttcttgattctagagaataattgacagcttggaaaaaatccactcggccagttagctttcctcattctgcaaacattaaatagcatatttttattacaaacttgacagccaggccttaagaataagctctgaaatgcctgcgattacatgtgtaggcagggactgctatgactggctgggtttcagatttgagtgtttgtttagacagagcaagaccaaaaggtgttagatcagacctaatctccaccagacagctcagagggrggctacagatttcttcatttggtttcaccattgagtctacgtcccgtggaagccatgttattcaccttcacagacctcccacccatgaaaatagggacagccattccaagagaacaagaactagaattgccacccatggaataaagcacatttagtgatggttgggagcagcactgtttttctaaattaacaagcagaaggaagcaaa

SEQ ID NO: 106786 - DNA, 576 bp, Homo sapiens
taattgacagcttggaaaaaatccactcggccagttagctttcctcattctgcaaacattaaatagcatatttttattacaaacttgacagccaggccttaagaataagctctgaaatgcctgcgattacatgtgtaggcagggactgctatgactggctgggtttcagatttgagtgtttgtttagacagagcaagaccaaaaggtgttagatcagacctaatctccaccagacagctcagagggaggctacagatttcttcatttggtttcaccattgagtctacgtcccgtggaagccatgttattcaccttcacagacctcccacccatgaaaatagggacagccattccaagaraacaagaactagaattgccacccatggaataaagcacatttagtgatggttgggagcagcactgtttttctaaattaacaagcagaaggaagcaaagtgtgctactttcttggcttggcttatttctcacttatttatacacctgaatctccactgaaacaacacactattagctgaacagaatcaccctttagccagtgagagaaattagaaaaca

SEQ ID NO: 106787 - DNA, 576 bp, Homo sapiens
taattgacagcttggaaaaaatccactcggccagttagctttcctcattctgcaaacattaaatagcatatttttattacaaacttgacagccaggccttaagaataagctctgaaatgcctgcgattacatgtgtaggcagggactgctatgactggctgggtttcagatttgagtgtttgtttagacagagcaagaccaaaaggtgttagatcagacctaatctccaccagacagctcagagggaggctacagatttcttcatttggtttcaccattgagtctacgtcccgtggaagccatgttattcaccttcacagacctcccacccatgaaaatagggacagccattccaagagaacaagaactagaattgccacccatggaataaagcacatttagtgatggttgggagcagcactgtttttctaaattaacaagcagaaggaagcaaagygtgctactttcttggcttggcttatttctcacttatttatacacctgaatctccactgaaacaacacactattagctgaacagaatcaccctttagccagtgagagaaattagaaaaca

SEQ ID NO: 106788 - DNA, 587 bp, Homo sapiens
ccctctagaagacaaggcagttttgtaaacataaaaaataagactatttctcgtctacctgtaataacctcttattgctttttttccattagtccctacagatcatcttagttatagctaatttctacataatcaagcttatctctaatactgacagatttaattttaaagggtagtatgaaaatctttttaaaacaatattgcacattacctattactcttcatgattcgggatatcacaatgaatagcaattattatttttcccagatgcatttatttattcagaaaaatgtgttcctttccaaaataattacaagctttccgagtttaaagatctgattcgtgttgcttttatgtatccccctctcccttccaagccatatcttgcacattgaatatgtctgcaatttttagtcctctttctgtctctgattccctactayaaaaaaataccataatcaagctaatatatagaaaacaatgtgaaggcactgattgcttagtgaatcctaaataataacatgtttttcatagctcaactgctaatgaaagaaggccttagataaggaccgtgtttaaaagcata

SEQ ID NO: 106789 - DNA, 422 bp, Homo sapiens
aacgattgggaatgcaaaggagaccacagtggtgggcaaagttttttcatggagcttacagtttagtagagaaaggaatataaaagtgaaccggcaataaataattccaaaatgttataaacctatgaagaaacaaataataaggatgtgttttgagatggaacctagtgtaaatcatggagtgagagaaaatgtttcacaagaggtgaagtrtaagttgatatctaaagcaaatggtaaaaaataattgaatgtaagctgatattttatatctgagcaaaaggcaggtaaggtgaaaagtgttctaggaacaggggtctgtgcaaaggccctgtgataggagagagctggccattcccagaaactgaaagaaggattttgagaacaggagaaatattttaaaaggaaggcagaagtttata

SEQ ID NO: 106790 - DNA, 564 bp, Homo sapiens
ttagtatatttgactgtttttgtcccagctcaggtctactctagacttggggcctttaaaaagattaagttcggagagctaagagataagattcctgcagtttgagggtcttttttttttttttttaaacctcattaaaaccttgattcttttttctatgcagttataaaccttagtaaatttgcctgctgggaaaagacagatgaaacaaatggccttctacttaaatggcttttacctgaatttaatttcatctatgyatagcctcagtataaagttgctttagaattctcttgataagaagcaatgcagaaaaaatgtgatcatcatagtggggggtgtcgggggggtagaactcagatagctttggccttcctttttttttttttttttttttcttgtttggttccaagttttcatcttctctgcatttccaaacagatgctgaattctcgtttgtccctaatggacacatcaagtgtactctagtcgctgtgtctgctttgctgtgagtagtttgcaattcctatgattaaatatgcaattaagatttaaatacaataa

SEQ ID NO: 106791 - DNA, 494 bp, Homo sapiens
gaattcaacctgtgagacagtgagaaattacttaactttgaacttttggtctttcttcttcaaaacttgagataatatatacagtcctctgcatgtaagaagacagaatgagtgtactttttatctccaaatttgtatgtaaggatatttgaaagggagtcaagtgtgtagtttagaaatagtcttcttaaacattcacatagctcctttcacaaaaataaaattctctgagcccttttcattatgatttaccaagtctggtcttgttttcactgttgtcattgttgttgtttaaagaaaattcttttctagttgatttctggaagtygaatggcagggagatgaaggtaccttaaaggtaaatttttgcatgactaacttgtccctcttgtgctaattatacgtgctttcacttttctccaacagtctccaagttcatcttccctctggcctttgatgtgtgtctgtcagctaatatttttatacaggtaata

SEQ ID NO: 106792 - DNA, 581 bp, Homo sapiens
taatattacattgtatggctatttttgtaatttttacaattattaagatttttgacagtataaattatcttggtaaaagttattgagatttaattggagctacataatytgttaacctgggcttgtcctgtaaatgttagttggccatgattttattttttcctttatctttaatttacaaagccagttagttgataatcctgttagcaactttaaacatcaatattccctactcccattactactaagtcactctttttaaaggtcattattgtgccatacttttagaaatattaaagaaaatgagctttttagactgctaaaactgggtttaattctgattctcccattgccagctcttgtgttcctgggcaagttatttgacttctgaaccgcaatgttgttggttgttaagatggttatgataatatttaacagagtcatttgcagatttaattgaaataattcatataaaagcagtgccagttcatggttataccctgaaaaataactgccaggcagattggaatacttgaatctctattttttaacctcagaatataaatggatattgtgtgcat

SEQ ID NO: 106793 - DNA, 581 bp, Homo sapiens
taatattacattgtatggctatttttgtaatttttacaattattaagatttttgacagtataaattatcttggtaaaagttattgagatttaattggagctacataatttgttaacctgggcttgtcctgtaaatgttagttggccatgattttattttttcctttatctttaatttacaaagccagttagttgataatcctgttagcaactttaaacatcaatattccctactcccattactactaagtcactctttttaaaggtcattattgtgccatacttttagaaatattaaagaaaatgagctttttagactgctaaaactgggtttaattctgattctcccatygccagctcttgtgttcctgggcaagttatttgacttctgaaccgcaatgttgttggttgttaagatggttatgataatatttaacagagtcatttgcagatttaattgaaataattcatataaaagcagtgccagttcatggttataccctgaaaaataactgccaggcagattggaatacttgaatctctattttttaacctcagaatataaatggatattgtgtgcat

SEQ ID NO: 106794 - DNA, 537 bp, Homo sapiens
gaattcacaactgcattttcctcctatgctcactctcttactgcacacacaggtgacattttaattatggagctctgagctggggaaacacaactgcctgactctctcccacttacccaatctcgtttccagtccagctgggagggaagggggtgagatgaagccacagcccttgcatgaagatgaggatttctcctcttagaaaggccccttctttctccgtttcttcttcatctttcatgagaatgcttcctctgtcctggagtccaaggtcactgctaatagttcttcactctgctttcactgactgccactttcctgaggacctgccgtgtgccaaggacctactgtattctgagcatcatggccatcctggggcatggaggtgcataaggcccccttcaaagggccacctgtcaggcttgcagggtgacaggcaaaggcagaggtacagcatgragtggccatgtggtacactgacccaggggaatgggggcccaaggagggacattagaccttacatgcattcatggagac

SEQ ID NO: 106795 - DNA, 632 bp, Homo sapiens
tgccactggcaatgaggtctgtatttgcatgcaagggatccctttgccaaccacccaatacttttcaaagtcatttctccatcagtcatctgagtgttatggccactctcatcggtggcttggagtttcatatgtgccttgcacaaccctcatggccctctggaagctgactttctgggttgggatccatgctccgccaatcctagataggaggccttgaacaggtgactttagtctctcattgccacagcttcctcatctgtaaaatggagttgtwttgaggatgaagttagaaatgcaggtcaagtgtttactatcatgtctagtccattgtatgttttcagtaactatcagtttttatcaataatgccagattggtttaaggttcaactggggtcagattggtttaaggttcaactgggatgatgtatttgaaaatattttgcaaaaagctgcatataatgcacgagttatgacgctaaaggtctggcatagacacgacaggtaatgtcctcgtattgtagatgaagaacctgtgcacacagaggtgaatgaacctgcctcatgccacctggtgtctgaggaaagggtgatccctatgctgttgcagattctcttagcatgcagtgatg

SEQ ID NO: 106796 - DNA, 555 bp, Homo sapiens
aagtccttacattggcatgtcaggtcctagaacaccagacccaaacctaccctgctagaattgcatgccacctactcactcctcatccaccttatgcgcaaacacacatcatatccatgctcctttcttcctgccttttcccgagtgctagggactgaatgtttgtgtccccccaaaattcatatgttgaaaccctaatccccagtgtgacagtgtttggaggtgggacctttgacaggtaattaggtcataaaagtggagccctcatgatgagattagtgccattataaaaaagagacaggagagagcttactttctctctctttctctcctttcattctctctcattctctccccctctctctctgcatgtgtgtgtgcacgccatgggaggatacaagagggcagccttctgcaaaccaaaaagcaggtgctcascagacaccagattttccagtgccttggtcttggacttcccagcctccagaactatgagaaataacttgttgtttagccaccagtctatgatatttttgttacagcagcacaaactaa

SEQ ID NO: 106797 - DNA, 630 bp, Homo sapiens
tgggctaactctggttggtccacaaggttattggtactaattatccatagaacgaatacactacccccaacgacctaccttactttcatctcctacttggctttctaccagggagacttggtacctgcagaaggtgatgaaacaggcaaacgttgtttgtcaataatcacaatgaggaagggactttgtcacttccatccatccagaggctccatagtgctttggacatttcagagttggacttgacaacattaggaattatttctcttcctccttctgggccggttctgagctatgcagacagctcttaatccacattccagaccatccgaagctttggctgstgttctaggtttggctctgctgtgcatagagtaggaaagagaagagtaggcagaggtgcaaagatcttgctcctgaatgctaaataaaggaaatgcagcatttttttgcctaataagatcaatgcaataatccaagtttcaactccatgaaatattaaccctccggcagaacagataaacaaaaggaaaagaaaagaatattaacaatgttgggaataggagacaatgagtaactataacgtgcaagggtaaaagctcactctatctgcctaataaaatagaatca

SEQ ID NO: 106798 - DNA, 626 bp, Homo sapiens
cactcacttttccctgcatcccacagttccactctctgcctgccttgacattgcttgctgcctggactctgaaggtgggtcatttactttaattaacttttattgatcacctactataagttcagaatagtcatggtttcttccacttacattatttcaatatcttgttcttttaaaaattcatctgcctaccatttcatgcctttaaagaatctctatcctaaaagtgtgtaactttttaaaccygtgtggcccatcacccagatcaagatgtagaacatttgcagcgccccaaaatgttctctcaaatcctcccagccaatattctgtaaacataaccactactctatcatcatcaattagttttgcctgtgctggaacttcatatacatggtattacgcagcatgtattattttgtgtctggcttttgctgaacattcatccatgttgcatggagcagttgtgttttatttttcatttctgaggagtagtatgtagtagtatgaatatatcccaacaagttaatctagtctactattgatggcatttggtttgtttccagtttgaggtactatgtaaaatgctagtatagacattttcgtagatacattttggtgaaaatagg

SEQ ID NO: 106799 - DNA, 584 bp, Homo sapiens
tactgcctataggaaataagataaaatgtattatttttacttaaagatactatctataaaaatgattctaagtttattaaaaatctatctatctgcatatgatttttgtctataggcatatctacaatgaaatatgccagaaatgtgttttcttaatgtgaaggacgattacttttgagtgttgggttttttttttttttttttttttagacagagtcttgctctgtcacccaggctggagtgcagtggcgtgatcttggctcgctgcaatctctgcctcctgggtttaagcgattctcctgcctcaggctccagagtagctgggactacaggtacccaccaccacactcagctaattttttktgtgtttttagtagagacggggtttcatcgtgttggccaggatgatcttgatctcctgaccttgtgatccgcctgccttggcctcccaaagtgctgggattacaggcatgagccaccgcgcctcgctgggtgttgggttttcttttgtgttattttgatactttcacctttgtgtttttatttttttatttttatttttatttttttgagatggagtcttc

SEQ ID NO: 106800 - DNA, 584 bp, Homo sapiens
tactgcctataggaaataagataaaatgtattatttttacttaaagatactatctataaaaatgattctaagtttattaaaaatctatctatctgcatatgatttttgtctataggcatatctacaatgaaatatgccagaaatgtgttttcttaatgtgaaggacgattacttttgagtgttgggttttttttttttttttttttttagacagagtcttgctctgtcacccaggctggagtgcagtggcgtgatcttggctcgctgcaatctctgcctcctgggtttaagcgattctcctgcctcaggctccagagtagctgggactacaggtacccaccaccacactcagctaattttttttgtgtttttagtagagacggggtttcatcgtgttggccaggatgatcttgatctcctgaccttgtgatccrcctgccttggcctcccaaagtgctgggattacaggcatgagccaccgcgcctcgctgggtgttgggttttcttttgtgttattttgatactttcacctttgtgtttttatttttttatttttatttttatttttttgagatggagtcttc

SEQ ID NO: 106801 - DNA, 607 bp, Homo sapiens
atttttcctcttccttttctattcctttcactccaagctagaaggagcctctccaatctttgaactccttcagcagattctaccttttggtacttgcttgtaacataattatatgtataaataagttttccttttttacttctacttacaaaattgaagacaggaactatattttatgaaaagatgaattgatgaatagaaagaaagttgaccagagttcaaaatccatctagtgcatgtccttgggcaaataattgagttcccttattaagtgagattatgtcacttactttatagaattttggtcagtataagtagaggtatcttataaaaagataagcaatatgaaatggctaatattttattttcactaacaaaatggaaatttcattatacctggtggttctctatattttagtacgcttttctttaaaataatgttgtatactatgctttacatccactttacaaatattgcccactgaatatataaatgaatatagtaatgctawccctattagcatgaagagagagaagaattagagagactctgaaatagagagaagagagaaaagaagggaaacaatctgcctcggggcttaccttg

SEQ ID NO: 106802 - DNA, 568 bp, Homo sapiens
agattgcatctaggttcagttctgaatatgacactttagcaggggtcttaaacatagacacctttggggaccaagttgagtgaaagcgggacaaagacagtaagcactgatgaaaccttgaagctggagagggtgtgcccagcagaaagatagtcaaattccttttgyttttacttttggatgtaaaaacaaaacaaataaaatagatattgtgtcaagcaaaacacatctgtgagccagaatctctgagtcattacaaaataaaaggacattcaaaggagagtggtcaggatacgaaataactcacaactgtgcagcatgtggaacaactgagtgaactgggatcctttaatttgaaaaagtgtagacccttgtgagcctggtggttgccttccaagtatttgaaggttgctatacagatgaggtattacagatattttagcttctctttaggggctaaaccagaaaaaaactgggcagccgttaaggattaaatgagtaaatatttgtaaagcacctaaagtagtatctgcacagagtaagcattatctattaaataaaatgaagt

SEQ ID NO: 106803 - DNA, 507 bp, Homo sapiens
actataggtgtatggatttgtcttcaggttctctattctgttccactrgtctatgtatctgttttcatgccagtactatgctctttgggttactatagctctgtaatataatttgaggccaggtagcatgattcatccagttttgttctttttgctcagggtagctttgggtattcagggtcttttatagttccatataaattttaggattgttttttctatttctgtgaaaaatgtcattggtattttggtagggattgcattcaatccgtagatttctttgggcagtatagacagtttaaagatattgattcttccaatccatgaatatctttccatttttttgtggcctcttcaatttcttgcatcaacggtttcaagttttcattgtagcgatctttcacttctttggttaagtttattcctaggtattttatttgtagctattataattggaatcactttcttgatttctttttcagattgttttttgttggcatctagaaa

SEQ ID NO: 106804 - DNA, 566 bp, Homo sapiens
agttcatccttccttgcattttgagagatagatcataattaacacatttgttaagagaggaagctggggttcagagaggttaaataatgcacctgaggccacacacagctggtaggcagcagagctaagacaaaattgtagataggattcacttcaaagccrgtgctgcctctagtttaaggcctggctcagccatcagtagctctgtgaccctgggcaagtttcttgacttttctgaatcctagtttccccttttgtaaatgaggatcatcatgtctgttttcatggccaaacaggacagagagaaaacctgtctagaccatctctcagttagattttgtcgttaacacaaatggtatttgcctctgcatttgattccctgtccatggggtgagtgggtggaggctcagcaggggtgattgacttagctggatcaggaccactcggtgatggacacagcccggggctcgagagatggagacagggagtgctcccatagctagacatctgtcaggtgcctttgcttgaggatgatctcctaatatatgtagctggcctgtttcctg

SEQ ID NO: 106805 - DNA, 566 bp, Homo sapiens
agttcatccttccttgcattttgagagatagatcataattaacacatttgttaagagaggaagctggggttcagagaggttaaataatgcacctgaggccacacacagctggtaggcagcagagctaagacaaaattgtagataggattcacttcaaagccagtgctgcctctagtttaaggcctggctcagccatcagtagctctgtgaccctgggcaagtttcttgacttttctgaatcctagtttccccttttgtaaatgaggatcatcatgtctgttttcatggccaaacaggacagagagaaaacctgtctagaccatctctcagttagattttgtcgttaacacaaatggyatttgcctctgcatttgattccctgtccatggggtgagtgggtggaggctcagcaggggtgattgacttagctggatcaggaccactcggtgatggacacagcccggggctcgagagatggagacagggagtgctcccatagctagacatctgtcaggtgcctttgcttgaggatgatctcctaatatatgtagctggcctgtttcctg

SEQ ID NO: 106806 - DNA, 520 bp, Homo sapiens
ctcagatccagacatgcagagcaaaggacacaaaagtgcagggggtggcatcccatctaacttggccacaggaggtttaccaggagttgacacttgccattttcccctttgttttttatttgctcctggagataaactggatcttttttttttttttcaccatcatagaataaatagactcctggtttatgttccatcatttcctagcttattgtgtatgctgcaaagtttcatttttccatcctatttctgataactgccaaagaatattaggtgctctggtgggatgttagggacgtgtgctctgacaatgggtgcatccccctcctgccccacccrtggcagcatttgcttcccctcttgcctctgagctgtgactgtgcttttaaaacctgctgggtctctatggacacaagggccagtgaatcagggcttattggcatggcactgcatggaccaggaggaagagggcttagaaggagacctggtgccttccagacactcccaggttggggtggga

SEQ ID NO: 106807 - DNA, 520 bp, Homo sapiens
ctcagatccagacatgcagagcaaaggacacaaaagtgcagggggtggcatcccatctaacttggccacaggaggtttaccaggagttgacacttgccattttcccctttgttttttatttgctcctggagataaactggatcttttttttttttttcaccatcatagaataaatagactcctggtttatgttccatcatttcctagcttattgtgtatgctgcaaagtttcatttttccatcctatttctgataactgccaaagaatattaggtgctctggtgggatgttagggacgtgtgctctgacaatgggtgcatccccctcctgccccacccgtggcagcatttgcttcccctcttgcctctgagytgtgactgtgcttttaaaacctgctgggtctctatggacacaagggccagtgaatcagggcttattggcatggcactgcatggaccaggaggaagagggcttagaaggagacctggtgccttccagacactcccaggttggggtggga

SEQ ID NO: 106808 - DNA, 653 bp, Homo sapiens
tgatgagttaatgggtgcagcacaccaacatggcacatgtatacatacgtaacaaacctgcaygttgtgcacatgtaccctagaatttaaagtataataaaaaaaagaaaaaatttaaaaaaagaaaaaagaaaactaaacctttgttttcaaggttgatgaactgtttgttcaggtaaagtgactgctgaaactctgatttccagttgcctacagccaaagaaaatgaggtgccagcccctcagatacactgtaagggggaaaggctaagtctgtggaaaacggggatgtcagggtgggtttcccaagtgcaactcacttgaacataggtgggggactcaggagtatccccccaaccacctagagtctgagaaaggcattcatgagcaaccaccaaagctctggagcaggttgcagatgatgccaccatgggaggtgccaccgtgaacctgggatctgtggttccagcaggaatcatcaaatctgagagtcgcagggccaggtggtatgacctgaccttcaatgactataataagccctagggaccgaggagagctcagagcctgtttacccagaggcatgaacgctgtggctctgatgcagccccattctctaggacactagctatctgcctggctgcagtttcactgcat

SEQ ID NO: 106809 - DNA, 587 bp, Homo sapiens
ggtctgtttgaagctgtcactttgtggatcagtaaagaattcaggagagagtcctgctgttggtcaagcgtgctgatccccagtctctggggcgccagcgttctgtagctcagcagctgggatatcctcctattcaaggtgtacatctaagtgcacagagaggagggaggagaagatgaggaccgcagaagacagccagcatcgaactgctgaaatacacccagcttcacagcaggagagtccatgcggctggactgacccctgacctgaattcagttccaaaacacatggcttctgtaagattgaggaaaagccaccaacagtttggggtgttcagaggattaaacattttaatgagtcttgtcttcttggtgggctgctgggaagcttggcgagtggcttcccaggattccccagccaggtcagggtgggttgtgatgamgcttagaggccaggattcctgctccctggctgagacccccaaaagtctccaaggtgaggaggatcctgggttcacagtggaagttagtggaagaaggtttgtgaggagagtgtgggctttggagctgggcctttggctgagcctt

SEQ ID NO: 106810 - DNA, 552 bp, Homo sapiens
gaaaagaggaaagagaagggcctctttaactaggctatctgaaacagaaacataatctaagagttattgcatttcagtaagtacttgcaagacaacatgactatacctaatgtttgggtaagacatagtgccggactttgtatttcagaatgattaatgaggcatgctgaaaaaagcctgactgagatgaattatttcatcctgctatcaracctattcttccctgctcccactccctgaaggtgacacctcccatacctcccacagcatacactcctatttttgtcaaacagcttgtaactggatgctttggggtctgtccctatcactaggctgtggtctgccctctagagcaaaaaattgcattcagaatcccaacatgaagatttgaaaacacactcccccttgctactgtggtaaagatggccccactttttctatgtcctccacattttaaggagtggcaataggaactcagtcacctcctaagtgaatgagaaacctgtataagagggtggggatgagtaacataaatacattttttctctgggt

SEQ ID NO: 106811 - DNA, 587 bp, Homo sapiens
tgcagggtggccaggtaaagttggcgaagtcacatggctaacaagtggagaatctgagattgaagttcaagtttgtctgattccagcggcagcatgcttactacactatcttacaccaacttttttgtgccaagaaatgttatagtccagaggaaataaacacagggtgaggtaacatgacaataggataaactcggatttatgctaaggaagagcttcttgagcgtttggaagacactagaaatcgaagatagatacatcttcctggagttgttgtcagcaggaataaggcagaatgacagctagaaatctgtcccaacctcatctcctctgtgaatctgtcccctggccagggcaatttccagcgagctttctcctgtttgaatgcagccccaagaacatatcccagttcccactgtaaatcytgagttgaaaatggcatcgggaggcacatgccagcaccctcctgcaaatgccagctagtctttccttggcatcccaagtacatcatccactggcttctgctccatcatttctcagcaatgtagaatatataattttattatttaataaataaatgtaatgta

SEQ ID NO: 106812 - DNA, 592 bp, Homo sapiens
ttccatggtatgaaattaatttttttccaatttaagaaaaaratgttttgttgtttttacagaacattcattttctttaagaatttcatttcttttttagtctttttctctcaaaaacctagttgccaccttatacatgtacatttccctagctctgtgtctggatccgtaacacatcacagggatacatggatataggctcttttaatttttaattaaaaattgtagttgcaattgtgccctaagagattaacactctcatgctgagaccctgaaccgtgtgaatatcaccagcatcttcttgttggttaatgcatccactatgttgtctgtaatattatcactcatttcaaagtgtctctgtaaaaaaaccacccctggtctccttaccagcaggaaaaataaataatgtacagcttgaaaaataaatttgctttgcgaaaaagacactcagaaacacctagattttcccctgggattgtccagtaatctaaatatggaactctgctcatgccatccaacaaatgtgttcaaaccttctctgtttctatcctgccaaacccattctccctttgacttacagacatgccat

SEQ ID NO: 106813 - DNA, 569 bp, Homo sapiens
tgctgttagccaaatgaggttccctttgttggtgatctgctccttctctctagcttttaaatgtttttcttttacttttttttctttcatcttcacattggagaacctgataattatttgtcttgagggtggtcttcttttgaagcattttgcagaggttctatgcatttcctgaatttgaacgttgtcctttctagcgaggttgagggaatatcatggccaatatcctgaaatatcctttccaaattgcttgctttctcccccattctttcagggatgtcagtgagtaatatatttggtatctttacattatgccatttttctcaaaagttttgttcactactttatagttttcttaatttatttttgtttgacagagttatttcagagaggcagtctttgaactctgagattctgtcctcagcttgtccaattctactgataatacctgcgatcgtattcaaaaattattgaggtaacttctcagttctacyagaacagaattgttcttttttaaaaaataaccatttcatcttttgtctcctgtattatttaattggatttcgtaa

SEQ ID NO: 106814 - DNA, 534 bp, Homo sapiens
atagcaaagtaaataatcaataaaattaaaatgcaacctagtcactgggaaaaatatttgtctaccacatatctcataaggagttaatattcaaaacttttaaagaatttgtacacatcaataggaaagaaacacataatccaacttaaaaatgggctaaagacctaaatagatatttcaaagaagacataaaaagccaagaagtrtattaaaaaggtgcttaatatcactaattataagggaaatgcaaattaaatcactatgaaatatctctgacacccattagagtagccgttatcaaaaagaaaagagatatgagctgacgagggtgtggagaaaggggaactttcatatactcttggtaggaatacaaattggtgtagcattatggaaaacagtaaggagttcctaaggaaatcaaaaattgaattatcttctgccctagcaatccctcttctgagtatacccaaataagtcaaatcaccacctcctaaagaaatgtgtacatgtttattgtagcactattcataataa

SEQ ID NO: 106815 - DNA, 534 bp, Homo sapiens
atagcaaagtaaataatcaataaaattaaaatgcaacctagtcactgggaaaaatatttgtctaccacatatctcataaggagttaatattcaaaacttttaaagaatttgtacacatcaataggaaagaaacacataatccaacttaaaaatgggctaaagacctaaatagatatttcaaagaagacataaaaagccaagaagtatattaaaaaggtgcttaatatcactaattataagggaaatgcaaatyaaatcactatgaaatatctctgacacccattagagtagccgttatcaaaaagaaaagagatatgagctgacgagggtgtggagaaaggggaactttcatatactcttggtaggaatacaaattggtgtagcattatggaaaacagtaaggagttcctaaggaaatcaaaaattgaattatcttctgccctagcaatccctcttctgagtatacccaaataagtcaaatcaccacctcctaaagaaatgtgtacatgtttattgtagcactattcataataa

SEQ ID NO: 106816 - DNA, 534 bp, Homo sapiens
atagcaaagtaaataatcaataaaattaaaatgcaacctagtcactgggaaaaatatttgtctaccacatatctcataaggagttaatattcaaaacttttaaagaatttgtacacatcaataggaaagaaacacataatccaacttaaaaatgggctaaagacctaaatagatatttcaaagaagacataaaaagccaagaagtatattaaaaaggtgcttaatatcactaattataagggaaatgcaaattaaatcactatgaratatctctgacacccattagagtagccgttatcaaaaagaaaagagatatgagctgacgagggtgtggagaaaggggaactttcatatactcttggtaggaatacaaattggtgtagcattatggaaaacagtaaggagttcctaaggaaatcaaaaattgaattatcttctgccctagcaatccctcttctgagtatacccaaataagtcaaatcaccacctcctaaagaaatgtgtacatgtttattgtagcactattcataataa

SEQ ID NO: 106817 - DNA, 598 bp, Homo sapiens
cacacacacacagacacacacacacatacatgtagtttatgtgtatgtatcaagtagctcaataaagcattggatgttttcagttgattccattgcattatgtagccataatagataaaaacaccaagcrcagataatcttttgtgtcagagtttaagtactgcactgttctaagaataagctagtctgtaactaattttctgttttcctctttttttgcctctgacaatcacattgacactttttttgtttgtgccggaagtatttgagtgttgaatgctaggcacattggatagtcagacacattggtcactgtctgatattgattacatttcactatatcaaaactcacaatacatctcagcttctagaattcagcacattaccatgttcaagctacttcagcaatcttgtcatctcaatttttcacactttttcatttgtttgttattttgacaatcaggtaccacaacacataccaataggtaatgctgtaaaaaatatgagaaattgtagcatcaacattgtcaagcctcatgtcgcagataaagtcactttaaaataataatgatccaggaatattttaaaatcatatatt

SEQ ID NO: 106818 - DNA, 598 bp, Homo sapiens
cacacacacacagacacacacacacatacatgtagtttatgtgtatgtatcaagtagctcaataaagcattggatgttttcagttgattccattgcattatgtagccataatagataaaaacaccaagcgcagataatcttttgtgtcagagtttaagtactgcactgttctaagaataagctagtctgtaactaattttctgttttcctctttttttgcctctgacaatcacattgmcactttttttgtttgtgccggaagtatttgagtgttgaatgctaggcacattggatagtcagacacattggtcactgtctgatattgattacatttcactatatcaaaactcacaatacatctcagcttctagaattcagcacattaccatgttcaagctacttcagcaatcttgtcatctcaatttttcacactttttcatttgtttgttattttgacaatcaggtaccacaacacataccaataggtaatgctgtaaaaaatatgagaaattgtagcatcaacattgtcaagcctcatgtcgcagataaagtcactttaaaataataatgatccaggaatattttaaaatcatatatt

SEQ ID NO: 106819 - DNA, 586 bp, Homo sapiens
tggatgcatttaattttatttaacttatattttaacaaagttgctttatttttaattgccaatttgaaaggaacataaaagaacatttttagaaagcatawtatataacatactttaagaatttcaagtcattttattgtgagattgaacaggaaaactttgatgctttttgcattgccaagaatgtataatgagttgctgtattcctggaacatattaattttatatcccagattacacgtcagaagtcatgtgtggaatgaaattttgcagggctgaattttggataatttgagagtactctttaagagaaggaaaccaaaaatacaaggcatcgtaaactttttaaatatattttttgctacttgttagcaatatatgatcatgtaaagacattctgctgcctcttcccaaagccttagaaagtgcacatacacctgatagtacccaaagcttcagcttcattagccccatatcctatctgcatctgccaggaatgtttgctgtaaatatcttttattcaaggaactcctcctctaatcctatatatctgccaagagtttgactgcttgggaacagtttatac

SEQ ID NO: 106820 - DNA, 586 bp, Homo sapiens
tggatgcatttaattttatttaacttatattttaacaaagttgctttatttttaattgccaatttgaaaggaacataaaagaacatttttagaaagcataatatataacatactttaagaatttcaagtcattttattgtgagattgaacaggaaaactttgatgctttttgcattgccaagaatgtataatgagttgctgtattcctggaacatattaattttatatcccagattacacgtcagaagtcatgtgtggaatgaaattttgcagggctgaattttggataatttgagagtactctttaagagaaggaaaccaaaaatacaaggcrtcgtaaactttttaaatatattttttgctacttgttagcaatatatgatcatgtaaagacattctgctgcctcttcccaaagccttagaaagtgcacatacacctgatagtacccaaagcttcagcttcattagccccatatcctatctgcatctgccaggaatgtttgctgtaaatatcttttattcaaggaactcctcctctaatcctatatatctgccaagagtttgactgcttgggaacagtttatac

SEQ ID NO: 106821 - DNA, 588 bp, Homo sapiens
accatatattacttaagatcaaactagacttttrtgctttgtttttatgacatcttcaatgcatagatagtagggaggagccccaaataagtttgtgctaagaatttaaggactgaagaatatgaaataattgtatgatattggtacacaagtcacttttgtcacatacaagttttattacaaacaggtacatacaatgtgattaaatgatttgtgaaccagtcatttgatatatttaaaaatttactgaggtgaattacttattggcttgtgtggtaattatagctcagtgttttttctagttatattcaacgtaggtccttatcaaggcatgtttgcaatacagaagtatatttttatatgcagcccacattctaattagcacattctaatttccagcttaaaaaaaaacacaagtagcatatggcttaaaatgttttcttgttaataactaaacggtgtacctcactgtaagacaaaaagtgaacctttctttactttgattgagccttgctctgtgacattttatttttattggataattaaataattaaataagatgaaatcaattactttcattagaaatta

SEQ ID NO: 106822 - DNA, 538 bp, Homo sapiens
gagccaataatctacgcagggcgtaaaaaaaggaaagggtattttccaggttttcttctaggatttttacagtttgacatcttatattgaagtttttaatccattttcagtaaatttttgtatacaagaatatgtaggagtccagtttcattcatctgcatatggataatcccctatcccaccactagttattgaatagsgagtagccctttccctattgcttgtttttattgaccttatcaaatatcagatagttgtgggtgtgtagctttatttctgggtttttctactctgtttcattggtctatttgtctatttttgtatcagtatcgtactgttttgattactgtaaattgtaatacagtttaatgtcaggtagtgtgattccctcagctttgttcctcttgcttagaatctcttcagctatttagattcgtttttggctctatatgaattttggaatagtttttccctaattctgtcaaaaaagatatcggtaatctaatagggatagcattgagcctatagagtgctttca

SEQ ID NO: 106823 - DNA, 538 bp, Homo sapiens
gagccaataatctacgcagggcgtaaaaaaaggaaagggtattttccaggttttcttctaggatttttacagtttgacatcttatattgaagtttttaatccattttcagtaaatttttgtatacaagaatatgtaggagtccagtttcattcatctgcatatggataatcccctatcccaccactagttattgaatagggagtagccctttccctattgcttgtttttattgaccttatcaaatatcagatagttgtgggtgtgtagctttatttctgggtttttctactctgtttcattggtctatwtgtctatttttgtatcagtatcgtactgttttgattactgtaaattgtaatacagtttaatgtcaggtagtgtgattccctcagctttgttcctcttgcttagaatctcttcagctatttagattcgtttttggctctatatgaattttggaatagtttttccctaattctgtcaaaaaagatatcggtaatctaatagggatagcattgagcctatagagtgctttca

SEQ ID NO: 106824 - DNA, 538 bp, Homo sapiens
gagccaataatctacgcagggcgtaaaaaaaggaaagggtattttccaggttttcttctaggatttttacagtttgacatcttatattgaagtttttaatccattttcagtaaatttttgtatacaagaatatgtaggagtccagtttcattcatctgcatatggataatcccctatcccaccactagttattgaatagggagtagccctttccctattgcttgtttttattgaccttatcaaatatcagatagttgtgggtgtgtagctttatttctgggtttttctactctgtttcattggtctatttgtctatttttgtatcagtatcrtactgttttgattactgtaaattgtaatacagtttaatgtcaggtagtgtgattccctcagctttgttcctcttgcttagaatctcttcagctatttagattcgtttttggctctatatgaattttggaatagtttttccctaattctgtcaaaaaagatatcggtaatctaatagggatagcattgagcctatagagtgctttca

SEQ ID NO: 106825 - DNA, 568 bp, Homo sapiens
aactgcattctctgaactttgtcaatgtaatcttgctacatccactgaaaaacaacaaaataagatgtgttccaccactgtctaggatttactgcatagcattgcacttcacacatcaatctatatctgcaccttctccacaggcagcagcagcaccagcagatcatctgatgatcgtgatgcatgtttaggcttcatggttttgtagccaactagaatgtgttatagatttcacaaggataaaatttcggaaaaaaaaaaaaaaaccatgtagttattctgtccacaatgcataactgaaagaagttcctttgaraaaatagtcttaaagtaggagtttggttgtgactaccattactgaagtgtcgagggaatggaatactgttgaattatagagagagggggaaaaatctcaagttaaaaatggttagatatgtaattgtctcaacaactgacttgaagtctccaccacttttaaacaaaaacatgtctatgaactagagtcttcaaaaagaggtatcaatttttttatacattatgatatgaagcagctcatgactatacttag

SEQ ID NO: 106826 - DNA, 596 bp, Homo sapiens
tttaattatgtaaatatttcatttttacttaattatgcctatgtacatatttttcagtgttgtgccaagtagtgtactatgacaccattttctttctgcacacttgtttccctatttacttcaagtttttatttctctggtgtttcatattgctatttataattcttccaaatttcctatcagaatgcaatttcccacatagtgaagcacatcaggtgatatatcaattccaatttattttctttcctgcagtcattcctcttggcaccctctcttcttctgcccctatttgtactctagttccctgggccagcagcacagctggctcttctttctgatcttctttggatcatttttctccttcattttgctagaatgtggcttccagaaaagtactggtaatgatttgcatagatggcacatttttgtaagcttgaaaatgcttttattttaccttcatttttatttgaggtttgaactgaataaagaattccaattgaaaattatttttctttataattttgaaacattgtacttttgacttctaacttgtrgtgttgctgttcagaaattcaatgccatatcaacaattattg

SEQ ID NO: 106827 - DNA, 598 bp, Homo sapiens
agctattttgaggattaaattacataataagggtaaagtacttaaaatgscacaggcgtggaataattgttagttgttgttactgtcactgctgctgttgatgttgttatctatcatctttacaaaactttagctactaggaagttttcctcacattaagacaaaacttacattatgtaaattgttttttcctcatatattatgtaatccctagaaatttgtttttcttattgaagatagtcaagatgaagctaggtaagatttggataatactttccatgaaaagtaagatgtgtttaaagcttccaacagttcttagaatttttgaaatcgttaggttaaggctttgagtgaccatgtcatttattgttcaaactaagacatttttgaaagtgaaaaggaaggttaattatacagggacaatagctagaatatattactgcacttcatgtatgaaaaaagagagcgactcacaaagtcatgttaatatattcttttttaaaaaaaacaaataaaataccaataggaaacttttggaatgttcaatctcaaagaagtagttgtgctgttacctgtaaaaggctagaaaatgaaagga

SEQ ID NO: 106828 - DNA, 596 bp, Homo sapiens
agctattttgaggattaaattacataataagggtaaagtacttaaaatggcacaggcgtggaataattgttagttgttgttactgtcactgctgctgttgatgttgttatctatcayctttacaaaactttagctactaggaagttttcctcacattaagacaaaacttacattatgtaaattgttttttcctcatatattatgtaatccctagaaatttgtttttcttattgaagatagtcaagatgaagctaggtaagatttggataatactttccatgaaaagtaagatgtgtttaaagcttccaacagttcttagaatttttgaaatcgttaggttaaggctttgagtgaccatgtcatttattgttcaaactaagacatttttgaaagtgaaaaggaaggttaattatacagggacaatagctagaatatattactgcacttcatgtatgaaaaaagagagcgactcacaaagtcatgttaatatattcttttttaaaaaaaacaaataaaataccaataggaaacttttggaatgttcaatctcaaagaagtagttgtgctgttacctgtaaaaggctagaaaatgaaag

SEQ ID NO: 106829 - DNA, 572 bp, Homo sapiens
ttccatgaaaagtaagatgtgtttaaagcttccaacagttcttagaatttttgaaatcgttaggttaaggctttgagtgaccatgtcatttattgttcaaactaagacatttttgaaagtgaaaaggaaggttaattatacagggacaatagctagaatatattactgcacttcatgtatgaaaaaagagagcgactcacaaagtcatgttaatatattcttttttaaaaaaaacaaataaaataccaataggaaacttttggaatgttcaatctcaaagaagtagttgtgctgttacctgtaaaaggctagaaaatgaarggagtatgagtccttgtgtgtaagcctgtcccactgcaaatagattatggtttagaaaataattttaattgtagctctctaaaatgccctagatatttccatggtgttatgggagataagagtacatcttagaatatttaaactggaacatttattgcagtttctcatattatatatgaaattgtgagtgaagtataaataaactcagccaaagtcatattagtgttggaaccaaggttctgattataggc

SEQ ID NO: 106830 - DNA, 565 bp, Homo sapiens
aaaagttggaagttagcagaggtcggctcatgagatttaaggaaagaagctatttccatgaggtcgaagtggaagaytgagcagaatgtgccaatgtagaagccataacaagctgtacagaagatctaggtaaggtcattgatgaaaatgtctaccctaaatagcagattttcaatgtagacaaaacagacttctattggaagatgaccgttaggactttcatagctagagaggagagatctatgcctggtttcaaagcttcaaaagacaggctgactcacttattaaggactaatgcaattggtgactttaagttgaatccaagactcacttaccaaatcttaaggtccttaagaataatactaaatctaccctgcatgtgctgtagaaatggagcaaccaaacctggataacagcacaactgtttacagcattattgactgaatattttaggcccactattgagacccactgctcagaggaaaaagtgttctttcaaaatgttactgttccttgacaatgaaacttgtcacccaagagctctgatggaaatgtataggagaat

SEQ ID NO: 106831 - DNA, 618 bp, Homo sapiens
caaaagtagactcatatcaacttgttagaacatatctgaacaggatgtaatttgaggcaccaagaaggagaagacacagtttgaaaagagtcttatgaaagcaacatgaattctgctaaaattgaagcaacaacaaacatcaaatttatgatgaartttaggctgaagactggtaaaatcactgatgctttacaaaaactttatggagacaatggccccaaataaatcagcagtttataaatggataacttgttttaagaagggatgaaatacgttaaagatgaagcctgcagttagaccatatacatcaactttcaagagaaaaaaatgaatcttgcttatgtccatactgaagaggacaaacaattaacagaaggtacagaaaatacaatagccaacaccacagacatctcaattggtttggcatacctaattctcactgagaaattaaagttgagcaaaatttctactcaataggttccaaaaccattgtgctcagatcagctgcagataagagtatggcttttaatggaaattttaagcaagtgaggtaaaaatgctgaaggattacttcaaataattgtaacaggagatgaaacatgtctttaccagtatgat

SEQ ID NO: 106832 - DNA, 537 bp, Homo sapiens
taatctcttaatttccaactttaaatagacactatttttaatatcttgaagtaatgcttgtctaaatatatattcttaaacattttaattacaatctatccaattttgtcacactagtcttataatttctagctctaggattctatgagagttgactatatcacaacacttccttctatcttaatttggacatcttcatttcacctggttccagtcattctttatcatatgtatcctctttctcccatacctctttgtagtattagaataggctggtagctgctgaaatgagcaaatggaggaaaaactagctatgaatctatttccccactagawaatctactttatgtaggtcaaatgattatgctaaataagcatatgggatatatttcatgttttcttttctgattctaattgagaaaaaaggtaagtacttaaggtgttaataatttaagggtattaacagttgatgaaaaccagtatgaaagcaaaggaggagctcgaatcttttgcattcaagtattttgatgaaaattg

SEQ ID NO: 106833 - DNA, 565 bp, Homo sapiens
cttcaaaacatcttacaattcacaggactgcacactacaaaaactaattatcggcactaaaatatcaatagtgccaaagttgaaaagttgtacttcagggtgaagggttgcttatgaaaaacacatggatgagaaagcagccaatttggtccaaagaatccaaaaaaaaatttggagttcaactcactgtacctcagaaaactagaaggaggccaagagcaagttaaaagatacacaacagaacaacagattcctcccaactctgtacaaataccagacattcatctctggggcaaaaaaatgcaggttaattctagaaataaactggccacgaaataaagacttccactcttctattagtggtatctggagcctctccaggaaaataatcacatctctacctgattactctaagtggaatctaatgagcaatccccactgcagagaragcatccactaagcattttatttaatgcttcactgtgaaagactaaacaaccaacaagattaagaaatatctacataatgaaagaccaaaccaaaaaataaaagaacttggagggaa

SEQ ID NO: 106834 - DNA, 574 bp, Homo sapiens
ctctacaaaaattaaaaatcagcaggtatggtggtacatgctgctagtcccagctacttgggaagctgaagtgggaggatcatttgagttggggaagtcgaggctgcagtgagctatgatggtgtcactgcactccagcctgggtgacagagcaagaccctgtttcagaagtataataaaatactaatattaatattactgataataaaactactaccacacctaacatttcttgggctttatatattaggccccttttaaactaattatatgaactaactttctcctgaaatatggtgaggaagaaataaccattttccctattttcacatgaggaaagtaagatagtaacttgcccagggttacaagatgaggatttgaactgaaacccaggcaatgcggatccaggggttttaccattacattatactccttctgtgtgtctctctgggttggggggcatggcgcgtctgatgaatatccgctttgggttagatatgaaagggtacaagttagaaacaatgctttaggtgattaattagggyaggatcttttgaaatacccatgggggaag

SEQ ID NO: 106835 - DNA, 558 bp, Homo sapiens
ttttaaacttgcatttgccrttgaagaaaatattgataaattaaataatgataaattatgtttatatttttgttacatttcaaatgacatgcatttgttattttgtatctatttgcacttctctgtagttttaaactaagtattttaataggacaatattttttcatttcattagctatttattgagtcactaaaatatgctagcctctctggtaaactcaggaaatacaatgatgaataaggcaaacatcctctgtcaatataacaggacaaataaaagtttagcaagaaattgcagtaattaatttgagataagtgtaaaatggtggtaggtactagaagaaaaggattaatacaggtggaacacagcttcaaaaattaaggagcacttgagcaaagtgatggtattgagagacaatcattgaatttcttcaaggtggaagatgctttacatgaattaatcttcatgatatttggcagttaaacattttcacaactgtgctgataagtaaactaacatgcaaagaagtgaaaaagaaatttgctgaagcccacaaa

SEQ ID NO: 106836 - DNA, 558 bp, Homo sapiens
ttttaaacttgcatttgccattgaagaaaatattgataaattaaataatgataaattatgtttatatttttgttacatttcaaatgacatgcatttgttattttgtatctatttgcacttctctgtagttttaaactaagtattttaataggacaatattttttcatttcattagctatttattgagtcactaaaatatgctagcctctctggtaaactcaggaaatacaatgatgaataaggcaaacatcctctgtcaatataacaggacaaataaaagtttagcaagaaattgcagtaattaatttgagataagtgtaaaatggtggtaggtactagaagaaaaggattaatacaggtggracacagcttcaaaaattaaggagcacttgagcaaagtgatggtattgagagacaatcattgaatttcttcaaggtggaagatgctttacatgaattaatcttcatgatatttggcagttaaacattttcacaactgtgctgataagtaaactaacatgcaaagaagtgaaaaagaaatttgctgaagcccacaaa

SEQ ID NO: 106837 - DNA, 615 bp, Homo sapiens
gaaaatcaataaattttattgaaacaatgagtaaataaatgaataaacaaaggaaatgcttcttcataaaaatattaaaaataaaattaagtctctatggcagattgcattttcctataaaatagcttcagtgatattacatatctcatttgctcttctatcgttgtgccctgcccctcacaagaggcagagtctcttccccttagaccaggacagatctttgtgattgccttgtctaacagattatggtgaatgttatgtgagttctgaagttgtgtcataaaaagaatttatggcatttttcctttttttggaaaattcatccttggtatccagccaccatactgtgagaaagctaaggccacgtagaaagatcatatataaatgttctggccaatagccccactaagatttcagagaacaaccagcattaactgccagatattggaatgagaaagctttgaaatgacaccaatcccagctgtttkatgactgcaactgcatgagaaatcctgagaagaaactacttagttgagcccagttaacctcccaaaattacaataatatgagacaggctaaaatgatctcattctctgatatgttttttgcagataa

SEQ ID NO: 106838 - DNA, 615 bp, Homo sapiens
gaaaatcaataaattttattgaaacaatgagtaaataaatgaataaacaaaggaaatgcttcttcataaaaatattaaaaataaaattaagtctctatggcagattgcattttcctataaaatagcttcagtgatattacatatctcatttgctcttctatcgttgtgccctgcccctcacaagaggcagagtctcttccccttagaccaggacagatctttgtgattgccttgtctaacagattatggtgaatgttatgtgagttctgaagttgtgtcataaaaagaatttatggcatttttcctttttttggaaaattcatccttggtatccagccaccatactgtgagaaagctaaggccacgtagaaagatcatatataaatgttctggccaatagccccactaagatttcagagaacaaccagcattaactgccagatattggaatgagaaagctttgaaatgacaccaatcccagctgttttatgactgcaactgcatgagaaatcctgagaagaaacyacttagttgagcccagttaacctcccaaaattacaataatatgagacaggctaaaatgatctcattctctgatatgttttttgcagataa

SEQ ID NO: 106839 - DNA, 592 bp, Homo sapiens
tcaatagaaggatgatagtttattttcttgttttttcctgccacagtagtgaattgatttttgatctttaacatgacacacaatgataaaacttccttatttagacttgcaaatatatatcttaaaagtagaattatagtcaatttaatatataatccaacttagtgttagggaaactacatagaaacatgttcctccacctaccccacctcaaagaagaaacatagtaatttaaaaaatacattttttcttctcataaaatattgtgcaacatacagaacacaaattaggtaactgatattaaatattgatttattcatcaatccaaaggcttatttatattccttttaatattttttaatttttaattttgtattgatagatcattgttgtacttactttatttatattattttaggaccattaattaaaattggcattaagctccgtcaaacaattgagttattttttcttagtttttttaccccactcaaaaatcaaaattaagtttgagcctagcaagattgaagctaatgtgtcattacagaatactaaatgccaagttatatrtaccagttgggaagacaattag

SEQ ID NO: 106840 - DNA, 463 bp, Homo sapiens
ctcataaaataggtggcaactgatttttaacttgacgggctgaataaaagttttcagttaaagaatggaaataggaggccaggcaaggtggctcacgcctgtaatcccagcactttgggaggccgaggcgggcagatcacgaggtcaagagatcgagaccatcctggctaacatggtgaaaccccatctctactaaaaatacaaaaaattagccgggcgtggtggcaggcacctgtagtcccagctacttgggaggctgaggcaggagaatggcatcaacccgggaggccgagcttgcagtgagccgagatygcgccattgcactccaacctgggccacagagcgagattctgtctcaccaaaaaatatatatatatatggaaataggagtgtcgttggctaagaaaacagaatatgcaatataagtggatatttgaacaactacaaacattcaatgtggata

SEQ ID NO: 106841 - DNA, 530 bp, Homo sapiens
atcacttcccaccaggcccccacctccaacattggagattacaatttgacatgagatttgggtggggacacagatccaaaccatatcatgaaataaccagcagtaccagctacagccggaaatgttctattttctggtgtaatatgtcagcatctcaattttgctctttctcrcctctgtgcactttccttttgtcccactttgtttcacctccagattattggttccactcagtgcaacctgggaggagcatggtgcattcttataatgaaagaagacttggatgcattattataccaaaaagtctctctccttctcccttcagggatgaggagatacgatagggtgaagggcaatgccattagccatatgatggtaattagaggaggaagcagggtcaaagaagagaacttttggttggagacattaggacattgtgtctgctggtgggagtgataaccttttgttctatttttaaaaatctccaacaagagcagaacttttgtgggggagaggatatttagaggctg

SEQ ID NO: 106842 - DNA, 530 bp, Homo sapiens
atcacttcccaccaggcccccacctccaacattggagattacaatttgacatgagatttgggtggggacacagatccaaaccatatcatgaaataaccagcagtaccagctacagccggaaatgttctattttctggtgtaatatgtcagcatctcaattttgctctttctcacctctgtgcactttccttttgtcccactttgtttcacctccagattattggttccactcagtgcaacctgggaggagcatggtgcattcttataatgaaagaagacttggatgcattattataccaaaargtctctctccttctcccttcagggatgaggagatacgatagggtgaagggcaatgccattagccatatgatggtaattagaggaggaagcagggtcaaagaagagaacttttggttggagacattaggacattgtgtctgctggtgggagtgataaccttttgttctatttttaaaaatctccaacaagagcagaacttttgtgggggagaggatatttagaggctg

SEQ ID NO: 106843 - DNA, 530 bp, Homo sapiens
atcacttcccaccaggcccccacctccaacattggagattacaatttgacatgagatttgggtggggacacagatccaaaccatatcatgaaataaccagcagtaccagctacagccggaaatgttctattttctggtgtaatatgtcagcatctcaattttgctctttctcacctctgtgcactttccttttgtcccactttgtttcacctccagattattggttccactcagtgcaacctgggaggagcatggtgcattcttataatgaaagaagacttggatgcattattataccaaaaagtcyctctccttctcccttcagggatgaggagatacgatagggtgaagggcaatgccattagccatatgatggtaattagaggaggaagcagggtcaaagaagagaacttttggttggagacattaggacattgtgtctgctggtgggagtgataaccttttgttctatttttaaaaatctccaacaagagcagaacttttgtgggggagaggatatttagaggctg

SEQ ID NO: 106844 - DNA, 602 bp, Homo sapiens
ttgaaaaacaaaattacatggtttgaaattatttttctctgtggtattaatatatacatatcaaaaagtcaagcctgtcagtggaaatatggaattaagggtgactctttatgtaatacagacatttacaatagaaggtcacttagtatcaaggaataaagttcccttaataacatgtttggagggtttacatatctgtgggatttttttttttagtttctgtatctgactatgatttatttttattaatttttttgagatggagtcttgctctgtcacccaggctggagtgcagtagcgcaatctcggctcattgcaacctccacctcccgggttcaagsgattctcctgcctcagcctcctgagttggtgggacagcaggcacctatcaccatgcccggctaatttttgtatttttagtagagacagggttttgccgtgttggccaggttggtctcaaactcctgacctcaggtgatccaccaccttggcctcccaaagggctgggattacaggcatgaaccaccatgcctggctatttcattaatttttttagctgctccttgtggagcaggagtaaatcctaggcagtatgcccagag

SEQ ID NO: 106845 - DNA, 602 bp, Homo sapiens
ttgaaaaacaaaattacatggtttgaaattatttttctctgtggtattaatatatacatatcaaaaagtcaagcctgtcagtggaaatatggaattaagggtgactctttatgtaatacagacatttacaatagaaggtcacttagtatcaaggaataaagttcccttaataacatgtttggagggtttacatatctgtgggatttttttttttagtttctgtatctgactatgatttatttttattaatttttttgagatggagtcttgctctgtcacccaggctggagtgcagtagcgcaatctcggctcattgcaacctccacctcccgggttcaagggattctcctgcctcagcctcctgagttggtgggacwgcaggcacctatcaccatgcccggctaatttttgtatttttagtagagacagggttttgccgtgttggccaggttggtctcaaactcctgacctcaggtgatccaccaccttggcctcccaaagggctgggattacaggcatgaaccaccatgcctggctatttcattaatttttttagctgctccttgtggagcaggagtaaatcctaggcagtatgcccagag

SEQ ID NO: 106846 - DNA, 585 bp, Homo sapiens
aagattgattagaagtcttcccaacaggcaatatggggactgaaggaatttgttaaatatgcaaccctcataggaaagtcacaccctcttctggcaaatattatctaaatatatagctwtaggagggtgtattttaattttttaaaggttccagccagactcatccatgattggaaacgcgagaaaacaccctaacgttatacattctagcatttaaaacactgtaagtgatcatatttattatatatcctgtagacagatttctctcaatctctaacatttgaggatatggctctgtagtgacaatttcattgaaagaaaagacattcctagggcaaaatctgcttttccactgtaggttttagttctacctctgcacatgcacagaatgggctccttcacgtggcagattttaaaatattcgatgtcacctgtaatatcccttttattgatctctattggaaagtccttataactttggtaagagttttcataaactcaattagggaaaatgttttatgatttcagtttaaatttaagttatctgtaagaaaaactattttttttggttgaaccaggatatta

SEQ ID NO: 106847 - DNA, 585 bp, Homo sapiens
aagattgattagaagtcttcccaacaggcaatatggggactgaaggaatttgttaaatatgcaaccctcataggaaagtcacaccctcttctggcaaatattatctaaatatatagctataggagggtgtattttaattttttaaaggttccagccagactcatccatgattggaaacgcgagaaaacaccctaacgttatacattctagcatttaaaacactgtaagtgatcatatttattatatatcctgtagacagatttctctcaatctctaacatttgaggatatggctctgtagtgacaatttcattgaaagaaaagacattcctagggcaaaatctgcttttccactgtaggttttagttctacctctgcacatgcacagaatgggctccttcacrtggcagattttaaaatattcgatgtcacctgtaatatcccttttattgatctctattggaaagtccttataactttggtaagagttttcataaactcaattagggaaaatgttttatgatttcagtttaaatttaagttatctgtaagaaaaactattttttttggttgaaccaggatatta

SEQ ID NO: 106848 - DNA, 631 bp, Homo sapiens
tttctttttatttttaacttcttcttaagttcaggggtacatgtgcaggatgtgcaggtttgttacataggtaaatggggtttgttgtacagattattttgtcaccaaggtattaaacctaatatcccttagttatttttcctgatcctctccctcttcccatcctccgccctccaataggccccagtgtgtgttgttcccttatatgtgtccatgagtgctcatcatttagctatcacttataagtgagaatatgcggtgtttgattttctgttcctgcattagtttgctaagaataatgggctccagttccatccatgtccctacaaaggacataatctcattcctttttgtgtctgcatagtattccatggtgtatatgtgacacattttctttattcagtctaycattgatgggcatgtaggttgattccatgtctttgctattgtgaatagtactgcaatgaacatacacatgcatgtgtccttataatagaagaatttatattccttcaggtatatacccagtaatggggttactgtgtcgaatggtatttctgtctctaggccttttaaatttaattttaatagtattgggggaacaggtggtttctggttacatgcataagtt

SEQ ID NO: 106849 - DNA, 525 bp, Homo sapiens
tacagggaggggaacatcacatacgagggcctatcgaggggttgggggctaggggagggatagcattagtagaaatgcctaatgtagatgacgggttgatgggtacagcaaaccaccatagcacatgtatacctatgtaacaaacctgcacgttctgcacatgaatcccagaacttaaagtgtattwaaaaaaggaaaaaagaataatagttattatcttatatttttatattttctcacatcaccaaactctgaaattatgagtgtaaatggaaaaagaaagaaaatgaataccctttagagataccttttttctaggcaatctatagttctttccttaatttatattcacctcattttaatttgctctacaaaaagttaggagttaccacttttattttaccaaaagtatactggctcttgtcctctgctggtcaggatcctgtattaatttctgttctacactggtgatgctgagacatgaaatattttatctctgggaccaattttcaactaggtttgagg

SEQ ID NO: 106850 - DNA, 525 bp, Homo sapiens
tacagggaggggaacatcacatacgagggcctatcgaggggttgggggctaggggagggatagcattagtagaaatgcctaatgtagatgacgggttgatgggtacagcaaaccaccatagcacatgtatacctatgtaacaaacctgcacgttctgcacatgaatcccagaacttaaagtgtattaaaaaaaggaaaaaagaataatagttattatcttatatttttatattttctcacatcaccaaactctgaaattatgagtgtaaatggaaaaagaaagaaaatgaataccctttagagataccttttttctaggcaatctatagttctttccttaatttatattcacctcattttaatttgctctacaaaaagttaggagttaccacttttattttaccaaaagtatactggctcttgtcctctgctggtcaggatcctgtattaatttctgttctacactrgtgatgctgagacatgaaatattttatctctgggaccaattttcaactaggtttgagg

SEQ ID NO: 106851 - DNA, 558 bp, Homo sapiens
ttgctgtagtggaatatgtgatattgtctatacaagcacttaatcttttgaagtgcagagatgactttggggtatcctaagcaactgtttaatctgagtcattagtagggatagatctagccacttaagagctgtctcatcctggcaaaccccctacctttctgggcctcatttcttcttgaaaatgagaaagktagaagtaagttgtcttttaaatttactctcaagttccacaaagtaaaaagccccatgaatattgcactgcctggttcagctgctgttatacaccctttgcagccaaaagcaactctcttcctaggagcttaggctcacaggactcattgtgctgaagacaatgggacgatggcttcagcccctggttctactgtttctactgggtctgaggagaggatgaggtggtttaaccagcaatggttcattaatccaacactaagtgggaaagcagaagagccctaaggttgagggacttagaaaaatgccaaaatgttgaacaggaacaaagtacagattaagaggaaagctttatgcaagaggaac

SEQ ID NO: 106852 - DNA, 608 bp, Homo sapiens
tgtcacactgggtagatgagataagtcacatacacttgcatcactgcaattgtctcatggttagtcatgcatgcttgtttttaggaatagttatttgacagaagaattcatgaccacagggcccaactcaggagtaggcaggcagatgccgaggtgctgcaaacagagggatctcatggccataccggtgggaaaaaccaaagtactcccaaccctctcccccacccaacatcctcctcctctttactgagaaagcctctttctgagagatagaggagggacgttgtctctaaagaggcaatgttaaattacacagtttttcctagaacaacacaggattgtgaggagtgagttkaagagcgtcttagtctgttgtgtgctgctatgacagaatagctgaaactaggtaatttacaataagcagaaatgtattggctcatagtcccgaaagttgggaaggccaatagtaaggtgccgacatctggcgagagccttcttgctgcatcatcacatggcagaaggtgaggaggtgagagaggcagggggctaagctcacccttttataccagcaccaatcccacccatgaggggggccctgcatggcctta

SEQ ID NO: 106853 - DNA, 399 bp, Homo sapiens
aagggaaccaattaaagttttatcaatgaagaaaaattaaatatgttgacatggaaagacattcaagacattattgttaagtctacaaaagatagttgccgacctagatatatgatactatttttgttaagaaattgtttatatgcctaggtatatatgtstatgcagcatgcatatatacaaatctgaaggaaaatccatcactctctacagtgatggcttctgaatatgaaaagtatgaagatatttcaggaggagctgaggcatagaaatacacagtgtgaactggaagaaccaatgcaggatggtaaaaacagttggaggcaccaccctagtataagaaaaataaaaaataaaagagacctaagtagcagcatgccatctcctctccctatgcca

SEQ ID NO: 106854 - DNA, 399 bp, Homo sapiens
aagggaaccaattaaagttttatcaatgaagaaaaattaaatatgttgacatggaaagacattcaagacattattgttaagtctacaaaagatagttgccgacctagatatatgatactatttttgttaagaaattgtttatatgcctaggtatatatgtgtatgcagcatgcatatatacaaatctgaaggaaaatycatcactctctacagtgatggcttctgaatatgaaaagtatgaagatatttcaggaggagctgaggcatagaaatacacagtgtgaactggaagaaccaatgcaggatggtaaaaacagttggaggcaccaccctagtataagaaaaataaaaaataaaagagacctaagtagcagcatgccatctcctctccctatgcca

SEQ ID NO: 106855 - DNA, 399 bp, Homo sapiens
aagggaaccaattaaagttttatcaatgaagaaaaattaaatatgttgacatggaaagacattcaagacattattgttaagtctacaaaagatagttgccgacctagatatatgatactatttttgttaagaaattgtttatatgcctaggtatatatgtgtatgcagcatgcatatatacaaatctgaaggaaaatccatcactctctacagtgatggcttctgaatatgaaaagtatgaagatatttcaggaggagctgaggcatagaaatacacagtgtgaactggaagaaccaatscaggatggtaaaaacagttggaggcaccaccctagtataagaaaaataaaaaataaaagagacctaagtagcagcatgccatctcctctccctatgcca

SEQ ID NO: 106856 - DNA, 417 bp, Homo sapiens
tgaattccagaaggaactactgagatgcaaagaagcacagcagcttttgcacacatgcgtgggattagatggaaaacaagtggattgagggtctgccaatgaaagctacccatactgaagtccactggctctggttgagacccagaagagtcatgcatcagaataaaggtggacaggaaataccctggcctttgtagggactgagcctgcaccgacgacctcaattgcagcctgtatggaggacccctgaccatcccccagaagtagactcccatctcttctgcagcaagataacatgctrctaggcctcaattcattgctaaatattttgtaacaagtatctcacatttaacaaaaaaagatcagtcatatggcagcaaaatacaatgtaatatgaccaaaacatgaaagactgtg

SEQ ID NO: 106857 - DNA, 547 bp, Homo sapiens
ttggggatgggtgttccagcccacagctgctgtcagtctccagacaggtgaacactgagtcttcagatgacctcagccccaggagctgcccctactgatgccacatgcagcagaaatgagccagtctctctgagcccaacccaaatgtagattcatgaggtccatgaatgcttgctcttgcttacgccactgggtttggggctgcttgctacatagtaacaggtagctaggacatgaggctcactgttcatatttatacattttaagaatcacttgggggccaggcacggtggctcacgcctgtaatcccagcactttgggaggccgaggaggttgartcacaaggtcaggagatcaagaccatcctgtgaatggtgaaacctcgtctctcctatatatacaaaaagttagccgggcgtggtggcaggcacctgtagtcccagctactcgggaggctgaggcaggagaatggcgtgaacccgggaggcggagcttgcaggtgagccaaaattgtgcccccgcactccagcctgggggacagagcgag

SEQ ID NO: 106858 - DNA, 538 bp, Homo sapiens
actcttgccataggaattttttttctaagagattgattattgttttttagtggggaaacattccaggccaaaatgaatgtttccatcagatggctgttgtgaaagtggataatttattttccaatggcctgaccacttacattaaaggcaaacatctcaggccataggattctttcctttgggggccctcagtttggggaggaggtcctcttgatctttttagctgttgtaactgtaaagacatgcacctctttgcctttcgaagaagttgccccttgaagaagttgcctcaatgtgactactctaactctaagttacctttggtaaagttcacccatttctgtagaaaatcagtttctggatacatagttctaatacatgaaattagctggagtttcaaatggaggagttttggccttcttggatccaaatgaacccatgattctctgtactttagtaaccttatctacttactgaacccagtacagtttctgcatgacccarttagacaactgaggcctccctataagaccctgtc

SEQ ID NO: 106859 - DNA, 344 bp, Homo sapiens
tggaaagggcatgattgtgttttgaaatgtgaggacatgagatttgggaggggctgggagaggaatgatatggtttggctttgtgtccccacccaaatctcatcttgaattgtaatcctataagccccacgtgtcatggaagggacacggtagaggtaactgaatcataggggtagtttcccccatgttgttctcgtgatagtaggttctcacaagatctgatggttttataaggggcttcccccttcattcggctctcattcttcctgtcaccatgtgaagaaggatgtgtttgcttccccttctgccatgctagtaagttttytaaggccccccaccgcagc

SEQ ID NO: 106860 - DNA, 600 bp, Homo sapiens
tgtttctgagtacactttgagctccctgaaggcaggagctagattttcagtttcttttgtgcttttctacagccattcagtgtcctttagccagtgcttttggcaaatcagcaacctaagcttccccctctatacccatatttttgcctatttattgtagatataattcttccattcaacattttctatgcctttggcatgtgtaagaggtgggataagcagaggtgaaaatgttgacattattacttgtttcttagcaatgttaatcgagcacctattatgtgctgrccattattctagtcactgaggatccaaaaataaataagaggacctccaccttcaaggagctgaaagtcaaatcaaggagacagacaagcaagcagacaattcccaaacaatctatgagctctccgttcccatactcatacttggcccatcatgactgagcaacccttagggacaggaataggttctagttctaggtctgccactggtaagaactgatttttttaaaaggcacaaactctaaaataattaagaatgtgccactccaaaatatgctgttctggcatattgatgactctgaattaaaggcagtta

SEQ ID NO: 106861 - DNA, 358 bp, Homo sapiens
atgtttaaaatgtgaaacctttagttctacttgctctttactcagaaaggatagagtattcccttatgccaacgaggtctctctgagttgtttgcactattggtagcaggtgctgcctggggtagctcttatggtctgtgcttgaagtgtgcaccagctgctgccctgracatgactgttggtccctgcatacaagcagccacctttaaacagatcaaatgactcttatgatgacagctgtctcactctactttcaaactggttttaatttggttacttgcaacctaagacagcaaacagcattttagggatgaattgcgttcctgaagtgcatgggtcagaaagctcctacattcac

SEQ ID NO: 106862 - DNA, 615 bp, Homo sapiens
ctggtgaaactggatttgttctcctagaaattgattaatttccatgagaaagccaggatgcccttcaggttttatctctttcaagtgtccacttccccttggactttcggcatcatgttataatgcaacataaaagccctcaccggaagccaggggcctgctcttgaacttctcagcctgcggaactgtaaactaaataaacctctyttctttagaaattacccaacctcaagtatcctgttatagcaacacaaaatagactaagacatatcctatataagtagttaccacatcccacccatgtcaccaatagtgtgcctccctcttcatgtccactgccactgccttgttctaagcactcataccctaaattccagatcatctgaatttcctaatagttgaccttcctagctttaggctatacctatccaaatattcttttataaacatcccttcactcaggtcatttatttgcattataacattaaagagctttcgaattcttcccagtgaaagctaacagtatactaaactgttgtttatttcataagctcttttttgtttcagtgctgcacattttgatttctaaattccgcagtataggcctagccttct

SEQ ID NO: 106863 - DNA, 615 bp, Homo sapiens
ctggtgaaactggatttgttctcctagaaattgattaatttccatgagaaagccaggatgcccttcaggttttatctctttcaagtgtccacttccccttggactttcggcatcatgttataatgcaacataaaagccctcaccggaagccaggggcctgctcttgaacttctcagcctgcggaactgtaaactaaataaacctctcttctttagaaattacccaacctcaagtatcctgttatagcaacacaaaatagactaagacatatcctatataagtagttaccacatcccacccatgtcaccaatagtgtgcctccctcttcatgtccactgccactgccttgttctaagcactcataccctaaattccagatcatctgaatttcctaatagttgaccttcctagctttaggctatacctatccaaatattcttttataaacatcccttcactcaggtcatttatttgcattataacattaaagagctttcgaattcttcccagtgaaagctaacagtatactaaactgttgtttatttcataagctcttttttgtttcagtgctgcacattttgatttctaaattcygcagtataggcctagccttct

SEQ ID NO: 106864 - DNA, 685 bp, Homo sapiens
gagtaatgtagatggcctccccaatttgttgggggtggggggaggtgggggcatcatccaattcattgaaagcctgaagagaacaaaaagatggagggcaggtaaattcactgtctgtgtttgagctgagacatccatcttttccttgcccttggatatcactactcctggttcttgggctttgggactcacaccatgacttacatcactaacttgtggttytcaggcctttggacccctcattatcaggttttcagagggactgaattaaacacttggagtggctttctggttctccagcttgcagatggaagattaagacttcttggtcttcatagctgcataagccaattcacataataaagcttcctttggttttctttctctggagaatcctgatacagattaatttttgttttcataaagattggtagcacatattttaaaatcaatagggtctcatttttaatggtataattttaagcttctgattcaattcctttatttgctaattattaagtcgttttagtttttgaacaagttttgctttgtttttcaaataacaatgactttaagttttcttatgtattttcataaagttgttctgtatctctttaagttttgctgcctatatttatgctcttcttctggttctagtatttttaacgtaattagtatactgaat

SEQ ID NO: 106865 - DNA, 469 bp, Homo sapiens
ggagcatatgtttctaagctgcagtaaacgtttggaaatataacacaggtaaagaggcaatagttgcatgaagaaaaacctgtagcaactttagactcattttcatttggaartagttttgagagtctttcatacaatctttcctttcctcccttagtgaatttaggattgtgaaggcattaggtgaaagattacatttatgacctctgcaaaagatcaaatagtcttattagtcagcctatattcatgaattttctatcttcttttgacatgaagggttttgaacaagcgtttcttctctggatgagaagaaaatgtatttcacaataaaacatgaaaattataaggtgctcagtgggattataacatttggtagcacaggaaaaaagagaaagatgtggaagtgccataatccattggtgtttcatataattctagaaggttctggttataacctgttcctaatttg

SEQ ID NO: 106866 - DNA, 469 bp, Homo sapiens
ggagcatatgtttctaagctgcagtaaacgtttggaaatataacacaggtaaagaggcaatagttgcatgaagaaaaacctgtagcaactttagactcattttcatttggaaatagttttgagagtctttcatacaatctttcctttcctcccttagtgaatttaggattgtgaaggcattaggtgaaagattacatttatgacctctgcaaaagatcaaatagtcttattagtcagcctatattcatgaattttctatcttcttttgacatgaagggttttgaacaagcgtttcttctctggatgagaagaaaatgtatttcacaataaaacrtgaaaattataaggtgctcagtgggattataacatttggtagcacaggaaaaaagagaaagatgtggaagtgccataatccattggtgtttcatataattctagaaggttctggttataacctgttcctaatttg

SEQ ID NO: 106867 - DNA, 583 bp, Homo sapiens
acaacacggaggagcccagccatgaaaagtacagactcctttcaggaacagcaaacagcaagggtaaaaggctcaagccatttatgttaaaaggcacagttgtaaaactttgagctgattttctatttaatagctgactatatttgatcatttctaaaaaaggcatgtacacctggaaggatgtgtcttgtgcttctattaaaacagggctctcatacgaattgtcaagtaacacaaagatattttctctttgcaagatgaaaagagtgctttttagtcagataagagtgagactgtatgtcattcattttaatagctagaatcaaatgtatgtggcttaacaattactcatttgcgcaatactttaagttattggagttaygaaaaaagagaaaaaagtcaaggctgtgagcattgagaggctgagtagttgaacaactaagtagttctgggaaaatagctttagctcgtgaaaaataataggaaaaattacaagtcttttgaactcaggacctctgacgaagtgctcgcctaaactgtatgtcaccaaataaaacacctgtgtacatttgtatggctctgg

SEQ ID NO: 106868 - DNA, 536 bp, Homo sapiens
acatagtgcatgtttttattttagacttacaatgataacccagacccttcatgttctttaaaaatctatagatatgataaataattattgcataatcagcagctgtatcttaaaggagaatgttaattttctataataagaatagaaaaaaaaagaatagagcaacatcaagcaaaatattgaaaaagagtgatccttaatcttaccacctaatcacaagtactattttaaattttgtgtatctttactggttttcatgcccttgaaatacctaaaattttctaatgtttaattccttagcatactttgcttaaaggctcatatcattactctttccttaagtarcctcacttttagcatgtagatttttggcaggaaaaaaagtactgttttcaagtgtccaaatttttccctgatgttcataatgtggattcttttttaacagatggaaaatggttgatcattatgttagccgtgtccgtggaaatctccaaatgttagaacagctggacctgattgggaaaaccagtgagatg

SEQ ID NO: 106869 - DNA, 569 bp, Homo sapiens
aatgaaactaaatacatacaaattctgtatgctgaaagcttcaaattactaaagaacacaaccaaagaagatctaaataaatggtgggatagactgtgttcatggattaaaagactcaatattgttaagataatcgattttccctaaacaggtatagtscatgcattctcaataaaaatcccaacataaatttttgtagagattgaaagatgaatctaaatttgttagtggaaaattgaataatctaaaatagccaaaattatttttataaagaagaacattggacaactcactctaaccaatttcatggctcactataaagaatcatgtacagtgcagtatttttaaaaggactgaccaatcgaccaataggataaggtagagagcccagtatgagacctgaacatataaaataaatgattttctgatcacagattctgacgcaatttaaaagaggtgtttttttgtttgtttgttttgttttgtttttccaacaaaacatgctggaatatatagaaaaaataagtcaaaatagattataaactagaagcctcagagtagagcataga

SEQ ID NO: 106870 - DNA, 586 bp, Homo sapiens
tggcatgatgctttgtcagtagagggcgctggagggacactgcaggagtaaaggtgttttgcttgcaggactcctgtgtctgctytctgtgctcctgggctgtgcagtcatcccagtgtccgggtactgcagatgggtgtctcctccactcatgaactctacagcccatgaagcttctctgccttcaggttgccgcagcacccaggcgctaccagtttcccctgacaccgtccatacttctccacttatgatgtcccagcaaaggacctcaggcgagacatcttatgaacagatttctctagtatctacctaaaggttatcaatcagttctcacactgctgtaaagaaacacctgagactgggtaatttatgaagaaaagctttaactgactcacagttccccaggcttaaaaggaagcattttagagaggcctcaggaaacttaaaatcatggcaggagctgaagggcagggaagcacgtcttaccacaattaagcaggagagagagagagagagagagtaaaaagggaagtgctacacacttttaaaccatcacatctcgtgagaactcactcactatcacaag

SEQ ID NO: 106871 - DNA, 586 bp, Homo sapiens
tggcatgatgctttgtcagtagagggcgctggagggacactgcaggagtaaaggtgttttgcttgcaggactcctgtgtctgctttctgtgctcctgggctgtgcagtcatcccagtgtccgggtactgcagatgggtgtctcctccactcatgaactctacagcccatgaagcttctctgccttcaggttgccgcagcacccaggcgctaccagtttcccctgacaccgtccatacttctccacttatgatgtcccagcaaaggacctcaggcgagacatcttatgaacagatttctctagtatctacctaaaggttatcaatcagttctcacactgctgtaaagaaacacctgagactgggtaatttatgaagaaaagctttaactgactcacagttccccaggcttaaaaggaagcattttagagaggcctcaggaaacttaaaatcatggcaggagctgaagggcagggaagcacgtcttaccacaatkaagcaggagagagagagagagagagagtaaaaagggaagtgctacacacttttaaaccatcacatctcgtgagaactcactcactatcacaag

SEQ ID NO: 106872 - DNA, 616 bp, Homo sapiens
tgtctaaagagtgacataagaaggcggatatgtcctctagagctagaggcaagttcgggtcagcttcggaaaaccatgagataccttatttctgttataggagatttattggcttggaggaaaaataactacatcagaagataaagattttctttttccaaaaaaaaaagatatttatgttagtatatcatgctatatattatatatattgttttatgtagatgctatatattatatataggatatatattattatatattgtttatatatttatactagcttatcatgctatatataaatattatatctttatagtagtrtatcatgcaatatattaactactttcttacttttacataacttaaatatctgattactattccatgagaaaatatcaacaaaatagatttctctcctttatcttctcagcaagaataaactataagagagtactactatgtctatttaaatatcttaaaccacatattcgctttcaaaattttggaacacacaagtataatataaaggatataaatcagacagtggaatggagtaaaatattagtatcagttattttctcattttctcatacagagacctttggagaaacaaaca

SEQ ID NO: 106873 - DNA, 616 bp, Homo sapiens
tgtctaaagagtgacataagaaggcggatatgtcctctagagctagaggcaagttcgggtcagcttcggaaaaccatgagataccttatttctgttataggagatttattggcttggaggaaaaataactacatcagaagataaagattttctttttccaaaaaaaaaagatatttatgttagtatatcatgctatatattatatatattgttttatgtagatgctatatattatatataggatatatattattatatattgtttatatatttatactagcttatcatgctatatataaatattatatctttatagtagtgtatcatgcaatatattaactactttcttacttttacataacttaaatatctgattactattccatgagaaaatatcamcaaaatagatttctctcctttatcttctcagcaagaataaactataagagagtactactatgtctatttaaatatcttaaaccacatattcgctttcaaaattttggaacacacaagtataatataaaggatataaatcagacagtggaatggagtaaaatattagtatcagttattttctcattttctcatacagagacctttggagaaacaaaca

SEQ ID NO: 106874 - DNA, 336 bp, Homo sapiens
gaattcctaaagtagtatgacatttgatcattaactgtgaaaaaagatatcattttcaaagagttatgtgacagtttatcttcagaaaagcagggacagtgagactctgttatcctggatcccttttttttctcaacagatgagtataatcctacatgtcttgtgactatctccaatcccacttttgacatcagttaagcttacataggatgcatctaattacagactttcccttctctccaaattccagctttataaacattgggaatacaaatttcacatatccctgaactgacatttygctgatcactttttcattcacttatttgatgagta

SEQ ID NO: 106875 - DNA, 524 bp, Homo sapiens
ctttcctttggtatctgaagcatctgaaacctaatagaaaatcttggcttctagaaaaaaggtaaactaaaagtttaggatatctccgtgtatttttagctgtttgtcagtaaattatatagatgaatataaggcattccaaagcattggtgaaaagaattatatggatagttgtggggttttaaaattgaagaaaatctatctgctargaggagaggttgttggagactatttttttctactgaacccacaaatcactttgaggttcctcttacatttcatggtgcatgtatcttgtatcctccagaatgtaaactgaaaagcaatgtgtagacaagccaatattagtagcgtgtctgattgcctgttgctgtcaatcttgtggaggaagggggcagcagagaaatcactgctaatgacttcagagtttgtatgtcccgcactcacttattactggaaaaaataaaatgtaatgaacctgatatggacaaggaatgagaggaataaaatatgtcttttagact

SEQ ID NO: 106876 - DNA, 570 bp, Homo sapiens
ataggaaaccaccagcctctcacctgccctttatcatgctcaaagatgactatatcccctcatgccctaagctacgttaccaaagcccctcttttactatttcaaggggtgttaaggagtcatctaacctagatatacgcaataaggtgatgcattttctgtagataaatacaaataacaattaaactaaaaattaatctgccttatattattgttctgagccagcaatgctaaacaatactggtaataaactattatttcctgctaggacagacstctcccaatccctaccccccaccacataccactattgaagagtgcatagaactttctcagaaaaaaaatacatgattccatcaagggagggattgcatctaatttgttcaaagacagctgtttgcttcccaggatgttgcacaatagctcccacatagtaggtgtccaaaaatatttattaaattaaatgtttaccttacatgtgagcacattgtaaatacagggaacataatatacaaaagaattaaggtgaaatggcataatatgttcagagaactatacaaatttataatt

SEQ ID NO: 106877 - DNA, 567 bp, Homo sapiens
ttatcagaatacacatataatcaatatttgcaaatttgaaaaatacataagtcagttgagggaaagacagagattttttgtggaagttcagattctccataactccaggctgtagatgctcaactcattttctctagttcctcaattgttttctctctgtgtcctaagacgtatatttgtcaccttgggtcattctaaaatgttccacttgcttctataactttccastgacacgagaagagaaaagctctttcttctgagtaacatcagccttagtttcgtctacttgttacagtgtttcatgatattccctactttaacaatttgtccttgagtggtcaataactcagcacccagttcttacagggactatttttctcataaaatacctgagacccccttttctacatcaattgccagtcctggcacctgtaagcacaggctaaaatcttctgtgacctggtggggctttgcttgcttttattatttccttaggtagcagagactagcaggttgtattgcaaactttttaccttttgttcttgggcacacagttagtctgcttct

SEQ ID NO: 106878 - DNA, 567 bp, Homo sapiens
ttatcagaatacacatataatcaatatttgcaaatttgaaaaatacataagtcagttgagggaaagacagagattttttgtggaagttcagattctccataactccaggctgtagatgctcaactcattttctctagttcctcaattgttttctctctgtgtcctaagacgtatatttgtcaccttgggtcattctaaaatgttccacttgcttctataactttccagtgacacgagaagagaaaagctctttcttctgagtaacatcagccttagtttcgtctacttgttacagtgtttcatgatattccctactttaacaatttgtccttgagtggtcaataactcagcacccagttcttacagggactatttttctcataaaatacctgagacccccttttctacatcaattgccagtcctggcacctgtaagcacaggctaaaatcttctgtgacctggtggggctttgcttgyttttattatttccttaggtagcagagactagcaggttgtattgcaaactttttaccttttgttcttgggcacacagttagtctgcttct

SEQ ID NO: 106879 - DNA, 546 bp, Homo sapiens
ttaaatttatcaaatcaggatcaccgaggctattctagattaaaacacatttatctgatttttgccttatgcattctcatttccttctccccagactgatcaaaagctcagagggacttacttttgcttctcatataggagagaatgtctcggctggaatttacttttgatgacactcctgtttccctgttgtgcaagtgcaagatgattgctgttggaaactcagcggcctgcttctgctgactcactcctacctcagggtggctggcactgtgatcctttcaggcttagtcacatcctccttgcattcacggcttttgctggccaccctgtagtttctgcaaaaggctctcctggcctcattttattcttcagtaactggtcattttgaccaatcatcttttgtggtaaccccttgcaggaagactacctctcaactytcagctatttctaatgttttattagacacacaaaacatttttggatctcatacatctcaaggaaaaaattcaagagggctgggaggtaggtggagaaagtgtgaag

SEQ ID NO: 106880 - DNA, 584 bp, Homo sapiens
tgagctctttttctatcccttcctccttgccaccaaacccctaagaaccactaatgtttttttttactttcttgatattttagccttttccagaatgtcttatgattagaatcagaaagcatatagatttttaaccaccttttacttaataatatgcatgtaagtctcctccatatcaatattattgctgaataatattccatggtacagatgtaccacagtttgttcattcctttacctattgaagaacatcttgattgcttctaaattttagcaattatcaataaaaccttccatgaatatttgtgtgcaactttctatgtggacatgagttttcaactgcctgccttttacaattaagctcaagtgccacttcctccaggaagcattgcctgattccctggggtctgcaacattgatctccctcctgtttccagtactccaatgcacctgttccaccatagcacttaggggactgtactacactaactgttccctgtgtgtcaccccagtgagactgtgggctstggaatgagagtccatgcatcttggcttccacaatacctatattaagtggtcaaaca

SEQ ID NO: 106881 - DNA, 437 bp, Homo sapiens
tcttggcttatatttttaaaatgatgaacacagggagtagaagcagggagaatgattaagaattttacawtaatacagatgagagacaatggtggcttggaccaaaggggtggcatgaagatggtgagaagcagtcagattctggatatattttggaggtatatgtaacattctgtaagattgaatctagtgtgtgaaataggagtaagaatgactccaatatgtttagccagtggaaccagagggatggagttgccatcataagaggaatgttctctggttttggaggactgagatgcggtctttggttttggaagttttaggtatgaggaatctattaggtaaacaagtgcagatattgagtgagcaggcaaatatctgagtatggagttgagggagagaatcagctggagatacaaatatgggggtcatctgga

SEQ ID NO: 106882 - DNA, 560 bp, Homo sapiens
gtaagaatcaatgatgcctaatgggcatttgccaccaccagctggcagtttaggacaattcaagttgtcttctcaagtcggctccagtatttagtagagcttgcccttcataataacataagtgtctctctaatgtttgcattaggacccatctccagctttatcaagtaagtgagcctgtggatcargataagcatttttttagaaggcatcttcctgagccagctgatcatgtaacactgtggctcagaaacacgtacatgtgaaataaaccttgacgtgtttctagcaaataattcagtttaaacttaggacatggaaagtttctggttcaaaagaaaatggagtaaactcatttcaccttatttctcctgcattaattatgaatataaagtctggacagaacacataagccaagcattaggagactttgaagaaagagaagtagggagagaggtaggactgtctagcagcctcaagacttacaggatgactcagtgataagttccccatttttggtttgtttcctttattttgttttgtttgcctcctatatatgc

SEQ ID NO: 106883 - DNA, 535 bp, Homo sapiens
tgcaacactgaacctaaagaaaatgttgagagtagtgtccaaatattcaatttgctatttggaacagggattatgaagtttatgacttcaaaaaatagaactagatctatytatccagcagttatatattgagcacctactaagttcacatgctgttttaggcccccaagacaaatatactagctaactagacagtgaaaggaggtttcagaaaggtgacttccaagtcaataaaaaagacttccttaaaaattagaagctatctgaggccaggagtggtggctgtcacctgtaatcccagcactttgtggaggcaaagtgggaagatcgcttgagcccaggagttacagtttgtactgagctaatatcacacacggcactccagcctggatgacagagcgagaccctgtctgtgaaggaaaaaaacaagctatctgaaggtagactggtctatctcatgaggcgatgaattctcagccattggggttgtacaaaaacagtctagcacatagaataaactggcctggggcatttt

SEQ ID NO: 106884 - DNA, 535 bp, Homo sapiens
tgcaacactgaacctaaagaaaatgttgagagtagtgtccaaatattcaatttgctatttggaacagggattatgaagtttatgacttcaaaaaatagaactagatctatttatccagcagttatatattgagcacctactaagttcacatgctgttttaggcccccaagacaaatatactagctaactagacagtgaaaggaggtttcagaaaggtgacttccaagtcaataaaaaagacttccttaaaaattagaagctatctgaggccaggagtggtggctgtcacctgtaatcccagcactttgtggaggcaaagtgggaagatcgcttgagsccaggagttacagtttgtactgagctaatatcacacacggcactccagcctggatgacagagcgagaccctgtctgtgaaggaaaaaaacaagctatctgaaggtagactggtctatctcatgaggcgatgaattctcagccattggggttgtacaaaaacagtctagcacatagaataaactggcctggggcatttt

SEQ ID NO: 106885 - DNA, 592 bp, Homo sapiens
gtataactggagagtaaaatgaagaacatggttgtcaagacacaggtgtggaggcagttagacctgcatagaggctagggcaaatgtatgtgaaaaacatagatctacaaggccaggatgtgggtagtaacaacatgtaaaagcatgaaccattccaggaatgggagggaagtggactctagcaattgaatagaagtgagaacttaggagaggaaaagacaactagaaagctttcaaatctgggaagtgcagaactcaaaataaacgatgatggtcaggatgaggactgttttttttcatttgtttgtttgttttttgaatctgttaagtattgatgctwgaaagccatccaagtaagtgagcaatgggccatggaaaagcagatctggacttaggagaaggacagggcaagagaatcttaagacatctaagcacaagtgatacttgaaggaagccatgatagtgttcaaatagagaccataagattgaaggaacagactttgtggcaataagatacaaaattctaaataacaactaaggccatgcctgacaaagtttaaggcacacacccctacacatagagagtaaacta

SEQ ID NO: 106886 - DNA, 538 bp, Homo sapiens
taaacttttatacaagtaaattcaccaacctaacactcttcattagatcacaagaactaaaattgttctttaacgttaggaagtgtgtttttgccttgagatagatgaactaggcattctttctatgaatagtcagtggctgatcactgaatacaattttctgctcagcactctagcagactggcataattagagagagaaaaaggcaacacaaaaacccaagatcataaagttagtgaataggagctaaccccatggtttagatgtatgtgttaccccaaggcagcagataaaaccttattatttatactaataaataatatatgacttgaaaatttaagaggaattatcaatcaaaattgtctttatatcagtcaactaggtttacaatgaaaatttagtttctrtgagtattctttctatttcttacattttagagaaaaccgccaaatcaattttctaattaaaggccataccatttcttccccttttcactattgttgccccaaccctctccaggggttctcatttaccaaag

SEQ ID NO: 106887 - DNA, 589 bp, Homo sapiens
agacttcaaaaactgaattttactgtcttgaatcacttgaaggatatmcaaatagcaccactgacagggccatgtaacccaaagctaaagcttttctgctaatagccgagccatcatggaagtgggtactcaagccctggaaaagccttcagatgactgtaaattcaggccttaccttgactgcagcctcataagggaccctgagccacaactattaattaatactcttctgaatccttaactttcagaaatcataaaataataaatatttgttattttaaaaagagaaaatgaaaagaagagaacaaaactctgacatttcaatcattctgttcacagagaaacaaaatgaaataagaattctctgtactgctctccagtgattaatactggatgctaaaattgagaaaaattattttgtcataggttattgcgttgtcaattcaataagctgtacacattctaaaataataagaaagttgtttttaaggagtaaagcattttattcattttatctagaaacaattaaaattttgaaatcattgaattttagtaatattagtgctgtgtttgttctcccaggctcaga

SEQ ID NO: 106888 - DNA, 564 bp, Homo sapiens
tgttgagcaaagagagaatctagcaatrcttgcattacaggagttgcgacaggtgtagtggttgtgctgactattgccagagagaaattatcactcactctcccatgtccctctagtgaactgaagacatttaactcaaggggaggtacggctgataccactgattatgttgtcaccatgaggattcataagtttttctgaagtcttttccagaattttgtcaggagtaaaccattatatttctataaaacattttaaacgttttaagtattagacctaaatgcatttttttccagttttaagtctaagccctaaagctatgtaatgagaatttttattttgccttttgctagatattttttccttattgcatatctttctattaaagaataaatcttgttaaaagactgacataaaagcctgtgggttttattgtagaagcaaatttattttctggttcatttaatgataatcaaattataggaatagttaaaaagtgaaagtcaagtcattcaatctagcacaacccaggcagccacaatcatgacctgaggatacaaatta

SEQ ID NO: 106889 - DNA, 528 bp, Homo sapiens
ttgcttcttatttcactgagaaaattggcacgagcaaaaaagaacatcctttgaccaccaagtctacaactcattgaaactgtgtttatgtacttattgccttacatatgctgtacataaataaattgtctctgatcgtgctgtacataatgaattgtctctgatcccatcaaaggctagcccctatacttgtgtaccaaattcctttcttcctcagacttaargacactgatttccaacaatcccttctatcttctgtattcatcagtttccccctttatgtttaccatcagtgtactagcaaaatacaaggcactactatctggatttctcaataagaaaaacaacaacaacaacaaaacctcttgacttcatgtccacctcagttttctctacccattttatagcaaaattttgtacttgctagctctacttcatcatacccataaattttgtctgtagcattaattctgcaaccacagttaatatgacatcaaagaaggttttctcagttcatgtttgaattct

SEQ ID NO: 106890 - DNA, 559 bp, Homo sapiens
tcttatgtattgtcaagataagcaacaatctcaagtctgtggagatgtaataattatcaaggtaatattaaatatataagtaattatarctgcatgtactcattcatattatctagctaaattttaattacttgtttctaatttggaaagatatacttttgtctcaaagaccttggcaaaagatggctacaccaagacgcagtagttggtgtggaagatatcttctgtgattttttttttccccttaaaagagtaacagtttcagaatattctatgcttgtatacacaaactgggacatcacattgtgccccataaatatatgtaattactatttgtcaattttaaaaggagaagaaaagatttaaaaatcagatgtatttttagaagcagttactataatgtgtttgaatgtttaactgtattctttgaaattcccatagaccagggtgctacttactcttgtaagagtaacgtgttacagggaacttaccagagagaagatttatgccagggttgagccatcggagtgatggttcttacaccacaactttgtttctt

SEQ ID NO: 106891 - DNA, 540 bp, Homo sapiens
aaactgtgtgatgtattaagttctatattggcacatcctttacactaccttatgtgccactaatgaaagaacatgcttttttttttcaaatgccaaaaaaatcccacaaaggaaataactgaaaatcacatactcacaccaccatcactatccccgccctccaaaaaaagataacggcttttcatttataaccactgggcatcttaatccaaaaagaatccttatcatgtacagatggatgtcatttgaacaaagcttattacaaatcaataccacagtgcatctttcctagttgtcccaaatttcaaagggctcgattaccctgctgtgtatttcttcttccagttcaaagcttacaagaagctgacaagagaaactggcccatatagttcaactgwctttagtgagaaacagcatgttctctgggtaaatataaaaatgagactcagacctcccaaggcccaggatttccatgctagttgacctgtcagaaaatacataccaaaataaataggcaaatctggatttaaaatatatata

SEQ ID NO: 106892 - DNA, 592 bp, Homo sapiens
ttttttcttcattttgaaggttatcatgattgttgattgatatggcaataatacctttaggggcttttgttatataaaatgttgactcctccactaaatgaccccagacttctaaatgttttgagttattatattcactattatgtaaaagagtcagtaaaactaccctgctaatggtgtccagtcactggtgctatcggaatctctgcttcagatagtggcttccttctttccaatttgctgcctctgtttgtctcttggggatacagatgaccaagcttattagggttatctgtaaaaacatagatagactctaagtaagagcctgataactcttcctataaataaaatgtacttggtctttattttatctatttaagttaattaacaggtcttttcttgcttctaaatagttgatwtatcctgataattgactgcctcactctggggatttcaaatggaaagagaattattataagaaattagaaacctacaccatgatgggaatagctagggagtacacatcaggaaaatctccttgggagagatcaggaagtataaggatcatagagaagctgccaacaataatctc

SEQ ID NO: 106893 - DNA, 592 bp, Homo sapiens
ttttttcttcattttgaaggttatcatgattgttgattgatatggcaataatacctttaggggcttttgttatataaaatgttgactcctccactaaatgaccccagacttctaaatgttttgagttattatattcactattatgtaaaagagtcagtaaaactaccctgctaatggtgtccagtcactggtgctatcggaatctctgcttcagatagtggcttccttctttccaatttgctgcctctgtttgtctcttggggatacagatgaccaagcttattagggttatctgtaaaaacatagatagactctaagtaagagcctgataactcttcctataaataaaatgtacttggtctttattttatctatttaagttaattaacaggtcttttcttgcttctaaatagttgatatatcctgataattgactgcmtcactctggggatttcaaatggaaagagaattattataagaaattagaaacctacaccatgatgggaatagctagggagtacacatcaggaaaatctccttgggagagatcaggaagtataaggatcatagagaagctgccaacaataatctc

SEQ ID NO: 106894 - DNA, 587 bp, Homo sapiens
ctgttaccagtggagggtgtccaggttcttggcgttttgaacaaataattggagaaaatgcacaaacaaagcaaggaaagaatgaagcagcaaaagcagagatttattgaaaatgaaagtacatcccacagggtgggagccggcgaggcggcagttgaagggccccggattcagaatcttctcaggtccaaataccccccagagatttcccattggctacttggtgttcaccccatgtaaatgaagtggtggcctgcaaccaatcaggartactttcaactttccatctgctgtgcagaaaaggtgggggtttgcaaaggggtagcctccggtccttttgttacttaggaatggaaagttaggattttcctttcaatttagttctaggaagtcaatgtgaaacggcttcaggttccctgactccagaccctattctctggcctcaattctagtggttgttgtttttaatcgttttctcaggtgatccatgagaggttttacatcagtgaggaaacaaataacctatttattttcattattctgattttcttttccattaagtagctggagatactaaagagaggaaa

SEQ ID NO: 106895 - DNA, 553 bp, Homo sapiens
ttcacgggttttcttttatactgagtacaaccctagatcccccacatatagatttccaagaattgtttgttttgtaacccacaggagagaaaggctcttgtactcacatgtaaacaaacttcagaagattgataatacatgtttgagaactgatgaagtatatattttgaaagcaagaagagtcacagtatatgagggaaaatacacatctgaacatagattcagatatacatatgaaaaaacatacaggatttgcagtatttgtttagaagatattgaaaatatctaaaggattcaagaaatttgttcatggaagtataatatatattatagattcctttggttattaaaatctactttttaagaatacctctagtaatttcctatggttgctgtaacaaagtaccacagactgagtggtttaaaaccaaagaagttcattctcccactgttctggaggcttgatcaaaatcagcakgttgacagaaccaagcttcttctaaatgctctagggaaggagtcttccctgactctcatcttctgacagcttcag

SEQ ID NO: 106896 - DNA, 407 bp, Homo sapiens
gtgctgtttaatttggtttactagtattttgttaaggatattttatatatgtgtttgtcagggttattggtctgcaatttaatttttttgtagtgtccttgtatggctttggtacgaggctaattctggccttgtaaaatgagtttggacatattccatsctcttcaatttattggaagactttgagaaggattggtattaattcctctttaaattttgataaaattcatccatgaaatctggtcctaggtttgtctttattgggtgtttttttaattctatttcaatcccattattccttattcatctattcagatattctatttctttatggtttagtcttgttaggctgtatgtttttaggaatttattcatttcctctagattattcaacttgctggtgtata

SEQ ID NO: 106897 - DNA, 407 bp, Homo sapiens
gtgctgtttaatttggtttactagtattttgttaaggatattttatatatgtgtttgtcagggttattggtctgcaatttaatttttttgtagtgtccttgtatggctttggtacgaggctaattctggccttgtaaaatgagtttggacatattccatgctcttcaatttattggaagactttgagaaggattggtattaattcctctttaaattttgataaaattcatccatgaaatctggtcctaggtttgtctttattgggtgtttttttaattctatttcaatcccattattccttattcatctattcagatattctatttctttatggtttagtcttgktaggctgtatgtttttaggaatttattcatttcctctagattattcaacttgctggtgtata

SEQ ID NO: 106898 - DNA, 618 bp, Homo sapiens
gtgacccacgctgctaaaaagaactgcctgagactgggtaatttataaagtaaaggggtttagctaactcacagttccacattgctgggtggtgagtggtgctcaggaagcttacaatcatggtggaaggggaagcaaacatgttcttcttcacatggtggcaggagagagaagtgcagaacaaagggggaaagccccttataaaactatcagatactgtgagaactcactatcatgagaactgcatggaggaaccacctccatgatctaattacctcccatgaggtccctcccccaatacagggggattacaatttggattacaattcaagatgggattttagttggtgacacagccaaaccatatcaagatagtaatcacgtttttttttaaatcattytgtttgaatatattatcactatttatctattataaaagccttctttatttagataaatcatcctgtatatctgagatctgtggcccatagaaataacaaggttaaagtgttaacaagaaatcaatgaagtcatatatgtttgaggtttaaacaaatcatgaaatgaagatcatgttattcattcatgagcattatttattgttatttcactgtttac

SEQ ID NO: 106899 - DNA, 599 bp, Homo sapiens
atcatcatttttctataatatttactgaatatttcaaaacagaaaaaggcaagaaaaataaaaacacacaatgaaatttgaaagaaaaaagtaaaagtgtcaatattcccaaaccgcaaagataaaaaaagtgtttagattttagtaaggtggcttgatataatagtatcatacaaagtaactgcatttctcaatgggttgacaggtgcagcaaaccaccatgacacatgtatacctatgtaacaaacctgcacattcagcacatgtatcccagaacttaaagcaaaaaaaaaaaagttagaaaataaaaattttgaagtactatttatctatggcatcaaaaatattaaatactgagcctaaatattatgaaaaatatgcaagaaccgtatactgaaaatttatrcaccatgattaagaaaaattaatgtatatctaaataaataaaaaataggtaactttcttggattggaacatctaagtttaaagatgccagttctccccaaattcatctataaattcaatctaaaaacaagtcagcaagattttgttttctgttcttagcaattgacactttgtaaatatgcaaaggagcaaga

SEQ ID NO: 106900 - DNA, 629 bp, Homo sapiens
tctctaaatttgcaggacaattatgagatgggattgtagaaaagtacaagagagcaatctgtgaactttttttaggttttctgtgtaatgcctcaagttctgtaattttcaacaattttcctttttttgtagttataaatggtataatacattgctctttaacattttctttattctcactctagttcctttaattagatatttaaattttctacatttattttatctaatattctctatctcttggtcctttattctattgttagaaaagacttttgtttttagtttaaaaagtcaactatattttaaatttttaagtgttaatttytgctttcttcctatagctttcaaagattgtttgatgaatcttcttcattttcttataatcagcataacatgagtaatatatgtgaagtcttttcctagttcctggtttgtgtctgatcctaatctgtttgttatgttctctctattgtatgttggagacagtcctaaatctctgatgatccttggatacccaattcatatttaatatgaggttcacaaaagctggttggaaattgttagtttccataactgttgagttttatgatagacaactgatttttttatgagaaatcctcaaatgc

SEQ ID NO: 106901 - DNA, 535 bp, Homo sapiens
cattatgttgtcataggtatgaatttgttcagcttcactagattcttgcartaatttttcaaggtagacataaaaatttgcctcccaaccagcagtatggaagagttccactttctcgtccaaatatactataatatttaatttgtatcttataaaaattattttattttagggagccaaacaagacccatagattgttattgcttagtgttttgttttattatttactgcttctttaaatcctgttttaaaatataggattcctttgaactcttttctctgttattcctcatacagtgcttttgtggttatttctgtgttgaaaacaaagcaaaacaaaacaaaataaaaaaaagaaactgcatcatttgttctgtaaagtttttggtaatctagttttgctaattgcatctcattatatcatttaacatatatacctgtttttcctgtttaattgttacttacagctttttgatatgagtaaatacatgtgtgcatgtgtgtgatgtttcgatatttcataggcagatggtaa

SEQ ID NO: 106902 - DNA, 535 bp, Homo sapiens
cattatgttgtcataggtatgaatttgttcagcttcactagattcttgcagtaatttttcaaggtagacataaaaatttgcctcccaaccagcagtatggaagagttccactttctcgtccaaatatactataatatttaatttgtatcttataaaaattattttattttagggagccaaacaagacccatagattgttattgcttagtgttttgttttattatttactgcttctttaaatcctgttttaaaatataggattcctttgaactcttttctctgttattcctcatacagtgcttttgtggttatttctgtgttgaaaacaaagcaaaacaaaacaaaataaaaaaaagaaactgcatcatttgttctgtaaagtttttggtaatctagttttgctaattgcatctcattatatcatttaacatatatacctgtttytcctgtttaattgttacttacagctttttgatatgagtaaatacatgtgtgcatgtgtgtgatgtttcgatatttcataggcagatggtaa

SEQ ID NO: 106903 - DNA, 604 bp, Homo sapiens
gatggatcatctggtatcacccacattgataaactagctcatctgttcttgccgcccccacctgggaactgactcagcataagaagacagcttcaaytccctatgacttcatctctgacccaattgatttgagtaataataaaactctgctgtcccgcaaaataaataaataaataaataaattcacaaaggaaattagaaaatatttaacagaatgacattattatttatcgttaattgtattgatacctatgatactatatatcaataatccttatttaggtacagaaatcacactagatagcattgcaaaaatagacacaatgtaacagaatacataatccacaaaaagcccaggtatatattgatacctgaattatgacaaaagggtcattgcaaaatgataaggaaaggaccatgttctcaataactggtagtagatagattggaaattcatatgaaaactttcccctaccttatgcatgaaaatacacgtacagaataatatttatagaagcagtctctgcactggtcttaaagccaaactgctgcaaatgcatatcaacaatagaatggataaacatacaatagatatacaatgaat

SEQ ID NO: 106904 - DNA, 599 bp, Homo sapiens
gacacctcaccctcttgacaccaacaaacctgcctctcacggtccctgactgttctctctgttctgactgcaacccatgtgtggcacaatgtcctatttccccatactgtcagtatatggagctgacaacctgctctcaatatcatctgtcctgtgttacatgtcgtgtgtttggcctcccactaaccctagggtgggaattcacatgaaaattaatatttctcagttaaaatgtctttagaaacatatcaactttatgaaaaggtttaccarcttactaaatttgatacataattgttgtgatacaaatgtatattctggtcaaagctattatgcatagcttcatgctttcgttgacatattttggattgacatattttgtattaggtatatttatgacaggacctgtgggtaaccatatggagtatggttggttactccataaccagtggagtaaatacaaggcaataaaaacaaatggtgtcacaaacaaggtcatgcaaccatgaccaagaacatctcatcagctttaaataactgctccttgggtaactatctagttctatgatatggcaaaggctaaggcagaactgccaatt

SEQ ID NO: 106905 - DNA, 599 bp, Homo sapiens
gacacctcaccctcttgacaccaacaaacctgcctctcacggtccctgactgttctctctgttctgactgcaacccatgtgtggcacaatgtcctatttccccatactgtcagtatatggagctgacaacctgctctcaatatcatctgtcctgtgttacatgtcgtgtgtttggcctcccactaaccctagggtgggaattcacatgaaaattaatatttctcagttaaaatgtctttagaaacatatcaactttatgaaaaggtttaccagcttactaaatttgatacataattgttgtgatacaaatgtatattctggtcaaagctattatgcatagcttcatgctttcgtygacatattttggattgacatattttgtattaggtatatttatgacaggacctgtgggtaaccatatggagtatggttggttactccataaccagtggagtaaatacaaggcaataaaaacaaatggtgtcacaaacaaggtcatgcaaccatgaccaagaacatctcatcagctttaaataactgctccttgggtaactatctagttctatgatatggcaaaggctaaggcagaactgccaatt

SEQ ID NO: 106906 - DNA, 660 bp, Homo sapiens
caaaggatgtacaaggcctttacactgaaaactatagaatatgggtgaaagaaattaaaggaggctttaaaatattagttaattagatacaatgcaaagtcttctaatccataattcatagagctcataaaccaaatctagcctgtagtctgcttttgtaaaaaatttgattagaacataaccctctcatttacttacattttgtgtatggccactcatacaacaatcacagagtagagcttgtgaacagatgcatggactgctaaccctaaaatattttctatctagctcattgcagaaaacgtttgctgaccccttatgtataarattataattataattaatttttgtcttttaaccttgtatcctgtgatcttgctaaagttactaattaattctagtagttgttttgtagattcccaggggaagtgttgactctactgagggaagaaaggtattagacaacgaagtagctactgcacttaggaaacacatttcagcagtttccgggacaagatgtgtaggacttgatcccaagtgggttaaacaaagggcagtagagcataaagtttcataatgcaatatatataaatatgaggacactctccaatgatgcgggagttaagtctttgataaagacctcaagagatggaactaata

SEQ ID NO: 106907 - DNA, 660 bp, Homo sapiens
caaaggatgtacaaggcctttacactgaaaactatagaatatgggtgaaagaaattaaaggaggctttaaaatattagttaattagatacaatgcaaagtcttctaatccataattcatagagctcataaaccaaatctagcctgtagtctgcttttgtaaaaaatttgattagaacataaccctctcatttacttacattttgtgtatggccactcatacaacaatcacagagtagagcttgtgaacagatgcatggactgctaaccctaaaatattttctatctagctcattgcagaaaacgtttgctgaccccttatgtataaaattataattataattaatttttgtcttttaaccttgtatcctgtgatcttgctaaagttactaattaattcyagtagttgttttgtagattcccaggggaagtgttgactctactgagggaagaaaggtattagacaacgaagtagctactgcacttaggaaacacatttcagcagtttccgggacaagatgtgtaggacttgatcccaagtgggttaaacaaagggcagtagagcataaagtttcataatgcaatatatataaatatgaggacactctccaatgatgcgggagttaagtctttgataaagacctcaagagatggaactaata

SEQ ID NO: 106908 - DNA, 581 bp, Homo sapiens
gcatttccattgtattaggtattataagtaatctagcaatgacctacagcatacaggagaatattcataggttatatataaatactatgctattttataaaagatttgagcatccatggattttggtatccacaggctttcctggaacaaattgccctggatatttaataactactgtacatagaaaagtatatttatcacaacattctttgtattaggtgatgaagagtaggccacatcgtaggtttctatcagtgggttgagaggcaaaatgtagcaggtgcatgacacagattactatgcaagagttagaagtaaacaatgagatacacgtggcaacccaaattaattgttaaatcgtgctgttgagtaagaaaaaaatagtattatacattcatacrtatatacagatggttcttgacttacaatgggcctgcatctgggtaaacccatggtaagttcaaaatatcctaacctttgacttgtgatactttcaacttgagttttatcatgaaataaccctcctgaaagttaaagaattactggatgagtattgttttcacaccattgtaaaactgaaa

SEQ ID NO: 106909 - DNA, 562 bp, Homo sapiens
gcattatttattatactcaccattctgtgtaatagatcagtaaagtttattcctcttgtctaactgatattttgtaccctttgatcagcatctccccttttcccatccacttctctctcccagcctctggtaaccaccattctacttctatgaattcaccttttttttagattgcacagatagctgagatcacatagtatttacctttttgtgcctgggttatttcatttagtataatgtcttccaggttcctgtcacaagtgacaggatttctttcttttatagggctgaatagtattccattgagtatatatgccacattttgttttcattcatatgatgatggacattaagattgcttccatatcttagctgttgtgaataatgctgcagtgaacgtggtggtacagatacctctttgacacactgacttcagttcctttagctatatgtccagaagtgggattgctggatcatatggtaattctatttttagttttctgtctccatgctgattttaataytggctgttttaatttacattcccaacgtcagtgcacaa

SEQ ID NO: 106910 - DNA, 533 bp, Homo sapiens
ctcacacaagtgaattcaaacaggaaagggatgtttcctttacaatttttcttttaatcatggagaaaaacctttctgaaaagttcttagtaagtccccctcaggaccttttggttakaagtgagtgatatgcccacctccacaccaatcactggtagaggaaatgggattaacgtgattgtcttcgcattcttgaatgctgggttagagacaaaacttccttaagtacattacttcctcaaatataaacaaagtaagagttgttagtaaggaacaaaagggaaatagcttttgggtaagccagcaatattttctgatgcacatattttctattgattctttaaaggtttttctgttgccttctgtgatggttaattctatgtgttaacttgactaagccagaggatgctccgatggctggccaaacattacttctgggtgagtctgagagtgtttccagaagagattagtgtttgaatcaataggctgagtaaagacaatcaccctcaccgatgtggaccgtggagaggcat

SEQ ID NO: 106911 - DNA, 566 bp, Homo sapiens
tctaaataagtagagtaaggcgacaaaccatgtaaaaatcaactaattaagagaagcagttgtatcctttatacataataaaccacaatgaaattccatgtactgaaattttatgtaaaaaagaaaaccatgaggaggtagaaaaaatataaagaatatttatataatcttaaagtgagaaaggctaacgtcatataacacaagaaaatatagaattgactacattgaaaaaagcctgaatttcaaaaaaaaaataaacccatgccgtaactagaactgaagacaaacaataaaaagtaactgggaaggaatgtgggagaaaggggagaaaaaaaaggaactgcaatgtagatggcagttaaatgattcctatcctcratatccagtgtttttacaaaacagcatagaaaaagataatagaagaggacctgaataagtaactcacaaaagaatacaaatatccaataaacacatgaaaaaacatagacacgcacgagtgttcatagatacattaaaacaaaaagataacattttgcctatcaattttagcaaagtttacaaacaca

SEQ ID NO: 106912 - DNA, 603 bp, Homo sapiens
gccaattcttaggtcaaacaaggtagaaaatgtatatctcaaaagcacacagctaagactttagacgtaaatattgtaccatcatttgctcaaaccaaggaaaaaatggtgtgagtaaaagttaagacaagatggccagtcaccttaaacaaaggtatgacttaytatataaatttaaaatagtgataagagttcctaatgtacacagacacctttacaaatgtaaatttcctttatagatataaattgattttaccaaaagggtttcaggatagccttcagtatagccagttgaatgccagaaaggtatactttagttccatagatcgtttttaaaaatttaactactgtttcttagctaaaattactgagttcagggtggagcccactaagacagtaggggaaagacagcgttcttttttattgtttgcagtttactcagaaattaaacagaagtatcttagtgtccatgtccatgcctgggcacagtatggatagatctgaaaaagaggcaagtcagctttacctaagggcctatattttataaacatttaatccaggctagctttcttttagccttcagggcagtatagtaactaagcc

SEQ ID NO: 106913 - DNA, 603 bp, Homo sapiens
gccaattcttaggtcaaacaaggtagaaaatgtatatctcaaaagcacacagctaagactttagacgtaaatattgtaccatcatttgctcaaaccaaggaaaaaatggtgtgagtaaaagttaagacaagatggccagtcaccttaaacaaaggtatgacttactatataaatttaaaatagtgataagagttcctaatgtacacagacacctttacaaatgtaaatttcctttatagatataaattgattttaccaaaagggtttcaggatagccttcagtatagccagttgaatgccagaaaggtatactttagttccatagatcgtttttaaaaatttaactactgtttcttagctaaaattactgagttcagggtggagcccactaagacagtaggggaaagacagcgttcttttttattgtttgcagtttactcagaarttaaacagaagtatcttagtgtccatgtccatgcctgggcacagtatggatagatctgaaaaagaggcaagtcagctttacctaagggcctatattttataaacatttaatccaggctagctttcttttagccttcagggcagtatagtaactaagcc

SEQ ID NO: 106914 - DNA, 631 bp, Homo sapiens
accccaattagtcataggttcagtctttttacatagtcccatatttcttggaggttttgtttgttccttttaattcttttttctctattcttgcctgcctgtcttttttcagaaagatagtcttcaagctctgatattctttcctctgcatggcctattctgctattgatacttgtgattgcattatgaaattctcatcttgtgtttttcagctccatcaggttagttatgatcctctctaaactggctattctagttatcmacatcgaaattgttttatcatgatttttcgcttctttgcattgggttagaacatgctcctttagctcactgaagtttgttattatccaccttcagaagcctacttctgtcaattcagccatctcagcctcagcccagttctgtgcccttgctggagaggtgttgcagtcatttggaggagaagaggcactatggctttttgagttttcagcatttttgcattgattctttctcatctttgtgggcttatccacctttggtctttgaggttgctgaccacagaatgggtttttggggggactttttgttgatgttgttgttgatttccatttgtttttctttaacaaacaggccactgactgttagcaac

SEQ ID NO: 106915 - DNA, 575 bp, Homo sapiens
ctgctagggaatgaatctttatgtccccctaacttcatatgttgaaactccactccccaatgtaatgatattaggatgtgggacctttggaagttgactggatcgtaagggtggaatcctcatgaatgggattagtamcctattaaaagaggctcccagagaccatcctcacctcctctacaatgagcagacacagtgaggagacagatctctgtgaatcaaggaacagaaccctcatcagacactgactgtgtcggtgccttgctctgggatttctcagccttgaaaactatgagaaatgagtatctgttactcataagcacctattctatggtattctgatatagcagcatgaacagaataagacatataccttctacgactatttgagggattggagataatgtcaattacaaacatattacagttgtctagaaatagctgactctctttaattggtagctttgcttgttattctaggacttggctttaccttctgattttcagataaacatagatttattcacgcactcggcaaacatgtaatcatactatttgcttaagtgttagaaata

SEQ ID NO: 106916 - DNA, 588 bp, Homo sapiens
gggggtataagcactataagaggtatgtgccaccactgtgaggggtcctgggatctcscctgcggtcccattggctgctcatgttctaccttctgatggatcacagggtgatccagcagtggaggaacctcctcctcagcatcagactgaatcggagtgtcccgccaggaggatgggctcaaggccgggctgacagctgttgctaaatcctgttcctggctatttatctgggcctctaagtgccctgcttgcacctggaggtcccccacccccaggtcctgctccaagctgtgcacttgggcccccaggtgctcagcttgtcctgggaggtcccttacctgtggaactgagcatgtacttcctgcagtgctgtcagaaacgcccatccgacgctgccagcaaaggtgcattccttcttggtgctgtgtgctcgcacacttgcaggagacctctccactgcctcccgcgtttccactggggctcatccaagcagcaccgctgcccctgggtacagcccgtgctgcagccacatagctgacccaggagccctcaggggccaaagacctactcacttcatcctgccaacgt

SEQ ID NO: 106917 - DNA, 588 bp, Homo sapiens
gggggtataagcactataagaggtatgtgccaccactgtgaggggtcctgggatctcgcctgcggtcccattggctgctcatgttctaccttctgatggatcacagggtgatccagcagtggaggaacctcctcctcagcatcagactgaatcggagtgtcccgccaggaggatgggctcaaggccgggctgacagctgttgctaaatcctgttcctggctatttatctgggcctctaagtgccctgcttgcacctggaggtcccccacccccaggtcctgctccaagctgtgcacttgggcccccaggtgctcagcttgtcctgggaggtcccttacctgtggaactgagcatgtacttcctgcagtgctgtcagaaacgcccatccgacgctgccagcaaaggtgcattccttcttggtgctgtgtgctcgcacacttgcaggagacctctccactgcctcccgcgtttccactggggctcatccaagcagcaccgctgcccctgggtacagcccgtgctgcagccacatagctgacccrggagccctcaggggccaaagacctactcacttcatcctgccaacgt

SEQ ID NO: 106918 - DNA, 579 bp, Homo sapiens
tgttctttgcattatttcccattcatagcaacctgacttaaagtggctgaaagtgaggtgtgcttaagcagaacttctttaaaatttacatgaatttgatttcaagtgtcttcaaatcagaagtaatgatcccagtgcaagacaaagcatttaacttttaagatacttaatggccactttgacaatacrggaagcattccacatgcttggacacaatttccagctctaacactccataaccacgcaagctttggtatgctgcacgctctccaaacagtatggctaccctgaggctctgaataaaaccttggacactttatatgttcctccttcacagagcaaaagaaacaaaaccaattagatttaaatttacatgtacacacacacacacaatccccaacttcttagaggagttaatgcagcccttaaatgatagatttatttcctttctgtggctcacacacactgctgaaaacttggctcagactgtgatgcatttgacaaggccagcatcacttggggcaatacagaaaaagggttgcttatattttattccctccaattcagctcttttctctc

SEQ ID NO: 106919 - DNA, 547 bp, Homo sapiens
caatgtgctggatctgcttccaactcattgtgtttcatgtctttctttacctcacttttcttttttcttttatcttaacacacatgtgtttgcacctctataggcagcaatactttaattgttgccccaggctctgttttctagacgacccatgctaagaaatgagtttttgacaagcaccatatactgcttctcagccttttgactaagaacaagtgtgataaagatgatatatttttattatgatagaaagaaatccaatgaacttataaaaaaayaaaaataacaacacgcaaaaaatatggagttgagtcattttatgtttcagatggctatttaataccattatcttttagaaagcaagtgataaagtttccaattatatccttgtataaacacaaagactgaataataaaacatacttgattcgattcttaccttttagataactatacccaagtaatacaaattaattacaaagtataaacttagcaggaggtctcacatatagagtccttgaacatattcattttaatgcttgtcattg

SEQ ID NO: 106920 - DNA, 547 bp, Homo sapiens
caatgtgctggatctgcttccaactcattgtgtttcatgtctttctttacctcacttttcttttttcttttatcttaacacacatgtgtttgcacctctataggcagcaatactttaattgttgccccaggctctgttttctagacgacccatgctaagaaatgagtttttgacaagcaccatatactgcttctcagccttttgactaagaacaagtgtgataaagatgatatatttttattatgatagaaagaaatccaatgaacttataaaaaaacaaaaataacaacacgcaaaaaatatggagttgagtcattttatgtttcagatggctatttaataccattatcttttagaaagcaagtgataaagtttccaattatatccttgtataaacacaaagactgaataataaaacatacttgattcgattcttrccttttagataactatacccaagtaatacaaattaattacaaagtataaacttagcaggaggtctcacatatagagtccttgaacatattcattttaatgcttgtcattg

SEQ ID NO: 106921 - DNA, 547 bp, Homo sapiens
caatgtgctggatctgcttccaactcattgtgtttcatgtctttctttacctcacttttcttttttcttttatcttaacacacatgtgtttgcacctctataggcagcaatactttaattgttgccccaggctctgttttctagacgacccatgctaagaaatgagtttttgacaagcaccatatactgcttctcagccttttgactaagaacaagtgtgataaagatgatatatttttattatgatagaaagaaatccaatgaacttataaaaaaacaaaaataacaacacgcaaaaaatatggagttgagtcattttatgtttcagatggctatttaataccattatcttttagaaagcaagtgataaagtttccaattatatccttgtataaacacaaagactgaataataaaacatacttgattcgattcttaccttttagataactatacccaagtaatayaaattaattacaaagtataaacttagcaggaggtctcacatatagagtccttgaacatattcattttaatgcttgtcattg

SEQ ID NO: 106922 - DNA, 641 bp, Homo sapiens
aatgataaaatgtatagtaaatacacaaacaagtaacatggtcatttatcatcattatcaagtattacatactgttcataattatatgtactatacttaaatatgactggcagtgcagtagatttgtttccaccagcatcatcataaacatacaagtgacatgtagaactatgatgtctgtgaagccacaaggccataagaawttttcagtgccattataatctttgcgaaaccaccatggtatatgtatatgtggtgactaaaacatcattatgtggtgcatgaccatataggaaaacaaagaattgttggggcataaaataaaacagtctcaaatatccagtttcttcaatcactaaacactctccaagtatgaaatggcctcagtgtaaacatcaaatcagggatttaattatgaaaccctctgccatgatcttagaaatattttaaagtttgcctagtatgccactctacaaaacaattgcatggccattatcccatagcattttagctaaagtaaagaaaaactaatgttgaaaaattattaatatggtttttggagtatgggatgaacacttataagatttataagaaactcacagaaactttaagagaatgtatgtatgaaagtgctgacagct

SEQ ID NO: 106923 - DNA, 641 bp, Homo sapiens
aatgataaaatgtatagtaaatacacaaacaagtaacatggtcatttatcatcattatcaagtattacatactgttcataattatatgtactatacttaaatatgactggcagtgcagtagatttgtttccaccagcatcatcataaacatacaagtgacatgtagaactatgatgtctgtgaagccacaaggccataagaaattttcagtgccattataatctttgcgaaaccaccatggtatatgtatatgtggtgactaaaacatcattatgtggtgcatgaccatataggaaaacaaagaattgttggggcataaaataaaacagtctcaaatatccagtttcttcaatcactaaacactctccaagtatgaaatggcctcagtgtaaacrtcaaatcagggatttaattatgaaaccctctgccatgatcttagaaatattttaaagtttgcctagtatgccactctacaaaacaattgcatggccattatcccatagcattttagctaaagtaaagaaaaactaatgttgaaaaattattaatatggtttttggagtatgggatgaacacttataagatttataagaaactcacagaaactttaagagaatgtatgtatgaaagtgctgacagct

SEQ ID NO: 106924 - DNA, 659 bp, Homo sapiens
gctactttttgagttctatatgggcagtaacaggagcacttaagaagtttttctggaattggttatatgtacattaatatatcagaatgaattgtttctaccaaggtaaaagtgataagtgagtgtcaagaagaggcaaaaccttggcaaattgggaagtgacagtggttcattatagttggagccgagtgtgtaagtgtaggagtgaggctgaaaaggtaagagtacccacatggcgcacatatatagtatatatagatactatatatatagtagatctactatatatatattctactatgtatatatacatactatatatatatatactatatatagtagatctattatatatatattctactatatatatacacacacacatagtaattatatatatataattaccattctactatatatataattacaaataaaagccctgcacaaaatacataaaacaataattaaaagacactgaaagaggaataaaaagatgagaaaatgagtatccctacaagaccaaacctttttggctaaatttgccttattccagaagaataccattcaaaatgctaaacccttctgtcttcccactgactgttatgaccrtgtagactatcaacaaagccttgccaaccatttccacccagcaatca

SEQ ID NO: 106925 - DNA, 636 bp, Homo sapiens
tgttgtggcttttttccagcatcttgcacagtatcgtatcaaatatatacttatagaataaatgaacttagaaataggaaggtagtaacccagccaaaaaatatccttttatctcagtaggtatatttctatagaagaaggtgaacgctaagagcaaagtctctggagacatgtgcatacggatttgatcttcatcttcctacactaggtatgctacatatgcttctttcagatttgggatttaggtgaaattaggacagtcttatttatctacaagattacaataagaattaaatgagacaatgcaaacgccctgcaatttgtaaatcttcaaaaatcaatttattgttatcataattatgattaatactaaaatttgtgatgtgacacattccatatgactgttagcatatatatatacacacacatatatatacacacatatatgtgtatatacacatgtgtgtgtgtgtgtgtgtrtatatatatatatatatatacttcctatgctgtagatgataatgcagaaaatagtctgatatgtactttgttgaagtttctcttaacagtgaaatcattcattgctggggaggaggaattagcttaactgtatcacattaaaagggagaacaaaaa

SEQ ID NO: 106926 - DNA, 562 bp, Homo sapiens
tggacaaaactggaaaaagcttacaattacaacagtcacgcaaatctacataaactaagaaaaaaaaaagatgcctggagtaaaataaatcaaaccaaaggcgttggcatttgttaagctccagtgcctggcatgtgctaagtgttatataagagcttgttcattaaataacaaattaaaatcaggctggttggcgagaaggtaaaacaacaaccccgcacgagtgcactgtgagacctaaaggccttttttgggtactgtgtgcttaggtctctaagggggtcagggcagctctttctggggtgttttaaatcctttgttcaggccaggagaagtctgatgactcactcaccttgctctgcaaaacaagaatttgttgagcccgacccctccaggtccctggcgargataggagctgctgaacgttgatgtcttccccaacctctctggccaaaacctgaaataaggcagggccttcaatgtggccaaaagagagggctccaccagaccctgatgctgctacgtatttagaagcatattcagaagcagtcttcacctacac

SEQ ID NO: 106927 - DNA, 619 bp, Homo sapiens
ttacaaacaaatagccctaactaatgcaactattgtacatagtggtgtgcttatctactgtataaatacttctacagtatatctgcctaatggcttctacaatacttattcgtacaagttaaaaaaattataagcaatctcctgccttttgacttgaccataatgtgccatctgtctttatttctaggaggctaaatccatgtagagaaacctggacttgttttcatctttctctccttcctaccatatgattttataatttttactgrggaagtcaattaagaaagcatctagttttgcctgaacataaaagattagtgaaaatcccacttgtctgccttttattttttacttgttttgagatggggtgtcactctgtcccccaggctggagtgcagcggtgcgatcacagctcactgcagccttgacctccccaggctcaggtgatcctcccacctcagtttgtatttttagtagagatggggtttcaccatgttgtccaggctggtctcgaactcctgagctcaaacgatccacctgcctcagcctctcaaagtgctagaattacaggcgtgagccaccacactgggctttgtctgccttttaaatgggaagaagt

SEQ ID NO: 106928 - DNA, 587 bp, Homo sapiens
aaagacaatgctagtcttatgggggcaaagtgtatcgtgtgtgtcaatgagaggtgatgtgaagcaaggattaaagggaatgagggaaaaccccataagaacactgaggaaggactattccaggaagggaatatggctgtggaaaagccttaggttaggagccagactttcagggggcagtagaagaagccagtgagcctagtgaagaaaagcaggaggaaaagacatctgagaggcaaccttcagggtagagaaggtcagaccaggcatggttgtgcaaagttgcccatgatattcagattttaatctcagtaaagtggggacactttgaaggactaatgtatcattatattatccacgtaaaggcttaaagcacttaacctttgctgataagaacatttacggaccatttcataaaaaaatccatcttgcagggattctgacaactttgggtttgttcaaatctgatgccataytcaacttgcaaatacgattgttgtgaatagaaaattagttgaatttactatggttcaaaccaacaaaggtggtgactaattttagtttcaaagttctctgagatagtctat

SEQ ID NO: 106929 - DNA, 616 bp, Homo sapiens
tttcatcgtctccagcccccagaatctgccaaacacatctgtcaatggcattattagttttcaataattcgcagttaaagtttcacacaattttgaatcttgcttccgttttctgtatgtagagttacatattcattgctttttgaatctccctccaaaatgtcttcatgaacgctattttttccattcttaacgacactatctyattgttacattaaatcactcctagatgaaaccacaccaacctggtccaacgtgagaaactcataatgggctgctcggccttcagttttttcctttccagtgaactctacacattacctaaaacactggtttcattgtattattaacaaaatcaaactatatgatgaattatttagtatgtgtgagtattaagtcatttgctaattgtttagttcacaaatacaaatgctaaatctccaacctttttaaaacaaagacctttattctatgtatgttccaaaaaattctttttcacaggagtatatagtaagcatattctgtatcaattaaactttatgaattctataattgcacacacatttctggaaaactgttgatctatttaacatctagcataatatagggcatcatg

SEQ ID NO: 106930 - DNA, 634 bp, Homo sapiens
atggttattggagtgggctggcatcgaatgaggagatgtcagtccaaagtatgaagttgaacttatgtaggatgaataagtcaagaaatctaatatatagcatgaaaactataggtaatagtgttatgttgtatactggaaatttactaagagagaagatgtaagatttttacacacacacacatgctgactatgggaggtgattaaatatattaaatatattgctttgcttgagtacacttatttgactatgcatatcaagctatcatattatattccttaaatacagactgcaagaaagagaaaaaaattgttttggtgaagaaaatatatttaatatccatgcagattttaattttatcaaaggcaaacttaactaaatatggctrcttctcccaatgctgtgtatctcttgaccgagtgaaaagtgatgccttctaagtgaagtgaaaatgcattttgtactgcagtctgaagtcactatatcctgcttccattaggacttgggaggattgctgattcttcaggagtatgctctgaatggggtagaactttccaaatgcatcagatagttaggaatgtctgtgttccttcttggaggagccctgaactacagggtgcataagtccacagg

SEQ ID NO: 106931 - DNA, 634 bp, Homo sapiens
atggttattggagtgggctggcatcgaatgaggagatgtcagtccaaagtatgaagttgaacttatgtaggatgaataagtcaagaaatctaatatatagcatgaaaactataggtaatagtgttatgttgtatactggaaatttactaagagagaagatgtaagatttttacacacacacacatgctgactatgggaggtgattaaatatattaaatatattgctttgcttgagtacacttatttgactatgcatatcaagctatcatattatattccttaaatacagactgcaagaaagagaaaaaaattgttttggtgaagaaaatatatttaatatccatgcagattttaattttatcaaaggcaaacttaactaaatatggctacttctcccaatgctgtgtatctcttgascgagtgaaaagtgatgccttctaagtgaagtgaaaatgcattttgtactgcagtctgaagtcactatatcctgcttccattaggacttgggaggattgctgattcttcaggagtatgctctgaatggggtagaactttccaaatgcatcagatagttaggaatgtctgtgttccttcttggaggagccctgaactacagggtgcataagtccacagg

SEQ ID NO: 106932 - DNA, 658 bp, Homo sapiens
tgccctgtctttctgcatgcaaaagccccgactgatgcaggcactgagagtagactggcaaccatgatgggcatagtggctgagtaatccagtccatcagatttaattgttaatgtgctggtataatttcaccagctactaccccctcactagattataagcttcttgaggcaagggttaattcacataatcagccagtttttttttatagagccattgagtgagttctaatatgccaggcagtgtgctggtaggagggatrcaatgatagataaggcggacaaggttcctggcttcatgttgcttacattgtagggagagggacaagaaaaaaaaccgaagtaaataggccattaaataagacagttgcaagttatgttatgtagtgttatgcaggaaataaatgggcagagacaagaagagcagaggggacctataaagagtggacagagaaggcttctcaaaggagttgacatttgcaatgccatttaaaggaatatgcattttattacgaaaaattctccactgtcacctgaatcaggaccaaactcaatggcttccaagatttttcacagcctggctctacccaacctgtggagcctcatccttcaccattcccctgtcacacatgctatgctctgaccacactgaactgctt

SEQ ID NO: 106933 - DNA, 641 bp, Homo sapiens
gggtcttctatctacattttgtattcttttatgagatgattagtcagtgtggccacgagacacaggagaggctcaggaaaacttgtttcattatactcacaggtcctagagacagggcatggcacaccgtgcaggtccacaagggaaagacrctagcgtggtcaggaggcagaagacaggaacaagggaagtgctttaggctagaaccctgattggggttttctcaggaaaggcaaggcagggtggggtgaacagtgcaggactggctagtttgaataatttcagtggctccaagctataggagtggtccctagttacctagaacctggccctggcatgattaaggcagagggctattgccttttagggtgttggggccagatagaggagttgtgactctggattggttagtttgcatgtcacaggcatactcctggctgggcccgttgctgtctctgagaattgaccagcctctccttatgccagcaggggcaatctctccccagctagaaaggctatatattatgatgtcaaagcatcataatatataggaaacacacccacacaatttttacttagcctgtctgatggttccctgaagactctacttgcaagacttttactttacttgacttggagct

SEQ ID NO: 106934 - DNA, 624 bp, Homo sapiens
gatatatttgacttggcttctcctagaaagagatgttgacattatctgcaagcgattgtgttcttttgcttttaagtctcatttactattttctcttcgttctttcttccttgtcataaggcttgactcctgaatcacattccccatgttcattgcttggtaaaaacaatagatctcatcaggattgtgtttcaacaggtaggtgttcctacttattttattttctctcataagtcaaatggaaagaaatagtttcttattgttaaaaatgcaacattttgtgataacaaagttgaaaggaattttagtaactgcaaatggcttccagttacctaaggatctctatagaattaaagtaacgattctaatacctctgtttgtgtgcgcacctgtgtgtgcacctacacatgtatattgtcatgttttgtttctagaaagtgttatgttaataaattaacatccccaatctggctcattttacctatgaataaataggtcagtttatggcatactggagtatagatccaygtctctgttctcctagcccaacatgtcttctgccacactacgttgtctctgatagctgtatcctttgcaagaaggtccaacctacatttatgtgat

SEQ ID NO: 106935 - DNA, 377 bp, Homo sapiens
aaaatggccttggtggtagtgggagtatttatagaatgaaaataggcaaacactacgaatcatggcttcatttactgcgtattgatttctggatctgtaacctgtacattgtgagtggcaaaaaaaawattttctccatgttcaaaaactaatatctgacccagcaaagaagtcacttgcattactgatgaactcatgaagttccaacaaatgtctctgttatttccgctccttctactcattaacaaaggaaatcaaccaacatttatgtcagagctatattcagccatcaattgaaaccataaattggttatgaatacaaaattttggaaaaataaaaatagcaaattgtgagaattaattgactatatagaatt

SEQ ID NO: 106936 - DNA, 479 bp, Homo sapiens
atcctgcaggagaagataaatccgctttcttcacctctcaccaaaccctattcacatctctcctaaaaataatgagttccmatcatgtgtcagattctgggctaagaactaaaagaagctaatacttattatgtatttactatgtgccaagctgttaaatgcagcacctatttatgaattctttttgagatggggtcccactctgtcgctcaggctagagtgcagtggcacattcataggtcattgcatcctcaaactcctggcctcaagtgatccccccgcctcagtcttctgagtaactgggattacagacaggagccactgcgcttggcctatgtctaatttaatccttacagttctatgagtgtggggttattttatgaccattcacagatgagaagactgaagtgcagagagattaagtgaatttacaaaattgataagtgtcagggatttaaatacagtcttcatggacttag

SEQ ID NO: 106937 - DNA, 644 bp, Homo sapiens
gatgacaaaatagtctgttcaacaaacccgtgacacgagtttaactatatagcaaacctgcataggtactccagagcttaatataaaagttaagaaaaagagaggtcaagaattggaagtgtttaactgaaatgaaataatataatattacagtcaataaacatattatattyacacgtttatacatacaattgaaaatataaataattattttaaaatttaacaaatacatatggaatgattttgatttgttacaaagtgcttgtatttaaaaatagtagtttgctgtctttatgagatactcataaaaatactcctttaacataaacataaaaaatatgaagatgaaaaatggaaaaaatataccatgcaacacaaactggtagaaaaccactttaatatactgtaataatataaaacagaagttgttattaaaaatgaagaagcatattcatagtgatatatttattatctataccattagtaattttaaaataatttgtatgtacctaataatacacatttaatataaagttgaaagaaataaatgagtaattaataaatttagggatttagtcacttctctttcacatctcatcacacaaacagatacatcactgactctatacagagatttaaactag

SEQ ID NO: 106938 - DNA, 613 bp, Homo sapiens
tgattatttaatgtaacatatatatgtattgaacatcaagttgtaccccataaatatgtacaattacaatgtgtcaatttaaaaaaaaawttaaagaatatgtagagggctaatgtcatgaggtctattgcactctcatgtttaggattttgttatatttatggctggcactgttcttgccccagaggagactacacctcagactaaaaaaaataaaaaacaacaaaaaatggggttttctcattcatttcctgcaaaattcagcactttcagttgaaaagcagtggtctgttacactatgccccaacctctgaccgctaatcaagtctgtccttgtggcaaaaaacactgttgattttcccccagctgtaaaaactgcaactgttactcactgtgctgggtgtggtgggtgggcagaaggcacgggagcagcactaggtaaacttactacaaatttgctgcactcttccttgaatctctagcagtttttccaagaataaatagttcacaaatgattattagcctttgatcaatttccagggcctcggaattgctttgttaatttgtcctcttcattcagtcacagcaatacatttgtatgtgttcagtgcgt

SEQ ID NO: 106939 - DNA, 595 bp, Homo sapiens
tatgcctcgagctttaaaggctatatagaaaactgttcaactccaaatacrtacatctgcatgcaaaggactgtgtaaagatgatcaaccatctcaataaaagccaggaacagagaagagattacaccagcggtaacactgccaactgagactaaaggaaacaaacaaaaacaggacaaaatgaccaaagactgtcagatttcttagactccacaggaccaaaccatagaacaatttcactgcaaacatgcatgattctccaagacaaaagaagagagatcctaaaggcaattcagatatccccaaggctgcctctcccaccacaagcccagagtggatgggctgggggaggggtgctgttttaatttctaaaggtaggaccaacacccaggggatcagtgaaggaagagaaggccagcagatcactgagagtgcaaccccaccctccacaggaaattgcctcatgggcagggccacagcagagagacacagcatgggcagtgccttccctgcctgtgggggtcatgctgccacttttaatgggtcctccacccaacggggtcagggaggtggtgctgccccagtgggccatgat

SEQ ID NO: 106940 - DNA, 595 bp, Homo sapiens
tatgcctcgagctttaaaggctatatagaaaactgttcaactccaaatacgtacatctgcatgcaaaggactgtgtaaagatgatcaaccatctcaataaaagccaggaacagagaagagattacaccagcggtaacactgccaacygagactaaaggaaacaaacaaaaacaggacaaaatgaccaaagactgtcagatttcttagactccacaggaccaaaccatagaacaatttcactgcaaacatgcatgattctccaagacaaaagaagagagatcctaaaggcaattcagatatccccaaggctgcctctcccaccacaagcccagagtggatgggctgggggaggggtgctgttttaatttctaaaggtaggaccaacacccaggggatcagtgaaggaagagaaggccagcagatcactgagagtgcaaccccaccctccacaggaaattgcctcatgggcagggccacagcagagagacacagcatgggcagtgccttccctgcctgtgggggtcatgctgccacttttaatgggtcctccacccaacggggtcagggaggtggtgctgccccagtgggccatgat

SEQ ID NO: 106941 - DNA, 595 bp, Homo sapiens
tatgcctcgagctttaaaggctatatagaaaactgttcaactccaaatacgtacatctgcatgcaaaggactgtgtaaagatgatcaaccatctcaataaaagccaggaacagagaagagattacaccagcggtaacactgccaactgagactaaaggaaacaaacaaaaacaggacaaaatgaccaaagactgtcagatttcttagactccacaggaccaaaccatagaacaatttcactgcaaacatgcatgattctccaagacaaaagaagagagatcctaaaggcaattcagatatccccaaggctgcctctcccaccacaagcccagagtggatgggctgggggaggggtgctgttttaatttctaaaggtaggaccaacacccaggggatcagtgaaggaagagaaggccagcagatcastgagagtgcaaccccaccctccacaggaaattgcctcatgggcagggccacagcagagagacacagcatgggcagtgccttccctgcctgtgggggtcatgctgccacttttaatgggtcctccacccaacggggtcagggaggtggtgctgccccagtgggccatgat

SEQ ID NO: 106942 - DNA, 553 bp, Homo sapiens
ttttgggttttcagcattttttcattgactcttttccatcttcatgtgttgtctagttttgatctttgaggctgttgatccttggatggggtttttgtggggatttttttgttgttaatgctgttatttttgctttctgtttgtttgcttttctttttttcttttttttttattatactttaagttctagggtacatgttcacaacgtgcaggtttgttacatatgtatacatgtgccatgttkgtgtgctgcacccattaactcgtcatttacattaggtatatctcctaatgctatccttcccccctccccccaccccacaataggccccggtgtgtgaaaccaaacaccgcatgttctcactcataggtgggaattgaacaatgtttgcttttctttcaattgtcaggtccctcttctgtagcgctgctggggtttgctgagggttcacttcaggcctttttcacctggttcactctcctgcctgaagatgtcactcaaggaggctggagaacagcaaagatggatgtctgcttttcctcctggggtctc

SEQ ID NO: 106943 - DNA, 609 bp, Homo sapiens
aagatgacacagatgttggaaatagctgacaaaacctttagagcagctgctttatattttttaaaaaagaatccccaaaaactaatcatagttttccttggaacaaatggaaaaataaaaagtctcagcacggaaacaagatacaaggaaaagccaaatgaaaattttagaatttacaattattataactgaaattaaaaactcactgggtgggttcartagcacaatggagatgacagagtaaagggtcatcaaacttgaagacagttcaatagaaattatctaatcagaacaacaaagagaaaaatagatttaaaaaaataaagagaacctcaggagatttgggacaataataaaaggtggcagaggagaggagagtgaagtgttaataaaggaatcaaaaaaaccaaataagtgaagaggcacaccacattaatggattggaagattcaaacaaaaaagatggtaatccacccccaaaatgatctatagatttaacacaattatgatcaaaatcccagtagtcatctttgtagatataaacaagctgactctaaaatatatttaaaaaggcaaatatttcagaataaatttaaaatttttttttaa

SEQ ID NO: 106944 - DNA, 598 bp, Homo sapiens
ctgaagaaaacccctaaagttaggaccctgtcttttcctctgggcacccagcaccatgtttgtcattcaatgggggcacaaaaagtgttcaacaaacgaacaaatgaaccacttactttgccaattgatgaggaaggatgattcatgagaactactcacattcagaaactgtgatatagttggtccaagggtaactgaagaggagcacacactttattctgtccctaggaatactcgtaggctctttgctagcttgtttgtatctggtgttcctgtgaatattcattgcttcactagtccattaatcaattcattgatgtttattgagttgccaggaaccatgctgagccatgtgaccacaagaaaaggcaggaatattttgtsacatagggagaaaatggcatttacttctctgggggagaggatgaagaagtaacttgttttctgggttattaaatgtcttctgccaataggaaggattgttctgggctgaattcctgttccttagggactattttcccccaagataagaatgaataattataataaaagttgccaggaactatattaaatgctttacataaattatccaattcaa

SEQ ID NO: 106945 - DNA, 577 bp, Homo sapiens
tttatttagcttaccatagccactatagcacagggacagttgtccatttagagtcatgtccagccatggcttggttatgggctgtaagtaaaagttagcattacyaaaatgcttgaggagttacatctaaagatatttaaacatatacaaagcttcggtgaacacctttcagcatgttgggaacacaaactgtgcaagttcaggaggtgatcataagacatgacctctgcctttatggaccttatagtctggtgggaaagagctatgtacccaatagtttcccaatgaaggggtatgtattaaatgctaggggcacatgcccatcacaagagggcacagaggaggaagagacaacttccattggcaagaaccaggacatgtttacaggagagatgggcacatgagctaagtattggaggacaaatgagaattagaaagacagagctggtgtagcattccagtttagtgtcccttttcaaaaatgcttagtatgagctgagcgcaatgatgcccaactgtagtcccagctacttgggaagctgaagagggaggatagcttgaacccaggagtttgatg

SEQ ID NO: 106946 - DNA, 577 bp, Homo sapiens
tttatttagcttaccatagccactatagcacagggacagttgtccatttagagtcatgtccagccatggcttggttatgggctgtaagtaaaagttagcattactaaaatgcttgaggagttacatctaaagatatttaaacatatacaaagcttcggtgaacacctttcagcatgttgggaacacaaactgtgcaagttcaggaggtgatcataagacatgacctctgcctttatggaccttatagtctrgtgggaaagagctatgtacccaatagtttcccaatgaaggggtatgtattaaatgctaggggcacatgcccatcacaagagggcacagaggaggaagagacaacttccattggcaagaaccaggacatgtttacaggagagatgggcacatgagctaagtattggaggacaaatgagaattagaaagacagagctggtgtagcattccagtttagtgtcccttttcaaaaatgcttagtatgagctgagcgcaatgatgcccaactgtagtcccagctacttgggaagctgaagagggaggatagcttgaacccaggagtttgatg

SEQ ID NO: 106947 - DNA, 622 bp, Homo sapiens
acaaaccacacatttcagtcaaccaatcaacattttttttatgtgcaaggcactattctaggagttgataatatcatagttaagtaagaaaatttatcccactaggaacttacattctgggaggaaagggaaacagccaaacaataactatataaacaagtatgattcagctaagttttgaggaaaataaaagaggaatgggatatggggaagaactactttaaccagaagggtcagaaaaaggctgtctcagcaagtggctttcaaatagagagctaaataataaagatgaagtagcaatgaacaaactaaaccaagcaaaaaaaatgctcaaatagcatttactatacataagcattcttccattcaagacaccattctctgcattgttaaacagttttacatagtagatttcttacctattcctttcaaaaccacaatgtccttcttccctcaaacagaatatgtaaacacacacagccttctcaacaagtaaacattcaatgagaaaaggagagtacagctcttcaactcttaccaatatatagcartatcgcttaaatcacttatacctgagaaaagtccaaagttcaaaattcagcaaatgaatataaagacaaca

SEQ ID NO: 106948 - DNA, 577 bp, Homo sapiens
  misc_feature (1)...(577): n = A,T,C or G
cataggcagataaagcttctcccctaacttgtgctaagcaagcactgaataggacagtgtgggtacttggagcagagaaatcatagacagttggtcatactcatattgaatagggattctccactactgaaatggacactttgttctgacaatgatcttctctttggccacaatcacagaagcaagctatgtgaaccagaaaaagcattctttatcaggtgaacagagaccacaagtacaaagaaccacncaacaaagcaagaagatgcaagcctgaataagaggcatayaactcaacatatagaagagcatttttcaaccttaaaatcacctgaaaaccttttttttaactttgatgtccagactaagccataaattaattaaatatctgggatggatccaaagcatcagtatttttaaatagttatcagtagattccattgtatagctgagattattattagaagaacagatatcctagaaaatacacagacatcccacattttattgcacttcacattattgtgcttctcacatactgcattgtccacaaatcgaatgtttgtggcaaccctgt

SEQ ID NO: 106949 - DNA, 582 bp, Homo sapiens
  misc_feature (1)...(582): n = A,T,C or G
ggtgggaggattgcttgaggccaggagtttgaggccaggttgggcaatatagtgagatcctgtttctaaaacaaaacaaaacaaaacaaaaaaaaccaaaaaccccccacaaaaaacaaacaaacaaacaaacaaacaaacaaacaaacaaamaccagatgtggtggtgcatgccttgtagtcctagctacttgggaagctgaggtggaaggatggcttgagtgctggagtttgagatcagcctggacaacacagtgagaccctgtctatacaaaaaaataaaattaaatgagtaaggtgtggtggtgtacactagccctagctatttcgcaggctgaggtgggagaatcacttaagtccaagagttggaggctgcagtgggtttgattgtggctggtatactccaacctgagtgacagagcagggacctatctcanaaaaaaaaaaaaaaaaaaaaaaaggggagganggggagaanacngataaaagaaagaaaagaacctagaatagtatgaagaacatttctcaaatcaaaataatagnctctaagttcttaaaattctattcccctttcactggntt

SEQ ID NO: 106950 - DNA, 571 bp, Homo sapiens
gaagtgggcaggagggaccaagatggccaactggaaacagytgctgttaaaggttcccactaagaagaagaaaaacggtgagtgaatccagcaccagcaactgaggtatacaggttcttttgttgggaatgactaggtggttggtgtgacccacagagactgaggaaaacagggtggtgcaatagcctacctgggagccacacagggcaaggggagctctcaccaccagccaagggagatggggagtgattgtgctaccccgcccgggaaaccatgctttttccatagatctgtgcaacccatggatcaggagatcccccttgtaagcccatgccatcagggccttggatgccaagcacagagctatacagattcctagcagccactctgctggagactgcctaagactaccaagttcccagggagaggggtggcatcatcactgctgctgcctgctgcctaagatgactgagctcctagcggtaggggagccttaactgcagctccagtctgccggttttcccctgccggagctgaggacactgggcagtttggatccaggaggaattcc

SEQ ID NO: 106951 - DNA, 551 bp, Homo sapiens
gtctcaatttcttcaagaagactgaatgagtttaaatatataaagtacttagaacagagtcctgcactacgctatgattcttgccttctctctcagaggacatcagtagatggaaattgggtgtgaatgagcaactgcagcaattcatgcacctgcaagctctaaatccggcccctgggggctgcaggtgccacctctggcctcagtgagctgaagtcgttgatgaagactataccacaataaactctgcaatgctgttgcgaggatcactgtgggatatcatttcagtgtatgatcatggtgcttattgttttgctctctctctcttttttttttttttgagagggagtctcgctctgttgcccaggctggagttcagtggcatgatcttggctccctgcaacctccgcctcccgggttcaagtgattctcctgcttcagccycccgagtagctgggactataggcgtgcaccaccttgcctggctaattttagtagagatggggtttcaccatattggtcaggctggtgttgaactcctgacctcaagt

SEQ ID NO: 106952 - DNA, 388 bp, Homo sapiens
atcacatattttctaactttgtttcaaatgcaaaatgatgaacataaacatataatcataatttctatttaccttttttcaatttatttctaaaaatagttgaaaagaaaatagctcaaacaaaaccttattggtacctagctaatcttcaacagtgttacactgagccctttcataaacatgcaacacaaatcattcatgatctaaattctattawtaaggaaatgtattgtcatgtataacaaggattatagcactctgggcatgattcatggctcatccctctttttagcatttcttgtgtttttgtgctttgctaagttttttttaaaacatcaagctggaaaggaaatgtctcctcctgttataaaagtcacatttaaacatg

SEQ ID NO: 106953 - DNA, 388 bp, Homo sapiens
atcacatattttctaactttgtttcaaatgcaaaatgatgaacataaacatataatcataatttctatttaccttttttcaatttatttctaaaaatagttgaaaagaaaatagctcaaacaaaaccttattggtacctagctaatcttcaacagtgttacactgagccctttcataaacatgcaacacaaatcattcatgatctaaattctattattaaggaaatgtattgtcatgtataacaaggattatagcactctgggcatgatwcatggctcatccctctttttagcatttcttgtgtttttgtgctttgctaagttttttttaaaacatcaagctggaaaggaaatgtctcctcctgttataaaagtcacatttaaacatg

SEQ ID NO: 106954 - DNA, 398 bp, Homo sapiens
agctaattactaaaagaaaaaaatgagaaaaggaggaaaaacattgatgtaacaaaaaataatcatagcaacaatatgctatagtgcttgcgtttcactttttataattggccctttttcccatcttgttgactcaatttgtagagaaattctaccatccaaattctcttattttttcagttacagttgataataagtagcaaattaaaaaattaccgaggtgcatttcataagcaaagacaaacaaaawactattgttggtaggcttaaaaatatagagtgccagcatttgacatataaatggaaacatagtaataatgcagactctttgggggaaaatgcgtatttgtatgcttctttaagaaaacagggaactgttgtgtagtttttggaaatat

SEQ ID NO: 106955 - DNA, 554 bp, Homo sapiens
tccagcctgacagccctgcagagatttgcagatacatcagatccccttgggacagggtcaggataaacatctctagtcctgccagtgtttcttatgacacagttgcagcaatagtagctaatattgattggtcacttactgtacacctatacacagactttactyatattatttaatttccaaaacaaacctacaaatcacaaactattattatgcacactttattgatgagaaatctacggctcagagaggtaaagtgagctgcccacgatcacagagccagaaggagtagagctctgttcacacctggctctacgttactgcagagagcaccaggctcctggctggccggttcccaccttgcaaggctcatagaaagcacttcagtgtttgattactccagacctctcaatgcccctgcatttttctgcttttctccttactggctctagaaggccatgggtttagaaaatcctcaaatgtcagaatatgaagggcctttagaaataagctggcctgggaggcccagccaaggaagaggtcagagaggagga

SEQ ID NO: 106956 - DNA, 457 bp, Homo sapiens
gaaaaatctggttctccaagtcatacttgccaacaacatttgggtgtgttggggttggcgagcaggagtgggtaggggatgggggggaaaggaaggcagattaagggtggcatttatcaagcactggccctagcattcgtgccagggttccctgtttccaggaggaccagatcatggcttacactgaagacacattaaggcttgccaaggttgagctgagagcccccaggcttgatttaaaggtgttggaggcattccatggtctgtggcaatcccatcagcagtagaacttacctgcaaatggctgagccacgatggccctgagcctcagttagaacctctgcagctctacaagccacttcttactgcagatgggcccataggaaagtatgtgcccatcccatgccmtggccagccaattgcaggcagacagctaaaggccaaacaccaatgacag

SEQ ID NO: 106957 - DNA, 456 bp, Homo sapiens
tgaaatcctggctccagtacttacagactctgtgacttgggcaactttcctcttttctgagtcttggtctcatttgtaaaatgcgtatattgataacatatctgagagaactaaattaacatatctgagagaattaaagcagatgattgatataaataatttgaatagtgctaggagattatataaaacaaaataaatgttaactaaattttcctgagtcactttagaaaccttaacaatggtgtgtttcaatgggtgaccaaatcccctttaatgcttgaaataatcaatgcctggaattgtaacatgttacacttcaccttatttgaggtgagttgaaaaattattgtggatgtagtgtttgaaawgccaaaaccaatattaggaaataaaatagtatttttgaaagacatgtggaatgaaggaaaggaaatttgtttcctgaataactatttt

SEQ ID NO: 106958 - DNA, 585 bp, Homo sapiens
cctgggtattctttccaactctgtctttttttccttcccatacctgtaatgttaatctgatcatcartgtatctctgcaatccgtttaccttactgtactcttaatatcattttactacttaaagccattatcatctccttcaaagttcattaatgtctgccaactataatattgtttttctatattacagaccttgcttccttgcccattcaccactctagagctgagggcattttccaaaaaaacacatcttgttctctcaatagctacatctggaactctgcctactccaggctccactccctcaccccacccacccaatagtgatggtggactaactattttctccccatctttcagatctaaaccccacatcactctttcagatctaaaccccagaaagtactcttaagtactttctgagtacattctgggtacattgatttctttcatcataatatttataaacatagctcaagttcttaaagctacttcctgtccattattacccttatttataaacccttctaatcttatttctgacttttatattcacttcatgttttttttctcttaaaacattt

SEQ ID NO: 106959 - DNA, 585 bp, Homo sapiens
cctgggtattctttccaactctgtctttttttccttcccatacctgtaatgttaatctgatcatcaatgtatctctgcaatccgtttaccttactgtactcttaatatcattttactacttaaagccattatcatctccttcaaagttcatwaatgtctgccaactataatattgtttttctatattacagaccttgcttccttgcccattcaccactctagagctgagggcattttccaaaaaaacacatcttgttctctcaatagctacatctggaactctgcctactccaggctccactccctcaccccacccacccaatagtgatggtggactaactattttctccccatctttcagatctaaaccccacatcactctttcagatctaaaccccagaaagtactcttaagtactttctgagtacattctgggtacattgatttctttcatcataatatttataaacatagctcaagttcttaaagctacttcctgtccattattacccttatttataaacccttctaatcttatttctgacttttatattcacttcatgttttttttctcttaaaacattt

SEQ ID NO: 106960 - DNA, 585 bp, Homo sapiens
cctgggtattctttccaactctgtctttttttccttcccatacctgtaatgttaatctgatcatcaatgtatctctgcaatccgtttaccttactgtactcttaatatcattttactacttaaagccattatcatctccttcaaagttcattaatgtctgccaactataatattgtttttctatattacagaccttgcttccttgcccattcaycactctagagctgagggcattttccaaaaaaacacatcttgttctctcaatagctacatctggaactctgcctactccaggctccactccctcaccccacccacccaatagtgatggtggactaactattttctccccatctttcagatctaaaccccacatcactctttcagatctaaaccccagaaagtactcttaagtactttctgagtacattctgggtacattgatttctttcatcataatatttataaacatagctcaagttcttaaagctacttcctgtccattattacccttatttataaacccttctaatcttatttctgacttttatattcacttcatgttttttttctcttaaaacattt

SEQ ID NO: 106961 - DNA, 585 bp, Homo sapiens
cctgggtattctttccaactctgtctttttttccttcccatacctgtaatgttaatctgatcatcaatgtatctctgcaatccgtttaccttactgtactcttaatatcattttactacttaaagccattatcatctccttcaaagttcattaatgtctgccaactataatattgtttttctatattacagaccttgcttccttgcccattcaccactctagagctgagggcattttccaaaaaaacacatcttgttctctcaatagctacatctggaactctgcctactccaggctccactccctcaccccacccacccaatagtgatggtggactaactattttctcccyatctttcagatctaaaccccacatcactctttcagatctaaaccccagaaagtactcttaagtactttctgagtacattctgggtacattgatttctttcatcataatatttataaacatagctcaagttcttaaagctacttcctgtccattattacccttatttataaacccttctaatcttatttctgacttttatattcacttcatgttttttttctcttaaaacattt

SEQ ID NO: 106962 - DNA, 534 bp, Homo sapiens
tcttacatagaatttgttgatcttggatgctttttttttgtctttcatcaaatatgggaagttttcaaccattatttttccaaatatgccctttttttctctatttcttcttctcccaggactcccccaatgcatatcttgatttgttgaacacgtcccttagactctgataatgttttttcagtattttttatttctgtcactcagacatgataatttccattgtcctgtcttcattaattctatttttctccctgctcaatcttcctttaaatgcctctagttattatactttcagttactgtacttttcagttccacaatttctttttggtttctttttacagtttctaaccctttgatattctgctttgttcacatattattttcttgactttctctacatcttccttcagttcttttagcatctatwagacaactgttttacaatctttttctagaatatctaccatcagatgtttcaaaggaatagtttcttttgatttatttttatttcctttggaatggctataat

SEQ ID NO: 106963 - DNA, 593 bp, Homo sapiens
cgttttattatttcctgcctcttactttaatttctctttgtcctttactctccatggggtttgtattatattccagttgtatcttacacggttaggctgtaggctattagctacacttccatatcactagacaagctcaaggcattcaattctacctgttatttaattttggactcttagaaattagaccttgatcataagtaatgcttggagtcaaccgctgaagaccacctcttactttcaacttgaacactcaattcaccactctcmccagccctccaggcagcaggctgggtgtaattgtctatagctcataaataagaaagtcaaggccagcaaggttgtgaggcttgcccaggctcacgcagtgattataaccatgagcagcactaaaagcttttgactttataaaagatcaaaaccattcatgccccaaatacattttatataaaaatgattgacaacttttttattaaactgcactttattagttggcataaaacagctttcaggcttttaagtgagttatggtcaccttggaatggctctgggtaaaatgctgacatcggtgaagtatgttttcagcttctggg

SEQ ID NO: 106964 - DNA, 522 bp, Homo sapiens
ggagggctagaggtcaaagttggatatgtgctagaaatgacttaccgtgccttctcagcaacacacagtccagtttttggaagaaagcaacattggagcagccacagcttcttaaaattgctgtctataattacgtttgctaaaaaaaacaaaaactggagcagcagggaacagaccctgtagttagtcccaaatcctcccccttacaattccccagtgcacatgcagtgacagctgtcattctccaagcagcttaaaatcctgaagtggccttgaagcggagactagagccagagaagctgcgtccrcccctgccaccagggtggcctcacacaatgtgctggcagcagcctttgaagaatggcaccgaacctagaggcaccgcaggcctcagcagctctgctctttcccctgacaggcaactgctgtgcttcaatttgggcccctctcccagctgacaaactcaagacagatctgagggctggaattcctctctagaaccttgtgaggccacccgtatcg

SEQ ID NO: 106965 - DNA, 583 bp, Homo sapiens
gagcttgagctgtccttattgcatttgactggttggtaaagaaattgagctagggtcaagtgtcattgtcaagatcaagccaagactgagtggcccatcaatttatggccagttcagtgaygtttctactggattagaaggaaacaagtagtgttttcagtgccttggacccccagcatctgaaagatctgaaagactgggccattccttcttccactacctcccttttgctagagtccagagaacgatcattgtccaggagactatcaatggttataagtatattccctcttctccatttcaaaggacactcactaggttttcttttgtacttcaggtcagtaacatgacccttgggatcctctgggaagagaatcatgttagcaggatgggctgtgaagcctcctgcagattaagccagttataatctgtgactcatatctgtagatagcaattttcttacaggtgtttgttgagtgatagggacatacagagagacaagagatagaggggcagcccaggtaacataccaaaaagcataactgtataacctggaactgaaagagacctttgacatcaccta

SEQ ID NO: 106966 - DNA, 563 bp, Homo sapiens
ttctcatgtggctaacattctttaatctttgtgcttttaaatgatcaccaatctttgatcttatatttacaaaatagttaataactagcccagtgttttggcataaagtatttaggtctctcatggttgttcattaaatactggggtggcttgggaatatggttgtacacacaattttaacccaggttgactcaaaatatttggggcttataattattttttcatttctaccttatagtaacctcacagactgggaataaatcctcaggtgatattagcatttttagtacaaaatctgtcatggtgaacctggttaattagaagttcaaaagtgctgagcagtgaaggagttctgttcattttttattgctgctgcaacagattaccataagtttggtggcttaaaacaacacaattttattattttacaattctggaaggcagaggtccaaaatggggctcacttgactaaaatcaacgtgcasgcagtgttgctgttcccttgggatgctttagggtggaatctgtttcctcggctttccccacttctagagaactcttgg

SEQ ID NO: 106967 - DNA, 627 bp, Homo sapiens
ccataacaataagtaagaacagacctgcaagcatatctcttccaacatcagtgaaagggttgtagaaggaattggggaaactgttttgaagccttgccctaagtaaggggcataaccactgttaagctccatttggctgttgacaagcagaaatgccaactttttcatttttatgtaaaattactggctttttacaagtttggcaaataattctaaattgttgcaaataattacgtaggccaaagaaagctgtctgtggatcatacttggccctcaggctgtcaaattatgattgctggtggtgtcaaaagagcatatttttagcaccatatagagctggattcaaatattcgtccagccacttgttcatcctataatgtagcaaatgttcactcccaaaccccaccccttataccttagattctcaatctccaaaatgagaataayaaaaaatctaatgaccaatataatatttaaattacattaaattattaaagtacttgggacatggtgttacatatccccaaacactgaggtgccttgaattcactgaaaggaattttctaatacactgaacaatttaggggttaataggaagagagttgcttctcttcccttttctgaaac

SEQ ID NO: 106968 - DNA, 624 bp, Homo sapiens
agtcaaggcttcaaggcttatccctgctggtctaccgattctcttgtggttacttgggtccaggaagaaaaggtgttcaatgtgttgagtctatcttatgaacagcttatgctgagtctgcacaagtataatagagaacggtcactatatgcaacatttaaaacacagkgtgtggcataaatcacatgcttcagtagctactgtggatgcttagttaaaatcttatctatttgtagcaagttttaagctaagatattccagttccaagcattgcttagaaaagaaagtccttgtgaaatgttaaagagccttgggtaaaaattcttgatttctatcttctagtcatttctacatcatgtcagcttccttaaaagtgacactctcaagatgagatcaaaagactcacaaggcaagtgatgaggaagaaatataaactgaaatagataagccacccttccttcatgcttaaataaaactcttctgtaagacaaggttatgtttcaatggcagtggtagaaaaacaaagacgccaggagcagaaggctaaatcaggaccattttcacaatcagctgtcacataggcctccacatacttttctctctctttccctccctcctgtcaca

SEQ ID NO: 106969 - DNA, 567 bp, Homo sapiens
acagttctttggccagtctcccagcatccacccattgtctatttagtcatgagataaggtgcccatggaattggcatgratgggaacaaaagaactcctctccatttcaggagttgtgagacaaggaggggctgtggttctgtctttctggagatatggggcatcgtctccatggaagtagaagctcccagaaagtaaatcaccattcatgggagttaaaactagtgcaaatgacccatgcggcatattcacaaacactgacactcaaaagattggaatcgttttcaaaaacgtgcccgagctcagagttgacagatgcccatagaatggaattgaatcaagaccaaccatggaaatgaaactagcatttgccgaggacttgctacttgccaggcatttgacacatacgctcactgaatcgcggcagtgcctagaaaatcaggcattatcctcacttacagataaggatcctggatttcagagaggttaggtggcctgcctatgtacactcagtcggaaagcagaagagtccggtctagaacccagggctccatgtgacagaaagac

SEQ ID NO: 106970 - DNA, 567 bp, Homo sapiens
acagttctttggccagtctcccagcatccacccattgtctatttagtcatgagataaggtgcccatggaattggcatgaatgggaacaaaagaactcctctccatttcaggagttgtgagacaaggaggggctgtggttctgtctttctggagatatggggcatcgtctccatggaagtagaagctcccagaaagtaaatcaccattcatgggagttaaaactagtgcaaatgacccatgcggcatattcacaaacactgacactcaaaagattggaatcgttttcaaaaacgtgcccgagctcagagttgacagatgcccatagaatggaattgaatcaagaccaaccatggaaatgaaactagcatttgccgaggacttgctacttgccaggcatttgacacatacsctcactgaatcgcggcagtgcctagaaaatcaggcattatcctcacttacagataaggatcctggatttcagagaggttaggtggcctgcctatgtacactcagtcggaaagcagaagagtccggtctagaacccagggctccatgtgacagaaagac

SEQ ID NO: 106971 - DNA, 567 bp, Homo sapiens
tcaaaaactaaagctttgaagcagaactcactgtatctgacaaaagttagatttttttcgtcgacaactctaataacatgttttatgayattaattttgttagtgatttttggtaactttttattatgatttctagcttattgaaatgttgcaaaaattatataaggaatttttttatcctatatccagattcacctgactacattttgccccgtttgttttataatcttcattctgtctcttgatgcgtatttattttggaaccctgagaaaatgaatgttgtcttcaacattcaacatcagtctcctttacacctaagtactcaagtgtgtaattcctaagacgttctctcgtatacacacaatgcaataatcaaaatcaggaaacatgatattgatgcaacgctgcgctctaatctagtgcatatgcaaatttcatcaattgtcctgataatgttctgtataagttcccccccactgctactgcctcactccagaattcagtccaggatcacacattgtatttagctgtcttgtctactatttggactctttaaatttgtaaca

SEQ ID NO: 106972 - DNA, 567 bp, Homo sapiens
tcaaaaactaaagctttgaagcagaactcactgtatctgacaaaagttagatttttttcgtcgacaactctaataacatgttttatgacattaattttgttagtgatttttggtaactttttattatgatttctagcttattgaaawgttgcaaaaattatataaggaatttttttatcctatatccagattcacctgactacattttgccccgtttgttttataatcttcattctgtctcttgatgcgtatttattttggaaccctgagaaaatgaatgttgtcttcaacattcaacatcagtctcctttacacctaagtactcaagtgtgtaattcctaagacgttctctcgtatacacacaatgcaataatcaaaatcaggaaacatgatattgatgcaacgctgcgctctaatctagtgcatatgcaaatttcatcaattgtcctgataatgttctgtataagttcccccccactgctactgcctcactccagaattcagtccaggatcacacattgtatttagctgtcttgtctactatttggactctttaaatttgtaaca

SEQ ID NO: 106973 - DNA, 567 bp, Homo sapiens
tcaaaaactaaagctttgaagcagaactcactgtatctgacaaaagttagatttttttcgtcgacaactctaataacatgttttatgacattaattttgttagtgatttttggtaactttttattatgatttctagcttattgaaatgttgcaaaaattatataaggaatttttttatcctatatccagattcacctgactacattttgccccgtttgttttataatcttcattctgtctcttgatgcgtatttattttggaaccctgagaaaatgaatgttgtcttcaacattcaacatcagtctcctttacacctaagtactcaagtgtgtaattcctaagacgttctctcrtatacacacaatgcaataatcaaaatcaggaaacatgatattgatgcaacgctgcgctctaatctagtgcatatgcaaatttcatcaattgtcctgataatgttctgtataagttcccccccactgctactgcctcactccagaattcagtccaggatcacacattgtatttagctgtcttgtctactatttggactctttaaatttgtaaca

SEQ ID NO: 106974 - DNA, 567 bp, Homo sapiens
tcaaaaactaaagctttgaagcagaactcactgtatctgacaaaagttagatttttttcgtcgacaactctaataacatgttttatgacattaattttgttagtgatttttggtaactttttattatgatttctagcttattgaaatgttgcaaaaattatataaggaatttttttatcctatatccagattcacctgactacattttgccccgtttgttttataatcttcattctgtctcttgatgcgtatttattttggaaccctgagaaaatgaatgttgtcttcaacattcaacatcagtctcctttacacctaagtactcaagtgtgtaattcctaagacgttctctcgtatacacacaatgcaataatcaaaatcaggaaacatgatattgatgcaacgctgcgctctaatctagtgcatatgcaaatttcatcaattgtcctgataatgttctgtataagttccccccmactgctactgcctcactccagaattcagtccaggatcacacattgtatttagctgtcttgtctactatttggactctttaaatttgtaaca

SEQ ID NO: 106975 - DNA, 574 bp, Homo sapiens
cactcattacatgtataaggtttctctctagtgtaaattttctgatgtctaataaggcatgayacttcactgaaagctctctcacacttagttcacacagaagatttctctcctgtgtgtattctctgatgtacaaagaggtgtgacttcaggctgaaggctctcccatattcatcacacacatagggttttcctctagtatgagttctcctgtaaatgctgaggtgtaagttttggaaaaaggctttcccacactcgccacactcatagggtttctccctggtgtgaattctctaacgttcaacagatgtgacttgtgggagaaagcttttctacattcaacacactcgtaggttttctcttgagtatggattctcaggtgtataatgagatttgattccctgctgaaggttctcccacacttagtacatattaagggcttttctctcttatggttctcttttgcataatgaggtctgacttctggaaggaggctttttcacattcactatgctctttttttttgtggcatatcttctattgccactaaataaatccaaatagttcaaattcc

SEQ ID NO: 106976 - DNA, 531 bp, Homo sapiens
ttttctttctttctttttttttttttttttttggtctaaacgttggtattgtaaaattgtaaacctttgggatgaactatttgttcttcattttcagacatgacctagctgaaaatctgaacaaaagaatgaaaattccctagggaagcccataactgtgtagctttatttgatcctctcataatcagcattgtggctaagctcccrtggaggccttctctctaattgtttttcaccaggagtattttcctttcaggtttctaagctatcactacaggtactgaagtataaccaattattcctcagtaagttgaaggataccttgaaggtagacctagttcaattagagcatgaaacgttgtcatcacagatattccatgaggatttctcaaagttaggatagacattctgcattttcctggaagataactgatattctggaaagatagtttcatattatatgcccctatctgcctagccaaagcccagtgctcctagtttcatcaatcaggataaccttcacattctaac

SEQ ID NO: 106977 - DNA, 531 bp, Homo sapiens
ttttctttctttctttttttttttttttttttggtctaaacgttggtattgtaaaattgtaaacctttgggatgaactatttgttcttcattttcagacatgacctagctgaaaatctgaacaaaagaatgaaaattccctagggaagcccataactgtgtagctttatttgatcctctcataatcagcattgtggctaagctcccgtggaggccttctctctaattgtttttcaccaggagtattttcctttcaggtttctaagctatcactacaggtactgaagtataaccaattattcctcagtaagttgaaggataccttgaaggtagacctagttcaattagagcatgaaacgttgtcatcacagatattccatgaggatttctcaaagttaggatagacattctgcattttcctggaagataactgatattctggaaagatagtttcatattatatgcccctatctgcctagccaaagcccagtgctcctagtttcaycaatcaggataaccttcacattctaac

SEQ ID NO: 106978 - DNA, 608 bp, Homo sapiens
agaagatacttgtgcatcagatccaaccgcaggcttgcatggagctggcgcctgtgcctgcaactggagctgcccgccccatgacagcagctggcgtgcccagctgtgtgcagtggccagaccctgtgcttgcttgctcatgcaccccttgctgctccacacctggctcaccactggcaggcgtgggagctgagcaagtagtgtgagctgagcacagcccagcaggttgactcagcagaatgagcccagggagcccaagcaaaacttaggcaaaggcaccactggccacagaggtttctggctggaaaagtgacaccccaaggatcctgagacacaggccattcactgaggcagargtacaaagaacacagcagttttggaagagaagtaagagaacttgtaggacagttgcactgaggagcggggtaaagatttccaatgaggtggttattatgtagctctgaagctcagaaaggaagacatctctgggcacatggatagcaactgaagttgtaggaacagaccagaacaccctaggagaatgagcacagtaataagaagaggtatgatccaactccaggggaacagcaagaaaagaaacgtcaccc

SEQ ID NO: 106979 - DNA, 625 bp, Homo sapiens
attccttgttgctcattaatattcttttcttctgggttgaagatttcctttgagcatttcttgtaagactggtttggtgttgatgaaatccctctgctttttttgtggaaagtctttatttctctgtcatgtttgaaggatatttttaccagatatgctattctagaataaaagttttttttyccttcattgctttaatattgtcatgccacactctcctggcctgtaaggtttccactgaaaagtctgttgatagatgtattggagctccattgtgtgttatttgtttcttttctctagttgcttttaggatcctttctttatccttaaccttttggagtttgattattaaatgccttgagacagtcttctttgcattaaatctacttggtgttctataaccttcttgtacttgggtattgatatctttctctaggtttgggaagttctctgtcatacatttgaattaactttctacccctatctctatctcctctttaaagccaataactcttagatttgcccttttgaagctatcatctagatcccacaggtgggattcattgtttcttagtctcttttcttttgtgttctctgactgtgtattttcaactagcctgtcttc

SEQ ID NO: 106980 - DNA, 625 bp, Homo sapiens
attccttgttgctcattaatattcttttcttctgggttgaagatttcctttgagcatttcttgtaagactggtttggtgttgatgaaatccctctgctttttttgtggaaagtctttatttctctgtcatgtttgaaggatatttttaccagatatgctattctagaataaaagtttttttttccttcattgctttaatattgtcatgccacactctcctggcctgtaaggtttccactgaaaagtctgttgatagatgtattggagctccattgtgtgttatttgtttcttttctctagttgcttttaggatcctttctttatccttaaccttttggagtttgattattaaatgccttgagacagtcttctttgcattaaatctacttggtgttctataaccttcttgtacttgggtattgatatctttctctaggtttgggaagttctctgtcatacatttgaattaactttctacccctatctctatctcctctttaaagccaataactcttagatttgcccttttgaagctatcatctagatcccacaggtgggattmattgtttcttagtctcttttcttttgtgttctctgactgtgtattttcaactagcctgtcttc

SEQ ID NO: 106981 - DNA, 623 bp, Homo sapiens
tactaacttggggtgattatacatatacaatctttatgacaaaatttttttcacaagtaacaaatgttgactataaattaagttgctatgttaactctgtaagctaactataaaaaattttagctgttaagatatttcagatagatgcattgttgagattattgagttaattcacccaaccaatatttattaagttctttatatgttccagccatttggctagttgctgttctagctggggtcatttgaaaggagaggtagatagatattcagcataaaataatacaagagtttctaactaatgtcttgagatgtatctgcagcttggttattagatattaaagacatttgctattgctacaatttctactactatgattcttttccatatttgttgtcttggagacagtatatggttaagggaatgggcattggggtctccatgggttcaagtcctagctttgccaattactagtcrtgtgaatttgggggaaagtattaactttcctaccacacatttttttttcactggaaagatgaagataagaaggatcccactggcctcttgagaagttagaatgagatattgcttgaaaaacactaaaagctattcccagaggttg

SEQ ID NO: 106982 - DNA, 599 bp, Homo sapiens
cccatcagtatagctcactatagccccgaattcctgggcttaagtaatcatcccacctcagcctcttcagtagctgggaccacagacatgtgccaccacatctggcctcatctagtttaaatatagcctgagtgggttttgttgttgtcgttgytgtttgagacagggtctcactctgttgcctggggcaatcacagctcactacagccttgatctcctggactcaagcaatcctcccacctcagcctcctgagtaactggaactacagatgtgcaccaacatgaccagctaattttagttttgttagagacagggtctcactatgttgcccaggctggtctcaaactcctgggctcaagcaattctcttgtctcagcctcccaaagtgctgggattataggcatgagccaccatacccaggccttatagcctgagtcttaatccccttatgtaagtaacaaaaaatattcctattgcaactgggctaaagataactttctaaaaatgttacattgaataacaataagtaaataatcaccttaagtatatgagatgtggatgggcataatttctgagttatctaattatgtttgtagtt

SEQ ID NO: 106983 - DNA, 641 bp, Homo sapiens
acatattctggttattaatcccttgtttgatgggtagtttgcaaatattttctctctttctgtgggttgtctcttcattttgttgattgtatcctttgccgtgcagaagctttttagcttggtgtaatcccaactgcctatttttcctttgattgcctgtgcttttggggccttatgcaaaaaaaactcttaagaatttcctcaattttttttcatgtctttaatccatttcgatttgatttttgtgtgtggtgaggggtagaggtcaagtttcattyttatgcatataattatccagttttaccggcaccatatattaaaaagactatcctttctccattgtatgttcttggcacctttgcagaagatgagttggttgtaaatgtatggatttatatctgggttctcaattctgtttcattggtctatgaatctctttttatgccagtaccatgctctcttagttactatagctttgtagtaaatttttaagtcaggtagtgtgatacccttgttctttttgttcaggattattttggttctttgggtcttctccggttccatatacgttttagaattatttttactttttctgtgaagaatgtcatcggtattttgatagggatggaatttaatctata

SEQ ID NO: 106984 - DNA, 641 bp, Homo sapiens
acatattctggttattaatcccttgtttgatgggtagtttgcaaatattttctctctttctgtgggttgtctcttcattttgttgattgtatcctttgccgtgcagaagctttttagcttggtgtaatcccaactgcctatttttcctttgattgcctgtgcttttggggccttatgcaaaaaaaactcttaagaatttcctcaattttttttcatgtctttaatccatttcgatttgatttttgtgtgtggtgaggggtagaggtcaagtttcatttttatgcatataattatccagttttaccggcaccatatattaaaaagactatcctttctccattgtatgttcttggcacctttgcagaagatgagttggttgtaaatgtatggatttatatctgggttctcaattctgtttcattggtctatgaatctctttttatgccagtaccatgctctcttagttactatagctttgtagtaaatttttaagtcaggtagtgtgatacccttgttctttttgttcaggattattttggttctttgggtcttctccggttccatatackttttagaattatttttactttttctgtgaagaatgtcatcggtattttgatagggatggaatttaatctata

SEQ ID NO: 106985 - DNA, 641 bp, Homo sapiens
acatattctggttattaatcccttgtttgatgggtagtttgcaaatattttctctctttctgtgggttgtctcttcattttgttgattgtatcctttgccgtgcagaagctttttagcttggtgtaatcccaactgcctatttttcctttgattgcctgtgcttttggggccttatgcaaaaaaaactcttaagaatttcctcaattttttttcatgtctttaatccatttcgatttgatttttgtgtgtggtgaggggtagaggtcaagtttcatttttatgcatataattatccagttttaccggcaccatatattaaaaagactatcctttctccattgtatgttcttggcacctttgcagaagatgagttggttgtaaatgtatggatttatatctgggttctcaattctgtttcattggtctatgaatctctttttatgccagtaccatgctctcttagttactatagctttgtagtaaatttttaagtcaggtagtgtgatacccttgttctttttgttcaggattattttggttctttgggtcttctccggttccatatacgttttagaattatttttactttttctgtgaagaatgtcatcrgtattttgatagggatggaatttaatctata

SEQ ID NO: 106986 - DNA, 560 bp, Homo sapiens
acaagaataaagaacatagctaagccctgtctctccttcctttggctccattcctgggtatttatgcctgggattkatactgatcccaagtagtgcaaaattttcaaaacatatctaactctttgtaactactatagcataaattagtactaattttaatccctaagcagtgagttaacatggctatctagcaaaatttaaaaactaataattaataggtacaaataaatgctttctgactattgtaaactgtttttaacttgtttatgtttatccatgtagcatctgaaaacccttctacttttaaatccaggtctcttggttctccataactgtccacagattacctatgactttaatatcaagagttctaatgtgtgcaccaaaccccggtgacatgaatttacctatataacaaatctgcaaatatccactgaacctaaaataaaagtttttaaaagagttctgtgcaacatccaaaggcttcttcagtatgtttcttctgtccccataaaatgcagatagcgaaaaaagacacaaaaaaactcagaaatgggcct

SEQ ID NO: 106987 - DNA, 560 bp, Homo sapiens
acaagaataaagaacatagctaagccctgtctctccttcctttggctccattcctgggtatttatgcctgggatttataytgatcccaagtagtgcaaaattttcaaaacatatctaactctttgtaactactatagcataaattagtactaattttaatccctaagcagtgagttaacatggctatctagcaaaatttaaaaactaataattaataggtacaaataaatgctttctgactattgtaaactgtttttaacttgtttatgtttatccatgtagcatctgaaaacccttctacttttaaatccaggtctcttggttctccataactgtccacagattacctatgactttaatatcaagagttctaatgtgtgcaccaaaccccggtgacatgaatttacctatataacaaatctgcaaatatccactgaacctaaaataaaagtttttaaaagagttctgtgcaacatccaaaggcttcttcagtatgtttcttctgtccccataaaatgcagatagcgaaaaaagacacaaaaaaactcagaaatgggcct

SEQ ID NO: 106988 - DNA, 590 bp, Homo sapiens
gttctgattattcaggactgcttttgacattaatgacatggactcttttatgatatgaaactaaagcaaacagtggtagaaggattggtactatatagaaacattttttagaggaaaaaaagtcagatgtgttttcgtaaagttatgccaagtgtgcccgcctcccctgcctccccttccaccttccacatctgccactcctgagactgcaagaccaatccctcctcctcttcctcctccttagcctacttgatgtgaagatgaagagtatgaagacttttatgacaatcccttccactcaatgaacagtaaatacattttctctttcttatgattttcctaataacattttcttttctctagcatactttattctaagaatacagtatataataccaatagcttacaaagtatgcattaatcgaatgtttatgttattgttaaggcttctagtcaacagtaggctaytggaagttaagttttgggagagtctacacttatacaaggatttttgactgcactggggtcagctccccaacccccatgttgttcaactgtattcatatctaacacatattgagtacttacta

SEQ ID NO: 106989 - DNA, 567 bp, Homo sapiens
gagcattcatgaacgggattagtgccccttatgagaaaggccagagaactagttaactctcttacttccctgtgtagatacaagaagttggccatctgcaacgtggaaaagggcccctcaccaaaacatgactattctggcaacctgatgttggatttccagcctccagaactgtgaaaaataaatttcttttgtttataaaccaactagtctataacaatgtgttttagcagcccaaactgactaaggcagctttgaatgataaaatcagaaaatacaaaactctaggttggtgggtttccttctcatagcagtttaaatattgcactctcttctcttggttgcatagcttccgaggcaaaagatgtaattcttatctttgtccatctatagctgtttttatcctcttgcttcttccaagaattcttwattttcagtactttaaatatgatatacctaggtgtcatttctttgcttgtttgatttttgcatttatctttggcgttctctgagctttctagatgtgtggtttggtatctgacattcatttgaggaaattttcagcca

SEQ ID NO: 106990 - DNA, 622 bp, Homo sapiens
tacatatttaaacactatgatctatagttcagatactaagaggggattaatccaccctacccttaagggatatcaaatgaattgtatcatttggaagcagctgttgagcagtcacaaaacctgagttgttagtatcctgactacagttcatcaggagcttattgttcttcccaacgttaaggaaagttcagatttttcttgaaaaaaaaaaaattgtcttttagaaagactttctgcgttgctccaaaaagtgagaaaatagaaacactagtaaggctaaattaatattgctaattacattgctttaaaatatattcatattatcaagtggtgatgccaattgtataagtaattgcttattacgttgttttaaaactccctgaatttctaacataaatttagtgtgcggaactmctttaatacttattttcttcatgtttgccgtggttgtacatggataaggcattcacattccatttataatacatactaattaatttcataattaaaatataattaaaatataattacaaagaaaacgcaaatcagagttctttcaattaacgtatctcattagagctgggatcttttttttttcagcattatatctttctttaaacca

SEQ ID NO: 106991 - DNA, 622 bp, Homo sapiens
tacatatttaaacactatgatctatagttcagatactaagaggggattaatccaccctacccttaagggatatcaaatgaattgtatcatttggaagcagctgttgagcagtcacaaaacctgagttgttagtatcctgactacagttcatcaggagcttattgttcttcccaacgttaaggaaagttcagatttttcttgaaaaaaaaaaaattgtcttttagaaagactttctgcgttgctccaaaaagtgagaaaatagaaacactagtaaggctaaattaatattgctaattacattgctttaaaatatattcatattatcaagtggtgatgccaattgtataagtaattgcttattacgttgttttaaaactccctgaatttctaacataaatttagtgtgcggaactcctttaatacttattttcttcatgtttgccgtggttgtacatggataaggcattcacattccatttataatacatactaattaatttcataattaaaatataattaaaatataattacaaagaaaacgcaaatcagagttctttcaattaacrtatctcattagagctgggatcttttttttttcagcattatatctttctttaaacca

SEQ ID NO: 106992 - DNA, 527 bp, Homo sapiens
caaggctgcagtgcatcctgattgcacctgtgaatcaccactgttcttcagcctgggaaacaggcaacagagcaagaccctgtcaaagaaggagaaggagaagatgaagacgaaatatagatgatggtgaggatgcagaaaaaagggaattcttgttggtgggagttggtgggaatgtaaactagtacagccattttggaaaacagtatggagatttctcaaaaaactaaaaacagctaccatacagtccagtaatctaactagtatttatccaaaggaaaggaaattaatatatcaaaggaatacmtgcagcccatgtttattgcagcaccattcacaattgcaaagataaggaatcaacgtaagtatccatcatggatgaatggttaaagaatatatatatatacacaatggaatactattcagccataaacaagactaacatgatggcatttacagcaacttggatagaactgaagggtcattatcttaagtgacataagccagtcacagaaagaagaatatca

SEQ ID NO: 106993 - DNA, 590 bp, Homo sapiens
catttatatacccaaagacatgygtatccatggatatgtcccttaataattattcagtgtttccaaggattactaatcaaaaactttagggtcattgaagaaaagaattttaaatttatgcagagggtaataaaaatgttcctcacattttattataaataaagaaaatatcctgaattgcagtcatagatgtgtctttatccactttattatttttgtgtaattagttggctgtatcctatcttgttcccaaagggtcttttggtcacctttattccaaatatagtagctctctcagaataggtggtaaaggatattgggtgaaagataaactcacagaacaaggctaacctggacatgaattgagcagagtgcatgttcattcagctgatgatgtaacctcatcttacaattacatatattctctagttatttcttatttatcttatacctaactaagcaactttaggagagaattcatatgttctattattttttacaaaatatgatatatgtatttatgtgtttgtttcatcatatactctaacatatctcagttaactagctagttaagcaaattcattgagtag

SEQ ID NO: 106994 - DNA, 590 bp, Homo sapiens
catttatatacccaaagacatgtgtatccatggatatgtcccttaataattattcagtgtttccaaggattactaatcaaaaactttagggtcattgaagaaaagaattttaaatttatgcagagggtaataaaaatgttcctcacattttattataaataaagaaaatatcctgaattgcagtcatagatgtgtctttatccactttattatttttgtgtaattagttggctgtatcctatcttgttcccaaagggtcttytggtcacctttattccaaatatagtagctctctcagaataggtggtaaaggatattgggtgaaagataaactcacagaacaaggctaacctggacatgaattgagcagagtgcatgttcattcagctgatgatgtaacctcatcttacaattacatatattctctagttatttcttatttatcttatacctaactaagcaactttaggagagaattcatatgttctattattttttacaaaatatgatatatgtatttatgtgtttgtttcatcatatactctaacatatctcagttaactagctagttaagcaaattcattgagtag

SEQ ID NO: 106995 - DNA, 590 bp, Homo sapiens
catttatatacccaaagacatgtgtatccatggatatgtcccttaataattattcagtgtttccaaggattactaatcaaaaactttagggtcattgaagaaaagaattttaaatttatgcagagggtaataaaaatgttcctcacattttattataaataaagaaaatatcctgaattgcagtcatagatgtgtctttatccactttattatttttgtgtaattagttggctgtatcctatcttgttcccaaagggtcttttggtcacctttattccaaatatagtagctctctcagaataggtggtaaaggatattgggtgaaagataaactcacagaacaaggctaacctggacatgaattgagcagagtgcatgttcattcagctgatgatgtaacctcatcttacaattacatatattcyctagttatttcttatttatcttatacctaactaagcaactttaggagagaattcatatgttctattattttttacaaaatatgatatatgtatttatgtgtttgtttcatcatatactctaacatatctcagttaactagctagttaagcaaattcattgagtag

SEQ ID NO: 106996 - DNA, 617 bp, Homo sapiens
aagtgtgtgcatgtgtgtgattttaaaatatggcatatggattccaaagktctgcttacctgttagtaacattattgcaaattcaaaagagctttcaggcataaaaactagttttcataaactttcatctcataaatcaataaaagtttttcttagctattctacccttaagttaatgtcacagaaatagttttcccatagtgacactaggcaataattttttttattggcaaattgttatttattgtatgtccataacaacgtatggcattagaaactatcaggattcccttccactgggaggtcatgggtgacggtggataaactcatatccagaaccagtacaaggaaacttacccagtctctgcagtacagaatgtatgtgccctatcaaagactactcagttagagccatctaatccttctataattattcccataggacagaaataattcccctgagtatatacttgctgaagttatacttcagataagctcaacaatcaaaggataaaaaagtcctttaaaagttgtttttgaaatatcttgactttgacaacttaggtttgatgaattggagacacagaaaaagtctacaaacatcttttctttgagaa

SEQ ID NO: 106997 - DNA, 604 bp, Homo sapiens
aacccacaacccttcactctatagaaatctttctaattcatttacatggctgtatagtattccattgtgtggctatgccatggtttcttcaactaatctcctacatatgggcatttaggatgttcctaatatttttcaatgtatggtaaataatgctgcaataagcagatgtatttggatcttgttggagataatcttcaaggaaaattcctagatgtgagaatcctgggtcaaaaaataaatgttgtgtagttttcttaaatattgccaaatcctcctccataaggttctactattttgtttccccaccagcaatgctgacagagcctgtatcctcacagcctcaccacagagtgttactaaatctttgtaatgtttgccaatctaatgagaaatggtatcataatgtagttttaacttgccttcctctgaaagtgagcaaaggcaagcatctttttatgtgtttaagggtcacttatgtgatgcatgtgtgtgcacagaygtgtgtgtaattttatgctctcagattttgcccatttttttcaagtttcttctcatttgttagtctattgggatatctgaataacactagtgtcgagaatcc

SEQ ID NO: 106998 - DNA, 373 bp, Homo sapiens
ctttcggacgtgattcacacctggcacaacatcccagagttcacactggagagaaaccttacaagtgtaatgagtgtgtcaaagcctttagtgggcagtcaacacttattcaccatcaggcaatccgtagtgtagggaaacttgactaacgtaatgattctcacaacgtcttcagtaatgctacaaccattgtaaatcactggagaagccataatgaagagagatcttacaaatgtaataattgtggcaaatttttcagacatcgttcatacattgcmgttcattggcgaactcatgctggagagaaatcttacaatgtcatgattgtggcaaggtcttcagtcaagcttcatcttttgcaaaacaggagaat

SEQ ID NO: 106999 - DNA, 548 bp, Homo sapiens
acatttgttcatatcttctcctttctaaaatccatttaagatgagagtaaaggagtttaaaacatatacaattacagggacaaagaatgagagaaagacaagagcaagtaagactctgcaataattttttaggagctcayggagaagcaatgttatgatttttcagagcagaggccacaaccccaaggtctgcagtgatagataggccaagaatgactatttcaccctacagaactcaggaaggcccaggacttggtggcagcaggtattactgaggggtggaatgagatgcagaaccaaatgcaggaggattggttcatgtcttaacgtggaactagctggattctcagccccctcctctcccgcaggaaacctgaagtttagtctctaaataaattgaaccagagaaaatctggactcagagaaaccaaacacagaaggggaggaggagaaacgaaacctggacataaattcagaagaattacgtgaaattttaggtatgaattagacaaaccctccctagactctgttccttctgcttcgaaacg

SEQ ID NO: 107000 - DNA, 573 bp, Homo sapiens
tcttttcccaactcccaattcagtgacatcacactggaagcttgacgttggccayagtggagtatttacactatggcagttggccaacagtataagtcagagcttttgactttctgataatttttttttaattaccagaaaatcactggatttcttcatgcccattggctcattattattgctggaccacttactattgattgttgaaaacacctaaataaaataaaaattcagtgtaaaaaaggcaaagtgaaactatatactctataaaattttgtaaaagattgaaaattgtaagacattgatgaaagtgatattgagctgctgttcaaaacacacatgccattgacaaataaagatccagagaattttgtaagttaccaactaaagaaggaaaattggccaaatacacacttgaatgtatgtattacatataaaatatgaagaggccctactgaaaacttgtgaaactgtcaatattttttcaaaagtattccttttacttatagcacaataatccaacctgaaattacaatgtcctcattgatgctattagagatttttttgaaaaat

SEQ ID NO: 107001 - DNA, 548 bp, Homo sapiens
acatttgttcatatcttctcctttctaaaatccatttaagatgagagtaaaggagtttaaaacatatacaattacagggacaaagaatgagagaaagacaagagcaagtaagactctgcaataattttttaggagctcatggagaagcaatgttatgatttttcagagcagaggccacaaccccaaggtctgcagtgatagataggccaagaatgactatttcaccctacagaactcaggaaggcccaggacttggtggcagcaggtattactgaggggtggaatgagatgcagaaccaaatgcaggaggattggttcatgtcttaacgtggaactagctggattctcagccccctcctctcccrcaggaaacctgaagtttagtctctaaataaattgaaccagagaaaatctggactcagagaaaccaaacacagaaggggaggaggagaaacgaaacctggacataaattcagaagaattacgtgaaattttaggtatgaattagacaaaccctccctagactctgttccttctgcttcgaaacg

SEQ ID NO: 107002 - DNA, 521 bp, Homo sapiens
gaaactctatccatttattcatcaaacgttaaccgagtatctgctacgttttaggtactgtaacagtgtttgggaatactgagatgagtaagatagtgttcttgccgttaaaagttcattctagtaggaagacatatgtataattaaattacagtataactagagaggaggtgacagtaagagcacatacacagtcagagaagtttgatagtgaggagagtgatgaactttatgtgatagagctaggaaggacctgagataatggaaggctgaattccagcaccacccccgtggaaagcccttcttyaatccttagtctggtttagctgtccctcatctatgctgtgatggcaacctattgcagttgtagccttatgtatctgtctatctaaactaagtacaccttgaggacagagacagtttttatatcccttgaatgtagcaaaactctgctacatgcttggtgctcagttaagatataaaaaaatgaatgaataaatgaaggaagaagggcattggag

SEQ ID NO: 107003 - DNA, 396 bp, Homo sapiens
cagtttctgacctctggtcaaacaactccaatgtgtgatgtgcctgtttcccacggactatccacrttcccagctgggtttgtggatagtggaattgggtttgtctcaactccacactcgtcagatggttgtctcataggaaaaaccagccaagggatatatattttgggaggctgttctcccagagggttaaggccatacaaccaggctcccaaaacagtttaagaagaaagtcaccctggagtggtactgttggattactaatacatctactgctacccaatggcactcttttttttttttttttttgagatggagtcccgctctgtctccatacaaccaggctcccaaaacagtttaagaagaaagtcaccctagagtggtattgttggatta

SEQ ID NO: 107004 - DNA, 575 bp, Homo sapiens
gaaaattggcacaaattccattcacaaaggctctgccttcgtgatctaaccaactctcaagtgtcctacctcctaataccatcacattgggggttaggtttcaacataagaattttagaaggacacagacattcagatcatagcactcaccatccatcccctccctcctttaccctcccctttcctactttctttcttttcatcatatcaagtagttttactgttgatatgctttggagattatatgtatgtatacacacatgcatgtacatgtttaattttgtgtatgtatgtatttaatttttaaatacctccaacagagaaaagcagagaaataaatgtagaaactatatataggtatatttcaaataattkccaaatgtttgctggatatacttcataaatttttcctaaggaattttaaatgcaatcatatatatcttgatattttaccctcaaatactcaaattcacacatctaaaaatgagaatggtttcctgcattttacagttatattttagcacttaatactaattttctattgctacctaattcatagcttttctcatacctat

SEQ ID NO: 107005 - DNA, 575 bp, Homo sapiens
gaaaattggcacaaattccattcacaaaggctctgccttcgtgatctaaccaactctcaagtgtcctacctcctaataccatcacattgggggttaggtttcaacataagaattttagaaggacacagacattcagatcatagcactcaccatccatcccctccctcctttaccctcccctttcctactttctttcttttcatcatatcaagtagttttactgttgatatgctttggagattatatgtatgtatacacacatgcatgtacatgtttaattttgtgtatgtatgtatttaatttttaaatacctccaacagagaaaagcagagaaataaatgtagaaactatatataggtatatttcaaataatttccaaatgtttgctggatatacttcataaatttttcctaaggaattttaaatgcaatcatatatatcttgatattttaccctcaaatactcaaatwcacacatctaaaaatgagaatggtttcctgcattttacagttatattttagcacttaatactaattttctattgctacctaattcatagcttttctcatacctat

SEQ ID NO: 107006 - DNA, 605 bp, Homo sapiens
gctatgaatgttactgagtttcactgaaaaatctcacacataagcaggggagaagggctaaaaaggaaagagatctagttagataataagatgtagtggagaacacaccagacagtcaaaaatactgagttaactgtcaatttaaataccaaatgatgcatcacattgacattcacagcaccttatctttacagtacggaatgaggaggctccaccagatcatatttatatctgcatctacatctcaaataacataattcgatgataaaaagaaaataataaaagggagacataaatttgttaagtaaaattaagatatttagaaagatagagaatcatccgtcattgccacaaaatctttcttttcctagtattatccaaccatcatatttctaaagtgatattatgtagtaaatataagatatctgcacaaagataaacagtgtttccaaatccacagcacaaaaagtatagcttccccagatatgtatacacatgtttacactacmtaagacaagtgttaacctgtataaagatttacagaagtgtaaatgatgagcattattttttgaagaaaactaatggaggttccactgataaataaa

SEQ ID NO: 107007 - DNA, 533 bp, Homo sapiens
tttaggtcccacttgcaagtgagaacctgcagtatttgggtttctgtccctgcaccggttcacttaagataatggcctccagctccatccatgttgctgcaaatgacataatctcattttttttaaggctgcaaagtattctatggtgtatataaaccactttttatttatccagtctagcaatgataaacatttaggttgattctgtgtctctaatattgtgaatagygctgcagtacgcatatacatgcatgtgtctttatgacagaattatttatcttcctttgggtatatacccaatattgggattgctgagtcgaatggtaattctgttttaagttctttgaggagttgccaaactgctttccacaatggctaaactaatctacattcccaccagcagtgtataagcattcccttttctctaaaacctcaatagcgtctgttattttttgactttttagtaataaccattctaactggtgtgagctggtatctcattgttgttttgattttcatttctctaattaagt

SEQ ID NO: 107008 - DNA, 289 bp, Homo sapiens
caacttgcaaggctgaggcaggggaattgcttgaacctaggaggcagaggttgcagtgagtcgagatcacgccactacattccaagctgggcaacagagtgaggccctgtctcaaaaayaataataaaataaaataacaaagaaaaaaattatagtaaaaaaaaaaaaaaatctgtcagagagtgcttatccaagtgaatcataaacatcaacagcagtaggaaaaatttgtatgatgtgctgatacacacataacacagcatcactgctgaaatattgttcccaaaaa

SEQ ID NO: 107009 - DNA, 423 bp, Homo sapiens
gaattcaactcttaaattacttcacgcytttttttcatttctgttgtattcacatgtaaaaaaaatgtgatcaattctgcatcaaagatttgggagactttattaggcggtcgttatttattaccttatggatgactaaggacattgaaatgtaagatgcatgatgaaaatttaagtggaaaggctgtttgtggttaacttacagaattgagtgatgtagggcattccgagtaatattcttttttttttttttttttttttttttttgagagggaatctcactctgttgcccaggctggagtgcagtggcataatctcggctcactataagctcctcctcccaggttcaagctatgctcctgtctccacctcccaagtagctgagattacagttgcccctgaccacatccagctaatatttct

SEQ ID NO: 107010 - DNA, 566 bp, Homo sapiens
ctaaatcttcttgaatgtagcacaaagaattctgggtattatctcaaacaacagaggttgttacaccttggttcattggcaaaactacaacatattttggtgtgttggccagggagaaaggaattcatcagaagggtgattaggagtgaggctacttgtcctcagttactttctgaggcttcttgtcctaagtttctttttctcaaaaacagctttgaaaacattggctctgttctaatccagtttcctttaatgaagggcctactcattgtgtggaattgaaaggmggtcctagggcaactgaaggttcctggctgagtctatacttcagtgttacctaaaaacccttggactaactccagtccccaacagccaatgagggcgttggcatgagaacttctagtcttttttttcatttcattttcttcttcttttttttgtggctatcatttctcctatccattctttgtatgcaatgttgtgaacgtttttacagcctatggatataatcatactgagtaaagtcagtcagtgtcttagtaatcagatatgtaactcagagttgt

SEQ ID NO: 107011 - DNA, 566 bp, Homo sapiens
ctaaatcttcttgaatgtagcacaaagaattctgggtattatctcaaacaacagaggttgttacaccttggttcattggcaaaactacaacatattttggtgtgttggccagggagaaaggaattcatcagaagggtgattaggagtgaggctacttgtcctcagttactttctgaggcttcttgtcctaagtttctttttctcaaaaacagctttgaaaacattggctctgttctaatccagtttcctttaatgaagggcctactcattgtgtggaattgaaaggaggtcctagggcaactgaaggttcctggctgagtctatacttcagtgttacctaaaaacccttggactaactccagtccccaacagccaatgagggcgttggcatgagaacttctagtcttttttttcatttcattttcttcttcttttttttgtggctatcatttctcctatccattctytgtatgcaatgttgtgaacgtttttacagcctatggatataatcatactgagtaaagtcagtcagtgtcttagtaatcagatatgtaactcagagttgt

SEQ ID NO: 107012 - DNA, 583 bp, Homo sapiens
gatcaggccgccttcagccagagctaattaccaaagttatgccaacttctcggccttccaagatttgtgtctatttctataactayctctaatatctttcccaccagaatgattgaaccccaacacacctccctctctcagcagggtctgcctgttcagagaacacaacttctccttctcgccttacacacaggggcaagaatagattcactcttgcagagagcacatccctttctgttactgaaaatcactttccaaaaaaaaaaaaaaaagcaacacatacacacatactcaccacatacacaggtgggtcagagaaaaaaaacaagtacaaatggcttagggacatgagaagtgtggccctaactttcgctgaaagggatcctattaacattaaccctcacctctgggtcagaagggttggcactctagagcctgccttgaggctttacctactgggaccaaaaggactgctggaaagctattttaggccgggtgcggtggctcaagcctgtaatcccagcactttgggaggcagaggcgggtggatcacctgaggtcaggagttcaagacaagcctggc

SEQ ID NO: 107013 - DNA, 660 bp, Homo sapiens
gaattctatcacaataatgctgtgggttttgttgctgttgttgttgtttgagaccgagtctctctctgttgcccagactggagtgcaatggtgcagtcttggctcactgcaacctctgcctcctgtgctaaagcaattcttgtgtctcagactcccgagtagctgggatgacaggcacctgccaccatgcctggctaatttttgtatttttagtagagacggggtttcgccatgttggtcaggctggtcttgaactcctgacttcaggtgatctgcctgccttggcctcccaaagtgctgcaattacaggcatgagccactgygcccagcctataatgctgttttttttttttaattaactggataattataaacgtgaacacgtgtgcacagaactgatgcatgtgtctgccggcgtggacactcctgggcttccttctggtagctcagccgcctctcttgaccctgaccctcactgcttgatgttaggagacaagcccaaggcatctaggttgctggcttccaccttggaaggccagggcccagcaaagtcaaggtgatgtgatgtggctgagcagggaggccatcttccttccagacagagactctgtcactttggactggactcttgtcccacagtgctggccagggacaggtgca

SEQ ID NO: 107014 - DNA, 507 bp, Homo sapiens
ggacggcgcggcgccggcaggcgagggcgagggcgtgaccctgcaggggaacatcacgctactcaagggcgtggccgtcatcgtggtcgccatcatgggctcgggcatcttcgtgacgyccacgggcgtgctcagggaggcaggctcgccggggctggcgctggtggtgtgggccgcgtgcggcgtcttctccatcgtgggcgcgctctgctacgcggagctgggcaccacatctccaaatcgggcgggatacgcctacatgctggacgtctacggctcgctgcccgcttcctcaagctctggatcggctgctcatcatccggccttcatcgcagtacatcgtggccctggtcttcgccacctacctgctcaagccgctcttccccacctgcccggtgcccgaggaggcagccaagctcgtagcctgccactgcgtgcgtgagtacggggcgccggccgggggttgggaggtcgtagtccctgggtccctgcatccttgcatcacta

SEQ ID NO: 107015 - DNA, 537 bp, Homo sapiens
cttcatcgcagtacatcgtggccctggtcttcgccacctacctgctcaagccgctcttccccacctgcccggtgcccgaggaggcagccaagctcgtagcctgccactscgtgcgtgagtacggggcgccggccgggggttgggaggtcgtagtccctgggtccctgcatccttgcatcactacgcccctggctcccacatctctacatttttgcgttcctggaccgtcccggcagttctaggctaaggtcattggtcccagaaaccaagtgcgtttctttcattcattcttttacacttctccccacaggctgggaatatcttcagtgacgggacagcagggtccctgccctgcccttcggtgggcatttcattcccccacttaagcggttcaggcaagtgccagcctcccgttggccccgctgagcaatactcccagcctcttgcgtggcacccacgtggagtaactgagcaaccggtttattgttaaagctccgattgctgactggttggtgaaaacgaaattgcagttaaaaa

SEQ ID NO: 107016 - DNA, 537 bp, Homo sapiens
cttcatcgcagtacatcgtggccctggtcttcgccacctacctgctcaagccgctcttccccacctgcccggtgcccgaggaggcagccaagctcgtagcctgccactgcgtgcgtgagtacggggcgcsggccgggggttgggaggtcgtagtccctgggtccctgcatccttgcatcactacgcccctggctcccacatctctacatttttgcgttcctggaccgtcccggcagttctaggctaaggtcattggtcccagaaaccaagtgcgtttctttcattcattcttttacacttctccccacaggctgggaatatcttcagtgacgggacagcagggtccctgccctgcccttcggtgggcatttcattcccccacttaagcggttcaggcaagtgccagcctcccgttggccccgctgagcaatactcccagcctcttgcgtggcacccacgtggagtaactgagcaaccggtttattgttaaagctccgattgctgactggttggtgaaaacgaaattgcagttaaaaa

SEQ ID NO: 107017 - DNA, 538 bp, Homo sapiens
cttgaaaaaacgctcaccatcactaatcattagggagatagaaattaaaatcacaattagatatcacctcctatctgtgagaatggccactatcaacaaaaacaacaaacacttgcaagaaggtggagaaaaagggaacctttgtatcctgttggtaggaacataaattagcataaccattaygggaaacagtatggaggatcctcaaaaaactaaaaatagaattactatatgatccagcaatcccacttctgagtatttacctgaaagttttaaaatcagaatgtggaagagacatctgtagtctcatattcactgcagcactagacaatagccaaataatggaataaacctaaatgtctatcagaggataaatgaataccaaaaaattcatctacacacaatggaacactattcaggctttaaaaaataaaaataactttgtaatttgtgacatcacagacggaattggaggacattaccctaagtgaaataggcaaggcacagaaagacaaatgccacagttctcacttatatg

SEQ ID NO: 107018 - DNA, 538 bp, Homo sapiens
cttgaaaaaacgctcaccatcactaatcattagggagatagaaattaaaatcacaattagatatcacctcctatctgtgagaatggccactatcaacaaaaacaacaaacacttgcaagaaggtggagaaaaagggaacctttgtatcctgttggtaggaacataaattagcataaccattacgggaaacagtatggaggatcctcaaaaaactaaaaatagaattactatatgatccagcaatcccacttctgagtatttacctgaaagttttaaaatcagaatgtggaagagacatctgtagtctcatattcactgcagcactagacaatagccaartaatggaataaacctaaatgtctatcagaggataaatgaataccaaaaaattcatctacacacaatggaacactattcaggctttaaaaaataaaaataactttgtaatttgtgacatcacagacggaattggaggacattaccctaagtgaaataggcaaggcacagaaagacaaatgccacagttctcacttatatg

SEQ ID NO: 107019 - DNA, 538 bp, Homo sapiens
cttgaaaaaacgctcaccatcactaatcattagggagatagaaattaaaatcacaattagatatcacctcctatctgtgagaatggccactatcaacaaaaacaacaaacacttgcaagaaggtggagaaaaagggaacctttgtatcctgttggtaggaacataaattagcataaccattacgggaaacagtatggaggatcctcaaaaaactaaaaatagaattactatatgatccagcaatcccacttctgagtatttacctgaaagttttaaaatcagaatgtggaagagacatctgtagtctcatattcactgcagcactagacaatagccaaataatggaataaacctaaatgtctatcagaggataaatgaataccaaaaaattcatctacacacaatggaacactattcaggctttaaaaaataaaaataactttgtaatttgtgacatcacagayggaattggaggacattaccctaagtgaaataggcaaggcacagaaagacaaatgccacagttctcacttatatg

SEQ ID NO: 107020 - DNA, 509 bp, Homo sapiens
gaattcaaatagggaccagatggttgatgcttaaatactctactcatagggtagagatgtaaggacctgggatgcagacattaagggaaggtgaggggtggagctgcatagggaaaatgttgttatatgatacagataaagttccctagggaatctcttggarcttccctcagaagaatagatgaaaagtctgtctgagcatggcaacaactcccagtttctcctcttctctgatggtttatctttcctggctttttgataagatccccaggaagagagtgtaagacagttgcatttcttttggaaggaagctttcttggtcaaataaggaaattccagagagcatccctccttacatctggagggggctgggaacaagacaaggttacggggaccttggttctgagacaccttcaaaggcctctacatgtttaaagagccagcctttggggaatcactttctaagacccaacaacagaacctctggcaacatagtgaagcacaaggtt

SEQ ID NO: 107021 - DNA, 636 bp, Homo sapiens
ttcatctagaacaaaatagataaagtctggacacaagaagtttatatgcttataagaaatgatcaataatgaacaaataagcaaataaatatttagcatgtcaggtggtattgtgaggggaaaagtagaacaaggcaagggacacatggaggcataaaagtcaaaatggggttacatggggggaaggtaggttattattcaaacaaagtggtaaaaatctctgacaaatggcatttgagctgtcttaaacagaatgagagaagaaagcaaaattcccaatagagaaacatgcctagtatgttcaaaatccagcaagagggactgtatggaaggaatagagtcatcctatggaagagtaaaaaaagatgaagtcagaatgtgggggcaagacagaacacatagggctctgtaggccactgcaggccactgtaggggctttgacttttaccctgagtgagatgggaagccactgaatgaaaatgagcagaagaatgaccagttaaagacagaagtgggggataatagaggagactatttaaataactcaggtgagacaaagtggtagcttggaccrggtggtagcagtggttgtagtgacagagaattggttggattcttgatgtatcatacatacat

SEQ ID NO: 107022 - DNA, 485 bp, Homo sapiens
gaattcatctctcactataactgttaaaaaccccagaaacttgcttttctagctttccttgcagtgaggggttgggcacatgacctaggctcaaccaatgagatgcacctactctggtctttgaaatagaagctaattgagcaaagaagcagaagcagaggaaaatatacacatataaatactattcacgaacactattttaagccaggcactgtgctaggctctgggtataccacagggaacaaaacaacatgtgaagtcctccagacctaaccttctagcaatagacaaatacatgagtaaatacacattggcattgatagcagtagttccagtaggggaatctattattcagaactggctgtaaactatggtgtcctttgttcaatatgatgtcagcagagtcctttcctgattggktctgttacataatattatctgtgatccttactgctgtgcagacctacatactcaagactgtttga

SEQ ID NO: 107023 - DNA, 575 bp, Homo sapiens
tacacaccctccactgataccatgaagggctggggtgggaatgtggcctaattactgctgggtggttggtaaaagttctgtctctccactgtgcctcctctcacaccactttagggaggagggggaggagcaccttattactgatgggtgggggatagaagcccatactccctaaattgtcaccactgaccttgcatcaggagggggtcttgttaccacctaggaaggataaagtcatgttttttcctacttggactttttttaataccacctctaagaggcttggaggagattatttcaggctgctgtgggtgaaagtctaggttactcatatggtctttgctggtgtggggcaggggacagaatactttgttttttctttccaatgtttggctaaattgagtagttattatctaaaatttttttctcttcttggatgcttctttcctgaatttttccctagagagagcagacttttacttggggrtgtggggcagtttttatctatgcccattggcctttccaggttgctggcttcataaactctatgtctaagatattaatgtaagaaaaga

SEQ ID NO: 107024 - DNA, 582 bp, Homo sapiens
gcacagctgatggtgaaacagccctcactctctttcccttgacctcttggaaccacagtttcctaaatggtaaaacaaccggtcagatgaacatcttgatagagtggatggtctagagaccagscacatcggcatcacctggaagcttattaaaaccgcagaatctcaggtccctcccagacctactgcattttagaaagatccccccaaggcaattcatgtacacattaaagtttgagaagcccagaaacagcctatattcctgacatactttctttgttcctttctctaaagacagtttcaaattaacagggaccactggtagcctcatattctgctccaaaatactcaccaacatccttctcatcttaactatcacccaagaaaccacattctagccaggtgcagtggctcatgcctataatcccagcactttgggaggccaaggagggaagatcgtttgagctcagcagttcaaaaccagcctaggcaacacagtgagaccctgtctctactaaaattaaaaaaaaaaagaaaaagaaaaagaaaaaagaaaattagctaggcatagtggtgcaggcc

SEQ ID NO: 107025 - DNA, 582 bp, Homo sapiens
gcacagctgatggtgaaacagccctcactctctttcccttgacctcttggaaccacagtttcctaaatggtaaaacaaccggtcagatgaacatcttgatagagtggatggtctagagaccagccacatcggcatcacctggaagcttattaaaaccgcagaatctcaggtccctcccagacctactgcattttagaaagatccccccaaggcaattcatgtacacattaaagtttgagaagcccagaaacagcctatattcctgacatactttctttgttcctttctctaaagacagtttcaaattaacagggaccactggtagcctcatattctgctccaaaatactcaccaacatccttctcatcttaactatcacccaagaaaccacattctagccaggtgcagtggctcatgcctataatcccagcactttgggaggccaaggagggaagatcgtttgagctcagcagttcaaaaccagcctaggcaacacagtgagaccctgtctctactaaaattwaaaaaaaaaagaaaaagaaaaagaaaaaagaaaattagctaggcatagtggtgcaggcc

SEQ ID NO: 107026 - DNA, 597 bp, Homo sapiens
catggaaaggggcaataactcctgggtgttcaccattgccatggcacactgtcgggcatgtcttatagaaagctgcttttgccccatccctgttttagctagtcctcaatttggtctggtgtctgagcccaccttcagagttgagtccgacctcctctacctcactgacactccatgatggccaccactgaggatgcacaggccccacagatgccacttgatcacctttagagaccaggaatcrgctgggcacggtggctcacacctgtaatcccagcactttgggaggccgaggcaggcggatcacgaggtcaagagatcgagaccatcctagctaacatggtgaaaccccgtctctactaaaaatataaaaaaaaaattagccaggtgtggtggtgggtgcctgtagtcccagctactcgggaggctgaggcaggagaatggcatgaacccaggaggtggagcttgcggtgagccaggatcgcgccactgcactccagcctgggtgacagaggcgagactctgtctcaaaaaaataataaatagagagcaggaatccagttcctacagcaccgggcagctccaactcaaacaggt

SEQ ID NO: 107027 - DNA, 518 bp, Homo sapiens
atctagctgagtgttagcattgaaatgtattggtgatgtctgccacagtcatggagggagacattactgctcatacatactttgccatctcagatgagggtactccctttggggctagttgatttgaaaaggtcacactataaactcaggggtggagagaagagttctgattaaccaggtgactttccctcagcaagtgggaagcagaggaagcaacagctctgaaagagaagccactctctgcaggcatggacttgcccttcatttctaaatgagcatgcccagagcsccaaccacagcccagcttcatcgcaacaggtgagagagaaatgcactcttcacattgccctaaaactgctctgtcaactatgacattgaagggctgacactgtgctagcccagaaactgagaaagtcctctgttcccgtggctcagaaaacttccatggctgcctggtcccatttgcagacattgagctgcagcagctaacaagctctgacacaggcggccagcacagc

SEQ ID NO: 107028 - DNA, 518 bp, Homo sapiens
atctagctgagtgttagcattgaaatgtattggtgatgtctgccacagtcatggagggagacattactgctcatacatactttgccatctcagatgagggtactccctttggggctagttgatttgaaaaggtcacactataaactcaggggtggagagaagagttctgattaaccaggtgactttccctcagcaagtgggaagcagaggaagcaacagctctgaaagagaagccactctctgcaggcatggacttgcccttcatttctaaatgagcatgcccagagccccaaccacagcccagcttcatcgcaacaggtgagagagaaatgcactcttcacattgccctaaaactgctctgtcaactatgacattgaagggctgacactgtgctagcccagaaactgagaaagtcctctgttcccgtggctcagaaaacttccrtggctgcctggtcccatttgcagacattgagctgcagcagctaacaagctctgacacaggcggccagcacagc

SEQ ID NO: 107029 - DNA, 518 bp, Homo sapiens
atctagctgagtgttagcattgaaatgtattggtgatgtctgccacagtcatggagggagacattactgctcatacatactttgccatctcagatgagggtactccctttggggctagttgatttgaaaaggtcacactataaactcaggggtggagagaagagttctgattaaccaggtgactttccctcagcaagtgggaagcagaggaagcaacagctctgaaagagaagccactctctgcaggcatggacttgcccttcatttctaaatgagcatgcccagagccccaaccacagcccagcttcatcgcaacaggtgagagagaaatgcactcttcacattgccctaaaactgctctgtcaactatgacattgaagggctgacactgtgctagcccagaaactgagaaagtcctctgttcccgtggctcagaaaacttccatggctgcctggtcccatttgcagacattgagctgcagyagctaacaagctctgacacaggcggccagcacagc

SEQ ID NO: 107030 - DNA, 607 bp, Homo sapiens
agttttgaaactctcattttgttaacacctctcttattttttatattgaatctaaacttcacttttccctgactgtctacccttatttacctctagtaaaattattatattttatcataaatatatgtttctatgactaagctctccactaggttatcaactcctaatatactgttttctttatcatttttgttccccaaggcctgggcacattccatggcatacactgggtaattgacatacgttaaatgaatgaatgaaattcatgtttcgatattctaggtgaagaattgggaattggataaaatatttacatagacttatcattgggaaaaatatgaccctggccattacgataccctgtcccasagttttataactgatttttattaggaaaaaaatgaacaggaaaagaatagccaagaataagtagtttaaaatatcaaaaagtagagtttccttttatttaacagaagagtgaaatcattacactgagattagagtagaattaattgtcttgtgaaacataaacgtaagagaaattttaccggagtgcccaaatctcccaggagtgaaagacatgcaaagaacatatagagaagaattc

SEQ ID NO: 107031 - DNA, 607 bp, Homo sapiens
agttttgaaactctcattttgttaacacctctcttattttttatattgaatctaaacttcacttttccctgactgtctacccttatttacctctagtaaaattattatattttatcataaatatatgtttctatgactaagctctccactaggttatcaactcctaatatactgttttctttatcatttttgttccccaaggcctgggcacattccatggcatacactgggtaattgacatacgttaaatgaatgaatgaaattcatgtttcgatattctaggtgaagaattgggaattggataaaatatttacatagacttatcattgggaaaaatatgaccctggccattacgataccctgtcccagagttttataactgatttttattaggaaaaaaatgaacaggaaaagaatagccaagaataagtagtttaaaatatcaaaaagtagagtttccttttatttaacagaagagtgaaatcattacactgagattagagtagaattaattgtcttgkgaaacataaacgtaagagaaattttaccggagtgcccaaatctcccaggagtgaaagacatgcaaagaacatatagagaagaattc

SEQ ID NO: 107032 - DNA, 395 bp, Homo sapiens
gaattcatctcaattattctaaatggcagtcctcaagtgacatttaggtagtgtatctcagtctttaagaactccggctttggagtcagagaaacatgagcttgagtctcagctgctctcggcttctttgtggatatttgctgataatgggyaacataattatgttttctaaatcttattttcctcattgataaatgggtaaaacaagaacactcattacattggcttgtgtaaattattgttatgcatttttttcatgttcaaacaagcaactaaattattgaaaatgtatctgtctctaagatgcttgaagaacctacagcacttgcctagtgtatgacttatagagagtaggaaggaaatagcacctgccactgttagttgcttaccagttt

SEQ ID NO: 107033 - DNA, 574 bp, Homo sapiens
aatagaagctctcactttgggccatgggtttcaggcttttcagcttgaaggtgtggtttcaccaggaacctacccctgtttgcctagaatttctctgccttctgcttctgtcatttcctcctctgaagaggcacatctaactaccattagaatacagtcgatgactgatcttagctactttctgctggcagagggcattgttttagagaaaatggcggtcaaatttctctcagaggcctacctgaggttcccagtaaaagggagctattgtctgatgctccagttgcctaattgctacaagtttcatggccgccaggcaagaagaaacaagttttaccaggttaagtatgcatggatcaaatatgtttattataaaaagaagagttaaaaatgaaagaatctagtgccaaagattacagaaataaraagtgacatatactaatcattctgaaaacaatattgtgtcccaggttgtttcactcgggtgaaagaaattaaatcttgtatgggagcagttaaattttagaacagatataactgtttacgggaagagatattcccatgggtgttcagg

SEQ ID NO: 107034 - DNA, 606 bp, Homo sapiens
gagggtcaaagcagtcccagtggttcaggatacactccagagaagtgtagactgaagataattgattatccatctacgagagagggaattagatgccccttagttcttttctctctttcagtgagaacctggggtgtctaagggagagaaaaaagggcattcttattttttctcctgtctttttatccccaagtcctggtgacctagacagatgccacgtaaacagatgaatgtgagggtgacctgcacgccccctgcgtcaggggtcctagatgaaggawataatggcatttacctatgccatctgtcctccctattgtcagtagcctttgcgttccctagacctcatttatgccatggatactagcatgacctctatccatgaaatgggggcttaatcagcaataattagtcatgctcacctgtgctgtgtccattgacttccattgtcctgtgcctctggatccctcagatccagtttcccttactagggctttagcctgaaggttgaaattgagtttgaggcaaaaatgtgtctcaggaaagttcacatatttatttaagtgaagtcccagacagccctcaccaaatttgcagccagcagct

SEQ ID NO: 107035 - DNA, 382 bp, Homo sapiens
tcagttttggaaagtcaaggtggttagaattttcagcagagtaagtaaaagaagagtatcctacatagaaaaaaaaaaaaaatccctgacgtgttcagttcagtgtagatcaactcatgcatgygagcgaaatacctaagtcaaaaaaaaaaaaaaagacttaaatgaacactgcctagaactcacaaaggacagggttattgcctgttgcaaagagagtagaaaactaataattcatgaggcatcttttagtgtactaagaagggtctacatgtagctttggtcccacataacgaagcatttaggcaaaaccaagtaatttacctttgtgctagattacagttcaataatatttttaggaatacagaaagatacagcattt

SEQ ID NO: 107036 - DNA, 531 bp, Homo sapiens
ctggccctttctagatccaggtctgctgttgtgtggcctgagtgcccctggctctgtaaagtaagaagaaagaggagagcagaaaagtgagactgagaagagtcgactccaagagagacaaactaaaagagacaaaaagagacgagggcaaagacacaacagagagcctagtggaaggagagatgggcaaagcagagatggggctgtatgtgcataacatttgcctgaattccggtgggtgaaggaataagaaaggtggcaggtggcgtgggggcgggggcagtggtatatgaagccagtgagaatcaacctggctctccctaacatagctttagcgracaccactcccccgacttcggtgatttccacccccccagactgagctacttctccccctccccgtaccgcggggcctccgaacgctccctgcgcactccccaagcccagacctgacatctggctgggcctccgcagctcccgctctcgatttgccaggcagagcccctcctccagcgcagggccctcccccgc

SEQ ID NO: 107037 - DNA, 612 bp, Homo sapiens
cccacctgcttgccccgagctaataaccctgaagcgactaacgaatctaccccattcctccagcccccaccaggattccaagaaacacaatctgaaatctaaattggcccaatactcttttaaaaaattaagtttacaataaaaaccagtagtcaaggtggcaggacagacttctcgggaaaaagaaaaaagaagaaagaaaaagaagtcctaacagactcactcctctgctccccatagcccattgcctgccctagattcactgtcttttcccatcgtagcccaggctgtctatgctacacttcatctgacagcacagagctggtctgtcccagtgcacactgcaaggaagagacatttctcggcacctgtgtgtctgtaggtgcctccagccaaaccctgcatttgaaccattggaaatgcagctgaccttcccgtaggagctgacatccttcactcatagcactcattgggcaatcagacagcatcccagtgacattctccayagctgctggcaatggcctttaattcatctggtatttaaccagggtgaagcatcctctggctgtaacatgtttgttggtgtgagctgagcctggctcatcttccgct

SEQ ID NO: 107038 - DNA, 606 bp, Homo sapiens
gcctctgcctcccaaagtgctgggattacaggtgtgagccactgcacctggcctgcatctgatccttttaaagatcagtttctttgcttcatttacacccaggyatgggtgtgccctttgggctcaggggccagaccacttgttcagtcctaggtgaaagagtcagagcctgtcgtaggctaaggacatcattttgcccattttctctcctgccctcaattaagaaagattcatcccctgctcattggttgttttctgagtttaaaccctggcactgtcctgtgtgttggggcctgtctcttctgtcacacgtcattgtttctgccttctggattcaggaccacaaagctgcaggctgggacgcagccctggggctgaagattgtgctgtgtcacatgggtctagctgctgctgtggtatgtgacactgagattgcatttctgtcccaggcttccttccttctgttgctggccaatccccttcctctacagggcatccctgcctctgcctgcatcccaggcttggtgctcaggggcctgtgctcagccacccgcccctacttcatttcttgatgcaaccttccttagtgttagattctgtgctgta

SEQ ID NO: 107039 - DNA, 606 bp, Homo sapiens
gcctctgcctcccaaagtgctgggattacaggtgtgagccactgcacctggcctgcatctgatccttttaaagatcagtttctttgcttcatttacacccaggtatgggtgtgccctttgggctcaggggccagaccacttgttcagtcctaggtgaaagagtcagagcctgtcgtaggctaaggacatcattttgcccattttctctcctgccctcaattaagaaagattcatcccctgctcattggttgttttctgagtttaaaccctggcactgtcctgtgtgttggggcctgtctcttctgtcacacgtcattgtttctgccttctggattcaggaccacaaagctgcaggctgggacgcagccctggggctgaagattgtgctgtgtcacatgggtctagctgctgctgtggtatgtgacactgagattgcatttctgtcccaggcttccttccttctgttgctggccaatccccttcctctmcagggcatccctgcctctgcctgcatcccaggcttggtgctcaggggcctgtgctcagccacccgcccctacttcatttcttgatgcaaccttccttagtgttagattctgtgctgta

SEQ ID NO: 107040 - DNA, 606 bp, Homo sapiens
gcctctgcctcccaaagtgctgggattacaggtgtgagccactgcacctggcctgcatctgatccttttaaagatcagtttctttgcttcatttacacccaggtatgggtgtgccctttgggctcaggggccagaccacttgttcagtcctaggtgaaagagtcagagcctgtcgtaggctaaggacatcattttgcccattttctctcctgccctcaattaagaaagattcatcccctgctcattggttgttttctgagtttaaaccctggcactgtcctgtgtgttggggcctgtctcttctgtcacacgtcattgtttctgccttctggattcaggaccacaaagctgcaggctgggacgcagccctggggctgaagattgtgctgtgtcacatgggtctagctgctgctgtggtatgtgacactgagattgcatttctgtcccaggcttccttccttctgttgctggccaatccccttcctctacagggcatccctgcctctgcctgcatcccaggcttggtgctcaggggccygtgctcagccacccgcccctacttcatttcttgatgcaaccttccttagtgttagattctgtgctgta

SEQ ID NO: 107041 - DNA, 651 bp, Homo sapiens
tgttaagcactgttacatcttcgtggagaaatgacccatttatcgtcacttaatattcttcttctttactcctgataactttccttgttctgaagtctgctctgcctaaagttcacagagttactcctgctttcttttgattagtgctagtatagtgtatctttctccacctacttactttttttttttttgagacggagtttctctctttgttgcccaggctggagtgcagtggygcgatcttggctcactgcaacctccacctcccgggttcaagtgattctcctgtctcagcctcccgagtagctggaattacatgcacccgccaccacggccagctaatttttctacttttagtaaagatgtggtttcaccatgttggctaggctggtcttgaactcctgaccttagatgatctgcccacttcagcctcccaaagtgctgggattataggcgtgagtcactgcacctggcccatctatttacttttaatctatatgtctttatagttaaagtgagtttcttgtagacaacatatacttgggtcttattttttgatccattctgataatctttgtcttttaatagttacatttagaccattgatgttcaaggtaataacaggtatagttggattaatatcaactgtat

SEQ ID NO: 107042 - DNA, 651 bp, Homo sapiens
tgttaagcactgttacatcttcgtggagaaatgacccatttatcgtcacttaatattcttcttctttactcctgataactttccttgttctgaagtctgctctgcctaaagttcacagagttactcctgctttcttttgattagtgctagtatagtgtatctttctccacctacttactttttttttttttgagacggagtttctctctttgttgcccaggctggagtgcagtggcgcgatcttggctcactgcaacctccacctcccgggttcaagtgattctcctgtctcagcctcccgagtagctggaattacatgcrcccgccaccacggccagctaatttttctacttttagtaaagatgtggtttcaccatgttggctaggctggtcttgaactcctgaccttagatgatctgcccacttcagcctcccaaagtgctgggattataggcgtgagtcactgcacctggcccatctatttacttttaatctatatgtctttatagttaaagtgagtttcttgtagacaacatatacttgggtcttattttttgatccattctgataatctttgtcttttaatagttacatttagaccattgatgttcaaggtaataacaggtatagttggattaatatcaactgtat

SEQ ID NO: 107043 - DNA, 651 bp, Homo sapiens
tgttaagcactgttacatcttcgtggagaaatgacccatttatcgtcacttaatattcttcttctttactcctgataactttccttgttctgaagtctgctctgcctaaagttcacagagttactcctgctttcttttgattagtgctagtatagtgtatctttctccacctacttactttttttttttttgagacggagtttctctctttgttgcccaggctggagtgcagtggcgcgatcttggctcactgcaacctccacctcccgggttcaagtgattctcctgtctcagcctcccgagtagctggaattacatgcacccgccaccacggccagctaatttttctacttttagtaaagatgtggtttcaccatgttggctaggctggtcttgaactcctgaccttagatgatctgcccacytcagcctcccaaagtgctgggattataggcgtgagtcactgcacctggcccatctatttacttttaatctatatgtctttatagttaaagtgagtttcttgtagacaacatatacttgggtcttattttttgatccattctgataatctttgtcttttaatagttacatttagaccattgatgttcaaggtaataacaggtatagttggattaatatcaactgtat

SEQ ID NO: 107044 - DNA, 651 bp, Homo sapiens
tgttaagcactgttacatcttcgtggagaaatgacccatttatcgtcacttaatattcttcttctttactcctgataactttccttgttctgaagtctgctctgcctaaagttcacagagttactcctgctttcttttgattagtgctagtatagtgtatctttctccacctacttactttttttttttttgagacggagtttctctctttgttgcccaggctggagtgcagtggcgcgatcttggctcactgcaacctccacctcccgggttcaagtgattctcctgtctcagcctcccgagtagctggaattacatgcacccgccaccacggccagctaatttttctacttttagtaaagatgtggtttcaccatgttggctaggctggtcttgaactcctgaccttagatgatctgcccacttcagcctcccaaagtgctgggattataggcgtgagtcactgcrcctggcccatctatttacttttaatctatatgtctttatagttaaagtgagtttcttgtagacaacatatacttgggtcttattttttgatccattctgataatctttgtcttttaatagttacatttagaccattgatgttcaaggtaataacaggtatagttggattaatatcaactgtat

SEQ ID NO: 107045 - DNA, 510 bp, Homo sapiens
ttttgtttagctggactttttttttttttttaaccctccccccttccacccctcctttttcttttctttttttttttttctttcttaaatgttcttttcttggaagaagttgttcctttgccaaacataaatgaaactttggctccaagatcagctcaaaatttactagctgataaattggaagtagggagtgcrttgtgaaggtgggaggagaagggagagggggagggaggttttcatttggggggcaagttcaaacttggaatcagaagctattaaagtgtctgatgtgtgctgagtcatatggaggtgggggcaggggatgacgctggctccttgccagacacacgtactgcccaggttgatgaacgagcctccaaaggcactacaacaggattataatttcactagcattttaaacataatattagaagccacgtgcatgacaccgagcaagcaatcagcatgggcctcttgtgtttatgagactggtcttggagtatacatctt

SEQ ID NO: 107046 - DNA, 510 bp, Homo sapiens
ttttgtttagctggactttttttttttttttaaccctccccccttccacccctcctttttcttttctttttttttttttctttcttaaatgttcttttcttggaagaagttgttcctttgccaaacataaatgaaactttggctccaagatcagctcaaaatttactagctgataaattggaagtagggagtgcgttgtgaaggtgggaggagaagggagagggggagggaggttttcatttggggggcaagttcaaacttggaatcagaagctattaaagtgtctgrtgtgtgctgagtcatatggaggtgggggcaggggatgacgctggctccttgccagacacacgtactgcccaggttgatgaacgagcctccaaaggcactacaacaggattataatttcactagcattttaaacataatattagaagccacgtgcatgacaccgagcaagcaatcagcatgggcctcttgtgtttatgagactggtcttggagtatacatctt

SEQ ID NO: 107047 - DNA, 641 bp, Homo sapiens
cgcttgtctgcaaagtaagaatcctttactcctgttactcatttttcctccctctcttcttttcttccttttgtttgttgcagaaggttgagtaaattgcactcctcagtccatggcccattatttatcttgtttgcttatttatttcatcyctattccttcatcctagtttttcttcctccctcccttaggcaaacactcttatttgtgtttaatttagatcctttggtttgtatgtattcttagaaaacattcatttttttaatccatgtatttttaatttaaaaaaatggtactttgctatatatctctttttgttccttacttttttcacccagcactgtttatcaattcatctgtgttattagatgctcagccaggctgttcatgctcactgttgcttcattctccatgatgtatactcaccatatgctgcctacctaatctgcattgatggatttccagattgccgccaacttcctgtcaccacaaacaacactataatgaacatcttcaaagatatctccttatggatccgggtgagatatccttggaaatacatgtagggtccattttaatttgactaagttgtgtcagattgctcaccagaaagcctgttcctggagacactcccagcagca

SEQ ID NO: 107048 - DNA, 598 bp, Homo sapiens
gccaattgcttgagtaagtgaataaaataataccctcatcctaacataatttcataaatcaaagattatcatcaaaggggtgttagagacggagagactctggagcttatcctttgttctacctggaaatgaattgacttggaatctatgtgacttgcccaagtcaaaagctgtaaacaaacagggctcagaaaaagggtcttctctaggcctacccttcacatactcagaagcatgtgcacttgtaggaggaagcctgtccagccgcacttggtctctgagtgcttacagcagccaagcagcctcctctttggctgctaccaagctgacctttgattcgagcttcccacaagccattatttcttaaaatcatggaatcatcaaattctctagtgcttttttttttcatttttttcttttctctgtgcttcacactgacccatttcttctcattgacccatgaagaagtagcaaaaagagagatgtgcacaytgagtcagagcctttatgtgctatgatccaatatgtaccacactcccattagttggctggaaagctatctggggttttgagaatctagacctctgatttccaagca

SEQ ID NO: 107049 - DNA, 610 bp, Homo sapiens
acggaattagctagggagaagaccttcctcctcaattttttggaatagtttcagtaggagcagtatcagctcttttttgtacatcctgtcgaagttggcagtgagtccatcaggtcctgtgcttttttttttttttttttttttttgggttggtaggctatttatcactgattcaattttggagttcattattggtgtgttcagggattcaatttcttccttgttcagtcttgggagggtgtwtgtgtccaggaatttcttcatatcttctacattttctgggttgtgtgcatagacgtgttcataatactctctgacagttatttgtatttctgtggagtcactggtaatatcccttttgtcatttctaattgtgtttgtttggatcttctcacttttcttctttattagtctacctagtgatgtatttttctttcatttttttccaaaaaccaactcctatatttattgatcttttgattggttgtttgtgtctcaatctccttcagttctgctctgattttggttatttttttgtcttctgctagctttggggttgttttactcttggttctctagttcttttagttgtgatattatgttattaaat

SEQ ID NO: 107050 - DNA, 502 bp, Homo sapiens
acatcacattgcccccaaatgccactggggaccagtggtgcagagtgaatcaatcggtgactgkgatacacagtttagtttgtcctctgtcataagaataaatatcagatatcataatcagggaaagcacaaagaagagagagcttttgagagctgtttacctagaatttaaattcttcatgttcactttagtacctctttaaatgctcaattcctgcgaaaacatgtattgtaacccagtgctatcactctaaaagctgtggtagaaggtgtggagttttaagtatggaagagggtatgtgctaaatagaaaaggtaaatagaaagctttttaaaaatctgggtaaatgcacacacatatccacatgcaggatgcacaaatgaaccctatgagggctctgacactaagaaactggcagtacctggactacagattcagcaggaacaagtccacaaactgagcaggcagttaatgagcttagcacccatcatccctggctca

SEQ ID NO: 107051 - DNA, 546 bp, Homo sapiens
cactttgtcatctttgcaactacagcgtttaacaagggctgggagatttcaactaaaacagacagaatgaactttcttttagggatcttagaacattttgcatggataggtggagaatttgaataaaatgacctatagggataactgtctttctaaaggtctaaaaacaaactgtccccagttcattaaccaacatatttattgccactagaaatcaattttcaaagagtggtaaaaatgacagggactgtagccactgcccaaaacccgactgacagggtctcagcactaaatcaagtaaaatttaataagtgtcactgtcccaggtgtgacagctaggatagaaatcattccatgtctggcccagacaggaggctaagggactagttaccctgggcagttaggaggcatacacttgagggaagaggaagttatgctttctatagggacatgtttcctatccttaatgagtttccctcctataagaagacacacaagtttaggataayaaaatttacccatacaactttacaaatttggcagcaa

SEQ ID NO: 107052 - DNA, 356 bp, Homo sapiens
gcaggaaggtggaaagggacatccggccacgccaggccagggccaggcagggctctttgtctccatctgggattcattttcatgagcagctgggtatccctttgcacctgtgggcaggtgggggttgaaaggtgagaggccaagcccccagcccctgtctagccaagaacaggcagagagactccccaagccttggcttctccatgtgaaatggggcasagggaggttctggggagggtgggtcacccacacaagagggggagcccacgatgtggggggatcaggtgggacctgttttggggcatctggaggtagctgctgggcccatgtaggctggagttgacttctgccccagc

SEQ ID NO: 107053 - DNA, 496 bp, Homo sapiens
tcatgtccttgggaacataatctgtaaccatgtggcaatactttgttttagtctcagccatttttcaacaggaagtagcctcttcttgtgctaaatcagataagccagtttgtcaatctgggtggtgccagctgatccatcaagggcagggtttacaaaatatcttaagcactgatcttgagagcagtttagggagggtcaaaaatcttgtagcctccagctgcatggcttctgggccatggtttctaatcttgtgcctagttcattggtctggtccccaggaaaaaaggaaatgtatcttgggaagtgcctgttatcatctttgttttagactatraactgtaaaccaggctcctcccaaagttgcttcagcctatgcccaggatgggcaaatacagcttaagggttggaaacaaaatggaattgtttgggtccaatctcttccactgtcacaaatttgcaatgacagtttcaaaacctgcctatcacaccttta

SEQ ID NO: 107054 - DNA, 580 bp, Homo sapiens
tcctttctttcatgggtacccttgaaaggaacatgatggaatgagattagaagccacattgcagtaggcagagggacaattgaggtgtgaaactatacatacacctgtaggctttcaaaatgcttawctgagaagggaaagaaaaaaaaaggtcttgtttttttagttgcaagaagataaagtgttgagggagttaagaagggagatatttaggctgaatgaaaatattgagtggggagatgcatatctgcatatctgatgaagcaatgtgttaggggacacaggtgattagaatcaagaacaggagaaaagagtaacttttgacatatgtccctccttctgaccagctaccttgtctatcttcttgtagcacttgacacctagtctgatgtgcccattctagtccccaatgacaacaaatgccttgaacctggtccactggcaagcagaggtctgcttttgcacagacataatttttgaaactttatccttgaggagtgtccccaggaaaaattcaatgacctcagattccctgaggtacagagagataggactactctttctattttagatactcctc

SEQ ID NO: 107055 - DNA, 624 bp, Homo sapiens
ccttttttgtcaatagttttggtcttgaatctattttgtctgatatgagtatagctactccttcttttgtttgatttccattggcatggaatatctttttctatccttttattttcagtctatgtgtgtctttataggtgaagtgtgtttcttgtaggcaacacatcattgggcattgttttttcatccattcagccagtctatgtcttttgattggggagtttagtccattcacattcaatgttattattgataagtaaggacttactcctgcctttgattatttgttttctggttgttttttgtacttctctytctttctttctttctttctttctttctttctttctttctttctttctttctttcttttctgccttttgtcctttcttccttttagtgatggtgatttttgtctggtgatgtgacttaatttctttctttttattttttgtgtattcattgtatatttctttgtttaaggttaccacaaggcttgcaaatactatttttgtaacacatgattttaaactgataacaacttaaccctgttggtataagcaaacaaacaagaaaaagaaaactactaaaggctctactctttaagtttgtcccccaactttt

SEQ ID NO: 107056 - DNA, 589 bp, Homo sapiens
attatactatctttcccaagagtatttgcatttttaaagaatggtaaaaataacaccaaccatctttgaaaatgtcatcacttctcatatactgtgttaagcatgctgtccttacccttgaagggaagtattattatcccagttttgcagatgaggacactaaggaattggaaagttgtctctcaaagtacacagctaataaatgatgtaccaaggattcaacccaaatctgcccagcacaaatagctgtgttttgttttttaatacttaaaacccttaaaaaaatgtttatccaaatatcagttatctacatgttttcttcactcttttggcctyaaatcctcaaccatctttatcaatatttacttaatttttttcaataaatttgcttttttactgtagatttgattcatgtccaagggatttatctgcataaacaaaaacccctatcaattgtacttcattgaatgctcaatttattaaatatatatttaataatctttaaacaagtttatatagacatgaatggacacatattattaatattttcttaaacaatttaagccacatttacaaatttagtgtgact

SEQ ID NO: 107057 - DNA, 508 bp, Homo sapiens
ctcataagtagaagcaaagctatgaggatgcaaaggcataagaatgacacagtggactttagggactcaaagggaaagagtaggaagggggtgaaggataaaagactacaaattgggtgcagtatatactgcttgggtgatggatgcatggaaatctcacagatcaccactaaagaacttactcatgtaaccaaacaccaccttttccccaataacttatggaaactaaaaaaaattaaaaagtatttcacctttttttggaaagaaaactaaactaataacttgtttattgggtatgaaaaagttgttctcacaggaaagacaaagcagattctgcaaaagacaataggcattcatttcagagacagagactgaggtctgcagtcagatggattctcctccaaaaacgtaattgcaatgyccagcaaactcatgagccaatagctgtctcactatcactgtagtaatgtatcaatagataggaagcttctggtaacttttagaccac

SEQ ID NO: 107058 - DNA, 630 bp, Homo sapiens
aagctcatctgtctcaattctgctaaatcagtttttactccttcagtcactttccaatttcccaattttgttgtcatctttaatactttcatctccttccttactcttctatcactgaggattcaggaaggactagagggccaggatgtggtggctcacgcctataatcccaacactttgagaggccaagcattgcttgagcccaggagattgaggcagcctgcagtgagctaggattgtaccactgcactctagcctaggttatagagtgactccttgtcttaaaatttaaaaaaaaaaaaaaagatgaaggaatagagataaagatacatgctcaatgctgttttaacagggtagtgctttctgtgaaagggttacctatggccagttccagcaacagaaacacttgctatcyttaataaatatacaaacctcagctggctgctggctgaaaaagaggctccaaactgcaaggcaactgccattgaatgttcagttggttaagttatacatccttaggtggatttcaaattcaggcatccaggtatattttattcttctccaggttccttcttggggataatagtcaatttaataaattagtgtttttatagtgcaaaacaacctagg

SEQ ID NO: 107059 - DNA, 568 bp, Homo sapiens
tgagtaatgagtgaatccttaagctgggggtggctgtgagaagagtgacaaggttagtggccacgatgctgtgggagaccaggctcttcactatagtttaagtggaatgaacccctcattgtttccaaamtaacgatcctcatctgagaagagaagttcatttggaaccccactgtcaccttctcagggccaccacggagtgtatgctcatcagggacttgggagaccactttggctcacccctgcacccaccgctttgctgacatccaaggggctgggggcccaagtctggggagctcaatccttcatccatgtctgatctcagcagcatgtcccattccagttcactattaaaaattgtatttctacagctcttttcatagaaaaaaaaattgtgttccttgtcttagcatggtgcatttctgcagttggactgaggtgttactaaagctagagttttctactcagagagaggagaggactccagactgccggtgcaagagatacgtatgtacatgcatgtgtctggaaagaaaattctgagatcaataaatctaccaagaatgag

SEQ ID NO: 107060 - DNA, 560 bp, Homo sapiens
cctgtgacgtaatacaacatatcacaaaacactttaacagatagcttgttactagtttttaggcctggatattcatattttcttatcagggctcaataggtcagaaatgtcacttcttagattctacaaaaatcatattttgaccttatygaatcaaaacacaggttctattctgtgatataaaatggaacattacaaagcattttcacagatagcttgtttctagtttttaggactggatattcataagttcctataacaaattaataggaaatgttccttcttagattctacaagaagagtgtttgggacctgttttatcaaaattcaggttcaattctgtcatataaaacagcacatcacaaagagttttcacagatagcttgtttctagtttttaggactgtatatttgtattttcttataagggctcaataggtttagaaatgtcactttttagattctataaaaagagtgtttcaatcttgttgaatcaaaacacaggttccattctgtgataaaaaagaaaaaacagcaaaacataaagcattttcacagata

SEQ ID NO: 107061 - DNA, 547 bp, Homo sapiens
cactgtacttctctcactaccctggacacatccaccttttcaacctcagggcttctgtaccaactgttctcggaagcattctttccctcctgtcacccatccctcagatattagttaaaatgtcacttccatgggatgccttccttgacctgcatcccagcatcctccatttctccccccaacacaaaggccaaactttacttcataggttcttgtcatacttaacttttagcagttaacacagatataaatracctcttcatggctggctgagtctctttcaatgtgacatatcatctatgagactagcaacagtctctctttataccagtctgtggcccaggggttggcgacccctgatgtagggcagttgcatttattaccagcacacctatgttgtatagtgcctggcataaaccaggtagccaataaaaagctattgattaaatgcaggacttataaggtaaggtttattttttctcttaaaggagaaaaaaatgctttaggtaaaggtaacatgctgtacctgtgtcagatgcaaataaga

SEQ ID NO: 107062 - DNA, 631 bp, Homo sapiens
tactggtgaggtcctgactctcatatgaggacacaatacacagttagaatattggtcacatcccatgtggatctggccaaaagtcagatggtggatcatatctggacccagcttacaggtccagtgatgactcttatacstggaccccaccaataagagaggtgttgactctctctcatagctgggattaggccaaaaaataaagttctgggttttctactttaaaaaatatcacaggtgattaccacacacatgcatattctgtaaagccctcagatggtacagagagtgtcatcataggacccagtaccacactgaggttgtgactattgtatgcacactcagctgactgttaaaattgtcacctttacataggagagagcaaaatagtgagttcctgaatctcactgacagacacagtccacagttggatcatgtctgtcacatgtggattgagccacaggagggatgttgaccaatttctgtaaccagataacaggaacaaaaatgactctcctacctggacccaaaaataagagagatgtttactctcatgcctgggcttagggcaatgggtgagatcctacatttggtattgtaagaaacacctgggcaagcacaaaggtctcaa

SEQ ID NO: 107063 - DNA, 631 bp, Homo sapiens
tactggtgaggtcctgactctcatatgaggacacaatacacagttagaatattggtcacatcccatgtggatctggccaaaagtcagatggtggatcatatctggacccagcttacaggtccagtgatgactcttatacgtggaccccaccaataagagaggtgttgactctctctcatagctgggattaggccaaaaaataaagttctgggttttctactttaaaaaatatcacaggtgattaccacacacatgcatattctgtaaagccctcagatggtacagagagtgtcatcataggacccagtaccacactgaggttgtgactattgtatgcacactcagctgactgttaaaattgtcacctttacataggagasagcaaaatagtgagttcctgaatctcactgacagacacagtccacagttggatcatgtctgtcacatgtggattgagccacaggagggatgttgaccaatttctgtaaccagataacaggaacaaaaatgactctcctacctggacccaaaaataagagagatgtttactctcatgcctgggcttagggcaatgggtgagatcctacatttggtattgtaagaaacacctgggcaagcacaaaggtctcaa

SEQ ID NO: 107064 - DNA, 555 bp, Homo sapiens
ctggcattcatccaccctcttctcttgagtgattcataagaatatccccttcttccactaaagttaatacttctacatgagatttaaattctatacccttgaaatttcttaggaatctagtataataaattgatttttgtctctcttcccagacacagtctgtcttctcaactgttttattttattttgttttaacttaaaatatatttaattctcattagagttactaatcttaatgctacctgtcctttactgctctcctggacttcttttttcactgtcaaattagtggccaatgagcactgtctctttctcaactattgctgaatattcactcccagcatgrctcctctcctattgatctattacaataactcctcgtaaccttcattcactacacctaagcatcatttttcagtccttgtctgactcaaccttttatatgaagttgttgaccaactgcttctccagatatttcctttcgttgccttccataacaccacatgtccattttataattgttttctctgacactctgtttcctttaaagcttac

SEQ ID NO: 107065 - DNA, 346 bp, Homo sapiens
aatagactcactcaacaaagggttgacacaaacctgcaatttgtaaaaaggacaatatctgcaaagcacaataaggcaaaccacagtaaaaaggtgtatgcttgtatactggtaaatatgtaaagtgtactatctatacctcctgattttccagttttacatgattactttttcttggctaggaagtacagatcaagaagattaagcrcagtacccaagggtggcagtgttatggtcaaacatttatgtgtcaagcagatttttaggtgcaatgcatacaaaggtgagaaaactcaatattgtctctgatttcttgtaattactgtctagtggggacacaggtaat

SEQ ID NO: 107066 - DNA, 617 bp, Homo sapiens
agctatatggatgaagctggaggccattgtattattcagactaacacagcaacagaaaaccaaatactgcatgttttgactttataactccctcttatagagagagctaaatattaaatacataaggacacaaagaagggaacaacaggtagtgggttctacttgagggtgaaaggtgagaggagggtgaggattgataaactactatcagattctctgcttcttacctggatgatgaaatagtctgtacaccaaacccctgtgagacacaatttgcctatataccaaacctgtayatgtacccctgaacttaaaataaaagttaaaaaaaaaggaaagtatatgccttagctacaaactattatataaatatatactttaatatataaacaatatacaattgaaattgagatcattattactgaaaatattgttaagattatgaagaagtgaacacaagatttttttatggttttgttggacaacttgtctttttagagtatagatgtttagctcatattttttgtgccttgtaaatcattacatatataattatatacaagctacaaaaggatctaatatatactttcctacactattttaatatctgatttaga

SEQ ID NO: 107067 - DNA, 590 bp, Homo sapiens
tttattctttctatgatatccatttgtatttttgctagcatctaatttgcattccttgggctaagttagcttttaacttccatggccaacatgactctcattagratattttgattactagttcatattagaaaagaatcccatcccatcaacaaggattgttgtgtgagtagacagaaacttctatgtatacgttggatgttatgatgtgattttggtctggaattctctctgaaactgaagatattttcatggctcttcatagaaaaggcattggatgctgaatccaaagacctaaacaagtgatttcggataagttacttactctctctgagcctcagtatttacatttttaaagcaaaggcatttgaagagatgaatgatcttttcccaggataaataagagctgtgactattctgaacaccaatatatttttggtgatacatcatgggatgcttccatttggtctgtccatgagtgctggaggaagggagaaaagaggttatgtagccattgtatatcgtgacataaaaaaaaacaccccaaaatgtaatgtcttaaaataacaatgtattgttatattccacaa

SEQ ID NO: 107068 - DNA, 590 bp, Homo sapiens
tttattctttctatgatatccatttgtatttttgctagcatctaatttgcattccttgggctaagttagcttttaacttccatggccaacatgactctcattagaatattttgattactagttcatattagaaaagaatcccatcccatcaacaaggattgttgtgtgagtagacagaaacttctatgtatacgttggatgttatgatgtgattttrgtctggaattctctctgaaactgaagatattttcatggctcttcatagaaaaggcattggatgctgaatccaaagacctaaacaagtgatttcggataagttacttactctctctgagcctcagtatttacatttttaaagcaaaggcatttgaagagatgaatgatcttttcccaggataaataagagctgtgactattctgaacaccaatatatttttggtgatacatcatgggatgcttccatttggtctgtccatgagtgctggaggaagggagaaaagaggttatgtagccattgtatatcgtgacataaaaaaaaacaccccaaaatgtaatgtcttaaaataacaatgtattgttatattccacaa

SEQ ID NO: 107069 - DNA, 590 bp, Homo sapiens
tttattctttctatgatatccatttgtatttttgctagcatctaatttgcattccttgggctaagttagcttttaacttccatggccaacatgactctcattagaatattttgattactagttcatattagaaaagaatcccatcccatcaacaaggattgttgtgtgagtagacagaaacttctatgtatacgttggatgttatgatgtgattttggtctggaattctctctgaaactgaagatattttcatggctcttcatagaaaaggcattggatgctgaatccaaagacctaaacaagtgatttcggataagttacttactctctctgagcctcagtatttacatttttaaagcaaaggcatttgaagagatgaatgatcttttcccaggataaataagagctgtgactattctgaacaccaatatatttttggtgatayatcatgggatgcttccatttggtctgtccatgagtgctggaggaagggagaaaagaggttatgtagccattgtatatcgtgacataaaaaaaaacaccccaaaatgtaatgtcttaaaataacaatgtattgttatattccacaa

SEQ ID NO: 107070 - DNA, 590 bp, Homo sapiens
tttattctttctatgatatccatttgtatttttgctagcatctaatttgcattccttgggctaagttagcttttaacttccatggccaacatgactctcattagaatattttgattactagttcatattagaaaagaatcccatcccatcaacaaggattgttgtgtgagtagacagaaacttctatgtatacgttggatgttatgatgtgattttggtctggaattctctctgaaactgaagatattttcatggctcttcatagaaaaggcattggatgctgaatccaaagacctaaacaagtgatttcggataagttacttactctctctgagcctcagtatttacatttttaaagcaaaggcatttgaagagatgaatgatcttttcccaggataaataagagctgtgactattctgaacaccaatatatttttggtgatacatcatgggatgcttccatttggtctgtccatgagtgctggaggaagggagaaaagaggttatgtagccattgtatatygtgacataaaaaaaaacaccccaaaatgtaatgtcttaaaataacaatgtattgttatattccacaa

SEQ ID NO: 107071 - DNA, 492 bp, Homo sapiens
aatcattgtgcaagtttggggagcaggtttctttgaaaatatagatcaaaaccagatgcagagaggccctgggtttagtacatatgtagacttgcatattatgagtggcaacagcatctaattggatggaatttgattatttgaggcagatggagaggtgcttaaaatcctagaaagaaatgattccacaattctctaacacttctsaattaaaacagaaaagaaaactccactcactctcttactgtcctcctctgtagggttcttctctctttccctgctttaatgccagggtgttgcatgggagatggggatctttgatactggggttgatgcaagcaactctaatctaccaggctctgattcctgcctgtctcagaactctctctctctctgaccatactcctcacatctgaggctgagccagcctagcctcctggaatttccacgtacacaatggccttctaaccaccacacctccctagcatcctc

SEQ ID NO: 107072 - DNA, 572 bp, Homo sapiens
gaaccaaacctttgtgttttctttcacttttctccctggaaaaccctggcatacaaagaagaaatgatttcaaccaccaatccactcaktgacttcagtcctgactgtggaaggaccttaaattagaacacatagatttctataattgctgctatagttttgggaaattgtctacacttttaacaaaaacaccccccgctttatgagtcagggtcaagaaggtagatgttaaataatttaactggtagcacctaaaactttgcacataaaatactcagctcatttggtagctatttaaatttctaactaaccaggggaggcattttccacctgtcatagttggatcctacaaaggttgggcctcaatgctaggtctaaccccaaagtccaaatcaataaagaaaaccatacccttctcgtatcttagcctcacaatgggactgatcattttagctcctttctaaaaagcaaatgcattcttaccttgagctaaggcaatctcaatagacatcaaggtaacgtaccatgtttgtcaaaacaagtgaatatagacctgggttcaattcccagct

SEQ ID NO: 107073 - DNA, 572 bp, Homo sapiens
gaaccaaacctttgtgttttctttcacttttctccctggaaaaccctggcatacaaagaagaaatgatttcaaccaccaatccactcagtgacttcagtcctgactgtggaaggaccttaaattagaacacatagatttctataattgctgctatagttytgggaaattgtctacacttttaacaaaaacaccccccgctttatgagtcagggtcaagaaggtagatgttaaataatttaactggtagcacctaaaactttgcacataaaatactcagctcatttggtagctatttaaatttctaactaaccaggggaggcattttccacctgtcatagttggatcctacaaaggttgggcctcaatgctaggtctaaccccaaagtccaaatcaataaagaaaaccatacccttctcgtatcttagcctcacaatgggactgatcattttagctcctttctaaaaagcaaatgcattcttaccttgagctaaggcaatctcaatagacatcaaggtaacgtaccatgtttgtcaaaacaagtgaatatagacctgggttcaattcccagct

SEQ ID NO: 107074 - DNA, 572 bp, Homo sapiens
gaaccaaacctttgtgttttctttcacttttctccctggaaaaccctggcatacaaagaagaaatgatttcaaccaccaatccactcagtgacttcagtcctgactgtggaaggaccttaaattagaacacatagatttctataattgctgctatagttttgggaaawtgtctacacttttaacaaaaacaccccccgctttatgagtcagggtcaagaaggtagatgttaaataatttaactggtagcacctaaaactttgcacataaaatactcagctcatttggtagctatttaaatttctaactaaccaggggaggcattttccacctgtcatagttggatcctacaaaggttgggcctcaatgctaggtctaaccccaaagtccaaatcaataaagaaaaccatacccttctcgtatcttagcctcacaatgggactgatcattttagctcctttctaaaaagcaaatgcattcttaccttgagctaaggcaatctcaatagacatcaaggtaacgtaccatgtttgtcaaaacaagtgaatatagacctgggttcaattcccagct

SEQ ID NO: 107075 - DNA, 572 bp, Homo sapiens
gaaccaaacctttgtgttttctttcacttttctccctggaaaaccctggcatacaaagaagaaatgatttcaaccaccaatccactcagtgacttcagtcctgactgtggaaggaccttaaattagaacacatagatttctataattgctgctatagttttgggaaattgtctacacttttaacaaaaacaccccccrctttatgagtcagggtcaagaaggtagatgttaaataatttaactggtagcacctaaaactttgcacataaaatactcagctcatttggtagctatttaaatttctaactaaccaggggaggcattttccacctgtcatagttggatcctacaaaggttgggcctcaatgctaggtctaaccccaaagtccaaatcaataaagaaaaccatacccttctcgtatcttagcctcacaatgggactgatcattttagctcctttctaaaaagcaaatgcattcttaccttgagctaaggcaatctcaatagacatcaaggtaacgtaccatgtttgtcaaaacaagtgaatatagacctgggttcaattcccagct

SEQ ID NO: 107076 - DNA, 543 bp, Homo sapiens
gacatggacctcatttcacgggcatggtaaccagtctgatttttttcctaagtgaaatgggacttggctaggtgtggtggctcatgtccataatcccgccactttggaaggctgaggygggaagattgcttgagctcagcagatcaaggccagcctggacaacatgatgaaaccccatctttacaaaacatacagaaattggtcaggtgtggtggtgtgtgctcgcagtcccagctacttgggaggctgaggtgtgaggctccctttagcctgggaggttgatgctgcactgagctatgatcacaccactgcactccagcctgggcaacagagtgagaccctgtctcagataaaaagaagaaagaaggaagaaggaagaagaaggaggaagaagaaggagaagatggagaagaaggagaaggaaaataagaaataggatcccgctgaaacatcttaagggggaaggggactgacatgacagatttatgaatttccaaggtcactatggctgctgtgcagagaataggtgagaagaaacaagag

SEQ ID NO: 107077 - DNA, 603 bp, Homo sapiens
  misc_feature (1)...(603): n = A,T,C or G
gcttctggtagggccaagtcattgccaagagctctgacatcatcttttccctaaaaccttgtctaacacaactgcccccatccccaaaccattctgtgtctcactggcttcattttgcccccttcagattagttttcaccatctgtagcatcttattatttcttggattcatgtgtaaacacttgaacacaatggaagacactaatgagtgttgttcatccttcagtctcctctcctaagccagtttctagaaccccataggctttaggaatatttagcaacaaatatttgaatatataaatgcttcatagctaaatcactactaatccaccaaatgtactgctttggctgctttcattttacactcaataagtaaataaataaatagataattatatactacatatgctattgtacactaaatataatgtacatatatttatttctttttttctgcggagncgcagcatttcctaccttgaattttaacaaaagaacggcatttaccttcaattttagtttttttttactttgctaggactgccaagctgtttaaatgattamgaaatataatattaaaatagacatgagaattcttttaac

SEQ ID NO: 107078 - DNA, 657 bp, Homo sapiens
  misc_feature (1)...(657): n = A,T,C or G
cttgcttctggtagggccaagtcattgccaagagctctgacatcatcttttccctaaaaccttgtctaacacaactgcccccatccccaaaccattctgtgtctcactggcttcattttgcccccttcagattagttttcaccatctgtagcatcttattatttcttggattcatgtgtaaacacttgaacacaatggaagacactaatgagtgttgttcatccttcagtctcctctcctaagccagtttctagaaccccataggctttaggaatatttagcaacaaatatttgaatatataaatgcttcatagctaaatcactactaatccaccaaatgtactgctttggctgctttcattttacactcaataagtaaataaataaatagataattatatactacatatgctattgtacactaaatataatgtacatatatttatttctttttttctgcggagncgcagcatttcctaccttgaattttaacaaaagaacggcatttaccttcaattttagtttttttttactttgctaggactgccaagctgtttaaatgattacgaaatataatattaaaatagacatgagaattcttttwacctttttctaagagcttacatgtagtgcacaaccttcagacaattaaactgg

SEQ ID NO: 107079 - DNA, 482 bp, Homo sapiens
atggatatgcaagtagaggtcctgagctctttggcatctctgaatactgccaaaatatcaacagcagttatccacgagggcttcggttttgctacagctttttcatataattacagtattgagatttcctctatgttctgggagacagtacctctgggagagaagaacacaagtcaattaattagtaagacttctaggatctaaaagcaagatccatgaagacctcagagattctatatttttttaaaaagcctaagagtayttaaagtacatatgagacattctttaggaaaaatcacaaggatcttttaattttaatttcttcactgaaaaagcagcattttcaatttatcattatagcacagtttttgataagcaagtagaaatagatacgaaaggaaatgttgtggttcataatgccatttgtaggaaaattttgagtcctaatcataaagttaatttcatatttactttcagaattc

SEQ ID NO: 107080 - DNA, 671 bp, Homo sapiens
ttttcttcgtgggaaaattgtaagggaggtatgtagcttttcaaaatttttgtagctatcttatttaggagtagactacatagactgggaagcaggtttgcatgacaagtttcccagcttgaatttccctttggcgtagtgattttggggtcccwagatttatttttcttccatatttactttttctttgcttaaatttatctttgcctaaattaattgtgggacgggaaagggaaaatttatgtttcagaagaaaactatggtacacttattagtttctagctctgatcttttttttttttttcagttttgctatttgcccacaatttaaactaaatcctatttttttttctggttacaggctttcagacaaatttttctcctattttttaagctcactgaaattgataatacctttttaccgaggccttgcaagctgaagtttatgcataaataaccttgtgacatacaaattacagatcacaaaatctgtcagatcgccaatgcctccttccacagtaactaaagatgcctctagttgaacagctggatacctcaactgactgctctccagactctaaagaaatccgtttatagactgctccaaatattaacctttgtttttctgctgtttgggagcccatctgcaacgccatttcctgaaatgagac

SEQ ID NO: 107081 - DNA, 671 bp, Homo sapiens
ttttcttcgtgggaaaattgtaagggaggtatgtagcttttcaaaatttttgtagctatcttatttaggagtagactacatagactgggaagcaggtttgcatgacaagtttcccagcttgaatttccctttggcgtagtgattttggggtccctagatttatttttcttccatatttactttttctttgcttaaatttatctttgcctaaattaattgtgggacgggaaagggaaaatttatgtttcagaagaaaactatggtacacttattagtttctagctctgatcttttttttttttttcagttttgctatttgcccacaatttaaactaaatcctatttttttttctggttacaggcyttcagacaaatttttctcctattttttaagctcactgaaattgataatacctttttaccgaggccttgcaagctgaagtttatgcataaataaccttgtgacatacaaattacagatcacaaaatctgtcagatcgccaatgcctccttccacagtaactaaagatgcctctagttgaacagctggatacctcaactgactgctctccagactctaaagaaatccgtttatagactgctccaaatattaacctttgtttttctgctgtttgggagcccatctgcaacgccatttcctgaaatgagac

SEQ ID NO: 107082 - DNA, 545 bp, Homo sapiens
aaagatgtgaaatatttcaaagtggggacttacaggtaataggtgaattcaaggattttctgatcagcatttggttgaaagaatttagctttgtctaaagacagtagaaagacatgcttgagttaagaaaaggaaggttgtggaagccaaggttcttgttatgtagatgaagcctctaggtagtattcttctgagagaatagatggtcaatgtctcttttcagattttaaatacagtccaactcaattaaatctcctctagacstggcaaagacctagaaagggaaagagattctaaagatgcaaaactttaccccacaaaaggctttgcagggccatttcaaaatatatcagataaatatattttgaagtaaagtgtgtcagtttctttcagggtctgctgtcgtgtgatgctataccagagtcaagttggaatttggcatcttactgccaaagggtctgtttcatccatataaggatgtctattttaatgttaatgctggtaagttttgcctaaactccaaaaaaagagggggtataatgagg

SEQ ID NO: 107083 - DNA, 643 bp, Homo sapiens
tggttgtggttacagaatatgttcttctctccaacacttccctgtgctctctagacaagtggcttgccatctgagtgggaggtgggctgggaccgtcttcatcgtctctagagctggatgaccaagtgaggtgaatgcctctttcaagccttgatcctttggggcttggagaagcacattggaaatactagaaaagtgtggccactaggacattgacatttagattgctggtcctccacacagtgaaatgtgtgagacttaaaaaaatgagaagatttgtcatgtccactgttttggagaacagtgatgagaattagcaactgccctatagtaaattcattccatttgaggcagcagaaacagtgcagcgtggtctagcattycacagtcccagagagcacctgagtgcagaaccagcccttttagggtgtgcatacacggtgtgatccccttcctttaaataatttttctgtctctctaactcctcattcatgatccctccatccatctatgcatccattcatccatgtacccatccattgatctatccatctattcattcattcatccatgcctcaaccacccatgtctccaaccatccatccatccatcgatgcatgcatccatccatctgtggatctat

SEQ ID NO: 107084 - DNA, 643 bp, Homo sapiens
tggttgtggttacagaatatgttcttctctccaacacttccctgtgctctctagacaagtggcttgccatctgagtgggaggtgggctgggaccgtcttcatcgtctctagagctggatgaccaagtgaggtgaatgcctctttcaagccttgatcctttggggcttggagaagcacattggaaatactagaaaagtgtggccactaggacattgacatttagattgctggtcctccacacagtgaaatgtgtgagacttaaaaaaatgagaagatttgtcatgtccactgttttggagaacagtgatgagaattagcaactgccctatagtaaattcattccatttgaggcagcagaaacagtgcagcgtggtctagcattccacagtcccagagagcacctgagtgcagaaccagcccttttagggtgtgcatacacggtgtgatccccttcctttaaataatttttctgtctctctaactcctcattcatgatccmtccatccatctatgcatccattcatccatgtacccatccattgatctatccatctattcattcattcatccatgcctcaaccacccatgtctccaaccatccatccatccatcgatgcatgcatccatccatctgtggatctat

SEQ ID NO: 107085 - DNA, 582 bp, Homo sapiens
ttaaaacttgagttgtttcttttaggagaaagaccctaaatgcacagattttggcaaacaygggagtcctgcaaaaaaatcccctgcgtatagtgtaggacaattgaattcaagattgaattccatcatgaatgaatgcctatctaaacatcacactgtatgttccatgatttcactccattcctaatctcccctgctttaaaatatggtgtgctattataataggaactctcagaatgacattagcaaattcctctataaagtcaagactctgaaagtcccttcatttttatggagaaactaatacttcttccctctccctcctgctccccacagaaaagtacttccttggagttctctcaaatagaaaacagttctggtcccacaactcatctaatttagacttcaaaataggtatctatcttccttgctcctcatttcctatttctgactttgtacttcaaatacctcataaggaaatttccccatatcaatttttttgcaaatcatacagattatctaggtagcaaagcacacatataaagaaacacacacatacacacacatttataataaaattag

SEQ ID NO: 107086 - DNA, 582 bp, Homo sapiens
ttaaaacttgagttgtttcttttaggagaaagaccctaaatgcacagattttggcaaacacgggagtcctgcaaaaaaatcccctgygtatagtgtaggacaattgaattcaagattgaattccatcatgaatgaatgcctatctaaacatcacactgtatgttccatgatttcactccattcctaatctcccctgctttaaaatatggtgtgctattataataggaactctcagaatgacattagcaaattcctctataaagtcaagactctgaaagtcccttcatttttatggagaaactaatacttcttccctctccctcctgctccccacagaaaagtacttccttggagttctctcaaatagaaaacagttctggtcccacaactcatctaatttagacttcaaaataggtatctatcttccttgctcctcatttcctatttctgactttgtacttcaaatacctcataaggaaatttccccatatcaatttttttgcaaatcatacagattatctaggtagcaaagcacacatataaagaaacacacacatacacacacatttataataaaattag

SEQ ID NO: 107087 - DNA, 567 bp, Homo sapiens
aataataacaatcaataataatgactattgtttttaatgcttactatgaattataaaatcacctcatgaggtaggtactactacttatcactattttactgatggagaaactaaggtactgagcatttaataacctactttaaatggcaaagcagagtaaaaatcaaccttctgattggtgctaccaggaatatttttaaaacagttttattgagatacgatcttacaygccagggcaggaatttctaaggcaaaacatgagacttcaataagatctggacttgcaatgagtgcttgaggctgcctccctctgagccttgtgatatttactcttttagtgaaaccttggaagaaacactaatttagttaaggctttcaactctcttattttaaagataagaatattgaatcccagagaaggaaacagacttgcctaaagacatgtggaatattcacagcaaagaactagcacttcagacttcaagttcagtatacttaaccatgtcaattatttaatatcttgtcctttattttttgttcctcatccttattaacatacagttttaa

SEQ ID NO: 107088 - DNA, 567 bp, Homo sapiens
aataataacaatcaataataatgactattgtttttaatgcttactatgaattataaaatcacctcatgaggtaggtactactacttatcactattttactgatggagaaactaaggtactgagcatttaataacctactttaaatggcaaagcagagtaaaaatcaaccttctgattggtgctaccaggaatatttttaaaacagttttattgagatacgatcttacacgccaggrcaggaatttctaaggcaaaacatgagacttcaataagatctggacttgcaatgagtgcttgaggctgcctccctctgagccttgtgatatttactcttttagtgaaaccttggaagaaacactaatttagttaaggctttcaactctcttattttaaagataagaatattgaatcccagagaaggaaacagacttgcctaaagacatgtggaatattcacagcaaagaactagcacttcagacttcaagttcagtatacttaaccatgtcaattatttaatatcttgtcctttattttttgttcctcatccttattaacatacagttttaa

SEQ ID NO: 107089 - DNA, 610 bp, Homo sapiens
tgagtagatttctaatagaaaaatgactggaaggatgaataacaaatattgctattttttcccttcccttcatctcttccttcttttttttctcctgccctccctcctcctttaccactctttgctttaattgttcaaaaacatttaataaacaccatgtaggagattggtcagggtggtgggaaaagttgcaagaaaatgttataggaaagaatgcaaaccttcttggaaggccgggaggttttgcaaaaacttcaagaaagaatttggctgaaggcagccaaattctcttatcagaaggctgagagcaaagagcggataacaagggaatgtaaaggaacttatctagataaacttgtttactcctgtctccagaaaccaatctttgatcattcctgcacaggactgctctctacttgggggggtcgacaatgtttattacccacaaactgtgtgtgctccaagcctttgtcattaaatctgcactaaataaatgcaagcatcaccaccttagggaaactgcactcyccttggctgctgcactctctcatcattggtgcagagatgtgctgagatgtggcagtcccctagacatgctgtcaggcaaaat

SEQ ID NO: 107090 - DNA, 552 bp, Homo sapiens
tctccttcctcttcttccattgtttcatcactctgaccccctcttctacttttaaggtctcatgtgactggattcggtccacctggataacgcaggatcatcttcccaccttaaggttcttaaacttagtcacatttgcaaagtcccttttgccatgtaagagggaacatatttacaggttctggaaattcagctatgggtatcttggaggagggcattatttagcctacaacatacaaatcagtcaatataaagaaatacctgagggattcactagccagaattttaatttgaaatccattgctattattataattttgaaataataaaattaaaacatttgggggaaggtaaatatggagaaaaaaatcaggaatgtacgtatctatattttgttctaagatataggatggccccacagtcttcagaaattaataggagttagaagattaaattataacayctgggaaaggaaggcttacatttaaaattctgacagccttctaacaacaggactgcagccctggcagacactgctataataagaatata

SEQ ID NO: 107091 - DNA, 573 bp, Homo sapiens
acagaagaggaatataggggcttaaggtttgcttcttaggatgggaggtgggtgtgattctatatgattctatatgtccaaaatagtctatgaaataaaaaataagctcaaaagtaccccaatcaggtactataacaataaaaaagaatgaagcactgatccgaccacatgaatgaatcccacagatgggacatgggatgaaagaagtccaacacacacagatcagatcatatgattccacgtgtgtgacctgaagaacaggcaagactaaagcaaggggagggaagtcaggagataggtcaccccgtggtgggggtgctggytgggaagaggcatatgcaggagctttctggggtactgaaagtggtgtgcaccttgatctgggggtggccacatgggggtatcaggtaaaaaagccattgagctgtatacttaagataagaacactttacaatctgcaatacctcaatttaaaaattccttaaacatttagaaagaaagaaaaccaagtcatcagccacatttgggaaccctttgcactggcttatgttaatattaaagagactgttttag

SEQ ID NO: 107092 - DNA, 572 bp, Homo sapiens
ctacaggtatatttgtatagaaagccactgaactagataatgccatccatggattatataaataatcaagagtttttaaaagaaaactgtgtataaaatatctgtttcacctactatatgcaaaaaattaagaaatctgtaagaaattcctactaaataactgcatgggcaaggtcgtgtgctattcactgtgaaaggggtgaaacataataataaaataaaatataaataatttatatactaaataaaattcaatatttagtggtaaaatcaaagtataaataaaatgacaaatgtgaatatgtataaaatgtgaaacatttaaaagcagtctgcaattaaccattgaataagggaaaatgcttatagtgaattcaatcacatatgaaaaatcattgtaagctgaggtatgctggaaaaaggcttcaaggcagaggaaattgttgagctgaaaacagaataaatataactaatatakttaaatatgtaaacattgttgcaccaaaaataaagtatacattttgatataaatcacagacttggaaatatttgtagtagataagaaagaagat

SEQ ID NO: 107093 - DNA, 564 bp, Homo sapiens
agttgacaaaatattattgaaaagatcagtgaagtattttagaagttttaaaaattgtaataatcaaagttgtagaaaatatgaagtgatacatctcagatattaacccttacaatatgaatatataattttatataaattaaatttgtattgtgtttcaagaagttcaaagcatttaaagtttttggccctgtagttttacctataaaaatatgtctaaagaaataatctagcacaaaaaattgatggatggtgatgttcattaccacatttcatgtaacacaacattgaaggaaaaatagccaacgatttggaaattggtacattaaaaatgattcattcatgagataaggtgtgatgaaatccgtagaaatgaattaaaaattatcttgtgtyaatgttatatgaataatgctaaaaataaaattgtattttataaacctacttttgtgaacactattacagtcatgccacataatgacattttggtcaaccacagactacatatatgatgacggttccataagattataatagagttgaaaaattcctatcacctagtga

SEQ ID NO: 107094 - DNA, 607 bp, Homo sapiens
gtagaaggcttgcatttcctactttactctcttattggtgccatctcattcacagtacttgacaaaacattttcatgagccaaagacaattctctaaacattactggatttatttgtatcatagttaccctagctctacctggttcttttgttgatatattgaattttgagtagtagccattttcaggagggaagtttgaacaaatatttataaacaaaaattcaagtgataatataaatatattcagaactctagaagtaagctacatacrttaggttagttcaaaaaccgcaattcctttttcaccaacataatacaatgtgctgagatgagtatcagataataggaacatcaaatgaagtctatctggtactagagagtgagtagtgaatgttgtaaaggacccaaactggaagtggagatagctgagatatgagatcacagaacatgtttaaataaggtctctacatatttatataggtggattggctagatttaagacggcatagcctggaggtgaaagacatctgttcagaggctattagtagagccctaatgagaaataatgaagttctctattatggccaataacagtacttagaaacc

SEQ ID NO: 107095 - DNA, 607 bp, Homo sapiens
gtagaaggcttgcatttcctactttactctcttattggtgccatctcattcacagtacttgacaaaacattttcatgagccaaagacaattctctaaacattactggatttatttgtatcatagttaccctagctctacctggttcttttgttgatatattgaattttgagtagtagccattttcaggagggaagtttgaacaaatatttataaacaaaaattcaagtgataatataaatatattcagaactctagaagtaagctacatacattaggttagttcaaaaaccgcaattcctttttcaccaacataatacaatgtgctgagatgagtatcagataataggaacatcaaatgaagtctatctggtactagagagtgagtagtgaatgttgtaaaggacccaaactggaartggagatagctgagatatgagatcacagaacatgtttaaataaggtctctacatatttatataggtggattggctagatttaagacggcatagcctggaggtgaaagacatctgttcagaggctattagtagagccctaatgagaaataatgaagttctctattatggccaataacagtacttagaaacc

SEQ ID NO: 107096 - DNA, 578 bp, Homo sapiens
ctggttcttttgttgatatattgaattttgagtagtagccattttcaggagggaagtttgaacaaatatttataaacaaaaattcaagtgataatataaatatattcagaactctagaagtaagctacatacattaggttagttcaaaaaccgcaattcctttttcaccaacataatacaatgtgctgagatgagtatcagataataggaacatcaaatgaagtctatctggtactagagagtgagtagtgaatgttgtaaaggacccaaactggaagtggagatagctgagatatgagatcacagaacatgtttaaataaggtctctacatatttatataggtggattggctagatttaagacggcatagcctggaggtgaaagrcatctgttcagaggctattagtagagccctaatgagaaataatgaagttctctattatggccaataacagtacttagaaaccagaatgtgaattagaaatgcaactactttctgaatgcacttaacagaagtagtttcttgtgcaaaattagaatataagtttaaattttaataaggaaaaaactggaatct

SEQ ID NO: 107097 - DNA, 621 bp, Homo sapiens
  misc_feature (1)...(621): n = A,T,C or G
nnnnnnnnnnnnnnnnnnctcaaaggattttccctggttgacagcattgcttgccttaaaatagtggggtcagacttttcattccagttccagaaagtgatgcgtgtatcatgattgttttgctatgaaacagttcctgtccctattaccctcgtagtcaacacaataggctatgttccttcccaggagtcattaggtttccctaatgggatgatggaaaggagggaaatagagctctggccctcttccttcattagtgctgaaatctggtgctgtatctgcttcacatcaagctcagtggattgtttttcccttgtctgagcctgctctttcctccttgagtgaggaaaaggatttaaatcctggctttcctgacatggaactttcctgcagtggctgttgcagctgaacgcattaaaaggagtacctgcaagctgtgagaagaaatattgtttgaagattagcatataatataatgtggacaagtgctcttaggtttgcttttaaatcgaaagactstgttctgtaggatttgaaaaagaatagaatttgtcattggcacatcccacccgtcatagccccacaggtttctttgtagccactggagggtcttaagtgatt

SEQ ID NO: 107098 - DNA, 614 bp, Homo sapiens
gtggaatttcttctgcctctgccacccttgagacagcaagaccaacccttcttttcttcctcttccttcttggtctactcaatgtgaaaacgacaaggatgaagacctttatgatgatctacttccacttaacaaacagtaaatatattttctcttccttatgatttttaaaataacattttttcctttggcttaatttattgtaagaatacagtatataatacacataacaaacaaaatgcattaattgactgtttatgttattggtaaggcttctggtcaacagtaggctattagtaggtaagttctgggggagtcaaaaagttttatgtggatttttgactgcatgggggtggggctggcacacctatcatccgagttattcaagggtcaattctaawttgttctcatagtgcatatttctcattaacatgactaaagaggaaactggagatctaatttgctaaagtggtcacgctggcacttgggaacatttttccctggtaatggacttgctgtcccattcacaggttgcattatctgtccatccccaggagtgtcaagaggtgaaggaaataagactggggtggtagttatgacttcacagtatttca

SEQ ID NO: 107099 - DNA, 593 bp, Homo sapiens
gcagctcaattcctagcaaccagtgctggaaatcagcaggctttgaactttacccgttttcttgaccagtcaggacccccatctggggatgtgaattcccttgataagaagttggtgctggcattcaggcacctgaagctgcccacggagtggaatgtattggggacagatcagagtttgcatggtgagaatttatatgatctacaaacacactttaagtttgtgatatttctactttttttttaatggggctacttttctatggtcatcatattcaggtcttccacagaggctgcgtaaatcttagaattactgtaggaaagtggcctcaatggcatctcttctaggttcttcaattgagctgttaagcatgttgttgcagcgaaatgaccctagggattacccaaggagagtggcacgtcaccttcctgtgggtctggatttcagatttgatctctcaagtgtagaaagtgacaygctcttcatgaggagagtagcagagttactttttggtgtttaatgatcaaagacatggttttcattattgtattctgaagttctctaaagatagcctggaagtgaaggagaggaaa

SEQ ID NO: 107100 - DNA, 557 bp, Homo sapiens
gaattctaagacaaatataagaataagaagagatggcacagtggctcgcggctgcaatcctaatgctttgggaagccgaggtgggaggattgcttgaggcttggagttcaagaccagcctaagcaacattgtgagacccctgcctctccaaaaaaatttttaaaaaacaactgggcatggtggcacatgcctgtagtcctagctacccaggaggctgagacaggaagattgcttgagcccaggagtttgaggctgcagtgaggtatgattgcaccactgtactccagcctggggtgacagcttcttcttytgaaaaggaaggaagtgagggaaggagggaaaatgaaaggagaaagaagaaaaagggaaaagaacaagaagagactcttgagggggaaatttgtggtggactggaagtgaggaaaccttgggtcctctgttttgaaatatttattactttcatcaaattactttgcctcctttggcctcaggttttttatgggtctagtaaagggaagcagggctgtaatcctcagggagtctctccacttttttct

SEQ ID NO: 107101 - DNA, 413 bp, Homo sapiens
attttcgcatcaatattcatcaagagatattggcctctaattttctttatttgatatgaatttgtctcattctggtatcagggtaatactggcctcgtagaatgagtttggaagtattctccttttttttttttttttttttcccagaatagtttgaggaaaatgggtctagttctttaaatgtttggtaggattcagcagtgaagctattgggtcctgggcttttctttgctgggagactttattatggcttcaatctcgttacttgttattggtctgttcaggttttggatttcttcgtggttcaatcttggtggattgygtgtgtttaggaatttatccatttcttctagattttcggatttattggcatatggttgctcatagtaaccactaatgatcctttgaattcc

SEQ ID NO: 107102 - DNA, 618 bp, Homo sapiens
tgtgagttttctcaaaacattttaaaatcttttttcaaatccctggccctaccattgatctactcattctttgcaaatggccttgttatttcatcaaattccctttgttgcaattgagtatgattatttcttcactacctctctgctgttacagagattaagaactgtcactacgtcttggacatcatcattttgtaccttcttttgtgccatgacaaatcatttatttctcatcccttttctcttgaatttttgatatgttcatatttgaaatgatagaaccaaataagtcgtcagggaagagagttactactactactgagaatttttaaggccaagagaaagccctgaatggtcaaacacaaccttagaaatcagcataccagtaatttttataacataatttagaatttttaaatgacaataaaatatcagatttgtttcaaatgttttgcrttcagtgttttaataattataactatcaatatattttctgagattaaacttttattttttattttacagctaaggagcttagattcctaatattgaaaaatcaaaggcaacataaggattgtgtaaactttacatgaaatcccattttcagttcaattctac

SEQ ID NO: 107103 - DNA, 553 bp, Homo sapiens
cattgtcctacaaacagcacgtagactttgttttccttatattgtttcagctactgagaatatgtttacgtatcttaattcaattttattttcttcttggccaccttaaattatttgcagttttatggagtctccctgaaaaacccatctctcctttcttcaaaatatttcaatacttaaatattatgtaatgacatctaattatactttccatataaaggcaagacataaaattccaggttacttacttataaaccctctwgtaatatatcaaaccttatggagttcccagtagctcctttatacatacttgatgactatttttttcagcattggaaattcaatgaattgatagtcatctaaatgcctgtattactgacccatccccccctggggatatttttatttactttaaaaagtgagttgaaacagcttataaaattaattacatataaaataaagtaccacttgggaaaatttagttattgtacttgatattgaatacaggtcctgcttatgtaacaaataaaaaaaaatataaatcccactttaa

SEQ ID NO: 107104 - DNA, 569 bp, Homo sapiens
catcaccagcagtatcacatgtacttcaaaaatatgtacaactattacgtattgataaaaaataaaaccaataaaaacataatagttcagaaaactacaacaaagtacaaagatgacaaataatagtgaagtatgaacaagttgactctgagttctgcatgagacaaggatgcctgatatcgtgtatactacaaatcattctacagaactggggcacagccagacaagaaggccaaaaatttccaccaacaccagtacaatacagggcaatacaatacaatacaagacaaataaagacaatacaatgcaacaccataagaaaatttttaaaataaaagatatattatttggaaaaaaaaaaragatgattgcacttaatgtaccagctcaagtccagctgtttggtgctcagagtcaaaacatgagaagctaggtgtggtaaaggaaagcagcttttatcaaccaaatgccagcagatgggagaatggctggcctcaagcctcaaaggaaccatctcagccttctgggctgagtgaaggggtttaggaagtaaaatttggtgtggggaa

SEQ ID NO: 107105 - DNA, 598 bp, Homo sapiens
tgttttctcatcatatgtccagtaaatagagttgactgaaatatacaattatcaacaatatatccgacatatgtagcaagtaaggatggagacaatcacatggaaaattcatctgaagacttttcattggtgacttttacttataattcagatagaagttctgtcttgggaacgtaattttaaatactgcaacattcagggccaatatgaagataaggaaatgttttctttaaactgtctcatcagcttaggtaccttgtctatgttagttacccacttaggaattatttgcttaaaattttagcacccacatcatagttaaaatatctatttatttgatcccatatttcacaaataatccgcargtgatttgtacatagctttaacttcttactaccttgacactttggtcatatctatgtgtgttttccattgttttgctgctgagtgatcatcaaaagtgaaagaatataattttcaatgtattgtttcttaaattgtaatgtagacatattcttcagaatctatgagattatatgtctaataaatgttacctaaaggttgttagacataggataaatttatgggaattatttta

SEQ ID NO: 107106 - DNA, 618 bp, Homo sapiens
ggactgctagtcccggaagaagcccacatttcccgactgattctctcggaataatgcccacctacaaactgggaggacgaggtggagcctctgagagttcacgcagtttgaattgggggggagcctgacctcttcagttcccatgtggtgacctgggattcaatttgtgaggtgggagacctgctagcaggactctctctggctttgccgagagttatttttcctttcctttttgcccaattaattccactcacctttctatgtccacaagcctaatctttcctggtctgtgacagaaacccagttttagctgaaccctggagaaagttctgcaacagttggaaactatctttaaacatttttataagtgcattttttttcaggaagaaatatatattggctcttgtcactggttcctgtcacagagctaaaacctttgtagtttcctgtgttgttggagtgataggaggagattttattctaatctggtggctcttgycagcccctagatagcttcaggatgggggggttggatgccagaaacctcaagccttgattagaagcctgaaactttccccttcaacctttggggagaggaaaggagctagagattaaatc

SEQ ID NO: 107107 - DNA, 591 bp, Homo sapiens
ctgaagtaaatacatgcttatttgtaggatgactgatattttattttattttatttatttctgagacaaaatctggctctttcacccatgttggagtgcagcggcatgatctcagctcactgcaacctgtgcctccccagttcatgcctcagcctcctgagtaactgggactacaggcatgtaccaccactcctggctaatttttgtatttttagtaaagacggggttttgtcatgttggccaggctggtctcgaatgatctaccccgctcggcctctcaaagtgctgggattacaggagtgagccacagtgcctagccctgattttttattttaacctcaagtacagataattgaattattttactcagtttacattattgattggtctgtgaaaattacatrcacacacacacacacacacacacacacacacacacacaaaagcacccatttcccttcccacagaggcaatcaatttcatgatttaatatgcaggtttttgtttccatatgttcttttataatgggcattttttacttcattttcatgcacttttaatttatgtaaatactacagtagcagagattgc

SEQ ID NO: 107108 - DNA, 539 bp, Homo sapiens
attggctcatgtgtgtagtcccagctgcgtggggggctgaactggtaggattgcttgaggctggaagtttgaggccagcctgggcaaccacctctaaattttaaaaaagaagaatwtcatgtatgaatgtttgagggtagaaagtgttacgtgcagaaagaacattgttttttaggtaaatctagaaaatatgcatcttttattttcatatcaactctttttatagtctctgttcattggtcccttcaacaggtattgtatccatgagtagcaaaaatgaatagaaggaattataattttttatataatcatagaaaaggcccattgcagcaaagttagcacttcagctttatccttctgagctacttatttctcaagccaatcctccctttacctccacagagttatttggggattaaatttgattattttagaacctacaaaagtaacattaatagactttacaaaatgttggggacttggtgggtatgaacacggttcctgctcctaattagttttgaggttggcttttactggaa

SEQ ID NO: 107109 - DNA, 591 bp, Homo sapiens
tcatattgtctaaacatcttgccatcctcttgtaagcaattatactgtttctgaataaacttaggggtataaaagtagaaaatatttaccatgcttgctttgaaagaatttaatgattttgaaaaattaaaagtttaaaaktgagtgtataaactaggctgaaagaaaccagaaaagtcacataggagttttatttaaaatgggttgttcaatcaaagaagtgtagaaaacagtagtctaagccaagctagaatcagtttctttactgcagaatttcaggtctttaatatacattgtgaatctctaaatccacggaaatgatataagaaaataaaagggtttcaaagttagtggctattggtcttctcatccattatttaatgtaacatttagttatatctctctgtatacctgttagagttataattactagttatatctcctagtattttgtggttcattttcagaaaaactgatttgctctttttattctataggtaagaaaattgggcttgagagagaagaataatttaatctcatggctaattaaaagcaaaggggattagaacccaagtgagggaactcccagga

SEQ ID NO: 107110 - DNA, 541 bp, Homo sapiens
taaaatatacaactgagggtttcaacaacagactagatcaagcataagaaagactttatgaacttgaagacaggtcttttgaaataacccatccagagggagaaaaagaaataaaaataagaaagaaggaaaaaagcctatagaacttatgggatgccactgagcaatggagaaaggcacagaaaacgtttaacaaaataatgactaatcactttccatccagatccaggaagctcaaaggatctcaagagaatcaacccagaaaagtcctttccaaggcacattataatcaaactgtcaaatatcaaagaaaaagaatcctaagagtaatgagagaatagcaccaagtcatatatrcttggatttccatttgactatcagcaagtttctcagcagaaaccttgaaggctagggaaatgagatatattcaatgtgctgaaagaacaactgtcagccaagaatactatgtctagcaaagctatccttcagaaatgaaggaaaaatagagtactccacagataagcaaaagcagaatgaattc

SEQ ID NO: 107111 - DNA, 526 bp, Homo sapiens
tcctgactactctctttaaaactgtaatcccaaactctacctggcacacccaatttatgttctcaggtttatttaaaaaaaaacaacaagttttattgatttgacaactacccatttatttcatttttaaattttctgtcttttckcagtagatagaggataatttaaatcttattttttaattgctgtatttttataggaggacagagttaaagtagctagtctgtgatccattcatttcctttattttccagagaaagtgagctccttttaattgaaattttagataaatagactaatgatatttgctataagcaagaaattatctattaaatactttttctaggatgccttggttgcaggattccttacatcaaatcaatataaaatcctatgagacatgattctttgaagaatgttatgaaaatgaaacaggatttgaggtataaattgatatttctcatcatttaaatgctcactgcaatgtgaataattacataaacctcacataaaaaactgatttatt

SEQ ID NO: 107112 - DNA, 621 bp, Homo sapiens
gaactggcacagtgaaagactgccaggtgcagaggagctagccactataaacttcgtgaaaacatctgctcctccaggcaggattgaagatgctgcattgccagtctgcaagatgctaggggcatcacgtggtcagaaactgcttccatgaattcaacagccaggctagtagtctatactgtctacagtgtctttaccatgtcatctaggcaaacccagtcagctgcagctcctggggcaactggtgcagtaatacgtgaggtctaagtttacataaaagtttatttctcacttatgtaaaattcaatcaatcagcagcagataggggasgaggtgggttctgctccatgcagtcatccaggcatctaggcttctctcatctcctgtcccagggaaagatagaaagagaggattgcagaggaggctttctgcccagacctggaagaggcacacatcatttccatctaccttccactaagtcatatggctccatctagatgcaagggggcctaggaaaatattgtccctagctaggcagctgcttcccactaacacctacactgtggaaaaggagcaagattgatggtgggcaattagccttctctgccacactgcttaacg

SEQ ID NO: 107113 - DNA, 552 bp, Homo sapiens
agtcctttgaactaacccagtctaacaaaaataaaaattagttttaaaaaatgagtaaagcctttgagaaatatgggattttataaagcaaccaaacatacaaattattgacattcctgagagagaaagagaaaaggcaaacaacctgtaaagcatattttagggaataattcaagaaaacttccctaatcttgctggagaggtagacatccagatataaaaaatccagaggacacctgcaagatrctgtacaaaacaaacatcaccaatgcatagagtcatcagactgtccaagatcaatgctaaagaaaatatcttaaaggcagctacagaaaaaggacagatcacatacaaagggaaccccagcaggctaacagtggacttctcagtagaaaccttacaagccaggagatattaggggcctattttcagcgtccttaaaggaaagaatttccaaccaagattttatatcctgctgagctaagcctcataagcaaaagagaaataaaatttttccagacaagcaagcactaagggaagttgttagcacta

SEQ ID NO: 107114 - DNA, 566 bp, Homo sapiens
aaaataactgattaatactcttcaaaataagtcagtcctaaaaggacagactgaggaattgtcatggtttagaggagatgaaggaaaaatgacaacaaataagatgacaagcgggattctaattaagatccaggaacatctgataaaggaatcaaaaaaggaattccatttacgatagtcacaaataaaattaaatgcctatgtattaaccaaagaagtgaaaaatctctataatgaaaactataaaacactgatgaaagaaattgaaaaggacatcaaaaaatggaaagatattccacattaatggattggaaacatcaatattattcaaatgtccatactgcccaaagcaatctacaaattcaatgcaattcctatcaaaattccaatgacattcttcacagaaatttttaaaatcctaaaatttatatggaaccccaaaagacccaaaatagccaaagctatcctgagcraaaaaggacaaaactggaggaatcatattatctgacttcaaattatactacagagttaaagtaaccaaaacagtatggtactagcataaaaac

SEQ ID NO: 107115 - DNA, 540 bp, Homo sapiens
gaaaacctgggagttgagcttactcttcctgttgaagaagtctgccacaagctagaatattttgatgccttgtagatctcccagcccagagcttggccttgcagttcttgagcttcccatgactttcacttctaatccttggtaaccacctgcttcctgggcctcatcgtcaattgtgttgaaattggaaacaactaccaaaagtttggctgggtgcggtagctcacgcctgtaatcccagcactttgggaggtgaggtgggcggactgcttgagttcaggagtttgagaccagcctgggcaatgtggcaaaaccccatctctaccagaaatacaaaaaattaggctgggcgcggtggctcatgcctgtaatcccagcacttttgggaggccgaggcgggcagrtcacaaggtcaggagtttgagaccagcctggccaacatagtgaaaccccgtctctactgaaaatacaaaaattagccgggcatggtggtgctcgcctgtagtcccagctacttgggaggctgaggcaggagaatcg

SEQ ID NO: 107116 - DNA, 564 bp, Homo sapiens
gtgcaagaaaataaaaaaagagaaaagagaaaatggggctggacataagggttacagtttcccaggaaataaggaaaaaataagtaaattgcaatttgcgtttttgacagtcagggaaattgagtggaccaaagttgccttggaaagaaaaaagctaacgttagtaagttaaaaataacaatgcaatacagagtgtgcctgaataattagccttgaaaaggggtttccccagtcatcccattatatttcctcagatgactttcccaagcagtggcaggtgaggaataggaaaccgctggatcaccagacataatggtttgattttaaagcctataaytgaatgttgaaataaatggcagagttcaaaaacatcaagaccaattagaggatagttaaggaaaatggcatgcactagtgtcctatacacagctctcttgggatgtcctatcatgctgtgcccttcactgtatgtcaggaccgtgagccatggtatccctggacaccagccaaatacacgtgggtgggggattgtgtacattaaattgtacagcgccaatcagttta

SEQ ID NO: 107117 - DNA, 551 bp, Homo sapiens
gcataatggatagtgcagctctagaatgaggtgggttctccttttcatgctcataaaatacgttttgcattgctctaattttgtgtttctcttaacatttgctcttgtctttcccatttccccaccagatggcgcccactttgagggaaaggaatgggtttgcaatttggttgccctctgtaaatgtcagttgaatgaatgattagtactgggccttccgacactggcaactgcctcgtgcaccagtggagcctccgctggctgactaggcctttacttttaggccactgactagacctgactctcygctagactagcttcattcctagaaaagttgggtaaaatacaaaaattatctatttgaaggcatcagaaagctacccaaacagctaggaattgagaaggcacacatttctgggaatgcactttccacttgctccatctctacttagactgacatttaagggtttacttggatcatgacttaaggtatccatctctccatttctggacccatatgttggtttcctttatctgctagactcaagctt

SEQ ID NO: 107118 - DNA, 633 bp, Homo sapiens
tcgaggtagacaccttgagcagcaagaggtcctggagggaagaagacaaatctggggggtggcttgccctttcctcaaatacgatgcttgcttatctccttagggagcacaaagatctttccttctttaactttctttaaatagcctccagtggactcttccacatcacagtttctatcaaatatatttgagttwagaaattctctaactgatggtaagatataaataatattaatggtattggaatttaaaagtacaaggtagaaagaagacccatttttccttaaatatcctgatatgctttgaatttttatcatatgtgtatactatttttatatcacaaataatattaacaaatttttatgtgttcttctttctgtggtcctatgacagaatgtactatcactagcattttctcctaagctaacaatatataatcaaatccttcaaaagcccatgactttttaagaattgagcatcaagaccgcacaagcctcctgatcaaaccctgccttctatttccatccctgctcccacttcacttcactgtaattatataactaaggtgatccttcaccctgataataaacactaatgtctatgtcattcctctgttcataacactcccattgc

SEQ ID NO: 107119 - DNA, 633 bp, Homo sapiens
tcgaggtagacaccttgagcagcaagaggtcctggagggaagaagacaaatctggggggtggcttgccctttcctcaaatacgatgcttgcttatctccttagggagcacaaagatctttccttctttaactttctttaaatagcctccagtggactcttccacatcacagtttctatcaaatatatttgagttaagaaattctctaactgatggtaagatataartaatattaatggtattggaatttaaaagtacaaggtagaaagaagacccatttttccttaaatatcctgatatgctttgaatttttatcatatgtgtatactatttttatatcacaaataatattaacaaatttttatgtgttcttctttctgtggtcctatgacagaatgtactatcactagcattttctcctaagctaacaatatataatcaaatccttcaaaagcccatgactttttaagaattgagcatcaagaccgcacaagcctcctgatcaaaccctgccttctatttccatccctgctcccacttcacttcactgtaattatataactaaggtgatccttcaccctgataataaacactaatgtctatgtcattcctctgttcataacactcccattgc

SEQ ID NO: 107120 - DNA, 587 bp, Homo sapiens
cagaagcaccttagaagtggttgcaatatgatgggaacaagttacaagtcatcatcactttaggagtagaatggcttgagacctacgatgaacacttttcctggagataaaaatctgaggtaagagttactctcaagtaacaagtcactgcgtttgacctgagagggtgtttmagaacgtagtcattcaaaatatttttctatttttttctagaaaaatattttttctaaattgtttttctattaaggaaaataaattcagtatctcatatactggaaagaatttaaggtaatagaaaactttggtaatagaaatagtaccaaaactgttgatacctccttttctcagctctgtttgaacacagcatataaccctcaggagaaaagtttgtctaccttttttgcttatatatttctggaggtagttaaatgtggtcacactaaaaaaaaagaactaaaattacccatcctttgatctcatagagtcaaattagcaaataatagaattgaagctaagattcttcaatttccagaggaggatgttgctctagagtgtaagcgccgtggtgtggcaggggctgagttctg

SEQ ID NO: 107121 - DNA, 564 bp, Homo sapiens
  misc_feature (1)...(564): n = A,T,C or G
tggaaccatttgattatagtgttccaacctttgaccaaacttataaagcaaattttagtaaaagtagagtgacttggcaggtgtgagagttttacttttttctgattttccatttagtaaattaataacctaaatgattaactctttttttttcaaattaacaaaggcatcataatttttcacagttcaaaatggaatagaagtgcttcttagcacctcttggaatcatgagattagttctttttaaaaaaattctaaatgacaaaggaaaattgtatatgtttattgtacataacataatgtttgnatatatgtatatattataaaatgctttaattaagctaattaaccaatgtattacttcacatacttatccttttttgtaacaaatcatttaaaaatctatttccttagcaattttcaagtatatgagaaayagttattaaatatagttaccgtgttgtaaaatagatctcttgaatgtaatcctcctgataaactgaaattttttaccctttgagcaatgtcttcccaatctcctcctctatccctccaacccctggc

SEQ ID NO: 107122 - DNA, 598 bp, Homo sapiens
gtttaaatatgtaaagagtactgggggagtatggtaggacatggcactatgcagatttgactaatgaagcttattgtaatttgaatgtatatattatgtccagtaagggaatgtgaatagtagtacttaggatatacatgtttytggatactttgctacagaatctgaaacttttgaatgccaccatcatgccccaagtggaaaagcccacaaacaaatacttaacgtaaactttgttacatatgcaaaattgttaaaaatactgaataaaattacttttaggctatgtgtgtaaagtgtatgtgaaacataaatgatttttttgtatagacttggttctcatattcaagataccttattatgtatatgtacatattccaaaatctgataaaaaattaaaataattgtcccaagcatttacaataagagatgctcagcctgtaacagaagttttaattattgtgaataatttctaaaaaatgcatggcatttacctatcaattgattttatttttctgttgataaaataaccaatatatctagctgctcagaataccttacttgatacttgcttgagaagatgtgtagcagctgtggt

SEQ ID NO: 107123 - DNA, 530 bp, Homo sapiens
agctgcctcacctatcactgattttctctttctttctttctttctttctctctctctctctttctttctttctttctttctttctttctttctttctttctttctttcttcctttcttttttttttgacagagtctcactctgccttgccaaggttgaactgcagtggtgtgatctcggctcactgcagcctccgcctcccgggttcaagtgattctyctgtctcagcctgctgagtagctgggattacaggtgcccgccaccacacccgaccaagttttgtatttttagtagagacagggtttcactatattggccaggctggtcacgaactcctgatctcaggtgatccacctgcttcagcctccaaaagtgcagtggcaggatcagggcatacggcagtcttgacctctggggctgaagggatcctccctcctcagcctcccaagtagctggattataggcatatggcaccatgccgggctaatatttgtaatgtttgcacagatggggttttgccatgttgcccag

SEQ ID NO: 107124 - DNA, 530 bp, Homo sapiens
agctgcctcacctatcactgattttctctttctttctttctttctttctctctctctctctttctttctttctttctttctttctttctttctttctttctttctttcttcctttcttttttttttgacagagtctcactctgccttgccaaggttgaactgcagtggtgtgatctcggctcactgcagcctccgcctcccgggttcaagtgattcttctgtctcagcctsctgagtagctgggattacaggtgcccgccaccacacccgaccaagttttgtatttttagtagagacagggtttcactatattggccaggctggtcacgaactcctgatctcaggtgatccacctgcttcagcctccaaaagtgcagtggcaggatcagggcatacggcagtcttgacctctggggctgaagggatcctccctcctcagcctcccaagtagctggattataggcatatggcaccatgccgggctaatatttgtaatgtttgcacagatggggttttgccatgttgcccag

SEQ ID NO: 107125 - DNA, 511 bp, Homo sapiens
gccagtataaacaagtttcctgtgagacacctggtcatgggtcagatacttgagcattaggctgtggtccaggaaaaagaaatttctggtgaaaggctactctaaagacccacagrcccctcccctagagccccattagagtgaggtagagtttatagccattctcctgagagacctcaagacccaattagaagaaaactataacatttgttatatagaaggcattttccaaagagtagttcaaagataaaagatatagtcttcctttggatataaaacaaaatctcaagatacaccaaaactgttttgcttttactgaataatttttgtgcatatgtgtttagctgcaagaggttaacaagctgtgattttctttcctttcctttcccttttttttcttgagacagtcttgctctgtcacccaggctgaagtgcagtggcctgatcttggctcactgcaacctcagcctcccatagctgggattacaggtgcctgccaccacacccagct

SEQ ID NO: 107126 - DNA, 410 bp, Homo sapiens
cttacacatggtgaatcccttcacaccagttcccagtataaagtaaccccttgcttgtagaaaacattattattattatttttgagatggaatttgtctctgtagtccaggctggagtgcaatggcatgatctcatctcactgcaacctctgcctcccaggttcaaaggattctcctgcctcagcctcccaagaagctgggattaccagcatgcaccaccatggcttgctaattttttgtaattttgtagagacggggattcaccatgttggccaggctgatctcgaactcctgacctcaggtgatccacttgcctsgatcttccaaagtgttgggattacaggcaggtgccaccacacccagactagaaaacattattcaatagcaaacaatagcagtatgcttggggg

SEQ ID NO: 107127 - DNA, 587 bp, Homo sapiens
tactataattctggagagaatattcatattgtgtttcaaattgagtayatcttgctataatatatggcaatatattatagcaatatattagtaatagaagatgcagtgaaaatcttttaaaaaaattaataactttattttaagagcagttttatattcccagcaatattgaaaagaacctaaagagatttttcatatatgccatcccccctcacatgcatagctccccccattatgaatatctcccacctgagtggtacatttgttacaactgagaagcttacattgctggatcataataatcacccaaagtccatagtttatatcttagttcccttttggtattgtaccttctatatagttggacaaatatataataaatgtacctgccgttagaatactttcgctgccctgaaattcgtctctctttttttattcctccctcccaactaacccctgtcaactactaatatttttgctgtctccatagttttgatatgtccagcatagtcatatattaaggataatatagtggatatctttttcaatattacaaaacataaatttccaagataattgaatgtatt

SEQ ID NO: 107128 - DNA, 587 bp, Homo sapiens
tactataattctggagagaatattcatattgtgtttcaaattgagtacatcttgctataatatatggcaatatattatagcaatatattagtaatagaagatgcagtgaaaatcttttaaaaaaattaataactttattttaagagcagttttatattcccagcaatattgaaaagaacctaaagagatttttcatatatgccatcccccctcacatgcatagctccccccattatgaatatctcccacctgagtggtacatttgttacaactgagaagcttacattgctggatcataataatcacccaaagtccatagtttatatcttagttcccttttggtattgtaccttctatatagttggacaaatrtataataaatgtacctgccgttagaatactttcgctgccctgaaattcgtctctctttttttattcctccctcccaactaacccctgtcaactactaatatttttgctgtctccatagttttgatatgtccagcatagtcatatattaaggataatatagtggatatctttttcaatattacaaaacataaatttccaagataattgaatgtatt

SEQ ID NO: 107129 - DNA, 640 bp, Homo sapiens
agaaacaaaaataatgttgaattcattaattgactcctaaagtggttattttcaatgaatatcagagcaatttccaaatggaaaagcttattcatatctaatgcttttagtaacattattttgtataagtatgccaattttgatggtttattatactttttgatgaggtttatatattataccttcttgccatgagtggatggagaaactttctgaaggctaaactagaggatacgagaaatgtaggcaaattatgacaccacaggggtgtgagaaataaagaatattatatactgggattcgccaaacatatatttaagctgatcagtttgggacacttccacagagcacttgagaagtgtacattcaactaaagtgccaytatcattgtgtacctgctcaattgtcaggcaagtttaagagcatgataaatatttgtagtataacggtataaatccctctgatgtcttacatgaaaaacatgcaggagcattagtcacctgctttgacattgattcccaagtgtatgagttgctgctctgattttagatcacatttttcctcatcactcggcatatccacattgatatagacactgttttattgtagtaacagacatatgaagaataatatcacctat

SEQ ID NO: 107130 - DNA, 610 bp, Homo sapiens
agcatgtggttttttttatttcttgtacacatattttgatatcatacactatttttgcagagagctatttccttatttttattcrtggctctataattagactaaaataatattagaaattgtggaaatttaactagacatggtatcatgtccatgtagtcccacctattcaagagatgaagccaggagaatttcttgagcccaggagtttaagaccaagcttggcaatataacaagagcttatctctaatttcaaaaagtcgtggaagtttagaaatttaaattctgttctcaaatctgtattagagaaggtttacacagtgttttccaagccttttttatttagagtatactttaaactctttatttaattgaaaaatatgcattttgtttaaaataacctgtttgataaacagatactcttcatattcctatggtcagactttaatttcacaaggtttttgcattttaattaaaaggaatccactcagggtctttgtatctcattctaaatttcaaatttcagaggcttttgtgcttagttattgaaaaaataattgtaaagctcctgcattactacgagccacttgaaactagaaaacctatttgt

SEQ ID NO: 107131 - DNA, 610 bp, Homo sapiens
agcatgtggttttttttatttcttgtacacatattttgatatcatacactatttttgcagagagctatttccttatttttattcgtggctctataattagactaaaataatattagaaattgtggaaatttaactagacatggtatcatgtccatgtagtcccacctattcaagagatgaagccaggagaatttcttgagcccaggagtttaagaccaagcttggcaatataacaagagcttatctctaatttcaaaaagtcgtggaagtttagaaatttaaattctgttctcaaatctgtattagagaaggtttacacagtgttttccaagccttttttatttagagtatactttaaactctttatttaattgaaaaatatgcattttgtttaaaataacctgtttgataaacagatactcttcatattcctatggtcagactttaatttcacaaggtttttgcattktaattaaaaggaatccactcagggtctttgtatctcattctaaatttcaaatttcagaggcttttgtgcttagttattgaaaaaataattgtaaagctcctgcattactacgagccacttgaaactagaaaacctatttgt

SEQ ID NO: 107132 - DNA, 229 bp, Homo sapiens
ttgataaataaataaaattagtattttattcatattatcagattttccagtatagaycttatgaatttatagacacagaaaatgtttcttgaattactgactgagtagtaaatataacattttctgaagatttctttttttttttttaaataggaatgaaaagcactaccagcaactggacaaaaagcaaatggtattggtattataaaaagtgcttcatgagagcaat

SEQ ID NO: 107133 - DNA, 229 bp, Homo sapiens
ttgataaataaataaaattagtattttattcatattatcagattttccagtatagaccttatgaatttatagacacrgaaaatgtttcttgaattactgactgagtagtaaatataacattttctgaagatttctttttttttttttaaataggaatgaaaagcactaccagcaactggacaaaaagcaaatggtattggtattataaaaagtgcttcatgagagcaat

SEQ ID NO: 107134 - DNA, 229 bp, Homo sapiens
ttgataaataaataaaattagtattttattcatattatcagattttccagtatagaccttatgaatttatagacacagaaaatgtttcttgaattactgactgagtagtaaatatracattttctgaagatttctttttttttttttaaataggaatgaaaagcactaccagcaactggacaaaaagcaaatggtattggtattataaaaagtgcttcatgagagcaat

SEQ ID NO: 107135 - DNA, 229 bp, Homo sapiens
ttgataaataaataaaattagtattttattcatattatcagattttccagtatagaccttatgaatttatagacacagaaaatgtttcttgaattactgactgagtagtaaatataacattttctgaagatttctttttttttttttaaataggaawgaaaagcactaccagcaactggacaaaaagcaaatggtattggtattataaaaagtgcttcatgagagcaat

SEQ ID NO: 107136 - DNA, 516 bp, Homo sapiens
tagtaataatatgtaaatttgtattaaaattacaagaattactttcacatttgagaacagaagagtcatgattgttcatcagcaataatcaacattattaattttaattgtgatcagctaattgagattaattgcaatacatcatgctttataatgtgaccgtcaaaaggaaaatatgattgtaatcttatactacatctatcaatgtctctgattcataagactatagagtaagcccctagttttcaaagccaacttatgmggcagtgacatcttatgcaagtttgctgctttctgccacagtggtccttggtcagctggcacaaattgttttacaaatgccactaggtctaaaaaaagtttggatcacaatgaacacagaaaaaccttcatcccttcagaaatacctatcaattacttccaatacagaatgaaaaattgacaaaggaaatatgttgattgtaaaaatgccagttaccttgcatctacatgaaagaaaaatgccattcttattac

SEQ ID NO: 107137 - DNA, 516 bp, Homo sapiens
tagtaataatatgtaaatttgtattaaaattacaagaattactttcacatttgagaacagaagagtcatgattgttcatcagcaataatcaacattattaattttaattgtgatcagctaattgagattaattgcaatacatcatgctttataatgtgaccgtcaaaaggaaaatatgattgtaatcttatactacatctatcaatgtctctgattcataagactatagagtaagcccctagttttcaaagccaacttatgaggcagtgacatcttatgcaagtttgctgctttctgccacagtggtccttggtcagctggcacaaattgttttacaaatgccactaggtctaaaaaaagtttggatcacaatgaacacagaaamaccttcatcccttcagaaatacctatcaattacttccaatacagaatgaaaaattgacaaaggaaatatgttgattgtaaaaatgccagttaccttgcatctacatgaaagaaaaatgccattcttattac

SEQ ID NO: 107138 - DNA, 516 bp, Homo sapiens
tagtaataatatgtaaatttgtattaaaattacaagaattactttcacatttgagaacagaagagtcatgattgttcatcagcaataatcaacattattaattttaattgtgatcagctaattgagattaattgcaatacatcatgctttataatgtgaccgtcaaaaggaaaatatgattgtaatcttatactacatctatcaatgtctctgattcataagactatagagtaagcccctagttttcaaagccaacttatgaggcagtgacatcttatgcaagtttgctgctttctgccacagtggtccttggtcagctggcacaaattgttttacaaatgccactaggtctaaaaaaagtttggatcacaatgaacacagaaaaaccttcatcccttcagaaatayctatcaattacttccaatacagaatgaaaaattgacaaaggaaatatgttgattgtaaaaatgccagttaccttgcatctacatgaaagaaaaatgccattcttattac

SEQ ID NO: 107139 - DNA, 420 bp, Homo sapiens
ttgctttttgttttgagacagggtctcgctctcattgccctggcacgatcttggctcactgtggcctttactcttgggcttaagtgatccccccacctccacttcctgagtagctaggactacagtcatgcaacaccatactcagctaatttttcatatttttttgtagagatggggcttcaccgtgttgccctagctgttctctaacttctaagctcaagmaatccacctaccttgcctcccaaagtgctgggattacaggcatgagccagcatgcccggccaaataatttcttttgttgttgttttttgttttgttttgtttgttttgagacagggtctcactcagttgcccaggctggagggcaatagtgcaatcatagttcactacagcctcgagttctagggctcaaaagatcct

SEQ ID NO: 107140 - DNA, 299 bp, Homo sapiens
aatttttcatatttttttgtagagatggggcttcaccgtgttgccctagctgttctctaacttctaagctcaagaaatccrcctaccttgcctcccaaagtgctgggattacaggcatgagccagcatgcccggccaaataatttcttttgttgttgttttttgttttgttttgtttgttttgagacagggtctcactcagttgcccaggctggagggcaatagtgcaatcatagttcactacagcctcgagttctagggctcaaaagatcctcccttctcatcatctgaggtcaggaa

SEQ ID NO: 107141 - DNA, 420 bp, Homo sapiens
ttgctttttgttttgagacagggtctcgctctcattgccctggcacgatcttggctcactgtggcctttactcttgggcttaagtgatccccccacctccacttcctgagtagctaggactacagtcatgcaacaccatactcagctaatttttcatatttttttgtagagatggggcttcaccgtgttgccctagctgttctctaacttctaagctcaagaaatccacctaccttgcctcccaaagtgctgggattacaggcakgagccagcatgcccggccaaataatttcttttgttgttgttttttgttttgttttgtttgttttgagacagggtctcactcagttgcccaggctggagggcaatagtgcaatcatagttcactacagcctcgagttctagggctcaaaagatcct

SEQ ID NO: 107142 - DNA, 299 bp, Homo sapiens
aatttttcatatttttttgtagagatggggcttcaccgtgttgccctagctgttctctaacttctaagctcaagaaatccacctaccttgcctcccaaagtgctgggattacaggcatgagccagcatgcccggccaaataatttcttttgttgttgttttttgttttgttttgtttgttttgagacagggtctcactcagttgcccaggctggagggcaatagtgcaatcatagttcactacagcctcgagttctagggctcaaaagrtcctcccttctcatcatctgaggtcaggaa

SEQ ID NO: 107143 - DNA, 521 bp, Homo sapiens
ttagggtttatattaggaacaatgtcctcaactattgcagcgatatattgtatgcctaattttagtgccagaacatagtagaccatcaataaacatgtggcgaactaaacaatctcaatrttaggcaaaccttagaagctggcgatagcccatgtggaagtcttcagaaagcaagcttccttagatttccagtttgaatcctacatgattcttggaaagttaatagtagagagtgtttaattgtacaaagtttcagctgaggaagatgaaaaagttttagagatggatggtggcagtggagcataatgatgtgaatgtagttaatgccactgaactctacacttgaaaatgatgaaaatggcactccagcctgggcgacagagcgagactccgtcttaaaaaaaaaaaaaagaaaaaaagaaaaaagaaaatcaggtgtagaatagtgtagtttattccttttaagaaaatgaatggtaatatatttatgtacatacaaaaatacctgtacatgcacatca

SEQ ID NO: 107144 - DNA, 521 bp, Homo sapiens
ttagggtttatattaggaacaatgtcctcaactattgcagcgatatattgtatgcctaattttagtgccagaacatagtagaccatcaataaacatgtggcgaactaaacaatctcaatattaggcaaaccttagaagctggcgatagcccatgtggaagtcttcagaaagcaagcttccttagatttccagtttgaatcctacatgattcttggaaagttaatagtagagagtgtttaattgtacaaagtttcagctgaggaagatgaaaaagttttagagatggatggtggcagtggagcataatgatgtgaatgtagttaatgccactgaactctacacttgaaaatgatgaaaatggcactccagcctgggcgacagagcgagactccgtcttaaaaaaaaaaaaaagaaaaaaagaaaaaagaaaatcaggtgtagaatagtgtagtttattccttttaagaaaatgaatggtaatatayttatgtacatacaaaaatacctgtacatgcacatca

SEQ ID NO: 107145 - DNA, 516 bp, Homo sapiens
ggttgattagctcatttcactcttccctgagaggcctctgaggagctggccacactgggagctttagragggtaggatcaatgcctttggatatctgggtggggtagagggagttttaagtatagagaaagggggaggggagagagtgttgaaagggtgctgatggcacatctggacaaggggcagacctgggcctacttaagatggcattgcattgggctcagggtttatagagcatagaatatgctttacatggaatgatgccacctccactgcctgagatgcactgtatagactgagatgctgctggaactgtggtgggggtgggcaagaggggtgggtggggaggcagtgggcataatttcccttcagagtcctgtagcacagagttctgccacagaacaccactgttctgctttaaacaccattgcaaatggttagcattcaccttagctgaatttgtagagagggagaggaaagagggaaaagaggagaaaaagagagaatgtgtttgtc

SEQ ID NO: 107146 - DNA, 516 bp, Homo sapiens
ggttgattagctcatttcactcttccctgagaggcctctgaggagctggccacactgggagctttaggagkgtaggatcaatgcctttggatatctgggtggggtagagggagttttaagtatagagaaagggggaggggagagagtgttgaaagggtgctgatggcacatctggacaaggggcagacctgggcctacttaagatggcattgcattgggctcagggtttatagagcatagaatatgctttacatggaatgatgccacctccactgcctgagatgcactgtatagactgagatgctgctggaactgtggtgggggtgggcaagaggggtgggtggggaggcagtgggcataatttcccttcagagtcctgtagcacagagttctgccacagaacaccactgttctgctttaaacaccattgcaaatggttagcattcaccttagctgaatttgtagagagggagaggaaagagggaaaagaggagaaaaagagagaatgtgtttgtc

SEQ ID NO: 107147 - DNA, 516 bp, Homo sapiens
ggttgattagctcatttcactcttccctgagaggcctctgaggagctggccacactgggagctttaggagggtaggatcaatgcctttggatatctgggtggggtagagggagttttaagtatagagaaagggggaggggagagagtgttgaaagggtgctgatggcacatctggacaaggggcagacctgggcctacttaagatggcattgcattgggctcagggtttatagagcataraatatgctttacatggaatgatgccacctccactgcctgagatgcactgtatagactgagatgctgctggaactgtggtgggggtgggcaagaggggtgggtggggaggcagtgggcataatttcccttcagagtcctgtagcacagagttctgccacagaacaccactgttctgctttaaacaccattgcaaatggttagcattcaccttagctgaatttgtagagagggagaggaaagagggaaaagaggagaaaaagagagaatgtgtttgtc

SEQ ID NO: 107148 - DNA, 504 bp, Homo sapiens
ggctgcagcaagcagacgccgtctcaaagtgatggccgtggcactcacatgacaccgcagacgtcgtccacagcctccccaggccagtcagcctttcctaacccaggtgggcagggaccactggtacggatccccggccggactctcaaggaggactccgtgccagtgaccmccgcttcttcacgcttctgtgcactaaaggccgaaaaccaggatggagcgactgccgggtgcctgcaaccaccgcatggggtgcctgccctgcagggctggggctcagggcgcccagaggtgcggctcctccctggggagcacagaccctggggagggtaaggatccctgtgtgtcagggacagaggttgcgatgcacgcacagggggagtgcaggcgacctcgagagaggagatcgggctttgctggcaccagcgctgggggaagcccacaggatgcttggagccaggagagagggcaggaaggcttcaggcagagggaccaggcatggag

SEQ ID NO: 107149 - DNA, 504 bp, Homo sapiens
ggctgcagcaagcagacgccgtctcaaagtgatggccgtggcactcacatgacaccgcagacgtcgtccacagcctccccaggccagtcagcctttcctaacccaggtgggcagggaccactggtacggatccccggccggactctcaaggaggactccgtgccagtgaccaccgcttcttcacgcttctgtgcactaaaggcygaaaaccaggatggagcgactgccgggtgcctgcaaccaccgcatggggtgcctgccctgcagggctggggctcagggcgcccagaggtgcggctcctccctggggagcacagaccctggggagggtaaggatccctgtgtgtcagggacagaggttgcgatgcacgcacagggggagtgcaggcgacctcgagagaggagatcgggctttgctggcaccagcgctgggggaagcccacaggatgcttggagccaggagagagggcaggaaggcttcaggcagagggaccaggcatggag

SEQ ID NO: 107150 - DNA, 504 bp, Homo sapiens
ggctgcagcaagcagacgccgtctcaaagtgatggccgtggcactcacatgacaccgcagacgtcgtccacagcctccccaggccagtcagcctttcctaacccaggtgggcagggaccactggtacggatccccggccggactctcaaggaggactccgtgccagtgaccaccgcttcttcacgcttctgtgcactaaaggccgaaaaccaggatggagcgactgccgggtgcctgcaaccaccgcatggggtgcctrccctgcagggctggggctcagggcgcccagaggtgcggctcctccctggggagcacagaccctggggagggtaaggatccctgtgtgtcagggacagaggttgcgatgcacgcacagggggagtgcaggcgacctcgagagaggagatcgggctttgctggcaccagcgctgggggaagcccacaggatgcttggagccaggagagagggcaggaaggcttcaggcagagggaccaggcatggag

SEQ ID NO: 107151 - DNA, 558 bp, Homo sapiens
gaagcaaagattcttggaactgggaaatgtttgaagtgagttttggagatgaccagagttcttgtggtgaggcagaggaggctgtttccagcggaaggagcagaacgtagaaaagcaccgaggagtgaaaagaaagggactacctcttacgtcctttcaattgtatatatttaagctcacaggatcttacataaggttttcagttcagttgataaatatgtaattatgtgattataaattgttgctgttgttttacagattgaatgtcaaccacttttactggctgcrcatctaggaaaactgataatggtggaatttttattaaagaaaaatgcaaatataaatgcagttaattgtcttaacaggtacagaccttagttcttattgtgttgtttttaaacctgagtgtcattgtagagtggtagcggtcactcaagtcacaaatattatattaataagaagactaacttttaattattgggatatagtgagaaatatcaacacagatcatcacaggtagaaaaacaattatttggactgagtaacataaagaacagt

SEQ ID NO: 107152 - DNA, 558 bp, Homo sapiens
gaagcaaagattcttggaactgggaaatgtttgaagtgagttttggagatgaccagagttcttgtggtgaggcagaggaggctgtttccagcggaaggagcagaacgtagaaaagcaccgaggagtgaaaagaaagggactacctcttacgtcctttcaattgtatatatttaagctcacaggatcttacataaggttttcagttcagttgataaatatgtaattatgtgattataaattgttgctgttgttttacagattgaatgtcaaccacttttactggctgcacatctaggaaaactgataatggtggaatttttattaaagaaaaatgcaaatataaatgcagttaattgtcttaacaggtacagaccttagttcttattgtgttgtttttaaacctgagtgtcattgtagagtggtagcggtcactcaagtcacaaatattatattaataagaagactaacttttaattattgggatatagtgagaaatatcaacacagatcatcacasgtagaaaaacaattatttggactgagtaacataaagaacagt

SEQ ID NO: 107153 - DNA, 272 bp, Homo sapiens
gaattcagattttaaaaagtcttcactctctgaagatgatcatttgcccttaaggacaaaaatgaactgaagtttcacatgagctatttccattccagaatatctgggattctactttaagcactacataaactgactttatcctcagaytagctgaatgattttgtgctgtttcaggatgtttgcactgaagaaaaacagaaagcttatctgaaatttataaaactttttgttttgctacatagaaaacagaaggtatttgaataataagc

SEQ ID NO: 107154 - DNA, 599 bp, Homo sapiens
gatttttaaaaaaactaatcgggcatggaaaatgacagagaatgaaaaagcagaatgacagagatcgtcttagaaagaccatgatcattatatgacgagttaatgggtgtagcacaccaacactgcacatgtataaatatgtaacaaacctgcacgttgtgcacatttaccctagaacttaaagtataataaaaaaaaaaaaagaaagactatggtcattatagctgacgaggaacagatacttactgtgaatakttatcagtggaggagcaaaagagtatgtaaaaacaaccaggaagacacagtatcgaagaaactaaaggaacagtttcaagtagtgttgtccagttagcagcatcatagattaggggggctgtagatcagagactggtgggtgtcaagacaaaagcaaattgagcaacagtttttattttgggattcacaggttattggtgactttgaaaagtgcaatttgagtagaatgatcagatcaaggtaaggtggggggtaaaggagtgaacaatgctgagatggtggagataacaagtatggacaatttgccactgaagtttcacaacaaaaggaggatgataaataat

SEQ ID NO: 107155 - DNA, 631 bp, Homo sapiens
tcatacaacagtttcacactgttttaattgttactgttactatctttttaaatttttttagacagggtctcactctgtgcccaggctgaagtacagtgacgcagtctcagctcactgcatcctcgaacttatgggctcaagtgattctaccacctcagccttccaagtagctgggactacaggcacttgccaccaggcctggctaattttttaattttttgtggagacagggtcttgctacattgcccaagctggtcttggattcctggcctcaagcaatcctccctccttggtttcccagtgttgggattacaggtgtgcaccaccakgcctggcctgttttaattgatgaggtctgtaaaacatcttaatatttgacagagctagtttctttttattactctttttttttcagagttttcttcgctatttttttttattggaattgcatttgatttccaagttaagaagaatgacatctttatgatgtcagtttttcctatctgaggccacactatgcttttccatttggtcacttgtctgtcctttaaaaatgacttgaaattttgttcatgtatcaccttcacatttctattaagtttacatctaggtcttttgttgtgttggctgc

SEQ ID NO: 107156 - DNA, 522 bp, Homo sapiens
taatgttcccaggtccatatctctggctctggcttctctcctaggctccggagccacatactagtcaccaaagttccattaaaatcttaaacctacgaaggccaaagctaaactttttttctctctgcctccttcctcccatctgtttccactatcatattatattttctgtcttactgaaatacatgatatttcaattcatcaatgaaagtagagacgtgatgattgtcttttacccttacttccaatcagtmaccaaattcattgttccagtccaactttcagatctgcaagcattaaactgttcattctcttgccaccagagcagggtccatccctattcccctgcccaaagcacatctttctctaccctgtcaccagggcaatatttctaagttataaatagtctcatttttcctctggtaaaaatttctcaaagcaattttactttacatttagcaaataagtcccagctcctaggcatagagttcacaacttccacaaactgacctctgcctattt

SEQ ID NO: 107157 - DNA, 680 bp, Homo sapiens
cttggcacacccattagaccttgctgggaagggttacagaaaggattattaacttaataaacgttttctcctttcattccatctcagaacaaaacatcaagccaaaataaacactttcaaattattcaactgattctgcagcctggccgcagtggattcagcatcagttatagaygatcctccaactttcccttcacctccccaaaactcttctggcattacaaaactcaaaacaaattcatcttgttgacaagcagaactgattcaagaaaggcaagatagctcatcatctttgtcattaaactttagataattaaaacgtcacaccaaacttcccttgaattagctgattaactgctctcttctatatatttaacttaaaaacattaaaaaccattattttaatgatatagaacatgaaattagaggactattacattattcagcactcttcaaagacccatgaccaaaaaaaaaaaattcattttaatgtgtgtcccacatctgtagaaatctcagaactgcatttgcctgtgatttaaagtaactatcacaatattatctattggaaaaattagaaaacatgacagaaatgagaaagtagaaaagtatattcatgtgtgtgtggaataccttcttgactttcgatagtatttattttaaaggtattttagacaaaa

SEQ ID NO: 107158 - DNA, 476 bp, Homo sapiens
ctgcacgcttcggaagacagtctctatgtatagcccacacttaaggagtagggagttattatgctcccctccttcaggtggagaattttcaycacttatttggaattcttatgcatgggggattggtctattatccccatttatttatttcctaatgggaaacttgacaccagccagtttcttgcttccatttagatagtccacttttttgctccagaagtgttgccaacaaagctctgagaaaaatatctataaacctacttttttatatccagtcaagctatttgttacctataaatgcaatataaaatgaatttttgacatgaaaggtctcaaaatatactgacagaaaagcatactagaaataattggtaaagaattgatcttagatattaaaaataaatctattaaaatagttgaaagaaatactggtaagcaaagcccattgaaattattaatttaaaacttctattatt

SEQ ID NO: 107159 - DNA, 476 bp, Homo sapiens
ctgcacgcttcggaagacagtctctatgtatagcccacacttaaggagtagggagttattatgctcccctccttcaggtggagaattttcaccacttatttggaattcttatgcatgggggattggtctattatccccatttatttatttcctaatgggaaacttgacaccagccagtttcttgcttcyatttagatagtccacttttttgctccagaagtgttgccaacaaagctctgagaaaaatatctataaacctacttttttatatccagtcaagctatttgttacctataaatgcaatataaaatgaatttttgacatgaaaggtctcaaaatatactgacagaaaagcatactagaaataattggtaaagaattgatcttagatattaaaaataaatctattaaaatagttgaaagaaatactggtaagcaaagcccattgaaattattaatttaaaacttctattatt

SEQ ID NO: 107160 - DNA, 476 bp, Homo sapiens
ctgcacgcttcggaagacagtctctatgtatagcccacacttaaggagtagggagttattatgctcccctccttcaggtggagaattttcaccacttatttggaattcttatgcatgggggattggtctattatccccatttatttatttcctaatgggaaacttgacaccagccagtttcttgcttccatttagatagtccacttttttgctccagaagtgttgccaacaaagctctgagaaaaatatctataaacctacttttttatatccagtcaagctatttgttacctataaatgcaatataaaatgaatttttgacatgaaaggtctcaaaatatactgacagaaaagcatactagaaataattggtaaagaattgatcttagatwttaaaaataaatctattaaaatagttgaaagaaatactggtaagcaaagcccattgaaattattaatttaaaacttctattatt

SEQ ID NO: 107161 - DNA, 610 bp, Homo sapiens
tttctaggacaggtattacaaatccacttaacagtgatggtggtagttgcagtactggaaattatactgaaaaagacataaatagcagatagagatagagataaaagataaataggtatatactgtgaattctcagtttaaggataattaccaatcaatttgatataaaacaagggagaaaatagtaaggggaaactgaaatcccatctctgtcattataagaaaagttaaatgtttgtttgtaattattttttctttattggctcaaatatatgcaaaattgaaaaaaacctgtggyttatctgagtcccacgaagactggacatagtctcttctaaattctgcctcaagtctgctatgtttttaactgttctcattcttcttgtttcagggtcttcacctaggaaagcaatatgataaatttgctattcatgacatttagtatcctcaaaataattgtatacctagataattaagtcacctcttcttaaaagtaaaaggatatgtaatacatttcaaataactattattatctacaaattataattctttctagcaataaaatgtgaatagagacaaacatagtatcaccagtaataattttaagtgg

SEQ ID NO: 107162 - DNA, 531 bp, Homo sapiens
gagggaagttgaacaaataggcccctttaatgagtaggtgaaaaacatgtttggagttttaaaatgttaacttatttatggatgtctagaaggtactggacactaggtgaggctaataatgcccatggcagatttccggaatttattttctccaaatgaaccttaccagtggtgctcatagctcagttttaccaaaaaattwaaaaaaaaatcacttcaagaaacaggaatttaaaatgtaactatgtatttttaaaaatcagtctaaaaacatgaaagctatttggcaaatgcaaataatttcataagagactatgaaatttcttaagatcccatacacgtttttaggagcaaattggacttacctaataagtcagtgtaaagtgcctgttctagatcacccagcatggtaaggatcacctcctcatccagatgagctgtcccttcccgcaaacagctttctccctcctcttcagcccagcttctgctgatgctgcttggcttggaggacacgttttcatcttcagacct

SEQ ID NO: 107163 - DNA, 531 bp, Homo sapiens
gagggaagttgaacaaataggcccctttaatgagtaggtgaaaaacatgtttggagttttaaaatgttaacttatttatggatgtctagaaggtactggacactaggtgaggctaataatgcccatggcagatttccggaatttattttctccaaatgaaccttaccagtggtgctcatagctcagttttaccaaaaaatttaaaaaaaaatcacttcaagaaacaggaatttaaaatgtaactatgtatttttaaaaatcagtctaaaaacatgaaagctrtttggcaaatgcaaataatttcataagagactatgaaatttcttaagatcccatacacgtttttaggagcaaattggacttacctaataagtcagtgtaaagtgcctgttctagatcacccagcatggtaaggatcacctcctcatccagatgagctgtcccttcccgcaaacagctttctccctcctcttcagcccagcttctgctgatgctgcttggcttggaggacacgttttcatcttcagacct

SEQ ID NO: 107164 - DNA, 383 bp, Homo sapiens
accatattgatagtgtttttctttacttatattgttaatattttgtacacttccaatattgcaaggaagaccagacattctgatcatatcagcctgtttytaatagcactgcttatatcacacggggaaccatcaatcccttccctctctgtactgaatggtgcttctgaaataaataggtgaaatgtcatcctttcttttagaatatggcctagctataatgactcaacttttttgggtttgtttttttttttctggtaaaacatggcagaagtcactttatagaatgcctgtaatttcatagaatgcctttaattttatatgatgctttcattgtttgtaaagtacatcatgaaaccagtagtggtcagtgggatgaattc

SEQ ID NO: 107165 - DNA, 584 bp, Homo sapiens
tttgtgtagaacaagaaagagtttggatgtctactgggtggcaagaaaggcagtgtgacagagatggctaggtgtccatcaaagattcatattccccttagtagagtatagctactgctggtgagcagtttttcagccagagacaatatttcccagcttgtactgcatcgctatggggccatatgactatttctcaccaaaggaaaaatggagaacatgttgtgcatcattccaggcagaggagacagagatatgcacatgctttatgcaccttgattgtccatcaactgaatgcagaatatcctcaggccctagataggggagaaaacataagaaagatgtgtaggacatacctcaccaccatgaagaaggacacatatggaaccgtccccccgcgccaaaaagagtcattgtttctgtaaatgagaaatgaacttttattatcatattaagccacrgaaatttggaaggttcatttgttaaagcagctaatgtcaccccaaataatacattgcacaagaggagattccatccaggcagttagatatgagcctagagctcagaggacaggtcaagtggagaga

SEQ ID NO: 107166 - DNA, 615 bp, Homo sapiens
tggcagcggcaatggctagatcagatgtgcagcagttgtcccttaagtgcaagtttgctttccagggtcttcgtggcctgtggtacagagagagggagaccacattcacataactttccttacagtatattgttataattattctattttcttagtgctgtttttaatatcttactgtgcctaatttatagacaaatctttatcatagatacatgtgtatatgaaaaaaacagagtatatacagggttcagtactattcacagttataggtatccactgggggtcytggaacatagccctcacagataaagggggactgctatagttaggggggacctgtgctgttggactttatatatatggtctccatctctgccaacaaggtcactgtttctgtgcccactgggccagtgctggtgtggccaatcacccaggctggtagggtcaactggctgagccattcgttctcttggttgttcagtgcttcttccatcatgggtgctctctggttggtgttgacatgagatacaaagatcttgccatggctgtatcatttcattgtcctcactaagtactactatcagatccattttcctcaaacactgctttatttaa

SEQ ID NO: 107167 - DNA, 580 bp, Homo sapiens
ttttgctgacaggttgattggttttgtttgttgtttatttgttttagtaatccaaatggtggtttcagatacatatatagatttttaaacttcaggatattgatttcaggagagatkaaatttacctagaaaatattgagcagatcaatgatattttagagaacaaagttggggggctcatttccactgttagactagaaaaagacaaagtggaataaaatggaaatctggagtgaataactgttttctattaatgattttacttcttttcatgtactaactttcagtttatcacatattctaagtttttatgaaaagtattttaacttttggagtttcgtaagctctaacactctccaactactgctaagagaagtgacaaacataattctgaacaagaaattgaattttattttaagcaatttcttataatttgtaccaaagggaaatctaaatgcattggtgcgactttatcaaataactactcttttgagtatgtgtctttatttgagtatgtgtctttgcttgagaaaaaacttgtctgaattatattttactttctggtttccctcttctctct

SEQ ID NO: 107168 - DNA, 521 bp, Homo sapiens
cgtggaaaagcaaagtgattgatttttatttccttaaaggagattttatatctgaggagatttattcattatcttaggaggggcagcaggtgtgttttcagggagccaagtgttaatctaataattgtaataatgtttgctactgcaacccagaggtacctatgcatcaatcctaggcagttaagcttccttggaagcctggcttttaaattttatttttgagaagattaggttcaagtctttttcattctttgaggattctatatcgggttatattttcattatctgatttctgctcagacaaagactgacttttgagatttttgctaagcttggactgaagaggtaggttagttcatytaatagatatatattaatactaaatacctactatgtgctagccatctttttgggtgctatagcaatgagcaagactgggtcctcgttatgattgggactaaaaaggtcttagttatggttggatttattgtgtagttagagaaatagacattaagtaaata

SEQ ID NO: 107169 - DNA, 558 bp, Homo sapiens
cccaacacagtgcaaggcatgtgggaggaggtactcaggaaatctttattttatgaatgaataaaagctaacaattgtgtatagcaggttttgctatgtactagaaattagaagtagagaatactcttcacactgcagaaagactatatcaatgcgtaaaagattcacataatctgaagcaagttattttatatggaatgaattggggtaactatacatagtataatataaaattctttgccatgcaaaggggaataaaaatgagccaggcgctgcacagaatttgggaacattgattggggaayagttctgaagtagaggcctattgtgtaagtaaatctctggctgagttcatcggtctcctttgattgttcagctaatgtcacttcaaaacagactatgctttcttcatgttaacccttttttaaaaaaattgaaactgttcagggcttcaagactagataaggtataccttatgtctggtataaaagataaggcattcactgtggaatacaaaaccagaaaagtggcattatttttttccaaaaggaaaaatga

SEQ ID NO: 107170 - DNA, 565 bp, Homo sapiens
ctgcctcaaaacaaacaaaacaaaacaaaaactactagtatctccagacctatttatgtttcagtcttcaccatctctcagttgatggcaattccatttcagttattcaggacaaaaccttggaatttttcttgatttattttttctctcatccaagattcaaaatctttggaaattaatgagtttatattcaaaatatatccagaatatgaagcctcttctcacgacaccctctgttgccattcatatccaagcagccattattatcattacgtcttgtctacatttttacaatagcatcttcctaatcagtgtccacattctactgttgtcctcccacaattcattgcaatggattctcaagaaagttgycagtgtcttcattctattatgtaagttatatcaggatgtgactcctgtaatttgaaaatcaaaagctttttttttttttttttttttgaggaagagttagaatttagacagtagcctacaaggctccacatggtatgattccccaactttctttttatagaatacagcagcagtgtacctagtgtgcatttga

SEQ ID NO: 107171 - DNA, 630 bp, Homo sapiens
gaacccaatgggagataattgaatcatggggtagttcccccatactgttctcattatcgtgagtaagtctcacaagagctgatggttttataaggtatttcccctttcgcttggctctccttctctcttgctggccaccatgtaagatgtgtctttgctggctgggcatggtggcttacrcctgtaatcccagcactttgggaggccgaggcaggcggatctcgaggtcaagagattgagaccatcctggctaacatggtgaaaccctgtctctactaaaaaatattaaaaaaattagccaggcgcggtgacaggcacctgtagtcccagctactcgggaggctgaggcaggagaatggtgtgaacctgggaggcagagtttgcagagagccaagatcgtgccacagaactccagcctgggagacagggcaagactctgtctcaaaaaaaaaaaaaaaaaaagatgtgtctttgccttccaccatgattatgaggcctccccacctatgtggaactgtgagtctattaaacctcatttctttataaattacccagtttcatgtgtgtctttatcagcagcatgaaaacagatgaatacagtaaattggacattgaagttgagggagatga

SEQ ID NO: 107172 - DNA, 591 bp, Homo sapiens
agtttctgttgtttgacaccacacagtttgtggcactttgctaccatgtttctaggaaactgatattcatcattttyctaattgcctcagggaattcttatttggtagtctctccttattctcaggggatacattccaagcctcccagcggacgcctgaaaccacagatggtaccaaaccacatgtacagtatgttttttcaacacgaaaactaggagggctagtaagtgactagcgagtgggtaatgtatacagcatggagaccactggataaagggatgtttcacgtcctggatgggacagaaaacatgggcacaagatttcatcatgctgcttagcacatctagcaatttaaaacttatgaattgcttatttctggaattttccatttaatatttttggattgtggttgattgcaggtaactgaaactgtgaaagcaaaacaaggatgaagggggactactgctgttttctctgtttgaaaagtgtgcactagaatttttcacttagttaactccatctttgaagtttcatttcaactaaacgttactttatctctgccctccttcaccaaatagggttctgttatat

SEQ ID NO: 107173 - DNA, 591 bp, Homo sapiens
agtttctgttgtttgacaccacacagtttgtggcactttgctaccatgtttctaggaaactgatattcatcatttttctaattgcctcagggaattcttatttggtagtctctccttattctcaggggatacattccaagcctcccagcggacgcctgaaaccacagatggtaccaaaccacatgtacagtatgttttttcaacacgaaaactaggagggctagtaagtgactagcgagtgggtaatgtatacagcatggagaccactggataaagggatgtttcacgtcctggatgggacagaaaacatgggcacaagatttcatcatgctgcttagcacatctagcaatttaaaacttatgaattgcttatttctggaattttccatttaatatttttggattgtggttgattgcagstaactgaaactgtgaaagcaaaacaaggatgaagggggactactgctgttttctctgtttgaaaagtgtgcactagaatttttcacttagttaactccatctttgaagtttcatttcaactaaacgttactttatctctgccctccttcaccaaatagggttctgttatat

SEQ ID NO: 107174 - DNA, 639 bp, Homo sapiens
ttcttattggtccagtgaggatcatatacctacatcataaatatgctgttaagacaatttctgccatgtggtatatgctcggtaaattttagttactatttttgttttgctgtttttatcattcaagtatatttggtaaggcaacaatatacaactctattgaatcaggagcccgtgctttgcaggattttctgraaatatctttcaaatatttgtcagagcacaacactaaccagcacattaaatctgtgtacaaaagccagcaccgtcccttctattgcggcaaacctataatagtctagaaaaatgtaggtgaacgtggtgaaaaaggacagcctgccccggtccctccacatgtgcctggcacccagatctggattaaactttcctagtgctgatggcacgtaggaatctgggggcccctcaagctaactgtgagaaaattccctgtctaaagtgagtcagtggatttttctttttctttttcttttttttctttgtttttttctttagtagtgcctctataatcctaaaacatttaaaacagaactgggttttaaacaagcaatgtcatgcctgtcaaaacagtttgagagagtctataaaataagcttatgggaagagatggtactttgtgag

SEQ ID NO: 107175 - DNA, 578 bp, Homo sapiens
caccatggtaaggagttccctctttatccccaaagccatgagaggcctttaaagggcttcgagtagtggtatgtagtggtttgacatggtcagatttgcattttggaaagatgcccactctggctgcaaggctgaaacagattgtagggagcgatggtggttggggagagattagttagggggttactttggaatccacatgaaccaggggagtggcctaaagtagcatcgtggtggaggtggagagtaatggttatatttaagaaagttcagtttggagagtgggggagagggggccaggagtgaggcctagttttctggatatgagactggagaaatggggataccatttgttgagttaggaagcaatggaggtggaagacctggttttcagtaaatgatcatcaatttttgtttctaatacattgagtttgtagtttctttgaggctcctgaggggaactgtcaaggaagtttttgggtattgggggtckatttagggatcccctgcactctgggccacggctatgcctggccttttgggggacatttaaatttccctcacaaactttggaatct

SEQ ID NO: 107176 - DNA, 547 bp, Homo sapiens
ggcctgagaaaatatgaacatcaggaaaatgtatatgtggagaaggagaatgtgtggaggggagatcaattacaagctgatatttttagatgggaggaggcaataagccagataagacgctggggtttgaacgaggccaggcagtaaggtcacagacggggatgcagatttcaggaaaggctggatatggagaccgtaatttctgtggcctagactttttatctgaacttgaggctggtgtttctcctcctgaaacgacttgagaatgacccacaaacaggtttccaataatgtcctcccaactccacaatgtgtcatatcagaagtggccaccaggagatgcagttacattaacaactgtagtagaaaccagaaaaggaaaaggtcctgtaggggtgcagatgcagagaattagagcagaacatggatgggaagggtgaggggcagtagggctgtccaggtgggagagacttggcccaatgcatggaatttttacagtttcaggaaacgggccagagacgatggawaattgcattaatgttgttac

SEQ ID NO: 107177 - DNA, 598 bp, Homo sapiens
aggtttttcccttggtgggcttcaccttgcctctccacagtgcaaaacaaatttctggtccgctccatctttaagatgtcactgtagatcttccctttatttccaaagccaatgcaatcacaaagatatggagagtagcaatggttaagattataagctttgcagtcaaacttcttgagttcaaatccaggctctgaatcttactagttgtatgaccttaagttacttgtatgacctcctgtacctcagttttttactcagtttttttacctcagtgaaatgaggctgataataatacttttttccctgggttgccatgaagattaaataagttaactcattctgcgagttaatttttatgtgagattgagcccgtgagaatgagtgacagagaggtagagggaaaaaaatggagggagtgagagaggagaaagtgggaaagacaatggaaaagataaatgagaatgaataatgggaggtagagataaaggaaaagcawtagaaagcagagaagttaattcattaaaatacatagagcactttgaagaatgcttgctatgttgtaagtacttaataaagttcgttattagtgacaggt

SEQ ID NO: 107178 - DNA, 648 bp, Homo sapiens
accctcgttacgctgtgaaccccagcaagtgtcagagtttggggccttatcaaggtcttgctgggagccacagagaactcatggtgygcttttctgggttggaagtggtcaaaacaacacccacagaaatccaagggcgagaaaatctctgcaaaggccaaataactacaagtcttatattctagaggtagtaattgtcaggcctctgagcccaagctaagccatcatatcccctgtgacctgcatgtacacacccagatggctggttcctgccttaactgatgacattccaccacaaaagaagtgaaaacggcctgttcctgccttaactgatgacattgtcttgtgaaattccttctcctggctcatcctggctcaaaagctcccctactgagcaccttgtgacccccaatcctgcccaccagagaacaacccccctttttcctttacctacccaaattctataaaatggccccacccctatctccctttgctgactctctttttggactcagcccacctgcacccaggtgattaaaagctgtattgctcacacaaagccctgtttggtggtctctttacacagacgcgcatgaaatttggtgccgtgactcagatcgggggacctcccttgggagatcaatcccc

SEQ ID NO: 107179 - DNA, 648 bp, Homo sapiens
accctcgttacgctgtgaaccccagcaagtgtcagagtttggggccttatcaaggtcttgctgggagccacagagaactcatggtgcgcttttctgggttggaagtggtcaaaacaacacccacagaaatccaagggcgagaaaatctctgcaaasgccaaataactacaagtcttatattctagaggtagtaattgtcaggcctctgagcccaagctaagccatcatatcccctgtgacctgcatgtacacacccagatggctggttcctgccttaactgatgacattccaccacaaaagaagtgaaaacggcctgttcctgccttaactgatgacattgtcttgtgaaattccttctcctggctcatcctggctcaaaagctcccctactgagcaccttgtgacccccaatcctgcccaccagagaacaacccccctttttcctttacctacccaaattctataaaatggccccacccctatctccctttgctgactctctttttggactcagcccacctgcacccaggtgattaaaagctgtattgctcacacaaagccctgtttggtggtctctttacacagacgcgcatgaaatttggtgccgtgactcagatcgggggacctcccttgggagatcaatcccc

SEQ ID NO: 107180 - DNA, 559 bp, Homo sapiens
tcaggcccatccctccacatcttttgggtctgacctcccctaagggtcactctcatcctcagccttgctgcaagatggctgtagtggttccaggaatcacaggcaaagaagaactgtttcttcatgcgtgtctcttgttttaggctaggaaacctttccaagaaaaatccacatgtcttactggacacacgcctacctctaaaccaaactcttgcaagtgggtgatgagattcatgtgattagctgagatcactcaggattcactcttgagctagggatagggctcttttctacatagacagatggtataaaatgatcagaaagtgatcagagtcaacagctacaagagtgggtgattgggtattaaataggcaatccacagatgctgtcagctccccactcatrttcccaggccctatgacttgagtgcccatcactgactttgaccaccggcatctgtatttctttgcttgcaagctctttgtgatatttggagtttgctacctgcacagtaggccagaaatgttggaggactggaggattaatgttcccaccttag

SEQ ID NO: 107181 - DNA, 576 bp, Homo sapiens
cacatcaaaggggtcatgctaccagcagctggcagggccccacccttccccactcagctgggctttgccctttggtgtgtgcagggggaggggctctgggtcccctgggcttccctgccaacgccccactccccactccccacttcacactgggccctcagtgctgccagggttggcctagccacccggcttgggagagacacacagagtggagggtggtggcttgaggctcccgaagtgaagtcagaaccagggaggggtctcccagttggtgkagtagtggagacataggcttgtgtccccagtgcctatgaggacagagggggcctacctgggccataccactctcaagctgggatagtcccgtcccataccagcactgggccggccaggccccgtcagacccactatacagaggggcaaactgaggcccggagtggctgggggaggtggtctttacggaggtgcagcccaccagcaccctcacccttctctcccctggctcctgggccctgcagggggagggagcaaagtgggaacaagggatgacaggcagacggtgggtagtcggtcccc

SEQ ID NO: 107182 - DNA, 573 bp, Homo sapiens
gggtgcagtttcatgaagtatgcaaagcaggctagctctaaatgactaaaaatctgcttttatggtctatgtttactaccattggatatataaaaagttgagttatggtgctgatggacttttgagctaatggttctcactctgctgtgaagaagttaacgacaaagaagaaaaatacggatgctatctttggctcatttatgcaacattggcctttgcagacaacaccatttattatatatatatgcattaaacagtgtcatattgcttcacagggagttaaaaattatgcagtgtaaaatgcatattaaaatcccagtgaaataagattttgccgtccccagtactgcaaaatttaaacttataaatgtccatgttttagcaaggatgttaaattmtgagaactctcaagcactgcttgtgaatgtcaatttttgcaatctgtgggatagggagtaagtattaagttgaatgtattcattctctgtaattcagcaattcaagtatcatttacgctcatcatggatattgttacacatttctacctggagccaattctaagaatgttcacaa

SEQ ID NO: 107183 - DNA, 552 bp, Homo sapiens
ctaaagtggtatctcagagtatattcacacaaaagactctcaaaagagattaaaagtgctccacctcctctatcaacaacaaggcttttaggaaccttaagtgtgccatctctgagccatctcatagaagcccaaggtagggaaagacttatatctaaaagacttaaggatgtgtttttatctctaatatagtggaattcaataagattcatagaagatccacaaagttcatttatgtatatatgtgtacatgtatacacacacacacacatatatacacaaacacacacagagagagagagagagagatcactaccttaaattgaaagacacagtgactgaaaaaaattgaaaggggcctatgagttatcaaaattctattagaagaaaacaagctaagaaacctgctaagttgcaaatatgtcccacatttcatgagaagaaaggatgattcagaccgtggyaccaaaagtccagaggtgagagctaaggaaccgagactaattaggctaattattcccagattttgcaatttaaccaaagaaatttcta

SEQ ID NO: 107184 - DNA, 606 bp, Homo sapiens
atggctaggactttttcggtgattcatagagagcctgcttatatttaagattacagatgtggcatcatattttgataactttctgattattgtacaaatagaggttgtgtgcaaaacaaaaaacaaagcaaaagacaggaagttytacaacagacatcttggtgataatgtttaaaatttaaattgttctttctgttattagcttcttaagctgttctaagttctttggaactctgatattcacaccactgagacaagcttctaggaattagaatgcaacgatggcaaatccaaacatgtcccttttgggaactacgccattataatttctacgatgaagtgtagatgtgtttgacacaaaaagcaaatagcactgaaaacacttcatcttaccataggaaaataaaacgtatggcactgtacttaccaacatggggaagccgtattaatgtcaaagcatctattgacccttgagtctgaaatagttaattaagatgaatataaaccaaccacttttgattgtgtgtgtttgatttttttaatcactgagttttgttatatgtaagtttttacagaatggaattctccactattcagtggagacct

SEQ ID NO: 107185 - DNA, 552 bp, Homo sapiens
aaggtcagatccggatgagaactgtttttgaacaggccattgatcaacgctcttcaactggtgcctggagaaatgctctttctatttgggaacctgtctgcaatgaaattttcgatcgtctgattaaaccacgctgggagattagataatgaagcgtgcgcctgttattccaaaacatacgctcaatactcaaccggttgaagatacttcgttatmgacaccagctgccccgatggtggattcgttaattgcgcgcgtaggagtaatggctcgcggtaatgccattactttgcctgtatgtggtcgggatgtgaagtttactcttgaagtgctccggggtgatagtgttgagaagacctctcgggtatggtcaggtaatgaacgtgaccaggagctgcttactgaggacgcactggatgatctcatcccttcttttctactgactggtcaacagacaccggcgttcggtcgaagagtatctggtgtcatagaaattgccgatgggagtcgccgtcgtaaagctgctgcacttaccgaaagtgattatcgtgt

SEQ ID NO: 107186 - DNA, 587 bp, Homo sapiens
tgaaattttcgatcgtctgattaaaccacgctgggagattagataatgaagcgtgcgcctgttattccaaaacatacgctcaatactcaaccggttgaagatacttcgttatcgacaccagctgccccgatggtggattcgttaattgcgcgcgtaggagtaatggctcgcggtaatgccattactttgcctgtrtgtggtcgggatgtgaagtttactcttgaagtgctccggggtgatagtgttgagaagacctctcgggtatggtcaggtaatgaacgtgaccaggagctgcttactgaggacgcactggatgatctcatcccttcttttctactgactggtcaacagacaccggcgttcggtcgaagagtatctggtgtcatagaaattgccgatgggagtcgccgtcgtaaagctgctgcacttaccgaaagtgattatcgtgttctggttggcgagctggatgatgagcagatggctgcattatccagattgggtaacgattatcgcccaacaagtgcttatgaacgtggtcagcgttatgcaagccgattgcagaatgaatttgctggaaatatttctgc

SEQ ID NO: 107187 - DNA, 503 bp, Homo sapiens
atttttaagaggaattcaataaaatcaagttaaggtttcttcattctcttctggaaagaagagaaattaaaatctaccctctatagcaatgcagaaacatagatagatagatagatagatagatagatagatagatagatagatagayagatagatagatagatacatacatacatacatacatacatacatacatacatgattgatagatagatagatagatagatagatagatagatagatagatagatagatagatacatttcatacactaggaaaagactctgttgctttaattcgcatgcccatttatgtcagagattcagatgacctaagcttaggggaacttgaagaatatattatcattgggagtcaggttattattctcacaagaatgattcatcccttcaacttgcaaactgctcttaaatcaacttgcaaactgctctctcagctatggggctgagagaaaactatattcctttgtaagtggtggtggaaac

SEQ ID NO: 107188 - DNA, 619 bp, Homo sapiens
gctcttctttttctgattccttaaggtaggaactgaggtcactgaattaagatctcttttcttttctaatataaacattcagtgctataaatttccctttgartactgctttagttgcatgctgcacattttgaagtgttatgtcttcattttcagggtatataaaatgctttttaatattccttttgattttcttaaactcatagttgatttagaaatatgttatttagtttccaaatatttaggaatttcccagagaggcagctgttatttatttctaattaattctatcgtagttttgtatgcttttaattttttttaaattcattgagtgttgttccatggctcaaaatttggctatgtgcccttgaagtctttgtgttctgtttttggatagactcttgtattaatgtaaatgaggtccagttggttgaccatgttcttcaagtctttaacagtcatgtgattttctgtctacttttcccaaaaaatttgaaaaagggagttaaaacatctttaataatatctgtaaatctacaagtttctcctttcacttctattattttttgcttaatacatctgaagttttttcttaggtacacaaaagtttaagattatt

SEQ ID NO: 107189 - DNA, 619 bp, Homo sapiens
gctcttctttttctgattccttaaggtaggaactgaggtcactgaattaagatctcttttcttttctaatataaacattcagtgctataaatttccctttgaatactgctttagttgcatgctgcacattttgaagtgttatgtcttcattttcagggtatataaaatgctttttaatattccttttgattttcttaaactcatagttgatttagaaatatgttatttagtttccaaatatttaggaatttcccagagaggcagctgttatttatttctaattaattctatcgtagttttgtatgcttttaattttttttaaattcattgagtgttgttccatggctcaaaatttggctatgtgcccttgaagtctttgtgttctgtttttggatagactcttgtattaatgtaaatgaggtccagttggttgaccatgttcttcaagtctttaacagtcatgtgattttctgtctayttttcccaaaaaatttgaaaaagggagttaaaacatctttaataatatctgtaaatctacaagtttctcctttcacttctattattttttgcttaatacatctgaagttttttcttaggtacacaaaagtttaagattatt

SEQ ID NO: 107190 - DNA, 506 bp, Homo sapiens
gggttgagcatacttgctcaggtctctctttgtcctcttgcaaagccactaataatcactcttgtgataacccattaacacattaacctattaatccattaatctgtacatgagggctaagacctcataacacaatcacctcttaaaggttccacctttcagtactgccacattggggataaagtttcaatatgaattttggaggggagaaacgtttaaaccacttcaatagcatttggtcactgacaacttgacatgagatccctcagtactgtcaacctgtaacaaatgaggktcccactgcagtgattgttacagctgtccacaaacatgatctggaccattgcattttagtcacaggaaacattcagcaagggtcaagcttactatacaacagcagtgagtatgtattgagtggcgattatgtgccagttgtggagtcttgataagtaagcaacaaagaggaagggaccccaggtaggggagggacccaggtggggaagaac

SEQ ID NO: 107191 - DNA, 576 bp, Homo sapiens
acaagcagaaacaggcattagaagatatgtacaaggcaatttctcacagttatttgtgatgctaaggaaagttttgcaataaatttttgtgyatgcacataatggaacatcatttagccattaaaatattttagaaaaatacttaatgatgcgaaaatgctcatgatacaatgtcaacactttaaaaacaggttatcaagcaatatacacactagaattctaattttgtgaaatatgcatatataggtatatggttatgtatgtgtattgaaaaggctgaagcattagcagggttttaacagaaagttggatgcttatgcatgatttttatttttgcgttagtccgtttggactgctataacaaaatattatagactaggtggcttttaaatatttagcatcatttctcacagttctggagactggaaggcccaaaatcaaagcaccagcaaatttggtatctcatgagggcccagccctcatagatggcacattgtatctgtgtcctcatatgttggaaggggccacttagctctctgggacttctttctaagggcagagcccttatgacctaat

SEQ ID NO: 107192 - DNA, 606 bp, Homo sapiens
ggtttaaacaaaattaaacaagatttttattgtagaactcttataagcctttaatagccaatatattggtagagctataagagggcaatagagaaggcaagayttcctaatccatttgaatagttctatttttctggggggtccattaagtcctggggactctttgggaatccctctactggacaaaatcctgagtatccattacatttttccgagaagtagggaattctattatgcttccccatcagagattttgaaatagagatgaaaatagtatattctatcattttcaaatttgtgtaacatcccatgtgcttaaaaaatactcctagggctttaggaaaagtggggttgattccagtaataattaatattaactaaaatagacccacaaactatcaaaaaccacaagtttaataacatgaaacatgtatgtagcagtactgaaccactacccaaccctctcctcaacctggaacgttcttctctactctgaccgttccaaccctgcttacctggttaactcctaggcattctccaggctcactgcagatgccatctctgccagcaagtctgttctgtataagatgccccgtagcccatgta

SEQ ID NO: 107193 - DNA, 606 bp, Homo sapiens
ggtttaaacaaaattaaacaagatttttattgtagaactcttataagcctttaatagccaatatattggtagagctataagagggcaatagagaaggcaagacttcctaatccatttgaatagttctatttttctggggggtccattaagtcctggggactctttgggaatccctctactggacaaaatcctgagtatccattacatttttccgagaagtagggaattctattatgcttccccatcagagattttgaaatagagatgaaaatagtatattctatcattttcaaatttgtgtaacatcccatgtgcttaaaaaatactcctagggctttaggaaaagtggggttgattccagtaataattaatattaactaaaatagacccacaaactatyaaaaaccacaagtttaataacatgaaacatgtatgtagcagtactgaaccactacccaaccctctcctcaacctggaacgttcttctctactctgaccgttccaaccctgcttacctggttaactcctaggcattctccaggctcactgcagatgccatctctgccagcaagtctgttctgtataagatgccccgtagcccatgta

SEQ ID NO: 107194 - DNA, 723 bp, Homo sapiens
cttaatttttttttttgcagataaatggtagatcctttgattgatttgccagggaagtcaaaggactgacatagcaactacttgtaagtggatctagatgtagtacatatcaaagatgcattagcaagaagaagaaagccatttttccccctgtcaaactatttacaatgaacttaggcaggatcgggaactgaatcctgttcccaggcagttgttcaaattgagcaaaccatatgtgtgtttcttggagaatagcaagtttgataactcagcaggtcacctttgtcctatcctacttgactcataccacggccwggaaaaggagaaagcaaatagatgtccactgcttgaggtgtagctgctgggagaatttagtttcaaacggagatgtcttgatcctgtttctaccaaataggttcaggaaggcttatgaagtttgtctgatgcagtaagaggacttggcagtgggcatgtaccaacctgccgaatgccaatatttctgatgacacgtgacaagaaaatctgagaatgatatcaacaggaccagaatattaactttatttgtgtgttgctaactgtgtgacaatcacagtttggaaaggaaaagagaataattcctagttgaactcatatggcagtgagagattgccttctgtagagttattctttaaaattgtcgcagcaaaaacaaaagtaggagctacttgttgtaagtgaatcttg

SEQ ID NO: 107195 - DNA, 723 bp, Homo sapiens
cttaatttttttttttgcagataaatggtagatcctttgattgatttgccagggaagtcaaaggactgacatagcaactacttgtaagtggatctagatgtagtacatatcaaagatgcattagcaagaagaagaaagccatttttccccctgtcaaactatttacaatgaacttaggcaggatcgggaactgaatcctgttcccaggcagttgttcaaattgagcaaaccatatgtgtgtttcttggagaatagcaagtttgataactcagcaggtcacctttgtcctatcctacttgactcataccacggcctggaaaaggagaaagcaaatagatgtccactgcttgaggtgtagctgctgggagaatttagtttcaaacggagatgtcttgatcctgtttctaccaaataggttcaggaaggcttatgaagtttgtctgatgcagtaagaggacttggcagtgggcatgtaccaacctgccgaatgccaatatttctgatgacacgtgacaagaaaatctgagaatgatatcaacaggaccagaatattaactttatttgtgtgttgctaactgtgtgacaatcacagtttggaaaggaaaagagaataattcctrgttgaactcatatggcagtgagagattgccttctgtagagttattctttaaaattgtcgcagcaaaaacaaaagtaggagctacttgttgtaagtgaatcttg

SEQ ID NO: 107196 - DNA, 657 bp, Homo sapiens
tgcataatattgtacaaaacttctgcaaattttcactgaaaactacattttgtgatatatttatgtcgatacatgtaggatgaattcattttaactttatatttaactgttaatatacatattttcaactttttggtaatataaataatgtggcaaacttcttttcttgttccaggatgtttttcttccttcttactcttgtggtgctcagtgggtgtactcttgtacacctagtggagctcagccccccaaaattttagacaccctcctgctgtgagggtggcttccagcaagtgcagcagctgtcccagtggggatgttcctgataagttccacagtcactctaactaacttcccagagagttcaggagacctgctatggcaagcttcccagagaggtccatgaacactctaccctgaaagcttaaggatagctttgggcttgccatctgggaaccagctttgaccaggatcarctctgcaatcttgttttccatccagtgcaactacaacttttccagtgaggtctggggaagtcccccctcccaaccaccttttaagtttgttatttccttgggcactctcccttagccctacagcattctttatagaattctttttcattccctctagtggttaatcctctgtaaatagtct

SEQ ID NO: 107197 - DNA, 579 bp, Homo sapiens
tacaggacctctacaaacagaataatcacaactgggagaatttttaaaaacttaatttaatggaagaatatagyatgttcatggattgaaagatttaatattaagatgtcatttgtcctcaaattgattcacagattaatgcaattccaatcaatatctcagttatacactatggaaggtagtaggattagtaaagaattgagtctcatcaaaataaagctttactgaacaacccaaaggagtcatctagccccattaagtcagctgagtcaagaaagaaaatccagttttgaaagacctggactttaaggtgtgaggaaaaataaggaattactaagctaaattaagctgtatgcagatgagaacatgaatgtttcttttgtgctttatagatgcacctgcctttcatatcataatttctttgacggcacccagaatcctgatacgaagggttatctttcgcattctactggtgaggaaactaaggctcagagagcatttacgaggtcatagagacttgaaattctagaatggggtaagaacacattttccccctggatttgtgttcatagctctttc

SEQ ID NO: 107198 - DNA, 592 bp, Homo sapiens
tagcatttgtagaacctcccatttcacttaagggaggatgccatgattgctactgggaatatcacttgttgaagggtaacattgtctttatttttctatggtagaagcaaatcatagaacttaaaaaaattgacaatatgatcacctgtgtgtatgtaacatacatgtacacaagtctggcttcctttctccctttcattttcttttctcattttttcctttcttccttctttgtaacaaagaaataagtaaacattcactgctgcaatgtaaccaacttttgtgagaggggagcaatcgataattaccatctrctaaagttttggttaaaggcattatttaaaaacatactagacaattttattttttttttgcaggaaagaagaattcaggaagtatggggtgttcaaatattttatctgctgtatttaaagtagagctcctgctagctgtttttcatagaatcatagaaagctagacttggaagcaacctgagacagcaactagattaaattcctcatttaacagaaaaaaagactgagacccttatggctaagtattattcacagacaaccaaaatttaaagccaaaa

SEQ ID NO: 107199 - DNA, 592 bp, Homo sapiens
tagcatttgtagaacctcccatttcacttaagggaggatgccatgattgctactgggaatatcacttgttgaagggtaacattgtctttatttttctatggtagaagcaaatcatagaacttaaaaaaattgacaatatgatcacctgtgtgtatgtaacatacatgtacacaagtctggcttcctttctccctttcattttcttttctcattttttcctttcttccttctttgtaacaaagaaataagtaaacattcactgctgcaatgtaaccaacttttgtgagaggggagcaatcgataattaccatctgctaaagttttggttaaaggcattatttaaaaacatactagacaattttattttttttttgcaggaaagaagaattcaggaagtatggggtgttcaaatattttatstgctgtatttaaagtagagctcctgctagctgtttttcatagaatcatagaaagctagacttggaagcaacctgagacagcaactagattaaattcctcatttaacagaaaaaaagactgagacccttatggctaagtattattcacagacaaccaaaatttaaagccaaaa

SEQ ID NO: 107200 - DNA, 576 bp, Homo sapiens
atgagaagtgagaaggagaacgaagtgtggccagatagagtagggctatgaggtgtactcattgatataggtgtatttttttgtcagtccgtttaagctctgaaaatagttcagcatgaccacattgagacaggttccctggtttccttgtcactgtctatagtctattatttccttgtttgtcttcattgtcctgtgaatttagagctcctccaatgaatacacaaagagagtcagaagagatgcagcccattagcttgtgatggagaagccrattatgatgttcagttcattattaattatcttttttttcctacttgcatggagcaaaagctcttttttcttttccttacctctcccccaaaacatatacacacacacatacacaccacacacacaaagacttgtgcacagactcgggctgcttgcacaggtttgagggagcgaaaagaaaaagaagagctgggctcctgaatggagggaggagacactgagtggataaagtaaggagaaagaatggagaaaggtaggctagagtcaccaaatgaaaagatataagagtcagcttcaagtttt

SEQ ID NO: 107201 - DNA, 576 bp, Homo sapiens
atgagaagtgagaaggagaacgaagtgtggccagatagagtagggctatgaggtgtactcattgatataggtgtatttttttgtcagtccgtttaagctctgaaaatagttcagcatgaccacattgagacaggttccctggtttccttgtcactgtctatagtctattatttccttgtttgtcttcattgtcctgtgaatttagagctcctccaatgaatacacaaagagagtcagaagagatgcagcccattagcttgtgatggagaagccaattatgatgttcagttcattattaattatcttttttttcctacttgcatggagcaaaagctcttttttcttttccttacctctcccccaaaacatatrcacacacacatacacaccacacacacaaagacttgtgcacagactcgggctgcttgcacaggtttgagggagcgaaaagaaaaagaagagctgggctcctgaatggagggaggagacactgagtggataaagtaaggagaaagaatggagaaaggtaggctagagtcaccaaatgaaaagatataagagtcagcttcaagtttt

SEQ ID NO: 107202 - DNA, 585 bp, Homo sapiens
cctctcagagctcttggagagggagagggtcattctatcttttgcttattgcttgtcacagaaatcaccaccaattagattcagctttttgctctttctttggatggtgcaaatattaagactgaaattagcattgtttttaacatagaaatgatatattttaatttctgcaaagmaagtagtgtcaaatccctttagtaaagtaatacctttacaaatttatatcaaattatctcatttttcctttactcttttttctttttcagttaattcacacaatccttggctccatggaaaatcacaaaactatttgagaattacattaggtggaaaacattgcttcaggaatacatacgtattactagcttccctagtaattttattttcatttcctttagctgattgagttctcagtgactggcgctatcttaggttcatctcatgtttcagttgtgctgagtgagtcctctgttgtatcattttccccaaccacataccagggtgtggttgtggctttcaaacttcctgcatctctatcagtagtacatataattgtcatttcaaataaaaagaaaataaattatt

SEQ ID NO: 107203 - DNA, 603 bp, Homo sapiens
ctgaaaaaaaaatagggaatattgttagcttctttcatttacttaatgttgaatatgggcattttgcaggtttattattttggagcttctatatctcataccccaagaatagccaaatggttaatacaaatgttctcaatgtattaatagtcattggtttcaaaagtttgctttcaacactgttctcaggccaagtcatttaattttcttgtcttaattttttcattttctaagtgccatcactatgattgctttatgaggctaagtgaaagttcatcaaattttattcaaaatacatttgaatgttaaaatgaaaagtaccaagtacctattacatagggcattgttttatgtagtgataacatagtgaattatagtgtagacatgtmtgttccaaagggtaactcaaattgctattttaccatctccgagaatgatgttcttggaggaagtttgtacttcacccagaatccaggccttttcacagcattcaggcatatttggggcagcctggaagacctaatacccacattgttgtgcattagtttgtgtgtggaaattgcttttctgaaacaatggattttgtagatggaccctaaagtt

SEQ ID NO: 107204 - DNA, 666 bp, Homo sapiens
tcaagaactatgcaaagtctagactaaagaacgaataggcaaattgcatccttccgtctagcctctttttccctgctttttcctaattgccatgaaaatggattctatctctggcttataactgctaccataggttccgacccaactcccctgctgtcttctcctgtactctcacttctaaattcgactttaaatctccctacattgccattgccctttccacttcttgctctcacctttttgctattcaaggatattctggaactatcttgagcaaatcgtcttctacatgaaaatttttaaatgaacacacattttgttttctaacattaaaaaaatgcattttcaataacataacatcttagtcttttccagcagaggtagctcaattaatctgtttctagtcactgattgaataagcagatgaggttattctctttatttctacsaggaaccaattttaagggcaatactggagagtcaggttgaagtcatatttaggaaagtcttggtaatcatactgatacatttactcttgtttaatttatcactaaatggtcagaatggctttaaaagaatagtacatgattaggccacacctcaggaagatcaacctatcgtggtaggtaatacaatttggcgtgaaaaacagattgaaagttgaca

SEQ ID NO: 107205 - DNA, 660 bp, Homo sapiens
ggctacagcagtgggccaaatcacagtttgctacagtgagcttcatcatcttggctgaaaacgcattatcctctgagcaggttgtccatggcaatccagctataactcctccccaaattccctgcgttgtcaagtctgattctgtctgcttgtcgcagaggacgaggcaactcaccattttggcaaatagactgtcacagagctaatgctgtgcgtagtcctttgattaataactaattaagtccacgaggaaagaaagactcggtgagaggaaataatagtaacacttttggagtatgtacaagatgttagtcaatgaggttaaggctatatacatcacatatattaatattatctcmttgtgtgtgtgtgtgtgtgtgtgtgtgaataaaatctcagttttataactactcagtgaaatgaaacacagagagtttctataacttgcccaagccacagagttagtgatgacctgtcccactctggaactcaacttcacacaccatcttccaaatttaattcgttcagttttcaacaatttattgagtatctactatatgctaagcactgttttaggcatgtgagatatgtaagaaaactagaattccttgccttcatcgaacctgaaatagacatgattaaaaaagtaaattccatatg

SEQ ID NO: 107206 - DNA, 415 bp, Homo sapiens
gaattcaccccactaatgctgatgaggatccctgaagctaggtctgaggtctggcgggtctgagcatcagttttaagaaggttgaccctgttatttattgycacagccaggcaacttcagagagtaaaaggactgaccagcagaggtcaacccagccacttccaggaacactaagaccctagcaccaagatcattactgggcaggaggcagcaagaactccaacctcaagagcagcttctgagcctaccctatactctctcatctccagagaaagcccaggctcatagaagccacacacacttgagccctagggctctctactgattctgggtaacccacttcaggaaacagccacttccagagatcctttaatggttttatggaaaaacaaattcaaaataaattaataggact

SEQ ID NO: 107207 - DNA, 415 bp, Homo sapiens
gaattcaccccactaatgctgatgaggatccctgaagctaggtctgaggtctggcgggtctgagcatcagttttaagaaggttgaccctgttatttattgtcacagccaggcaacttcagagagtaaaaggactgaccagcagaggtcaacccagccacttccaggaacactaagaccctagcaccaagatcattactgggcaggaggcagcaagaactccaacctcaagagcagcttctgagcctaccctatactctctcatctccagagaaagcccaggctcatagaagccacacacacttgagccctagggctctctactgattctgggtaacccacttcaggaaacagccacttccagagatcctttaatggttttatggaaaaasaaattcaaaataaattaataggact

SEQ ID NO: 107208 - DNA, 539 bp, Homo sapiens
gagcaaattttaaattttgagttagtacaatttattaatctttaaacatttttattggtcaagattacagtgctttatctaataactaatcaacaaatctaaggtttcacagattttttcctgtttccttataaaattttactattctatattgtatgttttatttatgtataaatgtaaggtatgtgctaaagtgcatttgtttgcatattttactctgttctatcaatctataggtctgtctgtatgccagtaccatactattttttcaaataaattcaacaatttattttatttttctatttatttttatttgtaattttattttctgtgggtacatagtaggtgtatgtattttgggtatgtgagatattttgatacaggcatacaatgcataatgatcacatcagggtaactggcgtatccatcacctcaagcattgatcctttctttgtgctgcaaacaawccatttataatcgtttagtgactttaaaatatacaataaattactattgattgtaataaccctattgtgcta

SEQ ID NO: 107209 - DNA, 604 bp, Homo sapiens
tggacaagtttgctgacttgtacgatactacgtgaatgtccttctcttttggtaatttttacagctacacacttatgatttgcagatgtctcccagtgcttgttatttctcagtagaaatacttccaaaggttgaaaaaagctttaatgttcaatttaacaatataaaaaaccattctttatacatctttgacattttaccattattttctaggttacccgaaatcttattttgcagatacccactctgaaaagtatatggagatttgcattaaactmatccagcttaatctcaaccaaatcattgtccgtggaatttgcagtcaaggaaggattgatacagtggcagtttcatgttggctctgaatgcttttgccacaagatggtaaagagtatgacaatgttaaataatggaatatttaactatagattatatagaggcaaatcaaattgcaaagaagaatatccatcttttggagaaaatttacaaatgttctggaagatgacatatttcttaatgaatttttcaaacataaagtctgttatgtgaagccattactagagccttttctttcaatgtccagtgttctgtaaaattatgaaca

SEQ ID NO: 107210 - DNA, 604 bp, Homo sapiens
tggacaagtttgctgacttgtacgatactacgtgaatgtccttctcttttggtaatttttacagctacacacttatgatttgcagatgtctcccagtgcttgttatttctcagtagaaatacttccaaaggttgaaaaaagctttaatgttcaatttaacaatataaaaaaccattctttatacatctttgacattttaccattattttctaggttacccgaaatcttattttgcagatacccactctgaaaagtatatggagatttgcattaaactcatccagcttaatctcaaccaaatcattgtccgtggaatttgcagtcaaggaaggattgatacagtggcagtttcatgttggctctgaatgcttttgccacaagatggtaaagagtatgacaatgttaaataatggaatatttaactatagattatatagaggcaaatcaaattgcaaagawgaatatccatcttttggagaaaatttacaaatgttctggaagatgacatatttcttaatgaatttttcaaacataaagtctgttatgtgaagccattactagagccttttctttcaatgtccagtgttctgtaaaattatgaaca

SEQ ID NO: 107211 - DNA, 631 bp, Homo sapiens
gtctttttgccattgccttggatattagcacctggctccgttttagtcatgctaatcactgtagcaagttgttgctccacagcccactcatatttctttcctgaaaatgtctttgcctttactcccacatggccaggctgcaatttgtttttcaaatttttatactcccctccccttttaaatataagttccaattttaagtcatttgttttctcccatatctaatcataggctgttagaagcagccagaccacatctcgaattctctgctgtttgaaaatttcttccactacataccctaaatcatcactctttagttcagctttctactaagccctaggatgtggacgcaacacaaccaagttctttgacagggtgtaacatgggtgacctttattccagttcccaataagttcctcatttacatmtgagacatcatcagcctggccttccctgtccatatttctatcagcattttggtcacaaccacttaaccagcctctaagaagttccaaacctccccctgttttcctgtcgtcttctgagccccaaactcttccaacctctgcccattatccagttccaaagctgtttctatattttcaggtatcattatagcaatgcctccctg

SEQ ID NO: 107212 - DNA, 629 bp, Homo sapiens
tattttaaatttattttgaaggctgcaccagcaagcttctctgacagattgaatgtgagatacaaacgaaaaaagaagagctaatggtgttgccaagtttgtaatcagctacaagaatgaagtttccacttactgagatgggaagacttaagggaggcaggcttgttgagggaggggatggatgaagaaacaaatgctcttaaaaattgttctgagtcaacatatctacggttaagaacagtttgatgaaaaygggttggagttagttaaagaaaattattcttggcatatgttaaagttctcaagaaagcattcttggaaaaaaacatgtttaaactgaggtctaagggataaacaggagttgtgaaactgaagggtggggatggagaaagggttctatggaaaagcctagtaaagacccaggaacaggataaaccacagcacatcaaagtgcgatctgctgtagcacttgctttgaataggtgaatctgttccaaagcaattgattaaattagaggtaatttgagtattggacgaaggcctcaaagaagagattcagaattcggtgcttcaatccagagtctcattcaagaagaaaaaactttttgggaaactcccaagctttctta

SEQ ID NO: 107213 - DNA, 574 bp, Homo sapiens
atggttagtctttaattcatccaagtagaggtcccatatgttatgacgcagagacaagcattgtgtaatgtccatgtggctgtccttcagaatgtgagactgtaattaagaaatttcagataaagccactaagtctgacttgatytgtgatgcaatactagtaaccaaaatggtacattttaaataaaaatgtattatatttcaaacctatatccatattgtaaaataaatccacacatatctaagaatataaagccaaaagtaaaagatctcttcacacataccctcagaacaaaaggagttagtactcttggtaaaagtagtccccgtttgaagctagatgtgcattcttccagatactttatacacttacatattttatagatactctcttttgagggataataataataatttgtggaatactattcatatggttcaaaatttttgccatttgaatgtaactggttatgttggaaatcgtaacattgcagcttatgtataaatatatatgattgcttttaacatctaaatacagaaatgagatatgactttcatggacattagcaatttt

SEQ ID NO: 107214 - DNA, 574 bp, Homo sapiens
atggttagtctttaattcatccaagtagaggtcccatatgttatgacgcagagacaagcattgtgtaatgtccatgtggctgtccttcagaatgtgagactgtaattaagaaatttcagataaagccactaagtctgacttgatctgtgatgcaatactagtaaccaaaatggtacattttaaataaaaatgtattatatttcaaacctatatccatattgtaaaataaatccacacatatctaagaatataaagccaaaagtaaaagatctcttcacacataccctcagaacaaaaggagttagtactcttggtaaaagtagtccccgtttgaagctagatgtgcattcttccagatactttatrcacttacatattttatagatactctcttttgagggataataataataatttgtggaatactattcatatggttcaaaatttttgccatttgaatgtaactggttatgttggaaatcgtaacattgcagcttatgtataaatatatatgattgcttttaacatctaaatacagaaatgagatatgactttcatggacattagcaatttt

SEQ ID NO: 107215 - DNA, 539 bp, Homo sapiens
tgcaatactagtaaccaaaatggtacattttaaataaaaatgtattatatttcaaacctatatccatattgtaaaataaatccacacatatctaagaatataaagccaaaagtaaaagatctcttcacacataccctcagaacaaaaggagttagtactcttggtaaaagtagtccccgtttgaagctagatgtgcattcttccagatactttatacacttacataytttatagatactctcttttgagggataataataataatttgtggaatactattcatatggttcaaaatttttgccatttgaatgtaactggttatgttggaaatcgtaacattgcagcttatgtataaatatatatgattgcttttaacatctaaatacagaaatgagatatgactttcatggacattagcaatttttttcttcataagcctcttaagatactaataatattctttattactttttggtataaatgagtataattaaggatgaactaatcatataataattgctataataattattatattc

SEQ ID NO: 107216 - DNA, 535 bp, Homo sapiens
atgttttcaaattgtcacaaatctccaaaaatttttcccatacatttattgaaaagatctgtgtgtgaatggactcacatagttcaaacccgtgttgttcgagggtcaattatagttttaacatatgaatttagggggagggagagacacaaacattctatgaaagcaagtcttaatctcttagwtcttgagaaatataaaaagtagtgcattttgccattgtgactttccaaggacgttgaaaaagttgtcacacagggtcaagtgggagactacattttgaccaaaaataaagcaaatgggacccagagttttcccatatggagaggcagtgttgtgtaatggatagaacctaagcatcagagcatgagtcatcccattcctcactctgcacagaggcttttggccgcaaaggagatggatgaagattcaggaccacaccctgttccttttcttttgccttccctcctatgctccgccccgactagcatgattctatatttccaactgttcaccgttgttaccaaaatttcca

SEQ ID NO: 107217 - DNA, 535 bp, Homo sapiens
atgttttcaaattgtcacaaatctccaaaaatttttcccatacatttattgaaaagatctgtgtgtgaatggactcacatagttcaaacccgtgttgttcgagggtcaattatagttttaacatatgaatttagggggagggagagacacaaacattctatgaaagcaagtcttaatctcttagttcttgagaaatataaaaagtagygcattttgccattgtgactttccaaggacgttgaaaaagttgtcacacagggtcaagtgggagactacattttgaccaaaaataaagcaaatgggacccagagttttcccatatggagaggcagtgttgtgtaatggatagaacctaagcatcagagcatgagtcatcccattcctcactctgcacagaggcttttggccgcaaaggagatggatgaagattcaggaccacaccctgttccttttcttttgccttccctcctatgctccgccccgactagcatgattctatatttccaactgttcaccgttgttaccaaaatttcca

SEQ ID NO: 107218 - DNA, 535 bp, Homo sapiens
atgttttcaaattgtcacaaatctccaaaaatttttcccatacatttattgaaaagatctgtgtgtgaatggactcacatagttcaaacccgtgttgttcgagggtcaattatagttttaacatatgaatttagggggagggagagacacaaacattctatgaaagcaagtcttaatctcttagttcttgagaaatataaaaagtagtgcattttgccattgtgactttccaaggacgttgaaaaagttgtcacacagggtcaagygggagactacattttgaccaaaaataaagcaaatgggacccagagttttcccatatggagaggcagtgttgtgtaatggatagaacctaagcatcagagcatgagtcatcccattcctcactctgcacagaggcttttggccgcaaaggagatggatgaagattcaggaccacaccctgttccttttcttttgccttccctcctatgctccgccccgactagcatgattctatatttccaactgttcaccgttgttaccaaaatttcca

SEQ ID NO: 107219 - DNA, 622 bp, Homo sapiens
atgagattttcaagagctgtggaccagagtaaaaggactgatgtagtgtgaaattagagttgtaagtgattaacaaaatggaaagtttctgccctgtaactgttaaatgaccttgctagagtctatattccatggtgatatgcaaatattaacagcttacaagtagttaagcatatcagatagactctccatataaacmatgaaaattcgatttcatgcagggacatataaggtggcctagcattactaatgttgctatttaccatctaactcttgcttctttcctcctctagaattcattttatgtactcagtctactttagaagattatacccccaactcctaacatttgagtatctagaagagtggcattaatgttaaaggtaaagaagtttcttcagaggttgacaattttgaatcagaacattctcggtagaaaggaagcattagggccttctaatcctaccatttatctgttgcttaaattccttctagaaaagtttttttcaattaaattctgccagaaatgagaccacaggtatttacattcaacaggtatttactgagaatccatcacaagctaggcactgtgctgggaatacagtgggaaacaagacagata

SEQ ID NO: 107220 - DNA, 586 bp, Homo sapiens
ttgatgttggcaccattttcagatctgcagacttagaaaagtcacttaacctgcccagaaaggactcagcttcataaaatagaaagtataatatatattttacgagtattttgaagacaatatgaactaatgaagggaaaagctcctagatgcagtatctggctcaagttatttggacagtcagastatatattaattaattgaatttacaaattttaatcaagaaacagttatgaggtataaacatgtaccagaatgtgaaaataaatacatcgagagaaatgatacttgtaaattaatgtgtggtgtattaaaataaagttaaatatattttcaaaactttatacttcatttagaaagaaacatcacattgtttcaggagggtatatcaaggttatcagctgtatcagcaagggtcctggcaggaagaacatggtgccttcaaactgtataatttaaggagagtttaaataaagggctatttaatggttttaaggaaactaacccgagacagtgcagtttatcaatgctagtaaccctgaggagtctttaccacccatgaatagacaagtggaaggaatgctcc

SEQ ID NO: 107221 - DNA, 462 bp, Homo sapiens
tggggacaacatactacctgacttcaaaatatactacacagctatactaaccaaaacagcatggtcctagcataaaaacagaacatatagaccaatggaacagagaatccagaaatatacccatgcatttagaatcaagctatcactgacaaaggtgtcaagagcacgcaatggaataaaaatatcctcatcaataaatggagttagaaaaactgtatattcacatgcacagaaacaaaattggacccttatctcactatatacaaaaattaattaaagtagattaaagacttaaacttaagaactgaaaccatrtaactggaaaaaaacttcttgacattggtctaggcaatgatttttcataaataatcccaaaactactcttaacaaaagcaaaaattgacaagtgggattgtaacaagctcaaaaacttctgcacagcaatggaaacaatcaaaatga

SEQ ID NO: 107222 - DNA, 481 bp, Homo sapiens
agaaaagctttgaagattccatcacctttactggcagaaaaaaatgcacttgaaataagaagacttggtgcacgtactgttccaagatttcctagcagtggaatgtggcacaatcactcacattttcttaacctccattcactcaccagtaaaatggkcacattagcatcttacctgactattgcacaggttcctgcacaactccatagctctttaaacatccactagaatgttggaaagatttaaaaatatatacattgtctaagagtaaacacaagggcaagtcatttaaccccttacatcccttacatctattttctcatctaaataatgggtatgatgagtgtagctccctcattgttgtgagtgttaaacagaataacataattgaagtgcttagcacagttgctgaatgctaagtaccaaataattttagcttttatttttattatgaataacaaatcataagtttgtctgaggc

SEQ ID NO: 107223 - DNA, 386 bp, Homo sapiens
ctggagcgataaggccagggcaaatccagaggtggtagacattttctgtcactgatgactaggtggtgaaaccagtctgcatagagaaggtacgaaagaaggagagacaaagaatggcagaggtgagagacaatgtggccccagacacacacacacacacacacacacccctacacacaaagktttaagatctgaggttcagctatgttgcctgctattggggtctacacacaggatccctggctgtgacagtcatgtcatcccaatcccttatcttcagaggggaaacagtcctacagaaaaaaagatgatatatttacactctaattaatcattcaggccaggcatacagatctgagttgtctatgctactagctgggttttat

SEQ ID NO: 107224 - DNA, 386 bp, Homo sapiens
ctggagcgataaggccagggcaaatccagaggtggtagacattttctgtcactgatgactaggtggtgaaaccagtctgcatagagaaggtacgaaagaaggagagacaaagaatggcagaggtgagagacaatgtggccccagacacacacacacacacacacacacccctacacacaaagttttragatctgaggttcagctatgttgcctgctattggggtctacacacaggatccctggctgtgacagtcatgtcatcccaatcccttatcttcagaggggaaacagtcctacagaaaaaaagatgatatatttacactctaattaatcattcaggccaggcatacagatctgagttgtctatgctactagctgggttttat

SEQ ID NO: 107225 - DNA, 462 bp, Homo sapiens
cattttggagagcaaagctgcataactttttgaaatcaagtgtgtatataccctaagamaactatttgctgtgccaataatcagtttcaaaatagcatgtgattaaattctgctaagtgagacctgagataaaatctactaagtggtatctaggaaaattttcctttccttaagaagagactcacagaaatgatagttgtacttttgccaatggctggcctgtcttgaagtgattcttggaaccaaggcagatattttgagatcatgaggggtgttacaaaggtttggcagagcagaaatgtagaagggtctctgagggcacagttgggccttcaaactacatccagactagtgtgaggagaaaataagtatctttattggttaaactactgcagttgctttaaaaaaaaaatgcatgtggctaaagacattcaaaatgacagaggactcagttagtttaca

SEQ ID NO: 107226 - DNA, 563 bp, Homo sapiens
aaatgcaaacccaaaccacactgagataccatctcataccccctggaaggctagagtgagaaagatggtcaataacaagtgtcrgtgaagatgtggagaaatcggaaccctcgtgcacgaagtaaattataaaatagtgcagctgctctggaaagcagtttggcaggtccttaaaatgctaaatgtagaattatcatatgacccagtaattccacttctaggtatccatctactcaagagaaatgaaacatgttcacccaaaacttgaacccaaaagttcatggaggcattattattcatggaggcattgttaacaatcacagtgaccaaaaaagtagaaacaacccaaatgtccatccaccgatgactggaaaagccatatgacatatccataaagtggaatgttacttagccacaaaactgaagcaagtactgatacctgctacaacatggacggcccttgaaaacattatgccaaatggaagaagctagtcacaatacatcacatattgtatgattccatttatggaaaatgtccaaaacaggcaaatctatagagacag

SEQ ID NO: 107227 - DNA, 563 bp, Homo sapiens
aaatgcaaacccaaaccacactgagataccatctcataccccctggaaggctagagtgagaaagatggtcaataacaagtgtcggtgaagatgtggagaaatcggaaccctcgtgcacgaagtaaattataaaatagtgcagctgctctggaaagcagtttggcaggtccttaaaatgctaaatgtagaattatcatatgacccagtaattccacttctaggtatccatctactcaagagaaatgaaacatgttcacccaaaacttgaacccaaaagttcatggaggcattattattcatggaggcattgttaacaatcacagtgaccaaaaaagtagaaacaacccaaatgtccatccaccgatgactggaaaagccatatgacatatccataaagtggaatgttacttagccacaaaactgaagcaagtactgatacctgctacaacatggacggcccttgaaaacattatgccaartggaagaagctagtcacaatacatcacatattgtatgattccatttatggaaaatgtccaaaacaggcaaatctatagagacag

SEQ ID NO: 107228 - DNA, 611 bp, Homo sapiens
gtagtttgttgctgagacattgttatccctttggaagtcaggattgccagttcagcgcttgggaagtcatttaatttctccaggtaagttcctctagcctgcaattagaggacactgacagtaggtggagattttttttttttttttttttgtggagacaagagtctcgctctgtcacccaggctggagtgcagtggcgcaatcttggctcactgcaacctcctccttccgggttcaagcaattctcttgcctcagcctcctgggtagctgggattacaggtgcccaccaccacactcggctaatttttatatttttagtagagacaggatttcaccatcttggccaggctggtctggaactcctgacctcgtgrtccacccgcctcaggctccctaagtgctgggattacaggcgtgagccactgcacccggccaaaatcctccctttcaattggagtccctcctccaaattcctcctatgtagacattctggagcctcttacaaaatatctgcattttctgttgattggtattttattaatagagatgctccctagcattagataaaatatttttcctcacagagtcttattttgctaatttgtaaaac

SEQ ID NO: 107229 - DNA, 577 bp, Homo sapiens
ctttgaatttatataggacttataccatctctactggttactgacattttcactgtagtgtcttgaatgctttttacctcttaaagcacttgcatctctatttacttacaagcaggattagaaagtccttgctaactagaatattgagacatatttctattttctagcgttttcacatagtgatttctcagcaaatggtgttgaactgatgtaacaatagagaatgaaaacattatctaagcytactgcattatgcttatttttccaaggcatggggattctcaacatagtgtgaactcttgaaatctttgagttgcaatttggaatttaatataggatttatgtgtctagacttgtggttcccaactattctgattttctgattgctttgaaaattaaaacccaactaaccatagcctagataagaaaggggattaccactactatgcaagacatccagaaattgtccatcggggctaacataatgactcagtgacctcaccaggaactcgtgctctttatgagtctctgccccttcatcttcagcttgaggctttccttgcaggtacaatgtaga

SEQ ID NO: 107230 - DNA, 592 bp, Homo sapiens
ctgtggatacatacaccctaaggaagaagcttaggctgcatttgcagagattgagatgttttgcacaactggatagaattccacttttgtgagagtggggttttgtttgtgaatgatgctttgtttgctggtgcttttcaacctggagggcctgtcaatactgagattcctggaccccacctccaaagattctgattcagaagatctgggctgagaatccatttttcataagcccttgggagttgctgatgatgcctgttggcaaatcagaactcaaggagtgagcatgcattaatgcactcaccgaaagcaatctgaggattagcagaacgtaattatcaagaaaatattaaggatttctaccagttagcgcatctcttgacaatttatttttcattgtaaacgacaaatgtagattctacaatttgttattaagcacaatttagatatatgatggtgaaatcaagtcttctgaaatatgacacctgcacmgaagagtaatacttaacaataacaaattattttatgcagtggatgttactgtttttacccaaacatgagcatctacgacatttccattgttttttgtgga

SEQ ID NO: 107231 - DNA, 525 bp, Homo sapiens
ctgggttgaaaagtctattctttaagaatgttgaatattggcccccagtctcttctggcctgtagagtttctgccaagagatcagctgttagtctgatgggcttccctttacagacaagcaaatgctgagagatttggtcaccaccaggcctgccctaaaagagttcctgaaggaagcactaaacatggaaaggaacaactggtaccagttactgcaaaaacatgccaaattgtaaagaccatcaatsctaggaagaaactgcatcaactaacgagcaaaataaccagctaacatcatcatgacgggatcaaatgcacacataacaatattaaccttaaatgtaaatgggctaaatgctccaattaaaagacacagactggaaaattggataaagagtcaagacccatcagtgtgctgtattcaggaaactgatctcacgtgtagagacacacataggctcaaaataaagggatggaggaagctctatcaagcaaatggaaaacaaaaaaaggcaggggttgcag

SEQ ID NO: 107232 - DNA, 626 bp, Homo sapiens
gaaaacaacttgaatttcaatcagtaggagagtggacatataaattgtactaaaaagaatcacatgctggtttcacagtgaaacttcctgtggcagtgtaatgagtaactagtgctctctgcaacaatgcacataaaacacggacagtgtttggcctcaggagcaggactgcagctggtggataacattctggcttctcattctcattctttaaatgagataaatggtggataacaytgtggcttctcattctcattctttaaatagacaattcaggatgtgttctatctgtttctcgtggtagaattccctcactagtgaccatgatgaatgcccttcagtgagtttctctccttcccctctcactttccctgatctctcactcctggttcctggggttacttcctcaataaaccacgtttgccccataacagtgagtaaaaaggcacttcagagaagactatagtacaatgtattatttttataaatttcaaaaacatgtttatttagccagcagaaggggaagaaccactgacatatacaacaacatacatgacaaatctcacaataattatgctgagcgataagaaagtctgactggtttcatttcattttccagaaaatgc

SEQ ID NO: 107233 - DNA, 578 bp, Homo sapiens
tgggtaattacttatagacaaatttattttttcctttctaatttcaatgcacatgcagataggtgtgtggacgtgatacaatgcaggcaccaggaggttgggccatttagcatctccctgctgtctgtttaataaaaggggattaggagtgactgctgaaggctgctgcatttgctcttatttggaataagaggaggtggtcgggtggagcaggtgctggaccaggtcaggagacccatcttttagggctaaccctgctaagttattcactgtgtggcctggggaaaaaccttctctgcttggtgcctcagtttcctcatctctgtaggaagcaatgagattggccatgtgagagagcctcggagagtttgtggtgtgaagcccatgagctgccacatttcctgtaaatatctgaccactttagacccttcaaattagactctacctacccatctgttcacacagaatatcttcccattgtccaagcagtcattttaaattaaactargcaactggctctctcagtattttcaggtaacttaattcccctattttgctttgctttcaataaaagcaag

SEQ ID NO: 107234 - DNA, 620 bp, Homo sapiens
cagtcaggcacagttcagttgagttccacgggctttcaggtgtgtgtgggcatctgcgggatggaggaatagagggggaggtaaggcttccagaaaaagaggaggatccacaatatccctatcttggcaacatttccaggagtcctaatatgctttggcctgttccttattgctgggacatgcacaaactagaatcattattgtcagcatctgaggacgttttaactaatccagttattctccagacaaattagaagctgcatgttctcatttggaaactaggattttgtaagatacatgcaggccaaagagatgtccaggcagggtttataagagccgggccttccctgcttgcttccttgagaaaatctccaccatttgcttctccatctgagccctgagctcactctcttacctcggtgacgatggacgagccaggmgtctcgtacacccagccgtcccgcaggggcccagtggcaggcggctcctgttggtgtccaggctggccagggggtccacgcagtcgaaggtgctctggttccagtccacctcgtagcgcctacactgtcttggggaggcttcgcccgcaggtcctgggcccggcaccgtgtagttcagtt

SEQ ID NO: 107235 - DNA, 544 bp, Homo sapiens
tgtgtccttgctgttatatctaaaaagttataatcaagctcaaatttatctagattttctcctaccttatgtattagttgtataattttttattttacatttagctatatgatcaattttgagtttatttctgtgaaaagtgtgtggtctacatctagattcatttttggcatgtatatattttttttcagcaccatttgttggaaaggctatcttttcttcattttgttgcctgtaagccatggcctgagctctactttcaccccttttagccatggctggagcagatgggaagcagagcaccaaatgcttatactgcaaacagcagagggactctaggcccaaccaatgatgccatttttttctcttagtcctctgggcctgtgatkggaggggctgctgtgtaggtctctaacatgccctggagacatttttcttgttgttttggtgattaagattcagctccttgttatgcaaatttctgcagtcagcttaaatttttcctcagaaaatgggatttccttttttatcacattgtcagggt

SEQ ID NO: 107236 - DNA, 506 bp, Homo sapiens
aatagaaagtgcaataaagagtttcaacagtagactcagtcaagcagaagaaaaaaatagtgaactaaaagcaacgtcatttgacattatatagtcagaagagaaaagagaagaaaagaatgaaaaatagtgaagaaagcctatgggatatatgtgccattatcaagtgaagcaatatatgcataatagaagtttccccagagaatagaaaggagaaggaagtggagttatgtgacattattaagtgaygcaatatatgcataatagaagtttacccagagaatacaaaggggcaggaagtttattaaaataaataatgactgaaaacttacctaatctggagaagaaaacggacatcttagaagatcaaagatccaagaagcccaaatgattccacatatgttgaacataaaaatgtttacaccaagacacattacaattaagttggcaaaagtcaaaagcagacagaattttgaaagtagcaagagaaaagcaatttgtaatat

SEQ ID NO: 107237 - DNA, 500 bp, Homo sapiens
aaaactatgaaaaccttagaagaaaacctagaatataccattttgacataatccacagcaaagacttcatgacaaagactccaaaagcagttgtaacaaaaacaaatagacaagtgggacctaagtaaactaaggagcttctgcacaggaaaaggaactatcgacagagtaaatggagaacctatagactgggagaaaatatttgtatattttgcatcagataaaggtctaatatccagaatcaacaaggaactgaaacgaaccaacaagcaacaaaacaagcaacccttccaaaatgggcaaatgacatgaacattaagtttataaaaaatrctcaatatcattaattgttagagaataaaaatttaatcatgattgagatatctcataccagtaagagtggctattattaaaaagtaaaaaaaataactgaagtttgccaggttgttgattaaagggaaagctatatgctgctggtggaaatgtaaatgagttcagcc

SEQ ID NO: 107238 - DNA, 520 bp, Homo sapiens
attttgcatcagataaaggtctaatatccagaatcaacaaggaactgaaacgaaccaacaagcaacaaaacaagcaacccttccaaaatgggcaaatgacatgaacattaagtttataaaaaatgctcaatatcattaattgttagagaataaaaatttaatcatgattgagatatctcataccagtaagagtggctattattaaaaagtaaaaaaaataactgaagtttgccaggttgttgattaaagggaaagctatatgctgctggtggaaatgtaaatgagttcagccactgtgggaagcagtctggagatttcttaacttaaaataaagctaccatttgacccagcaatcccattactgggtatatatccaaaggaatataaattgttctaccayaaagactatacatacatatgttcattgcagcagtattcacactagaaaatacatggaatcaacctagatgtctgttaatagaggacttgatgaagaaaatgtggtacatatacaccatgg

SEQ ID NO: 107239 - DNA, 442 bp, Homo sapiens
tttatcttctagaaatgggtagtaacaaatgatcgggtatttttttttaacactaatacagtttgacatctaatgcaaaaaatcaattttctccagatttaaataagaagatcttctccagataataaaatcctcaattattctggagtatgaagcagaaaaatcccataattttcaatagccaatatctcaaaatatactatcagtatgttgtacagaattaaatccacatcttttttttttctctatatttatgcagaacacattaccttaggtcattattagtataaggaaggaaatgagaaacaaggtattttaygggtgcattaaagcgttgatttctatatctgtaaacgacctttaaatagccaaaggtagttaagagaaaaacatattttgctcatgaaagatatagctttttattttatttattttttttttt

SEQ ID NO: 107240 - DNA, 609 bp, Homo sapiens
agcaatacatagaaactacgtaaaacagataagttaatattttacagcagacaacacatatacatccaagtaatttaatattaaaggtcaatgaaatgaaaataaataatataatgacattcatttaattcccatttcaaggttaaaaattaaaattttaatagaggaagtgtagaatagaatgagaatcaatgcgatatcatacagaatcaatgggtgggaatataatttgatgtaaccactctggaaaacaattagacrttgaagtgtaagacacaatattcacatacagtatgatataatcatactactgctaggacttggtgatagtttggattagttttcaaaattttcactttcctgtctctccaattgtaggcaggatatccttcctcattctaatgatgtcaactttaggtttgggtaaacctatgttaatggatataacatgattgaaggattgaaatgtacttgcacaatggagcttccactatcatcataaaaatacaatctgcataactttctttcctaggataattagacacaagtggtatgacactacccttgtatggtccccctaaggggaccatagagaaagaactgtaatcc

SEQ ID NO: 107241 - DNA, 516 bp, Homo sapiens
tagaagcaataaaaggagaaagatcaacttaatatttattttctgtttatagattttcttgaggctattttgtgaaatacaccaatatatttctaataaattaaccttttaccttatgatwtttttacctgttataaagatattattttattatttatacagcttaaaatatttgctttttatattttagcctaaagcaattgaatttagaatttacatataaaattgatgagatgttactacagtaatgtgaagatctgtactaattagcataaacttaatacaggacccttcctggcatacattccatggagactgcttatcacatatgctttacagctaatctcttaaagatttttggagaatgtataaaccaccagaattattttctttggtatctgtcaaatatatgttagaatcataaaattactcagaaccttgaaaatgatatttccctgggagaccaattgttaattaatcctgtttttgttttagtggatcaatattttaagttga

SEQ ID NO: 107242 - DNA, 237 bp, Homo sapiens
actgactggatggggcccaggagtgtcaccaaggctggcttcacacatctccttcctgggatctggcagaccctcctgtccaggggttctggtgaggagatcatcctgcagagaagctcagttcaggctggcctgagatcwgggcccctctgtgttttatatctgcagagatggaacacctgggaagcatcccattttccatggcttagatcccatccaagaggggattattcctcc

SEQ ID NO: 107243 - DNA, 425 bp, Homo sapiens
cttcttttttctttgggagctgtatatcccatgaggttccctgaccagctgctcctccttgagccattgtgtttttgtttgtgtggtgtaggtttttttttttttttttaagagggagttgccgccctgccccgacctgcccccgttcaagcgattctcctgcctcagccccctaagtagctgggattacagatgtccaccaccacggccagctaatttttgaatttttagtagagacatggttttgccatcttggccaggctggtcttgaactcctgacttcaggtgatctgcccacctcggcctcccaaagtgctgggattacaagtgtgagccaccgcacctggcctgttgggttttttagaaacaggatttcactctgtcacygaggctgggtgcagtggtgtgatcatagctcactgcca

SEQ ID NO: 107244 - DNA, 417 bp, Homo sapiens
atctttttctgattttttttctagatgccatatatatcttttactgcagttcatggtttgttacaaatccaggtatctggtaatctgtaaactcttatgaaataatgatttttaccctttttgggggtcatagatgactttgaaaatatgatgaaagttattgacagatacatataaaatggtatttaaaaccttgagggagtatgtttaataaccccttaaagtcttaygctggttaagaactcctactttaaaagtgcagaacagcatgtatagtatgctaccttttattaaggcagaaattacgaacatatataatttaattatatttgcataaagaaaccctggaaggataaacgaaaactaataaatatggttacctgtgggaggatagggtggggacggaatatagaattc

SEQ ID NO: 107245 - DNA, 611 bp, Homo sapiens
atctgtattttggcagcaagatccttctgagtggctcaccaactccaacacgtcaatctagtacacaagtccgtgttctcaaaagggaagaggtaagggcggggtagaaaacacagggcaatttgggctgccaaaagtaatttcctgttcacctgatgaaagtcttaaagaaatgagattttgattgagacatactgccaacctctaagtactaagggaatgtaatagtgtttctcattcaacatgtgatgacaaatatatcctttttaatgaattcaataaacacatctgaaacccctggctaaaagtttgatctcagggtaaacgtcccttcgtgagagatacacaggggttcttggtttcctttggaccccattattactattatacaatttaccatttatatctaaatgtctgtcttccccactggtggtaaactctgagaactggttccttctgtatcttgtacaacttcattccaatgcctatcacaggggctcacatacagtaagcccttaaaacatatttttaggtacaaatgaatgaattgaaagaagagagaactgaaagaagacattaaagagtgrcagagttccactctttaatatgat

SEQ ID NO: 107246 - DNA, 614 bp, Homo sapiens
ttaacagagcagagatggtggtgaggcttctcatgctgagaggaggctgggaatgagagagagtgtgtgtgtgtgtgagtgtgtatgtgtgagtgtgtatatgtgtgtgtgtgctccctcttcttgggagtaaagtaaacaaggtgagaaagtgagcatttgggcatcttctcagagctcagcatatctcacacattttatttcatgcttagagcaatcctacaaagtatgagtctccaactaacccactttactaataagatactgaggccatagaaggtaatttgcccaaggtcactcaactggtcagtaggaggagtattcagcacagaaaatagtggggaaactttaaggagaaccccaagtctaccttataccaccttcccacctcaaagggtcacatccatcatcctcaaamgtgaagacctaacatcctagaatgatctccgaggtgctttttagttgagaaggctggaaaggagaggggtgttgtgaatgtcagcagtttgctccttacccaccaaccaaccaacttttcattctgcggtgacttttcgtcgtagcctgtgagtggttttaaaaaaatctttctctgtaccgcatgagaccagctt

SEQ ID NO: 107247 - DNA, 577 bp, Homo sapiens
tttacagacaattaaatatttccttgtagttttgctactaaggcaatttgctcactctgctacctgtctatcctcaaacccaaaactactctttaaaacaagagaaatatgtggaagcactaaaagtatgactcatgctctattatattttcttacaaagtcgagacatttggagatagacgacgttgattatactgctgagaytcttcatgtgagatttaagttattgctgtaaaattgggtcaacatcatttttaagggctacttgaacacattacggaatgtgaaattaaagcagaacctcagaacaaaacctctgaaaaaagcagacttgtgtttgataaatgaaacatatttttcttttttcttcacaagaaaaacaaaatataagctttaacgcaattcaccaacacccctaaattgagttttaagcctggcaactgtttcttggatgactgtgggcttaccacccagggtgctgagagactcacatgaactgactagtttccctttgttctgatctctatttatctcctcaggcccaattctctcctccttctgcaaaagactgaaatta

SEQ ID NO: 107248 - DNA, 533 bp, Homo sapiens
aaattgagcagacccatctattaaataaaaattattgtcagagtggctcataagacaaaacccatgtttatgctgaaatcaagggatataacttttgttcccttgttttgtttgtttgtttgtttgyttgtttttgagacgcagtctcgttctatcgcccaggctggagtgcagtggcgggatctcgactcactgcctcctgggttcaggcaattctcctgcctcagcctcccgagtagctgggactacaggcatgtgtcaccacacctggctaattttttgtattttttagtagagacggggtttcaccatgttagctaggatggtcttgatccctgacctcgtgatccacccgcctcagcctcccaaagtgctgggatgacaggagtaagacaccgtgcccggccaagggatataactttcaaaaagtaattcaaaaagtctaatataaagtgataagaaaaagtatgtctggagactacaaacaataaaaaactagtgattgcaatcttgatattaaataaggagaattc

SEQ ID NO: 107249 - DNA, 614 bp, Homo sapiens
aagtccttggttatgaaggaaaatgcttcgctaatgaagatgaatatttccaatgtgttaagcgcagttacttttgttccctaagtgtttttcttcacatataattaggctggatgatttaatgaaatccagatcagcgtccatggataatgaggtgaatcccatcaagatcctttcttagtggctttatttctaggaacatttttttaaataggccgtatctatacaagaaaagtgaagaacagtatagaattaattttatttttggatcaagggtgtacaaggagaataaaattaggtaatgagctaatgggaaatatgcacatttggggacttgtggcctcagactggttggaaactgaatgaatccatgaaacaattgcccaagtccctttctttttcaaaatgtttacttttaatattttggcctgtttgggttttattaggtttcttagatttgataagaaaatgggtggtttataaatttgaaattctagttgacttgtgtaattccttacaattatatcttgcaattcttttttattatataaagtcaaawtttttaagatcctgtgacattttgttacattttagcccaagattatttacatttg

SEQ ID NO: 107250 - DNA, 644 bp, Homo sapiens
agggccacagttacatggtcttgagctacatgtcagatgggtgtgattgaggttggcataggaaaaggagggcttatccagtgacgacaacacagacaaaggcatggtggtacctgagcaggcccagcagccacaaaaagcagctaaatcttgaggaataacttcctaattcacaaccatctgacaaaggactaaggggtccagccttggtgggtgctgaaaagggagatggccgactgcctagcaaccattgctaaactctataaaccaaggatgagctggagaagaggccaggggccaggaaatgcagtcagatttcaaagcagagctcatgtcacaaacccagaggagtgttaggagcactgaatagaaatgcgagcttccaaaaagaatatatggaaaacttcaaagtgctgaatcttccayagaaaacatgctgagaagtttaagagataacaggaaaattaaaatgccttgtggctttccatcacagggtagataaagcagctgagggtcgagtgaaaagtatttcctgctgtcttcagacggtagattgttttcatttccactgaaggcaaaatagaaggggatatcttgtagcaagagatatttaggaaagacatcagaagcacctttttttttaa

SEQ ID NO: 107251 - DNA, 390 bp, Homo sapiens
gcccactgggtaactgcacaccgctgacaaccccggatggaggagaggaactgagggagtcccacaatgcactgtagcggagaccccagtccctctgcattcagtgtgtggcagaacttgttccagggatgggggaaggtatcttctgcatttcccaaggagaaccccataaaagatctgggagatacttgaaatcttagtaataatgattcaggttgctttcacyaacctgaactcattaggtttgcaaaaatcctgggatttaaaccactcagttgctatcagttttttatagaaacaaacgcatgaagatgtaaaagtcttcagtctttaagctagggctacaattccagtcttctgattacaaatctatgggatctccgctatggc

SEQ ID NO: 107252 - DNA, 459 bp, Homo sapiens
ccttgtttccttattggtagaaatacatagacatggggtaggtacctgttaaataaatgttatttccacagcattttactctctgcaygcatctggcagaataaggacctccatttctatcatatttgactacactcccggtgaaaatgctacttaattatcctgcaaaaattcaggaattgggtcagcaagtacatacttatgccactttacatcacaaacacattctgatgtatgagctggatcattgggaaggtggtatttcaaagtggcagggaaataacttgaaagctctgaaatccattgtgaatgtgagccagccaccctcaccaaggccctgggcctccatccagggaggcctccccaagacaagtgcctgctgccctgttctctgcctgctccctcctgctctccagggctgctgtgtctgtctcttttccttggcctcctctgtcttgc

SEQ ID NO: 107253 - DNA, 459 bp, Homo sapiens
ccttgtttccttattggtagaaatacatagacatggggtaggtacctgttaaataaatgttatttccacagcattttactctctgcatgcayctggcagaataaggacctccatttctatcatatttgactacactcccggtgaaaatgctacttaattatcctgcaaaaattcaggaattgggtcagcaagtacatacttatgccactttacatcacaaacacattctgatgtatgagctggatcattgggaaggtggtatttcaaagtggcagggaaataacttgaaagctctgaaatccattgtgaatgtgagccagccaccctcaccaaggccctgggcctccatccagggaggcctccccaagacaagtgcctgctgccctgttctctgcctgctccctcctgctctccagggctgctgtgtctgtctcttttccttggcctcctctgtcttgc

SEQ ID NO: 107254 - DNA, 583 bp, Homo sapiens
tatctttctggtcttcagcttcctcatctgtaaaatcagaggcttaggttggaggatttctaagctcttgtccggctctgtaatattggggaagattcagctaacacaagcagattgatgtacgtgtcccatgataatcttcaccttccaaaagccagagggagtgctcctggcccaagcccctagattaaacataaaaccctgttgatggatagcctgctatgcatcaggcmctgcaagaactgctttctatgcttttactttaatacttctaatgagcataattagtccagaatgatcattctcattttataattaaagggaatgagacactgttgattgacatggttagcctagttagaaggagagtggattatttttaaattcaagttttctgactccaaagaccatcctgataccaggctggcaggtcaccagggcacagtactctgcaggtatggtggcctcacgctagaaggaacattacaatttcctttcacatttatccatccagtttcagtcacctcatttactccgtattgcctcattcagtattcaggataaccccctattggcaaagtgt

SEQ ID NO: 107255 - DNA, 625 bp, Homo sapiens
catttttctctgcattctaagtaccttgcataatgcctagtacaaagcaggttgcttgatacaggtatgttgaaattctttttaagaggcaataattagtagtaacagtcacaaacatgtacataatgcatattccacctgggctctcttcttttttttttttttttttttaacttttgttttaagatccagggtacatgtgcagatttgttaaacgtctgccatgtaaacatctgccatggaggtttgctgcacagatcaacccatcatccaggaattaagcycagcatccattagctattcttcctggtgctctccctcccttcgccctctgcactacccccagcccgccaacaagctgtgtgtgttgttccccccatgtgtccatgtgtttaaaatagtttcttctaattctgtaaacaatatcaatgacagtttaatgggaatctataaattactttgggcagtatggccatttttactatattgattcttcctatccatgagcatggaatgttttcccatttgtttgtgtcctctctgatttctttaatcaaggtttgtatttctccttgaagaggtccttcgcttcccttgttagctgtattcttaggtgttttattct

SEQ ID NO: 107256 - DNA, 561 bp, Homo sapiens
tgtgctaggtgtttgcacctgcacttacagtggctttgtgtggttgagacagggttcctttatattaaaggacagcaaggacatacatgccacatacaagatgatgggggtcccaggaacattctgggagcctgaggagggagtgaggccmgaagctcaatgcagcagggaagctttgtggaggaggtaggatttttgcagaacttccttctccctatttcccctggtcttcctccttcccctcttgcccttgtccggttcgcactgacagcggccggcgggagggttggctctcactcctggatgtgggctgaacaagcatcccggaagcctgcggtggtgggaggctggccaggtggacagcacccacgctgctgcttgtgggatcctcgaagacagatttaccagttgccaaattctccttgtagcccactctcctccctgaggccccacacagcaattcctgaggcctggtgaggggaggagagggctcagaaaaggcaggtgaaacagaatcacacacaaactacagagactctgcaggaccatctccagcagatt

SEQ ID NO: 107257 - DNA, 623 bp, Homo sapiens
ggcctgctactgtttgaatgtaccccccaaaaagtacatgtgttgacattttaatccgcaatgcaacagtcttcacaagttggacttttaagaggtgatttgctcatgaggactttgcccttataaatggattaagatcattatcgtgggaatggattagttactgtgggagtgaactcctgatacaacagtaagttctaccctcacacttgcatctgtttcctgccttcagccatgggaggacccccaccagacgctggtgctgtgctctgaggccttctagcctccagaactgtgagccaaattaacttctgttctttataaacaacagtctgtggtattstgttatacagcagaaaacagactaaaacaaggccctataagagttaaaggagaactcagtcgtgtttatagtcacaagcaatcctaccatgtgtcacttcacacaacggtcccaatattgctgccaacctgagagaccatctattgaccattcatttccatcctgaggtgacagaatggctaccaagccaaagggaatggagtggaaagagcaagtaaatccatacaatgccacctttttcttgttaccctcccaccatccctacttgctaaagtagtat

SEQ ID NO: 107258 - DNA, 569 bp, Homo sapiens
attaagcattatgtgtgttccttacagcaagaaattctctcgcctgctataagtcagctgttttcatccaattttctaaagaagagaaactatcaaaataaaggctcactttgttcaatcaagaattaaacccactctcaccattacaaacacgggaaaaaaaattcaacctgamctttcctttttactgtttataccctggggtttgaatttgattcttcttgatcactttgaggatgtcaaagtatactcttcaaaggtataaaatgattgatatatggtattcacaatagactgttttaggtaatacatgtatgtagtaattcattttaaacattcctttgataattaaagcctcattcttacagaaaacacgtagaaatagggtatcacaaagaactactgttataatttctgcctcttctggcatacatctcttttaagagttattattcactaactgtattgatttcttacaaatgtgttttatatttttttacttcccttctcatttcattattttgtatttaattatttttaaaaatattttttggcctcatgtagaaact

SEQ ID NO: 107259 - DNA, 560 bp, Homo sapiens
gcaattcttcaagaacttgtgaagaatgagaagggtatatattttatcaaagattacatggggtaggcaaatgagaagtttaatattgaacacctccagtaaaccaatagaggctcttctatttgacatgtcttctagtaaacatttttggaacccatcattgtcaggttttcttatcattctggatatttggtaacccttacttctcagctcctttggattgggtgggattatggtactagttttggtcaaaggactgtgacagaagtgaaatgcattacttccaggtggaagcattttattgtatatatgagaccctttattctctcttctacagctatggcaatcatgagaagaccttgggttttgacagtagagacctaggacagaagtggcctggactgctgagttggaatgctgcccaaactcaaaaggtgatttgtggaraaagaagccctcattatgttaagacagctaaagcaccgagctgtgagggttgtacgctgcccagcctaactttgcttatcctgtctaggacatgtttccaatacagatcaacc

SEQ ID NO: 107260 - DNA, 703 bp, Homo sapiens
tactatttctttttacaacagcaaaatattgtaaaaataaattgaaatgttctgtaataggagcatggataatcctagctagctcctctctgtaattatgaaaattaatgaattactattatatgcattaacatagattaatcacacacataatatgaaaaatatgccatagaaaaatacatgtrgtatgatttctattattgctcaaacacatgtaatatgaaaataagtaattatctacatacatgtgtggtaagattgaagaaaagcaagagagtattcaatataaaacttcaagtttttaaacactctggatggtaaataaaaggaaatatgaagagtgatgcacaatgggctttaaatttattggtagtatcatatcttaatccaagaagtagctgcacaggtggttgtctcattagtactctacatagctttcataagctatatagatgcatatgctctatacatgtatacatgcaacatgacttatatatgcatgacacaatccttagtttaaaatgggaaagggagaaaatacagaaaaagatgacttttatatgtcaaaatgaaatagccttcagggtaaattagtggaaaaaaagtaaggcaaacaaaatgtgtataggatgctatgattagtataactaaagtataaaatgagaataaatacacattttgcttatttgtattgaacattttg

SEQ ID NO: 107261 - DNA, 703 bp, Homo sapiens
tactatttctttttacaacagcaaaatattgtaaaaataaattgaaatgttctgtaataggagcatggataatcctagctagctcctctctgtaattatgaaaattaatgaattactattatatgcattaacatagattaatcacacacataatatgaaaaatatgccatagaaaaatacatgtagtatgatttctattattgctcaaacrcatgtaatatgaaaataagtaattatctacatacatgtgtggtaagattgaagaaaagcaagagagtattcaatataaaacttcaagtttttaaacactctggatggtaaataaaaggaaatatgaagagtgatgcacaatgggctttaaatttattggtagtatcatatcttaatccaagaagtagctgcacaggtggttgtctcattagtactctacatagctttcataagctatatagatgcatatgctctatacatgtatacatgcaacatgacttatatatgcatgacacaatccttagtttaaaatgggaaagggagaaaatacagaaaaagatgacttttatatgtcaaaatgaaatagccttcagggtaaattagtggaaaaaaagtaaggcaaacaaaatgtgtataggatgctatgattagtataactaaagtataaaatgagaataaatacacattttgcttatttgtattgaacattttg

SEQ ID NO: 107262 - DNA, 496 bp, Homo sapiens
tcacaacacgacctcagcctgtcaagtcacatgacctctgcctgtcactgacaacctggtctgtctttaggccaggrgagaccatctggtccaccctccacactacccccattttcagagaggaaatggaggtgtggagcagcggagcagcctaaccaaagacctgtcattgccacaccactccagtcacaaccggccttgtgacagtttctacttaaactctggctgcccccatgagggtatgacaggatatgtaacaggccaccacatggcctctgttttcaaggcacaagaaaaatactttgcattctgggtggtgcgttttacttttggtcaagttgcctccaagttcatggttctcattttaccttcacaacttttatctttaatttacaaacaaggacggtaagatcccttggcaagtgatggggagttgaggctaaaatcgcggctccggtctccccagtccagggcagtcctgcgctgaagtgcactc

SEQ ID NO: 107263 - DNA, 560 bp, Homo sapiens
cctgtgcaaacacctagactcacttcatggattccaaagctctcagcttcattttattagttacgttaggtaagggggttcaagggtcatggtcctcatcacacacatgtcatcagggccctctgcactccacatgatgaggtcagacccacacggtgcaaatctttgggtcagtgagctcctggagaagagaggagacatgtcaggaatagattaggcacccctcttccttaatgaaatgtggcagtcctctcaggggtaccccacctacttagggatctgagttcttcagttcctcacccatagctcagcccgggctccctgatttggtcttcaatctactattcattccgtccccacccttttcttcttgatcttcctcagaccctttcccaaacccctctccctgggtctccagccacttacccctgcctcacttgccgcagcccagtgcctcctggctcccrctcctggtgctactgccccttaccaggctccccagggcataagcagctgcatcctgcacactcacaaacagctgatctggagtcaccctgtcc

SEQ ID NO: 107264 - DNA, 618 bp, Homo sapiens
ttcttttcttggttaatcttgctaatggtctatcaattttatttatcttttcaaagatagatttcaaacctttttgtttaatttaccttttgtaatttttttgtttcagtttcatttagttctgctctggtcttggttatttcctttcttctgctgggtttgggtttggtttgttcttgtttctctagttccttgaggtgtgaccttagaatgtcagtttgtgctctttcagtctttttgatgtaggtgtttagggctatgaactttcctcttatcactgcctttgctgtatcccaggattttgataggttgtgtcattattgttgtttagctcaaataatttttagatttacatcttgatttcatttttgacccaatgctcattcaggagcaggttatttaatttccttgtgtttgcwtggttttgaaggttccttttagagttgatttccagttgtattccactgtggtctgacagagtgcttgatataatttcaattttcttaaatgtattgaggctccttttatggcctatcatatggtctgtcttggagaaatttctatgtgctgttgaatagaatgtgtgttctgcggttgttggatgaaatgttctatata

SEQ ID NO: 107265 - DNA, 618 bp, Homo sapiens
ttcttttcttggttaatcttgctaatggtctatcaattttatttatcttttcaaagatagatttcaaacctttttgtttaatttaccttttgtaatttttttgtttcagtttcatttagttctgctctggtcttggttatttcctttcttctgctgggtttgggtttggtttgttcttgtttctctagttccttgaggtgtgaccttagaatgtcagtttgtgctctttcagtctttttgatgtaggtgtttagggctatgaactttcctcttatcactgcctttgctgtatcccaggattttgataggttgtgtcattattgttgtttagctcaaataatttttagatttacatcttgatttcatttttgacccaatgctcattcaggagcaggttatttaatttccttgtgtttgcttggttttgaaggttccttttagagttgatttccagttgtattccactgtggtctgacagagtgcttgatataatttcarttttcttaaatgtattgaggctccttttatggcctatcatatggtctgtcttggagaaatttctatgtgctgttgaatagaatgtgtgttctgcggttgttggatgaaatgttctatata

SEQ ID NO: 107266 - DNA, 412 bp, Homo sapiens
gaatggaatggactcgaatggaatggactcaaaaggaatgtaattgaatgcagaggaattgaatggacttgaatagactggactggaatggaatggactcgaaaggaatggactgtaattgaacggtctcaaatggaatggaatcgaatggaatggacttgaatggaatggaattgaatggcatggaattaaatggaatggaatggactggaatgcaggggaatgggcttgaatgtaatggactggaacagaatgaacttgaatgaaatggacccaaatgaaatrgaatcaaatggaatggaatcaaatggattgaaatttaatggaatggaagtgaatggaatggaatcgaatggaatggaatggtatggaattgaatgaaatggaatggaaaggaatggaaaggaatggt

SEQ ID NO: 107267 - DNA, 597 bp, Homo sapiens
ttttggtatgttgcgtttctatttttgtcttgatattttttatttcctttttgatttcttcattgacacatttgttgtttaaaacatgttgatttccttgtttatgaatttttaacgrtttatcctgttatcaatttctaagttggtgtcactgtaatcagaaaatacacttgatagaattttcaattgtctaaaatttgttaacacttgttttgtgacctaaccttctttattgtgggtaacatgtacctgagaagaatgtgtattctattgctgttggatggttgtgtacatgtctaaagttccatttagtctaaagtataattcaagtgcaatgctgtcttattaattttatgtctaggtggtctgttcattgttgaaagtggggtactgaaattcctctaataacattattctactatatataagtgctttgatattgggtacatatacattaaaaattgttctatcctcttgatgaattgactcctttatcattatatgactttttctccttgtacagttttttgacttaaagtctattttgtttcatataagcacagctacccttgctcttttattattccatttgcatgg

SEQ ID NO: 107268 - DNA, 597 bp, Homo sapiens
ttttggtatgttgcgtttctatttttgtcttgatattttttatttcctttttgatttcttcattgacacatttgttgtttaaaacatgttgatttccttgtttatgaatttttaacggtttatcctgttatcaatttctaagttggtgtcactgtaatcagaaaatacacttgatagaattttcaattgtctaaaatttgttaacacttgttttgtgacctaaccttctttattgtgggtaacatgtacctgagaagaatgtgtattctattgctgttggatggttgtgtacatgtctaaagttccatttagtctaaagtataattcaagtgcaatgctgtcttattaattttatgtctaggtggtctgttcattgttgaaagtggggtactgaaattcctctaataacattattctactatatataagtgctttgatattgggtacatatacattaaaaattgttctatcctcttgatgaattgamtcctttatcattatatgactttttctccttgtacagttttttgacttaaagtctattttgtttcatataagcacagctacccttgctcttttattattccatttgcatgg

SEQ ID NO: 107269 - DNA, 442 bp, Homo sapiens
agacctctttgaagatttcgttggaaacggaatcatcttcacataaaaactatacagatgcattctcaggaactttttggtgatgtttgtattcaactcccagagttgaactttcctttggaaagagcagctatgaaacactgtttttctagaatctgcaagtggacgtttggagggctttgtggtttgtggtggaaaaggaaatatcttcacctaaatactagatagaagcattctcagaaactgctttgtgatgattgcattcacctcacagagttgaacattcctattgatagagcagtttggaaacactcttgttgtggaatgtgcaagtggagatttggagcgctttgaggcctatggtagtaaagggaatagcttcrtagaaaaactagacagaagcattctcagaaaatactttgtgatgattgagtttaactca

SEQ ID NO: 107270 - DNA, 494 bp, Homo sapiens
agattctcccgtttccaacgaaatcttcaaaataggtccaaatatccacttgcagattccacacaaagagtgattggaaactgctctttgaaaaggaaccttcaactctgtgagttgaatgcaatcatcacaaagaagtttctgacaatgcttctctccagtttttatgtgaccataattcgttttccaccacaggcctgaaagcgctccaaatgtccacttgkagacactacgaaaagcatgtttcagaactactctatgaaaagcaatgtgaaactctgggagttgaacacaaacatcacagagaagtttctgagaatgcttctgtttagtttttatgtgaagatattcccgtttccaaagacatcttcggagaggtccacatatccacttgcagattccacaaaaagagagtttcaacactgctctatccataggagggttcaactctgtgagttgaatgcaatcatcacagagaagtttctgagaaggct

SEQ ID NO: 107271 - DNA, 372 bp, Homo sapiens
gctttcctgtgaagattctcccgtttccaacgaaatcttcaaaataggtccaaatatccacttgcagattccacagaaagagtgattggaaactgctctttgaaaaggaaccttcaactctgtgagttgaatgcaatcatcmcaaagaagtttctgacaatgcttctctccagtttttatgtgaccataattcgttttccaccacaggcctgaaagcgctccaaatgtccacttgtagacactacgaaaagcatgtttcagaactactctatgaaaagcaatgtgaaactctgggagttgaacacaaacatcacagagaagtttctgagaatgcttctgtttagtttttatgtgaagatattcccgtttcca

SEQ ID NO: 107272 - DNA, 627 bp, Homo sapiens
ctgagaatgcttctgtctagtttttctatgaagctattccctttactaccataggcctcaaagcgctccaaatctccacttgcacattccacaacaagagtgtttccaaactgctctatcaataggaatgttcaactctgtgaggtgaatgcaatcatcacaaagcagtttctgagaatgcttctatctagtatttaggtgaagatatttccttttccaccacaaaccacaaagccctccaaacgtccacttgcagattctagaaaaasagtgtttcatagctgctctttccaaaggaaagttcaactctgggagttgaatacaaacatcaccaaaaagttcctgagaatgcatctgtgtagtttttatgtgaagatgattccgtttccaacgaaatcttcaaagaggtctacatgtccccttgcagatgccacagaaagagagtttcaaaactgcgctctcaaaaggagtgttcaactccgtgagttgaatgcagtcatcacagagaagcttctgaggatgcttctgtctagatgtcatgtgaagatatacccgtttcaaacgaaggacacagagtggtccaaatatccacttgtagatcctgcaaaaagagtgtttcaaacgtga

SEQ ID NO: 107273 - DNA, 540 bp, Homo sapiens
taggtgaagatatttccttttccaccacaaaccacaaagccctccaaacgtccacttgcagattctagaaaaagagtgtttcatagctgctctttccaaaggaaagttcaactctgggagttgaatacaaacatcaccaaaaagttcctgagaatgcatctgtgtagtttttatgtgaagatgattccgtttccaacgaaatcttcaaagaggtctacatgtccccttgcagatgccacagaaagagagtttcaaaactgcgctctcaaaaggagtgttcaactccgtgagttgaatgcagtcatcacagagaagcttctgaggatgcttctgtctagatgtcatgtgaagatatacccgtttcraacgaaggacacagagtggtccaaatatccacttgtagatcctgcaaaaagagtgtttcaaacgtgaactttgaaaggaaagttcaactcggggatttgaatgcaaacatcacaaagaagattctgagactgcttctgtttagtcagctgaaattatcccgtttccaacgaattc

SEQ ID NO: 107274 - DNA, 542 bp, Homo sapiens
ggaattcgttggaaacgggataatttcagctgactaaacagaagcagtctcagaatcttctttgtgatgtttgcattcaaatccccgagttgaactttcctttcaaagttcacgtttgaaacactctttttgcaggatctacaagtggatatttggaccactctgtgtccttcgttcgaaacgggtatatcttcacatgacatctagacagaagcatyctcagaagcttctctgtgatgactgcattcaactcacggagttgaacactccttttgagagcgcagttttaaactctctttttgtggcatctgcaaggggacatgtagacctctttgaagatttcgttggaaacggaatcatcttcacataaaaactatacagatgcattctcaggaactttttggtgatgtttgtattcaactcccagagttgaactttcctttggaaagagcagctatgaaacactctttttctagaatctgcaagtggacgtttggagggctttgtggtttgtggtggaaaaggaaatatcttcacctaaa

SEQ ID NO: 107275 - DNA, 451 bp, Homo sapiens
aacaatgacatcaacttcatatgctattgtgaagattaaatgagacaatgagtgtaaaaacttacttgaatacctagtatataaaataaattaaattgttctttatcattggtgtgcctaacacaacaggggctttacacttattgccccatttggtacttccccattcctctatggtgaatatattgtccatttctgtaactgaggcaagttacctacccaaggccttgctgccagtataggtcaaaattagaacttgctttgtcctctgactaaataaaaatcgatctttttcctccacatattgtttccctgcatcagtctgcctctccctggatggtgcatgcatgtgtgtatgtgtgtttatgtgtgygtgtttaagtttgtgtgtgtgtctgtgtctgtgtgtgtgtgtgtgtgcccaatccctttcatagaaaaagcacagcca

SEQ ID NO: 107276 - DNA, 539 bp, Homo sapiens
gcatatctaatgtgcaaattaagtttattgctgctcatttagttgtttattcttcgtgatagaagtctttattataccagcattacagagtggcctatccattttctccagcagaatgatacgggtctaagtttactaagagaaatgcccaagatatgtagataattggaggcttcgtggctctagaaggcagtttgaaggatttgaggtatcaagctcagctttattgacaagcccagtttgattgagcagaccaaaagtacactttcagagaaatgacaagatgtattggaatacatttgtcatatcgtagtacttgaaaacaccagagaagtctccagcagcactaaaatctccccaaaaatgttcagttccacacgccactttcaaacacagaatgactgaaagcatttcaacagaatgaacatttgatttaaaaattagtgatggtaaaaattactttcaaggtgagaaaatatataakgagttattatactggtcagatgaaaaaatttcctgttccaatattgaaagtgatg

SEQ ID NO: 107277 - DNA, 656 bp, Homo sapiens
tggaggtgacagaatgctgttagatttaatataatgaagaacagtctaaatttgagaaggatagcagtggatgatttactaggtagtgagttctttatcattagacatgatcaagcagagtatggatgaacactactcgggatgtagcaaaaaaaaattgttttgacgatggatrggggttaaacctaagcttctacgaatggtttccttcagcctcaacattcctttgatctccctaagagtctatacttttggatcaagtatgcataaatgcaatttgcttttaatttttgaaaaatgctttgagatgctcgtgctgttctcatgtattgagtctttattttcttttgcaagtctctattggagtctttcatcataccatgtggtctcttgcttcagtttctttactgacgtcctttgctgcctcacttctaagcctgttgctgtctccaccaaagagatgctcaaaggtttttgtttgaaatcagagtcatctagagagtaaatttttcttcaatataaagaggaaggaaagaatgtagttcagattcccctgttgtcattgactcctcatcttttgaacctttttgtgaaacaaagacaatcttgagcaaattcccagggccatgtctcagcttacggatccttattcaatg

SEQ ID NO: 107278 - DNA, 592 bp, Homo sapiens
tttaagaggcagaacctgaaagtataattttttgcaagtgatttattagatgagtttttagaaagaacccaaaggaaaagagggaagtggggcagggaagagatagtagccaagcttggtatactgtcaagcaaagttccacagaaggtaaatttgattcaatcctatagctctggagagaatacaggtcatacctagagttgtctcacaactaggagcacgggagctggagaagttataccctagaagccagtcatttattggttaatggctgctcctgggggtatgtaaattcctaggtactttcagttctctctttgtgaagataaattagctataacagcttgasgacagtgtccaaaaagagataacatgtactggctcttaagggtacaaagtacataggaatctggggcggaagagggattagaagggacgtgagtccagcactgacattttctgctacattactcgtctaagaaaggtgtatctaaataggagactccatttcttgtatcaaagggaaaaaatgcttgtccagtaagactttaatgttgtcactgagttatttttctttggacaaggtggaatt

SEQ ID NO: 107279 - DNA, 567 bp, Homo sapiens
gaattctaattaattgaatttttaagaggcagaacctgaaagtataattttttgcaagtgatttattagatgagtttttagaaagaacccaaaggaaaagagggaagtggggcagggaagagatagtagccaagcttggtatactgtcaagcaaagttccacagaaggtaaatttgattcaatcctatagctctggagagaatacaggtcatacctagagttgtctcacaactaggagcacgggagctggagaagttataccctagaagccagtcatttattggttaatggctgctcctgggggtatgtaaattcctaggtactttcagttctctctttgtgaagataaattagctataacagcttgaggacagtgtccaaaaagagataacatgtactggctcttaagggtacaaagtacatakgaatctggggcggaagagggattagaagggacgtgagtccagcactgacattttctgctacattactcgtctaagaaaggtgtatctaaataggagactccatttcttgtatcaaagggaaaaaatgcttgtccagtaagac

SEQ ID NO: 107280 - DNA, 628 bp, Homo sapiens
tataaggtagctatttgttgtaatattattacaattatcataattgtcaaaatgttcagttacttaggtatttagttatgttaaaaaatgacttctgtcttcacaatcaatataaataactaagagcagagggaaaaatacacaatttttacttatattttgtctgaatgttttagattaaaagccttttcagttggatactttgcatgtatttgttataaatctcagagatttgctgtcataaaaagataaaggatcatgaattcagacaaatattagagctctatttttcctttgtaaaacaattttctcagaaaatttttattacactggtaatgcatgctcattgcaggaaaataatgaaaaccagaaataaacagagagcakaaaataaaataaaataaaataaaataaaataaaataaaataaaataaaataaaagacatttatatcacaactacccatagataaaaacttcacatgcaatacatacaacatatgcatttttaattgaataatacctcatatcctataaaattcactagacattgtgaatatctatgtgaataaagttccttctagaatttcgttcttattggttagtatgccataaaatgaatgaaaaaga

SEQ ID NO: 107281 - DNA, 560 bp, Homo sapiens
aaatgtgttctatagccgcaattattgcattaagcataaaatcagatatatctgaaacctttgtaagttatgtgaaattacatatgagcatgcatttattttcccaggtcagacatatattaggacaatttctaaacaaatacttatgaattatataattttgttaataatacccagaaacatgattcaatttcaycaatagatctagttcttctaagttttgccttgatttgtccctcaaggctgcaggaagcacattctgtaactggaagttgtcctgattcctgcaagaggtaatcctaggcttagttcccaccacccagagacatcatgatttcttttactcgtttgtcgtctcattgaagggtcttctgtcttggtgaaggcaggttgtgcagtaggaaaactctagaagtcagacagacttgcgttttatattgtgcacaatttcgaatcctctcggccctgcttcttacttcagccattgctacggtggtcagttcagcactgtgctttgtagatgtaacctgaaggagtgttgtctcaggtgcaaaactacc

SEQ ID NO: 107282 - DNA, 560 bp, Homo sapiens
aaatgtgttctatagccgcaattattgcattaagcataaaatcagatatatctgaaacctttgtaagttatgtgaaattacatatgagcatgcatttattttcccaggtcagacatatattaggacaatttctaaacaaatacttatgaattatataattttgttaataatacccagaaacatgattcaatttcatcaatagatctagttcttctaagttttgccttgatttgtccctcaaggctgcaggaagcacattctgtaactggaagttgtcctgattcctgcaagaggtaatcctaggcttagttcccaccacccagagacatcatgatttcttttactcgtttgtmgtctcattgaagggtcttctgtcttggtgaaggcaggttgtgcagtaggaaaactctagaagtcagacagacttgcgttttatattgtgcacaatttcgaatcctctcggccctgcttcttacttcagccattgctacggtggtcagttcagcactgtgctttgtagatgtaacctgaaggagtgttgtctcaggtgcaaaactacc

SEQ ID NO: 107283 - DNA, 560 bp, Homo sapiens
aaatgtgttctatagccgcaattattgcattaagcataaaatcagatatatctgaaacctttgtaagttatgtgaaattacatatgagcatgcatttattttcccaggtcagacatatattaggacaatttctaaacaaatacttatgaattatataattttgttaataatacccagaaacatgattcaatttcatcaatagatctagttcttctaagttttgccttgatttgtccctcaaggctgcaggaagcacattctgtaactggaagttgtcctgattcctgcaagaggtaatcctaggcttagttcccaccacccagagacatcatgatttcttttactcgtttgtcgtctcattgaagggtcttctgtcttggtgaaggcaggttgtgcagtaggaaaactctagaagtcagacagacttgcgttttatattgtgcacaatttcgaatcctctcggccctgcttcttacttcagccaytgctacggtggtcagttcagcactgtgctttgtagatgtaacctgaaggagtgttgtctcaggtgcaaaactacc

SEQ ID NO: 107284 - DNA, 560 bp, Homo sapiens
aaatgtgttctatagccgcaattattgcattaagcataaaatcagatatatctgaaacctttgtaagttatgtgaaattacatatgagcatgcatttattttcccaggtcagacatatattaggacaatttctaaacaaatacttatgaattatataattttgttaataatacccagaaacatgattcaatttcatcaatagatctagttcttctaagttttgccttgatttgtccctcaaggctgcaggaagcacattctgtaactggaagttgtcctgattcctgcaagaggtaatcctaggcttagttcccaccacccagagacatcatgatttcttttactcgtttgtcgtctcattgaagggtcttctgtcttggtgaaggcaggttgtgcagtaggaaaactctagaagtcagacagacttgcgttttatattgtgcacaatttcgaatcctctcggccctgcttcttacttcagccattgctacggtggycagttcagcactgtgctttgtagatgtaacctgaaggagtgttgtctcaggtgcaaaactacc

SEQ ID NO: 107285 - DNA, 594 bp, Homo sapiens
ctttatccccactgacctccactgatctggggcactcacctttcacacagtgcctgcagaaccacccagatgccatggtctgaaaaagctccggttcattaaagttataaagcctgcctttaaatccagcctgcctaactcaatgtacgctgttttaccctgctgccttgtgttggcctattactgctgtagtccctctcccatgttttcgtgacaggtaaagccacccttggtggctttcaaccaagggtaaataggagaaaacaaagaagtttcacaaaataaatagcatcttataaattattaaactgtrtcttacaacagaaaatgggtaggcttccttgtagagtggctgtgaattcatgggctgcgatatcagtcagtttcaaatttgatcatgcaccataagaatcttgtgaaaaatgcagatcccagagccatgcccatgattttgatttagtaggtgtggaataggttaaggaacctgaatttgtgtaagttcactccctctgccttcaagagaggctgaagttgttgaataccacctagaggagcactggtttggtgcacacatatctacttagatagaaatgt

SEQ ID NO: 107286 - DNA, 427 bp, Homo sapiens
ttttttaaataattttttttttttttttggtagagactggatcttactttatttcctaggctggtcttgaactcctggcttcaagtcatcctcctgctttggcctcccaaaatggtgggattacaggcatgagccacaagccrcccctaaaaaatgaatatatttttcagatatcaaggcctagcaattttcctaggtcagcaaatatagtctcttctttctgtacttcacaatgcaacatttgatattgagtagatgttgtagaacattacgttgaagagcccaggttctagaataccaccatatagtttagatcttggctttggtgctcgatcattgtgactttgagaatattgcttaaaattttctttcctcagcttgtctcatttataaaataatataaaagccactctctaccatgtagtgt

SEQ ID NO: 107287 - DNA, 619 bp, Homo sapiens
cgtaaatcctaagaaggaagctacacaataaaacaggcctcgattgctttctctcattgagccaggaggagatgaataactgagaattgtacagggtggttttttttttttttttttttttycacattcttgcacagaacaaaacttccctcaacccttcaaacaattctcatactaacagtgacactgaagacctcagtacaaagtgctgaaaacaaaagcatgaatcagttttcccttaagagtcctggtttccaagaatctacatgcagggcctggtcatgtatttatttgttttgaacactctgctgaattaaaatgttgctggtatccaaacagtactaattcagctcaacaaaaaaagtaatcgtgtttaccatgtggcaggcacggtgctaggtgctgggtgtgcagaggttagggaggtgcgggtcttgtcctcaaggagctcacagtttacttagcaggaggtgctaataaaccagtcattataattcggtgcaatgtgtgcagtaagtttattaagaacaagatgttaaggaagcaaaagattatcactgaactgagctgggaggtagggtagggcaggagtttcaagaaagctcctcaaaggggctac

SEQ ID NO: 107288 - DNA, 543 bp, Homo sapiens
aggagaaccatgaactgtggaaaactaagaaagctggtgctgtaacttaggcttttctattttcttataaagtcaactcaccagcctccaaggctggcagcacccccagcaaggaccagaagtcagtctgtgaacctagaacgggaaggaacagggtaaaattcttcactagaaaatagaaaatcaaattcagaaaccaagtggtgatcaccggacttgggaaaawtgaatatttgaaaagtatttttttaaaattagatgctgcattagtctgctcaggctgccgtgacacaattccagctagtgggttgctgaaacaacagaaatttattttctcacagttctggaggctgtaagtccaagactgaggtgccaacaggattggtttctggtgagggctctcttcttggcttgcagatggccaccttctctttgtgtcctcacagggccttttctgtgtatgtatccctgatgtcccttcaccttattataaagacggcaatcctgttggattggtgccacacccttatgacctcatagtca

SEQ ID NO: 107289 - DNA, 543 bp, Homo sapiens
aggagaaccatgaactgtggaaaactaagaaagctggtgctgtaacttaggcttttctattttcttataaagtcaactcaccagcctccaaggctggcagcacccccagcaaggaccagaagtcagtctgtgaacctagaacgggaaggaacagggtaaaattcttcactagaaaatagaaaatcaaattcagaaaccaagtggtgatcaccggacttgggaaaattgaatatttgaaaagtatttttttaaaattagatgctgcattagtctgctcaggctgccgtgacacaattccagctagtgggttgctgaaacaacagaaatttattttctcacagttctggaggctgtaagtccaagactgaggtgccaacaggattggtttctggtgagggctctcttcttggcttgcagatggccaccttctctttgtgtccycacagggccttttctgtgtatgtatccctgatgtcccttcaccttattataaagacggcaatcctgttggattggtgccacacccttatgacctcatagtca

SEQ ID NO: 107290 - DNA, 450 bp, Homo sapiens
atcaggacggcaacagagagtaaacaacactgcagagtctctctgaaatgtgcaaatatcatgacaaggagaggtctccttagctttatttacccagaatcctcacgtaagaggtagtcatctgggtgcttagaaatcaaaatgaatgactcactttttcaattttcatcaaaataacccttgttttgtaaatatacacaaaaaaactacccatcatttgaaatttctattgtaaaccccattgtgaatgtattattgaaaagattggaaaaccttaagggaaattctcaaccaaatctttttctgaacagcttttttgagtggaataattatggtataattcttatgtcatacaastaacacatttaaattgtacaattcagtgtttttagtgtattcacagaattgtataaccatcagcattatcaattttagaatatatttgtcatc

SEQ ID NO: 107291 - DNA, 594 bp, Homo sapiens
aaaattcaataagcctatggaggaagactggagccaggaaccaaaaaaccatcaggaaccaaggaatgtctctcactatgttgctctctctaatctgggatttatgtggtctcatatctgtgccagtgagttctctgtcttctttttggatatggctgagatggctggctgcttcaaacagtcttcttagcagctatgttagcctgccttcagttcaagtcgtctcctgggactgacaaggatctctaaactccctcttctgggaaaaacacttcatctgacccagcttgggtcaggcgtccacttttgatcctatcagctatagytggggaaacaaggtcatgtagtataagcaggactacatagaccattccagttggcaaagcaattctaaaagataagatggtggggaaaggaagagggttatgggtgacacagatgcccttacagtatctaaactccaacaaggaattatgattacaattatcctgatcttccagacaagtaacaggaacaaaagggttaaaccacctgtccagtggtgcacagttgattaatgtgagtcagtacttgaatcaatctctagaattcttt

SEQ ID NO: 107292 - DNA, 597 bp, Homo sapiens
acccttctggcatatctcttgcaaacaacccgaaagacaattcacctgcgtgccccttttcactgccttccctacctttacgtgggaagccccgtcctgcctgtttacctggtgaaatcattcttccaaactaaattctaaagtgccttcctaaacttcctcttctgtaataccacaaggttgatcacaaagcactaggkctgttttcctgtctcttacacatcagcctgtgaggccctcaaagtcggggaactgggccctattcatcttcccacatgcaccgcccagatcagtgccgggcaaaatgtatacttaaccacccaaacttggacaagctgggtcagatctcgggcactcggttttcctttccttaaaatggagctctttacccccgcaggatcttaggagattgattaaataaggctctgcaatgtgtttcccgcttacagtaagccataaacgcaagtttggaagcctcaagcctaagattctgattctgtctccgcgtctaactactgtagatgtgaggctctgaacaagtcgctcactcaaggtctgtttcctcatctgtaaagagaatggacccacagataactg

SEQ ID NO: 107293 - DNA, 597 bp, Homo sapiens
acccttctggcatatctcttgcaaacaacccgaaagacaattcacctgcgtgccccttttcactgccttccctacctttacgtgggaagccccgtcctgcctgtttacctggtgaaatcattcttccaaactaaattctaaagtgccttcctaaacttcctcttctgtaataccacaaggttgatcacaaagcactagggctgttttcctgtctcttacacatcagcctgtgaggccctcaaagtcggggaactgggccctattcatcttcccacatgcaccgcccagatcagtgccgggcaaaatgtatacttaaccacccaaacttggacaagctgggtcagatctcgggcactcggttttcctttccttaaaatggagctctttacccccgcaggatcttaggagattgattaaataaggctctgcaatgtgtttcccgcttacagtaagccataaacgcaagtttggaagccycaagcctaagattctgattctgtctccgcgtctaactactgtagatgtgaggctctgaacaagtcgctcactcaaggtctgtttcctcatctgtaaagagaatggacccacagataactg

SEQ ID NO: 107294 - DNA, 569 bp, Homo sapiens
taaggctacagagagcatacacaaatgaagaaatatagtgagctctcacctctacctatacagaagcatctgctattactggtccatccaggaaaacataagacatttcaagaagaacagaaaacagcaggcacaaaagaaatcagttattgttggagaactgataaactgatttaaaaaattaactccaattatgattcttttcatttcaagttaatgttccaaccattgttcaactgtatttcacaaaatcgaaacttgataggaaaaaaatgaaaaaaaaagacaaaacaaacaaagcctgaaagatcagcccctttgtgagaaaggcagaaggaaactaagtgcgtcattacatacttggttttgggagyttggtaacgacacaatgactagagaaaagaggtggctaataaacccattagagatgggaatcttaaaagaaagcactaacctatcattttcagtgcaattatttcaatttttttttaatgactgaattttctaaattggaaagcagttattcaaatagttctgagatcatttttgtctacttttgaggcagtttt

SEQ ID NO: 107295 - DNA, 551 bp, Homo sapiens
agtggcatcatttgaagaattctgcttctgttgttgaagatttaaaggtctctccagccagatattggtyatataaatggattaatcctgggaaactacatgtattagtacacttgagtggccataacaaaataccatagactgggtgccttaaacaacagaaatttatcttctcaaagttccaaaggctagcaagtccaaggtcaaggtctggcagggttggttcctggtgagggctctcttgctggcttacagatggctgtcttcttgctgtgtcctcacatggcagggagtggggagtagctttctggtgtctcttcttatagggatactaatcctgttggatcaggtccccagccttgtgacctcatctagccttaatcaccaccttaaagacccaatctccaaaatacagtcacatggagagttagggcttcaacacatgaatttggagggacacaattcagtccatagcaccacatacgatgtgtaaatttccagaggttttctggcataagtagattgtttctttccccagagacaagccggat

SEQ ID NO: 107296 - DNA, 351 bp, Homo sapiens
catccgcaccttggcaacaatatttgctatgacttccacccatattagttgggtacttcccatgagccagccagcattcttggcccttgggttccaacagtgaataaacakgcaatagcccctgccctcatcgagcttgcagtccagttaatgctcattagccctcagttgtcatttctgcctagaacacttttctgtttcagagtcagagctgggtttgtgactgtaactttggaataatcacttcacttctctgcacctacctttgttttctcagctgtcccatgggggatgaacaggcctggcttagacgtgctgttataatagatccaaacaccaccatgcgggtga

SEQ ID NO: 107297 - DNA, 515 bp, Homo sapiens
gctcctgaatggtaatgagagtctgagctatgggagctggggagtcgagccccaggacccctcagtcctgctgggccgtttctaagactggttctgcacccrgtgacctacaactccaggaacagtcttccttccagtggtctccatcacaggctggacagggtcggggtagcttcctcttgctacctgggcaatcctcaaagtgccctgatttgccgcacttgtgtcagttaacaggtgcccctcaggaatcctgggttttacaggcctgaagaattgccaatagaccctctgcttctttcttatgctttctctctttctcttgagcctcctccagatctttattgtaaaaaccaaggtggccatctccgggaggtttcctaaagtgctatctggttatatggcttgcttttgcagcttcctcctgatatcaggagctgcctgagtaataaacttattcttcagaattagttgtttctcaactgaatcaggagatagcgaggtacacctcacca

SEQ ID NO: 107298 - DNA, 499 bp, Homo sapiens
atgagagtctgagctatgggagctggggagtcgagccccaggacccctcagtcctgctgggccgtttctaagactggttctgcacccggtgacctacaactccaggaacagtcttccttccagtggtctccatcacaggctggacagggtcggsgtagcttcctcttgctacctgggcaatcctcaaagtgccctgatttgccgcacttgtgtcagttaacaggtgcccctcaggaatcctgggttttacaggcctgaagaattgccaatagaccctctgcttctttcttatgctttctctctttctcttgagcctcctccagatctttattgtaaaaaccaaggtggccatctccgggaggtttcctaaagtgctatctggttatatggcttgcttttgcagcttcctcctgatatcaggagctgcctgagtaataaacttattcttcagaattagttgtttctcaactgaatcaggagatagcgaggtacacctcac

SEQ ID NO: 107299 - DNA, 542 bp, Homo sapiens
tttttgatataaggcatctttgttttgttcttgatctcaaaacaaaacaaaaaaatgaaatttttaacaattaaatagaatgtttgctatggattttttgtagatgccttttattcagctaagacatatctcttctatttccagtttcttaagcaatttttttctgtgtgtgtggaaaacttgatcaaatgctgtttctggatctataacattccacacttgatctgtcaataccctggattacactgaatgagttttcactgttgaaccaaccttgtgtcataaagccaggcctaatttattyagaatgtttcatgctttttagtgctttactaggaaatcattcttttcatatttaatgcagttgctgatgtatttggatttaaacatgccatcttagtttgtgatttgtagttttccaactcattctataaatttttatctctttcatgacttcctttaaattaacagagtatctttttaaagtcatttttcctcttcataagtttgagagttttatattttgtttctattattttaag

SEQ ID NO: 107300 - DNA, 631 bp, Homo sapiens
tgcatttatttattcaaacaatagttattgaacattggttatctcaacggcattgggctaggcattgtcagtattttttaatacattcctgtgatcatatctctatctatgcmatatatgtaaatatatatatatataattaatgatactaaaataggcctcacgttagtcttgaaattcccttgaaatcaagaatgcctaaatatataccaaagcatgaattactgcagatatattgcataaatttctgagagaagtgttatcattccacttaattttaactcttctttgactcaaaacgattatgtctttggtaatactttagctagaaagagcaaagaatcatttttaataaagaaaataacttggcttaaaagtacaaaattttgctgtcaaaaaagggaggattctgaataagcaatgctagttttagctgctagaactctgtctcctcctgctctaaaagtattatttatagagctatattccagaggcccaaaattctgaagattcataaaaagaacatataaaagatgcactctcaactgagtcgtcaaacatattagtcatataaataacaatatttatttgacaaactaaaaatgcagcttacataaagacattcaattca

SEQ ID NO: 107301 - DNA, 595 bp, Homo sapiens
agatgtggggtctgaattccctctcctcaaagagggaatgaaatttaagacacactgaaagctttttctagagaagcaataaacgtcccagacctgttggccaaacctttaacatcctcaagaccttgaactgttgaccwcacattttcactctgctgtctaagtcacacttcgctcctctgcacctgagcaattcatttgctgccaagaatctaagaatctccaaagatttttctccctaaatatatgaaaatattttaagtaaaaagcaagccattgagattttgacttgggtaggcctgagggatgcaggtagattcttagctcggccataagcccccggctctagcgtccctgtaaactgcagcaccagaagcattgaagtgatgtgccattccaaacccgatatgcaggacatggggaatgcacccctggattcatcagtccaggaagaccagcaacgccctgccatggatgaatgccctaatgtgtaagcagattatcatcatcagaatgaaagatgtacagtattcaaagtctttcaaatatctgatcaaataatcctcatggccaatctcttgaattgtgttgtttt

SEQ ID NO: 107302 - DNA, 595 bp, Homo sapiens
agatgtggggtctgaattccctctcctcaaagagggaatgaaatttaagacacactgaaagctttttctagagaagcaataaacgtcccagacctgttggccaaacctttaacatcctcaagaccttgaactgttgaccacacattttcactctgctgtctaagtcacacttcgctcctctgcacctgagcaattcatttgctgccaagaatctaagaatctccaaagatttttctccctaaatatatgaaaatattttaagtaaaaagcaagccattgagattttgacttgggtaggcctgagggatgcaggtagattcttagctcggccataagcccccsgctctagcgtccctgtaaactgcagcaccagaagcattgaagtgatgtgccattccaaacccgatatgcaggacatggggaatgcacccctggattcatcagtccaggaagaccagcaacgccctgccatggatgaatgccctaatgtgtaagcagattatcatcatcagaatgaaagatgtacagtattcaaagtctttcaaatatctgatcaaataatcctcatggccaatctcttgaattgtgttgtttt

SEQ ID NO: 107303 - DNA, 599 bp, Homo sapiens
cagcttttggaaactgcttatgtctctgctgtgacatgagacaccatctcgagagacatcttttaactttcctttttgggcacagaatttcaggagtaagtatgccacaagtgttcggtagaactgtctacactatagggctgatgagttgaatgagctgatcctatactgccacccayttgctagggtggtcatcttgcctcaccaatccacacaatgaactttatatatgtgtcggataaacgtaagggcacattcatcacattagtgatgttgcagctggggaagagttgcaggtggtgtcgctggttccaagctcatctcctgtgcttctgtcttagatggacaagcgctcctcctatctaacaatgccatttcttctatccatgctctggactccgtctcctcaactcctagcttcctctggattcttgctgtgagtatctcagttctctctcttgtgtcttctatattttcctcttatgtggctctgtttcttctaagaatgcacccagttctttcctcccattaaaagggtcttctgagtctatggcttgcttaagctactatcataatgttcttctctttactgcaaaaag

SEQ ID NO: 107304 - DNA, 460 bp, Homo sapiens
taaatctaaacaaatgacttaaaaccaaaacaaataagcacatgtgataataaaaccaagaagccctttatggggttaaccaaggtctctaaaaaggaagcaaaagctgcagccttttcaagatccagacccctcacaatgatgactgaaagaagggaaggtttgcctgtggcaaatggggagcgacccacatctctggccatattctccagggctctcaccttttyggttggctacctgtattcaaaaacccaacaagcttgtacactgatagatggaaaattcaaagagacaaacagtaaaacaaataggaaatcaaaagctatcactggggggaagaaagaatgataataaatgggtaccccaaagtcaaggaacatacaaataatttaaactaattctcataaatattttctttttatcctgtgagtttaagggcttacatttccaagggactggc

SEQ ID NO: 107305 - DNA, 381 bp, Homo sapiens
ccagagcttgtgaatctgttaatatggctgtaactctggatgwctgatatgggttattttctcaaagaaccttaattttatgcttatagtcttttagttactttctcaaactacatttcagagatggcctttgcaacagaaggggctcgttggtaattcctgagtagtgatggtcattgttatcatttattgagcactaagtgctgagctcactggtaagcattttgcaaatgtggttttatgtaattctcaccataaccctttctctatttgtagacataggaactgaggcttaaataatcaccttgattaatgtgaaatgcctacatgtactacatgtagtacatgtaggctgagcaccagccacagtcctgaatttat

SEQ ID NO: 107306 - DNA, 597 bp, Homo sapiens
tttttccaattagtaaagcatcagtactactggccagagcttgtgaatctgttaatatggctgtaactctggatgactgatatgggttattttctcaaagaaccttaattttatgcttatagtcttttagttactttctcaaactacatttcagagatggcctttgcaacagaaggggctcgttggtaattcctgagtagtgatggtcattgttatcatttattgagcactaagtgctgagctcactggtaagcattttgcaaatgtggttttatgtaattctcaccataaccctttctctatttgtagayataggaactgaggcttaaataatcaccttgattaatgtgaaatgcctacatgtactacatgtagtacatgtaggctgagcaccagccacagtcctgaatttatctttcaaggaatctttcttctgccttcagcgtcaggcactgtgctaagatctagagacccagtagtgaacaagaaagacatggttcctgctccagaaagccccctttctaatgggggaagttgcctgggagacaggcaatgaccctgtaggagaataaaaatgaaaataaaggatgatccaga

SEQ ID NO: 107307 - DNA, 584 bp, Homo sapiens
ccaccctagttagacctgaagtgctgtcaaagccccatccaacatctgggttttcacccactttacagatgaggagccaagagagtttgccaaattggacaaaactggctcattccttccactgggccctgattaggcacttgttctctgtggttcctgctcccagtttctcctgttttaaattcgaacttattcatcagcttagtaaatccccttgatgaccctagcttctgcctttccctaactctgatttacttagattttttattttgaaataatttcagatttccaaaagcattattaagatagtactaagagttcccatataccctttacccaatttccctaactttaacatcttccataacatttgtctaaactaagaaaactsatatgataccattgactaaactactcacagactttgcctgaatttcatcagcttttccctaatatcctctgtttcagaatgcactccagggcaccatgttggatttagttgttaaacctccttagtctcctcctatctgtgccagttcctcagtcattccttgtttttcatgactttgcatactatgtatgtt

SEQ ID NO: 107308 - DNA, 509 bp, Homo sapiens
ttctttgcttatttactctgcctactaacatctcacaacaagtccttcctcamcgtgatttcagggaaggacggtatttgtatgctatttttaaaatctattctgagtaatacagtctataacccacatgccaagaaccaaaaaatgaagtgtcttgaaagcactgaggtgagtattttaaaatatggttatttttacttttctgtgttatttgactgttcacaggaggcacgaatcgcttcacaaagacaataaaataattgtaaaaaaagaaagcagtcatcataaagactgccatggacacaaagctacatcactaatgaccatgcagctggagacgggaatgagaaagagaccgggagtggacggtgtggttagaaggacagccattactctcacacctgtaatcccagcactttgggaggccgaggtgggtggatcacgaggtcaggagattgagaccatcctggctaacacggtgaaaccccgtctctactaaaaatatttta

SEQ ID NO: 107309 - DNA, 509 bp, Homo sapiens
ttctttgcttatttactctgcctactaacatctcacaacaagtccttcctcaacgtgatttcagggaaggacggtatttgtatgctatttttaaaatctattctgagtaatacagtctataacccacatgccaagaaccaaaaaatgaagtgtcttgaaagcactgaggtgagtattttaaaatatggttatttttacttttctgtgttatttgactgttcacaggaggcacgaatcgcttcacaaagacaataaaataattgtaaaaaaagaaagcagtcatcataaagactgccatggacacaaagctacatcactaatgaccatgcagctggagacgggaatgagaaagagaccgggagtggacggtgtggttagaaggacagccattactctcacacctgtaatcccagcactttgggaggccraggtgggtggatcacgaggtcaggagattgagaccatcctggctaacacggtgaaaccccgtctctactaaaaatatttta

SEQ ID NO: 107310 - DNA, 558 bp, Homo sapiens
tgtctctctctctctctctctctccctggaagttggaatgcatcctagactaacagaatcaagaagatttagggatcaatgagactcaagagaggactaaatctacatgaaattcagatttttgtttacctgttttcaaagtcctccctgaaggagattatactttttgctaactcacatcactatgttagcaagatgcaacgtgagagatcttgatcataactttaataattaacacatataaaagcctaaaagaaaagtgaagaaaaacgtattaaatttgacttatctaatrgcaccagaaatttttcatatgtaaacatcaacctcaggcaaataaagagtgtgatcaaatatgagcaaatcctaaatagaaattctcagctttgattctttaggtcacatgaggtttaaaattccaaaaccactgccctgctcccgtggggcccttcttgtcctctgctcccagttgatttttcttcatagcacttgtgcttgtcggacacactctattttgtatttcctctctctgcagtgaatttcctatagggtagaatt

SEQ ID NO: 107311 - DNA, 597 bp, Homo sapiens
atgtctgggaatttgatgcgttgctgcttggacagcagtaacaggtcccagacagaatccaggtcctgcctgggccaatctgggaagagcttgacgatggtattgtaggcacctccrgtgaaggttgatgggctggttcaggcccacccagaaggcctgctgggcccactccaaagcctggctgaggccgcgggagggctggccccctgccgatgctccttctcaaagcccctcacctgcttgccgtgaactccatgccctgtggctgagcagcagcgccgtcatccaccttcttgagaaagcatatgaagctgtcaatcatgctctccacctcctgcaggtcgagggcagtggtggtgcagtgctcagggtcaggaacgagctggcacccaccatgtcacctttctcgcaccacccacctcccatgaccaggccacgtatccagtgttcgtcttcgatacccacatccactcccccaagtgatgcccaccttctcgctgacctgctctgcttggatcggaggcagttttcttattttctttcctcaagaggtgctgtgccatacagaaggccttcctcttgccttgtttccaggcc

SEQ ID NO: 107312 - DNA, 597 bp, Homo sapiens
atgtctgggaatttgatgcgttgctgcttggacagcagtaacaggtcccagacagaatccaggtcctgcctgggccaatctgggaagagcttgacgatggtattgtaggcacctccagtgaaggttgatgggctggttcaggcccacccagaaggcctgctgggcccactccaaagcctggctgaggccgcgggagggctggccccctgccgatgctccttctcaaagcccctcacctgcttgccgtgaactccatgccctgtggctgagcagcagcgccgtcatccaccttcttgagaaagcatatgaagctgtcaatcatgctctccacctcctgcaggtcgagggcagtggtggtgcagtgctcagggtcaggaacgagctggcacccaccatgtcacctttctcgcaccacccacctcccatgaccaggccacgtatccagtgttcgtcttcgatacccacatccactcccccaagtgatgcccaccttctcgctgacctgctctgcttggatcggaggcagtttycttattttctttcctcaagaggtgctgtgccatacagaaggccttcctcttgccttgtttccaggcc

SEQ ID NO: 107313 - DNA, 395 bp, Homo sapiens
ataggaaaagaaaatgaaggaaaactcagttgcagttttcccctaggttgataatgacctgtgctttgaggggtgcgagaacccgcttgctagacactctttcatcacttcgtttttctgatgcttttggaaaatctatacaaaacgccaaagtctaatcttctgtggtgcattttcggagagaagggcttgttagagcaatktatcgatggcttgtatgacttagaaatgggtccaagaggaactaaaccaacaccaccaactcatttcatttagaccattaagcacattaggtgatgaggattttgtcagttcctctctagccagattaaatcaacaaattaaaaatgaagaatgtcctggcagcctgcgaatttcccgagctgcttcatcag

SEQ ID NO: 107314 - DNA, 487 bp, Homo sapiens
gtatgattctgattgctctgattcctctagaattttttttttttttaatgctgaaaagaccatcagggacctccctttgaaaaccactgctctagsgggacgtgggactcatgcttggttgcacagtgaaatcacctgctgagcttccaaaaaaaaactgatatatggtctcaccttcagggatgctgaattaaatggcaatggtaagtcatgagtattgagattttttttaaaagcacccttggagattataatatacaactagatttgagaagcccaatctatttaatacatgtttcatgctcagagctgccactgggagagaagcaaaattgcatcaaagccaccccctcaatgactctggatgaagctagactatttctctggggctcagagtaagcacacccacatctgtagtgttcgttacccatcctccacatataagaccctcatagccttgagactaacttgaggaaccattccacaa

SEQ ID NO: 107315 - DNA, 616 bp, Homo sapiens
aaaaaaaaaaaaaacccacaaaagagaatgaaaagtaaaccatagagcctttaagtcacagtggctgggaatagagaacttcaaagataaggctgtcagctgggttcagtgctgctttgaagatgtgtaagatgaatcaagacctattggaagtgctaacatggaagccattattgactttagcaaagtcaatttcaatgaaatgaaggggtcaaaagtccaattaaagtaggtaaatggtactcaaagaagtgaaagcttttttgaaaagttttgctttaaaaagaagctgtaaattgttgctattaagaatgatcaagtgtatagtctacaaaattaggctgagtttgaattctttgtttgctaggcatgttgagatgaactagtcacttaaccttactgaacctccattaacttcatccatgcaatgatgatgttagggagaacacatggagctattttttttccattttttcctccatatacttaaatktgtgtgtgtgtgtgtgtgtgtgttgagatagggagaggaaatagggaaaaaaaggagagccagtggacgtacttgtgttgaaattctattacctttgcattacttaagtacagtcatgtgtca

SEQ ID NO: 107316 - DNA, 585 bp, Homo sapiens
tgtaaacagcaccagaaggttactgtttggtctcggtttggtcactaggctgaggccctgtggttacaaggcctctgaatttggcaaaatgtgttttttgactcccagtgaaattctaagaaggttctcagaaaaatattgagatgagaacacataaataagatatccagctctggagcaaggcccctccctttagagaagcccccgttggggtcatggcttccgcctaccttccccatcctcccaacagcaactggcagttgggtcactcaatgaagtcctgaggcatttcacttcatgatcccaccctgtctctaggatcttagaaagtggcatttgtgtaacaggtaggattttatggagatgccagtgttctggccaagttggccgcaaagcagctctgtttttgttayaggagatggaaggatctgaaaccagcagagggcccacggtgtttcaggcccttttcaaggataaaggtgtacaaagatgaagaaacacagtccttgcctccaggggtttagagtctagtgttcctataacgtgtaatagcaatacctgttattgatcaacttacaatatacc

SEQ ID NO: 107317 - DNA, 599 bp, Homo sapiens
gctcttgttgccagttgtttggagttttctcctcacctccatccacagatatgttttctgagacttgcctttattgattctttccaaagtggtcaacttagaaacagcaatgtttctttaatgctcttatttcattcgttggcataatatttaattaagttatgtaatgacagtactraatacacctgccataaatgatttagacagcaaatgcaatggtctcttggtcagtaaacaactcacatggtgagagtggaagtttttggggttgctgaaggatacctctatgggacataatgcatttgtctgcaaggaacagaatctttaactgaaacaagttttaagctttgctttcaaaaaactctcagtgcatagtaaaaaaaacgcattttaaattgtcccttagcacatatgcaagagtataaactgaagcaaattttcacaagcagcacttacctttactttatgtgatgctacctaatatttttgtctattctttcctattttaattctattagaaatgctaatcatgacccactaatataatctcatgtctcattaatggagtgcaacccacagtgtgaaaaacaccggcttaa

SEQ ID NO: 107318 - DNA, 615 bp, Homo sapiens
ttaggggagggaagaaaacagtgtggctgcttaatagttataggtttttctgttggggtggtgagaatgttttggaactagatagagggattagttctgaacatgctaaatgccactgaattgtacacttcaaaatggtaaattttatgttatgtggattttccctcaagtttttaagaaagaataactagttacactagtwtgtaggatgaatgctgtcaatatcagtgtctttacatacagtatatttttgaaaatgtttgctatggagtcagagtaccttattccagaattagagaaagttctccaaaaattagatctcttactattttgctttgttgcatgatttggtttttgttgtttgtgtttgtttttcactgtttgcaaatcagaaaaactaacaatgtttagaattccagattgagagaaattttttttggtctggaatttgcataatgacttttgatggacaaaataaaaaagttttagaagaccatatgataaaagaaaaaattaaacttgttatcattgattgctgaggagtttaataaaatcttcatagtgtttaaggatcagtggttgacagactatggaatttgtcagtattaaaaatgt

SEQ ID NO: 107319 - DNA, 580 bp, Homo sapiens
atgtttaagaaaacttgtcactcctgcccctcagatgccaactgggcctttcctgccctccagatgtttgctgtttgctttcatatttcagactctcaatttcctgcctaggaagtccacagccctccccatcatttctgttaccaatccttgggcttatgctcaccagatcctgttgatattcagggtgaatgaatttctctcactgtcaaacaccaactcaaccccttccccagagcgtgttttaaaagaaaaaaaaggacagaattgtgtgagttgaatagattatgggaggacctgtgttcacaaggaaggattgatggaggtgtaggcatctttttgccrtcattctagtttttcactctcaccccttttctttcactttttctgtttctttcaggaggatagcagaggaattccaacccctctcccatatggagccccttcttctctcagctcttttgacccaaccaatatgtaggtctgggggcgaggaaggaggagagtgtaggcttcatgtcaaactctgtacagggcaccacccaaaggatggctggaaactccccagtaggactgttgg

SEQ ID NO: 107320 - DNA, 604 bp, Homo sapiens
  misc_feature (1)...(604): n = A,T,C or G
gttgttttaacaactgaaatgacacatgctcagtaataccattggaggcactccgatgaaataatttaaaaatggaaactgcaaatcttaagcaaaacacaaattaaaacatattgttgatataattaagcatttctgtcacttctaccaaaggaagcatgnnnnnnnnnnnnnnnnnncaaacgagtataatgcaatcaaaacatattttgaaagtctctggctgcatttgtataaacatgtgaactgttcctatagcatgcctcattcttgttcattgaacattggtattaagattatattgcgtattgcaaataatgctacagtgaacatgggaaagcaggtgctttacgaggtagtgatttaatttcctttgggtatatgcccagaagacggctagtaggrtcctatggtaattctatttttaattttctaaggaatctccacactgttttccatactggctgtaccggcctacatctccaccaacagagtacaatctacattctttacaccctcaccagcacttgttatctcctgtcttttttatagtacctgtcctaacaggtgtactcatgtagcaaatttctgaatacaacacacc

SEQ ID NO: 107321 - DNA, 530 bp, Homo sapiens
acttatcaccaaatccaaggtcaaagacatttctttgcctttctttccataaattttataactttaaatttttatacttaaatctatgatctattaagaattcattttttggatataagttgtgagagtcataaagttggatgagggtgagcacagctggtagcrcctacatatgtctaacagaatctaccaaccatctgaaagaagtcatttttagcttagtgccaaaattggctataataattttgttctactaagtgcattaccaacatacaattaataattgaacactcaagaaaacaaggcaccgcgagtaagaacaagaataaaagaatgtttcttggggttaatttttaaatgccagtttgaaactatagccagggaacaggatttgctaaaaacaaacaaacaaaaaacacaaaaaaagattaaaataaaatctacaaataaaaataaaatagccaaatttatttttttttattttaaaacattttatggatacataggtgtaaatatttagaggataaatg

SEQ ID NO: 107322 - DNA, 572 bp, Homo sapiens
caacattataatgtgtatggtatatttatctgaataactggaatatttcaagtggttataaacaagtagattatagactcaattgtataaaataaaaattcaggtaaaagcaaatccctatagttccccaaaacagtttttcatctttcaaagcaagaaattttwaaaaaaaattaaatatattttttccaaatataataaaatacatattttgttaaatttttcaagtatttctaaaatgtatgaattaaaacattctgctataaaatatctactttcattacacaaacatcaatagtgaaatcaataaggataaggtaaatatttttctaatttaaaaaatatttggaaaattcttctaaacatattgtagaaaccatttttcttttgagcaatgattttactagtttcaattaaaataagtaaagttcataatgagtcagagttacctagaaaaaaagaatattcaaagaaagaattgcttttaacacctaatgaagtcattacctcttattacatgagacattttataatttaggtgcataaatgtatacatatctcagtttgttcaa

SEQ ID NO: 107323 - DNA, 572 bp, Homo sapiens
caacattataatgtgtatggtatatttatctgaataactggaatatttcaagtggttataaacaagtagattatagactcaattgtataaaataaaaattcaggtaaaagcaaatccctatagttccccaaaacagtttttcatctttcaaagcaagaaattttawaaaaaaattaaatatattttttccaaatataataaaatacatattttgttaaatttttcaagtatttctaaaatgtatgaattaaaacattctgctataaaatatctactttcattacacaaacatcaatagtgaaatcaataaggataaggtaaatatttttctaatttaaaaaatatttggaaaattcttctaaacatattgtagaaaccatttttcttttgagcaatgattttactagtttcaattaaaataagtaaagttcataatgagtcagagttacctagaaaaaaagaatattcaaagaaagaattgcttttaacacctaatgaagtcattacctcttattacatgagacattttataatttaggtgcataaatgtatacatatctcagtttgttcaa

SEQ ID NO: 107324 - DNA, 477 bp, Homo sapiens
ggcttatgtgttgttatatactcctggtttcttccataactctctggccccttcctctcagttttccttgtgttctcatcttcatctgtccaggtcttcagtgttggtattggtcacagtctcctctaaatgtaagagcatatctatttcagtaggtttaattttccatccacattctgacattttcgaaatttttatttccaacacatatgtcttttctgaacttcagacccagttaagctattgcctgctgaacacgttttcttggttttctacaggtatttggaactcagtacagaacaatttatcttttatttcaaacctgttctttctctcatgttacttatctcagctgctcaggccaataacctgagattcctcctagatctcttccactcaccagtgcatttcatccaatgtcttaaagacgttttcamgcaaccctaagtatttatcaaatccatacaatttccccac

SEQ ID NO: 107325 - DNA, 511 bp, Homo sapiens
tggtacccactgacccaggcagacatgtgagtgagaaagtcctcaagatgactccagcccagccactgtctgactgcagccatatgagagaccacgaacaagaacagaacccagttctgagcccagtcaagcccagaactataagatatggtaataaaatgattgttgttttaagccactaagtttggggttattcattacatagtgatagatcatcagaatagtgattcttagattacaatagaggttgaccagatggcrgatgaatgatgctccaggcaacagggacaacacatgcaaggcacaaaagcatgagatggggcctttgattagagacacaggagctggtattgccatgggtgcctgctggagatggtgttggagggtgtacaaaccatgtaaaattaggcagcatggggtgaaactatcctggaagtcacggcatgttatggaggttttcaagcaagacaaagatataattatctctggattttaggagaaggaccactag

SEQ ID NO: 107326 - DNA, 595 bp, Homo sapiens
cagaatatgtcttcatgttctttgctggcaatacactaggtcagtaaatgaatgatatttaattgtgcattcttacaatgccagatattttggtatggcaagaaaatacaatagttatggaagtaaatagctactaggtgtgttactttttaaaaagatttttttttaatttattttatttttatttatttattttttaaattttactttaagttctggcatacatatrcagaacgtgcaggtttgttacataggtatacttgtgctatagtggtttgcttcacctatgaacctgtcatctaggttttaagccccacatgcattagatatttgtcctaatgctttccctccccttgcccccacaccctgcaacggtccccgctgtgtgatgttcccttccctgtgtccatgtgttctcattgttcaactcccacttatgagtgagaacatgcagtgtttggttttctggtcctgtgtgagtttgctgagattgatggctggtgggaaaggagatattatattaaatatcccttcaaattcttatatagcttgactttaaaatatctcaacttagcatccttttctgtaaataaat

SEQ ID NO: 107327 - DNA, 632 bp, Homo sapiens
atatttttccatcttttgagctttttcacatgatgatgcaagtaacattttacattttccaggactggtttcgtggtaatttcctttcttttgttttcttttcttttcctttcttttctcttctcttctcttctcttctcttctcttctcttctcttctcttctcttctcttctcttctcttttcttctctygtctcctctcttctttctttttttatgtaactgattaggccttgggaagaagaaagaagagtgaggccctgttataattgccacacactatatgacatgttgtacttcagccccctttcgctaacaaagtataaacctgatgatgatttatgatggataaaagagggcctttctaccccagataagctgccatgtttttccaagttgcttcaaatgcccctcaactcctcattctggctaatgcttttattgacaataatttaaggtgttcagtttgcattttccccctaagtccttctacttgtaaatattctatgctagagattaagacattatttctgcgcttaatggacagctttaatggacaacaacaagcatgtcttttgttatgacaaaagataacatgtcataagagaagcactaatgaaataacaaattta

SEQ ID NO: 107328 - DNA, 632 bp, Homo sapiens
atatttttccatcttttgagctttttcacatgatgatgcaagtaacattttacattttccaggactggtttcgtggtaatttcctttcttttgttttcttttcttttcctttcttttctcttctcttctcttctcttctcttctcttctcttctcttctcttctcttctcttctcttctcttttcttctcttgtctcctctcttctttctttttttatgtaactgattaggccttgggaagaagaaagaagagtgaggccctgttataattgcmacacactatatgacatgttgtacttcagccccctttcgctaacaaagtataaacctgatgatgatttatgatggataaaagagggcctttctaccccagataagctgccatgtttttccaagttgcttcaaatgcccctcaactcctcattctggctaatgcttttattgacaataatttaaggtgttcagtttgcattttccccctaagtccttctacttgtaaatattctatgctagagattaagacattatttctgcgcttaatggacagctttaatggacaacaacaagcatgtcttttgttatgacaaaagataacatgtcataagagaagcactaatgaaataacaaattta

SEQ ID NO: 107329 - DNA, 632 bp, Homo sapiens
atatttttccatcttttgagctttttcacatgatgatgcaagtaacattttacattttccaggactggtttcgtggtaatttcctttcttttgttttcttttcttttcctttcttttctcttctcttctcttctcttctcttctcttctcttctcttctcttctcttctcttctcttctcttttcttctcttgtctcctctcttctttctttttttatgtaactgattaggccttgggaagaagaaagaagagtgaggccctgttataattgccacacactatatgacatgttgtacttcagccccctttcgctaacaaagtataaacctgatgatgatttatgatggataaaagagggcctttctaccccagataagctgccatgtttttccaagttgcttcaaatgcccctcaactcctcattctggctaatgcttttattgayaataatttaaggtgttcagtttgcattttccccctaagtccttctacttgtaaatattctatgctagagattaagacattatttctgcgcttaatggacagctttaatggacaacaacaagcatgtcttttgttatgacaaaagataacatgtcataagagaagcactaatgaaataacaaattta

SEQ ID NO: 107330 - DNA, 632 bp, Homo sapiens
atatttttccatcttttgagctttttcacatgatgatgcaagtaacattttacattttccaggactggtttcgtggtaatttcctttcttttgttttcttttcttttcctttcttttctcttctcttctcttctcttctcttctcttctcttctcttctcttctcttctcttctcttctcttttcttctcttgtctcctctcttctttctttttttatgtaactgattaggccttgggaagaagaaagaagagtgaggccctgttataattgccacacactatatgacatgttgtacttcagccccctttcgctaacaaagtataaacctgatgatgatttatgatggataaaagagggcctttctaccccagataagctgccatgtttttccaagttgcttcaaatgcccctcaactcctcattctggctaatgcttttattgacaataatttaaggtgttcagtttgcattttccccctaagtccttctacttgtaaatattctatgctagagattaagacattatttctgcgcttaatggacagctttaatggacaacaacaagcatgtcttttgttatgacaaaakataacatgtcataagagaagcactaatgaaataacaaattta

SEQ ID NO: 107331 - DNA, 547 bp, Homo sapiens
ttctgaaacacttcattttggtcttttaggcattattttctggtactttggtagcagtaggcaaaatacattatcggagaaatatgctacaaagggaaagagaagaaggttttgggctatgaagttatgttaacagctttctcaagcattatttaaaaaattgatgcaataaatgtcatcttaaatgttttaacatacatttaatctggtagagtcgggttttgacaatttatttttaaacataatgtgtcttaatgaagtttttcatacacgaaattcattagtgttcgggacaaagaaaaataagtgaatttgtacccctatgttgccaagtgtatgatttgttggtatgctaaataagtatggtttttatattaatagattaattccacatacattatgaaagtgtkaatttttcaattttcctaattttatttttcaacatcatagaagctaattacatttgtatctaagagatcattcctcaagctttaataatgtgaggtacgagtttataatgaatttcaacctctttgttttttgattt

SEQ ID NO: 107332 - DNA, 529 bp, Homo sapiens
aaatgagttcttcacatatatacttaccactgtaaagctggtattttccttacacacaacatgtaaatatacattttaatcctgttctaatgaaattggagtgtcaacatacttcgagagacatctttagctatatatttttcctacagttatctgcactttaaaaatacagaacaattgaagccattcaaaactgttcrtgaaatattcaagctttaaaaagttgtttttgttgagagtgcaagcaaagaatgaaagcaaagcaaatttgggcagaacatagttatcattttatctgaagtgagaaccaaccatcctaatggacttaaaggattgtgaatatttttccagtgactggcaattgtagagagaactctgtaagtaggctaggttattttttgcacttgattgattgtaaatttagattcatagataggtggataatggatagatattttatctatgtagggaagtagttgttactttttttaaaaaaatacaaccaatatgtgttacataatacctggat

SEQ ID NO: 107333 - DNA, 529 bp, Homo sapiens
aaatgagttcttcacatatatacttaccactgtaaagctggtattttccttacacacaacatgtaaatatacattttaatcctgttctaatgaaattggagtgtcaacatacttcgagagacatctttagctatatatttttcctacagttatctgcactttaaaaatacagaacaattgaagccattcaaaactgttcgtgaaatattcaagctttaaaaagttgtttttgttgagagtgcaagcaaagaatgaaagcaaagcaaatttgggcagaacatagttatcattttatctgaagtgagaaccaaccatcctaatggacttaaaggattgtgaatatttttccagtgactggcaattgtagagagaactctgtaagtaggctaggytattttttgcacttgattgattgtaaatttagattcatagataggtggataatggatagatattttatctatgtagggaagtagttgttactttttttaaaaaaatacaaccaatatgtgttacataatacctggat

SEQ ID NO: 107334 - DNA, 529 bp, Homo sapiens
aaatgagttcttcacatatatacttaccactgtaaagctggtattttccttacacacaacatgtaaatatacattttaatcctgttctaatgaaattggagtgtcaacatacttcgagagacatctttagctatatatttttcctacagttatctgcactttaaaaatacagaacaattgaagccattcaaaactgttcgtgaaatattcaagctttaaaaagttgtttttgttgagagtgcaagcaaagaatgaaagcaaagcaaatttgggcagaacatagttatcattttatctgaagtgagaaccaaccatcctaatggacttaaaggattgtgaatatttttccagtgactggcaattgtagagagaactctgtaagtaggctaggttatttttkgcacttgattgattgtaaatttagattcatagataggtggataatggatagatattttatctatgtagggaagtagttgttactttttttaaaaaaatacaaccaatatgtgttacataatacctggat

SEQ ID NO: 107335 - DNA, 529 bp, Homo sapiens
aaatgagttcttcacatatatacttaccactgtaaagctggtattttccttacacacaacatgtaaatatacattttaatcctgttctaatgaaattggagtgtcaacatacttcgagagacatctttagctatatatttttcctacagttatctgcactttaaaaatacagaacaattgaagccattcaaaactgttcgtgaaatattcaagctttaaaaagttgtttttgttgagagtgcaagcaaagaatgaaagcaaagcaaatttgggcagaacatagttatcattttatctgaagtgagaaccaaccatcctaatggacttaaaggattgtgaatatttttccagtgactggcaattgtagagagaactctgtaagtaggctaggttattttttgcacttgattsattgtaaatttagattcatagataggtggataatggatagatattttatctatgtagggaagtagttgttactttttttaaaaaaatacaaccaatatgtgttacataatacctggat

SEQ ID NO: 107336 - DNA, 664 bp, Homo sapiens
atgtgcaaatggtaccaatttgtactggaaagtaaactgtgttttcttctgtcctggaaggccaattttatttgaatatgacactttatttttcatgcaaagggaggtacaaaagatggaattacagaagctaaatatagatgacttcaaagccacagttttgggcattttgtaggctcctcattctgataatggtaaaatcctgcctgccaatcagtgggcctgtgcttaaaagacaaacttcattgtgtaaygacttaccactaactccattaatgcaatttggggggttttgccttgtttcatttcatggctcatttcttgctccacatttccttggtctctggtgctgctttccaccataagttagaaatgaattttttaaaataagcacttgtactttgaaccataaaacaaaatctgaagctgaaatcaaaggcagaaggtaaattacttttagtactctgcaaagaaactttcatttggctatttcctgttgttctgaaactctgaaaatcaatacagaaacatatcgtattctgaaggcaggtcatctgtgcactaggtgtttttaacagttggctttgaaggggatacttatgcccccttgacatgaatctacagttctttgcactaagtgtccccatgaaactacatttttgct

SEQ ID NO: 107337 - DNA, 664 bp, Homo sapiens
atgtgcaaatggtaccaatttgtactggaaagtaaactgtgttttcttctgtcctggaaggccaattttatttgaatatgacactttatttttcatgcaaagggaggtacaaaagatggaattacagaagctaaatatagatgacttcaaagccacagttttgggcattttgtaggctcctcattctgataatggtaaaatcctgcctgccaatcagtgggcctgtgcttaaaagacaaacttcattgtgtaacgacttaccactaactccattaatgcaatttggggggttttgcyttgtttcatttcatggctcatttcttgctccacatttccttggtctctggtgctgctttccaccataagttagaaatgaattttttaaaataagcacttgtactttgaaccataaaacaaaatctgaagctgaaatcaaaggcagaaggtaaattacttttagtactctgcaaagaaactttcatttggctatttcctgttgttctgaaactctgaaaatcaatacagaaacatatcgtattctgaaggcaggtcatctgtgcactaggtgtttttaacagttggctttgaaggggatacttatgcccccttgacatgaatctacagttctttgcactaagtgtccccatgaaactacatttttgct

SEQ ID NO: 107338 - DNA, 475 bp, Homo sapiens
tgatgaagggataaagtttgaaacagaagaccaggttctgactcagaattttgtttcctaatcactggttaatctccacctgcccctttttccacatcctttggtagcaaatatgttgatattaaggtttatcaagttacatcaattgacacatttaattttgttttctgttgtttcatgtagactatcccattagagaatacatttgtagccagaaaaccaccttggacttttagggagcaattcctccctaaaaggggagcgatggtcagggccttctggaattactcctacaagaayaggagcagggaaagaggatatattttggagaggaagtgggatataaagaggatattagtgcacaaggatttaggatattagcttaagtagagtaagaaggacagagctaacaaccccaatgggatgaaatggctataattatttctttgtgtttctaggtatatctggagaaatc

SEQ ID NO: 107339 - DNA, 475 bp, Homo sapiens
tgatgaagggataaagtttgaaacagaagaccaggttctgactcagaattttgtttcctaatcactggttaatctccacctgcccctttttccacatcctttggtagcaaatatgttgatattaaggtttatcaagttacatcaattgacacatttaattttgttttctgttgtttcatgtagactatcccattagagaatacatttgtagccagaaaaccaccttggacttttagggagcaattcctccctaaaaggggagcgatggtcagggccttctggaattactcctacaagaataggagcagggaaagaggatatattttggagaggaagtgggatataaagaggatattagtgcacaaggatttaggatattagcttaagtagagtaagaaggacagagytaacaaccccaatgggatgaaatggctataattatttctttgtgtttctaggtatatctggagaaatc

SEQ ID NO: 107340 - DNA, 556 bp, Homo sapiens
tgcctgggctttttgtgtcccagtctaaaataattcaagagatataggacatctgccttgtaaattacataatcttttatatcttttaccattgggcagtagttttyaaaattattgaaactatcttcaattattcatttctaatattgcgtatactttaaaacctaactcacaaccaaatgatctcttttgggatattttcatccattgtcacaataatacatattttacatttcctcgatttataattattgttatttttttcatttatttctttagtcaatcaattaattacttagtaagtatttatagagcttctaaagctcaagcctgctgggggaatcattcacatgggaacaaaaactctgatttacccacattttccataaatccttcatcagattgctggttccttgcctgtggtgagcaggcgttgctataatgaagtcccagaacagtttagactggcaaaggaacacttttcaaagaacctcgtggggcttcacactcagcagctgggggaacttgtaggaattgagaccttggtagatttgtc

SEQ ID NO: 107341 - DNA, 615 bp, Homo sapiens
aggctggataggagaaccccaaccgcttgcaaaaagcatgcagtttatatagcattttcacttagcaccctcctactaacaacctccacctggtaaccttcatttaccccaaaacaaagggcctgattccctatatggcctgcattccatggggcaggccaggggtttagatgttcctcataggtaaggaataaatatctgggttgactactcccaattaccttagctcagaactcaaaacacacattcaggtgcatctgccacacaacatatatgtgtgtatatgtacataggttacatatatacmcatgtgtatcatattacatctgtatgtaatacatgtattcatgtatatacatatatatgaattttttccagttggaagaattttttttctattggatttgacggtcccactgatgtacttattcaacataatattagctagtcatataatcactaaatgtatttcactgttcactttgagtaatcatttggttgttaggggaagtggtgatgtaatttatgcaaatagattgatgaaggagctgctgacatggcagtttatatgtatggctcttgtttgaggggattaaatataatgacaatagtaag

SEQ ID NO: 107342 - DNA, 520 bp, Homo sapiens
aagtgggaaggtacctactgacmtgccctgaacccaaagttcatttccccagcataaccaattaggcaactaacttattcctactgtatgtgtgaaagacagagagagaacatgagcgagctcctgagagtgctgtgtaagtacaaaccacaaatgggagtctttcttttccccaaattttagtgttgcctcagatctgaaatctaactgaagcctgtcaattgttgtactgcatgtttcacaatgcatgaacgtgatactggacactgactctgagttcaagcacaaatttactggaggagaaagacatatttatttatgaggccttccaagtaaagccaaattattcacagatacagtgagtgctagaggagactttgcttgtaggagaaagaattctagaccacaagccagtatatcccttggttctagtcttggtcttgctcttaatttagggttatgtgactttggccaccccattagtccttctagacctcagtttcctcatgtgtgaaatgaa

SEQ ID NO: 107343 - DNA, 520 bp, Homo sapiens
aagtgggaaggtacctactgacatgccctgaacccaaagttcatttccccagcataaccaattaggcaactaacttattcctactgtatgtgtgaaagacagagagagaacatgagygagctcctgagagtgctgtgtaagtacaaaccacaaatgggagtctttcttttccccaaattttagtgttgcctcagatctgaaatctaactgaagcctgtcaattgttgtactgcatgtttcacaatgcatgaacgtgatactggacactgactctgagttcaagcacaaatttactggaggagaaagacatatttatttatgaggccttccaagtaaagccaaattattcacagatacagtgagtgctagaggagactttgcttgtaggagaaagaattctagaccacaagccagtatatcccttggttctagtcttggtcttgctcttaatttagggttatgtgactttggccaccccattagtccttctagacctcagtttcctcatgtgtgaaatgaa

SEQ ID NO: 107344 - DNA, 606 bp, Homo sapiens
gcggaactgtgagctaattacatctcttttctgtataaattaccaagactccagtatttctttatagcaatgmaaaaatggcctcataaaagagacctcagagagttagctagccccttccaccatgtgaggacacaatgagaaggcaccatctgtaaaccagagagtaagagctcaccagacatcagatctgctgatactttgatcttggacttcccaacctccataactgtgaggaataaatttgtcttgttcatcagccacccagtttatggtattttgttaaagtagcctgaacagattaagaaaagtggttagagagtcaaaacagtatggatgtgttatatccacaactcataaattcaatctaagaagtgaatattttatttattatgttgcatgctattttatattctgtattctccactagccccaaagtgattggaactttgacttcaggtttcctatgtttctagtttcagctagtcttttaaatatcatcacatgatctttattggagttaagtcccaaatgaataacaaaccaatgaaaacttcctgcttgttttctgatcaggtattgtttatgttaaggaaggtgctatgg

SEQ ID NO: 107345 - DNA, 510 bp, Homo sapiens
ttaaggttaaataaagtcataagaatggagccctaaactaatagaactggtgcccttattggaagagagacaccagagctctctctgtctagtgaggacacagcgagaagatggtccttattctagtctgaaagacagccctcactggaacctgaccatgctggcaccctaatcttaaacttccagttcccagactgtgaaaaaaaaattctgttgtttaatctacacctctacagtatttgtccttgtggcctgaactgactaatacaagcatacagatgaataaaatgaatgtgattttgtcaacataaggtctgctgtgtttggcagtgatcgtaaaatgaggcggtcaagtcatagattaggtaatttaccaatttcgtctaacayatagcagaataactaaactgatgcttcaatcacatttctttgagagctaacaattctcagctttctcaaaatcatattgatagttttacctttcttgaaactgacatttgtggtttaatt

SEQ ID NO: 107346 - DNA, 500 bp, Homo sapiens
ggtaactgctttgtacactaacccagtcatcaggatgagagtgccccatggctcttactttggactctgaacgtttttagtaagtttgcaaaagttttctgggtttttgcgccctctagaggagtaattccaagttgttttctgagatcctgccctctgtctttggttttcactgggcccaggtcaccctttctgatctagtaacagattaaagatctctccacttttcttattcacccctttttatttttttatttaatttttttatagttaaataaaaacctgcaggacgtgccggtctgttacataggtaaacatgtctcatggtggtttgctgcatctaccaacccatcacctaggtattaagcctcacatgcattagctgtttatcctgatgctctccctccccacgtctgattccctttttaggagcagacagacttaggcacatcttctggcttttaaasagtttatgtctatctagcctgtcttctaagatg

SEQ ID NO: 107347 - DNA, 555 bp, Homo sapiens
attttccaatataatcattcaacctaccagcctgtacttttaactgagttacagacagaaaaatccctgtcatccttgtctagcaaaacactctttgcaacggtgattcaggatctggggcttcatgatggaattcagagagtactttttggcaacaacttgaacttttggctgcacaagctcatcttcatagatgccatctccttcttgtcagggaagaggctgacattgtccttggacaggtacatccttgtggacattgatgatatatttgttgggaaagagggaacaaggatgaatgtcaaagatgtgaaggtaagcttatttatagacaacatcgaaatttgtatttcacaatatggtacygataaaatattactaatatgatagattattaatccctaaagttttaaggtgcagtagagttgaaataagatagccatttagaaaaatattgaaccaagacttaaccattctttacacacacatacacacaccagaagcttcagaatgggacagagctaaaatattaaaatatcccgaagagttagtgaa

SEQ ID NO: 107348 - DNA, 484 bp, Homo sapiens
tacacacaaaataaatacacttattgttgaatgattgttgcatgtcccaggtgctgcatatttgaacagaaagcatagaccatgcagcattctccattctccttctgctgccccctcccctycacacaatgctgcatacagacccagttgttcacaaacaaacttcttgcaggcacctttaaaccccaggcgattcagcttgtaaaaaatcatgtctgcctggctccctagtaaaaagacttcaatcagattagctctatgagatgggggcatagattgatagatggatagagtttgtattcaaaagctattcccaaatagccttttggttgcctttctaaagttcttcagactgctccaaacattgttgttgatagctatcaacagcaaggctccagaaatggacatagaaggtacatcgtgccatcatagaggacagatgatactttaaggctcattctgatctggaagtgctgtttattac

SEQ ID NO: 107349 - DNA, 345 bp, Homo sapiens
ttgaatgaacctttattccttacaaaggtgtgtggggctactacaagtagtcataggccccagtgagaaatgttttgttaacacccctttggggaggctgagccacttaacaagaatatcttctcaagaattatttgtgaggccactgggggtgggtcagattctacatagaaagaygttaacaagcattaacgagttcatttaatattggactcatcttgaatgtttttattgagttgttggtttcatagtggaaccatgaatttcttaaagtcaagaaccataggctattattcctgtggatccatcatctaaaccaagccctggcacttagtggctctcatt

SEQ ID NO: 107350 - DNA, 345 bp, Homo sapiens
ttgaatgaacctttattccttacaaaggtgtgtggggctactacaagtagtcataggccccagtgagaaatgttttgttaacacccctttggggaggctgagccacttaacaagaatatcttctcaagaattatttgtgaggccactgggggtgggtcagattctacatagaaagacgttaacaagcattaacgagttcatttaatattggactcatcttgaatgtttttattgagttgttggtttcatagtggaaccatgaatttcttaaagtcaagaaccataggctattattcctrtggatccatcatctaaaccaagccctggcacttagtggctctcatt

SEQ ID NO: 107351 - DNA, 430 bp, Homo sapiens
gaattcagtaactagtggtattcttttgtttttgtttttaagagaccgcgtcttgctctgtcactcaggctggagtgcagtggtgcgatcatggctcactgcagcyttaaactcctggttcaaacgatgctccaccttagctgccaagtagctgagactataggcatgtggcactacacctagtgaacttttgttttttattttttgtagagatggaatctcattatgttgcccaggttggtctcaaattcttgggtcttccaaaacactgggaaatatcctttcaatgtttcttcccaaatcagtcaatgacacaccggactatttggcacaagaatcagaagtctcctccaaagcctctgtaggagaaacagtatccatgtgccttcctcactctgggtctcaaatgccctcagcaaatttcagcaca

SEQ ID NO: 107352 - DNA, 496 bp, Homo sapiens
ttggaccctattgtctactccctccttcatggaaaagagatgaaaagttcagaaaggcaaatgaggcaaaaagagaagaggcaaagaggaaaaccagtgcagaatagtttatgaaaagggcataaagttaaaggtttcatggattgagcattttgtatgtgtgtgtgaaatacacactggaagtacaactgtgtgctcagggtgggygggaagaagagatgaaagtttgaagagagcaactgaagggctctgaaagggaacacgacaagggttgtggatttttagggtattgaaacagcctttgcaaaacttatatcagtgagaaaattataactgtaagctaagctaacccaccccccatcttgccttttcctgaactgttcctgggctacagggccaagctaactttggaagacatttaggcttcattttaaatgataataggcctcgcccaaaactctacttcttttgtaaaactaataggaggcctccaggc

SEQ ID NO: 107353 - DNA, 534 bp, Homo sapiens
ttaactgatttttccttgagttttctaagttagatacttagattattgatttyagatatttcctcctttctaatatatgcatttaatgctataaatttccttctatgcactgcctccactgcattttacaaattttggtaaattgtgtattcatttttatttagttcaaaatattgttaatatttcttgagactttttatttgacccatgtgttacttagaagcatattatccagctatcttctgttattgatttcttggttgattttactgtgatctgagacaatgctttatatgatttatattctttcatatttcataagatgttttaatggcccataatgtggtctatcttggtaagtggtccaggtgagcttgagaagaatatacattctgctgttggctgaatattttataaatgtcaatcagaccaagttgattgatagtactgttcatatcaactgtattcttagtaattttctgctagcttgatctagtgttgaaatctccaaccgtaatagtgggtttttctatt

SEQ ID NO: 107354 - DNA, 534 bp, Homo sapiens
ttaactgatttttccttgagttttctaagttagatacttagattattgatttcagatatttcctcctttctaatatatgcatttaatgctataaatttccttctatgcactgcctccactgcattttacaaattttggtaaattgtrtattcatttttatttagttcaaaatattgttaatatttcttgagactttttatttgacccatgtgttacttagaagcatattatccagctatcttctgttattgatttcttggttgattttactgtgatctgagacaatgctttatatgatttatattctttcatatttcataagatgttttaatggcccataatgtggtctatcttggtaagtggtccaggtgagcttgagaagaatatacattctgctgttggctgaatattttataaatgtcaatcagaccaagttgattgatagtactgttcatatcaactgtattcttagtaattttctgctagcttgatctagtgttgaaatctccaaccgtaatagtgggtttttctatt

SEQ ID NO: 107355 - DNA, 531 bp, Homo sapiens
ccttgaaacctccccagaagttgagcagatgccgtcaacatgtttcttgtacagcctatagaccgtgagccaattaaatctcttttctgaataaattaccaagtcttaggcatttctttatagcaattcgagaatggcctaatagtgtgtgtgtgtgtaactacagtatatatacagtatatatatatatatagtatgtatatatacagtatatatatatagtatgtatatatacagtatatatatagtatgtatatatacactatatagtatgtatatatacacaatatatatactgtatatatagtgtrtatatagtatactcatacacacaatatatactgtatatatacacacacactgagcatatattcatccacacatccagtcctctcagccatggctctaccctgaatttatacactatgtatgtgtatatatacggtatatacattgtgtatgtatatatacatactatatatgtaatctgatatatgtgtaactactgattatataattcataatatttaa

SEQ ID NO: 107356 - DNA, 588 bp, Homo sapiens
ctacatcatattcacattgaaaactgagagaattgaacggcagccacaatgaagtacatgaagagaagtactaactaaaaatagatatttttcagagatgcttttacyatttacaaatgcaggtacatgcactctctgcctgttattcattttccaagagggctccaggcaatcaacctttatcttttttgggacttcaaaagaggacaatgttaaagctgcattagacataccccaactgtttgtttatgatggcttttactgtttatatgcaaacctaaatatgtaaatcttagaaaagaatgctaaaagaaagggtataaggcaaggaaaatctggcaaatttttaaattttaggtttcagttaaattaaaaaaatagtaacattatctttcaaacgtgaaaatttcagttgcaaagaatagtacaaataaatcaaagtaaatgtagatttagttggctcatattaaaagaaatactaatcagtaacagtacagcttgatttgtcattggatgaatgatgaactggggaaattgaggcaatcacaaatagtctagcttcagtttacctcctcatgaagacttctc

SEQ ID NO: 107357 - DNA, 528 bp, Homo sapiens
ggaattcaaattcgtatcagcctattccagagggcatcttactgtgtcagaagaaagaggatagaaaaaggggaytgagaatttccaaagggggatgttatgagctttataaaagggtatatcagaaaacattttagaagagagacatagcctgcatgtccttaagcaatgtatttaacttttcagttaccttatctataagatggtgatgagacttacctggaaatggtagctggagttcaatgggacaatgtctacatagcacctaagaggtgccacaactttcatttccttgattgaaccaggtatagggaaccattgtcttgaagttataacgtgttcaaaaataaacccaggcttgaagactgtccatctttcagatactacttgcctgaaactaaagttacctctgattatctcatgggccagagaaacacaaagtgggcctgagacttgggtgtcaagcttcaaacccaaagatgccgggcccaggtgtggctccttacaccagggcaggaagactctacc

SEQ ID NO: 107358 - DNA, 393 bp, Homo sapiens
atgatcagaaatgagggacaaaggaatcttcaaatgtatcagtaaagtcctatttcttaaggtgagtggagggttcataagctccttagattactctttagagccttttatatgcctgtaatactttaaattctggttttaagcagctmaaagacctttgagaaataactgagactaactcaagaattgaggctattttaactgaaatgttattataatccaattcttatatgttgaatagccctctcaaacccctcctgctctgatttacaatatggcctttatatctggatttatttatgaactcttcatgctcttctcctgaccaatgtgtcttttcttgcatctaccacccgcaacttcatagctttaactatcttagaatctagaagg

SEQ ID NO: 107359 - DNA, 604 bp, Homo sapiens
gatgggaaagtaaattagtacaaccacaatggagaacagtttggaggttcctcaaaaagctaaaaatagaactaccatatgatccagcaattccactgttaggtatatactcaaaagaaaggaaatcagtatatcaaagagatatctgcactcccatgtttattgtagcaygattcacaacagtcaagatttggaaacaacctgtgtccatcaataggtgaatggaagaagaaaatgtgttgcatatacacaatggagtactattccgccataaaaaagaatgagatcctgtcatttgtgaatagagctgtggaggtcattatattaagtgaaataagccatgcacagaaagacaaactttgttttcactcatttgtgggagctaaaaatcaaaacaattgaactcatggagattgagaatagaatgaaggttaccagagactggaaaaggtagtgggggaggttgggggatggggggatgtttaacaggtacaaacaaaaatagaaagaatgaataagatctagtatttgaaagcaccacaaggttgctatagtcaataatttaattgtacatttaaaaatcactaaaagagtataactgagg

SEQ ID NO: 107360 - DNA, 604 bp, Homo sapiens
gatgggaaagtaaattagtacaaccacaatggagaacagtttggaggttcctcaaaaagctaaaaatagaactaccatatgatccagcaattccactgttaggtatatactcaaaagaaaggaaatcagtatatcaaagagatatctgcactcccatgtttattgtagcacgattcacaacagtcaagatttggaaacaacctgtgtccatcaataggtgaatggaagaagaaaatgtgttgcatatacacaatggagtactattccgccataaaaaagaatgagatcctgtcatttgtgaatagagctgtggaggtcattatattaagtgaaataagccatgcacagaaagacaaactttgttttcactcatttgtgggagctaaaratcaaaacaattgaactcatggagattgagaatagaatgaaggttaccagagactggaaaaggtagtgggggaggttgggggatggggggatgtttaacaggtacaaacaaaaatagaaagaatgaataagatctagtatttgaaagcaccacaaggttgctatagtcaataatttaattgtacatttaaaaatcactaaaagagtataactgagg

SEQ ID NO: 107361 - DNA, 631 bp, Homo sapiens
tactgtcaacattttaagatttttaaaattttggttaaattgaatttttcaaatatagtagatgtacctaattgtactaatctatgtttaaggatggagaatacaaaaataaggaaacaccctatttgttttctcatcttgtagccttgtagaagagataagaaatgaatataaatgattataatataattcaaaatgtactaagtataattaaagagttacaggagcagagagtagggatttgggaggaaagaggtaatagttgagttagggaagcacagaaagggcttcattaagggggtggcatttgaatggattttgaaggtgcctgcagttttcatgggattaggcataaggttttaatgagaaagggagttatgtacacacaaagtatttagtagtaggaaagcccagagcttatttttaatagcaggaaactatttggcttaacttgcaggagttgtaaaaggcttggctagtaactgagatctgtttgtagatgttttttgtctgggttgcatagttagaaaaaawtttttttatacagatatttatagctagatattggtcctaccattccctattatcttacaccttgtctaccttttcacacatacgtaacaccaccctg

SEQ ID NO: 107362 - DNA, 450 bp, Homo sapiens
cctcaatgagctacaaaatgtgcaattgtagaatggacaaaaacagtgtttcccaactgctgaatccaaagaaaagtttaactctgtaagatgattgcacacatcataaagcagtttcttagaaagcttcwttctaatttttatgtgacgatgtttcctttttcaccttaggcctcaatgctctccacaatatccctttgcagattctaaacaaacagggtttccaaactgatgagtgaaaaggaaactttagctctgtgagatgagtgcacatgttgcaaagtgatttctcagatagcttccttctggttttcatcctcagacattttctgttctgcaattggcctaaatgatctcccaaatgtccgtttgcagaatagacaataacagtgtttccaaactgctgaatccaaaattaactctgtgagatgaatgcatatttcacaaagc

SEQ ID NO: 107363 - DNA, 450 bp, Homo sapiens
cctcaatgagctacaaaatgtgcaattgtagaatggacaaaaacagtgtttcccaactgctgaatccaaagaaaagtttaactctgtaagatgattgcacacatcataaagcagtttcttagaaagcttctttctaatttttatgtgacgatgtttcctttttcaccttaggcctcaatgctctccacaatatccctttgcagattctaaacaaacagggtttccaaactgatgagtgaaaaggaaactttagctctgtgagatgartgcacatgttgcaaagtgatttctcagatagcttccttctggttttcatcctcagacattttctgttctgcaattggcctaaatgatctcccaaatgtccgtttgcagaatagacaataacagtgtttccaaactgctgaatccaaaattaactctgtgagatgaatgcatatttcacaaagc

SEQ ID NO: 107364 - DNA, 550 bp, Homo sapiens
ggttttcacctgggaatattcagtttctctttataatcctcaataggctaccaaatatttctttgcagattctagaaagaaaatgtttccaacctgctgaatcaaagaaaggtttaactctgagagatgaatccacayatcacaaagcagtttcacagatatattatttacagttttcatttgggaatatttggttattccccttaggcctcaatgagctcttaaatgtccctttgcagattttccaaaaagagtgtttccaacctgctgaatcaagagacacatttaactctgtgagatgaatccacacatcacaaagcactttcacagatactctttccagtttttatgtggggatattctgttttcccccaaaggtgtcaatgggctttcaaatgtcctttcacagattctccaaagagagtgtttccaatttgctgattcaaaagaaaacattaattctgcaagatgaatccacacaccacaaaccagcttcacagactgtttctttctagttttaatcttgagatattccgtttttcttcatatg

SEQ ID NO: 107365 - DNA, 508 bp, Homo sapiens
caggggatgttcggttttccccatatgcctctttgagcagcttaatgtcccttctcagatgtttcaaaaagaatgtttgcaacctagtgaataaaaataaagttttaactctctgagattaatccacacatcacaaataaatttaacagatatgttctttcaagttttttgtggtgatattcagtttttctgttaaacctctataggctcccaaacgtamttttgcaagttctacagaaagagtgtttccaaactgctggatcaaaagaaaggtttacttctctgagatgaatccacatatcacagagtagtttcacagacctcttctttcttgtttttatctagagatattcagtgtttcccataggccacaatgggctcccaaatgtccctttgcagattctccagaaagagtgtttccaacctgctgaatcaaaagaaaggtttaattctgtaagttgaatccacacggcacaaagcagattcaccaatagcttccttcttgttt

SEQ ID NO: 107366 - DNA, 520 bp, Homo sapiens
tacaatttttaagaataggcctgaatgggttcccaaatttcccttcacagattctacaaaatgaatgtttccagtgtgctgaaccacaaaaaagtgttaattttgtgagatgaatccacacatcacaaaacagtttcacagatggcttctttctagtttttaactggggatattcagttttaacccacacacttaaaagagctcccaaatgtccytttgcagattctccaaaagtgtgtttccaacctactgaatcaaaataaaaggtttcactctgtgaaaggaatccacacatctcaaagcagtttcacagatagtttctttctagtttttatctttgaatatttggttttgccctttaggcatccatgcactcccaaatatttattagaagattctccaaaaagagtctctccaacctgctgattcaacagaattgttcaactctgtgagatgaatccacatatcacaaagcactttcacagataacttcattttagttttcatctggggatattcc

SEQ ID NO: 107367 - DNA, 597 bp, Homo sapiens
tcaccttgcagattctgcaaaaagaatgtttccaacctgctgaatccaaagaaaagtttaaatctgtgagatgattccattgatcacaaagcagtttcttagatagcttctatctagatttttttctggggatattcagtttttccccataggcctgtttgagtacccaaatttccattcacagattctacaaacagattgttttaaacctgctgaatcaaaaaaaagtttgaactctctgggatgaatccacacattgaaaagctgtttcacagatagcttctttctagtttatatctgggatatttggttttccccctaaacctctctgggctcccaaatatcccttcgcaaattgtacaaaaagagtatttccatcctgctgaatcaaaggaatagtgtagctctgtgagaagaatccacacatcacaaaggcagcttcacagatagcttccttctagttttttctcagaggatattttgtttttcccttaggtctcgatgtgcttccaaatgtcccttcacagtttccataaaaygactgtttccaagctgctgaatcaaaagaaagttttaactctgagatgaatcctcaca

SEQ ID NO: 107368 - DNA, 544 bp, Homo sapiens
catcacaaagcagtttcaccgataggttcttagtattttttatctggtgatattcagtttttccccataggcctcaaaggactcctaaatgtcccttcacagattctacaaaaagagtttttttcaaactactgattcaaaagaaagttttttcttggtgcaaagaatccacagatcacaaagtagtttcatagatagcttctttctagtttttatttgaggtattctgttttcccagtaggactcaatgggctcctaaatgtcccctcacagattcttcaaagaacatttgcaattttgtgaatcataagaaagwtttaatgctgtgagattaatccacacgtcacaaagccttttcacagataacctccttctagtttttatctggggctattcagtttttgcccagaggcctcagcgggttacaatttgtcccttcgcagattctccaaaagagtgtttccaacctgctgaatcaaaagaatgttttaacactgtgaaataaatccacacatcacaaagcagtttcccagacagcttactt

SEQ ID NO: 107369 - DNA, 558 bp, Homo sapiens
gatcccaactggctgaatcaaaagaaagttttatctctgtatgataaatgcacacatcacacctgctgaatcaaaagaaagatttaaccctgtgagaccaacacacatcacaaagcagttacacaaatagcttctttcttgtttttatgtggtgtattttgttttttccataggcctcaaaggrctctcaaatgtcacatcatagaatctgcaaaatgagattctgctgaattaaaagaaatatttaaccctgtgagatgaatccacacatctcaaagcagtttctcagataccttcttcctagttcttatctggggatattccatttttcttcataggcctcaataggatcccaaatgtccctttgcaaattctccaaaaacagtgtgtccaacctgttgaataaaaagaaagttttaattctgtgatattaatccacacatcacaaagaagtttcatggatagcttcttagtagtttttatctgggatgttcaaattttccccacaaggcacaatggactcacaagtgtccactcgcagaaccaccaaaaagagag

SEQ ID NO: 107370 - DNA, 479 bp, Homo sapiens
gatgaatccagctatcataaagcagtttcacaggtagcttttttctagtatttacctggggatatttgttttttcccagtggcccaaatgggatctcaaatgtcccttcacagattctacaaaaacagtgttttcaatctgctgcatcaaaacaaaggtttaacactttgagatgaatccacacatcaaaaaacattttcaccaatagcatctttctaggtttttccccttagggctcaattgtctacaaaacgtccytttgctgattgtctagaaagagtgtttccaccctgctaattaaaagaagctttaactctgtgagataaatccacacatacaaagcggtttcacaaaacgcatctttctagtttttacttggggatattcaatttttctccataggcctcaatgggctcccaaatgtcccttcacaggttctagaaaaagagtgttttgaacctgctgaattgaaagaaaat

SEQ ID NO: 107371 - DNA, 479 bp, Homo sapiens
gatgaatccagctatcataaagcagtttcacaggtagcttttttctagtatttacctggggatatttgttttttcccagtggcccaaatgggatctcaaatgtcccttcacagattctacaaaaacagtgttttcaatctgctgcatcaaaacaaaggtttaacactttgagatgaatccacacatcaaaaaacattttcaccaatagcatctttctaggtttttccccttagggctcaattgtctacaaaacgtccttttgctgattgtctagaaagagtgtttccaccctgctaattaaaagaagctttaactctgtgagataaatccacacatacaaagcggtktcacaaaacgcatctttctagtttttacttggggatattcaatttttctccataggcctcaatgggctcccaaatgtcccttcacaggttctagaaaaagagtgttttgaacctgctgaattgaaagaaaat

SEQ ID NO: 107372 - DNA, 479 bp, Homo sapiens
gatgaatccagctatcataaagcagtttcacaggtagcttttttctagtatttacctggggatatttgttttttcccagtggcccaaatgggatctcaaatgtcccttcacagattctacaaaaacagtgttttcaatctgctgcatcaaaacaaaggtttaacactttgagatgaatccacacatcaaaaaacattttcaccaatagcatctttctaggtttttccccttagggctcaattgtctacaaaacgtccttttgctgattgtctagaaagagtgtttccaccctgctaattaaaagaagctttaactctgtgagataaatccacacatacaaagcggtttcacaaaacgcatctttctagtttttacytggggatattcaatttttctccataggcctcaatgggctcccaaatgtcccttcacaggttctagaaaaagagtgttttgaacctgctgaattgaaagaaaat

SEQ ID NO: 107373 - DNA, 285 bp, Homo sapiens
aattggaagaaacacagggagaaaaataaggtcatggtgtagtgaagaaggtatgctttcacctgctatgacagaaagtcaatagacagtgctaacagttaayttagctattctatttttgttatttcattaaacataagattaaatatgtaaagcagatctttataccacaaccagactattgaaatttaacttaaatgtcagaaatccttaaaagatagacacactaagctgaagacttttctggataaatttgatacttaggaaaataaaagagatttagaa

SEQ ID NO: 107374 - DNA, 570 bp, Homo sapiens
ttctagtttatatctggggatattcagtttttccccatagatctcaaagggctccaaaatgtcccttctcagattctccagaaagagcctttccaacttgttgaatgaaatgaaatatttaattctgtgtgatacatctacacrtcacaaagcagtttctcagataatctctttctactttttctctggggatattctgtttttccccataggcctcaatgagattccaagtgtacctttgagattctagtaaaatagtgtctccaacctgctgattcaaaagaaagttttaactctgtgagatgaatccagacatcacaaaccaatttcacagatagcttccttctagttttctctgggggtattctatttttcctctaagcctcagtgggctccctcatgttcctttgcatgttctacaaaaagagtctttccaacctgctgagttaaaaataatatttaactttgcaagatgaatccacacattaccaagcaatttcacagatagcttctttctaatttttatctgaggatatttgatctatccttgtagtcaactatgagttccca

SEQ ID NO: 107375 - DNA, 611 bp, Homo sapiens
cccaaatgtcccttcgtagatactccaaaaagtgtttccaacctgctgattcaaaagcatggtttagctatctgagctaaatccacacatcacaaaatagtttcacagctagcttctttggagtgtttatcaggatatattcgttttttttgccctaggcctcaatgggctgcaaaatattcctttgcagattttctgaagagtgtttacatcctgctgaatcaaaagaaagttttaactctatgagatgtatccacaaatcactgaaaagmagtttcacagatagcttctttctaatttttacctggggattttttttcccatagtcctccatgagctcctaaatatcccttcacagattctccaaaaagaatatttccaactgctgagtcacaagactgttttaactctgtgataagagtccacacatcacaaagttgtttcagaggtagcttctttctagtttttagctggggatattcaattttttcccataggcctcaatgggctcccaaatgtcccttctcagatcctccaaaaagaaatgtttccatcctgttgaatcaaaagaaaattttaaatctgaaagatgtttccacaaatcgcaaagc

SEQ ID NO: 107376 - DNA, 613 bp, Homo sapiens
agtctcccctgatgtcactgagggacttggactatgagcagaattggggcaggaggggctccagagaagccctcctcaagcatgggggcttccagcctaacttacagttccagggttgtttgtggttgtttttaaatatcatggaccagcaaaattaaagaaaaataacctgaagacaatactgaatcacccactttttattttgccagggagagaatcccagagcttcaattataacattatcaacacagtatcattttaacatctctcacctccattgaaaaaacacacaactgcatgataaaaagagtctaagaaagttcagctgacctccagactgattatttggaaagattatatatagccactatagwtaaatactgatacttacaaatacacatccataagtgcttatgtgtgcatacaaatgattgtgtgtgtatatactatgaaaggaaaataaatcttgggaccccaaactctctaaggcaaaggggaaagttaagctgggaactgggtcatgcaaacctgccccccagttttgttcctaaataagacagttacagagatgaaagggtatatacctccctcacaattttcccacaagggaatt

SEQ ID NO: 107377 - DNA, 368 bp, Homo sapiens
cgctccataaatgggtagctactgctaatagttacaagaagaagctggattttcctatccttggtcatctttgtggaacccacacaaaatatgaatagggagcatgcggacctgagaaattatgcaaagagagaaaagccatttcttggggaacacaaaactaccaaggacatttcagtaaattcacagtgaagattctaagcctcccaagggcccaaatctgacctatacagaaacaaatgaggaagagggtagccagaggatagaggcgagcttgctgagaattctgcccccaaggtgtgaacttgcaagcagagaggccgagaattttgcasatgctgtggcagttcgaactcccagagagccct

SEQ ID NO: 107378 - DNA, 546 bp, Homo sapiens
aatttcattagttcaaacaacaaaagaagtcatggacaatgagaaaatgagacaagacaatatttacattcatagcttttattaaccaatttatcctatagtaatmactgagaaaatgcttctttaatgaaaaattgtacaatgaacaaactagcaaattaacgatagtttccccatgtgattgttctttggcaattcagaggcactgtagaattttaaatcgtgatgttaatcgtccacacatgcagagtgtactccttgttactaagacttgattttatggctatatatttttacacgatcttaacatttaccagatcttgtaagcaattttatttaattgtttgtgcaaataattcttttacacccccttcctataatcctccactcgcatggtttcctacaaacctgaaagttaaaattgatctgtaaattaaccacaggactgaaaaacaggtattatctatgtacgcacacatcttccaccaaatttttttactttgatatgaggaaatggtaataataatcaaaagctgatttatttac

SEQ ID NO: 107379 - DNA, 546 bp, Homo sapiens
aatttcattagttcaaacaacaaaagaagtcatggacaatgagaaaatgagacaagacaatatttacattcatagcttttattaaccaatttatcctatagtaatcactgagaaaatgcttctttaatgaaaaattgtacaatgaacaaactagcaaatwaacgatagtttccccatgtgattgttctttggcaattcagaggcactgtagaattttaaatcgtgatgttaatcgtccacacatgcagagtgtactccttgttactaagacttgattttatggctatatatttttacacgatcttaacatttaccagatcttgtaagcaattttatttaattgtttgtgcaaataattcttttacacccccttcctataatcctccactcgcatggtttcctacaaacctgaaagttaaaattgatctgtaaattaaccacaggactgaaaaacaggtattatctatgtacgcacacatcttccaccaaatttttttactttgatatgaggaaatggtaataataatcaaaagctgatttatttac

SEQ ID NO: 107380 - DNA, 536 bp, Homo sapiens
agtcccagctactcgggaggctgaggtgagaggatggcttgggcctgggaggcagaggctgcagtgagctgagacgtcggccactgcactgctttcttatatactctttctaaacgtatctttctcaaagccccttcctttttttgtttcctattaatccaagtttcagaakattccattttcctgccttaattttttgtgtaaattattagtcagaagtcctacagattcaagcttccttctatttctcatgccataaccttaataaaaatcttcataaggtgatacttaaacctctagcaacaagaacaatggctattctttgtgtcctcaacttctctctccaatacataccatgctcactgctaaaattaagatggctaaacaccgtcctcactgaggcattctccagacacctttattgcacaatccctaattttctcctttacctggaatatgaaaactaagcactttaacccaatatccaaaggtctccctgtattcctctaacccatctttcccatctaacatcccta

SEQ ID NO: 107381 - DNA, 536 bp, Homo sapiens
agtcccagctactcgggaggctgaggtgagaggatggcttgggcctgggaggcagaggctgcagtgagctgagacgtcggccactgcactgctttcttatatactctttctaaacgtatctttctcaaagccccttcctttttttgtttcctattaatccaagtttcagaagattccattttcctgccttaattttttstgtaaattattagtcagaagtcctacagattcaagcttccttctatttctcatgccataaccttaataaaaatcttcataaggtgatacttaaacctctagcaacaagaacaatggctattctttgtgtcctcaacttctctctccaatacataccatgctcactgctaaaattaagatggctaaacaccgtcctcactgaggcattctccagacacctttattgcacaatccctaattttctcctttacctggaatatgaaaactaagcactttaacccaatatccaaaggtctccctgtattcctctaacccatctttcccatctaacatcccta

SEQ ID NO: 107382 - DNA, 511 bp, Homo sapiens
atctaagatctaatataggcccgatcaaagtgacaggaatgatttttaaaaagtggaagaaaggaaatattggggaaaaatggctggaaatttttcagaatgaagaaaaacacatatccacacataaatgaaacacaacataaaacaagcaagaaaaacagaaatttacaattagatattctgaagtgactatagatactgaaatcgggaccaccttaaaataaacagaaagaagaaatcactctacaaaataaccacaagtagacgaatagctttcttatcaacaatgaaaaccagaaaagagttaatatctttaacatgttaacctgaaatcaggaacacagcaaaactaccttccaacaacaacaaggaaygatcttagtaaataaaaactgagtttaccaccaagagaccttctccaagggaatttgaggtacaatcatgggaaacaaaattgttaaaccaaaacactggataataacttgagagtttatagataagagatcagggt

SEQ ID NO: 107383 - DNA, 532 bp, Homo sapiens
taattaagtagctgtttcccccaaaaaagtattaaatgaggcttttaaaatcttttatttttacccaatgaaactcagatatcacttctgggaaaaattctttctgggttcacaaacatactgacagagaactaaaaggaaagtgtaaattgagcaatggctgtgttccatttacaagcattttaaaagtgaatgtcaaatatatagatgtctaaatcatttgattttcaaagaatgtaaacttcaccaccaccagctacagcacccgcattcttattgagaaatttatattaggtagctaattatgcacataataagactgtcaaagatcatgttgacaccttatcccactttaccatttcaggctgatccaaactcataatatgaatagatggacattgaccaaagagaccagcagcagaacaaaagcataaacaaacatgagagtaggctaattttaccaacctgaggtcaaaartaagtatttttagaagtaagtgagtaactagatgaagtagatgatgaaggtggt

SEQ ID NO: 107384 - DNA, 496 bp, Homo sapiens
  misc_feature (1)...(496): n = A,T,C or G
tccctgcacaagctctcttctcttgtctgccatccatgtgagatggccttkctcctccttgctntccactgtgattgtgaggcctccccagccacatggaactgtaagtccaataaatctctttcttttgtaaattgcccagttttgggtatgtctttatcagcagcatgaaactggactcatacactacatattttcctcattgtcagatatcaagtttctgtgtatgcttgagtatttttatgcctctattttgtttgatttgtctgtttttctactcctatgccaatacctttcctacatcattattatttaatatctggtagggtaagtcttgccatttgattcttcttcaaaattacttgttgacctcttgtgaattttatgattagcttgacaatttcattaaaaatccagctgagatttttattgaaattgctttgaatccactgcttaatttgatgaaaataaagtctttatactattgagtcttttt

SEQ ID NO: 107385 - DNA, 485 bp, Homo sapiens
cttggcttcaatgactggttcagaaatatacagtcagccaagcctatgagaatatagcaaaccaggctctttcccctaaatgggaacagggatatctatagtttgggtttcagcaggcagccgtctcatggcccatgaggtaaaacattccaaggatgaagcccaggcacaaaaaagggcagagcaagaagtgctgcagaaaaacagagctagagtcctgttcaaactgtgcctgaggctcacatgacctctgcacttgccagtttccaggtgttctaggtttgcagaatcacccactcactttgttctagatgccatactctattaaacgcaggtgaaggctgcatcagcatttcsgaagccactcccaacaaaagccactgttggctcatatttagcttatgaacaacaaaaacttctaagactcttccagtctgctcataggtgggaactgaacaatgagaacacatggacacaggaagggg

SEQ ID NO: 107386 - DNA, 538 bp, Homo sapiens
  misc_feature (1)...(538): n = A,T,C or G
agcaattgtatttcatttctcttatctgaaatctctgctgactttccatgtcttatgaatttaaatagtctaaatagggcatgagatcttaaatattccttccagtttctacattttctattcagcaacaacattttccctggaaaagggtgaaagcctgtgagtcccccacagggcaggagcactgaatacacccacattttcctaccatctgacatagatgagacacaaagtagggactcagatgattatttaactgaatcaactggattccttaattctcacaatattatccttcctamtttgtaaatagggaaatggaggcttagtcacacaaaatatcttgttcgaagttactaatcaattaagtaacttaataatttattgacatctgaggcatttctctctttctacagcctcagaccagaaatgatgggatttcagccttcttttcttagagattggtgagccaagacctggagagagaactctggttgtcttaagtcacccagatgaactattaatagancacgaattc

SEQ ID NO: 107387 - DNA, 606 bp, Homo sapiens
gcctccaattagctaactaccattcctgyatcccagttccaaattcccaggtgagaacatctgattggttgacaccagccaatagatggactcaccttattcagctgtctatcctcatccaatctgttggagtcagggaggagtataattaggtaatgtaatcatgtctacaaggtcatgtttctttgtgtgaggagaatgacaatttctcagaaaacggggcagcccaaaagtagccccaagaatacccttagatgttaaaatgaatgttttgtctcaatcgtctggcttctcttaaacagctcaatgatgggcatcttcacttatgcattatgacaatccatccaaaaaagaaatgtgcactctaacagcactgcagccatggggttacactactcagatgtcccttcaagagagatgctggcatctcgaagagatactcgcatattcatattcatgttcactgtgcagtaaacacggcacaaacagccaagagatggaagcaatgtaaaggcccatcaacagataaatggataaagaaaatgtggtatatacatacaatagaatatcattttaccttaaaaagaagaaactcctgtcatacat

SEQ ID NO: 107388 - DNA, 606 bp, Homo sapiens
gcctccaattagctaactaccattcctgtatcccagttccaaattcccaggtgagaacatctgattggttgacaccagccaatagatggactcaccttattcagctgtctatcctcatccaatctgttggagtcagggaggagtataattaggtaatgtaatcatgtctacaaggtcatgtttctttgtgtgaggagaatgacaatttctcagaaaacggggcagcccaaaagtagccccaagaatacccttagatgttaaaatgaatgttttgtctcaatcgtctggcttctcttaaacagctcaatgatgggcatcttcacttatgcattatgacaatccatccaaaaaagaaatgtgcactctaacagcactgcagccatggggttacactactcagatgtcccttcaagagagatgctggcatctcgaagagatactcgcatattcatattcatgttcactgtgcagtaaacackgcacaaacagccaagagatggaagcaatgtaaaggcccatcaacagataaatggataaagaaaatgtggtatatacatacaatagaatatcattttaccttaaaaagaagaaactcctgtcatacat

SEQ ID NO: 107389 - DNA, 592 bp, Homo sapiens
agacgtcactttcagaatagtttgtcacatatcatagagaggagactttgatcagttgcagccagcatcatttcactatgtcattgaagaagaaaatttttgttttaatgtaatggaaacattagcatttagaaaacaaattctactgaacactgctgtgaatataaatatactttaatattaaatataacctcagaatatttttgtaccccctaaaaaattgctatgcctgtaattccatcagccagacagaaagctctgtcaaaaccttgatgtataacctttcaaaacgtttcccaactgtgtcaaatgcacacaagcatacrcacagaaacacacacacagatacatttatattatctatatactaaaaattaaaattataaaattacagataataaattgttataaataaggaatcatgctgtatataacctttggtgatcttttcttactctgtatgggaacattctttccatatcaaaatgttcatctacaatattatttttaatggaccactttaatttttttatatagagctgccatcttttattcaaccaatccctcactgtacgacatttagattttttca

SEQ ID NO: 107390 - DNA, 568 bp, Homo sapiens
gacaagtcaaacctgtccctgaggctggtaaggggcaatgtcctctggagcacacagttgtttgtacatgtgaatctctaaaaaatttcagggttctgttaggatgcaagagggaagtgttgtctggtatccgtgcagcagggtctggtgtagttactgtatgtactcaggaggaactaagttggtttctctgggcactgagtgaggaggactgtgaggagaaagacrggtgatgtggcaggagatctgaggtgactgctctctcagttccgtgtccttcaatacattcttcctctttctcagactgcttttgtacaaactggcaaggggctgaatttctcatctaggttgacaaggagggaaaaggaacaaatgcaggagctagggatagaggagatctagggaagtggtagaagccattgggagggcagtgtagttgggttttagccaagttaatctacattgcaggttgcagacaggttgcacacatcacaggtggttgcagacagggcctcagcaaccacctgggtaacaagatggcagccacagactgtgtggattttaacct

SEQ ID NO: 107391 - DNA, 656 bp, Homo sapiens
ccttcctattttgtctctctaaatattgtaagagattaccctcttaaaacttgatgttaactgtcatctccccagaagtccactagaaaaatttattgatgaagtaaagctaaatttattagaactactgcaacaaatgggtaaactacttggggttattattgtcttaaatattgtgccttagtttcccattttaacgagtttagggtctgggctgaataattttaagacaagtcttgtaagaagagaaatggttgagactgagcagagttcacgacacgatagctttgtattggtgtggatggcaaaataagaattttgaagtgagcctaagtaagcaagctgtttagattccaggagcaaagatttcctggaacaagaaattaggttaattttgtttagttcaaatataattttaacagatttagggccttactttcaattctcattaatttcatttttaaggtactagatcactcttaagcttatttttagtttgatatattaatatatgcttacattattatcttctatgacttctaggaaatttaacaaaagtgattatactatattttktaaatatttgtcttataaagcaccacttgtctaaaaatcttgggacgatttttcaagtgtgataaattcctgtttatagg

SEQ ID NO: 107392 - DNA, 516 bp, Homo sapiens
gatgaacaaatgatttgaaggaagtaacagtccatggggaaacactgatagccttgcaaaatgttgtgtggctgggttttagaagatgagtaagagatggatatgcggaagtttaattctttctaagcagaagaaattgaatatacagcactgcttcctttttatgggacttgaacccacttgttaggtatttatttgtaggttttctyctaagcatccataattcatataaattccagctacatggttcagtctttttaatcttttttaaaacaacaattaacagttttcatttgtagttttgatcttgttaaaatacgattttccagaactaaaataattgtcaggtacatataaagcaaatatatgaactttttatttctgcctctatcagacaaaggtcaggttagcaagtaactttattttgtttgagacatttaatcaatagtaaaaagtgtgttgaactgaatatatatatatatatattaccacagatgatccttgaataacctttga

SEQ ID NO: 107393 - DNA, 537 bp, Homo sapiens
ccccggtgggagaaactattgcttcctcgtgaaaggaatcttgattttatttatatatcaaaaggcagtttgaccagggagggtgagctaaatcctaagacagggtttctcaactgtggcactattgatactttgggccagataattttttgtcatagggcactgtcctgggcattgtagcacgtacagtawcattcttggcatctagatgctatatgctagtaggacaccctcctgcctaagttgtgacagccaggaatatctccaggcattgaaaaatgtcccactggggaataacaaacatcccgttctcctgatgggaactattgtctgagggaataactcaactttgccctaatgtgaatattataatctcattcctaattgcttgtaatggggaaaatggcatgtgaccccgttctggccaatgagacgtgaggagaagtcatctgaggggtcctcagaaagattttcctgtccagtaaaactggagatgcgtagggaaaaatgtctcctttatttctttggtttagagat

SEQ ID NO: 107394 - DNA, 537 bp, Homo sapiens
ccccggtgggagaaactattgcttcctcgtgaaaggaatcttgattttatttatatatcaaaaggcagtttgaccagggagggtgagctaaatcctaagacagggtttctcaactgtggcactattgatactttgggccagataattttttgtcatagggcactgtcctgggcattgtagcacgtacagtatcattcttggcatctagatgctatatgctagtaggacaccctcctgcctaagttgtgacagccaggaatatctccaggcattgaaaaatgtccmactggggaataacaaacatcccgttctcctgatgggaactattgtctgagggaataactcaactttgccctaatgtgaatattataatctcattcctaattgcttgtaatggggaaaatggcatgtgaccccgttctggccaatgagacgtgaggagaagtcatctgaggggtcctcagaaagattttcctgtccagtaaaactggagatgcgtagggaaaaatgtctcctttatttctttggtttagagat

SEQ ID NO: 107395 - DNA, 537 bp, Homo sapiens
ccccggtgggagaaactattgcttcctcgtgaaaggaatcttgattttatttatatatcaaaaggcagtttgaccagggagggtgagctaaatcctaagacagggtttctcaactgtggcactattgatactttgggccagataattttttgtcatagggcactgtcctgggcattgtagcacgtacagtatcattcttggcatctagatgctatatgctagtaggacaccctcctgcctaagttgtgacagccaggaatatctccaggcattgaaaaatgtcccactggggaataayaaacatcccgttctcctgatgggaactattgtctgagggaataactcaactttgccctaatgtgaatattataatctcattcctaattgcttgtaatggggaaaatggcatgtgaccccgttctggccaatgagacgtgaggagaagtcatctgaggggtcctcagaaagattttcctgtccagtaaaactggagatgcgtagggaaaaatgtctcctttatttctttggtttagagat

SEQ ID NO: 107396 - DNA, 573 bp, Homo sapiens
ttgctgcctacaatgacttctagaagtctgtgtcttggccagaattctccattgcagacaacaaactcacctctgtctagtttaagcatttaaaaaaaaaaaaaaagtattaagaacacattggagaaatacaaacacagaacctagtgcgaatgtcaagaacattttctgatatcatatcatgagcccttcycaccccctgacactcccaaaaaggaactactgcgtctctcatatccatgcatcattgcatcagaaaaataatactgtaatttctggctctaaaatcacacaatttgtaccacaatcaagtacctcctaaataggaagctcttttatagctgttggttcgagggacgtgctgccctgttcataaaaatataccagggggaaaaaaaggcccaggccccacctctttgcccccacataattcagttcaaaattaaagtaccccataggtatatctgattgtagaacccaaatcacatatatgtgccttagtgttaagggaggcagagaaattgtttgttttattttgtttttttcatttacctttaggaagttggtatctac

SEQ ID NO: 107397 - DNA, 573 bp, Homo sapiens
ttgctgcctacaatgacttctagaagtctgtgtcttggccagaattctccattgcagacaacaaactcacctctgtctagtttaagcatttaaaaaaaaaaaaaaagtattaagaacacattggagaaatacaaacacagaacctagtgcgaatgtcaagaacattttctgatatcatatcatgagcccttctcaccccctgacactcccaaaaaggaactactgcgtctctcatatccatgcatcattgcatcagaaaaataatactgtaatttctggctctaaaatcacacaatttgtaccacaatcaagtacctcctaaataggaagctcttttatagctgttggttcgagggacgtgctgccctgttcataaaaatataccagggggaaaaaaaggcccaggccccacctctttgcccccayataattcagttcaaaattaaagtaccccataggtatatctgattgtagaacccaaatcacatatatgtgccttagtgttaagggaggcagagaaattgtttgttttattttgtttttttcatttacctttaggaagttggtatctac

SEQ ID NO: 107398 - DNA, 573 bp, Homo sapiens
ttgctgcctacaatgacttctagaagtctgtgtcttggccagaattctccattgcagacaacaaactcacctctgtctagtttaagcatttaaaaaaaaaaaaaaagtattaagaacacattggagaaatacaaacacagaacctagtgcgaatgtcaagaacattttctgatatcatatcatgagcccttctcaccccctgacactcccaaaaaggaactactgcgtctctcatatccatgcatcattgcatcagaaaaataatactgtaatttctggctctaaaatcacacaatttgtaccacaatcaagtacctcctaaataggaagctcttttatagctgttggttcgagggacgtgctgccctgttcataaaaatataccagggggaaaaaaaggcccaggccccacctctttgcccccacataattcagttcaaaattaaagtaccccataggtatatctgattgtagaacccaaatcacatatatgtgccttagtgttaagggaggcagagaaattktttgttttattttgtttttttcatttacctttaggaagttggtatctac

SEQ ID NO: 107399 - DNA, 631 bp, Homo sapiens
taatagacaaagactgacctccactgagctaggaggaattattttggactataactgtaactcctgcagatttcagactcacagagccttcacagttgtgtgagccaatttctttaaataaatcggtctctctttctttctacacacacacacacacacacacacacacacacacacacacacacacagacacagacacaccctgttctatttccatggaaaaccctaatataatatatatatatgtttattataattttcactgatataaaatttgtgtaacaacttaaagtaacaataaaatatataaaayttttcattgcaaatgtcttataaccaattgattctcacataattctttcttggtttatgtatgcatagctgatctctgattgcaatttaagcatgatttgacaaatggagttatatctccatttgctcttttcccagtaaaaatattgtcataaaatctacgtaaacttgtgaaattcactatttttttcatcaaattttgttgctaacaattgtgtcacaatattagggtataagtaagtatttgattattattcgactcagcaaagaatttattgtgaataagtatagttcaatacaaatgttagttgatatttta

SEQ ID NO: 107400 - DNA, 599 bp, Homo sapiens
cagatcaacatgacagatatagtgaaagaatttgaatattgcaagaattaccaaaatgtgacagaaacacgaagtgagcacatgctgttggaaaaatggtgccaatagaagcttgacacagcattgccacaaaccttcaaacacagtatctgtgaaacacagtaaagcaaagtgcaataaaatgaggtataactgtttctaacgcagtgctcataagtgaggctgatcctactgatctagatcactttttttgtaacaaaatcattcttttatagtcattttatgcttctggaacctttaaaaaaggccaaggtaggaaaccataawgtcatttgaaatacttcatttggcttaatttgcatgctatttgcatacccatagtatttttacatatttaaaaaataattgcatttattagctttaatgatgccagggagagacaaattgtggccagactctaatttggtggactgatttaacattttgagattacatgaaagaagagtttgttcccccacttgcacattcttttccttgaaagatgaaaccattaaaaaagtatgactgtccacgcttttctcctattcattgtaatatta

SEQ ID NO: 107401 - DNA, 476 bp, Homo sapiens
tactatttaatgcattatgaaacaatctgatagcaagtaaagagattttaaattaaggctgtctgtgtttgataaaagtagaaaggatttgaatattttctcttagaagttgggatctagggcaagcatttgaaatataaccttgaagctaatgaataacaaaggatgagtcagaagataaagacattgattaawatcacgagatctcgctgtcaagaagtcatttcattctgaaaatttaactaaaatgattaaaaataggaagataaagtgacttaaacactgcacacttctgccaataaaaagacaaacaccatgttatagaattataaagtgatattggaataaagacaaagaagaataatgtcaaaagtaatgaataatttattgttgtttcttaaaccacagaccatgtaataccctctgctattatttcacttttcctctcatgtatgctgttcactaaaactattgac

SEQ ID NO: 107402 - DNA, 574 bp, Homo sapiens
tttgaacccaaatattttgtttcctgggacttcccttttaaccaccatacaatagaaatagtgctcaagtcatttaatagttttctacagaatacaaagtaggtgttaaattgtgtcatcttttttcattggctggaatcacactttccaagataatttgcttttgtccctcattgatctttattagttatcggtttcaaacactttagatttaatattctttgtttttcagcctttgatgaaacatgaattatstaaaagtacttggatggatcctctgtggtgtatttctatttgaagtaacttcttacaaagttggtactatttttgcagtattcaaaactatttctgtattatgacattgataaatattttatgcagcatatttttacatatattttcttccttaaaaataaatatattttggaacctccctgaccactgtatatgaactctttatactccaagcctacttttatcctcgtagcctaacttatactttttattttttcacagcattgaaatatagtgaactatattacatatttataatctgattgttgtctatctccct

SEQ ID NO: 107403 - DNA, 453 bp, Homo sapiens
cttttacactgaaagaatgatttctttctaaattttcatttttcagcacttttttttagccaaagttaggattttttttttttaattaccagtgagttactatgtaaataatagtgactaattgagaggcaacaatgcaccaggcaactttgctaagtaccttttatgcattatctgatccaatgttcctggcagtcttatgatttaagtgtaattaactcccttttggacttgagaaaacaaaacctaagagaatttaaatgctataattaagaaaccaggagatakaaaagttgtttagattttgttgttttcaggcatctttgaattgagttgaaacaatttgactttctcaataagatttaatttatatgaagactcaacggtagagtcatatttaggtaggatccatttattagtatttgtcatggtatacagaaattaatatagatt

SEQ ID NO: 107404 - DNA, 589 bp, Homo sapiens
tatttttctcgttctgaaaatttggagacctttttttcttctcaaaataaggctctttccttacccattgtagtcttgctgattccatttgatggtcagaatagtgatgatcattatataaaatagtagcagctaggttttgttaagtgcttactatgggccaaccctgtgctaaatgatttacatggattatctctttaaaccagatgataattctactagataggtactgtcattatccacatggtacagtggaagastcccatctaggttcacataagttaaataaggtgaccaatattgtacaggacaaagtggactcaaattggacttgaatccatgcaggtagacactagaggcagtggttttacctactgccgtatcccatagctttgaattagtgcagtagataatcgtaatggtttttgctccattgcatttgagcacagtaactaggatgaggctgagtgggcttttgccagctctaggaccagcattaatgagcggataatggtgactggtaatgagtacaaagccaggcttagcaatgctggcttctgcttacttcgcaattacagtgcttgtttga

SEQ ID NO: 107405 - DNA, 614 bp, Homo sapiens
tctaactctttattaaatgcaataaattgtttcatttggcaccaacacttcacttctcccactatccacactctttgtcttatgactctacgttgtcccactttagggtgtgggagctatgaccttcctgctcctggatgctgggctcagctaagttttgataagtttatttgcrttaattttatttaaataacattcaaaatattatatctaatttgctttagtaatttcaagaatagatgagttataaataatagagaactaaaaaattaataattcctggaagactaacaatcagaccttaatgttagtactttctttttttctcaaactaaaaatatcaaaactgtaagaggtatatcagtcaggatccagaagataaacatcaggttaagattaccagacagtaatcttaatatcaaaaattattaactgtaagaggggatttgctagcaaagaataaacagaactgttaataatagagtaatagcaaattataggggccactacccataaggctgaattgatacataatagaagcaagagggtctggaaccagcttccacacaccataccgatccagattcattggagagggcatagccatgaacatc

SEQ ID NO: 107406 - DNA, 591 bp, Homo sapiens
taatctattgataagaaatcttgcctattttagttgtgcctgaactggaccaaattacatcagcatagatgatgtatttaggtaatgaccaatgttggacaattttaatttcattttctcttttgtgtctaggcttatttttcaattattctacctttaccaccaaaagatgctcttttgacagtggtaaaactaggcatggaagaagtagaatttaaccaaaattctgtatgggaacataatctagtccaggaaaatttatgcttagtgcaattatacagtaaaagastaaagaaatgaaacattcatatagtctgaacaaaaagtagacatcaatactgaactatagcaatacctctgctacataatcatttactaacactgttaatgctttttattatatatatttttaattttccttaaatatggttattatgggtattaaggtcttgtgctatttctgaaaataactcacacttatttttaaagcatggcctctaaccaaagagtccttataaattggaaggtggcttttacatattaatatgattaaaaacgtgttactcagaggtagatgagtgtttttttcac

SEQ ID NO: 107407 - DNA, 540 bp, Homo sapiens
aagaatgagttggaacctttgggatattatttgtatgtcaaatattatgaatttagcttttaaagagaataagagaaagctaagttgtaatgcaaacatatgcattctttattgctgtgcaaagccaggcacaggagcattctgtatccaggactgagctatgtcataaatatcatgttacctttctatttcaaagtgttcagtgcatcaatatttttattcttttcatagatttggcaactgaacaggtaaaaatctttcaattttggcagactggagaatgccgtattcttcctaatattggttaacacctatactgttaataagactatttcttaaatatttcaatgtagtaagtgctttctgargacagaagaaaacttaacaaaagtgattaaattgaagccagttgaaattgtaagctgtttataaattatatcattggaaataaacttgttcattaattttaatgctttctgagatttcatgacttactttcacaactcaggatatagattccccttacccttaataaagctt

SEQ ID NO: 107408 - DNA, 583 bp, Homo sapiens
tggcaactgaacaggtaaaaatctttcaattttggcagactggagaatgccgtattcttcctaatattggttaacacctatactgttaataagactatttcttaaatatttcaatgtagtaagtgctttctgaggacagaagaaaacttaacaaaagtgattaaattgaagccagttgaaattgtaagctgtttataaattatatcattggaaataaacttgttcattaattttaatgctttctgagatttcatgacttactttcacaactcaggatatagattccccttacccttaataaagcttcaacattataaaatttgaaactttgtttttttcttcaacatttttatttactattttctcatgtcctctaccctggacttactatagtactttctatgactagaacagatgtttgtccatttgaaaatagtttcatccttttatattctttcatcacagtgtgtcctaggatgggaagaactttcatagaaacctatttcactttcctaagtgaaatttgagataatgaagcaagtactcaactctctcttataaaawacaacagaaacaattagca

SEQ ID NO: 107409 - DNA, 527 bp, Homo sapiens
gccccacagctcactgtcattcatttccaacattmtgcttcatcagtttagcacctggtgactctcaatcccatttctgtccattcatctagtctggcacccttgtacccacatctctcagtttggaaatttcagctgtgaattctcatgtgtgagtgaacacaaacatcatcatttcttgtttttttctaacaacaatggctttattacggaagccatctggctcctggtctttggtttttctcttgtttttactaccacagtatgttctttcagcattacctcttctaattgctctccatctcctggctttcctaggaagactggcttggattcatgcttatgcttttgatgtttgaaccactatgccaaagttctagaggagcagcccagggctgcatctgcaagatggcaccttggactgttgtgcccacgttcctgaaaaaaagacatcttttttctgtggagcattctgtgggagcatatgatttttatccttttgggtacaaaccaaaagagtaagggag

SEQ ID NO: 107410 - DNA, 644 bp, Homo sapiens
cccagcctgttggtacattttaaaataatctttcttctaagtggaagaattaacattcattttactttataacactttaaatgagcaagtctaagttcataactaaggaaatactgccatataaaggacttgcttcttgcagcaatcatgaaagttgtttcaattagtagtgagcctaacttgtgatcaaaatttgaaaagtaaccatacatgctactttaaamtatttaacattgtggtggttttaaaacatacccacaaattctgaccccctcgcccccaaagatgcactctatcttccttccacgtaagtgtggcccaggcttagtgacctgcttttcaggagtagagtgtagtagaattaacaatgtatggtttgtgggagttggtcataaaagacattgcagctttctccttgctgtatctctggaagatgccagctgccatgcagtgaggacatacacacagccatatggaaataccatgtgctaagtaacagaggtctcctacaaacagccatatgagtgagtcttcatgaaaatgtatccttcagccctagttaggccttcaaatgactgcagcctgggtgatgtctccactacaacagagggagaaattctaagccagaaccacccaaacaagac

SEQ ID NO: 107411 - DNA, 644 bp, Homo sapiens
cccagcctgttggtacattttaaaataatctttcttctaagtggaagaattaacattcattttactttataacactttaaatgagcaagtctaagttcataactaaggaaatactgccatataaaggacttgcttcttgcagcaatcatgaaagttgtttcaattagtagtgagcctaacttgtgatcaaaatttgaaaagtaaccatacatgctactttaaactatttaacaytgtggtggttttaaaacatacccacaaattctgaccccctcgcccccaaagatgcactctatcttccttccacgtaagtgtggcccaggcttagtgacctgcttttcaggagtagagtgtagtagaattaacaatgtatggtttgtgggagttggtcataaaagacattgcagctttctccttgctgtatctctggaagatgccagctgccatgcagtgaggacatacacacagccatatggaaataccatgtgctaagtaacagaggtctcctacaaacagccatatgagtgagtcttcatgaaaatgtatccttcagccctagttaggccttcaaatgactgcagcctgggtgatgtctccactacaacagagggagaaattctaagccagaaccacccaaacaagac

SEQ ID NO: 107412 - DNA, 423 bp, Homo sapiens
cttcttctctgccgggaaaactcgtactctgatttttctcatatctgcctcatagtcttctcatcacaactcaaatgtcacttcagtgggaggcccgtcctcacccatcctcagttcctctctttctgatttccctatttctgtcataacacttatcacaatctgtaaatggcaggtttatctgtttgtttacttaactgttgagtgtcttcctcacttggttcaaagctccacgaaggcaggcatgttgtctgtcttaatgactgtcktgtgcccagcatcttagtgcagtgcctaacacacagtagctgctcagtcaatgttggtgggtgagtgggtgggcagttggttggttggtaggttggttggctggatggataggtatggatgtatgtatggatatgaatggatggatagatgggt

SEQ ID NO: 107413 - DNA, 540 bp, Homo sapiens
cacctaattccctcctaaaacctgacggaggtgttactaaagggcagtacacttgagaagaatgtttggttcattttaggctggtgttgtgcgtgcatgtgaagagttgatgctttcattggaaactcagggaaaatgggctacagagcagatggagtaagtcaggccgctgcccagctcctcctgcgtcagcctttcccagagatctattatatggtttgaagtgatgtawgttatcgcagcattggaggttatatgactagcgtacaaagacacaattcaaagccaagtcttagtggttttaaattatccgtgccgcatctctctccacttgcacagaaaattgcaagttgatagctagtgaaatctggttgtcagattttttttttatcgaagggacctaacttttaactctgtgatacccgtaagtatatgttatatgtaattcccacgttggaggtatcttttacattacataagtggattgttgatcctgctgcagggcaccagttcagaacagacccgcttatctggattgaa

SEQ ID NO: 107414 - DNA, 601 bp, Homo sapiens
ttggggatacagttggagaaaagattgggtacaggactggggaatttaaacacataaacaataatcaaatagatctgggagggtcagtgctattgagaaaataaaatgggatttgtgagagataggaacgtgagagaccasttcaggtggttagagagggcacctctgaagaaggggcatttgagctgagacaaggatgacagaaagaaagaggacttgagaagaatttggggaagaatgcgcggggttggggaaagggcataacataacattttaaaagacaaagttcaaatattttactttaaggaaatgtaaatccactgaatgccagataagtattatctaggcatctgtcatttccctctccattgcctttctcctcctcaccccaggatcactcgcttgaaaacaacatctcatggtcagagcggcaatcccctgaaatgggggaggtgagatgttcacattttatttcaaattccgttccccatgtataactcagaggagttatccgatcttccccttccagtcctgaagcaatcagccctcttgcttgcaagccactgaaactgatcctagctaatttaagatgaaaataagt

SEQ ID NO: 107415 - DNA, 601 bp, Homo sapiens
ttggggatacagttggagaaaagattgggtacaggactggggaatttaaacacataaacaataatcaaatagatctgggagggtcagtgctattgagaaaataaaatgggatttgtgagagataggaacgtgagagaccacttcaggtggttagagagggcacctctgaagaaggggcatttgagctgagacaaggatgacagaaagraagaggacttgagaagaatttggggaagaatgcgcggggttggggaaagggcataacataacattttaaaagacaaagttcaaatattttactttaaggaaatgtaaatccactgaatgccagataagtattatctaggcatctgtcatttccctctccattgcctttctcctcctcaccccaggatcactcgcttgaaaacaacatctcatggtcagagcggcaatcccctgaaatgggggaggtgagatgttcacattttatttcaaattccgttccccatgtataactcagaggagttatccgatcttccccttccagtcctgaagcaatcagccctcttgcttgcaagccactgaaactgatcctagctaatttaagatgaaaataagt

SEQ ID NO: 107416 - DNA, 634 bp, Homo sapiens
gcatgtcagggtgttttggacttgagtactcatggtaacataaagatataacagttatgaagatctttagtcatccatagctttccacatttttgctgtratacaaaatatttagctccattttcatagcactcattaatggtaaatctaaaaaacaatgttaaataaaattttctaaatttgctaacttgtctctaccaagtttataattttactatatatactagaaaagggctaggttgattttttttctttaaatagaatttatattttggagtagctttggttcataacaaaattgatcagaaagcacagagttcccatgtatccctaacctccctatagatatacaacattctccattatcaacatcctccaccaaagtggtacagttgttacaattgaggaacctatactgacatatcattatctcccaaagtccatagtttatgttaaggttcactcttggtgttgtatgttctatagattttgagaaatgtataatgacgtatgcaccattatggtatcacacagaataatcccagtgtcctaaaaatcctttgtgcttcacctatttatccacccctccttctgattactagcaacccctgttttttttttttaattgtctccc

SEQ ID NO: 107417 - DNA, 589 bp, Homo sapiens
aacacaaacagactaacacacctcctcatctataatatasctccatgagaggagtgttaccctcatatgcactgttctatctttagagtgtgaatagtgcctggcactagagacacacaggatgcatttgtcgaataaatgaatcagatttagtgtgagacaagcacatattcttcatagttcatggaaacatactgtttaaattattcaagggcctttaatgttttcctcctaaaaagtatgtcaaacaccaaaatcaaccagcaagaatgtgaaataggaccagttctaaaagttggtcaaagccatcatggattaaacatctagcatgtgactggcactaaatacattttatagggcaaaaaaatgaatccttagagctgtagacattctaaaagtgtaatttaagctaacagttttaaactctttacttgaacttgtaactaaagctactatcaaggcgaatgatgacttagaattttccctccatattctgtttcacacctaccgcataataaatatcgaacatgtaattatgtgtgtgaagaacaattgagtaaataaatgaacaaacagacgaatgaaccag

SEQ ID NO: 107418 - DNA, 536 bp, Homo sapiens
gcagactcagggaaattggcttcccaaaatgctggcatgcagttatttttagaggcatctgggctttctaccctcttattactttctatcctcccgttttcatttctcctacatgaaaatggggacttcctcaggctgattttggcttgagaatcaagagaactccatgttagtcttacttctggaataatggtatcagctctgagtgttaaagggcagtggtttagaaaaaattgtgcttttagatcctgtgagaccctaccttgagcagacagtgtagtgacggctctctgcccttgctaggagtcasaatggctcatagaagctgcaggagatagaatatgttgtctctctcgttatttaaacccgcaacttaatctaattgtatcctgtgtgtgcatgtgtgtggatgtacacgtgtgcttgcttcattccacctataatccccaagaaacgctgcggtgtgtgttgcagcttttggagggaagtgggcacataagacttacaaacaccttggaaatgtatgggttttgttt

SEQ ID NO: 107419 - DNA, 588 bp, Homo sapiens
aaaatgagattggattaaacggtttttcttcgtgagtagttcacattctaatgaaggagatatacatgtactaattaaaacataataataaaaacacctagctaaaatcaggggttctataaaagaagagtagaatgggaagaatggatacttgcgggcaactagcagtctctgatacagtttgcatattaatgcatgcactcaacaaatgtttattaagtgtctgctgtgcattatccctgcctaggtagtgatctgtctgtctattgtttatatagagaagtctgggatttaaacatgtaaagtatataagaatggttacctctagggatggatacactcaggtatagtacaaatgttttatagaatgcatgttttatccctgttatttaaacaattggtttaaaaatggtagcagcaaacaaattagaacattgaatctgaaaagataaactcaatcttttcagactcartgaaatagaaaaaaagaccatatagaaagtccacacagccaagaaatcgtagaccatgtgtagaatcagggctgtgaaggaaagcagctttaattgtttgcacaacaaatataga

SEQ ID NO: 107420 - DNA, 650 bp, Homo sapiens
tgagaaatatggcaatgcactattaattcaaagaagcagtattgccccttggttaaaatctcagactccagagtgagaaatgatcagaatcctggcatctctacttaactgatttttaattttgtcaaagtatgttaacttctctaaccatcttcagtttccttctctgtaaaatggagataactgttatacctatctatcatctcttgtggagaggagagcaataggaaaacttaggcagagattgttacatagcaagcagtaagagtaactacctttgtaaataggaaaaatctttcatgagtcaagagtactgggttctgatcccagctttgtcactaactacctatgcaatttggggctatcatatcagttctctgaatcttagtttccataaccagaagtsaaagaaattgattgcatgatcttgaaaattacttccaattctaaaatactattctggttagcagaagcatttaaaaactcaaactaaaacaaaaagccccctccgtttctaattggtagttaattatttcagtctttacttaaacattcctttatgtcagggaaagaccttttgtttttcaccacttctatttccccaggaacttcattgcctccagttccagagaaaggtgttaagaagaaaa

SEQ ID NO: 107421 - DNA, 643 bp, Homo sapiens
gcagtgaatcccttatccatttgttcattctcttatccatagggaatgtttgcttaatgatgaatggattcttcagtagcttttactcaacacttcacttgctgggaatatgtttgtgtcaacactgaactaggaagagcaggttggaattccactaaataaaatccacaaatatgtcactaacaaatttataatttaatgaaaaaattagccagtcttggccctgactgttgatctttaagtcaaggttttgctcgtaacgtgagaacctcctgtactgttactgaatctccctacatggaaggccacccatgcagcgctcttccgagtgtgtttggttcctcacagggcagccatttggaaggaatgggtgaccatgtaggcctgatacaaagtgctgagaacacaaagrtgaccaaggcccagtgtctgctccccaagagctcacagtctggtgggggacatagtcatgtgacctcaaagtacagtgtgacaaatgctttaatgaaggtgtgtgtgccgtgtgctggcaaagagcaaggaagggagtgccagctgtccctggaataccagccaccttctagaagagtggccacatgcacagatctggaagacctgggtgtgcttttatagcaaggccagg

SEQ ID NO: 107422 - DNA, 641 bp, Homo sapiens
tgagaattagtcccccttcattcccttatgtggaagtccacaatatcacactcttgattttaagtaagatctaatttaaaaaaactatgacatttcctgtttcacttgcatagagcaacactgcaaaggaagaagatcttttcttctaaagaggagtcatttcaaagattgtcatgagtgtgaaggaagatgagagctttgacatccagagctctccatccacaagagaggctagaggtgttcagatgaaggctagaaacccattcaaaaaatatgcttcctgcagtgggtgcagcattgccctaaatgacyccgaggtcatcttcaactttaagagtttcagaatctaggaaatatcatcaccaggcagatgaacaggctatggctaagggcctgtctcatcattgaggaagaccaaatgtgatttcaatgaagggtacatatttagtgagataaggaaatctacctcctttcagttctgcactctgttgaagctgcaagtaaataaacttatgagaaaaaatatatatacctaaactttcttatctatccaataaggataataatagagcctacttcataaagttttgtaaggattcgatgagctaattcacataaagcacttagaacagtgtttgaaa

SEQ ID NO: 107423 - DNA, 577 bp, Homo sapiens
agtcatacactgggatagctgtcagatttctcttcttggttttctgtaaattgatgaaacactcagccttgggttcactggtttaaaatgatgagctatttgcaattgtttcaagcaaggtttttggaacttttgaattgtagtcactttgtgctggcacacgtcttacagatcttcctagctttccagcctcactttggcaggaacatcaaagaaagcacactatatccataagatttgggggattcacactcctctcatccagctgctggtcacaagttccaactcatttttatcagttccattgggtggttttctaatatcctataaagcaacataggagatacaagtgaacatctgcaaagcacagtgtgtgctgagaaacagggcagtcacttaacaagcacatttttcttcccactctttctgtgcttggacaacagatctggctaaactacacagcaatgmaaattacaatgtaactttggtgggaaaaattatataaaattctagttatcaagtagtttcaaacaatgacaaaacctaccactttgaattagaaagcatgtatctagcc

SEQ ID NO: 107424 - DNA, 686 bp, Homo sapiens
ggattcacactcctctcatccagctgctggtcacaagttccaactcatttttatcagttccattgggtggttttctaatatcctataaagcaacataggagatacaagtgaacatctgcaaagcacagtgtgtgctgagaaacagggcagtcacttaacaagcacatttttcttcccactctttctgtgcttggacaacagatctggctaaactacacagcaatgcaaattacaatgtaactttggtgggaaaaattatataaaattctagttatcaagtagtttcaaacaatgacaaaacctaccactttgaattagaaagcatgtatctagccatacaaagcgctttggcttggcacataagtattccatacttctttaccaaccaatcagaacttttatcacaamgtactggtgaatccattctcatttctggcaaatgcatgagcaaaattttcttaagaaaattgcccataaattcttagatattttgtttttacaatgtgttttccaaagagatctaaatttaacaaagttgtaggtgaggaagccctgcttttgcattataatttaattaattagcatttatttttgtttactttgaatgtctttgcatgctcatatgaaaatacatacatttacaataattcagatgtagacctgtcagatatcaactcctcaggtag

SEQ ID NO: 107425 - DNA, 584 bp, Homo sapiens
ctgtgagatgggggaaaacacctactacaattccaggcacgttatttatgatatttaaaagccaattattaactgtcattttctccattttgtatgtgataagactgagtctcaatgactaagtcacggtcccccagcctgcatggtcatttggacctcaaagactttctttttcacactgccttaggattggtgcttcagcaattcaggagaggagcagatggtagaatgttcttcagatctctgcagttcttgcttatagtgctgtcaggattccttcaggcaggtggctgtaccatgcagtggctaagagccaggctctgcactctgacagcacagccatcrattctgtgatatacagtatatttgctatgtgaccatgacattattgtctccattttataggtagggaaactgaggctaaaaacaattaaacagctttgtccaagatcatttagctagcaaagtaatttgagtcaagatgcaaactttaatgcccatgttcttaccactgtgtaaccctgtctccttaattatgtgtatagttctatacttgattttacagaatcaaataagcagttatc

SEQ ID NO: 107426 - DNA, 547 bp, Homo sapiens
gagatgtgaacgatgcactgtgaatgctcaaatgtatctcagcctcagtaccctcaccatcccaaaatactgaccaacttcaggaaatgaatatgaattgtcttacctagcactcttgtaattcactaatatgggaaggcagccctgagcctcaagttccttaaccaactcttgctaactcccaacctttggggtcacagggcactggacggatcctgtgcttcagctggtcagtacctggctggatccaagccttgaaygaacagaccaacagaagctatgcttctctacacttccctgcacaccactcatgtctggaattcccatcttgaccacagcctggggggtggcctctccccagcacctatgaaaaccacacctgatgttcgaacacacatcagatgcccattggaacctgtcctcagatcttctggctaacctggctgaagtagcctctgcaactggggttttcatctcacctaagtctgtatctcagattttttcttcttcccaccagtataagttttggcaagtgcagcaagggtgc

SEQ ID NO: 107427 - DNA, 547 bp, Homo sapiens
gagatgtgaacgatgcactgtgaatgctcaaatgtatctcagcctcagtaccctcaccatcccaaaatactgaccaacttcaggaaatgaatatgaattgtcttacctagcactcttgtaattcactaatatgggaaggcagccctgagcctcaagttccttaaccaactcttgctaactcccaacctttggggtcacagggcactggacggatcctgtgcttcagctggtcagtacctggctggatccaagccttgaacgaacagaccaacagaagctatgcttctctacacttccctgcacaccactcatgtctggaattcccatcttgaccacagcctggggggtggcctctccccagcacctatgaaaaccacacctgatgttcgaacacacatcagatgcccattggawcctgtcctcagatcttctggctaacctggctgaagtagcctctgcaactggggttttcatctcacctaagtctgtatctcagattttttcttcttcccaccagtataagttttggcaagtgcagcaagggtgc

SEQ ID NO: 107428 - DNA, 457 bp, Homo sapiens
ccttccttccaccaaaactgccctttatcaaggtcaccaaagacctccacgttgctaaatctgataagcaattgtcctatcttactcacctatctgtagcattgactctccctcctccttgacacctccaggataccagtctcgtttgtcaccacctcactggctgctctccttcagtctcctttgctgactagtcctcaacttcccaatatcaaaaaactggggtttagacctgtctacaactattcttctctgtctacacccacccccttgatgatttcctccagtctcaatactttaaaaacctgacccacctaasctataaagagcctcaaatctgtacctatagcccaacttctcctctacactccaaacctatatagtcagttccctattcaacatgtctacttgtatgtctaataagcttctcaaatttagagtgtccagaacggaattc

SEQ ID NO: 107429 - DNA, 598 bp, Homo sapiens
gaagattttttattactgaggataatacaaaattggtgctatacatttagaaaacgaagcttaaaagcatttctcaaaactattttggaagaaggcagtatcaaaagagtaaatgtataggctttaatggggacaaattcatggatttaaccatattctgtgcatttgtttcaaaagcaattgtattttctataggctcatcttatgcactgaattatctaattttcttttaaaagaaagagtgttttggttaactactgttagaacaatgctgcatgagatctcaccagtatacatcagtaagcatctaattagctgatggatgtgtaggttgggcatctgttggctcatctgggctgggctcagccgggtatctatgcttctagttgcagcaactggggtggctctgcttctgtaggtctaggctaaatcagctccacatatctctcattctccctggtgyagccatcgagcggggcaagttcttctcatggtgatacaacagagcaagaaggcaaacagaaatattcaagtttaggctttggactgttggttcttttctcctgccactgaagaaaacaagccacattgtagagcc

SEQ ID NO: 107430 - DNA, 537 bp, Homo sapiens
tcgctccacttccacccacccacccctactctaatttcaagccccctttatggtggaagtgtgtgtagagatcctcttcccatcctcatggggcgtgaatggctccctgttgtgctgctrcagtttctggtctcattcctttgatgcaaccatcagtgccaagctttgaacattaacacctgtgacccaccactgcctccactgaggggtcagatgctgcccagcagctggagaggaggaggaaaaagaggtggaatgtgagaggaagcatcctttctccctcccttcctgctatggttaattttatgtgtcaagttgtctaggtcatgatacctagttgttcgtcccctccaaatcacgtgttgaaatgtaatgccctggtgggaggcgtttggatcacggggacagatccctcatgaatggctcagcaccatccccttggtgatgagtgagttctcactctggtagttcacaagagatctggttgtttaaaagagtgtgtcacctcccccagcccttgctccctctcttgccttg

SEQ ID NO: 107431 - DNA, 537 bp, Homo sapiens
tcgctccacttccacccacccacccctactctaatttcaagccccctttatggtggaagtgtgtgtagagatcctcttcccatcctcatggggcgtgaatggctccctgttgtgctgctacagtttctggtctcattcctttgatgcaaccaycagtgccaagctttgaacattaacacctgtgacccaccactgcctccactgaggggtcagatgctgcccagcagctggagaggaggaggaaaaagaggtggaatgtgagaggaagcatcctttctccctcccttcctgctatggttaattttatgtgtcaagttgtctaggtcatgatacctagttgttcgtcccctccaaatcacgtgttgaaatgtaatgccctggtgggaggcgtttggatcacggggacagatccctcatgaatggctcagcaccatccccttggtgatgagtgagttctcactctggtagttcacaagagatctggttgtttaaaagagtgtgtcacctcccccagcccttgctccctctcttgccttg

SEQ ID NO: 107432 - DNA, 441 bp, Homo sapiens
tctacccaccttccagatagaaattttaaagttctcattagtgccaaacactctcaatagcaactctatggcttattttcacatttttctgaactaaaaggattgaatgtgtgacctgaattcacattatttaagtggcatgagaatgtttgtagccaagaaactaacattaaaacagtttcagagccatggaaaaacacagagccctagcaaagacttaggcaacagtccctaatagaggtgcctcttcaactcatggcacaaacaagccttccccaggagacaaagccaactgacgatgagctcataatccaaaattgtaaaacacacagggaaacccaaagccctgagaaagyaagtgtcataaagggggaatttatagctgggaaaaattaagataattgaacaatctaaaatgaaatcttgaaaataagtacatta

SEQ ID NO: 107433 - DNA, 563 bp, Homo sapiens
atttgttgaaaatttattctatttatttaatattgattaactgatagatgattgtttgaattcgttgtatttatatcaagtttttagaaaggaaagttagaaatattacaatgaggagggtgattgtattagtcaagatagagtgggttatgagcaagaacaaataatctgaacctcttgacaacaagggtttttctcttccttttagaagtatcaattgctggttggctgtggatctgctgcccatcagcttcactctaagatctagaatgatgcaacaacctctaactcagacaaaacaggtttccagagcagggtgggaaaaaagcatatggcaaaccatgagatggctctacaagcttatgctggaagtgccacatatcacctctgttcttattttattggccaaagcaagtcaccaggacaagcctaagctcaacaggaaagaaaygtatcatcctcccacagggagggaatcacaaggagaagcatgaaaatatatggtacacagaacacaccatagtgagcacgccaacatttttcacaaaaattatgaaggaatc

SEQ ID NO: 107434 - DNA, 584 bp, Homo sapiens
tggatgcttttggaagactattgcccagaaaaaagatgtttagtttttcccaagccaaagatgtaccgaagtatagagggctgttgtgtttgcagagctaagtcctccagttcttgattcactgacagtaaacgctatgaaaaggacttccagagctctttggggctgcatgagacatctgcgatgcctgtgttctgcttgtgaaaagatggaagacgttgccagcaggatcaaaaaaccctggattcatgtggcagatgcagggctgracccagtctaaatactacactgaaaccaaagagagtgaaaactgtatctgggaacaggataaaaagcaaccagaccaataaactgcagaagaaaggtaaagattgcaatgatgatgctcacagtaccacctcaagtgcctccttgttacagcaactagtcagacgatggctcagttatggagatggcttctggttctaccagaacaccaggtgttttcctttttagatctcacagactgaaaaagaagatacatagtgggattatttataaaggccattttgggaaagtcctcatcaactcacatctgttcaagc

SEQ ID NO: 107435 - DNA, 584 bp, Homo sapiens
tggatgcttttggaagactattgcccagaaaaaagatgtttagtttttcccaagccaaagatgtaccgaagtatagagggctgttgtgtttgcagagctaagtcctccagttcttgattcactgacagtaaacgctatgaaaaggacttccagagctctttggggctgcatgagacatctgcgatgcctgtgttctgcttgtgaaaagatggaagacgttgccagcaggatcaaaaaaccctggattcatgtggcagatgcagggctggacccagtctaaatactacactgaaaccaaagagagtgaaaactgtatctgggaacaggataaaaagcaaccagaccaataaactgcagaagaaaggtaaagattgcaatgatgatgctcacagtaccacctcaagtgcctccttgttacagcaactagtcagacgatggctcagttatggagatggcttctggttctaccagaacaccaggtgttttcctttttagatctcacagactgaaaaagaagatacrtagtgggattatttataaaggccattttgggaaagtcctcatcaactcacatctgttcaagc

SEQ ID NO: 107436 - DNA, 551 bp, Homo sapiens
ccccttttctctcctgttccttgagtttccattccaggaaaagtggctttaacctctcctctagtctttccatgtgccaattaggacaacagcattttccactgtaaattttgttttatcaatatctaatttaattaatttaatttctgttctccagatttttaaaaaacttaacttatttatgttatgctgacctccctattgttccacccttattttctttttcttttcttcttcttyttttttttttagactgagttttgctcttgtcacccaggctggagtggtgcaatggcacgatctcggctcactttaacatctgcctcctgggttcaaagattctcctgcctcagcctcccaagtagctgggattacaagcatgcaccaccacacctagctaattttttatatttttagtagagatggggtttcaccgtgtgggccaggctgatatcgaactcctcagcctaccaaagtgctaggattataggcatgagccaccacacctggcccactcttaacagtcttggataaatttccttccctacatc

SEQ ID NO: 107437 - DNA, 593 bp, Homo sapiens
tgtctctggctcttgctaaaaaaagatggtagcaagctatacaagggaaccacaaaaccacttatgagaaggagcaacattttcctccaggagccaggagttagcaggaagaccctgataaaagaggaagtggggagcagctgtgagtgcatctcccatggaaatttccactggaaatttcatcatctcactagctctacctgagttgcatacataatacacacttccgattatttaaagaaaaatgtgtttaccttacatgctcagtaaatatttctggaagaaacaagcaaactgaaattccctacaagtcattattatgaaattaaaagcttttgaactagaaagatttggattccagtctcaactacttatgtaacacctgaacctagacaaggcatttaacctctccccaaccttccatgttctcatctgtgaggtgggaataatgatgcccatttcactgcatcatttgaggattaaataggataatgcagataatggacataatgyacagggtacttaacaagtactcaacagatactagttcctttcctttgacccataagatctctcatgcaatggcatatggc

SEQ ID NO: 107438 - DNA, 520 bp, Homo sapiens
ggggaagctagttccatgctagcggttctaaaatgggatactttttaaatagaaacgggggggaagatttgctgaaagagtcagaagacccaggagaagcccatgagtgtacacycttccttttctgggccccacaacacggttcacatcaccctccacccctttgctaatgttcctctctccctgaacttcttcagcacacaattcaggtctccccttggactctgggttctccccaaagcagattgtgttagtcagggttctccagagaagcagaagcagaaagatttaaagaggtaagacagaggagatttatttatggtgagagctagttcacgtgattgttgagtccgagaagtcctacaatctgccaccagcaaggtggagactcagaaaagccagtccaagaccaaaggcctgagaaccaggagggccactcgttcttgggtctgaaggcccaagaactaggagattggatgtctgagggcaggagcagatggatgtcccagttccagaagag

SEQ ID NO: 107439 - DNA, 626 bp, Homo sapiens
cctgcatttccaatttgtgctcacttagtacgttaaaaatatcaacataaataagttgatcaattattatttttaagatacttaccaaataagactctcttgcctccttcctggaaaccactagtggggcctatgagggctccacatgagtgaggccaaaaagcctgctaattaaaataaataatatttaatgcaatattttaaaagtcaaaattaatgcccccaaacgtcccatgaacaaaataccaaaattttaaattaagacaagatctgattcctgctgctcagtggaaggaacaatcttctacatccttctcggtctgaggctctcacttactcattccgattcccacttcctttcctccttgccatacctagcaatagagttcaggcacccctcaacttgcattcagcccacagaagttaggcctgtcaatatttttgtttgttttgttgctttgttttagttgctaacatttacaaaccaatagatttcaatcccagacttgcagcctctcacagaacactgctgcacctggccagcctgggcctgcactctggcaagtggcagaagcccagcagcagctgcrtgctttagctgggcccactgcagtcttgccttatct

SEQ ID NO: 107440 - DNA, 562 bp, Homo sapiens
aactgacctaaaataaaaatgaaacatttttatgtaaattaaaatatatacatatattaagcatatatatgtatattaaataacatactaaacatatattaaagtatattataagtgggagcatatatatgttaaataaaaacatattaaaagtatatttgarataaagtttgactacacaagttttatacatatggtactttaaaaaaatagtaattgtatcatttacatgacaattatcaaaggaaaaaatttacataaactctgaaacttttatgttagtacctaactgcattacaatttttaataatgaaactttaacattatattaaagtaaatttctattcttaaactgctttctaaaaatgttaaccttcatccttccatacctgtctaccccagggatgaaaatacatggtatccagagaaaaatcctgataaattaacaaaaattattcaaaagctttttgtgtttgcctttacttgggcatttggaggagctttaaaccgtgaagatgaacacagagaaaatataccattttgtcccagtcttgaacctgat

SEQ ID NO: 107441 - DNA, 530 bp, Homo sapiens
ttgatttccttcttaagtatcttttaatctgtagcaatcttcccagcatgctttttattcatatcattcatttgtaagaaatcaggccagttatcccataaaattcctcacattctgaaaaatccctccttaccctttaggatctagcctgtatatactctgggatgctgtaactgagtcacaaagacaaatgttccctcttctgtgttctggcagcactyacttcatataattatcagattattttgtagctgcttacatgttttttcctttccaatagattagaagaaccttggataaagaaattctatcttattaatctttgatattccagggcttaatgtagtgcttgacacataattggtgcttcaaaagaatttgctatgtgaacaaataaatgaacaaacaagacacaaggtagatcacactgggaaaaaaaagttggcatagaaatatgattactaggaaaggagataaaataaaatttaattaatgctttccatgcatcatgtacagggccaaatgacttt

SEQ ID NO: 107442 - DNA, 589 bp, Homo sapiens
atttgtttttcctcagaactgcctagttcttgaatgaaaaatgataaaagcaatttgatatttgtataactatataaccttagttttkaaactttttcttttgaaataattacgatctcacagaaagttgcaaacatagtacattgaatcctgggaacacttcatttggctttcccctctgcaacatcatatataactgttgtaaatatcaaacaaggaattgatattggtacaatactattaattattatggagcacatgcagttttctccagcttttacattaactaattgtgtttgtgtgtgtatgtatatccaggcaatttgataaagctctatcataaagtcacacagataaaatgatattagtgctagttcaggttttgtttcaagcagtaccgttcacattctaatatacttcttttacttcaaatatacagcaataaaatattaaaagaggccatgcagaaaggcactgatgggtttaaaagatgagttatatatgcaatcaaaaacaggaaagaaacacaaaaacgataaatgaaaatgaagcctcagacctgctggaccctggtctgtgagccagcagt

SEQ ID NO: 107443 - DNA, 589 bp, Homo sapiens
atttgtttttcctcagaactgcctagttcttgaatgaaaaatgataaaagcaatttgatatttgtataactatataaccttagttttgaaactttttcttttgaaataattacgatctcacagaaagttgcaaacatagtacattgaatcctgggaacacttcatttggctttcccctctgcaacatcatatataactgttgtaaatatcaaacaaggaattgayattggtacaatactattaattattatggagcacatgcagttttctccagcttttacattaactaattgtgtttgtgtgtgtatgtatatccaggcaatttgataaagctctatcataaagtcacacagataaaatgatattagtgctagttcaggttttgtttcaagcagtaccgttcacattctaatatacttcttttacttcaaatatacagcaataaaatattaaaagaggccatgcagaaaggcactgatgggtttaaaagatgagttatatatgcaatcaaaaacaggaaagaaacacaaaaacgataaatgaaaatgaagcctcagacctgctggaccctggtctgtgagccagcagt

SEQ ID NO: 107444 - DNA, 589 bp, Homo sapiens
atttgtttttcctcagaactgcctagttcttgaatgaaaaatgataaaagcaatttgatatttgtataactatataaccttagttttgaaactttttcttttgaaataattacgatctcacagaaagttgcaaacatagtacattgaatcctgggaacacttcatttggctttcccctctgcaacatcatatataactgttgtaaatatcaaacaaggaattgatattggtacaatactattaattattatggagcacatgcagttttctccagcttttacattaactaattgtgtttgtgtgtgtatgtatatccaggcaatttgataaagctctatcataaagtcacacagataaaatgatattagtgctagttcaggttttgtttcaagcagtaccgttcacattctaatatacttcttttacttcaaatatacagcaataaaatattaaaagaggccatgcagaaaggcactgatgggtttaaaagatgagttatatatgcaatcaaaamcaggaaagaaacacaaaaacgataaatgaaaatgaagcctcagacctgctggaccctggtctgtgagccagcagt

SEQ ID NO: 107445 - DNA, 548 bp, Homo sapiens
aagaactttaaactgtgcacatttaattggtcatcaagatggctgactagaggcatgcagcactcacctcctccacaaaaaragatcaaaacaacaaatagataaccacacatcaaatagtatgtctaagggagaacactggaattcagcaaataagtgacaaagaccctctgaggcacagaaactcagcacagagagggaagcaaagcacctggctgggagaatggcttggagccaaaagaggctccccattgtgaggagaaggtaatcaggagatccccagaagtctatattcctaccatggatgcctgcaaccctacctacagaaaagccccacaactcttgcaggtcctgagcccagactagggagctgcctggaatccatgtgtctacatctttccagggagaaaattctgtgggatttctgacacagttgctacagcatggtgccattttgagagtggagccaccaccagaatgcatcctgccgtggggctcattagtccctgcatctccacataattgaagtcctgctgacactcccccat

SEQ ID NO: 107446 - DNA, 548 bp, Homo sapiens
aagaactttaaactgtgcacatttaattggtcatcaagatggctgactagaggcatgcagcactcacctcctccacaaaaaaagatcaaaacaacaaatagataaccacacatcaaatagtatgtctaagggagaacactggaattcagcaaataagtgacaaagaccctctgaggcacagaaactcagcacagagagggaagcaaagcacctggctgggagaatggcttggagccaaaagaggctccccattgtgaggagaaggtaatcaggagatccccagaagtctatattcctaccatggatgcctgcaaccctacctacagaaaagccccacaactcttgcaggtcctgagcccagactagggagctgcctggaatccatgtgtctacatctttccagggagaaaattctgtggratttctgacacagttgctacagcatggtgccattttgagagtggagccaccaccagaatgcatcctgccgtggggctcattagtccctgcatctccacataattgaagtcctgctgacactcccccat

SEQ ID NO: 107447 - DNA, 595 bp, Homo sapiens
aggtggaggaaggaaaactgtgctgcaaagtaatgacagcatgtgttgtgtgctctgtaatttactttaaataatgttctgtgtatgcatactgggtttgctgcttatcctggggaggtgggggaggacgggggtggattggtcagttgtgctcagctcacacttagagtatgcgaatcagaagggtggttcacagctgaaggactctaaacaaaagcccacatgtcagagacagcttctaaaagcttttagcatcyactccctgatcaacaccaagaagtgtttacttagtatattgagtatcagaaacgatgttatcttggtcagatgaatggatctcaagttaaatgaattgactggatgtattcttcaggcattcctagttgctttgccttcacagagcatctgaatgcagtgagcttctggccctatgctttgttcagataattgaggattccattgcctgactccagttggaagtatggctgcatcttctattagaatattgtcagaagcagctcttcatattgccgaaaagaacagacagctgggactttagcaagcttgcagaataggttttgtaactgcttttatg

SEQ ID NO: 107448 - DNA, 574 bp, Homo sapiens
cctggtatctttctttgaagtactattttgcagaatcttcttgagaataatgtgaggtaggctttattatttctatatatgaagaaactgggacataaagaaaataagtattttgttcaaggtcctgtggccagtgttggggagagggcattaatcttggttctgatgtatctcaacactgctgtacttactgaggttactttgttagtacatagaataaaaggtaatatacaaataagtatttttttttgagacagagccttgctctgttgcccaggctggagtgcagtggcatgattatagtcactccagccttgaactcctgggctcaagcaatcctcccaccttaccttcctaaatagctagaactacaagcgtgtgccaccatacctggctagtattttcattttttgtagatacaaggtctcaatatgttccccaggcttgaaataagtgcattttwaaatacatgcgttggaaagatattagagttataaagagtcaatttgcaaatttcgtctgcttgacaatgtcatacaggtcaaaatcctcaaatcatgagatttatgtgtcc

SEQ ID NO: 107449 - DNA, 596 bp, Homo sapiens
tggtagaagcaaagatttcttcaaaagggataaacttaaagagagttaagagagataaaagccaactaccatcttaaaagaaggtatttactatctatttttgagaaaggactcatagacagaatatagaaaaatctcctataaatgcaaaagataaagtgtcaatccggtagaaaaatggacagaaaactcaaacagcrttttacaaattacgatatccaaaagccaaaaaacatataaaatgacgctaaaatttatcagtcataagggaaatgtgaattaaaaccacatacataacatattgactaaaatgaaaaagacaggaaacaccaaattagtaagaacgagtactaaaagaatgagaacaacaacaacaaaaaaaaacaaagagaactaaaagaacgagtacctaaaaaaaatagtttccctgctagtgtgagtataaattggtatcaacattttggaagacagattattatctaataaacctgaaaatataccttccttattatctattaattcactctttcataatcaccttaaaaatgtgaatattaatatgcatctttaaatagtgggaacacactaaaacacat

SEQ ID NO: 107450 - DNA, 585 bp, Homo sapiens
gattcacacagcatataatgggaggttggcatttgcactgaccaggtaaaaatacttatagaaaaaccatagaactgagattacgratgttttatgcagtgattagccgttttatgcagtgggtaagagctaatcttctgggagtagactgcctgtgttcaaattccagctcccctgctccctagttgagtaacttgactggttacttacacatttcagttccctaacctgtaaaatggagaaaatactactgtgtacctcatgaagattccgtgagaacaaaataagaaaagctcatatttaaaaaaaaagtgatattttaaaataacagggattcatatattgatggttttctgtgtaccaggcaatttacaaaaattatttttaattctcgcaataattctttaaatttatattgtgatcatattttacatatctaaagaaagttcaattcaaataagttaaaatatttgcctgagatcacacagctaaatgatgtcacagtcaatactcaaatctagatttcagattcaaaagttgatgctctttcttctttgctaccaaggatgaatatcagtgacatca

SEQ ID NO: 107451 - DNA, 628 bp, Homo sapiens
cattgctatggatcaaatttgtccccacccccaaattcatatgttaaagtcctagctcactgtgactgtatttgcagatagggcttttaggaagttaattaggaggttaaataaagtcataagggagaagtcctaacctgatggggtggtagccttagaaggagagagagaagtctagctatgtttacacatgtgcacatgcgcgcatgctcatgygcgcgtacccccgccccccccccaacacacacacacacacacacacacacaccagggaaacgctgggtgagcacacagtgagaaagtgaatgtctggaagccaggaatagagtgttcaccagaccctgaccatgctggcaccctgatcttggacttccagcctctggcactgtgagaaaataaatttctgttctttaagccacccagtctatggcattttgttatggtagcctgaacaggctaagacattcatatatgttaatattattattcatgcttctatttatatttttatacttcatatgaggcattcagaaagaaaagctggcataaacatgagacagaacccactcttgtcagaaaaatcctctgtggaagcaaaactggatttttgagactcgggaagataaaa

SEQ ID NO: 107452 - DNA, 511 bp, Homo sapiens
ttagcgtgtcttaaattctagaaaaataaatgcttttatttttcaaatttcacaaaatatttttaaacaatagttaaatgctctgggggttgttgtacatgaggtttgacccattttctcattaaacatagagcctcaagaataatggattattttcctctatatcctccctcaaaaaaaaaaaaaaaactagaccatactttaaaaatcaataaaatagtatctttcaatcattatgaagtcctggaaaatatcatgacatccrgtgggttgggaaggaatgtttctttgctcctcttctggttttcctgggaaagaacaacaccccagggcaggaagtggtgtgtatttgattggttggtttaaaggccagaaacttgcccagcctcttcctgtttgtgatgggccaatcaggggaggccattgctctggtgtgatatcagcctagagtgagctgggtagccaaggccctgtttctgtgtggggaagcctgaggtggcccagcattgcc

SEQ ID NO: 107453 - DNA, 622 bp, Homo sapiens
atataaaaagcaaaggagggtttgcttctttgaagaaagaatcagcgggatagttgtatggaactggaaatgaaaagttatccatgtcagtctcctgtttcaatggatggagatgtcctttaaactaggaagaaccctcccataagtggggatacccaggaagtacagagggggctgtatctgcaatttgttgatctattcacccctgtaagacatctggattatttccagtttggggctattatgaacaatgctgctgtgaacatttgtgtgaacgtaagtcctcatttctctgagataaatgcccacaaatgcaattgctgggtcttctggtaactgcaagttaagtttgataagaaattgccaaaacgttttccagtatggccgtaggtaccattttatatttccatcagcaatgtatgagtgatccagtttctccacatctttgccagaatttggtggtgtcactattttttattttagccattttgacaagtgtgtggtgatatcttattgtgagttcaacttsgattttcatgctggcttaatgacattgaacacctttttacgtgtttacttaccatctatatatcctttttggtgaaatatctgttcatgtcct

SEQ ID NO: 107454 - DNA, 643 bp, Homo sapiens
tgtgaatctaagccatgcactgacccttgaataaccacatatgttttgcttgaaaaatgaaggaaaaatagactttaatcgtgttagagcattttgggatctttcttccacagcaacttagcctacaccctaaaagagcaaatcacctgtctttatctccatttttccagtagaagattaaagataattagtttacatgtagggctgttacagttatcaaaaaagaatacataagaaaaatgtttaatatagaatctgatatattatgttgtgtttctgatttaaaaatattcatattatcattagattatttgacactgtatataaaatattctgcataagagctttcttttctgtaggctttttagtctttcacaggaaactccccaaaaaagaataaatgaaattggcaattatatgatatgtaatgtaatttgtgtgaatttttaagattgtttagtccatttcttacaaatggttcttgaaaaaaagtttatgattgaaatcagcttawaaaattttataaacactttaccctcattcttttgaaatttgcagttctcattatcatattaaggtttagaaaatttctacaaaaagaaatctgctttactatttgatacattatgtgctaaacacaatg

SEQ ID NO: 107455 - DNA, 561 bp, Homo sapiens
aattcaacagtatactgtttatgcatattgctattttgacctaataattttctggattttaactacctctagttttaaaacttgggtatctgtctgtttggatggcttttatcttgtgctttcctactccatcaaaataggaattagagttcttcaaaaataatagcttctcactacctgcttcgtgataggtacactgattaagatttatgctttgaggaaaatgggatgtttggaattttggagaaaaatggctatagaaaaatacttatgagatttttcttagaaaatcataatatttgaaatccaaatgataacacgattgtcatatattaccagctctacatatctccctaacaagaaaattatccgtgtttatctcaaataggtatatgtaaaatcctgtacctgaaaactgtctcaagtatctatttcctgaggctactccagtatgaaccayggtttcattcaggatccagacaggttcaatgatagaaactaccatttggcagagatgtagtcagttaagacagcagcaagaacactggaaaggcattgtca

SEQ ID NO: 107456 - DNA, 587 bp, Homo sapiens
tgtgtacagaacagtataaataagaaaataaatgtgtttatagtttctaacagaaaacactcatattttggtcatatacctttcttatgtttttctcatatgcatgtaaattcatatttttatgttatatataaaattatattttatatttggtaaaatgccttttaattctatatcacaaatatttttaccatattattaaatattatctatgacataattttatggccacatacakcccaattgtataaattatgtcctttcatattaaacttacaacttattgttggtcatgtagttttttaagcccccccacaagcacactgtttaaaaatgcctctaaaattttaaagtcacataaaaaattttaaatgaaaaaattttaaactctttaaaaatttactctaagaatattagttaaatatatttaaagatggactggacgttcaatgaacaaagttggacattattggacttccatctttaaatgtattttaagcagttttctttgattaaaattctggaggtggcattacagaaccaatgaacatgaatatgttgaattttgtttaaattagaggcaaatt

SEQ ID NO: 107457 - DNA, 436 bp, Homo sapiens
atcagtattttttatatgctcctcaggtgattctaatctataaccagggtgcaacccactgtagacaaactccaggagggcaagaccatgtctttgttaattttatgactttttcttaagggcccaataaactctcttggcaaaataattgggtctttgtcagacccagaatggcatttcctatgctcctaggatatttggtttgatattacatgaattactagtggttaactgagttttgggatttcaattctgacatgccttcctcagttacgttctaaggaaaatgctgttatggraacataaaccccagtgaccatgaataaagcatgctgaccttgagttagagctgacagtggccttttctttatgaaaataatagcttttgtcactcaccttatgaggtgaaatcaaaaaaataaataaccaagaattc

SEQ ID NO: 107458 - DNA, 621 bp, Homo sapiens
gggagtttggctataaacaaaactgtaatttcaaaattgttttcccctcaaatttttaagacactagtttgttcatgagcttccagtgttggattaaaaagtccagagccaaccaggctcagtggctaatgcttttaatcccagaactttgggaggctgaggtggggggatcacttgaggtcaggagttcaagaccagcctggccaacatggtgaaacccggtctcaactaaaaatacaagaaaaaaaaaatagccaggtgtggtggcacatgcctgtagtctcagctactcagtaggctgaggcaggagaactgctagaacctgggaggggggaggatgcagtaagtcaagatctcaccactgcactccagcctgggttacagagcaaaactctgtctcagaaaacaaacaaataaaaaataaataaataatgcaatttaaaaaagaagtccaatgctattctgatttcaaactacctgtagaacatctccttcctggcccaagttaatagaatcctctttttgtatccactgttctgaaatgtcctaacratgtagctttttggagtaattttcattcatttttctggatgcttgtttgtgaggagaagggtcttttat

SEQ ID NO: 107459 - DNA, 373 bp, Homo sapiens
ctcaactcttcttttaattctagagacttttgaaatttctacttgaacttattctacgatcttgtggctcaaaatgtgttactaaaaccaacattgtgagcacctaggaagttactggaaatgcagaatgtcaagctctaccccaaaactgagtcagaatctccattttaacaagaactccaggaaattcacatgcacatacacataataggtttaagaarcattaaagtaaaacatctcaatcttattatctcctaagcagactatttattcttgtttctctttaatgttctaagagactcttggtcaaatttcccttctatcagtctgaagccctttcatagcttactgcttatttaggccttatgtaaga

SEQ ID NO: 107460 - DNA, 331 bp, Homo sapiens
catgggtccaggctggttgagccaaggtgctggggcttcttatgccctccccaagatgaacctgagggaggccttgccacaggtcagtcagtaagctctggaagaggctgagacagagggtggtgttgggagatggagcaatggcatccggagctggaattttgtaagttatgcagtgatgtragcctcaatggattctcttcagccaggaattagagcaagcagttgatgatctgaaacaattttggataatgtgtaaactgggtctggtatatcctgtgaagaagcctgagaatgattggtaagataagtgggagaaaacaaataatgc

SEQ ID NO: 107461 - DNA, 601 bp, Homo sapiens
agatgactttggaaagtgttctactcatttgctggatgggtcaggaactaacagcagggtaaccaggtagtttagttcaagaatccaggtaagatatgatcagggcagtccaggtaagggaagcaacgacagaagattggggagaaaaagcctcattctagagttgtaacatagaggagkttctactggaattgagggagacgtcctctctctttctttgtctggtcaagattctgaatccactttgatatgatccattattttggctcccacatatgactgagaagatgtggtatttgtcttctatgaatggcttatttcacttaacacactgatctctagttctatctatgttgctacaaatcataagatttcagtcttcttttgtggctgaatgacatcctattgtatgtatatagcatctttttaaaagtctattcatccattgatggacagaagttgattccatatcttggctattgtgaatagtgctgcaattaccagaggctaggaagggtagtggggagaatgaatgaggagaatttggttaatggggaccaaaacaccactagatagaaggaataaattccaggagttgata

SEQ ID NO: 107462 - DNA, 619 bp, Homo sapiens
actatattggtttcaaatttctctgggggccaaggctaccttcatttcaccttttcacaaattcaaatgtgaaaaaaaatgattgttactgacttaataccaataggaaaaagaagtggaaagaaattacactaataaaaagtggatttccctttaatcattttcttatgaagtactgaaatgtaaattcctggtgcaggatgaaagtgattataaccctcaggattgcacaggaagaagaaatatatagacaacatttttttctccaagaaataaaagctcatcaccatactgtcatgaacaccaagtgcattcaagcactgagtgatgcaaaggtgctgaatggtcccaagagaaggtgmatcagccttccatgacagtgcccatttgtacacacatagttggccccagcagggggtgtgcattcagggatcttccacagcagaaatatagacggtctctgggaaaatcagttcttcataaactttataacctcattccaaaatccaggtgtcagtttacagctttccagattgacattttaaatcaagaatatgtcacatgtgtacaataactggcctaatcttttctgtaaattgttgcctgtggttttcaaaaa

SEQ ID NO: 107463 - DNA, 568 bp, Homo sapiens
aaccaaaattaatataatgctcttggcatgcagcattaattgtatgtaggaaataactacacccactgtctcagtatctcagytaatgatgagcacagctcactacacaatcactgcttctgatgtcatatgctgccttgaagcaggacagagtatcttctcaaactaatacttaaaatgacttgatgcccttaatatttcaaatacacagaggaagtgttttcttcattaattctataattacaggacaaaaataaatgatgaattatatctacaaactgaaacatcagatggcccatttaaaaatgattctgtcaagccattgcacattgttctggaaacagggtcaaatcaagtccccagacaactcaaccaaattgaatttctgtggctaaaataagtgtggggatatagtgcttgttctgaaaggacttctttatgccattttttttccagcagcatactttcttaaggggattttgcaggaagtgtatttacccttccttgaaatactttttgaatcagtattgactctaagctaaatagtgcagttgtgcactgaaatggt

SEQ ID NO: 107464 - DNA, 546 bp, Homo sapiens
ggcatgaggaattataggctgaggcttcagattgaacttaattagtgtcttgcacacatatggccctggaagcatctgtgcatctgatttgtgcttcctctggttgtggttgtcactgcaactttgatattgtaccagctacctwagcataggagtcaggatccctgactcaggaaggataagtttgagaatgcaaggtagagagaattctgagaagattaaatcaaatatatgaagaaatatgtgaaaaatgattggtcagattagtgtcaaagctgagagaggtggaaagagagaaaggttttgttttatctgcaggaagccactaacagaatgacagtttctgcagaaacccttgtaacaagataccctttggtatgaagttcctaacaagccagtgtctgccgcacagcagggctgcctggaatgtctgctgcggcacagaactgcccaaggaagagagtcaggaaacaggagagattccatccttccatgtcccatctgaggactaatagaaaatagtgagaaagttactagagtgaagat

SEQ ID NO: 107465 - DNA, 596 bp, Homo sapiens
aaaaatgattggtcagattagtgtcaaagctgagagaggtggaaagagagaaaggttttgttttatctgcaggaagccactaacagaatgacagtttctgcagaaacccttgtaacaagataccctttggtatgaagttcctaacaagccagtgtctgccrcacagcagggctgcctggaatgtctgctgcggcacagaactgcccaaggaagagagtcaggaaacaggagagattccatccttccatgtcccatctgaggactaatagaaaatagtgagaaagttactagagtgaagattgtccagaagatgaggcagaactggctggtcccagtagaggccactgaatggaggcaacaaggtgacagaattaaaaaagaggaagaatccgagtgtctgataacaagaatgagctagaatcgcctttgccctttggaagccctcagcattgattcacttttgcctgctttctgattcaggaataacagtaggacaggaaaaatacagtacacagctgtgtgtgtagtaattgtcggtgtgcttgcatgttaaaatcagtatattgaaacatccagctgtctatgctcacttaaag

SEQ ID NO: 107466 - DNA, 572 bp, Homo sapiens
gtgtaaaatacaattcatgaaagtggaaagatgcagaaatcagaatggaaatgagaaccagcaacctgagagtmccacagaaatattcagtcacatctgtgtaaccaggggctgtacagtcttaggtggaggtattccagatttttgtttcttagtttctgtcagatgtaaaatgtgtatgtggaactattgtgcactttctttgtttggtagagacagtctctctgtgttgcccaggctagtctcaaattcctggcctcaagtgatcctcccacctcagcctctcaaagtgctggtactacaggtgtgagccaccatccccagcctactgtgcattttctattatttgaagcaaaattggggccacaaggaaggtcatctgtagtatgccaataacataaacctctgacatttcagtaaaatattgcctttgcctctgcatagtatgccagcatgttctgcagggtgggcagccgcaagcagtggttagaacaggggctctagaaccagggcctgaacctgaggctgtgctctgctctccttaatagtgaaatcagaggcaagttgcttga

SEQ ID NO: 107467 - DNA, 572 bp, Homo sapiens
gtgtaaaatacaattcatgaaagtggaaagatgcagaaatcagaatggaaatgagaaccagcaacctgagagtaccacagaaatattcagtcacatctgtgtaaccaggggctgtacagtcttaggtggaggtattccagatttttgtttcttagtttctgtcagatgtaaaatgtgtatgtggaactattgtgcactttctttgtttggtagagacagtctckctgtgttgcccaggctagtctcaaattcctggcctcaagtgatcctcccacctcagcctctcaaagtgctggtactacaggtgtgagccaccatccccagcctactgtgcattttctattatttgaagcaaaattggggccacaaggaaggtcatctgtagtatgccaataacataaacctctgacatttcagtaaaatattgcctttgcctctgcatagtatgccagcatgttctgcagggtgggcagccgcaagcagtggttagaacaggggctctagaaccagggcctgaacctgaggctgtgctctgctctccttaatagtgaaatcagaggcaagttgcttga

SEQ ID NO: 107468 - DNA, 572 bp, Homo sapiens
gtgtaaaatacaattcatgaaagtggaaagatgcagaaatcagaatggaaatgagaaccagcaacctgagagtaccacagaaatattcagtcacatctgtgtaaccaggggctgtacagtcttaggtggaggtattccagatttttgtttcttagtttctgtcagatgtaaaatgtgtatgtggaactattgtgcactttctttgtttggtagagacagtctctctgtgttgcccaggctagtctcaaattcctggcctcaagtgatcctcccacctcagcctctcaaagtgctggtactacaggtgtgagccaccatccccagcctactgtgcattttctattatttgaagcaaaattggggccacaargaaggtcatctgtagtatgccaataacataaacctctgacatttcagtaaaatattgcctttgcctctgcatagtatgccagcatgttctgcagggtgggcagccgcaagcagtggttagaacaggggctctagaaccagggcctgaacctgaggctgtgctctgctctccttaatagtgaaatcagaggcaagttgcttga

SEQ ID NO: 107469 - DNA, 572 bp, Homo sapiens
gtgtaaaatacaattcatgaaagtggaaagatgcagaaatcagaatggaaatgagaaccagcaacctgagagtaccacagaaatattcagtcacatctgtgtaaccaggggctgtacagtcttaggtggaggtattccagatttttgtttcttagtttctgtcagatgtaaaatgtgtatgtggaactattgtgcactttctttgtttggtagagacagtctctctgtgttgcccaggctagtctcaaattcctggcctcaagtgatcctcccacctcagcctctcaaagtgctggtactacaggtgtgagccaccatccccagcctactgtgcattttctattatttgaagcaaaattggggccacaaggaaggtcatctgtagtatgccaataacataaacctctgacatttcagtaaaatattgcctttgcctctgcatagtatgccagcatgttctgcagggtgggcagccrcaagcagtggttagaacaggggctctagaaccagggcctgaacctgaggctgtgctctgctctccttaatagtgaaatcagaggcaagttgcttga

SEQ ID NO: 107470 - DNA, 680 bp, Homo sapiens
gtggtggtggtggagatctctttccctttttccatcagggagaattattatttttttcctatgttccatttgtatttactgttacactagttaactaagtatctagccaaaaggaactataatttgakaaggtggttcccatgacttctcctctttcttttctttcagacttctgcttcctcagaaatgccctcattttgtcccaaggtactcagatctgtcactctacttgaatccaatcagcaaaacaacagctctgcagttagctgacttgcttctaacctccatcatctaaagtagaatattaacctcttatatcgttattcaaaattgtcacctggggtttcagctcctattctaacaggtcaatagaagcatttcctgaagagaaacaggagtgtgtgtgttttgggagtatggaagatatttctactaagaaaaggagtttttctccacagtgttaacattagaaatctagcacctatcatttcacaaattgaatacctgaggcttagggaggtgaagtgacttccttgaaggagacaagtagcaaatgtggaggttcatgtctgcagcctatagaacccaggaaccctctttccactatgccagactaacctgggaacccaattagctgccatcaaaagtataagaattctttttatttgcctattatctct

SEQ ID NO: 107471 - DNA, 630 bp, Homo sapiens
tcagcaaaacaacagctctgcagttagctgacttgcttctaacctccatcatctaaagtagaatattaacctcttatatcgttattcaaaattgtcacctggggtttcagctcctattctaacaggtcaatagaagcatttcctgaagagaaacaggagtgtgtgtgttttgggagtayggaagatatttctactaagaaaaggagtttttctccacagtgttaacattagaaatctagcacctatcatttcacaaattgaatacctgaggcttagggaggtgaagtgacttccttgaaggagacaagtagcaaatgtggaggttcatgtctgcagcctatagaacccaggaaccctctttccactatgccagactaacctgggaacccaattagctgccatcaaaagtataagaattctttttatttgcctattatctctcatgataagtgaatcaatcacttactgagcacaattcctacaaagtgcaaaatgaccaaagtccccagagtagcttcctctacatcgtgagctgcaactccagtaaaagaggctggcaactctcaaagacaaaatgcactggactgtggagcatatgatttcattaggactatttgtaatagagagaac

SEQ ID NO: 107472 - DNA, 637 bp, Homo sapiens
tcagcaaaacaacagctctgcagttagctgacttgcttctaacctccatcatctaaagtagaatattaacctcttatatcgttattcaaaattgtcacctggggtttcagctcctattctaacaggtcaatagaagcatttcctgaagagaaacaggagtgtgtgtgttttgggagtatggaagatatttctactaagaaaaggagtttttctccacagtgttaacattagaaatctagcacctatcatttcacaaattgaatacctgaggcttagggaggtgaagtgacttccttgaaggaracaagtagcaaatgtggaggttcatgtctgcagcctatagaacccaggaaccctctttccactatgccagactaacctgggaacccaattagctgccatcaaaagtataagaattctttttatttgcctattatctctcatgataagtgaatcaatcacttactgagcacaattcctacaaagtgcaaaatgaccaaagtccccagagtagcttcctctacatcgtgagctgcaactccagtaaaagaggctggcaactctcaaagacaaaatgcactggactgtggagcatatgatttcattaggactatttgtaatagagagaacatggcca

SEQ ID NO: 107473 - DNA, 630 bp, Homo sapiens
tcagcaaaacaacagctctgcagttagctgacttgcttctaacctccatcatctaaagtagaatattaacctcttatatcgttattcaaaattgtcacctggggtttcagctcctattctaacaggtcaatagaagcatttcctgaagagaaacaggagtgtgtgtgttttgggagtatggaagatatttctactaagaaaaggagtttttctccacagtgttaacattagaaatctagcacctatcatttcacaaattgaatacctgaggcttagggaggtgaagtgacttccttgaaggagacaagtagcaaatgtggaggttcatgtctgcagcctatagaacccaggaaccctctttccactatgccagactaacctgggaacccaattagctgccatcaaaagtataagaattctttttatttgcctattatctctcatgataagtgaatcaatyacttactgagcacaattcctacaaagtgcaaaatgaccaaagtccccagagtagcttcctctacatcgtgagctgcaactccagtaaaagaggctggcaactctcaaagacaaaatgcactggactgtggagcatatgatttcattaggactatttgtaatagagagaac

SEQ ID NO: 107474 - DNA, 518 bp, Homo sapiens
attctgaactcctttgggaaatgcttagtcatagcttttaattcagctcgtgttcaaggtttaaattctactgctgcttgcgtatttgggtcattgaagagatggaactttagaggtaaatgacattccgggatcttaggagagtcactgggagaaggtagggggtctggaagaagagggaggagtcaatgaggtgtgaaaggaggatsgggggatgaggaagagttgcagagctgaagtcaactggaggagaagccgggggaagatttgctgggcaaatgagttagtttgttgttaagtttgtcatactgttcattagctctggccaaaaaatattttagcggagtaatgtctgaatcagaatttcatttgaaaacttgtgtaccaatcaaaaactgctgcccattgcccctgagaaatattctctcttttctaaggtgtttttcaaatgaacaattttgttcaagtccaatgttctccagattagccactgaaggcctaaattatccttggtatag

SEQ ID NO: 107475 - DNA, 518 bp, Homo sapiens
attctgaactcctttgggaaatgcttagtcatagcttttaattcagctcgtgttcaaggtttaaattctactgctgcttgcgtatttgggtcattgaagagatggaactttagaggtaaatgacattccgggatcttaggagagtcactgggagaaggtagggggtctggaagaagagggaggagtcaatgaggtgtgaaaggaggatcggggratgaggaagagttgcagagctgaagtcaactggaggagaagccgggggaagatttgctgggcaaatgagttagtttgttgttaagtttgtcatactgttcattagctctggccaaaaaatattttagcggagtaatgtctgaatcagaatttcatttgaaaacttgtgtaccaatcaaaaactgctgcccattgcccctgagaaatattctctcttttctaaggtgtttttcaaatgaacaattttgttcaagtccaatgttctccagattagccactgaaggcctaaattatccttggtatag

SEQ ID NO: 107476 - DNA, 518 bp, Homo sapiens
attctgaactcctttgggaaatgcttagtcatagcttttaattcagctcgtgttcaaggtttaaattctactgctgcttgcgtatttgggtcattgaagagatggaactttagaggtaaatgacattccgggatcttaggagagtcactgggagaaggtagggggtctggaagaagagggaggagtcaatgaggtgtgaaaggaggatcgggggatgaggaagagttgcagagctgaagtcaactggaggagaagccgggggaagatttgctgggcaaatgagttagtttgttgttaagtttgtcatactgttcattagctctggccaaaaaatattttarcggagtaatgtctgaatcagaatttcatttgaaaacttgtgtaccaatcaaaaactgctgcccattgcccctgagaaatattctctcttttctaaggtgtttttcaaatgaacaattttgttcaagtccaatgttctccagattagccactgaaggcctaaattatccttggtatag

SEQ ID NO: 107477 - DNA, 630 bp, Homo sapiens
tgacaaaaccaacatcatttaaaaaaattcaacatggcaaaaactttatgagacttataccatmgaccaaatttgtaactttagccttgatacattactgcttgtaaatagaaatgttcttactatgaagtgatgtgctcagatacacccaaaatttattaaaggcatgtcaacagccaaattctgtggtacaaggtttttcatacattattttacataacctttgaggaattccaattttatattcccattttcagaagagttggttagttactgaattcaacaaatgagtgtgagcaggggcctggagtacttaaaaagaataaacaaaatgcctttaaatcagaaagacaaaattgctagtaatttcagttaattgcactttactccatgtagctacaattgtagatatctagaaaaaatatctatgctaaaagtctgccatctggaaaagtcaaaagaatgatgagctggtattaaatcaaagtaaccctggcatatggagtatctctgccatgttaagagcagaccttggtatgagactgactctgggctttacatatgaatttggaattgccaatatctccacttgaactatgtgagacaataaaagtgctcccttatacactt

SEQ ID NO: 107478 - DNA, 642 bp, Homo sapiens
gttttatgaaagcttcattatgtagaaatgattgattacctcattggccattggtaatcaactaaattttcagcccctttcctcttcctggggaataaggggttggggctaaaagttcatatcctctaattacatggctrgttttcatggcaatcagctcctattctaaggctatccaggagcctaccaagagtcacctcattacagcaagagatgctcctataatccaggatattccggggatgtaggagctctgtatcagatactcctatcactcaggaaattaaaaagttcttcggagctctgtgtcaagaaccagggtcaaagaccaaatataagaacaaaagatactcctagcatccctatctgcaagggttttagaagctctgtctcaggaatcagggacagagaccaaatacataatttttattatatcacaatatcacatggcataattcacttttatattttgtatatagttcaataagttttaccaaatgcatgaagtaatgtagctaccactacaatcagtaacacagaatagtctcatcaccacaaaacaactctctctggaatcccctttgtaagcactctctactgatatgtaacctctagaaaccactgatctgttttctgctccta

SEQ ID NO: 107479 - DNA, 512 bp, Homo sapiens
atttaaaagtagcattgtcataggtactgatggctatgtggtgtcatgtgattcttggcgcaggtccttcatgacattgtaactattgttttaattgcaccatgcactacaaataaaatgttgtatgaattaaatggagctaccttaactaaaataggtggtaattaatgaaaaatgctaatcataaccagaaaaaaaatttatttttttctttttaaatcaggatccctgataaaaatctacccagaatacaaatctacccaaaatgagattatcatccacaatctcatgtaaaaatatctaggctggcacggtggttcacrcctgtaatcccagcactttgggaggccaactggggcggatcacctgaggtcaggagtttgagaccggcctggccaacatggtgaaacccttcccctactaaaaatacaataattagtggggcatggtggcgggtacctgtaatcccagctactcaggaggctgacacaggagaatcatttgaacccggg

SEQ ID NO: 107480 - DNA, 656 bp, Homo sapiens
agcaaattggcactgaagtacctggttgatattgatgaaaatttatcttaacgtattttgggctgtaaaaactgaagaaaggtgtccttttatcttgatatgtccctaagcacagtatcggtaatatttgccctggttttatagctttacaaatgtaaacctggctccccgcatggtttcctttttccagtcttggcatttctggaacacagttattatgtattctcctggtgaatgaactcaatgcagcgtaacaaagtatctgaggttcaggatattttgtaggggggtaattagatcggccttccattcaactgtttcactccaaatggatgaaggaatctgtagcagtttaaatacttgtagattattttaaagtatcacaggagattcattttgattactcagctgcttactgaatttgttttgcaacaatgggatcacttttgattcaaytgcacagttttttcaagtcaaaagtcaaaattatagacataaaatgactccaatttctggcacaacttgcaattctgatgcttgtaaaaatggcagatacttgcttttagaataaagaggcatgggtaccctattccttcctttacagtctaacaaaactgagaaagggtgtttttgttacttttacccctaagttggca

SEQ ID NO: 107481 - DNA, 522 bp, Homo sapiens
ttaggcaagttgctaagtcttcggggcttgaacttcctcatttgtaattggtgataatcataacttctttctctgagtgactgtgagaaaaattagattgcagatgggaaagtgctttaaaacttttaaaatatgatgttttaggttggtgcaaacgtaattgcggttttttttttttttgccrttacttttaattatttttgcaccaacctaataaatataggttagatctagttaccgcctgtatgaaaacaagaaaccagttgtagaacattcgattccagttactatattactggttacacctacagagcaccatccagtttatccataggtggatgaaactgcccaactcgccatcccgagaaacaacaatcagcaccaggtaagcattttccaacttaaaaggctttcattgcatgggtctcttgcacatcatctctcaacatttcatcatttcgttactatttccttgttttccaaaatgttctccacctctggaatttatccttttaaaaataa

SEQ ID NO: 107482 - DNA, 582 bp, Homo sapiens
gttaaaatcaaactaccagcctggataatatagtaagatcttgtctctattaaaaaattattttaaaaattaaactaccaggctgagcacagtggctcacacctataagcccagcactttggaaagctgaggcaagaggatcacttgaggccagttcragaccagactgggcaatatagtgaggccccatcactacaaaataatttttttaatcaatctaccaatagtttggtaccatttttaattgacaaataaatgaaaacagctgaactatctatggtataatgcataagtaaattgtgggtttatccagtggaaaactgcacagcaatgaaaatgaacaaattacaattccatgatatggtcagatgtcacaaacataatgttaagcaagaaaagccacacccaaaataatacctaccatgatgattccatttataaaaagttcaaatatgtacagagctaaactatagcattagaagttagactaacagttacccatgaggaggcagtcactgtaagggtataattggagcttcatgggtgctgattatgttttttgacatgaggactggttacaca

SEQ ID NO: 107483 - DNA, 553 bp, Homo sapiens
tcttctgactcttggagtgtgcctcctgttttctgctaatatcctgattgactaaattttttgataaatgtcttttgtgattccttaatgtagataaaaacttacttgtgcggcagtagaaattatctatcttttaaagtcaagactctaccagacgctgccatgaaatatatttatttgttaattacagagtaaaaagattctgaaggagaagacayagtccctgagaacagatgcattaagagtaatggcattctgggtgttatgtgctataaccaatatactaaatatttagaaaggtgttgtagtcatactaaacaaattgcatcaagactctatctgcaagatgcttaagtaggatgaataggtgaaaataacgtaattacaaaaacatcaaaatccagtatattggagtgattacaagaaatcttctaatttatgtctttaaagaatggttaggttttttagaccgggaaagcagccatcagttacttgcccaactgctgtatttttggttcttttattactatgctgctttaggaaaatggtaatg

SEQ ID NO: 107484 - DNA, 621 bp, Homo sapiens
ctatttagaaagcatcaacaactctctactacaaagttcaaatccctaagcataaaattcaaagcctttcatttgttgcactaatcccccagaagattcttatgtgaactcatcttcatatttctaggtccagttttttaagtcatggaaaaagtcatggccattaatagctcagatgattcacaattaaagaattgyattacccaaacaagtaatgaaccccaaataacagaaggcaaagggaacatgaaatgggtagcaaaataataaaaaatataaatatcaacggattttctgcccaaccatgaaaatgagtagatctgagtacctatgtttatttctctgtgctttgctgtgcatatatttgtatatattaacttttttttatcctttagcttttaactgttattatacacaaagttacttgtgtaacttaaacttataatttatctgttaatatgtaggatatctatggcaaattgtgacagaatatgaatgaatgagaagagtaatgaatgtcattcagcaatgggtgaaatataacaggtgaaatttttgtttactctttgtgcatccttgtatcaaggataatttccacaccttaagttgaagcataatgtc

SEQ ID NO: 107485 - DNA, 620 bp, Homo sapiens
ctgagacttaacaacctgctaaaaatgagctttgggggcctacacgtctaggaaaaaaccctcctagtcatgagagatcagatgaaacctgaaaagagactcattttcttgtaaaatgctttctccaagattttaaaaaagaaaaggggagaaacgtgaaagtaaaatatcttgggccctttcaagctgggaactgctcagggcaaatctgcctcccattctattcaaagtcatccctctgctcactaggatagatgcaaactctgattgcttcctttggaaagacttatcagaaactcagaagaatgcaaccatttgtctctcacctacctgtgacctggaagcctctgggggcsgggggcgagggggtgggggacttgttttgagttatctctgcctttctggatggaattaatgtccttcttacatatattgattgatagctcatgtctctgtaaagtgtataaaaccaagcagtgccctgaccaccttgggcacatgttgtgaggacttcctgaggctgtgtcacaggtgcgtcctcaaccttggcaaaataaactctctaaattaactgagacctgtctcagattttctgggttcacaggaattttgtggaggca

SEQ ID NO: 107486 - DNA, 590 bp, Homo sapiens
tatgactcctttgtgggggagacagagggacaggagacaaaaggacaggagaaggtcggagagaggcattccttttgaggctgcttctgaggctcctcaatcccttttagttcaatgtactcagcaggccaaagtgtcatattttggggtactgttttctgagtcccaatgctttcaacaaaggtacttctacaaattttactgagtgtatataaatattaatgtaagaataaatcaaaggtggtgtttcagattcttgtattattataaaggacatttagtgatgggacasaacttcccagtgtgttagatcccagaggcatacatatccttacgtgttccttttgcagtgtatccactggctactgaacccatgactatatctaaatctttcttgaaactataaatttgtcaacatatataatttttctaggcttagtaattgcataaagtagactttttcatatttcttaaaattacatcttttaatctccaagaggaactttcttaattttattattccaggatttggtaaacacatctatctctaatgtacagacaccgcataatttaccaactagaatgtgcct

SEQ ID NO: 107487 - DNA, 590 bp, Homo sapiens
tatgactcctttgtgggggagacagagggacaggagacaaaaggacaggagaaggtcggagagaggcattccttttgaggctgcttctgaggctcctcaatcccttttagttcaatgtactcagcaggccaaagtgtcatattttggggtactgttttctgagtcccaatgctttcaacaaaggtacttctacaaattttactgagtgtatataaatattaatgtaagaataaatcaaaggtggtgtttcagattcttgtattattataaaggacatttagtgatgggacacaacttcccagtgtgttagatcccagaggcatacatatccttacgtgttccttttgcagtgtatccactggctactgaacccatgactatatctaaatctttcttgaaactataaatttgtcaacatatataatttttctaggcttagtaattgcataaagtagactttttcatatttcttaaaattacatcttttaatctccaagaggaactttcttaattttattattccaggatttggtaaacacakctatctctaatgtacagacaccgcataatttaccaactagaatgtgcct

SEQ ID NO: 107488 - DNA, 597 bp, Homo sapiens
tgagttttccaaaaattgtatgagatgtctagaaatcgaatatatacatwattttggttattatgtttaaatgttgtgtgccacagaaatagccaaattttcttgtcaatttctatttataatgaactcatatttttaaccatggccattctaagtctttgtcatgttgttctgatttttctataaaaacatctgaaattagctacagtccaaaattgcttctccttcaaggagattcatgtaaaaaaaaaaagtaacacatacttttgaacacaggtttctaacactaagatcataccattaaactaagaattttcagaactctaatgaagaaattgatggcttcatgaaattgctaattaaatatcaagcataaaaagaattatatggaactaaatggactgttgaatattaattacattttgtttgaaacattgctggttttccaaatgttttgttgcgcagatttaagaagccttttcccttaaagctatctatagcttacaatttggtaaagtatgcctttgtaaaccaaaattgaaacaatttttttccctacctgatccctccagaattcagaaactattcataagtatt

SEQ ID NO: 107489 - DNA, 639 bp, Homo sapiens
ctgttttacaaagttaggagaagcattaagagaagtagtgaaatatgtcaggacaacaagggctgttcccatcccttggctctcaaggcaaaggagggaatagccgccagaaagacactagaaagttataggtgaccgcagccctggtgaagctgtggccttacacagagagatcaacctctgccaatctgcaggacagaaggaaagaaccaaaggaataattattccaacctctctctctgatttcctgttggtgcctcccatcggctaaacccaggtagaaaccagagggcaaaagggcaaattgagacagtccccagaggtcaatgtccctggactgagagcaaagattggggtagagaaggatgtggaagacaaacagaggagatgcagcatgaagtctgagctaagatctaagcactgctctgattttagctctccagtgtttttcctcgakgggctcagagttgctttatacttaggcaaaggggacagctgtcccaatccggtatctaactaagaggagccatacctaaaagaggagcaggtgcagtatctgccaaggccatccctaaatgacatcatcgaatgttctcatcttcagcacaatcaacccagcatggcaataaggtcccagtt

SEQ ID NO: 107490 - DNA, 533 bp, Homo sapiens
tttattatattcacattccttctgtataaattactcacacttcatattaggaggctctgggttcaagtattttatatatatatatatatatatatacacacacacacacacacacacatatatatatatatatatwtttttttttttttgagatggagtcttgctctgttgccaaggctggagtacagcggcacaatctcggctcactgcaacctccacctaccgggttcaagcgattctccagcctcagcctcctgagtagctgggattaaaggctcctgccaccatgccgagctaatttttgtatttttagtagagatggggtttcaccatgttggccaggctggtctggaactcctgacctcaggtgatctgcctgccttggcctcccaaagtgctgggattacacacgtgagccaccgcaccctgcccaataatatttaatactatattatttataccttgtctacttctagataggattaggaggggtttctacagatgtgctttctcttccttaagatcatgtaaga

SEQ ID NO: 107491 - DNA, 581 bp, Homo sapiens
caatttcttcctggttcagtcttggggaggatgtatgtgtcaagaaatgtatcaatttgttctggattttctagtttgtgtgcacagaggcagtcatagtagtctctgatggtaatttgtatttctgtggggccagtggtaacatcccctttgttgtttctaaatgtgtttgtttgggtctctctcttttcttctttaytagtctggctagcactctatctattttatttactttttcaaaaaaccagctcctgccttcattgatcttttgaatggtttttttgtgtcccattcttcagttcagctctgattttggttatttcttgtcttcttctagttttggggttggtttgctcttgcttctctagttattttagttgtgatgttaggttgttaatttgagatctttctaacgttttgatgtaagtgtttagcgctataaatttccttgttaacactgccttagctgtgtcccagagattctggtatgttgtatctcagttcttattagttttaacgaacttcttgatttcttccttaattttactatatacccaaaagtcattcaggagcaggttgct

SEQ ID NO: 107492 - DNA, 581 bp, Homo sapiens
caatttcttcctggttcagtcttggggaggatgtatgtgtcaagaaatgtatcaatttgttctggattttctagtttgtgtgcacagaggcagtcatagtagtctctgatggtaatttgtatttctgtggggccagtggtaacatcccctttgttgtttctaaatgtgtttgtttgggtctctctcttttcttctttactagtctggctagcactctatctattttatttactttttcaaaaaaccagctcctgccttcattgatcttttgaatggtttttttgtgtcccattcttcagttcagctctgattttggttatttcttgtcttcttctagttttrgggttggtttgctcttgcttctctagttattttagttgtgatgttaggttgttaatttgagatctttctaacgttttgatgtaagtgtttagcgctataaatttccttgttaacactgccttagctgtgtcccagagattctggtatgttgtatctcagttcttattagttttaacgaacttcttgatttcttccttaattttactatatacccaaaagtcattcaggagcaggttgct

SEQ ID NO: 107493 - DNA, 581 bp, Homo sapiens
caatttcttcctggttcagtcttggggaggatgtatgtgtcaagaaatgtatcaatttgttctggattttctagtttgtgtgcacagaggcagtcatagtagtctctgatggtaatttgtatttctgtggggccagtggtaacatcccctttgttgtttctaaatgtgtttgtttgggtctctctcttttcttctttactagtctggctagcactctatctattttatttactttttcaaaaaaccagctcctgccttcattgatcttttgaatggtttttttgtgtcccattcttcagttcagctctgattttggttatttcttgtcttcttctagttttggggttggtttgctcttgcttctctagttattttagttgtgatgttaggttgttaatttgagatctttctaacgttttgatgtaagtgtttagcgctataaatttccttgttaacactgccttagctgtgtcccagagattctggtatgttgtatctcagttcttattagttttaaygaacttcttgatttcttccttaattttactatatacccaaaagtcattcaggagcaggttgct

SEQ ID NO: 107494 - DNA, 618 bp, Homo sapiens
atgtttataagagtgcgtagacccaaggaagtgggtggagacctaacaaggaagtgatggaagactttttttttggagaagtttggccttgaagaggtaatggccgtggctgagggagagagtgggtggatagaaagcaaggtctgaaatgtagaattggtttttctcttcacaggaaaaaatgttgatcatgtttataaattgaaaagattaaaaatatatgaaagggaagactgatgttaataattggacagcatcttgattatgactgagtaaacaatgtgaggatggactgcctttgagcagaagggtttttccctccaagccttctcaggttagaagacaagaacgtgagcgtgattgcatgcaaatatgggtaatatcttgatgtggttggttgttttagagcatgacaatggagagactttctggctgataatcaaattttctttgtgaatgaaaggcaaaatcttctgaggggtggtgaagatttggtagagccataggagaaatggaagaggatgctgraagttctgcaaagctgctcccgtggctgtaaatcatgagaccaacctcacttggtgggtgaattcttgtggcaacactctatagcccagg

SEQ ID NO: 107495 - DNA, 622 bp, Homo sapiens
actgagtggggacagaaattctggctccctattaggtgcccactaatacctccctggttggttgggagaggagtgccacttactatccctcacatgacctttattgacaccaagatgggacagtggagtggaggagtgagtggtaggtatcagggagtggttgctggattaactctgggtggtgatgaaaatcctgactctccattaggcattgtctgacatcaccctagaggagaggggaagagatgcttcattactgttgggtgaggaatggaagtctaggtttccattgacatttcaggggcttggggaaaggagtacattttcaccaagagggcatgaccatcctgactccctattcactttctctgacaccatcctggtgtgtgkgcatgtgtgtgttgaagtgttgggttccttatgacagcctggtgagggtgaaagtctaggctcctcatttgaccttagctggtgggggtggagtcgcagttttttctgtggtgtttggctggccccattacccaagatggagtgtagtggtgcgatcatagctcactgtaacctcgaactcctgggctcaagtgatcctcctgcctcagccttcagagtatctaggactatg

SEQ ID NO: 107496 - DNA, 464 bp, Homo sapiens
cctttactcatccctgtacactactgggacaggtcacatacacattcagaccccagatcctcctccacaaattcagagacccaagcacccaccaaatagcttatcatagtggcttttggggaaggtcaactccattcctccaaggctccagtttgccagtcttttcatgaatgggtaaggaaagtgtgtatttgaggccattagcttctttccaaatgcatacatcttcacttttactcaccctgcagacactcgggaatcagaacccatcacaaygcccccgtcaaactccactgccatgatggtggtctgcagagacacagaatatggaatgtcagggcaagaacagccttgatgccctcatgttagagaagaagaaacattcccagagaggcgaagtgactggctcaaagattacacagtaacaggccagagctgactgtcagtacaggctttttttccct

SEQ ID NO: 107497 - DNA, 547 bp, Homo sapiens
agtttatcaaaagtctgtgtgatgagttggtccttctcaataagtgcctatatttccttctcccaagtgctgttctacttcacccagggcaccatttcctcatctctttgcaccatccccaaccccctttcttgatttaaccagcccccactgtccgggaccagagtgaaagcgaaagcgctttagagtagcttcccgttgacgcttccagctaagagtcaaagcacccsctttttccaccagcctcgcgtgcctgttcccttcacggacactctagacgacccccctcagaaaagaaatactctatgctcattgcgggttgcaagcgctggctgctacaggcgacctccctgcgctcccgttggtctctgcattcacttctccgcgcgcgcttccagggtcccctggccgctgcatctcctccacccctctgccaaccctcaagcccagacccattaccccggtgtggacttctcccgcccggggtaagtccccggttggtgctcccgcccgcagcatccctgcaaggcaccgctctcctcgccgc

SEQ ID NO: 107498 - DNA, 547 bp, Homo sapiens
agtttatcaaaagtctgtgtgatgagttggtccttctcaataagtgcctatatttccttctcccaagtgctgttctacttcacccagggcaccatttcctcatctctttgcaccatccccaaccccctttcttgatttaaccagcccccactgtccgggaccagagtgaaagcgaaagcgctttagagtagcttcccgttgacgcttccagctaagagtcaaagcacccgctttttccaccagcctcgcgtgcctgktcccttcacggacactctagacgacccccctcagaaaagaaatactctatgctcattgcgggttgcaagcgctggctgctacaggcgacctccctgcgctcccgttggtctctgcattcacttctccgcgcgcgcttccagggtcccctggccgctgcatctcctccacccctctgccaaccctcaagcccagacccattaccccggtgtggacttctcccgcccggggtaagtccccggttggtgctcccgcccgcagcatccctgcaaggcaccgctctcctcgccgc

SEQ ID NO: 107499 - DNA, 621 bp, Homo sapiens
ccaaaatgaccaatataatcttaaagaataacaacattgaaagacttttcagatattgagacttactatagtgccatggaaatgaagaacatgtggtattggagcaaagagatatatagatcaatggaaaagaatagggtcaagaaacagattcagatgcatataatcacctgatttatgaaaaatactctactgaagtgctccagggaagggatttttttttcttttaaataaacaggactgaatcaatcagaaaattagaagtgcatgtgggaaaaagtgaatgctgacctttaatttacgctaaaggaagaaaactcttgactgctactttgtacttaagaagaaaacataagagaacatcctcatgactctgsatagcaaacatttcttaaataggacattgagaagtaccaaccataaagaaatagtgataaaccataaagaaatagtgataaacatggactacattatgatgaagaactcctgcttatcaaaagatactgtcatgacaataaaaatcaggcatgggggaagctgttacacatgtatcctacaaggacttctatctaaaatatataaagaacttctacttattaataaacagccaaccgcctcccc

SEQ ID NO: 107500 - DNA, 538 bp, Homo sapiens
  misc_feature (1)...(538): n = A,T,C or G
ggatgttgtctttctcgtgaaatctctgggaaaccattaaatactcatgcagaaaggcttggaaatccaatttgcattntaaagatgtctttccccccagcatggaagcaagaatggatagaggaagctagattgaaggcagggtataggctaaagatttttgcaggaaactcagatacaggttgtggcaataggaatgagggtgatctttgctatagcagggacgtccgtagagcattgctgaaccacagaccagaggtatatttcccagagttgctgtrtgtagagtaggctcaaagatcatgtcccaaaagcattgcaaaagttaaatgagactctcactgcatctgcaaattcctgttatactatcactttgcatagtccaatgcgatttgaaggagaagttgagactagacaagcattcaggttgttcccccaactgtgtgtatttacaagttattttatcattctgggcctcagtttcctaatttgaaatatgaaaacataatacattctctacttcataggaataatattt

SEQ ID NO: 107501 - DNA, 538 bp, Homo sapiens
  misc_feature (1)...(538): n = A,T,C or G
ggatgttgtctttctcgtgaaatctctgggaaaccattaaatactcatgcagaaaggcttggaaatccaatttgcattntaaagatgtctttccccccagcatggaagcaagaatggatagaggaagctagattgaaggcagggtataggctaaagatttttgcaggaaactcagatacaggttgtggcaataggaatgagggtgatctttgctatagcagggacgtccgtagagcattgctgaaccacagaccagaggtatatttcccagagttgctgtgtgtagagtaggctcaaagatcrtgtcccaaaagcattgcaaaagttaaatgagactctcactgcatctgcaaattcctgttatactatcactttgcatagtccaatgcgatttgaaggagaagttgagactagacaagcattcaggttgttcccccaactgtgtgtatttacaagttattttatcattctgggcctcagtttcctaatttgaaatatgaaaacataatacattctctacttcataggaataatattt

SEQ ID NO: 107502 - DNA, 534 bp, Homo sapiens
tgctgaaccacagaccagaggtatatttcccagagttgctgtgtgtagagtaggctcaaagatcatgtcccaaaagcattgcaaaagttaaatgagactctcactgcatctgcaaattcctgttatactatcactttgcatagtccaatgcgatttgaaggagaagttgagactagacaagcattcaggttgttcccccaactgtgtgtatttacaagttattttatcattctgggcctcagtttcctaatttgaaatatgaaaacataatrcattctctacttcataggaataatattttaatcacataatagaatgaaaaagcaatttgaccaaggaaggaatattgtaaaaatgtaagttattaatttttttgcataattgttgaaagcctatctttctaaaatatgggaggaagggagaaaataggactgaatattgcttctatgctcagagaaaaagatattactgtctcccttttcattttgtaagtttagaggttttaattctgagcattttgtagaaagctccata

SEQ ID NO: 107503 - DNA, 547 bp, Homo sapiens
tgcactctagcctgggtgacagagcgagacttccatctcaaaaaaaaaaaaaaaaaataggaaggatcttattttctcactgctattaactgaatgtttgcatagccccaaaattcatatgttgaaacctaatccccaatgtgatggtatttggaaatcagtcctttgggaaacaattgtgccatgagggtggaggcctgttgatgagattagtgcctttataagagacaggaaagagcttgcttgctctctctctctcggctgtctgccatgggaggaggcaaagaaagagatgaccatttgcaaactatgatgaaagccctcaccagacatcartctgctgacaccttgatcttggatttccccacccctagaactgagaaatagatgtttgttgcttaagctgcccagtctattgtactttttttattgcagcccaaacagactaagacagttacctacatcccttaagcccctcccctcctcagtgttccacttaactttcatgtcccttgcattaactctgataaaatccaaattgcttgtc

SEQ ID NO: 107504 - DNA, 414 bp, Homo sapiens
tacaaaaggagtgattccaacctgctctatgatagggaatgttcaactctgtgtcctgaatacaaacatcacaaagatgtttctcagaacgctgcagtctgcaatttgtatgaattcccgcttccaacgaaatcctcaaaactagccaaatatccacttgcagattccacaaaaagagcgtttcaaaacttctctatgaaaagraaggttctactcctttagttgaggacacacatcacgagtaagtttctgagaatgcttctgtctagtttttatgggaagatatttcctttttcaccttaggccggaaagtgctccaaatgtccacttacacacactacaaaaagagtgtttcaaacctgctctgtgaaagggaatgttcaattctgtgacttgaatgcaatcatcacaaag

SEQ ID NO: 107505 - DNA, 414 bp, Homo sapiens
tacaaaaggagtgattccaacctgctctatgatagggaatgttcaactctgtgtcctgaatacaaacatcacaaagatgtttctcagaacgctgcagtctgcaatttgtatgaattcccgcttccaacgaaatcctcaaaactagccaaatatccacttgcagattccacaaaaagagcgtttcaaaacttctctatgaaaaggaaggttctactcctttagttgaggacacacatcacgagtaagtttctgagaatgcttctgtctagtttttatgggaagatatttcctttttcaccttaggccggwaagtgctccaaatgtccacttacacacactacaaaaagagtgtttcaaacctgctctgtgaaagggaatgttcaattctgtgacttgaatgcaatcatcacaaag

SEQ ID NO: 107506 - DNA, 540 bp, Homo sapiens
gagaagtcaaaagtcaaccattctgagtaatgacacccccaaagcatcctccaaacacggagaagccacacagggaaataacatatgagtattttctttttgagacagagtcttactctgtcgcccaggctggagtgcagtggcacgatctcagctcactgcaacctctgcctcccgggttcaagctgcatcagcttgattcacctgcatcagcctgagtagctgggactacaggcactygccaccacacctgactaatcttttgtatttttagtagagatggggtttcaccacgttagccaggatggtcttgatctcctgacctcgtgatctgcccgcctcagcctcccaaagtgctgggattacaggcataagccaccgtgcctggcccacatgaatattttctaccacaaaatgaattcaatctcaaagggatatctaaacccagattagatcttgtcacttctctgctcagattcctgcagtggctccccacttccctcatggtaaaagcatagccctgacaatggcccagttggc

SEQ ID NO: 107507 - DNA, 540 bp, Homo sapiens
gagaagtcaaaagtcaaccattctgagtaatgacacccccaaagcatcctccaaacacggagaagccacacagggaaataacatatgagtattttctttttgagacagagtcttactctgtcgcccaggctggagtgcagtggcacgatctcagctcactgcaacctctgcctcccgggttcaagctgcatcagcttgattcacctgcatcagcctgagtagctgggactacaggcacttgccaccacacctgactaatcttttgtatttttagtagagatggggtttcaccacgttagccaggatggtcttgatctcctgacctcgtgatctgcccgcctcagcctcccaaagtgctgggattacaggcataagccaycgtgcctggcccacatgaatattttctaccacaaaatgaattcaatctcaaagggatatctaaacccagattagatcttgtcacttctctgctcagattcctgcagtggctccccacttccctcatggtaaaagcatagccctgacaatggcccagttggc

SEQ ID NO: 107508 - DNA, 581 bp, Homo sapiens
atacatatatttaaaatatatttccaaacacaaaaaagaagttaatatgtttaaaaactgcaaaataaatagttaatatgtactcagacagaggcttccttatttaaattccraacatatttgagtatataaaccagttccaataactgcttataatttcaggaccaatttcaaaatactgctctcattgtctgttttcttactttcaaattaatacatagctacatattgaatgcttacaagtagtgtgtggtgctaagcgaatacagtttttgaggcatcgagaaaaagtcaactaaatggcatacatttatatgtcaaattgggtagtatgatactttatcaaattgcaaaatgcatttctgctcaaatactcagtttactgaaacatttaaagaaatttgagaaagttagtgatctgttactagactctcttccatttggaagtaatcagtagaggttttatattttctcagcaatggtaaaggcacgtatgaactgttgcatacagaaacaatgttaaaatgcataatgaagattggattttcatatacacagagttcaattttacacatatttta

SEQ ID NO: 107509 - DNA, 665 bp, Homo sapiens
taaaggttcatttgggaagccaatggaaactctttgagtcaatcattgcaattgttacattttaagacaaaacaccagaaatatacaaataatatgcacagcactgtattaaataataataacataatatgaaatattgagaataatataaacaataggaatgacaagaataatayaaacaaaaataatggcaagaataatataaacaataatctaaacaatattaatgacaatataaaatagcaagagacaacatatttgcttgattttaaaataacttcagcagaagtttctcttcagtagaggaatttagtcagttttataaccgacatattttgacagagtattgacaatagaatcaaacaatgttcttctacagacactttgatgtagtgagactacctacagagtcaagattatttaaaattgcagtttatttctgacattatcttatgatatgattttgagaaaaatgcctaacttctctgacacatattagaagttttgattatgcccggttttgtcaaaatataacaggaaattcaaagcattactggtggaaatataaccagatgtggccagtctgaagaacagctcagaaatagtcaaatctaaaatgcatttgtaactatgaccccacagtccttgagtacatttccagagta

SEQ ID NO: 107510 - DNA, 631 bp, Homo sapiens
caaactgctttggaagcccctttcttccccatccacactgtgctttgccaacatcttcaatctcctcctccattgtcctaatattccatggcccagcaatgctgttgcctgtcttgttatgcttacatataagttaacaagcctgctgtrgaaaaattatgcaagcttataattgtttctcttacaaacatatgttgtgaaatctcaaccctattcaaaatactgcccagcaatcctttgattcccaccccctttttctcacattctccagagaaagtatttcaaataaatctcactctgctaaaatatcctaacctaccacctctcctcactttcaggacatgattttgcctctttcttaagaaagaaattagaaactattagaaaaaaatacatagagagagttcaatttctggtcactgcacttataaacttaaatgagatatatctatctttttatactttgctcttatcaaaatgaaaaaggtgtttcctcttggctaggactaagtaataggttaataaattacagaaaaaaaaatatgccaagcattagaaattatgattaaattaaaaataggtgaaaggagtaagcaagaggaactttggagtttagtgtcaaagttgtagg

SEQ ID NO: 107511 - DNA, 631 bp, Homo sapiens
caaactgctttggaagcccctttcttccccatccacactgtgctttgccaacatcttcaatctcctcctccattgtcctaatattccatggcccagcaatgctgttgcctgtcttgttatgcttacatataagttaacaagcctgctgtagaaaaattatgcaagcttataattgtttctcttacaaacatatgttgtgaaatctcaaccctattcaaaatactgcccagcaatcctttgattcccaccccctttttctcacattctccagagaargtatttcaaataaatctcactctgctaaaatatcctaacctaccacctctcctcactttcaggacatgattttgcctctttcttaagaaagaaattagaaactattagaaaaaaatacatagagagagttcaatttctggtcactgcacttataaacttaaatgagatatatctatctttttatactttgctcttatcaaaatgaaaaaggtgtttcctcttggctaggactaagtaataggttaataaattacagaaaaaaaaatatgccaagcattagaaattatgattaaattaaaaataggtgaaaggagtaagcaagaggaactttggagtttagtgtcaaagttgtagg

SEQ ID NO: 107512 - DNA, 631 bp, Homo sapiens
caaactgctttggaagcccctttcttccccatccacactgtgctttgccaacatcttcaatctcctcctccattgtcctaatattccatggcccagcaatgctgttgcctgtcttgttatgcttacatataagttaacaagcctgctgtagaaaaattatgcaagcttataattgtttctcttacaaacatatgttgtgaaatctcaaccctattcaaaatactgcccagcaatcctttgattcccaccccctttttctcacattctccagagaaagtatttcaaataaatctcactctgctaaaatatcctaacctaccacctctcctcactttcaggacatgattttgcctctttcttaagaaagaaattagaaactattagaaaaaaatayatagagagagttcaatttctggtcactgcacttataaacttaaatgagatatatctatctttttatactttgctcttatcaaaatgaaaaaggtgtttcctcttggctaggactaagtaataggttaataaattacagaaaaaaaaatatgccaagcattagaaattatgattaaattaaaaataggtgaaaggagtaagcaagaggaactttggagtttagtgtcaaagttgtagg

SEQ ID NO: 107513 - DNA, 631 bp, Homo sapiens
caaactgctttggaagcccctttcttccccatccacactgtgctttgccaacatcttcaatctcctcctccattgtcctaatattccatggcccagcaatgctgttgcctgtcttgttatgcttacatataagttaacaagcctgctgtagaaaaattatgcaagcttataattgtttctcttacaaacatatgttgtgaaatctcaaccctattcaaaatactgcccagcaatcctttgattcccaccccctttttctcacattctccagagaaagtatttcaaataaatctcactctgctaaaatatcctaacctaccacctctcctcactttcaggacatgattttgcctctttcttaagaaagaaattagaaactattagaaaaaaatacatagagagagttcaatttctggtcactgcacttataaacttaaatgagatatatctatctttttatactttgctcttatcaaaatgaaaaaggtgtttcctcttggctaggactaagtaatargttaataaattacagaaaaaaaaatatgccaagcattagaaattatgattaaattaaaaataggtgaaaggagtaagcaagaggaactttggagtttagtgtcaaagttgtagg

SEQ ID NO: 107514 - DNA, 620 bp, Homo sapiens
tcagttttggagcttattttattagcttatcattcacatttgacaactggccaattccattataattttttcttttggtttccaggaaaatttataaagtcaatcttatatgtctgtgggatctgtattagcagattcaaccaatcacagatcaaaaatatctgaaaaaaaaatccatacaacaataatacaacaaaatgatacatrcagtttaaaaactatgtacaaagcatttgcattatattaggtattgtacataatctggagattatttaaagtatatggaagcatgtgtgtaggctgtatgcaaatattactacattttatataaggaacttcagcatcccaagatttttgtataatcaggggtggtcctggaaccaatttcctgaagaccctaagggataactgtactgtattgtttttcctcctatctcatttactctcactctcaatctcctttactggttcatcctaattttgctgacattttagtgttggagtgtcccacaactcaggtattagtttctttttcctttttttaaatttaataatcacttcaactggtagaaacaggaataattacttccactttgagatttccaaatttagaagttcag

SEQ ID NO: 107515 - DNA, 620 bp, Homo sapiens
tcagttttggagcttattttattagcttatcattcacatttgacaactggccaattccattataattttttcttttggtttccaggaaaatttataaagtcaatcttatatgtctgtgggatctgtattagcagattcaaccaatcacagatcaaaaatatctgaaaaaaaaatccatacaacaataatacaacaaaatgatacatacagtttaaaaactatgtacaaagcatttgcattatattaggtattgtacataatctggagattatttaaagtatatggaagcatgtgtgtaggctgtatgcaaatattactacattttatataaggaacttcagcatcccaagatttttgtataatcaggggtggtcctggaaccaatttcctgaagaccctaagggataactgtactrtattgtttttcctcctatctcatttactctcactctcaatctcctttactggttcatcctaattttgctgacattttagtgttggagtgtcccacaactcaggtattagtttctttttcctttttttaaatttaataatcacttcaactggtagaaacaggaataattacttccactttgagatttccaaatttagaagttcag

SEQ ID NO: 107516 - DNA, 548 bp, Homo sapiens
gcctaccatttccagattttaaaaaaatggccctttatcccagaaaggagaaattcattgtatcccagagaccagcattacttctgttgcagtattttcagtgatggaactctgttgaggctacagacaagaaaagcaggagagcattttaggaatctaagattttttattttactttcctctggggaccttctttaatagtttttttctttcttaagaacctatccttgaatcataggtaaagaaataatcacagaatgagtaactgacattaataatcacagcttcacactatagtcttactggatttttacgtttttcagggtttccccaagtggtggtcacatttcttacacaacyctgcagtgtagatagacatgtatagtcattactgggctgacacggtgggactgagacctgctagtgccgtggttggcatctatgattagtgaggtccaagatcaaccttctttacattaaacatgccctagcaagaccttcaacccaactttattaagctgatgctaacgcacacaaagaagtcctaa

SEQ ID NO: 107517 - DNA, 612 bp, Homo sapiens
actaactacctgtattgctcaaatcagtttctgatggggtgcaatattatttgcatgttaaatatcctgagtcaaatataaattactaaacttgactccaagagaaatattaagctaaaaaatactaatacacatttwaaaatttcgtagatagatcattgtcaataatctaactacaaaacaaggaacagattcatagagtataccaagccctcaaagaacaaataacttattttacacaacagttatagaaactataaaagggagatgctctccatatcctttttatgaagctagaaaaactttgatattaaaagtgcataagggcagtatagtatgagaaaaaatgtataatagacatagctatgaacataggtacacaaacttttcataacacctaatatctgttactttttaaccaaagaaagtaaggaagcagaagagagggagaagagagaaaaagagagagagagaaagataaaaagagaaagaaggaaaaaagcaagcaagaaaaaaaatttaataaatttgcaataaaaagacattttcttaatctgatataagtacctgtcaacaacctaaagcagatgtcatactaaacgtgaaaatcaa

SEQ ID NO: 107518 - DNA, 537 bp, Homo sapiens
tatctatgtgtgtatatatatacttatatacatacatctacatatacatacatgtatagatacgtatatayacacacacacacacacacacaccacagaatactactcagccataaagaagaatgaaataatgttttttccagcaaattggatggagctagaggccattattctaagtgaagtaactcaggaatggaacgacaaataccacatgttctcatttataagtgggagctatgctaggttatgtaaaggcaggtagagtggtataatgacattggagactcagaagaaggaaggggagaagaaaagtgagcaataaaactacctactgggtgatgggtacactaaaatcccagacttcaccactataaaattgatccatgtaaccaaaaaccacttgtacccctaaagctattgaaataaaaataaatcaatttaaacagagagttaaaaaaagaataaaactgtataaagtttttaaaaagtattctggtttgagacaaatggccatttcatgctctgttggttgaactg

SEQ ID NO: 107519 - DNA, 628 bp, Homo sapiens
caagtggtaattaactgttttttaggatgtatttgagcctcatttactgaactaccaaaaacatttacagaataaaataaaatgtaaaagaaacagctaagtaagaaataataaatggaaaagttgtaattttattgtcctctattacaaatgtgaaatattcccacattttttcatattttatgagaactgtttatacagttgaaagtttctatagaagaattacattatcttcatatgaaccatattgtattttcttccttttttgacaatttttaccaaagctatatctatggatgctttgttatgcatttacttacctagcaattcatgtttctaaagtgtataaagcaacaacattgagaagtgcttttgttcttctgttagatatttgtcataaacaaacttccctatctcgtaatatacatatttgcaattttataggataatctctacagctttagtgatactaaagagctttrgaatttatcagttcagctattaaggtaaattggttgaacaaaacccataaaattttagatgggaatctgatctttatattgcaaacgtgaaaatagttctcatatatatttgggattattatcagcaaaagaaaatatactgttca

SEQ ID NO: 107520 - DNA, 554 bp, Homo sapiens
gtgtgcgcaacaggttgttgacttaggcaatgtgtggaatgttctggattcctagaccccgggcagtagctccaagacagttttgaactttcaagtaagacaaacttagttttgatttccagytgtacacttagaagctatggatggtagatactttgttggggaaaatggcagcaattctcactccctgtgtctacccctttggttgtccccttccataccggctggccatgcccttgtgacctgctttggccaatgggagaatagcaaatatgacagaagtgagacatgggaagttcttgtgttgctgcccttatgctgcttttgaaactcaacccctatgttcaagctctcctggataatgagacttgtggtcgcattcccatcacccagctgacgatgagctcctcctgtccctaaaatatgaggccccttagccatccagcccccatccagttattgagaaacaagtattacctgtttgaaatcataaacgggtggtttatgatgcagcaaaaactaacttacatacaacatgacctcatgtgggtttc

SEQ ID NO: 107521 - DNA, 554 bp, Homo sapiens
gtgtgcgcaacaggttgttgacttaggcaatgtgtggaatgttctggattcctagaccccgggcagtagctccaagacagttttgaactttcaagtaagacaaacttagttttgatttccagttgtacacttagaagctatggatggtagatactttgttggggaaaatggcagcaattctcactccctgtgtctacccctttggttgtccccttccataccggctggccatgcccttgtgacctgctttggccaatgggagaatagcaaatatgacakaagtgagacatgggaagttcttgtgttgctgcccttatgctgcttttgaaactcaacccctatgttcaagctctcctggataatgagacttgtggtcgcattcccatcacccagctgacgatgagctcctcctgtccctaaaatatgaggccccttagccatccagcccccatccagttattgagaaacaagtattacctgtttgaaatcataaacgggtggtttatgatgcagcaaaaactaacttacatacaacatgacctcatgtgggtttc

SEQ ID NO: 107522 - DNA, 554 bp, Homo sapiens
gtgtgcgcaacaggttgttgacttaggcaatgtgtggaatgttctggattcctagaccccgggcagtagctccaagacagttttgaactttcaagtaagacaaacttagttttgatttccagttgtacacttagaagctatggatggtagatactttgttggggaaaatggcagcaattctcactccctgtgtctacccctttggttgtccccttccataccggctggccatgcccttgtgacctgctttggccaatgggagaatagcaaatatgacagaagtgagacatgggaagttcttgtgttgctgcccttatgctgcttttgaaactcaacccctatgttcaagctctcctggataatgagacttgtggtcrcattcccatcacccagctgacgatgagctcctcctgtccctaaaatatgaggccccttagccatccagcccccatccagttattgagaaacaagtattacctgtttgaaatcataaacgggtggtttatgatgcagcaaaaactaacttacatacaacatgacctcatgtgggtttc

SEQ ID NO: 107523 - DNA, 575 bp, Homo sapiens
cgtggcttaaacaagaaatatttatttctcatagttctggtggctggcaagtccaagatcaaggcatcagcatggttgagttccagtaactgctgattgcagactgctgatttcttattttattcctacatggtggaaaaagagcaagctaattctctggcctctcctgtccaatttgtaaaatttcatattcagacatgtaaaagttataatgcttatttcaaattgagaatcagtagggtgataggcattttagcaagaaacataattatctccatatataaactaattttaaatattacagtttagttttccaggtactaattccttggctcatataaaatgtatacttcagaaaatctctttccttgtttctgctttttattccaatattataacttctcataaaaatgaaataagataaatttaaatgctgtgtaattcagctatctggaaaaggacatcattcttctgatgacactgaacatgtagatgaggaatcatartggaggaaagctatcttagtgggaccaagtatcccagtggtcacagacttaagggaagggattcaggat

SEQ ID NO: 107524 - DNA, 603 bp, Homo sapiens
ccctcccttggacatcactgaaggcatgagagaaggtgtagggagcttccgtgccctctctggtatgccaccctcaggtacctccatgtgttcagcaattcagaagctctccaaactgattttggggttttatgaaagcttcattatgtrgaaatgattgattacctcattggccattggtaatcaactaaattttcagcccctttcctcttcctggggaataaggggttggggctaaaagttcatatcctctaattacatggctggttttcatggcaatcagctcctattctaaggctatccaggagcctaccaagagtcacctcattacagcaagagatgctcctataatccaggatattccggggatgtaggagctctgtatcagatactcctatcactcaggaaattaaaaagttcttcggagctctgtgtcaagaaccagggtcaaagaccaaatataagaacaaaagatactcctagcatccctatctgcaagggttttagaagctctgtctcaggaatcagggacagagaccaaatacataatttttattatatcacaatatcacatggcataattcacttttatattttgtatat

SEQ ID NO: 107525 - DNA, 603 bp, Homo sapiens
ccctcccttggacatcactgaaggcatgagagaaggtgtagggagcttccgtgccctctctggtatgccaccctcaggtacctccatgtgttcagcaattcagaagctctccaaactgattttggggttttatgaaagcttcattatgtggaaatgattgaktacctcattggccattggtaatcaactaaattttcagcccctttcctcttcctggggaataaggggttggggctaaaagttcatatcctctaattacatggctggttttcatggcaatcagctcctattctaaggctatccaggagcctaccaagagtcacctcattacagcaagagatgctcctataatccaggatattccggggatgtaggagctctgtatcagatactcctatcactcaggaaattaaaaagttcttcggagctctgtgtcaagaaccagggtcaaagaccaaatataagaacaaaagatactcctagcatccctatctgcaagggttttagaagctctgtctcaggaatcagggacagagaccaaatacataatttttattatatcacaatatcacatggcataattcacttttatattttgtatat

SEQ ID NO: 107526 - DNA, 569 bp, Homo sapiens
ctctgggatcctaggtacatagaacttcacattctccatggacatttgagctggcagggggatcttcaaagagagttggcagagacagggcttcaccggcatggagcctaggagcttttgtgcatgtggagctgtggcmgagcatggcctagacacccatcccccagggctccccacctccctacaggcagctctagcctcagctgattgctggcccaagagagagtgtggctggcttccctgtgggactgggaaacttccagggcccctgcctggccaccctgcaggagttgtgcacagagtagcctctgctgccaagcctgggtgctttgcttcacctgagtaccttcctggtggcctgggagcactttggatcccccagaacagctggggcccaatctcaagggtctggaggatgaagctgaaagccagtcctagctccccaaaactacacaaatacatggaaattgaacagcttgctccagaataactcctcggtgaacaataaaattaaggaagaaataaaaaaattctttgaaataaatgaaaatagggacacagcttaccaa

SEQ ID NO: 107527 - DNA, 569 bp, Homo sapiens
ctctgggatcctaggtacatagaacttcacattctccatggacatttgagctggcagggggatcttcaaagagagttggcagagacagggcttcaccggcatggagcctaggagcttttgtgcatgtggagctgtggccgagcatggcctagacacccatcccccagggctccccacctccctacaggcagctctagcctcagctgattgctggcccaagagagagtgtggctggcttccctgtgggactgggaaacttccagggcccctgcctggccaccctgcaggagktgtgcacagagtagcctctgctgccaagcctgggtgctttgcttcacctgagtaccttcctggtggcctgggagcactttggatcccccagaacagctggggcccaatctcaagggtctggaggatgaagctgaaagccagtcctagctccccaaaactacacaaatacatggaaattgaacagcttgctccagaataactcctcggtgaacaataaaattaaggaagaaataaaaaaattctttgaaataaatgaaaatagggacacagcttaccaa

SEQ ID NO: 107528 - DNA, 395 bp, Homo sapiens
tggagttgtactggtgagacggttgggggtgctgattgattgcaagctggctgatgattcaggccagatggagaggcagagaaatggcccatcagggcaggctaatggaatgcaggggcactggggggtcatgatcagcaaatgcaaggcagaatatagtcacagtggkggggaagggacaagcaagggttaagttgggaagagcttaccagacaatagaagctgaagactgaaggtaaatttgattgccagagaaactagactttggatttgtcaggcaccaacagcagaaggcttctcctgagggactaagataaatgagcaaggttcatagctcagtgttgcctttttagaagcttggcttaggactgcccaaggacggaattaaagacacc

SEQ ID NO: 107529 - DNA, 624 bp, Homo sapiens
ttcatttgtacattttattttccaaatgggataattatataagaagaaagatttatgcttttttaacctagtttcatggaaagccactgttgattctatataagcaaggatattcagccactgattccaggttgtttattatactgcctcctcacttactatatatatcttaggggtacaccaccacatgattccatcatagcaataatatagcccccaataacccataaatcaacagttaagctgagtttaagatgaaggcctggagtaggataaaggatcagctggactcaaatcctggagtcgctgttcattatcaatatgatttttaggtaaatgccaaaattaggccagtgcctaaattttctgattcacaaaatggagttmctaatagttctcgacacatagaagttttatatatatatatatatatatataaaatctttattgagataatttacctaccataaaactcagcctttttaaaatgtcaaattcagtggattttggcacatttttagtcatacaacggtcaacattatctaacgttagggcattttcatcactccaagcaaaactccacccctttgctttccccctttactatgccactggtaaccaata

SEQ ID NO: 107530 - DNA, 624 bp, Homo sapiens
ttcatttgtacattttattttccaaatgggataattatataagaagaaagatttatgcttttttaacctagtttcatggaaagccactgttgattctatataagcaaggatattcagccactgattccaggttgtttattatactgcctcctcacttactatatatatcttaggggtacaccaccacatgattccatcatagcaataatatagcccccaataacccataaatcaacagttaagctgagtttaagatgaaggcctggagtaggataaaggatcagctggactcaaatcctggagtcgctgttcattatcaatatgatttttaggtaaatgccaaaattaggccagtgcctaaattttctgattcacaaaatggagttcctaatagtyctcgacacatagaagttttatatatatatatatatatatataaaatctttattgagataatttacctaccataaaactcagcctttttaaaatgtcaaattcagtggattttggcacatttttagtcatacaacggtcaacattatctaacgttagggcattttcatcactccaagcaaaactccacccctttgctttccccctttactatgccactggtaaccaata

SEQ ID NO: 107531 - DNA, 489 bp, Homo sapiens
tatatatatatatatatataaaatctttattgagataatttacctaccataaaactcagccttttkaaaatgtcaaattcagtggattttggcacatttttagtcatacaacggtcaacattatctaacgttagggcattttcatcactccaagcaaaactccacccctttgctttccccctttactatgccactggtaaccaataaactagatgttgtctataggactttgcctattctagatattttatgtaaacatctagaatgtcttttgtgactggtttcttccatttggcataattttttcaaggctcatctgtgttgtggtatcattcagcatgttattccttttcattgccaaataattaatattacattatatgattacattctcttcattcatttatcagttgatggacatttgggttgtttctacctttttgttatcatgaatgatgctacaatgaatattttagtataatttttggg

SEQ ID NO: 107532 - DNA, 526 bp, Homo sapiens
cgtgagaccttgtctcaaaaaaaaaaaaaaaagacaatttttacacrttggttttatgtcctgcaactttactgaattcacttatcagttttaaaaggttggtgtgtctcgtgtgtgtgtgtgtgtgtgtgtgtgtctagtttttagggttttctacacataagatcatgtcattggcaaacagagatagttttacttcatctttcctatttgaatgccttttatttctttttcttgcctaattgctctggctaggacttccagtactatattgaatagaagtggtgagaaagagcacccttgtcttattcctgatctacaagaaaagctttcaatttttcacttttgagtatgaagctgtgaacttgtcatatgcagcttgtattattttgaagtaaattccttctatacctagttggttgagaatttcttttttaatcatgaaaggctgttgaattttgttaatttcattttcaaactattgagagtaatatgtgatttttaccctaatttcttttaatgtggt

SEQ ID NO: 107533 - DNA, 526 bp, Homo sapiens
cgtgagaccttgtctcaaaaaaaaaaaaaaaagacaatttttacacgttgrttttatgtcctgcaactttactgaattcacttatcagttttaaaaggttggtgtgtctcgtgtgtgtgtgtgtgtgtgtgtgtgtctagtttttagggttttctacacataagatcatgtcattggcaaacagagatagttttacttcatctttcctatttgaatgccttttatttctttttcttgcctaattgctctggctaggacttccagtactatattgaatagaagtggtgagaaagagcacccttgtcttattcctgatctacaagaaaagctttcaatttttcacttttgagtatgaagctgtgaacttgtcatatgcagcttgtattattttgaagtaaattccttctatacctagttggttgagaatttcttttttaatcatgaaaggctgttgaattttgttaatttcattttcaaactattgagagtaatatgtgatttttaccctaatttcttttaatgtggt

SEQ ID NO: 107534 - DNA, 491 bp, Homo sapiens
aagtacctacattgttctctttcaacagtagggttttgtcactgctgctggatgtgttcattaaatgcccctttatttaaaattatgatagctccccatgcttacaagcaaatctttccttctttcattcattcaattaaaataatgaatacctaccaaaaggctgagactgggtaaatattggtgaacaaagactaatactctatattgttttctctattcaatgatctaattccaacttaattctataataccccttctccatacccctcctcactgcctccacctcacactgcttcattctttaaaaggtattctttacttcaagtattcagwtgtgttatacattctgctaaaatatcatgctctaccatcctgaaggcagtctttcaaccccttcttgcttcataagaacagatcttggacctggaacactattttaccaagggttaaagagttttcacagcctgtgctggtcttgtcatcttgtg

SEQ ID NO: 107535 - DNA, 595 bp, Homo sapiens
ggtatcttgctccagaagatgcttttaaaatgccgcattttccaggcttctaggtataaaccttgggggcagggaacctggattctcctttccttttgctggtcaactgtccagttccttctgggtccctgagtctggagtgaggcaggggggaggttatagattgtattttgccggtaggccttaatcctttaatccttttctaggtagtatctcttccccaggtagcctatttaaaataaaaaaatgtatgtctttcagaaaaaattgctagctagccctattctgagtaatattatagaaggcatgtagccagttggatgaagatttattcatggtctttaaaagtttgaaacarattatataggtttccgtttattgtttggcactagtgtatatatatctttagttgggaaaatcttacaggagcatgactcttccaattctagtcttcattcagggtctagctgtcctgtagccaccttccctttgattgttttagtaaacatcacaataacctttatgctcactccaaagtttaaacaatactgtactttttagttgttctttctcaattttatttatatttaacaca

SEQ ID NO: 107536 - DNA, 595 bp, Homo sapiens
ggtatcttgctccagaagatgcttttaaaatgccgcattttccaggcttctaggtataaaccttgggggcagggaacctggattctcctttccttttgctggtcaactgtccagttccttctgggtccctgagtctggagtgaggcaggggggaggttatagattgtattttgccggtaggccttaatcctttaatccttttctaggtagtatctcttccccaggtagcctatttaaaataaaaaaatgtatgtctttcagaaaaaattgctagctagccctattctgagtaatattatagaaggcatgtagccagttggatgaagatttattcatggtctttaaaagtttgaaacagattatataggtttccrtttattgtttggcactagtgtatatatatctttagttgggaaaatcttacaggagcatgactcttccaattctagtcttcattcagggtctagctgtcctgtagccaccttccctttgattgttttagtaaacatcacaataacctttatgctcactccaaagtttaaacaatactgtactttttagttgttctttctcaattttatttatatttaacaca

SEQ ID NO: 107537 - DNA, 561 bp, Homo sapiens
tccttactattgtatctcattcatttgtagaacaatcagaatccagagttgtgctgagtttcaactaggaatgcaactatgagccatcatgtggtactttaccaagaccagcagctgtacattaagcactgaaattatcaaagctcatgacttacacagccagcacctcccgtagcaatcgttctgctgtggactacccaccaacaaaatctttagcaacaggattcattttttccagaccaaatattaagtagtaacgacaacacctcaatgtgcagaggatatcagagctgtgatgagccaagtcaaattcatgccagaaagatacataggcattttgaaagtaaagccattaacgcgtaagttcctcatttttatgtsctacattttccaaatcatcacatctcagaaattacctgaaatcaacctttaactacatcgaatgaaacagagcactctgaagaaaagtccatggataacttttagaccaaacaaattggaacgcttctacataccaaagtaaaatttcttcgacttattcttcttttggtttcagaattc

SEQ ID NO: 107538 - DNA, 598 bp, Homo sapiens
agagtaagtagttgtaattacctctaaaggtaaaagcttatatctattttttacacaaattttttaaccaatgtatctgtagtttctagatgaccatttatgtaatttgtgatgggattgcttgacaaatgagacaggtaaacaggaactgatagtaacgaaaaacagtggtaatgtatttgttcaaagctgcctgagactgctttaaatgtaacatgcctctctatgagaaacacatgattctggtggaagggtagaattcccatgaaatggttaatttactaaagataccaagccatttggtaaatgcagggtgttcagtgctaagagtgaagcaaagtggcaagttgccaaggagagatggaacaggttcatagagatgtatgttgcaagcattttgatttgtggcaaacttgtttgcctcaggaagtcactgacagtgggggaggaaaggaggtaggtgctatagttgtgtctaacaaacactgatccagacaaaacaacaaccaaaacccaggagctgacaytcaatcattaaaggatcccagtcgttgtacagtgcacctatctggccaaccctcaaaagaactcaaagaaa

SEQ ID NO: 107539 - DNA, 595 bp, Homo sapiens
tggtaaaggtctgctgtttataagtggtcttgtgaaaaaattattaagtgatttcatgggtcactcccattccatctgatttaggaaataatattttggtttccaggatttgtgtgcttttcttggcatcctagggtataaagaaaaagataaatctctccagaaatacaagggatagttcactctacttactcgtgtctgcaagattcttacttttcaattacagaacccactagaactggtttaagcagaaagggatctgttaaggattatcagatcacttacagaaatctttggaacagccagagaggaaacyattttaacaaaagcttcagagtaggcatatcacagcatcctacatctaccatttggcactattcatgctagagaatagcataggggaatctagattccgttatgatcaatattccttttgcccagggttcattcttaaattttagtggaggaggaatatgaattgctttcagtttgtgaatatacataggaaatagtgttgggaattgctagatatgaaaacatgagaacaattctggatttttttctcccttactttgtttaaagcatcgtttcctaa

SEQ ID NO: 107540 - DNA, 586 bp, Homo sapiens
taattatcaagggatgcaaataaaaaccacaatgcaataccaccttactcctgcaagaatggccataattacaaaattaaaaaattataaaataacagatgttggtgtggatgtggtgaaaagggaacacttatacactgctagtgggaatgtaaactggtacaaccattatgaaaatcattatggagattccttaaagaactaaaagtagaacttccaattgatccagcaatcctacttgtgggtatctacccagagaaaaagaagtcattatatgaaaaagatacttgcatacacatgcatatagtagcacaatttgcaattggatatatatacatacaatttgcaactaggatatatatatatatatatatatwatatatacatacatatatataatatatatatcacaagttatttttacatatacacaccatagaatactactcagccataaaaaggaatgaaataatggcattcgcgcaacctagatggagttggagaccattattctaagcgaagtcacttaggaatggaaaaccaaacattgtatgttccacttgtaagtgggaaatcaagctatgag

SEQ ID NO: 107541 - DNA, 607 bp, Homo sapiens
tcccagctgattactgattacagtgagtgcactaatgaaggccagttgtgacaagggaccccctcaatcagcaggtttgacccaacaacttcccagcagtcttgccaaaattagaactgctgttcttactggagttacccttcctcactgaagtcttcagtatgcatacttccagttttaaaattgatcgtcccaggacgtttccattaagataattcagcaatattacattcctacatagcaaacccaattatctacttaaattatattatgaatcagtgtgtctgaattcccgaaatgtctttggaaattttatgccraatttaagaacatctaagtcctcagcagggtaaatctactgtacctgcctttgatgctcacacatgatgctttttcccattttttttctagtctatagacatgagtattttaacacatcccctcaactaacatttattaagtgtctatcttatatggtactctgcttgattataggcttagaaagattaataaggtatgacaataccaattgattagtagagtagaaagtcatttcaaatattggcttataaaaattcaaatgctatagtagaggtctgtacatggt

SEQ ID NO: 107542 - DNA, 381 bp, Homo sapiens
caaaaggtttgccacacatacacagaatatgggaaagctgctaagatgagaggaaagaaagagaattttaacaagaaaaagaaagaaaggaagaaaagacagaccaaaaaaaattctcattgaaaatgattttgcaaattaaaaatctgaaatctaacactaataaaaccaatgagatgataaagggaagcggtaaagagatattgactgagaattatcctacrctgaagaaacgtaatcttcaaattgaaagagtgttcctggtgctgagaggaaacatttaaaataaactcacgccaacacacatttttgtgaaactacagaatatgagctacaaagataaaattgtaaatgctaccagagagagaagactgacaaaag

SEQ ID NO: 107543 - DNA, 607 bp, Homo sapiens
tttccccaaaacagtcatctcagcagaaacttggaaaacacgtttcatagatgaatgtatttgagaaatgctatatgatctcactttcttggctattcagtacacattaacatactgaagcgtctgagaaattctacaattaaaaaaattaattttgataaacctgcatgtttcccaaatttgataacaccctttaattcacataatgtttaattgcttatcaaataatgttcttccctttaaacacactttaacactgacctagatttttataacagtatcaataatatgatttatatgatatataaagtataatatgcaatatcaaatttatgtaatacakatgttctatatttatatggtaatatcaataagaatactcttaaaaataaaattttattacaaagtgattggcaaagcagttttatccagttttacccatgtgatttcattgattcataccctctgtgaggtatacagagcagatccctacttaaagaaacagaggatcggatgaggcccagaatgggtaggacttaccaaggtcacagagggaatggatcacttttcatgccattgacttctttgtgatacgatttcaaaatac

SEQ ID NO: 107544 - DNA, 506 bp, Homo sapiens
ttggaattcttgtgcattgttggtgggaatgtaaaatggtgcagccactataaaaaacagtatggtggttcctaaaaaactttcatgtagaatcaccgtatcatccggcaatttcatttctgggtatacacccaaaagaattgaaagaatggtcttaaagagatatttgtacacccatgcacatagcgatgttgttcacaatagccaaaaggtaaaagcaacccaggtgtccattgatagatgaataatgaacaaaatgtgatatatgcaaacaatggataattgttcagccttaaaaaggaaaataattctgacacatgctgcagggataaaacttgatkacattacactaaatgaaataaagcagtaacaaaaaggcaaatactgtatcattccacttatatgaggtatttagaatagtcaaattcctagagacagaaagtagaatgatggttgccagaggctgagggcagggggaaaataggtagttttctaatgggaataag

SEQ ID NO: 107545 - DNA, 262 bp, Homo sapiens
tgagtcctcctgtgaccctaccttctttagatccacctatgggtagagctggggtcacwgtaacagcagtgtctcatgtgtgaggtcctcagcacttctcggagtcccagggcatgtctactgtatgctgatgaacaagctccctcctgcggggcacagtacatgcttcgcccagagctgggaccctgccgtatcaccaccagcaccctggctttccacgatgctatagctgcttggtttatggcaaatggaagttgaattc

SEQ ID NO: 107546 - DNA, 273 bp, Homo sapiens
aatactaaccttaaatgtaaaggggctaaatcccccagttaaaagacagagtggcaagctagataaataatcaagatccattggtatgctgtgaagagaccaatctcacatgcaatgacacacattgactcaaaataaaggaatggagaaatatctgctaaacaaatggaaaacaacaaaaaaaagcaggggttgcratcctaattttagacaaaacagacttaaacaaaggtcataaaagacaaagaagggcattacatatggtaaagggtt

SEQ ID NO: 107547 - DNA, 551 bp, Homo sapiens
tcaataataatgtcttttttggatttacacagaaaaactggatactatgtttactatgtttagtacttttttatttttgtatcaataagtaccttgtagcagaggcayagaaagaggggcagctatttatcagagccaacatctgccccctccttgttccccaccacagtctaggtttgtgggaagatggttacctgagttggcacacaaaattgaaaataaggagtaaagaggaaggaaacagaataaatgttgatagtagcattttcccatccccagatatcttttccttattttctgtctctgtatgacaaaggcattagaaagaaggaaatgtaccttccctaaggaaggtaggggatttatgaaattgtaattatttctggtcaactgatagagtttctggtaaaaaaaaaaaatgaaagagatgactcatatgacttatggtctttacgttctgtgatacttgagtcactgaagtagaactgaatgaattgatccatattagaaatggagtctttcctggaaaattcagctatatgactccttta

SEQ ID NO: 107548 - DNA, 583 bp, Homo sapiens
gcacagctagccagagacttcctatagacaatgaggaaattcaaaaacaaagaatgtagtagtttggctatttctctaggagcccttggggatgagactgagccattttcctgcagctggctgcaaagcaggccactgaaaaagatcagtatgaaagaacaaggcatactgttggtatatgcgtcactgtgggccagagctttttgtcataggattcagtcaaactcaaaatgcaagatgaaagtcatcctctttgtaaccgttttaaaaataatacatagaaaagaagtgaacagaaccatgttttccaaagtcctgatgctaaaaatcacaaaatcttaatagttcctgagctggaaatgtggactgcttggcctgggatcaagtctagaatttgatgttcttggcaggtacatcaagtggttagtatcakcagagaagctaaggaaatactgaagtcgaaggataaaggatgattccctccctgtaatggctttactctgagttacctactgtgtgttgtcctgggcttacttccaggcaattctcataggtttgtggttacatgctggattttgggatg

SEQ ID NO: 107549 - DNA, 583 bp, Homo sapiens
gcacagctagccagagacttcctatagacaatgaggaaattcaaaaacaaagaatgtagtagtttggctatttctctaggagcccttggggatgagactgagccattttcctgcagctggctgcaaagcaggccactgaaaaagatcagtatgaaagaacaaggcatactgttggtatatgcgtcactgtgggccagagctttttgtcataggattcagtcaaactcaaaatgcaagatgaaagtcatcctctttgtaaccgttttaaaaataatacatagaaaagaagtgaacagaaccatgttttccaaagtcctgatgctaaaaatcacaaaatcttaatagttcctgagctggaaatgtggactgcttggcctgggatcaagtctagaatttgatgttcttggcaggtacatcaagtggttagtatcagcagagaagctaaggaaatactgaagtcgaaggataaaggatgattccctccctgtaatggctttactctgagttacctactgtgtgttgtcctgggcttacttccrggcaattctcataggtttgtggttacatgctggattttgggatg

SEQ ID NO: 107550 - DNA, 521 bp, Homo sapiens
atcaaatgaaaggaacggaagagcggaagatcagtctgccaagcgatttctccagaaccagaacttttattttgttggtagaattctcataaaatcaccttttgcctttaccatttyatcattaatttctaggccacatcttttttcttctatgttttttacttaccgtgtaatttaatgatctttctctctctcttccccccgcccccgtatagaaataggtgttacataagaaacacctggagtgcttgagtgaaaatcattattaccagctcctgcctgggattattaattggtgtggaatctttaacagaaacacccaaacaaatgacaatgaagccgtttctagaccacaatttgagttgtgcagtgatatggtttggctttgtgttcccacccaaatctcatcttgaattgtaatcccataatccccacgtgtagtgagagggacctagtgggaagtaattgaatcatgggcgtggtttccaccatgctcttctcctgatagtgagtgagttctc

SEQ ID NO: 107551 - DNA, 521 bp, Homo sapiens
atcaaatgaaaggaacggaagagcggaagatcagtctgccaagcgatttctccagaaccagaacttttattttgttggtagaattctcataaaatcaccttttgcctttaccattttatcattaatttctaggccacatcttttttcttctatgttttttacttacygtgtaatttaatgatctttctctctctcttccccccgcccccgtatagaaataggtgttacataagaaacacctggagtgcttgagtgaaaatcattattaccagctcctgcctgggattattaattggtgtggaatctttaacagaaacacccaaacaaatgacaatgaagccgtttctagaccacaatttgagttgtgcagtgatatggtttggctttgtgttcccacccaaatctcatcttgaattgtaatcccataatccccacgtgtagtgagagggacctagtgggaagtaattgaatcatgggcgtggtttccaccatgctcttctcctgatagtgagtgagttctc

SEQ ID NO: 107552 - DNA, 521 bp, Homo sapiens
atcaaatgaaaggaacggaagagcggaagatcagtctgccaagcgatttctccagaaccagaacttttattttgttggtagaattctcataaaatcaccttttgcctttaccattttatcattaatttctaggccacatcttttttcttctatgttttttacttaccgtgtaatttaatgatctttctctctctcttccccccgcccccgtatagaaataggtgttacataagaaacacctggagtgcttgagtgaaaatcattattaccagctcctgcctgggattattaattggtrtggaatctttaacagaaacacccaaacaaatgacaatgaagccgtttctagaccacaatttgagttgtgcagtgatatggtttggctttgtgttcccacccaaatctcatcttgaattgtaatcccataatccccacgtgtagtgagagggacctagtgggaagtaattgaatcatgggcgtggtttccaccatgctcttctcctgatagtgagtgagttctc

SEQ ID NO: 107553 - DNA, 521 bp, Homo sapiens
atcaaatgaaaggaacggaagagcggaagatcagtctgccaagcgatttctccagaaccagaacttttattttgttggtagaattctcataaaatcaccttttgcctttaccattttatcattaatttctaggccacatcttttttcttctatgttttttacttaccgtgtaatttaatgatctttctctctctcttccccccgcccccgtatagaaataggtgttacataagaaacacctggagtgcttgagtgaaaatcattattaccagctcctgcctgggattattaattggtgtggartctttaacagaaacacccaaacaaatgacaatgaagccgtttctagaccacaatttgagttgtgcagtgatatggtttggctttgtgttcccacccaaatctcatcttgaattgtaatcccataatccccacgtgtagtgagagggacctagtgggaagtaattgaatcatgggcgtggtttccaccatgctcttctcctgatagtgagtgagttctc

SEQ ID NO: 107554 - DNA, 624 bp, Homo sapiens
gttggtgtcagagaattgattggtgtgaagaaaaaaactccatactcttggcgccagaattggtgttataaaaatacttcagagaaggaaaatgaaaaaaggtgactgagttttgaaatatcaattatatctcttcctaactggagyttagaaccattgagggagagtggcaggatagggattaggttcctaacaggaaaagacacattggaggagaggttttggtagtgcaaatacatgagcttgctaactttgctttgcgttgtgcttagcacccagattgatgccttccagggtgcagggcagacctagctccactacatttaacaagtcaccaagggagcagacaagagttcaacatctctgtagtcagggagtgaaggctgagccagccattctcaccagataagtcacatcctatttgagttgaggtgtgaggttatctctaagaaggctgttgtaacttgaatgaagagtgttaataccctaatggcaataagccaacctgaagacctaaaaccaggggtaagcggtctgctgaaaaaacacattccacagcaaaatgtttcagcctttaaccaatggatttggctattgatctaaatgaaaatcattcagaagatg

SEQ ID NO: 107555 - DNA, 560 bp, Homo sapiens
agatgggcaatcacaaaagttattagtatagacatttgatggggtctaatctacctatggaatactgtgttctgtcaagaaaagagagctaatgygtcttctaaatatcaaaagacaggagccaatttatgcctgtcaggcctcacttttcacagatttaaatcgctcctgttagggagagacacattactcccactgcagtcaaatttccctcttgattttagtcaaaaataattttaaaagctttctgacaatttaaaagagcattttaaaataaatggcattattttagaaatccctactggataccaggaattacctataattagtgataagttttaatattgtacattgctcctcttttatatttactatattttaaagtaaaatgtctttaaggcatactcccatccgttattaaatcattttctttgtacatgtttaagagttatataaaacttttgctgtctctaatctaagtgaactttattatttttgttgcctgaatgaaaattcctgatgatatttcgtgggtcaattagcttcctaatatttgcagg

SEQ ID NO: 107556 - DNA, 570 bp, Homo sapiens
ttatatgcgacgaatagtttgttatttaatttcaaagtgcattgtattaggttcaccaaatgtttttcttgcagattaaacttatctctataattatgcctatgtattttatgtcattatttctctcctaacacctgggacaatgcttgacataaaatcgggactctaatgatgagtcaatttttccaaaattattaagcagaggtttgcaaatcatgtgcatcaagttgattaagtatctcatctagtttacactattaatccattcagttaatcattttactttaacatccagcccactccttatrtcaattactataattttcaattagcagagaccaaattaaaggaggcttgttacatgcattcacctgtcctcaaattatgacttgttagattgtgaagctatcgaaaaatcctctaaatccagttgtctacctggccaaatacatcccttttaaataattccttttttgaagtgtttacatatttttcttggtgtgaacttcactgtctttaattaatttcgtgttttaacgttacaacgtatttctcttactgaatagaatt

SEQ ID NO: 107557 - DNA, 529 bp, Homo sapiens
ttgagctaggttttgattttcagatccttacagtataaatggagacacagagtgtctttagctgaataccagctgctgacaaaggtaccctagatctgggtcaggactaactcaagtcctgaatgctatctttgagtgttagtgttcattggaatctgattctaaccagctaagcacatccaagattgaaatagaaatcatcaggaatcctggaacagattgaagtacctggaaaggtcctagagctctttaatgagtttgctaagtgaggtgctggctctgcctctgactactccatggagtagctgctgtttgttttggtcctgctttgccagggcgcagactgaaagacactgaggcagtsttgggcttagcagaaaataatgcaatacccttagccctttgaatccataggttcagcatttggggattcaaccaactgcggatacaaaaatacttggaaaaaaatgggaggttgcatctgtaatgaacatgtaaagatgtaaaaaaaaaaaattatcattgtacc

SEQ ID NO: 107558 - DNA, 529 bp, Homo sapiens
ttgagctaggttttgattttcagatccttacagtataaatggagacacagagtgtctttagctgaataccagctgctgacaaaggtaccctagatctgggtcaggactaactcaagtcctgaatgctatctttgagtgttagtgttcattggaatctgattctaaccagctaagcacatccaagattgaaatagaaatcatcaggaatcctggaacagattgaagtacctggaaaggtcctagagctctttaatgagtttgctaagtgaggtgctggctctgcctctgactactccatggagtagctgctgtttgttttggtcctgctttgccagggcgcagactgaaagacactgaggcagtgttgggcttagcagaaaataatgcartacccttagccctttgaatccataggttcagcatttggggattcaaccaactgcggatacaaaaatacttggaaaaaaatgggaggttgcatctgtaatgaacatgtaaagatgtaaaaaaaaaaaattatcattgtacc

SEQ ID NO: 107559 - DNA, 477 bp, Homo sapiens
tatacttgtgacataggtatataccaaaagcagtacctcacacagtaactgcctctctcttttccaaaccttcaatgctgttaaatcagtgatggaaaatgctgctayttcctcagaagggtcaccattcattgtcttcatttgtgcattggtatatgtgcccttccagttcaatgctacaacccatcagatcacctccttttctgtcccatttggcagccagtctcaggactgctgctgtttttccatctgtcaaactcaatctaccttcagcatacaggcagggcctggagactggactgagtaaagaacaataaagtcaggctggtttcaccctgaattttatctactttgaggggaaaaaggaattctaataacatggaaaattccctttgcaggagtctgcctagaactgggcttccagccttgggagacagcaaccccattcagtgaacagcttttgcagagtctgcccag

SEQ ID NO: 107560 - DNA, 611 bp, Homo sapiens
tgtacacacctaaagttccttctttaaagagaagcagtagattgcaagctccttgacagcaggccctgtagtaggtgcttattaagctgaactgatagacttgtagagtaaggcagcctctgctgcaatcttttccaacctctgtcaagtgtgagaagacactcacccacctcccttttaagtagacatccagcctttgcttgcatatctcttttggcagggggctcacagtttcctaaggtagttccatctgtcagtaacccttgtatattgttctcaaatcggcctttttgggacttgtactcattggtccattgttacttaaacagttaatttattgaggacctagtaggtggcagattctgggttaggagctggrgacgtaaaggaaaccttgtacagaactggctcttgacagagccatgttagacaagagcgctcagatctttagactaatgccttttactcaaagggagaaatgtttagcctttctcagactcctcttttggttcctcttagtctctgcttctccacgcttccctcttgtggcccagatgggtctcctgtagcattttctcccccagcctgcccgtgggtggcttcatttagca

SEQ ID NO: 107561 - DNA, 568 bp, Homo sapiens
tctaatggtcttgatttcctggtctgcctaagtccaaaaaacaatgactgatgtttctgttatttgtgtggtctgcttctctgagtttacactgaatgatgtgttgttccccgctatttctgttcccagtcagcattactgctgagtttcaattactttatctcatcacaaacactctgccactactgtcagcgttagtctattcttcccatcrtgtatatatttttttttcccatggatgtgtggaagatttctcttctggtggacagatcccttctgcttctgtgcctgctgcttctgctgtgtggtctgtttgatgaatgtctggactgctggcaagaaggcaggctgcactccttggcatgaagctgagcgcactcactgtggcaaagtgaccatgcattaccacacttgcattttaggtttccaggtatcttattccttgacatcttcttaactccaagcagagaggagtattgattgaaatgtttaggattctggggcagatggatacattcatgaaagggaggccctgagagctggcacagacagaccaaaaatgcagtca

SEQ ID NO: 107562 - DNA, 563 bp, Homo sapiens
tatttgtaaaatgtagaaaagtgtgctggggaaaataaggaagactagtaactggtgttaacaagggctgaaaaaaaacatacagaaagactggtaacttcatgtaattaagctacaatctaccttcagtagttctcacaatgttgcttaagttatagaggaagataatcttttcaccaacagtaacaaactaagagtaacttgtagggataaasaatttccaaagaaaaactcctgccttttaaaaatgtaccattagcccaatcctgatgtctacccttgtttaaaaagtagattacttaatctctggatagtctatcatctaaaataaatagttgaatatatatttttggtctgaacctagtagaggttccataaacacatggttcactgaatccaagtcctttaattgtgcttattttcctttctgccaccaactttgcacgattattttgctttaatacatttccatcagggtaaaccccaaaaaatgtagagatgaaaatgttccaagagggtaaaggtaacgaggcatgtgaaaatgtttttcaacaaagttgaaa

SEQ ID NO: 107563 - DNA, 580 bp, Homo sapiens
atatcctcttagctaccattgacacaggagatgcagagatctcaataacctctgaagtctctggcacactaaaggacagcagtgctggtgttgctgacgctcctgcctttccacgtaaaaaggatgaagctgatatgagcaattataattcctccatcaaatccaatgtccctgctgatgaggctgtccaggtcactgattccaytattcctgaggctgaaatccctcctgctcctgaagaaagcttcactactattccagacataactgcccttgaagaagagaaaataaccgaaattgacctaagtgttttagaagatgacaccagtgctgtggctacattaactgactctgatgagaagtttatcactgtgtttgaactcactacctctgctgaaaaagacaaagataaacgggaagatactctgctaactgatgaagaaactaccgagggagccagtatttggatggagagagatactgcaaatgaagcagagacccattctgttttgcttactgctgttgaatccagatatgacttcgttgtccctgcatcaatagctacaaacctagtggaaga

SEQ ID NO: 107564 - DNA, 640 bp, Homo sapiens
aggggccctcagatttaaatacaagaatgttggcaaactcttacactgaagaatgtgattttacatgttcataagggaaaaacactgaaaacaatctacaattgtagtcacatgtaattaattacacttctgtatacccatatgaagccatagcttgcatcttttaaaatggttctaaggaagaatatttaatcaaatggatgatattttcatacaactctaagcaaatttacacagtggtatgtatgcaatatacacatgcacacacatacacacgcaagcagaatgtctggattacatatatcacaatatataatctctaggaaggactgcaggtgattttgtttcattctctgtgctttcgtgcgtttttaaatgctctccaatcatccagaacataaactgtacacaggagaggatgaatgtttgtcaaccccattaactagaaaacctggaagccaagctaaatctttcactcttacttgsttcccatacccaattaaaatattacaagtattttgagtgttccctatgtatcagacactactttatttttcatttacaaggcatgtatatgcactgactatgttccaagcaccatgaaagtgttttgagacactgtagtgaatcaaatgacacc

SEQ ID NO: 107565 - DNA, 567 bp, Homo sapiens
catgatgtcttctttacattgttatttcatcctggttcaagatttaatttaatttttatttgcaaaatatcggagtctctaatttgcatatttataaaaacaagtgatctatacttttgctgtttgattgctcatggtgtagaggagatgggtggataaaataggatactgcagtaaatggcagaaatatgtagtgtgtccagacaggctgccagaccagaaaggattaatgaacaatttgcagggtagtgattgtgtgtgtttaactttatatgcaaaattgactgtaaagttctgatatttagttgatagcgcatacaaattgaatgaaggattagaatggacttgaaacaattgtttagcagttttacaaagggactgtaaaagcaacagaaagatgttggtgcaggaactgtgtttgccaaacactgtaagatgaggtgatttttgatggtgctttcttgtaaggggaaaatttggggcagtatatgtgcttacaatgagatgggagaaatactacctttgctggttaaaatgcctgcargtaatgaggtgaggtggtggtta

SEQ ID NO: 107566 - DNA, 633 bp, Homo sapiens
cactatatacggtacttataccctatataggcctctaggcctggaatttgctctgggtgagtcagtaagtgagtggtgattaaatgtgaaggcccaggacattactgtacactactgtgaaccttataaatactgcaaacttaggctactctaaatttatgaaaacatatttttctttcttcaataatgaattaaggtacaaaaatatctttagaatataaagatacaaaaaaagacacaaaaacatctttattctttatawcctcattctataagttttctctactgttaaatataaatactttttttacttttaaacttttttgtttaaaaccaagacacaaacatacatattagcctaggcctacccagggccaggattatcaagacatccctagcaacaagagtttttcagctccattataatcttatgagatgaccatcatagatagttaggcattgaccaaaacactgttatacagcgcatgactatacttattttttgtcaattgtcgtgctaaatactggcgatttggggaaaatattgttgtgctaaatactagtgattaagaaaaaagattctctttaatgatcttacaggttagataggggagataaacatatacaaaattt

SEQ ID NO: 107567 - DNA, 483 bp, Homo sapiens
tatttttatacacatcaatcaacctcttttcaaacccctcctattcccagcctctggtaactatcattctactctttatctccatgatatcaattttatatagctccagagcacacaagtacgtaactgcggtctctatccctgacctactgacctgaaacctggcccccactttgatttccaggagcataaaccgctcatataagtgagaacatgcaatagttttctttctgtgcatggcctagttcacctaacattatgacctttaattccatccatttagctgaaaatgacaggatttcattcttctttatggctgaatactattctattgtgagtatattcccattttctttatccrttcatccattgattgacatttagattgattccatatcttggctattgtaaatagtgctgcagtaaatatgggggtacagatatcccgttgatacactgatttttttttggatatatacccag

SEQ ID NO: 107568 - DNA, 573 bp, Homo sapiens
ttattatctttgctcaaagaaaaaattatcacaattgacattttgaggacaagacatctgaatgtaaacttgatcttaaaggatattaaggaattactggtaatttgattgggtatgacaatgatcatataaaaaatgccctcatgtttttagagggaaagtaaattacgtaggggtgaatatcatgatgtaattacataactactgtaaacttttttaaatagwtcagaaaaacaaatggagtaaatattgcaaatgttaatagtttttaaacctatgtgatgggtatatgatagctcattaaactagtctacttttatgtatattgaaaatttttcataataataataataaaaaccttagccaggcacagcagctcatgcctgtaattccggcactttgggaggccgaggtggatggaggactgcttgagcccaggagtttgagaccatcctaggcaacatagtgaaacctcctctgtacaaaaaatagacaaattagtcaggcatggtggtgtgcacctgcagtcccagctacccaggaggctgaggtgggaggatcacctgagcccag

SEQ ID NO: 107569 - DNA, 636 bp, Homo sapiens
tatttggaagctttcaggaagttttcagttattattttattaaataggttttctatgcctttacccatctcatctccatccagaactcccagaatttcagtttttggtcacatatgtgtcccatatgtcatgtagccttgcttcattcttttttctttctttttgtctgactggattattttaaaagactattcttcaggttcagaaattctttgttttgcttgatctattctattgttaaagctgtcaattatcttttgcatttctttcaatcatttattccttccagggtttgtgtttggttctttgttatgctgcctatctctgttgaatttctcattcagattatgtattgttttcctgatttttttgtattcattatgtgtgttctcttgtatctccctgagtttctttaataacattattctgaatttttttcaggcatttcatagattttcttttcattggaatctgttgctggagaattattgtgcttctttggagatgttatgcttcctttttcatatttcttkcatccttatgtgactatctgtgcctctgacataacagtcacttcttccaattttatggattggcttttatatgggaaagaccttttcttatagctatatctac

SEQ ID NO: 107570 - DNA, 523 bp, Homo sapiens
ctcccccacttccccaaacttctccatcattaggccaccacaaatccactttctgtctctatagatttgcctattctggacatttcatataaatggaatccagccggacgtggtggctcacgcctgtaatcccagcacttttggaggctaagccgggaggatcacttgaggtcaggagttcaagaccagcctggccaacayggtaaaactctgtctctactaaaatacaaaaattagccaggtgtggtggtgtgcacctgtaatcccggctacttgggaggctgaggcagaagaattgcttgagactgggaggcaaaggttgcagtgagccaagatcacaccactgcactccagcctgggcgaccagagctagactctgtcttcaaaaaataaataaataaataaatggaatcccataatacgtagtctttgtgactggcttctttcacttggcataatgttttcagtgttcaaccatgttttaacacatatctgcacttcatttatttttactgctgaataa

SEQ ID NO: 107571 - DNA, 580 bp, Homo sapiens
ataaggaagccaccagtgccattgctgcagtgacgtggccattgaggtcagtcatgctgctgtccccactgcaaatgctgctgcacccaaagcaggcatctggacattggcatcctcacaatcatgccccctggagagcaaaaatagccagcacccaaggaacatggctatagcctgacttcctccttccccatctcaccacagcgaagctcactggtgggacacgttttgctaaactagaactccacttgcagaatcccaacctctgcatttcagggaggcacacagaaggaaggtggggtcaggtgcactctgctccatgggctattatgatattaaatgagatgatgcaggcaatggacttagaacagtacctggaacgtcatgagaatcataaatggatgttatttatgttgtattgttacctgctgcaggacttctcagagcctttattctgccaacatatayaattttttttcctggtagtaaaatttgtataacctgctatgtcttctattttgttttctcagcttagagacaaatcttagattcaattatagcacttttagagagcccagtg

SEQ ID NO: 107572 - DNA, 578 bp, Homo sapiens
cgaggcaccattcttggctctcttggtcaggtgaggttctccttgttgcttccataacaccatccctcaatgtgttccttccttgtattgcaatgatgtttagatgtgcctgcctccctcacaagacttggagatacatattattaccaccattgccctcagttaagaggcaagactgttggggctcagagaaattaagtcacttctctaaggtcacagagctagtgtgtaatagagctaagatttaaatctatctcacctcggtttcactccaaagcttgtaattttttttcatttcagactgtttctacaacaaatagatttctaaagtgcctctacagaaaatgtgttttctmtaaaatgaacaccaaactggacacttatgagtgcccccaagggtcttgaggtgatggaatagtctgcctttcaaagagaatgatcttacaatttacaagtttgcctctcaattaactgagcactgtggctctttatttaatgttatttctacataatctaattttggctgcaggttaatggacccatagggagttactgctagttcagtttcaaacgaattc

SEQ ID NO: 107573 - DNA, 573 bp, Homo sapiens
tttgtgtatttatagtagagacagggtttcgccattttgtccaggctgttctcgaactcctggcctccactgatccacccaccttagcatcccaaagtgctgggattacaggcatgagccastatgcctggccagcaatgaattaagggaaaaattaaggtgattttttttttccttttcagttcttgggagaatcaggacaggtgtggatgcaaagtggttcatatcaactgctcctacatgctggacttgaaagaagaccctagggccagtcggcctagggatattcagctaattgaagagaaaatatgatgaaagggttttcctttaaattcaaaataaaagcaaataagttgaaggtcacaaacacccaaaaatgtgtattaattataagtgcctaagaattctgcccccaaagacatctcagctgtcctggttttacttcccattgatccccttagaaagtctgtcctcatttaatagccaaagatgcccccctctaaacctgcaggtgagagctccacaggtgacccaagtcagaaagatgaaattggagtagacttggccatgatg

SEQ ID NO: 107574 - DNA, 573 bp, Homo sapiens
tttgtgtatttatagtagagacagggtttcgccattttgtccaggctgttctcgaactcctggcctccactgatccacccaccttagcatcccaaagtgctgggattacaggcatgagccactatgcctggccagcaatgaattaagggaaaaattaaggtgattttttttttccttttcagttcttgggagaatcaggacagktgtggatgcaaagtggttcatatcaactgctcctacatgctggacttgaaagaagaccctagggccagtcggcctagggatattcagctaattgaagagaaaatatgatgaaagggttttcctttaaattcaaaataaaagcaaataagttgaaggtcacaaacacccaaaaatgtgtattaattataagtgcctaagaattctgcccccaaagacatctcagctgtcctggttttacttcccattgatccccttagaaagtctgtcctcatttaatagccaaagatgcccccctctaaacctgcaggtgagagctccacaggtgacccaagtcagaaagatgaaattggagtagacttggccatgatg

SEQ ID NO: 107575 - DNA, 537 bp, Homo sapiens
ctctacccatttgtgattctccctttctttttaatttacctttctcttcttcaactgcctatcacctacaaaacaccttcatttttttcrggcccgctccgctctgatacccagtctttgtgtttgtattgtataacgtttggaggttatttttttttttttttggtaacgctttattgaggtatacatacctcatactgaggtttacatactgtaaaattcacccttttatgttgtaaagttggttttagtatatttacaagatgttgcatccatcaccactatctaactccagaatattttcgtcatctctaaaagaatcccatacctactagtagtcactcccattctccccttcccccagctcctggcatccagtgttcttctttctctctctatggatttgcctattttggacatttaatgtaaatggaattatacagtatgtggtgttttgtcactggccttttttttcacttagcagaatttttcaagtttcatccattatagcaataatattacattttatggatatac

SEQ ID NO: 107576 - DNA, 472 bp, Homo sapiens
gggtcttaaacttaatgccaamacatgacctatatgacagaaatttgatacattgcacataaaacattaaaaaattttgttttgtggaagttcaagggaagaggatgaaaagaaaagctacagactgggataaaatatttgtgataagatatacaggtgtcaaataaacaatgaaaagatggtagatatcattaggttgttagggaaatgcaagttaaaaccacaatgagatatcactatatacctaccagaatgggtaaaataaaaaataatgacaacaaaaaatgctggcaagaatgcagataaactggatctctcacacatttttggtgggaatataaaatagtacagttgctctaaaaacagtatgacagtccttacaaaactaaacatgcgtttaccatacaacccacgaactacattgttgggtatttatcccagagaaatgaacacttacgcttattcaaatacc

SEQ ID NO: 107577 - DNA, 538 bp, Homo sapiens
gaattctagtccctggctctgatactggggaggtgtgatttgatgacctttaggcatttggcaccctgagatgctgaggccttggacaaatctttcctctccctttggggataggggcttggtttgatcatctgtaaartgtcctgagggagtaagtggtcaggaggggtgaacttcaagctctccaccagttctaacattctgcctctgtgcttaatctctgtcacccgggctggagagcagtggcatgacctcagctcactgcaacctccacttcctgggttcaagccattcttccacctcagcttcctgagtatctgggactacaggcatgcaccaccatgcccagctaatttttgtctttttagtagagacggggttttgccatgttggccaggctggtctcgaactcctggactcacaggatctgcctgtctccggctcccaaagtgttgagattacaggcgtgagccattgcacctggcccctagagtcttgatttatttaggcacctatgactccagggtagacaggaagt

SEQ ID NO: 107578 - DNA, 567 bp, Homo sapiens
  misc_feature (1)...(567): n = A,T,C or G
ttttctttcagtttcaaattcaaaaatcttggagaaaagactcattggctcttctgggtcaagttctttctcaggcaaagtagcagaagcagggtcacactgtaacatggctgccctctgcangcaagaagtaatccgacaaacttagagactactatgcaaacatagaaaatgctgctttactataagcctttcttagagaggaacaaagcatactggcaaaattaaagcaatcaaaatcctaagattaactgtttaaattcatgttccacaacaaatttaataaattttcaaaaaactactcacacacacacacacatacacatgtgtgcacagatagttatatatatwtatttatttatttatatttttatatataatacatttgaatggataatatatacaatgcattttaaaagctttccctggaaattaatttgtgtcactattccaactgaatttactttataacagtcactcagtggatcattaacattatcaaatagcttgtatgctttcatattaacagtttgcataccctgggaacccaataaaaagtgagttaac

SEQ ID NO: 107579 - DNA, 553 bp, Homo sapiens
ctcatctctttctacattgtgaacattgatattttatatttattgcctatcgtgtgagaagtttcacacttgaatggatctggtaaactaaacaacaacaaaggaaaatgcaaaacaacaaaagttaaaaaacaacttaactttctcaatttcttctrttttttgtcatttattgtaccagttgtgggtatgtccagtaattcagaataaagcaacactttgaattttatagctagaccaatatttgttcctctttaattagtttctgtggatttaaaatcacattgcaaccttctgtctctatgttcattttagaagaaatcagtactgaggtttccttctcaacatgtatccacaactgaaaagtctataaagtttattagacctctttcacaaaggtcatggaaagagaaaataagagtgctttattttagataaaggctatgtattataagaagaccatgtcacctattgcagtcagcatttttaacagcaataataaatatgatggtaagtcaacatggaacacataatttaatactagtaattatat

SEQ ID NO: 107580 - DNA, 553 bp, Homo sapiens
ctcatctctttctacattgtgaacattgatattttatatttattgcctatcgtgtgagaagtttcacacttgaatggatctggtaaactaaacaacaacaaaggaaaatgcaaaacaacaaaagttaaaaaacaacttaactttctcaatttcttctattttttgtcatttattgtaccagttgtgggtatgtccagtaattcagaataaagcaacactttgaattttatagctagaccaatatttgttcctctttaattagtttctgtggatttaaaatcacaytgcaaccttctgtctctatgttcattttagaagaaatcagtactgaggtttccttctcaacatgtatccacaactgaaaagtctataaagtttattagacctctttcacaaaggtcatggaaagagaaaataagagtgctttattttagataaaggctatgtattataagaagaccatgtcacctattgcagtcagcatttttaacagcaataataaatatgatggtaagtcaacatggaacacataatttaatactagtaattatat

SEQ ID NO: 107581 - DNA, 583 bp, Homo sapiens
ggactaaaaaaaaaaatgttgtacctatacaccatggaatactatgcagccattaaaaaagaatgaaatcattctttgaarcagcatgaattcagctggaacccattatcctaagtgaattaacacaggaacagaaaaccaaataccacatgttctcacttataagtggaagcagacaatgggtactcatagacataaagatggcaaaaatagacaatggggactattgggggaaagagaagggagagaggaaagagttgaaaactattgggtactattctcagtatctaggtgatgagatcaatcataccccaaacctcagcactgtgcaatatactcaggtatattgcacatttctataataaaatgtgaaattactttaaaaaataaattgagcaagaaccagcaacttggaaggaataaaaaaatgtcacaagcaccacaaagaagcagtcaacaaaaaaagtgagagttaccagattttagccaatgactgatgcttacaatggtagaaagctggagtgtgtgactcaggaactagaattcctttctagttccccgactgtctttcaacacagagaga

SEQ ID NO: 107582 - DNA, 592 bp, Homo sapiens
tccttccatatcccctggtatttctctttttctatactctaatcacttatacagtaagtaattatttaatatctccgttcttcactaaattatgagcatcagcatgggtgttcagtcacattcttttactgattaaatatctatattttctttagaatgaaatgtgagatccttgaaatcaaagatcacatctttgcattcccatggcccagtactgtgactgtcatataataatttctaaaaagtatttcatttaatgatgaagttgtaagagaataakgttataaatcatttaagaaattgagaagacctttgtggcaccaatgtcatggcaccatggtagagttggttaactctccacaaaattccatgcttaccttttcataatttggtagtgttattgggagacagttacccagccagggcatgtgaacaggaggaggcctataacttttaggcttctgttttttgtttttttgttttttttaataaagtcatatgtcttcttcactcttttctcttcctctgattggatacagaggttttcaaggccccagaagatgacacctcaccaaagcagagagggcctggt

SEQ ID NO: 107583 - DNA, 594 bp, Homo sapiens
ggcagtggaatggaacatagacctaaagctaacatttacaaatagataaggagagttgatcccaagaaaaaataaaaatcaaacaggcagattcaagtctctttcttttagtcacccatctatctctttgtcagtattgaacacttattatgcttcagagccagggctaagggctatggagaatayaaacatgaataagacagcccctgtctgtaacaatgaccttctagaacaaaaaaaaagaagatgtgaacaaaaataactcaatacccaagacagtgtgagtatcatgagtgatttaaccttttcttaggattcagagcagagagaaaccattttctactaagaagcttcatggcaaaggtagcataggaacgcgaacttacgggatacattcactttcaaagccactcatccaaaaataaggaatcccaaagcatcaaataaaacccctccatacatgcttgatggctcctgatactcagtaaatgtaattgacttgtttcccttccatttctagcagtgaggtcacagagtttcccagggttttgcctgatttctttcccactctctagtttcttctgaagatgcagt

SEQ ID NO: 107584 - DNA, 669 bp, Homo sapiens
tccacgtctaggtaagcaatgctgtctctggaagggcccagagtcccagctgtggggttccaggtgctgtgggagtcagggattaggtctgtcttccccaccctgtgccccattttggacctgctttgctgagctaagggcactrcagcagctctcttgaacaatagtgtatccatctgctagggctgttctaatggaatactgtagagtagcttatacaacagacatttgttttctcacagctctaaagctgaaactccaagtttaaggtgttagcaggtttcgttccttctgaggcctctcttggcttgcagatggccacccttgctggggtttcacatggtcttttctctgtgtgcagcatctctggtatctcttcctcttctcataagaagataagacatactggattaaggccacaccttaacggcctcctttcaactgaactgcctctttaaagagcttatctccaaatatggtcaaattctgaggtaccaggtgttaggtcttcaacatatgaatttggtggtagaggaccacaatttagcctataacaaaaagcacagttgcattcttactgtaatatttcattcttcaaagcccatttgaaagacccggtccaaggaaaaaaatccctacacttttatcttcccaccaaaagtcaactaa

SEQ ID NO: 107585 - DNA, 598 bp, Homo sapiens
ctgttttcatgttttaactctttactttagagccgaagttcctctttccaacctgttaagaagacaactgtaagttctgatcaagcttgactgggattgcaaatgcagaaagaaatatctctaggcaagtgcagtagtcactctygcacaaaaacttctggacataatctgtgcaaatcatgacagggtcttggaggcaatggggtctttaactttgtctattccatattttttcagagacgccaccggcaatctattagagcagtgctcacaaccttttccaggttgggacatacccagcaaaggataatttttgtaccacacaggaataaaaatagaggctcctaaaggctagaagaagcctgccagggttctctggacactccaggccctataaaaaccttgccatccacatggctagggggataaaagctttttccaatatgaactgattcatggcacctcagtatgctaaacataaaacgcccccaatattagtcctttcctttttattaaagatagcaatgggatcccaattatcaaaagtcattaaaatataaacatcttaagcaaggagaaaaaaattgcctgaaagggt

SEQ ID NO: 107586 - DNA, 578 bp, Homo sapiens
tatatatggagacaatcaggaaacctccaagtcagaagaagaacaaaagttggggagagactctgggctgcaatttttgtggctattgcagggaagaggatcattagaaggctgactccccctaaaaaggggattcaacatccagaaaaaggaggtgctcacttaggaaaaagcccatcggcaaatggtggaacagagctatggctctggcagtagatagggatacccagaggcgcccctaaatctctagagccaattaaaatttccccacagtagttctgggtacaacagacagtggggaagaaatggattgatttttttttgtcaactggggtgtgacttattcagttcttaacaccccagaaagaagaagcacagaggtgactgtacctgtgacaggagttacagggagaatacaataaaaaactttctgacagcctttagaatgtcaattgggaaacctgkaattgacacacaggttcctctatatgccagaatgccccatatctctaactgggacaagacctgctatgtaagtgaaatactcgagtgacttttttcctagaaaaaatagcagt

SEQ ID NO: 107587 - DNA, 560 bp, Homo sapiens
ggcccatcaaaactactcagttctgccaatgtagcacagaagcacccacagacaatacataagagaatgggcatggctgtgttgcaataaaacttccttttcaaaaacaggcaactggcccgatttggccccaagtgatagtttkctgtccccggtgtaaacaacaaagttaattctttttcctgccacctatccattgtggatcactgtggtttattctccacatttctttctgaaccccaagtggatagagctgtcatcatcttgagtattggttgatgttgtgcaagagaaagaaaaggcttttcacttgccttagcaattaagggctcagagacagaagggacacattattttagctcatgattcattggctagaattagtcataggaccacaccttaccataaagcggcaatgagagctgtgataaaggttcagattaggtgttgaaagaatacagtgggccgggtgcagtcgctcacacctgtaatcctagcactttgggaaccgaggcgggtggattactttaggtcaggagtttgagatcaacctggccaac

SEQ ID NO: 107588 - DNA, 603 bp, Homo sapiens
tcagctacccttaaatatggtgtataagttacatgctatcgagtatgtagtcaaattattataataacagtgtgtgtgagagaaagagagagatgaaggctattaatgagttatagattgggtacatttgaggacttaaagagttggaataagatctcaggtctttccattttaataccagtgtcctttttactagggcatgttccctaagtgggggtttctactaccaccactgagctgtctttaaaaatcagagccctgtgactcagaaagtttctaaatgttggagtatttgtctctatagccatcttcrttacagagcaggatattcagcactgaatcaactcccctgtttggaatcacatttcaaagaaaatagaccatagagatatgatttgtcccctctttcattcagtggttcagaataagaaaggtcatctcactggctacatagtaagtgtgtggaagtgtgagtgagtgtgttggtaaaagccacaatgttgacttcatatgggcattcattctcatctccatctcaacctgtacaaaatttatacatccttcaatgtccaattcaaatcttaccttattgtaaaaaagctt

SEQ ID NO: 107589 - DNA, 574 bp, Homo sapiens
gaacacgttgcagtatagttggagagaatataatgtatacaaattttagtcctgctttcagttctctctcttgtgtcaaccagatcagacatgttaaaaaatctagttaggtgtaaatggtggctatttttctactaaggtgggtgttaggctgctaatagactgaatatccagaagttkttagaaaggatgaagctctataccattttaccaaataaatttggatctctatgaagaggaattgagtccatgtttaacattttgcctatgaagtctcaacatgccctgttctttcattttagcagtgatattttagtatagctctttaggatacacatttttggggtacaaggtcaagactgcaatgtacaggctgtcagtggtagcttcttagcctaatggagctgaacataatcttgaggtcatgacaattccagggtaggattagtataggtcttcataattattaactgtaaagcctaatagagtagtttcaacaattgctaacatcagcaattgttaacattttgtcattcttcattctttctctttctcccttcctctccccacctac

SEQ ID NO: 107590 - DNA, 568 bp, Homo sapiens
caaatatttaactctggttgatgtgacatttcccaaactatctayttgggtgttatttctctatccaaaatattataagttttctccttgccttaaagaatcagtccaatgcatataatctttttctcagttttattgaaataatctttccaaaatactgctactacagtctcattcatctattataaaactctcatgttttccattgcctcctagatagaatccaaatgtgccactctgaattccaaaaccttatataggctggtgccaattcatcttcctagaattttgttgccagtattccttaggacaaacactgaattctaatcagactgcttgattaccatctcttggaacctccacttacattctgctttctgtattcttagctcatattgttccctgtgatttagactatctttctccttataatctagttgtcttatataaatcttgtaaacattttaatattccacttaaatacatatcaagtgctttgtgggagttaaaacacacttgttctagcagggaataaggccaaatagccagggagcaaagacccaaaata

SEQ ID NO: 107591 - DNA, 548 bp, Homo sapiens
tattatatactgttgaaggtgtaaattcagcaagaggatataacaattgtaaatacatatgcacccaacactgtagcatccaaatatataaagcaaatactattacagataagagagagactccaataaaataatagttggatacttcaacagcctactttcagcattggagatattatccaacagaaaatcaacaaagattcatcagatttaatttgtactatagatcaaatgtatctaatagatatatatagaacatttcatccaatgactttagaatacacattcttctttcaacamctggatcattttcaaagatagactatatgtcaggccacaaaacaagtcttaaaacattcaaaaaaactaaaatcatgtcaagtatcttctctggctacaatggaataaaacttgaactcagtaacaagggaaatttgggaaattatacaaacacataaaatttaaacagtatgctcctgaatgactggtacatcttgtaagcttgctttattctttttccttttgtcttctctattttcatgtaggct

SEQ ID NO: 107592 - DNA, 530 bp, Homo sapiens
gcctttttgaactaactttagaaacataatgagtgtggaccaccttcaggcttgcccgaatccatcagccaggccctggagtcctgggattatgccttctgggtaagataaggcaggaagccggctccaacctcccacggaggcccactgcttctggagagctgagcagtcaccccaagacgttaaaccaatctccgtgggatgcaggtttgttccgaagtgcatacaacgtagtggcaacaacaggcaggtttaacttgtgttctccaatgaaaagtctccatccggcagtctctggccatgattggacagagtaattctgagaggctccatgaacggcagcgaaatcmgaggaggtggagaccctggatgagacaccaagccccctgaagcttcagcttgcccctctaagaaggaagcagagcaagaccttgcagcccatttagggagattagggatcggctctccaaggcacagccgagctccgtgactgggagccactatcgcggatgctattgttctttttttgt

SEQ ID NO: 107593 - DNA, 567 bp, Homo sapiens
gcagttttaagaatgtgaagacaacatctggctttgcttctcaggcaccttgagaagttagtacaatgttctaatatgttaaattaaaatgtgatgattgaacattattccaacaccctaactccattatatttgctcgaagaaaacaaaaggacatggagtataaaggtgaacaaagcacagtgaatgatgatatatgttttagtttaagtgcaatttatgcatttcagcacaaatccccttggtgaaagccattttcagaaacaaactttaggatatgctgcttcaaaactgctgtgtttagctgatagtccataaatcctctgttggagatattatggtctacagtggattctagttaattggcacatctcagtggaaattgaaatatgccatttagacaatgattgtctcatttaaatacataattgctcttatgaactatcagatacatttgaaattagaaaggatttttgaaatgcaaaacattgaccaaattgtrtatgtacataattaagacaaattagaaatgcagatgttaagcgtgatacaaaacattatcatcaa

SEQ ID NO: 107594 - DNA, 512 bp, Homo sapiens
actactgattgtgagtttaggtagttgatttctctatattttaactaaacacagcttattattatccaaatgaaaaggaagtaatttttaatgtgacactaatcttaatcttaaaagttttgatatgttatttaacacaacaaactgaagcagtctatttccatattaaaacattattttattattaatatttaataatctttcagtagagtagagaacaagtaaagtcattaaagaatttaaattcagtatttgccactcataaactkgtttggaagataatttatttgtatcctagtttacttacctgtataagaggataaaaacatcacctattctatgaggctgttgtgaggcttaaaagtctcagaagagtataaacatgtagcaagtaatcaataaatttaagctattatagttattaaaaacaataagtattcttataataagggtttcttaattattttgattttgaaatagcgaaataacctccagttcaggattttttctta

SEQ ID NO: 107595 - DNA, 433 bp, Homo sapiens
ctgctttctggcttgcattgtttttgatgagttatctgctcacatagtatcctgttctgctgtacccaaaatgtgggcttctttttctggctgctttcaaagttttctctctattgttggttttgtgcaatttgactattagatttggaaaatttctagccattattttttcaaatatttttctgtcttcccttttttcctctccttctttgactccaattacacatacgtgagagcacttggagttatcccataacttagtaatgctgtgtttatttgtaaagttatttktctccctgagtttcatttagaatagattttattgatatgtattcaaaatttgctaccattttcttccgaaatgtctaatgggattttaatcccacactgtgtaattttatctcacacattgtagtttccatctatagaattc

SEQ ID NO: 107596 - DNA, 627 bp, Homo sapiens
taccttgccattttggttattatagctctgtactataatttgatgtcaggtaatgtgttttttctagttttrttctttttgttcaggatggctttgcctattgtgggtcttttgaggttccatataaagtttagaatttgtttttctattcttatgatgaatgccattggtattttgatggggattgcattgaatctgtagatttctttgggtaatgtgacattttaacaacaatgattcttcctatctatgaacatggaatatctttccatttttggtgtcctcttcaatttctttcattgctattttatcactttcattgtaaagatattttactcctttgattaagttaattcctaggtattttattttatttgtagctattgtaaatgggattactttcttgattttttagattgtttgctactgacatatagaaatgctactgattttttgtatgttgattttgtatcctgcaactttactgaatttgtcagttctagtaggtttttgctggagtctttagtttttccaaatatgggatcatatcatctgccaacaaagataatttgacttccttcttttcagtttggatgccctttatttttttctcttatctgattgctc

SEQ ID NO: 107597 - DNA, 588 bp, Homo sapiens
tgacctttctttcaaacagaaaattcaaaatagctgttttcaggaaattcaatgaaattcaagataacacaaagaaggaatttacaatcctatttatgggaatcagagtcctaaaaatgtaacaaaacaattgaaataactaaaaggaatcaaacagaaattatagagttgaaaaatgcaattgacatactgaataatgcatcagaggattttaatagcagaattgatcaagcagggaaataacgagtgagcttgaagacaggctatttgaaaatacacaggcagagaacacatgcacacatcaagaataaaaaaagaatgaagcatgccaacaaaatctagaacatagcctgaaagggacaaagctaagagttattggccttaaaraggaggtagagagaggggggtagaaatttattcaaaggacaataacaaagaactttccaaaactagagaaaaatatcaatattcaagtaaaagggggttacagaacaccaagcagatttaacccaaataagattacctcaagatatttaataatcaaacttccaaagataaaggatcctaaaagcagcaagagaaaggaaa

SEQ ID NO: 107598 - DNA, 518 bp, Homo sapiens
acctcaaatatacatgcattgatgcaccttagggcttttgaaaaggcagctccctttgcgaagaatgctctgcctctgtttacctatgttgctcattaattcacttccttcaagtttttcaagtggtaacttctctgtgaggcctaccctgacttaattataattccccctactagcgttcccagtctgcctcatcttatgcttgtttatagcattactcaccttctaacayattatataatttgttacttactatgtttgtttttctcctttcactggaatgtaagctctatgagggcatggatttttacttcctttgttcatcagtgtatccttagttcttagaattgtgcccagtataccagtcagtgctcgataacatgtgctaacttacaaatcttcacaagaatatattcatgtgttttgcatgtttttaaaaatcaaagactatgaatcaaatataatcaccaatcatacaaacaaaaagttagaataaaatgtttgagaagttcctgggt

SEQ ID NO: 107599 - DNA, 515 bp, Homo sapiens
tgagtggcatggtatcattattttaaaagattactttatctgctatacccaggatggattctaaggagtaagagtgaatttcagagagaccacattaggcagcaataatctgggcaagagaagatgatgatctgtactaaaactggacagaaatagatgaattcagaagayatttttagagataggacttataatagattggatatgagaagatgcaaaagccagaataaatgctaactcccagcttttttacttagacaaactggatgtatgttgatgaaattggctgagatgaaacaattgaagaggaacagatttgtgagacacatgaccaagagttgttcttgggacacattaaatttgagatgcttgttagagatccatgtgaagagtgtaggcagttggaaatatgagtctgaaggtccagggagaattcaagtctggaaataaagattttaaagcctttcagagacagaaggtatttacagctataggatcaaaattcatcacctgga

SEQ ID NO: 107600 - DNA, 636 bp, Homo sapiens
tcaccaaactcaagagaagaacgtgcttcaagaaggagggagtagtcaactttgctgaatgatgctaggagttaagagaggtgaagattggatttgtctaaatggaggccactagtaaaagtaacagctctgttaggggagtgctgaggaatctcagggctttttccagaatgggatggagttgaagagagaagaggaaatgaaagaatagaaacaagactagagacaacaatttcaagacattttgctctaaatagggcatagagaagtggggtggtatatggggttaagaraggattttgtgatagatgatgataaagttctttgttattattattcatgttggaatgatcttgtatttacagggaaatgttgcagaagaaagaacagataaaccacagcaaacccttggacaagaagtagactccacagaggaacatgttcgttgacctcaaaaagtttatctcagctatgattataagccaattttctttcagtttgtacttttgtctacattaaagacactgataaatgatataagaaaatagttaagcccacaacatctaatctgcataccaaggcctcatctgcctctttacagactcctatcttcactactcaactggtgaagggagt

SEQ ID NO: 107601 - DNA, 437 bp, Homo sapiens
gatgtaaataggagttagccaggtgagggggtgcgggtcaggagtgaggaagacttccaagctgaaggaacagcactttcaaggttcggagttgtgagggaatgtggcacatccagggcactgaaaaaaaaagtttactgtgtgtgtcaggagacacacacagtaaagtgtgtgagagtgaggtgggtggtgggggagaggactgagaagtaggcaggggccatgataagaggtttggctttaattttaaaggcaatgaagaattttaagcagggaggtcgtgagatcagttctgtaggtacattagacaatgactccgactgcrgtgcggacaatgtattgaagggtgtggcatgggagagaataagaccagagggtcacctggtgggaaccagggaagaggggatatggctctaagtcagagtaatagtgttggg

SEQ ID NO: 107602 - DNA, 510 bp, Homo sapiens
aaacaaatgatcacaaagtagtgatcataaatttattatctaacggttctgtagcctagaagtctggttgagtttgactggtttctttgctctgggtctcacaaggctgaagtcaaagtattgctgccctgggctcctatctagaggctccaggggagaaggtggctctgctcccacattcattcagatgctggcagaattctgtttcatgccgctgtaggactgaagtccctgtaccattcctggcagcctacrggtgtttcactttctagaggctgccttattccctagcttatgaccctcttcatctttaaagctagtcaagtccttctgatgtttcaaatctctctgacctcctcttctgcttcatcttctctctctccagctagagaaagttctctgttttttagggctcatgtgattaggcccaccagggtaatccagaatatgctccctattttgaagtccgtaaccttagttacatctgcaaagtcactttcatcatgtaac

SEQ ID NO: 107603 - DNA, 385 bp, Homo sapiens
cacagatgattatggtcacagggcataaatggaagagataagactcaaaaccaaatgcatctgacacagtctctcttgaccactacattattccatctcccaatacttaaaaaaaaaaaaaaaaactagcaaatttcaggagcaaagtaatatattcaataactaccagaccagttytataaagtaaaaaggtttgtttttttttttttttcccccagtctgtgcacatcagcatagagattctgtggtagagattaccatttctgttcatctactctgatgtggttccaagtgtttctgcaagtctaggagggtcttattacaatggccgagtgatgtggttaagaaatttggaaaaaatatattcacttcaatccaatgaatt

SEQ ID NO: 107604 - DNA, 584 bp, Homo sapiens
actccagcctcagcaagaccctgtctctaaaaacacaaaaccaaaaaccaattcagagttttgtagtgtctcatcctcaccaccatattcattcattcactcattgattcatttcagctctattttttgagtttactacatgccrggcacagaacaaggtgcaagaaattttaaaacaaacagatgcataagacatagaccttgccctccacgaacttggatcaaataatattgaatgggtagatcaaagaaccactcactaaagctttctagttgacagcatgccaggtatcaaagagttcacagtgcctgcctttaacttaaagcatgacaggttttctgctggtcttttagtcagttcttagtttatattccagtgcccataattatgtcaatttgaattgatttcttcagtacaatttcatgtaactatatgaataatttataaaattaaatatataaagtgtaataccttatcatctattaatcacactgatctgttgaaaggcagttattttgtttcttagttttattttagtatgaatgtttttatcggtcacaaaaatagtgtcatatcatataca

SEQ ID NO: 107605 - DNA, 519 bp, Homo sapiens
tgctttctatacttctgggaaggagaggttccaggcccaatcttgagagtggttcagtatttatttaaccatgctagcaattctcaaacttccctatcttaggactcatttctacgcttttatttggrtgagttatctcttcagatgcttgccacagcaatagttaaaaccccaaaatgtttaaaacccaaaaatataaaaacacacattccattagccattaagcaatgatgtcatcacatgtagtgtagtctctgagatgtatcctactatacattgtgagagaatgagaatgacaagattatgtaatactaagtgtttctattattataaaaacagttttgaactcatagactgcctgaaaagatcttagggtttcttaggagtcccctaaacctcagctggttctcaaatgagcaacactgaactatgttatttagtgggtaagctggggtaaagaatgcctacaggtaacacaacctgttcctggcacattttctttgctcactgcttttgatg

SEQ ID NO: 107606 - DNA, 544 bp, Homo sapiens
ttttgtggcctattatatgatctaccttggagaatgttttatgtgccactgagaagaatatgtactgtgcagttgttgcgtagaatgttctgtacatgtctgataggtccctttggtctaggttgtagactaacttcactgtttcttagttgattttttttttttgtctagacgatatcttttgctgaaagtgggatgttaaagttccctgttcttattgtattggagtttatctcacctttatggcttgytaatatttgctttatatatttaggtgttctgatattggctgcatatgtatttacaattgttacgtcctcttgtttaattgaccttgttatgattatataatagccttatgtgcctctttttagagctgtagatttgaagtctattttatctgacataagtctagctactcctgctatcctttggtttccatttgcaaggagtgtctcttttttccatcacttcactatcattcagtgtccttacaagagaattaggtttctttctaagcagcatgcagttgagtcttgttttt

SEQ ID NO: 107607 - DNA, 544 bp, Homo sapiens
ttttgtggcctattatatgatctaccttggagaatgttttatgtgccactgagaagaatatgtactgtgcagttgttgcgtagaatgttctgtacatgtctgataggtccctttggtctaggttgtagactaacttcactgtttcttagttgattttttttttttgtctagacgatatcttttgctgaaagtgggatgttaaagttccctgttcttattgtattggagtttatctcacctttatggcttgctaatatttgctttatatatttaggtgttctgatattggctgcatatgtatttacaattgttacgtcctcttgtttaattgaccttgttatgattatataatagccttatgtgcctctttttagagctgtagatttraagtctattttatctgacataagtctagctactcctgctatcctttggtttccatttgcaaggagtgtctcttttttccatcacttcactatcattcagtgtccttacaagagaattaggtttctttctaagcagcatgcagttgagtcttgttttt

SEQ ID NO: 107608 - DNA, 644 bp, Homo sapiens
atcattgaactctcagagaaacaaaactgttaggccaattagctatgctctatgttcacctgcgtttccactcagaacattcttccagctctccatcatctcctgcaaatctctttctcactagccatcactggcctgcatgttctttaaatgtcaccttagtcccccctctttcctagctccccctgtgagatggcagcttgatttcagactgttgtgctgggtcttgattaatatccctttgaggtggtgtttttgtaaatacctccatgaaaaggccacagggccatgacaccaatgatggctttggtttccttacaactttagataccaattgaatatgtgttcttttgctggttaactaacaaacatagggttgacagtcatatggcaggttcctgactctagattaaagtgatgatatactccagggcactgattctatgtgatcagctgcatctggtttgagcagacattaaactttcaagtggcaggaattttcatatggccatcatccactatactgactggcatgcataatgtcaattgaatggcttctgaatgaataaacacacattgaggatagtttgagggcatatgtaaaactttagactyactccacattctatcaaaagctcaactgt

SEQ ID NO: 107609 - DNA, 497 bp, Homo sapiens
actgctttgacaatcttgttaaaaaatatttacaagtcawgtctcatgtcccagctttatttattcacagctacttgctttggacttgtagatgtctgataccatcgtcaggctctgaggcctgctgccataccccatggctgtcttttgggttgtgtcctaggaaccactgctggttttcagctctcctgactgtctccacagatgaggatttctagggctagctgtcttagagacaagcagggacacatacattgtctctcccttctatttttggagaatgcatgacaaatggttcttcaactattcctgaccaacagggttttgaggggtttgattagaaatattttcgatatttcaaaaatatgtgaattggccacgcacattggctcacgcctataacgccagcactttgggaggccatggtgggagaactgcttgagcccaggagttagagatcagactgggcaacacagcaagaccctgtccctacaaaa

SEQ ID NO: 107610 - DNA, 602 bp, Homo sapiens
ttgctttaaaaaggctattattttttaaatatattctttcatttcaaacataacatttgtatgaaatccaatgccatgtgtatagagaaaagacaagttttttgcctttatttttatctattttatccaagtattctatttaaattaatcytacataaaagcaactttttaacacagttcacatgaataacaagtaaatatattatctaaaaataacttcacctgagactttttttttcagaaataaatttattatagcatcaactttttctttctcttaagcttacgcttgcacaccaaacattggctttcaaaggtgaaactgtgggtggtcataattaaaaggaaagtactagggcagaccctgcaggaaatgtggacactgggatttctgactgcactacagttagagttgaccacatgtttccgctcaattgtttcctagtccataaaagaaagcttaagtgatattcaaagatgaccagttttgagactcttgcctttgtgactatacaaatgaggagtatctttctaggacatgtacagaagcaaccttactcatgatacaatatggtttgaataaaaaagagggagtaactgtt

SEQ ID NO: 107611 - DNA, 602 bp, Homo sapiens
ttgctttaaaaaggctattattttttaaatatattctttcatttcaaacataacatttgtatgaaatccaatgccatgtgtatagagaaaagacaagttttttgcctttatttttatctattttatccaagtattctatttaaattaatcttacataaaagcaactttttaacacagttcacatgaataacaagtaaatatattatctaaaaataacttcacctgagactttttttttcagaaataaatttattatagcatcaactttttctttctcttaagcttacgcttgcacaccaaacattggctttcaaaggtgaaactgtgggtggtcataaktaaaaggaaagtactagggcagaccctgcaggaaatgtggacactgggatttctgactgcactacagttagagttgaccacatgtttccgctcaattgtttcctagtccataaaagaaagcttaagtgatattcaaagatgaccagttttgagactcttgcctttgtgactatacaaatgaggagtatctttctaggacatgtacagaagcaaccttactcatgatacaatatggtttgaataaaaaagagggagtaactgtt

SEQ ID NO: 107612 - DNA, 611 bp, Homo sapiens
cccacccagctgacctgccagctaactctgattgtacaagtgagtcccaccaagatcagtggaacctctaggccaagtcatagacttgagagcacagataaatatttattgtgcaggacactgtgattttgtagttatttgttatacagcattaatgagacaatgggaaaattgatacatctgtttttcccatgaagtaagattaggagggaaggggatgagaaattcctttgcccaggaattatatgacaggaagtaccatctgtattttgggatgaggtgttagaaagtcgtttttactatagatctaaagccacactaatcaggtgatgagaaacaggttgacattttggtctccatttatttgtctcctgtgtcttttctcatttggctccaaactcagggagggcagaaaagtgtgacaaattgatgctctaaaatgcatgcttagctaaatrttgtggaaaaaatttaataagagtaaaacatacataatgcgtattcatgtgatagcagtaaaaaaaaggattagaatcattgtcgtaagttatttcaactgactactattagtaaaatgtagccctttgttcgaattgtatgctaaaatgaaa

SEQ ID NO: 107613 - DNA, 623 bp, Homo sapiens
  misc_feature (1)...(623): n = A,T,C or G
gtctttacatattggctcctgatatctcagccccttggccctgaatactttccagaagacttgagctgctaagaacatgtgtggaatgtatcaggtttaaaagtaggcttcaattttcctaagactcaggaagtttttctctgtcttgctgtaaagtgtgggatgctagaaagaatgactgggaactctcaggtattcagtaccactcactattacaactcaatcatacagtcactgagttactgttgaaggaatgaacgagaagctgcagacataataattaggtgagaatggtaaaggagctaggagttttctttttttttwaaattatactttaagttttagggtacatgtgcacgacgtgcaggtttgttacatatgtatacatgtgccatgatggtgggctgcacccattaactcgtcatttaacattaggtatatctcctaatgctatccctccncccctcctcccaccccacaacaggcccctgtgtgtgaaggaagaagactgagaagtaacttagtacccaagcaaatggcagactcttgtgtaaagtgggacatagtagaaagatttatagtggaaacaacttttcagttaactgcatggccttgcaaaagtt

SEQ ID NO: 107614 - DNA, 570 bp, Homo sapiens
tgttccttacatttttactaacatctcctcaaaatccttccagcttcttctcactactagttccaaagcttctccatattttaagtttttattatggtagcactccattcctggcaccaaaagtttttctagatatattttcttgcattaaaaaacattgctcctccaaaatgtaatgtcttaaaatataaacatttactatctcacacagttttgtgggtcaggaattcaggaatgatttagctaggtggttttrgctcaggatctctcatgagagagaatagtcaagatcattaggggccatctggaaggcaggccactacacattcaaaagaaatatttactttcatactttatttttatatgtaattttgtattcacaacttgtataattttcagtttccaccacacctggatttcctcaaactcagaccaaaactctggacttctctcctcatctcatactccacagttgatctgttagtacaccctactaggactaccttcaaactgtatctccaattcagtcccatgtcacaacctccactgttaacacattccaaatcataa

SEQ ID NO: 107615 - DNA, 496 bp, Homo sapiens
taggggccatctggaaggcaggccactacacattcaaaagaaatatttactttcatactttatttttatatgtaattttgtattcacaacttgtataattttcagtttccaccacacctggatttcctcaaactcagaccaaaactctggacttctctcctcatctcatactccacagttgatctgttagtacaccctactaggactaccttcaaactgtatctccaattcagtcmcatgtcacaacctccactgttaacacattccaaatcataatcctttctcactgatattattatttttctttttttgagatggagttttgctcttgttgcccaggctggagctcaatggcacgatctcagcacactgcaacctccgcctcccaggttcaagtgattctcctgcctcagcctcccgagtagctgggattacaggcacccgccaccaggcccagctaattttttgtattttttagtagagacggggtttcacc

SEQ ID NO: 107616 - DNA, 526 bp, Homo sapiens
gtttcaaaaaataaagttaccattccctttaccccaaagttatctcgtgatcaccatggcgacttgcaaatgataataacaacttattgagaagttcaatcatrtagtaggtctaactggtaagacttcaacttgttggattatttcagtgagaaatataataactaaaggcttaagtactctgcaataatagcgtaacacttagccactgtcacaatatgctacataacaaacacctgcacaaatctcaatggcattcaacaataagcacatatttcttgctcatgcatctatagggcaactgtattttactaatacagactgagttcagatgtgcttgactcaaggctatgagttaggtccacgtctgctccacatgtccctccttccttcttggacaggagctatcaaaaacatattcttctcatggtgaaaggcaggagttcaagggagccaagttaattatacaagcacatttcaaatctttgcttgcatcacatccactaacatctgtagaggagggcaa

SEQ ID NO: 107617 - DNA, 568 bp, Homo sapiens
gtacactacaactctgatcatctaatggccctcttcacatctctctctctctctcctctcactggagtgcaaagagatgtctggatctcttaaacaccaaacagccatatctacaacgaactttccatcctctgctcttgctctcttgagaccgctcaccattattgtgtacaaatggggctcccttaagcaatggtaatcctcctcagggttccaaagcctccctcctttcgtttttccccctagtgtttctgtttcttgtactagattttggcttaaataagttggtatattcctgccttatttttgttgttccagttgttttctttcttttttttctactcttacgggaatagaaaaaaaaatatggactttctcctataactttgrtttgaatgggacatctcataacattgactttttccccatcctaaagtttgtaaagaccgtgatttttcaactatggaggaataataagatggactcatactgaagtgtgctaaataattttaaaacccaatttcaaaaaaggatgtttattttctgcttgaaattgaaaaaaaaagat

SEQ ID NO: 107618 - DNA, 568 bp, Homo sapiens
tttttacatctatgtttactagcaaaattgggctgtagttttctttttctgttgtctctttgcctggttttggtatcagggtgttattggtttcatagaatgagttagggaggcatccctcctcctcaatttttttgaataatttcagcagaattggtatcagctcttcttggtgtgttgggtaaaatttagctataaatgcccccagccctaagctttttttattaggagattatttattactgattcaytttcattattcattattggtttgctcagggtttctatttggacctgcttcaatcttgggaagttgtatgtttccagaaatttatctattttctcatgcctttctagttcgtgcacatagaatgctcatagttgtctctgatgatctttagtattttcttggtatcagttgtaatgttacctttatcattactgattgtgcttatttgaatattctatcttttttgcttggttaatctagctagctgactattaattttgtttatcatttcaaggaaacaatttttcatttagttgttattttgcattatttttgggg

SEQ ID NO: 107619 - DNA, 642 bp, Homo sapiens
tcaagtcttctcagtgcattagcacaaatttctcctttcgtgggtcaagttctcattctttcccaaccaggagcctgactttagcatgccagacttacctgacataygagacttacctccttgggagctcagacaatctgatagtttattccaggctctgggcttcagtttactctgttctcccttgataggggtaagaatctgtctgtatgcaaccaggacaactctctcgattttgaacttaaatttacttgccaattaattgctctcaacatttttttctctgtccagagcatcaagagtgcttaaaaatagctacccaaatccattgtcctaatagttcttatgttctccatatttctcaaatgctgtatactttgccccaattaatatatcaccttccaccagtatactataccaattcatcaaaagtgaaaattttaacaattgtacatctatcttgtactaagaactctctgtattctaccaataagaattttcagtgagggaccgttattgccagcctggcagtgagtaacccagccacaaaacatcaccccattatctactttcttaattcatttatggcatcaattgtaataggctgagtttcttgggaaccagacactgtacaagaggttc

SEQ ID NO: 107620 - DNA, 642 bp, Homo sapiens
tcaagtcttctcagtgcattagcacaaatttctcctttcgtgggtcaagttctcattctttcccaaccaggagcctgactttagcatgccagacttacctgacatacgagacttacctccttgggagctcagacaatctgatagtttattccaggctctgggcttcagtttactctgttctcccttgataggggtaagaatctgtctgtatgcaaccaggacaactctctcgattttgaacttaaatttacttgccaattaattgctctcaacatttttttctctgtccagagcatcaagagtgcttaaaaatagctacccaaatccattgtcctaatagttcttatgttctccatatttctcaaatgctgtatactttgccccaattaatatatcaccttccaccagtatactataccaattcatcaaaagtgaaaattttaacaattgtacatctatcttgtactaagaactctctgtattctaccaataagaattktcagtgagggaccgttattgccagcctggcagtgagtaacccagccacaaaacatcaccccattatctactttcttaattcatttatggcatcaattgtaataggctgagtttcttgggaaccagacactgtacaagaggttc

SEQ ID NO: 107621 - DNA, 587 bp, Homo sapiens
ccataccactcgctaatacatatgaaagattttgtccctaatatttttactatctgaaaatgtgamtgggttatcactaaggtcatcctctttggtagttgtgtaatcaaatggctgaggcttaccacaattaaggcaagagacaagagaatgtaacccagcagaaagccagtgactaatgctgagtcacagtttccaagtgattatttaaccaaaatgtcaacctctcatactaacaattccctacaatggtggctgaaagtagatcaaaggtattatccaaaaagtatacatcagtattttgcaggataatgctaagggattgaggccagtaaagtctagttggacctagcatttataagcccaaatttgctaagtcaaggagattcttacctcctcaaactttacagtgggagaagaattcatgattatgttgatctcagtatacttggatcctccagataacaccctcttgccaaaaagttccaggtcctggctactaccagctacagtctttagtggcagctatataatctcaatatagaaggactttagaaagaaaaacctaatgagggaagggagcattg

SEQ ID NO: 107622 - DNA, 622 bp, Homo sapiens
attatatatatctttcaatagtatctcatcacatttagaataaaattcaaattgcttaccgtggcctacaaggtcctatgtaaattttcctccctctctgtttgattacccaggcccagccctctttttatttctcagacatgccaagccaagctttttttctgtcatagagctttacttcaacatggaaaactttcccaggtctgaktttttaaatgccaccttctaaccatctaaagtagcccctagtttttctccaaaaaatcatgttttactttactataatatttcccactacttgattttttcattctttgtttattgcctgtcttcctataataaaatataaactctttgagacaggtgatttcatctatctcattactattacattcctagagtctcaaacagtgtctggcatgttgtggctggagaacaaataattgtatataaatttatatataaatgatactttggtcatttgaataattttttagttattagaataatgctaacattaatattttatatataaatatttgactatttttaaaagacagaagagactcctagaagaataaatactagcacaaaagatacatatatctgaagactgtagaaa

SEQ ID NO: 107623 - DNA, 616 bp, Homo sapiens
caaatgcacttcatgccacaaaactgtatacttaaaatggttataatggtgaatattaygtcatgtatattttactacagttttaaaagtaaaactattttataatcgctatgatatcattgatgatgaataatacgcatttattttctgtttcatctgtttccatatttattatttccttccaatttataatggtttattttttgttctgttttctatcttttgttaatgaatgctttagtcatttcctcatctattttcagtgtttcttgttttctaacaaatagtagctgtaggttttctgagtaaagttttactgaaactcatagattttactctcaagatgaatacaaaataaatatgttattctgtggaagttaacataaaactaagtgctgtgtcaaataaatctcaggatttgtgtgatttggcacaatagaatttcacttctcaattatttatcagtccaatctgggtttatgttcatagctgtcaggtgttcctcattgatgacacttagttctaaaattcaatttaacctagagtttttgtgttgaatttctcttgccatcaatgtgagttgtgtctctagaagttttgcacaatatggtcctaa

SEQ ID NO: 107624 - DNA, 405 bp, Homo sapiens
ggattcgaatggaatcgaatggaacaatatggaatggtaccgaatggaatggaatggaatggaatggaatggaatggaacagaatggaatggaactgaatggaatggaatggaatggaatgcaatggaatggactcaaatggaatgaaaccgagtggaatggaatcaaatggaatggaaytgaatggaaatgaaagtaatagaatggaatggagtgtaatggaataatatggaatggagtggaatggaatgcagtggacacaaatggaatggactggaatggaatggacacgaatggaatggactggagtggaatggacacgaatggaatggaagcgaatggaatggaatggaatgaaatggaatggaatggaatgaaaaggaatggaaaggaagagaatggaat

SEQ ID NO: 107625 - DNA, 560 bp, Homo sapiens
tgtccacaagttccccactacaagccaacactacctccagcatgactgtacagacaatcctcagcagctaggcccattcactgtcaagctgcattgcctccaccaccatggtgaatgcccccagggagtcaggcacccagkccccaccagcactctgccatagctgctacaccttggccattccagtgaagtggactcttagccttgaaggacagagaacaaaattggggcccaatacaagtcccctagagtttgagcacacagtccaggagttgggaactttgtgtttgccctgtaaaatcttccagaaatgaagccatttagctgaatctactgtacatcaaaatcaaaccctcaggtcatcaaataggataaaagaaaaaaacaaagatcaacaacgtcaaaggttgaaggtagataagcccacaaagatgagaaagaatcagtgcaagaaacctgaaaactcaaaaaaacagtgtgccttctttcctccaaatgaccattttacctattcagcaagggttctgaacagggctgagatggctaaaatgacagaaata

SEQ ID NO: 107626 - DNA, 472 bp, Homo sapiens
ggttaactcagctatgaagcatggtcaagcagtgcaaaggatggacacttagctcacacctgcagctctgctttgaatcaagcyataataggatgagatgtgcccatagcagaagctaggaaaggagaaggctgcatgggtgaaataccagataattacatctacactcttgcactcttgcagaatagactgtagtgtaaatgcaagcaaagccaacagggacaggtagctgcatgcaaaatcatggggagagagtaactctttgagaggctacacattttctaagagtatgaacataaaatatataggacatgttcacatgatccaattgccttgtacttaataatatattgaataattatttttaacccctccaagatgcaggtgagcagcttggaatgaaaaaaagtggagaggtaaaataaacaaaacaatccacatttgtaagaacaacaaatttgaaatatgagtt

SEQ ID NO: 107627 - DNA, 472 bp, Homo sapiens
ggttaactcagctatgaagcatggtcaagcagtgcaaaggatggacacttagctcacacctgcagctctgctttgaatcaagctataataggatgagatgtgcccatagcagaagctaggaaaggagaaggctgcatgggtgaaataccagataattacatctacactcttgcactcttgcagaatagactgtagtgtaaatgcaagcaaagccaacagggacaggtagctgcatgcaaaatcatggggagagagtaactctttgagaggctacacattttctaagagtatgaacataaaatatataggacatgttcacatgatccaattgccttgtacttaataatakattgaataattatttttaacccctccaagatgcaggtgagcagcttggaatgaaaaaaagtggagaggtaaaataaacaaaacaatccacatttgtaagaacaacaaatttgaaatatgagtt

SEQ ID NO: 107628 - DNA, 564 bp, Homo sapiens
tggccatgggctgtaatttgatggcctctggtttggtttagctgatagccttcccagctctatggtattatttttaaccccaatatattgattaggggactggagctaaattagggctaagctgagatatagaggggggcagtgttctaatacatatcaatataattccaatgcctacattctttattmtacattgaatttttcactcagctgtgacaaatgaatctgtatttctaccatctatatccctttttcaccaaaggaaccgctagtggaagatatgttggttttatttgcccttattcagctccaaacttcggtggggaccctcagagatagcgcatgttttctgtttctcaagtacatttacctgctccagtgcccccaaggatttttgctaagtctacctatttgccctttctttgttcttctgcctacattgaaagcctgacatgcgaattttattttaatgtcaacctcaatttgttaatgctagaagctttccttgtgaacttctgaaaaacaagggagtagattgagaacgaagggattactcattgaata

SEQ ID NO: 107629 - DNA, 564 bp, Homo sapiens
tggccatgggctgtaatttgatggcctctggtttggtttagctgatagccttcccagctctatggtattatttttaaccccaatatattgattaggggactggagctaaattagggctaagctgagatatagaggggggcagtgttctaatacatatcaatataattccaatgcctacattctttattatacattgaatttttcactcagctgtgacaaatgaatctgtatttctaccatctatatccctttttcaccaaaggaaccgctagtggaagataygttggttttatttgcccttattcagctccaaacttcggtggggaccctcagagatagcgcatgttttctgtttctcaagtacatttacctgctccagtgcccccaaggatttttgctaagtctacctatttgccctttctttgttcttctgcctacattgaaagcctgacatgcgaattttattttaatgtcaacctcaatttgttaatgctagaagctttccttgtgaacttctgaaaaacaagggagtagattgagaacgaagggattactcattgaata

SEQ ID NO: 107630 - DNA, 577 bp, Homo sapiens
agtggcaaaataagtgataaagaataatctttaggcatccagagaaataacatacatttaatacagagaaacaaagaaaaatgtagagccaacttcctacttctttgtcttatatctcattctgcttcagaatgcagctagagaaccagactctattaaattttcttaaatctggccaagttaaatgtcaaacaccagaggcatattagtaaaacartaaaacttcaaaagtagagaatttgatctcctcccttgtttattttcatttttcttattgtgacatcaggtactttaggctggcatagttcatggattttcagtgtatattatctagtttatgtgaactaattggcacatgataacaaaaaatggcttagaaatcccagccaagaatctagcagagttcgtgtttgtcctcctgcaaatacaagttcatctttagcaacaatatatctgtaaaataatgatgatattatctgatgtaagaagctaccaagtaattttaaaaatgtccagaaaaaattatttgaaatagagatttatatacttctttctaacaagctggctgctatgatac

SEQ ID NO: 107631 - DNA, 577 bp, Homo sapiens
agtggcaaaataagtgataaagaataatctttaggcatccagagaaataacatacatttaatacagagaaacaaagaaaaatgtagagccaacttcctacttctttgtcttatatctcattctgcttcagaatgcagctagagaaccagactctattaaattttcttaaatctggccaagttaaatgtcaaacaccagaggcatattagtaaaacaataaaacttcaaaagtagagaatttgatctcctcccttgtttattttcatttttcttattgtgacatcaggtactttaggctggcatagttcatggattttcagtgtatattatctagtttatgtgaactaattggcacatgataacaaaaaatggcttagaaatcccagccaagaatctagcagagttcgtgtttgtcctcctgcaaatacaagttcatctttagcaacaatatatctgtaaaataatgatgatattatctgatrtaagaagctaccaagtaattttaaaaatgtccagaaaaaattatttgaaatagagatttatatacttctttctaacaagctggctgctatgatac

SEQ ID NO: 107632 - DNA, 533 bp, Homo sapiens
tgcatctggggagtgttatattccttactttttcctttttttgtttaaccaattgagcttcgagtgttctattagttgtttccattatagcctgtccttggaaattagggattcctgttgtatgtgtaattttccactgatttaagaatttttgaaatgctttactacagtatcctggcccattatctgttttaattttttctggaaatccactgactgcaaaacaagataataaatgtcttttaacatgggaagtactttctcctgtctggcaggttgcgcatatgaaatgtgaataagtatcaactgtcacatggacaagtgacaattttccaaatgaaggtacatgtgtgacgttcatttgccataatgcatcaggacttaaacctctaggattaactcctgcctcttgagcgggcaggtgtaagacttgacactgagcataatgttgtacaacattttttgcttgtttccatgtgatatcaaatttgttttttaatcctgttgcmtttacatgagtcagggcctgaagt

SEQ ID NO: 107633 - DNA, 607 bp, Homo sapiens
ccaggctgtgttccaatttcttatagcaggaggatactcaaagtaattccatctctcttccctgtcactgacgtaggagtgaacatctggctgaatgctagacaattagatatgaaaaaaatgtaatcggagacttctaaaaaattcttatttttgccacaatagtactttatgtcattttttttttcctttggataattatatctggatgtagttcttgagaagttgtagtcatcttgctataagcctaattatgaagccaayattcaggatattagagtagagacatagagatataagagatacataagaacctggtcttggatgagataattgagtcgccaaattaaccaaatctgaaggctttcctataatgtgatacaaattttcttattgctaaaagtactttggttcagggttcctattatttgcagccaaaccttcctcaattatatgccatttttgttgtaagtaaattcctatatatacttaagatcaaattctgggctctagtctgttacaccgatctgtttatttctttgtattaccatatagtttcatttacaaatttccaagcctgtcacccctcactggtattttttttccc

SEQ ID NO: 107634 - DNA, 607 bp, Homo sapiens
ccaggctgtgttccaatttcttatagcaggaggatactcaaagtaattccatctctcttccctgtcactgacgtaggagtgaacatctggctgaatgctagacaattagatatgaaaaaaatgtaatcggagacttctaaaaaattcttatttttgccacaatagtactttatgtcattttttttttcctttggataattatatctggatgtagttcttgagaagttgtagtcatcttgctataagcctaattatgaagccaacattcaggwtattagagtagagacatagagatataagagatacataagaacctggtcttggatgagataattgagtcgccaaattaaccaaatctgaaggctttcctataatgtgatacaaattttcttattgctaaaagtactttggttcagggttcctattatttgcagccaaaccttcctcaattatatgccatttttgttgtaagtaaattcctatatatacttaagatcaaattctgggctctagtctgttacaccgatctgtttatttctttgtattaccatatagtttcatttacaaatttccaagcctgtcacccctcactggtattttttttccc

SEQ ID NO: 107635 - DNA, 261 bp, Homo sapiens
gggttcaaaacactcagccaagctcctgaaagttctgattggccagtgctttgtggggttgacagcgatttttctcccggagagtttaatttttccctagcatagacrtcctctgtgctgtccttagggaaaagagctgttgtcaaaatctctgctcaaggaagaatcttgtagattttattatgctataaattgttgcatgtcacctcgagaaagaatttatctcgactcttttgtaggataaggggatacaggtgcatg

SEQ ID NO: 107636 - DNA, 543 bp, Homo sapiens
cccttaccctcactcaggctaagcctaggcaaaaagttctaaaaagtacaaaggtaatcggacccaccaagctgtactcatgaaggcctcacaatatatatttcacatagttttactrgaaagatctgatattaggtacttatagtaattttaacattgttttgtgttccttttaaataatgggtaaaggaaaggaagataagtactaggaataaaattatactgtacgtgcttctcaaatgatatttgtatcggacaaatggtatctgtgctggacattgtcagtagcccaatataaccaccttttttgttgttgttcacatggctccttctctctgctgcctctgtgttttctcacccatattatatgcaggtgggagttttctaaaatgtagctttttggcgagaaagctaattttcagtttggatctaagctgaaaatagttccccaattgccctgaagttatcactgtcaggttatttctaatgtagtatttttcagcatgctcctgggctagcactcctgaaggcttaactgcatag

SEQ ID NO: 107637 - DNA, 462 bp, Homo sapiens
agatgccctgatatcttgaaatcagcacccttaaaactaaaagtttgcctgtctctggctctctcttcctccaatgactatagttgtagccatcagagcatgagcacgtccactacttcttatcccaaagccactgaccaaatagagtttatgatttagaattgtttaggcttataaaaaggtatatattgcataaattgtctaatgcatkcacattctagccctcttctctcaaggagtggatgtagcatctcatggcctaatatattaatattttggcagcaaatcaaacaaatgcccacatgtgtgatgaataaacactagaaatagcctcacatcagttcaggttagtgtttgcactcagataagttcaagtcaggacaggttttgcagacaaaagtatttaaaaggttttagtgtttagctgtttggactttagaactgctggtgagagattatata

SEQ ID NO: 107638 - DNA, 629 bp, Homo sapiens
caagtttgacttattatggctttgattacaaaaatgtccttctttaaggagttttctttggaaatttaaaatgtgtataagagtagagaaaataaattcccaagtgcatataaactgatttgtcaactcagagccactcttgtttatctctaactgtgcatcactaatgctgacatttctgaaatattctgttccaattttcctaatagttaaaaaaagtgaacacctgcaattataaataagtatwtatataattcctttatataataagtaacgtgtctatttatacactatgattatatgtcatgaacacattattatcaaacatacattattaatatatgactttttaagatataatttttttaaattatatgaaatgatatataaattgacactataaagtaatataaaatattaatgtaatgaataatataaaataatgtataatatgaataatataaaataatgtataaatgtataaattaagatatacagttatttaattcatttatatatcagatacatgaaccacagaaataatatatttctatataataaaacatataagtaagaataaagtatatgatgaaaataaataaataccacattaaattattttatttaat

SEQ ID NO: 107639 - DNA, 587 bp, Homo sapiens
tacagaaaacattaacgggtagcctcagaaaacttacaattatcatggaaggtgaaggggaggaaaacacatcttcccatgacagaagaggagagaaagagagagctgcggggtggggaagtgtcacacayttttaagcacttttaaactatgagatctcatgagaacccactcactattatgagaacagcatgggggaaatccacccccgtgaccctatcacctcctaccagatatttccttcaacacgtggggattacaatttgatgtgagatctggatgaggatacagaacaaaaccataacacctttcttacctcacttgcaaaaatcaactcaacatggattaaagacataaatgtagaacctaaaactataaaagccttggaagaaaacctaggaaataccattctggatataggacctgacaaagatttcaagaccaagatgtcaaaaaagcaattgcaacaaaaacaaaaattggcaaatgtagcataataaaactaaagagcttctgcgcatcaaaagaaatgatcaacagaataaacagcctatagaatgggagaaaatattttctaattatgtatt

SEQ ID NO: 107640 - DNA, 587 bp, Homo sapiens
tacagaaaacattaacgggtagcctcagaaaacttacaattatcatggaaggtgaaggggaggaaaacacatcttcccatgacagaagaggagagaaagagagagctgcggggtggggaagtgtcacacatttttaagcacttttaaactatgagatctcatgagaacccactcactattatgagaacagcatgggggaaatccacccccgtgaccctatcacctcctaccagatatttccttcaacacgtggggattacaatttgatgtgagatctggatgaggatacagaacaaaaccataacacctttcttacctcacttgcaaaaatcaactcaacatggattaaagacataaatgtagaacctaaaactataaaagccttggaagaaaacctaggaaataccattctggatataggacctgacaaagatttcaagaccaagatgycaaaaaagcaattgcaacaaaaacaaaaattggcaaatgtagcataataaaactaaagagcttctgcgcatcaaaagaaatgatcaacagaataaacagcctatagaatgggagaaaatattttctaattatgtatt

SEQ ID NO: 107641 - DNA, 399 bp, Homo sapiens
tgcttattcttagattcatttttgttttttcaaatagaaggatattcagtattagctctcagaatgatgccttatatctataaattgtatgtttttatttcaccattaaacgtaatttgcttgagtaaacctttaagaatagaaagaggcaactttagtgattctgagttttcggatgatagagccattcaaacatttattgatttaatcatccaagcattattttttgagcaactaacatgtggcatcgtccctttgccagtcaatggaaatatacagtatttccttttataaacctamaaatctgatgggaatgtgtggcagagatggtgtctacaaactgttcacccaaaactgatgttccccctggcttagtgaaaatgagtcaccaggaggttg

SEQ ID NO: 107642 - DNA, 517 bp, Homo sapiens
ggaccagaatttgggggaaaggaccatctctactatatgcggagtcaaaagaaacactcgaaggctaaagaagaacttccaagatggctaatttacatggctggcaagttggttctgattggaagctcagctcagggccaggaactttaagcctctttctatatgggctttccgaggattgcttagaactctttcaagacagtggctggtttctaagagcatctataccaaaaraaagaagtttcccagatgggcaacttcctggaaactggcacagcattatgtctgctgtatattctgttggcccagcagttataaagcctagactcaaagggacaagtgccaaagaattttgtggccatattttaaaactgtcacactcaacatgtcacttctctgtttcaaattcagcaatgcctctctgtattattttaagtattttgaccaatcaggaaagcacaattgtttatgatctttagacagtttattcccgcggcctcatttgtttctgcttccc

SEQ ID NO: 107643 - DNA, 590 bp, Homo sapiens
ggacaaactaagtatattcaaatatgagtacatgtattttatctcaaagacagcagctattcgtacctggattaagtctctttgtaggtgcttagtcaaactttcagccactagaacttcagtcagttacagaagaaaatakccagcatccaataagctcctttgtaaattcaccttacataaagagataaccaaaggcttgtctgttatcacatttgtcctcacagtaatggataaggctccatatcactattaaacctcgagggacactgaacaatagaaagttaaattacccttctcggattacacaccttctggagtgactagtctccagggatgttgaactgaaagctgatgtcaagcctcttaaactggtgtgtcaaacctcttaaactggtgtttatgctttgtaggtatatcatcagcatacttcatttattgctacaaacaccttgtttttgttaaaatttaatttcactgtagggaaaaaacatatttaaagaaaaattttgcaaggtccttttgcttaaatttacttatttttatgaggaaaaaaacattttttaaaaccgaaatggtaaaagcatgaa

SEQ ID NO: 107644 - DNA, 637 bp, Homo sapiens
tggcctccagtttgatccgtttggtgtagaagtctgggttgatttctggggatttctaggttatctctgggtaggtattaaaataattaaagaaaagaaaggaacatacagataaagaaaaaaagaatataaatataccttttgtttatgccrgtgttaatgagtttttgttcattttaactctgagagcttagaaaatagggtatgacttatacattctggcatctcaaatgtaagaaatgatacaatctatggctctctgcattttccaagttacttggaacatgtttctttgattttccaaaacacatatttcttagttgcttacagaatgccaggcactgtgctaagcattcagggtgtatattcacttaatacttagagactttgtagcaatttgcaggtgaggaaactgaagcatgcctaaatttacagtgttagtgatatttaggattcaaatcaggcatacttaattccagagctttaactcttaaacactaattaatcatgaatcttataactatatgtggaaatatgtaaatcaagaatttttaattctattttgtagatgaggaaacagatgctttaaatcagcagtccccaacatttttggcacagggaccagtttcatggaaga

SEQ ID NO: 107645 - DNA, 594 bp, Homo sapiens
gacatgccttgaatacgcttaaaacaaaacaaaataagcaaactaaaagctgttgaagccaacatttgcccactgttttctgtttgacatctacaaatatattagcttcaccgtagctgtggctgtgtctaattcatcaatgcatcattagtaccttggatgatacttgacatagcatatgtaccaagcatttttttttgctttaaacatgttatttgggggattactgaatttatatgcacacatttttaaagaggtggaaaatatgtaaaatgtcgatattatcaaaacataattattttacataaaaattctttacttcatacttttgttttcaattacttttcaaaagacagaaactgatgaacatttatttcttgggcttgaggacttatatcaagttgagagcacaaaaaccaaggcataagagtaaaaacacatgtttaacctgtaatgaagtgttggtttcctcagtgcatttttatgtatttaataatctttgatttgttttacttctccaagccaacatatgcaagtcraaaaactgtgaacaatgtttccaaatatttctggcacaattaaatacaatacaac

SEQ ID NO: 107646 - DNA, 611 bp, Homo sapiens
tttcttttgttcttaatggaagattccaaagatatatctcctgactcaatgttggcttacagacccttttagacaagcttgttttgtatcacaggaagttcttcagattctcaactagaagccaaatgagtcaccattttgtcttctgcatctttcaaatagaatttgtttttgaaataatagctttattgagatataatccacatattgtataattcatctttttaaaatgtacaatttaaaggtatttagtatattcacacagttgtgcaattgtcatcacaatcaattctggaattttggaatatttcatcaccttcaaaagaaacctcatacccattaagagtaactccccacctccccctcccccagttgctggcaaccactaatctcgtttctgtctccatggatttgtctattctagatagttttcataaatagaatcacaatatttgttcttttgtgtctgtcttctttcacttktcacaatattttcaaggttcatccatgttgtagcatatatcatcacttcattcccttctatggccagtgaatatggcattcccttctatggccagtgaatggatataccacattttatttatccatac

SEQ ID NO: 107647 - DNA, 575 bp, Homo sapiens
  misc_feature (1)...(575): n = A,T,C or G
cccatggtgccttacatctggtaggtgtagtcagtatgcagtatgtgattggctatggagcaactgaattgcagtgcttctgagcagagacacataaanagttttagagcattaaaaaatgagagactggtttttctctgaaacccaaggcagaaagtcccctaccactaaaaagaaagttttaaaaatttcctattttgaccacatcaccatcatcaatccttcaagacactgattttacccattcacatattgttccctcttcttcaatgctctcctcctccttgtggacatctccttgtagacctagaaaacccccactcaatcttcacttcccawgttgaacagcaattcttaaggaagtcttcttcctcttttttcattggaaacagggtcatgctctatagcctgggctccagtgcagtgatacaatcatatctcactgtacccttgaattcctggactcaagggatcctgttgcctcagcctcccaaatagctaggattacaggcatgtgccaccataaaaattttttaaaaattaaatttaaaaaaaagatttctagatacagggtg

SEQ ID NO: 107648 - DNA, 613 bp, Homo sapiens
ttttccaagtgcaaatccctaacacttttaaaattttattttacccggtgggaagaaaatactcattaaaggatccgcaaacttcagctkcttggcaggaattttcagctcattacatggtaattaatactaatctatatgctaaaaaataaaaaaaacctgttttctttgttccaatttttatactgcttctctgccagacagccaataaagctaaaacagaattgtttgtttttttaaaaagcctataatgcacagaaaaaaattttgtgcctaggctgaagaaatctatgcatttttagtttcaggataataaaagtttattattatttttaaaattactaatattattaccacacattgcaacaactctaggcccaacaaccattaaaaaaaatgcaagtagtagttaagaatttgaaaactttttaaatccactttttagatatggctttatctgcattagattacttaaaaatgcgacctcactaactgagataatatttcatattgcatctggtattagatatgccaggatcattgtctatttaaaagcatggtctctgatgattactccaaactcttgctacagagaataaatgagagacaagaa

SEQ ID NO: 107649 - DNA, 456 bp, Homo sapiens
aaggaagatactgattttagaaactagcaatgtgccacatgggaaaagacgttcagttgccaacaggacaaaggcccagccgccttccagcatgagctccccaccctcctctacagagcctctgggatgtgcctatctgccccactccctttccccaagacacattctgcctttcccccctgcatgcttttgcttctttcaaagaacagaaacataatattttgccaagactttgcgtgcaccttatctatatgagttacrttgtaaatagcattctattcaactttcaaaccatccccatgaggtagaaatctctattttacaaattaaaaaaaaaaaaaaacaggcacagaaagatttgtctacttgcccaaagtcacagagcaaataagtgacagaataacttttttaaagcaataaagcattgtcatttttgtatatatactatatggtaag

SEQ ID NO: 107650 - DNA, 235 bp, Homo sapiens
cccatttcaaaaaattatttacatatatcatacttcattktacttttttcttttcccaaatgcctttattttgttgctggccctataagaccaattatttaattcattaaactttccctttctcattcccaactctgtttacactaacttttctggagatgcagtcagctttaccttccaaatctcccattaagttatatatttctgcaataaatttcttaaattttaagaattc

SEQ ID NO: 107651 - DNA, 235 bp, Homo sapiens
cccatttcaaaaaattatttacatatatcatacttcattgtacttttttcttttcccaaatgcctttattttgttgctggccctatargaccaattatttaattcattaaactttccctttctcattcccaactctgtttacactaacttttctggagatgcagtcagctttaccttccaaatctcccattaagttatatatttctgcaataaatttcttaaattttaagaattc

SEQ ID NO: 107652 - DNA, 608 bp, Homo sapiens
taactgcccagttaccttggaatagctgatttctcaaagtaattaccatattctgcatagtgaagtgtcatcagagaaaattttaacacacagtgatcatttttaacttggtgatttaaatatcatattgattaatgaaatagtattttaattcagactgttaagtcaaaagagagagttgttyatcacatactgtagactgcactgttgtgtaataatcacttatttcttacctgtttttaactaccatttaaaaaatattccttctaataaagataaaatcttattggattaaaaattaaaaagcaattggacccagtctcctacctagaaccttattgctgttaagtctaggacatctttaagaagccatctttacattgctgttttctgagagtcgtatgttatgatttcattagatctgcaaacaaacaacagaagcatactactggtatggtattctaacatttgccatgatattgttcatcaaattgttaactttttgttaactgtgtgttggtttgtttgctttgctttccaagaacatgtttcacagatactattagttcaagaaagctggggaaaaggaaaaaaaaaaaaaggttaag

SEQ ID NO: 107653 - DNA, 594 bp, Homo sapiens
gatccaataatttcatttctgggtatgcattcaacagaactgtatgcatatatgcagtaatagaagcttataacaatgttcacaaatggatcacttagccacagaaggaaagcaatgtctagcaagacaggaaagaataaatagtggtggatgaatagattgcaccactttacatctatcaaaatgaatatgattaagatacacacaataacatctgtgaatcttgatcataattttgagcaagaggaacaaatacaaacacattctgtattagtctatttatagggggtaaattattctttgycatttgacatcagaacagtggttacattttgggagaagagagagggaaataatatggttagggcatgaggagcctcctatgtgtcctttgagtgtttcttgaaccaggttgatagtttcatgggtgtgttcactctgaactaattccttgagctatacagttatgatttgcacaattcaattatattatatttcagtggaagctaatgaaagagaaacattgctgctaaaattcattaagtgaaggcttatggggaagtagaccttcatagcatcctatacttgcaaaag

SEQ ID NO: 107654 - DNA, 511 bp, Homo sapiens
acataaaaagacacataggcactatttttttgaygttttattgagaaatattgataacataccacagaagccactgatttaaagtgtaaaattcaatggttttcagtatatttacactgtcatgcaaacatcaccacaataaattttagatcattttcattaccctgaagtaaaccccatatccctccattttcccccaactcccctaaccctgggccaccacgaatctactttctgattctatgtattaggctattttggacactttatttaaatggaattacataacatgtggtcctttgtgactggcttctttcacttagcacaatattttcaaggtttattcaatcttgcatgtgcagagggcacactttacataaggataaaccggcggtggggggtgcttactgattgattttgaaacttccctccaaaattgtaaagggaaatgattggtttcaaatagaggaaaaacctattcaggctaaaatcctgttttcagcagatttta

SEQ ID NO: 107655 - DNA, 511 bp, Homo sapiens
acataaaaagacacataggcactatttttttgacgttttattgagaaatattgataacataccacagaagccactgatttaaagtgtaaaattcaatggttttcagtatatttacactgtcatgcaaacatcaccacaataaattttagatcattttcattaccctgaagtaaaccccatatccctccattttcccccaactcccctaaccctgggccaccacgaatctactttctgwttctatgtattaggctattttggacactttatttaaatggaattacataacatgtggtcctttgtgactggcttctttcacttagcacaatattttcaaggtttattcaatcttgcatgtgcagagggcacactttacataaggataaaccggcggtggggggtgcttactgattgattttgaaacttccctccaaaattgtaaagggaaatgattggtttcaaatagaggaaaaacctattcaggctaaaatcctgttttcagcagatttta

SEQ ID NO: 107656 - DNA, 642 bp, Homo sapiens
cttaatttgcttaatttggttacatctgcaaagacccatttttctttcttttttctttttttctttttctttctttctttctttttttttttcctgagacagagtctcactgttgccacctgggctggagtgcaaaggcgtgatctcggctcactgcaacctctgcctcccaggttccagcaattctcccgcttcagcctcctgagtaggtgagattgcaggcacctaccatcatgcccagctaatttttgtatttttagtagagatggggttccaccatgttggccaggctggtcttgaactcctgacctcaggtgatccacctgccttggcctcccaaagtgctgggattacaggcacccggcccaaggacccattttctaaataaggtaacatttacaagttccagggattaggacttcatatctgtaggtgaccrttattcagtttcctacactgcctggctcaactcacattcaagcttgaaattgttctttggttaattctttagcatcaataacagattttgtatagaattttagaatctttcagtgaaaacagaaggtcctctttggaaaagtcaggagggactagtcccgtctggtatcacctgattgaaattccaaaaattggagaaccaag

SEQ ID NO: 107657 - DNA, 507 bp, Homo sapiens
aagcagaaaaccaaacaccgcatgttctcacttgtacgtgggagctgaacaatgagaacacatggacacagggaggggaacatcacacactggggcytgtgggaggtgggcagggggaaggagagcattagaaaaagtagctaatgcatgctgggcttaatacctaggtgatgggttgatatgtgcgcaaaccaccatggcacacatttacctatgtaacaaacctgcacaacctgcacatgtaccccagaacttaaaaaaaaatgaaaaattgttaaaaagatgcaatgccaataattactctatgacaacaggtgtgagctaagactgtcccaggcatatcagatggcttttgctacatagcatactagccattggatttaaacaacaataatttttttttattttcatgattctatgggtcgcttaggaggattttgcggcttgggcctgcttggctgattttctgtgggctcatagacagaatgtaggccagttggtggctga

SEQ ID NO: 107658 - DNA, 507 bp, Homo sapiens
aagcagaaaaccaaacaccgcatgttctcacttgtacgtgggagctgaacaatgagaacacatggacacagggaggggaacatcacacactggggcttgtgggaggtgggcagggggaaggagagcattagaaaaagtagctaatgcatgctgggcttaatacctaggtgatgggttgatatgtgcgcaaaccaccatggcacacatttacctatgtaacaaacctgcacaacctgcacatgtaccccagaacttaaaaaaaaatgaaaaattgttaaaaagatgcaatgccaataattactctatgacaacaggtgtragctaagactgtcccaggcatatcagatggcttttgctacatagcatactagccattggatttaaacaacaataatttttttttattttcatgattctatgggtcgcttaggaggattttgcggcttgggcctgcttggctgattttctgtgggctcatagacagaatgtaggccagttggtggctga

SEQ ID NO: 107659 - DNA, 507 bp, Homo sapiens
aagcagaaaaccaaacaccgcatgttctcacttgtacgtgggagctgaacaatgagaacacatggacacagggaggggaacatcacacactggggcttgtgggaggtgggcagggggaaggagagcattagaaaaagtagctaatgcatgctgggcttaatacctaggtgatgggttgatatgtgcgcaaaccaccatggcacacatttacctatgtaacaaacctgcacaacctgcacatgtaccccagaacttaaaaaaaaatgaaaaattgttaaaaagatgcaatgccaataattactctatgacaacaggtgtgagctaagactgtcccaggcatatcagatggcttttgctacatagcatactagccattggatttaaacaacaataatttttttttawtttcatgattctatgggtcgcttaggaggattttgcggcttgggcctgcttggctgattttctgtgggctcatagacagaatgtaggccagttggtggctga

SEQ ID NO: 107660 - DNA, 588 bp, Homo sapiens
taatgtttgtttgagggttatggtactgcttcccttcctattatttccaaactaatttattttagtagtacatgtttgccattttataaactaggcacttatgaatacaggcccttgtttatctgagtgctaatagagattcttgaccattgtagatgatcaataaatgtttcatgatgatgatgatgataaattttatgaaatattttcttattctatgtgattgtgatgaaaatttcccaatttaatattacttatggagtggacttcaagaatcagattaccacaatgactatacctgagacttgtggttgaattattagaatagatacatgtcctttattaatcaaatatttacaacttgaaccaaaactaacaaaggattattttatttttgtaargatccttttacccaatttctgattgatttcaatgtgtataatatccttttcactctttctcatccaaaatcctgtatcaagaaaataatcattgaaatgtaacttaacctataaagaagaaaatatcctttttataaaaattcatagttttcatcatatgagtctccaattccaatcagtctgcttt

SEQ ID NO: 107661 - DNA, 541 bp, Homo sapiens
agcaaactcttgctcaaactacaaggtgctctccaaaaaaaagtgatggaaatgttttaaaacccaaaaactattttaaataattaatagtcacttgtcttgttttgtctgttggagatccatgagtgcagatgccttctttaatccatttttggctgatcacttgccaacaaggaagaaaataagaaagtaaggaaagcaagaaagcaagaaaagtaagaagaaaggaaggaaggaaggagggaaggaaggaaggaaagcaggaaggaaggaagggagggagggagggagggaaagaagaaaagaaagaaaggaaagaaggaaagagagagaaagagaaagaaaaagaaagaaagaaagaaagaaaggaaggaagraagaaagagaaaagcaagcaatcataccttccactctgaaggtgtggtgtgaacaaatgaatcagtcagatttgggggtaagagagtgccaggatttatggccaaggctctcctcacctaggcaacagttggtaggcagcatttgtggcagtggctaaaagctg

SEQ ID NO: 107662 - DNA, 447 bp, Homo sapiens
ccatttaagtctagtgctatgaaaataacccaaatcatcatctaactattgttagatgatccactgagcaagaccacctcgctccctggcttcagccccctttccaggggagtgactggttctgtcttgctggcattccaggtgccactggagtacgaaaamaaactcctgcagttagctcagtgtctgcccaaacagccacccagtattgtgtgtgtgttagtattgtgcagtggatctcccagcacagcactcgagctctgctaaggaacagactgcttcctcaagtgggtccctgacacccgtgcctcctgatggggagacacctcccagcagggagtcaacagacaccttattcaggagagctctggctggcatctggcaggtgcccctctgggatgaagcttccagaggaaggagcaggcaacaatctgctgttctgcagat

SEQ ID NO: 107663 - DNA, 568 bp, Homo sapiens
aaaatctgaaaggaatccaaaactggaaatgcttctcatcccaagcatttcagataggggatggttaacctgtagtttgatatgtcttgacacttattcactagtgtaactaccaatccaaatgaggtataaagcatttctatttcctcaaagattcctattgtctcttctcagttaacactggcaatccctgtacccagacaaccactgatcctatttaggctctaatgttagattagattttccccccattctagaatttcatataaacataatcatattgtgtgtacttttttctatctggcttctttttcacagcataatgttttgcagcttcatccatgttgcagtgtgtattaataattcatttctttttactgttaagtattattcaattgtatgaatataccatcatatatggtatccactagcttttttgacatttaatttgtttccagtttttttactattataaataaataygtaatgtgaactcttatatacataagcacatattcatgtggacgtatgttttatttctcttgggtaaatatcttgaagtagaatt

SEQ ID NO: 107664 - DNA, 579 bp, Homo sapiens
attgctttttcaaaactcagaaataatggtgaaatttaaaacagcttaattaaacttcaaatgtgtggttctgataagcctggcccagagccatggcattccaagattctcaaatagcataatctaattaattttttttctagaacacagaagtcataaacacacagtaatctgaarcacttagtgtcctgccagctggcatcttctcatttccagtttccctgcactgtaattttgctgccatttgtgagaaactgtggatttctccactttggtagattgtattaagttacgtgctattcagttgaggtattttttaatgaactaattacatgttagttaataagaaaacattgcttcaacagtcaactgttgaatatcacttttaaagaaattacttcagtcttacagtaggaatgtctgggaacaggattgacccatgaaaacagcatgattgctagcagtgaattattgagttataaatacatgtatgagtactggatatcattattattagcaataacaacatcaacaacaaagacatctatgaaattcaaattttagtttttcctgccaaaa

SEQ ID NO: 107665 - DNA, 547 bp, Homo sapiens
atgtggttatagtggctggaaagtccaaaaatctgcaaggcgggctggcaggtggcgacccagagaagagtcaatattgcagttgaagtctgaaggccatctcttggcagaattccttcttgcttgagggaagtcaatcttttgttctagtgatgactttaactgattgaatgggacccactcacattatggagggtaawctgctttagtctgccaatttaaatgtaaatctcattccaaagcattcctcccagaaaccaccagaataatgttttaccaagtgtgctaagccaaattgacgtataaaattaaccaccacagggataaaactgaactcaaggtaagaaaggccagatcatgaatgccgtgcttgggaatttggactttgattttgaggtcagatggaatcatcaaagagttttaagcaagggggtcacttgggcagatctacgactacaaaaattagttctgctaagagagtagaggacggaatgaagtaatgataagggttacagcagagagggaccttcagaagaggagggagaga

SEQ ID NO: 107666 - DNA, 547 bp, Homo sapiens
atgtggttatagtggctggaaagtccaaaaatctgcaaggcgggctggcaggtggcgacccagagaagagtcaatattgcagttgaagtctgaaggccatctcttggcagaattccttcttgcttgagggaagtcaatcttttgttctagtgatgactttaactgattgaatgggacccactcacattatggagggtaatctgctttagtctgccaatttaaatgtaaatctcattccaaagcattcctcccagaaaccaccagaataatgttttaccaagtgtgctaagccaaattgacrtataaaattaaccaccacagggataaaactgaactcaaggtaagaaaggccagatcatgaatgccgtgcttgggaatttggactttgattttgaggtcagatggaatcatcaaagagttttaagcaagggggtcacttgggcagatctacgactacaaaaattagttctgctaagagagtagaggacggaatgaagtaatgataagggttacagcagagagggaccttcagaagaggagggagaga

SEQ ID NO: 107667 - DNA, 542 bp, Homo sapiens
agtaaaaaatgattacaatttttgagtcaggaggggccaagaaaattgtggaggctctgtcagaaatgcagttaggagtggaagtaggttttaggtagaagatggaagatagtgtgtttrgtttttaatgtaacatttgaaaaaatggtagatagtttaatgttcagcagacaagtgaaaaaatgggagagaggttagggttgggcacagaatatgtaattttaaactttgtggagaactctcaatgcaaattgaaactaattgtctgtgaacaaaattacctcctgtcactaatggctgataaagggatagatcccttattgtacataaattccattttacaagtgccatcagatttctaggcagcccaactcagagtttcttcttcttgggtggtgaaaagcactgactttggattcagatatttataacctgacctatgatgggttatcatatcctggagattagcttcatatagggaaggctttttactgcataagaaagcaaaatccactaaatctcattactgagctgtattgtta

SEQ ID NO: 107668 - DNA, 482 bp, Homo sapiens
tttatgtcatgggcaggaggatgggctgggagctccaggtaagagcttctttgccaacagtaaagacttccctgattcctaacccaggaatctggtgatgccccagttctaggtggcagaggctcagatgactacaatcttctggactgtcctctatttaagtcatatgtggtctggaaacaacttyctaggcaagagccaatgctgagggtctggtctgaagccctcccaggcttctcgtctttgaaagtggtgcctccatatctcacatctggcacatcctccagcaccttcagagagaagtctttgtgggctctgcctctttcccagcagtgagaggtggatgtggaggtgattctagtcacaggctggctcactgtggctgcctgaggcatggtgtgctcactgcatccagggtggcagctgagagtcattggcctccacaagtagacagtgaacttaaaaaggcaagcttggtctgg

SEQ ID NO: 107669 - DNA, 596 bp, Homo sapiens
ataaatgcccacattaaaaagaaaaaaaaactcaaattaacaacctaaatttacattttaagaaattcaaaaatagatggaaataaggccaaagtgagcagaaagaaggatacaattaagataagaacagaaataaatgaaatagagaatagaaaaaaatcaacaaaattaagttggtttttttaagatcaacaaagaacaaaactttcgctacattaattttaaaaagagaagatatgaatacttaaaatcagaaatgaaagaggggatattacaacttttgccacaaaaattacaatgattataagagactaccatcaacaattatagaccagcaaactggataatctagaagaaatggataaattccttaaaacatataatctaccaagactgaatattgaaaaaaattgaaaagttgagcagaccaataaccagtattgagattgaattaattatcaaaaatctcccaataatgaaaagcctaggaccagagggcttcactggtgaattctgccaattattcagtccttctccaactcctccaaaaacctaaagaggakgcaacccttctaaactcacctcacaatgccagc

SEQ ID NO: 107670 - DNA, 344 bp, Homo sapiens
ttaaaagttcaacttgaaagctgcaggaatgcactaatttaaacccaggaaatctgcagacaayggtgagaggtgaatctggtgcattagtgcccaccatggagattttaaacctatgagcggaatgagtccaatggccaggggtgagtaaatctacccataaggacactgaccatggaaatgggattactgcaccaatatcccataggtcaaagaggcttttgacttgctctgttttactttttgtcaacagtgattctgctcgttattacaaagcctacttcttcactaggcatttttgaaaagagtcctaacatttctaaatgttcccttcaacacaagtg

SEQ ID NO: 107671 - DNA, 536 bp, Homo sapiens
aagcatacatacatacattgtcttctctagagcaggacttcttacatttgacagcatccaattttttggtatacacatcatggttttggtgtcatgtctaaraaatgtttacctaatccaaggtcacacaaatgttttcacgttttcttctagatgtgtttaaatgttagattttacatttaagtctttgatttgttttgcataaaattttgtatattgtgcaagttataatttgaggtttttttgcatatggatatctgatttttccagcattgtttgttgaaaagactattattttaacattgaattgccttaatgcttttgttgaaaaacacctgaccatataagtgaggatttattgttagatatttcgttctgcttcattgataaaggtttctttttttttttttctggtagtgcctagtgtcttgcatactacaactttatttctttcaatcagctagaataaattctaatgttagtcttctattttcaaaattattttggtaaaaggaaaaatgtttgctatattttac

SEQ ID NO: 107672 - DNA, 580 bp, Homo sapiens
caaagacatggattcaacccaaatgcccctcagtaatatactggataaagaaagtgtggtacatatacaccatggaatactatgcagccataaaaataatgagatcatgtcctttgcagggacatgattggagctgaaagccattatcctcagcaaactaatgcagaaatagaaaaccaaasactgcacgttcttacttataaatgcgagctgaacaattagaacacagggaggagaacaacccacactggggcctgtcagggggacagagggagggagagcatcaggataaatagctagtgcatgtgaggcttaatacctaggtgatattaaaatattagctaattatttataagacaaataataagattttggagggtctgagtctggccttggcataggtaaacaaggggtcactcataagtttcctcttaatcacataagaaagggtagttctttgcagaaagctgtttcttaggacacaaaatgttaaggggtaatttcttaatcaccacttgtggtggctcatattaggtgtcaacttgactggattgagggggatgcctagatggccgatgaa

SEQ ID NO: 107673 - DNA, 580 bp, Homo sapiens
caaagacatggattcaacccaaatgcccctcagtaatatactggataaagaaagtgtggtacatatacaccatggaatactatgcagccataaaaataatgagatcatgtcctttgcagggacatgattggagctgaaagccattatcctcagcaaactaatgcagaaatagaaaaccaaagactgcacgttcttacttataaatgcgagctgaacaattagaacacagggaggagaacaacmcacactggggcctgtcagggggacagagggagggagagcatcaggataaatagctagtgcatgtgaggcttaatacctaggtgatattaaaatattagctaattatttataagacaaataataagattttggagggtctgagtctggccttggcataggtaaacaaggggtcactcataagtttcctcttaatcacataagaaagggtagttctttgcagaaagctgtttcttaggacacaaaatgttaaggggtaatttcttaatcaccacttgtggtggctcatattaggtgtcaacttgactggattgagggggatgcctagatggccgatgaa

SEQ ID NO: 107674 - DNA, 600 bp, Homo sapiens
caaacgagaaaatgcagaccgggcactgtggctcatgtctgtaatcccagcactttgggaggccaaggcagctggatcaccagaggtcaggagttcaagaccagcttggccaacatggcaaaaccccttctctactaaaartacaaatattagccgggtgtcgtggtgtgtgcctgtagtcccagctatgagggggctgaggcaagaggatcactcaaacctgggaggcggaagttgcagtgagccgagatcgtgccaatgcactccaacctggacaacagagcaaggctccttttcaaaaaaaaaaaaaaagaaagaaagaaagaaatgagaaaatgcaaattccaaaagaaagaatatgcttttggcaaattacagttctttttgcagccagtccaaaaatatgaaatagaatatgtataatggtttatttcttcattctttcttgtccctgagaatttgaaaatacttgcaagttgtaatttaggttttgctattttttaagattcatcatcataatcatcagtataagtatattgagtccctgttgtgtttgccatatcatctgaatcataacttacgtataataaaatgcaataa

SEQ ID NO: 107675 - DNA, 436 bp, Homo sapiens
ttgttcaccacctgatctatggtattttgctatagcagcctgaatagactacaacaatatcttttataccacttaattctcacatgttagaaaaagctgtcatcttacattatatcttaaaactcacagccagaagcaagaggcaggggatggagtagattaacaccttgtgtctgtagggagaaagacaggcatataaccttccctgtgtggcccaggatcagatactgccttcctctccatctatatctatctatrcactcatgttcatatgatctacagataactatttttattcagctttgtatttccggtacttagcatgtttggtgaacaacaattattgaatgaatgaatgaatgaacaatgattcattgaaaatgctcagacactttgggtgcttgaactaggattagaatttacatccgctgaattc

SEQ ID NO: 107676 - DNA, 596 bp, Homo sapiens
ctagcctttttttgaaccttctattacgtgctaggcaccagcaaatcaaagacaaatgaactatggtccctaactcaggagtctcaatatttattagtagaaacaaatgcataacaatcatcaattatttgttactttaacaaatatttatcaagcaccaattatatcctagacaccactctagactctgaggatataacatatacaagatagagtggcctgtttggaatcaggctgcacagcaggaagtaagtggtgggtgagcaagtgaagcttcatctgtatttacagccactccacattgctcacattaccacctgacctacccctcatgtcagatcagcggcagccttagattctcataggagcgcgaaccctaacatgaactatgcatgtgaggaatctaggttgtggattccttatgagaatccaatgcctgatgatctgttagtctcccatcacccccagatgagactatctagttgcaggaaaacaagctcaggactcctactgattccacattatggtgagttctataattattttattattyattataatgtaataatgatagaaataaagtgcacaataaatgt

SEQ ID NO: 107677 - DNA, 494 bp, Homo sapiens
acttaaccaatcttgcccttgttattatggcgtgctttgagaagagatgaggagcaggcctggcctggtggaaaccytgtcagatatgttcattagtgccctttttcatttcccccacattaggttcagcctgcaagcccaatagtccctactcctttccctggcccacagccaagaagaaagcctaatggctggagggacaaggtgtttgggttctgataccactagcaaagcttgattgctctgtgtagtcactgcagtcagactggtgtgtatttcctcatcaaagaggaactctgatgctttacaccgtaatttgtataattaatcttctgagtttttttgaaattgcatttttgttgctgttgctgttgttaataaatgccacagtgttatcaatccacatttagtaccaagaggaaataacaatgcacatgaaagtgaaattgcaaacctagctccaccaaaggtgtcactcatgaatgatgggtaaa

SEQ ID NO: 107678 - DNA, 491 bp, Homo sapiens
gagattccctaggagagtactccacattgccaaggatcctgagacaaggaaatggggaagccacggtccttaccctcaggtgtctcaaatatcaccagtagatgaatcaaaggattccctccttaacccttaggtcaattattaaacacataaaaatagaatcttctcacatcttgttttttgtaacaatgaaaaagaaagtacctttttttttttctgagtagctgtgttatctaggctcygagaatcagtgatctatgttttgaatatacatgtcccttactatcaaagttatttgtaattcaataattattctttttattagtatgtttatattatatgtatacaatcataaatatatatttttaaatcttaatggagtaattacttatatcagtcattgtcataactagtaaaaccgtgctataatgcgagcaggataatcttcctctatggcagatgcaagaaagatgtgaagtttgggggatgaa

SEQ ID NO: 107679 - DNA, 617 bp, Homo sapiens
ctccacagatcctctcacactttaatatctctgacttcagcaaagaccaagtccttgaggtctgattacgtcagtcccacctaaataattgcccttgggttaacttaaaattcaactcattagtaacctactcatgagagtactgtcctatcttattcactggctcttcccacactcaaaaagaaggacatatacatgaagtatccattagaaggtgggaattctggaagccatcttagaattctgcctaccaagtttccatccagtgattcccaaagggcctctctgctcaccacagcacttaccacaatgagtttttcctatatccttttctgacactcaccacactttgaatcctcggagggcagggatcatgtcatattcatatttgtcttcccaacatataactcaaggcctggaataaggtagatgttcaccaagggtttgccaagtattcatgctgtgcatattcataaactagaccctttgcatattagaaaatagaacaaacacaaatttgkatgaaagcctgatctagggtcttaggaaagatgcaactaactcaataatttcaaaaagttaagaaaggttgacttcaaaagcaggctaataaacat

SEQ ID NO: 107680 - DNA, 651 bp, Homo sapiens
ttgaatcaacccaaatgtccataaatagtagattgaataaagaaaacttggtacatatacaccatggaatgctatacagtcatagaaaggaacaagatcatgtcctttgcagggacatggatggagctggaagctgttatcctctgcaaactaacacaggaacagaaaatcagacgccacgtcttcttacttataagcaggaactgaatgacaagaacacgtggacacatcgggggaacaacacacactgtggctggttgttgttggaggggagggagagcatcaagaagaacagctaatgggtgtggggctcaatacctgtatgaggggtttatctgggcagcaaaccaccatggcacatgtttatctgtgtaacaaacctgcacatcctacacatgttccccagaacttaaaataaaatttgataaaataaagaaggaaaacaaataaataaataaattgacataattagaatatttctctaagtgtttaataactaaatggatttgaarcttttagactgacattatgacattttaagtaatgcttccatgtaactgaatgatttggtttgttctgtgtccgcatccaaatctcatcacaaattgtaatccccatgtgtcagaggagggacctggtgtgaggtgattg

SEQ ID NO: 107681 - DNA, 633 bp, Homo sapiens
caccccctgtacttccacttgttaccacctccctgctcctttttgatgtttctcctttccctcttattcccttatcttctctccctcaaccataatgatttctgtatcccaatcatctgcctgttttcagtcccttgatcatcagctgagaagggttttaatcttgtcttattgttgtattagttaaagtttttccacacaaatgttactatctctatctatctatctatctatcacaaaatcagtaggagatatatatatacacacacacacacatatatacatatgtgtatgagaaattgcctcatgtgattatggagactgaggagtccccaaatctgctgtgtgcaaaccagcaacccaggaaagctgacagtatgattaagtccaaggacaaaggtctgagaacctggatagccagagaagatgasaggagatgtcccaattcaagtacgcaggcaggaagcaaaagtagagaattcctccatcctccaccttttgttctatttaatctctcaatggattggatgatgcccagtttcacacattgaggagtcaagtctacgtactgaatccacccattcaaatgctaatctcttccaagaacaccctcacagacacacccgaaatagt

SEQ ID NO: 107682 - DNA, 633 bp, Homo sapiens
caccccctgtacttccacttgttaccacctccctgctcctttttgatgtttctcctttccctcttattcccttatcttctctccctcaaccataatgatttctgtatcccaatcatctgcctgttttcagtcccttgatcatcagctgagaagggttttaatcttgtcttattgttgtattagttaaagtttttccacacaaatgttactatctctatctatctatctatctatcacaaaatcagtaggagatatatatatacacacacacacacatatatacatatgtgtatgagaaattgcctcatgtgattatggagactgaggagtccccaaatctgctgtgtgcaaaccagcaacccaggaaagctgacagtatgattaagtccaaggacaaaggtctgagaacctggatagccagagaagatgagaggagatgtcccaattcaagtasgcaggcaggaagcaaaagtagagaattcctccatcctccaccttttgttctatttaatctctcaatggattggatgatgcccagtttcacacattgaggagtcaagtctacgtactgaatccacccattcaaatgctaatctcttccaagaacaccctcacagacacacccgaaatagt

SEQ ID NO: 107683 - DNA, 613 bp, Homo sapiens
aactttgacatttattgaggttttttcccccgatggataccttctgattttctgtcttgggattttcctttcctaaattacccttgtagatattctaaatcttaaaaaggaagaaagaacttgcttaccatctctttgagataccttatgcatccatggttaagttataaccttagttaaaacttattaatttcatgtgggaagttacctgtggtagaattcaaaagccagcaatattgactgtgctggcaaaagtctggtaataagatatttaaaataacttttttttttttttttagaaaaaagagctctgtggtttaaatcagcttaattaagaatggatatccaagctatatgtatttaagaggctctaacttttccctcttcatgatttgtatttttctgaaaaattttgtttcttcacagtagattcaattattcttctccattttgtcttcttgacaytcttgatgcccacaagagaaaacttaagataaattctaacagtctgggactccttgggaagaacagaggaaccacagactccattgtgggaaaaaacttggttttcctcactgaagcctggaaattgaaacagcaattgaaatagatc

SEQ ID NO: 107684 - DNA, 572 bp, Homo sapiens
ctctgcctacttttagtgcagatccccctgccagttcaaatgtctatggaggtcgtgagctctcttgtagttaggatcccaggcgtctgcagcaagagttggctgtccctctgtcccttcattcaccccttacttagtagctattgaggggcaggcactagccctggcattcagcaaccctgcacaggactcagctttccccccttcagccttggtgtctgagccatggctccattgactcagtgttttctctctaaagatcttttcaaagtttgttggtttacttgagaatttggtctccctccatgggagtagcacttctggatgcactgaatggcccatgttgtctctcctcaattatttatttttattcattgtcaaaacttcctttaatcctagactgcattctagaatatatagttggttttaaattataacactttgtaattcataccaaaattcatcatctttatataccaaaaatccaaaaataaatttgtcttttcaactttgtatgaataattgkgatgatattttgtcatcccttgatagtctacttgtttctgacactt

SEQ ID NO: 107685 - DNA, 608 bp, Homo sapiens
atgtacatattaggttaagtggcatgtttcttttattaatttttaggttcataacaaatttatgtgctctgttttcactccggtagctaggaaataaaaatggtttgaatctgatttggtttcccccttactcactatagtgcattggcaccacaccctgctgagctccagctttactctcccatctttttattcctgttcccaggcagaatgctgtctgcacagtgcaagttctgtcccctgcactcacacagagcatgggatgaccacaaggccaggtgctgagaatacatctcaggcttgcctttgtaactgtgctgctgagaggacatgtatttgtgttcatcaggcagaaagggaggaaggctaccacttaaggaaagcctacaatagctttctctttgtgtgtgtgataaggagcatttgggataaatacacagcaggtctttgaattacatcgtttcattcaatatcatttctttctaacmccgatgagaaaaaaaaaaaaaaaaacactctctggctagggctgctgtctgtgtggagtttgcacattctccccatatctgcatggcttttctaccctgttttcctcccacctccctaag

SEQ ID NO: 107686 - DNA, 576 bp, Homo sapiens
cacttcttaataggatctagaacaacataatttctggaaagatgttaagatagaaattaaagattaatcagtcagtgacaactggtgggtaggaaaagggtcaataaggggcagtagagagaaaagaaaggaggtaagaaataacatggatggtgtcccaaaggccactggcctargcctcagggttcccattgttgacccagataatgaagggagggttcacaagactcattaaatttgctgaagatgatcttaagaggacaaccactaacctggaagggagaattaaatacacattaaaggactttaataaacagagaaataaccagaagcaaaccactgatgatcaatgcagagcttgacagaaatagaggaaaaaccaagtgcacaagtgcaagctggacagtgtaacaaagaaactgtaataactgtagggtgaccatataatttatcatctaaatatggacatgtggaagggggaaaagggtgctaatacaacacaaggacaacaggcttaaatgaggattgtcccaaatagtaatataaagtcaccctatactgtggtttaatgtgtcc

SEQ ID NO: 107687 - DNA, 571 bp, Homo sapiens
ttcttaactatataggctctgctccaagagggtgcattgcttatggggaaataagtctataaacacaacaacaaagtaaaatgattaggataagaagtaaacatagaaaactatgtgaacacccaaaaaaagggtcctaatcctaatgggaattatcaggaaaggctttcaaaagattatgatttatcatgcatatgtgaaagtgtgtgccatggacagagacagatgaccagagggatcaggaagagcctttataggatacaaaagtttgaaatcttaaagacaatagaggaacggaaatttacaaagagaagatcatattaacaattcttatttaagcaaggaaatgacaaaatctgttcatatkttggaaagttcactctgaaagccatacggagaggagattagagggatacaaatcaagagctagggcatttatcagaggctattgcctgaaataggcaagaaatgatgaggcttgagttaagctcatggcagagggaatgaagaggagggagaagattccaaagagaaagaagttataattattgcacttgggactgatttaatg

SEQ ID NO: 107688 - DNA, 571 bp, Homo sapiens
ttcttaactatataggctctgctccaagagggtgcattgcttatggggaaataagtctataaacacaacaacaaagtaaaatgattaggataagaagtaaacatagaaaactatgtgaacacccaaaaaaagggtcctaatcctaatgggaattatcaggaaaggctttcaaaagattatgatttatcatgcatatgtgaaagtgtgtgccatggacagagacagatgaccagagggatcaggaagagcctttataggatacaaaagtttgaaatcttaaagacaatagaggaacggaaatttacaaagagaagatcatattaacaattcttatttaagcaaggaaatgacaaaatctgttcatattttggaaagttcactctgaaagccatacggagaggagattagagggatacaaatcaagagctagggcatttatcagaggctattgcctgaaataggcaagaaatgatgaggcttgagttaagmtcatggcagagggaatgaagaggagggagaagattccaaagagaaagaagttataattattgcacttgggactgatttaatg

SEQ ID NO: 107689 - DNA, 418 bp, Homo sapiens
taaaaaatctttaaaaagggtcaagacattcaaagtttcttcatgttctaaatttccaacaggactgaattgctctagaggtctgaaattagtagaaattttcttttcttttctctttttggccctagtagaagtgttttagcttccmcagtgatagaaatgggcaaataacatctatttggggagtaatggacaatctttggttatatttatttgctgatctctgttgaaattacagaggaaattaaaagtttgctttctttagtactgtaaagtttagaaagattcatttcagtcaattactgccaaagttactttgccatataagccaaagttacttagggtagttttaattattgcaaagttattgttgaggagctcaccttccttatattatggcgattgtaatctggaattc

SEQ ID NO: 107690 - DNA, 426 bp, Homo sapiens
gacctcgtctcacaaaaaataaaattagccaggcatggtggtgcacatctgtagtcccatctacttgggaggttgaggctgcagtgagctgagatttggccattgcactccagcctgggcaacagacctcgtctcacaaaaaataaaattagccaggcatggtggtgcacatctgtagtcccatctacgtgggaggttgaggctgcagtgagctgagatttggccattgcactccagcctgggcaacacagtgagaccctctctctcgaaaaaaaagaagaggggttttcaagtaagtgaacagggaatgaaattctttttgccaggamcaggtgtatggaattgtgaaaatacttaaaagatgggggtggcagcagctgaaaacccttttatgtgaagtctccaacgagtcaggcatagtacatc

SEQ ID NO: 107691 - DNA, 629 bp, Homo sapiens
ttcggcagttttgggggggtgtttacttagtttgtttttccctgtgtactatttttttatggctttggtatcaagacagtgctggcctcatataatgagtcagaaagtgtttacgttcccacgtcttgaaaytcctgaaaaagtttgagaaagcagagttagttattctttaaatgtttggtagaacccacaagtgaaggtaataggtccagggcttttattggtcagaaaattattgattactgattcaatcttcttactagctataagtctacttagaattttcattttttatttcagtattggtaagttttgtgtttctgtaattttttccatttaatctaggttatccgattttttggtagatagttgttcatataatccatttaatttctgtagattcagtaggaatgtccccactgtcatttctgattttagtattttttcttagtaaatcttcttaaatggctgtaaattctatttatctttttgaagaagcagctttaaagaaaatttctctgtagttttctactttctatttcatttatctctgcttattcattattattcactttcttctggtagctttgggtttcattttttcttctagtttcttttttgatttgagt

SEQ ID NO: 107692 - DNA, 552 bp, Homo sapiens
acatcttttgcaggaacatggatggagctgagggctattaacaaattaatgcaggaacagaagaccaaatactgcaagttcttatttataagtgagagctaaatggtaggaacttrcaaacacaacaagggaaacaacagacactggggtctacttgaggatatagggagggaggagggagaggagcagaaaagataactattgggtactgggcttaatgcctgggtgatgaaataatatatacaacaagcctccataacacatgtttatctatgtaacaaaccttcacaggtacccccaaacctaaaaaaaagttaaaaaagaaaaaagtgcggaaacaataaatcaaagaaacactcttcccacacacatctgcaaactgtttctttctctcgattatcagtcttctaaccccctttacctgagtaacattataactactttccctctatcttcttttacttttcttctctccattttttctaccttggacacagtgacttttaagactccaaatctcttcattatatttcctttataaaagttctaata

SEQ ID NO: 107693 - DNA, 552 bp, Homo sapiens
acatcttttgcaggaacatggatggagctgagggctattaacaaattaatgcaggaacagaagaccaaatactgcaagttcttatttataagtgagagctaaatggtaggaacttacraacacaacaagggaaacaacagacactggggtctacttgaggatatagggagggaggagggagaggagcagaaaagataactattgggtactgggcttaatgcctgggtgatgaaataatatatacaacaagcctccataacacatgtttatctatgtaacaaaccttcacaggtacccccaaacctaaaaaaaagttaaaaaagaaaaaagtgcggaaacaataaatcaaagaaacactcttcccacacacatctgcaaactgtttctttctctcgattatcagtcttctaaccccctttacctgagtaacattataactactttccctctatcttcttttacttttcttctctccattttttctaccttggacacagtgacttttaagactccaaatctcttcattatatttcctttataaaagttctaata

SEQ ID NO: 107694 - DNA, 488 bp, Homo sapiens
gaattcagttcggagattgtaacactgaagtccctgtgttcttgactgatgtctaggaggccccttcttgattaatgtgaaggagctcctagaggatatctgccattccccaacatgttggctctctctcaacatggcaggtgcccatttagggctaacaagaaaaggtctctgctgcttccaatttctgacttctgtccttgacctctagagtcaaatttacaggactcgggtgatcaggtcagacccacccagatcatctctgttttgattaactcaaagkcagttgatcagtaaatttaagtacatctacaaaatcttcagtaattaaaatcaaagtttacagtgattaaactccatcattaaaattagtaatcttatctcttcagaaatctattttgctatataatataacataatcagaggagtgatagctcatcatattttcatccatccatgctcaagggaaggagactacacaagcacga

SEQ ID NO: 107695 - DNA, 423 bp, Homo sapiens
gactcatacaaatatggccaattgacttttgctaaatgtgctaactatttcaatggaggaaagacagtgttttcaaaaaatagtgccagagcagttggatatttttaggaagaaaataaacctcaacctaagtctcataccttatataaaaataaacttaaaatagatcatggccataaattaaaacataaaattataagaattatataaaaacatagaaggaaatctttggaatctaaacctagacaaagagttcttagacttgataccaaaatcacaatttataaaggaaaccacyggtacactgtacctcaccaatgttcaaaacttttgttctgtgaaagaccttgtaaagaagatgaaaagacctactagagactgggagaaaatatgtgtaagccacatatctgacaaaggatccat

SEQ ID NO: 107696 - DNA, 645 bp, Homo sapiens
aaaaatcatataatcatctcaatagatgaagaaaaggcatttgaaaacattcagcaccacttcatgataaaaactcttaacagattaggtacagaggaaagtatttcaatgcaataaaggccatatgtaacaatcccatagataaaattattctcagtgttgaatgaacagttgaaagcttttcttgtargattagaaacaggacaagaatgctcattttcgtcacttactttcaacatagtacaactgtaagtcttaaccagagcaatgggaaaagagaatgaaataaaagggatcctattaggaaaggaagaaacaaaattgtctctgtttattaacaacatgaacttatacatagaaaatcttaaactccaccaaaaaactgtgaaaactgataaacaaattcagtaaagttgcagaatgcaaaatcaacatacaataattattagtgattctaggtactaataacaaattatcctacaaaggaaagtaagaaaacaatcccattcatcataacaaccaaaaaaattaaatatttgggtgtaaattttacaaaggacgtaaaagagctatgcactccaaactataaaacactgatgaatgaaactgaaggaaacacaagtttggaaagatatcccaagttga

SEQ ID NO: 107697 - DNA, 645 bp, Homo sapiens
aaaaatcatataatcatctcaatagatgaagaaaaggcatttgaaaacattcagcaccacttcatgataaaaactcttaacagattaggtacagaggaaagtatttcaatgcaataaaggccatatgtaacaatcccatagataaaattattctcagtgttgaatgaacagttgaaagcttttcttgtaagattagaaacaggacaagaatgctcattttcgtcacttactttcaacatagtacaactgtaagtcttaaccagagcaatgggaaaagagaatgaaataaaagggatcctattaggaaaggaagaaacaaaattgtctctgtttattaacaacatgaacttatacatagaaaatcttaaactccaccaaaaaactgtgaaaactgataaacaaattcagtaaagttgcagaatrcaaaatcaacatacaataattattagtgattctaggtactaataacaaattatcctacaaaggaaagtaagaaaacaatcccattcatcataacaaccaaaaaaattaaatatttgggtgtaaattttacaaaggacgtaaaagagctatgcactccaaactataaaacactgatgaatgaaactgaaggaaacacaagtttggaaagatatcccaagttga

SEQ ID NO: 107698 - DNA, 645 bp, Homo sapiens
aaaaatcatataatcatctcaatagatgaagaaaaggcatttgaaaacattcagcaccacttcatgataaaaactcttaacagattaggtacagaggaaagtatttcaatgcaataaaggccatatgtaacaatcccatagataaaattattctcagtgttgaatgaacagttgaaagcttttcttgtaagattagaaacaggacaagaatgctcattttcgtcacttactttcaacatagtacaactgtaagtcttaaccagagcaatgggaaaagagaatgaaataaaagggatcctattaggaaaggaagaaacaaaattgtctctgtttattaacaacatgaacttatacatagaaaatcttaaactccaccaaaaaactgtgaaaactgataaacaaattcagtaaagttgcagaatgcaaaatcaacatacaataattattagtgattctaggtactaataacaaattatcctacaaaggaaagtaagaaaacaatcccattcatmataacaaccaaaaaaattaaatatttgggtgtaaattttacaaaggacgtaaaagagctatgcactccaaactataaaacactgatgaatgaaactgaaggaaacacaagtttggaaagatatcccaagttga

SEQ ID NO: 107699 - DNA, 645 bp, Homo sapiens
aaaaatcatataatcatctcaatagatgaagaaaaggcatttgaaaacattcagcaccacttcatgataaaaactcttaacagattaggtacagaggaaagtatttcaatgcaataaaggccatatgtaacaatcccatagataaaattattctcagtgttgaatgaacagttgaaagcttttcttgtaagattagaaacaggacaagaatgctcattttcgtcacttactttcaacatagtacaactgtaagtcttaaccagagcaatgggaaaagagaatgaaataaaagggatcctattaggaaaggaagaaacaaaattgtctctgtttattaacaacatgaacttatacatagaaaatcttaaactccaccaaaaaactgtgaaaactgataaacaaattcagtaaagttgcagaatgcaaaatcaacatacaataattattagtgattctaggtactaataacaaattatcctacaaaggaaagtaagaaaacaatcccattcatcataacaaccaaaaaaattaaatatttgggtgtaaattttacaaaggacgtaaaagasctatgcactccaaactataaaacactgatgaatgaaactgaaggaaacacaagtttggaaagatatcccaagttga

SEQ ID NO: 107700 - DNA, 556 bp, Homo sapiens
atgagaagggctcttcccagcatttcccactgggcccatgagccgaggaatgtgggcagtttatataaaatggaaaagccaagggaatgaattcttccctaaagcctccagaaagaagcacagccttgctgacatcttgattttcccctactgagagacctgtgttgggtttctaacatacaaaattgtaagacaatacatccacactattttaaatcatgaagtgtgtggtaatttgatacaacatcaaaagaaaattagtacaaattttggtactaatagtgggatgctactgtaacaaacacgtaaaaatgtgaacatggctttakaattgggtagtggccagagactggaagaattttgaagagcatgagagaaaaggcctggagtgccttaacagaccctacgagaattatggatgataatcactctgctattaaggattcacaaggaagtgaggaacatggttggtaaagagacatatcacttcagagaatactaaactgtcagcagactgctggtggaaatgcagacactgaaggaactgcgggtgagg

SEQ ID NO: 107701 - DNA, 599 bp, Homo sapiens
gtcaattgtatcttaataaaactgaaaaaaatgcaagggataccatacaccatgattcttcaagactatgtaaagattcactcctctgagctctcctaatatccaaactgtcatctgtcattaaatttactatttaccttattgctttgtctgccacggtaacataaatatcttcacagggaatgtgtgatatgaatgttgtactccaaaacctagtacaaagtttggtacatagtaggcacaagaaaatgttggttgaaataatgcaygattctttgtaaaatttgttttcagtgctcacatttgactaactttgtacactgcctttctaatataacaagtgttattcccaaacaggaacccaatgattccagagacaaatcacctaatatgaatagcagcaaatataaagcacttgtcagtaaatcccatagtcccatcctggttgtttttctttcagaaatgattttctgacacaaaataatcaacacctagtttgcagcttcttgcagtctagaagcaaatgattcatgcttcttgttattgtattagtgcatgggaaaagcaataaaaaatccaagaagccataatatattcac

SEQ ID NO: 107702 - DNA, 599 bp, Homo sapiens
gtcaattgtatcttaataaaactgaaaaaaatgcaagggataccatacaccatgattcttcaagactatgtaaagattcactcctctgagctctcctaatatccaaactgtcatctgtcattaaatttactatttaccttattgctttgtctgccacggtaacataaatatcttcacagggaatgtgtgatatgaatgttgtactccaaaacctagtacaaagtttggtacatagtaggcacaagaaaatgttggttgaaataatgcatrattctttgtaaaatttgttttcagtgctcacatttgactaactttgtacactgcctttctaatataacaagtgttattcccaaacaggaacccaatgattccagagacaaatcacctaatatgaatagcagcaaatataaagcacttgtcagtaaatcccatagtcccatcctggttgtttttctttcagaaatgattttctgacacaaaataatcaacacctagtttgcagcttcttgcagtctagaagcaaatgattcatgcttcttgttattgtattagtgcatgggaaaagcaataaaaaatccaagaagccataatatattcac

SEQ ID NO: 107703 - DNA, 649 bp, Homo sapiens
ggtttgttctatagccatgtatctgtttttaatttcttcattctttttttttaaattttttatagagatgagagtcttgctatgtttcctagtctggtcttgatcttctagcatcaagcaatcctttggcctcagcctctcaaagtgctgggattacaggtgtaagccaccatgctaggcctatttcttcattctttatgttccagaaacacatccatgaagactttgctcaggggtcaccttgtcttgaataaattttcctatacctgccaagatctctgattatatgcacaatatttttgctactatattgaccacattgtattacacatatttgttaaaaattttttgtgatctaagaaaatgctaagttcattgaaggcagtgccacatcttagtacttaaattcctagtatttagagttccaggagttcctcaagaatctttattgagtgaataaatgaattattttacagagtatactgcayagtttgggtacaccaaaatgcagaagctaaaatgggattagaggtgtaagagatttattaagaggggaggaaaataatagacagtggggaaaggtttcagattataatgtggttttgagacctattgcgggagaaagaaaagggaggattgggtaggaaga

SEQ ID NO: 107704 - DNA, 465 bp, Homo sapiens
agtcttttttagataggaaaacaaaaccgaaaacatgaagagagtgaggagaagcgagggagagagaagaaggcagaggacaaatcacggaggaccttgcatggcctgataaagaggttgggtgtyattctatgggaagcgatagaatagattctgcccagtaatctgatgcacatctttgaaagattaccctaccttcattatgtagactggattacagggtgatgaacagaagcaggaaaaccagttagacatgtaattcaatagtttaagcctgaaataaggtgggtgacagtggatataaagacctttaaatggattggattagataaatcttggatgaagaaaatacagggttagctgttggattggacatagtacatcagagaaagaaaagcagtgaaatttagtaccaagattgttgccttgactaaatgaatggatagatattagttctatttactg

SEQ ID NO: 107705 - DNA, 534 bp, Homo sapiens
aaatgaaatcctgaaactatataagattcatatctcttgattatccaaaatagagacatattattacttatgaagatgaaatgtttgtggtttgatgctaaaacatttagtactaataattattccatatasagtgtttgcattaatctcgactacactaattcagagcatgagctctttgcctttgtgcatgaagacagtttcttgggcaaattaccaatgtaatttcctcgttgtcattccgcaaaccatctatgttcaaatattttaaaagcagctgtacagaaccaaataatttatattttaattctatataaatcaacatatacttctttacttggacattaccattttaacttcaaattcaacatgtctattttgaaacccttgatttccaggataaatcagtctcttgctgacttcccttctcttttgtttgtggtagaatgattcccctaatgttggagccttaaagtctaacttagtgactcctctcatgttttccatatctagtctggggcaacatccagaaat

SEQ ID NO: 107706 - DNA, 534 bp, Homo sapiens
aaatgaaatcctgaaactatataagattcatatctcttgattatccaaaatagagacatattattacttatgaagatgaaatgtttgtggtttgatgctaaaacatttagtactaataattattccatatagagtgttygcattaatctcgactacactaattcagagcatgagctctttgcctttgtgcatgaagacagtttcttgggcaaattaccaatgtaatttcctcgttgtcattccgcaaaccatctatgttcaaatattttaaaagcagctgtacagaaccaaataatttatattttaattctatataaatcaacatatacttctttacttggacattaccattttaacttcaaattcaacatgtctattttgaaacccttgatttccaggataaatcagtctcttgctgacttcccttctcttttgtttgtggtagaatgattcccctaatgttggagccttaaagtctaacttagtgactcctctcatgttttccatatctagtctggggcaacatccagaaat

SEQ ID NO: 107707 - DNA, 431 bp, Homo sapiens
aattcaatattgtatgaaaatttcttaatatggtgttgggcacatagtaagccacagaatcaactcgagacttcatagattccagactattagaagctgatatggtttggctttgtccctacccaaatctcatctcgaattgtagctcccataatccccacgtgttgtgggagggacccagtgggaggtaattgaatcatggaagtgggtttttcctgtactcttctcatgataatgaatatgtctcaagagatctgatggttttataaagggcagttcccctgcacatgccctcttgcctgccgccatgtaagatgtgcctttgctcctcttttacctctgccaagccatgtggaactgtgagtccattaaacctctttttctttataaattacccagtctcagaartttcttcatagcagtatgaaaat

SEQ ID NO: 107708 - DNA, 605 bp, Homo sapiens
ttcaacaacggtctgtagtaggagaaaatatgccactctgtaattcttagacgagcacaacctaaattatcatgatgtacagaaactcccaaagcatcccagcaccataaaaaaatagagaaatcttatcagtcttctttaggacttgttccctgggaagccaatgaccatcaaaacagaatggctttggttactggtaagagcaaccttccttgtagaatatatattcatggaccagatttttaaaatcctgctttctttttctttccacagtcaatattcttggaagaatatcaaccctgaatacctatcatgtatcctttacagcttcaatggtatagggtctacatatcttcaggaaaatatctttgtaaatctaaatattaaggttttctttkgtctttctcattctttgaacttcacttttaaaacatctttattggagtaaattatggacaaaattaaatggcatatttaatttacaaatacatatagttttataatgaaataaaatatatttaatttctctttctctctacctatctctgaaatctttttataaaaattagcagtttcttcatccacttagtcctaccctatgttct

SEQ ID NO: 107709 - DNA, 554 bp, Homo sapiens
tacagtatctgaagggggaagagggccatgagcttcaggttcttcttggtcttgcggggcacaccatggggagaggaacaccaaagagagcccttgtcaggccccctgaagtggggaatcgtgccctgggaagcagcttcactggcctggggctaaaggtggtactgaactcatatgttgcgaatatcttccaggacagctggaggaattaagggtggttcatctttccatagtaggaatactcttgttggagtaagtggtttcctcctaggagagtccattagtattatttctttgattaayctatgtctgcgttctgagctgcttgtacccttcttcacccttaccccccaaccccccaccaaaaaacagaaaacaaaccaaaactctaaaggtaacaccaatccttcactcaggcttcagaactgtttgaggatcgatatagatgataatgccagctgctttattgctttcttactaagaaccaggcaagaaaccaagctttagcttatttaatcctcataataccaccatgagaaagatctaattattat

SEQ ID NO: 107710 - DNA, 511 bp, Homo sapiens
aatgattctatctaatagttttaattctttcttcagatcaaggattttcataaactcttggtgaagtagggaaaagggatgactactgatcagtcacatcacctwttacactacagtcaatcccatgtaaaatccagaggcaaattagaaaaatcacatctgagtttattaaggaaatatttgtttagaactgtacaagcaggtggaaagagaattctttgtactgcaaatcccattcacagatccccactcactcccctcatccccattccaacccttccccttaattctccaacaggatatctagtgaaaagcacttaaccgatgagagacaactgtctcactggctccatgagtgagtctaatgtcaggagagctggggggctagtgcagaagggcatgaacacggtttgaaaaaccccctgtcctcaccacacaccagcagcccctcatgtagctgagaatcactgatgtatagacaccttcataacactaattaatcctgagccta

SEQ ID NO: 107711 - DNA, 511 bp, Homo sapiens
aatgattctatctaatagttttaattctttcttcagatcaaggattttcataaactcttggtgaagtagggaaaagggatgactactgatcagtcacatcaccttttacactacagtcaatcccatgtaaaatccagaggcaaattagaaaaatcacatctgagtttattaaggaaatatttgtttagaactgtacaagcaggtggaaagagaattctttgtactgcaaatcccattcacagatccccactcactcccctcatccccattccaacccttccccttaattctccaacaggatatctagtgaaaagcacttaaccgatgagagacaactgtctcactggctccatgagtgagtctaatgtcaggagagctggrgggctagtgcagaagggcatgaacacggtttgaaaaaccccctgtcctcaccacacaccagcagcccctcatgtagctgagaatcactgatgtatagacaccttcataacactaattaatcctgagccta

SEQ ID NO: 107712 - DNA, 567 bp, Homo sapiens
cacagaaatacaaaaaaccctcaaagactgccatgaacacctctatgtacacaaactagaaaacatagaagaaatggrtaaatttctggaaatataaaacctcccaagattgaaccaggaagaaactgaatacctgaacagatcaataacccattctgaaattgaatcggtaataaaaagcctgtaaactagaaaaagccctggatcagatggattcataactgaattcttccagatgtattatgtaaagatgacctggtaccattcctactgaaactgttccaaagacttgagaagaagagactcctacctaaatcattaaatgaggccagcatcaccctgataccaaaacctggcagggacacaacaacaacaacaacaaagaacttcaggccaatattgttgatgaacatagatgcaaaaattctcaacaaaatactagcaaactgaatccagtggcacatcgaaatctaccacgatcaagtaggctttattgctggttggtttaacatactcaagtcaataaatatgattcatcacataaacagaacgaaataaaaaccaaat

SEQ ID NO: 107713 - DNA, 567 bp, Homo sapiens
cacagaaatacaaaaaaccctcaaagactgccatgaacacctctatgtacacaaactagaaaacatagaagaaatgggtaaatttctggaaatataaaacctcccaagattgaaccaggaagaaactgaatacctgaacagatcaataacccattctgaaattgaatcggtaataaaaagcctgtaaactagaaaaagccctggatcagatggattcataactgaattcttccagatgtattatgtaaagatgacctggtaccattcctactgaaactgttccaaagacttgagaagaagagactcctacctaaatcattaaatgaggccagcatcacmctgataccaaaacctggcagggacacaacaacaacaacaacaaagaacttcaggccaatattgttgatgaacatagatgcaaaaattctcaacaaaatactagcaaactgaatccagtggcacatcgaaatctaccacgatcaagtaggctttattgctggttggtttaacatactcaagtcaataaatatgattcatcacataaacagaacgaaataaaaaccaaat

SEQ ID NO: 107714 - DNA, 567 bp, Homo sapiens
cacagaaatacaaaaaaccctcaaagactgccatgaacacctctatgtacacaaactagaaaacatagaagaaatgggtaaatttctggaaatataaaacctcccaagattgaaccaggaagaaactgaatacctgaacagatcaataacccattctgaaattgaatcggtaataaaaagcctgtaaactagaaaaagccctggatcagatggattcataactgaattcttccagatgtattatgtaaagatgacctggtaccattcctactgaaactgttccaaagacttgagaagaagagactcctacctaaatcattaaatgaggccagcatcaccctgataccaaaacctggcagggacacaacaacaacaacaacaaagaacttcaggccaatattgytgatgaacatagatgcaaaaattctcaacaaaatactagcaaactgaatccagtggcacatcgaaatctaccacgatcaagtaggctttattgctggttggtttaacatactcaagtcaataaatatgattcatcacataaacagaacgaaataaaaaccaaat

SEQ ID NO: 107715 - DNA, 567 bp, Homo sapiens
cacagaaatacaaaaaaccctcaaagactgccatgaacacctctatgtacacaaactagaaaacatagaagaaatgggtaaatttctggaaatataaaacctcccaagattgaaccaggaagaaactgaatacctgaacagatcaataacccattctgaaattgaatcggtaataaaaagcctgtaaactagaaaaagccctggatcagatggattcataactgaattcttccagatgtattatgtaaagatgacctggtaccattcctactgaaactgttccaaagacttgagaagaagagactcctacctaaatcattaaatgaggccagcatcaccctgataccaaaacctggcagggacacaacaacaacaacaacaaagaacttcaggccaatattgttgatgaacatagatgcaaaaattctcaacaaaatactagcaaactgaatccagtggcacatcgaaatctaccacgatcaagtaggctttattgctggttggtttaacatactcaagtcaataaatatgaytcatcacataaacagaacgaaataaaaaccaaat

SEQ ID NO: 107716 - DNA, 553 bp, Homo sapiens
aatgctattcctatcaaatgaycaatgtaattttttacagaattagaaaaaactattcaaaaattcatatggaagcaaaaaaagagcttgaataactaaagcaatcctaagcaaaaggaacaaggtcagaggcatcacattatccaactacaaactataccatgagcctacagtaaccaaagtagcgtaggactgatacaaaaagagacacatagactaatggaacagaatagaagaaataaagccacacacccacagccatctgatctttcatgaagttgacaaagataagcaatggggaaggattccccattcaatatattgtgctgggataactggctagccatatgcagacaaataaaactggaccatcagcctgtcataatactagaagaaaacctaggaaacactattctggacatcaaccttgagaagaagtgtatggctaagtcctcaaaagcaatcacaacaaaaataaaaattgacaagtgggacgtaattaaactaaagagcttctgcacagcaaaagaaatagtcaacatagtaaacaaac

SEQ ID NO: 107717 - DNA, 618 bp, Homo sapiens
gtttcaacattcctttttctttttgtctataatttaagttgataatgtttgtatttcaggcactcattccctcattttagttattaaaacaagatggatgcacacaagttcaaaaatttactcctggacaagtgtgtgcactattgatgccaactaattcactcagtcttgttggaggtggggaataactgattttccagcttaatatattttcctcatagaggttgaatttatgttggaggcaactagtaatttccctctaccgattttaaaaagcacaaagacaagaagaccaaatatctcctgtgggyctctcattcaccagcagacaccctcccttgcctattccttgattctccactaatttttcgcctaggtcattttttctcattcctataaatccaaatggtctacagacacttcctatgagatctcatcttgactaatcactatatatgactcacccccaggagtccaacacaattctgggtgtgtagataaattgttcaataaataagaatttctaacaaagaaactttgtagtggcaaatgttgcattgtaacttgcagctctcactctgggccagcaaggcacaagtgttttcattcatcccatat

SEQ ID NO: 107718 - DNA, 618 bp, Homo sapiens
gtcaggcacaaatccccctaactctgccaacacctagcttatgtttcttcatttataagttttttttgaaagattttgtcaaatgtttcaagacattcttccttatctacaaatttcattcctcaaaattataaataaaattactttggaataactttagctcggaattggggataggtcattttcagttcktaatatggagcaaaacatgataggtatctaagaaagagaaagcagtcattgtgtcttaggatagataggagatgaagaaacaggaaaaagtgacacaaaagaggaaacaattgacataattaaagcaatagataataaaagcccaatcaaagtatggggagtaaaaatgaaaaaattctgatgcttattgaaagaaaatatcaatagaatttctggactttgttggggaatcaataaagatttgagtactcaaaaggaggaactttgcaggggcatctaatatttccaggttgggtaaagaaataatttaagtagttttcgttgaaatatttgtaacattacatatcatgtaacacttaatatagaacaagagacatgattatcaatgtcaattccatgtaaattataaagacatagatgactctt

SEQ ID NO: 107719 - DNA, 618 bp, Homo sapiens
gtcaggcacaaatccccctaactctgccaacacctagcttatgtttcttcatttataagttttttttgaaagattttgtcaaatgtttcaagacattcttccttatctacaaatttcattcctcaaaattataaataaaattactttggaataactttagctcggaattggggataggtcattttcagttcttaatatggagcaaaacatgataggtatctaagaaagagaaagcagtcattgtgtcttaggatagataggagatgaagaaacaggaaaaagtgacacaaaagaggaaacaatkgacataattaaagcaatagataataaaagcccaatcaaagtatggggagtaaaaatgaaaaaattctgatgcttattgaaagaaaatatcaatagaatttctggactttgttggggaatcaataaagatttgagtactcaaaaggaggaactttgcaggggcatctaatatttccaggttgggtaaagaaataatttaagtagttttcgttgaaatatttgtaacattacatatcatgtaacacttaatatagaacaagagacatgattatcaatgtcaattccatgtaaattataaagacatagatgactctt

SEQ ID NO: 107720 - DNA, 588 bp, Homo sapiens
aatctttccccccagcatgtcttattttaaagcctgtgttagaagctacaactgtctgtctagtacccaatcctttagatattgctttaaatgttttacataaaagaagaataaatggaagtccttctttttctgcttatctgcagcattttgsgttttattaagtctactttgaagcagaccaagaatattttttctacctttcattgatcctcctatttcaccttataattcttttcattgattaagccatgccccctgaggatctgattggaaagaaaggaatcagagactcagaatgttcacttgagctggaaaacaactgcaggataaatttccctgtaggagcctagagggacctgtgcagtagggctatgctgtcagccaggagttaactacaagatagagagcccctattagttaatttttttaattagtctgccttttgcattcagcagtaaagtcctacttaaatgaaaatgatttttcaggaaggaaaatcaagagcgagtagggatttccagagaggagccagtggcttagagagcaggatctgaagtcagtccaactcccgccctgccactacca

SEQ ID NO: 107721 - DNA, 618 bp, Homo sapiens
atagaaaactctctccttataagttgctctcaggaaatgttaccttagtatttgctattttagttactttaatcaactgatatcttttttaaagttctggattagaataattattataatgagtaaaacttagagtgcttactataactgtaaaaaagatatagagagtaggtaccattttggtcctacttcacacagagggaacttaggttaataacattaaaacagtagctagagcttgaaccctggtctttctcatagcaaagtcacacaattaaccatgagtrtaaattttcaaactccacacctcttagtttcatgtgagctgtccttaattccgcatagccacaatgtatttaaatttcagagaacacaacgatagttttcactgaaattgcaaaaccattatcatacaggagacaacgttctaaaggttcaaggcattagctgctagaagtgatgtgcattgagcgatgggcaggacactatgtcaaccaagcaaaggccattctcttgattcatacactttgcttctgtttgataatacctacaaccttcattccagggcctgacacagtgtgggccaaatgatatacacaaaatacacattttgtattc

SEQ ID NO: 107722 - DNA, 618 bp, Homo sapiens
atagaaaactctctccttataagttgctctcaggaaatgttaccttagtatttgctattttagttactttaatcaactgatatcttttttaaagttctggattagaataattattataatgagtaaaacttagagtgcttactataactgtaaaaaagatatagagagtaggtaccattttggtcctacttcacacagagggaacttaggttaataacattaaaacagtagctagagcttgaaccctggtctttctcatagcaaagtcacacaattaaccatgagtataaattttcaaactccacacctcttagtttcatgtgagctgtccttaattccgcatagccacaaygtatttaaatttcagagaacacaacgatagttttcactgaaattgcaaaaccattatcatacaggagacaacgttctaaaggttcaaggcattagctgctagaagtgatgtgcattgagcgatgggcaggacactatgtcaaccaagcaaaggccattctcttgattcatacactttgcttctgtttgataatacctacaaccttcattccagggcctgacacagtgtgggccaaatgatatacacaaaatacacattttgtattc

SEQ ID NO: 107723 - DNA, 618 bp, Homo sapiens
atagaaaactctctccttataagttgctctcaggaaatgttaccttagtatttgctattttagttactttaatcaactgatatcttttttaaagttctggattagaataattattataatgagtaaaacttagagtgcttactataactgtaaaaaagatatagagagtaggtaccattttggtcctacttcacacagagggaacttaggttaataacattaaaacagtagctagagcttgaaccctggtctttctcatagcaaagtcacacaattaaccatgagtataaattttcaaactccacacctcttagtttcatgtgagctgtccttaattccgcatagccacaatgtatttaaatttcagagaacacaacgatagttttcactgaaattgcaaaaccattatcmtacaggagacaacgttctaaaggttcaaggcattagctgctagaagtgatgtgcattgagcgatgggcaggacactatgtcaaccaagcaaaggccattctcttgattcatacactttgcttctgtttgataatacctacaaccttcattccagggcctgacacagtgtgggccaaatgatatacacaaaatacacattttgtattc

SEQ ID NO: 107724 - DNA, 618 bp, Homo sapiens
atagaaaactctctccttataagttgctctcaggaaatgttaccttagtatttgctattttagttactttaatcaactgatatcttttttaaagttctggattagaataattattataatgagtaaaacttagagtgcttactataactgtaaaaaagatatagagagtaggtaccattttggtcctacttcacacagagggaacttaggttaataacattaaaacagtagctagagcttgaaccctggtctttctcatagcaaagtcacacaattaaccatgagtataaattttcaaactccacacctcttagtttcatgtgagctgtccttaattccgcatagccacaatgtatttaaatttcagagaacacaacgatagttttcactgaaattgcaaaaccattatcatacaggagacaacgttctaaaggttcaaggcattagctgctagaagtgatgtgcattgagcgatgggcrggacactatgtcaaccaagcaaaggccattctcttgattcatacactttgcttctgtttgataatacctacaaccttcattccagggcctgacacagtgtgggccaaatgatatacacaaaatacacattttgtattc

SEQ ID NO: 107725 - DNA, 406 bp, Homo sapiens
aaaagagatgagatagtctgaaaaatactcaaagacatgctgccaacttaataaaagctaaaagtttcagcctaaacattcctctttaatgaagaccttggtgcagctgaaatgggatgattccattctaaaacatytaaagaaatttaccatagttagcagaacagatttgcttcttctcagtgaaattatctttcatctttctcaatgtttataaaagtaggatctttaaaagtctgcattataaagcaaaaaaaaaaaaaaacaactgtcccacagctaaaaaccaaaaataagtcatcaaaactgaaatggaaacacattcccctcgataattacattttagtaaataaagatataactagctgttggtgatgatttctggtgatgaaaatgacccagaatt

SEQ ID NO: 107726 - DNA, 550 bp, Homo sapiens
ggaagggtagttgatcatacaacaggtgaaggaggtcttctagggagtgggagggcccagacactggctgttagccaaatcctctctcakctgctccctgtggtttggtgactcaggattacagaggcatcctgtttcagggaacaaaaagattttagctgccagcagagagcaccacatacattagaatggtaaggactgccacctccttcaagaacaggagtgagggtggtggtgaatgggaatggaagcctgcattccctgatgcatttgtgctctctcaaatcctgtcttagtcttaggaaaggaagtaaagtttcaaggacggttccgaactgctttttgtctctgggctcaagttagagaaccttgcaatcctcaaagatgttagggcaggaacaatctgtctttccaaccccgtttgaatggcttttaggtcacaagttatccaagaatgtcagggaaactttgcagttccacaccgactctctggtaaggaagctccagagagactgtgccatgtgatgtcccacatcagtagcctggaagc

SEQ ID NO: 107727 - DNA, 550 bp, Homo sapiens
ggaagggtagttgatcatacaacaggtgaaggaggtcttctagggagtgggagggcccagacactggctgttagccaaatcctctctcatctgctccctgtggtttggtgactcaggattacagaggcatcctgtttcagggaacaaaaagattttagctgccagcagagagcaccacatacattagaatggtaaggactgccacctccttcaagaacaggagtgagggtggtggtgaatgggaatggaagcctgcattccctgatgcatttgtgctctctcaaatcctgtcttagtcttaggaaaggaagtaaagtttcaaggacggttccgaactgctttttgtctctgggctcaagttagagaaccttgcaatcctcaaagatgttagggcaggaacaatctgtctttccaaccccgtttgaatggcttttaggtcacaagttatccaagaatgtcagggaaactttgcagttmcacaccgactctctggtaaggaagctccagagagactgtgccatgtgatgtcccacatcagtagcctggaagc

SEQ ID NO: 107728 - DNA, 524 bp, Homo sapiens
acctggttgggtgcactggctcacacttgtaatccctgcactttgggaggccgcggtggacagatcttgaggtgggtggatcacttgaggtcaggagttcaagaccagcctggccaatatggtgaaaccctgtctctactaaaaatacaaaaactagccagggatggtggcatgtgcctgtagtcccagctactcgggaggctgaggcagaagaatcgcttgaacccaggaggcagaggttgcagtcagccaagagggcaccactgcactccagcctgggcaacagagcaagactccgtctcaaaaataaatgaataaataaataaataagacttactatttgatagcatagcacaacaaggtgactatagtcaataactaaattgtatattttaacataactgaaagagtacaactggattatttgtaactcaaaggataaatgcttgaagggatggagaacccattttctataatgtgcttrtttcaccttgcatgcctgtatcaaaacatctcatgccccc

SEQ ID NO: 107729 - DNA, 657 bp, Homo sapiens
tccactgtagacttactaaatctaaacctctgaggttgggtcttgtagtaggcagaattctaaggtggcccccccaaattcctataccccagccaacagtgtgcacatcctgcataatccctccctttgagtgtgggcaggacctgtgaatatgatgaaatgtcatgcccatgattaggttacatatgtggcaaaggaagggggttttgcagatgcaattaaggtcttaatttagttgakttgagttgattacttgaaagggagagtatcctgtgtgggactgacttcagcaggtgagagctcttcaaattagggttgggtttcttctgaagctagagatatcttccgctggccttgaagaagcaaatggccaggcagtgagccgtctatgcagatgattacatgttaaagatctgagtgtggcctctaggagaaaagattggtttctagctgacatctaacaagaaaatgtggatctcaattagccacaaggaaattcaattttgccaccaacctgaacgaacttgaaagtgattcttcccaaattaagcctctaaacagcataaactttgacctcatggccaatagcactgtaattcatgcttgagcaaagacatagtttctaaccattttaaccggtcagatcaccaacaaaaa

SEQ ID NO: 107730 - DNA, 529 bp, Homo sapiens
atcatatatgcagactttttaaatctggcttttttattcagcataatgcttttgagattcacccatattgttgcatgaatcagtagtttcttctttttattgctgagtaatatttcattatatgaacacactatatattttatgtatttwtcaacatttgtacatcttcttttgtgagatgtcagttcaattcttgtgcacattttaaaaaattggattgtcttttcactgatgatttataggctttctttacatatctgggatacaagttgtttgtcatgtatgtgttgtgaatattttttataatatttcaatttgttatttgttatttgtctgttcattattgcaatgctgtcttgagatgagcagttttaattttgaagtctagtttatctatggttttcatggttactgctctttgtgtcctactgaagaaatcttggtctactccaaagactcattccatgtgccaacattcccctgcagattaggagtgccctgttcctgttctcatggctttctcttccaa

SEQ ID NO: 107731 - DNA, 540 bp, Homo sapiens
tttatttgtcatgagacgatatatttgagccccaaatatctgcaaatacatttttggctttctggttatttataaggcaaaaaccaggttaaatggcatgaaattatttgatasttttcagtggcccaatgaagcacaaaataagctatttacaaagctattggctttacctgggacacaaaactcactaagaatatgttggataagaactgtcacaggaacttgttatgaatttacacaccaactaaccacttggaaataagtttcattgccagctccagtctttagcctagggaaacaagtgtcaaaacaaggggatttgggaagcacaatcttctcaacaggcctgtgtcattaaaaccagtgcaagcttagtgtaaaataatactgttattatgaatttatctgcagagctatatatacctaccctgctttacattccttccctccttgtcggctgatactaagcttattcacaagctaattccttcattgtccttgctttcattccacatatcttgctacattagtctggaggct

SEQ ID NO: 107732 - DNA, 618 bp, Homo sapiens
gactttcagcaaaacaatatgtttttctagaaaggcattgtaacaactattagaaggtcaaaatcataccaagttatgtagtctatatatctcaataatatctttcaatcatttattattgcacatttttatgcttatcttaaccttcaaacacagatttcaataaaacttttagggaatgaaaaattatacaacatatctatcatttacctttgtgaatatctataattcctgcgatttgaatawttactatatgtcagccccaagcctagactctttatgaacagttttgcttttaatggccacaatgtagaaactggtacaaattgatgaaaaaactgaagccctgaaaaataagcaaccttttgcaggccacagagcaattcagttacagctatgactcagagctcagggagtcagagctccacagaccattattctgcccatggtacagacttttggaacagtcactaatgtgaaaacccaatcttaatggcatatatagaatttatttttcaaagcagtattgatctcagtttttaagtctttaaacacagaaaaatttagagctttataataagaaaaatatccaacgtgagctagaaaaggaatgatata

SEQ ID NO: 107733 - DNA, 618 bp, Homo sapiens
gactttcagcaaaacaatatgtttttctagaaaggcattgtaacaactattagaaggtcaaaatcataccaagttatgtagtctatatatctcaataatatctttcaatcatttattattgcacatttttatgcttatcttaaccttcaaacacagatttcaataaaacttttagggaatgaaaaattatacaacatatctatcatttacctttgtgaatatctataattcctgcgatttgaataattactatatgtcagccccaagcctagactctttatsaacagttttgcttttaatggccacaatgtagaaactggtacaaattgatgaaaaaactgaagccctgaaaaataagcaaccttttgcaggccacagagcaattcagttacagctatgactcagagctcagggagtcagagctccacagaccattattctgcccatggtacagacttttggaacagtcactaatgtgaaaacccaatcttaatggcatatatagaatttatttttcaaagcagtattgatctcagtttttaagtctttaaacacagaaaaatttagagctttataataagaaaaatatccaacgtgagctagaaaaggaatgatata

SEQ ID NO: 107734 - DNA, 635 bp, Homo sapiens
gtcaatctttaatagctgtgttgttatgtattgaaagcatgaatgttcactatcttactaaaatgctcccacaatcatgcctctttttgtagtaccatccttccagatacaagtaggaaaagtcgccagaagacaagagctgtagggaaaaccaccaaccctatcttcaaccacactatggtgtatgatgggttcaggcctgaagatctgatggaagcctgtgtagagcttactgtctgggaccattacaaattaaccaaccaatttttgggaggtcttcgtattggctttggaacaggtactgtttgctacatttttaattctccatgagccaaatttttctagagatactagaggtttgtttgttgctttgcttcttcccagtgaaaaccgagatatcctgaaaacagatatctcttaagtatagtgaaataaatgagtaaagaaatgtcaggttgtatgccaagggctccagatatgaggattaacagggtgaagtgtctctgcatatagagtttaagttattgtggcagtggcagggacagaaaagccttcatcactagtctgccctgcaaaaacatttatggtccttcaaggctaaatatatgytttgagtaataacaataacatttttg

SEQ ID NO: 107735 - DNA, 570 bp, Homo sapiens
aaagctaggtgaagaacttctagacttgatactaaaagtatgattttcattttaaatgaattttaaaatgaatttcaatgaattttaaaattcattttaatcaactgggacctcatcaaaattaaaacttttgttctgtaagagaccctgtgtaaagaattaaaagaaamactacagagcaggagaaaacatttgccaaccacatattcaagaaagattttgtacctagagagtataaagaactctcaaaactccacagtaaaatccaaacgatccaattaggaaaatgggcaagaaacataaacagaaattttaccaaagatgatatacagatggaaaataagcacatgaaaagatgttcaatatcattagccattaggaatatgcaaattaaaccaatgagatagcactatctacctatcaggatggctaaagtaaaaaagagtaataataccaattgctggagaggatgtggagaaactggatcactcatacattgttgatggaaatgtaaaatggtacactctgtaaacaatttgcttgcttcttataaaactaaacatgtattta

SEQ ID NO: 107736 - DNA, 405 bp, Homo sapiens
ttgactttaacttatattaatttgacttacacttagattaatttattagctccttattatataacaccactgattaaagacaatgataatagaaaacatgccaagttcaaactcattagcttaaaagcttcaagtcaacttttctcctaaagtatagcttttacatacctcctgggctgcacrtggacctaactagaagataaagagggaacttttgccttgcaatgaaaccagccatagtttaatgtccattttgaatggtgaaggtattcttccataaacagtccatgaattgttcttttggttattccatcagttgcagcctatcattacaaaaaccattaaacttaatgggtctgaaactggctatgattttaatgccagttaagcctccattacctacag

SEQ ID NO: 107737 - DNA, 622 bp, Homo sapiens
acactagaactcaaaaaacaaaaacagattcctcctaataaagattttatagcctttgaccatcacctccccattccctccacccccatcccctgtaaccgccattctatctgcttcgagtgtgattattttaagattcctcatgtaagtgagaacatactatctttgtttttctgtgcctataagccagtatttttcaaatggagattcttgtgataaacactccttacatctttcacgtttgaaaatgatttttcaaagtaatttttaaggcttttgtcatttacaaatagaattttgctttgtggtgcttccctgaaagctcttacaaatctagctgtagtgctttgtctyaacaaaggattatctcagagccccatggcaaagctctatgccaggtacttttcatttggggcagaagcttctgatgccgtcacttacacaaccttgagaccataccagcagactgagtcaggatttccagagccctgtttggagaggcagatgtatgcatgaaactgttaagccaagaggaagcagagcaagaattacacaggactgaaggaactgatgaggaatgactgtagcttttgtttggaatattgctgatattttaatggtt

SEQ ID NO: 107738 - DNA, 604 bp, Homo sapiens
atcttatatcttcatctctttaaatacatctctactcacttcaagtgtgattctagtgctayacagaaatcacatctcatttctatggtccactcactcttacttcttcccaattcagctccaacacattcacactgaccctcatcctcaactgatctccttgccttctgtttcattgaaaaaaaaaaggaagcaatcagaggattgttttcatacctccatatatacctatatcccacaaatttagtgcatacagcataaatgtactgggaataattattttcttatagtagttatgccactgacttgcaattcacttaggttctgtagctttagtttgttctgaacatttagtaactctattgtatattttatacggcttttttcaatacaatttttatttttatatagagtaattgtggatacacatgcagttgtaaaaaatactacaaaaacatcccattgacctatcatctagttccccacaatggtaacagcttacaaatctatactacaattttacaaccggagtatggatattaacagagtcaagattcagaacaatttcctgactggtttcttgtgttgctctgtgacagccaca

SEQ ID NO: 107739 - DNA, 618 bp, Homo sapiens
ttttatatttgttgatccctgtgcctagggcacttttatttgtctggtaatattttgattacgcactgatgcccagtttaactgtctcctccactgatttgctgcaccttctttgagtcatctttgcaaacatgtgcctctctatagtagcattactatattataattatctcttaacatgtctagtgcctccactagtctgtgtttccttaaggattgaagagtggtgcatttatttctgtgccatgactgcatagacatgcaacctggcatacagtaggtgcttttttaaagtttggtraataaatgaatattgctggaacagcatttagttctgatggctggctcactcatggccatcacatttgtagacatcacatttactttgagcctgaataagaagaaatctgaattaaaactgcattttctggcatgattcaaagaggacatataatagtccagaaaagtttttaatgaatgaatattcacagtaagagctctgcttccaaaatgcaaaaaagagaagaaataacaataaaagctcagtatactaaaatttgataatgtacagtttgtgttattcagctgatatttatgattttaggcttctgttcagat

SEQ ID NO: 107740 - DNA, 564 bp, Homo sapiens
aggggcttatgtagtagcttgaaagcaaaatgagggaaggtatctttgtctattttgttcactgggtatatctaaagaagcaagaatggcgtttgatacatggaagctacccaataaggatttattgaataaatctggcaaataacaggaagaggctgtattagtaagaaggtctagatcagtttcctattacttctgtaacmaattgccagaaacttagaggcttaattaaaacaacacaaactcattatcttagagttctattgtcggaattataaaatgggtctcactgagctagaatcaaggtgccagcagggctgcctgccttctcgaggccctagtgaagaagtaaaccacatttacttgccttttcctgcttccaagcaaccacatttcttgactactgtcttcaaggatgtggagtccttatgctgccatctctctggttctctcttacatagtggtttcttcctcttcctctgttaaggactcttgtgattgtattgggaacaccagtggaacacaggatactctccttattgaaagtaagctgatgagcaaccc

SEQ ID NO: 107741 - DNA, 506 bp, Homo sapiens
tgctgtacaaagcctaggaaaataagacattagcaatatcataaataaaatgctagctatttaaatatagtcaaatctacattattttcacaaatggattcaaattactaatatatgtttgcatgtggtctttcaggtacataataatatgttagtgtaaatgtgaagttaattttaataaataatatttgtttagattctggattatgttataaaatcaataagaatttatttatctggttaaaattacaaaatagagatgcacacactaaaatagtcaagggaaagtgtaaataatgtatctgctttcaacatataaagtgaaataaacatctttttttccaaagatatgtcatcaaatatgatttgagaatagattcagtgctttgcacctcatgttggctgactgttctactccaagtatgattcaaygtattaattttactttaatgtctctatgattcagcaactacataattcctgaataaataaccagatattcttag

SEQ ID NO: 107742 - DNA, 601 bp, Homo sapiens
accaattgcgtcgggctcgaactctcgcaggtgacagtcaggaccccccaccgcctccaggagacgggtggatccgcagccccagtgcaggctctcggcgcaggcggcgtccaggtaaaccacagcccgtttcactttggccagcacctgctcccatccttgctgggtaaaggacagtacgcccgaggcgctcatgrttggggattcgcagacttgggaaactacggtgcaggaacttctttcagaactcaccgcttccggaaattgggctccgggagactttgacagtctccacagtacacgtggtcggcctctgacacgctccctgatggcgctcggtgatgacgttaaactgagcggtgattggctagagaggaggccgggagtgaggaaggatggcgcggtcgggaaagaagtgggtggggctctgtggctccgggcttcctcaaaagctcgtggagatcaggtgtttcctgagatggagctgaactgagttctttccgtcgctcggcctgtctgcgcagataatcttctcagataatcttctcatgttccttgaaaagtctccgaaataaaaacctaatccgaaatttggtatctt

SEQ ID NO: 107743 - DNA, 584 bp, Homo sapiens
gaattcttttctcacacaactctgtttagagtctgggcaaaggaggcaaaaacaaaaacaaagcaaaagaaaaaccccaacttctccaattgcctgcccttgtttgcttccctgcttccacagagactagaagaagattacaacacacaccaaaactcataaagcccataagcctcctggtgatagcaacaccaagtattttacgtccaggtaaggagatrggtaagatgtaaccttggaaaaaacagagccagagatcaatgaaggggaaaattctatacaaagacattttctttttaaaatcctttttcagatactgtcttctgtcttttgcctcctcagtgttatgtctctctgcctttcaattcacacagtggtggtagttttaaaatcagggattgcagagattgaacattcctttttaatgatgcccttagagtcacacaggggcctctttgctatttccagctaagctcacccctcctcttttcctggaacttctgaaagggccccagaatcagcctatgtgatctgctgcagcattagattgagaggagggtttgctttttccacagatactgatt

SEQ ID NO: 107744 - DNA, 526 bp, Homo sapiens
taccatagttactctaatggaacatgctcttacaggaaggaactgattcaatgtttattttcataccagctgtggcttccaaatgtaaatcatttcacttcttgctagtgtatgccgatcctccgtggcccctgcattgatcctatggtcgaataatttgcacgtagtattacataacaaggaagctctactggggctgcagttgaattcccttaattgtctggcaaatcatcattttctttatgtgttttactagtattctcattttggggattactgttaactgatggagggcaaaagccatcaccaaatagccacagttcttcctggcacatgtgacaactgtcctaggttgagacaatctcttttacaataattctgacactttgatctttcttgtcwcatcagtcactggagtctgttagtacaacgctatgtatccacataattcagacttctgttgcagcgcaagttcgagttcagtacgggtttgcttatttctaggatttaacccagtaccaggagc

SEQ ID NO: 107745 - DNA, 483 bp, Homo sapiens
agaaggcacactaatggcaaacaggcatatgaaaaggtactcaacatcactgatcaacagagaaatgaaaatcaaaactacaatgagatatcatctcaccccagttaaaatggcttatcttcaaaagacaggcaatacaaatactggtgagggtgtggagaaaagggaacctttgtacacttttgatgggaatgtaaattagtaaaacccgtatggaaaacagtttgtaggttcctcagaaatctaaaaactgagctaccayatgatcctgcaatcccactgctgggtatataaccagaagaaaaaaaattagtgtatcaaagagatatcagcactcctatgtttgtagcagcattgtttacaatagctaagatttggaagcaacctaagtgtctatcaacagatgaatggataaagaaaatatggtagatattcagccataaaaaaatgagatccaatcatttgcaacaacatggaaggaac

SEQ ID NO: 107746 - DNA, 644 bp, Homo sapiens
gacccatacaaggggtgttcagccaaagacagtcctcagtcagactgtggcctgagacagatggtgaggccagttggtgctttggggcagtcagattacatttccaaggcgttctcgtgtgacagctgtgtgcctttgatcaaaacattgagaaacaaaccctcacgtgtcccttagcacaaaaacagccaggaccctgttttcctggatcaaagagaggcatgtcagatactctataggacttcatatgcattaaataccacattctcagaagagctgcagaggcccaggatgacaggggtcactacagaaagaggacctctgcaggaggtgaggaggggctccaccagggcggactctctttgtatctgttgtaccctcagcacctacaacagtacctggagcaatgtagaagctcaataaatattttttgaattaattattaaataagtgagctgcttctatctggcamgtcccttactttactcagattgacacatcattcctgctcatttttgaaaatccagctcatctctttctcagagtgctttctttgacctgtctaaacacttctctatatataaagctgtactttcaaatggatttctgttgcttgttcttataatacagtattgcagttactt

SEQ ID NO: 107747 - DNA, 644 bp, Homo sapiens
gacccatacaaggggtgttcagccaaagacagtcctcagtcagactgtggcctgagacagatggtgaggccagttggtgctttggggcagtcagattacatttccaaggcgttctcgtgtgacagctgtgtgcctttgatcaaaacattgagaaacaaaccctcacgtgtcccttagcacaaaaacagccaggaccctgttttcctggatcaaagagaggcatgtcagrtactctataggacttcatatgcattaaataccacattctcagaagagctgcagaggcccaggatgacaggggtcactacagaaagaggacctctgcaggaggtgaggaggggctccaccagggcggactctctttgtatctgttgtaccctcagcacctacaacagtacctggagcaatgtagaagctcaataaatattttttgaattaattattaaataagtgagctgcttctatctggcaagtcccttactttactcagattgacacatcattcctgctcatttttgaaaatccagctcatctctttctcagagtgctttctttgacctgtctaaacacttctctatatataaagctgtactttcaaatggatttctgttgcttgttcttataatacagtattgcagttactt

SEQ ID NO: 107748 - DNA, 561 bp, Homo sapiens
tgaggacaagtgactttgcttctctgagtctcagtgcctgtgtctataagatggggtcatcatgtccacctcacatacagaggtgttatttggatgaaacaaggtaagrtataaactcctaacatagccatggcacatcatagctcttggtgaatgctaactccccctttgtttccagttgggcagagtttcaatcagatttctattttagaacaataactccagtggattgcccttggaggggtggggctggggggactggaggcagatagaagactcaactctgggagtgagttgctttgctggtctcaatatgtaaatgctgagttctaatagcttcaatttcaggagtttacatcttcattaacagaaccaatatccttctctaagaagactggacaatgaatgagccagcttagctgcctcagtttctccaacgtgaagagaccagtctgaagggacacagttgaagcaagttcaagtttatttggccatgtgtacttgatctcttgttttccatttcattttttcgtttgttcactcatttagcaaacatttact

SEQ ID NO: 107749 - DNA, 561 bp, Homo sapiens
tgaggacaagtgactttgcttctctgagtctcagtgcctgtgtctataagatggggtcatcatgtccacctcacatacagaggtgttatttggatgaaacaaggtaaggtataaactcctaacatagccatggcacatcatagctcttggtgaatgctaactccccctttgtttccagttgggcagagtttcaaycagatttctattttagaacaataactccagtggattgcccttggaggggtggggctggggggactggaggcagatagaagactcaactctgggagtgagttgctttgctggtctcaatatgtaaatgctgagttctaatagcttcaatttcaggagtttacatcttcattaacagaaccaatatccttctctaagaagactggacaatgaatgagccagcttagctgcctcagtttctccaacgtgaagagaccagtctgaagggacacagttgaagcaagttcaagtttatttggccatgtgtacttgatctcttgttttccatttcattttttcgtttgttcactcatttagcaaacatttact

SEQ ID NO: 107750 - DNA, 561 bp, Homo sapiens
tgaggacaagtgactttgcttctctgagtctcagtgcctgtgtctataagatggggtcatcatgtccacctcacatacagaggtgttatttggatgaaacaaggtaaggtataaactcctaacatagccatggcacatcatagctcttggtgaatgctaactccccctttgtttccagttgggcagagtttcaatcagatttctattttagaacaataactccagtggattgcccttgraggggtggggctggggggactggaggcagatagaagactcaactctgggagtgagttgctttgctggtctcaatatgtaaatgctgagttctaatagcttcaatttcaggagtttacatcttcattaacagaaccaatatccttctctaagaagactggacaatgaatgagccagcttagctgcctcagtttctccaacgtgaagagaccagtctgaagggacacagttgaagcaagttcaagtttatttggccatgtgtacttgatctcttgttttccatttcattttttcgtttgttcactcatttagcaaacatttact

SEQ ID NO: 107751 - DNA, 561 bp, Homo sapiens
tgaggacaagtgactttgcttctctgagtctcagtgcctgtgtctataagatggggtcatcatgtccacctcacatacagaggtgttatttggatgaaacaaggtaaggtataaactcctaacatagccatggcacatcatagctcttggtgaatgctaactccccctttgtttccagttgggcagagtttcaatcagatttctattttagaacaataactccagtggattgcccttggaggggtggggctggggggactggaggcagatagaagactcaactctgggagtgagttgctttgctggtctcaatatgtaaatgctgagttctaatagcttcaatttcrggagtttacatcttcattaacagaaccaatatccttctctaagaagactggacaatgaatgagccagcttagctgcctcagtttctccaacgtgaagagaccagtctgaagggacacagttgaagcaagttcaagtttatttggccatgtgtacttgatctcttgttttccatttcattttttcgtttgttcactcatttagcaaacatttact

SEQ ID NO: 107752 - DNA, 547 bp, Homo sapiens
taaattatttctacattttgactcaatattattcataatagagaaatcagtctcccagaggcctgttgacaggatggaagaagmgatttaaagcaatttcaggaagcacaggatattcatttttaacctttacacaaaatgaagcaaatgatgctgtatttcaaaattcatcttcaatccttcaacagttgccagttttaacatatcctgtagagtttattaaatttaaattatcttttcttttttagagacagggtttagcactgtagcctaggggagtgcaatggcaccactacagctcactccagcctcaaactcctgcctcaagggatcctcctgcctcagcctcacaagtccctgggattacaagccaccatgcttggctctaaattatcttttgataaaagaaatggattatttatattgggtcttcactcagtggaaaataaaatttcaaaacatactttcaaatttgagaagtattcagagataacttttcacagacacacagtaacaagatcatcacttcattaataattgttgttac

SEQ ID NO: 107753 - DNA, 547 bp, Homo sapiens
taaattatttctacattttgactcaatattattcataatagagaaatcagtctcccagaggcctgttgacaggatggaagaagagatttaaagcaatttcaggaagcacaggatattcatttttaacctttacacaaaatgaagcaaatgatgctgtatttcaaaattcatcttcaatccttcaacagttgccagttttaacatatcctgtagagtttattaaatttaaattatcttttcttttttagagacagggtttagcactgtagcctaggggagtgcaatggcaccaytacagctcactccagcctcaaactcctgcctcaagggatcctcctgcctcagcctcacaagtccctgggattacaagccaccatgcttggctctaaattatcttttgataaaagaaatggattatttatattgggtcttcactcagtggaaaataaaatttcaaaacatactttcaaatttgagaagtattcagagataacttttcacagacacacagtaacaagatcatcacttcattaataattgttgttac

SEQ ID NO: 107754 - DNA, 587 bp, Homo sapiens
gatcatgcttatagcaaacagattacagtcacttgtcaggttaataagatagctttgaaagattttttaaagtagcagttttatagccaacaktttttattataatctaataacattaaaaataaattacttaaaggtgaggagaaaactatttcagaaatatgcactagataatctttggctcaaggaagaaatcaaaagggtggtgtttatttgttaacaggcaataaaaaggagaaacataaaagtgaaaactaatgacccagcaatggctggactcaaaggaaaatttatgacctataatgtccttgctataggagaagaaaattaaaagtcacagaactaagtacttgtcttaaggaattagtgaaataacaataaaataagccaagtgaagctaggaaaaggaaatctaaaaataaaagctagaattaattaaatgagttaactataatttaatgtatttattaaaattgcattaaatatatgtaacatttatttaaaaactggttccttgaaatagctaactccttcaaaaatctgaatatgttaaagaaagagagaaaacaaaaaaggagacccaatac

SEQ ID NO: 107755 - DNA, 587 bp, Homo sapiens
gatcatgcttatagcaaacagattacagtcacttgtcaggttaataagatagctttgaaagattttttaaagtagcagttttatagccaacagtttttattataatctaataacattaaaaataaattacttaaaggtgaggagaaaactatttcagaaatatgcactagataatctttggctcaaggaagaaatcaaaagggtggtgtttatttgttaacaggcaataaaaaggagaaacataaaagtgaaaactaatgacccagcaatggctggactcaaaggaaaatttatgacctataatgtccttgctataggagaagaaaattaaaagtcacagaactaagtacttgtcttaaggaattagtgaaataacaataaaataagccaagtgaagctaggaaaaggaaatctaaaaataaaagctagaattaattaaatgagttaactataatttaatgtatttattaaaattgcattaaatatatrtaacatttatttaaaaactggttccttgaaatagctaactccttcaaaaatctgaatatgttaaagaaagagagaaaacaaaaaaggagacccaatac

SEQ ID NO: 107756 - DNA, 335 bp, Homo sapiens
gaattcaaatgtattaaatatttagagacttacagaacttcaaaagagaggaacctttgagatcacctagttcaaccgtcttactttccatcagaggcaaacacaacctagaaawctttaataacttgccccgactggaacggccatgagagcccaagcctaaactagaaccaggatgtccagctcctaactcccaggttagtgcttttctaccagatctgttcgttcttcagagggttgaataaagaacaaatttaactacagttttaacttattgttatcattcactggctgcatctacaatcaaaaccaaaatgcttctacagaaccagctt

SEQ ID NO: 107757 - DNA, 610 bp, Homo sapiens
aagttcccgagttatccagtattattcacagaattgtgtcccctcaaatttcatgttgaagctataaccctcagtacctcagaatgtgactgtatttgaagataggacctttaaaattcagattaagttccttataaattctggatgttagtcttttgctgaatgcaaagtttgcaaattgttttagtcagggttctctagagcgacaagactaataggataaatgtaasatgtacatatgaaagggatgttattaagaactattaactcacatgatcatgagatgaagtcccgtaataggccataagcaagttgaggagaaaggaagccagtccaagtaccaaaatctcaaaagtagggaagcagagcgcacaaccttaagtctatggctgaaggcctgagagcacctataaatcactggtgtaggtccaagagtccaaaagctgaagaacttagcgtcccatgtttgagggcaggaagcatgggagaaagatggaggccagaagactcagccaatctagtccttccctgttcctctggctgcttttatgctagccatactgacagctgattagatggcgccctcccagattgagggtctgtctgcctc

SEQ ID NO: 107758 - DNA, 610 bp, Homo sapiens
aagttcccgagttatccagtattattcacagaattgtgtcccctcaaatttcatgttgaagctataaccctcagtacctcagaatgtgactgtatttgaagataggacctttaaaattcagattaagttccttataaattctggatgttagtcttttgctgaatgcaaagtttgcaaattgttttagtcagggttctctagagcgacaagactaataggataaatgtaagatgtacatatgaaagggatgttattaagaactattaactcacatgatcatgagatgaagtcccgtaataggccataagcaagttgaggagaaaggaagccagtccaagtaccaaaatctcaaaagtagggaagcagagmgcacaaccttaagtctatggctgaaggcctgagagcacctataaatcactggtgtaggtccaagagtccaaaagctgaagaacttagcgtcccatgtttgagggcaggaagcatgggagaaagatggaggccagaagactcagccaatctagtccttccctgttcctctggctgcttttatgctagccatactgacagctgattagatggcgccctcccagattgagggtctgtctgcctc

SEQ ID NO: 107759 - DNA, 610 bp, Homo sapiens
aagttcccgagttatccagtattattcacagaattgtgtcccctcaaatttcatgttgaagctataaccctcagtacctcagaatgtgactgtatttgaagataggacctttaaaattcagattaagttccttataaattctggatgttagtcttttgctgaatgcaaagtttgcaaattgttttagtcagggttctctagagcgacaagactaataggataaatgtaagatgtacatatgaaagggatgttattaagaactattaactcacatgatcatgagatgaagtcccgtaataggccataagcaagttgaggagaaaggaagccagtccaagtaccaaaatctcaaaagtagggaagcagagcgcacaaccttaagtctatggctgaaggcctgagagcacctataaatcactggtgtaggtccaagagtccaaaagctgaagaacttagcgtcccatgtttgagggcaggaagcatgggagaaagatggaggccagaagactcagccartctagtccttccctgttcctctggctgcttttatgctagccatactgacagctgattagatggcgccctcccagattgagggtctgtctgcctc

SEQ ID NO: 107760 - DNA, 572 bp, Homo sapiens
aaagatgttcaaaggtttaaccctgggcaggtggataagtagttcttgtgacagtaacacacataaaaaaaaagtgaactaagagagaagatttcaagagtacaagaaaaaggaaaatttggatttaacatttttgcctattggaaaatgctcttgaaatcagagggtttggaaatatggatctgggatgtaaaagagaatttaaaaagagagaacaaattaaagacatagatttttgagtccacctgcttagaagagctaattgaagcataatcttggaaaaggtcactcagcagggaccacaaatgaacaggataatraaatcttgaaggtgtcaattttacaggagagaagagtctctgttgaattctattctgaaaacaccagcctagcatgtgctcttctcaaatatcttacaatattcttttggcattatgtatcagcttcatatttttaaaaccaatatatgatcaccttaaaaaactataaaaaattctgagtatctactcaatatgtatacataggacacctacaatgtacaaggcaatgctagatgatataatgttactatt

SEQ ID NO: 107761 - DNA, 619 bp, Homo sapiens
gaaaatgctcttgaaatcagagggtttggaaatatggatctgggatgtaaaagagaatttaaaaagagagaacaaattaaagacatagatttttgagtccacctgcttagaagagctaattgaagcataatcttggaaaaggtcactcagcagggaccacaaatgaacaggataataaaatcttgaaggtgtcaattttacaggagagaagagtctctgttgaattctattctgaaaacaccagcctagcatgtgctcttctcaaatatcttacaatattcttttggcattatgtatcagcttcatatttttaaaaccaatatatgatcaccttaaaaaactataaaaaattctgagtatctactcaatatgtatacataggacacctacaatgtacaaggcaatgctagatgatataatgttactatttattccttagagacaagcctcggctcttattacactccaggtrtctaaatggaaaatattatccaggttttccagctacttgctcattcttgcaatgaacagaggtgacagattgaagtactgagtgtggctgtgaaagacgcagagtgtaatgtctcatagattggattttagacagatgaaactgcag

SEQ ID NO: 107762 - DNA, 452 bp, Homo sapiens
aatcccagctactcgggaggctgaggcagagaatagcttgaacctgggaggcggaggttgcagtgagctgagatcgtgccactgcattccagcctggtgacagagtgagactatctcaaaaaaaaaaaaaaaaaaaggaagtctgaaaaatgacattacatagtaacaaattttgagtctttagagtattcttagttgtcagaaaaaatcattttcaaagtagatgatcgtgatgaggtataccataaaataaaccttgagactgtaaatatttatatacatatgaaacatttatataaatatgaagcagcattttataattttatgtgaaaagttacatcytttaccttcctcatttaggtaaaagcctaataaaatgtaatctgtatcaatgcaagatcagttaagagacagaaaccataccagtaatccaaagtgtaaaaacagaatat

SEQ ID NO: 107763 - DNA, 612 bp, Homo sapiens
gtaaatatgcatgtctcaaacttcttcaagataattgaaactagacattctctgtacagcacatattctaatcacaggtccccaatattggctacatgttagacacccctgagtacttttaaaactccttttgaccccacaatagaccaattacattaaaatattaggcctggagctcaggctttggtatttaaaggttttttktttttttcatgagatttcagtgtgcaggtaggaatataaccatatttttagaggatattaagagcagttatttcatctggaatagggcatggtgacttatactttagcagaaaataaaatagagtttcagaagaaaaatattttggactcatttctgtttgaaatctttctgcttttctggaatcgtgagggtaccaaacaagagagggttcatactctgtcttaggtaagcaaagacctgcctcagagagagccaggttgtgctcaggaaaagctacaggtctctttggtgattaacaaagaccttaatgagccttagttatctgtagtctcagtacttgtccttgaaagctgaacagctatagaaaatcatgctacatgcatggatggttggttccattataaatc

SEQ ID NO: 107764 - DNA, 631 bp, Homo sapiens
cctaattaaattaattgcctttttaaaggctctgtgtccaaatacagtcacattctgaggcactagtgattaaggctttaacgtatgaattttgagatagaccatccagtccataacaagaaagaataaaacatgaataagaaagaggttttgctggctgaataatgaaaatttgtcatgaacagaggaacataattattctaaacctcttatgttaggcccaaaacagctgaaaagatggaatcttcattgggaggaaaacccgcttctggaaatctgttctacagaagtaatatgagttacttaaatatataaataaartcttcataagattattttttcagtgagataaaatactgaaaactacacagtttagaaatttgttaagtaaactctgggatatgtttagtatataatcatatattctttacaaattttatttatgtaaattatatagaaatttgaggaaagcttctgagaggcttaatactaaagatagtattaaaagggtaatgttttactttatggtcacacttttatgtggaatctaaaacaatcaaactcatagaagcagacagtagaagtggttgctggggatgaggagtagcagccacttggagatgttgatcaa

SEQ ID NO: 107765 - DNA, 613 bp, Homo sapiens
tccatcagaattaattcagtaagcactgttagattcttttggcccatttagtccagttatctcttccaggaagaaacagaacagttgttaaaagattttatgtaatgtcatctaaacaaattataacatttgtagacaaaaggtgttattcacgataggtaataaacattatttctacatctgatcctaaaactaaaaaaaaaaaaaacaagaaaayttctatcaaaagaagggacccatattaaatacacatataattatgaggtaagttaaactgtaaatatcaataatgtttggaacacatcaattgataacaaaattatatagttattaatatggaaatgttagactttatttcacccacacagtggcgtcacagttttttttttctagtatacttccatattttccaaagaattcttgtggaattgtgctattattaaaaagtgagatagagatagcatgaagctactgttgtttaaattttagtttccctcacttgcactttctgggtagggatttaacaataaactcacaagtaatatgtctttgtgaaaattctgtaagcaaagatattttaaccatgaccaactaaggccactttccattaata

SEQ ID NO: 107766 - DNA, 586 bp, Homo sapiens
tatccaatttcaaaaataatcaaaggacatttttaccttgtattattaaatattttgtaataatgctgcccttatccacatgcttgcctcgtaagaaagacacatttttagtttgtaccctaattgctcacctagttgactcttgttttattgcctccctcattttgacaagaaaatattcttttctgtaaaattccacactgctcccctctccactatacagattctcctctgttttattgctagtgctattccttgatctctactgcctgtcttcatgattgtctttctctctaggccgataatctctctcgttctcatgagggaagtatcacagctgtccaggttcctggacttccaagaccttccatcctagggatcatcactactgagaggcttttgagtttcacmgttcagtattttgagaaaaagaatctgattggctcagcatgagtcaggggtctaccttctgtccaatcagattagagaagctgggccatctggcagacacaagtcaggaagccccctcttcaagccaggactgtggggcacttccaaagacaggagcacaggctggtcacaaact

SEQ ID NO: 107767 - DNA, 609 bp, Homo sapiens
caattttggagaatacactttttaattctacatttggtttctttacaaatattatgacaactggcattacatttgggaactgaaacactttcccctttctccacaactttcctaaattttcatgcattttctacttctgtggccaccatccccacgactcatttctacccagcccagtcctttttcattcctgtactcaccatgctattccttggtttgaatgtagtaattttagtccaagagaaaaaaagcactatataaataaatctttattactstcatagcattgttaaaggatttcctagtttgagctgctcttcctttgaaatcaccaccttaccagggcagagaggatcctgctaggcattttaaattagagaagacaggtttactgtcaaggcaggtcaatcaaattataattggctctaatttgcactcccaccagctgttaaattcttcacctgcagcactcaaaatggtgtgaaattcttttcggctttgtgaaagcttcaaagagaatcactctcattctggtccctaaaaccaaaagtctttgttacttttcatcagaagcgaggaaaatgcacttttgactctgactgtggaaaa

SEQ ID NO: 107768 - DNA, 543 bp, Homo sapiens
gcaatttcaagaagtccttaccaaggcattcaacagcactgtaagttcaaagttcatttgggaattaaaagaatgaataaaatactccttagagggagtacaaagtttattcaaacattttagaaataatcaattaattacataagwatatagtgaaatctgtcaaaaacaatgtcaagtaacttgtttttaaagtggcaacgcaatatagtaaagcaatggctttaatgactaaatgaaagaatcacaaagcacctagaaatatttattgaagaaataataaacaaattttcatgatttattttgtccatttgcaatttcagtattttagctctatctcatatcattttttggtaggtgctgttaacatatgaggttaaagtggtaagtctcacaataaagtagccatcttctttgaatatttcatctcttcatttctatgaatataatcatctttcagctgcatgattccttcagcctgattctcatttcatgtctcaataaacgtgtttttgcctgataaagagaactgtgcacatattg

SEQ ID NO: 107769 - DNA, 599 bp, Homo sapiens
tggttttggttttcagtgttcaagatacatgttgaggctaggttggctctcagcaatgtaaagtaaatgacattgatgagaggagtttcagtggagtggtgggcaggaaaccaattggagtggattctagagagaatggggtaaagaagtgttggctatgaaaacagacaattatttctaggagttttgctctaacaaaatgatagaggaagatttgcagtccaagtggatcgttttgttttaatatgggagatattatagcatattcatcagctagtggaaataatccattagggaagaaaaaatgaccaatgacaaaacaaaaaattacaagaaaaaattccttgagtaggcaagaaggaatgggattaagacacagttaaagtttaggaatagactattcaatagattttctgggcacaattgtctcttcactggaaaatttcaaaatgacatctattctacatcttattaaaaaattgatttaaagatmtgattgttcaaaatgaaactaaaataccatatacttttttttttattaatataaccttgggggttgtattagttcattttcttttgctataccagaatagcagaga

SEQ ID NO: 107770 - DNA, 663 bp, Homo sapiens
atactgataccttttcttttctttcttttttctttttttggctatatacccagcagtgggaattgctggatcatatggtagctctatgtttagttttttaaggaatctccataatgttttccatgatagctatgctaatttgcattcccaccaacagcgtatgagagttccatttgctccacattctcaccagcatttgttattttttgtctatttgataatagccatattaactgaggtgagatgatatatcactgtggtcttgatgtgcatttctctgatarttaattatgttgaagtttttttcatatacctgttggccctctgtatgtcttctttgagaaacatctattcagatcatttgcccattttaaaagtcagattgttattttgctattgagtcgtttgagtcccttatatatcccggttagtaatccattgtcagatggatagtttgcaaatattactctcattctgtaagttgtcttttcactctgattgtttccttcctgtgcagaagatttttagcttgatgtaaccctatttgtttttgcttttgttgcttctgatttttgcctataaaatctttgcccagaccaatgttctgaagcatttccctgatgttttcatctagtagtttcatagtttcaggttctacattta

SEQ ID NO: 107771 - DNA, 463 bp, Homo sapiens
gaatcctccctaattcattttatgaggtatcctgataccaaagcgtggcagagacacaacaaaaaaagaggattttagacaatatccgtgatgaacattgatgcaaaatcctcaattaaatactggcaaaccaaattcagcagcacatcaaaaagcttatccaccacratcaaatcggcttcatccctgggatgcaaggctggttcaacatatgcaaatcaataaatgtaatccatcacataaacagagccagtgacaaaaaccacatgattatctcaatagatgcagaaaaggccttggtcaaaattcagcagtgcttcatgctaaaaactctcagtaaactaggtattgatagaacatatctcaaaataataagagctatttatgacaaacccacagccagtatcatactgaatgggcaaaaactggaagcactccctttgaaaactggcacaagaaaagg

SEQ ID NO: 107772 - DNA, 612 bp, Homo sapiens
ctcccttcccggaaggtcagggaatggggcttaaatttccaaccctctaatcacatcgttggtacctcagttcctatcctccaagatagcataaaccccagtgtggttgaaaggggcttattataaataacaaaaaatgcttctgtcaccccaatcactcaggaaattccaagagttttaggagctctgtgccaggaactggagatgaagactaagtatatatttcttattacattgcaatatcacaacaagacttgaagatagtaaaactatgtgaaagagactaaaatataaatacttgaaatgtcctaacagacaaagggagaaataaaaaaataggagaaggcagtattaaaaaaataacaaaagagaagttttrtaaatcaaaaataacaaccctcaagtagtaattacagtgataccattcaagagaattaaagaagaatatgagtccagcataagataaagatggaaaagatgaaagaagagttaaaaaattgagaaaatgtaaggaaaaggtatgtgtagctgtacttatattcatatgcacacatacacacacccactccccctccaacacacaaaagcacatacatgtatatattggagtaa

SEQ ID NO: 107773 - DNA, 587 bp, Homo sapiens
gtttcttttttatctaattatgtgattgcttagaagttccagsgactaaatcttgaaacaaaccagttgattgtggatttctcccctacctggaaattacctcaaggctagagttaatttacaacccagccgtaaccaagactttgccagcccattcaccagatggaacaaaaactcaagatggtcatcagaacaagtcacatagaccagcacctccttgccactcctgcatgcccctcaagccaagttttcctttctaatcctctatactcagcccaaaatttgaaacggtttattcaaggtatgagcctggccatttcctcaattgctagcttttgcaattaaagtcacggtcctttcactgcgtctcatctttgttcatttgattttgcaagctgtgagcagctgagcttgtattcagttatagaatgagcctcggaatgatgattggttatgctaacaaaaagaatgcaaatcaatggattactgaaaactacttcttcgtagttggggtttataattatttctaataaatgggaaatttaaaagtaaattaatacctgaaatttgactgtaggtatactaat

SEQ ID NO: 107774 - DNA, 631 bp, Homo sapiens
acttcccatctcactgagaaagcatccaaacctcaaacaaggcaaggtgtcataaacacagcatctcttattccccactggccactctccatcttgttctctgcagttcagtcaatctccagaagtttcttgttcaacatgatcccacctcaggattttgaacttgctgtgccatcttcctaaaaaagtctttctgtagatagccacatatttagtcaaaccacttacatcagctttctgttcagatttcatcttatatagagkttttttgaacaacctatatgtagtagactaaacggtggcccctgtgatattcaaatcctaatcccatacctgtgaatgctaccttatataacagaaaatacttttcagagatgagtcagtcaaggattttgaggaagggagattacttgggattatctgggtaaatactaaatgtgagagggaggcaaagggagatttttctatagaagaagaaagcagtgtgatgactaatgaaagtgctacgctgctgtctttgaagatagaaggggccaaaatagcactgttcatgaagcttgaaaaggcagtaaaacagagtctctcctaaagccttcagaagaagtgtggccccacgcacacttgagtttga

SEQ ID NO: 107775 - DNA, 631 bp, Homo sapiens
acttcccatctcactgagaaagcatccaaacctcaaacaaggcaaggtgtcataaacacagcatctcttattccccactggccactctccatcttgttctctgcagttcagtcaatctccagaagtttcttgttcaacatgatcccacctcaggattttgaacttgctgtgccatcttcctaaaaaagtctttctgtagatagccacatatttagtcaaaccacttacatcagctttctgttcagatttcatcttatatagaggttttttgaacaacctatatgtrgtagactaaacggtggcccctgtgatattcaaatcctaatcccatacctgtgaatgctaccttatataacagaaaatacttttcagagatgagtcagtcaaggattttgaggaagggagattacttgggattatctgggtaaatactaaatgtgagagggaggcaaagggagatttttctatagaagaagaaagcagtgtgatgactaatgaaagtgctacgctgctgtctttgaagatagaaggggccaaaatagcactgttcatgaagcttgaaaaggcagtaaaacagagtctctcctaaagccttcagaagaagtgtggccccacgcacacttgagtttga

SEQ ID NO: 107776 - DNA, 602 bp, Homo sapiens
aataggtttgctcaaattagacttctgtggtcctaatattgtgaatcattatttctgtgatgttcctcctcttctgaggctttcttgctctgatgctcatatcaatgaaatgctgcccttggtcttctctgggctcattgcaatgttcactttcattgtcattatggtgtcttatatctgcatcatcattgccatccagagaatccatgcagctgagggaaggtacaaagccttctccacttgtgtctcccacctaaccacggtgaccttattctatgggtctgtttcttttagttatatccagccaagttctcagtattccttggaacaggagaaggtcttggctgtgttttatacactggtgatccccatgctaaacccacttatttatagcctgagaaataaggatgtaaaagatgcagccaaaaggttgatatggtggggggaaaaaccccacttgactcagtcctgcatatagctttgytaacctaacatttacctgcaaatatatggcctatctttaaaatgatatcaaacaattataaataaaactatactccagatgctcttgtacagtttggatcaggaatgatgagtttgac

SEQ ID NO: 107777 - DNA, 527 bp, Homo sapiens
atgaagggctatgcaggatgtgctttgttaaacaaatgctcgaaggcagcatgcttgttaagagtcatcaccactccctaatctcaagtacccagagacacaaaacactgcagaaggccgcagggacttctgcctaagaaagccaggtattgtccaaggtttctccccatgtgatagtctgaaatatggcctcatgggaagggaaagacctgactgtcccccagtccgatacccataaagggtctgggctgaggaggattagtaaaagagaaaggcctctttgtagttgagataagaggaaggcatctgtctcttgctcgtccctgggcaatggaatgtctcagtgtaaaacccgattgtatattccatctactgagataggagaaaaccgccttagggctggaggtgggacatgctggcagcaatactgctctttaaggcattgagatgttyatgtatatgcacatcaaaagcacagcacttttttctttaccttgtttatgatgcagagacatttgttcacaggt

SEQ ID NO: 107778 - DNA, 428 bp, Homo sapiens
taaatttttttatcctcattgacagccacagttacgtaagtgaatggcaccaatgagaaggggtggaatttcatggraaaattattattgttctgtttagcgcccaccttcaactcatcctaataaacagttacagtattatactctaaacaaaaaccacatgcttcaatgagaaaaatgtcactcccacaattctgatagaaattgaggtggttggtgacagatttgtataatgtagattggaaaatgagtaacataatcatatataagtttattctgaaactaagtgaaactgagtcaggcatatcctaagtgttcctacatgattggtacaattaactaatagaaaataagtgagaacaccaaaagtgaaataatctgttgtcactcccattagttgacatgcaaaatatcaggaaaataaaatt

SEQ ID NO: 107779 - DNA, 623 bp, Homo sapiens
aatttcctttttatcgaacacactttatttccattccatcagcatattaaggtgattctaaatatagactatatttggtgtctacttaagcatttgtttcrctaccattctggcccagataactatcagtttcagaattattgctgcagtactgtagcatgcacctaattttattcttattcttcttgagtcatagcttaatgtaggagccagagttatactgctaaacagtaggttggatcatacattttcttcacaaaccctacacaatatttcatcacaataagaataaaagccaagaggtttataagtgctcattggttaaaaaatgatttcctcaattcttaaatctatgaactcctttcttattatccatctgtcacgctcactttgtttctactccatgacctcccagctcttctctctaagcaatagtacaaacactgcctgaagtttttccatttttctcttcttcctgaaacttctttcccacaaataactgcatgatggtttttcttatccttttcttaacaagagaactccttgccaccctattaaaactaatacatttcacaccctctttcaaaccttcatttgtgtttcatagcagttattctcatctg

SEQ ID NO: 107780 - DNA, 556 bp, Homo sapiens
tggaaaccataggtgagctgcttagtggacagggctccagggcccggtaaccactgtggtccagtaaggtgagagaataatctgtaggtgcatagacaacaccaaattattcatgaacatctatctggccaaattcacccaaatgaaccattgagggaaataagatggtggagttgggcaacattttgtgacaggccatagtgtctgctgtgcccacatcccagatgatgtgaacatcgccacttctatcaggtgcaaattcactgacaaggtcaagagcaagagccatggggaatttccctccataaaagtgtctgtctccttaccaagtcacagccccaactcagcttctttcagagttctaccaaggcaacttcctgtttatctccacattattaatgcctacatttaatacaaataccattttcaattaatacgtcattgcaattgagaaaagacttttgtgaacggaaattccaagaacttattttgaagaatattwgtcagattcattcaccgaatattaatctatcacttgcaactatgcaatgattaa

SEQ ID NO: 107781 - DNA, 560 bp, Homo sapiens
aatcttgctaaaatgcagattctgattcagtgggcctggggtggggcctgagattctgcatttctaatctgttcccaggtgatgctaaagattgaagaaccacattttgaatgacaaggccttatgcagccctcataacagaacccaggagcagataatagaatgtgtctatgtgattgcagaaaatgtccgcatcagacagctataaaaaaaagggcctctctgcccaataaacacctcctcagtctctaataaatacagaagtgcttgggcccattcaaattatgagtccttggtggttgctgcccaaacagtctaaataagactcaatgaaaggcccttgtctgtgatgcttagcttcatgacaggaagaacacctgtcrtgcttgcaacggaagattcagtgagacactactgttcatagggccctggaatgcatagcagcctcccataacagcagatataaagtggatcacgcaagctctctgcagtcacggctggatttggctcctatctgactttcccttggcagagccactccatttcagcatggccgtcca

SEQ ID NO: 107782 - DNA, 501 bp, Homo sapiens
ataaagtcatttcccaaagaagctagagctttaaattagaaaatcccattttgtttttcagctttaaataatggcattctaacatttacattccatcacataggaccatctggctttatctattcttaaacccattgtctatagggtgaagtctaacctagggtcccagctccccaacattacccaaagataacatagaccttctctttttttttttttttttttgagtctcaatatgtcacctaggctggagtgcagtggcacaatctcagctcactgcaacttctgcctctcaggttcaagcgattctcctgcttcagcctccctagtagctaggattaaggtgcgccaccatgcctggccaatttttgtatttttagtagagatggggtttcaccacgttggccaggctggtcycaaactcctaacctcaggtgatccgcccacatccgccttccaaagtgctgggattataggtatgagcgaccgtgcccagccaac

SEQ ID NO: 107783 - DNA, 623 bp, Homo sapiens
tcaatgatttgtttcaatattagagctccctttagtagttcttttagcactggcttggtagtggcaaattctctcagcctttgtttggaaaagaatgtatctttccttcacttatgaagcttaggtttactggatacaaaattattggccaataattgttttgtttaaggagactaaagataagacctagataccttctagtttgtagggtttctgctgagaaatctgccggaatatttttttttttttttgagattgagtcttgctctgttgctcagactggagtgcagtggcacaatctcagctcactgcaacctccccctcctgggttcaagcaattctcctgcctcagcttcccaactagctgggactataggcacttgccaccaygcctggctaattttttgtatttttagtagagacggggtttcaccatgttagccaggatggtctcgatctcctgacctcgtgatccacctgcctctgcctcccaaagtgctgggattacaggcgtgagccaccatgcctggctgagaaatctgctcttaatctgataggcttccctttatagcataactgatgtttttgcttcacagctattaagattttttctttcatcttat

SEQ ID NO: 107784 - DNA, 552 bp, Homo sapiens
ctaataattaggctctctatgtatataatctttcaaggagagaggacatcaaactgagattagattagaggaaaaagagcaaaagakgaccatggatagtaatctattcccttttgtgatcagcatgtagaaaacagtttcagaaatgtattttcatttttcacttaaaaaatatttgtattttaccttcagggaaggtattcagtattctagcagttgcttcagaaagagggaattggctggcactgtgccatgcatgcttcatagacaaagccacctaggtccataaacacagtcatctgaggggcgaagggcagggaaggattcaagcaccttagttccaactccaggttggatgtccctctcgttaccccacggtaaaaggattatttcactccactgtgaggacttggctggcagaaggcattttcaggcaggcagtgaggagagcagggaagaaaggcaggtggggagcagaatccaagacagtgcagagggcctgggagaccaggagaacagggacagcccacagtcagaggccctaaggagtat

SEQ ID NO: 107785 - DNA, 552 bp, Homo sapiens
ctaataattaggctctctatgtatataatctttcaaggagagaggacatcaaactgagattagattagaggaaaaagagcaaaagaggaccatggatagtaatctattcccttttgtgatcagcatgtagaaaacagtttcagaaatgtattttcatttttcacttaaaaaatatttgtattttaccttcagggaaggtattcagtattctagcagttgcttcagaaagagggaattggctggcactgtgccatgcatgcttcatagacaaagccacctaggtccataaacacagtcatctgaggggcgaagggcagggaaggattcaagcaccttagttccaactccaggttgsatgtccctctcgttaccccacggtaaaaggattatttcactccactgtgaggacttggctggcagaaggcattttcaggcaggcagtgaggagagcagggaagaaaggcaggtggggagcagaatccaagacagtgcagagggcctgggagaccaggagaacagggacagcccacagtcagaggccctaaggagtat

SEQ ID NO: 107786 - DNA, 642 bp, Homo sapiens
ttttatttatctggactggtaactttatgtatggtgtgtttctctgtttgggcctcaaggccggttaagcaaaaggcgggaaacataaataagtaatggatggagagggctgtccatttatagactctcgacratgacctgattttctgttccagtgtaagcattagtgttgcattagagtaatatgtagccatagatgttttcactggtgtatttggtggtgataatcaggagagacatattcatgttctatttttataataaaaattaagaaacctcaggccacaccaagggcccttactggcagcatggacactgtgggtttgaacagtccattttcctcagcttgtgtgggatcactgtgttcttttctgctctcctccagtttctggttattattaaacaaccctttgtgaaggattaactctggcttttctcccagcgaggagatgtctacacaaagccagaatatccagccaattacaggcaaatgggttatttggtgtagtgcaggaacaaatgactggttggcaagccaattcttcactttttgatggtttcctttggcatggaaatagtcctctgtagtacacagtgtaaatgcttgtgagcatctttttattcattcattcagaaaatatt

SEQ ID NO: 107787 - DNA, 642 bp, Homo sapiens
ttttatttatctggactggtaactttatgtatggtgtgtttctctgtttgggcctcaaggccggttaagcaaaaggcgggaaacataaataagtaatggatggagagggctgtccatttatagactctcgacaatgacctgattttctgttccagtgtaagcattagtgttgcattagagtaatatgtagccatagatgttttcactggtgtatttggtrgtgataatcaggagagacatattcatgttctatttttataataaaaattaagaaacctcaggccacaccaagggcccttactggcagcatggacactgtgggtttgaacagtccattttcctcagcttgtgtgggatcactgtgttcttttctgctctcctccagtttctggttattattaaacaaccctttgtgaaggattaactctggcttttctcccagcgaggagatgtctacacaaagccagaatatccagccaattacaggcaaatgggttatttggtgtagtgcaggaacaaatgactggttggcaagccaattcttcactttttgatggtttcctttggcatggaaatagtcctctgtagtacacagtgtaaatgcttgtgagcatctttttattcattcattcagaaaatatt

SEQ ID NO: 107788 - DNA, 610 bp, Homo sapiens
ttaagcccaggagtttgagaccagcctgagcaacatactgagaccccatctctacaaatayatatatttttaaaattagacaggcacagtggcgtgtatctgtagtcctagctactgaggaggctgaggtggaagaattgctatagcctaggagttcaaggctgcagtcagccatgatcatgccactgcactccagcctgggcaacagactgaggccctgtgtctaaaaataaataaatcaataaataaagaagagtgaatgaaataatatgtggagaaagcaaattccccagtgactggcacaaagaaagagctcagtagatgttgtcatctcatatttttaaggacttaggaataacatcaataaatatgtattaagtggcttaaggagaccagagacactccctccttgtccactgtgatagaagagaagtagcagtgtcgtctgagagttcaactgtaaattcagcacctagcaggtttgagcagaaatacagaaagtcaggttgaaggaggtattaggtcagagagctctaatgcagtgtaagtgatggaatctggacattggataggtgaacatcatccagaaggggcatgtcctatcattgta

SEQ ID NO: 107789 - DNA, 552 bp, Homo sapiens
tgtcagtggtcacaggcattttatgctaggccaatccttacactcactagtcacatatgggtcacttatagagttgtttaactgtccctgtgacataagcataggcttgcctttggcaactgtacaagacaagtcctaatcctattgttyttttccaagacaatcaatgtgatctcttgccaagaagtattttttaaacaacttcttaactctctcagttactctactagtcctgttaggaagacacatctggtttgctagacaatcaatgcaagttggagaggtttgatactcatgcaaacacagccagatcctcttttctctaaagtgagaacttttagaaatgtcttcttgagcacatcggaacaagcataggaaacagtaattagaatggacttcaatgcataatagatcaagtctacaaaaggagatgggttggagatatccaggcaacagaagttttgcacgtttccccaaattacattcctgttgcagatcaaagatttgtttttttttcaaaccacaccaaagcacacatttggaagccaaact

SEQ ID NO: 107790 - DNA, 527 bp, Homo sapiens
ttgatgttaaaaaataattttaaaaatcaattttaaagatgctcatgcctgtaatcccagcactttgggaggccgaagcgggtagatcacctgaagttgggagttcaagaccagcctgaccaacatggagaaaccctgtctctactaaaaatacaaaattagctgggcgtggtggcacttgcctgtaatcccatctactcgggaggctgaggcaggagaatcacttgaacccagtaggcggaggtcatggtgagctgagattgtgccattgtactccagcctgggcaayaagagtgaaactccgtcccgggagaaaaaaaaatcctcctttggtgcctctgtgggccattctagattatggtaaatagaattaagtacacaggtaaccttctttatgtccttcattatttttctgaacctaatttcacatgttatgttcttatgttgttattttgagacaaggtcatgctgtgtcaccaagtctggagtgcactgatgcaattactgctcactgtagctttgaattc

SEQ ID NO: 107791 - DNA, 556 bp, Homo sapiens
aatcatgttagctagagtgttcatttccatatctgaaaatgccagctttaaatattaaggtatttattagcacccaaaatattaaagtctatagtgtctattggatatttgaaatcaatggatgagaaagatcagtcagtatgttgagaatagaagtattgaagttattcaggtaatgcctgagcaaaaggaaaaaagaaccttatcaagaagagactaaaatgtttttacttcctatatcaggttcttcatgcaagaaaatactgctatggagtcctctgcagtrggaacatttccaaccttgaatgaaaccaaactatccatcagagaaaagactaattaaaatagactttgctctggagattgagatagcacgctcatgggccaagggcttgttaactctagaatccatcttcaattcatttgtagtttattaacttcataaaaggccattgctttatttacgaaatgattgaaggattccatgagaaaaaatatcataaaagtaagcaaccactttaatactatctctctatgctactaacattggtaaaag

SEQ ID NO: 107792 - DNA, 572 bp, Homo sapiens
tgattctaaactctgtaggaaataatttgcttctataactctagatccatacagatatgttcaagcaatccaagaggtagaatactcctgatataagtcagatgatggtttgccatgtaatcctctaaataattctgtgaaatattatcctgtttacaagtataagtgatgggtgacaaaatagagactccaataatcaaatcaagrttataccttttcacttgaacttgattgataccatccatgccctatgaaggatttcctctaaaaagataatttcctttataatacttgttaagtaaaatattattctcaaatagaaaggcaatgtataggttaaggattccattctactttttcatttaacaactaagcattaagcatttgccatgggccagatgtagataagaaattgaacagaaaaaaatatttcctttttttatgaatgtaccagcaatttgagaaaattggatataaacaggtatgataaagtgtgatgaatgttatcaaatagtctaggtattatggtggtgtgtagcttttccccactcccttgtttccatgtaacctag

SEQ ID NO: 107793 - DNA, 536 bp, Homo sapiens
cttgcagcactcagaagacagaaagatgtgggaaagtttggaatgtcctagaaacttcttgaatggttttgtccaaaatgctgatagtgacagggacaataaatcccaggccaaggtgactcagagatgaggaacttttttgggaattggagtaaggttactcttgctatgcaaagagactggtggcattttgtccctgccatagaaatctgtggaactttgaacttgagagtgatgatttaaggtatctggtagaagaaatttctaagcagcaaagcattcaagagaaagcagagcataaaagtttgaaaaatttgcagcctgatgatgcaatagaaaagaaaaaaccyattttctggggagaaattcaagcctgctgcagaaatttgtgtaagtaacaaggagtggaatgttaatcaccaagacaacagggaaaatgtctccagagcatgtaagagacattcacagcagccccacctatcataggcccagaggcctaggagctaaaaatggtttcatgtggcaggcccaaggcc

SEQ ID NO: 107794 - DNA, 590 bp, Homo sapiens
aaaatagcattcctagaatgaagaactgaattcagcaagcctgcaggatatatgatcaaaatagacaaatcacagcactagcatagttaaaatcaccttgaaaaggaataataaagtaagggttatcactaacagatattaaatcttactatatagccaaagcaatcaagactaaggtattggcagatcacagacacagattaatgggacagaatgaagaacacagaaaataaaccrgaccaacaaaaatatgctcagctgatttttgataatggtgtaaaagctactgaatggaagaaagtttttcaaataatggtgctggaagaatggaacatctataaacacatgaaactcgggctccaggactcgagtgctggggcctattcctccctgtgctttgaaaggcagggctccaagttggtgtggatgaagatgcttaaggcaccagagagtgtccttgctaagcactgccggtacctgtgaaggaagctcttatacgtaggcctcatcatttacatgagctatggcagccatcgtctggaaagggtacaatgtggttcatgcctccagggtcatgataggactcactg

SEQ ID NO: 107795 - DNA, 497 bp, Homo sapiens
ttcttttcctttgaggattatgtaaaagactttagggaacataatggaaagatgctgttagataaccaggatgggtgaagaaatacaaataagacttatgaaacaagtataagataagaagggggaaaatgaaaacaagcttcccaggatgatttcagggagactgacgtaatgacaaaaaaatcccaaagataggtgtagcatgtgaattatatgaattatataaactatattcacttcctaaggagtctgataactaatgctaggtatrgttatcaccataagactggctctatttgattggtcatactatagtaattagcaaaatgttagggttgactttgtaatgatgatctaaaagataacataaaagtcccttggtctgatttattgctaagaactgactctgctccaatctccagctcctatctgcatgccaatgcctaggatgcatgtagatacgttcatcagggagctgatgacatgttacttaaaag

SEQ ID NO: 107796 - DNA, 560 bp, Homo sapiens
ccccggtaatactaggttgtgtaatagtaagagttgaacgattaaagtatctgacatttaaatcaaccccattgtacactttttggatattgacataaagagtgttacagtctctgtaggcatatctttgtaaacataattcattgaaaaatgaattactcatacaatttcaagcagtaaactacagtctaatgttttaaaaatccagccaagttttctatctcatgcgttttgtatctcataattttggatggaaagggctttaaagggagcagtctgattgtccatatctttaaaatattctcaagcagtttaaagagtcawaaacggagataacatcttaaataaacactatatttatcaaaattgcatgtaaaatgatgattctttaaagagtcatttttgaaaatgtattttagataagccatagtgtcattatttgtggtaatgactaaaactggcttcaagatttttacttcaatattcaaaattcaggctaagatagaaaacagaatatttacaaatcttctcataggttgaaaatggaattactgctcatt

SEQ ID NO: 107797 - DNA, 584 bp, Homo sapiens
gaattatatgataatttgacaacactgtcttctctttgctttcaatttctttctggtgaatctgaatttcagaaacactcatcattgcctagagattcagattctctcattttaactgasatctggaatccctgataatgcactaatactgaataaaggcaacattttttcagaacttccatctccagggcccctgtaaatcataaagtttataacattttacataatttaggtgtcctgtgtgagatttcaaaatatctacattttaacaagtttaatcgatattctaaagattacagaaattatctgttgcttataacctatgtgcaaaatggcactaaaatataacaaaatttaaggcaattgtttttgcctcctaagaaacgtacaggctagctagtgatattttaaaaaacttgaaaacaattcataatagagaatacataaacattaaataacagcacatactttggagtcacagaaatcagggattgaaccttgtcacaaacctcagtttccacatctgttaattggatttaatcaaagaaccgattttaatggcattattgtggaaattgacctaa

SEQ ID NO: 107798 - DNA, 602 bp, Homo sapiens
ggtgaagcagagctttccaggaaagttcttgctctccataggtaccatctttcaccaagcactggctggtggtgtgagcatctagtgcttggtgcaaacctggcttgcaaacatctgacctaggaatgtcctgcacgatcagccagctagcgtgtgctggactcagctcygcagcagctgatccctgtggaaggagaccagctccttgagacttcaaatccctgttcctgaggggggcagtcccaggccttttcctgcagttgtgatgtataggggagctctgtgtggctcactttcagggttcctgggccagcatcttcaagttccccacttattctattccccaaatgctacctatgacactgcctctggaatcccgctaagcaaatgattctctgcttcttaagcaaatctttctccccctagactggggaggcccatgaacctcatcctccgtccctgcacagtgtgtaggttcttctgtctccctgtgtgtgtctggctgctcgaaagcccagcacatctatcctagcctcctaggctgctgataccacttggaagcataataaccaccatttcttgagcaccttttacatgcctga

SEQ ID NO: 107799 - DNA, 646 bp, Homo sapiens
ctgctgctgtttacataagacatgacttgctcctccttgtcttccaccatgattgcgaggcctccccagccatgtggaactgtaagtccgttaaacctctttctttcgtaaattgcccagtctcgggtatgtttttatcggtagcatgagattggttttttttttatctcaccaccccccaccaaaagtgaaacaactattatcactycattttagatgtctaatgacttgtccaaggtcactcagtaagttaatcactaagactagatgtaacttgatttcctagtccaatatattttctatatttaataataaaatgtgcaaaacatgacaggatccccaaaatagcaagaattaagatgagggaagtttgctgtcaaggttaaagcagtccagtgcttttcacaatcccttgctaggctgggaagtcctctttgttgcagggtgttatcctcagattttctccacacactcccacaatactctgccttaccctatttcgccagcaataaagtgtgtactccttagtggtctctgatggggggaagaatgatgatttcagttctcagaaatcccaatgggaaacaacagttacaaagtgccctgtgatccaccgctttttgacaaggtgaccttgggcaagtca

SEQ ID NO: 107800 - DNA, 719 bp, Homo sapiens
gggggttaaataaatttagcccaatttgaccaactcttcttatattctgggcattttgtttagataacagggccccctgtggatctatacccagtttttcaaatatctgccccagggagctctcatccctaagatagcaatcagggtgtgagggaaggttactgtgagcttcaggcagtgtagtgatgggtcctcagagctgtgcttgtggtgtcccttgtcagccttgctgctgcccacccagcttggctttgtagtagacattggcagctggtataacctgggttctggtgtctctgagcttgatcatgaacaatggtatacttcggctgtgctggtctcattccatctctcactgattctatagacctttctggatctaggtgattcacattttgcctctgctgtgaaagtcacttcacccctacttatggtgcctgagggcaaatccatggctgtcaaacccatggctgctttcaaagagccttttatgtgcacacagggccccatctgtgcacacagggccccatctatgacactaggtgtagagggcaactaaaacctgttctccctttgttctayaatagaattgctattgttgggcaaatatggctccccagtgatattgaatttccccacattctttgtggttaggtttggtcatatgaccaagttctagccaataaaatatgagaagagttcatgtctgccacttttgg

SEQ ID NO: 107801 - DNA, 582 bp, Homo sapiens
ctttttctcccctatcctatatctccccccttctctcagtagcaagcctgatagttatcataggaaaaaggaatagcttctctgtctttatggaaagaactctatrtgagttttttaggcttgttcttgatagctaaaagaatttagaaaatcctccctctctggacagaacctagctttcaggcttactgtctgaaaaagcctattttgattcatgaacatggaaacaaaagagaaatgctcatttatagtttttgaagaattacctctcattacatagaccaaaaaaaaaaaaaaaaagatttacgtcaagatgtttgcagtggttataactatatgataaaattatgcaatttttttcagcctggtatagtggcttatgcctgtaatcccagcactttgggaggcagaagtgggcagatcacttaaggtcaggaaatcgagaccaggctgaccaacatggtgaaactctgtctctactaaaaatgcaaaaaaaaatagctgggcattgtggcacatacttgtagtcctagctacccaggaggctgaggcaggagaattgctggaacccaggaagtggag

SEQ ID NO: 107802 - DNA, 572 bp, Homo sapiens
tgcacaatctggttgtttttctctaaaacagaataatttttcaaatgcctaacgtttatgtcctatttcatgattgtgaagggcaattcagaatgtctgacctttaaaacaaggagttagtgtttgccatcatgacagtactcgggggagaaatactggtggactaaattcgtaagaatgttcccatgatttttggatgtacttatgcctaatggaggctattagcatctygaaagtaaatgtcctgtggtttggtttgagatatgccatgaactctacccttgattctatcattcatctacttacacataaaacacacacacacacgcacacacacacacacacacacacacagagaaacagggagagagagagagagtgagtgagagagagagacagggagaaggatttattaagtttattattatatgccagagacaaagcaaaattccacttgagataaacatcaggcccattcaaatctgccttattcaaagtcagattaccatgaagggcacagaaagacaaacttctcacgttgtcactcatgtgtgggagctaaaaatgaaaac

SEQ ID NO: 107803 - DNA, 421 bp, Homo sapiens
gaattcctaaaaaacaagttttgtaatcaacccttctcctgatttgtccttttttctttgaaaacttgagtctctcctttgttctttgaagcaattcccagtgtttcccagggtaagtcatcawccttggcccaaatcaactctatattaattttgcctctgtgtctttctttaaattggcaatagccttatgtaaatagatgtcaatgatttttttaaagtggcatttgaaaataaatcaggtgttcagtctcacttcaaagcaatttaacttttaaatccctatgtttgaatgtaaaacagagatcatcttggaaaatctcagacactggacactttaagttcctttcattcttagataaaaatcctaacaacaacttgcactttttaaaatttttatgctggtaaatgattttcacgt

SEQ ID NO: 107804 - DNA, 596 bp, Homo sapiens
ctaaaattgttagtataaacatcaagctttaggagggcaggaggaagaggtatagtgtgtgagaacttaatcctcatttttttattgaaaaattaacaaaatgtcatttgtaggtgataggtttaaaaatggaaaktatataaatattaactaaatttagtgcaaactaccagaaaagcaaaggacagcaatgttaaaggttgattctggggagtggggcagggatgagtgagtgttgtatgcacgactattactttttatcatagtctcttccgtattctttgatttgcttccaaatgcaaatatatgcttctatttaataaaaaataaagcatcttaaaattaataagaattaaaaacataaaggtttacattaaaataatactgtgaaaaaattaacaaattgtttctttctttttttacaagtctaatattttattaattgtacaatataagaaaacttttcaatcatttttgatgtgttataattaaccatagcacataatttaaaatattaatcgaatatgagggaaaatacttccatcagatatacatccacttattgactaccatttgatgtctagggagacatattt

SEQ ID NO: 107805 - DNA, 598 bp, Homo sapiens
  misc_feature (1)...(598): n = A,T,C or G
agtgaaatcacatctaccaagttgcagccttgggaacttggcaactagagttggatcagagcatcacagggaaacttctgcttttgtgtcattaatgcaacagtgattttaaaatatagaatcattagtgtgctggagacatagatacccaaattcccaggtccatgtgagcagggggctttgggggattcatgtggaatctgtgagtgggagagagtcccacctcacaagtaggartctgagtaccctgngatcgttacagttagttaggtattctagggagacggccatgagattctctggatagaagatggaagtttctatcctagagatgttaatgacaaatccattaccatgaagatgattccctgatgctataatttttgaaatatttactatatggttttgttcccaccctcattggatcagggtaattgggagagcaagctggattaacagtgacagcttggtgcctggttgggccttagagtggtctccacacacaacaaagacaaaagaggtgtttcctagaaggaggtatttggctaaagcaatagaaaagaagtattataatcaggaagaagagaaaagttaatgt

SEQ ID NO: 107806 - DNA, 532 bp, Homo sapiens
cacaggagagcttcaaagatgttcacagagattcaaaagagagcctggtttcaaacttacttttgatgacaacaatcgtggtctctataaatagcccaggaaagaatggctgcagtaaatctgcttttctggctgctgaagtgtctggtctgtcttgacacttcctatggtgccataaggaagtgtttctgctgcatctctggcagtctcaaccaacccccgaaccactaacaactttgaagatttcacacctattgataacaaaatcagtttccatgtgacgagacggaggttctttctttttytctttttctttggctccctcacttcttccctccttccctctctcttcttaccaccctttctatcatttagagagggaagacaaatgaagagatgatgagatattcaaaacacttttggctcctgttagaaccagaaaataagaaaaatatactatgagaaaacactacatataaaactgaagtatgcaatttgtcagtattctctagcacattaagtagaatgtgat

SEQ ID NO: 107807 - DNA, 614 bp, Homo sapiens
acatgggtttaaactcttattaattataaccttgagcaatgtacacaatctctctgtgttcatggagagattatatttcttcaagtttccttgtaatgattttgtgacatgttttaaagattattgtgtaatataagaaaatctattagcatagtgattaccacataactagtattcaataaggaacagttttatttttacccatttagtatgaaaatactatgctagatactgagtgggaattgagcatgtaagaagtttcaaaaatgaatcacttttacttcttggaaaacacataaaagcatatgaaactattatagttaggaaatgctagctgctgtaacaaataaaccaccaaatgtccatgcccaaacccaatagatgtgtatttctcatgcaaaactctaaggtgatagtccctatttgacaggctttccttgatagagtcattcagagaaacagrctcctgtcttgtggcactggattgccttaaaattctgtgtcttctgctccaaccagcagaagagaaaagggagagagtgggagagacattcgagaagacataactaacttttaggaaccctggtccaaaagtgaccatcccattcatgttc

SEQ ID NO: 107808 - DNA, 553 bp, Homo sapiens
attagaattaataattaaggcccagaaactagcagtgcagaggtaagcataataatttcatggttatcacattttatataactgactttccaaattgctctaatttttaaataaaagaaagtttcttttatttaaaagaatggaaagtgatgaaatcacagagtggcacacccattttttgtggctgaagagtttcctcactcatgttccttcaaaggctattttttgtaagtaatgataaaaaattggtacatctgtaattttatctgcaaatattattaagcctgggggacaaatgatactcaaagaaaacataaagtttctatgtactacttttatttatttaatagtagagcctatggaaagggtattggttgctaagtctggagacayacaatgtatgactttggggaagccatttacacactgtggacctctgttacctgagatataaaagaaaggattaggttggatgagtctatcttctctttgctgtattattttaggtctctatttcattattctagtgctagggctcccagttcagtcatat

SEQ ID NO: 107809 - DNA, 602 bp, Homo sapiens
aagtgaattccctattactgttattgcctaaaaaatctttaaaaagggtcaagacattcaaagtttcttcatgttctaaatttccaacaggactgaattgctctagaggtctgaaattagtagaaattttcttttcttttctctttttggccctagtagaagtgttttagcttccacagtgatagaaatgggcaaataacatctatttggggagtaatggacaatctttggttatatttatttgctgatctctgttgaaattacagaggaaattaaaagtttgctttctttagtacygtaaagtttagaaagattcatttcagtcaattactgccaaagttactttgccatataagccaaagttacttagggtagttttaattattgcaaagttattgttgaggagctcaccttccttatattatggcgattgtaatctggaattctacatgctaaatgtaaggtatgtcccttgggcactctgctgagtgggaggctgggacctgggggtgagggtggaaggggagatgctgaatttaggcttctctttcacaaaaagcctcacatctagactcttgatattatcttaaaactggattata

SEQ ID NO: 107810 - DNA, 602 bp, Homo sapiens
aagtgaattccctattactgttattgcctaaaaaatctttaaaaagggtcaagacattcaaagtttcttcatgttctaaatttccaacaggactgaattgctctagaggtctgaaattagtagaaattttcttttcttttctctttttggccctagtagaagtgttttagcttccacagtgatagaaatgggcaaataacatctatttggggagtaatggacaatctttggttatatttatttgctgatctctgttgaaattacagaggaaattaaaagtttgctttctttagtactgtaaagtttagaaagrttcatttcagtcaattactgccaaagttactttgccatataagccaaagttacttagggtagttttaattattgcaaagttattgttgaggagctcaccttccttatattatggcgattgtaatctggaattctacatgctaaatgtaaggtatgtcccttgggcactctgctgagtgggaggctgggacctgggggtgagggtggaaggggagatgctgaatttaggcttctctttcacaaaaagcctcacatctagactcttgatattatcttaaaactggattata

SEQ ID NO: 107811 - DNA, 555 bp, Homo sapiens
ttgatctaaaaaataaatcagatatattcctcttttctaactgaggaagtgctctatattattctttttttaaattgacatataatatttgtacatattttaagggtacatgtgatatttagatacctttacataatgtgtacaggtatccatcatgtcaaacacttaggttttctttgtgttgggaacattacaattaatagtttttataaatgttgatgtggaggcataggaagcaaatttgaggaacaaaaattctttacatactcctgaagagaatttttaaatttttatatttatttcttaaactatgaataagtccaatttaaattacatttaatcaatttttaagctatgtattgaacaaatgaaacttaccaaagtttaactatttcatgacattatgactattccagraaaattagaatacatatttgtcatataaataataacagttgtttaaggcactacttacagctaaaatggtgagtggtcaggtgacatgcgacccatgatgtgttacttcctattgactctggaatggctggttttaca

SEQ ID NO: 107812 - DNA, 467 bp, Homo sapiens
ccaccaaaccaagcctataatccaattgtaaaaaccaatgataaacagaaaatttaaaaatatatcattaatttatatcctccccaaactcaataaaagagaaacaatttgcttattaaatatagtcaaaagatttgaatagatacttcaccaaataaaatatacctttatggcaaataagwaatgaaataataaacaattctgttagttatttaaaaatgcaaattaaaaccacaattaaataacaccgcatacctattacaatggattaaactaaagacagaacatatcaagtgctgacaaaaaaatggaggaactgaaccctcatatactgctagtgagaatagaaaatagtataattgggggtggagccaagatggtctactagaaacagttgtgttcagaggcaaccataaaaaaaaaaccataataagcatgtgaatccttcaccagcaaccaaagaatcc

SEQ ID NO: 107813 - DNA, 566 bp, Homo sapiens
taattccctaaaaagtatgtagtctttttctagctccatcttcctsctatggctggctcaagtaaaaaccccctgcttggtgactagagaactcagaagctcccaggctgtagggggaggccatttaagacttccttgtaatgctttgctttcattctattggcagaagatcccacatcccataattatgttcctccaaacttgagtcatttctattccatgtcatgtttttacatatccacttgctgcctttgccattaattacttaatattttaaaaataaatttattcttaaattggcatgcacaagaaaaaaagtaagttgcaactgtcagtggaaaatagatgttgacatttattttggaggtaactgtgaaagtaaatattatgctatgaaatgcaaaactataaaactcctggacaagaacaggagaaaatctagaggacaatggacatggcaatggctttttagatacaacactaaaggcacagtccatgaaagaaatagttagctgaacggcattaaagataaagacttctattctgcaaaagacaatgtcaaaaga

SEQ ID NO: 107814 - DNA, 549 bp, Homo sapiens
gggtgactggtgagattttggtgcacccatcacccaagcagtgtacactgaacccaatttgtggtcttttatccctcatccccttcccaccctttcccctaagtccccaaagtccattgtgtcatccttacgcctttgcatcctcataccttagctcccacttatgaggaagaacacacaatgtttggttttccattcctgagttacttcayctagaataatagtctcaaatgccatccaggttgctgcaaatgccattaattcattcatttttatggctgactagtattccatcatatatatacacacacacacacacacacacacacacacacacacacacaccccacattaccacattttctttatccactcattgattgatggatgtttgggttaattccacatttttgcaattgtgcattgttccgctataaactcgcatactcacatactcacgtgtgcaagtatctttttagcaaaaaatgtatttaagttttaagaagtttttaaaaagaaacactgagaatgtgttctagattaaatgag

SEQ ID NO: 107815 - DNA, 549 bp, Homo sapiens
gggtgactggtgagattttggtgcacccatcacccaagcagtgtacactgaacccaatttgtggtcttttatccctcatccccttcccaccctttcccctaagtccccaaagtccattgtgtcatccttacgcctttgcatcctcataccttagctcccacttatgaggaagaacacacaatgtttggttttccattcctgagttacttcacctagaataatagtctcaaatgccatccaggttgctgcaaatgccattaattcattcatttttatggctgactagtattccatcatatatayacacacacacacacacacacacacacacacacacacacacaccccacattaccacattttctttatccactcattgattgatggatgtttgggttaattccacatttttgcaattgtgcattgttccgctataaactcgcatactcacatactcacgtgtgcaagtatctttttagcaaaaaatgtatttaagttttaagaagtttttaaaaagaaacactgagaatgtgttctagattaaatgag

SEQ ID NO: 107816 - DNA, 607 bp, Homo sapiens
gacatcactaatcaattgtggcactctttcttgccaaggccagggatgacctctgaatccttctcaacacagcggttcagtcatctactaccaataaatcagagttatccaaagaaagaaacccgcctgtcattatgggttgtgatattggagcaagactttgagagatgttttgagtgttgctagctaatttmttcccttgaatcccataacttgggcccatgtccacacttaaggccaagagctgacttgattttcacgtttggttcagagaaggtggagagaggctatatttgtcccatagtgcttcctcaaagtctgtacttagatttgagaactgaagctccattcaaaagcctctgattactgaacatttctgtggctaagatttccgcactaaaactgtatttttattttaaatcattttcttttcttcctgcattttccatgctactgaagctgcctcaaagaaagccatatgaacattgggcacaatagatatctatgatttgtaattacttctggcttctcaaagtcaggaaaaaataaataaaggcatccaaatgcattgaatcgtttgctaggttccagttttccagttcttctt

SEQ ID NO: 107817 - DNA, 570 bp, Homo sapiens
ctcttggttgcaactactcaaccctaccgttgtatcacaaaagcagctacaaatagtgtgtaaacaaatgagcacggctgtaatccaataaaacttkatttataaaaagaaacagcaggctggagttacttcatgggccatagtttgctggcccctggtctagcggaagcaggggccaactataaacccgctttaaactcccttcaggctagaaagcaaagcaagtccctattgccccacatcatggcccccacaagaaacaactgcaggttctcttcattttgattacactttcgtgtctcagcctaaaagccacttccttgggaagcctttccaactccctaggtctgggttgggtgtccatcttctatatgcctatggtgccactcacttgctccatcacagcaccgagtccagtgtgacatgagtgactaggtggtcgtctttcttagagagggggacaagttctgtcccctccaggccccatccctggtacctggcacagggtctggtgtacaacaggccactgagagcattgcttccgtttttcccatttccgcatccatttca

SEQ ID NO: 107818 - DNA, 645 bp, Homo sapiens
gagctcctgaataccactgtctacaccatgaagccaataagagtgagaattgaatcacaccttcagaatatcagctagtggtcactcaggaagcaattaccctcttcttgcttgagaagtctccgtctctgcccctcctgctccattcttgagaatttgggattgggatcaagtggaaagaaaggaaagcctgagatagagctttgaacggaactgaacctgagatcacaatcctgaatttacacaaaaagtcactggattgaattaagaaactccaaaaaaggatgatattagttattctgttaaggagcagaaattggaactcatgagttaattwaaaaaaaaaaagtttccttttgcatatgtgggttgtgttaattatatcagctgtggatcaatacaactgtatatataaattcatcgtggtatcatgttgtccttttcttctaataacatcatctggctcctgtgggacagttgaatagaaaaattctaatctattagattgtgctataattaacaggggagcagcttttacagacctgaatttaaaatgtgccaaggaaggcaattctaagtgcttccacaagagaataatctttctcagtggttctttggatactgaccaagaccctcaaataggat

SEQ ID NO: 107819 - DNA, 580 bp, Homo sapiens
gtcactaatgcatcattgcctgtgtttattctagggcaatgtgtgatcctacaagtattagtaaataatttttccaaggtaccttcccgatcgatattttacactatttgcccggatgcaaaataaaagatctggcttcaaagccaaaattgtcacttcctagctgtatccccttcaataagttacttaccctcattcagtttcccttcctgtaaaacacacttcctagtatttgcagcagacgacgctggttatgtatgtaacaacctgtattctcctttgctttcttatttacccaatcatcattttctttggagaggtaaagtgctagtaattcacattcctaatattcctttcatctaatggtgtccaggggataagatctttgtcaatgagtctatgttgttgggtgcagccctctggagggtggggctatatccttttctggttgcctctccctactcagaatgtggctgggctgcagttgtcstatgcatgccgggtcagtgccacgctgcaaagaaagcccagaaaatgccagaaggagcccagaacccagaagaagacaacatatgagccc

SEQ ID NO: 107820 - DNA, 570 bp, Homo sapiens
gctgggattacaggtgtgagccaccacacctggcccatactactttaagaaaataagcataatttctkgagattcacctaatttaaaacaacctaaaataacttttcaggtccctcccatttcctctggcttttattcaccatggatattaattattattatttgttgttgtgtgagtactagtaatcaaaacctttaacctaaaatcttttttagcccctatccgacttatgcggcatttgctcagatgtgttttcattatagaatctggaattataaaacacaatagtaacattattctatatgtgataaacatcacccctcaaaaaatcaaatataaaaggtgatcctgtcattgtgagattattgaaatgccccagggtagcataaagaagaaggcagtgagagggaggcagccagaagttctgggagccctgccatgcagtccaggttccatctgtggtctggccccgtgggaggctggtccactccaggttatgtgttagcataggtgcaatacaggaagtagaacaaaaactatttatgcagataatgagggcaaagagtcct

SEQ ID NO: 107821 - DNA, 587 bp, Homo sapiens
aggcaggatgatagtcaattctccataagaaaatatgatctaaagagtgacattcatttttattatttcaaaactacaagtcaagaatatctaatttttctrtacaaagtaataagtattttaattatccacatttattttcctcagttaaaaaatggagaaaataatctctggcccctgtcttcttcttgtgagttggcacaaaattgcttaggtagataatagacagtgtgattggaatttttgtgttgttaagagattagcaagttcgctttctttggtatgttttggtttgattaggtttggggtaggggaaagtgcccattctcttacgtgctgttataagttaattgtaatattcaagaatattagaagttaaagatgaacttgtaaaataatagaaaaacttgaaacaacatattttctaatatgacagcaattcttattctagttgtaaatttccaaagttttttttttatttttatcaattgaagtaatgcattttacactcatttaggactaccctactatatggcaggcaaagtgctaatgtcatcagttctggaagcataggagagaggaagaca

SEQ ID NO: 107822 - DNA, 572 bp, Homo sapiens
tgtaagtgtagacagtgaatgcaaaatagttttttaaaagtttggagaataaggctagaaaagagaaagaagagagagtgaataaaataatatggtaagttagacaytgtagaaatttgttttagatggcttctatcctctccataaactttgcaatgagggaatctatggagatttaaagtagtagagttaggacaatatggatgttatgtcccagttactctaaagactgttttagcaaactaactagagattaatttaaaagtaatggtacttccctaaggcctagtcatggttgcatgaaagaaatgtgttgtagattcgtttaggtcccttccatgctttctcctctttgtaattcaatacccatcgcaatacagtagaatcaggaaaatatgaaagtgaataaggtcatattttaaaatcagagattgttaaggtacaaatgtcaaggacaaaaggaagtgaatcctccaatcatagaccacaacattgaattgtataagcttagtttaacaatcatgtatttgcagttgaaaagtttgtgtccaactgtatagctagcctgaatg

SEQ ID NO: 107823 - DNA, 572 bp, Homo sapiens
tgtaagtgtagacagtgaatgcaaaatagttttttaaaagtttggagaataaggctagaaaagagaaagaagagagagtgaataaaataatatggtaagttagacattgtagaaatttgttttagatggcttctatcctctccataaactttgcaatgagggaatctatggagatttaaagtagtagagttaggacaatatggatgttatgtcccagttactctaaagactgttttagcaaactaactagagattaatttaaaagtaatggtacttccctaaggcctagtcatggttgcatgaaagaaatgtgttgtagattcgtttaggtcccttccatgctttctcctctttgtaattcaatacccatcgcaatasagtagaatcaggaaaatatgaaagtgaataaggtcatattttaaaatcagagattgttaaggtacaaatgtcaaggacaaaaggaagtgaatcctccaatcatagaccacaacattgaattgtataagcttagtttaacaatcatgtatttgcagttgaaaagtttgtgtccaactgtatagctagcctgaatg

SEQ ID NO: 107824 - DNA, 616 bp, Homo sapiens
aatgggtaatcaatgtattaaacaaaatctcattctttaagaataaataccatagtctacaagaacaacttcaaagtttcaatgtaatttacaatttctttcacagccttatatcatgccatgcttcccattagcctgtattcttcacaccatcatactttcgtttccttagttttgtttagctcatgtgcatctccacctccaggttttgtcatgttttgttctcaccatatgaattactatttttcatatttcccataccctagccccacacaaataagtartgtatacaactaacttctattaactgattaaaaactatttagcataaattaagtggtagaaatgtgaaatcttgactcacagaaaaatacaacatattataacactgtaattgtagtgtgtaaactaaactactaatatcttgagtaggaaaacaaaaagagaaacctatcaaaagtaatatctttgacaactttttaaggcatagacagtataataacatttaaacagaaacaaagacagtttaaaagtggaggaagctgaaattaatatgtagagtttctgttagtttttccttcttgtttgtttgttaatttttgcatcagagtttagt

SEQ ID NO: 107825 - DNA, 653 bp, Homo sapiens
ataatttagaaaaataagaacaaagatatggggagttgtttttctattgaaatgccaaagcatctattaatgtatgataataataccatgtatattgctacaggactagataaataagtagaaaataaaaacaagagtctagagagttcaaaaataggcacatatgagaggtgaagccagctggacttcctgggttgagtggggacttggagaacttttctatctacctagagtattgtaaaaacaccaatcagcactctgtgtctagctaaaggattgtaaatgcaccaatcagcactctgtaaaaatgcaccagtcagcgctgtgtctagctaaaggattgtaaaatggaccaatcagcactttgtaaaatggacccaacagcaggatgtgggcggggacaaataacrgaataaatgctggccaccccagccagcagcagcaacctgcttgggtccccttgcatgctgtggaagctttgttctttagctcttcacagtatatcttgctgctgctcactctttgggtcggcaccacctttaagagctgtaacactcactgtgaaggtccacggcttcattcctgaagtcagtgagaccatgaacccaccagaaggaagaaaccgcagacacatctgaacatctgaaggaaca

SEQ ID NO: 107826 - DNA, 536 bp, Homo sapiens
atgctaattctaatccaactgtgctcttgacataaaacaaaaatcctaggtgacagcatatctgtttacaacatggtttaccaaatattgtaaacccactgtttagaccttgtttaggcttaccgttaagaaaaaaaaaaaatcctttcaaaatattacagctcattgacaatgtacctgatcacccaagagctctgatggagatgtacaaaaatgttaatgttcttttcatgcctgctaacacaacatccattcagtagcccataaatcaagaaataatttcaactttcaagtcttattacttaggaaatacatttcatargatgatagctcccaaagatcatgattcttctgatggatctgggcaaagtacattgaaaaccttctggaaaggattcacccttctagatgccattaagaacttgtacctcatgagaagaggtcaaaatatcaatattaatgggaatttggaagaggttgattccaatcctcatggatggctttgaggggttcaaaacttcagtaggggaaataat

SEQ ID NO: 107827 - DNA, 581 bp, Homo sapiens
caaaatagccaaggcatttactaatttgaccatagctttctttctgatcatttcacattcgttaaactatgtttcakgtgtaatcaatatattctcccccttcctgactctgtgtctttagatgagatgttataaatacgtaaaattcctttttcctgctctttaacccctggaaaattcttccttatccttttgaacctagatttaatgccctttctggtgtgagtttgaatctttccaaatgctttcaggcagaaagaattgcctcctctctgctgcctcagggctgggcttaaactctcatgaagctcaccgtgccgtgttacaatttatatttccagtgtttatttattttgtcgtcaagctgagcccttgaagcccagtgtggttcctttgcactggacctgaagaatgtaaagctgactgttgatgacacagggcatatgaaagcgagcgcaaggagccatcgttaatcccatttcacaggtaaagaacctggggccttacacagagtaactagttgcataaaaagtaacacagttggtaaaaaccagccaaaatggagagacaggattatgtaa

SEQ ID NO: 107828 - DNA, 567 bp, Homo sapiens
atacatccaacattccagcttttttgaggtctgcycaaggaactggtttctgtcttacctgattttggggtgctgacagagagccagcatacttcagatatctggtggccactagaataaggaagagcaaggaggcatgctgctatagaattaaagaatcaaataacttgcagtattgcacagacaccagagaaagcaagaaattatgagttcctgaaaaaacaaacaaacaaaaaacaaaaaaaaaacaggaagcctctctaattgaggaattgcacacacaggcccagagaagtcatatcatcctcctataaaacaaaaggcttcagaggccccaagaattttttagccaggctgggtgatgagggtcttccctgcacaaagctagtctgtaaagactggagaggttgctgtttctttcaaatgtgtgaattttaatataaatttacaaaacacctgaagaaacagtgaaacatggtccaaaggagaaaaaaacaaatctccagaaatcaatcccgaagaaatggagataagtgaataccctgagaaatatttcaaaataagcac

SEQ ID NO: 107829 - DNA, 687 bp, Homo sapiens
tagactctggaagtactgaatccactacttcctgaatatgtgaattcccaggggagtatagtgttgcccatctcacctggaaaaagggagagaaatccctagacaacacccccaagtggtcctccagccaccctgaaccctgacttctacaacagctcattccatccttgagcagttcagattcttagaaagttcttcactcctaccagtgactggcagagatccagggatgctttatgtggtttctaataaactgatttaataaaatgctttccagaaggggaatttrtactttttagggacatttcactccccacagattcaggcatgctgggagcctgaattcaagcttttgcctgtgacgccgggacttcctgcccactggtagatcttaaaaggcaaatgcctttttttctgattttgccctccaagatacttagagatttttgttctcattctaggatggagcccaaaggcaggcaaaccaaaaagtaaagctctccaaaccatgtcagataaataactgatgaaggaatacagctccatcgcctaaagaaggaaagatgtaagcagatgtgacagttcgtcttcagacagaggcatgtcatgagagtgagataacagactccttctgtgaggctccagagggcagactttggaccagaggcagatggaagctacaagggg

SEQ ID NO: 107830 - DNA, 633 bp, Homo sapiens
tggtcaatggcttgatatctgcagtatttgccaagttcaccatatataacaggagccatcaatcttttttttttaaccaaataatgaaatatcaaggatttgctctttggaaggacactgctgggaatgactagatggaatggaggtgacagagattagaaatagaaaagactggatgatacagcasttcagtttgagaaatacaaaggtcaaaaaagaggtcagtgatgggggaaatgaaatttataaattaaatacattataatagatctcctttcaaggaatatttgacaaggtcacattgtattaatctaataattttcctggagaaaaggttgaatgttttcccaaaatccattgattcccttacacctctagaatagcggttcttaatttttcccaacgtccatgttttcaggaagaatagtaatcctaaacaaacataggtgagacaatggactacatggaccacctgtcccccaagtttccactttctagtgggaattaaaagtgagttataacaaagaatagagagggttgaaatcacaattcaggtaatcacagcccatcaattaaaagcaaatgacacacaaagattgatccatgaataatgatggttgaaaattaagacca

SEQ ID NO: 107831 - DNA, 635 bp, Homo sapiens
gggcaatcaatagtgagatccgcttcagagggatggtacagagaacaaacatgtagagagagaggcaagattcaagggcagctgttggatccccctgtgatctcattaaggagacaactccagggctttcccagggataaaaataattttttcttctttactcccaaattcttacatgctgcccaccagtactgaggtattttaggaattggatattctagaaatccttttcaaaaaccattgcttctgctcacaataatttacagataattgctccatggttgtaatatttataaactgtggtaatraggcttattagagaaacaaatagaaatatttgcttttggatttactgcatacattaggtgtttttctagcctcaaataaaatttccataaaatctgacaataaatgactattttctacttagttgctgagaatcattttgtcactttgtagaacacctaaatgtttgaccatgcatctgaatttctcttaaaaatcaaggtgacacttcagataagagatactcttgtaaaatagacacaactccacttaaaatgccaaagtccattcctgttccataatgattggtgtaatgattctaatttaccatttaactcaagattttcagg

SEQ ID NO: 107832 - DNA, 635 bp, Homo sapiens
gggcaatcaatagtgagatccgcttcagagggatggtacagagaacaaacatgtagagagagaggcaagattcaagggcagctgttggatccccctgtgatctcattaaggagacaactccagggctttcccagggataaaaataattttttcttctttactcccaaattcttacatgctgcccaccagtactgaggtattttaggaattggatattctagaaatccttttcaaaaaccattgcttctgctcacaataatttacagataattgctccatggttgtaatatttataaactgtggtaataaggcttattagagaaacaaatagaaatatttgcttttggatttactgcatacattaggtgtttttctagcctcaaataaaatttccataaaatctgacaataaatgactattttctacttagttgctgagaatcattttgtcactttgtagaacacctaaatgtttgaccatgcatctgaatttctcttaaaaatcaakgtgacacttcagataagagatactcttgtaaaatagacacaactccacttaaaatgccaaagtccattcctgttccataatgattggtgtaatgattctaatttaccatttaactcaagattttcagg

SEQ ID NO: 107833 - DNA, 570 bp, Homo sapiens
cttgttcccctctgagatagcaagaatcttgcttagttttctagatgttcatgtarttgttgcagtgacgctcatgaaacttgttttatccgtgtacaaattaatcagagactaaataatctctgcaaagtacaacatttcctcaggaatgtaaacccttcctgtgggactattaaaatatttccacctttttttttctttaatgcaacattactttagattacaataaaaaataaatgagagatgagattttcttaacacaataagctctgaaagaaagaaagataaaagaaagaaagagaatgaatgaaacaaagaaagagagagagaaaagcaacttgaacccaaactctccccacactctgagctttcttcacctccagagtggtgacaaactttccaagaattttacatccccaaggagggaatacaattcacacctcctctcagccagaaggaagcagcacaaacagttggggattcctcttgttatggtttctaccaaccctgggattcattatctcacagaaaggatgcttcaggctctaatagtgtgtgtcagaaaggtcg

SEQ ID NO: 107834 - DNA, 630 bp, Homo sapiens
gtgctccacacttaccttgaaagccttcctgagcacctaggaccccctctgacctgcagagtgggccaacactaagaccgtgtttctaggtgctttattagaatcagctcctttcagctccctgactagtgaacccattttgtagaagaagggacagggctttcaaaagtgatgtaattggcaagatcatagkgtgagtgaggagaggaggtgggattcccatccagctcctaattccagggcatgtccctaaactgctatataattcagcttgctaacagcctcagacttaaacaagtggaaaataaaagcagtaaggcacacaaaaacccctgagagtgcagctggaactgggatgggacacagactttgatgaagcctaggactttaggtcccagtctgaaaatccctgctccaggctgtgggaaattgcatgctcctagcttcagcagcacgctcatgctgcctggagtttgcagctatcggacaccaactccagccactttgcaggaagatggaaagccacagactcctctccattccaaggagagccaccaagccaccagagggatacagctggccccttcccttcatatggtggggggagatcagaggcatggcacagatgct

SEQ ID NO: 107835 - DNA, 583 bp, Homo sapiens
tgtccagaggcacaaaggggaatctctgaaggacctgacagtatgcagacagtgctcaatatgagcctcccyaggtcctccctctatgggtcctgtctgcttaggaaccaagcacctttaccacacacactcagccactccaagggggctgtgtggggaaggtgaactcagttctgttgctgatctgcctgtcattatctaggcaactccccattatccagcagactcataagcttacatgcctttccaaaagaatttgtactggcccagtgaaattatgacctctctgcatggatacctctttccttctccctgcctatttttctccttttgcctattagtatctaacctgctaagtattttccttagttatcttgttgttttctcccactaaatgtgagctttgtgaggacaatgatttacctttatcacagctatgtcttcagcaatcaaaagagtgcctgtctcatagttggaactccataaatacctgttgcatgaacaaatgaggaatgaataatcggaaagccaatttttaaaacaaagggataagtcaccgacttacaaaatttgcttcttaaga

SEQ ID NO: 107836 - DNA, 595 bp, Homo sapiens
ccaagtgcttctgttctctccctcactgacactgtgcctctggtggaagtgagcctccaaagacagcctccgacaattcctcctctctgtgtacatgcacactgtgggggaggagctaacttcccccctgaccccttgaayatgaacttgcccatgatcatttgaccaatggaaagcactgggagtgacattcaaaagcttaagccaatgagcagcttctttcttattcttgaaactcattgttagaatccagccacgtgggaggcacctgatggaggacaaggctctcctgtgcagccttggctcagctcacagctggcagccagcagctggatgtgcatatgaggcctttagaccatcggggacatttcggcctaatctagtccccggatgcctgaagatccatctacatcatctgaaacaggtgcagccttggctcagctcacagctggcagccagcagctggacatccacatcaggcctttagaccttcagggacatttcggtctaatatagtccccagatgcctgaagacccatctacatcatctgaaacagaaaaccactcagtttgtctcagtcaacttacagaatca

SEQ ID NO: 107837 - DNA, 622 bp, Homo sapiens
atttgctgcttccaaaggcctctctccttggtcctccttcttcttgctggtgactctgggaccactcgctctgccctgtccatgtcacctgaccctaccttgattaaccccctccatcccagggtgctgtatggagaggaggcctcaggagtgaggacatgaactcaagggccttactgcattctcaccctggctctatactattggttggatgtaggcttcataactttcattatctccatcttagtttatttgtaaaatattgagcttaatattccctccctcacaggatttgtgagatttaaatgatttaaaatgcactagtactcatacacactcatgcatatctagcacacagtacagtacgtactctataactgttcattcttataactattgaatcattagatcctcattctcttcacagctgcttcctcccttgttctaagtcattcccaatcttttgtcgttaatgcacttcttgcaatttcattgttttccttaagtgagctcgttcattccccagccctcacttttcctcacacratgataacaataaggaaataataataaaatgatcaacagatcacatttattgtgtgcttgcaatatacctgtttaa

SEQ ID NO: 107838 - DNA, 575 bp, Homo sapiens
ttagggctaagagaagaagagaaatatctcaataaaagagagagtcaacatgcaaaattatttttgtctttgtatgaaggacaatttctaaactatatttattcaaagcattacagcaagtyctccttcatagtctctatgagaaaaattatgaaaattattataccaaaatataccatttctggaaacctaacagcaaaactactcttattatttctgtgtataacaaacgtggcttcacatatttcaacagataattagtaaaatcctcaacaaggaatatattttataaaactttgtaaataactgaacacatagaatgaatttgtactttttatgttgaataagaagatctttcctattgagttcaattcacacaaacatatagtaaaattacaaaatacacatcttttaatcctctggtcctaaaatattttcatagtacaaacattaaacttctgtgtgccttatttttaaagatgtcttatatacgatattttatcagatagaaaaattaattattactgcggtggctcatgcctgcaatctcagcactttgggaggccgaggcgggc

SEQ ID NO: 107839 - DNA, 583 bp, Homo sapiens
ccatagtttgacaacctccgctttaggcactgggaagtcattggtggtttttgagcaggaggctcttgattaggttgtttttcagaggaggctttgtttgctgacacattgccgtgtcccttctctgaacttagtaataataacctttactgtttacaccacactttacaacttataaagcatttcaaatcccatgtaatccccactagggaggctgggaarcattatccctgttttaaagaagacgaattcaatccagaaggactcgatgacttgtcctaagtcacagaggtagactggaaccctgtcttcctgctgccagcctcggggctctggtggagaccccgactcttcctccatttagctggccagacatctaattactttatgtgttagtcctgtttcctcagttacaggatgcatttctaaagtgtagggatatgtcttccactctttttctatcctccaaagtcctaagcacagtgctgagtctttaaggagccatttactgttgatcattcacctctgggccttgtggttcaaagtttgttttccttccatttgtcttcagttaattgcttgg

SEQ ID NO: 107840 - DNA, 553 bp, Homo sapiens
gagaaactggggagatggaatggaggactgtggtaactgcacggtttaggactcggcttttttctgtcccttataaaacaaactacaatttgcttctccaattgttggagtgaacactttatacttctcttgccttcctttgcacctaccctttttcaagggtggagtgttggtacacctttgtattagtccgtcttcaagcttctgataaagacatacccgagactgggtaatttataaataaaaagagatttaatggactcacagtttcacgtggccgggagacctcacaatcatggaggaaggtgagggaagaaccaaggcaccgtcttacatggctgtaggcaaagagagaatgakaaccaagtgaaaggggttttcccttataacaccatcagaattcatgagacttattcactaccacaagaacagtataagggaaaccagccccataatttaattatctctcacccagtccctcccacaacaaatgggaattatgggagctacaacccaagatgagatttgggtggggacacagccaaaccagatc

SEQ ID NO: 107841 - DNA, 513 bp, Homo sapiens
gaattcttatttttttaacttttattttaagttcagtcatatatgtttgttatataggtatataggagtttgttatatgggtaaacttgtgtcataggggtttgttgtacagattatttaatcacttaggtattagtctagtacctattggttctttttcctgatcctctccctcatctcaccctccaccctttgacaggccccagtgtgtgttgttcccctctatgtgcccatgtgttctcatcatttagctcccacttataattgagaacatgcagtatttggttttctgttcttgggttagtttgctaaggataatgacctctagctccatccatgtgcctgcaaaggacatcatcttgttcttatttatggctgcatagtattccatggtrtatatgtatcacattttctttatgtagtctatcattgatgggcaattaggttgattccatatctttgctattgtgaataatgctgcaatgatcatatgcatgcatgtgtctttataat

SEQ ID NO: 107842 - DNA, 523 bp, Homo sapiens
ctccatcctccctgtctgcatctgtaggagacagagtcaccatcacttgccgggcaagtcagggcattagcagtgctttagcctggtatcagcagaaaccagggaaagctcctaagctcctgatctatgatgcctccagtttggaaagtggggtcccatcaaggttcagcggcagtggatctgggacagatttcactctcaccatcagcagcctgcagcctgaagattttgcaacttattactgtcaacagtttaatarttaccctcacacagtgttacaaacccgaacataaacccccagggaagcagatgtgtgagactgggctgccccagctgcttctccttatgcctccattggctgagagtgttcctcagatgcagccacactctgatggtgttggtagaggaggatatgagatcacctctgcatcccaatttctttttcttttctcagccccagctgcacagacataacaatgcctctgctgatttaataaagatagagatcatgacacctgaagag

SEQ ID NO: 107843 - DNA, 523 bp, Homo sapiens
ctccatcctccctgtctgcatctgtaggagacagagtcaccatcacttgccgggcaagtcagggcattagcagtgctttagcctggtatcagcagaaaccagggaaagctcctaagctcctgatctatgatgcctccagtttggaaagtggggtcccatcaaggttcagcggcagtggatctgggacagatttcactctcaccatcagcagcctgcagcctgaagattttgcaacttattactgtcaacagtttaatagttaccctcacayagtgttacaaacccgaacataaacccccagggaagcagatgtgtgagactgggctgccccagctgcttctccttatgcctccattggctgagagtgttcctcagatgcagccacactctgatggtgttggtagaggaggatatgagatcacctctgcatcccaatttctttttcttttctcagccccagctgcacagacataacaatgcctctgctgatttaataaagatagagatcatgacacctgaagag

SEQ ID NO: 107844 - DNA, 523 bp, Homo sapiens
ctccatcctccctgtctgcatctgtaggagacagagtcaccatcacttgccgggcaagtcagggcattagcagtgctttagcctggtatcagcagaaaccagggaaagctcctaagctcctgatctatgatgcctccagtttggaaagtggggtcccatcaaggttcagcggcagtggatctgggacagatttcactctcaccatcagcagcctgcagcctgaagattttgcaacttattactgtcaacagtttaatagttaccctcacacagtgttacaaacccgaacataaacccccagggaagcagatgtgtgagactgggctgccccagctgcttctcctkatgcctccattggctgagagtgttcctcagatgcagccacactctgatggtgttggtagaggaggatatgagatcacctctgcatcccaatttctttttcttttctcagccccagctgcacagacataacaatgcctctgctgatttaataaagatagagatcatgacacctgaagag

SEQ ID NO: 107845 - DNA, 532 bp, Homo sapiens
gtgggcagggcaccctgagggccctgattcccgccatgaggcataaccctttaggtgccagaccacggggaggyccaggggttgcaggggagggctgtgcatctgcaatgactctcagggggctcccggtggtggcaattggtgaatctgcacggtggtgtttcaatattgtgacaaccctgctgtctctcatgctcttaaaaagcatttctcttacctgtgacagacttcctatacctaacagcttgcaaaaatgttccagattaatgagaataatctctcggagccatacctccctgcttggggtctcagtttccccaactgtctccagacaagttaggctagaaggcccctgagcctcagcccctctatacccctcctgtcacccagacctgatctgggtcttgcaccctgggtgcagcaagacaggggtgggcaggggctggctctgggccagaggaccctttctgatggacttcagctgttggccttccaggggagactgatcaacctcacaagagtcatatggtga

SEQ ID NO: 107846 - DNA, 532 bp, Homo sapiens
gtgggcagggcaccctgagggccctgattcccgccatgaggcataaccctttaggtgccagaccacggggaggcccaggggttgcaggggagggctgtgcatctgcaatgactctcagggggctcccggtggtggcaattggtgaatctgcacggtggtgtttcaatattgtgacaaccctgctgtctctcatgctcttaaaaagcatttctcttacctgtgacagacttcctatacctaacagcttgcaaaaatgttccagrttaatgagaataatctctcggagccatacctccctgcttggggtctcagtttccccaactgtctccagacaagttaggctagaaggcccctgagcctcagcccctctatacccctcctgtcacccagacctgatctgggtcttgcaccctgggtgcagcaagacaggggtgggcaggggctggctctgggccagaggaccctttctgatggacttcagctgttggccttccaggggagactgatcaacctcacaagagtcatatggtga

SEQ ID NO: 107847 - DNA, 586 bp, Homo sapiens
tccctgggggccagcctcagaaagcctgtggccatggcctcttggccaacatcagatcctgtggtctggcaatgcctggggtacccagacctcactctggacaggccctgggagggggccctggtgagattcctggcagcctcacrgccactcttctgtccgtagctacaacatgtcatgccagctggaggctccatcccagttggctgggagcacaaaggccaggaagatagacatcacccaccacaggggccagtcggggcctgaaccagggcgggcagaggttggctgccttgggatatgggtgggctcagggagtcagacagcaagggactagcctcccatcctactgctgaccagctctgtgactggagagagtcaccttacttctctgggccgagtttccccctctgtggagtgacactaaatgctctctctggagactgggatcagtagggcactggtgattgaccaggcactcagcacatgcctggagcacacagtgcagggctgtggtggggaggtggcctgagttcctggggagtcacccatgtgtgcctgcccttctgaccagccaccaggccct

SEQ ID NO: 107848 - DNA, 586 bp, Homo sapiens
tccctgggggccagcctcagaaagcctgtggccatggcctcttggccaacatcagatcctgtggtctggcaatgcctggggtacccagacctcactctggacaggccctgggagggggccctggtgagattcctggcagcctcacagccactcttctgtccgtagctacaacmtgtcatgccagctggaggctccatcccagttggctgggagcacaaaggccaggaagatagacatcacccaccacaggggccagtcggggcctgaaccagggcgggcagaggttggctgccttgggatatgggtgggctcagggagtcagacagcaagggactagcctcccatcctactgctgaccagctctgtgactggagagagtcaccttacttctctgggccgagtttccccctctgtggagtgacactaaatgctctctctggagactgggatcagtagggcactggtgattgaccaggcactcagcacatgcctggagcacacagtgcagggctgtggtggggaggtggcctgagttcctggggagtcacccatgtgtgcctgcccttctgaccagccaccaggccct

SEQ ID NO: 107849 - DNA, 586 bp, Homo sapiens
tccctgggggccagcctcagaaagcctgtggccatggcctcttggccaacatcagatcctgtggtctggcaatgcctggggtacccagacctcactctggacaggccctgggagggggccctggtgagattcctggcagcctcacagccactcttctgtccgtagctacaacatgtcatgccagctggaggctccatcccagttggctgggagcacaaaggccaggaagatagacatcacccaccacaggggccagtcggggcctgaaccagggcgggcagaggttggctgccttgggatatgggtgggctcagggagtcagacagcaagggactagcctcccatcctactgctgaccagctctgtgactggrgagagtcaccttacttctctgggccgagtttccccctctgtggagtgacactaaatgctctctctggagactgggatcagtagggcactggtgattgaccaggcactcagcacatgcctggagcacacagtgcagggctgtggtggggaggtggcctgagttcctggggagtcacccatgtgtgcctgcccttctgaccagccaccaggccct

SEQ ID NO: 107850 - DNA, 586 bp, Homo sapiens
tccctgggggccagcctcagaaagcctgtggccatggcctcttggccaacatcagatcctgtggtctggcaatgcctggggtacccagacctcactctggacaggccctgggagggggccctggtgagattcctggcagcctcacagccactcttctgtccgtagctacaacatgtcatgccagctggaggctccatcccagttggctgggagcacaaaggccaggaagatagacatcacccaccacaggggccagtcggggcctgaaccagggcgggcagaggttggctgccttgggatatgggtgggctcagggagtcagacagcaagggactagcctcccatcctactgctgaccagctctgtgactggagagagtcaccttacttctctgggccgagtttccccctctgtggagtgacactaaatgmtctctctggagactgggatcagtagggcactggtgattgaccaggcactcagcacatgcctggagcacacagtgcagggctgtggtggggaggtggcctgagttcctggggagtcacccatgtgtgcctgcccttctgaccagccaccaggccct

SEQ ID NO: 107851 - DNA, 401 bp, Homo sapiens
cacacccaaatccaggaaagggccagggccatgacagagccagggcgagtccttggcagggccaggttccaggccagggccaggaaagggtcatggcagggtcactgtatggccaaggtccaggccaaagccaaggcagtggcagggtcaggtctgcataagggcaggaccagagccagtgatacrgcagggccagggccagggccagggctgtgccaggacagaacaagagcagagcagggcaggaccagagccaggccatagagagagtagggcaaatgccaaggcaaggccagggtagtgccagggctgaggcaaggtcagggaaggtccagggctcagtcaaggctagaaccaagacaggggcagatctagggcacaagcagagcaggctagggcag

SEQ ID NO: 107852 - DNA, 401 bp, Homo sapiens
cacacccaaatccaggaaagggccagggccatgacagagccagggcgagtccttggcagggccaggttccaggccagggccaggaaagggtcatggcagggtcactgtatggccaaggtccaggccaaagccaaggcagtggcagggtcaggtctgcataagggcaggaccagagccagtgatacggcagggccagggccagggccagggctgtgccaggmcagaacaagagcagagcagggcaggaccagagccaggccatagagagagtagggcaaatgccaaggcaaggccagggtagtgccagggctgaggcaaggtcagggaaggtccagggctcagtcaaggctagaaccaagacaggggcagatctagggcacaagcagagcaggctagggcag

SEQ ID NO: 107853 - DNA, 401 bp, Homo sapiens
cacacccaaatccaggaaagggccagggccatgacagagccagggcgagtccttggcagggccaggttccaggccagggccaggaaagggtcatggcagggtcactgtatggccaaggtccaggccaaagccaaggcagtggcagggtcaggtctgcataagggcaggaccagagccagtgatacggcagggccagggccagggccagggctgtgccaggacagaacaagagcagagcagggcaggaccagagccaggccatagagagagtagggcaaatgccaaggcaaggccagggtagtgccagggctgaggcaaggtcagggaaggtccagggctsagtcaaggctagaaccaagacaggggcagatctagggcacaagcagagcaggctagggcag

SEQ ID NO: 107854 - DNA, 401 bp, Homo sapiens
cacacccaaatccaggaaagggccagggccatgacagagccagggcgagtccttggcagggccaggttccaggccagggccaggaaagggtcatggcagggtcactgtatggccaaggtccaggccaaagccaaggcagtggcagggtcaggtctgcataagggcaggaccagagccagtgatacggcagggccagggccagggccagggctgtgccaggacagaacaagagcagagcagggcaggaccagagccaggccatagagagagtagggcaaatgccaaggcaaggccagggtagtgccagggctgaggcaaggtcagggaaggtccagggctcagtcaaggytagaaccaagacaggggcagatctagggcacaagcagagcaggctagggcag

SEQ ID NO: 107855 - DNA, 466 bp, Homo sapiens
aatccagctttgtttgtcaaaaacaaatgcattcattccatttggagagtaaaacagtctttttttcatgagcataatggtgaaagctaattaaatttatcataaattacacccttaatatttgttctcaagatcattagtctataatgtaaacagacagattcacaatagttaatgttaacagttttytaaaattcagaactttaaaggtttattcatttattccctaagcatcagtttaaaaaaatgttttaaagagcatacacattaaaaagtatgatattagatgaacaactaaaaattagactaaaaacatcgccaaattggattttatatagtaatattgttacattgagaggtaacattttggcaaccatttgctgcaaacctacaaattctgtaaaagcttctaaagattaatagcactatcagtcagttgcatcattatctcattgaaaatgaattc

SEQ ID NO: 107856 - DNA, 420 bp, Homo sapiens
tatgccctttcattgttagtggcctataaccaagacacacacacayactacttaattataagtgtttgttttggggaatttgctacttgttctctgaagcagattttcttttacacgaggagagcaaatgccagtttactgccaattccagaagtctgctctattgcagcaaagaaggagatgggaatggcagtgtctagaagcatgagacgtctctgacgtctgctctgatcctcccagtgcctggtgggttctggggccagaactgggcacggtgactcaaaatgtgaagatgtcctccttctggggtgtgtcgtgtgtcctctctacctcagcagagaaaacaagaaaatgaaacgggattcagagtgtcaattctaaacgttaacactttctgaataatcaataaaaaacgaattc

SEQ ID NO: 107857 - DNA, 419 bp, Homo sapiens
gaattcaaatgcaaattcacactgggatatgccctttcattgttagtggcctataaccaagacacacacacacactacttaattataagtgtttgttttggggaatttgctayttgttctctgaagcagattttcttttacacgaggagagcaaatgccagtttactgccaattccagaagtctgctctattgcagcaaagaaggagatgggaatggcagtgtctagaagcatgagacgtctctgacgtctgctctgatcctcccagtgcctggtgggttctggggccagaactgggcacggtgactcaaaatgtgaagatgtcctccttctggggtgtgtcgtgtgtcctctctacctcagcagagaaaacaagaaaatgaaacgggattcagagtgtcaattctaaacgttaacact

SEQ ID NO: 107858 - DNA, 651 bp, Homo sapiens
aaatatgcccaataagtataattgttctctgtgtcagcccttgtggaaggaatactcacagtagtggtgataactgctatcatagctaccattaaattactcattgtgactggttgccctgctttcctcaggttttcttccaccatctgtgacagcttcttgatctgtcaggtggatggctgtgttcgacaggtgttgctcatgacagttgagactcctcagcatcagtctcaacatggctgcaaccagggggtccttgggatcctcccagcatctcttcctcacatctggctcatgataaggttttaggtgtcttgatggtattcaaattggctgttgattttggctkggagaaacacaagcataacctctactcccagttatcattttacctatttcctaattttttgttattggatcttttcaccaagtaatgctagattcaattgtgtatggactgtcctgtaatccctgtttctcctccttttttatttttgtcatcagttgttcatctgtatgaaatcataactgagcattttcaattaactgtgtgtaatgaaccatgtatgaagaatcagaatcacattaataggcatattaaaagcagtcaatacctcaattacagctacaagctccaatttttgagctgaa

SEQ ID NO: 107859 - DNA, 547 bp, Homo sapiens
cctgctttcctcaggttttcttccaccatctgtgacagcttcttgatctgtcaggtggatggctgtgttcgacaggtgttgctcatgacagttgagactcctcagcatcagtctcaacatggctgcaaccagggggtccttgggatcctcccagcatctcttcctcacatctggctcatgataaggttttaggtgtcttgatggtattcaaattggctgttgattttggctgggagaaacacaagcataacctctactcccagttatcattttacctatttcctaattttttgttattggatcttttcaccaagtaatgctagattcaattgtgtatggactgtcctgtaatccctgtttctcctccttttttatttttgtcatcagttgttcatctgtatgaaatcataactgagcattttcaattaactgtgtgkaatgaaccatgtatgaagaatcagaatcacattaataggcatattaaaagcagtcaatacctcaattacagctacaagctccaatttttgagctgaagtatagggcatct

SEQ ID NO: 107860 - DNA, 498 bp, Homo sapiens
caagtgatctttagcggatccatgcttaagcatagaaacagaaagctttggccagcttctagttcccattagcttgtctctgagacaccatgcttagttgtgtgtgtatctgaattgaggcagtcagtgatgtactagggctgaaatagtaataataataacaattctgacagctttgaaggtagaccctcctgctcrttttaaatcacaggcgctgttctctgcttagctctatggagcaataaaaagaaaaaaatacaaaaaggcaggctggggagaagtgtgttgctcctgtgtgggggcgggatcatctgaggagtgtttccagggaactctggcaggagggttcttgttcatgaaggatttccccggcactgcgctgtggcaggataacagatgggcttctctgtattacagaagggaaaataccttttgtcttcgccaatgcccttcactgcaggcaagcaaataggagggccttgtaagcaccacttctgc

SEQ ID NO: 107861 - DNA, 557 bp, Homo sapiens
tagaaaggttgcttgagagaaccaatgaaaaggatgatatatttataagttgctaacaaaagatttataacttctcaaagtgaggggaagacacaatttatcacgccaagaaccagaatgtaagtatagcatccaagaaggagtgtggctgaggacaagagccctgggaatgtatgaattagagtaagatgtgaacttttaggtaacaggacaggtttggccagatggggtttgtcagctatttagtgatccagagatattagttttgtcagagagaagcaggcaaaagaggaagcttgagttaacgttcagasgctggggtcagagagatttcaggaggggagggctgggcggtaggtgatgctgagataaagagctactctgaaagcagaggcgattcattctctgggcctgtttattacttccatcgattgtggaggctctgagcccactgatgttaactggcttatttttctctgcacctaataagccatctgtggtgagatacttttaagatcatgcaaatattctgctcttcatcaaagtttactccccaa

SEQ ID NO: 107862 - DNA, 558 bp, Homo sapiens
catctacttttaatcttcttacaattatctaggataataaattaaacattctttccacctcatttaaatgaggtatttaaatgaagtatctcatttaaaaatgtacctgtataaaacagccttacttgctttagatcagaggaatgagatagtgaagttaattttatyttttgtttaacaaagtcattcttcatgctctttctttccttcaaaaagaggcagtaggacattgtggtcagagtgtagcctttgaatctgggttacttgggcttgaattccaggatgccagttaccagctgtgtcactctggacaagttgcttaacttctgtgtatctcagtttccttatccatagaattgggataatcacaatccatatcttctaggttgttttaagagttaaaagtgtcactgtaataaagaatttagagcagtgcctggcacttagtaagggctcactaaatattagatattattatcattattattttgagacatagtctcactctgttgcccaggctggagggcagtgtgtgaacatggctcactgcagcctcgt

SEQ ID NO: 107863 - DNA, 584 bp, Homo sapiens
cttagaaagagccataaaattaaaagaaatcaatttgaaattgatactactcctcacaggacacaaaaaggtcaacctaataccatgatttctgttttgttttgctttctttagtttagttttgttttcagtgatgctcagtcttcagcaaaacagaaaagagtcagatactccttcacacaattatgattatctattgttcctaagggctaggccaggaacatgataacaaaagaaatacttttttcttttgtaggttttgtttgtttgtttttgtttttttgagatggagtctcaccctgtcgcccaggctggagtgcagtggcgagatcttggctcactgcaacctctgcctcccggattcaagcgattcccctgcctcagcctcctgagtagctgggactacaggcatgtaccaccacrcgcagctaatttttgtatttttagcagagatggggtttcaccatgttggccaggatgatctcgatctcttgacgtcctgaaccgcccgccttggcctcccaaagtgctgggattacaagcgtgagccaccatgcctggcctgtagtttgtttttaaagata

SEQ ID NO: 107864 - DNA, 561 bp, Homo sapiens
atgctatgcattgtttaaaagtcatagaataggctggatgtggtggctcacacctgtaatcccagcactttgggaggccgaggtgggtggatcacctgaggtcagtgttggagacccgcctggccaacacagagaaaccccatctctactaaaaaartacagaaattagctggatgtggtgcatgcctataatcctagctacttgggaggctgaaacatgagaatcacttgaacccaggaggtggaggttgcagtgagctgacattgtgccactgcactccagcctgggtgacagagtgagactctgtctcaaaaaaaaaaaaaattcatagaataggtatacatatatcaacatgtatggttgtataaaagcatgttgatgcatgacaaaaattgcaaatgcattaatactgcttatgtaaataaaatctcattataaaaacaatttatgttttataaaaacaagaacaatagagaaacctcatatggatttatgataatatgcaatagactatagccataattaattgaactctcagcacttgaaatacaaaaaagaac

SEQ ID NO: 107865 - DNA, 561 bp, Homo sapiens
atgctatgcattgtttaaaagtcatagaataggctggatgtggtggctcacacctgtaatcccagcactttgggaggccgaggtgggtggatcacctgaggtcagtgttggagacccgcctggccaacacagagaaaccccatctctactaaaaaaatacagaaattagctggatgtggtgcatgcctataatcctagctacttgggaggctgaaacatgagaatcacttgaacccaggaggtggaggttgcagtgagctgacattgtgccactgcactccagcctgggtgacagagtgagactctgtctcaaaaaaaaaaaaaattcatagaataggtatacatatatcaacatgtatggttgtataaaagcatgttgatgcatgacaaaaattgcaaatgcattaatactgcttatgtaaataaaatctcattataaaaacaatttatgttttataaaaacaagaacaatagagaaacytcatatggatttatgataatatgcaatagactatagccataattaattgaactctcagcacttgaaatacaaaaaagaac

SEQ ID NO: 107866 - DNA, 561 bp, Homo sapiens
atgctatgcattgtttaaaagtcatagaataggctggatgtggtggctcacacctgtaatcccagcactttgggaggccgaggtgggtggatcacctgaggtcagtgttggagacccgcctggccaacacagagaaaccccatctctactaaaaaaatacagaaattagctggatgtggtgcatgcctataatcctagctacttgggaggctgaaacatgagaatcacttgaacccaggaggtggaggttgcagtgagctgacattgtgccactgcactccagcctgggtgacagagtgagactctgtctcaaaaaaaaaaaaaattcatagaataggtatacatatatcaacatgtatggttgtataaaagcatgttgatgcatgacaaaaattgcaaatgcattaatactgcttatgtaaataaaatctcattataaaaacaatttatgttttataaaaacaagaacaatagagaaacctcatatggatttatgataatatgcaatagactatagccatrattaattgaactctcagcacttgaaatacaaaaaagaac

SEQ ID NO: 107867 - DNA, 560 bp, Homo sapiens
gtaccaggcatgttttctggtaccagtctgtcctcagtcatttataacggggagaattcagactcaaggacagcctttcccaggcctggcttggaaaggtgaattagtacaactagattctctttcagctatttgaactacgaaatcccaaagaaagttgaaaatatgcattgagagtttcataggtaagcacaagcaaaagttatgaataaatataaaatataagtgagcgagagtattcagtgatagaagtctagaacagatgcacagaaataagcagaaacattctgagacagagagagagatgaggaaagggaaagaacaattcctatttctgaaagctttaggttcccattgtcctgaaagttccaggtccctgatgccaggaagcctataaatatcagttccaatgggcctgaccattctggatgccctatctttgaattttccagagaccactgtctctcttattaataatatcataayctaaatgccaccaagacctccaactggataaggtcaccagtttctcaaaagataagtaaaaactggctgacata

SEQ ID NO: 107868 - DNA, 534 bp, Homo sapiens
aaactaacataattggcacaactataaaaaaatccaaaatattcaggccatgaagtttttgccctacaatttaagcgaaaatatgcaactcatttattcactttgtcttttttttctttttctttttctctctttttttttttcagagatagggtcttgctctatctcccaggttggagtgcagtggcatgatcatagctcactgtaactattaactcctgggctcaagcaattytatcccatctcagcctcccaatagctaagactacaggtgtgcaccaccatacccagctcattaaaaaaaaaaaaaaaaaaaggtagagttgaggtctcactatgttgcccaggttggtctggaacttctggcctcaagggatcctcccacttcagcctcccaaaatgctagaattacaagcatgagccaccacacctggcccattccttcacttcgtgcaacataattgccatcagaaaccagactttttttttttttttactacagagacttaaacttttacaaaaggaagatgtttt

SEQ ID NO: 107869 - DNA, 534 bp, Homo sapiens
aaactaacataattggcacaactataaaaaaatccaaaatattcaggccatgaagtttttgccctacaatttaagcgaaaatatgcaactcatttattcactttgtcttttttttctttttctttttctctctttttttttttcagagatagggtcttgctctatctcccaggttggagtgcagtggcatgatcatagctcactgtaactattaactcctgggctcaagcaattctatcccatytcagcctcccaatagctaagactacaggtgtgcaccaccatacccagctcattaaaaaaaaaaaaaaaaaaaggtagagttgaggtctcactatgttgcccaggttggtctggaacttctggcctcaagggatcctcccacttcagcctcccaaaatgctagaattacaagcatgagccaccacacctggcccattccttcacttcgtgcaacataattgccatcagaaaccagactttttttttttttttactacagagacttaaacttttacaaaaggaagatgtttt

SEQ ID NO: 107870 - DNA, 582 bp, Homo sapiens
gtatgttaaaagctactccccaagatttttataagcatcatctggtccttagaaacctcaggcagggttattgcaagatcctctttatgggtattcttcttcttccacgtcctcaaacctctaaaatctccttcctgtcactgtcagattaccatttctaatattatcttagtttttattctgaaacttttcatggatccctcttgtaatgttcaaagcctgctaaaactgtcttcaatttctttttaaatccatcatagastctgttaacatgtactctgtctaaaaaccagactgacctagtcaatatctcatgactatgccttccttattgtccttacttttgctgatcccttttcctggaatttgtggcttacttggtgcttttacttggccaaacttttgaatcttttaagttttactttaaattatacgtctttgttacatcttccttcactggctactctagccagtagtccttatcaatatcacttatctggcatttaatcaaaccaaccaatagttttgactttttaagtaccaatgtttttatactctgcagagactaatgtggtgccacat

SEQ ID NO: 107871 - DNA, 582 bp, Homo sapiens
gtatgttaaaagctactccccaagatttttataagcatcatctggtccttagaaacctcaggcagggttattgcaagatcctctttatgggtattcttcttcttccacgtcctcaaacctctaaaatctccttcctgtcactgtcagattaccatttctaatattatcttagtttttattctgaaacttttcatggatccctcttgtaatgttcaaagcctgctaaaactgtcttcaatttctttttaaatccatcatagagtctgttaacatgtactctgtctaaaaaccagactgacctagtcaatatctcatgactatgccttccttattgtccttacttttgctgatcccttttcctggaatttrtggcttacttggtgcttttacttggccaaacttttgaatcttttaagttttactttaaattatacgtctttgttacatcttccttcactggctactctagccagtagtccttatcaatatcacttatctggcatttaatcaaaccaaccaatagttttgactttttaagtaccaatgtttttatactctgcagagactaatgtggtgccacat

SEQ ID NO: 107872 - DNA, 582 bp, Homo sapiens
gtatgttaaaagctactccccaagatttttataagcatcatctggtccttagaaacctcaggcagggttattgcaagatcctctttatgggtattcttcttcttccacgtcctcaaacctctaaaatctccttcctgtcactgtcagattaccatttctaatattatcttagtttttattctgaaacttttcatggatccctcttgtaatgttcaaagcctgctaaaactgtcttcaatttctttttaaatccatcatagagtctgttaacatgtactctgtctaaaaaccagactgacctagtcaatatctcatgactatgccttccttattgtccttacttttgctgatcccttttcctggaatttgtggcttacttggtgcttttacttggccaaacttttgaatcttttaagttttactttaaattatacgtctttgttacatcttccttcactggctactstagccagtagtccttatcaatatcacttatctggcatttaatcaaaccaaccaatagttttgactttttaagtaccaatgtttttatactctgcagagactaatgtggtgccacat

SEQ ID NO: 107873 - DNA, 406 bp, Homo sapiens
gaattcttaatgacctaatgatattaaccattgtttcagatgcttattgactttatatatttatggaaaaatgtctatgtyctttgctcatttttttaaattattatttgagatagagtcttgccctgtcggccaggctggagtgcagtggcatattatagttcagtgcaaccttgaactcctgcatttaagcagtcttcccacctcagccttctgagcagctatggctgcaggcacccaccaccacacctggctaattttttttaaaggtatttttgtagagacagggtcttgctatgttgcccagattggtctcaaactcctagcctcaagcaatcctcccacctcaacctcacaaagctctgggattacagttgtaacccactgtgcccagccgcatttttga

SEQ ID NO: 107874 - DNA, 418 bp, Homo sapiens
cattgtttcagatgcttattgactttatatatttatggaaaaatgtctatgttctttgctcatttttttaaattattatttgagatagagtcttgccctgtcggccaggctggagtgcagtggcatattatagytcagtgcaaccttgaactcctgcatttaagcagtcttcccacctcagccttctgagcagctatggctgcaggcacccaccaccacacctggctaattttttttaaaggtatttttgtagagacagggtcttgctatgttgcccagattggtctcaaactcctagcctcaagcaatcctcccacctcaacctcacaaagctctgggattacagttgtaacccactgtgcccagccgcatttttgaaattagctgtttatcttttagttgttatttgtgagaattc

SEQ ID NO: 107875 - DNA, 418 bp, Homo sapiens
cattgtttcagatgcttattgactttatatatttatggaaaaatgtctatgttctttgctcatttttttaaattattatttgagatagagtcttgccctgtcggccaggctggagtgcagtggcatattatagttcagtgcaaccttgaactcctgcatttaagcagtcttcccacctcagcctyctgagcagctatggctgcaggcacccaccaccacacctggctaattttttttaaaggtatttttgtagagacagggtcttgctatgttgcccagattggtctcaaactcctagcctcaagcaatcctcccacctcaacctcacaaagctctgggattacagttgtaacccactgtgcccagccgcatttttgaaattagctgtttatcttttagttgttatttgtgagaattc

SEQ ID NO: 107876 - DNA, 616 bp, Homo sapiens
cctaccatattcactggttctgaggattaagacatgccatctttagggtcattattctattcaacacagtttcctattcacggccttcaagttaagtaagctttaatactggctgcagaaaaagagatggaaaaattacaataaaaaaatggggataaaatgaggatgcttattcattgattcacaaatattgattacagtactatttgtgattcaatgcttttctaggtagtagagattaatagaaaatcaaaagtggaytctgtttctgaatgtatatgttttaattgaagaaacagaaatatgaacaactaattacaagataattcattaattcacatgtgcattttatattcattgtattttaggtacaatagaagaagtatggtaataaagctgttgttggaaaagaaaaaaggaattttaattaaatattcttctaaagttcaatatttacagcatcattttaaagtgaactatataaccatattgctgtggcagtttatcagttaaggccatttattaatgaagttggttttctttccagatattttaaagcacagagatccatttagttataaaaactgagatgtatctggaaactatgacctgaaca

SEQ ID NO: 107877 - DNA, 584 bp, Homo sapiens
tgggtcttaaacccaccagtcactatgcctagggagactggatggatggattagcttaatctagtgcttgatccatacttaaagctggggatgcagttgccttccccacaaccagagggctccccaaatggaactgagataagtgggtagggggagcagatgctaggacaacatagctaacacctcttgaatcctgctaatatgtgatctctgcatcctagagtcagggacgtaatggataaaggtggtatggacatgttgagaaggcctcatttgagtgaggaatgaccctgcttgtttcagatcagctatttaaggtaaaagtgaagctgcttgaacaaaagacccccaaatgcagaggccttaacaagacatgtttttatttttctcattttgcagagctcagttttccagagctgggagggggggaactctggcatcttcacaatacttccatttctgaattcaggttggctgatcccatggacacctctcagcagagaaaggaaaagggcaagggattatatttttgtcatggcttcatctaagtgayacacattcctttgactcgattcttattggcc

SEQ ID NO: 107878 - DNA, 561 bp, Homo sapiens
gagtaaaatcttcttgagtgctccaccagaagccaagcaggtgccagcagcatgyttcttgtatagcctgcagaactgagagccagataaacctctttgcttcacagattactcagtcccagatattctttatagccatgcaaaacagacaaacacatcagtattcaaaacattcactagctaccttgcttataattctatcataattatgtattttatagtttcattttccttgatctttatactttcttttctcaccaaaagtggtattaaattttcattaaatttaaaaacagtttaaaattataatattaaaaacttatatgttaagaaagacacatttttcaaattttcaatttttttttctccaatgcatgagtaaaacattcagcttacatatgggggcatctctccgagaacttagaatttcagagtatcaggtagtaaaatgttgaaaagttttgaacataatctgctaatttaactgataagggaatggtagccaaaatatcaaagtgagtgaaacacagttatataattaatacatggcaagactcaaat

SEQ ID NO: 107879 - DNA, 561 bp, Homo sapiens
gagtaaaatcttcttgagtgctccaccagaagccaagcaggtgccagcagcatgtttcttgtatagcctgcagaactgagagccagataaacctctttgcttcacagattactcagtcccagatattctttatagccatgcaaaacagacaaacacatcagtattcaaaacattcactagctaccttgcttataattctatcataattatgtattttatagtttcattttccttgatctttatactttcttttctcaccaaaagtggtattaaattttcattaaatttaaaaacagtttaaaattataatattaaaaacttatatgttaagaaagacacatttttcaaattttcaatttttttttctccaatgcatgagtaaaacattcagcttacatatgggggcatctctccragaacttagaatttcagagtatcaggtagtaaaatgttgaaaagttttgaacataatctgctaatttaactgataagggaatggtagccaaaatatcaaagtgagtgaaacacagttatataattaatacatggcaagactcaaat

SEQ ID NO: 107880 - DNA, 560 bp, Homo sapiens
atatcaacagtaaataatttccttgaccatctcaaaagtagacttgataggccaggcacagtggcccacgcctgtaatcccagcactttgggaggccgaggcgggcagatcacaaggtcaggagattgagaccatcctggctaacacagtgaaactccgtctctactaaaaatacaaaaaattagccaggcgtggtggcgggcgcctgtagtcccagctactggggaggctgaggccggagaatggcgtgaacccgggaggtggagcttgcagtgagccgagattgtgccactgcactccagcctgggcaacaaagcgagactctgtctcaaaaaaaaaaaaaaaaaaagaaagaaagaaaagaaaaaaaagtagacttgatatatatatgtgtgtgtgtgtgtgtgtgtgtgtgtrtatatatatataggctgaaattatgcaaactaaaacacacgagaaaaatattggggaaaaaaatttttaaactgtgggacagtagtaaacagtctaacaccatgtaatttggagccaaaagcagaaaagagtaattaataaga

SEQ ID NO: 107881 - DNA, 668 bp, Homo sapiens
aggtcacccaagagctctgatggagacgtacaaggggattaatgatgttttcatgcctattaacacaacatccattctgcagcccatggatcaaaaagacattttatattcgattattcttgtttaagaaatacattttgtaagattatagctgccacagatactgattcctctgatggatctgggaaaagtaaattgaaaacctcctggacagaatttatcattgtagatgcctttaattgtaattatgtaattacaattgtaattacatttgtaattcatgggaggaagtcaaaatatctacattaacaggcatttggaagaagttgactccagccttcrctgatgactttgagggatcaggacttcaagggaagacaaaactacatatgtggcagaaatagcaagttagttagaatcagaggtgaagcctaaagatgtgactgaattgcttaaatctaatgataaccttgaatgaatgagaagttctttttatagatgatcaaagaaagttgcttttattttttttcattgtttaggacagggtgttgctgtcacccaggctactgtgcagtggcaagacatagctcattgcagcctagaactcctgaacttaaacaatccttccacctcaaccttccaagtggctgggcctacatgtatgcacc

SEQ ID NO: 107882 - DNA, 668 bp, Homo sapiens
aggtcacccaagagctctgatggagacgtacaaggggattaatgatgttttcatgcctattaacacaacatccattctgcagcccatggatcaaaaagacattttatattcgattattcttgtttaagaaatacattttgtaagattatagctgccacagatactgattcctctgatggatctgggaaaagtaaattgaaaacctcctggacagaatttatcattgtagatgcctttaattgtaattatgtaattacaattgtaattacatttgtaattcatgggaggaagtcaaaatatctacattaacaggcatttggaagaagttgactccagccttcgctgatgactttgagggatcaggacttcaagggaagacamaactacatatgtggcagaaatagcaagttagttagaatcagaggtgaagcctaaagatgtgactgaattgcttaaatctaatgataaccttgaatgaatgagaagttctttttatagatgatcaaagaaagttgcttttattttttttcattgtttaggacagggtgttgctgtcacccaggctactgtgcagtggcaagacatagctcattgcagcctagaactcctgaacttaaacaatccttccacctcaaccttccaagtggctgggcctacatgtatgcacc

SEQ ID NO: 107883 - DNA, 668 bp, Homo sapiens
aggtcacccaagagctctgatggagacgtacaaggggattaatgatgttttcatgcctattaacacaacatccattctgcagcccatggatcaaaaagacattttatattcgattattcttgtttaagaaatacattttgtaagattatagctgccacagatactgattcctctgatggatctgggaaaagtaaattgaaaacctcctggacagaatttatcattgtagatgcctttaattgtaattatgtaattacaattgtaattacatttgtaattcatgggaggaagtcaaaatatctacattaacaggcatttggaagaagttgactccagccttcgctgatgactttgagggatcaggacttcaagggaagacaaaactacatatgtggcagaaatagcaagttagttagaatcagaggtgaagcctaaagatgtgactgaattgcttaaatctaatgataaccttgaatgaatgagaagttctttttatagatgatcaaagamagttgcttttattttttttcattgtttaggacagggtgttgctgtcacccaggctactgtgcagtggcaagacatagctcattgcagcctagaactcctgaacttaaacaatccttccacctcaaccttccaagtggctgggcctacatgtatgcacc

SEQ ID NO: 107884 - DNA, 527 bp, Homo sapiens
atttctgctttactaaaatttgcactctagggatgcaaaattgtaatttctagggttaaaaaatttaaaaaaataattaaaataaataaaatacaaagtaagtaaatatttaaaatcttaacaaaacaaaattaagcctggggccaaattttgtatatggtagttgcctgagaaaatgtaacagtggrctaaggctggaaagatgctctttagtacacaacgatggtaaatacattatgagtgcagtctaaaatgaataaattagtgtatattttgtagccgactagagaccccttgtaggctcatattttgaaattattggtcataatgaagataaaaaaatggtaatcatttgtgtttcagggaaagtggtgtaattacaattgtagcattcactgtagaaaggggctaatataacattttaaaaataattgttagtctgaagttgacggaatcaggaaactagacagcgtagccacaaagataaaactctggtcttgaaaatgagtagtatagaaactgataac

SEQ ID NO: 107885 - DNA, 527 bp, Homo sapiens
atttctgctttactaaaatttgcactctagggatgcaaaattgtaatttctagggttaaaaaatttaaaaaaataattaaaataaataaaatacaaagtaagtaaatatttaaaatcttaacaaaacaaaattaagcctggggccaaattttgtatatggtagttgcctgagaaaatgtaacagtgggctaaggctggaaagatgctctttagtacacaacgatggtaaatacattatgastgcagtctaaaatgaataaattagtgtatattttgtagccgactagagaccccttgtaggctcatattttgaaattattggtcataatgaagataaaaaaatggtaatcatttgtgtttcagggaaagtggtgtaattacaattgtagcattcactgtagaaaggggctaatataacattttaaaaataattgttagtctgaagttgacggaatcaggaaactagacagcgtagccacaaagataaaactctggtcttgaaaatgagtagtatagaaactgataac

SEQ ID NO: 107886 - DNA, 527 bp, Homo sapiens
atttctgctttactaaaatttgcactctagggatgcaaaattgtaatttctagggttaaaaaatttaaaaaaataattaaaataaataaaatacaaagtaagtaaatatttaaaatcttaacaaaacaaaattaagcctggggccaaattttgtatatggtagttgcctgagaaaatgtaacagtgggctaaggctggaaagatgctctttagtacacaacgatggtaaatacattatgagtgcagtctaaaatgaataaattagtgtatattttgtagccgactagagaccccttgtaggctcatattttgaaattattggtcataatgaagataaaaaaatggtratcatttgtgtttcagggaaagtggtgtaattacaattgtagcattcactgtagaaaggggctaatataacattttaaaaataattgttagtctgaagttgacggaatcaggaaactagacagcgtagccacaaagataaaactctggtcttgaaaatgagtagtatagaaactgataac

SEQ ID NO: 107887 - DNA, 618 bp, Homo sapiens
ttaaattacaaatggacaatatgagtcattgtcaattgaaaggcatttaagcaaccctcagataaaccaaattccagtcagtctattacatctccaacactrtgctaaacattataaactaattcttgcctgaaaattatacaacatgaatattaaaagcaagcataaatttagggaacatttagaaacaaataatataacacattgttttgtaaaaagtataatggcaaacttgatcatccaaaatattatgcggaaactcaattaccaaaactgagtttaaaaatagaaaggagaaaagagagagacagagagagacagacagacagacaaatggataaatgcttgggctgaagtgacagtgaggaatttggagctaactcaaaaacatcatttaacttttgggaacattaccccaaatttcttctatacatgccctgtggtagacacaccaaaaacgtaaggggaagcagaataccatttgaattccactggagaagaaatctattctagaaatgagaaactaaataattaagggtccctactgtagagaaaatacaaaacatgataaagaagaatagagtctgttttgatggataatttaagtaggaaattatt

SEQ ID NO: 107888 - DNA, 618 bp, Homo sapiens
ttaaattacaaatggacaatatgagtcattgtcaattgaaaggcatttaagcaaccctcagataaaccaaattccagtcagtctattacatctccaacactgtgctaaacattataaactaattcttgcctgaaaattatacaacatgaatattaaaagcaagcataaatttagggaacatttagaaacaaataatataacacattgttttgtaaaaagtataatggcaaacttgatcatccaaaatattatgcggaaactcaattaccaaaactgagtttaaaaatagaraggagaaaagagagagacagagagagacagacagacagacaaatggataaatgcttgggctgaagtgacagtgaggaatttggagctaactcaaaaacatcatttaacttttgggaacattaccccaaatttcttctatacatgccctgtggtagacacaccaaaaacgtaaggggaagcagaataccatttgaattccactggagaagaaatctattctagaaatgagaaactaaataattaagggtccctactgtagagaaaatacaaaacatgataaagaagaatagagtctgttttgatggataatttaagtaggaaattatt

SEQ ID NO: 107889 - DNA, 640 bp, Homo sapiens
atggctgggtcaaatggtatttytagttctagatccttgaggaatcgccacaccgtcttccacagtggttggactagtttaaaactttatgacagcaaaagtgcacagatactgagtttggacatttgtattagtatttccatttaaaaatgtgatttattatgctccttttgatagtgcaagtaaaaaagtaatgaaattcatacaaaatggctgttttatctttaagactactattctaaaactttaaatataattaaataaattataactttttgtaaaaatacattaactaaaagacagtagcctacattaattttttcaatgtgttttaatattgtatacatatttccattatggaagtaggtgattctggagatcatagtttgataactctgaccattaaatcatcgaaaataatccctacatcccaatttcatgttgattaaaatctacatctgaatgtaagttttcttcccttgtagttactttcttatgaaacggagattgtcaattcagtaagtgatatgatattcagttcacctaaaatttcttggcgaaaatcaacaactcgacacacttttatataaccgtctgacttccattgaaatgtaacaatagtgaagtcctattaataaac

SEQ ID NO: 107890 - DNA, 617 bp, Homo sapiens
cccacctcttaaccaattgaatggtgcttttkccaagctcacccatggaccagtcagcacacactcccccattctgagcccataaaaaccctggactcagcctcacagatggctactgctttcggaccccctctcacagcaaagagctacccactttgggttctctctcattgtcaagagtttttctgtcacttaataaaattcttctctgccttgctcactctctgttgtccatgtacctcaatcctcttggtggcaggacaagaactcagaacctaccaaatggcaggtgtgaaaagagctgtgaggcttctcaccaactagtcaagctgcaggcagcaggaaggagaaagctgtggcattccccaattcactgagctgcgagcagcagatgtgaaaagagctgtacatacactcctgcccaccaactatgggagttaaaaagccagccactggccaccacacagtcctgtgtgctgacctaggggaacaaaagagctgtgacatttttgaggctccaacctcaggacaccctagcaacagctgtaacaccctttggggttccgtgattcctgacatgtccaagttttctggtgcagccacataccctcatctaa

SEQ ID NO: 107891 - DNA, 386 bp, Homo sapiens
ctaaaaaaaaaaaaaaaaaaaaccatatttaggtatagtggatgtaggagccattcctacctctagggctgagaaacagtgctccaaggaacaaatcagaagacacacatatacactcacacacatacacacacacatgcacacttacacacacatacmtacacacttgtgcacacacacacacacaccacctggtatgcagagcacgatggagagtgtggccattgagtgacagaaaagttcactgtgataccccagtccaagactgggaaagaagaagccatatactggggcgctgctgaaatgcactgggaagctaccctctgggactctagggagctcactgagaagccaccacaaagatgctgctgaacttgctagaattc

SEQ ID NO: 107892 - DNA, 583 bp, Homo sapiens
gataccagggtgggcaagacacacctgatccttaccctcacagagcttacagtctagtctggcctcttcctggacccacagtagtgttggaaacagaagacacggtccccccattcaggtttggcaggcaaacattcactgatagacacactctggaagtagctctgggagcttcaatagcctggcaatcacttggattatttggttatgagaggtggtgtggtttagagccaggctgcctgggttcagatcccagatcctccacttacgagctgtggaattttttttttctagctgtggaattttaggcaaattctttatctcccttatgcctatttcctcatctgtgtaaaggagtagataacagaacctrtctcgtgggttgttgggaagatttaacagtgtaatctatgtagaggatataaaatgatgctgggtacagagtaggtgctatgatgtgttagtggtccttgttgatcttgttataaataatcaaggattctcacactgaccacagctagatgacaacccgcagagagccagacagacctccttggtgtctgtgaagaaatccaagtcactc

SEQ ID NO: 107893 - DNA, 600 bp, Homo sapiens
gaattcaagaaagaggcttccacaaatgcttataatttttagtggcaaaaaaaagcactcaaaaatgtatatattaggattgtaactattaaaaaaaaataggctggacacagtggctcacacctgtaatcccagcactttgggagggtraggtgggcgatcacttgaggtcaggagtttgagaccagtctggtcaacatggcgaaaccccttttctactaaaaatacaaaaattagccaggcatggtagcgcacgcctgttatcccagctactcaggaggctgagatatgagaatcacttgaacccgggaggctgaagttgcagtgagccgagatcgtgccactgcactctaacctgggcaacagagcaagactctgtctcaaaacaaaaacaaaaacaaaaactaagcagaggaaaaagacttaaaggaagtaataccaatatggtaaactagttgtgttttggcagtgggtttctccaagaccgtgttccattttcccaactaatgtgatgtggttttaaaacttctataactaaaagagatagtctcctttaagaagctaaacctgggtgtcagtactgtcagttgttttgtgatt

SEQ ID NO: 107894 - DNA, 614 bp, Homo sapiens
aaaagtagacccacacaaatgtgttcccctgttttttgacagaagtgcaaaagcaacttcttggaggaaggatagtcttttcaacaagtggtgcgagagcaatgaaataggcaaaaacaataaactttggcctaagcctcacaccttttacaaaaatcatctgaagacacatcatatatttaaatgtaaaacataagaacttttagaagataacgtaagagaaaatctttgagatttggggcttggagaaaggttcttagacatgacaccaaaagcacagtacataaatgaccarttggaactcatccaaacctgaagtgatttctctgctaacgatcctgttaaaggagtaaaggcaagttacagactagagaaaattacgtacaaactacacatctaacaaagtgctcatatctagaatatagttctcaaattttaacattaaaaaacactcaaatatttcaattagaaaatgggccaaagatgtaaagagacattttatcaaagtggatctatgaataataaatgggcacatgaaaagatgttcaacatcactggccattaagaaaatgcaagttaaagccaccatgacatataactccatacatattaga

SEQ ID NO: 107895 - DNA, 443 bp, Homo sapiens
gccaatcctttgtgtgagctgctcttttgtttggtatactctatgcatataacttcactcccctcctttaccacgtaaatctcttttaatttttcagaggtcttcagttttaatatactgggaaagcctttaccttttcactagcatatgtcaaactccttggaatagctctcctggaactgtgttccttttctttccaaggtttgcctcaacttttcttaagtrtttggagatattctttacatacaataaaaatcaccctttttatgtggataattgggtgacttgtgtcaaatgtgtaaccaccactaaattcaagatacatatttgcattaccacaaaaagtgactcatgctcctttacagtccttctcctcagccttcagaccctgacaaccatcaatttctttttttacatttccatattggtttattataaaagtg

SEQ ID NO: 107896 - DNA, 540 bp, Homo sapiens
acttgcatttctaacaagttcccaggtgaagctagaactgttggtctgagcacacactttaaagggacactgagaagcttaaggatgtcaagtgtgtgatatgatcaaatttacatttaaaagaatgcatcataatcacttagtcctggagaccccagagctctgaaacagaagctccgagaggaaagctctaaaggctsaataacaaaaacactgggaaattaggtggttttccattcccttaattcaacgaagtggaaggaggacctaaccaggttatcagctgatatgttattaaaaatgattattgataatatataactatgtaatttggattcataatttaggagttcaaaaattcagtgtcattgctataacaaaactcttttcattcctacatagttatttatgaaaacatggattttgaggcttatatagagaaaataaaaatataaataaaagtgatagccctattttattctagtaatgagcagtatttgtctatggattcataaactaactgaacaaaaaggtcccatt

SEQ ID NO: 107897 - DNA, 540 bp, Homo sapiens
acttgcatttctaacaagttcccaggtgaagctagaactgttggtctgagcacacactttaaagggacactgagaagcttaaggatgtcaagtgtgtgatatgatcaaatttacatttaaaagaatgcatcataatcacttagtcctggagaccccagagctctgaaacagaagctccgagaggaaagctctaaaggctcaataacaaaaacactgggaaattaggtggttttccattcccttaattcaacgaagtggaaggaggacctaaccaggttatcagctgatatgttattaaaaatgattattgataatatataactatgtaatttggattcataatttaggagttcaaaaattcagtgtcattgctataacaaaactcttttcattcctacatagttatttatgaaaacatggmttttgaggcttatatagagaaaataaaaatataaataaaagtgatagccctattttattctagtaatgagcagtatttgtctatggattcataaactaactgaacaaaaaggtcccatt

SEQ ID NO: 107898 - DNA, 614 bp, Homo sapiens
agaaagacacattgcttagcacatcaggaaaccaaacaaccttagaggtgagtgttctgctctagtaactaacatgaaagcccttatactagctattgatattattatcttattactttgcatttatatagctacagggagaaaaggggctttaaaaagtctgaggaaatggaaataatcccactttactgccaaagacacccggayacccattacaaattcggttgtcagataaatgaggttgcattggaggtgccctatttcagaataagcaggatgggaggaacttttcaaatccctattctggaaatctgtcttatcgcctttcaatgacattggatttgtgcatttatctggaaatcagagatgatttctgtcaactccttgttgtagtcacatttcaattaaaaacctgaaggagccctcttatcaggccccagcattcgtctgagtcatcactgaatatactttcctcagaaacaggatttgtattttctgtttcattgactacagaagttattccagattaaatgtggctttgctcaccaacctacttctcaaaattaataaggtcttcagttcccaggatacactgccttcctccaccaaagtaa

SEQ ID NO: 107899 - DNA, 614 bp, Homo sapiens
agaaagacacattgcttagcacatcaggaaaccaaacaaccttagaggtgagtgttctgctctagtaactaacatgaaagcccttatactagctattgatattattatcttattactttgcatttatatagctacagggagaaaaggggctttaaaaagtctgaggaaatggaaataatcccactttactgccaaagacacccggatacccattacaaattcrgttgtcagataaatgaggttgcattggaggtgccctatttcagaataagcaggatgggaggaacttttcaaatccctattctggaaatctgtcttatcgcctttcaatgacattggatttgtgcatttatctggaaatcagagatgatttctgtcaactccttgttgtagtcacatttcaattaaaaacctgaaggagccctcttatcaggccccagcattcgtctgagtcatcactgaatatactttcctcagaaacaggatttgtattttctgtttcattgactacagaagttattccagattaaatgtggctttgctcaccaacctacttctcaaaattaataaggtcttcagttcccaggatacactgccttcctccaccaaagtaa

SEQ ID NO: 107900 - DNA, 455 bp, Homo sapiens
ttcctcccctgttgcttgattagtgtggatcccaacatttaagracactggatggattcatcgcctaaatttagccacctctcaggtaaatgagaagcaagtttatgaccaatattagccaactggtaccaggctacatcattggttggactcttgaaaagaaagcttattggtagatgaagctgaaaagatgcgagggtgggaactgctgtgattacctagcaaacataacatgacattctgtggagaacaacggcatctttgagaaccacaggaagatgaaaagggggagcatgtgctgacacagatgtgtaccactctccagtgatctatgagggattgaaaaattagacatcagtggagcaaaaagtattatattttgtcttgaaataaacctttgctttacattttggcctcttatttaaatttgtagtggtcagctatatgtacttata

SEQ ID NO: 107901 - DNA, 455 bp, Homo sapiens
ttcctcccctgttgcttgattagtgtggatcccaacatttaagaacactggatggattcatcgcctaaatttagccacctctcaggtaaatgagaagcaagtttatgaccaatattagccaactggtaccaggctacatmattggttggactcttgaaaagaaagcttattggtagatgaagctgaaaagatgcgagggtgggaactgctgtgattacctagcaaacataacatgacattctgtggagaacaacggcatctttgagaaccacaggaagatgaaaagggggagcatgtgctgacacagatgtgtaccactctccagtgatctatgagggattgaaaaattagacatcagtggagcaaaaagtattatattttgtcttgaaataaacctttgctttacattttggcctcttatttaaatttgtagtggtcagctatatgtacttata

SEQ ID NO: 107902 - DNA, 509 bp, Homo sapiens
ctgccctttgcatttttacttatcctctacatagcaaggaagtgtgtaagattttgatttcgtttttacatttcatttaaatgtattttaccaaattgagaaagaaagtgcagggtgactagttttcacttttaatttttcttagcaggtgcttttaaaactttccaagtgaaattttaatcatttggyaatgtatttgaactctagcattcacctgataaacaattatttaagataattgcatattgatcattctttactttatgcacatccttcagtatttatatctatttctaattttgataaaatgttctgctccatgattctgagatcagtaatactatttaggatttctgtatcttctccatatttgttatttaaaatatagatttataagaaattccattgttcataaatttatagaaatcctattggaatataaatcaaatataagacaaatatatttaactggatttttgcatataaaaacatgcaacaagaatatattt

SEQ ID NO: 107903 - DNA, 560 bp, Homo sapiens
cacaattattttaaattttcagtctggtaattctaaaatctctgccatgtataagtttggttacaatgctgctttgtctcttcagactgttatttttgtattttgtttttgtttttgctgtttatcctaacttttaattttttgttgaaagctgaatataatgtttgataaawgaaactgaaataaacagatctctcatgtaaggacttacgtttatctaagtcattgtttgctgtttttgtaggagtaagaggttaaaattttctctaatgccctggtttttgcctcttatgtcctctttagatttccctacagactaattcctaaataaggtctgggccacacagttcttttcacctataattctttctttatacaggactcctatttatgtggtgatatggtattgagggaggggaaacattctttgttcctgtgattagttatcattcttctcctgggcctcttacccacactgtgaccttcacaagtgcttctcagcttcctcactgccttgttagtaggaccgaacgctggaattgggaatttccctttcccca

SEQ ID NO: 107904 - DNA, 560 bp, Homo sapiens
cacaattattttaaattttcagtctggtaattctaaaatctctgccatgtataagtttggttacaatgctgctttgtctcttcagactgttatttttgtattttgtttttgtttttgctgtttatcctaacttttaattttttgttgaaagctgaatataatgtttgataaatgaaactgaaataaacagatctctcatgtaaggacttacgtttatctaagtcattgtttgctgtttttgtaggagtaagaggttaaaattttctctaatgccctggtttttgcctcttatgtcctctttagatttccctacagactaattcctaaataaggtctgggccacacagttcttttcacctataattctttctttatacaggactcctatttatgtggtgatatggtattgagggaggggaaacattctttgttcctgtgattagttatcattcttctcctgggcctcttacccasactgtgaccttcacaagtgcttctcagcttcctcactgccttgttagtaggaccgaacgctggaattgggaatttccctttcccca

SEQ ID NO: 107905 - DNA, 522 bp, Homo sapiens
aagaattgagagataatggcaggtagaaactttctgctcataaacaccatattctttatttcctgatttgctgattcatttgataaacaatttcaaaaccataaacttgttcaacaataaaaggtgaggcctatagtacttgccaaataatttcyttttttaaagtagctattctgtgaatgtccaatttaataaatcacagaaaacaagtcatcaaatgttaccaaatatgttgccattgtcattagctttgctccaaggaatctgagcccatccaggaactgaatttagaatgaaaacgttatttcttctttcagtagcaactgtatttaatttaaagtatgaatataaataggaatagagctataaaagtagagttcaacctaaaccaggactaagaatttcaaaaacaaatgttgtttctttgttggctatgcatacaattctttatccaaaatgaaataaacctagacacattaaatgtttatcagtaattcgtaaaattgtcttttttactgtgga

SEQ ID NO: 107906 - DNA, 528 bp, Homo sapiens
actgcctcacagaatgatggcagccaagcatctgcttaggcatgacattgaatattcatccttgagcaagtaataaagctatttacaaaatagcaatacatatttatactatgtgttacacatattcatatttattttactatgtatatatctatattactactaaatatctatattactatgtgctatgtatatatatctttcttaacttaaatatataataataattagccttaataacaattctatggattaagtactcttactactattttagtttctatttgtcctcaatataatgaacrttccaagagggtcaacaattggagatttagtcttttttttttcactaatctattttcaatctaaaagtgtatgcctcaaaataataagcacttaatgaatatttgatgaatgaaggaacacttgaattcttatctcatagatgaggaaactaaagcctatagaggttaaactatgagcttaagctgtagaaaatgaaagtcatacttaaacctcattcccaaa

SEQ ID NO: 107907 - DNA, 511 bp, Homo sapiens
tgtgtaaagactagacgggtctatcttcccagcctacatctttctcctgtgctggaagcttcctgccctcgaacactgaactccaaattctttagttttgggactcggactggctctctttgctcctcagcttgcagagggcctattgtgggaccttatgattgtgtgagttaatacttaataaaatcctctttttatatatgtatatatacrcacatatgtatacacacatatatacacacatatacacacatatatatacacatatatatacacatatatatacacacatatatatacccatatatacacacatatatatatacacatatatatacacacacacacacacaattagtatatatatatcctacttgttcagtccctctagagaaccctgactaatacagattttggtatcaagagtggttgtagaggaacagaatattaaggatggagttttttcattagtttggtggtttctgagattggctgcttaatatgattagac

SEQ ID NO: 107908 - DNA, 546 bp, Homo sapiens
atgtttgtgacttcactgttactcacttttagtaaagagcaagaaagtgtcaatggaacattttaaaccatgaaatgtaattgttttaaaactgtgattaatctgggatagataaaaccagagttctttttaaaatgattggacagcctgttgagagaaataggatacataaagcacaaattaraaaaccttcacagatatctgttgtttcccacttgttctatgtggaattgcatggctaacctaattatttactaactttaagtaatttattatacttaaaataactttaaagataaatattagtgagcatatagtgtggactgtaccagttttttcttggtttgtctatgtctaagaaaatccaaactgccatgcctgctattctagcttgatgattcaccacaaattacacggtggcaacttccggaaataaaggcagagttcagtagggacaaactcaactcctctctaggatctgttcttaaacttcatcccctgaaacatgggagaatttcacaccccttgtgccataatctctttgtg

SEQ ID NO: 107909 - DNA, 635 bp, Homo sapiens
cccttgtcagaattctctttatggtctgtccacatcagtacaagatttttctagccttttcctccagattcgttcagcctctgctcattacccagttccaaagccactcccacatcttcaggtatttgttatagcaacaaccccactctcrgtaccaatttttctgtcttagtccattttctgctgctataacagaagaccacagatggtgcaatttgtaaggaaaagagatttatttggctctcagttctagatgctgagaagtccaagagcatcagcacctgttggcattaggtgagggtcatcccatggcagaaggcacacatatgagacagagagaggaaatccagctcaactcatccttttctcagaagcccactctcagaaaacactaacccagttccacaataacattactccattcataagggcaaagccctcatgacctaattatcttccaaaggtcttacttctcaacactgttacattggcaattgaatttcaatatgagttttggtggggacattcaaaccataacaatgaaacatgcctcatatacaagttatgactttaccccttaactcccattcaaaaagaagtatactggaatgcatatgtgtaagagtgacataata

SEQ ID NO: 107910 - DNA, 539 bp, Homo sapiens
tgttaaaaaaaaaaaaaaaaaggctgtaaagtgcttctattaagtgaaaagttctcgatttaataaggaaagaaaaaatactgtatgctgaggttgctaagattagctcagttattgttaatctcttactgtgcctaatttataagttaaactctatygtaggtatgtaagcacaggaaaaaacatatagggttcggtatactatcttaaagtttcaggcctccactgggggtcttggaatgtatcccccatggttaagggggaactgctctattaatatctttgaagaattgacagcatttctataagtagcacctaaatctcaccacctaaatgcattcgggttcttccctccctcctgtgcctgtccttgttagcctacattggtgagatgactccacagcatacgatggctaatataatagtacaaactgaagaggagagaatggtaaagatgctttctgattctacaaatgcaaagaaagggcgtatgacacaataatgcagtgtgggcatgttttagcgctttctggttcaag

SEQ ID NO: 107911 - DNA, 539 bp, Homo sapiens
tgttaaaaaaaaaaaaaaaaaggctgtaaagtgcttctattaagtgaaaagttctcgatttaataaggaaagaaaaaatactgtatgctgaggttgctaagattagctcagttattgttaatctcttactgtgcctaatttataagttaaactctattgtaggtatgtaagcacaggaaaaaacatatagggttcggtatactatcttaaagtttcaggcctccactgggggtcttggaatgtatcccccatggttaagggggaactgctctattaatatctttgaagaattgacagcatttctrtaagtagcacctaaatctcaccacctaaatgcattcgggttcttccctccctcctgtgcctgtccttgttagcctacattggtgagatgactccacagcatacgatggctaatataatagtacaaactgaagaggagagaatggtaaagatgctttctgattctacaaatgcaaagaaagggcgtatgacacaataatgcagtgtgggcatgttttagcgctttctggttcaag

SEQ ID NO: 107912 - DNA, 584 bp, Homo sapiens
aatccaccaaaaagtaaattgccataacctataaacatatgaaataattattcatgttatgaatagttttttaaatgaaaattgaagccacaatgaaatatcaattttatattcaagatgagcatagtaacaaccacaaataaacaaataatggaatctactgttaaagatgatttacatacaaaattgagagtaaatgaatagcttatataatctggaattatctattatcattttaaaaattataaattacatttgcctctgtcttccattattgattttctattgtacagaaaaaatattaaagtatatttatttaagaacattaagaccaagatagaatttctatcatttattttaaaattatgacatttaaactgctattacataaaactgttgatagagggtttcatattaaaaattttaaattattaaaataatataagttgttcaaactgtagtgtacttaaatttttacttgtatgacattggagaaattaaggagcaatatcaagtatttaactttagttactccaattggtgaagggacatgttaagtaaaygagataaagaacgttttcata

SEQ ID NO: 107913 - DNA, 433 bp, Homo sapiens
gttttaaagcaaggcaatgccatgtgtggtagagagtgccaaacatgtctgacatgccgctcagactgattagaaatgagcacctgactatgggacatgtggtcaagtcatctcatcatgggtttcatcaaacccacagtcttgtaaagtctgctggctcaacaacaatcaactctaagacagaaatgttatattcagctttgagcatgagcaaagtcctttaccaacatagaatacatactatttcaactaaagaagaaaactgtgtgaaggaactgtcacctacaaggctagaatgggtgttgtggttctctggggggatgcagtggcatatttctaatgagtacagttcaacagtgtggcttaggttctrgtggtacatggaagcagctccagccagttctaaatatttgatgggtgaagttgttcctga

SEQ ID NO: 107914 - DNA, 589 bp, Homo sapiens
ccccctccaccctcaaagagtaagagtctaggagcagagaaagtatgcagattccatagttgcactctggagccagaccacctgggttccgattccagctatgacacatactaggtgtttatccgtaccagttatttaagctttctgtgaatactaagtggatttatcttgtaggctgtcataatcattaaatgaactaatgtaagaaaagttcttaaaattagtactttgtttatattttwaaaaaaaaagcaatatacaaaaaacacagtgaaagtttttctagaaagagattttgatataatcccagtggggagaattcattccaggattcagggcacaatgtgagcaaagattcagagagtaaagcataaagagcgctttggaaatagcaactaatccattgcagttaagacttttgggtctgttaaaaggagtgctgagaactgaaaccagaaaggcaagatgggcccggattacccaaagggccaagaataccaagccaaagagttgtggctctgtcctgcacgcgctagaggaccaccaagagcgtttgagccagggagaagcatgaatgttggagaaacac

SEQ ID NO: 107915 - DNA, 370 bp, Homo sapiens
gcagaggggtcttggggagcttgctccattctctgttgtgaccgaagattgtgggtgtacaagcrtagcctcacccgagacatgctctccaggcccatcccttttacacctttagcatagcacttgacctgcaaggttgtaattatttttaatttgaatattcagaaaagtacaaatgaaaaaataatgattactcatattccagcaacccacagttagccagtgttgacatatttgcttctagttttattttatatctattccttaaaataaaaaactgcatgatatataagcacattgttctttgaaacaattattacaatatgagaataagctaaattcctatgactaccatttcaaatctgaattc

SEQ ID NO: 107916 - DNA, 515 bp, Homo sapiens
tacagaagaaaataagaacaaggagccatgggtttgagttgaggatgcgtctgaatagccatctgctaaccttagcctgaaggagaatagcccaaaattcatgctcacttaataaggacagaaggactagctgatttcatagacacagtggcattgacagagggtgttatttcagtagatttgttatatcgttttccaaaaccaaaggcacagtgcggtgctgtgaaatagagtttttcagaagactctgattttcggtggcacagtgtttcctggcactgtggtagtcgagtaaagggatgcttggttgtcattacctggagagcaaattgtggctgatttcaaatggaaagatgctgatgccatgtaagcagcaccccccaagcagttacaactcctccacttttgatactacaaaaaggaaatcagtactatccactggcatagcaaaattttcttaccttctaaattggttccctttgctctttytgtgaaaatgccacacagtccgtaac

SEQ ID NO: 107917 - DNA, 579 bp, Homo sapiens
gctactccttgagggaccggtgcttcaaatacacacatgtgtggccctcagccctgccacttttctcccagaggatggggaaccaatcgagcatgactgccaataaattatagtccagacttatgccgcccaagatgatctcttagaagtccccttagctaatcctgaccttaatcctgacctttcaccaatggaaattcatttgtgaaacatgggatacaaagggcaggttatgccatagttagtgatgtaaccatacttgaaagtaagcttcttcccccagggaccagtgcccagttagcagaactagtgrcacttagctgagccttagaactgggaaatggaagaagaataaatgtgtatacagatagcaagtatgcttatctaatcctacatgcccatgctgcaatatggaaagaaagggagttcctaacctctggggaacccccattgagtatcacaaggaaaccatggagttattgcatgcaatgcaaaaacccaaggaggtggcagtcttacactgctgaagccatcaaaaggagagcgagaggggagaacagcagcataagtggctggcag

SEQ ID NO: 107918 - DNA, 601 bp, Homo sapiens
acaatgcctagtgggtctatttggattttggaggcaacacattcctcatgtggtgtgtgttattctgtcgcatttatcaagtgacccaaaaggctgccagttttgagtggggtccaaaacaggagaaggctctgcaataggtccaggctgctgttcaagctgctctggcacttgggccatctgacccagcagatccaatggtgcttgaggtctcagtggcaaatagagatgctgtttggagcctttgcaggaccccataggtgaatcatagtggaggcctctaggattttgaagcaaggccctgccatcttttgcagataactactctccttttgagtgacagctcttggcctgttactgggctttggtggaaactgaacgtttgactatggatcatcaagtcaccatgtgacctgaactgcctgtcatgaactgggtgctttctgacccatctagccataaartgggtcgtgcacagcagcattccatcatcaaatggaagtggtatatatgtgatcaggctcgagcaggtcctgaaggcacaagtaagttacatgaggaagtggctcaaatgcccatggtctccactcctgccaccctg

SEQ ID NO: 107919 - DNA, 522 bp, Homo sapiens
aggatatgagatttgggaggcatcaaggacagaatgatatggtttggatttgtgtccctgcccaaatctcatgtctaattgttattcccagcattggaggaggggccttgtgggaggtaattgggtcatgggggtagattttccccttgctgttctcatgttagtgagtgagttatgagatttggttgtttataagtgtgtggcacctcccccttctctctcttcccactgctctggccatgtaagactttatctcacaagggtccttggggagggctgccagtggaattgtggaagraccacagggtaaaggaaacttccagctgaactttgtaataattttggctgaacatgaattttccagggtaaaatccgggggtggggagcaaacaggaagtgcagatttgagcacagaagccatggcatgtgggtaggggtgaagcctgaaagccctacttgctttctcagcaggaaggcttgtagcctggggcaagaactcagccctgcacactgactgcctgg

SEQ ID NO: 107920 - DNA, 548 bp, Homo sapiens
gcaaaaacattaatgaaactggagttcattatgttaagtgaaataagtcaggaatagaaacacaaacattttatgttttcacttacttgtgggatgtaaaaatcaaaacagttgaacacatacagatataagtatgctacctgagactgggaagggtggtggggggtctggaggagaggtagggatggttaatgggcacattttaaaaagctagaaagaatgaataatacctagcatttgatagcacaacagggtgactacagtcaaaataatttaattgtacattttttaaaaactaaaagagtataactggattgcttagaacatgaaggataaatgyttgagaagatgaatactccattttccattatgtgattattacacattgcatgcctgtatcaaaacatctcatgtaccttataaatatacatacctcccatgtactcataaaaataaaaaaataaaaagaccaggctttggaactcaccatcttgaaaggttctctgttcatcatcatctgagatgagaatggctgaatggaaaagaag

SEQ ID NO: 107921 - DNA, 564 bp, Homo sapiens
tagctgcagcagtaaaacccacaagggatttttctcttggttcaaataatattttattagaacttcagttataaaagtctgtgatgagacctggatctctgcacagttgtgggtgaagttctatgggaatcctttggtgtattagacggcagcagactcccttgggtgtttcactttcatgagcactagaaattcacacaagtgccagtgggaagattttaaaggctcccaaagctgacccagagtttgaatgccccttgcctgtacttcctagtaggagattttgacttgatcaattccccagttttgatcaaagccagcagtgactaaacatggtgtgcgggcagtacttaaagctccctgagggaagaaaagcctcatcactcagcaaccmctttggcaaaataaagggtaacattcattgggtttgaacaagtgaataaaaaaaacagctccccaatttttggaggaaaacatgatagaataaaaaaaaaaaaaaaaaaaaaaaaaaaactactgacttaaaaaagcccttctaatccaatcttaaaattttcacaaatc

SEQ ID NO: 107922 - DNA, 564 bp, Homo sapiens
tagctgcagcagtaaaacccacaagggatttttctcttggttcaaataatattttattagaacttcagttataaaagtctgtgatgagacctggatctctgcacagttgtgggtgaagttctatgggaatcctttggtgtattagacggcagcagactcccttgggtgtttcactttcatgagcactagaaattcacacaagtgccagtgggaagattttaaaggctcccaaagctgacccagagtttgaatgccccttgcctgtacttcctagtaggagattttgacttgatcaattccccagttttgatcaaagccagcagtgactaaacatggtgtgcgggcagtacttaaagctccctgagggaagaaaagcctcatcactcagcaacccctttggcaaaataaagggtaacattcattgggtttgaacaagtgaataaaaraaacagctccccaatttttggaggaaaacatgatagaataaaaaaaaaaaaaaaaaaaaaaaaaaaactactgacttaaaaaagcccttctaatccaatcttaaaattttcacaaatc

SEQ ID NO: 107923 - DNA, 567 bp, Homo sapiens
gtcattttataaagtgcactgaaagctggatgaaagcttatgaagaaagaataaatcaatacattgaagagcaaagaccaatctatttccagaaaagtgaatctgtacagaaaggcagaagatcattttagcattaaatataaaatctaacagtgscttgtaaatgtagccacaatattcataatcaaagggggcaagataactctaagtgacatggacaacagaactagagggatataatttatagaaggaagaataaatttgttctcttaaaacttacatagtgagtacatattgtaaaaaaaagattaaaaagtgttagtatgatgatattattatattattaattattttcctgacatctttttgtccctcttactgacattaactacaatgcagttcctagaccttagtgttagactgggttccaaactagattcctctgctttctggacacaccctctaagccttagttatatcatcagatagctaactataataataccttttagtgttgatgacactactaaatgagataatgtatgtgactaacaatgcttaaatatg

SEQ ID NO: 107924 - DNA, 609 bp, Homo sapiens
gctgggattacaggcatgagtcaccatgcctggcctgaactcaaagtttttaatatgtaattgatgacactgaagtgactttatgaagcagctcttttgaagttacttatggaagtggtttttgagacaatatagaggtgacacaaaatgtcagtaaactggacttcaaaagagtgatttagaattttatrtcttatgggtgaaataatcaaatatgttctgattttaaaactacttattacagagatagtataagtagcaaaaaatttagcaagttttatattgccactatagattactacttctaaatctgttatctgaaattttgagtaggcattgtttcatgtaatattctttactgatgcagcattttgatacaaatcattttgtaattactatttaagtaaaaaattaaaattttagtattaaatgagttatatataaagttcttagagtgtatggtacctaagcattcatgcattagcaattattacttttattgttaaaatagaaaatttatatttataatcaatatattaatgaggtcatgtttaatacctaaatctctagcttcattcagtaccacctgttttttccctgtcctgtatg

SEQ ID NO: 107925 - DNA, 609 bp, Homo sapiens
gctgggattacaggcatgagtcaccatgcctggcctgaactcaaagtttttaatatgtaattgatgacactgaagtgactttatgaagcagctcttttgaagttacttatggaagtggtttttgagacaatatagaggtgacacaaaatgtcagtaaactggacttcaaaagagtgatttagaattttatgtcttatgggtgaaataatcaaatatgttctgattttaaaactacttattacagagatagtataagtagcaaaaaatttagmaagttttatattgccactatagattactacttctaaatctgttatctgaaattttgagtaggcattgtttcatgtaatattctttactgatgcagcattttgatacaaatcattttgtaattactatttaagtaaaaaattaaaattttagtattaaatgagttatatataaagttcttagagtgtatggtacctaagcattcatgcattagcaattattacttttattgttaaaatagaaaatttatatttataatcaatatattaatgaggtcatgtttaatacctaaatctctagcttcattcagtaccacctgttttttccctgtcctgtatg

SEQ ID NO: 107926 - DNA, 595 bp, Homo sapiens
tcactccttctcttctggtagcaagatggctgcagcagttccaggtgccctatccaactaccacagctgagagaagaaaagaaataatttcttatttgtgtgtctcccatgaatgaggaaacttttcccagaagcccccagcaaatcttcccttatgtttcattggccsgatttggatcacatgcttttttctgtagcaatccctgaaagggaaatgggattgctgtttgacaagtcaaacctgtccctgaggctggtaaggggcaatgtcctctggagcacacagttgtttgtacatgtgaatctctaaaaaatttcagggttctgttaggatgcaagagggaagtgttgtctggtatccatgcagcagggtctggtgtagttactgtatgtactcaggaggaactaagttggtttctctgggcactgagtgaggaggactgtgaggagaaagacgggtgatgtggcaggagatctgaggtgactgctctctcagttccgtgtccttcaatacattcttcctctttctcagactgcttttgtacaaactggcaaggggctgaatttcttatctaggttgacaaggagggaaaag

SEQ ID NO: 107927 - DNA, 581 bp, Homo sapiens
tttgacaagtcaaacctgtccctgaggctggtaaggggcaatgtcctctggagcacacagttgtttgtacatgtgaatctctaaaaaatttcagggttctgttaggatgcaagagggaagtgttgtctggtatccrtgcagcagggtctggtgtagttactgtatgtactcaggaggaactaagttggtttctctgggcactgagtgaggaggactgtgaggagaaagacgggtgatgtggcaggagatctgaggtgactgctctctcagttccgtgtccttcaatacattcttcctctttctcagactgcttttgtacaaactggcaaggggctgaatttcttatctaggttgacaaggagggaaaaggaacaaatgcaggagctagggatagaggagatctagggaagtggtagaagccattgggagggcagtgtagttgggttttagccaagttaatctacattgcaggttgcagacaggttgcacacatcacaggtggttgcagacagggcctcagcaaccacctgggtaacaagatggcagccacagactgtgtggattttaacctgatagcatca

SEQ ID NO: 107928 - DNA, 622 bp, Homo sapiens
atctcaaaagaatgaaagaaaactcaactaagggaaatcattgctgcttgtgatttattttctgagtgtgggaactttcatgatgtcaagcatactttgagacagtaatttttagaaaggtgttctgaagttagaaaaaaatttctaaacatgtgtgcctcatagaatcatggcaattcagaggcattagccatctgctagattcgtatgtgttttatttttctgaggcatcgtttctgtatgtgcttgaatctcactccagaaaattaggtgtgaatgaaagatcttgtctttacttccttcacatgaacctatggcaattttggctttgaactccttttatacagcttttagggaaattaggcctcaaactgtacacccatggctcctcccaagtttcttggtctatgaccttgttagattgacaggatcctctgatcactgcccragttccttcaataatactgtctctgtattttgtgccaggcttgggtcacaggaatatctgtagctggttcacgttgctgacgcatagcagagtaattctgagtcctagcccatcgtcatggtattgcttgagaatagggctcagggtccccaactataggatacaaggattatt

SEQ ID NO: 107929 - DNA, 585 bp, Homo sapiens
aaatgttaaaataagaaatatcgaaaactcagcagtgcctgaaatgtttaaacatttaccacttgatacaagaataaataaataactttggtattaaaaagtttatgcaatgcycaaatttgtttgaaaaagtattttatcttatattaatggtttctgcaaggtatttttgttcattactctctcaaataatgttcatttcttttaagaattcttagtacttcattgtttttttcaatgattgctggtatcccagaaagattatttttaattctgcatattcccacaggggaacagtcatatattggtgtagcacttatgtctgtagatccctagaggaataaatgctgataaagcctggaagatccaaaggaatttaacatcttttactaaaattgatacaagatggttaatgtatcattaaaacaatctcacctataaacacttcacaattttgttgggatgcttttatttttggaacttttactcgttcttattcctgaggcctagaagatcacaatgtctaacatattttacagaaaatgtaatacaaaatgaatgtaattttattaaaaatactgtttt

SEQ ID NO: 107930 - DNA, 633 bp, Homo sapiens
aaaaaattcatcagataaatttcatgaaatggatatggcaaaggaaagcataaamtaattatgtatcaatagtcataatccaaagaaagaatatagagaaaaaatattgaaaaatttgaacagactatattaagggatcaggtatatttatacttgcagtaacaaacatgtaaagattaagaatggacaaaacattcaggaaagagttgacatattttcccaaatttgttgaaagaaattttctggcacaagatgaacaccaggcaggataagtacaaataagctcattctgagacacatcatatttaaactgcttaaagtcaaaattatatagcaaaggttgaaagatgtgagaaaaaaataacatatagattcaggataacaatgatgcatcaataaccatggaagacagaagaaagtgggacaaatactttaaacaaacaaccaagtaaaactgttaactcagaattctgcatacacgagaaattttattcaagaatgaatgtaaatagataaaaagaaatctaagaaaatttttcaagagatgacttgtttgaaaagaaatgcatggcattttttttaccttaaaatgtaatgccaaatgaaaacttattatatcctcagaaaagaatg

SEQ ID NO: 107931 - DNA, 633 bp, Homo sapiens
aaaaaattcatcagataaatttcatgaaatggatatggcaaaggaaagcataaaataattatgtatcaatagtcataatccaaagaaagaatatagagaaaaaatattgaaaaatttgaacagactatattaagggatcaggtatatttatacttgcagtaacaaacatgtaaagattaagaatggacaaaacattcaggaaagagttgacatattttcccaaatttgttgaaagaaattttctggcacaagatgaacaccaggcaggataagtacaaataagctcattctgagacacatcatatttaaactgcttaaagtcaaaattatatagcaaaggttgaaagatgtgagaaaaaaataacatatagattcaggataacaatgatgcatcaataaccatggaagacagaagaaagtgggacaaatactttaaacaaacaaccaagtaaaactgttaactcagaattctgcatacacragaaattttattcaagaatgaatgtaaatagataaaaagaaatctaagaaaatttttcaagagatgacttgtttgaaaagaaatgcatggcattttttttaccttaaaatgtaatgccaaatgaaaacttattatatcctcagaaaagaatg

SEQ ID NO: 107932 - DNA, 560 bp, Homo sapiens
cctatgcagtcctagtaagtgggtttgggggttatagtaactcaaacgtggtctagaatcagccatgtggctacaggggtaaacatcatgtgtccccagagtccacagcccccaggatctgtgcccctgttgtacaggtatatgggtaatattgcatcactacagacttgtgaagtattcacatccctgttgaatagatgagtagaatgtctgaaaaagtaagaatattgcttagagtcacacaaatagtaatatgaaagtcacaatttaaatccaagtmtgcttttatacgaagcacttttaagtatacttaagtgttttaattcaaagcacttttaagaatatatttaaggtgaaaatcaacaagaaagccaatgcatgggaacttaatagattattagttaaaaaatgccataaattgtattaacttaatattgttttctgcatgttgatataacacccaataggagaatttcatctaatagtagtaaaaattcaaataatggcccaagtaaaagcaaatagcctttataagaactattttaaatcacaaactgcca

SEQ ID NO: 107933 - DNA, 596 bp, Homo sapiens
tatagtcatgttagtggatacgcacttgtgtcatattatgttctagtttgtatttctaagctgactaaaaatattaatactatttcatgtttattgactccttgaattgtgattcttctgtttggggcttttgtccccactttcatatttgtctgtttcttatttgcttacattttcttattgacttctaggagttcttatttttttcaataatgtttttgacaaaagtgctgcaaatatcttctccattatactctttattgggaattttaggtgaagagaattatgaatttgcttttcaagaatagtttgcctgagtatagaattctcatctgacagtgtgtctttaaaawttttgaatatgtttctaaatatttgaataggttattccattacctgtggctatgataatttcttgtaaataatttactaattttatggattatttcctgtaaatgacttttttctttctgcatccagggttactcattttctgtcttgggacagtttgactataatgtgtctaggtgtcgatgttttttagcttattgaatgtagagatcagtttttctcatcagatttaggatgcttttaga

SEQ ID NO: 107934 - DNA, 526 bp, Homo sapiens
ctactagcatttgttaaattcatttctcatgtcatcccaccaattgtctcaggaagggaagacattggctggttcttggtgtcttcctgaagttggtctgtccttcatgttatatcagataaaaacttctcaacacctgtagaatgcaacggacaccacttccctgccagctccctgttttctccttttccttttcttggtttatggagttttctccttactttcctttttctttgtagtttttatcggttttttcccktacttcaccatcttcccaagaaatcttgagttagatcactttgtggaacttagtatgagcaagctataccactaataaacattaaaataatgagatagcctaagagtaactgctcaaagaaaatgaagactatccccgaattcatgcatgaccatagcatgtattttgaaagaagaaagaaaacatagcaaaccttgccaatcaataagcaatttgccgatcaataagtaatttccctgtactattcaatgcaggcagatctccaca

SEQ ID NO: 107935 - DNA, 578 bp, Homo sapiens
attccgtttaatgtaatacaatttatttaatgccactatttttatggatataaatgwgacaacatcactaaaagtcctatgtgttgattttcccagaagtaaaagagaagaaaattggtaaccaaagctggaggtctagatatgtaaaaatttctgaattaaaactctgtctttgaaatgtttttcgaaaacaatactattccaaatacctcaaagctgttcatttcctttctctttacaaaaaggttaatgaatgtgtttaaaagttaatgcagattatttatttcacttactaaaatatcccaattatattatgtgtcaaaatctgatccattcaaggtttttaattgaaatgatgttccagcagctgatgttattatggagtagtagaaaagctgaacgacgtgggataacaggctagtcatatgcagaagactaaaactagaccccttccttacaccatacacaaaggggaattaaagacctaaatgcacaacttaaacctataaaattcctgaaagataacctaggaaataccattctcatcataagccatggcaaatattttatggagaaga

SEQ ID NO: 107936 - DNA, 559 bp, Homo sapiens
aaattaaccagatgttgttgggaatgtaaaggcctagagacgtggcctttgggattcattctggactcattcctttctagtatacyatgatgacctttaaggggaagtaaagctaacaatatttgtagctgaagggtacttgatattccttccagccagctcttctcccttgcatactaatgtgtttgttcatcaaaatgattgtattagtcttctgaacaatttcagcattacttgctagggttgagagagagagagaaggacaggattatttagaaagcaggccacataagggacaaaataaagaaacataagtatccaaatcgcatccccctgtttccccccaggctgtcgcttagctttctgtccccactgccattttctttatcatccaaacttaagtccatcaagatggggacaggaaaaaaaaaactgaagccagatattacgtatgtgcacttgctattatttctattaataggacctcctttggcatgaaaaagtttaatgtcattgtcgttctcagaaacgagttttgaatgttggatgagggagccct

SEQ ID NO: 107937 - DNA, 577 bp, Homo sapiens
atatggccaggtggaacagctgtcacctaggactgagatgactggtgtactcctaacagatcttcagagggaagacacagaagctgggctgaaggggggaaaagctaggaaccctacatggggctactacacacctggactcattcctggcccccagtggctccaggggaatggatgagttagactggcaaagtgcaacctgctcttaccctggaaccgaagcaggagaagaccccacgaccaccaccaacactcaaattggcagagagagctgctcagagaagtggtagaagcagcaagccagctgacatagagcccagagggtttggtgtgggaacatctgtagtggaacataaccaaggttggacatccccctagattcaacttgcttccacaagagactttaaccctaggggaactgttggtcctgaactcttcagggcaatcatgcccatcaggcagggctcatccagcctgggcaccccttggtctgctggcctctcctggggccccagcrtggccatgcctctttgtagggcagcctcacatgccctgggggcccccatcacagcttctg

SEQ ID NO: 107938 - DNA, 612 bp, Homo sapiens
tattttatgtgaattgtttaagtattttgtgcattttactattcgattttctatcctttccttattagtttgcaggtgttctttacagagtctagatatgattttttgtgtggggggtaaattttttgtagatatactccttctttatttatttaatgttatcatttgatgaacagagctattgatttatctttttgctttagtttaaaactatttgtgttctgtttctgaaatcttggactactctaaaatcatgaagatgattgcccatgttttcatctaaagccattattgttttaccttaaccacatagaccacagtcatttttaattgatttttgtgacttgggtgagcagaaattaagatacttatttttctcaaataagtaatccattgatgcagcacctttattggaaaaactacacgttgcccactgcacagcagtgttacttttgtgataaattaggttggcgtatatatgggtaaaactgtttcttagtgagtatatsaagcacatatagaaaactaaagagaatagtataattatcccatactatccatcacacagcttcaataattatcagttcatggacacttttcatatactagcac

SEQ ID NO: 107939 - DNA, 531 bp, Homo sapiens
taaaaatatggctttataaggaatttctgccagatttgaaacagtccttgttgaatgacagggatttcaaatgattaagagaatggcactgaattcccacctttgacttctacttgttttagttgaacttctatcaagctttggaacccacttctcccaaatttttctgaggttcttgttgaaaattattgacagggccatgcctcagggagaaaaatacccacaaaaaaaacaacaaatcacagataaggtctgtagtttcaataatctgttgctaccctgaagatagcactaaagtgattaaccaagtctttyctctatgggcagcacttcttcacctttttgtctctccaaattttcttccttcatcaaaactctattgttctgaattttatctctttaggaccctactatggtttgaatatttgtcaccttcacaactcatgttgaaatttaatccccaatgtggcagtgttaaaatgtggggcctttaagaggtgattggtcatgtgggttctgccttcatgagtg

SEQ ID NO: 107940 - DNA, 581 bp, Homo sapiens
atcagcacagttctcattcatctttgatttaagcatttgtcattgtgccccattgtagaatagcataatacaatgcatacatgcctcaccaatctgacacatctaaggtcacactrttagtagtacttgaatattgctatttccaacttctcattttctcattcagaaactccaatgccttaacacttcccaccccttcagcaacaaaaaggatcttatatgcacttcaatatcagtttgaactgtaattacccaccatcctctgctactccaagctctatcttcaccatcattccttgcctcacacaggcccctcatttcattaaggtgcatattcctacctttttatttgcaacattaatgttctcagtgctcaaacagtatgtcaggagtctttgcaatgttccatcccactatattaagctcaatgggtagggttccatagcaggagagcttaaggatctgaactagagtaaactcacagtacaagtagactcaaaagcatatatggctctcgacaatagaagtgtatttcttgatcatgtgacactaaaaggtgagagaacaggtagatgggtctg

SEQ ID NO: 107941 - DNA, 561 bp, Homo sapiens
tctttatattgtccaagatttccttatggaaaaagtttaacayacaacttagtggaacaaattttgtaataaacatcctaatactcatcacctatatttgaccatatacattttactgtacttgctttattgcatacatctctatgtcaccatcatcctgtttagcaatccagccacttcactttatatgcatttctaaatgaattgcacacatcaggtttaattcacattttcctgatgccagataatgctgaacacttttttacatgcttactgtccttttatatatcttgtgttgtaaaacgtctgtacagtttttgcgcattttaattgagttatttgtcttttgcttattgaattatagggtatctttgtataacccatatacctgctctttgccagcggtatgtatacaattttcttcccacctatggtttgcctattcgtttttttaactgtgtactttgataagcatattttaatttttgataaagtataatttctcaattgttataggtattgtttctgtaaactaagaaatctttgcttacatgaacatca

SEQ ID NO: 107942 - DNA, 506 bp, Homo sapiens
cttatacactcaagaagcaccaaaaaagrtatgtttgttgaagggcaaaaatagagcatgaaggattcacccaccttaaatgtgactttccaataaggtcattgataatatctttcttcattgaaacagcctctttacaatatggaagaagtaactttcagcaacctggtatttgtcctatgtcattaagaaatctatttttaacttagaaggtgggcaatcactaactacatattcacgtgaaattattcattatttcatatacacttttggtctccacatacattttccttcatagttgatatctctcctataacctcagttacacaaataagatagccctggttcacatggtaatgaagcaacaagtttgcacctggtaataaacaagacttccttatatttgaattgcattgtagaattcactatatatttcagacactcacaacctcagggaccaccataaaaaaagaaagaaaacaccagggctgagatcctggctatcc

SEQ ID NO: 107943 - DNA, 546 bp, Homo sapiens
tccttggcatacacaatggctcaagccttttagcagttgattatgtgcagtgttataccccaatgagagcctcctaacaagatctgaagtcagcaaagtcaaattatcatcttgtacttcttttgcaccatctaagcacctttggagagtgcttatatttaatttatgtgccrgtaaagttttgaggattgctactaggtaatgctattaacttgcatatttttgcataaaagattttggaagaaaaagttatattggcacacagggaatgggatagcattgcaaaaatcacatgcatattcaaagataatgacatatgatattctgaatcctacagggaaatcaattcttaattactcttcctgacatttgtcattgcatagcattccaggaaaatcactgaatctcaaaaacttccacattacctggaagaaggaaaatgtgaattagataaatcttttctagaccaatcctgcagattgaatctgagggagggtgttgtacagtggacttttcagtctaatagactgggctaaagtgttaaat

SEQ ID NO: 107944 - DNA, 642 bp, Homo sapiens
gccaaaacaataacagtaataataacaataatttaaatagtgtggacaattctgcctgacatttcaatcaatgagaatatgtatatgttttcagtaataaatatcaggagagataagactttgctgatctcccaatcagttttggttttatattggttctaaaaattgrgaatcttgccatgctatgtaattcttgtgttataagatgtttttatacttttgtacataatggcccttcacctccaagaatacatcatctatatatcagatgttcagccagaacaaaacaaaatgagccatcctttcaactttgagagaaaaatgatgagatagatttatagagagacagcagaagaatcttcttataacaggtttgtagtaaatttgactctgacatctttatcttctgtgttgactttagaaattaatctctctatataacttcattttatctacaaatggtgctatttatcaaatggtggcatcagaggagacacaaacaaaatgaaacagaaaatgtgataaaacaagtaaaatgattagtttgtatatatcaatttggttggttgattaacttattaaaactactgtgcttttgactatgattgacaatgttacttacagaagtgaagtgttattatc

SEQ ID NO: 107945 - DNA, 642 bp, Homo sapiens
tttctcaatatttcgctttttaaatcacaaaaccaaaagactataacttgaagtcagcttaagttttcaaattaacatttgctaccaattagttcataatgagtgtttgtctgaaatgtttaatgaccataagaaagcttttaaaattgaaaaacttttatgttcagtacttatgttgttaccctgcctggcttattattgcaacaagtttgatcacccaagagttcataagattttaaacaggaggacttggccctcaagcaggatgacagggcctttgcctctctttaacatcctgcatrggaaatcttttaaacaaagagtagatcccagttgcttgttttgtacttaaacctcacactaatcccattgccatcaatagaaagtttgtatgtggattgagtatgggctgcccattcacagagccactgagaaaaggaaatgcccttttatttcattgttaagtccagtttccttaattttatttatttcagtctaattagtactacaaagaatttttcctaactttattgggaatacttctaaagtttcaccattaaaagcaatgtgtactcttaagtttttttgttcttggttacaatagttttaaatcataaatgggtaattttattaaatgctaga

SEQ ID NO: 107946 - DNA, 595 bp, Homo sapiens
atctcacccaagttaaaatggcttttacccaaaggacaggcaataaaaaatgctggcaaggatgtggagaaacgggaaccctcatagactgttgtaagaatctaaattagtacaagaaatatggagcattccagtgctcagcatatactcgaaagaaagaaaatcattatatcaaagagatatctccatccctatgcagatatctattgcagcactattcacaatagccaakgtttggaagcaacctatgtctccatcaacagacaaatggaaagaaagtgtgttacatatacatgatgtagtactactcagccatagaaatgaatgagatactttcattttcaacaacatgaatggaactgaaggacattatgtaaagtgaaataagtcaaacacagaaagacaaaattatcctgttctcacttacttgtgggagctaaaaattgaaacaattgaactcatggatatagagagaataaggatggttaccagcagctgggaagggtattgaggaaaagaaagtgtaaatagctaatgggaataaaaatacagtcagatagaataaataagaacttgtatctgatagcacaacggg

SEQ ID NO: 107947 - DNA, 595 bp, Homo sapiens
atctcacccaagttaaaatggcttttacccaaaggacaggcaataaaaaatgctggcaaggatgtggagaaacgggaaccctcatagactgttgtaagaatctaaattagtacaagaaatatggagcattccagtgctcagcatatactcgaaagaaagaaaatcattatatcaaagagatatctccatccctatgcagatatctattgcagcactattcacaatagccaatgtttggaagcaacctatgtctccatcaacagacaaatggaaagaaagtgtgttacatatacatgatgtagtactactcagccatagaaatgaatgagatactttcattttcaacaacatgaatggaactgaaggacattatgtaaagtgaaataagtcaaacacagaaagacaaaattatcctgttctcacttacttgtgggagctaaaaattgaaacaattgaactcatggatatagagagaakaaggatggttaccagcagctgggaagggtattgaggaaaagaaagtgtaaatagctaatgggaataaaaatacagtcagatagaataaataagaacttgtatctgatagcacaacggg

SEQ ID NO: 107948 - DNA, 556 bp, Homo sapiens
acatacaaatcatttcttttatttttaaggtgaaataacttgttcattttcttctactttaatttatttaggattttaacattttgtttttattttggtggaatgaaggacaataaaattgttttaactatagcctaaaatactactacatatatttttgctttagttgaaaattgtgaaacatgccctattttaaacacagggaatctcagattattagttgatccatttggcaagtaaatatctaacaactgtatgaaaaactagactagcataggattaattgtgctttatgtttttctccctctttcgctaggataaaagaataatatttaaaaatwatggtagttaccaattattatacaactgctaaatgattagaatgcattacataatttattcatatttaaattttacaacatccttgcaatgcatgaatatttatgcctatttagtagataaaggaactgaaactccacgcatgtcttagtcagcttggaccgctataatgaattaccatagacttaatggcttaaatagcaaattatttctcata

SEQ ID NO: 107949 - DNA, 521 bp, Homo sapiens
aatggaatcatccaatggacgagaagtgaatcatcattgaatggaatcgaatagaatcatcaagtgaaatccaatggaatcatcatcgaatagaatcgaattgaatcaacatcaaatggaatcgaatggmatcatccaatataatagaattgaatcaccatcgaagagaatcgaatagaatcatcgaatgaactcaaatggaatcatcatcgaatggaatcaaattgtcaatgaacggaattgaatggaatcatagaacggaatccaatgtaatcatcattgaattgaacccaatggaatcattaaatggactcgaatggaatcatcgaatggactcgaatggaatcatcatcgaatggaatagaatggaatcattgaatggaatcgaatggaatcatcatcgaatgaaatcaaatggaatgatcatatggactggaatggaatcatcatcgaatggaattgaatggaatcatcgaatggaatcgaatggaatcatcctcgaatggaatctaatgaaatca

SEQ ID NO: 107950 - DNA, 521 bp, Homo sapiens
aatggaatcatccaatggacgagaagtgaatcatcattgaatggaatcgaatagaatcatcaagtgaaatccaatggaatcatcatcgaatagaatcgaattgaatcaacatcaaatggaatcgaatggaatcatccaatataatagaattgaatcaccatcgaagagaatcgaatagaatcatcgaatgaactcaaatggaatcatcatcgaatggaatcaaattgtcaatgaacggaattgaatggaatcatagaacggaatccaatgtaatcatcatygaattgaacccaatggaatcattaaatggactcgaatggaatcatcgaatggactcgaatggaatcatcatcgaatggaatagaatggaatcattgaatggaatcgaatggaatcatcatcgaatgaaatcaaatggaatgatcatatggactggaatggaatcatcatcgaatggaattgaatggaatcatcgaatggaatcgaatggaatcatcctcgaatggaatctaatgaaatca

SEQ ID NO: 107951 - DNA, 521 bp, Homo sapiens
aatggaatcatccaatggacgagaagtgaatcatcattgaatggaatcgaatagaatcatcaagtgaaatccaatggaatcatcatcgaatagaatcgaattgaatcaacatcaaatggaatcgaatggaatcatccaatataatagaattgaatcaccatcgaagagaatcgaatagaatcatcgaatgaactcaaatggaatcatcatcgaatggaatcaaattgtcaatgaacggaattgaatggaatcatagaacggaatccaatgtaatcatcattgaattgaacccaatggaatcattaaatggactcgaatggaatcatcgaatggactcgaatggaatcatcatcgaatggaatagaatggaatcattgaatggaatcgaatggaatcatcatcgaatgaaatcaaatggaatgatcatatggactsgaatggaatcatcatcgaatggaattgaatggaatcatcgaatggaatcgaatggaatcatcctcgaatggaatctaatgaaatca

SEQ ID NO: 107952 - DNA, 477 bp, Homo sapiens
tgaattttccatgtatttgctataagtacatgttattattgatagtgtaacaagaaagaggagaaagtaacaataaaattaattataaggctatgtagtccaagtccatgctggaaaaaaaatgtaatggcttaacagttttgtacaattctttgcaaagctaagttaattttacatttgtcwcttaggtggagctattcattgttccactttgagacctagtagcaatttcacatcacttgctaaatcatctcttctatttaaaaagtggctagaactcttataccttatgcttaaatgaggccattcatcattgaaatagtcaattcatgttattttgctatccagtgaccagtagagttcatttatattttgcttaattttagctcagcataataggtgacaaactgtgcattacagaagtgcacctatttatcagcatctgcactcaacacctgtgaaatctatagctgctgc

SEQ ID NO: 107953 - DNA, 587 bp, Homo sapiens
acacagagcctgaccaaagtaagtacacagaaaataacagttgtttacattagcacattatctatctaatggcatttacactccaagtcttagtttacaaggctatttgcagtgtggcctacttcacgttattcatctgtatatactacggtatttcaccatagctttttcatgcagtataatttctcccacagtgttcttgccatccctacctcatgtgtattttawcagttagtcttaccaagtagcaaagcattctaaaaatgtggcttagaacaatagccattaattattataattcaagagtctgtagattgcctgagaattggctggtctacggattcactcatgtatctgtggtcaactgggagttgttctgttctatatttgtcacatggtcacccagtgaccagtgagctagcctagacgtgttcttatgataatagcaaaggcaagaacataagcagaaacatacgtggattcctgaggcttgagctctaagtggaaaatgcataattggaccctaagtaaagaaaggtgttgaaatatatattccattgctttagtgaaggcaacaatagtgttac

SEQ ID NO: 107954 - DNA, 587 bp, Homo sapiens
acacagagcctgaccaaagtaagtacacagaaaataacagttgtttacattagcacattatctatctaatggcatttacactccaagtcttagtttacaaggctatttgcagtgtggcctacttcacgttattcatctgtatatactacggtatttcaccatagctttttcatgcagtataatttctcccacagtgttcttgccatccctacctcatgtgtattttatcagttagtcttaccaagtarcaaagcattctaaaaatgtggcttagaacaatagccattaattattataattcaagagtctgtagattgcctgagaattggctggtctacggattcactcatgtatctgtggtcaactgggagttgttctgttctatatttgtcacatggtcacccagtgaccagtgagctagcctagacgtgttcttatgataatagcaaaggcaagaacataagcagaaacatacgtggattcctgaggcttgagctctaagtggaaaatgcataattggaccctaagtaaagaaaggtgttgaaatatatattccattgctttagtgaaggcaacaatagtgttac

SEQ ID NO: 107955 - DNA, 622 bp, Homo sapiens
ttgctttggacctaattacatctgcaaaatcccttctgtcatagagcatgaaataattatcatggcattcatctttataggtttcatgcacagtcaagaggaggagattatatgagtgtgcctcattgaaggccacgttgaaattctgcctactaygatcatttcatgtatagttcacatttacaggacaaattttatatatgaacaactatctgtaaacaagctacaggatttcagaatgaaaatgaaaagacacatttttgttatttcaggaactctatcaatacacattgtgggtttagctgttaattacaaaaactgcatacttatgaagattccaattatattttacttgtttctaattaatctcttgccacctatcacttggaatattttattactaattgttatgttgttttgcggtttgttttttagaagacataaattatttcaagtgtttcttttcagggagtttaactaatactcaattagtatagatatcttaatatgcaacccaaatttaaatctaatagttacctggatttgtgttatttttatgtcagctgaaggggtttaaattcttgtggcttacagttttctctttgtgggctgcattactgtg

SEQ ID NO: 107956 - DNA, 622 bp, Homo sapiens
ttgctttggacctaattacatctgcaaaatcccttctgtcatagagcatgaaataattatcatggcattcatctttataggtttcatgcacagtcaagaggaggagattatatgagtgtgcctcattgaaggccacgttgaaattctgcctactacgatcatttcatgtatagttcacatttacaggacaaattttatatatgaacarctatctgtaaacaagctacaggatttcagaatgaaaatgaaaagacacatttttgttatttcaggaactctatcaatacacattgtgggtttagctgttaattacaaaaactgcatacttatgaagattccaattatattttacttgtttctaattaatctcttgccacctatcacttggaatattttattactaattgttatgttgttttgcggtttgttttttagaagacataaattatttcaagtgtttcttttcagggagtttaactaatactcaattagtatagatatcttaatatgcaacccaaatttaaatctaatagttacctggatttgtgttatttttatgtcagctgaaggggtttaaattcttgtggcttacagttttctctttgtgggctgcattactgtg

SEQ ID NO: 107957 - DNA, 524 bp, Homo sapiens
tatatgaaacacaatagtaaattaactcaaagcactgataaaaattgcctaacatgaatgtctgtgtttcttgtcatgcaatgataacctcaaaacacttcttttagtttatatggataacggcagctgaaggctgtgttccagtattctacgtttaagaaacatttttatcagtttgagaaatgatttttttgaaagtaaaatttattttgttactgaaatcaggtaaagttttcaggtattttattcataattttctacttctgtatattcacttttttttttttttttttttttttttaacgggtttcttctaaaagctccacatagggatgtcaaaaactgggcttgcaaaaatgaaagtatcctcattatgctaattwaagttccactgataggcatgttctgttttataaattacatcctcttgtcaaaagtcaaaatgtttttgaataacttcatggaaattgtcaccaggatttaaaattgggggccttacatgccattgttaatttaatccatgg

SEQ ID NO: 107958 - DNA, 580 bp, Homo sapiens
tttaaattttcttcttaatttcttcattgacccactggttgttcaggagtatayactttaattttcatatttttgtgtagattccaaaattcctcttgttattaatttctagttttattccattgtggtcagagaagatgcttgatattatttcaaattttttgaatgttttaagatttgtcatatgagctaatatatgctctatccttgagaataatccattttctggggagaaaaatatgcattttccagccactggatgatgtattctgtaaatattaattatgtccgtttggtctatactgcagattaagtccaatgtttcttcgtttattttctgtctgggagattgtccagtgctgagagtggggcattgaagtctccaactattattgtattggagtgtatctctctttagctctaataatatttgctttttatatttgggtgctcctgtattgggtgtatatatattcacaattgctgaattgacccctttatcattatataatggccatttttgtttcttcttaaggtttttgtcttgaaatctattttgtctgatgtaaatatagatacc

SEQ ID NO: 107959 - DNA, 578 bp, Homo sapiens
caggtgacattaataatcacagacttatgttgtctaattttgggccagaaactatttaatgtgctttacattgataaatgtatttaatcttcgcaaccaaattattaattctatgctaacattatcattcacatgtttcaagtaagtggtgaaaggacatgatgcagtctcacggcttgtaagaatagaactgggattcaattcaggcaggctggctcttstgtctccaggcctaagcaatattctttgctgccactcaaagatcagaatgactggggctagacaggggaatcaaaatagtttcttagagaaggtaagttttaactacacagaagttaggtttcaaacaaaaatgaattattaatgttgctgaaaacaaattttatagttttatgtggtttcaacttttcttcccttcaaaaaatcctttgtatatatcagccgtgtgtgggtgcatgagtgtgtctgtgtgtgtgtgtgtgtgtgtgtgtgtgtaaaggattggtgcatgagggaaaggaggaaaaagattttacaggcaaatgagttgttttgattaataatgaaatggatttatt

SEQ ID NO: 107960 - DNA, 641 bp, Homo sapiens
tgccatattttcagtaagtgtttcccccaaaaaggaggaaatcggtcaaagtccagctgttttaatgccttcttccccaataagcaacttttaatgatttttttctttaaacttacttcttttcatcttattatgattatgtcaaaaggccgaaagttatagatatattttttacaaaaggaagttttactttgaataaaagtatttcgaggaacccatctgttagatgtagaggagatgagaggcaaggactgagggaaagcgggcttttccagatttctgaatgaggtctttagcaaatggccatgaactcaacctctggggttctggacgtctggactgctcatttaccttatacctacacaccatctgagggacattgatcaaattgacactggacaaaaacagttggagtttggtttttgttgtggttgttgttttctccacaagcaagggaaaccaaacccggccactgatacattccttgtatctatatatttcttayatacacaatatatattcaaccttgcattatatcaatcacttctaattgcttgcataaacacttagaagaacatagtaatactccattttataatgaagtgagactcaagagattaaacagtttttccacagtcaaa

SEQ ID NO: 107961 - DNA, 630 bp, Homo sapiens
tcgctctgtctcccaggctggatataatatataattttaaatctataattatatatttatatacatttaaaagtttatatataacaaagtatattcctacttatttatgtgtgtatctgtatttctggagtccttattctgttccattggtctgtgtgtctgttctttcactaatcctgcagtttcgtaattaytgtagctttatagtaagtctgaactcagttattgtcaatattctgactttgttcttctccttcgattttcttatttttaaactattatttatactttatcttgtattagacttttttctaatgcaaaacaatctttaaaaagtagtgttaatatatgtgatactgtgtgaagatttagaaaccctgtctggtataatcaaattgaattgggaagtcattatagggaaaagccaggatataatcattttaaatatttgccaaattcccggcatagcatcgtaaacattttagagatgctcagttgaaatttctgacaatgtgatacgatctttgtagacatacaagcttttatcttcttgccttctgcttctcttttcatttctctcctttccttttgctcttccccacctccccgcccccccccccgcttttattt

SEQ ID NO: 107962 - DNA, 535 bp, Homo sapiens
tattgcctttttttttttttttgtcatggctgtatttttttctttcattacaatacattgaaatgtaaatgtctgtatttggaaaactgggtatcattttaattattcttggtctgaaaagagcacaaagcacaaagagaaaagtactctggggaaaaattagaattaataagggcaaggtgtgtttacaataccctttctggcagttctcacgaaagctgatgattctctcactcatgtcttcaatagaagtattttctttttttcaaccagtgagtcggggagggagaaaatacccatagaaaaataaayttggtaaagtgataaatcctttgtaatattttaggagaaaaatagaaaaataaaagaaaaactgtaaatagttcttacctatcttttgctgaactgtgaaaaaaaaatcaatgctgtaagatctcaacatcaagtgtgaatgcttgaggtggttgttagggttttcagtttggaagtagaagtggtcagtaaagattcgtagatttctcttcttcatttaaat

SEQ ID NO: 107963 - DNA, 570 bp, Homo sapiens
taaaatccagcatctataaggaacttaaacaaatttacaagaagaaaccgaccccataaaaaggtgggcaaaggacatgaataaatacttctcaaaagaagacatacatgtggccaacaagcaaataaaaaatgttaacatcaccaattattagagaaatgcaaatcaaaaccacaatgagatacccatctcaaatcagttagaatggctattatkaaacattcaaaaaataatagatgctgctgaggctgtggagaaaaggaatactaatgcactgctggtaggagggtaaacttgttcatccactattaaaagcagtttttagatttctcaaagaacttaaaacagaactaccattcaattcagtaatcccatatacaatttgatacttacccaaagaaaataaataactctagcacaaagacacatgtatgtgtatgttcattgcagcactgttcacaatagcaaagacatggaatcaacctaaatgcccaacaatggtgtattgggagaacctgcccccaatacttcaaagtaggttctttctattttctgtaagtgtcagctgga

SEQ ID NO: 107964 - DNA, 625 bp, Homo sapiens
catactaaagattcagtgaaaattagaaaaaaaaagcatattcatcagaatcacaaaatataagtgaggaaataatttatgttaaagcatacagcatttgacasagtcaatgtcttttcttgccattaacttcagctaaacagcaatcgctttaggtaaattctacagatttataaattctttttgcatatactttattttaatgttttgcatatttaacaactaaagaaagaatcacctacaaatccttaactttaatagtgcctcacaatccattttgatttattttgactttgaggcatatataagtagtactcacatatttgtaatcatgtatatatttaacatatattccatttttaaatttatatttctacttagtattatcaataaggtatttcccactttccagaggaatacttataactgaaatactgatggaatctatgtcaaacttcttagcatgatatacatggagcttcataatctatcttcaattacttttctaaatgtatctccctattacatatccttccttgcaacttttgtagttttcaagagtcatattaacatgagattgagattttctgctcaatatcactagttatactattaataaaaacac

SEQ ID NO: 107965 - DNA, 625 bp, Homo sapiens
catactaaagattcagtgaaaattagaaaaaaaaagcatattcatcagaatcacaaaatataagtgaggaaataatttatgttaaagcatacagcatttgacacagtcaatgtcttttcttgccattaacttcagctaaacagcaatcgctttaggtaaattctacagatttataaattctttttgcatatactttattttaatgttttgcatatttaacaactaaagaaagaatcacctacaaatccttaactttaatagtgcctcacaatccattttgatttattttgactttgaggcatayataagtagtactcacatatttgtaatcatgtatatatttaacatatattccatttttaaatttatatttctacttagtattatcaataaggtatttcccactttccagaggaatacttataactgaaatactgatggaatctatgtcaaacttcttagcatgatatacatggagcttcataatctatcttcaattacttttctaaatgtatctccctattacatatccttccttgcaacttttgtagttttcaagagtcatattaacatgagattgagattttctgctcaatatcactagttatactattaataaaaacac

SEQ ID NO: 107966 - DNA, 625 bp, Homo sapiens
catactaaagattcagtgaaaattagaaaaaaaaagcatattcatcagaatcacaaaatataagtgaggaaataatttatgttaaagcatacagcatttgacacagtcaatgtcttttcttgccattaacttcagctaaacagcaatcgctttaggtaaattctacagatttataaattctttttgcatatactttattttaatgttttgcatatttaacaactaaagaaagaatcacctacaaatccttaactttaatagtgcctcacaatccattttgatttattttgactttgaggcatatataagtagtactcacatatttgtaatcatgtatatatttaacatatattccatttttaaatttatatttctacttagtattatcaataaggtatttcccactttccagaggaatacttataactgaaatactgatggaatctatgtcaaacttcttagcatgatatacayggagcttcataatctatcttcaattacttttctaaatgtatctccctattacatatccttccttgcaacttttgtagttttcaagagtcatattaacatgagattgagattttctgctcaatatcactagttatactattaataaaaacac

SEQ ID NO: 107967 - DNA, 637 bp, Homo sapiens
atcttacctgtctatcctcatttcctaccgccaacttctcctacaaaagaaacatcccactatttcccaaatacagcatgtccttttggggctcatctactatatccatgttattttctctaagttgcaatgtctttcctgcccttgtctgcctcctaaaaacatagctttctcaaaatgaaaatttatcwcttctcagaagactctctaaattagcctagctatgttattcaccttttagattcagataccattttattgtaataagacattttttacaagcttggcttctatactagacaggacaaagacctgtgtaaaattttgtctcccccaactttcagcctaagctgagcgcaatgttggctttgactaaggttagttcaatggctataggataaaataggatctcatattcttcagaaagccttccatgattattccatgattattacttcaattcatctattaattcttccccaatacattgtttgagctctttcgcatttattttatttagacatgcactaaagatagttggctgctttctaagtggattttaagtatcttgtcgcctagcaatgtgaatgcaataggtgctttctaaatgcttgcctaattgcactaatgaacgttg

SEQ ID NO: 107968 - DNA, 553 bp, Homo sapiens
gctatgttattcaccttttagattcagataccattttattgtaataagacattttttacaagcttggcttctatactagacaggacaaagacctgtgtaaaattttgtctcccccaactttcagcctaagctgagcgcaatgttggctttgactaaggttagttcaatggctataggataaaataggatctcatattcttcagaaagccttccatgattattccatgattattacttcaattcatctattaattcttccccaatacattgtttgagctctttygcatttattttatttagacatgcactaaagatagttggctgctttctaagtggattttaagtatcttgtcgcctagcaatgtgaatgcaataggtgctttctaaatgcttgcctaattgcactaatgaacgttgaataacatcgaaaacaaacaaacaagttctgaaaacttcagcagtggtttcttagagcctaggagaaagaaactatcatttttacattctagacactccccttatttactataatattaaatcatgcttgacttat

SEQ ID NO: 107969 - DNA, 600 bp, Homo sapiens
attaacggcaatcaagcaagacctctgtcttcatatcctggtggggagtggccagaccctaggttggacaactgtaagggaaggttgcttgctggctaagtggcatctcactgtccattctgaagttttctataactatggacaaaattatataccatgggctgtctgtgaataaatatggagtagttttgtttctctttgcttcattctcctgaaatgaatatttttcactatggaagaatggaagcaagatatatatatttcacttcattcctctttcggcctaaacaatttatgatagamattgacgctaaaataaacacattcctgctacaaaatatatgttctttatcaatgtgctagctgatagtacagccattgtggaaaacatcgtggagttttctcagaaaactaaaaatagaactaccatataatccagcaaatccactactgggtatttattcaaagaaaaagaagtcagcatatcaaagggatacctgcacttgcatgtttattgcagcactattcacaataataaagatatcgaatcaacataagagtccaccaacagatagatggataaggaaaatgtggtacata

SEQ ID NO: 107970 - DNA, 430 bp, Homo sapiens
acgtgtgcttgtagaaatggatagtttacaaagatgctgcttttggtggctaagagcagcccaccagctcaatgtgtgctaatgtgacattaaacctcacctctcattcccataaagagatcggctatctcagcaactaacttgaaacagccatcacaaattccactcaaaaatcactccaaggacttgtttcagccacctgccaacaggttttaatcaastttagatttttttttaaccaccttttaactcgaggtgctttatagttactgcttcgttgcttttcattttgttcttaaagatctcggtagctagtgactctggctttgtttttgttaaccatgcaaataaaatattgactaatcacctttggataaagtttagaaagaataggataagccattggatattttccccttttgtttaaggt

SEQ ID NO: 107971 - DNA, 571 bp, Homo sapiens
ttttttttttttttgcttccctaggtgtctctgtactattactacacaataggtagcaatcactaataaaaatgactgttaagttcctatgcaatataaactactgtataaaggctaagcaataaacgatttactacttactctgagcaaatggaaacctcattttgccaatataaacaagacctcctcttatcctatactttatagcgrtattattgtgaaaatcacaagtcccaatagattgtcacaacaggaacaagcattatctgatttgttcctctttatggtattaacaatgttctaatgttgtgaagcaccttaaccgagcaacatctgatgttttaaaaaacatttggatgttagccacatttgtaagacagcacagcctagagtgatagaactgttgagtgaggcagaaggaaagtgaaaactgttgcagcagaagagtgacccagaccgtggaatctgacttaagggaagttggcagaaggtaggtttggcagggtagcgaaaaccatgtttcatcttggaaatctgtgagctactgcacacaagacaagctgctaagtta

SEQ ID NO: 107972 - DNA, 607 bp, Homo sapiens
ttaatagagtagactaatcttttggaagactagaaatcaatttgattttgtttagtaactttacatcttttgcacatggaagggatcccaaacacctttgaattctctgatcttattaagatggtcaaatagcagagaattttatgtagcatattttaaatgtgttactattattctaatatgggaataggaagtctggatgttcatgatgyagtcagatggagtatttaagtaaagttagtttttgaaggaaaatacacttctattagatggagaaaaacatagatgaacactagactaaggcaaagagttgtgttttaagaaacaggaagtgtctgcagatttaaaatagaatagatgatctggcttctggttttactttttcactctgaaaatagaaaacatgttaaccagttacccattttcaggggtaataaaatttgaatcccaaattagctctgtataactttactaaactgtcttgaattagttcttttcccaatggttcgagaatacaaggtctaataaagacctaactctgagtaccaaaaagcactcattgtagaaagtatctatcaatatgatcaggttctttgtttactaaaat

SEQ ID NO: 107973 - DNA, 596 bp, Homo sapiens
ttgtatctgtctctgcctcccctgaagtagttttctgggaaagagaaagactgtaataaaaccagatatacacatgtcttaattagaatgaaagatggatgtttattatttccaaatacttagtactttacatgcataagaactccggtctctgcaaaatctgaattaaaagaaatgatgcaactaaaaaaattaatttcttatgtttcagaagactagtaccaacacccatatctccttatattaaatgcattggcastaagtcctaagaaagagtgtgaggggctgaagggactgggaactggtaaggtggctctctgcagactagctggcctggcacactcaatgctatctcttttcacagacttctcagatttgcagtagctccctccccaccttctactgtacctcagagagggttctcagcatctttgcctcccctgcacatctcctctttactttggctcatttgcatgtgcatgtgaagaatgttagattttataattccaggaaaggacaataaaagcagatgcagtctggctctggctgatctataaatggacccaaattaaatctgggtagccaaatgtggtggc

SEQ ID NO: 107974 - DNA, 596 bp, Homo sapiens
ttgtatctgtctctgcctcccctgaagtagttttctgggaaagagaaagactgtaataaaaccagatatacacatgtcttaattagaatgaaagatggatgtttattatttccaaatacttagtactttacatgcataagaactccggtctctgcaaaatctgaattaaaagaaatgatgcaactaaaaaaattaatttcttatgtttcagaagactagtaccaacacccatatctccttatattaaatgcattggcactaagtcctaagaaagagtgtgaggggctgaagggactgggaactggtaaggtggctctctgcagactagctggcctggcacactcaatgctrtctcttttcacagacttctcagatttgcagtagctccctccccaccttctactgtacctcagagagggttctcagcatctttgcctcccctgcacatctcctctttactttggctcatttgcatgtgcatgtgaagaatgttagattttataattccaggaaaggacaataaaagcagatgcagtctggctctggctgatctataaatggacccaaattaaatctgggtagccaaatgtggtggc

SEQ ID NO: 107975 - DNA, 596 bp, Homo sapiens
ttgtatctgtctctgcctcccctgaagtagttttctgggaaagagaaagactgtaataaaaccagatatacacatgtcttaattagaatgaaagatggatgtttattatttccaaatacttagtactttacatgcataagaactccggtctctgcaaaatctgaattaaaagaaatgatgcaactaaaaaaattaatttcttatgtttcagaagactagtaccaacacccatatctccttatattaaatgcattggcactaagtcctaagaaagagtgtgaggggctgaagggactgggaactggtaaggtggctctctgcagactagctggcctggcacactcaatgctatctcttttcacagacttctcagatttgcagtagctccctccccaccttctactgtmcctcagagagggttctcagcatctttgcctcccctgcacatctcctctttactttggctcatttgcatgtgcatgtgaagaatgttagattttataattccaggaaaggacaataaaagcagatgcagtctggctctggctgatctataaatggacccaaattaaatctgggtagccaaatgtggtggc

SEQ ID NO: 107976 - DNA, 524 bp, Homo sapiens
agggagaagccaggccctttcacattctttgaagacaaatcccattgccactgttatgggctgcttgtgggggctgggggcayggcaaagtgaggagtaagcaaactgcactccccacagctacctgcctatgctgttccagttaagacggactctgcactctgtagtggcaggcccacagcacagccatctcttcccacagttgagcattccggcagcatgggtgatagctgacattgactatcacagctggcaactgaatgcactatgagggaatctaaggacaagtctgctgccccagtccccttcctccaatatttgatgacccgatccgggatcctgggaatcacccagtccagtccaccaatggatgtccatcaatggatgattggataaagaaaatgtggcatatatacagaatgaaatactatttgacaataaaaacaaacaaaattatgacattttcagcaatatggatggaactgatggtatttaccttatataaaataagctaagcctaaaaa

SEQ ID NO: 107977 - DNA, 524 bp, Homo sapiens
agggagaagccaggccctttcacattctttgaagacaaatcccattgccactgttatgggctgcttgtgggggctgggggcatggcaaagtgaggagtaagcaaactgcactccccacagctacctgcctatgctgttccagttaagacggactctgcactctgtagtggcaggcccacagcacagccatctcttcccacagttgagcattcyggcagcatgggtgatagctgacattgactatcacagctggcaactgaatgcactatgagggaatctaaggacaagtctgctgccccagtccccttcctccaatatttgatgacccgatccgggatcctgggaatcacccagtccagtccaccaatggatgtccatcaatggatgattggataaagaaaatgtggcatatatacagaatgaaatactatttgacaataaaaacaaacaaaattatgacattttcagcaatatggatggaactgatggtatttaccttatataaaataagctaagcctaaaaa

SEQ ID NO: 107978 - DNA, 524 bp, Homo sapiens
agggagaagccaggccctttcacattctttgaagacaaatcccattgccactgttatgggctgcttgtgggggctgggggcatggcaaagtgaggagtaagcaaactgcactccccacagctacctgcctatgctgttccagttaagacggactctgcactctgtagtggcaggcccacagcacagccatctcttcccacagttgagcattccggcagcatgggtgatagctgacattgactatcacagctggcamctgaatgcactatgagggaatctaaggacaagtctgctgccccagtccccttcctccaatatttgatgacccgatccgggatcctgggaatcacccagtccagtccaccaatggatgtccatcaatggatgattggataaagaaaatgtggcatatatacagaatgaaatactatttgacaataaaaacaaacaaaattatgacattttcagcaatatggatggaactgatggtatttaccttatataaaataagctaagcctaaaaa

SEQ ID NO: 107979 - DNA, 524 bp, Homo sapiens
agggagaagccaggccctttcacattctttgaagacaaatcccattgccactgttatgggctgcttgtgggggctgggggcatggcaaagtgaggagtaagcaaactgcactccccacagctacctgcctatgctgttccagttaagacggactctgcactctgtagtggcaggcccacagcacagccatctcttcccacagttgagcattccggcagcatgggtgatagctgacattgactatcacagctggcaactgaatgcactatgagggaatctaaggacaagtctgctgccccagtccccttcctccaatatttgaygacccgatccgggatcctgggaatcacccagtccagtccaccaatggatgtccatcaatggatgattggataaagaaaatgtggcatatatacagaatgaaatactatttgacaataaaaacaaacaaaattatgacattttcagcaatatggatggaactgatggtatttaccttatataaaataagctaagcctaaaaa

SEQ ID NO: 107980 - DNA, 627 bp, Homo sapiens
aggcccccaatctcttctggcttgtagggtttctgctgagaggtccaacattaacctgatggggtttcctttgttgggaacttgacctttctctctagctggctttaacattctttcttccatttcagctttggaaaatctgagtattatgtatcttgagggtggccttcttgtgtagaatcttgcaggggtttcctgaatttgactattggcctctctactgatgctggagaagttttcatggatgatatcctgagatatgttttccaagttgtttactttctccctgtccctttcagggatggcaatgattcaaagatttggcttcttcatataattgcatacttcttggaagttttgttcattccttttaaatcttctttgctgtttttctgactatttcagaaagccagtcttcaakttctgagaatttttcctaagtttaatctactctcctgttcatacttgcaattgctttgtaaaatccttgtagtttgtttttcagctctattagatcaattaggttattttgtatactggccattttgtctgttagctcccatataattttattgtgattcttggtttccttagattgggttttcccattctcctaaatcttgataa

SEQ ID NO: 107981 - DNA, 451 bp, Homo sapiens
agctgtccttaatccttgggggaacaagatggctgaggatagctaaacaaaaagaagcagacagacaaacgtaacctcaattaattactgctgataataatgggcagagtgtccctttatgtttgtataacatttggtccagaaacacactgaacaacttgtcaaagatcatatagaaaaatcaggtcagaaacagaattagaaccagaccaggtgtccttattcctgactcatctttgctctgctgtgctggcacacctccctggataacttgtctgcttctttatgagaatagtctcatttcatctttcaaatagcagtggtgttacccattattacttctgggcagtggcaggacaatatawgcaggcaacttggctctggctgttgctgggcatggcaatgttttgcacggttaggaggagccatagcagtgatcgggtgcagctcc

SEQ ID NO: 107982 - DNA, 512 bp, Homo sapiens
attttctttttgatggatatttgtctccagtttgcagcaattatgaatactgctgctataaacatttttgtgtatcttcagttttaytcagtaatgccagattattttccaaagtggttgcactagtttaaattcctaccaacaatatgtgagcattcctgtttatccacctctttgccaaggcttagaattgtcaatcagttaaattttattaaccattgtggtaggtacataatgggtttttgggtgtaattgaggtaggtgtcatacacaataaaatgtaaaaatgtatagcctgaaaaatattttacatataaatatctaatcactacccagatgaagatatagaatatttccatcactccagaaagttctctcatgttcctttccagaaagaagctgctattctaaccacactgttttgacttcggccactatacatgcattttgcctgtttttgaacttcatataattgggctcagacagtatggactctcctgtgtctggcttct

SEQ ID NO: 107983 - DNA, 512 bp, Homo sapiens
attttctttttgatggatatttgtctccagtttgcagcaattatgaatactgctgctataaacatttttgtgtatcttcagttttattcagtaatgccagattattttccaaagtggttgcactagtttaaattcctaccaacaatatgtgagcattcctgtttatccacctctttgccaaggcttagaattgtcaatcagttaaattttattaaccattstggtaggtacataatgggtttttgggtgtaattgaggtaggtgtcatacacaataaaatgtaaaaatgtatagcctgaaaaatattttacatataaatatctaatcactacccagatgaagatatagaatatttccatcactccagaaagttctctcatgttcctttccagaaagaagctgctattctaaccacactgttttgacttcggccactatacatgcattttgcctgtttttgaacttcatataattgggctcagacagtatggactctcctgtgtctggcttct

SEQ ID NO: 107984 - DNA, 512 bp, Homo sapiens
attttctttttgatggatatttgtctccagtttgcagcaattatgaatactgctgctataaacatttttgtgtatcttcagttttattcagtaatgccagattattttccaaagtggttgcactagtttaaattcctaccaacaatatgtgagcattcctgtttatccacctctttgccaaggcttagaattgtcaatcagttaaattttattaaccattgtggtaggtacataatgggtttttgggtgtaattgaggtaggtrtcatacacaataaaatgtaaaaatgtatagcctgaaaaatattttacatataaatatctaatcactacccagatgaagatatagaatatttccatcactccagaaagttctctcatgttcctttccagaaagaagctgctattctaaccacactgttttgacttcggccactatacatgcattttgcctgtttttgaacttcatataattgggctcagacagtatggactctcctgtgtctggcttct

SEQ ID NO: 107985 - DNA, 441 bp, Homo sapiens
ggcacacagtgattattattattctttttttagtagagatggggcctctcactatgttgccagggctggccttgaacttctgcacgcaagggaatttcctggcttggcctcccaaagtattgktattacagggataagccattgtgcccaccatctctggttcttaactttctgcctccctcttccacatttaaagaacacttgtaattacatgggctcttctagatactccaggataatattattttaaggtcagctgattagcaacattaatttcatctgcactcttaattcccccttcctatgtatttgtgcagtgtaacataggacatgagcaattggtggggtcgggggggtcattactttggccaccacagtaacttttttgtgccaggtactcagctaagccctggtgaattaagcatgaataatacatactcg

SEQ ID NO: 107986 - DNA, 440 bp, Homo sapiens
aaacatgtgccatacttgaaactctccacccatccccttttcttaaacaagatcacatttttatgaaacttagaaaagtccagctcttcttgaacrttcagaatccaccgttctatgcatttgtgctcacagaacaacacacgctgctgaatatacctcactgcgctttcaagggcagccctgtctaatatgctatttccttcctcagcttttcctccagccaggcggcccttcacatgtaaactcagtcggcccaactaaagaacgttattctcttcggggcctagaggaggctgtgagattcagactcttctgggtcactctgggcagtagaacctcagtcctgcacattcggtggagagactcatcccacggaagaccgtcatagcattcgctgtctgaagccacgaggcaacatggcacagaacatcccggaattc

SEQ ID NO: 107987 - DNA, 566 bp, Homo sapiens
tatcatccttgacccagtccattctcatggaagggaacttccaaggggggaaggggaggagaggatagaagggcgattcacttagtaagtgagcaacaaaatggccttagtgttagccaaactcacacagcatcttcgagactttcagtcatttcttcaggttctatcattgtatcccagcccataggaagatcacactgtgggagatttaagatttgcactgctagccggtccaccagccctgccaccccggcagacactacctgccactgtcctaatccctgagagctgtacccacctcaggcagtagcacctttcagagcttcgtcctgttctttgtttyctggccttgcagctgtgaggacctttcaaccactttgccttctcctcaggaacttgccttgtccttcttgtggcctttgggttagtcaccacccattttcagccatgcttatttggagtgcagaatggggaacaagagacagttcagattctgctggtgggggttgtgggagggatggaaagagcagaggtacacaactatgcaccatgaaacaaccagaccc

SEQ ID NO: 107988 - DNA, 490 bp, Homo sapiens
gaattctcctcaatgttcctgggtttactccaggctcccattcaagatctctgagcctgaactcagcaactgagcccaaatcattccctttcctttccyatctcctatgcttgcctttcaaaactcctttcagaggactcctttgtttgaaacaccattcaaaatttgcttattcttcctttgtaggcatctggttgtcatgccagatttttaacttttgctttttcagcaaagcacagatctttttgtctagcattcccattttagatgagcagttggatttaaaacctgcacattgagggaggttccaagatggccaaataggaacagctccagtctacagctcccagcgtgagtgacgcaaaagacaggtgatttctgcatttccaactgaggtaccaggttcatctcactggggcttgtcagacagtgggtgcaggacagtggatgcagcccaccgagcatgagccgaagcagggtgaggcatcac

SEQ ID NO: 107989 - DNA, 556 bp, Homo sapiens
ggagttactttttatgagtgagcaaagaaagtgttttttttttttcagatgaaatctactcctagtgaagatgctgtgaagattcttgaagtaacaaaagatttagaatattccataaacttagctgataaagtcctggcagaatttgagagtgttaattccaattttgaaagaagttctactgtgggtaaaatgctatcaaacagygtcatgtgacacaaggaaatatttcatcaaaggaagagtcaagagatatgacaaatttaattgtgatcttattttgccatagccaccccaacttgcagcaactaccatcctcatcagtcagcagccatcagcattgaggaaagatccttcaccagcaaaaacataacacttcccagaaatatcctacaatattttaacattttgtggaaggctcagttgattgttagtgtttttagcaataaagtacgtttaaattaaggtatttcagatataatgctattgcacacacaatagactacagtacggtgtaaagataactttaatacttactgaaaaaccaaagaatttg

SEQ ID NO: 107990 - DNA, 367 bp, Homo sapiens
tattttacatccagcttctttacagcatggcagcttatgtacaagagagaacactgcaagaagttaagctccaacgtgcaagtgtttgtcaagtttccgcatgataatatcccactggccaaagtaagaaggcaggctaaactttaagacaatataaaaggggattttaaaagggtgggcgaggcacatcttgttggaagccaaaatgtaataagtctattccactccaccctctgacttccaatgattcacacawcttccacgtgcaaactatactcactgccacccaacatctttgagtgtctcattccattgtaacatcagatatagtcttgaatctagaatgtcattatctacctcagttgca

SEQ ID NO: 107991 - DNA, 278 bp, Homo sapiens
tggcaatctggtgtcctttgcagtttcatatgaatgtgaraaccagctttttcatttctgaaggatcggcttttccattttgggagatacttgctattactagggtggggaacacggggccacatcctctaacacttcagattgtgtgttttgatttgagtgtcctattgccacctcttcaactctctccatcaacaattttgaacattcatacattccttcttctaaacctaggcttgtacatctaattttttttttcttttgagatggagtgtcac

SEQ ID NO: 107992 - DNA, 648 bp, Homo sapiens
ggcaatgtaagatgaaaaccctcttattgtagccactgagaacttacagctaaaactgttctagtgctatcaatacaagcaaaactcaggcacattcaactttagagtctcaaatgttttttggccaacaatgactaaaaaatatgaccccatctttccaagcttttgattccagacacagctgcacctatgttgttcctcaccaccaatgttccagaaaagtctcctccatttggctaagccagtctccatgcaccacatgttttctgaggccagggtgaccggcatatgctcattttgccataagcagcgtgcatctttgagctccacaaagtctaagaaatatacactcaggatcattgtccctatgtatttgctgaaatgaataacctctttatcttttcttagacgctagattttgtttaatataagcgaggtcttatattattatatatggccaaataaaccataaaatgcaccaatttgccaacttgaaaatgctacttagctgtcatttattgctgaaagccacctgcccagaatctaaccataaaaattaaaccacayaatcatgtaagtcagactcatgactacaaaatactgccaaaagtctacagtttaaaggtgaaagctgtgcattgttctcat

SEQ ID NO: 107993 - DNA, 576 bp, Homo sapiens
ttaactcacttaatcctcaaattaaccctgcactgatgatactagtcccatccttctatgtgcagctggagaaactgaggcacagagagagggactcagaactgggccaaagttacatggctaagtagcctgatcacaggcagcctgaccccagaggcacacctgaccactctgccgtcctgtccagggtggcagaggaacagaggagtgagctgcaagtcaccccagcagcatacaagcagaggggcctccactggggatgccgagtcctgggcagggaaatggacagaaagactcctcggtggccccacagccrggtggatgtctgggtctgggtggcaggggggttgcctgtggggctgccacagccctgggtgtctggcccctctggcagacacacagggtgatgttttatgtcttaattaaacggagaggagtttaattgatgagtggcctgccggacgatgcagcttcctggcttcccaccccgatgactcatgcatgcggcggccccagatgccgagcacagctaatagatttgcaacgctgatcactgctccagacccacttagtgag

SEQ ID NO: 107994 - DNA, 607 bp, Homo sapiens
atcaattctgaaaagaaaaaagaagcatgtatattttgcatcatagactcatttaaacttagataaagatttgactataagaaatccaatcatagaaaacctagtggaaacacagttgatgctttggcagatatatggaagtattaacacctgcctgtcttggaattgaagaaattaaagaagagatgggtttaataatgtaaacataaaaactttctggacattagaaactaaaatgattgkgaaacatttgcatcaaaagggcagagggtccatgtcatccacagctgtcttagtctatttgcattgctgtaaaggaatacctgaggctgggtaattgataaagaaaagaggtttgtttggcttatggttctgcacgctgtacaggaagcatggtgccagcatctgcttctggcgaggcctcgggctgcttccactcatggcagaaggcgaaagggagccggcatgtatagaaatcacatggcaagagaggaggaaaggagaagaggtggcagactctttttaacaagcaggtcttgtgtgaactaatagagcaagaactcactcattactggaggagggcaccaagccatccagaaaggatcca

SEQ ID NO: 107995 - DNA, 599 bp, Homo sapiens
cctctccaaattcctgacccacaaaattgtgagcaaactaaaacagctaattgaagtccctatgttttggagcactttgttatacagcagtggataactgcaacatgacccaacagccagcaagatcttttaaaaatggaaaccaaacaatgccactcctcaacttcaagctctccagtggcttcttattacaaaatctggacttttcaccatggcctgcagggctctggacagtctgggccctgtccccattgccactcccttcctccctgggctccatccacactgtcctcaaccctccagcacagtaagtgcctgctcacattccttcttcctgagacactccgcatctcttctcatctcctggtctctgctaagatgtcatctcctccactttacamccatctgggtgcctgttaacaagaaaacaggaaataacaagggttgatgaagatgtggagaagttgaaatcccgatacattttatatgatacatgtactataaaatgatacactttatagtaagatggcactgttctgctgcggaaaacagtatggtgttttctaaaaaaattaaacagaattactgtatgacctggc

SEQ ID NO: 107996 - DNA, 599 bp, Homo sapiens
cctctccaaattcctgacccacaaaattgtgagcaaactaaaacagctaattgaagtccctatgttttggagcactttgttatacagcagtggataactgcaacatgacccaacagccagcaagatcttttaaaaatggaaaccaaacaatgccactcctcaacttcaagctctccagtggcttcttattacaaaatctggacttttcaccatggcctgcagggctctggacagtctgggccctgtccccattgccactcccttcctccctgggctccatccacactgtcctcaaccctccagcacagtaagtgcctgctcacattccttcttcctgagacactccgcatctcttctcatctcctggtctctgctaagatgtcatctcctccactttacacccatctgggtgcctgttaacaagaaaacaggaaataacaagggttgatgaagatgtggagaagttgaaatccygatacattttatatgatacatgtactataaaatgatacactttatagtaagatggcactgttctgctgcggaaaacagtatggtgttttctaaaaaaattaaacagaattactgtatgacctggc

SEQ ID NO: 107997 - DNA, 593 bp, Homo sapiens
acacaaatagtgagatagtaatggtaatggtatcaggtcaatgatagcagtgattctgttaaatataaatggtgtaaacaatccagttaaaagacagagactgtcagactggattgaaaaaaccaaaccatcgacctgctgtttatgaaacacttaagaacatgaagtgattgaaagtaaggcaagcacyaaccaaaagaaaagtacacaggcagtggtgtctacagctaatggatcacaggcagttatagatttctttgttcactttccaccctcactgcttcacttgactagcctgaaaaggaaaagtggaatgaatatattatcatcacacaaaacagatgttaatgttagaagcattgaaagatgtcaagtgggacatcttataaaaaagacaaatcatcctttgtcccaaatttgttatatacctaataacataactttaaaaatataaagcaaaaatcaacagaactagaaggagaaatagaataagtcacaatcagagctggagattttaatgccaactctgatgaaacaagaagataaaaagcaataataacatatatttgaacaaaataattatccaatttcac

SEQ ID NO: 107998 - DNA, 287 bp, Homo sapiens
gaattctcagtaacttccttgtgttgtgtgtattcaactcacagagttgaacgatcctttacacagagcagacttgaaacactctttttgtggaatttgcaagtggagatttcagccgctttgaggtcaatggtagaaaaggaaatatcttcstatagaaacaagacagaatgattctcagaaactcctttgtgatgtgtgcgttcaactcacagagtttaacctttcttttcatagagcagttaggaaacactctgtttgtaaagtctgcaagtggatattcagac

SEQ ID NO: 107999 - DNA, 321 bp, Homo sapiens
gaattctcagtcacttccttgtgttgtgtgtattcaactgacagagttgaactttcatttagagagagcagatttgaaacactgtttttgtggaatttgcaagtggagatttcaagcgctttggggccaaaggcagaaaaggatatatcttcgtataaaaactggacagaatcattctcagaaactgctgcgtgatgtgtgcgttcaactctcagagtttaacttttcttttcattcagcggtttggaaacactctgtttgtaaagtctgcacgtggatattttgmccacttagaggccttcgttggaaacgggttttttt

SEQ ID NO: 108000 - DNA, 429 bp, Homo sapiens
cttcgtttcaaaactacacagaatcattcccacaaactgcgttgtgatgtgttcgttcaactcacagagtttaacctttctgttcatagagcagttaggaaacactgtgtttgtaaagtctgtaagtggatattctgacatcttgtggccttcgttggaaacgggatttcttcattttctgctagacagaagaattctcagtaacttccttgtgttgtgtgtattcaactcacagagttgaacgatsctttacacagagcagacttgaaacactctttttgtggaatttgcaagtggagatttcagccgctttgaggtcaatggtagaaaaggaaatatgttcgtaaagaaacaagacagaatgattctcagaaactcctttgtgatgtgtgcgttcaactcacagagtttaacctttcttttcataga

SEQ ID NO: 108001 - DNA, 463 bp, Homo sapiens
ggaaacactctttttgtggaatttgcaagtggagatttcagccgctttgaggtcaacggtagaataggaaatatcttcctatagaaactagacagaatgattctcagaaactcctttgtgatgtgtgcgttcaactcacagagtttaacctgtcttttcatagagcagttaggaaacactctgtttgtaaagtctgcaagtggatattcagacctctttgaggcyttcgttggaaacgggatttcttcatattctgctagacagaagaattctcagaaacttacttgtgttgtgtgtattcaactcacagagttgaatgatcctttacacagagcagacttgaaacactctttttgtggaatttgcaagtggagatttcagccgctttgaggtcaatggtagaataggaaatatcttcctatggaaactagacagaatgattctcagaaactcctttgtgatg

SEQ ID NO: 108002 - DNA, 463 bp, Homo sapiens
ggaaacactctttttgtggaatttgcaagtggagatttcagccgctttgaggtcaacggtagaataggaaatatcttcctatagaaactagacagaatgattctcagaaactcctttgtgatgtgtgcgttcaactcacagagtttaacctgtcttttcatagagcagttaggaaacactctgtttgtaaagtctgcaagtggatattcagacctctttgaggctttcgttggaaacgggatttcttcatattctgctagacagaagaattctcagwaacttacttgtgttgtgtgtattcaactcacagagttgaatgatcctttacacagagcagacttgaaacactctttttgtggaatttgcaagtggagatttcagccgctttgaggtcaatggtagaataggaaatatcttcctatggaaactagacagaatgattctcagaaactcctttgtgatg

SEQ ID NO: 108003 - DNA, 207 bp, Homo sapiens
aggctttcgttggaaacgggatttcttcatattctgctagacagaagaattctcagaaacttacttgtgttgtgtgtattcaactcacagagttgaaygatcctttacacagagcagacttgaaacactctttttgtggaatttgcaagtggagatttcagccgctttgaggtcaatggtagaataggaaatatcttcctatggaaa

SEQ ID NO: 108004 - DNA, 258 bp, Homo sapiens
tattcaactcacagagttgaatgatcctttacacagagcagacttgaaacactctttttgyggaatttgcaagtggagatttcagccgctttgaggtcaatggtagaataggaaatatcttcctatggaaactagacagaatgattctcagaaactcctttgtgatgtgtgcgttcaactcacagagtttaaccttttttttcaaagagcagttaggaaacactctgtttgtaaagtctgcaagtggatattcagacc

SEQ ID NO: 108005 - DNA, 415 bp, Homo sapiens
tctgcaagtggatattcagacctctttgaggctttcgttggaaacgggatttcttcatattctgctagacagaagaattctcagaaacttacttgtgttgtgtgtattcaactcacagagttgaatgatcctttacacagagcagacttgaaacactctttttgtggaatttgcaagtggagatttcagccgctttgwggtcaatggtagaataggaaatatcttcctatggaaactagacagaatgattctcagaaactcctttgtgatgtgtgcgttcaactcacagagtttaaccttttttttcaaagagcagttaggaaacactctgtttgtaaagtctgcaagtggatattcagacctctttgaggctttcgttggaaacgggatttcttcatattctgctagacagaag

SEQ ID NO: 108006 - DNA, 316 bp, Homo sapiens
tattcaactcacagagttgaatgatcctttacacagagcagacttgaaacactctttttgtggaatttgcaagtggagatttcagccgctttgaggtcaatggtagaataggaaatatcttcctatggaaactagacagaaygattctcagaaactcctttgtgatgtgtgcgttcaactcacagagtttaaccttttttttcaaagagcagttaggaaacactctgtttgtaaagtctgcaagtggatattcagacctctttgaggctttcgttggaaacgggatttcttcatattctgctagacagaagaattc

SEQ ID NO: 108007 - DNA, 312 bp, Homo sapiens
agaattcccagtaacttccttgtgttgtgtgcattcaactcacagagttgaacgttcccttagacagagcagatttgaaacactctatttgtgcaatttgcaagtgtagatttcaagcgctttaaggtcaatggcagaaaaggaaatatcttcgtttcaaaactagacagaatcattcccacaaactgcgttgtgatgtgttcgttcaacwcacagagtttaacctttctgttcatagagcagttaggaaacactctgtttgtaaagtctgtaagtggatattctgatatcttgtggccttcgttggaaacg

SEQ ID NO: 108008 - DNA, 408 bp, Homo sapiens
ttctgatatcttgtggccttcgttggaaacgggatttcttcatattrtgctagacagaagaattctcagtcacttccttgtgttgtgtgtattcaactgacagagttgaactttcatttagagagagcagatttgaaacactgtttttgtggaatttgcaagtggagatttcaagcgctttggggccaaaggcagaaaaggatatatcttcgtataacaactggacagaatcattctcagaaactgctgcgtgatgtgtgcgttcaactctcagagtttaacttttcttttcattcagcggtttggaaacactctgtttgtaaagtctgcacgtggatattttgaccacttagaggccttcgttggaaacgggtttttttcatgtaaggctagacagaagaattccca

SEQ ID NO: 108009 - DNA, 408 bp, Homo sapiens
ttctgatatcttgtggccttcgttggaaacgggatttcttcatattgtgctagacagaagaattctcagtmacttccttgtgttgtgtgtattcaactgacagagttgaactttcatttagagagagcagatttgaaacactgtttttgtggaatttgcaagtggagatttcaagcgctttggggccaaaggcagaaaaggatatatcttcgtataacaactggacagaatcattctcagaaactgctgcgtgatgtgtgcgttcaactctcagagtttaacttttcttttcattcagcggtttggaaacactctgtttgtaaagtctgcacgtggatattttgaccacttagaggccttcgttggaaacgggtttttttcatgtaaggctagacagaagaattccca

SEQ ID NO: 108010 - DNA, 235 bp, Homo sapiens
tgaaacactgtttttgtggaatttgcaagtggagatttcaagcgctttggggccaaaggcagaaaaggatatatcttcgtataacaactggacagaatcattctcagaaactgctgcgtgatgtgtgcgttcaactctcagagtttaacttttcttttcattcagcggtttggaaacactcwgtttgtaaagtctgcacgtggatattttgaccacttagaggccttcgttggaa

SEQ ID NO: 108011 - DNA, 488 bp, Homo sapiens
tgcgttcaactctcagagtttaacttttcttttcattcagcggtttggaaacactctgtttgtaaagtctgcacgtggatattttgaccacttagaggccttcgttggaaacgggtttttttcatgtaaggctagacagaagaattcccagtaacttccttgtgttgtgtgcattcaactcacagagttgaacgttcccttagacagagcagatttgaaacactctatttgtgcaatttgcaagtgtagatttcaagcgctttaaggtcaatggcagaaaaggaaatatcttcgtttcaaaactacacagaatcattcccacaaactgcsttgtgatgtgttcgttcaactcacagagtttaacctttctgttcatagagcagttaggaaacactgtgtttgtaaagtctgtaagtggatattctgacatcttgtggccttcgttggaaacgggatttcttcattttctgctagacagaagaattctc

SEQ ID NO: 108012 - DNA, 628 bp, Homo sapiens
tctcatggtttcccatctgaactgtgtcctctgaaatctgagagttacattttcccattttattcacataatgactccttacattatctcagtctcttataacttaatgttgtagagatagttgtggtttgcaatcatctttactccatccacttatttgtgttctttttagtctcatcttatcttttcatttcagtctattatgattctatgcagagaatctatatctgcttaaattcttttcgtgatgccaaaagtttctggaattcttctcttggatattttcagaatagcattcttcttctgcatcttctttttttagacagagtctcactctgtcacccaggctagagtgcagtggcatgaacatggctcactgcagcctcagcctcctaggttcaagcgatcctctcacctcaacctcctgagcaactgggaccacaggtccgtgccaatatgcccagctaattcttcyacatcttctaaatgtgaattccttttccttattctgctatatattttcactggtccctggttgattttatcctctttattttttatagatattaagataattttgtttccagacttagaaataaattctattaacagagcatgttagtaaatt

SEQ ID NO: 108013 - DNA, 610 bp, Homo sapiens
ctacaaataccacttacagagcataagaaagcatggaaatcttctaaaatcattctataatgaaactaaaaccttgcaaccataaccaaaaattaatagtgcaagaaacaagtccgttggtgatcttgcttatgagcatagatgaccagatcataaatatattagctaaataaattttacagtgtgctaaaagatatactatgcaaaaccagattcctttgaagaggagactcttcagctaagactaagaaatgaatgatgaaatctgatctaaacgtcaagtttagggatagagagcatggagtacttagagtgtccatactcacacctgtccgctctctgtctttgggtttacttccacccccacccaaataacttaatactccaatggacctatcaacaaatcttagttagttatatttccactacattctagtataagragaaaaaatccttttatttatcagtagaaaattatcagaacttccagaaaaggaaggaaacaaagcaggaaggatgtgaaaattcaaatgcagtatccaatgttcaaaatcttagacaaacagtaaggttttatagtaaaacaaatataaaatattagttgttattc

SEQ ID NO: 108014 - DNA, 610 bp, Homo sapiens
ctacaaataccacttacagagcataagaaagcatggaaatcttctaaaatcattctataatgaaactaaaaccttgcaaccataaccaaaaattaatagtgcaagaaacaagtccgttggtgatcttgcttatgagcatagatgaccagatcataaatatattagctaaataaattttacagtgtgctaaaagatatactatgcaaaaccagattcctttgaagaggagactcttcagctaagactaagaaatgaatgatgaaatctgatctaaacgtcaagtttagggatagagagcatggagtacttagagtgtccatactcacacctgtccgctctctgtctttgggtttacttccacccccacccaaataacttaatactccaatggacctatcaacaaatcttagttagttatatttccactacattctagtataaggagaaaaaatccttttatttatcagtagaaaattatcagaacttccagaaaaggaaggaaacaaagcaggaaggatgtgaaaattcaaatgcagtayccaatgttcaaaatcttagacaaacagtaaggttttatagtaaaacaaatataaaatattagttgttattc

SEQ ID NO: 108015 - DNA, 337 bp, Homo sapiens
aatgctctgttgtccaggctggactcctgggcccaagtgatttgcccacctcagactctggggcagctcagactacaggcatgtgcactgcactcagctgtttttttttgtctttgtttttgttttaattcatattatttttgcwttgtcttggataaagaaactttcacatctgcagattcaaaccacaagtgtatcaaaagtattgtacgtgctattgagagcttgacgtccttccaaaatgtacagacttttctaaaaagataagcatgatattaacaaatgggatttttaaatgacataatgcatttatcagtatttggaagacctgcataac

SEQ ID NO: 108016 - DNA, 619 bp, Homo sapiens
aaggtgagaagaattagatccacctgctggttctaaggtgtaaaggtacacaggtcagggccagaaaaaggtctctaggactaagagtggccatgggcaataaccagcaactaagtggaggcttcagttttaacaaccacaggaactgaattcagccaacaacctgaatgcatttggagscagattcacccctagaacttccagtaggaaatgcaactctgccaacaccttgatttcaaccaagcttgtcagacttctacagatagaactgtaagatattaaatggatgttattttaagcattttagtttgtggaaatatgttatggcagcaatagaaaatgactacagtggttcaagtattaagggatagaaataatagaaaattttcctgaggggataatgtaatcgtctgattgaacttgaagttgaaacttccatctggtcattttggaatcctgatgacagtgaatcaacaggcaaaaaatgtgatagtctactagcctggatgattgattatgactttcaaagagaaattgagccactactacttaatgcaagtaagggagactaggtttgaaatgcaggagtttctttggggtatcagttagtactcccatg

SEQ ID NO: 108017 - DNA, 625 bp, Homo sapiens
ctctttccatgaataatatgagatagaagaaaataaaacgagagacagacaaatacaaattccatggtcaggacaaaaaatatagtgarataaatatctatatttaagtaaaaattattttgagtgatgatatattatcaactccatcaatttaagtaataaacatgattatcttaatttccaaaggcaactgagaaattagtaatacattaaaaatatggtaaagttgcacatgttctgttatatgatagaaactgataatgaataaatgtttaaaactatatttagccataactgtagctttcataaccttgtttaaattgaatttaaataaataaataatatacagtaggtactgtggtgacatgaaaacagtcgcttcctccatggaccatttgtacttatgtacagttggccattgtacttatgtcacctacaactgttatattaacatgtaagtctccctcaacttggttgtaatttcctatagcagagtttaatatagtatgaattcaataaaaatacagaaaaatacatgcagcagctagataagataaaacgttagatatagatcagttaagcagctgaacaaaggacttcagtttgtctgtgggtaagacactaa

SEQ ID NO: 108018 - DNA, 622 bp, Homo sapiens
agacatagtactgagattttaggatacagaaaaggatataaaagaaaattccctccccttagagaagaaattattctggcaggagataggcagacaaaaracaggtataaatgaattaccaaaacaagttcagatagagatcagtgcccagaaaaaatcatgagaccatataatgcttccaagtggctgggggtgggtacagttgggagtagaaaggcagggacaggctttttgatgaaaagaaatgcaaatctcaataatttagaggctggttatagaggatgttttattcatctctctcctgctgaccatcttttgccatttcactaattattattgttccattatagtgctggaatgccagtcgataaatgattattgagaccccactgtgttctcagcaccactgtgactagaaaatgtggttgaattcaaataactaattctactgctctaataaaatgtgaggtggggaagaatgcttaaatcggtaaataacttaagccttcttgctttgagaggtgcattggagtctaagcttcctccaatccattcgtagctcacacatctgaaactcagccatcggtttcagcaactgctctaagaagaggcatcacgtatt

SEQ ID NO: 108019 - DNA, 610 bp, Homo sapiens
cctatgggtctggattttaattttccactttctagttaagaagcaattataaaaattaaatgagggtcaaggatggctttgattgccattatttttaacaccatattttaattgtcttgtttatataaggtttgtctctctgcaaagatcttcagacacttgaagatacactttcccacttgccatttcttagtccttattggggcctggcagtatgcccactatgagttctcaatraataataagtagcttgttgtgggaacttattgaaaatatcagtagattattcataaaacagctgatcttcctttgcaatcccactttagggggtcagttgaaagggcacacacttggaacaggttggagctaagctgaagctacctctaccactacttaagagtgtgatcttagattccctgagcctctgtttctcagcattcattggaaatgatacaatttaaccacttgctataagaattggatgagacaaggtacacacattgtccaggacgtacctggcacaatagcaagtcattcaacggtagctttaaatattatttgacattatataccatcactgctaattaatagttgtataagtaattccaca

SEQ ID NO: 108020 - DNA, 488 bp, Homo sapiens
gcgttcatttcagagagttgaacctttagtttgattgagcagttttgaaactctatttttgtagattctacaataggacatttggagtgttttgaggcctatggtggaaaaggaaatatcttcagtttaaaactacacagaagaattatgacaaacttctctgtgatgtgtgtgttcacctcacggagttgtacctctcttttgattgagcagtttggaaacactcgttttgtagaatctgcacgtgcacatttggagcactttatttccattggtagaataggaaatatcttcacataaaatccagacagaaggaatctgaaaatcttctttgtgatgtgtgcattcatctcacagagttaaacctttcttttgattgagcagttttgaaactctttttgcagaatctrcaactggacatttggagtgctttgaagactatggtggaaaagggaatatcttcacataaaaactagacagaagaattc

SEQ ID NO: 108021 - DNA, 349 bp, Homo sapiens
gaatagaatcatttgaaatggcatcaaatggaattgaatggaatggaatctactcgaatggaatggacacgaatggaatggaatggaatggaaaggaatagaatggaatgaaatcggatggaatggaatggtatggaacggagtcgaatggaatagaatggaattaaatggcatcgaatggattggaatagaatggaatctgctcgaatggaatggacaggaatggaatggactagaatggaayggcatcgaatggaatggaatggaatggaccaaacataatggactgtaatgcaatggaatcaaatagaacgcacttgaaagtaatggtctcgaatgaaatttattc

SEQ ID NO: 108022 - DNA, 603 bp, Homo sapiens
ctacaaaaacagtgtttcaaaacagcacaatcaaaagaaaagttcatctctgtgagatgaaagcacacatcacaaagtttctcagaatgcttccgtgtagtttttatgtgaagatattctcttttccacaacaggcttgaaatccctscaagtatccacttgcagattctacaaagagagtgtttcaaaactgctcaatcataagaaaggttcaaatctatgagatgaatgcacacatcacaaagaagattctcagaatgcttctgtgtagtatttgtatcaggatatttccttttcctccataggatgcaaagggtttcaaatatccaattgcagattctacaaaaagagaaattcaaaactgctcaatcaaaagataggtacaactctgtgagttgaatgcacacatcacaaagaagtttctttgaatgcttctttgtagtttttatgggaagataaatccttttccaccataggcctaaaagatctccaaatatccacttgcagattctacaaagccaatgtttcaaatctgatcaatcataagataggttaaactctgtgagatgaaagcgcacatcacaaaaaagtttctcagaatgc

SEQ ID NO: 108023 - DNA, 603 bp, Homo sapiens
ctacaaaaacagtgtttcaaaacagcacaatcaaaagaaaagttcatctctgtgagatgaaagcacacatcacaaagtttctcagaatgcttccgtgtagtttttatgtgaagatattctcttttccacaacaggcttgaaatccctgcaagtatccacttgcagattctacaaagagagtgtttcaaaactgctcaatcataagaaaggttcaaatctatgagatgaatgcacacatcacaaagaagattctcagaatgcttctgtgtagtatttgtatcaggatatttccttttcctccataggatrcaaagggtttcaaatatccaattgcagattctacaaaaagagaaattcaaaactgctcaatcaaaagataggtacaactctgtgagttgaatgcacacatcacaaagaagtttctttgaatgcttctttgtagtttttatgggaagataaatccttttccaccataggcctaaaagatctccaaatatccacttgcagattctacaaagccaatgtttcaaatctgatcaatcataagataggttaaactctgtgagatgaaagcgcacatcacaaaaaagtttctcagaatgc

SEQ ID NO: 108024 - DNA, 603 bp, Homo sapiens
ctacaaaaacagtgtttcaaaacagcacaatcaaaagaaaagttcatctctgtgagatgaaagcacacatcacaaagtttctcagaatgcttccgtgtagtttttatgtgaagatattctcttttccacaacaggcttgaaatccctgcaagtatccacttgcagattctacaaagagagtgtttcaaaactgctcaatcataagaaaggttcaaatctatgagatgaatgcacacatcacaaagaagattctcagaatgcttctgtgtagtatttgtatcaggatatttccttttcctccataggatgcaaagggtttcaaatatccamttgcagattctacaaaaagagaaattcaaaactgctcaatcaaaagataggtacaactctgtgagttgaatgcacacatcacaaagaagtttctttgaatgcttctttgtagtttttatgggaagataaatccttttccaccataggcctaaaagatctccaaatatccacttgcagattctacaaagccaatgtttcaaatctgatcaatcataagataggttaaactctgtgagatgaaagcgcacatcacaaaaaagtttctcagaatgc

SEQ ID NO: 108025 - DNA, 603 bp, Homo sapiens
ctacaaaaacagtgtttcaaaacagcacaatcaaaagaaaagttcatctctgtgagatgaaagcacacatcacaaagtttctcagaatgcttccgtgtagtttttatgtgaagatattctcttttccacaacaggcttgaaatccctgcaagtatccacttgcagattctacaaagagagtgtttcaaaactgctcaatcataagaaaggttcaaatctatgagatgaatgcacacatcacaaagaagattctcagaatgcttctgtgtagtatttgtatcaggatatttccttttcctccataggatgcaaagggtttcaaatatccaattgcagattctacaaaaagagaaattcaaaactgctcaatcaaaagataggtacaactctgtgagttgaatgcacacatcacaaagaagtttctttgaatgcttctttgtagtttttatgggaagataaatccttttccaccataggcctaaaakatctccaaatatccacttgcagattctacaaagccaatgtttcaaatctgatcaatcataagataggttaaactctgtgagatgaaagcgcacatcacaaaaaagtttctcagaatgc

SEQ ID NO: 108026 - DNA, 531 bp, Homo sapiens
tagatgattgatagctagaaagagattcatgcatacatataggaacaaaaagaggaaggaaggaggaaaggaagaaagacaaatggcaatttatgtgatgtgtttctgcacctggaaaaaattattgataggtacataatagcyttatagaaaaatatgaataaagagaaaatgataaaaatgtaaaagtcaattaacctaataactccaacagcaaaaagttactctaaaaaatgataaaatacttggccaatcaacatacaatatttgcacaattttaattaaaccttgtctatttttgtcatgattttttgaatttgggtaatttattttataaattttgtagagtaactaaataactacccacattgggagaacggataagggcaagtaagagttctttgaagagtgataaggcgtcctctccagtaagaatagccaatagatatagtatctgaaatgtatgaatcaagacatatcagcatacattattgtgtaaggaataggaaaataataatagggaaaatgatt

SEQ ID NO: 108027 - DNA, 591 bp, Homo sapiens
caatgactgtttcttgccttttaagggtaaaaacctgtgaaacrttaacaccaggaagtgttctcctttttctcatctgtcttccatttttcctcatgctccttcttccttcctaaggcaatagccctagcctttcactctttcattaatactggaagttggttgtgtccaattatgatgactcaatattctgatcttagccatttatgtctacaagctttcaaagatctggaaaggcagtagcccatcaaaaaatgttcagcagatcttagggtttgctgaaataagaaggaatatatgcaaagatatggattcacttttggcaatactttgctgaaaatctcccctaccaatataattgctgtgtcaagatgaaggcagagcaggagggaaagcaactagaataagttatcatcaagaaggggaatgaagggacacaattttaagaagcaataggggacaggcaccagacgaatttatgttagagtctttgcagggagagtaattaatacattgcatatggaatcaacccattgagggatgcaatggaagtaattagcatgaagttttaataaaggagttagacatgta

SEQ ID NO: 108028 - DNA, 527 bp, Homo sapiens
gctaggcctctgaggatggctaggcattttatcaatggagttaagtatatatgagggctgtgtagaatgaaggatcaaaatgaacacaggcattaagatgagaagggacttatttgaaagcaaaatgctcaatcaatttaattagagaaaaaggttgatatcgggctctgtctaggtcctgtgctgtcacgtgaccctataaatgtgatatatgtgtgcatacacatgcatacacactgtatcagtaaacatgctctggttaagaacagtgattgtcctggtaaatcatttttttaaagtttactctctttgaactgataggcaattcagtctgtaaaaactagttaggatatagaaarcaaaagaaataaaatgatagaaatgaagagaaagacagatctgggaaagttcagaaaaaggagaacggggaagtacagaaacagaaaggagacacaattctccaaacagcccttattggagaatcaccttttgccactgactttacctggccttttttgtggtcactc

SEQ ID NO: 108029 - DNA, 444 bp, Homo sapiens
aagttcacagtttactcagagaacataaagtgaacaatcttatttctagaggaaaaggtgttttcagggaagttgataggaaaggtcaaaacaaaattgtgaagggcctttggtttcttgctaagtggtatcactaatgtgttctaatrtatgatggagatccataggacatttgggggtaatagtaggatcataggtgttaggtatattgctgtgcatgcagtttatgagctgagctgaagagaagacttagaaatacttcaagaggaggtgtatacctaatctgggaacaccaaagtagtagtaaataggaaatccagctggaatcacactcaaagcccagagttactaaaagaacataattatgaatattaaattctcttgggattgtgacacaaataagaatgggtagcaagaaagttatcacaaccttcattgattttg

SEQ ID NO: 108030 - DNA, 444 bp, Homo sapiens
aagttcacagtttactcagagaacataaagtgaacaatcttatttctagaggaaaaggtgttttcagggaagttgataggaaaggtcaaaacaaaattgtgaagggcctttggtttcttgctaagtggtatcactaatgtgttctaatgtatgatggagatccataggacatttgggggtaatagtaggatcataggtgttaggtatattrctgtgcatgcagtttatgagctgagctgaagagaagacttagaaatacttcaagaggaggtgtatacctaatctgggaacaccaaagtagtagtaaataggaaatccagctggaatcacactcaaagcccagagttactaaaagaacataattatgaatattaaattctcttgggattgtgacacaaataagaatgggtagcaagaaagttatcacaaccttcattgattttg

SEQ ID NO: 108031 - DNA, 622 bp, Homo sapiens
tctctgaaacagaagagcaagctagaaccttcccartgataaaatggaaagtggttaaaaaagaaactctccttaggataaggggcaggcagacaaggggccattagccactagaaattagaattcaggtcagacacagtggctcatgcctataatcccagcactctgggaggctgataaagggggattgcttgaagccaagagttcaaggccagcctgggcaacaaattgagaccctgtctctacgaaaaaatttttttaaaaaatcagctgggggcagtggactacaagtccgagctactcaggaggctgagacaagaggatcacttgagcctaggagttcaaggctgcaatgagctatgatcacaccactgcactccagcctggaggacaaagcaagaccttgtctcttacaaaatacaaattttaaaaaattaaatataatagaattcagagttgatgcagggagaggaatgcattcattagctgaaaatacaactctaggttgttttcgtttttcagtttccctaagaaatgcatcctgaaatacagtgtttgtataaaactctttatttttagaagttttaaaaaggaatgtgttttaagaacacaaatttcaaac

SEQ ID NO: 108032 - DNA, 422 bp, Homo sapiens
tcattctttcaaagggagtggggcctttcccatccacttttttctaagaggaacctgagttgtaaatgaaataaaatcatgtgatcttgctgtcataaatattcatcttgggtaagtgactatttttaataatcaaattctttgttatccagagaagttgagggtgactgtacttttcctaacccacctgtaaaactacctaaggaatatatataaatatctgtatatatctctctctatatatacttactcctgactgtaatmattcttatttattactatttaatttatatggaactctcataagctatctcataaactcacaaatcatcattcaataaatctgacaaatatcaagtcatgtactacacacaactgacaaatgattagtatcaaaatatattttttaaatgtgcagatct

SEQ ID NO: 108033 - DNA, 539 bp, Homo sapiens
caataaacccaccagaagcaaaaaaaaawcataagttaaaccatcataagttggactatcatcaggaatacaggattgtctgtatttatttctaaatattagaatacatacaccatgtgtataggtatcatatatacatattatatatatgtgtatatatatatataatgcaaagaaagaaaagcgtgcaggattttattctttctttatctactaaaagcccatagacattccacttatatatcacaagatttcagcatttcagtattattctcaattcatttgagaaaacatcactgaaattctgtatgcagacaagcaaacatgctatgttcttctaaatctaattactcaaatcttcattaatacaagtaaagtagcacaaagggagcagcagtattcaattaaaataattatgaaggctagagctccccttgatagagcacaaacaattatatatacaggttttctgtgcaattaatacatatatccccatggtaaacctgaaaaccataatacaaactgcacagagctgaaca

SEQ ID NO: 108034 - DNA, 539 bp, Homo sapiens
caataaacccaccagaagcaaaaaaaaaacataagttaaaccatcataagttggactatcatcaggaatacaggattgtctgtatttmtttctaaatattagaatacatacaccatgtgtataggtatcatatatacatattatatatatgtgtatatatatatataatgcaaagaaagaaaagcgtgcaggattttattctttctttatctactaaaagcccatagacattccacttatatatcacaagatttcagcatttcagtattattctcaattcatttgagaaaacatcactgaaattctgtatgcagacaagcaaacatgctatgttcttctaaatctaattactcaaatcttcattaatacaagtaaagtagcacaaagggagcagcagtattcaattaaaataattatgaaggctagagctccccttgatagagcacaaacaattatatatacaggttttctgtgcaattaatacatatatccccatggtaaacctgaaaaccataatacaaactgcacagagctgaaca

SEQ ID NO: 108035 - DNA, 539 bp, Homo sapiens
caataaacccaccagaagcaaaaaaaaaacataagttaaaccatcataagttggactatcatcaggaatacaggattgtctgtatttatttctaaatattagaatacatacaccatgtgtatakgtatcatatatacatattatatatatgtgtatatatatatataatgcaaagaaagaaaagcgtgcaggattttattctttctttatctactaaaagcccatagacattccacttatatatcacaagatttcagcatttcagtattattctcaattcatttgagaaaacatcactgaaattctgtatgcagacaagcaaacatgctatgttcttctaaatctaattactcaaatcttcattaatacaagtaaagtagcacaaagggagcagcagtattcaattaaaataattatgaaggctagagctccccttgatagagcacaaacaattatatatacaggttttctgtgcaattaatacatatatccccatggtaaacctgaaaaccataatacaaactgcacagagctgaaca

SEQ ID NO: 108036 - DNA, 539 bp, Homo sapiens
caataaacccaccagaagcaaaaaaaaaacataagttaaaccatcataagttggactatcatcaggaatacaggattgtctgtatttatttctaaatattagaatacatacaccatgtgtataggtatcatatatacatattatatatatgtgtatatatatatataatgcaaagaaagaaaagcgtgcaggattttattcttyctttatctactaaaagcccatagacattccacttatatatcacaagatttcagcatttcagtattattctcaattcatttgagaaaacatcactgaaattctgtatgcagacaagcaaacatgctatgttcttctaaatctaattactcaaatcttcattaatacaagtaaagtagcacaaagggagcagcagtattcaattaaaataattatgaaggctagagctccccttgatagagcacaaacaattatatatacaggttttctgtgcaattaatacatatatccccatggtaaacctgaaaaccataatacaaactgcacagagctgaaca

SEQ ID NO: 108037 - DNA, 620 bp, Homo sapiens
gcttaaaatttaataacattcttcttttgatgttgcccactccttgattccattaaaattaagttttaataatagaatgtccaataatacaactcgcagtcagtgccatttatttctggatctctttttcattttcctccatacttgaaattttgttaagttaccactaacataaaacctaatttaagagttctagtaaagaaatactgcacattaactatgaaaacaagtatgggaccacttcagcagagcttaaaagaaaatctacaattgacttattaagaatcagaagacgatcttaatgggaatgagtcagcaggmtcagaaaaatttttttattatactttaagttctagggtacatgtgcacaatgtgcaggtttgatacataggtatacatgtgccatgttggtttgctacacccatgaactcatcatttacatgagatatttctcctaatgctatccctctcccagccctccaccaccagacaggccctggtgtgtgatgttccccaccctgtgtccaagtgatctcattgttcaattcccacctataagtgagaacatgcggtgtttggttttctgtccttgcgatagtctgctgaaaatgatggtttca

SEQ ID NO: 108038 - DNA, 589 bp, Homo sapiens
accaccggggccctggatttccagcacaaaattgggcagccctttgggcagacacctttgggcagacaccgagctagctgcagttcttttttcataccacagtggcgcccagtgagacagagccattccctggaaagggggctgaagccagggagmcaagtggactggcttgctgggtcccactcccacgaagcccagcaagctaagatctactggcttgaaattctcgctgccagcactgcagtctgagctccattggggatattcaagcttggtggggggaggggcatccaccattgctgaggcttgggtaggtggttttaccctcacagtgtaaataaaaccactggaagtttgaactggtcccagcccacctcagctcagcaaggctgctgcggccagactgaatctctagattccctcctctctgggcagggcagctctgaaaaaaaggcagcagccccagtcaggaacttatagatgaaacccccacctccctgggatagagcacctaggggaaggggcacttgtgaggacagcttcagcagacttaaacgtccctgcctggcagttatgaagagagcagcag

SEQ ID NO: 108039 - DNA, 600 bp, Homo sapiens
gatagtgatgtctttttcttttatattaccaataaaacgtacatactttcacaggagactgcagtgtatagtgtcaccaaccattagtccaatgatctttcatcccagaacacaactgtgtccagcacaaattgaggagcttcccaaccatgttcccactcctggcttatggatatcttggagcattgtatacacacaggatagtcagatgtgggccatgcaaagtgtgaatctagcagttgaggcctggtgtagatggagtaagagttctttagctctaaaaggataacaaactggaagagattattcagatgttaaaacagtgcaccaaatgtaatatgtacaaaactgagttccttattccctcctttttttttccttcttatgagtcttcctcatcttacttaatagaaattctatctttcaggccagaagctataactttatcttgactcttctgtttatcttacactcacccacattggcaaattcaaccatttctgctttaaaataratccagactctgatcatttcttaccacctcctatgctaccatcctggtccaagtcactctcaactcttgctttggttttataatgg

SEQ ID NO: 108040 - DNA, 558 bp, Homo sapiens
tagttacagttgggtaagaactgcaccattttggaaaacagacaacaacagtgtaacatctatacatgtgtccatccatatgcttatttacttatatgggagagaaaaagaataggacaaggttcatgctaggttcttaaatggtataactagtagggtcatggattggttgctaatgtgaatggagaaatagataaaggccatacttttatcatttcacgcytttatcaattcaccttcctggctgaatgatcctttaatacctttctgcctgctctgtagacaccttatgaggatagatgagaagcagcagcatacaacaatagctaagaacctaaattctgcaacttaaggtcttagttggaaaccagactctattatcaatggctgtataccctaagagaggctacttaaactctctgaagtggttttttcaactgtacaatatgaataaaaatatctattacacaagtttattgtgaaaattaaatagcaaatgtatgtaaaaagcttataactgtgtctgtcactattctaaatgagctcatatataagata

SEQ ID NO: 108041 - DNA, 558 bp, Homo sapiens
tagttacagttgggtaagaactgcaccattttggaaaacagacaacaacagtgtaacatctatacatgtgtccatccatatgcttatttacttatatgggagagaaaaagaataggacaaggttcatgctaggttcttaaatggtataactagtagggtcatggattggttgctaatgtgaatggagaaatagataaaggccatacttttatcatttcacgcctttatcaattcaccttcctggctgaatgatcctttaatacctttctgcctgctctgtagacaccttatgaggatagatgagaagcagcagcatacaacaatagctaagaacctaaattctgcaacttaaggtcttagttggaaaccagactctattatcaatggctgtataccctaagagaggctacttaaactctctgaagtggttttttyaactgtacaatatgaataaaaatatctattacacaagtttattgtgaaaattaaatagcaaatgtatgtaaaaagcttataactgtgtctgtcactattctaaatgagctcatatataagata

SEQ ID NO: 108042 - DNA, 518 bp, Homo sapiens
agaaggaagaccctaagttcacatctcaggccaatcctcagaacagacacagcctacaataattaaaaaattaaaaagttggccaggagcggtggcttacgcctgtaatcccagcactctgggaggccgaggcgggcagatcacaaggtcaggagatcaagaccatcctggctaacacagcgaaaccccgtctctactgaaaaaaaaaaaaaaaaagcaggctgggtgtggtggctcacgcctgtaatctcagaactttgggaggctgaggtaggtggatcacgaggtcaggagttcaagatcagcctggccaaggtggtgaaaccccatctgtactaaaaatacaaaaaaaattagcgtggcrtggtggtgggcacctgtaatcctagctactcgggaggctgactcagagaattgcttgaacccgggaggcggaggttgcagtgagccaagatcacaccactgcactccagcctgggtgacagagcgagactccatctcaaaaataaaataaaatg

SEQ ID NO: 108043 - DNA, 609 bp, Homo sapiens
ttcattggttagtttgttttttcatctaccagtgctcacccttctgctatcatgctgggtactgtgctgagtattagaatcactgcagagggcagaagctggtccagggcatccccataggggttgggatggcttggggcccacaccttttagaagaccagtctgggatctaaagtgtctctcagtttctcttggtttcgctcagacacttgaatggattctaccccattactctcccaggaacaggagggattagcatttgaagaatcagcatagcaagtattttcttttcacttcaattttatgttgccaagggttgcttgaggtggggaagcttgatgcagatgacacagggcatccccttcccatcaccacccccaaagtccctcttgagccaccccttggcatccggcactggcagtgagcaaagcataccttgccctgtggagagcggaggctcctgttaatagaatggtctggagcttcttagctactcttgccrtaggtgaaaggctattgagaaagctcttgggattttcttaaagccagatatcttgatcgccaactcgcagcccaatgcccagccctcagcactatacagggaatgcc

SEQ ID NO: 108044 - DNA, 546 bp, Homo sapiens
tattgcatgatggtactgggctattatttacacatctrttgtcactcaaattttaattttattcttcatattattattcaaaaattaacctaatagaaaacacataatatgatatgttgaggaatgatgatgtattattccctcagagtaaaagtcatacatcatttctaaaatgagagaaagacaaagttaatagaatatattttgacatatttgattcaaaattgagtgtcttcatatatctgcattcatgatggcattctaaaggagagaaaataaagtcttacttgaaagcacaaacaaaagataagagaaactggcacattaacatctcagaaaatttctgttggtagtttaattgaagatcgtgaaaggaatcgtatactgttcctgaaagatacacttttatttaaaaagtcttgtatttttagcactcattggcacatgcaagtttcatttcgtatatgtcaaattttttcacatactaaaaaatgttgtatacacaaatcaacaaagatttaaaatataaaatcaaatgttatattt

SEQ ID NO: 108045 - DNA, 564 bp, Homo sapiens
aaagtgtggcaccccaccccgtactgctgccatgtgagacatgccttgcttcccctttgccttctggccatgactgtaagtttcctgaggcctccctcaccatacagaactgtgagtcaattaaaactcttttctttataaatgacccagtctcagatagttatttatagcagtgtgaaaacagactaatacatggttcatccaactagatatgcctggtacctactttgctcctcagtcctaacccaatccatacccaaagccctggccatctgactttctacatccccctgaagcctgtctgcctcactccatctcctcctctccsctactattccaaagaattatcaggtctaatggaatcaacctaaatgcccaccaatgacagatcggatttaaaaatctggtacatattcaccgtggaatactatgcagccataaaaatggaatgggctcatggcttttgtgggaacacagatggagctagaggcaaattattattcttagcaaattaatggagggacagaaaaccaactattgcatgttctcacttataagtgagag

SEQ ID NO: 108046 - DNA, 557 bp, Homo sapiens
agaggcatagtttgatgggcttattcttcaattaaaatcacatacctaccacttgcttaaaaaaaaaaatcaaactcgttaacaagatactcagctaaaatccctcccaatctatctttagcctgtccccagactcatcttctctcattccagttacagcagaatactgacactgcctagtctccatawccctggttacatttttagtctttcaggaatgccctaacctacttattttaaaattgtcctctaaccaggttcatttcaaattaattctcttattattccagtcagatttaacctgtgtgattctatgtatacacctgaattctaagttatacaattcacttacctacctatttgacaatacatactgagtgctaacatgtgctaggcactgttctaaggctgaggctacaatggtaaagatttgacatgtaacttaatgcttgtactcatcatagtctaacctgtattttacttagctgtttaaatgcctatttttccaccaatttgtgagtttcttgaagtcaagtcccacgcattaaaaaaaaaaa

SEQ ID NO: 108047 - DNA, 531 bp, Homo sapiens
aatactaacaaaaacatcttaattaaaataggctaggcatattacattctgtttgaaatggaaagaagcaatgttttcttcctamtctcatactctacccaccattctcaatacaatacttcacctctgggtaccaaaatgtgtgtggggatgtctcctcaccaattaccaattccccagtggacaccaactggatgtcctgtaattcaatttaattaggaaactatctacctggagatagtggtggaacacacaggctaagggctcagtcccacaagtcttcccccattccagatgccaatcgcaagtacatctgatacatctgaccagccagctataaatctgggatttctacaaccccttccttgagtttgatcaatttgctagagcagctcacagaactcagggaaatattttatgtttactggtttatgataaaggatactataaaggatacagatgaacaaccagatggaagagatgtatagggaagatataggcagggaacacggagcttccatgccctcttgg

SEQ ID NO: 108048 - DNA, 554 bp, Homo sapiens
cctctgaaagctcaaggaaagaccattcacttgactaagtcaacattgagctattagttcgaataacagttttgttatagtttttgctattttcaaattctaagattatagacaagtatatttttattgtatttatagtagaaagtatcccataaatttaatattttttaatgagaagaaagtattagaataccaatgccattgtaccaattcagtttcaatcaggaaaacagaaaatgcatcagttattttaacaaaaagaagtaacataaggaattgaaggaagaaaagagcaaaaaaggtgacattgaaatacctcagaagtaatttctgaggattgaaaactggctcctttcttcatgaattctgagacactgggcaagttacttggcctccttaagtggtctgatacacccagagttagttaaagtgtgaggwttggaaggcacagctgtcaagacttccccttcttctaacatcaactgcaagtctagagggttagcaaaatcactctcagctttataattcactacaagaatacacagaactcactg

SEQ ID NO: 108049 - DNA, 669 bp, Homo sapiens
agggcttatacaaaggaataaaaatgacttcttacttctaacaagcaacactggaaactaaaaaagaactgaacaatggattcagtttctgagggaaagtcttttctctcctggaagtctatgaatctcactgcaaactaaatgcaaggataaaaatattttcaaacatgcaagggcttaaattaactttctctgtgcacctttttctgtgttacagagtatctatagaacattgttgaagtatatatttcataaaaaacgaaggaatagatttaggaaggacccaggaatcagggcatttaacacaaaagggtgtaaagaggagactagagaaaaatccagtttagactggaacaagaggagtaaagatttcaggagagatatttcaaacacacacatgtacacacacacactggtttctttgtagtcaaatacataaagtaatttatcagttcttcttgtgtgcatrtgtgtgagtgtataaggtagtgcagggatgtgaaaaagagccatatcctcattcttcaagctaagaaaccaaaagatattatctaaaaatacttaaaaccactaagtagcagtgaaaactcagtatttaaaatatgcagtttaaatgtatagtctatgggaaattacattggaatattcaaaattcaattaatgacatga

SEQ ID NO: 108050 - DNA, 669 bp, Homo sapiens
agggcttatacaaaggaataaaaatgacttcttacttctaacaagcaacactggaaactaaaaaagaactgaacaatggattcagtttctgagggaaagtcttttctctcctggaagtctatgaatctcactgcaaactaaatgcaaggataaaaatattttcaaacatgcaagggcttaaattaactttctctgtgcacctttttctgtgttacagagtatctatagaacattgttgaagtatatatttcataaaaaacgaaggaatagatttaggaaggacccaggaatcagggcatttaacacaaaagggtgtaaagaggagactagagaaaaatccagtttagactggaacaagaggagtaaagatttcaggagagatatttcaaacacacacatgtacacacacacactggtttctttgtagtcaaatacataaagtaatttatcagttcttcttgtgtgcatatgtgtgagtgtataaggtagtgcagggatgtgaaaaagagccatatcctcattcttcaagctaagaaaccaaaagatattatctaaaaatayttaaaaccactaagtagcagtgaaaactcagtatttaaaatatgcagtttaaatgtatagtctatgggaaattacattggaatattcaaaattcaattaatgacatga

SEQ ID NO: 108051 - DNA, 592 bp, Homo sapiens
tttaaactgattgtcctatattatcaaatatttttctaaattaattttcatttatacatttgctgtatttgatatatattcttcctttcactctaaatcatttatattttacaatatatactgatgacatttgtttaatgtgatgtgaccattgttttaggtgatgtgggtattgaagcaaagaagatggacaagttgttatttctagaagcccattttgtagaactagatagataacaaataaataaatgaaagaaagtatcagttagtgataagtrccttgtaaagaaaccaatttatctagataattttgtttttatggtttgcattccgatttctgtgctttcaatttttatgccattctataggcatgaaatgtctttccgtctcttgtatttgcacatgaaatagcttgggttttgcaattggaagagtgaacttaagtttgatatccactggagattaacaatgtgacctcatgcaggagttttaatgtgggtgaggccagtttgccatctgtaaaatgggaatatagcactaacatcttcttcactgtggtgctgagtgaacaatgcccattgtacataaagca

SEQ ID NO: 108052 - DNA, 563 bp, Homo sapiens
aacattcttaagtacattccccttttttaagctgttaaatcctctcttattgtcactcacctggctactactatttttgtaacaaacatttgaaagagggaatatttttgtttagaatgatatttgcagtatgctttcctttatcctgtgcaagaaagctttcctttaccctaggaaaaaaaaatgctggtcttgaagtcagaaattgtctttcacatctagggttctacctcttactgactatatggattcaggctacacccatttatgcattacatatttattatttgttacatatcatccattgtgataattattggcaatacaagttgttacaagcaatattcctttttatcaagaaacccagccrttaaacaattttcgcctcatttcctcattcaaagagggttataatggcatattcaatccaagttattgacatatttaacaattatttaataaacatctgtacatgtttaactttaataactcatttatgaaagcatctgacattggtaggggctgaaaaaatatttgtttgcgaatctgatgtgctacccttt

SEQ ID NO: 108053 - DNA, 633 bp, Homo sapiens
gctttcttgtcattcaggtgttaactgaagtagcatttttaatttccttcaagaacactttcttgtgtacacagcttggctgtttgattcaagagacctagctatggcctctctcagcttttgatgtcctttcctgactaagcataataatttctaatcatttgtgagacatgtgtgactcttcctttaacttcaaaacttgtagagtattgtagggttatgaattggcctaactgcgatattgttgtgtttcagggaatagggaggcctgaggagaatgagagagatgtggggttggggggacagtcagtcaaggagcaatcagaacacacacaacatttatgcaattaagttcattgtctyacatgggcacagttaataatgctccagaacaattacagcagtaatacgaaagatgactgataacagatcatgatagcagatataataaaaatgaaaaagtttaaaaaattttgagagttaccaaaatgtgacacacagattcaaggtgagcacatgctgttggacaaatgctgccaacagacttgctagacccagaattgcctcaaaccttcaattcttaaaaaatgtattttctgtgaagagcaacaaagtgaagcgcaataaaacaag

SEQ ID NO: 108054 - DNA, 612 bp, Homo sapiens
ggctctgccttcttggtggatggcaacttcatctgttcttctgacgtcaccattttgttcatcttgtgagtcaacggtgctcgattgcggtgtctccgtctccgcggaggtgcttttctttgcatctctgatgggttcattgtagaacttcaaakgtctagtgggtatccaaacaggaagctgattttctcctggtgaaacacaagcaaaacctctcccccacgttatcaccttccctatttcccatgtcttatttttattatctttccaccaaattagttttccttcatgtgggctgttctttttaccagtaagatgttgttctgcagaagtagtagtctgatttctataaatgtttaaaaaatttaaagtatagagtgctagattaagttgcatctgaggagtggtacactccttactgtctcccccttctttttgtttaactaattgagttttgagtgttctattagttctttcaactatggcctgtccttgggaattataaggaattcctgttgtatgtgaaattttccactgacttaagaatttttggaaagctttactacaatatcctggtccattgtcagttttgattttttctggaactcccat

SEQ ID NO: 108055 - DNA, 360 bp, Homo sapiens
gtgccttgtcccagggctgcacagagcagctgtgccctgggcctggaccatgaaaccatttttccctcctagggatccggaccggtgataggtgggcttctgcaaaggtctctgacattccctggagacattttcccattgtcttggctattaccatttgactcatgcaaatttctgcagtcagcttgaatttytccccagaaaagtgatattttttttctacacatagtcaggctgtgaattttccaaacttttatgctctgcttcccttttaagcataagttccaattcccaaccatctctttgtggacacatatgactgtatgctgttaggagcaacccatccacattttgagtgct

SEQ ID NO: 108056 - DNA, 585 bp, Homo sapiens
tccatatttagccatcaagaacattaactgctgaaatggcagtagtgatgatattaatgacaactcttgaaaaagaagaagtgggcatggagagtgggtataagaagaacagtgtaagccagaaaaacagaaaactccttttactttttcacctcttgacataagattttgagaacrtggataaaagggagttgggaaagaggggtctccattgtaaaaagggtgattgaaagagtccagaaaagacttttctggagaggagaatgcttttccagcatatgcatatttgaaaagctccttttatcttttctgtacctcagagggcttttcaaacagctcaagaaactgcctggatgcacttacctggtaacaggtggacaaaattagacattagtctcagaatgtcactgcatattatgtttccagtctgctcttctagttttagcaagtcagctgcaatgagagtgcaaaacaaacacattttagtctgtctctgattaaactaatgataaaccaataactgctgttaggaaaagaaaaaagaaaaaaaccctaaagttcatgctgtcaggacgcattctatct

SEQ ID NO: 108057 - DNA, 619 bp, Homo sapiens
attttgtccccaaaagatatattgaaatcctttggaaatagagtctttgcagatgtaatcaaattaaaatgagcacattagggtgggccttcctccaaaaagactggtgaagagacacaggcacagaagtgcacaggggaatgtcatgtgatgatagacgcagagattggagtagcaaatctccaaaccagggaatgccaaggattgctggaactaccagaagctaagaagaggcaaggaggaatcctctgtagagtctttggagggggcatgccctgcccatctgctgattttgacttctggctttcagaactgtgagacaataaatatctattgctgtaggacacttagttgtggtcatgtgttactgcagtgctaggaaacttgatttttcactaataatacattttgactattatttctagtttccatgagaatgtatacagatcttatctatttttttgtacaattacacttccagaaacacatgttyaacactgttttttgttcaaagctagtgaatgacaacacacactgggccctgttggtgggtgaggagtgaggggagggaacttggaagactggtcaataggtgcagcaaaccaccatggcacacgta

SEQ ID NO: 108058 - DNA, 483 bp, Homo sapiens
tctgtttcaaaacttatcatacatttgtcatcaaaatctacattcattagttgcttttaagtttttgcctacattttagagtaaccctgcttattcctgtgaaccaaccagtaatctctgactgcagaccagaaggaaaaaaggggtatgggtaatgtaaaaatctggatcaatattctagttctgagcaattatcctgaaaattctgccaggtgataggaataaatagggtgcccattactcagagttttcctttttrggaaagcaagatcaagggagccaaacaaagtcaagacccatcacccaatcttagcaagcataactatagctgccagttttcttggcatgtcacaggatatccttttctctcccttgttggaagaggactcaattttacagcttcaccttagcattcagtttatgataaagagtccccccaaaacacatttttgtcccaaattcaattccaagcttcaggtcaaa

SEQ ID NO: 108059 - DNA, 483 bp, Homo sapiens
tctgtttcaaaacttatcatacatttgtcatcaaaatctacattcattagttgcttttaagtttttgcctacattttagagtaaccctgcttattcctgtgaaccaaccagtaatctctgactgcagaccagaaggaaaaaaggggtatgggtaatgtaaaaatctggatcaatattctagttctgagcaattatcctgaaaattctgccaggtgataggaataaatagggtgcccattactcagagttttcctttttaggaaagcaagatcaagggagccaaacaaagtcaagacccatcacccaatcttagcaagcataactatagcygccagttttcttggcatgtcacaggatatccttttctctcccttgttggaagaggactcaattttacagcttcaccttagcattcagtttatgataaagagtccccccaaaacacatttttgtcccaaattcaattccaagcttcaggtcaaa

SEQ ID NO: 108060 - DNA, 573 bp, Homo sapiens
gagctacaatattaactgcagaatgtctgcttagtgagcccatatcagtaaatatggcctgatccacctttaacatctaataccccatagctctaacattcattcacacacattttccttagatttctacttgcataaattagaaaacttaagtagttattttgaagtatggccacctccctcattggtcacactttgtgcctcacctttaagggtcttctaggacttgaatccaattacaggtctagaagtaaagggaggtattagtgttgtttcctgaygaaaatcagcattttcttgcatggcaactgcttcgggggaagccattaccatgtcctcaggcaatgtaggattaatcacctcagagggaagtggaaaggcagataccaccattggaagggaggccccactgtaggtggaacaccactgtcattagggctgaacaagccacttttcactgtggttagagaagccacttgtgctggcaaagaagactcatcagaatttaggggctcaatattttcaatttcatcagtggcttgcaaaatgtccccatcccaccttaaaggatcc

SEQ ID NO: 108061 - DNA, 525 bp, Homo sapiens
taaggacacagacacacatacaaagaggaaagaccatgtgaagacatggccatctgcatgccaaatagacaggcccttggcagaaaccaaccctgccaacaccctgatcgtgctcttctagcatctaggactgtgagactataaatttatrctgtttaagcctgctggtctatgttatagcctacagcagccctagcaaactaataaactaatctttcatcttattgtgcagaaatgaagaacatgaaacttctgggaagttctacaaaattttaccatgataaaatcagagacttcaaagaacctcaccttatgagttgtacggtatttgctatgacaggaacctaaaattttctcctggaggctttttaatgcttggagacaaaaactttaaacaatatagggaagaaataattgaacatcttttccttcttctttgcactcccatcagtttttcatttgtgatacatataggtgggggaaaaaaacttaagaaaacctgttcctcttttttgtatctggtaa

SEQ ID NO: 108062 - DNA, 573 bp, Homo sapiens
tgaattttatgattttttaggacttttaaccttatataaatgcaacatttatgttggagaackagggaagaaagtttattaaacatattattgatgttatgaacttaaaactgcatgataattcttcttagcatgttttactgcacaaagcaggtgatgaaattctaagtatcaaaagattaaaagtattataatcaaacctaaattagtttcaaggcttacagaccccttgatgtcaaggacactgtgcctctccatctgcactagctgcaacattatagcaggacttgcctggactggagtgcatctaatacttcttgcatgcagggatgaaatacaagtttttgaaatgacttttctcaagacttctgggaaatgtcaataaaaagtattgttaatccacccaacaagtaaatatcctatcactgaaagaatgaatttaacttgaaaacctctaagacatcagataatttccagaaccattctattgcttacataagtagctttatactttcagatctaaatatgggttgaaaatttgaaataaattcattaatacatttgtaagcacga

SEQ ID NO: 108063 - DNA, 550 bp, Homo sapiens
gcttgcatgtgcccccttctccctccctgaactctgttttcttttttgtttgttttgtgtttgagacagggtattgctctgtcacccaggctggagtgcagtggcatgatcatggctcactgtagctgcttcaatctcctgggctcaagggaccctcccaccttagcctcctgagtagctctgatcagaggagcacaccaccacacctgagtaacttaaaaaaaaaartctttggagatatgaggtctttctatgttgcccaggctggtctcaaactcctgggctcaagagatcctcccgccttgacctcccaaagtgctgggattacaggaatgagttgccgcacccagccctggactttcttttcttcttgtcccctgttcagacactgccctaaggttctgcccttgaactctttctctttcagagaacccaacaatcattcatctggcaatgactcccaaattttagttccaattgtactttctcgcttgagctccagtcttgtgtttccagggggccagtatctgcattacctgaaaacaccaga

SEQ ID NO: 108064 - DNA, 616 bp, Homo sapiens
gtgttaaaatgatttaaaacacacaatcctagaggcagaaagcaacaatttacaagctgtttcacataagaaagttggggtgaaggcaactcagcatctgtacttcagatgtttgtcccccactgctgtgattaaaagaaaataataattcttggtaagmattttatgatagtatgatttattaaatttttgacagttggctgggtgcggtggctcacgcctgtaatcccagcactttgtgaggccaaggtgggtggatcacgaggtcaggagatcaagaccatcctggctaacacagtgaaaccccatctatagtaaaaatacaaaaaaattagctgggtgtggtggcgggtgcctgtagtcccagctacttgggaggctgaggcaggaaaatggcgtgaacccaggaggcagagcttgcagtgagctgaggtcgccgccactgcactccagcctgggcgacagagcaagactctgtctcaaaaaaaaagagaaaatttttgacagttaatatttactatattctttagctctttgttcttttttgaattttttgtccttattattattttaactagttactctgttactagaaaggggtcctgatccacacccc

SEQ ID NO: 108065 - DNA, 443 bp, Homo sapiens
atgtttgaattatttaaataaccatttttgtgtctttctcttsttaattttttacagcttatcgtgagcctcattattattatcagttcacagctcgatatcatgcagctccctgcaatagcatttataatatttcttttgagaagaaacttcttcagattttaagcaaactgcttcttgacctttcatgtgaaatttccttacttaagtctgaatgccatcgcgttaaaatgcaaagagctggtttgcaaaatgaattgttctttgcattttcaggtaagtctatacaatttgttagaaaagcaaatggagaacacataactaatagttaaaaaagttgttaattactcacagcatttttatgatataaacataaacaccatacatccaaatatattttgttctctactttgacttagtgctgttaacccctcaaatagaat

SEQ ID NO: 108066 - DNA, 571 bp, Homo sapiens
ttctttgcattttcaggtaagtctatacaatttgttagaaaagcaaatggagaacacataactaatagttaaaaaagttgttaattactcacagcatttttatgatataaacataaacaccatacatccaaatatattttgttctctactttgacttagtgctgttaacccctcaaatagaattctgctgattcgtgtactaatgaaaagtttgttctctcaataacttacactgytatgataatttactgtagagtggaatttagtataaggaatgtcatgatatttagatataatgatttaatttgtaaaatcatctaattataagacgggttaatatcatagaccagaggaaccgtccagcttagtatgcttttcttaataatgtggagtagaggcccagtgttttctggaaaacaaagaattggactttatatttatatctttatatttatctttatatttataatggtttatgaatgaccacttaggaatacccacgcatgtgtttttaaggggtccgagtgacagtagggcacccttcccctttcatctcaaatgttattgcttg

SEQ ID NO: 108067 - DNA, 627 bp, Homo sapiens
attatcaagaactttgcaaattggcaaagcagaaatgtttacagggtctaaataactggtacaatatataaacactaaacataagaaagctggaatggttttatattaatatctaacaaaataggcttcaatgtaagaaatattatcaggaatataaaaatgtactacataatgatagaggaggaagtgatcaggaaaaaatagcaattctaaatgtctatttaactagttactgagtttcaaatatgtggcaaaactaaaaggagaaatagacaaattcacaataatagctaggaatttcaaacattccgttctcaaaaactgatataacaagttgaaaataaaaaaacagggatatagaagattaacttactaaaaccaaaaatatcagaataaactttttattcatgggagcatataacatttatcaagatgtgccagatttctggccagaaaacaatcttcataacaactgaaaggactgaattgatatagaatatgttttctgaacataagatatttaattgcagrttaacaaaaattatattggagttgaccagatatatgaaagttaaacaacatactaatgaataagacctgggccaaataaaattataaaattagata

SEQ ID NO: 108068 - DNA, 597 bp, Homo sapiens
ttttggttaaagtgattttgatacctagcatttccttgtgattcttagagtttccatttctctcactgcattatccattctgttcttgcatcttgtcccattttttccattagaactcttagcatgttattcatagttattttacatttctgtaccataattcccaaatctctgccgtatctgagtttggttttgatggttgctctgtttcttgaaactgtgtttaattgacttttagtatgttttccatttttgtgtgtgtgtatgtgtgtggaaagctgaacattatgcactaggtagtaaaaaattagttaaatagttcttttagtgtgtgatatttctgtttatctgtctgggatttgggctttgtttactgtttatcstagtactagaggctacatttttttttatcgtcttgttattgtctttcctatggtctttgagtgatatggagactttttcttgaataagacttgaaatgctttccataataacaccatggcattatacggaacactgtaaatatagtggtaatgtatgcatgtatggggggtaagcatcctgtaagtctgtgatttgctctcagttttttcagag

SEQ ID NO: 108069 - DNA, 565 bp, Homo sapiens
gaccccaaggttaagaaaacaaaaattagctatgagctaaaggttcagggctcagctggcatgtcaattccctaaatttctatggctacaaaaaacaaacaaacaaacaaaaaaaccacacacacacaccttgctaaactctttaacaacaagagctattagacaaattgccagactcccttcctaactctgatttacaacccagaccactaaaattctgactggatagagaatctgccttacaaatactccttcctgaaaggcaactgcagaccttaagccagtttcagcaagctaatagagactgcacacaaattctttgtgttttatagtcaacctttcaatagacagagccaaattctacctcattttaatgctaaaaccccaccccaaagtgaacayggaacgttaagttacatacatgtctacccattgaacatgtgctcaaccccccctcataaatatgtatagctttacccaaaacaagctgaatatgtaagaccctattgttaatatggacccttccctttggaagagagagtgccttcagtccacaccagagacc

SEQ ID NO: 108070 - DNA, 547 bp, Homo sapiens
cctgcagagggttagcacgactgtgggtgtggggccagccaaggtaggaggcaactcccaggaccttggggcatcacacacttcaagaaccctgagcacagaaccagctgcaaacytgtcaggctggtagaggaaggggttcctgcagtggcccctgaagccacagtactggggccagtcccatggagtgtgggagggaagaagggtccaggctgctggctgaggagccactgcccatgtctgggctggaggaaggatgaagatagcaaatgggtgccagtgctatggaaacacaggggttccccctaggtcctcctggccatagcatggagagccaatcactgagttgagtattgccagggaagaaggctttaaccgggtgctacagccgaggagaacaggagataaagtctcaaatctgtctccttgactaaaattgggggattcacatagctgggaaggtggagaacagcaattcggggtggggtaagaaagtcatcctgatggatgaggggtgtggcatctcattctctggatcctgggatcc

SEQ ID NO: 108071 - DNA, 547 bp, Homo sapiens
cctgcagagggttagcacgactgtgggtgtggggccagccaaggtaggaggcaactcccaggaccttggggcatcacacacttcaagaaccctgagcacagaaccagctgcaaacttgtcaggctggtagaggaaggggttcctgcagtggcccctgaagccacagtactggggccagtcccatggagtgtgggagggaagaagggtccaggctgctggctgaggagccactgcccatgtctgggctggaggaaggatgaagatagcaaatgggtgccagtgctatggaaacacaggggttccccctaggtcctcctggccatagcatggagagccaatcactgagttgagtattgccagggaagaaggctttaaccgggtgctacagccgaggagaacaggagataaagtctcaaatctgtctccttgactaaaattgggggattcacatagctgggaaggtggagaacagcaattyggggtggggtaagaaagtcatcctgatggatgaggggtgtggcatctcattctctggatcctgggatcc

SEQ ID NO: 108072 - DNA, 575 bp, Homo sapiens
cagacatgtagctaacacctgttatcccagaactttgggaggctgaggtgggtggatcacttgaggtcgggagttcgagatcagtctggccaacatggctaaacaccgtctctactaaagatacaaaaaattagctgggagtggtggtgcatgcctgtaatcccagctactagggaagccgagacatgagaatcacttgaacccgggtggcagaagtttcagtaagctgagattgtgccgctgcattccagcctgggtgacagagagaaactgtcattgtctctgtctctgtctctctctctctttctctttctctctctctctctctctctctatatatatatatatatatacatttattaacataaacttttttactcttaaaccaaatttgcatctctgaaataaacccaactagattctcatatattttcatttttatacagtgctgtttrctaacatttttgtagaaagtcctttttctgtgtttatgagagattggctgaaaccttcttttctcatacttttctaatcaggttttgacacaactttatgccagccaccttaaattgacg

SEQ ID NO: 108073 - DNA, 476 bp, Homo sapiens
ataatattaataataaataaataaattgaagtaaaggacaaaataggagaaggaaggaaaacattaattatttctttttcttgggtctcatagtaaaatgttcttcgttatatcacttatcacatttattttagttgattatgtttgtcttcaacattcaattatactaggatactcctagcttcatggccttcttcgtagcacacagttatatccttaataattttttaaattaatgaatagatcattaaagttctatgagtataaatacttgagtaattaagacaaaagttgcttctattaacaggtaggatgtgaaatgttggaagttgtttaaagtgatgacagtgtgtgcaataaaaatcatacatgaatccctgagagattattgtcataaagcagtttcaagtgttttgtatttatttgcatcmaaataataccttttatataatgcttaaattttcacaaaacatttt

SEQ ID NO: 108074 - DNA, 629 bp, Homo sapiens
aagtagggaaaggtcatcacaggctagaggattagagagatgggatggacgttattgatgaggtgtaacagggatgtataatgtggctgctgaggaggaggaagttggccgcgaccaggttgaggatgtagatggagacagcgttcctgcacatgcggaagcccaggagccagagcacaaccgcgtttcctgtcagcgcgacaagggaaacgatgcacgtcagcaccgtgaagctcagggtctgattgtagcaaggagtctcctcagttccgttgattggtgtcagttctgtacccaagactgggatggttggatccatgctcagaaaccccagtctggtgcccctgggaacacaaaccagatgtgatcaccagctgtatcatctctgattctccccaccaccctgccatgtgggatttactgtycttactttaaggagagagaaaaagaggctcgcagagaataaatcacctatcaaaaggtgggggtcctcaaatagagtttgaaatccagttcttattgattctgaagtctgacctcactctgctgccacacaagttctgtacggacatgggagtaacttatgatcaaaacaccctcactcatccagccagggctgtggacccgat

SEQ ID NO: 108075 - DNA, 596 bp, Homo sapiens
caattatggaaatgtcacgtgagtgttcaggagatataaatggacctttcaggttcaaggttataaatgtacagtgaaaccgctgggcatggttgtgtgttgtgctgcagccacmctcagttctatgggaacaggcatggagttagtggagagctggattcaagcagggtaaaagacgaactgatacttcagcaaggacatatatgcatgacaaataaacacataaaaagatgctcaacatcactaatgtttaggacaacaaataaaagtcacgagataccactctaccctctcaatatggctaaaatataaaatactgatagtttcaaatattggctgagatttgaaggaattggaggtctcatacactgccaatgagaaagtaaaatagtagagctactctgggaaatcttcttgcattttcatataatccagcaatccagcgtatcctagaacctggaaaatgtatcctagaaactgggaaactgtgttcacttaaaaatctgtacaggaggggggccaagatggccaaataaaaacagttctggtctgcagctcccagcgggaccaacgcagaagactggtgatttctgcat

SEQ ID NO: 108076 - DNA, 596 bp, Homo sapiens
caattatggaaatgtcacgtgagtgttcaggagatataaatggacctttcaggttcaaggttataaatgtacagtgaaaccgctgggcatggttgtgtgttgtgctgcagccaccctcwgttctatgggaacaggcatggagttagtggagagctggattcaagcagggtaaaagacgaactgatacttcagcaaggacatatatgcatgacaaataaacacataaaaagatgctcaacatcactaatgtttaggacaacaaataaaagtcacgagataccactctaccctctcaatatggctaaaatataaaatactgatagtttcaaatattggctgagatttgaaggaattggaggtctcatacactgccaatgagaaagtaaaatagtagagctactctgggaaatcttcttgcattttcatataatccagcaatccagcgtatcctagaacctggaaaatgtatcctagaaactgggaaactgtgttcacttaaaaatctgtacaggaggggggccaagatggccaaataaaaacagttctggtctgcagctcccagcgggaccaacgcagaagactggtgatttctgcat

SEQ ID NO: 108077 - DNA, 513 bp, Homo sapiens
ctgtttgggcagagaccgacctagatgcaggagtttttttcataccccagtggtgcctggaactccagtgagacagatccgttcactcccctggaaagggggctgaagccagggagacaagtggtcccctgcctcaatgggtcccactcccacagagcccagcaagcaaagaaccactggcttgaaattctcactgccggcgcagcagtctgaagtcgacctggggcgattgagctttgtggagagaggggtatccgccattcctgaggctttartaggcggttttcccctgacagtgctaagaaggctgggaggtttggactgggcggaattcaccacagcgcggctaagcagctatggccagactacttctctagattcctcctcactgggcaggacatctctgaaggacagacagcaggcgcagtcaggggtttacagataaaattcctatctccctgggatggagcacgtgggggaaggggaggctgtgggcgcaaccgcagcagattt

SEQ ID NO: 108078 - DNA, 474 bp, Homo sapiens
tgttacataggtaaacgtgtgccatggtgatttgctgcacctatcaactcatcacctagatattaagcccagcatacattagctcttttctctaatgctctccctccccaccctcccctgacaggctcyagggagtgttgttcccctccctgtgtccacgtgttctcattgttcagctcccacccataagtgagaacatgcagtgtttggttttctgttcctgccttagtttgctgaagataatggcttccagctccatctatgttcctgcaaaggacatgatctcattcctttttatggttgcatagtattgaagcttattttctatgcttgctagtggcatgatcttgagtaaaatgatgagatttctagaaacctctgatgcctgtctttaaagtaaaagtaaagatattttagattacaagtataagtgaggtcatgcagtatttgtctatctgtgtctgacttatttca

SEQ ID NO: 108079 - DNA, 639 bp, Homo sapiens
aaaaaaccaaatactgcatgttttcacttataagtaggaactaagctatggatacacaaaggcatgcagactggtacactagacattggagactcagaagcgggaagggtgagagatagatgagggataaaaaagtcagctattgggtacactgtacactattcagtgataggtaccctaaaagcccagacttcaccattatacatggataaatttatttatgtaaacaaaaccacttatactcataaaactattgaaattaagaaaagagatgttcaaaaatgtaaaataatgccactcttctaattttttgtgaggaaatatatttatggaaaatatatctatcaaagaaataatatcagaaaaacttccaaactgaaggacacrtgtttccagattaaaatgaccttctgaatgcttaacacagtaaataaaaaacaggaagaggaagagataaaataaaaaatgaagacatacaaggccatgttatgaaacttcatcacactgtagatcccatgagcagcacaaggtcagagataaccagcaccatgcacagttgtgtctttccatgatgtctgacttttattggtgccatctcaatcataaaagcctcaagctacatggatttcccaaggaggc

SEQ ID NO: 108080 - DNA, 623 bp, Homo sapiens
gccacaataacaggatatagagttcaatctaatacaccccctccattaaaggggccttgcccaaatgcaactattacatagtctttttcaagatccctctttctgggagccacacaggtcaygtcagtctaagaagtcaatgggaaatcataaacggaagactagagttgcatgggcaagtgtgagtaatcccaattgcttagttcctccacttccatggctgggggtcatgcctgcaaccatggacaatatgtttaacaatgtgctggagtcccaggaatcaaggagggaaaagagtagggggtaaactcctgctgtcttcccctccaccttgggtcacaacaaaaggaaggaggttacagggatgccttttttctggcttctctttctaggtgggtaaaaaaccatcttcaacctgtactcctctgaagtgcattctgaagcactgggattcctttgaccttgaggctttggaaaaaaaagcagctcattttcttttgcaccctgttactagacctttgcaagcactgcacaatcgactcagctcttttagcagtcatatcaggtgggcccagtgggaatgattcctcaaaactaaagaaacagaccccccacaggaaacc

SEQ ID NO: 108081 - DNA, 616 bp, Homo sapiens
tgagtttttaaatgttgtttccattaaaatcaatcactcctcacaattaagccaatagtctcaccatttttgctgctatgagctaaagcatcctaaatatattgacagctgtcttcaataggatgacacaaacgggggaaggggggcagrcctaagactaaatgtcaccaaagggagcaagtgagctcctcttgctgcacctcattttcataccccagaaggcatttagtacacttttttttttgcagtggcaacatacagtaatcaatgttttgcatattacaatcaataacacacttaaatgtttaagttttgcattcttttgcaataaatattgatatattacaaactctggaaaaactgttcattggactttttgtttgcactgtgtactgtatcattcagcaaataagtgagctaaatattgtttgttacaaaacagatgtcaaataaaattatgccatatgtgctattaaacacttttcttatttttttttttcagcgaaacccaagacttagtttcagaagtgaatgtatttggcttttcaaggatttgaagcataaaagcaacatctttgaaatatttttaaacctgctggctttgtgtaatccagtt

SEQ ID NO: 108082 - DNA, 572 bp, Homo sapiens
catatttacttacgggtaagtagatatgttcaaattaaagtgcctatcttaattcyatacccttgaggcaggatctgcaatcagggtattaggaaactttattactgagatccatccacaagtctctgctcataacattgtttgatagagggacttcagcgggattttttaaactttggtttgaatatcatacttgctacctctaccaatgcaaaggacatttcctagtgcttgatctttttccttctatctaggacctatgaggtattactagactcaaatcttgatcaattatggaataactaggatcttgagttctcatttcaagatactgtccttgtaattcacttaatttgaggagaaaaaaagacaaaatagcctttataacttcattagcctcagccttgctctatatccttgctctagggaaaaagacaagcctgataagcccaaaaagtgctgggcataattaaggattggtttctgctctcaaggagctaggagagtcttgttaaagagttgtgtaatgtacaaggtctgttggtttaaatattatatttactacctatacc

SEQ ID NO: 108083 - DNA, 535 bp, Homo sapiens
ttggtgtgactatctcaaaaaggatattgtgcatttaattttcccrtactctgaaataatttagttattcactgtataagtttaaatcaagccatatagtacaatgtgttaacagaggttggcacactgtagtccctgggcccaatcttgccagtcctgaaaaatttggcggtgagtttgtgtaaataaagttttattggaacacagatccatttttacttattgtttatggttacttttgcagtacattgtgagtagtttaatagttatgacagagacagtatgacctacaaaacctgagatacttactatttggcccttcagagaaaaattttgcagaaccgtgatttatagcagggtgttttcacatgacagccaagaattaagcattcacatatttcctgagtaaaagtatggttttctgcaaatttcttattatctctaaaactcaatttattcatctgtaatagtatctgtctggtaagatttttggtaaggaataaattataggagcttatagtaactcttaacacag

SEQ ID NO: 108084 - DNA, 610 bp, Homo sapiens
tcaagttgagcttcctgcattctccttgtgttgagtgtgcatcctcatcatagcatccagcagcccacttagcatacttactgtatgaatctgtttgccagcctgtcctttgactggactaaactccyggagggcatagactgtgcattctgtggcctgacagcctcagcacccagcacagagcccaagacaaatttgatgcatagtaaacacttggatgaatgcatgtcacttagacttaagaatctatcagtcacagaagcatgtgctctctgtctttgattccatcaaacctcatgacacaaccagattataagctgttagattacagagatcatcttcaattctttaaatgtcttcctgatcccttagactaagtaggcattaaacaatcaatactaaagggaaattagcttctgggggtgtaggtaggaaggactcaactttattgagcaatggttcactgccagacactgcaaagcactatacaaatattatctcagttcatattactacttctcattcatttggagattgctggatcagcataataattgtaagccgccttctaatgaacccattttacaacggaattttgaatactaatact

SEQ ID NO: 108085 - DNA, 610 bp, Homo sapiens
tcaagttgagcttcctgcattctccttgtgttgagtgtgcatcctcatcatagcatccagcagcccacttagcatacttactgtatgaatctgtttgccagcctgtcctttgactggactaaactcccggagggcatagactgtgcattctgtggcctgasagcctcagcacccagcacagagcccaagacaaatttgatgcatagtaaacacttggatgaatgcatgtcacttagacttaagaatctatcagtcacagaagcatgtgctctctgtctttgattccatcaaacctcatgacacaaccagattataagctgttagattacagagatcatcttcaattctttaaatgtcttcctgatcccttagactaagtaggcattaaacaatcaatactaaagggaaattagcttctgggggtgtaggtaggaaggactcaactttattgagcaatggttcactgccagacactgcaaagcactatacaaatattatctcagttcatattactacttctcattcatttggagattgctggatcagcataataattgtaagccgccttctaatgaacccattttacaacggaattttgaatactaatact

SEQ ID NO: 108086 - DNA, 610 bp, Homo sapiens
tcaagttgagcttcctgcattctccttgtgttgagtgtgcatcctcatcatagcatccagcagcccacttagcatacttactgtatgaatctgtttgccagcctgtcctttgactggactaaactcccggagggcatagactgtgcattctgtggcctgacagcctcagcacccagcacagagcccaagacaaatttgatgcatagtaaacacttggatgaatgcatgtcacttagacttaagaatctatcagtcacagaagcatgtgctctctgtctttgattccatcaaacctcatgacacaaccagattataagctgttagattacagagatcatcttcaattctttaaatgtcttcctgatcccttagactaagtaggcattaaacaatcaatactaaagggaaattagcttctgggggtgtaggtaggaaggactcaactttattgagcaatggttcactgccagacactgcaaagcactatacaaatattatctcagttcatattactacttctcattcatttggagattgctggatcagcataataattgtaagcckccttctaatgaacccattttacaacggaattttgaatactaatact

SEQ ID NO: 108087 - DNA, 610 bp, Homo sapiens
tcaagttgagcttcctgcattctccttgtgttgagtgtgcatcctcatcatagcatccagcagcccacttagcatacttactgtatgaatctgtttgccagcctgtcctttgactggactaaactcccggagggcatagactgtgcattctgtggcctgacagcctcagcacccagcacagagcccaagacaaatttgatgcatagtaaacacttggatgaatgcatgtcacttagacttaagaatctatcagtcacagaagcatgtgctctctgtctttgattccatcaaacctcatgacacaaccagattataagctgttagattacagagatcatcttcaattctttaaatgtcttcctgatcccttagactaagtaggcattaaacaatcaatactaaagggaaattagcttctgggggtgtaggtaggaaggactcaactttattgagcaatggttcactgccagacactgcaaagcactatacaaatattatctcagttcatattactacttctcattcatttggagattgctggatcagcataataattgtaagccgycttctaatgaacccattttacaacggaattttgaatactaatact

SEQ ID NO: 108088 - DNA, 585 bp, Homo sapiens
ctttcagtcttggcatcaaaaagttattttttgagcactaagcaaatatgaaaaagatgggtctggactgagtcttgcttttccctgccagggtaagggttcattccagaggccaggcatgtgtgagtcctcatcgtctgcatgccaccctgtccctggataagccagtggtctacagacctaaaccactgaggccccaccccaggggacacttaagggacctttatccggaagtctgacctcatcacttctgagattcatttccaccctgccagaagcaataagaacggatgagaagatgttcacataccagtaatatttttacccatttttatattcttcttcttatggctactgcttagaaaatcaagagtrttttgctgctccaatcccagataatgaaaatacagttatagtgaaagcttctgtattaggtaaacttctgctgatttaaagagattatgctcccaattttcaaacttagtaaagagtttataaaactggatttactctaaaggggtctgaataatctgctataacctgatcatttttgcatattacaagaagctttagttaggggttggg

SEQ ID NO: 108089 - DNA, 606 bp, Homo sapiens
aggaagaaaactggagcaaacagcagatcagcaacaatgaagaatccaggagacaagyagagtgtatttggcccaaggccttaatattagtttgtgcactctgtacactgcacaaaggtgttcatgtgttacacagaaattcagcacttgctctgcttgcatgaagggtatggtgggcatagtgctggagtattggtgccttttggctttacatgttgagagttggctgattaataacattgtgcagatgatatgcaatgggagaataaatatattacttatttttaaaataaagctgattaatgtggaagttaagatttatagtattttggacaacaatgagaagttaaaaagaaaaccacaaattattctttattgcttattttgattttcttataatactttctatgttgcacttttcagtaacattaattttgaaaaagaggagagattttccaattagtggatgctttgaggtcaattttaggaagactatttggcaaatacttgataaggttatatttggtatagcctctttcttaggtgcatcaaaaattcatgcttttaatccccattaaaactaattagtgttaatgtgtgtgaaca

SEQ ID NO: 108090 - DNA, 433 bp, Homo sapiens
ccagcctgggagacaagagtgaaactcagcctcaaaaaaaaaaaaaaaaaaaaatttagaagaggccaggggcggtggctcacctgaggcacctgaggtcaggagttcaagaccggcctggccaacatggcaaaaccccgcctctactaaaaacacaaaaattagctgggcatggtggtgcgggccactagtcccagctactttacatgggaggctaaggcaggagaattgcttgaacctgggaggcagaggctgcagtgagccgagatcgcaccactgcactccagcctaggcaacagactccccctcaaaaaaaaaaaaaaaaaaaaaaaatactcaggagagaatcccaggatgtcagggtggaaatgaacatcaraagcagttcttgctcttcctgtgccctgaactacccgagctggcttctgcccgg

SEQ ID NO: 108091 - DNA, 430 bp, Homo sapiens
tttattcactatcatgagaacagctcaggaaagacttgcccccatgattcaatgagctcccmctggatctgtcccacaacatgtagaaattcaagatgagattcaccatatcaatatacaaaggagaaaatgtgggaataagggctagggaaattgttagcaacaaccatctgggtgaccttcaattttatttttatttgtatttgttttccgttttttttttttttttttttttttttttattaaaaaaatacagggtctcactgtgttgcccaggctggtctcaaacttctaggctcaagcaatcctcctgcctcagcttaccaagtagctgggactacaggtgtgtaccaccatacttagctaatttttttttttttaaattgtagagacagggtcttgctatgttgcctgggatggtcttgaattc

SEQ ID NO: 108092 - DNA, 567 bp, Homo sapiens
ggcgggtggctcttcctcacgctcgctcttggcttgctccctgcagcttttcctccgcaaccatgtctgacaaacccgatatggctgagatcgagaaattcgataagtcgaaactgaagaagacagagacgcaagagaaaaatccactgccttccaaagaaagtgagctccgacccacccccatctttagaaaggctgggtgggagcggccggtgggagggcgggaggmtgggagcggccgcgggaagaattcgggaggggggagtgcgggggaagagccgacagttgatgaatgtggcttgcaaaggttaattaaaaatggttttgcagccaacaaacacggggctttagtaatttagtaatggaatatttaatatgccatattaatatacaaacatttatccattaaaatgtatttctatttagtatattcaatatacatattttattccattgtggaataccgtgtagaatgtttatgatttgaaaagatgctttaaatgaaagccctttagtctgtactgaatcctttaatcatctccctccatctttttttttttttttttt

SEQ ID NO: 108093 - DNA, 571 bp, Homo sapiens
gttcactggcatatcaggtcatgaaacaaccacgagtgtgaactaggaaaccacaatgcatgtgagaatggcccaaacacaattgactgcaccatctggagaaaaggtgaagcctacacagaatgccaagtagaaaaatgagatgggtttatgtcaagcgaagattaacatttcatgtatcttctcactttaagcacttcgtcctgcttctggtatatcccttcaccctgagctgaagcgagttcattagttaggtggaaaacaagaggaaagccagtggaaactgacactctttttagattgtaacccctacttggggcaaacctacaggatctcaatgacagaggtttgctttcttagtaaacagccttggaaattccccctcatcttcctwcatgggtctggtgttcttcatcattttaccagtgacttatatgttgggagagaaaacctgcttgctagatattaagcttattaagagaagaggataggagttggaagggtgggagttgagtacttagcatcttgcaagacagtatcagaatttgaaagagatcagaggaaattgaaa

SEQ ID NO: 108094 - DNA, 554 bp, Homo sapiens
aggtgttcaagaccagcctggccaacatggtgaaattccatctctaccaaaagtacaaaaatagccaggtgtggtggtgcacacctgtaatcccagctactcgggaggctgaggcaggagaatcacttgaacccaggaggtggaagttgcagtgagccaagatcatgccactgcactccagcctgggcaacagtgagtaacactctgtctacaaaaaataagaaagaaaaagaaaaaaaaaagaatcagtagataatacaatagtcaggtttcaaatagcttacacttttctgcagattgttgagaaatagtcctctgttcttaaagtatggttctgaaatgctctagaagaaagwcaataggtttaagaataacatgcagcaagttaaaataatgataattgccaccattactacacgatctaacacaaaaaggatagactttgaagtcactcatatgtagatccaaacctcaagtctgccatttacttatttacatattcacatgagatgatgattatgattggtgatacagatattctcaaaatgttactc

SEQ ID NO: 108095 - DNA, 640 bp, Homo sapiens
cctttcttatgtcactctctcaaagccagggttcctgaagaaaggatttctggcgtcattacacaaaggagatcctggaaattaaggtttgccatgggttatgtccagtactggaataaacacagaattattgaggtaccttcctctgtcttctttgcaaactcctcgttgcagctccttccttgcaaacccctctgtcttccttgcaaacccctcattgtagctcaraactctgctttggcattgcctcctggtaaagcccctgctgcgtccacccttccaaccacacttcctcactctcctccgcaccactttggtgctgcaggagttacactttctgttgcaaagatcaagtagtctcgggtgacctctggtgatgtgggtgattggaaagatacttaaggcaataaggaagcacaggtatgacactaggcaggttgtagtccagcctcccagagccctgggatgtcagaaagggctcccctttgagtcagtaatggtaatgcccccttgagaagagggacctttggcccctgactcccgacggtgccatactcacagtttcacttctctccttcacctctctgtgcttccgcttctcactagttcagctgttacctccacttttgtttctttctaa

SEQ ID NO: 108096 - DNA, 416 bp, Homo sapiens
cattggtaaacctaagattgtaaaaatgtaaaacttttctctcctcaacgtcatctgtaataatgaaaccccmaaaatatttactctatgtatcctgtagttttgcacaactttgtggttacctttggccaagttacagattcttgatcagttcgatcatggttacttaccagggtcacatgacagaaagtcaacaacttatggaaaaagaacagtctttgctgctttgctcagaaggtaatatgtacaaacttgcattattgcatatatcacaatacagcttgtttctgcatagcccagtcccctacaagactagaaccgtgaggccagtggtatttcctatatttgcatgttcagcatgtaacatactgcctggtacatggtagattctcaataaagctctgttgaagttaatt

SEQ ID NO: 108097 - DNA, 542 bp, Homo sapiens
ttgctgtatgatcctgctgagccttggtttccttaactgtagagagactaagaatctctaacttacttggggattcaatgcaataataagtatcacagaccagacacagtggctcgcgcctgtaatcccagcactttgggaggctgaggtgagtggatcgcttgagcccaggagtttgaccaccctagcaacatggtgaaaccccatctctaccaaaaatacacacacacacacacacacacacacacaccagccaggcatggtggcacttgcctgtagtcccagctactcagggggctgaggtgggaggatcacctgaactttgaaatttgaggctgctgtgagccaagatggcaccactacactccagtctgggagacaggagtgagascctgtctcaaataattataataatacatgtaatatttagcattttacctggcatatcataagtacttgatatattgtagtcattataaaggtcaaatttctctctaggactgggttagaaaatatgaggaaaatagataagttcatagaac

SEQ ID NO: 108098 - DNA, 404 bp, Homo sapiens
ataactcagttagaccccatcactacaaaattagttaaataaaagacaaaaggaaattacttttggcctggtgcactggctcattcctgtaatcctaacactttgggaggcggaggcaggaagattgcttaagcccaggagtctgggaccaggctgggcaacaaaatgagactgtcactrcaaaaaaaattaaaaattagctgggtatagtggtgcacacctgtagtcccagctacttgggaggatctttttttttttttttttttttgagatggagtctccctctcttgcccaggctggagtgcagtggcatgatctcggctcactgcaacctctgcctcctgggttcaaacaattctcctgccttggctgcccaagtagctgggattacaggcacccaccac

SEQ ID NO: 108099 - DNA, 404 bp, Homo sapiens
ataactcagttagaccccatcactacaaaattagttaaataaaagacaaaaggaaattacttttggcctggtgcactggctcattcctgtaatcctaacactttgggaggcggaggcaggaagattgcttaagcccaggagtctgggaccaggctgggcaacaaaatgagactgtcactgcaaaaaaaattaaaaattagctgggtatagtggtgcacacctgtagtcccagctacttgggaggatctttttttttttttttttttttgagatggagtctccctctcttgcccaggctggagtgcagtggcatgatctcggctcactgcaacctctgcctcctgggttcaarcaattctcctgccttggctgcccaagtagctgggattacaggcacccaccac

SEQ ID NO: 108100 - DNA, 625 bp, Homo sapiens
atgctagttatttctgctttttttattcctgtattatgatggatgagggtgaggcgtctagaaaactgtcatatgaggaagcggcaacgtcttacaattttccttatatcttttctcttttccttaccaaaaaaaaaaagacatattgcattagtataaatttgaggaaagtctgtaaatttaattaacatcaaatctggtttagtggaaatcattctaataagaaatgaggtcatgtctcttgcaatgaatcatgtcattaaatttatcttctttctgaagtctttccttcatttgtttgtcatttccaagtccwtaattgttgttgattactcaaataaaatcaggttttttagttttgaaaagatatgaaactgatgctaaaaaaatctctatctctacacgtctgcttttaactttacaatattttttctacccagtttttttaaagcaaataccaagtttattttattcaaaatcttcatttatcatgtgtatctcttatttcacgggtgtcttcacatattcctctattgttttaattttctttttcttttttttttttttttaaagagacaggggtttaactatgttgcccaggctggactcaaactccagggctcaa

SEQ ID NO: 108101 - DNA, 585 bp, Homo sapiens
ggggtctgggcagcaggcgccgcggcgtaccccggggcagggtcgcgaactgagggcaggacgcgccgccccctccgcccgaacgcggcgctgtccctttaagatgatcctcctcccggggccaagcagcgcgttggcggccccgccgcagggggcagcgacatccgggctaccggactggcgacggcggcggcccctcgggcagctmccagtccccgcgggatgcccggctcaccgccgccggagaagaggagccctccaggccaaaaaaatccccccaagcccagggtcgcaccgcggcggccgcggcatgtgccgccacccgcctccgactcgcagactccggggccgggacgccggggccagcacgcgggtcgcgaacgctcagcctgcggggccgcgcggcgcgcgcccgcctcaggaccgccccacctcctgcgcgtgcccagggggcggggcgcttctgatcagccaatcagcgccagactccagggaccgcccctgaagtcttcttagggggcggcactggagggggaacttcgtcgggggggagcggcggctggctgtgggtgtggaaaagcgggc

SEQ ID NO: 108102 - DNA, 585 bp, Homo sapiens
ggggtctgggcagcaggcgccgcggcgtaccccggggcagggtcgcgaactgagggcaggacgcgccgccccctccgcccgaacgcggcgctgtccctttaagatgatcctcctcccggggccaagcagcgcgttggcggccccgccgcagggggcagcgacatccgggctaccggactggcgacggcggcggcccctcgggcagctcccagtccccgcgggatgcccggctcaccgccgccggagaagaggagccctccaggccaaaaaaatccccccaagcccagggtcgcaccgcggcggccgcggcatgtgccgccacccgcctccgmctcgcagactccggggccgggacgccggggccagcacgcgggtcgcgaacgctcagcctgcggggccgcgcggcgcgcgcccgcctcaggaccgccccacctcctgcgcgtgcccagggggcggggcgcttctgatcagccaatcagcgccagactccagggaccgcccctgaagtcttcttagggggcggcactggagggggaacttcgtcgggggggagcggcggctggctgtgggtgtggaaaagcgggc

SEQ ID NO: 108103 - DNA, 585 bp, Homo sapiens
ggggtctgggcagcaggcgccgcggcgtaccccggggcagggtcgcgaactgagggcaggacgcgccgccccctccgcccgaacgcggcgctgtccctttaagatgatcctcctcccggggccaagcagcgcgttggcggccccgccgcagggggcagcgacatccgggctaccggactggcgacggcggcggcccctcgggcagctcccagtccccgcgggatgcccggctcaccgccgccggagaagaggagccctccaggccaaaaaaatccccccaagcccagggtcgcaccgcggcggccgcggcatgtgccgccacccgcctccgactcgcagactccggggccgggacgccggggccagcacgcgggtcrcgaacgctcagcctgcggggccgcgcggcgcgcgcccgcctcaggaccgccccacctcctgcgcgtgcccagggggcggggcgcttctgatcagccaatcagcgccagactccagggaccgcccctgaagtcttcttagggggcggcactggagggggaacttcgtcgggggggagcggcggctggctgtgggtgtggaaaagcgggc

SEQ ID NO: 108104 - DNA, 585 bp, Homo sapiens
ggggtctgggcagcaggcgccgcggcgtaccccggggcagggtcgcgaactgagggcaggacgcgccgccccctccgcccgaacgcggcgctgtccctttaagatgatcctcctcccggggccaagcagcgcgttggcggccccgccgcagggggcagcgacatccgggctaccggactggcgacggcggcggcccctcgggcagctcccagtccccgcgggatgcccggctcaccgccgccggagaagaggagccctccaggccaaaaaaatccccccaagcccagggtcgcaccgcggcggccgcggcatgtgccgccacccgcctccgactcgcagactccggggccgggacgccggggccagcacgcgggtcgcgaacgctcagcctgcggggccgcgcggcgcgcgcccgcctcaggaccgccccacctcctgcgcgtgcccagggggcggggcgctkctgatcagccaatcagcgccagactccagggaccgcccctgaagtcttcttagggggcggcactggagggggaacttcgtcgggggggagcggcggctggctgtgggtgtggaaaagcgggc

SEQ ID NO: 108105 - DNA, 617 bp, Homo sapiens
agctgaaacataaattttaaaggcagaagaatgaagctatctatctgcagactttaaagtgagaaggaaaaaaaagaaataatgcttttattgtttttaaagataataaaacagtatattgatctcaagggtaaggggacagactttttaaacgaatccaaaaagcactacctataataggaaaataggtaaatttgaccacattaacattaagacagccaggctcaatggctcacgcctgtaatcccagcatttagggaggmtgaggcaggcggatcacctgaggtcaggagttcaagaccagctggccaacatggtgaaaccccatctctacaaaaatacaaaaattagctgggcaaggtggtgcatgcctgtaatcccagctactcaggaggctaaggcaggagaattgcttgaacccgggaggcagaggttgcagtgagctgagatcgcgccattgcactccaacctggtgactgagcgagattctgtctcaaaacaaaacaaaacaaaacaaaacaaaacaaaaacaaaaaaaaacattaagacttggttttatcaaattacaccattaaaagagttaaaaggcaagcctcacagatgattaagaaatttac

SEQ ID NO: 108106 - DNA, 617 bp, Homo sapiens
agctgaaacataaattttaaaggcagaagaatgaagctatctatctgcagactttaaagtgagaaggaaaaaaaagaaataatgcttttattgtttttaaagataataaaacagtatattgatctcaagggtaaggggacagactttttaaacgaatccaaaaagcactacctataataggaaaataggtaaatttgaccacattaacattaagacagccaggctcaatggctcacgcctgtaatcccagcatttagggaggctgaggcaggcggatcacctgaggtcaggagttcaagaccagctggccaacatggtgaaaccccatctctacaaaaatacaaaaattagctgggcaaggtggtgcatgcctgtaatcccagctactcaggaggmtaaggcaggagaattgcttgaacccgggaggcagaggttgcagtgagctgagatcgcgccattgcactccaacctggtgactgagcgagattctgtctcaaaacaaaacaaaacaaaacaaaacaaaacaaaaacaaaaaaaaacattaagacttggttttatcaaattacaccattaaaagagttaaaaggcaagcctcacagatgattaagaaatttac

SEQ ID NO: 108107 - DNA, 617 bp, Homo sapiens
agctgaaacataaattttaaaggcagaagaatgaagctatctatctgcagactttaaagtgagaaggaaaaaaaagaaataatgcttttattgtttttaaagataataaaacagtatattgatctcaagggtaaggggacagactttttaaacgaatccaaaaagcactacctataataggaaaataggtaaatttgaccacattaacattaagacagccaggctcaatggctcacgcctgtaatcccagcatttagggaggctgaggcaggcggatcacctgaggtcaggagttcaagaccagctggccaacatggtgaaaccccatctctacaaaaatacaaaaattagctgggcaaggtggtgcatgcctgtaatcccagctactcaggaggctaaggcaggagaattgcttgaacccgggaggcagaggttgcagtgagctgagatcgcgccattgcactccaacctggtgamtgagcgagattctgtctcaaaacaaaacaaaacaaaacaaaacaaaacaaaaacaaaaaaaaacattaagacttggttttatcaaattacaccattaaaagagttaaaaggcaagcctcacagatgattaagaaatttac

SEQ ID NO: 108108 - DNA, 636 bp, Homo sapiens
tcccaattatttacactcataaaaggatgaaacacacttaataggacaaaatcactaatctgaaatcatgtttattttccctttggaaagcagttagagacacatatccagagacataaaataatccgagttgattccccacccctcttatttcccctctgcacacctacccaggccagaaacctagcagttaatcaagtccctctttattgtccttacccatgagatctcttgttccccaatatctgtcaccagtttcttctctgttcccctcatttaggttctcrtcacctctggattacctcttgtcttgttctgctcagagccattgcacagcacaggtccaagggggcactgtgtcatttacactgactacaaagtgaatggtgccccttggggttggcaatataatggccttgcacctgccttccttcatttgccctcttagtcatcttttaatgcaaacatggtaatggtgttccatttcttaaaatcttaaaaattaatggaaatgataatgttgaagatgataataataacggcagttacatgccacatgccatgcacaatgctacccaagcattttacatttgttaatttgtttagttcttacagcaattctatgaggcaggcact

SEQ ID NO: 108109 - DNA, 442 bp, Homo sapiens
gctcacaatccactgtctaattctttactacagaaaagggattcataaaggtagggaaggcaatgggttcacacatatctaaaatagaagacaaaagttgttgcagaactaaagctgaataaataaggacccttaggtagccatttccccccttcctctagtttwccaccaccaccaataaccacaaaaagaactcaacagtgacattagtagcttaaatgttgaaataattcctgtcctttgaggttacatcagtggtagaaaattcaagaatatcttttcaaacctgtcagttaaaagataatttttccttctttgatgccatgccactattgtgactatttttttaattgaaaattattatatcctgccttgtcctttagttatctatgcacataactgcctattctaatagactttaaaatggctgatatctgaatgt

SEQ ID NO: 108110 - DNA, 583 bp, Homo sapiens
gcattaacttggaattccattatgatgaaaaggaatggtgagaggggacatcctagtcttgttcctgatcttagtaggaaaagttcaagtttatcgccattaagtatgatattaactrtaggtttgttgttgatattctttatcaagctgatgaggttatcttctagttttagttttctgagaggtttttttagtcattaattaatgttagattttgtgaaatgctttttctgtatctattgatattgattttcactgtaatgtatctgtttgatatttttcgttttgtatttttcttgcttgagatttgctgatcttaaatttgtgagtttatattttcatcatctgtgaaaactcttagctattatattccaattttttttttctgctccattctctctaacttctcctggaactccaattgtacgtatgttatgagtaatattttattggttatataaatatataaattcgatatatatatatgtacactaaagggcttactccaaaacataatgtgaacttttgtactcaatgataagcaaaagcaatctaatcaaaaattgacaaaatatttgaaaca

SEQ ID NO: 108111 - DNA, 571 bp, Homo sapiens
aatggcatggaaatagtgattgctctcatatgcattgctgagggaaatgaatcccagggtccgtgagtgatggcaccacacaattaggctgcatctcctggacatacaagatcattgcaaatgtgcaagcagtagtatgaaaggtccaaaacaacaacgacaaaatcactcaaagaggctttggtagagtccaagcagtgaataaatctaagccattgaataatgtttcacatgttttgatatcagaactgttactaaaaatgccaaaggtcacaatgaggagttaactaaggttaacagactgaagtgaggacttccttaagatgcagtgtcatcaaggtgggcagggmaagccctttggtgttaccagaaaaccttttctgcagctctgtctttaactcctcacctcttctatccccacattcattgagttgaaaatgctagcttcataagcatcacttgagtactgtctctttgcaggggtcccattaccatcacctcattatctctcccagagtagcctgctcactggtgcccagactcatctggttcaagcctatcccacccgaga

SEQ ID NO: 108112 - DNA, 552 bp, Homo sapiens
gtgaattcagatggagatgggaaatttgttgggaactggagtaaaggtgactcttgctatgctttagcaaagagactggcagctttttgcccctaccctagagatctgtggaactttgaacttgagagagatgatttaggatatctggtggaagaaatttctaagcagcaaagcattcaagatatgacagagcataaaagtttggaaaatttgcagcctgatgatgaagtagaaaataaaaacccattttctgtagagaaattcaagcctgctgcagcaatttgcagaaataataaggaactgaatgktaatcactaatacaatggggaaaatatctccagagcatatcaagaccttcccggcagtccctcccatcacaggcccagaggcctagaaggaaaaaatggtttagtgggccaggtccagggcccccctgctctgtgcagcctcaggatatggggtcctgcattccagctgctttagctccagccatggctaaaaggggtcaaggtaaagcttgtgccattacttcagagggtgcaagccccaagc

SEQ ID NO: 108113 - DNA, 571 bp, Homo sapiens
aatttaatttcttgtcctttttttttacttcttgccaaacagtctatcatcagtgaaaattcaagagatgtgtcatctggctattttctwataaaaatacactgtaaaatgaactaactgcctgctaaaacatgctctcatgtgcataatacatatattagtcatgtttttccacctcagaagttttatcttttttcatcataatatcagtgtagaaatagggaaaatatggtctggcacagtggctcactgcctgtaatcccagcactttgggaggccgaggcgggcagatcatgaagtcagcagatggaaaccatcctggctaacacggtgaaaccctgtctctactaaaatacaaaaacttagctgggcatggtatcgtgcgcctgtagtcccagctactcaggaggctgaggcaggagaatcactcaaacccgggaggcagaagttgcagtgaaccgagattgcacccctgcactccagcctggcgacacagaaagactcagtcaaaaaaaaaaaaatagggagaatatgactcagtgaatgtagataccaaaaagcccctttcaca

SEQ ID NO: 108114 - DNA, 580 bp, Homo sapiens
cttttttgtcttgtgatctctatgcataaaagttatattttatctaagaataatagttatatgcgtgtctatattgccagaaataaaatatgttcatctttaggatgtggtatttgtttagaatagaactgccattcttattgtattgactgcatgcttcaaatttagttaataacaaatataattctgtttttcttgacaactagaatgttttctcccattaatcactttatttggggggaggatcagctatagtctaatatgaattcagtgatattcacctttgttatttctttctatgggataaagttttgtgattaattaaacttttatttgtggtagagacagtctcattatattgcccaggctagtcttgaactccaagggtcaagtattcttcctgtcttggcctcccaaagtgttgtgattacaggtgtgaaccaccasgctcagctgattaattaaagtttaacattaattaacatcttttttacttgagatatattttactcctattataatgttaacaccaccctatgggctatcaacatttgaacttttgatcaatattgagttaaat

SEQ ID NO: 108115 - DNA, 573 bp, Homo sapiens
aatggccagtacaattccaatctattttccctttgtatagtggaagatagagaaaatatggaagataataactcctccagtctgggaagataacatgcttagctaaaaagtataatttttgcttacattgatattaccggtaaaaagaataaactacatttgttgtaatctctaatgacaaaatggtgattcttcatccagatacctgtgattctagaaataatacagagccaacctgcctaaattatgaaactacaagtaaaatctgctatgtttacattgcaaatggtttaccaaaccacgtgttatgagttgagaacaactctggttagtgaagacaagaagttaatattcatagatttctaactaggaagtttccttcactcacattatacttaaacaataaaattaggcaactgctgaaacaaaagaatgmatggctagttttacctttaaaatgtagattggtacaattactaatccaagtaaacacatggcactgcttggattaaaaaaaactcatattttcaaatctttattatgtacctacagtgtgtcagacacacacacaca

SEQ ID NO: 108116 - DNA, 453 bp, Homo sapiens
aatgaaaaatgagaaaatcctccagtcagccctcccttcttcatggctggggtatgcgggacaatatactcccctttcccatttgctgctttgagctgggatatttcatcacttgcaatgagaggtcttgaggaacccaggtgctaagtggctatgtatgagagattcccatcaaacacaggcacagaggggatggggcgataacacagcccagagcacttccaagccaaacatctcctatacatggtcacattttttaaaaaattagaaatatgcatgatctccaagcccacttctctgcatttttcttgagtaagtcaactcttggcttataaataattcaccatctttgaaactcacatttacatttgttaaattaaataagcaggaggccatcagcctgaggctgtctttgtactttgagtttstatgtaaggaactgcaacctcacag

SEQ ID NO: 108117 - DNA, 574 bp, Homo sapiens
tatatatacacacatatataacttgtgtgtgtatatgtagatatatttccatagctatatacacacacrtaagttatgtatgtgtatatatagatgtgtacatatacatcgatatatacatatctacatatacacacattatatatgtgtgtgtatatacctacatgtacacacacaagttatatgtgtgtgtatctatatatagatataattttctgtatattttgatgttttgacaactttaaaaacctttttgaggccaggcatggtggctcatgcctgtaatcccagcacttttggaaactgaggcaggaggctcacttgaggccatgagttctagaccagtttgggcaacagagtgagaccctgtctctacaaaaaatacaaaaattagccaggctcatgaggtggcatgtacctgtagtttgagctgcttgggaggctgagatgggaggatcgcttgagcccaaaagtttgatattgcagtgagccttgactgcaccactgcactccagcctgagtgacagaacgaagaccctgtctctaataaaaccaaaaccaaaaacaaaaacct

SEQ ID NO: 108118 - DNA, 569 bp, Homo sapiens
tatgggaggctaattcaatccactgaattttaatataggtcactgtacagaggtcaccaatcatgatagaataataaaatagtgataatttaatgataaaccagtaaaawgaagtaattatgaactaagaagaactccaaaagaaaatcactttactcaatctcagtttgctatggcagtagtatatatattttattacatgttttctactgaataattacaatattataaatacaatagtcataccatggtcccagtaacactgacaaggcctttgaaggacttggagagataaagtctgggctccaggaccacacccgtactttgggccagatcatctaggcttctattcacatagtcagttatttatttgacatattgttctgcactttttgttggaataaagaattccaaggctaactacatatagcctagctccctcattttacagatgagcaaaaagagaccagagaaaataagtccgatcaaccagattaaataatacagtaaatgaaaacttggattagaatctagttttcctaattatctagtactctatgccctgcaca

SEQ ID NO: 108119 - DNA, 628 bp, Homo sapiens
tgattatttgcaattgatggtgctgtaaaattgcaaaaagtaaatcttcataatgaaacatcaaaagtgattgacagctgtggggaatactagatttccttaagaccttaacttttgagaaaatatttatgttcatctgtttttaaattcaagtgggtacttttcattttgtctattttaatttggtattccgccaaagacaccatttggatttgatcaaaatgacttggtttctacacactcctgatttctagatttttccagagtcatcattaatttctaacgccttccctgcagattacacaatatttccttattactttgacatattttaggtgagcaggagcctgcttttcagataaaatacatcagacagaatcactattagaataaacctccaccaagaactcatgctagtttctacttcttaattgtttaatgaaatcatgaaaattgggctttacctgggctctgatttgccgtcattatttattatttacctaattagggactaattagctcataaatattgaaagaataaagtggtggcatgagggagggagacagtgtattctgctttatttttagttagtgtgtagtaaaacaaaracatgtttaggaaaggtgt

SEQ ID NO: 108120 - DNA, 563 bp, Homo sapiens
gccttgtttacaaaagagaaactttggatagttaataaaataagcatcatagaataatattaaaattaatatgtaaagaaattcaaaagataatagggtcagggaaagtgaacatgaaaataagattaatacatgaaatattataatttgcaatgtactggcactaggtggataacaaatacagttctgtgctatgtaacagacaatgggaaggctaaataagacaagttgcataaatcagtgtccataagttaaatacaaaccaattactaggtgatatacasatattccaaagactgagactggagcagatgcaaatattaatttccaattaatccctatgaagagataagcatgtcatgcaatgaacaatgctttcaatatgctcctaaagataattaaaaatgagtttcctaagactttttgtgccacattctcatatgaccaatgcagtaatgcccaaataatgttcaataaagattactccaatgggagcaggctaagcaaaacaatatagatgaggtactgtgacagaatggaccaacctaagcacacatatgtga

SEQ ID NO: 108121 - DNA, 570 bp, Homo sapiens
ttgtccctggctcctgagaaaaaagaaaaaaaaaaaacccaggtaagacgagtctctttgttatttatgagccccttgaattacgcttgagtttatgctaaggagatatctcaggatgggggctggtcactgaaatgatcaataatgtgattagaaaattggggctttgagttagcctgacttccagggataggacagggttacagattgagttcaatcacatgtccrgtgattaatcatacttacttaacaaaatcctaactctggacatggaaacttccctggatggtgaacacatcaatgtgctgtgagggtgatgcactctaattccatgaggggagggcttggaagctttgtgtttaagactttgcatttggctggtcctggtttttattctttataataaaactgtaatcataagtatagtgctctcttcagctctgtgaatcattcagtgaagtatccaactggagggcggtcatgggaaactaccacatttttagtcagttgaacagaagtacaggtggcctggtgactcccaaatttgtggctggcatttgaagtgataac

SEQ ID NO: 108122 - DNA, 407 bp, Homo sapiens
gcaggggcactgtgcagggtgtctgcagcctgaacatggagtccttctgaatggaagctgccctttgctgcyctgggagcctttgattatgcccagaagaacaggaggctttggaagcctgcagagtaggaaactggcttccctacccaccctcttgccagtaggctgcatgatcctgggaagacgcttcccctttccaatcccaattttgttcatttgttgggatccattaactgagtgagagagtcggtggttgatttctgaggtctgcttgaaaattctgcaagctggaggcttctcctaaggagttaattgttaattcaagtgtaaactgaggatggcgttaagtgtgacctcctcctgggttatttgcattttataatgcactcctaggagaccaaaattcc

SEQ ID NO: 108123 - DNA, 526 bp, Homo sapiens
gtggcccaggtgggaggcgatgtggtcatgctgggagggaagtttagatgtgtccaagagaagttgcagagagcccgcagcatgatatctgaccatgtcagtttcacaagggggacagctgcaggtggctgacacatccagacacgtgtacaccaactggggaggaaattggctagatggttttcatttgggttttattctattccttggtgttgaacaccttgggctttcctgaaagacatactttggcaatatttcctgtctcaactcaggactagggttggggatcaaaggcacccatgctactctgttttctaaagtcttttgatttctgccactggttttatctacctacgactacattcttcaaaaacagacctacttgcattgtaaactaatctaaaaattgctgtgatgggcagatattggtcatggtgtcacccttcaggtgacatattgacctattaagagggcttggtgggggcartgttttggttgtaaaaagtgagattttgataccattcaa

SEQ ID NO: 108124 - DNA, 625 bp, Homo sapiens
tctttgtcctgctacatggctatggaccgaaccttgatatcagtctcctgtcttcaaaatttgccctattgtttttaatggacttctaataaaagagtgtaaataaattaacataagtcagttcacactatagagaaataaaagagtctccaagaacattccataatcagactcttcttgacttggcactaaggataataagttggctcttctgcttcaaacttgagttatgtggtcagaacattctctcaattcttcatcaggcttggaatctttgccatctacccactaagtcatagatcacctctgatcagcattagtcccctctcctgacccagaggccatgatgataaastatgtggactgaactgtatcgatggtgcttctgatctgttgcctattgaacacgtgttccaaagggtacagaggatgcaatgagaatgtatatcctgaagatgtataatgtggtgctgggatactgaactcatactgttccagatatatcaaaactctgctagtcttaccacatctgatttaaactctttcatctttatttttcctagcttaacaaaaacctctgcaaatttccaagtctcattctaacttgtagtaaagctccaaagag

SEQ ID NO: 108125 - DNA, 580 bp, Homo sapiens
taggtccaaaaagaaaaaagaaaaagagaaaaaatggctcaaataaaattgaggaagaaagagcagtaaagagaactcaagttctaaaaggacatattttaaaatcacttttgaaaacaacaaaagtgagaattctaatgatttaaagctagaaaatctattctgccttactttatcccttctgaaaacattgaaaagtgaatttccttttaagatgtacaacaggaatagatcacattcaagtctccaaataggttttaagagaaaatgaaagtaaacaagaactggaaatacatccatacagatgacaaaagcacactggaaatacatggccacaaaaaaacaaaattataacacataatttcaacatgtgctaaaacttttaaggaaatggtagtaactattaaataagtatagcaattagaataagaaagtccctacaatgacatgagtggagaaaaaggtatctgtaaacatgcgacagaactygaaatatttgaaaattacagaaaataatttcataaagaaagcctatgctagaagagacatgtgaacaaacaaacacagaaaatcatactta

SEQ ID NO: 108126 - DNA, 638 bp, Homo sapiens
gggaacacgtagaatataaagtaaattatgtgcatatcttggaatgccaaccaaaacagctaatatcgcatataaaatataaaacaaggaaatctaaatttgtcatttcctgttttccttgatattttcaatataaatttgaaaatcaatatttttaaatattatataaatctttaaacaataatcagaatcaaatattatcaaatattggcctccttttaaaaaagtagaatgaattatcaaaaaaagaatactattacattattatataaaattatatataactttacttgtgaaaaattaaagaacatagacaggtgacttagtgtggctccaaaagaaatatagaatcattgatgttgtcacaagagggagcccacgtttttcaattaatgcaaacacattgcaagtaaatgaaatgaaagtaatttaatcctgacaaaatgtgaagctatatatkttataatataattcattattgataacaaaatataaattattattaagtatcagtattaaccattcttttttttgtttatctggatggaaagtgagaaaaactttttaatgatttaatttccaaacaaacatagaactatgatatgcaggaaggaaataaaacacgtactacagtttta

SEQ ID NO: 108127 - DNA, 662 bp, Homo sapiens
gagttccaattctgctctcaactgtattaacaacttaataatatttttatttcagtgaaaactttttatgtaaatggagaaaataatgctgtccttctakaagtggggtgtgtgtgtgtgtgtttgtttaaagatgataaatctaaagtgccacattcgggactcatacattttaattgttttataatgattatttgtgttatttttaactcaataaaacccaaacaatatctatcttttcttttcctgtgtcttttccagattttcttcttccttctcttttccccccccttttcttcctgcttctttctcccaaaaagcagtaaagtatggagaagaagcaatacatatcacattcttacagaccaactgcttcatttcattttgaccctctctggccaaagtgcatttataatttacagtaatgcaataataaatttaggataatttacaaaggcaattttggttagagtaattaaatatgaactcagagtaattataaattcaaaatgatttttaaactgtgagttagagaaaaatcagcaaaatatttagcaaaatcgtaattcaaaatgaaggaacctttgcatattttcatttaaaatttaaaatcagtttagatatctgacagttttctccaatgtgtcccaacattgcccata

SEQ ID NO: 108128 - DNA, 490 bp, Homo sapiens
ctgcatcctcacgtggcaaagagaggaagagccggtgttttttccttttgttataaggacactaatcccatcattgaggctctgctcttatgacctcatctaagcctaattacctccaaaaggctctgcctccgaataccattatattgcatactaagatttcagcatatgaattttatgtggacacaaacattcagtccataatacagacactgattaaatatttgttgaatgaataattgactgcatgaatgaatattttgtatttaagttataatcttcaagtcaggacatgcttgtattcatacataaaagtgtatcagatctataaagtttgtaagacacaagttcttacwacaaataagttagtctatgtacattttgaaagtgcatgcatgttttcctgaacaattgatatttttgtttattttgctgtgtcttgttttccttttagacatgttagtcctttttttaaatttatttttgtaaa

SEQ ID NO: 108129 - DNA, 635 bp, Homo sapiens
ccagttttcaaaatactgtgtagttactttgagatttatctacatctttgcttgtgtcaatagcactttcctttttattgctgaatactatttcattgtgtgaacataccacagttagattatctatttacctgtttaggcacattttggttatttccatcttctggatattacaagagctgctacagatatccttatacaaatccttatatatattttktgtgtgtgtgtgagggtaaataactaggcatataatggctgcatcatatgttagatgcatatttaatttctttttatgaacctgccaatttcttttgcaaagttgtaccattttacattttcgtcatcagtgaatgagagtttatttctctacatacttgacaacacttgatatagtcagactaatgtagccattctaaaagatttatagtggtatctcattgtggcttttgtttgcatatccttgatgactaatgatttcagcatgttttcatgtgttcatttggcatctctatgttttctttggtgaagtgtccattcaaatttttacccgttttttaactgaattatttattttcttaatgttgacttttaggagtccattatatagtctgggtgcaactgttttttacaca

SEQ ID NO: 108130 - DNA, 635 bp, Homo sapiens
ccagttttcaaaatactgtgtagttactttgagatttatctacatctttgcttgtgtcaatagcactttcctttttattgctgaatactatttcattgtgtgaacataccacagttagattatctatttacctgtttaggcacattttggttatttccatcttctggatattacaagagctgctacagatatccttatacaaatccttatatatattttttgtgtgtgtgtgagggtaaataactaggcatataatggctgcatcatatgttagatgcatatttaatttctttttatgaacctgccaatttcttttgcaaagttgtaccattttacattttcgtcatcagtgaatgagagtttatttctctacatacttgacaacacttgayatagtcagactaatgtagccattctaaaagatttatagtggtatctcattgtggcttttgtttgcatatccttgatgactaatgatttcagcatgttttcatgtgttcatttggcatctctatgttttctttggtgaagtgtccattcaaatttttacccgttttttaactgaattatttattttcttaatgttgacttttaggagtccattatatagtctgggtgcaactgttttttacaca

SEQ ID NO: 108131 - DNA, 582 bp, Homo sapiens
aaatagcataaacaaagtcatttaagacaaacagtgtgttttcttatggaacttcaagttttatgaccaagtgttgttggacattaaatatgggattggaaaatggcaatagtaaggttgccagcagccaaattatggagtgctttgtrtgccatcccaagaaggtggattgtattctcttacagtgccagggaattatgttttcaaactagaacagtagcataaaatctgtatttttggaatgttcctctataaacagtaccaagaattggaataaatggaaagaagaaagactaatctggagaccactgacaaagtatagagaatttatgatgaggatgtaaatgtatatgacaatatgatttaagttgctgtaaaattttaaatacgtagttattcctgctcaagttcacagtaaactgtttgaagataagatctatgcaatatctttttataccttacagtatttaccaaagcacttagtacactatgtgctcaataaatgttcttgttatatttacatatatcattatttatgtaaaattcgatctcctctatctacacaaaaacatttgtcaactc

SEQ ID NO: 108132 - DNA, 582 bp, Homo sapiens
aaatagcataaacaaagtcatttaagacaaacagtgtgttttcttatggaacttcaagttttatgaccaagtgttgttggacattaaatatgggattggaaaatggcaatagtaaggttgccagcagccaaattatggagtgctttgtatgccatcccaagaaggtggattgtattctcttacagtgccagggaattatgttttcaaactagaacagtagcataaaatctgtatttttggaatgttcctctataaacagtaccaagaattggaataaatggaaagaagaaagactaatctggagaccactgacaaagtatagagaatttatgatgaggatgtaaatgtatatgacaatatgatttaagttgctgtaaaattttaaatacgtagttattcctgctcaagttcacagtaaactgtttgaagataagatctatgcaatatctttttataccttacagtatttaccaaagcacttagtacactatgtgctcaataaatgttcttgttatatttacatatatcattatttatgtaaaaytcgatctcctctatctacacaaaaacatttgtcaactc

SEQ ID NO: 108133 - DNA, 647 bp, Homo sapiens
taagtcccagcagcatcggactgaatgacttgaaaaattgtcccactggaaatcagaagagaagcctttgtagaaactgattaaagtcgtataaaaggaaactctaagtgtattaagcaaattttattgaaagcataaatacaaaagtgtgtacacaaatcatgcatgcataattttatgatgttttaccaagtaaataaacctatgtaatcaagtggttcaagaaatagaaaactgctactgtcgagaaacctccttcatgaccttttcaagtcattacccccatttaaatggagctgctgttctgatttatatcaaaatacatttgctttgcctactttggagatttctgtaaaaggaaacaaaaaataagtgcccttttgctggtttctttcagtcaacattgtgctattgtgcttagtagcagtttatttatttttcattgccgtgtagtatttagatgcatatatcatggcttatttaaccattccacagttaatgggcatataggttgtttccagtttgggaaaattataaatattggtaccaattttttcatactgattttttttygcagctcatattagtcatttctttgggagtagaaatatttcagaataggtaatttgtacattcagctttataag

SEQ ID NO: 108134 - DNA, 629 bp, Homo sapiens
attgcatatttctccatggtgacaacgttgcttttttcttaatgcattatctgtttttaaactgtattattttggcatttattcagtgtttcctatgagatctgtactgtgctatgtactaggaatataaaggtattgcttcatttttaaagctttgaaatataagtgaatttgtatttagttttaattattaattgcaatataatgtaactgatgctgtggtatgggtacccataagttgcatacacgtttttgtttagaacacagggaagttgatgagctttatcaacatgaatggttagttttctgaaagcgtgctgaaatttacatttatatagaaagcatacttttctctttaagcatttgaattctacattttgctcccacaataatgtggctttctggataatagtaagtgaatttttaatgacaaacttacttgtattttcttaattataatgtttcttggttttgatactgttgaacatcacctccttcttgtcactctctggcttcactaacyagttctttgatccttttcctgtttaataattcataacataaaactgtaataatagttagcaggtgcttattatgtgtcaggcattgttcaaataattttatttgca

SEQ ID NO: 108135 - DNA, 629 bp, Homo sapiens
gtaacccttgtacactgttggtggaatgtaaattagtacaaccactatggagaacagtttggacattcctcagaaaactaaaaattgagccactatatgattcagcgatcctacttatggctaccgaaagaaagcaaatcagtatactgaagcgatatctgcactctcatgcttattgcagcactatttacaatagctaagattttgaagcaacctaagtgtcgatcaacagatgaatggatacagaaaatatggtacacatacacaatggagaactattcagccacaaaaagaatgagatctagtcatttgcaacaatatgggtggaactggagatcattatgttaagtgaaataagcaagagacagaaagacaaacatctcatgttctcacttagttgtaggayctaaaaaccaaatcaattgaactcatggacatacaatagaaagtaaaggatggttactagaggctgagaagggtagcagggagcttggtgggggaagtagggatggttaatatgtacaaataaatagaaagaatgaataagacctactatagtccaaaaagacaagtaaagtcaataataacttaatatttaaaaataacaaaaagagtataattggattgtt

SEQ ID NO: 108136 - DNA, 629 bp, Homo sapiens
gtaacccttgtacactgttggtggaatgtaaattagtacaaccactatggagaacagtttggacattcctcagaaaactaaaaattgagccactatatgattcagcgatcctacttatggctaccgaaagaaagcaaatcagtatactgaagcgatatctgcactctcatgcttattgcagcactatttacaatagctaagattttgaagcaacctaagtgtcgatcaacagatgaatggatacagaaaatatggtacacatacacaatggagaactattcagccacaaaaagaatgagatctagtcatttgcaacaatatgggtggaactggagatcattatgttaagtgaaataagcaagagacagaaagacaaacatctcatgttctcacttagttgtaggacctaaaaaccaaatcaattgaactcatggacatacaatagaaagtaaaggatggttacyagaggctgagaagggtagcagggagcttggtgggggaagtagggatggttaatatgtacaaataaatagaaagaatgaataagacctactatagtccaaaaagacaagtaaagtcaataataacttaatatttaaaaataacaaaaagagtataattggattgtt

SEQ ID NO: 108137 - DNA, 591 bp, Homo sapiens
tcacatcatctattctcttatattttatttctcaaactctcttaaaatactttcatttatcctcataattggttaatcccatgaaataaaatgagacaaattacagatctgggtataaaaccctatactcttgtatcatcttcttagtgaactcyctccagttactctaccttatgcttaaattgtgaattctttaagagtctctatcagtttcatatggacataaatacaatttaattaatatgcaatgtttggcttttgcagcacaattccaaatgtaacagaatgtatgaagttatctcaatgattgatatagttagctcacatgttttggagatggagttttggtaattttggtatgtatctctattcagacagctgttgacagatggaaatttggtttaagaactgttccagaacattcctccctttccaaaagatcatcaaatgcttttaataagcatattggagaagactagagagacagacatacaaaaatatccacaacaggtattttgataatagagagagaagggtaaaaagaaaaagaagaaaaaaagctctgacaagtgaagtcaggtgaattcatac

SEQ ID NO: 108138 - DNA, 498 bp, Homo sapiens
ttgtatcatcttcttagtgaactccctccagttactctaccttatgcttaaattgtgaattctttaagagtctctatcagtttcatatggacataaatacaatttaattaatatgcaatgtttggcttttgcagcacaattccaaatgtaacagaatgtatgaagttatctcaatgattgatatagttagctcacatgttttggagatggagttttggtaattttggtatgtatctctattcagacagctgttgacagatggaaatttggtttaagaactgttccagaacattcctccctttccaaaagatcatcaaatgcttttaataagcatattggagaagactagagagacagacatacaaaaatatccacaacaggtattttgataakagagagagaagggtaaaaagaaaaagaagaaaaaaagctctgacaagtgaagtcaggtgaattcatacatatcaaaaataaatttgcacattgggtagaggcaaa

SEQ ID NO: 108139 - DNA, 587 bp, Homo sapiens
gaaggtcattcaagcaacaatacacatttattggatacccactctgtgccaggcacaggatataaggatgaaaagctggtacagaatcttagcaccagatcatattagtttataaggtacacagtcaaagctccatcattgtgattctattcttccttcattaatcattaattcatttcttaacctttyactccatataaagaaagagagcaagcaagagtgattgttttgatttactcaaatttcttctctagcagaggtcaccaaaatggacagtatgatatgaaccctagggcaatccactgggtacaagagaaaaacatttgcatttctattaatattaatcacatggatatttatatttctatttccattttcatatgttttaaaatgtaaacaatatattagcatagtaatatatatgtaatttagagtagagaaatatattagtggcaacctttggagtgtgctattaagataattttaaaatgacagcaacatgatacttacagagcagattctataaagagggctattacactgagtataagcaaaataaaaaagagtgcaataggaggttctaaccc

SEQ ID NO: 108140 - DNA, 514 bp, Homo sapiens
aattattctttaactcagcttaggtgtttaatacataaaaatgaaaaaaatgcaatcttttctttgatagtttagtaggagacatacagagttttgttttgtttttctcaaataaaggctaaaagatatgagaaaactaaacatagaagtgttatatagctgccatctaatatataagaggggttggagagaatgacataatatcacacagtctgagtaaagaaacagtatttgttggggaaatgtaaaaaagaattaccaagaggagaaatgtgaaccccaaattttcatcctcctacaaaagacacaggtgattcaatggaaaaatcagagggttgaagttacaggatagagattygattccgccacaaaaaacaacccctgatctccttttcttaaatagtgatgtttaaaattaaccttgtctatgaaggaatactgagatgccagacagcctgtgtttacattctacattttgacaggtatagtaaaaagtctaattacttgggaactt

SEQ ID NO: 108141 - DNA, 527 bp, Homo sapiens
ttgtattaagcttaaactaggctaagataaaggctatattagacccatcaaaacagagtctataaacaggctattaaatgtttaaaattatccacaagcaagttagcttcttcccaggccaatcttcagcagtcttacagaagaaaacaaaattaaacaaacaacagcatagccatcacaatgcttaacaccaaatcaggggacaaarcagtagatatgacatgtaactagaaaaattagaaaagaaaacccagaagtgacagagataatggtagtagcaaaggccattttttgacttgtgaagtattattaacttttatcatatatatttataagctacaacatgatgttttgatgtatacatcaaatatgatgtatacattgtggaatgattatatcaagttaaataacatatccaccaactcacatactttctttttttgtgtgtggtaagaatacttaaaatcttactctcagcaatttttaagtgcatagcacgttattactaactgtagtggccacatggt

SEQ ID NO: 108142 - DNA, 632 bp, Homo sapiens
tgggctttggtagaaacagaatgtttgactatgggtcatgaagtcaccacgtgacctgagctgactatcatgaactgggtgctttctggcccatctagccataaactggggtgtgcacagcagcattccatcatcaaatggaagtgatatattcatgattgttcgagcaggttctaacgcacaagtaagttacgaaaagaagtggctcaaatgcttatggtcttcactcctgacaycctgccttctctcacccagcctgcaccgattccctgtggtcaattgacagaggaagagaagactagggactggtttacagatggttctgcatgatatgcaggcaccttccaaaagtggacagtggacagctacagcactaaagcccctttctaggacatctctgaaggacaacggcgaagggaaatcctcccagtggacagaactttgagcagcacaattggttgtacactttgcttggaagatgagaaggccagatatgcaattatgtactgacttatgggctatagccaatgatttggctgtatggtcagggacttggaagaagcataactggaaaattattgacaaagaaatttggggaagaggtatgtggatgggcctctctgagttgtcaa

SEQ ID NO: 108143 - DNA, 600 bp, Homo sapiens
tgtcattttaaaaaacaagtgataaataattatagctactgaatgctgctttcatgagttcttcattaaatattaggtcaataaaggatttaagttaaagggaggttaaagattttctgtgcatgcattacgatctaaaacacaaagatgacaaatttgatccaactgatatattaaaacacttcatccagaaatgacagaattcacatgattttcaaatacacatgaaaactttgacaagattrattatatgctttggcttgaggtaactcaataaatttcaaagcaatgaaactactatttttttctgactactttgtaactaaggtggaaatttagaaatatacatgtaaacaaaagcaaaagtgtaactgcattttgcttcagtgtttagacatttgtaaattttaaataaatggtaggaagagagataaattcaaaggaaacaagaagatattgtaaagtggatgatgacaaatacaagacatataaaatttttggtctgaattaaagttttgcttacaagcatatatagatcctaaactgcatataaactgtgatctattgtgtaaaataaaggaaagaataacaaattaaaaa

SEQ ID NO: 108144 - DNA, 430 bp, Homo sapiens
attcatcagaaaaattactagctatagcagctatartcttacaaaatgaatttcttaaacaataagacctcaatatttaaatcactccttgatccatgagctgcagaatacatgggttagtaggcaggaaaataagactaatctcttcagtgctctagagtgacaaggtgcattgttattgagcagtaatatgttgaaaggaatctttttatctgagcagtaggtctcaacagtgggcataaaatattcagtaaaccatactgtaaacaaatgtgctctagaccaggctttgttgtttcattaatagagcacagggagagtatatttagcataattcttcagggtcctaagaggtttgaaatgccaaatgataattggctttaacttaaagtcacctgcgttagcccctaacaagaaagttagcctgttg

SEQ ID NO: 108145 - DNA, 430 bp, Homo sapiens
attcatcagaaaaattactagctatagcagctataatcttacaaaatgaatttcttaaacaataagacctcaawatttaaatcactccttgatccatgagctgcagaatacatgggttagtaggcaggaaaataagactaatctcttcagtgctctagagtgacaaggtgcattgttattgagcagtaatatgttgaaaggaatctttttatctgagcagtaggtctcaacagtgggcataaaatattcagtaaaccatactgtaaacaaatgtgctctagaccaggctttgttgtttcattaatagagcacagggagagtatatttagcataattcttcagggtcctaagaggtttgaaatgccaaatgataattggctttaacttaaagtcacctgcgttagcccctaacaagaaagttagcctgttg

SEQ ID NO: 108146 - DNA, 430 bp, Homo sapiens
attcatcagaaaaattactagctatagcagctataatcttacaaaatgaatttcttaaacaataagacctcaatatttaaatcactccttgatccatgagctgcagaatacatgggttagtaggcaggaaaataagactaatctcttcagtgctctagagtgacaaggtgcattgttattgagcagtaatatgttgaaaggaatctttttatctgagcagtaggtctcaacagtgggcataaaatattcagtaaaccatactgtaaacaaatgtgctctagaccaggctttgttgtttcattaatagagcacagrgagagtatatttagcataattcttcagggtcctaagaggtttgaaatgccaaatgataattggctttaacttaaagtcacctgcgttagcccctaacaagaaagttagcctgttg

SEQ ID NO: 108147 - DNA, 437 bp, Homo sapiens
attaatagagcacagggagagtatatttagcataattcttcagggtcctaagaggtttgaaatgccaaatgataattggctttaacttaaagtcaccygcgttagcccctaacaagaaagttagcctgttgtttgaagctttgaagccaggcattgacttttcctctctagctttgaaagtcctagatggcatcttctttctaaagaaagctattttatctacactaaaagtctgttgttcagtatggccaccttcatctattatcttacctagatcttctggataactatgttaggacttgctgcttcacatagactttcatgtaacggaaatggcttcttttttaaacctcgtgaatcaacttctgttagctttcaatttttcttctgcagttacttgacctctctcaggtttctaagaattgaagagagttaga

SEQ ID NO: 108148 - DNA, 520 bp, Homo sapiens
gatcacaggcgtgagccacgtgcctggcccgctttcagatttctacttgggagacttgagttttcaaacagttttgtttttatcttagggagactatacattttacaactaattatatgcttcaagttgggattaaaacgttagaaactattctacagatgatagtacgtgggtaattttttaaagaatcaatttgagtctaatattattcttgtctttatgtctttatcctatatytctttttgttctcattttcctctccacttattttttcatcttatttatttgtttttgtaatattgttacttttgttgtactatttccagttttaaggttttttttttttttttttcttgaaagtgttttggaatgaaaaaatgaatgactatatcagtcatagcatagaagataggtagagagaattggggaaacactgcttgagagaaaaatattgaaatggttttaaaagggttttgtgggtaaatacattaataacctttgaccatgaaatcaacagtta

SEQ ID NO: 108149 - DNA, 690 bp, Homo sapiens
tatagtatttcataagtcaggtagcgtgatgccttcagctttgttctttttgctcggaatttcttttttaataagcattttttaaattttaattttgtgtttaaacaaattgtgggtacatggttaggtgtatatatttatggggaacatgggatgtttccttggctatccartgtcttttgtggctttatatagatctccagattttttatttctttgaagaatgacatttgtaatttgatatgcattgcattttatctgtagattggtttgaatagtatggacaatttaacaacattcattcttcaaaccatgaatacgggatgtcttttcaattttgtgtgttcccttcaatttctttcatcaatgttttgtaattttaattgtagaaatgtttacctccttggttatatttactcctaggtattttgttttatttattttttgtagctattataaatgagattttcagctagttcattgttgatgtataataatgttactaatgtgtatatgttgattttgtattatgcagctttactgaatttgttgatcagttctaaggggtttctgttgtcgctggagttgttaggtttttctctatataagattatgtcatggaaacacaggcattttgacttcctctttttcaaatttgaatgtcctttatttctttctcttgcctaatta

SEQ ID NO: 108150 - DNA, 627 bp, Homo sapiens
gatttcaatcatgaatatcaccaagttcagaagaaataatttctgaattgtctctattagaccatgatcaagaggaaaaaatgcaagactgagttttcctttagtgttgtatctgacatttttaaatagactcattttctgtggtttcatgtgacctattacatttgtcactggatggcaagaaggcctgtctctcattagcacttccggtagtacttgagaaaaatatcccrcaagaaaaaagattccatttccttcccccctggatttggaggcacttgattttttgagaatttcagtgaatatcatctctaattttagttgaatactcctcaccatatgatgttacaagatataactaacatactacccgcctagaaatatgtttctctttgatcctaaaaatggcttttgatttaaaaattggctctccattatgttaacggtgagataggatttaagtgtgtgtgggcgggcaggcgtagaagactgatctataaaagacagaacaaaagaatagatcagagttaaattgttactttttaaaatccatctcttaatcttttcccttttttctgtttattcaagccccaatgtttactgttagacctctgcagatttggagtg

SEQ ID NO: 108151 - DNA, 541 bp, Homo sapiens
tcctaaagcccagcaattcactcmggcagaattaacttccagagaaattcttacaaatgcacattgaaacatgttcaagaatgttcataacagcattatgtattcattgctaaaagttgagaaccagctcagttgtccactaagcatgtataaataaattgaaatattcttacaatacagcattatatagtgatgagcatatagtatatagtatgatccataaataaataaataaaatgaatgtatctcaaaaaatagtgttacagaagaatgactatatatataagatcttgtttttataagactaaataatagacaaatttaagtagtattttatttttgatacataaatacatgaagatttcataaagcaaagcaagggagaaagaggtcaaagaatgaacaacgaggtagcaaggcagaaaaaaaattagggagtcggacttcaaaatctctgggagcattccattttataagctatgtggcaaggacctagatgttagctttgtttttctttaaattgtgtatatgaattgtacac

SEQ ID NO: 108152 - DNA, 511 bp, Homo sapiens
atgacataactatgacaatcgcattatttactcaatggtatttttttaaaaaactaattgtgcctcagacaaagcaatatgttgagttcttgtcaatcacatgctgtaggctgcttttttctttgtaactcagaatgtgtgtcctttccagctcttttatgctttacatttttttcagaacagaaactgtagtaccatagctctgaggtcaacagtaagtacactggttcaggtctccctgagaattttcaataaagatagcacaaaagatttgaaggagataatagtttctgttcagatcttctgaggaagtaataaatgacatttgacaccatttcttatacctttaattcagaagaaaaagagagagaagaaactcatggatgtcaatagaaacagaatactgtaacaagttatcattttgattgggaaatgctgaataygttggaatttatggcatgtatccacagggcacatttcagaaaggaacttgaatttgatggaccaaaat

SEQ ID NO: 108153 - DNA, 594 bp, Homo sapiens
cttacaattgttttataattggctacagtatttagtaaagtaacatactatacaggtttgtagcctagaagcaatatttagatagataaatacttacaattgttttataatcgcctacagtatttagaaatgtaacatgctgtacaggtttgtagtctaggagcaataggctaaatgatataggcaggcggatcacctgacgtcaggaatttgagaccagcctgaccaacacggtgaaaccccatctctacaaaaaacacaaaactagccwggcgtggtggcacatgcctgtaatcctatctacttgggagcctgaggtaggagaatcacttgaaccggggaggtggagtttgcagcgagctgagattgtgccattccactccagccttgaaaaaagagcgaaactccatctcaaaaaataaaacgacccccccaaaaaagaacaacaacaacaacaaaaaaaaacaaaaacaaaaaacaaaaaacaatatagcctaggtatggagtaggctatattatctaggttagtgtaactacactctataatattctcacaatgataaaatcacctaatgatgcatttctcagaacata

SEQ ID NO: 108154 - DNA, 594 bp, Homo sapiens
cttacaattgttttataattggctacagtatttagtaaagtaacatactatacaggtttgtagcctagaagcaatatttagatagataaatacttacaattgttttataatcgcctacagtatttagaaatgtaacatgctgtacaggtttgtagtctaggagcaataggctaaatgatataggcaggcggatcacctgacgtcaggaatttgagaccagcctgaccaacacggtgaaaccccatctctacaaaaaacacaaaactagcctggcgtggtggcacatgcctgtaatcctatctacttgggagcctgaggtaggagaatcacttgaacyggggaggtggagtttgcagcgagctgagattgtgccattccactccagccttgaaaaaagagcgaaactccatctcaaaaaataaaacgacccccccaaaaaagaacaacaacaacaacaaaaaaaaacaaaaacaaaaaacaaaaaacaatatagcctaggtatggagtaggctatattatctaggttagtgtaactacactctataatattctcacaatgataaaatcacctaatgatgcatttctcagaacata

SEQ ID NO: 108155 - DNA, 590 bp, Homo sapiens
gcttggacactaaaatagtctttagtccaggttgtggtttctttggaaataaaacttcctcaaaacttaggagacttttatttcctgccttccagttttatgtgccagtaatcatatccaaagtttttttctagacataattctttttatttacttatttattttttgagacacagtctcactctgttgcccaggctgaagtgcagtggcatgatctcagctcattacaayctccgctgcctcctgaactgaaatgattctactgcctcagcctcccgagtagtagagacatggtttcaccatgtctgccaggctgatttcaaattcctgactttaagtgatctgttgcctaggcctcccaaagttctgagattacaggtgtgagccaccatgccctgcctagacataattcttaagcattctttctttcattctcatctttcatttctttctctctttttctttgctcctttctcccttccttcatttctccccttttaatggcagacaatgtaaagttattagaaaatgtcttcttgggtgggaaggtcaaacctgataatctgatcctcgctgtaagactcagtact

SEQ ID NO: 108156 - DNA, 590 bp, Homo sapiens
gcttggacactaaaatagtctttagtccaggttgtggtttctttggaaataaaacttcctcaaaacttaggagacttttatttcctgccttccagttttatgtgccagtaatcatatccaaagtttttttctagacataattctttttatttacttatttattttttgagacacagtctcactctgttgcccaggctgaagtgcagtggcatgatctcagctcattacaacctcckctgcctcctgaactgaaatgattctactgcctcagcctcccgagtagtagagacatggtttcaccatgtctgccaggctgatttcaaattcctgactttaagtgatctgttgcctaggcctcccaaagttctgagattacaggtgtgagccaccatgccctgcctagacataattcttaagcattctttctttcattctcatctttcatttctttctctctttttctttgctcctttctcccttccttcatttctccccttttaatggcagacaatgtaaagttattagaaaatgtcttcttgggtgggaaggtcaaacctgataatctgatcctcgctgtaagactcagtact

SEQ ID NO: 108157 - DNA, 613 bp, Homo sapiens
tgtatgtatatatacttcataacaacacttttcagctatatacctttagaatctgccattttgctagccgtaaagcttattatatacttaagcacagtgttagatgcttaatctgccatttcttatttcatcttcaaactagtacatgaagaaggtattcctcattttacagctgagcaaactgaatggcagaaagattaagaaacttgactgtgcttgggtagctagaaaatgacagatcaggtattataacctacctctcactttaaactacatgtaatacatgtatactcagtaggtatttgttgactgaccaagcaagcaaatgactgaatgaatggacgactgaatgaacaaaagatgtgggatcaaataggacaaagcacaagagatagaagtaaattttagaaatctcttatactttttcccctaaaaatgaagggatggaagcaagmgagaaagtttgtcctagcagtagttttgagatggaggaaatggaatttaaggacaaatatcacatgactttattcttctcagtgaacaaagaaatgaagttggagtaaggagaatgaagtgatttgatgaggggttgaagactaaagacaggagagat

SEQ ID NO: 108158 - DNA, 613 bp, Homo sapiens
tgtatgtatatatacttcataacaacacttttcagctatatacctttagaatctgccattttgctagccgtaaagcttattatatacttaagcacagtgttagatgcttaatctgccatttcttatttcatcttcaaactagtacatgaagaaggtattcctcattttacagctgagcaaactgaatggcagaaagattaagaaacttgactgtgcttgggtagctagaaaatgacagatcaggtattataacctacctctcactttaaactacatgtaatacatgtatactcagtaggtatttgttgactgaccaagcaagcaaatgactgaatgaatggacgactgaatgaacaaaagatgtgggatcaaataggacaaagcacaagagatagaagtaaattttagaaatctcttatactttttcccctaaaaatgaagggatggaagcaagcgagaaartttgtcctagcagtagttttgagatggaggaaatggaatttaaggacaaatatcacatgactttattcttctcagtgaacaaagaaatgaagttggagtaaggagaatgaagtgatttgatgaggggttgaagactaaagacaggagagat

SEQ ID NO: 108159 - DNA, 600 bp, Homo sapiens
acttctcactttctttgcagccattgatttgaaaggggtaacaagagaacagaaaataatgtgcatttttgtaagtgacaattaaaagtattcatcaaatgggaccccataattcagttctttctactggagtataacctgttagagtcagcaaaagaggatcattacaatcacttctggccaagatgggaaattaaaaaaaacccacattttgttaatctatacactattaataataaaactctattatttcttgtcaggtgcttcgttcacattatcttatttctcacaactactctacgtagtaggtatttctagcctgttttacagatgaggaaataaagacttcaaagggatggtgtgacttttaactgaatccacaatttatgtttttttccattatataatgctttgatcactccctgttagttgactatgttgacctttgacactctggtgacatgtcctgctcyactggctttggtgactgctagcataccatcccagttcctaatcaccttatgcttgtaattctgcaataacaccctagttcattatccttcttcaggtgtttctttactgtaatctgttccacatact

SEQ ID NO: 108160 - DNA, 563 bp, Homo sapiens
catcttctcagattgggtctgaaaagactttttcagaaccaacacagcacattcaacccctgcttcacagctcacacccagcaacatctctgagctcttcagtccaaagaaggcatgctacatttcaaatcttaaatattcaggatcctaatatatacaacatagggactgcagttaataacaatgtactatattcttgaaaattgctaacagtagattttaagagttatcatcacacaaaaaaggtaagtatgtgaggtaatgcatgttaattagtttgatttagtcaacactgtatacatatttcaaaacatgttgtacatgatatatatatacaatttttatttgtcaattaaaaataaattaataataagatatgaccaggcatgrtggcatgtgcctgccgtcccagctacttgtggaagggtgaggtggtgggattgcgtgagcacaggaggttgaagctgcagtaagccttgattatgccactgaactccagcttgggagctacagcaagactctgtctcaaaaaatagataaaataaaataaaataaaattttaa

SEQ ID NO: 108161 - DNA, 563 bp, Homo sapiens
catcttctcagattgggtctgaaaagactttttcagaaccaacacagcacattcaacccctgcttcacagctcacacccagcaacatctctgagctcttcagtccaaagaaggcatgctacatttcaaatcttaaatattcaggatcctaatatatacaacatagggactgcagttaataacaatgtactatattcttgaaaattgctaacagtagattttaagagttatcatcacacaaaaaaggtaagtatgtgaggtaatgcatgttaattagtttgatttagtcaacactgtatacatatttcaaaacatgttgtacatgatatatatatacaatttttatttgtcaattaaaaataaattaataataagatatgaccaggcatggtggcatgtgcctgccgtcccagctacttgtgraagggtgaggtggtgggattgcgtgagcacaggaggttgaagctgcagtaagccttgattatgccactgaactccagcttgggagctacagcaagactctgtctcaaaaaatagataaaataaaataaaataaaattttaa

SEQ ID NO: 108162 - DNA, 661 bp, Homo sapiens
  misc_feature (1)...(661): n = A,T,C or G
catgaagacatcagtatttccgtgtgaaagaggaattcagagttaatgaaggaaatactggcccatgttgcactgcaattatatttaactgagctaacaactgtttacgtatgagtgcagtgaggtcaatcttaatttcatgtgaaatttggctgggagcggtggctcatgcctgtaaccccagcaacttgtgaggttgaggtgggcagatcacctgaggtaaagagtttgagaccaacctggccaacatggtgaaaccctgtttccatgaaaaattcaaaaattagccrggcatggtggtacacacctgtagtcccagctgctcaggaggctgaggcaggagaacagcttgaacccaggaggtggaggttgcagtgagcttagatggtgccactgtactccagcctgggccacagagtgagatcctgtctcaaaacaataaataaataaataatttaaaaattcatgtgaaattcaaggctgaaggaaaataaagacctggtaaaagtgttttgtttttaattcctagaaaacaatattttacacccccaaattattttaataaagtattaatgaatatataataccaacatattcatattccatacctaaatataggaaaaattatgtgtttaannnnnnnnnnnnnnnnnnnnnnnnn

SEQ ID NO: 108163 - DNA, 438 bp, Homo sapiens
ggaaacactttactgaatagataaaaatgggggcttctatcaatgaaagacagaatggactcaggcaaagagaagaacaggaggagaatagcacaaaacatgattggaaagtctgaaaactgcattcttagtagctccttatgaaacccaatgtttccacttgcccactacaacctgcgccagcckaggcaaatctctcctctctaattttttttctcctctttcaggtggacaatttcttttttaattttttgagacagagtcttgctctgtttcccaggctggaatgcagtggcatgatctcagttcagtgcaatctccacctcctggattcaagtgattctcctgtctcagcctccggaatagctgggattacaggctcccgccatcatgtccatctaatttttccatttttattagagacggggttttgccatg

SEQ ID NO: 108164 - DNA, 635 bp, Homo sapiens
acttatttttagaataggaagtccggtttcaagaatggatcttcaaatttacagctgtctgttcccaaatcattgcacactgaaatccttaactccaagtagcaagtgaaggaaaaaatgatcagcagaaccaaatatgctgtggaagtctgaagataggaagggatcagttagagcagtggtgaccaaaagatgcttcaggaaggtaacagtttaagcttggcttccatgaagtgcaggatttgcacaatacatgatggaaatttcttccctggtttttcttcttcagaaaaattcctctggcttctaagacccgagaaggtgggatttgagaatttgaagacctcttacctttactgcctttgatagacattttttctttggttctctttgctgatgttcctggcaaagcaattgaatttggttgattagaagcctgctgatcctcttccctcgacttctctgtggaggtccactggggaacagaggagctggtcagtcattcctctagtgtccaaaccacacatacactacctgcctcaagataactcacttctaaggcaccaacgyagttactggactccactggcagtgtggattctcctctgggtatcatcttaatactcagtttcatt

SEQ ID NO: 108165 - DNA, 600 bp, Homo sapiens
aaaaaattaaaggtggaaaagggggaaacgtccctgcaaagttctgagacacatcctcctgaagtggctcttcctcctgtgggggagccgcctgccctggaaaattccactgctctccttgagggagttaatacagttgtggtgacaacttctgccccagaggctttgctggcctcctgggcgagaatttcagccagggcgaggacaccagaggcagtggaatctccacaagaggcctytggtaagcgcaacatgaagagcttattctggtccaatggggaaataagcttagtagatattaatcactggtacattttagggtatatcaaaatccctttgagggccggtgattcctggaccctgcccacagagtttctggtgcaggtctagggcaggacctgagcatttatttgcatttctttttttttttcctttttttttttttgagacagtttctcccttgttgcccaggctagagtgcagtggcatgatctcagctcaccgcaacctccacctcccaggttcaagcaattctcctgcctcagccttcctgagtagctgggattacaggcatgtgccaccatgcccggctaatgttgt

SEQ ID NO: 108166 - DNA, 600 bp, Homo sapiens
aaaaaattaaaggtggaaaagggggaaacgtccctgcaaagttctgagacacatcctcctgaagtggctcttcctcctgtgggggagccgcctgccctggaaaattccactgctctccttgagggagttaatacagttgtggtgacaacttctgccccagaggctttgctggcctcctgggcgagaatttcagccagggcgaggacaccagaggcagtggaatctccacaagaggcctctggtaagcgcaacatgaagagcttattctggtccaatggggaaataagcttagtagatattaatcactggtacattttagggtatatcaaaatccctttgagggccggtgattcctggaccctgcccacagagtttytggtgcaggtctagggcaggacctgagcatttatttgcatttctttttttttttcctttttttttttttgagacagtttctcccttgttgcccaggctagagtgcagtggcatgatctcagctcaccgcaacctccacctcccaggttcaagcaattctcctgcctcagccttcctgagtagctgggattacaggcatgtgccaccatgcccggctaatgttgt

SEQ ID NO: 108167 - DNA, 600 bp, Homo sapiens
aaaaaattaaaggtggaaaagggggaaacgtccctgcaaagttctgagacacatcctcctgaagtggctcttcctcctgtgggggagccgcctgccctggaaaattccactgctctccttgagggagttaatacagttgtggtgacaacttctgccccagaggctttgctggcctcctgggcgagaatttcagccagggcgaggacaccagaggcagtggaatctccacaagaggcctctggtaagcgcaacatgaagagcttattctggtccaatggggaaataagcttagtagatattaatcactggtacattttagggtatatcaaaatccctttgagggccggtgattcctggaccctgcccacagagtttctggtgcaggtytagggcaggacctgagcatttatttgcatttctttttttttttcctttttttttttttgagacagtttctcccttgttgcccaggctagagtgcagtggcatgatctcagctcaccgcaacctccacctcccaggttcaagcaattctcctgcctcagccttcctgagtagctgggattacaggcatgtgccaccatgcccggctaatgttgt

SEQ ID NO: 108168 - DNA, 600 bp, Homo sapiens
aaaaaattaaaggtggaaaagggggaaacgtccctgcaaagttctgagacacatcctcctgaagtggctcttcctcctgtgggggagccgcctgccctggaaaattccactgctctccttgagggagttaatacagttgtggtgacaacttctgccccagaggctttgctggcctcctgggcgagaatttcagccagggcgaggacaccagaggcagtggaatctccacaagaggcctctggtaagcgcaacatgaagagcttattctggtccaatggggaaataagcttagtagatattaatcactggtacattttagggtatatcaaaatccctttgagggccggtgattcctggaccctgcccacagagtttctggtgcaggtctagggcaggacctgagcatttatttgcatttctttttttttttcctttttttttttttgagacagtttctcccttgtygcccaggctagagtgcagtggcatgatctcagctcaccgcaacctccacctcccaggttcaagcaattctcctgcctcagccttcctgagtagctgggattacaggcatgtgccaccatgcccggctaatgttgt

SEQ ID NO: 108169 - DNA, 631 bp, Homo sapiens
aaaaatcttcttggttttctgtagattctgactttcctgtcatgagtatgaataagtatgtatttcttgagaaatgtgaaaataactttatcttcccagatttctcataattgaaaatgttggaataaatggtcctgggacagatctttccattgagaagggcagaagggaaaccctggggattcagctgggtttctgttgcatttctggtaacacacagttgtgaaaagccagtgttggccrttccccaggacagtctggggtagaggaggtcaggatttaactacttgagggtccggggaacagatgtggccacagtccttcctgactcactgttttcccttccacagtccccgtcttctcttcactgatgcacatagatgcctgaccagaggagagatttagttttcgtccaaggattatctgttatgttgcagttctgaaattcccataacgtttaggctagaacacaagtgatttcattatctccaatgtgtatggcttgatagaaatagattccattatgtagcaccttaaatccagataaaacataaggaatttctattccatgtttgtatgatcaatgttaataatctaagaaaatctaaaaagaagctacttcctatattac

SEQ ID NO: 108170 - DNA, 472 bp, Homo sapiens
tcaaaccatgacctcattgaccttcacaaccactccttatgaggcagatttaactgtccccattttcaaggtaagaaattgaggtaggtgatgtgcctgacccaggatcacacacccagtgagtgattgaactgtgatataaactaccacaccacacctttcctggagcagcgagagatgactccagcctctcctcaccaacgactgaaataggatatttctgtctaatgtagaggatagggcacaaggcttctctgtctccccagtgtcttactcctcctccatggcacactgacccagagggtttgcagccccaccccaacscaaaccctaaccctgtaataaaactggcccagggagcctctgaggctctcataaaagtttccctgtctcctaattggcaagggaaaggacaggcccactctccgcccaggcctgccttgcatctcattttggttgcttctgctaggtg

SEQ ID NO: 108171 - DNA, 435 bp, Homo sapiens
ggtacgcatgctcagaaaagacctgataaggctctaaaattccatgtcagggtgaccttcccctcaggctctgttcaagcaggtgagggctaaggcacaattgcaaaccacctggctgaatgttgaagatctgtcccaacacctacaaaaagcccatctgcaaagactgggagatattttggtatcaggtgttcaaggaaagctctttctaatcattagctgactactataagtcatggataatggaatayaattgagagtatcgagaaataaactcatatatttatgatctactgattttcaagaagggtatcaagataattcaatggagaattgtctttacaacaaatgatgttgggagactggatagctacgtgaaaataaatgaatttggactctaacagcttagtccctgggctgctgggggagggagag

SEQ ID NO: 108172 - DNA, 518 bp, Homo sapiens
atctcttagtataatgataatttggaccctgcagatagagacaaactcattgcctcgtttccaaaacacaaaaaatctttaaaaaaatttaacaatcttctcctacaacaactttactctggaaagactcagaaaggtttattaaaagactattcaacaatgagttgttggttggctaaaccaaggactggaactcaaatcttctaccttctgaccctttgctcttcaagctgtatttttgtgcctttttgtaaacaaattattacgtagttcagtttaggaattgtaakaataaaagcttttcctcccagggaacttaaaatgtaaataattgagcaagaatgtatgaagaatatggtaataatacataataaataaatatcatattgaatataattaagggccaaatgaagactacagaaaataagtactaaatattctaattaaagaggttattatgggttgctttaccagggaaggattaatgagcaaaaccaggcactgaagatggaagtact

SEQ ID NO: 108173 - DNA, 409 bp, Homo sapiens
ccacaggtggctgcccaggccctaggtgaataccaggtctcgcagggacattaggccccaggtgaacagcaagccccaagtgaatacctaggttcctggtgaacatcaggacccaggtggcactcaggccctacactcaggccaaaagtggaaatcagaacatatgtggacactcagggcccaggtggctatcaggccccaggtttatatcactttcctggtagacatcagtacccaggtagatactggacttcaggtatacatcaggttcctaggtggacacccaggccccaggtggacaccagcctacaagtggacatcagaccacaggaggacacccrggccccagatagatatcagactccagaggaacacccaggcctcaggtggacatcaggtcccaggttaa

SEQ ID NO: 108174 - DNA, 592 bp, Homo sapiens
aaaaactgagtatgccacgatacatactagcaacaacctattagtgaaaatgctttgtgatgtgcrgattcatctcacaaagttaaacctttattatcattcagtaggttgagatcactctttatgtagcatatacaaaaaaaaagacatttttgtgaacattgaggactaaagtaaaacaccaaatatttcacggtaaaaactaaaaactgtctatctgtgaaaatgctttgtgaagagtggatttatctcagagttaaacctttgttttgattcaacaggatgaaaacaccttttttgtagaatctatgaagggacatttcggagcctattgtgaactaaactgaaaaacctaatatcccagcataaaaactagaaagaagcaaaatgatttgtgatgtgtggattcatcttacagagataagcctttttgtatcagttaaaccttttttttattccccgcaagttggagtcctcccacctgaccatggggccgtgttgtggacagcttgtgcaatgaagggaatgcaaggatggagttggaagcacttcctgtgtcatctgcaccttttttggcagatgaaggtgcagg

SEQ ID NO: 108175 - DNA, 542 bp, Homo sapiens
gtggtttagtacgtgttaaatacacatttaaaaattccatttttgtgaagtaaatgtgacaaatgtatgccactaaagtctttatcatcaaagctggataactcacatgttttacgtgcagagtattgagagttcaaagaagcaaagcagattttgattattatgatgcttccaggaaaatgaatgaaatgattcmtagtataaagtttttcaaagtgcttttgaatagacttatatctagtttctaaaacatcttatatagcattaaaagcataattgagcaaaatatgattacatggaataaaattggaataaaattatgttcaaaggcggaagtaaaatgcattttataatctaaattggggagaatacatttgcaacacttaatttagtgtatcccctttatcgctggcttgctaacatagcagaaaagcaggccagtccgtctgctctcacctccatgcaatgcctgccttttgcaggtgtgcctcaaggacttcttctcattcttcgaatcatcttgcagacactaatgagcatcg

SEQ ID NO: 108176 - DNA, 365 bp, Homo sapiens
cacatttgtaaaatgttcacaatcaacgcctgtcccattttaaaatctcacaagtttttcttcatgattaacacaattcacaaaataagaaatggtatttggtcattctctgagttcaatctgtgctctagtaaatataacttgtgaggaaaaagtaaaaaggtcaagagtctaattcattttcagtttttaaaactatattttaaaaaagaatgakttgggttaaaaataaagatggcttagttttatctcccttacagtaagtagcagaaacttgagctgaaaacacatagaagctgtactcatttctattcacaaagaactgttctactgtctgtctgcaaataaatctcctcagtaaatag

SEQ ID NO: 108177 - DNA, 542 bp, Homo sapiens
ggtaagattgcagctcactacatttaccttaacctcccaggctctggtgatcctcccgcctcatcctcctgagtagctgggaccacagccacacaccaccacaccaggccaatttttgtattttcttgtagagaaggggttttgccatgttgcccaggctggtctcaaactcctgggctcaagtkatcctcccgctttggcctatcaaagtgctgggattacagatgtgaacccccgtgtctggcccttatttgggtcatttgattttacttgggataatatttgacacaccttggttactgagttaataacaacacacaacaatatcctatgagtgtcactctatgctgggcccatggctcagtgattaacatggacatttttcattatgcctcactaatcatttctaagatagatatttaataccaaacccatgtaaaaataagaaaactgaagtttagagattaagtattttggccaagggtacaatggcagagttgtacgtggatccagttctctctgttgccaaaacctaaatgagc

SEQ ID NO: 108178 - DNA, 596 bp, Homo sapiens
ctcagttgtcccttccttgcccaggacaccctttcctcacaacctggtcaaaccctcctgtgatacctgctcagattaccatgcattcaccctttgtggttttacacrcgcgtgtgtgtgtgtgtgtgtgtgtgtcttcttcatttatgcccatctaccccacaaggctgtaaactccttgatgacaagaactctttctcttttacttttcattgtagctctccagggcctaacagagagtctggcttatagcagatgctaaacaaatacttatggagtgaatgaatcaatgctctctggaggaagagatccctaatagagtgtggaaggagggatgagagtgtttcgagccaagaaatagtatgtgcataggtctaggcaaaagtgagagaaaggtgaggtgcagaatgacaatgggtaggttcattttggctggtgtatagtgggaagtggagcagtgcccgggccagctccaccagggaccctgtatgccctgctgaggagctcgatacatttctaagaaagatggttcacaatgaaaggttttaaatagacattgttcacattatctaataattcaacaacacctttaggag

SEQ ID NO: 108179 - DNA, 596 bp, Homo sapiens
ctcagttgtcccttccttgcccaggacaccctttcctcacaacctggtcaaaccctcctgtgatacctgctcagattaccatgcattcaccctttgtggttttacacacgygtgtgtgtgtgtgtgtgtgtgtgtcttcttcatttatgcccatctaccccacaaggctgtaaactccttgatgacaagaactctttctcttttacttttcattgtagctctccagggcctaacagagagtctggcttatagcagatgctaaacaaatacttatggagtgaatgaatcaatgctctctggaggaagagatccctaatagagtgtggaaggagggatgagagtgtttcgagccaagaaatagtatgtgcataggtctaggcaaaagtgagagaaaggtgaggtgcagaatgacaatgggtaggttcattttggctggtgtatagtgggaagtggagcagtgcccgggccagctccaccagggaccctgtatgccctgctgaggagctcgatacatttctaagaaagatggttcacaatgaaaggttttaaatagacattgttcacattatctaataattcaacaacacctttaggag

SEQ ID NO: 108180 - DNA, 507 bp, Homo sapiens
gatctttgtcacttaggagatcctgaaatggccctacagactgatttcacagcaaaagactttcttctcttcagtctccatactgatgaaatagccttcaggatcacagtcaagtgtgattggaggtcagtcatgtggctgcttttgggttcacagtggagtctgctattttgggggcttttactagatgtgtagataagagtgtctccctccaggtccctgggaggacagctgttctrccactaggtgggtccctggtcaagtaagactggtgctggactgagactcagaggggctgcagctaaagtatagggctgcttcaggatctacagccaagataaaaatctttaggcttgcatctggggctacaaatgagcatcctcccctgcctgattccagacgggggaggactgcctatggactgcatctgggagagaatggagttgggttgcagggctacttcaagatcagcactgggtttgaagtcagtgaatttgcctttggggg

SEQ ID NO: 108181 - DNA, 417 bp, Homo sapiens
cttaaaagttagaaggctttatcattttgtcatttttataacatctacgatcaytataactttaaaggctaaaatgtttggcactgtgttacgctgttttcttctccagtattttttggtgcataagatctagaaatttcaaaatctattttagtcattttttaatattataggagttgtgcatggataagtttctttttcaaatagtatcagaaggtcaggaaaatgataaactattctctcaataaaccttaagttttaggcagcatttgttagcaacttttgtttttagttgttttgataattaccacaaggggaacatacattcatattactaatttttaattacgaattgtagtctgcctcgtttcctttcagtttttaacaaaaatgctgtgtgtaacattctgttaaatt

SEQ ID NO: 108182 - DNA, 604 bp, Homo sapiens
tttcaagatgtagcttcttgggtgtattactctaacctgttgccttctcctgggttcctatcttaatagcatcaattgcctctcaattattttaaagccaatgtctatgtgcctttctccatgaccttttccatctagtaagttgctaaatcctttcagtttgaactctccaatatctttcacgataagaaaaatataatagtgataaagacastatgaactacccacatcaataccacaattattgagtgtttattttgaattaaaactgcgctaagcattttcctcataggatatcatttaatccccacaattccattacagtgaaaacaattgaggtaaggaaactgaagagactcaaagaacacttgcccttgatcataaaattgggaaaaggcagatacactattcaaaataaggtgtaactatctggtcatgaaaccctctgctctgcagctgcatcctttccattcccactgctagtgactcagtttgtccttcatcatgtcttctctgaactaatgccagagcctccctgcctctaactgtggcccttccctttaactgttgcaatacatctatcttcataaaagcgggttaaaac

SEQ ID NO: 108183 - DNA, 579 bp, Homo sapiens
gtcttattgatttaagaggttggcaagcatgtatttcttctcagatagattttakatccattaaggtatccatctttacatcttctccatcttgcaatatcacagtatctaatacacagagcctttcaaataataatctaagataatttattttaacaattatttatttatggaacatcagagctgatttagaccctagagacacctattcttttgaagaaagcagaacacttctgcttaagaaaacttacccagtgtgtggatggaccaataataaaaaggaatgtaaaaattacagtaaaagaggacattaggctagaaatgaggagggcggtagaatttaaataagtaggacaaggtcacattcgtgctgtgaactgaataacagagagatgatcccaagataagtactttctagtcagaggggagaaataataaaggtactagacggggaataaatatgacattttaacgtgcctgagaaatatagatgatcaatgtggctagactttggtgaatgaggaagagagtgatacaataagaggcaaaagctccaaatagacaagatgagattgttta

SEQ ID NO: 108184 - DNA, 579 bp, Homo sapiens
gtcttattgatttaagaggttggcaagcatgtatttcttctcagatagattttatatccattaaggtatccatctttacatcttctccatcttgcaatatcacagtatctaatacacagagcctttcaaataataatctaagataatttattttaacaattatttattkatggaacatcagagctgatttagaccctagagacacctattcttttgaagaaagcagaacacttctgcttaagaaaacttacccagtgtgtggatggaccaataataaaaaggaatgtaaaaattacagtaaaagaggacattaggctagaaatgaggagggcggtagaatttaaataagtaggacaaggtcacattcgtgctgtgaactgaataacagagagatgatcccaagataagtactttctagtcagaggggagaaataataaaggtactagacggggaataaatatgacattttaacgtgcctgagaaatatagatgatcaatgtggctagactttggtgaatgaggaagagagtgatacaataagaggcaaaagctccaaatagacaagatgagattgttta

SEQ ID NO: 108185 - DNA, 597 bp, Homo sapiens
gaaagcagccagcattgtccctaccactgcatacagcccagaaagtgacaggtagctttctaccacataataaagctgatgggatggctaacagcttgaacagcattaattcatctttctgctgtgggggctttcaccagagattaatcatacactccctccaacttgccttctcatcttgctgtgtttctgtttaatttctctttcttactatgttctcctttgcaatctgttgcygctgttgcattgaacccccttccctctcctcctcacatctggacatcagatcgtcagctgcctccaagcctggttcatgcactccctgcctgagacgtcagctgagccatttatgaactagatgtcactcaagtctgcaagctgtgctccagggtatcatcctgtcttagagactccaagttcttgcagctgctgagtaaaaaaggagaatgagatgtggcttcaagctattaccctccagatcagaatgccacgttccatatagttctgaggcttgacatgtcatcttatcaaactaatcatttcgtcaaggatgagcataatagcgaacttccacaagatgggttgaaaacaccaaga

SEQ ID NO: 108186 - DNA, 350 bp, Homo sapiens
ttagttgtgaaagtgcaatgcatgaactaagtactgtaaacttgaaagacggtgatgttaaggaatggaggttagttcacaaaacgtgtatgactttttcaaggctagagtgctatagctcaataaagagatgtcaatactgcctcagactactttaaatcaaaaccattatatttctagtagcagtactaccaaggtaactttcttagctggaattggcttcattctctcgagaatttcaagtaccaaattccatttatgcctcttctgacttaaaatgacatccagggmcattttggtcattttagtgacccaataacaaccagaaattcttgacatatgagcagata

SEQ ID NO: 108187 - DNA, 599 bp, Homo sapiens
ttcctctttccctctgtctgtattcaattgttttttctttccttatttttcagcagttttactatggtgggctcaaaattagtagattttcttaaatttgtagattaatggctttatccatttggaaaattttcagctcttccacactaytccattctctctctgcttttcttccaggatgccaattgcatgcatcccaaaaatgttttacagctttatgtcttatgctcaggtctttgggttaatttttgaatataatgtaatggaaggtccagcttcatgattttgcatatgaatttccagttttcttagaatcattagttaatacgactgtcttttttccattgagtggttttggcatctgtgttaaaaattatttgaacatatatgagggcttatttctggactctattctattctatgtatctatgtgcccgtttttagacctatagcacatagtttactgtagtaggaagttttgaaatcaagaaatacgtgttctctggtattgttctttgttaagattgttttggcaattcgggagggcccttgagattccacgcaaatttttggatagattttttatttctgtaaaacac

SEQ ID NO: 108188 - DNA, 592 bp, Homo sapiens
ggtgggctcaaaattagtagattttcttaaatttgtagattaatggctttatccatttggaaaattttcagctcttccacactattccattctctctctgcttttcttccaggatgccaattgcatgcatcccaaaaatgttttacagctttatgtcttatgctcaggtctttgggttaatttttgaatataatgtaatggaaggtccagcttcatgattttgcatatgaatttccagttttcttagaatcattagttaatacgactgtcttttttccattgagtggttttggcayctgtgttaaaaattatttgaacatatatgagggcttatttctggactctattctattctatgtatctatgtgcccgtttttagacctatagcacatagtttactgtagtaggaagttttgaaatcaagaaatacgtgttctctggtattgttctttgttaagattgttttggcaattcgggagggcccttgagattccacgcaaatttttggatagattttttatttctgtaaaacacctcattgaaattttgataaggtttgagggaatctgtgagttcccttgagtagtgttgc

SEQ ID NO: 108189 - DNA, 592 bp, Homo sapiens
ggtgggctcaaaattagtagattttcttaaatttgtagattaatggctttatccatttggaaaattttcagctcttccacactattccattctctctctgcttttcttccaggatgccaattgcatgcatcccaaaaatgttttacagctttatgtcttatgctcaggtctttgggttaatttttgaatataatgtaatggaaggtccagcttcatgattttgcatatgaatttccagttttcttagaatcattagttaatacgactgtcttttttccattgagtggttttggcatctgtgttaaaaattatttgaacatatatgagggcttatttctggactctattctattctatgtatctatgtgcccgtttttagacctatagcacatagtttactgtagtaggaagttttgaaatcaagaaataygtgttctctggtattgttctttgttaagattgttttggcaattcgggagggcccttgagattccacgcaaatttttggatagattttttatttctgtaaaacacctcattgaaattttgataaggtttgagggaatctgtgagttcccttgagtagtgttgc

SEQ ID NO: 108190 - DNA, 502 bp, Homo sapiens
tccccagtgtgtgtcctcttgtgccgccccagggaggagttctggttgaaggccctcccacagtcctgacactcatagggcttctccccagtgtgaatcctccgatggacggtaaggtgtgtactatggcagaaagacttcccacattcggcacacttgtagggcttgtctccagtgtggatgcgctcrtgctggacgagggaggagttctggctgaaggctttcccacactccttgcacatataaggtctttctcccgtatgaatcctcttgtgcacggtgaggtgtgcgttatggttaaacgacttcccacagtcagtacatttgtagggtttgtcctgcacctggctttttgtgagttccgtaattggaatggcctgactggaatctctgtgacagtcactgttttcaccgggctgttttcctggggagcctgtctgctgactgactaagctggagttatgttctgagtctgtaatctgtgagtcgtaagtatacaaat

SEQ ID NO: 108191 - DNA, 561 bp, Homo sapiens
ttttttgcattgaggtttgagacatactccagatatgagtcctttgtcagatatgtagcttgtaaatatttagtccatgtgtctagcttgtcttttcaccatttcaacagggtctttggtggagcaaatgtttttaattttgatgaagtccaatttattaacttttattaacttttttcttttctagatgatgctcttggtgttaagtctaaaatctctttatctaastcacagtcaccaagtgtttctcctctgaaccttcaggataatatatactaaagactctcgataaccttattttcctccacagagcactgagttgtgtgttctggcaagtagcgtctggccagtcacctcaatcctgtgaaggcttctttttgcttttgttagtaccagtcttttcttgtttttcctttagccctaggatgtagcccttagtcccagtacatgattcttagtcctaaggtgtggcatggcccttctcacatttcaatggaaagttcaaggtgtttaccaagcccctcttaacttggtgagacttcacctccaaactctatctcc

SEQ ID NO: 108192 - DNA, 579 bp, Homo sapiens
tctgtgcttgacttttcagtctcttaacagggccttttacagagcacagttttaaattctgatgcgttccaacgacttttttctggtatggatcatgctttgagtgacatgtctgagaaattttgcataactccaggtcatgaagattttcttgtagttggtcttttaaaagttttatactgtcatgttttacatttagatctacgatccatttgagatgatttttgtataatatgtgagatttaggtccagattcagttttatgcatacggatatccaattgtttcaacatcayttatagaaaatatcctccttctttcattgaaattgaattgccattgcaatttgacaaaaagccaactgagggtatttgtaaggaatatatttctggacagtggttctgttccattgatcattatgtctgttcttttatcaaaactgtgccatattgatttctatagctttgtaatgagtcttaaaatcagatagtgtgatttttctaaatttattcttctttttcaagagtgtttcagctattctttttttttttttgcctttctatgtgaactttaggatctg

SEQ ID NO: 108193 - DNA, 579 bp, Homo sapiens
tctgtgcttgacttttcagtctcttaacagggccttttacagagcacagttttaaattctgatgcgttccaacgacttttttctggtatggatcatgctttgagtgacatgtctgagaaattttgcataactccaggtcatgaagattttcttgtagttggtcttttaaaagttttatactgtcatgttttacatttagatctacgatccatttgagatgatttttgtataatatgtgagatttaggtccagattcagttttatgcatacggatatccaattgtttcaacatcatttatwgaaaatatcctccttctttcattgaaattgaattgccattgcaatttgacaaaaagccaactgagggtatttgtaaggaatatatttctggacagtggttctgttccattgatcattatgtctgttcttttatcaaaactgtgccatattgatttctatagctttgtaatgagtcttaaaatcagatagtgtgatttttctaaatttattcttctttttcaagagtgtttcagctattctttttttttttttgcctttctatgtgaactttaggatctg

SEQ ID NO: 108194 - DNA, 530 bp, Homo sapiens
tatttgcactctttcagtgaatgccagcaaatctgttattccatcggtaaaatcgtattgttgctctcctgttaatgtcatatttatagaagtatcatgaggatgccaaatgctaaaaatggagatgatctagtaactagaaatccccaccgcagggagcacacacacctatctccctgcatcctaacaatgtgatgtgttttggaacacagacattagaacttcatgaagtttkaactgttgagtctttcccaagcatcatcaagttacgatttaggcaatatacaactgaaatgcattcattcatcatgcataggcacaatcacataaatatcgcacaaaatatgtcccgaacagaaacccagaggtacaaaaacatatttcactttgtaaagaagtctgtgagaaaatatagctctgtgattgtatagacacgtttcctgataatacattgacattcacgaacagtagattgcactgcagtttgtacacattttaagtttcataaacttctccttgattttcaaaga

SEQ ID NO: 108195 - DNA, 530 bp, Homo sapiens
tatttgcactctttcagtgaatgccagcaaatctgttattccatcggtaaaatcgtattgttgctctcctgttaatgtcatatttatagaagtatcatgaggatgccaaatgctaaaaatggagatgatctagtaactagaaatccccaccgcagggagcacacacacctatctccctgcatcctaacaatgtgatgtgttttggaacacagacattagaacttcatgaagtttgaactgttgagtctttcccaagcatcatcaagttacgatttaggcaatatayaactgaaatgcattcattcatcatgcataggcacaatcacataaatatcgcacaaaatatgtcccgaacagaaacccagaggtacaaaaacatatttcactttgtaaagaagtctgtgagaaaatatagctctgtgattgtatagacacgtttcctgataatacattgacattcacgaacagtagattgcactgcagtttgtacacattttaagtttcataaacttctccttgattttcaaaga

SEQ ID NO: 108196 - DNA, 530 bp, Homo sapiens
tatttgcactctttcagtgaatgccagcaaatctgttattccatcggtaaaatcgtattgttgctctcctgttaatgtcatatttatagaagtatcatgaggatgccaaatgctaaaaatggagatgatctagtaactagaaatccccaccgcagggagcacacacacctatctccctgcatcctaacaatgtgatgtgttttggaacacagacattagaacttcatgaagtttgaactgttgagtctttcccaagcatcatcaagttacgatttaggcaatatacaactgaaatgcattcattcatcatgcataggcacaatcacataaatatygcacaaaatatgtcccgaacagaaacccagaggtacaaaaacatatttcactttgtaaagaagtctgtgagaaaatatagctctgtgattgtatagacacgtttcctgataatacattgacattcacgaacagtagattgcactgcagtttgtacacattttaagtttcataaacttctccttgattttcaaaga

SEQ ID NO: 108197 - DNA, 655 bp, Homo sapiens
  misc_feature (1)...(655): n = A,T,C or G
agagaataacaggtaagtgagggtttagagatttgaactcaactcttctaattccaaataaactttttttcacaattacactatgctacctctttaatcaaacgtactccaaaaattcagatgtataatgtccccgngtgttccccctcaaaaacattacccagaaagaaaatgaagtcagaccctatgctgacttctagccaaggccactgcaagctgacggttcacaagatgcactcttttcttctggaaatctgtcccggaatattcggtaacattgacatgactgccataatttgcagaagcaaagttcttttcctcctcttaaaactcccaaacagtgtttagtttaygaaaattctcagggtgtgatcaaagaaaagccccctggatgcgccgtggatttcacacagtacttctgccacacatctgcaatcagcgcctggtccctgaggtatctctgttgcctctatcttctatttgtccgtatacatgggatgaggaaagggtccaataattttcttcccaatttatatgaaatgatgctaataacttattaaacattgtttctccttggattctatgtatgagcaccaggtctagtttaccatgtagtgcacacttgtcttatcctgagagttgctaccacggtatg

SEQ ID NO: 108198 - DNA, 453 bp, Homo sapiens
  misc_feature (1)...(453): n = A,T,C or G
aaatccactattattgtattgctgtttctccctttgctgtccatagaagcagtcccagtcaatttctacagctttacctcctgcaatagccaagcatctggggccccaggccacaaacttggggtaggggagtctttctttctaaytgcccagctaccttgtcctcccaagtattcccatggccgtgcggctgggtgaaataaaaatcccggtggcccagtggtgggtgcctgtccttcagaacactcacctgaggagcacgtgcaggtgtgtatttcggttcatgttcattcagctgaattgattgtggcctgactaggaaaaaaaaaacaaaaccctttctatggtgaatagcaaatagagttgaagtcttcaacacctttgtgctcatttaatatgtatgtttttctggttacaaaactgacagnnnnnnnnnnnnnnnnnnnnnnnnnn

SEQ ID NO: 108199 - DNA, 453 bp, Homo sapiens
  misc_feature (1)...(453): n = A,T,C or G
aaatccactattattgtattgctgtttctccctttgctgtccatagaagcagtcccagtcaatttctacagctttacctcctgcaatagccaagcatctggggccccaggccacaaacttggggtaggggagtctttctttctaactgcccagctaccttgtcctcccargtattcccatggccgtgcggctgggtgaaataaaaatcccggtggcccagtggtgggtgcctgtccttcagaacactcacctgaggagcacgtgcaggtgtgtatttcggttcatgttcattcagctgaattgattgtggcctgactaggaaaaaaaaaacaaaaccctttctatggtgaatagcaaatagagttgaagtcttcaacacctttgtgctcatttaatatgtatgtttttctggttacaaaactgacagnnnnnnnnnnnnnnnnnnnnnnnnnn

SEQ ID NO: 108200 - DNA, 453 bp, Homo sapiens
  misc_feature (1)...(453): n = A,T,C or G
aaatccactattattgtattgctgtttctccctttgctgtccatagaagcagtcccagtcaatttctacagctttacctcctgcaatagccaagcatctggggccccaggccacaaacttggggtaggggagtctttctttctaactgcccagctaccttgtcctcccaagtattcccatggccgtgcggctgggtgaaataaaaatcccggtggcccagtggtgggtgcctgtccttcagaacactcacctgaggagcaygtgcaggtgtgtatttcggttcatgttcattcagctgaattgattgtggcctgactaggaaaaaaaaaacaaaaccctttctatggtgaatagcaaatagagttgaagtcttcaacacctttgtgctcatttaatatgtatgtttttctggttacaaaactgacagnnnnnnnnnnnnnnnnnnnnnnnnnn

SEQ ID NO: 108201 - DNA, 623 bp, Homo sapiens
atctgcatgaaaaaattttgcatatttattggtgtcataatatctaccaaatcagggccatctagagatatctacaactgtgactcaacataaaggcatatatttttgagcaggaccttcagaggttctaaaagcttattctattacaaagtttcacaatatgctcctactttggatcttgtttctaactccatagcagcgyatgtcactaaagaactaatgggggcattatcaaaagagaagtctgacctctgtcccaggttagcccccaaggtcttatcacagctttttcatgtgagctcccagtaccctatggctgcggcatcccctataagaatatgttctgtgttacgaccaggtttccttctgcatcctgtaccaggattatcatgggattactccctagattcatcatcagtgaatgtgataaataccaaatggccagaaagattgcaaactacctgtgtgaaaagaggtcaaaggtttcaagggaaggggagttcagttatcatcaggcagctttttaaaagctcattaaagcacaatcatacagggttataacagtctaattctaaagaacagaggagaaactattgatcaataaactttgacttaaaatcata

SEQ ID NO: 108202 - DNA, 596 bp, Homo sapiens
actttcatgtagtaaaggctcaacaaaagttacgtattttaaattccttaactccaccccmaccatttgccccattctggcatgcatttttattgcaggtcattttaatgacctagagtcattcattgatccttcatacatttgtttttgttgttttttctttgatatgattcattttttcttttttcgttttagcaaaacccaagtatcaagttctgcactcagtactgagataattgcactacacagagatgagtgcaatatggaagctaaacacaggatgctttgaagaaaagaagaatcccttctattttgtcctgtaccttcctgtaccgcataaccatgctcagaactcaaagaacacacagcctttctcaagattatggctggatggaaaaatttctaataaagaagtgaaagcaatttgccacattaaaatcttagcaagtccactggccctcagtgcctcctcgagaaccagtatgagtcagatgttaccaaaacacaatggagacaacatcaaggctgtacacaacctaaaagggatattttacattgaactaatcttttttttttttagatggattctcgctgtg

SEQ ID NO: 108203 - DNA, 596 bp, Homo sapiens
actttcatgtagtaaaggctcaacaaaagttacgtattttaaattccttaactccaccccaaccatttgccccattctggcatgcatttttattgcaggtcattttaatgacctagagtcattcattgatccttcatacatttgtttttgttgttttttctttgatatgattcattttttcttttttcgttttagcaaaacccaagtatcaagttctgcactcagtactgagataattgcactacacagagatgagtgcaatatggaagctaaacacaggatgctttgaagaaaagaagaatcccttctattttgtcctgtaccttcctgtaccgcataaccatgctcagaactcaaagaacacacagcctttctcaagattatggctggatggaaaaatttctaataaagaagtgaaagcaatttgccacattaaaatcttagcaagtccactggccctcagtgcctcctcsagaaccagtatgagtcagatgttaccaaaacacaatggagacaacatcaaggctgtacacaacctaaaagggatattttacattgaactaatcttttttttttttagatggattctcgctgtg

SEQ ID NO: 108204 - DNA, 575 bp, Homo sapiens
gccatacatagcacaaaaacgaaaactatacatcaatatcttttgtgaagttagatataaaagttatccacaaatagttaacaaatatcactttctattaaaattaactcaaattggatcacaaacaaatataaaatgtaaaactctaagcctccttcaggagaaaaataggaggacattttcaggatccatagttagacaaagtttttaggatacaccaaaattaagaaaaacaaatayaatctgataaattaatcttatcagaatgaaaaactttcatcctgagaaaaaccctgtgaagagactgaaaagataggttacagactgtcagaaaatatttgcaaccacatatttgacaaaagactgatatcttgaatatataaaaactctcaaatctcatcagtaaaagaaaaacaaaataagcaacaaaaataaaccatttcatttagaataaggacaaatgaaatgaagaaacattttactaaagaagaaaaataattgttgaataagcatgagatgttaaatgtcataagtcaatagaaaaatgcatattagagccataatatgatatcatt

SEQ ID NO: 108205 - DNA, 529 bp, Homo sapiens
tgaattcatttattaagttccaacaggttgttttatgctcactaacattttctgtatatgtaagatcatgtcttatatacggacctatctgcaagtaaagacagttttgattctcctttccaatatttatttattttattgtcttttgtggaatagaaatgagagtggataatcttgtcttgctcctgatattaacattagtgtttataccagcatttcctgtttcttgcctgtctcatgatttttgttgaaaaatagacatttaaatagtgtartttggcaagtctggaaatcaaaattcctccctatctccaggatttgttattgttgcttttttttaaagtgacttttgagtcaattctgtaaagcctgtattctttttcatgtgtggccactctagtctctactcagttaacttaggtgacagcaaattactggacagagattttgttaaaagtctcacttgactcaatctctcatcatttgcttagagcctttgtgtgcatattggggcaaactgcaacactgg

SEQ ID NO: 108206 - DNA, 375 bp, Homo sapiens
acaacccagagagttaaatgcattggggaaggtagccagaccacacctgtggctttarggggattcagcccactggttacaacctagcaagcagggtgccagggaataaacatcctatctcacttcttccactctccaagcatctatccctggtgcctctaattggcccaaaggggaagtccatatcagtaatacaccccacacttttcccaacagggaagcacccagtttgggaacagtggatttgaaggtacagaaagaagaccttcaggacatcttctcctctatagtttgtgactcatctttaacatatttgaaatgataccaaactctgacaaaacctttgctatttaagcccctcttgaattacccttg

SEQ ID NO: 108207 - DNA, 522 bp, Homo sapiens
tatttgaccattgactcttctagtcatgattcagtttactggtttacttggctgaaattgaagtgtgtctggagagaatctccctggtagcaatgtttttgcaaaatattcattgctttaaacaaaacaactatatgtttctggggtccatttgcaaaaagaactgtataagtactcacagttgtcaagacagttgccttgattcattcactcattcaaatatatttattgcatgcccactatgtgctagttttctaagcagggggtccacagaatacacagaaaaccgtatcctcttagattgtgcatacatttagactgtaaattatggcaaaattaattaaaagggaaaggtaaatttgtggaatgtcaaatggcaataaatactacagagaaaaatraagcagagaatgagacaaggagtattagaaaacatgcttttaaaataaaatagtctggaaatgtttcaccgaaaagttacattttagtaaacagtttgccatggagtgtggcatgttgaca

SEQ ID NO: 108208 - DNA, 588 bp, Homo sapiens
tactacaattgtatgttctccaacaaaaatttataaagaaagtaaattaccttcctatgatgtatttgaaacttctctatcggtataaaactttgcactttatttgtagtaacctggatacaattctttcttcagaatatctaaaatgtcaactagacttgttagcatcaaagacataatatgacatgttttgtctaacaccttattttaatttgtgcgtgggtaaacaattcactttagtgaatttagtaaataatgcagttgtttgacattcaattatgcatttaaattattttatatttacccttatttcttatctgttgtttacattttctgtcatcattgattctcattctttattattacaggcaattcagtgccacaaatgtcatgatttgtttaatttctaaagttcttccattatgaaatctacaaattatttacttttcaaacaagataaaaatattttgytttgtacacttatacaaagactctccatgttgttatttttaattctatagacttttaaagattttttaataaatttgatttattatcactatcttagatttgtttctattaaatatt

SEQ ID NO: 108209 - DNA, 532 bp, Homo sapiens
caaacttgaaaccttccatttcttatttggctgttatattccacagtttgaagtgtaagagtgtacctctttcccatttaaactgttgctggtatttttttttttttttactgaatctttattatattttgtgcattatattaactagtggattcaggagattctaacagtttaatctagtcttccaacttttcccagatattataaagactatagaggcttaaagtagasagatgctcataaatggagtttggatataatttcctaagcctcgtgaaccttatcctgttatgaacttcagtgaatgaattcatgccacagaaatagagatggatatttaatgttctaaatcattcaagcaagataatcttggcttttccttcctttactcccctagaaacatacttgtttccagaaggtataagagctaatcgcaaaaagatgtctcaactgtacattaatattcttagatgttgaaataagctggtgatcaaaaactatgttaaataattggcaagtaatagctagagaa

SEQ ID NO: 108210 - DNA, 649 bp, Homo sapiens
attatcaaaacataagaaacgtgaataattattccccctcttatgctagcaagtgattttatgagtaattacatgaaagatacctgtaattcccatctctgacccgaattcttcctagtgactttcctctcctgtttcagtaggcaccaagtgtcacttaatacatcaaagatgctatgttcactcaataatattgaaacagtcatttataaattgtgaaggaggctttaaaaacrtgttttgataaaggaggaatttttcctataaaaaataaaactaaaacaaagaaagattcctcacctgatgcattttgtgtgaaaatactgctatttcactatgatacagtaaggctctgtcacttactgctgaattcatgatactgtaattttttgtcatttattatttatagacttccttcattgtgcacagagtccacaaaacagaagatggattggctagggttctaaatagctcctaaggaatgagtgggacccgaaaaacacttgactacttaattatattaataacctgcaattgcaggtgtaaaattcaacaaaaattatatactctagttttttaaaataaattttgaatacctgggataaagtaaataggtatacaaatactgtatttagttaatctatgatca

SEQ ID NO: 108211 - DNA, 630 bp, Homo sapiens
ctttaaatgtgtttaaaatatattttattttaaataaacttaaaaaaaacaaataaagaataagccttgtcttttgtgatatacatgttgctcttcttacatcttcctctgagaaaacattacattgcatartttactataagtgggtagcatagtgagcatgttcattaaaaaaagaagcgattttttcactaatcttattttctcattgagcttatatagatttttaagccatctgattccaattggtgtttcagcacaaatttgagcacagttttcttcacctgcatgaactatttttataaaatatgaattctatgaatcttgcactgtgtactagaaagaaaacacttccagtcaaatttatttgaacccttttttatgttaaagtagccaattacatttttgagaagacgtaatttatataatttgtccaagccatagcccatttctatttttttgccattttctttgaaagaaaataataattactttaggtactataaagattaatttacttattaagttaatttctttggtagaaaagtcccaacggtagaaaaatccatgaggtcagttgagtttctattgtgcagaaagctaatatgaagtaaagtgaagacatttgga

SEQ ID NO: 108212 - DNA, 574 bp, Homo sapiens
acaaccgacagaatgggagaaaacatctgcaaattatgcatttgacaaaggtctaatatccagcatctataaggaacttaaacgaattcacaagagaaaaacaaacaatctcattaacaagtaagcaaaggtcatgaataaacaattttgaaaagaagacatacatgtggccaataagcatatgaaaaaatgctcaatatcactgatcattaraaaactgcaaattaaaaccacagtaagataccatctcacattagtaaggattgctattatactagtaaaaagtaaaaaaataacagatgctggtgaggttgcagagaaaaaggaacacttatacactgttcatggaagtgttgactcgttcaatcattgtggaaagcagtgtggctattcctcaaacagctaggagcacaacggccattgggcccagcaatcccattactgggtatatacccagaggaacatacatcattctgtcataaagacacatgcatgcgaatgttcattgcagcactattcacagtagtaatgacatggaatcaactcaaatgtccatcaataacagattcgataa

SEQ ID NO: 108213 - DNA, 615 bp, Homo sapiens
aatcacctccaccatgcccctcctttaacacagaggaataacaattcaacaaaagattggggtggggacacagccaagccgtctctgttactaacaataaacatattttttttcaaacggggctctttgaagaaaggataaaaataaaattttctttactgctccccacattgaatccagcagatattcagcatctgcatcaaatgaattatatattacatactgtgcaattatttcactgctagtgaaatgttctgccaaatgtctgtaagaaaaagtgctgaaacttgaattttagaatatttcatcttaaatattatgtttttatatgaacacaccagaataatttacaatgaagaaattaatagtactatatacagttttagaggaataactacattatcaaataagattaacatagctrtaggttttcaccaagattcagacccaagtatccaattaaaacagactcactgaaagagatccattggatttagagtacctaaaggcaaaagacatgaaaatagagctgtgaagagtggagctactgttacagtaggtagccagtcaggcattacttggcagaagagggctccccacaacacacacacacac

SEQ ID NO: 108214 - DNA, 584 bp, Homo sapiens
gcagactcaacacaatccctgtcaaaattccaacagcatttttaattttttcagaaatgtaaaagctgatcctcaaatacatatagaactgcaaggggccctgaataaccaaaacaatcttgaaaaagttaaaaattgaaagactcacacctccccatttcaaaactttgcttaaagctataatatcaagactgtagtatgggcatargaatagacatgtagttgaggacaatgaattgagagtccagaaataaacccagactcttgcatcaattgattttcaacaaggctgccaagacagttcaatggaggaaagaataatctttcaacaaatggttctgaacaactagatatctacatacaaaataatgaatttggcacctgagtaccatacactatatacaaaaattaactcaaaatggatcaggacctaaacataagagctaaaattataaactcttagaagaaaacatagatgtaaatccctgtgaccttggattaggtaatgtttttttagttatggcaccaaaaacccaaactataaaagaaaaaaatagaaaaattgatctactccaaaattaaac

SEQ ID NO: 108215 - DNA, 519 bp, Homo sapiens
aaaattatcactgagacggtgaaagagttttaacttaaccgactccatcttgcttctaacctccttgttcgttcagcataggctgaactaactttgagagaaacttatagtttaaaacaaagatgataacagccctttcccaaagcacacctccttcttgcctggggactagattccctttgtaggactaacattagctacaagattagaaattatggtttaagagtcatgcaactrgaggcttcaagattttcttcaaatatctcagtgcttgagatattttccagaccctgcaattgccggatcagctggcaccacccagatggataaactggctaatctgatcttgtggctcccacccaggaagtgactcagcacaagaagacagcttcaactccctatgatttcatttccgtcctgaccaatcagcactcccgggtcactggcttcccccaacccaccaatttatccttaaagattctgctcctggctgggcgtggtgactcgcacctgtaatcc

SEQ ID NO: 108216 - DNA, 599 bp, Homo sapiens
atgtgtttaggtgggagtgaccttctggccccatttgacagtagagaacctgagattaggcaaggagaagccatttccccaggcttgccacaaactaaggccgcaaacagactgtgtaccattcgctcaggagcaattcgtattgcagctcatgagcacccagtccagagccacctccagaacaggagctcaaccctctttttgagagcttctctgaggggccctcctattaaaaatggggaaactgaggcccggagaaaggaagtgacttgcaaggagtaacagagcagtcagagagacctgccccaggagttctaattctaatcaccataacagctattatttattgagcccttcctgtgtgctgaatcttgttccaagcctttacaratagtgtcttgttccatcccccagtgattctatggctatatactaaaagcccacagtcctttatctgcaatttggaagcccaaaaaactctgaagccaaaaggattttcctgtatttgctgcccagactcttctgtgtgaagagtggataaatgtggaatcaattaatgaatgggaagaggagtgaggagttgaacaggtgaacaggag

SEQ ID NO: 108217 - DNA, 463 bp, Homo sapiens
gctgtttaaaagtgtatagcatctcccttctcacttttttcccctcttctggccatgtgaagttccgtgtttcccttcaccttactccatgttgtaagtttcctgaggcytccctagaagctgaggagatgccaccatgcttcctgtggggcctgtagagtcataagccaattaaatatctttttgtatataaattacccaggctcaggcatttatttatagcagtgagagaactaatacagttgccaaaaatagaaaattatgtttatcataggaataagtatcctattgtattctattctaaataaaccaaatcagcttacagacttctgtttttctcagtgtgttttttaaaaagacattaatagaaatatacttgtgagggggcattttgacttgttatgaaaaagagaaaaatgtaacatatgaatgagctgggcaagtttaaacaaaaggaaatttt

SEQ ID NO: 108218 - DNA, 575 bp, Homo sapiens
aagatcatcagattcaggagcatggtaaaacccaacccaaggaaactaagaatataataaaatgatacaggagctgactgatgaaatagccagtataagaaaaaacctaactgtcctaatattgctgaaaaacacacaagtatttcacaatgcaatcacaagtattaatagcaaaatagaccaagctgaggaaagaatctcagagcttgaaaactagttctctgaaataacacaatcagacaaaaataaagagaaaagaataaaaaggaatgaataaaacctctgataagtatggaattatataagaagggcaaatatatgaatcagtggcatccctgaaaaagatggggagaaagtaagcaacttggaacatatattttaggatattgtccatgataacttccccaatctctctagaatggccatcaatcaaattcaagaaatacagaaaatccctgtaagattctacacaagatcacscccaaaacacataattatccaattttccaaagttgaaatgaaagaatgttaaaggtagctagagagaaaaggcagatcacctacaagtagaattc

SEQ ID NO: 108219 - DNA, 558 bp, Homo sapiens
caggatttgattgaacttggagttctcacctcccagtgcagcgtatcagggcagagctgggacagacacagagttgcaaaggtcagaccaggagtgagggtccagggctgggtggtctcaaagggcaagagaccaggcaagaagaaggaagttggggttaggttgttccaaagtgtaatgtttgccaggtttgtgagagcccccctggcatctgctcaagcccaaaaaggggagacttgccctgggaagagaacagggggagcttaacccgcctggagcaccagagcccatcggagcccaagggccccccctggcaggaccctgacaaggctctacttggaatgtgtgacacagagcctcatgtccttatctgtaagctgggggcaatcaggacacactgagtggcaggagacacctgggcagctcccgcacacagccctggggtggccacctctctcccaccagcccccactgtggtgctgaagctccyaggctcaggctaccagccggcttctgcgctggactccggccataggctggagttcctcccggttttct

SEQ ID NO: 108220 - DNA, 639 bp, Homo sapiens
cttgtctcaaaaaaaaagtatcttaggagacacctagtagaattaccccatacagtccctcagtaaacctggcagggcagatttttcccccagcttggcttggatccctgtttctttggtggacaccagaaggagtagctggcttgggtttcaggatcatggttgatcatgcagcaccatctgttcccccgggtcactcccagcacctaaatgaacttgtactgtgagggagactggaggcccagcgggagcagattcatgcctcaccctggggacycatcaccaagaggaactagcatgggggtctcctgcaccagccaagtcattctctcctcactgtcactctggaccaagcgtgttctgtggaagtggcctgagtccctggtcatgggccgcttgtatctggggcagggggtgaatcactcactccctgcatgctcctgggcaggtgtgtggcaggtcttttccaggccacatggtggcgtgaagaaagagcatgggctcagaatcatcacaactgggtttaaatcctggctttaccatttcctctttctgtgaaccagtcaaatttcccaccctgtctggctcttgtttccttatttgtcaaaaaaaacccagcaagatagttaaggatataac

SEQ ID NO: 108221 - DNA, 497 bp, Homo sapiens
agaagccagcatagagggttttccacatgcttcttggttttctccagcatgttaaagctagcagcagggatgtgagtaactggggatgattggcagtgcctgggaatttgccctttgttccaaacatactgcttacatagctccaactacagcttggagtagttgaggttaagcaaagcaaaagggtgattctaatcttacaggaaagaaagaattaggattgacagaaaatatagtaaagctgctttgaaagcaaaaataaaaaattgacattgggtactatatctcacaaatgtttagacaatggacatgtttcaggatattagtgtctttcagaaatattactgaaatggattttatctgagggaagagggcatcytgaaaaaaatttgttttgatacagggtctcgctctgtcgcccaggctggagtgcagtggtgtaatcatggctccctgcagccttgagctcctgggctcaggtgatgctcacaccttag

SEQ ID NO: 108222 - DNA, 572 bp, Homo sapiens
agggtcatccagggtgtagctataaaaagaggcatgccattcattgcctgccattcctggacttgccttgtacagaacattcccctgggttttgccagtgaaattttaattcacttaagcctgagagttccccacacttccctcagaaggctgctatccttctgctttagcagtttaataggcagagacaggggaaaggatattgaagaaagcaggagctctatccatgtaactctataccataggactaccaaggggtttcatgaatttattctcagaatgagaggaaagcctgagcaaatcgtaaagcatactcgttttcccccatctctcttttccctcctctctttcrctccctccagactggaatatccttaagtgcagtaatcaagtcttggttatgtctctacttacagcaccaagtaaagtatctaggtcatggattttgaacagaacatctatgtactccctctctgccacacttttacaataaataacatctctcttgtaccctggttttcaagcctggttgtacattagcattactagagagcttaaaacaaacacagagg

SEQ ID NO: 108223 - DNA, 645 bp, Homo sapiens
gggttctattagtccattttcatactgctatgaagaaatacctgagactgggtaattcataaagaagaaaaggtttaatggactcacagttccacatgactggggaggcctcacaatcatggcagaagatgaagaaggagcaaagacacatcttgcatggcaacaggcaggagagcgtgtgcaggggaactcctatttataaaaccatcagatctcctgagacttattcactatcctaaaacagcacaggaaaaatccaccttcatgattcaattaactcccacctggtccctcccacaacatgtggggattatgggagctacaatttaagatgagatttgagtggggacacagccaaatcatctcactgggcatggtggtgtctcaagcctgtagtcctagctactctggaggctgagatgggagaatctctcgagcccaggagtttgagcttgcagtgagccatgattgttccactgtactccagcctgggaaacagagcaagaccctgtgtcaagaaaaagcctgtcaccaagttgctctgagttaaataagtggaagtggtgctatggaaaatgtaaagcattatgtaagtgtcaccttcttagaattcrtgtagaatcaccaactttagaactaaaagtt

SEQ ID NO: 108224 - DNA, 658 bp, Homo sapiens
tttaaaaacctttagtattgagttgttagccctccatgtggatagaatttcagagcccttattacattttaaaagtgaagctagggcagaaagtgactcaaaattagaaatgtcaggatcttcaattttgaggtatggccatttattcttaaagatactgcattcaaacaaaaaggagtcagctgaggtggctcacgcctgtaatcccagcactttgggaggcctaggagagaagatagcttgagctcaggtcatcgagaccagcctgggcaacatagtgaggcccccatctctacaaaaccaattaaaactagcctggcataagggtgggtgcctatagtcccagctacttgagaggctgaggtgggaggatggcttgagccaggaaggccaaggctgcagtgagctgtgaccacaccaytgtactccagcctgggtgagagagtgagaacttgtctcaaaaaaaaataaaaagagagagagagtgagatagagagacagaaagaaaaagaaatagggcaccatttcaaagaaacataaaagcattttttaaatattacttctttatgatttagaatggatattttttcttccagaaatgaaagacaagtgtctctagaagaccagactttagaataaacattgcagcaaatgtcca

SEQ ID NO: 108225 - DNA, 495 bp, Homo sapiens
tggcatgggtgccagtttagccacagtagaatagagttccaggtagattcttaaggtttctgactccaggccttggctcctagatgttacctctggatccrcacagggctgggggcaacttgcttctctggagggaagaacaaaggcctggctagttttgctgccagagccctagggccttgagagaacatagatgatagccaggcagtggctaccatgggccttgggtgagactcagtactgtgctggattcaggtctgacccagcattgtcccagtgttgggtagagacagggatgcttatgtcacccctcttcaagctctaggcagctcagtagacagagaaggagactctgcttgtttgtttgggagaaagtaagggaagagaccaaaattctctgcctagtaatccagagaagtcttccagatcttatccaagaccacaagacctctatgagtctgcaaaagtcatagtgttactgggcttgggatgcca

SEQ ID NO: 108226 - DNA, 592 bp, Homo sapiens
tattgtgaatagagctatgaaaaacatatgagtgcaggtatctttttgatgtaatgatttcttttcctttgggtagatgccaagtagtggtattgctggattaaatggtgttctatttttagttctctgagaaatctccatactgttttctatagaggttgtactaatgtacattcccaccaagtttttcaaaactttaaaggtaatacctacatgagtctagtatgtcagcctttggctggatgctggccttttctgtaaagttctggatgaaaatgaaagctcctaataaagctatgttgtatattactccattcctgaatctcaggagaactgagaaagtactgaatttcctaaatcttctcttagttctcatctatctctcctgaatttaaatgaaaacatgcaaactattttagtttacagttaatttataaggtagtcttawtcattgatgtatgtaatattaattaatttttatgtacaattataaaaaataaagatttcacagagaagaaatctctctcaatatatgtgtatatgtgtgtgtgggtgtgttaccaacatagcatgaaattgttataagcgttcg

SEQ ID NO: 108227 - DNA, 442 bp, Homo sapiens
ttggtagcatataatataaatgttagcaactatgattttttgttaaaaaaatctgatttcattatttcccrcataccctaaacttttttttttttttttttttttttttttgagataagagtctcactctgtcgcccaggctggagtgctgtggtgcaatcttgactcactgcaacctccgcccccaccaccccagctaaattgtgtattttcttgtggaggtgaggtttcaccatgttggccaggctggtctcaaattcctgacctcaagtgatctgcccgcctcggccaccctccccgccgccatactcttgtcactgagtgtcttattcttcctttgataccccaagcctttgcacaagatgtatgtacactctgtctgatgcattctttcacatgccttatttgcagcttttcccaggaagagtttattgttggcttc

SEQ ID NO: 108228 - DNA, 442 bp, Homo sapiens
ttggtagcatataatataaatgttagcaactatgattttttgttaaaaaaatctgatttcattatttcccgcataccctaaacttttttttttttttttttttttttttttgagataagagtctcactctgtcgcccaggctggagtgctgtggtgcaatcttgactcactgcaacctccgcccccaccaccccagctaaattgtgtattttyttgtggaggtgaggtttcaccatgttggccaggctggtctcaaattcctgacctcaagtgatctgcccgcctcggccaccctccccgccgccatactcttgtcactgagtgtcttattcttcctttgataccccaagcctttgcacaagatgtatgtacactctgtctgatgcattctttcacatgccttatttgcagcttttcccaggaagagtttattgttggcttc

SEQ ID NO: 108229 - DNA, 442 bp, Homo sapiens
ttggtagcatataatataaatgttagcaactatgattttttgttaaaaaaatctgatttcattatttcccgcataccctaaacttttttttttttttttttttttttttttgagataagagtctcactctgtcgcccaggctggagtgctgtggtgcaatcttgactcactgcaacctccgcccccaccaccccagctaaattgtgtattttcttgtggaggtgaggtttcaccatgttggccaggctggtctcaaattcctgacctcaagtgrtctgcccgcctcggccaccctccccgccgccatactcttgtcactgagtgtcttattcttcctttgataccccaagcctttgcacaagatgtatgtacactctgtctgatgcattctttcacatgccttatttgcagcttttcccaggaagagtttattgttggcttc

SEQ ID NO: 108230 - DNA, 442 bp, Homo sapiens
ttggtagcatataatataaatgttagcaactatgattttttgttaaaaaaatctgatttcattatttcccgcataccctaaacttttttttttttttttttttttttttttgagataagagtctcactctgtcgcccaggctggagtgctgtggtgcaatcttgactcactgcaacctccgcccccaccaccccagctaaattgtgtattttcttgtggaggtgaggtttcaccatgttggccaggctggtctcaaattcctgacctcaagtgatctgcccgcctcggccaccctccccgccgccatactcttgtcactgagtgtcttattcttcctttgataccccmagcctttgcacaagatgtatgtacactctgtctgatgcattctttcacatgccttatttgcagcttttcccaggaagagtttattgttggcttc

SEQ ID NO: 108231 - DNA, 615 bp, Homo sapiens
ccattacatggccatcactctggaatgtgtccaggctaaaagaatttaaacttgtctcaggtgcaattaacctgctggttgctctcggagtcacatctcatagtgctgcctggctgttcctgaggaagcctcacattggcagatgatcagctctggagtgcatatcctgctgttataaatctgcattttctagttgtagaaatacaaaaatattccaaggaaatgcacacaaagtgtttttgaaaagcaaacatttgtgcaaaatgatgtttttcatttttctctgtgctgctggctgcatttctttggaaggtgattattatactgaatgattgttagcacagaacatcaaggccatcacgatctcattttatgcagtcagcatttctattgaattacaaatgtggcattcacattctcaaaccatttttgtctttctggcatttgcctgaaagamtaagttccattgcttgttttaataatctatgtctgtttgacatacagtaattcagatcttcctttatgtggaaagatgagcatccctcctgtgatgagatggtcaccaccatttctgacctagagggagggtcgtagcaggtaagggtgcagtgtggg

SEQ ID NO: 108232 - DNA, 658 bp, Homo sapiens
gttcttgcagtgtacatctattaaagtataatataaacaatataaacatagtattaatattaagtcagtttctggaaacttaaatagttcctttcctctcaactctgtgaattccactgatgatatcaaggtcaagatacaacctaatcaaggaagcagatagcatagctacgtttataccctaatcactaatgcaaggtgacatctacacagtcaaaacaaaacacaccaccatcatttcccttcctagaaacacttattgtctgtgattgagtttaagagatgaaggtttatatccattcagtttaaggcaagtcagagaagagatgaagaaagtgatagagcagaaaatgaagttactcttgtaagatttaaaaccactaaaattattttctataaagtaacttttaaagtaaaaatatcattaaaaataattaagcaccacatattttggtgagcataagtacttaggaactaaaccataggaatgggaaccaaattacaggaattamagcttagcagacctatctgaaatatggtacaatattcattccaagaattctagtcatgatggaaagagaattaaagtactgaatgttctgcttttctttccttttttcctacttaataacctgaatggagaacaagagaataagag

SEQ ID NO: 108233 - DNA, 582 bp, Homo sapiens
aaggtcttgctttgtcacccaggctagagtacagtggcgagatcatagctcactgaagcctcgagcccctgggttcaagagatcttcccacctctgcctcccaaagtgttgggattacaggcatgagccaccactgctggcccactccttgccctttgatgaccactactttactctctacttctgagttatcaaaatgaaagatttctttctttttgaaggccgagcagtatcctatggtatatttataccacctttcctttgtccattcatccatcaatgggcacttagcttgattctatgtcttagctattgtgagcaatgttataatgaatgtaggagtacagatatctcttcamcatactgatttcatttcctttggatatatacccagtagtgagattgctagatcatagggggttctatttttaatttatttctctcccacttaatacttcagcaacactgaactgctttgagctccttgcacacagcatacctgtactaagtcatcgaatgcctgcctctgttcttaatctttctcccctcttcctccactcttacataatattctaaggctca

SEQ ID NO: 108234 - DNA, 594 bp, Homo sapiens
ctggcctttgtcttggctccaggaggtagcctctaaaccctttgaattttccaagtaattggagtgtctttgttatggtgggcctgttagaacccacttgatagagagttatgctgattaggtgactgatggttagctcctagatagtttatgctgaggagttgactaggttggatttggccatactggaaagatcaacyttatatttttatatcaccctaaccccagtggaagcgagagctaactggagactgagtcagtggacaatgattcaatcaattgtgtctacagagttagagtccgatttaaaaaaaacaaaaacaaaactcttaacactgaagctcagtgagctttccctggttggcaatactcttgagtatcgtcgcactttgacactgagaagatgatgaaaactgtgttttgaactctctgagtcttcactctatgcatctcttctaatttgggaatatatatattatatatgctatataatatatatattaaaactataactttaagtattagactttcttctagtgagtcctgtgaatttttctcttgaaaaatcaaacttgagagtggttgttgaaacac

SEQ ID NO: 108235 - DNA, 594 bp, Homo sapiens
ctggcctttgtcttggctccaggaggtagcctctaaaccctttgaattttccaagtaattggagtgtctttgttatggtgggcctgttagaacccacttgatagagagttatgctgattaggtgactgatggttagctcctagatagtttatgctgaggagttgactaggttggatttggccatactggaaagatcaaccttatatttttatatcaccctaaccccagtggaagcgagagctaactggagactgagtcagtggacaatgattcaatcaattgtgtctacagagttagagtccgatttaaaaaaaacaaaaacaaaactcttaacactgaagctcagtgagctttccctggttggcaatactcttgagtatcgtcgcactttgacactgagaagatgatgaaaactgtgttttgaactctctgagtcttcactctatgcatctcttctaatttgggaatatatatattatatatgctrtataatatatatattaaaactataactttaagtattagactttcttctagtgagtcctgtgaatttttctcttgaaaaatcaaacttgagagtggttgttgaaacac

SEQ ID NO: 108236 - DNA, 583 bp, Homo sapiens
tcatttagttgctgacactaaacgccctgcagttaacctggaaaccttcctttctctcatgcccaaatgcaatgcatcagcacgtcttattagcctaaccttcatagtatcctttgatctttagcccttactctggtcattttgacttctggacttttcacatttccaactcaggatgtacagggcttatagctgcaattctggaagtgtacttctccagagaagacttttagactgtgatctccttggagcagggttgatttctgatcyatacttttaaccttagagcctagtgaagtgcctggaggtacttggcaaatgaccaaagaaagctaaatgacaactggacagagcacattgccaagaagttaatatagcttgacaaagtcttggcaatgtagaattttacctgaatgttgttaaacacagttgatgagaggctgttggcttggaccagcctcctgcactaggccccagcagaccagaccagaccagaatagacagacttgtgctaagtgccatggaaccaaacagaagtttgaaataggtcagttttcctaaaaaacaggagatttcagtcaac

SEQ ID NO: 108237 - DNA, 348 bp, Homo sapiens
tgctctttgtcatattctcattgrgaaacttgaggaaatatgaccttagccacattatatttaggtggatggatgcacaacgtgcttgaatgttcaaccaaagggaaattgaaatttcaatttaaagttgcattaatattttgatttaactcccaagcactgattcttgggatcatccagtcaactgctattagataatttgcagtaagtaatttagagtgtgctcatcaactctctaggtaattataaatattagttggtataaggaggagataaaaattgaaaggttgaataatataaatacacaaaagagatgcctggaagaaatttttcttattataatattaa

SEQ ID NO: 108238 - DNA, 348 bp, Homo sapiens
tgctctttgtcatattctcattgagaaacttgaggaaatatgaccttagccacattatatttaggtggatggatgcacaacgtgcttgaatgttcaaccaaagggaaattgaaatttcaatttaaagttgcattaatattttgatttaactcccaagcactgattcttgggatcatccagtcaactgctattagataatttgcagtaagtaatttagagtgtgctcatcaactctctaggtaattayaaatattagttggtataaggaggagataaaaattgaaaggttgaataatataaatacacaaaagagatgcctggaagaaatttttcttattataatattaa

SEQ ID NO: 108239 - DNA, 604 bp, Homo sapiens
atttgcagtctgatatggtttggatttgtgtccccaccctaattagaggaggggcctggtaggaggtaattggattataggggtggatttccccyttactgttctcatgatagtaagttctcatgagatctgagagttcaaaagtctgtggcacttctcccttcattctttctctctcctgcttggccataggaagatgtgccctacttcccctttgtctttcaccatgattgtaagtttcctgaggctactcccgccatgcagaaatgtgagtcaactaaacctcttttctgtataaattacccagtctcaggtagttctttatagcagtgtgagaatggattaatacatagcccatcattagatgttactgaggaatcaagaaatgagacacagagcctgttcagtgtagttaatgaaagatgacatatgttatatttttattttgggtttggtcccccagaaacagacattgagacaaggttttgagtttaagtggtttatacggaagatccaaggaagaagtgataggtcagtggggaaatgagacagtaaagagatgggggcaataaaagatgtgttattgagacgttaccgctgtggg

SEQ ID NO: 108240 - DNA, 499 bp, Homo sapiens
catctctataaaaaaaaaaaaaaaataccaaaattagccgcatatgggggtgtgcatctgcagtctcagctacctgsagggctggggcaggaggattgcttgaacccagaagatcgcacccctgcactccagcctgggtgacaaagtgagaccctgtcacaaaaaaaaacaagcaaaaaaaaaacaaaaacaaaacaaaagaaatatggctattcaatttcataggagaatttcagaagaatcaagggggagtatcgaagtagacaggctggaaagatgattccacaatactgtttcatgcactggggcggacaggcaattaagttttcggtgctcctctgtgaaatgagaatatgtaagaaaatattttttaagcctaagttttttacaaacaaaaatttcaagctaaaagactttcctttattctaagaatattctttctgacttttttagggggtaggggcttgaaaatctttccttttatgaaatgataatggca

SEQ ID NO: 108241 - DNA, 499 bp, Homo sapiens
catctctataaaaaaaaaaaaaaaataccaaaattagccgcatatgggggtgtgcatctgcagtctcagctacctggagggctggggcaggaggattgcttgaacccagaagatcgcacccctgcactccagcctgggtgacaaagtgagaccctgtcacaaaaaaaaacaagcaaaaaaaaaamaaaaacaaaacaaaagaaatatggctattcaatttcataggagaatttcagaagaatcaagggggagtatcgaagtagacaggctggaaagatgattccacaatactgtttcatgcactggggcggacaggcaattaagttttcggtgctcctctgtgaaatgagaatatgtaagaaaatattttttaagcctaagttttttacaaacaaaaatttcaagctaaaagactttcctttattctaagaatattctttctgacttttttagggggtaggggcttgaaaatctttccttttatgaaatgataatggca

SEQ ID NO: 108242 - DNA, 499 bp, Homo sapiens
catctctataaaaaaaaaaaaaaaataccaaaattagccgcatatgggggtgtgcatctgcagtctcagctacctggagggctggggcaggaggattgcttgaacccagaagatcgcacccctgcactccagcctgggtgacaaagtgagaccctgtcacaaaaaaaaacaagcaaaaaaaaaacaaaaacaaaacaaaagaaatatggctattcaatttcataggagaatttcagaagaatcaagggggagtatcgargtagacaggctggaaagatgattccacaatactgtttcatgcactggggcggacaggcaattaagttttcggtgctcctctgtgaaatgagaatatgtaagaaaatattttttaagcctaagttttttacaaacaaaaatttcaagctaaaagactttcctttattctaagaatattctttctgacttttttagggggtaggggcttgaaaatctttccttttatgaaatgataatggca

SEQ ID NO: 108243 - DNA, 499 bp, Homo sapiens
catctctataaaaaaaaaaaaaaaataccaaaattagccgcatatgggggtgtgcatctgcagtctcagctacctggagggctggggcaggaggattgcttgaacccagaagatcgcacccctgcactccagcctgggtgacaaagtgagaccctgtcacaaaaaaaaacaagcaaaaaaaaaacaaaaacaaaacaaaagaaatatggctattcaatttcataggagaatttcagaagaatcaagggggagtatcgaagtagacaggctggaaagatgattccacaatactgtttcatgcactggggyggacaggcaattaagttttcggtgctcctctgtgaaatgagaatatgtaagaaaatattttttaagcctaagttttttacaaacaaaaatttcaagctaaaagactttcctttattctaagaatattctttctgacttttttagggggtaggggcttgaaaatctttccttttatgaaatgataatggca

SEQ ID NO: 108244 - DNA, 654 bp, Homo sapiens
aattatttctatgcacacaggtgcactttctattagtgtgaattttgagagagcagatattcatacattctattgatttttaggtccatagcaaataagccctgtactgaagacagaagggatgctcagtaaatacttgtaaaatkaatgaatggaaaaccaaggcttctcattcccccaacacccagttctctgcgctggccctctactcttataagtactatgataacttcctatgtgccaagcagagctgaccagcatgtattactgtagtttaatgtcacagcaacaccgctgagttggtcctattgctggcacccttttactgatgaggaaattgagacttgagagacatttagttacttcctcaaagtcacacagctagtcagtgacagatatccctcaaatgatggtgctgtggaaaaatgagggaagaaacatgtgacaaaatggaccttgttgggtaaaagccacaatacccacagcaatgtacactaatgctatcactaaagaagcagcagaataatccaaaatgattaccatctaaaaaaaggaaggtaaggttgtgggtgacctgatgtgtcacccaatcaactctggtacttggaattccatcaagaaaacggacagattgtttctgccacctccccagaa

SEQ ID NO: 108245 - DNA, 613 bp, Homo sapiens
tcacaccatttaaaaatttacatggagaagacattgcaacagatgaaacagccggtgggaaaatgctgacactgaaaacagagggcaattcagggaagccagagcgtaagacagaagatggaagcaagtgactggaggcaggtcaggaccagattagaatgacctttgggccacagtaggaatttggactttaacctgtaggcaacagggaatcactaaaggttttgaaatagaagagagacatgcccataagatgctaagatgaagtttcacaaggtaaagtggaggttagaccaaaatggagagagactggtagagaaaactgattaaaatgtatgtttaataatgtaggcaaatggtggtgagagtttaaataaagcaatcatcattactattgtgagaggggaataratttgacagagaaatatgaattctgtattcaaaaaactagatagggttattagtggacaaacaaattcaggagccgtggctgttataagtactttgacaacttcacatagtaaagattctccagatattttttatcttggttgttcaaatatttgaaagctttagatttaaaactgatattatgatttgaagatttttactg

SEQ ID NO: 108246 - DNA, 570 bp, Homo sapiens
gtctctcagtttcaaaggcagaagtgagaagtcaagacgtccacagggccatgctcccttggaaacctggagaggagcataccttctgtccttttctaaattttgagtttgtccgaaatcctgggtgtttcttggcttgtaggtgtttcattccaatctctgttgctataatcacatggccgtcttctctgtgtgtctccttttttcttaaaagcatatcagtcccactggattaagggttcacccaccctactccttatgaccttatctccttataagctcctattaccttatcttaactaattacatttacaatgaccttatttccaaataaggtcacattttgaggtattagtggccagggctttaacacatgttttagggaacacaattcaactaaagcatatcatctcccaattccctccaaagtctgattycattacaatatcagactctggctcagcatcaagtatttatatatatatacacatatatataaaatattatattatattatattatattatattatattatattatattatattatattatataaatacagtcc

SEQ ID NO: 108247 - DNA, 550 bp, Homo sapiens
catttgtcttctgcacaggccaaataggagagttgaatgggggtagagtgggaatccctatcactgcatctttcaagtccttgatggtagcactaatctccacaatccatccagggatacaatgttgtttttgatttactatctttccaggtagaggcagctctaatggcttcaatttgtcctttgccaccataatagccttcaccctaccagtcagagagccaatgtgggggttctgccagccactaagtatgtctatgccaattatgcattctgacactggggaagtgaccacaggatgagtctggggacccactggacccactataagttggacctgagctaaaatcattaattacctgacctccataagcccctactttaactgcagaaccacaatgacattttgggtaccctggaatcaatgtcagctcagagccagtgtccagtartctccaaaatttctgatcatttccctatccctaatgcacagttaatctggtaaaagaccaaaggtcttattggggaagaatgggagaaagattaacag

SEQ ID NO: 108248 - DNA, 550 bp, Homo sapiens
catttgtcttctgcacaggccaaataggagagttgaatgggggtagagtgggaatccctatcactgcatctttcaagtccttgatggtagcactaatctccacaatccatccagggatacaatgttgtttttgatttactatctttccaggtagaggcagctctaatggcttcaatttgtcctttgccaccataatagccttcaccctaccagtcagagagccaatgtgggggttctgccagccactaagtatgtctatgccaattatgcattctgacactggggaagtgaccacaggatgagtctggggacccactggacccactataagttggacctgagctaaaatcattaattacctgacctccataagcccctactttaactgcagaaccacaatgacattttgggtaccctggaatcaatgtcagctcagagccagtgtccagtaatctccaaaatttctgatcatttccctatccctaatgcacagttaatctggtaaaagaccaaaggtcttmttggggaagaatgggagaaagattaacag

SEQ ID NO: 108249 - DNA, 210 bp, Homo sapiens
gaatacggaggataaaatccttgtgaccttgkataaggcaaagatttcttagatatgacaccaaatacattatgcttaaaagaagatattgataaattggacttcaccaaaattaacatccttttcttttctaataacttagtaagaaaataaaaagaaaagccaccactttgaaaaaatatttttgattcttatacctgataaaggcct

SEQ ID NO: 108250 - DNA, 549 bp, Homo sapiens
catcttgaaaaacaatatacgcacacaaattaagtgcgaagagatgaaaggcggcagaggtaagtagctacattagggacagcagattgaggaaataggtgaggtaaatatgagtacagtaaaagcttctgctggagagcagtgggacagatgcctggatgaaaaaggagatttgatgttactaagaactgaaawtttttacctaaggaatttgtattcgatcatctattttgggggcattctaaatttcctggataagaaaaagcacagtaaataagagtttacagccatcggagattttcccagtattactgacagaaagtaaagaatgaattagtgttgggcaaatcttgaagtaaaaaacaaaaacaaaaaaaaaaatcgcattcttttaaaagccaattttaaaaattaaatgcctttacttaaataggccatgtaaaaataacatgaagatgttttcagaaaaggatcaccaggcccaattcctgaatattcagatttagtaagtctgtgaatacctgggaatcagataaagaaatctggaat

SEQ ID NO: 108251 - DNA, 586 bp, Homo sapiens
cgtgtccccacccaaatctcatcttgaactgtaatccccacgtgtcaagggatgggcctggtggaagatgatttaatcatggaggaaggcttcccccttgctgttttcaagatagtaagttattatgagatctgttggttaaaagtgtgcagcaattcccctttctctgtcctttctctctctctttctctctcctgccaccatgtgaagaaggtccttgcttccccttccaccaagattgtaagtttcctgaggcctcctatacatgcttcctattaagsctgcagaactgtgagtcaattaaatctgttttcttcaaaaattacccagtctcaggtagttcttcatagcaatgtgagaatggattgatacaataatataggaaaaatttgttattttatattactgtaagcccaagacttgcacctgttggtgtttaataataggttattttgtttttttttctctccagtaagaatagcttgttagataaacttctgatgttttccttcatttctttacagtttcagacaagagcactactgttcattctgacttgtaacctagaagacagatgtaaatgcta

SEQ ID NO: 108252 - DNA, 586 bp, Homo sapiens
cgtgtccccacccaaatctcatcttgaactgtaatccccacgtgtcaagggatgggcctggtggaagatgatttaatcatggaggaaggcttcccccttgctgttttcaagatagtaagttattatgagatctgttggttaaaagtgtgcagcaattcccctttctctgtcctttctctctctctttctctctcctgccaccatgtgaagaaggtccttgcttccccttccaccaagattgtaagtttcctgaggcctcctatacatgcttcctattaagcctgcagaactgtgagtcaattaaatctsttttcttcaaaaattacccagtctcaggtagttcttcatagcaatgtgagaatggattgatacaataatataggaaaaatttgttattttatattactgtaagcccaagacttgcacctgttggtgtttaataataggttattttgtttttttttctctccagtaagaatagcttgttagataaacttctgatgttttccttcatttctttacagtttcagacaagagcactactgttcattctgacttgtaacctagaagacagatgtaaatgcta

SEQ ID NO: 108253 - DNA, 623 bp, Homo sapiens
tgagcctattatttactaaaatattatataatgtatacatatttagtataattaatatattaaaatatacattttcttcagtaaagggcattaatcatcaaaaacttcatttggtaaaactgagaaactgttgaattacttcctgtactgcactagtttctacataagaagcttaatttgtactcttcattttccttaacaaaaacctatgatgccataaaatttacatatttacgagttttttaaagaataattgaattaacctcaacrcttttaaaatttgcatcagcaggttcattaagcagagccaatcattctgttttatgtgctatttatatcaaaggtctccagatttcttagaaatcaattgttgcctttatgaatatatttagacttctctcctaaaattgtaaaggtcatatttttaaaacaagatatattacttcatttatttgtgtatttatgcacttaagctaataaataaatattgtatatatttatggtgtataatttgatatatgtatatattgtgaaatggctaaatcatgctaattaacatatatgttacctcacatattttttggtgagaatataaaatttactttcttatcattttcaagtat

SEQ ID NO: 108254 - DNA, 376 bp, Homo sapiens
taggcaccacctccagccctgtaaggatgaggcactcttccctcttatcctttcagatggtctccaactttgggtagtttcttttcatgcatggaatgatgagtgctctaccgaatcctcaraggagaccctctatagattttcaggggttctctctcttcgcagctctcttttctctggcagactgttctgcaaattctattcattttgatctcccagactaaggagttgctgcatctccttagctcagggagttcactgtgttctgctgtgtttctccctccacagcctggagccctctcttgacagtactgggggcagtcatagggctcgccttgttcaaggttcactatcttcgttgctggatattcagtgt

SEQ ID NO: 108255 - DNA, 376 bp, Homo sapiens
taggcaccacctccagccctgtaaggatgaggcactcttccctcttatcctttcagatggtctccaactttgggtagtttcttttcatgcatggaatgatgagtgctctaccgaatcctcagaggagaccctctatagattttcaggggttctctctcttcgcagctctcttttctctggcagactgttctgcaaattctattcattttgatctcccagactaaggagttgctgcatctccttagctcagggagttcactgtgttctgctgtgtttctccctccacagcctggagccctctcttgacagtastgggggcagtcatagggctcgccttgttcaaggttcactatcttcgttgctggatattcagtgt

SEQ ID NO: 108256 - DNA, 571 bp, Homo sapiens
cattccattatattacaatgctgcaacctcaactgttatctgattaaatattatgcatactgtttataaagaaagatcctattatacttaatatgttctggaaactatatattttgttaatttttgcttattattgtctctctttcccctctataacatgatcattttaaaaacagaagttttcttgttttgttcactgttgtatgctcaaaatcttatttagtgcctgcaacattgaaggtgctgagtaaatatttgttgaaagtaatktaggttctggaattcattctatacttgccatctctaaagttgatcttgtcgttcttacgatactgctttctaatatactttttttcttcctaaagacaaaaaagtcatttttaaaataaaagtggaattctagcagtggctacttcttgttaaatttagttcacaagcatttaggcttcccaaagtctcaatggtgcgatgctttgtgtctttattctgtgattcattcacttttataagctaaataataagtgcaaacttgcaaaggggaacatattaaaagggcacagtgcatcaattc

SEQ ID NO: 108257 - DNA, 546 bp, Homo sapiens
tttcttttgattgttgcctagtgttaacagagtttttttttttaatttttaaagatacagttgtagctaatatggtcttctctattagacaattgatttcaactttattagtttcttcttttttatagtattctaatttttttgtttataatttgtcagttggttactaatgtattgagatgcacatttgtaataatgattttcagcattcttttctaatatattcctttaatgctgtaaacttcactgtgaaattagctttagctatatcttataagctttgatatatatttaatgttattcattttaatccgttttctaatttccagtgttgtcttttaatattagttttttaaatatatttattagtttttaacttaattccacattacctctttaatgaagaasccccctggtgatgggggaagatggcttactagatgcagccaggtggaacagctgccaccaagaggcagagatgactagcacactccgagcaggccttcagagagaaggcattgagagtggatggagggaagacacaga

SEQ ID NO: 108258 - DNA, 615 bp, Homo sapiens
aatgttatacacacacacacacacacacacacacacacacaacctgagagagagaggaatgctattcaaccatacaacacaatgaaattctgtcatttgcagcaacatagatgaacctggaggacattatgttaagaaaaataagtcaggtgcaggaagacaaataacgcatcatctcactcttatgtgaaaatttttaaaagttgatttcatagaagtagagcgtagattagtggttgctagaggctggggtggagaggcaggaaggtgctctgggagaccttggtcaatgagtacaatcttacaattatacaaaaacartaagttttgatgttctattaccactgtgggttgactacagtaaataataatgtattgtatatttcaagatagctagaagagagaattttgaatgtggtcaccacaaagaaatcataaatgtttaaagtgactggtatggtatttaccctcatttgataattatactatatatacatgcattaaaacatcacatggttccctaaaaatatatacaattattatgtgtctattataaatacaatttttaaaagagagcaagggcattgataccccttgtgaaatgttcagtccttc

SEQ ID NO: 108259 - DNA, 615 bp, Homo sapiens
aatgttatacacacacacacacacacacacacacacacacaacctgagagagagaggaatgctattcaaccatacaacacaatgaaattctgtcatttgcagcaacatagatgaacctggaggacattatgttaagaaaaataagtcaggtgcaggaagacaaataacgcatcatctcactcttatgtgaaaatttttaaaagttgatttcatagaagtagagcgtagattagtggttgctagaggctggggtggagaggcaggaaggtgctctgggagaccttggtcaatgagtacaatcttacaattatacaaaaacagtaagttttgatgttctattaccactgtgggttgactacagtaaataataatgtattgtrtatttcaagatagctagaagagagaattttgaatgtggtcaccacaaagaaatcataaatgtttaaagtgactggtatggtatttaccctcatttgataattatactatatatacatgcattaaaacatcacatggttccctaaaaatatatacaattattatgtgtctattataaatacaatttttaaaagagagcaagggcattgataccccttgtgaaatgttcagtccttc

SEQ ID NO: 108260 - DNA, 637 bp, Homo sapiens
aaaatgacaggtgctagtgaggctgcaaagaaacaggaaggcttatacactgttgatgggagtgtaaattagtgtaaccattttatgtggaaagcagtgtggcaattacttaaagacttaaaaacagaaataacattcaacccaacaatccaattactgtatatatatgtccaaaggaatataaattattctatcataaagatacatgyacatgtacattcgttgtagcactattcacaagagcaaagaaatagaatcatcctaaatgcccatcagtggtagactggataaagaaaatgtggtacatattcacctaggaatattatgcagccataaaaaagaataagatcatgtcctttgcaggaacatgaatggaactgaaggcttattacccttagcaaatttacacaggaacagaaaatagaatactgcatgttctcacttgtaactgggagctaaatgatgacaacacatgaaaatgtagaggggaataacatacactggggcctactggagggtggagggtgggagggagaggatcaggaaaaataactaatgggtactaggcttaatacctgagttatgaaataatctgcacaataaacccctgtgacactggtttacctgtgtaacaaac

SEQ ID NO: 108261 - DNA, 637 bp, Homo sapiens
aaaatgacaggtgctagtgaggctgcaaagaaacaggaaggcttatacactgttgatgggagtgtaaattagtgtaaccattttatgtggaaagcagtgtggcaattacttaaagacttaaaaacagaaataacattcaacccaacaatccaattactgtatatatatgtccaaaggaatataaattattctatcataaagatacatgcacatgtacattcgttgtagcactattcacaagagcaaagaaatagaatcatcctaaatgcccatcagtggtagactggataaagaaaatgtggtacatattcacctaggaatattatgcagccataaaaaagaayaagatcatgtcctttgcaggaacatgaatggaactgaaggcttattacccttagcaaatttacacaggaacagaaaatagaatactgcatgttctcacttgtaactgggagctaaatgatgacaacacatgaaaatgtagaggggaataacatacactggggcctactggagggtggagggtgggagggagaggatcaggaaaaataactaatgggtactaggcttaatacctgagttatgaaataatctgcacaataaacccctgtgacactggtttacctgtgtaacaaac

SEQ ID NO: 108262 - DNA, 578 bp, Homo sapiens
gttattaagcatgacaaggcagatttttagaattttttagaaataaaaaatactagcaatattattgaaaacttatatagcaaaataggcagagccaaagagaaagtttataaacttgaaaatagattggaatatattaagcataatgcaacatagaaagataggaagctaggaaatacgaacaaacaaaaaakatctaatgttaaatgccagaagataaagaaaaaaatatttttgttagtaaaaaatcttataattagcccgaatatttttcaaatataaaggactggcctaagactctgacctggggaagcctacagccaaaggaacctgagtggagctcccttgccttatgtcagggaaaagaaagaagtctgttttgcaaagtgcctgctttccaaaatttggagaaagatgatgggctagtttttcatagctaatatgtgaatccacagaagaaggctgaactgggttctttatggaaaggtattacaagaatacctgactggatgggcaaggtaaccccatgagatagatgagtcattggaaaccaaggggcaaaaaggaagttataaata

SEQ ID NO: 108263 - DNA, 578 bp, Homo sapiens
gttattaagcatgacaaggcagatttttagaattttttagaaataaaaaatactagcaatattattgaaaacttatatagcaaaataggcagagccaaagagaaagtttataaacttgaaaatagattggaatatattaagcataatgcaacatagaaagataggaagctaggaaatacgaacaaacaaaaaagatctaatgttaaatgccagaagataaagaaaaaaatatttttgttagtaaaaaatcttataattagcccgaatatttttcaaatataaaggactggcctaagactctgacctggggaagcctacagccaaaggaacctgagtggagctcccttgccttatgtcagggaaaagaaagaagtctgttttgcaragtgcctgctttccaaaatttggagaaagatgatgggctagtttttcatagctaatatgtgaatccacagaagaaggctgaactgggttctttatggaaaggtattacaagaatacctgactggatgggcaaggtaaccccatgagatagatgagtcattggaaaccaaggggcaaaaaggaagttataaata

SEQ ID NO: 108264 - DNA, 423 bp, Homo sapiens
attattagagaaaaaaactataaaccaataactcataaacatagtttcaaaaattattccaaaatattagcaaattgaatccagtggcataccacaaagataacatattttaactaagtagaacttattacaggtataaaatgtcttaacattttaaaataaattaatgtattttaccaatttaacaaaaatatgaaaaaaataataggattatcctattcaatacaaaagagacaaaattcaatacccatttatrgtttttaaaaatcactttaggaaactggaatagaagaaattttttcttaatgtgataacaatatctacaaaaaaaaccccaacagcaaacatcataatcaacagtaaaacgttgactgagtatgttagcagaaaggggtttcaatccagaccccaacagagggttct

SEQ ID NO: 108265 - DNA, 329 bp, Homo sapiens
atagtctacttattcaagaagaatgaggaacagcagacttgcacttgacctgcatgggaaccaaactcagcagatcacagactttatcaacagacccactctttcccacytcctgacaattccgcaagaatgtgtgattgctttttagacactacacttgtagtggtttattatacaattttgttgaggcaaaagataaccaaggtagacatggactagaagtgggttgcttctttaacaaaaacctaacagtggatttaggaccaggtattactccacaaggaagtcattatagaagcctggagaaatgatgagaactgtggtgagaa

SEQ ID NO: 108266 - DNA, 602 bp, Homo sapiens
tgaacaggcactgtcaaaagacctctctgagttttcgcatcctcaagttagggtcttgcaggatgttgttgttactctgctctgtgccccaactgaggaagcttctcaggaaggcactgaagctctccttaacttcttagtaatagaggatataaggtttcaaaacccagggcccagctttgtcaagcctcagcgaagcacctaggtttagtgctgtctgaggggattggaacattaggggaagaaaggattaagcctatttcctccttcctcctctccaaaaccctcaagcaactaagaggatttttgggcattacaggattttgcagactatgratacctgggtatggtgaaataacccatttattatataatctcataaaagtaactaagggaactaaaactcatcttttaaccttggaacctgaagctcaaaaggcctttgaccagctaaagcaagccttgcttaaggcatcagctctcaaccttcctgtagggaagggcttaaatctgtatgtatcacaaaggaagggaatggccctgggagttttaacacagacccaaggaccagctcaacaaccagtgggttacctaaataagga

SEQ ID NO: 108267 - DNA, 595 bp, Homo sapiens
tacttttataattagataaatgaatagatgtaaaccaagaaaataaactgctagtgtagttaaattatactttcttttcattaacttatgtatgctagagtataattaaaatatgtattggaatcacatgaatatggcttcatattttaagtcctttggtaactagttgtgtgaccagagacaaatttgcaccttagagcctccgttttcttatcaggaaagtggaattaataactaccctatagatttttggtggatatttaatgagattatgcatataatgtgtataagtgccgaatcaagtgaagacacatagcgaccattcagtacatgttagttgacttcctttttatgagttcataaatttttgttaatgaaaactgctataaaaggctatttttattatatagccacaaaaccctgatttttgaaattaattatactgttgctgacatgttactgcagaggaaagtagggaaaccaggcagggaagagtgtagtagggctgtgatactcatgtgggmaggtaggacagggagggttaaaaagtcacctatgaagttaaactgttttaaactacccacttcacaacatc

SEQ ID NO: 108268 - DNA, 554 bp, Homo sapiens
ttaattaaatattaacatgttctactatagaacaatttagagattttaaagtgtttacaggtgaattaactgatccattctcaaaataatcatttgcggaaggaagacatgtgttaattgttccattttatggaacaggaaataaagacttagagatgttcaatagtagttttcttacagtggaatggttcagaagtaagtgagatggatttttattagtctataatcacttagagattttaattattatcatgagatgaaaatcctagtcaaacacttttggaaaagtgaaaaaagaaagttatgtttggaaaaagaagggaaaaaaattataagggactttggagagagagctrcagttatttgaaaatcaaagatactttttaatgggaagatccatgctggagcagtgtcagtattgtgtctgttgttcattaggctctgttataaggggaggggtgggagattctgaatgctcatcatcacgcccaaaggaaaggatggggtgaagctgctctggaagtgggctaatgctttcgggagtgctgaaaact

SEQ ID NO: 108269 - DNA, 554 bp, Homo sapiens
ttaattaaatattaacatgttctactatagaacaatttagagattttaaagtgtttacaggtgaattaactgatccattctcaaaataatcatttgcggaaggaagacatgtgttaattgttccattttatggaacaggaaataaagacttagagatgttcaatagtagttttcttacagtggaatggttcagaagtaagtgagatggatttttattagtctataatcacttagagattttaattattatcatgagatgaaaatcctagtcaaacacttttggaaaagtgaaaaaagaaagttatgtttggaaaaagaagggaaaaaaattataagggactttggagagagagctgcagttatttgaaaatcaaagatactttttaatgggaagatccatgctggagcagtrtcagtattgtgtctgttgttcattaggctctgttataaggggaggggtgggagattctgaatgctcatcatcacgcccaaaggaaaggatggggtgaagctgctctggaagtgggctaatgctttcgggagtgctgaaaact

SEQ ID NO: 108270 - DNA, 607 bp, Homo sapiens
gtatcccaactcatcaagctgtttagtgtctggtctttctgattaagatctagtagaaactcaggaatagaacaggcaagatttaacccaagcagagcatcctgaatcaacctagtcaagattcaggtctcatttacttaactttcttctgtaatttgggcagaggagggtggaactgatgaaagacacttgattcatgtctggactgaacttacactacttattgttttctactccttgactacttatacagcagaggcagccctaaagtctaatgttcccagaggcarttgacatatttgatggcatttggcctaagacacagcataaataaaaccatgctgacttgtactatattaaaaccatagagagagagaaaaaaatcaatgtttctccaaatagtaaaggttgaaacccatgaaggaaaaaactaatattatccaacattgagtaaaggcaacacaaacactgtaagtgttttaaagtacttttatagctatagatgcaaataaatagtttttaaaatatgtagcaagagattagactgctaattctataagctacctagttacctcgatttcagaagacagcagttaggtaatgtagt

SEQ ID NO: 108271 - DNA, 451 bp, Homo sapiens
ttatttaccaactttaaattattatgccataaaacttgcttattcctgatcaattttccacctagaatgaccctaacttaataaatatcagaccccataacttaataaatattttttgtaggcattcctctttacggcactactaagactctgttgggggggcaaacatctytcattgcagtacaactcatacttagctttgcctaaccagctgattttttggtgatcttttgaaaagttggcaaacaacaggcacatgtatccctgttaaccaagttacatttgccaatatagcaagataagaaaaaagaggagaaaagagcaataattaactattgtagctagaaactactctactaaaggataaaatgaaaaagcttctccatcatcctaaatttactgttgtataaagatgactaccatttaaccatacaaccccaacttttatttt

SEQ ID NO: 108272 - DNA, 560 bp, Homo sapiens
acatttcacatgtagcaaaatgggcaatattaattactattcatgttggtaaagtacacatttttaagagaaaatatttttctatcattacagtcacagcaagtaaggcaatgtgggaatcagtttctttgattttaattaaccatttctgaggaaaatagaggatagtctaaggtatcagaaaaacttctaaaaagtcaaatcaatattagctcaaggtggttttgtgattcacagaacagaaacacarctcagtatctagaggctctagtcacagacctactgggctctgggaccaggaagcaagcagaggaggctgggaatcaacgttgtgtggtagcagtgactaggctggctcacacagcaccaggagttagattaaagacatcaaacagaggcaagatacagtcatgatcagtaattagaaaagttttgaaggctacctttgcagctagtattgagtggttgactagagaaaaggaggtaatcagaacccaggccaaagtgctcattgacagagactgtgtttgtggtgatctcaagagacaaaggccctaagc

SEQ ID NO: 108273 - DNA, 491 bp, Homo sapiens
ataaagaatgcctaagaattaataagagaaagacaaccctgtagaaaaatgggcaaaaggtttgaacaattacttcacaaaagaggatacctaatggccaataagcatatgaaaatgtgtccaatctcattagtaatgacaaatatgaaacttaatcacaacgagataccatcagctacccatcagaaggaccaaaattaacaagtttgacatttctaagcattgatgaagacaaggagcaaagagagcttgcaggctgctctttgtaaattcgtgggaatttacattggtatgactactttgaaacacagcctagcattacttagcaagttaagtgtgcaccttacagaggggtaggcatgtgacgtccaggagacatcttcacagcagcactgtttgttacaggcccaaactggaaagaatccagatgtctrtcgaaaagagaataaataagtcatttgtagtgtgttcatacagtggaaatgaataac

SEQ ID NO: 108274 - DNA, 572 bp, Homo sapiens
agaatcttcttgccttccaccagagaccaggccctacaatcccatgtaagactcctgattatcctgctgaagcaaagttcacctttttacccctggcatcaaggtcctctgcaatctggccctaacctagccttccagcatccctccctgctggaactttccactcagactcactgtttctcacacataccttatgccattgctaattcttaagccaccagattgcttcttgggcacatgagtccaygtggacacggttaaatctcctgcatgccttttgatatcttgacgtttggaattgagctgggcaattgctcaatgtgaacaatgattctacactttaaggaactggggacatgatctttccaagataaaagggcttttctttcttttctggtctcctaatgccacctcaggtcacgttccactgtgtggagcccagacaattatcatgctgtggccagagatgtttaattggactttaaaagatgagaaagcagcagggagctgattgtcagctctctgacaagactgtgccgcataggtggccagcagcacagaggagggctggc

SEQ ID NO: 108275 - DNA, 629 bp, Homo sapiens
tgtttacacagtgtgtacaagagcagaaattcttcatccttacactcataatttctgcatgttattgcatttattaaactgaattgaaaacccaagaaaggatgtggtagtccaactttgaggggcaggagagacagggtcacttggggattctagtttgcataacttacctggcaggaaaggagcaagtgtggagmaaaagacttctcccaggtcctccacacaggtgtccaacagccctggtgaccaacaaccaggcagctgtatcatctccctggactgctcctgaggggagagacggacaacaaattacacaattcttccattcttgacccttctctttccacattctgctccctggtctttcctccactgactcattcccccaaagcaactgttttcaatgaggtttgattagttgctggctcaagtttcaccctctcttctctatactctcattttcatttaaatatcacctccttggagaggtcccctgacccctagctaatatagttcctcccttttatctcagcccatttgttttctttgtgatttgaaattaatctctgtcactgagtgtcaagattgtgtgtataattcatatgctcattcatttgttcattcattcc

SEQ ID NO: 108276 - DNA, 629 bp, Homo sapiens
tgtttacacagtgtgtacaagagcagaaattcttcatccttacactcataatttctgcatgttattgcatttattaaactgaattgaaaacccaagaaaggatgtggtagtccaactttgaggggcaggagagacagggtcacttggggattctagtttgcataacttacctggcaggaaaggagcaagtgtggagaaaaagacttctcccaggtcctccacacaggtgtccaacagccctggtgaccaacaaccaggcagctgtatcatctccctggactgctcctgaggggagagacggacaacaaattacacaattcttccattcttgacccttctctttccacattctgctccctggtctttcctccactgactcattcccccaaagcaactgttttcaaygaggtttgattagttgctggctcaagtttcaccctctcttctctatactctcattttcatttaaatatcacctccttggagaggtcccctgacccctagctaatatagttcctcccttttatctcagcccatttgttttctttgtgatttgaaattaatctctgtcactgagtgtcaagattgtgtgtataattcatatgctcattcatttgttcattcattcc

SEQ ID NO: 108277 - DNA, 537 bp, Homo sapiens
gtattgtagattggctcattactgactcatgtctaaaagatatatatacaaaacacaaaggaagaggcaacttattctctggagaacacccatgcaccctactttaaatctctcaygttatatggaagttctatcatctctctcacatccaggaaaaaatggtctcgtctgatcttatattctcctgaatagtacttgaatgacacttgcatccagcactagaaaatcatacatcagttccccttggaatgatcttatgccccacaagcagcctttaaattattatgggaaattaggcattatatatatatatatatacacacacatatatatatacacacacacacacacacacacacaaatatacatatacatatatatatatatatttgtagatagaaagtgtgctgatgagcaaatattcatgtggaaaccttgacagtcattttttccattgtaaattaataaactggcaatggcgtttctcatacatcatttttttcatgggtcagagttgtggtttgcagttaacagcag

SEQ ID NO: 108278 - DNA, 599 bp, Homo sapiens
tcctagagagtttccctgacgtcttcttgcagtagtttcactgtttgaggtctcagatttaagtctttaatctattttgatttgatttttccatatggcaagagataggggtctagtttcattcttctgcacatggataatcagttttccaaatccatgtacaattgtttaagaaatagtcttctccctgtagttgtattccagcgtctaataattattttttgccrtttctttcagcacaatctactgaagagactgtcctttccctaatgtatgttcttgacaccattgtcaaaaacgagttcactgttggtatatggatttactttcaggttctctattctgttccattggtctgtgtgtctgttttaatgccagtaccatgcggtttaggttactatagctcagtagtataatttgaagttaagtaatgtgattcctccagttttgttctttttgcttaggatagctttggctattctaggtcttttgtagtttcacataaatagtgcacccattttaagcatatagttggccgaactttgataaatgtatatagtcatgtaaatacatcataatagtgatataaaatataccca

SEQ ID NO: 108279 - DNA, 599 bp, Homo sapiens
tcctagagagtttccctgacgtcttcttgcagtagtttcactgtttgaggtctcagatttaagtctttaatctattttgatttgatttttccatatggcaagagataggggtctagtttcattcttctgcacatggataatcagttttccaaatccatgtacaattgtttaagaaatagtcttctccctgtagttgtattccagcgtctaataattattttttgccgtttctttcagcacaatctactgaagagactgtcctttccctaatgtatgttcttgacaccattgtcaaaaacgagttcactgttggtatatggatttactttcaggttctctattctgttccattggtctgtgtgtctgttttaatgccagtaccatgcggtttaggttactatagctcagtagtataatttgaagttaagtaatgtgattcctccagttttgttctttttgcttaggatagctttggctattctaggtcttttgtagtttcacataaatagtgyacccattttaagcatatagttggccgaactttgataaatgtatatagtcatgtaaatacatcataatagtgatataaaatataccca

SEQ ID NO: 108280 - DNA, 550 bp, Homo sapiens
caaacagctttcataataacattaagatgttattttccctttttactgtattgattttgcatcaagaatgaaagcaattgtggcwccttagtaagaataaagacaatgacatccaacagtgctgcactgtattctgcacttttatacatgtgtaaaaattaattttgcttaaaaatgttcgtaatgaggcagtaaagtttattaactttattaaatctttgaatgacaaaatgggaagtaaatgtaaagcaaatccgtagcatatggaactacaatggttgccctgaggaaaaacacttgtacaatcatttgagttgtgagctgaactagcttcttttttcgtagaacaccgtttttacttgaaagaaagaccgagagataaactgtggttatttacacttgggtattttgcagacatttttcataaatgaacaaaatgagtccattattttaaggaaaacagctggcagtatttgattaatgccaatagtaaaatgtaagcttgagaataaaaattagatttttggataacatatcagccagacttttc

SEQ ID NO: 108281 - DNA, 459 bp, Homo sapiens
caactgctgttgctgctgctgatactactagcagcaatgagcattgacatagtcctcatggtgtgcacatcaagaatctaagcactttgcgtttattgactaattgaatcctctgatttcactgcagcacataccttagagaagtagagttactgatcggcaagggttgtgcatctttaatattattagatgctgtcaaattgccaaaatacacatctatcaggagtgtwtgagtggtacctccaacatttggtattgtgacttaaaaaagtgcctctaaacaataccatattatggataaagaaactgaggcacagagaagtgaaattacctgtacaactcctacagctggggatgaaacctaggcaggtgtatttattcctgatcactagaaattgactttcaccaccttgaataactctgagtattgagtatttcaaatatttttgtttttctcat

SEQ ID NO: 108282 - DNA, 552 bp, Homo sapiens
taagtaaatgattgtatatttgaaccacaggacattttgaaaaaaagaataaaatggatcccatgtggaaaaaatrgaaagaataaagtagatctctctacagtgacatgaaaagatctcaaagatctttcattgagtgaaaaataccacaggcaatataatgagtatggaatgttccctttggtgggaaaaaatgaagatataggaaatccagttaacagtgcttacatttgaggacaggccctggggtttgggagtgtgatggagtaatgtgcatactctattgatgtgtttttatattttccccatctgtgtgtattaatttttcaactgaagtgaaagaagaacagaaaaagaaatccttcctctgcattgtggcatagagaaggtatccctggttcgtggccaggtcgggggtgtcggggcacacattcacagccctacaccctgaaagaatccttccacacctcttctggaagatgctataatctgtcaaatcccatagctagtaggaccaccttatggcttcttttccagtatcattttgtctca

SEQ ID NO: 108283 - DNA, 538 bp, Homo sapiens
tagtgaggtgtaaatcagaagcatctatattattcaccagtcaccaccctggactatagtctgttgattttctacctctattctcttactaaacttttggrtacattccaaagcatcatggtcacttccagttatgaaaggatgtttaaaagcccagcccagcttaaaactccaagcccatattcgctttgaaatcctccccttcctcatcacgagctgggtttgcagctcagagaactggaagggagttgctttcattttcacttctcctccctttctagaactttcaaaggacagaatcccagtggctggctctaaggaacctcttccctggcattgaagattaggagggaaaatagtgacttgactggcagtggggaagccacacaagtctcactttgtcactgtgaggattctgttggttgccaactgcctttcccaaaatggcaggtggtctcttcgccaaggatcctttccaaggcagcagacaactttccccagattctgcccatcattgaggactctgtagatggggaaa

SEQ ID NO: 108284 - DNA, 424 bp, Homo sapiens
gaaggtgttaagaaaacattgcattgtcctggttatttagagatagagacataaattctctatgattatttctcccaaagaycttggaatccaatggacctgagacaggtcaagatgaatgaatacaaatatgagaagggcatagctcatcagaaattcagagaccctgggtgagcagggttaggcaacttggagaaactttctagacacaggagccatagcactgtaactaaagaaggaggaaaacacagcatgccgagcagggtatagaggctgcaggtgtgtttttccttggctttcatgctgtgctggccctgacacaggactgactttacccataaagaaagtggcagcagcaggaagggcactgtggtgagccctggtgaatccacatggcacttggaccaacccctcagacacaacc

SEQ ID NO: 108285 - DNA, 424 bp, Homo sapiens
gaaggtgttaagaaaacattgcattgtcctggttatttagagatagagacataaattctctatgattatttctcccaaagaccttggaatccaatggayctgagacaggtcaagatgaatgaatacaaatatgagaagggcatagctcatcagaaattcagagaccctgggtgagcagggttaggcaacttggagaaactttctagacacaggagccatagcactgtaactaaagaaggaggaaaacacagcatgccgagcagggtatagaggctgcaggtgtgtttttccttggctttcatgctgtgctggccctgacacaggactgactttacccataaagaaagtggcagcagcaggaagggcactgtggtgagccctggtgaatccacatggcacttggaccaacccctcagacacaacc

SEQ ID NO: 108286 - DNA, 424 bp, Homo sapiens
gaaggtgttaagaaaacattgcattgtcctggttatttagagatagagacataaattctctatgattatttctcccaaagaccttggaatccaatggacctgagwcaggtcaagatgaatgaatacaaatatgagaagggcatagctcatcagaaattcagagaccctgggtgagcagggttaggcaacttggagaaactttctagacacaggagccatagcactgtaactaaagaaggaggaaaacacagcatgccgagcagggtatagaggctgcaggtgtgtttttccttggctttcatgctgtgctggccctgacacaggactgactttacccataaagaaagtggcagcagcaggaagggcactgtggtgagccctggtgaatccacatggcacttggaccaacccctcagacacaacc

SEQ ID NO: 108287 - DNA, 509 bp, Homo sapiens
aaccaaggcccgcctttcctaggagccttcattgcccagcctactccaygccacagtgaccgctccctcctccagcttctaatggcacaggtggtggggagggagcagaggaaagggtgactacatgtcctcattttgctaggagcattctggtagtgtatgtctgttgttttagcatcattattaatagcacatctactctcaaaagtacgctaataggatgatgttatgtggttttccatggcacagtgaatccaccctggaggcctcagagtctaaggtgttgcaaaggcttggccctttctacattcctgtgcactgatcacagtgcataggaaagagaggcacaatgcttcaaactgctaccaagcacactcatcccccacagtgggcctcactacagggcctttgctactccatcctgctctctgccccagcatactggctcattcggactaaccacagctgatcagggtctaggtcatgctaagtggctcaagcctccatca

SEQ ID NO: 108288 - DNA, 509 bp, Homo sapiens
aaccaaggcccgcctttcctaggagccttcattgcccagcctactccatgccacagtgaccgctccctcctccagcttctaatggcacaggtggtggggagggagcagaggaaagggtgactacatgtcctcattttgctaggagcattctggtagtgtatgtctgttgttttagcatcattattaatagcacatctactctcaaaagtacgctaataggatgatgttatgtggttttccatggcacagtgaatccaccctggaggcmtcagagtctaaggtgttgcaaaggcttggccctttctacattcctgtgcactgatcacagtgcataggaaagagaggcacaatgcttcaaactgctaccaagcacactcatcccccacagtgggcctcactacagggcctttgctactccatcctgctctctgccccagcatactggctcattcggactaaccacagctgatcagggtctaggtcatgctaagtggctcaagcctccatca

SEQ ID NO: 108289 - DNA, 509 bp, Homo sapiens
aaccaaggcccgcctttcctaggagccttcattgcccagcctactccatgccacagtgaccgctccctcctccagcttctaatggcacaggtggtggggagggagcagaggaaagggtgactacatgtcctcattttgctaggagcattctggtagtgtatgtctgttgttttagcatcattattaatagcacatctactctcaaaagtacgctaataggatgatgttatgtggttttccatggcacagtgaatccaccctggaggcctcagagtctaaggtgttgcaaaggcttggccctttctacattcctgtgcactgatcacagtgcataggaaagagaggcacaatgcttcaaactgctaccaagcacactcatcccccacagwgggcctcactacagggcctttgctactccatcctgctctctgccccagcatactggctcattcggactaaccacagctgatcagggtctaggtcatgctaagtggctcaagcctccatca

SEQ ID NO: 108290 - DNA, 509 bp, Homo sapiens
aaccaaggcccgcctttcctaggagccttcattgcccagcctactccatgccacagtgaccgctccctcctccagcttctaatggcacaggtggtggggagggagcagaggaaagggtgactacatgtcctcattttgctaggagcattctggtagtgtatgtctgttgttttagcatcattattaatagcacatctactctcaaaagtacgctaataggatgatgttatgtggttttccatggcacagtgaatccaccctggaggcctcagagtctaaggtgttgcaaaggcttggccctttctacattcctgtgcactgatcacagtgcataggaaagagaggcacaatgcttcaaactgctaccaagcacactcatcccccacagtgggcctcactacagggcctttgctactccatcctgctctctgccccagcatactggctcattyggactaaccacagctgatcagggtctaggtcatgctaagtggctcaagcctccatca

SEQ ID NO: 108291 - DNA, 660 bp, Homo sapiens
actttttaccccatcagttgtaccatccaccttccagctatcttcccacttcatgcccatgattccatgcgctattcatgctggaccacaacaactaagaagtctcttttgcatttctttcttccctccagcaacacatggccctttatgcagctctcacagccagtctgtatgagagacagaaataatggcattgcccttgggaaaggagaaacagataaagattccttctcttgagttctagcggcaagcagtgacaaagtgccccacaaaatttaaagcatcaaggagtagcccgtgggaagatatccatcagatcctccaatatatgaattaggtctgatgggggtagctgctcactggtcgtgatatcttgggactcctgcttctatccagcccctacatcgctctttcatgattttaaatgtgcactcaaggagctcactccaaatccaagcctacatgtatgcctaacctactscaaccagagagctccatatttatgtgaagaaaagggccatatctgattaaacaaccatggttctgtttgcaaacaccaatccatacattatgaaagacacagcaaatgtccccaaataattgattttattcacaccaagtttactctgatggattaccacaaataaacatgtaaacatg

SEQ ID NO: 108292 - DNA, 660 bp, Homo sapiens
actttttaccccatcagttgtaccatccaccttccagctatcttcccacttcatgcccatgattccatgcgctattcatgctggaccacaacaactaagaagtctcttttgcatttctttcttccctccagcaacacatggccctttatgcagctctcacagccagtctgtatgagagacagaaataatggcattgcccttgggaaaggagaaacagataaagattccttctcttgagttctagcggcaagcagtgacaaagtgccccacaaaatttaaagcatcaaggagtagcccgtgggaagatatccatcagatcctccaatatatgaattaggtctgatgggggtagctgctcactggtcgtgatatcttgggactcctgcttctatccagcccctacatcgctctttcatgattttaaatgtgcactcaaggagctcactccaaatccaagcctacatgtatgcctaacctactgcaaccagagagctccatatttatgtgaagaaaagggccatatctgattaaacaaccatgrttctgtttgcaaacaccaatccatacattatgaaagacacagcaaatgtccccaaataattgattttattcacaccaagtttactctgatggattaccacaaataaacatgtaaacatg

SEQ ID NO: 108293 - DNA, 516 bp, Homo sapiens
gtgttcagcacaaatgttgacacccctaagggcatcctgcagctgccccttccctgctaacctctccttccccaactaagccatcgccaaattctgttcgtttcattcaacttcaaacgagtctcttgccaggcacggtggctcatgcctgtaatcccagtactttgggagaccgaggtgggaggactgcttgagcccaggagtttgagaccaggctgggcaacataggaagactcaatctttatcaaaaacaaaaaaaaaaaaaacaaacaaaaaaaaaccatgagtgggtgtggtggcatgcacttgacaggctgaggcaggaagatcgcttgagcccaggagttcgaggttgcagtgagctatgatcataccactacactgcagcctgggtggcagagccagayctcactgcaaccaataaaacaaacaaacaaaaactcttacactgctctccttctttccagcaacattactgctttttggaaaataccgaaatggaagcagaaaaacaga

SEQ ID NO: 108294 - DNA, 516 bp, Homo sapiens
gtgttcagcacaaatgttgacacccctaagggcatcctgcagctgccccttccctgctaacctctccttccccaactaagccatcgccaaattctgttcgtttcattcaacttcaaacgagtctcttgccaggcacggtggctcatgcctgtaatcccagtactttgggagaccgaggtgggaggactgcttgagcccaggagtttgagaccaggctgggcaacataggaagactcaatctttatcaaaaacaaaaaaaaaaaaaacaaacaaaaaaaaaccatgagtgggtgtggtggcatgcacttgacaggctgaggcaggaagatcgcttgagcccaggagttcgaggttgcagtgagctatgatcataccactacactgcagcctgggtggcagagccagacctcactgcaaccaataaaacaaacaaacaaaaactcttacactgctctccttctttccagcaacattactgctttttggaaaatacygaaatggaagcagaaaaacaga

SEQ ID NO: 108295 - DNA, 581 bp, Homo sapiens
ctcttttccccgcccttcctcactgcgactcccatcactgcacaggtggaggcagtgaaggggatgccttgctttctgagctgctgaaaacatcagggtttcagttctgtcttgtttactgctmtatctgatcaccttgcattgtgcttggcatgtagtagctgctcagtacataccatttgaatgaacaaatcaatcaattaatcaattaatcagttaatcagccagtcgatgcaggtgatgcctgttcctaaattcctttggtcccattaggtactttgcaacatttccatttcttctgcttctgttagaagggacctttttaaacttgaagggcagaggcccccacgcagctcatgcagatggtggtactaactggagaagcagttacagttttacctagcatgcatttctgttggagctcatttcaagtaaatgacttatactttatgtccacagcaaagaggcccacatttgtggcaatcttggtcagtacagtcaggaaggaagtgtagctgaagatcactgaggaaccagagaaattagtgtatacctggatttaatgatcaatttgcttatgt

SEQ ID NO: 108296 - DNA, 581 bp, Homo sapiens
ctcttttccccgcccttcctcactgcgactcccatcactgcacaggtggaggcagtgaaggggatgccttgctttctgagctgctgaaaacatcagggtttcagttctgtcttgtttactgctatatctgatcaccttgcattgtgcttggcatgtagtagctgctcagtacataccatttgaatgaacaaatcaatcaattaatcaattaatcagttaatcagccagtcgatgcaggtgatgcctgttcctaaattcctttggtcccaktaggtactttgcaacatttccatttcttctgcttctgttagaagggacctttttaaacttgaagggcagaggcccccacgcagctcatgcagatggtggtactaactggagaagcagttacagttttacctagcatgcatttctgttggagctcatttcaagtaaatgacttatactttatgtccacagcaaagaggcccacatttgtggcaatcttggtcagtacagtcaggaaggaagtgtagctgaagatcactgaggaaccagagaaattagtgtatacctggatttaatgatcaatttgcttatgt

SEQ ID NO: 108297 - DNA, 581 bp, Homo sapiens
ctcttttccccgcccttcctcactgcgactcccatcactgcacaggtggaggcagtgaaggggatgccttgctttctgagctgctgaaaacatcagggtttcagttctgtcttgtttactgctatatctgatcaccttgcattgtgcttggcatgtagtagctgctcagtacataccatttgaatgaacaaatcaatcaattaatcaattaatcagttaatcagccagtcgatgcaggtgatgcctgttcctaaattcctttggtcccattaggtactttgcaacatttccmtttcttctgcttctgttagaagggacctttttaaacttgaagggcagaggcccccacgcagctcatgcagatggtggtactaactggagaagcagttacagttttacctagcatgcatttctgttggagctcatttcaagtaaatgacttatactttatgtccacagcaaagaggcccacatttgtggcaatcttggtcagtacagtcaggaaggaagtgtagctgaagatcactgaggaaccagagaaattagtgtatacctggatttaatgatcaatttgcttatgt

SEQ ID NO: 108298 - DNA, 581 bp, Homo sapiens
ctcttttccccgcccttcctcactgcgactcccatcactgcacaggtggaggcagtgaaggggatgccttgctttctgagctgctgaaaacatcagggtttcagttctgtcttgtttactgctatatctgatcaccttgcattgtgcttggcatgtagtagctgctcagtacataccatttgaatgaacaaatcaatcaattaatcaattaatcagttaatcagccagtcgatgcaggtgatgcctgttcctaaattcctttggtcccattaggtactttgcaacatttccatttcttctgcttctgttagaagggacctttttaaacttgaagggcagaggcccccacgcagctcatgcagatggtggtactaactggagaagcagttacagttktacctagcatgcatttctgttggagctcatttcaagtaaatgacttatactttatgtccacagcaaagaggcccacatttgtggcaatcttggtcagtacagtcaggaaggaagtgtagctgaagatcactgaggaaccagagaaattagtgtatacctggatttaatgatcaatttgcttatgt

SEQ ID NO: 108299 - DNA, 604 bp, Homo sapiens
aaactgtccctattcacagataacatgattttctatgtaaaaatccaaaggaatctatgaaaaactggtaaataagttgagtaatgctacaggattcaacatcaacacacaaaaaacaatcatatttctatatattcacaaggtaggactggaaacagaaacttgaggaacagctctattaacaatagctaatagctcagaaaaagacatgtttaggtataaatctaaacgaaatgtgtccaagatctgtgtgatgaaaccacagatatgtacatggaagaaatcaaagaagacttaaataagtggagggacaccctgtgttcatggatgggaagactcaacatagtaaaaatgtcaattctccccaaattgatctataaatttgatgcaattctcataaaaattccagaaagggttttaaatagacatttacaagctgactaaaatttgtatgaaaaagcaaaggaactagggtagttaaaacaattctgaaaaagaagaaaatgggagkactcactaactgattttaagactcactatcaggcaacagtaatcaatcatgttgattgattggcaagtattggcaaagggataggcccatgaa

SEQ ID NO: 108300 - DNA, 391 bp, Homo sapiens
gtgctaacgtatttatagcatttagaggagggaataaatccagaaccttccccatgggggcttcctaggcctttccctcctgacacatggcatttgcccagtggaaggtctgcatacactacccctgcatcccctccagccagcagcggacagtgacggtggagaggctgggcacgggacatgcctctgtgcatgcttgtgtgcatatgtatgcccagcgtaaaaaaatgccctgctcttgtggtctgtctctgcccaatggcttgccacgacccctggtatcagccctgaccctccaaggcttatggagaggccaagtgcacggacccatctccccactctctaaacactgaacggctcttyccatatatgggatggaggtggggaattc

SEQ ID NO: 108301 - DNA, 572 bp, Homo sapiens
tgctaggcttccgacttgcatagtgttggccaaccctcagcgtactcaactttttaaacatgccgagggargtggcatcttgtcgttgttgaattcgccactcttgagtctctggtggctctgggagtctccagcactggcgactgccccctttttgcagctcccgcttatgcccttgactcgctgcttccctttggtatatacagcatcctggggaccagaaatcccgagttgccatttgatcagatccgccaacatttcaccttatggtttgggcttttggcgtcgtgtttaaaaagtctctgtctcccatccgagtgacagatattctccattagctttctagttttgccttgcacatataagtctctgttaagcccatcttagactaccttacgtattttgagccagttttcccaacaccggctgttaagcaactctcatttcacagatgaggaaactgggacccctggggagaaaacaacttgtctagagccatagggagggtggctgtggctgtcttctgggacagatctgaactacttgcgcacatcacatcactcccccaatcc

SEQ ID NO: 108302 - DNA, 503 bp, Homo sapiens
tacgattgtgtaacttcaaagtaatcaataaaaaaatacaaacttcaagatataacacaatttattaatgaaagccttaatggtacatcagtttgttgtggaatcagttttttctctggtcatgttggtactattaagttgcattcatgttcataattggtttaactctttcattttaaccatgtatgtacctggtttagttaaaagacaaaaagtgtaaaatttatttactgggttgaatcatatagttactaaaacgctttggtaatggggagcttgtgaaggtttctgagcaggggtttgatgttactaratttacaaagtgtatgattaatctatataatgcatagaatagctatattaactagctcatagcaacagtagcaatgaggctttcagagctgctgcttttgatcagggtgtaacttttagtgctactcaaattatcctaaatgaaatagtgctgattgcttctatatagtgtgatccttttggacaccctt

SEQ ID NO: 108303 - DNA, 579 bp, Homo sapiens
taatataaagtttattatttataccctttttaatgcaaagctaatatttagttatatgtatgatttttaataaaaattactttactttttcctatgaatttaaaacatttgatgttggcattttatacaggcaggttgccaaatttaattatgttacactaagttaaacacagcacttaattacctcaaatccagatttctcttaatctgtgtgtacataaaaggaataagtccaaattaatttatagtttagtgttgcactataggtaatattcttttgttatttctagtttttatggaatccttttctttcaagattctaaataataaatcgttacstctcaatagtggtaatagtggtaatggtttattattagctgtttcaccaattgaactacattcttttggagacattcctttcttttttgatgttgatttgcaaaggagaaatgcttgttaatatacaaactctagtcagttacctgtgaggatgagatgtgtcagaggactcagactttggtatagttagaaaaataatatttttctcacttgattctgtgtgaatgtctcttctgatac

SEQ ID NO: 108304 - DNA, 579 bp, Homo sapiens
taatataaagtttattatttataccctttttaatgcaaagctaatatttagttatatgtatgatttttaataaaaattactttactttttcctatgaatttaaaacatttgatgttggcattttatacaggcaggttgccaaatttaattatgttacactaagttaaacacagcacttaattacctcaaatccagatttctcttaatctgtgtgtacataaaaggaataagtccaaattaatttatagtttagtgttgcactataggtaatattcttttgttatttctagtttttatggaatccttttctttcaagattctaaataataaatcgttacgtctcaatagtggtaatagtggtaatggtttattattagctrtttcaccaattgaactacattcttttggagacattcctttcttttttgatgttgatttgcaaaggagaaatgcttgttaatatacaaactctagtcagttacctgtgaggatgagatgtgtcagaggactcagactttggtatagttagaaaaataatatttttctcacttgattctgtgtgaatgtctcttctgatac

SEQ ID NO: 108305 - DNA, 581 bp, Homo sapiens
tgtggtgacagcaaatcaatatatgtcctggtacctgtatgccccaatgaactgataaatttaccctgtacttcagagcagtggccatcagaagcagttaggttcaaggcaacatatgaagcattgcacctttgctgttctgtctcagttgtactaaaaccttttctagccctgtcctatcatcagtgctcaggaactgtgattttactctgttctactggacatcacactaatccactacatggatgttttcatactgatgaaagtagtaaaatatcctatacgtttttgtaagtcacacgtgtgccagaagttaggaaayaaacctcgcccaaattcagagacaaacatacaccaccttggtaaaaatcttagggcatagtgatcaggatatatgaagaaatgtcccacaaggaggacagttgctgtacctgctccctccttcatgaaaaggtgtcatccttaatgggccactttggattttggaaacaacatacatctcatttgggaatgccattccagtttatttaatccaaaaggctgtatgtttggggaagagaggctctgtaaaggccccgact

SEQ ID NO: 108306 - DNA, 652 bp, Homo sapiens
tatgtgtctatattagaatgcacatatatattcttgctctgtcagctgaggtggcctaaaagtaatgacatctcaataacaatgagcacaattagtgcccaaatattgattttttttctttttaccagcttgacttcaaaatacatcaaatattgatttctaatgccaatttcccataaaacaaaccaggattacttggagaaatggtagattctgaggctggggcaaggaatatataagaggagyatcttattgtggccagaaatgaaggaaatgcaaaaaataaaaatgtaaagcacacacacacacaatggtgggatatgttaaagagatacaggtgccagttaaaagaatgcccaatgaacaaagctgtaacaatttaagcaacaaaataaataaaataatattaaattaaaactcaaaatgtaaaatatcctgagtccataaggatataagttgaataaataaataaatatagacaaatctcccaagcagaagaattcaaaatagtatatatgatactccctcctcaatgagatggaggatgaatacccatcccttacatgtgggctgcacataatgtcttgctcccaaagaatatggtaaagaaaggtagaaaataactttacagaggagaaacctgtcaaacacc

SEQ ID NO: 108307 - DNA, 608 bp, Homo sapiens
ctgctctcagcagagaggaggccctggaatgagtagctcctttctgcagctggtcatccagatatctgcttagttctggctgagcgcagggcttttatgggcctcagaggagagaaagtatgtgctgattggtccatgggtagccgtgggtggcctggaaaaggaaccacaagttcccactcctgtctgcaggactggcagcctggcccccagccttcaggccctccatggcctgaaggtggggcctcattgcccttttccagccaggaccctgtctacctcctgctgccattcatggcccccaggctataggtgccaaggggtgcctgcaggccagcaccaagctaccctcagttcctccatcagcttccctcctatgctcatcagcacccaaagtccagaaggggccaaggcagcagggggctgtcctgtcagcactccttgaccatgtgcacacccagctgggctgtgacagcacctgggctcagctccgactttgctccaagatcaaagtaggtgctgacagcagggagaaggcagacagcgggasgaggcatttctgagcctgtgagggcaaggggggccttcccagcccccgcaaagtgcaa

SEQ ID NO: 108308 - DNA, 608 bp, Homo sapiens
ctgctctcagcagagaggaggccctggaatgagtagctcctttctgcagctggtcatccagatatctgcttagttctggctgagcgcagggcttttatgggcctcagaggagagaaagtatgtgctgattggtccatgggtagccgtgggtggcctggaaaaggaaccacaagttcccactcctgtctgcaggactggcagcctggcccccagccttcaggccctccatggcctgaaggtggggcctcattgcccttttccagccaggaccctgtctacctcctgctgccattcatggcccccaggctataggtgccaaggggtgcctgcaggccagcaccaagctaccctcagttcctccatcagcttccctcctatgctcatcagcacccaaagtccagaaggggccaaggcagcagggggctgtcctgtcagcactccttgaccatgtgcacacccagctgggctgtgacagcacctgggctcagctccgactttgctccaagatcaaagtaggtgctgacagcagggagaaggcagacagcgggacsaggcatttctgagcctgtgagggcaaggggggccttcccagcccccgcaaagtgcaa

SEQ ID NO: 108309 - DNA, 569 bp, Homo sapiens
tcaaccagagtcctaaaataagtgagtatagtagaataaaatattttgagagaagagaaagagaccacattcacgtaacttttgttagagtatattgctctattttattattagttgttattgttaatctcttactgtacctaatttgtaaattaacttcatcacaggtatgtatgtacagaaaaaaaaaacctagtatatatagggttcactactatttgtggttttagactccactgggggtcttggtacgtatcccctgtgagtaacaggggactactctatttgaaaaactcttgtagatgtatgagcatgtgtatattctaaggactcagagagaagggaggcccaatctactattttaccaaacaaaagagggaagaaataattgaatttatttctgtttattaataattttcttcctgaattttactttttatattttttaaatttatttttacctaaagcaatcaaatcaggaatggttttgtarcctctaatcttttcacctaatatgtaatgtgtatatagaatttaaaagtatagagtatgtcacttaaaaaaaatcc

SEQ ID NO: 108310 - DNA, 522 bp, Homo sapiens
atgtaaggcaataaattgttttctcacatgaagtaattcccatttcttctttataaattgcctaaccttaaactggctaagacttgtaactatagaacaatagacaatgtggctttatatattgggcaaacctgagtcaaagagtcagtttttagattttgcaaatgacccagggcagctttgaaacagttgattaacatcttggagtgttggcatggtgggccctggtttctctaaccttccatctgcagtacacacatggggacataatgtgacaaaagcagtggtcctctgaccagagaaatcagagatatccatgaagattctgccctcagggagcttccagtctagtaaggaaaacagactatcagtaggtaaacacatacataagtatgtacttgtagattggaaaaaatggtgtcaactagagaccaaatgatgatggataataaagaggaagccctacataaatggtcagggaaggagggmgatatgtttggctctgtgtccctactcaaattt

SEQ ID NO: 108311 - DNA, 347 bp, Homo sapiens
ctttttaaaatctacagttcaatggttttgctgtattcacaaagtgattgtattagggtcatccagagaaacagaaccaatagaaggtgtgtacatgtgtttagataaagagatttattattatgaggagttggctcacctcattacagaggttggcaagtgccaagattggcagagtaaatcagcaggctggagacacgggagagcccatgttgcggctctggtgtccmcctgaaggcccaagacccaggagagccaatggcatcgttccagtcccgagacccaggaaaagcgcatgtgtcagtttgagtctgaagcaggaaaaatctgatgttccaggttgaagg

SEQ ID NO: 108312 - DNA, 449 bp, Homo sapiens
cactcacctttatacaccatgtttacatcctcaaagccctgtgacctttctaatacaggcacatattacgtttttcatactgtcctcttctctctcaaacacttacttaagggaaagacctgatcctactttcaaaacatttgaagtgagtggttaagtgactttaactgaagcttcactaaagcccagatccaagtcaactgcatattagattgactcagtccctcacactaatggcccaatagaagaagggtacattctttttccaggagacatatrcttactataggcactactttttaaaaaatatactacatttcagactaaaaaaattgcaagacatgcaaagaagcagggcaatgagactaataatcaggggaaaaattaccaatagaagtagacccacagatgactgagtgttggaattattagacaaggaccttaaataa

SEQ ID NO: 108313 - DNA, 602 bp, Homo sapiens
aatatgacatcatttcctggggtgatcagccagctacttagtggcagcatgattaaaacggactactttccacatagaggggcgtaactttgttcttactgtaaaaacacttggatatggatttgccttacctgaatgcaatgtttcttccaaacctgtcatactgcagagtgtcttatccactattgcagtaattctgtacacattacttctgatcaaacaactcattcacagcaaataacttgtggcaatgggcccacgctcatataattcactggccttactgtgtttcccctcatcctgtatcatttggtttggtacaacagtggaatggccttttgaaggctcagctacaccttgcagggctaaagcaatgccctccatgagrctgtccaggccctaaaacagcatccagtagatagtgatatttctctcacagccaagaatcaaggggaagaaatgcaagtaatgaggtaatattgtttagtgtctttctatatgaccaaatatgaccaaatcttgctatatgatacaacatagagtcaaatttgctaatgtttcatgtccactagaaacacataggcattattctaccactagaa

SEQ ID NO: 108314 - DNA, 602 bp, Homo sapiens
aatatgacatcatttcctggggtgatcagccagctacttagtggcagcatgattaaaacggactactttccacatagaggggcgtaactttgttcttactgtaaaaacacttggatatggatttgccttacctgaatgcaatgtttcttccaaacctgtcatactgcagagtgtcttatccactattgcagtaattctgtacacattacttctgatcaaacaactcattcacagcaaataacttgtggcaatgggcccacgctcatataattcactggccttactgtgtttcccctcatcctgtatcatttggtttggtacaacagtggaatggccttttgaaggctcagctacaccttgcagggctaaagcaatgccctccatgaggctgtccaggccctaaaacagcatccagtagatagtgatatttctctcacagccaagaatcaaggggmagaaatgcaagtaatgaggtaatattgtttagtgtctttctatatgaccaaatatgaccaaatcttgctatatgatacaacatagagtcaaatttgctaatgtttcatgtccactagaaacacataggcattattctaccactagaa

SEQ ID NO: 108315 - DNA, 608 bp, Homo sapiens
gtcattcatatttccttttctgtgtactctcattcatacattttgtctagttttcttttatgttggtyatattaccctgttaaagctaaacccttactagggtccagaaggccttatgatctggtacccaggtgtgtaaaattttctgtggattagataataccagagaaaatttgtgagagatgataaaaatggaaaaatgatgctaaagcattccaaaggctatggcctgggtgctcacttttgctttaaaaacttccacatactgggaatatttccttgggaaaataatcggatttcatagtggaaattagaagaaaatatttgtgttaagaaaattcatgttatcttctactgtgatggaaatcaactttttccccattaaaaaatataaatcgtgttacagattcaagtgcaagtgatttttaaagtgacatggcaaagtgaaatggaggattgaagcagttttctggatagcccaggctaccacctgaccacctcatctgatatgtacatgtaattaacaatttttcgtgagaagtttaaatcactatagcagtcaactgttttccaaaattcattcttcttttcttctactctactggatt

SEQ ID NO: 108316 - DNA, 599 bp, Homo sapiens
aaccaaaccaaacaggtaaacaatgagagaaagaaaggaacagaagatctacaaatcaaccagaacacaataaaatggtacaagtaatttcctgcctatcaataatatcattgaattaattcctattaaaagatatagcatggatgaatggattaaaaagaaaaaaataccccactgtatgctgcgtatatgagattcacctcaccattaaagacagactgaaagtgttgaaatggaaaaagatattctttgcaaacaaaaactaaaagcaagaaggaatagccacacttatatcagacaaaataaactttaagagatcaayttaatgatgatataataatttaaacatacatgcacccaaacagaactggagcacccaaatatataaagcaaatattattagattccgtggaagaaatacattgcaatacaataatactagggagctttgaaacctgtttcagtaagagacagatcatccagagagaaaatcaacaaataaattcaaacttaaatggcagtataggctaaatttacctaagagacatttgcaaatttcatccaacagttgcagaatatgcattattctccactgcaca

SEQ ID NO: 108317 - DNA, 536 bp, Homo sapiens
atacagattggaagcaataataaatatgtgattgtttgcagatatgatgagatacaggaacacacacgcaaacacacacacacgtaaaaatctatagacaaactattaaaattcaaaccaaatctatcaatatgctggatacaagattatattacaaatcaacacacaaaagatccacaaattgaaccaaaaagaaattgtgccaaagaccaaatttccactcagggaatgtcctcacacaactgtctccctttttctccttcacatctaagggtggcaaacctccctgcccacttcaagggtgcccttacraccagaaaactctactatctcttgtggttttcctatacttaaactgtacttatgtaaaacatcatttattaaactctccgactaggacggtgacaaatataattccttctcaagatgggcagtattagccaccgtagaagctccattcttcttgtctgtcattggttcaataaatatttgttgtcatgtgattccattctggccattaaatgaggttagaattc

SEQ ID NO: 108318 - DNA, 438 bp, Homo sapiens
ggagtcagtgctgaagctcccttctcttctcgcccccgcttcaccagacaacagccttgacaaggcccccagtctgtgctgccgcctcccccagccccatgctgacggcagggcagctggtccttgtgggttttgagccccaggaggctgccacttaaggcatgagcagggctgttattctcagcaacgcgagggactctcatcctgggtttcatttattaattggactctaatgaagcatcactaattsctgatggtgctacaacactgcaggtgggcctcagtttacagaataactgactctggagtaaggagggcaccaactggaggccagcagctcccagtccctgagggcccagctcttcccctgcccttgcctgcagggcatgggggctgctctgggaaaaagaaagcgcaccttccgagaaactctgagaa

SEQ ID NO: 108319 - DNA, 593 bp, Homo sapiens
tgctttttgcttccatcccaaggctgaaagaatccttctcatatctaatggacaaaggtaggattctcccttcaaatttttgtscaagacattgtgtatccacacttaatctcccgactctggaacacaaaatccaggaaggctcattctctatttctgttttctgccctgccaaaagcttcccccaatgcagccaagtcactggatactgggagaacaatgagcataatatatcttcatatctcagaagtactacactgcatcgctacttaagcgagcaatctcttgctagcttctaattctccttgtgtaatttttcccaagtgtctttccctcctcttgatacatgttctggaaactaagaacaaatctgcaatcctactgaatctccttgcaaacagggcccctgcactgctgactgtaatataaacccttccagacactattttcttgcttttggttccttttgcagaactcacacttttaagagaaaatttaaaaacaagattgcaaactagtatggattgaattgtatcaccccaaaatggatgttgaaagcctaacccctagtactcaggatgtgacctcatttg

SEQ ID NO: 108320 - DNA, 593 bp, Homo sapiens
tgctttttgcttccatcccaaggctgaaagaatccttctcatatctaatggacaaaggtaggattctcccttcaaatttttgtgcaagacattgtgtatccacacttaatctcccgactctggaacacaaaatccaggaaggctcattctctatttctgttttctgccctgccaaaagcttcccccaatgcagccaagtcactggatactgggagaacaatgagcataatatatcttcatatctcagaagtactacactgcatcgctacttaagcgagcaatctcttgctagcttctaattctccttgtgtaatttttcccaagtgtctttccctcctcttgatacatgttctggaaactaagaacaaatctgcaatcctactgaatctccttgcaaacagggcccctgcactgctgactgtaatataaacccttccagacactattttcttgcttttggttcmttttgcagaactcacacttttaagagaaaatttaaaaacaagattgcaaactagtatggattgaattgtatcaccccaaaatggatgttgaaagcctaacccctagtactcaggatgtgacctcatttg

SEQ ID NO: 108321 - DNA, 488 bp, Homo sapiens
ctttattccttaatgtgtttgattctatttcctggtgacttttcttggattgttttttttttattttatttaaatgtttagtccgggggaagatttattctgctacatgctataaactgtagaaaagcctacaccgttaccatgttgctgtccagatactgcaagactatttactaaatgatcctcctgcctctccaagtagctgggaccatgggtgcatgctaccacgtccggcttatccactggacctctgatttccttagacattatgttcctgcatagcactggctctgcatctggcctttstgttccattgccatctgtctgtccctgtgtcttaccatgccacatccttgtgctctcatctgcttgcatgtctgctgatggaactggccaagtgccctcactcctttgcatctttttattatgatacctattgatgtttacccagaaaccttagaatcatttcgccaaaatctataaaattc

SEQ ID NO: 108322 - DNA, 488 bp, Homo sapiens
ctttattccttaatgtgtttgattctatttcctggtgacttttcttggattgttttttttttattttatttaaatgtttagtccgggggaagatttattctgctacatgctataaactgtagaaaagcctacaccgttaccatgttgctgtccagatactgcaagactatttactaaatgatcctcctgcctctccaagtagctgggaccatgggtgcatgctaccacgtccggcttatccactggacctctgatttccttagacattatgttcctgcatagcactggctctgcatctggcctttgtgttccattgccatctgtctgtccctgtgtcttaccatgccacatccttgtgctctcatctgcttgcwtgtctgctgatggaactggccaagtgccctcactcctttgcatctttttattatgatacctattgatgtttacccagaaaccttagaatcatttcgccaaaatctataaaattc

SEQ ID NO: 108323 - DNA, 488 bp, Homo sapiens
ctttattccttaatgtgtttgattctatttcctggtgacttttcttggattgttttttttttattttatttaaatgtttagtccgggggaagatttattctgctacatgctataaactgtagaaaagcctacaccgttaccatgttgctgtccagatactgcaagactatttactaaatgatcctcctgcctctccaagtagctgggaccatgggtgcatgctaccacgtccggcttatccactggacctctgatttccttagacattatgttcctgcatagcactggctctgcatctggcctttgtgttccattgccatctgtctgtccctgtgtcttaccatgccacatccttgtgctctcatctgcttgcatgtctgctgatggaactggccaagtgccctcactcctttgcatctttttattatgatacctattgatgtttacccagaaaccttagaatcatttygccaaaatctataaaattc

SEQ ID NO: 108324 - DNA, 388 bp, Homo sapiens
caacaaaactttaaatttggcatgcmacagtagctgtttatgatgtgtttccatattaccacataataaagagaatgatttcaaatttaatatattcaccttataaaattcacaattctgtccatgttggtcagcacaacgttcagttaagctgcttttttttcatagtaaaactctctcaatgaaggaagcagtgcattaatttaaaatctagcccaagcacttcttaacctggatgacattttcctgtcgttgcaagctgcagccatcagaacatactcttacataaaacttaaccccaaaccacattttgataatataaccttcatagttttatacattcagagctagttgtgtttgtgacaattaagctaaaagatacacaatt

SEQ ID NO: 108325 - DNA, 630 bp, Homo sapiens
ggatttaaccttacctggagctaaaatggatttaggaagttgcatgacacataaaactagaagaagcagtgggaagtgccttccctgcagacactcccagtctccagctcaagcccagggaagccacccctgactatatctcacacaggccctcagggaaggcatccagcagaattagggaggggtcacagggtgaaagaagctcccaactgaaattagtagtaatttcaactgggcacaaattttcttgagcagaatccaggggatgaatgggaactgctgcagatatgagcacaggagctgctgccaacagtgtgggcagatggggagggttgaagcctgaaagccatgcttgctttctcagtggggaagctcatggcttggggcaagttctgaatggagcactgagggggcaagactggccttgccaactgcatgagagctggatgaggcctctcgctaccagctatcccccacttccctgatgaactataagacacagcagaagcagtcaaaatcccctctggaacataataccattggcctgagaatcaccccacyatccttcacagtggctatggcaagctctgcccaaggagagtctgaacccagacccacttaactctgcca

SEQ ID NO: 108326 - DNA, 561 bp, Homo sapiens
caaaactgactattaggagaaatataaagaaagaactgaaaggaagaggaaattgtagcaaattgtattttccaaagatggctgtcacaatatcccctatcccacatacttttctagaatcttgccatgcccccatcaagaggtggttgtaatggatagtaggacaatacwtttaaaacataggtgagttgcagggttcagtggctcacgcccgtaatcccagcactttgggaggccgaggcgggcagatcacctgaggtcaggagtttgagaccagcctgaccaacatggagaaactccatctctactaaaaatacaaacttagcagggcgtggtggagcatgtctataatcccagctactcaggaggctgaggcaggagaattgcttgaagccaggaggcagaggttgcagtgagtcgagatcacaccattgctctctagcctgggcaataagagcaaaactctgtctcaaaaaaaaaaaaaaaaaaaataggtgagttaaagctacattactttttaaagtcatatcagtatgaagactgactacatttgtggcctgc

SEQ ID NO: 108327 - DNA, 573 bp, Homo sapiens
tgaaaccaactttgcaaaattatgacagtaagagaaatctgacatagttggttccatattgtttctgacctccaaactgtccttggtcattcctggtcataagccaagctaactktgggaggaatttcatttatagtttaacttgaaagcaagaatgacaagctacaggagaatccacaaatatttatgaaagtataaatccatgcatgtgcaactgagtttcatgcctcttcgtgggacccatgcccaaaaaatggaagtgttaatatgatccagggtagagttttcagccctctaatgtcaaatggtgaagcactaattagacataaaactaatcccctccctatttgggtgctgaaaccacctttgtgagactaatgagaggtcgcaagataggtgtagtttctataatctcttattgctcaggggttgtatgctcctatagataacatcactcttctagaacctaagactggtttcttttgagatgtttttcagattcaccccacctggatttctgactcatgactcaactgatcctgcggccccacccaaatgcagactcagtgcatg

SEQ ID NO: 108328 - DNA, 674 bp, Homo sapiens
taactcctgtttcataaagatgccatgaaataagtaatacaaaactttagaaagtaagaaaatgttcatgaattttgataggtgtctaccagtcacatattacatgtatggtaattgacagcctcttataaaacatgcttacttttgagctatgtatatatttttgtttattttttttaatcaatataggcacatgagatggctgtaccaggttaagtaagccatctggaaccacagagcaaagatttttcctctttatttctcttatgagcaaaatcaaccaataagaatgaatgtaaaatcaaagatgatgactttattataaacatacttaggtttataacttgagaaaatatgactagaaattttatatatrtgtgtgtgtgtgtgtgtgtgtgtatgtgtgtatgcatatcatttatacatatatatgtatagttctctttctgggatggaaaaaattgttaaatgcttgttttaataatcaagaacagtaataaaaggctacattcactcccaataagaaagtttcacaatatacacttcataggtatattattcttgtataaggaagaaggaaactagtggggaagagctacagaagaaggaagatgggggaagaagcatatgtactattttaatatttttcaatgtctgaagaggtaaacataaac

SEQ ID NO: 108329 - DNA, 419 bp, Homo sapiens
attcttgttgtaatcaccagtacmtcttacctgagtaatttccgtaatatcttaagtaatttccgtataccctaactggcctccttgcttctgcctttgctctctactgcggttaccagtgattttggtttcattgggactgaggagtttccccgaatgtgggactgccaatgtcaaaaccatgacagccctggacaaaagaggacaagttggccaacctctattctcgttgcttttctatttaaagtcctgaaatggctttccactacaattagaataaaagtgaatgttttaaaattattctataatgccctccctagttggaaccccattatatctttgacatgttttcctactcttcttaggttcacttgctctgctctatccactctggtttttttgctgttcctataatatgc

SEQ ID NO: 108330 - DNA, 654 bp, Homo sapiens
cgcccttctgttctccacagtggctatactcatttatatttccaccaacggtgtatgagagttcccttttccccttttcttcacatccttgccagcattcattattgcccgtcttctggataaaagccatttttacttgggtgagatgatacctcattgtagttttcattggcatgtctctgattttcagtggtgttgagcaccttttcatacacctgtttgccatttgtatgtcttcttttgagaaatgtctattgatatcttttgcccattttaaaatcagattagattttttcctacagagttatttgagttccttctgtattctggtgattaaacccttgtgagatggaaagtttgcaaatattttctcccaytctgtgggttgtctcttcattttgttgattttttcttttgctgtgtggaaggaagctttttaacttgatgtgatcccatttgtccaaaaaatctttgcttagaccaatgtcctggagtcttcccaatgttttcttttagtagtttcatagtttgaagtcttagatttaggtcattcatccattttcatttgatttggtgaagtgtgttgcttgtaggcaacagatccttgggtcttgctttttatccattcagctattctatgtcttttgattgcag

SEQ ID NO: 108331 - DNA, 654 bp, Homo sapiens
cgcccttctgttctccacagtggctatactcatttatatttccaccaacggtgtatgagagttcccttttccccttttcttcacatccttgccagcattcattattgcccgtcttctggataaaagccatttttacttgggtgagatgatacctcattgtagttttcattggcatgtctctgattttcagtggtgttgagcaccttttcatacacctgtttgccatttgtatgtcttcttttgagaaatgtctattgatatcttttgcccattttaaaatcagattagattttttcctacagagttatttgagttccttctgtattctggtgattaaacccttgtgagatggaaagtttgcaaatattttctcccattctgtgggttgtctcttcattttgttgattttttcttttgctgtgtggaaggaagctttttaacttgatgtgatcccatttgtccaaaaaatctttgcttagaccaatgtcctggagtcttcccaatgttttcttttagtagtttcatagtttgaagtcttagatttaggtcattmatccattttcatttgatttggtgaagtgtgttgcttgtaggcaacagatccttgggtcttgctttttatccattcagctattctatgtcttttgattgcag

SEQ ID NO: 108332 - DNA, 594 bp, Homo sapiens
gtccactgttgtgccatatttttggtgctggtgaaattaaaatgtatacaaacaacacctacagtggcacataatcacatacatcaattttatgaggttatttgggttttctgaagtttgaatgcaatgacttttacttcatttactaatagattcaccttatttattctccagttagaaataaaagtattatccttatgtgtgatttttcagctttgatgttaatttaaaagtcagtgtttaaaagaagcttttgacacatgtatacatatgcaacaaacctgcacgttatgcacatgtaccctagaacttaaagtataataaaatatatagatatatataaataaaaataaaaataaaagaagcctttgaaaatttggagctatcatcaaagtatcctgacttatatttatagaagtatattattattccctaacttccaccttagactttgtcttctaaaaagcacctttaactgttttagccataaaactctttttctaatcttgtcacattraaaggtaaagttttgttcactggttattaaataaattaaaaatagcaaatttaaggctttcagtaatttaaactatt

SEQ ID NO: 108333 - DNA, 459 bp, Homo sapiens
ctcctgttattcacacagacatagaaggcctcagtaagagttgttgttcttttgtttttataagtgaattcattaaataacagcaggtgaattattatggcaacatcttcttaatcaatttgagtaaaccatggcaagttctctgtgatgggctgtgtgtttttcactcatctgcagaatgttttgtagagatgtcaggtttccaacttctagtctttgcttaatcagagataattttctggaaatctgaaacracagcatttatgaaccccaatccaaagtaacttccgggtagtcagatatgagatagactgggcatggctctgagttcatagaatagccaggtctatatatcaattgaacttaactaaaagctttcagttggaagagaaagtagggtggcttctgataatgcgtcctgcagaatgcacattacatcctggcgacttttagttgcaa

SEQ ID NO: 108334 - DNA, 550 bp, Homo sapiens
tcactatctgaatatgctgatgaaatcatgtcccatttttcaagaccaatatgacttctgaatagccaaacaagtcagttaaatgaggtycccattgattagcagtgttcaatgtcctgaacatgttaccctttaaaatgaaagcaagtttggggagggtcatgtgaaagatttaaatcaagtcttatgatgttatgaaaggatctttcctcaagtatactacacttcccattttttcatttttttcccaagtggctggttctgttaactgactttgttcttggaattaagaatcccatgactctctaccttggtggcccaagcctttttttttttctttttttaccagacctagaatctttctttctttctttttttttttttggttggttttggttttctagataagactttaattggttatctatttcaatcttaatgatcctataatcaagtagccacctccaactttgcctacagattacattattccaattatgactataagagacaggaaaaatcaaactgtgtttcctagactcacactcaa

SEQ ID NO: 108335 - DNA, 550 bp, Homo sapiens
tcactatctgaatatgctgatgaaatcatgtcccatttttcaagaccaatatgacttctgaatagccaaacaagtcagttaaatgaggtccccattgattagcagtgttcaatgtcctgaacatgttaccctttaaaatgaaagcaagtttggggagggtyatgtgaaagatttaaatcaagtcttatgatgttatgaaaggatctttcctcaagtatactacacttcccattttttcatttttttcccaagtggctggttctgttaactgactttgttcttggaattaagaatcccatgactctctaccttggtggcccaagcctttttttttttctttttttaccagacctagaatctttctttctttctttttttttttttggttggttttggttttctagataagactttaattggttatctatttcaatcttaatgatcctataatcaagtagccacctccaactttgcctacagattacattattccaattatgactataagagacaggaaaaatcaaactgtgtttcctagactcacactcaa

SEQ ID NO: 108336 - DNA, 616 bp, Homo sapiens
tgcctgcttcactaagcttaatcgtttctagcttttgatttaaagtgagagatgtgcaactgtttctttcacttgaacacttagaggccattgtagggttattaattggcctaatttcagtattggtttgtctcggggataaggaggtctgtggagacgaagatgagggaagggccagttggtggagcaattagaacacacaaatttattgagtaaattctccatcttatatgggcacagtttgtgatgccctaaaacaattacaatagtaccatcaaagatcactgatcacagatcaccataacagatataataatgatgaaaaattttgaaatattgtaggaattactaaaatgtgrcatagagacatgaaaatagccatgccattgaaacaatggtgccaatagacttgctcaatacagggttgtcacaaacctccaatttataaaaaaaaaaaacatggtatctgcaaagcataacaaagtgaagcacaataaaacaaggtatccctggatctgctttagactgtatttgcagacttctgggatcacctccacatggacttctcttatggaagaaggacttcacaattttcagggatgaggttaaggttgaa

SEQ ID NO: 108337 - DNA, 538 bp, Homo sapiens
tttatttatttattcattcattcattcatttttgtagagactgggtttcccaggctggtataaaactcctgggtttatgcagtctcctatctcagcctcctaaagggctgggattacaggtgtgagccaccgtgtccagcatttcactgatttcttggtctccagtctcaacaccttcaaattatgtcactcctrtactcaaaaatcttaaaaaaaaggagatcattaactactgaataaagttcagatttagcaagcaatgttctccatgacctagtctgttaaccactctagcctcactgcttgtacttttctggtagacattatgatgtttcatgcccttagaactttgttttgccttgcctcaagattttctattttagctcactaattcctatccatacccttaagatacagctcaggcagcatatctcccagcatatccactctggtgtcccagacttggtcatgtatccctcttctgggcacccttgaaatcctgtctatggccttaccgttgtgttacattaatatttca

SEQ ID NO: 108338 - DNA, 575 bp, Homo sapiens
ggattacaggtgtgagccaccttgcccagctctttctgtgtacttttaattttatattattcaattccatggatttaaatattctgtatatgatgttaactcccaaatataaatcccattttttatatccttcctctgaattccagaattatacttatagaagtttatttggcayactcactcagatatcaacattgtgctattgtcatcacaaacttatcatggcaaaggtaactatttttctaccttccaattctttttcagtttttttatggtcctaatcttgatcatcccctcatcccctgacaaaccaaaaccctcaatgcacaagtgtgttctagtgttaattccaaagtgcatgacaaatgtgactgcatcttactgtcttctacaactttagtctgacccaccatcatctcatgtttgcacaactgcacttgcctcttaattgattttccaactttcattccttttttttttttcctgtggtcaatttgctacgcagtagcaagaacaatttttttcaaagtataaatctaatcacattattatgttgcttttcctcttccaatgac

SEQ ID NO: 108339 - DNA, 575 bp, Homo sapiens
ggattacaggtgtgagccaccttgcccagctctttctgtgtacttttaattttatattattcaattccatggatttaaatattctgtatatgatgttaactcccaaatataaatcccattttttatatccttcctctgaattccagaattatacttatagaagtttatttggcatactcactcagatatcaacattgtgctattgtcatcacaaacttatcatggcaaaggtaactatttttctaccttccaattctttttcagtttttttatggtcctaatcttgatcatcccctcatcccctgacaaaccaaaaccctcaatgcacaagtgtgttctagtgttaattccaaagtgcatgacaaatgtgactgcatcttactgtcttctacaactttagtctgacccaccatcatctcatgtttgcacaactgcacttgcctcttaattgattttccaactttcattccttttttttttttcctgtggtcaatttgctacrcagtagcaagaacaatttttttcaaagtataaatctaatcacattattatgttgcttttcctcttccaatgac

SEQ ID NO: 108340 - DNA, 563 bp, Homo sapiens
acgatccattgattggtcagttcttgctggactgaatcaattgattaaatggagaaaataatatataatttttccctcaggagaatgataagaattatgatgtcaacttgcacaaaaatggtctatagcttttatctgcctacttttgttaaactatatttaaaattaatttaagcactctatcttttagataaataatcagttgtaaatactaaaagttattacactataaaccattaaagagtgcattttgatgaaacgtccccaaatttcaccaaccatggtaccrattgacagttgagactccctagtcttcatgatatcatattgctgttagcagtgatggctatttatatatttacaaagtccctctgatatttgagtaatgggtaagtcaggctttaccttgtaaattaagtcctgcaaactgacagttttaagaactcttattgtgctcactactcattgcaggtacctggaatgtctgttttctctcctcctaaaatattatgctattttgctataatttttaatcttcctattctaacaattttgatacctca

SEQ ID NO: 108341 - DNA, 385 bp, Homo sapiens
agggggagccttatttctgtaaacctaggcctcaaaggtgcctggtgatagtaggcactcaataaatattgaatgagtaaatgagtacagataagactaaaacgtttttgctggcgcggcggatcgcttgaggtcaggagtccgagaccagtctggccaacatggtgaaaccccatctctactaaaaatacaaaaatcagccaggtgtggtggcaggcacctgtaatcccagctattctggaggctgaggcaggaamatcgcttgaacctgggggtcggaggttgcagtgagcgagatcgcgccactgcactccagcctgggccacagtgcaagattctgtctcaaacaaaacaaaacaaaacaaaaagtataaaatattttaag

SEQ ID NO: 108342 - DNA, 434 bp, Homo sapiens
  misc_feature (1)...(434): n = A,T,C or G
nnnnnnnnnnnnnttagacaagcagacagcctagtacctgtcccagagtaagaacttcacccctgcagacaagcagggctgtaaaacgaacagagttggaaaacaccctgaaagttcctcaaactattattaaacacacrgttaccagatgactcagcaattccactcccagatatgtacccaagagaaatgacggcaaaacacagccacacaaaaacacagatacaaatgttcacagcagcatcattcacaacagccaaaaagtggaggcaatccacgtgttcatgaatggataaacaaaatgtggtctatctatgcaatggaatattacttgccaatgaaaaggaatgaagtgctgatacccatatcatggatgaaccttgaaaactttctgctaaatgaaagaagccagtcactgaaggccacacatcgtg

SEQ ID NO: 108343 - DNA, 407 bp, Homo sapiens
ctagtacctgtcccagagtaagaacttcacccctgcagacaagcagggctgtaaaacgaacagagttggaaaacaccctgaaagttcctcaaactattattaaacacacggttaccagatgactcagcaattccactcccagatatgtacccaagagaaatgacggcaaaacacagccacacaaaaacayagatacaaatgttcacagcagcatcattcacaacagccaaaaagtggaggcaatccacgtgttcatgaatggataaacaaaatgtggtctatctatgcaatggaatattacttgccaatgaaaaggaatgaagtgctgatacccatatcatggatgaaccttgaaaactttctgctaaatgaaagaagccagtcactgaaggccacacatcgtgtaa

SEQ ID NO: 108344 - DNA, 498 bp, Homo sapiens
ctctggattctggcaagaggccaagagaagataaggagttatttaagaaaaaaaaaaagcaagcaagcaagaaaataaactgctgattagaaggatagcactctcacccctcctacattcctgaggctctcaatgttgaaagcrcctatccaaaagacatagcattctctggatgatttccaacacccagttcttcctccctatcagaatatttccagtgacctgggtgccctgctgcttatggtaccatccatctgctggctcccagcggaaagaggcatggacagagaagagctagatctacccagactttcctcccctaaacaattttatacatacaaaaaccagctgggctaggatgaaagcacctaaggatagaaacagctctcaagggcaatcctaatgacaaagaaaccaggaacattcccccactgagcttgacagagtatttaaagtaaagcaactcaccaggggactgcagagattaaaaagacagtt

SEQ ID NO: 108345 - DNA, 578 bp, Homo sapiens
taatctaatcattctgaccatgttcatatccagtcccagtcaccactgccaaattgtttaatggcgacagagctgcattattaattggatggcctggcctgraattaaattgtaaagctctagtgtgacatgcagaaaaaaaaaaaaaaaaaaaaaaaggaatctgagcttaataaaaagaaagtaagtaaattagttctgggcaactatgtcctatattagaacccaggatccctcattgctaaatcattctttacttggttccttctaagcatcacttttttcatctataaagtaggagtagatatatgcaaactttcaagattttcaacaaaattattggttgtgatgactttctaaactacaaagggatatatacccacatgtatgtgtgttcgtgtgtgtgtgttatataaacaactgtcagaatttatgccataagattaaaagtagtaatctcaaaatgaaagggttataggtagtgttgccagataaacacaagacgctcagttaaatatgaatttcagataaacgacaaataatattttagaatatcttatgcaatattagggatatgc

SEQ ID NO: 108346 - DNA, 578 bp, Homo sapiens
taatctaatcattctgaccatgttcatatccagtcccagtcaccactgccaaattgtttaatggcgacagagctgcattattaattggatggcctggcctggaattaaattgtaaagctctagtgtgacatgcagaaaaaaaaaaaaaaaaaaaaaaaggaatctgagcttaataaaaagaaagtaagtaaattagttctgggcaactatgtcctatattagaacccaggatccctcattgctaaatcattctttacttggttccttctaagcatcacttttttcatctataaagtaggagtagatatatgcaaactttcaakattttcaacaaaattattggttgtgatgactttctaaactacaaagggatatatacccacatgtatgtgtgttcgtgtgtgtgtgttatataaacaactgtcagaatttatgccataagattaaaagtagtaatctcaaaatgaaagggttataggtagtgttgccagataaacacaagacgctcagttaaatatgaatttcagataaacgacaaataatattttagaatatcttatgcaatattagggatatgc

SEQ ID NO: 108347 - DNA, 561 bp, Homo sapiens
agctgaaactcaccagatcactgcatttggacaatgagatcccagatccctcactcatcataactgcctagccaaccacctgcttcctgttgaccaactcctcttcctttcccctccttctgccccatgaatgaatgtctctgtaatcaagtaactttagaagatgttgcataccatgctctcttggaaatctgcataacagatcaacatatgataggctctgggaagtgtaatggtaaagagatatttgtgactttctaccttgcacctaaacttatttggctgagaaaaatgtattttccaaagcaccaataacattgtgccattagggtcctgctgaatgtgtttttaggcatacatctatgtcatattatttagtcatcttattttggaagagataatcctakaagtatgctacacatagtaacaggagaaatagcatgggaatgggattcatatcacataccatgtgaaatattatcttggggacatcaatgcacctctctgatccttaatttcctattctgtagaatgtggtaaaccccttttatgtacattact

SEQ ID NO: 108348 - DNA, 557 bp, Homo sapiens
aagctttacactttaacttcatctttcactttttaactttttgttgtttctaactatttttattatactacttcttgaaaagttttgtttttattatttttgctagtttcatgttttagccttcctactcaagatgtgcatagtttacacactacaaatacagtacrgtaatatcctgtttgtgtatttagtattaccagttgagttttataccttcagattatttcttattactgattattttcattttcttaaagattgaagaggtttctttagcatttctttttggacaagtctggtgttgatgaatgccttcaatttttatttgtctgggaaagtctttatttttcctttatgtttgaggatagtttcactgaatgtaatttcctagtataaaggtttttttttttttttttttaatttcagcagttaaaatacgtaatgctactctatcctgacctgtaaagtttccactgaaaagtctgctgctaaacatatgggaactccttggaatgtaattggttttctttttctggctgctttaaaaatcttttttt

SEQ ID NO: 108349 - DNA, 557 bp, Homo sapiens
aagctttacactttaacttcatctttcactttttaactttttgttgtttctaactatttttattatactacttcttgaaaagttttgtttttattatttttgctagtttcatgttttagccttcctactcaagatgtgcatagtttacacactacaaatacagtacggtaatatcctgtttgtgtatttagtattaccagttgagttttataccttcagattatttcttattactgattattttcattttcttaaagattgaagaggtttctttagcatttctttttggacaagtctggtgttgatgaatgccttcaatttttatttgtctgggaaagtctttatttttcctttatgtttgaggatagtttcactgaatgtaatttcctagtataaaggtttttttttttttttttttaatttcagcagttwaaatacgtaatgctactctatcctgacctgtaaagtttccactgaaaagtctgctgctaaacatatgggaactccttggaatgtaattggttttctttttctggctgctttaaaaatcttttttt

SEQ ID NO: 108350 - DNA, 557 bp, Homo sapiens
aagctttacactttaacttcatctttcactttttaactttttgttgtttctaactatttttattatactacttcttgaaaagttttgtttttattatttttgctagtttcatgttttagccttcctactcaagatgtgcatagtttacacactacaaatacagtacggtaatatcctgtttgtgtatttagtattaccagttgagttttataccttcagattatttcttattactgattattttcattttcttaaagattgaagaggtttctttagcatttctttttggacaagtctggtgttgatgaatgccttcaatttttatttgtctgggaaagtctttatttttcctttatgtttgaggatagtttcactgaatgtaatttcctagtataaaggtttttttttttttttttttaatttcagcagttaaaatacgtaatgctactctatcctgacctgtaaagtttccactgaaaagtctgctgctaaacatatkggaactccttggaatgtaattggttttctttttctggctgctttaaaaatcttttttt

SEQ ID NO: 108351 - DNA, 561 bp, Homo sapiens
agttcatgtggtttccttaattaaatcttttaatgacttcccatgacccccaaattaaaaccctaactcctcccctttawgaatggttttttttttttttttttttttttttgagacagagtttcactcttgttgcccaggctggagtgcaatggtgcgatctctgctcaccgcaacctctgccttccgggttcaagtgattctcctgcctccgccttccaagtagctgggattacaggcatgtgccaccatgcccggctaattttgtatttttagtagagacagggtttctccatgttaatcaggctgatctcgaactcccgacctcaggtgatccacctgcctcggcctcccaaagtgctgggatttcaggcgtgagccactgcgcctggcctatgatttcatttcttacttctccatttctcatgtttttctctgtggcccaaccactgacatttttctgaacacaacgttaatctctcaagcttcatgccttattgcaagctgacttcctctttcctctggccttggcaaaccatactttggccttaaaaagtgcca

SEQ ID NO: 108352 - DNA, 561 bp, Homo sapiens
agttcatgtggtttccttaattaaatcttttaatgacttcccatgacccccaaattaaaaccctaactcctcccctttaagaatgkttttttttttttttttttttttttttgagacagagtttcactcttgttgcccaggctggagtgcaatggtgcgatctctgctcaccgcaacctctgccttccgggttcaagtgattctcctgcctccgccttccaagtagctgggattacaggcatgtgccaccatgcccggctaattttgtatttttagtagagacagggtttctccatgttaatcaggctgatctcgaactcccgacctcaggtgatccacctgcctcggcctcccaaagtgctgggatttcaggcgtgagccactgcgcctggcctatgatttcatttcttacttctccatttctcatgtttttctctgtggcccaaccactgacatttttctgaacacaacgttaatctctcaagcttcatgccttattgcaagctgacttcctctttcctctggccttggcaaaccatactttggccttaaaaagtgcca

SEQ ID NO: 108353 - DNA, 632 bp, Homo sapiens
caaccagcagccatccctcctctgctaacaaaggccaggtctgcacagcagtgggtccagcctgggttgggaggcatgatcagcagcaactcccttctctttcaccagggactggtcatgtaacccagctctggccaacacataaaaccaagggttttctttctttcttttttaatagacagggtctcactctgttgcccaggctgaagtgcagtgatcatggcttactgcagcctcgacctcccaggctcaggcaatcctcccacctcagcctcccacrtagcagagactacaggtgcacactgccatgcttggctaaaattttttttttttttttttttttttttttttagagacagggtcttgctgtgttgcccaggctagtcttgaactcctgagctcaagtgatcctcccaccttggcttcccaaagtgctgggattacaggtgtgagccaccacaccctgttggaagtcttctatccaaacaaaagggggagtagcgcttggagcggtggcagccatcttgtgactaggatggcagggccaggaggtactgggagatggtgacgcagagctctgacaccacggaatgtagggaccggcttggagctccttccctccagactttctg

SEQ ID NO: 108354 - DNA, 632 bp, Homo sapiens
caaccagcagccatccctcctctgctaacaaaggccaggtctgcacagcagtgggtccagcctgggttgggaggcatgatcagcagcaactcccttctctttcaccagggactggtcatgtaacccagctctggccaacacataaaaccaagggttttctttctttcttttttaatagacagggtctcactctgttgcccaggctgaagtgcagtgatcatggcttactgcagcctcgacctcccaggctcaggcaatcctcccacctcagcctcccacatagcagagactacaggtgcacactgccatgcttggctaaaattttttttttttttttttttttttttttttagagacagggtcttgctgkgttgcccaggctagtcttgaactcctgagctcaagtgatcctcccaccttggcttcccaaagtgctgggattacaggtgtgagccaccacaccctgttggaagtcttctatccaaacaaaagggggagtagcgcttggagcggtggcagccatcttgtgactaggatggcagggccaggaggtactgggagatggtgacgcagagctctgacaccacggaatgtagggaccggcttggagctccttccctccagactttctg

SEQ ID NO: 108355 - DNA, 632 bp, Homo sapiens
caaccagcagccatccctcctctgctaacaaaggccaggtctgcacagcagtgggtccagcctgggttgggaggcatgatcagcagcaactcccttctctttcaccagggactggtcatgtaacccagctctggccaacacataaaaccaagggttttctttctttcttttttaatagacagggtctcactctgttgcccaggctgaagtgcagtgatcatggcttactgcagcctcgacctcccaggctcaggcaatcctcccacctcagcctcccacatagcagagactacaggtgcacactgccatgcttggctaaaattttttttttttttttttttttttttttttagagacagggtcttgctgtgttgcccaggctagtcttgaactcctgagctcaagtgatcctcccaccttggcytcccaaagtgctgggattacaggtgtgagccaccacaccctgttggaagtcttctatccaaacaaaagggggagtagcgcttggagcggtggcagccatcttgtgactaggatggcagggccaggaggtactgggagatggtgacgcagagctctgacaccacggaatgtagggaccggcttggagctccttccctccagactttctg

SEQ ID NO: 108356 - DNA, 620 bp, Homo sapiens
tgtctttctatacacatattaatatacctgggagccaacgtgcccctgtatcaacacattttccaagcagtgacttctccccttcctctctgattcattttgtaccaaaacaatggcaacacctgtagccgttaatttctgcgctttgatttttgtccagttataaaggaggctcccagcaggctcccctctcaggagccatatgtggagttgatgtgccagccgccttggaagggaaacggcctccggagaagtgcacaatggctccataatccccatcaactggaccctcttgaactgcctctttattttccagtcaaagaaatgccaatctcaagataaaagctgtggctgccctgggagcccaggggaaacctgtatcgcttgcctggttcagcccsagggtggtgactctgagtcccgccatctagtctcgcaatctggagcccagaaactgcctgtagcacccccaacactttcccttgcactcccctctaggatgaggcttttaccacaaggccacctcccgcccagcctctcccggcggctggcgaccacagcgcaccctgagcagagccacggcaccgccccctcgcaccggctcacgccaggggtttcgg

SEQ ID NO: 108357 - DNA, 625 bp, Homo sapiens
tcatttttttttttttttttttttgagatggagtcttactcagtcgcccagactggagtgcagtggtgcratcttggctcactgcaacctctgcttcccaggttcaagccattctcttgcctcagcctcctgaatagctgggactacagacatgcgccaccacacccagctaatttttgtatttttagtagagacggggtttcaccatgttggccaggctggtcttgaactcctgacctgaggtgatccgctcgcctctgcctcccaaagtggtgggattacaggcgtgagccaccgtgcctggcctgggaccatgtcttaatcacctttgtacctaacctttaatcttctttgtacctaacacaatttgtacccactactttgaaaagtgaaggtgttcaacattttgtcagtttgaacacatccagatagattatctgtattcatatctctaccactgtagacatcagccacattgggcgcatggtttcaaaagaaaaatttggcacctgagattctttttggacaaagtctacttcacacatctactaatcaataatatgcctgttcccacatatcctgatggcagttagggatttgctgtttagccaaaggcttcttatca

SEQ ID NO: 108358 - DNA, 506 bp, Homo sapiens
tgcaaggtgtcaatactgcagggaaaggaaattaaacacttagtgccagttgaggagagctgcttgcaggaatgccagggaggacggatgttttgggcccggagactggcttctcagaagcactcctttgagatagggctgcctctctggattcatcccagcacctcttgggcagctgcatggatggagcaggcccagatctggacaccgtggagggcagggagaggaggggagggagactcactaccaactaccctgggcctgtagtcagtgtttggtctgtcagatgcaggcactgaagacaccgtctacctgtgagattccatccggaataccctcttcctccttcaaaaatgctcagaattagactcaatgcatcactcccccaccaggttaggaagtgaagctggtggctttcgggagttaccygggttgggaggacatggcattcttgctgtcagtgagaaagatgaccaggctaggaagtgcctgctaccatgacctct

SEQ ID NO: 108359 - DNA, 667 bp, Homo sapiens
accagtcacagcagcaacacagtggaaagatgctgtgtggccccaggaccgggtctgcagccccattcgacagctgaagaaacagaagcaaaaggcagagctggcctgctctggaaggctggtgttttgagagccaggttgtacycgccagctgggcatacctgtgtccacacacatagacccacaaacacaaccttacatggttctacatggttatgagagattcagacatacatgctgttatgtgagtaggacagagacacagacacacgccatccaacaggacactgtctcttatgaggatgtgacattcaaacatgtcattctacacaagtcacacacacacaaagctgaggacatatccattgatgtttctgccctcacttcccagataattgtgctgaaaaatagaaacacctgcaccctaccaagctattacccggcagcggcaggagcaggctaattaagccttcacaggaggctggcattttcctggcagccctgctcgcctcgctgccagggtggccgccagcccgagtggcctttgtgatgagccccaggggcacacggcccagcctgtctccctctcctccctctctgggccctgaaatgattctgcatcttgttctcccaaaggatgcctcttgggccaatggcctgcttatga

SEQ ID NO: 108360 - DNA, 575 bp, Homo sapiens
ttaatgggtaaatgaatgacttttttcttttgaagattactgtttagggaagattatctatacactttagtagccttcaagtgaaagcaagcctagaaagacttgctgagtggtagagcatcaaggctcattggccagaaggccaggccatacccaagctgataaggcttcccacagtcagacacatgggaccagtacaggagttgggagatgggcattaggacttaaagaaaataggggcaatttcctgatagaaggttaaacacttcagttcttgctggaaggagtgattagcctggtccttttcttatcagaattcagctgtttccaccacagtaartaatggacaaattgggcatctggcttacttgatttcccatcgctaaggccgatttctgaagtgcaatatgctatttgatgtaccacagtgaatttgtcttgggcttgagagcctctcaatggcaacaagcaaaaataactcttggagaagttccacacatactgaacacaaaacaccctaaaatgtaacctgtactctgcagcctgctcagctgagtccctaatggggtagcagg

SEQ ID NO: 108361 - DNA, 587 bp, Homo sapiens
ctgtgttgtgttcttaactactttttgtactgcctaagtaatgaaatgatgactactagcaagtgcaggtactctataactgagacatatgatctaaattaaatatatgtgtcacaatttataggaactaggaagtttgtagtaaagaactgtgtggaagtaatgcatgaaatttttgcttggccaaagcaaaaataaaaatgtagaagayttagaaatgttctttaattacctatattagtttcctagtattatcataacaaagggtgacaaattgggtgggttacaacaaaagaaatttattaccatacagttttggaggctggaagtctgaattcagactattggtacgaccatgctccttttgaaacttgtagaggagaatcatttcttgcctcttctaactggtgtttgccaagtatcattggcattccttatcttgtaaatatatcaccactttctgccttccttgtgacaagtggccatctacttcctgtatgtatgtcttcacatggtggtctcttctttatataaggaaaacagtcagattaagggcccaccctactcatgtatgaccttaccttaaa

SEQ ID NO: 108362 - DNA, 600 bp, Homo sapiens
agttgatgaggttttatttcttttcagaactttaaaaatttactccattgttttctggcttgtgtttttctaaagtgaagtcttgcattatttttatgtttggtgttctgttaaaaaatgtgtctatctttggttgcacytaagatgttctatttatcactgattttgagcaattttattaggatgtgccctggtatatttttttctatttgttttgctgggggttcctttagcttggttctgtaggtttatagttcatgccaaatttggaaaatatttgaccagatttcttccaatattttttgcctcccatcctctctttcctcttctttgggaactccaattctgcatattttaggctacttaacattgggtctcacagctccctcatactccgttcacttttttccttctcttttcattttggataattttaattgcttgtttttaaattcaccaattttttttctgccatggctaatctactcttaatcctatccagcatatttcatctcacacattgcaatttttctccctgtaagttcatactgggtcccttatattttccatatccatactgtgtataatcttctatattgt

SEQ ID NO: 108363 - DNA, 600 bp, Homo sapiens
agttgatgaggttttatttcttttcagaactttaaaaatttactccattgttttctggcttgtgtttttctaaagtgaagtcttgcattatttttatgtttggtgttctgttaaaaaatgtgtctatctttggttgcacctaagatgttctatttatcactgattttgagcaattttattaggatgtgccctggtatatttttttctatttgttttgctgggggttcctttagcttggttctgtaggtttatagttcatgccaaatttggaaaatatttgaccagatttcttccaatattttttgcctcccatcctctctttcctcttctttgggaactccaattctgcatattttaggctacttaacattgggtctcacagctccctcatactccrttcacttttttccttctcttttcattttggataattttaattgcttgtttttaaattcaccaattttttttctgccatggctaatctactcttaatcctatccagcatatttcatctcacacattgcaatttttctccctgtaagttcatactgggtcccttatattttccatatccatactgtgtataatcttctatattgt

SEQ ID NO: 108364 - DNA, 481 bp, Homo sapiens
gtgaagacagttgacataaccagagttgaaagatgaaaatagccctgatccctgagtcactgttggaaaaatgccttcaggaacactgtctgattcatatggactctgttaagtcactgagattttgggattgtttgttcttgcgatctagtgcagcccagcctgacaactgagcatcttctatgtgctcagcactgtattaggttctttccaataaattgtctcaaaacaatcttatgaatgtctactctaggagagttttggcccagtaaagtttgagggtgtgaagggtcactacatcccccaagacttagcttcttcctatgcatctccagaagttatgccagaacccctagcctttgggactctcagattctgcccattctcaagaactcttctgagaatctagccttctctctggacttggcattcatcacatttccccctggactkgacagtctctggatactggaaaagccac

SEQ ID NO: 108365 - DNA, 557 bp, Homo sapiens
ttttaatagaaaacctacaggaaggcagtggtaatagacaagggataatttcaggttcaaatataagaaataaaaaagcaaaaaagaaacaatcagatatgctgaggtgcaactttcttcattgtgtctgtcctgggaagaatgacaatgcaccttcccttcccttcccttctacaccaggcttcaggtgtgaggaggctgttgaatgtctgtgagcaggacagaacaaattayggggctcctcaggcaggtaagattctgactttccttcaaacccacagacttgaaatattcgttcaacacttactggggaagctgatcactacagggtaaagagtgaagagtgcagactaccaggggtggggctctgcttctcctctaccacactgaactattccgcctagccccaaacgtgcatacctcccttagcaaaatgaagccccccagctaaccaaacccactattctcaggatgctgttcagcacagggcattgggaaaggtcctacgctttactgagaggcttatcaaatattcttttgttttggagctatcctaa

SEQ ID NO: 108366 - DNA, 573 bp, Homo sapiens
ggacctgagacattttttcattttgagcaaagatcatttttccctctaacttccasttgtcagtctaggagtctgctaagtcttcatagaacatatttcataaatacctgctataaaaacatccctttgtttctcataagcctcattaaacttactcttctgatgtgtttatgggacttctggctgttgtaagtctgattagaaaggagaggattgtttgatatgaaataaagtatccaagtgaaatgttgtctttttacttttttgagaaatatctagtggatatttcagaggatttaaaatagctcttatgtttccctacccttagcatattaactaccacaacaaaaagatttggaaaatgtccattttgatgcatttccatttgataatacattcacagtgaacattctaaaatgctttgtgattgccagatgacaggcccacactgtcaacctaagttctgtaagagccaaattgataacattgaaacagttgacactgtacattatgattttaatctgccaaaccatctcacactgactcctaaaattaaaaataaatatcacacct

SEQ ID NO: 108367 - DNA, 573 bp, Homo sapiens
ggacctgagacattttttcattttgagcaaagatcatttttccctctaacttccagttgtmagtctaggagtctgctaagtcttcatagaacatatttcataaatacctgctataaaaacatccctttgtttctcataagcctcattaaacttactcttctgatgtgtttatgggacttctggctgttgtaagtctgattagaaaggagaggattgtttgatatgaaataaagtatccaagtgaaatgttgtctttttacttttttgagaaatatctagtggatatttcagaggatttaaaatagctcttatgtttccctacccttagcatattaactaccacaacaaaaagatttggaaaatgtccattttgatgcatttccatttgataatacattcacagtgaacattctaaaatgctttgtgattgccagatgacaggcccacactgtcaacctaagttctgtaagagccaaattgataacattgaaacagttgacactgtacattatgattttaatctgccaaaccatctcacactgactcctaaaattaaaaataaatatcacacct

SEQ ID NO: 108368 - DNA, 573 bp, Homo sapiens
ggacctgagacattttttcattttgagcaaagatcatttttccctctaacttccagttgtcagtctaggagtctgctaagtcttcatagaacatatttcataaatacctgctataaaaacatccctttgtttctcataagcctcattaaacttactcttctgatgtgtttatgggacttctggctgttgtaagtctgattagaaaggagaggattgtttgatatgaaataaagtatccaagtgaaatgttgtctttttacttttttgagaaatatctagtggatatttcagaggatttaaaatagctcttatgtttccctacccttagcatattaactaccacaacaaaaagatttggaaaatgtccattttgatgcatttccatttgataatacattcacagtgaacattctaaaatgctttgtgattgccagatgacaggcccacactgtcaacmtaagttctgtaagagccaaattgataacattgaaacagttgacactgtacattatgattttaatctgccaaaccatctcacactgactcctaaaattaaaaataaatatcacacct

SEQ ID NO: 108369 - DNA, 628 bp, Homo sapiens
ctccactctgtaaacactcaatgtattttatagatgagtgaatgagggaatgcatgaataaatgaatgaatcaataaagtaacatttagaggctaaaagcataaagaatttgatgggcatgggggcaaactactgaaagtaaagcaaaaaaatgtagaaagaagccttgaaatcccaattaacatttcctgattgcttcagaatagaatgctgtaaaatgagaggctttcagcctgtctgcatttcagttctgtgcagcttacaaaggaacctgggaaaaagctgacattgccrctgtagctttgaggctttcaagataagcatcagtttgggttcagaagaaatgaacagtgatgaatattgtcttcagcttcacaatggtccttttaattcctgtcattctcaaaaagaaaaaaatgccagtgtttcttctggaatattttcaaatttctccaattttaattttggaaaattgcatttgaaactttcttgaagtagtcttattctctgccctttccatcctcatctataattactaataagtagtctctttcttttattaaggtaaaattcatttgtgatataattcaccactttagccattttaaaatgtacaacttagtgttgc

SEQ ID NO: 108370 - DNA, 656 bp, Homo sapiens
agttcaatccaacttattcagctactggagtaccaagaagtctggtgaaatgtcaccctgtcactgacacaccctgtagacccctatggatctcaggagagagatgtgatctgatccagtttccatagaaaactaaaagaaacaaagaaatttataaggaagccaggcctagagagtcaatcaaagattgtcagatgcatgcatatcttagtcactaatactccaattctgttgttgttgttgttgtttatttgaggcagggtctcactctgttgcccagaccaggctggagtgcagtggtgtgatcatggtacactgcagccttgacctcctgggctcaatgatcttcctgcctcagcctcccaagtaactgggactacacaggtgcatgccatcatgtccagataatttttttgtttgtttgtttgtttttgtwtagacgggattttcaccatgttgctcaggctggttttgaacttctaggctcaagtgatccacccactacagcctcccaaagtgctgggattacaggcgtgagccactgcgcccagcctaatactccaatttgtagtggtttccatggaagaggaagaagtgcttctatctcaaagccgagagcaagctaagagacttagaaacatgcattgggaatagac

SEQ ID NO: 108371 - DNA, 656 bp, Homo sapiens
agttcaatccaacttattcagctactggagtaccaagaagtctggtgaaatgtcaccctgtcactgacacaccctgtagacccctatggatctcaggagagagatgtgatctgatccagtttccatagaaaactaaaagaaacaaagaaatttataaggaagccaggcctagagagtcaatcaaagattgtcagatgcatgcatatcttagtcactaatactccaattctgttgttgttgttgttgtttatttgaggcagggtctcactctgttgcccagaccaggctggagtgcagtggtgtgatcatggtacactgcagccttgacctcctgggctcaatgatcttcctgcctcagcctcccaagtaactgggactacacaggtgcatgccatcatgtccagataatttttttgtttgtttgtttgtttttgtttagacgggattttcaccatgttgctcaggctggttttgaacttctaggctcaagtgatccacccactacagcctsccaaagtgctgggattacaggcgtgagccactgcgcccagcctaatactccaatttgtagtggtttccatggaagaggaagaagtgcttctatctcaaagccgagagcaagctaagagacttagaaacatgcattgggaatagac

SEQ ID NO: 108372 - DNA, 495 bp, Homo sapiens
tgtcatggcccagggagccagagcaggaaaatcaacaagaaacccatgcaagggttcaggcacttcaggtcccggtcctctggccactcggttatggtgcctctctgttaaccctactctgagtggattctacctcaggattctattaaaagctgtctgggtggatcacgaggtcaggaattcsagaccagcctggtcaacatggtgaaaccccttctttactaaagatcaaaaaaaaaaaattagctggctgtggtggtgcatgcctgtaatcccagctacttgggagggtgggtcaggagaattgcttgaacccaggaggcagaggttgcagtgagccaagatcgctccattgcactccagcatggatgacagggcgagactttttctcaaaaaaaaaaaaaaaaaaaaaaaagctgtctgggaaaacctgggggagaaaaaggggctgtaggagaaagtaagggcattaaaacatcattagaaaggaaactc

SEQ ID NO: 108373 - DNA, 495 bp, Homo sapiens
tgtcatggcccagggagccagagcaggaaaatcaacaagaaacccatgcaagggttcaggcacttcaggtcccggtcctctggccactcggttatggtgcctctctgttaaccctactctgagtggattctacctcaggattctattaaaagctgtctgggtggatcacgaggtcaggaattcgagaccagcctggtcaacatggtgaaaccccttctttactaaagatcaaaaaaaaaaaattagctggctgtggtggtgcatgcctgtaatcccagctacttgggaggstgggtcaggagaattgcttgaacccaggaggcagaggttgcagtgagccaagatcgctccattgcactccagcatggatgacagggcgagactttttctcaaaaaaaaaaaaaaaaaaaaaaaagctgtctgggaaaacctgggggagaaaaaggggctgtaggagaaagtaagggcattaaaacatcattagaaaggaaactc

SEQ ID NO: 108374 - DNA, 663 bp, Homo sapiens
tgtctctgcagcacagaaggaagaggatgtccaccagacatgtgaatagatgtcatccagacacccarcaaaacaaagaaaataatgatgacaacccaagctgaatggtatgatttaatttctaaattgagatgattttggaaacttaccaaatctccagtgtccaagcattcatctatttgttcaataaatattttttctgtaccaaagacacatcaggctctgtgctaaacactggagatataaaggtaaatgatacagatatgtcctaaccccataaaggctgcaatctagtcagcaaagatggacaagtgcaatgttaggacagtagaaggtgacatgcattatttattttggtttccccagtagaggctgctcagtgatgggcacagagcaagaactcaagaaatgatgtataagtggctgaaaataactcacatttattgagtatatactatgcaccaggcattgttctaagcacaatgtatgaactcattttatacatgtaatatatatttaatgaattgatatacataattaaatagatttaattcattcatttaagaaataaaagtagtaaatgaacaagtgacggacactcagctcccaaagcttccatcctgagcacatcttgaatccatacaagaaaggacaagaataaac

SEQ ID NO: 108375 - DNA, 597 bp, Homo sapiens
gcagagttcattagaatagcactgaggtttgtgtgcatgtctaatcatgagattagcaaattacatgcctggtgcacggaccatatgaccgttgtgggattgtggaacaactgagagcatttgggagaaacactgagaatggcaaattcaccgagcagaaggccagcttccaaagttcttgcacagggcagatgagcagcagtgatgagcaatgtgttattgagcatcttctaagcctggggcactgaactaggcactgggggagaattaatttcctcccaaagtcaccatagaggaaactgcgttaactcctttaatgaatgggcagccctcaaaggaggctctaaaygtttatcattaaaggcaggccagagactgcagaggggaagccagttgggaacaaatctcctttcacccctgtctgcctggctgtgccacctccaggctctaggaactcagggaataaaaagaactggaggttcttgaacttttaatggcccaagtaattaactaataccaattcattaaacagacaaaacattaacagggtcactgatgatgagtaaagaaagaaagagctaagttacacatcattcc

SEQ ID NO: 108376 - DNA, 424 bp, Homo sapiens
agacgtgttatctaaaacctggttcatctgtccttccacgcagggcctaggggatgccaaattccagggtccagaaagagcttgggataaaatgaacatccaaggggasggctttgacctgggctgagtctgcctgtgccgagtctgcctgtgccatccaactggagtctcaagtcctgaggcaggacgtccagatgccccagtgcagggtcctcctgatcaacacctgctcccctgtactcattagcaacctcacccaccctactctcaaagcacacttggctctcatatccaggagctctgcatctgtagattcagcaacagcagatggaaaatattcagaaaataaattggacggttatatttctattgaacatgtgcagactttgttcttgtcattattccctaaagaatacagtatcat

SEQ ID NO: 108377 - DNA, 424 bp, Homo sapiens
agacgtgttatctaaaacctggttcatctgtccttccacgcagggcctaggggatgccaaattccagggtccagaaagagcttgggataaaatgaacatccaaggggagggctttgacctgggctgagtctgcctgtgccgagtctgcctgtgccatccaactggagtctcaagtcctgaggcaggacgtccagatgccccagtgcagggtcctcctgatcaacacctgctcccctgtactcattagcaacctcacccaccctactctcaaagcacacttggctctcatatccaggagctctgcatctgtrgattcagcaacagcagatggaaaatattcagaaaataaattggacggttatatttctattgaacatgtgcagactttgttcttgtcattattccctaaagaatacagtatcat

SEQ ID NO: 108378 - DNA, 516 bp, Homo sapiens
cttactgagtgctctcaaagaccctcaaaaacactgaggagaatattatagccattaaaactgacatatgaaaaataacatacttatggttggaaaaggtcatgacattttaaagcaaaaaagcaggctacacaaaaatgcgtaatacacagttaagaaaactggggggatagcaatacattgtgtttatttttctcttgcttattctgcattctctaaatttttctacaaatatttgtgttgttaaaaatacgaataaaaatctatatttaacaaaacaatacaataaaggaggagagtttatttaactttatgagtctcagttttctcctcccctaaaatccaaaataaccctctttgggtttttgcaaagacttsattgactgatctacgaaaaagggcttgcaattgtgtgcgtcataggtagtgatctgttttaaactttcagtctcattttataactataattttgataccttcccaatttggcctagttatagtgtaaaaactatagct

SEQ ID NO: 108379 - DNA, 516 bp, Homo sapiens
cttactgagtgctctcaaagaccctcaaaaacactgaggagaatattatagccattaaaactgacatatgaaaaataacatacttatggttggaaaaggtcatgacattttaaagcaaaaaagcaggctacacaaaaatgcgtaatacacagttaagaaaactggggggatagcaatacattgtgtttatttttctcttgcttattctgcattctctaaatttttctacaaatatttgtgttgttaaaaatacgaataaaaatctatatttaacaaaacaatacaataaaggaggagagtttatttaactttatgagtctcagttttctcctcccctaaaatccaaaataaccctctttgggtttttgcaaagacttgattgactgatctaygaaaaagggcttgcaattgtgtgcgtcataggtagtgatctgttttaaactttcagtctcattttataactataattttgataccttcccaatttggcctagttatagtgtaaaaactatagct

SEQ ID NO: 108380 - DNA, 615 bp, Homo sapiens
  misc_feature (1)...(615): n = A,T,C or G
acagatcacgtcttgggaaaaataaatgtgaccccttaaaayttgcaccatattattgaaatctctttgacacaagtaaccatagaagacacaggtaacatatgggttgctctttatgtagggctttagcagtctattcagtcttttaccatgtgactactttgtatgtggaaaaattgttacataaacaaaatagaagcattttctctttgataccaagaggagatctctgaccaattaatcaatattaaggggaaaattttaccttggatataanaaaataattttctaacagctcaaattatactcagttgttgttattaactaacaacccttatatctgcatactaatacttgtaaaatcaagattaatttgatattcatttctggtaggggacggggttatgtcattttcctacagtcttggagagaaaataatttgttaaatgcaatttgctagcatctattagaaatcttgtaaaggttatatatttttaatttcacttaatatttctgcttttatttttctacacatgaccataaatatatatcttcatgtatgcatgatgaagcatggtgagtaacagattttttaatggaataagctattatggt

SEQ ID NO: 108381 - DNA, 615 bp, Homo sapiens
  misc_feature (1)...(615): n = A,T,C or G
acagatcacgtcttgggaaaaataaatgtgaccccttaaaatttgcaccatattattgaaatctctttgacacragtaaccatagaagacacaggtaacatatgggttgctctttatgtagggctttagcagtctattcagtcttttaccatgtgactactttgtatgtggaaaaattgttacataaacaaaatagaagcattttctctttgataccaagaggagatctctgaccaattaatcaatattaaggggaaaattttaccttggatataanaaaataattttctaacagctcaaattatactcagttgttgttattaactaacaacccttatatctgcatactaatacttgtaaaatcaagattaatttgatattcatttctggtaggggacggggttatgtcattttcctacagtcttggagagaaaataatttgttaaatgcaatttgctagcatctattagaaatcttgtaaaggttatatatttttaatttcacttaatatttctgcttttatttttctacacatgaccataaatatatatcttcatgtatgcatgatgaagcatggtgagtaacagattttttaatggaataagctattatggt

SEQ ID NO: 108382 - DNA, 615 bp, Homo sapiens
  misc_feature (1)...(615): n = A,T,C or G
acagatcacgtcttgggaaaaataaatgtgaccccttaaaatttgcaccatattattgaaatctctttgacacaagtaaccatagaagacacaggtaacatatgggttgctctttatgtagggctttagcagtctattcagtcttttaccatgtgactactttgtatgtggaaaaattgttacataaacaaaatagaagcattttctctttgataccaagaggagatctctgaccaattaatcaatattaaggggaaaattttaccttggatataanaaaataattttctaacagctcaaattatactcagttgttgttattaactaacaacccttatatctgcatactaatacttgtaaaatcaagattaatttgatattcatttctggtaggggacggggttatgtcattttcctacagtcttggagagaaaataatttgttaaatgcaatttgctagcatctattrgaaatcttgtaaaggttatatatttttaatttcacttaatatttctgcttttatttttctacacatgaccataaatatatatcttcatgtatgcatgatgaagcatggtgagtaacagattttttaatggaataagctattatggt

SEQ ID NO: 108383 - DNA, 451 bp, Homo sapiens
gggcatattgcatgatgctgaggtttggggtatgaatgaccaggcactgagtaaagtaccagtaggtagttttccaacctttcccttcctccctccctccactctctggtagtccccagactttttttatgtgacaatatcatttttatttttctaacaaatctttcttcctttttttcttttgaagataaacatggatttaataagaatcagataattccacttagaatcatctattgggggggctattttaaaatgctggtgtctgatttaattgctttggagaggacctgagtataaatattatttttaaaagcacccccggtgattccagtgtgcatctgggaatgagaacccttgttgtcggcagcacttctcaggttcatattcttaagtggggcaaccacacatsctagtttgccttaagtgagtcctggtgtaattattcaca

SEQ ID NO: 108384 - DNA, 410 bp, Homo sapiens
gtcaactgcatttacaattacgaataatagygagctgccattcccaagggaaataatgaaagaaatgtttcatagatttttttagcaaaaacaaatgatttgcatgtttccaccaaaagggaataaaacccttaatatggaatatccctcaggtctcctttttggaaacaaaattcataaccacctgccatttgatgaaatctaataaattcctaatatagcatacactcctccaaagttttcattgttcaaagaaactcaagtgaaaataaggtatgaaatcctcatgtgcacagagagataaagataaatgcggcatttttaaaatatctgttttttttctagtacaaagaaaatatatcggaagtattaaagtgagcataatttcatcccacagcaatagtttcaac

SEQ ID NO: 108385 - DNA, 410 bp, Homo sapiens
gtcaactgcatttacaattacgaataatagcgagctgccattcccaagggaaataatgaaagaaatgtttcatagatttttttagcaaaaacaaatgatttgcatgtttccaccaaaagggaataaaacccttaatatggaatatccctcaggtctcctttttggaaacaaaattcataaccacctgccatttgatgaaatctaataaattcctaatatagcatacactcctccaaagtkttcattgttcaaagaaactcaagtgaaaataaggtatgaaatcctcatgtgcacagagagataaagataaatgcggcatttttaaaatatctgttttttttctagtacaaagaaaatatatcggaagtattaaagtgagcataatttcatcccacagcaatagtttcaac

SEQ ID NO: 108386 - DNA, 410 bp, Homo sapiens
gtcaactgcatttacaattacgaataatagcgagctgccattcccaagggaaataatgaaagaaatgtttcatagatttttttagcaaaaacaaatgatttgcatgtttccaccaaaagggaataaaacccttaatatggaatatccctcaggtctcctttttggaaacaaaattcataaccacctgccatttgatgaaatctaataaattcctaatatagcatacactcctccaaagttttcattgttcaaagaaactcaagtgaaaataaggtatgaaatcctcatgtgcacagagagataaagataaatgcrgcatttttaaaatatctgttttttttctagtacaaagaaaatatatcggaagtattaaagtgagcataatttcatcccacagcaatagtttcaac

SEQ ID NO: 108387 - DNA, 410 bp, Homo sapiens
gtcaactgcatttacaattacgaataatagcgagctgccattcccaagggaaataatgaaagaaatgtttcatagatttttttagcaaaaacaaatgatttgcatgtttccaccaaaagggaataaaacccttaatatggaatatccctcaggtctcctttttggaaacaaaattcataaccacctgccatttgatgaaatctaataaattcctaatatagcatacactcctccaaagttttcattgttcaaagaaactcaagtgaaaataaggtatgaaatcctcatgtgcacagagagataaagataaatgcggcatttttaaaatatctgttttttttctagtacaaagaaaayatatcggaagtattaaagtgagcataatttcatcccacagcaatagtttcaac

SEQ ID NO: 108388 - DNA, 518 bp, Homo sapiens
aagcacctctcaacgtctctagaatccacaaaaatgaatctcattacacctgagaatttgtctggttgaggtaaacttttagatattaaacaaaggggaagaagaaaacgaagaaaaacgaacactacggtttttccataaagcagtaaagctactcctcttcaactaaataaaatctttaagaactgcaaagctttttttaatccatatttgaccaatttaatgatcagtcatttctgatgtgatgctttagaaatatctgagactcctttctctctaagaagtggcatctagtacacctcattctattcttaacactttygtcactaagcacattgccagtttactatgtgggtagtaaaatatgagattatgataatgttgcatgattcaaatttgtctgttctcttcagatcttgcacccgtattataaagaatgccctttttttctttgccagctgaatccccaagtgttgatgccacagatgggcgatacacctggtaccaggcatctagaa

SEQ ID NO: 108389 - DNA, 639 bp, Homo sapiens
gatgaatagagggcgtagttgagcttcaccaggggagaaggaactgttcgaaagaaaattcatggttaataggattttaatattttcttcatctaagaaaggatgtatgtagattaagaaaatatttcatctttttatgattattggattataaaagagctgtcagcaaaatgcttgaaaaaatgttcttcctgattttgtttatggttttacaaagactaatcatattgactaggctagctttaccgttggtggtcattttttcctatctagcagtgttataattggatacatgagagtgattcrtatgatcctgcttatatgacagcaaaagcagaaaaatagtacatgaatacatgtggtataacttggctagagaaatgtataaatatggatataaaattacaatgggagatgaaatttccagtgagtaaacaattctgcataatatgtacaaggccaagaatgccataccctgctgcatagatacctcaggggaagcagaaatagacaaatggacttggacgcttggttagatctcatttcagaaatgtaacagatctcaaagaacatgggcattggtatcaaataaacctaattctaaaacctagcactgcctctttattttattaagtttta

SEQ ID NO: 108390 - DNA, 645 bp, Homo sapiens
gacatatgagaacccatgtaaaagtctaacataaatgtaattggaggtgagattgaaaaagaagcaattttgaagaactactacctgagaattttccaaaactgaccccaaaaaccccacacatcgagtcatagattcaaacaaaataaactcaaagaaagccaaacataggcacatcatagtaaaactgctgaaaaccraggaagacaagaaaaattgttaaagcagcaaggaaaaacacacattaccttcaaataagcagtaatgacagccaacttttcaacagaaccaacagaagccattaaaaaatggaatcacatctttgaaatagtgaaagatatgtgtcaattgagaatgctatactcaattaaaatatcagtgaaaaacgaagacaaaataaatacttttcaaagacaaaaacaaacttctgataacttacctctatcagatttacattaaaagaaatacaaaaggggattcttttggcagaagaaaaatgatcctagacacaagtgtaataatgcaagaaggaacaaaaacaaaagaaagagtgactatagtggaaaatataaataaatattatttaaaaccaataccaatgtctgttggttttaaagtatatgtagaattgaaatacgtaatagc

SEQ ID NO: 108391 - DNA, 537 bp, Homo sapiens
acaataactaaaatgaaaaattccctagagggcctcaatagcagatttcagatggcaggaaaaaagaatcagtgaacttttagttagatcagtaaaaattattcaatatgaagaacagagaaaaaagaagagtaaagagaaataaatagagccttggaaacctatgaaaaaacaattaaagaaataatagctgaaagtattcagcactctgaatatatcacttcagggattttgagacatacctttcactgccttctggaatccattttttatgataataaattagcttctaattgtatttctttcccttttatgaatagatttgttgcttttctctttattattctcyctgaataatttgactaggatgttgtctaggtgtgtatctctttgtctttatcttgtttatatttagcttcttggatatatagactaatcttaaaaaataaaatttggaaagaatcggtattggattttgtcgaatgctttttttgatttattgatagggtcatgtaatttttctcctttaacctgttg

SEQ ID NO: 108392 - DNA, 532 bp, Homo sapiens
ttcaagtggtaacacgaaagtgttaagttctcgtttatgagatgtcagtcccaagcaaacgcggtaacattatgtttaagataaatccgggtctatyagacttatataacaaggtaaggaatatgtactcttgccccctatagtgtagatagctgtattagtggcaaaacaggtgttattgcaaatacttaggcccatgaaaggatacttgattatgttctggtggaaatatagattgcttttgtttgaaatgcattgaggtttaaagaaggtttttttttttttttttttttaagtttagagaaaaaagcaaaaggacctccaagtgataaagaattcttttagatcttagaatggtacagaatttgaagcaaaccaaaggcgttcaagggaaagggagcatataacaagcaactcaaagtggggctctaagattgtgctatggatagagtgaaggaatgccactctgggaattctgcagtccttgcaagaatggagaaattataaagtgttggtggtaagaggagattgt

SEQ ID NO: 108393 - DNA, 532 bp, Homo sapiens
ttcaagtggtaacacgaaagtgttaagttctcgtttatgagatgtcagtcccaagcaaacgcggtaacattatgtttaagataaatccgggtctattagacttatataacaaggtaaggaatatgtactcttgccccctatagtgtagatagctgtattagtggcaaaacaggtgttattgcaaatacttaggcccatgaaaggatacttgattatgttctggtggaaatatagattgcttttgtttgaaatgcattgaggttkaaagaaggtttttttttttttttttttttaagtttagagaaaaaagcaaaaggacctccaagtgataaagaattcttttagatcttagaatggtacagaatttgaagcaaaccaaaggcgttcaagggaaagggagcatataacaagcaactcaaagtggggctctaagattgtgctatggatagagtgaaggaatgccactctgggaattctgcagtccttgcaagaatggagaaattataaagtgttggtggtaagaggagattgt

SEQ ID NO: 108394 - DNA, 561 bp, Homo sapiens
  misc_feature (1)...(561): n = A,T,C or G
agcatgagtagacatttctgaaaagaatacttacaaatggccaatatgtgtatatgaaggttttctcaacaccactaatcactgcggaaatgcaaatttaataaaactaataaaatataatttctccccaatcagaatagctatttgtaaatatatattwaaaaaaacagatgctggttaggatgcagagaaaagagaaatcttacacactgttgggggcaatgtgtaaccattttgaaaaaaagtatgaagattttccaaaaaactaaaactagaactaccatttgatccccagcaatctcactactgggtatctatccaaaataaatatataaaaataatacctgtgctcatatgtttattgcagcactattcacaatagcaaagataatgcaatcaacccaagtgtccatcaacagataaactgataaagaaaacgttgtttgtgtatgtgtatataatagaaaaatggataaagaaaatatatgtgtatatgtgaatatatatgtacagtgtatagtgtgtnnnnnnnnnnnnnnnnnnnnnnnnnnnnnnnnnnnn

SEQ ID NO: 108395 - DNA, 631 bp, Homo sapiens
taaaggagctgaccaataaaaggagttctcaacattgaaggggaatgctaggtaaagaagcctgtattttaaaatgattgtaagatatttctttcacctttacattcttctcaaaatccactcataaggctttatctatgttcaagaatatagcagtggaaaacaggcccagacagactaaacaatctagacttaataataaactggacagactgaccactgtatttacatagactgacatgcttgaagtactgactatggtagaccctttgagaccctaaacaaaatggactactgtgaacatcattttactgcccaacagtcattatccttgttgtccttcagcctccaccttctgtttaggcaacctgtgtaattcaagggaagctgctgaatttgagcttcagggcttgatcctgattaagaactgttatagtagcaattccacattttgctggtgaaaggtttaggagtggacttayagcgcaatcgacttaatgagacaaaatattttctgaaaagtttctaatttttttgtctgtttgtttccaggagtaattcaatccagattgtgaagaagtcttagtgccaattgctctggcagccatgttatgaccatgagacaatcagc

SEQ ID NO: 108396 - DNA, 553 bp, Homo sapiens
ataatagtacctaaagtgaggcctggctgttcacacctgtaatcccagcacatcaggaggctaaggagggaagactgcttgagcccatgccaacactcttacagcaaacctattgtcctattgttgttcaagaccagtcagggcaacatagtgagaccctatcactataaaaaataaaaaattacctgggtgtggtagtgcatgcctgtagtcccagctactcgggaggctgagrtgggagattgcttgaacctggaaggttgaggctgcagtgagccatgttagcaccactgtactccaacctggacaacagagcaagacattgtctaaaaaaaaaaaaaaaaaaagtaactcatgaggttgttgggaagattaaataaaatatcatgggtgagatgactagcacagtggttggcactttataggtgcttagtgaatgtgagtttcttttctcctttatttaaagttctttggcacgaatgaaatcactgtttaataatgcacaaggccattgagaatgtatagtgagattcttggcaagcaactggattgt

SEQ ID NO: 108397 - DNA, 249 bp, Homo sapiens
aacctgtttcccttaaataccttcaaagttggaggcctcactacctcctgagacagctgttattagttagagtcctttgaactgaaaacaacaaaaacaaacaaacaaaaaaagcacaaaccaaccygactctagtttaattaagagagaccaccctttggaatgatactaaggtatttcatactcttcaagaaagagctgagtgactgacagggttgtgggagaataagaggatcgtgagattcagga

SEQ ID NO: 108398 - DNA, 537 bp, Homo sapiens
tttgaaaatattcaaaaagtaccatcaaattaaatgtatattttacattgtaatctactttggtctttttttttttcatttcagtgtcaaattaggcaatgcctgttgattgtcagtaaaatgagtacagtagaatgactaaatagcaaatagtccaactgtcagaggatttctgaaaccagaccaggaaaaacagcaacatggaaattaaatgccattcagggactttgattctctatctgtctctttatggkgttccgtgtttcaggccaatcttattctgtccttttcctaagctccccaaataacatggaaagcaaagaacaactgtcctgctgaacactgttattctgaattttattctttaaactttttgcccagttagtcatacgtctgaaaatgcatagagtatcctcttaagcaagagtgtgactcaaactctcactacatacttgcgaaagaactttggcatgccccatctctgagaaggctggtggggttgaggctggaccaaatagtggctgaatgccttcatga

SEQ ID NO: 108399 - DNA, 486 bp, Homo sapiens
ttcttctgatccaataactcatgcatgaaatagctttttaattttttttaaagaataaaaacttcctgtatctcatttttcccagctttattgaggtataattgacaaataaaattgtatatatttacagtgttcaatgtgatgttttgatatacatakacattatgaaatgattactacgatcaagctaattaacatatccatcacatcacatcattaaaaatgaaaaagtatttttaatcaacacaaaattgtatgcaaaaatatgttctctgagacaacttggccccttttagtcacaacttgtctttaagttgttagtcctttcctaacccttttgtcttgtctctatagccagaccgtaaatccctggaggtcggagatttgtctgtcatctttttccatccttgccagtacccaattccaccccctccattatgctccaagggtgatcttgctgggtcttcattaaagaatttatcacag

SEQ ID NO: 108400 - DNA, 509 bp, Homo sapiens
gtaaaattaccagctgctaagacaattccccaacctcctcattattattttttcgctgagttaatggctggacttcaggcacataatatacagaacaagctcttggttaaagtttgttgacttttatcaaaaggtgcctataggaattttcttccgtctgttttttctttattgaatgcttgaagctactcataaagtaaacacccaaattagtaatgattttattatatcatttttggactcgcaaaataaattttacttctgtaatgaaagtcgatcaagcctacttttgatcarctgaaaccttggggcttcccttttcagtctttggatgaaagctggtggtgttgatgtcatgagagagtcttgaaatggggaaggctgtttcttcctaatgaatgcccagccatcccccttggtttggttgaaaagcaagacgcaaagtctcagattctgtcactgccaagatcctgtcattcctaatgtgctcctttccagctgtggcccat

SEQ ID NO: 108401 - DNA, 509 bp, Homo sapiens
gtaaaattaccagctgctaagacaattccccaacctcctcattattattttttcgctgagttaatggctggacttcaggcacataatatacagaacaagctcttggttaaagtttgttgacttttatcaaaaggtgcctataggaattttcttccgtctgttttttctttattgaatgcttgaagctactcataaagtaaacacccaaattagtaatgattttattatatcatttttggactcgcaaaataaattttacttctgtaatgaaagtcgatcaagcctacttttgatcaactgaaaccttggggcttcccttttcagtctttggatgaragctggtggtgttgatgtcatgagagagtcttgaaatggggaaggctgtttcttcctaatgaatgcccagccatcccccttggtttggttgaaaagcaagacgcaaagtctcagattctgtcactgccaagatcctgtcattcctaatgtgctcctttccagctgtggcccat

SEQ ID NO: 108402 - DNA, 509 bp, Homo sapiens
gtaaaattaccagctgctaagacaattccccaacctcctcattattattttttcgctgagttaatggctggacttcaggcacataatatacagaacaagctcttggttaaagtttgttgacttttatcaaaaggtgcctataggaattttcttccgtctgttttttctttattgaatgcttgaagctactcataaagtaaacacccaaattagtaatgattttattatatcatttttggactcgcaaaataaattttacttctgtaatgaaagtcgatcaagcctacttttgatcaactgaaaccttggggcttcccttttcagtctttggatgaaagctggtggtgttgatgtcatgagagagtcttgaaatggggaaggctgtttcttcctaatgaatgcccagccatcccccttggtttggttgaaaagcaagacgcaaagtctcagattctgtcactgccaagatcctgtcaytcctaatgtgctcctttccagctgtggcccat

SEQ ID NO: 108403 - DNA, 607 bp, Homo sapiens
tcatacagtttttatccttcattctgttaatgtggtatgtcaaatatattgattttcatctgttgaaccagacttgcatcccagggataaatcacactggatcatggtgtataatctttctgatgtgctgttgaattcrgtttgctagtactttgttgaggacttttgcatctatgttcatcaaggatatcagcctataattttcttttcttacagtgtcataatctgtctttgttgtaagtttaatgctgggcttgtaaaattagcttgaaagtgtcccctcctcttcagttttttggaagagtttgagaaagattagcattaattcttcattaaattcttgatagatctcacctgtgaaaccattaatttggggattttctttgctggcaggtttttgatcactgattctccttacatgttatttgtctgcttagatattagatgtttttatttctttatgattaggtcttgccaggtggtacactcctaggaatttatccatttcttcaaagttatccaaattgttggcgtataattgttcatagtagtctcttatgatcctttgtatttttgaaagattggaagtttattacaaaattaacaa

SEQ ID NO: 108404 - DNA, 607 bp, Homo sapiens
tcatacagtttttatccttcattctgttaatgtggtatgtcaaatatattgattttcatctgttgaaccagacttgcatcccagggataaatcacactggatcatggtgtataatctttctgatgtgctgttgaattcggtttgctagtactttgttgaggacttttgcatctatgttcatcaaggatatcagcctataattttcttttcttacagtgtcataatctgtctttgttgtaagtttaatgctgggcttgtaaaattagcttgaaagtgtcccctcctcttcagttttttggaagagtttgagaaagattagcattaattcttcattaaattcttgatagatctcacctgtgaaaccattaatttggggattttctttgctggcaggtttttgatcactgattctccttacatgttatttgtctgcttagatattagatgtttttatttctttatgattaggtcttgccaggtggtacactcctaggaatttatccatttcttcaaagttatccaaattgttggcgtataattgttcatagtagtctcttatgatcctttgtatttttgwaagattggaagtttattacaaaattaacaa

SEQ ID NO: 108405 - DNA, 567 bp, Homo sapiens
gccagtctcaactgttgaaaagactattccttccccattgactgtaattggcactcatcaaaaattaattggcatagatgtatgggtttatttctagactcttaattctatttcgtttgtctatatgcctatatttatgccagcaccacactgttttgmttactatagctttgtaataaatttttaaattgggaagtgtgagtcttccaactttgttcttcattttaaaagattgttttggctattcagggctccctggaattgtacatgaatttgaggaccagcttttccattgctgcaaacaaaaacaaaaacaaccaatgaaacaaacaaaaattcctggaattttgatagggattgtattaaatctgtagaacacttggtagtgttgccatcttaatgatattaaatcttctaatccatgaacgtagatgtattcacatgtatttaagtctttactttctttcatcaatgtttcatcatttttagcatacaagcccttctcctccttggttaaattatactagatattttattcttacactattataaatggaattattttct

SEQ ID NO: 108406 - DNA, 593 bp, Homo sapiens
aagtgaggcttttccaaaaaggcttaccctaacaaaactcattctacttcttttaattatgtcttataaaaccttgcctcatactggcatgaaactcactgatgtatgctttgtacaatcaatattttttttatcactttgaaatatttgaattctccccgttagtgatgccacagagataactgatagaagttagctgattgccttgtagtctccaggatgcaattctcattagggtccctgaactcaattagaacacttagttttgttcttacaagctccaggcttgcactgagcttcagtttcactgtctttatccaatatctgtctcatcctttccagttgaaagacgaattgttttggtagagaagatggatacctcataatttttactacctttctgtcatctatacaattccagttctatcctttctttattattcttgtcctcaacactaaaaaattatttcagwgttctttttacatttgcaagtttcagcttattcccagcatgaatcttctggacaccattcttgctgcattcttttgttgatccttgggtatgtgtctttatttctatcttttgtacattc

SEQ ID NO: 108407 - DNA, 578 bp, Homo sapiens
tgatgtatgctttgtacaatcaatattttttttatcactttgaaatatttgaattctccccgttagtgatgccacagagataactgatagaagttagctgattgccttgtagtctccaggatgcaattctcattagggtccctgaactcaattagaacacttagttttgttcttacaagctccaggcttgcactgagcttcagtttcactgtctttatccaatatctgtctcatcctttccagttgaaagacgaattgttttggtagagaagatggatacctcataatttttactacctttctgtcatctatacaattccagttctatcctttctttattattcttgtcctcaacactaaaaaattatttcagagttctttttacatttgcaagtttcagcttattcccagcatgaatcttctggacaccattcttgctgcattcttttgttgatccttggktatgtgtctttatttctatcttttgtacattccttttcgactttaagctacttggaaagttctctgtgtagccattaagttttaggctacttctcccatttcttcctcattggaat

SEQ ID NO: 108408 - DNA, 565 bp, Homo sapiens
gtggctacatgacatggtacatttgttaaaatccatagaactgtacacacagagagtgaaccctaatgtaaactatgcaccttaatgaataayaatgtatcaatattggttcatgaattataacagatgtaccacaataatgcaagatgttaatattagaagaaactgtgtactgtggaaaagagggtagatggaagctctttgtactttcaatgcaatacttctgtaaacctaaaactgctacaaaagaacagtctatttgttaacaatagagagatcggtcttttgagtaaatcatgtttgggagatgctaggttaaacaaaattaaaccagtttttttactgaagagctttccagagccttttactatgctgatctgtactggattctccatgagggaaattgtgagtgcagcctttcacatagttgcttgactgaaaaacttgtctttttaaagtagttaaggaacttctattcttcagaacacatttttgggagtaatggaatgtagcaatgaattaataatttttaaatacattttctatgtatgcctgaatagaaaat

SEQ ID NO: 108409 - DNA, 459 bp, Homo sapiens
aaataattatgaaataatttgtttccttttgttattaagactttttaaaccagttttgttaggtgacctccatacaacatcccaaactagcactgattatagtcatttcaagctagtgtttttcttccgaactgtatcacattgtctaatayaaaatgcttgtttgaatgttttgtaatgttcgaaggatttgactataaggcatgttcttcctttctgagtactaatcttgaagaaaacaacttgctttttattaagacattgtattagtttgctagaattgccataacaaataccacagactgggttgcttaagcaacagaaacttattttctcacactcctggaggatggaagtccaagatcaaagtgttggcaggtttggtattcttctgaggcctttctccttggcttgcagatggcctggaatctcagaatgtgaccatatttgggaagaaaa

SEQ ID NO: 108410 - DNA, 482 bp, Homo sapiens
aagctgaacatgccctctttttcggcttcatgaaaaaaaaatatgtttaaatgaacctagaattgttattacattggattgaatattctaattactgaactgattgttttgagacaaaagtgacaggaagaacttttattacctgagaatgacctggagagtcatggacctacccttgyttttattcacgaagtgagaaaatggagaacccttctgtattttttttctgtccttactcagtgtagcagttattgtaatttgtaatacttctgcaaaaataatctatagatattccaattttaaattcagaatttgcagacacatacattggtttaacaaaactgtaataagtattcagtctgaaaaatttgtttttcatataatgccaaccttatactttattgcaatatttgaggtgtttattatctgagggtattaaatactaaggaaattctgattatagaatactttcttaggtttca

SEQ ID NO: 108411 - DNA, 544 bp, Homo sapiens
ggctcatctccaatgtgctttccttggagcccaattccatgcctttctagggcaggtctccttagagtctaggcaatacttttagctcttacaatgattgtatgcctcgaaactcacaaatcatactttaagtattcttcactggttttcccggccttcccttctcaaatctgtccagattttctytttttttttttttttttttttttgagatgagtttcactcttgttgcctaggctggcgtagtgcaatggcacaatctcagctcaccgcaacctctgcctcccgggttcaagcgattctcctgcctcagcctcccaagtagctgggattacaggcatgcaccaacatgcccgggtaattttgtatttttagtagagacggggtttctccatgttggtcaggctggttttcaactcccgacctcaggtgcttcgcccgcctcagcctctcaaagtgctgggattacaggtgtgagccaccgtgcccggcctgattttttttttgttgttgttgtatacttaatacagctctcctagcattc

SEQ ID NO: 108412 - DNA, 544 bp, Homo sapiens
ggctcatctccaatgtgctttccttggagcccaattccatgcctttctagggcaggtctccttagagtctaggcaatacttttagctcttacaatgattgtatgcctcgaaactcacaaatcatactttaagtattcttcactggttttcccggccttcccttctcaaatctgtccagattttctctytttttttttttttttttttttgagatgagtttcactcttgttgcctaggctggcgtagtgcaatggcacaatctcagctcaccgcaacctctgcctcccgggttcaagcgattctcctgcctcagcctcccaagtagctgggattacaggcatgcaccaacatgcccgggtaattttgtatttttagtagagacggggtttctccatgttggtcaggctggttttcaactcccgacctcaggtgcttcgcccgcctcagcctctcaaagtgctgggattacaggtgtgagccaccgtgcccggcctgattttttttttgttgttgttgtatacttaatacagctctcctagcattc

SEQ ID NO: 108413 - DNA, 509 bp, Homo sapiens
agaattctctcttgcttcagagaggcttctctttttgttctatttaagcctccaatggattggatggagcccacccaaattatggaaggcaayctgctggctcaaagttcactatcttaaatgttaatctcatccaaaaacacccttccagttgacagataaaactggccatcatacctttggcagttccagacaaaaagagcatcccagagggaagtaagtgtcagccagagatggctgtggtgtctagctggctttggcaggcatccagggtggagtgggagagtgaggcatggagacagaacaatgtgtgcaagtacacacatgctcaaggccactgtagtactgtggacatccttagcttcaaccttgcaggcagacctggaaagtagtcattgagtagcccaaacaccacagcttcttcccgattaagaaaatgaggctgcatttggctactgctttgttttgggttcctgaggagtttgtgaggatattagacgtagatctca

SEQ ID NO: 108414 - DNA, 541 bp, Homo sapiens
cctaagccagggtgattccttctatctgctctctataagacaggggaaggagactgctgtggaatttcatcttccttttgaagagttatagcagtgttatgtcaaatgttgaacaagggagctgtggtgatctactcagatggttggcagagagcacagtggtcattacttctactgtgaaaagagaactagaagaatcaaccttttattgagcacctactagggacctcttaatcctcctcatggtaacctagtaaggaagcatgcattataaaacattttatggatgaaagagcggaagtttagagagggtaaattgcctcaagtgcacatastagcattaataatagtattaaaaatacaggtggctgctaagtttgagtgtttgtgtcccccacaaaattcatgctgaaatttaactcccaatgcaacagtatcaagaggtggggccttttgggggtgattaggtcatgagggttccaccctcatagatgggattagtgccttattaaaggcctagagggaaatagccaggaacttt

SEQ ID NO: 108415 - DNA, 541 bp, Homo sapiens
cctaagccagggtgattccttctatctgctctctataagacaggggaaggagactgctgtggaatttcatcttccttttgaagagttatagcagtgttatgtcaaatgttgaacaagggagctgtggtgatctactcagatggttggcagagagcacagtggtcattacttctactgtgaaaagagaactagaagaatcaaccttttattgagcacctactagggacctcttaatcctcctcatggtaacctagtaaggaagcatgcattataaaacattttatggatgaaagagcggaagtttagagagggtaaattgcctcaagtgcacatagtagcattaataatagtattaaaaatacaggtggctgctaagtttgagtgtttgtgtcccccacaaaattcatgctgaaatttaactcccaatgcaayagtatcaagaggtggggccttttgggggtgattaggtcatgagggttccaccctcatagatgggattagtgccttattaaaggcctagagggaaatagccaggaacttt

SEQ ID NO: 108416 - DNA, 637 bp, Homo sapiens
gatgatttttctgaaaataggaatctccaaaggaagtgtctgaatagattattacatagaataagagtttcaaatattgttaatgtcttctgccacccctaccactaaaagagctccattttgatgaggacgtatagttttttttttgtttktgttttgttttatttttggggggggggtctttttgctttttatttttatactctaagttctagagtacatgtgcacaatgtgcaggtttgtaacataggtatacatgttttgttagctctgcctggtgttttgttttatttgtgcactgttttatttttcttttgccttattcagttattcacttcttgatcactgaaataccaatcttggtcctctaccactccttaagccaaacttgctagaagcttagtttcttctttgggtatcgtcaggctgctgtagcaaaataccataaactggatatcttataaacaacagagatctatttctcacacatctagaggctgggaaatccaagatcaagctgttggcaggtttggtgactgatgaaggctctaccttctaataccatcacattggggattagaattttaacaaaaaaatttgggggagatacaaatgttcagaccatagcattgagtat

SEQ ID NO: 108417 - DNA, 637 bp, Homo sapiens
gatgatttttctgaaaataggaatctccaaaggaagtgtctgaatagattattacatagaataagagtttcaaatattgttaatgtcttctgccacccctaccactaaaagagctccattttgatgaggacgtatagttttttttttgtttgtgttttgttttatttttggkgggggggtctttttgctttttatttttatactctaagttctagagtacatgtgcacaatgtgcaggtttgtaacataggtatacatgttttgttagctctgcctggtgttttgttttatttgtgcactgttttatttttcttttgccttattcagttattcacttcttgatcactgaaataccaatcttggtcctctaccactccttaagccaaacttgctagaagcttagtttcttctttgggtatcgtcaggctgctgtagcaaaataccataaactggatatcttataaacaacagagatctatttctcacacatctagaggctgggaaatccaagatcaagctgttggcaggtttggtgactgatgaaggctctaccttctaataccatcacattggggattagaattttaacaaaaaaatttgggggagatacaaatgttcagaccatagcattgagtat

SEQ ID NO: 108418 - DNA, 637 bp, Homo sapiens
gatgatttttctgaaaataggaatctccaaaggaagtgtctgaatagattattacatagaataagagtttcaaatattgttaatgtcttctgccacccctaccactaaaagagctccattttgatgaggacgtatagttttttttttgtttgtgttttgttttatttttggggggggggtctttttgctttttatttttatactytaagttctagagtacatgtgcacaatgtgcaggtttgtaacataggtatacatgttttgttagctctgcctggtgttttgttttatttgtgcactgttttatttttcttttgccttattcagttattcacttcttgatcactgaaataccaatcttggtcctctaccactccttaagccaaacttgctagaagcttagtttcttctttgggtatcgtcaggctgctgtagcaaaataccataaactggatatcttataaacaacagagatctatttctcacacatctagaggctgggaaatccaagatcaagctgttggcaggtttggtgactgatgaaggctctaccttctaataccatcacattggggattagaattttaacaaaaaaatttgggggagatacaaatgttcagaccatagcattgagtat

SEQ ID NO: 108419 - DNA, 637 bp, Homo sapiens
gatgatttttctgaaaataggaatctccaaaggaagtgtctgaatagattattacatagaataagagtttcaaatattgttaatgtcttctgccacccctaccactaaaagagctccattttgatgaggacgtatagttttttttttgtttgtgttttgttttatttttggggggggggtctttttgctttttatttttatactctaagttctagagtacatgtgcacaatgtgcaggtttgtaacataggtatacatgttttgttagctctgcctggtgttttgttttatttktgcactgttttatttttcttttgccttattcagttattcacttcttgatcactgaaataccaatcttggtcctctaccactccttaagccaaacttgctagaagcttagtttcttctttgggtatcgtcaggctgctgtagcaaaataccataaactggatatcttataaacaacagagatctatttctcacacatctagaggctgggaaatccaagatcaagctgttggcaggtttggtgactgatgaaggctctaccttctaataccatcacattggggattagaattttaacaaaaaaatttgggggagatacaaatgttcagaccatagcattgagtat

SEQ ID NO: 108420 - DNA, 378 bp, Homo sapiens
gcaaactctggtgtgcttggtcctctctgtaggatatctgttgagattgcctagaatttttttttctttactcttcaagtttcttaatttttgccaagtgttccattattggaacgctaagcatgtgggagttatttgtatcctactcarggtcatcgccaaggtctgtttgcaaaaattcaaaaaattgcaacctcaggcataaatgggtacggactatgttcaattttgtttcttctttttacagtgtgtggcttgttttgtaaacaaatgaatacatgaattaaatctatatggagtacaaagggatgaaggagaaacagcttctgagctgtttgtaaccatccttgtttgcataacctacttattattgaattc

SEQ ID NO: 108421 - DNA, 385 bp, Homo sapiens
gcgtgtgctcaaagcttactgagggaggggyaacttcacctggtgccactggccctgggctgcagggaagaatgcacaggttagttgacatttgatccaatgctggaattggaagggatgttagagggcttttgttccacactcctccttttcagatgagtaaatcaagcctcagagagggacaggaactagcccagaggcagtggtcagcggccagggttggagcccaggacttccctagacaatgctttctcctctgctgggcccttcatccctgtgctgtgggcaggatcagctcacagaggtggtcaggccgacattattcacacaaacagttcagctgatcatggaggtcatggaggccgcataccttggtgcaggacaa

SEQ ID NO: 108422 - DNA, 385 bp, Homo sapiens
gcgtgtgctcaaagcttactgagggaggggtaacttcacctggtgccactggccctgggctgcagggaagaatgcacaggttagttgacatttgatccaatgctggaattggaagggatgttagagggcttttgttccacactcctccttttcagatgagtaaatcaagcctcagagagggacaggaactagcccagaggcagtggtcagcrgccagggttggagcccaggacttccctagacaatgctttctcctctgctgggcccttcatccctgtgctgtgggcaggatcagctcacagaggtggtcaggccgacattattcacacaaacagttcagctgatcatggaggtcatggaggccgcataccttggtgcaggacaa

SEQ ID NO: 108423 - DNA, 565 bp, Homo sapiens
agaagaaggccgtaggaggagctggctggggcgaatgccagagctcggtttggggcaagtcaggacatgttggacatgctcaggatgctgtggctacaacaaagcttcctttccccatgttcrtgccatggggctttgctgcttttttcatcaagaagtggagtctaattccccaacccttgagtctggctggccttgcaaatagctttggctgataaaatgcaggagtgatgttgtgtggcttctgagctttagtctcaaaagactttgcagctcctgctctcactgtcttgagaaactgccctaagaccactatgaggaagcctggtctacccatgggaggatcagaggccatgtgaagcagagtaaaactgtcctgagtcccctagatccatcagccaacagccaagaccaagtgcacaggagactgaggccatcttactttatccaacctcagttgagcttctgggtgatggcctctacatgaatgaccccaacagaagaaccactcagctgagtccagctcaaattactgactcacaggatcatagcaaattggcttatt

SEQ ID NO: 108424 - DNA, 426 bp, Homo sapiens
ccatgtgaagcagagtaaaactgtcctgagtcccctagatccatcagccaacagccaagaccaagtgcacaggwgactgaggccatcttactttatccaacctcagttgagcttctgggtgatggcctctacatgaatgaccccaacagaagaaccactcagctgagtccagctcaaattactgactcacaggatcatagcaaattggcttatttacttcattaagatttggcatgacatttgaaagaagacatttaaaacttggaccctgagattcagttgaccctttttagccattgataattgataatttggtgcaggcatttgggatattagcatctagagatgctaacagcagtacttaactgatataaagcagcacataactgataaaggtgtcgacctgacatgcagtacagatggttt

SEQ ID NO: 108425 - DNA, 459 bp, Homo sapiens
gaattcctaaggactgcccattgaaactgacaaaattgcccttgtttgatgagaggaatgagcagagcattgatgtggtgaacaaggatctagtgagactytcccagcatgtttctaccaaagctttatctaagcttctcagaacactctcctaataagcagatgtttggcctttcagaaagtcaacaagcaaaatgccttgagtgtcccaaaacactgatgccatgatgtgggctcctgactggcctccttttcctttgactggaccactgccacctcttggtagccatcgctttcatgatgctttgccttggagatcatattggtgaagccatgttccaactgccgcttacaatttgtcagagggatgcgtcaggatcgtgatccctcctgtttaaaatttccactgatagctctcgtcgtaactgcagctgatctgggcacagtggttttcacagc

SEQ ID NO: 108426 - DNA, 546 bp, Homo sapiens
aatgagcagagcattgatgtggtgaacaaggatctagtgagactttcccagcatgtttctaccaaagctttatctaagcttctcagaacactctcctaataagcagatgtttggcctttcagaaagtcaacaagcaaaatgccttgagtgtcccaaaacactgatgcyatgatgtgggctcctgactggcctccttttcctttgactggaccactgccacctcttggtagccatcgctttcatgatgctttgccttggagatcatattggtgaagccatgttccaactgccgcttacaatttgtcagagggatgcgtcaggatcgtgatccctcctgtttaaaatttccactgatagctctcgtcgtaactgcagctgatctgggcacagtggttttcacagccactgcaggattcatcttccacatcttctcacctcttcttgaaacaagctatacattcgtaaagagttcatttctttggggtagtgtccttacaagcttttcttaaaacgtcaatgatttcttcaatcttccacccaagcttc

SEQ ID NO: 108427 - DNA, 602 bp, Homo sapiens
gaattcctaaggactgcccattgaaactgacaaaattgcccttgtttgatgagaggaatgagcagagcattgatgtggtgaacaaggatctagtgagactttcccagcatgtttctaccaaagctttatctaagcttctcagaacactctcctaataagcagatgtttggcctttcagaaagtcaacaagcaaaatgccttgagtgtcccaaaacactgatgccatgatgtgggctcctgactggcctccttttcctttgactggaccrctgccacctcttggtagccatcgctttcatgatgctttgccttggagatcatattggtgaagccatgttccaactgccgcttacaatttgtcagagggatgcgtcaggatcgtgatccctcctgtttaaaatttccactgatagctctcgtcgtaactgcagctgatctgggcacagtggttttcacagccactgcaggattcatcttccacatcttctcacctcttcttgaaacaagctatacattcgtaaagagttcatttctttggggtagtgtccttacaagcttttcttaaaacgtcaatgatttcttcaatcttccacccaagcttc

SEQ ID NO: 108428 - DNA, 629 bp, Homo sapiens
tgaattcctaaggactgcccattgaaactgacaaaattgcccttgtttgatgagaggaatgagcagagcattgatgtggtgaacaaggatctagtgagactttcccagcatgtttctaccaaagctttatctaagcttctcagaacactctcctaataagcagatgtttggcctttcagaaagtcaacaagcaaaatgccttgagtgtcccaaaacactgatgccatgatgtgggctcctgactggcctccttttcctttgactggaccactgccacctcttggtagccatcgctttcatgatgctttgccttggagatcatattggtgaagccatgttccaactgccgcttacaatttgtcagagggatgcgtcaggatcgtgatccctcctgtttaaaatttccactgatagctctcgtcgtaamtgcagctgatctgggcacagtggttttcacagccactgcaggattcatcttccacatcttctcacctcttcttgaaacaagctatacattcgtaaagagttcatttctttggggtagtgtccttacaagcttttcttaaaacgtcaatgatttcttcaatcttccacccaagcttcaccataaatttgatgtttcctcttgc

SEQ ID NO: 108429 - DNA, 546 bp, Homo sapiens
aatgagcagagcattgatgtggtgaacaaggatctagtgagactttcccagcatgtttctaccaaagctttatctaagcttctcagaacactctcctaataagcagatgtttggcctttcagaaagtcaacaagcaaaatgccttgagtgtcccaaaacactgatgccatgatgtgggctcctgactggcctccttttcctttgactggaccactgccacctcttggtagccatcgctttcatgatgctttgccttggagatcatattggtgaagccatgttccaactgccgcttacaatttgtcagagggatgcgtcaggatcgtgatccctcctgtttaaaatttccactgatagctctcgtcgtaactgcagctgatctgggcacagtggttttcacagccactgcaggattcatcttccacatcttctcacctcttcttgaaacaagctatacattcgtaaagagttcatttcttyggggtagtgtccttacaagcttttcttaaaacgtcaatgatttcttcaatcttccacccaagcttc

SEQ ID NO: 108430 - DNA, 446 bp, Homo sapiens
ggagctaggttgcttttcctgagttaagtaactgtccctgcagggcagtcctataatggctactggaattgggctacctaggattaaattaaggttcagggaggttggtcaacttgcttgggcccacacagcaccccttggagccaggactgggccaccagtctgctgcatgctggagggcgggatccctctggggctgcctttccctgctstgtgcactccgccgctgcgggcaaattgaggacaggaagcggaccgcacccacttctctcccaggacttgggcaatgttcaacacaggtggtcttccaaaggttcatagaaaatgcacatggtgaagaaacgatgcatggatttccactggtttgcactaaaataaacttgtcctaacttctgataacctttctgaactagatctagtttgaggcactaagaaggatgagacat

SEQ ID NO: 108431 - DNA, 656 bp, Homo sapiens
ccggttgctaaacttggagctaggttgcttttcctgagttaagtaactgtccctgcagggcagtcctataatggctactggaattgggctacctaggattaaattaaggttcagggaggttggtcaacttgcttgggcccacacagcaccccttggagccaggactgggccaccagtctgctgcatgctggagggcgggatccctctggggctgcctttccctgctctgtgcactccgccgctgcgggcaaatygaggacaggaagcggaccgcacccacttctctcccaggacttgggcaatgttcaacacaggtggtcttccaaaggttcatagaaaatgcacatggtgaagaaacgatgcatggatttccactggtttgcactaaaataaacttgtcctaacttctgataacctttctgaactagatctagtttgaggcactaagaaggatgagacatccactgaaaaggactcccgtcagagcaacatgaattccacgaaaattgcagcaagaggaaacatcaaatttatggtgaagcttgggtggaagattgaagaaatcattgacgttttaagaaaagcttgtaaggacactaccccaaagaaatgaactctttacgaatgtatagcttgtttcaagaagaggtgagaag

SEQ ID NO: 108432 - DNA, 656 bp, Homo sapiens
ccggttgctaaacttggagctaggttgcttttcctgagttaagtaactgtccctgcagggcagtcctataatggctactggaattgggctacctaggattaaattaaggttcagggaggttggtcaacttgcttgggcccacacagcaccccttggagccaggactgggccaccagtctgctgcatgctggagggcgggatccctctggggctgcctttccctgctctgtgcactccgccgctgcgggcaaattgaggasaggaagcggaccgcacccacttctctcccaggacttgggcaatgttcaacacaggtggtcttccaaaggttcatagaaaatgcacatggtgaagaaacgatgcatggatttccactggtttgcactaaaataaacttgtcctaacttctgataacctttctgaactagatctagtttgaggcactaagaaggatgagacatccactgaaaaggactcccgtcagagcaacatgaattccacgaaaattgcagcaagaggaaacatcaaatttatggtgaagcttgggtggaagattgaagaaatcattgacgttttaagaaaagcttgtaaggacactaccccaaagaaatgaactctttacgaatgtatagcttgtttcaagaagaggtgagaag

SEQ ID NO: 108433 - DNA, 656 bp, Homo sapiens
ccggttgctaaacttggagctaggttgcttttcctgagttaagtaactgtccctgcagggcagtcctataatggctactggaattgggctacctaggattaaattaaggttcagggaggttggtcaacttgcttgggcccacacagcaccccttggagccaggactgggccaccagtctgctgcatgctggagggcgggatccctctggggctgcctttccctgctctgtgcactccgccgctgcgggcaaattgaggacaggaagcggaccgcacccacttctctcccaggacttgggcaatgttcaasacaggtggtcttccaaaggttcatagaaaatgcacatggtgaagaaacgatgcatggatttccactggtttgcactaaaataaacttgtcctaacttctgataacctttctgaactagatctagtttgaggcactaagaaggatgagacatccactgaaaaggactcccgtcagagcaacatgaattccacgaaaattgcagcaagaggaaacatcaaatttatggtgaagcttgggtggaagattgaagaaatcattgacgttttaagaaaagcttgtaaggacactaccccaaagaaatgaactctttacgaatgtatagcttgtttcaagaagaggtgagaag

SEQ ID NO: 108434 - DNA, 656 bp, Homo sapiens
ccggttgctaaacttggagctaggttgcttttcctgagttaagtaactgtccctgcagggcagtcctataatggctactggaattgggctacctaggattaaattaaggttcagggaggttggtcaacttgcttgggcccacacagcaccccttggagccaggactgggccaccagtctgctgcatgctggagggcgggatccctctggggctgcctttccctgctctgtgcactccgccgctgcgggcaaattgaggacaggaagcggaccgcacccacttctctcccaggacttgggcaatgttcaacacaggtggtcttccaaaggttcatagaaaatgcacatggtgaagaaackatgcatggatttccactggtttgcactaaaataaacttgtcctaacttctgataacctttctgaactagatctagtttgaggcactaagaaggatgagacatccactgaaaaggactcccgtcagagcaacatgaattccacgaaaattgcagcaagaggaaacatcaaatttatggtgaagcttgggtggaagattgaagaaatcattgacgttttaagaaaagcttgtaaggacactaccccaaagaaatgaactctttacgaatgtatagcttgtttcaagaagaggtgagaag

SEQ ID NO: 108435 - DNA, 620 bp, Homo sapiens
tgaattccacgaaaattgcagcaagaggaaacatcaaatttatggtgaagcttgggtggaagattgaagaaatcattgacgttttaagaaaagcttgtaaggacactaccccaaagaaatgaactctttacgaatgtatagcttgtttcaagaagaggtgagaagatgtggaagatgaatcctgcagtggctgygaaaaccactgtgcccagatcagctgcagttacgacgagagctatcagtggaaattttaaacaggagggatcacgatcctgacgcatccctctgacaaattgtaagcggcagttggaacatggcttcaccaatatgatcgccaaggcaaagcatcatgaaagcgatggctaccaagaggtggcagtggtccagtcaaaggaaaaggaggccagtcaggagcccacatcatggcatcagtgttttgggacactcaaagcattttgcttgttgactttctgaaagccaaacatctgcttattaggagagtgttctgagaagcttagataaagctttggtagacacatgctgggagagtctcaatagatctgtgttccccacatcaatgctgtgctcattcctctcatcaaacaagggcaattttgtca

SEQ ID NO: 108436 - DNA, 608 bp, Homo sapiens
atgaattccacgaaaattgcagcaagaggaaacatcaaatttatggtgaagcttgggtggaagattgaagaaatcattgacgttttaagaaaagcttgtaaggacactaccccaaagaaatgaactctttacgaatgtatagcttgtttcaagaagaggtgagaagatgtggaagatgaatcctgcagtggctgcgaaaaccactgtgcccagatcagctgcagttacgacgagagctatcagtggaaattttaaacaggagggatcacgatcctgacgcatccctctgacaaattgtaagcggcagttggaacatggcttcaccaatatgatcgccawggcaaagcatcatgaaagcgatggctaccaagaggtggcagtggtccagtcaaaggaaaaggaggccagtcaggagcccacatcatggcatcagtgttttgggacactcaaagcattttgcttgttgactttctgaaagccaaacatctgcttattaggagagtgttctgagaagcttagataaagctttggtagacacatgctgggagagtctcaatagatctgtgttccccacatcaatgctgtgctcattcctctcatcaaacaag

SEQ ID NO: 108437 - DNA, 551 bp, Homo sapiens
atgactagtgaatgggtgcagcacaccaacatggcacgtgcttacatacgtaataaacctgcacgttgtgcacatgtaccctagtaattaaagtataatttaaaaaaaaatggaaaacgaaagtgtgatcctaatgtcatggtgcggactgaatgaagcagcacatggcaagccttaaaacgatcgcacatagtaggtgttcaattaatgttaactatatttcttttctataatagtttataaagggaattcatgaacactatgtgattaatccttggaacaacccaacaggtaggtaaataaagcctaattttatacctaaagaaaccatgcggcttaacttgcccaaaataataatgattgtaatgagcactggctgttggtttcttatgtacttggtactttgcacgtattaacscagtcagtcctcctaacagttgtgagagagatagcattcttatccccattttacagatgaggaacctgaagcccaggtgataagtagtttatccaaggtatcatagctagaagtcgggtgcaggcagtctggc

SEQ ID NO: 108438 - DNA, 551 bp, Homo sapiens
atgactagtgaatgggtgcagcacaccaacatggcacgtgcttacatacgtaataaacctgcacgttgtgcacatgtaccctagtaattaaagtataatttaaaaaaaaatggaaaacgaaagtgtgatcctaatgtcatggtgcggactgaatgaagcagcacatggcaagccttaaaacgatcgcacatagtaggtgttcaattaatgttaactatatttcttttctataatagtttataaagggaattcatgaacactatgtgattaatccttggaacaacccaacaggtaggtaaataaagcctaattttatacctaaagaaaccatgcggcttaacttgcccaaaataataatgattgtaatgagcactggctgttggtttcttatgtacttggtactttgcacgtattaacgcagtcagtcctcctaayagttgtgagagagatagcattcttatccccattttacagatgaggaacctgaagcccaggtgataagtagtttatccaaggtatcatagctagaagtcgggtgcaggcagtctggc

SEQ ID NO: 108439 - DNA, 542 bp, Homo sapiens
atgactagtgaatgggtgcagcacaccaacatggcacgtgcttacatacgtaataaacctgcacgttgtgcacatgtaccctagtaattaaagtataattttaaaaaaaatggaaaacgaaagtgtgatcctaatgtcatggtgcggactgaatgaagcagcacatggcaagccttaaaacgatcgcacatagtaggtgttcaattaatgttaactatatttcttttctatamtagtttataaagggaattcatgaacactatgtgattaatccttggaacaacccaacaggtaggtaaataaagcctaattttatacctaaagaaaccatgcggcttaacttgcccaaaataataatgattgtaatgagcactggctgttggtttcttatgtacttggtactttgcacgtattaacccagtcagtcctcctaacagttgtgagagagatagcattcttatccccattttacagatgaggaacctgaagcccaggtgataagtagtttatccaaggtatcatagctagaagtcgggtgcagg

SEQ ID NO: 108440 - DNA, 607 bp, Homo sapiens
  misc_feature (1)...(607): n = A,T,C or G
tgtacatcactaagtggctggctaataaattatagtacgttcatccttacggaagaatactttgcagctaaaacagaacgaaagagaggaaactcttcaaaatgttaactgggaatgacgttcaagacttattgttaaataaaacaaattgagaagaagagtcgtttattggtactaaatttgtgtcagtaaaaatggattctatacgtgggatggtttataagtatgtggaaaaattctttgatggtttttccttgaaaaagtgaaacctaaatccactccgtttggatgtgggackatttacggttgttgcttcctaaacataaactacgtttaggctgatatttcagacatgaaccnttttgagtgcccgtagcgggatgatctcggttggtgagtgcagggaaggaggatgtaattccatcatatatactctctgtgcctaccgcatttggaaccatgcgagtgatacctatttataaaataaaataaaccaagcacaactacgaacttagcaacactatattgagttaatagaacggtatcttgtatttcttctgtccaggtatacttataaatgcctgcagggatttcaccacctcagggt

SEQ ID NO: 108441 - DNA, 607 bp, Homo sapiens
  misc_feature (1)...(607): n = A,T,C or G
tgtacatcactaagtggctggctaataaattatagtacgttcatccttacggaagaatactttgcagctaaaacagaacgaaagagaggaaactcttcaaaatgttaactgggaatgacgttcaagacttattgttaaataaaacaaattgagaagaagagtcgtttattggtactaaatttgtgtcagtaaaaatggattctatacgtgggatggtttataagtatgtggaaaaattctttgatggtttttccttgaaaaagtgaaacctaaatccactccgtttggatgtgggacgatttacggttgttgcttcctaaacataaactacgtttaggctgatatttcagacatgaaccnttttgagtgcccgtagcgggatgatctcggttggtgagtgcagggaaggaggatgtaattccatcatatatactctctgtgcctaccgcatttggaaccatgcgagtgatacctatttataaaataaaataaaccaagcacaastacgaacttagcaacactatattgagttaatagaacggtatcttgtatttcttctgtccaggtatacttataaatgcctgcagggatttcaccacctcagggt

SEQ ID NO: 108442 - DNA, 607 bp, Homo sapiens
  misc_feature (1)...(607): n = A,T,C or G
tgtacatcactaagtggctggctaataaattatagtacgttcatccttacggaagaatactttgcagctaaaacagaacgaaagagaggaaactcttcaaaatgttaactgggaatgacgttcaagacttattgttaaataaaacaaattgagaagaagagtcgtttattggtactaaatttgtgtcagtaaaaatggattctatacgtgggatggtttataagtatgtggaaaaattctttgatggtttttccttgaaaaagtgaaacctaaatccactccgtttggatgtgggacgatttacggttgttgcttcctaaacataaactacgtttaggctgatatttcagacatgaaccnttttgagtgcccgtagcgggatgatctcggttggtgagtgcagggaaggaggatgtaattccatcatatatactctctgtgcctaccgcatttggaaccatgcgagtgatacctatttataaaataaaataaaccaagcacaactacgaacttagcaacactatattgagttaatagaacggtatcttgtatttctkctgtccaggtatacttataaatgcctgcagggatttcaccacctcagggt

SEQ ID NO: 108443 - DNA, 589 bp, Homo sapiens
gaattcctaaggactgcccattgaaactgacaaaattgcccttgtttgatgagaggaatgagcagagcattgatgtggtgaacaaggatctagtgagactttcccagcatgtttctaccaaagctttatctaagcttctcagaacactctcctaataagcagatgtttggcctttcagaaagtcaacaagcaaaatgccttgagtgtcccaaaacactgatgcyatgatgtgggctcctgactggcctccttttcctttgactggaccactgccacctcttggtagccatcgctttcatgatgctttgccttggcgatcatattggtgaagccatgttccaactgccgcttacaatttgtcagagggatgcgtcaggatcgtgatccctcctgtttaaaatttccactgatagctctcgtcgtaactgcagctgatctgggcacagtggttttcgcagccactgcaggattcatcttccacatcttctcacctcttcttgaaacaagctatacattcgtaaagagttcatttctttggggtagtgtccttacaagcttttcttaaaacgtcaatgatgtcttcaatctt

SEQ ID NO: 108444 - DNA, 590 bp, Homo sapiens
cagctacatcataccaataatttacactgtttacaaaccaaaaacaaaacccaaaaaaatccccaaaccatttttacagcactacagcaagtcatgtgtggtggccaggctccaatgcaggcccaaggatcccttctggcttcaagccatcctgtagcttcctgctacattgcacgatgattgggttggtctatgtgatgtacaacacaacacaagtgaaagtttatcacttctgaggctaggttataagtgatatctgctatgctccctcttgactccgttactttggaagaagtcagctgctatgtcatraggacataccatcttaatggaaaagcccaaacaatgagaaacagggcctctcatcaccaagagccatgtgaatgagtcatctgagcaacaaaatatttagcccccattaagccttgaatatgaccttagaaagcagaaccaccaaactactctactctgagaaactgtgtgagaatataaaacttcatgttttaagctgctagttttagactaaatttgttatacagtgatggataactaataaatcaagcctccccccatcccatattcatataatt

SEQ ID NO: 108445 - DNA, 602 bp, Homo sapiens
gacacgttgaaaccatagcagcagacctccattttcccaagtatgaaatatgtgtagcccaaagcatgcctttagacatttaatctgggccaagtctagttgcctctggtgggacaatactcggtgtatgcttccaaactcagagccaaggttctgcctttcgtgggggccctgggaacagaggttgaatgcaggaaaataatgaatgtgctttttaggacagaaacattagtccaagtgcaatccattaggcagtatccaggaatgatgccacagttgagaattacatagtacaaagggaccaggaagagagagagattgagttggggacacagaatggagtaggcagcttcagaaggacaggtgraagaaccacctagaatttctttaggttctccatcctatcaagggtcatagtcttagccagtgtgggaagaaagttggtagggacactgaattacttcattctctttttttggtctttccactgggtctctgtgaatccaagtgattttactgtatacacttttagacttgtccataaaataagtcacctttttgttttaaaaaaggatgttttttgatagattttagtcacagat

SEQ ID NO: 108446 - DNA, 452 bp, Homo sapiens
ggagcctggtgggagatgactggatcatgggggcagcttctcatgaatggtttagcactatccccttgatgttgtcctcttgacagtgagtgagttctcacaagatctggtcacttaagtgtgtggcacctccctctctctcctcctcttgccatgtgcctsttgcccctttgccttccgccatgattgtaagcttccttaagtctccccagaagatgagcagatgccacactatgcttcctgtaaagcctgctgaaccaattacacttttttctttataaattacccaatctcaagtatttttttatagcaattcaagaatgacctaacacacagggtctcactaccttgtccacgctggacacaaactccagcctcaggtgattctcccactttggccccccatagtgctggcatcacaggcatgagccactacacccagcttctaaacc

SEQ ID NO: 108447 - DNA, 602 bp, Homo sapiens
gcatatataaatttgaacaatcttggtgagataagattcctctttttttcttctttttaaaaatagagatggggtcttgctgtgttgcccaggctggtctccaactcctaggctcaactgatcctcccatctcygcctctcaaagtgctaggattacaggtgtgaggcactgtgcccaggtgagaggtaagatttcttaaacagagcagaaaaacactaaggtaaaggggaaaatgacaaattggcacatattaagatgaaaaacttttgttcttcaaaaggtaccattaagatggtgaaaaagtaggccaggtacggttgctcatgcctgtaatcccagcactttgggaggccaagatgggcggatcacctgaggccaggagttcagaccagcctggccaacatggcaaaaccatgtcttgactaaaaatacaaaacaaaacaaaacaaaacaaaacaaacaaacaaaaaaaccgggcatggtggtgggcgcctgtaatcccggctacttgggaggctgaagcaggagaatcgcttgaacttgggaggcggcagcttcagtgagctgagatcatgccattgtactccagcctcggcgacag

SEQ ID NO: 108448 - DNA, 518 bp, Homo sapiens
gagcaagcctgagacagtgagtggttcgttgggaggtgatttcaggaagcagaatgatggagaggggagaatgaaacagggaaggaagaaaagctaatacaggagttgatgttgggttgagagctacctcaggggtcacccagggcactgtatatctgaggactctgaggaacagtgaacaatgcatctcagaattagttctctctcccactccctacaggggttgcggkggaggaagctggaacttctccacgtactcccatcttccccaggggcatgaacctcctttccctttacctataagagtagtgagcagtatacacaaagatccagcttttgaggagcttatagtcttgaggagaaagcaatacattagtaagcaacatagtatccaaaaccaatgcatgctctgagaagacagaacgaaggttgtgtgacaggagtgcttggggaactccttagatggggtggccaggatgagggatgagctgagaccccaatggcaaggagaagccagt

SEQ ID NO: 108449 - DNA, 518 bp, Homo sapiens
gtttctgtattgttgagttgttataatgagcatgtattattcatgtattttttcatcaagaaaagttttttaggggcctataaaagtgcctggcacaaagaggctcccaataaaaacattattatgtctgaaaggaaattcaraatttccatttgacttaataggaattcatcagctccggaagctgggtgaagaaaagaaacaagatagggcaacagctagaggagaattcaggtgagaggtttctactttcaaatgagaagggcttatacatcctaaagtaaggggtgggaacagaaggagggagaaggaattgggagctgggggaagagtggtcctaaagcctccctagatgaatttaattatttgggggaaggttactagtgaccaattgttgacatatatataagccccatttcatacatgccatgaataataggcctccctggggtaacaaaaatttaaagatcattctggaaaatgagacaggaattaaaagaactctatggcttgctttc

SEQ ID NO: 108450 - DNA, 518 bp, Homo sapiens
gtttctgtattgttgagttgttataatgagcatgtattattcatgtattttttcatcaagaaaagttttttaggggcctataaaagtgcctggcacaaagaggctcccaataaaaacattattatgtctgaaaggaaattcaaaatttccatttgacttaataggaattcatcagctccrgaagctgggtgaagaaaagaaacaagatagggcaacagctagaggagaattcaggtgagaggtttctactttcaaatgagaagggcttatacatcctaaagtaaggggtgggaacagaaggagggagaaggaattgggagctgggggaagagtggtcctaaagcctccctagatgaatttaattatttgggggaaggttactagtgaccaattgttgacatatatataagccccatttcatacatgccatgaataataggcctccctggggtaacaaaaatttaaagatcattctggaaaatgagacaggaattaaaagaactctatggcttgctttc

SEQ ID NO: 108451 - DNA, 520 bp, Homo sapiens
taattcaatatcataattacaataatgtgtaaaatactaagaaataaaaatagaatagattggccttgaaatggrcaaatacaagcctaaatcattttcataacttaatgttggaatttacttagcatttttaccgagagagtttcagaaaactgggtaagaaaactggataagaaaggataagaatgatttgtgtgggttgtatgtagaactgatttgggccacaatggtctgggagcctagacaatattagttgaactgaaaaaaaaaaaagtgaaagagaaaaaaataacttctaaaatttttggtttaacttttgtaataactcctcttcaccatccctcaaactaaagaaaaagtttgggggcagatgaagaaatacatgaactacatcactcagaaatgacgaaacaccgcagcatgctatattccttcattattttttctctaattatttactttttcctgcctcctgcatctacttctgtttcctttggttgttaaattgtggtgcatttgt

SEQ ID NO: 108452 - DNA, 520 bp, Homo sapiens
taattcaatatcataattacaataatgtgtaaaatactaagaaataaaaatagaatagattggccttgaaatggacaaatacaagcctaaatcattttcataacttaatgttggaatttacttagcatttttaccgagagagtttcagaaaactgggtaagaaaactggataagaaaggataagaatgatttgtgtgggttgtatgtagaactgatttgggccacaatggtctgggagcctagacaatattagttgaactgaaaaaaaaaaaagtgaaagagaaaaaaataacttctaaaatttttggtttaacttttgtaataactcctcttcaccatccctcaaactaaagaaaaagtttgggggcagatgaagaaatacatgaactacatcactcagaaatgacgaaacaccgcagcaygctatattccttcattattttttctctaattatttactttttcctgcctcctgcatctacttctgtttcctttggttgttaaattgtggtgcatttgt

SEQ ID NO: 108453 - DNA, 622 bp, Homo sapiens
gaactataacctgaacaaagaaagaaaaggcaacttaagaaagaaattatttcatgtgtctaatattgagaactagttttatttttccagcctgcagatattaagtcaatgtattattatacttattatgaatatgaaaactactgggatttagaaagcttgttttaaacaccaccagaattagtaatgaaagaaaggaggccagatgtcaaatatttattctcttatgtatgtatgtatatattttgccattcaactcaagttggattccaagactcagttctgactctggtagtttgttttctatttataagttgccaaagacataargaacacctatattagtccgttttcacacctctgtaaagaaatacctgagactgggtaatttgtacaaaaaagaggtctaattaactcacagttctgcatggctggataggccgcaggaaacttacaatcttggtgcaagctgaagcagaagcaggcgtcttcttcacaaggtggcaggagagagagtgctagtaggggaaatgccagatgctgatgaagccatcagatctgaaaactcactcactatcacaaaaacagcatggaggaaaccaactctataattcaattgcct

SEQ ID NO: 108454 - DNA, 622 bp, Homo sapiens
gaactataacctgaacaaagaaagaaaaggcaacttaagaaagaaattatttcatgtgtctaatattgagaactagttttatttttccagcctgcagatattaagtcaatgtattattatacttattatgaatatgaaaactactgggatttagaaagcttgttttaaacaccaccagaattagtaatgaaagaaaggaggccagatgtcaaatatttattctcttatgtatgtatgtatatattttgccattcaactcaagttggattccaagactcagttctgactctggtagtttgttttctatttataagttgccaaagacataaagaacacctatattagtccgttttcacacctctgtaaagaaatacctgagactgggtaatttgtacaaaaaagaggtctaattaactcacagttctgcatggctggataggccgcaggaaacttacaatcttggtgcaagstgaagcagaagcaggcgtcttcttcacaaggtggcaggagagagagtgctagtaggggaaatgccagatgctgatgaagccatcagatctgaaaactcactcactatcacaaaaacagcatggaggaaaccaactctataattcaattgcct

SEQ ID NO: 108455 - DNA, 426 bp, Homo sapiens
tttcatgcaaatattttccacagaacatttagataactcaatcaagcaatatagaaaagaataattcaccatgataaagtagggtttatcccagaagcataagattggtttaatattcaaaagttcatcaatataatkcatcatattaagaaattaaagaagaaaaaacacactgtcagatcaattgaaaaaaaaaatgggggaagctggctctcccgccgtaaggacactcaggcagtgttgtggagaggagtccatttggcagcaccaactcaccatccatgccatgcacatgccatcaatgtgaataagacacttcgaaactggatcttccaatcccagtcaaatcatcaaatgactgtagacccagccaacatttgactacaacctcctgtgagattaagagctaaaactgccctacaaaca

SEQ ID NO: 108456 - DNA, 566 bp, Homo sapiens
gaatcagcagaccacaatctgtccttccaagttcaatagataaagcccgatattgagtacttagggccaaaatttacatgatatgataaacagctacttatcaaataacaagccggaaacgtgcttgccctcaattacccatttttctttaaaaaaaaaaatcgttttttttccctctaagtaatctcaagtgtcaactaacttctacccttggctttgactgcaattttagtttacgtatggttttatttccacataccactccctgccacaaaaggacagtacagtgtacatgaaatggtggtctagataagctatctggatrttgggtaaagtataaaaaagacctaacattcacaatcgtgttatgttctggccagttactggggtttgggtttttttaatctttccatctatgatgactacacttgtaaacgtcaagaatgaccaggttccaatagtcatataggtgccccagtctttctctaaggaaaaagcagattcatagagaagagttatgcatagcctttgggtggtacttcagtaaagtaggtagaaattttaaa

SEQ ID NO: 108457 - DNA, 591 bp, Homo sapiens
atacacaacatgtagacgttgtttgtgacaataacatgcttctttttcttcaatggatacagaaagtaacagctttttatgactttcaatttcagtcttaccacttgcaaaactgtccccaaattctttttacatttaatgatgtaaaacaaaaagaattaaaaacagtgaaaaaaaaaactttacaggaatactgaaaaatataatacatacttsacttagttgtcagtatataagaataaggcattatgaaatgtgagctaatatgtaatactaagaattgtaattcagattcattcactgtatgtttgggcatacgtgtgtatatgtatgcaggcacgcatttattccgacttatcccacaaaggaggtaataaccaaaataaataaaacaatagttatataagtatacaataggatgtatatacacatactatactgtatataatatatcccatactgtgtacagtgcatattcactttgctacataaaatataacacatatatacacacatatacacattatatatataaatatatgtatacacattacatatgtgtatatatatgtttgcacacaaatattaaag

SEQ ID NO: 108458 - DNA, 541 bp, Homo sapiens
ccggccttgcattcagctcttttgaatatgtcatatccttcaattttcatatcaatcctataaggtcagtattaacatcaccgccatatttctgatgaggaaactgagacttgcagtgtgawagtagtaatttactctcccaaagtcacagctactgtggggcagagttggaattcaggcttaggcctctgtgatttcagaatatgagccctttaccactacatagtgataacaataacatagcaacaacttcagggtagagatattagtgtctagatatactattaaaatctccatgcatggctgaattccaaacacttcttggccataaacatgtgatatcttcttggctgtctgccaatgaacccttttttccatcagcactcactctccgtttggaggaaatcttatctttgccctaacaacacccagcacagctaagatatgtgcccatgactcacctacttaaactcttgcctaggccagacagggaggcttacacctgtaatcccagcactttgggaggccaaggcgggaggtt

SEQ ID NO: 108459 - DNA, 565 bp, Homo sapiens
catattcatatttctacccacattctatagctcattctttgtgtattctctaggaattttcaactctccccttttctttttgagccctcaccggaatcacctctataagtcacttaatgataacagcagccttttctagcatgcagctcaaaacccttccagcctctccactcattacctagtaacaaagctccttccacatcgttaggtgtttgttgcattagcacaccacttctcagtaccagtttctgttttagtcagtgcggaccgctawaactgagtaccatagactgggtggcttgaacaatatttacttctcacaattctggaggctggaactgggttccagattaggctgccacaatggtcaattcttggtgaagtctctcttcatggtttacaggtggtcgtgtttttgttgtatcctcacatggtcaagagagaaatcatctatcttgtgtttcttcatagaagggcaataaccccattcatgagggctctgcactatgatctaattatctctcaaaggctccccctcccacctcctaatgacattacactggag

SEQ ID NO: 108460 - DNA, 565 bp, Homo sapiens
catattcatatttctacccacattctatagctcattctttgtgtattctctaggaattttcaactctccccttttctttttgagccctcaccggaatcacctctataagtcacttaatgataacagcagccttttctagcatgcagctcaaaacccttccagcctctccactcattacctagtaacaaagctccttccacatcgttaggtgtttgttgcattagcacaccacttctcagtaccagtttctgttttagtcagtgcggaccgctataactgagtaccatagactgggtggcttgaacaatatttacttctcacaattctggaggctggaactgggttccagattaggctgccacaakggtcaattcttggtgaagtctctcttcatggtttacaggtggtcgtgtttttgttgtatcctcacatggtcaagagagaaatcatctatcttgtgtttcttcatagaagggcaataaccccattcatgagggctctgcactatgatctaattatctctcaaaggctccccctcccacctcctaatgacattacactggag

SEQ ID NO: 108461 - DNA, 594 bp, Homo sapiens
tatctcatggacgtcaatctatctactacttctcccttttggtttaagccaaaaggtagcatttagtagcaaagtacataatcgtgttgttgaatgcaaggctcacaagacatttattaaacacatgttatgtctcaggtgcatcacgtgtcttttctcacttaatctttaaaacaatattgagagaaagacattactaaaaaacatttcatacataagcaaacagactcagagaagttatatgacctgttcaagaacacacagcagtgccagaatctgaaactaggtctgcctgactgcaacattaatgctgtctttctactgttttactctgcctctaaatgaaaaaacaaaaaaaccccatacaggtataccttccaccttaggaagaggaaagggtagccaaaaccacttgctctatcaaaatgtacttggagggaaaaaaatgtaccttggtactgggtcaaagacagtcccccaggacaccaatataatttaatatggcacttcttatactgtaaaccattcctttttctttacttgatgcagaaatctcttttctctgygatagaactttctgctccaattgccatg

SEQ ID NO: 108462 - DNA, 652 bp, Homo sapiens
cactgcatctagcaaccatgtttatgacaaaaatacaaaggggtaaaagataacctctccttttctgtctcaacttagaacatcaggtatgacttagataaatggatgaagaaaagaggatgttacaaaaagagaaccatgtgaataaaggaagaragacaagaagaaatgtggcacactgtgaaacaatactagatcaattatgattggagtagagacttgctataggggagtaatggataaaaaaaggtcgtggaaagggagggagtcaggctctggtagaaatggcaggcatgaaggggaaggagcttgagtctgaagaagacttgaaggcttctgagcagaaaatgatatgagaaaacagtgctttagaaagctaaatctggcagcagggtgccagatggagagatgtggccaaccaattgctttatatgcccttgactcaaaggactttatttccttgtatctaaaagtaattgttttataataaaagaatacttttagaaagaaatatctggaaaaggtaggtacattaacctagcctaccacaccagtcaatttcattcagatgatcaagagagtctctagtgacacagctagatcaacttcacactagactgctgctgtgcatacaggagataatggctaacta

SEQ ID NO: 108463 - DNA, 652 bp, Homo sapiens
cactgcatctagcaaccatgtttatgacaaaaatacaaaggggtaaaagataacctctccttttctgtctcaacttagaacatcaggtatgacttagataaatggatgaagaaaagaggatgttacaaaaagagaaccatgtgaataaaggaagagagacaagaagaaatgtggcacactgtgaaacaatactagatcaattatgattggagtagagacttgctataggggagtaatggataaaaaaaggtcgtggaaagggagggagtcaggctctggtagaaatggcaggcatgaaggggaaggagcttgagtctgaagaagacttgaaggcttctgagcagaaaatgatatgagaaaacagtgctttagaaagctaaatctggcagcagggtgccagatggagagatgtggccaaccaattgctttmtatgcccttgactcaaaggactttatttccttgtatctaaaagtaattgttttataataaaagaatacttttagaaagaaatatctggaaaaggtaggtacattaacctagcctaccacaccagtcaatttcattcagatgatcaagagagtctctagtgacacagctagatcaacttcacactagactgctgctgtgcatacaggagataatggctaacta

SEQ ID NO: 108464 - DNA, 608 bp, Homo sapiens
caggcatgttggctcacgtttgtagtcccagcactttgggagcctgagacaggcagatcactggagcccaggagtttgagagcagcctgtgccaacatgacgaaaccctgcccctataaaaaatacaaaagcttgccaggcacagtggctcatgcctgcagttccaagtacttggggctgaggcaggagaattgcttaagcctgggaggacgagactgcagtgacctgtgatcacaccayggcactccagcataggtgaaagagtgagaccctatcttaaaataataacaataacaataataataataataataatataattcttgcttttttttttcagctgctactaaatatgaacctggatcctatatagcttctcctctaggatttacacacaaggaaaatctgaatcaagatccagttttggaagtaacaaaagagtatgcacagattttaagaagaaaatacatactctgaaagataaggcaattttatttgggctattcacatgatattttgtttcccattaaatatatgatgtgaacatttttactaaagggaaatattctatattatacatgtctgatgaaaatttatgtagtatttta

SEQ ID NO: 108465 - DNA, 556 bp, Homo sapiens
gaggactggccccctcttctcctgtcctcttcagcgccagcggcttccggctccccgaggacccctcccatcctcgtgtcctcatcgggcctggcacaggcatcsctcccttcctcagtttctggcagcagcggctccatgactcccagcaaaagggtgtggctggaggcttcccaggtgggagggtaccagaggccagcgcctgcctaggagcagaaccgtagccccacaaacggttcctggacctctctggagggaaggcctcccaagtttgtctccctgtgtggggcctatgtgggtgagaacggccgccttcctgtctccggcattggaaccggggctccctctctcgggagtggaggtaacgggaaagtccctgcttttgacctccgatgggctgagggaatcctgcatctgcactttcagttgtgtgactatgtatgagtgattggaatgccctgggcctcagtttcttcatctgtaaagtggggataatgctattaactagctaggatacttgtgggagtgaagtgagaattccagttcggctttgagc

SEQ ID NO: 108466 - DNA, 559 bp, Homo sapiens
tgtcctcttcagcgccagcggcttccggctccccgaggacccctcccatcctcgtgtcctcatcgggcctggcacaggcatcgctcccttcctcagtttctggcagcagcggctccatgactcccagcaaaagggtgtggctggaggcttcccaggtgggagggtaccagaggccagcgcctgcctaggagcagaaccgtagccccacaaacggttcctggacctctctggagggaaggcctcccaagtttgtctccctgtgtggggcctatgtgggtgagaacggccgccttcctgtctccggcattggaaccggggctccctctctcgggagtggaggtaacgggaaagtccctgcttttgacctccgatgggctgagggaatcctgcatctgcactttcagttgtgtgactatgtatgagtgattggaatgccctgggcctcagtttcttcatctgtaaagtggggataatgctrttaactagctaggatacttgtgggagtgaagtgagaattccagttcggctttgagccatagcgccctgctggccaacatgg

SEQ ID NO: 108467 - DNA, 581 bp, Homo sapiens
ttatagaaaacactagtcttacgtttgtaataaaaattaattgtagaatattttaagaaaatatgtttttctattttatagctatatactaatcagaactaggttaactagattcaactactcctttaatccaagggattcagagtagtccttagggaacctaaattaatgactagataaggcaaatttgtaattagtgtatcaactgcttatatggaattaagtctttccaaagtgctggaaggtgctttaaacggtttatcttaagtagaccaactgttcccaaatgtggctcatcctcagaatcatatgtggagctttttaatcagagatccctggacccaccatggagattctgattccctgggtcctgttcagctctggaatgtgcctgtttaaaaagctccccaggaaattccagtgatctgccaagtatgagaatcaatgctttakaaaaatattaacgaaacaatggaaactccaaccctatttgaactatcatagattgcaaataaaactgaggcatgtaaataacgtaaataaaaaacctcctgtttctctcccaccacattctcattccc

SEQ ID NO: 108468 - DNA, 507 bp, Homo sapiens
tctttttaccacaccatagtcaagaaaacctggtgcatattttccttgattccagcactgtgagtcagtggccacatctgtactttgacctctggtcactagctgcttgtacagtctctcactgctcctcttaagagtgcttcatacatggcctcaacgtctgtccccaatgttacctttgttctccatcttggcttcctgattcctctctcctaagttcgcttctgctcacagttccagcatgtcaaaagttagcaatataagccaatgtgtactggatatctattrtctgccaagaatgtcctaaagggtttctacacactatatacatgtccatatattatacaacagacttgcaaggtaagatatgatttgattctccacttttcaggtgagaacacagggctcagggaaattaacttactgtagatcacagagctagtcagggatggaaacaggaattctaactgaggtctgcataactccaagcttttttcactcacttta

SEQ ID NO: 108469 - DNA, 507 bp, Homo sapiens
tctttttaccacaccatagtcaagaaaacctggtgcatattttccttgattccagcactgtgagtcagtggccacatctgtactttgacctctggtcactagctgcttgtacagtctctcactgctcctcttaagagtgcttcatacatggcctcaacgtctgtccccaatgttacctttgttctccatcttggcttcctgattcctctctcctaagttcgcttctgctcacagttccagcatgtcaaaagttagcaatataagccaatgtgtactggatatctattgtctgccaagaatgtcctaaagggtttctacacactatatacatgtccatatattatacaacagacttgcaaggtaagatatgatttgattctccacttttcaggtgagaacacagggctcagggaaattaacttactgtagatcacagagctaktcagggatggaaacaggaattctaactgaggtctgcataactccaagcttttttcactcacttta

SEQ ID NO: 108470 - DNA, 567 bp, Homo sapiens
taccctttgaacctcagtttccatacctgtgactcaaggaatgagaacatctgtcctgcacatgtgtctcttataaggggggatgatgataagctgataatgttagtgagaatgacaatagcaaaacatatcastgtggctgttgtccacggagcactgactatggagccaggtgctttcaagaacatgcaaagcttaaatcagccacgccaaatgcttagaacatatcccaggcatagaaggagtgccctgaaactgtttgcaattgtcagtgtttttacaccaggtgacaatagttggggagacttgtggaagcccaatcagtgggaaaatctcatggtcaagtgtgctgggcactccactgtcaactgggaattattttcttctgtggccttccttttattccctccagagcatttccaaggagcagccagcatctgtgacttgcctagggacttagtgagtccagccagcccagagtccaggccctgctgcccagccaactcctggctgcccaaaagcaccaggctgttctgtaagtggagggcaactgcacctgtcccgcac

SEQ ID NO: 108471 - DNA, 591 bp, Homo sapiens
cttggcatccattgaagactcctgcatgtattaactaccacaataatggttgccaaataatgattatctgtttccatcattccttctacatatattagttagtattgtgcagtagaagagttttccatctgtcccattgatttattcatttattgatatcagtttgggtctattttattcaatgggttgtgatccaattcactcatttattttgatgctcaatttgtccccaaaattgtccctgatttgggacaatttttgtcctgcgtgtcccttaggcgtgggaggctcccatgtccttcgcacttcttgcctccattcttaagcactttcatgctttctggcctacgaagatactccgggctcgtcttattctttccctgtcccagcccaagaatcagtcattttttttcaagatgtactgatcattttagtggcaaaaggtatttagaaactaagttacaggtgctctatatgctcactgctagtgagtattcattatttctaagtcttcwcagtgaaggaagctaggaaataaagaaatacacgcccaaacacaaatttataactatttctgtatctgtgtatgta

SEQ ID NO: 108472 - DNA, 577 bp, Homo sapiens
tttgtttcatcttgttttatctattataaaatctacttctgtagacatgagactgtgaacttttctgtattgtttactttctgctttggtagayacatttgctcattgcacatacgtggtgatgcaagtttttcatctgataaaatcttcacttttcattgatttttgttctcaatttttattaatttattataatatataaactttgttttaattcgaattggttaatttggacaggaaaaaaagttcagtaaatataatttttagccttttctcaacctgccttcaccataagagtgccaggtgtctgagttcaaccctttctctgaaatagctttttcatttgtagtgagaattgataagtgttaattatcactgaaagtgagattaaagcagtgaaaagttccattaagaagaattaattactaggctggcatttaatggaaaggtcttaagcaaataataagatgccatcagcatcttattacatctcgctactgacatttgtagtttaagatcatgattatcaaattaatctggctttacagcagcttcctccctgtccccaggactgtgc

SEQ ID NO: 108473 - DNA, 571 bp, Homo sapiens
ccaagaaacaatgggagaaaggaagaaaaagaaagaaggagggaaggaaggaaggaaggaagagagagagagaggaaggaaagaaagaaagaaagaaagaaagaaagaaagaaagaaaagaaaagaaaagaaaagaaaagaaaagaaaagaaaagaaaagaaaasaaaagaaaagaaggcatggtaagatagggagggacaaagagaaattccacaaatgcaccttttggcactggaagaatagtatagccctgcaattaatttgaatcctgtctatgtagtgatgattttcatcctgagtatccaatttaataaacatgcacatgctcctttgtctacaaaatagtggggattataattattatctaccttctaggattattatgtggattaaattagctaaggcatgcaaaatgcttggcacacactgagctgatcctgttatttgggaacacatcatgggcaatgatcatatatgagattcgagagacaattgggctcagcttgagaatagctttacaaattacaccaaggaattacatggtcagttgtgggtagccaatggaggtta

SEQ ID NO: 108474 - DNA, 520 bp, Homo sapiens
ttttagtgagcctctccttttaggytatgatcatcacaagtactccttgggtttcccccactgtcttaggcaagatgggaaggctaaagagatttggatctgggccattccccacatggaaagctagcagcagctggacttgagtatttctcttcatccaggtctgtcaatctgtgttagaactacagtggattaagctctttaagggttatcctaaggctctggtcaaacaatttgccttgagggaagacttggttaaaaataagagaatactcagagcgtattttaaatggttaatccccccgccttcccccttctggaagcataagagcttctgtttttgttatattctgtttgagaatcatgtaggggtccttgagctaaaactcccaaaatttaagagttgtcctaagattggatttttctggagtttttaactccccaactttttcgccctgaaccttcagaaatttatcaattacagtttaggttttcctgccctagtgctgcatcccacaaa

SEQ ID NO: 108475 - DNA, 520 bp, Homo sapiens
ttttagtgagcctctccttttaggctatgatcatcamaagtactccttgggtttcccccactgtcttaggcaagatgggaaggctaaagagatttggatctgggccattccccacatggaaagctagcagcagctggacttgagtatttctcttcatccaggtctgtcaatctgtgttagaactacagtggattaagctctttaagggttatcctaaggctctggtcaaacaatttgccttgagggaagacttggttaaaaataagagaatactcagagcgtattttaaatggttaatccccccgccttcccccttctggaagcataagagcttctgtttttgttatattctgtttgagaatcatgtaggggtccttgagctaaaactcccaaaatttaagagttgtcctaagattggatttttctggagtttttaactccccaactttttcgccctgaaccttcagaaatttatcaattacagtttaggttttcctgccctagtgctgcatcccacaaa

SEQ ID NO: 108476 - DNA, 550 bp, Homo sapiens
agtattcaccacaacaacaaaattcagcctatctactccttaactaacctagttcttacaaatccatctatttgcataaaaagcagttttgctgccctacaatcaacaactatcacttttaatgattcttgtttttctgagcaagtcatgcttgcttttctcacttattggtgtgaaacaagaccacttcccaraattggctggtttggattttagtgctatgccttctcctggctgtccctagcattttattaggaagccataatttttatatttgaaatacaggcaatatttgtacttgaactgtgaaaaaacacccgaggaaagcaggcaaaacaaaaggtcacatcattagttgggtgattagaatacacggttccagggaagcaagtatacagtcctttaaaccaacatgtgaaacagtgaagtattcttcaataaatcaattcattaaatttcaaaaaatgtctaaattagatttcaaaaaatgtctaaacaggccctgtaataagttcattttaaattctcagcaaatgatcaaagccattga

SEQ ID NO: 108477 - DNA, 550 bp, Homo sapiens
agtattcaccacaacaacaaaattcagcctatctactccttaactaacctagttcttacaaatccatctatttgcataaaaagcagttttgctgccctacaatcaacaactatcacttttaatgattcttgtttttctgagcaagtcatgcttgcttttctcacttattggtgtgaaacaagaccacttcccaaaattggctggtttggattttagtgctatgccttctcckggctgtccctagcattttattaggaagccataatttttatatttgaaatacaggcaatatttgtacttgaactgtgaaaaaacacccgaggaaagcaggcaaaacaaaaggtcacatcattagttgggtgattagaatacacggttccagggaagcaagtatacagtcctttaaaccaacatgtgaaacagtgaagtattcttcaataaatcaattcattaaatttcaaaaaatgtctaaattagatttcaaaaaatgtctaaacaggccctgtaataagttcattttaaattctcagcaaatgatcaaagccattga

SEQ ID NO: 108478 - DNA, 522 bp, Homo sapiens
gattcacgtcatggtgtcctgtattactcagctcatcctcccatctcaccaatcagctgttttcacagtgagtccatggaagtcaggggtcaaagcagcactttaacgaatgcccacaatttcctgaacagagttttcaagtaaagccaataacgtaaggaaagcgctacccacttccatcaattcatttctgcccctgcttcctgaaaggatcccmctgagtgattgtgcaccagctccccgaaccctttcagctaattggcccaaaaaaaaagaggttcgggagtggaattcgtgtgacgtggcccagtcttggctttcgccgttactagcagttatttcctgcatcgaaaggggaagctgaaaggatatttatgttggcgacaaaaggcctcagactagtgataggtaaaagtaaattggggtgaaagtgaggatcatcaggagagttactgtaagggacgtgcccccatcccagagcagaacacatgccaagatcccttcacttgtggatcagtctaa

SEQ ID NO: 108479 - DNA, 522 bp, Homo sapiens
gattcacgtcatggtgtcctgtattactcagctcatcctcccatctcaccaatcagctgttttcacagtgagtccatggaagtcaggggtcaaagcagcactttaacgaatgcccacaatttcctgaacagagttttcaagtaaagccaataacgtaaggaaagcgctacccacttccatcaattcatttctgcccctgcttcctgaaaggatccccmtgagtgattgtgcaccagctccccgaaccctttcagctaattggcccaaaaaaaaagaggttcgggagtggaattcgtgtgacgtggcccagtcttggctttcgccgttactagcagttatttcctgcatcgaaaggggaagctgaaaggatatttatgttggcgacaaaaggcctcagactagtgataggtaaaagtaaattggggtgaaagtgaggatcatcaggagagttactgtaagggacgtgcccccatcccagagcagaacacatgccaagatcccttcacttgtggatcagtctaa

SEQ ID NO: 108480 - DNA, 522 bp, Homo sapiens
gattcacgtcatggtgtcctgtattactcagctcatcctcccatctcaccaatcagctgttttcacagtgagtccatggaagtcaggggtcaaagcagcactttaacgaatgcccacaatttcctgaacagagttttcaagtaaagccaataacgtaaggaaagcgctacccacttccatcaattcatttctgcccctgcttcctgaaaggatccccctgagtgattgtgcaccagctccccgaaccctttcagctaattggcccaaaaaaaaagaggttcgggagtggaattcgtgtgacgtggcccagtcttggctttcgccgttactagcagttatttcctgcatcgaaaggggaagctgaaaggatatttatgttggcgacaaaaggcctcagactagtgataggtaaaagtaaattggggtgaaagtgaggatcatcaggagagttactgtaagggacgtgcccccatcccagagcagaacacrtgccaagatcccttcacttgtggatcagtctaa

SEQ ID NO: 108481 - DNA, 607 bp, Homo sapiens
catgtagactgaaagtaaagggatggaaaagatattctttgcaacagaaaccaagaaagactagatatagctacacttacatcagatgaaacagacttcaagtcaatggctataaaaagacacaaagtcactatgaaattataaatacaycaatttacaaagaggatataacaattgtaaatataaatgtacccaatcccaaagcacttcaatatataaagtaaacattaataaatctaaagggagagatagacttcaatataataatagtagaggacttcaacaccccattctcaataatggacagatcatccaaacagaaaatcaacaaagaaacatcagttaaactacactctagaccaaatggacctaactgacatttacacaacatttcatctgactgctgtagaatagacaatcttctcatcaacatatggcacattttccaggacagaccatacatcagaccacaaaacaagtctgaacaaattcacaaaagtagaaatcatatcaagtatcttttctgactatagtgaaataaactagaaatcaagaactaaagaaatttggaaactacacaaatacatgaaaattaaacaacatggtc

SEQ ID NO: 108482 - DNA, 597 bp, Homo sapiens
ggctggttcctgcttctctgcctcctgccaagtcactggacacatgtgttagtgtgcgcttgtcatgttccaggtactcagtgtgaagcaggtttactatgtgctggttaccaamttttttgagtttggtgagatagaacaaacccacacacaaattacacaaagcaggtgtttacttacagataggctgcaagggacaatagaagcctaggatttgttgtgagctgctcctcacaggctcaggaaagctgcccacggtgggtggaatctcatctgtgcaggcctcactagaactgctgctgagggaccctggaaagctgcttggagtaacaggacttgctgagccccagcagtgaaggacatcctgtttttggaggagctggaacagagctggctgttctggccagtccctctggatctcaggatgttgtattctcagcacattctacagttattcttgagaactacaaattagaaagcaaggaggacaggttggtccaagaacacccagagaactgtcctgccctgagccttctgctggggatagacctgggactgagacagatccaggccctgcagctgtggaaatgatagtcc

SEQ ID NO: 108483 - DNA, 608 bp, Homo sapiens
ctcaaagtcttgggctttttgaactacagcaatttggaatcttagcttgctcaaaggagtgaacactttctgataatgatcatctccaatattcattaagtacaaattgtgccagacactgtgcccactgctttgaacacatgtcatttagtccccatgacaactctgggaagtagaaacttttagtttgcccgactttccagaagaaaaaawctgaagttcggcatgtcatgctatggtctgaaaatatctcccaaaattcatgtattggaaactttatccccaatgcaacagtgctgggaggcagggccttggaggaggctattaggtcagactaaggctactataaaatggcttggtggaaggaagctggcccttttttgcccttctgccttccgccatatgaatacagtattaatcccctctggaggatgcagctttcaaagctccattatggaagcagaaacagaccctcaccagacaaacctgccaatgcctccatcgtggacttcccagcctccagaactgtgagaaataaatttctgttctttataaatgacccagtctgtggaattttgctatagcagcacaaatggactgagacagga

SEQ ID NO: 108484 - DNA, 608 bp, Homo sapiens
ctcaaagtcttgggctttttgaactacagcaatttggaatcttagcttgctcaaaggagtgaacactttctgataatgatcatctccaatattcattaagtacaaattgtgccagacactgtgcccactgctttgaacacatgtcatttagtccccatgacaactctgggaagtagaaacttttagtttgcccgactttccagaagaaaaaaactgaagttcggcatgtcatgctatggtctgaaaatatctcccaaaattcatgtattggaaactttatccccaatgcaacagtgctgggaggcagggccttggaggaggcwattaggtcagactaaggctactataaaatggcttggtggaaggaagctggcccttttttgcccttctgccttccgccatatgaatacagtattaatcccctctggaggatgcagctttcaaagctccattatggaagcagaaacagaccctcaccagacaaacctgccaatgcctccatcgtggacttcccagcctccagaactgtgagaaataaatttctgttctttataaatgacccagtctgtggaattttgctatagcagcacaaatggactgagacagga

SEQ ID NO: 108485 - DNA, 608 bp, Homo sapiens
ctcaaagtcttgggctttttgaactacagcaatttggaatcttagcttgctcaaaggagtgaacactttctgataatgatcatctccaatattcattaagtacaaattgtgccagacactgtgcccactgctttgaacacatgtcatttagtccccatgacaactctgggaagtagaaacttttagtttgcccgactttccagaagaaaaaaactgaagttcggcatgtcatgctatggtctgaaaatatctcccaaaattcatgtattggaaactttatccccaatgcaacagtgctgggaggcagggccttggaggaggctattaggtcagactaaggctactataaaatggcttggtggaaggaagctggcccttttttgcccttctgccttcygccatatgaatacagtattaatcccctctggaggatgcagctttcaaagctccattatggaagcagaaacagaccctcaccagacaaacctgccaatgcctccatcgtggacttcccagcctccagaactgtgagaaataaatttctgttctttataaatgacccagtctgtggaattttgctatagcagcacaaatggactgagacagga

SEQ ID NO: 108486 - DNA, 608 bp, Homo sapiens
ctcaaagtcttgggctttttgaactacagcaatttggaatcttagcttgctcaaaggagtgaacactttctgataatgatcatctccaatattcattaagtacaaattgtgccagacactgtgcccactgctttgaacacatgtcatttagtccccatgacaactctgggaagtagaaacttttagtttgcccgactttccagaagaaaaaaactgaagttcggcatgtcatgctatggtctgaaaatatctcccaaaattcatgtattggaaactttatccccaatgcaacagtgctgggaggcagggccttggaggaggctattaggtcagactaaggctactataaaatggcttggtggaaggaagctggcccttttttgcccttctgccttccgccatatgaatacagtattaatcccctctggaggatgcagctttcaaagctccattatggaagcagaaacagaccctcaccagacaaacctgccaatgcctccatcrtggacttcccagcctccagaactgtgagaaataaatttctgttctttataaatgacccagtctgtggaattttgctatagcagcacaaatggactgagacagga

SEQ ID NO: 108487 - DNA, 516 bp, Homo sapiens
accaggaaggccatcccatgatatgccccacctgtggtaggatgggtatcctttctccaggtcagagacagcagcttggcatactgcgtggctcaccaagcatgaaacagcagtcattctgagagagaagaggcaggcccacacccatggcacagagccagacatcaactgtgggagaggaatgatgcctggacattgggggaaaacagtttatrgatgccatggagactaagacacagtaagaaaaatgaaaacttcctggtagttggcagtggggttagtataacaataaatgtttagtgtcacaagattggggcactccaaatgctaaccaccacctccactgacactcttatcagccacctacaccatcccaagtacgcttgggcacacaattccccttgtccctccctcacactgtctgtgggacaaggagcttcactggtcttttcaaagtctttttctgactctaatgtctatacatcagagtgaggtcttctgtggcttcaaaactgg

SEQ ID NO: 108488 - DNA, 565 bp, Homo sapiens
aaaacaccaaaagcaatggcaacaaaagccacaattgacaaatggaatctaattatactaaggcgcttgctgcacagccaaagaaactaccatcagagtgaacaggcaacctacaaaatgggagaaaatttttgcaatctactcatctgacaaagggctaatatgcagaatctacaaagagctcaaacaaatttacaagaaagaaacaactccatcaacaagtgtcctgtagtttttttgttgttcktgtgttctttcatgtttttaatatcgtggagatactggatttgtacaatgatttagagaggtattcctacactttgattttttggaatagcctcagtaggatgacaccagatcttttctgtacatctggcaaaacctgactgtgaatctgtctgttcctgttcttttgtttgttggaagatttgtattactgattagattagtgattagatctctttgttggaagatttgtattactgactagatttttttttttacttgtttgtggtctgttcaggttttctatttcttgctagttcaatcttgagaagttgtatgt

SEQ ID NO: 108489 - DNA, 565 bp, Homo sapiens
aaaacaccaaaagcaatggcaacaaaagccacaattgacaaatggaatctaattatactaaggcgcttgctgcacagccaaagaaactaccatcagagtgaacaggcaacctacaaaatgggagaaaatttttgcaatctactcatctgacaaagggctaatatgcagaatctacaaagagctcaaacaaatttacaagaaagaaacaactccatcaacaagtgtcctgtagtttttttgttgttcgtgtgttctttcatgtttttaatatcgtggagatactggatttgtacaatgatttagagaggtattcctmcactttgattttttggaatagcctcagtaggatgacaccagatcttttctgtacatctggcaaaacctgactgtgaatctgtctgttcctgttcttttgtttgttggaagatttgtattactgattagattagtgattagatctctttgttggaagatttgtattactgactagatttttttttttacttgtttgtggtctgttcaggttttctatttcttgctagttcaatcttgagaagttgtatgt

SEQ ID NO: 108490 - DNA, 608 bp, Homo sapiens
atcacagaaagcccttccgtcttcgacatcctaattcactccttctcacctgcaggggtcacctccttccagctttctaccagccagcctctgtcctaagggttaggctaggtgtcctttcttgtttttccataaaaatctgggctctactaactgggctacatctagaggtatagctgtggaaggacattacacttcagttgtctctcatctgtcagtcttatcattaagactgtgaatttctgtttcataaacgtggccacagcagattagaatacccagaaacgtttagagttagaaaacctaaggaagagagaaagggtaccagaagtatatctgtggccacctggttgaacccttttaacttcygtggactcgagagtcattgttagagacaccagggtaataagcaaagctgggtgccatccattttctgagggagtgaataactatgggaaaggtcagctgccagccaaggatggaatgctggaagagacccacatttggacatggaaagagaaacaacagagacagtcaccaatggagattctgaaatctgaaaaagctatcaaaatattatgaaataccaaatgtggtcacagtagcct

SEQ ID NO: 108491 - DNA, 608 bp, Homo sapiens
atcacagaaagcccttccgtcttcgacatcctaattcactccttctcacctgcaggggtcacctccttccagctttctaccagccagcctctgtcctaagggttaggctaggtgtcctttcttgtttttccataaaaatctgggctctactaactgggctacatctagaggtatagctgtggaaggacattacacttcagttgtctctcatctgtcagtcttatcattaagactgtgaatttctgtttcataaacgtggccacagcagattagaatacccagaaacgtttagagttagaaaacctaaggaagagagaaagggtaccagaagtatatctgtggccacctggttgaacccttttaacttccgtggactygagagtcattgttagagacaccagggtaataagcaaagctgggtgccatccattttctgagggagtgaataactatgggaaaggtcagctgccagccaaggatggaatgctggaagagacccacatttggacatggaaagagaaacaacagagacagtcaccaatggagattctgaaatctgaaaaagctatcaaaatattatgaaataccaaatgtggtcacagtagcct

SEQ ID NO: 108492 - DNA, 416 bp, Homo sapiens
gcactttaaaatggcagatcttaaatcatctttccagtttcttccataattgacatagtcaagttttctgcttcatcttgagtcragcttgagcatttgctaagatataatcaattttctttagctttaaatgtttgtggccatagagttacttataatgttctcataaaacaatttcagtctctcctgtatgcatggttttatccccttctcatttctactcttacataattttgttatctcttttctttaatcaggtttgcaaggagttcgttaattttattgactttttcaaagaagcgattttggatttatttgtcctttctacttgttttggtttgttttctattgatttatttttcctgttttcttaaggtttaaatgttattttctaatgttttaaaattgatgtagaa

SEQ ID NO: 108493 - DNA, 416 bp, Homo sapiens
gcactttaaaatggcagatcttaaatcatctttccagtttcttccataattgacatagtcaagttttctgcttcatcttgagtcaagcttgagcatttgctaagatataatcaattttctttagctttaaatgtttgtggccatagagttacttataatgttctcataaaacaatttcagtctctcctgtatgcatggttttatccccttctcatttctactcttacataattttgttatctcttttctttaatcaggtttgcaaggagttcrttaattttattgactttttcaaagaagcgattttggatttatttgtcctttctacttgttttggtttgttttctattgatttatttttcctgttttcttaaggtttaaatgttattttctaatgttttaaaattgatgtagaa

SEQ ID NO: 108494 - DNA, 584 bp, Homo sapiens
tgtcagtggctccaccttacaacctcagtgctgaggaacagaagggcactcaggagagcctgagccacttacttagaaagtatttaataacagcacactaagcttactgggctagatacccacctcagcacccagcttgataacaggaggaaacagctggaactggagactggagagaaggaagttcatacatttccaacttggtctgcatctctttagttccttgtattgcttattaatccagaggagaaaacagctagttaattaaaaattccaaaaaatctgaagttttagctwatagttacttccctggttcatcaatttaagataaggatctaaatactgtgttaaaatatagaaaaacggagactcttataaggtttttgacctctacacttgaaagtgagctcttacaagaaactaatcagtgtttcgttattccatatcagtggcttttactgtcaaagattgtgtaagctaaattatctggcaaaattttgctttccagaaatactatctatattaattttaacatttttattgtgaaatatagtttaaatacataaagcaattatatagtataa

SEQ ID NO: 108495 - DNA, 492 bp, Homo sapiens
cctccgacagaaacctgcatacttgcattactcgtacaaagagctaaaaagttacaaaatacaggcctccctaacaccttcccccctccgtgaataaagctagactccctcattgatagactcccaacactactggagaacatcagcaaaactccaggaggaagcgccggcatcctcccactttctccccctcaattccctctcccggggccactcacacttttagaraagagccgcggcgccgagaaagtgggttggttcccttcctccttcggactgaagcggcagctgcggaaggctccggcgcggtactgaggaagaagcggtgctcgtgtcgctaaaccaggcggcaacccgggtctcttccgcgctgccaggggaggggaggcggcggccccgcttacctcctcttttcctcttcctgggtcttttcaggctgcggcttctgcccgtccagggccacttctcccgggacagtcaggtttgggagac

SEQ ID NO: 108496 - DNA, 579 bp, Homo sapiens
ctgggcttgttgaggccgtggagtgtgacaagacataattcatagaggcttcaaacgtagcttgcrtgagtaggattcctctcatatgctgccaagatccacttcaagaagaacatatcacaggtgtcattggaccaatgagaacagaaaagcacttggagtggatccaaacaatgttggtgaggaagttcaggagatttaaaaaaatgaaggcaagtaagagaagaaatagggcctacagcccagtgaggtcttaattagtatttttaattctttcatttgaaggcataaatttgagtattattttctgttcccatgttaccttacattttatattaactaactaccccaacttctttctttcattccttcttgacttacttttctcattcatgggtccttgaaaattgaccaaaaaaaaaaaaaaatctgttttgagtttgtttttttctctgagggatttagttgtttttcttctgagaagaatcacattctctcctgaccatattgacaattatggtagtttctttccaaactttttttgatattttctttctgaaacccatatcaattttattt

SEQ ID NO: 108497 - DNA, 577 bp, Homo sapiens
ttgtgtttgtatatgttatccttcaaaagcaagttttagaaaaaaccatgtccatgtcccatagcacagaggcaagccttcacttagttatattcacctgtttatcaaacttctatttctactaaggtgcaaaaagtacaattagctgctacatctctgagaagaaagaattttgctgatgatctaacagaacttgtgagtcatccatcaggagatgttttaatggtgccaagaactcagtaaagtctgtgatggatttggcaaggtyatttgtcattttcacatcagcatggttttggcacctgcttctcagtaaagaattgcactgttggaaactcacttttgacaaagatggtctgcttctgaccaaatggtttatgctacagcagagaaggtgagtaaagctgtccctggccatattaataatcaatacaggtggctgattcagtaatttcatgattgacatgactcatggattttacagtttatgaagacagactatgccaagtaatattgtctggtcactttatcctagaggagtgcatcttgtagaaaggtgttcacattcagcttagac

SEQ ID NO: 108498 - DNA, 386 bp, Homo sapiens
gaattcttaataataaccaacttttaccacagacacgccagaataaagtatgcaacacacctttttgttttaaaactccatccttttgtgttttgctgttttccgtgccaagaatgccctttcctgcctttttcaggttaatgatactcatgctgtaaggctttgtttaaatgacaattaagttacatgttttttcatgcccaccaggcacagttgttcactccttctgtgctatttcatgtttgtgctgacttcttttattcatattataaccttgaagcataattacatattcacctgcattttcccccactacattgtgacagtgyttgggacagaatatgcttaaatcattaaatctagtaaatgaaaactgatacaggtaa

SEQ ID NO: 108499 - DNA, 582 bp, Homo sapiens
gtggtttttatttgttctttttgtgctcctctccctgaatggctgcatctctcaatcactccctgtctaatcttgcaatacagtcttgggaagagggtctggttacccacttcccaagagtacagcataaaccaattaattaacctttaatttaaatgatgcagcaggtgaaatttagcaaattagaacaattaatttattgcattagtgagtattaattgtaatgatatataatcatgcacctcaagatttcaaaattcttctattttaaaacacgaaagcagtgatagtttttttttttttaattagactgaagtttataccaaagtttyctagaccctatgtggtctaacaattagattttactctgctgggatataatgaatggtgtttcaactacttaagtacctacatatttttcttcttatttacacattacaattacaagccatgatctttattcacagtttattatgggtgagtgtcaataatactcattgatggaaggataatatgaagaaaacaaaacaaaatctttcatgatatttgaaagtcatgtaatgttatgcactttaccttctt

SEQ ID NO: 108500 - DNA, 577 bp, Homo sapiens
gagaaattcaagagtcagaagtatgtaggagtttaagggaaaaatcaagtagcaaaatctctgccactggactgggattcaagcacaggctccagtccttgggaagttaacaagttgggtaactatagggaaataccccaatcctagagtctgggaattaagccattttcaacgtagagactgaaggttacagaaacagtcaaaaaaatgaaagtccaattttaaaaactgggatataggatcaacaaaatctagagcaaattggaagctcaatctaaacagtcccrtgagtaagaacagaaacagtaagttgataatgtgttccatgatgttgggctctaatttcttaaaattttcctgctttatcagtaattttagaggattgtccagaaatgtgccacattggttttaaaattgttttagtcactgtagaggctaaaacttaggaatgaggtaggaccagatgcctgcttcttctaattcagacgattgcaaccttatcattgttccccttgcttccatcagagtcagtcacaacactgaggagaaacttagatggacttaagataaagataca

SEQ ID NO: 108501 - DNA, 577 bp, Homo sapiens
gagaaattcaagagtcagaagtatgtaggagtttaagggaaaaatcaagtagcaaaatctctgccactggactgggattcaagcacaggctccagtccttgggaagttaacaagttgggtaactatagggaaataccccaatcctagagtctgggaattaagccattttcaacgtagagactgaaggttacagaaacagtcaaaaaaatgaaagtccaattttaaaaactgggatataggatcaacaaaatctagagcaaattggaagctcaatctaaacagtcccgtgagtaagaacagaaacagtaagttgataatgtgttccatgatgttgggctctaatttcttaaaattttcctgctttatcagtaattttagaggattgtccagaaatgtgccacattggwtttaaaattgttttagtcactgtagaggctaaaacttaggaatgaggtaggaccagatgcctgcttcttctaattcagacgattgcaaccttatcattgttccccttgcttccatcagagtcagtcacaacactgaggagaaacttagatggacttaagataaagataca

SEQ ID NO: 108502 - DNA, 585 bp, Homo sapiens
atttggaaaaaatttattgaaaattataagtttttggcattaggcattgtaagaaaacattattagaggaagtaacaataattaatacagttgattaagactttgatatatgaaaatctgaactttgagcatgtactgatacagagattaataatattattcaactgggaaaatgatcaagataatmatcacaataataatgataaaacttatataatacatcaaacattgtggtaggcaatttatagacaatattttatgcagtcctcaaataaatatttaaggtataccgtattcccttttgcagaaatcaaggctacaatgggtgggtgacttgcccaccagtcactggtggtgctagtactaggaacacatttgcctaacaacaaagctagtgttcttatatcactaaacaaacaacaaaggcagggttttactgtagaatacaatgagctacaaaaaaatatgtcatcaaaactcagacaatgagagaaatgaacactgagagaatgagaaaaaagaccacatttttaacagtatctgcacaggtattttcagcatttacatagtaagaagaaattggaa

SEQ ID NO: 108503 - DNA, 588 bp, Homo sapiens
atcaccaaatttacccttttaaaggggtttacaaagtcaccacattttacaactatcaccattatctaattccagaacattttcagcatacccaaaagaaaccctgtatccattagctgtctcttcccaatgctcccttcccccagcacctggcaattactaatctactttgtgtctctatggatttatctatctgaatacttaatataaatgaaatcatacaatatgtggcctttggatctggctactttcacttagcatactgttttcaaggtttactcacattatagcatgtagcagtacttcattccgttttatggctggktttcaactgtgtagatataccacattttatcataatttccattttttggctattatgaataatgctgctatgaacatttgtgtacagatttttgtgtgaacatatgttttcaactgtcttgggtatatagctaggaatggaatcatagggtcatatggtaactctatgtctaccgttttgaaaggctaccaaactgtgttccaaagttactgcactgtttttacattctcaccagcaatgtataaagctttcaatttatctac

SEQ ID NO: 108504 - DNA, 588 bp, Homo sapiens
atcaccaaatttacccttttaaaggggtttacaaagtcaccacattttacaactatcaccattatctaattccagaacattttcagcatacccaaaagaaaccctgtatccattagctgtctcttcccaatgctcccttcccccagcacctggcaattactaatctactttgtgtctctatggatttatctatctgaatacttaatataaatgaaatcatacaatatgtggcctttggatctggctactttcacttagcatactgttttcaaggtttactcacattatagcatgtagcagtacttcattccgttttatggctgggtttcaactgtrtagatataccacattttatcataatttccattttttggctattatgaataatgctgctatgaacatttgtgtacagatttttgtgtgaacatatgttttcaactgtcttgggtatatagctaggaatggaatcatagggtcatatggtaactctatgtctaccgttttgaaaggctaccaaactgtgttccaaagttactgcactgtttttacattctcaccagcaatgtataaagctttcaatttatctac

SEQ ID NO: 108505 - DNA, 419 bp, Homo sapiens
agaaaataagagttatttgattttacctgtctcagttttcccaatatgtttataaatcatctttagataactagttagcaatgacatcttctaccttggagataccactttttctagaaacccttactgaactcagtaaatgccaggtcctatgatagagtcagaggataaaataaagaacaaagttcatttctccaaagagccagtgttctcactggggagasagcagagtgaaacaatgctgacgcagtgtgctatgtagagagttacacaaatggaaacacacacactcacactcttcaaagatgactgttaaaaatgcatacgaaaaatgtcttcatgttagaatcagtttaaagatgcaaatatgttacatatgtatatgtttgattttaataactattttactttaataaatg

SEQ ID NO: 108506 - DNA, 661 bp, Homo sapiens
  misc_feature (1)...(661): n = A,T,C or G
nnnnnnnnnncacacacacatatatagsatcatttgtgatgcatccaaatattaaagacacatttaaaatctcaatttatttccaaagataccagaaaagtgcagagctaaatttgcagccctattgtatgatgctgtaatatctgccctcctaatattttctgtcttatgtatacttcccctgcacccattatgtatttgcattgttcaatttcattacctatatttaaatgattttgtaaattatctctattctgatgtaatatgggagtttatatataaaagaggaaacataaaatgtttagtacaaaaaaatgcaaaaataaatgatttactgagttatctggaaagatttcttagatgttttgaaggtatatttgatagttaatgatgacgcttaggctatctgctttcactaaaaaatcaattgcttttgttacctagacacatgtatatcacaaagattattataagtatattagttttgattaggcttattttggcttacatgtatctcagagtgattcaaatgagcagatgattattctgatatcacagcacagtggttggcaaaaaagaatctgcagtgctgaacatgtgtgctgtgaagatggacgtactgggccaaaccagagagtgcaaaaggagaggaggagaacat

SEQ ID NO: 108507 - DNA, 661 bp, Homo sapiens
  misc_feature (1)...(661): n = A,T,C or G
nnnnnnnnnncacacacacatatataggatcatttgtgatgcatccaaatattaaagacacatttaaaatctcaatttatttccaaagataccagaaaagtgcagagctaaatttgcagccctattgtatgatgctgtaatatctgccctcctaatattttctgtcttatgtatacttcccctgcacccattatgtatttgcattgttcaatttcattacctatatttaaatgattttgtaaattatctctattctgatgtaatatgggagtttatatataaaagaggaaacataaaatgtttagtacaaaaaaatgcaaaaataaatgatttactgagttatctggaaagatttcttagatgktttgaaggtatatttgatagttaatgatgacgcttaggctatctgctttcactaaaaaatcaattgcttttgttacctagacacatgtatatcacaaagattattataagtatattagttttgattaggcttattttggcttacatgtatctcagagtgattcaaatgagcagatgattattctgatatcacagcacagtggttggcaaaaaagaatctgcagtgctgaacatgtgtgctgtgaagatggacgtactgggccaaaccagagagtgcaaaaggagaggaggagaacat

SEQ ID NO: 108508 - DNA, 535 bp, Homo sapiens
aagtccaaagtctcatctgagacaagataaatcccttctgcctatgagcctgtaaaataaaaaataagttagttggttccaagatatcatgagggtacaggcattgggtaaatgctccaattccaaatgggagaaattggccaaaacaaaggggatagaggccccacagaaatccaaaatccagcagggaagttattatattttaaagctgcaaaatactctcctttgactccatctctcaaatccaggmtgtactgatgcaaaagatgggcttccaagcattgaggagctccactcctttggctttgcaggttacagcccccatagctgctttcactggctagcattgagtacttgcagattttcaaggtgcatgatgcaagctgtcagtggacctaccattctgtggtctggaggatgttggccctcttctcacagcttcactaggcagtgccccaagagggactctgtgtgggagctccaactccacattttccctctatgctgtcctagtagggattctccatgagagctc

SEQ ID NO: 108509 - DNA, 535 bp, Homo sapiens
aagtccaaagtctcatctgagacaagataaatcccttctgcctatgagcctgtaaaataaaaaataagttagttggttccaagatatcatgagggtacaggcattgggtaaatgctccaattccaaatgggagaaattggccaaaacaaaggggatagaggccccacagaaatccaaaatccagcagggaagttattatattttaaagctgcaaaatactctcctttgactccatctctcaaatccaggctgtactgatgcaaaagatgggcttccaagcattgaggagctccactcctttggctytgcaggttacagcccccatagctgctttcactggctagcattgagtacttgcagattttcaaggtgcatgatgcaagctgtcagtggacctaccattctgtggtctggaggatgttggccctcttctcacagcttcactaggcagtgccccaagagggactctgtgtgggagctccaactccacattttccctctatgctgtcctagtagggattctccatgagagctc

SEQ ID NO: 108510 - DNA, 539 bp, Homo sapiens
gcaaacctttatccaaactaagaaaaaaaaacaggctgggcgtggtggctcatgcctgtaaccccagcactttgggaagctgaggcaggcagatcacctgaggttgggagttcgagaccagcctgaccaacatggagaaaccccgtctctactaaaaatacaaaattagttgggcgtggtggcacatgcctgtaatcccagctactcaggaggctgaggcaggagaatcgcttgaacccaggaggcggaggttgcagtgagctgagatcgcgccattgcactccagccttggcaacaagagtgaaattccgtytcaaacaaacaaacaaaacagagaagcctcaaatagagatgagaaagaacacattacatccaataccacagaaatttaatagatcattagaggctactttgagcaactatatgccaataaattggaataccatggaatggacaaattcctagatacatacaagctaccaagattgaaacatgaagaaatacggacctgcacagagcaataaggaataacaattgac

SEQ ID NO: 108511 - DNA, 404 bp, Homo sapiens
tccaaagttctaaataaaaatgcttgttgtcctgtttattgattgattatccatccactgtctgctatgagatgaaaacttagcacttacctgcccctcccaccccaatgcttccartctatccccatttctgttaaatcagttttcattgcttacattttcaacactgagcccaatatactgctaggctagtcccatttgctgtctcacgtaagttttttatacttgtttggaattaaaactgactgttccctttgcctcattttctatatagctatcccaaattcatcttgtcccacctaatgggacagcaaaatgcctctcaatgctgttttccacacaaacacatcaggtaatggactggttcgggcagtgtactcgtgccacctcctactggctgaaag

SEQ ID NO: 108512 - DNA, 425 bp, Homo sapiens
tttggtgcttgtattgagtggaactcatyagctcaccatctcctttatcccaaaccaactgctttactgaattccatatttcagataatgataataataactagtcacccattaacctagatttggaaaacttgtattcatttacttcatttcacttttctttttaatctcttcttgacaactttttgtgtatcagccagaaagataggctgattttttctgacatcttctttggagtcctatgtatacatacacctgcagttctctaactctgtaggcagctacattttccattgcagctgccaccagtttatttttatctccctcctaaatatttacagttgatattcttcccttttgttcctcctccctccagattaatctttctggagggtattgtaatgcctctcaggccaaaaaccttc

SEQ ID NO: 108513 - DNA, 574 bp, Homo sapiens
gttcaacagcagactagatcaagcagaagaaagaaccttgaaggtttctgaaatgactcagaagagaagaaaaagaaaaaagaatgaagagagcctatgggacaccactaagcaaacaaatattcacattgtaggaatcccaaagggggaagaaacagaaaagstttatataaataaaataattggtaaaaacttcctaaatcttgggacttaggaagagagagagatctacatacaagtcaatgaagctcaaagatctcagataaactttagaaggttctctccaaggtacattataatcaaactggcaaaagtgaaaagacaatgaaatagttttaaaaacagcaagagaaaactgtctagtcacatataaggggatgtccatcagagtatcattggacttttctgcagaaaccttacaagcctggagaatgggatgacatattcaaaatgatgaaagggaaaaaaaaaaaaaaaaacctgccggctaagaatactataccaaggaaaactatccttcaaaaatgaaggagaaataaagtcttccccagacaaataaaagttgaaggaattc

SEQ ID NO: 108514 - DNA, 630 bp, Homo sapiens
gtctctctctctctcaacttactcgctctgcttgtkctttgcactttggtagtaataagtgctcttatataaccttcaattccaccgttcaaggagtagattcttggctatatactgcctgagaaaaaaaagtctctcccattttgtcattgactcaaagttttttttccatatgaagctcttagccggcactctgaccttggtagcttggattctaatattttcagcccacatgtgtgggataaacctccatttatgccagctgtgctgcaaccctgctcatgatgtatcaccactttcctttcgctgatgccgaatctaagactcagacaaggtaaatagcttgcctgagattatatgtgaacaaattgtggagttggccatgtcccctataatatgctcgataaatttgattaactctttgccttatggtttctgtataatctcttccttctaattactcccccagtatttattcattgctctatttttttcagcacatatgtcctttttaattcttactcttatttttctgagttctgatttatacctaagcaatactcatactagggaagtaggagaaagagatttcacagagatggtggtgagtgtatatgtatataattgaac

SEQ ID NO: 108515 - DNA, 546 bp, Homo sapiens
gaagtggactccgtgacagtgagtgtgcagatgttttctcatgtcagttatccttgaacatctttgtgcagccttggcgagggccagctattgttcatggaacatcatcttttaaatttttcttggcttcattctggcgaattctgcagttttttgggatctgagctgtcaatgccaggtattcctccaaggaggaagtttctttcctgtcatatactctgaataatcaggaggtgagttctctccagtgatctgtttctcaaccactattttatggttaatgtctttttgttttcatccgagtaccacatggagacagataacttgccctccaggttcctgatctgcactcgcttctgcccccacttcttgttgcccaagatggtgccacatccacccttgccagcccccacgatggtgaccagggcctgctygaggtggtggtggtggtcgccgctggccagctctggcaccaggatgagtatctggttccccatccaagtcgtcgctacccaccacctcctggcatgcctgcaccaggatcac

SEQ ID NO: 108516 - DNA, 510 bp, Homo sapiens
gatagctaagcagatagatcaaaatagcctggtttgttacttcctcaggtagctagattatgtctggattccagattttgttgtctgaaaagtaagcttctcattgcttaagtctctcttataggtttctctcatatgtagccaagtacaattcatgatgatatagtaaataaaacacatgatgttgtcctcagcaaacctacagttttacaaaaattagaaataaattttattctcaagtgaatgtcaatttactgctagtgactgcctgtaatatactttgccatattgacaatgattctgaagcttctcctaagtctattggcaaaaagtgcagtgtttgatcagcaataagcagagcggtggaaggagtgatttatttgctatccttggtgggaaatatacctgtctatataagtgwctcctggctaaaattttgtaatagaacaatgtataaagttaatatgctaagcaaataatttaaaagcatgtagaaaataaaggtttggt

SEQ ID NO: 108517 - DNA, 490 bp, Homo sapiens
aattaaccgagctgaacatagacctaaacacccctaaggcagaaaatgacttttgctttgactctccaaactttcatatccctagtgactatgaacacatgccccaaagtcatcgcagctcaaatgcaaaacacatgagatattagaagcattttcaaacgttgatttccacttttctagagctgttattttacaacaacttggagtttgtcttggcaaaatttccaaagacctcaaaattctagctctatctcccattgctgactttaattctcctttacagtaaccacttttcctctctagcaaccatacwtttctgccttgagtcctttggctatactttttcctttacctggattaagatttctactggtaaagcactaaccaccttcaatatttagctcagatattgagctatcgtctttactgaagcttccatggtatcccctaatctgaattggcctgaatgattatagcaatttgttatgtt

SEQ ID NO: 108518 - DNA, 634 bp, Homo sapiens
atgacagcaatgttgtaagtactataagatgatgtgataccactgaggaggatgtgtctgattcttcttggagtgctcaggttggcctcccagaggagatcacacttgagttgcataatagaggaggccatgtacccaacacagaggaaatggcatttacaaaggccaagtggragcttcaggaagtaagacacctttggaaactgtgccacattgagcaaccctggagtgcaggagaccttatggtggcagtcacgagagcttaagctgggcaggaggagtccagggcaggaaggaacttacagtctgtggtgataaatttggactccatctaccagaaatgaatagattatataagccaatatgcattttagaaagaatgtggaggaaagatgtggaaagcagattgcaaggaagaaggctggaggtattactttattttacgctgcatttataaaaccaaaagcaactgattcttttccctgtcacaaaatgactttggaaagatcaatcttttatgttcagttccaactgaataaaaaatcaaagatgcaggatgggttgaaactctcttgtgattgttgacaatgccactgtaagaacccactccatgttcttccttgaaaggaatggc

SEQ ID NO: 108519 - DNA, 515 bp, Homo sapiens
tttcatagcctggcacacagtagacatttgatttgttccctaacggtcctttaatgttagaaagcactaactgaaatagaagtggagaggtgatgcagaaagcagataagataatgtgcagatataagcatagtttcattcattcatccaaacgtattcattgagcactaatttttagtgtgctaggcagatatgccaaggaacgaaacagataaaatttctgcttttgtgagtttacattttagtgagagagacaggctacaaaatatgcgtaagacacacacatacacccacacacacacacacacacacacasagagaaagagatacatttcacatgctgatcagtgctaggaagagaactatagtgggataaaatactgttggataaaatactgttgatggtacagattagactgaaagggacaagagtgaaacgaggaagatgacttagaatgctcctgcctcaagaggttatcatccaaggagaaggatcagactagggcattggagtc

SEQ ID NO: 108520 - DNA, 607 bp, Homo sapiens
ttcattcatccaaacgtattcattgagcactaatttttagtgtgctaggcagatatgccaaggaacgaaacagataaaatttctgcttttgtgagtttacattttagtgagagagacaggctacaaaatatgcgtaagacacacacatacacccacacacacacacacacacacacagagagaaagagatacatttcacatgctgatcagtgctaggaagagaactatagtgggataaaatactgttggataaaatactgttgatggtacagattagactgaaagggacaagagtgaaacgaggaagatgacttagaatgctcctgcctcaagaggttatcatccaaggagaaggatcagactagrgcattggagtcagggctcatattatacatgtattttgaggataaagtcaacaggatttgatatggattgagtgtagaatgtgagaataaaagagaagtgagggttgactctagaatttttggtctgagaaagtacaagaatgaaattccatttactgacatggtagaacctaaagaaggagctgtttgaaggaatgcaaattaaaaattgtggatatattcactccaataactagttgcac

SEQ ID NO: 108521 - DNA, 551 bp, Homo sapiens
caatatgacaatgagtgtaaatgacattaactaggtcaagcacggtggctcatatctgcagtcccagcactttgggaggctgaggtgggaggattgcttgaaatcaggatttcgaggccaacctgagcgaaaaaagcaagaccatatctctacaaaaataaaaatttttaaataaaaaattagctgggctgggtggtggatgccagtagtgccagctattcaagcagctgaggcagaaggatcccttgtgcccaggggttagagactgcagtgacccataatggtgcctgggctccagaacaagaccttatctctaaaaaaaaaaatgaaaagaaagatatcaaccaattaaaatgccagcattctttgtcacaataattatcatttggggggatcaattcttagctaatcacttgaaatgtgtggagaaggcaaaaaatactttataaaaaagtgtattagtgaggrattatttatagtggcaaaattttggaaaaatttaagtgtccaacaatagagacatggataataaccttggaaaatcaacctaa

SEQ ID NO: 108522 - DNA, 534 bp, Homo sapiens
gagcccaaggtgaaggcaatacagaggatctattccagaccactctcctagtttcaggtagtcccttggcttctggcagcataactccagtcttcacttggtattctccctgtgtacatgtctatcacttcataagggcattccttttatatggacaccagccacattgacttaggggcccatccttctctagtatgagctcatctttaaataactaatgacatctacaactgtctaatttccaagtaaggtcacattctgaagtagtgaaggttaggacttcaataaatgaattttaatgggacatgattcaactcataatatctaatgacarttactacagccagaacttaccataatcctgggtataaaaaaatcagtctaggccaggctcagtggctcatgcctgtaatcccagcactctgggaggccaaggtgggcggatcacaaagtcaggagattgaggccatcctggccaatatggtgaaaccccatctctactaaaaatacaaaacttggctggatgtggtggca

SEQ ID NO: 108523 - DNA, 535 bp, Homo sapiens
cagaaaatctgtgattaggtcagctttctgaaaatatattgtatttgaaatcttataatggtgttaaccttttaaagatcctgataaaaatctttaattaatttttaattattcctatagagaaaatcaatctctaattttaaatttataaaaatgagatttctcttaaacttggttaaacttggttaaagctcatacatatgtatcttatctccaagaaaccattatttattttaatactctaattttgccatgaattaattatatccttctatctattttttctaagagttatagattattttgatgagggctgtcattggcactgagtgtcaagagcattgytaaacctgcttcaattattttgtgctacttagatttttgtaagtgcatctaccacatagacagcatgtttgttgtcagaacttgagatgtgcatttaagaagctctctgaagtatcttccagttcaaaaatatcatctagccaatgttttctttatatagtctcttgaaaatgctcactaaataccttca

SEQ ID NO: 108524 - DNA, 535 bp, Homo sapiens
cagaaaatctgtgattaggtcagctttctgaaaatatattgtatttgaaatcttataatggtgttaaccttttaaagatcctgataaaaatctttaattaatttttaattattcctatagagaaaatcaatctctaattttaaatttataaaaatgagatttctcttaaacttggttaaacttggttaaagctcatacatatgtatcttatctccaagaaaccattatttattttaatactctaattttgccatgaattaattatatccttctatctattttttctaagagttatagattattttgatgagggctgtcattggcactgagtgtcaagagcattgttaaayctgcttcaattattttgtgctacttagatttttgtaagtgcatctaccacatagacagcatgtttgttgtcagaacttgagatgtgcatttaagaagctctctgaagtatcttccagttcaaaaatatcatctagccaatgttttctttatatagtctcttgaaaatgctcactaaataccttca

SEQ ID NO: 108525 - DNA, 569 bp, Homo sapiens
tatttgttttgcctgaaatgttcaacactctcaattaccacacttttattaagcatgttctatatgccaggcacgtggtaataactgcaggagatgcacatattactggaaaacaacaacaaaaaagtgccttttcttcaaatttctaatagtctagtttcatgaacaagtacatacacaattaattataataagtagtacagaaaattatagtaaaataaacatagtttcttctatgtctagcttagttatatgcatgcatctgactcggctcaagtcccwgcttctctaagaagtcattgatctcagtccagagtaatctccttttccagctgcactttgcagtacatttgttctagagaactcataaactcatgtaacccttaatataaacaagcgtaactttttatatttcaaatatatgggctatatatcttttccaaattttatctttttaaagtacagagattttattctgtgtctcttaatttctctagagctcatatatcacttgctctttcatttggccattaatttatttgttattcattcatttagttgtttctatg

SEQ ID NO: 108526 - DNA, 569 bp, Homo sapiens
tatttgttttgcctgaaatgttcaacactctcaattaccacacttttattaagcatgttctatatgccaggcacgtggtaataactgcaggagatgcacatattactggaaaacaacaacaaaaaagtgccttttcttcaaatttctaatagtctagtttcatgaacaagtacatacacaattaattataataagtagtacagaaaattatagtaaaataaacatagtttcttctatgtctagcttagttatatgcatgcatctgactcggctcaagtcccagcttctctaagaagtcattgatctcagtccrgagtaatctccttttccagctgcactttgcagtacatttgttctagagaactcataaactcatgtaacccttaatataaacaagcgtaactttttatatttcaaatatatgggctatatatcttttccaaattttatctttttaaagtacagagattttattctgtgtctcttaatttctctagagctcatatatcacttgctctttcatttggccattaatttatttgttattcattcatttagttgtttctatg

SEQ ID NO: 108527 - DNA, 569 bp, Homo sapiens
tatttgttttgcctgaaatgttcaacactctcaattaccacacttttattaagcatgttctatatgccaggcacgtggtaataactgcaggagatgcacatattactggaaaacaacaacaaaaaagtgccttttcttcaaatttctaatagtctagtttcatgaacaagtacatacacaattaattataataagtagtacagaaaattatagtaaaataaacatagtttcttctatgtctagcttagttatatgcatgcatctgactcggctcaagtcccagcttctctaagaagtcattgatctcagtccagagtaatctccttttccagctgcactttgcagtacatttgttctagagaactcataaactcatgtaacccttaatataaacaagcgtaactttttatatttcaaatatatgggctatatatcttttccaaattttatctttttaaagtacagagattttattctgtgtctcttaatttctctagarctcatatatcacttgctctttcatttggccattaatttatttgttattcattcatttagttgtttctatg

SEQ ID NO: 108528 - DNA, 624 bp, Homo sapiens
caaagctacagaaagagaggaagaggtgtggacattggatttgatgactcaacacggataacaaagggagagagaatccacaatgaattccatctcttatcrgttgtgaaatcttcctgcaccaaaatatttccccccgtccactctctctattcgtaagattatacaatttgctctttcttctttgccttctttattctgttaactctctttttcttgttctctggatattacataaaagtctcatgtaattgcccttttcacatattattcagctgaggatcatattgcttaatcattctaagctatattctcaagtaaaaccttcttaggaatagacaggaacataatgtagagcacagcaagggaatattctgctcccaacagtgatgacaaagaagctacacagcaaagggaaacttttatgtaaagacccagaaaacaaaaggttgataagaagaacagtgatttcaatgaaaagatcaccagaggtctgaatccccagcacatacagttgtctttattctttgatcttccctggctctgaaattctggcttaagctacagtccatgacagccccaggacatagggatttgatagcttccaattccattacagttttt

SEQ ID NO: 108529 - DNA, 624 bp, Homo sapiens
caaagctacagaaagagaggaagaggtgtggacattggatttgatgactcaacacggataacaaagggagagagaatccacaatgaattccatctcttatcagttgtgaaatcttcctgcaccaaaatatttccccccgtccactctctctattcgtaagattatacaatttgctctttcttctttgccttctttattctgttaactctctttttcttgttctctggatattacataaaagtctcatgtaattgcccttttcacatattattcagctgaggatcatattgcttaatcattctaagctatattctcaagtaaaaccttcttaggaatagacaggmacataatgtagagcacagcaagggaatattctgctcccaacagtgatgacaaagaagctacacagcaaagggaaacttttatgtaaagacccagaaaacaaaaggttgataagaagaacagtgatttcaatgaaaagatcaccagaggtctgaatccccagcacatacagttgtctttattctttgatcttccctggctctgaaattctggcttaagctacagtccatgacagccccaggacatagggatttgatagcttccaattccattacagttttt

SEQ ID NO: 108530 - DNA, 651 bp, Homo sapiens
tggtgcatatgtagagtacttaacttcttccaggttttattactacagtgattccttattcaggaatagaactcttagctactagcccctaaatgaatggagagctgtatgctgcacagcttggaaactggaaactgatttagatgtcatgatttctaagcctatgtgttggcacttaaaacctctcagaattaacttmtatatcaaagttgacccaatgaaatgaaaacaccaagagatcatcacactgttcttggggataggaggcttcgttggtgttgtaaacaacaacaaaagaaagcactgaatctggggccagaaaatgtacttcaatctttgcctccaccacttatttactagatatgacactacgggcaggtctttacatctctctaaacctcagtttcctccaaaatctacataagttatctgctactgaataacaatttatccccaaaacttagcagcttaaaacaacaataaaaatttattatctcacatagtttctgtgggagagttcagaagcaacttacctgggtggtccagactcagggtctctagtgagctattgagatactgaccacagcagtattcattttaagacttgactggccctggagaatcctgttccaagatgcttacttatatggc

SEQ ID NO: 108531 - DNA, 523 bp, Homo sapiens
agatgtggaactgttttaatttcccacaaagcaatcagtcccctggatatctatacacaaaaaagatttgactgcaaatttgggatgtcagggaatttgcatggccacaacacaaacaacctgaaaatgcaagtcgagatatttctgctatgaaagtcactcggccatttgcacaactagaatttcagtcttctaccatgttatgttcaactctctcctcactcccttttctctttcttcttgtgcttcactaccaagttcttcttcatttcaaattcacagtagcttttcatcttggcttttgccaatctgtgtattcagaatgtcttccttcacccctaattggctggtcaargtgttttccttaaaaaggctataacctccttaagaggaattctggaatcaaccattaaagttataaaatattttaccctgatatattaataattcccaaagctatcaaagtagtggagaaagtggtaaactctcgcattacttctcagctgtagagtcaatttacact

SEQ ID NO: 108532 - DNA, 746 bp, Homo sapiens
acatatttattcaatgcttagcaaggtagtctggtgacatttttttaatcatgtaaaaaaaagccaggagcggtggctcccacttgtaatcctagctactcaggaggctgaggcaggaagattgcttgaggcctggagttttgagattagcttgggcaacatagtaagactctatctttaaaaatacaaaaaataaattagctgggcacagtaacatgagcctgaaactgttgtcctagctattcaaggggctggagtgggaggattgcttgagcccaggagtttgaggctacagtgagctatgatcaccactcagcttggtgacagagtaagaccctgtctctaaaattaattaactaaaaagccttttaaaataaaatatacttaacaaaaaatttaccatcttaatcattttcaagcagacagttcagtggcattaagtacattcacatttttatgtgactatcaccaccatccatcttcagaactttctcatcttcccaaactgaaactctgtgcccatcaaactataacttcccattacttcactcttctggcaatcgccatgctattttgtatgaatctgactgttttagatacctcatataaatgaaatcatacacaatatttawccttttgtgactaatttattttcacttagcataatgtcttcaagattcatccatgttgtagcatgtgtcagaatttcctcccttgttaaggcttaataatattccatcgtatgt

SEQ ID NO: 108533 - DNA, 605 bp, Homo sapiens
gacattaggtaatcttagaagtggggattcaggtgaggcagaatacagaatggcagatagaatgtcagtagaaacctgtaaatgyctatatagaaagtactgcactccagatcctacatagacacacacacacacacctcatccagctggaaagccacctatcctccaatgagaataacagtgtccttcactctaatataaatggagacttctacttctgagtatgatggagagctaagaacagcagagctaagaacaactagaaaggtaattttaaaaaaattaaagctgtttgaagacatataagaactcctgaaataatggattgagaggaggagggaaacagcagataatgagctgatatttctgcagtggcattcccctagtgcattgccaattctgagagcaggacaagaagtcagcaatgcagacttttctcaggcagaggagaaaccagcaaagattttagcagtcttctgatgctgggaagataaaaactgtaacaaagtaacaaacaaatagaaagtccaaaatcacagtgaaaaagagagaaatggaaaaagaaggctaacactcatctggtattatccttaagacaagagttc

SEQ ID NO: 108534 - DNA, 605 bp, Homo sapiens
gacattaggtaatcttagaagtggggattcaggtgaggcagaatacagaatggcagatagaatgtcagtagaaacctgtaaatgcctatatagaaagtactgcactccagatcctacatagacacacacacacacacctcatccagctggaaagccacctmtcctccaatgagaataacagtgtccttcactctaatataaatggagacttctacttctgagtatgatggagagctaagaacagcagagctaagaacaactagaaaggtaattttaaaaaaattaaagctgtttgaagacatataagaactcctgaaataatggattgagaggaggagggaaacagcagataatgagctgatatttctgcagtggcattcccctagtgcattgccaattctgagagcaggacaagaagtcagcaatgcagacttttctcaggcagaggagaaaccagcaaagattttagcagtcttctgatgctgggaagataaaaactgtaacaaagtaacaaacaaatagaaagtccaaaatcacagtgaaaaagagagaaatggaaaaagaaggctaacactcatctggtattatccttaagacaagagttc

SEQ ID NO: 108535 - DNA, 548 bp, Homo sapiens
tgtacagcaaagaaaacaatcaaccaagtgaagaggcaacctacaaaatgaaagaaatatatttgcaaaccatacatctgataaaaggttgatatccaaaatatataaggaactcaaacaactcaatagcaagataacacataactcaattaaaaaatgggcaaagggactgggtgcagtggctcatgtctgtaatcccagcacttttggaggtcaaggcaggcagatcacttgagctcaggagttcaagaccaaccggggcaacatggcaagaccctgtcactactaaaaatacaaaaaaaattgctaggcgtcatggcatgcacctgtggtcccagctacttgggaagctaaggtgggaagattgcttgggctcaggaggcgaaggtygcagtgagctgagattgtgtcactgcactccagcctgggtgacagagccagacactgtctcaaacttaaatttttaaaaaaagaaatgggcaaaggacctgaagacaaatggccaaaagatatatgaaaacatgctcaatgtcactaatcaccaggga

SEQ ID NO: 108536 - DNA, 422 bp, Homo sapiens
gggtaaaatgatatctcctcatggttttagtttgtatttccctgatggttggtgatgttgagcattttttcatatatctgtcggccatttgtatgttttcttttgagagatgttcattcagctcatttgcacattcttaaattggattttttttttttttttgctgttgagttgtttgagttcattgyatattctggatattaattcctcatcagatgaatagtttgcaaatatttttctcattctgcaggctgtctcttcattctgttgattgtttcctttgccgtgcagaagctttttagtttgacacaatcccatttgtctatttttgcttttgttgcctgtgcttttgaggtctgctccacatagtcgttgcccagaccaacgtcctgaagtattttccctatgtttttgtatagttg

SEQ ID NO: 108537 - DNA, 492 bp, Homo sapiens
ctgaatggcatagaaacagatgcaagatcctaaaacaatcttctcaagaggaaaataaatattgctctcaaaatcagagaatcagcagcaaggttctatgctgattcacttggctctaatgtcttactcctacagattgccggaaataaaacattttaagaactctgacgttatgagaaattatcagaagcatctagctgtaaatgcacaaatyttatttccttgccttgggcctttgaaactgtcttcaatatttggtaaaaacaactacttaagcagtttgtcttctacctaatgtggcaattcgattcctcaattagattgttgctactgttggctgattaaaacagaatggcatgcaatggcagtttaagtattgggctttctcctttgcattcaggtggacaattctgtcatagtccctagcaccatacttattccttccatatttctcccttgcataaatttctgcctggcttaaaggaaaagaag

SEQ ID NO: 108538 - DNA, 631 bp, Homo sapiens
aggacaatgcctgggtcatggttaacactccataagtactctttattcaatagatacttcttgaatatcaaaatattaaagctgatcaacataacaatttgagagatcctatcactatttccaacgggaataatttgaattctgatttcctgtttctgatgctagataggaaaagtggtagcctctcctttgctctcgattagcatctatatgagtggattttatgtaaatgagacatttgcattcatagtgactagagaaatgagttctaaatcatgtagactgtttggcacctcattttcttgttttctagtgttgcgctaatgcctgcctctgaagcacctgggtcttcaygtctgactgaagtcattaaaaaaatatgtgaactgccttttttaaaattagtgacatatgcttccactctttacattttagacaaataatcaaaatttccaacacagatatgggtaattctttatttaagtgaaatctcaccacttacatacttatcttttcaaattgccggttcaccagtatgaggaacaaatggaaaaactttctgatgttggtgctgtcatgagcttttcatttcagtgtaatcatgtgattaaatatattttgttaatttgct

SEQ ID NO: 108539 - DNA, 615 bp, Homo sapiens
gccattttatggaatgaaaattatgttattatactacataaatgtcgataaaaattggaagtgtgatattaatttcygatgccccattagtagaagttggtaaacatatgtaatcaggtatagttaagggaataatttctgttctaaaccagtctaattttcttaagtttttaggttctatggatcctactctgaggttctaggaaaaaaaaattttcttcaactttcataagttctttgttgaaatggagccctgtagcaataggcagattaataagagaaaaacaaacaaaaatttattaacatatatattttataaatacatgggaaacacccaggagatgaatagtcttaaagaagtggctttgaattccagattatatgtatcatcaacaaagaacagtgacattttagagaaatgacaagacaaaagacaggactttgaatctccagcagcagccaatggtgggcaggcagataaaggtgagttagtaaagcttgttaatgtagattcctgtcatcccatctccaggctgacatgtgtccaaagctgtcttcagtggttaatttttttctctccctggtagagaagggggtcaggataccttttatctt

SEQ ID NO: 108540 - DNA, 615 bp, Homo sapiens
gccattttatggaatgaaaattatgttattatactacataaatgtcgataaaaattggaagtgtgatattaatttctgatgccccattagtagaagttggtaaacatatgtaatcaggtatagttaagggaataatttctgttctaaaccagtctaattttcttaagtttttaggttctatggatcctactctgaggttctaggaaaaaaaaattttcttcaactttcataagttctttgttgaaatggagccctgtagcaataggcagattaataagagaaaaacaaacaaaaatttattaacatatatattttataaatacatgggaaacacccaggagatgaatagtcttaaagaagtggctttgaattccagattatatgyatcatcaacaaagaacagtgacattttagagaaatgacaagacaaaagacaggactttgaatctccagcagcagccaatggtgggcaggcagataaaggtgagttagtaaagcttgttaatgtagattcctgtcatcccatctccaggctgacatgtgtccaaagctgtcttcagtggttaatttttttctctccctggtagagaagggggtcaggataccttttatctt

SEQ ID NO: 108541 - DNA, 554 bp, Homo sapiens
tatgaaacacacagtcttttcttttttttcttttttgagatggagtctcactctgtcacccaggctggagtacaatggcstgatctcggctcactgcaacctctgtctcccgggttcaagtgattctcctgcctcagcctcctgagcaactgggattacagctgtgcgcctccacatctggctaatttttgtatttttagtacagacagggtttcaccatgttggccaggcttgtctcaaactcctgacctcaagtgatctgcccgtctcagcctaaagtgctgggattacaggtgtgagctaccgtgccctgctgaaacagacagtctttgatttgatctctgcaggattaggaagaaaagtcttttcagaaagaagcaaagatcagaggtggaaagtctgcagatatgcaggaaatggtctgtagttgagtgtagctacaggatagactttgtgatagggaatcataagaaataagatgaagtcagtagactgaagcctcttcattaagaaccttgactgcaaagccagagagttcagatttcattcattgg

SEQ ID NO: 108542 - DNA, 554 bp, Homo sapiens
tatgaaacacacagtcttttcttttttttcttttttgagatggagtctcactctgtcacccaggctggagtacaatggcgtgatctcggctcactgcaacctctgtctcccgggttcaagtgattctcctgcctcagcctcctgagcaactgggattacagctgtgcgcctccacatctggctaatttttgtatttttagtacagacagggtttcaccatgttggccaggcttgtctcaaactcctgacctcaagtgatctgcccgtctcagcctaaagtgctgggattacaggtgtgagctaccgtgccctgctgaaacagacagtctttgatttgatctctgcaggattaggaagaaaagtcttttcagaaagaagcaaagatcagaggtggaaagtctgcagatatgcaggaaatggtctgtagttsagtgtagctacaggatagactttgtgatagggaatcataagaaataagatgaagtcagtagactgaagcctcttcattaagaaccttgactgcaaagccagagagttcagatttcattcattgg

SEQ ID NO: 108543 - DNA, 529 bp, Homo sapiens
tagtttttttagattaatagatttttattaattttagctgttttaagtttacagaaaaatggagcagaaggtacagaaagctcccatatacaccccacacctcctcccaacacccatttcccatattaggaacatcttgcatttgggtgatacatttgctataatcaaggggccaatattgatttattattattaattaaatccatagttgacattggagttctctcttggtgttgtacctcctatgggtttggaggtacctccaaatgtgcaatgttgtagctccagtgaatgtgtaatgwcacgcacccaccactgcagtatcacacagagtagttttcctgccctagatatcccctgtgctctgcctgttcagccctcccttcccctgaactgatcttttcccaacctccatagtgttgacttttccagattgtcacatagttggaatcatacagtttgtagccttttcagaggagcttctgtctctaaaaccttattactactgaaagtgtctccaggcctagca

SEQ ID NO: 108544 - DNA, 636 bp, Homo sapiens
tttccaggcagtaaataataactcctaataccagtgtaagcttggctgggcactgttggaatgtttatgttgcttgggcttgttttcattttgggtttgttttcttttcatggtctttatggtagagctacgtaaaaatcagtagcattgactccctagctaaccttaattcaccatgaaataggcttaaacactagactccctcatcgagtgaattttggatatcctgtggacagggatttaaattgggctcagccttcttaatgagcatggttgctatttaagtatcttgtcaccgttgcacacagtgcttgtgtctttccttggaggtgatttttcccaacctggagaactctgcctgctttgtgtcctgggttcttcttgctttaaggactttcttcatgtagcacattctagatcaggactctggagcaatgggaacatgctgtgcctccttcaaagtttagctccaggaggtgctctctggcacaccactgccagccaagctgctcacaccactgtgcatatgcctgaggccctctgctgccatcctgtgaactgtcagtcatatacatctgttctagggttagctcrcacacccttgagggcagggacccaggtcattcatcagcatgc

SEQ ID NO: 108545 - DNA, 634 bp, Homo sapiens
gtctttgtttgttctcacatagtcctatgtgtatatttaaagattttttaaagcaagrtaaatatacagagatacattaatatattgtaaaaaaagaattagcatcagagattgccctggcatctagcttgtggtggggaatacaaaatctgtttgctttggaattaggaagaccaggtatagtggctcatgcctgtgatcctagcactttgaaaggcaaaggtgggacgactgcttgagtccaggagtttgagaccagcctgggcaacatagcaagaccctgtctctaaaaaaattaaagaaaaaaaattaggcaggcatggtggtttgtacctgtaatcccagctactctggagcctgaaaagggaggatcacttgaccatccaggaggaaaaggctgcagttagctatgattgcgctactgcactccagcctgggtgacagagtgagaccctgtctccaaaaaaaagaaatacaagaacaaaagaaagaaagaaagagagaaagaaagaaagaaaaaagatttagggcccccagcttgttcccactcctttgctctcagttggaagtgtgcataatcaccttgaaagcaatgtgttccttgaacgtaccagctctcctgctttcttgattc

SEQ ID NO: 108546 - DNA, 611 bp, Homo sapiens
tcctatgagcattctccagaggtttaccatagctgagctttacagccatattctgctctctctcatggatggcttttctttcttttgcccaagttagctcctcctccatcctccagccttcaatgcctcagtcacttcttcaaggataccattcctaatctctgatttaggtgaaactcccttaaaatggagtctcattgtcaatgaytgtcaatgatgtcaatgatgcagtttcatactgtacatgagagaacattagattatcatctattctccttgctaagtgccacgttcagtgagggcagggacaatgctttggttcaccagttgagtcctcatcagttagtacaatgcctggcaccaaacagacaactaataagtatcagtcaaataaataccaaaataatggctatttacaacagagggtagtaatgacccctcatagcaggtagcatagtttactatgtgccatgcaattttttgggcactgcaaaaatgcagtctcacaatgagtctttgcactaaagagatgtaataatatctcttaagccccattttacagaggtgaaaatgatgaaaacatagaggttactatggtctgaatgtttata

SEQ ID NO: 108547 - DNA, 493 bp, Homo sapiens
atatacctacatcataaatgtatggaaagaaattttctggctgccaagtatatgtgtggatgtggggagaatgtcagggggtgaaggcataaactgacctctggaggtggggaggagggcaggtgtcatagctctacaaggcagtagcaatgggtgtgttaatggaaacgtaagcatagataagatggtacatatggaagtacaaaggaacatctcaagttcctgggagaattgttgaagcagaaaaagaagagcaggaacctttgactgttgttcctgtttttagtttgttcaaactgtagtcttcctccccctaccccgagttgattgcrtttgtacttagaaaaaagatgttatagaatgacacaagattcaaattaccagatttagaaaggcaaggtccagtcatgttacaatgattttgatcagaaagagccagcctattccaccattttccctttatttccaggttagacaaagatttcagaggcta

SEQ ID NO: 108548 - DNA, 609 bp, Homo sapiens
tttctaaccacctaacgtatattagttccactctctgactctctctcacctattttcttgtttccctagtgatacttgttataagttacagatacacacacagacacacacattctgtttgttagtttctctgtattacggcctaggtcaacccagggcaattttgaccctattctcaccctggggaacatttggcaaagcctggaggcatttttagttgacacaccygggaaacgggggttgctaccagcatctagtaggtgaagacctgggatgttgttatatatcctacaatgcacaggatggttctccttccctcccatgaattatctggagcaaaatgtcaatagtgcaaaagttgaaaaagccttgtttattttaccacttcccccattatacttaaagcttcatgaaggcaggtatctcttcactggttccttaaacagcatggttccagaacctagaaaagaatctactgaatgaatgagtgaatgggataaaggaggaaaaatatataaagtaagtaacgtccttaacatctcaaggatctctaggggcctcagagtccaccatggcttccattctcctgtggtggtctctgttgaaata

SEQ ID NO: 108549 - DNA, 582 bp, Homo sapiens
atcatatctattttctactcaaaactatttcataattttgctatttaaataatgactttgcagccaggcatggtggcccacgcctgtaatcccaacactttgggaggtcaaggtgggagaatcacttgagcccaggaggtcaagactaggctgggcaacacagcaagaccccatctctacaaaatattaaaattataaaaagcaaacaacaaataatgactttgtaactttttgtaaaaaaaagttttctctagaaaatatggctgaaggtaggatggacgactgttattatttattataagtctttctgtactatttgcattttatcacgtacatttattactctaacaaaatataataaaaatttcttattttattttaattcaactaagtgtaactctcacttaactaatttttttcctcagcactaaagaggcatataaaaatataaaargctattcatttgaaaacttgaacaaaactaatatccagagaatggtcagcaatgacaatttacatccatcactaaattaccgtatcatggtttttgcattgattacccttaggaaatgcaagtggaca

SEQ ID NO: 108550 - DNA, 624 bp, Homo sapiens
tatgtatatatgtatatatttacccctcttgggtcttatcaaaaagaccatatttttaaaagatttagcttttttccaatccaaattggggctgcgtctaagttaatggtgcctagggacagatgtacagctgatcgcattccgaaaagtgctctccagagacgcccttcagaaactccggcctgacgacagagcaagagacagatctsctgagatcgttcaagcaaaaggaaacatattttatttacaacattactaataaatctttcctactgcactttaggtttcctctctttaagtaggctttatgatatctcataagggagagttggcgtcactggaaatgcctgtctaggagctgcaccttgggaaatgaactgcctaaatgaacccaaaggattctcaacccaataacacctgcctcagcttttctgtctccatcaacctttctcatttctacacctacataaagaagcatgttgcccagctaatgcagagcaaataccctgtggatatattcgtttccttcctttttcttcttactcccttctttcttcatccgtctttcttggttgttttcttctttctcagtttttttcttttctagctcttttctcacatcca

SEQ ID NO: 108551 - DNA, 559 bp, Homo sapiens
gggactcagtgagaaagggtgggaaaggggtgagggataaaagactacaaattgggtgcagtgtatactgcttaggtgatgtgtgcrccaaaatctcacaaatcaccactaaagagcttactcatgtaaccaaaaactgcctgttccccaataacctatggaaatttaaaaattgtggttgtaaatataaatggatatcaatcaatcaatcacattatttgtgtgttcttctgcagctatatctactgcttcagtgcaggaggaaataggttgttttcttaccctgagctagctcaattttttccaaggaacataacactgctcacattaaagtacgtctcaatggaaatttatggggaagtacagatgtatcttatgtgataagtgaaccaggagtagaaggtcaggacttaagtaactatctccatctcttcaagaccgtttgatcctcatgtatgatttttgcattatatatattcttttctctctgtgccaaccggatttttgttcttttttgtataattggcagaaagtgattgtccctgcccaggataagctt

SEQ ID NO: 108552 - DNA, 559 bp, Homo sapiens
gggactcagtgagaaagggtgggaaaggggtgagggataaaagactacaaattgggtgcagtgtatactgcttaggtgatgtgtgcaccaaaatctcacaaatcaccactaaagagcttactcatgtaaccaaaaactgcctgttccccaataacctatggaaatttaaaaattgtggttgtaaatataaatggatatcaatcaatcaatcacattatttgtgtgttcttctgcagctatatctactgcttcagtgcaggaggaaataggttgttttcttaccctgagctagctcaattttttccaaggaacataacactgctcacattaaagtacgtctcaatggaaatttatggggaagtacagatgtatcttatgtgataagtgaaccaggagtagaaggtcaggacttaagtaactatctccatctcttcaagaccgtttgatcctcatgtmtgatttttgcattatatatattcttttctctctgtgccaaccggatttttgttcttttttgtataattggcagaaagtgattgtccctgcccaggataagctt

SEQ ID NO: 108553 - DNA, 551 bp, Homo sapiens
ttgactcttattgagtcatgtttctcagtttgtgcgccttgttattttttgttaatttttgcatttgacaagaacagccaactctcccagtctatttgttcattctcatgctscaactaaagatatactcaagactaggtaatttataaaggaaagaggcttaactgactcacagttcagcatggctggggaggcctcaggaaatttaaaatcatgttggaaggggaagcaaccacatccttcttcacatggtggcagcaaagagaaatgcagagtgaaggtggaaaaaagccccttataaaattatcaggtttcatgagaactcaactcactgtcatgagaacagaacggaggtaactgcccccgtgatccaattacctcccaccagatccctcccatgacaggcggggattatgcgaactacaattcaagatgagattcgggagggtgcgcagccaaaccatgtcaccctgtatttatagaatggctttatacaggcaaaggccttcatcaatcagcaaactggaaattcagagggcctccaaaaactt

SEQ ID NO: 108554 - DNA, 551 bp, Homo sapiens
ttgactcttattgagtcatgtttctcagtttgtgcgccttgttattttttgttaatttttgcatttgacaagaacagccaactctcccagtctatttgttcattctcatgctccaactaaagayatactcaagactaggtaatttataaaggaaagaggcttaactgactcacagttcagcatggctggggaggcctcaggaaatttaaaatcatgttggaaggggaagcaaccacatccttcttcacatggtggcagcaaagagaaatgcagagtgaaggtggaaaaaagccccttataaaattatcaggtttcatgagaactcaactcactgtcatgagaacagaacggaggtaactgcccccgtgatccaattacctcccaccagatccctcccatgacaggcggggattatgcgaactacaattcaagatgagattcgggagggtgcgcagccaaaccatgtcaccctgtatttatagaatggctttatacaggcaaaggccttcatcaatcagcaaactggaaattcagagggcctccaaaaactt

SEQ ID NO: 108555 - DNA, 551 bp, Homo sapiens
ttgactcttattgagtcatgtttctcagtttgtgcgccttgttattttttgttaatttttgcatttgacaagaacagccaactctcccagtctatttgttcattctcatgctccaactaaagatatacycaagactaggtaatttataaaggaaagaggcttaactgactcacagttcagcatggctggggaggcctcaggaaatttaaaatcatgttggaaggggaagcaaccacatccttcttcacatggtggcagcaaagagaaatgcagagtgaaggtggaaaaaagccccttataaaattatcaggtttcatgagaactcaactcactgtcatgagaacagaacggaggtaactgcccccgtgatccaattacctcccaccagatccctcccatgacaggcggggattatgcgaactacaattcaagatgagattcgggagggtgcgcagccaaaccatgtcaccctgtatttatagaatggctttatacaggcaaaggccttcatcaatcagcaaactggaaattcagagggcctccaaaaactt

SEQ ID NO: 108556 - DNA, 524 bp, Homo sapiens
gggattacagatgtgagccaccgtgcccagccaagcccatctatatatagaaaagggtatgtaacagaatsaaaaatgtgattcaaattttacgtaggctgtcttgaaataaatattcatcaaacatgaacatatcacagtttagaaaagagcagagttttgaatctgtgaattacacacaatagtcttttggttttttgttttgtttttcagagtacctactttccaaaaggtctactacagctccaggatctactgcactttcaaatacctgcagagaaaaatggggaaaataaattttcaaagttgtattaataagcgcatatagaaactgtaaatgccaggtgcagtagctcacacctgtaatcctagcactttgggaggccgaggtgggtgtattgcttaagctcaggagtttcagaccagcctgggcaacatggtgaaaccctctctctacaaaaaatacaaaagttagctgggcatggtggctcatgcctgtattcccagctacttgtggggctgag

SEQ ID NO: 108557 - DNA, 595 bp, Homo sapiens
taccatctgctgcttttatgtggcacttccttcttactcactaagtttccacctgagcaggattgcagtgctgaagctctctgaagggtattgtctacaaaagtagttattgtgtcaggtgaacrtgaaagggaaataaaaagtaagtcacctgatatatcatcataaagaatggttgactgggtgctgtggctcatgcctgtaatttcagcactttgggaggccgaggagggcagatcacttgaggtcaggagttcaagaccagcctggccaacatggtgaaagcctatctctagtaaaaatacaaaaattacctgggcatggtggtgtgtgcctgtagtcccagctactcagaggctgaggcaggagaattgcttgaactccggaggcggaggttgcggtgagctgagatcgcaccactgcattccagcctgggctacagagtgagattctgtctcaaaaaaacaaaagcaaaaacaaaaaagaatggttgcattgattgaatctgaatatcccaggaggaaggcactctttgggaactgccataaacttcagaccccaagggcacccaacctgaggttactcctgaaaactg

SEQ ID NO: 108558 - DNA, 595 bp, Homo sapiens
taccatctgctgcttttatgtggcacttccttcttactcactaagtttccacctgagcaggattgcagtgctgaagctctctgaagggtattgtctacaaaagtagttattgtgtcaggtgaacgygaaagggaaataaaaagtaagtcacctgatatatcatcataaagaatggttgactgggtgctgtggctcatgcctgtaatttcagcactttgggaggccgaggagggcagatcacttgaggtcaggagttcaagaccagcctggccaacatggtgaaagcctatctctagtaaaaatacaaaaattacctgggcatggtggtgtgtgcctgtagtcccagctactcagaggctgaggcaggagaattgcttgaactccggaggcggaggttgcggtgagctgagatcgcaccactgcattccagcctgggctacagagtgagattctgtctcaaaaaaacaaaagcaaaaacaaaaaagaatggttgcattgattgaatctgaatatcccaggaggaaggcactctttgggaactgccataaacttcagaccccaagggcacccaacctgaggttactcctgaaaactg

SEQ ID NO: 108559 - DNA, 595 bp, Homo sapiens
taccatctgctgcttttatgtggcacttccttcttactcactaagtttccacctgagcaggattgcagtgctgaagctctctgaagggtattgtctacaaaagtagttattgtgtcaggtgaacgtgaaagggaaataaaaagtaagtcacctgatatatcatcataaagaatggttgactgggtgctgtggctcatgcctgtaatttcagcactttgggaggccgaggagggcagatcacttgaggtcaggagttcaagaccagcctggccaacatggtgaaagcctatctctagtaaaaatmcaaaaattacctgggcatggtggtgtgtgcctgtagtcccagctactcagaggctgaggcaggagaattgcttgaactccggaggcggaggttgcggtgagctgagatcgcaccactgcattccagcctgggctacagagtgagattctgtctcaaaaaaacaaaagcaaaaacaaaaaagaatggttgcattgattgaatctgaatatcccaggaggaaggcactctttgggaactgccataaacttcagaccccaagggcacccaacctgaggttactcctgaaaactg

SEQ ID NO: 108560 - DNA, 572 bp, Homo sapiens
aggcagagagtgaatactcaaaacatataccgtatgagatataaatcaatgtraaagacaaaaatcaagttgggaacaggaggtagagagtgttggatggggaatactattttaaattgctattttaaatagagtggggagtaaagtattgctgataatgtgacattttcatggagacctgaagaagtgaaggagtgaggcaatgaaccaagtaaatatctgagcattccaaacagagggcaagtaagttcaatggcattgagctgcctggcacatgcatggaacaacaaggagggcttggtggccagcgtgagtagacctcacctgttttggaaatcagctccatttcggacgttaggtcttaaatgagaccagtggctttatttggaggaattactgggtaaagtttaactggatcatgtcttttatatggcatgtaatagcatacattgctggttattttcccatatccatttttccttctcctacagtaatggaacttccaattttagtgaaggatctaactcttataataaaggcattttccagcctcctttgcagctgggtgtggc

SEQ ID NO: 108561 - DNA, 467 bp, Homo sapiens
aatgcctaattgcacacagtcttaccaactcatatgttgtcaaacatctttatttttttcccatctgataagtgagcaacaattcctcagtgtagttttmattacatttctctttttgtgaacaagagattaagtaagtgtacttttacattatatgttctctgaattgtctgtttttatctctagcccattttctttctttttttttttttttttttttttttttgtagagatggggtctctctctgtcgcctaggaaggtctccaatttctgggctcaaaggatcctcacaaagtgctgggattacaggcatgagccaccttgcacagcctcagcccactttctctatagttttttccagagggaaggggggataattttttgtaatgtgattaaatttatcaaactttttttaatgacatgcatttttcatcacagctaaacatttttctcactcagaatatag

SEQ ID NO: 108562 - DNA, 467 bp, Homo sapiens
aatgcctaattgcacacagtcttaccaactcatatgttgtcaaacatctttatttttttcccatctgataagtgagcaacaattcctcagtgtagttttaattacatttctctttttgtgaacaagagattaagtaagtgtacttttacattatatgttctctgaattgtctgtttttatctctagcccattttctttctttttttttttttttttttttttttttgtagagatggggtctctctctgtcgcctaggaaggtctccaatttctgggctcaaaggatcctcacaaagtgctgggattacaggcatgagccaccttgcacagcctcagcccactttctctatagttttttccagagggaaggggggataattttttgtaatgkgattaaatttatcaaactttttttaatgacatgcatttttcatcacagctaaacatttttctcactcagaatatag

SEQ ID NO: 108563 - DNA, 582 bp, Homo sapiens
aaattccagcagacattttctacatttattggaaaatgtacatgaaaacacagatgacctagaaaagccaatacaatcttgaaaaagaacaaaacttgaggatttacacaaccaaatgttaatacttagaaaaaasctacaataactaaggcaatgtggtatatacaccaatggaacagaataaagacagcccagaattagacccacacatattgtcaccaatttacataccactgaagttcaaaggggaaagaacgaccctttcccagtccccataaatggtgctggatcattggaaaactatatggagaaagaggaaccttgactcttaaattccacaatgcacaaaaatttttttttaacttttaagttcaggggtatatgtgcatgttttttacacaggtaaacttgtaacatgggcatttattatacagattatttcatcaccccatgtgatggttaacactgagtgtcaactggattgggttgaaggatgcaaagtattgatcctgagtgtgtctgtgagggtgttcccaaaggagattaacatttgtgtcgctgggctgggaaaggcagacccac

SEQ ID NO: 108564 - DNA, 582 bp, Homo sapiens
aaattccagcagacattttctacatttattggaaaatgtacatgaaaacacagatgacctagaaaagccaatacaatcttgaaaaagaacaaaacttgaggatttacacaaccaaatgttaatacttagaaaaaagctacaataactaaggcaatgtggtatatacaccaatggaacagaataaagacagcccagaattagacccacacatattgtcaccaatttacataccactgaagttcaaaggggaaagaacgaccctttcccagtccccataaatggtgctggatcattggaaaactatatggagaaagaggaaccttgactcttaaattccacaatgcacaaaaatttttttttaacttttaagttcaggggtatatgtgcatgttttttacacaggtaaacttgtaacatgggcatttattatacagattatttcatcaccccatgtgatggttaacactgagtgtcaactggattgggttgaagkatgcaaagtattgatcctgagtgtgtctgtgagggtgttcccaaaggagattaacatttgtgtcgctgggctgggaaaggcagacccac

SEQ ID NO: 108565 - DNA, 601 bp, Homo sapiens
aactgcgttttagcatttcttataggacagacctggtgttgatgaaatccctcagcttttgtttgcctgagaaagtcttaatttctcttttatgtttgaaggatattttcactggacatactattctagggtaaaagtttttttcccagagcactttaaatatgtcatgccattctatcctggcctatacagtttccactgaaaagtctgctgccaaacacattggagcacaattgtatgttatttgtttcttttctcttgcttattttagaatcctttctttatccttgacawttgggagtttgattattaaatgccttggggtagccttctttagttcaaatctgtttggtattctttaaccttcttatagttaaatatcgatatctctctaggtttggaaaactctctgttatcactgcttcaaataaactttctacccctatctctttctctacctcctctttaaggccaataactcttagatttgcccttttgaatctattttctagattttataggcatgctctattctttttctttcttttttgagacagagtctcactctgtcacccaggctggggtgcagtggtacaatctt

SEQ ID NO: 108566 - DNA, 542 bp, Homo sapiens
agtggggaagaccatatattttccatttctacagccctgccctggaacacacacaagcctgtactgaraatcacctgtgagaagccaaacagaaagtcagcaaaactgttagaaccactggctatttgatgaatagcttgatggtactgattccctcctcaagtagggaacaataaatgggtaacttgttccccatattcatatagataatagctccagctttggctaatatgtccctccctaataacggtgtgggactttcaggcataacaagaaaggcatgtgaaaagaccaaagtctcccaattacaactgaggaggtgggagaaatacctggttacaagctgtcccaggattcctaggatggtaacggaccttgaggacagctgtccagggcaggagattaacactgagaaggccatgccagtgtccaggaggaagtcaatttcctggccctcaatggttaaacgtacctggggctcagtgagggtgatgacatgagctggcgcttaccccaggcaccctcagttctgttgttggatc

SEQ ID NO: 108567 - DNA, 542 bp, Homo sapiens
agtggggaagaccatatattttccatttctacagccctgccctggaacacacacaagcctgtactgagaatcacctgtgagaagccaaacagaaagtcagcaaaactgttagaaccactggctatttgatgaatagcttgatggtactgattccctcctcaagtagggaacaayaaatgggtaacttgttccccatattcatatagataatagctccagctttggctaatatgtccctccctaataacggtgtgggactttcaggcataacaagaaaggcatgtgaaaagaccaaagtctcccaattacaactgaggaggtgggagaaatacctggttacaagctgtcccaggattcctaggatggtaacggaccttgaggacagctgtccagggcaggagattaacactgagaaggccatgccagtgtccaggaggaagtcaatttcctggccctcaatggttaaacgtacctggggctcagtgagggtgatgacatgagctggcgcttaccccaggcaccctcagttctgttgttggatc

SEQ ID NO: 108568 - DNA, 542 bp, Homo sapiens
agtggggaagaccatatattttccatttctacagccctgccctggaacacacacaagcctgtactgagaatcacctgtgagaagccaaacagaaagtcagcaaaactgttagaaccactggctatttgatgaatagcttgatggtactgattccctcctcaagtagggaacaataaatgggtaacttgttccccatattcatatagataatagctccagctttggctaatatgtccctccctaataacggtgtgggactttcaggcataacaagaaaggcatgtgaaaagaccaaagtctcccaattacaactgaggaggtgggagaaatacctggttacaagctgtcccaggattcctaggatggtaayggaccttgaggacagctgtccagggcaggagattaacactgagaaggccatgccagtgtccaggaggaagtcaatttcctggccctcaatggttaaacgtacctggggctcagtgagggtgatgacatgagctggcgcttaccccaggcaccctcagttctgttgttggatc

SEQ ID NO: 108569 - DNA, 542 bp, Homo sapiens
agtggggaagaccatatattttccatttctacagccctgccctggaacacacacaagcctgtactgagaatcacctgtgagaagccaaacagaaagtcagcaaaactgttagaaccactggctatttgatgaatagcttgatggtactgattccctcctcaagtagggaacaataaatgggtaacttgttccccatattcatatagataatagctccagctttggctaatatgtccctccctaataacggtgtgggactttcaggcataacaagaaaggcatgtgaaaagaccaaagtctcccaattacaactgaggaggtgggagaaatacctggttacaagctgtcccaggattcctaggatggtaacggaccttgaggacagctgtccagggcaggagattaacactgagaaggccatgccagtgtccaggaggaagtcaatttcctggccctcaatggttaaacgtaccyggggctcagtgagggtgatgacatgagctggcgcttaccccaggcaccctcagttctgttgttggatc

SEQ ID NO: 108570 - DNA, 504 bp, Homo sapiens
gaagcctacttctgtcaactcaaactcattctccatccagttttgttcccttgctagcgaggagttgtattcctttggaggagaagaggctttctggtttttgaaattttaagcctttctgctctggtctctccccatctttgcagttttatctacctttggtctttaatgttgggacctacagatggggttttagtgtggatgtcctttttgttgatgttgatgctattcctttctgtttgttagttttccttctaacagacaggcccctcagctgcaggtctgttggagtttgctggaggtccactcccaatcctgtttgcmtgactatcaccagcagaggctgcagaacagcatatattgctgcctcatccttcctctggaagcttccttccagagggtcacccacctgtatgaggtgtctgtcagcccctactgggaggtgtctcccagtcaggctacgcaagggtcagggacccacttgagtaggtagtctgtccatta

SEQ ID NO: 108571 - DNA, 504 bp, Homo sapiens
gaagcctacttctgtcaactcaaactcattctccatccagttttgttcccttgctagcgaggagttgtattcctttggaggagaagaggctttctggtttttgaaattttaagcctttctgctctggtctctccccatctttgcagttttatctacctttggtctttaatgttgggacctacagatggggttttagtgtggatgtcctttttgttgatgttgatgctattcctttctgtttgttagttttccttctaacagacaggcccctcagctgcaggtctgttggagtttgctggaggtccactcccaatcctgtttgcctgastatcaccagcagaggctgcagaacagcatatattgctgcctcatccttcctctggaagcttccttccagagggtcacccacctgtatgaggtgtctgtcagcccctactgggaggtgtctcccagtcaggctacgcaagggtcagggacccacttgagtaggtagtctgtccatta

SEQ ID NO: 108572 - DNA, 604 bp, Homo sapiens
tctagttccagttttaccacagacttgctataggaccttgagtaattccactcttccttctggggctcagtttcttcatctgtaaaacgagaagactgaactagcttgtatccaaggtcactccaatccaaatattcttaatttctaagttgacttctctggatcccttccagcaacatgaaagtttaaaatctccaggtccgaattattacttggttcatttgagttcagagyatataaaatgtctctaagagtgtgcaccagagtctcatgctacagcagtggaactataaattggcttagctacttaactgtctgcccacacatatttctcactatgacttctttaatcaggtccagtgcaactaggtaagggagagacatgttaaaataataagtagtcaccttagcatctggtcacatcagagaagtgtcgcatgccttttattcaccacagggcctctctataaataattttccacctctttcatcctcctaccattacactcaccaagaaacatgtgctgatgccatagacacatatgccaatgcagcagcagtactaagatgaacaacacatgttccttgccttcttagagctagt

SEQ ID NO: 108573 - DNA, 563 bp, Homo sapiens
catgaataatggagaccagcatgtatgctaccaactagaaaaagcaagaagttcagttaggctggaatacaagtgcaagcagtgtctggtgcgtggggatgctagattgcagttggaataaattaatatctsactgaggatcttggaccttattatatggtgtggtagtgataagcccctgcaagaatcagagctccctatatccctgttgtgattctgggcttggctaatggtacgttagcaaatgtgatacaagcaaagcctgagaagtacttccatattggggcttggcttctcttgctgcccttaggaaccctaagatcacatatgaagaagccaaggcttagcctgccagaggatgagagaccaggtacaccaaagacaagctgtcctcaaaaggctcccataccaaccagcctacccaccttcacacccatgaatgaagccatcctagacacaccagccccagcagaggtgacccacaccagaaggatctaactaaccctcagaattatgataaataataattctttgttttagtccactaagttttagagcggttt

SEQ ID NO: 108574 - DNA, 513 bp, Homo sapiens
tcttttttgcttttattctctttgcttttccattttggaaatatctattgagatagcctgaaacgcagatttttttccctctactgtgtccagtccattaataagtccaccaaaggcattcttcatttatgttacaacatttcatgttacacttatttttaattctttcttagaatttccatctctccacttacgttgcacaactcttcctgtatgttgcttagtttaaccattagggcccttagcatattaaccatagtttttattaaagaattccaatctgataacttcaatatccctgccatatctgagtctggtttagatgttttaactgtttcttcaaagtatgtttttgtcttttagtatgccttcwaattttttcttgattgcagggcatgatgtattgggtaaaagaaattgctcttagtaggcctttagtaatgtggtgatatggtggggaggtgaagcattgtgtaggcttctgagtaggtctcggtcttttgatgagcctgt

SEQ ID NO: 108575 - DNA, 607 bp, Homo sapiens
tttggcttcagtgcctggaatacttatgggaatggtaaatgcttattgaaatgatgcaggaataatacagatgtttgtccacattggaccaaattcctgggctgtgaacatgtacatgaattgggattgtccatatttcatcccaggtacaagaggaagactgagctactgagttagcttcaggacagaactggagactgagaatcacccttctctcataatatggcatgtatgttttgggtgtcagyggcctctacataggcattttaggatccataactttaattcacaaataaatctatgaccactaaaatgttcagaactattgctctatgttctccctgtatgatctggcttattcatgacagtctaagtcatatcagagacagaatcttcagtacagattacaaccaaagttataattagtgtggttagttaatatcaagtatttcctttgcctctagtgttacaagatgaggatgaacacgagacagcatctatgtgattccaacaatgtacagcaaatattgctgagttacaataaatgaaagtataagaaaaagaaaccaattttaactgtaattataatagttaccttattaatact

SEQ ID NO: 108576 - DNA, 531 bp, Homo sapiens
ccattggcttttctcatcattgtctgatgtgtttctttaaaagttccttacatagttacttttgatcattcagaagaaggcatgcctgctggggccccaaggatttgttgagcctttctaaactgagccatgtggacacatttctttagagttgatgccagtcattcacgtgctccccaaacagaaggtgggggtccttgaagtccagaatacagtttacatgtgcaggaggaaggcttggaacttgtacttggatgaaatgagacaacggtgaaatctataccaatggaacgtgatacatgytgtgagagagacattgaacagagagataacatagtctgagaggaaggcagaagagatagtgcttcaagtggaagggtaaaggaaagtttagcatttgagcttcgctatgaaaagcttcagcaactgaatgaaagtgggcacaaggtcaggttcaaggtacagcagaggatatagttgggataaaggcatgagcatatgtcgagcaccctgctcagtaatatcaatctg

SEQ ID NO: 108577 - DNA, 597 bp, Homo sapiens
tttggccattttatggatgaagacatttaagcttaagatcgtatagctaggtaagtggcagagctcagattcaaaactatatatatacacgtatatatatgtgtgtatatatatacgtgtatatatatgtgtatatatgtgtgtatatatgtgtatatatgtacgttttatatatacacatatatacatatataaaagtctatgatatatacatataaaagcccatgatcttcacatacatataaatgcatattactatgatctctactagtgattaatacatatccaaattattatgtaagagagttggagagagacatggcttattaaattcatactaaaatgaaacaaatcattttttatcattaccatttagtactacttcctgattcatctttayctacacttttattgactggaattttattcttcctttcatgacctaaacttgaaatgccttcttagtatctacctaaaggaaaagagagatgaaaaattgttctaagtatcgatacactgaaatataaaagttaaaaaaaaacaaaccactgaaaatattggtctgtccttatgcataaaatacatattaaaacacat

SEQ ID NO: 108578 - DNA, 514 bp, Homo sapiens
ttgttagttatacaaattcattatgtcctcttaaagttccccatgtctccattgactcacagaagaatgagatcctcagataaaaataatatctgtggaataaattattaacagtcaagcaagcccgccctctcccaaggctagttggtgatgttgtttctgtgccattctatcttcagggaagagaaaaataagaattattacattctaactgaaagacttgttgctggtggcaatatttgtcttaaggaaaaagtattttattttagaacttattaacaaatttagttgaaggcaaacaagcaagagagctaaaatctctgcaaagtgaaaataaaacaacaaaaagattttagagtttctttggcagccaaagagagccggagaggaagggaatctgggaaccaagaagagaggggaaggcataaaattccagagaaaaacgtggaggaggaaagtcctgagcgaagayggcaaagaggaaattcctagtgtgatactggctagagaattc

SEQ ID NO: 108579 - DNA, 573 bp, Homo sapiens
  misc_feature (1)...(573): n = A,T,C or G
cagaaatgcagactcttctggccatgtccctccccataaacttctgcatccaatcagtcactaccacctattaattctacttcctgtttatgcctcaaatccatccactttctccctctccattcaactaccctcatccaggctaccatcatcttttacctgaactatagcaagtatacttgtcttggagtatgtacctctcacctgtgtctccccgactctgcatcttgagggagcatatttaagacacatgatcattatgtcactcctgttacttaaaagcctttcaatagtttcccactgcatttaaaataaagtccaaatcttatgtccatggttgacaaggctctgcatgaactgacccacctacttctctagcctcatctcttacaaatgttctaattcttggcttctactaggctcttmtcttggatccttgaataggatggagaaactttcttcccanagccttctctagtactccagacaagatcaggtcattgtgctatgtccccttatatcccttgttacagcacctctagaatcttaaatacaagtgttaatagctatttc

SEQ ID NO: 108580 - DNA, 559 bp, Homo sapiens
ttttagtgtgtctttttacaactaaatgtcctgtctatagctttataatgaaaaataaaaaagaagctcaagtattcttcaagtttttaggrtaatttcctacatcattccccaaataaaaacttgatccagccaaatattaaattattgaaattacaaatctgttaatctacagcacattttactcattagtgtaattttaaaattcactttcatttgattgactgttttaatcttccttaactagtgagtaactgaaaataaatggtgcattcctaatactataaatatgaaaaataggaagtagttagggactgcaggcgaatacattaaaatgagtcagttttctagttaacatattctcattctgtttgtgtacaaacccactgcattgagaagacagatcacaaattcacggcctcacaaaaacatggtctcgatttcatgttatgacagcagaaattggcccaagtctctaaccatttcccctaaaggaccctggctggctggtgccatccaggtgaggcaatctgaacgaggggaacatcacgtcaaattc

SEQ ID NO: 108581 - DNA, 642 bp, Homo sapiens
ctgggttcctgactaagaagaactggaaactctcatcactggtcaagatgaacctgtcatcactggccattcctatacaagtacagaaatgcatgaaaacttttagatcaccttgtacataatgtattgaaaatataatcaggagttgtgataggtgaatgatgggaggacctctagtttgggcctaaagagatgatgtttaggctaaactcaggcaattaaaagaaattaactgtctttcaggggcatgcattgcagaagaggaagcttatacaagtctctaaggcaggaacaaacttaggggacagacacaaagacaaccatggctgaagcctactgccrggaggggtgagggaggcaagggcaggcactggcaaggtccgcaggacccaggccctatgcagcttctagggagaggggtctggatttctttgcaaatcagatggacagcccctggaagcttttaaccaggagggtgatgtgatcaacttagattaaaaagacaacctccagatggtctatggagaacacccgaaaggggaagagaatacaaatatgaaggccaagcaagaggctgctgtagtactccaggcaggatgtgatggtagctttcaccaggctggacatagtggagagggagga

SEQ ID NO: 108582 - DNA, 470 bp, Homo sapiens
acagcatggaggaaccttaagggcatactgctagtgacatagtcgcaaaaggacaaatactgtatgattccacttagataggtcgctagagcagtcacattcacatagacagaaagragaagggtggctgccagggctggggaggggcaatggggaagggagttatttaatgggtacagagtttcaattttgcagctgaaaagagttctggagaccagctgcttctctgccttgcctgtgttggttgtgccgtgagccacacaaatgaaaggtaagacatggagccaaagtggccactgggaaacagtaaaagaccaacataggcaagggagagaagcagcaagggctggcaggatccagaccaactcgcacttcaggcgcagagcagatgtgcctgaaaacgcagcacagccactccacgtggaactgaccctgcggcgttagagatcctctgtcttataggggaattc

SEQ ID NO: 108583 - DNA, 611 bp, Homo sapiens
acttttatttaaagaaatgaagatatatctataaggacattcagcttagcatataagagcaaaaaattgaggctgagcatggtggcccatgcctataatcccagctccgtgaggctgaggcgggaggatggcttgagcccaggagtttgagaccagcctaggcaacctggtgagaccttttctctacaaaaaattttaaaaaaatcatccaggcatggtggcatgcacctggtagtcccagctattcaggaggctgaggtagggggattgctcgagcccaggagtgcaaggctgtggtgagctatgatcacaccactgcactccagcctgggtgacagagcgagactcttcctaaagaaagcaaaaaatctggcaacaacaatgggggataataaaattaatgtcagacagtcacaacaaagtactatcaacagtgatgtmgacgtgcatatgtacatggaaacatactgacaatatcggaaggtagaaaagtagaaaaaatcaggtaacaaaatgtatataacatctgttaccatttttgtgagcagaaaagaaatagctcggtaattggaggctttctagtgccagacactattccaagtactgtactt

SEQ ID NO: 108584 - DNA, 598 bp, Homo sapiens
ttcttttatgacatttcattttatgataaaacttctgctgaagtcaccatcctttgtgaaactctgtgcatatatacatatataatgtaaatatataagctgtatagacacagctttaatttttttaatgtttgttcactgaattggcttatcactttttgccctatttaaacaataagaaaaacattacaaagtctttccttattttaaatttttttcataattttaatcactgtatcaacttgctttcaaattttaacatagtgattatttcatataaaatatgattatatatacaacatataaacactcctacatatttaaacaatgtgtttgtgtatatatccatctttgtctctgcatacgcatacatataggtatatgaaacatgtataattttactggaaatagtgacttgagttgtctcacctaggatagtaatgaaatgttttttgcagtctcttatgaaccttctaagcaacctgaaactaaagacactctttattagctaattagagcatttcttcttctttttttgaagtaaaagttatttttaataggcaattgygtgtcgttagaattaaaaaaacaaattctc

SEQ ID NO: 108585 - DNA, 622 bp, Homo sapiens
tttgctcttgttctatcacaaaacttatcaggcacctacagtaatgcaagcaatgggcaaacacataaaatatcaaatcaaaaaagaaaatcacagcaagtttctcagagatgctattgcttcaacaattggccgggtcattaaggactccctgagcacccaagccctctgctagctgccatcaaaatgmccttggcagaatgcatggcataccttctgctcactccatttcctcgcctggaatactttcgtatgtaaaccccttctcctcattttttgtggcctaacctaattgtacgtcttcacctgctgtgagatttttccaggattcctgctctcacctttccaaagccctacagcacattgtgcttttctcatggggcaacttttcagttattttaaatgaatatttaaggtaatgaaaaataatttaaattacatagatgtatgtataatgaagagtgaaagaccatctttatcccaactctactcctatttctgtctccagaagcaagtcctgtcaacaattttgtgtgtgttcacccagagctttctttgggcatttgcacacatgcatgcatgtgtacacacacatataatagaagttttttttttaaataag

SEQ ID NO: 108586 - DNA, 412 bp, Homo sapiens
tggtatttttaaaaagctctctgggtaattctaacacacggccaaggtaggttataaaccaccattccaggacatctctatgagttaaatgtcattaatatcttcatttaactgaaggcaaaatcaaggcatggaaaggtcacttaatttgcccaaagtcacacaataagtaagggacaaagctaggattcaaatgcaggctccagagcctaaaatgcatggcttctctattaccttgtgtagaactgaatcctaagcacacagcagaattcctattattcaacaaatgcttgttgaatggataaatgaaggaataaatgaatgtcaacacctatttgtgatataggctttcattaaaatattgatgggtatgggcttaatattacsttttaatttacaaagtactttcata

SEQ ID NO: 108587 - DNA, 613 bp, Homo sapiens
taggtgaattattggaattgttaaatgaatatatacgtacatatatacatgtctgtatatatatacatatgaaatgggagagttccctgacctccttcacgggacgtgcaacagggatgtggcttttctgttcggccaccaccgtgcatgctcaaaccccttacaggagggggagcactcagatgggcaggtgcaggagccggggcaagtgctttttggctccggttccacggtagcatctagggatgggtgcctgcaactcccgaagccccagtgggcatgttacagtgctcctttagctctgccatccacagaggacttaagtgataaccagttcagtacccacttggtatccgggttcttgtccagtgtccaggaagaacaaggtcccmcatggacttgaaggatggtgaatgtgggggttttattgagtgctggaggcggctcaatgggatggatgggatgctaaataggggatggggtgggaagatgattttccccagaaatttggctgtcctgtggctgatctgccctccaaccatccccagctgaactcttctagacgttcagatgctccttctcttctctccttctccctactcttttgttctgt

SEQ ID NO: 108588 - DNA, 613 bp, Homo sapiens
taggtgaattattggaattgttaaatgaatatatacgtacatatatacatgtctgtatatatatacatatgaaatgggagagttccctgacctccttcacgggacgtgcaacagggatgtggcttttctgttcggccaccaccgtgcatgctcaaaccccttacaggagggggagcactcagatgggcaggtgcaggagccggggcaagtgctttttggctccggttccacggtagcatctagggatgggtgcctgcaactcccgaagccccagtgggcatgttacagtgctcctttagctctgccatccacagaggacttaagtgataaccagttcagtacccacttggtatccgggttcttgtccagtgtccaggaagaacaaggtcccccatggacttgaaggatggtgaatgtgggggttttattgagtgmtggaggcggctcaatgggatggatgggatgctaaataggggatggggtgggaagatgattttccccagaaatttggctgtcctgtggctgatctgccctccaaccatccccagctgaactcttctagacgttcagatgctccttctcttctctccttctccctactcttttgttctgt

SEQ ID NO: 108589 - DNA, 582 bp, Homo sapiens
tgaattctgggtgtatacaagtcatacttgttgagcaacagtgggaaagtgcttcagtgggacatcagaatattgtatgtgtggggtagggttactaaaaggccatctttttcttcattatccatttactcaccctgcaaaccttcaagaactttctcatgctcccttttcagagaaaatgctcagagatctatgaaargggtagcaaaccacgtgagacctcatctcctctccagtcacaggtgacttaaccataggtggataccacactcaaggcagtgtgtttggaatgcatttgtgtacatgaaaaacccaggcattctttaatttaggagtatgaaagttggagttacaaactaacgttagtcagtgtctgatggacttgtgaatggtataaagctggagatcatggtggccacatgcatgctaaagcagtgaaagtcagtagtttttgaaaagataaaaccagatgtgcagagagaagcaatcaggagaacgtgcagttctggggagataaaaacataactttagtttctgagttctggcccctcatgaagcctgactgttttgtgaacacttctg

SEQ ID NO: 108590 - DNA, 523 bp, Homo sapiens
tttgtgagtcagaaaaaggggtaattactgccaactgcacccacctgtttatccttggtaaggggtagtctgccaggatagtaattacatcttaattccaggcgacaagacccagataggcagtgagctctccattcacaatgacctagcttgaagaaggctccagcacctgagagggagggctttttatgccattaaagggtcccagctgttttccctaccactactttcagaaccactgatgattctkcctttgcatggtttgcttgaagtatgggtttccaataaaatccctgactttgtgagaaggtgaaagggtgatggaagaattttgaaggaagttgtagtatgggacagggagcacaatttgggttgaggacctattataaccacttggcactgtgcagtctgaggcccaaggtctgacctcataaagtgtgatcacctgtggctgaggccatgtaaaaggcatgctggccttgcactggttatctggaagccagaaaaatatgtttgacacaag

SEQ ID NO: 108591 - DNA, 699 bp, Homo sapiens
gtgacacatgtctatatagacctagctacttgagggactaaggcaggagaatttattgagcccaggagtttgaggttacaatgagctatgatcacaccactgcaytccagcctgagtgacatagtgagaccctgtctctaaagaaaagaagataaaagaaattgaagatgacacaaataaatggaaagacatcccatgctcttcaattggaagaactaatattgttaaaatgaccatactgctgaaggcaatctacatattcaacaaaattcctatcaaaataccaatgtcgtttttcacagaaagaaaagaatcctcaaatttgtatggaaccaaaaaagatcccgaatagcaaatgcaattatgaacaaaaagaacaaagctggaggtgtcacactaactgacttcaaaatatgttacaaggctatagtaaccaaatgagcatggtattggtattaaaaacagacacatagaccaatggaacagcatacagaacctagaaacaaatccaggtatttacagccaactattttcaacaaaggcgccaagaacataccctggagaaaggacatcctcttcaataaacagtgctgggaaaatttaatacccatatgcaaaagaatgaactagacctctatctctcaccatatacaaaaatcaactcaaaatgtagtaaagacctaaacataagacctgaaa

SEQ ID NO: 108592 - DNA, 699 bp, Homo sapiens
gtgacacatgtctatatagacctagctacttgagggactaaggcaggagaatttattgagcccaggagtttgaggttacaatgagctatgatcacaccactgcattccagcctgagtgacatagtgagaccctgtctctaaagaaaagaagataaaagaaattgaagatgacacaaataaatggaaagacatcccatgctcttsaattggaagaactaatattgttaaaatgaccatactgctgaaggcaatctacatattcaacaaaattcctatcaaaataccaatgtcgtttttcacagaaagaaaagaatcctcaaatttgtatggaaccaaaaaagatcccgaatagcaaatgcaattatgaacaaaaagaacaaagctggaggtgtcacactaactgacttcaaaatatgttacaaggctatagtaaccaaatgagcatggtattggtattaaaaacagacacatagaccaatggaacagcatacagaacctagaaacaaatccaggtatttacagccaactattttcaacaaaggcgccaagaacataccctggagaaaggacatcctcttcaataaacagtgctgggaaaatttaatacccatatgcaaaagaatgaactagacctctatctctcaccatatacaaaaatcaactcaaaatgtagtaaagacctaaacataagacctgaaa

SEQ ID NO: 108593 - DNA, 699 bp, Homo sapiens
gtgacacatgtctatatagacctagctacttgagggactaaggcaggagaatttattgagcccaggagtttgaggttacaatgagctatgatcacaccactgcattccagcctgagtgacatagtgagaccctgtctctaaagaaaagaagataaaagaaattgaagatgacacaaataaatggaaagacatcccatgctcttcaattggaagaactaatattgttaaaatgaccatactgctgaaggcaatctacatattcaacaaaattcctatcaaaataccaatgtcgtttttcacagaaagaaaagaatcctcaaatttgtatggaaccaaaaaagatcccgaatagcaaatgcaattatgaacaaaaagaacaaagctggaggtgtcacactaactgacttcaaaatatgttacaaggctatagtaaccaaatgagcatggtattggtattaaaaacagacacatagaccaatggaacagcatacagaacctagaaacaaatccaggtatttacagccaactattttcaacaaaggcgccaagaacataccctggagaaaggacatcctcttcaataaacagtgctgggaaaatttaatacccrtatgcaaaagaatgaactagacctctatctctcaccatatacaaaaatcaactcaaaatgtagtaaagacctaaacataagacctgaaa

SEQ ID NO: 108594 - DNA, 607 bp, Homo sapiens
tgctcgggtccacttccacagtgtgaaagctttgtactttcgctgtttgcaataaatcttgctgctgctcactgtttgggtccacactgcctttatgagctgtaacactgactgcgaaggtctgcagtttcactcccgaagccagtgagaccacaaacccaccaggaggaatgaacaactccagatgcgccaccttaagagctgtaacactcaccgcgaaggtctgcagcttcactcttgagccagcgagaccacgaacccactggaaggaagaaactctgaacacatccgaacatcagaaggaacaaactctagacacaccgcctttaagaactgtaacactcaccgcragggtccacggcttcattcctgaagtcagtgagaccaagaacccaccaattccagacacactgtgacagtgcaggcagctccaggtgccaccacaggcaccggctcaggggccagctctttgcaagactgtggctggatcagatgtactgcaagcagcttctgttgtgggtacccatgtctgggcaagggaaatgagttggtgcccggaagcttggagacaccaggaactgcacacccccaaagagggtgtcacagc

SEQ ID NO: 108595 - DNA, 508 bp, Homo sapiens
ttacaattaagtagcattttcgtggaataagtgctgaattaaacctagatattgaatgtacctcacatagatttcctttagagggcactattgattctctgaaaccatggaaacctttcttcatgttttcttggtaaaattggccaattttgaaatcttattgggtttcaaatctactccatatagtacaaagtactatactcgttaccaattccatactttgaagattgtccatgtacagaataagaagttacaccagaatgttgtttgttatgacaagtcatcaacacaatacatataattctatatttgaaaacctcaactggtttatttgcttttgaaataaaccagttcaaatgggaatttccttttgtaacttgmtgcaaaatttaaattaaacaattcagtcttttttgtttagaaagacaaattacttctttggaaactaatgtttcattctagaaatgggtaattatttacatatatttagaagaaaccatatttatgg

SEQ ID NO: 108596 - DNA, 237 bp, Homo sapiens
  misc_feature (1)...(237): n = A,T,C or G
tgcaagcaatgtattttctctgagcttccgttttctcatctgtaacatggagatacttaataatggcattgatctcacagggtggttttaagcacttaatatataayagatattaagtatttaacataaggcctagcacaaaataagtgccctaaaaaaagtattagtctgactgatagtgttttctgaggtgccatgtggaactcanggtgaatgagctcttacatcagaagtgta

SEQ ID NO: 108597 - DNA, 589 bp, Homo sapiens
aagggcaccttatggacacacacaaacccagttttaggctgcaaaacgggagaaagtagtayggtacttcaaaacctgtctgcagtacagaacaggcttgaagctgggagctcaactccccaaatatcacatttatctcaatttggcaagaagctgaaaacctatctgggaccatttaaattctaatgttattaagggctcatctaatcagcttttaaaataagctgcttcaaatgcatgggaaatgaaggtgagatagaagcaggcaagcaaggcagttcaggccagcctgtgagcacctgggtttgaattgccaaggagccatgaggggacctggctgcctacctatttggtaactcctgcaattccaacaccaagccatgctagtgaaaagtgatttgtaagtgtgtggggaaggggactaatctggacaagctatgttctcctgtgaggtggttcagacacatgtgacaggcttggccgggaaagatggactgccctctgtgccaggaggtggctttgagatttaatcagcagggtttgtcaaatattcttttatccacacaagtgctttccctgagcagagtgc

SEQ ID NO: 108598 - DNA, 595 bp, Homo sapiens
agcaaagcaaagggagaaaaaagtatctgtaaggggttccttgtgtcaaataaattaaagaatcatagaattaaatagcattagatttctttacagaagaaattttcagtctttaacatgcaaacatgatttgtgaatcattaagatagatatagakgtatatgtaaatatagatttagaattgatatatagataaagatacagattataaatatagataaatgcagaaatgggaggcagcatcaagtggtattaaaagaacagattctaaacctggactgccagagtgaatcctgactccaatagttgctctcttgtttcagtttcctcatctgtgaaatgggcaaaatagagttgtgatgattaatttaactaatacctacaaatcacttagaacagaacctatgacatgatcagtgttcagtaactactacatgaaaatactagtatctagctgaatttggcatgcagagaatcctgaatgtaaaaccaaagggccttcttttaaatagcatcttatgagattaatattacatgaaacactctttgtaaagtgcttcccaaggatgtagagcacaggttggaataggtggag

SEQ ID NO: 108599 - DNA, 604 bp, Homo sapiens
atagcatcttatgagattaatattacatgaaacactctttgtaaagtgcttcccaaggatgtagagcacaggttggaataggtggagaaactgggtagggtctagaatatggaagaagagttttgtataatgtcactgatggaggaaagatgttttctctggaagaatttgatccttgccattgtagtctcatcaccaagaaggcacaggttggtagcccaaaagcccagaagcccagggttagcaaataagtgatatgcgtgtctttacttctgagttttccctcatgacagacattgctaattgatcacagcacactcgcctgccaaccttctcacagtactttgtgcaactttacaaaaatgatggaatatgtatgtgagatacagcctattttatatctattatataatatatctattatatagatataatatagataatgataacattataatatagataatgatattatatctattatcatttagtggtgaaaaatgtggcagtacttcaycacaactgtttctgaaaccccaagcaatagtttggacaacaaattctattgcaccaacaaattctcagccagctttgtttagaattg

SEQ ID NO: 108600 - DNA, 583 bp, Homo sapiens
caccaaccgtgaggggtcagttaattgtcatgttctggaaatgtaagctgtgagttcaagagcagacacagttttcttttatctttaggtattagcaactggcacaagaacaagcacagagtccttgataaatgtttgttgaatgaaagaacgagtgaatgaagtccactaggctgcactgtggtgatccraatcagcttccaagatgaccgcattaatcagacctatttaactgtcatattatttatgtcacatggatacaggaaagtgaaaaaaatgaaaacagctcttcccagactttgcctttgtggcctggctaggagaccggaagggataaaacttttcttgctgaacataatgaaccagagttaattttatccatgttagttttgggctcttgcacacacaacaggagacccttaatggccatccaagttgtatcttattaaatttaaaaagataaaatgaatcgcaggaaccataagctcatatgctaccacaggccaaagaggaacatgctgattaaagtttactcagcaaagaacagtaacattctgtatcccaggcatatgaaaacaaatgt

SEQ ID NO: 108601 - DNA, 536 bp, Homo sapiens
ccttgtcatataggagcatccctattctgggttgttgctgtgaacaagtactccctgctgaggagtggaagctgcagctgaaatattcccacctrgcttttcccccagcccccttatccccagcctttaagacaaataaggaataggccctgtatgtcccagctctgtgaggaagaggtatgtggaagcctttgtcctttctttcctcctcttcaacttgggtctctgcagcccactccccagcttcccgcccctggaaggtgacaccatgtttagagggtgccttaccaaagtgaccacttggggtcactgtgacttcgcccaaaggaggctgagcactgtctggcccgggaccccaggccctgtgcctggtcctttcctcctcagaagagctgcagggcgttgaaggtctggtgctgggtttggtgtttgtgcactggcccatcagggagtgcagacatagcgaggtggacattgagtgccgtggtcagtgctgacttgccagctggactccctctggagtctcagatttcttc

SEQ ID NO: 108602 - DNA, 536 bp, Homo sapiens
ccttgtcatataggagcatccctattctgggttgttgctgtgaacaagtactccctgctgaggagtggaagctgcagctgaaatattcccacctagcttttcccccagcccccttatccccagcctttaagacaaataaggaataggccctgtatgtcccagctcygtgaggaagaggtatgtggaagcctttgtcctttctttcctcctcttcaacttgggtctctgcagcccactccccagcttcccgcccctggaaggtgacaccatgtttagagggtgccttaccaaagtgaccacttggggtcactgtgacttcgcccaaaggaggctgagcactgtctggcccgggaccccaggccctgtgcctggtcctttcctcctcagaagagctgcagggcgttgaaggtctggtgctgggtttggtgtttgtgcactggcccatcagggagtgcagacatagcgaggtggacattgagtgccgtggtcagtgctgacttgccagctggactccctctggagtctcagatttcttc

SEQ ID NO: 108603 - DNA, 536 bp, Homo sapiens
ccttgtcatataggagcatccctattctgggttgttgctgtgaacaagtactccctgctgaggagtggaagctgcagctgaaatattcccacctagcttttcccccagcccccttatccccagcctttaagacaaataaggaataggccctgtatgtcccagctctgtgaggaagaggtatgtggaagcctttgtcctttctttcctcctcttcaacttgggtctctgcagcccactccccagcttcccgcccctggaaggtgacaccatgtttagagggtgccttaccaaagtgaccacttggggtcactgtgacttcgcccaaaggaggctgagcactgtctggcccgggaccccaggccctgtgcctggtcctttcctcctcagaagagctgcagggcgttgaaggtctggtgctgggtttggtgtttgtgcactggcccatcagggagtgcagacatagcgaggtggacatygagtgccgtggtcagtgctgacttgccagctggactccctctggagtctcagatttcttc

SEQ ID NO: 108604 - DNA, 602 bp, Homo sapiens
tatatccagtttcttttcagcatgctgcacttggtggttttcgataacttaggcctttyacatttaatttaaattaattatgaaatgggggaagtggcctcctagttgctgtgtaagcatgatatctgaagcatagtagacactcagtaaatgtgtgtcgagtaaatgaaatgaatggaaaatcttctttatccatgagaaagaaggggaagcatttcaataaactggagctttttggaaaaaaaaaaaagtgtcagggaaatgcaactgaccacaaaaagcttttgtccttcaactctttaaatccagaaaacccgaatcataatggattgaacatattaaaatgtgattatgtagcgcagagggttttagctgtgggaggtcttgtaatttgcattcacaaaatggcctgcctagaagaaggcagcctgagtgcctgatgaggacacagagcttcgcagtagggggttggtgtaggtcagaccttagcagaaggaaataattaaacaatcgtttcctaaaaacagcacacaggattgggagccaaccgtctattttgtagccactcttggattctgccctttgttggccacttggtagca

SEQ ID NO: 108605 - DNA, 558 bp, Homo sapiens
tttcacattccaaattggcaggaatttctccatgtgcttgggtataatagcatttcttgatatgataattatcatctagttgtctatatttatgtatctacctaactacaagagaaaatttgcagcagaatatctgtcttttcatttttgctttttactcttatcatactataaaacactttcataatagtttaaataatttcctgggggagttaatttggctaagtcatcgttctttttttggtgcttcagtttctctttgactctcatggaatgtttgcttttgccctttgggtgtttaaagaccacattttgtagccccagtgttctttctaattatagaagtgacataagaaaaacggaaagtawgtaagaagtggagaacagagtcattaagggagagtctagatcagagagatgtcaaagagtttcgttgggtatttaaggaaattaatgaataactcatctgggacttagagatagtgacttaagtcgtaattaatccattgatatagcacaaaataaaaaaaatactgtatttagaaaaaaatagtatgg

SEQ ID NO: 108606 - DNA, 558 bp, Homo sapiens
tttcacattccaaattggcaggaatttctccatgtgcttgggtataatagcatttcttgatatgataattatcatctagttgtctatatttatgtatctacctaactacaagagaaaatttgcagcagaatatctgtcttttcatttttgctttttactcttatcatactataaaacactttcataatagtttaaataatttcctgggggagttaatttggctaagtcatcgttctttttttggtgcttcagtttctctttgactctcatggaatgtttgcttttgccctttgggtgtttaaagaccacattttgtagccccagtgttctttctaattatagaagtgacataagaaaaacggaaagtaagtaagaagtggagaacagagtcattaagggagagtctagatcagagagatgtcaaagagtttcrttgggtatttaaggaaattaatgaataactcatctgggacttagagatagtgacttaagtcgtaattaatccattgatatagcacaaaataaaaaaaatactgtatttagaaaaaaatagtatgg

SEQ ID NO: 108607 - DNA, 609 bp, Homo sapiens
cactgggtggggaacatcacacaccagggcctgttgtgcggtggggggatgggggagggatagcattagaagatataactaacrtaaatgatgaattaacgggggcagcacaccaatatggcacatgtatacatatgtaacaaacctgcacattgtgcacatgtaccctaaaagtataaaaataaaataaataaaacatatgttcccatttccaaaaatatatatatataaatatatatatatatatagttatatgtgaatttgatcctgtcattatgattttagctggttatcttccccgttagttgatgcagtttcttcttagcatcgatggtctttacaatttggcatgtttttgcagtgactggtactggttgtttctttccatgtttagtgcttccttcaggagctcttgtaaggcaagcctggtggtgacaaaatctctcagcatttgcttgtctgtaaaggattttatttctccttcacttatgaagcttagtttggctggatatgaaattctgggttgaaatttctattctttaagaatgttgaatattggcccccactctcttctggctcgtagagtttctgaagagagatccgctgtta

SEQ ID NO: 108608 - DNA, 535 bp, Homo sapiens
gcccactgtgatttattttctctgaggttcccagggtatttttttcctccttttaaaatgcagcactgccatattcccacttgaggtcattagccccagcataggttaaaaacaaagtgtttgtgtccatccgtctaattgcacagaaaccatcaaaccctcattaccatcagcctaattattttgaaatctagcatattatcgtgttccacaattaggcagatgataagcatttgcctcacctgcccagggataggaggtaagcttggcatgagggaggtggagaggagggggccgtgggctgccttgtgaggaagtgagatgtctacacttgcaggagyccacccacccgcttctgatgatttcccgtcccccaacttgcaaagccactaacaagagtttcaccctaatgagcagggaggatgggacctgactggttgaaggggacagtgttacagaactggaaactaattgtcatcattcagctttctaggcataaataaaatgcctacctggatatagtgaaacagaccag

SEQ ID NO: 108609 - DNA, 355 bp, Homo sapiens
tgtttactttatttgcaactcaattgccatctgggtagattatttgcagggaaggtgagagaagagaaaaaaaaggaagatattttcatgaagagaaaaaaatggagctctttatttcttatttccttctttctagttgggtggctggggggtataatcaatrtcacagcgtatcaaataatgctgggagcagaaacactgacaatggaaacaaaaattcacatatccattcgagggagacaaaatgcagggatatacattagagagaaaaaattcaaacacttttaatagaagaaggaaagagaaacaaagaatctgaccaaagtagagaattatagacacaagtgtgaaagat

SEQ ID NO: 108610 - DNA, 555 bp, Homo sapiens
gcagaaactgagatgaccaggactttggctaagtatatctatacctatgatgaggttgtatttctcaatcccatcaaataataagtaacatttgaaaaaaaaaaactaatcttttttaacccaaactggtaagaaattatatttaccaccctctttcctacattgcccaatccctgatggagttggcctaaatgacctttggagctcagtttcctttttgctgtgatttattgggcacctgcaacttacttggcagaagacttgacccatggggctcatgaattttcacatttgtcaggaggaaggaacaaggaaccaaaatagaagcaagtattgcagtatggctgagggcttaaaacttaggtacttagaggaatagttataccattggtctgtataatgtaaaacagaggtgtacaatcttttggcttccctgggccacattggaagaagaattgtcttgggccacacataaaaatatactaaygccaacaatagctgatgaactaaacaaaaaaaaaatcgccaaaaaatctgataatgttttaagaaagc

SEQ ID NO: 108611 - DNA, 617 bp, Homo sapiens
aagttaatgaaagacttctataaatcaacacatttctcagtgtgcttagacaaatcattatgcctctatgaatctttaggtagaaaaataaaaaaacattcgtagttcttgtattataatccctttagtttatgcactcaccactgggctatatggtgtttaaataggaagtgttgaaagaataaccaaccactgaatgaaacgtgtgggtgactcattagatagctaacttccctttgggttaataagagaagttctaacatacatgatctaacatgatgaaaggtctaacatgtccaaagtagcagaagtctttaagcactagaaccaattctttctcatcactgtcaacaatatttgcaaagtattcttcctaagagtaactgatagaaaccaatccaaacctgtttctccctrgccaatcaaaatgttcaagggaaaatctgaagatagacacatttataagcaaccataaatggtgaaatgcatttgcaaatatatttaacacaaacgtaaaactggtcaatatccccagggtaataatcatttgaatcttcatctaacaaaatttatttgtatctttatcaatgagaattgttgtattactgtaagtaatc

SEQ ID NO: 108612 - DNA, 592 bp, Homo sapiens
tgaaagaataaccaaccactgaatgaaacgtgtgggtgactcattagatagctaacttccctttgggttaataagagaagttctaacatacatgatctaacatgatgaaaggtctaacatgtccaaagtagcagaagtctttaagcactagaaccaattctttctcatcactgtcaacaatatttgcaaagtattcttcctaagagtaactgatagaaaccaatccaaacctgtttctccctggccaatcaaaatgttcaagggaaaatctgaagatagacacatttataagcaaccataaatggtgaaatgcatttgcaaatatatttaacacaaacgtaaaactggtcaatatccccagggtaataatcatttgmatcttcatctaacaaaatttatttgtatctttatcaatgagaattgttgtattactgtaagtaatctacaaattagagaattgtaaaatatctaaaagataacaaaaaacataagcccatatagaatcaaataaccccagtaggaagccctagacagtgcccagcattccactgacaggacatccagtaattctttgcctgtttcaaaatcgttc

SEQ ID NO: 108613 - DNA, 527 bp, Homo sapiens
acacattgttgtactggggaaaagtctgtgatccaggcaaaaaggcattgaccttggagtttggggacccaggctctgattctggaactagcactaatgaactgtcacctcccccacactgtccctacatttctaaatctgtggatgagagaatagaataggacattttctaagagctcttccatttctaagtaaaargattggtagaaaatttaggcataggggaaacacacctgctaaatagatcgcaaaaccatttatttcactttatctccgctgccaagttcctgcttgaaattgttgtcacctccccgtaagcctcctgcactggcctcaacagaaagcttcatggcttttcttggcacacacagccctgatccagaatgatctttccaaaacactgtctgaagttgtcttttcctgaatacctattctgattgaattcatgaaacttatagctcattcatgttagagaataagtattgaacgtgggtgaaaagaagaaagaagagtagtagagattccaa

SEQ ID NO: 108614 - DNA, 528 bp, Homo sapiens
cagtgattgacggtggcctgaaatacggagttgtcagtaggatataagatacactattttaattggatactagataggtctcagtcccagtcacccaaagagttgcaaacccttcagagcatttttatatatatctggtttgcttaggaaatcgaaagctatttgaatctcactaacctcttccctttttaaaaaaatgttaatttttttaacactagaaaagtttatctgtagcaacaaaagagtacatttgaagctgagttgaaatgtagctgcaggaaaattgtycaacataagagaaaaaaaccctctaaaatactccaagcttcctagtatttctgagtgttaaattgtcagatgtattttttcattgttttcatgggggctataatcatcataatttgagtcaaaacaggtattttcaaggtcttaacatttcaacacaaatttgttaatatgaccaagaatattccaccaagaagtctacatctgctggtatgcggctccgtaaacttgggccggccactc

SEQ ID NO: 108615 - DNA, 528 bp, Homo sapiens
cagtgattgacggtggcctgaaatacggagttgtcagtaggatataagatacactattttaattggatactagataggtctcagtcccagtcacccaaagagttgcaaacccttcagagcatttttatatatatctggtttgcttaggaaatcgaaagctatttgaatctcactaacctcttccctttttaaaaaaatgttaatttttttaacactagaaaagtttatctgtagcaacaaaagagtacatttgaagctgagttgaaatgtagctgcaggaaaattgtccaacataagagaaaaaaaccctctaaaayactccaagcttcctagtatttctgagtgttaaattgtcagatgtattttttcattgttttcatgggggctataatcatcataatttgagtcaaaacaggtattttcaaggtcttaacatttcaacacaaatttgttaatatgaccaagaatattccaccaagaagtctacatctgctggtatgcggctccgtaaacttgggccggccactc

SEQ ID NO: 108616 - DNA, 528 bp, Homo sapiens
cagtgattgacggtggcctgaaatacggagttgtcagtaggatataagatacactattttaattggatactagataggtctcagtcccagtcacccaaagagttgcaaacccttcagagcatttttatatatatctggtttgcttaggaaatcgaaagctatttgaatctcactaacctcttccctttttaaaaaaatgttaatttttttaacactagaaaagtttatctgtagcaacaaaagagtacatttgaagctgagttgaaatgtagctgcaggaaaattgtccaacataagagaaaaaaaccctctaaaatactccaagcttcctagtatttctgagtgttaaattgtmagatgtattttttcattgttttcatgggggctataatcatcataatttgagtcaaaacaggtattttcaaggtcttaacatttcaacacaaatttgttaatatgaccaagaatattccaccaagaagtctacatctgctggtatgcggctccgtaaacttgggccggccactc

SEQ ID NO: 108617 - DNA, 528 bp, Homo sapiens
cagtgattgacggtggcctgaaatacggagttgtcagtaggatataagatacactattttaattggatactagataggtctcagtcccagtcacccaaagagttgcaaacccttcagagcatttttatatatatctggtttgcttaggaaatcgaaagctatttgaatctcactaacctcttccctttttaaaaaaatgttaatttttttaacactagaaaagtttatctgtagcaacaaaagagtacatttgaagctgagttgaaatgtagctgcaggaaaattgtccaacataagagaaaaaaaccctctaaaatactccaagcttcctagtatttctgagtgttaaattgtcagatgtattttttcattgttttcatgggrgctataatcatcataatttgagtcaaaacaggtattttcaaggtcttaacatttcaacacaaatttgttaatatgaccaagaatattccaccaagaagtctacatctgctggtatgcggctccgtaaacttgggccggccactc

SEQ ID NO: 108618 - DNA, 569 bp, Homo sapiens
gtgatgttagcaaaatgagatgcatcttcgggaaatgctcactcatctatttagactgaaaatcaccatctgaaactcatttaatggaagcagtcagtccagggagcaccactacyagtagaggcctggagggaacgctgggaagaaagttaaatagagatgggaggctgagccagcacaatcagagcttctgtccggaaaaacatcatgacgtttggccagtgttcatgagcttcccacagctctggacatccagccagagcttccaaaatccactctgcttctgcctggtggccagcctgtcctccgacttctagctctagttgggaagatggacccagatgggcttcccatcaatgctctgcacaaggagaagttggtgatatttaatacttcactgctttgagaccagtaactcagccaaggctaaaagtgtgagtccagacccaggattgaaggctaggagtattcctgaatagcccaaggaaatgtgccatatctctggcttttagctgattacaagttttctggggtaaagttggatgtaaccaagactcgaatcatttttt

SEQ ID NO: 108619 - DNA, 325 bp, Homo sapiens
cataaacccatttactcttgtgttagatagtgtgtcagttatcaatttgatgcttctcaacttgaagtgtgctcttcatcaccctgtgatttttatatctgggccctgtaaatattttttgccacctggcatgatgttcgtctttgtcaatggaggacactggagggagattgcaggaggaaggggcttctttttatgcttccctgtgcttgcctttcttcttgctcctgttgcacttagaccataagcaagatacttagccaagctcattctggagcttttacatcagcacccaatgggtgsattcctggcatgttttgtcagc

SEQ ID NO: 108620 - DNA, 429 bp, Homo sapiens
tctaagaaatatttgcctgacacaaatytgcaaagatatatttttctaagtttttgttcattagctatattttttaggttattacctttaggaatattgttcaattagaattgacttttttgtgtatgatgtgaggtaggggcagagtttgtttgtttgtttgttttcaatccagtattccagcatatttgttgaagagattttcctttccccattaggctgctttggtgctcttgttgaaaatcacttgactatataagtttggcctctttgttgactcctcattctatctaattgatctatttgtccttttgccaatattatactgttttaggtatagtagctttatgataaatgccgaagccaggtagcataaatccttccatttttgtttttctttttgaagattgccttcattattcttgatct

SEQ ID NO: 108621 - DNA, 429 bp, Homo sapiens
tctaagaaatatttgcctgacacaaatctgcaaagatatatttttctaagtttttgttcattagctatattttttaggttattacctttaggaatattgttcaattagaattgacttttttgtgtatgatgtgaggtaggggcagagtttgtttgtttgtttgttttcaatccagtattccagcatatttgttgaagagattttcctttccccattaggctgctttggtgctcttgttgaaaatcacttgactatataagttkggcctctttgttgactcctcattctatctaattgatctatttgtccttttgccaatattatactgttttaggtatagtagctttatgataaatgccgaagccaggtagcataaatccttccatttttgtttttctttttgaagattgccttcattattcttgatct

SEQ ID NO: 108622 - DNA, 459 bp, Homo sapiens
gtcaaattgacacctatattaaccatcacaactcaaaagcacatttttttacctctgatagtaaataccattagttgttttccttaaagtgctggctaactttattcattttcaagagaagtctctgaaatccccatatckaaaacaaacatagtttgttttccagtcattctttcaagtaaaaagggtattcgctgaagaaagcaggtagtttgcaacccaagccatcaaacaagtgcttttgtttgcaacaaccatcttgctttagtatgcagcataagtggtttatgtgcacatctcacttcactacataaaattctaagaaggaatttactcaaaaagtgaagtttcaataaaatcaatacttattactgcttcatcaagacttcaagtacctgactctgaagaaatacaatgagtgccagtgccttgatttgggcaaaaggcagttttacccac

SEQ ID NO: 108623 - DNA, 539 bp, Homo sapiens
ttatgttgaccccaatctatccatgtatgaaactatggattcacctcaacttgccctattaagaacgcacttcatccttcaaacttttttgactactctccccatccaagttttttaagtctgtgtccctggccctagaaactttctttgtatatgacaccatgcagataaagaagtagaataacaggagataaaactagaccattggtactatcaaaagtatcagttacattctgagggcaatgcccttttctttatgtcaaacataaaggaaaaattctagttgtagaaatattctaaatcttgtaaaacttacttaatcattaactctggagaataaattgatcccagtggcaaaactaaaacataaattaactgtagaaaactacaaaatatttaccagtagtaagctatttttgtttttcttargaaaaactgacaacacattttttagtgacctggaagcctgttctctctcagagatgctttatttcacatatgtccttcttttcaagaaaatatttattaccatattgata

SEQ ID NO: 108624 - DNA, 493 bp, Homo sapiens
tggcaatggggagagcctgatttgcaaacttgaggttcatggtggttttaaagagactatcaatcaagtggtcacacagcaattcagtgaaagtcacccycattggtgggtaaggaatactttatagaagacccatacttatagctagacattctgttttctctgactttatactgacataaaaacatttcatatcatttattagtgcaaataattttagtttttttctttctttttgagacaagatcttggctcactgcaacctccgcctcccgggttcaggcgattctcctgcctcagcatcctgagtagctgggattacaggcacccgccaccacgcccggctaatttttgtatttttagtagagacggggtttcaccatgtgggccaggctggtctcgaacttctgacttcaggtgatccacctgcctcagcctcccaaagtgctgggattacaggcatgagccaccatggccggccttattttcgttt

SEQ ID NO: 108625 - DNA, 601 bp, Homo sapiens
tgttatgaagaattcagctaaaattattaacaaattgctaaagatccagtgtgagttaacatgagcgtacagaactcccggaaaccagagacaaaggaagtttgtattcactcatggtctcttctccacgaatgaaggacagatgaaaccaaactagcaagacagtagattttaattaaaccatagcagcaattacattaaatgtaaatcatctaaacacatcacttaaaaaacagagactatcaaactaggtgaagamgtgagatccaattttatgctgtccacatgtttttcaggggcaggaataaaagaaatacttaagaatacagaatatgggaaaaatatggtttcccataatttaaaatatttaaaaataggaagtttgtaattattactgttgaatattcagttaaagtcaatgattcttttgaccagtatacctactcccaatttttctgggcaaatcccaactatacacctctgtctagacctcacatgggtcttaccttgcctacttctctcatatcatcttacattattcctgctctccctcatccatggtgctgtggccattctgatttccttttagttcctcatgtag

SEQ ID NO: 108626 - DNA, 609 bp, Homo sapiens
tgtcatctatctattcatccattcatctatattcttgttattatcttacagacaggagccttaaagaaacgacttgatcattattccaggttaaaaaaatgagccacaattcccctggtcatgaagttataattctagcctcttctctattaaattgctctcaggtaataatttagagagtaattggcacaaaccttacaaatagttttctatttttaactctatcccccttgtggtacctgggtagactttgtgctcattagtctttggctcctactgatcttgtgctgtgttggcagtcatgtgatakacctctgcacaagatgctggggggaaatctagcctttatttctgcagcctaatgacagtgagagccaagagatgagtacatttgaggagtcaaaatgcttctgtgtcagaactttatggcaagagaaagaaagttgggacactggttattttctgggacatcagctactgatttatgaacttgatgggacctccctacttattactttacaatgaaatgaaggttattttaaatgttgattgttaggttgtaatgtccctccccccaccccgttttcattagaaatgtcatttacagat

SEQ ID NO: 108627 - DNA, 609 bp, Homo sapiens
tgtcatctatctattcatccattcatctatattcttgttattatcttacagacaggagccttaaagaaacgacttgatcattattccaggttaaaaaaatgagccacaattcccctggtcatgaagttataattctagcctcttctctattaaattgctctcaggtaataatttagagagtaattggcacaaaccttacaaatagttttctatttttaactctatcccccttgtggtacctgggtagactttgtgctcattagtctttggctcctactgatcttgtgctgtgttggcagtcatgtgatatacctctgcacamgatgctggggggaaatctagcctttatttctgcagcctaatgacagtgagagccaagagatgagtacatttgaggagtcaaaatgcttctgtgtcagaactttatggcaagagaaagaaagttgggacactggttattttctgggacatcagctactgatttatgaacttgatgggacctccctacttattactttacaatgaaatgaaggttattttaaatgttgattgttaggttgtaatgtccctccccccaccccgttttcattagaaatgtcatttacagat

SEQ ID NO: 108628 - DNA, 580 bp, Homo sapiens
aaggaagttaattatgccaggtgaaaggccacagaattcccttttagcacctgcaaaagtatgccaatatttatacaacagtctcctgggatttgtgggagatgtcaatttttaagacactctacctttccttttttttttttactttcagccatctgtaagtaatatgtgcagagaaaggatgatctgacaaagtatgaaacamaacaagctgtaagactttgagccttgtataacaaaatatgaaaacaaagatcaaagccacaaggcatactgggtgattgtttggttttttaaaagaacagcccaaagcaaggaaaaaaatttcccaacttctaaacaaacagagtatcagcaaaacataaacaagagcatgtttatcttatacctaccactgaatctccttgagtccctttcctgtttaagccgttagccagctggacacaaagtcagcagagcagcctgctttaatttactcagaatgagagattattctgaggttccagtgttactttttatgaagtcaaatccaagaaaattaactcacatgtataaatgtgtaaatctataaaaactagat

SEQ ID NO: 108629 - DNA, 511 bp, Homo sapiens
taacttagtggaaacttcttaaaatacgtaccactaaaaggaaacagtattctcctacatgtggctagccattatcccagcaccatttgttgaaaaaggtgtcctttccccacttcatatttttgtttgctttgttgaagatcagttggctataagtatttggatttatctccaggttctctcttctgttccattggattatgtgcctattttaataccagtaccatgctcttttggtgactatggccttatagtatagcttgaaatcaggtagtgtgatgactccagatttattctttttccttagtcctgytttggctatgcgggctcttttttagttccatatgaattttagaattgtttttttctaattctgttaagaatgatggtggtaatttgatggagattgcactgaatttgtagattgcttttgtcagtatggtcattttcaccatgttcaatctacccatccatgagcacagaatgtgtttccatttgtttgtgtagtcta

SEQ ID NO: 108630 - DNA, 576 bp, Homo sapiens
taggaaattctgtttagcgtatagctctatattttagtgattttcttgttatttaatttattgtaataaaagtgatcctccttctgctataggttcattctagcttttgttaatacatataacttgtttttatttttctatgttgatttcattacctgttttcaatggtgtgcttagttgtattatttgctaatttctgtgtaatagatactcccactgtagacaatttcaaatattcaatatttcatccagtckttcacaaaattcctgaacttttaacaatatactcttacaaactagtacaagccagctccagcattactctgccttttacttcagtaaatagtatttgcaatagtttttttattaattaattctattggaatttccaaatgtataattatacgcttgtagttttacactttctatttttacaattttaatctgtttaaattgtttaattgctttaattaatattctataatttctataaatggttagatgttactggagatgttgaacagtcatactttgctgattttgtagagaagcttcttgtgtttcccactgaataag

SEQ ID NO: 108631 - DNA, 594 bp, Homo sapiens
tcataattttgtccccagtgaggggatatctagtgtatgttttatgcaccttatgtagaaatgaaagataaagttaggggtgctggatgtcccaatatcacctaaccatctggtgacatagattctagtcagtgtcaatgctaggttggtctccttggataagtgacctggatttcttagcttaacaccctttgtgaaaggagggattcatcattatattgtcttccatttgtattttttgagagaagtatacgcccaagacatatgacaaattaaagacaatggaagtggtactggtaaaaataacaataataataataattttaacaaagacataaattatcactaagaaactactagctaacatctctgtgacaattactttaaatgcattgtttcttgtaattctaataaaatgtttgtaagtttcaatattcttattttgctaatgaggtgactaaggcttgtatcagttaagtgacagtctcaggctcacgyaactacttgagctacttaaggtcactgctgagattccaggaaaggagtaatttttccaacacgattccagcaaattgggcagagacacgatttcta

SEQ ID NO: 108632 - DNA, 532 bp, Homo sapiens
gtccaatttgtagatatgctggatgtatagagaatttgctctccacattcaaccgtatctgctggaggctctgccctctttaacatagcttccaagatttgccttgggttttgttctgcagacaacaggagaagatcatggagaatcacgtattggagtttgtgatggatcggttctgtaagtgaggtgcatcattatgattcaaattgcattgactgaaactcagttacatgtgcacacctaactttaaggatggctgtcttagtctattttgtattgctataacaraatagaggaaactggggaatttataaataagggaggttgatttaacttatgctagcaaattcaagggcatggctcttgcttctggtgaggacttctgtgctatgtcatatcatatcacagaaggttaaaagaaaaataaacacatgcaaaaaaagcaaaactgagggagggctatcctggctttataacagcccacgctcgcagaagctaattcactctcgtgagaactaatccagtctttcca

SEQ ID NO: 108633 - DNA, 548 bp, Homo sapiens
ataattatatttatgaattgaggagtaattctaaatcagtgttaaaataatccacccaagattaggggacataactgagtttgtgactattcaaatctcctgtktgtttcttttttagtctcccgctatccagtgctagattctatattcctactaattttgctatatactgatagatacattatgaagtagctgagaaaatgagcttggagatcaatgtgaatggaggcaaaattagtcatttctattaactgttcccttaaatttctcaacttctctcagtagcagtttagatcaaatacatctagaacccatcatcaatccgtttagctaccttcttgccaatgataccacttcctttgcctttgtgtccaaactctaaatcaacccaaccctcagacttttctgaatctgaccttaagagcaattacaaagaaaaccacacaaccatgcagacagatgtcactctatgtgtagacttctatctgtacaaggccttcagaacttactggatttattagtttacagttccaggggttagaagtctg

SEQ ID NO: 108634 - DNA, 480 bp, Homo sapiens
gccattttctcccagctcaacatcaaaacccctttcatctgctgtctaaacgcaaacaaagcaaaccttccaccaggcctttctttccagataaattaaaactctcatgtsctggggcctaaatcaagcctacaggccttccctatataaatccgctctcaacctgaaatcttcttgccacacgtgctccttgtaagataattttgcagtagctaatcaataatgcaacagtaaattgcatttaaataaacattagcagcccctcttaatgaataaaacctcatctgcaatttgtcaaagtcagaaatattggactcttttgatattcattagaatattggaaattggagctttgacaggttttatgtacattgcaattaccatcctgtggggggttgggagatactaaaaaaaggcttacttttatacatcccggacggaatatagtggaacatacagcaggtttctagactggaattc

SEQ ID NO: 108635 - DNA, 559 bp, Homo sapiens
caagacatagttatatacaatacatggagtgtgtgtttatgtgcacatagtataaatatgtaaaagtcacatcattaaatcttttatttgtctgtattcataatacacaaagctgtttttaaattatttaaagrtctattctctcttccatatacattaatactaataagagttgccgtcaacatcaaagggaagctagacccctaattagagttccaatctgccctgagagttgctttgcagagagaacaaatatgaaataagctgagcattagggaaactaataatcagtcctcattctcaacttctgattattgcaagaatccggtgatttcttagcagtaatatatactcatgttccatcacaatttataaatggaaaaattcctaatgaacaatttccaaggaaaaagataatagttaaaacatataaatctgtcatgtcttcatatgttaggatatgagacagttacaatagctccagaaatttcaagtaaatttagaatttagaatttttgatattgcctgacttgctttaaccccgttgggttaaagcctt

SEQ ID NO: 108636 - DNA, 529 bp, Homo sapiens
tcgagaggactggctatcaaaggtgaggtattcataatttcacacttaattatttttaatttccatctccttactatagtgaaaacaatttgtcctggattttgcttcaatgcccatggataattaacaatcatccctaattataggaagattttgttgtgggggatggtgtggagttaacagctgagttgtcaggatccaaagcttggtctgtaactcttagaagttctctttcctgtctgtaatctgacagatacctaaaatttgtttgttccttctactgccagaagtggatwacatttttcctgttgtaattgaggtcaccaaaaacttacgtagtcaggggcctagtaggacagattaaaaatattcctgaactctctttagatggaagtagaggaagcaagtgaggaagccagaggtgagcgaaatagagaaaagagcaggcctgtagcaggggagagtgacagcatgaagccagaactcaggacagagattcaagtatgcagtccagagactaggaagagcc

SEQ ID NO: 108637 - DNA, 401 bp, Homo sapiens
gatcagaaatttggaagcaaagtgttttgtctagcaatagtcactaaagtcaaggaacccatagatggaacaaagaaccttattgctcttatcacctttctccctatctcctggtcaaaaaataaataaataaacattggagtattacaaaagacaaattgtttatatcaacattagcccgttggacctcaagaacatttgggaagaagatatagtacagaactaaaggggtgcaataaaggaagagaagatggtagaacaaatatgcgttgctcattagaatctggtggaggaatttaagtaaatgaactcattttcrtaggacacattcagaataagagatgaagccctcagctggactgctcagatgcatacttcttagttccccttgtcatcctctg

SEQ ID NO: 108638 - DNA, 587 bp, Homo sapiens
tacaatacacttcaaatttagttctttagtaccacttattttcacctgaggaaactggaagcattttaattgataatttgtttcttctctagatattagctgactctcatgaagtaataatcttttgctgcttctaagaatgtttaagattggtttcagtactgtaagtctcaagatcacacactgattcataaattcatkagaggcgtgtattacattgagatgtcttgaaaatactgagtagtcaagaggaaaaataacattgaggcaaaactccaggttagataccgttgtattatgagatctccaaatggtagcaataacagaccgtctaactgtaggatattttctcaagtttgtaaatcgcttgatagtacggtatatttttctttgcttaattaattgattcaatgaatatttattgagaacctacatgatgccaggcactactataaaatctagggattcaggcataagcaagcatcattcccactctgatggtactcttggacttaggaatgcagatatgaaaacatgtactttcaatgttgtgtactgtgcacacgagcaatgaacagaaatggcca

SEQ ID NO: 108639 - DNA, 587 bp, Homo sapiens
tacaatacacttcaaatttagttctttagtaccacttattttcacctgaggaaactggaagcattttaattgataatttgtttcttctctagatattagctgactctcatgaagtaataatcttttgctgcttctaagaatgtttaagattggtttcagtactgtaagtctcaagatcacacactgattcataaattcattagaggcgtgtattacattgagatgtcttgaaaatactgagtagtcaagaggaaaaataacattgaggcaaaactccaggttagatrccgttgtattatgagatctccaaatggtagcaataacagaccgtctaactgtaggatattttctcaagtttgtaaatcgcttgatagtacggtatatttttctttgcttaattaattgattcaatgaatatttattgagaacctacatgatgccaggcactactataaaatctagggattcaggcataagcaagcatcattcccactctgatggtactcttggacttaggaatgcagatatgaaaacatgtactttcaatgttgtgtactgtgcacacgagcaatgaacagaaatggcca

SEQ ID NO: 108640 - DNA, 587 bp, Homo sapiens
tacaatacacttcaaatttagttctttagtaccacttattttcacctgaggaaactggaagcattttaattgataatttgtttcttctctagatattagctgactctcatgaagtaataatcttttgctgcttctaagaatgtttaagattggtttcagtactgtaagtctcaagatcacacactgattcataaattcattagaggcgtgtattacattgagatgtcttgaaaatactgagtagtcaagaggaaaaataacattgaggcaaaactccaggttagataccrttgtattatgagatctccaaatggtagcaataacagaccgtctaactgtaggatattttctcaagtttgtaaatcgcttgatagtacggtatatttttctttgcttaattaattgattcaatgaatatttattgagaacctacatgatgccaggcactactataaaatctagggattcaggcataagcaagcatcattcccactctgatggtactcttggacttaggaatgcagatatgaaaacatgtactttcaatgttgtgtactgtgcacacgagcaatgaacagaaatggcca

SEQ ID NO: 108641 - DNA, 587 bp, Homo sapiens
tacaatacacttcaaatttagttctttagtaccacttattttcacctgaggaaactggaagcattttaattgataatttgtttcttctctagatattagctgactctcatgaagtaataatcttttgctgcttctaagaatgtttaagattggtttcagtactgtaagtctcaagatcacacactgattcataaattcattagaggcgtgtattacattgagatgtcttgaaaatactgagtagtcaagaggaaaaataacattgaggcaaaactccaggttagataccgttgtattatgagatctccaaatggtagcaataacagaccgtctaactgtaggatattttctcaagtttgtaaatcgcttgatagtacggtatatttttctttgcttaattaattgattcaatgaatatttattgagaacctacatgatgccaggcactactataaaatctagggattcaggcataagcaagcatcattcccactctgayggtactcttggacttaggaatgcagatatgaaaacatgtactttcaatgttgtgtactgtgcacacgagcaatgaacagaaatggcca

SEQ ID NO: 108642 - DNA, 610 bp, Homo sapiens
cattgtccactataggcggaactaagggcccacttgaagttattgtcatgaatagactaagccatgttggaatgactgtggatattttttccccaaccacattcatctgcatgaaggcagacgtagtatgagtatagagttkggtttaaacagggttgtgagttataagaaagtgataaataggcaagagatttgagagttgagatttgagatttgagaattgagaattgagatctgagagttgagatttgaaaagtgactgtgaaatttaagagaaaaagaagaaactgagggcactgaggaaaagtcaaaagatgttggagaaacagattgaaggtcttggtgacaacagaaggatttttggaattgagataccagagggagtgaactgaaaagacaggaggttttggtcagagcatggtatgttgctttgatgggacagcggccaacactggcaatgacaaggtctagagcagtgctacccaaagtacaattatgaaacagagccagtctgtgaagctcaaaagggtccatgatgagataactgcaaaaatgggtactaaacaagtacaaaactttataacaatttgacagtgccatgatacccaac

SEQ ID NO: 108643 - DNA, 379 bp, Homo sapiens
gaattcatatcacaattaattggataatataatcacgttttcttctggaaataagaatctatctgcattttgaatacccatccataaatggtaaaattgtatttcctatgagttttgcaggatgggcacaaaacatggagamttgcccacaaaaacatcagtcagtttatagctaaataggtgttatgtgcagtgtagcaggttgggttacgaactgacaaggagagaccaacacacgtgcacacactcccaccacacatacacacttttttctctctctctctttctagagcagaaacaggtagaatatttttaataaagtttttctcttgctctggattctatatacttgtttcattcctgtacagttaggatcttg

SEQ ID NO: 108644 - DNA, 610 bp, Homo sapiens
ttgattggtcagatgtgagctaagttgcaagccccgtgtttaaaggtggatgcggtcaccttcccagctaggcttagggattcttagttggcctaggaaacccagctagtcctgtctctcagtccccctcctcaacaggaaaacccaagtgctgttggagaggttggctgacaactgctctaactgcttcctgctgaattggggtgtagtaggggttgtgcagttgagatttccttgagaggggtgccttcgatgtcatcaacattgragcataggctagcaggctggtccaggggtccgtggtagatcttagtcatggactgcatctggggctccatttgaagaatgatttgtacttttacagctttgattctggaagagacaaacttaacaaggaggttaaagatacagggattgaaatgtatggcctatagtgcaggggattatttctttggcacacttcacagaccctaactatctgcttgatagttttgaaaaggcttggtccagtaaataataatttggccatctgatgggtgctatcaatgcctaactgaaaggtttggtgaagggttttaagtaatttccattggttagctgcaggcaaaag

SEQ ID NO: 108645 - DNA, 376 bp, Homo sapiens
gcattctttcctgtggttttcttagttttgctttgcatcatggttcatctattaagagttggcatgaggagtgcatataggggataacacaagtataggggatcatattagattcagctggagggttttttttaatcaacactccaagaaattgggttcactgttctttctcttatatcttgatatggtttggatctgtgtccccacctaaatctcatgtcaaattctaatccctaatgtgggaggtagggcctggtgggaggtgaatggatcatggaggtggatttcccacttaggtgctcttctccttatagagttctcatgagatctgmttatttagaagtatgtgataccaccccactctctcttcctcctg

SEQ ID NO: 108646 - DNA, 600 bp, Homo sapiens
ttcatgcaaaccaatactttatggtaaataccctactggttctggttctgtttctctggagaatcctaactaaatcatattttggtaccaaaagagtccagatgaacagaatgttaagcatgaggtttttaaattagttttagggtttctggaattggcyctttaatttgattagacttaagatgctaatgacttaatttaattactagagctagcactgtaatccatggtgtgatctggcaatatacctataaaaatatgtgcattacataatcctaatcagccacttataagaagtgggatgactgtatatgatgcttttaaataactttgggaaactaatgaatataatgttgctgactggttggtcccaacatcagtgggagatagaaaggactctaacagttaggctggttgactgaaacatggactgaaaagtggcctgctataagcaacttgtaaatgctagacatgtgttggtttaatgtagagaaatagattcaaagacttgcaaatgcaaggagactgaaatgttaagagtgaatttgtcatttaaggcctgctcacccacactgggaagatccagaagacatacctttc

SEQ ID NO: 108647 - DNA, 408 bp, Homo sapiens
ttcctacctcctcctctcacccyagcccttccccccagcacatggatccaaaaatgccctaagtgatgggcagtcctagttcccctgcaacatctgctggctaatcctggcctattgagggcaaggctgcctgtctgtttggataagggcactggagttagcagcttccaatcttgccaggcccagtggagtagctgagagtgctgagctttggaatcaggcttgcttcggtgctcacagcccagcctctcatccactggctgtgtggccttgggcaggtaaactggccaaacccctgcctggaaaagctgcctgctgatctctgcaccctagcagtgttgggtgggttaagtgagagggagcctgagaagctgatggtgagcatccagctttgctcccagccaagag

SEQ ID NO: 108648 - DNA, 653 bp, Homo sapiens
ctatttaaaattataacaacctcgactttcaaactttaccttctaaatgtgtctctaaaatatttaccacattctagcatgcaaaaatttacatattttattgcaaaaataatataaacactctgtggacagcaattttattctgtttgggtaactgttatgtcgttggcatcaagaatattggcttttatattaatatttactgactatttaccgagctctattcatggatagacttctgattgctttgaggaaacttaattataatctgtgtacatgtaatagaacatgagtttacccactrgactttgtaacatgcctgcttgaataggggaacttaaaactaagagtatgttagaaagcacacaaaatttgtgtaagccaacaacaactactctaagctttgtggataagagaattatttttgattggacccattcatataccctctaaaataaagtttattgaaagtcacaaacaaaaatcaatttttcaggaaagagtttctactctcaacctatgtaaaagacatcataataatatattccattctggtacatatattcatatttatttatccttaaacatgtaccatacagcttgttaccatcaagtttatgtgaaattttaaacccctacaaaataataaagaa

SEQ ID NO: 108649 - DNA, 606 bp, Homo sapiens
tagtctttaaatcatttgatatttaagagagatatcatataaattgaaagtattattattttgaaaggcattaaatctcagataaattaattctaattggtttcatgacatttccttcataaagtgtatatctcttaccatacataatatctcttcttgaagttccaaaagaagtgtatcattattaaatgactgatgattaatatgaaatattaaaattgttggaactttttagtattttattaaaactattaatcttmttttattagaaacttttcactgcacaagattggctaaagtgtgttaatttaatgccttcaaataaccaattcgcatgccctaatgtattgctacctttccctagaatttttaccatgttctcttttctatgcttctgtttaatttaccacctggaaatgtgggtaccacctaaagctatctccctgagtatctcaattgaaacactatagataagaaattttagaagatctaaaatctcatgcatattggtttaaacattcagcaatgtagttttcctgaagataataaatatataggaattaaatatcaatgtcaaataatggtgtttcaaaacaggtttctttt

SEQ ID NO: 108650 - DNA, 606 bp, Homo sapiens
tagtctttaaatcatttgatatttaagagagatatcatataaattgaaagtattattattttgaaaggcattaaatctcagataaattaattctaattggtttcatgacatttccttcataaagtgtatatctcttaccatacataatatctcttcttgaagttccaaaagaagtgtatcattattaaatgactgatgattaatatgaaatattaaaattgttggaactttttagtattttattaaaactattaatcttattttattagaaacttttcactgcacragattggctaaagtgtgttaatttaatgccttcaaataaccaattcgcatgccctaatgtattgctacctttccctagaatttttaccatgttctcttttctatgcttctgtttaatttaccacctggaaatgtgggtaccacctaaagctatctccctgagtatctcaattgaaacactatagataagaaattttagaagatctaaaatctcatgcatattggtttaaacattcagcaatgtagttttcctgaagataataaatatataggaattaaatatcaatgtcaaataatggtgtttcaaaacaggtttctttt

SEQ ID NO: 108651 - DNA, 606 bp, Homo sapiens
tagtctttaaatcatttgatatttaagagagatatcatataaattgaaagtattattattttgaaaggcattaaatctcagataaattaattctaattggtttcatgacatttccttcataaagtgtatatctcttaccatacataatatctcttcttgaagttccaaaagaagtgtatcattattaaatgactgatgattaatatgaaatattaaaattgttggaactttttagtattttattaaaactattaatcttattttattagaaacttttcactgcacaagattggctaaagtgtgttaatttaatgccttcaaataaccaattcgcatgccctaatgtattgctacctttccctagaatttttaccatgttctcttttctatgcttctgtttaatttaccacctggaaatgtgggtaccacctaaagctatctccctgagtatctcmattgaaacactatagataagaaattttagaagatctaaaatctcatgcatattggtttaaacattcagcaatgtagttttcctgaagataataaatatataggaattaaatatcaatgtcaaataatggtgtttcaaaacaggtttctttt

SEQ ID NO: 108652 - DNA, 606 bp, Homo sapiens
tagtctttaaatcatttgatatttaagagagatatcatataaattgaaagtattattattttgaaaggcattaaatctcagataaattaattctaattggtttcatgacatttccttcataaagtgtatatctcttaccatacataatatctcttcttgaagttccaaaagaagtgtatcattattaaatgactgatgattaatatgaaatattaaaattgttggaactttttagtattttattaaaactattaatcttattttattagaaacttttcactgcacaagattggctaaagtgtgttaatttaatgccttcaaataaccaattcgcatgccctaatgtattgctacctttccctagaatttttaccatgttctcttttctatgcttctgtttaatttaccacctggaaatgtgggtaccacctaaagctatctccctgagtatctcaattgaaacactatagataagaaattttagaagatctaaaatctcatgcatattggtttaaacattcagcaatgtagttttcctgragataataaatatataggaattaaatatcaatgtcaaataatggtgtttcaaaacaggtttctttt

SEQ ID NO: 108653 - DNA, 360 bp, Homo sapiens
attctgccaaaaggaagcacttgtttgagttctggaacattagttaaggcaaaggccttcttgctgcagttactgtctaccaggaaggtcatgaagatatgagtactagctgtcacagtgctccaatatctagacttgagcttcaagataacctagagacaattgatgcagatgatgcctgcatcccaatgtctagccatcagcttaatgagtgggaacacctgaggagccagattcagcatttttgtctcctctggattagaactgaggtgttagtacatatttgaagtcatgaatccaytggtagccacttttcttttgtttctccagacttttctgtaatttgtagtcatgtgatgc

SEQ ID NO: 108654 - DNA, 635 bp, Homo sapiens
tgactataattccaaaatggtatagagatatgatcattagtaggagaggtaggtatgtaagtttgatgatgggacagcctagaataagcctccatgtttgctagtccatgtatattaagctaagatagttcaactcattttagcattatagtatccagttgtgcaaattcaatgtatttccaacttgcattagatatcaactaagcaccatttggtctgacaaccatgtgggagaaatgaatccttttgaaataatgaaaaagactatcttgaaaaatgtctgtataatatctatattgctaccaggtgttgctctaaaagatgttatttatagtgaaatataattgggtcacttccagtgatgagaatttagtcttcttattatcctagacactatggctcatatcctatttcaagtgttggctggactttcatggtaatgtcttcataatgatgaaaagcaatggttcagttaatggggttatcagtacgtttgtagatgctgccaaaatcttttggctccaaatcaactgctgttaactgtgtccaatttyttttcaaatataccataaaatataaaggaggagagcaacgccattaaatctgaaattataaggaatatatagtatgactat

SEQ ID NO: 108655 - DNA, 573 bp, Homo sapiens
aattcactacaagaatttcataatataatcacaagtattaattgcaggaaaaaaaaactgaggaaagaatctcagagattgaagaactgttctttaaatcaactcagtcagataaaaataaaaaagaaagaatattgaaaaataaacaacatctctgagaaatacgggattatgcaaagagataagacctatgactcactggcattcctgagagagaaggagagagagtaagtgacttggaaacatattggaggggatagtccatgaacatttcactaatctcaatagagagggtgacatacaaattcaagaataaagagaaccgaggctagatactataaaagtcgaccatctccaaggcacataatcataaggttcacaaaggtcaatgtgaaagaaacattcttaaaagaakatagaaaggttaggccacatacagtgggaaccctatcaggatagcagccaacatctcagcagaaaccttacaagctagaagagattggggtttatttccagcatccttgaagaaaagaaattacaaccaagaatttcatattccatcaaactaagcct

SEQ ID NO: 108656 - DNA, 584 bp, Homo sapiens
ttattgtactttttattgattatacctttaaccagagtaatcaattctgtttcttccatagagggacatagagaaaactgaaaaatagaaaatcgcaaactccctatttttttatgtttgtgaggacatattttatatcaaggttactaattttaacacagcaagaaagataaacctgtatagcatcatccaatggtattcacatactctacaattttcagaaaaaaaggtaaaataagcagtatagtcactaaggtttgtaaatttatcttacctgcaagttcatatacccacaaattattttattaayccaacacaatattagtttaatgtcttaaaattagttaaaaatttggaaattataatttaaattgacacatcaagctgtttttatttgtaacattttaagaacttatttatgaattaactatttttgaaacgtcaattattacaagttaatttaaacataattttaatattcaacatcttatacaattgtgaaaaatgaaaatagatgtgactcttaaaatcaatgtagaaagtttattaacattagctcatgaaaattatagttttgaatatgc

SEQ ID NO: 108657 - DNA, 570 bp, Homo sapiens
ccttgctgacttgtgtcagagctaccctaggatccagggcaaagtctgtaaggcatctccaagagctgcttctttcacaagtgaacttggaatacacccaccagtcatctgcatacatgaacatggaaaaataatgagatgaygcagttttcccctctgtgattaaaaatttagaagcattaccaggactaaataaaaatttaaaaacagctgagttttgttcttcactctgtcctgtcctgcatgcttcctcttttttggagctgccaagccaattgtgataagagcagatctttggtcctttaaggatttacgtaaaagccaagctcatttcagaggaaaaccctgacatatgtttgtgagtcttacattctcatttggaagacataaagtccaacttaaactacctagaaccacatattttgcttaagtcatgcttggtattaagttaaacattaactttttctttttctccatggccaaagtggaaaaattctgggcagaatatcatttctgaaggtagaaaacaggtccacttccacctctaccacacctttccaatgtcacacc

SEQ ID NO: 108658 - DNA, 570 bp, Homo sapiens
ccttgctgacttgtgtcagagctaccctaggatccagggcaaagtctgtaaggcatctccaagagctgcttctttcacaagtgaacttggaatacacccaccagtcatctgcatacatgaacatggaaaaataatgagatgacgcagttttcccctctgtgattaaaaatttagaagcattaccaggactaaataaaaatttaaaaacagctgagttttgttcttcactctgtcctgtcctgcatgcttcctcttttttggagctgccaagccaattgtgataagagcagatctttggtcctttaaggatttacgtaaaagscaagctcatttcagaggaaaaccctgacatatgtttgtgagtcttacattctcatttggaagacataaagtccaacttaaactacctagaaccacatattttgcttaagtcatgcttggtattaagttaaacattaactttttctttttctccatggccaaagtggaaaaattctgggcagaatatcatttctgaaggtagaaaacaggtccacttccacctctaccacacctttccaatgtcacacc

SEQ ID NO: 108659 - DNA, 572 bp, Homo sapiens
acacccattgtgtgaagaacagtattgctgatacacaagtgtgtgtcttacttttaggtaaatcttcttctcaggctcccatatccttatattcccacaacatttttgtgtttatttaaaatccttttgtttattcatttatattgcctgtaagattctgagccattgctacacaaggactatacctcatgcatatttttccctagggatcctagagtggamccacaatataacaggggggaagtgaaagttttctgaattgaattggatttaattcttccagtcagttaatgggaaaagcaatccacagggggctggctgctcttcagcctttcttaactagtgctcttcttttgctacagtgatgtgttgttgcacaaaagcctggagaactcatcttgcctcatataccacagaatagggatttgttattttgtctgccctacatccattctctttggcatctttttttttttttgtattaatcattttctattgtatccttttggagaaccccttatccccattttcaatccaagtttccagttggcaaatattggcacatgaccagg

SEQ ID NO: 108660 - DNA, 582 bp, Homo sapiens
ttgaaactgtgagggtgaaccgtgactgaaaagttacttattttactttgttctaattttcctcagcactactaaggagtgacttcttgcccttacatatgacagttccaaattaaatgaggaagatatttacagttctgtaaatatcactttggcattttacatttcgtaggaaagggcttttacgttgcagttcatagcatagtttatggtttttaaatgccaacttgagaagttgaaaagagacctttcctggagaaaaagacsaagcttcagattcaacgttgaaaaatgtgcagaatttttagggattgctgtgaagagtgaagacgttacttgatgaaaagaacataaggctctggctcatttatttattggctcacagcagaaggggtgggacattagaatcagagagaagacgatggttctgtgctttacttcctttatattctatttacgtgaccacttggaagagtagtagacagtgggcaggaatcaaataggtaccccgggaaacagcaatgtctgtatatcttggtaaattgtgaagaatggaagtatccaattgcagatgtaaacatt

SEQ ID NO: 108661 - DNA, 618 bp, Homo sapiens
acgtccatctctcctgtgagtcatgacattcaaagccaagcttattctttctcatatttgcaagattaggtcaatctgagccattcatctagaaatgacccaagtaagagaaagaaagctctcagagggattggacactataaactgaaacagttggaaagagggggctgaacaaatttcagctccttgacatttggtctatgatccaggaaactgtgaaggtagcatctttgtttgctcttttgacaraatattgattgattgtgataaatatgatggacagaacttaaatgttcggaaccaaagaatccttagagaacaggtttggctttcatggcaatactgtaaagtcaatcagctgaaatgcatttgaaaaggggttgtttttatccccatctgtaaaaaaatattagaaagagagggaggaaactaacattatcttttcagattttcttgttggggtgatgatagtgtttaataccacatgcttatttatgcatttcttatgggaatctgacagggccaatctttttttttggaagcatactcatcatagacatgaaaagaagactcaataacatgtaaacacaatggagaattagggagaggttcagaagg

SEQ ID NO: 108662 - DNA, 639 bp, Homo sapiens
ggatgttggtgaacataatcygaaaacatgcaaagatttagaaagtattctgataatgtagaaagaattagaaaatggatgcattaaccaacacaaaacacttttaaatgaaaagatgattttaaataacattttaagaaattatccttaaaatatggaagaaatttgatgcaaaatgttggatattctctcttccaaatggaagtagcatttactcatataattgaaaatcatttttgaaaacaatttaattactttaaaaactgcattatgttactctataataatttattttttaaatttggcatttgtaatttttataggtatgtagtacatatatatatattcattaggtacatgagataatttgatacaggtatacgatgtgtaataattacatcagagtaaaatggatatacatcacctcaagcattcaccataccctactgttacaaatatcccaattgtacttcctcagttattctaaaatgtaaaaaatttattgcttactgtactcaccctgttgtactatccaatagtagatctaattcattgcatgtagctatatttttgtatccatgaaccattcccatttccttccccctcccaactacccttctcagcctctagtaaccatca

SEQ ID NO: 108663 - DNA, 639 bp, Homo sapiens
ggatgttggtgaacataatccgaaaacatgcaaagatttagaaagtattctgataatgtagaaagaattagaaaatggatgcattaaccaacacaaaacacttttaaatgaaaagatgattttaaataacattttaagaaattatccttaaaatatggaagaaatttgatgcaaaatgttggatattctctcttccaaatggaagtagcatttactcatataattgaaaatcatttttgaaaacaatttaattactttaaaaactgcattatgttactctataataatttattttttaaatttggcatttgtaatttttataggtatgtagtacatatatatatattcattaggtacatgagataatttgatacaggtatacgatgtgtaataattayatcagagtaaaatggatatacatcacctcaagcattcaccataccctactgttacaaatatcccaattgtacttcctcagttattctaaaatgtaaaaaatttattgcttactgtactcaccctgttgtactatccaatagtagatctaattcattgcatgtagctatatttttgtatccatgaaccattcccatttccttccccctcccaactacccttctcagcctctagtaaccatca

SEQ ID NO: 108664 - DNA, 639 bp, Homo sapiens
ggatgttggtgaacataatccgaaaacatgcaaagatttagaaagtattctgataatgtagaaagaattagaaaatggatgcattaaccaacacaaaacacttttaaatgaaaagatgattttaaataacattttaagaaattatccttaaaatatggaagaaatttgatgcaaaatgttggatattctctcttccaaatggaagtagcatttactcatataattgaaaatcatttttgaaaacaatttaattactttaaaaactgcattatgttactctataataatttattttttaaatttggcatttgtaatttttataggtatgtagtacatatatatatattcattaggtacatgagataatttgatacaggtatacgatgtgtaataattacatcagagtaaamtggatatacatcacctcaagcattcaccataccctactgttacaaatatcccaattgtacttcctcagttattctaaaatgtaaaaaatttattgcttactgtactcaccctgttgtactatccaatagtagatctaattcattgcatgtagctatatttttgtatccatgaaccattcccatttccttccccctcccaactacccttctcagcctctagtaaccatca

SEQ ID NO: 108665 - DNA, 639 bp, Homo sapiens
ggatgttggtgaacataatccgaaaacatgcaaagatttagaaagtattctgataatgtagaaagaattagaaaatggatgcattaaccaacacaaaacacttttaaatgaaaagatgattttaaataacattttaagaaattatccttaaaatatggaagaaatttgatgcaaaatgttggatattctctcttccaaatggaagtagcatttactcatataattgaaaatcatttttgaaaacaatttaattactttaaaaactgcattatgttactctataataatttattttttaaatttggcatttgtaatttttataggtatgtagtacatatatatatattcattaggtacatgagataatttgatacaggtatacgatgtgtaataattacatcagagtaaaatggatatacatcacctcaagcattcaccataccctactgttacaaayatcccaattgtacttcctcagttattctaaaatgtaaaaaatttattgcttactgtactcaccctgttgtactatccaatagtagatctaattcattgcatgtagctatatttttgtatccatgaaccattcccatttccttccccctcccaactacccttctcagcctctagtaaccatca

SEQ ID NO: 108666 - DNA, 589 bp, Homo sapiens
cgaagttgcattgcctatgttcactgatgacataatgtkataactataaaaccctaaaaatttctccaaaagactcttatacttgataaatgagtccactaaggtgtcagaataccaaatcaatgtgcaaacatcagtaggatttctatataccaaccatgtgcaactgagaaccacataaggagctcacttccatttaaaatagccacacaaaatgaaatatataaaaatacctttaaacacagcactgagagatgtctacacaaagaactacacaacactgatgaagaaatcatatgtgatacacataaatgagaaaacacacatccatgctcaaggagtggcagaatcaatatcatcaaaatgactatactgtccaaagcaatctgtagattcaaaacaattcttattacaaatgtaatttttcaaataattagaaaaaaattttaaattcatatggaatcaaaaagggcctgtgtagtcaaaggaatcctatgccagaagagaaaagccagaggcatcacattacctaacttcaaattatactgccaggctatagtacaccaaacagtgtagtactggtaccaaa

SEQ ID NO: 108667 - DNA, 589 bp, Homo sapiens
cgaagttgcattgcctatgttcactgatgacataatgtgataactataaaaccctaaaaatttctccaaaagactcttatacttgataaatgagtccactaaggtgtcagaataccaaatcaatgtgcaaacatcagtaggatttctatataccaaccatgtgcaactgagaaccacataaggagctcacttccatttaaaatagccacacaaaatgaaatatataaaaatacctttaaacacagcactgagagatgtctacacaaagaactacacaacactgatgaagaaatcatatgtgatacamataaatgagaaaacacacatccatgctcaaggagtggcagaatcaatatcatcaaaatgactatactgtccaaagcaatctgtagattcaaaacaattcttattacaaatgtaatttttcaaataattagaaaaaaattttaaattcatatggaatcaaaaagggcctgtgtagtcaaaggaatcctatgccagaagagaaaagccagaggcatcacattacctaacttcaaattatactgccaggctatagtacaccaaacagtgtagtactggtaccaaa

SEQ ID NO: 108668 - DNA, 612 bp, Homo sapiens
gaattcgctggttatagtacgtttctcactatcttgaagtcgctggcttgatagaatggcagaatggccttccgaagaatcagttacagtgccagccaggtggtaatatcttttagggctgggacaatgttctccagaggctatatatactctgagccagtgtttaatatgtggtgccgtttctctgatagctaggattcacgggtccaggaatcaagggatggaagtgggtgtggttccactcactgttccccactagtgacccmctagcaaatttttgccccagttcctgtgaatttatgccttgttggcctagacgtcttttttttttttttcttctgagatagtgtcttgctctgtcacccaggctgggttgcagtggtgcgatctctgctcactgcaacctttgcctcccaggctcaagcaattctcatgcctcagcctcccaagtagctgggattacaggcacatatcaccatgtctggctaatttttgtatctttagtatagatggcgtttcactgtgttggccagtatggtctcaaactcctgacctcaggtgatccacccgcctcggcctcccaaagtgctgggattacaggcatgagccact

SEQ ID NO: 108669 - DNA, 645 bp, Homo sapiens
ttgccttatcagcatcttggaaatataattcctctttactgtsctcattgcccataaattagtttaggcaagggttttcacactttccacataaaagtgaaattattttcacattataaaataattatattctataagtacaggccataggggtaaaagattttttttctttctttctttttattttttttttttccgagacagagtctcactgtgttgcccaggctggagtgcagtggcatgatctcggctcactgcaacctccgcctcctgggttcaagctattttcctgcatcagcctcctgagtagctgggattacaggcacctgccaccgcacctggctattttttgtattttagtagagatggggttttgccatgttggtcaggctgctctcaaattcctgacctcaggtgatccacctgcctcagccccccgaagtgctggggttacaggtgtgagccactgtgcctggacaaaaatctgattgtataagttactggaaacaagactcagaatccttcaaccatcctgaggggtgagggggtccatgttcctgtacagctattctccattcattcagtagggaagccttgacttaggccctcatcatcacctgtctaggcattctaccaattctagat

SEQ ID NO: 108670 - DNA, 527 bp, Homo sapiens
gagcactttctttgtatgacttttaagaagggcataacattgagaaagatagtgggtttttaatgcaagcatattattctttactcattaatgaatttcacagtatttatcaagtcttacccagttccagacctatgacctgggatacagttgtaagcatgatactattgcttctctttactgagctgtagtacaagagagacccagataagttgagaggagattacagagcactctcacaggcttggtacccagggctgtctaccacttgctagttaactgactttaattaggtgactttccatttctcaacctcagtttcctttgcctgcccaagtcatgccacctttacctgtcctggcatcactgtttcacccctggacttcccaagtctgttcaatctccacccacaacttttcctgttataatgccaggtgttttttcacaacagaggaatagggggtgtgccgagmacagtgaaaagtattacagactttgaggacggagagtctcaggggtgaatgtca

SEQ ID NO: 108671 - DNA, 642 bp, Homo sapiens
acaataaatggatatatttggggcaagtgatatacaaacaacacaatatagactatcaactattttgcttttattgagaaagatattactagttatttctgtagaataactcataagcatatattcccagccccaaattagttaataacacaaattcatgttggatttttttctagcacaatgtggttggaaaatagaacctctccttatgcaactcataggtggttgtagtgtgacaggtccctcaccaggatacctaaagggcatatgtctgccacctgaaccctgaaggctgggtggtgagccaaggccatagygcccaacccaggtgtgcctgagaaaccaaacatcctggagaatatctgagaacataccaagaaaaacagtctcattgttcaaacacagtcagcaaagagccaaaaaattagcttaatagcatgccgccatccaggaatgccctgtatgtaagtcaaaataaatcacctactcatcaatctggacttgtctgaaccattctttggtctcttggcaccttcctattttgaaaggggggaacgttacagccccaagtttttctcttaacagaggcttcattcaatatattggagggtgttggcaacacgcaaaggaaatctcttctct

SEQ ID NO: 108672 - DNA, 620 bp, Homo sapiens
ctattaaagtcaacatcaattatttagtttcagcctaagatattcaatgtatatatatwtttttttgtttatttatttatttatttatttttatttatttttttttggagacagggtctctctccgttgcccaggctgaagtgcagtggtgcaatcttggctcactgcagcctcaatctcctaggctcaagcaagcttctcacctagccttccaagtagatgggactaaaggtgtgcaccaccacacccagccagctgatttttgtatgttttgtagagacagagtttcatcatgttgcacaggctggtctcaaactcctgggctcaagcgattcaccctgcctcggcctcccaaagtgctgagattacaggcatgagctaccgcacctggcccattatataacattaatgttatttgagttttctggtattttttgtatttgctttaaaaatgttttgtggtaaaagcaaaaagtgtaagaaatatatccctgtaataggcctataagtttttaagtaatgttgtgataattgcaaagtaaacatggtaaagatctacttaaaaaaaatctgtgtattccttttgtgtaaggaatttggatttgttattggtattaatt

SEQ ID NO: 108673 - DNA, 469 bp, Homo sapiens
gtttcccagagcagacccctgacattgtagaggtgtstgtgtacacacacttatcactgtctgatatgatatcacaattgcttaactattcatacatatgacatttgtatctattacctctgttcccccatcttgcactagaatgttttcatgagagcatgaaatgttttttgtttactgcagtatcctatagacagactaaagtagccaaagctttatccaagaaaccttacatttacatgatatgtgctaagtactaggaattttaagatgactatgagactatcccggagcctctgctatgaacaggcattgtgagcattgccaaggatacaaccttgaagaaagtgaggtgaggcagggtgatgcagatagataattagaaaaatacacatctatctatgtggtgcagatagataattagaaaaatacaaatcgttaaataattacagttttgataagtgctgca

SEQ ID NO: 108674 - DNA, 469 bp, Homo sapiens
gtttcccagagcagacccctgacattgtagaggtgtgtgtgtacacacacttatcactgtctgatatgatatcacaattgcttaactattcatacatatgacatttgtatctattacctctgttcccccatcttgcactagaatgttttcatgagagcatgaaatgttttttgtttactgcagtatcctatagacagactaaagtagccaaagctttatccaagaaaccttacatttacatgatatgtgctaagtactaggaattttaagatgactatgagactatcccggagcctctgctatgaacaggcattgtgagcattgccaaggatacaaccttgaagraagtgaggtgaggcagggtgatgcagatagataattagaaaaatacacatctatctatgtggtgcagatagataattagaaaaatacaaatcgttaaataattacagttttgataagtgctgca

SEQ ID NO: 108675 - DNA, 602 bp, Homo sapiens
aaatatttaatgttttgaagtttatcgcagaacaacacacaaaaaatattttcaaagtagaaatagtgacaacaaagggataaagataatattatttgccttaacatataaagaaaatttaaataaccaataattttttataatcttaggaaaaaataatgatctgaatacaaatatatatacacatatctatttcttatacatatttcaaaatgacattacaaaagataaatcacttaggaataaacttaataagcatcataaaaacactgaaaacaggaaaataattgacagtatatcatatttacttaaactaatcaattctccctaagttaatttatagattgaatgtaccctatagatgattctttttaaaaataaagaaaatgtttctagaaatcaactagggggaaatcaggtaagcatgtccaataccattctgaaaaagcaattctggattgaaaggagcaatctcttatctatccagaacataaagtaggagagcctgctgyaggatacaagattaataatcaggctgacatacagtccccaaacagagccaatgatagatgagaaataatatgaagaatgaatcaaaaaca

SEQ ID NO: 108676 - DNA, 491 bp, Homo sapiens
aagcaacattttacgccctaatcgccaaagagctttcttcatctgaacatttttacaagttatttatgactgatattttaaaacaatatatgtagtgattttcaaacacatatcttgattatatttcacaaataaacaagctytggaagcagataatcgtgggccttccttagagacggggaaagtgaaatataatgtagagtagcttttcccaaagttcacagaacccaaatgctccatgaaaaggggattgcagggtcaagtatgtttgagaaatgcttgttaggaattttcaatgcgcattaacataaatggctctggaaagtcctgaagcaaaatattctatttaattttatttatcacagtattactgcctctagaagtcaattcctgaaaaaaaatttaggcttgtaatgatcacattaagctctgggtaatattactaaattgaagagtcaaaacaacaatttggattcttcaagggaaaactt

SEQ ID NO: 108677 - DNA, 491 bp, Homo sapiens
aagcaacattttacgccctaatcgccaaagagctttcttcatctgaacatttttacaagttatttatgactgatattttaaaacaatatatgtagtgattttcaaacacatatcttgattatatttcacaaataaacaagctctggaagcagataatcgtgggccttccttagagacggggaaagtgaaatataatgtagagtagcttttcccaaagttcacagaacccaaatgctccatgaaaaggggattgcagggtcaagtatgtttgagaaatgcttgttaggaattttcaatgcgcattaacatraatggctctggaaagtcctgaagcaaaatattctatttaattttatttatcacagtattactgcctctagaagtcaattcctgaaaaaaaatttaggcttgtaatgatcacattaagctctgggtaatattactaaattgaagagtcaaaacaacaatttggattcttcaagggaaaactt

SEQ ID NO: 108678 - DNA, 494 bp, Homo sapiens
gccttctttgatatcatgtattgagaacctatctgaatgattgggcccttataacatcatttgaacagctatatatagctacatttgaaccatccactctccagaataccaaatatgagagtaagttttctgttacytataacagaaaaaatataatgcacaagtgatagcgtgaaaggtaatgccaaaatatgtaatgttctataagtctatatatagagaagtcaggaatgggtaagattgccatagcagagtcaagaaatctccagaaggcacaggagcctaacgtggggtttggagatgaataaaaataatattatcacagagaagatgaaattctttccagttagaagtaataatacatacaaaatcaagagcactcagcatgtgcccaggatataatatttaataaatgtaagtttaaagaaaaacagaatgaatacagagcatgtatgtatcaaggaagagtagaatacagaattgttcaaataata

SEQ ID NO: 108679 - DNA, 602 bp, Homo sapiens
ccttctctctggtggtccttgctcaaaggcacaacctcttttttacagataaaactcaattttcaaactcaaagggaagagayggagaggcaaaggattccttgatcctctattatgtgccaggattttcccatgccttaactcattttaatccccaccacaacccgtacaggctagtatcatggacccatttcccagatgggaaagctgaagcatagagaagcagtaagcagcaagcaaaattctcaatttccataaataacctaaccttctcctctttggaaccttctcagttcagaaaaacaaaaaaaaaaccaagaatttaaaaaatagggcattttcaagatttctgattatggcttttcttttaacaaacttgttttttttcaaaataataattcctgatcatttctatgtttagaaaaaagcacattattgaaaacatgaaaatttaggggagtgatatggtttggatccgtgtccccacccaaatctcatgttcaattgtaatccccaatgttggaggtggggcctgcaaggaggtgactggatcatggaggcagtttctcatgaatggtttagcaccatatgctggatgctgt

SEQ ID NO: 108680 - DNA, 602 bp, Homo sapiens
ccttctctctggtggtccttgctcaaaggcacaacctcttttttacagataaaactcaattttcaaactcaaagggaagagatggagaggcaaaggattccttgatcctctattatgtgccaggattttcccatgccttaactcattttaatccccaccacaacccgtacaggctagtatcatggacccatttcccagatgggaaagctgaagcatagagaagcagtaagcagcaagcaaaattctcaatttccataaataacctaaccttctcctctttggaaccttctcagttcagaaaaacaaaaaaaaaaccaagaatttaaaaaatagkgcattttcaagatttctgattatggcttttcttttaacaaacttgttttttttcaaaataataattcctgatcatttctatgtttagaaaaaagcacattattgaaaacatgaaaatttaggggagtgatatggtttggatccgtgtccccacccaaatctcatgttcaattgtaatccccaatgttggaggtggggcctgcaaggaggtgactggatcatggaggcagtttctcatgaatggtttagcaccatatgctggatgctgt

SEQ ID NO: 108681 - DNA, 602 bp, Homo sapiens
ccttctctctggtggtccttgctcaaaggcacaacctcttttttacagataaaactcaattttcaaactcaaagggaagagatggagaggcaaaggattccttgatcctctattatgtgccaggattttcccatgccttaactcattttaatccccaccacaacccgtacaggctagtatcatggacccatttcccagatgggaaagctgaagcatagagaagcagtaagcagcaagcaaaattctcaatttccataaataacctaaccttctcctctttggaaccttctcagttcagaaaaacaaaaaaaaaaccaagaatttaaaaaatagggcattttcaagatttctgattatggcttttcttttaacaaacttgttttttttcaaaataataattcctgatcatttctatgtttagaaaaawgcacattattgaaaacatgaaaatttaggggagtgatatggtttggatccgtgtccccacccaaatctcatgttcaattgtaatccccaatgttggaggtggggcctgcaaggaggtgactggatcatggaggcagtttctcatgaatggtttagcaccatatgctggatgctgt

SEQ ID NO: 108682 - DNA, 609 bp, Homo sapiens
aatatacacagtgatgtatggcatataataaagagctcatattttaaaaaattaagttcttataatggccaatagagaccttagatgatacgcctacctcaatttcccccattatttattgaccttaagttctactactcttttccttattgtcttcactccacccatgctggcctccttgttgaacttcaaactaaccagaaatgccttcatcttaaggccttcacatctgctgttccctcaagcaggaatgttcttccccagatacctgcatggctacttccctcatcttcttcagttctttgttcatatacagtcttcttagtcaggcttccctgaccactctctcaaattttcaccttctttccagaattcctatccccgtttccagttttattcttttccatagcacatatgaccttatgacatatcataaatcttatgtactttattgctttttcttccccagttagaatgtaaatgctatgaggccatggtacrtattgtgtttgctacttcatcatcagtgcttacaatagtgcctggcacacagtaggcattaaacaaatatttgttgaatgataaaatggtgaaaatctacagaatact

SEQ ID NO: 108683 - DNA, 548 bp, Homo sapiens
ttttgaaaggctacagagtctctgtgatggtctttttttttttttttttctgagacagagtcttgctttcttgcccaggctggagtgcaatggcatgatcatagctcacygcagccttgagctactgggctcaaatgattctcctacctcagcctactgagtagctgggactacaggtgtgcaccaccatgcctggcatctgggtagttgttttttttgtaatttttgagatgggggtctcactatgttgcccaggctggtctcaaacttctggcctcctcctgtctcagcttcccaaagtgctgaggttacaggcatgagccactgtgcctggctgtggtggcctcttgatcatcagctgaaccacagtcccatgaaagtctagaatgatggctgagggctcagcagctggatttccaatactttccctgccacagcttcccccaagccctgtgcaaggtacctgaatgaaatctacacatagagctaagagctgggcaaaaacatactctttcataccaagaagcttttgctccaaaccactgtcc

SEQ ID NO: 108684 - DNA, 538 bp, Homo sapiens
aaagttttgctgtacgaaaacactattaagaaaataaaaagtcaagctacagactgggagaaaatattagaaaatcacatagctgacaaatgatttgtctctggagtgttaaaagaactctcaaaactcaacggtaagaaaataaacaaacttcattagaaaatgggtaagacttgaacaracaaagaccaaagaccatatatggaagtcaaattagtatagtataagatgtttaagatcatttgccattagggaaatgccaattaaagccacaatgagatatgactatgtacctttaggagggcaaaaaaaaaaagcccagaaaaaaacaaaagtggacattattaataatgccaatgcttcagatgtgaaacaactggaaacacttgtgcatggctggtaggaatataaagtagtcaaaacactgtggaaaacattttgacagtttcttataaaatttacttataaagttaaatgctcccaataatcctacttataggctatcctagagacattaaaacttatgttcatacaaaaa

SEQ ID NO: 108685 - DNA, 538 bp, Homo sapiens
aaagttttgctgtacgaaaacactattaagaaaataaaaagtcaagctacagactgggagaaaatattagaaaatcacatagctgacaaatgatttgtctctggagtgttaaaagaactctcaaaactcaacggtaagaaaataaacaaacttcattagaaaatgggtaagacttgaacagacaaagaccaaagaccatatatggaagtcaaattagtatagtataagatgtttaagatcatttgccattagggaaatgccaattaaagccacaatgagatatgactatgtacctttaggagggcaaaaaaaaaaagcccagaaaaaaacaaaagwggacattattaataatgccaatgcttcagatgtgaaacaactggaaacacttgtgcatggctggtaggaatataaagtagtcaaaacactgtggaaaacattttgacagtttcttataaaatttacttataaagttaaatgctcccaataatcctacttataggctatcctagagacattaaaacttatgttcatacaaaaa

SEQ ID NO: 108686 - DNA, 538 bp, Homo sapiens
aaagttttgctgtacgaaaacactattaagaaaataaaaagtcaagctacagactgggagaaaatattagaaaatcacatagctgacaaatgatttgtctctggagtgttaaaagaactctcaaaactcaacggtaagaaaataaacaaacttcattagaaaatgggtaagacttgaacagacaaagaccaaagaccatatatggaagtcaaattagtatagtataagatgtttaagatcatttgccattagggaaatgccaattaaagccacaatgagatatgactatgtacctttaggagggcaaaaaaaaaaagcccagaaaaaaacaaaagtggacattattaataatgccaatgcttcagatgtgaaacaactggaaacacttgtgcatggctggtaggaatataaagtagtcaaracactgtggaaaacattttgacagtttcttataaaatttacttataaagttaaatgctcccaataatcctacttataggctatcctagagacattaaaacttatgttcatacaaaaa

SEQ ID NO: 108687 - DNA, 618 bp, Homo sapiens
gagggcaccagtaagatgttaaaactggttcaaagaacatttatggaaccaagtmtttataggtaacttaataaagcactgttaggataaaaacttctggactagatacaaaaccttctaatgtccagtagagcaataaactgtaaacttcagagttacatattccattggacagaaattatttacatctccactggataaaaatctataaaagttatataacttcactaaagctgggaaatttaatcaattttgaacagtgagttaacaagataaaggcttctaaacttgaatgtgcctgtgtttctgaaggacagtaaaagagcgtgtcatccctcttttgcctatttcaaaattttggataattcaccagtttctttaccacacttctggaatcataattaatctaccataaagtctggtatcagtgtgtttgtcctgattatgtagatatgtgtaaaaaagtgtttattaactatgcttgcctcattaattttgctctgaaaattgacagtcctacaatattgagcaagttctgtgtggacattttcataaagaatcttggattggacttttgaaagcctgtgtcatttgctcttccatcctaaggctaggaaa

SEQ ID NO: 108688 - DNA, 618 bp, Homo sapiens
gagggcaccagtaagatgttaaaactggttcaaagaacatttatggaaccaagtatttataggtaacttaataaagcactgttaggataaaaacttctggactagatacaaaaccttctaatgtccagtagagcaataaactgtaaacttcagagttacatattccattggacagaaattatttacatctccactggataaaaatctataaaagttatataacttcactaaagctgggaaatttaatcaattttgaacagtgagttaacaagataaagscttctaaacttgaatgtgcctgtgtttctgaaggacagtaaaagagcgtgtcatccctcttttgcctatttcaaaattttggataattcaccagtttctttaccacacttctggaatcataattaatctaccataaagtctggtatcagtgtgtttgtcctgattatgtagatatgtgtaaaaaagtgtttattaactatgcttgcctcattaattttgctctgaaaattgacagtcctacaatattgagcaagttctgtgtggacattttcataaagaatcttggattggacttttgaaagcctgtgtcatttgctcttccatcctaaggctaggaaa

SEQ ID NO: 108689 - DNA, 449 bp, Homo sapiens
aagtcagtcataagaactttattcatgaggagtcttactctattctcagtaaggatgggatgtcataaagtgacacagaaaagaatctaaacaaacaggccttgctaagttcccttcccccccccaccaagtttactaccattaaatcatacacctttttgtctaatcatgtttctccacagtcacatgcttctttcatcatccttaacataaaaaatacagttttcgctgtataggtatctataggtctttatttctgaaggctcccgggtcatgtaagacatatgaaataaatttgttatgcttttctcttattaatctgtcttttgttataggagtgtcagccacgaaggctgagattggtgagaaaaaggtattacttttcctaccytacagtgccatccttttccaagaggatctgaggctgaccttcctgttgtagatgaatt

SEQ ID NO: 108690 - DNA, 572 bp, Homo sapiens
tggctggtgatatggtttggatctgtrtctctgcccaaatctcatgtcaaattgtaatccccagtgttggactgtgttggactcggggcctggtgggaggtgattggatcctaggggcagagttctcatgaatagtttatcatcatccccccttggtactgtatagtgagtgagttctcacgagatctggttgtctaaaactgtgtaacacctcccctctctcttctcttcctcctgctccagccatgtaagacgtgcctgcttccccttcaccttccatcatgactgaaagtttcctgaggtctccccagaagccactatgcttcctacacagcctgcagaactgtgagccgattaaacctcttttctttataaattgctcagtcccaggtatttctttatagcaatgcaagaacagactaatatacctggctaattttttttttaaagatggggtctctctatgttgccaaggctgatctcaaactcctggcctgcagtgatcttcctgccttggcctgccaaagtgctggaattataggcatgagccactgcacctggccaggagaagc

SEQ ID NO: 108691 - DNA, 601 bp, Homo sapiens
tggtattccattgcatatctaagaccatgattgtatccattcatccattgatggacacttaggttactttcatatcttgtctattgtaaataatgcaacaataaacacgtgggtgtggatatctctttgagatactaactttgcttccttcgtatgtatacccagaagaaatattgccagatcctatagtagttctacatttaattttttgaggaagtgatgggatctttttgggaaggccaaggtttcttgcaacagggaactcatacttgtcttggcgattcttttccaacttggcatccactcctatcaagcattaatattggcatgtccagaaggtgaatgccatgatgaaattagtgttttctgattagccagtgaatataagctagtctagatgaggcccttgaaactgaatgacrtccgtggaatactacacagccataaaaaaggatgaaatcatgactttcgcagcaagatggatgcagctaaaagctattatcctaggtgaattagtgcaagacagaaaaccagatattgcatgttctcacttataagcaggaagctaaacactgggtacacatggacataaaaacggaaa

SEQ ID NO: 108692 - DNA, 618 bp, Homo sapiens
gtggtgttaatgaattttggggaagtggtgggggcacacacattcagtccataccaccctggaactccagggattaaagctgagaagtcagagtggaagaaggtagagccagwgtgctctcctgattcactcctgtacatagagaaggaaccagacacatggaatgcaaattccagttgcaacacattttgtagcttggactgttcactgtaatccactgacattctacttcttcatctgtaacaagaacaaagcaatcctaataccaatcactatcatttattgggcccgttacatatcaaaccctaagctgagctggaactttacctacagtgtgtcttggtgagttctcaccttagcatttcaatgccagtgatggtgtctccatttgaggagataagagtgtctatgaaagattgaccaaaaatccctacttgtcagggatcctgagaaaatccagcgacatggcaggagacagccacacacagggacccatagatagtgtccatttctatgggaagaggggtaaaatggactttcgtggaactactatgaggcaggctatgcttgtggctttcacccaccttctgcctagcagttgtttcaggaaagtccatt

SEQ ID NO: 108693 - DNA, 471 bp, Homo sapiens
cagcgaatatcgagggagaaaagcagcagcctcatgtaggaagtgtagggccagggccccctctcaaagctcattcacatgtacttactttgactgccacaacgaacacatttgtaggctttccggcttgtggcttacctgcctgtgaccacaaagctcatatgtaccacaagtcctctttttcctacttcaaacaaacaatgctcatctccctcctctgaatttttttgtttgagagtttccaccttaaggttttcaaggggtccacaattcagttgtatcttgagtggaaatcttattctgtaaggcccctgtcttcattctcacacagtcaaagcacactagctgacaagcaggctgggarcagagccatgataaagcttcaagccctgcctgcccagagctcacagccccggtgggtgacccggaaaataagcaggcacctgcaaaaggcctgtaaagtgctgtgat

SEQ ID NO: 108694 - DNA, 596 bp, Homo sapiens
ttgtgccatttccacgcggaaaaaaaaattgttttctccatgtgactgtcagtgtatgtcaaaatgataatggggaatgtgtaatacaagatattgctacttatcaatggactstgaaaagaaaattagctcaagcatcccttgatataaaaagcaaatatgaggtcttgaatcacaccatcctgctatcaacatgttttgttacaagtcagtttatgttccttgagtaccacgtggtttacagtgcatttctctgacagcaatacagaacctcaaacaaatattacccttgcctccaataccaaccaacattaaatacaagttctattcctgaactcagtggcattcagaaattcaaaatgcttagatgccctctccatcgatttgcttctctgggtattgggctgacttcctgttcatcagggggtggtggtggtggctggaggaggaagtagatggttttaaccatttgtaggtctaattactcaagctcagtgagcccacattgaagaaggagaaggagaagaagaaaaattctctttcctattgttcatatataaaatcccagggaaagattctaatcaactctgtttgga

SEQ ID NO: 108695 - DNA, 619 bp, Homo sapiens
ggctgatgtggggactggcttttcttcttggtgactcaaagacaaagccagcagtacttatttaaaacatgccacgtgctcatgtttatgtgaggagtagaagacaacggctttggtaaaggagaaaattcactgcataattgaatctttgaaattccagagggaatggccttttctgagaacaatgtctgttattaacagaagaatttcaaggccaaatgcagagttttccaccaggttgcatagtgagagtcatattttgaatggatatatagtttttaaaaaaaagaactctgaagagttatggatgtttctcaatatctttctcaagaaggcaacagattttggactcagcagataaccctttatcctatagctgtagtgatgatgacatgataagctgtgtagcctgagcttagatgcacaaatgaattctgggcaagggtcccactaacctgtcttccctgggctccagacccacatmcctatctccttgttgggggctccaacttgtacagccagcacatcaggctcagaaggtacaaagttgacatatcaattttcccatgaaaagagatcttgttttgacaacactagtctttcagttacctagactcaa

SEQ ID NO: 108696 - DNA, 619 bp, Homo sapiens
ggctgatgtggggactggcttttcttcttggtgactcaaagacaaagccagcagtacttatttaaaacatgccacgtgctcatgtttatgtgaggagtagaagacaacggctttggtaaaggagaaaattcactgcataattgaatctttgaaattccagagggaatggccttttctgagaacaatgtctgttattaacagaagaatttcaaggccaaatgcagagttttccaccaggttgcatagtgagagtcatattttgaatggatatatagtttttaaaaaaaagaactctgaagagttatggatgtttctcaatatctttctcaagaaggcaacagattttggactcagcagataaccctttatcctatagctgtagtgatgatgacatgataagctgtgtagcctgagcttagatgcacaaatgaattctgggcaagggtcccactaacctgtcttccctgggctccagacccacatacctakctccttgttgggggctccaacttgtacagccagcacatcaggctcagaaggtacaaagttgacatatcaattttcccatgaaaagagatcttgttttgacaacactagtctttcagttacctagactcaa

SEQ ID NO: 108697 - DNA, 646 bp, Homo sapiens
cagataatactggctataaggaatatcacaggatctcctgccaagaaaatgagattcctatgtgatttcttatatctctccatatgtttcctataagaatactagccatcaaaatgacaaattcaaattggtatattcagacaaatagaaagaaagtatttccctatccctcaaatgagttggataaccatgaatggtgagtcagatgagaaagaaaatgcaacagctctcactcagacctggacaaaatgttaaaagatttagtaggatggtcaaaaacatagttttcaccttaactgcttactttcaactcttcattggaataaatgcatataggccaaattaataaggaataagtagttatattttaggttaatagttgtaccattattagaaaaaatctgcctcatataaatgcagccatgagcacttcctcycctttaaaaactagtataataaaaggaatgactgattgtacttggcatatttcccctctctgtggttgcatttcactgcagttatgaaaacataatataatttttcccaaggccatggttacctgacagaagcatttaaaaaccaactacactttggacttccaggcacgtgtgtgtgtgagtcataagacagttcagaagagaaattc

SEQ ID NO: 108698 - DNA, 646 bp, Homo sapiens
cagataatactggctataaggaatatcacaggatctcctgccaagaaaatgagattcctatgtgatttcttatatctctccatatgtttcctataagaatactagccatcaaaatgacaaattcaaattggtatattcagacaaatagaaagaaagtatttccctatccctcaaatgagttggataaccatgaatggtgagtcagatgagaaagaaaatgcaacagctctcactcagacctggacaaaatgttaaaagatttagtaggatggtcaaaaacatagttttcaccttaactgcttactttcaactcttcattggaataaatgcatataggccaaattaataaggaataagtagttatattttaggttaatagttgtaccattattagaaaaaatctgcctcatataaatgcagccatgagcacttcctctcctttaaaaactagtataataaaaggaatgactgattgtacttggcatatttcccctctctgtggttgcatttcactgcarttatgaaaacataatataatttttcccaaggccatggttacctgacagaagcatttaaaaaccaactacactttggacttccaggcacgtgtgtgtgtgagtcataagacagttcagaagagaaattc

SEQ ID NO: 108699 - DNA, 557 bp, Homo sapiens
atacttgttatcatgaaaaatgacaaatttgccatctgatcaaaatgttaacaaggtaactgtcagtgagatggatctctgactgtcactgcaagccagaacatgaggatacattgatatttctcaatacagcccctgcttccccaacgttcactaactacatttccacagtaaggtaataaatcactcagaaataacgagctatataggatctctggggtatgatagatgtgtccyaacagcactatctgcaagatagaaaacaattgataatgatctaaagaaaaccctaatcaactgccattttccataatggggtagatgaagcaaagatatgaaatcttaactatgtgatgcatgttatgacaaaaccggactgctccaaaaaaaacccacacagccccaaacaaaacacaaatgacctaacattacgtagggtcgaataaatgaaaaataaagttaataacacagtctggatacaaacattatattggacactggcaatgatgggataatcacagcaattgctgggtccacaaacagctaaatagtggagg

SEQ ID NO: 108700 - DNA, 618 bp, Homo sapiens
ttggtgccacgtctcaacaattctcttttcatctatcccctaatcatgcaactgaatgcttccagtaggccacacagtagggacaaaatgatagtaagaccacctggctatagatacctgcttctagagaggccaggttccaacccattacaagctgataaccatatgtatgatttttgctacactggccaagtatttggatcttttttaaacatatttgattatttaccctttgattagaatttgtgaataaaaatgtcttttaagagacacaaaggaagggggtaygggcaatagctcattactaaaaatcattttagtgtggaaagtgggcttcactattcctataaggcagtcattttcaaacttcagagcatcacaagccccctgttagattataatagaaccctgaggaaaatgcacatacacataaatgttcacatataatttatacaggttgaaggacctcccaaaacaaaacatatctatcaaccacaaactccagtgtaaaaaagtggctatatgaagacttcaaatcaccctcacttcctgtgcatataaccatttttttcttcagacaaataaaaaatacaattaagtttaatacaagaagaggct

SEQ ID NO: 108701 - DNA, 618 bp, Homo sapiens
ttggtgccacgtctcaacaattctcttttcatctatcccctaatcatgcaactgaatgcttccagtaggccacacagtagggacaaaatgatagtaagaccacctggctatagatacctgcttctagagaggccaggttccaacccattacaagctgataaccatatgtatgatttttgctacactggccaagtatttggatcttttttaaacatatttgattatttaccctttgattagaatttgtgaataaaaatgtcttttaagagacacaaaggaagggggtatgggcaatagctcattactaaaaatcattttagtgtggaaagtgggcttcactattcctataaggcagtcattttcaaacttcagagcatcacaagccccctgttagattmtaatagaaccctgaggaaaatgcacatacacataaatgttcacatataatttatacaggttgaaggacctcccaaaacaaaacatatctatcaaccacaaactccagtgtaaaaaagtggctatatgaagacttcaaatcaccctcacttcctgtgcatataaccatttttttcttcagacaaataaaaaatacaattaagtttaatacaagaagaggct

SEQ ID NO: 108702 - DNA, 618 bp, Homo sapiens
ttggtgccacgtctcaacaattctcttttcatctatcccctaatcatgcaactgaatgcttccagtaggccacacagtagggacaaaatgatagtaagaccacctggctatagatacctgcttctagagaggccaggttccaacccattacaagctgataaccatatgtatgatttttgctacactggccaagtatttggatcttttttaaacatatttgattatttaccctttgattagaatttgtgaataaaaatgtcttttaagagacacaaaggaagggggtatgggcaatagctcattactaaaaatcattttagtgtggaaagtgggcttcactattcctataaggcagtcattttcaaacttcagagcatcacaagccccctgttagattataatagaaccctgaggaaaatgcacatacacataaatgttcacatataatttatacaggttgaaggacctcccaaaacaaaacawatctatcaaccacaaactccagtgtaaaaaagtggctatatgaagacttcaaatcaccctcacttcctgtgcatataaccatttttttcttcagacaaataaaaaatacaattaagtttaatacaagaagaggct

SEQ ID NO: 108703 - DNA, 578 bp, Homo sapiens
ttaaatatttttttaactcagttttaaacaacatctctcagaaaataccattcttagtagaataataccttctttgaaggcgtacatagacttacatatgtgatatttgcaaccaatcagcattttgggtgactgtgcaggtcttgggaagtgggaggcacagtaaaaatgaaagactttgtttgacctccctgagttctaagcaagatgtggtgcctgagaaagcttatgcaggtcctactgggcaagactataaagccaagcrcaacagagaaaaaaataccttagggcacggacgtttggtttctcaaggcctgtgatggggaaggccctgaaactcccctaacagggatggaagaaatctgtggatattttgttcatgagaagtagaggaaaaggggaggggagaaagtggaaacagcaacgtgtctggaaaccagctggcacctgtgccttgaagtaaataaattgggtaaagaaatatgatagctagatagtcctagaaatgaacatcctgaaatcatcccataaactttattttggagggggatagggaagagaagagactctttcttcca

SEQ ID NO: 108704 - DNA, 550 bp, Homo sapiens
ttgatccattccaaagagggaggcagaaaacttcaaagcagaataacagtcccctgcactctgccctactctaagtacccggagcattcattatgaatcagcccacctcccctctgcccacgtggggctgtgcaagccagacacgcaattcagacccacagcttgttcagcctccccgagaacacaccgtgtgcaaggtttgggaatggaaatatagcagggtgcccactcctaagtggggttaattcacggatgtggaaggaatctctacctttcgcagagastgctagaaacaccagcttcccttctttctcttcaaaggaagatggtgtttttttctccttaatcctgagtcatttacagtaagatacacgtaaataatagtccaggaggtaaaatgtgattctacacagtctctacctcaaaaataagttttttgggggacttgtttaccattccgaatgtgacccggcagccctttacaaaaagtaacatttgcttttattagatacagcagatctatttctgtgagcaccgcagatgtaactgg

SEQ ID NO: 108705 - DNA, 588 bp, Homo sapiens
ggctggtcttgaactcctgacctcaggtgatccacctgcctcagcctcccaaagtgctgggattacaggcatgagccacaaggcctggcctaagatatctttttataagcaaatgaattgtggtgtaaaaatgtaacggccatttttcttcccatagtgggactgattctcatttgttgtttgggggaggttttgatttgggttttctttttcctaaatccatagctcagcagccagctgtgtcagcactgtagccattttgcygcaaacatctttgccccaggtcctgatgtgtctacccccaagttctgttccttaccctttccctctgggtttcattgcctagaattacaactccagagtctcatgcaaaacatggcatccaaaatggaagggcttacagtcaggaatgtggaggtctgagaagcaaatggcacccaacagcaagaaaagaaaatcatcccaaatacttaaaggactaggtagtatggtcccattctatggatgagacaccaacagctcaggggcatatccaagggtaaacctagaccagaataaacacaaataacccaattcccagcctattca

SEQ ID NO: 108706 - DNA, 460 bp, Homo sapiens
ttcctgagacatgtacccactctctttagactgttgccatctaaggtgcacacgctggatttccacatgctgcaggaaktgaagaacctcttagaaacctggtcttcataaacttaaggcttatctgggttagctgcaagagacagcaagagaacccatgcagatctttcatatgctcccatctgactcattccctgtcctcttctccccacgaccattcctgccccaacttggcccagaaaccaaatgtgaattttctatttcccacctcagcactagtccatgccaggacaccagctgacaatttcttggttttattgtcaatagctgtaccatgtgatcaattactgtcttcacttagaacgaagccagagcccaagaatatttatattctaccaatacgtgcctgttacaagagaaggaaatatgagttattaagtttaactttttatgtgaattc

SEQ ID NO: 108707 - DNA, 417 bp, Homo sapiens
cagttaaaaaaccgtctagggtttcagctgttcggtgaggctgctgccaccgcctgccggccaccagcccgcggccagcaccgcggcgaccgcgcgcggtgggcgaagtttccacgactcccccgtccctccccgcccactaccgggggcttcgggaacggagaggtggggagggaaccggaggacccgcgggaatackccccggccgctcgcgcactcagcccgcctcgatctgtcagcaacctctcctccacacgggtgcgactgccgctcgcgcccgcccgcccgcgggtgttttccttaggtcctggaccgttttccccagcactgtatttgagcagcacttgcccctcgcttgtccgccccaccccatcccccgccttctttcatatgttctccactctcagcaacgtgcaa

SEQ ID NO: 108708 - DNA, 417 bp, Homo sapiens
cagttaaaaaaccgtctagggtttcagctgttcggtgaggctgctgccaccgcctgccggccaccagcccgcggccagcaccgcggcgaccgcgcgcggtgggcgaagtttccacgactcccccgtccctccccgcccactaccgggggcttcgggaacggagaggtggggagggaaccggaggacccgcgggaatactccccggccgctcgcgcactcagcccgcctcgatctgtcagcaacctctcctccacacgggtgcgactgccgctcgcgcccgcccgcccgcgggtgttttccttaggtcctggaccgttttccccagcactgtatttgagcagcacttgcccctcgcttgtccgccccaccccatcccccgccttcwttcatatgttctccactctcagcaacgtgcaa

SEQ ID NO: 108709 - DNA, 612 bp, Homo sapiens
cattgactgctacaactggctcttaaaatgtaagagaaggaacttttcccccttcctggagtatcaaccagctctaactgacagattgaatgagaacttcccttttggatgcatctaatatttgccattacccatctcatctgcacacatgtacacacacacatgtatgctgcagacagtatccatccaatggatcatttatttacacataattaatatttattttaaattgtagtttgggaagaaaacagcagagcatcttcccaggtctccaatgcagagaagttacagtacattaaatttttatattgtgttactaatgcagactaaactagaggctttaaaaattgatgctgytacttaaacagcataaaatgaggaggatttgattgggcttaaaaataaaaatgtcagtcttaactacagctggatggggcatgcaagtattattttaaatgataggtataattcattagacaatggatcaattttttgttttctttccttttcaggaggtaatctctccaaacaaaggcataaaaagaaaaacctcccttcaactaaccaacctaatcaaagcgttctatttaaatctaggtattatatgaacta

SEQ ID NO: 108710 - DNA, 398 bp, Homo sapiens
tcatctaaaaaatgtcatttccaccttcaggcctatatgaaggggtttaagaataagaactgcaagaaaatgagggctaatgtgtttacaatttcttctaacggaaaaaacatsaggcttacatgggaaattctttctcaaggatgctagactccttgaggccacagatgagagtgacacagcaggcaagtcgtgctgggtccaaggagctagagcaggagatatcccagaagcccagctctggcactcaactttcctgatacctggtttaccttatttctacagtagtgaccaatctgaaataccttagccgaaacaaaatgtattaactcctaaagggaaaaaatgagaatgtaactttccagattaagtccaaggcaaacattaacatggtttat

SEQ ID NO: 108711 - DNA, 398 bp, Homo sapiens
tcatctaaaaaatgtcatttccaccttcaggcctatatgaaggggtttaagaataagaactgcaagaaaatgagggctaatgtgtttacaatttcttctaacggaaaaaacatgaggcttacatgggaaattctttctcaaggatgctagactccttgaggccacagatgagagtgacacagcaggcaagtcgtgctgrgtccaaggagctagagcaggagatatcccagaagcccagctctggcactcaactttcctgatacctggtttaccttatttctacagtagtgaccaatctgaaataccttagccgaaacaaaatgtattaactcctaaagggaaaaaatgagaatgtaactttccagattaagtccaaggcaaacattaacatggtttat

SEQ ID NO: 108712 - DNA, 504 bp, Homo sapiens
gaaactggtcagccgtttccaccattattattttaacagaaaccaaagaaaccaccacctcctgctaaggctccaggtatgtaagaagcatattattcagtttgctattttccattttttaaaattctaaaatggtaaaattggatctaatgcaaactattgatttttatcaagtatgatgtctgtaaacatttttagaaatatatgaaaattgagtgttcacatgcattagtatctgtcatttttcttaaagtacaaatggtataaaatagggatcttgaaaatgtagatactttatatgtaattttgagttaataaaattaatcaaatttaaactgttttagaaaacttaatatattgacctggccaactagttattctaccktttcaaatgaaatccatttgttaatgtctcaaataataatttatgtactcttcttttcagggaatatgctgaaggttaaacaaagtagatgattttaaacagatgaataaattatggta

SEQ ID NO: 108713 - DNA, 376 bp, Homo sapiens
tgccagtggccctgccctggatttcattatttttgaaagtgacaaggtttagttttctacccagagttacatgggagttcagagtcaagaaaattgggttcactagtaaaaatcaagtcgtcgtctttacctacatttgttttttggttcatacctgtaaatatatatttgtgtcatattgttggctaagaagcttctgggtagcatgtatktttaatagaaacatgttttatatatgtggtgttgtaaaattggtttgttttattcaatagtgtgattcagatatcatttctaatacagatatatcattctttaatgactacagtattttatcagatgcatgtactgtagtttatttaaatagttcacaactaat

SEQ ID NO: 108714 - DNA, 518 bp, Homo sapiens
tggggggttggccggagccgatcggctcgctggccggccggccggcctccgctcccggggggctcttcttgatcgatgtggtgacgtcgtgctctcccgggccgggtccgagccgcgacgggcgaggggcggacgttcgtggcgaacgggaccgtccttctcgctccgccccgcgggggtcccctcgtctctcctctccccgcccgccggcggtgcgtgtgggaaggcgtggggtgcggaccccggcccgacytcgccgtcccgcccgccgccttctgcgtcgcggggcgggccggcggggtcctctgacgcggcagacagccctcgctgtcgcctccagtggttgtcgacttgcgggcggcccccctccgcggcggtgggggtgccgtccccgccggcccgtcgtgctgccctctcgggggggtttgcgcgagcgtcggctccgcctgggcccttgcggtgctcctggagcgctccgggttgtccctcaggtgcccgaggccgaacggtggtgtgtc

SEQ ID NO: 108715 - DNA, 498 bp, Homo sapiens
gggggtcccctcgtctctcctctccccgcccgccggcggtgcgtgtgggaaggcgtggggtgcggaccccggcccgacctcgccgtcccgcccgcygccttctgcgtcgcggggcgggccggcggggtcctctgacgcggcagacagccctcgctgtcgcctccagtggttgtcgacttgcgggcggcccccctccgcggcggtgggggtgccgtccccgccggcccgtcgtgctgccctctcgggggggtttgcgcgagcgtcggctccgcctgggcccttgcggtgctcctggagcgctccgggttgtccctcaggtgcccgaggccgaacggtggtgtgtcgttcccgcccccggcgccccctcctccggtcgccgccgcggtgtccgcgcgtgggtcctgagggagctcgtcggtgtggggttcgaggcggtttgagtgagacgagacgagacgcgcccctcccacgcggggaagggcgcccgcctgctctcgg

SEQ ID NO: 108716 - DNA, 448 bp, Homo sapiens
tctctcctctccccgcccgccggcggtgcgtgtgggaaggcgtggggtgcggaccccggcccgacctcgccgtcccgcccgccgccttctgcktcgcggggcgggccggcggggtcctctgacgcggcagacagccctcgctgtcgcctccagtggttgtcgacttgcgggcggcccccctccgcggcggtgggggtgccgtccccgccggcccgtcgtgctgccctctcgggggggtttgcgcgagcgtcggctccgcctgggcccttgcggtgctcctggagcgctccgggttgtccctcaggtgcccgaggccgaacggtggtgtgtcgttcccgcccccggcgccccctcctccggtcgccgccgcggtgtccgcgcgtgggtcctgagggagctcgtcggtgtggggttcgaggcggtttgagtgagacgagacgagacgcgc

SEQ ID NO: 108717 - DNA, 505 bp, Homo sapiens
cggcggtgcgtgtgggaaggcgtggggtgcggaccccggcccgacctcgccgtcccgcccgccgccttctgcgtcgcggggcgggccggcggggtcctctgacgcggcagacagccctcgctgtcgcctccagtggttgtcgacttgcgggcggcccccctccgcggcggtgggggtgccgtccccgccggcccgtcgtgctgccctctcgggggggtttgcgcgagcgtcggctccgcctgggcccttgcggtgctcctggagcgctccgggttgtccctcaggtgcccgaggccgaacggtggtgtgtcgttcccgcccccggcgccccctcctccggtcgccgccgcggtgtcygcgcgtgggtcctgagggagctcgtcggtgtggggttcgaggcggtttgagtgagacgagacgagacgcgcccctcccacgcggggaagggcgcccgcctgctctcggtgagcgcacgtcccgtgctcccctctggcgggtgcgcgcg

SEQ ID NO: 108718 - DNA, 370 bp, Homo sapiens
tcgcctactgtggcccgcgcctccccccttccgagtcgggggaggatcccgccgggccgggcccggcgttcccagcgggttgggacgcggcggccggcgggcggtgggtgtgcgcgcccggcgctctgtccggcgcgtgacyccctccgccgcgagtcggctctccgcccgctcccgtgccgagtcgtgaccggtgccgacgaccgcgtttgcgtggcacgggggtcgggcccgcctggccctgggaaagcgtcccacggtgggggcgcgccggtctcccggagcgggaccgggtcggaggatggacgagaatcacgagcgacggtggtgcgggcgtgtcgtggttcttggctgcggtcgctccggggcg

SEQ ID NO: 108719 - DNA, 602 bp, Homo sapiens
ttccatgtggtgttaagcctgcaggtgaycaaagtgcaagagtgaaggaagcttggcattctctgcctaaatttcagaggatgtatgagaaaggctggatgcccagggagaagcctatgcacagctggagccctcaaagaggacctcttctaggacagtgccaagtggtaatgtgggattggaggccccacactgtgggggctgcctagtggagctgtgggagggggggctgctgccctccagatcaaagaatgatagagccaccagcagctcctgtcttcagtgtagaaaagctgtgggagcagagctgcccaaagccttgggagcccaccctatgcatcctggtaatgctctatgttcccaggatgtgggacatggtttcaaaggagattattttggaacatcgagatttaatgactgccctgctgggatttgaacttgtgtggggcctgtagtccctttcttttggccaatttatctcatttgtaatgggaatgtttaccaaagacctgtatcccagttttatcttagaagtcaataactggttttgattttacaggctcattggtggaagggacttgccttgtctcagaagaaactgc

SEQ ID NO: 108720 - DNA, 602 bp, Homo sapiens
ttccatgtggtgttaagcctgcaggtgaccaaagtgcaagagtgaaggaagcttggcattctctgcctaaatttcagaggatgtatgagaaaggctggatgcccagrgagaagcctatgcacagctggagccctcaaagaggacctcttctaggacagtgccaagtggtaatgtgggattggaggccccacactgtgggggctgcctagtggagctgtgggagggggggctgctgccctccagatcaaagaatgatagagccaccagcagctcctgtcttcagtgtagaaaagctgtgggagcagagctgcccaaagccttgggagcccaccctatgcatcctggtaatgctctatgttcccaggatgtgggacatggtttcaaaggagattattttggaacatcgagatttaatgactgccctgctgggatttgaacttgtgtggggcctgtagtccctttcttttggccaatttatctcatttgtaatgggaatgtttaccaaagacctgtatcccagttttatcttagaagtcaataactggttttgattttacaggctcattggtggaagggacttgccttgtctcagaagaaactgc

SEQ ID NO: 108721 - DNA, 231 bp, Homo sapiens
tatttagccgatctttgctttcatcttcggtggtggcggtgaaagaggcatgacactaaatcgacccttaggacgccgtttatgttgaagtcgaggagcttatcggggaaataggagaagtacggacgccacacgtggccgagagaaaagtctgaaaatgcccctcgcatccaagcggggacccggcctcgacctcccgaaatcrtacaccgagtggggaagcccagcaag

SEQ ID NO: 108722 - DNA, 545 bp, Homo sapiens
gggcctaagtacccactgggggcttcctgttaacctgggggctggtgtcattctggggcctaatgaccacctgggttgtattattcacctagggcctggtgtccacttggggcttgagtgtaaccttggacctggcacccacacaggacttgggtatcaaactggccccttggtgtccagttaagacatcatgtgaacctggcgcctgagtgtccacwtggggccaaatgactactgggggcctgaatgtcaacctagaatctgaggtttactaggggcctaggtatccacctggggcccaatgtccacctgagcctgggtgtcaacctggggcctgatgtaaacctctagttcagtgtccaccttgggcttgatgtcaacctggagcctgatgtccacctgagtactgatgttcacctttgacctgatgtccacctgtggactgtttatccacccatggcctgatgttcacctggggctgaatgtccaactgtgacctgttgtgcacctggaacctaggcatccacctgcagcctgatgttcag

SEQ ID NO: 108723 - DNA, 545 bp, Homo sapiens
gggcctaagtacccactgggggcttcctgttaacctgggggctggtgtcattctggggcctaatgaccacctgggttgtattattcacctagggcctggtgtccacttggggcttgagtgtaaccttggacctggcacccacacaggacttgggtatcaaactggccccttggtgtccagttaagacatcatgtgaacctggcgcctgagtgtccacatggggccaaatgactactgggggcctgaatgtcaacctagaatctgaggtttactaggggcctaggtatccacctggggcccaatgtccacctgagcctgggtgtcaacctggggcctgatgtaaacctctagttcagtgtccaccttgggcttgatgtcaacctggagcctgatgtccacctgagtactgatgttcacctttgacctgatgtccacctgtggactgtttatccacccatggcctgatgttcacctggggctgaatgtccaactgtgacmtgttgtgcacctggaacctaggcatccacctgcagcctgatgttcag

SEQ ID NO: 108724 - DNA, 454 bp, Homo sapiens
acacgggaggactaggtgcccacctgaggactggtgttcatggggaactggtgttcagctgtggcttgatgaccaactgggtcctggtgtcctcctggcacctgwtgtccacctgggactgcatgcttacccagggcctggtgtttccctggggcctggtgtgcccctgagacctggggtccacctgggcctagtatccacttggggcctcatatccatctggaacatcatgtccacttggggccttttagttacctagggactgggtgtccttctggcgcttgagtgtcctcctggggcctggggttctcctggggcctgggtgtacatctctggcctgatgtccaccttgggatggatgtccatctgggaacagatgttcacttgtggcctgagtgtccatcttgtgcctaatgtctacctgggatctggtgtttgcctgaggccttatatc

SEQ ID NO: 108725 - DNA, 454 bp, Homo sapiens
acacgggaggactaggtgcccacctgaggactggtgttcatggggaactggtgttcagctgtggcttgatgaccaactgggtcctggtgtcctcctggcacctgttgtccacctgggactgcatgcttacccagggcctggtgttyccctggggcctggtgtgcccctgagacctggggtccacctgggcctagtatccacttggggcctcatatccatctggaacatcatgtccacttggggccttttagttacctagggactgggtgtccttctggcgcttgagtgtcctcctggggcctggggttctcctggggcctgggtgtacatctctggcctgatgtccaccttgggatggatgtccatctgggaacagatgttcacttgtggcctgagtgtccatcttgtgcctaatgtctacctgggatctggtgtttgcctgaggccttatatc

SEQ ID NO: 108726 - DNA, 454 bp, Homo sapiens
acacgggaggactaggtgcccacctgaggactggtgttcatggggaactggtgttcagctgtggcttgatgaccaactgggtcctggtgtcctcctggcacctgttgtccacctgggactgcatgcttacccagggcctggtgtttccctggggcctggtgtgcccctgagacctggggtccacctgggcctagtatccacttggggcctcatatccatctggaacatcatgtccacttggggccttttagttacctagggactgggtgtccttctggcgcttgagtgtcctcctggggcctggggttctcctggggcctgggtgtacatctctggcctgatgtccaccttgggatggatgtccatctgggaacagatgttcacttgtggcctgagtgtccatcttgtgyctaatgtctacctgggatctggtgtttgcctgaggccttatatc

SEQ ID NO: 108727 - DNA, 530 bp, Homo sapiens
caaggtggacaccaggccccacgtgaattcgtacactccaggtgaacatcaggtcccaagtggatacctggactccaggtgtataccagtctctaaattaataccaggcctcagatggtccttaggagccatgtgggcattagtcatcaggaagttacctaggcccaaagtgcacatcaggccacctgttgacacaagatctatttggaagtcaggccccaggtggacacccacgccctatgtaaatacttaggtcccaggttgacagcaggccctrtgttaacactcagaactcaggtggacatcaggcctcaggtggacatctgagttcatctggaacctcgtgttacaggccccatgtaaacaacaggccttaggtggatacccaatctctaagtggacatcagagctcagattgacacaaagactccagtagacataatgtaccaatgaatatccaggcctccggtaaatacccaggccccagattgacatcggggtctatgtggacacacaggccccgggtagta

SEQ ID NO: 108728 - DNA, 530 bp, Homo sapiens
caaggtggacaccaggccccacgtgaattcgtacactccaggtgaacatcaggtcccaagtggatacctggactccaggtgtataccagtctctaaattaataccaggcctcagatggtccttaggagccatgtgggcattagtcatcaggaagttacctaggcccaaagtgcacatcaggccacctgttgacacaagatctatttggaagtcaggccccaggtggacacccacgccctatgtaaatacttaggtcccaggttgacagcaggccctgtgttaacactcagaactcagrtggacatcaggcctcaggtggacatctgagttcatctggaacctcgtgttacaggccccatgtaaacaacaggccttaggtggatacccaatctctaagtggacatcagagctcagattgacacaaagactccagtagacataatgtaccaatgaatatccaggcctccggtaaatacccaggccccagattgacatcggggtctatgtggacacacaggccccgggtagta

SEQ ID NO: 108729 - DNA, 530 bp, Homo sapiens
caaggtggacaccaggccccacgtgaattcgtacactccaggtgaacatcaggtcccaagtggatacctggactccaggtgtataccagtctctaaattaataccaggcctcagatggtccttaggagccatgtgggcattagtcatcaggaagttacctaggcccaaagtgcacatcaggccacctgttgacacaagatctatttggaagtcaggccccaggtggacacccacgccctatgtaaatacttaggtcccaggttgacagcaggccctgtgttaacactcagaactcaggtggacatcaggcctcaggtggacatctgagttcatctggaacctcgtgttacaggccccatgtaaacaacaggccttaggtggatacccaatctctaagtggacatcagagctcagattgacacaaagactccagtagacataatgtaccaatgaatatccaggcctccggtaaatacccaggccccagattgacatcggggtctatgtggacacacaggccccggktagta

SEQ ID NO: 108730 - DNA, 489 bp, Homo sapiens
gccacaggtggacatctagccgctgggcaacatccagccccaggtggacataaccatttccatggataaaccattcccaggtggatagcaggcctcaagaggatggcagtcaccaggtagacatcaggcctcagatagacaccaaggtcccagatgtacagcaggccccaaccaaaccccagactcatgtggacatcaggtcacaggtagacaccaagccttaggtagatacctaacttcaggtggacatcagaccccaggtggacacccagtccccgggtggacagtcaggccccaggcmcacatcaggtcttaagtggacacccaggccccaggttgatatccagctcccaggtgatcaccaagccccaggtagacaccaggccataggtgagcaacaggatgcagtaggtcatcaggccacagctggataccagtccctggtgaacacaaggccccagtgggacagagatctaatgcagacatcat

SEQ ID NO: 108731 - DNA, 489 bp, Homo sapiens
gccacaggtggacatctagccgctgggcaacatccagccccaggtggacataaccatttccatggataaaccattcccaggtggatagcaggcctcaagaggatggcagtcaccaggtagacatcaggcctcagatagacaccaaggtcccagatgtacagcaggccccaaccaaaccccagactcatgtggacatcaggtcacaggtagacaccaagccttaggtagatacctaacttcaggtggacatcagaccccaggtggacacccagtccccgggtggacagtcaggccccaggcccacatcaggtcttaagtggacacccaggccccaggttratatccagctcccaggtgatcaccaagccccaggtagacaccaggccataggtgagcaacaggatgcagtaggtcatcaggccacagctggataccagtccctggtgaacacaaggccccagtgggacagagatctaatgcagacatcat

SEQ ID NO: 108732 - DNA, 489 bp, Homo sapiens
gccacaggtggacatctagccgctgggcaacatccagccccaggtggacataaccatttccatggataaaccattcccaggtggatagcaggcctcaagaggatggcagtcaccaggtagacatcaggcctcagatagacaccaaggtcccagatgtacagcaggccccaaccaaaccccagactcatgtggacatcaggtcacaggtagacaccaagccttaggtagatacctaacttcaggtggacatcagaccccaggtggacacccagtccccgggtggacagtcaggccccaggcccacatcaggtcttaagtggacacccaggccccaggttgatatccagytcccaggtgatcaccaagccccaggtagacaccaggccataggtgagcaacaggatgcagtaggtcatcaggccacagctggataccagtccctggtgaacacaaggccccagtgggacagagatctaatgcagacatcat

SEQ ID NO: 108733 - DNA, 489 bp, Homo sapiens
gccacaggtggacatctagccgctgggcaacatccagccccaggtggacataaccatttccatggataaaccattcccaggtggatagcaggcctcaagaggatggcagtcaccaggtagacatcaggcctcagatagacaccaaggtcccagatgtacagcaggccccaaccaaaccccagactcatgtggacatcaggtcacaggtagacaccaagccttaggtagatacctaacttcaggtggacatcagaccccaggtggacacccagtccccgggtggacagtcaggccccaggcccacatcaggtcttaagtggacacccaggccccaggttgatatccagctcccaggtgatcaccaagccccaggtagacaccaggccrtaggtgagcaacaggatgcagtaggtcatcaggccacagctggataccagtccctggtgaacacaaggccccagtgggacagagatctaatgcagacatcat

SEQ ID NO: 108734 - DNA, 601 bp, Homo sapiens
gcgcaccaccacaccggctgacttttatgttgtttctcatgttttccgtaggtaggtrtgtgtgtgtgtgtgtgtgtgtgtgtgtgtgtgtgtgtgtgtgtgtgtgtgtatctatgtatgtacgtatgtatgtatgtatgtgagtgagatgggtttcggggttctatcatgttgcccacgctggtctcgaactcctgtcctcaagcaatccgcctgcctgcctcggccgcccacactgctgctattacaggcgtgagacactgcgcctggctccttctacatttgcctgcctgcctgcctgcctgcctgcctgcctgcctgcctgcctgcctgcctatcaatcgtcttctttttagtacggatgtgctctcgctttattgtccatgctctgggcacacgtggtctcttttcaaacttctatgattattattattgtaggcgtcatctcacgtgtcgaggtgatctcgaacttttaggctccagagatcctcccgcatcggcctcccggagtgctgtgatgacacgcgtgggcacggtacgctctggtcgtgtttgtcgtgggtcggttctttccgtttttaatacggggactgcgaacgaa

SEQ ID NO: 108735 - DNA, 531 bp, Homo sapiens
gctcctcgagggcctgacaaggggctgagtcccagccagggcctcacccaagatgaggattctccatgggtttggagttgggtttccttttcatgtcctggaggagaaggcagaggtactaggatgggggctgagctccagctgagcatggttaagggaagtgtgtccaccaggcatctgtgcatgggggagttgttggggaagcactggccactgcccagtgttctgcccagggcagctcagggggccctgaacacctagggtccaggaagggcyatatattgaggtttgttgagttggctcctctggtgttttgttgatggggtaaggaggcaaatggacaccccaggccagtgaccctcctgtcccacaagtgcccagctcccccaggaggacctggctcaccccaagcccacaggaagcacaggaaagtttctgcatggcacagaagccaggccctcctcaagagggggcatcacaaggcaggggccaggactcaggcccgctgctatttccactttattaatttta

SEQ ID NO: 108736 - DNA, 531 bp, Homo sapiens
gctcctcgagggcctgacaaggggctgagtcccagccagggcctcacccaagatgaggattctccatgggtttggagttgggtttccttttcatgtcctggaggagaaggcagaggtactaggatgggggctgagctccagctgagcatggttaagggaagtgtgtccaccaggcatctgtgcatgggggagttgttggggaagcactggccactgcccagtgttctgcccagggcagctcagggggccctgaacacctagggtccaggaagggctatayattgaggtttgttgagttggctcctctggtgttttgttgatggggtaaggaggcaaatggacaccccaggccagtgaccctcctgtcccacaagtgcccagctcccccaggaggacctggctcaccccaagcccacaggaagcacaggaaagtttctgcatggcacagaagccaggccctcctcaagagggggcatcacaaggcaggggccaggactcaggcccgctgctatttccactttattaatttta

SEQ ID NO: 108737 - DNA, 531 bp, Homo sapiens
gctcctcgagggcctgacaaggggctgagtcccagccagggcctcacccaagatgaggattctccatgggtttggagttgggtttccttttcatgtcctggaggagaaggcagaggtactaggatgggggctgagctccagctgagcatggttaagggaagtgtgtccaccaggcatctgtgcatgggggagttgttggggaagcactggccactgcccagtgttctgcccagggcagctcagggggccctgaacacctagggtccaggaagggctatatattgaggtttgttgarttggctcctctggtgttttgttgatggggtaaggaggcaaatggacaccccaggccagtgaccctcctgtcccacaagtgcccagctcccccaggaggacctggctcaccccaagcccacaggaagcacaggaaagtttctgcatggcacagaagccaggccctcctcaagagggggcatcacaaggcaggggccaggactcaggcccgctgctatttccactttattaatttta

SEQ ID NO: 108738 - DNA, 531 bp, Homo sapiens
gctcctcgagggcctgacaaggggctgagtcccagccagggcctcacccaagatgaggattctccatgggtttggagttgggtttccttttcatgtcctggaggagaaggcagaggtactaggatgggggctgagctccagctgagcatggttaagggaagtgtgtccaccaggcatctgtgcatgggggagttgttggggaagcactggccactgcccagtgttctgcccagggcagctcagggggccctgaacacctagggtccaggaagggctatatattgaggtttgttgagttggctcctctggtgttttgttgatggggtaaggaggcaaatggacaccccaggccagtgaccctcctgtcccacaagtgcccagctcccmcaggaggacctggctcaccccaagcccacaggaagcacaggaaagtttctgcatggcacagaagccaggccctcctcaagagggggcatcacaaggcaggggccaggactcaggcccgctgctatttccactttattaatttta

SEQ ID NO: 108739 - DNA, 557 bp, Homo sapiens
gcggcagtttcccccatgctgttctcatgatagtaagtgagttctcatgtgatctgatggttttataaacatctggcatttcccttgcttgaggtgatgaatgccccatttaccctgatgtgattattacacattgcatgcctgtgtcaaactatctcatgtaccccataaatatatacacctaccatgtactcatataaattaaaaataaaaataaatttaaaataaaaagtgtgagtttttaaaggtgaggtttgccctccagcactggtgcctgcmaggtgtgaccttcacgtcgtgtttccacacggtccaggcccccatctgcagaggccaacagttcccagagtgaccttcctcagaaaacagggtcttggaggagacagtcagaggagggggcctcatcctccccactgcacagccccttgtggggattggaaagtgagggtctctgcccacaagttggcagtcaccctaaactgttttgtgggaggaagcatatggaatatatgtcagggctgggacagcatttcctgatcctgacttggagaaagtgt

SEQ ID NO: 108740 - DNA, 557 bp, Homo sapiens
gcggcagtttcccccatgctgttctcatgatagtaagtgagttctcatgtgatctgatggttttataaacatctggcatttcccttgcttgaggtgatgaatgccccatttaccctgatgtgattattacacattgcatgcctgtgtcaaactatctcatgtaccccataaatatatacacctaccatgtactcatataaattaaaaataaaaataaatttaaaataaaaagtgtgagtttttaaaggtgaggtttgccctccagcactggtgcctgccaggtgtgaccttcacgtcgtgtttccacayggtccaggcccccatctgcagaggccaacagttcccagagtgaccttcctcagaaaacagggtcttggaggagacagtcagaggagggggcctcatcctccccactgcacagccccttgtggggattggaaagtgagggtctctgcccacaagttggcagtcaccctaaactgttttgtgggaggaagcatatggaatatatgtcagggctgggacagcatttcctgatcctgacttggagaaagtgt

SEQ ID NO: 108741 - DNA, 186 bp, Homo sapiens
atctgcagaggccaacagttcccagagtgaccttcctcagaaaacagggtcttggaggagacagtcagaggagggggcctcatcctccccactgcacagccccttgtggggattggaaagtgagggtctctgcccacaagttggcagtcaccctaarctgttttgtgggaggaagcatatggaata

SEQ ID NO: 108742 - DNA, 542 bp, Homo sapiens
caagtttgagacagaaatatttgagaacatttttatcagttgtgacattttgatagtgaacattttatatcttctgtcaacttaaaatgtttgcatcttctgtcagcttaaaatgtttaatttgttatagccaaataatttggctataattgataatttaatttatcaaattaaattgctttttttccctttagactttcttcagtcacatctgaataaatcccttagaagtaagctagatgtaatataatgaaatgcttaaaagggctgtgtatcttcatattacacttacagtgattttctcttgtgcccattatattctacctgcagctagttgaggtaaagagagggcatttaactgtcaagggaacctgtgaggagactgtagaaatctggaaagtctcttgagtctttgagggattttgggatgcagagagtggggctgggatctctggctaggttggagccagcctgcrtttgtatctttatcttggaagcaaacttagaatgcagagatagatgtggcctggatgctgctaact

SEQ ID NO: 108743 - DNA, 587 bp, Homo sapiens
catgagttcacttcagagtttgttcaagacatacgtttcgtaaggaaacatcttagttagaagttattcagcagtaggtaccatccctaagtatttttcaccaaattcgtgacaataaagagctatctaaccagaaaaattagcgagtaccggcaccatccatagggctttgtctttacgcttcattagcacttaccatgccttacaatgtctaggattgaccctgatagcatttcgraaacaagctaatgctttgtccagttcttcagtgaagacaagctcacgccctaatgcgctataggcataagcatcatttggatccacttcgagagttctctggaagaattgaatcgcaatatcgtgttcccgttgcagaccgaaacagttccctgcagcacaccaggcctctggctggcgaatttttatccatgtctgtgaagtctttggacagaactgaaagagcaacctctttcggaggatgccaaagtgttgtagagtagatctccatgccttcgactctgtaattctcaatcctcctaacctctgagaattgtctttcagcttgcgtggactctgaaagtttacaa

SEQ ID NO: 108744 - DNA, 548 bp, Homo sapiens
tgtctaggattgaccctgatagcatttcggaaacaagctaatgctttgtccagttcttcagtgaagacaagctcacgccctaatgcgctataggcataagcatcatttggatccacttcgagagttctctggaagaattgaatcgcaatatcgtgttcccgttgcagaccgaaacagttccctgcagcacaccaggcctctggctggcgaatttttatccatgtctgtgaagtctttggacagaactgaaagagcaacctctttcggaggatgccaaagtgttgtagagtagatctccatgccttcgactctgtaattctcaatcctcctaacctctgagaattgtctttcagcttgcgtggactctgaaagtttacaataggcccttccgattttggcacagtacccaaccggtattgcagtggtgagaagctagatggctcaagatrctgatagcttctttgccgtggtaagaacacaaagctaaataacctttccccctttcacgaagaaggctcatcaagccttccgctgctgctttttgtaga

SEQ ID NO: 108745 - DNA, 566 bp, Homo sapiens
tgttaaggtacattactaacaaccacacaaatttttaaaagaaaagaacactcttagcagcctayggtactttgaaatgaaatattgcctctcattctcacttgtgttgccattccaaaagtttgaatttgctgaggtttatattctgggtattatataaccattggttctatttggcataaccctattaaatggtgctcagagctgaattacctacagaaactttctggtttaattagcataagttggtataaatattagtgagcccatacttctgtgatataattaaaccaacttaatgattctcacataaggtgtcaatttattttactaatgcattcataatctatgctttgtagcaacatttttcaaatgtttaaaatgctaaatcttctcaattttccaatcttttcttgaatctattagatacctatagtgtagttactgaatagctgggaaacaaatacacctagttagaaatggcactgctttataaaaggcactagagaaaagacgagactattcctatatttaaatgctgctggcaagtgaattcctttgtatat

SEQ ID NO: 108746 - DNA, 576 bp, Homo sapiens
ctcttcctatcattgtgaagcagaattcaccaagcgttggattgttcacccactaatagggaacgtgagctgggtttagaccgtcgtgagacaggttagttttaccctactgatgatgtgttgttgccatggtaatcctgctcagtacgagaggaaccgcaggttcagacatttggtgtatgtgcttggctgaggagccaatggggcgaagctaccatctgtgggattatgactgaacgcctctaagtcagaatcccgcccaggcggaacgatacggcagcgccgcggagcctcggttggcctcggrtagccggtcccccgcctgtccccgccggcgggccgcccccccctccacgcgccccgcgcgcgcgggagggcgcgtgccccgccgcgcgccgggaccggggtccggtgcggagtgcccttcgtcctgggaaacggggcgcggccggaaaggcggccgccccctctcccgtcacgcaccgcacgttcgtggggaacctggcgctaaaccattcgtagacgacctgcttctgggtcggggtttcgtacgtagcagagcagctccctcgctgc

SEQ ID NO: 108747 - DNA, 609 bp, Homo sapiens
ctaatagggaacgtgagctgggtttagaccgtcgtgagacaggttagttttaccctactgatgatgtgttgttgccatggtaatcctgctcagtacgagaggaaccgcaggttcagacatttggtgtatgtgcttggctgaggagccaatggggcgaagctaccatctgtgggattatgactgaacgcctctaagtcagaatcccgcccaggcggaacgatacggcagcgccgcggagcctcggttggcctcggatagccggtcccccgcctgtccccgccggcgggccgcccccccctccacgcgccccgcgcgcgcgggagggcgcgtgccccgccgcgcgccgggaccggggtccggtgcggagtgcccttcgtcctgggaaacggggcgcggcyggaaaggcggccgccccctctcccgtcacgcaccgcacgttcgtggggaacctggcgctaaaccattcgtagacgacctgcttctgggtcggggtttcgtacgtagcagagcagctccctcgctgcgatctattgaaagtcagccctctacacaagggtttgtccgcgcgcgcgcgcgcgcgtgcgtgcgtgcggggggcccggcggggcg

SEQ ID NO: 108748 - DNA, 485 bp, Homo sapiens
gtgagctgggtttagaccgtcgtgagacaggttagttttaccctactgatgatgtgttgttgccatggtaatcctgctcagtacgagaggaaccgcaggttcagacatttggtgtatgtgcttggctgaggagccaatggggcgaagctaccatctgtgggattatgactgaacgcctctaagtcagaatcccgcccaggcggaacgatacggcagcgccgcggagcctcggttggcctcggatagccggtcccccgcctgtccccgccggcgggccgcccccccctccacgcgccccgcgcgcgcgggagggcgcgtgccccgccgcgcgccgggaccggggtccggtgcggagtgcccttcgtcctgggaaacggggcgcggccggaaaggcggccgccccctckcccgtcacgcaccgcacgttcgtggggaacctggcgctaaaccattcgtagacgacctgcttctgggtcggggtttcg

SEQ ID NO: 108749 - DNA, 488 bp, Homo sapiens
catattggagtggttgctgaaatgaaagtctgatctctggattcttaaggaaaaattttattggactgcagagacataaattggatttttaattctggagtcaggatgtgctcagtaaacatgtgcccattaatgcctcctcgcatttttttagctcggtattctgttatcttttaataatataataatgacttgcaaaacctacacccattttgcagcaaaccgtgacacatgtatacctgtgtaacaaacctgcatgttctgcacatttatcccagaacttaaagtatatatatacactttatatatatatattctctctctctctctctctctatatatatatatatakagagagagagagagagagagagagacagacagacagacagagagagagagacagaaaacccagccaagtgcggtggctcatgattgtaatcccagggctttgggaggctgagacaggtcgaccatctgaggtcagg

SEQ ID NO: 108750 - DNA, 483 bp, Homo sapiens
cgctccccgccgcccgccggccccacgacacgcgcacaccaacgacacgcccttctttctctytctctctctctctctctctcccccgtctccctcccgagttctccggctctcgcggccggcggggccgggcggcgaacgaacgagcgagcgaacgaacgggcacgcgggccccgcccgcgcacgcgccgcgtcgcggtgggggggtgggtgtgcggagggaagcgcgcggcggcgccgccgccgccgcgggcctcgccctccgggctccgttaatgatccttccgcaggttcacctacggaaaccttgttacgacttttacttcctctagatagtcaagttcgaccgtcttctcagcgctccgccagggccgtgggccgaccccggcggggccgatccgagggcctcactaaaccatccaatcggtagtagcgacgggcggtgtgtacaaagggcagggacttaatcaacgcaagcttatg

SEQ ID NO: 108751 - DNA, 523 bp, Homo sapiens
ccgcgtcgcggtgggggggtgggtgtgcggagggaagcgcgcggcggcgccgccgccgccgcgggcctcgccctccgggctccgttaatgatccttccgcaggttcacctacggaaaccttgttacgacttttacttcctctagatagtcaagttcgaccgtcttctcagcgctccgccagggccgtgggccgaccccggcggggccgatccgagggcctcactaaaccatccaatcggtagtagcgacgggcggtgtgtacaaagggcagggacttaatcaacgcaagcttatgacccgcacttactgggaattcctcgttcatggggaataattgcaatccccgatccccatcacgaatggggttcaacgggttacccgcgcctgccggcgtagggtaggcacacgmtgagccagtcagtgtagcgcgcgtgcagccccggacatctaagggcatcacagacctgttattgctcaatctcgggtggctgaacgccacttgtccctctaagaagttggggga

SEQ ID NO: 108752 - DNA, 523 bp, Homo sapiens
ccgcgtcgcggtgggggggtgggtgtgcggagggaagcgcgcggcggcgccgccgccgccgcgggcctcgccctccgggctccgttaatgatccttccgcaggttcacctacggaaaccttgttacgacttttacttcctctagatagtcaagttcgaccgtcttctcagcgctccgccagggccgtgggccgaccccggcggggccgatccgagggcctcactaaaccatccaatcggtagtagcgacgggcggtgtgtacaaagggcagggacttaatcaacgcaagcttatgacccgcacttactgggaattcctcgttcatggggaataattgcaatccccgatccccatcacgaatggggttcaacgggttacccgcgcctgccggcgtagggtaggcacacgctgagccagtcagtgtagcgcgcgtgcagccccggacatmtaagggcatcacagacctgttattgctcaatctcgggtggctgaacgccacttgtccctctaagaagttggggga

SEQ ID NO: 108753 - DNA, 499 bp, Homo sapiens
tatgtgccctttatcataaaacaaatctatgaagcatttatataaaaacccagtatttctggtttcaaattcagtactgtgccgtctgcttgatagatttgttcgcaggttagagacattttattgcataacttccatgaaatatcacagttgtactcttgactatgtttgaatcacaaaaagactttaatctgcactcagttcttgtaactaaaatcttcagtttgaatatgaatttcacttaaagaacatccctagaaatttcagagagaaaaagactttacttgyagaatacaatctgcatttgctttgacaactagttagttcacatatgtaaaataagtctacctgtctgtatgcataattaagatgtaacagtagtgtggtaatgacttgttaaagcaattagaatggcagtggatcatggcacaatttaccttaaaagccgtgagcagaatacatcacaagctatgatacaatgaatagtcattaggtttaa

SEQ ID NO: 108754 - DNA, 336 bp, Homo sapiens
tgaaaagcctcgtatttatgtgtgtaaatgaacgagcgtacgtagttatctctgttttctttcttcctctccttcgtgtttttcttccttcctttcttcctttctctccttctttaggtttttcttcctctcttcctttccttctttctctctttctgtccttttttccttcgtgctttatttctctttcgttccctgtstttccttcttttttctttcctctctgtttctttttcccttctttccttcgtttctttcctcattctttctctctttttcgtgtttctttccttcccgtctgtcttttaaaaaatggagtgtttcagaagtttactt

SEQ ID NO: 108755 - DNA, 424 bp, Homo sapiens
tttgtgtcatacaaataaatacacatcgctctataaagaagggatcgtcgataaagacgtttaytttacgtatgaaaagcgtcgtatttatgtgtgtaaatgaacgagcgtacgtagttatctctgttttctttcttcctctccttcgtgtttttcttccttcctttcttcctttctctccttctttaggtttttcttcctctcttcctttccttctttctctctttctgtccttttttccttcgtgctttatttctctttcgttccctgtgtttccttcttttttctttcctctctgtttctttttcccttctttccttcgtttctttcctcattctttctctctttttcgtgtttctttccttcccgtctgtcttttaaaaaatggagtgtttcagaagtttactttgtgtatctacgtttt

SEQ ID NO: 108756 - DNA, 424 bp, Homo sapiens
tttgtgtcatacaaataaatacacatcgctctataaagaagggatcgtcgataaagacgtttattttacgtatgaaaagcstcgtatttatgtgtgtaaatgaacgagcgtacgtagttatctctgttttctttcttcctctccttcgtgtttttcttccttcctttcttcctttctctccttctttaggtttttcttcctctcttcctttccttctttctctctttctgtccttttttccttcgtgctttatttctctttcgttccctgtgtttccttcttttttctttcctctctgtttctttttcccttctttccttcgtttctttcctcattctttctctctttttcgtgtttctttccttcccgtctgtcttttaaaaaatggagtgtttcagaagtttactttgtgtatctacgtttt

SEQ ID NO: 108757 - DNA, 311 bp, Homo sapiens
gtagttatctctgttttctttcttcctctccttcgtgtttttcttccttcctttcttcctttctctccttctttaggtttttcttcctctcttcctttccttctttctctctttctgtccttttttccttcgtgctttatttctctttcgttccctgtgtttccttcttttttctttcctctctgtttctttttcccttctttccttcgtttctttcctcattctttctctctttttcgtgtttctttccttyccgtctgtcttttaaaaaatggagtgtttcagaagtttactttgtgtatctacgtttt

SEQ ID NO: 108758 - DNA, 551 bp, Homo sapiens
catgtgtctcttttccccactcccctccccccgtstgtctgtgcgtggattccggaagagcctacgcattctgcctctccgtgtgtctgcagcgacccgcgacagagtccgtgtgtgttctttctccctccctccctccctccctccctccctccgtgcttcagagaggcatctccaaacacccacgcgccgtgggttgtcttctgactctgtcgcggtcgaggcagagacgcgttttgggcaccgtttgtgtggggttggggcagaggggctgcgttttcggcctcgggaagagcttctcgactcacggtttcgctttcgcggtccacgggccgccctgccagccggatctgtctcgctgacgtccgcggcggttgtcgggctccatctggcggccgctttgagatcgtgctctcggcttccggagctgcggtggcagctgcagagggagggccccgtccccgctgtgagataggcagagctccggaaagcccgcggtcgtcagcccggctggcccggtggcgccagagctgtggcgcgtcgcttgtgag

SEQ ID NO: 108759 - DNA, 551 bp, Homo sapiens
catgtgtctcttttccccactcccctccccccgtgtgtctstgcgtggattccggaagagcctacgcattctgcctctccgtgtgtctgcagcgacccgcgacagagtccgtgtgtgttctttctccctccctccctccctccctccctccctccgtgcttcagagaggcatctccaaacacccacgcgccgtgggttgtcttctgactctgtcgcggtcgaggcagagacgcgttttgggcaccgtttgtgtggggttggggcagaggggctgcgttttcggcctcgggaagagcttctcgactcacggtttcgctttcgcggtccacgggccgccctgccagccggatctgtctcgctgacgtccgcggcggttgtcgggctccatctggcggccgctttgagatcgtgctctcggcttccggagctgcggtggcagctgcagagggagggccccgtccccgctgtgagataggcagagctccggaaagcccgcggtcgtcagcccggctggcccggtggcgccagagctgtggcgcgtcgcttgtgag

SEQ ID NO: 108760 - DNA, 440 bp, Homo sapiens
tggggttggggcagaggggctgcgttttcggcctcgggaagagcttctcgactcacggtttcgctttcgcggtccacgggccgccctgccagccggatctgtctcgctgacgtccgcggcggttgtcgggctccatctggcggccgctttgagatcgtgctctcggcttccggagctgcggtggcagctgcagagggagggccccgtccccgctgtgagataggcagagctccggaaagcccgcggtcgtcagcccggctggcccggtggcgccagagctgtggcgcgtcgcttgtgagtcacagctctggcgtgcaggtttatgtgggggagaggctgtcgctgcgcttctgggcccgmggcgggcgtggggctgcccgggccggtcgaccagcgcgccgtagctccagaggcccgacccgcgacccgcggggaccccc

SEQ ID NO: 108761 - DNA, 546 bp, Homo sapiens
cgcgtgtgtcctggggttgaccagagggccccgggcgctccgtgtgtggctgcgatggtggcgtttttggggacaggtgtccgtgtcgcgcgtcgcctgggccggcggcgtggtcggtgacgcgacctcccggccccgggggaggtatatctttcgctccgagtcggcattttgggccgccgggttattgctgacacgctgtcctctggcgacctgtcgctggagaggttgggcctccggrtgcgcgcggggctctggcctaccggtgacccggctagccggccgcgctcctgcttgagccgcctgccggggcccgcgggcctgctgctctctcgcgcgtccgagcgtcccgactcccggtgccggcccgggtccgggtctctgacccacccgggggcggcggggaaggcggcgagggccaccgtgcccccgtgcgctctccgctgcgggcgcccggggcggccgcgacaaccccaccccgctggctccgtgccgtgcgtgtcaggcgttctcgtctccgcggggttgtccgccgccccttccccg

SEQ ID NO: 108762 - DNA, 320 bp, Homo sapiens
gccgccgggttattgctgacacgctgtcctctggcgacctgtcgctggagaggttgggcctccggatgcgcgcggggctctggcctaccggtgacccggctagccggccgcgctcctgctygagccgcctgccggggcccgcgggcctgctgctctctcgcgcgtccgagcgtcccgactcccggtgccggcccgggtccgggtctctgacccacccgggggcggcggggaaggcggcgagggccaccgtgcccccgtgcgctctccgctgcgggcgcccggggcggccgcgacaaccccaccccgctggctccgtgccg

SEQ ID NO: 108763 - DNA, 518 bp, Homo sapiens
tggggggttggccggagccgatcggctcgctggccggccggccggcctccgctcccggggggctcttcktgatcgatgtggtgacgtcgtgctctcccgggccgggtccgagccgcgacgggcgaggggcggacgttcgtggcgaacgggaccgtccttctcgctccgccccgcgggggtcccctcgtctctcctctccccgcccgccggcggtgcgtgtgggaaggcgtggggtgcggaccccggcccgacctcgccgtcccgcccgccgccttctgcgtcgcggggcgggccggcggggtcctctgacgcggcagacagccctcgctgtcgcctccagtggttgtcgacttgcgggcggcccccctccgcggcggtgggggtgccgtccccgccggcccgtcgtgctgccctctcgggggggtttgcgcgagcgtcggctccgcctgggcccttgcggtgctcctggagcgctccgggttgtccctcaggtgcccgaggccgaacggtggtgtgtc

SEQ ID NO: 108764 - DNA, 592 bp, Homo sapiens
ctttctttatgcttgatatttggggtttgattattaaatcccttgaggtagtcttctttgggtaacatttgcttggtgttctataatcttcttgtacttggatattgatattcctctaggtttaggaagttctctgttactatccctttgaataaactttctgcccctgtctctttctctacctcctgtttaaggccaataagtcttaaatttgcccttttgaggctattttctagattctatagatatgcttcattgttttttattcttttgtctcctctgactgtgtattttcaagtagcctgcgtgcaaggtcactaattcttctgcttgatcaattgtgctattaaaagactctcatgcattcttagtatgctaattgcatttttcagctccaacatttctgcttgactctttttattatttcaatctctttgttaaatttatctgatagaattctgaatcccttctatgtgttttcttgaatttctttgagtttcctcaacacgrcaattttgaattgtctgtttgaaagatcacatctctctgtttctccaggattagtccctggtggcttacttagtttatttgg

SEQ ID NO: 108765 - DNA, 558 bp, Homo sapiens
ctctactacagtctattaagtctatgtttatagtcttttaaaagtacatatgttaattttattataaaaatactttatttcttaaaaatgctaatgatcatctgagctttcagtgagttttaatctttttgctggtagaaggtcatgacttggtgttgatggctgctgactgatcagggtggggatttctgaaggttggggtggccatggcaatttcttaaaataagacaacagtgaagtttgccacactgattgactcttcctttcgtagcagatttctctgcagtatgtcatgctatttgatagcattttttctcacagyggaacttctttaaaaattggagtccatcctctcaaaccctgccaatgccttatcaactaagtttttgtattagtttaaatcttttattgtcatttcaacagtgttcacagcattttcaccagaagtagtttccatctcaagaaatcactttctttgctcatccataaaaagcaagtcctcatctattcaagttttagtatgagactccagcaattcggtcacatcttcaggctcca

SEQ ID NO: 108766 - DNA, 558 bp, Homo sapiens
ctctactacagtctattaagtctatgtttatagtcttttaaaagtacatatgttaattttattataaaaatactttatttcttaaaaatgctaatgatcatctgagctttcagtgagttttaatctttttgctggtagaaggtcatgacttggtgttgatggctgctgactgatcagggtggggatttctgaaggttggggtggccatggcaatttcttaaaataagacaacagtgaagtttgccacactgattgactcttcctttcgtagcagatttctctgcagtatgtcatgctatttgatagcattttttctcacagtggaacttctttaaaaattggagtccatcctctcaaaccctgccaatgccttatcaactaagtttttgtattagtttaaatcttttattgtcatttcaacagtgttcacagcattttcaccagaagtagtttccatctcaagaaatcactttctttgctcatccataaaaagcaagtcctcatctattcaagttttaktatgagactccagcaattcggtcacatcttcaggctcca

SEQ ID NO: 108767 - DNA, 590 bp, Homo sapiens
cctttctttatgcttgatatttggggtttgattattaaatcccttgaggtagtcttctttgggtaacatttgcttggtgttctataatcttcttgtacttggatattgatattcctctaggtttaggaagttctctgttactatccctttgaataaactttctgcccctgtctctttctctacctcctgtttaaggccaataagtcttaaatttgcccttttgaggctattttctatatwctatagatatgctccattgtgttttattcttttgtctcctctgactgtgtattttcaagtagcctgcgtgcaaggtcactaattcttctgcttgatcaattgtgctattaaaagactctcatgcattcttagtatgctaattgcatttttcagctccaacatttctgcttgactctttttattatttcaatctctttgttaaatttatctgatagaattctgaatcccttctatgtgttttcttgaatttctttgagtttcctcaacacgacaattttgaattgtctgtttgaaagacacatctctctgtttctccaggattagtccctggtggcttacttagtttattt

SEQ ID NO: 108768 - DNA, 590 bp, Homo sapiens
cctttctttatgcttgatatttggggtttgattattaaatcccttgaggtagtcttctttgggtaacatttgcttggtgttctataatcttcttgtacttggatattgatattcctctaggtttaggaagttctctgttactatccctttgaataaactttctgcccctgtctctttctctacctcctgtttaaggccaataagtcttaaatttgcccttttgaggctattttctatatactatagatatgctycattgtgttttattcttttgtctcctctgactgtgtattttcaagtagcctgcgtgcaaggtcactaattcttctgcttgatcaattgtgctattaaaagactctcatgcattcttagtatgctaattgcatttttcagctccaacatttctgcttgactctttttattatttcaatctctttgttaaatttatctgatagaattctgaatcccttctatgtgttttcttgaatttctttgagtttcctcaacacgacaattttgaattgtctgtttgaaagacacatctctctgtttctccaggattagtccctggtggcttacttagtttattt

SEQ ID NO: 108769 - DNA, 590 bp, Homo sapiens
cctttctttatgcttgatatttggggtttgattattaaatcccttgaggtagtcttctttgggtaacatttgcttggtgttctataatcttcttgtacttggatattgatattcctctaggtttaggaagttctctgttactatccctttgaataaactttctgcccctgtctctttctctacctcctgtttaaggccaataagtcttaaatttgcccttttgaggctattttctatatactatagatatgctccattgtkttttattcttttgtctcctctgactgtgtattttcaagtagcctgcgtgcaaggtcactaattcttctgcttgatcaattgtgctattaaaagactctcatgcattcttagtatgctaattgcatttttcagctccaacatttctgcttgactctttttattatttcaatctctttgttaaatttatctgatagaattctgaatcccttctatgtgttttcttgaatttctttgagtttcctcaacacgacaattttgaattgtctgtttgaaagacacatctctctgtttctccaggattagtccctggtggcttacttagtttattt

SEQ ID NO: 108770 - DNA, 450 bp, Homo sapiens
gaattcatcctctcatataaactcaaagaattttatcttaaaaaaatatataaataagcagaaatatatttctcactgttttgtgaagaaaagggaaactattttatttctagagaaaagctttttagaataggtggttagaaagaagctttgaagtttgacatgagtctaatcttgttctttagctaatagccaaggattttcaaagagttcttatgatgttggcagaaattgttcaccccttctgtgtttcccccaaccctgatcatttccaagttttcctcactatacaacttcaattatgccatgttttggaagagagctgcaagctaatcctataatatagaaagtgaaacacagatgcttcaggaagcatccaaaaattgtktagatttctactttaggtactctaaaaatgtgcacatataggttatgtattaaaatgaatgt

SEQ ID NO: 108771 - DNA, 453 bp, Homo sapiens
gaattcatcctctcatataaactcaaagaattttatcttaaaaaaatatataaataagcagaaatatatttctcactgttttgtgaagaaaagggaaactattttatttctagagaaaagctttttagaataggtggttagaaagaagctttgaagtttgacatgagtctaatcttgttctttagctaatagccaaggattttcaaagagttcttatgatgttggcagaaattgttcaccccttctgtgtttcccccaaccctgatcatttccaagttttcctcactatacaacttcaattatgccatgttttggaagagagctgcaagctaatcctataatatagaaagtgaaacacagatgcttcaggaagcatccaaaaattgtgtagatttctactttaggtactctaaaaatgtrcacatataggttatgtattaaaatgaatgttag

SEQ ID NO: 108772 - DNA, 537 bp, Homo sapiens
agtttcacaaatagaaaacttaaacttagagatattacttaagatgtccaacatcccacagccaatgagtgagggaggcagtagtaaaccccagcttttaaccaacatgtttttcaattctatacacaaagtttatatatgattttgtgcaaggcattttcagtgttgtagggccaatagatggacacgacacaggacatgccctcatgttgctcaaagtacaacagagaaaacagacggatatttacttacctatagtcagggttagaacatgacaatttctaagacaaggagtagacaccatgcattgggaggacagatatatgattgacaaattctgactctggggatgtaagaaggcctcataaaaaaggtgataagaacatttcatgtagatacattcaatttttataaaatcagaagaataagtggagcasagaaactatttgtggaatgtcaaggtgttgtatgtggttggtaataagataaattcattaatttcttaaccctgttagataattactgatattatatctg

SEQ ID NO: 108773 - DNA, 619 bp, Homo sapiens
agagagacctggaaatgccatgtgctctccagaccaagagaagagagagacactcaccgttgggggggaaacctctgttcctagaaaatcacaaagacaccttcccttgagctatgtccctggttactatgacattccctgatcttgacaaacaagattacttccctgaactgtaaaacttcccatgggttgcatacacagagaagataaacgatatgatggtcatagacaggaaaggaggaatttactataggaaagttggagatcctgttgctgacacccactggggtggtcagaggttggggtcagtccaatagcctttggatgacactggggggtagccctggccagaaatcttcagcttccccaggacttcttccagtcccacacaacggctaagtcttccatraaaggaagttggtttaaacatggccaatatgacagaaacccatgggtactgggtgattctccatgttctccccagcatgcgggtcccccaagtcttgtaaggctgggagccatgctaatcgttttcaaatggctgaagggggcccagtatttggtttgatttggttctaaaatggaggccaagagcctcagaatgaaaggacagagctgg

SEQ ID NO: 108774 - DNA, 657 bp, Homo sapiens
aattcacactgaggagttacagatgcccatgaattactacattattgagtgtagctagcatatttaaattttcttagacgtgatccagtatcttggcttccatttggaccatttaaagggtgggatgatccccatgcctttctttgaacatctttccaacattgctttcttctagattagcaatatccaataaaaatacaatgtaagccatatatataaattacattttgagtccttggcaaatgtccgtctaccctagcttaccttcatttccttacacacctttactatggcctagttattagtatgactataaatctctaatacatttcacactgtatagaaacaatctgtacttgtcagtcagatatagtcctttcctcctccaaaaagtccccgaaatgcaattttaccaagccttctctgaaaacgaatagttctctgtttcactgatatccagagacaaacaaaacactacattcaaaacctgactttatttaatgaacttttatcttgttttctctggccatttttcttacctaatctgctagctttcttgccatttaaaaatgtkcatcccaggacatatagataagcaaatatgaagtacattaaatttaatatttttccttaaccttcatggggacttgaaatgga

SEQ ID NO: 108775 - DNA, 528 bp, Homo sapiens
gataattactttaaaaaaacacatacacataaaataatttttgatttttttctttggagaaagtgagtatactatatacactttcagagatttaaagccttaatgagtactcaactgaatcagagaagatactaacctgtttcttcaaggggctctataaagtaaggaagttgtcagactatgaggtgtggataatcttgcttaactgaaatgtggggctctaacatgaggtggtttctttaattttctaaaaaaaaataaatgaracagaaataagtaccctaaaacatgatttatgcacagcagaatggcttttatgtatagacatatgaagcaagaattgaagtgtgtgttatactgtcttgaaagtcaacctataaagacagtaggggctcctatgttttctactgtatgaatctaatcatataataataaaactacagaacacttattaggatatctgaaagttagcattcttgaattggactctattctctttcctagagccccttctaaaaatttatgttt

SEQ ID NO: 108776 - DNA, 489 bp, Homo sapiens
gaattccttctaccatgtttgatatggtttgattctgtgtccccacccaaatctcaagtcaaattgtaattctcagtgttggaggagggacctggtgggaggtgattggaccatggggtcagacttcccccttgctgttgttgtgatagagttctcacaagatctaktgtttgaaagtgtgtggcacctcccccttcatgctctctttttcttgcccctgccatggaaacatgcttgctttcccttcaccttcctccatgattgtaagtttcctgaggcctccccaaaaacagaagcctgtacagcccacaggctgcgagccaattaaacctcttttctttatagattacccagtctcggttatgtctttatagcagtgtgagaacaaattaatacaatttgtatatttttctgtctttatatgagcaagatacattatttacctactaataattggcaagttataagttttcctcacagtattacatt

SEQ ID NO: 108777 - DNA, 433 bp, Homo sapiens
gcaaaaatgtccatagcagtcctattcataatagcctcaaactagaaacaatccaaatgtcaaaaacaagataatggataagtaatttgtaatgtagtcayacagtagaatatcacacatcaataaaaaaggagtgaatgactgatatatgcaacaatctcaaaattattacggcatgtgaaaggggcctttacaaagtacatgctgtgtgattccatttatattaagtccaagaataggccaaactaaactatggtgaaatatgtaagaagtggtttcctgggaggtagagagaaggtagaagaagggtagggaggtaggtgatgaggttttgaattggaattgactggaaagggcaaagagaaaactatttagggtgtgggattcaataccttattttgggtggctggtacacaggtgtatctaattctca

SEQ ID NO: 108778 - DNA, 583 bp, Homo sapiens
cttgcctcaccgcactaccaatttctcagtagccaattctgagtttgcgttcactttcaggcattttatctgccttgctctgagaggtattattaatcacatcctgttgctaggatacctgagaatgttcatttatgtctgatgtttctttggcaaaatgcactatgaagaaagcgtataatcatgacaatgaaaattactgtgcacatgctacttattaaaaaagggaggaagagcataaccaccacataatataatgctaactgccatgaattttttaatatcgtttttgtttcacctagattttaaaggaaaaaaaactcgcaatatttttggataatgagaatctgtagtgcttctatacttccgagttaactataaaaagtggaaggtggtagggttttggttctgttcatttcatagggatttaagagaggaaggagcttgaaatgcttcaaatgcttcctttacagacagggtaactaggttatagtgctagttgatttgcagggycagacctaaaacccaggtcaccactattgccatgtttagctattttaatgcaagattttttagaaaagtg

SEQ ID NO: 108779 - DNA, 631 bp, Homo sapiens
ttgttcaatatacctataaatatgttctattattcagcattttagcatctaaaattattccttttcatgaaaaaagaataaagcctgttattaggagtgcagttaaagcacaatttctatagattactacatattttgttttattagagakttacaattttaccctgtaaagtggagtaaaagtaaagtggagacttgccagtggtccagcacatcagaacttgtaaaccatcaattggggtacccatttgaaacaatgacattaaaatatgtatctaggcttcgaaaactctaccatatattgtgagaattatgtagaaatcctctgaactgaaacactcaaaagattcaacacaatttatggtaaataatttaaaatagtcttattttccctgggtagatttacttctaaaggatcaattagtggaatctatattgaattaagagttttaatattatttagagttaattttctgtatgaaggcaacaacgggaagcatttcattaggaaaggtaatgatatgagtccaaacagaatctatgcttgtgaagtctgagtttgttcactttaaatagcaatttatgtggctaatgaacacacaatcctgcctagattttcatctgggggaaa

SEQ ID NO: 108780 - DNA, 590 bp, Homo sapiens
ggatgccagaattctctgacctaactctgcccagatcagatctstggaggaggggaccagattgcatcattggtgtgtaggctccaaggcccgaggagtgttcaaaggattcctggggctttgatgtgtgtatcaatggccccagtgcacgtgcatgaggccccttgcaatgctggagggactgtgatgaaggcagaaagaaaaggggacctacacttgttctctatgagagcaaagcatcacctgtggggcatcaagcacgtgatctataggcaaaactccttatctgaggaattcagaagtaattagacttctagaatttctatacatttctggaatacaagcatgtcgaaacccattgtacaacctttgccgacataaaggcaccaaaacatccacaaatgttaatcatttctcatgaccaatgtgactaatatggtccaaatcacccttcagctcctgcgttaagtccacaaatacccctacggaagatccaactgggcacactcagtcctctcttactgaagctgcactctgctgcagcgttcctcctatctaataaaacattcctcttcaaacttatactgttg

SEQ ID NO: 108781 - DNA, 590 bp, Homo sapiens
ggatgccagaattctctgacctaactctgcccagatcagatctgtggaggaggggaccagattgcatcattggtgtgtaggctccaaggcccgaggagtgttcaaaggattcctggggctttgatgtgtgtatcaatggccccagtgcacgtgcatgaggccccttgcaatgctggagggactgtgatgaaggcagaaagaaaaggggacctacacttgttctctatgagagcaaagcatcacctgtggggcatcaagcacgtgatctataggcaaaactccttatctgaggaattcagaagtaattagacttctagaatttctatacatttctggaatacaagcatgtcgaaacccattgtacaacctttgccgacataaaggcaccaaawcatccacaaatgttaatcatttctcatgaccaatgtgactaatatggtccaaatcacccttcagctcctgcgttaagtccacaaatacccctacggaagatccaactgggcacactcagtcctctcttactgaagctgcactctgctgcagcgttcctcctatctaataaaacattcctcttcaaacttatactgttg

SEQ ID NO: 108782 - DNA, 590 bp, Homo sapiens
ggatgccagaattctctgacctaactctgcccagatcagatctgtggaggaggggaccagattgcatcattggtgtgtaggctccaaggcccgaggagtgttcaaaggattcctggggctttgatgtgtgtatcaatggccccagtgcacgtgcatgaggccccttgcaatgctggagggactgtgatgaaggcagaaagaaaaggggacctacacttgttctctatgagagcaaagcatcacctgtggggcatcaagcacgtgatctataggcaaaactccttatctgaggaattcagaagtaattagacttctagaatttctatacatttctggaatacaagcatgtcgaaacccattgtacaacctttgccgacataaaggcaccaaaacatccacaaatgttaatcatttctcatgaccaatgtgaytaatatggtccaaatcacccttcagctcctgcgttaagtccacaaatacccctacggaagatccaactgggcacactcagtcctctcttactgaagctgcactctgctgcagcgttcctcctatctaataaaacattcctcttcaaacttatactgttg

SEQ ID NO: 108783 - DNA, 597 bp, Homo sapiens
tagcaccaccttttccttcagtaaccagaagacctggaatgagtcatttccatccttgatgggggcagatgcaggccctgcccacgagtccccaggctaagtccagggtccgtcctgtttcccccgtgaagttccaaacaatgaatcaggcctctagtgcaggatggccttgaggsacaacagggcttcttaagcctcatagtcccaaagcagtcccttggatgggaacaaggaccaggtcttgggtgcagcttcctttaacactttgaaatagttcgacatatagtatgtggacctccattcatgctcttgctctaggccccacaaatgttgggaatgatcctgctcagacatttgcaatttcaaaaactcaatatgtgattctgatggaaagccatacaatacgtttctaaccttggagtatgaaatacaaagccttgggatcttgtactcctttggagaggattctccccaccttcctagacttatttcccattctactcctttatataaaactgttggttctttataaaactatttcatcaacgtactaatccccttctcttcatgtacaaaatttactcatataagacctaa

SEQ ID NO: 108784 - DNA, 567 bp, Homo sapiens
gaagcacccttcttctgtgcttctgtaacctttcatttactcctttgccatagcactaattcttattttggttcacaattagttgtgtgtttgttttcctgactggatggtggcttccttcaggacaagtcgagagtcccatatcgttctctctcctgatgtctagcaccgtgccttaaacacaaatgctccaactcactctgaaatgctggagaacatgaagtcaattttagtactgctaaaatgcagtgaaagtacamccaagaatagagcttttagcaggtatgtatattacaactgacacccaagaaaactattatattagaaaagtgggtgataaaataatagaaaggctttcagaataatgaacacacattctgtgctagttgtgctttattttatcacagattctagtttaaaaacaaaacattaaaatatggtgtgcatcttatttctgcttaaacctggatgcagcactccacttgcgatgaataaaaatggaccataacctcataaaaattgaatttgtaagataaaactttttccttatatgagaaaatttattta

SEQ ID NO: 108785 - DNA, 567 bp, Homo sapiens
gaagcacccttcttctgtgcttctgtaacctttcatttactcctttgccatagcactaattcttattttggttcacaattagttgtgtgtttgttttcctgactggatggtggcttccttcaggacaagtcgagagtcccatatcgttctctctcctgatgtctagcaccgtgccttaaacacaaatgctccaactcactctgaaatgctggagaacatgaagtcaattttagtactgctaaaatgcagtgaaagtacacccaagaatagagcttttagcaggtatgtatattacaactgacacccaagaaaactattatattagaaaagtgggtgataaaataatagaaaggctttcagaataatgaacacacattctgtgctagttgtgctttattttatcacagattctagtttaaaaacaaaacattaaaatatggtgtgcatcttayttctgcttaaacctggatgcagcactccacttgcgatgaataaaaatggaccataacctcataaaaattgaatttgtaagataaaactttttccttatatgagaaaatttattta

SEQ ID NO: 108786 - DNA, 350 bp, Homo sapiens
gaacttggtttccttatctaaatgtgcaatttcaagacaataggctctctgaagaggattaaattcctgagagtttagttaaatgagagataattagaaattttaggctctttctgatatgggacaattccagaagcagtagcagtaactctatcctgtttawtttaatttaaaggactgacttgttattaatgaatgtgtgtgtgtaagtgtatgtgtgtagtattggtccattttagtaggttcagtttttttataggtcagtaagtttccacttaaaacttattttcaaaggagaatctctttagatttcttggcacactttggtgcgtgcccagtaagcaaatcgt

SEQ ID NO: 108787 - DNA, 519 bp, Homo sapiens
ccagtagcaaagactgcaggtgtccacagtggcaatgggggctgctggggtcctcttttttacctttcctccacagggagaagttccttctggttctgagctgaccttaattaggggaatgaagtgggagaggcatggtgattcctcctcttctccatgcagccatcctgggtttctgcggtctacaggacttctgctgcctccttgctgttctgcgatgctctcctttagttattttggtcaaaatgtagttttttgtttgtcgtttgtttttctggcagtgagggaaggggagcagagagagcgctactaggagcttctagtggaccctcttgctaacatcttcaaacttaatttttaacagatgagagaaggatcgctccttttttgctattaccataagcacaggcttggtcttcctaatggacaatccagcaatattttcacttaaattgtaagtttcatgrggaccaaaactatttcagtcttagccacaatgtattctcagtgccaggacaa

SEQ ID NO: 108788 - DNA, 609 bp, Homo sapiens
agggaagttgtatacctaattctccatacattatgtaaaaaaaaagcattatgtataatacaatgctaaagacaatgttaatacaatgctaaagacaatgttaatacaaaaattaactacaggaaattgttaaagggaaagaatggaattttacaaggacagatctgaaagatggtagcaagaagatattgtcagcttctagaattamtacagagagttctctactatagagatctgaaaaatttcattcatgaaaattctgtctatagtcatttgcattttcataagtgatgcgtacaaagactagttgttaaaatggaatattgactttaagttgacaacaaatcaacaactaagagatgcccaagaacatattcatgcaaactatcataacttgccagacattttactttgccaaagagaaatacaagaacaacatgatcaagattcctacccagctggatgagtgaagcaaacaagtatagaggttctatgtttgcatagtgagtccctgtctctcagttctgtctcatattacttgcataatgaaattttagttgaatgatcactatgaggttggttgggtcaaagaatttttttaaataccaa

SEQ ID NO: 108789 - DNA, 603 bp, Homo sapiens
ctctagttcagttttcacagacctttctctcatctgaaaacaaaatgaacacatgtgcaatgacttcaaaattttacatgcaataataggagatgcacagatgccttgaaggccatcatgggctggtgaggagcctcttcaccctaagctgagaaccaccaatctattccaacaatgtgattttagagatgagaaaatctagacaatgagaacttaaagagtcacagagtgagttaaaaatagttctaggactagagacccggtatcttgcttcccacttattcccattccctcaggtcattttagccataattggacataaacatgctgaagaagaaatgaacggatgtccttgattagtcaagaaaggatgggacctagtacaagaagaggggtttactttggaataggagaaggaccaataaaccctagtaataggaagggaggcasagtatataatgcagatgtcaaatagtttttaagtgtggtgttgagggtctatttttcctacatgcgctccaaagccatatgctgggctactttgctccatagataccttccttaccactctctgccttccactatcctaactctcacgcagat

SEQ ID NO: 108790 - DNA, 603 bp, Homo sapiens
ctctagttcagttttcacagacctttctctcatctgaaaacaaaatgaacacatgtgcaatgacttcaaaattttacatgcaataataggagatgcacagatgccttgaaggccatcatgggctggtgaggagcctcttcaccctaagctgagaaccaccaatctattccaacaatgtgattttagagatgagaaaatctagacaatgagaacttaaagagtcacagagtgagttaaaaatagttctaggactagagacccggtatcttgcttcccacttattcccattccctcaggtcattttagccataattggacataaacatgctgaagaagaaatgaacggatgtccttgattagtcaagaaaggatgggacctagtacaagaagaggggtttactttggaataggagaaggaccaataaaccctagtaataggaagggaggcagagtatataatgcagatgtcaaatagtttttaagtgyggtgttgagggtctatttttcctacatgcgctccaaagccatatgctgggctactttgctccatagataccttccttaccactctctgccttccactatcctaactctcacgcagat

SEQ ID NO: 108791 - DNA, 603 bp, Homo sapiens
ctctagttcagttttcacagacctttctctcatctgaaaacaaaatgaacacatgtgcaatgacttcaaaattttacatgcaataataggagatgcacagatgccttgaaggccatcatgggctggtgaggagcctcttcaccctaagctgagaaccaccaatctattccaacaatgtgattttagagatgagaaaatctagacaatgagaacttaaagagtcacagagtgagttaaaaatagttctaggactagagacccggtatcttgcttcccacttattcccattccctcaggtcattttagccataattggacataaacatgctgaagaagaaatgaacggatgtccttgattagtcaagaaaggatgggacctagtacaagaagaggggtttactttggaataggagaaggaccaataaaccctagtaataggaagggaggcagagtatataatgcagatgtcaaatagtttttaagtgtggtgttgagggtctatttttcctacatgcgctccaaagccmtatgctgggctactttgctccatagataccttccttaccactctctgccttccactatcctaactctcacgcagat

SEQ ID NO: 108792 - DNA, 409 bp, Homo sapiens
agaaaagggtgggaggaagaaaaacccccagctgtttggaactcacttttattggtattcaattccttgagattgtaggcctgaggtccctatttccttgcttgctgtcagctaagggatattcaaaactgctagaggtccccacattccttgccatgcagcctcttccttctttaaggatcaagggtgcyttggaatcaccttggcttctctgccactgacatctaggttaatatttaaagggctctgtgattaggttagactcccccagataatctccctatattaaactcaaatgattctggtccttaattatatctgaaaaaaatcccttcacagcagtacttatattatagtttgagtgtataagtgggagaaggtatgtgtaaaccacaagctgtcagaattc

SEQ ID NO: 108793 - DNA, 564 bp, Homo sapiens
ggatgcttgaatgcaaagccttcagctgattcaaaatgaggctcatgacttcttctcaccaaacatcatttcgaaattgggcagaagaggtccaaacttttagcataagacccaggaacttgcttggaggcatcctccctcagggatctttatatggtgcctgatttttgtatggagttgtagaaaggaaacttactgtttgaagtagtttcaattcaaaggattctattttttcctatggaaaaataggactgtacatcacacttgtatcctttgtgtatatatgtatatttctctaatgtcttatttcatctttgtattatttttcattttatccttttagtatgtcctttaagtttatttactttttaattagcagtacctgtagctggcatcattgttgaatrtagttttctatactatactggtaactatggtgttcacacatgtaaaaaatactaaatctgagagttctaagttctcctcataataaataataaattacccagttgaaaatagagtttattaagttatttcattatcagtagatattagggtaagata

SEQ ID NO: 108794 - DNA, 609 bp, Homo sapiens
aagaacccacagtcagacattttgaaattctgattctaaaagaatgccttaagtttggktctccttattgtatgcacgagagtatagtctggagataagtaggagcatacttggagtatctcacacatctttttcctttaccaataactgaagcaggacataagtgctgtctggataccagagaagctcttgaactgagtaattctatgcacaagggaaaggtgttacctatcagcttaataaaacttggcctttccctatgtttgggacatgccaaatctaccaaagtgaacacgacacaagatagagtcatggacctgcgaaaccatagtcccagtcttccttcccttttaaaagcccattttctgcctacattttgggagtacgggcctggaccaaatgttattggtcacctcttctcacctttaggttagttgttttcaacagtgctccagtgtatagtctgctccctgttccttaacttaatcacaaaattcctgtatttattagatttacataatttggatctcaggtaaggttttattaaaataaagggttacgcatctaaagatttgaaaagcattgtaaaagtgtaagctcaagtttttc

SEQ ID NO: 108795 - DNA, 609 bp, Homo sapiens
aagaacccacagtcagacattttgaaattctgattctaaaagaatgccttaagtttgggtctccttattgtatgcasgagagtatagtctggagataagtaggagcatacttggagtatctcacacatctttttcctttaccaataactgaagcaggacataagtgctgtctggataccagagaagctcttgaactgagtaattctatgcacaagggaaaggtgttacctatcagcttaataaaacttggcctttccctatgtttgggacatgccaaatctaccaaagtgaacacgacacaagatagagtcatggacctgcgaaaccatagtcccagtcttccttcccttttaaaagcccattttctgcctacattttgggagtacgggcctggaccaaatgttattggtcacctcttctcacctttaggttagttgttttcaacagtgctccagtgtatagtctgctccctgttccttaacttaatcacaaaattcctgtatttattagatttacataatttggatctcaggtaaggttttattaaaataaagggttacgcatctaaagatttgaaaagcattgtaaaagtgtaagctcaagtttttc

SEQ ID NO: 108796 - DNA, 609 bp, Homo sapiens
aagaacccacagtcagacattttgaaattctgattctaaaagaatgccttaagtttgggtctccttattgtatgcacgagagtatagtctggagataagtaggagcatacttggagtatctcacacatctttttcctttaccaataactgaagcaggacataagtgctgtctggataccagagaagctcttgaactgagtaattctatgcacaagggaaaggtkttacctatcagcttaataaaacttggcctttccctatgtttgggacatgccaaatctaccaaagtgaacacgacacaagatagagtcatggacctgcgaaaccatagtcccagtcttccttcccttttaaaagcccattttctgcctacattttgggagtacgggcctggaccaaatgttattggtcacctcttctcacctttaggttagttgttttcaacagtgctccagtgtatagtctgctccctgttccttaacttaatcacaaaattcctgtatttattagatttacataatttggatctcaggtaaggttttattaaaataaagggttacgcatctaaagatttgaaaagcattgtaaaagtgtaagctcaagtttttc

SEQ ID NO: 108797 - DNA, 609 bp, Homo sapiens
aagaacccacagtcagacattttgaaattctgattctaaaagaatgccttaagtttgggtctccttattgtatgcacgagagtatagtctggagataagtaggagcatacttggagtatctcacacatctttttcctttaccaataactgaagcaggacataagtgctgtctggataccagagaagctcttgaactgagtaattctatgcacaagggaaaggtgttacctatcagcttaataaaacttggcctttccctatgtttgggacatgccaaatctaccaaagtgaacamgacacaagatagagtcatggacctgcgaaaccatagtcccagtcttccttcccttttaaaagcccattttctgcctacattttgggagtacgggcctggaccaaatgttattggtcacctcttctcacctttaggttagttgttttcaacagtgctccagtgtatagtctgctccctgttccttaacttaatcacaaaattcctgtatttattagatttacataatttggatctcaggtaaggttttattaaaataaagggttacgcatctaaagatttgaaaagcattgtaaaagtgtaagctcaagtttttc

SEQ ID NO: 108798 - DNA, 624 bp, Homo sapiens
ttacaaaagggtgtgtatgtcatttgtatttcataatgtatggttcttattatattgaattgtatctcaaaattgcatacttatctgtttaaatgatgattagaataaatgttttatttacaatttgcaattataattgcttcacttttttattaaaaatgataacacaacatgtgaaacagataatgctattgtaagtagagataaatgcattgttccaaaacrgaaaaaagttttttttcttttatgtctataagagcaaaacctcttttatattcatttgtgttacatttcatattcaatttttttcaatagaaatagtaaatgcaatatataacataaatataatcatgtcaatcatttaccttttgtttttggcttcactgtctactagtagtttcttactaactttgttccgaaagattgcttataatctctttttagaagacaaattgcatttctctgtttaataacattttaggtagttatgatattcctaagtaagcctataattgttcatctcataatgcacttgagtttctgtctgcttgaagttagagtttaggatgccaggaagatactaatagggacacttgcaactcgtttcaccatcacaatctgcct

SEQ ID NO: 108799 - DNA, 624 bp, Homo sapiens
ttacaaaagggtgtgtatgtcatttgtatttcataatgtatggttcttattatattgaattgtatctcaaaattgcatacttatctgtttaaatgatgattagaataaatgttttatttacaatttgcaattataattgcttcacttttttattaaaaatgataacacaacatgtgaaacagataatgctattgtaagtagagataaatgcattgttccaaaacggaaaaaagttttttttcttttatgtctataagagcaaaacctcttttatattcatttgtgttacatttcatattcaatttttttcaayagaaatagtaaatgcaatatataacataaatataatcatgtcaatcatttaccttttgtttttggcttcactgtctactagtagtttcttactaactttgttccgaaagattgcttataatctctttttagaagacaaattgcatttctctgtttaataacattttaggtagttatgatattcctaagtaagcctataattgttcatctcataatgcacttgagtttctgtctgcttgaagttagagtttaggatgccaggaagatactaatagggacacttgcaactcgtttcaccatcacaatctgcct

SEQ ID NO: 108800 - DNA, 574 bp, Homo sapiens
taagcagctataattgttcaaggacatgttctgaactaatcagtatataaatcacttcctggcattcctttagtcatgtcagataataaaaccttctccctttaactgaattttgataactaaccagtgacttcagtatcactcaaatgttaaaaccaatattaaatcatactgaaaaaagtaattaaccaatatttctcaatgaattcattttkaggtgttaagtgtaatatgtgataaaaaagaaatattcagcattcatagcaaataatttggtgctagcttgcccttgcacataaataaaatagaagcttctttaaatacttacagtaaattattatattgttacactctccaacttaatcttcagctcctcaccttagccctgatacctagctatggatggacaaatcatatacatttcgccctggggatgctttataactgaacattactgtgatcctgcgatgaactcaaaagagtcctgaactaagtgtatagatatgaggagttgagtatgtgcagagggggttaggggtgagagaggaactagctcaacaactatgatcaaatt

SEQ ID NO: 108801 - DNA, 574 bp, Homo sapiens
taagcagctataattgttcaaggacatgttctgaactaatcagtatataaatcacttcctggcattcctttagtcatgtcagataataaaaccttctccctttaactgaattttgataactaaccagtgacttcagtatcactcaaatgttaaaaccaatattaaatcatactgaaaaaagtaattaaccaatatttctcaatgaattcatttttaggtgttaagtgtaatatgtgataaaaaagaaatattcagcattcatagcaaataatttggtgctagcttgcccttgcasataaataaaatagaagcttctttaaatacttacagtaaattattatattgttacactctccaacttaatcttcagctcctcaccttagccctgatacctagctatggatggacaaatcatatacatttcgccctggggatgctttataactgaacattactgtgatcctgcgatgaactcaaaagagtcctgaactaagtgtatagatatgaggagttgagtatgtgcagagggggttaggggtgagagaggaactagctcaacaactatgatcaaatt

SEQ ID NO: 108802 - DNA, 574 bp, Homo sapiens
taagcagctataattgttcaaggacatgttctgaactaatcagtatataaatcacttcctggcattcctttagtcatgtcagataataaaaccttctccctttaactgaattttgataactaaccagtgacttcagtatcactcaaatgttaaaaccaatattaaatcatactgaaaaaagtaattaaccaatatttctcaatgaattcatttttaggtgttaagtgtaatatgtgataaaaaagaaatattcagcattcatagcaaataatttggtgctagcttgcccttgcacrtaaataaaatagaagcttctttaaatacttacagtaaattattatattgttacactctccaacttaatcttcagctcctcaccttagccctgatacctagctatggatggacaaatcatatacatttcgccctggggatgctttataactgaacattactgtgatcctgcgatgaactcaaaagagtcctgaactaagtgtatagatatgaggagttgagtatgtgcagagggggttaggggtgagagaggaactagctcaacaactatgatcaaatt

SEQ ID NO: 108803 - DNA, 624 bp, Homo sapiens
ttacaaaagggtgtgtatgtcatttgtatttcataatgtatggttcttattatattgaattgtatctcaaaattgcatacttatctgtttaaatgatgattagaataaatgttttatttacaatttgcaattataattgcttcacttttttattaaaaatgataacacaacatgtgaaacagataatgctattgtaagtagagataaatgcattgttccaaaacggaaaaaagttttttttcttttatgtctataagagcaaaacctcttttatattcatttgtgttacatttcatattcaatttttttcaatagaaatagtaaatgcaatatataacataaatataatcatgtcaatcatttaccttttgtttttggcttcacygtctactagtagtttcttactaactttgttccgaaagattgcttataatctctttttagaagacaaattgcatttctctgtttaataacattttaggtagttatgatattcctaagtaagcctataattgttcatctcataatgcacttgagtttctgtctgcttgaagttagagtttaggatgccaggaagatactaatagggacacttgcaactcgtttcaccatcacaatctgcct

SEQ ID NO: 108804 - DNA, 619 bp, Homo sapiens
attttgtaactcacttaaaaagatcaagcggtatgtttagaacaggttaattacatttcagtctgtgccatttaaattttaatgtcaataattgatattaagaataaaattttaaaaattcactctatacaaccaggtagcctcaaaatctccaaggcaaagcctgtgtttttctaaattctagtattacctgggcactttaattcatctgaatagtctccacagtcattagacccgtcgcatatccaggttggcagaacacacagtgaggtagaattacatcttatgaaccctgtggttttcactccaagcttatagaaatgtgtgcagtctgtgttatctagaagaaggtaaacaaaaaatgaaaaagtacctcatttkcaaagattatgagccttctatgtaggtcatagagatgagaaaagttaacttcatttgaggaaatagatacgtaattatcccacacaacaggggttaattacataccaattttggacaaagttcagtaaaatcttgcacagtgttcaatgcaatgccaaaagtgcccaagcataaacagacaaaaggtagtggaatatcttactgcagttcttttcatctgaagcatctgcacaatcta

SEQ ID NO: 108805 - DNA, 513 bp, Homo sapiens
gtgtcacaaaacttacataatatctagtcaatagtatttattgagcacttactaagtgctcagtactattttaagagtttatgctatttaatcttaggatgcacacatttacttgattgctcttttctttttctttttgtctaactgcacaaatactgtctccctcttatctcaaaactaccagaacacaaaaacagaatgtaagcatcttaagatgtgtgttactctaaatatcacacagataactgtaactgcattttatggaaaaggtgatacytgcaaaacagaaactcaactgcgttttgctaagttagtaaaagggtaattatcaacaaatctagttataaaatagatctattatggaaataaaaatcagtgtgtcaatgtgatctagtcagtgcagtatttctttctcagagactatttttaatagcaaaagtggtaagaaattaatttgatgctagggatatttctttctgatcttttgtctttcttgacttcaagtttgtcttt

SEQ ID NO: 108806 - DNA, 513 bp, Homo sapiens
gtgtcacaaaacttacataatatctagtcaatagtatttattgagcacttactaagtgctcagtactattttaagagtttatgctatttaatcttaggatgcacacatttacttgattgctcttttctttttctttttgtctaactgcacaaatactgtctccctcttatctcaaaactaccagaacacaaaaacagaatgtaagcatcttaagatgtgtgttactctaaatatcacacagataactgtaactgcattttatggaaaaggtgatacckgcaaaacagaaactcaactgcgttttgctaagttagtaaaagggtaattatcaacaaatctagttataaaatagatctattatggaaataaaaatcagtgtgtcaatgtgatctagtcagtgcagtatttctttctcagagactatttttaatagcaaaagtggtaagaaattaatttgatgctagggatatttctttctgatcttttgtctttcttgacttcaagtttgtcttt

SEQ ID NO: 108807 - DNA, 629 bp, Homo sapiens
tatgaccttggttggacaaaaatactgaagttaagcactttcttctgatattaaagtatgcaactatgtaagctgtagctgtggctttctcagcaacacaaaccacacatttttttttaatatcatattacasatgttgtatctggaaatatgttatctatgctcaccactacttcaaactatatggtggccattagacccacttctatatctttttatgtaaagtgttaataacaaagtgcatatgttgttctatctcaaatttgtttctttttatattttgataactgtatttcaatgtcatgtttgctttgtaaacctatgtattttattttctgcatggaaagggatctgtatgtttaccaggctgccaaagggcgacatggcacataaaaagttaagattgaggcgggcagatcatctgaggtcaagagttgggagaccagcctggccaacatggtgaaacctcgtctctactaaaaatacaaaaaaaaattaacagtgtggtggcacatgcctgtagtcccagccactcagggaggctgaggcaggagaatcacttgaatccaagaggtggaggttgcagtgagccaagatcacgccactgcactccagcctgggcgacaggg

SEQ ID NO: 108808 - DNA, 629 bp, Homo sapiens
tatgaccttggttggacaaaaatactgaagttaagcactttcttctgatattaaagtatgcaactatgtaagctgtagctgtggctttctcagcaacacaaaccacacatttttttttaatatcatattacacwtgttgtatctggaaatatgttatctatgctcaccactacttcaaactatatggtggccattagacccacttctatatctttttatgtaaagtgttaataacaaagtgcatatgttgttctatctcaaatttgtttctttttatattttgataactgtatttcaatgtcatgtttgctttgtaaacctatgtattttattttctgcatggaaagggatctgtatgtttaccaggctgccaaagggcgacatggcacataaaaagttaagattgaggcgggcagatcatctgaggtcaagagttgggagaccagcctggccaacatggtgaaacctcgtctctactaaaaatacaaaaaaaaattaacagtgtggtggcacatgcctgtagtcccagccactcagggaggctgaggcaggagaatcacttgaatccaagaggtggaggttgcagtgagccaagatcacgccactgcactccagcctgggcgacaggg

SEQ ID NO: 108809 - DNA, 629 bp, Homo sapiens
tatgaccttggttggacaaaaatactgaagttaagcactttcttctgatattaaagtatgcaactatgtaagctgtagctgtggctttctcagcaacacaaaccacacatttttttttaatatcatattacacatgttgtatctggaaatatgttatctatgctcaccactacttcaaactatatggtggccattagacccacttctakatctttttatgtaaagtgttaataacaaagtgcatatgttgttctatctcaaatttgtttctttttatattttgataactgtatttcaatgtcatgtttgctttgtaaacctatgtattttattttctgcatggaaagggatctgtatgtttaccaggctgccaaagggcgacatggcacataaaaagttaagattgaggcgggcagatcatctgaggtcaagagttgggagaccagcctggccaacatggtgaaacctcgtctctactaaaaatacaaaaaaaaattaacagtgtggtggcacatgcctgtagtcccagccactcagggaggctgaggcaggagaatcacttgaatccaagaggtggaggttgcagtgagccaagatcacgccactgcactccagcctgggcgacaggg

SEQ ID NO: 108810 - DNA, 629 bp, Homo sapiens
tatgaccttggttggacaaaaatactgaagttaagcactttcttctgatattaaagtatgcaactatgtaagctgtagctgtggctttctcagcaacacaaaccacacatttttttttaatatcatattacacatgttgtatctggaaatatgttatctatgctcaccactacttcaaactatatggtggccattagacccacttctatatctttttatgtaaagtgttaataacaaagtgcatatgttgttctatctcaaatttgtttctttttatattttgataactgtatttcaatgtcatgtttgctttgtaaacctatgtattttattttctgcatggaaagggatctgtatgtttaccaggctgccaaagggcgacatggcacataaaaagttaagattgaggcgggcagatcatctgaggtcaagagttgggagaccagcctggccaacayggtgaaacctcgtctctactaaaaatacaaaaaaaaattaacagtgtggtggcacatgcctgtagtcccagccactcagggaggctgaggcaggagaatcacttgaatccaagaggtggaggttgcagtgagccaagatcacgccactgcactccagcctgggcgacaggg

SEQ ID NO: 108811 - DNA, 606 bp, Homo sapiens
ggacttggggtgagaatgatgtgtcaatgtaggttcaccggtttttccaaagtaccactcyggtggtagcgtgttgataatggggagactgtgcatgtgtgagggtagggggtatattggatatctctgtactttcttctcaattttactgtgaccctaaaactgctccaaaaaaaatagccttagaaaaagatacttgtcattggatttagaacccacctggataatccaggataatctcatctcaaaatcctgaatttaatcacatcggcaaagactctttttccaaaagtaataacatttgtatgttctagagatttaacatagatccctttggggagcctttttttggcctagcacagacacttcaggagttttatagagcacacctcaaaattgcccacttgagggaaggaacaggcaagagttaatccaccagttcccaagccccattgttcaatgcttgccacatgggtgtttcccaccttgagctcccaggttggtatgcatgtgtgaatgtacataggacccagcaggcatccacacagtggcatcagaaatcctaagtgaaagtgggcagtgcagctgagaggtggtattgtcaac

SEQ ID NO: 108812 - DNA, 487 bp, Homo sapiens
agaaacaatcacagacaggaagagcccaaggagacatcaaaactaaatgtaatgtgatattgtggtcagaatcccgtaactacattttattttacttagtgtgaaaagtacaggctggccgcggtggctcacgcytgtaatccgagcactttgggaggccgaggcaggcgaatcacctgaggtcaggagttcaagaccagcctggccaacctggtgaaaccccatctctaccaaaaatacaaaaattagctgggtgtggtggtgcatgcttgtaatcccagctactctggaggctgaggcaggagaattgcttgaggttgtggtgagccgggatcgcaccactgcactccaacctgggcgacaagagtgaaactgtatctcaaaaaaaaaattttttttgaaagtacattaggtaataacaaaaaaagctcaataatatatcaacatgggctcattaatgtgtgtgtgtatgaatttatgaattctt

SEQ ID NO: 108813 - DNA, 578 bp, Homo sapiens
atttgaaaagtcccaccaacctttgttagcttaggaaaaaatccaagcatttcatattcatcaaacggtgccccagaagggattgggagttgattatctggtgaaagcccagcatatggtgctgcccggcttccggctccagctctagctgcactcgctgaacctgctggagagaagttctgtttgtcacgtgccattagcacagatgctaggggcgtaagtttagatgcttagggtttacatgcaaattaatcacataaaagaaaaacattttggcaggataaacagattttcaagggggaaaataatagagagagaggtcggcagagttttccaaacttccttggaaattatttagggaagattccattaggaataaaaatcacaaaaattttttaaaagtaggtgtygtaaactcaaggcataaagcagcaaacactgaaagtttatctctgtggttacagggaaaggggaacacgtgaaaataaatggtggcctctaaaccacctagtccacaaacagaaagtggaaaataaggactttgaaagacctaagctcaccagacctggcaaatacaa

SEQ ID NO: 108814 - DNA, 387 bp, Homo sapiens
agacactgaatctgctggcaccttggtcttggacttcccagcctccggaaccagaagcaattgatttctgttgtttctcagccacccagctcacagtattttgttacagcagctcaaatgaatgggaatctacatattatgtttacctatatgagttgatggcgagagtagatattaagattcagcttctggtaacagtagattttaagtgatgtcacatctatacctccctccccactgaataaaaagggtaactgtgtgagatgatggatgtgttaattagcttggtggtggtaataatttcacaatgcrtacatatattaaaaccacaccttaaataatgcaatttttatttgtccatcatatttcaataaagctggaaaaaaa

SEQ ID NO: 108815 - DNA, 521 bp, Homo sapiens
ttactatactatgcttaagtacactcttgcttgtttatttgtttgtttccttcactctgtgtatctggtcatcatcagcatttatgttgacaggtagcttgcttacttattgacaaggtggctgtatggtttcctgacatctcctttcagtattatagtcgtcagtctttttcataagattatataaactataataaatatctgattacccatctatcatctttctagctaagacatctataatatatatatatgtgtgtgtgtatatatatatacatatatatatattcacagtttatagactatttcagaaayttttaattacctctctaaagtagtaagatatttgcatgggaaaaaaatctcagacatctctgccaggagaaacattcaaactattaaaagcacagactctaaatttgccttttggataataaccattgctgcttctctctttgctttatttcacttgactacctccattctccttgggactgtcccctcaatctctcagggcatca

SEQ ID NO: 108816 - DNA, 569 bp, Homo sapiens
gtggtggcctcaggttggcaggagggtagaaggcatctgttctcagaacttcttccctcagagtcgtcggtccttcttaccatgggaggatgcctggaaccacagggcagtgcatggcgtagcagcctgtgtgcagagcagagyctaccttccccgagacacctggagtctctctccagcaaaggcccccacattgtctttctccttacaacacttttgatcctaaatgtgtaaagttccctgaaaacccactgcttctccaacacccatttcttgccccaaaatttaattctgacacaacttagagttcgcacagatcccacaaattcagggctaagtcccacatcacccctctcactgcagaggttagtcacatgtcccataagcccatctatacttctgagctactgcctataaatctgagactcccataaaccccttttcaagttaaataatttgatagagttactcaaaaaaactcaacaaataagtctaattatatttaccactttattataaaaatacaactcagaaactgacaaatgaaagagatgtctatgaaaaggaac

SEQ ID NO: 108817 - DNA, 634 bp, Homo sapiens
gtctagaacttcctgcaggtgtcattgtgacaaacatacacatttgtccagcacctgagtgagtagactctcctgtttaagcccatctcacaaataaaattgggacatatcattggacctagaacgtaggtgaygtggctctattctctcgacttgtgctgcccacagggagcattgtaacatatcactgaacttaacacctaggagattgggggctcctgcctgaactctgcccacagggaggcagagcatatttctgccttgtagcatatttctgcctccatcaccagatgatgtgactctcctttctgcctgcaccttgcccacaggaaagattctgacatatcactgggcctagtaatcagtaatcaggtgatgtgtctctcctgccatggctttacccacagggagtgtggtgacatatcactgagctcaatattcaggtgatttgactctgctgcttgtactctgatttcaggaggggattgtaacatatcccgggtgagcacacaagtgatgggactcccttcctagcctccgacctcataaaagattgttacatatccctggcccagccttaggtatgtgactctcctacctggtccctgccatcaggggagatattgacagatct

SEQ ID NO: 108818 - DNA, 634 bp, Homo sapiens
gtctagaacttcctgcaggtgtcattgtgacaaacatacacatttgtccagcacctgagtgagtagactctcctgtttaagcccatctcacaaataaaattgggacatatcattggacctagaacgtaggtgatgtggctctattctctcgacttgtgctgcccacagggagcattgtaacatatcactgaacttaacacctaggagattgggggctcctgcctgaactctgcccacagggaggcagagcatatttctgccttgtagcatatttctgcctccatcaccagatgatgtgactctcctttctgcctgcaccttgcccacaggaaagattctgacatatcactgggcctagtaatcagtaatcaggtgatgtgtctctcctgccatggctttacccacagggagtgtggtgacatatcactgagctsaatattcaggtgatttgactctgctgcttgtactctgatttcaggaggggattgtaacatatcccgggtgagcacacaagtgatgggactcccttcctagcctccgacctcataaaagattgttacatatccctggcccagccttaggtatgtgactctcctacctggtccctgccatcaggggagatattgacagatct

SEQ ID NO: 108819 - DNA, 612 bp, Homo sapiens
agatgcatccaaaaaattatgcaaatcataaccaaatgaggacagactatgtcacaattatagtatgcaaaatgmtttttaaataactgtcttagtttataaaatatattatgaaatcaaattgtcagaaaaacaaaggacaaaataataaaagggtttattcactggaaacctatgacaattatacacatttatataattgtgtgtatatatctaattatgtatacacacaaatatgtatgcaccttacatgagtatttttaaatatatcaataatatcttgacagaacataagcaaaaacggcaatatattaaaagtataatattttaatacaccagttctgtaattaataaaaaagccagatagaatattaaaaagtaaacggacgacatgaaaatactgtaaagcaattagatataacagatgcatacagaacactctacacaaaaacaaaactcacaatcttctcaaaagctcatgaaacattctcctaaaaataactattaagccaaaaaacaattctgaacagaatttttgaaaaattgaatgttacaaaaaattcaaaaaatcaatgaatataggagttatttttttgaaaagatcaacaaaat

SEQ ID NO: 108820 - DNA, 612 bp, Homo sapiens
agatgcatccaaaaaattatgcaaatcataaccaaatgaggacagactatgtcacaattatagtatgcaaaatgctttttaaataactgtcttagtttataaaatatattatgaaatcaaattgtcagaaaaacaaaggacaaaataataaaagggtttattcactggaaacctatgacaattatacacatttatataattgtgtgtatatatctaattatgtatacacacaaatatgtatgcaccttacatgagtatttttaaatatatcaataatatcttgacagaacataagcaaaaacgrcaatatattaaaagtataatattttaatacaccagttctgtaattaataaaaaagccagatagaatattaaaaagtaaacggacgacatgaaaatactgtaaagcaattagatataacagatgcatacagaacactctacacaaaaacaaaactcacaatcttctcaaaagctcatgaaacattctcctaaaaataactattaagccaaaaaacaattctgaacagaatttttgaaaaattgaatgttacaaaaaattcaaaaaatcaatgaatataggagttatttttttgaaaagatcaacaaaat

SEQ ID NO: 108821 - DNA, 612 bp, Homo sapiens
agatgcatccaaaaaattatgcaaatcataaccaaatgaggacagactatgtcacaattatagtatgcaaaatgctttttaaataactgtcttagtttataaaatatattatgaaatcaaattgtcagaaaaacaaaggacaaaataataaaagggtttattcactggaaacctatgacaattatacacatttatataattgtgtgtatatatctaattatgtatacacacaaatatgtatgcaccttacatgagtatttttaaatatatcaataatatcttgacagaacataagcaaaaacggcaatatattaaaagtataatattttaatacaccagttctgtaattaataaaaaagccakatagaatattaaaaagtaaacggacgacatgaaaatactgtaaagcaattagatataacagatgcatacagaacactctacacaaaaacaaaactcacaatcttctcaaaagctcatgaaacattctcctaaaaataactattaagccaaaaaacaattctgaacagaatttttgaaaaattgaatgttacaaaaaattcaaaaaatcaatgaatataggagttatttttttgaaaagatcaacaaaat

SEQ ID NO: 108822 - DNA, 612 bp, Homo sapiens
agatgcatccaaaaaattatgcaaatcataaccaaatgaggacagactatgtcacaattatagtatgcaaaatgctttttaaataactgtcttagtttataaaatatattatgaaatcaaattgtcagaaaaacaaaggacaaaataataaaagggtttattcactggaaacctatgacaattatacacatttatataattgtgtgtatatatctaattatgtatacacacaaatatgtatgcaccttacatgagtatttttaaatatatcaataatatcttgacagaacataagcaaaaacggcaatatattaaaagtataatattttaatacaccagttctgtaattaataaaaaagccagatagaatattaaaaagtaaacrgacgacatgaaaatactgtaaagcaattagatataacagatgcatacagaacactctacacaaaaacaaaactcacaatcttctcaaaagctcatgaaacattctcctaaaaataactattaagccaaaaaacaattctgaacagaatttttgaaaaattgaatgttacaaaaaattcaaaaaatcaatgaatataggagttatttttttgaaaagatcaacaaaat

SEQ ID NO: 108823 - DNA, 551 bp, Homo sapiens
tagaatctaagcttgtttcacctcctccttatgctcctctctatcagcctttgccaggtayaatagtgagcagcccagctgtagttactcgcggtggaacttcacaccatgcagggccagagaatttgatccgcttacagaaagtcccaaatggagagaggaccatcagagtgcttgttctcttctcaataaatgatctaatccaatgcaagcaacagctctgatggctcccaaagaacttcagcgcatttactgaagccttccaggctctaactttgaccaccattcaacttcaccatccataaatggacccaatgactgctgaccacgtagctgcagaaaacttttgcttattggcaaaaaatagaaaagacttaaaacttttgctgctttcaccatttcaatgcagaattcctttgcagcacaaatgtcaccataaggtggagccttgggaatccagtataaactatctcagaaaatctcagtgtgtccccaacaggcagcagagggcctcaatagacttcaacaacatctggactccatggccactg

SEQ ID NO: 108824 - DNA, 551 bp, Homo sapiens
tagaatctaagcttgtttcacctcctccttatgctcctctctatcagcctttgccaggtacaatagtgascagcccagctgtagttactcgcggtggaacttcacaccatgcagggccagagaatttgatccgcttacagaaagtcccaaatggagagaggaccatcagagtgcttgttctcttctcaataaatgatctaatccaatgcaagcaacagctctgatggctcccaaagaacttcagcgcatttactgaagccttccaggctctaactttgaccaccattcaacttcaccatccataaatggacccaatgactgctgaccacgtagctgcagaaaacttttgcttattggcaaaaaatagaaaagacttaaaacttttgctgctttcaccatttcaatgcagaattcctttgcagcacaaatgtcaccataaggtggagccttgggaatccagtataaactatctcagaaaatctcagtgtgtccccaacaggcagcagagggcctcaatagacttcaacaacatctggactccatggccactg

SEQ ID NO: 108825 - DNA, 551 bp, Homo sapiens
tagaatctaagcttgtttcacctcctccttatgctcctctctatcagcctttgccaggtacaatagtgagcagcccagctgtagttactcgcggtggaacttcacmccatgcagggccagagaatttgatccgcttacagaaagtcccaaatggagagaggaccatcagagtgcttgttctcttctcaataaatgatctaatccaatgcaagcaacagctctgatggctcccaaagaacttcagcgcatttactgaagccttccaggctctaactttgaccaccattcaacttcaccatccataaatggacccaatgactgctgaccacgtagctgcagaaaacttttgcttattggcaaaaaatagaaaagacttaaaacttttgctgctttcaccatttcaatgcagaattcctttgcagcacaaatgtcaccataaggtggagccttgggaatccagtataaactatctcagaaaatctcagtgtgtccccaacaggcagcagagggcctcaatagacttcaacaacatctggactccatggccactg

SEQ ID NO: 108826 - DNA, 551 bp, Homo sapiens
tagaatctaagcttgtttcacctcctccttatgctcctctctatcagcctttgccaggtacaatagtgagcagcccagctgtagttactcgcggtggaacttcacaccatgcagggccagagaatttgatccscttacagaaagtcccaaatggagagaggaccatcagagtgcttgttctcttctcaataaatgatctaatccaatgcaagcaacagctctgatggctcccaaagaacttcagcgcatttactgaagccttccaggctctaactttgaccaccattcaacttcaccatccataaatggacccaatgactgctgaccacgtagctgcagaaaacttttgcttattggcaaaaaatagaaaagacttaaaacttttgctgctttcaccatttcaatgcagaattcctttgcagcacaaatgtcaccataaggtggagccttgggaatccagtataaactatctcagaaaatctcagtgtgtccccaacaggcagcagagggcctcaatagacttcaacaacatctggactccatggccactg

SEQ ID NO: 108827 - DNA, 670 bp, Homo sapiens
tcaagttgacacataaagttaactctcacaggggtgaaggttgaagaagtttggtgtgttccaggagcatgaagaagcctaatatagttagagggttaggagttggtcagaagggagggaagatggcaggaagtgagattggaaaagtaaggaaaggactggaatgtgaagtgaatgccttatatgtttgcttttctcaaggaatctagaatttatcctgaagacagtggcaactacagaagggttgtgaatcatagactgtcctaatcagatttctataacaaaagatgagaggatgcactggaaaagcaaagacagggggcaagacatctagttaggaggctgttgtggtaatctacacaggatatgataacaacctggatgagggtggtggcaaatgaggatgaggaagtcatcctcatccccaagagaaaaggagactagacaacccatggtratagattgaaaaacggtgaaggagagggttgtaaagattcatccttcactcctcttcaccacattctcctcccccaaattcatgaccttcttgcagcagaattgtgttgttttacttcttccaaatggagattcccagaccttatcttgaacctgacaaattagaccctcaggcccaggcactggtatttttcacagcttcaccgcagttgac

SEQ ID NO: 108828 - DNA, 564 bp, Homo sapiens
aaatatgtcctggtgtctattgtttctttctctgtatccaagwgtactaaatgattagctcccacttataagtgggaatatgcagtatttggttttctgttcctatgttaatttgcttaggatactagccttcagctccataaatgttgctgcagaggacatgatctcattcttttttgtggctgcatagtactccatggtgcatatttagtacattttctttgtccagtctaccttggatgggcttttaggttgattatatgcctttgctattatgaaaactactgcaatgaatatgtctatgtatgtgtctttatggtaggatgatttattttcctttgtgtatatactcagcactgggattgctgggctgaatagtagttctgtattaagttgagaaattgccaaacaaccttccacaatggctgagctagtttacattcccacaaacagtgtataagcagtcccctttctccacaacctcaccactacctgctattttttgactcgtgagtaatagccattctgaatggggtgagatgggatcttatagtgtgtttgata

SEQ ID NO: 108829 - DNA, 564 bp, Homo sapiens
aaatatgtcctggtgtctattgtttctttctctgtatccaagtgtactaaatgwttagctcccacttataagtgggaatatgcagtatttggttttctgttcctatgttaatttgcttaggatactagccttcagctccataaatgttgctgcagaggacatgatctcattcttttttgtggctgcatagtactccatggtgcatatttagtacattttctttgtccagtctaccttggatgggcttttaggttgattatatgcctttgctattatgaaaactactgcaatgaatatgtctatgtatgtgtctttatggtaggatgatttattttcctttgtgtatatactcagcactgggattgctgggctgaatagtagttctgtattaagttgagaaattgccaaacaaccttccacaatggctgagctagtttacattcccacaaacagtgtataagcagtcccctttctccacaacctcaccactacctgctattttttgactcgtgagtaatagccattctgaatggggtgagatgggatcttatagtgtgtttgata

SEQ ID NO: 108830 - DNA, 564 bp, Homo sapiens
aaatatgtcctggtgtctattgtttctttctctgtatccaagtgtactaaatgattagctcccacttataagtgggaatatgcagtatttggttttctgttcctatgttaatttgcttaggatactagccttcagctccataaatgttgctgcagaggacatgatctcattcttttttgtggctgcatagtactccatggtgcatatttagtacattttctttgtccagtctaccttggatgggcttttaggttgattatatgcctttgctattatgaaaactactgcaatgaatatgtctatgtatgtgtctttatggtagratgatttattttcctttgtgtatatactcagcactgggattgctgggctgaatagtagttctgtattaagttgagaaattgccaaacaaccttccacaatggctgagctagtttacattcccacaaacagtgtataagcagtcccctttctccacaacctcaccactacctgctattttttgactcgtgagtaatagccattctgaatggggtgagatgggatcttatagtgtgtttgata

SEQ ID NO: 108831 - DNA, 564 bp, Homo sapiens
aaatatgtcctggtgtctattgtttctttctctgtatccaagtgtactaaatgattagctcccacttataagtgggaatatgcagtatttggttttctgttcctatgttaatttgcttaggatactagccttcagctccataaatgttgctgcagaggacatgatctcattcttttttgtggctgcatagtactccatggtgcatatttagtacattttctttgtccagtctaccttggatgggcttttaggttgattatatgcctttgctattatgaaaactactgcaatgaatatgtctatgtatgtgtctttatggtaggatgatttattttcctttgtgtatatactcagcactgggattgctgggctgaatagtagttctgtattaagttgagaaattgccaaacaaccttccacaatggctgagctagtttacattcccacaaacagtgtataagcagtccccttyctccacaacctcaccactacctgctattttttgactcgtgagtaatagccattctgaatggggtgagatgggatcttatagtgtgtttgata

SEQ ID NO: 108832 - DNA, 631 bp, Homo sapiens
agattgtggtgacactgtggagaaagggggatgtttatactgtgttggtgggaatgtaaatgtagtttagcctgctgtggaacagcagttgggaggtttttcagtgaatttaacacagagattgtgttcaacacagtaattccatttgtgtatatatattcaaaagaaaagaatgtgttcccccaatctgatacatccacgtgtatgtttagtgtagcctctatttactatagcaaasacatgaaatcatcttaggtgcccatcaatggtggattagataaaggaaatacggtacacatacacagtggaatactacatggccataaaaaaagaatgaaatcatgtctgttgcagcaccatgaatgcagctgcaggtcattatcctaagcaaattaacacaggaacagaaaaccaaatactacatgttctctcttataagtgagagttaaacagacaaacatggtacacatggacatgaaaatggcagccataaacactggggactagtgggagggaaggagggggtcaaggattgaaaaagagctattgggtactatgctcactacctgggtgatggtattaatcataccccaaacatgagcatcatgcaatatacctatggaacaaaccc

SEQ ID NO: 108833 - DNA, 631 bp, Homo sapiens
agattgtggtgacactgtggagaaagggggatgtttatactgtgttggtgggaatgtaaatgtagtttagcctgctgtggaacagcagttgggaggtttttcagtgaatttaacacagagattgtgttcaacacagtaattccatttgtgtatatatattcaaaagaaaagaatgtgttcccccaatctgatacatccacgtgtatgtttagtgtagcctctatttactatagcaaacacatgaaatcatcttaggtgcccatcaatggtggattagataaaggaaatacggtacacatacacartggaatactacatggccataaaaaaagaatgaaatcatgtctgttgcagcaccatgaatgcagctgcaggtcattatcctaagcaaattaacacaggaacagaaaaccaaatactacatgttctctcttataagtgagagttaaacagacaaacatggtacacatggacatgaaaatggcagccataaacactggggactagtgggagggaaggagggggtcaaggattgaaaaagagctattgggtactatgctcactacctgggtgatggtattaatcataccccaaacatgagcatcatgcaatatacctatggaacaaaccc

SEQ ID NO: 108834 - DNA, 630 bp, Homo sapiens
agattgtggtgacactgtggagaaagggggatgtttatactgtgttggtgggaatgtaaatgtagtttagcctgctgtggaacagcagttgggaggtttttcagtgaatttaacacagagattgtgttcaacacagtaattccatttgtgtatatatattcaaaagaaaagaatgtgttcccccaatctgatacatccacgtgtatgtttagtgtagcctctatttactatagcaaacacatgaaatcatcttaggtgcccatcaatggtggattagataaaggaaatacggtacacatacacagtggaatactacatggccataaaaaaagaatgaaatcatgtctgttgcagcaccatgaatgcagctgcaggtcattatcctaagcaaatkaacacaggaacagaaaaccaaatactacatgttctctcttataagtgagagttaaacagacaaacatggtacacatggacatgaaaatggcagccataaacactggggactagtgggagggaaggagggggtcaaggattgaaaaagagctattgggtactatgctcactacctgggtgatggtattaatcataccccaaacatgagcatcatgcaatatacctatggaacaaacc

SEQ ID NO: 108835 - DNA, 497 bp, Homo sapiens
acaatgcagtgaactcatcgagtttgtagaacaaaaaaaaaaatcacttaacgtttgtggttattgtacttcctctttcttttggcaagtttatcacaggtggattcaagtaactgaaaaagaaacaggaaaagatgcctggcatgcatggctgttattcctggcactctctctgattagggtcctgtatatatctctcaaaacacacacacatattcacacaccccacasatctataataaactaggggttttccttattatcggatagttaataaaccgcagcataattaaataagagcctacatttattattgtcattcagtaagcagcatatagttttggatttcctggttggagtccatccatagttaataattgggtaggatatgctggtatctcaatcaggatatgaatgattagccaatagttccttgaacagaaccttattactaatgaggagcagtagattgagttgagttttaaggaacttcagga

SEQ ID NO: 108836 - DNA, 497 bp, Homo sapiens
acaatgcagtgaactcatcgagtttgtagaacaaaaaaaaaaatcacttaacgtttgtggttattgtacttcctctttcttttggcaagtttatcacaggtggattcaagtaactgaaaaagaaacaggaaaagatgcctggcatgcatggctgttattcctggcactctctctgattagggtcctgtatatatctctcaaaacacacacacatattcacacaccccacagatctataataaactaggggttttycttattatcggatagttaataaaccgcagcataattaaataagagcctacatttattattgtcattcagtaagcagcatatagttttggatttcctggttggagtccatccatagttaataattgggtaggatatgctggtatctcaatcaggatatgaatgattagccaatagttccttgaacagaaccttattactaatgaggagcagtagattgagttgagttttaaggaacttcagga

SEQ ID NO: 108837 - DNA, 497 bp, Homo sapiens
acaatgcagtgaactcatcgagtttgtagaacaaaaaaaaaaatcacttaacgtttgtggttattgtacttcctctttcttttggcaagtttatcacaggtggattcaagtaactgaaaaagaaacaggaaaagatgcctggcatgcatggctgttattcctggcactctctctgattagggtcctgtatatatctctcaaaacacacacacatattcacacaccccacagatctataataaactaggggttttccttattatcggatagttaataaaccgcagcataattaaataagagcctacatttattattgtcattcagtaagcagcatatagttttggatttcctggttggagtccatccatagttaataattgggtaggatatgctggyatctcaatcaggatatgaatgattagccaatagttccttgaacagaaccttattactaatgaggagcagtagattgagttgagttttaaggaacttcagga

SEQ ID NO: 108838 - DNA, 497 bp, Homo sapiens
acaatgcagtgaactcatcgagtttgtagaacaaaaaaaaaaatcacttaacgtttgtggttattgtacttcctctttcttttggcaagtttatcacaggtggattcaagtaactgaaaaagaaacaggaaaagatgcctggcatgcatggctgttattcctggcactctctctgattagggtcctgtatatatctctcaaaacacacacacatattcacacaccccacagatctataataaactaggggttttccttattatcggatagttaataaaccgcagcataattaaataagagcctacatttattattgtcattcagtaagcagcatatagttttggatttcctggttggagtccatccatagttaataattgggtaggatatgctggtatctcaatcaggatatgaatgattagccaatagttccttgaacagwaccttattactaatgaggagcagtagattgagttgagttttaaggaacttcagga

SEQ ID NO: 108839 - DNA, 634 bp, Homo sapiens
  misc_feature (1)...(634): n = A,T,C or G
cacaaaaagagaagaccttccagaccaaaactaggaagtttggaaaaatgagaatcatgaaaatatgcgtattacacatacagccaggttgaagaagacagaaagcattagaatgtggaggaaccttatgagctagaatgcttagtacttaaagaaatgtctttgggatcagccatgctcctgggatgaatcctgacctggccatgatctaactgtcaccttaaccatgtcaccgagaggcttaacctgcacttacttctttcatctgtaaaatggatggcataatagtgcctgcttcacagaggcatggtgagggttgaataagatcatgcacattaagtacctangacccagtaactctctgtaattatgctgtgtttgagatcataaagctcttaatcattataaaagtacctgagaaattctggaatgctataacaggaaaacttctgaaaatatagactacccctaggcaagccctttgttttacacagcaagaaagtgagacctaatcagttagaggcaagatgcttctcgagtcagtmtagtgagtttttattgtgcactgaattacacatctacagagcttcgtgtagcaggaaactgtgctcagtttgcccagtgctcattccta

SEQ ID NO: 108840 - DNA, 634 bp, Homo sapiens
  misc_feature (1)...(634): n = A,T,C or G
cacaaaaagagaagaccttccagaccaaaactaggaagtttggaaaaatgagaatcatgaaaatatgcgtattacacatacagccaggttgaagaagacagaaagcattagaatgtggaggaaccttatgagctagaatgcttagtacttaaagaaatgtctttgggatcagccatgctcctgggatgaatcctgacctggccatgatctaactgtcaccttaaccatgtcaccgagaggcttaacctgcacttacttctttcatctgtaaaatggatggcataatagtgcctgcttcacagaggcatggtgagggttgaataagatcatgcacattaagtacctangacccagtaactctctgtaattatgctgtgtttgagatcataaagctcttaatcattataaaagtacctgagaaattctggaatgctataacaggaaaacttctgaaaatatagactacccctaggcaagccctttgttttacacagcaagaaagtgagacctaatcagttagaggcaagatgcttctcgagtcagtatagtgagtttttattgtgcactgaattacacatctacagagcttcstgtagcaggaaactgtgctcagtttgcccagtgctcattccta

SEQ ID NO: 108841 - DNA, 584 bp, Homo sapiens
ctactttaaaatgaaagtgacttcattttcaagtgaccttttataaagtccaaacatcaagtgtcgtaaatattctaagtattcagaatgaggtccagtactgtaatattaagttggatatgccagaaactcagaaaagcstatttctctttaaatagccaacttataaaattattcatattgtcttcctggattcccattatgttcctcgtgcaagaaagtgaaagtgttttatacaagccacactgtggggtaatatggccaaactaagagctttcagaaggattcttctcttattctctacttctgcttctgctgctgctgctttttttaaacaaatgagatcagaggcatactgtgattagcaatgcatgtttatgtagtgagacaccagattagaaatgattattatcatgtcacctaacagagtgataataatggtactctgagatggtacagctcagctgttgaggattcctactacaataattattttaaaattaattttgaagagaaaaaggaaagaaagaaagatgattgaaaccattaaagcaatcctgataaataagaaaaaaaaacccaaa

SEQ ID NO: 108842 - DNA, 584 bp, Homo sapiens
ctactttaaaatgaaagtgacttcattttcaagtgaccttttataaagtccaaacatcaagtgtcgtaaatattctaagtattcagaatgaggtccagtactgtaatattaagttggatatgccagaaactcagaaaagcctatttctctttaaatagccaacttataaaattattcatattgtcttcctggattcccattatgttcctcgtgcaagaaagtgaaagtgttttatacaagccayactgtggggtaatatggccaaactaagagctttcagaaggattcttctcttattctctacttctgcttctgctgctgctgctttttttaaacaaatgagatcagaggcatactgtgattagcaatgcatgtttatgtagtgagacaccagattagaaatgattattatcatgtcacctaacagagtgataataatggtactctgagatggtacagctcagctgttgaggattcctactacaataattattttaaaattaattttgaagagaaaaaggaaagaaagaaagatgattgaaaccattaaagcaatcctgataaataagaaaaaaaaacccaaa

SEQ ID NO: 108843 - DNA, 584 bp, Homo sapiens
ctactttaaaatgaaagtgacttcattttcaagtgaccttttataaagtccaaacatcaagtgtcgtaaatattctaagtattcagaatgaggtccagtactgtaatattaagttggatatgccagaaactcagaaaagcctatttctctttaaatagccaacttataaaattattcatattgtcttcctggattcccattatgttcctcgtgcaagaaagtgaaagtgttttatacaagccacactgtggggtaatatggccaaactaagagctttcagaaggattcttctcttattctctacttctgcttctgctgctgctgctttttttaaacaaatgagatcagaggcataytgtgattagcaatgcatgtttatgtagtgagacaccagattagaaatgattattatcatgtcacctaacagagtgataataatggtactctgagatggtacagctcagctgttgaggattcctactacaataattattttaaaattaattttgaagagaaaaaggaaagaaagaaagatgattgaaaccattaaagcaatcctgataaataagaaaaaaaaacccaaa

SEQ ID NO: 108844 - DNA, 584 bp, Homo sapiens
ctactttaaaatgaaagtgacttcattttcaagtgaccttttataaagtccaaacatcaagtgtcgtaaatattctaagtattcagaatgaggtccagtactgtaatattaagttggatatgccagaaactcagaaaagcctatttctctttaaatagccaacttataaaattattcatattgtcttcctggattcccattatgttcctcgtgcaagaaagtgaaagtgttttatacaagccacactgtggggtaatatggccaaactaagagctttcagaaggattcttctcttattctctacttctgcttctgctgctgctgctttttttaaacaaatgagatcagaggcatactgtgattagcaatgcatgtttatgtagtgagacaccagattagaaatgattattatcatgtcacctaacagagtgataataatgrtactctgagatggtacagctcagctgttgaggattcctactacaataattattttaaaattaattttgaagagaaaaaggaaagaaagaaagatgattgaaaccattaaagcaatcctgataaataagaaaaaaaaacccaaa

SEQ ID NO: 108845 - DNA, 630 bp, Homo sapiens
atggaactatatgtactggtagagaaagatgtccaagatgtccaaaaaaagcaagttggagagcaacaaataatataatcctattttctaaaataaatattttgctggggtaaaaaaaaagaaaagtaaattctgagtcactaccattgaaatgactgtatctcagatgagtacttgagattcagtctgtcatggtggccaccttaagaggaactggaaccaaattacctaagttagactagacaacagctaaggctcttctccttcttatgattctatgataacaaatttggcttgacctttaaggcccttcataatcccagtcaagcccgtcttacagactcatctaacattattcctctaaactccatattccttccacgctrtgcagtttacagtgtcccacccatatcatgccccttcctgcaaccagacttctgattcttatactttccactcttcctcccctttccaatattagattccacccattcttgaaggccctcttccctcaagcccctcctgcttccacagtggcagtacacactccagccttccatctgcatttctcttgcagtgctcctagcaaactaccttgtattctgggtatatggaaacatgtcttatcag

SEQ ID NO: 108846 - DNA, 630 bp, Homo sapiens
atggaactatatgtactggtagagaaagatgtccaagatgtccaaaaaaagcaagttggagagcaacaaataatataatcctattttctaaaataaatattttgctggggtaaaaaaaaagaaaagtaaattctgagtcactaccattgaaatgactgtatctcagatgagtacttgagattcagtctgtcatggtggccaccttaagaggaactggaaccaaattacctaagttagactagacaacagctaaggctcttctccttcttatgattctatgataacaaatttggcttgacctttaaggcccttcataatcccagtcaagcccgtcttacagactcatctaacattattcctctaaactccatattccttccacgctatgcagtttacagtgtcccacccatatcatgccccwtcctgcaaccagacttctgattcttatactttccactcttcctcccctttccaatattagattccacccattcttgaaggccctcttccctcaagcccctcctgcttccacagtggcagtacacactccagccttccatctgcatttctcttgcagtgctcctagcaaactaccttgtattctgggtatatggaaacatgtcttatcag

SEQ ID NO: 108847 - DNA, 630 bp, Homo sapiens
atggaactatatgtactggtagagaaagatgtccaagatgtccaaaaaaagcaagttggagagcaacaaataatataatcctattttctaaaataaatattttgctggggtaaaaaaaaagaaaagtaaattctgagtcactaccattgaaatgactgtatctcagatgagtacttgagattcagtctgtcatggtggccaccttaagaggaactggaaccaaattacctaagttagactagacaacagctaaggctcttctccttcttatgattctatgataacaaatttggcttgacctttaaggcccttcataatcccagtcaagcccgtcttacagactcatctaacattattcctctaaactccatattccttccacgctatgcagtttacagtgtcccacccatatcatgccccttcctgcaaccagacttctgattcttatactttccactcktcctcccctttccaatattagattccacccattcttgaaggccctcttccctcaagcccctcctgcttccacagtggcagtacacactccagccttccatctgcatttctcttgcagtgctcctagcaaactaccttgtattctgggtatatggaaacatgtcttatcag

SEQ ID NO: 108848 - DNA, 630 bp, Homo sapiens
atggaactatatgtactggtagagaaagatgtccaagatgtccaaaaaaagcaagttggagagcaacaaataatataatcctattttctaaaataaatattttgctggggtaaaaaaaaagaaaagtaaattctgagtcactaccattgaaatgactgtatctcagatgagtacttgagattcagtctgtcatggtggccaccttaagaggaactggaaccaaattacctaagttagactagacaacagctaaggctcttctccttcttatgattctatgataacaaatttggcttgacctttaaggcccttcataatcccagtcaagcccgtcttacagactcatctaacattattcctctaaactccatattccttccacgctatgcagtttacagtgtcccacccatatcatgccccttcctgcaaccagacttctgattcttatactttccactcttcctcccctttccaatattagattccacccattcttgaaggccctcttccctcaagcccctcctgcttccacagtggcagtacacactccagccttccatctgcrtttctcttgcagtgctcctagcaaactaccttgtattctgggtatatggaaacatgtcttatcag

SEQ ID NO: 108849 - DNA, 442 bp, Homo sapiens
ggtagaggaaaaatcaataaaattatttaaaaataaagtttaggtttcaaaggcctttaaatcctatactacacattgaaatcacctggcaatctttacaaaccatagatgcttaattctcacctatgttacttggtatggcatgcaaccaaggcatcagtatttttaaaagcttcctaggtcattataatrtgcaagaatgcttggaaaccactatcctaaggaattacagactagaaaatatctggggccattatactacagggttatcagagattttcttagaaatagaaaaatacagagagaggagtcagggcttgggagcattgaaaattccaggctattaatttcattaaaagcgttgcctattataaattcggtgaacactgttaataaaacagagtagatgctatgtactttgaaagggcctaaagtttactaa

SEQ ID NO: 108850 - DNA, 495 bp, Homo sapiens
gaattctgatagactatctttggtcaggggtgggaggtggttggtaactgattgtgaggaggtaccacggagccttctgggtaccaaaattgttctattttttgatctgggtagtagtaacacaggtatatgcatatgtcagaatcttttaatggacactgcagacttgtgtatgttatgaatggctgttatatcttaattcaaaagattatttaaaagtaaacaaaaaccttcacaaatttaaaatttaacacgccaagtgtgtcaggcagagcatatctattyggtgatcacaggtgagaacgttagaagttagacaaaaagctttaaatgaaagcttttatttttcatcagaaaaagtctgcaggactatgaatgtctacagcattaatatgtgatttctctaaccctatgccttccagtacttaaaatacctagttataagaaccaaaaatgaataatcttgaagaaaaaaatcactgagatgataagcag

SEQ ID NO: 108851 - DNA, 592 bp, Homo sapiens
tttacctagacttagagctaaaacattaccaatattaaagatacctgtataattcactatctcattccccagcatttccctagctaatcactatcataaagttggtagttataattctatattgatgaatatgtatatgtatgtatatacacacacatacacatacatacacacatacatacatacacataaatatatatatatatagagagagagagagagagaaattgcttggttttgaattttacaaaaatggtgccatacattatatctccagcatttgctttttttgtttttactgttttacatttrtaagattcatcctcatcattggaaatggtggtaatttattttcactactaggtatttgattttattgacgtggcacagtttattacgcatttttctgccaatggatatttgaattggttccaggttttggtttggtttgtcttggtttttccttagagctaacagtgttgctataaatacttttgtatgatgtctgtctgttgcacacagcatagggatttaagttttgtattttgaactaaaatgtttgtatcctgagtgtgcatatatgcaaatttat

SEQ ID NO: 108852 - DNA, 639 bp, Homo sapiens
tcacgtatatgtggagtctaaaacagtcaaactcacagaaacagagtaaagggttggttatcagaggataggggaggagtaaactggggaaggattggacaaaaggtctaaagtttcagttatacaagacaaaaaatttttgaatatctcctgcacagcaaagggcctatgattaacaatgctgtattgtatactttaaaatttgttaagaagataaatcttaygttaaatgctcttaccacagaaagaaaaaacaaaacaatcaaaagagtgggagaaaactttgggaggtcatggataggattatagcattgattgtgttgacggtttcaaaggtgtattcttatctccgaacacattaagatgtatacgttaaatatctacagctttttgaacatcgatcatctcttaataaatatttttttaaataaataagcaaaataaattttctgtggattttacaataaattactcatttaaatattctgaaaagttaaaactgtctacaaaatgtacaaaaaataaatacaatttcacatttaaaaaaatgaggctcaggagattaccaacgggatagtattcagagtctcgtgagttataaaagggagtatgaattcaatttgttgcattggaaataaa

SEQ ID NO: 108853 - DNA, 524 bp, Homo sapiens
actggaaacaactggcatggagctggttaagctgaatagaacattgagtagggaaaggaactgatcaccttccaccctccccaatacctgggaaaaactctcccagacacartgaaatctgctccagctgtggtggtagtgactggagccagatgccctaccacacttgacccctaggtatatctcacaccgtccactctacaggcagtggagatggtagtagcaagagcatcagtaatcagatctctttagactgtatgggattctgcttctgaagttttcagcagaagtatcatcagtgtgacggctcattatggagcaagtgctattcggtagaatttgtgaaagtcattgagattgaaggaagcacgcatctacatctgaattttgactccagaacagatgtgggaacctgaaggactgtcccctaggctgatggatttaacacagcagggacttaatacctgcttatactagaatacatttcattgacccctgcaattaataatgatttgattggtaat

SEQ ID NO: 108854 - DNA, 524 bp, Homo sapiens
actggaaacaactggcatggagctggttaagctgaatagaacattgagtagggaaaggaactgatcaccttccaccctccccaatacctgggaaaaactctcccagacacaatgaaatctgctccagctgtggtggtagtgactggagccagatgccctaccacacttgacccctaggtatatctcacaccgtccactctacaggcagtggagatggtagtagcaagagcatcagtaaycagatctctttagactgtatgggattctgcttctgaagttttcagcagaagtatcatcagtgtgacggctcattatggagcaagtgctattcggtagaatttgtgaaagtcattgagattgaaggaagcacgcatctacatctgaattttgactccagaacagatgtgggaacctgaaggactgtcccctaggctgatggatttaacacagcagggacttaatacctgcttatactagaatacatttcattgacccctgcaattaataatgatttgattggtaat

SEQ ID NO: 108855 - DNA, 524 bp, Homo sapiens
actggaaacaactggcatggagctggttaagctgaatagaacattgagtagggaaaggaactgatcaccttccaccctccccaatacctgggaaaaactctcccagacacaatgaaatctgctccagctgtggtggtagtgactggagccagatgccctaccacacttgacccctaggtatatctcacaccgtccactctacaggcagtggagatggtagtagcaagagcatcagtaatcagatctctttagactgtatgggattctgcttctgaagttttcagcagaagtatcatcagtgtgacggctcattatggagcaagtgctattcggtagartttgtgaaagtcattgagattgaaggaagcacgcatctacatctgaattttgactccagaacagatgtgggaacctgaaggactgtcccctaggctgatggatttaacacagcagggacttaatacctgcttatactagaatacatttcattgacccctgcaattaataatgatttgattggtaat

SEQ ID NO: 108856 - DNA, 535 bp, Homo sapiens
ggatcagaatctctaataagtttccaattctctagatagatgtagaaccattggtaccacagaacatttgtctctttgtttacatacatttatgtattaatcctgtgagtctctataaaaggtagatgagtgatgattctttgctgaaaataactgaaaatgtaattatgaataactacccgaaatagtaataatgataaatattgagmaaaaacatttttttctggaatggaaaggagtataaattctttataaagaaggaggaaatattaagtgaatcttgagcaggtgatagaatttgggcagaaaagaggatggaatttgaatggtcaggaaaagcactgttggcacaggccacagtttccatgtggaatagagaatatggcaaacttcatggagatatttccacatgggccctcaagttttcttttcaaataaatccacgctgtattgttgtgttaggactagctgctggggaaaatctgtatgactcttcaagagagttataaaatatcagcaaatgtttattcaaata

SEQ ID NO: 108857 - DNA, 661 bp, Homo sapiens
tgatgcaactggttacgaggcaacacagaatagagccaagtctgtgttatttctggtactgtggtgtggcyacgctgtagttttcatagaggattcagtccagcctcattgcagcagacatttctattgctctgaagaggaagtgaatgaagccaaggaatgatctttatttattaaggctgcactaattttggtggcaaagtcagagataggacccacatcacctaattaaaattctctgtttatttttccaaaggagcactgtattagacttttctagagaaaaaataatcatctcatcactctgtaaaaggtaaaatatgactcatttaattagaattataggacaatatttaatcttttcattggaaaatatgagactgaaacaaattcagacatttgactcttttaaaaaattcttctatatatgagcatgaaggttggcagtgttggcttatatttttcacttatatttctgaaccattttctttacatgttgaaaatagctagcctttttgtacaaagcacagtctctaggggttttgttatgcttgattaaaggaacgcgtgtgctcttattgccacaggaaataacttctataatttagaggctgtctgaacccttttgtttcctggggaactgttaatgttttgcctataa

SEQ ID NO: 108858 - DNA, 632 bp, Homo sapiens
aaaatgcaataaaattagaaaccaataacaatatagaattactgtaagttgctacaaattcccatacattattatatattaatatacacttgtataactggaatgaaaaacaaatactaaatgactatttgwttaaagtgaaaattaagaaaaacttgatgttaagttacaatgaaagcacaatatatcaaaatttctagatacaaataagccaggtttttttaataaaaatgatttcactaagcattctattcaaaaagaccaaaaagacacaatagagtgtccaaagaatcacaaaaacccctaaacctggtgctttgaaaaatctcagaacctagacacatccctggagaaattatttaaagaaaaaaaaattaggttgattgaatatcaaaaatacagaatgaagaaatagaaataatcgtagtatgccagcttaaaagcaatgaaagaaaatcctgagcaattctatctttttcagtcatagttatggaaaggaaactcagccaaaacctttatttgaaaacaagaaggaagactgggggaaaaacgtccgtgtaaagagctaactttgttataaattaatgagaatttccaagagcggagacaataatgataggaacaacaacaat

SEQ ID NO: 108859 - DNA, 621 bp, Homo sapiens
aaactttgctccctaatttttgaccaaaggatttggtcttgtcaatcctgagtgtggtttgggaaccaaaggacctgctattgctaaatattctcttaagtagaacacatgattaagttccttcagcttggttaccaataggcaagggagtagcaaggaaccagtgtctttccaactctggattgaccctacccgcttaaggagcacccccagtagctggtgctgaagaaggaaccaaagggcaagggaaaagcctggctaggacaagactgccccaactcatcccatgtctccagctcacttcagtgaagcctgagaagtcccacaccagcagtgcaactggccttcttgrgacagtagtccttaatgggggaagaagtttatcaatgtcacctctttcacctctagagcatttgaaaactgcttactaggtgcttcccttcccttagtcagaagctactcttagcttcaaggggagatttgtcttcatttgctttagaacaaggtagagaaactgactcaatgtgaagcaactgagacaatcagatggctagttttttttcaagtggttttaggtttatcattttatgcatctcacacgtgtgtccattaattatgcaa

SEQ ID NO: 108860 - DNA, 621 bp, Homo sapiens
aaactttgctccctaatttttgaccaaaggatttggtcttgtcaatcctgagtgtggtttgggaaccaaaggacctgctattgctaaatattctcttaagtagaacacatgattaagttccttcagcttggttaccaataggcaagggagtagcaaggaaccagtgtctttccaactctggattgaccctacccgcttaaggagcacccccagtagctggtgctgaagaaggaaccaaagggcaagggaaaagcctggctaggacaagactgccccaactcatcccatgtctccagctcacttcagtgaagcctgagaagtcccacaccagcagtgcaactggccttcttgggacagtagtccttaatgggggaagaagtttatcaatgtcayctctttcacctctagagcatttgaaaactgcttactaggtgcttcccttcccttagtcagaagctactcttagcttcaaggggagatttgtcttcatttgctttagaacaaggtagagaaactgactcaatgtgaagcaactgagacaatcagatggctagttttttttcaagtggttttaggtttatcattttatgcatctcacacgtgtgtccattaattatgcaa

SEQ ID NO: 108861 - DNA, 581 bp, Homo sapiens
ttgtgaggacacagcaaaaaagcagccatctatgacccagaaagcaggcctttaccagacactgaatctgccttcatcttggacttcccagcttccagaactgtcagaaataaatttcttttgtttataagccacccagtttgtggtattttttttacagtagcctggatgaactaagacaggatcttagtagtaaaaggtgatacttcagggaaagtttcactgctggccatggtaaacattggactcaattacacacaagattataaaattatagattatgtatggttatagaatcctaaagttttaagtcttaggactcagcccrtgattaatatctgaagtagttggccagctgctgcatttcagatgatgcttttgtagaatcttgatatcctccagggattctatttttctctattaagtgtcaaatgtaacatttgcttggctctttacagtttacaatatgcttccacaaaaattaactcatttcatcttatcataatcttcattttacagaggtaaaaactgaggctgagaagggttaaagaaaacctacttttacataactggtactggct

SEQ ID NO: 108862 - DNA, 610 bp, Homo sapiens
tttttatcaggggtttgagcatcagtggatttggtattcacagaggtcctagaatcaatcctctgtggataccaagggacatctgtattgcttatacagttgattaattattacagatttgtcttgggttttaaaatggttttcacttacaagttgcacctcattcatatttatttattttgttggagggcaatgctggtaggagaggaagacacttatttttggaattgggatcatacattctataacctattgcagagagagaaattttgtggtgtttttaaccattgtgtattaaaaacaagattgaagggcagcaacaatttcaataatttcatgtaatttccatttattttatttcctaaaggagttgaattatattaaatttgggcagctaccagttttgtaccaycaaacacaatagattatgaaatgaccctttaaatgaagtccctctgtggccttccaatgaccagctacccaccaaccctagtgacatatctgatcatggagacatctagatacccatgatacctatagcactgttgtccaaaatttgtgttctaatatgtcagtacataatgctgtgtgacagaactgcttttatttt

SEQ ID NO: 108863 - DNA, 610 bp, Homo sapiens
tttttatcaggggtttgagcatcagtggatttggtattcacagaggtcctagaatcaatcctctgtggataccaagggacatctgtattgcttatacagttgattaattattacagatttgtcttgggttttaaaatggttttcacttacaagttgcacctcattcatatttatttattttgttggagggcaatgctggtaggagaggaagacacttatttttggaattgggatcatacattctataacctattgcagagagagaaattttgtggtgtttttaaccattgtgtattaaaaacaagattgaagggcagcaacaatttcaataatttcatgtaatttccatttattttatttcctaaaggagttgaattatattaaatttgggcagctaccagttttgtaccaccaaacacaatagattatgaaatgaccctttaaatgaagtccctctgtrgccttccaatgaccagctacccaccaaccctagtgacatatctgatcatggagacatctagatacccatgatacctatagcactgttgtccaaaatttgtgttctaatatgtcagtacataatgctgtgtgacagaactgcttttatttt

SEQ ID NO: 108864 - DNA, 610 bp, Homo sapiens
tttttatcaggggtttgagcatcagtggatttggtattcacagaggtcctagaatcaatcctctgtggataccaagggacatctgtattgcttatacagttgattaattattacagatttgtcttgggttttaaaatggttttcacttacaagttgcacctcattcatatttatttattttgttggagggcaatgctggtaggagaggaagacacttatttttggaattgggatcatacattctataacctattgcagagagagaaattttgtggtgtttttaaccattgtgtattaaaaacaagattgaagggcagcaacaatttcaataatttcatgtaatttccatttattttatttcctaaaggagttgaattatattaaatttgggcagctaccagttttgtaccaccaaacacaatagattatgaaatgaccctttaaatgaagtccctctgtggccttccaatgaccagctayccaccaaccctagtgacatatctgatcatggagacatctagatacccatgatacctatagcactgttgtccaaaatttgtgttctaatatgtcagtacataatgctgtgtgacagaactgcttttatttt

SEQ ID NO: 108865 - DNA, 534 bp, Homo sapiens
gtagaatacttagactagcacctgacatataataagtgcctaaaaatattgtcttgctctactatctgtccctctgtctgcatatacgtatgtgtgtgtaaaattaatgtgttagggacatcctttcttgtcctgaagccaagtcaaatgaagaaaataatggcgctyttcaggattaaatgagatcatccatgttgtgggtgtaggttagtggcagatgaaaaccaccgtgaatactagttaaaagtactactgttaccaccacatcttaccttgaagaaaatgattttgcaatggaaatcctttgtaaagtcttcctatttaacagttgtttatcaagactgcaacatgccaggtgctgcactagacacatcccatttcatctttgcaataactgcccaagataataagtgttaaccacatcttacagatgaggaagcagaagccctggactaagacttgacaaggtcacatagctggtaaatggcagagctgggattaatccatgagtgttccattgtgtaaatgtaaaca

SEQ ID NO: 108866 - DNA, 623 bp, Homo sapiens
ctactcatttgacactttcctcactgtgctgcaagctccacatctgtaaatggagataaaatggtacttaccatttcaggcacgttttcaagaggatgaagtgggttactgaatgtagaatacttagactagcacctgacatataataagtgcctaaaaatattgtcttgctctactatctgtccctctgtctgcatatacgtatgtgtgtgtaaaattaatgtgttagggacatcctttcttgtcctgaagccaagtcaaatgaagaaaataatggcgctcttcaggattaaatgagatcatccatgttgtgggtgtaggttagtggcagatgaaaaccaccgtgaatactagttaaaagtactactgttaccaccasatcttaccttgaagaaaatgattttgcaatggaaatcctttgtaaagtcttcctatttaacagttgtttatcaagactgcaacatgccaggtgctgcactagacacatcccatttcatctttgcaataactgcccaagataataagtgttaaccacatcttacagatgaggaagcagaagccctggactaagacttgacaaggtcacatagctggtaaatggcagagctgggattaatccatga

SEQ ID NO: 108867 - DNA, 395 bp, Homo sapiens
caagcgtacacagcataaattcaaagaatgtgggaggttttagaaagggaggatgaggctctgtccttcggtacacgcagccaactgtaagcacagctgccttagactgatcaaggaccacagcctggtgggaaatggtagatggaaaagagacctgactctgacctggctgggtgaccttgagcaagaaacacacctctctgtccactcagcatcaggaagcatccgagtgtcagtttctccataggtaaaacaaggtggccaggatgagaactasaccatcccatgaggcccatccaacctgacatcccaaggctctgtgactcatggcctctgtggcctcctccctcctgggaggtcagtgtcatttgaaactaccccactctcaagcccca

SEQ ID NO: 108868 - DNA, 482 bp, Homo sapiens
actacttaccactgagtgaatctgaggcccacagaaagaccccagagttttcctaaagcttcttatgcttcccacaaattgtggagtatccccctcccactctccaaagtaccccaactggagaggtaygatacaggcaaaagcctttttcaaactgctggaagatcagaatttgatcatattttataaaagttctctctttttttacagtgtaaaaaatacaatgaatgggaggaaattctggagtcaggtgaaacacttaagttgctatggtccttgctagaaataataagggactgaataaaggctgagaccagaaactgggaaaaaaggcatcagtaggaatgctttatcttctttgtaggggccccttttagctcttagtgacaaaccttccaattgtccacatgtcaaaccaaacaatgtagagatcaaatatcaagaacttcctcctgcaggcatagcctctggaaattttattt

SEQ ID NO: 108869 - DNA, 566 bp, Homo sapiens
tcattttgtatttgtgaagtttcctaattgcagctatctttgaaatttccatattcactacttttaacattagttgtcctctggtcaccaaaaacaacttrgtaataaccaaaagactttacttgtctttttattttctttaggcctgcatggagattctctttgtcaggaaattttcaacatgtttgctgtaggcagccagcagtatttccttaatccaatgttctttcttattttattcacgtaatagatttgtatgatatttctttcttcaaaagaagtcaagattttgcttatagattattcaacaataaattttaaacactctacagtgcacaaacaatagagtagtcatcaagagaaaaaggcattgatgaaaagaataatcgctgctcctgttgttctgtctcaccacttggatcttatctctattacacgttaaattagaattaggcaattagttatttacctcctcagttagagtcatcttcttcaacacagggactatgtggtcattcattcattcattcgttggtcattcatgtatttgtttattcattcaaaag

SEQ ID NO: 108870 - DNA, 564 bp, Homo sapiens
gtttcttattctccaataaatgaaaccaaggctccttggagaatgagctgattctagtactcagataggaattataacgatctgcctgtagtcacagaaattaatgaagatatccccccaaagaaaagacaattatggtgctgtgccaaagggacacaaggcaactgaaagaacttccagttggcaaaacttgaacaacaaaatttaatattggattataatccaaagtataaaataaatatccatgagttcatattggtaaaaataaatgaataaataaatggggaagaataaacaaatctctcatacagaataattctaaatactytatgttgcttattctgcccacatgaatcttgtagacaattctccactccttgagtgtagactgtgcaccgtgacttactttcaaagggctaagtatgaaaaaaagaaacacaacagtaattttaccatggaaaaacttaaacactacatcagccaggtgaccaaagtttgcattaacaataataaaccatgctgatagtatacacgcttgatatgctatgatgaaaatagctattc

SEQ ID NO: 108871 - DNA, 564 bp, Homo sapiens
gtttcttattctccaataaatgaaaccaaggctccttggagaatgagctgattctagtactcagataggaattataacgatctgcctgtagtcacagaaattaatgaagatatccccccaaagaaaagacaattatggtgctgtgccaaagggacacaaggcaactgaaagaacttccagttggcaaaacttgaacaacaaaatttaatattggattataatccaaagtataaaataaatatccatgagttcatattggtaaaaataaatgaataaataaatggggaagaataaacaaatctctcatacagaataattctaaatactctatgttgcttattctgcccacatgaatcttgtagacaattctccactccttgagtgtagactgtgcaccgtgacttacttycaaagggctaagtatgaaaaaaagaaacacaacagtaattttaccatggaaaaacttaaacactacatcagccaggtgaccaaagtttgcattaacaataataaaccatgctgatagtatacacgcttgatatgctatgatgaaaatagctattc

SEQ ID NO: 108872 - DNA, 622 bp, Homo sapiens
tagaagcaataatatcccagtatcaatgagtacacatagcactcagatctttgtttcttattctccaataaatgaaaccaaggctccttggagaatgagctgattctagtactcagataggaattataacgatctgcctgtagtcacagaaattaatgaagatatccccccaaagaaaagacaattatggtgctgtgccaaagggacacaaggcaactgaaagaacttccagttggcaaaacttgaacaacaaaatttaatattggattataatccaaagtataaaataaatatccatgagttcatattggtaaaaataaatgaataaataaatggggaagaataaacaaatctctcatacagaataattctaaatactctatgttgcttattctgcccacatgaatcttgtagacaattctccactccttgagtgtagactgtgcaccgtgacttactttcaaagggctaagtatgaaaaaaagaaacamaacagtaattttaccatggaaaaacttaaacactacatcagccaggtgaccaaagtttgcattaacaataataaaccatgctgatagtatacacgcttgatatgctatgatgaaaatagctattcatgata

SEQ ID NO: 108873 - DNA, 555 bp, Homo sapiens
aaaactgtctttcataaaccctgtccctgatgccaaaaaggttggggactgctggtctaaggtaaatattaaaaaatcttaaaggcagctggagaaaaacattagatcacttacagagggaacctctttaagctaaccttgaacttttcagcagaatcctcacaagcctgaagaaactggggggctatttttggcattatcaaagaaaataaactccaaacaagaatttcatgtttcaccaaattaagatttataagcaaaggagaaataaaatatttttcagataagcaatcactaagagaatttattaccactagaccagcctgacaagggatcttataggagttttaaaaatgaaaatgaaagaacaatacctgctatcacaaaaatagcacctaaacacgtagcccacagaccctttaaatcaactacacggtaaaaactacaaaacaaccrctaacaaatttacgatatgatcaaaacctcacatattcatattaaccttgaatgcaaatggtcctaatgacccatgtaaaaggtacaggattgcaagtt

SEQ ID NO: 108874 - DNA, 623 bp, Homo sapiens
tagagaaaatatattttgcagctagaatgagcatttctgcatctttcaataattttatggtgacagtaatcttacatttctccatgattgtggtgttgcttttaatttactatttttatacaaataaggagttcttaatatggccttttctctcataattcataaatatattcactaaatatatatggagtgccactagataataggcattattcttggtactgggtaaacagcatagaaaaagacaaacaaagctcttcttgtcatagagattccattatagagttgwatgtagtaaacacacaaaaaaaatgttcaaatacttttcattaaagtgatttaaaaaatggtgtgatacaaaagtgaaaagtacagggcagaaggtagacatcagggaagtcttgtttaaggctatgatctttattacccaaatctgcaaatttgcgtctctgctgaagactctgcagaatctccatgtgggaaaagtgacttggttgtgctggatctgtctgcattccagctgccaaaagggccttgatatttccatagtgacaggaaagcctcaaaaaaataaataaataaataaaaataaaaaagcagcagatcggaggagcccccgaaaa

SEQ ID NO: 108875 - DNA, 616 bp, Homo sapiens
aaacagctcaatataggcaatttcatagggttcaacttaatgtatattcaacataagatatagtttggctctgtgtccccacccaaatctcatctcaaattgtaatccccacatgtcaagggagggacctggtggraggtgattggatcatcggggtgttttccccatgttgttctggtgatagtgagtttctcttgagatctgatggtttaaaagtgtgtggcggttcctcccttgcacagtctctttcctgccaccaagtaagacatgccttgccttcaccttgtgccataattgtaagtttcctgaggcctcccagccatgcatgactgtgaatcaattaaacctcttttctttataaatcacccactgtcaggtagtttttttatagcagtgtgaaaacaggataatacaacatatcaaagacagaaaacaaaataaacaaaaagaaatgtacacacaatcattgactaaagagacaaaatagggctgaatatctgggttataataataaatgtaaatgggatatactcttttattaaaaagactctaaaattcaattatgtgccatttccaggtgatacccctaaaacatagttgctcaaaaggtgaaaaa

SEQ ID NO: 108876 - DNA, 616 bp, Homo sapiens
aaacagctcaatataggcaatttcatagggttcaacttaatgtatattcaacataagatatagtttggctctgtgtccccacccaaatctcatctcaaattgtaatccccacatgtcaagggagggacctggtggaaggtgattggatcatcggggtgttttccccatgttgttctggtgatagtgagtttctcttgagatctgatggtttaaaagtgtgtggcggttcctcccttgcacagtctctttcctrccaccaagtaagacatgccttgccttcaccttgtgccataattgtaagtttcctgaggcctcccagccatgcatgactgtgaatcaattaaacctcttttctttataaatcacccactgtcaggtagtttttttatagcagtgtgaaaacaggataatacaacatatcaaagacagaaaacaaaataaacaaaaagaaatgtacacacaatcattgactaaagagacaaaatagggctgaatatctgggttataataataaatgtaaatgggatatactcttttattaaaaagactctaaaattcaattatgtgccatttccaggtgatacccctaaaacatagttgctcaaaaggtgaaaaa

SEQ ID NO: 108877 - DNA, 616 bp, Homo sapiens
aaacagctcaatataggcaatttcatagggttcaacttaatgtatattcaacataagatatagtttggctctgtgtccccacccaaatctcatctcaaattgtaatccccacatgtcaagggagggacctggtggaaggtgattggatcatcggggtgttttccccatgttgttctggtgatagtgagtttctcttgagatctgatggtttaaaagtgtgtggcggttcctcccttgcacagtctctttcctgccaccaagtaagacatgccttgccttcaccttgtgccataattgtaagtttcctgaggcctcccagccatgcatgactgtgaatcaattaaacctcttttctttataaatcacccactstcaggtagtttttttatagcagtgtgaaaacaggataatacaacatatcaaagacagaaaacaaaataaacaaaaagaaatgtacacacaatcattgactaaagagacaaaatagggctgaatatctgggttataataataaatgtaaatgggatatactcttttattaaaaagactctaaaattcaattatgtgccatttccaggtgatacccctaaaacatagttgctcaaaaggtgaaaaa

SEQ ID NO: 108878 - DNA, 619 bp, Homo sapiens
ccgaaatcgaaaacaccaaatgctggcaaggatgtggagcaacaggaactctcatcactgctgctgagaatgcamaatggtgcagccactttggaaaccagtttggtggtttcttatgaaactaaacacactcttttcatgtgatccagctatcatgctctttggtatttacccaaaggagttgaaaacttatgtctacacaaaacctgcacacagatgtttaaagtcgcttatgcatgattgccaacactcggaagcaacccagatgtctttcagtaggtgaagagacaaatgaactgttggctcaatggctcacacctgtaatcccagcgctttgggaggccgaggcaggcggatcacctgaggtcgggggttcgagaccagcccgaccaacatggagaaaccccatctctactgaaaaaacaaaattagctgagtgtgatggcacatgcctgtaatcccagctactcaggaggctgaggcaggagaatcacttgaacccgtgaggtggaggttgcagtgagccaaaattgtgccattgtactacagcctgggcaaccagagtgaaacttcgtctcaaaaaaaaaaaaaaatagcaatgagctgtcaagccgtgaaa

SEQ ID NO: 108879 - DNA, 359 bp, Homo sapiens
aaataatttttgaaagtgcggcgtggtgcccttgcgagagggaaacgccgcccgcgcccagggggaagggggggccccggagtttgaattcctggggctccccccggagcctgtaacgaactcccaacccccggcctgggtaaagggtcgcccgagggtyattttcagggtttttttatgcacttagttatttttttaatatttttaaatattttttgaaaagatgacgtctggggaaatgcggcgcggcggcctgggacgccacctttgtgtctcgcaggcgcggcgcccaaccccgcggcccgttccgcggccccgcaccccagttggtgtcgacccccagtcagagggaccacgga

SEQ ID NO: 108880 - DNA, 579 bp, Homo sapiens
agcattgccatggatgatgtgattttacaaaactgtggcttaaggtcgataacgtttcagacaaaatgcaggacaatttacacacagctctcaacatggtagttgtactccaggtaggttgtgcaataaaatcatgtgttctttkttgttgttgttgttgttgttgttgttgttgttgttgttgtttgagacagagtctcactctgtcgcccaggctggagtgcagtggcacaatctcggctcactgcaacctctgtctccccggttcaagcgattctcttgccccagtcccccgagtagctgggattacaggcgcctgccaccacaccaggctaatttttgtatttttagtagagacaaggtttcaccatgttggccaggctggtctcgaactcctgaccttaggtgatccacccgcttcaggattacagacatgagccactgcaccagggtgttttttttttttaaacgtacatgtaaagtgaagttgattatggctcatgtgcctatgaactagcttttcacctctatgaatattctgacagtacattcaaaagatgtacaggactcaggacaatt

SEQ ID NO: 108881 - DNA, 191 bp, Homo sapiens
agaattcctgccagtgtcagaaataggatgagaacaccaacttttgaaggaaagggagttcacttttgatcagcatctgctatgtgacaaataacttgtcatctcatttattcttcaawaccatcattattgatataggtattgttattcccattctataaacatggtgaactgaggcttagagaagtgaa

SEQ ID NO: 108882 - DNA, 637 bp, Homo sapiens
atttcttctgagccttagtatttaaagacccagagtgaaagcaggtgaactcatttgttttctcattggccaggatggcagaggataataggatcaacttggtccaaggaaagcaacatgcakaaaccagaaaaggaaattagatttcttccctaagaattccagaaaggatgccagaaaaagacaagtttgtgattgaaagaagaaagctcaaataaacacactaagagggagatttggtttcaactctgccactaaatgtttgggtgattaggacaagtaacaagtctctcataacgtgggctttctttttctttttctttttttttttttttttaaaaaaaaaaaggtaagttggaatatcaagcattacagattgatggcctgggacaaattcacatacgagaaataagacttttttttttttctgtccatggtgtttaaaagattttgaattcaaaatcctttagaggaagcgtacattccctgattctaccagcgttccaactacatcatccctcatcccctttacccactcacttacttcagccctgacagcatttgagcttgaaacttctctacctctcattctacttttttttactcactctaaaattccatcagaccgtacacataa

SEQ ID NO: 108883 - DNA, 646 bp, Homo sapiens
caaatagaaacactttttcctccctgaacctatctccttcaccaaaatttcagctgacttttatgttttattgctatgcatgcataccacatagcagtgttctacaaaatgcagtccatctgtcacttgcatcagaatcacctatgttgattttgtagaaagctgaccagtgaattaggtcatctggtattcaggcttaggctcattaaagtttgaaacccactgcctttcagtttaacatcatttccctgtgcactttaagatggtcctgctctacaactgactgtatttcacaattcatttgtacttgcaaagactaatgcttgaccaaaacactgttagctgagacaaaaatgatggagaaaacatacatctctcttcagtttataactctgataactcttcgctaytccttatacctttgctacagaaaggcaggcaggcacatgtttgattcattttctccagtttatttaatgtattattattgttttccaattagtataaagttgggttttgttatttggaactgtagtttgtgagcacctgctttgtctgttaaggacacttccagttttgtattccccttttcatttctgtatacataacaagtcacctattttcaagtgatatttactccaacaga

SEQ ID NO: 108884 - DNA, 555 bp, Homo sapiens
cttatttacaaagtaaagctttaaaaatattttaatactttattgtagtgtatctactttggattagaaagcttacatcatcgattcactctaaggtaggcttgcaggcatctttctttctttttttttttcagaagcaaggtcttgctttgtcacccaggctggagttcagtggcatgatcatagctcactgcagcctcaaactcctcctgggttcaagtgatcctcctttactcagccttccaagtagctgggatcccaggtgtgaaccaccatgcccygcttaggcatacatcttgatacttttagcaagatagttaagaagtaatttataaattacttctaaataggatccttccctatttcattcagcaacctctgcaagccctttcagagaaattgaggcacttctattaaaagtaaccacattattgattgtggcccaagagtgaaatgggcttctggccctcaatacctccttcaaagtattataccttgcaggggcagtcactctcacctccgttcattccttcagcttttaggaataggtaattg

SEQ ID NO: 108885 - DNA, 554 bp, Homo sapiens
taactaatgggtagtaggcttaatacctgggtgataaaataatctttacaataaagccccatgacacaagtttacctacataacaaacctgcacttgtacccctgaactcaaaataaaaagtcataacaaaagtgttggttcatgctttttgttcactttctaacaaggttatttgttttttgtttgttgaattgtttttaagttccttgtagattctggatattaggcctttgttggatgcatagtttgtgagtattttctctcattccataggttgtctgrttattctcttgatcatgtcttttgttctgcagaagttcttcaggttaattaggtctcatttgtctatttttgtttctattgcatatgcttttgaggattgagttaatttttgtatatgatgaaaagtagaaggtccagtttcatccttctgcatatggctagtcagttatcccagcaccaataagcactacttattgaatagggaatcttttccccaatgcttatttttgttgactttgtcaaagattaaatggttgtaggtgtgtggttt

SEQ ID NO: 108886 - DNA, 495 bp, Homo sapiens
ttaaaaaaaacccaatttttttgttgttgatggagacttaggttgattccacaacttggccattgtgaatagtgctgcaataaacatagatacacagatatctgtttgatatgttgatttccttccttttgtgtgtttacccagcattgggattgctggattgcatggtagtgctaatttaagatttttttaaaaggaacctcttattattttccatagtggttgtactaatttacattcccaccaatagtgtacgagagttcctctttctcyacatcttcttcagcatccaatattgcctgtctttttgaaaaaagccattttaactggggtgagatgttatttcaatgtggttttgatttgaatttctctaataatgatgttgagcattttttcatatacttgttggccatttgtatgtcatcttttgagaactgagttttcagatcttttcatttcttaatcatattatttgattttttgctttttagtttg

SEQ ID NO: 108887 - DNA, 613 bp, Homo sapiens
ggggaactgcccacatgatccaatcacctctcactgggctcctccctcaacaggtgggattatggggattataattcaggatgagatgtgagtggaaacacagagccacatcatatcctttcactccttgcccctcccaaatctcacatctttttgacatttcaaaaccaatcatgccttctcaaaagtcccccaaagtcttaactcatttcagcattaactcaaatgtccacagtccaaagcctcatctgagacaaggcaagtcccttccacctatggaaaaagtcaaagacaagttagttccttccaagatacaatttgggtacaggcaacgggtaaatacacccattccaaatgacagaaattggtgaaaataaagaggccacaagccccatgcaaatctgcaatctagttgggcarttattaaatcttaaagctccaaaatgatctcctttgactccatgtctcacacccagggcatgctgatgcaaggggtgagctcccatggccttgggaagctccttcacatgctggcattgagtgcctatagcttttccaggcacatagtgcaagctgaaagtggatttaccattctggggtctgaaggatggtg

SEQ ID NO: 108888 - DNA, 573 bp, Homo sapiens
ggaaacaacctacatgcctattaacataaatggataatgaaaatgttatacatatatatacataatacatatatatataatatatgtattatttggctatataaaagaaaatcctgttacttgtgacaacatggatgaacctggagaacattttgctaagtcaaatgaaccagacacagaaaaataatamtatatgagctcacttgtgtatagaatctaaaaaagttgaacgcatagaagcagagagtaggacaatgcttaccaggggctgggggagtgggatatgttggtcaaagggtacaaactttcagttataagataataagttatggggatgtagcatacagcatggtgactatagttaaaagtactatattgtttattagaaatttgatgagagtagattttaagtgtcctcaccacatacatgtagatgcaaaaaatggtaaccatgatgatgataaatatgttaattaatttgacggtggtaatcagtatacaatggatatatatgtatataaaatcatgtagtacacctcaaacagttattatttatcagttaagaactgatac

SEQ ID NO: 108889 - DNA, 573 bp, Homo sapiens
ggaaacaacctacatgcctattaacataaatggataatgaaaatgttatacatatatatacataatacatatatatataatatatgtattatttggctatataaaagaaaatcctgttacttgtgacaacatggatgaacctggagaacattttgctaagtcaaatgaaccagacacagaaaaataataatatatgagctcacttgtgtatagaatctaaaaaagttgaaygcatagaagcagagagtaggacaatgcttaccaggggctgggggagtgggatatgttggtcaaagggtacaaactttcagttataagataataagttatggggatgtagcatacagcatggtgactatagttaaaagtactatattgtttattagaaatttgatgagagtagattttaagtgtcctcaccacatacatgtagatgcaaaaaatggtaaccatgatgatgataaatatgttaattaatttgacggtggtaatcagtatacaatggatatatatgtatataaaatcatgtagtacacctcaaacagttattatttatcagttaagaactgatac

SEQ ID NO: 108890 - DNA, 573 bp, Homo sapiens
ggaaacaacctacatgcctattaacataaatggataatgaaaatgttatacatatatatacataatacatatatatataatatatgtattatttggctatataaaagaaaatcctgttacttgtgacaacatggatgaacctggagaacattttgctaagtcaaatgaaccagacacagaaaaataataatatatgagctcacttgtgtatagaatctaaaaaagttgaacgcatagaagcagagagtaggacaatgcttaccaggggctgggggagtgggatatgttggtcaaagggtacaaactttcagttataagataataagttatggggatgtagcatacagcatggtgactatagttaaaagtactatattgtttattagaaatttgatgagagtagattttaagtgtcctcaccacatacatgtagatgcaaaaaatggtaaccatgatgatgataaatatgttaattaatttgayggtggtaatcagtatacaatggatatatatgtatataaaatcatgtagtacacctcaaacagttattatttatcagttaagaactgatac

SEQ ID NO: 108891 - DNA, 591 bp, Homo sapiens
ctttaagacaaattcaaaagacatttagatggctttataaatgtaatttcttttagcatgactttaaattttttaaaaaatgtgttgtcttataaattacaggggttcaygtgtaagcattattcaattttatttgtatgaattgccttgatgatgttttccctcagaaaaggattgggttaaggtagacataatctttaattattaggcttataaatttatttcactaaaaagcctacaatgcattaatagtgttattgattttataaaacaagttcactttgcattaacacaaggttctcttgagggatagctggtgagaagtaagtagttgctttgtaggcacaaatgtcagagggtaggaaagcacagtgaaagaatattgggaccaaaatttgataatctagttcctatctctgccatttttattagctatgttacctttcgctagcttctaacatcacagatctctattttgctcatctgtaaaatgatactaccaaaacttgcctggactttgctactgtttaagggagtaattaagtattttgatagtcaattcttataaattcaaggtgatattaccctgca

SEQ ID NO: 108892 - DNA, 608 bp, Homo sapiens
tacaggtgagtacaaatgctcaacaccattgccttgaataagacaaattttaaatgaaatctgagcttcagagctcaccattgagtcagctgagcctcctgcgttttttctatagttcaatttctttttctgtctaaccttacttytctcacacctttacaggtatttttttcacaagagcactgcctagcaaggtccatgaatgcaaatttctgcctcaaagtctgtttcccaaggaatctaacctatagggttgataacaatgttgatcctagaaagcagaatttaaaatgggattttagaaatgcactattcactgggctcctggcaatgaggaccctaattaaaagtagcagatagaatactaatagctgtgacatggcatagaagtgcaattgttaaaacgtacactggtgattaactggtctggaatactagtcaaaatgaatgcatttggtgggcacactatctgaagtatttgagacatatggaaaaataataagtactatggaattggatggggttaaccatgcattgaagaaaaacactgaaaggtttacagtgattaatcaccaatttaaggtgacatgtttggaagtatataaaga

SEQ ID NO: 108893 - DNA, 614 bp, Homo sapiens
gactcaggatagggacatctaagtcaatgtacttgaaaaattcaattcctagtttaccctgagctctctgcacctgaagaattggtccactccttgttagagggtaatggtcccttttgctggaatatgatgcagaacctctcccttaaaagacatcatgtgaatgacctcgggatttgctgccctctctcatcttgaataccaaaacaataagtacagtcacgttacaacagaaattagctggaaaaatactggcattgtgaaaggttaaaagggaatttgcagaagttgctgcagaacctagccacatacatacaccaacaagaggcacaggagtatgtagaattgaattctgatggtaccagataggtgtgtaggaatgggtttgtggcagaaatttggataagggaatgcttgytcatatggaaagtctgtccatgataaaagatttaaaacattgacaaggatcccaggaaatattactaacaagttgctaagataattcttagaagttcagaaaaaatatgacacataatatgggataaagaaattccaaaatttccatagaagacactagagaaaaaaacaaaaagctcaaataagtggctaagtgg

SEQ ID NO: 108894 - DNA, 600 bp, Homo sapiens
agaagcaagagtttgatctttgaagagttataattatatttgaagtttattgttttatattgaaagaattttagattttttgaaatgtgaatattgatgtaattaaactcatcacttgatgctatgccttcatttgtagcatttattaaaaagcattcgatcaattgttgctgcattaaagctatgagaagttcttggcatcattcatattctttttcatgaaatattatggatactgaaatttaagatgcatgatctttattaaacacaaatgacagaataagaaatataatcatcagatgtcatcaaatcactgcaatgcatcaacaatttattagaaattaaacttagtattgggtctaactgaaaacacaattcttgctgacaaacatattgctaatttcaaaacacttaattctcagatgccctaggaaaaascataggcaggggaagtatcactgcaaaagtagcacacagaaagactctggaggggcttggtcacaaatactgtgttgccaatattagaaaaccctaacaatcctaatggaagtttctctctctctctctctctttttttttttttttttaagacagagtctc

SEQ ID NO: 108895 - DNA, 538 bp, Homo sapiens
agattttcttgtagttgtatcttttacttttattttattttattttattttatttttttgagatggagtctcacactgtcgtccaggctggagtgcagtggtgcgattttggctcactgcagctccacctcccgggttcacaccattctcctgcctcagcctcccgagtagctggkactgctggcgcccgccacaacgcccggctatttttttgtattttttgttttgttttgttttgttttaagtagagacagagtttcaccatgttagccaggatgatctcgatcttctgaacttgtggtctgcctgcctcggcctcccaaagtgctgggattacaggtgtgagccaccgcacccagctgtagttatatcttttaaaagtccatgtaactagataaatattttgcactttcaagtttaaattttcaggcaaaataaaattttataaagtcttacacagtttacttagttttactttttattttctcttaaagtcttactgacttttgagaagtggtattttataatgattaaaagt

SEQ ID NO: 108896 - DNA, 594 bp, Homo sapiens
cacaagtaatgctgacagacgagcatcaaaggaatgggtagggaaaggaaggaggaaagatggagaccattgtttcatagtcaagaaagggaaatactaagcaagtttatatgaaaggtctttaactaacttagtaaagaaagttgcttttcataacagaatagagggcagtgttaagtttactgagagcagaagatttttggaaacatttaatggaaaacaaaatacaacattcataagagatgccagatggcagtgaaaamctagatataactaagataaatatgactttgccctagaataagtaagatctaaacttaatttttgaggaggagaaacaattagataacttttctaaagttattgcattcagttgaaggaaacataaagaaatgtgaaggtaagtacaagaaaataataatggcaaagttaaagaacatttaagaacagtaacactaacacagagtcaaaaagactcattacttgtaagctgtatcaaaaaagttactagacaaaaggattgggagcttggtctcactggtatatttgaagtcttacagttaatttttcctacttttcctcttacactatggc

SEQ ID NO: 108897 - DNA, 558 bp, Homo sapiens
aaccaaatgacaagaccattcctcttccaatgattagcygtaaaagaagtatttttactccctcagataaccctgtttcttcaggtgcttaggtcacgtaagctactaaataataaagttaaattactacctcacatatttttcatcatatgctctcttaattagaatagcattcttgaaatagaataagcactaacattagaaaaaaacagacttaaatcaatgcaacagtttaatgctccctaaataaaaacacatctacatgtatcatgggctagagacgttaaaaatttctaggaagaaaagcaatatttgccttataaacactgcaactctttcctctcaacattaaaacccaaacatagaaaccagtaagttagctgcatttacagccccttacaggttttaaatgtcacatctcagtgcctaaaaaagttactccatcgtttcgagataagtttctgagaacaaagaaaactctttaaactactgaactgcattttattctttccttttccgtgtgaccatctgcaaaagcaacagttgtcagttaaacag

SEQ ID NO: 108898 - DNA, 550 bp, Homo sapiens
aaggaaaacattgatagtaaccttgataagtgagaaaataaaacaggatgaaagtcaaagaaaactccaggtagttgatttataaacagaaacacaaacataaatataagatagggagtgatactgtgcaattgtgtagagctttgcagctaatgatttggrgaaaagaagaagagaaagatgaattgcatttaaactgcttatgtatattaaaaatttttgagaggctaatgcttatcagttgttctccatggaaaagagagagaagaaaggaagaaaagagaagagaagaaaaaggagagagagagataaagagagaaatgaaagaaagaaagaaagaaagaaagaaagaaagaaagaaagaaagagaaagaaagaaagaaagaaagaagaaggaaggagagagaaaagaagaggagaaaagaagagaagaggggaggggaggggaggagagcgcagggacggggagaagacaaaagagaggagaggagaggaaaaaagagaacagaagattggcttagaataaagaatattatattttgttgtacac

SEQ ID NO: 108899 - DNA, 610 bp, Homo sapiens
tcagccaaacaatagcccagccagtgacctgtgacatagccttgagaaaaagataaaataaatcattttccttggtatgacagtaggagaaaaacaaataaacaaacaagagaattagtgtacttcgccatgagagttgaagcaaaaatatcattcattaatccaacaaatacttatggagtgcagtactatattataacaaagaattaaaaacataaagtccctgtcttcaaggaactaacattctagtgggaaagaggacaaaaagcaatgaaacaaataaataratgaaagaacgacagatgattattattgccatgaatgaagtaaataaagtatttggataaggaacagcaagggggagggacactttatgtaaggtggtttgggaagggctatctgagatgtgatatttaaactgagatctgaagaatgatagagattcagatttgtgtatagttggggaaagaatgttccaaatataaggagaagcaattgcaaagaccccaaggaaggaaattctcagcagattcccagaactgacagacagccagggcaactggagcagagtgagtaagagggaaagatgagatcagagagggagacagaa

SEQ ID NO: 108900 - DNA, 610 bp, Homo sapiens
tcagccaaacaatagcccagccagtgacctgtgacatagccttgagaaaaagataaaataaatcattttccttggtatgacagtaggagaaaaacaaataaacaaacaagagaattagtgtacttcgccatgagagttgaagcaaaaatatcattcattaatccaacaaatacttatggagtgcagtactatattataacaaagaattaaaaacataaagtccctgtcttcaaggaactaacattctagtgggaaagaggacaaaaagcaatgaaacaaataaatagatgaaagaacgacagatgattattattgccatgaatgaagtaaataaagtatttggataaggaayagcaagggggagggacactttatgtaaggtggtttgggaagggctatctgagatgtgatatttaaactgagatctgaagaatgatagagattcagatttgtgtatagttggggaaagaatgttccaaatataaggagaagcaattgcaaagaccccaaggaaggaaattctcagcagattcccagaactgacagacagccagggcaactggagcagagtgagtaagagggaaagatgagatcagagagggagacagaa

SEQ ID NO: 108901 - DNA, 594 bp, Homo sapiens
  misc_feature (1)...(594): n = A,T,C or G
tttggtgtacaaataattttgtcacccaggtaatcagcatagtatccaataggtagatttttaattctcaccgtcttaccactctccatccccaagtaggcctctgtgtctattgttctcttctctgtacccatatgtactcaatgtttaactcccaaatataagtcagaacatccactatttggttttctgtttntgcattaattcatttaacataatattaggcctctgtgtctagtgtttccttctttgtatctatatgtgctcaatgcttagctcccaaatgtaagtgagaacatgcactatttggttttctgtttctgcattaattaatttaagataatagcctccagctccattcatgtcactgcaaaggacatgatctcattctttgttatggctgcatcatattccatacacactagtattagttgactatcttacttaatccgttcatggctttcagcttttgaaggtattttggcaaacataaatttgatcaatggctctaaaataaaattaatctctgatttcttttyatatgcgattaagaatggagcatctaaatccacaaagtaaagtaagttattagga

SEQ ID NO: 108902 - DNA, 527 bp, Homo sapiens
aacttgggagatttctcatcaggagatgtaccacattcgctgctcatgtcctgtatctgccagtttggccactgatgaaatccatttyatgtagggccattatatggccctgaacttttaaaatgattacatttatcctatataaactaataaaaattaactgattcattccacatttttccaagctgatgtataacattaagatgaaattttgtttctctcatttatcaaataatgaaacaattatatttatagatttataatatatatatttgtatgtatgtatatatatattatttttgagacagtctcactctgttgcccatgctgaagtgcagtggtgcaatcttggcttatcgcaacctccgcttcccaggttcaagcaattctcctgcctcagcctcctgagtagctgggattacaggggtctgccaccatgtctggataatttttgtatttttaggagagatgggatttcaccatgttggccaggctagtcttgaacccctgacatccagtgatccatc

SEQ ID NO: 108903 - DNA, 527 bp, Homo sapiens
aacttgggagatttctcatcaggagatgtaccacattcgctgctcatgtcctgtatctgccagtttggccactgatgaaatccattttatgtagggccattatatggccctgaacttttaaaatgattacatttatcctatataaactaataaaaattaactgattcattccacatttttccaagctgatgtataacattaagatgaaattttgtttctctcatttatcawataatgaaacaattatatttatagatttataatatatatatttgtatgtatgtatatatatattatttttgagacagtctcactctgttgcccatgctgaagtgcagtggtgcaatcttggcttatcgcaacctccgcttcccaggttcaagcaattctcctgcctcagcctcctgagtagctgggattacaggggtctgccaccatgtctggataatttttgtatttttaggagagatgggatttcaccatgttggccaggctagtcttgaacccctgacatccagtgatccatc

SEQ ID NO: 108904 - DNA, 615 bp, Homo sapiens
gcaggtttattacttgggtatattgtctgatgctgaggtttggggtacaaattatctagtgacccaagtagtaagcatagtacccagtagttagtttgtaaacccttgcctcctccctctcccctctagtaatccccagtgtctactgttgtcatctttatgtccatgcgtactcagtgtttagctgtcacttataagtgaacatgcagtgtttagctttctgttcctgttaattcacttaggatgatggcctccagctgcatctatgttgctccaaaggacaygatcgcattctttttttatggctgcatagtaggaatctgtatttttaacaagatctcttggtgatgcttacacaaggctaaggtgggatgccattccctaacatatcaggaaaagttacatacaactcgtaaggaatagaaaatttccaaaaattaaaaacatcaccattgcatgatccatgtgtctgccacaccataaggtctgaaatggttaaaatttactggcgtttcattctatctctgtctctaacacacacacttgtcctttaaagtaaatttcccacttaatcttttctgtactgatctgttaaatatttgaactcagttgttg

SEQ ID NO: 108905 - DNA, 601 bp, Homo sapiens
aactcctggcctattttaacatttttttttctttccaggggatgttggggaagctactgctacttagctgtgtaggggaaatctgttcttacaagaaatgaggagggggataatccttaaaaatttccccttcaaatccaccctctgggttgtttaaatgagcatctcttgtaaaatggaaaagattaaaaataaagagaaagacaaaaagcaaaaaaaaaaaagggctaaggacatgaatagacaattctcaaagaagatatacaaatgaccaacaaacatgtgaaaaaatgctcaacatcactaatgatcagggaaatgcaaatcaaaaccaccatgtgataccaccttactcctacaagagtggtcataatcaaaaaatccaaaaataatakatgttggtggagatgtggtgaaaagagaacacttttacactgttagtgggaatgtaaactcatacaaccactatggaaaacagtataaagattccttaaagaactaaaagttgctctaacatttgatccagcaagtccactcctgggtatctactcacaggaaaataagtcattatatgaaaaagatacttgcacacatgtgttta

SEQ ID NO: 108906 - DNA, 591 bp, Homo sapiens
gaattccatcttcttgacaaaatgcctaagttcctcactcccttccagcccctcagcccactatgctgattckcatccccctctctccactccagcgactctgcattactacaatttcctctctgccaaagcacctcacctctcaggcattcatcgtttcattcctgccagtggctgccttccacaacccctcttctctggacttactcctatgtatcttttaagaccctccatctgggctgctgaatgggtcccctggattccctggggcacttcctctgctccctccctgggtcatcgtgccaagtgctggctgtggggatgcgcgcctctgtggctcaccaatcctgtgacaggaaggacaagtcactcaacctctctgctcttcaggtttctcatctaaaaccataaggaaaatgatagcatgtgcttttgacagtgggtgaaataatctgtgcacagtgcttagcagagagcctggcacatactaaacagtagtagcttattattaccccagtgtcactgctgccactgttgttagtttctgtgacaggctcccacactgggctgtggaatcccatagggcagtac

SEQ ID NO: 108907 - DNA, 435 bp, Homo sapiens
aatatgctaaataagtgtactctgaagaaatgagatgcatcatatacagacactgaggatgaaggagtgcagggaatgccactctcaaatctgctgctttggtatattgattattaagccaaaggcacttggaaagcagcaactgcatggagaggctttctctgaactcctttaatcagccaaagatagagcccccaaaggaactcagtttcatcaatcccatcccagggagtttcattatacagggaagaaggctgttatcacaggggaggaggctagaaactgacaccacacccagacagacctcgtcatctattctcctaaggggcaattcatctttcccccaaagtcatgactctccggcaagttgcctgaaaccccttccyttccgcactatgaggagggtatataggcttctacagctcactgggtttt

SEQ ID NO: 108908 - DNA, 572 bp, Homo sapiens
agtacagacaagaaaaacaaatatcaaaaagtgggactacatcagactaaaaaatatctacatagaaaagaaagcaatgaaggaaatgaaaaattgacctagagattagaaaaaaaactgtaaattatatatctcagaagtagttaatatcctacatatatatatcaatttgtataattcaacagcaaaaaaaaacaagtaacccaattaaagaatgatcaaagaagctaaatagacattttccaaagacatacaaaatggacgtatgaaaaggtgctcagcattactaatcatcagggaaatgtaaatcaaacccacagtgagctatcccctcacaccagttaggatgactattatcaaaaaggcaagatacaacaagtgttgatgagtatggaaagaaaaactaactcttatatactgttggtagmaatgtgaattttggctgcaccaattcacatttccaccaacagtatacaagagttagtttctcttcacatacagagagagtatacaaaacagacaacaaaagaaaaaattaaaaagtggaactacatcaaacgagatgtagaata

SEQ ID NO: 108909 - DNA, 563 bp, Homo sapiens
ctgtgagggcaaatactgacttcttacatgtgggtactgcagccaacagcatgcaggagacaggtcagcaggacagcctctcacttgcccagagccaatagaacacctgcaaatggaagttgtactaggtgtacaagggttcatgcctgccttgtcttctagtccacaggatttttgtacctggaggggctgccaagcctccatatctaaggtagacctccccaaatatcctccttgagaccattctccaggcccagggggccacactggcagccaagcactgtgacatggggagctgactcagtgggtaccatgcactttcctgtaaaaggcccagatagactcgggaccactcaggcagggaactctaaggccctctgatcttggaatgtggtcgtctaggctccggggcagcacacagcttyggtccagagtcaaagccagagtcctggctttgaggcggcaacatgtccgggccatgttcatgcttaatattccttctgtgggtgctcttagtggaagaaacatctatcatgtagttgaacttgttctctgatgaagag

SEQ ID NO: 108910 - DNA, 648 bp, Homo sapiens
tatgtgataaaactaaaatatcaaggaaagataaacccaaaatgtaggaagggggtaaggaaagtaattgggaagaactatggataggctcccaaaaactctgctaaggctatgcttctgaaactagacatttgaaccaytggttttcatcttattattattccataaatggcattagtaggttttacataaattttcatgtctatttcataaaaaataatttaaaataaaatagaagataaaaaagaatttcagagggatttcccccacccctcggatgaaagcagaactcctcagcatggtccccgggacttctgacgacccccttccttgtcatcctcccatgggactgtccatcttggagcattctactctctgcatcagttcccttaggaaagccactccttctcatatacatttggtgaactctcactagacttggggatcactccaagatggagccactgcagcagttgccaaccctgcctggtgctctgcaggagcaggtatctgtgcttactgtggccagagccctgagctcccctcatgcagcctctccccgcccctgccctgcctgggagctgagacctcagagtttcaggactccatctcattcatttctagaagtaaagttgtcactaggaagtc

SEQ ID NO: 108911 - DNA, 648 bp, Homo sapiens
tatgtgataaaactaaaatatcaaggaaagataaacccaaaatgtaggaagggggtaaggaaagtaattgggaagaactatggataggctcccaaaaactctgctaaggctatgcttctgaaactagacatttgaaccattrgttttcatcttattattattccataaatggcattagtaggttttacataaattttcatgtctatttcataaaaaataatttaaaataaaatagaagataaaaaagaatttcagagggatttcccccacccctcggatgaaagcagaactcctcagcatggtccccgggacttctgacgacccccttccttgtcatcctcccatgggactgtccatcttggagcattctactctctgcatcagttcccttaggaaagccactccttctcatatacatttggtgaactctcactagacttggggatcactccaagatggagccactgcagcagttgccaaccctgcctggtgctctgcaggagcaggtatctgtgcttactgtggccagagccctgagctcccctcatgcagcctctccccgcccctgccctgcctgggagctgagacctcagagtttcaggactccatctcattcatttctagaagtaaagttgtcactaggaagtc

SEQ ID NO: 108912 - DNA, 395 bp, Homo sapiens
gcacaatgctgtcatctagcaactgggagccactactctaggggcctctaggggtctctgacatcagcttttgcccttaacttccccctggctacgtttgagacagatgatcttgtggtgtaagaaacctccaaggctgagtccctgccaggtgattcagggccatggagaaagcactaccctgcttagtagaaattccttccccagaatcctcgttggcttgccctcaggattttttactttgtttactatgttttactcaaaggtgatatcacccaaaaggtggggaaggcattacacattctctccccacaccatttggaaatcccctaacaagcattactaaagcccagccctgcttasctggtgaaatctcactaatctcttgcccaggg

SEQ ID NO: 108913 - DNA, 529 bp, Homo sapiens
gtgtattaaaaataagttttgaactttcctagaaaatttttatggtggtctaccrttgacatttttttgtgtgtgtctacacaattcaatattactcagcaataaaacgaaagccactactgatacacacatgaatgtgggtgggtctctaaaacaaggctgagggaaagaagccgtgaagtcttttctacatgtatgcattggttgggtcgttggttggttggttggttggttggttctgacaggaagcatgttgttctggatccaagacagacctgatgattcacagagcatcttgtgtcagttccccatgcagcccctccccatgggacgatgcaagaagagcagtgggcacctacacatgtgatttggtttgtgccacaagaaggagctccaaatcataaatcttgcagcttatgtgggtggctggtacagctgcctggctccccctctggaggaaagagagaaacctggtttttttgtttttttttttttttgacataaacagatcctctcaggtgggaaggag

SEQ ID NO: 108914 - DNA, 531 bp, Homo sapiens
tttgggaatttgggggggaagagtaggaggggagtgaggaataaaagactacaaatatggtgcagtgtatactgctcacatgatgggtgcaccaaaatctcacaagtcaccactaaataacttactcatataaccaaataccacctgtaccccagtaacttatggaaaattttttaaattataaattaaaattagaaatcataaaatttatctttataaataaaaattatataaattaaattaatataaatcataacatgattgttataaagaaataaatttttctataaaataaaattattctaaaatagtctatttaaaaacaagtaaatagaaagagaaatggagattcagagggaagagaagtgaagaagcatttttatgtctatctacgcatttgatcytcctggcaagagtgctgttcctattttaactatgaaaaaattcagtaaaattcagctacttatccaatgtcacagagaaaattccagttgatataaatatttggatgtttattctgtactatttggt

SEQ ID NO: 108915 - DNA, 635 bp, Homo sapiens
acagcatggcaaaagtagagcaggtcttctggccccagacccagggtcctcctactaacttgaatgccctcactttgcccctgtcccagaacccccaatctcagggccaagcaggtcctcacctcattctcatagaccagcagctgggcctggcagaggagcagatatcggtctttccagaaacccaggaggcccccactgctcttcttgatccagccagccttgtccaccatctgtgctccccgaggcttctcaccggcttccttcacaccctgtaacacagcaccagttcataccatgagggttgctaccatggggtcacaggtcacaggttcataggtcacacaagggatgtgtccctaggctaagtacctaatgacatcataatatgtgagcttccccacaacccccaaggcagatattcctaacccaggatcagagctaataacaacaataatagcagcagccactttactctgagccactgtataacatttgatacacatagtgtcatttcactcttacaactcccctccaagatggyagcctcattatccacatgtcatagcaaactaaagctcagaatggaggatgactcgacagagtggcaaaccactgctagaggacagagccag

SEQ ID NO: 108916 - DNA, 591 bp, Homo sapiens
tcatcaagttgcaagagggcctagtgattctgtccaggatgactctctaatcacccccgaaggccgggttgttggggatgtctgagggtccggtgatgcagttatcttctgcatcctcacctgggactcctctctctgactccatcctccacacatggctgaggcatcccactcacccagccccttccccttccgcaggggctgatcacagcttttcccagtctcatatgcatctgtcctgctatataaaatgtctttctcgtgagactacctgggcaccggaaagtcctctccttagcaatcccttctcatggtgaagatgctctctggaaggcccccagaggaagacaagtgagttccacatggtgggkgagctccagacattcctgacccgcatgccagatcacaatagtggattattttatgaggtgtgcaagaaacctcacggctctctattttcttgacatctaatttaacttaactttgagcctgtatcccgaggggtgtagggaaaccctatctcagtcagacaggaggctcctcaatccccagggtcaaatgagagtggggcttataggagccgctctcatc

SEQ ID NO: 108917 - DNA, 580 bp, Homo sapiens
cagtcaccaaaactgacagccccttcagacagtcacaagtctgggcctctggaacttctgaccgactggcttcaagttggggttcccaagacccccctcttttggtttgattaatttcctaaagtgagttacagaactcagggaaacacatttatcactttattagaaaaggatacgtgggggaaggggtgtggagcttccctctgtgggaaagccttcctccactaatatccacttgctcagctacccagaagctcttagaacctctgctttggggccttttatggagaattcattatgtaagcatgattgattaaccattggtcatcaatttaactttcagctccctcccctcccctgaggtcatagggtggggctgaaagtcccaaccctctawtcctgccctggtctttctggtgaccagccccatcctgaagctgcctaggggctgccggccatcaggcaatcatcagcatacaaaaagacacttatcactttggagattccaaggattttaggagttgtatgccaggaaatggggatgaagaccaaatgtatatttcacattcttacaggctgt

SEQ ID NO: 108918 - DNA, 548 bp, Homo sapiens
gcatacaagttaacatttaaaaaattaaaattctacatctacaaagcacaatasttgaattgaaaattttacccgataggcttaacagcagtttagataggacagaagaaagattagtgggttttgggatagggtaatagaaattaaaacagagaaagaaaaatcactaaaaacaaaaaacatatgttcaatgtcatgtggtataacatacatgtgattggagtgccagaaaaagaggagagaaaaattggggtagaaaaagatatttgaaaagataatgcctgaaaaattttaaatttactgaaaaaaatattaacctagagatctaagaagtaggataaacacaaagcaaactgtattattttagattgattcaaaagcaaaaacagaaaatttaaaaagtagtgaagtaaaaagaacacattgatgtaggataataacaataaaaataacggctaaactttcatcattataaatgcagtccaaaaaaattgaatgatgcctttaaaatgctgtaagaggaaaatagttattaacatagaattcta

SEQ ID NO: 108919 - DNA, 548 bp, Homo sapiens
gcatacaagttaacatttaaaaaattaaaattctacatctacaaagcacaatagttgaattgaaaattttacccgataggcttaacagcagtttagataggacagaagaaakattagtgggttttgggatagggtaatagaaattaaaacagagaaagaaaaatcactaaaaacaaaaaacatatgttcaatgtcatgtggtataacatacatgtgattggagtgccagaaaaagaggagagaaaaattggggtagaaaaagatatttgaaaagataatgcctgaaaaattttaaatttactgaaaaaaatattaacctagagatctaagaagtaggataaacacaaagcaaactgtattattttagattgattcaaaagcaaaaacagaaaatttaaaaagtagtgaagtaaaaagaacacattgatgtaggataataacaataaaaataacggctaaactttcatcattataaatgcagtccaaaaaaattgaatgatgcctttaaaatgctgtaagaggaaaatagttattaacatagaattcta

SEQ ID NO: 108920 - DNA, 548 bp, Homo sapiens
gcatacaagttaacatttaaaaaattaaaattctacatctacaaagcacaatagttgaattgaaaattttacccgataggcttaacagcagtttagataggacagaagaaagattagtgggttttgggatagggtaatagaaattaaaacagagaaagaaaaatcactaaaaacaaaaaacrtatgttcaatgtcatgtggtataacatacatgtgattggagtgccagaaaaagaggagagaaaaattggggtagaaaaagatatttgaaaagataatgcctgaaaaattttaaatttactgaaaaaaatattaacctagagatctaagaagtaggataaacacaaagcaaactgtattattttagattgattcaaaagcaaaaacagaaaatttaaaaagtagtgaagtaaaaagaacacattgatgtaggataataacaataaaaataacggctaaactttcatcattataaatgcagtccaaaaaaattgaatgatgcctttaaaatgctgtaagaggaaaatagttattaacatagaattcta

SEQ ID NO: 108921 - DNA, 514 bp, Homo sapiens
gttaaaattcagcatattaaaattgtgtaatgaactaatatagtgtatacagaaaaaatattttaaacgattaagcataaaaatgtttaaaatcaataatcttattttaagattctagaagagcaaattagcaaaataaattgaagagagaggcaatcaacacaagaggagaaatctccaatgtctctatcgtctcatccccggggaatcacgccttcccagtgcctacttggtctcacccttggtgcatcatgcctctccagtgcctggactgactaatctctagggattcctgcctccccagtgccttcacagcctcatctctagggaatcctgcctccccagtgcctgcgcggtctcatacctagaggtttgtgcatcctcagtgtctatattctgtgttctgtagtggttcatgcatcctcagcatgtgygtggtctctcctctagtggttcatgcatcccagtggctgcatgagcccccagggtctccatgttctctctgggtctggag

SEQ ID NO: 108922 - DNA, 558 bp, Homo sapiens
tttgctgcctactgggattcactgtgttggaaaaatctcagaacccaaggatgtcggagttggaagggaactgaggactcatctaacccctccccttcattcttcattgaggactttcagatgcagaggggtttatgcctcttgcttgagggtcactttgttatttacatataatraaaatgaacatgcctctagtttctagttaattaagatccagctttgaatgctactcaattaggtatttcccctggtgtatgtggatctgtagtctgaaaaagcaacaatcaatggtgtccactttttaacacaaatcaggactaaatgagttttaaaatgatgagttggttaaaaatacgttcagtgggaatagttgtgttcatcagtcttccgttaatggtttggaacctaaagtgatttttaaatcatttatttctttcccaaaggttttatgcccacctttaagtaaacagcagaatttaatcagcagagttagatgagcaatttctctcttgagagcttgcgcagtattgaaactcattgggtttcacagttacaaaa

SEQ ID NO: 108923 - DNA, 558 bp, Homo sapiens
tttgctgcctactgggattcactgtgttggaaaaatctcagaacccaaggatgtcggagttggaagggaactgaggactcatctaacccctccccttcattcttcattgaggactttcagatgcagaggggtttatgcctcttgcttgagggtcactttgttatttacatataatgaaaatgaacatgcctctagtttctagttaattaagatccagctttgaatgctactcaattaggtatttcccctggtgtatgtggatctgtagtctgaaaaagcaacaatcaatggtgtccactttttaacacaaatcaggactaaatgagttttaaaatgatgagttggttaaaaatacgttcagtgggaatagttgtgttcatcagtcttccgttaatggtttggaacctaaagtgatttttaaatcatttatttctttcccaaaggttttatgcccacctttaagtaaacagcagaatttaatcagcagagttagatgagcaatttctctcttgagagcttgcrcagtattgaaactcattgggtttcacagttacaaaa

SEQ ID NO: 108924 - DNA, 576 bp, Homo sapiens
tttctcatgtaagttattgagaagacatttaaactgaaggggaaattcttgttatattctaccatacttaaatttttccactactaaaccgtaacattgaactttataatatcaatttatggaaatatttcaagtttgtagttttgctgtgtgacttacattacttacctattctgtcagcagagggttggtgatatctcacttctytaggaatgttatttactgctggaactgactctgttttatatatgtttttaattaaacattttatttaaaaagtcaacatctctgaaaatatcagtgcttttagaataacatgcaacactgttgtctcaggagtttaggtagttttatatctgtgtttatgccaattaacatggcagttattagagggaaaacaatgggaggtaaaaagttctcagtttgcaggaagaacacttattggaagaaattaagatataaatcatttatttaaatttattcaacaccaaaaatatgtattagtattctcactaacccctggttcatgaatccttgttttaaacatttatgttaagtaaactgcactttttagct

SEQ ID NO: 108925 - DNA, 508 bp, Homo sapiens
ccactcttactacttattttcatcctcatggtagaaaccctagccagagcaacaaggcaagaaaaagatataaaaggcatccaactaggaaagaaagaagtaaaattttctctgtttgcagattaaatacttttwtttgcagaaaatcctaaaaacttcatgaaaactatagtatgttaataaacgaattcagtaaatttgcagatacaaagtcatcatacaataatcagttgtaattttatgtactaagaataaacattccaggatgaattatgaaaataattcatttatgatagcatcaacaataataatgtacttagaaataaacataatcaaggaggtgaaatctatataatatgaaagaaataagtttgaaagatacaagtaaatagaaagacctcttgtgttcccatatcaaaggcttaatattgtttaaatatccatgctgtctaaagtaatctataataaggaaacaatgaacagaatggagaagtaacctacagaaggg

SEQ ID NO: 108926 - DNA, 508 bp, Homo sapiens
ccactcttactacttattttcatcctcatggtagaaaccctagccagagcaacaaggcaagaaaaagatataaaaggcatccaactaggaaagaaagaagtaaaattttctctgtttgcagattaaatacttttttttgcagaaaatcctaaaaacttcatgaaaactatagtatgttaataaacgaattcagtaaatttgcagatacaaagtcatcatacaataatcagttgtaattttatgtactaagaataaacattccaggatgaattatgaaaataattcatttatgatagcatmaacaataataatgtacttagaaataaacataatcaaggaggtgaaatctatataatatgaaagaaataagtttgaaagatacaagtaaatagaaagacctcttgtgttcccatatcaaaggcttaatattgtttaaatatccatgctgtctaaagtaatctataataaggaaacaatgaacagaatggagaagtaacctacagaaggg

SEQ ID NO: 108927 - DNA, 508 bp, Homo sapiens
ccactcttactacttattttcatcctcatggtagaaaccctagccagagcaacaaggcaagaaaaagatataaaaggcatccaactaggaaagaaagaagtaaaattttctctgtttgcagattaaatacttttttttgcagaaaatcctaaaaacttcatgaaaactatagtatgttaataaacgaattcagtaaatttgcagatacaaagtcatcatacaataatcagttgtaattttatgtactaagaataaacattccaggatgaattatgaaaataattcatttatgatagcatcaacaataataatgtacttagaaataaacataatcaaggaggtgaaatctatataatatgaaagaaataagtttgaaagatacragtaaatagaaagacctcttgtgttcccatatcaaaggcttaatattgtttaaatatccatgctgtctaaagtaatctataataaggaaacaatgaacagaatggagaagtaacctacagaaggg

SEQ ID NO: 108928 - DNA, 553 bp, Homo sapiens
taagcagtaaacaaacaaagtagccgggcacggtggctcaagcctgtaatcccagcattttgggaggccaaggcgggtggatcacctgagtttgggaattcgagaccagcctgacaaacatggagaaaccccatctctactaaaaatacaaaattagccaggtgtggtgtcacatgcctgtaattccagctactagggaggctgaggcaggagaatcgcttgaacctgggaggcggaggttgcrgtgagctgatatcacaccattgaactctagcctgggcaacaagagtgaaactccatctcaaaaataaaataaaataaaataaaataaaataaaataaaataaaataaaataaaataacaagtaacaaaaaacaagtaagatggtagagttaggagttgacacatcaataattgcctgatgtaaacgctgaaaatataccaatagaaaaatagattgtcatagtctctaaaaattatgatgcaagtatatgctgtgtatatgaaactcacttcagatttaacatatgtagtttgaaagtaaaagaatgga

SEQ ID NO: 108929 - DNA, 553 bp, Homo sapiens
taagcagtaaacaaacaaagtagccgggcacggtggctcaagcctgtaatcccagcattttgggaggccaaggcgggtggatcacctgagtttgggaattcgagaccagcctgacaaacatggagaaaccccatctctactaaaaatacaaaattagccaggtgtggtgtcacatgcctgtaattccagctactagggaggctgaggcaggagaatcgcttgaacctgggaggcggaggttgcagtgagctgmtatcacaccattgaactctagcctgggcaacaagagtgaaactccatctcaaaaataaaataaaataaaataaaataaaataaaataaaataaaataaaataaaataacaagtaacaaaaaacaagtaagatggtagagttaggagttgacacatcaataattgcctgatgtaaacgctgaaaatataccaatagaaaaatagattgtcatagtctctaaaaattatgatgcaagtatatgctgtgtatatgaaactcacttcagatttaacatatgtagtttgaaagtaaaagaatgga

SEQ ID NO: 108930 - DNA, 607 bp, Homo sapiens
atttattttcctaaataaatgtataaatgcgacttttgttcaatgtcagatcaacagaacccccaatcagagctttgtaattgttcagcataacatttatacctaagataaatctgaataattaattacaggctatttcagcctgacagtattgtatgtaactagatgtcccccctgtatgcctaggagaatcattcagcattgttaaatacaatattcctgcttcctaaagtagagcactctaaagagtagcatatgttataagtagctgaatcataaatcaatggtatgcctcagaccacctgtatctttgacttttgattgaagggttttatttgaaaccaatgcttgtttcccttgtccacagtatcttcatatatgtggcatagctctcctaattataaataattttaatggtgttttagttttagctctagatgatgactgcctcttttttaaaataaattgcatatactatgcaacttccatgtcgtcattttccattaatttatcaaacccatattattgggcacccaaattattctagatagaaatgttgtgctgraaaagataagcataattgttgcttatcttgtcataaatagtt

SEQ ID NO: 108931 - DNA, 607 bp, Homo sapiens
aattcctctcatgtctcttggaccccagccataattactaatttgtttatgatattctgatgcaagaaactttcttccttaaccccgtgttatatgttgttacagcagcaattgctggacatatactgggctttcctgaatacagaggctctgatatcctgagcctatgattccctgtactgaattgctcatttgcttttgttggagamacagcatcccacaaggagtacaggtggccacccaggcctttttgctgtaacagaaattgtagctacagaacacctatagcactcctggcatttcccacctgaaggaggtaatggtccccccaaactcagtcctttgccagatgccatgatgccagaaatactggaaacagagcaattctaccttgaataggggctggggaaaatgaggctgagacctgctgggctgcattcccaggaggttaaaacattcttagtcacaggatgagatgggaggtctgcacaagatgcaggttacagagaccttgctgataaaacaggatgtggtaaagaagccagccaaaacccacaaaaaccaagatggcaacacacgtgacctcagcaaaaccaagatggtgaca

SEQ ID NO: 108932 - DNA, 607 bp, Homo sapiens
aattcctctcatgtctcttggaccccagccataattactaatttgtttatgatattctgatgcaagaaactttcttccttaaccccgtgttatatgttgttacagcagcaattgctggacatatactgggctttcctgaatacagaggctctgatatcctgagcctatgattccctgtactgaattgctcatttgcttttgttggagaaacagcatcccacaaggagtacaggtggccacccaggcctttttgctgtaacagaaattgtagctacagaacacctatagcactyctggcatttcccacctgaaggaggtaatggtccccccaaactcagtcctttgccagatgccatgatgccagaaatactggaaacagagcaattctaccttgaataggggctggggaaaatgaggctgagacctgctgggctgcattcccaggaggttaaaacattcttagtcacaggatgagatgggaggtctgcacaagatgcaggttacagagaccttgctgataaaacaggatgtggtaaagaagccagccaaaacccacaaaaaccaagatggcaacacacgtgacctcagcaaaaccaagatggtgaca

SEQ ID NO: 108933 - DNA, 604 bp, Homo sapiens
ctgaattctgccatacatttaaagaactaatactaactctatttacacttttccaaaaaaaaaaatagaggagggaatacctccaaattcattctacaaggcaagcatgaccctgataccaaaatsagacacatcaaaaaaagaaaaccacaggctgacacttggaatggatattgatccaaaaatcatcaacaaagtaataggaaaccgaattcaacaacacattaaaaagttcattcatcatgaccaagtgaaatttatcctagggatgcaaggatggttcaacatatggaaatcaatgaatgtgacacatcatatcaacagaataaaggataaaaaccatacaaccatttcaattgatgctgaaaaaagcatttgataaaattcaacatacatcatgataaaaatccacaaaaaaactggatatagaagtaacataactaaacataataaaagccatataaaacagacccacaaatagtatcatactgaatgagaaaaaaactgaaagcctttcctcaaagatgtggaacacaacaaggatgcccactgtcaccactgttatttaacataaaactggtagtcctacctggagcaaaaagac

SEQ ID NO: 108934 - DNA, 474 bp, Homo sapiens
cggaattcctccatctgtaactccagttaattttatatacagtacaagaatgcttttatagataaatggatgaaccttaccaaaggtaagttagggttactgtggccacagtggggaagttttaattcagataaagtttttcaattttgaggcacattagaaaagcaaaggttaatttcaaaaggtacagaaaaagcattaaataaaattcaacatcccaaggccatatatgacaaagccacagatagcatcatacttaatgggaaaaagctaaaagccttttctctaagatctggaacaagacaaggatgcccacttccaccacttttattctttatagtactagaaatcctakttacagctattagacaagaataagaaataaagggcatttgtattggagaggaagaagtcaaatagtccttgtttccagattatatactcttttatttagaagaaactaaagaccaccaa

SEQ ID NO: 108935 - DNA, 560 bp, Homo sapiens
ttgggtaaacagagtcttttaaaactcctacttgaaatgcactgtaggaagtaaaggatcattccttgtcaccagatctcaggaagcatgtggccacctgttaggaaggctgagtttttaagccaggcatgtctatattctttattgttgttgttttgtttttgtttttttttcttttcagaaaggaaaggaagggatgggaataggagaagaaagggaaggaacaaaaagtagatgtagttgaacagaaagcctgaggagttgctgatacataaggaggggatgggtatcccacctttggagcctttggagtgctacttcagcaggtcttccaacaggaagtccactgtgattacacatgatggactggtgttgaagtgtttggaagggaggttttatggaagcctgaggggcaaggacatataatgtatcttctaattaccctttatygtgagcccttgatatggtttgactgtgtccccacccaaatctcatcttgaattgtagctctcacaattccctcatgtcatgggagggacctggtcggacgtaattgaatc

SEQ ID NO: 108936 - DNA, 584 bp, Homo sapiens
actgtctgcacctttcatggcttgtttctccgtcaatgaattaagaaagttggattagactattataattttttgttgttgataktgttttaagcaagagtttttcaaatgaaaatttacttgaaatttagatatataatgaaatatattggttttctagtgctgtataacaaatctccccaaaatttagtaccttaaagcaaaggtagtaatttattaatctctcacagttccatgggttgggaaatggagattgacttggctgtgttaccaaactaaacttggctctacttgccctgtgtgcagaaaaagccaaacactaatattaagatctgcagcaagagaaattattgcatttattgtagggtgccaagcaaggagaatcaggcagctaatgcttaagacctgaactctctgatggcttacaagcaagggttttgaaaggcaggggtatattttaagaaagcagaagttacaagtaaaatcataggtgaatacatggaagttacatattggtttggcccaaaaaggtaggatatcttgaagtgggagcttacaagtcataggtgaattcagagattctt

SEQ ID NO: 108937 - DNA, 507 bp, Homo sapiens
gccaaatctcagaaatcaccaccaaagaacttatacatgtaaccaaacacgacctgttccccaaaaaacaactgaaatataaaaatatttttaaaatagaaatataatgttttcattactgagataaagttggtaatttttttcttttttcaaaaatcagattgatataattttaaaacaataattatttttcctttttgtaatacaatatttgtttaatttttttaattttttggcataattatacatatataatacaataatagaaacattctcagtctgcatttcttttcttatcttcattatgattagtttcattccatgattattactgaaaatttttttgcagtatagaggaggacagggtgttataaaaccagtaaaaagacacycaaatggtttcaaacagctagaattggccttgaacagtgtaatctgaagcactgagctttaaaattgttccttgaaggttggcgcacagaaattgtgacactattgggcacatgt

SEQ ID NO: 108938 - DNA, 608 bp, Homo sapiens
cccaaatggtttcaaacagctagaattggccttgaacagtgtaatctgaagcactgagctttaaaattgttccttgaaggttggcgcacagaaattgtgacactattgggcacatgtcagcatgtatcagctctagaactaccacggacagaaagagaaaagtgggtgaccaaaggatccataaatgattgaatgaaccatttacagtttcactgcacyagccatgtgcacttagacatgcatagcttaatctttctgacaagcccatttctttcatttacatttccctgactacaggaaagctgagcatcttttcatgtttttggacatctgactacctggtagaattcattcaatcctctctgggatggtgacacccagcctgcttggatcaggaatctctttgaaaatatgatgaagcctatggatttgtttctgagcaaacggcctacattttcattggtacagaccctcgcacccaagttcaggggactcagaaaccaccccttcctcattctacagatacagaaactcaggcctatgatcttggactaaaatagagcaagccccacaccgtttgagacttgtttttctcatttgcagaaaag

SEQ ID NO: 108939 - DNA, 617 bp, Homo sapiens
ttttttttaataaagcatttttttttaagtagagtactgagtttgtagtttaagtttggaaaagctgcccaatgagtatcctgtattgaataactaaaaccagaaaacctttctcaaaatggtgatggttttcagtaaacatctttaggtttactataacacattgcttatctctaagacaaacttttttttcattgtaaactgtttatgaaatgaacaaggcagaaattaggatacaacccatactctctgactgtcaaaactatcaggtgtttatcctactaactactctattttctgatagttaacttttatygaacatttattacatgccacgtgcataagcattacgcttttttcattgggtactttatataaacttttcaacctctgaggctaacgcagttaactaactcattcaaagtcacccactggtaaaaggtagagcgacagacaccagagccttacttaactgtgtcttgatatctacccactgggagctcataagctagtgaggaagttacacaaataaaccagccatcccagtacaatattataaatccaaggagcacagaaccggatacaggcaattctgccagggaaaatcccaggaggtt

SEQ ID NO: 108940 - DNA, 474 bp, Homo sapiens
tatacttgtgacataggtatataccaaaagcagtacctcacacagtaactgcctctctcttttccaaaycttcaatgctgttaaatcagtgatggaaaatgctgctatttcctcagaagggtcaccattcattgtcttcatttgtgcattggtatatgtgcccttccagttcaatgctacaacccatcagatcacctccttttctgtcccatttggcagccagtctcaggactgctgctgtttttccatctgtcaaactcaatctaccttcaacatacaggcagggcctggagactggactgagtaaagaacaataaagtcaggctggtttcaccctgaattttatctactttgaggggaaaaaggaattctaataacatggaaaattccctttgcaggagtctgcctagaactgggcttccagccttgggagacagcaaccccattcagtgaacagcttttgcagagtctgcc

SEQ ID NO: 108941 - DNA, 474 bp, Homo sapiens
tatacttgtgacataggtatataccaaaagcagtacctcacacagtaactgcctctctcttttccaaatcttcaatgctgttaaatcagtgatggaaaatgctgctatttcctcagaagggtcaccattcattgtcttcatttgtgcattggtatatgtgcccttccagttcaatgctacaacccatcagatcacctccttttctgtcccatttggcagccagtctcaggactgctgctgtttttccatctgtcaaactcaatctaccttcaacatayaggcagggcctggagactggactgagtaaagaacaataaagtcaggctggtttcaccctgaattttatctactttgaggggaaaaaggaattctaataacatggaaaattccctttgcaggagtctgcctagaactgggcttccagccttgggagacagcaaccccattcagtgaacagcttttgcagagtctgcc

SEQ ID NO: 108942 - DNA, 479 bp, Homo sapiens
actgcatcctcgacctcccctgactcaagttatcctcccacctcagcctcctgagtaactggaattacaggcatgcaccaccacacccagctaatttttgtatttttggtagagatgggattttccatgttgccccgactggtcttgaactcctgagctcaagcaatctgcccgcctcagcctcccaaagtgctgagattacaggcatgagccactgagcctggcccagagcattttaaataactaggtaattaatcaaatcttaaagacagacaaaagactttytaaagtcccaaatttgacctgctacaaaatgacagtttgcaaaatcatttaatagaaacaaaaagataaaaattttaaaataatcttattgaaagttgcttcaatttttctaacacaaacaataagctattttgtaatatatttaaggctgaatactttctatttgaaaaatgtaactttattagtaaatttta

SEQ ID NO: 108943 - DNA, 348 bp, Homo sapiens
gtagtgctcactgaacaaatgcatccatttcttttctcttgcaagtttcagagtacagtggaaagagcctgagatttggagttagacagatctgggttcatgtctgatttttccaatcattcaacatgtgaatttgcaatttccttattgtcttggaatttttctcctcatatgyaaagaaaaggggccattaattcttacttttaaggctatgaagggggattatgacaaaatgtgttccagataatagcacagtttctgccagaatggatgcttttcctcaaagtttctcaatgtatggtccctagaacacttggatcagaaccacttaaaatgaagacactgggt

SEQ ID NO: 108944 - DNA, 632 bp, Homo sapiens
ggtatcccttcctttctttcaatacatatttcttcagtgtctatttcttgctaggtgcttttgygtttattacctaatctcaaaatatcctcaggaggtaatgaggcaaatataggcacttttctgctaaaacttgtgatttctccttcatactatggagttgttactaggaagtagctgctcacggaggccttgccaaggagtgattatatgaaccataatgatcaaggttgatctaaagtattttccagtgctttagaccaagtttctcctggtctggggtagagataggctccaatgacaaatgttcccagtaacttccccttacctagatgtactccctgtacatctcctgtacttcctgtacttccctgtacctagatgtggaatgagggcatatttgttggtgtacacatcctcccaagacaaagttcccaactccctcctctgtgctaaggtgccaggtcacatttcaattacataacttctagcattttattgtagtcatgtctatcttcaacccattacacagtaaatcccaatggtagagaaattatgcctaattcaattttgaacctctagggcttatcacggcccctgccatataaaaatttgtaaaataaaaaatgaaa

SEQ ID NO: 108945 - DNA, 609 bp, Homo sapiens
ttaatgttttcatgtttgctaacacaacaacctttctgcagttcagagatcaaggggtaattttaagtcttattatttcagaaacacattttataaggcaataactgccagacatagtgattcctctgatggatctgagcaaagtaagttgaaaatcttctagagatgattcactattctcaatgtgattaagaacatttatgattcatcaaatgaggtaaaaatatcaacattaacaggagtttggaagaagttgacttcaacatttatgaatgactttgagaggttcaagacttcagtggaggaagtacttgcacaagtggtagaaataacaagaaaactagaattagaaakggaacctgaagacattgctgaattgctgcaatctcataataaacttgaacagatgagaagttgcttcttatgaatcagcaaaggaagtggtttttgagaggaaatctactcctggggaagatactgtgaatattgttaaaatgacaacaaaggatttaggctatgacataaacttagttgataatgcagcagcagtgtttgagaggactgattccaactttgaaataagttctactgtggttaaaatgctatcaa

SEQ ID NO: 108946 - DNA, 457 bp, Homo sapiens
tggttcagtatataaagaacygaatgggaatctcatttgagacaatcatcataggtcattgagactcacagacacctcatgccagtctccaggtcatcctcagagactgtgagtttccctcaacgttagctacataaatagcagtgcttttgaggttccatgctgtctccaagaatctcttgttcattggaggagaagcaggtccctcacttaagaggctggtatttgattgaggctagaaagtgcatatcagtctgaaattcaaacaaggacacctagaagccctgtaatttgggacaaatctgaagttctctttatttctgcactgtaaaggcctttcctggcggtgcacagatttgttagctctccaaacacctgttcaaaaagcgcattacttatctggcttgaatcagcctgcttgatcaaatcctcttgcttttctggcctaggagtggtc

SEQ ID NO: 108947 - DNA, 457 bp, Homo sapiens
tggttcagtatataaagaaccgaatgggaatctcatttgagacaatcatcataggtcattgagactcacagacacctcatgccagtctccaggtcatcctcagagactgtgagtttccctcaacgttagctacataaatagcagtgcttttgaggttccatgctgtctccaagaatctcttgttcattggaggagaagcaggtccctcacttaagaggctgktatttgattgaggctagaaagtgcatatcagtctgaaattcaaacaaggacacctagaagccctgtaatttgggacaaatctgaagttctctttatttctgcactgtaaaggcctttcctggcggtgcacagatttgttagctctccaaacacctgttcaaaaagcgcattacttatctggcttgaatcagcctgcttgatcaaatcctcttgcttttctggcctaggagtggtc

SEQ ID NO: 108948 - DNA, 625 bp, Homo sapiens
  misc_feature (1)...(625): n = A,T,C or G
ntgtgtcatttcaaagccgggcccatgtgaagtcacaagcatatatgtatcctgcatttaatggaaaacccaagatatatgaaataaatcatttaaatcagtctcattttattcattcccagtaagtcaagtggtatatatattttcaatttagggaaattatttcactcccattaaaatgaatgagcaatggtgtgatgatatgaagccgtaaaatatagagaaaatcccccccctttatttgttgaagtaaacaaaggaatttgaaacaacagtaactaatttcttccttttccccctccccctccccaaaaaaaaaaaaaaaaaaaaaaagagaggcctgtgtccttggatatgtcaggtaaatagtcacccagttcaraaacatcagaattcctcttaaatattctgagtatacctacggggatgtttttagtaagaatttttttttaatctaccatttaagagagtttatcaaaatttaagataactgcattggtatttgtcaggtgcacctagtgaatttgtcattctttagaaaatgactatactggtgattctttagggtatatgattttttttcatccatatgtgttagtaatcctatcatacattcagattttgt

SEQ ID NO: 108949 - DNA, 624 bp, Homo sapiens
gaaagagatttccagtccagacaatatggtgaaaactatctctccctcctcctccccacaagctcaactatagacatgttggagaaaaatgaaagacgacccaaggagagttctgaaatgttcaaagagaaagcaggccaggtaggggccagaactggaggagcagcccagaagtaggatgtcatattatcccatgcaacagtggaaggacatccaagcctaacatttcctgacccgcagcctcaaagagggaagatcagctagtctcataccacatgtgtgtggaaatagagycccaccataccaagcaagttgaggcaaaccagtagaggggactgatcagaagccctgtggcaataagtggtgctctccttccctgtcctgggactcctcctcccactgagtgattccatttaccagagacagcagcaggggcaactgctacaaacaaaatgctcaacctgggaagccacttagtcccctagggcctaagactcccctaccctaggcagggatatcacactgtgggaaacacctgcaaaggtgaccttgagcccatgagcagcctgagaggttctcctcatcattccactttttcaactggcagacgtagcttgacaagca

SEQ ID NO: 108950 - DNA, 524 bp, Homo sapiens
aatatgtgggactttgtgacttgcttctttcacttagcataatgttgtcagagttcatttctatgttgtagcatgtatcagtacctttyccttctcacagctgtataatattccactgtatggaaataccactgtttgtttatccctgtatctgtggatggacatttgtttgttctgttttttggctattacaaattctgttgctattcacatttttccacgtttttgtatgggcatatgtttttatttttcttgggtatatatttgtaacaaaattgctgggtcatatcatcatagggtaacttttattctgttattatgcaacattcatatcaacctgatttggaggaggtgttatgtgtaatctcttaaataaatttaagaattgaaacctgagcaaaactcactggaaacaaacagaaaaatcaagtaatccacccaatatagttttatatttctttctaaaataaagaaaaaagtaataaaatattaaaattgtgcttattgtttttattgttgacctt

SEQ ID NO: 108951 - DNA, 560 bp, Homo sapiens
agtttttaggattttcgaggtatggaatcttattgtctacaaagagagttactttgacttcctattttcctatctggatgccttttatttctttcttttkcctaatttctctggctagaatttcaagtaccatgttgaatagtagcagagaaagtgggcatccttatcttgtttcagttttcaagaagaatcatttcaaattttgcctattcagtatgatgttgactgtgtgtctgccatagatgactcttattattttgaggtatgtgccttcgacgtctggtttgttgagagtttttatcacaaagaaatactgtattttattaaataacttttcttcatttattgagatgatcatatggtttttcttttgaattctgttgtggtgaatcatatttattaatttgcatatattgaaccaaccttgcatccagaaataaagtttactttatcgtagtgaattaattttttaattaacttttaaattaattagttaattagttaactaattagctactgaattcagttagctaataatggttgaggatttttgtgtctat

SEQ ID NO: 108952 - DNA, 418 bp, Homo sapiens
caccaacatctgcgtagttaatgaagccaaaacctctacctcagtcttggttcttctctttccttagatctattctaaatacatcccctgatttatacttctagtcctggctcagtaataattacctcattttactttaaaaggattgtggtttggaactaaattatatgatggctcttkctgtctcctaagtcattgttttcatcaaaccctataagagcaaactacaaaatatagatctaaataatccagtcttccttctccatttgtcactaccatggctcaagcctttgttgtcttgaacttgaagcacttccacctaccattctctctgcatccaatcttgtttccgtcacccattctggaaagtagcatctaaaatggtctttataaaatggaaccacttcccttaaagcat

SEQ ID NO: 108953 - DNA, 623 bp, Homo sapiens
ctgagctgatcctgttatttgggaacacatcatgggcaatgatcatatatgagattcgagagacaattgggctcagcttgagaatagctttacaaattacaccaaggaattacatggtcagttgtgggtagccaatggaggttaatagtcaaggtcatggaatgattagaatttgggtttcagaaaataagacagagtggcatggcatggatttgaaaggagtcagggaaccaataatgaggctacttttgtagccagggaagggagaggcaggttcaaagataaggacaaggccgaatttaagactgatcactgataggataaagaaaagaagggagggacaagtcaatgactatgccaaaaatattagcttgtggatctgacaggaataatgtttcaaaaaggaactcagaaggaggagggaggaaggcaggaaagaagagaggaaaggagaaagaaaagaaaactgkctgcctccaagacagctgaataactctaaaaggaaatgtaaaatcacagtctgaaaagctacacattgcatttggttggtatttttcacatgaccctttttacctctggtttcccttgtcattagttgttgaaaaaagcctaatcatttgttc

SEQ ID NO: 108954 - DNA, 619 bp, Homo sapiens
tttttttttgttgagacagtgtctcattctgtcacccaggctggagcacagtggcgccatctcagctcactgcaacctccgctgcctgggttcaagaaattctcctacctcggctttacaagcaggtggaattcaggtgcccaccaccacgttcagctaagttttgtatttttagtagagacggcatttcaccatgttaacgaggctggtcttgaactcctcacctcaagtgatccgcccgcctcagcctcccaaagtgctgggattacaagcgtgagccaccaaccccggcctcaatgcatgtttaaacatatagtcacccctcagtaacctcaagaattgattccaggttccacacagataccaacatccacatatactcaagtcctttatgtaaaatggtgtagtatctgcatatatcctcccaaatagtataaatcatctctagattacttataatacttaatacaatgtaaatgctatatgaacagtaatcctttattatttgtatttttttgtattatttctttctgaatattttctattcatgattggttgaatccatatcaatcygaaacccattgatatggagagccaactgtatatatatccatgtaac

SEQ ID NO: 108955 - DNA, 528 bp, Homo sapiens
acttggtttttttccattagtatatctaactaaggtaattaaggtaaggtaattaagctgaatgtttttaaaaagtaaaacctccacatccaagtgataatttccacttcaaaatagtgacatcaggaaactattcttttattcaattatgctaccaatgcttaaaacattctcttgtgcaaattcggaaatcatggcacattcctttgaacttccctaatggtttagctccagagaacagccaaatttaaattacagttgagctgatgattaagataggtcatactggctggctgtggtggctcacacctgtaatcccakcactttgggaggctggggagggcggatcacttgaggtcaggagtttgagaccagcctggccaatatgttgaaaccccatctctactaaaaatatgaaaattagccaggtgtggtgctgcctgtaatcccagctacttgggaggctgaggcaggagaaatgcttgaacccaggaggtggaggttgcagtgagctgagatcatgccatt

SEQ ID NO: 108956 - DNA, 338 bp, Homo sapiens
ctatgcagcttctagaaactagcaaagaaaactattttctgatattgaaataaacaataatttattattaaacaaagcaaaaatggatgtagtataatgaacacaccaacacacttgcttttatttcaatattcatcaaaagtcactttcgagagagtaaaagtgtatgacctacattgaaagaaaatattttcattatcttcccctaaaaaagcwaagggctaattttaaaaaccttcttacacatcactaattaaaatacagacaacaaaattatttgaacaaaactttataaaaataatatgcaataccaaatatatttatgaagagtttcaata

SEQ ID NO: 108957 - DNA, 568 bp, Homo sapiens
aataattctatattttcaaatatatttagcagttagaaaattataaaatcctatcaaataacatttatctcaggaatgcaatgttgacataatattggaaaagtttttcatgtgatactttatgttaaaataagggataaaaaaatatgcttttatcacaatagatgtaaacattttaaaaagcactgaacaaaagtcatcacttctttttgattgtgatctcagcaaactcgtattaaataggaatgtscttacctgataagcacaatctatgaaagatctacagtcagcattcatcattctgtatttttttttactatatactttttgcctttgtgttactatagactttctgcatatactatttgcctttttcttatcagaactaagtagtgtgttctttcagtttcctttttttttttttttttttgtccccagggaaatatggttgaaacagcagagatcagttggccaccccgtatcaatcagtgtggtttagtggttagactgtaagagttactgataggcactcaaaaattgctgaaacatgcataatctgatttttaaa

SEQ ID NO: 108958 - DNA, 568 bp, Homo sapiens
aataattctatattttcaaatatatttagcagttagaaaattataaaatcctatcaaataacatttatctcaggaatgcaatgttgacataatattggaaaagtttttcatgtgatactttatgttaaaataagggataaaaaaatatgcttttatcacaatagatgtaaacattttaaaaagcactgaacaaaagtcatcacttctttttgattgtgatctcagcaaactcgtattaaataggaatgtgcttacctgataagcasaatctatgaaagatctacagtcagcattcatcattctgtatttttttttactatatactttttgcctttgtgttactatagactttctgcatatactatttgcctttttcttatcagaactaagtagtgtgttctttcagtttcctttttttttttttttttttgtccccagggaaatatggttgaaacagcagagatcagttggccaccccgtatcaatcagtgtggtttagtggttagactgtaagagttactgataggcactcaaaaattgctgaaacatgcataatctgatttttaaa

SEQ ID NO: 108959 - DNA, 608 bp, Homo sapiens
ttcagcaactgcaacagtgcttagcatccatgtcatttagagcaattcatcacagcttttccacagacagttctgagtcttaatgaactgctgctatccagcagccctcccttcttgaagaaaacccaactttcagcccccacagtagaatgaatcacctggttgaccattgtccaggagcccaagaaggtcaaaaagcaaggccctgtgttggcctcttccacagtcaccctctttgggtggctgcacatcctctatgtcaggtaaatgctctgccctgggcccaccctgacagctggggcacctgcgtgtttagcttggctctcagcaaaggcgcactggaggctggtttccaacacagctyaaacacaattaactttcatttgatgtggcctgcctctctctgctcctaatgttccctcaggacccgggatccaataaagtccagcatgtgaccaagaaagccaggcagagaaactgaccaaatattgttcaatgtgatattacaaacctatgggaaaggagtttaattaaagaccacaacaattctttggggaaatgtttcttttattaaccattcctgccgaacaaagcagctttaaacaaac

SEQ ID NO: 108960 - DNA, 396 bp, Homo sapiens
attaacttatgaattaatctcaactctatttttgcttcacggtccaatgcacatattcattactgattagctaagacaaaggaaaagaacagttttcagagctgtcacagaaatacacaatctaataaaaaatagctttccacaaattcactatttgttaggatattttcagctccaagtaacasaaaacctaactaacagtagattaattagctcatgtaacaaaattttgcaagtagacagctccaagattgtttcagagttcaaccaaatcatggggctaggttaactttctgcaattttcttggccgccttctcatttttgaaacttgccaataccaactctaagcatcacatccttatatagagcacccaaagcagggaggcaaagaattc

SEQ ID NO: 108961 - DNA, 554 bp, Homo sapiens
gaataattcactcaaagatggtttttcagttgccttaggcaaggctgaatttgtctcgcacyatttacataaaactaaataaaaatgtgtcttccttcctactcatagggactattttacaactaaacttttcaaaaggccagaagctcatcatttggctctaacggggcaaactttgttactccttgtctatttcagcaatccctgcgcctcagtttgatcctctgttgatttaaggattggattaaatgtttccaaaatttgtgagaggaggtagagtgtatttgggcttgatttcagttttgccatttagtcagatggtatgtaaccctggaaagtcactgaatttctttaagtgtccattttctcatcagtaacaaaatgaagataatccacatacttatcctatggatatgtaagaatcataaatcaatttgctaaattggctgaatgtaataggacacaattgttacaggaaaggggtcccaatccagatcccaagagagggtcttggctttcgctcaagaaagacgaattcagggagaatccagaga

SEQ ID NO: 108962 - DNA, 646 bp, Homo sapiens
  misc_feature (1)...(646): n = A,T,C or G
ctgtggagtgctttacttccaattaggtggtcaattttagactaagtgtgaagtgttgctgagaagaatgtatatcctgtttctctggggtggagagttctgtagatgtctattaygtccaattggtccagagctgagttcaggtcctgaatatccttgttaattttctgtctcgttgatctgtctaatattgacagtgggatgttaaagtcttccactattattgtgtgggagtctaagggtctttgtaggtctccaagaacttgctttatgagtctgggtactcctgtattgggtgcatatatatttagaatagtgagctcttcttattgcattgatccctataccattatgtaatgcccatccttgtctcttttcgtctttgttggcttaaagtctgttttatcagagactatgattgcaaccctgccttttttttttttttttttttttttttttttttttggcttcccctttgctggggaaaaattcccctatccctttattttgagcccatggggggctttgcccatgaaagggggctcctgaacacaacaaactgggggggtttgattctttattcaatttcccagcctgggtattttaactggggcatttagcccctttccctttaagggtagnnnnn

SEQ ID NO: 108963 - DNA, 585 bp, Homo sapiens
catgcctgtaatcccagctacttgggaggctgaggcaggagaattgcttgaacccgggaggcggaggttgcggtgagcctgagatcgcaccattgcactccagcctggacaataagagcaaaactccatctcaaaaataaataaataacggctatgatgcttttacaaaaataatatttttaaacaaaaactgtataatgatactaagagatccatatatgaaggttrggaaagcaatgaccaggccagtctctggttgtattcgccatctcctcgtcctgatcactttcctttcttccctctttgcttatgctcacttccttttttaaattttattttcttccttaaaactagtcatcatgaagtcattagggagcattcagtacacgtcaggggcatgcattacatgacatcgtagtagaccacacacaaacatactttttttttaaagtaatacagtagatacagcctatgtatgagataaattgataaatattatacaaaattgagccacatttttgtcactaatcatttataagtttccagtcacacaatacaattgctgggatattatacttagacaac

SEQ ID NO: 108964 - DNA, 528 bp, Homo sapiens
atttgggaagtcagcataagtgagaataatgagtacctattgcatactctattttattctaaacacagtctctgctaggctttgacctaccatgaagtggggaaacctttatggtcactctcacttctacacagtctctgtatattggtggtacacattgtgtgaaataccttctccatctagagattgcttcatttttttattataaaaacattacacaaaatttgtttaaggtgtcatgtaaatatacttttagtgactgtcatttttggggtttcactctcagaggaaaatgaattatttatattaggtatttctgaatacctaatctgaatatgcttgyttttttaaaaaaaccagttctctgcaatgttcacccatccacctacctaaaatatgcaccacttaatcttttattcatgctgctccacagcgtgccgtaatcataacccacttgtggtagactcagacactgttgttgtatgaatgcctcatttatctctttctgtgcatatttatgtttcagtt

SEQ ID NO: 108965 - DNA, 406 bp, Homo sapiens
gaattcacgcatcctcactcccacyacattttattggttacaagagagtcactaaagccagcctagattcaagtggagaggaattagatagaccccacctctcggtgggaggaatgtgtgatacttacagccaccttttaaaattgctgccttttagattccttaaatgtgtttaacattttaaaatgtatcgtacagctgagtgcagtggctcgcacctgtaatcccagcaatttgggaggccgaggcggaatgattgcttgatgccaggtgttcaagaccagtctggcatagtgaatttctgtcttcacgaaaaattttttaattgtttttgtttttaagacagagtcttgctctgtcacccaggctggagtgtaatggcatgatcttggctcgctgcaacctc

SEQ ID NO: 108966 - DNA, 581 bp, Homo sapiens
agacattaccaaaaagaaaaataatagaataatatctcttatgaatataaatacagaaagttcaacaaaatactagcaaactgaatccagcaacatatagaaaagactatataccatgaccaagtaggatttatccctggagtgcaaggtcagtttaacaagcaaaaattaatcaaagtaatgcacaatgttaatagaaaaaaggtaaaaaatatatgatgatctcaatagatgaagaaaaagtgtttgacaaaaatctaaaaccactgcatgacaaaaacagtcaagaaactagagatggaagagaatgtccccaatctaataaaggacatctatgaaaaatccacggctaatatctctgtttttaataatcatattggcaataattatttttgtactctacttcaaatcctggcaaccagcttgtttctctaagttccatagtcatcaaaaacaaccaaggtttcttggagaaatgtctgattccaaatctgtgacatgatgtataacatgaagtcagagcttataaagtgaraaatctttaaaatcactgggtttacatcagaaaaattttgaagtca

SEQ ID NO: 108967 - DNA, 597 bp, Homo sapiens
atccaattatatggaaagctgggatttcagacaagagctaaggagaaacagaaggtaccatttgtttcttgagccaaaaaacaccaggctggaattgctgttaattttcttctccttttctgatggatgaacttttttcctcttaaaatattggcaaaacaataaataaaattctgttagcaataactattttggggggaaggacagaggagcagaggaagaaagctctgattttcattataaacatctgaacaatgtatgaakaatctaataatgtgtatggattactttttttaatgtgacagatattttctaagtggagagattgagaactgtatatgtttcctttatatagttttgtgtactaaagcacgaatgctcattttgaacaatattcattatgaaaattagaaattactgataaactaaaaataaataaagcattttcaaaaccctataattcactcaaagatagaaattgttagcttttaggtgtttattctttttttttttgagacatgtttattcttctagattgttatctcaaatacattatgctagtttaaaacctaatatattactttccacatcacttaa

SEQ ID NO: 108968 - DNA, 529 bp, Homo sapiens
aagtagaatggaatttatttatccagttatgaccttggatacttatctagaattatrtaaattagaaactttactgtgctcatgtctgaggttaaaatcttgtccagtttcacggattttaaaatacttatgtaactcacatactttgtctctgtatgttattgaattcattttttagcttgaacgctaatctctagaaaaggaagtctgtgtgactcagtgtcctgtttcaagtttaaactataggccagtaagttgtaatttttttcagagtaatgggaattaataatagtaataacaataattatcattattatacgcaaaacaaaaaagcagcactattataaaatgatgacatattcaatgctgaacaaagactgaagttaaaaaaaaatgtgctactaaatctgtattcttgtatcttttttttatgtcattggtcaatggctaaataaatgcaattaaatgccatcacctactttcccacatactagtaacagatactttattcaagaacaaatatacacat

SEQ ID NO: 108969 - DNA, 529 bp, Homo sapiens
aagtagaatggaatttatttatccagttatgaccttggatacttatctagaattatataaattagaaactttactgtgctcatgtctgaggttaaaatcttgtccagtttcacggattttaaaatacttatgtaactcacatactttgtctctgtatgttattgaattcattttttagcttgaacgctaatctctagaaaaggaagtctgtgtgactcagtgtcctgtttcaagtttaaactatargccagtaagttgtaatttttttcagagtaatgggaattaataatagtaataacaataattatcattattatacgcaaaacaaaaaagcagcactattataaaatgatgacatattcaatgctgaacaaagactgaagttaaaaaaaaatgtgctactaaatctgtattcttgtatcttttttttatgtcattggtcaatggctaaataaatgcaattaaatgccatcacctactttcccacatactagtaacagatactttattcaagaacaaatatacacat

SEQ ID NO: 108970 - DNA, 529 bp, Homo sapiens
aagtagaatggaatttatttatccagttatgaccttggatacttatctagaattatataaattagaaactttactgtgctcatgtctgaggttaaaatcttgtccagtttcacggattttaaaatacttatgtaactcacatactttgtctctgtatgttattgaattcattttttagcttgaacgctaatctctagaaaaggaagtctgtgtgactcagtgtcctgtttcaagtttaaactataggccagtaagttgtaatttttttcagagtaatgggaattaataatagtaataacaataattatcattattatacgcaaaacaaaaaagcagcactattataaaatgaygacatattcaatgctgaacaaagactgaagttaaaaaaaaatgtgctactaaatctgtattcttgtatcttttttttatgtcattggtcaatggctaaataaatgcaattaaatgccatcacctactttcccacatactagtaacagatactttattcaagaacaaatatacacat

SEQ ID NO: 108971 - DNA, 433 bp, Homo sapiens
caatttcttttttgagggctggagatttttcagtgaaatgtaactagacaaattctcraagagctgtaacactaaaatttcattcaattttagtgttgaaagcggaagtatcttaggctttaaaaatcaggcaaacctttcttctaatcggtcacgtagttagttgtatgacccagggccatttactaatgctttagaagttcaagtttcctcctgcaaacaaatggcagtgattttgcttattttgctatagatcgtgaaagttaaaacacatatgaaagcaccaagtagaggatctagcatgttagatattatttaaccagttatttttttctattcttttttcattccttcaaatagtttcaccttcacatcatttttcttaatgcatcttttcagaaatacatctaatggattcagcaatattcaatga

SEQ ID NO: 108972 - DNA, 458 bp, Homo sapiens
tttaacatattttcctcacgggattattctgtatttcatgatgacttaaccaggggctttagagagaacattatttctttgaatacaattttcttcaagtctcactctttttcaatatcctaatccgtcttcccttctcccttccattaagtttcatatattttgtactgacctttatcccttgaggtaactcatcaattcataacttttcatcttacccccaattttattctttgtcarttttttagtaatgacataatcatcttgtcctaagtagtactgtagaaatataatttactgctatgctcaggatagtaattactgcctaatctcatgctatgtggtatagcaacattttttcagaattcttttgataaagtaattccctaccaatcacacatttagcatgatattcatcgtgttcctgattttgatgcctcaaaagtaaaagtaatgta

SEQ ID NO: 108973 - DNA, 575 bp, Homo sapiens
tttggtaccatgactcataaaatatatgactcatcaaaatataaattcttccatgtttctactgctgaaaaattgctttagcatctggatttccagaggtgaaatctttgacagctggtaggggattagaatttagaaataacttcaactgaaaaagttcaggttgaagccctgtaacacaaaagtacctggttggggcttgagaaggcctgggttttgcttttactttaccwctgactagttacatgacctttttatgccatagcttcataggattaaggaaatcaggcaaaccactaataggttatcagttctctttattaagctttgtcaaggacagatactatattttggtcagcaaggttccaagtgtctgcagctttgggctgtgatttacaccagattctagcttcttagaggtgcttctcctgggcgcaccattaagccgctagaaagccacttctttgagcctttcccatcctctctctctaaagctagggcttgtgctggggatagttaattcctaggaatcagactctggaaaacctcagtcattttccattctcttagatcgc

SEQ ID NO: 108974 - DNA, 606 bp, Homo sapiens
tggtaggggattagaatttagaaataacttcaactgaaaaagttcaggttgaagccctgtaacacaaaagtacctggttggggcttgagaaggcctgggttttgcttttactttacctctgactagttacatgacctttttatgccatagcttcataggattaaggaaatcaggcaaaccactaataggttatcagttctctttattaagctttgtcaaggacagatactatattttggtcagcaaggttccaagtgtctgcagctttgggctgtgatttacaccagattctagcttcttagaggtgcttctcctgggcgcaccattaagccgctagaaagccacttctttgagcctttcccatcctctctctctaaagctagggcttgtgctggggatagttaattcctaggaaycagactctggaaaacctcagtcattttccattctcttagatcgcccctccaccgcagtagtactctgctgcttccttcttttcagcaacatgtcatagacttctcaatcaatttctgatttctcatatgcctggaggaaaagactgcttcacctctcagctatggcaaaaagccctaaagcaataattgc

SEQ ID NO: 108975 - DNA, 454 bp, Homo sapiens
gtcaattctgggaattgatctcaggagaattcaaaggatctcagcttacaattatacataaatggatatttatagcaacactgtagtagaaaaaccttggaagtaatctgaacacccatcagtgcaggaataattgaataaataatgtgcatctatttttggtattactatgaagctattaaagagaatgagttacgtctgttatcactggtctgtagggatgcccmcgatatgcagtttagtaaaaaacacaagctgcagagtaatatacatagtaggtgccatcattgctctgaatgtccttgcttcattgcctttgacgattcttttctcatgaaacttgctaacagtctcttaccatctgtatgtctaattcttctttcacattcatattcaccaggagcctcagtttgtcagggaagctaaattgaccaacccagattggatacatgtc

SEQ ID NO: 108976 - DNA, 597 bp, Homo sapiens
ttagggtcatgactgtataccaataaacaagtgagtttatttagggctagagctgttcctagcacttgctaggtcagtgtatgtattagtcaatttccacactgttataaagaactacctgagactgggtaatttataaagaaaagagattcaattgactcaccattctacatgactgggaaagcttcaggaaacttactatcatggtggaaggtgaaggagaagcaagcaccttcttcacaagggggaagtaccacacttttaaaccaccagatgtcgtgagaactcactcactatcccaaaaacagcatgggggaactgccccaagatccattcatctcccacgagatcccactgtcgacacgtggggattacartccaagatgagatttgggtggggacacagagccaaacatcatcagtctgtcacttaggatatgcgttaagtaacagaaaagatgaatacaaattgtccttttaaaaaatgaagcttttcattggctcacttagctgggagtacaaaggtagggtaaggctcagtgttatttaattcaacaggtcaatgataaccatgtctctaatctgcagtcctaactg

SEQ ID NO: 108977 - DNA, 597 bp, Homo sapiens
ttagggtcatgactgtataccaataaacaagtgagtttatttagggctagagctgttcctagcacttgctaggtcagtgtatgtattagtcaatttccacactgttataaagaactacctgagactgggtaatttataaagaaaagagattcaattgactcaccattctacatgactgggaaagcttcaggaaacttactatcatggtggaaggtgaaggagaagcaagcaccttcttcacaagggggaagtaccacacttttaaaccaccagatgtcgtgagaactcactcactatcccaaaaacagcatgggggaactgccccaagatccattcatctcccacgagatcccactgtcgacacgtggggattacagtccaagatgagatttgggtggggacacagagccaaacatcatcagtctgtcacttaggatatgcgttaagtaacagaaaagatgaatamaaattgtccttttaaaaaatgaagcttttcattggctcacttagctgggagtacaaaggtagggtaaggctcagtgttatttaattcaacaggtcaatgataaccatgtctctaatctgcagtcctaactg

SEQ ID NO: 108978 - DNA, 368 bp, Homo sapiens
tgaataaatgcatcatgatgtgagagtggaaagtgtcatgatacaagtaggatgtgcgctaccattggaaagaagctgtgggtgaagagcatagttgagaaataagattgatttttatawaatatttagatattctcataaaaagtttttgaccacaagtatatcattaaggggaatcagtgaatgaactgaatatctggtgcatggatctttttccttttgggtgttaagcagaagaaaatatgaaaaagagtagagctcatagaatcaggtaaacttcaaatctggaaggacctgaaatgtctagtacaacttcacacccaacaacagatgatcacacttgtgaaacagtgacagtttccatttaa

SEQ ID NO: 108979 - DNA, 368 bp, Homo sapiens
tgaataaatgcatcatgatgtgagagtggaaagtgtcatgatacaagtaggatgtgcgctaccattggaaagaagctgtgggtgaagagcatagttgagaaataagattgatttttatataatatttagatattctcataaaaagtttttraccacaagtatatcattaaggggaatcagtgaatgaactgaatatctggtgcatggatctttttccttttgggtgttaagcagaagaaaatatgaaaaagagtagagctcatagaatcaggtaaacttcaaatctggaaggacctgaaatgtctagtacaacttcacacccaacaacagatgatcacacttgtgaaacagtgacagtttccatttaa

SEQ ID NO: 108980 - DNA, 614 bp, Homo sapiens
cagggtaacaaaatacatcctaacaatccagaattgatcagactcagttgtctggccccagtcaactgtggcttttgaaggagtgctatgaatgtttatatccaatagaaggcaaagcgatctaactccccagtgctcagaagaacagtgggagggttccaattatctatgcttctacaagttgagttcatggatgtagtaggggtgatttaaaccagatttaaactcagtaaatattgattgaatgaatgagaagctaagtggtatggataacctttgaatgaagtgtagaaaggtctgagtttaagttcgagcaccgccactagcttggaacaaagctaaggatttcttattcccagtctagggatcatttgtcaagagtaatttgtcactgaatcaattaactatgaaagggttgaacaaatagaaaagaaataatacttttgattacctactatgttcttgccacaatactttgtatatattttctyttccaccatagcattcccgtgaggtaagtgtgatttctgctcctcttcccttcaaatgaggttcataaaagcagagtactggaacagttaaattttgaagggaatgatagaatataagaaaaa

SEQ ID NO: 108981 - DNA, 614 bp, Homo sapiens
cagggtaacaaaatacatcctaacaatccagaattgatcagactcagttgtctggccccagtcaactgtggcttttgaaggagtgctatgaatgtttatatccaatagaaggcaaagcgatctaactccccagtgctcagaagaacagtgggagggttccaattatctatgcttctacaagttgagttcatggatgtagtaggggtgatttaaaccagatttaaactcagtaaatattgattgaatgaatgagaagctaagtggtatggataacctttgaatgaagtgtagaaaggtctgagtttaagttcgagcaccgccactagcttggaacaaagctaaggatttcttattcccagtctagggatcatttgtcaagagtaatttgtcactgaatcaattaactatgaaagggttgaacaaatagaaaagaaataatacttttgattacctactatgttcttgccacaatactttgtatatattttctcttccaccrtagcattcccgtgaggtaagtgtgatttctgctcctcttcccttcaaatgaggttcataaaagcagagtactggaacagttaaattttgaagggaatgatagaatataagaaaaa

SEQ ID NO: 108982 - DNA, 543 bp, Homo sapiens
  misc_feature (1)...(543): n = A,T,C or G
ataaactctgaagccctggaacctgactcatttggttttcttcactttactttagaaacccaaatactagtttttaacagaatatcttattcaccaacttttaaagccaacttatggtatgacacccttcagtgaacttgggtgaataaattggatcaatggcataaatgttttcctctggatacactccagartttctgtctaccccaaggcaatggcaaacatggacatgcttattttctgtttttctcaagactacaaggtttctttgtacactgcaagcaaaatttccaggcacaaacatttgccaaggaaatcacaacaaggaacacttatttaacatttgacaggcacattccgcaactctactaataaagatactgtgaggaagatgtggtctagaggtcaatctcatcttcgacagacaagggaagggaagggaagaaggaaagannacaataccaagtaagaattgctaagcataccagtcctggctacagaatcaatttaatagcaaacaaccaacagtacaaacaatacgta

SEQ ID NO: 108983 - DNA, 362 bp, Homo sapiens
atagtcaaggacacctcatcatcattaacacaaaacatcttttttaaagtttcttgatgagattttacagagacttattagtgtagctagaatacttctagcataaataattattaatacaatatcamataggtctgtaggtgaactcaattacagtggcacaatggggcaaataactgtaaaagtcattggcattattgttctccgaaggtcaaaggcactggagtggagaatggtgaaattagatgacagagcagaataagaggctgtgattgaagatgttctggatcacagacctttattgtacttttatttttttaaggcttacattatttgggcctttcatctgtgaaaaaaaaata

SEQ ID NO: 108984 - DNA, 473 bp, Homo sapiens
tatttaatgcattatgaaacaatctgatagcaagtaaagagattttaaattaaggctgtctgtgtttgayaaaagtagaaaggatttgaatattttctcttagaagttgggatctagggcaagcatttgaaatataaccttgaagctaatgagtaacaaaggatgagtcagaagataaagacattgattaaaatcacgagatctcgctgtcaagaagtcatttcattctgaaaatttaactaaaatgattaaaaataggaagataaagtgacttaaacactgcacacttctgccaataaaaagacaaacaccatgttatagaattataaagtgatattggaataaagacaaagaagaataatgtcaaaagtaatgaataatttattgttgtttcttaaaccacagaccatgtaataccctctgctattatttcacttttcctctcatgtatgctgttcactaaaactattgac

SEQ ID NO: 108985 - DNA, 473 bp, Homo sapiens
tatttaatgcattatgaaacaatctgatagcaagtaaagagattttaaattaaggctgtctgtgtttgacaaaagtagaaaggatttgaatattttctcttagaagttgggatctagggcaagcatttgaaatataaccttgaagctaatgartaacaaaggatgagtcagaagataaagacattgattaaaatcacgagatctcgctgtcaagaagtcatttcattctgaaaatttaactaaaatgattaaaaataggaagataaagtgacttaaacactgcacacttctgccaataaaaagacaaacaccatgttatagaattataaagtgatattggaataaagacaaagaagaataatgtcaaaagtaatgaataatttattgttgtttcttaaaccacagaccatgtaataccctctgctattatttcacttttcctctcatgtatgctgttcactaaaactattgac

SEQ ID NO: 108986 - DNA, 655 bp, Homo sapiens
cttcctattttgtctctctaaatattgtaagagattaccctcttaaaacttgatgttaactgtcatctccccagaagtccactagaaaaatttattgatgaagtaaagctaaatttattagaactactgcaacaaatgggtaaactacttggggttattattgtcttaaatattgtgccttagtttcccattttaacgagtttagggtctgggctgaataattttaagacaagtcttgtaagaagagaaatggttgagactgagcagagttcacracacgatagctttgtattggtgtggatggcaaaataagaattttgaagtgagcctaagtaagcaagctgtttagattccaggagcaaagatttcctggaacaagaaattaggttaattttgtttagttcaaatataattttaacagatttagggccttactttcaattctcattaatttcatttttaaggtactagatcactcttaagcttatttttagtttgatatattaatatatgcttacattattatcttctatgacttctaggaaatttaacaaaagtgattatactatattttgtaaatatttgtcttataaagcaccacttgtctaaaaatcttgggacgatttttcaagtgtgataaattcctgtttatagg

SEQ ID NO: 108987 - DNA, 611 bp, Homo sapiens
gatcattgatcacagatcaacatgacagatayagtgaaagaatttgaatattgcaagaattaccaaaatgtgacagaaacacgaagtgagcacatgctgttggaaaaatggtgccaatagaagcttgacacagcattgccacaaaccttcaaacacagtatctgtgaaacacagtaaagcaaagtgcaataaaatgaggtataactgtttctaacgcagtgctcataagtgaggctgatcctactgatctagatcactttttttgtaacaaaatcattcttttatagtcattttatgcttctggaacctttaaaaaaggccaaggtaggaaaccataatgtcatttgaaatacttcatttggcttaatttgcatgctatttgcatacccatagtatttttacatatttaaaaaataattgcatttattagctttaatgatgccagggagagacaaattgtggccagactctaatttggtggactgatttaacattttgagattacatgaaagaagagtttgttcccccacttgcacattcttttccttgaaagatgaaaccattaaaaaagtatgactgtccacgcttttctcctattcattgtaatatta

SEQ ID NO: 108988 - DNA, 608 bp, Homo sapiens
aagaacttctataaggagcccttggggaggcacagctagctgctggcctggacatcttcatctgggctgcaggatgatggcctcccaggcccattggttctctctaattcarttagctctctttagcatacgtctttatgctggaatgctatacacataatataatggcaatatgaaaagaagccttcattcaaatgtgccacaagttggcaatggtgggagttgccatggcttccttatttaagttttggcaaatccatggccaggaatgactatggaagacattttgtcctatttctgttacttttcctatttcttacaatcgtactgtgatataagaatctcaggctggtcgacattccatgctgatttatatcactttgagtatgttctcagtttcaaaggtgttatacttactgcatatttcttaacctgagcttgattaaaaaaaaaaaaaagtagagatatcctgcctcaagtacttagaattcatcaatgatgcttctgtagtagggctgtttctatccctaatcacttaaatgtggaactatgagttaaggtattctacaatatcttatcaaaagaatttgatatcaatatggaaaagt

SEQ ID NO: 108989 - DNA, 592 bp, Homo sapiens
gggagttgccatggcttccttatttaagttttggcaaatccatggccaggaatgactatggaagacattttgtcctatttctgttacttttcctatttcttacaatcgtactgtgatataagaatctcaggctggtcgacattccatgctgatttatatcactttgagtatgttctcagtttcaaaggtgttatacttactgcatatttcttaacctgagcttgattaaaaaaaaaaaaaagtagagatatcctgcctcaagtacttagaattcatcaatgatgyttctgtagtagggctgtttctatccctaatcacttaaatgtggaactatgagttaaggtattctacaatatcttatcaaaagaatttgatatcaatatggaaaagtgatcatataagcaaggtactcggctgtttgtcctactacctactctactttttttgtacatttgaaatattccataattttaaaatatatacttataaaaccataaagggattatttagctcatatgaccagatgatagagcgttagtgttagggctcacttgatttatgtgattacgtcttcaaggcatggcatggtttt

SEQ ID NO: 108990 - DNA, 592 bp, Homo sapiens
gggagttgccatggcttccttatttaagttttggcaaatccatggccaggaatgactatggaagacattttgtcctatttctgttacttttcctatttcttacaatcgtactgtgatataagaatctcaggctggtcgacattccatgctgatttatatcactttgagtatgttctcagtttcaaaggtgttatacttactgcatatttcttaacctgagcttgattaaaaaaaaaaaaaagtagagatatcctgcctcaagtacttagaattcatcaatgatgcttctgtagtagggctrtttctatccctaatcacttaaatgtggaactatgagttaaggtattctacaatatcttatcaaaagaatttgatatcaatatggaaaagtgatcatataagcaaggtactcggctgtttgtcctactacctactctactttttttgtacatttgaaatattccataattttaaaatatatacttataaaaccataaagggattatttagctcatatgaccagatgatagagcgttagtgttagggctcacttgatttatgtgattacgtcttcaaggcatggcatggtttt

SEQ ID NO: 108991 - DNA, 671 bp, Homo sapiens
tgggctggaattcctgtctggcaataattttcaggagctgagtgatggctgtgtgctttagggggaccagggccccccattttccccaggtaccatttctccttggtatgctaccaccctaggytcacttcactcatttgcatgaattgcctggcttggaagagcttaccacccatgaagagccagtttttcatctcatagatagggacactaaggttttcaagggaaaattgagttatctgagatcacccacaagttaatgacagagcaaggccgagaacccaggtctcctggcctttaatctaggactcttgaccccagattgcacttgcaatgatgctcctggtcaggccactctattaatttcctagggctattgtaatgttaccatgaactaggtggcttacgacaacagaaacttattctctcagttctggaggcaagaagtccaaaatcaaggtttcagcagggtcacaccccctctgaaagctataggggagaatccttccttccttgccttttccagtttccacctgccacctggtagctccaggtgttccttggcttgtggctgcatcactccaatctctgtttccatcttaatgcccttctctctgtttctctgtgtgtttgtgtgtctgtctgtctaatcaacctctgcctcactcttc

SEQ ID NO: 108992 - DNA, 671 bp, Homo sapiens
tgggctggaattcctgtctggcaataattttcaggagctgagtgatggctgtgtgctttagggggaccagggccccccattttccccaggtaccatttctccttggtatgctaccaccctaggctcacttcactcatttgcaygaattgcctggcttggaagagcttaccacccatgaagagccagtttttcatctcatagatagggacactaaggttttcaagggaaaattgagttatctgagatcacccacaagttaatgacagagcaaggccgagaacccaggtctcctggcctttaatctaggactcttgaccccagattgcacttgcaatgatgctcctggtcaggccactctattaatttcctagggctattgtaatgttaccatgaactaggtggcttacgacaacagaaacttattctctcagttctggaggcaagaagtccaaaatcaaggtttcagcagggtcacaccccctctgaaagctataggggagaatccttccttccttgccttttccagtttccacctgccacctggtagctccaggtgttccttggcttgtggctgcatcactccaatctctgtttccatcttaatgcccttctctctgtttctctgtgtgtttgtgtgtctgtctgtctaatcaacctctgcctcactcttc

SEQ ID NO: 108993 - DNA, 599 bp, Homo sapiens
caaacccacattttctgatgctgaaaaacacactatgcatttaggaagggtatcattatacttttgggtgctgtttaaattgaaaatcaaygcatgaatcaatgacataacagagcacattggcatcaaggcaagtaaatagaataaagaaaacaataggtagtgtgtctgtatctgtgttgactgattatacataggacaaatagccttgtcttaggttaggccagatgccctagaagcagagcctgggacaaggattaggtgccagtgatttattgagtgcccttaagagaaacctatattggtatggaagaaacaagatagaaaagtggaagaagtcaggcaatgatgtggtttcaggtaaaatctagcctcatcctgatctgaccaggagccctggggtgttaatggcactgcacaccttgagatgaggagacttgacttttgtaccccagcatatgccagtcactgactatgggctgccatggaagggaatgtaaaactctcagtttcctgcaggcaaagtggctccagtcactccaaagcaattctctgaagaagggttggaggtatgagcagttagcagcaccctacacaac

SEQ ID NO: 108994 - DNA, 554 bp, Homo sapiens
tggttagtatcatcttttcatattattacaaagggaaaacctccagataatagagcccatacagggaaaagtaggacccaagaggcaacaggataaaatgaagtcctgaatgtacaatttcagcccttgtatgaagccatacctaaatttaaatytacagctgtcttttttcagtaacttgagcctataaatttattttcatttaatcctgttgcattggaattctgtagttttcaactgagagaccttcttgagccagccttatttcaggtgcctataatattatgagatatcatttgggaaattatcctatcttcaatttacccatggataaatgacagcagggattgttcccatctgagcagggcttcccacattctagaatgcccttacccagggtgactattcaaagtggccactttagttggtatagacaacatctgctgacatgtgttccaacaggttcatccccattccatctagattgctaaatatttttagtatcacctctgctttcaactacatgattgcatttacattgcaaatccaagcgg

SEQ ID NO: 108995 - DNA, 362 bp, Homo sapiens
atggactataacatatgcaaagtgcccagcacarcggccagccagtggcgctcaatatttatcaggagactgcagaaacaggcccgagggagggactagacacttgtctccatctccatgcctggcaccatctgcagtgctgggcacaataggtgctcaatgaatgcccacagaattgaaatatgggctggacctcaaacaccatctgccaggccatcataagcccaacactttgcagcaagagattcaccccacagaccacatcgacatccacgcagttgcaaggaaatcaattggtctggctccagctgtcgaaactagttaccaagaggaaccctggacaaatagtcttcggctcagca

SEQ ID NO: 108996 - DNA, 498 bp, Homo sapiens
ctacaggccccatgcaagtccaaaacccagcaggcaaatcttaaagctccaaaatgacctcctttgactccatgtgtcacatctaggtgatgcaagaagtgggttcccagggtcttgggcagccccgcccctgtggctttgcagggtacagccccccttctggctgcattgagtgtctgcagcttttccaggcacacagtgcaagctgtcagtggatctaccattctggggtctggaggatggtggcccttttctcacagctctgcttggcagtaccccagtggggactctgtgtgggagctccaaccccatatttccctttgacactgccctagcagaggttatccatgagggcccccccctcccctcccccccacagcaaacttttgcctggatttccaggcattttcatacatcttctgaaatgtaggcggaggttcatgaacgttaattcttgacttyggtgcatctgcaggcttaacaccacctagaacctga

SEQ ID NO: 108997 - DNA, 577 bp, Homo sapiens
cattgatagtatagataaatatacctgatctctagcaggaggaactgcattgtcttggggaaaggttttagatatagggaggggtgatgagttgggaacaataatgtagtctgccacaaacatattaaagtgtaactggatatggttgctgcagaattttgaacctttgttttaattgtgatttttactcttttccccctatctagtgccctttygtaatacagtaattatcatgatttttgtctgaactgaaatcttctgagattagattgtctacgaaaatacagtcgatcctccttgttttcagcttttgtatttgtgaactcacctactattttttgtaacccccaaatcagtactcacagcactttcatagtcatgtgtttgcgcagagtgtcaaagaatttgagtttgaacaggatgatattctgccttctttttcagctctcatacaatagtcaggtatcctttttgtggtctatttaatgccatgcttttcctgtttttgtgctgtttgttggttgttttgccatttaaattaacccccaagcatagtgctgaagtgctgcttagcatt

SEQ ID NO: 108998 - DNA, 577 bp, Homo sapiens
cattgatagtatagataaatatacctgatctctagcaggaggaactgcattgtcttggggaaaggttttagatatagggaggggtgatgagttgggaacaataatgtagtctgccacaaacatattaaagtgtaactggatatggttgctgcagaattttgaacctttgttttaattgtgatttttactcttttccccctatctagtgcccttttgtaatacagtaattmtcatgatttttgtctgaactgaaatcttctgagattagattgtctacgaaaatacagtcgatcctccttgttttcagcttttgtatttgtgaactcacctactattttttgtaacccccaaatcagtactcacagcactttcatagtcatgtgtttgcgcagagtgtcaaagaatttgagtttgaacaggatgatattctgccttctttttcagctctcatacaatagtcaggtatcctttttgtggtctatttaatgccatgcttttcctgtttttgtgctgtttgttggttgttttgccatttaaattaacccccaagcatagtgctgaagtgctgcttagcatt

SEQ ID NO: 108999 - DNA, 577 bp, Homo sapiens
cattgatagtatagataaatatacctgatctctagcaggaggaactgcattgtcttggggaaaggttttagatatagggaggggtgatgagttgggaacaataatgtagtctgccacaaacatattaaagtgtaactggatatggttgctgcagaattttgaacctttgttttaattgtgatttttactcttttccccctatctagtgcccttttgtaatacagtaattatcatgatttttgtctgaaytgaaatcttctgagattagattgtctacgaaaatacagtcgatcctccttgttttcagcttttgtatttgtgaactcacctactattttttgtaacccccaaatcagtactcacagcactttcatagtcatgtgtttgcgcagagtgtcaaagaatttgagtttgaacaggatgatattctgccttctttttcagctctcatacaatagtcaggtatcctttttgtggtctatttaatgccatgcttttcctgtttttgtgctgtttgttggttgttttgccatttaaattaacccccaagcatagtgctgaagtgctgcttagcatt

SEQ ID NO: 109000 - DNA, 585 bp, Homo sapiens
taactttttatttgttcatggaactttctagaccgtaactacactgaataatgagaatctgctgtaatctttttaggtgctgtagatgagccattggattaaattattacagtatgtttcagactgctgtatgttgaaccctagtgaaatgcctctcaaaccttcataaggatcacaatctcatgtccttttttttttgttattaaatgcccagtatgtgttagcgatttaaacaaaattcaaatatttttttttttttttgagacagagtctcgctctgtcacctaagctggagagtgcagtggtatgatctcggctcactacaacctctgcctcccgggttcaggcgattctcctgcctcagcatcctgagtagctgggattacaggcacccgccaccacgctgggctaatttttgtatttttagtagagacrgggtttcgccaggttgtccaggctggtctggaactcctgacctcatgcgatctgcctgccttggcctcctgaagtgctgggattataggcgtgagccaccatgcccggcgttgacttcttaataataaccatactgactggtgtgagatg

SEQ ID NO: 109001 - DNA, 585 bp, Homo sapiens
taactttttatttgttcatggaactttctagaccgtaactacactgaataatgagaatctgctgtaatctttttaggtgctgtagatgagccattggattaaattattacagtatgtttcagactgctgtatgttgaaccctagtgaaatgcctctcaaaccttcataaggatcacaatctcatgtccttttttttttgttattaaatgcccagtatgtgttagcgatttaaacaaaattcaaatatttttttttttttttgagacagagtctcgctctgtcacctaagctggagagtgcagtggtatgatctcggctcactacaacctctgcctcccgggttcaggcgattctcctgcctcagcatcctgagtagctgggattacaggcacccgccaccacgctgggctaatttttgtatttttagtagagacggggtttcgccaggttgtccaggctggtctggaactcctgacctcatgcgatctgcctgccttggcctcctgaagtgctgggattataggcgtgagccaccatgcccggcrttgacttcttaataataaccatactgactggtgtgagatg

SEQ ID NO: 109002 - DNA, 609 bp, Homo sapiens
ttatacttcagaaacgaaaataytaatcttacgtgtttatggcggatgtttttcttataattttagttaaaaaatatttgtagaaggtttttatagtaatatagtcagaaaattagtctgcatttttacctacaaattaagcagtattttaaaaattagctcaagaaattttattttatattgtattttagtctgcatttgaatgatatttaaattcttagattttcactttagatgtgggaactccggtgcttaattctatcctctttaattttatatctgtgatttcttctgctttgttttcagttctatttttttcctgcactgcaaaagagtttctaaagattgtatttaatattacaagcttcatttagtgctctatcatttggcatttacatttttacatagttttaaaattatatatatttctttggattttttatctaattttatacaattttaaaaatcatgcacctctaatatctattgactaggtttagctttcatttcagagataacattaatagtgaaaaatattatcttaaatgcaaagatattcattatttaaaaattgatcaatgacattcactaaattatcacagggacgaa

SEQ ID NO: 109003 - DNA, 609 bp, Homo sapiens
ttatacttcagaaacgaaaatactaatcttacgtgtttatggcggatgtttttcttataattttagttaaaaaatatttgtagaaggtttttatagtaatatagtcagaaaattagtctgcatttttayctacaaattaagcagtattttaaaaattagctcaagaaattttattttatattgtattttagtctgcatttgaatgatatttaaattcttagattttcactttagatgtgggaactccggtgcttaattctatcctctttaattttatatctgtgatttcttctgctttgttttcagttctatttttttcctgcactgcaaaagagtttctaaagattgtatttaatattacaagcttcatttagtgctctatcatttggcatttacatttttacatagttttaaaattatatatatttctttggattttttatctaattttatacaattttaaaaatcatgcacctctaatatctattgactaggtttagctttcatttcagagataacattaatagtgaaaaatattatcttaaatgcaaagatattcattatttaaaaattgatcaatgacattcactaaattatcacagggacgaa

SEQ ID NO: 109004 - DNA, 514 bp, Homo sapiens
aaaatgccaaatgttttttctgcctcagaggaagtttatatatttttttcattttactcagttaatgtggtgagtttgaaaattcaaatacttgaaaaatcacgttcccatcaaacactgcttcttactgtscctttctaagaggactaccttcaacttgggcatttagaggatacttcccttcctatagctcaaggtttttttgtattttttttatgtttaaattttagtgatatttcttttatgtgtttttaaaatattttatgggctactgcattgacccatttgtttcaactttacagctctagttaaatataaaaattaataaaatgtcaacactcaagtattacatatatcccttgatctggtgatttaggactatgagaaaaatgctcaatttccctcgatagaaggaagtatgaacttttttatttatttattactgtagtctcacagcctaaaaatcagtaggtctccactggtcagcaagcaaatgatcatgattgtttttctg

SEQ ID NO: 109005 - DNA, 589 bp, Homo sapiens
tgctgcaggctacgggggtgggggaaagaggggagcatgggctgaataactacctactgggtactatgctcactaccagggtgcactgtacaaaagtaacaaatctgcatatgcactatctgtgtctgaaaaaaactgaaattataaaaaccaagagaatatgtttctaatgaacgtagactttatttgatggactggattagaatataatttttttaaggggaaaggcattgggggatgcacaatgtctacaggtttctaaacctctctggtttctcacctaattcatagtctcttatgtcattttcatagttttcatattctgcctttccacctcttctttttaacaagtaaaattcctcatagcatacaaaaaaacaattttataaaaaacccatattatagatcagggacctgtggattatatgctattagaactatacaaaatgtctctatatagttttctgtatctttggaatatctttgggtgaagctgcagaccttctyggtgagtgttacagctctgcgcagagccaaacagtgagcagcagcaagactgcaaagagcaaaagaacaaagcctccacact

SEQ ID NO: 109006 - DNA, 589 bp, Homo sapiens
tatagttaggttttgattgtttcttggtgctggagtggacctttcctagttagtctgatcctgcatcagaggtgaatggccagcaactaagagcagatgtcaaaacccttttagtcacatttaagaaacaaagaggttcagaaggagtggctctcaggataaatctgcctggagttcattgctaagttcaattttgtcagttccataggcattgactaccatttggaagttctggaccagtgttattctgttagatgcatcatttctgcagaggttggacaggaaacagataaaaagtttaaaaagaatgatgcggtacaaaattaatagtaacatgaaatattgtctatgaacatggacccaaaggcagccaactaatgaatcaaaagtctaygtgagactgagtgagatctgttgtagccataaagcctgtcttgctattttatgcaattaggtcttgacttccccagagaaatatattcaggtacagcatgtagttattagcaatggcacagacattcttgttcaaccagtagataattgagagttatctcatcctgtcctgttgtgttatctacggctactcagc

SEQ ID NO: 109007 - DNA, 510 bp, Homo sapiens
actaaactaacagcctactgttgactggacaatccttaacacatatttcatacgctgtatgtattttacaccgtagttttacaatgaagctagttacagaaaagaaagtgttattaagaaaattatagggaagaaaaaatacgtttacagtactacagtatatttatttctctcataagtttacaatccygtgtttacaagatggatccttcttctgaaatggcagcacacacagctgcaggcctcaatctagggtacctatcaagcaattcattgttttcctgtaatgtcaggacccttctctgtttcctggaagaactttcagcatcactagcagcactttttataggtctgaaggtgttattcaaggtttatggtattgcactagacatcatgaataatacaggagaaacatgagagaacactttttactgtgttaatttactggagagacaagctactcacaagaagatgattagcattatgtggcattttaagtgaatactcaca

SEQ ID NO: 109008 - DNA, 550 bp, Homo sapiens
ttaactaaatgctgtaaggactcaggaaatccattctttcaacaaaagttactgaagactttccccattagtatcctaaacaatgtctgcaaaattggttttcatacctggataccttgtcttctaagagacacggcagggaaagatcataggaaaaaagtcamtatcaggcacagctaacaactagcaaacccatagtctttaaaagactgatcctttgattcctatctctcaagtaaagaggtttaggtcatcttcatattacaggaaagtatccctaccaaaaacttctaactaatgactcttaggattcttccaaaagcaaatagtctttgggagaagacagcttccatcaaatgcctttggatcaagtgaatcactatatgagatatcggtatctgcaaaccaagatccacaaaaaaagatccattgtttgtcatatttaatctgtatatcttgagttttcattttcctagttaactttatctttttatgcttaaggttacatttaattactttacctataaagctactattcctaattcctcta

SEQ ID NO: 109009 - DNA, 556 bp, Homo sapiens
acttatttaactaaatgctgtaaggactcaggaaatccattctttcaacaaaagttactgaagactttccccattagtatcctaaacaatgtctgcaaaattggttttcatacctggataccttgtcttctaagagacacggcagggaaagatcataggaaaaaagtcactatcaggcacagctaacaactagcaaacccatagtctttaaaagactgatcctttgattcctatctctcaagtaaagaggtttaggtcatcttcatattacaggaaagtatccctaccaaaaacttctaactaatgactcttaggattcttccaaaagcaaatagtctttgggagaagacagcttccatcaaatgcctttggatcaagtgaatcactatatgagatatcggtatctgcaaaccaagatccacawaaaaagatccattgtttgtcatatttaatctgtatatcttgagttttcattttcctagttaactttatctttttatgcttaaggttacatttaattactttacctataaagctactattcctaattcctcta

SEQ ID NO: 109010 - DNA, 556 bp, Homo sapiens
acttatttaactaaatgctgtaaggactcaggaaatccattctttcaacaaaagttactgaagactttccccattagtatcctaaacaatgtctgcaaaattggttttcatacctggataccttgtcttctaagagacacggcagggaaagatcataggaaaaaagtcactatcaggcacagctaacaactagcaaacccatagtctttaaaagactgatcctttgattcctatctctcaagtaaagaggtttaggtcatcttcatattacaggaaagtatccctaccaaaaacttctaactaatgactcttaggattcttccaaaagcaaatagtctttgggagaagacagcttccatcaaatgcctttggatcaagtgaatcactatatgagatatcggtatctgcaaaccaagatccacaaaaaaagatccattgtttgtcatatttaatctgyatatcttgagttttcattttcctagttaactttatctttttatgcttaaggttacatttaattactttacctataaagctactattcctaattcctcta

SEQ ID NO: 109011 - DNA, 624 bp, Homo sapiens
tgcctgctttgtctttctccctggctcagacgctgacttctgcaccaggcagccctggctgtcttccctactcaagcttcacccatgaaaatttgcacctcgccatttgccagccccgcctgggctgcaggaagcaggagaaatagccaaacatacatctttccatcttccccttgggctggaaggcaaagtctctacctcccagtaccgaatgstgtgcatcacactccttcagcatgcaagaaactgatgaagagagttatccacatctgcaactggagaaataagaaggcttgagctgcccgaccctggatgctccatggctcatctggaacaaaaggtcttacaaatcctgggacttgaaagagagtgaaaaaagcattctcacagtaaatgatggctcatgtgtttatcacacgattcgccatggtgaaagtccctagtgtaggatccttacttggacagggtccctgtcatcactacctaagaagaggctgttatgggctgaactgtatccctccaaaatttgtgtgttcaagctctaagtcccagtacttcagaatgtgaccgtatttggtgatggagtctttaaagaagtaactaaagtgagatgaggtcattagg

SEQ ID NO: 109012 - DNA, 624 bp, Homo sapiens
tgcctgctttgtctttctccctggctcagacgctgacttctgcaccaggcagccctggctgtcttccctactcaagcttcacccatgaaaatttgcacctcgccatttgccagccccgcctgggctgcaggaagcaggagaaatagccaaacatacatctttccatcttccccttgggctggaaggcaaagtctctacctcccagtaccgaatggtgtgcatcacactccttcagcatgcaagaaactgatgaagagagttatccacatctgcaactggagaaataagaaggcttgagctgcccgaccctggatgctccatggctcatctggaacaaaaggtcttacaaatcctgggacttgaaagagagtgaaaaaagcattctcacagtaaatgatggctcatgtgtttatcacacgattcgccatggtgaaagtccctagtgtaggatccttacttggacagggtccctgtcatcactacctaagaagaggctgttatgggctgaactgtatccctccaaaatttgtgtgttsaagctctaagtcccagtacttcagaatgtgaccgtatttggtgatggagtctttaaagaagtaactaaagtgagatgaggtcattagg

SEQ ID NO: 109013 - DNA, 570 bp, Homo sapiens
gtgctctctgcttctaagacctcatgtaattagattgagctcacttggataatccaagataatctccttctctcaagctgtatatctttaatctgcaaaggctgttttgccacataaggtaacatgttcacagattctggaaataaagcattgggtatctttttggagggcattattctccctcccacaagagttacacatttttcccacactcactaggaggtgtgactcccagataataaggtcagcataagaaccacagagataccrtgaatttctccagatctttggtgacacacgagcctggagccccagagcagtcatatcctgaccccaaaggcacaaagttgtggttgactcgagcaggaacattgaggagacatcggtaactagaaggtctgtaatctagggggagggtgtggagatgtagagccaagaggccaagaccctgaagttgtcagatcaatatggattcaaatgacacctcttacacttgatattgaaaaagtcaataagccctttgagccttggttttcttagcttttaaaatggaggtaatgaaaatagcat

SEQ ID NO: 109014 - DNA, 570 bp, Homo sapiens
gtgctctctgcttctaagacctcatgtaattagattgagctcacttggataatccaagataatctccttctctcaagctgtatatctttaatctgcaaaggctgttttgccacataaggtaacatgttcacagattctggaaataaagcattgggtatctttttggagggcattattctccctcccacaagagttacacatttttcccacactcactaggaggtgtgactcccagataataaggtcagcataagaaccacagagataccatgaatttctccagatctttggtgacacacgagcctggagccccagagcagtcatatcctgwccccaaaggcacaaagttgtggttgactcgagcaggaacattgaggagacatcggtaactagaaggtctgtaatctagggggagggtgtggagatgtagagccaagaggccaagaccctgaagttgtcagatcaatatggattcaaatgacacctcttacacttgatattgaaaaagtcaataagccctttgagccttggttttcttagcttttaaaatggaggtaatgaaaatagcat

SEQ ID NO: 109015 - DNA, 590 bp, Homo sapiens
gggtccactgaggatcatatttgctactggccctttcaatcatcgtgatcattttcatctctgagggtcccttagttgatccaccccagatgcccagggagcgaaagctattaagcatctaattccaaatggaccaccatctgggtgggctttcaccctaatctgtttctagtcttcagtaaccccacagtgaccatgcaaaacctgccacaaactgccaaggcatatatggctcctctgccatcggcccacaggctccaggaacacctgcctccagaagacctcgtgggagagggcagtgaacagccaagacctccctcttgctccaagacctccctcatccttggaccacagcatctgccttcagcttttcaaagcaggggctcagacacagacccaagatccatcaatgcccccagagtaattcatcattrccaaattccaggcatgtgcaaaagaaagccatgatgcatctcacccttatttagtgttctcgttctttccctgacacatgcaggtcagagtctgacaactctcctttgacacacaagtctagtctctggctcaaggtcacatacgctgcagattct

SEQ ID NO: 109016 - DNA, 535 bp, Homo sapiens
ctctgccacttcctcagatatgtggctgtaggcatcttatgaaacctcaaagactcaccttcaccatttaaacagtggaagcaaaggactggctcctcactgggttgtcacaaagattaggtgagaaattctatatgtggtgcttaagcacagcacctgctaaatattaaccctccacataaatattacctattactatacctatgtcaaaattataaattattgacatttagctggctctgaaggtcccaattatagttgacaatgcctgggaagaggttggaagaaggtgcagaaaaatgcaaaatgcagctgagctaaatttcctcatcctatctggacacagtttaaagctgtcatctcattcttgactttgaatcttagagaaacaagggttacagcagccttttcagaagaacttcaaggytcaacttaaatcgaatgtagacttaatagcaggatgcctaccttcaaatcagcaggtaagataaaagcaaatttaacagactctacagagcaaagaacagagaaaaca

SEQ ID NO: 109017 - DNA, 599 bp, Homo sapiens
cttttctacctctgacctggaagcctcctctcccagtgtctccctgtcttcctgcctttgcttcaagttctcccgcctttccagatgaagaaaccaatgttcaccttgcatatgcattgatgtcttatgtctccctaaaatgtataaaatcaaactatgctctgaccttgggcagatgtcgtcaggacctcctgaggctgtgtcacaggcctgtgtcctcaaccctggaaaaataaactttctaaattaactgagacctgtgtctcagattttcggggctcacagacatattcwtgtaatcttgtgagcgtttatgtgcccacctatgaatagccacatccagatgtatcaatctttgtatctatagtcacatagaataaagatgtaggaggtggaaaaaaataaacactccatcctacaggttaacagaaggccaagaccatggccaatcaaagcttcctgagcaatggacagagggtgtggggtcagaggtggggttctgggtgcatgatgagttcccaatgatggcgccagtaaaacctacgtggaccaacattgtgcaaagctccaagccaaggccatggctgaccaaagcctca

SEQ ID NO: 109018 - DNA, 578 bp, Homo sapiens
tgtaacagtaaagagagttcagtggagtagaataatcttttcaacaaatggtgttgaaatagttggacatccatgtgcaaacaaatgaattccaatctgtatctgtggcatatacaaaaattaactgaaaatgcatcatacattcagatatacaacctaaatctgtaaaccttctaaagataccataggaaaatctgtgtgatgttggtttaggcaaaaatttcttagatatgttgccaaaaacaagacctattaaaaatggataaattttaaaattggcaaattgaacttcatcmaaattaaaaactctactttgaaaaacagttaagagagtgaccagcaacatatttggagaaaatgtctgcaaactatatatctgataaaggacttatgtgtagaatgggtaaagaactctcaaaactcgataataagacaatacccaataaaacaatgataaaatatttgaacagacattttaccaaattagatatacatggcaaataatcacatgaaaacttgttcaacatcattaatcattagggaaatacaagttaagaccacaatgagataccattata

SEQ ID NO: 109019 - DNA, 578 bp, Homo sapiens
tgtaacagtaaagagagttcagtggagtagaataatcttttcaacaaatggtgttgaaatagttggacatccatgtgcaaacaaatgaattccaatctgtatctgtggcatatacaaaaattaactgaaaatgcatcatacattcagatatacaacctaaatctgtaaaccttctaaagataccataggaaaatctgtgtgatgttggtttaggcaaaaatttcttagatatgttgccaaaaacaagacctattaaaaatggataaattttaaaattggcaaattgaacttcatcaaaattaaaaactctactttgaaaaacagttaagagagtgaccagcaacatatttggagaaaatgtctgcaaactatatatctgataaaggacttatgtgtagaatgggtaaagaactctcaaaactcgataataagacaatacccaataaaacaatgataaaatatttgaacagacattttaccaaattagatatacatgkcaaataatcacatgaaaacttgttcaacatcattaatcattagggaaatacaagttaagaccacaatgagataccattata

SEQ ID NO: 109020 - DNA, 578 bp, Homo sapiens
tgtaacagtaaagagagttcagtggagtagaataatcttttcaacaaatggtgttgaaatagttggacatccatgtgcaaacaaatgaattccaatctgtatctgtggcatatacaaaaattaactgaaaatgcatcatacattcagatatacaacctaaatctgtaaaccttctaaagataccataggaaaatctgtgtgatgttggtttaggcaaaaatttcttagatatgttgccaaaaacaagacctattaaaaatggataaattttaaaattggcaaattgaacttcatcaaaattaaaaactctactttgaaaaacagttaagagagtgaccagcaacatatttggagaaaatgtctgcaaactatatatctgataaaggacttatgtgtagaatgggtaaagaactctcaaaactcgataataagacaatacccaataaaacaatgataaaatatttgaacagacattttaccaaattagatatacatggyaaataatcacatgaaaacttgttcaacatcattaatcattagggaaatacaagttaagaccacaatgagataccattata

SEQ ID NO: 109021 - DNA, 478 bp, Homo sapiens
gtttggaagtggatgtctgaaggaatgtagtttgtgagttactgggaaggatggaagcagtgtcatctgagatgggagggaatcttgcaggcccaggtgtggatgagtgtggctcataacttgcacaatgaactgaggttgctggtagatgtttgcatgtgtatgtgtgcgcccatgtgcacagatgcttgtattttgcatattgctcaatgtctcagcccagctggttacagctttctktgtttacctactgtttctcgcagatgaaatcatgtataagcaaatgcaaaatgttatgctcagattgttccctaatatatcagttacactggaacaaattcacatcttccaaacaagcatcactgcagaaccaactgtgcagtgttgcgagaggggctgtgtggagaagctttctaaaggaggtttctggaggacattgtagggtaggactgaactgtaggatctcaagagcacccaa

SEQ ID NO: 109022 - DNA, 541 bp, Homo sapiens
ttaacatctaaagcccatttcatttctttctttttcttcaaaaatatcttgaaacatcatttgttttttcttcattagaaagaggaaatggtgttttatcaaaggtaaatagacttgaacgctgatgggttgaagttctgttcmccactcaaagcccataagtttgattaggtactaaacttggcacagagagtccttcattcaccctgtcagccaagtcacgccactggtctcaacttttggaaaattaattacctacatgttgcttgtgaagcctgtgggtagctgacttatttgatcacagcttaagcaaataggaatctactcttcattcaaattcagctaaaagtaactgagatgttaaatctactgactctattttaaaaccagatttgaaaaagattttgttcaatatctgtggagatgaaatcttatggctagaaaagaataaatgacatgttttatattagacatatgtatttgtatcaattaaattattgaactttggttgttttaggaactaaacttaagagaagaattc

SEQ ID NO: 109023 - DNA, 584 bp, Homo sapiens
catttgcccatgcatgttgtgcgtttagacgttcacctgcacatttatcagacaaaattcaaacgaagcaggcagaactgtttgctactccagctacaacaccctgacattttagggaggttgaaaaatctctagtcttagcagagaaaattctaactcaaaatgaatgtccaccagagggcaaacgtgttatctttattaggtttggaactctcattttgaactcttttgagtgagacttctgcaaatagctccttcctaggtgctgctttctttttggtttttattgtcttcagtataatgaaccctgtaactcatgccacgtggataacaggactgcacgattgtttctttacggttgttttggcactggtaagggtagttcagaagattaatattttcaaccaaaaaaaagtaaatataaaaacaataatgataatgagctgtcatttattaagcacttrctgtatgtaaagcctttcattcatcattttacattatcttgttccgtctacagggtaatcttgtcaggtgggtattaatactattactcccacttaaaaactgccaaagctgaggcttgg

SEQ ID NO: 109024 - DNA, 423 bp, Homo sapiens
ggtgaaagagcaagactccatctcaaaaaaaaaaaaaaagtaagataaatatccagccaaggggaatgagtttcctatgctgcatccatacaatggaacagtatatagttatttaaartattacacttcggaaggacatttatagcatgaagaaattctcatgctatcttaagacaaagcaggttacagtgattccaaatttccaaatatgtgtatacacatagagaaaaaaggctagaaagtgttagcaatagttatctatggatattggaatcacagttgaattctgaacttctttttatcctatttctgtagatacatatacatatatatatatataaacgttaaagaagaacttcttggttaattaaaagcttgcatgcacatgtgtgctcgaaggcacaaaactctggacagacagat

SEQ ID NO: 109025 - DNA, 423 bp, Homo sapiens
ggtgaaagagcaagactccatctcaaaaaaaaaaaaaaagtaagataaatatccagccaaggggaatgagtttcctatgctgcatccatacaatggaacagtatatagttatttaaagtrttacacttcggaaggacatttatagcatgaagaaattctcatgctatcttaagacaaagcaggttacagtgattccaaatttccaaatatgtgtatacacatagagaaaaaaggctagaaagtgttagcaatagttatctatggatattggaatcacagttgaattctgaacttctttttatcctatttctgtagatacatatacatatatatatatataaacgttaaagaagaacttcttggttaattaaaagcttgcatgcacatgtgtgctcgaaggcacaaaactctggacagacagat

SEQ ID NO: 109026 - DNA, 423 bp, Homo sapiens
ggtgaaagagcaagactccatctcaaaaaaaaaaaaaaagtaagataaatatccagccaaggggaatgagtttcctatgctgcatccatacaatggaacagtatatagttatttaaagtattacacttcggaaggacatttatagcatgaagaaattctcatgctatcttaagacaaagcaggttacagtgattccaaatttccaaatatgtgtatacacatagagaaaaaaggctagaaagtgttagcaatagttatctatggatattggaatcacagttgaattytgaacttctttttatcctatttctgtagatacatatacatatatatatatataaacgttaaagaagaacttcttggttaattaaaagcttgcatgcacatgtgtgctcgaaggcacaaaactctggacagacagat

SEQ ID NO: 109027 - DNA, 609 bp, Homo sapiens
gatgtccatctactttcctttccttttgtgcataggtatctgcttctgtattattatgtttgcacactatgtcacaaaaagttttaaaaaaatagaaaatttttattttttattgcagattggtattgacatgaaaattattttttcatctttggctaagtgaaagtaaaattattgctagttagatgtttcatatgatgcagtaaacttccagttttagcactaaaattcttgtgtcccaggcaaactaggatgattggttactctatattttgctcacccagcacagtacagttgaagttgtaagattagagtcacatagcctgatattggagatgttttcccctttggacaagtaaccttttwtaactcacttttcaactcactgtctctgtttcctcatttgaatattatatatttctcattggcatatttaatttcctcatttgtatcttattattgattttattatatataggtatattattatagcctcctccttagggtggtgagatgaaaaggataatgtgtttaaaacagagaatagaaccaaatactgaatattgagtcacccaataacagctaattaaatgaatggctatatgttga

SEQ ID NO: 109028 - DNA, 363 bp, Homo sapiens
acttcatgtcaaaatagtttatattttttaaaataaatatttagaaagattgataaggcaacaacaacatgcttgtcactaaaagttcagacatgttatcagcatattaaaaatgttaaaaaaaagatccagcctggtcacaattcttctttatagaagggtcatgtatccaaatttagagccaaaagaagagaagcccttaaaacacaattccataactaccaattaytccacttctcccacggacctcacttttcctggtttttatctaactcatcaatacacacatcttccacatgtctttcttcacctgtcttcccagcctgggtcacatggtccaccatttaaagaatacacattggc

SEQ ID NO: 109029 - DNA, 646 bp, Homo sapiens
ttttgactaacattccttactaagatgtgatgaagagtaactgaaatactgtatatgaaaacatgttgaaaactccaaggtgctatatgaatgctagttggcattgacagctattcctcattctctttttggtcatagccacggaagccctagtctggcaggaaagaagagtcattaggcatcatctggcaacttggcttggagaagtcagatcagtcaccaagagtctggtggggctgcagcaatggctagaaagaaccagtgacatgrttgccaggtaggtgccagtgcaagtcttgagcctgcccagacattactatgtactctgtcctccatcctcctagcatatccaccttagccaccaccttgttgatgatctttgcctgaactactcatctacgccactgtgtgaactctatcaataacctcaaagtggtattttatcacctttaaattatacccaaagtcatgctcacatgaattagaagggttagggctctcatctcagttctatctcctccttacccagttagaggtggaggtttctctgtccaggaagtaggtactgcagagtccttcaggataactagggtctgatatgagagaatatgttcctccttacttcattgagcaacctttccagagg

SEQ ID NO: 109030 - DNA, 457 bp, Homo sapiens
aacctcaaagtggtattttatcacctttaaattatacccaaagtcatgctcacatgaattagaagggttagggctctcatctcagttctatctcctccttacccagttagaggtggaggtttctctgtccaggaagtaggtactgcagagtccttcaggataactagggtctgatatgagagaatatgttcctccttacttcattgagcaacctttccagaggcattgagttcccctttgccaggtgttgggcagaagtctggccagggytgcatggaggattccaaggcttgggcctgactcagggcttctgtcctattgaaccaaacttgcaacctcaagacacttctctcctattttccatcctcctagtctctacttcctctcccctaagcaaactcattttgacagataatttcaaggaaaaaagaagatgtcaaataaacggtttaaaaag

SEQ ID NO: 109031 - DNA, 483 bp, Homo sapiens
tcctgtgttgttcacctgtaatgaatgagcttaaaaagaggctgatgattgaaactttttactatttcaaattgagaaagaaatgagattttctatgctattacattattcttctattagaaaaacttccaaagtaaactatatcaggaggccatagtccaattcttcctaaattaaagttgatagaagcacagaatatttttgagttggaatgtatgccagagttacttagtgatttataagtgggaaaactgagaaccaggaaggttagatacctaaatcttacttgtttgggtttataactatgccctaagcttcttcakcatatcaggatccgtggtattgtgttatcaccctcagtcgttttgtgttttgtcttttcagccataaaaaaattttgtttagggacagagacaaataaatcttttccttggctgaacttgaatgtaccatttccactcaagattctagaaaatcagattt

SEQ ID NO: 109032 - DNA, 597 bp, Homo sapiens
gaatgacctttacatatttaaaggttgaaaaatgtcgaaagamggatattatttaatgacaagttgaaatgtgaaactcaaatttcagtgcccataaatacaattttattagatcacaagcacaagataatttgtttatgtattgtctaagactgcttcctcactaaaatcatggagttgagtatttgctacacacaccctgtggctcttcaaagcctgaactctactctttggccatttaaagaaaaatttgctaacccctgatctcgttgagcttcttcacacagctaggaagttcttagagctttggtggccagtacaactgaacaatgtcttacaaattgttctcaacagaactaaaatcagaacccagatgggctgaatacactacatctttgtgtctcttttatcctaacagaatcacatatccataggatctggtgctagaagagtttgaaagttagaaaattacccactatttgtcttactatatgtaatcatttttgtggggtatgttggtttactattttgattacaacaacacatatttttgatagtttttattatctctgatttagaaatgaagaaactgaggac

SEQ ID NO: 109033 - DNA, 440 bp, Homo sapiens
taaaggttacttagatataaatttttggttgttattagttaaaatcttgtgtcaattagataaaggcccaccaacagtgcattgtactaattggccatgagcgagatccttgaatcatcaaaagtcagtggtattttaaaataatacatgcagcatttcctttaacgtaaatatgaagtagaatttcttctgcttttttaggttattttttgttttctatttgttctcaaattactcatttcaaacaagtaaaaatatgacattctttgcgctgatgatgaaaactagaatttgttgttcttccagaaaatgtttttttgttagtttgtgattyacaaaacatttctagaaaagcataggatctaaacatgtgttcatatcttaccagtgaagttttcagttttttagccgtaaaacaaacattgatataattgaattaa

SEQ ID NO: 109034 - DNA, 447 bp, Homo sapiens
atttacttaaaatttacccgagaaacagccttccttacgtgccacccacccgagtgctatcaaccaaaaagtctgcagagtttttgatgtcctcttttctcartgtgtaattttatacaggattttcctcattttcatattatatttgtcatttcaaagatgataatggaagtgagtcagacacatgtcctcaaattggcaccttttcaggaatcccgtgtgtgtgtgtgtgtgtgtgtgtgtgtgtgtgtgtgtgtatgtgttcaatgttcagtatcacattttaaaagatgtttaatgttaatatcacacaaatatccagactcaaaaaataaagcataatatctgaaacctactttttaattttctttcaaaaaattctcttctattcttatttaataacacagaactactcttctccaggcataactagctttatgtgatgcc

SEQ ID NO: 109035 - DNA, 539 bp, Homo sapiens
agtgctgtgaggaatacaacataccatatccagtacccgacaccaatcacagacaagacaataggacaccgtttttcactgaaatgcaacttaaaacctggggagacagataagataaagaagacaatattttaaaaacatcttatgaatacaataaataccattcaatagatgctcaaaagaaggttgtggctagaggaacagaataagcttaatgaaggacaggctataaggcacggtatcaatctgaygatggccttcatcaactctcccttcttgtgacatgatgaaaaaaccttggttttcagagtaggatctggttttgaccaccactggctgtgcaagttagaatacatttcttatcctctgtgaaccagttttctaatctgtaaagtgggctttagggatataaccttcctctgatctcgaccattccttaatccttagcagtctcgtttcatcccactcttggtcactggaattagcgctacagcaatcgcctcctaattgtcgctttttgattatcaaattaaacaaag

SEQ ID NO: 109036 - DNA, 595 bp, Homo sapiens
gagggtggcggagtagaaagttagaatgagactgggtccctggtaactccaccaaatcaacctgagtcacctaccttgtrtctttaagtgtgagagagagaaataaatttttacactatttaaaccaattttatttttatgctttttaaaaaacatgcagccaactgtagtctgaaatgaagcctgctcccacagaaaggacataacctgtatttgcctcatccctctactcagtaaaatgtagcaacatctgagaattgtatttgtatggaaagagtgggtgttgaggagatatgtaatcatgcaagcgttatcccacttaatttggtctgaaaaatatagcttagtaaaaaggaatgttctgcttatccagctcaacttactcaaattttctgcattgggatttatggaaaatccaatttaaaaacttctttttttattagcagtcttcctgtggatgggcaacaggatttgatatttctgggtttcttttttataaattcatttaacattgtagatgcctcctgtcctctccatagacccagagcgtcccacctgatctccttacccgtagctgattagagctctagcatct

SEQ ID NO: 109037 - DNA, 255 bp, Homo sapiens
gcttcatagggtatcgtagcatcttataaaaagtggcctatcaaatgattgattcaatcatttaaaatgcattagcagaggatgcctatcagactaagacatccrtgtttctgatccagtgaaaagggtccaggtaaggaacacatattaagcctcttggcatccttgtgtgagcaccgtgcatgacgtggccatcagtatcattgttttctttgagttttgcttgagtgttgagatgtgtgagggatagaagat

SEQ ID NO: 109038 - DNA, 594 bp, Homo sapiens
  misc_feature (1)...(594): n = A,T,C or G
gtttagcatgttatatgcttaacttcatataccttctaactcttgaatcaaatactgccactgaaaatttttttaatagataaataacccaaggcttagcagaagtgaaataatttgctcagaaactttcacaaagcttttagcccagaccaggctactcttccactgctgttcgtgatcggaatgaaaatcaggaggtgcttacattgctaaaattttctgaatatctgaggcagattttcttttaagtcccaaggaatcgttgtgacattcccagggaaatgmaaaaacctgaagttttaaaacatatgcatactttcaatttaactgccccaaatcatctgaattgattatgaaaccagcccaatatccccatagaagtgaagtttatgggttaaaaaaaaataaacatagaaatagacccctctggtcttaaaacttgagaaacttacatttgtcttatctgagttcctttcttaggaaacccaccatcaggcctcccagatagtatcaaagaactgaaacttattagatcactgcatttggacaatgagatgccagacccctccctaatnnnnnnnnnnnnnnnnnnnn

SEQ ID NO: 109039 - DNA, 389 bp, Homo sapiens
gctactttcattttcttttctaaccactgccctagaagaataacacctcacattctctggtagactgaagcctgcagctgcaaggatgctcagaaaaccagacttctattcattggccacttgctgcackttctgtccctcgatccttgcaacgtacctttgaggtaggcataaaaatccccatttacaagtgagaaaaccaaggcaaaagaggttcagtttatttcaggctcaaatgtgcttccagtagcttatagcctctacagctagtgtttgaacccaggtctgagacaaataggattgacaaggggagggaaaagaggaacagaaattcttttctataagacaattgtttatgcagccaggatttcttaacatccagtttgtgc

SEQ ID NO: 109040 - DNA, 389 bp, Homo sapiens
gctactttcattttcttttctaaccactgccctagaagaataacacctcacattctctggtagactgaagcctgcagctgcaaggatgctcagaaaaccagacttctattcattggccacttgctgcactttctgtccctcgatccttgcaacgtacctttgaggtaggcataaaaatccccatttacaagtgagaaaaccaaggcaaaagaggttcagtttatttcaggctcaaatgtgcttccagtagcttatagcctctacagctagtgtttgaacccaggtctgaracaaataggattgacaaggggagggaaaagaggaacagaaattcttttctataagacaattgtttatgcagccaggatttcttaacatccagtttgtgc

SEQ ID NO: 109041 - DNA, 617 bp, Homo sapiens
tagtgtcttagaaaacccttaagcagacagtccctgagaaasagtgtgttatccaatgttaagaaaatatctatgattgattctttactacttcatgatagggaagttatgccatgtagtgatggtgtggagggtgtttttggaagataactttgtgatatgctctgaggaatgacagatcttttatcctttcaatatagtaaaagttcttaaagaaaaacctgggaactatggagatctttttttttctgctttgaggagaatattaacccatttttgctgattttagtaacttcacagagaagttttttaaaaaatttcatatggatgggggtctcactatattgcccaggctggtctcaaatcctggtctcaagtgatcctccagccttggcttcccaaagtattaaggctgtaggggtgagcactgcacctggctaagactccattcttaaagcattgtgaatgttttcattgttataatttatttataacaatataaaatataaattaaaaataaaattataacaatttatttataattattataaataaatttataatttaataaataaataattccctttccttgagtgacaagggaaatggttgaggtc

SEQ ID NO: 109042 - DNA, 617 bp, Homo sapiens
tagtgtcttagaaaacccttaagcagacagtccctgagaaagagtgtgttatccaatgttaagaaaatatctatgattgattctttactacttcatgatagggaagttatgccatgtagtgatggtgtggagggtgtttttggaagataactttgtgatatgctctgaggaatgacagatcttttatcctttcaatatagtaaaagttcttaaagaaaaacctgggaactatggagatctttttttttctgctttgaggagaatattaacccatttttgctgattttagtaacttcacagagaagttttttaaaaaawttcatatggatgggggtctcactatattgcccaggctggtctcaaatcctggtctcaagtgatcctccagccttggcttcccaaagtattaaggctgtaggggtgagcactgcacctggctaagactccattcttaaagcattgtgaatgttttcattgttataatttatttataacaatataaaatataaattaaaaataaaattataacaatttatttataattattataaataaatttataatttaataaataaataattccctttccttgagtgacaagggaaatggttgaggtc

SEQ ID NO: 109043 - DNA, 530 bp, Homo sapiens
gtggagcagaagaaagagagagggaaggggaagtgccacacactttttaaccatcagatctcgtgagaactcactattatgagaacagcaagggggaattcgcccccatgatccaatcacctcacatcaggcccctcctccaattcaacatgagatttgggtggggagacaaatccaatccatatcaattaatatagatataactcatttttttctaatggttgcataattattcaaattatgaacatataatttattcagcaatgtatgtattgatggatattaggttatcttccattatttttatttgtatgtttgttttgttactattgtgtttgttgccacaacaaaaatgmtgcaacaaacacatttgtaagtgtatccttatttcttagtcccttaatttccacgggatagattcccagacatgaaattgttgcatcatatgcatgtttttttctctccataaattctgtaacagttcaatttcttttagtaatgtgagagagtgccctttccctagcaaaaac

SEQ ID NO: 109044 - DNA, 565 bp, Homo sapiens
tgaatgctcaaataaactctttaaagtttaaatgtgtgatttttttttccttaaaaacaatctgtcctagtgttaccatcaatactattggaccaaattttgtatagtcagatacttctttggtctctggacagcctrtgaatgagctgatcttggcttatgtgcctactctgcacctgttagctgccattccttgctcatttgccaagtctggatggatgattctacttcttgaacacttttcctcttcattcattctgtttccaggtttcacctctgtttcactattgtaacagtaaatttaccatactctgtttcaccatgagaacagtcaaagatatctttcagccttggtcttgcttcatttgtcatagatcatgtcaccataacctttctaagatacacatatgatgacatcacatccctgcctaaaacctttcaaaaactcgccatcattttttaagtagaatgtcaaacctcctttgcttaccaatgtcatctcccattactatcgctccagcattcatctcttggctcttcatttgctctttatattcaatcaagg

SEQ ID NO: 109045 - DNA, 565 bp, Homo sapiens
tgaatgctcaaataaactctttaaagtttaaatgtgtgatttttttttccttaaaaacaatctgtcctagtgttaccatcaatactattggaccaaattttgtatagtcagatacttctttggtctctggacagcctatgaatgagctgatcttggcttatgtgcctactctgcacctgttagctgccattccttgctcatttgccaagtctggatggatgattctacttcttgaacacttttcctcttcattcattctgtttccaggtttcacctctgtttcactattgtaacagtaaatttaccatactctgtttcaccatgagaacagtcaaagatatctttcagccttggtcttgcttcatttgtcatagatcatgtcaccataacctttctaagatacacatatgatgayatcacatccctgcctaaaacctttcaaaaactcgccatcattttttaagtagaatgtcaaacctcctttgcttaccaatgtcatctcccattactatcgctccagcattcatctcttggctcttcatttgctctttatattcaatcaagg

SEQ ID NO: 109046 - DNA, 553 bp, Homo sapiens
ttaacttttagtgtgacaattttcaaacataaaaaaagtggaaagtttgatctgttccccagctccctcactttttggctagaacacattggcgaatcccaaacatcatgtcatttcactcctaaattactttagtttgtaccccctgtcataaacagaaagggagagagagagaaacattttcttatgtaacaatgtcattatcacacttaacaaaattatcaataatttaagtcatctaattcatagtcaatattcaaatttctgtatgtgtttttgtagtccttacttctaatatttattgcacacataattgaggtcaggcttgttttakgtgctggggccatggtgaggaatgctatggacaggacccctgccctggtggggcttatgttctcgtggttcataagctatgaaggccagtccttcccacagcctgggggacaaggccatcttggagctgggcttggctcagtgaagctgctgggttctggggtaactcccatggtggttgagtactcccaagactactaaaacagtcaggcccgggttg

SEQ ID NO: 109047 - DNA, 521 bp, Homo sapiens
tgaattcagattaagactaatttgtattgatttttaaaatctaaattgcatgttcctctaactacattcaaaagacagaactaagttttatattattgtttaagccctttggaaaacttaagcaaataatatttataggtgaccccagtctgcactgagaaagatcatattacytttagtgctttacatttgatgtggtgccctaggaattagatggtccactttacatatgtattacttgaaaccctacctttcctcatcccccgcactacaccagaagaacaggagtggagagagggaaaaaaatttgtgcttgggtaagattaaagatgagaaattgttcacaggcaagttctggtttttaccttggtgcctagaacagcattcagcacagaatagacacaataaatattgattaataatattggtaatctacactaatggaggggattgtgacatagttaaccaatgtttatgaatattttgacatgaacacattagctgtttctatctgcacattt

SEQ ID NO: 109048 - DNA, 468 bp, Homo sapiens
ttaaatatttctaaataggaatatttattatttaaattcatttaataatacattctttttctccttgagacaataagtatttactgaacacccaccctacgccaggtactgggttcaattaacacaacaataataattaataccaggtaaaaagctatgttgttaaaacctttcagtgttaaatgattaataataattggaatawcactttttaacagagcattggtctgaaattcagtagctagttaggattagggaagtcaatgagccctctcactcaattttgccatttaaaaaaaggatcaactataatatgattgtcttttctatttcatagactatgtagaaatgttttatatgcaaaagataatattacttttgtttccatttataaaactcaacatttcataacattaacaaccccgaaatgagttatattatatgtgactctggggattttttcataat

SEQ ID NO: 109049 - DNA, 468 bp, Homo sapiens
ttaaatatttctaaataggaatatttattatttaaattcatttaataatacattctttttctccttgagacaataagtatttactgaacacccaccctacgccaggtactgggttcaattaacacaacaataataattaataccaggtaaaaagctatgttgttaaaacctttcagtgttaaatgattaataataattggaatatcactttttaacagagcattggtctgaaattcagtagctagttaggattagggaagtcaatgagccctctcactcaattttgccatttaaaaaaaggaycaactataatatgattgtcttttctatttcatagactatgtagaaatgttttatatgcaaaagataatattacttttgtttccatttataaaactcaacatttcataacattaacaaccccgaaatgagttatattatatgtgactctggggattttttcataat

SEQ ID NO: 109050 - DNA, 613 bp, Homo sapiens
aggtaaccagctttttcattggatggccccaaaatattatttatgtaagtctattcacctatgcttttaactttttctagaatactcttcaactaactgtagtctgcacttacatatccagttcccagcatgctgagattagaatgcgggaaaaagactgggaaatttcaccattcagaatgcacaatttaacttgttctccctgttttccgtctcgtatgtaattcctgccacccagtgtgccttgtgtaccatgtccaaaactacttctgttcaatttctctaatgaagaaccctcccattatgggtgagtgcttcaattcacaggactggagaaagaacttggggccatgactggtttaggctttcaacccatccctaagtaaaataagtayatttggatggttttcctttcattgatttatttattagttacataaacatcgattgagtgccaatgataaaacctgtgtactaagtttatttattagttacataaacatcgattgagtgccaatgataaaacctgtgtcctaagtatgtaaattttgtacatgcaatgttgcaatttgtcctgtaggtatatgcacacgtagaaacattaaagaatctt

SEQ ID NO: 109051 - DNA, 557 bp, Homo sapiens
aaaaaaatgaatgaaagttgtgaaaccaattaatgattctgctaatgtcaagtgaagataaaaaacttctaacaagtgttattgattttattaacataatattttttaagagttaaaagtcatatckcaggtatggtaagagtagttcctttagctgaaagcagtagaggcccatataatattatataagtaaggtctaatttttaccaattatgtctccagtttaagtagactatctactatcatatgttgcctccctgtcactgagagatatccttgtcatttcatttctttttctcttttagcgatggggtcttgctttgtcacctgggctggagttcagcggctgagcatagctcactgcagccttaaactcctagcctcaagcaatcctcccacctcaacttcccaagtagctaggactacaggcatgtgccaccatgcccagataacttgttttatttttgtagagatggggtcttgctatattgcctaggctggtctcaaactcctggcctcaagcattcttcctgcctcatcatttcatttcttaatgc

SEQ ID NO: 109052 - DNA, 518 bp, Homo sapiens
  misc_feature (1)...(518): n = A,T,C or G
cacacctgtagtcctaactacttgggaagcgggggcaggaggagtggttaagctcaggagtttgaggctgcagtgagctatgattgtgccactgcactccagcctgggtgacagagggagaccctgttgaagaaagaaggagaaggaataagaaaggaggagaatgaggaagaggaggagaaggaggagatgaagaaggagcasaaggaggaggaggagatgaagaaggagcacaagaagcacaagaagcacgaggaaaaggaggaggtgaagaaggagaaggagaagaagaatgaggaagaggaggaaaagtataagggaaggagaaagaggagggggaggggaagggagggaggggnccgggaggcagaagacttacactgcttacacagagtgtattttgagaggaaaagaaaatataggatataatgccgctgaaaatctccaagggagaggcaaagagagagaaaattgtgaaacacattgtgagaatcactaaaagtctctgatttacaaca

SEQ ID NO: 109053 - DNA, 518 bp, Homo sapiens
  misc_feature (1)...(518): n = A,T,C or G
cacacctgtagtcctaactacttgggaagcgggggcaggaggagtggttaagctcaggagtttgaggctgcagtgagctatgattgtgccactgcactccagcctgggtgacagagggagaccctgttgaagaaagaaggagaaggaataagaaaggaggagaatgaggaagaggaggagaaggaggagatgaagaaggagcacaaggaggaggaggagatgaagaaggagcasaagaagcacaagaagcacgaggaaaaggaggaggtgaagaaggagaaggagaagaagaatgaggaagaggaggaaaagtataagggaaggagaaagaggagggggaggggaagggagggaggggnccgggaggcagaagacttacactgcttacacagagtgtattttgagaggaaaagaaaatataggatataatgccgctgaaaatctccaagggagaggcaaagagagagaaaattgtgaaacacattgtgagaatcactaaaagtctctgatttacaaca

SEQ ID NO: 109054 - DNA, 518 bp, Homo sapiens
  misc_feature (1)...(518): n = A,T,C or G
cacacctgtagtcctaactacttgggaagcgggggcaggaggagtggttaagctcaggagtttgaggctgcagtgagctatgattgtgccactgcactccagcctgggtgacagagggagaccctgttgaagaaagaaggagaaggaataagaaaggaggagaatgaggaagaggaggagaaggaggagatgaagaaggagcacaaggaggaggaggagatgaagaaggagcacaagaagcasaagaagcacgaggaaaaggaggaggtgaagaaggagaaggagaagaagaatgaggaagaggaggaaaagtataagggaaggagaaagaggagggggaggggaagggagggaggggnccgggaggcagaagacttacactgcttacacagagtgtattttgagaggaaaagaaaatataggatataatgccgctgaaaatctccaagggagaggcaaagagagagaaaattgtgaaacacattgtgagaatcactaaaagtctctgatttacaaca

SEQ ID NO: 109055 - DNA, 518 bp, Homo sapiens
  misc_feature (1)...(518): n = A,T,C or G
cacacctgtagtcctaactacttgggaagcgggggcaggaggagtggttaagctcaggagtttgaggctgcagtgagctatgattgtgccactgcactccagcctgggtgacagagggagaccctgttgaagaaagaaggagaaggaataagaaaggaggagaatgaggaagaggaggagaaggaggagatgaagaaggagcacaaggaggaggaggagatgaagaaggagcacaagaagcacaagaagcasgaggaaaaggaggaggtgaagaaggagaaggagaagaagaatgaggaagaggaggaaaagtataagggaaggagaaagaggagggggaggggaagggagggaggggnccgggaggcagaagacttacactgcttacacagagtgtattttgagaggaaaagaaaatataggatataatgccgctgaaaatctccaagggagaggcaaagagagagaaaattgtgaaacacattgtgagaatcactaaaagtctctgatttacaaca

SEQ ID NO: 109056 - DNA, 580 bp, Homo sapiens
ggcttcccctacctgcccgccaccacacagagaatgcagagtgcagggatacctgggtttagagctgtggctgggcagctgtagctgcacctgggagcacgggctyctgccccgccaacttagtagggcacagggctcctgctgggatcacctgttcccagcccccactgactttgcagagccgtagccttggccgcaacctcccttgctgcagctggcatcctcacagtggtggcaccagatgggccactgttctcatcaataacaggtcacaagataaacttttaaaattgctaactcaatgtattatttagaaatctggagcaaacaacagaaaaatttgaaagtggttgccacttttagacttaatttttaaatgatgagaattattaactttgataaaaatagaagaagaatgttaaagtcatctagaatagaaagaacagaacgtgcaacttccaccaaaaaggtgggagaaggagaaaaaaagaaatggaatcatatgtagatttttttccagaaattctcttgtggtagttttggtttgtgaaaaattattccagggaacttaaaggtgtat

SEQ ID NO: 109057 - DNA, 614 bp, Homo sapiens
cctaacaagattaaatgacttgccaaaggtctcactttgaagtggcaaaattgggactagaacccagatctcttcaggccccaaattaatgttcttcccattccactgcagtgtttctattaaccatgatgtttttagtgctttttcaatggaactactgtctttaaaaaatatggaaatgacttgcaactgggtgcagaccaactggcaaaggggataaagctccaacaaacctagaaatttatctgacgctaaatattttctctagctatttaatagttaatacattttttattatatcaatgaacataccattaataataatcacttatggtttatttttagccaaaggtcttctgtaaaaaattctcccatatttttatattcattagataaataccacctgtatcttattaattagaatatatttattctagttgtatgaattaaataattataaagtgtctgcaagttctcaggtaggatgctctactgataaaatgatttgtcattataataagacrttctatttcatgataattgtaaccatataaaggccttattataattttatattttgaaatctttagaaatgtaatttgtagtacagatgg

SEQ ID NO: 109058 - DNA, 564 bp, Homo sapiens
acatgactgtatatacctataaattaaggacctgttacttttataaaaatatctatgttatcctgaaacagaggcaatcaaaatagatattcactgggtactcttaaaatgcatagcttcttatgagcaagaggagaatctccatgttaaaattgtaaaattcgtattagatatgttgccataattttacataatttatctttgcatactgatattctagatgtaattgagaattctctaaatagatggagtactatgaataatatggaattcaaatgagatggatttatatatgtaatatggaaagtaagcaaaacttttttttttaaagaaaagcagatgacagaacagtgtatgatatggtctcatctgtatttaaaaatatatatatattttacrtacttttatggttatatagacaatttctggaaagatatacaagaaactgctacagtggttacttctggggtggaaaactgagagaataactttactttttttaaaaaaaaaaatccttttgtgtggcttgacatttttaacctgaatgtgcatagctttgtaaac

SEQ ID NO: 109059 - DNA, 344 bp, Homo sapiens
gctgttcttcatagtggatgttctaaattaccttcccaaaaacactgtacaagggatcccctttctccacatyatcaccaacatttgctattttctgtcttttggataaaagccattttaactggggtgagatgatatatcgttgtagtgtttatttgcttttctctgatgattagtgacgctgagcatttttgcatatgcttcttgaccatttctatgtcttcttttaagaaatgtctatttagaacttctgctaatttttaactcagattatttaattttttcctattgagttgttcaagatccttatctgttttggctattaatcccttgtcagatgggta

SEQ ID NO: 109060 - DNA, 575 bp, Homo sapiens
gaatgctaattgcttttgcaccatcctaaagtggaaccattataagttgggaaccacttgcattttcttactttctacactacaagatgctccaggcttattttgcatatatcctgactcagttgtacaatcagccatttctccaaggagccctattttattttattttattttactttatttattattttttgagatggagtcttgctctgtcacccaggctggactgcagtagcatgatcttggctcactgcaacctccacctcccggattcaagcgattcttctgcctcagccttcctagtagctgagattacaggygcgtacccccatgcacagctaatttttgtatttttaatagagacggggtttcaccatgttggccaggctagtcacggactcctgacctcaggtggtccgcctgccttggcctcccaaagtgctggaattacaagcatgagccaccacgcctggcccctagtttattttattgaagaatggtattagaaaccaaaatctgggtgctggcactcttattgctaatgggatgtggttgcttctaggctgtctcaacag

SEQ ID NO: 109061 - DNA, 604 bp, Homo sapiens
agttctagtgttccattgcacatagagtggccataattaaaaataatatattgtacatttcaaaatagcttggagagaagattttgaatgttctcaccacaaagaaatgacaaatgtttgacctgataaatatgctaattaccctaatttgatcattatatattgtagacatgtaaaaacatcacactgcaccccataatatgtacaattgttatttttcagttaaaaaaataaaatttcaattaagacgtgctttttgactgggcgcagtggctcacgcctgtaatcccggcactttgggaggccaaagcgggtggatcacaaggtcaagagatcaagaccaccctggccaacatagggaaaccccatctctactaaaaacacaaaaataagctggacatggtggcacatgtctgtagtcccagctactcaggaggctgaggcaggagaatcacttgaacccaggaggaggaggttgcagtgagctgagattgtgccactgcactctakcctggtgacagagtgagactccatctcaaaaaaaaaaaaaaaagtgcttctttttttcttttctaaaccccttggttttatatgattccccact

SEQ ID NO: 109062 - DNA, 488 bp, Homo sapiens
tttgctgattataaaacaactattttgctttctacacaaaatagctttttttcttcggagttgtatgctaagcaagaggtctctgcttaggaaacctatttgaaaatataataagatgtayttcagtagggagagaaccaactaaaacatgaaaaaaatattttataaaactcaataaaatactaatgattttgcaaaaaaaagtggactttcatgaatgcttaatgcagtgttcacaatatggacaaaatttttacctctcttttcacttaacatggtatcaagagcattttcttaagtctcaaccttaactatataccttcttaacatgtgtatttcttcaaacccagtatatagctgcacgtgtgggctagatttgggggatataaaaaatgtggagaaacttttctgttaattggtttgttggacatcgttggatactgtaagatactgttacacagtataagacaaagattgacagatggaat

SEQ ID NO: 109063 - DNA, 506 bp, Homo sapiens
catagtgtttttagctggtgcttatttaattgtcagctgagtttcatcctaaagaaataaaccttttttccaataattcctgcaaaatttctactaaaactttcgattagcccagctgtgctacatgtccatcccagaagcaatctgggcagggtatgtaaaacttttacataggcagggtatataaaactttgaagggcctccctagagttggaagttgcaatttattgaattatgaaacatccaaataattacttagtatgcacgaaatgtttgaaaaatatttaggaaagatgaatgttaacataaatgatgaagaatatttacagcagtacacacaattatataagctgtgtgtcattcccaatcttctatttataaatattattgctattcaaaacagtaaaagaaaagtaaaaggaaataaaacgttaatctctakagtagatgaaattaagagtgttttctttacattttgttaattttttacatttaaaaatgatgca

SEQ ID NO: 109064 - DNA, 575 bp, Homo sapiens
gatggagacaaaaagccgctataaccataccaggctccatgaagaagcacttgatgttaaaacagcgggcactgaattatcaaagaatgcacatatttcttaaaaattttactggataattggacatgtatgtaaagaaagtaaattttagcttctatataaccctatacatgacaaataatttgagatcaatcttaagcctgaaagaaagtattggaaccccagtgctggctccctttaacaaaacataaatgcaagcctggaaaaggatgaaacacttcccaagtaacataactgcatccttaaataaatatgaagagtattcrtgagaaatacaaaagtatccagcactcaacaaaatcaaattaaatctctggcattaaaacaaattaccagctatgtaaaaatacagtgaaaggtgattcataataaggagaacaattaagcaattgaaaccaattgtgaacagacataggcattaaatatagcagacacaggtggtaaatcaaagccttcaaaattttagaacatatagaaaaataattttacatgtttagagtaagcaaatgtttttc

SEQ ID NO: 109065 - DNA, 386 bp, Homo sapiens
aaaaaaaccaagtgagatttttcccaagaatgtaatagtagtataacattttatcaagacatttaaaaataagcataaaaatagatgtctgagtcctgtttataaaatttaagacgtattcctcccatccaagtactaaccaggcccgaccctgcttagcttccgagatsagacaagatcagccacattcatggtggtatggccgtactcaagagctattcccaaggaactaaaaagtgtgataaaataagagtacgagattatcactgaaaagaagttcacaatttcatgcacacacataaaaaagtcataggccaaaagcaatatagacatgagagtctgggggaggttaacagcatccagtctggagcccgagtacttgaggg

SEQ ID NO: 109066 - DNA, 505 bp, Homo sapiens
tttatagctgattgtaaaatcaccttctaaagagaaccaaaaygagacaacaattgtccatggataaaaaaaggttttagggcacccatagtcaaagacacaattgacgaagaaatttattacctctgtggtacacaataactttaacataacaattatgcttattactgataatgcactctaagtcatatcaaaataacaggagttttccacaattttggaacacataccaataacatattttacaaatacagcccaaagaaaatcaagcaccatttaatatttgacaattcttctggtataatttttataccaaataagccaaataatgtcatttttggactttagagaaattaatatcttaaaggattaattaggtcagaaaaagacataatttgtagtttgattttggaaagcttgtcaaatgtaaaagttttaaaacacttgatatcacaaaataggattacaggtcgttgtgaagtcattcatgtaaccaaagtgataa

SEQ ID NO: 109067 - DNA, 639 bp, Homo sapiens
cacaggagaataaacaattgtggcctcatagcatacgagattacttttctttcatggatagaatataattaaatgcaagcagtttttaatggaaagagtggaaaacttttatttgcctaatttgtggaggtagcaattattgttggtttaatcctattttaggatattatatgcatattatctcttcttttttattttttttcagaaagacaaataccttcttcagtaccttatttttatttttgctttctgagattcttggttatatgttatggcttttaaataaatatttgtatgattcagaacaggtcacttttttgactcagaaactaatcatctgagaatggtttttgaaaatcatggatttatatagtcagaaagttctttaaagattaccaaaggcatatcttcaattttagagaggagtaaagtgaagcccaaagcgatgaagtgactttgaatcattgatttgyagcattcctttaaccagaccatgtacctccatattgcacaactcctgcagggtacagcctctgagctcctgcaaagctgccctgtgggacttcaggttcctgcttctgagaccagggcacttctacaataggtggttttcaagagccaccttattaagttaaagca

SEQ ID NO: 109068 - DNA, 631 bp, Homo sapiens
tgcccatggcacatgccagggacagagttctatttcttaggagttaatcactcaacttggtcctcccacctgtgataagtgatgcccagcctgmtctcgttggctgcccttcagcgaagttaattaccaacaggaagacatttcatgtcctctcagaggccctggcaaaagtcttgaagtggattttaattcactgtaattattctctgcagtgttgtgtggtagcgagagccatcaaagcaatttggggaggattctgcaaatcccaggaggcaaggagtcccctccctatatcagagaaggaaagaccatcttcttgctattcgccttcctctgtggccttggccaagcagagggaaaatttcctgaagttccaggagctagaattacgggtcccaacaacagcctatggcaacccaatggtggctacatccctctgttcttcagtgaaataattacacctgctcttctaaacagtatggtggagtcacactgtatgtaaatttgttgtgggaatccaattgcttacataagcttggggggtgggatatacagggagataaataataatcccaacagtgagggagattttgccaccactcatacactgagcagatacctggtggcaaag

SEQ ID NO: 109069 - DNA, 631 bp, Homo sapiens
tgcccatggcacatgccagggacagagttctatttcttaggagttaatcactcaacttggtcctcccacctgtgataagtgatgcccagcctgctctcgttggctgcccttcagcgaagttaattrccaacaggaagacatttcatgtcctctcagaggccctggcaaaagtcttgaagtggattttaattcactgtaattattctctgcagtgttgtgtggtagcgagagccatcaaagcaatttggggaggattctgcaaatcccaggaggcaaggagtcccctccctatatcagagaaggaaagaccatcttcttgctattcgccttcctctgtggccttggccaagcagagggaaaatttcctgaagttccaggagctagaattacgggtcccaacaacagcctatggcaacccaatggtggctacatccctctgttcttcagtgaaataattacacctgctcttctaaacagtatggtggagtcacactgtatgtaaatttgttgtgggaatccaattgcttacataagcttggggggtgggatatacagggagataaataataatcccaacagtgagggagattttgccaccactcatacactgagcagatacctggtggcaaag

SEQ ID NO: 109070 - DNA, 631 bp, Homo sapiens
tgcccatggcacatgccagggacagagttctatttcttaggagttaatcactcaacttggtcctcccacctgtgataagtgatgcccagcctgctctcgttggctgcccttcagcgaagttaattaccaacaggaagacatttcatgtcctctcagaggccctggcaaaagtcttgaagtggattttaattcactgtaattattctctgcagtgttgtgtggtagcgagagccatcaaagcaatttggggaggattctgcaaatcccaggaggcaaggagtcccctccctakatcagagaaggaaagaccatcttcttgctattcgccttcctctgtggccttggccaagcagagggaaaatttcctgaagttccaggagctagaattacgggtcccaacaacagcctatggcaacccaatggtggctacatccctctgttcttcagtgaaataattacacctgctcttctaaacagtatggtggagtcacactgtatgtaaatttgttgtgggaatccaattgcttacataagcttggggggtgggatatacagggagataaataataatcccaacagtgagggagattttgccaccactcatacactgagcagatacctggtggcaaag

SEQ ID NO: 109071 - DNA, 631 bp, Homo sapiens
tgcccatggcacatgccagggacagagttctatttcttaggagttaatcactcaacttggtcctcccacctgtgataagtgatgcccagcctgctctcgttggctgcccttcagcgaagttaattaccaacaggaagacatttcatgtcctctcagaggccctggcaaaagtcttgaagtggattttaattcactgtaattattctctgcagtgttgtgtggtagcgagagccatcaaagcaatttggggaggattctgcaaatcccaggaggcaaggagtcccctccctatatcagagaaggaaagaccatcttcttgctattcgccttcctctgtggccttggccaagcagagggaaaatttcctgaagttccaggagctagaattacgggtcccaacaacagcctatggcaacccaatggtggctacatccctctgttcttcagtgaaataattacacctgctcttctaaacagtatggtggagtcacactgtatgtaaatttgttgtgggaatccaattgcttacataagcttggggggtgggatatacagggagataaatawtaatcccaacagtgagggagattttgccaccactcatacactgagcagatacctggtggcaaag

SEQ ID NO: 109072 - DNA, 649 bp, Homo sapiens
catggtgggaaacggagctgatgtgtggggtgtggggagagggccaagccctacctgcccactccttgacaccaccttgctttatgcaaaaaatgcattacattttctcaagcaatacatatgattcagaaggtggtgtgagtgggaaaggcctgttctcattcattctggctcacatgttgccctgccgctgcctgcacactggcacttcctcctgtgactggaggcattgcctggaccacagaaagcctttccttgtcatgtcgcttctgccctccagatcctgtctcctctgtcagacaccatcctcgctgaaaagaccatcactgtgctggacgagaaggtgaccatcacagacctcggggtgcagctggtgacagggctgtcactctccttgcagctcagcccaggaagcaacagggccatctttgccactgcagtggctcaggaacttctgcagaggccaaaacaggtatggaggagggcttgagacacacttcagcagggtccctcaccaagtggatcacacaycaggcaggcaccacgccaggcgggtcgcacaatagagtgggatcatatatcgggcgtttgtttctccatctgcaaagggctcttctgaagcaggtgactcctctgcctcatgtttccc

SEQ ID NO: 109073 - DNA, 513 bp, Homo sapiens
tctttttggtataatgacctattttcctttgggcagatactccgtagtgggattgctggatcaaatggtaggcctattttyagttctttgagaaatcttcatactgttttccacattgaaaaacctaagaaaaactcttccagacattggcctgggcaaaggatttatgactaagactccaaaatcaaatgtaacaaagccaaaaataaataaatgagacataattaaactaaaaagctctgcacagcagaagaaataatcaacagggtaaacagacaacctaaagaatgggagaagatatttgccaactatatctccaagcaaaggactaatatccagaatctataaggaactcaaacaaattagaaaaaaaatacaaataattccattaaaaattgggcaaacaatatgaacagacatttctcaaaagaaaatatacaaatgaccatcaaacattggaaaaaatgctcaatatcactaattattagggaaatgcaaattaaatccacaata

SEQ ID NO: 109074 - DNA, 611 bp, Homo sapiens
atttcaaatgcatggagagtaattcacaaacattctccggcaaggccaaggtggaggatacctcctttcactccaatccacaccttttccagtgagccagaaaattaggtaatggtatttttgtatgagagggagaaaagaagagtatccatactatgatatttaaaataatgttatctgtagattctagttgtatatttcatctcaagtttacattagaaaaaaatccttttgtatttcctcatacagaatttagtattaggaaagtacatctacaaacatacactgtattccttaygaatcaaagagtttaagcataaaaatattttcagaaaactatgataattcaaatgaaatcaatttggtaattttatgatctattattctcatttatttattttattataatcttcagaaacacatacaatatatcaggaaaaggtcagaattatatcagcaatgtctcatctaaaaatatgtatatgtatgtgtgtacgtagtatttcaaagcattttatatcaattatcttttttctttgttacagggatcctgcaatagacagaagaaagataattccctgggaagtgctgaggtaaaattctgtgaaata

SEQ ID NO: 109075 - DNA, 577 bp, Homo sapiens
aacacttagagtagtacctggtacagtgtgaacgcttgaaaaagtgatccatggttatttaccatcttgatctgcagtcagagggtgaactttaattccatttagcaggttttttatcttttaaagccattttagcatgcttccagccacctccacccctgattcctacccctgaactataagtatgacattttttaagctaaggttttcagtatacttaactggtttccatgtaaccttgcttagatgcagtaatattacagttatcttcattggggtgcacccagttcatgtattttgaatccagaattcacacatggaattcaagtgattttttcagcccctataattatatgcacattcttttgtgcagtttctttcttttttttattttttaatctgggatgaggactctcacagctatcatcacacttactagggtgtctttggcatcgartgactagaattgtccccaggggggaaggaaaaagcacaaactttcacatatgctgtgtctaaagtagtttcagcaaatcctctgaggactcattcttcaggggtaattgttgagcatact

SEQ ID NO: 109076 - DNA, 587 bp, Homo sapiens
tgaagaaatagttgttctcccccacccccatggaaatccgtatattcagatggagattagattacatgatatacgaatttccctctaagaagtgtataatctgtaacatgtaattgtgaattaataaatgagcaaatatattataaaaatgtaaccaagcatatactcagggagaaaagatacagagtctcaaattctgttaatacagaggtgataacaaaccaattatatgtagtyatcaaaataattattctactgtttatcaaacttaattacatgacaaacagaagaagtacatgacaataataacatgattaattcaaattctagcagatcctttaaaaaatctagaatatagatgttttcagatattctagcagtattcagctatgcagatgcaatctcttaaacaagtggaatcaccatttaaaactagttatttgcttgggatgactgactagcagtcattgactataatcaatcttgtaggcttgatttatgaataagaattttgcggctgtgaaagctgaagttaaggaggtgggggagcattaaagaggatcatcaaaagttctcatacatgaatt

SEQ ID NO: 109077 - DNA, 608 bp, Homo sapiens
aatcacactatgtaccataaatgttttatggtctgtaaaatataaaacgtgaaaactaattcaaattgtgaattgataaagcagtaaaaaatatatttcaaaaaacagaaaagttttaaacctcaggcataattataaatgtgtattcctatagagatttctgggcatatacgtcaacagaaacgtctaaatcactaagtcatccaaatatcccaggaatataatgtggatatttgaggctacaagtagctgttcactcaaaggtctactactagtgttttttctcatatggaaattaagtcctatcattctcttgcttacaattcctcaaaatcttcccatcaacaaaaacacaaatgaaaatcccttaggtattatggagggcttttcaaaagctggttcctaccacttgtctaacatcatttcctggcaagctatacctcactctccacagcttgcaattttccaaacaygctgtgctagacgactttctttcacttcccattatatttgcctcccttcccttttcttctcagtaacaaacaaacgttttctcagagtcgccaactcctgatattcccaggcacccagattgtgtcttccctgta

SEQ ID NO: 109078 - DNA, 613 bp, Homo sapiens
cattcaacgtagcattttccgaatctccttagtgaagcaatatggagttgtgataagaattttcctagatctctttttcattaactgtgtttccttggatcaatactaagcctcatttataaaataataatcacactaaagtagtggtaatgtcatgtatttcataatattatagtattcatataaataaatatttttcaaatggktaacacgatttcctccaaacacaatacatcaccaaaacctggaaattattattattagtgaacatgtgaccactggaaaacctgaataaaatgtgtctttaatggagcattcagaaagctttgagaatgaattgagggttggggttgcagaggcaggcagatcgattcctggaaaagggagatggtattccctcaccaacaatgattttaaaatttacccctgctgagaatatttgtagaaattcttttatcagcacgtctttaaagtgatgggttatatgttgattcagcaggatccacattcccttatgatacttgaacccttagagaaaattgttttaaaaattatggtcatcttagcaaatttccacttttgagccaagcacaattaagaatgaaacaaaaac

SEQ ID NO: 109079 - DNA, 538 bp, Homo sapiens
ttcctacaattttctgactctggaagcataagactgcattccatattcttgtcacctctctaaaataatattgttctttgttaaagatgctatataagcctgagttctaagtcactacttttgagttatccatcattaaattttctcctgtgatgtgcactacatgtgttaataaacttgcttgcttttctcttgttaatctgtcttttgttgcaggagtctgtccaaactacaaacttatgagggctaagaagaaattatattttctccctgacaccatcctcataatttaacaaaacaaaataatctatagtggaatactaaagatgttgtgacatcataagtacctkctttgggccacatgtagcaattttaacataaattaaaaatctcccccaaaaggattttatgctttagtattacttgctacagggagttccaagccacatttatacctctctgcctccaactcttgctatatacggactcatcccaagcacatttacataatccatatcaaagacaatcaggtattaaa

SEQ ID NO: 109080 - DNA, 620 bp, Homo sapiens
gccacatgtagcaattttaacataaattaaaaatctcccccaaaaggattttatgctttagtattacttgctacagggagttccaagccacatttatacctctctgcctccaactcttgctatatamggactcatcccaagcacatttacataatccatatcaaagacaatcaggtattaaaaatcaggacttcctgatcaaagcttcttcctatatgtaaccagtaatatggaagagcaacaaaatagaattgtagagagagaacaagtagacttccaagaatattctcattgtaatgaatgtattttcgctatgtatcttttgcatctttgccaggagtttttggaacttaccagcctcaaagaagggagagattttgcactctgtgacaaggtcttccttcaggagttttgagagccagtgggatgacttgagcagatacacaattaaaaacactctgcttgatacataccatcaaagcaagtgagaggacattttagatcacagaaagaaaagtggtattgatgctgaacaggaacaaataaattagacagagtatttgaagcagaagagtacagatacagcctcgttttattgcacttagcttcaatgagcttca

SEQ ID NO: 109081 - DNA, 675 bp, Homo sapiens
tgtgtgacttttggcaagttactgaaattctctgagcctcaatttcttcatcgtacagtatgcatgatgatgccactgaaattaccaggttgttttgrtacttaagtgtgataatgtgttagaaatattcagcaaacagtaggtactcaataaacactggtttctcccctgccatctcctattctccacccctcctgaagggcagggaccaaatctgattctatagcacagagcctggtctgtaataggtgcccaggaaatgttttccaggtgagtttttcaccgagcaaacatagtgatgcctaggagagaggccacccagatttctccccctagcaggcctgcccgcctggctgacatatctattatagatgcctcacatcccaataaatatttcaatgcaaataaataaaggatgccatgagcctctcagtgagtgactcttcacagctcactacacacaacatctatccctgattcctgcacaaagtctggtgtcccctgggatgcctcactggctctagcgggacacaatgtatgccaatgtggggctcgaaaaaaaccactcagctgactccttgaaaacaggagaaacttctcactttggggtggccttggggacattgggaagctcgagcttatgtttcatggggcctatactcaagtgacagccac

SEQ ID NO: 109082 - DNA, 675 bp, Homo sapiens
tgtgtgacttttggcaagttactgaaattctctgagcctcaatttcttcatcgtacagtatgcatgatgatgccactgaaattaccaggttgttttggtacttaagtgtgataatgtgttagaaatattcagcaaacagtaggtactcaataaacactggtttctcccctgccatctcctattctccacccctcctgaagggcagggaccaaatctgattctatagcacagagcctggtctgtaataggtgcccaggaaatgttttccaggtgagtttttcaccgagcaaacatagtgatgcctaggagagaggccacccagatttctccccctagcaggcctgccygcctggctgacatatctattatagatgcctcacatcccaataaatatttcaatgcaaataaataaaggatgccatgagcctctcagtgagtgactcttcacagctcactacacacaacatctatccctgattcctgcacaaagtctggtgtcccctgggatgcctcactggctctagcgggacacaatgtatgccaatgtggggctcgaaaaaaaccactcagctgactccttgaaaacaggagaaacttctcactttggggtggccttggggacattgggaagctcgagcttatgtttcatggggcctatactcaagtgacagccac

SEQ ID NO: 109083 - DNA, 675 bp, Homo sapiens
tgtgtgacttttggcaagttactgaaattctctgagcctcaatttcttcatcgtacagtatgcatgatgatgccactgaaattaccaggttgttttggtacttaagtgtgataatgtgttagaaatattcagcaaacagtaggtactcaataaacactggtttctcccctgccatctcctattctccacccctcctgaagggcagggaccaaatctgattctatagcacagagcctggtctgtaataggtgcccaggaaatgttttccaggtgagtttttcaccgagcaaacatagtgatgcctaggagagaggccacccagatttctccccctagcaggcctgcccgcctggctgacatatctattatagatgcctcacatcccaataaatatttcaatgcaaataaataaaggatgccatgagcctctcagtgagtgactcttcacagctcactacacacaacatctatccctgattcctgcmcaaagtctggtgtcccctgggatgcctcactggctctagcgggacacaatgtatgccaatgtggggctcgaaaaaaaccactcagctgactccttgaaaacaggagaaacttctcactttggggtggccttggggacattgggaagctcgagcttatgtttcatggggcctatactcaagtgacagccac

SEQ ID NO: 109084 - DNA, 607 bp, Homo sapiens
caattaaatctcttatctttataaattacccagtctcaggcagttctttatagcagtatgaaaacagactaatacagctggtatgttggaatcgattatgagaactgtgtgatgttatggataacatactagaaattttgaacaactcatgctttttaaaaaacctatttttgttcttatattatctaatatcaagatagcatatgattttgccattatgggagaaaattgataatccatagtctaaatcatcctttaaagatcaggagatttaagcctggggagtgaaaatcacttayctgaaatgacacaattatttagtaagaaatctagagttagagcctgggtcatctgctcttgtcccagctctttctgttttgtggcacagtctcctcaaaggggcagatcctcagcaaaattcttattacttttgttcccagttgctgccagttttcctatcagtgggcaccaccaggaaaaataaggcagcagggcagcctcgtgtacaaggtttttctattttaccaacagattgctctcatgcttttggggaaagagtaaccttaaaatgatgaatgcttgtcctattaaaagctcttccagcaca

SEQ ID NO: 109085 - DNA, 423 bp, Homo sapiens
aacattgcattcaaaataaaattktagtaagtacaaactgtagagagtattccttttatttctcattgatatgtagtactttataaacaaaatatgttacacaattgcttttgcttgccatccaagacagtttaggacagaaatcagggatgtatccataagggggttttcagagacacgcactactgaacaaattttattactatcaaaatataaaatttactcattttaaagaaaaattcggatttcttggtcagtgatttgcaaatagtaagtgaacatctacagagtagtatttgcaacataaactactgggatctatttcaatgttgtattcattgtttgcagctgtattttttgtttgctttatgatgatgatgatgaaatgcagaatccagtttatattaactattagatagaatt

SEQ ID NO: 109086 - DNA, 583 bp, Homo sapiens
tgtgacttctgtccctccaagctgttgctattcagactccaggtcagtctttctcactccttgaagattttagtccctagctcactgacatttttactgatactactcctgtcataatatttatgaatatcaaattccaggtaaataattcttactgaactatgactcctgggttctttgacctctcgttcttcagtgttcatgtctccaaatacttcaaccgtcccctcccatggcatagcctagacctcatcattactctttttatacttaacaatttccagggtgccactctctattacttcctatcattctcacctcactccctctggtacctggmctgttagaattcttcaactgcattggcgcatataattctctgagatgtagactgctctaccttttatctctacttgtaaattatataaatctggatgcaagaacagcaacatatatttgaaacagagataatttaatttatgaagttgtttatacagatgttagaagagctgacaagcctcaggcaagagaagatgtttttgctatcctttcactggagagggaaaaggagaaggcagagtta

SEQ ID NO: 109087 - DNA, 561 bp, Homo sapiens
agaaagtaatatacaaccttcaaagcatgggataaacacctttccaagcctgggtgccgtcarcgtatcctccccaaacatcacttctgcttatttgactctcatgcattacctatcacattgcagcataatgaaaaatttgtcattctcacctttgggcacatgttgcccctctgacttcattttcttcaggtgactgattcttatttgcctttcaagcataatctaatgtgtcacctcccttcaggaaattttcctctcctgggttaagtgcctctcttttgtgcacccatagaattcttcttgtattttttatcagagcatttttcttatccagttgtaattatttgattatttctatagttcccacctatactttgaagtccttttgagcaaagcctgtggccctccctactagttgtttttcttaagatgggttaggtttgcctgtaattagcaaacgactcccaaatatcagttatttaaaacagcacaggtttatttcatcttcgtactacatgtgtgtcatggggctgcttaaggctctgttcattgctcttt

SEQ ID NO: 109088 - DNA, 598 bp, Homo sapiens
ccaccttcggtaatgtcagaaaagattaaatgaagacattttatcttacttccccttctctgattcatatttttttatcccaagatgagaatactccagagtgttcattttccacatcacatacagggaagcctggtcctgacttgcagccctatagtaagtcttaggacaactattctaatacattcatatgttgccacattttagaatccaaaaggaataggatttcaggctgaaatttctttaactcagaaagaaacaataaaccagctcacccatcttgataccacttcacccctagctgctggctgggaatggcctcagctgacaaggatgaatgaaagagaaaatagatccactcacggttgtgtactacgaaaatatccttatttcaagatatcactatacttttttacttaataaacgcacttacccccagaaaagtacagaacacttggcaaataaaaataaayttcagaaaatttataagcctggcttatatattgctttatttagaggataattctcacattttttccttccacctaccaaaaggaacatgcataataaatgaaactaagcttggcaggaaatccat

SEQ ID NO: 109089 - DNA, 547 bp, Homo sapiens
ccagttaggcggagggcaatctgatgactgctcatgccaaggtatcagagacacagtgagctacccattttgaaactattcaaatgtattaaataatgtctgcaaagggcgaggcttaactgcaaaacaagttaacagtggaatttcaggcacagtaaatcttagattggggaaaatattagagaacataaaagctttcttgatatttaaaaagacacatatctgtccatgcatccatccatccgtccgtccgtccgtccgtccatccatcctccatccatccgtccatccatccatctatccagacttcatctcagtttgttatttatgatactagctggctatgctcagacatttatgagcttgaggtctcttttaaggtgagggcagagtactcctatcatatgctctacattacacctgtggaatctgacccctcctccctgcacatagggaagggtctggttatgggcacagtttgaaggaayaacatttgttgcatttgctctctgtttccaactcttctcttccccaagggctatttggg

SEQ ID NO: 109090 - DNA, 585 bp, Homo sapiens
cattaaaaataaagccctctggcatagttttgcttaaagttacaagaaatttcttgcatattttgccctttatggttctgamaatttgttagtcattaaataagatgtccaataagttgaaagagaaaacagcaggaaaccactcaaggtacaatataaccctttgattagaagcagttatttctaaaattaatcacatatgacaccaactgttggcttatttattatcttactctataacttacacttcatattcagaaagagtgggggttctcttctggaaattaggcaacaaattgaggtgtccttttcattttaatttaaactgttagttgaaataaaatgtaaagagctgatagtataaaggaaagggaaaaatgaaagatgggactatagattgaaattcccatgatttgtagccttgagaaaatttgtctcttcaatgtattgaaaattctaaaaggaagtcaacagtcacttctcttgaaaaatacaaagaaggaaagaaatataaccaagttgaaaataaacagtcttcctctgcctcaaaagtaagtgaacgagggctgatgtgttagtctaccc

SEQ ID NO: 109091 - DNA, 585 bp, Homo sapiens
cattaaaaataaagccctctggcatagttttgcttaaagttacaagaaatttcttgcatattttgccctttatggttctgacaatttgttagtcattaaataagatgtccaataagttgaaagagaaawcagcaggaaaccactcaaggtacaatataaccctttgattagaagcagttatttctaaaattaatcacatatgacaccaactgttggcttatttattatcttactctataacttacacttcatattcagaaagagtgggggttctcttctggaaattaggcaacaaattgaggtgtccttttcattttaatttaaactgttagttgaaataaaatgtaaagagctgatagtataaaggaaagggaaaaatgaaagatgggactatagattgaaattcccatgatttgtagccttgagaaaatttgtctcttcaatgtattgaaaattctaaaaggaagtcaacagtcacttctcttgaaaaatacaaagaaggaaagaaatataaccaagttgaaaataaacagtcttcctctgcctcaaaagtaagtgaacgagggctgatgtgttagtctaccc

SEQ ID NO: 109092 - DNA, 549 bp, Homo sapiens
tggataggactcagataagagtttttctgctctcttctgggcatayaaaatcaaatgatggtatggctgcctggctaatatgttgaatggtttatctctgccccatgtggtttctcattatctagccaactagtccacaactttccacatgtcagtatcatggtctcaagatcaagaacagaaacatacaaaacctcctgaggtcttgggcaggactggcacatcatttccgccacattctgtaggccaaaatgaatcaatagaatgatacaatccaatgaagtagggagataggctccatttcttgatgagatttatagtcatattatagacacacgtactggcaggggataaattctggccaactttgcaatccagcacatagattacttttgcatatttttgttccttcattttaacttctatttattttattttaaatataatttttataatcttttttcaaattattctatttacatttttgtattattttattattaattatattttattcttttccagtgatgattattttgtagcataatt

SEQ ID NO: 109093 - DNA, 549 bp, Homo sapiens
tggataggactcagataagagtttttctgctctcttctgggcatataaaatcaaatgatggtatggctgcctggctaatatgttgaatggtttatctctgccccatgtggtttctcattatctagccaactagtccacaactttccacatgtcagtatcatggtctcaagatcaagaacagaaacatacaaaacctcytgaggtcttgggcaggactggcacatcatttccgccacattctgtaggccaaaatgaatcaatagaatgatacaatccaatgaagtagggagataggctccatttcttgatgagatttatagtcatattatagacacacgtactggcaggggataaattctggccaactttgcaatccagcacatagattacttttgcatatttttgttccttcattttaacttctatttattttattttaaatataatttttataatcttttttcaaattattctatttacatttttgtattattttattattaattatattttattcttttccagtgatgattattttgtagcataatt

SEQ ID NO: 109094 - DNA, 614 bp, Homo sapiens
ggcaatcggttattatctaaagacccgaaatcaatggaaggaatgtctgggttataataaggagtgtggagaccagatttgatcatgcagatgaagcctccaggtagcaggcttcagagagaacagattgtaaatatttcttatcaggcttacagagtctgttctatcagtcttaaggtctgcaytgatgttgatggtaaaaaggtatgcccaacagtcccttctgatcatggcctgaactagttttttaggttacctttagaatgcccttgcctgagaggaggagtccattcagacaggcttagaatttcatttttcttttacaggctgatgtaggttttctggtactgaggaggccagctgtgtgaactatcagcacctgaatataactttatttaaactgcattcacattttactttcgcttttatagaatggagttaaggggaaaggaaaaacctgagtagatgaaacaactgaattatctgttccctaaatgtccctggaataccctgagttaatggacctcgtctgtgttcttattcaaattcctcttttgcaaactgctcaacttgcttatattctgttttccttgtactctcttgtaatcattttg

SEQ ID NO: 109095 - DNA, 471 bp, Homo sapiens
ttgtaaataatttgtcattgtaaaataggtgcattttccagaacaatactgattctatgtgctctattcactcttgaataatttcagtcttatgccaatgctgataggctaaatgtggactgttcttttcaagaaagtacaaaaacatctctcatgtgagcaatcattgaatrgaaaaccatttgcaagagtagatatcatcacgcctgaattcaaatgaaagctcatgtcatctttcttgtttgttctttcttcccttgaaaacaagtcattttatttttaagctgttctgtgaacacaaaaatctgatcaataatttatgttacattttctcttcttatggatatgatgtgtttgactaaaatgtggagaaattatttgaggaatgttttaagttacgaatgctcaaaagcaggtttttgaaaacaagaagttgatgggtgtggttcatctttgtcttgtttttctaaa

SEQ ID NO: 109096 - DNA, 568 bp, Homo sapiens
agttggtctaagacaggatttgattgtttccaagtcccttgacttaacactgtcatcttataacgctttccaattcccaaatacctttaaggtttrgtaaaaataatataccttccacaagtcatttgatttttgtgggccttagtttatcgacctatttggatagatgggatgaaaaaccttagagccatctttccttactcattccccctgctagtgagagagaattcagtggaatcagaaatggaatgaagcatatacttggagaagtaaaagaaatttcccataacaaaagacagaaagggcccagtgagcaatataaatatgtattttatgtccatatttaggcatattgcaattaaagttcaaaataacaaagatgatttgaaaatattatgtatcaaacacggttttacttactggacagtatgtagtataggttgtgcatttatttaacacaacttttaagcatttcttgggggccaggcattgtgtcagatgactagggatttagaaacatatgagagatgattggcatagtcagctttggctgccataacaagatgct

SEQ ID NO: 109097 - DNA, 568 bp, Homo sapiens
agttggtctaagacaggatttgattgtttccaagtcccttgacttaacactgtcatcttataacgctttccaattcccaaatacctttaaggtttggtaaaaataatataccttccacaagtcatttgatttttgtgggccttagtttatcgacctatttggatagatgggatgaaaaaccttagagccatctttccttactcattccccctgctagtgagagagaattcagtggaatcagaaatggaatgaagcatatacttggagaagtaaaagaaatttcccakaacaaaagacagaaagggcccagtgagcaatataaatatgtattttatgtccatatttaggcatattgcaattaaagttcaaaataacaaagatgatttgaaaatattatgtatcaaacacggttttacttactggacagtatgtagtataggttgtgcatttatttaacacaacttttaagcatttcttgggggccaggcattgtgtcagatgactagggatttagaaacatatgagagatgattggcatagtcagctttggctgccataacaagatgct

SEQ ID NO: 109098 - DNA, 542 bp, Homo sapiens
tagagattgcatggcaactcttattttcaaacttttgaagaacagggtaacagtcacctctttgaaattttatgtgatacacagcttggattcaagaaagtaatcattccaggcctcgatcccctgaggccttctgaggagataccaggctaactaggattcagtcttttcttcctctcagtctttagttctggcatttttcatcaacatatgtgtcctttgggtattctaaccacgaacattaaaaaaaagtttttattgtggaaaatttcaagtgtacaccaaagtaaagagaattgcctagtgaaccccatrtaccagcttcacgtggtttcaacaatcatcagcatttgttagtcttgtttccttattcccacgtaatgctcttctcacctcctttttaagctaaaatattttgaagcaaatccaagacaggatgtcattttacctgtaaatatttcagtaaaacaatggccatcttgacttaataaacatagatatagaaattggaataaaaatatatttaagttctactgtgttca

SEQ ID NO: 109099 - DNA, 461 bp, Homo sapiens
ggttttttttttcattttttgtatccttttcaatttctttcatcagtattttacagttttccttgaagagatcttttacttcttttgttaaatatattcccatgttgtattttttgtagctgcagcaaatgggattgctttcttgatatctctttcacattgattgctgtaagcatatagatttgtgagttaccacggctgattttgtgtgttgattttgtatcctgcaactttactaatttatctatcagttctaaaagttttttgtggrgtccttaggtttttctatatataagatcatgtcatctgcaaacaaggataatttgacttcttcctttccaatttggatacttttatttctttctcttatctaactgctctagctaagacttccagtactatgttgaataagagtgatgacagtgggcatccttgacttgtttcagttcttagaagagctt

SEQ ID NO: 109100 - DNA, 586 bp, Homo sapiens
aaaattttaattgtgatggatataaggaatattattcatatagatgaatatagatatataataaagagatatttgttcctaattttattatgttgatcaataatagtgtcattgttgaagcatcagtgtacagtgaaaataatcactttacctgacaaaacagaataagtgtatactctctgagttaactcattgtgtctaatgaattctatgtttcttcagtcagtaacattctggcagaatgactgacagatrtaaatcctgctgcatttcaaggtgttcttagagttttgaaaaggaggcactacacaatcagaagtttacacttggggtttcttaaaagatactttatttcgcactccatttgaacaaaacaattctgcttttgcaacagtttggtgtcaccatgacaaaagtagcttgtagtaaagtgctctttaatttatccataaattgcagcttattaaacagctatgtacctagtggggaagtattgtaaactgcttggagaaaagaaataatataaggacttgtattcacaaaataccatgacatgcgcaagtctatacacagctcaaattctata

SEQ ID NO: 109101 - DNA, 533 bp, Homo sapiens
tgaaaccaagcaaacctgttaatcacagctgtatcacttagcattgtgaccttaagagatttagtctctctgagctgtctccatgagtgaaatggagaaccatttacataataattttcttgtgatgattaagtgaagtgatatgtgaaaatcacttatgcttgagggttaaatsataggccttcatagaaaacagctatcacttgttttaaggcttctcaggaagacgtttttctccctttctttcttgggaagcttcagtctattttgataagacagttcatagattgtaagtactggttgtttctttctcctacgactgcactataaacacagtgggttatgaatagggttactactgaataaacaagagtctctatataaatagccagaacttcagcctgtttctgaaaattttgtcagaaaattaatttttaatttactgcttaattcacatagagcaatttttatttggaaggtgtatgagactaaagctctttaacttctaccaataataacacagatgtattgct

SEQ ID NO: 109102 - DNA, 445 bp, Homo sapiens
taggaaaaaaactataatgagaaagaacatatatggaaattatgggatacaaattaagtgcttctgaaagtatacttgtaattctaaacatatcaaagacatcgactaaaaagaataatattagatgaattaaatatgtaactaataatggagaataaaataagaaaakgaataaagaatagtaaacaaaaatatatattcaaacctgattttttggaaggaaagtttaaaaaaaaaacctaaactaatcttattaagatacatgaaagacatagaaaataagcagcttgaaaacattataacaatattttcttaactctacacaaataaatttaatatgaaggatttcgagggaaggttgctaaaagcaacttcaaagaaacagaaaacacacataaactgatttctgaataagaaaatgagaagcttgtgaattttccctaaa

SEQ ID NO: 109103 - DNA, 538 bp, Homo sapiens
tactagttgtacattaatgagtatttccaaacttacygcaagttttgggaaagaaccttaaatatcagccatggagagtcagcaagtctaaatatagctttaatattttgtcaaaaataaaaatttctttaattggaaatctaccaactttgaattattatttcctatgtttttagtgcctactctatgctaagcacttacctgtatcatttcatttaatcttttaacccattaatacattatgacccagaaaataggaatgattttccttatcttttaaagagaaacagtgaggaagagaaggtaaagaattttccctggaatgcaagcctttctgacacaaaagaccatgtaataattcaacccaatgggttagattacttttaataatatgaaattgagaattgagaggtagatgaagaaaattgacagtagaatataaattgcttaagaaatactaagagggacagcatcttcctttccaaagtaacttgcacctacacagcttttgacagagttctaagcacactcatacacc

SEQ ID NO: 109104 - DNA, 538 bp, Homo sapiens
tactagttgtacattaatgagtatttccaaacttaccgcaagttttgggaaagaaccttaaatatcagccatggagagtcagcaagtctaaatatagctttaatattttgtcaaaaataaaaatttctttaattggaaatctaccaactttgaattattatttcctatgtttttagtgcctactctatgctaagcacttacctgtatcatttcatttaatcttttaacccattaatacattatgacccagaaaataggaatgattttccttatcttttaaagagaaacagtgaggaagagaaggtaaagaatttkccctggaatgcaagcctttctgacacaaaagaccatgtaataattcaacccaatgggttagattacttttaataatatgaaattgagaattgagaggtagatgaagaaaattgacagtagaatataaattgcttaagaaatactaagagggacagcatcttcctttccaaagtaacttgcacctacacagcttttgacagagttctaagcacactcatacacc

SEQ ID NO: 109105 - DNA, 538 bp, Homo sapiens
tactagttgtacattaatgagtatttccaaacttaccgcaagttttgggaaagaaccttaaatatcagccatggagagtcagcaagtctaaatatagctttaatattttgtcaaaaataaaaatttctttaattggaaatctaccaactttgaattattatttcctatgtttttagtgcctactctatgctaagcacttacctgtatcatttcatttaatcttttaacccattaatacattatgacccagaaaataggaatgattttccttatcttttaaagagaaacagtgaggaagagaaggtaaagaattttccctggaatgcaagcctttctgacacaaaagaccatgtaataattcaacccaatgggttagawtacttttaataatatgaaattgagaattgagaggtagatgaagaaaattgacagtagaatataaattgcttaagaaatactaagagggacagcatcttcctttccaaagtaacttgcacctacacagcttttgacagagttctaagcacactcatacacc

SEQ ID NO: 109106 - DNA, 435 bp, Homo sapiens
gatcagttggctctaagtatttggctttatttctgggctctctattctgttctattggtytgtgtgcctgtttttataccagtaccatgctgttttggtggctatgagatttaaatcttcagtccacttgaagttgattcttttttcttttgtatatggtatgaagtagggatccagtttcatctttttctttttaattaccaattttgctagaatagtaaccattttttattgattagtctctcttttcctcactgatctgaaatgctacctctgtcatataatcaggtttaaagtagctgtgtgtgttcttgactccctattttatactgtaggttaatttgtatattgttgtaccagttccacactgccttaattaccatggcttcataaatccaaatatcaaatagtgcaagttcccctctctgttcttag

SEQ ID NO: 109107 - DNA, 610 bp, Homo sapiens
aacatcctccacaatatccagcagtagtgttttgtcaggtgaaacacaattaactgaatatcatggaatgaaaggaaatagcaagctttctttcattttgtttatttatttatttatttttattttgagaaatgttctcactctgtcacccaggctggagtgcagtggtgagattacagttcactgcagccttgacttcctgagctcaagcaatcctgccacctcaaccacctgaagagttgggactacaggcatacaccaccatgctggctaatttttaatttttttagagagacgaggtctccctaaattgcccaggctggtctcaaactcctcaagcaatcctcccacctcagcctcccaaagtrctgggattacaggtatgagccaccacaccagacctcttcaagctttaaataagagtctaaaaatagtgcaaaagaaattgtgtttcctggaacttgtgaaaatattgcctcttgtgtaggggagagcactgtaggaaaagaaataattctacttaaacagtaatatagtgcaaaaggacaacgaagtgaataatccgatggctatgaatgttactagattctgtgagatgccagtgagacac

SEQ ID NO: 109108 - DNA, 559 bp, Homo sapiens
actggctactcctttcattcttctatgctattccttcttatttttcaatatttaaagtttgagtaccccagaagtcaatccttgaattctttcttctctttatatttactttctgcattatccataactttaaatactgtctataagctgatgaattccaaagttttaactaaacctgatgtttcttctcaactctagtattatatatcatatgtccaactacctatctccaattggtatctcaaatttaacaagccccaaatttgactcttgatctccctaacatcacagttatacctcctactctgttcacagcttttgcagttactcaagacaaaaactttggattgcccttaattcctctcacayctcacatccaatctatcaggaaatcgctttggttctgcttttgagtcaacactcagtgactttcagcacctcatccactgctaccctggttcaaggcagcatcatcgtgtgcttggattattgcaatagtctcctatctggcatttctgcttctacctctgacccctgtaaactcttctttacacaacat

SEQ ID NO: 109109 - DNA, 480 bp, Homo sapiens
agaacagaatgaaattgagactcaaaaaatacatacaaagtatcaatgaaagcaaatgtcggttctttgaaagaatgaacaagatcaatagacaacaagctaaattaacaaagaaaaaaagggagaagatccaaaaaagcccaatcagaaatgacaaaggtgacattacaactgatcccacagaaatacaaaagattatcagagactgttattaacacttctttgcaaacacactagaaaatttagaggaaatgaataaattcctggaaacacacaatctgccaagattgaatcagaaaggaattaaaaccctgaatagaccaataatgacttccaaaattgaatgagtaataaaraaacctaccaaccaaaaagttgcaggccagatggattcacagccaaattctaccagacatacaaaaaagacttggtatcaatcctactaaaactatttcaaaaaatcaggaagcgtctcctccc

SEQ ID NO: 109110 - DNA, 571 bp, Homo sapiens
atgacttccaaaattgaatgagtaataaagaaacctaccaaccaaaaagttgcaggccagatggattcacagccaaattctaccagacatacaaaaaagacttggtatcaatcctactaaaactatttcaaaaaatcaggaagcgtctcctccctaactcattctagaaagccagcatcaccctgataccaaaatctgacagacacaatgaaaaaagaaaactacaggccaatattcgtgataaacatagacacaaaattcctcaacaaaacactagcaaaccaaatccaacagcacatgaaaaagtgaattcactatgatcaaayagtgcaaggatgcaaggttgcttcaacatatataaatcaataaatgtgattcactacataaacagaattaaaaacaaaaaccatatgatcacctcaatagactcagaaaaagcttttgataaaatccaacatcccttcataataaaaaccctcaagaaaataggtatcaaaggaacatgcctcaacataataagagtgatcgatgacaaacccacagtcaacatgacactaaagaggcaaaaagt

SEQ ID NO: 109111 - DNA, 633 bp, Homo sapiens
atctgttgtgttgccttttttttttttttttttttttttgagatggagtctcgctctgtcgcccaggctggagtacagtggcgcaatctcagctgactgcaagctccgcctcccgggttcatgccattctcttgcctcagcctcccaagtagctgggactacaggcacccgccactatgcccggttaattttttgtatttttagtagagacagagtttcaacgtgttagccaggatggtctcgatctcctgacctcgtgatctgcccacctcggcctcccaaagtgctgggattactagcatgagccaccgcgccctgcrgttgtgttgcacttttataaccacatctaccttccacatccgcaacacctggcaaccactaatctgttttccttatctttaattttgtcaattcaataatgttacataaatggagttatactgtatgtaaccatttgggattcgctttttttcactcagtatatttcccttttaattgctgagtaatattccatggtaagaatgtatcactgtctgttagccatttgcccattgacaatttgcagtttgtttacagttttgggttattacacgtaagtgttatgaatatttatgtattggtttttgtgtgagc

SEQ ID NO: 109112 - DNA, 633 bp, Homo sapiens
taaaatccaggttttatagttgttcttagttgtaatactagtcagatgcaaactactccttcatagctagaagcaagattatgattattgttaataatcaaatcatctcaaattttgataatggragtccagttaagctggattctggatcattttgatatgtaccctcaattcatgatactcctttactctctgccacaacaaaatgtttcaaggtcactttgtacttactctgccaaagacatagattcagttatatctctaaggattccagttatttgtagtgaaaaatgatgtttagaagccaagatctggggaaaaagtatacttatcgctaccagagtaacattgcttctgaatctttccatggcttaattgcatgtatttaatcattaatgctaacaaaaattcaaatacaataccatagcatttgtccttgccttttcctattccatatttaccctttctttcatcctacagtacaaaaaccagtgttaaaatgtctataccaatgccatcaccaataaaacttaataaagctcacaatttctgtgcatttccttttttcttagaacattttattgagtgtaccttcaaaatattattttctcagattaagtttttctatataaa

SEQ ID NO: 109113 - DNA, 594 bp, Homo sapiens
ctgtcgtcatttcataacctcttccatgtaggttacaagccactagtcygtctcttagaatctctcatttcctttccatcatgaaaatctgtcctcaaggaaatcacttctcagtgctccatctgcaattctactactcctcagggattattcaggccccctcccttccctacacatcaagctctgggatttgcccccacccaggactggcaaattgactttatgcaacataccctgagtcaggaaactaaaatacctcttggtctgggtagacactttcactggataggtagaggcctttcccacagggtctgaaaaggccaccacggtcatttctgcccttctgtctgacataattcctcggtttggccttctcacttctatacagtcctataacagactggcctttactagtcaaatcacccaagcagtttctcaggctcttggtattcagtggaaacttcctaccccttaccatcctcaatcttcaggaaaggcagaacagactaatggtcttttaaagacacacctcaccaagcccagcctccaacttaaaaaggactggacagtacttttacctctttcccttctcat

SEQ ID NO: 109114 - DNA, 609 bp, Homo sapiens
tcttgtttatgtaagattatgatgtcttacaaccccagcacaaagcacaaagcattataggtactgaatacataatatttgtcaataaggactgaattagtgaatacacaataaacaaaaatataatctgctatagaagagctatctgtaagagtaatacaaacattttttcctgtgtacagctgtgtgtccattttttctcttgcttatttcttttctcaygtcctctgttacttgtatctttactgtttcctatataacaactagcttttcaatttctattttaataatttctcagactttgaaaaattgacatttcaataccctctacgaaattattatgcttttgcacatttatcttataaaagaaactatagttgaaatgggattactcaccatagaaaagccccttttcttttcccagaggtagctctcaacaaaactgggcagacaaaactgactaatcttgcatctagttgtgacttcatccttctttttatgaaagaactaatgttcttctctcttcagtcttacttacaagaacacaggaaagaaaagaagagagagaaagatagggtgggacttacttagattcagaaaacaagagca

SEQ ID NO: 109115 - DNA, 657 bp, Homo sapiens
atgtgccatgaactgagtataatgaactcaattctctgtacttaatctttaaaaaaatgaacaaattagaaaaaataagaagttgaggtatgatttaaataccttactaaactatttccagaacattcatagaacataatacagtcagagacttgtttagaagttctctatgttgcatttatgtgatctgatttccctattcctttttccttctcagatggagaggtctcttctacatttaccatctagcttctgttattttttgccaattcaagaaagaaaggtcctttctttcccttgtttataagttctatgaaaccctctagcaagtagagctgttctaatgatcaagtttggaatttgaactacccataaatctgcaacattacataagctaaaaaaaaaaaagcctactctccaatgcgaatgctcctactactctacatttaagtggcctcatagagaaggcactctgttacttcagcactaataagccaacagacattgcaattatgctataatgaatctgaagcaaaactagaaaaagkggactatttgctgaaactagcctccaacaacatatgttgaatgaccagtgcagagtttgacagacatcgcaagtacaaatgtgatttcaataagcatatataggaatgg

SEQ ID NO: 109116 - DNA, 496 bp, Homo sapiens
gtggaatactatgcagccacaaaaaggaacaagatcatgtcctttgcagggtcatggatgaagctggaagccagtatcctcacccagcaaactaagtcaggaacaaaaaaccaacaccacatgttctcacttataagtgggagctgaacaataagaatacatagacatggtgggagaacaacacttactagggtctattgatggagggaggrgtgggaagtgcattagggaaaagagctgatgcatgttaggcttaatacctaaataatgagttgactagtgcagtaaaccacaatagcacatgtttacctatgcaacaaaacctgcacaccctgcacgtgtaccctggaacttaaaaataaataaataattaataataaaataaaataaaatgaaaaatccactagatagccttaacataagattggatacagaagaagaaagagttgataaattcaaagatttatgaatagttcttatctattctgaactgaaa

SEQ ID NO: 109117 - DNA, 496 bp, Homo sapiens
gtggaatactatgcagccacaaaaaggaacaagatcatgtcctttgcagggtcatggatgaagctggaagccagtatcctcacccagcaaactaagtcaggaacaaaaaaccaacaccacatgttctcacttataagtgggagctgaacaataagaatacatagacatggtgggagaacaacacttactagggtctattgatggagggaggggtgggaagtgcattagggaaaagagctgatgcatgttaggcttaatacctaaataatgagttgactagtgcagtaaaccacaatagcacatgtttacctatgcaacaaaacctgcacaccctgcacgtgtaccctggaacttaaaaataaataaataattaataataaaataaaataaaatgaaaaatccactrgatagccttaacataagattggatacagaagaagaaagagttgataaattcaaagatttatgaatagttcttatctattctgaactgaaa

SEQ ID NO: 109118 - DNA, 572 bp, Homo sapiens
tttttctggttattgctttaaagacttccaaatagaatagtttctgccagtgtggagaaaagggtgactgtgcctatgaaagctcagaacaagggattctagtgatggagccattytgtgtcttgactgtggtgatggacatgcaaatctacatatatgataaaacttatacatgtgacaaaattatgttattttatttttcagaacatgtaacatttatatattattttctcttactcttaccacagcttttgttttagttcttacaatgaaggctattaaatgtgtccatttttttgactgtaatttttctaattgtctatttgttgaatgaattttagctcctagtagatatctcagtaaaaactcataggtaaaatatttcttcagctcatgcatattttttgcagacttcatttttagaagaattttatgttcacatccaaatatagaggaaagtacagagattttctatatatcccctgcccccacacatatatagcttcccctattgtcaacatttcccaccagagtggtaaatttgttacaattgatgaatctatattgacata

SEQ ID NO: 109119 - DNA, 647 bp, Homo sapiens
gttatgtaatttactcaaaatattttagctataagtgaactgctgataaatgttttatgtatggatatacattggaaatagtcacctgtgcttagataaataatattcccatcacccaaacggttttcttattctcactttgcagtcgataccacactcaacccaccgcaaatatctatcaccacaaattatgtccaccaatttttgaacttcatattaattgaatcgacaggcttctttcaatcaacatatctgtgtattctttgttttgtaatattcaaaatattatatactgtattaygggaatatgacttaatttattcttctattgttggatatttattttgtaataatactgatataaacattttgtaactaatgcttataattttatgttgccttggcatccattttgaataaaagtttcactttctcataccagagacagagcttagtcaccattccagttctaaccacaaacaaatgggctcaagctggtgtccaaagaccaagaacttagatgcatctctcttgccttgcatgttgggctccccactttcctgccatttaaagggaccattcaggcatttgcctgagaacttaaagtgatccacaccctattcccttacgtataccactggttcgtt

SEQ ID NO: 109120 - DNA, 647 bp, Homo sapiens
gttatgtaatttactcaaaatattttagctataagtgaactgctgataaatgttttatgtatggatatacattggaaatagtcacctgtgcttagataaataatattcccatcacccaaacggttttcttattctcactttgcagtcgataccacactcaacccaccgcaaatatctatcaccacaaattatgtccaccaatttttgaacttcatattaattgaatcgacaggcttctttcaatcaacatatctgtgtattctttgttttgtaatattcaaaatattatatactgtattacgggaatatgacttaatttattcttctattgttggatatttattttgtaataatactgatataaacattttgtaactaatgcttataattttatgttgccttggcatccattttgaataaaagtttcactttctcataccagagacagagcttagtcaccattccagttctaaccacaaacaaatgggctcaagctggtgtccaaagaccaagaacttagaygcatctctcttgccttgcatgttgggctccccactttcctgccatttaaagggaccattcaggcatttgcctgagaacttaaagtgatccacaccctattcccttacgtataccactggttcgtt

SEQ ID NO: 109121 - DNA, 647 bp, Homo sapiens
gttatgtaatttactcaaaatattttagctataagtgaactgctgataaatgttttatgtatggatatacattggaaatagtcacctgtgcttagataaataatattcccatcacccaaacggttttcttattctcactttgcagtcgataccacactcaacccaccgcaaatatctatcaccacaaattatgtccaccaatttttgaacttcatattaattgaatcgacaggcttctttcaatcaacatatctgtgtattctttgttttgtaatattcaaaatattatatactgtattacgggaatatgacttaatttattcttctattgttggatatttattttgtaataatactgatataaacattttgtaactaatgcttataattttatgttgccttggcatccattttgaataaaagtttcactttctcataccagagacagagcttagtcaccattccagttctaaccacaaacaaatgggctcaagctggtgtccaaagaccaagaacttagatgcatctctcttgccttgcatgttgggctccccactttcctgccatttaaagggaycattcaggcatttgcctgagaacttaaagtgatccacaccctattcccttacgtataccactggttcgtt

SEQ ID NO: 109122 - DNA, 623 bp, Homo sapiens
ggcttacaactcccgtagtccttgttataatgttgtggtatgcgggaaacataatctctctctgaccttttcctgtcctcctttcacctgccgaaggcaatctaatctgattgtgggtcaaaaaaccctcattccagagatatttctgctgcatactctagaggaaggaatgctaaccagagaggcsaagaaatatctgaacagttaggtcttgttgggttaaatcatgcactttttattttatcacatttctacgtggttgtcaatttgcctgtgtaataaattctccataaaatgacgagagtactggatttgcagagcttccagatagctgaacatgtggaggttcctggagggtggtgcacccagggagggcatggaaactccacgccccttcccacatagattgccctacacatctcttcatctgtatcctttgtaaaatcctttatattaaaccactaaatgtgtttccctgagttctgtgagccactccagcaaattaatcaaacccaaagtggggtttatgggaacccccatttaaagcctgtcagtcagaatttctggggcccagacttatgactagtgtctgggaggagggagaacagtcttaaggactgagc

SEQ ID NO: 109123 - DNA, 623 bp, Homo sapiens
ggcttacaactcccgtagtccttgttataatgttgtggtatgcgggaaacataatctctctctgaccttttcctgtcctcctttcacctgccgaaggcaatctaatctgattgtgggtcaaaaaaccctcattccagagatatttctgctgcatactctagaggaaggaatgctaaccagagaggcgaagaaakatctgaacagttaggtcttgttgggttaaatcatgcactttttattttatcacatttctacgtggttgtcaatttgcctgtgtaataaattctccataaaatgacgagagtactggatttgcagagcttccagatagctgaacatgtggaggttcctggagggtggtgcacccagggagggcatggaaactccacgccccttcccacatagattgccctacacatctcttcatctgtatcctttgtaaaatcctttatattaaaccactaaatgtgtttccctgagttctgtgagccactccagcaaattaatcaaacccaaagtggggtttatgggaacccccatttaaagcctgtcagtcagaatttctggggcccagacttatgactagtgtctgggaggagggagaacagtcttaaggactgagc

SEQ ID NO: 109124 - DNA, 410 bp, Homo sapiens
ccattactaaaggtaaaagttaccagtggaattaagggatgatggtagtctcaattcttaaggaattgccttattggatatgcaagagaattcaaaataataagaaccatgctaaatacactatcccttggttattgctatctgtaataggtaaaatgaaagtaaaagagacttccgagtcaggccttgaggctgtactaaggtcagatgtgtgtctctctgagctcaggcctctagcctgaaatctacccacaaaggcgaaaattatgtcaaggcaacagaaartacctcaaagaccttttttttggtcaccaagaagttagtcagtatgggggaagggcaaaaccaagaaactattgaaactagagggtatagtgtaaaggaattatctcgttttgtggatgggtatc

SEQ ID NO: 109125 - DNA, 515 bp, Homo sapiens
aaaatgctcaacatcactaatcattagagaaatgcaaatcagaaacacaatggaataccatctcacaccagtcagaatggctattattaaaaagtcaaaaaataacagttgctgtgaggttgtggaaaaaaagagaaagcatatccactactggtaagaatgcaaattaatacagccacatggaaagcagtttgaagatttctcaaataactcaaaacagaattaccattcaacccagcaattccatgattggctatatacacaaagtaatataaattgctctactataaagaaacatacacttggatgttcatcacagtacaattcacaacaacacaacaacaaaaacatgggatcaacctaaatgcccaacaatagactggattaagaaaaatgtgatacatayacaccatggaatactatgcagccattataaagaataagatcatgtcatttgtagcaacgtggatggagctagaggccattatcctaagcaaactgatacaggaacggaa

SEQ ID NO: 109126 - DNA, 579 bp, Homo sapiens
tttttatggtaaggagtatactttatctcttccccacttttattgtaatattgtaattcttaaatcatctattagttacatatttgtatgttgtctgttaacccaaatttataattaatgctgggattgaattaaagtttggaattacaaaatattgatagtttygttttcttatccaatacacacgaacacaagtgcttgcttttagctttattaacttcagttagaaattctagatttagtgattttcaaaatgctctgtgtattgcgccagtgtcacagtgatccaggcagtgacatgtccatccaaggtctacacataagaaggcagttatctattgggtttaatttttttttaagatgaaaaacaactggctccccagatatccctgtggagataaagccttcttcctatgtctcttagatgactgaaaatcaagcattttggtacttagaatcccattttcatatatattataattaaatgtttttacctgaaaatgacttatttctcagtatataaaatatgttttaaaggagaaaatctttcatgtttttccaaatatgtaatggggttga

SEQ ID NO: 109127 - DNA, 579 bp, Homo sapiens
tttttatggtaaggagtatactttatctcttccccacttttattgtaatattgtaattcttaaatcatctattagttacatatttgtatgttgtctgttaacccaaatttataattaatgctgggattgaattaaagtttggaattacaaaatattgatagttttgttttcttatccaatacacacgaacacaagtgcttgcttttagctttattaacttcagttagaaattctagatttagtgattttcaaaatgctctgtgtattgcgccagtgtcacagtgatccaggcagtgacatgtccatccaaggtctacacataagaaggcagttatctattgggtttaatttttttttaaratgaaaaacaactggctccccagatatccctgtggagataaagccttcttcctatgtctcttagatgactgaaaatcaagcattttggtacttagaatcccattttcatatatattataattaaatgtttttacctgaaaatgacttatttctcagtatataaaatatgttttaaaggagaaaatctttcatgtttttccaaatatgtaatggggttga

SEQ ID NO: 109128 - DNA, 546 bp, Homo sapiens
ggaaattgtttttaatgctaatgctattgcaaaaagcttgctttcagaccattgtatttcttaaaacaaagcaataagaaaagctaatgaaagccctttctcataatttgccttttttcaaaaataatttatcattctgcatacacacacacacacacacaactggcacatcctagaaagcctctcaatgcttcctgcaaagaagaaataaacagctagttcaaataaatgaacttcacttttgatcataacctatgagatcccaatgtggtcagtgacacaattatatgccattgcaggtggctagctttcagagttttctaatttttgacctttatttcktgttccccatccatggaaaaagggaaaatgagttagacacattgaggcaaaaggatgagtatgagccattcaaccctgattgctgccctaagaagtaagcatcagcacatccacctagtaagggttatggctactgagagcagatggcagtactagattggacacagagatagtcaagacaacactgcaacttcctttttctcc

SEQ ID NO: 109129 - DNA, 546 bp, Homo sapiens
ggaaattgtttttaatgctaatgctattgcaaaaagcttgctttcagaccattgtatttcttaaaacaaagcaataagaaaagctaatgaaagccctttctcataatttgccttttttcaaaaataatttatcattctgcatacacacacacacacacacaactggcacatcctagaaagcctctcaatgcttcctgcaaagaagaaataaacagctagttcaaataaatgaacttcacttttgatcataacctatgagatcccaatgtggtcagtgacacaattatatgccattgcaggtggctagctttcagagttttctaatttttgacctttatttcgtgttccccatccatggaaaaagggaaaatgagttagasacattgaggcaaaaggatgagtatgagccattcaaccctgattgctgccctaagaagtaagcatcagcacatccacctagtaagggttatggctactgagagcagatggcagtactagattggacacagagatagtcaagacaacactgcaacttcctttttctcc

SEQ ID NO: 109130 - DNA, 604 bp, Homo sapiens
caggggtttttcaaagacccctgaaagatagagggatctttcaaagaccccaaaggcatggatgagctgggtcttggaaactcacagaaactggagactgcagcgcaccagaaatgactgggaattctttctctctgttgcttgtctttgcttctccccattcattcttcaatttctgcagacgctgatttttcagttttcctatttacatagcagcaaaatggccacacacaaaaggcatactgggaatatgatagagccaattacaaagtctcagatgcaggtgctgatcagaataacttggaatagawgcccaaccatggtccagtcagttactgctaaaaagttttattatacaaaaaagttttctcccatacttaccatgtgcatagttgggcagtgtgaaattaccaggaaagagaaaactgttcaggagataacccactacaaatttaattttgtccacccacatttttccatttgaatacacaaacaagctctcatttaatcaagaatctcaactctctcatttgggatggctgtaaatttcaacttcccaactccttcaggacaaacaggacacataaattagaaaaatgaaggt

SEQ ID NO: 109131 - DNA, 610 bp, Homo sapiens
gcagtgccaaggcgggacttccaggtgtttcctgtgactgagatagggactgcctgctgcctattcccatcttacttccttttggtcctrtaaacaacttcatgcccttccaataaattattaatattatgattcctaggctgactagctagtagtaatttctgctgctggtgtatacagataatatgtcagctattatttcagctctgatggtgatgttaggtttgtgttcagaacagtatttgtgcaattatttgaatattttattctattttatcctcactattgtccaaaaatatgttagagaatgcaaacaggaaaatgcttatacgagtaataaaaaataaaactctcaaatgaagatagttgagataaaatgaaaatttggcatgtagacaagagagaatcattagactcaatagaattaagctaattgattgcaaattcatttatgagaaaaaagaagaaaaccaaagcacacctattaaatgcttaaaatatactaccaaagtttgtgtctctaaggagaaagaaaatagaacagatttttaaaaataaataatattttatctctttaggaacttccctatatatttttaagtcaattttg

SEQ ID NO: 109132 - DNA, 610 bp, Homo sapiens
gcagtgccaaggcgggacttccaggtgtttcctgtgactgagatagggactgcctgctgcctattcccatcttacttccttttggtcctataaacaacttcatgcccttccaataaattattaatattatgattcctaggctgactagctagtagtaatttctgctgctggtgtatacagataatatgtcagctattatttcagctctgatggtgatgttaggtttgtgttcagaacagtatttgtgcaattatttgaatattttattctattttatcctcactattgtccaaaaatrtgttagagaatgcaaacaggaaaatgcttatacgagtaataaaaaataaaactctcaaatgaagatagttgagataaaatgaaaatttggcatgtagacaagagagaatcattagactcaatagaattaagctaattgattgcaaattcatttatgagaaaaaagaagaaaaccaaagcacacctattaaatgcttaaaatatactaccaaagtttgtgtctctaaggagaaagaaaatagaacagatttttaaaaataaataatattttatctctttaggaacttccctatatatttttaagtcaattttg

SEQ ID NO: 109133 - DNA, 498 bp, Homo sapiens
aaaatatggacattcaaaattacggtgctatcctttaggaaataaatgttacttactcaaaaattattaaaatcgcatggacttgaaatgggctgayaccaaggtatagagatcaatagaaaggaaagatgaaaagatctatcctaaagaataataatcttactctcctactacttgcaacttcgaataaaatacatcttagattaggcaaatttcccaggatcttctacagaaccccttttcattcctttttttagtggctgtgttcagaagtaagagaggtgttgaggtttatgtggaataaaatatgatgacaaaaaagatgaagcaattcattcatttcatgaatatctgagtatcaacgttgtttactgctggggaacataagcaagaacggtcaacaatctgcctctgtgaagctcacattttggtgagaggaaaagctgacaaaaaagataaataaaatatagaatgtgcactaacaatgataagtaagga

SEQ ID NO: 109134 - DNA, 571 bp, Homo sapiens
agactggggtgcagggtgagtgaggggaagagagtttaaaaactggctaataaagaagaaagtggaagaatgaagtaactagatgtcttgatgaggtcaagtaataataaaaaggagtgtgatatattgcatgttttgtcagtgctgtcgtgctaaatgttatagtttatattatcctcccaatgacaactattattttcacaggaaaaacagatgcttagcaagatttggaaacttgcttgtgttcacacattctgaacatggcagaattgctcttagcctagggcatctgatgctagagcacttgctgtaaccattgagctactttttagctacaggcattgtgtaagtagccaagtgagacagctggaaggmtaggacttgtggttatcagatagcaatatttttgtttaagaaaccagacacgagcatttcaagtgatgaaaaaagaccaggcctgctccatgggatgtggagagcagaactagaatggtgggaaattcattgaaattatgaaaataaagtaatgtttgaggccagattttggatgtattgtccatctatatgctca

SEQ ID NO: 109135 - DNA, 527 bp, Homo sapiens
tcgcctgttgaaattttacagtacactttggagacccaactgtcagcgcttcatctttctcctagtctagatacagtcgataagggctgaagtcaaattttcatttgtgtatatgtgtgtatggtacatacttaacacttatgtacttaatatttacaaagtgttacaattttatattttatattttttttcccatttctyatttactagtcatacaaacctgagttaacttgtgtatttgtcattaaggacattttaaagtgaagtaactgaggctcaaatcaggtaacttgtatgcctagtaagcggcagaaccaggacctacacgggtctcattataccactgtaattttttatatttctattacgtcatgagagagttattcatattacaaatacaaacttcagtaatgccaatctgaatcctgcctacatgacaatgtattagaaacttttcaatgaggcaagtctcagaattgtatggcactgctgacagtttctatttatgacagtggacatgatacttg

SEQ ID NO: 109136 - DNA, 626 bp, Homo sapiens
ctaccattgatggggacctggggtgatttcatgtctctgcaattgtaaatagtgtgctttgatgaacatacaagtgcttgtatctttttgatagaatgaattcttttttttttttttgtatatacacccagtaatgagattgctatgtcaaatgaaacctctgcttaaagttctttaagatacctccagactgctttccacagtggatggactattttacattcccaccaacaatatatacrcatttcctttcctctggagccttgccagcatcttattttttgaatttttaataagagcctttatggtgtgaaatggtatctcattgtggttttgatttgcatttctctgatgattagtgatcctgagcattttctcatgtttgttggccatttgtatgtgttcttttgataagtgtctgtacatgtcttttgcccatttttggtggggttatttgttttttgcttgtcgatttaagtttcatataaattatggatattgggtctttgttggatgcatagtttgtgaacatcttctgtcattctgtaggttgttcactctgttcatagtttcttttgctgtgcaaaaagctctttagttaggtctcatttgtctatttttgtttt

SEQ ID NO: 109137 - DNA, 626 bp, Homo sapiens
ctaccattgatggggacctggggtgatttcatgtctctgcaattgtaaatagtgtgctttgatgaacatacaagtgcttgtatctttttgatagaatgaattcttttttttttttttgtatatacacccagtaatgagattgctatgtcaaatgaaacctctgcttaaagttctttaagatacctccagactgctttccacagtggatggactattttacattcccaccaacaatatatacgcatttcctttcctctggagccttgccagcatcttattttttgaatttttaataagagcctttatggtgtgaaatgrtatctcattgtggttttgatttgcatttctctgatgattagtgatcctgagcattttctcatgtttgttggccatttgtatgtgttcttttgataagtgtctgtacatgtcttttgcccatttttggtggggttatttgttttttgcttgtcgatttaagtttcatataaattatggatattgggtctttgttggatgcatagtttgtgaacatcttctgtcattctgtaggttgttcactctgttcatagtttcttttgctgtgcaaaaagctctttagttaggtctcatttgtctatttttgtttt

SEQ ID NO: 109138 - DNA, 578 bp, Homo sapiens
ataataattgacttgaaaacttgtaggccaatttttagctgggagcaaatatgtaatacagatatataaatctctccaaaaggatgtttgatgatggaagtccttgggggtaaagtatacctatggcaattcattactccatttaaagcactgcattgtactttatttacaaaaaatagtgtataaaatgctcagacattctgtgaaaaaagtaaggagaaacaagaaatataggctgttttwtttctgcgagttgtatataattttacccaaaaatatcctggttttcctttattatagtctaccaatgaaattatcaagagtatactggagaggaaagatatagactttgttgaattccagtctaaattatttgcattgtcactttaagttgcctaacatatctagctttcagtttccttaacggtagaatgtgaacagtaatagtaatatttactatgtagtgtactctttctatttcttaagttacgctaatcatttcagaaaattttctcattaaactttcaaacaacatgaagatccaggtattatatacctatttgtaacagatgaaaaat

SEQ ID NO: 109139 - DNA, 593 bp, Homo sapiens
ccaaagttgggctatatttatgtaaccactgatcttcagaacatgtcatctgccatcctgcagccatgtggaagttctggaaaggctttcatattaccaaaaaagagaggacatttataaaatatattaccttttgatgtctttttaaaatgtttctgtcaccatttttttctctgcttatctgaacttttacaagatgaagatcatactcacacttaagcatgtgaawaagattgctaattaataaaattagtgaatcctaattctacaaatgctgagcagtttacaaaagctgctagagatcacaactataacctttctcatctattaaagcacataatgtatcatcaaaaaggaaaaatacataaaccaaacacaactactgagatcagaaaccttaagcagttatcttctgtgcatactatctgaatcttctttaatgcatctggcttccaaaatgccaactaagggaacaaattccagcaggtatagctacatattatgcattcaaaaataaaacctcactaaaaagaaacatattttctgctttgtgatttaaacttctcttacctcacgatttataccaggtttca

SEQ ID NO: 109140 - DNA, 613 bp, Homo sapiens
accctaactttcatggagtactatttcccatggaaaagatggtgcagcataccaaggaggcagcccccaggacaaagaaacccaaagtgtgtgcttaatagagtatgagagctccctgtctgggactctgagaagtgacctactccccaggaatagcacaatctgtggctccagcagaaatgtagaatctcctcctccytcatgcacactgctacagcagttgctgccattaagatatcaggtaggcaagcctcagagctcacagtctggggctgaaggcattgacccttcccccactggcagagtggcctctatgctcaggctgacacatagagagtatgaccctttaccccactctgcacaccaccacagctgcagctgctgttgctgcatttagggggctgcctgtctggagctgagtcgtaaccacacccccactgacagtgtagcctctatgctcaggcttgcacatgaaatgcactataaagacaaatataggctgaaattaaagaggtgggaaaaaatactccatagaaacagaaaccaaaagcaagctggagtaactatacttatatcagattaaacaggctttaagtcaaaaatagtgaaacaa

SEQ ID NO: 109141 - DNA, 613 bp, Homo sapiens
accctaactttcatggagtactatttcccatggaaaagatggtgcagcataccaaggaggcagcccccaggacaaagaaacccaaagtgtgtgcttaatagagtatgagagctccctgtctgggactctgagaagtgacctactccccaggaatagcacaatctgtggctccagcagaaatgtagaatctcctcctccctcatgcacactgctacagcagttgctgccattaagatmtcaggtaggcaagcctcagagctcacagtctggggctgaaggcattgacccttcccccactggcagagtggcctctatgctcaggctgacacatagagagtatgaccctttaccccactctgcacaccaccacagctgcagctgctgttgctgcatttagggggctgcctgtctggagctgagtcgtaaccacacccccactgacagtgtagcctctatgctcaggcttgcacatgaaatgcactataaagacaaatataggctgaaattaaagaggtgggaaaaaatactccatagaaacagaaaccaaaagcaagctggagtaactatacttatatcagattaaacaggctttaagtcaaaaatagtgaaacaa

SEQ ID NO: 109142 - DNA, 613 bp, Homo sapiens
accctaactttcatggagtactatttcccatggaaaagatggtgcagcataccaaggaggcagcccccaggacaaagaaacccaaagtgtgtgcttaatagagtatgagagctccctgtctgggactctgagaagtgacctactccccaggaatagcacaatctgtggctccagcagaaatgtagaatctcctcctccctcatgcacactgctacagcagttgctgccattaagatatcaggtaggcaagcctcagagctcacagtctggggctgaaggcattgacccttcccccactggcagagtggcctctatgctcaggctgacacatagagagtatgaccctttaccccactctgcacaccaccacagctgcagctgctgttgctgcatttagggggctgcctgtctggagctgagtcgtaaccacacccccactgrcagtgtagcctctatgctcaggcttgcacatgaaatgcactataaagacaaatataggctgaaattaaagaggtgggaaaaaatactccatagaaacagaaaccaaaagcaagctggagtaactatacttatatcagattaaacaggctttaagtcaaaaatagtgaaacaa

SEQ ID NO: 109143 - DNA, 423 bp, Homo sapiens
caatttctataaattactctggtatttctataaccaaatgtcgccaaatatattttatcccttyacctaaaatattttccttgccaaagtgtatatgtttaacaaaaatattattctttcatatcaaaattttaattcaatgccaaggtgaaggcattatctaacatttatatgtatagattatgtaattagacaaaacattcagaataaacattcagggtgagtatctcccatcccaatttacagtgaagtaacttttgctattgttgaaaatatgatactttttaaacatttctctgccttccaaactttaatttattgaggagataattttaaagaatttttaaagctaattctagtttatttttttaataatatatacagcctttacttgtaaatttatggtaaatacacagaaaacca

SEQ ID NO: 109144 - DNA, 632 bp, Homo sapiens
tcatcgaatattggcaaagtcctctcatttgaatgatgctaccattctaaagaggagaggaggcagccaggaagctgccataaagaggggaagtgctttgtcttgtaacattgctgaggcttgtggagttgggcaaaatgagcactggagttaaatcagcataaatggttatacatattcaacttaagtaagactttgaatacttattaaccactttttaaacctatgtaataacaaagaaagactttttaaatttttaaaattttataaaatttgctcttgtatttttttggcttccttctctttaaaacaaggaaaagagaattcttaagtagattaatccagatttctacatataagtattttatattgtttacagactttatagaagcttacatatatgtttttccttttgtatttccttctcctttctttttcgtgtaattaattcttactcatgggtgtcastcttacagtaaaaaagaaaaatgaaattgttatatgtcttaatttgattccaacttgtcacctcagtcatacttcatgatgtgactaagccttaattaagttgggtggtgtgtaggaatattaataactacctgtataaaaaataaaatacccctttacaaatt

SEQ ID NO: 109145 - DNA, 563 bp, Homo sapiens
ttttccatagctgaaatagtgcagaatgaacacaacactatatttcttttgcaatctaccttcttatgcagaaaggaagattatcattgttaactaatttmaaattatgattttggttagtaatgtactaactaatttgctttcggaacaaaataattttctaatcattgttatgatgttttatgtatgccataattgtattttttttcatgatcaggaagaaagattaattcaaaacttattttaactgcttttcattaaaccataactgagtttcattgggttaaatttggtaattttccaatctaagtgtgttttaggctggtgccaagactaattcaattgcttctcttctagattcataggtttcataaaaagttcattttatgttagcttagggcttttctgcctagtgaggattatagtatttgtcacaagggtgccaagatttattataagaaaaaagaaaataattcgtaaattttacaattgaaatgactatatttaaaatgcttaataatggcacttaagagacaacagtgtttgtacattcttatgctaat

SEQ ID NO: 109146 - DNA, 563 bp, Homo sapiens
ttttccatagctgaaatagtgcagaatgaacacaacactatatttcttttgcaatctaccttcttatgcagaaaggaagattatcattgttaactaatttaaaattatgatttyggttagtaatgtactaactaatttgctttcggaacaaaataattttctaatcattgttatgatgttttatgtatgccataattgtattttttttcatgatcaggaagaaagattaattcaaaacttattttaactgcttttcattaaaccataactgagtttcattgggttaaatttggtaattttccaatctaagtgtgttttaggctggtgccaagactaattcaattgcttctcttctagattcataggtttcataaaaagttcattttatgttagcttagggcttttctgcctagtgaggattatagtatttgtcacaagggtgccaagatttattataagaaaaaagaaaataattcgtaaattttacaattgaaatgactatatttaaaatgcttaataatggcacttaagagacaacagtgtttgtacattcttatgctaat

SEQ ID NO: 109147 - DNA, 533 bp, Homo sapiens
gtgtgttttttctcattgtaattgcattaataaaagcaacaataatgacaaatacttacataatccttctacaaaccatgtaccattctaagcattttacactctcgtctaaactttacatgagagaggtaatgtttatgtacacattttacaaatgaagaaagtgaggcacagaatgttaaaggtcttattcaacgtcatagaattaggaagttttggagcttgtttcaggacccaagaagactcttctaaaccactgtattcttccatggcagaaagggagcckgcatctgaagcaacctgaaaaggaaacagcagtttggtcccagctggactttctattctggttggttaaatttaaacagtgtttgtggctcactcttcttctttggccacaagaataaaatcattcaacaatcttctcatcatttctcccatactttaattcttcttcatagggtgaccatctgcgattttgtctgtatagcatccgttcccctttcttcgactaccatgacccaattttcctgctt

SEQ ID NO: 109148 - DNA, 533 bp, Homo sapiens
gtgtgttttttctcattgtaattgcattaataaaagcaacaataatgacaaatacttacataatccttctacaaaccatgtaccattctaagcattttacactctcgtctaaactttacatgagagaggtaatgtttatgtacacattttacaaatgaagaaagtgaggcacagaatgttaaaggtcttattcaacgtcatagaattaggaagttttggagcttgtttcaggacccaagaagactcttctaaaccactgtattcttccatggcagaaagggagccggcatctgaagcaacctgaaaaggaaacagcagtttggtcccagctggactttctattctggttggttaaatttaaacagtgtttgtggctcactcttcttctttggccacaagaataaaatcattcaacaatcttctcatcatttctcccatactttaattcttcttcmtagggtgaccatctgcgattttgtctgtatagcatccgttcccctttcttcgactaccatgacccaattttcctgctt

SEQ ID NO: 109149 - DNA, 556 bp, Homo sapiens
aaaatggcaattctaaaactaaatgtatacttttggctgtgtttggatcttttaattaatccattggtgtctctctaaacaaattctaagattataatttcaaaataagtgtctgaaaatttagatagctggaggaacaatagtttttgttttctactttctgagtaagtttatgtataaaattacttatatattagtagtagcttgsctttaagtttgccagtgtttttcttttgtgtgtgtgtgtgtgtgtgtgtgtgtgtgtaatgtttatacttcattaagaattcacagggaaaaataaacatttcctactagcaatgagaattctacagaagtagtaagatatctgcaaatgttaaatgtctccacactttctgagggtttgcaatttttttaaaaaagcatatttttcaaaaccttaaaacagttttatctaggtcaccccttctcctggctagatgttaacagctagccctgcaggaggtataatattgagtagatgggcttggcagagggagctcttcttgctaaaacctgcaacgtaacacaaaaa

SEQ ID NO: 109150 - DNA, 610 bp, Homo sapiens
tcattgaatgataccatcatgttagccaaatagttccatagctgtagattttcacttgtttaataggtaatatggcagtgcaagagactgcattttacctccacctctggcttttcagttatataaaccagcttattgtgacctgtggcaggtgcagtcttagttacattccagtatttcccaagttgggaagcagagtcgggtgactttagacgyaggtgttattctgaaataatttggaaacattacgagcatgtgtataggggcatttgcagtgagtagcttgatatgaatatgtgaattatattatctcataaaactttgattgatggttaattctaggaatagtaagaaattctttgcaactttatgtaaacatcctagggcaaattcttcatggaatttcctctatcctaaattttaaagtaaattttgtttcattcaaaacatttgctcattgtggtttcccttggtcaataatacccacagaaatacttctttactccagggatctgattagaagctgtaaacaagcacagatatagtaaatgccagtcctgtaaaggacttaaatcagacaattggaagaaagcaacagaggtgtggtggg

SEQ ID NO: 109151 - DNA, 610 bp, Homo sapiens
tcattgaatgataccatcatgttagccaaatagttccatagctgtagattttcacttgtttaataggtaatatggcagtgcaagagactgcattttacctccacctctggcttttcagttatataaaccagcttattgtgacctgtggcaggtgcagtcttagttacattccagtatttcccaagttgggaagcagagtcgggtgactttagacgcaggtgttattctgaaataatttggaaacattacgagcatgtgtataggggcatttgcagtgagtagcttgatatgaatatgtgaattatattatctcataaaactttgattgatggttaattctaggaatagtaagaaattctttgcaactttatgtaaacatcctagggcaaattcttcatggaatttcctctatcctaaattttaaagtaaattttgtttcattsaaaacatttgctcattgtggtttcccttggtcaataatacccacagaaatacttctttactccagggatctgattagaagctgtaaacaagcacagatatagtaaatgccagtcctgtaaaggacttaaatcagacaattggaagaaagcaacagaggtgtggtggg

SEQ ID NO: 109152 - DNA, 447 bp, Homo sapiens
aaccaaacgtaatgtggtatccaggatgatcctggaacagaaaaaggatgttagtaaagtgtctttagcaaaaattgagaacatgcaaataaaatatgaactgcaattaataataatgtatcactgttggttcattagttgtgaaaatgtaccatattattgtagaatgttgacaagaagggaaactgggtacagtatataaggcaactttctataccatttccataacttttctgtaaatstaagaccattctaatattaaaaattttaaaagagctacattccaaaaattagtaaactcttaagcgatttattagtaactgaatctacctcttttttgggctgccaagaagtttagagccaaatttgaggttcagtccttgtggcctgaatttacattgtgtttttatgcctccagtcttaaattttagaaatctttatatttca

SEQ ID NO: 109153 - DNA, 642 bp, Homo sapiens
tgaaactatgaaaagttcacttatgaccttttatcacatttacattcacttaatttattcttaacaattatgcttgaatagttcattaaacaaagctagccatcatctcaagttaatttttctcttcataatttttatattactgtgtgttaggcaagtatcataaaagcaaaatccataaagttaaatacatgtggttttttcttttataacttagaagacatagttgtttttattaaaccaacaatatttaacaagtattatttgtgaaagatgtagccaagtcatatgaactgaaaggcatttgagctagtttstatttttttgataaaatacttaagtgcttactttttctttaagacaattaattagaagtctttcatatattttaatagtgaaatatcacatgcacatgacatatataaacagttagacagagacactcagatagatgcaaattttatagcttcataaatccttcctctgccagatttcagattgtttcttttccctttactcatcaagtctaaacaattgttagtagtcagctcttaaatttgcactttcaaaaacatgactcaggtgatatttacatcccaaaagaacagaacttgggtcccaacaccaatatttgctgaaaca

SEQ ID NO: 109154 - DNA, 598 bp, Homo sapiens
gtcttgtaggaagaatgtctaatcaagatgtgtaagtgaacccagaaattgatttagcaagaaaaatatagaattaaaatatgtaaaaggcttgaagtcatgtataacaatgaattcacagttggaactcttcaaggcattgatatttcctgcacccacttctcataatcttcttctggatttccacagggtcagctttctcttttcctccactctctttcctccttccctctagtatgtatgtatgtctacataggtatgtctacatgtgagaggatgtgtgtgcgtctttgtctttatgtatgtatgtgcatatgtttatcataactttagtaaatataagctttttgaagtcagagattttatcctaattatgagacatagtcttataaagggacattatcacaatgtctgggacattgactctgtattaagtttggtgtttgtaatttttgtatttgattgattgtgtgtgtgtatttaacagggagatggatagagctggagggtactatccttaggaaactaacacaggaacagaaagycaaataccatatattctcccttataagtggcagctaaatagctaaatgatgaa

SEQ ID NO: 109155 - DNA, 561 bp, Homo sapiens
gaaaataattatttcatattctaaaactcttctataaatgaatgaaaatctgtgtgcaggatattcatttaaccgaaaggtgtctatattgggtgaactggaaatctgatgtgtatrtgtgattgtgtgtagaattgaaaggctggtggtagaagaaacctgaagtgtagcttaatcattcatattaaaaagtttcatagataatatatatttttaaagagtggtgaaagtagttgcctttgtgaagtgggaatcagggattggaagggataaaacatgtcagctgattttactcacaagcagatgattcacattcttaaacttcttaagctatgcacatatgtgtttttgataaaaatttaaaaattcaaagcaatattcaaattatctgtctaatctacctagtcatagtttaattgtgaactcatcaaggatataggacagcttctctgatttgtaaaattcctggtatgtgcaccagtcatacatagcaaaaggaagttcacacatgatgtgtgtgcatgcacacacatgtgtacacatgcccccaaaccaagttga

SEQ ID NO: 109156 - DNA, 617 bp, Homo sapiens
taaaaattgagtgatacctcagagttgcattgtttgtaactgttcctatgtacttgataacatgaattaatatttgagatgtagtactcttcttgaagaatacatatgttaaggtcatcattcattttctagtaaattttcaaataaaaatgctttattgataattaaaaattatatatctcaatttgtattatagccttttctatttcaaccgtaacatgtctatggtctgcgaaggaggtgaggagaattgggaattgggatgtgggagaggggatggaggagacccctcatggctgggagactgccagaagagacctagtgcagctgtcatttaacacctgtcctcttttcaaaagtagggggtggcattcttatagagaaaccagagaaatacggattagagaaaactactaaaagatggatagtctattgtttctgatcttttgggcaccagaataattgctaataggccaatgtcatgtttggagaaaatgtacattatacactgtcttctccaccatatgattcaatgatgtgttgttataaattggaaacacaatccraaagataaccaaaaaaattcttaattattgtttacaagcaaccaaaaaaat

SEQ ID NO: 109157 - DNA, 609 bp, Homo sapiens
tatagttttatgtcgttgcatatttttagttctgttaaaccatcttattgactttataagtcatttcatttcatgttttcaaagatataaagaggctgaaataaggcatggccaatgaaatgtaccttaaatacagaaaaaatatctaactcacttcctgatttaaaaataatttatttggggccattgcagctagacagtgatgttatgatatacatgtgtcttaggctgataatgctatatacactactaagaatggattccatagaaagaagagtcctcaggaaatctaatcagctgttgttgaatagttggggtaaactgaccagcagttatgggataggaaataaaagaattgctgaaacttttcttgtatcttaaatggataaagattagaaatttgattttggaagcaaagaagaaagaggaattgaaggtgacccagggtttaatttaagatctgaaaaactctgggyattgcaatgtcattcacccctgtgaaatgcagaagggaattaggttttgaaaggaagatgcattctccctggacatgatgagtctcaggtccatataatatattgttgtagtcacatgtagacagctagaaat

SEQ ID NO: 109158 - DNA, 524 bp, Homo sapiens
agaatataatatggaaaagaggattgggggattaactttatagtagagaaaccctgacaaatactgcctcaggcaggtagtgaaggtcaatatcaacagtggaagtcgtgttggcagtatgtacccttgacaagatgtgatgaaagtggcaccttacctctgaggttttcctcccaaaaactcacagccccaaccttatcatgaaaaaaaaaaaatcagaactgacaaatcccaattgacaacattctaccaaatacttgactagtattcctgaaaactgtcaacatcataaaaagcaaagaatgcctgagaaactgtcacagccaagaggagcttcaggagacatgactactctatgtaatgtggtaccctggatgggatcctgaaacggaaaaactaagtaaatttgaattaggtaaaaagtaagtaaattttaattraagtggactttagctaataacaatatatcaatattggttcatcaattgtgacaaattctaatataagttgttaatactagtaaa

SEQ ID NO: 109159 - DNA, 664 bp, Homo sapiens
agtcccgtacaatagatgagaaaacaaaagtagtaagacaaaataagctgcccacagccatacgcttgtaactggaggataaagaactctttgttccctaaatcacttgggattaagyggctgacctgatactctatcatccctgcatacttagagatgatgtttcataaacaagaatattctctctcttctccaaaataccatgatcaaaatcaggaaattacataactatcatttaatgcatagacttccttcaagttttatcaattgtctcaataatgtattttatagtgaaaggatatccacattagaatcacacatttcatttacgtgtcaggcctcttaagtctcctttactatggaatagttctccattctttttttttttttttttttactattattatactttaagttttagggcacatgtgcacaacgtgcaggtttgttaaatatgtatacacgtgccatattggtgtgctgcacccgttaactcgttatttagcattatgtatatcacctaatgctaaaataaaggagaaattaagactctcccagataaaaactgagacagttaactgctagttgacttactctataagaaatgctaaagggagtcctttggactgaaataaaagaactctaggctaactcaaatttacat

SEQ ID NO: 109160 - DNA, 597 bp, Homo sapiens
atagtcatagtctctctccctctatcccttaaaagtaacttattaaaaagcactcatctatgtaacaaccagtacgtctgaaaattttatggcaaatagttacacagttttttaaaacgtatgaatgtaggccatgtaaacaaaagcttaaatcccttttcttccaggaaatcttcggtatcactggagtctataactgatgtcatctgtacttggataatttgcctcatctctgtcttatatgggatttatatgtatacatgttctgcctcccaggrgagttcttacatattcaagtggcatcttttatactttcaattcagcctccttgacagctgaatgaaagggtaatgaggtagatactccagctgcccatcatatagacattctccctttgtgctttcctaatagaatctagaattggtgtgccaatgggcccagctacatttttcaggcttccctagaggtagaagtggctatggaattaagttccaacaaatggaacagatagcaagttttcttggtgaagcttctggggaagcacttaaaaaaaatgaggactggttaagtttgcatgtgattttgaccacctaccat

SEQ ID NO: 109161 - DNA, 601 bp, Homo sapiens
aggccacctactccaaataatcagaggttttgatgtatgttagtgacagatttttattttcttctctgtttgatgttatttccctttttttctatttaaacaagaccctgtatttggcacacataatyttctagttatctaaaactataatcaattgtgtgtgataaaaaggagctctggactagaaaccagaagacagaatttctaggaaataattaaccatatactttcacagtgtgtgtgtgtgtctctctctgtgtgtgtacacactatagaaatattttaacttctgttctcatttatttttcccattggtaaattgagacgcttaacctggatgatttctaatgtaattgcatttctataatcttacacatctgtttatttcaatagattaaaaccttctactgtgtgaagcaagtgttaagtatgtagagaaaaaaaatccaaatcaaatttcatttcaacaacaatttgtttgcctgttgcttaattttaataaatagtctgttatttgttattttctgactgtgatctagttagcaatatagctacactaaagtcttcggctgggtatggtggctcatggctgtaatcccag

SEQ ID NO: 109162 - DNA, 601 bp, Homo sapiens
aggccacctactccaaataatcagaggttttgatgtatgttagtgacagatttttattttcttctctgtttgatgttatttccctttttttctatttaaacaagaccctgtatttggcacacataatcttctagttatctaaaactataatcaattgtgtgtgataaaaaggagctctggactagaaaccagaagacagaatttctaggaaataattaaccatatactttcacagtgtgtgtgtgtgtctctctctgtgtgtgtacacactatagaaatattttaacttctgtyctcatttatttttcccattggtaaattgagacgcttaacctggatgatttctaatgtaattgcatttctataatcttacacatctgtttatttcaatagattaaaaccttctactgtgtgaagcaagtgttaagtatgtagagaaaaaaaatccaaatcaaatttcatttcaacaacaatttgtttgcctgttgcttaattttaataaatagtctgttatttgttattttctgactgtgatctagttagcaatatagctacactaaagtcttcggctgggtatggtggctcatggctgtaatcccag

SEQ ID NO: 109163 - DNA, 601 bp, Homo sapiens
aggccacctactccaaataatcagaggttttgatgtatgttagtgacagatttttattttcttctctgtttgatgttatttccctttttttctatttaaacaagaccctgtatttggcacacataatcttctagttatctaaaactataatcaattgtgtgtgataaaaaggagctctggactagaaaccagaagacagaatttctaggaaataattaaccatatactttcacagtgtgtgtgtgtgtctctctctgtgtgtgtacacactatagaaatattttaacttctgttctcatttatttttcccattggtaaattgagacgcttaacctggatgatttctaatgtaattgcatttctataatcttacacatctgtttatttcaatagatkaaaaccttctactgtgtgaagcaagtgttaagtatgtagagaaaaaaaatccaaatcaaatttcatttcaacaacaatttgtttgcctgttgcttaattttaataaatagtctgttatttgttattttctgactgtgatctagttagcaatatagctacactaaagtcttcggctgggtatggtggctcatggctgtaatcccag

SEQ ID NO: 109164 - DNA, 640 bp, Homo sapiens
ttgtcagggctgcagctgcttcaactctttctgtgagcggctcagtcccctagcccactctttcactggatacctgtgtctgagtgcattttttcatccgtcactctgtcagggtctatgggtcggacccggcagtcagacagtgaggctttgtcaaaggctgttccactccctgctgtatacytggacccagcatgaattactgcccttctctcaagagtgtaggtattttattttattgttccattctctttctccagctatcatgggttttcaccaatgcctttagggaaggacaatgcttcagctccctatcccctcgacttccccactggcttaagcctttccttctgtaggagagagctggggtgttttctctagttgctctgggacattttatccttcagtggctactgtttgcctcttctttgtccatacaacaaagcatgctttctcactacggtggccaatacttttcttgagcacttggagaagtctctaaagaatagcctgtaagtaggtatgcattcactttgtatatgcattctccttcccagaggatctatattctgtcgttagtacataccccacctatcttagtacattttgtgttaaaagttcattttgtgtacaaagaata

SEQ ID NO: 109165 - DNA, 640 bp, Homo sapiens
ttgtcagggctgcagctgcttcaactctttctgtgagcggctcagtcccctagcccactctttcactggatacctgtgtctgagtgcattttttcatccgtcactctgtcagggtctatgggtcggacccggcagtcagacagtgaggctttgtcaaaggctgttccactccctgctgtatacctggacccagcatgaattactgcccttctctcaagagtgtaggtattttattttattgttccattctctttctccagctatcatgggttttcaccaatgcctttagggaaggacaatgcttcagctccctatcccctcgacttccccactggcttawgcctttccttctgtaggagagagctggggtgttttctctagttgctctgggacattttatccttcagtggctactgtttgcctcttctttgtccatacaacaaagcatgctttctcactacggtggccaatacttttcttgagcacttggagaagtctctaaagaatagcctgtaagtaggtatgcattcactttgtatatgcattctccttcccagaggatctatattctgtcgttagtacataccccacctatcttagtacattttgtgttaaaagttcattttgtgtacaaagaata

SEQ ID NO: 109166 - DNA, 640 bp, Homo sapiens
ttgtcagggctgcagctgcttcaactctttctgtgagcggctcagtcccctagcccactctttcactggatacctgtgtctgagtgcattttttcatccgtcactctgtcagggtctatgggtcggacccggcagtcagacagtgaggctttgtcaaaggctgttccactccctgctgtatacctggacccagcatgaattactgcccttctctcaagagtgtaggtattttattttattgttccattctctttctccagctatcatgggttttcaccaatgcctttagggaaggacaatgcttcagctccctatcccctcgacttccccactggcttaagcctttccttctgtaggagagagctggggtgttttctctagttgctctgggacattttatccttcagtggctactgtttgcctcttctttgtccatacaacaaagcatgctttctcactacggtggccaatacttttcttgagcacttggagaagtctctaaagaatagcctgtaagtaggtatgcattcactttgtatatgcrttctccttcccagaggatctatattctgtcgttagtacataccccacctatcttagtacattttgtgttaaaagttcattttgtgtacaaagaata

SEQ ID NO: 109167 - DNA, 610 bp, Homo sapiens
ttaattttttattgggttatcacttagctttctacttgaataagtgtagtttacagaccacagttacagtgttagaatattctgtgtttttctgagtacttactatgaccagtgagttttgtatcttcagatgatttcttatcgcttgttaatgtctttttctttctaactgaagtactccctttagcatttcttgttggataagtctggtgtttatgaaatccctcagcttttgcttttctagaatacacagcatattttatcctagcataaamcttgttttttagcccaacgaggtggctcatgcctgtaatcccagcactttgggaggctgaggcaggtggatcacaaggacaagaaattgagagcatcctggccaacatggtgtaaccccgtctctactaaaaatacaaaatttagctgggtgtggtggcacacacttgtagtcccagctacttaggagaatgacgcaggagaatcacttgaacccggggaggggaggtggaggttgcaatgagccaagatcaagccactgcactcccacctggtgacagagcgagactgcatctcaaaaaaaaaaaaaaaactttttttccagcactttaaatat

SEQ ID NO: 109168 - DNA, 573 bp, Homo sapiens
tatgtatcctgttaatacgaattccattaaccattattttagcatcgtatattgactctaagggattgattagaggcactgggctaggggataagaccactgcttactcttggaagcttgtactcaaggaaacaaagaaaacaaatgagagcaacagtgaagtgtatagcaactatgttaaaggggtactgctctgtgaagtctacctcaagctctgctctttaaaataattttaaaaatctcagaaaaggaagtgaattacttttgcagtaaaatgaagcttattgyagaagaaaaatatgaaataatttattaaattactattttgtggttttgtttgcttgttttattttgctccttctcgtttgaagaagatagccaactatgtaatttcctttattttaggatacatcttatacaattttccttcatgaagaataaataagttcccttcttaacatttaggttcctgactccttattaggagattaagcagaattttctcagaaaagcaaggagatctatgaatacttagggcaacaaagacaccatgactgtacttggggaagaagt

SEQ ID NO: 109169 - DNA, 684 bp, Homo sapiens
tatattgacactctgattttaggattgcatgtgttcttgaagaactgacccacttatggttatgtaatgcccttcttcattactaatacgtttcctttctttgaagtgtactttgtctcaaattactatagcttctgctgcttcataataattatgaagctatattataattttgattattagtagtatatttctctccatttatttaatttatatgtccctctatatttaaagtgggattttttatactttggtatatacaacatatattttcatcaactctgaaaactctgtcttttaactggtgcatttaggctgagtacagtggctcaagccttttaatccyagcattttgggaggctgagacagtaggatcattgaggccagaagttaacgagcagcctgggcaatagtgagagccccatctctacaaaattaaaaaaaaagaaaaaatctggccatggtggctcatgcctgttgtaccagctactagaaaggctgaggcaggaggatcccttgagtccaggagttcacgactgcagtgaacaccagtgcactccagcctgggcaatgaagtgagatcctgtctctaaaaaataaatttaataaaactccccaaagtgagtaaatctagaccactgacattcaaagagattaatgatataggtggattatcttctacca

SEQ ID NO: 109170 - DNA, 585 bp, Homo sapiens
gcagcaggtgacagaggacaaatgtgaatccagttcccacagactccaaagctgtgctttcaagtgcgacatgctactcccacctggcccagatgccccacctcccctggaacccaggatctcttttgagcaccatttagcacgtgtctaagggacaatttggtgacaagtttgagaacattttgcaagagggaaggaggtgattaaacaagcaattgcaatggtgttagttcagggaacaaggcaggaccacacagcacaccaggtaaacctagcggaagggggtgcagcaaaktgacagtgaactgaggcttggaggatgagtcagggaggcaggcagggttgggtacgtcattgcatgtgcagaagtctgaggtgaggggaaaaagacccatgtgagaggaagtaaaaaaaatagcgtggctacagcatagaggctgtagcagagagtgtattggggagcacaaggtcagggctggaggggtggtggggggcaagcccagatcaggggctgtgccaggggcatggtgcaggagaggcagtggtccagcttacaccttcaatcactccagttgctgagtggag

SEQ ID NO: 109171 - DNA, 604 bp, Homo sapiens
cattagtttattttttttaatgtttataaaaagcgttgctgttccaagtggggcctgttaaaggagaaaagtaatccaaagcctgccagcattgcagagaaactgaaacatctttgtatttttttttttaagtttcttgaagttgctaatggttttatagttttttaaacaagttgcagggcattttcaaaagctggtcaggtaacctagtgctaagaaccrtttattcctcattataagcataggtcttaacatctccagagaaagcatttggccctcttccacctaagaaactgagtttctgcctttttgattcctgttagactattgattatataagattgtactttaatctactgggccttagataatttaataactcaataataattaaatttgatttggattgtttttctttaaacgttacaatttaaaaaagaacatatcaaagatctatgttgggtgaagaaaaaaaaagaaaacacatatgggaggctgaggcaggaggattgcttgaggctaggagttcaagactaacccacgcaacaaagttagacccccctctctacaaaaaataaaaatttggctgggcacagtagcacac

SEQ ID NO: 109172 - DNA, 277 bp, Homo sapiens
aaaagatagaagaccagcaaagtaaatggtttgctgaatcaaagtctgttagtaaagtgggcctgaaggaccaactgtggtgtgtctctagtattttgatacatcttaaattaggtatatgtacagcatccgttccataattgtaactgacctgtatgatcatmtaagtcgagatgatgtgtttacaagaataaattctctgtccttggtgcatgcagaagactatatactacaagaagcaaggctagggccacctggaaagcaagatttgaagaca

SEQ ID NO: 109173 - DNA, 577 bp, Homo sapiens
tgggcttcttttgtctccacttcaatacagacatactgatgaaatactttaaaaacttcctatacagaatctttagggtctaattcttcaaataattcactttagggccctagcagttgaattgtagaaagcatattgttattttggctaatgagcaaaaatgcattattctttaatatttttctaatgttgaggttgtgttgcatcccattttcactcgtgaccttagcagaaatgttacaggtctcattgtcaccactgcgatgtgtttgctgtgaatggaaacatagcttgtttctcaatgyagccccattaacaatctctggatcgcatgatcaacagtgcctattctctttgagaatggggcatcaccttcacagttcttaggataagctatgcatatgtgactgccttcatttgtcacggtccaggatagtttctcattcttttttgtctagatggtcaggcactgtcattgccctttgtgcagtgtgccatggttgtctcttctctacttaggaacagtcttatttcctcacctctaacctgagaatagcagatgaccaacaaatcaata

SEQ ID NO: 109174 - DNA, 279 bp, Homo sapiens
gacttacttgaataatgtatttaatattttataaataaaaacttttctttatatatattatttaaaagacacctttttgtgtgaggacctctctaatgtcaaaaatataaatcaattcaaaygtaatacctatggtcattatatagacagtctttttgactaaaactttttgaaaagtagggctactatatctgaagaaaagcaatctggtccaaaaatttttccaagaacaaaatcataaatagcacaattgccaatgaactctaaatatgaagtgaa

SEQ ID NO: 109175 - DNA, 279 bp, Homo sapiens
gacttacttgaataatgtatttaatattttataaataaaaacttttctttatatatattatttaaaagacacctttttgtgtgaggacctctctaatgtcaaaaatataaatcaattcaaatrtaatacctatggtcattatatagacagtctttttgactaaaactttttgaaaagtagggctactatatctgaagaaaagcaatctggtccaaaaatttttccaagaacaaaatcataaatagcacaattgccaatgaactctaaatatgaagtgaa

SEQ ID NO: 109176 - DNA, 488 bp, Homo sapiens
aaaacaatactaaagttcacatagaaccaaaaaaaagtcagaataactaacgcaatcttgaccaaaaaarcaaagctagaggcatgaaagtgcctggctttaaaatatgttactgggctatataaccaaaacagcattggtattggtattctgtccaatggaaaagaatagagaacccaaaaataaatcaacatatttacaaccaacttattttctacaaaagtgcctagaacatccactagagaaaggacatcctcttcaataaatggtgctgggaaaattagatagcaatatgcataagagtgaaactagaccgtcgtctctcaccatatagaaaaatgaattcaagttggattaaagatttaaatgtaaaactcaaaactataaaactactaaaagcaaacagagaaaacacttcagaacattggtctaggcaaagattttatggctaatacctcaaaagcacagacaactaaaacaaaaatcga

SEQ ID NO: 109177 - DNA, 488 bp, Homo sapiens
aaaacaatactaaagttcacatagaaccaaaaaaaagtcagaataactaacgcaatcttgaccaaaaaagcaaagctagaggcatgaaagtgcctggctttaaaatatgttactgggctatataaccaaaacagcattggtattggtattctgtccaatggaaaagaatagagaacccaaaaataaatcaacatatttacaaccaacttattttctacaaaagtgcctagaacatccactagagaaaggacatcctcttcaataaatggtgctgggaaaattagatagcaatatgcataagagtgaaactagaccgtcgtctctcaccatatagaaaaatgaattcaagytggattaaagatttaaatgtaaaactcaaaactataaaactactaaaagcaaacagagaaaacacttcagaacattggtctaggcaaagattttatggctaatacctcaaaagcacagacaactaaaacaaaaatcga

SEQ ID NO: 109178 - DNA, 585 bp, Homo sapiens
aatcagctaatttttgtatttttagtagagacagggtttcatcatgttagccaggctggtyttgaacacctgacctcaagtgatctgcccgcctcagcctcccaagtagctgggactatcaggcatgcaccaccacgcccagtttatttttaaattcttttttgtaaaggtggggtctcactatgttgcccaggctggcctggaactcctagcctcaagcaatcctctcaccttggcctcccaaagtgctgggatttgcaggcatgagccaccacgcccagccactacattactaattttgtcagatattatttataggaaaaggcaaggatcagggtcatttatcttttaaggaatgtagtgactcaggcaagagacatcagggaccatgtactctgtcctgttttgtcttcaaagtgtcatctttctggagaactacacgttgtcccagagtcaggggccgtgtgaaattctgctacgaacagaaatgaacaaacatggcttcttttgtttgttacttcatctcccatgtgttttatttggtcatgaattactggttgtatttataagattaatgttgattat

SEQ ID NO: 109179 - DNA, 577 bp, Homo sapiens
tcaacgatgatttgattcgtgtccattcgatgattccatttgattccacttgatgatgattccattcgagtccatttgatgattccattcaattccattctccgatgatttcttttgagcccattcaatgcttccmctcgattccatatgatgatgactccattcgatgaaattcgatgatgattccattcgcttgcattcgatgatgattccacttgagtccgttagaagattctattcaattacattccatgacgattccgttcgagtccatttgatgattccattagactccattcgacgatgattccattcgatgttattcgatgattccattcgatctcattcgatgatgattccattcaactccattcgatgtttccattcgagttcattctattattccattagattccattcgatgatgattccattcgattccatttgatgattgcattctatttcatttgatgatgattccattcgagtccactcgatgattccattcgagtccatttaatgaatccattggtttcaattctatgatgattacattggattccattcgttgatgatt

SEQ ID NO: 109180 - DNA, 577 bp, Homo sapiens
tcaacgatgatttgattcgtgtccattcgatgattccatttgattccacttgatgatgattccattcgagtccatttgatgattccattcaattccattctccgatgatttcttttgagcccattcaatgcttcccctcgattccatatgatgatgactccattcgatgaaattcgatgatgattccattcgcttgcrttcgatgatgattccacttgagtccgttagaagattctattcaattacattccatgacgattccgttcgagtccatttgatgattccattagactccattcgacgatgattccattcgatgttattcgatgattccattcgatctcattcgatgatgattccattcaactccattcgatgtttccattcgagttcattctattattccattagattccattcgatgatgattccattcgattccatttgatgattgcattctatttcatttgatgatgattccattcgagtccactcgatgattccattcgagtccatttaatgaatccattggtttcaattctatgatgattacattggattccattcgttgatgatt

SEQ ID NO: 109181 - DNA, 577 bp, Homo sapiens
tcaacgatgatttgattcgtgtccattcgatgattccatttgattccacttgatgatgattccattcgagtccatttgatgattccattcaattccattctccgatgatttcttttgagcccattcaatgcttcccctcgattccatatgatgatgactccattcgatgaaattcgatgatgattccattcgcttgcattcgatgatgattccacttgagtccgttagaagattctattcaawtacattccatgacgattccgttcgagtccatttgatgattccattagactccattcgacgatgattccattcgatgttattcgatgattccattcgatctcattcgatgatgattccattcaactccattcgatgtttccattcgagttcattctattattccattagattccattcgatgatgattccattcgattccatttgatgattgcattctatttcatttgatgatgattccattcgagtccactcgatgattccattcgagtccatttaatgaatccattggtttcaattctatgatgattacattggattccattcgttgatgatt

SEQ ID NO: 109182 - DNA, 552 bp, Homo sapiens
tctcataactcagattttttctttttgcctcaagagtgatgtaccactatgtgtgtgtataatgatttctttcaggtagtgattttgcagtgctcctcagatatgcccccagatgtgtctattcagttgtggattggttcaaaggaaaagagtgagagattcatggtcaccacagttaaagaaaaaattattttgacacttgttaaaactgtaaggaagacttcattcagggctctcatgatagatgtcaaaactmtcacagtaggagagaaagatggagcctaactgaacaaacaaaaacaagtagagatttccaaggaacaagcagaatgaagggtcaatggacagaaaattactaagacagctgggcgtgatggctcacgcctgtaatcccagcacttcaggaggccgaggtgcacagatcacgaggtcaggagtttgaggtcagcctgaccaacatggtgaaaccttgtctctactaaaaatacaaaaattagccggccgtggtagtgcgtgcctgtaatcccagctactcatgagactggggcagga

SEQ ID NO: 109183 - DNA, 420 bp, Homo sapiens
ctttacaccatgcaccacataaatgagaagcaattcatgggatgactttctgaaaactcmgttatgggtttgctcagtccagagcaaacaccatgaaaaataggactctaccacagttgatgcaatatatgctttaaaatagcaaagaatatatggcactctttctcccatagccagagtagaaatgtttgggaatgaggggtggaagtgtttgactcatcactctttcagctgacttatagcacttttctgagtctttgctatacagagattgtcttttctatttttaattttaatatatgaatttctttgaagtacaaacaagaagagagagtctagtgtatatttacttattgatggctattaactcaattttctctatttaacaattgaacaattgttttgtaaaattctatactg

SEQ ID NO: 109184 - DNA, 448 bp, Homo sapiens
ggttccattcaatgatgattctattcaattcctttcaatgtttccattcaattccatacgatgatgattccatttgatttgwttcgacagtgagccattcgattcaattccatgatgattctatttgattcaattggttgacatttccattcgattccattcgatgatgattccctttgattccattcaaagatgattccattctagcccattcaatcattccattcgattctattcaatgatgattccattcatgtcgatttggtgattccatttgacttcatttgatgatgattcctttcaagttcattagatgattccattcgattccattttatgatgatcccattcgagtccattcagtgattccattcgtttccattccatgatgattccattccattccatgcaatgattccattcgattccgtttgatgatgatttcatt

SEQ ID NO: 109185 - DNA, 555 bp, Homo sapiens
aaggactttcactaatggacttgtattcaagctcatattaccaggtatggaagcgcacacacacacacacacacacacacaccaacaatgcacctaacgggaggtgacacatatagttgatatttcaaytatatcaatttgacattaatgtggtctacttcaataagctttttctaagtgtccatgtatataaggcaaaatgatacatgctgggctttcagaaatgatggaagcttagtctccatcagctatattgtaggttgtgcaacctacctgggcagatagataaataaggagaaaaccagaatgccagtatgaaaatatcttgttatgtagatgtaggcaaactgtaggcaagtaaggcttttcacagactgtatctgactcttaagcatgaggaatgccagtggaatagatctaggagggtgaggcaaggagatggaagtgtatcccaagcagacagatatccactgagatattaaatctgtgccttattagttttttaatttagagcaagtctcttcaccagttctacttggactctttttataattc

SEQ ID NO: 109186 - DNA, 521 bp, Homo sapiens
catgaatgtctttggctaataacccattcatgggcaccaggtatgtgatgaagctgctacctcctcagctacaaaataatgcacatttcacaaaaccctctcttggagtttaatccccaagtcatggacagtatagtatcctattcactggataatcatttacaaaagatttttctatctaataatatccagaagtgctctgggtctttaggaaggccccatcacaatgtcaaaattttaattcttcccataataataaaactcattaatattagggcagtaagaatgccaactagaaattgtacatctttctgagcacagcggctcatgcctgtaatcccagcastttgcgggaccgaggtgagcagattacttgaattcaagagttcaagaccagcccgtacaacatagcaagaccccatctctactaaaagtacaaaaatttgctgggcatggtacatgtgcctgtagctgcagctacttggcaggctgaggatcgcttgagcctgacaggttgaggc

SEQ ID NO: 109187 - DNA, 521 bp, Homo sapiens
catgaatgtctttggctaataacccattcatgggcaccaggtatgtgatgaagctgctacctcctcagctacaaaataatgcacatttcacaaaaccctctcttggagtttaatccccaagtcatggacagtatagtatcctattcactggataatcatttacaaaagatttttctatctaataatatccagaagtgctctgggtctttaggaaggccccatcacaatgtcaaaattttaattcttcccataataataaaactcattaatattagggcagtaagaatgccaactagaaattgtacatctttctgagcacagcggctcatgcctgtaatcccagcactttgcgggrccgaggtgagcagattacttgaattcaagagttcaagaccagcccgtacaacatagcaagaccccatctctactaaaagtacaaaaatttgctgggcatggtacatgtgcctgtagctgcagctacttggcaggctgaggatcgcttgagcctgacaggttgaggc

SEQ ID NO: 109188 - DNA, 521 bp, Homo sapiens
catgaatgtctttggctaataacccattcatgggcaccaggtatgtgatgaagctgctacctcctcagctacaaaataatgcacatttcacaaaaccctctcttggagtttaatccccaagtcatggacagtatagtatcctattcactggataatcatttacaaaagatttttctatctaataatatccagaagtgctctgggtctttaggaaggccccatcacaatgtcaaaattttaattcttcccataataataaaactcattaatattagggcagtaagaatgccaactagaaattgtacatctttctgagcacagcggctcatgcctgtaatcccagcactttgcgggaccraggtgagcagattacttgaattcaagagttcaagaccagcccgtacaacatagcaagaccccatctctactaaaagtacaaaaatttgctgggcatggtacatgtgcctgtagctgcagctacttggcaggctgaggatcgcttgagcctgacaggttgaggc

SEQ ID NO: 109189 - DNA, 507 bp, Homo sapiens
acagtatctcaataaatggatatttatatgcaaaaatttaaactttgctccataccttgcatcatagacaaaagttaagtaacataaataaatgttaaacctaaaactataaaacttctaggacaagatgtagaaataaatctttatgatctggggctaggcaaatatttcttagagataatgtcaaaatcatgatgcaaagaaaacctgataacttaaatgtcatcaaaatgaaagacttcaatgcttcaaattttactgttaagataattaaaagataaaccacagactaagagggtatatttgcagactaaatatgtaataaatgactcattcctgaacaagtttcttaatagcagccttgttgacattttggcctatttctttatgggatcytaagcagcttctttggcctctatattctagatactagtaacattaccttccaaacctccacaatcctgacaatatgtcctatgagattacataattactacaggttgaaaa

SEQ ID NO: 109190 - DNA, 470 bp, Homo sapiens
caagaatagcaagggggaaatccacccccatgatccaatcacctcccaccagacctctccttcaataatggggatcacaattccacacgagagttggggggggacacagagacaaaccacatcagcgcaacaccacagtgctggtagcagcaggactctgctattcatcaaaggctgaaagggagagaagagggaacagctggagaaattttaaaggaaaaagggctgtgtagacagagccacctacctggcattgtatctttagtttatgggtccagcttttccctgtgactccaaaaagagggacccaaggaaataagtgctacaactttactgtctttcttcctgctgatctcctgccagtggtccccttgtactatgcccatctggaagcaatgacatatcccctacagatgagcctcccagggcacasagcacgtgaagaaaggtagagactggattggagaggc

SEQ ID NO: 109191 - DNA, 622 bp, Homo sapiens
aggatgagaaggatggtggagatcagagaaaggggtaggtgcactaaagaaaggtgagaatatttaaaggcacagtatgaaggagcacaaaatattttggaaaggcaagtggttcagggtggctaatatagaaaagcgcgcgaagagtaacgcagaggatggagttactctatgcgcgactatgttgagcctttagaaattcccgctggggacacagagttaatgaaggttagccccaatagccccgtgtttctatgagattcgcaaagaactctcttacctaagaataaacccaactggggatagagtctgatacaaggaaacccagttaggaggcacttatgaccatggtttaagagcctgaactacagtagctgtaacagaaaaaggwctgatatgggaactctgggcagtaatatagatggatttgtgttgggtgaagaagagggaggctgagcttgattcagatgtctttagtctgggaaattagatagaggatggtagcattaactgacataactaatacaagagacgcaccctcttttttatttggttgtttggagggaaagtaagatgagttgaattttggatatgaacttgaaatacctataagttatccaag

SEQ ID NO: 109192 - DNA, 554 bp, Homo sapiens
ggagctctgcattgcccactatgttcagaaacaaatacatttgcaatctggaatagttatatatttttgcaactcaaatctttctttgttatttagaactgtatgctagggctctcagagagccatcatataattgcagatgagaaacaaagcaacacaatcctattttagatatttggaaactcataaagatagaactaccttggtaactctttattctctgttcatgtgctgagttgrgtgctgaacccaccatgctttgcacacacttcattttatccatgcagaagcaccatagtcaacagctgggatctctcagcactcatcccagctcaatgaagatgctattcgggatgtttgatgtacagtatgtggtgtggtgcaatgtggtgaaaagaatctgaacttgaagttagcacagctgggtttgagtgttagatttgttacttcctaaacttgtgctcagcttaggcacaaagaaacaaattatattacctctttttgtctcaaatgtcatctttcaattgaagatattcttctactgcccaatgttg

SEQ ID NO: 109193 - DNA, 554 bp, Homo sapiens
ggagctctgcattgcccactatgttcagaaacaaatacatttgcaatctggaatagttatatatttttgcaactcaaatctttctttgttatttagaactgtatgctagggctctcagagagccatcatataattgcagatgagaaacaaagcaacacaatcctattttagatatttggaaactcataaagatagaactaccttggtaactctttattctctgttcatgtgctgagttgagtgctgaacccaccatgctttgcacacacttcattttatccatgcagaagcaccatagtcaacagctgggatctctcagcactcatcccagctcaatgaagatgctattygggatgtttgatgtacagtatgtggtgtggtgcaatgtggtgaaaagaatctgaacttgaagttagcacagctgggtttgagtgttagatttgttacttcctaaacttgtgctcagcttaggcacaaagaaacaaattatattacctctttttgtctcaaatgtcatctttcaattgaagatattcttctactgcccaatgttg

SEQ ID NO: 109194 - DNA, 545 bp, Homo sapiens
ctttgcacacacttcattttatccatgcagaagcaccatagtcaacagctgggatctctcagcactcatcccagctcaatgaagatgctattcgggatgtttgatgtacagtatgtggtgtggtgcaatgtggtgaaaagaatctgaacttgaagttagcacagctgggtttgagtgttagatttgttacttcctaaacttgtgctcagcttaggcacaaagaaacaaattatattacctctttttgtctcaaatgtcatctttcaattgaagatattcttctactgcccaatgttgaataaagagtaaaggagayggcatactttaatgatgtacatatgacattatctatgtcatacccaggtctggaaatacttcttctcatcattacctaaaaaattctaactgcaccaaaggaggtgtgttattggatatctaattttaaagtcattttaagtcccccaattctctagtttttcccataattcaaaagtcctgatattgcggacttcttactttttcttctcaaagtaagctagaataca

SEQ ID NO: 109195 - DNA, 438 bp, Homo sapiens
tatgaaataatcagataggagaatggaaaaataaatgcactacataaagtcaggctgcataagacccacttgaggtgagtgatcacgaatttaaagcgagaccaatcacatagttctgtgtttatctgcaatcacattctgtctcatgggtgcagccatagagtagagggataattagatttatacaggttatgattctcccaaacaaaacttataaaaagggtacatgagggaagccgagagcacaggcaagggaataataatgaatgaccatggaattgaagctggagaggaagggaaatgtgtacaagaggggagtgaggggaagtgaaagactgcatggaagcacttttagagttgtgattactgaaggaagcttcacagtcagggtggtgatggcagraagcagttgtttgaaacagagcttatggagagatt

SEQ ID NO: 109196 - DNA, 598 bp, Homo sapiens
atatgatagattgattacttagtaaagttgccggggcaattcagtgtataaagaatgacctttccacaaatgatgctagaacaattgggcatacatttttwaaaagtatttaaatactcatatcatatttataaaagaactcaaaatgaactataaaccttgatgtaaaacccaaaacttaggacaggagaatctctgtgatcttaaattaggcaaaatattttagagaggacagaaaaatcacaattcattaaaaaattggtaaattggaaccataaaaactaaaactgctcttcaaaagacactattaagaaaatgaaaaggcaaaacacagattaggagaaaatatttgcaaacacgtgtttgaaaaagaacttgtagtcataatacataaaaaaggctcatgaagtgagaataggaaaacaaactgcccaatttaaaaatgttggcaaaagaattgaacagacacttcacaaaagagctattgatggcatgaaaagatgctcaacatcattcgtcatatgaaaatgcaaattaaatccaaagtgaggtatcacaatagactcattagctaaacttaaaagctgacaaaaccaag

SEQ ID NO: 109197 - DNA, 571 bp, Homo sapiens
cttttctgggagcagatcttgaaccaaggattggggtgcagatgattttattgaggacgtgttctccagagacaccatgaagggaataggcagcagaatagagaaggggaaaaacccagcccagctttggtggttttttttagtccaacttagagtataagccatacctcagaatttgagaatttgttccctactcagcaaakgggcaggttgtttgtgctcttacgccaattgttcctttaggagatccttgggaagagaagggcccagaagcagtagtgttaacctctgggcacttcccattttcctccataccaaaggccagtcttcagaggcaaagcaggcagatgttgggggagggccacacagaacttgtaaaagggaccttaaaagatctggaaaggcaccatgagtgttcagtgcttgtttctctagtctgaaaagtggaagccattttctaaaaccatgaaagaataatttttgctagggctctgtttccaatccaaaagaatcatgttttccaatcgctgatgtcaggattagacaaaaggtttgttgcctagaccctgat

SEQ ID NO: 109198 - DNA, 441 bp, Homo sapiens
cactcaataaatctaattgttcaataaattcaatgaatgtcaaatctcattaagagagagagattagtgagattgagtgattgattttgagctagtggaaaaaaatgcaggggaagatagccagcaatactttgtatctatgtaccaacactatgctacttgttttacatatattattttacatatattatctttttaaaaaatagtcttgataaacctcatttttttattcctactttacactggaagataaagctcaaagaaattacagatcaccccaggatcacactgttagtaartatcagtgtgatggttttaaaccagttgtgttgggctccaaagatagagactttacactacaccaagttttagaagagctcagtgatttcaaaaaggagcagatttactctcacaaagcagtagttctctatctctagaaat

SEQ ID NO: 109199 - DNA, 593 bp, Homo sapiens
tatgttatttatatttttgcactgaaccatgcttaattatatagctcttgcaaactgtcctgcactggtcctgaaaggatgccaaaggtagtaaggaagactgaggccacatrgttgcattcaatgtatcaaccagaaagttcagggaaatacgattctggactagggatgacatgttttctcctgtaactttgcatatttatgacctatttctgatccttctgtagggaaacctcttcttaattttataattattatactcctacttgtgtaattcttcctgctgctgaatatcaagaaacctcaaatcttctcattgcctatctcacgtgaacatacaggcttcccgccacctagaattagaaaccaatttctaaaattttgagcatcatctgaatatgtcactatattttgtggaaatctgtgctgagcttactctatctgaagtaaaaccaccctttctaactgatatccttgacaccaccatcaaatgtctaaatcctctatgctttgaggatgaatgagctatccagagaaaacctcagatactgtctttacaagaattactctgaactaatcaactagtagtatca

SEQ ID NO: 109200 - DNA, 552 bp, Homo sapiens
caatgacaataaggttaaatctacattgatttttgaataaattgtgacatgactcatctgggtcaacatgggtaatcagcaactcaatgtatattctttggatgtccctcccccaccatctcctgctcccaccacctccatcataatggctgcaggtaaaggattcttgtaaaaggctatctgtggttcacagacttgcctggggtgggtaagcactaaatgcacccttcgtcagctaacataaggctcattcactcagcttagcttctttcccagcctcccaggttggtgcagtgtaatccccctttcctccttatttattttttaagatttcctataatccacatacatatgttcttttcttaaggtarcgattgtttttcagatcaaaaaagaaaaagttttcaatctattgattacagtaaaactcactaatctttttgttgcataaatgtgtttatatgtacatctatgtcctagttttagcatttctgcccttattcattttaatatcctttaaaaagtgactcctgttttttcttttgacctgca

SEQ ID NO: 109201 - DNA, 404 bp, Homo sapiens
tgggacttggtggaggggatggtagacctacatgctcaatttgtcattttatacctaattttctgttcttaaagtgttctgtaaaatactcccaccagattgagctttagccccaccccacccccaatacacatgcagccatttatttggcttctttctctcttttctgctcttcaaaaataaaaatacccaagcaaaaataaaaagaaaagtctccctatttcttatgccaacaaattcagctttctttatyccctgtcttcagccctggatgttttctgaagattctctggtacacttaaatgagtcatctactaagcgtctccctccactccctgcccctgacccccatccctaacttcctccaccagtttctgctaaggggagaagatgatatagagctc

SEQ ID NO: 109202 - DNA, 446 bp, Homo sapiens
caaacaaacaaacaaaaaaacaccatcatctggtccccaggaatgctctctttctccccaacaggacaaccctgtccagatgctggtgtctaccctcttcctcagctcttctcccaagacccatacccatgaagggggaccttgaaactcacattccttcttattcctgtcccatttcacatcaaaaatagttcttcaggtgtgtgtgtgtgtgtgtgtgtgtgkgtgtgtgtgtgtggtgtctagaaaaagacatctagcctctagagactgccccctccccttcccttcctacccacctggtgttgccctagaaaccaacttcaatcaaccccaaccccagatctggaagaatgtagaaactaccattcaatcctcaaagactgagtcacacccttctctgctctcatccggagggctgagtccctgagacccagcctcagctc

SEQ ID NO: 109203 - DNA, 446 bp, Homo sapiens
caaacaaacaaacaaaaaaacaccatcatctggtccccaggaatgctctctttctccccaacaggacaaccctgtccagatgctggtgtctaccctcttcctcagctcttctcccaagacccatacccatgaagggggaccttgaaactcacattccttcttattcctgtcccatttcacatcaaaaatagttcttcaggtgtgtgtgtgtgtgtgtgtgtgtgtgtgtgtgtgtgtggtgtctagaaaaagacatctagcctctagagastgccccctccccttcccttcctacccacctggtgttgccctagaaaccaacttcaatcaaccccaaccccagatctggaagaatgtagaaactaccattcaatcctcaaagactgagtcacacccttctctgctctcatccggagggctgagtccctgagacccagcctcagctc

SEQ ID NO: 109204 - DNA, 446 bp, Homo sapiens
caaacaaacaaacaaaaaaacaccatcatctggtccccaggaatgctctctttctccccaacaggacaaccctgtccagatgctggtgtctaccctcttcctcagctcttctcccaagacccatacccatgaagggggaccttgaaactcacattccttcttattcctgtcccatttcacatcaaaaatagttcttcaggtgtgtgtgtgtgtgtgtgtgtgtgtgtgtgtgtgtgtggtgtctagaaaaagacatctagcctctagagactgccccctccccttcccttcctacccacctggtgttgycctagaaaccaacttcaatcaaccccaaccccagatctggaagaatgtagaaactaccattcaatcctcaaagactgagtcacacccttctctgctctcatccggagggctgagtccctgagacccagcctcagctc

SEQ ID NO: 109205 - DNA, 562 bp, Homo sapiens
aacaaacagaatcatttatggtcaactgattttgacaaagataccaataaaactcaactggcaaagaacagcctcttcaataaaagttcctggcaaaactggatgctcacatgcagaagaatgaaattggaccctaatttcacatcatatacaaaaatcaattctaaatggattaaataattaaatgtaaaacctaaaacctaaaactgtaaaagtactagaagaaaacatagaagggaagctccrttacattggtctaggcaatgagaaccaaaactagacaagtgggataatatcaaaccacaaagaaaacaactaacagagttaagagacaacctatggaatgggagaaaatacttagaaaccatgcatctgataagggctaatatccaaaatatgtaaggaactcaaacaactcaccagcaagcaaacaacctgattaaaaaattggcaaaggaccaaaagaagacatgcatagccaataggtagatgaaaaaaaatgctcaacatcactaatcatcagagaaatgcaaattaaaaccatgatgagttatcatctcac

SEQ ID NO: 109206 - DNA, 617 bp, Homo sapiens
ggtggatgctggggagatgttggagatacaatatttcagttagataggagaagtgagctaagagatttgctgtacaacatggggactacagttaatgtattgtattcctgaagattactaagagagtggattttgagtgttttcaccataaaaaataagtgaggtaatgcatatattagttagatttagtcattccacaatatcattccacaatgtatccaggtttcaaaacatcatattgtacatgataaatayatataattttttgtcaattaaaacataaataaattaatttaaaaactataatccaagaagactttaaataatagaatacttgaatcaacatggcaaggtgtcaccatgtactagccacaatgatccagaatagcctcagaaatctgaagtttagtgccctttcactcagatacttacttctacattttaccatctgtcactaaaaattttcaagaagtgaactcttcccaagttaagacactggacacattaactgatgggtataattctaaagaatgtatatttaatgggagagttataagagacttcctctggatagaagactatctttgaatgcttcatgtcatagttattgcaactat

SEQ ID NO: 109207 - DNA, 551 bp, Homo sapiens
cagatatacgttagagatcaagtttggatccaactgccacaataaagagaatcacacatatttttggtttcctgctgcatataaaagttatgtttacactacaccataatctattaagtgtgcaatagtattatatgttaaaaacagtgtatataattaaaagtattttactgctaaaaatgctagtgatcatctgaccttcagtkagtcataattgttttgctggtagagagtcttgcctcaatgttgatggctgctgactgaccagggtggtggttactaaagtggctatggaaatttcttaaaataagacaacaataaagtttgctgcatcagttgactatttctttcatgaaagatttctctgtagcatgtgatgttgtttgaatttctttccacggaagaatttccttgaaaattggagtcaatcttctcaaatcccgctactgctttatcataagtttatgtaacattttaaatcctttgttgtcatttcaacagtctaatgatacaactttcatggatgaagagttgctattttttttttttaa

SEQ ID NO: 109208 - DNA, 619 bp, Homo sapiens
gttggtcaggctggtcttgaactcctgatctcaagtaatcttcttgccttggactcccaaagtcttgggatcgcatgtgtgagccactacacccagcccagctccagaacttctgcttgattctttttaattactgtaatctccaggttaaatttatctgatagaattctgaattatttctctgtgttgtcrtgtatttctttgaatttcttcaaaacatctatttcaagttctctgtctgaaagaaaacatattgctgtttctccaggattggtccctgatgccttacgtagttcatttggtgaggaccacgttttccttgattttcttgacacttgtagattttcatccatgtctgggcattgaagagtaaggtattcattttagtcatcaccatttgggcttgttcgtatctttccttcttgagaaggctttccagatatttgaaaaaacttgggttttgtgatctaagctgtatattctttagggagcaccttaagcccagtaatgttttgattcttgcagacccaaagaggtaccgctttgatgatcatgaacaagatctgggagaattctctggattaaaaggcagagacttgttctcttcccttctttttcc

SEQ ID NO: 109209 - DNA, 619 bp, Homo sapiens
gttggtcaggctggtcttgaactcctgatctcaagtaatcttcttgccttggactcccaaagtcttgggatcgcatgtgtgagccactacacccagcccagctccagaacttctgcttgattctttttaattactgtaatctccaggttaaatttatctgatagaattctgaattatttctctgtgttgtcatgtatttctttgaatttcttcaaaacatctatttcaagttctctgtctgaaagaaaacatattgctgtttctccaggattggtccctgatgccttacgtagttcatttggtgaggaccacgttttccttgattttcttgacacttgtagattttcatccatgtctgggcattgaagagtaaggtattcattttagtcwtcaccatttgggcttgttcgtatctttccttcttgagaaggctttccagatatttgaaaaaacttgggttttgtgatctaagctgtatattctttagggagcaccttaagcccagtaatgttttgattcttgcagacccaaagaggtaccgctttgatgatcatgaacaagatctgggagaattctctggattaaaaggcagagacttgttctcttcccttctttttcc

SEQ ID NO: 109210 - DNA, 619 bp, Homo sapiens
gttggtcaggctggtcttgaactcctgatctcaagtaatcttcttgccttggactcccaaagtcttgggatcgcatgtgtgagccactacacccagcccagctccagaacttctgcttgattctttttaattactgtaatctccaggttaaatttatctgatagaattctgaattatttctctgtgttgtcatgtatttctttgaatttcttcaaaacatctatttcaagttctctgtctgaaagaaaacatattgctgtttctccaggattggtccctgatgccttacgtagttcatttggtgaggaccacgttttccttgattttcttgacacttgtagattttcatccatgtctgggcattgaagagtaaggtattcattttagtcatcaccatttgggcttgttcrtatctttccttcttgagaaggctttccagatatttgaaaaaacttgggttttgtgatctaagctgtatattctttagggagcaccttaagcccagtaatgttttgattcttgcagacccaaagaggtaccgctttgatgatcatgaacaagatctgggagaattctctggattaaaaggcagagacttgttctcttcccttctttttcc

SEQ ID NO: 109211 - DNA, 598 bp, Homo sapiens
gaagttgagtgtgttctcatgcatcatgactggaagctgcctgattccggtaattttcatctttgctgtttctcctaatagaattgtttcatttggttaaaattactattcaggttgttgttaatacaccaaagagtgttacttaaatcagcaaatcaaattatatgggaatgggctggaaaataaccaaaatacgtcacagctatcaagcctatgtaagtgcttataatctcaagttaacatcgtacatctcttatcaactgctcttccaaattactttccagtgtatccattaagaaaaacattcagtggaataaaaagrtggaacgaaagctgctccttaatctgttcatacggattataagctgatccactcaatatagaaaatttttagatgttgtattaaatatgacacacactcagagaaatgcacaaatcttaatgacttctcacaaactatacacttttctgtcattggcactcatatcaacacacagagaattattagcaccctaaatctctctttccatttcccacacctcaaaggtaaccaatatcttaacttctagcagcaaagattagttttacaaattctaaa

SEQ ID NO: 109212 - DNA, 351 bp, Homo sapiens
atatcagccctttagctcattactaaagaacaggggattctggtaaattaaccatatcaatgcagtattttttacattattaactgatgaaaaatgggtgccctttacagacttttttaagattaggaaacaaaaagaagtcagagggatgacaaatcagaactgtaaagcagatgcttaatgatttcccatcaaaactcttaacaaaatgtcccttgtttggcccgaggagagagcaggagtattgtcatggtgaagaaggactctgtggtaacgctttccaggtwtttttctgctaaagctttggctgactttctcaaaatagtctcgtaataagcagatgttaccatt

SEQ ID NO: 109213 - DNA, 617 bp, Homo sapiens
ttttttgtgtacatagttgttaagttggtgtccttgcaggagagatgattggtggagtcctctacccagccaacttgctccacctttctcctgcatcaagatcttttaaaatccattctgtcmatctatatcttttaaaaggagcaatttatgttcaaggttaatattgacaggtgaggtatttttcctgtcataatgttaattgttatctagttgctttgcagtctcatttgtctaattgtttattagagctatgagttgcatacttttgtgtgttttcatcatggtcagtattgacttttcatttccatttttagaattcttttgagtatttcttgtaagggaggcaacgttaaagctaaagctatttcaaaaacaatcaaaaaaagtcttcgacaatcagagcaacatgttttgcaggtatatgagtagccacaaagtcaagtgaaaagactaaagtggcttactatttttttaaccttaaatcatgtggtctaaataaattattttagaataatttagaagagaaagagataatcacaaaatgaggaaattttatcagataagagttcttttggtgaaatatcagtatgtattaattcacttgagatatttac

SEQ ID NO: 109214 - DNA, 617 bp, Homo sapiens
ttttttgtgtacatagttgttaagttggtgtccttgcaggagagatgattggtggagtcctctacccagccaacttgctccacctttctcctgcatcaagatcttttaaaatccattctgtcaatctatatcttttaaaaggagcaatttatgttcaaggttaatattgacaggtgaggtatttttcctgtcataatgttaattgttatctagttgctttgcagtctcatttgtctaattgtttattagagctatgagttgcatacttttgtgtgttttcatcatggtcagtattgacttttcatttccatttttagaattcttttgagtatttcttgtaagggaggcaacgttaaagctaaagctatttcaaaaacmatcaaaaaaagtcttcgacaatcagagcaacatgttttgcaggtatatgagtagccacaaagtcaagtgaaaagactaaagtggcttactatttttttaaccttaaatcatgtggtctaaataaattattttagaataatttagaagagaaagagataatcacaaaatgaggaaattttatcagataagagttcttttggtgaaatatcagtatgtattaattcacttgagatatttac

SEQ ID NO: 109215 - DNA, 201 bp, Homo sapiens
gaattcctagcttcaagtgatccacctgcctcgacctcaccatcctagattttaaaccttgaaattttctagagctgcctcccagtgactttaacttactgtgtggayctgccttgctgccctcacttcttcatcttctcaccccgtcctcaccacttccttgtcttcttttggactggcttgtgtttacaacattggatt

SEQ ID NO: 109216 - DNA, 555 bp, Homo sapiens
aaattcttaactcattccagcattaactcaaaagtccaagtccaaagtcttgtctgagacaaggtaagtcccttccaccaatgagactgtaaaatcaaaaacaagctagttacttccaagataaaatggggatrtaggcattgggtaaatgcttccatttcaaatgggagaaattggctgtacagctccactaggcagtaccccattggagactctgtgagggggctccaacttcacattttatctttgcactgccctagtagaggttctccatgagggcttcacccctggagcagacttctgcctggacacccaggtatttccatacatcctctgaaatctgggtggaggctcccaagcctcaacacttgctctctgcacacccacgtacttagaaccacgtggaaaccaccaagtcttcttatgacttgcagcctctggagcagtagcctgagacatatctgaggactttttacccatggctggagctggagcagctgggatgcagggtgtgcagagcagcagggccctgggcctggcccacaaaagcagttt

SEQ ID NO: 109217 - DNA, 555 bp, Homo sapiens
aaattcttaactcattccagcattaactcaaaagtccaagtccaaagtcttgtctgagacaaggtaagtcccttccaccaatgagactgtaaaatcaaaaacaagctagttacttccaagataaaatggggatataggcattgggtaaatgcttccatttcaaatgggagaaattggctgtacagctccactaggcagtaccccattggagactctgtgagggggctccaacttcacattttatctttgcactgccctagtagaggttctccatgagggcttcacccctggagcagacttctgcctggacacccaggtatttccatacatcctctgaaatctgggtggaggctcccaagcctcaacacttgctctctgcacacccaygtacttagaaccacgtggaaaccaccaagtcttcttatgacttgcagcctctggagcagtagcctgagacatatctgaggactttttacccatggctggagctggagcagctgggatgcagggtgtgcagagcagcagggccctgggcctggcccacaaaagcagttt

SEQ ID NO: 109218 - DNA, 494 bp, Homo sapiens
gtaaaattcacatggaactaaaaatccgtgaataaagaaggcaaccatgagcaagaagaacaaagctggaggcattacactatctaatttcaaactatactacaaagctgaagcaattaaaacagcatggtactggcaaaaaaaaaaaatagatatattaaccaattgaacaaaatagwgaccccagaaataaacccatgtatgtacagtcaattaatttttaacaaagatgccaagaatatgcaaagggaaaaagacagtctcttcaataaatggtcttgggaacactaaatatccacatgcaggagaataaaattggatcctcatctcacaccatatacaaaaaacaaaccaaaatggattaaacacttaaacatggcaccggaacctttaaagctaatagaggaaaacatcagtgaaaattcacacaactttgggccatgaaattatttttggatatcacccaaaacacgcatgcaacaaaaggataaata

SEQ ID NO: 109219 - DNA, 566 bp, Homo sapiens
gacacggagaaactgataagattcacgatcttcaggaggtagaacccattaagtgtggggagatgaatgaagagttaagcctgactcccagacttctggcttcaatgctaacagattagtggtaccatctattgagattaaaatttaccaagatggcaaaggaagtctgtttctggatatattaaatttggggcagctaccaaattttcgagaaagagccagtggttagttaaataaagatctgtatcttagggaagagatgtaagctggagaaaaagatgccacacaggtgaccatcaaagtcaaagatgctgatgagattacmtaaggaaaagcacatgaaattggagattagaagaatgagagcaacaaccttgaagaacaccaacatttagaagcatttaaaaagacagagcaagaagaaatgtaggatgtggtatcagagaagccaaggaagaaataatttcaaaaagtgaagtgttaagttttaactgccaaaaaacaataaactggccggttgtggtggctcacaccaataatcccagcatgttgggaggccaaggcaa

SEQ ID NO: 109220 - DNA, 400 bp, Homo sapiens
gaattcaacacaattctgttcccaagcatgttggataagggatctcaacctgaaataacaatttttctcttacatagtcatcctttctgcttccttttcaccaagctcccaatattgtgatgtgaaaattttttggttaawtatcctgtgattagtaggctatgcaaataatgcacagaactgtgcactgtagtatgcttttatattttctttctcacttttcttccttaaaattagtaattgctttcttttgcttcttttcacttttactgctgactttccacagtatccaatagcctgccaatacgattttccacaaggtcaacgtagtgtcagttcatctgttatttccaatatttcttggagcgctctctaggagacttccattctttgtggagtt

SEQ ID NO: 109221 - DNA, 406 bp, Homo sapiens
ttcttgaagctccatatgtattttgaagttttatgatacgtaatcatgttctctactgaagtaatcaatttgaactgtaccagatgggtgttcagaagtcatcaactgatgagtcatgtatcgatcacatagataactctcattgaaaaatgtgtctaagtgtgggtaaggaggagcgtggggggtagaaaatcctttatttctttgtggaaaatggccccaaaagraagatagtgcagactgatgcaaatcacttggtctaaaaatggggaatagtgtttagtcagaactggtgactgtggagaattaagaagtagaattttattataggatgtgaaggagtcctccatatattatgaactgaagatagaaaatggttcataaaatctggtaggccatttaaaac

SEQ ID NO: 109222 - DNA, 528 bp, Homo sapiens
gaagttgtactttggataagatccaacaagcacttaaaaaaacaacaacaacaactatttttctcatctattaagtatttcatttaaaaaatcctcagtctaatggaaaggatagtttattacctgatcaaactatttacaagtaacaggactttgtgaatgtggttttgagagagaaatttttaaagtgatgcaataaagcacttgatttttaaaaatccaaattatgataaagtagactcaactgggtaagtcttgtagagtgaagaactccccatatccaatgctggagaacaagaagcagcagctccaactacacttttaggagatgaaatttgctgatatagttctttctatgcaacagcagaaaagagcttctttgtgggaactgcatcacgtttccctacaccatcccatakcaccctataagggcacagcaaaagattgtagcttactattaaaggccactaatcatcttgtttttttttccataccttgattttaaattattaaccaatgatcagcaaa

SEQ ID NO: 109223 - DNA, 497 bp, Homo sapiens
cttatgtcatatttttacaacatctatrtttaacgtatactctaaggtatacttagattagggttataatctactaattttttcatagatgtccttttcaaacaatcatgttctatttacctaatgtgtattcagattatactataccttttattcttttttttttctttttttttgagacggagtcttgctctgtcacccaggttggagtgcagtggcgcaatcttggctcactgcaagctctgcctcccaggttcacaccattctcctgcctcagcctcccgagtagctgggactacaggtgcccgccaccacacccggctaattttttgtatttttagtagagatggagtttcactgcgttagccaggatggtctcgatctcctgacctcgtgacccacctgcctcggcctcccaaagtgcctatatcttttattctgagtgattcatatagctattactatttatttgtttgattgtttgtacattattttca

SEQ ID NO: 109224 - DNA, 594 bp, Homo sapiens
aattccctccgttttttttgttttkttttgttttaaaaatattatttcatttttgagggttagctagtatagtattattgactggctgggtttttttctttcagcactttgaatatatcatcccattttctcctgtcctgtaatgtttctgctgaaaaatttgctgttagagtgatggagtttctcttatgtttgacttgacacttttctcttgctgtttttagcattctctttgtcattgacttttgaatttgactacagcgtgctttgaataagatcttttgggtcatatctgtttaggaatctttgaacttcctgtgtttgaatagctgtctcttgtgagactggggaagttttcagctattattccattaaataggttttctatgacattttccttctctacattttatggaacaccaaaaatttgaatatttgctcactttctcgtgtcccatatgtcacatagcctgactttattcttttttattcttttctttcttatttttgtctgactgagttacttcaaaagacttgtgttcaagttttgaaattgttttttcttcttgatccagtctattattgaagctctta

SEQ ID NO: 109225 - DNA, 401 bp, Homo sapiens
gggctcaaccctcaaaaagggaatcaaacccagctttggggtttaggttttatgtttcatgacatagaagataatcaccatagagggttttctcaatatcrtgttcaacctctcagcctatatattctctagatgtagactcagaagtccatcttagacgtgttttgagcaatgtccagtgagcaagtggtaacaaagaggaagccatactcaagatcacctaagaaccaaacagcagtttggaaccacacaaaatgtaagcctccttatctctagtgtgtgagaaaatcggtttatttaagagttgagaaaaaaatttacttttccaccttccaaaagagaggacaatttttatgagggcttatattaaatattaattgctatgcaacaaattactccaa

SEQ ID NO: 109226 - DNA, 401 bp, Homo sapiens
gggctcaaccctcaaaaagggaatcaaacccagctttggggtttaggttttatgtttcatgacatagaagataatcaccatagagggttttctcaatatcgtgttcaacctctcagcctatatattctctagatgtagactcagaagtccatcttagacgtgttttgagcaatgtccagtgagcaagtggtaacaaagaggaagccatactcaagatcacctragaaccaaacagcagtttggaaccacacaaaatgtaagcctccttatctctagtgtgtgagaaaatcggtttatttaagagttgagaaaaaaatttacttttccaccttccaaaagagaggacaatttttatgagggcttatattaaatattaattgctatgcaacaaattactccaa

SEQ ID NO: 109227 - DNA, 401 bp, Homo sapiens
gggctcaaccctcaaaaagggaatcaaacccagctttggggtttaggttttatgtttcatgacatagaagataatcaccatagagggttttctcaatatcgtgttcaacctctcagcctatatattctctagatgtagactcagaagtccatcttagacgtgttttgagcaatgtccagtgagcaagtggtaacaaagaggaagccatactcaagatcacctaagaaccaaacagcagtttggaaccacacaaaatrtaagcctccttatctctagtgtgtgagaaaatcggtttatttaagagttgagaaaaaaatttacttttccaccttccaaaagagaggacaatttttatgagggcttatattaaatattaattgctatgcaacaaattactccaa

SEQ ID NO: 109228 - DNA, 608 bp, Homo sapiens
tcaagacaatgtaagtatttatttaacaaactattccaagacttactactttcagacactgggctgagaactaataataagggatttggtgttaaaagtcatagccctgggatgtgcattttattgcagtgtaaaaacaaataaattaatagctattgtacaatatcattatatgctttgatagaaatgtgaggagagttatcagagcacataggaggaatgcctcaaacagctggggaatgaggaacttgaggaaaattggggaagataacttggtcaggcctatttgaactgaaacttgaggtagaaataagactcatgtaagaagttccaaagcaggtaagataaagaagtttgaagggaaatttgaaatgaaagggtatttctggtagtgtgtgcaaggcaatgatggttgagagagcaaagtatattcaagtatcttcaaaccctttaatatgcatgacaaatagaaagaatgaggaatcagaatcaggagacagaacccagacctaaactttactccagaaaaagcagcatagactttattctcaaagttwtgaagatcactgaaggcaagaaacataagaaaccccaaattataaatggtc

SEQ ID NO: 109229 - DNA, 656 bp, Homo sapiens
tatacaggaatcaagatgaaggaatgcccagaaataaaactcctckttgtggctgtaaaccaaaaagtgtctgagacaggtgtcaatcaatttagagatttattttttcaaggttgaagacatacctgggaaaataagacacaagtcaccataggatctgtggcccctgctttttccaaagagggttttgaagactacaatatttaaatgggaaagagtggcttggggggaaaaaggaaagatactgtattagtccattctgatgccactatgaagaaatatttgaggctggataatttataaagaaaagaggtttagttgactcacagttccacatggctgtggaggcctccagaaacttacaatcatggcgaaaggcattttttcacagggtgccaggagagagaatgagtgccaagcgaagggagaagcccctaataaaaccatcagatctcatgagaactcactcactgtcatgagaatagcatggggggaaactgcccccatgattaaattacctcctactaggttcctcccacaacatatggagattatgggattacaattcaagatgagatttgggtggaaacacaaagctaaaccatattagatacaaaagggagggtaggtagtgagataagtggtcacatttttgt

SEQ ID NO: 109230 - DNA, 391 bp, Homo sapiens
gaactcagaaaaaggtccattgtttctggggaaataaataagcaaaagtactttaacccataaggaatggtcaagacaatctcttggacccaggattttgcatgatttcgaagcagagttttgctaccacttggagaggggcaataaagactctctcacacaggattttccacaaatagaagacagatttttgctmtaaggagagtgataaatactctctataaagaaaccctatgtctaaagaaaagacatattgggcctgcctaaaacttggctcgtccacaagaaaagagagtactctgcacccctcataatcctagtattgagcacaagtactcctatagtaagagcacaagatttgagattgtgttcatagcggaggtctatgatg

SEQ ID NO: 109231 - DNA, 604 bp, Homo sapiens
gtaccactttcagctgaatgcatatagctttcacactgtcataaacattaaaaaccataacttgaaccatcataagtcacgtgccatctgtatacatgtaactctattctgtgtcacatatattcaaattaaataatataaatactaaaatgcrtctgacaacaaaacatccttttcactaatagttttttaatggaaatatgtgcttagcatgatagatgaaagtcagctcagcttaagaaagccctgaaaggatagaaagtgaaaataactcattatgtgcctatttggatgagtaggtgggagagggggtgtctgtgcctccatgataaggctgttgggtctgtatctgatgcctgttgctcagtcatgctatcgcttctctaaaacatgtatacacattgcctcaagctatataaggtattttgatactttattcttaaatgtatttaagcattaaaaaaaaaaaaaaacttctggcagctgttgtcaggctggtacaaagtttctcaggagtctccaagaaatgaagtagttaatttgataaaaatctgttctgagagtattttaatatatttatacatcctaatttaactcccaaacc

SEQ ID NO: 109232 - DNA, 584 bp, Homo sapiens
gcaagtttttttttaattggcagaaaagcaattcaaaacaaagagtgaatgcacagatgaattcatagatggctccgcagcagttggcaatagtgtgtgtgtgtgtgtgtgtgtgtgtgtgtgtgtgtgtaggtggggagggtggaggagagtggtgaggagaagacagacagagagagagagattagtgtcagccaagtggaaatttagtagttctcagtttcctcattcactggttaacatggttattaaatgccaacaatgttgagacattgacatggtacctttcctcgacaaacttaagagtctaagtagagaaggcctatkataaaaaggaaaacaaataactcgatatcaagataaatattcagaaaattgtttactggttttgaatcctgaacaggatcatattgagaataaatgggagaccgactgagacattatcaaaagaactcatacaaatatatttacaaatggtttaagagctaagagggccatatacaaggtcttgtgagagcacctgacctagtctgaggcatcagccaattcttccttgcaggaagcactattttaaatccattcca

SEQ ID NO: 109233 - DNA, 617 bp, Homo sapiens
agattgctagtaagttaagcaacaacttcttactaacagacaagcattcaggtgcagacctctctgactctagagtctgtgcatttatactacagttgctcagagaagacatctgagaaagcctattaggaagaaacaggataagatatctaggataaggtgagtccttcctcaagtcagaaagaactacaggaagaaacttgtttaaaacaggcccaagggatttattttggacctccatttctgtccaaaagattgagtaaaaggaactggatttatctttctgcttaacacagccaaaaaaaatgaatatatgaaatagcttcaaggcactggacacctagacaattaatgaccatgattcttgagaggtggaaacagatcaggtgagtctatgattgccgcagcttactgccataaaagacataacacaaggtggggagtccaggcagatgccaacatagccaagaccagggagaagaaaaaaagccagactcaaaaattcataataaagttcaagggcctataagcaacaaagcaatgctgaaaaggaacamacatgaaagactaactctacaggatttcaacacttaaagttatagtaatccagacagtgt

SEQ ID NO: 109234 - DNA, 462 bp, Homo sapiens
ataatgaaatagttcttgtgattctcaaaagcatgacttaatttgcactgatttactcatatatgatttggtatagcggtttattatccttactaagcaattctatagaattttacattcaaaatcagtatcttgtttttgctcttatagagcacaacataaagtgaatatcaacaaattgataattacaaaccaaatagcaataatcattatagtttaaacaactatttacaactagtacaatatttatacaaatattgtattatataaataaataaaacaacaactatttatttagctcgtaaytctgttggtcagcaatttggactgggctgaactgtgtgattttctgctggtctcagttacacctacaagttcagctaaaccattttgcatgtcaaaacaaaagagtgtgaccacctatcaactggggttgttgggaagcctggactatatgtgtcc

SEQ ID NO: 109235 - DNA, 643 bp, Homo sapiens
ataaaactttggtaagtcctcctttagattttaggcattaagagatcctggcccaaagtaggcacttggtttgtgtttattttctaccctgacaggtttggaggatcttctgagctattgaaaccctactaccccttccagcaccgatggcacactgcagataacctttctgattaggtattctgattaggtaaaagaaaaattaaaaggaacactcagagaacctctgcttggattcgtgactgtagtttgtggcattcgggagactaaaagttttcttaggaaatctttcaagtgagtctgacattgcatctgattaatktttttttttttttattccagaggataacaggctgtttatctaggacctataaactacattttgtgctccttcaggcaggtttgccatgacaaaaaagtgtgaaatagcattttgtgttcaggaaactaatatgattcagtgaccttggtggagagtagagaatcaaggctgagaaaaacatcaggaacaggaccatggtagggtgaatatactacataaggtgttttttgggaggatcctgggtggaggggccagggggtggtcagatcatgtgacttttaggaaaatattttgataccacagaatgccagttagcaaaat

SEQ ID NO: 109236 - DNA, 600 bp, Homo sapiens
ctgaccgttacagaaacaggtgggctccctctctgtttttaactatgtccaaaaataatgggattctgctgatattaggaacttcagcatctatatgaaatctgcttttttcataaatgagatatctattttgagaacctcttaacaagaggacctggcaggtcatagctacctcatatttcaggtatttgcagagaaggtgcataaaggaggagagttactatgaccgaaggagaaagatgctctaaaatgagctcacggattggcttccatctgggtgttctgctgctgctttcaactyagtctcctctctctagcattaattgtcatctgttttttttcctccagtgtccttactttctattcttcactatactattgtgcctctttggctttctttctttctctctactcggatttctttctttctgtgccactaaactcattgtttttctttgtgctgcctgcgttggctttctgatggttactttctgtgtcatttacttagttatttttcctcttcacctgtgatatctgggctatttttatactaatctaaatattatttctttcctttagaaatacttttttatgtgtatg

SEQ ID NO: 109237 - DNA, 628 bp, Homo sapiens
catggttagaaacttctaagtcagagctaattacagctacctgacaggggggttttgagtattaagtgagataatgtatataaggcacctaatatgtacctgaagcacggtgggctctcaacaaattcccttctcctgccaccctacctgaaactgacatagaatgacaagggacaaacctgttaggagacaggcaaagatgataaaggtactttccattccacagctcagagatcctgttccaggaagcatctgtcttgacaaggtgtgaggactctaagggaggctgraactctaagggagacaatgagatgctaacaagctggaaatcagatgcatttcaagaaccatttacaccccaacaggctgacctcagaagggcactcgagactgcccactgctttgtactgcaggaaggtgagtgttcaaccctaaagaggcgctggtccaggaagccctggttcagtatcccagtggctgaggtctgacctgtagcctgttctcaaccaaatggaggaagatggggggtcactcaggcccagaccagaaagcaggctcaccgccctcttacttgctgtcaaatttcctaaccagtcattagaagagtcactctgtgggacacccagtt

SEQ ID NO: 109238 - DNA, 628 bp, Homo sapiens
catggttagaaacttctaagtcagagctaattacagctacctgacaggggggttttgagtattaagtgagataatgtatataaggcacctaatatgtacctgaagcacggtgggctctcaacaaattcccttctcctgccaccctacctgaaactgacatagaatgacaagggacaaacctgttaggagacaggcaaagatgataaaggtactttccattccacagctcagagatcctgttccaggaagcatctgtcttgacaaggtgtgaggactctaagggaggctgaractctaagggagacaatgagatgctaacaagctggaaatcagatgcatttcaagaaccatttacaccccaacaggctgacctcagaagggcactcgagactgcccactgctttgtactgcaggaaggtgagtgttcaaccctaaagaggcgctggtccaggaagccctggttcagtatcccagtggctgaggtctgacctgtagcctgttctcaaccaaatggaggaagatggggggtcactcaggcccagaccagaaagcaggctcaccgccctcttacttgctgtcaaatttcctaaccagtcattagaagagtcactctgtgggacacccagtt

SEQ ID NO: 109239 - DNA, 607 bp, Homo sapiens
ctttttgaggctagtttctagatcttgtaggcatagttcatttaattgtttttgtctctcctgactgtgtattgttaaatagcctaccttcaaactcactaattctttcttctgatgaggctgatgcatttttcagtatgtgaattgcatctttcagcttaagaatttctgcttgattctttttggttatttcgatctctattaaatttatctaatagaagtctgaagtccttctccttgttttcttgaattgctttgagattcctctaaacagctattttgaattctctgtatgaaagttcacatatctctgtttctccaagattgatttctgatgcctagttagtttgttcgtttgtttggtgaggttgtgttcctgaatggtcttgatgcttgaagatgtttatcaycatccagacattaaagagttaggtattttttgtagtcttcacagtctgggcctctttgtacctgtctttcttggaagtatttccacatatttgaaaagacttgggtgttgtgttcttagccatatctgcattagggggcaccccaagcccagtgacactgtggttcttgcagactcttagaggtgacaccttgatga

SEQ ID NO: 109240 - DNA, 470 bp, Homo sapiens
ctctatcagatacttattatggtttgaaaatattttctcccagtctgtgatttttcaattaattttttttttttttttttttgagacagggtctcactctgtcacccaagctctagtgcggkggggtgatcttggctcactgcaacctctgcctcccagggtcaagagatcctcccacctcagccttctgagtagccaggactacaggagcacgccaccatgcctggttaatttttgtattttttgtggagatggcattttgctctgttgtccagtctggtctcaaattcctgagctcaagtggtccaccctccttggcttccgaaagtgcagggatttcagatgtgaaccacctccccgggccaattaattttcttaatagttttttgaaacaaaattttatattttaatgaagtccaatttattaatattttcttttatgaattgtgctattagtgtcttaagaattc

SEQ ID NO: 109241 - DNA, 396 bp, Homo sapiens
gcagccaggcatcctaattacaaatggtaaagtaggttccagctagtttaagcagaaaaggttttacaaaggcatagtggatagttttatgaaacatcagggaaggccagagaaccagatttggtttttaatgtcagtaaaaaaaaaatgcccaaccacaccatgggactcttctaatggaaacagctgtgaagttgatacccacacttaggaaccttggacttgtctggacgccaatatcccatgctgtccaaaaaatccgatttccctttgaccasctgccaccttatgcaggtgcatgtgattggaagaaactgatcacaggcctgcagcctagctggaagggagtcaatagggtgttgtttttagctttccagcctacattgtaaagaaaag

SEQ ID NO: 109242 - DNA, 502 bp, Homo sapiens
aaaacaaaatgagatacctagatgtgtaaatatttatatgactcagaaaattatgagacattatttaaagccagcaaagaacatttacataaataggagatattaaaagtttcagtatcacaatgatgtcaatcgtcccaaaataattaatagatttaaagcaattcaaattaaaatgcctacatgtttatatagtagctgacagtctaactttaaaatttggctgggaacacaaagcatcatgaatagcgaggcattcttaaggaaaacaaacaaggtttagtagatgtgtccaaacagctatcaggacttattataggtctatattaaaatggtggtgtgagtaaggacagaaaaattaaccaayggaaagaataggcatatggaaatttagtttatgatagagctgatattgtatacaaagtggagaaaacataaactattaaataaattgtagtaagacaataggtaattactgctgaaaaaaatgacacttgagtcc

SEQ ID NO: 109243 - DNA, 602 bp, Homo sapiens
ggagaataaaagttcacaggacaggataactaagaaacacacgcagattcacacatgcgcacatacacacacaccggcaaaactgaaggtaggacaaggtcacatttgcagaattgcttcttccccaattgtgtattatgagagatggttgctgtggtgatgggaagagggctaaacacggagggcttgtcacaggggctgtaaactggcaagggcttaacctatagaaatcttgttgaaattatctctgcgaattgggttgagaggctgcctcatctagtctccatcagaggcccgttgcatctcttcaggttctattagtcactcgtattggttgtttctatcatcctgaggggatcccaagcctctgctacaaagagagaatgtcccacccgacatcctaggattcttccagctctaaatttatgaacctatatgatgactctggaggattttttatgggctatttttctgcacaggccatgtgggaaaaaawttggtacacatactttaaagcatgcccataaatatatataaaaagtgagccacaggaagcgacactctggtgtgggctgtgcaggtactcctctctgctggagcct

SEQ ID NO: 109244 - DNA, 544 bp, Homo sapiens
atatccactaatgagactgctgagtcaaacagtaattctgctttaagttgagaattctccaaatggctttccacaatggctgaactaatttactttaccaccaacagtgtataagcatcctcttttctccacagtctcaccagcgtctgttttttgacattttaataacagctactctgaatggtgtgagatggtatctcattgtggttttgatttccatttctctgatgactaattatgtggagcactttttcatatgcttcttggccgcttgtatgtcttcttttaagaaatgtctgttcaagtcttctgcccattttttaatgagttttttttttgtttgttttttgttttgctttttcaattgtttaagttctttayagattctggatattagaccttcatcagatacaaagcatgcaaatattttctcccattctctaggttgtccgtttcttttgctgtactgaagctctttagtttaatcaggtcctgtccatcaatttttgtttgtgttgcaattgcttttgaggatttagtccta

SEQ ID NO: 109245 - DNA, 550 bp, Homo sapiens
atgagaaccaagtgaaagggcaaaccccttatagaaccatcagatctcgtgagacttattcactaccatgagaacagtatgggggaaaccgcccccgtgatataattatctcccactgggtccctcccacaacacatgggaactgtgggagctacaattcaagatgagatttgggtggggagagagccaaactatatcaaacctctactgtgggatgttaggaaatgcctatcaggctgtgtgatttttgtcccacagtgtacacattttctggagaatcacaggacatgaaaacaaatatgatttcattacatgaacctttccagtgtttgaccaaatattaagcttatcaggccaatttaactgacagttatagcatacttcctgaatccaagacacagagccaggcaccaagcaggaagaaggtggtgatatggccaacagaacagaaaatcagaagccctrtagtggtggtgccacggaaacagtggaaggtgaagtttctgcatgggtcaggcatacattggtgaggcacattcgaggccagcct

SEQ ID NO: 109246 - DNA, 505 bp, Homo sapiens
gttccctcttaccataaattaaatatcaatttaaataacattaagtaattcaaagtaccagtgctacagagacatgacataagttgtgccagtcaagtttgcctaaagtttgctttaaaccagtgattccgagaaaaacaacacaaccaccccagggttgtaccctctgttggaaccaggtcacgtggaaagtggcaaataatctgtcgctaaggtcgctggacacctcacacaaggcagacatgcgggtttcagagtcagatgtccactgagctactgtttgaatccccttcccataggaatcaaggaatttgcttcttcttgtccactctacsatttggtactgtaatgaggaccacaagctttcattgttggatctgggattcaaacctgagtctgtttgcctctgaggacattgatatcccccggagtggggtctccctttgctgcggttgctcagagccttccggagaagacaggtgctggtggtataccagtctcagcc

SEQ ID NO: 109247 - DNA, 617 bp, Homo sapiens
taaataagtaaaaccatacgattatttttaaaatgagtgaatgaatgaatgtcatgcacgtaaaagccaaagagtaaccacatcaaaaagataaatgtggttttctgtgttctcaatgagggaggcctctggaggtgatttagaaatgtgggtggmggtggtggtgaagttggttgcaaaaatgacaagaagccattactggcattggatgtccaggaaccaaagattttaaacatcttgcaatgcacgagacagtcttcagcaagaaagaagtgtctcactcacaatgctagtaaccatcttggtgaaaaacacagtttaggtgggtttccccctctacttttctatattttccagattgttttcatgagtctatttcccttattaagattaaattatacctattctataatttgacactgtaaaatgaaatgataaaatatagataaagcaaagataataacaatcacccatattcacgttcttgctgccaagacatccagtgttcacctctcagtatacattgctttagaatttgtgagccatggattgcaacgatggtccagttcttcgctcctttccatctcctgtgtccatgcactctgctctgtgacttt

SEQ ID NO: 109248 - DNA, 470 bp, Homo sapiens
cctccacagtctattacctaggaacccagctgggcccctcaattccagagccaccactcagtgtaagtaaaaactgatgggcaattatcagctgaaaggagcccgtagcagtgggtaggcccaccaccaactagacaaagaaggaaagcaagtgggaaatcaggagaaaagccataaataaataataaagtagcatacttcataaaggtgaaaattgcccagcttctgagattmttcaccaataaaacgcttgagtcagttctgacacatctatgcatatatggaagaattgttgcataagagattctgagcgaaagccttaatttattattaaaaaaatcagtgaagaatctgttgtaaaaggcagctttccaaagacatacacatttttattgggagtagctaagtagaaattcagactccagcggggtgaggtccaggctgcagtgagccttgatcataccactgca

SEQ ID NO: 109249 - DNA, 548 bp, Homo sapiens
  misc_feature (1)...(548): n = A,T,C or G
nnnnnnnnnnnnnnnnnctcttattaatgcagatattgttcagtgtaaagttgtttactgggacagattatttaaattaaatgtcattttggaaaagtgattttttcaaagtagtaagcaacgtcttggggccaagtgtgtgtgggatgtgtagcagaggtttcacgttgtgtggacctgttccaacagtaactcctgggaatgttaaatcatcgtgggcccaatctgttactatggcagtgccatgaatggagaccccatgattctgtcatttcaagtatgtscctcagagcaagaacatattggtttgcttgtacagaaaacagaatctgacatggagaaaaataaacaaaactatatttttagttctgttattaacacttcagattttagatcttcacttatagaatctatttgtcttcagtacgagagatacaggttgcttattaaattaagaaaggccaagcaataaagatctgagtagaataacaatttggagcctactggcctataaaatagctccatttttctcaatcaaattatgaatg

SEQ ID NO: 109250 - DNA, 548 bp, Homo sapiens
  misc_feature (1)...(548): n = A,T,C or G
nnnnnnnnnnnnnnnnnctcttattaatgcagatattgttcagtgtaaagttgtttactgggacagattatttaaattaaatgtcattttggaaaagtgattttttcaaagtagtaagcaacgtcttggggccaagtgtgtgtgggatgtgtagcagaggtttcacgttgtgtggacctgttccaacagtaactcctgggaatgttaaatcatcgtgggcccaatctgttactatggcagtgccatgaatggagaccccatgattctgtcatttcaagtatgtgcctcagagcaagaacatattggtttgyttgtacagaaaacagaatctgacatggagaaaaataaacaaaactatatttttagttctgttattaacacttcagattttagatcttcacttatagaatctatttgtcttcagtacgagagatacaggttgcttattaaattaagaaaggccaagcaataaagatctgagtagaataacaatttggagcctactggcctataaaatagctccatttttctcaatcaaattatgaatg

SEQ ID NO: 109251 - DNA, 581 bp, Homo sapiens
ggtgggaattgaacaatgagaacacatggacacaggaaggggaacatcacataccagggcctgttgtggggtggggggaggggggagggatagcattaggagatacacctaatgctaaatgatgagttaacgggtgcagcacaccagcatggcacatgtatacatatgtaaaaaacctgcatgttgggcacatgtaccctagaacttaaaataaaaaaaaaaaactcctccccaaacacattgtgtttctttgaataatccagatactgtcacctattatgactcaaraaagtttggctgattatttccaatgggactgtaattaagatgccattggaggcagtgttgcatagcaattttagaatctgggttctgaaatctgagatcaggcctcaaatactatctccatcattttttagctgggcaaattaatctaattctgttttttcacctttaatctagagataaacacagcacatatctcgtggagttttgtgaggatcggacaagatgtcatgggtcggttttaggaatacttcttagtgcgtgtagaactgctcatgtatcctaaactactgcta

SEQ ID NO: 109252 - DNA, 452 bp, Homo sapiens
  misc_feature (1)...(452): n = A,T,C or G
atgcaggcctattctctcaccctgcacctagaatactctgctgaagcagaggaaggcatcagctcccatccaggatagttcacctaagaccatctcacatgccttgcacacaacaaccaaaggcagaatcaggaaaccttcagacagagtcctaaccatctggggatgatctccaacagagaaattccagggcaatgatctagagttgtgattctttgctctgtagataaaaattctactaaaagaaaacaattttgtcattatttcctactgctgtcmattagactgtgcattccttggaaggaagatctattcttactgttatctgtgtgcctggcaataaatgtttgatgaatgaatggagcagtcagaggagatacccaattaattttcacagtaagggtcatgnnnnnnnnnnnnnnnnnnnnnnnnnnnnnnnnnnnnnnnnnnnn

SEQ ID NO: 109253 - DNA, 460 bp, Homo sapiens
tctcacacaagaaagaattcagagtgagactgtagactaaaatgaaagcaagtttattaagaaagtaaaggaatacactttgggaggccgaggtgggcggatcatctgaggtcaatagttcgagaccagcctggccaacatggtgaaacccatctctactaaaaaaaaaaaaaaagaaaaagaaaaatacaaaatattcgggtgtggtggtgcacgcctgtaatcccagctactaggtggctgaggcaggagaattgcttgagcccaggaggtggaggytgcagtgagctgagatcatgccactgcactccagcctgggtaacagagccagactctgtctcaaaaaaaaaaagacaagacaggaaaggaataaaagaatagctactccgtagacagagcagccccaagggctgctggttgcccatttttatggttatttcttgatgatatgctaaacaag

SEQ ID NO: 109254 - DNA, 631 bp, Homo sapiens
atacccatctagggagagtggaaatgaattctcgcaaagggctcaagaaaaccttccagaaaaacagaaatttcctcattcagtcttgcctttccatgacttttccataaactgtgtgtggtttatctggacagaaggcgctgtgcttgcaatggcaaggttaactcaaagttaaatttggccaggtcaggagagttctggggagggacctgagtaacaggggggaaggagcggggaggttatgatgctgaccagctgctctcagggccttgagagacttamgatgaccttcccctcctctttgctgggcgcttctgcttgtctcagtgccaggagcagtgtggctgtaaggattactgatttaaatggatggaatgaaacagtggaacaaactggctaccggtggaaataccaccaagtatcaatttgttgctgatccatgttgaatagaaaagcctttagtaagccactttatctttaatatttccctatagttggaaatatgaactagaaaactctggttccaagggctttagattatatatgtttatatatgtttatttcttttttatgaatccatgtttatatatttatatgaatgcatcatttagcaatcatatttagaacaaaa

SEQ ID NO: 109255 - DNA, 610 bp, Homo sapiens
tgagttctagtactgagatgggctcagagacagcggacacatgaactgctgagacaccagtggaggcagctaagggagtgcttgcaccacccctaccccaaccccaggctgcacagcttgcagctccaagagactcyttccttctgctagaggagagaagagaaaagaggactttgttttacatctcagataccagcttggccacagcaggatagggtaccagtgagagtcatgagtcccactttccaggccctagctcctgcctgacatttctagacatattctgggccagaagggaacctgcctccttgaagtgaaggacccagtcctgccaggacacatcatctgctgactaaagagcccttgggccctgaataaccagcagcaatacctaagtaacatgctatgggccttgggtgagactgagattcgctggtttcaggtgagactcagcacattcccggccctggtggccatggggagagattcctcctgagagagaaaaataaagtagactttttcttgtaccttaggtaccagctgggcagcagtggggtagggtaccaaatgccctcttgaggtccccaattacaggcattggttcttagac

SEQ ID NO: 109256 - DNA, 610 bp, Homo sapiens
tgagttctagtactgagatgggctcagagacagcggacacatgaactgctgagacaccagtggaggcagctaagggagtgcttgcaccacccctaccccaaccccaggctgcacagcttgcagctccaagagactccttccttctgctagaggagagaagagaaaagaggactttgttttacatctcagataccagcttggccacagcaggatagggtaccagtgagagtcatgagtcccactttccaggccctagctcctgcctgacatttctagacatatyctgggccagaagggaacctgcctccttgaagtgaaggacccagtcctgccaggacacatcatctgctgactaaagagcccttgggccctgaataaccagcagcaatacctaagtaacatgctatgggccttgggtgagactgagattcgctggtttcaggtgagactcagcacattcccggccctggtggccatggggagagattcctcctgagagagaaaaataaagtagactttttcttgtaccttaggtaccagctgggcagcagtggggtagggtaccaaatgccctcttgaggtccccaattacaggcattggttcttagac

SEQ ID NO: 109257 - DNA, 555 bp, Homo sapiens
ttttgctgttgttgtcatcttatacaaaagccatctgtgaatgatatttttaaggagtcctggaagtaatttttttttttttaccctttcagctggattgtctggcttacaagagaggtactactaattgcctacctaatatctattttcctcttttcattaagagagtcatgattttgtttgggtcaatagtgtgtccagctaacatcctatgcttccaggtctctcccacagctggaggtggccaagggtcacaattcttgccaatgaaaaagtctctaagttgggcttctattaaagctcttcaaaaggcaagcagacttagcacatgcttttgcccttccccttcttcttgcctgaaacatgggcataatgttagaagttagagtagcaatttcacggctaggartgacaagtgcacgctaaggatggctcagaaggaataaggaagtgacctggattctagaagtgattagaaagtttcccaagacccattgactgcctacctctggacttctcattttgggaggcaaataaaacccttatttttgggcc

SEQ ID NO: 109258 - DNA, 702 bp, Homo sapiens
gaaaatgtcatgcaggtttgcaatttttgctactattaacaaaatagtgaagagtgtatagattagtggaaactaaatggttggctgaaactaaacacatagcttacatgtatagtttttttttttccttcttcacagtatgccttctggaaagaagacatgagggaaggaatggagaatgtaatctgaagcaatagagcctccttgtcttccctgtmatttccactttgctgtaataatcatttgaggatttgggctttttccttggggctccaaatttaggaatgcagagctctctcttattgcttgtcgtcttaggcaaagcacttccataagctccgccatttacctactgtccctttaaaaatgttcaagacaagacctctaagaaatcaaggggacaggctgggtggtggcttacccctgtaatcccagcactgtgggaggccgaggcaggtggatcacgaggtcaagagatcgagaccatcctggccaacatggtgaaaccccgtgtctactaaaaatacaaaaattagctgggcgtggtagtgtgcacctgtagtcccagctacttgggaggctgaggcaggagaatcacttgaatccgggaggtgaagtttttcttttccttttgtttttatgaagagtaataactatccagcctgatcaacatggtgaaaccccgtctctactgaaaatata

SEQ ID NO: 109259 - DNA, 440 bp, Homo sapiens
tgtctacaatctgggaagctctcagtgctatgagcccacaggcagcctttccttataaccaagagcaaagtgatactagggctgggctgcacagcagagactagaagatctatctccctgccttctaggcaggtctaggctagaagggaagaaggaaacccactttttgctggtgtttgcagttcttccttccaaaatacaggaagcacctgcactgcatgatgcctcagaccmggggaggccagtggcagcctctgcctgttgctctcccacttccacactgggtgctcctgcagggcacggcctgggtctgaggcttgggatcccagcgaggccagttccaagacaggagcctgggagctgctagaccagtgtgggtgggaccaggccagggtaaccacaggtttaaattgggtggggaggagactctttgtagtaag

SEQ ID NO: 109260 - DNA, 576 bp, Homo sapiens
cttgataaaatacaggtccccaggtaaattttaacttcagataaacaaatttttatgtgtgttctaaatatttcattgggtataattaaacttaaaaatattcactatccgaaattcaaatttacctacatatcctatattttatttgctaaatctaaaactgtaggtggaacagagatttctatccggactgcctggccccagagcttgtgctccttcccaccaccttamaccattacttgtatcagaaaagaagcttaatatacataaaagagatgtattggggcaagtataaattgaaagtgaaaaatgcagcataaaagttttttttaatttgcacatccgtcattatcattatcatggttgtaatctctacaataagagctacctgtttatcatgcactatgcttcttgctttatataaattaattcatttaaatattacaattattatttccattgaacaatgaggtttagagaagttgagatcctcttccaagatcacacagccataaagtggtttgaccccaaggcaggtgctttcataaaccttaaattgcagttggtactatggca

SEQ ID NO: 109261 - DNA, 648 bp, Homo sapiens
ttatctacccaacatccaacttcaccacctctgcctccttctttctaataatcagtactctgctttgttcagttatctttgctttgttatctatgctttgttcagttatcttccctcctccataaggctatgtgcttctgagtaggcrtattgcatcctgtgacagtgtcctaacatttctaagctgactgtggttatctcctgtcccttggcaatgactggtttcatcatgagtatttgacacaattccaaccaataaaacctgagaaaaagcctattgtctagattctgccaaattttctcttgcttttagaaggaaattcatagaagagatgactccctttcttccaatggtttctcatgtatagatgacttctagaactgtcaccctagagtaactgagaaactagccaaaagaaaaagctgacaatccagagacagcatagcacaaaatgcgaaaagcttattttttaaaaatttatttcaatggttttgggtgacttttgattatgtggataagttctttagtggtgatttctgagattttagttcacccatcacccaagcagtgtacactgtacctgatatgtagtccttttatcccccacatccctccaatccaccccctaacccacccagagtcctcag

SEQ ID NO: 109262 - DNA, 648 bp, Homo sapiens
ttatctacccaacatccaacttcaccacctctgcctccttctttctaataatcagtactctgctttgttcagttatctttgctttgttatctatgctttgttcagttatcttccctcctccataaggctatgtgcttctgagtaggcatattgcatcctgtgacagtgtcctaacatttctaagctgactgtggttatctcctgtcccttggcaatgactggtttcatcatgagtatttgacacaattccaaccaataaaacctgagaaaaagcctattgtctagattctgccaaattttctcttgcttttagaaggaaattcatagaagagatgactccctttcttccaatggtttctyatgtatagatgacttctagaactgtcaccctagagtaactgagaaactagccaaaagaaaaagctgacaatccagagacagcatagcacaaaatgcgaaaagcttattttttaaaaatttatttcaatggttttgggtgacttttgattatgtggataagttctttagtggtgatttctgagattttagttcacccatcacccaagcagtgtacactgtacctgatatgtagtccttttatcccccacatccctccaatccaccccctaacccacccagagtcctcag

SEQ ID NO: 109263 - DNA, 618 bp, Homo sapiens
aagcctctcattcctttagtttcatcctgctcataagacccaacttactgaaacataaatcctcaacgctctatagatcacatttccatgtcaaatttcagaagagccttatttcaaagtgtcttctctgaagatagagatggccctctgacatgtgggaattgctgctgccttcwaggtgcatgctactcaaaaaacagctgatatcaaagtgattaggctctcggggtcctcggaggtgggatgtgaggctgcactcttaaagctccctgggaagtggggagaatgaagattgcagcctgctgatgtaaaggttaatagcagaaaaataagcagaggataagaacagatattttataaggccagcaaccccttggcctgtgctgtccacaccccattccccactccccaccaccccccagcatatgctgtcaggaaatccaagggaaaacaaacacgagaggtttttaaaagagtaaaattaatcaagttcatcacagcagcccttatcatacatgcaattatttctgaagtactctaattcgaaagacgagcaaaggcttctgggtgcaatgccaagtggttttgttcaatggatttttagaaaacataaaagca

SEQ ID NO: 109264 - DNA, 666 bp, Homo sapiens
  misc_feature (1)...(666): n = A,T,C or G
tcttcataagcaggccattggcccaagaggcatcctttgggagaacaagatgcagaatcatttcagggcccagagagggaggagagggagacaggctgggccgtgtgcccctgacgtcatcacaaaggccactcgggctggcggccaccctggcagygaggggcagcagggccagtngaaaatgccagcctcctgtgaaggcttaattagcctgctcctgccgctgccgggtaatagcttggtagggtgcaggtgtttctatttttcagcacaattatctgggaagtgagggcagaaacatcaatggatatgtcctcagctttgtgtgtgtgtgacttgtgtagaatgacatgtttgaatgtcacatcctcataagagacagtgtcctgttggatggcgtgtgtctgtgtctctgtcctactcacataacagcatgtatgtctgaatctctcataaccatgtagaaccatgtaaggttgtgtttgtgggtctatgtgtgtggacacaggtatgcccagctggcgagtacaacctggctctcaaaacaccagccttccagagcaggccagctctgccttttgcttctgtttcttcagctgtcgaatggggctgcagacccggtcctggggccacacagcatctttccactgtgttgctgctgtgact

SEQ ID NO: 109265 - DNA, 582 bp, Homo sapiens
agtttctgctacatacactatctttttccataagggatgataaaattatcttctatctcatttttaggtacatgttaattcctactcagcctcccaccattttacctaagatacctgtgtaagaataactgaataggccaggcatagtggctcaagcctgtaatcccagcacttttgggaggctgaggcaggctgattgcttgagcccaggactttgagaccagcctgaccaacaggatgaaacccagtctctacaataaatataaaattagccaggtgtggtggcaggcacatgtggtcccaactactcaagaggctgaggtgggaagattgcttgagccagggaggcagaggttgcagtgagccaagattgcaccattgcactccagcttaggcaacgrgaataaaaccttgcctcaaaaaaaaaaaaaaacaccaaagactgaataatgaatttttatgcatatatgaactattatgatattcttatagtgtcttgaaatagctaagatcatgaatacagaaaaaagaaattttctagattttatttatttatttattatactttaagttctgggatac

SEQ ID NO: 109266 - DNA, 586 bp, Homo sapiens
cacactgtcttagtatgtttggactataacaaaacaccataagctgactgccttataaacaaaaaaaaatttatttctcacaattctggaggctaggaagtccaaggtcaaggatccagcagatgtggtgtctaggtgagagcctgcttctttgttaatcactgtctatgtctttcctcctgtggtagaaggggcaaggcagtcctctgggcatcatttatatgggmagtaatcccattcacaaagtctcccctcttatcacctaatcaactctcaaaggcaccacctcctaatgtcatcacattggggactgggtttcaaaacatacattttatggggacacgaacatttcgaccatagaatatggggtgaataagactatcacagtgatcagtattcttgaagtttcatcaaacctcacagacaattattttcccacaaaataaaagacattgctttaaataaaccatgcagttttatatatattacttcacatgtattgtgattgagtaacttgaaagggaaaatgcccttgtaatagaaaaaaagttggctattacttcttgacacgtatgatttccataat

SEQ ID NO: 109267 - DNA, 619 bp, Homo sapiens
accttaaactctgactgccggtgagccaggtggaacagagccatatttctcttctatcaaaagcaaatgggagaaatgtcgctgaattctttttctcagcaaggaacatccctgagaaagagaatgcatccctgaggggaggcctctaaaatggccgctttggtggggcggctgtcttttacagtcgcagctgtgggatgaaataagccccggtctccagtagcgctcccaggcttattaggatgaggaaatttctgcctaataaattttggtcagactggttgtctgctctcaacccctgtctgctgawaagacgttatcaatgacaatgcctgcccaaaacttcattagcaattttaatttcaccctggtcttgtggtcctgtggtctcaccctgcctccatctaccttgtgatatcttatcatcttgtgaagcatgtgatctctgtgacccacaccctatttgtacactccctccccttttgaaaatcactaataaaaacttgctcgttttatggctcaaggggcatcacggaacctgccgatgtgtgatgtctcccctggacacccagttttaaaatttctctcttttgtactctgtccctttatttctcagacc

SEQ ID NO: 109268 - DNA, 610 bp, Homo sapiens
tgttctcatatacttattaaggagatcccatttgatctctttcttggccttccagaacttctttcaatatctgacatggaaatagtatgatcagtggagttatatagtgttagggctctgagatccattgcacagctagctttctagatacttgttcctgcagttgaaatgatcaaaagtatttttgatcagtgctcgcttcggcagcacatatactaaaattggaataatacagagattagcatggcccctgtgcaaggatgacatgcaaattcgtgaagtgttccattaaaaaaataaatgaaagtatttggatcgttgtatgatatttattttaaaatgcagcaatgttgcaaatgctgcaaactaatttattatgaatcaatgtgtttatgagttgatatatttacacttctattcatatttgaagaaatatcagtgagtagtaatggtctaaaaccatataatatgcttttagagttgctatgrtaacttattttcttggaaaatctaatagatgtttggaaacctgccatggttacttatcagctattggagaaatagcactgcatcttgttttttaaaaagatctgcttatttattaacttta

SEQ ID NO: 109269 - DNA, 436 bp, Homo sapiens
caatgtttgctttttgatggttatgccttccaatagacacgttattactttttcagtttatatacaatattataatatttgcattttaaatttaagtgtggattgtttatattatagaagaatatgttcatcttttttcttaatartacaattttcaatcacagtttagtgcttctgtatccattcctgaacacatttgcttctctctcacccagagatagctaagatcatagatttgctgtttataattcatattcacttcttcatagtgtaactgcccagtaggttatacttgctcactgcacagatagaactgatttattaagactgggaaattacaatagagaaagagcttaatacacatagaactggctaaaggggagatctggagttttattatgacttaaatcagcctcctgaaaaatgtggaggctag

SEQ ID NO: 109270 - DNA, 550 bp, Homo sapiens
atccccaactttagtgaaaaaccattaagttcacatataggaarcttgaaaaacttcaaacagggtaaacattaggagtcccacaaaccaatatgccacagtaaaaatgctgaaagtcaaagacaaaaagaaaatctgaaatgctacagataatttattcataaaatgatttttgctttggaaatgatcaaaagagcctgggagtcaaaagttctaaattcaagtctaggtctgccatttattaattagatgaacttcagcaactttttggcatctctaaattctaatttcctaacctgaaaaataaagttaatatttcaaacaaacatgaaatattacatcttcttacactcaatgtggtaatatatgtaaaagccttcagaaaaaaatagatgtcctaaagaaatacaaaatgcttttaaaatttttaagttaaaatgtttggggagctcaaactaagaacccagatttttccagtttatcctttgctttgctataaagccagcctaatccagacaagtggcaggaataaaggaggctgttttctgta

SEQ ID NO: 109271 - DNA, 550 bp, Homo sapiens
atccccaactttagtgaaaaaccattaagttcacatataggaagcttgaaaaacttcaaacagggtaaacattaggagtcccacaaaccaatatgccacagtaaaaatgctgaragtcaaagacaaaaagaaaatctgaaatgctacagataatttattcataaaatgatttttgctttggaaatgatcaaaagagcctgggagtcaaaagttctaaattcaagtctaggtctgccatttattaattagatgaacttcagcaactttttggcatctctaaattctaatttcctaacctgaaaaataaagttaatatttcaaacaaacatgaaatattacatcttcttacactcaatgtggtaatatatgtaaaagccttcagaaaaaaatagatgtcctaaagaaatacaaaatgcttttaaaatttttaagttaaaatgtttggggagctcaaactaagaacccagatttttccagtttatcctttgctttgctataaagccagcctaatccagacaagtggcaggaataaaggaggctgttttctgta

SEQ ID NO: 109272 - DNA, 539 bp, Homo sapiens
ttcttttctaaggtaggattttttctaaacaacaattgcaactattgtttttaacaaaaagtttaagctgccaactcaaatactatataataatttttggtttgttygaaatgtccagttctcttattccaaggatatattatgattgtacttttctacttacttggtttcaaagcataaatgtgtattttagcccattttctgttgctataacagaatacctgagactgagtagtttataaagaacagaagtttatctagcttacagttctagacactagtaagttcaagattgtgcagtagtcacctctggaaaggaccatgacatgctgtgtcatatggcagatggcatcacatgggtggcagcacttgcaagagcagcaaatgagtgcctgcaaaagagataggggcaaaggaggccaactcactttaaaagaacctgatctcacaaaagtctcaagcgtactaacccagtctcatgagaaagacatcaatcaatcttaacaagctgatcacctcttaaaggcctcacctcccaa

SEQ ID NO: 109273 - DNA, 539 bp, Homo sapiens
ttcttttctaaggtaggattttttctaaacaacaattgcaactattgtttttaacaaaaagtttaagctgccaactcaaatactatataataatttttggtttgttcgaaatgtccagttctcttattccarggatatattatgattgtacttttctacttacttggtttcaaagcataaatgtgtattttagcccattttctgttgctataacagaatacctgagactgagtagtttataaagaacagaagtttatctagcttacagttctagacactagtaagttcaagattgtgcagtagtcacctctggaaaggaccatgacatgctgtgtcatatggcagatggcatcacatgggtggcagcacttgcaagagcagcaaatgagtgcctgcaaaagagataggggcaaaggaggccaactcactttaaaagaacctgatctcacaaaagtctcaagcgtactaacccagtctcatgagaaagacatcaatcaatcttaacaagctgatcacctcttaaaggcctcacctcccaa

SEQ ID NO: 109274 - DNA, 539 bp, Homo sapiens
ttcttttctaaggtaggattttttctaaacaacaattgcaactattgtttttaacaaaaagtttaagctgccaactcaaatactatataataatttttggtttgttcgaaatgtccagttctcttattccaaggatatattatgattgtacttttctacttacttggtttcaaagcataaatgtgtattttagcccattttctgttgctataacagaatacctgagactgagtagtttataaagaacagaagtttatmtagcttacagttctagacactagtaagttcaagattgtgcagtagtcacctctggaaaggaccatgacatgctgtgtcatatggcagatggcatcacatgggtggcagcacttgcaagagcagcaaatgagtgcctgcaaaagagataggggcaaaggaggccaactcactttaaaagaacctgatctcacaaaagtctcaagcgtactaacccagtctcatgagaaagacatcaatcaatcttaacaagctgatcacctcttaaaggcctcacctcccaa

SEQ ID NO: 109275 - DNA, 576 bp, Homo sapiens
tggaactaatagtgacaggagacagataaattcccaggcagaaagggattaaaaaaggcactaggtgccactccctctcgctagcagagctatgggtggtaggagtaaaaaagctgtaaccctccctcccacttgctgaacaggaragaagaagccactgagtgccactccctcacctagttgagctaagggagtaaagaagtgaagtctctgcctccaggggccactccctcctgctcctcaaactacaggaacaaaaaggctgcaacagaaccatttgagaaacaaaataaatgttagacagggaggtgggtgtaactacacagtggagaaatctgacaaacactacctcaaccaggtcatcaagttcaacatgtacttaaatcatgttgatagtgtgcacacttgatatggtgtgatgaaaatcttacttctgtgatgaaattttacttctgtcatctttttctccaagcctcctaaccctaatataaacatgaaaaaaagcacaaaagaaattccaatagagagtcatattacaaaatattcaaccagtacgcctcaaaattgtcaaagtca

SEQ ID NO: 109276 - DNA, 592 bp, Homo sapiens
  misc_feature (1)...(592): n = A,T,C or G
nnnnnnnnnnnnnnnnnnnnnnnnnnnnnnnnnnnnnnnttaggactatgtggcatactatattataattaattattttttttctgtaatacccactattatgtaaattctatgcgtgagcatttataaaaataatagatttataaattmttgaagatcatctagcaaatattagagattcaataaatatttgttaaataattgaatagataaatgagactcagtgaaaatttgattcaagaaaaatggtagatatttcttcaaatatttttatatttagtatgtttggtattcacaaagtcagatgcatcacttataaatgcccagattctagcaggtaattccttctcaaggaactataagtgcaaaaaaattaaaattcatgtttttaattttatttagaagaagttaactcattatcataatatagacaaatctccatccagaatgattattaataatttcggtagatactgttttcaaggaggtagaacatacttcttcacttctcaagtgtaggctatgcatagtaacttcttttcaaagagcaccaaaaggaaaaggggaaaaaggtgagtttttcagtagagaa

SEQ ID NO: 109277 - DNA, 358 bp, Homo sapiens
gcagattatatagtatagaatttatgtcaaatttatctcactgtattctaactctaaaaattcatgatgtaagtatgtattgtactgtctctctaagatgaccaaaataattccaattttctattctatgtaaacaagattttaactctgtattaaaatgcagaacgacgtgattcaatagcctatgaaaatgwcaattattttagaacaagcttgagaaacttagaattgcctcaaggactttaaaattgtagacatattctgggaaacccacttgaaaatccttcatttaaaattgttcatgtctttaagatcaagactaattcacctagacagtaaaattgaatggatagctttc

SEQ ID NO: 109278 - DNA, 523 bp, Homo sapiens
ctctggtaagcataacttctactctccatgttcatgagtacagttcttttgatttttagatctcacaaataagtgagaacagatgtttgtctttctgtgcctggcttatttcacttaacataatgatctccagttccatccatgttgttgcaaataacagagtcttacacattttattgctgaatagtagtctattgtgtatatgtaccacattttctttatccgttcatctgttgatggacactgaggttgcttccaaatcttagttgttgaaaacagtgctgcaacaaacataagagtgcagatatctcttcgatatactgatttcctttcttttgggtatatacccagcagtgagattgctaaatcacatggtagctcgatttttagttttctgaggracctccaaactcttctccatattggttttactaatttatgttcccaaaaacagtgaacacatccacatcctcaccagcatttttattgcctgccttttggatacaagccattttcactggga

SEQ ID NO: 109279 - DNA, 573 bp, Homo sapiens
agtcttacactgaaattttcttcaggaattttctagtagaaaacccacgactaaaggagctatagaaagggaaatattatttgygattatttttcttcttatgctatatccacaagtttttcaggctcaagttgagaagagtgagtcaataacttgtatttgcttttaaaattaaattaatccttgacaagagtgacttttttttttagaagttagtccttgaccactagtttgatgctgtctccattttgggtgacctgtttcaccagcaggcctgttactgtccatgactaactgtgtaaatgcttaaaatagaataaactgctttttccattgaaaaaacaaaaaccatatatatatatgtatatatgtatttatttatgtgagtgtgtgtgtgtgtgtgtgtgtgtggtgtgtgcataacttattgaatgtctggttgttaatgctgcagagggccttctgtagttaagaaagtttctgaatcattgtgtacacactttgagaatgtctgagaaacatcatcaaagaagaactttgatgcttctgactttatgttgtttccaaaagatt

SEQ ID NO: 109280 - DNA, 614 bp, Homo sapiens
acttggtgtctagctaaaggcttgtaaatgcaccaatcagcattctrtcaaaatggaccaatcagcaggatgtgggtggggccaaataagggaataaaagcaggccacctgagccagcagtgcaaccagctctggtcgccttccatgctgtggaagctttgttctttcactcttcacaataaatcttgctgctgctcaccctttgggtctgcactgcatttaagagctgtaacccacacagcaaaggtctgcaacttcactccagaggccagtgagaccacgaacccactgcaaggaatgaacaactctgttccacctttaagagctgtaacactcactgggaagggtgcagcttcactcttgaagacagcaagaccacaaacccaccgggaggaacaaacaactctggacaggagaaatgaacaactctggacacaccatctttaagaactgtaacactcaccacaagggtctgtggcttcattcttgaagtcagcgagatcaagaacccacaaattccagacacaataagggaaatgatcattaaaacagtcatgagatataactttactaagtctgaaaaacaaaaatgttagagaattccaaatgtgtgg

SEQ ID NO: 109281 - DNA, 614 bp, Homo sapiens
acttggtgtctagctaaaggcttgtaaatgcaccaatcagcattctgtcaaaatggaccaatcagcaggatgtgggtggggccaaataagggaataaaagcaggccaccygagccagcagtgcaaccagctctggtcgccttccatgctgtggaagctttgttctttcactcttcacaataaatcttgctgctgctcaccctttgggtctgcactgcatttaagagctgtaacccacacagcaaaggtctgcaacttcactccagaggccagtgagaccacgaacccactgcaaggaatgaacaactctgttccacctttaagagctgtaacactcactgggaagggtgcagcttcactcttgaagacagcaagaccacaaacccaccgggaggaacaaacaactctggacaggagaaatgaacaactctggacacaccatctttaagaactgtaacactcaccacaagggtctgtggcttcattcttgaagtcagcgagatcaagaacccacaaattccagacacaataagggaaatgatcattaaaacagtcatgagatataactttactaagtctgaaaaacaaaaatgttagagaattccaaatgtgtgg

SEQ ID NO: 109282 - DNA, 614 bp, Homo sapiens
acttggtgtctagctaaaggcttgtaaatgcaccaatcagcattctgtcaaaatggaccaatcagcaggatgtgggtggggccaaataagggaataaaagcaggccacctgagccagcagtgcaaccagctctggtcrccttccatgctgtggaagctttgttctttcactcttcacaataaatcttgctgctgctcaccctttgggtctgcactgcatttaagagctgtaacccacacagcaaaggtctgcaacttcactccagaggccagtgagaccacgaacccactgcaaggaatgaacaactctgttccacctttaagagctgtaacactcactgggaagggtgcagcttcactcttgaagacagcaagaccacaaacccaccgggaggaacaaacaactctggacaggagaaatgaacaactctggacacaccatctttaagaactgtaacactcaccacaagggtctgtggcttcattcttgaagtcagcgagatcaagaacccacaaattccagacacaataagggaaatgatcattaaaacagtcatgagatataactttactaagtctgaaaaacaaaaatgttagagaattccaaatgtgtgg

SEQ ID NO: 109283 - DNA, 614 bp, Homo sapiens
acttggtgtctagctaaaggcttgtaaatgcaccaatcagcattctgtcaaaatggaccaatcagcaggatgtgggtggggccaaataagggaataaaagcaggccacctgagccagcagtgcaaccagctctggtcgccttccatgctgtggaagctttgttctttcactcttcacaataaatcttgctgctgctcaccctttgggtctgcactgcatttaagagctgtaacccrcacagcaaaggtctgcaacttcactccagaggccagtgagaccacgaacccactgcaaggaatgaacaactctgttccacctttaagagctgtaacactcactgggaagggtgcagcttcactcttgaagacagcaagaccacaaacccaccgggaggaacaaacaactctggacaggagaaatgaacaactctggacacaccatctttaagaactgtaacactcaccacaagggtctgtggcttcattcttgaagtcagcgagatcaagaacccacaaattccagacacaataagggaaatgatcattaaaacagtcatgagatataactttactaagtctgaaaaacaaaaatgttagagaattccaaatgtgtgg

SEQ ID NO: 109284 - DNA, 550 bp, Homo sapiens
agctccaaaaaacagacatgtgaaatacttgggaaaatatctaacaaaagataacccagatctctacactaaaattaaaaagctttgttgaaaaaaaattaacaaagctcttataaataagcacagctcctatttcatgaattggaacattcaattttgttaagatagtaattttccccaaaacgatcaatatatttaacacaataccaatcaaaatcccaggacatttttagtaaaattggcaagttgatttaaaaattcatatggaaataaaagtaacgtagactaaccaaagcaatttttgaaaagaacaaagttggatgtttacaataatgctgcgataatcaagatagtttggtactgcscttcctctccaaaaaagacatatagacattccaatgcattggaagagaagcaagaaatagaactattcacacatatacggcgaaattattttcaacaaaggtagggaagcaaattcaatgaggaaaggaaagtcttttcaacaaacattgctaaaccaactggatacacatttggaaaagataaa

SEQ ID NO: 109285 - DNA, 512 bp, Homo sapiens
ctttcttgttaaacataggtctaagccyaagtatgtcaatacaacaaatacttactgtttcatttctagtaataaaaaaataaagtctttctggcataaggatgattttcatctggttattttgaaacatttttgtaaaataaatttccatctataaagaacatttttaatttgtaaggaggggtatgtctctgtgcactggaagagagggaggactaaatcactgggaagtcttatgataaagaagccattggcttaaatcagcaaagcaagccatcccttggtttaaggtgtttttcctggccatcctgtcttgactagaactttacctacaccttcctttttggtttaggcaaattatcatatctaaacctgaagtctcagctctgtgtctttgagatataaatgttctaccacgtcttctctggaacctgataactatctatctctttaaaatgcaagtctagggagatgactcatcagaaaaagaagaaaaaagaggtatttggaaa

SEQ ID NO: 109286 - DNA, 512 bp, Homo sapiens
ctttcttgttaaacataggtctaagcccaagtatgtcaatacaacaaatacttactgtttcatttctagtaataaaaaaawaaagtctttctggcataaggatgattttcatctggttattttgaaacatttttgtaaaataaatttccatctataaagaacatttttaatttgtaaggaggggtatgtctctgtgcactggaagagagggaggactaaatcactgggaagtcttatgataaagaagccattggcttaaatcagcaaagcaagccatcccttggtttaaggtgtttttcctggccatcctgtcttgactagaactttacctacaccttcctttttggtttaggcaaattatcatatctaaacctgaagtctcagctctgtgtctttgagatataaatgttctaccacgtcttctctggaacctgataactatctatctctttaaaatgcaagtctagggagatgactcatcagaaaaagaagaaaaaagaggtatttggaaa

SEQ ID NO: 109287 - DNA, 512 bp, Homo sapiens
ctttcttgttaaacataggtctaagcccaagtatgtcaatacaacaaatacttactgtttcatttctagtaataaaaaaataaagtctttctggcataaggatgattttcatctggttattttgaaacatttttgtaaaataaatttmcatctataaagaacatttttaatttgtaaggaggggtatgtctctgtgcactggaagagagggaggactaaatcactgggaagtcttatgataaagaagccattggcttaaatcagcaaagcaagccatcccttggtttaaggtgtttttcctggccatcctgtcttgactagaactttacctacaccttcctttttggtttaggcaaattatcatatctaaacctgaagtctcagctctgtgtctttgagatataaatgttctaccacgtcttctctggaacctgataactatctatctctttaaaatgcaagtctagggagatgactcatcagaaaaagaagaaaaaagaggtatttggaaa

SEQ ID NO: 109288 - DNA, 512 bp, Homo sapiens
ctttcttgttaaacataggtctaagcccaagtatgtcaatacaacaaatacttactgtttcatttctagtaataaaaaaataaagtctttctggcataaggatgattttcatctggttattttgaaacatttttgtaaaataaatttccatctataaagaacatttttaatttgtaaggaggggtatgtctctgtgcactggaagagagggaggactaaatcactgggaagtcttatgataaagaagccattggcttaaatcagcaaagcaagccatcccttggtttaaggtgtttttcctggccatcctgtcttgactagaactttacctacaccttcctttttggtttaggcaaattatcatatctaaacctgaagtctcagctctgtgtctttgagatataaatgttctaccacgtcttctctggaacctgataactatctatctctttaaaatgsaagtctagggagatgactcatcagaaaaagaagaaaaaagaggtatttggaaa

SEQ ID NO: 109289 - DNA, 537 bp, Homo sapiens
aatttgctctaaaactaatatgctggtgataataaacattacgcatttaactaacaacaattttgcttcgtttgcagaatttagaaaagctttttggtagcattttggaaggctcagatttctttaagacatctgtctagggaaatttgaactaatttctcttytatttccctcttgtaaaaattcccattagcaagcaaatgcattcaaaaccattccattgatcttataactgtgttttataacaatagccatgagcttttcctttctatcctgtgggctgaaagcactgcagtggggtgtctgaatggcacacaggaaccaggggaactgggaagtgaggggcagccagctttgagagggaccccggtctgtctttctagcacagcaaatgtcaggggaaagggatttggcttcaccctttttgttttctgaccctgtttccaggaagactttgtaaaagttgaagactgccaggaacttatttaaaactataatggaagttttaaaatgatcataaaatgccagtttcatgac

SEQ ID NO: 109290 - DNA, 537 bp, Homo sapiens
aatttgctctaaaactaatatgctggtgataataaacattacgcatttaactaacaacaattttgcttcgtttgcagaatttagaaaagctttttggtagcattttggaaggctcagatttctttaagacatctgtctagggaaatttgaactaatttctcttctatttccctcttgtaaaaattcccattagcaagcaaatgcattcaaaaccattccattgatcttataactgtgttttataacaatagccatgagcttttcctttctatcctgtgggctgaaagcactgcagtggggtgtctgaatggcacacaggaaccaggggaactgggaagtgaggggcagccagctttgagagggaccccggtctgtctttctagcacagcaaatgtcaggggaaagggatttggcttcaccctttttgttttctgaccctgtttccaggaagactttgtaaaagttgaagactgccaggaacttatttaaaactataatggaagtttwaaaatgatcataaaatgccagtttcatgac

SEQ ID NO: 109291 - DNA, 600 bp, Homo sapiens
agaatgtatgagtatctaatgacctctccaaattaatttttatttttagctctattagatttttctcagtgtaacaaatgtttattcctatgtaattaagggcatatttcctgtacagaatattcatattacttaattgaaaattatataatgcaaaaatataatactatttttaggccaggcatggtggctcatacctgtaatcccaacattttgagaggccaagtttggagaatcatttgagtccaggagttgaccagcctgggcaacatattgagaccttttctttattaaataaataaataagtaaataaataggatgggcactgtggctcatatctgtaatcccagcattttgggttgcgaaggcaggaggattgcttgagcccaggagtttgagaccagcctgggcagcatagcaagactccatctctacaaataataaaatattaaccaggtgtggtggtgcgcacctggggtccagctacctgggaggmtaaggtgggaggtttgcttgaggctgcagtgaactgtgaatgcaccactgcattccagcctaggccacagaacaggaccttgtctaccaataaataagtaaaa

SEQ ID NO: 109292 - DNA, 600 bp, Homo sapiens
agaatgtatgagtatctaatgacctctccaaattaatttttatttttagctctattagatttttctcagtgtaacaaatgtttattcctatgtaattaagggcatatttcctgtacagaatattcatattacttaattgaaaattatataatgcaaaaatataatactatttttaggccaggcatggtggctcatacctgtaatcccaacattttgagaggccaagtttggagaatcatttgagtccaggagttgaccagcctgggcaacatattgagaccttttctttattaaataaataaataagtaaataaataggatgggcactgtggctcatatctgtaatcccagcattttgggttgcgaaggcaggaggattgcttgagcccaggagtttgagaccagcctgggcagcatagcaagactccatctctacaaataataaaatattaaccaggtgtggtggtgcgcacctggggtccagctacctgggaggctaaggtgggaggtttgcttgaggctgcagtgaactgtgaatgcaccactgcattccagcytaggccacagaacaggaccttgtctaccaataaataagtaaaa

SEQ ID NO: 109293 - DNA, 524 bp, Homo sapiens
ataatttgatgaaatttcatatttttacacacatctacgtattataatctgactctatattaataaattgtactcaggctgtatatttacttatcagtcatgcatatgccagaggggagcactttgtgcatttgccagctcccagatgttgcattagatacatattctactctcagctgacaaactagacttaatacatgtatttggtgtcactgagttttagtaatgcaagtaaaattttgtttcagctgatttagttgcaaatagctaaataggttaaccatctggatatcacagactctaaatcaagccagtgttgacccctcaaaatatacctatcttgagacttcttctattaagccattctgcaaaattatcctattatcctttcaattatcttattgtaatgtttctttaatcrtcaattaaaagggcaggaaatataaaattaaatgaaacaactcaattctaatgggttttaaatatttaaagagctgtagtaacttgatttatttaagttattg

SEQ ID NO: 109294 - DNA, 535 bp, Homo sapiens
ctgtattgcttaacaaactctggttaccttaaacaataaataataggaaaactattatctatgcattgttttgcttagcttatattggagttaggttttctggactattccatatactattaaagtgactatttaggaaactgaacatactacattctaagttcattggggtaaaactctatgctgcatagaaatatgaaaagtttaatttcaaattataatttatttttagtactttgggagttaacacataaaaaggaaagtattccttgctttaattctcacatattaaaatatgtgtaaargtaataatattaaagaagaacgttcccaacatcatttaagcaaatttttatagaattcataaaaaaccttgctattatactgtagtactgctttgtgaaaagaaaaaatgtgggaaaattatattctttgcgtttgtatttatgggctaaccttatttcaagttaatttcatttcagctattattaaaatattgaaatacaaaacaactagacattatattcaaaatttt

SEQ ID NO: 109295 - DNA, 609 bp, Homo sapiens
tgtgctatgtcttaagcacacctctattgttatagatagtacattttattaaaaatggtagtcttcaactttatttcctcccctaaattmtgagtactttagtgtatgttttcttttttttgcatttgtgttcttatttgtctttccgataccacgctatcattggtacccaatcaatatttgcagaattaggaggtgaatgaacagatgaataaatacagagtgaattttactttagagatgcaggtaaatccaacaatgattataacaaaggaacaacaaaataagagcgtgttttggctttatagagagaaaggtaataaatgtgattataatatacttgtgcccttaataatgaggtagacactttacaaaatcacagaatactaacgttatgtccagaaattttatgtgaaagaaacagaatcaatcaagatgtagtccttcaaagtagaataaaagctatgatagtaaatgagcttgaattttcttgaggaatggaaactagtcatggtaaaattgcaagatacttttgaatagatgaaagcttgtatttgtgtaattcttatacacttgcaagttctctaaccttttcactttaaaggaaat

SEQ ID NO: 109296 - DNA, 609 bp, Homo sapiens
tgtgctatgtcttaagcacacctctattgttatagatagtacattttattaaaaatggtagtcttcaactttatttcctcccctaaattctgagtactttagtgtatgttttcttttttttgcatttgtgttcttatttgtctttccgataccaygctatcattggtacccaatcaatatttgcagaattaggaggtgaatgaacagatgaataaatacagagtgaattttactttagagatgcaggtaaatccaacaatgattataacaaaggaacaacaaaataagagcgtgttttggctttatagagagaaaggtaataaatgtgattataatatacttgtgcccttaataatgaggtagacactttacaaaatcacagaatactaacgttatgtccagaaattttatgtgaaagaaacagaatcaatcaagatgtagtccttcaaagtagaataaaagctatgatagtaaatgagcttgaattttcttgaggaatggaaactagtcatggtaaaattgcaagatacttttgaatagatgaaagcttgtatttgtgtaattcttatacacttgcaagttctctaaccttttcactttaaaggaaat

SEQ ID NO: 109297 - DNA, 635 bp, Homo sapiens
aagccagattatcaagtagacaccgaacgtgagtgttgtaaatcccttcagagagaaaaggggagttacacattcccaacccctttctgcactgcccccagagaatatagcccccgcaagtgtttgcacatccatttaaaattacctctctattctgtgatctagagagactcgtggatgcctactcattttgttccagagctaagaagtttaggactgagtcctttgggaggtagctgtgcaatttggagcagttgctgcataacatctaacagaaggaaccagggagctgcattttcaaagccccttttctgtactacttctgggaaatgaagcccatacaagtgcttacacatccatataaacctgacacatttttgtggtctacatatactcacatatacttcgtctttttttgcttttgagctaggaggtttaggatgtattcccttaggtgggagctttaaaagttggggcactcaatgaggaaataaactccttccaggagggattaagttatatggaatttttgctagggtgagccatgagagcagrctgaaaagaactagtctgcttcttaggttgttggtcaggctaatgcttgtctgtctctttaacatcccaatgcaagttag

SEQ ID NO: 109298 - DNA, 557 bp, Homo sapiens
ccatttgtgccatttgttaaagaattctgagtacaccgtggctcaaatctgcatctgaagccagcctggagtgctttcctgagctctgggctcagataccctagtgtctgctggacacctcctccagcttgtctgtcattcccccagacaagctcatcatcatccccccaccaagctgctccaccccctcaatgcctatttcattttgcagcaacatcactcaccccattgtccaaaccagaaacctgggaatcttcctcaacttgtccttctccstctcccataacacctaataagttactcccaagtgatgttcacgtctctccttccagccctgctccagcgtcacccgggcttctgtagttcaggcgtccttgtccctcctctggagtctgccccagcctcctactgatctttctacagccagccttatcctcctccaacccatctccgtttggccccataaaatgcaaatctcattaggtctcttgtgcttaaaatccttcagtgacttcttgtttcctgtgatctgaagttcagacacgcttcatttcatc

SEQ ID NO: 109299 - DNA, 557 bp, Homo sapiens
ccatttgtgccatttgttaaagaattctgagtacaccgtggctcaaatctgcatctgaagccagcctggagtgctttcctgagctctgggctcagataccctagtgtctgctggacacctcctccagcttgtctgtcattcccccagacaagctcatcatcatccccccaccaagctgctccaccccctcaatgcctatttcattttgcagcaacatcactcaccccattgtccaaaccagaaacctgggaatcttcctcaacttgtccttctccgtctcccataacacctaataagttactcccaagtgatgttcacgtctctccttccagccctgctccagcgtcacccgggcttctgtagttcaggcgtccttgtccctcctctggagtctgccccagcctcctactgatctttctacagccagccttatcctcctccaacccatctccgtttggccccataaaatgcaaatctyattaggtctcttgtgcttaaaatccttcagtgacttcttgtttcctgtgatctgaagttcagacacgcttcatttcatc

SEQ ID NO: 109300 - DNA, 624 bp, Homo sapiens
aagttactatattcctaaaagatagaagggcgtcagacactttcttcacttctaaaagtctccatttccacatctttaaaattcagataatacctatatctataaataattgtcaagatcgtatgtagcacatagtaggtactcaaaaatggtaggttcccttctcttctacctgctttattagtgactgcattgtcaagcagagattatttttctctgtacgtttgatgtaggtcaagcagagaaaattgtttttagaattaccaatataaataccaatatcttgtgttaayggttaaactgacaaattaaaacttactttccgagcttttggaacaaagccattgaaagtacatgtgaattctgaaacaaggcagagtgatagaaaccattttgggagatgagaggtgagagagttgaaaaaataaccccaaatgcacaaagttaaagaagtctggaagagctgccctttccattacagaaacagcacacaaatcagtggggaaatcttactctaggaggtggagacatcactatttagtcaaacttttctgtttcattcattatttgttttcatgtatactgacatgatagaatttttagttgaagagaaaaagagaaggg

SEQ ID NO: 109301 - DNA, 540 bp, Homo sapiens
ctattgttttattcaatgggttataatttattatagcattatgtaatttaatgctcaatttataccagattttgtgagtagtaacactttaggctgacttctgtgttttattggcatgtctcataattcttttagcactttttaagtttttggcacaagaagatgttccaggctcatgttgtactttcactaacaaagaacttctccccacaaaatggctatttatcatttctcccaggataaatggttgcttttgatgaagaataatatttagggattaagatctgggtctaggtgagctcatggctattggtatctcactgctcccaggcccagcccactcagtggaaagataccctccccacgcccacacacaaacctatatcgatttytctgtctctatttctcttatttctctcacctctaacccttcctgatatatacttatctttctctctctaactacatatctaactgtctatgttgaaaaccatgagttcacactggtatctccaatcccaattcagcaacacagggcaa

SEQ ID NO: 109302 - DNA, 540 bp, Homo sapiens
ctattgttttattcaatgggttataatttattatagcattatgtaatttaatgctcaatttataccagattttgtgagtagtaacactttaggctgacttctgtgttttattggcatgtctcataattcttttagcactttttaagtttttggcacaagaagatgttccaggctcatgttgtactttcactaacaaagaacttctccccacaaaatggctatttatcatttctcccaggataaatggttgcttttgatgaagaataatatttagggattaagatctgggtctaggtgagctcatggctattggtatctcactgctcccaggcccagcccactcagtggaaagataccctccccacgcccacacacaaacctatatcgatttttctgtctctatttctcttatttctctcwcctctaacccttcctgatatatacttatctttctctctctaactacatatctaactgtctatgttgaaaaccatgagttcacactggtatctccaatcccaattcagcaacacagggcaa

SEQ ID NO: 109303 - DNA, 562 bp, Homo sapiens
tcaagcctgtctacttcaaatcctctgctctctctactctattccattattttggggacaagatgaagaacaggaaagaagagaaggaggaggagagaggaaaaaagaaaaggcagtagcaggaaagccatatgcttaggacatcctgcagatggtattttaatttctcattccaggaagtgattgaggagggagaacmaggagctattcaaaccagagacccatagaaattgagaaatgggagtcaggtgaagggagaacactcaagctatagaaatgggcctccttgatgaaagaagatgtagaaggtaggaacttaggcacttgaagatgatttggagctacggagattttgtgtaaaatgcatttatttcaaaagtgccaagtattctcactacaatggtatcttgccatttgaacagcaagggaaattttaaatatttagaaagaattcacaacctttttctcacctgatgatcttcaagcacctatgaacatgtaggtaggatccctccccagacttcttctccatgcgtccctctccatcctccccaccaaagac

SEQ ID NO: 109304 - DNA, 515 bp, Homo sapiens
gtaactggcaaaaacaagttagacactctttgaggaagtagactataaaatgtaaatccaagagtatcttctgctacttggaccccacaattacaagtctccacagccatgacctcagcaaaacagacaccaaagaaacacagaagacagagtgaaggacagggtccaggcagccgtggtaactcccctgttgcctttcttagctctgtgttgcctcatggaaaaaggaatcctactcaacaaaacaaagcaattgggtcccaggyttctacttcaagttattcctgaggccccactgcatttctctctttgtatttctttgagacactccaaagtctttaaaataaaatatcccttctaacttttctacttatagttggtttgggttttgtcatggttatttgccctgcctgagaggtggatgccctggagcattcctggataacagccattctgcctctgggacctttctccccacttgggaggaaagttacaatggttttgagaggagaagc

SEQ ID NO: 109305 - DNA, 623 bp, Homo sapiens
gttaatgtacacacgagtaatgtacacatgggtaatttgtggggagggggaggtgaaaatcctttaaaattagatagtggtgatgatggtgatggttgtataactttgmgtttactaaggacacttcactgttcactttacaagtgattttatgatatgtgaattttatcttaaagtttgtattaaaaaataaaaccatgaggagaccttacagtgaccagacaaaaagaatacaataatagtagaaaagaatgtaatgcaaggttaaaattcaataggtgaaacagacccacacatactcccctcttctgcttgttcccctctgctgaagacttgaccacacatcatcttcattaggctgaagacagagggttcttctgaagattaaatggcctcagaggaaaataaactcctaacatttgagagtgcacaataataaaagtcatctccgcctctctttacaaataaaacataccaagaaatgaagcccacaattatgtgtatttccttccaaaactaagggtcaccaaacatttgacgagtgtctccaacatgagaggcattggagttaaaatggcatcataaagataatataagagaactaaagcaacaaaaaacaaaac

SEQ ID NO: 109306 - DNA, 533 bp, Homo sapiens
tgacctgctgccactacttccactgctgataccatgcacaccactcagaggttcaaggatggccttctgctgccaccaacagcacctgagcaygtgacctggaagcccaaggactggcccacacagattttccatagttagcacccatgtatgccactcaggggattgaagaccagcatgctcagcccatcactgccatcaatggtgccaaggacctatctgcctggtgtccccatctctagcaaggcctcaccacagcttccactaacaaccacagcctaagccactgtggaactcacagacaccgctcatgctgactacagctaaagaaattacataagattttactactgtgcccacctggaatcaaagccaaagaccctactcaacactatagctatgtctttccctacaaaagccaaatcataaaactgaaagaaacaatcattacaacagacacacaggtattaacataaggatacaaagagcaaggaattattaaaccttcaaaggaacacaataaatccctagta

SEQ ID NO: 109307 - DNA, 588 bp, Homo sapiens
gaaactgggctgcatgtgtcattgctgtgtcattcccagcctgttcccctgagattgtggtacagtggggccctctccgctccaccctcaggcagaactccaggcattcagagcacatgcttgcctggactagccctctgaatcaccccacccttcctggacgtaaatcatggkgcagtgaggccctctctgtttcatactcaggcagatatcaagtcatttagagcagccgctctcatggaatatcaacctgaggcaccccacccttcctgggcagaggttctggtgcagtggagatctctctgttccattttcaggctgaactccaagcatttggatcacccactgactaggttggcagctttggctgccccacccttcctgtgcacagattgtgatacagtggggctttctccactcccatgcccaggcagatctccaggcagtcagagcacccattcaaaaggatcagtagcttaagccacactccccttcctgtgcagagattatggtgaagtggggccctctctgctctacactcaggcagatctccaggaattcttagcacccactcacctgaattggcaa

SEQ ID NO: 109308 - DNA, 504 bp, Homo sapiens
ttacccttaagcgccatctactggctcataggttatactacacagtccaatataaaacttgctaaaagtccagagggctatagaagcacagccaaatgaccctacccaggattctctacactctaaacccccttgggggtaggaggagggaaagaagaaaaaataatattatagagaaagaaataagaagaaaaaatgctaccctcatgaaaataattacaaaaattagaagtgccagcatctcccgatgagaaggaactagcacaagaattctggcatcacgaaaaatatgaacttattggcatcaccaaaggataacactagctctccaytgatgggctctaaccaaaatggaaattcagaattgacacaaataattcaaagcacagatttcaaggaagttcaatgagatccaagacaaggatgaaaatcaacacaaagaaatttccaaatcaatccaaaaaatgaaagaagaggtaaatatattaaaatgaaatcaatcgg

SEQ ID NO: 109309 - DNA, 408 bp, Homo sapiens
tcagtagaaaaatagtccaaagatataaacaggcaatgcacagaagaacattagtaataaacctttgggcatattttcatgcccacactcactagtaatcaggaaactcccaactaaattgagataccacttcatacctatcaaattggcaaaaattttaaagtctcataatacaaatattggtgaggatgtgaaatagtgggaactctcataaactgtgtgtgggagtgtaaattgttacaattactttcagacaatttaggcaaatttttaaagttcargagctactcctgggaataaggaaacatgcagtattgtttgtaatggccgccattggaacaatctgcacgtccctctgctgaaggaaagaataaagtgtggcatattcataccatagttgtggaattc

SEQ ID NO: 109310 - DNA, 565 bp, Homo sapiens
tagtatgagactgcagcaattcagtcacatcttcagactctacttctaattctagttgtcttgctatttctatttaataccacatctgcagttactttctccactgaagtcttgaatccctcaaattcattcatgagttttggaatcaacttcttccaaactcctgttcatgtcgatattttgacctcctcccatgaatcatgaattttcttaatggcatctagaatggtgaattmtttccagcaggtttttaatttaatttgtccagatccatcacacaaatcactctttatggcagctatagccttatgaaatatatttcttaaataagaaatgcctttgagagttgaaagacttgaaagtagaaattactctttgatccatggactgcagaatggatgtccttttagcagacataaaaacattaacttttttgttcatctccatcagatctcttgggtgactaggtgaattctcaatagcagtgatattttgaaaggattttttttttttctgagcagtaagtattaacagatagcttaaaatattcagtaaaccatgatgt

SEQ ID NO: 109311 - DNA, 559 bp, Homo sapiens
aataaataatatacaaaggagctccaatatatccaggaacagacatctcagtggacagcttacaggcatgatatattaaaaggaaaaaaggaaaagacattttcctggagtagtatatccagtgaaaatatccttcaaaaatgaagaagaaaagactttcctagatgatcaaaaggtcatggatttcatcaatatcagacctctcctacaagaaaagctaaagagtgttcttcaatctgaaagaaaaggacattaacaaggagtaagktacaaatctttcacctgaaggtacaaaacttactggtaatcctaagtacacagacacagaatattataacactgtaattgcggtatgtaacctactcatatcttgagtagaaacactaaaagttgaacttctcaaaaataataactacaacaacttttcaacacagagggagtataataagatagaaataacaaaaggttaaacagtgaggatcaagaaattaaagttagagtttttatgagttttctctttgcttatttgtgagttttttatgcaatcagtgttaagttg

SEQ ID NO: 109312 - DNA, 376 bp, Homo sapiens
atgtccttctacatatggcagcagcaacaagaattataagcaaaggggtggggggaagccccttataaagccattagatctcatgacaactcactcactatcatgagaacagcatgagagtaactgctaccatgattaaattacttcccaaggggtccttcctatgacatgtggggattatgggaactacaattcaagatgcartttgggtgtggacacagtcaaaccatatcattctgcccctggccccgcccaaagctcatgcatgtcctcacattttaaaacacaatcatgcccttccaacagtcccctgaagtcttaactcattccagcattaactcaaaaggcaaagtccaaagtttcatctgagacaagg

SEQ ID NO: 109313 - DNA, 612 bp, Homo sapiens
gccacatcccatctcagtagggctactgtaattaattatggatatttgccaaaggatgaaggaatgccagatggaaaccctgttatttgcgaacctacactaactcatgatgatactgtgctactttatatgacctggctcacttatattatgagctcttttaagatttgsggctcattaagtatttgaatttttaatcagatagcaacaagaaaatatggggaaaatttcaacgtagacactcccatttcttgaagactttgagagagtaaatatttttggttgattaaatgacatggtcatctttttgatacttaatggcattaactaaatgtcttaagtaaagttcttggtattcagtgatgaaaagcatatttactttagagtttaattttaattacggaaacaagctaataaacaaaattaatattatatcatagttatttgtaagagctttgtgcatttgctttgggaacatcaaaaaggtctagttcagaaaatcaggtcagagaaatcttcccgggggaatggtgtttaagctgattgctaaaggataaattggatttggcaaatacagggtgctgatgagggagagtttttgcaagaacagag

SEQ ID NO: 109314 - DNA, 612 bp, Homo sapiens
gccacatcccatctcagtagggctactgtaattaattatggatatttgccaaaggatgaaggaatgccagatggaaaccctgttatttgcgaacctacactaactcatgatgatactgtgctactttatatgacctggctcacttatattatgagctcttttaagatttgcggctcattaagtatttgaatttttaatcagatagcaacaagaaaatatgrggaaaatttcaacgtagacactcccatttcttgaagactttgagagagtaaatatttttggttgattaaatgacatggtcatctttttgatacttaatggcattaactaaatgtcttaagtaaagttcttggtattcagtgatgaaaagcatatttactttagagtttaattttaattacggaaacaagctaataaacaaaattaatattatatcatagttatttgtaagagctttgtgcatttgctttgggaacatcaaaaaggtctagttcagaaaatcaggtcagagaaatcttcccgggggaatggtgtttaagctgattgctaaaggataaattggatttggcaaatacagggtgctgatgagggagagtttttgcaagaacagag

SEQ ID NO: 109315 - DNA, 555 bp, Homo sapiens
cttgatacgcagaaattctgaaggcagagtctttgccaagtgtgctttattttattttgttcaggatgttaaaagataattagtttatggtttattgaaccaatattcaatgattaaatctttgagaaactactatgtgtttcgtgctttcatacatatatattatttcatttaattctaacatccttgtaattttaccaaaaaatccaaggtttagcttttgctcaaagtcacagacactgtgtggwatttaagtttgtattctagtcctatgctctttcttcccccctacatttttattctccaggattacgaaattcccctagcttgagggtaatgatattttcttcctctctccttcccctgttcccattctccttccctttctccatccctgctttcctttcttccttccttccacagatatttaatgagatctaggttcaaagattgattataggtactgtaggttcaaagaaaatatgacattggcccacaccaaggaggaattactaagctactggggggaccaggtatttaaataaaaaatgtaat

SEQ ID NO: 109316 - DNA, 604 bp, Homo sapiens
gcttgggtccagggggtgaaggctgtartaagctatactcacaccactgcattccagcctggggaagagagcaagattccgtctctaaaaaaaaatttttggtagcttttctttagcatcaaggatgtcctactgactcttgactattgatgaaagcacttctctccttcatattatcatcagcatttccctctgttccaaagggtaggttaggccacagggtcactggctaagacagaaggtatcctgtttccacttagtattggaaatttttctgaccaaaaactatttaatgtctcttatcttttgctgattttcacatagtatttggacaatttttattggagctcttctccctcatgagaataattccatatttttaacaagtgtgccagtttcatgagtaggagacatatttataatttggatatatttctgcaaaatctatttgtacatcacagcatggggtaaaaatactctcttttcctggcttgatttaagcacaaggtcctgaccacaggatgccacacagcagatgcttagcatagatagcaaatatctaactgcacacaaaacacaatatttacatgttcatttatacctt

SEQ ID NO: 109317 - DNA, 604 bp, Homo sapiens
gcttgggtccagggggtgaaggctgtaataagctatactcacaccactgcattccagcctggggaagagagcaagattccgtctctaaaaaaaaatttttggtagcttttctttagcatcaaggatgtcctaytgactcttgactattgatgaaagcacttctctccttcatattatcatcagcatttccctctgttccaaagggtaggttaggccacagggtcactggctaagacagaaggtatcctgtttccacttagtattggaaatttttctgaccaaaaactatttaatgtctcttatcttttgctgattttcacatagtatttggacaatttttattggagctcttctccctcatgagaataattccatatttttaacaagtgtgccagtttcatgagtaggagacatatttataatttggatatatttctgcaaaatctatttgtacatcacagcatggggtaaaaatactctcttttcctggcttgatttaagcacaaggtcctgaccacaggatgccacacagcagatgcttagcatagatagcaaatatctaactgcacacaaaacacaatatttacatgttcatttatacctt

SEQ ID NO: 109318 - DNA, 604 bp, Homo sapiens
gcttgggtccagggggtgaaggctgtaataagctatactcacaccactgcattccagcctggggaagagagcaagattccgtctctaaaaaaaaatttttggtagcttttctttagcatcaaggatgtcctactgactcttgactattgatgaaagcacttctctccttcatattatcatcagcatttccctctgttccaaagggtaggttaggccacagggtcactggctaagrcagaaggtatcctgtttccacttagtattggaaatttttctgaccaaaaactatttaatgtctcttatcttttgctgattttcacatagtatttggacaatttttattggagctcttctccctcatgagaataattccatatttttaacaagtgtgccagtttcatgagtaggagacatatttataatttggatatatttctgcaaaatctatttgtacatcacagcatggggtaaaaatactctcttttcctggcttgatttaagcacaaggtcctgaccacaggatgccacacagcagatgcttagcatagatagcaaatatctaactgcacacaaaacacaatatttacatgttcatttatacctt

SEQ ID NO: 109319 - DNA, 498 bp, Homo sapiens
atctagattcttgtaagcctaaagctggatttatcccgaagctcttccactttgttatctcaaagactatcttttgtggtaggttataaccactctctaatattgtgtgctattttatgatgagtattwtttatttatttatttatttatttatttatttttttttgaggcggagtctcactctgttgccaggctggagtgcagtggcatgatcttggctcactgcaacttccgcctcccaggttcaagcaattctcctccctcagcctcctgagtagctgggattacaggtgcatgccaccaggcccagctaattttttaatttttaatagagacagggtttcaccacgttggccaacatgggggacctcagtttcttgaccttgtgatccgccctcctcagcctcccaaattgctgggattacaggcatgagccactgcgcccggcccagtatttattttatattgatatggaaagtttgttttcatatacagtta

SEQ ID NO: 109320 - DNA, 498 bp, Homo sapiens
atctagattcttgtaagcctaaagctggatttatcccgaagctcttccactttgttatctcaaagactatcttttgtggtaggttataaccactctctaatattgtgtgctattttatgatgagtattawttatttatttatttatttatttatttatttttttttgaggcggagtctcactctgttgccaggctggagtgcagtggcatgatcttggctcactgcaacttccgcctcccaggttcaagcaattctcctccctcagcctcctgagtagctgggattacaggtgcatgccaccaggcccagctaattttttaatttttaatagagacagggtttcaccacgttggccaacatgggggacctcagtttcttgaccttgtgatccgccctcctcagcctcccaaattgctgggattacaggcatgagccactgcgcccggcccagtatttattttatattgatatggaaagtttgttttcatatacagtta

SEQ ID NO: 109321 - DNA, 566 bp, Homo sapiens
aaaatggaaagaataagtcctaactaatcaataacatcattgggtgtaaatgggctgcactctccactcaaaagacacggagtggctgaatggacaaaaaaaaaaaaaaagaagacccagtgatctgttacctacaaagaacatacttcacatacagatggaaaataaagagatggaaaaacttattccatgccaataaaactgaaaagaacaggagtagtatacttttatatcagacaaaatagatttcaagacaaaaactataagaagagacaaagaaagtcactatataataataaaraggtcaatgcagcaagaggatataatcatttaaaatttataggtacataacattggaggaccaagatatataaagaaaatattattagagctaaagagagaaataggccctaatacaatgatatctggagacctcaacacccaactttcaacaatgcaaagatctttcagacagaaaactagcaaagagaatagtggacttaatctacactgtataacaaattgacctaaaagatatttacagaacatttcgtctaacagctata

SEQ ID NO: 109322 - DNA, 566 bp, Homo sapiens
aaaatggaaagaataagtcctaactaatcaataacatcattgggtgtaaatgggctgcactctccactcaaaagacacggagtggctgaatggacaaaaaaaaaaaaaaagaagacccagtgatctgttacctacaaagaacatacttcacatacagatggaaaataaagagatggaaaaacttattccatgccaataaaactgaaaagaacaggagtagtatacttttatatcagacaaaatagatttcaagacaaaaactataagaagagacaaagaaagtcactatataataataaaaaggtcaatgcagcaagaggatataatcatttaaaatttataggtacataacattggaggaccaagatatataaagaaaatattattagagctaaagagagaaataggccctaatacaatgatatctggagacctcaacacccaactttcaacaatgcaaagatctttcagacagaaaactagcaaagagaatagtggacttaatctacactrtataacaaattgacctaaaagatatttacagaacatttcgtctaacagctata

SEQ ID NO: 109323 - DNA, 513 bp, Homo sapiens
gtaccttcacatttcatatcctccttaatgggaaatgcttattcagaaattactctcctgggaagcaggcctcaagcaggccaatgagtccagttctgaggttcctccagctgcgtttcactcacagtgcctgagtgcaggcccagtaaggcccttcctccttcctcagacatctgtttctatgtcccagggatcacatggccattctccttctccgcctgagggagagagtgaagcaagcctttcagaagcctgtcacttgtcagattgttagcccaggccagggtgggggttctgtaccaatggcaggattttcttttcttttttctttttttttmttttcataaagacacagtcttgttatgttatacatgctgatctcaaactcccaggctcaagtgatcctcttgcctcagcctcccaaaatgctgggattacaggaatgaggcactgtgcctggccagtgccatctgcccctactctgcagcttctgccatctggaactttaccccc

SEQ ID NO: 109324 - DNA, 544 bp, Homo sapiens
ggtgggaaaaaaaggtcaagaaaatttgtaatggagataattgaaagtataaccaggctgggtgaggtggcttacacctgtaatcccagcactttggaggctaaggcgtgagaatcacctgaggtcaggagttcaagagcaccctgaccaacatggtgaaaccctgtctctgctaataatacaaaaattagctaggcatgatggtgggtgcctgtaatcccagctcctcggcaggctgaggcgggagaattgcttgaacccgggaggcggaggttgcagtgagctgagattgtaccattgcactccaacctgggtgatgagagtgaaattctgtctcaataaataaataaataaataaatataaagtattaccaatatgaacaggataacatttctgaaagaacatttctgaaaagtagagaacataaaatatatakagagaaaaaatatttgtgtgacaagacagcaataattttgcagttacaattaatgaatgaatgatataagcagagaaggaaagcttaaatatggaaattaagaacca

SEQ ID NO: 109325 - DNA, 565 bp, Homo sapiens
taaactccatgtactcaaaactcagtttcaacaattatcaattcatagtcaatgttattttacctataatgtgaagcaaattgtgacatatcatttgactatttctgtatgtatttagaacacataaccacaatacaattatcatacctaaaataattaacaataatctctaatattattacatttttagttcaaaacatttcttgttttgtcaatgtgtcttagttgtatggtgttttaaacccaatcacgtagctggtccaggccggactggccctctctaggcctgttgctcagctcgcatgctgggacttccttccaccagtcttccaacttcagtacagtttctcmtgtacactgtgttttctgcctcattttaatctcctacattcatcctcaagtaacttgctatgataaatacattgaaaataatttttctgacttgttttgaaagatgactttttcagccctcatgctttattgatatcatgtttgggtatagaattctagtttgaatgtaattttttctcagaagtttgcaggcattattcaattatctatggtt

SEQ ID NO: 109326 - DNA, 567 bp, Homo sapiens
tgcaatcaagacactgtgatattggagtaaagctagacaaatagagcgatggaaaagaatagagagtccagaatagactcatatatatgatcaattattttcttcaaaggtgcaaaagacaattgtgtggataaaatatagacttttcaacaaatggtgctggaacaactttatagtatacacacacayatgcattcacaagaaagaacttcaaaccatatcatactatacataaaaattaactcaaaatggattgtagttataaatgcaagagctaaaatgatagaacttctagagtaaaacagtaaaaaaaaatactgtataaatttggattaggccaggacttctttgacacgccactgaaaacataccctataaaagatgaaattgagtaaatggacttgagcagaattaagaatgtctctctttcaaaagaaagtgttaagagaataaaaagccatagcttgggagaaaatattcacataccatatatttgataaaggactggcatccagaatattttaaaagctctcacaactcaataataaaaacgaaaaaaaaagatgg

SEQ ID NO: 109327 - DNA, 532 bp, Homo sapiens
tgtaatttatgaaagcacaaacagaatgatatgtcccgggtgcttcaataattaaaggggcttccagaagggccactgctctcacagagcaacatttgctttcaaagaactagctctagctaaaaaagcaggagacagtgcccagtctgagaagcttccatgttcttaatgtcctgatattctccctctcacacccaccataactcactactcaagaaattgtatggctagagtcaccagcaagagtaattttgcacaacaaatgcccagctaggaattactcttcatccacatgggctgaaaaatcccctccatatagagacataaggatatctgacctggagaagcttgctctgcaccctcaagcagcattaccaaggacagtgggagccatgaggcatgaaataaaccaagatgaaaatagcaccacataacctctgaaaattacacmgtcattgcaactaaaacccacaaaagtaggccaggacctacatgccaaacctaaatagaggaattgactgttaaaataaaa

SEQ ID NO: 109328 - DNA, 537 bp, Homo sapiens
aagcaaaaataaaagcataaacgttgagctaaaagcttaactatgagctgaaagcgcatacttaagataggatagcttgagggtaaatrccagtctctgcactgtggtttggagatttagctttaccttagcagcaaggaagataagctgaaaatgagattcttggattatacctgaaaccctggaaggggctaaatttgttctaggtttgtaatgtctccaaaatccctgtggaaacacatgaaccttctcttacatggaatatatctttaaattaggcatcctagttttcctcagaataaaataaagtcaaatataaggtaacaatcaacaatcaccaaatttacaataaaacttaccaccagaaatgagagtaggtaggaaaaaacataatagatttagctcaccaagggcatcaaatactagattttacgacttggaatataaaatatacataggacatttaaagaagtaaagaatgacatcacaaaatacaatgagagccaattaaaaactgatgagggatatttggaaaag

SEQ ID NO: 109329 - DNA, 567 bp, Homo sapiens
catgtcggcaaaacatcaataaattaagcaattagactactgtttataatcacagcagagtttgcaaacagccacagtcaaatactgacatctcactccagggttgttcawtaacattatcactagagatgatcattgaaattaggaacaactataatataaaataattatcccccacgaaaacaggactgtcagtattttgcctagataatttccaaataatcgccttttccagagccatcccttcatctccttccaactttcaagtattcctttggaaagcatttttttcccagtttttccacctgaagaaaattgttccacacttttagatatatctgtaatttttcgtcaggtctgttctttcttactcttaaaaattgtaacgcctaatgtttcttaaatattcataccccataccattgcgtcaaccactttatgtacattgtctcattttatcttcacaaatatcctacatgaaagaaacaagtattgggccaggtgcagtggctcactcctgtagccccagcactttgggaggttgaggcagcggatcacgaggtcagc

SEQ ID NO: 109330 - DNA, 605 bp, Homo sapiens
ggctctggcagtaatgaacctgtttgggccttcgtttcctcaaatgaaatagttaaattggattatctctaatttaatttcaagttcttgaattaaaaaaaaaatgaaagaaggaagggaggacaggaggaagaaaagggggaggttaggagacagagagggaagtagagaaatggtgcttctcctgttagactaatgagtcacaaaacatttcctaaggaagcatatttgtcatttaatgacttcaatgcatgacttgagacagtgtggacgtcgctgctgctattcaactaaagacaaattttagtaaattgaaagagatttggagagagaatgaactattctgygctcaggcagatgcaaggaagagaatgcggatgagccactgaaaatcgccagttcccaaggtcattctgcaagttggtccttctatgttcagttagcatttttgtaccttttatttggtctgtggtaataatgacatttctcccttagtttgctaaagcctgagcattcattcaatagctcctcatctttgtaattcaaaaggtgaagaggcaaattagtcaattaaaatgcacagtatctgtggtgtgtacctcagt

SEQ ID NO: 109331 - DNA, 490 bp, Homo sapiens
aggctgggggatggtcaggtctttcccttcccacgaggccatatttcagactatcacatggggagaaaccttggacaatacctggctttcctacgcagaggtccctgaggccttccgcagtgtttgtgtccctgggtacttgagattagggagtggtgatgacccttaacgagcatgctgccttcaagcatttgtttaacaaagcacatcctgcrcagcccttaatccatttaaccctgagttgacacagcacatgtttcagggagcacagggttgggggtaaggttacagattaacagcatctcaaggcagaagaatttctcttagtacacaacaaaatggagtctcctatgtctacttctttctacacagacacagcaacaatctgatctctctttcttttccctacactcaaatgtataattggattggcatacttggcatttggaataactcacatacttgggtccttggactataagataagagc

SEQ ID NO: 109332 - DNA, 563 bp, Homo sapiens
aatagttaatgctgtattgtataattgacatttgataaaaggttaggtcaataagtgttgtcaccatacacacacaagcaaatggcaactatgtgaggtgatagatatattaattagcttatttttggtgattatttcacaatgtaagtgtatatcaaataatgagtttgcacaccttaaatatatgcaattttaaattgtgagttatacctcaataaaaacataagtaagtagctccacccccatcactctttcacacaaccttctttttttttgtttttatgttgagacagggkctcgttctgttgcccaggctggagtacagtggcgtgatcattttccacagcatactcaaacccctgggctttgaagttatcctcccgcctcagcctcctgagtagctgagactacaggcacatgctgccacgcccagttttgtttcgtttgttttgttttgttttgttttgttgtagccacaaagtcttgctgtgttgcccaagtggctctcaaacacctaagcccaagcaatcctcccatctcggcctcccaaagtgttgggatta

SEQ ID NO: 109333 - DNA, 628 bp, Homo sapiens
tttgtaagagtaactgggcaatacatatatttttaaatatgtgtttcccctgcctctacctacccttatttaatcatatatttattgtctctctggttagcctaagatagccattgcrttataattacattgtacacaagaaaggttctgttgagaaaaaagaggttgttcactactccaaaactcaaaatttacccgtagcaacaacgtcatcattcagggtgatatagcaccaatatatgttcctgaagaattaggagagtaaataaggatggtcaggcagccagctttcccggtttgaactcttcatttccttcatggtgtgtatgcaaagttgagaattgtcagacctgacttgtaattccctgtggctgaggcactgttgctagggacaggacaacctggaccaagagccaaattgagtgtatggcataaactcacaggggtctttagcatgaacaggaggtgacaggaacctgaaccacccaaagtcagtgtctttgctctgactgagctgagaaagtggagatggcaggctgaccaagcacgggcatttgaagagcttgccagcagagtctcaatggtttctgacaatgtcaagcatggcccagtttctgacaacgttaag

SEQ ID NO: 109334 - DNA, 581 bp, Homo sapiens
tgactttggaactaggtaatgrgcaggagttggaagagtttggagggctcctaatacaggaagatgaaggaaagttctgaatttcttaaagactagttaaatggttgtgaccaaaatgctgatagtgatatggacagtgaaggataggctgatgcggtctcagatgaaaatgaggaacttactgggacttggaataaaggtcatgcctgttatgccttgacaaagaacttggctgcagtctgttcatgtactagggatctgaggaagtttgaacactcagacgcaggagcaaaaaaatggacttaaagttggaatttacaattaaatgggaagcagaccatacaagtatagaaaatttgcagcctgcccatttggcaaaggaagataaagcattttcaggggaagaatctaaacaggctgtggagcaaccacttattagagacatttgcataactgaaaaagagctaggtgcttatagccaagacaattaaaaaaaggccttgaaggcatttcagaaatctttgcagcagctcatcccagcacagacctagaggtctaggatgaaagaatggtttcttgtg

SEQ ID NO: 109335 - DNA, 581 bp, Homo sapiens
tgactttggaactaggtaatgagcaggagttggaagagtttggasggctcctaatacaggaagatgaaggaaagttctgaatttcttaaagactagttaaatggttgtgaccaaaatgctgatagtgatatggacagtgaaggataggctgatgcggtctcagatgaaaatgaggaacttactgggacttggaataaaggtcatgcctgttatgccttgacaaagaacttggctgcagtctgttcatgtactagggatctgaggaagtttgaacactcagacgcaggagcaaaaaaatggacttaaagttggaatttacaattaaatgggaagcagaccatacaagtatagaaaatttgcagcctgcccatttggcaaaggaagataaagcattttcaggggaagaatctaaacaggctgtggagcaaccacttattagagacatttgcataactgaaaaagagctaggtgcttatagccaagacaattaaaaaaaggccttgaaggcatttcagaaatctttgcagcagctcatcccagcacagacctagaggtctaggatgaaagaatggtttcttgtg

SEQ ID NO: 109336 - DNA, 581 bp, Homo sapiens
tgactttggaactaggtaatgagcaggagttggaagagtttggagggctcctaatacaggaagatgaaggaaagttctgaatttcttaaagactagttaaayggttgtgaccaaaatgctgatagtgatatggacagtgaaggataggctgatgcggtctcagatgaaaatgaggaacttactgggacttggaataaaggtcatgcctgttatgccttgacaaagaacttggctgcagtctgttcatgtactagggatctgaggaagtttgaacactcagacgcaggagcaaaaaaatggacttaaagttggaatttacaattaaatgggaagcagaccatacaagtatagaaaatttgcagcctgcccatttggcaaaggaagataaagcattttcaggggaagaatctaaacaggctgtggagcaaccacttattagagacatttgcataactgaaaaagagctaggtgcttatagccaagacaattaaaaaaaggccttgaaggcatttcagaaatctttgcagcagctcatcccagcacagacctagaggtctaggatgaaagaatggtttcttgtg

SEQ ID NO: 109337 - DNA, 581 bp, Homo sapiens
tgactttggaactaggtaatgagcaggagttggaagagtttggagggctcctaatacaggaagatgaaggaaagttctgaatttcttaaagactagttaaatggttgtgaccaaaatgctgatagtgatatggacagtgaaggataggctgatgcggtctcagatgaaaatgaggaacttactgggacttggaataaaggtcatgcctgttatgccttgacaaagaacttggctgcagtctgttcatgtactagggatctgaggaagtttgaacactcagacgcaggagcaaaaaaatggacttaaagttggaatttacaattaaatgggaagcaraccatacaagtatagaaaatttgcagcctgcccatttggcaaaggaagataaagcattttcaggggaagaatctaaacaggctgtggagcaaccacttattagagacatttgcataactgaaaaagagctaggtgcttatagccaagacaattaaaaaaaggccttgaaggcatttcagaaatctttgcagcagctcatcccagcacagacctagaggtctaggatgaaagaatggtttcttgtg

SEQ ID NO: 109338 - DNA, 561 bp, Homo sapiens
acgcttttggagtggtgtttttgccctgaatgcctcctccccctggcttgttgatggttttatttggtgtgataagaatgacccaattcatatgatcaatttttacatttamccctttccatcaagatctttctcttaaagcatcaaccatgtttatagttgtacaacaaccacaagttaggtttaatcatcccttagtgctaggatggacctgtcccagttgctccgtcccacatctgggaaaggtatggaggtctacatcaggtctatgtcaagatttatggcttaaaatgtctatccaaggaaaaaataaaactgaccagtaatcccaggagagaaacataccttggcaaattctaagatatttctaattttatttaacaattttaaaattaattaatgtatcaaagattcacctaactcatgtcaaataaaatatgtttgcactaattaatatatattttatatgaacattcctttatttaaaccatccttttttcctagagtgatggattaggggctttcagtgtgcctcagccacttggaagtagaaaaataagc

SEQ ID NO: 109339 - DNA, 537 bp, Homo sapiens
tagtgctaggatggacctgtcccagttgctccgtcccacatctgggaaaggtatggaggtctacatcaggtctatgtcaagatttatggcttaaaatgtctatccaaggaaaaaataaaactgaccagtaatcccargagagaaacataccttggcaaattctaagatatttctaattttatttaacaattttaaaattaattaatgtatcaaagattcacctaactcatgtcaaataaaatatgtttgcactaattaatatatattttatatgaacattcctttatttaaaccatccttttttcctagagtgatggattaggggctttcagtgtgcctcagccacttggaagtagaaaaataagcataaagataaactttgtgagcttcaattcaagaagaaaaataggaattcacaggaatagagaagaacactccagaccctgtggagggggaggtgggaaagcagactctgtgatagcatttggttcataaaagggagtgaaactccagtacgagacaagagcagccagtctc

SEQ ID NO: 109340 - DNA, 561 bp, Homo sapiens
acgcttttggagtggtgtttttgccctgaatgcctcctccccctggcttgttgatggttttatttggtgtgataagaatgacccaattcatatgatcaatttttacatttacccctttccatcaagatctttctcttaaagcatcaaccatgtttatagttgtacaacaaccacaagttaggtttaatcatcccttagtgctaggatggacctgtcccagttgctccgtcccacatctgggaaaggtatggaggtctacatcaggtctatgtcaagatttatggcttaaaatgtctatccaaggaaaaaataaaactgaccagtaatcccaggagagaaacataccttggcaaattctaagatatttctaattttatttaacaattttaaaattaattaatgtatcaaagattcacctaactcatgtcaaataaaatatgtttgcactaattaatatatattttatrtgaacattcctttatttaaaccatccttttttcctagagtgatggattaggggctttcagtgtgcctcagccacttggaagtagaaaaataagc

SEQ ID NO: 109341 - DNA, 537 bp, Homo sapiens
tagtgctaggatggacctgtcccagttgctccgtcccacatctgggaaaggtatggaggtctacatcaggtctatgtcaagatttatggcttaaaatgtctatccaaggaaaaaataaaactgaccagtaatcccaggagagaaacataccttggcaaattctaagatatttctaattttatttaacaattttaaaattaattaatgtatcaaagattcacctaactcatgtcaaataaaatatgtttgcactaattaatatatattttatatgaacattcctttatttaaaccatccttttttcctagagtgatggattaggggctttcagtgtgcctcagccacttggaagtagaaaaataagcataaagataaactttgtgagcttcaattcaagaagaaaaataggaattcacaggaatagagaagaacactccagaccctgtggarggggaggtgggaaagcagactctgtgatagcatttggttcataaaagggagtgaaactccagtacgagacaagagcagccagtctc

SEQ ID NO: 109342 - DNA, 547 bp, Homo sapiens
ctcaccttttcactggggatctgtgcaatccagattaagggagagcactctgtgtctcccaagccttggagctagcacaaaagtggctgagagatggggaaagaggaaagacactcagaaaagctgcaggcatttccccagacctgggactgagagaaggatgmcctttttaatctgggctcatacaaagtcaatcattttttggtgcctggcaatggtggccactgcagacactttaatcttgggctaggaattggagtgctttctctggagcaggggagcagcctcaacagccagaattgagtgttgagtgtggaaagtgccccagcagtaagtgttggaattaggctctctcctcttgcaggactgtagtgggaagagagttgctaaagcagaggtttctcaaggatggtgagacttgcagccaagaacagctttgcaacctggaactggtctgtgtgtgtcattgctgggtgtctcagcctgctcccttggtcagttgagagagtactccatcagctccaagaaacaagagggaggtgaaccc

SEQ ID NO: 109343 - DNA, 501 bp, Homo sapiens
ggagagcactctgtgtctcccaagccttggagctagcacaaaagtggctgagagatggggaaagaggaaagacactcagaaaagctgcaggcatttccccagacctgggactgagagaaggatgccctttttaatctgggctcatacaaagtcaatcattttttggtgcctggcaatggtggccactgcagacactttaatcttgggctaggaawtggagtgctttctctggagcaggggagcagcctcaacagccagaattgagtgttgagtgtggaaagtgccccagcagtaagtgttggaattaggctctctcctcttgcaggactgtagtgggaagagagttgctaaagcagaggtttctcaaggatggtgagacttgcagccaagaacagctttgcaacctggaactggtctgtgtgtgtcattgctgggtgtctcagcctgctcccttggtcagttgagagagtactccatcagctccaagaaacaagagggagg

SEQ ID NO: 109344 - DNA, 547 bp, Homo sapiens
ctcaccttttcactggggatctgtgcaatccagattaagggagagcactctgtgtctcccaagccttggagctagcacaaaagtggctgagagatggggaaagaggaaagacactcagaaaagctgcaggcatttccccagacctgggactgagagaaggatgccctttttaatctgggctcatacaaagtcaatcattttttggtgcctggcaatggtggccactgcagacactttaatcttgggctaggaattggagtgcttkctctggagcaggggagcagcctcaacagccagaattgagtgttgagtgtggaaagtgccccagcagtaagtgttggaattaggctctctcctcttgcaggactgtagtgggaagagagttgctaaagcagaggtttctcaaggatggtgagacttgcagccaagaacagctttgcaacctggaactggtctgtgtgtgtcattgctgggtgtctcagcctgctcccttggtcagttgagagagtactccatcagctccaagaaacaagagggaggtgaaccc

SEQ ID NO: 109345 - DNA, 547 bp, Homo sapiens
ctcaccttttcactggggatctgtgcaatccagattaagggagagcactctgtgtctcccaagccttggagctagcacaaaagtggctgagagatggggaaagaggaaagacactcagaaaagctgcaggcatttccccagacctgggactgagagaaggatgccctttttaatctgggctcatacaaagtcaatcattttttggtgcctggcaatggtggccactgcagacactttaatcttgggctaggaattggagtgctttctctggagcaggggagcagcctcaacagccagaattgagtgttragtgtggaaagtgccccagcagtaagtgttggaattaggctctctcctcttgcaggactgtagtgggaagagagttgctaaagcagaggtttctcaaggatggtgagacttgcagccaagaacagctttgcaacctggaactggtctgtgtgtgtcattgctgggtgtctcagcctgctcccttggtcagttgagagagtactccatcagctccaagaaacaagagggaggtgaaccc

SEQ ID NO: 109346 - DNA, 501 bp, Homo sapiens
ggagagcactctgtgtctcccaagccttggagctagcacaaaagtggctgagagatggggaaagaggaaagacactcagaaaagctgcaggcatttccccagacctgggactgagagaaggatgccctttttaatctgggctcatacaaagtcaatcattttttggtgcctggcaatggtggccactgcagacactttaatcttgggctaggaattggagtgctttctctggagcaggggagcagcctcaacagccagaattgagtgttgagtgtggaaagtgccccagcagtaagtgttggwattaggctctctcctcttgcaggactgtagtgggaagagagttgctaaagcagaggtttctcaaggatggtgagacttgcagccaagaacagctttgcaacctggaactggtctgtgtgtgtcattgctgggtgtctcagcctgctcccttggtcagttgagagagtactccatcagctccaagaaacaagagggagg

SEQ ID NO: 109347 - DNA, 362 bp, Homo sapiens
ccggctctctctctgctaggagagagtcactcaggttaaaacaaggtagggtatcacaggaccatgtacaattcttcaaactccagcttcaactctctttcttattgctctcttaggacagtatatttagatcagagtaaatgaaagtaatgttattaggagataagattaaaattgatcccatttgtaaaaagggaagtagattatttgtgaactgtaatactttttttagtgaagaatcaccttaaaacttggaacctggatacaagataattccttcattctgtaaaagtttagtagcaaactatatgccaggactgtgctaggtactagggatasatggttgaatatatagtataaga

SEQ ID NO: 109348 - DNA, 580 bp, Homo sapiens
gtagctaacctggcacttagggaataagacaaagtattttctaytcttctttaccctctctgcaggcagaagagcttcttctatgactgccaacactactggcccatgggggggtttccaccaaatcatcatcactttctcacttaaagcccaaggactctttagttagcttgtgataaattctgcaatgcctgggactcgacctttggcccagggcaagtgcagaaatgctgaccaagaagaccctaggcctggactcagggactctaagaatctgcttggtgatctaccccactgtggttgagctggtataccaggtgcaatgtagagttccctttactttcccccctgcctttctcaaacagaagtctttcaccatagctaccacagctagaaatgtactgggtcacacctgaacttagcacttctcagagcccaatgcccatggtgtattacctggttgtcactgtttttttattctgggtacaggggttctttagtcagcaggtgatgaattctgccaggtctttactgacatggcagcactgagtttgatgtaaagtcctccagtcactgtgct

SEQ ID NO: 109349 - DNA, 580 bp, Homo sapiens
gtagctaacctggcacttagggaataagacaaagtattttctactcttctttmccctctctgcaggcagaagagcttcttctatgactgccaacactactggcccatgggggggtttccaccaaatcatcatcactttctcacttaaagcccaaggactctttagttagcttgtgataaattctgcaatgcctgggactcgacctttggcccagggcaagtgcagaaatgctgaccaagaagaccctaggcctggactcagggactctaagaatctgcttggtgatctaccccactgtggttgagctggtataccaggtgcaatgtagagttccctttactttcccccctgcctttctcaaacagaagtctttcaccatagctaccacagctagaaatgtactgggtcacacctgaacttagcacttctcagagcccaatgcccatggtgtattacctggttgtcactgtttttttattctgggtacaggggttctttagtcagcaggtgatgaattctgccaggtctttactgacatggcagcactgagtttgatgtaaagtcctccagtcactgtgct

SEQ ID NO: 109350 - DNA, 580 bp, Homo sapiens
gtagctaacctggcacttagggaataagacaaagtattttctactcttctttaccctctctgcaggcagaagagcttcttctatgactgccaacactactggcccatgggggggtttccaccaaatcatcatcactttctcacttaaagcccaaggactctttagttagcttgtgataaattctgcaatgcctgggactcgacctttggcccagggcaagtgcagaaatgctgaccaagaagaccctaggcctggactcagggactctaagaatctgcttggtgatctaccccactgtggttgagctggtataccaggtgcaatgtagagttccctttacttycccccctgcctttctcaaacagaagtctttcaccatagctaccacagctagaaatgtactgggtcacacctgaacttagcacttctcagagcccaatgcccatggtgtattacctggttgtcactgtttttttattctgggtacaggggttctttagtcagcaggtgatgaattctgccaggtctttactgacatggcagcactgagtttgatgtaaagtcctccagtcactgtgct

SEQ ID NO: 109351 - DNA, 580 bp, Homo sapiens
gtagctaacctggcacttagggaataagacaaagtattttctactcttctttaccctctctgcaggcagaagagcttcttctatgactgccaacactactggcccatgggggggtttccaccaaatcatcatcactttctcacttaaagcccaaggactctttagttagcttgtgataaattctgcaatgcctgggactcgacctttggcccagggcaagtgcagaaatgctgaccaagaagaccctaggcctggactcagggactctaagaatctgcttggtgatctaccccactgtggttgagctggtataccaggtgcaatgtagagttccctttactttcccccctgcctttctcaaacagaagtctttcaccatagctaccacagctagaaatgtactgggtcacacctgaacttagcacttctcagagcccaatgcccatggtgtattacctggttgtcactgtttttttattctgggtacrggggttctttagtcagcaggtgatgaattctgccaggtctttactgacatggcagcactgagtttgatgtaaagtcctccagtcactgtgct

SEQ ID NO: 109352 - DNA, 421 bp, Homo sapiens
gctgtgcgtggtggcgggtgcctgtactcccagctactggggaggctgaggcaggagaatgrcaagaacccgggaggtggagcttgcagtgagcagacatcgcactactgcactccagcctgggtgacagagcgagactccgtctcaaaataaataaataaataaataaatattacgtaaactgagaaaatgagtataacaagagtagtattgttgtttctctgataaataaactaaatatgttggaaaaatgagaaactcaacagttgctgtcagcttaactgttggcaagacaactagaaacaaatgggaaaaattgtgtaatctaggatttcagattgctttaccccagttgtcttcacagaaagtgaacaagaaatcaatgacaacatatcattggcatagtttccacaagaaactc

SEQ ID NO: 109353 - DNA, 421 bp, Homo sapiens
gctgtgcgtggtggcgggtgcctgtactcccagctactggggaggctgaggcaggagaatggcaagaacccgggaggtggagcttgcagtgagcagacatcgcactactgcactccagcctgggtgacagarcgagactccgtctcaaaataaataaataaataaataaatattacgtaaactgagaaaatgagtataacaagagtagtattgttgtttctctgataaataaactaaatatgttggaaaaatgagaaactcaacagttgctgtcagcttaactgttggcaagacaactagaaacaaatgggaaaaattgtgtaatctaggatttcagattgctttaccccagttgtcttcacagaaagtgaacaagaaatcaatgacaacatatcattggcatagtttccacaagaaactc

SEQ ID NO: 109354 - DNA, 421 bp, Homo sapiens
gctgtgcgtggtggcgggtgcctgtactcccagctactggggaggctgaggcaggagaatggcaagaacccgggaggtggagcttgcagtgagcagacatcgcactactgcactccagcctgggtgacagagcgagactccgtctcaaaataaataaataaataaataaatattacgtaaactgagaaaatgagtataacaagagtagtattgttgtttctctgataaataaactraatatgttggaaaaatgagaaactcaacagttgctgtcagcttaactgttggcaagacaactagaaacaaatgggaaaaattgtgtaatctaggatttcagattgctttaccccagttgtcttcacagaaagtgaacaagaaatcaatgacaacatatcattggcatagtttccacaagaaactc

SEQ ID NO: 109355 - DNA, 476 bp, Homo sapiens
agaattctcttgaccaatctattttcttgatttttaaaagtcagtgtactctcaaagaaacaaaactattattcatggattctgttatttgaaaatatttactgatcatttttacyttacaccaagtgatctccagctcgtggaaaaatatgtaaagttgcccagcttcattaagcttaaactcttctgaaggagaaaagaagcaatggagtagggacattaaaggaggagtgtggtgatacggctgagacttctacttgcacactgtggtagctgtgtggagactggattgaaaaaagggcaatgacagaagcttaaattagtatcaaatatggcaatcttataattttaagggtccttgaaataagaatgtataatagttctcattatttcctcaagaaatctctgcacttggccttgtgaaggaagcgctatagttaccaagtggtgggggtgggaatgtgaatttggaaaca

SEQ ID NO: 109356 - DNA, 531 bp, Homo sapiens
agattaaaagctttcacattgtttggttttyacatctataaataaaacaagttgttatcattttgtaatatttagcttatatacatttttgtgagagctttgtgggacttggaaagtgtatggactagcatcagacacaaattatttttcatctttctcacttggagtttcagatagcagcattttaatcatctcttccattaaaccaagattacacaaaagcgtttgaggacactgaggactggcacttctaatttttcttcagaaaccagtactcaaaatgtctggtttggaggtcagttacactgctgtctttgtataatcagccattaaaaaatattttggggacatttctcagaagtctcatccccatatttttgttcttaacacatctcaccacaaactctaccacacctatggtttgcaaactttgggaaatgtcagtatatgccattatcatggttattagtactattatttgttaaaagcactttgaaggcaatttatgtgacttatatatagttagtattt

SEQ ID NO: 109357 - DNA, 531 bp, Homo sapiens
agattaaaagctttcacattgtttggtttttacatctataaataaaacaagttgttatcattttgtaatatttagcttatatacatttttgtgagagytttgtgggacttggaaagtgtatggactagcatcagacacaaattatttttcatctttctcacttggagtttcagatagcagcattttaatcatctcttccattaaaccaagattacacaaaagcgtttgaggacactgaggactggcacttctaatttttcttcagaaaccagtactcaaaatgtctggtttggaggtcagttacactgctgtctttgtataatcagccattaaaaaatattttggggacatttctcagaagtctcatccccatatttttgttcttaacacatctcaccacaaactctaccacacctatggtttgcaaactttgggaaatgtcagtatatgccattatcatggttattagtactattatttgttaaaagcactttgaaggcaatttatgtgacttatatatagttagtattt

SEQ ID NO: 109358 - DNA, 531 bp, Homo sapiens
agattaaaagctttcacattgtttggtttttacatctataaataaaacaagttgttatcattttgtaatatttagcttatatacatttttgtgagagctttgtgggacttggaaagtgtatggactagcatcagacacaaattatttttcatctttctcacttggagtttcagatagcagcattttaatcatctcttccattaaaccaagattacacaaaagcgtttgaggacactgaggactggcacttctaattttkcttcagaaaccagtactcaaaatgtctggtttggaggtcagttacactgctgtctttgtataatcagccattaaaaaatattttggggacatttctcagaagtctcatccccatatttttgttcttaacacatctcaccacaaactctaccacacctatggtttgcaaactttgggaaatgtcagtatatgccattatcatggttattagtactattatttgttaaaagcactttgaaggcaatttatgtgacttatatatagttagtattt

SEQ ID NO: 109359 - DNA, 598 bp, Homo sapiens
gctcgacccagttccaacttcctgtaggctttgcttacactgtgaggggaaaactgcttgcttactcaagcttcagtaatggtggacgcccctccccmcaccaagctggagagtcccaggtcgacttcagactgctgtgctggcagggaggatttcaagccagtggatcttagcttgctgggctccgtgggggtgggatctgctgagctagaccacctggctccctggtttcagctccctttccaggagagtgaacagttcggtttcggtggtgttccgaggtaccaccggtgtattaaaaaaactatagctagctcagtgtctacccaaatggccagccagttttgtgcttgaaacccagggccatggtggtgtaggcgacccagagggaatctcctggtctgtgggttgtgaagaccatgggaaaagcataatatctgggcctgaatgcaccattcctcatggcacagtccctcatggcttcccttggctaggggagggagttccctgactcgtgcgcttccagggtgaaggatgccccaccttgctttggctcatcctccatggctgcacccactgtctaaccagtcccaatgag

SEQ ID NO: 109360 - DNA, 551 bp, Homo sapiens
gcatgcattgcctcccaaatccaaagaagcccactaggtgttgttcctctttttttggttatgggaggtgggggcagatgcaacaacttatccttcacattagaaaggttatcacaacatgtcccacaccattagacccccagatatttcactgaggtagaaagactctgaatatttttttgataaaagttgtcctatcctctgacacacaaatattttaccaataaatgtagagtagttgctacttctcactcacgaggcccaattagcataatgtcatcaatgcattggaccactgtgataccttgtggaagggaaaggtgatcaagatccctgtagagactaaattatgtcatagggctggagagttgttatacaactaggataggactgtgaaggtgcattgctggccttgccagctgaaagaaaactgcttctggwggtacttattgacagatgagggtgggaggtggagcattagccagatcaatcgctggataccaaatagtagggaatgcattaatttgctcaagcaatgaaaccacatttat

SEQ ID NO: 109361 - DNA, 577 bp, Homo sapiens
gcatgcattgcctcccaaatccaaagaagcccactaggtgttgttcctctttttttggttatgggaggtgggggcagatgcaacaacttatccttcacattagaaaggttatcacaacatgtcccacaccattagacccccagatatttcactgaggtagaaagactctgaatatttttttgataaaagttgtcctatcctctgacacacaaatattttaccaataaatgtagagtagttgctacttctcactcacgaggcccaattagcataatgtcatcaatgcattggaccactgtgataccttgtggaagggaaaggtgatcaagatccctgtagagactaaattatgtcatagggctggagagttgttatacaactaggataggactgtgaaggtgcattgctggccttgccagctgaaagaaaactgcttctggaggtacttattgacagatgagggtgggaggtggagcattagycagatcaatcgctggataccaaatagtagggaatgcattaatttgctcaagcaatgaaaccacatttattacagtagctgtaattgaagttatga

SEQ ID NO: 109362 - DNA, 570 bp, Homo sapiens
taaaaagaaatgaggtattaatatatgctacaacatgcatgaaccctgaaaacatgctaagttaaagaagtcataaaaaacacacattgtattattccaattatatgatgtaagcagtataggcaaatctatagatacagaaagtagattagtagttgccaggagctgtggggagaaaggwgtaaaaagtgactgctaaagaacatggggtttcttttggggatgatgaaaatattccacaattagatagtaggattagttacataacattgtgaattgtcagtaaaacgacaccaataaaataactctccagagaagaaatcttactgcatgggggatagcaaagatcataacaatgccagccgacaggagcggcagtcccaggatgtcaacccattgcgtagtttgcaggtaggtgttgaggctgccaaaaaagacatggctcacagaggcactggaaggaatagcactttacccacataaagatgagacagagaaaaatcagcttcaacagtgagcattggtctccagtggccactgggtgtcacctgatggccatcatggaaaatt

SEQ ID NO: 109363 - DNA, 507 bp, Homo sapiens
attattccaattatatgatgtaagcagtataggcaaatctatagatacagaaagtagattagtagttgccaggagctgtggggagaaaggtgtaaaaagtgactgctaaagaacatggggtttcttttggggatgatgaaaatattccacaattagatagtaggattagttacataacattgtgaattgtcagtaaaacgacaccaataaaataactctccagagaagaaatcttactgcatgggggatagcaaagatcataacaatgccagccgacaggagcggcagtcccaggatgtcaacccattgcgtagtttgcaggtaggtgttgaggctgccaaaaaagacatggctcacagaggcactggaaggaatagcactttacccacataaagatgagacagagaaaaatcagcttcaacagtgagcattggtctccagtggccaytgggtgtcacctgatggccatcatggaaaattgttgcacataatccttcttatacgtca

SEQ ID NO: 109364 - DNA, 581 bp, Homo sapiens
agccttattgcacagtgtttacagtagtgtacagcaatgtaccaggccttcacattcattcaccactcactgacacatccagagcaacttccagttctgcaagctccattcatggtaagttccctataaaggtgtaccatttttgccttttattctgcatctatacagtaccttttctatctttagatatgtttataaacacaaaaacttaccattatgttacaattgcctgtggtattcagtatagtaaaatgctgcacaggtttgtagcytaggtgcaataggctataccatatagcccagatgtacaataggctataccatctaggtttgtgtaagtgcactctatgatgctcaaacaaaaataaaaagcctaacaatgcatttatcagaatgtatccctgtcatgaagtgacacataactatataactatattttgatttagaaaaaggcagaaaggaaatccttgatggttgaagagttagcatgagtaatctctttacatattttcatgtagtccatcactttgttttgagattatttgtgtaactgtacataagatgtgtctcttgaagacagc

SEQ ID NO: 109365 - DNA, 623 bp, Homo sapiens
tttagtgttggtccattccagaatcctgatatacatgcttctaaatacttgtgaatggtctctcataattacataaaagtaagttgaaaagcrcgaagtttcccagaataagagcacagtaacctaggtttgtgtgtatgagggcaaacgtgcatgtgtgtcagtctgtgtgtgtgtttcagttgcttagtacaagctttgtcactccttgatatagttacaaggaggaatatacacatttgtgagggtggaaaccagtcctatcacctcatttttatgggagatctattgggatggatcagagcagaaaagaataacaatgagtcccttgaaataaaataagtcccagagatccagaaaagggcataaaagcccaggaatgtgtgtgtatggggagggatggtatgatgatcatggtaggctttttgattcatggcaagtgacagataatgaaaatgccatctgggtttagccattttagtatagagtgcactctttggaaaaaaataattaaatttattgaggaagggctgaaagagtgataaaccacaagacaagtgtaagacatctgagttacttctgaggatgagtcttcagaaggaatttcacgtggcagtgagaat

SEQ ID NO: 109366 - DNA, 623 bp, Homo sapiens
tttagtgttggtccattccagaatcctgatatacatgcttctaaatacttgtgaatggtctctcataattacataaaagtaagttgaaaagcacgaagtttcccagaataagagcacagtaacctaggtttgtgtgtatgagggcaaacgtgcatgtgtgtcagtctgtgtgtgtgtttcagttgcttagtacaagctttgtcactccttgatatagttacaaggaggaatatacacatttgtgagggtggaaaccagtcctatcacctcatttttatgggagatctattgggatggatcagagcagaaaagaataacaatgagtcccttgaaataaaataagtcccagagatccagaaaagggcataaaagcccaggaatgtgtgtgtatggggagggatggtatgatgatcatggtaggcttttkgattcatggcaagtgacagataatgaaaatgccatctgggtttagccattttagtatagagtgcactctttggaaaaaaataattaaatttattgaggaagggctgaaagagtgataaaccacaagacaagtgtaagacatctgagttacttctgaggatgagtcttcagaaggaatttcacgtggcagtgagaat

SEQ ID NO: 109367 - DNA, 631 bp, Homo sapiens
atagaaaagaaaaacccattttctgaggagaaagtcaagccacctgcacaaatctgcrtaagtaatgaggagccaaatgttaaccaccaagacaatgggaaaatgtctccagggcacatcagaggtcttcacagcagcccctcccatcaaaggcccagaggcctaggaggaaaaaatagttttgtggtccagattgagggccttgctgctttgtgcggtctcaggacttggtgcctggatcccagccatggctaaaaaggaccaacatagagctcaggccatggcttcagatggtgcaatccccataccttggtggcttacatgtggttttaggcctgtaggtgcacagaagtcaagaatttaggtttgggaacctttgcctagatttcagagaatgtacagaaatgcctggatggccaggaagatgtgtgttgcaggggtggaacctcatggagaatttctgctagggcagtgtggaaggaaaatgtgggatgtgatccctcacacagagtctccatggtagcactgcctagcggcgtgtgagaagagagccaccatcctccagaccccagaatgttagatccacggacagcttatatcatgtgcctggaaaagccacacacactcaaca

SEQ ID NO: 109368 - DNA, 631 bp, Homo sapiens
atagaaaagaaaaacccattttctgaggagaaagtcaagccacctgcacaaatctgcgtaagtaatgaggagccaaatgttaaccaccaagacaatgggaaaatgtctccagggcacatcagaggtcttcacagcagcccctcccatcaraggcccagaggcctaggaggaaaaaatagttttgtggtccagattgagggccttgctgctttgtgcggtctcaggacttggtgcctggatcccagccatggctaaaaaggaccaacatagagctcaggccatggcttcagatggtgcaatccccataccttggtggcttacatgtggttttaggcctgtaggtgcacagaagtcaagaatttaggtttgggaacctttgcctagatttcagagaatgtacagaaatgcctggatggccaggaagatgtgtgttgcaggggtggaacctcatggagaatttctgctagggcagtgtggaaggaaaatgtgggatgtgatccctcacacagagtctccatggtagcactgcctagcggcgtgtgagaagagagccaccatcctccagaccccagaatgttagatccacggacagcttatatcatgtgcctggaaaagccacacacactcaaca

SEQ ID NO: 109369 - DNA, 631 bp, Homo sapiens
atagaaaagaaaaacccattttctgaggagaaagtcaagccacctgcacaaatctgcgtaagtaatgaggagccaaatgttaaccaccaagacaatgggaaaatgtctccagggcacatcagaggtcttcacagcagcccctcccatcaaaggcccagaggcctaggaggaaaaaatagttttgtggtccagattgagggccttgctgctttgtgcggtctcaggacttggtgcctggatcccagccatggctaaaaaggaccaacrtagagctcaggccatggcttcagatggtgcaatccccataccttggtggcttacatgtggttttaggcctgtaggtgcacagaagtcaagaatttaggtttgggaacctttgcctagatttcagagaatgtacagaaatgcctggatggccaggaagatgtgtgttgcaggggtggaacctcatggagaatttctgctagggcagtgtggaaggaaaatgtgggatgtgatccctcacacagagtctccatggtagcactgcctagcggcgtgtgagaagagagccaccatcctccagaccccagaatgttagatccacggacagcttatatcatgtgcctggaaaagccacacacactcaaca

SEQ ID NO: 109370 - DNA, 582 bp, Homo sapiens
gtgtgtcaatgtgttctcataatttagctcccacttataagtgagaacaccggtatttggttttctgttcctgcattattttgcctaggataatggcctccagctccattcatgtccttgcaaaggacatgatctcatttttttttaggattaaayagtaaatttattttttaattataacaaatatatgccattagtatgttcttaagttttgggtcacattggcaacagtgtctttaatttgctttgaaattcttttcagtaatcttaaggttatagttcacttaaaaaatatatttgctatgttttacctccttgaatactgcaaacaggacaaaaaagcatggatataagcgttagctagtgatcactgactactctaaacagtcactaaggcttgaattctctctttaccagatgcctaattggcagaagtcccaaaggtttccctgatcatattaataactttataaaaagttgatcattattcattaaaaattagacatttgtaatgaaaacataaattaagtctaacccaaaactcttaaccagactaacttcagtgttatgaatcacaaaatc

SEQ ID NO: 109371 - DNA, 543 bp, Homo sapiens
cctgtgggagaaagcaagggcaagggccttatagaaacaagcagcacttaacaaggtcattgggttcattttgcctgctgcccagatagagccaatttatcacaacaggggaattgcaatagaaaaagggtttaatacacgcagaaccagctaattaggagaccagagctttattattactcaaatcagcctccctgaaaacacagaggctagggtttttcaaagacagtttggcaggcaaaggaatgggttcagctgattggttggggatacgatcatagggatgtggaaactccagtccttgtgtgttgagtctacttctgggtgggggccacaggaccagttgagtcaagagtcatgggtctgggtgaggctatctggttgtcagaaacgcgaaasgctgaaaagacatctcaaaaggccaatcttaggttctacaatagtagatgttctacagtagtgatgttatcagtaggagtaactgaggaagatgcaaatcttgtgacctctaataatggctggtcattatttgcacctagatct

SEQ ID NO: 109372 - DNA, 524 bp, Homo sapiens
tgtgatcatccaagtgtaattttggtttttccttcccagaatttgtcactgataatctctagtcagccatctggagaagctctcggatgcttcaggctatggagtggtctgtgagatgtgcagtagcctggactccactcttatgctccagaggtgatgttgagtggagctggaccaggctgacccatcctatggtttcccagtggcaggttcaagtaccagctctaatgatggtggcacgggagtggcttacactctgtaagatttccttggttgtaaatagccttggcattgtggctttctccattgttagatgtagtagtaatgtgttgggcatgtgaatgggctcaaggcctcctgagtagctttggtggtgcagtcaatagtgttagctgagatcatgcaaaagcctttttcttcttgagtgctgttattgtgccatcagatattgtartgggctaggccagttgacctctggccaggatgtggtgcgtgcagtagagagccagctgcagtggcagctg

SEQ ID NO: 109373 - DNA, 629 bp, Homo sapiens
tggataaatacatgtgcctcgagtacccccgactttttgccctgcatgttttagaaaagttgtatgtgagattcattatttttattaattaaaaaatgatggggtatgcggtgtggggaggtactgggtgcttttctcagtttttaaagttccatttagcctttcagtcaaggtgttggcagactccaaataaataatgaaaatcactggggaagctgtgtattgaaaggaaccttgtcattaaatgagaacactgcggggggagttattgcctatccacacactggttttaagtctggattttgtatctgatttccttaggattcacatayttgtatatatcacattgtatgtgcacacacatgtgtgtgcaatcttatatgtacatgtcttttccagataaattgtcttttcaacattatttggcaacaggctatatttacccatttcataggcagataattagacaacagaaagggtattatgacctacccagtgtctcactttagttctcccttaaggttccagatttcatcactacaaatctagttctcaattacaaagagtaacgttgggtcttctcattttaatttgatgcctaatatttatttttgtccctccccatttcc

SEQ ID NO: 109374 - DNA, 539 bp, Homo sapiens
caaggtagctgacttacgtccagatgtgaaatgactatactaatccctggtctacctgtctgctgcctgcctcacaaaggaacatcagaacagtgtgcccaggtatcttccagttctacttctccatctttaagcattcatcagccatgggattggtaacctatttgaaactctagcttggtgttgacattaagctcaccattgtccatcctttcctcctgtttagaaaattgggacagagattgcctgtccctgattcccttctctaattctgcatgatttggagaagatcatggccagctgctcagtggtctgacygcaagtttgcccctgggaggttcattggttttgactttgtgggtagcagtggttctcaaacataacgctgtgcatgcaaattacttggagcactgctgagacacagattggtgggccccactcctagagtttctgattcaccaggtctggggtgggcctgagaatgtgcgtctctaacaagttcccagtgatgctgatgctgctggtctggggaccatgaa

SEQ ID NO: 109375 - DNA, 377 bp, Homo sapiens
acttttcagtatcccaattgtagtggtggttacaaaaatctatatatgtgttaaaatgcatagaactaaatagcaaaaactcagtaataataaaaataacaaacacatgctaaycaacattttagcacacaaaggtgcacagtaagcatttgttgtatcaatttaaaaatgatattaaagaccattactgctatgttccacattgccacagcctagtttaaattactgtgtctagctgaatactgaacatgttatatatacgttatgtgttaatgtgtacataagcaagaatgactgttggagggagggcaagtcaattatagacaaactttattgctgaaatacctggagttcagtcaagattgtgatgctccctg

SEQ ID NO: 109376 - DNA, 580 bp, Homo sapiens
gaattcaggaagagccttttggttccttaactgaacattttcaatgtatatttatgtgtaaaagacttctcaaaatataaatgcctagaagaggtcaccccataaaattggttgaatgattgaaagtttaaaatgcttgatgtcrattctttctgaattgattgtaaagaagataggcaaagtcttcattggataccccaaagagctcaagaagaaggaaatggaaggaatgcaaaagcaaaaaggcttaaacctggtggcctcactattggcccagcatgcttctgtcattatttgaaggactatggtaggtgtccttggatgcagcttagaaagccatgctcctcagaaagcctctgcttcaagctttttgtttttcttagtgaaaaatcaaacaataaacaatccactttttccaaagtaccatttctcttgtagcaagtttggcttccagtcaggagagctccttggacatagcccggtggccagagttgactcagcagactgccttgcttttccaaagctctgagctcttgggagagttcttggcatgacacagccatagatcacccaattacca

SEQ ID NO: 109377 - DNA, 402 bp, Homo sapiens
gataggagacggatcaaccctatgccttcatctgttctttatgaaacacatgcttataggtgcaacagaaacaggatagtccagggcaaaacaattatagccatctattcacaaaacacatacacatatgcacacacaggtgatacaacatcatattaagagacaaaccaaagaaaatgcaaagtaatcagtgaagaataagcycattattgggtaaaaaaaaaagtgaaatggtgcaccttctaatcaagagttctccaaattaaatcccaaatgtgttatataatacatatattgttggctacaagtcctaggataccaaagggaagtcaccactgggaacccaatatgatgatttataagtcaaattactattaaagggcaaatggaattttggcacca

SEQ ID NO: 109378 - DNA, 402 bp, Homo sapiens
gataggagacggatcaaccctatgccttcatctgttctttatgaaacacatgcttataggtgcaacagaaacaggatagtccagggcaaaacaattatagccatctattcacaaaacacatacacatatgcacacacaggtgatacaacatcatattaagagacaaaccaaagaaaatgcaaagtaatcagtgaagaataagctcattattgggtaaaaaaaaaagtgaaatggtgcaccttctaatcaagagttctccaaattaaatcccaaatrtgttatataatacatatattgttggctacaagtcctaggataccaaagggaagtcaccactgggaacccaatatgatgatttataagtcaaattactattaaagggcaaatggaattttggcacca

SEQ ID NO: 109379 - DNA, 565 bp, Homo sapiens
cctgtccagttctaggtggactttatataagtgttgcctaatgaaaccacagacattgtgtcagcacctgaattcaatgagattccttccaaaactgaaaatgtagaaggaatattaggtgatctttaagatcctttatcttttggacattcttgatccaaagctcaacactttggattatattatggaaaatgcttacaagatcctgacctctgtagtgctatytgatcatgaaagtttgtgacatacctgggaagtctgaataaacaacaacagaaaatttagagtaaggttttctgtatgcagggccaccacacctggtttatgcaagccattgactgctctatacttactgtcctggcataagcattaatagcagatcctttcgcttcaaaggctaaaagacttgaataaaaaatcatatgttcactctatttatactcccaaatctaaccacctccttagctcttgacatttttttaaaaccaataacacagttttgttttgttttaaaatggcaactaagtataggtactattttaatgaaggatttgtaaatgtacca

SEQ ID NO: 109380 - DNA, 565 bp, Homo sapiens
cctgtccagttctaggtggactttatataagtgttgcctaatgaaaccacagacattgtgtcagcacctgaattcaatgagattccttccaaaactgaaaatgtagaaggaatattaggtgatctttaagatcctttatcttttggacattcttgatccaaagctcaacactttggattatattatggaaaatgcttacaagatcctgacctctgtagtgctatctgatcatgaaagtttgtgacatacctgggaagtctgaataaacaacaacagaaaatttagagtaaggttttctgtatgcagggccaccacacctggtttatgcaagccattgaytgctctatacttactgtcctggcataagcattaatagcagatcctttcgcttcaaaggctaaaagacttgaataaaaaatcatatgttcactctatttatactcccaaatctaaccacctccttagctcttgacatttttttaaaaccaataacacagttttgttttgttttaaaatggcaactaagtataggtactattttaatgaaggatttgtaaatgtacca

SEQ ID NO: 109381 - DNA, 647 bp, Homo sapiens
attatattttctatttaataatttttcaatttttgattattacagttgtccctcagtatccatcagggattggttccagtaccccctcagataccaaaatccatggatgctcaagtcctacagtagccctgtggcacccgtgaatagaaaaagtcagccctatgtatttatgggtttcacatcccataaatactgtgttttccatccatgttgggtcgaatctataaatatggtatctgtagatcaggatggctgactatttgcacataacctatkcacaacctcccatatactttaactcatctctagattgtttatgtacctaatataatgtaaattctatgtaaattgttgttatacctcattgtcttaaaaagtctgtatatgttcagtacaaatcatccattttttattggtcaaatattctcaatccatgttagttgaatatgcagatgcagaacccatgaatatggggggctgactgtattataaataattctgtgccataacaataaggctccaacttcaatgaggggatttctggttaacattagtaggaacatctaaacgaatgggcttggcattattgacataaacaatgtaggcaactttgtagcagaatttgaaaaagtgacacacacacacat

SEQ ID NO: 109382 - DNA, 647 bp, Homo sapiens
attatattttctatttaataatttttcaatttttgattattacagttgtccctcagtatccatcagggattggttccagtaccccctcagataccaaaatccatggatgctcaagtcctacagtagccctgtggcacccgtgaatagaaaaagtcagccctatgtatttatgggtttcacatcccataaatactgtgttttccatccatgttgggtcgaatctataaatatggtatctgtagatcaggatggctgactatttgcacataacctattcacaacctcccatatactttaactcatctctagattgtttatgtacctaatataatgtaaattctatgtaaattgttgttatacctcattgtcttaaaaagtctgtatatgttcagtacaaatcatccattttttattggtcaaatattctcaatccatgttagttgaataygcagatgcagaacccatgaatatggggggctgactgtattataaataattctgtgccataacaataaggctccaacttcaatgaggggatttctggttaacattagtaggaacatctaaacgaatgggcttggcattattgacataaacaatgtaggcaactttgtagcagaatttgaaaaagtgacacacacacacat

SEQ ID NO: 109383 - DNA, 582 bp, Homo sapiens
acagtgaccttgagtataaaatgagcataaaaatttctatctccctcaaaggttttctataagaaacatatgaattaatggatacaaaagtgctctgtaaactttaaaatgctacacaaatgttattataattacatggggagcattaggtttcccaagcccactccatcctttttggccttagagtgcacctgcctctggaagagctgtgttaytttaacagaaagttaattaggttctttaccctccctctggatatctgcctgagttagaagtgcagctcagcacacaagctctatcatccatattaaaagtgggattttctgagttggcctgggcagctagttgaccaataagttccaatgtgtgttttcaataaagctgcttacccaggaagccttattaagtgagtaagtcaagctgacatgatttccgtgctgattaacatgaaacctaggctgctttcgcaatgcagttacattaattatttataggaggtaaatgaggttacaaggaaaacaagctccaattaccagaaacaaatcaaataatatatctttatttttaaaagctatgtactaa

SEQ ID NO: 109384 - DNA, 558 bp, Homo sapiens
cgatctttaattaccagacttaggtcaggcaggcccaggcctggttttgggtctggttccttggtttcaggtctggttcctaggagctgggctacctgcctttaatttcrcttctcattctttttcttagtataaaacaatatgagagggcctgtctctcttctctcatttcccccctttgagactctcactttttattagtgggagttctcactcttattttcactacttatatcttcctgtgcaatagattgataatgattcatatagtacacttccttcttagatgagtagccagtcatcttcagtctgtacccctcttgaatgtatcctgaaatcctgggactcccttaaaaagcaccttttttccttgctcctccattgtcactcttcactgataattctgtctccatactatgggatactcccctcagatgcatcctccaaactggaaagagttgatttcccaaaccctaaactggttggcttaggattgggctcaggggaagggaaccaaaaagcctgacatgcccacataagggtaaagtttttaccagt

SEQ ID NO: 109385 - DNA, 535 bp, Homo sapiens
tacatcctgattacccaactaattagcatcaatttgtttaaggcaagaactctgagttgtactttttgtttcagagtgaacacctagatgtgaaggaagctgttttgtacctgttttttgtacctataggcacagtaccacagtctacagtcctgattatttgtaagaactcaatatataaaaaagaaagtataagaaatcaatgggaaagcatgagattatacaagaaatgatgttatttacttacatggagaatactagtttagcagttttaagctatcacgtatcttaaaaataaatccagggccaggtgcagtgactcacgcctgtaaccccagcactttgggagkccaaggtggaaggatcacttgaggtcaggagtttgagaccagtctaggcaacatagccagaccccatcttaaaaaaaaaaaaatttaatttaaaaaattttaaaaactacatccatagtcccagttactcagaggctgagacaggaagatctctttagctcaggagtttgaggcttcagtgagac

SEQ ID NO: 109386 - DNA, 660 bp, Homo sapiens
ttcaatttaactcttttccagtgaaattgtctttggtctactataaagctttcctatggcatagggtggtggtcaggttaaagggggaacaactgtccttcttacaggtcgtgtaacatcttataatcatcaaataaatatggcagaaaaataaatatacatcgaccaaataaatctttttcttcacggtcataatggcaatgcttataatctataattacctacatacctaggcatagccccataaaggaatatatggtgttcctgtattttttcttggttctcaaagaacttatgtaattttatcccaatttttgtttttaaagtgcttgtttgaaaatggtattaatatgaataattgtcaacagttttctaaatctttttttgagagtgccctctgtcctttggctaaaatgcaaaaacagagcatgctttttctatttttacccctgctgtgacccctcacaaggtgaaacagctgcaaagagctcccaggaattatgtcaacacaacccctgggtagctcaggctgcttacgttctagtattaaattcagctcttcagtttaaawgacagtcagaggtagacatattcatcacacaaccaaatttctacgtgttaataatttctgtttattctccaagtgccttccacactgaa

SEQ ID NO: 109387 - DNA, 591 bp, Homo sapiens
gaactctctatttgaatcaaatggaaaaaacaaacaaaaaagtttgtattcatcctctttccatccatgggaatgcccctcagatgggcttagaagaagagaaattggaatgattgccctagttcttgatctttgcctccattctccattcccttaaaaggaccagatacctagggctagaatgggattagtgaattggatgaggaargaaaagaggcagaagtctattgttgccagccagcactgaaaaatgatctaaagtacccaaatccctcaacaacatatgctgatctgaagctggctactggctccatcaatactagtaaaacatttaaatgatcccttggtcttaattttctgtttttcttttgttcaatgttacattaaggtacacttttaaaagattttgtctgtataaaagataaacagtcaaagcacatggcagttttttctcaaagccccatacttactcatagataatataatctcttttccattgtcctcacagattctatagtaaccagaatatcactgcaggtgggctctttgatgtagacttgtagatgtctattaaattatcttaagtagtta

SEQ ID NO: 109388 - DNA, 591 bp, Homo sapiens
gaactctctatttgaatcaaatggaaaaaacaaacaaaaaagtttgtattcatcctctttccatccatgggaatgcccctcagatgggcttagaagaagagaaattggaatgattgccctagttcttgatctttgcctccattctccattcccttaaaaggaccagatacctagggctagaatgggattagtgaattggatgaggaaggaaaagaggcagaagtctattgtygccagccagcactgaaaaatgatctaaagtacccaaatccctcaacaacatatgctgatctgaagctggctactggctccatcaatactagtaaaacatttaaatgatcccttggtcttaattttctgtttttcttttgttcaatgttacattaaggtacacttttaaaagattttgtctgtataaaagataaacagtcaaagcacatggcagttttttctcaaagccccatacttactcatagataatataatctcttttccattgtcctcacagattctatagtaaccagaatatcactgcaggtgggctctttgatgtagacttgtagatgtctattaaattatcttaagtagtta

SEQ ID NO: 109389 - DNA, 591 bp, Homo sapiens
tactcaactgatttgaaaacatatttccacamaaaaacctgcacaagactgtttatcccatctttatccaaacagcgaaaaactagaagcaaacaagatgaccttcaataagtgaatggataaacaatctgtagtacatctataccatagactgttattgagcaataaaaagaaatgagctaataacttatgaaaatactgggataaatcttaaatgcatattgttaaataaaaagccagtctcaaaaggcaagatatttaaatattgtatgattccaatgctatgacatactggaaaaggcacaactgtacagacaataaaaggatccgtcattgttagggattcaggggaaggagaaaagagtccaatggatagagcacaagggatttttattttttagctcagtgaaactattttgtatgatagtgtaatgatgacgtgacgctatgagtttgtcaaaacacattgaactttacagaacaaatgaaactgaatatatgcaaatttttaaaaatcatttaggagatcagttgaatatagagaacaacttcactgaaggaagcgggaaaaaagttgacgcaagtaactgg

SEQ ID NO: 109390 - DNA, 591 bp, Homo sapiens
tactcaactgatttgaaaacatatttccacaaaaaaacctgcacaagactgtttatcccatctttatycaaacagcgaaaaactagaagcaaacaagatgaccttcaataagtgaatggataaacaatctgtagtacatctataccatagactgttattgagcaataaaaagaaatgagctaataacttatgaaaatactgggataaatcttaaatgcatattgttaaataaaaagccagtctcaaaaggcaagatatttaaatattgtatgattccaatgctatgacatactggaaaaggcacaactgtacagacaataaaaggatccgtcattgttagggattcaggggaaggagaaaagagtccaatggatagagcacaagggatttttattttttagctcagtgaaactattttgtatgatagtgtaatgatgacgtgacgctatgagtttgtcaaaacacattgaactttacagaacaaatgaaactgaatatatgcaaatttttaaaaatcatttaggagatcagttgaatatagagaacaacttcactgaaggaagcgggaaaaaagttgacgcaagtaactgg

SEQ ID NO: 109391 - DNA, 623 bp, Homo sapiens
ccaaaaccaagatggtgacacaagtgatctccggttgtcctcactgctcattatgtgctaattattagcatgctaaaagacattcccacctgcgccatgacagtttacaaatgccatggcagtgtctggaagttaccctatatggtaaaaaaaggggaggaacactcccctcagttccaggaattgcccaccctttcctggaaaactcatgaataatccaccccctgtttagcacataaccaagaagtaactataagtataatcaattgttacttgattagtctgttctcatgttgctaataaagacatacccaggactgggtaatttataaaggaaagaggtttaattgacccacagttcagcatggctggggaggcctcaggaaacttrcaatcattgcagatgggaaagcaaacatgtccttcttcacatggtggcagccagggcaagaatgagagcccagtgaagggggaagccccttataaaaccatcagatcttgtgagtacttactatcatgagaatagaataggggaaacggcctccatgatcaattacctcccaccaggtccctcccataacaagtggagattatgggaactacaagatgagatttgggtgggg

SEQ ID NO: 109392 - DNA, 502 bp, Homo sapiens
gaattcgacctagagtcttctatgtgaagcttggggatacagagatgtataaggtggcctctgcctttagcagcagcagatggataggtcgaggaggggagatctggacagtgtcagactgagataccatgtgggaggcacagggtgcccggggactgggagagtgtcgctccctaagcaggtaggcagagagggagagatggcatttgctctgggctttgagtggtgactgggctggatgaaggtggagccacaatggagaggaggmtgagagggctggaagcaaaggtgtggagatgggagcctgggaatggcctatggaaatagttggccagggtcttgggccaagagcaagagctggaaacatagcttgctcctgattgtggaggcttttgaatatttgcctgtggactttgtatttactaaccattaaaagttattgaaaagactgggcacggtggctcacacctgtaatcccagcactttgggaagccaaggtggg

SEQ ID NO: 109393 - DNA, 563 bp, Homo sapiens
ggtttttccgcgggcgggggtgtgtgtgtgtgaaagcggttgcccccgacaacgccggcagtccgctcacccgcattggcccggcccgggggtgggaggggaggcggggctcgcgcgcgagctttcgcctacgcggcgcgctggcaggctgcggctcctgcagtcggggagcgggcgggggcggaaccctgggcgtgctcggcgtgtccggggccactcagcgcacgctggcatccgccggggggmatggggggcggcggcggcggcgcagctgagctcgcggtgtccccgagcgccggcggccgggaggatggcctgggctgcgggtggggcgcgcgcccgacggctggggctcccctctgagcggctgcggctcctgcacctccccggggagccgccccgtcgatgccactaaggccaaggacatatagacggtctgccctcccccactcaaaccgggatcatgacggtccccaaggagatgcccgagaagtgggcccgggcccaggcgcctccctcttggagccgaaagaagccctcttgggggacaggtaacgggaggc

SEQ ID NO: 109394 - DNA, 509 bp, Homo sapiens
acaggactctagtgtaagctggaaaaggaaagaaaagctattttggtgyttggacacacaaaagaaagctgtgtcgaggcaaaggagagttagtctctggcatctccatgttggcactgaaaaatagttttttccatcaggtcctgtagtagtgtctcatatacctactacaaaccaaagtcagaggtcttgccaagtgctgagtatgcttcaaccaattctatgtgtatctgggtccaaaatcagtcttgacgtttgtagcacaactcaataagtcattgtatttatatgccccgccaagcaatggattaaaagaagcccagattttttgcccaggtagactaagaacaactgattttacttataaaatgtttgagcacaatacagagaataggagtgggcggagagaagaaaaagcaaatgagagctgagttttattgtatttgaaggatgttactacagtgctctgtacagggatgttctaagtaggtggtcagatcagatgtccc

SEQ ID NO: 109395 - DNA, 509 bp, Homo sapiens
acaggactctagtgtaagctggaaaaggaaagaaaagctattttggtgcttggacacacaaaagaaagctgtgtcgaggcaaaggagagttagtctctggcatctccatgttggcactgaaaaatagttttttccatcaggtcctgtagtagtgtctcatatacctactacaaaccaaagtcagaggtcttgccaagtgctgagtatgcttcaaccaattctatgtgtatctgggtccaaaatcagtcttgacgtttgtagmacaactcaataagtcattgtatttatatgccccgccaagcaatggattaaaagaagcccagattttttgcccaggtagactaagaacaactgattttacttataaaatgtttgagcacaatacagagaataggagtgggcggagagaagaaaaagcaaatgagagctgagttttattgtatttgaaggatgttactacagtgctctgtacagggatgttctaagtaggtggtcagatcagatgtccc

SEQ ID NO: 109396 - DNA, 619 bp, Homo sapiens
gcccccattttctaaaatttgtatatgaaatctgcatgaatataatgaaaagcaaatattatagataatggattatgtgatagaagatgtctgcaacacctttattgattaaatacataacacactgggatactacccccaaataaagtaaccagagctccgtggtaaaatagcytatttcaaatctgaactatgaaattcacaagatggcccttgaacatcttgttatgacaaaaggcaagcaatttatagataatatccaaaaaattagggttccaacttgaagagatgcccactgaccaaaggtggggcaagtgaagcatcaataagaacagcaactcttttatcaataaagatattcaaaacacaaacagaaccccaatggtctcccaaggaagatgcaggaaagccaaatcattattcctaaaactggtaaataaagggaaaatatttgtgcacatatctgcttttcctatgtaaactgcactttggggtaaacaaataggctatgaagggaaggttctctacgcgaaattaatccaggtaataaatgatgaaacaatgatagagttagagtacattcgttttgaagctcctaaagaattaatgaatctaggca

SEQ ID NO: 109397 - DNA, 618 bp, Homo sapiens
cattcaactcaaattctgcttgacaagcctcagacagctttgttctgtcacagatatcattggaaggaaatgctccattaatcatccttaattaactttaccatagtctgctgaaaccaatatgctctctggctaaactttggrcttagccaggattctatagttatcaaatggaagagagctttttatgtttcttctctcctatcgttatgaactatagggatccagcatgaatagagttcacaggaagtcatgcccattgattatatgagatagcttatcagcgtgtgcattcttttctaaaggaaacataattttaaatatggctgacctgcatgagatggcattttatatctatatctcacttgatgctcagacattctatatttcctccccaattctcagctatcatatgtcctgagataatcattttctaagaggaaagaaaaattttaaaacaacaacaatagtaaagacttagtttgaaaagtaaagttgctagaggcacaaaatggtttgtgattaattcataaacacacacacatacacgtctcacattgtaaaatacttcacaattttcataaagctttaacatgaggcatgtgttttattttcata

SEQ ID NO: 109398 - DNA, 610 bp, Homo sapiens
atttcttctcttgccacagattctttttccttcgcataccttacccactgttcatttcttttttgctgattcaagttgaaatttacttcctgaccactcttccccataaaatttttagttcaagtatctatttgccaattactgtactaggcagtggggacagaataccacacataacaggccggtgcagtggaggaggtagacattaaacagtgaatcccaatacaatatgataaaagatcaagcagcattttagtgtgctacggtaacaaataattgggacataatttaatttgggaagagcagtcaggaaaatccttcctgtgraaaaaaaaattaaatagggacccaagagacagaataagagttttttagatgaagaagatggaataagtgtggtctatataacagtccacatggagttattcatttgtttactgaacatttattgacagccactcatgtgtccccaatgtcacctctactggccatttatttgtcaatttaaaactgatatttcagaacatgtggagcatacttattaaaccccaaagaatatatttgaagtagaaattaattttggaagcaatgaagagcaaaataaagactt

SEQ ID NO: 109399 - DNA, 572 bp, Homo sapiens
tactcacaagcctggtctgagtctgtgattcagccaagctctgcacaattgtcccacagctcccaatagtttatcatcattgttttgtataattggaaacagaattatttatatgcccctgcctactctgcaagcaaatttacaaggsaactgtgtctcttaatctatagtagacctaatgtaaacagtaatgcaaaagagtattcagatttattgtaggacttaattaaagatcaatatttaaaatgaatacatattgtgctaatttaaacatgcaacatcatcacagtagctagtttacacaatgccatgttacaatgtgcctacagacatggatttatacatctatcaccgtactttcctaatgaggatatcttattatcagatggaaagaaaaaaagagttacaagttcaatgttaattcgccttatttataaacactcatctaaatctgtaacctcaacagacaatatattaagctaccaaatgaggaattaaagttacattgagtgtgacccaaataggaaaataaagctgaccgcatcctctgcagtacaagatgtacagttcag

SEQ ID NO: 109400 - DNA, 537 bp, Homo sapiens
gatgctaataataattgaaaatgttcaccccaaaaaggaaatttctacttctctttaaaaatggaaagacttggtaacacttaacttgcatcttcccttagaaacaacttgctggggctgagtagcgcagccccctttagaacagaagtgagtcccctgcttgccaatgtccactcttcctgtttcacactttcatgtcaccatcctggttcctgatgtagtcatgtttgtgaatctcatccagagaatatcttgtccaggaatccaagcctgtctgtggcaggactgggatgaaagtaaggtcaaatcttacacattttcctcactgcactatcagcacattatactctcyttggctaattcctttttgcaggaaaaatgatcctagtgaaaaataagttgaaagatctaataatcacagtcattggcaattatgacttcagtgactcttctgagatctaatggaactcttgatcatcccaaaaggtatagtgttttaatgcttgcaaaaaatgtttgcatcaaaatatgggctct

SEQ ID NO: 109401 - DNA, 615 bp, Homo sapiens
gatttagccctacccaaacaatttgaaatatgcaaaacataaatagtatttgttgttatcattataaaggggaaatataatattattaatagaagtatcaataatgaaatatgcgaaaaacaacagaacagccacgctagggttaaatgttgaaaagccaccatccttgccacaagatagaagaaaaattcaaaccagagacattagctttaaaaaagccaaagctttgaataaagaaatttaaaaacattatcttcatattatatttgacaagctggatttagacatagtcaacacattaaaaaggtggcttagtgcttttcaattgtttactagtgtgctagcaaagtactttactktgggtggtagaaaattaattagttttaaataatcatttttatagaactaataatttttttaaaaaattcatcagattcaaacaatttctacaacctatcactcagacttttagaccctagtggagaacaaaactgagaggtcttaggagagaatgtttctaatgccctctccaagtaaaaatatgctctgttatagaaatagtattggatttccacacttccctacataatcctcaaattctacgcagtacagagc

SEQ ID NO: 109402 - DNA, 615 bp, Homo sapiens
gatttagccctacccaaacaatttgaaatatgcaaaacataaatagtatttgttgttatcattataaaggggaaatataatattattaatagaagtatcaataatgaaatatgcgaaaaacaacagaacagccacgctagggttaaatgttgaaaagccaccatccttgccacaagatagaagaaaaattcaaaccagagacattagctttaaaaaagccaaagctttgaataaagaaatttaaaaacattatcttcatattatatttgacaagctggatttagacatagtcaacacattaaaaaggtggcttagtgcttttcaattgtttactagtgtgctagcaaagtactttactgtgggtggtagaaaattaattagttttaaataatcatttttatagaactaataatttttttaaaaaattcatcagattcaaacaatttctacaacctatcactcagacttttagaccctagtggagaacaaaactgagaggtcttaggagagaatgtttctaatgccctctccaagtaaaaatatgctctgttatagaaatagtattggatttccacacttccctacataawcctcaaattctacgcagtacagagc

SEQ ID NO: 109403 - DNA, 510 bp, Homo sapiens
gacccctcaccaggcagcaagggatcaggatgtggtgacagacacctggaagaagtactggcccaggcagagcacaggtcacactgctggaagtccatggacgggggaggtaaggggagaaagaggctggaggggccttgatggacaaagtgagacattagaccttgtccaccgaaaggttcagacagagacatgatgggatgtgagctacagtttgaagacatcacactggctgctgagtraaagatgatgtggcaagtgagtctcctatatacagccaaaggcaatgtgcctttttattattactaaaggcaaatgccttgacttcctctgttttataattcaggatttccggaaagcaggacacatctgcaagtaggatatttagattagcaacacagcaatttaacccacaaggtttctatgtgcagctctcccaccctctcctatccatgctgtgcttggccctgaggtgggcttagggttggggaggacttcgttcctagactc

SEQ ID NO: 109404 - DNA, 592 bp, Homo sapiens
ccctcctttgccctggtccccgagctggacccccactcccacctccgagttaccctgccaggtctcggcgtccccggcgggccctgagcrctccctggtctggggtatgcccagcgcacgggggcgcactgggcgcagcgcaggtgggcagtgccaccgccagcctcgactagccgtcgctcctgctggggaccctgactctgttccccgggtagccccttgagcgaaaattcccggagccacttccggggagggaggtgccacctgtcctgggacgcgcccctttcgctcaactttcttctccagccccgcggggcacccgcaggtcagcgtcgcgtcgggcgctgctggtggcggctcacagggccgcgggtcacttcgcggcgggggagccgggctcagggcgctccgggcggcgggcgccgtcccagcctgcatgaggcccttgtcccggcggctgcatcttgtaaaccgagcagccagaaaatcccgagataggacaccagagtggaggacgccaaggggttaaggtcagcgtgggtgcctcgcagccagagacgggtgagcgttttctgaggctggaagctgattg

SEQ ID NO: 109405 - DNA, 605 bp, Homo sapiens
ccagctgctgaggaggatctcttgagcccaggaggttgaggatgcagtgattgcaccactgcactccagccctgggaactcgagcaaagctctgtctacccctcccccgcccccaacccccactcaaaaaaaaaaaaaaaaaaaacttagctgatctaaaagcaatatttaacttgcttttaggattctctccttctcatttatccatgaaaaacctctgcaaatgccccaggatttatcaaccagatgtctcaagagcttgaaatatgcttttgcacttgggaaagccattttgagtgagaataaggctaaactagacccctgcctctaggtgtttacaattagttttggaaaacaaasctaaaagacacgaaactacagtagataaggttacactgcctagaatgaatgggctaagttatgccactgagctctatgtgtaataagatttcagacaaggggtaattgaacagaggaaggctagccagagaagtgtcttcagaggaggcatgtcaagctttggggttgtggaggggaaggaagtttatttcaagcaaacacagacccaggagcttgtgctaccaactgtaccacccagtgcccaa

SEQ ID NO: 109406 - DNA, 555 bp, Homo sapiens
ggaattcctcaagtgcacagcttctcagcacatgcatcacagatgctctataaggctgtccttagctcaacgcccaaataatacttcagctgctctagagccctcagaaaccaccttagcaatggtatcccaggctagcccrtggtgcacttctattttccttacacctcaggataggtagaatgatagccccttaaacgtgtccacattctagttcccagaacctgtgagtatgctattttacagagcaaaagggactatggagatgtaattaagttcaagtatcctgagatggggagagtattctgggttatccaagtgggcccaataaccacaagggtctttacaagaggaagacagaagggtcagaatcaaagacatgtgacaatgcaatgaggagagagagaaagagagatcgattttaagtactggttttgtggatggaggaaggaggagctaaggagccacagaaagcaggcggcctctggagactgaaaaaggcaaggaatgaatcctcccctacagcctccagaaggagccagcgcagccaacact

SEQ ID NO: 109407 - DNA, 563 bp, Homo sapiens
gctggtctcctggtcacggagctatatgcccaagttaataactagcacaatgccccaggcactgcaggggcttggggttgggtggatggctgaggttggggagagaagggagggctgctcaagaaagatggacatgggccagaagagttcccaattaactaggcaaaacaggctggaagaaagctttgcactgcttataaaaacgtctctctaaaaaatgtatcaaccaggactgagtaattttttaaccaagaattctgtaacagacacaagagcatctgtaacatggacaacatggccatasgataggcagaccagatgtgggcttaggagccatgagctgcaagtgaatgaaaatgcatccaattcagaatcaaataaacatgtctgggcccacagccaaggataattcttggattggacttttatcaggaacctaaattttaaccagctggaacttctcttttccaagtaccaccctattccttcctaccttttgtgatgaagtatttgccttaaatgggaaacttgcatttcattgtaaagatgatgccagcatcctg

SEQ ID NO: 109408 - DNA, 593 bp, Homo sapiens
aagatggcaaaaccctgtctttacaataaattacaataaatttacaataaattagctgggtgagggggattatgcctgtagtcccagctacgagggggatcgattgagcctgggaggtcaagggaggtcaaggcagttgcatcactgcactccagcctaggcaacagattgagaccctgtctcaaaaaaacaaagaaacaaaaaaacaaacagaaaaccacttcggaataaacagaggccaaggcagcattttgccccrtcctctgtttgagtattagttggtgagggctaccataacaaagtagtataaactggttggcttatgtaacagaaatttattctgttgcagttctgaaggccagcaggcttagatcaaggtgttggcagggttggttccctctgaggcctgggggaagaatctgttgcatgcctctctcctcgctcccggtggtttgctggcaagatctggtgttcactggcttgcagacaccttcctttggtctctgccttcctcttcatgtggtgtcctgtgtgtgtgagtctgtctccaaatttcccctttttataaggatatcagtgatattaggttagag

SEQ ID NO: 109409 - DNA, 593 bp, Homo sapiens
aagatggcaaaaccctgtctttacaataaattacaataaatttacaataaattagctgggtgagggggattatgcctgtagtcccagctacgagggggatcgattgagcctgggaggtcaagggaggtcaaggcagttgcatcactgcactccagcctaggcaacagattgagaccctgtctcaaaaaaacaaagaaacaaaaaaacaaacagaaaaccacttcggaataaacagaggccaaggcagcattttgccccatcctctgtttgagtattagttggtgagggctaccataacaaagtagtataaactggttggcttatgtaacagaaatttattctgttgcagttctgaaggccagcaggcttagatcaaggtgttggcagggttggttccctctgaggcctgggggaagaatctgttgcatgcctctctcytcgctcccggtggtttgctggcaagatctggtgttcactggcttgcagacaccttcctttggtctctgccttcctcttcatgtggtgtcctgtgtgtgtgagtctgtctccaaatttcccctttttataaggatatcagtgatattaggttagag

SEQ ID NO: 109410 - DNA, 593 bp, Homo sapiens
aagatggcaaaaccctgtctttacaataaattacaataaatttacaataaattagctgggtgagggggattatgcctgtagtcccagctacgagggggatcgattgagcctgggaggtcaagggaggtcaaggcagttgcatcactgcactccagcctaggcaacagattgagaccctgtctcaaaaaaacaaagaaacaaaaaaacaaacagaaaaccacttcggaataaacagaggccaaggcagcattttgccccatcctctgtttgagtattagttggtgagggctaccataacaaagtagtataaactggttggcttatgtaacagaaatttattctgttgcagttctgaaggccagcaggcttagatcaaggtgttggcagggttggttccctctgaggcctgggggaagaatctgttgcatgcctctctcctcgctcccggtggtttgctggcaagatctggtgttcactggcttgcagacaccttcctttggtctctgccttcctcttcaygtggtgtcctgtgtgtgtgagtctgtctccaaatttcccctttttataaggatatcagtgatattaggttagag

SEQ ID NO: 109411 - DNA, 588 bp, Homo sapiens
tgagaaagcctaaggcacaaaatcctagactctaaaaactgtttcacccagtaggtaggggtacagtggtaggcaggaaggttcatgtacaaattgccaaaggttatttcactttataaaaatggttcatcacaggtttccttaaatcatcatcttcccagagaggtcacgagactgaccagtcttccattccctcccaacaggcaagagcaaggccttacatcattgagacatacatacatttcatgaggctgaatgggatttatgctgtctttgtgaagtgtgcactattttatgaggtcttctttctattaagtattccgtatcttaaagctataatcktctaaaaattctccttatggaaagataaggataaagattactaaaacattcattggataaaaacatgttctatcccaatgttaaactataaatcaaattaagaggatattgcctcaccagacactaaatttctaaaatatgataattctctgtagccttatatgatttgaatcatttaatctattaactcatttatgccttgactctatccgaaatatcttggaaaaggctgaaaaaatacatgca

SEQ ID NO: 109412 - DNA, 418 bp, Homo sapiens
aagaattcagtaactcagtggctgcagttctgtcctggtagccaacaatgttgaaaatatttcaaagtctcaccttttacagaaaagagctggtgaacccctgatctastaccatgtcttaagaaatacatgaagactaatgcatttaatcctccctcacaacttggcaagcacatattgctattttcgcagtcttgcagataagaaaatgaaagatacaaggagttaacttgcacaaggtcaaagagcttacaaatagtagagacagcaatcaaatccagccctttactccatagctggttatctttataccacagaacatgacaatcacctgcactcaacagcccaatctattttcctactaccaaacttctttatcaaatatgtgtgtttattctttccaaaagagatctaatgt

SEQ ID NO: 109413 - DNA, 421 bp, Homo sapiens
ttctgtcctggtagccaacaatgttgaaaatatttcaaagtctcaccttttacagaaaagagctggtgaacccctgatctagtaccatgtcttaagaaatacatgaagactaatgcatttaatcctccctcacaacttggcaagcacatattgctattttcscagtcttgcagataagaaaatgaaagatacaaggagttaacttgcacaaggtcaaagagcttacaaatagtagagacagcaatcaaatccagccctttactccatagctggttatctttataccacagaacatgacaatcacctgcactcaacagcccaatctattttcctactaccaaacttctttatcaaatatgtgtgtttattctttccaaaagagatctaatgtgcttgcaaaaccatcagtctgtaggaattc

SEQ ID NO: 109414 - DNA, 567 bp, Homo sapiens
atgaaaacactaactgatttagacaataaatctgaagtcactagatgcttttagcagggattgtttcatgtagagaattaaaggttgactcagcaaaggaaagactgagccggcaaagtcagaaaggctgctataaatcttgcaaaattatgttggcacccaagtgcctgatgcccacgaggaagtcaggaamctggcaccgcttcgtgctcaccatccaccaaggcccacatgcgtttctgcacctgccactggagaccaatgccttccctgctttttaccttttaaacctcatgcacctgacgttcacttggagacaaaaattaggactctactagcaaggcagcctagatcatccttagatagagttttagaagcacagaggtaacattaaggcttaataaacaatcaggtacaatctccactggaattttttttttttttttttttgaggcggagcttcactcttttgcccaggctggcgtgccatgtcttggtctcagttcattgcaacctctgcctcccaggttcaagtgatactcctgcctcagcctccctagtagctga

SEQ ID NO: 109415 - DNA, 549 bp, Homo sapiens
gggcagtcaaatcttaaggctcaaaaatgacctttgactccctatctcacatccaggtcacgctgacrcaagaggtaggttcccatagtcaggaagttctgcccctgtggcttggcagggtatagcttccctcctggctgctttcatgggctggcgttgagtgtctgcagcttttccaggcaaacagtgcaggttgttggtggatctaccattctggggcctggaggatggtggtcctcttctcacaactccactaggcaatgtcccagtagagaatctgtgtggggactctgaccccacatttcccttctgcactgtcctagcagaggttctccatgagtgccccgcccctacagcaaacttcttcctgtacattcaggcatttccatacatcctctgaaatctaggcagaggttcccaaaccccatttcttgacttctgtgcactcacaggctcaactccatgtggaagctgccaatgcttggggcttgcaccctctgaagccacagctcaagctctacattagcccctgtcagccacagctggagc

SEQ ID NO: 109416 - DNA, 611 bp, Homo sapiens
ttagacattgcaaaagaaaatataactgaattttcatgcataacaacataaaatacccaaaatggaacattgagagaaaaagaatccctccccctacccacccaaaatggaaagaaggttagtgaggtgtggaacaacttaaagcagcttagtatgaggagaggaaaagtaaatatktgaagaaataatggccaaatgctcttccaacttaatgaaaacaagaaacccaccaatccaggaagcacaaccaactcctacattctacatgatcatatttcatctttatacagcacagtgggaggcactgtagacaatcaatcaactgatgagttaaattacactgttgcacatgaaaatatacagcaatgttggtttatagaggttcattttagataaactaccttttattattttttaaattcgctcttatttataaaagttgtccatgatttaacaccaaatatcacaataaacagctgctcgggtgagaaaatgtttatgttgataagaaaattcaccacggaataactggttgcaaaatccctgaagagcttatggctttctttggtggtggaaatgcatacatgatgtggattccagcagaagacaac

SEQ ID NO: 109417 - DNA, 611 bp, Homo sapiens
ttagacattgcaaaagaaaatataactgaattttcatgcataacaacataaaatacccaaaatggaacattgagagaaaaagaatccctccccctacccacccaaaatggaaagaaggttagtgaggtgtggaacaacttaaagcagcttagtatgaggagaggaaaagtaaatatttgaagaaataatggccaaatgctcttccaacttaatgaaaacaagaaacccaccaatccaggaagcacaaccaactcctacattctacatgatcatatttcatctttatmcagcacagtgggaggcactgtagacaatcaatcaactgatgagttaaattacactgttgcacatgaaaatatacagcaatgttggtttatagaggttcattttagataaactaccttttattattttttaaattcgctcttatttataaaagttgtccatgatttaacaccaaatatcacaataaacagctgctcgggtgagaaaatgtttatgttgataagaaaattcaccacggaataactggttgcaaaatccctgaagagcttatggctttctttggtggtggaaatgcatacatgatgtggattccagcagaagacaac

SEQ ID NO: 109418 - DNA, 506 bp, Homo sapiens
atatcagtccctttaggggtgagaccatttctcaaaagactcctggtggtaaaaaaaaaaaaaaaaaaaaaaaaaaaaaaagtcctagtccttttagaaaatgcatctttcctgatggtttagtaatttctatccctccaacaccacggccaggctccggtcctccatcstgccgtaggatcattggctttccctgcagggaaatatcctgtggctcttattccacttgtaacttgatagtgttcttctcctctgactctgttaccactctattttagcaggtattaaagtacacactgtagatttttttttgttgtaaattcaaccaagctttcattttctttgcaagcaaattctgcagcaactgggcaaagccaacactagcacaagtaacttaaaatccgtttaagaggggccactccaatgcctgatgaagtgagcaaggtgaatgatatggttaggctttgtgtccccacccaaatctcagcttgaattgtagatcccat

SEQ ID NO: 109419 - DNA, 506 bp, Homo sapiens
atatcagtccctttaggggtgagaccatttctcaaaagactcctggtggtaaaaaaaaaaaaaaaaaaaaaaaaaaaaaaagtcctagtccttttagaaaatgcatctttcctgatggtttagtaatttctatccctccaacaccacggccaggctccggtcctccatcgtgccgtaggatcattggctttccctgcagggaaatatcctgtggctcttattccacttgtaacttgatagtrttcttctcctctgactctgttaccactctattttagcaggtattaaagtacacactgtagatttttttttgttgtaaattcaaccaagctttcattttctttgcaagcaaattctgcagcaactgggcaaagccaacactagcacaagtaacttaaaatccgtttaagaggggccactccaatgcctgatgaagtgagcaaggtgaatgatatggttaggctttgtgtccccacccaaatctcagcttgaattgtagatcccat

SEQ ID NO: 109420 - DNA, 506 bp, Homo sapiens
atatcagtccctttaggggtgagaccatttctcaaaagactcctggtggtaaaaaaaaaaaaaaaaaaaaaaaaaaaaaaagtcctagtccttttagaaaatgcatctttcctgatggtttagtaatttctatccctccaacaccacggccaggctccggtcctccatcgtgccgtaggatcattggctttccctgcagggaaatatcctgtggctcttattccacttgtaacttgatagtgttcttctcctctgactctgttaccactctattttagcaggtattaaagtacacactgtagatttttttttgttgtaaattcaaccaagctttcattttctttgcaagcaaattctgcakcaactgggcaaagccaacactagcacaagtaacttaaaatccgtttaagaggggccactccaatgcctgatgaagtgagcaaggtgaatgatatggttaggctttgtgtccccacccaaatctcagcttgaattgtagatcccat

SEQ ID NO: 109421 - DNA, 506 bp, Homo sapiens
atatcagtccctttaggggtgagaccatttctcaaaagactcctggtggtaaaaaaaaaaaaaaaaaaaaaaaaaaaaaaagtcctagtccttttagaaaatgcatctttcctgatggtttagtaatttctatccctccaacaccacggccaggctccggtcctccatcgtgccgtaggatcattggctttccctgcagggaaatatcctgtggctcttattccacttgtaacttgatagtgttcttctcctctgactctgttaccactctattttagcaggtattaaagtacacactgtagatttttttttgttgtaaattcaaccaagctttcattttctttgcaagcaaattctgcagcaactgggcaaagccaacactagcacaagtaacttaaaatccgtttaagaggggccactccaatgcctgatkaagtgagcaaggtgaatgatatggttaggctttgtgtccccacccaaatctcagcttgaattgtagatcccat

SEQ ID NO: 109422 - DNA, 589 bp, Homo sapiens
ctgtgatccaggccagacctctcagagcaatgtttgaggatgaggtaatcataaagcaatccaaaattgagtacacttcccagcctgttccatggagcttgttccatttataggccatcagtccctcatatctctgtcatggtgtacacagctctggctgcctgggttgccacttttcatcttcatccctgcgtaataatctgtgttgactacaggcacatgtgttgcgtttacctgctcagcgtccatcctcccctccaccccaaccctgtctgatgtactaacttcctggggctstcaatcaaaatgcccaatgctctcttggctgaggggtagggagaaatctgggccatgcacatgctctcctcagaaatgtaaatcttgagtcggaaaggctgaaaacagttggagctgctttacccatttgttgctgtggcaacaaatacatcttagctcctattcagttgctgtttcccaaagccagctttttctctttacctttgatgctgtgatcaatattatttttctttcaataggattctattctgggctaagataaccaaatttgtttcaaagaaaaattgcacac

SEQ ID NO: 109423 - DNA, 593 bp, Homo sapiens
cacatttcgctctgttctaactgaggtcatttctagaattttgagaaatttctagaaaatacatagggttatctgtcattctggtttgaaaaagtagaggaaaggaaagtctgaactcwttctatctcacaatgtagttcagtggaaaatgcattatttcagaggctgggtccccttgcccttctctgggtgcctggagagagctcacaataacatacgcaatttctattgcatctcctgccaaagaggaacaactctaggcaagactgtggttgtctctatttaaatttttactaaaatatttattcaaatttaatttaaatgcaaatgagtccctttccacttggcttctggatatccatgaaggcagcatattgttagtaggacctggaatttctgtttggacaatgaataattccagacttaaacaggatctgcccagagatttctcttctcacaggcctgatccatctgaccactttctcagaacacaatgatgcggcatctaatgcaccattttcttcgtgacagctcagtactccatgtcaaaccaccaaatctaacatgtgtctttctcatttaacccctgattg

SEQ ID NO: 109424 - DNA, 593 bp, Homo sapiens
cacatttcgctctgttctaactgaggtcatttctagaattttgagaaatttctagaaaatacatagggttatctgtcattctggtttgaaaaagtagaggaaaggaaagtctgaactctttctatctcacaatgtagttcagtggaaaatgcattatttcagaggctgggtccccttgcccttctctgggtgcctggagagagctcacaataacatamgcaatttctattgcatctcctgccaaagaggaacaactctaggcaagactgtggttgtctctatttaaatttttactaaaatatttattcaaatttaatttaaatgcaaatgagtccctttccacttggcttctggatatccatgaaggcagcatattgttagtaggacctggaatttctgtttggacaatgaataattccagacttaaacaggatctgcccagagatttctcttctcacaggcctgatccatctgaccactttctcagaacacaatgatgcggcatctaatgcaccattttcttcgtgacagctcagtactccatgtcaaaccaccaaatctaacatgtgtctttctcatttaacccctgattg

SEQ ID NO: 109425 - DNA, 510 bp, Homo sapiens
ccctttccacttggcttctggatatccatgaaggcagcatattgttagyaggacctggaatttctgtttggacaatgaataattccagacttaaacaggatctgcccagagatttctcttctcacaggcctgatccatctgaccactttctcagaacacaatgatgcggcatctaatgcaccattttcttcgtgacagctcagtactccatgtcaaaccaccaaatctaacatgtgtctttctcatttaacccctgattgtgtcctgtggactccatacgtggtgcttctggacacacaagggaaaggcatgcttccatagttatctatttcagttaggtctttccaaatattggttacattttctgttcttcaagcgataaaacaataatataataaatagtagcagattcgtagaagcaggctttctgagccagcagtaaggagggtgtagtggcatgcttagatgagcctttgtgtggctgttgaccagtggaagttgtcaatcgtg

SEQ ID NO: 109426 - DNA, 593 bp, Homo sapiens
cacatttcgctctgttctaactgaggtcatttctagaattttgagaaatttctagaaaatacatagggttatctgtcattctggtttgaaaaagtagaggaaaggaaagtctgaactctttctatctcacaatgtagttcagtggaaaatgcattatttcagaggctgggtccccttgcccttctctgggtgcctggagagagctcacaataacatacgcaatttctattgcatctcctgccaaagaggaacaactctaggcaagactgtggttgtctctatttaaatttttactaaaatatttattcaaatttaatttaaatgcaaatgagtccctttccacttggcttctggatatccatgaaggcagcatattgttagtaggacctggaatttctgkttggacaatgaataattccagacttaaacaggatctgcccagagatttctcttctcacaggcctgatccatctgaccactttctcagaacacaatgatgcggcatctaatgcaccattttcttcgtgacagctcagtactccatgtcaaaccaccaaatctaacatgtgtctttctcatttaacccctgattg

SEQ ID NO: 109427 - DNA, 565 bp, Homo sapiens
ccctttccacttggcttctggatatccatgaaggcagcatattgttagtaggacctggaatttctgtttggacaatgaataattccagacttaaacaggatctgcccagagatttctcttctcacaggcctgatccatctgaccactttctcagaacacaatgatgcggcatctaatgcaccattwtcttcgtgacagctcagtactccatgtcaaaccaccaaatctaacatgtgtctttctcatttaacccctgattgtgtcctgtggactccatacgtggtgcttctggacacacaagggaaaggcatgcttccatagttatctatttcagttaggtctttccaaatattggttacattttctgttcttcaagcgataaaacaataatataataaatagtagcagattcgtagaagcaggctttctgagccagcagtaaggagggtgtagtggcatgcttagatgagcctttgtgtggctgttgaccagtggaagttgtcaatcgtgtgtaataaattgcacctcttctcagtaacccccatgctcagttcccatcccaaca

SEQ ID NO: 109428 - DNA, 565 bp, Homo sapiens
ccctttccacttggcttctggatatccatgaaggcagcatattgttagtaggacctggaatttctgtttggacaatgaataattccagacttaaacaggatctgcccagagatttctcttctcacaggcctgatccatctgaccactttctcagaacacaatgatgcggcatctaatgcaccattttcttcgtgacagctcagtactccatgtcaaaccaccaaatctaacatgtgtctttctcatttaacccctgattgtgtcctgtggactccatacgtggtgcttctggacacacaagggaaaggcatgcttccatagttatctatttcagttaggtctttccaaatattggttacattttctgttcttcaagcgataaaacaataatataataaatagtagcagattcgtagaagcaggctttctgagccagcagtaaggagggygtagtggcatgcttagatgagcctttgtgtggctgttgaccagtggaagttgtcaatcgtgtgtaataaattgcacctcttctcagtaacccccatgctcagttcccatcccaaca

SEQ ID NO: 109429 - DNA, 565 bp, Homo sapiens
ccctttccacttggcttctggatatccatgaaggcagcatattgttagtaggacctggaatttctgtttggacaatgaataattccagacttaaacaggatctgcccagagatttctcttctcacaggcctgatccatctgaccactttctcagaacacaatgatgcggcatctaatgcaccattttcttcgtgacagctcagtactccatgtcaaaccaccaaatctaacatgtgtctttctcatttaacccctgattgtgtcctgtggactccatacgtggtgcttctggacacacaagggaaaggcatgcttccatagttatctatttcagttaggtctttccaaatattggttacattttctgttcttcaagcgataaaacaataatataataaatagtagcagattcgtagaagcaggctttctgagccagcagtaaggagggtgtagtggcawgcttagatgagcctttgtgtggctgttgaccagtggaagttgtcaatcgtgtgtaataaattgcacctcttctcagtaacccccatgctcagttcccatcccaaca

SEQ ID NO: 109430 - DNA, 565 bp, Homo sapiens
ccctttccacttggcttctggatatccatgaaggcagcatattgttagtaggacctggaatttctgtttggacaatgaataattccagacttaaacaggatctgcccagagatttctcttctcacaggcctgatccatctgaccactttctcagaacacaatgatgcggcatctaatgcaccattttcttcgtgacagctcagtactccatgtcaaaccaccaaatctaacatgtgtctttctcatttaacccctgattgtgtcctgtggactccatacgtggtgcttctggacacacaagggaaaggcatgcttccatagttatctatttcagttaggtctttccaaatattggttacattttctgttcttcaagcgataaaacaataatataataaatagtagcagattcgtagaagcaggctttctgagccagcagtaaggagggtgtagtggcatgcttagatgagcctttgtgtggctgttgaccagtggaagttgtcartcgtgtgtaataaattgcacctcttctcagtaacccccatgctcagttcccatcccaaca

SEQ ID NO: 109431 - DNA, 586 bp, Homo sapiens
tgctttaagactttagaagctttgagaggtgaggaagaaagattcttggaggtatattatctttgaaaaatcaattgtgctgttacctctattccctccaaagggagagaaagtgcccatcttcttatcccaaaccccccaaaggaagaggatccgacagggcgggctatttgtaggcattaagatgcaacccctatgactgggggagatggtggcctgagtatgattttccagggcagtgaaagggagatgtgcctataaaagcttagctctggggagcarccctgggctttcagattttcccaagaccagagacacaggtatgttttatctctaagcaaggcaagtgatacaatctacaaagacattggcacaaaagttgaaggcattttaatttttagcatcaaagaataaaataaaacaaagcgaagagcacatgaaaagaatagtcaccttttctttggaaatgaagctgatgagaatatcagaaggaacatgcattgctcagtaagttgttttcctgcaaaggttcctaatcatctcaacaaatcatagttctattaatttgaaattgatgtaaagttgg

SEQ ID NO: 109432 - DNA, 647 bp, Homo sapiens
gtctaggaatacgtgtgtgtgtgttcactttttcttataaatgcctccagaaagatacagctcagcaggacatccaagctgattgcttatgtaaaaattctaatccaacttgtattaggccattcttgcattgctataaagaaatacccaagattgggtaatttataaagaaaagaggtttaattgtctcacacttctgcaggctgtacaggaagcatagctctggcattagcatctgcagaggcctcaggacgcttgcaatcatggcagaaggtgaagtgggagcagggttttacatggtgaaagcaggagcaagagagagttggcagggggaggtgccatacrcttttaaatgagcagatctcctgagaactcactatcatgaaaacagcaccaagccatgtgggatccacacccatgacccaaaaacctcccaccaggccccacctctagcactgaggattacaattcaacatgagatctgggtggggacgaacatccaaaatatctcacaattattatatactgggtcaagtacagtatatgaggtttaccaagagaagtttggctaaaagtgtcaatatctcactagataaaaatctcaggcttcaaggggcagtgcgttgaaaagaaaagccttattaaga

SEQ ID NO: 109433 - DNA, 606 bp, Homo sapiens
  misc_feature (1)...(606): n = A,T,C or G
ctttcttctctagtttgtttgttttgctttgctttgctttgtttcattttgttttgagatggggtcttgctctattgcccaagctggggtgcagtggtgcgatcatggcttaccacagcccatcccggttttaaaccytaaaaatctattttggtcagacttctttgacatacctccaaaggaaggagagataagttcaggaaatccaagtgcagacaatgtgggtatttcctttcctgggtagatcccaagtggaactgaaatggactttggtgatgtaatccagggatagaggtggctgggtcctatgtgtgtctttgcagatgaacctgagacagcgtgatagagcatcttttgtcccagcctagtccgttgggttttctggaaaccagcatcttgtgagaatagcagaataatttccatgttactaagaaagatagtagggtagaaatagaggccaagagatgcaatggcaaccctccagtggatgaaagaaggnacacagaagacatctgcatgggaaatgggaaagaaaaaaatagagcaaacgtcctccgagacagatcaagaatggaaaggaaggagcttcccctctatcccacatcc

SEQ ID NO: 109434 - DNA, 598 bp, Homo sapiens
caaaccattttatctgtcaattaaaaaataaaaatcattatattaagttcttagtgaaaatcaaagcaacaatcaaaagtaggactattgaagattcagactctttagaaatgaaggcttgagttactctaccagataaggaatcttgactaattgaytttttggctgagagcaagagaagtatggaaatatggaatggatcctaagagaataatggcacatgtatatataagcagaaatgagtgttctgtgcttttgcgtagtttctctttccttgttatgtgtgtttgtttttataaataataatttttattgtcttttcctccttccctttattactttacatacaaattatatgctattgttatacaatttagctttcaggtaacagaatagtcagtgggaccctgactaaatttgaggagtatctaatgcaaccagggatgatgcaatgacttgaggcctgtttttcctcatgttagggaagggacggggctgcatatcatgtataaaggatgcttgtaaaacagggtcatgtactaagaagggtaaaaagcaatctgaagaatatggcagtcacagatgtggggagcaggca

SEQ ID NO: 109435 - DNA, 598 bp, Homo sapiens
caaaccattttatctgtcaattaaaaaataaaaatcattatattaagttcttagtgaaaatcaaagcaacaatcaaaagtaggactattgaagattcagactctttagaaatgaaggcttgagttactctaccagataaggaatcttgactaattgattttttggctgagagcaagagaagtatggaaatatggaatggatcctaagagaataatggcacatgtatatataagcagaaatgagtgttctrtgcttttgcgtagtttctctttccttgttatgtgtgtttgtttttataaataataatttttattgtcttttcctccttccctttattactttacatacaaattatatgctattgttatacaatttagctttcaggtaacagaatagtcagtgggaccctgactaaatttgaggagtatctaatgcaaccagggatgatgcaatgacttgaggcctgtttttcctcatgttagggaagggacggggctgcatatcatgtataaaggatgcttgtaaaacagggtcatgtactaagaagggtaaaaagcaatctgaagaatatggcagtcacagatgtggggagcaggca

SEQ ID NO: 109436 - DNA, 598 bp, Homo sapiens
caaaccattttatctgtcaattaaaaaataaaaatcattatattaagttcttagtgaaaatcaaagcaacaatcaaaagtaggactattgaagattcagactctttagaaatgaaggcttgagttactctaccagataaggaatcttgactaattgattttttggctgagagcaagagaagtatggaaatatggaatggatcctaagagaataatggcacatgtatatataagcagaaatgagtgttctgtgcttttgcgtagtttctctttccttgttatgtgtgtttgtttttataaataataatttttattgtcttttcctccttccctttattactttacatacaaattatatgctattgttatacaatttagctttcaggtaacagaatagtcagtgggaccctgactaaatttgaggagtatctaatgcaaccagggaygatgcaatgacttgaggcctgtttttcctcatgttagggaagggacggggctgcatatcatgtataaaggatgcttgtaaaacagggtcatgtactaagaagggtaaaaagcaatctgaagaatatggcagtcacagatgtggggagcaggca

SEQ ID NO: 109437 - DNA, 617 bp, Homo sapiens
gcataccatagtaaactatgtgcatattcaagaaggtaaaggaagtcaaagtttttaaagaaaaaatgaggaggattggattataattttgaaataattatccttgcctgcaaagatcaataacaatatagtctaaggttgtactagaacttgatcagtctaaggttgtactagaacttgctgggtagatgatcttgaagtattttttgtttaaggtggtaatggcttttgtttagggttgtggcttttagagtcttttgtgatagttcttattgtcaggcatttgtgcatcagaactctctcttcacagccatctctgggtttattaatcagtttttttctcaacaccaatgatatggtttggctctgtgtcytcacgcaaatctcatgtagaattataatccccatatctcaagggaggtgcctggtggggcttaactggatcatgggagcagatttccctattgctgttctcatgataggagggacttttcatgagatctgatggtttaaaagtgtatggcatttcccttcactctcactccctctcctgctctgccatggtaaagatgttcttgcttcccctttgtctcctgccatgattgtaagtttcctga

SEQ ID NO: 109438 - DNA, 617 bp, Homo sapiens
gcataccatagtaaactatgtgcatattcaagaaggtaaaggaagtcaaagtttttaaagaaaaaatgaggaggattggattataattttgaaataattatccttgcctgcaaagatcaataacaatatagtctaaggttgtactagaacttgatcagtctaaggttgtactagaacttgctgggtagatgatcttgaagtattttttgtttaaggtggtaatggcttttgtttagggttgtggcttttagagtcttttgtgatagttcttattgtcaggcatttgtgcatcagaactctctcttcacagccatctctgggtttattaatcagtttttttctcaacaccaatgatatggtttggctctgtgtcctcacgcaaatctcatgtagaattataatccccatatctcaagggaggtgcctggtggggcttaactggatcatgggagcagatttccctattgctgttctcatgataggagsgacttttcatgagatctgatggtttaaaagtgtatggcatttcccttcactctcactccctctcctgctctgccatggtaaagatgttcttgcttcccctttgtctcctgccatgattgtaagtttcctga

SEQ ID NO: 109439 - DNA, 592 bp, Homo sapiens
cttaaataaggaacagatatagagtgtctccgttaatgataatcttattaattattctttctggctgcaatgtttggattttaatatatcagtcttggatcttaagctgtcttctgtttaagtactgagtgctcattaaagcataacttatatagtaaatttaccataatgaataagaaaatgtatatttttattttaccctagttaaatggtgggtgtctagatggtgataaatgatagggggtacagatggacaggaagtaggaaaattcagattttagtactctatgtgtatgttttctttgaaatttattgatatgttaattatggagtagggtaatgttacaaatactgaagatatgaaaytaaagaaataatttttatttgattctcagaatctgtggaagtatattttaatgatgttgtacaattacttcagtttttagttagaaggtgctttggattaaaatatataactcctaccaccagaccctttgtaaattttagcaatgttcacctcatgaaaactttactcagtatcatcaacattgtcttaagcaatattataaaataagggcttaatcttttttgc

SEQ ID NO: 109440 - DNA, 592 bp, Homo sapiens
cttaaataaggaacagatatagagtgtctccgttaatgataatcttattaattattctttctggctgcaatgtttggattttaatatatcagtcttggatcttaagctgtcttctgtttaagtactgagtgctcattaaagcataacttatatagtaaatttaccataatgaataagaaaatgtatatttttattttaccctagttaaatggtgggtgtctagatggtgataaatgatagggggtacagatggacaggaagtaggaaaattcagattttagtactctatgtgtatgttttctttgaaatttattgatatgttaattatggagtagggtaatgttacaaatactgaagatatgaaactaaagaaataatttttatttgattctcagaatctgtggaagtatattttaatgatgttgtacaattacttcagtttttagttagaaggtgctttggattaaaatatataactcctaccaccagaccctttgtaaattttagcaatgttcacctcatgaaaactttacwcagtatcatcaacattgtcttaagcaatattataaaataagggcttaatcttttttgc

SEQ ID NO: 109441 - DNA, 608 bp, Homo sapiens
gaaaaacaaatagaagtttattaacatgtatacagtgactttttctgtaacctctgcctccccccctcccaccatgtttatagacccctgcatttaaaccatctgggacttcaggttttaaacacgagctggctgaatcttcttgcttggtaccctgcaataaatgtatacatgggagacacccagggacaaatgaggaactctcaaagagatagtttagaattcaagcataaatactatcttcagctaaagacaaaacagagaatggtgtcagggaggacgaggtaactaggaaaagtacagtaaagaagagtaagttttgtaatgcagatgtaagtcaataccttccccactgctaagagcctctagtgatttacccatctttctctttcttatacagagagggagacacacttaaaaaattgagatttactttataaatgcaaatttcccatagaaaagggtttacttytcctttattttcagagcttctcctgtgtctgctgtttctcaaaataattctgctaaagaggcatattttggggtgtcatattctggtctcctatatcattcacgctaaatcatggggcaggatgattttccgttaa

SEQ ID NO: 109442 - DNA, 610 bp, Homo sapiens
ttacaagacttttcttatcaaagatcattaaaatttagacctaaagggaaaccttgccccaaggaaattcccaaagaatcaaaaaatacagaagttttagtttgggaagaatgtgtggccaatagtgyggtgatattacaaaacaatgaattcggaactattatagattgggcacctcgaggtcaattctaccacaattgctcaggacaaactcagtcgtgtccaagtgcacaagtgagtccagctgttgatagcgacttaacagaaagtttagacaaacataagcataaaaaattgcagtctttctacccttgggaatggggagaaaaaggaatctctaccccaagaccaaaaataataagtcctgtttctggtcctgaacatccagaattatggaggcttactgtggcctcacaccacattagaatttggtctggaaatcaaactttagaaacaagagatcgtaagccattttatactgttgacctaaattccagtctaacagttcctttacaaagttgcgtaaagcccccttatatgctagttgtaggaaatatagttattaaaccagactcccagactataacctgtgaaaattggagattgctta

SEQ ID NO: 109443 - DNA, 610 bp, Homo sapiens
ttacaagacttttcttatcaaagatcattaaaatttagacctaaagggaaaccttgccccaaggaaattcccaaagaatcaaaaaatacagaagttttagtttgggaagaatgtgtggccaatagtgcggtgatattacaaaacaatgaattyggaactattatagattgggcacctcgaggtcaattctaccacaattgctcaggacaaactcagtcgtgtccaagtgcacaagtgagtccagctgttgatagcgacttaacagaaagtttagacaaacataagcataaaaaattgcagtctttctacccttgggaatggggagaaaaaggaatctctaccccaagaccaaaaataataagtcctgtttctggtcctgaacatccagaattatggaggcttactgtggcctcacaccacattagaatttggtctggaaatcaaactttagaaacaagagatcgtaagccattttatactgttgacctaaattccagtctaacagttcctttacaaagttgcgtaaagcccccttatatgctagttgtaggaaatatagttattaaaccagactcccagactataacctgtgaaaattggagattgctta

SEQ ID NO: 109444 - DNA, 610 bp, Homo sapiens
ttacaagacttttcttatcaaagatcattaaaatttagacctaaagggaaaccttgccccaaggaaattcccaaagaatcaaaaaatacagaagttttagtttgggaagaatgtgtggccaatagtgcggtgatattacaaaacaatgaattcggaactattatagattgggcacctcgaggtcaattctaccacaattgctcaggacaaactcagtcgtgtccaagtgcacaagtgagtccagctgttgatagygacttaacagaaagtttagacaaacataagcataaaaaattgcagtctttctacccttgggaatggggagaaaaaggaatctctaccccaagaccaaaaataataagtcctgtttctggtcctgaacatccagaattatggaggcttactgtggcctcacaccacattagaatttggtctggaaatcaaactttagaaacaagagatcgtaagccattttatactgttgacctaaattccagtctaacagttcctttacaaagttgcgtaaagcccccttatatgctagttgtaggaaatatagttattaaaccagactcccagactataacctgtgaaaattggagattgctta

SEQ ID NO: 109445 - DNA, 549 bp, Homo sapiens
aatccccaaacacattcccttgcagtctgcacatctcagatgagagtgaatgtgtacttccgaaaacttagctgaacttgacagcacatattttaaatatgggaaatacattacattatttgtaagtgttgtaatttataatacatagagaaacgtacatgtatatgtgaaaagagtgagaagatacatcacttccaaatcgtttttttttttttgagatgaattttcactcttatggctgaggctggagtgcaatgccatgatatcagctcactgcaacctctgtctcctgggatcaagggattctcctgcctcagactcccgagtagctgggatcacaatcgactttcaaaatgcttttgggttgtgggaaaaatgtttgaaraccatgtccctatgggtctgtgcccccaggacctctctgacctcatctcctacctgtgccctcctctcttccactgctccagccccacgggtcgctttccttttcctggggctgaggttgctcctgtctcagggccctcacttgagctgtccctctctctagga

SEQ ID NO: 109446 - DNA, 549 bp, Homo sapiens
aatccccaaacacattcccttgcagtctgcacatctcagatgagagtgaatgtgtacttccgaaaacttagctgaacttgacagcacatattttaaatatgggaaatacattacattatttgtaagtgttgtaatttataatacatagagaaacgtacatgtatatgtgaaaagagtgagaagatacatcacttccaaatcgtttttttttttttgagatgaattttcactcttatggctgaggctggagtgcaatgccatgatatcagctcactgcaacctctgtctcctgggatcaagggattctcctgcctcagactcccgagtagctgggatcacaatcgactttcaaaatgcttttgggttgtgggaaaaatgtttgaaaaccatgtccctatgggtctgtgcccccaggacctctctgacctcatctcctacctgtgccctcctctcttccactgytccagccccacgggtcgctttccttttcctggggctgaggttgctcctgtctcagggccctcacttgagctgtccctctctctagga

SEQ ID NO: 109447 - DNA, 549 bp, Homo sapiens
aatccccaaacacattcccttgcagtctgcacatctcagatgagagtgaatgtgtacttccgaaaacttagctgaacttgacagcacatattttaaatatgggaaatacattacattatttgtaagtgttgtaatttataatacatagagaaacgtacatgtatatgtgaaaagagtgagaagatacatcacttccaaatcgtttttttttttttgagatgaattttcactcttatggctgaggctggagtgcaatgccatgatatcagctcactgcaacctctgtctcctgggatcaagggattctcctgcctcagactcccgagtagctgggatcacaatcgactttcaaaatgcttttgggttgtgggaaaaatgtttgaaaaccatgtccctatgggtctgtgcccccaggacctctctgacctcatctcctacctgtgccctcctctcttccactgctccagccccacgggycgctttccttttcctggggctgaggttgctcctgtctcagggccctcacttgagctgtccctctctctagga

SEQ ID NO: 109448 - DNA, 575 bp, Homo sapiens
tgaacaatggtggccaagatggcaaaggcaaatgaaagaacaatgaattattaaaagcagtacatgtttcatgatgagagactgaatatacaaacggacagtggccacaccatatacaaaaatagatctctgacgcacaatctgcagcaactagatcaggaaaccaaaccacaatctctgtagcaaacagcccaaatcagccaagaactgattattaactgataatttttctaatttttgaccttgcttccaacttaggaccaaccaaagaacacgaaatgtacacccctaaccaatcatgtaggctgcccttcttgtagttagcccacctatagcttccccatgtcaacagccttcaaccagaactctcctgaagtcttccttttttcccactataatgcttttacactcctctgccagcctttgagtctctctgtcaaaagcaagggatggtggttgcctcttttgctgtaggaagctctgaatgaatagcatttgcttaytctcatttgggtggtttttgtttattttcacaaaacctgaagtttgagtacttgatatctttaatgcaatat

SEQ ID NO: 109449 - DNA, 569 bp, Homo sapiens
tgcttttccttttccaccccacagattatttttgttaacaatctgggagctaatttcttagtgaagatcaaaacatttgaaagacaactgatcctgaagctgattctggaatgtacctgaacctgtattcccatctacaatgatacctatttcaggggattgttttgagaaaatatgacataatcaatgaaaactgcctgaggtggtgtgatcacacagaagaattctaaatggacctttcaagtactttcccttctctccaatataatgcaaatttggatggtccaaagaatagtagacttatagtcagaagacatagatttgggtttcaatttagtttctacttacrtttgtttttctagttctatgaacttggacaattcaatctagcctgttttggtgtctaagatggagataatcatgcctcctttgcagctgcctacctctcaagactttcaagagagtataaagaagtgctttgtaaatgtatgggtatgtttactctgactcacattctacgaacgtgtattaataggatttcttttttcctccattcccttgactggttc

SEQ ID NO: 109450 - DNA, 533 bp, Homo sapiens
gcttcattctgctggggaaactctgcaacatggggtagaatgtatgcttccaagagtgaggggtctgggtgtttatacaccaagttcttagtagtcatcggttgaggattgcacctgaaaggtgcaactcgccagcattccaaacctgctatgtaagtggcaaaatgtgccatggtggccacagaaaaccctcaggcaagtggaggcaggaggtgccagttggaatttggctggtgtacatgcagatggtaggactgaaggcacatgtggctgccagtgacaccaccctcctcaacatccccaccatcccatgagcaaccttgaaataaaagtcatcattcccatgattgaaaactatatgtacatctgccccatccaggagcctagtttactttaggtgtatgtgggatttcagagctgggcctaaagggatgggtataaaaaagggataarccatagtggtccccaaacaccaagctctgctgactagctgagtgagctaagacttgctttgttctttagaacctcacttc

SEQ ID NO: 109451 - DNA, 413 bp, Homo sapiens
ctccttctgtcatttctactttgttgaatgacaacacaatcacaaagttactcaagataaaaaaaaagttatttaggtaataattttaggtcactgccattcattaaaaatataacatgaaccacaaatgtgagcaacacaggtaatttaaaattttctggtagccacagtaaaacagtacaaagcaacgggtggaattaattttgatgatatattttatttaatctaatatattcaaaatagtatcatttcaaggtgatcaagatacgaaatcattaatgagatattgtacattccattttaatactttgtcttcaaaattaggtgtgtaygtcacacttaacagcatgtctcatattgaattagccatgtctaaagtgctcattagctacacatgactaatggctactatg

SEQ ID NO: 109452 - DNA, 605 bp, Homo sapiens
aaatgtcttacaaattgccagcatacatttttgtttgtgtttattattcaagcaatttcctacttatccctgccaaattctataaggtgtcaaaatttggcacaggggttacaaaactataaacccaacctaatacagaattatctttgcttatgtaatttttaataaataagacattgatattggtttaatgaaaatagctacatcttgaatttagtatgattaccataacttcttgtcttgtggctttaggaggtctagtccacaggcagtaaggtatgttttggaaaaggactgttaccatctttgtttcaaagctaaactataaactaagttcctcccaaagttagtttggcctatgcacaggaataaacaaggacaggttggaggttagaagcaaggtggagtcagttaggtcagatcttttttactgycccagttataattttgcaatggcagttccataactttaaataatgactattgcaatttccataaacaatctaggtaaatgattaaaataaaataattgggcaaatgtaatgggataaatacttgtagacaaactcattataatttagaatctaaagttatattaaataata

SEQ ID NO: 109453 - DNA, 581 bp, Homo sapiens
atctgcatcaaggccaaaattcatcttgtcaacgtctaattctgctgcatttcagctagaagagttgtcaatacctgggtggarcagagttttcaacctgggccattgctccatgaaattccttctgggcctcagaagttatagaatcaagaccagatcctcaataagacaaaaatcacccccacaggctctcagactgctaacttccatacttgtgctggcgagtctaatcacccagcatgcttgccttgagtcaggacaaattctgtgatgtaatttatactccaggacacccctgatggttcagactgaggctgtgccttgaccagaaattgcttccttttttggcttctcccctcatcctttaattccttaattcattttctcccgggacagtttttaaataaattgctcacatatgaatccttgtgttagggtttgcttctggtaaacctgaccaaagacaatgcctacttaggaaaagatgagcaaagttcaaggccaagcaagcataatctgcatccttagacagtctctatgcctgatgaaggcacatgcatttgctgaggagagaagagcaa

SEQ ID NO: 109454 - DNA, 581 bp, Homo sapiens
atctgcatcaaggccaaaattcatcttgtcaacgtctaattctgctgcatttcagctagaagagttgtcaatacctgggtggaacagagttttcaacctgggccattgctccatgaaattccttctgggcctcagaagttatagaatcaagaccagatcctcaataagacaaaaatcacccccacaggctctcagactgctaacttccatacttgtgctggcgagtctaatcacccagcatgcttgccttgagtcaggacaaattctgtgatgtaatttatactccaggacacccctgatggttcagactgaggctgygccttgaccagaaattgcttccttttttggcttctcccctcatcctttaattccttaattcattttctcccgggacagtttttaaataaattgctcacatatgaatccttgtgttagggtttgcttctggtaaacctgaccaaagacaatgcctacttaggaaaagatgagcaaagttcaaggccaagcaagcataatctgcatccttagacagtctctatgcctgatgaaggcacatgcatttgctgaggagagaagagcaa

SEQ ID NO: 109455 - DNA, 594 bp, Homo sapiens
aagcaggcattttcactcatctgtaatgactgtaggtactgtgtgattgtgtgattcagtttttcttcagtcattcttagttgtattcttcatttaaatgtgtatccaggagcaaaatgtgtaacagtaaaattaacaataaagttacaaattatcaatggcaccacaatgcattatatatttacttgaattagaccaccattttaagtttttacttaattagcttttatttatttgcagaaatgtaattaacatgttgctgaagactggtycactgagcactgtttgcaaaatggagccccagtgacacctcatcaccacagctggtgatgctccctcagtggtggccatgtactgctggctgggcatagaaaattagctggctgtgaacagtttatgtgctccccaggcctccaacactttcttctctaccccatgaggatgtcagaatacaagtgaatgagaatggcttcatcatcatagaaaattgtgaccatctcttaatacattttgaagtctaaaactaataaaaatcccaaattcatgttccttacgtctttattattattttaaagacggggtcttgctctgtca

SEQ ID NO: 109456 - DNA, 476 bp, Homo sapiens
tatcatagtttgaattgaactcatttctatactgagggctttttttgtgtgtcctctatcacaatgctttccaaataaaatccgttyttaccactttactgtcaggtctgttttttcatcaacaggggacattttggataataccttatatggttttattcaaaggcgtaccctacatttagtcaacaaatggagcctaaaccttttaattacctcggggtgatttttcagctcctatgagacactccctgactgatcatctttctctgtcctctagattttgattgggatactaaatcctattgaactgggctcaatgaccctttcagttttaggaaggagaaactactgtggctattttttttttttttttttttttagcagaaagaggtttaaacctaggagcttaagaaatctttggaagttgatgtgttttggatgtggctgggcccatgggaatatccctggaactaatg

SEQ ID NO: 109457 - DNA, 615 bp, Homo sapiens
tgacgatgttccacttttccagagcctgactttcagaaacaaatctaaatttaaataaaaacaagtctaaatttttactgtgacttagttactgctgtsagatagccttcagaacctagactcatgcctattaaggcccaactgtgacttgggcaagacttttctactccactgggggaagtcaaaaacctatcttgggcttcaggcagttgcaggagatggagaaacagactattgactttattgacactggattgtcttttggaccaaagaaggtctcatctttatctggagtagataaccaagtatggagccttggatcccaaagttcgtctagggcactgagatatattttagtctcatcagaggtatagggttgtatttagagtgatcatgtcatttgttattcaaaccaagactaccgagaatggaagtggcactgttgatagatattggaaaataggtgaaaaccaggacccttgcatagggatgcatagcgatggatctcctgaataggtaccataaatagggatctctggtaacaccattcatggtaaaacttttcctctgtttcaagtttctcacaggctctattgtgaaagtaataacaacttc

SEQ ID NO: 109458 - DNA, 635 bp, Homo sapiens
tctctctttgtttcaagagctgattcttccattttaaatcaaggataccttacaaaccaatgatatctgactgaacaactactttcagggtaataaaagttgtaatattttgctaaaaacacatggattttgcatactggcaattttgttaatgtgaattcatatatattttttaaaacaactctttaactattttatacagtttttcatgggcaatatcaggagtggaatttttgaatgacctgattatttactagcctggctcttttcagaaaacctgatactcaaaggaatactacactgataataaatagatttgaattcattgtaagaagaaagaaaggtttgtacatgggctctggatttaaacgaacatgaatataggactaaaatctggctccaagtctcactaattgcgtgacggtggcaaatatgttaacctctctgttttctaatctgtaaaatgggattaatatcagtactaacctcatatattagtgtgaaaataaataaaaataaagataataaccaccaattattgcaagacatckaattgtccatcaaacactaagccaagtgcatcttgtgattaaattctgtcttcacagcaactatttgagattgtacttaaattc

SEQ ID NO: 109459 - DNA, 614 bp, Homo sapiens
tttgtcttctagcttaaaatgctcctctgagctccagaattatatatctattattaatagacacataagtaagtacataagctcaaccgaggtcatcatctttaatcctgctccattcttgtctttatcctgtttactttggtaaatggcacaaccatccaaacagcacttgagctctaagtctagaatttattcagtcacaraaacttgctgacttatctcaaatccatccatctgccacctgcaaatgacctaatcatctgacacctcaaatattattatagtttcataattggactttctgtgaacatttttcattccctctctgcggttacccaatccagcatctacctgtattgcggccgaaatatctcttagaaactcatgtataattatgttgtcctattgcacaatgccttaaatttttctttagataaagattaaagtacttaacttgacctacagggtcttgttgaatcaggaccttgttgacttttggaacccttttgtgctttgacactagctctccctgcttcagacatactagtcggcattcattttctcaaattgtcttcccctacgttgtttcaggaccttcactcatactttgtttc

SEQ ID NO: 109460 - DNA, 542 bp, Homo sapiens
tatgtgattgagtgttcacatataagaaggtggtataactttccattcactaaagcaaattttataactattaggagatgtttaggcctttcttgatacaaattctatacttctttcattcacttcattccttagtattttatatttttgcttattattatgaatgtgactatttaaatcaatacattttataaatgcaatttataggcatatattaaatatttcagctcatgtatttattttataattagtgactttatttatagagtcatttttgtctgatatttaatattgagatatttaatattatgattctagttagaactcatttacttatgcaaaaaaaggtaaggaaactggtccatgatagattctatcctcagtcttaggattcaataayatttcaggatacatccagatattgcttacttttcatgaacattgcaaaatactgagcccttttgttccacatgtctatagaaattataaactatagagttggctgcctaatgcaatggctactagccacattactaattaaa

SEQ ID NO: 109461 - DNA, 484 bp, Homo sapiens
aaataccaccattattcctcacagaattaggaaaaacaattctaaaattcacatggaaccaaaaaagagcccacatagccaamgcaagactaagcaaaaggaacaaatctggaggcatcacattacctaatttgaaactatactataaggctatagtcaccaaaacatcatggtactcatacaaaaatgggcacatagaccagtggaacagaacaaagaatccagaaataaaaccaaatatttacagccaacttatctttgacaaagaaaacaaaaacatgaagtgtggaaagaacatccttttcaacaaatggtcctggaataattggcaagccacatgtagaagaatgaatgaaatcctcatctctcaccttataaaaaaatcaactcgagatggattaatgacttaaatctaagaactgaaactataaaaattctagaacattggaaaaactctcctagacattggcttaggcaaggattt

SEQ ID NO: 109462 - DNA, 631 bp, Homo sapiens
ataataaaaccaacagatggcctgagaactcactatcatgggaacagcatgagggtaactgtccccacgattcaattactctccactgggtcccttccatgaaatgtgggaattataggaactacagttcaagatgagatttgggtggggatacagcaaaatcatatcaagaggctctcacatttcgatatggatcacrtgggtataatggggatatagatcagggaagccaagggtttcttgatatatcgcagtggagcaggtcatcacagcagaacactgtctcttgagggcagtacaatgagtggtaatgacaatgttctctaaagattacatgaagggttttggcaagtatagttcttcttctcgatgtactgatggagacctatttgactcagccataaagacccctaagacagttggagaagtggaagtgtttccactaagtgtgtcatagccttctagatctattctcctttctatccccataaccacctgcattttaaaaattagtaacaagctgtagtaagaagtctcggagatgttggaacttcaaatgtagggtgtgtatattttactagtttagttgtcacttcaaagaattgaaagaattagtcctttaaaagacatg

SEQ ID NO: 109463 - DNA, 592 bp, Homo sapiens
ttcacagagccaatttgtgcatgaattgttgctgaaacagtccattcatggaaaaagaaaggtccagtgctttctactatgctatgttgcttacatcacttccaagcaaatactttaacacttctaaacaacccatgagcaagaagtaataaagggaggattagaatgcatctttaatggaaaagaaatgaaaacacagcatataaaatttctgagaggaaaattctagtcctatatatcaatcaatattagtgaagaaagttttgtggggtcrtttgttttgttttgttttttggtggggggcagggtctcacttacgcaggctggagtgcagtcatatgatcccagttaattgcagcctccatctcctgggccaggtgatcctaccacctcagccacccaagtagctgtgttagctgtgactacagatgtgcaccactatgcttggctatttttttttttttttttagtagaggtgaggtcttcctatgttgtacaagctagtctcaaactactgtgatccccctgccttggcctccaaaagtgctggaattacaagcataatctacctggcaaaaagttcttaaaagta

SEQ ID NO: 109464 - DNA, 599 bp, Homo sapiens
cgttgggcctgagccttggaaattacagatttgtgtaaatgtaaatgtgtctgtatctgccttgtttgctttgtgagactgcacttaggttggagaagctatgagttggcaactagggcttgggcctatatgaacagaataatattcaattatgaaaaactaaagctaagatatctttgtttcaaagtgatccacacacatcttgactctcatctggcagctgtacgtgctctatatgaatgaaagacccacacaatctgtatattcttgggtatttgttgggcctcctgataggaygaatgtgccatatctgctgaatttcttgcctttgtgcttgtatccacaattgtggtattagaaatgtaaatacaaaatataacataaccaaatattaaatttgattggagaagtgaaagaaaattgggcagaaatagtattaaagatatagttgctgaaattttccaaaactgataaaagacattgaaccacagattcaagaactataaaccccaagaatatgaatacaaataaaacaacatcaaggcacatcataagggaactattgaaaaacaggaaaatattaaatccagcagagaaaa

SEQ ID NO: 109465 - DNA, 599 bp, Homo sapiens
cgttgggcctgagccttggaaattacagatttgtgtaaatgtaaatgtgtctgtatctgccttgtttgctttgtgagactgcacttaggttggagaagctatgagttggcaactagggcttgggcctatatgaacagaataatattcaattatgaaaaactaaagctaagatatctttgtttcaaagtgatccacacacatcttgactctcatctggcagctgtacgtgctctatatgaatgaaagacccacacaatctgtatattcttgggtatttgttgggcctcctgataggacgaatgtgccatatctgctgaatttcttgcctttgygcttgtatccacaattgtggtattagaaatgtaaatacaaaatataacataaccaaatattaaatttgattggagaagtgaaagaaaattgggcagaaatagtattaaagatatagttgctgaaattttccaaaactgataaaagacattgaaccacagattcaagaactataaaccccaagaatatgaatacaaataaaacaacatcaaggcacatcataagggaactattgaaaaacaggaaaatattaaatccagcagagaaaa

SEQ ID NO: 109466 - DNA, 705 bp, Homo sapiens
gtgtttatacagcattaggcatgctaagggtggaggagggataataaagtagtaggagatgtatctgtgatcatgaagcatctgttatgtactttcttatgttagatatcctgtatactacaaggaattaagttttatcacagaagccaagagaacaatattaagggtgttcaacactatgtgatgccaaagagagagatgaagatagaaaagtgtccattgtaatagaccttagttgttttgtggaaaaacttggttcaagttcatttaaaaggatgtgcacaatgtttggtaagagattaaagcatgattggtttattgcttaactatggtcctagaaattacagtgaaatgatgcaggagtcaaatagtaagaaaatatgtagtatgaggaaaagcgtatcaaactggtaaaatctcattttacctaagatgatgctactcttatacatgcaaagacccatgtttccagtaacgtaatggaatagtgaaatttaggcattggtgagacagctggtctggtttagaaacatagcatagcataggaagaggaataagttttatctgggtgaagttaactgaatcacatgaagcttaaatttgtcatgttgttcattcaaaattacctaaatgttagctagctcaaaatattatttattcatataawttattttaatttttaatttttgtgtacatagtaagtgt

SEQ ID NO: 109467 - DNA, 638 bp, Homo sapiens
agagagaacttaaaatatgcatagaagctatatcttcgtcatggattaccttggtatatatgcttatgttagatatcttatgcccaacatagagtatatgtccatatatacagataatctatgagaatgaattggagaaaatttgagatttcaacagaaaattggcrttagatgactcaaagtttcctagcttagagtaaaaggaaagggataaagaatgaatgatccaagaggagcaggattttaacatgaaataaatagaaagaggcaagaccaaaataaaataaaacgaactcattgagataggcctagaaatagtgagagaaaagactagccctgtgtttgctgaaatttaggcatagttagcaattatggggcatttgctacacactggactactgacattaggtaagcttaaaatgtagtcttaatttcagaataacaaaaaatacataatattttaacttaatttattgttcacaaagtttcacaaatatgtctatagccagttcaatgataattaatttggccaataaatcagattttgtattgattcaatgtctcttattagacaatttctataaagcttgaaagttttagctttcttgctgcccttacttacaaaatataattgtgtc

SEQ ID NO: 109468 - DNA, 638 bp, Homo sapiens
agagagaacttaaaatatgcatagaagctatatcttcgtcatggattaccttggtatatatgcttatgttagatatcttatgcccaacatagagtatatgtccatatatacagataatctatgagaatgaattggagaaaatttgagatttcaacagaaaattggcgttagatgactcaaagtttcctagcttagagtaaaaggaaagggataaagaatgaatgatccaagaggagcaggattttaacatgaaataaatagaaagaggcaagaccaaaataaaataaaacgaactcattgagataggcctagaaatagtgagagaaaagactagccctgtgtttgctgaaatttaggcatagttagcaattatggggcatttgctacacactggactactgacattaggtaagcttaaaatgtagtcktaatttcagaataacaaaaaatacataatattttaacttaatttattgttcacaaagtttcacaaatatgtctatagccagttcaatgataattaatttggccaataaatcagattttgtattgattcaatgtctcttattagacaatttctataaagcttgaaagttttagctttcttgctgcccttacttacaaaatataattgtgtc

SEQ ID NO: 109469 - DNA, 556 bp, Homo sapiens
gcttaccactggatttcttagtagattcaaataagatcatgtacttgaagtgcttagaattagtgcctggcatggagttggaggcaggcattgtgctgggagtgaaagagttctgtggtagagtctctgttagtagaagccctcagggaatttaagcattaataagatatttgataagtgaaagayattgcaaggtttcaggaattgctcgagacaaccataaaagagacatctgaaggcaacatgtattactaatctacaaagtgagagaactagccaacacatgctgtagacattcaaatgggagagaaagatcacttccactacaagcagtttaaaataatttatggtgaaatttttgcttttttaaatgcctgatttcaatgacaataaaatcaagatctatacccagaaagcactcattttggcttacaaacatgaagcaacataggactttataccaactactaatgtagagcttagattacatgctataagagaaactcttctgaaatacagatacctatttatgtgtgtataggaaaaacacacattt

SEQ ID NO: 109470 - DNA, 537 bp, Homo sapiens
tgtagggtttcttctgagaaatcgactgttaatctgttaagttttcctttgtaggttacctggtgcttctgtctcacagctcttaagattctttccgtcgtcttaactttggaaaacctgatgacaatgtgcctaggtgaagatctttttgcaatgaatttcccrggtgttctttgtgcttcttgtatttggatgtctaggtctctagaaaggccggggaagttttcctcgattattcccccaaatatgttttccaagcttttagatttctcttcttccttggcaacaccaattattcttaggtttggttgcttgacataatcccagacttcttggaagctttgttcatattttctcattcttttgtctttgtctttattgaataggattaatttgaagaccttgtctttaaactctgaaattctttcttctacttgttcaattctgttgctgagactgtccagagcattttgcatttctaaaagtgtgtccaaagttttctgaattttttattgtttttcctttaagctatatatt

SEQ ID NO: 109471 - DNA, 601 bp, Homo sapiens
gttactataagaatcaaattgctttcaaaagaaaaaagtggatattgttctttgaacacatgagaaaggtcccagctggatattttggaaagagaaaggcagaagtgaaagtgttttatggccttagaaacttaactaatttggactcagaagtttactgcttcaccaatatttatgggataacaaatttatctargaatttgtgtttgtcccacacaaccaaagttattaatggccccagctggtggtttttaatcttcatttcctaaaacaaaactagccctatgtttctgcaggctgtacatcatacgtacaaaccacaccctggaaaccaaattgagctcaagtcaatagctcataagagtgactcctaaaatgaggctttaaaactacttttagccgccactttctcaggcaaaagaatatttaatttaactttcccctgggaagctcttgggaagaagaaagaaagcatggctcttattctttcaagagaagcgtacaagaaatgaataaataaaacagttaattttccaactgtattcccttgctacatctatttgtacaaagcttcatgacttctttcctcatggagaggatg

SEQ ID NO: 109472 - DNA, 402 bp, Homo sapiens
aatatcagttaagaaaaatgatagggttctggtgtcagttaagaaaaaattagccacaacttaaaaaaatagaaactcaaagaattttagtgaagtaaacaatcaaagacatcaacaagccagggaatataaaacatgtgtgatcatcagaattacccaggakatataaaaataaagatatcaggacccatctagagatttttctttgggtggggcttgaatgggggccaagtgattctgataattttcttaaacctctctatcccctgctatctcactaccactttgtgatacactgacttagactagccttctctaaagactaagtaatcttttcttaaaaatcaaacaaaaaaacaaaaaccactttttaaatatcacactcaaatggtctcttaaaaa

SEQ ID NO: 109473 - DNA, 554 bp, Homo sapiens
tgactcaggcctctattccagaaggtacaagcagtaagtcttgttggcatccacaaggtgccaactctgcaggtgtgcagagtgcaagagttgtgggggcatgactttttccaccaggattttgaaagttactcagtgagcctcaaggtccaggcagagatctgtcacaaaagtggggcaaccttatagtgttcccccaggacaatgtctagcagagccatggttggggccactgcagagagcctcaactatggcaatgcttagtggaaccatggtgtcaaggttttccgtaagaaccctgacctgtaaggtccccaatgtgccatgccagccttggtgagctgcgggcacctgactccaactcctgacatatgtgcagtggctgtatccaacaaatccatgagagcagggccactaggagccttgggtttccaacccatgcctcagtctgtctggaagattagacatagggatgaagattattctcaagcattaagacaagatttaatgttgctttctctgttgggytttgaacttacttggtacctgttgcc

SEQ ID NO: 109474 - DNA, 588 bp, Homo sapiens
actgttcaaaattacatgttatcaagtaaattgcttttttcttttttaataatggttctcaatgctggctgtgcatgagaaccattgaaagaattgcttaaaatatacaggtatccagaagtcatctctgaaaagtgtagctcagtgtgactggggtaaggtgtgtgtgktggttaatattcagtgtcaacttgattggattgaaagatgtaaagtagaacaatactttacccaatactgggtatgtccatgaggctgttgcctaaggagattaacattggagtcagtggactgagagaggcagacccaccctcaatatgggtaggcacatctaatcaacaactgtcagcatgcctagaataaagcaagcagaagaaggtggaatgacgtgacttactgagacttcaggccttcatctttctcccgtgctggatgcttcctgccctagaacatcagactccaaattcttcagcttttggactcttggacttacatccagtggtttgccaggtgctctcaggcctttggtcacagactgaaggctgcattgttgccttccctacttttgaagttttggtagtcagactg

SEQ ID NO: 109475 - DNA, 608 bp, Homo sapiens
cagccccttccttgggtccacagtgctcctccacagtgggaacccctagcagctctgaacagcagatccagcctcgagcttattctggcagtgtaaccaggcccttcacacagcaaactgtagtgacatgtcagtagcacatgccctgcggttgctggtgccttcaaaagtgttcattttaggtggttctgccaccctcccaagccagacttcatgtgcacatcttccttattttttcttgaaaaactggaatctgacaagtctagcagagtgtgtttatgaagtgacttcttaagtagcagtatttgaaacctgtcatgaagatatgtgatgatattggtttggctcatgtgattaagtgatctgtttcgttcagagagagtgatggcagaaaagagagcccatggttttgaagaatacctctttttttttttttkggggggagatggagtcttgctcttggagtacaatggcgcgatctcagctcactgcaacttccgcctcctgggttcaagagattctcctgcctcagcctcccaagtagttgggattacaggtgcacaccactacgcctggctaatttttgtatttttagtagaaatggggtt

SEQ ID NO: 109476 - DNA, 646 bp, Homo sapiens
ttgttttaatacattaacagaaccaggaaatatgttcctctggaatggaccccaatagtgatgacagctccagaaatttatttgtgaaggatttaccgttagtatcaaattctttatcatgattattaatactaagaaaggtttaattctgtgattcatttatgaaaggaaatgtgcatcatgtcaactcttatatttgtagtctgttgctttctctactgagaatatatttaagagaatttgatgtgttgaaattctattacatatagccaagctaaacccttctttttcttatatttcactccttttttgatgcctaggaaaaagaagccttaccacagtttttaattctacttcatactttccttcagtcatacttttcygtgtaccatgtttttattctaagaaggattagctattgaaatgagatgttttgccagccctctgaatagtctggttcagaaaataaataaataaataaataaataaaatatcatatttaacacagttgtcccattgtctcgctgatccagttcatttttctagatcccatataccctcctccccttctcttggatcaaatgtactttgtttgtttatgaattattaagatttaattataaacagtaaaatgcacagatcacag

SEQ ID NO: 109477 - DNA, 492 bp, Homo sapiens
aaggtaacagtaaatcattcttcaccagtaattacattaaatgttaatggactaagctccctaataaaaagatacagaatggcttaatggattttttaaaaagcatgatccaactatacatttgtctacaagagactctatttatttatttatttatttatttatttatttagagacggtctcactttgttgcccaggckaaagtgcagttacatgatcatggctcactgtagccttgaattcctgggctcaagtgatcctcctgccttggcctcccaaagttctgggattataggcatgagccaccatgcccagccaagaaactcactttagattcaaagacacgtaaactgacagtgaagcaaatggtaacaaaaagaaagcaggagtggctagtcttatgtcagacaaaatagactgtaagccaaaaactgcctctagagaaaaaaatcattatattatgacaaaaggatcaattcaacaatttacagc

SEQ ID NO: 109478 - DNA, 661 bp, Homo sapiens
attataaaacctttcaatatacaacaaggaaaagatgaaagacctacaaaattcctagaaagactcaaagagcaaatgaggaaatatgtaggtctagaattagaagacccccctcaaatgagggatgttaaagcttcattttgtaactaatasttggccagatattaacaagaaattacaagagaactggaaagatagacctatggaagagcttctaagagaagcccaaaaagtatatgtaaaaagagatgaaggaaacacaaaagcagaaagcaaaaattctgctctccaccatataacaaagtacccagggggccagaacctataaagaacctaaacccccactctccaggtaatataatgggtatgaaagagtaaagccaggagactcaaaggtagaaaaaaaaaaaagggacagaacgaatgtttcaaatgtggaaaattaggccactttaaaagacaatgtcctgaatgagaaaagaaagaaaaagtatcccatttaaagcttttgaagaagactaaggaagtcaggggctcttttattttttatcttaagtcccaccaaaagcccttaataaatttagaagtgggacctaaacttaagcttatcacctttttaatcaacacagaagcagctcgctcctcagtttgttctcttcca

SEQ ID NO: 109479 - DNA, 489 bp, Homo sapiens
agatccacacctggacttcccaataacataagcgattgatttcactttggtgtaagctagtctgagttgggtttgtcttgtgcaagtaaaagaactctcccagataccatgaatgtatacatagatacctacatatgacccctccccaaattcaaaacatatccaggcagtttaacagtacttacatctgattgagatttgarttagggaaaaaaaattatcaaccttattcactaattttaactttttacaataagctattattttatgattttttagtaaaaaatgttttttttttcataaacagaatctgtattcactcttaaggtgggaaccatggcatacactgtaggcagcaatatttgaaacaggcaaaactgcagatgctgtgcaaaatcacacctctagtctgtttgcttgattcagttcattgtatagtgaacggctgcaaactacagtcttccagaaatgtaatttagcctcccttca

SEQ ID NO: 109480 - DNA, 608 bp, Homo sapiens
ggattccacccccgccccgcccccttatggttctggtccaagattgaccacaagagaaatctgcatgagatttgggaggcagaagagaagcagcagtcattactctctgaaaatcattgtcgggattcaggtgctgctgtttcacccactggctcattttctgcagatcctccagctccaactgatctcctccttcagactctgagtcctggaccaaatgcagatttttccgcaaatctccccataatccattttaaagatggcgaatgacagatgtagatttatattcatgggttgctgatcataatcctaggtttcaattttccyaactcttgcctgattttcttccacagtcagccctgccaacctacagtggattgtggcccatccccagacacaggacagtagccttccctagactcctttacctgcttccctctggattcactggttaatgacttatctaaaatgtctccttccagaccttacttgctcagcttctcccttatgtactccttgtaatacatcccttagtacttatcagtcataattgttccacttccctgatcaaatgctgattggtcagtggtgttaaatccaacaatgta

SEQ ID NO: 109481 - DNA, 640 bp, Homo sapiens
caatttttcagcctatctaattcttaggttcttatgagactcagatgaactagtctatttaaaagtacttagtagaaagtttatctaaattatcattttgcatttcatgatttargcaatgattgattccaactaccatctgctaaacataacaagcctgaacattccagaaatgatcatttggcaattgttggtatacttcaatgcttaagtaaaaactaataatatgttccataaatagactcaaaaaaaattccagagcataaattaatcagcatttttagaaagactgaaaatagtctcacctttgtgtttgtgtaggaaagtttagcaagaatgttttcttatttaactgctttcatagaaaagaaaactgttgtttctcttgtaataccataacattgcatcaaaaaataaatgataataataatattgcagctgtggcttctgtatttactctgaaaactatttaattaatctcttttcactactgaatctataataattatatgctaattcctttggttatttgatgagtatcctttacagattcaaatgttgctatggggaaggtaaggtgcaaagtgattttggataaacctaatgcaaatatcataatggatttattcattgagatggc

SEQ ID NO: 109482 - DNA, 571 bp, Homo sapiens
tttcccatttaaagcctagaaatagacagtgaagactttttataaaactacactctccatttccctgacgaaaattgagtatacagggagtttggatatattttgtttacccaagggctattgaagagaaaagaataacttgaggactatctcacttctaatcgatagtggtagtgctagcggtactttttctatgacgaaaacaccctattgccagactataaagattacccttaacatctttcctctttgcttttcttcccactgattttctggcatttagactgggatacactacatatgcaatatatatattaatcactgtggtactaatattttcattctgacttttcatttattatatatgacttgcataaaaaacaaatgctacctaattttgtttygttttagtccacgtggacaaaaggattgattgaaaacagttgacagacataagggaaaaaatgtttcagctaccgttcaaattaacagttgcaacaatatatgggtgattacagcatacaataagtgaaataaagaacagcaatattataaaggacaggtgagaaaa

SEQ ID NO: 109483 - DNA, 571 bp, Homo sapiens
tttcccatttaaagcctagaaatagacagtgaagactttttataaaactacactctccatttccctgacgaaaattgagtatacagggagtttggatatattttgtttacccaagggctattgaagagaaaagaataacttgaggactatctcacttctaatcgatagtggtagtgctagcggtactttttctatgacgaaaacaccctattgccagactataaagattacccttaacatctttcctctttgcttttcttcccactgattttctggcatttagactgggatacactacatatgcaatatatatattaatcactgtggtactaatattttcattctgacttttcatttattatatatgacttgcataaaaaacaaatgctacctaattttgtttcgttttagtccacgtggacaaaaggattgattgaaaacagttgacagacataagggamaaaatgtttcagctaccgttcaaattaacagttgcaacaatatatgggtgattacagcatacaataagtgaaataaagaacagcaatattataaaggacaggtgagaaaa

SEQ ID NO: 109484 - DNA, 509 bp, Homo sapiens
  misc_feature (1)...(509): n = A,T,C or G
agagaaacagtgctgacttcaagggtatgtgacttgtacagttgyacaggggcttgcatttggattaatgctctgctattgccgtcttaaaattattaaattttggacaaagggccctgcatttttatttttacagggctctgcaaaagaggcagctttctctgtgtagaagatggcggattctgtttcttgcctaaggggttcaaaacattgtgtattagaatcatgttaagacagtaacgtaggaacttgcttaattgntctgagccttgattgcctcttttagtgcatataaagagacttccttgcatgctgtctaagggagtagccaaaggcttaaactataaggattattgtcccacgtaagcagttgagacaggatgttgatacttcctctcctctctatgagtcctaagaganaagactctgtcaataaggatttttgctgagttcaagatatgactcagctcaggattagtggcatcgatacttcatttgccccgggggga

SEQ ID NO: 109485 - DNA, 589 bp, Homo sapiens
tagaaggcagaggaggtgctggagattacsctgtacaaaaactcttttcgtttgttggtttgtttgcttgttttgagacagagggtcactctgtcacccatgttggagtgcagtggcatgatcatggctcactgcagccttgatctcctgggttcaagccatccttccacatcagccttctgagaagctgggactacaggtgcacatcaccatgcctagctaatttttaagtttttctatagagatggggtctcactatgttgactaggctgatacaaaaactcttgaccaaggggatttgaaaaatttgggcctggaagggtgatgtgcccagagagggcacagaagctctacgctgcccctccctacctctatactttgccctagacatcttttccatctgtctgttcttccattgtattctttatcataaatttaggtacacctaggtaaagtgctttcctgaattctatcagccattctaacaaattattgaacctggggagggggttttgggaacctcctatttagagccagtcagactgatgtgttggtacctgggacctcctacttgcagctggcatgtgaa

SEQ ID NO: 109486 - DNA, 589 bp, Homo sapiens
tagaaggcagaggaggtgctggagattacgctgtacaaaaactcttttcgtttgttggtttgtttgcttgttttgagacagagggtcactctgtcacccatgttggagtgcagtggcatgatcatggctcactgcagccttgatctcctgggttcaagccatccttccacatcagccttctgagaagctgggactacaggtgcacatcaccatgcctagctaatttttaagtttttctatagagatggggtctcactatgttgactaggctgatacaaaaactcttgaccaaggggatttgaaaaatttgggcctggaagggtgatgtgcccagagagggcacagaagctctacgctgcccctccctacctctatactttgccctagacatcttttccatctgtctgttcttycattgtattctttatcataaatttaggtacacctaggtaaagtgctttcctgaattctatcagccattctaacaaattattgaacctggggagggggttttgggaacctcctatttagagccagtcagactgatgtgttggtacctgggacctcctacttgcagctggcatgtgaa

SEQ ID NO: 109487 - DNA, 590 bp, Homo sapiens
tccactgcttgctttcttaaaattatctgaatgartaacctgccggtttataaaccaaacttgcacattttctcttgcctttcctttttgttcaaaacaaagcattcagactgctgatgaagagagtttgccagaaggccagtgacctgcattttttgagtagaaaagcaatcacaatttgccaaaggcacaaaaaagttagtgatttatgttttatatcatgacagaggcgctgcttcctatgccgtattttaagttgttctgtctaaagtgctggacatgccacacaaagtcaatgaagcaatgaaaataaaggtaagaaaatgagcaatttttttttatagatgtcattagggccacatagaaccctggaacagactaaataattctgagtaggaatgcaaccctaggcagtcatgcagattgtgcaaaaccccgtcaatgcatttttcttagtttaatatccttcaaagatctaaaaggcttcaacattacatccttggtatttcttgacaatatcatcagctgttagtgaaagaaaaacaattagaaggaaaatacaagcttaaggctcttatctggcatcttca

SEQ ID NO: 109488 - DNA, 540 bp, Homo sapiens
gatttcgctctcaacatgaacattattggtgtataaaaatgccgcctttttttgtrtattgactttgtatcctcaaacttcactgaagttgtttatcatttccaggagccttttggcagaatttttagggttttctagctatagaattatatcatctgtgaatagaaacagtttgacattttcttttcctgttttgttgccttttatttctttctcttgcctgattgctctggctagaacttcctcttactattcataattataagtccttaaacagtttaccatataaaagcaagattgaatatggtaataaaagtagctcatgggactatttctattgctagaagtatttctttggaatgcaaaataaaacataaacaagtagggtattttattacttattgagttattcacctaatatatatttattgaacatatttctatgtgccaggaagcaggttgcattagtagctaatgatttgttaccaggagtttgaagtgataaatgaaaaatggagaagtaggggaattttggaatgt

SEQ ID NO: 109489 - DNA, 540 bp, Homo sapiens
gatttcgctctcaacatgaacattattggtgtataaaaatgccgcctttttttgtgtattgastttgtatcctcaaacttcactgaagttgtttatcatttccaggagccttttggcagaatttttagggttttctagctatagaattatatcatctgtgaatagaaacagtttgacattttcttttcctgttttgttgccttttatttctttctcttgcctgattgctctggctagaacttcctcttactattcataattataagtccttaaacagtttaccatataaaagcaagattgaatatggtaataaaagtagctcatgggactatttctattgctagaagtatttctttggaatgcaaaataaaacataaacaagtagggtattttattacttattgagttattcacctaatatatatttattgaacatatttctatgtgccaggaagcaggttgcattagtagctaatgatttgttaccaggagtttgaagtgataaatgaaaaatggagaagtaggggaattttggaatgt

SEQ ID NO: 109490 - DNA, 531 bp, Homo sapiens
tgaattccctgttagcctaattatttggaatgaatcattaccttctatggtcactaatctccatgtggtcacatttattaatatattttattcctatttaaagtgctttttttttgtttgtttactggtcgtattctctgctttagtaccttttaatagtcccacttctcagttgcaatcccgaagctggctcaccctgaaataatgaaaacagcaacttattaaaaagacattggctaactcacagacatattaggaaggctagacaactatgcgtacaataaacagctagaaaaatcaccctagattttataccagatcatatytgctgagaaaattgttgttactacaaaaatagcaggtgggagggtcaggaagagaagaaggagaaaggacaggaggtggaggaggaagagtggcaggtaggaggtggaggagaaaggtggggaggagagatgttttcttatcattttctttttggctttccacatctcatgtcaaaactctctgcaacctagctgcaagccaggc

SEQ ID NO: 109491 - DNA, 531 bp, Homo sapiens
tgaattccctgttagcctaattatttggaatgaatcattaccttctatggtcactaatctccatgtggtcacatttattaatatattttattcctatttaaagtgctttttttttgtttgtttactggtcgtattctctgctttagtaccttttaatagtcccacttctcagttgcaatcccgaagctggctcaccctgaaataatgaaaacagcaacttattaaaaagacattggctaactcacagacatattaggaaggctagacaactatgcgtacaataaacagctagaaaaatcaccctagattttataccagatcatatctgctgagaaaattgttgttactacaaaaatagcaggtgggagggtcaggaagagaagaaggagaaaggacasgaggtggaggaggaagagtggcaggtaggaggtggaggagaaaggtggggaggagagatgttttcttatcattttctttttggctttccacatctcatgtcaaaactctctgcaacctagctgcaagccaggc

SEQ ID NO: 109492 - DNA, 407 bp, Homo sapiens
tcatttccacattcagagcacccttagagatctcttgtaagggaggtctagtggtaacaaattcccttagtgcttgcttgtctggaaaaatgttatttctccttcacttatgagccttagtttggggaatataaaattcttggtttgaatttctcttctttaaaatgctgaaaatagccctctaatgtctcctgtcttgtaacatctctgttgagaartctgctgttaggttgatggagttccttttgtacatgatctgaccttatctccagcttccttttcattttttaatttttttaaattttattctccagcttcctttaagatttttttctgtagcattgatcttggagaatctgaagactatatgccttggtgatgttcattttctattgtatctggcaggt

SEQ ID NO: 109493 - DNA, 437 bp, Homo sapiens
aaaattcaggccaggtacagtggctcacgtttgcaatcctagtattttgggaggccaaaatacttggcttgagccaaggagtttgagaccagcttgggcaacataatgagaccccatctctacgaaaaatagaaaaaattagctgggcatcgtggtgcttgcctgtaggtgcagttactcaggaagctgaggcaggaggatcgcttgatcctccccagggaagtcaaggctgtagtgagctgtgatttcaccactgcacaactccagcttgggtgacagagtgagaccctgtctcaaaaaaaaaaaaaattcaaactctttaattttgkaattctacttctaggaatttggaagttaaaaaaaaagatggatataaggtaaaaataaaaagttggtgagataatagttcataaatatggaacattcatttgcagaat

SEQ ID NO: 109494 - DNA, 508 bp, Homo sapiens
gttgttaatgttactgaatatcagtggtttggtctaggtcctgctgctggctgcacagcaagccaatgactgagacaagtattgccaaggaagaaggctttattgggtgctgcagtcgaggagatgggagatcagtctcaaatccatctccctgaccgactaaaattagggctttatatagcagggaagaaatataacaatgtattggaaaacaggaactagagaagtgtaaggaaacaaaatgaggggtctggcatctcattggatgcagtgatctggtgagtttcagttctttgatactttttgagaagcctggggggtcctttcttgaggaaggaactcagataaaacaaacgtaagctttaagaccagagggtcagtttctatgtttatccaaaataactgtctgtgtgaggggtctccaactcccacactgtggaccagtaccagycattggcctgttaggaaccaggctgcacagtaggaggtgagcagaaggcaagccagt

SEQ ID NO: 109495 - DNA, 496 bp, Homo sapiens
gtaccatttttttttttttaccttttatatgatatctttactgtatcttttctatgtttagctacatagatccttaccattatgttccagtttgtctacagtattcagtacagaaacatgatgtacaggtttgtagactaggagcaataggctatcccatagtgccttgatgtataatgggctatgtcctctaggtttgtaagtacactctgagatattcacacaacaaaatcacckgaccacacatttctcctaatgtagccccattgttaagcaaggcatgactgtatttttaaaccaccacactgtcccttgggacaagctttggagcaaatgccattttcatggccccatctcccatgtgtgctgaggcaaacgtatcctgtgtctcctcccttcacctccctgccttcagggtgtttatttctaatcaccgaaatgaaatgaataacaaagatttaatatcaataagatgcaaaaagaatgggtaaatttt

SEQ ID NO: 109496 - DNA, 592 bp, Homo sapiens
aattttagtactttggaactttgaaatttatccagaataacagttttatatttccaagcacagatggtcattgccagaaaaaataaacttaatttccaggttattttgggccactgtggctaggttcagattttttgttgagttgaagtggaagaaaaggaaaaagaaagtggtcatacaaatgttagacctagcatcctgggaaagttgtgatrtgtgtgtgtgtgtgtgtggacgtttatgtgtgatgtgtttttaagcaattgtagttttattaaaaccttatgacaaagggaataggaagctgtataatttttggagagactattcacttatttttgtgacccaaggtagttcattagaaaaagcattttcttcaaaatattattatgaatcttgaaaaatctgaatttgccaatttgtagtcaaaaatacttttgccaactgaccatagaaggtcattgagtttactaaggtgaggattcccagtggaaaaataggtattggaggaaatatactttggaagtatatatagatagacataggcatatcatttataatttacatagggtaaagccaacatttctgatat

SEQ ID NO: 109497 - DNA, 569 bp, Homo sapiens
ttagttcaacaactacggaaagcagtttggagatttctcaactcttgaatagaggacagataatccactaggccagcctgggaagaagtcttgtttgggaaatctaggaggccttcacttttggtgacacctacctgaattacaagtccagtatctgcaaggaaccaaccagttcccaatctaggaatgaatgtactttgcaaagtacattttgctgagtaaagataaacatcacaatctgaatatcactgacaatagcsgaaacttaccagttacatcctacattcaaggcccttagtgtaaattatttcctttaatcctcaccacaatttgataaaatagattaagatgccatgcaattggaaggattgctactattaactctgtcacacagatgagaacatggagaacaaaaatagatttagtgatttgcccaatgtcacactgaaagtggagaaaggtaggttggatataggttttctgattctagaactgaaaactttcaccaatgggccatgttccctctggcatctctgcaatcatgtggcttcacaaccttgagacccagg

SEQ ID NO: 109498 - DNA, 536 bp, Homo sapiens
ttgagcacctgctgtatgccaggcattacagaaggcagtaaaactgaaataagttagcttgatttttctgcagcttgtacattggagcattttgtttccatcaacctatgcattctcctacaagtatttattgagtgctctgtaggaaaaaggcactctgcacagaggatttcaaccaagggtgatttttgcctctgaggggacattaggcaatatttggagccttctttttgtcatcgctgtcacaagtgagggtgggatgagggtgttataccggcatctaatgggatgctgctcaacatcctaaaatgcayagcacaggaagccccacgacggagaattatctggtccaaatgtcagtagtcgcaaggatcctgcctctgccctcagtgagcttcagtctagtcggggttacagaaaggagactgacaagtgcagcatagcgtgctatgatggtgggagtgcaggctacacaagtacagaagcagcagccttaactcagatgtcagctgccagcagaggctttaagaaacaga

SEQ ID NO: 109499 - DNA, 571 bp, Homo sapiens
catgaataatggagaccagcatgtatgctaccaactagaaaaagcaagaagttcagtttggctggaatacaagtgcaagcagtgtctggtgcgttgggatgstagattgcagttggaataaattaatatctcactgaggatcttggaccttattatatggtgtggtagtgataagcccctgcaagaatcagagctccctatatccctgttgtgattctgggcttggctaatggtacgttagcaaatgtgatacaagcaaagcctgagaagtacttccatattggggcttggcttctcttgctgcccttaggaaccctaagatcacatatgaagaagccaaggcttagcctgccagaggatgagagaccaggtacaccaaagacaagctgtcctcaaaaggctcccataccaaccagcctacccaccttcacacccatgaatgaagccatcctagacacaccagccccagcagaggtgacccacaccagaaggatctaactaaccctcagaattatgataaataataattctttgttttagtccactaagttttagagcggtttagtatgca

SEQ ID NO: 109500 - DNA, 534 bp, Homo sapiens
tttttaaagctttgcaagaaaacaacatgcagcaaagagattagccatttggtgaccaaaggctcagccaggggaaagcgtatgtcaggaatgtagacagtatgcgacggacagacatggtgctatttggaataggagttcccaagaaggatctcttacatttgatccatgaagcaacaggtgttcttggaaataggatcctaggtttggctcagaccacaacctctgtcaaaatgagaacaaaggattggaaaaatcaccaccamactgacaattcccattaacctctggcatggaacgacacactcttatctgcccacaactgctgcccagtctgcagcctgaagcttgtctccatttacaggctgtggaattaccctagcctctgaaaattcaccaagagcaaatactgctgcaacctgcacttctttggtgactaagacccccctaaggctcagagggaaggcttgcagatatatgtttatcttgatgagcacatatcacattgcctgggcttttcaatccaggccagta

SEQ ID NO: 109501 - DNA, 534 bp, Homo sapiens
tttttaaagctttgcaagaaaacaacatgcagcaaagagattagccatttggtgaccaaaggctcagccaggggaaagcgtatgtcaggaatgtagacagtatgcgacggacagacatggtgctatttggaataggagttcccaagaaggatctcttacatttgatccatgaagcaacaggtgttcttggaaataggatcctaggtttggctcagaccacaacctctgtcaaaatgagaacaaaggattggaaaaatcaccaccacactgacaattcccattaacctctggcatggaacgacacactcttatctgcccacaactgctgcccrgtctgcagcctgaagcttgtctccatttacaggctgtggaattaccctagcctctgaaaattcaccaagagcaaatactgctgcaacctgcacttctttggtgactaagacccccctaaggctcagagggaaggcttgcagatatatgtttatcttgatgagcacatatcacattgcctgggcttttcaatccaggccagta

SEQ ID NO: 109502 - DNA, 534 bp, Homo sapiens
tttttaaagctttgcaagaaaacaacatgcagcaaagagattagccatttggtgaccaaaggctcagccaggggaaagcgtatgtcaggaatgtagacagtatgcgacggacagacatggtgctatttggaataggagttcccaagaaggatctcttacatttgatccatgaagcaacaggtgttcttggaaataggatcctaggtttggctcagaccacaacctctgtcaaaatgagaacaaaggattggaaaaatcaccaccacactgacaattcccattaacctctggcatggaacgacacactcttatctgcccacaactgctgcccagtctgcagcctgaagcttgtytccatttacaggctgtggaattaccctagcctctgaaaattcaccaagagcaaatactgctgcaacctgcacttctttggtgactaagacccccctaaggctcagagggaaggcttgcagatatatgtttatcttgatgagcacatatcacattgcctgggcttttcaatccaggccagta

SEQ ID NO: 109503 - DNA, 529 bp, Homo sapiens
ctgagttgtttgccttcaaaagttgctaaaaagaaatactcagaaattttctgaggccagaggaccacttcaaaacagctatacttgttgaatgttgtttcactccaactaaaattatatattgtctcaaaatggtgtgctcggaaataattggcaccatcttgcccatttctgrgatcaggtcaaggcagtattctaaagagtggtcggcagccatcttatactaacattcatcctggagaggattaaaacatcaacaagatgtaattgctttattgacgcacccctcattccacggaaccctcaccaccacactgaggtgtagagaagcacttccctagatgaaatggaagacacagagtttgaaccaaggtctgtatgactccaaaaatttctcttttgactctgctatactcacagacagcatgaagagaacttctaagcttctggagcaagggaagagcttagatacagtttatcttcattttgcaagaattaaaaacaatctccgatatcaacccttttccat

SEQ ID NO: 109504 - DNA, 529 bp, Homo sapiens
ctgagttgtttgccttcaaaagttgctaaaaagaaatactcagaaattttctgaggccagaggaccacttcaaaacagctatacttgttgaatgttgtttcactccaactaaaattatatattgtctcaaaatggtgtgctcggaaataattggcaccatcttgcccatttctgagatcaggtcaaggcagtattcyaaagagtggtcggcagccatcttatactaacattcatcctggagaggattaaaacatcaacaagatgtaattgctttattgacgcacccctcattccacggaaccctcaccaccacactgaggtgtagagaagcacttccctagatgaaatggaagacacagagtttgaaccaaggtctgtatgactccaaaaatttctcttttgactctgctatactcacagacagcatgaagagaacttctaagcttctggagcaagggaagagcttagatacagtttatcttcattttgcaagaattaaaaacaatctccgatatcaacccttttccat

SEQ ID NO: 109505 - DNA, 533 bp, Homo sapiens
gttgtatgtttcctctatagtcacattatamcaaattggacttgttatacaaatggatcttcgatttcatttttataataaattgtttatatttagtaaataaataactacagttgacccatgaataatgtgggggtgagggactctgatccctgtgcagttgaaaatctgagtataacttttgattccttcaccttagctactaatagcccacaattgactggaagccttcctgataacataaacagttgatgaacacctattttgtttgtgctgcattattatatactgtgttcgtacaataaaataagctagagaaatgaagctgttagaaaggaaatcatcaggaaaaacatattgacttttcataaagcataagtagtcctgacaaaggtcttcatgatcttcaggttgattaggctgaggaggaagaggagaggtggatcttgctgtctctctgttgcagaggcagaagaaaatctgcatataagtgaatccctgcagttgaaacccttgctgttcaagggtgaact

SEQ ID NO: 109506 - DNA, 533 bp, Homo sapiens
gttgtatgtttcctctatagtcacattataccaaattggacttgttatacaaatggatcttcratttcatttttataataaattgtttatatttagtaaataaataactacagttgacccatgaataatgtgggggtgagggactctgatccctgtgcagttgaaaatctgagtataacttttgattccttcaccttagctactaatagcccacaattgactggaagccttcctgataacataaacagttgatgaacacctattttgtttgtgctgcattattatatactgtgttcgtacaataaaataagctagagaaatgaagctgttagaaaggaaatcatcaggaaaaacatattgacttttcataaagcataagtagtcctgacaaaggtcttcatgatcttcaggttgattaggctgaggaggaagaggagaggtggatcttgctgtctctctgttgcagaggcagaagaaaatctgcatataagtgaatccctgcagttgaaacccttgctgttcaagggtgaact

SEQ ID NO: 109507 - DNA, 533 bp, Homo sapiens
gttgtatgtttcctctatagtcacattataccaaattggacttgttatacaaatggatcttcgatttcatttttataataaattgtttatatttagtaaayaaataactacagttgacccatgaataatgtgggggtgagggactctgatccctgtgcagttgaaaatctgagtataacttttgattccttcaccttagctactaatagcccacaattgactggaagccttcctgataacataaacagttgatgaacacctattttgtttgtgctgcattattatatactgtgttcgtacaataaaataagctagagaaatgaagctgttagaaaggaaatcatcaggaaaaacatattgacttttcataaagcataagtagtcctgacaaaggtcttcatgatcttcaggttgattaggctgaggaggaagaggagaggtggatcttgctgtctctctgttgcagaggcagaagaaaatctgcatataagtgaatccctgcagttgaaacccttgctgttcaagggtgaact

SEQ ID NO: 109508 - DNA, 533 bp, Homo sapiens
gttgtatgtttcctctatagtcacattataccaaattggacttgttatacaaatggatcttcgatttcatttttataataaattgtttatatttagtaaataaataactacagttgacccatgaataatgtgggggtgagggactctgatccctgtgcagttgaaaatctgagtataacttttgattccttcaccttagctactaatagcccacaattgactggaagccttcctgataacataaacagttgatgaacacctattttgtttgtgctgcattattatatactgtgttcgtacaataaaataagctagagaaatgaagctgttagaaaggaaatcatcaggaraaacatattgacttttcataaagcataagtagtcctgacaaaggtcttcatgatcttcaggttgattaggctgaggaggaagaggagaggtggatcttgctgtctctctgttgcagaggcagaagaaaatctgcatataagtgaatccctgcagttgaaacccttgctgttcaagggtgaact

SEQ ID NO: 109509 - DNA, 624 bp, Homo sapiens
atatgcccagtctcacaaaagaggttattgctgtggagagtactggaggcaggagggagtgctagagttggggtaaaccacagcagctcatttcacttgataactgtcaggcctcagagagagaagtttcactgacatgagggaataagatgtgattaagttgcatatagatgctttggctaattttttttgagacagccagttctttgatatgatagytgttttataaaagtcctttacagtgtaagataatacaccaaacttagttaattttagaagcaatcatattataaaattcattctgtgaataccaaaattctctttttcaataaatactgcactgattttgaaattaaatatgtattcatatccagcaagtctgtggtaattcagtgttttcttttttgataaatattttgatatcggaagcttattcgacatggtttatgtgttttatggaccgccttgcatgagtggatcaaggagctctaattgaaggccaaatgaggggacaggagaaatgtaggtgctgcagtagcccatgtgatcatgggaaaaatgagtagtttgattagctgtcatttcataagtgtgtataagagctgatcaatgtagaacactttc

SEQ ID NO: 109510 - DNA, 572 bp, Homo sapiens
tttagcttcttaatcagaatatccattttcagttgatctgtttttaagtctccatggcaatcaaagtctkcatttccaaatacatttaacatatttattgtcatttccaggagtttcttatatctgcagaaatgtacagaattagtaagtcaactatttttgagtaaatatttaataattgtttaaacatctgttatggcatatcaaagaaacaaatctataaactatgttcctttcagtttcaactgaacatagtttgaaagcattctatatgaaattataatcttaaataatatgaagaacaattttatggcatatatggcaggtaaagtgatattatagccatacagtgtttttgttttgttttttgttttgttttgagatggaatttcactcttgttgcccaggccaaagtgcaatggtgtgatctcagctcactgcaacctctgcctcctggactcaagtgattcacctgtctcagcctcccaagtggctgggattacaggtgtgtaccaccacgcctggctcattttgtatttttagtagagacggggtttcactggtcagactgg

SEQ ID NO: 109511 - DNA, 572 bp, Homo sapiens
tttagcttcttaatcagaatatccattttcagttgatctgtttttaagtctccatggcaatcaaagtctgcatttccaaatacatttaacatatttattgtcatttccaggagtttcttatatctgcagaaatgtacagaattagtaagtcaactatttttgagtaaatatttaataattgtttaaacatctgttatggcatatcaaagaaacaaatctataaactatgttmctttcagtttcaactgaacatagtttgaaagcattctatatgaaattataatcttaaataatatgaagaacaattttatggcatatatggcaggtaaagtgatattatagccatacagtgtttttgttttgttttttgttttgttttgagatggaatttcactcttgttgcccaggccaaagtgcaatggtgtgatctcagctcactgcaacctctgcctcctggactcaagtgattcacctgtctcagcctcccaagtggctgggattacaggtgtgtaccaccacgcctggctcattttgtatttttagtagagacggggtttcactggtcagactgg

SEQ ID NO: 109512 - DNA, 572 bp, Homo sapiens
tttagcttcttaatcagaatatccattttcagttgatctgtttttaagtctccatggcaatcaaagtctgcatttccaaatacatttaacatatttattgtcatttccaggagtttcttatatctgcagaaatgtacagaattagtaagtcaactatttttgagtaaatatttaataattgtttaaacatctgttatggcatatcaaagaaacaaatctataaactatgttcctttcagtttcaactgaacatagtttgaaagcattctatatgaaattataatcttaaataatatgaagaayaattttatggcatatatggcaggtaaagtgatattatagccatacagtgtttttgttttgttttttgttttgttttgagatggaatttcactcttgttgcccaggccaaagtgcaatggtgtgatctcagctcactgcaacctctgcctcctggactcaagtgattcacctgtctcagcctcccaagtggctgggattacaggtgtgtaccaccacgcctggctcattttgtatttttagtagagacggggtttcactggtcagactgg

SEQ ID NO: 109513 - DNA, 572 bp, Homo sapiens
tttagcttcttaatcagaatatccattttcagttgatctgtttttaagtctccatggcaatcaaagtctgcatttccaaatacatttaacatatttattgtcatttccaggagtttcttatatctgcagaaatgtacagaattagtaagtcaactatttttgagtaaatatttaataattgtttaaacatctgttatggcatatcaaagaaacaaatctataaactatgttcctttcagtttcaactgaacatagtttgaaagcattctatatgaaattataatcttaaataatatgaagaacaattttatggcatatatggcaggtaaagtgatattatagccatacagtgtttttgttttgttttttgttttgttttgagatggaatttcactcttgttgcccaggccaaagtgcaatggtgtgrtctcagctcactgcaacctctgcctcctggactcaagtgattcacctgtctcagcctcccaagtggctgggattacaggtgtgtaccaccacgcctggctcattttgtatttttagtagagacggggtttcactggtcagactgg

SEQ ID NO: 109514 - DNA, 516 bp, Homo sapiens
cagacttcagaactgtcagaaaataygtgtgctgtgttaagttaccaagtttgtgtcaatttgttatagcagccttaggaaaccaatacaaatggaaaataacataccttgcaaaaccaaccaaaggaaagctggaataactatatattcatctctagtattgcttcttacctgggaagcagtcatttgaaagtgataaaaggaaaagaaagtgcagctgtttttctgctctgtttgtcttttctcctagaaagtaaggccatgggatcacaaagttatctgtaagcagctttttagtgtccattcttctccttcttgggggccaagagccagccttaatagcagcagaggacactctttagttctggagacttcatttctgtgtcctagttactatggaggagatatcttaagctcctaacttcagttgtggctccagacatagcagcaagatgactgactctttattgtcctggagcaaggtccaagccatagtttcctggcctaatgcttact

SEQ ID NO: 109515 - DNA, 516 bp, Homo sapiens
cagacttcagaactgtcagaaaatacgtgtgctgtgttaagttaccaagtttgtgtcaatttgttatagcagccttaggaaaccaatacaaatggaaaataacataccttgcaaaaccaaccaaaggaaagctggaataactatatattcatctctagtattgcttcttacctgggaagcagtcatttgaaagtgataaaaggaaaagaaagtgcagctgtttttctgctctgtttgtcttttctcctagaaagtaaggccatgggatcacaaagttatctgtaagcagctttttagtgtccattcttctccttcttgggggccaagagccagccttaatagcagcagaggacactctttagttctggagacttcatttctgtgtcctagttaytatggaggagatatcttaagctcctaacttcagttgtggctccagacatagcagcaagatgactgactctttattgtcctggagcaaggtccaagccatagtttcctggcctaatgcttact

SEQ ID NO: 109516 - DNA, 452 bp, Homo sapiens
cacatgggctcctaaatataatttttcactaagtatgtcttggtttggtttctctcagagccagaccctcaggaaataataagaaaactaatagtttagttaggagggaatctcatgaaacaccagtagtaaagggagagatgaaacaaacaagagcagccagaaaacagagggtgttgtcaagaagcttaccactgggagttaatggagcataatctcatttacaatctctgagaaccacatagatttgtacctcaaaaatatcccaccagaggcaagggagtctctgccacttatttattgagagcttctcttaggacgcattaattttctactgcgtcagtctgccatgcrcagacgcagaatgggcttgcccagtagaaaaaaattctttatgcagagaagcagatgctgacatatgaagttgaagttaggcagaaaacactattgta

SEQ ID NO: 109517 - DNA, 453 bp, Homo sapiens
agaatgtttatgtaacttctccaaggagagttagcaggaggaggagccaggttttataccactttggccttatgacttggaaatgtggatcacccaaaactcatttctgctttgatttgtattttcctatggtctactggttgaagggtatttaaggagtagggaaaaatggggaaatacatttgattttctttagtcggatattgaaaagaaataatttctagtgtctctaagcacattgcttgggctgtgggagctaaggcacagtaggaagagttctgcagatgccaaagatgagatgcaggtatgagttttattagtcacagcagaaaataagtcacagttagctccaccatagaacctttaaatacattttactgtttggggccyggccctgagtactaggaaccaatgttcccctctgcaagtagacaatcttctgagttcctgatg

SEQ ID NO: 109518 - DNA, 560 bp, Homo sapiens
tcatgttttctttcatgctgactttacttatatatgtgatttacctggcagctttaattcatactgtattttttcttagaaattttccctttaggcccagcatggtggcttatgcctgtaatcctagcacwttgggaggccaaggtgggcagatcacaaggtcaagagattgagaccattctggccaatgtggtgaaactgatctctactaaaaatacaaaaattagctgggcatggtggtgcatacctgtagtcacagctacttgggaggctgaggcaggagaatcgcttgaacccaggaggcagaggttgcagtgagccgagatcgcgccattgcattccagcctgggcgacagagcaagactccatctcaaaaaaaaaaaaaaaaaaagaattttttcttttaacatacacattagtatctttggaagtatccaaaacagtttaatgccagaaattgatctagcagtgacttgaaagggctaaggtttaaatctcagcaataacacaccccagttctgacagacagggtggtatgtcactagaactggtagcttctg

SEQ ID NO: 109519 - DNA, 560 bp, Homo sapiens
tcatgttttctttcatgctgactttacttatatatgtgatttacctggcagctttaattcatactgtattttttcttagaaattttccctttaggcccagcatggtggcttatgcctgtaatcctagcactttgggaggccaaggtgggcagatcacaaggtcaagagattgagaccattctggccaatgtggtgaaactgatctctactaaaaatacaaaaattagctgggcatggtggtgcatacctgtagtcacagctacttgggaggctgaggcaggagaatcgcttgaacccaggaggcagaggttgcagtgagccgagatygcgccattgcattccagcctgggcgacagagcaagactccatctcaaaaaaaaaaaaaaaaaaagaattttttcttttaacatacacattagtatctttggaagtatccaaaacagtttaatgccagaaattgatctagcagtgacttgaaagggctaaggtttaaatctcagcaataacacaccccagttctgacagacagggtggtatgtcactagaactggtagcttctg

SEQ ID NO: 109520 - DNA, 560 bp, Homo sapiens
tcatgttttctttcatgctgactttacttatatatgtgatttacctggcagctttaattcatactgtattttttcttagaaattttccctttaggcccagcatggtggcttatgcctgtaatcctagcactttgggaggccaaggtgggcagatcacaaggtcaagagattgagaccattctggccaatgtggtgaaactgatctctactaaaaatacaaaaattagctgggcatggtggtgcatacctgtagtcacagctacttgggaggctgaggcaggagaatcgcttgaacccaggaggcagaggttgcagtgagccgagatcgcgccattgcattccagcctgggcgacagagcaagactccatctcaaaaaaaaaaaaaaaaaaagaattttttcttttaacatayacattagtatctttggaagtatccaaaacagtttaatgccagaaattgatctagcagtgacttgaaagggctaaggtttaaatctcagcaataacacaccccagttctgacagacagggtggtatgtcactagaactggtagcttctg

SEQ ID NO: 109521 - DNA, 524 bp, Homo sapiens
ttgtgcattgattttgtatactgcaacattaccagatatatcaaatctgagaggtttttgggggagttaytaggtttttcaagatgtaagattatatcatcagaaaagagataattttatttcatgtttgccaatgtggatgccttttctttctcttgtctgattgctctgtctaggactttcagtactatgttagataggaggagagaaagtggacatccttgccttgttccagttcttagagaaaaggctttcaactttttcaacatttttcaaatgtattttgtattctatgaattcttcagttccagaatttctgtttggttcttacaaaaaatctatctctttgatgagtttttttttttttttggattttccagaattatcttgtagcttactgagcttcttaaaatcaatattttgaattatttgggattttgaagacttcttttgattaagatctattgctggagaataattgcatttttctggagatgtcatatttctttgctttttcatgtttc

SEQ ID NO: 109522 - DNA, 524 bp, Homo sapiens
ttgtgcattgattttgtatactgcaacattaccagatatatcaaatctgagaggtttttgggggagttattaggtttttcaagatgtaagattatatcatcagaaaagagataattttatttcatgtttgccaatgtggatgccttttctttctcttgtctgattgctctgtctaggactttcagtactatgttagataggaggagagaaagtggacatccttgccttgttccagttcttagagaaaaggctttcaactttttcaacatttttcaaatgtattttgtattctatgaattcttcagttccagaatttctgtttggttcttacaaaaaatctatctctttgatgagtttttttttttttttkgattttccagaattatcttgtagcttactgagcttcttaaaatcaatattttgaattatttgggattttgaagacttcttttgattaagatctattgctggagaataattgcatttttctggagatgtcatatttctttgctttttcatgtttc

SEQ ID NO: 109523 - DNA, 524 bp, Homo sapiens
ttgtgcattgattttgtatactgcaacattaccagatatatcaaatctgagaggtttttgggggagttattaggtttttcaagatgtaagattatatcatcagaaaagagataattttatttcatgtttgccaatgtggatgccttttctttctcttgtctgattgctctgtctaggactttcagtactatgttagataggaggagagaaagtggacatccttgccttgttccagttcttagagaaaaggctttcaactttttcaacatttttcaaatgtattttgtattctatgaattcttcagttccagaatttctgtttggttcttacaaaaaatctatctctttgatgagtttttttttttttttggattttccagaattatcttgtagcttactgagcttcttaaaatcaatattttgaattatttgggattttgaagacttcttttgattaagatctattgctggagaataattgcrtttttctggagatgtcatatttctttgctttttcatgtttc

SEQ ID NO: 109524 - DNA, 327 bp, Homo sapiens
gaacaacaatctaaattcaatggtgagacaattggctgaaaactctacgggatttcytaaattaacacaaaacccagaggccccagcaggtggccaagtttgatattcaaatcattaacatttggcatgtggagtttccattaggacaagtttaccacatgatggacaatctgtgtagatttgcagatgtgccgtgcgtggccatctaacctgtgtggagagaataattcccagcaatctccacctgactattgctgaaggcaatgtccaatcaaagtgcagagctcagagaataaatgagttgctttgacaggaaattccaacagc

SEQ ID NO: 109525 - DNA, 437 bp, Homo sapiens
ctagccttgctgctccctgttggaggtagaaaaggatgcttcagaaaatacaaggtgccacactcttaaaatgaacacttccctaaataagttggaagcatttgggtaaaatggcacaaaacactttggagaagcacagtttgatttcagtgtgcaaaagatgtaaaaactaggagaaggtaaatatgttcttatttcccaccttcaatatacggtacttactactaaaatactaactatactaaattgcctcacacttcacgtttctccttagtgagggtaaagatagcaaaaaatacttgctaccaagatttggccatggagtactgtaatattttgcactccagatgaggctgcaccactrggctatctcatgcccattaacaattgcacaaggctcaactaaattaatgatgttcctgagtcagcctggaaac

SEQ ID NO: 109526 - DNA, 632 bp, Homo sapiens
aacatttttgtaaatacaaatcaactcataaacctcacattgacgtcaaagaaagatrtccttcacttttagtttggtttggtttcttgctgctgtttatgaactgatttcactgtaaaattcccatgagagccactgtccttatttaatctaatgtttttcctggctacatgggttttattttttatctcttagagatccttgaaaaatatttttgaataatttttatattgaaatttaaagcagcatcactgaaacaagtcaggacatatttgtagtagatatttttaaaatatcttttaacagaaatgagatactaaaaaactcagtataagttgtgaacttcattataaattgtacatttttatagagggaaaaaaatcacaagaaggcagaacccaaaagatatagtttaaagtagtataaattaattaaagagaaactgacaaagtatacattgaggatagcaggaaaggtcaagaaaacacggcaaatgaaatacaatcatgcttgaaagatttatttaaaagtattttcatataaaaaataagaaaaattaacatttctacaataaaaagtggaccctaagtgaaatttatattctattgtaattttgcaggccacaaatttgt

SEQ ID NO: 109527 - DNA, 486 bp, Homo sapiens
aatccattataagggctaataatcttcagatttggaatactttgacattcatttttaagactcctggttatttctataatttacttactataatgtacttaccactttaaaatcaagccatccttatgtctctcacacttttttgtctagcccatttattgtttatctctctggctatgaagctcacaaatgctaagtaaaatcacccttttcttagagataacattgatgctgtgatagaaaacaatgatttaaagcactcacagcttgtaaaactattatctggagttgtttatcacttacaagccctgttccagagctaacatagtcacagagatacttactakcattacttggtgtccaaccacataattctgcctgttaatctctaagaactgccaaacaggcaaatcgaatttgaataagaaagtgccaggaaaatctcggtgccaggtcaagtggtaatacaatttataaaaaagttta

SEQ ID NO: 109528 - DNA, 584 bp, Homo sapiens
agtctagtatggtcaaacccaactacttgtacctatgatggtgattttgttttgtttttaatgtttctgccccttacataaacttcctaaaaacacatttaacctataacattattttagtctttaagctcttctttgtagaacccacagggktcttctgaaggatacagaagcaatcttacctaaggcctagaagcagttctgaaggagggagatacgtaaccacaggagcctagttcaccttgaaaatggactctgaagagctgtaactctgcatcccaaagaaaatatccccagggcctcattgctgcctatccccaaattgtgctatacacatgcaagattcagtactacatggtgagaatggaagctttcagaagtgtgagaactgatgatcaaagtgagctgacggcactgggggaaggacacattttcaaagcaggcgaaagcaaccagtgcaaattataccttagaggatctagagttcaaacgatctttactttaacggcaagtgaggagacactacttttgaaaaataattttctttttcacatatacctttattatctttaaattaatgtaaa

SEQ ID NO: 109529 - DNA, 579 bp, Homo sapiens
cccatatctactataacagcatcaaacagaatagtttcatggtctttaaaatctcttgtgctctatctacttatcccctacttcattactccctgagaatcagtgatttttctactgtctttatagttttgccttttgcagaatgtcasatagttaaaattatacagtatgtggccttctggcactgctttctttcccttaacaatatgtgttgtaagtgcctccatgtatttctatagcttgactgttcatttcttttaattttccattgtgtgagtctatataagtctgagggtctgtggcttgtctaatttttatttccctattcaactgttttagaatatcttcaaactatttactcattcatctattaaaggaaatcttggttgctgctaattttttttgcaattgcaaataaagtggctataaacacaaatgtgcaagtttttgtatgatgtaagctttcagtttatttgtgcaaacatttaggagagtgattgctgggtgacatggtaagactgagttaacctttgtaagaaactcccaaattgtcttccaacatggctgtatgcttatttt

SEQ ID NO: 109530 - DNA, 615 bp, Homo sapiens
aaatgcttttctctctaataaacactaaaatgcaatgatattataaattgagtacaattagcctagaaaatgaaagtatcaggaaaaatatgagaaaaatatttttgtttttttctgtaaatattttatcatattctgcagttacataataagcctaaaattggacctataccgtaataaactctaagaatttatagcttctaatgtgatgtaaataacataaagaaaaaatatattccacactgattcaggatatgtgatctcaaatccttatacaggcaaaaatggagaataatgggttaaagcagccagaaaaaaacatgaccaagtctaactgcagtgagaagaatgcatactttaaaacatgaagcaaaaatttctccacctccaccaccatgtccagcttttgttttcctccttgttttacgaataaaggacaagtaatagatgtagagtgaaggctgtttctattctccctgtcatgtattatcctgacgtaatactaacttctaaagaaaggaaaatcacagaagaactggaacaagactgaagtgtttcaggagtttaatttccatgrcaaatgctagataaaactggccccaaatgaagaatgaa

SEQ ID NO: 109531 - DNA, 615 bp, Homo sapiens
aactcacctccttctaaatcatatctaaataagccaagaacccattgggtaagaatgcaaggagtaaagaaatagtgactataatcatcaactgtaaatttggctcgcacctgaaaaagaaaatacagtaaacaatctttctactgccttaaataataatcatgttataaatttttcagtctccttagactcagaggaataccaatttctacctgtagatggaactggatttcaatataaatgacttcattatctttatactatattttatgcacttaaaaacattctggtcgggcgcagttgctcatgcctataatcccagcactttcagaggctgagtgggggcagatcacgaggtcagcagttcaagaccagcctggccaatatggcaaaacgccgtctctaaaaaaaatataaaaattggctgggcatggtggcacatgcttgtagtcccagctacttgagaggctaaggcagaagaatcacttgaaccaaggaggcagaggttgcagtragctgagattgtgccactgcactacaacctgggcgacaaagcgagactccatctcaaaaaaaaaaaaagaaaaagaaaaaaaaaatatatatatacatata

SEQ ID NO: 109532 - DNA, 527 bp, Homo sapiens
aataatgatgttcattaaataaatcacagttaatcatctctgtccttggcagtatatgagctactgacaaattttctgacctaatgaatttaacagactgcaagaagataaagaatgaagtaagctcccaaagctttgtccatttctccaaatatttaattatcagtagttgtaacaagaaaaagggtgcagtctgtaggaacatgaaatcatatgcctcatgactgtcaaagattctgtgtgtgtgtgtgtgtgtgtgtgtgtgtgtgtgtatcagagacaaatttacacaatcccattgcctggagaattccacaacasttattgaaattgatgccctaaagtatcatacgattagcatttggaacttctgttttaatgagtttaaccctttctccctcttcctccttttatatttcctaatctgctccaatctcacccaaaactttatcctaatcttggcagaatcagcgtcgatgactaagcagtcactttccatgtctaagttactctcttatagtgagcta

SEQ ID NO: 109533 - DNA, 606 bp, Homo sapiens
actatacacataaacactttgacattttcaggattccttaataacttctgtctccagcatagtgtcagtattttctgagaaaagttcaaacatcaactatacgaggttttttgtgggacactgacaaaatatctaccaatagatttcccaaatctttttaacagtgcccttaattccactatgcaacacgacgccttctcccagtaggctctaattgtgatgtaagtccccttggaagcagttacactataagccattaaagagatttcttcattcctttacacagattagtttgtgcgtaactaaatgatgtctgaggaccagatactgggacggtcacttttgtttaaaaaaaattgacaaaaggaaggtctagagcttagggcaggaaagaaggtactcacaaaaaggagtttaaggaaaataagtatcagactatgcacatttactgactaaggaaactaagtccaggaaagacaaaaagagaggaaaatcagagatcraaataaatttttgccatttttcagttacctagagcaagtcttactaacactaactgattgatccatccatccattcatttatattcatagaatcaataacata

SEQ ID NO: 109534 - DNA, 524 bp, Homo sapiens
catcaaaactagtgttaaaccatatttagttttcatctgtctygttttagctattttaaaactcacagtacaagattcactatgtctaagtaagcctttaggtttttaagttcctgttagttctcttagagtgcttgcaattttagtctcagaaggagttgaatgtgtgcacattttagctgatgttaatttacaatgattaaatcttttttctctttgggtttgccactattaataactacaacttcaaaaaacccattgaatacaaaatggattgggagagagtctggagtctgcatgatggtagaagcaaccaagagctttctacaataattcaatcgtggtaatggtagccactgactaggctaacagtagagagtatttaatgacaggaatgagatttccctgggaaatctggtgaaatatgatgagagcaaaggaaggaagagggaatagttaaatattatttctagatttagagtttagagacagagggggttatacctctgaaagcaagacctatg

SEQ ID NO: 109535 - DNA, 598 bp, Homo sapiens
aatgtacatttctgtgaacttgcaactgagtgtcaattaatataaattattgctttatctatgttttctgttaatggaataattgcttgcaggtgtgattataaaagtctatcacttaatttattgtttatagtttccctgtctgtgtttgaaatgaccttgaaaccgtgacctttcaattgaggtagtcaatgggttacttcaattacttcatccatttctgcctttccaatcttctgatctttgacaagttattactgtttttcaaggctgtctccctgagctgatgaaacataactgtattatatcttatttttccccctctgttttctgggattgtgtttttcattctttgrgagttataatagtaaatttagtttggaattataaatataatgaatagtaatctcggaaaagacttagaaattttgctaaaaatgtttaacaatctttccctatgaagtgtgcttagacttaatgcctgcttctttactatttatattattgaaatcagtacatgactttcagtctctttttccctcccttttctttgactgttattttatgcatgacaaaattctcttgcttactgctatgt

SEQ ID NO: 109536 - DNA, 550 bp, Homo sapiens
ggttggaggaggtatataggaaacaaataaacaaaacagaaacatatttcatcagcaagtaatatgtactgtgaagaaaataaaacattgtgatctccagagaggaagctggaaaatctacctctgattaggtgattaggaaagaatgctctaaaatgggaccactaatgcaactacctgagcagccatrcattccaagatctgatctggggacagaacgttctaggagtaaaggtcagaaaaaaacaagtttcttctcttgtaattagttagactttagaagacaggccagtggcactggagcatagtatatcaggaacagagaggtaagggatgaatttgaagaagtagggaaaatccagattatgtagagtctgtaggttgaggtaaagattctagtgaagagatataaataaacatacgatatttaagggaacaaaattgcttctgttatcttaaggctgggcaggagatcagagaaaactgttctcttcggagagaggatgcctgagctggattttaaatgaggatgagtcagttggccaagaag

SEQ ID NO: 109537 - DNA, 383 bp, Homo sapiens
tgagaggcaacagacagtaaaagaacaaataacataattataggcagagtgactacaatggagaaaaggaaccaagcaaaagtgcagagtatggtgtttatgtctaaggcagcaggagaggtagatctgagaagggaacatctgagctaagatcagcccaaaggcactggctgagcatggaaagatctagaggaagccatttctgacaaaagcacagcaagtacaaagaccccgaggaaagaagaagtttgatattttgagggaatatgaaaargccacttgggtctaatggaagaaatagctcagaacttaagggaaagatgcacagagctgaaaacgatgaaggaatagaccacagatctggggggcaagtccaagaattc

SEQ ID NO: 109538 - DNA, 557 bp, Homo sapiens
tgtcatccaggttagagactttacagagtccagcagctcctgttctccccattctcccacagccctggacatcagttcttttcatacggctaaagaacctgcatgcctgtcttgctcacaggctgtcatcagtactcagaaatgtttgctgaaagcatccattcatccatctctggttggtcacataaactgcctaggcctagacagcagtaaaagatggcagaatatgtcaaggcttgctgatgggaaaaaaatattacatgttagaaaaagaatattaatgcataaagaacttttcttacctaagcatttgacatctccaactgcataagctgaggcagctctgggtttgttggtgaccagggcaagctctccaaagtactgccccttatggcagcgggcaatctcgacctcctggttcccaccatccttgtttgatttagtctacagcaggcaaagaacatgacctaggctgactccaggatcacagctgggcakgtccagttgcacacacatacactgttctcagcatactctacacaattactgaggaattc

SEQ ID NO: 109539 - DNA, 603 bp, Homo sapiens
aatgtttatatttttgtaaaactttcctattaatatcatttctttagttttttatggggctacactattttattaataagagcacttttattttgcaaaattaagctcttttgttctctacgatctaactgcttttgttcttttcttctggcaaaattaaaagtttaaacaaagatataaatatttaaagtctagtagatatgatattataccaatttagtgagaacaaaagtattcgttctataagtaactgaaacatattctacaaataaaatgtataaacacataagtaggaaagttttattcaataactctttggacttccacaaaaataatgtccatatgcattagaaatttttaaaaatggatgctagaataacatttgtaaatgtgcttataatcatagagtagaaggttaatcagagaaaaactcaaaattcagaggttaagcgataaaacatttgcttttgcaagtattgaccatttctgtctccaaaatctttttrtactttagtgatcaaaaattgcattgtttataaatttgacttggtcttgatctacacaaattttcacacaaacatgcacatataaggttatttttct

SEQ ID NO: 109540 - DNA, 591 bp, Homo sapiens
gtactaattttaatgactttaagatattgatgcaggagattaataaccatactctcacagagggctttagtacacatgctgtttaagagaattttatttcgtagggcaccaaataaggaagaattttctgtaacaatttatttttagatatggctattcttccygtgcttttatatttgtattttataagtttttttcccttacaaattgagattagaaaaaaatatgacttcctagattatattttaagccattgcattataatgttttgttgaaacttactatctgaactgactctcaggcacttagtcttaaacctggaaaacaaatatggaatgtgtttttaattccctcatgaagtctttatgatatttctattcctgcctttatgaagctttccaagatatatttcacctctcaggcaatgatggaactcttaatatttccttctattgctaacgctgaggcgagatgaggtgcagtaagctgggctgcctggggaaatagcatcataaaacatggaggctcaactcatgttctagtctgtggtattttgaaagactctgttattatagcacaacagagttgtac

SEQ ID NO: 109541 - DNA, 533 bp, Homo sapiens
ttatgtgtacatatgcttctatttctctactaattcaataaaacatttactacaactacatttaaaaagttttttttcttagtgccataatattccatttgctttttaatatttttctctcagctttaaaaaattacctttgaaaaagctatttaaatacgttgtttcttatgttaatttttctacctttatttcctgtggaaaaatgaagtatcttttgggaacaatgtaagatagcaaaaataagaaagaaaatagargataaatatattaaatataaataacctataatatgtaactgctaaacaatttatttgctaaataagtaataaatcactaaacaatcaaaacaatagcaagataatagcaatattatacattatatcatatgtattatatgctattttatgcatatatatatacaccagccctttgatttgcttttctctcacttccatgtatgccaattggtatttatatggtacatctccctttatactgccctcattttttagttctcttttttgaggaaa

SEQ ID NO: 109542 - DNA, 642 bp, Homo sapiens
gaagtttgagaaaactaagtaaatggggaagcatgacatgattatgaattagaagacttgagatcatgaagatttcaattatcaccaaatttgtcagtgcrataccaataacaattctagcaagctcttttgtagaagttggaaagctgatttgaaattatatatggaagtgaaaaacacctaaaatgacctaactgatttttcaaaaaaggaacaaagttggaggacttgttctacctgatttctagacttattataaagtcatagtaacagagacattttggcattggtaaaaagattatatatctattaatctatcaatggaacagaatagagtctagaaatagacccacagatacatgatcaattgattgattacaaaggtgcaatggaaatttaatgagaaaaaaatggcttttcaaaaagttgatgcttgatatgaatatgaaaaatatcaacctctacctcacagcatacacaaaagttatcctgaaatggatgaagggcctaaatgtaaaatgtaaaattataaaacttcaggaagaaacacaagagaaaatctttgctaccatggggtaggcaaagatttctcagaccataaaaaacaaaaactataaaagaaaagggattataaaattggac

SEQ ID NO: 109543 - DNA, 511 bp, Homo sapiens
ttgttccacaacatcattatctcttacatcttatttttgtagaaagtagaaaaggggaagaaagaacaagaggaagaaaagaagaagaagaagaagaagaaggagaaggagaaggagaaggagaaggagaaggagaaggagaaggagragaagaagaagaagaagaagaagaagaaagaagaaagaagaagaagaagaagaagaagaagaagaggaaggagacatagtagtggagttgttctaggaccagaaatctccagaaggagcaggaaagtgtctgcaaaattagtgaagaatgacataaaattcactggaggaatatctgagaagaaggaaacttcttcacccaaagaggaagacagggtgacctaagaaatgggtctcgtaactaagtttctgctgcagagtcaggaaagtgtgtgtgcagataggagaactgcagtctcagagggaacaaaggaacatttttataaattagaccaaagctatcatgtatagttgagaggtccat

SEQ ID NO: 109544 - DNA, 603 bp, Homo sapiens
tgtgtctatttgggggtaaaccttattcaaggtttgtattgtctgctgatgagagctcttccttgagaatattaaaataccaatgttagaaggaaaagcacttagttgagccagaagttgtaggtttgcatatttactccactacttcctggtgaggtggcatgagtaaactgtttagtttctaggcctccctttcttcatttgtgaagcagggattataatactgtaactcacagagttctgataagatttaagggaatattatgaatgactctggaatggagccagatgcctaggaagcactcaaagatattaggtaaaatatcagctgacagtagatcaacttggacatgtgtcttcaaattttatatccaaatttcaagatggtaggggacataatggaagagaaaaaagttttagattttcagccaaggaaaaaacgaaaytgaacttgctactggctgggtggctctgaacaaatttctcaccttttctgagtcttatttatttattttttttgtaggtacatagtagctgtatatatttatgagatacatgagatgttttgatagaattcttgcaatgtgacataatgagtcttat

SEQ ID NO: 109545 - DNA, 566 bp, Homo sapiens
tctctatcgctgcaagtataactgcctgtctctgcagatagatcatccgtctccttccagtgaccagcatgtgaaatgatggtcactgtcacttattttgtttcatgaaaggctgcctgttagcacatttgtctgtttctctttcaaccatacttgaacctgcacccccccccccaaaatattaaaatacrttaaatatctgttaaatatcccttctatctgttaaggggaagattatccttcagtaagaggtgatccttggtcacccccaatgttagcattatctgcacattatagagctgtgctgtttaatacagcagctgctagtcatgtgaagattttacatttaaatttattaaaataaaataattcagtttctcagttgcaccagccacatttcaagggcttagtagttgcatgtggctagtgattactccactgggcggcacagagtatttcaattttttcagaaagttctattagacagcactgctatagaagctcaactgagtaaatatatctgttgactaaagaaaaaaaaatcaagcttttagagaattaaagtt

SEQ ID NO: 109546 - DNA, 578 bp, Homo sapiens
ttggatttctataagtgtgtccaatttttcctgaaattttcattgtttttttctttatgctctctatttccttgtgtattagggttctcttagagggagagaagtaatagaatatatatatatacatacatacacacacatatacatatatcagacttgtgggcaggaagcatatagcatgggagaaagatgtcggctgggagcctagacctgtctctctttttcacatttttctgctcagyttatattcactggcagctgattagattatgcctaccagatgaagtgtggatctgccttccccagtccacggactcaaatgttaatctcttttggcaacaccttcacagacacacccaggatcaatactttgtatccttcaatccaatcaagtgacactcagtattaaccatcacaagtccatcccttgtcaacttgaacccatatacatatcctgtgataatacatagtcttcagataaagacaatgataaggtcataattatgcctaacataagacaactatccttcgtacaaccagaaacccaccaatcctcaactcaaatactattacataaa

SEQ ID NO: 109547 - DNA, 333 bp, Homo sapiens
tggcctcccaaagtgctgggattacaggcctgagccaccgcacccrgccctttacttgctatttctgcttcaccctctagtctgacaatttcagggcagcagggaatgtgtctatggcaagggtgtgcaatcttttggcatccctgggccacactgaaaggcgaagaattgtcttgggccacacataaaatacactaacactaacaatagctaatgagagggaaaaaaaaaagaatctcattgttttaagaaagtttacgaatttgtgttgggccgaattcaatgccatcctgggccacgggttggacaaacttggtctacagcattctcagc

SEQ ID NO: 109548 - DNA, 530 bp, Homo sapiens
agatattgcatttttctttttttttttttacaaattaaagttttgtggcaactttatatcgagcaaatctattggtatcattttccaacagcatgtgcgcactcggtgtctctgtgtcacatttagtaattcccacaatatttaaaacattttcattatcatatctgatatggtgagctgtgattagtgatctttgatgtaactattgtaattgttttggggtgtcacawactctgtctatagaagatggcaaactcagatacacattgtacgtgttctgactgctcaactgaccagtttttcccccatctctccccctctgctggggcttccctattccctgaggcataacgatatttaaattaggcctattaataatcccacaatggcctttaagtgtttaaatgaaaggaagagtcacatgtctctccctttcaatcgaaatctagaaatgattaggcttagtaagaaagacatatgaaaactgcaataggccaaaagctaggtctctagtaccaaatagtcaagct

SEQ ID NO: 109549 - DNA, 511 bp, Homo sapiens
ccatgattggtcagaataggtgaggttttgctgcaataacaaacaactcctaaatcttggtaacttcaaacatcagtagttgtttttctcactcatgctacatctgcagggaggtgtggggtgctctgttttccatcaaacttgccctaagactaaggctaatgggggctgcattacctcgagtatcaccaagcagggaacagaaggagaagaatgctagagagtcttgtactaagaattaaatgctccaggctagaagtctaacactgcacctctgcccccagcctcttggccagtactagccacatcccctcccccaccacagggcaaygcatgaagacaggagaattggatacattacaaatttctaccccatggcatttcataaaagagaaaaaaatgcaaatacaaaaatattttaatagaatagaatatatacatttttagaataaagaacagtcctccaaaaaggacagctggtggtctttcaccaatgggcacatttctgtga

SEQ ID NO: 109550 - DNA, 576 bp, Homo sapiens
aatatcaaaattttcctaatgaagctgggtaataaaacttagtatccatggtttgtgttggatttggagagccttaacacgtgaaataagcataagtcattcaaaacattcattcatcaaacacagtcattccacagagatttattattactgtgggctcaaaactgccatggttgctctggtgaatagagtatgcctgcacctctgaagagcttacattatatctaaagaaaaatcatgtaagtgactaaggacaataacgtgtgtgaagtgctgtgaatgagtgatgcacaaagaactgtggggtgacataggaagaaccaatgaatagtgacaagggcagggacaaaagctccactgaagaagtgatctgtgacatggagctgaacctccaagatgagatcttagtgcttttctgcagccctcaacacagccctagtcatccattcaagatccttctgtcttcaaagcctagtttcttcctgcatcttttcctaagtctccaaaaccttttyttctgctctccactttaaaatgatgactttaatttctgtttcaccaagaaaataaaagaca

SEQ ID NO: 109551 - DNA, 569 bp, Homo sapiens
tgccaggtgggatcaccaaggggaagcccatggagctatctctggaaagcttcttcctaactgtacaatagtctggggatgttgttgttacccaaggtcaacaatcaggaaagacagtgggacttggtgagggaagaggcagagaagacattttatctattctttacattctatctaagaccttcagaatgtaagtgtttgctttaataataactcagagtcatacaagaaaagacttttaggaaatgaaagtcctaaatgaacccagttgacagtacaaaatgtaagcacaggtctctattacagaggtacacactttgagctggggtggggctatagacttgagaagagccatacctagtttccgggttaaagtttgtttttgctatgtcttcagtaaatattttagtaaaatatgaatctcaactytcatattcttgtagtattctttcagggtcacccaatcaatgagaatattcatacccaccccagacactgtgtatccaattaatttacctgtattttttcatagaactataaaagtagatttaattattgatttgtttgct

SEQ ID NO: 109552 - DNA, 575 bp, Homo sapiens
atgaatttagcttacatttattttgccagatgtaggtatttatttttgagactttcttctttactaatatgaggatataaagctgcacatttctctgtaagcactgttttagctgtattctataaattttgatatggtataactttattgtcttttagttgaaactatggtttctatttagtttttttggacatataagttatactcaattgtgttaccttttaaatatttgtagattttctggatatttctaatggtttctactttaattctgttgtgatcagaaatactacaattttagtcatataaggttgagtgacacattttatttccggtcataaggtgtatccttgttatcattcaatgtaaatttaaattatgtattcttcaataattggatgtcatgttctacaaattgtaattacaagtcgatttatagtatttttcaaatattctattactaawtttttttgtctagctgttttactaactacttagtgagggatgttaaaattcccaattacaactgaatatgtctctttctacctttatttttcagtcagtttttctttatg

SEQ ID NO: 109553 - DNA, 572 bp, Homo sapiens
gattcttaaactatattaaagaactagcaacatgctttcagaagaggttttctgcttatacacaaacaaagaggagggcaagattaaagaaattaaaaattctgaagaaacacacattacactgatttctagtcaatgggacctgggtctggcatttgtcaattttatacataaaccragtaatactggctttgtgatttgtttaaatacatatcatctttaggagtagatatgtcatttcctttcaaaaggttgtaagaaaaggagcagtacagagaacttacttgaaaatgcaattcaaaatgtatattcttttttaattactcagtgtattatttgaaaagaaaaggacaacagctctcatcattcatccataggtctgtgaatcttttctcaaaataagtttgccattttttgccagcaaaatgcattcagttccaggcaagtggttccacattaacgtgccatttctgttagatgttaagccaaatttttacacactccaagaatgattctgtgaagcacttgtgtgaagctttccaattgtgcttctttaaaatagttcaacaaac

SEQ ID NO: 109554 - DNA, 558 bp, Homo sapiens
ttttatttgtggaggacatactgataatacatagtaagtgacatcccaagttggggagagaagtgaatatctttattttgtgtgaaaatcttaaattctaccaatgatactaaatttcaactcttataaatatgggtccctcttcttcctatttttagtctcctctggcgcagaaaacacaagctgaaaaacttattagaattatttttaaggtaaagattatagtatctgaatgttggtgtaaacctctctcctaaaaagtaaatgcatttgtatttactaatcagctctgaagtacttctctctctccccttacttgaattatttttctagataagtagtgtccaaattaaatttttgtaaaattgcttatgtaggatctcacatattagaatacaattaaagctgtttaaatcagccaccctggaacaataacatttttaataccttttccccagagaaagcactcaaatrcctttataggcttattgtgtatacctttcctgaagactaatttataattcatttaattgcattatcagtagaataatttaatga

SEQ ID NO: 109555 - DNA, 389 bp, Homo sapiens
caccgtctatttgtgtgctctatcgccatctgtcacgatttccccttttgcccattcattgtctgtctcaaatcagataatgaatttagatccatggattcagctacactgccsaccccagagcagacagcagggttaggctggccatgtctttgtctattcacaggaaagagaaggcagggggtcagacaagccaaggattatggaactatacatgtaggcagctgggcaggatttagaggcagtcttagtttagacacacgaggtaaagtcaccagttcgcacttgtctttgttaaaaagcacgataaaattctaagaaacaaatagcaccctgagcagtaatgtttcctgtctgcataatctttgcccaaattatttccccaaatt

SEQ ID NO: 109556 - DNA, 576 bp, Homo sapiens
tggttagcaactatgggactgaagctgcctatgggactgaaggtttcccctcctccctggtcacagcccagcatcctccaggcactggctccccattcctggtcctatccttactgcctggagcaggtggagaggaataggtctgatacctggatatttcaggtctcctgctcagtacagggggcgaggtctctccagggccacttcctatagggagagttctaaaaagaggaaggaatcaccaactcccacttccctgggcaacccccacttgaacgtcctcttccagctagggtaagagaactggggagggcaccctgcccatccctgctcccctcccctcgggtacacggcactgaaggtctttccaaggggagtggtgtggagctgaacagagcatcccagagaggtagggagggcatagtctatacagcaccctctttagcactcagggactttagtgcactgccccacctttaaggaaatgacatcatcatacccatctgacagatggtgaatactgaggsctagagacattcataaaactggtgggagcagacctggaacaaggaccca

SEQ ID NO: 109557 - DNA, 626 bp, Homo sapiens
ctgtatcaggggagactttaagtagaagactgtaactgggagctttcctaattaagtcttacatgaagtgcggtatttattaaagtataagtcataaaatgtgcttacttaaagcttacatgtrtgttattaaaactcaacagttgtttatagcttagaccaactatttttcagggaggagtgcttttataactgatgtttattattgctggggcatgatgataatagaaagccgaccaacttggttttatttttgtttccaaattgcctacagacaatacacccacttattgcctactcttggggaggtgagcagcactttcaccacccttcccttgatgtacatgagcagagtgaaaaggattaactatagggagaccacaaaaaacactgattggaattccagaaatagggtgtgatgaaggcctgaatttggttatttaggagacaacaggaatgtaaaggaagcgatagatttaagaaatgaccagagattaataaatggaatttaaagtaagaaaaatttgagctagaatgacttggaaaatggtgttttaacagaaaagagatttttaaaggagctggtttgtggaggaagacattatactggtagcatgaaacaataa

SEQ ID NO: 109558 - DNA, 626 bp, Homo sapiens
ctgtatcaggggagactttaagtagaagactgtaactgggagctttcctaattaagtcttacatgaagtgcggtatttattaaagtataagtcataaaatgtgcttacttaaagcttacatgtgtgttattaaaactcaacagttgtttatagcttagaccaactatttttcagggaggagtgcttttataactgatgtttattattgctggggcatgatgataatagaaagccgaccaacttggttttatttttgtttccaaattgcctacagacaatacacccacttattgcctactcttggggaggtgagcagcactttcaccacccttcccttgatgtacatgagcagagtgaaaaggattaactrtagggagaccacaaaaaacactgattggaattccagaaatagggtgtgatgaaggcctgaatttggttatttaggagacaacaggaatgtaaaggaagcgatagatttaagaaatgaccagagattaataaatggaatttaaagtaagaaaaatttgagctagaatgacttggaaaatggtgttttaacagaaaagagatttttaaaggagctggtttgtggaggaagacattatactggtagcatgaaacaataa

SEQ ID NO: 109559 - DNA, 563 bp, Homo sapiens
aatggttgaactaatttacacttggagtattttaaatccttccctcagcttgctctgaattaaatttgttctattttcagtacaagtgaatcagtgtgagatttgcatatttatcaaaataaaaggatatatgacaagtaaatgtaatgcagtgtcttgggcgtgatcctggaacagaaaaagaacattagataaaaattaaggaaatctgaatcaactgtgaaatttagttgataaaagtatatcaacgttggttcattagttgagacaaacatagaatactaattcatgtaagatgttaacattaggggaaagtgaatatagggtatatgggaactctctgaactatgggaactatctttgcaattattctgtaagtctaaattattcccaaatgaaatgtttatttaaaaaatattttttcaaaaaatgaraccagaacctaattcccataaaaatactttgaaaagactatatttgaagaataagttgactattaggagtttgctaaatgagctataaatatctgaagatataattaaataggattagataaactaaaa

SEQ ID NO: 109560 - DNA, 567 bp, Homo sapiens
gtagaagagggggaatggatgttggattagcaatcaacagggtctgcccaaataatgaatgaatttactaaatcacagaaacttagctaactttcaagaacttttaaacattttttagtcatttttaataaaaatatttttcggaygctttcataaaaagaagatgctgattatgatgtgaatgttgttaatataggctcctcaataaaatgaaggactatactctgcgttcagtagatttatttcttccctggctaccagctgtcaatcatgctgccagaaatccagtgttgaagctatccttacaaatgtgctcttttctttctgccaacccaaatcaatccaaattattagaatttcatattaagtaataatagccagtaaattcataactgtgtttatttctacatggatacctagtttctttttgcctgtctttgtgatagttatttcacagggctgttttcgcatacttcctgatttttcactacattcaatggtgtgagtagtcagaaatctgatgcccagttaactcagaagtgagagtgagaagtgggaggggggaag

SEQ ID NO: 109561 - DNA, 567 bp, Homo sapiens
gtagaagagggggaatggatgttggattagcaatcaacagggtctgcccaaataatgaatgaatttactaaatcacagaaacttagctaactttcaagaacttttaaacattttttagtcatttttaataaaaatatttttcggatgctttcataaaaagaagatgctgattatgatgtgaatgttgttaatataggctcmtcaataaaatgaaggactatactctgcgttcagtagatttatttcttccctggctaccagctgtcaatcatgctgccagaaatccagtgttgaagctatccttacaaatgtgctcttttctttctgccaacccaaatcaatccaaattattagaatttcatattaagtaataatagccagtaaattcataactgtgtttatttctacatggatacctagtttctttttgcctgtctttgtgatagttatttcacagggctgttttcgcatacttcctgatttttcactacattcaatggtgtgagtagtcagaaatctgatgcccagttaactcagaagtgagagtgagaagtgggaggggggaag

SEQ ID NO: 109562 - DNA, 567 bp, Homo sapiens
gtagaagagggggaatggatgttggattagcaatcaacagggtctgcccaaataatgaatgaatttactaaatcacagaaacttagctaactttcaagaacttttaaacattttttagtcatttttaataaaaatatttttcggatgctttcataaaaagaagatgctgattatgatgtgaatgttgttaatataggctcctcaataaaatgaaggactatactctgcgttcagtagatttatttcttccctggctaccagctgtcaatcatgctgccagaaatccagtgttgaagctatccttacaaatgtgctcttttctttctgccaacccaaatcaatccaaattattagaatttcatattaagtaataatarccagtaaattcataactgtgtttatttctacatggatacctagtttctttttgcctgtctttgtgatagttatttcacagggctgttttcgcatacttcctgatttttcactacattcaatggtgtgagtagtcagaaatctgatgcccagttaactcagaagtgagagtgagaagtgggaggggggaag

SEQ ID NO: 109563 - DNA, 644 bp, Homo sapiens
gtaagtatgatgtcaccacaaaatataaaactggaattagccagatagtacatattaatctataatagttttacatttgtacaggaaaactgccctgtaaaattaaatttttaattatacatttttaattttaattttaactaaattttaaaatgaaactacagtatgccacacccctcttagttttcagagttatttaaatgtgacatagatgtattagtgacaatcctagcacaaagcatatggaaagctcaaaacatttgacttacagcttttgaggcaatggagataattaaaggaacccacaaaggatggtgaagcctccagagattaayaaccatgggactccagaacctcccgcaagtctgaaaggcaagaagaggaaagtgttactagagtgtggagaaacctggaaccctgaaacaagaggcagctgataacaattacatacatgctaaagaccagtcccaaccagagactccctccctgatataatcagaaggattaaattgtattaatgttactataagtaataataacagctaatactaacactaatcaagatattactatgtggcatccactgttgtaagcatctgtcatgcatgttctcatccattcttcagccatgaggggcatattac

SEQ ID NO: 109564 - DNA, 618 bp, Homo sapiens
gatttccttctttgtgaccttactatactctgcacattcttctatcagtccccctgtaagcttttattagtttttctctgtctcttcctgttactctgggagcctgtcctcttatcgtcaatgggaaagatgctgaataaatgtttgtcaaatacactagcctctgcccaaccaactttagttgggaattttcatccttgttaaaagaaagtatttcttggctcatggacctcacacacagattcaaactagctagacttctcctgaaattttcaaggcacatgttaaggtctgtgtttagttatagtgttgacctgtgacatcatcaaaactactacaaatagagctaagtcaatagaatctttgaaagcktaagatcctttttatatttagtaacaccctagccattccaaatgtaacccaccttttagttacatagaatgtgcaagtgtcacaattgtttaggtgtcataacaccaatgaattttatatcatattaaagtaaagccctttcattcaaaattgaccaaagtagagtcaatttaacattttttcaaggcactactctctctctctttttctcctttctctctgtttctctcccctccgccaccccgc

SEQ ID NO: 109565 - DNA, 566 bp, Homo sapiens
atgaataggaattgaccaggtaagtaaaggtgagacagacatttggagctaagagacagggctagggctaagcacagagtacgggtccaggtcgtgtgtgcaaaagccacaggtagttggttcttacagaatagacactttgaagccacatctcctgctacggcttgatccactgtaacaagcaggagaatgacctctatgtatgtgcatgcacgtgtgtgtgtgtgtgtgtgwgagagagagagagagagagagaaagagagagtatgtgtgtgtgtgcgcgcgcgtgtgtgtgtgtgcaggcaggcagtggtggcagcatcatacatttagcagatcttggtagtcagaatatggtctataaaatttgaagacctggatttaaatcctccattacttttagctattggaccttgggaacatgacaaaatgtccctgtgcctcagcttttccacctataagtggggatgatgaaagagcccacttcatggcatcgctgggaggactatattaggtaatatctccttctaacagtgtgtggcaggcacaaagagagctctcaatga

SEQ ID NO: 109566 - DNA, 578 bp, Homo sapiens
aaacactctacagaagcattctgagaaacttctttgtgatgtgtgcattgatctcacagagttgaaagtttatttggattgagcagttttgaaacactcttcttgtagaatctgcaagtggataattgtggagattggaggcatattgtggaaaagcaaatatcgtcatataaacactatgcagaagccttctgagaaacatctttgtgaggtttgccttcaactcacagagctggacctctcttttgagtgaccagtcttgaatctctctttttgtacaatctgcaagtggatatttggagcgatttgaggcctacatttgaaaatcaaatatcttcccttaaaaactacacagaaacattctcagaaattgtttgtcatgtgtgctttcaaattaccaagttgaacctatcttgtgattgagcagtattgaatctctctttttgtggaatcggcaagtggatatttttagccctttgcggactgtggtggaaaaggaattatcttcaaatccattctacacagaagcattcagwcaaacttctctgtgatgagtgcattggtcacacagaattgaa

SEQ ID NO: 109567 - DNA, 459 bp, Homo sapiens
agccaaccaattttcaacaaaaacaccaagaacatacactgggaaagtcagtctcttcaataaattgtgctgtgaaaactgaatatctacatgcagaagaataaaactaggcccctacctctcaccatatacaaatattaactcaaaattgattaaagacttaaatgtaatacccaacactatgcaactactagaagacaacatagggaaaatgtttcagcaacttactctgggcaaatattttatggataatacctcaaaagcacagccaacaaaagaaaaaatagacaacttggattatatcaaamtaaaaagcttctgcacagcaagaaaaccatcaacaggatgaacagaaaacctgtagaatgggagaaaatctttgcaagctattcatttggtaaggttttaatatccaaaatgtacaaggaattcaactcaacagcaaataataataataat

SEQ ID NO: 109568 - DNA, 524 bp, Homo sapiens
gtgactgaggttataggagtgagaaatcttggattatgcaaggactctttgattggaagaaggacattttgagatgagatttattttaagatatagtaaaaaaaaacctagtatacaactttttgtttttttctaaactaacccttttcgggggtgacaggatggggtgtggactagaagcaataccaaacttttaagtatcaaatcttcactcagaagaaaaaaaatgtcttcagggtgaaagaatagctcaaatgcgaaaagcctgatagttatataatttgagagtagggtctggcatattatagaggactcsgagagcctgatccaagcagcctgccattttcatcaccccaggattatctgtaaggacaactttactgtctgtcacctgccaggtctcagcctggcccttgtgagtgccaggaagtttgtgtcctctgttttgccaagcttaattagctctagaaataccctatcaaaggctgtctggcagtgttccattaatggtatggggtgaattc

SEQ ID NO: 109569 - DNA, 595 bp, Homo sapiens
catttctgtggtgcctggtccctccaggtggacccatccatcttcaagcattacatgagaaggatcaatacagctgtggcccaacacctccctaccccacacccccattctacaggcaggcaaaccgagtcccagatggctgagtgacctgtccatgttcacaccactggtgagcagccggggctggaccagtggcytgtacactcacagccctgtcctgagcctgtgttaaagccggcactctatttttctggtgtcatatcagctgctcacatgtctgtccctcactccatgccctacatccccttgttccagggtccggcttgcagtcagcacttttaccatgggaatgcatgccttagtttagcccaccttccctgggaaaaagagctggatatacacacaacatacccatgtctcaattgtctggtatgcaagtgatatgacatatttgtgttaataaatttgtgtctaatatgcatttgtgtgcaggcagtcactcaaactgggacacttttgatctaaataaatactaaggtggatccttggacaactgcaaagccaggactgtcagataaatggtccccttgggcct

SEQ ID NO: 109570 - DNA, 595 bp, Homo sapiens
catttctgtggtgcctggtccctccaggtggacccatccatcttcaagcattacatgagaaggatcaatacagctgtggcccaacacctccctaccccacacccccattctacaggcaggcaaaccgagtcccagatggctgagtgacctgtccatgttcacaccactggtgagcagccggggctggaccagtggcttgtacactcacagccctgtcctgagcctgtgttaaagccggcactctatttttctggtgtcatrtcagctgctcacatgtctgtccctcactccatgccctacatccccttgttccagggtccggcttgcagtcagcacttttaccatgggaatgcatgccttagtttagcccaccttccctgggaaaaagagctggatatacacacaacatacccatgtctcaattgtctggtatgcaagtgatatgacatatttgtgttaataaatttgtgtctaatatgcatttgtgtgcaggcagtcactcaaactgggacacttttgatctaaataaatactaaggtggatccttggacaactgcaaagccaggactgtcagataaatggtccccttgggcct

SEQ ID NO: 109571 - DNA, 595 bp, Homo sapiens
catttctgtggtgcctggtccctccaggtggacccatccatcttcaagcattacatgagaaggatcaatacagctgtggcccaacacctccctaccccacacccccattctacaggcaggcaaaccgagtcccagatggctgagtgacctgtccatgttcacaccactggtgagcagccggggctggaccagtggcttgtacactcacagccctgtcctgagcctgtgttaaagccggcactctatttttctggtgtcatatcagctgctcacatgtctgtccctcactccatgccctacatccccttgttccagggtccggctygcagtcagcacttttaccatgggaatgcatgccttagtttagcccaccttccctgggaaaaagagctggatatacacacaacatacccatgtctcaattgtctggtatgcaagtgatatgacatatttgtgttaataaatttgtgtctaatatgcatttgtgtgcaggcagtcactcaaactgggacacttttgatctaaataaatactaaggtggatccttggacaactgcaaagccaggactgtcagataaatggtccccttgggcct

SEQ ID NO: 109572 - DNA, 502 bp, Homo sapiens
ctttatttccgattctagaatcaacttccctctcctttcatctttagttttttttttttttttgaaaaatataacttatttataaaagcattatatgctcatattagaaaattcagaaatattaaaaaatagaaaaaaaacccactgacactgccccattcacaagttcacctctcagccatcaggtgtgaaaaacattaagttttgtattacccttttgtgcaacagaaagtatcatgcatttttctgttattatggtttaataccatccatctgtccatccattcatccatctacccacccacccatctatatatccatttatttgtttactattcattagagcagttttaggtttacggcaaaatagagtggaaggtacttgggtttcccatttaccccttaccccmacacatgcatagcctccttccttatcaacatctcccaccataggggtacatttgttacaactgatgaacttacacttatgcagcattatcac

SEQ ID NO: 109573 - DNA, 653 bp, Homo sapiens
tgatagacatggtgaggcgggggacctggacccacctctgccaggctctgcaagtgcaggcacagtctctgtaccaggctgatcccagccaagccctgagtcagtgttcttgctttggttccttttcctctagttccaggagctgcagctagcagcggccggcatggggatgacctgaaacacaccaaaaatgagatctcagagctgacccgtctcatccaaagactgcgctcggagattgrgagtgtgaagaagcaggtgaaggggactggagccttccttactcactcctaagggaggggtgaactgcttagcaccccctgccccctccttctcttgagcatccatttcagaatcccttcttcaaatggaggtcctgctctcatccctcacccttagctcccatctgaagtttggaacaattgcagattattttcataaagctgtggggcccagcgtagcaagcctctcagtctcaggttgacaggactccacctggatgtggctgggtctctgctccaggacatggggcaggacagaggagggctcaaccattgagagcatgggagaggtgaagcgaggcccagggacgaactcagggagaaatgctacctcctgaccccagtgtgccaacctggagacggccatcgctg

SEQ ID NO: 109574 - DNA, 555 bp, Homo sapiens
cttcccatataacacagagagtagaattttttttctcaggtttcgccatgtgaactcttagtacagcaaagatgtgagatgcctccatacacatatccccacccatctccactcccgccctcaacgtcctgccaaacggttagccaatctctgcttgaaacttgatcactccccaggtagcctctcccatgtcaggatcatagaaaggtgcttcttatattgagccgaatatgttgtagcttcctgaagcgatattgatggaatttggatatgggattcattggaataggacagcaacccatatgaataaaacattgtgttcccaggcatgcccctccagaagtctttggggaggatgtggcagctaactgcaaacatcatatcaacccatagtgataagacactctgtttccatgcacacccctctattctctctgagaagtttctccccatctcatctatcctggcagcargcctgtcagaggacaggcagaaaagggaaaggcaggcagagagcctgcccacatgtggaggagaagcccacctttcagggga

SEQ ID NO: 109575 - DNA, 574 bp, Homo sapiens
cacaggtgctgaggaaaataagctgagagccaattatgataaatggaagagattccctattctatttttgtagtgaaatgtgtacatattttagccccaatatttttataagtgtggtctttttacctccattcacagagtgcttttaacatattttctatgattaaaactgtcaaaaatgttttaattttcttctgaatgtctcagcaaatgtagatatcatgcagttacaggcattctcaatttcattctattctgatacagaagataactatctaattakaaatagaagctccattaaaaccttttccttcaaattgagatatttcagagcctaataattggcattcaaattaaatcttgtattccttcagatctctcaatgtttatttactcccttctttgcttttatgagaataaatttgtcttttcattcatgagatttacttttaataactgaaattctttacaaacttaaaaatctgaattttgcttaacattttgattagagatttccaactaatttctaataaaatgtaaacaaaatgtaaataatttatgtggtaaatgtaaa

SEQ ID NO: 109576 - DNA, 599 bp, Homo sapiens
tctttatttagtggcacacatagaatgaatgaatcagctgttagttgtggcatacttagtaagtctgatcttgcctatagaaataagatcttaatacttcattctcagaacactttaaaaccyaagccacagtttttctttcaaggatgtggaaagcattcctcattcaaatctgattaatggttttataatgtatgtacctcatttttactagtcattatcttcatgctggattctaatgttctttttgatggtggcgtgttcaatgatagaaacttacagagagaaaattccttccttctcaatttataaacaaacattttaaaagcaacatttttgacgtagtaggaagacatttatatgacatatgcagctactgccttaaattggcaaaaataacaaaagaaaaaattgttatttaatctttaaataatgagtctctatttgctacaaatctataaatattttaaatatatttccttctactgcaataaaaattaaaagacaaccctctgtttaacagcttttgaagatgttaattttataaggaaataaaaaagattgacttgcctcccgaatatccagtgataaactgaacc

SEQ ID NO: 109577 - DNA, 633 bp, Homo sapiens
ttcctcactttcccagcctgtctaacccaaagaccaggactgtcttttcagccactctggctcttcttttatccttacgctgtcaaaacctctaagcaagaacacccagatccacatacctgccttgtccactctttaactgggctgctcagcactgcttggggcaccaggggccatgagggtgactgaggtttcacaggcacctgggatggtcctgtacccagtccccagcctcaggtggtgcttggggctttcagtcagcagcctcctccctttcactgcagcagccctggcacagggcacctggctgtcctcccatttttctctgactcagcctcgcccatctgtcctctgatcatggtgttgaccaagtcagcagggagctgagtctccagagrgtgctttggggactgaccgaagcctctctgctgaggggtccaggtgagtcgctgccccgaccccaccccatttactgtcgtccccagatccatccactccaccccaggctggctccatccagatgcatcccaaagtcatcagttcctttgggtcacccccaccccaactttcccaatgacctctgcaggcacagactccatactgggtttttcccaccagatttcagatcccctc

SEQ ID NO: 109578 - DNA, 605 bp, Homo sapiens
tttattaactatattttctgaccaaaatgtaagaaaactaaaaatgaataatagaaggggtggtgaaatctacacaaatttatagaaattaaatgacatgctctagaacaatgagtaggtaagtgaaaaaattgaaaagtggtaagtttcttgagacaaatgaaaatgaaaataacacrtatcaaaaaaattcgagatacagcaaaagcaattataaaagaaaagcttataacaataaacacctacatgaaaaagaagagatatttcaaataaacaacctaatattacatctcaaagaaccagcaaaacaagaagaaacaaatgttgaaaagtagaagggaagaaataacaaaaatcaaagtaaaaataaataaaaaagagaattaaaaatagaaaatatgaatgatgaagttggttttttgaaataataaactcaacacttcctagtagactaagaaagtaacagagaagagtcaaataaataaaagtagaaataaaaagggagaaatcacaactgctaccacagacatagaaaggatcacaagagactattaagatcaactgtatgtcaataaaatgaaaaacagaaaaaaatagataaatct

SEQ ID NO: 109579 - DNA, 605 bp, Homo sapiens
tttattaactatattttctgaccaaaatgtaagaaaactaaaaatgaataatagaaggggtggtgaaatctacacaaatttatagaaattaaatgacatgctctagaacaatgagtaggtaagtgaaaaaattgaaaagtggtaagtttcttgagacaaatgaaaatgaaaataacacgtatcaaaaaaattcgagatacagcaaaagcaattataaaagaaaagcttataacaataaacacctacatgaaaaagaagagatatttcaaataaacaacctaatattacatctcaaagaaccagcaaaacaagaagaaacaaatgttgaaaagtagaagggaagaaataacaaaaatcaaagtaaaaataaataaaaaagagaattaaaaatagaaaatatgaatgatgaagttggttttttgaaataataaactcaacacttcctagtagactaagaaagtaacagagaagagtcaaataaataaaagtagaaataaaaagggagaaatcacaactgctaccacagacatagaaaggatcacaagagactattaagatcaactgtatgtcaataaaatgaaaaacrgaaaaaaatagataaatct

SEQ ID NO: 109580 - DNA, 564 bp, Homo sapiens
ctgttggcagtgtatgcatatgagagtcaaaatctcaacagtgtactgggccttgttatattattactctttgcaccatctgcggcggtakataatatgtgtaagacttgcaatgcactccaaaacatttgtgcttatatgaacccatgatcttactcatttctccaagtctagggatgagattcaccatctcttctattgactggtttagatataagagtcattaccatgcctgtgagctaggtccagcaataagtcaccattttacctgtggccagatccacatatgacagtcaaaattccaactgtaaactgtgtctactagtgacattcaggaccttaactgcgggctctatgtgtgagattgacaattttaactgttggctatgtgctgggctccggaatgacatgctctgtaccaccaaagggcattatagaatatgcataagcttgctcatactttgccatcttaccggaagcaggaggctgaagacattatacattgtcataaatccagctaaaagagtcaaaatctcttctattggttgtgtccatgtatgatag

SEQ ID NO: 109581 - DNA, 564 bp, Homo sapiens
ctgttggcagtgtatgcatatgagagtcaaaatctcaacagtgtactgggccttgttatattattactctttgcaccatctgcggcggtatataatatgtgtaagacttgcaatgcactccaaaacatttgtgcttatatgaacccatgatcttactcatttctccaagtctagggatgagattcaccatctcttctattgactggtttagatataagagtcattaccatgcctgtgagctaggtccagcaataagtcaccattttacctgtggccagatccacatatgacagtcaaaattccaactgtaaactgtgtctactagtgacattcaggaccttaactgygggctctatgtgtgagattgacaattttaactgttggctatgtgctgggctccggaatgacatgctctgtaccaccaaagggcattatagaatatgcataagcttgctcatactttgccatcttaccggaagcaggaggctgaagacattatacattgtcataaatccagctaaaagagtcaaaatctcttctattggttgtgtccatgtatgatag

SEQ ID NO: 109582 - DNA, 563 bp, Homo sapiens
ttaagtatgtcatgtcaccatctccyggcctgtaggattttcactgaagagtccactgtcaaacatattggtacttgtttgaatgttgttttttttctattgctgttttcagaatcctttatctttgacctttgagaattttattattaaagacattcaggtggtcatatttaagtgaattgtgcttagtattctacaaccttcttatacttgaatattaattttttaggtatgggaagttctcattatacctttgaataaactttctacccagaactttttttctacctcctcttgaaggccataactcttagcccttttgaggcttttttttaaatctcatctgactgtatcttttcaaataacctgtgttcaaactcactgattctttcttctgcttgatcagttctgctgttgagagactctgatgcgttcttcaatatcatttaaattttcagaaccagaatttttgcttgattcttcaaaatgattttaatcaatttgttaagtttattggatcagattctgaatttctttttttttgttgttattttgaattttgc

SEQ ID NO: 109583 - DNA, 600 bp, Homo sapiens
agagatgaattgtttataagccactcagtcagtggtatcttattatagctgcccatatagactagagacaaacacagtcttgtgatatgacttcatcaaacggcacccacatcactctatttctgtatccttgctcacttttcttcatagcatttatcactactagatgcagtataagttagttatttttcttccccctttaaaaaagattcactccatgagaacacagaatttttctgttttgttcatagttgtatccccagcacctagaataaatgccattgaaggtcatgacaaagagtgcgagggtggctgggggctggcttacactggagcagaaataagacaaaraaaataaattaaaccctctgtggatacaaaactagagctaggcgctcacaagaatttaacagaaagccctaggagccaaaaacaaagatgcaattgcaaaccagagcaataagcttgggagcttacctgtagtcaccttgggaagtaaccagtgggcttgggtttaatagcctttggccagatgagattcaaatctctggataaagctgataccctcaaaggattacatacttggctatcactggcata

SEQ ID NO: 109584 - DNA, 622 bp, Homo sapiens
aaggtatcagtgaatggtgaggcagtggagatagctggaacaaactgctctcttgaagtctgaaaatgaaggaaaagaaaatgatggaacaatagcttgagggacaacagaaggaagaaaaaaatttaggctaaggaaagattatatgagtatgtcttttgttggagaaaaagtggacaaaaaaagcaacattttttttagaacaggaaagagcagagatagaagatccagtaaaggcataaatcaaagatgcataaaatacttgatgtattcattcaataagtatttaytgaatgcccaccataaactcaaaactggagaatatacaccggagaacaagctaggtaggatcccaagctcatggagcttgtatgtctaagcttccagaggaaaaggaagaatacagtggacagggtagaatgcctttattctaccctgttgttgcagaacagccacagagtttggatggaattaattccactgctaccaatggtctcagaaatcagcatcatcttatctgtgttatcagggtatttgattcacgaatgaccacacaacctaagttggtcctatcagaatgaaacctgggactttgattaaatggaaaagaggacaatcctga

SEQ ID NO: 109585 - DNA, 622 bp, Homo sapiens
aaggtatcagtgaatggtgaggcagtggagatagctggaacaaactgctctcttgaagtctgaaaatgaaggaaaagaaaatgatggaacaatagcttgagggacaacagaaggaagaaaaaaatttaggctaaggaaagattatatgagtatgtcttttgttggagaaaaagtggacaaaaaaagcaacattttttttagaacaggaaagagcagagatagaagatccagtaaaggcataaatcaaagatgcataaaatacttgatgtattcattcaataagtatttattgaatgcccaccataaactcaaaactggagaatatacaccggagaacaagctaggtaggatcccaagctcatggagcttgtatgtctaagcttccagaggaaaaggaagaatacagtggacagggtagaatgcctttattctaccctgttgttgmagaacagccacagagtttggatggaattaattccactgctaccaatggtctcagaaatcagcatcatcttatctgtgttatcagggtatttgattcacgaatgaccacacaacctaagttggtcctatcagaatgaaacctgggactttgattaaatggaaaagaggacaatcctga

SEQ ID NO: 109586 - DNA, 622 bp, Homo sapiens
aaggtatcagtgaatggtgaggcagtggagatagctggaacaaactgctctcttgaagtctgaaaatgaaggaaaagaaaatgatggaacaatagcttgagggacaacagaaggaagaaaaaaatttaggctaaggaaagattatatgagtatgtcttttgttggagaaaaagtggacaaaaaaagcaacattttttttagaacaggaaagagcagagatagaagatccagtaaaggcataaatcaaagatgcataaaatacttgatgtattcattcaataagtatttattgaatgcccaccataaactcaaaactggagaatatacaccggagaacaagctaggtaggatcccaagctcatggagcttgtatgtctaagcttccagaggaaaaggaagaatacagtggacagggtagaatgcctttattctaccctgttgttgcagaacagccacagagtttggatggaattaattccactgctaccaatggtctcagaaatcagcatcatcttatctgtgttatcagggtatttgattcacgaatgaccacacaacctaagttggtcctatcagaatgaaacctgggactttgattwaatggaaaagaggacaatcctga

SEQ ID NO: 109587 - DNA, 618 bp, Homo sapiens
gaagataagaaaacaaattaaaccacttttaaccctcttaagagccatatgaaatatttatacatgagaaaaagcctcaggcagatcaaaaatatttttcaagatcatataccaagtatattgtagggtacagattcaaattcaagactgactccaaactcagtctctcccaaagaagaggcaaatcacctctggttggctagttrgatgggagtttggaggctggtggagagaaaccaggaacagtttcttagggaagcagttatttcaggtaaaacttggaaagatatacacagttttgaaaagctgagatggcaaagaaggagaacatttccaggaggaacagcaaaaagcacagaagcaagaaatcaggatcaacatttggagaatggtgagtagatcaagtagcacaaactctttacaaataaagatagattggatgcacattctggaagtcaaatattggggttaataagttactgtaatagttcagggaagagcctaaactagaatctcagacatgaaaaaggagaaaaggagaagaggggactaatgtgaggagtcagatggaagattactctcttatgtttacattacagtcaacaacaacaacaaaaa

SEQ ID NO: 109588 - DNA, 449 bp, Homo sapiens
tcaaaaacccattgatcatacttttgtaggcctagttttggactctgtttgcacattgaaaatctcatcagacaatgctctgttttttgctcttaactgttaaacatactctaaatgactcagggtgaaagaatagtctattatatttacccagaaatttaccattcctgttgttctctcttcctttctgatgttccasatttgcatatggcatcattatcttctggctgaagaactttcttttagtcattcttgtagagaagtctgttgctaatgaaaattctcttagtgtttcttcatgtaagaatgtctttatctcattgttagtcctgaagagtatttttgctagatacagaattctggtttcatggttcctttttctcagtgctttaaaaatgagtgcactttcttctggcctccatgacttcttttttaaaaaaaattatttt

SEQ ID NO: 109589 - DNA, 577 bp, Homo sapiens
aaactccaacaggaaaagagatcaaaactaacaaagaaataaacaataacaataacaaaataaagctcagaagaaagactgtcaggaaaaagaagaaaacttcaaggaattataatcagtaccctcagaaagatgagaagattttgcaaccataaaataaaaacataatactatagaaaaggaagaataagagagtaagaaagcacttaagaaataaaatattcaataaaagggttaaatgcagatgaggaagtctcctaaaaaagaagtaaaaaataataccaatgtaacaaacctgcacattcagcacatgtatcccggaacttaaaataaaaaagaagtgaaagataatgagatgggaaataggagaaaaaagatagatgatcagtatcagaagttcaacctttgacttttaggagctctccagagagaatgaaaaaacaaaaaggataaaactatcaactaaattttaaaaggaaaattgctaggactgaaaatatgtgtttcaaacttagaaggactcaaagagtgcccagcacaaaagatttttgaaaagacscacaccaaagcacattgt

SEQ ID NO: 109590 - DNA, 608 bp, Homo sapiens
tgtggcagtcatcacccgtccgacaggttatcatcatcatcaaggttggaggtaatgaggagccagtgagaggttccaatttgtctttcctctccctcagtttaagctcaacaccagccccaaaggcaacaaccttgcagagctttttaaatcagttctcatcattgcattaggtctaacttctatagtaactccctcattccatatcatcctagtcgtgtaccttcttcaatagaactgayacaaccaattgaaaaacctagtattatctttcttagctttaaaaaaactcacacctctacaacctcttcttactttatcttctacatatttccaacagttaagaaggttttatatacagttgacccttaaacaactcagggattaggggcattgaccccctgtgtagttgaaaatccatgtataatttttgacccctgtgaacttaactattaatagcctaccattgactgcaagccttactgataccataaaccattggttaacacatattttgtatgttacatatattatatactgtattcttaaagtaagttagagaaaagaaaatgttatcaagaaaatcataagacagagaaaatatattt

SEQ ID NO: 109591 - DNA, 608 bp, Homo sapiens
tgtggcagtcatcacccgtccgacaggttatcatcatcatcaaggttggaggtaatgaggagccagtgagaggttccaatttgtctttcctctccctcagtttaagctcaacaccagccccaaaggcaacaaccttgcagagctttttaaatcagttctcatcattgcattaggtctaacttctatagtaactccctcattccatatcatcctagtcgtgtaccttcttcaatagaactgatacaaccaattgaaaaacctagtattatctttcttakctttaaaaaaactcacacctctacaacctcttcttactttatcttctacatatttccaacagttaagaaggttttatatacagttgacccttaaacaactcagggattaggggcattgaccccctgtgtagttgaaaatccatgtataatttttgacccctgtgaacttaactattaatagcctaccattgactgcaagccttactgataccataaaccattggttaacacatattttgtatgttacatatattatatactgtattcttaaagtaagttagagaaaagaaaatgttatcaagaaaatcataagacagagaaaatatattt

SEQ ID NO: 109592 - DNA, 497 bp, Homo sapiens
tgtgtctaattggtaatggacagcctctcccttcccgccaaattggccctattcaatttcaaacaatagccaatcgggtcagcttagattgtgcgatccaactctggccaatggggaaaggacacagaaacaggacctccattagggagaaaaacccttgccctaccctgcttggtgtgctcttgcaattgcatcaaatgcaggcagcaccctcctgcagaagtaaagttgccttgctgagaaattttcagtttaagtgctagttcttctttgcagcascaagcgcttgttgctaacaatttggaggcttgtctgggatcccattctcctctggggaagggtcttcaataatctctcatgacgagatgcgtcccgctgccatattgtggtggcctcaggagtaagagatcgagacccaccaagcatgacaaataaacttggactctcagtaacatgggaagaaaaggcctacaaataggtaccatggtaaccaggta

SEQ ID NO: 109593 - DNA, 603 bp, Homo sapiens
actggtgcatcacacatacacaacctgcatgtgttcacgcaaacaacactgtaatggaataggtgggaatcctttcacttgtggtcaaactacaatcactgcagtccttgggcractcatctcagttcttaagactttttttttccttttttaaatctataaacgaatttgatgatagaatgtctcaaggccatcccatctctccagcacagtgatctggtgtattccactaattgtgaatcattggttctcaccgagatttagtacagtataagcattctttacataaccagagccaccaaatgttgatgacttgctatattctaggtcccatgctaggtgcttttctcacaccccgccctcacaataaccctgaagagaggtaactgctactgttatcccaattttccagatgagaaaactgaggtgactcagttggaaagcagaaaagccaaggtttgaacccaggtagctggataccagagcttttgcaatcagtgcagtcatttatgccacactgtgctggcaaaaactgagtgaagaaattcatgcttttccagcagctgaagtactttccatctcgtaatgaacttgacccattaa

SEQ ID NO: 109594 - DNA, 603 bp, Homo sapiens
actggtgcatcacacatacacaacctgcatgtgttcacgcaaacaacactgtaatggaataggtgggaatcctttcacttgtggtcaaactacaatcactgcagtccttgggcgactcatctcagttcttaagactttttttttccttttttaaatctataaacgaatttgatgatagaatgtctcaaggccatcccatctctccagcacagtgatctggtgtattccactaattgtgaatcattggttctcaccgagatttagtacagtataagcattctttacataaccrgagccaccaaatgttgatgacttgctatattctaggtcccatgctaggtgcttttctcacaccccgccctcacaataaccctgaagagaggtaactgctactgttatcccaattttccagatgagaaaactgaggtgactcagttggaaagcagaaaagccaaggtttgaacccaggtagctggataccagagcttttgcaatcagtgcagtcatttatgccacactgtgctggcaaaaactgagtgaagaaattcatgcttttccagcagctgaagtactttccatctcgtaatgaacttgacccattaa

SEQ ID NO: 109595 - DNA, 603 bp, Homo sapiens
actggtgcatcacacatacacaacctgcatgtgttcacgcaaacaacactgtaatggaataggtgggaatcctttcacttgtggtcaaactacaatcactgcagtccttgggcgactcatctcagttcttaagactttttttttccttttttaaatctataaacgaatttgatgatagaatgtctcaaggccatcccatctctccagcacagtgatctggtgtattccactaattgtgaatcattggttctcaccgagatttagtacagtataagcattctttacataaccagagccaccaaatgttgatgacttgctatattctaggtcccatgctaggtgcttttctcacacsccgccctcacaataaccctgaagagaggtaactgctactgttatcccaattttccagatgagaaaactgaggtgactcagttggaaagcagaaaagccaaggtttgaacccaggtagctggataccagagcttttgcaatcagtgcagtcatttatgccacactgtgctggcaaaaactgagtgaagaaattcatgcttttccagcagctgaagtactttccatctcgtaatgaacttgacccattaa

SEQ ID NO: 109596 - DNA, 603 bp, Homo sapiens
actggtgcatcacacatacacaacctgcatgtgttcacgcaaacaacactgtaatggaataggtgggaatcctttcacttgtggtcaaactacaatcactgcagtccttgggcgactcatctcagttcttaagactttttttttccttttttaaatctataaacgaatttgatgatagaatgtctcaaggccatcccatctctccagcacagtgatctggtgtattccactaattgtgaatcattggttctcaccgagatttagtacagtataagcattctttacataaccagagccaccaaatgttgatgacttgctatattctaggtcccatgctaggtgcttttctcacaccccgccctcacaataaccctgaagagaggtaactgctactrttatcccaattttccagatgagaaaactgaggtgactcagttggaaagcagaaaagccaaggtttgaacccaggtagctggataccagagcttttgcaatcagtgcagtcatttatgccacactgtgctggcaaaaactgagtgaagaaattcatgcttttccagcagctgaagtactttccatctcgtaatgaacttgacccattaa

SEQ ID NO: 109597 - DNA, 577 bp, Homo sapiens
atgaatgagattgagattcaaataacatgaggaaataaagaaacttgggctctgagaggtgaagccatttgctgtatataacaacatgcttcccaagttattagaagtctgaatattaactgtctttttacatttctaaatgaaatccttttattttcttgttggtaggcagtcaggtaatgagagaaaaggataagttgagaaattattcaggtttctacctgatttaaaaaaaaacaaaaaagtttcagttaaacagtggacttcagggacactcttttttgtgatccatcttttaagagacttcatagctatatgaaaagcgttaaaaacctctaggaataaaatagtagatataactatttattaacaggagaaaaacagcattttgatacattaaaacaaatatttctataggcgatgagtggaattggcacacrtaatagtgttttagacatttcattatgttattcctcatgaccttagcataaaggttctacaccagtagacacacagaacactctcattaaaaacaaatactcccatatttaacaaaggttaatctcacaggtaaaaa

SEQ ID NO: 109598 - DNA, 535 bp, Homo sapiens
gctactactgaattctttcagcttttgattatctgaaaaagtctttattttgccttcatttctgaaagatatattactgagtatagaattctagactgaaattttcttttcttcttctagtactttcaagatgttcctgcactgtcttctcacttggccttgtatctgatgagaagtgtcaggtttattttatgtctacacaaaatgtgtctttcttcactgcttgctttgagtagtttccctttatcactggttttgaacagtttgattaggcaattggtttgtttttaattttacaaacaccttgaatcacgtaactggttgtgcttcttttcactggttgtcaaaagctcagatccacatttcttctgctccaattagtaaatgctattatatatacactcttcatctgagccttcatcataattccctttattttctctcttccckgttgttaaatattttaatcctatcacagtatatatttttctcaattttatttttgtagtcacaaactaacacattctcttcatcc

SEQ ID NO: 109599 - DNA, 545 bp, Homo sapiens
cagaatttattagtgttattagttagtggttttgaactcatgcttgtactcagagacccaaaataccataatgttctactagtcagagtaagccttgagctgttctagtagtggtttcaaacatacagtagaaagagagtatatttaatggcagaattttgatgttgattccctaatatgtggaacaaggaacagatgttcccttcctgaagacagtaawccaaaatgccacatcccacagagattagtgccactgtcaaaatttgagagatgcaaggatcatgttttctagcacactaccaagtaactagcctgttcggtcagtgcaaaagcctgaaggatcatagagaatgacagtagattatgttgaaaacttaatcagatagcaatgcccatcacagctatggctccaaatggggtatcttcaaggacacaactcaaaacaagttttagcacttaatatgtaacaaataatttattttctacaaaattcagtaaagaaaatcgtaaacaatttgcatttatgtgtcggagacaacagtgta

SEQ ID NO: 109600 - DNA, 545 bp, Homo sapiens
cagaatttattagtgttattagttagtggttttgaactcatgcttgtactcagagacccaaaataccataatgttctactagtcagagtaagccttgagctgttctagtagtggtttcaaacatacagtagaaagagagtatatttaatggcagaattttgatgttgattccctaatatgtggaacaaggaacagatgttcccttcctgaagacagtaaaccaaaatgccacatcccacagagattagtgccactgtcaaaatttgagagatgcaaggatcatgttttctagcacactaccaagtaactagcctgttcrgtcagtgcaaaagcctgaaggatcatagagaatgacagtagattatgttgaaaacttaatcagatagcaatgcccatcacagctatggctccaaatggggtatcttcaaggacacaactcaaaacaagttttagcacttaatatgtaacaaataatttattttctacaaaattcagtaaagaaaatcgtaaacaatttgcatttatgtgtcggagacaacagtgta

SEQ ID NO: 109601 - DNA, 630 bp, Homo sapiens
tagttgaactcctgtttaggacttgaatcttaaggaagtgacaaaagttgccagacaatgtgaatgtatttatggcacaattaatagtttcaaagattcagtggcagaggcaactgaagcagcatcttaaatggaagcttctcttgtgtaaccatttctggagtattaatgattttttgcttgctacctgttattaagcattgcgatctggcttataggtgggcttataggtatcttcacaataaatccattttttttctttaaaaagcctaaattgaccccagttgtttgtaacaaatcaatcttactgtcaccaaaaccaataccaagaatgggactcaggactcagactcttatagaaatagaaaaaatrtaggatatagtatctgttatatgaactaaagtcagtgaagatttcagtattccataataaagataccttgcatgtgaaggaaaaaccattaactaaattattcactggggtttacctgaagacaagactatgggactgtagttacacctgaagagaagaatatgctacggtttgagttgtacactccaaggaaagtatgttgaagtccttacccccagtacctcggaatgtgaactttcttagaaacagggttattg

SEQ ID NO: 109602 - DNA, 630 bp, Homo sapiens
tagttgaactcctgtttaggacttgaatcttaaggaagtgacaaaagttgccagacaatgtgaatgtatttatggcacaattaatagtttcaaagattcagtggcagaggcaactgaagcagcatcttaaatggaagcttctcttgtgtaaccatttctggagtattaatgattttttgcttgctacctgttattaagcattgcgatctggcttataggtgggcttataggtatcttcacaataaatccattttttttctttaaaaagcctaaattgaccccagttgtttgtaacaaatcaatcttactgtcaccaaaaccaataccaagaatgggactcaggactcagactcttatagaaatagaaaaaatgtaggatatagtatctgttatatgaactaaagtcagtgaagatttcagtattccataataaagataccttgcatgtgaaggaaaaamcattaactaaattattcactggggtttacctgaagacaagactatgggactgtagttacacctgaagagaagaatatgctacggtttgagttgtacactccaaggaaagtatgttgaagtccttacccccagtacctcggaatgtgaactttcttagaaacagggttattg

SEQ ID NO: 109603 - DNA, 510 bp, Homo sapiens
ttggcaatcagtatgagaaactgcagcttgattctgctgcactttatgaagtgttctatgaaacgtgtcttagaatgatctgcctaggggatgaaaggaggaagcatttatccactggctttcatcttgcattggttaaggatgcctcccgggcattaactctcccacacttccagattggtcatgcttaagtgctgaacaggtgtctgcagacatcccacactgtttgtgacattagaaaaatcctgaaggcaagagatatgaagcaatgacctaacttgcaattatatgaagcttatcaaagctaatcataagatgagtaactggagcagcagctggaataagaggtgggccagcagcattctaagtgggggcaccagaagtttccaatttgatttgtagtccaacaactggcttaartggtaagtgttatgcattcaaaatatttttgtaattattatatgcttatgagaaactcatacaattggacttttgacaataaagtagatt

SEQ ID NO: 109604 - DNA, 520 bp, Homo sapiens
gtttccctgctagcatcagccagagcttggtctttgctcttagaggcttccattattcttcctcttggactgatttatcttcaaaccaccaatggcatattaaagttctttcttgtgcttccatatctcttacttcttgttytactatctgccataaaaaactttgtttttagtggggtctatatgatttagattaggtctatatacgtaatctccttatcttaagatcaaatgtgtcatacaaaataacaattatggaagtgacatcttaacatatttataggcactagggattagagtataaaatcttgggagccatttttagaattatggctcaaaattaaatatttataatttagatcccatcttagcaaactagtgagagagattctcctgctggactgttagaagcaaagtcatattgtgtcaactctctgtcgtggcagataattgactgggagctgagggtagcctcagtcaacagctagtaataagctgggatcctcactattacaaacag

SEQ ID NO: 109605 - DNA, 499 bp, Homo sapiens
gaattcattcttttttattctggttakgagagaagagttgaagtagtttatattcacatggaacagacaatagtattgatttacagtgttgtcatagatctatattaactctactactgtgttgtaatacagcccagagaaatctggaatagcaggacacaccacagaacactccacttatccattaaatcaatgatattgtcttgatccaaccagatgaacaagaggtggctagtaaactgagctttgataaaatacatgtggtccagtggaagggagataaagcttataaacattcaaaaactgtggcttctagtaaagacttataggtctagtcatcagagaatggcagcatattagctccaaagtaaaaatcaagttgctgtgactcattacctatcacaaggaatgaagtgcactgcaactagcctttcttgagttctggagacaaaatagtccacacctgggaatactgctttagactttatacccagtgaca

SEQ ID NO: 109606 - DNA, 501 bp, Homo sapiens
tagtttatattcacatggaacagacaatagtattgatttacagtgttgtcatagatctatattaactctactactgtgttgtaatacagcccagagaaatctggaatagcaggacacaccacagaacactccacttatccattaaatcaatgatattgtcttgatccaaccagatgaacaagaggtggctagtaaactgagctttgataaaatacatgtggtccagtggaagggagataaagcttataaacattcaaaaactgtggcttctagtaaagacttataggtctagtcatcagagaatggcagcatattagctccaaagtaaaaawcaagttgctgtgactcattacctatcacaaggaatgaagtgcactgcaactagcctttcttgagttctggagacaaaatagtccacacctgggaatactgctttagactttatacccagtgacacatatgataccaattttgaatggaacctggatcaaaaaagaattc

SEQ ID NO: 109607 - DNA, 556 bp, Homo sapiens
aaacaagcaagtagacaaaattacggacaagttgatattgtccagccttccacatcagttattccatgacagacatgattasacttgacaggatacacataggtctgttagcgtggactccctccagtcggagccactgtagttactactaattctgaatgtcccatctgctaaccacagagaccaatgccttgcccctaatatggtactacttaaatttcatcaaaattaaaatttgtttctctctgaaaggtactatattaagaaaatgaagaggatatccacagactaggagaaaatattctctatatatctgacaatggacttggatccagaataatatgaaaaaattattttaaggctaaatatgcatttattttataaaataacattataatctgtacttttatattatactttaaaaaatctgctgttattgtgattattttacaattatttaaaacaacctcaattactgcataatattaaatcaaaagaacataagttgaccacttttctactgcacattgagttttctcccattttaatttatatt

SEQ ID NO: 109608 - DNA, 556 bp, Homo sapiens
aaacaagcaagtagacaaaattacggacaagttgatattgtccagccttccacatcagttattccatgacagacatgattacacttgacaggatacacataggtctgttagygtggactccctccagtcggagccactgtagttactactaattctgaatgtcccatctgctaaccacagagaccaatgccttgcccctaatatggtactacttaaatttcatcaaaattaaaatttgtttctctctgaaaggtactatattaagaaaatgaagaggatatccacagactaggagaaaatattctctatatatctgacaatggacttggatccagaataatatgaaaaaattattttaaggctaaatatgcatttattttataaaataacattataatctgtacttttatattatactttaaaaaatctgctgttattgtgattattttacaattatttaaaacaacctcaattactgcataatattaaatcaaaagaacataagttgaccacttttctactgcacattgagttttctcccattttaatttatatt

SEQ ID NO: 109609 - DNA, 594 bp, Homo sapiens
gatcttaaccacaacattacaccaatataatgaaggtaggggttgatatcccttgttggcattagtatattgtacactatttycagaattatttcgatcatatacttcacatttctgcagatgtgtgttgagtctgctgtgacccacaaagggatttccctaaatgttgatcctttcttttagccattttgcattttctgtacttgattcagggatgatggaatactgctctgcttaggaataaagctgctaacagagtgttatttaaaatatctcttacatagcttgtatcttatactctatgatgagagcttattggcctgttatcatgtttccaatgttttcataactttttgccggggcattgacatttctaaatatttttggcaaattatattaccattgtgcatccaatttttgtcctctctaaaatgggtacagtatgacatatttcccattgctatgttgatgattaaatgaaaaagtctatttcaaggttgtggtgcagtgctgggtaggcctgtgccacagggacagtcatctaagatattttcttttttacataataggtactcaatgaaatgggctctgttg

SEQ ID NO: 109610 - DNA, 594 bp, Homo sapiens
gatcttaaccacaacattacaccaatataatgaaggtaggggttgatatcccttgttggcattagtatattgtacactatttccagaattatttcgatcatatacttcacatttctgcagatgtgtgttgagtctgctgtgacccacaaagggatttccctaaatgttgatcctttcttttagccattttgcattttctgtacttgattcagggatgatggaatactgctctgcttaggaataaagctgctaacagagtgttatttaaaatatctcttacatagcttgtatcttatactctatgatgagagcttattggcctgttatcatgtttccaatgttttcataactttttgcyggggcattgacatttctaaatatttttggcaaattatattaccattgtgcatccaatttttgtcctctctaaaatgggtacagtatgacatatttcccattgctatgttgatgattaaatgaaaaagtctatttcaaggttgtggtgcagtgctgggtaggcctgtgccacagggacagtcatctaagatattttcttttttacataataggtactcaatgaaatgggctctgttg

SEQ ID NO: 109611 - DNA, 611 bp, Homo sapiens
gatacactcaagagctaggatagatctcaagggtaaaatgctaagggaaaaaaaggcaatatccaaaggccacatactgtatgattccgtttatagaagaaaatgaaactaagtggttaacttggagacttgcctttgatcttccttagtagggagcttttcatggaatcagtgmtatttcgttttataatattacaaaaaaagcaaaccctttatttttcttctctgatgtcctttttttttttactttattgttagatttcatagttatctttatttagaagactttgaataaattgttgtttggcaatttggattttcatttggaagaaatacatctttggtttctgtgccatattgccctgtttataaaaaacttagtctatttaaagagaaaggttaaaagtaaaaaaaaggaatagcaaccgcaatctggatatgactccttctgaccccttcctcagcagctggatcaaataacacttttaattgaaataaatgtgctaaaaacaatcaaggtcgctctgttgcaatggagaaaatatgcaggtacccttcacatgatagaactggaacatcattaagagtgctgattaccaagagaaaaaaag

SEQ ID NO: 109612 - DNA, 611 bp, Homo sapiens
gatacactcaagagctaggatagatctcaagggtaaaatgctaagggaaaaaaaggcaatatccaaaggccacatactgtatgattccgtttatagaagaaaatgaaactaagtggttaacttggagacttgcctttgatcttccttagtagggagcttttcatggaatcagtgatatttcrttttataatattacaaaaaaagcaaaccctttatttttcttctctgatgtcctttttttttttactttattgttagatttcatagttatctttatttagaagactttgaataaattgttgtttggcaatttggattttcatttggaagaaatacatctttggtttctgtgccatattgccctgtttataaaaaacttagtctatttaaagagaaaggttaaaagtaaaaaaaaggaatagcaaccgcaatctggatatgactccttctgaccccttcctcagcagctggatcaaataacacttttaattgaaataaatgtgctaaaaacaatcaaggtcgctctgttgcaatggagaaaatatgcaggtacccttcacatgatagaactggaacatcattaagagtgctgattaccaagagaaaaaaag

SEQ ID NO: 109613 - DNA, 520 bp, Homo sapiens
agaaatatgtagaatggggataataataaatgtcttgtcaagtttttgtcagaacatacacacacacacatacacacacacacacacacacacacacrcgcagaggtaaggcacagtgatgggtaaacagtctgtatttgatatatggtagatattatgtgtaagcaagaattccattttaaaatcccttgcagttcttttatttccctctagtgttggaagattaagttcaggtatgggacagactgctcctttgttttggaaaaaatcacattatggtcaaagataaagcaaagatcatacttttaaaaatggagatggtcactgctctgcattaatagcacaaaggtttatggttatgggcagacttcaatatctatagatagtttcttctaggaaaaaatgtttcttttctatataggtgtttaggctgcatcttcttggaaaattctcttcaaagcagtttcagaataatgttgacattagggtgcttcagagggacagaatcagtaggcaatac

SEQ ID NO: 109614 - DNA, 520 bp, Homo sapiens
agaaatatgtagaatggggataataataaatgtcttgtcaagtttttgtcagaacatacacacacacacatacacacacacacacacacacacacacacgcagaggtaaggcacagtgatgggtaaacagtctgtatttgatatatggtagatattatgtgtaagcaagaattccattttaaaatcccttgcagttcttttatttccctctagtgttggaagattaagttcaggtatgggacagactgctcctttgttttggaaaaaatcacattatggtcaaagataaagcaaagatcatacttttaaaaatggagatggtcactgctctgcattaatagcacaaaggtttatggttatgggcagacttcaatatctatasatagtttcttctaggaaaaaatgtttcttttctatataggtgtttaggctgcatcttcttggaaaattctcttcaaagcagtttcagaataatgttgacattagggtgcttcagagggacagaatcagtaggcaatac

SEQ ID NO: 109615 - DNA, 487 bp, Homo sapiens
ctagtgggttgattctagctctggatgttctgaaagtttgattccctactggttccatttggtgcagtgtttgtttaaaaaattgaagtcaactcatggaatgttaacaagacaagtcatggaggaggcaaagttgctttctgggtgcctgtaccagcactcaccttgaggcccttcttcctcctctcaccccaagcatcccttcagtgagctcaagttttttgtgggatattaaggcagctctttttttacactgcccagtggaagaataacttaaatacaagacactgttttccagaatgtgcatcttatgcagccaggcagaggacacaagagagtctggaggataattctgaagtgtgcacaaagatgctcaagagataggaagttagagaagagaatgcagcagcggaaatatcttactggaatattctctctgtaaccrtggctatagtagaaataatcacagcagttttttgagcatcta

SEQ ID NO: 109616 - DNA, 515 bp, Homo sapiens
  misc_feature (1)...(515): n = A,T,C or G
gaattccccggcaattggagtttcgatgccactaatcctgggctgagtcatatcttgaactcagcaaaaatccttattgacagagttttttctcattggactcatagagaggagaggaagtttcaacatcctgtctctactgcttacttggraaaataatccttatagtttaagcctttggtttctctccttagacagcatgcaaggtagtctctttatatgcactaagagaggcaaccaaggctcagaacaattaagcaagttcctacgttactgtcctaacatgattctaatacacaatgttttgaacnccttaggcaagaaacagaatccgccatcttctacacagagaaagctgcctcttttgcagagccctgtaaaaataaaaatgcagggccccttgtccaaaatttaataattttaagacggcaatagcagagcattaatccaaatgcaagcccctgtacaactgtacaagtcacatacccttgaagtcagcactgtttctctatttt

SEQ ID NO: 109617 - DNA, 516 bp, Homo sapiens
  misc_feature (1)...(516): n = A,T,C or G
tgaattccccggcaattggagtttcgatgccactaatcctgggctgagtcatatcttgaactcagcaaaaatccttattgacagagttttttctcattggactcatagagaggagaggaagtttcaacatcctgtctctactgcttacttgggaaaataatccttatagtttaagcctttggtttctctccttagacagcatgcaaggtagtctctttatatgcactaagagaggcaaccaaggctcagaacaattaagcaagttcctacgttactgtcctaacatgattctaatacacaatgttttgaacnccttaggcaagaaacagaatcygccatcttctacacagagaaagctgcctcttttgcagagccctgtaaaaataaaaatgcagggccccttgtccaaaatttaataattttaagacggcaatagcagagcattaatccaaatgcaagcccctgtacaactgtacaagtcacatacccttgaagtcagcactgtttctctatttt

SEQ ID NO: 109618 - DNA, 515 bp, Homo sapiens
  misc_feature (1)...(515): n = A,T,C or G
gaattccccggcaattggagtttcgatgccactaatcctgggctgagtcatatcttgaactcagcaaaaatccttattgacagagttttttctcattggactcatagagaggagaggaagtttcaacatcctgtctctactgcttacttgggaaaataatccttatagtttaagcctttggtttctctccttagacagcatgcaaggtagtctctttatatgcactaagagaggcaaccaaggctcagaacaattaagcaagttcctacgttactgtcctaacatgattctaatacacaatgttttgaacnccttaggcaagaaacagaatccgccatcttctacacagagaaagctgcctcttttgcagagccctgtaaaaataaaaatgcagggccccttgtccaaawtttaataattttaagacggcaatagcagagcattaatccaaatgcaagcccctgtacaactgtacaagtcacatacccttgaagtcagcactgtttctctatttt

SEQ ID NO: 109619 - DNA, 516 bp, Homo sapiens
  misc_feature (1)...(516): n = A,T,C or G
tgaattccccggcaattggagtttcgatgccactaatcctgggctgagtcatatcttgaactcagcaaaaatccttattgacagagttttttctcattggactcatagagaggagaggaagtttcaacatcctgtctctactgcttacttgggaaaataatccttatagtttaagcctttggtttctctccttagacagcatgcaaggtagtctctttatatgcactaagagaggcaaccaaggctcagaacaattaagcaagttcctacgttactgtcctaacatgattctaatacacaatgttttgaacnccttaggcaagaaacagaatccgccatcttctacacagagaaagctgcctcttttgcagagccctgtaaaaataaaaatgcagggccccttgtccaaaatttaataattttaagacggcaatagcagagcattaatccaaatgcaagcccctgtrcaactgtacaagtcacatacccttgaagtcagcactgtttctctatttt

SEQ ID NO: 109620 - DNA, 556 bp, Homo sapiens
caaaaataatttaagtgttcattttgaaataactaagagtatgattgaatcatttgtaacacaaaggataaatgcttgaggtgatgaataccctatttaccctgatgtgattattacacactgcatgcttgtatcaaaatatctcttgtatcccataaatatatacaactactatgtttctgcaaaaattagaaaaaaattaaaaaggaaaaaaaacgaattgacacttatgttgggattctgggtatggcayctaggagtatgaggtctgagacaagtaactgaacatctttgagactcagatatttttatctgggaaacaggaataataaaattaccttttaatttaattggttaatgggagggttgaaacagatactgtatgttgaagttatgtttgtattagaaaatgttgaacaaatgctattcatcctccatccctaaggaaacaatgaaaatgatgtaacaatataagaaatataaagagcgttatcttctttctagttgaatttaattcatttccattcaatatgttcttaaattgggttgccatagc

SEQ ID NO: 109621 - DNA, 513 bp, Homo sapiens
gtgacctagtcagaccttcattatatttggtcttacattatcctctgtttcagatgtttcgtcctatttcactaaacagagaggtctttgaaggctcaaaatatcttacagacagctggcttctctagagcctataaaagaaccccacaatgtaacaaagccaccaagaaagtaagacaaagagctggaggacagtgacttcctgttgatgaaagtactctatgaacttgatactgcagttcaatctcacccttattttttagtcaactcatctaaaatatttggcccacgtgatacgtgatttcctttcatattctttttttattccttttctactccaactaatgttattttcattcaactggttaaattcagtatacatggaacatcrgatgaaacaatgtgttgataaaaaaatttcggccaaagacagacttcaaataagaggtcattgttaagggttttaaattcaaggagacaaagtggcacggtaacacacatacacaatttaat

SEQ ID NO: 109622 - DNA, 537 bp, Homo sapiens
ggtttggtctgttcttgtttctctagttccttgaggtgtgaccttagattgtcagyttgtgctctttaagtcttttttatgtcggtttttagagctatgaacttttctgttagcattgcctttgctgtatcccagaggttttgataggttgtgtcagtattgttcaattcgaataattctttaatttccatcttgatttcatttttgactcaatgatcactcaggagcaggttacttttcatgtatttgcatggttttaaaggttccttttggagttgatttccagttttattccactgtggtctgagagagtgcttgatataatttcaattttttaaaatttattgaagctcatttcatagcctatcatttggtctatcttgaagaaagttcccttcactgttgaatagaatgtgtattctgtggttgttggatggaatgttccgtatatatctgttaaggccatttgttccaaagtatagtttaaaaccattgtttctttgttaactttatgtcttgatgactgtctagtgctgt

SEQ ID NO: 109623 - DNA, 636 bp, Homo sapiens
ccccacaaatatagcagaaggcaagaaagggacatcttacatggtggcagccaagacagcatgtgaaagggaacttccctttataaaaccatcagatctcatgagacttattcactaccatgagaagagcatgggaaagacctacccccatgattcaattacctcccaccaggttcctcccacaacatgtgggaattatgaaagctatgaytcaagatgagatttgggtggggacacaagatgagatttgggtggggacacagccaaactatatcaagcagttatgatcaacccttctgctaaaaacaataaaaaaataaagaaatgtatgtgtagtctaacaggaaaataccaaacttaggccgacagctgagtgaaaacaagaacctgagaataatactaacagtgaaggccagcttttatcttgagggcacgtgagaatcctagttttactaagtatcatttgttggcatttcatgggattggagtgggtgctgggacataaaaaaaaaaaaaaatcctaagaaggctgaatcaaagtgggaaagtcaaggcagagttcctcttttcttaacggcagggactcaaaagtgctatgctctccgtataactgtgaattaggaataactgtgtacc

SEQ ID NO: 109624 - DNA, 636 bp, Homo sapiens
ccccacaaatatagcagaaggcaagaaagggacatcttacatggtggcagccaagacagcatgtgaaagggaacttccctttataaaaccatcagatctcatgagacttattcactaccatgagaagagcatgggaaagacctacccccatgattcaattacctcccaccaggttcctcccacaacatgtgggaattatgaaagctatgattcaagatgagatttgggtggggacacaagatgagatttgggtggggacacagccaaactatatcaagcagttatgatcaacccttctgctaaaaacaataaaaaaataaagaaatgtatgtgtagtctaacaggaaaataccaaacttaggccgacagctgagtgaaaacaagaacctgagaataatactaacagtgaaggccagcttttatcttgagggcaygtgagaatcctagttttactaagtatcatttgttggcatttcatgggattggagtgggtgctgggacataaaaaaaaaaaaaaatcctaagaaggctgaatcaaagtgggaaagtcaaggcagagttcctcttttcttaacggcagggactcaaaagtgctatgctctccgtataactgtgaattaggaataactgtgtacc

SEQ ID NO: 109625 - DNA, 636 bp, Homo sapiens
ccccacaaatatagcagaaggcaagaaagggacatcttacatggtggcagccaagacagcatgtgaaagggaacttccctttataaaaccatcagatctcatgagacttattcactaccatgagaagagcatgggaaagacctacccccatgattcaattacctcccaccaggttcctcccacaacatgtgggaattatgaaagctatgattcaagatgagatttgggtggggacacaagatgagatttgggtggggacacagccaaactatatcaagcagttatgatcaacccttctgctaaaaacaataaaaaaataaagaaatgtatgtgtagtctaacaggaaaataccaaacttaggccgacagctgagtgaaaacaagaacctgagaataatactaacagtgaaggccagcttttatcttgagggcacgtgagaatcctagttttactaagtatcatttgttggcatttcatgggattggagtgggtgctgggwcataaaaaaaaaaaaaaatcctaagaaggctgaatcaaagtgggaaagtcaaggcagagttcctcttttcttaacggcagggactcaaaagtgctatgctctccgtataactgtgaattaggaataactgtgtacc

SEQ ID NO: 109626 - DNA, 613 bp, Homo sapiens
ttttcagtagtgtacagcaatgtcctagccttcaccttcactcaccactcactcactgacacccagagcaagttccagtcctgcaaactccattcacagtaagtgccctatacaggtgcacctttttgaaaatcctttatgccgtatttttactgtaccatttcaatgtttagacacacaaatacttgccattctgttaaactgcccacagcattcagggcagtggcatgttgtgcaagtttgcagggcaggaggaataggctataccacacagcctgggtgtgyagtaggctgtatcattaggtttgtgtaagtgcacactatgatgtccacataaggacggaattgcctagtaacacatttctcagaatgtatccccatcgttaagcaacatgtgactgtactaaaaactgatgtgaaaagagatccgaaaataagaccaaaaaattacgtgactcactcacccatgggcatcaaccagcaaacaacagcacccagaactcttgtgtatctgaatacaaatccacctcttccgaaactgaaccacatcgtgcctatgattgaacttttcttggcaaacaggaacttatgtggaagtcttttcctgctgatt

SEQ ID NO: 109627 - DNA, 613 bp, Homo sapiens
ttttcagtagtgtacagcaatgtcctagccttcaccttcactcaccactcactcactgacacccagagcaagttccagtcctgcaaactccattcacagtaagtgccctatacaggtgcacctttttgaaaatcctttatgccgtatttttactgtaccatttcaatgtttagacacacaaatacttgccattctgttaaactgcccacagcattcagggcagtggcatgttgtgcaagtttgcagggcaggaggaataggctataccacacagcctgggtgtgcagtaggctgtatcattaggtttgtgtaagtgcacmctatgatgtccacataaggacggaattgcctagtaacacatttctcagaatgtatccccatcgttaagcaacatgtgactgtactaaaaactgatgtgaaaagagatccgaaaataagaccaaaaaattacgtgactcactcacccatgggcatcaaccagcaaacaacagcacccagaactcttgtgtatctgaatacaaatccacctcttccgaaactgaaccacatcgtgcctatgattgaacttttcttggcaaacaggaacttatgtggaagtcttttcctgctgatt

SEQ ID NO: 109628 - DNA, 613 bp, Homo sapiens
ttttcagtagtgtacagcaatgtcctagccttcaccttcactcaccactcactcactgacacccagagcaagttccagtcctgcaaactccattcacagtaagtgccctatacaggtgcacctttttgaaaatcctttatgccgtatttttactgtaccatttcaatgtttagacacacaaatacttgccattctgttaaactgcccacagcattcagggcagtggcatgttgtgcaagtttgcagggcaggaggaataggctataccacacagcctgggtgtgcagtaggctgtatcattaggtttgtgtaagtgcacactaygatgtccacataaggacggaattgcctagtaacacatttctcagaatgtatccccatcgttaagcaacatgtgactgtactaaaaactgatgtgaaaagagatccgaaaataagaccaaaaaattacgtgactcactcacccatgggcatcaaccagcaaacaacagcacccagaactcttgtgtatctgaatacaaatccacctcttccgaaactgaaccacatcgtgcctatgattgaacttttcttggcaaacaggaacttatgtggaagtcttttcctgctgatt

SEQ ID NO: 109629 - DNA, 629 bp, Homo sapiens
cacccgtaaaagaaaatcttcgtttccataagatattaacaaaacaaagtaatgaaaagtaacatttactataaatacaacatccatcaattgtaattgtaattatacattgaagtaaatgtgttcaatttctggtaattacaaaaataaaattagatcaaaacagaactgagaaccactcaaccaaaaccacttatttagaaaacatttctagagcattgtctatatgtcagacagttttcagaagcaatgtgccagagacacatgcaatataaaaagtatgaggaaagtgccacaacttaccccaccaactttctcaaagtgagatccatctttcttaaaatctgcaagggccccattgaaataccaggtaaagatgatgtctaacagcgggtcatgttgtacctggcagggcaatatgacgctttcaccaacagaaacatccatgttagatggtgccaaagttattcttgttggttctattggggaaataatttttcagaaaaacagcattttattgtgataaaagacatttgcacaggcagactgttcatctaacwtatactgtgtatgtctgtagatgcatatacataaatatacatacatctatataattaaaagtattcaac

SEQ ID NO: 109630 - DNA, 532 bp, Homo sapiens
tgccaatgcttgttataaatgaaaacagcacttcccttgttaacagggtaactatgtcagacagtaattataaccttaagtgacaaaarcatattcactcacatgcactaatgatcatttacaatggactgaactcttggaaatgtcatactacatcagagtcacttacatgtgtttcttttgacaaatgccatatggccagttctgccattagaaaggttagataactgcaacaatggattattgaggctgaccccctgctggcctggagttcagggccaagggaaatggaagtacacagaaatctattaatccattactcagaaaaaaaaacactaacctgcctcttcagttcttactttttctgagggtaaacttggttctccacctccaattttgttactggctacaacccgaaattcatattccacccatgggtttaactcaactacagtggctgtgtgcgtcttcccatcgatgacctcaggcactacaaaggaatatttcagaggtaagagtctgcctgctttag

SEQ ID NO: 109631 - DNA, 594 bp, Homo sapiens
agtgcagtggcgcgatcccgactcactgcaagctccgcctcccgggttcacgccattctcctgcctcagcctcccgagtagctgggactacaggcgcctgccaccaagcccagctaatttttttttttttttttttttgtatttttagtagagaaggggtttcactgtgttagccaggatggtctcgatctcctgacctcgtgatccgcctgcatcggcctcccaaagtgctgggattacaggcgtgagcccctgcacccggccaacactcaraacatttctttgctgcatgtggtgatgtttgaattggggatacctatggatagagagatgattgaagtctcactgaattcagaaatgacctgaaaaactatatgtatctttttcctttgaaaaggatatggaatctaatctttacattctaactataatttttcaagtaagctctttttgaggacaatataatgacccagatttttttttatagatatgtccttcccaggtggaatgataatctgacttctggagtttctttaaaaatagcagcaccattttacctgctttcaaaaaaattcaatttttaaaaagtaaatt

SEQ ID NO: 109632 - DNA, 623 bp, Homo sapiens
tgctctcctgcttcccaaggctgagacagcatttcttctctctgcttcttactggtttaaaagaccatgtggcaacagtctctataaacaccttcactagaggcaggatggaatgtccagtgtgctcagccagtcctagtttacatgtgttgtcttggaggtaattactaacagtgccccctttcccttctaaaatgtcccagtttgttgaataacttccatggtcaccttaatcgtatagtctattccacygtaattgatggtttagttatccacattctaaacagactgtgggctttttgacggctccttgatgtctcttattcatctatgtattcccagagccggacataatacccagtgaaaaataacaatatgataaattagaaaacaacatggagtaccttccttctaggcagaaggcagggacatcaatcaatctggtttttaaaagtgatggcatccacatatgaaataaaattctccctgtgcttcaaggttcaacagttagaaattcaagtaagatacaaaagcaaaagactcactgagatctcagctacgtatctgagggtagattcactgaaactcactgagcttgcacgcctacctgacagttgcgaggg

SEQ ID NO: 109633 - DNA, 580 bp, Homo sapiens
tactgcatcccagactttccaccaaagtggtgtgatttgtaagcatcagagcaaaattctcttcctgattgtatgaatcggtgataaaaatcttgaatgacatcaagcaagctttcacacacttttaaatatgctttgttttaaagtaggtcagacttcccagttggcatcacagaaaatggcccaagttacttttaaattttgcctaactgcaattttgtttgacagaatttcttctggaaagtggccatagaaggattaaatctccttcataatataattttacaatggaactacagataaaaacttgmatgtcagtattatatgtattagtgtatctccagataaacaccagagtgacatatttcatgttaaattgactggtcttatacttaagtgaccagggaaggaatatagctagaggcagaatgccatttatcacatattactttttagaaagcagtttcaggacctcattttttaaatttatagctttgattggcaaaactttttgacttttgaattaaaaaaattcatattcctagtattcacatagcattgttaatagaaagcccactgg

SEQ ID NO: 109634 - DNA, 579 bp, Homo sapiens
ggccctggatggggtacataaaaagaagtggccagagggaaggacaggaagggccatcctcagaagttttgtccccatcctggaggcagggcagaccactgatgaggggggttgtttttaaaaggctgcctttcccagatggattgatagacttatctcagcctggctaaaaccctggccactccctgatagagaacaaggttcccagcaggcaagggcaggggtggggcccagcagggaccagttttgcaagctcacctggccctacacccgcaaacactcagcttttcctccaagacaagcctcaaggcttggagcaagtctctttgaagttttcttatgaattgctatgcttaacactaaatcatgggaaagattaacacccatgaaactgaagcaggagcacataacagragcttaatatgaatcttccatcttaaaaatatcttattctacatctgaaaagagaaccatttggaaattccacgtcatactcacttatagacttaacagcaatttcaactttaaaaattcattcccacctgcattatatgacttgattcttacagtagccctgta

SEQ ID NO: 109635 - DNA, 578 bp, Homo sapiens
gccacagagctctgctaacatgcaccatgctgatcactccattggaggctccaaactctaagaggctcaggcttgcctcctctttagctaataggaaatgaagaggcctcaagaaactgctgggcttccttgggcatggaaatgaccaaagatgctatgaatggatctattgactgctcagatgcatggctggagtcaagcacatgacagtcaggtctggcagccctgggagccattctgtctctctaaggcagaggctttacccattttttgacaacacatcttatccccaatatctatttatttgyttataaataatatagcactagtatattccgtagtaccacctgcaaattatatagtacttatatgctataaacattatacgtgcacaaacatgaactgtctaaggaaatacaaagaaaaatctgaaaggtctatattattttcttcttttgccccagaagatctctcaagcaccattctgaggcaatggttctcaaactttgtgtaaccaagaattacttggagatcttgcttaaaatgaaggttcactgggccttgaccctagtgttgat

SEQ ID NO: 109636 - DNA, 578 bp, Homo sapiens
aatatttttagatatgcttttttccaatttgattttcacaagtttttgtaaagtgactgtataacttcctggcctttaaaaaatatggtgattaaggagtttacctactctccttgtattgatggtacccgtggctctatgggtagcatattctgcactagcccactgaaccttgtattctcagagcccaaacctctgataccctagtcttttgtggaatgggagagggctgaagcatgcatttatttaaaataaatgattttttttaaacattgacatacaaacaaacagacaaaacccttcttatctcaaacagaatgtttaattctagttggcaactgattttttttttacttcttcttccattattcactatttaaatagttgccatttwaaaaaagatacactgaattttccaaaggctaaggaattaaagtttaaaaaacaaatccataacaagtgtttctcatcctagacaaaccttggaaccaggatcctcccccaggtcagagcgcagacttacacaaaagccccagggctgccagccctatcagcagcaccaagcacaaagtcagcag

SEQ ID NO: 109637 - DNA, 533 bp, Homo sapiens
tctaccctttggctaatacctcctcatttccctctcctgtaacccctggcaaccaccattctactatctgcttctatgagtttggttatttgaagttcctcatataaatggtatcatgcagcatttgtccttctgtatctggcttgtttcacttagcataacatcctccgtatttattcatgttgctgcaatggcaggatttctttcttttttaaggctaaataatattccatggcatgtaccatatgacctagcaatcccatgactgggtatatatccaaagaaattgaaattgcaatttcaaagagatgcctgaactcctatgtttattgcagcactgtacacaatagccaacacacgaaagcaacctcaatgtccattgacatgtgaatagaataaaaataaaatgtggcatattcattttattaatttaaactatttgtttctaagaactttatattttaggttgttagttagaaatgaacaaaataaaygcttttattgctctatgaaagcttgattcctcagatcta

SEQ ID NO: 109638 - DNA, 580 bp, Homo sapiens
actttgcctataagaaatgtgaaaaatatgaagaatcctcttttattatcatggcctatgagtgcccaaactgtttgaccctatatgaattaaatacacttttttggatattttgttctccctgtatgtagggtttcaaatgggtgcaaataatatacagttaaatctaaatgtgctctttccaccagaagaataaagtctgttaccagctgaagatgagaaagtggaaataggcatagctgagataaattwaaaaaaaatgggagccttgggcatttttcataacagccctggagttagtggttggctgggaggagggactgtcctgtgtgtggctttgaagttatgtggaagtcattcacatttagcacattattctcaggctatgggggtaagggtgatgctcatatctcgtagagagagaatgttcacttactgaaagcctgcctggactttgtccttttccaggcaccatttaactattaggagttctagatcatacttggcattaaggatgtcataacaaactccactttctaaggtttctgatccttaaatataatcaagagaagtaatggtt

SEQ ID NO: 109639 - DNA, 601 bp, Homo sapiens
tctaaaagttacattgatttgattcagggactcatgtgattttgtggttttaatgtttttcttattcaagtaatcctttagacttataaggataggaaggccaggcatggtggctcacatatgaatcccaacattttgggaggctgagacgggaggatcacttgaggccaggaattcaacactagcctgaataacacagygagaacttatttctgcaataataataataataataattttttaattagccagatgtggtggtcacgtgcatctatagtttcagctactcaagtggctgaggcagaaggatcacttgagcccaaaggttcaaggttataataagctatgatcatgccctgagaccctgtctctaaaaaaattaaaaggctgggtacaggggtcatgcttataatcccaacactttgggaggtcaaggcaagaggattgcttgagcccaggtgttccagaccagcccagtatttacaaaaaataaaaaaaaccagacaggtatggtggcacacacctatagtcccagctacttggatggcaggatgatcccctgagcctgggaggtcgaggctgcagtgagccatgatcacac

SEQ ID NO: 109640 - DNA, 392 bp, Homo sapiens
ttgcctgcatataaatttagtttattcattcattaaatttttcaacacatacctattgagcgcctccttttttaaaaaaacatagttatgcactgggtgttagaatattaaagaaascattgtggggctcttatgtcccagtggaaaagctgactcaaaagtaaacacatgcatacttacaatgaaacaatagatcctacttcacagtctacatccagtatcttgaggcaacaactctagaagagttgaagtcttccctgcctccctgtttagcattctatactgcctagcaggagaagataaaagagatttattgcagctgtggttcagtgaggaggggcatctgaaagctggtcgtgggattttttttttttttttttttgtagtgaatt

SEQ ID NO: 109641 - DNA, 508 bp, Homo sapiens
gctaactgaaacataaatatgcacagaaagagataaatgaggcattcatacaacaacagtgtctgagtctaccacaagtgggttatgattacrggacgctgtggagcagcatgaataaaagattaagtggtgcatattttaggtaggtggatgggtgaacattgcagagaactggttttaaaaaaaagcaagaatattcagattaggtattcagaaatacctaatataaataattcattttcctctgagagtgaaacccaaaaatgacagtcactaaaagtatatttacatgacaccttaaacaaattttgtgtaatgtttttataataaaaaaatgaagcaatctctagatggaaaaggtatttcacacaatgtgtaccaccaatatacagagactgtgtagaagtgagagtgaccataaaggtttccccacttcatggtaggtcaaaacctagcagagactgtgtttagaataaaatagagtatgcaataggtactcattattctc

SEQ ID NO: 109642 - DNA, 508 bp, Homo sapiens
gctaactgaaacataaatatgcacagaaagagataaatgaggcattcatacaacaacagtgtctgagtctaccacaagtgggttatgattacagsacgctgtggagcagcatgaataaaagattaagtggtgcatattttaggtaggtggatgggtgaacattgcagagaactggttttaaaaaaaagcaagaatattcagattaggtattcagaaatacctaatataaataattcattttcctctgagagtgaaacccaaaaatgacagtcactaaaagtatatttacatgacaccttaaacaaattttgtgtaatgtttttataataaaaaaatgaagcaatctctagatggaaaaggtatttcacacaatgtgtaccaccaatatacagagactgtgtagaagtgagagtgaccataaaggtttccccacttcatggtaggtcaaaacctagcagagactgtgtttagaataaaatagagtatgcaataggtactcattattctc

SEQ ID NO: 109643 - DNA, 508 bp, Homo sapiens
gctaactgaaacataaatatgcacagaaagagataaatgaggcattcatacaacaacagtgtctgagtctaccacaagtgggttatgattacaggacgctgtggagcagcatgaataaaagattaagtggtgcatattttaggtaggtggatgggtgaacattgcagagaactggttttaaaaaaaagcaagaatattcagattaggtattcagaaatacctaatataaataattcattttcctctgagagtgaaacccaaaaatgacagtcactaaaagtatatttacatgacaccttaaacaaattttgtgtaatgtttttataataaaaaaatgaagcaatctctagatggaraaggtatttcacacaatgtgtaccaccaatatacagagactgtgtagaagtgagagtgaccataaaggtttccccacttcatggtaggtcaaaacctagcagagactgtgtttagaataaaatagagtatgcaataggtactcattattctc

SEQ ID NO: 109644 - DNA, 508 bp, Homo sapiens
gctaactgaaacataaatatgcacagaaagagataaatgaggcattcatacaacaacagtgtctgagtctaccacaagtgggttatgattacaggacgctgtggagcagcatgaataaaagattaagtggtgcatattttaggtaggtggatgggtgaacattgcagagaactggttttaaaaaaaagcaagaatattcagattaggtattcagaaatacctaatataaataattcattttcctctgagagtgaaacccaaaaatgacagtcactaaaagtatatttacatgacaccttaaacaaattttgtgtaatgtttttataataaaaaaatgaagcaatctctagatggaaaaggtatttcacacaatgtgtaccaccaatatacagagactgtgtagaagtgagagtgaccataaaggtttccccacttcatggtaggtcaaarcctagcagagactgtgtttagaataaaatagagtatgcaataggtactcattattctc

SEQ ID NO: 109645 - DNA, 524 bp, Homo sapiens
gttcaagctattctcctgcctcatcctccctagtagctgggactaaaagcatgcaccaccacacctggctaatttttttgcattttttagtagggatggggatttgccatgttgtccaggctagtctggaaatcctgacctcaggtgatccacccaccttggcctcccaaagtggtgggattacaggtgtgagccacctcacccaacaagaataacaactttctaaaggagtcgttttctctctctctctctctctctctctctccaggatttgggagacatggtggcaaggtatgttaatggccatcartgcaagctggagcacaaggcgtgctgtgaaaaacatcaagttgtttccaacaaagggaaaacataatttactaacaccataatgtgtcaatgtgattgtgtgtgtaagtgtgtgtacttatgtgtttgtgtggtatgttgaatgttacctatgcctcttatcagacattaaacttttcttacttttccaagtgactcaggggtttctgttttga

SEQ ID NO: 109646 - DNA, 584 bp, Homo sapiens
tctctctctctctctccaggatttgggagacatggtggcaaggtatgttaatggccatcaatgcaagctggagcacaaggcgtgctgtgaaaaacatcaagttgtttccaacaaagggaaaacataatttactaacaccataatgtgtcaatgtgattgtgtgtgtaagtgtgtgtacttatgtgtttgtgtggtatgttgaatgttacctatgcctcttatcagacattaaacttttcttacttttccaagtgactcaggggtttctgttttgaagagttcaatgcagragttgctagaatacaattgcctctttttaggattcagaatcataattagagatcaactatttggtggcaaatagggagagaggcatttatctttcagtggcagtaggttagaaacggagtgaagagttagaaagattccctaagggccacaaacccatcctaggattgtggaggtacattacaatatcagaagtggtttgaatgaagcattttctgttggaatctatttcttaaacacaaacatcagaaacttaaccaactcaacctacttccttgcaggagtgagtccgtgct

SEQ ID NO: 109647 - DNA, 584 bp, Homo sapiens
tctctctctctctctccaggatttgggagacatggtggcaaggtatgttaatggccatcaatgcaagctggagcacaaggcgtgctgtgaaaaacatcaagttgtttccaacaaagggaaaacataatttactaacaccataatgtgtcaatgtgattgtgtgtgtaagtgtgtgtacttatgtgtttgtgtggtatgttgaatgttacctatgcctcttatcagacattaaacttttcttacttttccaagtgactcaggggtttctgttttgaagagttcaatgcagaagttgctagaatacaattgcctctttttaggattcagaatcataattagagatcaactatttggtggcaratagggagagaggcatttatctttcagtggcagtaggttagaaacggagtgaagagttagaaagattccctaagggccacaaacccatcctaggattgtggaggtacattacaatatcagaagtggtttgaatgaagcattttctgttggaatctatttcttaaacacaaacatcagaaacttaaccaactcaacctacttccttgcaggagtgagtccgtgct

SEQ ID NO: 109648 - DNA, 584 bp, Homo sapiens
tctctctctctctctccaggatttgggagacatggtggcaaggtatgttaatggccatcaatgcaagctggagcacaaggcgtgctgtgaaaaacatcaagttgtttccaacaaagggaaaacataatttactaacaccataatgtgtcaatgtgattgtgtgtgtaagtgtgtgtacttatgtgtttgtgtggtatgttgaatgttacctatgcctcttatcagacattaaacttttcttacttttccaagtgactcaggggtttctgttttgaagagttcaatgcagaagttgctagaatacaattgcctctttttaggattcagaatcataattagagatcaactatttggtggcaaatagggagagaggcatttatctttcagtggcagtaggttagaaayggagtgaagagttagaaagattccctaagggccacaaacccatcctaggattgtggaggtacattacaatatcagaagtggtttgaatgaagcattttctgttggaatctatttcttaaacacaaacatcagaaacttaaccaactcaacctacttccttgcaggagtgagtccgtgct

SEQ ID NO: 109649 - DNA, 363 bp, Homo sapiens
cacttaattatcccatgcaggaacaaaatttgcacatcatggacagacaggattttgtacaatgcacttgtaagtgtgagtgctctctcctattaatacggtaaattctacacctcattgctttaggtggaaaaatttattttacacagaagttttcactgaatctttgggccagaataggaatttaacagtcgtgcatcctatggcaacaaaaacacattctgagaaatgcattactaggcgattttatcattgtgtgaacattagaacacacataaaaacytagatagaatatccatctacagatataagctaaatggtacagcctattgcttctctgagaagttgctagcaatgtctcag

SEQ ID NO: 109650 - DNA, 394 bp, Homo sapiens
cacttaattatcccatgcaggaacaaaatttgcacatcatggacagacaggattttgtacaatgcacttgtaagtgtgagtgctctctcctattaatacggtaaattctacacctcattgctttaggtggaaaaatttattttacacagaagttttcactgaatctttgggccagaataggaatttaacagtcgtgcatcctatggcaacaaaaacacattctgagaaatgcattactaggcgattttatcattgtgtgaacattagaacacacataaaaacctagatagaatatccatctacagatataagctaaatggtacagcctattgcttctctgagaagttgctagcaatgtctcagcrggaaccaaaagggtttaacccacattgaa

SEQ ID NO: 109651 - DNA, 609 bp, Homo sapiens
gatgtatccggaagtgctgaatacacactaaaatgtttatttttatttcctttattttattttatttttatttcttttgctagagacaaggtctcgctatattgcccatggtggtctcgaactcctgacctcaagcaactctcccgcctgaactgcccaaagcactaggattagaggcatgtgccackgtgtctggtcttttctttttttggtctcaaactcctgacctcaagcaacccaccctcctcaactgcccaaagcactgggattagaggcatgtgccaccggtgtctggccttttctttctttttctttttttctttgatttagaagagaaagaaaattaaatgacagcacagcagaagaaatgcccaagagcttgtgttcaatgaaaatcaggtgatcctttactgaagagttgcttttagttagaactgggaatgggtattcaggaataagtaaactctgcttttcaccactgtcgaagtgtccagtgtttccccattcagcaactggctaattaagggtcatatggcaagaaggatcttatgtgtcttttaatctcttaaactgatcactaactcaaggtgattatacaaattatgaaaa

SEQ ID NO: 109652 - DNA, 510 bp, Homo sapiens
gtatctttctactcctgtgtctcaaagtggatgaccatttcagtctcttctctacctccccactgttacctcactatattccaaggccccaaggctggctaggggtgttcctggattatgaatgtgggatagtgagctttgttaatgttgcccaaagttccctcatttgtagtttcctctcacgcatcttctattttcctctcagacctttcatttgccacggatctaaataatcagggacaggtcacaracctgaccaaggccttgggaattctaatagcagaggaggctcctattctggttactttcttaatggggaaaatcagtcatatctcattaccttttacttcattttacctcctggatatatatttatcgtatcattttttaaagtgttgataatgaacatttgtcatttctattttatttgaatagatgtaacgtctcttattatattgtataggatgcatgttcttttaacttgttatcaaagcgtactagaggtgaaag

SEQ ID NO: 109653 - DNA, 510 bp, Homo sapiens
gtatctttctactcctgtgtctcaaagtggatgaccatttcagtctcttctctacctccccactgttacctcactatattccaaggccccaaggctggctaggggtgttcctggattatgaatgtgggatagtgagctttgttaatgttgcccaaagttccctcatttgtagtttcctctcacgcatcttctattttcctctcagacctttcatttgccacggatctaaataatcagggacaggtcacaaacctgaccaaggcmttgggaattctaatagcagaggaggctcctattctggttactttcttaatggggaaaatcagtcatatctcattaccttttacttcattttacctcctggatatatatttatcgtatcattttttaaagtgttgataatgaacatttgtcatttctattttatttgaatagatgtaacgtctcttattatattgtataggatgcatgttcttttaacttgttatcaaagcgtactagaggtgaaag

SEQ ID NO: 109654 - DNA, 510 bp, Homo sapiens
gtatctttctactcctgtgtctcaaagtggatgaccatttcagtctcttctctacctccccactgttacctcactatattccaaggccccaaggctggctaggggtgttcctggattatgaatgtgggatagtgagctttgttaatgttgcccaaagttccctcatttgtagtttcctctcacgcatcttctattttcctctcagacctttcatttgccacggatctaaataatcagggacaggtcacaaacctgaccaaggccttgggaattctaatagcagaggaggctcctattctggttactttcttaatggggaaaatcagtcatatctcattaccttttacttcattttacctcctggatatatatttatcgtatcattttttaaagtgttgataatgaacatttgtcatttctattttatttgaatagatgtaacrtctcttattatattgtataggatgcatgttcttttaacttgttatcaaagcgtactagaggtgaaag

SEQ ID NO: 109655 - DNA, 538 bp, Homo sapiens
gaagaaaacatcagtatgtcagagagcacactggggaatatgcacaagattatcccaagccagagcctcatggcctgcctggccaccctgggctgagaggatcactatctcagcacactatttgggaaatggatcaaatgacacttttagtaaatgttatcactctatagcataagaaataattaatttctttttatttatataaaaggctatcgtataacttatatgtatagtaattaaatgaacatttgtgaacytaatagccatatgaagaaaataacatttctaatatctttggatgccccatgtactaatgacagttacgcttttgcattttcttgaattttatgtttatttatctttcctctgtcattatttataattttatcacacatggctgtatcctttacatgttttggcattatgtatttttgaatttttataaagacaatcataccatgtgtaattttcagggacttgatttttttcattgacttttaagggttcaaatatattatcactgtggatgtagtttgcc

SEQ ID NO: 109656 - DNA, 488 bp, Homo sapiens
atatattttctgttgagtcctatactagtaagattttcaacacaaggtgactctcgaccttgccttgtaggaagagtgctgagaaaatatttcacctgctctttctccataaggagcttggtgctgatcattgctattttcttattcgatctgtaaagatarcaaagacaaatgcttagtatttcatatttccttaaatgattcttaatgccttgcagtcattacatttaaagtgttgccctgagagtaaaccaaattacccactaaatagtgttttcacaccgaagatgtgtaagagcatacctgttgtaaggaattataattttaaaatcattctaaagaagcacctttgtttctaaggtgatttacactgaacaagcagttcaaacaaagtagacagggaagagaaatggctatcagtggtgtatggctcaacaggcaaaatttgctgccttctaaaatggctctacttgtaagattctgaagat

SEQ ID NO: 109657 - DNA, 567 bp, Homo sapiens
tatatatatatattatctcctatatatattttgcagtgaaataaatgaaagcacattacaggtaaacttacctgtttttaacgtgtatcctgtatatgtatatcctttaatttttctactgtctgcatagccctttcatctagctctgatatatattcgtgtagtacactaagttctacgatamtgttttccatatgtgtcttgagatttaatatttcttcttccaacatcttttgattctcctcaagtttttcacattcttgttgtacttttttcatagataataactcctgttggataacttgattgtctttagccaaattgacacattttgaagatacagcttcctcctctgccgtaagatcatcaaactgcataaataaaatagtatagcgtgataatgaagtaggctgagaataatctaatacaaaaccaatagcaaattttaaaatgcatttacatgcaataaaatgttatcagtaatgcatcagattcttcaaatgtgaacccttaaattactcagaattttaagaacaatgttaaagctaccatgagtcataaaaatat

SEQ ID NO: 109658 - DNA, 567 bp, Homo sapiens
tatatatatatattatctcctatatatattttgcagtgaaataaatgaaagcacattacaggtaaacttacctgtttttaacgtgtatcctgtatatgtatatcctttaatttttctactgtctgcatagccctttcatctagctctgatatatattcgtgtagtacactaagttctacgataatgttttccatatgtgtcttgagatttaatatttcttcttccaacatcttttgattctcctcaagtttttcacattcttgttgtacttttttcatagataataactcctgttggataacttgattgtctttagccaaattgacacattttgaagatacagcttcctcctctgccgtaagatcatcaaactgcataaataaaatagtatagcgtgataatgaagtaggctgagaataatctaatacaaaacmaatagcaaattttaaaatgcatttacatgcaataaaatgttatcagtaatgcatcagattcttcaaatgtgaacccttaaattactcagaattttaagaacaatgttaaagctaccatgagtcataaaaatat

SEQ ID NO: 109659 - DNA, 567 bp, Homo sapiens
tatatatatatattatctcctatatatattttgcagtgaaataaatgaaagcacattacaggtaaacttacctgtttttaacgtgtatcctgtatatgtatatcctttaatttttctactgtctgcatagccctttcatctagctctgatatatattcgtgtagtacactaagttctacgataatgttttccatatgtgtcttgagatttaatatttcttcttccaacatcttttgattctcctcaagtttttcacattcttgttgtacttttttcatagataataactcctgttggataacttgattgtctttagccaaattgacacattttgaagatacagcttcctcctctgccgtaagatcatcaaactgcataaataaaatagtatagcgtgataatgaagtaggctgagaataatctaatacaaaaccaatagcaaattttaaaatgcatttacwtgcaataaaatgttatcagtaatgcatcagattcttcaaatgtgaacccttaaattactcagaattttaagaacaatgttaaagctaccatgagtcataaaaatat

SEQ ID NO: 109660 - DNA, 526 bp, Homo sapiens
agacacaaggtctactgtgggtggagggtgggggtagagtgaggatcaaaaaactccctattagatactacgttcactacctggatgactacgtaatctgtacaccaaatcccattgacacacattttacccayataataaacctgcacatgtacccgctgaacctaaaataaatgttggaaggaaataaagttacaaccaactcttgtactattgtgaggaaacaatcatatgtgttgacaaaaaaatcagctactaatagatttataatagtatatatgtagcagaaaaatatcagatataacttatatacccaaaagtatgacttaaaaacagcatgacaatctttatgatgggatattgtgcaactactagaagcacattttcagagattatttattaacatatgataatgactacattgagtggtttttagaagcatgaattgaaaccatgtataagcatgactttattgaacttaaatataacattacacacacatttacataattataaaataagtatg

SEQ ID NO: 109661 - DNA, 413 bp, Homo sapiens
gtcgttggaattgggaggcttctagtagctataacataagcactgatgtttactmttccctgccctccactttgatcactctgggaaacgtttttttttcttaaaaaatcaattgtattgaaagataatttacataaaataaatactattttaaagtgcacagtttgctgagttttgccagatgtaaccatccaggtgaataaaattgattaaactgatctttcaaataataaattaactttgcaatcttgctagaaatttaatttgttcacagtttattatccattctatgtactgctacattcaattggttattatgttttaaggacttttgagtctatgtttatgagggataaacatcaaagttgtataatgcctttgtctcgatttggaatcggcaatactgggttcat

SEQ ID NO: 109662 - DNA, 413 bp, Homo sapiens
gtcgttggaattgggaggcttctagtagctataacataagcactgatgtttactcttccctgccctccactttgatcactctgggaaacgtttttttttcttaaaaaatcaattgtattgaaasataatttacataaaataaatactattttaaagtgcacagtttgctgagttttgccagatgtaaccatccaggtgaataaaattgattaaactgatctttcaaataataaattaactttgcaatcttgctagaaatttaatttgttcacagtttattatccattctatgtactgctacattcaattggttattatgttttaaggacttttgagtctatgtttatgagggataaacatcaaagttgtataatgcctttgtctcgatttggaatcggcaatactgggttcat

SEQ ID NO: 109663 - DNA, 626 bp, Homo sapiens
acagctgcactggccatgttcatgtcactgcactccagcctgtgcaacagagcaagattttgtctcaaaaaaaaaaagttggtgacaattggaataattggaactcacatacattactggtgggaacataaaatggtgtaatcaatttgggtgttttcttggcatttgatttttttaaaaaatcaagacattgtttccctatgttgcccagggttgtcctgaactcctgagctaagaaaatcctccaaactcagcgtctcaaatacctgagattaaaggtgtgagccactgtgcctgaccagtgtaaccactttgaaaaacaacgtggcagtttctcaaagactaaatgtatagtaatcacataatgcaacaatttcactcctgagtgtaaatccaagagaaataaaaatatatgttcacactaaaacttacgtacgagtgttcatagcagcctgactcatgatggtgaatacgcaaaaacaacacaaatgtccatcaactaatgaayggataaacatacgtaccctatgaacatagggtacgtaggaggtagtggctaagaggtgagggtttctcactcataagtgggtaactcacaagtgggtaatcacttctaagaaagactg

SEQ ID NO: 109664 - DNA, 626 bp, Homo sapiens
acagctgcactggccatgttcatgtcactgcactccagcctgtgcaacagagcaagattttgtctcaaaaaaaaaaagttggtgacaattggaataattggaactcacatacattactggtgggaacataaaatggtgtaatcaatttgggtgttttcttggcatttgatttttttaaaaaatcaagacattgtttccctatgttgcccagggttgtcctgaactcctgagctaagaaaatcctccaaactcagcgtctcaaatacctgagattaaaggtgtgagccactgtgcctgaccagtgtaaccactttgaaaaacaacgtggcagtttctcaaagactaaatgtatagtaatcacataatgcaacaatttcactcctgagtgtaaatccaagagaaataaaaatatatgttcacactaaaacttacgtacgagtgttcatagcagcctgactcatgatggtgaatacgcaaaaacaacacaaatgtccatcaactaatgaacggataaacatacgtaccctatgaacatrgggtacgtaggaggtagtggctaagaggtgagggtttctcactcataagtgggtaactcacaagtgggtaatcacttctaagaaagactg

SEQ ID NO: 109665 - DNA, 594 bp, Homo sapiens
tgtttccccttaaatgggatttttgttattgctacctagccaacctgctatacagatagctaaaaaagtagaagcaggctcaatagtgggtagcaaacaaagattggaagggcttggagggattagagtactagagggagtgggagggagtgatttaatcatggatgggtgggggtgtatgtggaaggsaaaaaggggtgggtagggtgggagggagtagactggctgtatggtggtgggaaggtggtgggtagtaggaagggggagtagcctgctgcagaggcagagcctcatggaaaatgcctactggggaagtgcacctgtggctttgcaggtctgagcccccatggctgctctcatagactggactagtgttgagtgcctgtagcttttccacacggagggtgcaagctgttggtgggtctatgtatctgaggtctggagggtggtagcatgggggctccaagtccatattttccttctgcactgccctagtagaggtttcccaagaactcttcgtctgcaggaggctactgcgtggaaacagtaggaggtgggtgtgggaggcagatccttcaccaatggttaggcaac

SEQ ID NO: 109666 - DNA, 594 bp, Homo sapiens
tgtttccccttaaatgggatttttgttattgctacctagccaacctgctatacagatagctaaaaaagtagaagcaggctcaatagtgggtagcaaacaaagattggaagggcttggagggattagagtactagagggagtgggagggagtgatttaatcatggatgggtgggggtgtatgtggaaggcaaaaaggggtgggtagggtgggagggagtagactggctgtatggtggtgggaaggtggtgggtagtaggaagggggagtagcctgctgcagaggcagagcctcatggaaaatgcctactggggaagtgcacctgtggctttgcaggtctgagcccccatggctgctctcatagaytggactagtgttgagtgcctgtagcttttccacacggagggtgcaagctgttggtgggtctatgtatctgaggtctggagggtggtagcatgggggctccaagtccatattttccttctgcactgccctagtagaggtttcccaagaactcttcgtctgcaggaggctactgcgtggaaacagtaggaggtgggtgtgggaggcagatccttcaccaatggttaggcaac

SEQ ID NO: 109667 - DNA, 594 bp, Homo sapiens
tgtttccccttaaatgggatttttgttattgctacctagccaacctgctatacagatagctaaaaaagtagaagcaggctcaatagtgggtagcaaacaaagattggaagggcttggagggattagagtactagagggagtgggagggagtgatttaatcatggatgggtgggggtgtatgtggaaggcaaaaaggggtgggtagggtgggagggagtagactggctgtatggtggtgggaaggtggtgggtagtaggaagggggagtagcctgctgcagaggcagagcctcatggaaaatgcctactggggaagtgcacctgtggctttgcaggtctgagcccccatggctgctctcatagactggactagtgttgagtgcctgtagcttttccacacggagggtgcaagctgttggtgggtctatgtatctgrggtctggagggtggtagcatgggggctccaagtccatattttccttctgcactgccctagtagaggtttcccaagaactcttcgtctgcaggaggctactgcgtggaaacagtaggaggtgggtgtgggaggcagatccttcaccaatggttaggcaac

SEQ ID NO: 109668 - DNA, 374 bp, Homo sapiens
aacataacaattacttaatattcaataaattagggtcattacattttcacaagcatcagaagctttacacacagaaaaatattcatagatttaaaatgtctctaacctgtctgagtttgcttcagttgcaatacaaaatcggtcacctgaatacttaactttttayggaagtttgtaatctagtatctgggccttcagccacccagaatgctcattctgaaaagattcagaatcagaaaagaaattattgcaaaacaaatcacggcttgcttcacaaggagacgttttcttatcctgtttgtactcttttaattgagaatatttatgccagtaaacaacagggtccctattttaaaaatgacaaacagaacaca

SEQ ID NO: 109669 - DNA, 399 bp, Homo sapiens
gaatatcacatgaatacacttgaatcctctaatcactagccacatattggatagtgttcaatattcattctaacttttcaagatatcaccaattaactccaattcaattctatgtcagacatgtcacttaactgaaatttgaggttctatcactcttcatacctatgaattctgtttatactcattgttatggaatttggagttctccacgatttgtccttaaacttatttctcattactactttaccmtacctcattgctgccctatttgtctttttcagcttctgaaaggcagatccttattgaatacttcctgcaagtctaggttcgtggaagtttctgagtgaatttgggaaagggtaaagggagttgaaatcaaaacagtaagagatgtattca

SEQ ID NO: 109670 - DNA, 562 bp, Homo sapiens
tttaatcttgccaacgttattgatagtactcttaatacttttagtctttggatggaaaagaaataaaagtagaacaagcaaagaaaccatcttttccaagtggtggtaggcggagaccaccaccttcttcaagaaacagaagcccttcaggaagtctgagatctgcaagaggaagtagtggaggaacaagaccgtggctgccctcacatgaaggacacttgggtaatgttctaaaatataaagatggaaccataggactgaaagaaaataagtttgaagatatcaaaatttcccaattttatttattttgggaaatttactyattggtaagaagtaattttcttattgataagaaaattaacttattgataagaagcaaaattatttctaagtactaaaggtgtattataagaatgattgcactaatatctaaaatttgttttaaaattgtaataagtttgcattgaaataacacaaatttcaaactgaattgagtttatgaatgctgattgcctgtactcaacaggttttctgaagaactcatttatattaactatacttc

SEQ ID NO: 109671 - DNA, 590 bp, Homo sapiens
ccatgtctaacatccagggcacactggtgtgaggggtaggctcccacagcattggacagctctgtctctgtggctttgcagggttcagcccctgcagcygcactcatgggatggcattgactgccttcggtttttccaggcatatatggtgcaagctgtcagtggctctaccattctgaggtctggaggacaatggcccttttctcacagctccactaggtagcaccccagttggaactctgtgtgggggctttaaccctgcattagccctccacactgccctagtagggaattctccatgagggctccaccactgcagcaggcttctgcctgtacatccagacttttcatatatcctgtgaaatctaggtggagactcccaggcctcagttcttgtcctctgtgtagccacaggcttaaaaccacatggaagccactaaagtttgtggccaacatgctctgtagcagcagcccaagctgtacccaggcccctttgagccatggctgaacctggagaagctgggatgcaaggagcagtgtcccgaggcttcacagggcagcagtgccctggctctggcccatgaaaccat

SEQ ID NO: 109672 - DNA, 613 bp, Homo sapiens
gaaaactatcccaaggtttagcatgtgagttggctgggttttaactaattgaggctttatttgacttttccaaaagtcaaataaatccaaaagtttcatgaatatttacatcactaagataatttaaaaagagaaattaaaagattagtacaacttccaggtaacttactgagaagaagagtgtgtgtgtgtgtgtgtgtgtgtgtattaagtgacaatttacacccttaatatttcttaaaccaattcaaagtaaattacaataaaagcacaatctgcatgttcccagaatggttatgataaaagagacacaaatagctaaagagggggctaattacatcaggaactagggatggaataattactataatcaggcacgatttggtttttagttctggaaaatcaaggccaaaagggaaacatgttgcatagctcagtatttgacaaaatgatagcaatactactaagggtgagatgataaaaaagaaagaaccttggacttgaaatggaaccctgaattccagtctraaactactagctgtccagctgtgagcaggttattcaacactgtttaatgcaatttccttcactataacattagaggttgggttgg

SEQ ID NO: 109673 - DNA, 513 bp, Homo sapiens
tgtgtgtgcattcaactcacatagttgaagttatcttttgatttagctgttttgaatctcctttttgcagaatctgcaagttgatacttggggccctgtttcaccctatagtggaaaagcaaatatctgcacataaacaaacactacagagaagcattcagagaaagttctttgtgatgtgtgcattgaacacgcagagttgaaactatcttttgattgtacagttttgaatatctctttttgtagaatctgcaagtggaagtttggagctctttgcacmctgtggtgtaaaaggaaatatcttcatataaaaactacacagaagcattcagagagacttctttgtgacgaatgcgttcctcacacagagttgaatcttcctttttattgagtagtattgaaaccctctttttgcagaataaccaggtggatatttggagagctttgaggcctgttttggaaaaggtaatgtcttcaaattaaaaccacacagaagcattctgagaaacttct

SEQ ID NO: 109674 - DNA, 481 bp, Homo sapiens
ttgtgtgtgcattcaactcacatagttgaagttatcttttgatttagctgttttgaatctcctttttgcagaatctgcaagttgatacttggrgccctgtttcaccctatagtggaaaagcaaatatctgcacataaacaaacactacagagaagcattcagagaaagttctttgtgatgtgtgcattgaacacgcagagttgaaactatcttttgattgtacagttttgaatatctcttttgtagaatctgcaagtggaagtttggagctctttgcaccctgtggtgtaaaaggaaatatcttcatataaaaactacacagaagcattcagagagacttctttgtgacgaatgcgttcctcacacagagttgaatcttcctttttattgagtagtattgaaaccctctttttgcagaataaccaggtggatatttggagagctttgaggcctgttttggaaaaggtaatgtcttcaaatt

SEQ ID NO: 109675 - DNA, 474 bp, Homo sapiens
tttaattttctgccattggctgcaaagtgctccaaatattcacttacatattatacaaaaagagtgtttccatactgctaaatcaaaagaaaggttcaactctgtgaaacgaatgcacacatcaccaagaagtttctcagaattcttctgtctagtttttatgtgaatatatttccttttccaccacaggcctcacggtgcttgaaatgtccacttgcagattctaaacaaagagtgtttcaaaactggtccatcaacrgaaagtttcgtctctgggagatgaatgcgcatatcacaaaaactttctcagaatgcttctatctagtttttatgtgaagatatttccttttccactattggcgtcaaagcgtcccaaatgtcatcttgcagattcaacaaaagagagtttcagaactgctcaaacaaaagagagccttaactctgtgagatgaatgcacacatcacatagaagtt

SEQ ID NO: 109676 - DNA, 249 bp, Homo sapiens
cagctgggatgactatccggtctaaagtgactaatccactccactaccccaatctccctaagcctttggatcccttcctctacattaaacsaaggtagatcagtcattttcagcttgcgcacagtgggccgtcttttcatccatatttcagctaagcaagcaaataaactattataacttttttttaacaccccaagctgcaacattaaatgcagagtcccagttagtgggcccaaatcaataaatttg

SEQ ID NO: 109677 - DNA, 566 bp, Homo sapiens
gtgacagtttctcagtctttctttctcattcataaccttaagacttttaaaggagtactagttaattattttgtaaaaggccccttatattgggtttgtctgatgttctcttataattagatttaggctatgcgttactgtaaaaaatatcacagaagtgaaatacttctcttaatgcaacttcctttgtaggtacaagatgttggtatatcatattctgcttatgttaaacttgatcacttggttaaggtagtgtatgccatatttgttcaatgtaaagttactatattttaccttatarttaataaatatttattttgaggaaaacatgatggatctatgcaagtatatactttatccttacacttttgtatatgaattttagcatccatttgtggatcttgcctgctgcaataattagcatgatgttcaagtgaagattttctatttcctttattctatctacatttattaatttttttctgtgagaaaaaatgtgtcttcttgcaattcatttatttatttacttatttttatattcatttggactcaaggatatttatatt

SEQ ID NO: 109678 - DNA, 566 bp, Homo sapiens
gtgacagtttctcagtctttctttctcattcataaccttaagacttttaaaggagtactagttaattattttgtaaaaggccccttatattgggtttgtctgatgttctcttataattagatttaggctatgcgttactgtaaaaaatatcacagaagtgaaatacttctcttaatgcaacttcctttgtaggtacaagatgttggtatatcatattctgcttatgttaaacttgatcacttggttaaggtagtgtatgccatatttgttcaatgtaaagttactatattttaccttataattaataaatatttattttgaggaaaayatgatggatctatgcaagtatatactttatccttacacttttgtatatgaattttagcatccatttgtggatcttgcctgctgcaataattagcatgatgttcaagtgaagattttctatttcctttattctatctacatttattaatttttttctgtgagaaaaaatgtgtcttcttgcaattcatttatttatttacttatttttatattcatttggactcaaggatatttatatt

SEQ ID NO: 109679 - DNA, 652 bp, Homo sapiens
tgacttaaacctgtatatacacacatttatttctttgctctataagctagaagcaagaacacccccattacaatgagcacttcagattttagatgttaacaccattttctaattaaaaggatagagggctccttggagagatggctggttttagggcttgactgggaataaacaagatgagcctagaggatcttacagttccagaaagtaaaaaagatcccacctctaaaaaaaaaaatctcaaagtgatggacataggtcaaaaggacacagcagccaattgtcctaggtgaagctaggacaatttgagcaatcaaattaataaagtagtactgaaatataactcaaagtataaaagaaatatctgtgagtccatactgatacaaataaatgattaaatgataaataaatgaatggagaagaatgggmaaatctcccgtgatgaataatttcaagtaatttatgtagatactctacattccaggagatggagcatagctgcatgttccttaagtatagactacacatagagagtttcttgtatagtaaaatcccaacttgacagtgaagaaagctgataaacaccacctcacccaggtgatcaagattaatttcaacagtgataagtcatgttgacaatatgtactcttgg

SEQ ID NO: 109680 - DNA, 652 bp, Homo sapiens
tgacttaaacctgtatatacacacatttatttctttgctctataagctagaagcaagaacacccccattacaatgagcacttcagattttagatgttaacaccattttctaattaaaaggatagagggctccttggagagatggctggttttagggcttgactgggaataaacaagatgagcctagaggatcttacagttccagaaagtaaaaaagatcccacctctaaaaaaaaaaatctcaaagtgatggacataggtcaaaaggacacagcagccaattgtcctaggtgaagctaggacaatttgagcaatcaaattaataaagtagtactgaaatataactcaaagtataaaagaaatatctgtgagtccatactgatacaaataaatgattaaatgataaataaatgaatggagaagaatgggcaaatctcccgtgatgaataatttcaagtaatttatgtagatactctacattccaggagatggagcatagctgcatgttccttaagtatagactacacatagwgagtttcttgtatagtaaaatcccaacttgacagtgaagaaagctgataaacaccacctcacccaggtgatcaagattaatttcaacagtgataagtcatgttgacaatatgtactcttgg

SEQ ID NO: 109681 - DNA, 652 bp, Homo sapiens
tgacttaaacctgtatatacacacatttatttctttgctctataagctagaagcaagaacacccccattacaatgagcacttcagattttagatgttaacaccattttctaattaaaaggatagagggctccttggagagatggctggttttagggcttgactgggaataaacaagatgagcctagaggatcttacagttccagaaagtaaaaaagatcccacctctaaaaaaaaaaatctcaaagtgatggacataggtcaaaaggacacagcagccaattgtcctaggtgaagctaggacaatttgagcaatcaaattaataaagtagtactgaaatataactcaaagtataaaagaaatatctgtgagtccatactgatacaaataaatgattaaatgataaataaatgaatggagaagaatgggcaaatctcccgtgatgaataatttcaagtaatttatgtagatactctacattccaggagatggagcatagctgcatgttccttaagtatagactacacatagagagtttcttgtatagtaaaatcccaacttgacagtgaagaaagctgataaacaccaccwcacccaggtgatcaagattaatttcaacagtgataagtcatgttgacaatatgtactcttgg

SEQ ID NO: 109682 - DNA, 637 bp, Homo sapiens
tcctgagacaaggatggtacaattatgctgacagctatgacggctycaattttccctactttaactacaacctatgaaaactgacatcctatcaatattccctagcattactcttgcatttacagcacaatgttatttttaaattctttaataattccaatatccagacaaagtttacttatgtaaatctacccattcattaccattttttcatatttacctactttaaacagtcaatgctttggaatctttttttgtttttacgtagaaacatttgaaacattaaaaaagaaatagaatataaaatattcagatgagtgaacttagcagccagggaacatttgaataaggatgattgttcccagagactgagacagttgaaaattattgctggttgatcacgaatttttaataaacatcccagaaaatccaatggctactcgattataaacttgaatttagagggaaataaatattctattttctaagaaagcttcagtcatgaaaaactgcctctctttagtaagattactcactattttggcttctgagagagaagtaatgtggaaagtgtgtctgagacactgtctttctacctgaccttactgtgaagggcactcagcaaattgccctctac

SEQ ID NO: 109683 - DNA, 572 bp, Homo sapiens
gggttttaattgaaatacaataaactgtatgtacttaaagtgtataattggataaattttaacaaattaatacatcctgaaatcataaccttgatcaagacagcagacatttccatcaccccaaaagttttcttttggctcatattgtaaacatctgtcctacaggtaaaattctcacggagctactgatgtgatttctgccacatttatttatttctattttcttgaggttatatacatttctctaattctatatactcttctcttctgcctagttttttgtatttacataattttcttaaaattcatttgtgtttttgcacgtatcagtattccagatcattktattgtttaatagtattctattaaatgagtatagtctaatttgtttatccattcatttactgatgaacattcaaattatttttagctcagtgctattacaataaagctactatatacatttttaaatgtagaaatctttgggtatatttttattttacttgggtaagtaggaatgggatgtctgagtaatatggcatggggatgtttaattttttaagagcttccaa

SEQ ID NO: 109684 - DNA, 473 bp, Homo sapiens
ttattttttattatttcattggtttttatttaatttttaaaaatttttgatctgaggtttgttgaattctcaaatgcagtacacatgggtataaaragctgactgtacacacacacacacgtgtgtgtatgtaaaatgtaaaatatgcaaaatgtaaaaaagtaaaaatacttttatatcttggcaacacttttaaagggcacagaaaaatttgatttcattattatagttattatcgtttcaatgattactgagattattttaaaacatttaagcttgcacattaatttaaagtttgaaatatgcaatatatagtcaaaagagttaacattcttgtgagatgtattgttatgagctgaattctattccccaaaatttataggctgaagcccctaaatctccactgcattagaatgttaccatattgggaggtagggcctttaaagagatattaggtgaaaaggaagccattt

SEQ ID NO: 109685 - DNA, 473 bp, Homo sapiens
ttattttttattatttcattggtttttatttaatttttaaaaatttttgatctgaggtttgttgaattctcaaatgcagtacacatgggtataaagagctgactgtacacacacacacacgtgtgtgtatgtaaaaygtaaaatatgcaaaatgtaaaaaagtaaaaatacttttatatcttggcaacacttttaaagggcacagaaaaatttgatttcattattatagttattatcgtttcaatgattactgagattattttaaaacatttaagcttgcacattaatttaaagtttgaaatatgcaatatatagtcaaaagagttaacattcttgtgagatgtattgttatgagctgaattctattccccaaaatttataggctgaagcccctaaatctccactgcattagaatgttaccatattgggaggtagggcctttaaagagatattaggtgaaaaggaagccattt

SEQ ID NO: 109686 - DNA, 473 bp, Homo sapiens
ttattttttattatttcattggtttttatttaatttttaaaaatttttgatctgaggtttgttgaattctcaaatgcagtacacatgggtataaagagctgactgtacacacacacacacgtgtgtgtatgtaaaatgtaaaatatgcaaaatgtaaaaaagtaaaaatacttttatatcttggcaacacttttaaagggcacagaaaaatttgatttcattattatagttattatcgtttcaatgattactgagattattttaaaacatttaagcttgcacattaatttaaagtttgaaatatgcaatatatagtcaaaasagttaacattcttgtgagatgtattgttatgagctgaattctattccccaaaatttataggctgaagcccctaaatctccactgcattagaatgttaccatattgggaggtagggcctttaaagagatattaggtgaaaaggaagccattt

SEQ ID NO: 109687 - DNA, 571 bp, Homo sapiens
gaattctattccccaaaatttataggctgaagcccctaaatctccactgcattagaatgttaccatattgggaggtagggcctttaaagakatattaggtgaaaaggaagccatttcattaaaggatgactttgtgaatatacagcaagaggatgatcattttcaagccacagcaagagatgccttagaggaaaccaaatgtggcagtgccttaaccttacacttcaagacctccaaaaatgtggaaaactaagttcttcttctttaagtccctcagtgcttggtattttcttattgcagccctagcaaactaatatacccatacactggaaaacaaaacattacagatagaaattgaacttgaaatcagtttgatgtattcaatcttcttgaatacaaaaattccatattaagatatcagttccctccaaattgacttataggttcaatgcagtcctaagccaaatctaagctagctgtttaaaaatagaaattaacaagttaacttttaaatttgtataaaaatgcaaaggatttaaatagctaaagcaattttgaagagagttactaa

SEQ ID NO: 109688 - DNA, 571 bp, Homo sapiens
gaattctattccccaaaatttataggctgaagcccctaaatctccactgcattagaatgttaccatattgggaggtagggcctttaaagagatattaggtgaaaaggaagccatttcattaaaggatgactttgtgaatatacagcaagaggatgatcattttcaagccacagcaagagatgccttagaggaaaccaaatgtggcagtgccttaaccttacacttcaagacctccaaaaatgtrgaaaactaagttcttcttctttaagtccctcagtgcttggtattttcttattgcagccctagcaaactaatatacccatacactggaaaacaaaacattacagatagaaattgaacttgaaatcagtttgatgtattcaatcttcttgaatacaaaaattccatattaagatatcagttccctccaaattgacttataggttcaatgcagtcctaagccaaatctaagctagctgtttaaaaatagaaattaacaagttaacttttaaatttgtataaaaatgcaaaggatttaaatagctaaagcaattttgaagagagttactaa

SEQ ID NO: 109689 - DNA, 624 bp, Homo sapiens
catcctcctggatttcagaggatgtatgggaatgactggatgcccaggcagaagtctgctgcagtcgggggccctcacggagaacctctgctacagtgatacagaagggaaatgtggggttggagcctccacacagagtccctactggggcactgcctagtggaactgtgagaagagggccatcattctccagaccccagaagaatatatctgcagacagcttggatcatgcacctggaaaagcttcagacactcaatttcatgtgagcctgtgaaagcagatgggagggaagatgtaccctgcaaagccatgtgggcagagttgccaagaccataggaacccacctcttgcatcagtgtgacatggatgtgagacatgragtcaaaggagagctttttggagctttaagatttgactgccccactgggtttcagacttgcatggggcctttagcccctttgttttggccaatttctcccatttggaatggttgtatttacccaatacctgtatccccattgtatctaggaagtaactaacttgcttttgaactgggtaacaggaagattctggaacagtttggagggctcagaggaacataagaaaatgtataaaggctcata

SEQ ID NO: 109690 - DNA, 603 bp, Homo sapiens
cagcacccaattaaagcttttttccctggcaacatttgttgtctcagtgattgactttctatgcagtgaatagcaggatgtagaccaaacccctggtgttttgataacaatttcatgtattttattgggaagactgggacccagggagcctctacatagaattataagaccatggtgtgtcaaaaaattatttaattcacckatttaggtactatctaataatgattcattgtctctgccttgcactatgtttgaagtgcttcctacagacttacataggctcacaattttccttacataagcctgaaaaatagagttcccctcctgattttccactactatgccaaagctatgtggaagtttctaatttcactctggccaataagtgtgggccaaagatgttggtaaattcagaaaaaaaaaaaactccaatacataatgttcttttagcctagttatgatgtattttttctcctcacaaaacatcagtgtttgaaagggaaaatgtggtatcttctaaaattatttttacatcttgtctctgttattcgtagctgagaaagcctcattgtttagttatcaatggcacaactaatgcttagc

SEQ ID NO: 109691 - DNA, 560 bp, Homo sapiens
tttaatttacataggatcattgtattcctattttctagtggtcagctatgaaggcattgaagccatcccctactcctgcctgattctgctctattttactgctatgttgtatctttcttatttaaagaaaatctttttaatttcagctttaagctacacagactacactgcattatttgtaatacatttctactgtcactcagaaagactattgagatattcagtaaaatagagtttcttttaaagtcagatttrcagtaatataaatacaaattactaagttcattaaaagtaatcactggtatagttttataaggaagttgaaaagctaacaacatttcaaaattaagcatttctagttattagttcagttgcttcaagaagcacatggcaaataaaggtcaatattttcactaatgaacagccttcaaaagctagagagtaataatttttaaaatatattcttaggatgttctgctctacaagcaaatttatgatgaaataaacataaaaacaataaagtaaaatattcgacaataaactttggtctaatacatttt

SEQ ID NO: 109692 - DNA, 581 bp, Homo sapiens
atttgtgtacatactgtgtgtggctgctttccctataacagcaaagttgaatggttgtgactgagaccatatggcccacaaagcaaagatatttactatctggctctttacagaaagtttaccagcccttgatctagatagtaattttcaatagctgctaaaacctttaggtgagagaagctgctgggaaattttgtaatggctatatggagattgacatcacctgatcctctgggtgcctctggatgtgaaggcagtacccgtgtactacstctgaaagtattctttgaacactggctgtatacatgatgacattaaagaattattaatttcttagagtgtgttaatgattggtcacttattaagagaggctgtcttcagagatttttgctaaaatatttgtggataaagtatatgatgtcaataattttctgtgttattcagcagggtcccagggggttatacacaagacaagagtgaccacatattgacaattgtagagctaggccattggtacatgggagttttctattctatttgtatatgtttagaaatttcataaaagtttttatgttactatt

SEQ ID NO: 109693 - DNA, 607 bp, Homo sapiens
cctcaagacaagctgaactgggaaagtcaaagtgaatcgtgataaggggttcaattacagcccgtgcattctccttatctgggtgacaaacacactcatataatttgagttcccactcttgttatactttgaaagtgattagaaagccttaatatattttgaaagaacgcaacttctctactgtattctacataaattgcatrctaagctagcctgaaaggagaaattttatttcaaaggaagattagaaagtgccttttttaaagctatcaaagctgataccaagatgcaaaaggtacaactaaccagatacttaggatatagagccttgcaccattaaaagggtacttttttgtgcaaatcattttttggtagatagtgaggaaaaggaatgtatgtaatagggacattaactttcactttacaaggcagaagatcacaaggggaacagcaaatgagctgagctgattatcttggggtttcaattgaagaagagcaaaatgagctagctagcacagcagacaggtcaatgtctactgaggcaatgctcagagcactttggaagctgcagaaattaagcctttttgttcttgtattgtggcctggt

SEQ ID NO: 109694 - DNA, 596 bp, Homo sapiens
aacttgtctagaaaatccatagataatatggcaaaatgctttggaagttgtaaaatacaatacagagaacccctgactttttttctaggctgagcatgaagtctattacccaaggttgtttgagtgtctggcagaagaaagtargaggaacttgaggcttattgaaaaaggagatttggtttggcattagtcttaaacatctaaattgaatcctgagtatttatttaaattccacaaaggctggcaaaaattatgtccttctccagtttgagctggaattacagacaatgaaaacattgctttagtatttaattgcaataactggtatcataccacttttttgtacaatgatgcatcacggttatctgaaattgatttattgctttgttgtgaaaacttgtttttcattgatgtttccccctcagtgctctttttcactaattgattgatttgattgttagagcttcaactccatctctgaagatggattggaataattattgcagcctgctgtttaatcattctgccacacaattactgctgctatgtgctcttcagttgcactttattagctgtagtaattgtagttgagttta

SEQ ID NO: 109695 - DNA, 548 bp, Homo sapiens
tctttcatttgaattgtgagcttcttcagggaaagctctgtatctgatttgtgttcatatactttacagggcttagtccagtgccttgtatattawacttgagataaatgttgctcgagtgaaaaacatatataagtcctaacttatagacattcatttttgcataataccaagatttacttgaaactcaatagtgttaataataattaaatttttaaacatgctaaactttaaaaaaacttttgttttaggttcagggtacacgtgcacgtttgttatataggtaaattgcatgtcataagggcttggtgtacatattatttcatcacccagataataagcatagtacttgatatgtagttttttcaatcctcaccttcccccaacccttcgcccttaagtaggtatctggtgttcccttctttttatccataggtactcaatgtttagctccaacttataagtgagaacgtacggtatttgctcttctgttcctgtgttagttcacttaggattatgacctccagctccgtctatgttgctgcaaa

SEQ ID NO: 109696 - DNA, 548 bp, Homo sapiens
tctttcatttgaattgtgagcttcttcagggaaagctctgtatctgatttgtgttcatatactttacagggcttagtccagtgccttgtatattaaacttgagataaatgttgctcgagtgaaaaacatatataagtcctaacttatagacattcatttttgcataataccaagatttacttgaaactcaatagtgttaataataattaaatttttaaacatgctaaactttaaaaaaacttttgttttaggttcagggtacacgtgcacgtttgttatataggtaaattgcatgtcatragggcttggtgtacatattatttcatcacccagataataagcatagtacttgatatgtagttttttcaatcctcaccttcccccaacccttcgcccttaagtaggtatctggtgttcccttctttttatccataggtactcaatgtttagctccaacttataagtgagaacgtacggtatttgctcttctgttcctgtgttagttcacttaggattatgacctccagctccgtctatgttgctgcaaa

SEQ ID NO: 109697 - DNA, 548 bp, Homo sapiens
tctttcatttgaattgtgagcttcttcagggaaagctctgtatctgatttgtgttcatatactttacagggcttagtccagtgccttgtatattaaacttgagataaatgttgctcgagtgaaaaacatatataagtcctaacttatagacattcatttttgcataataccaagatttacttgaaactcaatagtgttaataataattaaatttttaaacatgctaaactttaaaaaaacttttgttttaggttcagggtacacgtgcacgtttgttatataggtaaattgcatgtcataagggyttggtgtacatattatttcatcacccagataataagcatagtacttgatatgtagttttttcaatcctcaccttcccccaacccttcgcccttaagtaggtatctggtgttcccttctttttatccataggtactcaatgtttagctccaacttataagtgagaacgtacggtatttgctcttctgttcctgtgttagttcacttaggattatgacctccagctccgtctatgttgctgcaaa

SEQ ID NO: 109698 - DNA, 548 bp, Homo sapiens
tctttcatttgaattgtgagcttcttcagggaaagctctgtatctgatttgtgttcatatactttacagggcttagtccagtgccttgtatattaaacttgagataaatgttgctcgagtgaaaaacatatataagtcctaacttatagacattcatttttgcataataccaagatttacttgaaactcaatagtgttaataataattaaatttttaaacatgctaaactttaaaaaaacttttgttttaggttcagggtacacgtgcacgtttgttatataggtaaattgcatgtcataagggcttggtgtacatattatttcatcacccagataataagcatagtacttgatatgtagttttttcaatcctcaccttcccccaacccttcgcccttaagtaggtatctggtgttcccttctttttatccatakgtactcaatgtttagctccaacttataagtgagaacgtacggtatttgctcttctgttcctgtgttagttcacttaggattatgacctccagctccgtctatgttgctgcaaa

SEQ ID NO: 109699 - DNA, 630 bp, Homo sapiens
aaaagatctaaatgtgtaactggcaatcagctttagctttgattgtctttcatagcagcatggatcaattatgtttacccagttggctatttctccatgctaaactcatattgcatacatgcctctgaaattccagtcatgtatagtctataatatatacctatattacacaatttgtatacttttccactttaaaggggggatttatacctgcaaagggacttgacctacaagtatcatccaattctgttccaaattttggatactatgactctatcctggaaatgattcagtagttttgtttcatttgactcttcctacagacataatgtgttgaagtaaacctrttttttatgtttggaaagtagccttttgatgggtgttttctagcttttggaaaacatgtactcgaagcagaagtaactagttgttgagggaatagaaccacaacatttctgacctaggcaaattgaaaccttgtcatccttgatgacaaacatgacatgacacatgattgcctttttcagggagttcttatgtaaaagattttatccccaactagttggtatcattcaaatcaaattttataattttactctgtattaggaagcagttttataatgtccaaag

SEQ ID NO: 109700 - DNA, 630 bp, Homo sapiens
aaaagatctaaatgtgtaactggcaatcagctttagctttgattgtctttcatagcagcatggatcaattatgtttacccagttggctatttctccatgctaaactcatattgcatacatgcctctgaaattccagtcatgtatagtctataatatatacctatattacacaatttgtatacttttccactttaaaggggggatttatacctgcaaagggacttgacctacaagtatcatccaattctgttccaaattttggatactatgactctatcctggaaatgattcagtagttttgtttcatttgactcttcctacagacataatgtgttgaagtaaacctattttttatgtttggaaagtagccttttgatgggtgttttctagcttttggaaaacatgtactcraagcagaagtaactagttgttgagggaatagaaccacaacatttctgacctaggcaaattgaaaccttgtcatccttgatgacaaacatgacatgacacatgattgcctttttcagggagttcttatgtaaaagattttatccccaactagttggtatcattcaaatcaaattttataattttactctgtattaggaagcagttttataatgtccaaag

SEQ ID NO: 109701 - DNA, 630 bp, Homo sapiens
aaaagatctaaatgtgtaactggcaatcagctttagctttgattgtctttcatagcagcatggatcaattatgtttacccagttggctatttctccatgctaaactcatattgcatacatgcctctgaaattccagtcatgtatagtctataatatatacctatattacacaatttgtatacttttccactttaaaggggggatttatacctgcaaagggacttgacctacaagtatcatccaattctgttccaaattttggatactatgactctatcctggaaatgattcagtagttttgtttcatttgactcttcctacagacataatgtgttgaagtaaacctattttttatgtttggaaagtagccttttgatgggtgttttctagcttttggaaaacatgtactcgaagcagaagtaactagttgttgagggaatagaaccacaacatttctgacctaggcaaattgaaaccttgtcatccttgatgacaaacatgacatgacacatgattgcctttttcagggagttcttatgtaaaagattttatccccaactagttggtatcattcaaatcaaattttataattttactctgtattaggawgcagttttataatgtccaaag

SEQ ID NO: 109702 - DNA, 680 bp, Homo sapiens
attttttatgtttggaaagtagccttttgatgggtgttttctagcttttggaaaacatgtactcgaagcagaagtaactagttgttgagggaatagaaccacaacatttctgacctaggcaaattgaaaccttgtcatccttgatgacaaacatgacatgacacatgattgcctttttcagggagttcttatgtaaaagattttatccccaactagttggtatcattcaaatcaaattttataattttactctgtattaggaagcagttttataatgtccaaagcatctttatgcatattttttctcaaataaatcctacagcaactgtgtgagatactcaaaggtgagaatattatccccattttacaactgagcaagcagacttcaagatttgttaactttttagagctgaagtttagtccactattttatgttatcaacctttgatttgctgtgctatacccaacaatttagaaaagaatttacccaagattgtaacatataatacaattaatttattttttttctctccgcttgaaaacagaaacagtggtgattatggagtatctactgattattttkctgggacaagttgatgtcactaaatttataaactgaactgaactgataacctcagttactttgccaaaattccttcttttaatattacataaactgt

SEQ ID NO: 109703 - DNA, 582 bp, Homo sapiens
atgaaattcctagacagactaaaggagcaaatgagacaatatgcaggcctaaatttggaaaatcccctgggacagggaatgttaaagctccattttgtcactaaaagttgtccagatatttccttttatttttttgagatggagtctctctctgtcacccaggctggagtgcaatggtgcgatcttgattcactgcaagctctatctcccaggtttgctccattctcctgccttagcctcccgagtagctggaactacagacgcccaccaccacgcccagcaatttttttgtatttttagtagagacggggtttctcygtgttaaccaggatggtctcaatctcctgacctcgtgatccacccaccttggcctctcaaagtcctgggattacaggcatgagccactgtgcctggccaacattgtccagatatttcaaaaaagttacaaaaattagaagattgggaaaactgacctcaagtgaacttctcagagagactcaaaaagtatctgtaaagagagacgaagaaaagcaaaaacaaaagacaaaacttatgttattcaccttctaacagatcgctcca

SEQ ID NO: 109704 - DNA, 630 bp, Homo sapiens
ggcaacacattttaatagtgtagaaatgagtagatcttattctataggccctggaaaaattcccagaatacttctggctgtaaatattagatgaactaactaacaattgctaaaaccatagaaaccaaagtttttttggtggtacagggataytataggatctcactctgccccccacccccattattagttgtgctatcggcagtgttttgtccatgtctcctttcttggttggctaattagcaacagctccaatcatcatgctaactcaagacaatatctgaaggctgggggtgctgcttttgttcacatttttttttttaaataggaagaaaacttggaagcttgcagtaatcttcctgtaacattttattggctggattataccacatgcttatttctataccaatcactaggaaagcaaatgtaattactgtgattagcttagaataatgatttttcttttaagattggatgggggtaacggaatagtaaatatctaaatgaacttgtgtttctacagcaataaagaataaataatgactatgcataggaagccagcaatgttttctgcaggaacacagtggaaaagtttgagcaggggaatcacaagattagatttgagtatca

SEQ ID NO: 109705 - DNA, 606 bp, Homo sapiens
aatactgcttttgctgtgtgctatagaattttttatgttgtgtttctattttcatttgtttcaagggattcttaatttcattattaatttctttcttcacctattggtcattcaggagcatgttttttttttttaatttccaggcatttatacagttttgaacgtttttctttgtattgatttctggttttattatattgtagtctgataaggtacttgatataattttgatatttaaaaactttttgagactwgttttgtgtcctaacatatggtgaattctgcaaaattttccatgtgctgatgaaaagaatgtgtgtctgcagctattgggtgaaatgttctgtaaatgtctgatatttctttgttgatttttctgtctagatgatctgtccaatgctgacagtgaagtgctgaagttgtcagctattattgtattgagttttatgtctcccttttgatctaatatttgttgtatatatctaggtgcttccatgttgggtgcatatatatttataattgttatattcttttgctgaattgattcctttattattagtatacttaattatctcattttccagcttttgacttgaagttggtttt

SEQ ID NO: 109706 - DNA, 606 bp, Homo sapiens
aatactgcttttgctgtgtgctatagaattttttatgttgtgtttctattttcatttgtttcaagggattcttaatttcattattaatttctttcttcacctattggtcattcaggagcatgttttttttttttaatttccaggcatttatacagttttgaacgtttttctttgtattgatttctggttttattatattgtagtctgataaggtacttgatataattttgatatttaaaaactttttgagactagttttgtgtcctaacatatggtgaattctgcaaaattttccatgtgctgatgaaaagaatgtgtgtctgcagctattgggtgaaatgttctgtaaatgtctgatatttcyttgttgatttttctgtctagatgatctgtccaatgctgacagtgaagtgctgaagttgtcagctattattgtattgagttttatgtctcccttttgatctaatatttgttgtatatatctaggtgcttccatgttgggtgcatatatatttataattgttatattcttttgctgaattgattcctttattattagtatacttaattatctcattttccagcttttgacttgaagttggtttt

SEQ ID NO: 109707 - DNA, 617 bp, Homo sapiens
cattttctttgtttgaagttaaaaataaaatataaaatttttgttaatatccaaggtccctactagcttgtggctracatctggtatgtactttgcatgaactgtcctaaaactttttgcaagcctaaataatataagtatgaaattactcattaaatatttaagtgaattcctttataaaaggtaaagcctttctttttttatagtgaatttttgtttgtcattttgtttccatctcccctcctgatctttggctttactttgacacctttgaagtttacatggctcttgggtcctctcctgaagttggtctattcctattccaatcttctaccctatggctttgttatcactttagaattccaagtctcacctccttaccatttttctctgaaaagttgcttttgcagactttatgctgatgcttctccttattacctaaactttattgctactgcttacaggctcactctaggctgtcaagtggcatctgaaacacatgtgccaatcttatacatatattatgatctttctctgaaaattctagaaaagccaagctcctgatttagggttatttttcaactttttaaaccctaatctagtcatgaggaaaaata

SEQ ID NO: 109708 - DNA, 547 bp, Homo sapiens
acttctggggatttcttagtcttgaactgaagcctccttgccatatgtgtttcaatgtcacagaagcaacagaagctgtctctgtttgtaagagaaaaggtagctgtgggagtatttaaccatcttatgggtaaactttgtcctccccaaattcatatgttaaagtcctaatccccagcacctcagaatgtgaccttatttaaaatagggtaattgaaaatttaataagttaagtgtggatgagtcatgctggagtggaatggacctctaatccattatcactggtgtccttataaaagggagaaatttggacatggacacacatgcacacasacacacacacacacacacacacacacacacagaaagccatgtaagaataaaggcagagactaggacgatgttcatttatgccaagtgtattagtccattttcacactgctgataaagacatatctgagactgggcaatatataaaagaaagaggtttactgtacttacagttccatgtggctggggaggccttacagtcatggtggaaggtgaa

SEQ ID NO: 109709 - DNA, 589 bp, Homo sapiens
tctgccactggaattttacactgaaaagttagcaataagcattttactactcattgttatttatatgttgctatgtaataaaccaccccaaagcttaatgacttcaaatcacagccattttattgggtacgatgtcatgagacagcaatatgggcaggatgaagaagagataactcgtccatgattgaatggttttggctgggacagctcacctggagctagtggaacccattggcctcattcacacgtgkggcatgggtacttgctgttgtctggaacaccatgggtctcttccatgtagattgtgtttctacctgcggcctgtcaccctcccgtctctccgtgtggttaccctccttaataggagatcctggaattctttatgtggagctgaattccgaaagggaaagtagaaactgaatacctgagctcaaaagtcctagaacataacttccgtgacatttcattgatcaaagcaagccacatgggcaacccagattcaggagttaaagaaatagacttcacctcttgacaggagggtggcaaacaccttagaaaaggggcataggcatgagcattggtgggcagt

SEQ ID NO: 109710 - DNA, 589 bp, Homo sapiens
tctgccactggaattttacactgaaaagttagcaataagcattttactactcattgttatttatatgttgctatgtaataaaccaccccaaagcttaatgacttcaaatcacagccattttattgggtacgatgtcatgagacagcaatatgggcaggatgaagaagagataactcgtccatgattgaatggttttggctgggacagctcacctggagctagtggaacccattggcctcattcacacgtgtggcatgggtacttgctgttgtctggaacaccatgggtctcttccatgtagattgtgtttctacctgcggcctgtcaccctcccgtctctccgtgtggttaccctccttaataggagatcctggaattctttatgtggagctgaattccgaaagggaaagtagaaactgaatacctgagctcaaaagtcctagaacataacttcygtgacatttcattgatcaaagcaagccacatgggcaacccagattcaggagttaaagaaatagacttcacctcttgacaggagggtggcaaacaccttagaaaaggggcataggcatgagcattggtgggcagt

SEQ ID NO: 109711 - DNA, 571 bp, Homo sapiens
gccaccttagaaaactaacataattggtaaaggacataatggactttttaaagccagcacccaactacgttagcatcattttcagatgtttgatttagttcgtttattttatgttatcaagtattataatgacaattttaaaaaaacagtttcatgaggtggttcacacttttaatcccagaactttgggaggcaaaggtgggaggatcacttgaggctggaagttcaagaccagccagagcaacataatgaaagctaatgtctacacatttttttctttaataaaaaataaagctggrtgtggtggcacacacctgtagttctagctacttgggagctgagttgggaggactgcttgagcccaggagatcaagactacagtgagccataattgcaccactgcactccacccggggtgacagagtgagaccctgtctgtaaataaataaataaataaataaaaatagataaaaacaatttcaaaacttaagactaaaagaaactcagaaaactgtcaattacattttgctctgatttttctcttttatatagtatgatgaaatgttacatc

SEQ ID NO: 109712 - DNA, 571 bp, Homo sapiens
gccaccttagaaaactaacataattggtaaaggacataatggactttttaaagccagcacccaactacgttagcatcattttcagatgtttgatttagttcgtttattttatgttatcaagtattataatgacaattttaaaaaaacagtttcatgaggtggttcacacttttaatcccagaactttgggaggcaaaggtgggaggatcacttgaggctggaagttcaagaccagccagagcaacataatgaaagctaatgtctacacatttttttctttaataaaaaataaagctgggtgtggtggcacacacctgtagttctagctacttgggagctgagtygggaggactgcttgagcccaggagatcaagactacagtgagccataattgcaccactgcactccacccggggtgacagagtgagaccctgtctgtaaataaataaataaataaataaaaatagataaaaacaatttcaaaacttaagactaaaagaaactcagaaaactgtcaattacattttgctctgatttttctcttttatatagtatgatgaaatgttacatc

SEQ ID NO: 109713 - DNA, 600 bp, Homo sapiens
agataattaggtagagaaaaacaggggttaaaagagctcaatttagaaggtaaacaggaggctctagcatgaaagcatcaccctttaagatccagactaaactgtacatagttggcctttaaatctagttgaatacaacttayaccctgacagatgctttactgaaataaaggtgctttgtttattcaagacaaacagccagagagaatggctaccaatgcctcatgcaaaacactggatttcatacagaaatataccaagtgttcagtaaaacatattaattaattctgtatctgcaagaaaggataaatctgtccaaatgattcttacctaatattctgtttctttcctactcaagtaccaaacagggagggaacaaaaaccaaatcaatgtacctttttcattgaaacctagagattttagattttgtttagctcttctagttccgattctttcactgatatcatggcagatattgtgtgttatctcacttaacaggcatccaaaacccccttttctagacattataatgtaaaatattcaaatgcccagcctcccttgcaggtcaggatgattatataactcaggtattgccaata

SEQ ID NO: 109714 - DNA, 583 bp, Homo sapiens
agtctgctgccccagacatcaactgtccctgctctgggttctctgagttcatgctctctcaagggagagcctatcagtgtcttcttctttcagctgctcccttgaaatgcttcaggtcatccctycctcaccttggctttattctgaacgttttaaggctctctcctttaatatcattaacatctctctctctttcactgacttcttccctttttcctataaacaagctcagttctacaagcctttaaaactgtaatcataaaaactctgacctaaaagaacccttaatttatcttatgtttttcttactagcaactgtctagttttttccttcttttaccaccaaatttttcaaaagaataacttattcttgttactatgatttcctttacccacagtctatcttttgtccccaccactctaaataaagtattctattcaaggctcctagtgactttaaaatcatcacatatagtggcctgtccaagtctttctcttcttcctcacttcttatccaactttgccgtgggcaaatcaaccttccttggggaatgatttagagaggtgtaaaataaaaagtgaa

SEQ ID NO: 109715 - DNA, 569 bp, Homo sapiens
catccctccctcaccttggctttattctgaacgttttaaggctctctcctttaatatcattaacatctctctctctttcactgacttcttccctttttcctataaacaagctcagttctacaagcctttaaaactgtaatcataaaaactctgacctaaaagaacccttaatttatcttatgtttttcttactagcaactgtctagttttttccttcttttaccaccaaatttttcaaaagaataacttattcttgttactatgatttcctttacccacagtctatcttttgtccccaccactctaaataaagtattctattcaaggctcctagtgwctttaaaatcatcacatatagtggcctgtccaagtctttctcttcttcctcacttcttatccaactttgccgtgggcaaatcaaccttccttggggaatgatttagagaggtgtaaaataaaaagtgaaagttacccaaccttgtgctggatccctcatttctatcccaagaagcaataactgaaaacaatttattgtatatccttcctgaaatgttctgtgcataatcaaa

SEQ ID NO: 109716 - DNA, 554 bp, Homo sapiens
tgcttaggcttgtcactgttttcatgctgcagacagacagtgagtcttcaaagatatgcccactgggaaaaaatgcactcaaaacatgttattcatttcccctttatgtaactcagaaacaagtaaatagatttaattctaactttctatgagatttagcccctgggcctagaccaagagctactaagttcagtcaaaaataaaaatytgtggtggaagtggccaacatggacaacttgaagcagctagtgtgcgtggctctcacagagaggaatgaaaggggcaagtaaatacagcacattcaactgaaacatccaggtacttgctctgggactaatcaaggaaacaactcaacccacagagaatgttgaaaaggaaggccggatgatgcccacctgggagtgacaggaagccaagggaacctctcccacccagggaagcagtgagtgaacgggtaatcccaggaactcatgcttcccccacagatctttgcaactctcaggtcagaagagccccttgtgaacccactccaccaggagcttcaatctgacaca

SEQ ID NO: 109717 - DNA, 587 bp, Homo sapiens
tggaacttatatttaaaagggaagcagggcataaaagtttaaaaaatttgcagcctgactatgaggtaraaaagaaaaaaccattttctgtggaggaattcaagcctgctgcagaaattttcataagtaaagaggagcccaatgttaatagttaagacaatggggaaagtgcttccaaggcatttcagagacctttttggcagcccgtcccatcacaggtctggaaacctagggtggaaaagtggttttgtgggccagaccaagagcccaactggggcactgcctattggagctgtgagaaaaaggccaccatcctccagaccccagaggtaggtccatcaacagcttgcaccatgcacctggaaaagctgcaggcactcagcaccagcccttgagagcaaccagggcagctgagtcctgcggagccacagagacagagctgcccaaggccttgcaagcccactcactgcatcaatgtggcctgaatgtgagacatggagtcaaaggagattattttggagctttatgatttaatgtctgcctgccctgctgtatccctgttgttttggctgaattctcccttttgg

SEQ ID NO: 109718 - DNA, 587 bp, Homo sapiens
tggaacttatatttaaaagggaagcagggcataaaagtttaaaaaatttgcagcctgactatgaggtaaaaaagaraaaaccattttctgtggaggaattcaagcctgctgcagaaattttcataagtaaagaggagcccaatgttaatagttaagacaatggggaaagtgcttccaaggcatttcagagacctttttggcagcccgtcccatcacaggtctggaaacctagggtggaaaagtggttttgtgggccagaccaagagcccaactggggcactgcctattggagctgtgagaaaaaggccaccatcctccagaccccagaggtaggtccatcaacagcttgcaccatgcacctggaaaagctgcaggcactcagcaccagcccttgagagcaaccagggcagctgagtcctgcggagccacagagacagagctgcccaaggccttgcaagcccactcactgcatcaatgtggcctgaatgtgagacatggagtcaaaggagattattttggagctttatgatttaatgtctgcctgccctgctgtatccctgttgttttggctgaattctcccttttgg

SEQ ID NO: 109719 - DNA, 623 bp, Homo sapiens
ttgttctgaaatgtggctggtgaccctttgctcccagccatcaggcatcgtcattttgcctttctcaggtggcatgccaattttcaccccagactgttggccagggaccaaagtgcacccagaacttttagacctatgcaaaaacagccctgttatattctgtagctatccccactccattactgggggaaaagtttttcccaaggagacacasgcctgtttcacttttgtggagatatctggaaagtttttgtatttgacctttcagccaacccctcatgagtcacctcagtcacaccgacacatttgcaaattgctgcaacaaaaaagtccacaaatggccattggtgatataatactgtattttacagactttccacatacgcacacttgctgcatatagaatttccacaccatggctgctgcttgtgtgaaagttgcagcagctatgctgaaatagaatgtgtgtggatacacgaagggagactgggtcaagagagtctgtatttcaaatattttcaagccccttcagcaagaaaaaaaaacattgttttgtgcaggatgcactctacaattatcattaatgaaaccaacttctgctttttagcatctgctatgtggca

SEQ ID NO: 109720 - DNA, 531 bp, Homo sapiens
acagactttccacatacgcacacttgctgcatatagaatttccacaccatggctgctgcttgtgtgaaagttgcagcagctatgctgaaatagaatgtgtgtggatacacgaagggagactgggtcaagagagtctgtatttcaaatattttcaagccccttcagcaagaaaaaaaaacattgttttgtgcaggatgcactctacaattatcattaatgaaaccaacttctgctttttagcatctgctatgtggcaaccatggttcaatgctgctagcacgcactgagtctgagatgtgtctctgttctcataggagcttaaaacatcaatgcagcacagacaacctcacatggagcacgtatagaaaggacatggaaccacaggagagccacagggatgcasaagagagagatatgaatcacaggtgtgtagcggaacctggactgggtctttttcaaaagaaggtgtctatatatggtagggagggatggagaaagaactctccagatagggaacacaactggagtaaa

SEQ ID NO: 109721 - DNA, 531 bp, Homo sapiens
acagactttccacatacgcacacttgctgcatatagaatttccacaccatggctgctgcttgtgtgaaagttgcagcagctatgctgaaatagaatgtgtgtggatacacgaagggagactgggtcaagagagtctgtatttcaaatattttcaagccccttcagcaagaaaaaaaaacattgttttgtgcaggatgcactctacaattatcattaatgaaaccaacttctgctttttagcatctgctatgtggcaaccatggttcaatgctgctagcacgcactgagtctgagatgtgtctctgttctcataggagcttaaaacatcaatgcagcacagacaacctcacatggagcacgtatagaaaggacatggaaccacaggagagccacagggatgcacaagagagagatatgaatcamaggtgtgtagcggaacctggactgggtctttttcaaaagaaggtgtctatatatggtagggagggatggagaaagaactctccagatagggaacacaactggagtaaa

SEQ ID NO: 109722 - DNA, 613 bp, Homo sapiens
tttcttaaacaccagagttgttggtcttggaggatcattgcaccaactcaaaatagctggaagaaaatacttataaatgtaccaaaaaacccacacataacacccttgaatttctgatatatagggatcaaatgactgataaattttaagtmtaaaatctgactgattttaacaataattcattaactttcagtcactgaaaagactgtgcttttgaaacctaaaacttaagtttatcaccacagcttgtaacagaaaatataacactagttcagagagactgttcatgttaacaagtcaaggagtcttttcctgcagattattcaaacgatcgatccaaacccttaaaggttatggttgatcatgattgtgagtaattaattgattcctaaatacttcagacctttaggaattactgtaatctaccatgtcactcacatgcatgactaccaaaatgaatgtctaatacaaatatcaatgctctagtatattttatctacatttactgttggactgaaatgtctagaaaagactatgacaagtttgatcactcggaatataattaataaatggcatgaaatacctgttcaaagcacatatgcgaaataatcac

SEQ ID NO: 109723 - DNA, 648 bp, Homo sapiens
attatttgattattgaacatctaatatctaaaaatatgagccaaattcatgatgactagtgagtaggtcattaaagatatttagaagatggcaaaagcacagctgcttctatgccaaaacatttatgataaatctttcctaaattgagtgaaggctgcatacttctcattgcttcattatctgaaacacttaaatctacattaggattaccatcataaagtacttgatattatctaaatatattaatgcaaggaaaaaactatgcaaaatatgccatattgatttcccatttaaaccaaattagtatttgcattaaaatactgagaatcaagtaacttcagaattgaaggagtgaacacttcagtatttctttgtaaagaagaaaatactaaggttctcacaagtgctccaataaataaaaattacacccaaatctaaatgatcttattctawctccattcacaaataaatatgcatacatacaatttctaaatatctgaggaaatgttatgtgaggaaaaataacatgcatttataattcacaacattcatttttccccctttcctttacagtagctttagaaaattgctttttgatgatttagcaaattttatttatttttaaaagaatctcatttattgagattg

SEQ ID NO: 109724 - DNA, 570 bp, Homo sapiens
agacgcttgtgctctctgaacttgatcccttaactcccttaacctgttgactttcctgacgcacaattagccagcactgaactgttacctaccagacctctatgactagaaaagagaaaaaaaaaatcctcgtctrtagactttcagaaaattcatccacgtgattaaaccactgaataccattaattgttgaaagcattcagaggtatttacaatttaaaaggtaaaaacatttctatgaactaaataatttgtggaaaatgtgacttttgtaaaatagtaactaaatatattgctttctggtagcaaatattttgcttaaaaacactatcatatagtggtccaaagggactggcattatatatgtttcaatgtagttgaaaaggaaggttaatggggctgatattttgacccccaaatgctgatgactaatgagaacttattgcctaaagcacacgagatagcaaaataaaatcaaactcatagaaatcaataattaaacagttgttgacaaattccatccacctattttttctggcagatatatgtttgtgattttcattttaagat

SEQ ID NO: 109725 - DNA, 604 bp, Homo sapiens
gacacctgcaagcaaggcttaactaatgttctgtatattgtaagaagctgtgcagttcttaccttcatttacaaatagcctggtaaaatggaaaagcatgacttagggatctaggaagaactgttctcttattttggggttggctttttcctcctgcggcacttcccatcttcttgcctactttcctgcccatcatcctttctcccaaagaatcaggaaatctataagaaagcaatttactgtatcccaaggcccctctggggatggtgtccacattacccagacggtgcctctttgatctttagctattattttatattttcctatccgtcaattaccaactccccttgagggtctcacatggctattttttttcacctaattgcygtctataaggcattacaccaaagagcaacaaaatacacaatctttctaagtagacacgaaacatttacctagaaagaccatattctggcccgtaaaacaaatcttaataaacttataaggattgaagtcatacaaacattttctctgaccataatttaaaaaactaaaaatcaataacaggatgacacctggaaaatttcaaattatgaaactaaca

SEQ ID NO: 109726 - DNA, 604 bp, Homo sapiens
gacacctgcaagcaaggcttaactaatgttctgtatattgtaagaagctgtgcagttcttaccttcatttacaaatagcctggtaaaatggaaaagcatgacttagggatctaggaagaactgttctcttattttggggttggctttttcctcctgcggcacttcccatcttcttgcctactttcctgcccatcatcctttctcccaaagaatcaggaaatctataagaaagcaatttactgtatcccaaggcccctctggggatggtgtccacattacccagacggtgcctctttgatctttagctattattttatattttcctatccgtcaattaccaactccccttgagggtctcacatggctattttttttcacctaattgctgtctataaggcattacaccaaagagcaacaaaatacacaatctttctaagtagacacgaaacatttacctagaaagaccatattctggcccgtaaaacaaatcttaataaacttataaggattgaagtcatacaaacattttctctgaccataatttaaaaaactaaaaatcaataacaggatgayacctggaaaatttcaaattatgaaactaaca

SEQ ID NO: 109727 - DNA, 577 bp, Homo sapiens
gcttatacactgctagtgggaatgtaaattagttcggccaatgtggaaagcagtttggtgatttctcaaagaaatcaaaacaactaccatttgaccgagcaatcacattattaggtatattcccaaaggaatataaattgttctacaataaagacatgcacacatatgtttatcacagcactattcacaatagcaaaggcacagaatcagcctaaatgctcatcaacagtagactggataaagaaaatgtggcacatgtacaccgtggaatactacacagccataaaaagcaagatataatgtccttcatagcaatgtggatagagcgtgaggccattatcctaagtaaattaacacaggaacagaaamccaaatactgcatgttctcacttataggtgggagtgaaatattgagtacacatgaacacaaagaagggaacaacagataatgaggcatagttgagggtgaaaggtgagatgagggcgaggataggaaaactacccatggagaacccatggagaactattatggtgaaataatctgcacacaaaactcctgtgacacgcaatttaccta

SEQ ID NO: 109728 - DNA, 577 bp, Homo sapiens
gcttatacactgctagtgggaatgtaaattagttcggccaatgtggaaagcagtttggtgatttctcaaagaaatcaaaacaactaccatttgaccgagcaatcacattattaggtatattcccaaaggaatataaattgttctacaataaagacatgcacacatatgtttatcacagcactattcacaatagcaaaggcacagaatcagcctaaatgctcatcaacagtagactggataaagaaaatgtggcacatgtacaccgtggaatactacacagccataaaaagcaagatataatgtccttcatagcaatgtggatagagcgtgaggccattatcctaagtaaattaacacaggaacagaaacccaaatactgcatgttctcacttataggtgggagtgaaatattgagtacacatgaacacaaagaagggaacaacagataatgaggcmtagttgagggtgaaaggtgagatgagggcgaggataggaaaactacccatggagaacccatggagaactattatggtgaaataatctgcacacaaaactcctgtgacacgcaatttaccta

SEQ ID NO: 109729 - DNA, 577 bp, Homo sapiens
gcttatacactgctagtgggaatgtaaattagttcggccaatgtggaaagcagtttggtgatttctcaaagaaatcaaaacaactaccatttgaccgagcaatcacattattaggtatattcccaaaggaatataaattgttctacaataaagacatgcacacatatgtttatcacagcactattcacaatagcaaaggcacagaatcagcctaaatgctcatcaacagtagactggataaagaaaatgtggcacatgtacaccgtggaatactacacagccataaaaagcaagatataatgtccttcatagcaatgtggatagagcgtgaggccattatcctaagtaaattaacacaggaacagaaacccaaatactgcatgttctcacttataggtgggagtgaaatattgagtacacatgaacacaaagaagggaacaacagataatgaggcatagttgagggtgraaggtgagatgagggcgaggataggaaaactacccatggagaacccatggagaactattatggtgaaataatctgcacacaaaactcctgtgacacgcaatttaccta

SEQ ID NO: 109730 - DNA, 510 bp, Homo sapiens
catgccttataagcttattgtgagggctaattgaagtaatgaagatgaaatctgcacagccacgagggtaatgttagcttcccattctttgtatgttgaattttctttcctttgaaatatactcaccataagctttcatagttcatataggatgccagagtcatggacttagtgttctatttcatttctttttaaaaaataccaaatctcacgcacattatagtccagctgccctcttgccacactttccatgggcctacccttcatgcgggagctcccccacccaaggtcccctctccatggcctcccctgcaagcaagctctgaatgaaggacattacacattccagcatactttgaatatcatttgcatatttatttccatgaaagtaagagttgtgtcctatatgcctccgactatctaacagcttcacaataagttctcagaaattgtttatgaatcaatgaaaggtgkgaaaagaggaaaggagagagggaaggaaggaaggaa

SEQ ID NO: 109731 - DNA, 577 bp, Homo sapiens
taaaatgacaataaaatttgaaaatgattcataagattatgaagaataagtgaatcaataaactaattagtcaaaggtctggcatgttgtaaacactcaattatatattgtctattttagcaatctttttcttcatgagaacatatcatggatgaggggtgacttccagtcttgcccacttgtaaatacttgattatcctccctgtttggtcaggcaacccttctgactaagtactctgtgctgatgtgactggttattttgggctctgactattgcctaggcatttttgtctacccattatttcttcacacastggctcctttttattttcagtatttttataaagttgcctccagccaagtacactgtgtaccatttcaccattcagagtcactttatacaataaagtgttaaggagcacaccaaaatgaatctgcaacttcacttttagtgacacatgactcttgtctccatatcttcatatcaggcattggtttctagcctattacagcctgaaggttacaaaggaatgcatctttagaatagtcattagtatcttctgcatgactcttcgtg

SEQ ID NO: 109732 - DNA, 447 bp, Homo sapiens
ttcttggtttatgtcctcctcctccactttcaaagccagcagtccagcacctttaaatttctctcatgccctcctgtcttccttttataaggacgcttttgattgcattgggcccacccacattatccaagataatctcccaaactcaagcttcttaacttaattacatcttcaacatctctttagccatgtgaagtaatatatttaaaggttctgaggattaggatgtagacaattttgagggccaattattctgcctaccacagtatgtcaagaggtattagtgctttggatgtcttctaaagagcagcaggaaamtgaaacttggatgggaaaaatgtggcagtgtttactaattgtctaacactatgctgggagaagagtctattggaactagacatgacatgttcatgtttgtgttataagaatcatcttcaatgcagcaga

SEQ ID NO: 109733 - DNA, 615 bp, Homo sapiens
ctcccactctcttcctggttatcctgcccattggcaggctcttatgccaggctaagggacaaatgtcccaaaaccggcagccaggaggaggagacttgagctctcgtttaaattttgctgctaattgtctgaatgatcatgggaagtcatcctgtgtccctgggcctcaatttccctttctgtaagttggrtgggcataggcattttaaatgagatgatctttaagctcgttcccagccctgacatttccagttccacaggatggaaacaaaatatcatgagggtccagcagtcttcagagcagtattttttcagctggggacagaaacaccaggaggcttatgaggagtttctagaaggtggcctgcagcttgatagagcttgtcagttgttcctggggctgcagaaactgtaggttttgggtattgagtgtaggcttcctcctctcgcctcttcaggaaatgaacccctttgagagataagtgaaagctaggtactctctctccagaaaaacttgagacatgcagagaatcacgtatcacacacctacccttttgtacacttactttcaggggcttcgtgtccttccagtaatgtgtcttgaatcacctcctg

SEQ ID NO: 109734 - DNA, 615 bp, Homo sapiens
ctcccactctcttcctggttatcctgcccattggcaggctcttatgccaggctaagggacaaatgtcccaaaaccggcagccaggaggaggagacttgagctctcgtttaaattttgctgctaattgtctgaatgatcatgggaagtcatcctgtgtccctgggcctcaatttccctttctgtaagttgggtgggcataggcattttaaatgagatgatctttaagctcgttcccagccctgacatttccagttccacaggatggaaacaaaatatcatgagggtccagcagtcttcagagcagtrttttttcagctggggacagaaacaccaggaggcttatgaggagtttctagaaggtggcctgcagcttgatagagcttgtcagttgttcctggggctgcagaaactgtaggttttgggtattgagtgtaggcttcctcctctcgcctcttcaggaaatgaacccctttgagagataagtgaaagctaggtactctctctccagaaaaacttgagacatgcagagaatcacgtatcacacacctacccttttgtacacttactttcaggggcttcgtgtccttccagtaatgtgtcttgaatcacctcctg

SEQ ID NO: 109735 - DNA, 615 bp, Homo sapiens
ctcccactctcttcctggttatcctgcccattggcaggctcttatgccaggctaagggacaaatgtcccaaaaccggcagccaggaggaggagacttgagctctcgtttaaattttgctgctaattgtctgaatgatcatgggaagtcatcctgtgtccctgggcctcaatttccctttctgtaagttgggtgggcataggcattttaaatgagatgatctttaagctcgttcccagccctgacatttccagttccacaggatggaaacaaaatatcatgagggtccagcagtcttcagagcagtattttttcagctggggacagaaacaccaggaggcttatgaggagtttctagaaggtggcctgcagcttgatagagcttgtcagttgttcctggggctgcagaaactgtaggttttgggtatygagtgtaggcttcctcctctcgcctcttcaggaaatgaacccctttgagagataagtgaaagctaggtactctctctccagaaaaacttgagacatgcagagaatcacgtatcacacacctacccttttgtacacttactttcaggggcttcgtgtccttccagtaatgtgtcttgaatcacctcctg

SEQ ID NO: 109736 - DNA, 466 bp, Homo sapiens
taagccaaccgagaaattaactttttccagtttggaggggagtgtcccacagtamagagacacaatagcatatcagtgaggaaaggacagaggaggaagaaggagaaaggaggcatttttttcaaaggagtctgaggggttcaggatgcatttgaaagaagtacaaactgaatatgaatggctactaatctagaaaaagggaagtaatgctttccaggtttccttatttttctagcaaatacctggggtatgtatggagagaaagtgaggcattcctctttctttctttcattcttatatactcgagtctaagcgacaataatagggtgcagcccatgggtgttaaagtggctttcacccatgttaacagaagggccatactcagatatgccaacatatcccctaactcccctgcagtcagtagcctttgaattccctagacctcatttatgccatggatattagc

SEQ ID NO: 109737 - DNA, 573 bp, Homo sapiens
gactgtataaagtggcttcaagactaaatttctttgatgtggtgtaggttttctttttttcatcttgagtatgtggtgattagacaattktaggtgtttataaaaactcgcagaaatatacactgatataagctacttttactttctctaaataaaaattaaatttaaaaagtgcattgaagaacatgacagaaaatgtatttcagacttaggttttgagcttaaatagtttacaatgggatttgcagcttctcatgtatatagtcttattactagttctactttataaagaaaaatatgtaaaataggtttgatgatgtaaattgtatgctctattgagacaggagaaagaaaacaacagaagttaagacaggtccttcacgtggggttagaaggaggtcctggggaaactgaaggcatctgtctgaggtcacacctcagtgttacctgaaggcccctggactaattcgggtctccaacagccatcaggtgtcagcaccaggatttccagactttcctatcacattctctgtttttcttttttgtggctatcatgtctcttatcccttcttt

SEQ ID NO: 109738 - DNA, 573 bp, Homo sapiens
gactgtataaagtggcttcaagactaaatttctttgatgtggtgtaggttttctttttttcatcttgagtatgtggtgattagacaattgtaggtgtttataaaaactcgcagaaatatacactgatataagctacttttactttctctaaataaaaattaaatttaaaaagtgcattgaagaacatgacagaaaatgtatttcagacttaggttttgagcttaaatagtttacaatgggatttgcagcttctyatgtatatagtcttattactagttctactttataaagaaaaatatgtaaaataggtttgatgatgtaaattgtatgctctattgagacaggagaaagaaaacaacagaagttaagacaggtccttcacgtggggttagaaggaggtcctggggaaactgaaggcatctgtctgaggtcacacctcagtgttacctgaaggcccctggactaattcgggtctccaacagccatcaggtgtcagcaccaggatttccagactttcctatcacattctctgtttttcttttttgtggctatcatgtctcttatcccttcttt

SEQ ID NO: 109739 - DNA, 562 bp, Homo sapiens
ttccagactttcctatcacattctctgtttttcttttttgtggctatcatgtctcttatcccttctttatgctatgttgggggagtttttgcagcctgtggagataatctttttgggatcatttagaaagtttcttagtaaccaggaatgtaactcaaataattgctgcttctatgattttcttgagatargggtatttaaaagttttagcctaaactttcacctagtaagggctttttttaatctcccagtgatagtcattcatggcactgaatagaagagtatttgatcccaagtaaatatcctactgtccatttgggttgtgttttcctccatgtaagagtacagcactgccaaatgaattaaaactgttcctctatgagacaaatcatttctttcctgctaaaaggcttactgtgaggacagcccaccaagccccacacctctttttttaacctctgcctgaaaataatttggagtcagagtttttacctaacattttagtccctcccacactttctagtgaaatgagatttttctctgtgggtggtcctattggtcc

SEQ ID NO: 109740 - DNA, 574 bp, Homo sapiens
agttctgcaattgtaaccctcaagagaagaggaggaagagacaagtatttggtgctctaaaacaaaacaaaacaaaacaaaaaacttccaacatagacaaactcaggatcagatagcttcaccagtaagtcatatcaaacatttaaagaattaacaccactcttctcaaactctttcaaaagaaatggaaagtgaaaaaatrcttttgaaatcattgtatgaggccagctacaaagacacgacgagaaaacaagataatagaccaatagattttctgaatatagatgaatgaatgtgggaaaatatctcacgtccatggattagaagacttaatactgttaaaatgatgcttccactcaaaacaatatagtgtcaatgcaatccctatcaaaatctcaatggtctttttttagaaatgtaaaaacccattatgaaatttatatgctatttcaatgaatcctgaataagcaaaacagcattagggaaaaatgttggagaattcacattttttcttttaaaatgtactataaatctatagtaatcaaacagtatggctctggcataaggatagaaa

SEQ ID NO: 109741 - DNA, 539 bp, Homo sapiens
ttttattgtactatattcatgcataatattttcagaccacagttgactaggggtaackgaaaccacagaacataaaactgcaaataagagaatgatgacagctactatatttaagagctaataatatacaattcttagaagaaaacaggagcagatgtttacaaccttgggttttacactatttttttattaaatatgaccccaatagcacaggcaacaacaaaaatataatagataaatggaactttataaaaattgaatagttggaaataatgttcccaagtcatatatacagtgtaaattgacataaatttcatgtatacggaatcctttataccaacgcttagcaaagaggtccttgctgtcctttaaccatgtacaagatagcaaattttatctggttttcatgttcaggttttaaatttcaaaaatatgtacatttcctttaggaacattttaaattagacaatcaatttagtcgtccttaccctcagattacatatccagacataatcaaaactttttcctttaatgttaat

SEQ ID NO: 109742 - DNA, 539 bp, Homo sapiens
ttttattgtactatattcatgcataatattttcagaccacagttgactaggggtaacggaaaccacagaacataaaactgcaaataagagaatgatgacagctactatatttaagagctaataatatacaattcttagaagaaaacaggagcagatgtttacaaccttgggttttacactatttttttattaaatatgaccccaatagcacaggcaacaacaaaaatataatagataaatggaactttataaaaattgaatagttggaaataatgttcccaagtcatatatacagtgtaaatwgacataaatttcatgtatacggaatcctttataccaacgcttagcaaagaggtccttgctgtcctttaaccatgtacaagatagcaaattttatctggttttcatgttcaggttttaaatttcaaaaatatgtacatttcctttaggaacattttaaattagacaatcaatttagtcgtccttaccctcagattacatatccagacataatcaaaactttttcctttaatgttaat

SEQ ID NO: 109743 - DNA, 535 bp, Homo sapiens
aacttgctaataggaaagactagatacaagagaaaagcgcaaacatagctaagaaattagagagcaattaaaggagtagaagacagattatcgaataaaaacaataacttctgttctgaaagtagaaaattcaacagaaggagaaatagtttattcaaatatttaatagagaaaaggttctttgtcataagagaacagccgattttgtagatagaaggaaaaaccactgaaaacaattgattacagggcaataaaagcaaagatcttaagcctgattgtatcattaaaatttataggwcaagaaataatttttcaagcatgcagacagaagataactgactgatagtttgctttgctcaggcaacatttaatttaagatgaaaaaacattatttcatatctcaggaaaattttgctccaagattatactgggataaaatcttctatcagaataaaagtgattgaaatgtccagaaaaatattcttgaggttctcatggtgactgggaaaaaaaattgattatacaatccagccaa

SEQ ID NO: 109744 - DNA, 520 bp, Homo sapiens
gagacctcattgcaaaaataaatacaatttaaaaaataaaatataataactgcctaaaatggaaagaaacatctttttaaaacatttaaaaattgttatgggtacataatagttgtatatatttatggggtacatgtgacgttttgatacaggcatacaatgtgtaatgatcaagtcagggtaattggagtacctgtcacctcaagcatttatcatttttttgtattgggaacattataattccactcttttggttattaaaaatatgcaataatttattgttaactatagtcaccctatttattgtgctactgaatactagatcttattcattctatctaattgtatttttgtatccattaatgattccacttcatrtcccctttaccgactacccttctcagtatctagtatccatcattctactttatatttccatgaattcagtttttttttcagctcccacaaatgagtgagaacatgcaatatttgtctctctgtacctggcttatttcactta

SEQ ID NO: 109745 - DNA, 602 bp, Homo sapiens
gaatacacaaatgataagaaagtgaaacagccttattgctgatatggagaaagtttgagtggtctggatggaagatcaaaacagccacaacattctcttaagccaaagcctaatccacagctggccctaactctcttcaattctatgatggctgagggaggtgaggaagctgctgaagtgccrggcacggtgactcacacctgtaatcccagcactttgggaggctgaggcaggaggatcacaaggtcaggagatcgagaccatcctggctaacatggtgaaaccccatctctactaaaaatataaaaaattagccaggcgtggtggcgggtgcctgtagtctcagctactcgggaggctgaggcaggagaatggcgtgaacccaggaggcagagcatgcagtgagccaagatggtgccacttgcactccagcctgggcgagagtgcgagactccgtctcaaaaaaaaaccaaaaatcaaaaaacaacaaaaaaaagaaagttgcagaacaaaagtgtgaagctagcagaagatggttcaagaggtttaaggaaataagccatctccataacataaaagtgcaagctgcagcaggaagtgct

SEQ ID NO: 109746 - DNA, 518 bp, Homo sapiens
ggtttactagctataatagtttgtagcattgtttagactggaactggggattcctgacagctaatttagcttcttttcatagttctggagagaaagttgtgactaacagcaagaagtagagaagataactaatgtttggacacaaaaggaagccagcacaagcaccatcacatccttcttggaaagacaattaaaaattttaccatatactcatggagtgttattcaagtcgtagttcagggcttagaaagcaaaggattctgtggtctaaaggggaaggacagtagtcaagctgagctrtttcttttttcttttctttctttttcttttttattttctgagacagagtcttgctgtcttgcccaggctggagtgcagtggcatgaccttggctcactgcaacttctgccccccagatttaagtaattctcctgcctcagcctccaaagtagctgggattacaggcacacaccaccatgcatggctaatttttgtatttgtagtagagacgggtttct

SEQ ID NO: 109747 - DNA, 579 bp, Homo sapiens
ggtttgaaagtgctattaaaatattaaatggtttactagctataatagtttgtagcattgtttagactggaactggggattcctgacagctaatttagcttcttttcatagttctggagagaaagttgtgactaacagcaagaagtagagaagataactaatgtttggacacaaaaggaagccagcacaagcaccatcacatccttcttggaaagacaattaaaaattttaccatatactcatggagtgttattcaagtcgtagttcagggcttagaaagcaaaggattctgtggtctaaaggggaaggacagtagtcaagctgagctatttcttttttcttttctttctttttcttttttattttctgagacagagtcttgctgtcttgcccaggctggagtgcagtggcatgaccttggctcactgcaacttctgccccccagatttaagtaattctcctgcctcagcctccaragtagctgggattacaggcacacaccaccatgcatggctaatttttgtatttgtagtagagacgggtttctactacaggctggttggtgaactcctgacctcg

SEQ ID NO: 109748 - DNA, 502 bp, Homo sapiens
atttgcctttcttggagatggaacccaggacgtgctcattattattattatcatcatcactgaagataaaagaaatctatcaatttcactatttcctgctgcgtacgtaataactcaagcwctgtcttggtcatctactttaagggacaatataatggcattactggcagttacttatatccactcacttggaagctagcagctcttgattcagtttcaatagatcaaattctattcgagaaagttatgagaacaatgattatttcttttgggagtttgggagtctttatctctacacaagtgggtctaaaaagttcattgctctgtgagtaccagttttcttctggggaatgtcatgtgagttttgaatggtactctatcttataaaactttagcaaagtatttttagtcattatgtaatgacccaaaggcatgccaaaaattgatctgccccatatttccttatttggaactgtgagagcacagttctcacatcatgatt

SEQ ID NO: 109749 - DNA, 575 bp, Homo sapiens
agtggttgaccagtaggttgtgttgagaagagttctgatgtcaagtataggcttgcgattgatcagtgatcagtgaggactgcttagaaagtggtgcagagaaagattatgtgtctaccatttctatattactgtgcctttccttagatcagttgggtcattttggctttaatatctaactctacaactgagattcattgaagggaaaggctcaatctgtgaatacccaacagtatctaacataaagaggaaagcagagtttcttaaggccacaaatgatctggcacatgctttttgaggtaggataggaaaggattcagctcccaccagcaaattcagggccctacctatattccctcagcactttccattttcttgcctttacaggatgccagaytaaatgagataatgcatgcaaagttcctagcacattatttgacacaacaaactacttgctatattatcagtaactgctttattaatttaattgtccatcatttattgctggaaagttaaaatgggtttacagaatggaatgggtaaaaaagttctgctgcataataacattatagagc

SEQ ID NO: 109750 - DNA, 589 bp, Homo sapiens
cattctacagctgatttttaccccaccaaaccatatgcaacaaaaatgttgggtttgcatgaaatatatactgtgttgtattgcaagttgctttggccttcaggaatctcctacacataaatatagacatggtgtctgcctcaggcactcaaatgcacagagtatcaacttggcaagaggaaraatccatctagtcaccagcctggagtcttctgatttattctgaacaattggcaagaaatttttattcctttatttcctgctttgctgcacttcaccatggagtgattgtctttagctgttggcaaaaactttattggccatgcttttccacttcaggatctacattaaatagggtttgcttttggctgtgcatcatagcaaccccaaacatcagcagttttatctcaaggagtttatttctccttcttataaaaaatacttaattcagttgatccataaagttgtgaaagtccattctctctctttttttgctttcctctttaaattgtttttgacaaacaaaaattgtatatatttatagtatacaacatttttgatatatgtatacattgtagaatggctaaat

SEQ ID NO: 109751 - DNA, 472 bp, Homo sapiens
gaattcatttaacacccacaatactcacttaaatccagaatctgtctcattcattttcaaaattcactccatattttttgtagtaactcgagtatgtacctaaacacttgatattggaaagagcagtagcctttctcaatcaaaacccacaaatgcggcacatttttttttttacaagtaaaatgaaaataaacaacttatccaaaactacaaaaaaacctaaagtcttctatttcccacgaaatatgcatttctttgttatayacaacagatatcattttatttcacttaggtgcatgtcctggctggaaagtaaaatgcctttagaagtcaaccagaaagaaaatcaaacaaaaagcagttttatgatcatttgcattagctgattatttatgtgctatagattatcatgtagaatcttaatttccagtcaaaaatctcatatgttctattataaattctgaaatcatta

SEQ ID NO: 109752 - DNA, 582 bp, Homo sapiens
ataacattgtatccaaatgtttccaaagtttgcatatttcccaatacttacaacattttaacagcttgccatttctgtttcctcctcagtgcagtatcagtttctatcttctgaccacattttcctgagttgaatttctattactgaaatayagtttttgtatattttctgtattagtctttcactagtatatttttcaaatatcttctttcaagtactgtattgtctgtatattaccagtaggagttacctattgctaaacattcaaaattattcacttttatcttcttgatgtatttatttgtgtatttttgcagaagtccttttcatgaaattgagatgtaaatatattctcctacagtttcttcaccatattttagcattaagctcttaatttcttgggaattggtttttttgtgtcatgtaaagtgaggatccaaatttatttttatttcttaagggatatctaagcaattgttactgaagaatcattttagttttgtaatattatcactattacatagcaatattcactatatctattggcctatttttgggatttccataatgacccatatatta

SEQ ID NO: 109753 - DNA, 582 bp, Homo sapiens
ataacattgtatccaaatgtttccaaagtttgcatatttcccaatacttacaacattttaacagcttgccatttctgtttcctcctcagtgcagtatcagtttctatcttctgaccacattttcctgagttgaatttctattactgaaatacagtttttgtatattttctgtattagtctttcactagtatatttttcaaayatcttctttcaagtactgtattgtctgtatattaccagtaggagttacctattgctaaacattcaaaattattcacttttatcttcttgatgtatttatttgtgtatttttgcagaagtccttttcatgaaattgagatgtaaatatattctcctacagtttcttcaccatattttagcattaagctcttaatttcttgggaattggtttttttgtgtcatgtaaagtgaggatccaaatttatttttatttcttaagggatatctaagcaattgttactgaagaatcattttagttttgtaatattatcactattacatagcaatattcactatatctattggcctatttttgggatttccataatgacccatatatta

SEQ ID NO: 109754 - DNA, 487 bp, Homo sapiens
tattaacttcaaatattattttgcaagttacttaactacataatgtactaacttttgtttttattaatgaactgcagctttaaatgttatagcaagtgttgatctcttcattgttctcagtggaaatagttactatgttagccccactaaacattrttttctttttcttcaaagttacaactggcttacacaggagaaaactggcttttatttaaagataggcaaaaaccttcgcagtaagttatactctgacacatatttccaatttagaattcaacctggccttcagttaattttttccatagttgctatcttttcatcgtgctgcataatttattactggtattattctaaattacctataggatataaaactaaacttttagtcatttaaaacaacacttttttttgttcaatgagtatgcctatcatggtttggcaccagagattgatcatatttgtctctcagggacactggctgacagag

SEQ ID NO: 109755 - DNA, 487 bp, Homo sapiens
tattaacttcaaatattattttgcaagttacttaactacataatgtactaacttttgtttttattaatgaactgcagctttaaatgttatagcaagtgttgatctcttcattgttctcagtggaaatagttactatgttagccccactaaacattgttttctttttcttcaaagttacaactggcttacacaggagaaaactggcttttatttaaagataggcaaaaaccttcgcagtaagttatactctgacacatatttccaatttagaattcaacctggccttcagttaattttttccatagttgctatcttttcatcgtgctgcataatttattactggtattattctaaattacctataggatataaaactaaacttttagtcatttaaaacaacacttttttttgttcaatgagtatgcctatcatggtttggcacmagagattgatcatatttgtctctcagggacactggctgacagag

SEQ ID NO: 109756 - DNA, 620 bp, Homo sapiens
tgcctgctgggttttagcaattctcctgcctcagccttctgagttgctgagattacaggtgcgagccaccactcacagctaatttttgtatttttaggagagacagggttttgccatgttggccagcctgagtcgaactcctgacctcagtaatccacctgccttggccctcccaaagtgccgggattacaggtgtgagccaccgtgcccagccagattgcaaaataaagtcttwatatcagcttttccctgacttctttattgagttctatctacctcagcaaataacaccaccatacatcgagttactcaggtcaaaaatctgagagtagttcttattttcttctcataacacatatgttagctaatctttcaaactgcgaacattacttaccaactatacagctaacaccctgctcacaatacttttgaactctagcaaatctcccatacgtcaatgtacatctattttcttaccccacacttatttaattcatagcgattatcattatttaaattataaaatatcatatgaaataaattcttagatatcatgctatattagactatataataccacattatgttaattacttattttattctttcgtgattccccc

SEQ ID NO: 109757 - DNA, 514 bp, Homo sapiens
tttgggaatgaggtttaagtatgactttcattttctacagcttaagctcatagtttaacctctataggctttagtttcctcatctatgagataagaattcaagtgttccttcattcatcaaatattcattaagtgcttattattttgaggcatacacttttagattgaaaatagattagtgaaaaaaaaaagactaaatctccaattgttgaccctcttggaacgttcattatattgaggacaaatagaaactaaaatagtagtaagagtacttaatccatagaattgttattaaggctaattattattatatatttaagttaagaaagatatatatacatagcacatagtaatatagatatttagtagtaatatagatatatacatagtaaaataaatatgaatatgtgtaacacatagtataaatatrtattgctattttgtaaatagctttattacttgctcaaggatgaatattcaatgtcatgcctaagcagatgcttggctgccatca

SEQ ID NO: 109758 - DNA, 514 bp, Homo sapiens
tttgggaatgaggtttaagtatgactttcattttctacagcttaagctcatagtttaacctctataggctttagtttcctcatctatgagataagaattcaagtgttccttcattcatcaaatattcattaagtgcttattattttgaggcatacacttttagattgaaaatagattagtgaaaaaaaaaagactaaatctccaattgttgaccctcttggaacgttcattatattgaggacaaatagaaactaaaatagtagtaagagtacttaatccatagaattgttattaaggctaattattattatatatttaagttaagaaagatatatatacatagcacatagtaatatagatatttagtagtaatatagatatatacatagtaaaataaatatgaatatgtgtaacacatagtataaatatatattgctaktttgtaaatagctttattacttgctcaaggatgaatattcaatgtcatgcctaagcagatgcttggctgccatca

SEQ ID NO: 109759 - DNA, 585 bp, Homo sapiens
tattacaattaggtgggccagtataatamaactattataactttccttgccttcatgctttccccacactgatcttctaaaattgcatagcattacatcatcccttacacaaaaatcttaaatgatttctcattgcttatctgtctaaatattttagtgtttgagatcttccacaatatagtaataatttaggttttcaaaacttaactattttttccaagtaaagtcaatgtacatttttcatgcacttaatatgaaaatactatggaaggcagaggcaattccattcaaatacttgtatgccacacccatttgccaaacctatatattgtaatccttttcattctttaaataacggttcaaaacagcaatcctttatttcctaactagaaatgatttatattttatctaacctttgtgaaataatgttatattgcaagtatatttctatctacagacttattttgatgaaattatataaatatttgctgaaaacatattcaatttaaagaccagaaatagagtctagaaatataaattccatgtctcaaaaatacctaaatttcttgtcaatttaagagaaac

SEQ ID NO: 109760 - DNA, 513 bp, Homo sapiens
agaaaaatgaaagtaaggtaaaaaagtaatggtcactcatgttattcagaatagggagatgtttaattattttttattgcagaatgttgagtatctgtctctgccaatattccctaaagattatttgtgtttatttgtgcttaattgatattcacagccagctgcaatctaccagctgttagtggtcagttgtcagggtcaattttgtttgtttggttgtttggctggttggytgtttttcctttttcactttgttggaattacagaagagctgatctagtccaggaccatctacttcacttttttttttgttgctgttattgttaattaaaaataaatgaacctgggtttcaaaccattatttcagtattctataagttgcagcccagacactcctaactcacacgtcaggctataggagatgttttaaaatggaagaaaatctgaggtatattcaaagccatgaaaattagtgatctaatatacaatgatcatagaaatttactattgaat

SEQ ID NO: 109761 - DNA, 513 bp, Homo sapiens
cacatatttcttcaatactattgccagcttcctgaattatrtattcttattcctattgttaagatgaaaaaactgagtctgagggtggtaagtaaatgttgccatagccagtcaacaatggagccaaaactctattttgtttttaagtcctctgctctcccttaattttacaatatttgtgtcagttggaccgcaatctttttggtttggctagcttgtgtagagcaatttgaatctcaggatcacttgatttctcatattatcacccattaaaaatttgctgagaatctgaggtatatggaatagcttcttccaagttagctctgaactggaagaaaaagttccagtgtttttggttttggttttggtttttgtttttgtttttttttgagatggagtcttgctgttggagtgcagtagtgccatattggctcactgcaacctctgcctcccaggttcaagtgatcctcctgcctcagcctcccaaatagttgggattacaggcacccacac

SEQ ID NO: 109762 - DNA, 378 bp, Homo sapiens
gaattctataaggattagaataagctgtttttatctggacatgtaattcactctttgtgctattctgactcacaaatcccataggaaatatatccctgtggagtccagtgagttggctggagaggaagagtgagatagagatttggtgcaaactcatggactagatgtttgtctggtgggctgctgaactgttctgagccccactttctgtatctgtcgaataagaatctcatcacttatctgacaaggtcatggcgaggatcatgtccatagtgcatacccagtttctagttgattgtgtctactarccgttctttcttctcctcttctctcctccagaaagaataatgtcttgataggccttgccgaggtttttct

SEQ ID NO: 109763 - DNA, 491 bp, Homo sapiens
attttttattatgattctataaatagtttggcaaaaagaaatttttttatttccctgacaaaaagaggagtgaggaaatactaatagtgtccagaaagtgctaaaaaggtgatagaaatttgtgtggttagagagtcaacatgatattgagacagtcctatatctggatcttgattcagctagttacaagttacgtgatttggtgttagtttcttatacctcagagcctcaggtcctccatctgaaaaatagaaatcacagaactcactttgcagggttttgcgaaaaggrcagaaaattaatgtacagtatctggcacaaaagaaagcttcaataaagatagctgctatcatcattatgttttctgcatcatcatcattatcatcatgtttacatttttcccttctgaaaatttcaaccagatcagtggtagggaaagagacctgttctcaactggtagcattggtggaggcttttgagtttctcgtaaa

SEQ ID NO: 109764 - DNA, 624 bp, Homo sapiens
gttctgacaaatgataaaggaaacaattgtggtttatttcttgaataatgttttagaaaaatgagaactgttttgattcactgcagaactggagagcttggccgtagataggcagggccgttattccattctaacaagtggaaaaccayggtttccgggtacagttagagtaagagatttaatggtatcaagatgaaccattccatttgtttgcttctttttccctgttgaaataaatcaaggccatttcttacaggtatgcaatgaagaagttgtactggtaatgtaaagagaatactcactaccacagtcctttctgaaattgggagaatgctttgactagagaaaattagcaggcttgtttaccctgctgagttgcagtggtaaatttcggttgatataagtcagaatggttggcattcaaccttaaactgctcagaaacagacatcaagtaagtagaattagcattcaaggaaaccgtgacagagtgggggagaagggtgttgaaggtgtgtgtaaaagaataaatattttttagaagcctcaaaatcctagatgaaccatgaggaatgtggagacatgagggagatggtcagtgagtagttgagagtctcaatggattg

SEQ ID NO: 109765 - DNA, 624 bp, Homo sapiens
gttctgacaaatgataaaggaaacaattgtggtttatttcttgaataatgttttagaaaaatgagaactgttttgattcactgcagaactggagagcttggccgtagataggcagggccgttattccattctaacaagtggaaaaccatggtttccgggtrcagttagagtaagagatttaatggtatcaagatgaaccattccatttgtttgcttctttttccctgttgaaataaatcaaggccatttcttacaggtatgcaatgaagaagttgtactggtaatgtaaagagaatactcactaccacagtcctttctgaaattgggagaatgctttgactagagaaaattagcaggcttgtttaccctgctgagttgcagtggtaaatttcggttgatataagtcagaatggttggcattcaaccttaaactgctcagaaacagacatcaagtaagtagaattagcattcaaggaaaccgtgacagagtgggggagaagggtgttgaaggtgtgtgtaaaagaataaatattttttagaagcctcaaaatcctagatgaaccatgaggaatgtggagacatgagggagatggtcagtgagtagttgagagtctcaatggattg

SEQ ID NO: 109766 - DNA, 595 bp, Homo sapiens
tcccttgcccaacggattttaaaacatagcttccaatcccagatgatctctgctacctatgtatgtaaggtcaagccttttgttaattgtactactcactctgttttctagcagtagtgtgtgtatgtgtgtgtgtgtgtgtagggtagtggtgactgtaacattttcaaggttaatgctttaaagacatcttcgagtagcagttttcaggctctataaaatctaaaacttccctcaacaaagaaattaattggagttacttatgtcaaaggtcccacttccatctatcatgtcatcataagaatgctagcatggcattttcctttcttgcatgaatgycaaatgttagtcatgaggctgcacagaggatgcatcagaagctaagtatccagcctaagaaaaccggaggtgagattcatgttctcctgagttactgagtattccagcttttactaagactgctttttaagtcctagtctgggtttcttttttgtttgaaaaagaaactttcaaagaaaaaaaagtatccttcatctgattgtgctgatgtaggtcaagtattacacttgggacatgttcccgttggccctcacag

SEQ ID NO: 109767 - DNA, 571 bp, Homo sapiens
cctgaatgtgtgaacttggaaagtaaatactccctgtgactctcagcttctcccggggtaaggtgggaataccaccaccacgttatggaatgttgaaggaaggaacatgctgatgcgtttgcaatgttggcaatggaggctgcttttaataatcacatcatatctgcagctcacaatctgcttcctggatctctttaaactgggttaggcattttgggaggccaaggcaggtggatcacctgaggtcaggagttcaagaccagcctaaccaacatggagaaacaccgtctctactaaaaataaaaaattagccgggcgtggaggcgcatgcctgtaatcccagctactccggaggctgaggcaggagaatcgcttgaacctgggaggtggagattgtggcgagccgagattccaccattgcactccagcctgggcaacaagagcaaaaactccttctcaaaaaaaaaaaaaaaaaaamaaaaaaaaggattaatcacaaacctcatcagctttacaagaactgtgctcctttggcagagtttactaaatgtgttccctttggtgctcacat

SEQ ID NO: 109768 - DNA, 599 bp, Homo sapiens
aaatgacctcattggtttgttttgggtagaggaagtttgtttcagttgagttcagaagctgatcataaggaaatcaggcccattagaaaacaaccctgataagcaggagtgaactaacgtggttagaactcctttgtattaatgctgaattcacaaactcccctgccctcaatggttcatgaaattctgaaacacacaagtggaagacctcagagttackgcaatccccctgactggacctctacaagctgtaaagagtccctccacaacatgttcagaaaacacaagtgggatgaagttctgggatataagagtacaatagcttcaagctctgtacctcctccaagcctctgctcacacagttcccatcttctaggaaacacccttccccgcttcccacttggccaacatgtagcattctcaagggccagctaatgtccacaaaattcatcttgtgatcagtgttgggaaagaccttaaatatcatctggttctaggagctactcctttctaaaattgaatttcttctataatttctaggcagagttgaaataccattggtgactgggggctcaatctcctgaagacaacccatttta

SEQ ID NO: 109769 - DNA, 555 bp, Homo sapiens
gcttccctaataccatgctcctttccttttgttctaaaatgtgtgtggagcccagaatgccctgaattctccacgggccggatctgtctgctgaatgttccagggacaggtctgtgcagctcaactgctgcagcaacagaataaatattttgagagctccaatttggaaccagctgcagtgaaatcgcttctttctggcttgggtcagaaagtaagagaagaaaacccacycttgcaacttgtctgcacccgtcgctcgggccctggacacccatatgcccctggtgggccactgggctggaccaagtgctgtgcatggtctgtctaatgaagcactgaagtgctgcctgccaaccctgtcccttggggtccagcagcacacggggcactcgcattaagctgctgtggtaggagctggtgcctggccagtgggaagtggtggtagccttttgagcacaggtgccaccagcaaaatttcccttacagttgcttagccactccaggtcagggaaagacccaggttgatgagacccactcactactaaaacaaaggca

SEQ ID NO: 109770 - DNA, 555 bp, Homo sapiens
gcttccctaataccatgctcctttccttttgttctaaaatgtgtgtggagcccagaatgccctgaattctccacgggccggatctgtctgctgaatgttccagggacaggtctgtgcagctcaactgctgcagcaacagaataaatattttgagagctccaatttggaaccagctgcagtgaaatcgcttctttctggcttgggtcagaaagtaagagaagaaaacccacccttgcaacttgtctgcacccgtcgctcgggccctggacacccatatgcccctggtgggccactgggctggaccaagtgctgtgcatggtctgtctaatgaagcactgaagtgctgcctgccaaccctgtcccttggggtccagcagcacacggggcactcgcattaagctgctgtggtargagctggtgcctggccagtgggaagtggtggtagccttttgagcacaggtgccaccagcaaaatttcccttacagttgcttagccactccaggtcagggaaagacccaggttgatgagacccactcactactaaaacaaaggca

SEQ ID NO: 109771 - DNA, 594 bp, Homo sapiens
acatcacacactggggcctgttgggggctaggggagggatagcattaggagaaatacctaattgtaaatgacgagttgatgggtgcaacaaaccaacatggcacatgtrtacctatgtaacaaaactgcacattgtgcacatgtaccctaaagcttaaagtataataataataaataaataattaaacaatttggccttttgcaatctggccaactgtatattcagagcacctccatgctcttaccaggggaatgggaaacaggagaccctgcctggactggtttctgttccctgactcctccgctctttcctgccttcctgcctaccccagcccccaaataagcaattgggccaaggatggacaagtgtctcaaaccaggctaaagcccttctgcgtaatttttctaaatggagccagcagggaagaacttctttttattttcttttttggaagctgagagggatttgacctcagagctgcttctgaaagctttgttcctgggcatgcaggaaaaatcaggcaggagagaaaaaaatgaaagagaattggtgcccaggatctcagagctgccctacctcccatagctcttcct

SEQ ID NO: 109772 - DNA, 579 bp, Homo sapiens
acttcctattcaataaatgctgctggaataattggctagccatatgcagaagactgaaaccggacccctacatttcaccatatacaaaaatcaacwcaagatagattaatgagttaaatgtaaaacctaaaactctaatgaccctagaagaaaatctaggaaataccatcctggacatgagctgaggcaaaggcttcatgatgaagactccaaaagcaactataacaaaaacaaaaataccagcctgggcaacatggcaaaaccctatcctacaaaaaatttaaaaattagcccaccatggtggcatgcatctgtagtcccatctattcaggaggccgaggtgggaagactgcctgtacccaggagactgaggcagcagtgagccgtgatcataccactgcactccagccgggtgacagagcgagatcctgtgtcaaaaagaaaagacaagtgagacctaattaaactaaagagcttctgcacagccaaagaaactgttaatagagtaaatagacaacctacaaatgggagaaaatattagcaaattttgcatccaacaaaagtgtaatatccagaatc

SEQ ID NO: 109773 - DNA, 631 bp, Homo sapiens
aaacccacaaccacgtatttcttgagctttatcgcatgattatttactcaaaggtagggagctgaatgtggagcccatttwaggcaaatgaacagaaacacatatactggatcgcaggcgagtgtacgtctatgattggtttgcgccaggggaatccttatgtgttatttaagatattttattttagatgagagagtggtagttttctggactacagcttctggaaactaggttcgcttactcaagaatgtactgaacacacagggtacatggagcccagtaactattccccaattttgaacctataccaaaacatatcatgaaataagccatcacaccaactagaaacaactaaatagttacaaaaatactgtctacaatataatttacataaataatagtggaagaaatgagaagtaaggatgagttacttagggaaggtttcttggaaaaggtgtggcccaagtaggatgttagagaaactgtgacatgtaacctcgcaaagtagttttctgttgttttaaaataactgcacaatttaactaggttgactaatgattaatttgaactatgcatctgagcatggacagctttatagtgcacaggaagcctatatatcagccatgcctac

SEQ ID NO: 109774 - DNA, 577 bp, Homo sapiens
ccctccctctaaattcatagatttcagtgatgcaaattccacccatgtatctaagagctggtcatttaaagaattattgcactacagaagccaccatggttgattcagggataggcatgttatctaagaagagctactataactgttgtagggctagaagaaaaaaaatcagcctacgagtctggcttctcttgcttagcataacgctttattcatgcggtctaccctgagaagataggaagctggagatgtgctggcaacttttttgccatggaataaagacagaacacaaatttaaacaatgaaagayattaaaattcaaccccaatggcattgtttaaagtcttggatcaagttgtccgtgaggctgccacttgactttttttgtgagccagtaaattactcttgtttttccttaaaccaattttagttggattttcacaacttatggcatagacattcttaattaatactttcctatctcaatttttcttgtgtgaatagtgatttccaattcgtatttttctgctctattcttttaatttttttctcttcttggctcatgtaccattttcct

SEQ ID NO: 109775 - DNA, 484 bp, Homo sapiens
atgtttcatatcattaggctcaaattaagtaaataacagaatcctaagctgatgacacatcctgggtttgcactaatcataatttgcaatctccatcattgtcatcagaacctttttgcctagcaacrttcctgctgctgcttctgttccgaccctctgggtgcaactgaaggaggaggcagtcaaaaggaaaaacacaaatatctccaagatggcacttacaaaaagcaacaacaatgacaaagtataaatacaaacacacaccttgaagtttatgttcttactcaaatgcaagcatcaacaatagcctactgtcagcaagttaaatggctggggctgtttcagtctcccattacatgaaggtatgcaagctcatgctaatacgtatcagttggtaccaaatgagtgagtgagtcaggagtgatgaatgaagtgtgagggaaattgcactgttcctgtaccatctaaaagggtaatggatatt

SEQ ID NO: 109776 - DNA, 484 bp, Homo sapiens
atgtttcatatcattaggctcaaattaagtaaataacagaatcctaagctgatgacacatcctgggtttgcactaatcataatttgcaatctccatcattgtcatcagaacctttttgcctagcaacgttcctgctgctgcttctgttccgaccctctgggtgcaactgaaggaggaggcagtcaaaaggaaaaacacaaatatctccaagatggcacttacaaaaagcaacaacaatgacaaagtataaatacaaacacacaccttgaagtttatgttcttactcaaatgcaagcatcaacaatrgcctactgtcagcaagttaaatggctggggctgtttcagtctcccattacatgaaggtatgcaagctcatgctaatacgtatcagttggtaccaaatgagtgagtgagtcaggagtgatgaatgaagtgtgagggaaattgcactgttcctgtaccatctaaaagggtaatggatatt

SEQ ID NO: 109777 - DNA, 593 bp, Homo sapiens
gtagcctttctttaggttctgttgcgctgctgggtaggggcaccgggtcacgcgaaagccgatctgctctctaggctgaagtcctcctggtggcgcctggggtcacaggtctcctgaggcctggggctgtagcccctagaggcaaaggagacagtgaacttgctgtctccggtcccttcatggttgccaaaaatgttgcgggaaactgaggactckagagactgatatggagaacaggaggattgtttatttaaggtatgcactggctcagatttttttttttttttttttttttgggatggagtctggctctgttgcccacgctggagcacagaggggcaatctcagctcactgcaacctccgcctcctgggttcaagtgattcttgtgcctcaccctcccaagtagctgggtttacaggagtgcaccatcacacctggctaatttttgtgattttggtagagacaggttctctttatgttggccaggctggccttgaacgcctgacctcaaaggatccacccacattggactcccaaaatgctaggattacaggcttgtgacaccatgcctggcctactttttttctaatc

SEQ ID NO: 109778 - DNA, 573 bp, Homo sapiens
ggaattctatgtgagggacagacattcaaaacccaacagcagtgttctggaatcctatgtgagggacaaactttcagaccctcgtagcagtgttctggaatcctatctgagggacaaacattcagaccctcatagcactgtactggaatactatgtgagggacaaacattcagaccatggcagttccgaaatgctatgtgaaggacaaacattcagaccttcgtagcagtgttctggaatcctatgtgarggacaagcattcagaacctcgtagcagtgtcctggaatcttatgtgagggagagacatttagaccctcgcagctgtgttctggtatcccatgtgagagacaaacattcagaccctcccagccgtgttctggaattctatgtgagggaaagacattcaaaccccagcagcagtgttctggaatccgatttgaggggcagacattcagaccccagcagcagtgttctggaatcctatgtgagggacaaacattcagaccccagcagcagtgttctggaatcctatgtgaaggaaaaatattaagaccctcgtagcagtgtcctgg

SEQ ID NO: 109779 - DNA, 573 bp, Homo sapiens
ggaattctatgtgagggacagacattcaaaacccaacagcagtgttctggaatcctatgtgagggacaaactttcagaccctcgtagcagtgttctggaatcctatctgagggacaaacattcagaccctcatagcactgtactggaatactatgtgagggacaaacattcagaccatggcagttccgaaatgctatgtgaaggacaaacattcagaccttcgtagcagtgttctggaatcctatgtgagggacaagcattcagaacctcgtagcagtgtcctggaatcttatgtgagggagagacatttagaccctcgcagctgtgttctggtatcccatgtgagagacaaacattcagacmctcccagccgtgttctggaattctatgtgagggaaagacattcaaaccccagcagcagtgttctggaatccgatttgaggggcagacattcagaccccagcagcagtgttctggaatcctatgtgagggacaaacattcagaccccagcagcagtgttctggaatcctatgtgaaggaaaaatattaagaccctcgtagcagtgtcctgg

SEQ ID NO: 109780 - DNA, 548 bp, Homo sapiens
atctaaaaggcaagccaggtgtatgggagggaacatgaaagtggactatgagtgtgaccactgaaacacagtgtcacagggagatggtcaggcctccasataactgcaggtgggaatgactgacgtcatgccttccacaggaggtggaggaacacagtcttctctaaactcccccggggaaagggagactccatttcccagtcggctaagtaggggtgcttttccttggcactgatgctactgctagaccatggtccctttaggtcatgggcatcttcccagatgctggtgttaccgctagaccaaggagccctctggtggccctgtccgggcataacagaaggctcacactgttgtcttctggtcacttctcactatgtcccctcagctcccatctctgtatggtctggattttcctaggtttttattgtagagcaaggattattataatattggaataaagagtaattgctacaaactaatgattaatgatattcatatataatcatatctatgatttatatctagtataactattcttattttat

SEQ ID NO: 109781 - DNA, 548 bp, Homo sapiens
atctaaaaggcaagccaggtgtatgggagggaacatgaaagtggactatgagtgtgaccactgaaacacagtgtcacagggagatggtcaggcctccacataactgcaggtgggaatgactgacgtcatgccttccacaggaggtggaggaacasagtcttctctaaactcccccggggaaagggagactccatttcccagtcggctaagtaggggtgcttttccttggcactgatgctactgctagaccatggtccctttaggtcatgggcatcttcccagatgctggtgttaccgctagaccaaggagccctctggtggccctgtccgggcataacagaaggctcacactgttgtcttctggtcacttctcactatgtcccctcagctcccatctctgtatggtctggattttcctaggtttttattgtagagcaaggattattataatattggaataaagagtaattgctacaaactaatgattaatgatattcatatataatcatatctatgatttatatctagtataactattcttattttat

SEQ ID NO: 109782 - DNA, 594 bp, Homo sapiens
tcaaacccatctcctctacattcctaagtaccttcagccttctaggtcattaaactcaggtcattcaaacactggctttgaatttaggaaaatcctcaggacacttgtctatcagtccatgtctagtcatgatggaaatctttgagtcaaaattccactattaacgtttccctggctttttcaattctgagacacaattgctagaattcctctagtgttctatttasatgagggccctactttgatgtttaattttggtagagattgaacttttatctggttcatgagtggagtatggtgatagtattttgctcagctttacgaggtatacaaatctctatttcctggtaacatgtcctactttcctaaagcacagattatttttttttattatttgtaaatttttaatcaacaaataaaaattatatatatttagtatgtacaacatgttattgtgaaatatgtatgcattgtagaatggctaaattgagctaattaacaggtgaatttcttagattctcttttttagcattggagctgtttttccactgtcttcctctctctctatgacatagcaccccctactgcatggtc

SEQ ID NO: 109783 - DNA, 571 bp, Homo sapiens
tttaagtggctcacagacccacaggctttacaggaagtatgattccggcatttgcttggtttctgagaaggcctcaggaaacttataattatggcagaaggcaaaggggaagcaggctcctcttacatggccaaagcaggagaaagagatggagtggggaggtgctacacacttttaaacaaccggatctcatgataactgtcacaagaatagcactagagggatggcgctaaaccataagaaaccaccatgatccaatcacctcccaccaggccccacttccagcattggggattacatttcaacatgagatttgggttgggactcagatccaaaccatattattcagcccctgttctctcccaaatctcctttctcacattttgaaatacaatcrtgccttcttaatagtcccccaaaatcttacctcattataacattaactctcaagtccatagtcaaaagtctcatctgagacaaggatagtcccttctgcctatgagcctgtaaaatttaaaaaaaataaaaataaataaataaataaaaaagttagttacttccaagatacaag

SEQ ID NO: 109784 - DNA, 578 bp, Homo sapiens
aatgcatgacttcaatttcctctactgtccttgttttgtctttcctgttgtctttaggtttccctagaaattcttcattaaatatagtctgagccttgtagttctatcagatgtaatcttctgctgtgacacagatactctgttgatgtggtggtaaggtgtgtggggagaggaagccttcaatcatgccatgattcagtctcagtcttttagtgggcctgtgtccctagggtgtgatgtttgtaagtgcccctcagtccctccctcctcccacaccacacacatagactgacaccatacacacagaactaactttctcaactaagaccagagaaggctgaaactgagtatttacctacctttactttagttaacttcttgcaaagtggtttcctttgaggacagagaaaaataatcttttagtatatttcaaattggttactttctcatgagcattctccatgatggttagttttcctctccttttgctgaagcatgaggggcttttttcatattttcaccacragaatctggatgagctcctggggataaagctcactacagtgacccttaaggct

SEQ ID NO: 109785 - DNA, 505 bp, Homo sapiens
gaacagaaaaccaaatactacatgttctcacttataattgggagctaaaatgatgagaacasatgaacacacagaaggaaacaacacacactggggacttctggagggtggaggttgggagggagaggaggatcaggaaaaatagctaatgggtactaggctcaatgcttgggtgatgaaataatctgtacagcaaatccccaagacgcaagttgacctatgcaacaaacctgcacttgtacctgttaaattaaaataaaagttaaaaaaatgaccatatagtgaaaaaaagaatgtttttatctttctatattttctatattttacaattttgcttctatgaaaatcatctagttttaccaaataaaaaagttttaaaattagttctataacaccagtttttactgattccaaactataattcttaagaaaacactcttcaatttaaacacgtaaattgaatttaatggtaacattgttagtatttcaatttaaatgaaaatgt

SEQ ID NO: 109786 - DNA, 578 bp, Homo sapiens
gtctttacattatttcattattaggttaattttggcatcagagaatgagttatggaatgctccctgtacttgtatattctagaaaatattgtagaggattaatgttattttttcccataaaactttagtagaatttaacagtgaaaccatctggacctggtgctgttctggcatggttatttattttataataaataataaattttaattattttaataattattttattattatcaatctttttggtagatacagagccattaataaaatctatttttctagtgtgaattttggtgatttgcatctttcttagaattagtctgttaaatctaagttatcaattttgagggcacagagttcatcatrgtattttttattatttttaatgtccataagatcagtggcaataaccaatctttttaattaatatcagaaacgtcttctcttttttgtgtttttctcaggttatcctgaatggagttttatcaattttattgatgttgtcttagagctagctgtatgtattgttgattttctttatttttctgctataatttctcctgatttatgttaattt

SEQ ID NO: 109787 - DNA, 578 bp, Homo sapiens
gtctttacattatttcattattaggttaattttggcatcagagaatgagttatggaatgctccctgtacttgtatattctagaaaatattgtagaggattaatgttattttttcccataaaactttagtagaatttaacagtgaaaccatctggacctggtgctgttctggcatggttatttattttataataaataataaattttaattattttaataattattttattattatcaatctttttggtagatacagagccattaataaaatctatttttctagtgtgaattttggtgatttgcatctttcttagaattagtctgttaaatctaagttatcaattttgagggcacagagttcatcatggtattttttattatttttaatgtccataagatcagtggcaataacsaatctttttaattaatatcagaaacgtcttctcttttttgtgtttttctcaggttatcctgaatggagttttatcaattttattgatgttgtcttagagctagctgtatgtattgttgattttctttatttttctgctataatttctcctgatttatgttaattt

SEQ ID NO: 109788 - DNA, 592 bp, Homo sapiens
gaaacagtattttctttattctctgactaaaaagtaattataaagtaaataaagatttaattaatttaatggtaacctaatagttattgaatgagtagcatatggtaagatgtaaaaaaagaaagcaattttattgtttcctactactatccttgcaaatgtgccccaagattttcactcacctttagataaatttagggcaatacttactgcttctctggtcactacagtctctttctgcggtaatarcaagtctattctacataaaattctaaagttcatttaaatagtcttcccatcctctgctctggttgtctccccctcggaaggttatggtagggcagagggctttggtgtagacttttccttcatcaatttcccaaatttccagctgctttagatctctagaagactaatctgagaaagaaaagttaagaggcagaaatgctgtgcgtgactgatttagttatcatctagggctgtgccctctaggggtgatatattctacatgctaattctttctcatgtagggtgcttatatgctgagacctttccccaaacacaactgttgactatgtttcctttgaaagac

SEQ ID NO: 109789 - DNA, 571 bp, Homo sapiens
gggaaaaagaaaaaaaatctctcaggaaaacttctgaaggtaaaaaccactctgggtcacaggctttggtcacaacagcycagatagggacttgttctttctttctatcccttcacacaccaggggcaacattcttcctgggacttactatgcgccacaagaaactcattattcgccttcaccaaaatttaaactcttcccctttctgcatttcctgcttcaattataactcaacctactaatcaaatggccaaactagggataatcttaggcccttcctttttctccactatcaatctaatttctttccaaatcctgctgacctatctctgtaatcgtttatcaaatctgcttcttcccatctctgcttgccactgccctagcctgatctagatacttgtagcatttgattggctatgttactggtcctgctctcttagatatgtctctactctgacatcagaggaatgtatataaaatgcaaatcagatgctgtcaacccactgcttaaaaatcattcaaagcattccattgcctacaagataaagtaaaatctatttacgtgacatgc

SEQ ID NO: 109790 - DNA, 571 bp, Homo sapiens
gggaaaaagaaaaaaaatctctcaggaaaacttctgaaggtaaaaaccactctgggtcacaggctttggtcacaacagctcagwtagggacttgttctttctttctatcccttcacacaccaggggcaacattcttcctgggacttactatgcgccacaagaaactcattattcgccttcaccaaaatttaaactcttcccctttctgcatttcctgcttcaattataactcaacctactaatcaaatggccaaactagggataatcttaggcccttcctttttctccactatcaatctaatttctttccaaatcctgctgacctatctctgtaatcgtttatcaaatctgcttcttcccatctctgcttgccactgccctagcctgatctagatacttgtagcatttgattggctatgttactggtcctgctctcttagatatgtctctactctgacatcagaggaatgtatataaaatgcaaatcagatgctgtcaacccactgcttaaaaatcattcaaagcattccattgcctacaagataaagtaaaatctatttacgtgacatgc

SEQ ID NO: 109791 - DNA, 617 bp, Homo sapiens
atctatacctttgaattgctgcatttaaagtataatcaatatttcatttaaaaaaatgaaatgctaatattttagtgagaatcatattgatctattttaaatattgttatttcatctttcattctttaatatatattttaaagtatgttttacaatatactttatatactgtataagataatttayataaaatattagtaaactaataaatgaaagacattttcaagatataaacatacatttagtgaggtgcatacattttactgatgggtctttagtcaaaaagtttgaaaaccactttcttatataatatgacagttttaagaaagcaacaaatgcaccttcaaaataaatggactaaatggaccttagagccacattcataggttcaaattccagttttcatacttacaagaagattaatatatttagttatttgtgtcttactttccttgcgtgtaaaatgtggatagtattagtacttatctcacaggttgtttgtgtgtattaaattacataattaatgtaaagtactccaaagagtacctaatatttaagttctcaacaaacatcaattattatcagtagtggttataacactcatacagaattatggt

SEQ ID NO: 109792 - DNA, 596 bp, Homo sapiens
aatgactttgttgattaatcacgcaattcagaaagcaatttgagaatttggcccatgaataatattttcaatactctgtcaaaattgattggaggaattaaagttaaaaagtatatgcatctaagtttgttctgccattgtctaaatgatagtatttctcttgctttcttgtaaaatttgacatgaaactgctaatcataagtaacactattttcaacaaggtagcaggcatatgagcactaaaacattttttcaaatattagtatttccagatatagatgagtgcagtgagtcagttgyctgtgatgatcattccatatgtgaaaatgtgaatggtgggtataactgctcctgcaaagaaggttatcagacatccacaggaaaatcacagttcacacataatgatggcgcttactgccaatgtaaattacattattaaattttatgtatgatcaaagaactatataaaatatgtagtacacagttgtgaagtatcacagagctacatcttccaagaaatgtgcctgcattcctttatcttctatggaacaaagaaatgaaagcctattttttttaatttaatcaaaattgtagat

SEQ ID NO: 109793 - DNA, 571 bp, Homo sapiens
actaggttacaagaacaacactatctcagccaaggacaccctttctaactcaactcttactgtaagtatgttcagctttaactcaatataattgagctttgaatttttcctttcatttgtgaatagtgtaggattccaacatttctaaaagacatactttttttcaataggaatttgtaaaaaccgtgaataattttgttcaaagggatacatttgtagtttgggacaagttatctgtgaatcataggagaacacatcttacaaaactcatgcacactgttgaacaagctactttaaggatatcccagagcttccaaaagaccacagagtttgatacaaattcaacggatataggtaagaaacaagggtccatttaaaagtaattgtgttttccaaataagccattttcaaagttttgggtggggttaggaggcatggtgttgaaactagtattgattacattgaaagtagttttatcagtgtacaaatgaatggtgatgcatattgcaaragcattgtgaataaagtaccagtcaaaaggataaatccacaagtgtctccttcctatcat

SEQ ID NO: 109794 - DNA, 573 bp, Homo sapiens
ggtcacttgaaccattaaacgtaagtagaaggctgttacatccatgatttttatatttgctctcctattgggaaggtttagtcactgtgatgtgtgattgagagtactcctttgaataagatggtgcacaaatccatttaagggacaggagggttgtaattcatgtcattttataattaccacgtaactaacaactaaaacaaaatggtatatagtgaaactgatctttgtgttgcaattccaaaagatctttgcttaacsagtgtttatgttcaggagatggtaaaagtagagattgatcagacaggcagtagtctcagctaggaagtaaatccaaaagctacatttattcattctgagggtaatatatattgccaggtatcaaaataattttgcaccaggctcaactaatgaggcaggatgatcaaatatatgtgtgctcagaggacaaattagaccctttcaatactgggactattataaacctggttactgtccaagaccagattcacatgccactttctttgcaaggctttaaaaaaattttatctgtcagtaataattgtttgtttt

SEQ ID NO: 109795 - DNA, 625 bp, Homo sapiens
attgtaccacgaaggaggatcaaaggcagttttctcttttgtaggaaggacaacattatacattcacttaatttttccagggctatataagtctcctgctctcagacacaatgtagtcagcaggaaccttcatcacattagcattcctcagaacatcatattggtctacaatattgatgatatcatgttaataagatctggtgaaaaggaagtagtaagtactctagatctctggcaggataaatacatgtcagaggactggagataaaccacaggaaaaattagctgcttaccatgttagtgatgcttttaggagtccagtggtctaagataggctgggacatcccctctaaggatgagcagattttatatcttgtaccttttactatcaagaaggagccatgkcacttagtgtgtcattgtggattttgaaggtaacatgctgactacatttggaaatagttctcctttgggtttatctggagactgaaaagactgacagttttgaatgaggcccagagcaagagaaaatcctgcagcaggtcttgtttgtggtatcaactctcctgcaacgtgggccacatgacctggcagagtcaatgatgccctctgatagataagtatg

SEQ ID NO: 109796 - DNA, 589 bp, Homo sapiens
tgaagcctattgttcaaataaagccacattcccttgcccagtttttggactcragccagttttcagactgggatccactgactcaagagagtgaggatctcaggggaaggaccttattacacactgtaaagttcctctcaatccttctccaaaagagccaacggcctgatcaagtgactgtgtactggaaaaaggtaatacccaaatattcacaagacagatggccatagggtctgtactgacacttctacctagtaatctgaaacatctttacgcctcctctgtcagaatggggtataagggaggcagatgataaaaagggtcctggccaaattctgactgtggtgagtccaatgggtctgcagacacacccaataatcatttcctcaattcctaaaagtataactgggatagatgtacttgacttttggagcaactcctatgttgcatcctgggcctatgggataatagctatcctgttgaggatgtcaagtgaaaacttctgaaattgtctgccctatgccttggccacgatcataaatcaaaatcagtatcacatccaatatgtgcgtatgggggaaaatgtgag

SEQ ID NO: 109797 - DNA, 589 bp, Homo sapiens
tgaagcctattgttcaaataaagccacattcccttgcccagtttttggactcaagccagttttcagactgggatccactgactcaagagagtgaggatctcaggggaaggaccttattacrcactgtaaagttcctctcaatccttctccaaaagagccaacggcctgatcaagtgactgtgtactggaaaaaggtaatacccaaatattcacaagacagatggccatagggtctgtactgacacttctacctagtaatctgaaacatctttacgcctcctctgtcagaatggggtataagggaggcagatgataaaaagggtcctggccaaattctgactgtggtgagtccaatgggtctgcagacacacccaataatcatttcctcaattcctaaaagtataactgggatagatgtacttgacttttggagcaactcctatgttgcatcctgggcctatgggataatagctatcctgttgaggatgtcaagtgaaaacttctgaaattgtctgccctatgccttggccacgatcataaatcaaaatcagtatcacatccaatatgtgcgtatgggggaaaatgtgag

SEQ ID NO: 109798 - DNA, 589 bp, Homo sapiens
tgaagcctattgttcaaataaagccacattcccttgcccagtttttggactcaagccagttttcagactgggatccactgactcaagagagtgaggatctcaggggaaggaccttattacacactgtaaagwtcctctcaatccttctccaaaagagccaacggcctgatcaagtgactgtgtactggaaaaaggtaatacccaaatattcacaagacagatggccatagggtctgtactgacacttctacctagtaatctgaaacatctttacgcctcctctgtcagaatggggtataagggaggcagatgataaaaagggtcctggccaaattctgactgtggtgagtccaatgggtctgcagacacacccaataatcatttcctcaattcctaaaagtataactgggatagatgtacttgacttttggagcaactcctatgttgcatcctgggcctatgggataatagctatcctgttgaggatgtcaagtgaaaacttctgaaattgtctgccctatgccttggccacgatcataaatcaaaatcagtatcacatccaatatgtgcgtatgggggaaaatgtgag

SEQ ID NO: 109799 - DNA, 589 bp, Homo sapiens
tgaagcctattgttcaaataaagccacattcccttgcccagtttttggactcaagccagttttcagactgggatccactgactcaagagagtgaggatctcaggggaaggaccttattacacactgtaaagttcctctcaatccttctccaaaagagccaacggcctgatcaagtgactgtgtactggaaaaaggtaatacccaaatattcacaagacagatggccatagggtctgtactgacacttctacctagtaatctgaaacatctttacgcctcctctgtcagaatggggtataagggaggcagatgataaaaagggtcctggccaaattctgaytgtggtgagtccaatgggtctgcagacacacccaataatcatttcctcaattcctaaaagtataactgggatagatgtacttgacttttggagcaactcctatgttgcatcctgggcctatgggataatagctatcctgttgaggatgtcaagtgaaaacttctgaaattgtctgccctatgccttggccacgatcataaatcaaaatcagtatcacatccaatatgtgcgtatgggggaaaatgtgag

SEQ ID NO: 109800 - DNA, 560 bp, Homo sapiens
gttggtcttttgctggcagtttggacattgaacagtatcaaaagatagtctagccttgatcagagggaccccaaacttagagcccatgcatagccttcacctctgtcaccatggctactcagttcatggctctattgcatagtcacaagagtggctaagggtagaggcttgctgacaaccagtggatgcatcatcttgtccacccagttaagtgctgcctctgcaatggatggtctgtggtggacattattaacattagataaaaagatcaacatggattttgaccacttccatgggtacatctacatacttctttccsagctccccttgtctctgatctaatctttctctttcctagccgatgaccaagcatccatgccttttaggagtcctcaaagatctgtgtctgtcgttattttgaggtacttctccattcctgcaaagggaatgatccagtgtactgctcatacttccagtgtagaggattcactctcactactgtcctttagtgccaagtctagatggggctgtattgatgtagcagtccattttcagctcaa

SEQ ID NO: 109801 - DNA, 495 bp, Homo sapiens
tagaattttaattagaagttgaatgaaaaccttttaccaatgaagatgatcttgaaaaacataaggcaataatgaggtttttaggaagcaraccatttattattctgtgcccatttgactctctgcttcatgtggaggggcaataaatgttcttctctattaaatttcctctgcatgaacttgcatttaattatttttaaggaaggcttcatgtctgctcttagtctgaagtcctcatgaaaaatttggagtttcacacaatttagctccctgtagaaaagattgctggtagccctcttcaatgtcagtttgctctttttcattagtcatagaaccccagttttattaggttggcgcaaaagtaattgcaattttttcattaaaagggatggcaaaaaccgcaattacttttgtaccaacctaatattgggtgacagtgatttcagtttaaagaagatatttccccagctctttttcagctaagtgtgcccatga

SEQ ID NO: 109802 - DNA, 610 bp, Homo sapiens
aactggctatttcaaagttcatctgcacaacctcattgaataaactgctgctcctggaagagagaaaagaaactggctttaagccaactttgttcaaaggacccttctctcctcataatagtacgcagaagataaagacaaagaaacacatctcagggatggctccagggttttggtgggggatcctggggcatggaaccacctacaaagtgaggactggcatctgggacagagaagcacccacaagttaaggatatgggccaagaatattcaacaatgagcagtaacctgtgtctgtgttgatgaggccttggaatgattattaccagctctgcagatgatgagctaaactagtttatctcacacctgcagtatgcacctgaatggcctctgttcagttctgtaggtgtggcagaygctataggctggggtccccaacccctgggccatgaaccggtaccagtccatgggctgttaggaatagggctgcacagcaggaggtgagtggcgggtaagtgagcaaagctccatctctatttatagctactccccatagctcacattatcacctgagctccacctcctgtcaggtcagtggcagcattagatt

SEQ ID NO: 109803 - DNA, 570 bp, Homo sapiens
aaccggtgttgagcaaagagagaatctagcaatgcttgcattacaggagttgcgacaggtgtagtggttgtgctgactattgccagagagaaattatcactcactctcccatgtccctctagtgaactgaagacatttaactcaaggggaggtacggctgataccactgattatgttgtcaccatgaggattcataagtttttctgaagtcttttccagaattttgtcaggagtaaaccattatatttctataaaacattttaaacgttttaagtattagacctaaatgcatttttttccagttttaagtctaagscctaaagctatgtaatgagaatttttattttgccttttgctagatattttttccttattgcatatctttctattaaagaataaatcttgttaaaagactgtcataaaagcctgtgggttttattgtagaagcaaatttattttctggttcatttaatgataatcaaattataggaatagttaaaaagtgaaagtcaagtcattcaatctagcacaacccaggcagccacaatcatgacctgaggatacaaatta

SEQ ID NO: 109804 - DNA, 570 bp, Homo sapiens
aaccggtgttgagcaaagagagaatctagcaatgcttgcattacaggagttgcgacaggtgtagtggttgtgctgactattgccagagagaaattatcactcactctcccatgtccctctagtgaactgaagacatttaactcaaggggaggtacggctgataccactgattatgttgtcaccatgaggattcataagtttttctgaagtcttttccagaattttgtcaggagtaaaccattatatttctataaaacattttaaacgttttaagtattagacctaaatgcatttttttccagttttaagtctaaggcctaaagctatgtaatgagaatttttattttgccttttgctagatattttttccttattgcatatctttctattaaagaataaatcttgttaaaagactgwcataaaagcctgtgggttttattgtagaagcaaatttattttctggttcatttaatgataatcaaattataggaatagttaaaaagtgaaagtcaagtcattcaatctagcacaacccaggcagccacaatcatgacctgaggatacaaatta

SEQ ID NO: 109805 - DNA, 524 bp, Homo sapiens
tgtcttactgattgaaaaaaaaaatcccagcctttagctgggagcacagatcaaagtaagttctcattagaaatcaaatatgatccttcacaatttgtttatttacaaatctgtattgtttatttaattctttttttgaatttatttttcttaatttgacaaaattatatgtatctattaygtacaatatgttgccttgaaacacatatacgttgtggaatgcttaaaagtagctgcttaatatatgcatcactacacatttttctcactttttggagagaacatttaacacccacttttctagcatttctggagcacagtacagattaagtatcccttatccaaaatgcttgggatcagaagtattttggattttaattttggaggaatttttggaatatttgtattatatatttaccacttttgcattcctagtccaaaaatccgaaatccaaaattctccaaagagcatttcccttaagagtcatgttgatgttcaaaaagttgtgaagtttggatcattt

SEQ ID NO: 109806 - DNA, 524 bp, Homo sapiens
tgtcttactgattgaaaaaaaaaatcccagcctttagctgggagcacagatcaaagtaagttctcattagaaatcaaatatgatccttcacaatttgtttatttacaaatctgtattgtttatttaattctttttttgaatttatttttcttaatttgacaaaattatatgtatctattacgtacaatatgttgccttgaaacacatatacgttgtggaatgcttaaaagtagctgcttaatatatgcatcactacacatttttctcactttttggagagaacatttaacacccacttttctagcatttctggagcacagtacagattaagtatcccttatccaaaatgcttgggatcagaagtattttggattttaattttggaggaatttttggaatatttgtattatatatttaccacttttgcattcctagtccaaaaatcygaaatccaaaattctccaaagagcatttcccttaagagtcatgttgatgttcaaaaagttgtgaagtttggatcattt

SEQ ID NO: 109807 - DNA, 564 bp, Homo sapiens
ttgagtacagtttgggactgaatgttatccaatagatggcactatactctttgaaatacattacctaatgttaccagtttctctgtcaaatgacagaataggcatttttagttttctgaaacagaaagttgtcttaaaggaatcatcaaaacttgagctatttctaatagtctttggtatgttctaattaaaaacaatcatagatttaatctgtagagttaaagtcattatcactaaccatccttaaaatagtttaacagaaaggagcatagattattttatcaaacaaagtatttctgaaaaacaggataatgyaaacgtcagtaaattaaacattaacattagaaccattgtgtatatgtacatatgaaacataatttaagaatatgtgtaaatattagaatatccgaataagtataaaacaagattttttatttttgttatttgaaaattatagtaataaaataatgtgcattatatgtgtgttacatatgattttataatgtttattaaatctgactcaagcatggttattgaggttatgtatattcacacagaaaaatc

SEQ ID NO: 109808 - DNA, 564 bp, Homo sapiens
ttgagtacagtttgggactgaatgttatccaatagatggcactatactctttgaaatacattacctaatgttaccagtttctctgtcaaatgacagaataggcatttttagttttctgaaacagaaagttgtcttaaaggaatcatcaaaacttgagctatttctaatagtctttggtatgttctaattaaaaacaatcatagatttaatctgtagagttaaagtcattatcactaaccatccttaaaatagtttaacagaaaggagcatagattattttatcaaacaaagtatttctgaaaaacaggataatgtaaacgtcagtaaattaaacattaacattagaaccattgtgtatatgtacatatgaaacataatttaagaatatgtgtaaatattagaatatccgaataagtataaaacaagattttttatttttgttatttgaaaattatagtaataaaataatgtgcattatatgtgtgwtacatatgattttataatgtttattaaatctgactcaagcatggttattgaggttatgtatattcacacagaaaaatc

SEQ ID NO: 109809 - DNA, 564 bp, Homo sapiens
ttgagtacagtttgggactgaatgttatccaatagatggcactatactctttgaaatacattacctaatgttaccagtttctctgtcaaatgacagaataggcatttttagttttctgaaacagaaagttgtcttaaaggaatcatcaaaacttgagctatttctaatagtctttggtatgttctaattaaaaacaatcatagatttaatctgtagagttaaagtcattatcactaaccatccttaaaatagtttaacagaaaggagcatagattattttatcaaacaaagtatttctgaaaaacaggataatgtaaacgtcagtaaattaaacattaacattagaaccattgtgtatatgtacatatgaaacataatttaagaatatgtgtaaatattagaatatccgaataagtataaaacaagattttttatttttgttatttgaaaattatagtaataaaataatgtgcattatatgtgtgttacatatgattttataatgtttrttaaatctgactcaagcatggttattgaggttatgtatattcacacagaaaaatc

SEQ ID NO: 109810 - DNA, 613 bp, Homo sapiens
aaacaaacacataataatgggggatgtctgtgtaatcttctttttttattattaaaaaaaataaaaatctsttagtagtggctgaaaactttatcttattttaccagaactgtatatgagtcctattaaattttattctgtcattagtcaagccatgcttttttcaactttccaaaaatccttgaataaataatggactgactgaccttactctgtgaattcactcaataagcaaagcacttaccatgtgctgtgggtgccgttaggtcctgtggatcagaggtccccaagtgtcttggcaccagggatctgtttcatagaagacaatatttccatggactgggggcaggggatggtttcaggatgattcaagcacattacattgcatctattttgcactttatttctattattattacattgtaatatataatgatagagttatacagctcatcataatatggaatcagtgggaaccctgagcttattttcctgcaaccagacagtcccatctaggggtgatgggagacagtcacagatcatcaggcattagattctcataagaagcatgcaacccagatccctcacaggcacagttcacaataggattttt

SEQ ID NO: 109811 - DNA, 613 bp, Homo sapiens
aaacaaacacataataatgggggatgtctgtgtaatcttctttttttattattaaaaaaaataaaaatctcttagtagtggctgaaaactttatcttattttaccagaactgtatatgagtcctattaaattttattctgtcattagtcaagccatgcttttttcaactttccaaaaatccttgaataaataatggactgactgaccttactctgtgaattcactcaataagcaaagcacttaccatgtgctgtgggtgccgttaggtcctgtggatcagaggtccccaagtgtcttggcaccagggatctgtttcatagaagacaatatttccatggactgggggcaggggatggtttcaggatgattcaagcacattacattgcatctattttgcactttatttctattattattacattgtaatatataatgatagagttatacagctcatcataatatggaatcagtgggaaccctgagcttattttcctgcaaccagacagtcccatctaggggtgatgggagacagtcwcagatcatcaggcattagattctcataagaagcatgcaacccagatccctcacaggcacagttcacaataggattttt

SEQ ID NO: 109812 - DNA, 489 bp, Homo sapiens
gaagaaaagagagaaaaatcaaatagatgcaataaaaaatgataaagaggatatcaccactgatcccacagaaatacaaactaccatcagagaatactgtaaacacctctacacaaataaactagaaaacctagaagaaatggataaattcctggacacatacacactcccaggactaatccaggaagaagtcgaaaccctgaatagaccaatacaagttctgaaattgaggcagtaattaatagcctasctatcaaaaaaagtccaggaccagacagatgcacagccgaattataccagaggtacaaagaggagctggtaccattccttctgaaactattccaaacaatagaaaaggagggactcctccctaactcattttatgaggctagcatcatcctgataccaaaacctgacagagaaacaacaacaaaaagaaaatttcaggccaatatccttgatgaacattgatgtgaaactcctcaataa

SEQ ID NO: 109813 - DNA, 489 bp, Homo sapiens
gaagaaaagagagaaaaatcaaatagatgcaataaaaaatgataaagaggatatcaccactgatcccacagaaatacaaactaccatcagagaatactgtaaacacctctacacaaataaactagaaaacctagaagaaatggataaattcctggacacatacacactcccaggactaatccaggaagaagtcgaaaccctgaatagaccaatacaagttctgaaattgaggcagtaattaatagcctagckatcaaaaaaagtccaggaccagacagatgcacagccgaattataccagaggtacaaagaggagctggtaccattccttctgaaactattccaaacaatagaaaaggagggactcctccctaactcattttatgaggctagcatcatcctgataccaaaacctgacagagaaacaacaacaaaaagaaaatttcaggccaatatccttgatgaacattgatgtgaaactcctcaataa

SEQ ID NO: 109814 - DNA, 362 bp, Homo sapiens
ttctgctgtcatgtgaacatcatagagtgcacttacacacatcttacacacatacctacacatacttagacatggtatagcctaytacatagctaggctagcctattgtttctaggctgcagacttgtgcagcatgttactgtattgaatattataggcaaatgaaacacaatggtattcatgtatctaaacctggaaaaagtacagtaaaaatagagcattataatcttgtcggaccgccattgttgattgaaatgttatacagtgtataactgtacttttttactttctatataaagagcttaaaaaaatactgagggtaatatggttgtttcaaatgattacagcacagtcagttgtat

SEQ ID NO: 109815 - DNA, 622 bp, Homo sapiens
attcttccctccttctaaatgagggcattccgcatggattcatgcctgatcttccagttttatttttatatagttacttatattgctactatttcaattctcaatttaaacaactttaaaaattataattttagacaaaatgtctttctatacccagagctccaaatgcacaatygacaattcccatccaaaaccatatttgccacataaacatgactaacactacatcttttttctagaattagttctaattatctttaagaaatttccattttgttcccagttattcagacctgaaacttcttagacattgtaacagctcccatatcctattatctgtcacacctgtctcttccttctttttggtctgctgctttatcccaaataatgctggacatatacaaattattctgtaaatttttgctgaataaatttatcaataggctcttacatcagtctaagttcatatctctgtcactgcacaccagtagcacctccaaaatccccctaactactctgtcattcagtaagtccctgtcttcaagacagaatccacactggtgtctgatagctcttatataaatgacttttcaatttccccaggaaaaatacgaagccttca

SEQ ID NO: 109816 - DNA, 502 bp, Homo sapiens
aggtaagcatacttggagtctgtatatatatttaccctttttccttctcctaattatagtgtataatggcccctgcttttgctagcatgtctctccctaacaaaggagtggggctttcaggcataattagaaaggcatgtgaaaagagtamagttccccactcacaacttagtgtctgggagaagtatctagtgattgcctgtcctaggacccctcggatagtgacagatctggaggacagatgtccaggacaggccagtaagactgagaaggccacgccagtgtccaggagacagttaacctcctggccttcaatggtcaagcatacccggggctctttgagggtgatggcatgggctggcgcttgccccgggcaccctcagtcctgctgctggatcatctcaaaggttagtggcttctgactcagaggaccttcattccctgggggaagtgggcctcccagtgattcccttcacataaggggcatggacgagggggtggc

SEQ ID NO: 109817 - DNA, 502 bp, Homo sapiens
aggtaagcatacttggagtctgtatatatatttaccctttttccttctcctaattatagtgtataatggcccctgcttttgctagcatgtctctccctaacaaaggagtggggctttcaggcataattagaaaggcatgtgaaaagagtacagttccccactcacaacttagtgtctgggagaagtatctagtgattgcctgtcctaggacccctcggatagtgacagatctggaggacagatgtccaggacaggycagtaagactgagaaggccacgccagtgtccaggagacagttaacctcctggccttcaatggtcaagcatacccggggctctttgagggtgatggcatgggctggcgcttgccccgggcaccctcagtcctgctgctggatcatctcaaaggttagtggcttctgactcagaggaccttcattccctgggggaagtgggcctcccagtgattcccttcacataaggggcatggacgagggggtggc

SEQ ID NO: 109818 - DNA, 570 bp, Homo sapiens
ggagataccagaattctctatttgagggtgattctaatgcgcagaaagattgagaatcgctggcataggtaaacaaataaaggtagtacacatgtaaggacaacatttaactatctaaggaaaaagtattatttcatctcaagtatacagaatatattcaaatgccataaaatattttttctttaatatttctataattcaatttttagcacttacatggccctgcctaagcgagcctgcaggttcactagaaaaggaaagctgccttccaacattctccaagtaactatggagactttacaaactgggttacaattatcttccatagtttttctaatmtttcaatgaacatgaaatcctctgtgttccactgtgataaatatatagggcaaactgtccaagcacattactttatttgatttttctaagcaagaataacatgtaccttgctgtttgccattgcatctggaccaccagagctggttttactggatgaaagtaatgtctgaaatagattaatgtgatagggatgtcgatcatgaaaaataatgtcaagtaaacttgtacagt

SEQ ID NO: 109819 - DNA, 540 bp, Homo sapiens
ctgaatttcccagtctgtttcttcctgagcttatacattctcttgcgaaaattgattgtttaagatgtagatttcatttgctgggatttagcattttcataggattttaaagcatcaattaatccatctcttttgttcagcacagttgatttaaatatagaagtaaaatctgtatttaaagaaactgcttcttaagaagattaagtcacctctgcaagggtcaccaaggtagggtcagaaaggccatatgataatggaacagggaggccactgaaccaacgcatccattaaatggaaacctcatcatatcttatgcaatttagaaagtttgattcttaattaagctttttcctttagctttctccaaaagacttttaaaattcttacagcttttagatttttattgayatataataaatacaaaaagcacataaatcgtacatgtatagtttgaggaatgtttgtaaaatgaccacataacctcctcccagactgaaaaataaaaaagttgctgtcaccccagaagctcccttatgctgc

SEQ ID NO: 109820 - DNA, 540 bp, Homo sapiens
ctgaatttcccagtctgtttcttcctgagcttatacattctcttgcgaaaattgattgtttaagatgtagatttcatttgctgggatttagcattttcataggattttaaagcatcaattaatccatctcttttgttcagcacagttgatttaaatatagaagtaaaatctgtatttaaagaaactgcttcttaagaagattaagtcacctctgcaagggtcaccaaggtagggtcagaaaggccatatgataatggaacagggaggccactgaaccaacgcatccattaaatggaaacctcatcatatcttatgcaatttagaaagtttgattcttaattaagctttttcctttagctttctccaaaagacttttaaaattcttacagcttttagatttttattgacatataataaatacaaaaagcacataaatcgtacatgtatagtttgaggaatgtttgtaaaatgaccacataaccycctcccagactgaaaaataaaaaagttgctgtcaccccagaagctcccttatgctgc

SEQ ID NO: 109821 - DNA, 611 bp, Homo sapiens
tttatgagctcccactgtccatctggataagatttacagacctttcagaaattcctataagcttgggttctgtgcccacactctagactgtcaggctaagatctctgatataaaacagacttcttctgattttgtctagctgcttttctaatatctattcaccaagctcttccaataatagcataaggccctaattaatrttaaacttttatcattataatacataggatgtcttctgttttcctgatcaaattctgactattaaaatataaagaattgtccagaaatatataaaaaaagaatcacacattgatcttctttaaatgaaaatgtaacaattgtatggactaggatgattacagttgttcagttctgactgttatttgaagaaaaaagcaataagaagcctcagcaacttaacagaaggagctgccatttactaggagaaaagattgtggatgagagtgtagcaaaggtcagaattctgtgaagcttgagatgtctattataatgaattatcttttatactcactacaatttcctaacaattttggggtttatatttttgaaagagatatacctttaattttctttctttgtactattgttag

SEQ ID NO: 109822 - DNA, 611 bp, Homo sapiens
tttatgagctcccactgtccatctggataagatttacagacctttcagaaattcctataagcttgggttctgtgcccacactctagactgtcaggctaagatctctgatataaaacagacttcttctgattttgtctagctgcttttctaatatctattcaccaagctcttccaataatagcataaggccctaattaatgttaaacttttatcattataatacataggatgtcttctgttttcctgatcaaattctgactattaaaatataaagaattgtccagaaatatataaaaaaagaatcacacattgatcttctttaaatgaaaatrtaacaattgtatggactaggatgattacagttgttcagttctgactgttatttgaagaaaaaagcaataagaagcctcagcaacttaacagaaggagctgccatttactaggagaaaagattgtggatgagagtgtagcaaaggtcagaattctgtgaagcttgagatgtctattataatgaattatcttttatactcactacaatttcctaacaattttggggtttatatttttgaaagagatatacctttaattttctttctttgtactattgttag

SEQ ID NO: 109823 - DNA, 589 bp, Homo sapiens
cttgtttagctcaagactttgttcaaaaattgttagatactatgatttttattttataaaaatggtttaccctaagctgccaactaaagataatagcagataatgggtaactattcaaagaatagccacaagatctttagtcacggtaccacagttgaggttccatgctttgatttatgacttacccacagactccacacgatgtgaatagctgctttacatctatgcgttcatgtttcaraatgtaaatcaaagatatccattgcctcctggctgtggaatctcggaatctgtagtgtaatattctgttcttcaaacatgatagcatcactgactaatcatccctagattatattctttgaatcctatgtccttagagagattgtgtggcccttccacactcagtctggtaatgacaaggtgggcaaatctgtgaagttttcagtgttcaactttccatttaaattcctctttccccatctcagtggttagtctacccgtatatgcagaagctttgattttctaagattctttctattatctaccccccacccactcatcgaaacaggaagggctctaatgtctgcca

SEQ ID NO: 109824 - DNA, 547 bp, Homo sapiens
tcattagggaaatgcaaatcaaaaccaaaatgagatatcattatacctcagttgaagtggctactattgaaaagaaaaaaaaaacagatgctggcaagaatgtggaaaacaggtaactcatgcactgttggtgggaaagcaaactagtttagccaatatagaaaacaatatgaaaatttctcataaaactaaaagaaataccacatggtccagtaatctcactactgggtatttatccaaaggaaatcagtaaatcaaaggaatatctgcatttgtgtgtttatcacaccactattcacaataagaaagatgtgaaatccaccgaaatctctatcagcagacgtcaggatagagaaaatgtggtttacatgcacaatggaatactattcaggtgtaaagaaaaatgggattaygtcatttgcagcaacatggatggaaatggacgtcattatgttcagtgaaataagccaggaacagaaaaacaaatattgcatgttctcactcatatgtgggagcttaaaaacttaatctcataaacgaagagaat

SEQ ID NO: 109825 - DNA, 473 bp, Homo sapiens
cagaattctgacctttgctacactctcatccacaatcttttctcctagtaaatggcagctccttctgttaagttgctgaggcttcttattgcttttttcttcraataacagtcagaactgaacaactgtaatcatcctagtccatacaattgttacattttcatttaaagaagatcaatgtgtgattctttttttatatatttctggacaattctttatattttaatagtcagaatttgatcaggaaaacagaagacatcctatgtattataatgataaaagtttaacattaattagggccttatgctattattggaagagcttggtgaatagatattagaaaagcagctagacaaaatcagaagaagtctgttttatatcagagatcttagcctgacagtctagagtgtgggcacagaacccaagcttataggaatttctgaaaggtctgtaaatcttatccagatggacag

SEQ ID NO: 109826 - DNA, 474 bp, Homo sapiens
acagaattctgacctttgctacactctcatccacaatcttttctcctagtaaatggcagctccttctgttaagttgctgaggcttcttattgcttttttcttcaaataacagtcagaactgaacaactgtaatcatcctagtccatacaattkttacattttcatttaaagaagatcaatgtgtgattctttttttatatatttctggacaattctttatattttaatagtcagaatttgatcaggaaaacagaagacatcctatgtattataatgataaaagtttaacattaattagggccttatgctattattggaagagcttggtgaatagatattagaaaagcagctagacaaaatcagaagaagtctgttttatatcagagatcttagcctgacagtctagagtgtgggcacagaacccaagcttataggaatttctgaaaggtctgtaaatcttatccagatggacag

SEQ ID NO: 109827 - DNA, 473 bp, Homo sapiens
cagaattctgacctttgctacactctcatccacaatcttttctcctagtaaatggcagctccttctgttaagttgctgaggcttcttattgcttttttcttcaaataacagtcagaactgaacaactgtaatcatcctagtccatacaattgttacattttcatttaaagaagatcaatgtgtgattctttttttatatatttctggacaattctttatattttaatagtcagaatttgatcaggaaaacagargacatcctatgtattataatgataaaagtttaacattaattagggccttatgctattattggaagagcttggtgaatagatattagaaaagcagctagacaaaatcagaagaagtctgttttatatcagagatcttagcctgacagtctagagtgtgggcacagaacccaagcttataggaatttctgaaaggtctgtaaatcttatccagatggacag

SEQ ID NO: 109828 - DNA, 474 bp, Homo sapiens
acagaattctgacctttgctacactctcatccacaatcttttctcctagtaaatggcagctccttctgttaagttgctgaggcttcttattgcttttttcttcaaataacagtcagaactgaacaactgtaatcatcctagtccatacaattgttacattttcatttaaagaagatcaatgtgtgattctttttttatatatttctggacaattctttatattttaatagtcagaatttgatcaggaaaacagaagacatcctatgtattataatgataaaagtttaacattaattagggccttatgctattattggaagagcttggtgaatagatattagaaaagcagctagacaaaatcagaagargtctgttttatatcagagatcttagcctgacagtctagagtgtgggcacagaacccaagcttataggaatttctgaaaggtctgtaaatcttatccagatggacag

SEQ ID NO: 109829 - DNA, 387 bp, Homo sapiens
gctggatctgggaaggagacaaaaagttattaaatgaggcagcaggcttcagcaggtgccacattgctcagggccttgtaggccatgctaaggatttggatgttartgtcagtacaaacaattgagtcataagcagaaagtaaaagcatgattccatcaaatgtttttctctaaacagtaattttataaatacaggttaaatgtgtgtggtcccagctactcaggaggtcccagctactcagtattccttttcaacaaatattaggtgcctactattagccaggtacagcccttagctactttgaatgaagcatatattacaaactggcagaaattcttaaagaatctaaagattgtttatacaccataatctcggtattttataaa

SEQ ID NO: 109830 - DNA, 508 bp, Homo sapiens
attttgctgaatgaagaattcattgaagtgagtcaggaatgtatgattttggacaactgacacaatgcctgaggcatartttcttcatatggaaattggagacaatgatcatatctaccttagcagattatataatgaattattttcctagggctcctgtaataaagtaccacaaactgggtaacttaagcaacagaaatttattgcctcacaattctagaggtgagaagtccagatcaagaagctggcagggctgggctgcctgaaaaggtgctaaggaaggaactgttccagtcctctttctctccttccagtagttccttggcttgtgacagcacagtgtcaattctcatatggcatcctccccgtgtgcctgtctctatgtccaaatctcccttttatttaaggacagagtcacagtggattagaacacccccataacatgaagattgcatgaaattatatacataaataattcaacaacatagcttccaaatagaaaacactc

SEQ ID NO: 109831 - DNA, 508 bp, Homo sapiens
attttgctgaatgaagaattcattgaagtgagtcaggaatgtatgattttggacaactgacacaatgcctgaggcatagtttcttcatatggaaattggagacaatgatcatatctaccttagcagattatataatgaattattttcctagggctcctgtaataaagtaccacaaactgggtaacttaagcaacagaratttattgcctcacaattctagaggtgagaagtccagatcaagaagctggcagggctgggctgcctgaaaaggtgctaaggaaggaactgttccagtcctctttctctccttccagtagttccttggcttgtgacagcacagtgtcaattctcatatggcatcctccccgtgtgcctgtctctatgtccaaatctcccttttatttaaggacagagtcacagtggattagaacacccccataacatgaagattgcatgaaattatatacataaataattcaacaacatagcttccaaatagaaaacactc

SEQ ID NO: 109832 - DNA, 545 bp, Homo sapiens
gaattcattgaagtgagtcaggaatgtatgattttggacaactgacacaatgcctgaggcatagtttcttcatatggaaattggagacaatgatcatatctaccttagcagattatataatgaattattttcctagggctcctgtaataaagtaccacaaactgggtaacttaagcaacagaaatttattgcctcacaattctagaggtgagaagtccagatcaagaagctggcagggctrggctgcctgaaaaggtgctaaggaaggaactgttccagtcctctttctctccttccagtagttccttggcttgtgacagcacagtgtcaattctcatatggcatcctccccgtgtgcctgtctctatgtccaaatctcccttttatttaaggacagagtcacagtggattagaacacccccataacatgaagattgcatgaaattatatacataaataattcaacaacatagcttccaaatagaaaacactcagcctttgtcatctcatcattatttgtttacacctttgtattattggtatag

SEQ ID NO: 109833 - DNA, 511 bp, Homo sapiens
tgagcttgggcaaatcgctcattaaccccaagtcttcatcattttgtgcatataatggggataactgtggcacccacctgtttttgtgagaatcaatgaaatattatgcttgatgttattgtgatcatgatactatctgacaagggcagtgatgcatgataacatcaaaaaattagaaactgtaatgaggtctcttgggcaaaattccatacaagcaaattactgtctctacaaagcatttctgccacacttaattcaccattccctgaacaaaatgtgccatcttcattgttcaggtctgtatagtgctggtttccctgcctgggcagstcactccatcccatcccagcccaatccccatccctccacctcccccttccctccccactctcatacaactcttccttatcttacaggacttggcttcaatgtcaccttaactggaagcttctctccctctccagaagagcttcccattgcacttgatgcatgcactattatttgatcattt

SEQ ID NO: 109834 - DNA, 592 bp, Homo sapiens
acctttttctttctttcagtcttcaatgattcactgcttcatctcgctccaccaaagataaatgaaatctacatctcttatacattaacaatgcatgacaatttayaaatagctaaatttttggagctaactttaagtacctgaatggaatttaatcaacccactaatctcctcacttctcagttatttatcaagtttatgtcaagggacaaggaaaaattatccaaacattgtttaaaacaatcatcattaattagtaacacttatccagggggggttttaacctttcccccactcaaggattattctaatgtcagagtagaataaaaaataagtgcagcgatgctgactcttccaagcttaacatttctcacaagtcaattagctttgtactgggaggagggcgtgaagggctgcttgcggtagttgtgtagcagcagcacaatggccgcagacaaggaaaacagtttctaggaattcctcgtatataattttatatttttgacaagattaatgacccatgctcccttcctctccatttctttttttggaattctgtgttggtatgcagttactatattttattaaagga

SEQ ID NO: 109835 - DNA, 592 bp, Homo sapiens
acctttttctttctttcagtcttcaatgattcactgcttcatctcgctccaccaaagataaatgaaatctacatctcttatacattaacaatgcatgacaatttataaatagctaaatttttggagctaactttaagtacctgaatggaatttaatcaacccactaatctcctcacttctcagttatttatcaagtttatgtcaagggacaaggaaaaattatccaaacattgtttaaaacaatcatcattaattagtaacacttatccaggggggkttttaacctttcccccactcaaggattattctaatgtcagagtagaataaaaaataagtgcagcgatgctgactcttccaagcttaacatttctcacaagtcaattagctttgtactgggaggagggcgtgaagggctgcttgcggtagttgtgtagcagcagcacaatggccgcagacaaggaaaacagtttctaggaattcctcgtatataattttatatttttgacaagattaatgacccatgctcccttcctctccatttctttttttggaattctgtgttggtatgcagttactatattttattaaagga

SEQ ID NO: 109836 - DNA, 592 bp, Homo sapiens
acctttttctttctttcagtcttcaatgattcactgcttcatctcgctccaccaaagataaatgaaatctacatctcttatacattaacaatgcatgacaatttataaatagctaaatttttggagctaactttaagtacctgaatggaatttaatcaacccactaatctcctcacttctcagttatttatcaagtttatgtcaagggacaaggaaaaattatccaaacattgtttaaaacaatcatcattaattagtaacacttatccagggggggttttaacctttcccccactcaaggattattctaatgtcagagtagaataaaaaataagtgcagcgatgctgactcttccaagcttaacatttctcacaagtcaawtagctttgtactgggaggagggcgtgaagggctgcttgcggtagttgtgtagcagcagcacaatggccgcagacaaggaaaacagtttctaggaattcctcgtatataattttatatttttgacaagattaatgacccatgctcccttcctctccatttctttttttggaattctgtgttggtatgcagttactatattttattaaagga

SEQ ID NO: 109837 - DNA, 652 bp, Homo sapiens
aaaatacaaaaaaattagctggatgtggtggtgggcgcctgtagtcccagctactagggaggctgaggcaggagaatggtgtgaacttgggaggcagagattgcagtgagccgagattgagccactgcactccagcctgggtgacagagcgagactccatctcaaataaataaataaataaataaataaataagtaaaataagaataaaaagttgaaactggaaactgcaacttaagacagaaaaaaaaaaaaccacagacacacaaaagacattttgaaattccagtcagtgaactcaaattgaagaaaagattcattccttctatattaagagattatctagtgtattagtttctgagagctgccaaaaactgggtagcttaaaacaatggaagtatgtgttcacagttccagaggttcaaagtctgaaatcaaggtaacgaactggcaggattgcttcccttttggagactctgaggaaacatctgctccatatctctcttgtagcttctggtgattatgagyggtccttagtgttccttggctggtaaatgaattgcttcattctctgcctcctccttttcatggtcttctctttttgtgtgtctgaatttccatcttcttataagggcattaatcattagagaatcc

SEQ ID NO: 109838 - DNA, 543 bp, Homo sapiens
aagaaaaacttcagcctaattaaatttaaaggtgtttaattgatcaatgaatgatttgcaaatcaggcagccatctgagccagagtaggctcagacttcagctcagccccgtggtggaagaagatttatggacagaaaaagaaaagtaacctacagaaaatgggagtgaggtacaaaaacagctgggttggttacagctcagcatttgccttatttgaacattttgaacagttggctacctttgattggtcaaaactcagtgattggcacaagtgtaggctatggtctgtttacacctccacttgttatagttcacgatgtacagaaaaacctttaggctgaacttaaattatgtaaggaggcggctttaggctaaacttgatttaataattccccccttttggtcatcttgttaactttgagagattgaccgaaaatttagtcaatgatgccactatcaccattggtcttaaaacctactgggaaacagtagaatagtggkttttgcaaggtaggaacaaggactgagtagagggtacctcc

SEQ ID NO: 109839 - DNA, 593 bp, Homo sapiens
tgtttaaatatttgtttgtgccctgaatttagttttcgagttccccttaaggaaagatgcttggaaataatttaatcaaaatagagtagtgctttttatagttgccttttgatcatatgtggtcattcagtagacataatatgtatataaaatatcaccttcttattttaacaataaatctgatctccctcaccaaatgatttttctatagttctaaaaagtaacatttacatgagtagctggctttcattaggttatatttgaaaggattacaagaaatgaaaggrccaaaatacaaagaattccagtaaggcaaaaagaagctttcaaaggctcctccaggtctatggaagttttagcaacgcttataatagtaaagcaaatgatctgtacaaactctggagccaaaagccaggccaacctctctcaaagcaaatatatcttcaatgaaaataggagttgttaggaagagggaaagaataaagcatgccaggacagcaagcaagggtgtcgagtatgcttcacatctttgcctaatttccatctgtatcctgcttcctaaacacatgtactaaccctcccccttgaaacat

SEQ ID NO: 109840 - DNA, 509 bp, Homo sapiens
gctcctccaggtctatggaagttttagcaacgcttataatagtaaagcaaatgatctgtacaaactctggagccaaaagccaggccaacctctctcaaagcaaatatatcttcaatgaaaataggagttgttaggaagagggaaagaataaagcatgccaggacagcaagcaagggtgtcgagtatgcttcacatctttgcctaatttccatctgtatcctgcttcctaaacacatgtactaaccctcccccttgaaacatcttggctacctcccagmcataaatttattgcactgagatctgagtccagcatttctggttgatggcagttccattagttctgcactgaactcttgataccctagcaaacgagataaataagttactcaattctaatgtactttaatactattcaataaagtttttccttccatcatgagaaaaatgggaaacaacacacagtaatgactgatgaacatcacatatcatctcctcccggtaaaaagcct

SEQ ID NO: 109841 - DNA, 566 bp, Homo sapiens
ctagaaataagaattacctaagttaatatttaaaatgtattgctattacatatgattagcatctaaaaaagacaacaaatgctattagggcctggtaatgggcacttctctttgtaagggtggaagaaagtctgttgactccccttaatagtgggagactttccactcaaaaacaaggttattagaacctccatttrgatgattacatgtttctaaagacaatatcatataggtggggatattttcaagagttttaaaagcatggagttgaaggctttatttgtcatgtttttattttaaaatatcaattcaataccctgtattactgactatctcaagtaatgttataaagtaggtttggaaggcctaaaatttgaaaatataaagaaatgacttttagcagtacatcaatacctggctgaaattctggtaaactgtttaaagaggcacattccctgtttcacaggagtgatgtgctaatacctttctacaaggactaccagactgcattgaaaagtcccattcaaactagagctaaaatggtgtttgtatcttgaactagttaa

SEQ ID NO: 109842 - DNA, 625 bp, Homo sapiens
gtatactgaataacagtggtgacagtgggcattcttatcacattccggatcttagaggaaagcctttcagtttttccccattcagtatggtactagctgtctgtctgttgtatatggcttttgttatgttgaagtatgttccttctatacccagttttttgagggttataattatgaagggatcttgaattttatcaattgcttttttagcatcattcattctgttgatatgatgtatcacattgattgatttgcatatgtwgaaccattcttgcatcccagggataaatctcacttggtcatgacgaatgatctttttaatgtattgttgaatttggttcactagtattttattgaggatttttgcatcaatattcgtcagagatactggcctgttgtttgtttgatgtgtttttgtctgctttgggtatcagggtaatattgtcctcatagaataagttctaaagtattcctttcttctctatttttggaagagtttgagtagggttggtgttagtttttctttaagtgtttggtagaattaaacagtgaagtcattggttccagggcttttctttcctaggagactttttattatgccttccatctcattacttgtgatagg

SEQ ID NO: 109843 - DNA, 331 bp, Homo sapiens
atctttttgttgaattgatcctttgatcattatataagatcatctttgtctctgtttattgtttttgtcttgaaatatattttgttggatataagtatagccactcctattcttttgtggttttcctttgcctgggttatctttttcaatgcctacattttcagtcaacatgtgtctttataggtgaagtgattttcttgtaaacaacatatacttggatttttaaaaattcattcaaccattyaatgtctcttgataggagaattttgttaacttacatttaatgttattattgatatataatgatttactactgccattttgttaattg

SEQ ID NO: 109844 - DNA, 604 bp, Homo sapiens
ttttactacagtagtaggtccttaaacatttgtcaggtctctttcccaccttctgacttcaaaaacttaccartaagtttagagtatttgttacctcttgatccctagattcaatcagctcaatttcatcaatgtaatagaccaaagtgatatcctgtggagaaggaaaaagcaatcaaaatacctccaaattaaattatgacatagggctggagagttgatatatccctgaggtaggagaatgaaagtgtattgttagttttgtcagctgagaagtaaactgtttatgtcggaccttatggacaggaatgcagaaaaagtgatcgagtaaaaaatatttgtcagatcaatagctatgcaccaagtagcagggaatgtgttaatctgttcaagcaatgaagctactggagcagcagctgcaattggagtcaccactttgttaagtttacagcaatccactgtcatttttcaagatctgtctgtcttctccacagaccaaataggcaagttgaatggagatgtgttaggagtcatcaccctgcatccttcaaattcttgatggtgacactagtctttgcaattactccaataatgcagtacatat

SEQ ID NO: 109845 - DNA, 577 bp, Homo sapiens
atttcttgttttactggtttggttgcagcaaattttctcagcatttgtttgtctgaaaaaaaaattttatctttccttcatttctaaatcttagtttttctggatacaaaattcttggctgacaactattttgtttaaggaggttaaagataggaccccaataccttctggcttgcaaggtctttgctgagaaatctgctgttaatctgataggttttcctttataggctatctgatgcttttgcctcacagctcctaagattcttttcttcatcttgactttagataacctgatgacctatctggctaggtgatgatctttttgcagtaaatttcccaggagttctttgtattgtatttggatgtctgtatttccagccaggygaggaaaggtttcctcaattattcccttaaataagttttccaaacttttagatttctcttcttcctcatgaacattaagtattcttaggtttgtccatttaacataatcccacattcttggaaactgctcattttttaaaattcttttttatatgtccttgtctggttgggttaatttgaaaaccttctcttt

SEQ ID NO: 109846 - DNA, 605 bp, Homo sapiens
cctcttgactctcctcagcctaatcagtgtagagactatgagaatgaaaacctttccartgacccacttccacttaataaataataaacatatcttatcttcattatgatgttctcaataacattttcttttatttttcttactcaattgtaagaatacagtgtacagtatacataacctataaaacatgcgttaatggactgtttaagttatccataaggtcagcaggaggctatgagttattacaatttgggggagacaaaagttatacatagatttttcaactgtgacagagtaggtcaacacacctcatcccagtgttgttgaagttttaactctatattcagtctgctacccatattgtgaaatataatttatatttttatttcatgatagtgtggaaaaaaaattattaataagatacaaaataattctgaggagtgaagtaattgaaaggccaaacttaagtgtaatgaaataaagaaattttactccttatatatctctattagtaaaataattaaatgcatcaagtgcttctttatatttagaggataaaatgcaaaagatggagattgtttctttgtcaggagaattatttcatg

SEQ ID NO: 109847 - DNA, 378 bp, Homo sapiens
acattggtggtgaaaatgtaaaaatagtacagccattagaaaaaacagtttagaagtttctcaacatttaaatagaatcactacatgactcagcaattccacccctaggtatatgcccaaaatgcacataacatgtattcaaacaaatacctgtgcataagtgtttayagcagcactattcacaaaataccacaaggtagaaacatcctaaatatttattaatcattaatggataaacaaatggtcatatgtacatacaacggaatattattcagcacagaaggcatgacataatgatccatgctaaaatagggaagaaccttgaaaacactgttctaaatgaaaaaagccagacataaagtctcatattgcaggatt

SEQ ID NO: 109848 - DNA, 578 bp, Homo sapiens
tagttctagaaatttgaatatggttctttttattaattttattttttattttttgatatttgtagagacagggtttcactatgtttcccaggctgctctcaaactcctggacttaagcgatcttcctgcctcagcctcccaaagtgctgggattacaggtgtgagccaccatgtccaacctggttctttcttaaaatgactgtattgtctttcaactcctggatttcttggaytgggtttcagctttctcctgcacctcattgagctcccttgccatccagattctgaattctgtctgtcatgcctgccacttcaatttgattaagtaccactgttgggaagctactacaactatttaaaagtaagaagacactctgatttttaaaattgacgtagttattgcactcatctaagagggctggttttcctttattatttagaatttgctcttgcttgagtggggcttttggttttcatgttctttaattcccttgaaggtttgactgtgaggtgagttgagtatagttgaagcaatcacttcatttaacacttccttaggagccattcagggccaggaa

SEQ ID NO: 109849 - DNA, 600 bp, Homo sapiens
tctattcacaattgccataaagaatacaatacctaggaatgctgcaaaccaaggaggtgaaagatctctacaatgagaaatagaaaacactgctgaaagaaatcagagatgacataaacaaatggaaaactttccatgtgccagaaagatttcataccattaaaatggctatactgcccaaagaacttacagattcattgttattcctatcaaactaccaatggcattttccacagaacaagaaaaaactattttaaaattcatatgggaccaaaaatgagcccaaatagccaaggcaattctaagcytaaaaaaaaaaaaaaaagcaggaggcatcaagccaagctaacttagttaaaactacactacagagttgcagtaaccaaaatagaatggtactgctacaaaaacagacacataaaccaatagaacagaatagaaagcccagcaataaggccacacttctaaaatcatctgatcttccacaaagctgacaaaaacaagtaattgggaaaggactctgtatttaataaatgatgctgggatagctgactagccatatgcagaagattgaaactggacccctttcttacaccatat

SEQ ID NO: 109850 - DNA, 539 bp, Homo sapiens
ttttgtgagtattattggaaaactatgaaggcaaatagctggttgtgtatagaaaattaaaaagttagccaggcatggtggcacctgcctgtgatcccagcattttgggaggtcaagactggaggatcacttgagcccaggagttcaagatcagcttgggcaacatagtgagacstcatctctacaaaaatcagaaaattagccagatgtggtagtgcctgcctgtggtcccagctactcaggaggttgaggtaggaaaatcatataaacccaggagttggaagctgcagtgagccatgattgcaccactgcattccagcatgggcaaaagagcaagaccctatctcaaaaaaaaagaaataaaataaaaaactgttagcaaagtgtctattttggccatatggaaataagtcagatttattgttaagaacaatgtaagatccatacatgtatgactctatgtcttcatccacccatctgttctgtatgcaatatgtgcactttatttgagggcagagataaataatataaagtgccta

SEQ ID NO: 109851 - DNA, 627 bp, Homo sapiens
catttgtccaacaaatgagccagattatttatggatactctgagaagagggaggtagggagaaatctctcacttataattacaacaaaaacactacctggtataacaatcaaggacttccctgcttcctcatcaacatctggtacagatgattttcaacagaggctctacggctgggctctattctggatggactgactgttggttgtgggagaatgttccacactttgtaggatatgagctctctgtgcctcagtcactaaatgccagggatattccctcgtcactgtgacaatcaaaaccatcctacacatttcctataatgcaaatgggcgtagyatgacttctagttgaggaatagatttacgactaagctcaacagctgccaatagcttaattttccatatgttccttaagctaaaatgtattcaagttattaaagaaccatatattcttgcttggatggcttgaaaggagatgttttgctgagcccatgtcacataagattccagaagagataataggtagatttaaatatttaaaaaatgcaagtaagaacacagaaacaaagcaataacaagcaaaaaccagtcatcgccctatggaaaacacaacttagacaaagaca

SEQ ID NO: 109852 - DNA, 581 bp, Homo sapiens
acttttagtactttcactaattttgctactgctatctaaaaggcaagccaggtgtatgggagggaacatgaaagtggactaggagtgtgaccactgaaacacagtgtcacagggagatggtcaggcctccagataactgcaggtgggaatgactgacgtcatgccttccacaggaggtggaggaacagagtcttctctaaactcccccggggaaagggagactccatttcccagtcggctaartaggggtgcttttccttggcactgatgctactgctagaccatggtccctttaggtcatgggcatcttcccagatgctggtgttaccgctagaccaaggagccctctggtggccctgtccgggcataacagaaggctcacactgttgtcttctggtcacttctcactatgtcccctcagctcccatctctgtatggtctggattttcctaggtttttattgtagagcaaggattattataatattggaataaagagtaattgctacaaactaatgattaatgatattcatatataatcatatctatgatttatatctagtataactattcttattttat

SEQ ID NO: 109853 - DNA, 581 bp, Homo sapiens
ggaattagtgaaagtactaaaagtctttgaaatgcatagtagaaataatgatgtaagctgtcctctctctctctccgcctcggctgccaaacaaggaaggtcccccgactggtggacacgagactcacgtaaccttacctatcattggagatggctcacactccttaccctgcccccttgccttgtatccaataaacaacagtgcggccaggcattcggggccactaccagtctccacatcttggtggtagtggtctcccgggcccaactgtcttttcttctatctctttgtcttgtgtctttatttctacgatctctcatctctgcacamggtgaagaaaacccacagaccctgtagggctcatccctacagtagactacaggcttacatcatcacccctggctaattttttttgtagagatttggtttcaccatgttgctccaaatggtcgcaaactcttgagctccaaaagtgctgggattacaggcgtgagccactgcaccctgtcacacttagttcatttttaagtaataagtgctctatgagttcttaccattttatcaaatagaatactgaaaa

SEQ ID NO: 109854 - DNA, 484 bp, Homo sapiens
tctttgcatattagtaaactgtgytttaaggttctttacatcataaaaatgtctgttgactttaaaaaaatgcaaaaaaaggatctcttacaagtgagcattgtactgtattttacttaagttttaagatactggttggaatagaagtgagacactgtctaatcttccctttttaaatatgtaaaatactctattgttttcctacagaatttataatttccaagaacagattactgacactgagcggtaaacacttgtgtcatttgtccttgaggtcacataattcacagaaagagttgggtataaaaaggaacagagatggttaaggaaatgtttctgcttggttggttggtttgagacagagtctcattctgtcacccaggctggagtgcagtggcacaaccatagctcactgtaacttcgccctcctgggctcaagtgatcttcccacctcagccccccaagtagttagatccacaggtgc

SEQ ID NO: 109855 - DNA, 484 bp, Homo sapiens
tctttgcatattagtaaactgtgttttaaggttctttacatcataaaaatgtctgttgactttaaaaaaatgcaaaaaaaggatctcttacaagtgagcattgtactgtattttacttaagttttaagatactggttggaatagaagtgagacactgtctaatcttccctttttaaatatgtaaaatactctattgttttcctacagaatttataatttccaagaacagattactgacactgagcggtaaacacttgtgtcatttgtccttgaggtcacataattcacagaaagagttgggtataaaaaggaacagagatggttaaggaaatgtttctgcttggttggttggtttgagacagagtctcattctgtcacccargctggagtgcagtggcacaaccatagctcactgtaacttcgccctcctgggctcaagtgatcttcccacctcagccccccaagtagttagatccacaggtgc

SEQ ID NO: 109856 - DNA, 554 bp, Homo sapiens
actacattttccgtcttttttagcatgtacttctctttttaaaattttttttaactatttgccacagaatttgcaatatacatttacaacaaattcaagtccactttcaaataacactatcccactatcccacaaataggactacctgcttaacaaacaaaacacctaattcctcaatatacatttacaaccaattcaagtccactttcagataacactatcccacttcacgggtgactacctgcttaacaaagaaaacacctgattcctccctcccatccttccattccattccttgtattattgttcyttatttcccttgtgtataagcatacataatctatctgtgtgtatttattgttatctacaaacttattggtcagatcaattatgaataaatacatgtttttattttaccacaattcctccctcccatccttccattgcattccttgtattagtgttactcatttcacttgtgtataagcatacataatctatctgtgtgtatttgttattgtctgtgaacttcttggtcagatcaattaagaata

SEQ ID NO: 109857 - DNA, 586 bp, Homo sapiens
tgagggaagaacattcaaaccctcgtagcagtgttctggaatcctatgtgagggaaaaaaattcagaacctcgtagcagtgttctggaatcctatgtgagggaaaaaaattcagaacctcgtagcagtgttctggaatcctatgtgaggaacaatcagaccacatcaggaatgttctggaatcctatgtgagggacaaacattcagagtacagcaggagtgttctggaatcctatgtgtgggacaaacattcagaccacarcaggagtgctctgcaatcctatgtgagggacaaacatttcaaaacctcgtagcagtgtgctggaatgttatgtcagggacagacatttagaccctcacagcagtgttctggaatcccatctgcgggacaaacattcagacactcgcagcagtgttctggaattctatgtgagggacagacattcaaaacccaacagcagtgttctggaatcctatgtgagggacaaactttcagaccctcgtagcagtgttctggaatcctatctgagggacaaacattcagaccctcatagcactgtactggaatactatgtgagggacaaaca

SEQ ID NO: 109858 - DNA, 586 bp, Homo sapiens
tgagggaagaacattcaaaccctcgtagcagtgttctggaatcctatgtgagggaaaaaaattcagaacctcgtagcagtgttctggaatcctatgtgagggaaaaaaattcagaacctcgtagcagtgttctggaatcctatgtgaggaacaatcagaccacatcaggaatgttctggaatcctatgtgagggacaaacattcagagtacagcaggagtgttctggaatcctatgtgtgggacaaacattcagaccacaacaggagtgctctgcaatcctatgtgagggacaaacatttcaaaacctcgtagcagtgtgctggaatgttatgtcagggacagacatttagaccctcacagcagtgttctggaatcccatctgcgggacaaacattcagacactcgcagcagtgttctggaattctatgtgagggacagacattcaaamcccaacagcagtgttctggaatcctatgtgagggacaaactttcagaccctcgtagcagtgttctggaatcctatctgagggacaaacattcagaccctcatagcactgtactggaatactatgtgagggacaaaca

SEQ ID NO: 109859 - DNA, 515 bp, Homo sapiens
ctgcatctcattactggaccatgagaacaagcagccagaatcttgatttggtccaggaacacaaccagctaaagaaaatctgaattgggattagaaatatggaggtatgtaaacagatcagtttgaatattgggctccaaatcctttcrtagatattaaacatatacctgaaattacaaatgaggtaaccattcaaaagcttattcatgattgaagaggggctgggatacccgtttcttctttggggacatgcttttcattagccctaatctcataatccacataggagttcctttcttctaaagatttttctttttttaccactttattcactgctgcttgaagggcaacaccagatgcaggttgagccaatagtgccagccagtaagaactggagtgcacagtaagaactggggtgcactgtaagaactggggtgcactcccaccaccattaccagtgctttcacaccctcccatgggatgcagtacccacggcagaggagcactctgaacat

SEQ ID NO: 109860 - DNA, 533 bp, Homo sapiens
gctgttggggggccttagatttccacttttggttaacactgtcccccttctggccaagtcagtggccacccaatttttattttgtcctrtagtgttgccagggtggcgtagctacctacttcacgtccaccctatttttgtagcctgtcagtttcaggtgattacctaagaaccttaagatacatggttattttaccaataatttaagatttagctgttttcattaaaccgcaacattaacatcttattggtttaaaaaccacaaaagcagagatgattctgtttggtggctggctttatagttttataacttctcattttttgagacggagtctcactgagccacccaggctggagtgcagtggcaccactctgctcactgcaacctctgccccctgggttcaagagattctcctgcctcggcctcctaagtagctgggaatacaggtgaccgccaccacagctagattttgtatttttagtagagacgggtttcaccatattggccagactggtctcgaactgacttcatg

SEQ ID NO: 109861 - DNA, 563 bp, Homo sapiens
ctgccatattccccccataaagagaaacaaaatgacagtgagggaagaaaaaaagaaaaatctttaatccacaaggacaaaaagaaaaaaaataaccaactagaaatttcaacaaactttttgatgatgaaaagcaggcaatgcagtggtaactaaatcagaagaggaagctacaacctacaaatgcctagagaggggaatactaaagaaaggcaagcatatctaaaaacacagggggcaaggtacaagggggctgttagaaaatctgaacatacaggatggttacaccctcaggtctcctctaactaaatatccatgagacaacttccctaccatgcccactagcctctcgtaacacaagaggccagaggattactggaacaactgaaccagagaggctccagactcagaccagcatggaactaagatcaagggttgaggcacaaatctaaaagtggagattaagcaaagtctgcatactcataagtgggacacctttatmctgccttgttccccaaacattatcagccaggtaagtagcctcaacaagagattatagaatt

SEQ ID NO: 109862 - DNA, 613 bp, Homo sapiens
tttaagtgcactttgtcacagatcaattatgggaaatgtagacggcttcaaaaattgcaattgcaggtttctagctggcataatgagatggtggtgtcattcacagggaaaggatactccagaggagaagtgattgggggatttaaggtagaagtagttgctgagtccagatttgaagttattaatatgggaaagtagaaagcttgcttttgacacattttagacactaagtggatatattgattagtcaagtagatacaagtctaggactcaaagatatgttctaggctaaagataaaaattggggagtcactgatatatagttggttttttgaatcaagatattaaaagatgaaatttcctagagaaataatatagagtgagaaaagaaggcacatgtcyctgcttctcaaataagggtacaagaactccagagaaatattctctgtatttaccaatgttcttgaagagcagggaaaatttcaagtcatagacacagctcaaattcttcaatcaccagttttatttaaatatttgggatgagggatgttatagagtataacacaatgtagaattctgtagattagaatgcaaaatttacataaatcataag

SEQ ID NO: 109863 - DNA, 611 bp, Homo sapiens
gtgctgtttcctctgattgggcattttgtctctcttctttgtcccctcaaacttcagttttcagatccagcaacacctcttccagagaggttattttctcaccattcagtaaatcaaattcagtaaatcagagcccgattattttctctcacaactctatattccactatagtatttatggtggattacaaaatgagaaatattgtttgttttgttccctttgcaaaacttagtagctagtgtgggaattggaatacagcagatgtacacaacacaacamaataagaaaagcaaaacttatattggactcatgatgtgccaagcagggttttaattatcttatctatgttaactcattaaactttcctagcaaccttatgaaatagataccattagcacgtccattttacagatgagtaaactgaagccagagatgttaagtcacttgctgaagacttcacagcttgccagtggtggagttgggatttggttccagtatgtgtggctgtggtgtctgtccttttaactagtgtgactctctatcactgactaataaatgaacaaaccaatgaaggtagcctgtgctcctaacttctcattaaactgcctgc

SEQ ID NO: 109864 - DNA, 598 bp, Homo sapiens
ttgtattaaaacaatagactggctctcttcctttgggtgacatggttgtgatttccagaaataggatgaatcatttgtctcaagtaggtagtgttcattctaactcggctagattttcggtggccttttctaaaatccatagaagaaatgtgtattacagatagacacatttgagaggtgcttcctagggaaaaaaaaaatactctatgtgaacaagttctcctctgtatcttacccaactctccatcaaaagagggtttttcctactatgcctttcttttcttatacctatgaggttaactataggaataggatgaactacgctgatctttagagaggagaarggaagcgatattatcaatgctttagccatatgtgtataaaatttgggaatgctttgggttgcaaataaaagaatattggtctaacagtagcttatataaatacagttatacatcacttaaggatgggaatacattctgcaaaatgtgtcatcaggtgattttgtcattgtgcaaacatcatagagtgtgctcacacaaatccagatggtagagcctctacatgcctaggctctatggcatatgctatttctcct

SEQ ID NO: 109865 - DNA, 650 bp, Homo sapiens
gctttaaccttaacaaagaaactttgaaagggcccatctgctttttgtcttctgtttctgtttcttcagctcctttttcgctataaaactaaacatctctgcacagctcattgagacsctcagttttctttataaaatgtggtgttggtgttgcctgattctagaattgcaaataaaagccaaataagatctttaaactaatttttttttgtaattttgtctttgacaacaccatcataatgttttaagtaaaacccacttttgctaaattgtcttgcagaattaaacaatgactcctttatgttttaacaaaggtgagtgttctaaaattaagtctttcccaattagacttacttgcctaacaaaatcttagtgccatcttaaaagaaccatgaaacgtatatttttttctaaatgatttattctcagtgaatttgcaaaatatttaaatcctagtctttcatctagtttcaatgactgcagcgaaacttacagagaagtagaaaagggctacatattgaaattcctagaaaggaaaacatatttcattttcttcttacttagtcagcggttaaatgcaggaatcagcaattgccttcagaaaatcatactttatcagtgcatggaaagggagggggtttgtaattgct

SEQ ID NO: 109866 - DNA, 562 bp, Homo sapiens
aacctgccttctcccagccatctagagtcagggatggctgggaatcatcttcaggtatgtattgtactctattttcttgagcatagttactggttttggattggacccatgaccatgggtsagccaatcagaactttactctgtgatattttgaataagccaaaacgaagagcccttccctcctatgtgacaaagatgagaagctgagaaccttggcctgctgtctccactgcttcgaagacatggaaatgggtggtctgaatgaagctgactcctagagtcaagagcctggttatttagagtctctgctttcagtcatctctaaggtcagctgtgcctgctgttgccagatatgttgcaagggtcaataccttttttaaaacttttgtctaagcacatctaaatttggttaatattactagatatcatcacatcttagatcatgcagatatattcatattgcatatattaagaggtaataatatgaatgaaataaagagacaagtaaaatggaaaataaataggttaagaaaactaaataatgcattcatataggctaaca

SEQ ID NO: 109867 - DNA, 562 bp, Homo sapiens
aacctgccttctcccagccatctagagtcagggatggctgggaatcatcttcaggtatgtattgtactctattttcttgagcatagttactggttttggattggacccatgaccatgggtgagccaatcagaactttactctgtgatattttgaataagccaaaacgaagagcccttccctcctatgtgacaaagatgagaagctgagaaccttggcctgctgtctccactgcttcgaagacatggaaatgggtggtctgaatgaagctgactcctagagtcaagagcctggttatttagagtctctgctttcagtcatctctaaggtcagctgtgcctgctgttgccagatatgttgcawgggtcaataccttttttaaaacttttgtctaagcacatctaaatttggttaatattactagatatcatcacatcttagatcatgcagatatattcatattgcatatattaagaggtaataatatgaatgaaataaagagacaagtaaaatggaaaataaataggttaagaaaactaaataatgcattcatataggctaaca

SEQ ID NO: 109868 - DNA, 605 bp, Homo sapiens
ctgagctagtgggtgcctggcaactggaaagaacaggaaatatctcacaggctgaagaggaggaggaggtgctgcagtgagcggcacacatggcccacagaaatgtcagcccagaaggagaggcaattgtcccgcttccaaacactgccaaggcttattccttaaggttaagcttggaaaaatcacaaagttctgtggatatgaatcatatttagaacattgtaatgatttcttcatctctcaacatgtgaactagttgtttatggaactaattgtttcttggaattcaaacgttttggtttcataacaaatacaatttgtggaaatatttctcaacgcttccagatcttattggaaaccacgattagaaaacaaatatatctttggtctgattccttctttagaggggtaacatatatactattttcagcaaaaccaacaatataaatcatcttgttgaaattctttgaagtgctaaaaaaaaaaatcacgcatcaaaaataaaaatagwttaagccaggtgcggtggctcatgcctgtaatcccagcactttaggaggccgaggtgagtggatcacttgaggccaggaatctgagaccagact

SEQ ID NO: 109869 - DNA, 515 bp, Homo sapiens
ttttaaaaaatctctttagaccacaatggaacagaaccagaaatcaaaaataagagaaactttgaaaactgtaaaaataaatggaaattaaataacatgatcttgaacaactattgggttcatgaagaaattgagaagaaaatcaccagaattttgaaacaagcaaaaatggagacacgacataccaaaaygtatagaatacagcaaaagcagtatgaggagagacatttatagcaataaacacttcaatcaaaaagtagaaagatttcaaataaacagcctaattatgcagttcataaaaactagaaaagcaagaacaaaccaagcccaaagttagtgaaggaaaaaaataataaagatcatagcagaactaaacataatagagactaaaaaggatacaaaggatcagcaaaaaaagctggcttgttgaaaatataaggaaaatagaaaaccaagaactagattatctgacagaaaaagagaaaatcgaaacacctaaaatcagaaatgaaaaa

SEQ ID NO: 109870 - DNA, 458 bp, Homo sapiens
gaattcaatccataattgaggctctggatttattagagggtggagatcagccacctgtcacatcctggtttcagagcagcctagaaattgattcctctgtagcatgttagagagacacaatattttgagccaaagtttatttaaaattctttactttgcatttcttgcttgttttctggtttattttatacttttttactatatacaccttctgctttctctccactgatccgttatctctctatcactccttattcttctcttactcctatcyacattttctatatacacagtgacctgttcaattattaacaggacctaccaagttaaaaagcagcaggaagaataatcaaagttcaagcaatccatacatggcacatctcagattttactctaggaatccttaaatgctgcacaatttttttaaaaagattatctgtaaaaattaggattcttaa

SEQ ID NO: 109871 - DNA, 594 bp, Homo sapiens
atgtacaatggaatactacacagccataaaaaaggaaygagatcatgttctttgcagggacatggataaagctggaagtccttaccctaagtaaactaatgcaggaatagaaaaccaaacactgcatgttctcacttataagtgggagctgaaaaatggacacaggatacatggacacagggacgggaataacacttactgtggcctgttggggggagtgtgtcaggggagaccattaatgtatgctgggcttaatacctagctgacaggttgatgggtgcaacaaaccaccatggcacacatttacctatgtaacaaacctgcacattctgcacgtgtatcccagaacttaaaagaaaaataataattatttttaaaaagttctttgatgtttaatgaaattaagacaacaaaattatatacccttttaatttaacctatatatttaacatttctattacttttcatttattcagagataccatttgtaccaaatgtacagcttagaccagatgtaatcttggaataagtgaaatcttagaataattttcgactcaaacattttatcatttctcatagtgtaagtctactagt

SEQ ID NO: 109872 - DNA, 550 bp, Homo sapiens
aaaatcctcccaacaaagaaaattccaagaccagataacttcccagctgaattccaccaaacattcaaaggataattaatatcaaacctccttaaacacttccaacaaaatagataagagtgaacatttccaactcattttattagaaaagcatcatgctgattctgaagccagacagaaacgacatacataaaaactgtkggtcaatgcccttgatgaataaagatgcaaaaatcctagcaaacaaaattcaatagcacgttaaaagaatgaggcatcatgtttaactgggattcatcctttggatgcaagttgtttcaacatgagaaaatcaatcaatatgatacaccatagtaacagaatgaaagacaaaaaccacatgattatctcaaagatgcacaaagagcatttgacaaaattcaatattgtttcatgaaaaaaacctcccaaaagatagacattttaataaatgaaattataaaacattaataatttttttaaagatacaaataagtgaaaagacatttcatgttcatggattgagcacaat

SEQ ID NO: 109873 - DNA, 533 bp, Homo sapiens
gaagtataaaatgtgaaggatacaatcttgactctaaacaaactttaatgaattaaggaygtataacttttagccttagaccaatgatgagaaatgcttttaaagggattcttttggcagatagacctgaatttatcctaatcatcctcaccttctggtattcacaccatgatataattccctcctctcgactgtagacaagacctattttttgtttgtaactggcagtatatgacaaacatgatggtttatcactcctgtgattatgttatagtgtataagactccatcttgctcacagacttgctctttctatcctgctggctttgatgaagtaggatccatgttgtgaactgtctctgaacagggccatatggcagggaactgcaagtgtatttgttgggagaaaagctgagtgttggaagagaagctgaggcatggcttgcatgtctgctagacttgctggctccttgtttctagcactcccattatctcaagcagccatgtttcccattcacttgatacactgtttcc

SEQ ID NO: 109874 - DNA, 527 bp, Homo sapiens
tgtcagggtcgcccaccttgtcacatgccagagtgccttcctctttcaaaacttcacttccctgcccctgccctgggaaggctgccctggccccacctggccgagcagcctctccacgccgttgcctctgctgcattctggctctgtgttctcggctcagcgtcaattcttccctgccagagggggaagccagccctggcctaagtggctgcccagtgaacggccacagcgggagccgggagggaaagcggcctcagcgtgtggccygcaggggccagagcagcagtagccagtgggtcctgtcacagtgacaggaggagagcgggttacagactgtccatcacgggacactgcatggcgggggaaccaaggatgccaggccctgtgtgtcaggagggatgaaggggaaaggcagctgcagaggagcagagggtctgaaatggatgtgaaatgggcgtgactcgggcacacacaggtgcacaaggaattgtggggatgggtcacgggcaggaaggccacactcagga

SEQ ID NO: 109875 - DNA, 527 bp, Homo sapiens
tgtcagggtcgcccaccttgtcacatgccagagtgccttcctctttcaaaacttcacttccctgcccctgccctgggaaggctgccctggccccacctggccgagcagcctctccacgccgttgcctctgctgcattctggctctgtgttctcggctcagcgtcaattcttccctgccagagggggaagccagccctggcctaagtggctgcccagtgaacggccacagcgggagccgggagggaaagcggcctcagcgtgtggcctgcaggggccagagcagcagtagccagtgggtcctgtcacagtgacaggaggagagcgggttacagactgtccatcacgggacactgcatggcgggggaaccaaggatgccaggccctgtgtgtcaggagggatgaaggggaaaggcagctgcagaggagcagagggtctgaaatggatgtgaaatgggcrtgactcgggcacacacaggtgcacaaggaattgtggggatgggtcacgggcaggaaggccacactcagga

SEQ ID NO: 109876 - DNA, 508 bp, Homo sapiens
tcagctcacaaaatttaaagctggtttttacgggccagtataagccagttccaacaccactctccttcaggccacatyaaggattaagctttatcctaaatgcagtgtggaaagccattaggaggctttaaggagaggagagaatgtattctattttcatttttaaaggctcattcatgcagctgtgtggaaacaggttggaaagggatgagagagggaatgcacagccaattagaagattattggtgtctgctctcctataggcactctgatctctgacataacatgggctacaaaggatataaagctatttttctcttactctagtgaaagcacacttagacatttttacaagaaaaccacaagagaaacatgaaacaaaaaaggaaatgcaaaaaaaagcatggaatctaaatgaacttccagagcagattctatctcctacctataaattaccttgagccagactggctcagcttgtcagatcaggttccagaaaacacaagcc

SEQ ID NO: 109877 - DNA, 508 bp, Homo sapiens
tcagctcacaaaatttaaagctggtttttacgggccagtataagccagttccaacaccactctccttcaggccacattaaggattaagctttatcctaaatgcagtgtggaaagccattaggaggctttaaggagaggagagaatgtattctattttcatttttaaaggctcattcatgcagctgtgtggaaacaggttggaaagggatgagagagggaatgcasagccaattagaagattattggtgtctgctctcctataggcactctgatctctgacataacatgggctacaaaggatataaagctatttttctcttactctagtgaaagcacacttagacatttttacaagaaaaccacaagagaaacatgaaacaaaaaaggaaatgcaaaaaaaagcatggaatctaaatgaacttccagagcagattctatctcctacctataaattaccttgagccagactggctcagcttgtcagatcaggttccagaaaacacaagcc

SEQ ID NO: 109878 - DNA, 547 bp, Homo sapiens
tacagtgcttcctggctgattcgagtctagttcttaatcctccccaaatgtttgtatcttttcaaaacattcttcttctgcttaaattagagtttggttctgttatttaaaacccataaccttgtctggaacttcttattcagtaagaagatcagtaccagcagcrtggcctcagtaattacatgtatgcttcttatagagaccttcttacaggaaccaactggaaggagttctaaatataatttaaagcattccagaagtggaatagactgcattttcattccaagtcaaagatacaggagtggagatataaaaaataaatctgaaagcagacatcattacaagaagccatatttgggaaatgtggtgtgaaaggaaccctgggatgagagccagggaatcttccaccacctcttacttacccatttacttagcctggtgacctcaggtgaagtgttttctatctctaagcaatcgttcgttcatctgtacaagatagataataccagctgcaaagcctatttcacagggctgttaggagtaataa

SEQ ID NO: 109879 - DNA, 483 bp, Homo sapiens
ttctaaaaatctaaacacagtagaaccagaactgaagaaagagtatttgcataccatmtagtggtcactttaaagaacagcaaaattttttcaaaataatttgtgtttaaacggaaatagtatatacggttatacctgacctaaatataatccacaaaacctgtcatttcacgtcattaaaaaataagaggaagagtggttttatttacttctgacatgtggaaacacctaaaaatgatcatctaatcataattatttcatgcttgtctaatttttaaaatatatcaaatattgggtctttgcagtagcacaccatgtttatcagatatttatttgtgttcttgagttcaaccatggaattaaaatagaatgtccttatgctgaacttaaacaatttaaatgaggcttaatagtagacaacaaaatacaacagccaatgcttttgtgcacttcacacagattggtatcatgtttaaaataaaa

SEQ ID NO: 109880 - DNA, 533 bp, Homo sapiens
cagtaccttgaacccaaggtcacccctattaattttctaatttccaccttggaaggtctgtgcagattttaccataatgccctttgaagccctttgaagaaggcttgattctgtttttgttacaaagatcttactggagtagaagtttcaaaacactaagtcagcaatcccaagatctacaatgctttttttttttttttttctgaaggttaggatacattaatcagttttggcaagagacactttaaacatagatggacaattctgagctggaaaactatgagcaaagtcccactctcaaggggaagcttaaactgatttgaaagatggcaaacctatttattcaaactgtttacccctcaatacacaactagagtctagttggaaaaccacaatttcctttaaacaattagtaaaactaaatgaccacccaaacagagtgcctaaaagtaaatcataatttatcatcagcaactcatggattaraaaaatcctatttcaacataatttttctggcttttcaaattacctta

SEQ ID NO: 109881 - DNA, 575 bp, Homo sapiens
catcaagtttctcacagaagccattgattgtgaaattttaattatagcatcatcttgccaagcgaaagaggtaggcataagccagaaagaattaagggactaagagtctcattatgatgtggagtcttgttctcatagagctgtccacagagtgaagtcatcaacttcttatcctggtttkcagtttcaatgtctctggtcatggcactgggcatttgtgaagtctctgagtggcccacacatctggcatgagaatattctcttgaaatttacattgaattttcaagctctagctcatggagcttctggaacagagaagtgctggttagcaattccatggcacaacattagtttggaggaaactaaaagacttcaggattcagtccagtctgtaggtagatttcaaaaacccaaaaacaatgaacagggttacagttgaataatggagttaccgtttttcttctgaagtacaattgttttctctacaattacccccatttctaccaaagataatcaaagtaagacgaatttgtttgcaaagtttagcctcatcagacttggcctggttatttaca

SEQ ID NO: 109882 - DNA, 581 bp, Homo sapiens
cccgttattgtactgcacggcagacagctctctgggcatgcagacattggcaattgcccgtggttttatttccccaggtayctggtgtaacacagccactgcctgacagatctaatcacaggcagagtctttttcacagtcaccccagagtaaaagctcagtgtgttcccaaggaaatgactgaaacattcaaatcaattgcccttttcttctcctttttttgacaccattttgaatacaagtatgaggtttgatacttgagtatgaggagaggaggtggatttcatatgtccagggactgatcaaaaggagaaagactgcacaaagatagaagtgctcagccttgcaccagcctcaaagattgctgcagcccctcctgagaataaccaggaatccaatcaaactcttgaatgtcagtgtcagagtgggcaaagacatccagtacccactcctcactgcatccacatgagcttcatcctcactgcactccttcctgctgttcttgcaggctcctcagtatcagcctccaggcctctgcttatacctttccccaacctgagatgttttatgccaatgccaca

SEQ ID NO: 109883 - DNA, 576 bp, Homo sapiens
gaacaaaaataaaagcttaaaaaatgtatattgggactttttttgacttttggataggctgttgaaaggtcggtgaggattgaaatayttataatgataacaagaatttatttttaaagccttttctcaaggaattctcacaatcctcttgagtctacaccattagacttaatttacagatgggaaaacttaggcaagggcagttaatgaaaattgcctaagataaaataattcattaagtgacaaaccatactctaaattcaaggtttcccaattctaaatctcatgcacatttcaatatgtctggttagcaacttggtagctgacttaaagcacatgcaaaaactatgggttaaaggaatctaacaaggtgaaatttatcaaggataaacttaaggtactgcctgaatttatgccaaaataccctcaaataagtgaggtataatgtcccagcagctcattgaaaaaagactcaggaagtctggttagcaggaagaacagcataaatcattatatgtgacaggaccacaaaaactgaaactttagtgactttatgctacatcaagaagacagaca

SEQ ID NO: 109884 - DNA, 629 bp, Homo sapiens
caatgtgtttcctctttactttctctctttcctcctcaccatgaacaggaacttggatacatagtgtgaaccattcttacctaggtaggtgagaaacacactggagggtgacagagcaccatgggagaaggaagaaggaagaagtatccacccatggatgctcgggtaatttagtggagaggagctacctacagcatgcatcacatgcctaacggatctgaggaaaaattaraagttgacctggacccagaatactgaatttttgaatcccattctttaccagccatctattatccttttaggtgcacaagaaaattgtatatgtaaatgaggatttagtttcaaactctagttctctgctccactggatcacgcagagcaaatgttgcaaacctggtcaccaacaggggctgggcaggtaagtgcaaagaagcaaaacttactgagtagagcttggtgtagtggagaatgtgtgatccacctaaaggactgttgttctgggacatgggcctcagcatttcttgatatttttacctgtttaaaagaaaatagaaatccagattttttaaaagtagaatccacagactttttaattaacaagctaagtttcacaacattttaaagtaaaa

SEQ ID NO: 109885 - DNA, 605 bp, Homo sapiens
aaaacactgtattgtaaaatccatgaaggggtatttgggagmctattgatgcttatggtgaaaaagcaaatctcttgagataaaaatcagaaagaatctttctgagaaacttctttgtgatgtgtgcattcgtcacacagagttaaacctttctttgtattcagctgtatagaaacaatgtttttgtccattctgtgaatgaacatttgggagctcattgaggtcaatggtgaaaaagtgattatctctataaaaaactagaaataagctatctgagaaaccacttagtgaagtgtgcaatattcgagtagagtttaaccttatttttcattcatcagtttggaaacacagtttagatagaatctgcaaatttatatttgggagcgcattgaggcctatggtgaaaaaggaagtatcttcagataaaaataagaaaaaaacctttctaagaatctactttatgaagtgcacattaatctcacacagctcaatctttcttttgatttggctgtttggaaatggtttttgtccgttctgtgattggacatttgggaggtgattgaggccaatggagaaaaagtgaatatccaagaaataaaactaga

SEQ ID NO: 109886 - DNA, 605 bp, Homo sapiens
aaaacactgtattgtaaaatccatgaaggggtatttgggagcctattgatgcttatggtgaaaaagcaaatctcttgagataaaaatcagaaagaatctttctgagaaacttctttgtgatgtgtgcattcgtcacacagagttaaacctttctttgtattcagctgtatagaaacaatgtttttgtccattctgtgaatgaacatttgggagctcattgaggtcaatggtgaaaaagtgattatytctataaaaaactagaaataagctatctgagaaaccacttagtgaagtgtgcaatattcgagtagagtttaaccttatttttcattcatcagtttggaaacacagtttagatagaatctgcaaatttatatttgggagcgcattgaggcctatggtgaaaaaggaagtatcttcagataaaaataagaaaaaaacctttctaagaatctactttatgaagtgcacattaatctcacacagctcaatctttcttttgatttggctgtttggaaatggtttttgtccgttctgtgattggacatttgggaggtgattgaggccaatggagaaaaagtgaatatccaagaaataaaactaga

SEQ ID NO: 109887 - DNA, 605 bp, Homo sapiens
aaaacactgtattgtaaaatccatgaaggggtatttgggagcctattgatgcttatggtgaaaaagcaaatctcttgagataaaaatcagaaagaatctttctgagaaacttctttgtgatgtgtgcattcgtcacacagagttaaacctttctttgtattcagctgtatagaaacaatgtttttgtccattctgtgaatgaacatttgggagctcattgaggtcaatggtgaaaaagtgattatctctataaaaaactagaaataagctatctgagaaaccacttagtgaagtgtgcaatattcgagtagagtttaaccttatttttcattcatcagtttggaaacacagtttagatagaatctgcaaatttatatttgggagcgcattgaggcctatggtgaaaaaggaagtatcttcagataaaaataagaaaaaaacctttctaagaatctactttatgaagtgcacattaatctcacacagctcaatctttcttttgatttggctgtttggaaatggtttttgtccgttctgygattggacatttgggaggtgattgaggccaatggagaaaaagtgaatatccaagaaataaaactaga

SEQ ID NO: 109888 - DNA, 605 bp, Homo sapiens
aaaacactgtattgtaaaatccatgaaggggtatttgggagcctattgatgcttatggtgaaaaagcaaatctcttgagataaaaatcagaaagaatctttctgagaaacttctttgtgatgtgtgcattcgtcacacagagttaaacctttctttgtattcagctgtatagaaacaatgtttttgtccattctgtgaatgaacatttgggagctcattgaggtcaatggtgaaaaagtgattatctctataaaaaactagaaataagctatctgagaaaccacttagtgaagtgtgcaatattcgagtagagtttaaccttatttttcattcatcagtttggaaacacagtttagatagaatctgcaaatttatatttgggagcgcattgaggcctatggtgaaaaaggaagtatcttcagataaaaataagaaaaaaacctttctaagaatctactttatgaagtgcacattaatctcacacagctcaatctttcttttgatttggctgtttggaaatggtttttgtccgttctgtgattggacatttgggaggtgattgaggccratggagaaaaagtgaatatccaagaaataaaactaga

SEQ ID NO: 109889 - DNA, 483 bp, Homo sapiens
gctgaatccaaagaaaggtttaactctatgagacgaatgcacacatcacaaaacagtttctcagaaagcttctttctggtttttaacaggagatgttcactttttcaccaatggcctgaatgagtttcaaaatgtcacttctcagattctacaataacagtgtttccaaactgcagaatgaaaacgtaggtttaactgtgtgagctgaatgcaaacataagcaagctgcttctcaaaaggcttctttctagtttttatctgggttatttgctttttcaccattggcctgagagaamccaaatcttcatttgtagattctacaacaacatgtttcctaactgctgaatcataagaaaggtttaactctgtgggatgaaagcacccctctaaaaaacagtttctcagatagagtctttcaagtttttatctgaagatatcaggtttttcatcataagcctcaaagcactcccaaatgtactttcg

SEQ ID NO: 109890 - DNA, 574 bp, Homo sapiens
acagtgtttccaaactgcagaatgaaaacgtaggtttaactgtgtgagctgaatgcaaacataagcaagctgcttctcaaaaggcttctttctagtttttatctgggttatttgctttttcaccattggcctgagagaacccaaatcttcatttgtagattctacaacaacatgtttcctaactgctgaatcataagaaaggtttaactctgtgggatgaaagcacccctctaaaaaacagtttctcagatagagtctttcaagtttttatctgaagatatcaggtttttcatcataagcctcaaagcactcccaaatgtactttcgcagattctatgaaaacartgtttccaaactgctgaatccaaagaaaggtataagtttatgagatgaatatcacaaagcagtagctgagataacttctttctggttttgaactggagatattcgtttttctccataggcctgaatgagcttccaaatgtcctgtctcatattctacagaaacagtgtttccaaactgctgaatccaaacataggtttaactgtgtgaactgaatgaacagataacaaa

SEQ ID NO: 109891 - DNA, 598 bp, Homo sapiens
ttggaaacactgtttttgtagaatctgtgaaggtatatttgggaactcattgaggccaatggcaaaaaagtgaacatcccaggataaaaactagaaggaagctatctgagaaactgttttgtgatatgtgcattcatctcccagaggtaaaactttcttttcattcaacagtttggaaacactgtttttgcagaatctgcgaaggtatgtttyggagtgcattttggtctagtgtgaaaaaggaaatattttcagataaaaactcgaaagaaccttcctgagaaactgctttgtgacgtgtgttttcatgtaacagagctaaaactttctttggattcagcagtttggaaacacagtttttgtccattctgaaagtggagaattctgagctcattgaggccaatggtgaaaaagtgaatattcctggataaaaattagaagtaaggtatctgagaaactgctgtgtgatgtgtgcagttttctcacagagttaaacctttatttggaatcagcagtttggaaaccctgttttggtagattccatgaagggatatttgggagcacattaaggcctacagtgaaaaaggaaatatcttca

SEQ ID NO: 109892 - DNA, 598 bp, Homo sapiens
ttggaaacactgtttttgtagaatctgtgaaggtatatttgggaactcattgaggccaatggcaaaaaagtgaacatcccaggataaaaactagaaggaagctatctgagaaactgttttgtgatatgtgcattcatctcccagaggtaaaactttcttttcattcaacagtttggaaacactgtttttgcagaatctgcgaaggtatgtttcggagtgcattttggtctagtgtgaaaaaggaaatattttcagataaaaactcgaaagaaccttccygagaaactgctttgtgacgtgtgttttcatgtaacagagctaaaactttctttggattcagcagtttggaaacacagtttttgtccattctgaaagtggagaattctgagctcattgaggccaatggtgaaaaagtgaatattcctggataaaaattagaagtaaggtatctgagaaactgctgtgtgatgtgtgcagttttctcacagagttaaacctttatttggaatcagcagtttggaaaccctgttttggtagattccatgaagggatatttgggagcacattaaggcctacagtgaaaaaggaaatatcttca

SEQ ID NO: 109893 - DNA, 606 bp, Homo sapiens
ttaggctgctatgctaataaagacagatgatattagtatgctaagttatagatgagagaactgagactcaaatatacagagcattttcccagtaccacacagaaatctgggactcgaattcaggccagatggcaggcttctatatccacagaacatcctgaacttcacatggactttgctgcttccatgttcctcagacacagagtgcttttttatcatagataaggtgttcacaggtgacccaaggcaatctcacatatgcaggaattacatcccaccactcagtttccacaaggctgacaaaaggaatcagtagtgctcactaagtattcatcagcctctgccttctgcacacacaataggatcacacctccaagcccttaaggttggatgaggccrtgtgagtgttagtgaccaatgagctatgagcacatgcaacgtgtcacttttggtctcaaccatttaattgccaatttgacaccatccagagctcttgcccacagcatttgagatggcagctgctccatcagtctggatacctaaatgactatcacagcaatcctgatgggtatgtttcatgagcaataattaaatgtctgttattta

SEQ ID NO: 109894 - DNA, 606 bp, Homo sapiens
ttaggctgctatgctaataaagacagatgatattagtatgctaagttatagatgagagaactgagactcaaatatacagagcattttcccagtaccacacagaaatctgggactcgaattcaggccagatggcaggcttctatatccacagaacatcctgaacttcacatggactttgctgcttccatgttcctcagacacagagtgcttttttatcatagataaggtgttcacaggtgacccaaggcaatctcacatatgcaggaattacatcccaccactcagtttccacaaggctgacaaaaggaatcagtagtgctcactaagtattcatcagcctctgccttctgcacacacaataggatcacacctccaagcccttaaggttggatgaggccatgtgastgttagtgaccaatgagctatgagcacatgcaacgtgtcacttttggtctcaaccatttaattgccaatttgacaccatccagagctcttgcccacagcatttgagatggcagctgctccatcagtctggatacctaaatgactatcacagcaatcctgatgggtatgtttcatgagcaataattaaatgtctgttattta

SEQ ID NO: 109895 - DNA, 606 bp, Homo sapiens
ttaggctgctatgctaataaagacagatgatattagtatgctaagttatagatgagagaactgagactcaaatatacagagcattttcccagtaccacacagaaatctgggactcgaattcaggccagatggcaggcttctatatccacagaacatcctgaacttcacatggactttgctgcttccatgttcctcagacacagagtgcttttttatcatagataaggtgttcacaggtgacccaaggcaatctcacatatgcaggaattacatcccaccactcagtttccacaaggctgacaaaaggaatcagtagtgctcactaagtattcatcagcctctgccttctgcacacacaataggatcacacctccaagcccttaaggttggatgaggccatgtgagtgttagtgaccaatgagctatgagcacatgcaacgtgtcacttttggkctcaaccatttaattgccaatttgacaccatccagagctcttgcccacagcatttgagatggcagctgctccatcagtctggatacctaaatgactatcacagcaatcctgatgggtatgtttcatgagcaataattaaatgtctgttattta

SEQ ID NO: 109896 - DNA, 592 bp, Homo sapiens
tggacatttcggagctcattgaggccaatgacaaaaaagcaaatatcccaggataaaaactagaaggaagctatctgagaaacggatttgtgatgtgtgcattcacctcacagaagtaaaccttttttttccttcagttatttggaaacactatttttgttgaatctgcaaggggataatggaasggctttgaggtctatggtgaaaaataaatatcttcacataaaaactagaaagaagctgtctgtgaaactgctttttgatgtgtgcattcgtctcacagaatgaaacctttctttgaattccaaaaacagttgtttggaaacactgtttttgtccattctgcaaatggacatttgggagctcattgaaaccaaaagtgaaaaagtgaatatccaaggataaaaaccagaaggaaactatctgagaaaccactttgtgatgtgtgcattcatctcacaggtttaaacctttcttttcattcagcagtttggaaacactgtttttttttagaatctgtgaagggatatttgggagcacattgtgacctatggtgaaaaaggaaatatcttcagataaaaactagaaagaa

SEQ ID NO: 109897 - DNA, 513 bp, Homo sapiens
ttacaccccctccccttttgaaacccttaataaaaaacttgctggtttgaggttcaggtgggtatcacagtccttccattatgtgctgtcaccctcggcaacccagctgtaaaattcctctcattgtatcctttctctttatttctcagctggccaacacttatggcaaatagaaagaacctacattgaaatattgtgggtgggttccccaatacctatcttttgatttagcagtttggaaacattgtttttgtagaatccactgagagatatttcctaggtcattcaggtcaatggtgaaaaagtgaatatccccagataaaaactggaaggaagctatctgataaactgctcattatgtgtgtattctactcacagtgttaaaaatatgttttcattcagctttctggaaacactgtttttgaagaatctgmaaaaggacatttgggagctcattgaggccaaaggtgatgaagggaatatctccagataaaaagaagaaagaaactgtct

SEQ ID NO: 109898 - DNA, 601 bp, Homo sapiens
cctttgggctggagttcttggagtaagtgctgatagttttggraagatttatctggaagtgtagcccagggtcatactgcagaggcgatgagtttcagagaaacacaattctcctcttctatttcctgtaggatcccagggtacggctgcaaaaggagtctgagaagatgacttactgaaatcaaggtactttcttagtcattgtgatagttaattgtaggtgtcagcttgactgtattcagggacacctagctagctggtagagctttatttctgagtgtgtctctgaggatgtttctaggagagactggcatttgcatcaatggactgaataagggagagccatcctcacctaatgtgggggcaccattcactccactgagggctctgatggaaaaaaaaaaaaaaaaaaggtaacgtaatggtgaatttgttctctctctcttccagagcttggatgcccttctccttctgcccttggatgtcagaattccagttcctctggcttttggactgtaggactcacaccagcattccctgtccctaccacctccaccacccaccagctttcaggcctttggcctgagactgagagttacac

SEQ ID NO: 109899 - DNA, 601 bp, Homo sapiens
cctttgggctggagttcttggagtaagtgctgatagttttgggaagatttatctggaagtgtagcccagggtcatactgcagaggcgatgagtttcagagaaacacaattctcctcttctatttcctgtaggatcccagggtacggctgcaaaaggagtctgagaagatgacttactgaaatcaaggtactttcttagtcattgtgatagttaattgtaggtgtcagcttgactgtattcagggacacctagctagctggtagagctttatttctgagtgtgtctctgaggatgtttctaggagagactggcatttgcatcaatggactgaataagggagagccatcctcacctaatgtgggggcaccattcactccactgagggctcygatggaaaaaaaaaaaaaaaaaaggtaacgtaatggtgaatttgttctctctctcttccagagcttggatgcccttctccttctgcccttggatgtcagaattccagttcctctggcttttggactgtaggactcacaccagcattccctgtccctaccacctccaccacccaccagctttcaggcctttggcctgagactgagagttacac

SEQ ID NO: 109900 - DNA, 585 bp, Homo sapiens
cttatggagttaaaagaccacaattaatatatttaagcaattgagaacaagagacaacactgcatctgggcatggtggctcacacctgtaatcccagcactttaggagaccaaggcaggaagaccgcttgaagctggagtttgaggccaagttgggcaagaaattgagaccctgtctctacaaatacatacatayacatatacctatacatacatatatatatatatatatatatatatatatgaaaattagccaggcatgatggcatgtgcctgtagtcctagctactcaagaggctgaggctggaggatcacttgaatccaggagttcaaaaaagctgtagtgacctacgatcacaccactacactctagactgggtgacagagagtgagatgctgtttccaaagagagagagagagagacaacactgcatttgttattcagtcattgaataaatatttgttaagcatctattgtgtgcttcgtattgatctagacactgggacacaatggtgaaaacacggacaaggtcccagttctcatgacatttatattctagtgtctgtgtggggaagagatacataa

SEQ ID NO: 109901 - DNA, 585 bp, Homo sapiens
cttatggagttaaaagaccacaattaatatatttaagcaattgagaacaagagacaacactgcatctgggcatggtggctcacacctgtaatcccagcactttaggagaccaaggcaggaagaccgcttgaagctggagtttgaggccaagttgggcaagaaattgagaccctgtctctacaaatacatacatacayatatacctatacatacatatatatatatatatatatatatatatatgaaaattagccaggcatgatggcatgtgcctgtagtcctagctactcaagaggctgaggctggaggatcacttgaatccaggagttcaaaaaagctgtagtgacctacgatcacaccactacactctagactgggtgacagagagtgagatgctgtttccaaagagagagagagagagacaacactgcatttgttattcagtcattgaataaatatttgttaagcatctattgtgtgcttcgtattgatctagacactgggacacaatggtgaaaacacggacaaggtcccagttctcatgacatttatattctagtgtctgtgtggggaagagatacataa

SEQ ID NO: 109902 - DNA, 585 bp, Homo sapiens
cttatggagttaaaagaccacaattaatatatttaagcaattgagaacaagagacaacactgcatctgggcatggtggctcacacctgtaatcccagcactttaggagaccaaggcaggaagaccgcttgaagctggagtttgaggccaagttgggcaagaaattgagaccctgtctctacaaatacatacatacacatatayctatacatacatatatatatatatatatatatatatatatgaaaattagccaggcatgatggcatgtgcctgtagtcctagctactcaagaggctgaggctggaggatcacttgaatccaggagttcaaaaaagctgtagtgacctacgatcacaccactacactctagactgggtgacagagagtgagatgctgtttccaaagagagagagagagagacaacactgcatttgttattcagtcattgaataaatatttgttaagcatctattgtgtgcttcgtattgatctagacactgggacacaatggtgaaaacacggacaaggtcccagttctcatgacatttatattctagtgtctgtgtggggaagagatacataa

SEQ ID NO: 109903 - DNA, 585 bp, Homo sapiens
cttatggagttaaaagaccacaattaatatatttaagcaattgagaacaagagacaacactgcatctgggcatggtggctcacacctgtaatcccagcactttaggagaccaaggcaggaagaccgcttgaagctggagtttgaggccaagttgggcaagaaattgagaccctgtctctacaaatacatacatacacatatacctatacatayatatatatatatatatatatatatatatatgaaaattagccaggcatgatggcatgtgcctgtagtcctagctactcaagaggctgaggctggaggatcacttgaatccaggagttcaaaaaagctgtagtgacctacgatcacaccactacactctagactgggtgacagagagtgagatgctgtttccaaagagagagagagagagacaacactgcatttgttattcagtcattgaataaatatttgttaagcatctattgtgtgcttcgtattgatctagacactgggacacaatggtgaaaacacggacaaggtcccagttctcatgacatttatattctagtgtctgtgtggggaagagatacataa

SEQ ID NO: 109904 - DNA, 562 bp, Homo sapiens
ttgtttgaaagtgtcctgtaaatattatatgcattctttactcttattattattactttattctttgactagatagtttcaaatgatctatcttcaagtttgctgattttttcctctgcttaatagaatcgtctgttgaagctctgttgtatttttaaatttcattcattttatgctttagttccagatattatgtttagttcttatttataatttttttctttttctttttctttttctttttttttttttttgagacagagtctcgctctgtcaccctggctggagtgcggtggcacgatctcagctcactgcaacttctacctcctgggttcaagcaattctcctgcctcagcctcctgagtagctgggattacaggcatgcaacaccatgcctggctaatttttgcatttttagtagagacagggtttcaccatgttggtcaggttggtctcgaacycctgacctcgtgatctgcccgccttggccttccaaagtgctcggattactttgggtgtgagccaccatgccaggtcctagttcttatttataatttatatt

SEQ ID NO: 109905 - DNA, 643 bp, Homo sapiens
tatggttgttatgagatctttagggtgtcacattttggccagaaacctctgtggccagtggtgcctttgttcaagttcttgtcctgtgtccaggaagaatgaggtatgcagacaagtggaggctgagcaagacaaacaggagctttattgagtgttagtatagctcagaggagacatgcagtaggcaggtcctctctgtaggcaggtcatcccatcgagtgtttaactctcagcagagaggaggccctggagagggttgctyctctctgcagtcaggttgtcccatcatctccccagctcctagcagagaggaggccttgcagtgggttcctctctgcagctggtagtcccaacatttctgcaggtctctgaagctttcagcagagaggaggccctagagtgaatagctcctctctgctgctggccatcccatcttctcctcagctctggctgagcccagggcttttatgggcctcagaggggaggaagtgcctgctggtcagtcacagggtggtgatgggtggccagaaaaggcacaagttcccactcctgtcagtgggactggcagcctggcccccagcctgaaggtggggcttcaccagggacctctccctcctgaccagaaatctgtctgcctcctgct

SEQ ID NO: 109906 - DNA, 533 bp, Homo sapiens
cattttattaaacattttaattcacctgtcaaaacaacagattaactccttagtgtaaactactagagataatttttaagagggaaatggaattcatatcacctcttatttattatgagcaatattttaatataaaaattttatatgtgaaaatgctattttaggtactttgccattctctttataaatgtgtatttgagtggttctgtatatttatttacattatcatgtgtgaatatgttcacccatatttcaggtcactgcattttattctcttaatacaatgttttcacaacggttaccttgctttccaaagataaatatattttggattagaaatctgagttgttttaatttctaatacctcttrtaaaagaagaattaataactttttaaagcagtattcaggtaaatacaatacattattttgttttctaacaaaagcagttcttagttcaggaagaaaagactaatctggcttctatgtcaatttgtctccatagaaatgaaagcctcctcttgcttctttcatt

SEQ ID NO: 109907 - DNA, 553 bp, Homo sapiens
taatttatatacagtaagcacaaacattttactgtattgtttgaattttaacaaatgtatgcaactgtagagccatcactccctttggttcccytcacagtcacttcactttttatttcccttccactgattgttctgatccttttttttttttgagatggagtctcactctgttgtccaggctggagtgcagtggcacgatttcaactcactgcaacctccacctccaggttcaagcgattctcctgcctcatcctcctgagtagctaggattacaggtgcacaccaccatgcccggctaatttttgcatttttactagagacggggttttgccttgttgcccaggctggtcttgaactcctgacctcaggtgatctgcccgcctcagcctcccaaagtgctcggattacaggtgtgagccactgcgcctggcctgattgttctgatctttattactgtactttgcatttgcctgcattaaaaactttacataaatgtagtgatacagcatatgctcatttgctccaggcttttttcattccactggatgtt

SEQ ID NO: 109908 - DNA, 553 bp, Homo sapiens
taatttatatacagtaagcacaaacattttactgtattgtttgaattttaacaaatgtatgcaactgtagagccatcactccctttggttcccttcrcagtcacttcactttttatttcccttccactgattgttctgatccttttttttttttgagatggagtctcactctgttgtccaggctggagtgcagtggcacgatttcaactcactgcaacctccacctccaggttcaagcgattctcctgcctcatcctcctgagtagctaggattacaggtgcacaccaccatgcccggctaatttttgcatttttactagagacggggttttgccttgttgcccaggctggtcttgaactcctgacctcaggtgatctgcccgcctcagcctcccaaagtgctcggattacaggtgtgagccactgcgcctggcctgattgttctgatctttattactgtactttgcatttgcctgcattaaaaactttacataaatgtagtgatacagcatatgctcatttgctccaggcttttttcattccactggatgtt

SEQ ID NO: 109909 - DNA, 562 bp, Homo sapiens
atcttctttcgttccttctcggatggattctttgcatttcttctatgtgctagataattttaaattttcgtgtttgtaatatatttcaagaatttgtattatgcttaacataatcaactttcaccaaataatctattatcaaattaattttcctttactatcattgcattatatttaatggagtttgattccctctagttaaaagtcaacagttttatttacttttctgtagcttgaatgttgtgagtaactcaactatatttgtgtcaatacttcttggaatattttgctactgttcctcatctgttaatttgttacatttcctgcacaaagcatgtttgtttatccagatagtagagaaatatttgtaygccttttctcttcagattttttccctgtttatatgaaatcctggtgtgcttttcttgctctgtctgtattctttcagtttcagcagtaaatcattccacctaattatcagaaaaggaaaaaacaccccccgacaataaataaataaataaatattccctgaggttagcaacagatttaaagatagtagtga

SEQ ID NO: 109910 - DNA, 557 bp, Homo sapiens
tcctccaacattttattgatcatgcacctcaagctgtcttccacatggacttgaacagagatgcataagccaaacaacagggtaagaataaaaagaatcatacaattatcagcattcaatccagttaattctgaattggtgcatactctgctattatctttttttttttctcataaaacacaatgatagagggtctaccagtttgcaaattggcggagttatgcaaaatatttgttgccatactggcaaaaaatgagggaagagatgggttttctttatgttctcatataaaatttattttgaaaagacagtgaatgcctcttttcagactttttawggtctcatattaacatcatttaattgagattcaagtctcatacaacaaacactagagtattatgcatataaataatgtgcttgcaatttatacatttgattattaaacacatcatgtaattgttatttagtatttcttatttatcagtaaatgacgttaatataagtgttcctcgatcatatactgatagatttacctagtaaccaggtaatttttgcta

SEQ ID NO: 109911 - DNA, 557 bp, Homo sapiens
tcctccaacattttattgatcatgcacctcaagctgtcttccacatggacttgaacagagatgcataagccaaacaacagggtaagaataaaaagaatcatacaattatcagcattcaatccagttaattctgaattggtgcatactctgctattatctttttttttttctcataaaacacaatgatagagggtctaccagtttgcaaattggcggagttatgcaaaatatttgttgccatactggcaaaaaatgagggaagagatgggttttctttatgttctcatataaaatttattttgaaaagacagtgaatgcctcttttcagactttttatggtctcatattaacatcatttaattgagattcaagtctcatacaacaaacactagagtattatgcatataaataaygtgcttgcaatttatacatttgattattaaacacatcatgtaattgttatttagtatttcttatttatcagtaaatgacgttaatataagtgttcctcgatcatatactgatagatttacctagtaaccaggtaatttttgcta

SEQ ID NO: 109912 - DNA, 557 bp, Homo sapiens
gataggatgtggggacacacagctaaaatatatcaaccttatacacatactctgaaggtagtattatacagtattttaaaaaatttggtgcataaaacaaagtttctgttaagtacctatgtgtggaaatctccacttgtggcattacattgacactcaaaaagtttcagattttggaacatttcagattttggatttttggattatggattctcagccagtactctgatggcagcctgagagaactttaaagtgaaggacccagctaagatataccaattttcttaatgcacagaaagtgggtaaacatgcatgtgtgatatttcttatgctgctaagtggtggagtaatttgttacaaacaatggataagtgatatggkgatgaacaatttttgggaggggaactcagggaatttcaaatttgaattgctctcttaactggctaaatcttatcactcagaagtctctctctccatgtgtgagttattcagcaattgagaatgtgtgcttattaatttattatttaagcattagctgagaatagtattcttgggtc

SEQ ID NO: 109913 - DNA, 557 bp, Homo sapiens
gataggatgtggggacacacagctaaaatatatcaaccttatacacatactctgaaggtagtattatacagtattttaaaaaatttggtgcataaaacaaagtttctgttaagtacctatgtgtggaaatctccacttgtggcattacattgacactcaaaaagtttcagattttggaacatttcagattttggatttttggattatggattctcagccagtactctgatggcagcctgagagaactttaaagtgaaggacccagctaagatataccaattttcttaatgcacagaaagtgggtaaacatgcatgtgtgatatttcttatgctgctaagtggtggagtaatttgttacaaacaatggataagtgatatggggatgaacaatttttgggaggggaactcagggaatttcaaatttgaattgctctcttaactggctaaatcttatcactcagaagtctctctctccatgtktgagttattcagcaattgagaatgtgtgcttattaatttattatttaagcattagctgagaatagtattcttgggtc

SEQ ID NO: 109914 - DNA, 556 bp, Homo sapiens
gttgtaatttttttagtacggggcttatcatatatgatataggttaaaatatggaaactaattcaactgtttcttgaagtgagagcagtgatcaactgraataacacttttagattattattattattgtatttatttatttattttgagacggagtcttgctctgttgcccaggctggagtgcagtggcacaatctcagctcactgcaacctccacctttgggttcaagcgattctccagcctcagcctcctgagtagctgggattgcaggtgtttgccaccatgcccagataatttttgtatttttagtagagacagcgtctcaccatgttggtcaggctggtctccaactattgactttgtgatccacctgccttggcctcccaaagttttgggattacaggtgtgagccaccacgtccagcccacctttagattattatatcccacttactaattaaaatatttgatgacaacctttgaagtacaagaaaaatgaatacatttaaaagagtttgttggtaaccttttgcataatgaacacctttcttttaca

SEQ ID NO: 109915 - DNA, 554 bp, Homo sapiens
aaatatcaatttactaacaagaaaaatgtgatttattttaatagggaataagagmagcagcagaaatgacagctacaccaatcagcatgcattgaacacttcatattgatgtcagggaaacacattatctcatttaattctaagaagagtcccaagatgtagataatattttaaagttaatgaagcagaagtttagaggtaaccctagttatcagtcaattcagtgaagaagccaggattcaaatctaattttaaatcctgggctgttaacaattttcctccatagcctccctacagtgctctacatagcataaataattaatgatgagaatgtcgttggttagtgatctttaatgaacataccttgatgcaaaacaccgtcactaccaccaccacttccatgtcaaccaccacctctaccaccgttctagctctactgccaccattgctatttactgaggactcatgaccataagccatattaggggctggggatggagcttgcctcctctctctcaaaaatcagcttcatgaaagcaggaaaaaaaaaaaat

SEQ ID NO: 109916 - DNA, 554 bp, Homo sapiens
aaatatcaatttactaacaagaaaaatgtgatttattttaatagggaataagagcagcagcagaaatgacagctacaccaatcagcatgcattgaacacttcatattgatgtcagggaaacacattatctcatttaattctaagaagagtcccaagatgtagataatattttaaagttaatgaagcagaagtttagaggtaaccctagttatcagtcaattcagtgaagaagccaggattcaaatctaattttaaatcctgggctgttaacaattttcctccatagcctccctacagtgctytacatagcataaataattaatgatgagaatgtcgttggttagtgatctttaatgaacataccttgatgcaaaacaccgtcactaccaccaccacttccatgtcaaccaccacctctaccaccgttctagctctactgccaccattgctatttactgaggactcatgaccataagccatattaggggctggggatggagcttgcctcctctctctcaaaaatcagcttcatgaaagcaggaaaaaaaaaaaat

SEQ ID NO: 109917 - DNA, 632 bp, Homo sapiens
gcgtgaattggccaacgtttgcacctagagtactatcttgcacctagtatactgtcttcttcagtaatcagtatgtaaagtaatcagtatttaaagtgttcagacaattttttctaagtaggggatcactaaaatataacactcacagccttccaaaagagttctgcraagtgaaagactactcatgggttctggcttccttctaacatttcaaaaccatcttctgccttcaccctagtgttactgaccatcttacctttgtgtcccatggtattcaatacctatttctatcatttaattatattttatatttcctataatattttattgtataaactactgccctgatttgttacatgtttgtcctgaatttaaaaacataaagtgctgaagttccataatagtatctcaatcatcttaaaacttccagaccaaggacatacccagaacttagcgataaatgtttgttgaaggaaagattgaatgaataatgggaagttggagctgatgtaaaactatctacttgaaaggacccaaaagaataaatgaaggcactttttgcatagaattacgagaagagaaaactaatttcttggccttatatgtatagtttctaaataaactttttggag

SEQ ID NO: 109918 - DNA, 595 bp, Homo sapiens
gatcattgaataaccagtatactatttatttaagatttaaaacctgccaaacaaagcttttatttcatatacatgtagtaaaagtaaaaagaaatgcatgaggacaagaaatacaaaattcaaacagagactacctttggtggcaatagagaagatgtgatctaaaagagccacacagagttcttcaattgtccctttcaagttttattttcaagctgcacagtgcttttgaaagtattgattatagtattctctaggcattttgggtgtctggaatacttcattaaaaaaccagccacggaatgaaaagaaggaaaacaagagaagtatacacatttatatacaatttactgtgagacaccatcttgtctcatgaggagtgttttgtttacatggtaaggtcaagataaaagtttctacctcatggtaacaactgaaatataagttcagatcatgtgagtgttttgacctggtactaaatggcaggatttcatatctcctccagattgacacytgcccctgggaagaagggcaaatggtccgtgaagtccccatctgcctgtctgaagacatctgtagtgaagtgggctgtcct

SEQ ID NO: 109919 - DNA, 573 bp, Homo sapiens
ggcgttggatccctactgcaaatgacaatgttatgtgtcaataaaattgaatcttaatgtcacattcaggatcataggttaaaccagtgattttaactagatgacaacatttttccgattttgtataagaaatctaaatttgtacacaatatttttttctaattgcaggatttcttttttaaaattatagattcagggggtgcctgtgtaggtttgttacgtggatatgttgctaatggtgaggtttgggcttctagtgtaaccatcaccagatagtgaacaytgtatctaataggtcatttggagtctatactattattcacattttaatgtttatgggttcccattgtttagctcccactcatgagtaaaaacttaatatttgatgttctgtttttgagttatttcactgaggataatggtctcaggctccatccatgttgctgcaaaggacattattttattctttctatggctgagtagtattctgtggtgcaaatataccgcattttctttatccattccacagttgatggacactttggttgattccaggaatctgctgttgtgaat

SEQ ID NO: 109920 - DNA, 573 bp, Homo sapiens
ggcgttggatccctactgcaaatgacaatgttatgtgtcaataaaattgaatcttaatgtcacattcaggatcataggttaaaccagtgattttaactagatgacaacatttttccgattttgtataagaaatctaaatttgtacacaatatttttttctaattgcaggatttcttttttaaaattatagattcagggggtgcctgtgtaggtttgttacgtggatatgttgctaatggtgaggtttgggcttctagtgtaaccatcaccagatagtgaacactgtatctaataggtcatttggagtctatactattattyacattttaatgtttatgggttcccattgtttagctcccactcatgagtaaaaacttaatatttgatgttctgtttttgagttatttcactgaggataatggtctcaggctccatccatgttgctgcaaaggacattattttattctttctatggctgagtagtattctgtggtgcaaatataccgcattttctttatccattccacagttgatggacactttggttgattccaggaatctgctgttgtgaat

SEQ ID NO: 109921 - DNA, 483 bp, Homo sapiens
aattattatttttcttccagcttctatactacttgtttccttctagctgtccttactcaatagaaaatactaaattgaagtcagaatatgaattataattagtaagggaatgatatggctctagttgttaatatacctacatagctacttgaaaattactcttatataggagggagagttcatgagaaatgcaggcaccaaaggaggaagtcagtaccaacattcattttcctttccatctttgacaaaatttaaaaagctatgggcaatgacacatggataatcttcaggacccaattttgtcacttgttattttgtagcctctatggttcaggaaaaggaagtcaaggaatgtggaargggtattgagtggaccaacctatggtatttgctacaaaaatacaattgtgtaaaaggcaggaatgatgtgtcatgggaattcatgaaagaaaataactttgggctataataaacaggggtaat

SEQ ID NO: 109922 - DNA, 633 bp, Homo sapiens
atagcattatttatcacctgtcaatgttaccttatatctgctttgctcccacttatgtttagargacaaggggattcaataatgaaatacaataagatgcagaatagcatagctaccaggtgctaaagatagacacaaatctggagctggccccaacatcaaggaagaggtggctcattgaactataaccttatgcagaagagagattggtattacaatgattaaaattacaagacagtgaattgtcccaaacaacacaggttctggctggggtcttctattcacatgccagtgggcggtaacacatttcagagtaacatctctcaaaaagcagttataggtagaaaactcatcacccctagtgaggtgcactgcatgaacacagataccaggcccagatggagttctgtacacaagattacagctttgccatttataaaactgagccatgagatgcaaataagttctaaatgttgtttttcttccaagtaaaactcaaaacttgagaacttaatctgttgtttttgctttgaagctgaaatctgcagattgcaaaagttgagactagtagcctctctttgtttccttctttatgtgcttatataacatagcaagctttcccagaaatagatg

SEQ ID NO: 109923 - DNA, 633 bp, Homo sapiens
atagcattatttatcacctgtcaatgttaccttatatctgctttgctcccacttatgtttagaggacaaggggattcaataatgaaatacaataagatgcagaatagcatagctaccaggtgctaaagatagacacaaatctggagctggccccaacatcaaggaagaggtggctcattgaactataaccttatgcagaagagagattggtattacaatgattaaaattacaagacrgtgaattgtcccaaacaacacaggttctggctggggtcttctattcacatgccagtgggcggtaacacatttcagagtaacatctctcaaaaagcagttataggtagaaaactcatcacccctagtgaggtgcactgcatgaacacagataccaggcccagatggagttctgtacacaagattacagctttgccatttataaaactgagccatgagatgcaaataagttctaaatgttgtttttcttccaagtaaaactcaaaacttgagaacttaatctgttgtttttgctttgaagctgaaatctgcagattgcaaaagttgagactagtagcctctctttgtttccttctttatgtgcttatataacatagcaagctttcccagaaatagatg

SEQ ID NO: 109924 - DNA, 633 bp, Homo sapiens
atagcattatttatcacctgtcaatgttaccttatatctgctttgctcccacttatgtttagaggacaaggggattcaataatgaaatacaataagatgcagaatagcatagctaccaggtgctaaagatagacacaaatctggagctggccccaacatcaaggaagaggtggctcattgaactataaccttatgcagaagagagattggtattacaatgattaaaattacaagacagtgaattgtcccaaayaacacaggttctggctggggtcttctattcacatgccagtgggcggtaacacatttcagagtaacatctctcaaaaagcagttataggtagaaaactcatcacccctagtgaggtgcactgcatgaacacagataccaggcccagatggagttctgtacacaagattacagctttgccatttataaaactgagccatgagatgcaaataagttctaaatgttgtttttcttccaagtaaaactcaaaacttgagaacttaatctgttgtttttgctttgaagctgaaatctgcagattgcaaaagttgagactagtagcctctctttgtttccttctttatgtgcttatataacatagcaagctttcccagaaatagatg

SEQ ID NO: 109925 - DNA, 633 bp, Homo sapiens
atagcattatttatcacctgtcaatgttaccttatatctgctttgctcccacttatgtttagaggacaaggggattcaataatgaaatacaataagatgcagaatagcatagctaccaggtgctaaagatagacacaaatctggagctggccccaacatcaaggaagaggtggctcattgaactataaccttatgcagaagagagattggtattacaatgattaaaattacaagacagtgaattgtcccaaacaacacaggttctggctggggtcttctattcacatgccagtgggyggtaacacatttcagagtaacatctctcaaaaagcagttataggtagaaaactcatcacccctagtgaggtgcactgcatgaacacagataccaggcccagatggagttctgtacacaagattacagctttgccatttataaaactgagccatgagatgcaaataagttctaaatgttgtttttcttccaagtaaaactcaaaacttgagaacttaatctgttgtttttgctttgaagctgaaatctgcagattgcaaaagttgagactagtagcctctctttgtttccttctttatgtgcttatataacatagcaagctttcccagaaatagatg

SEQ ID NO: 109926 - DNA, 493 bp, Homo sapiens
ttacttttcatggtaataaatttatttgcatargttcaataaaaatctgttctcttacttaacaagatataaatagacaaatctgagataggaggccagacttgactcaggagacaggacttgactctggaggcagagctcagacactggaccaaattcaggactagctaaaacagggagaggtagaagcagctttccaccaacaacacccaccagtgtgccatgccagtttaccattgccatggcaacaccagggagttactgcctctttccatggcaatgacttgatgactcaaaagttactcccccttccctagaaatttctgcacaagctgctccttaatctacatataattaaaagtaggaataaatatgactgcaaaactgccctgagctgctgctctctgcctgtggggtagccttgctctgcaggagcactcatggagctgtaacactgctacttcaatagagctatttttttttctgcctctgg

SEQ ID NO: 109927 - DNA, 626 bp, Homo sapiens
attatctacaccacattcttttcagctgtggaaagctttgacattcttagcgtatatctggtagaactgaaaccttcatttgtgatgtgtctgaatcttwagtgattctgctgtagtaaattgctgttgttttccatcatcttttattcctggatctgacagtacaggaggtgcctcagaggaccccattggttgtttaacagcaaccccctcccctataataatctgaaccattcacttcagctaatgaaataattgacttttatgcccactgtttggtgaaaaaaaaatgccagttgcttttttcaacccctcattaaactaactatggttgtgtaccctgatctcttgagtgctgaaatatccaaaacaacatagccaaaagccagaatgatagaaacaaacattttgtcagtggacattaggtataacagggacaggcatccattctgatttctctttaagaaatctgtttgttcccggacctgtgaattttggttatggatttacagagcctattggaagatacattccatttataatctgacctctgtaagtacttacttacagaggacttacaaatacaccataatggctttctggttccatcagaattagaattaact

SEQ ID NO: 109928 - DNA, 559 bp, Homo sapiens
aaactagactaacaaaaaccagactaacaagagatgagctgtttatttattaaaacatacagtatacatcactcaggagaaatcaaaatgaagagtgtgactcaaaggggtggttagaacttgggcttcttagtgtcttcataaaagaccaataaatctgtaaagaagggacaagagaaaggaaaatgttttagattttcaaggacagcaaactgtgaaggaaacatagataggaaaactaatgaaataagatttgtttgtgcaggttcatttctgtgctgactttccatttcttcatggccataaarctttgccaagagagaagattcatggaagtcttcatttttcagaagtttctgcttttggtcagataatggaagccctgggaaggcttctttttgcatctgcagattcccatttatctccagctcaaataatccttatgccaaagtgacatactttaaggtggcatattctggtcacctatagttcgttgtcctattgtaaagccatccactataataaaactgttttcagcatcagctgtaaaacatacctg

SEQ ID NO: 109929 - DNA, 599 bp, Homo sapiens
atgaattccttttgaataacactgactgacgcaggtaacagattcacccaggacaacatcagtggtctccagcctaacatgtgaggctccatgtaaatcatgccacatctggaaacctggaaagccataattggttaccatcaaggtaataatgcttataaaataaatatgatttggcacctctgtttttttataaccttcagcaaagtcttgggcggggggaagcttaatattatataatttcatgatgtcgatttttgtgtctgactttaccaaatagtcctaaaccaagagaaaaacatcctgaccactaaattagtcaagrtatgtcaacagataacgtctgtactttgagaatcacagatcgctcttaaaagaaattctgctaatattttttgtttaaagtcaaaggtactaagcaaatacatgcatttataacattttataatttataaaaagatgtcaaaatggagaacttacagtggcaggggaagcaacttctaaatccattggctcaaaaattagattcatttgtggtgacatctgaataatctccccactcatcagacatagcttcttgttgtcatccagcacagtgt

SEQ ID NO: 109930 - DNA, 391 bp, Homo sapiens
atgataatgatgtctggaaaggaaaaagacatgtaaagtagtctctaacatatattaaaccctgaagaaatattttctgagtgaacagaaataaagcacaaattagtgttaagttcarttgttgcaggacttttccttagttcagctaaaggtggggtccttgttacacagccatgaaaattttgcctcacagactatttgaatggtgagtaaaacaggttttattgagtgaaagtgaagaaaagggggaaacagggactctccacaaggccagcgtcccttctagagtgcttcccaccctgcagattgaatcccaggttccatccaggaagaagaggggccaggctcctccccactgcaaacagcatgaacttctgtggttccaccccag

SEQ ID NO: 109931 - DNA, 570 bp, Homo sapiens
agtagcacatcataaacagaggtttgagaatcaaatgtctctgcccttgagtccaggttccattcctttttagctgaaacactggaaactcacataacttctctaagccttcatctctttatctataaaaaacagatacataaatttcactgcctaaacctgtaagaactaaaggggatcatgcctataaatgtttaaggacagtgtctggcatggaaagcactcaggaagtgttaactcttggtggcagaagaagcagtaataggatttgaaataagcagtgacttctgcagtggtacatggtgtgtacttctggggaggtcctaggtggaactataaatttggaagtattaaatagtacttaaaatgatgggctggagggagattattcaaggagagaaagtagatgaaaaggaggataaggtctcgtctggagcccttccgcattccaaagttcagcattttggaattggaactttttcctcctttttccttttcattcattttagaataaacctctamaacattttacgaattccccacaaatatcacagccatggaattagagct

SEQ ID NO: 109932 - DNA, 580 bp, Homo sapiens
ctgtcttccccatgagacccccatccatcctggtcttcaccaggaagggtcccacagcttgggttcacagcacagccaccccacccacagctgatcattctgattggcagtggctctgcatttctctggggtggaaatggtgccccaagagataactgaaagttcctctgccattgccactgcaaaggtccctgaccctggtgccaccaagttgaagagaaaacataaaaccttaactcaccccagggatgtagtgtgaagcctgggagtgccaagtctagatctatggccagcacttgagtgggagaggagcccacaatttcagagcatttagaggtagcatggctgcaaacacaaagaaatacagaggagacataggctgagtaagagtctttctactggtcattatgctgaagcaccatccactggaccacagtccagacttcaacaccaaaaatactttgctaatatatgcatctgtgaaaccaaggacaagaactcagccacaaagaccctgcacaaagctgtggccctctgaaaacatccagaaamaaagccaactgactatactcaaatttca

SEQ ID NO: 109933 - DNA, 590 bp, Homo sapiens
gtgtttctgaccactggagggttagctccatgaaggcacagctgaaacctcaatgttttgaacactgcttaccacatagcaggcactcaatagatatttgtaaatgttgttatatctcacttaggaatacagatataaaatcctataatttaaatattaatacagtgcttcattttaagtataataattatatatacttcatatgaccataacttaaataccacagtgtattaaagagattctagatcataaactgattataacattctacaatataggaaggttggttcaacattaggaaatccataaattttattacttccatacacatgttaaaacaygtgattatcggggtagatattttacaaacattttataaaattaagcaaatattcgtacttgaacatttagtaaaatagctgataatgacaaaggtaactgagtaatgtgtaagcagaaatgaggtttgccgtgctacttatagccctgtgtaacatgccaatagattatgggtggtaacgtggtctgggaacctctgatattgaccaggagagccagcagaaagggttgaactctaatttagctcagtt

SEQ ID NO: 109934 - DNA, 509 bp, Homo sapiens
tctataataccatgagtaagtagcagttatgggaattgaactcaggttttccagttttaagctgagtgacctttctactcttccactctggcagagctttatttcacatagctttcccactccctctctttaatgcacttctacattttccatgttaaacgctatgttttaccctcgttggcttcctctttctgctctcctctagcaacctggaaaaaagtctgcctatttctgtaaataagaatctttaggtacagttatttaggcacatttgacagacatttagccaagagaaaatatttaaagtgaaatatttggtatacttgtcaaaccaaaagaaaaaawgtgcttatcagttacataaaatatcttttttgggtaagtggcagaatgttacatttttataacatcacttaaaaatgccacttgagtgtgttacatgctcattaacaacaaagaaaatacatcaaagaaatataactatttgcacaattcacatttaagggtag

SEQ ID NO: 109935 - DNA, 629 bp, Homo sapiens
tttagagtttacattttagtgctgagaaacagaatataaacatataaaaataagtaaaataaataatataatttaaaatatcaataaaatttacaaagaaaataaaaatgtgtaatggaataaataattatccgtttagatattcaagaaagatctttctgaagaaggaacatgtaaatgagtctgaataagagaaggtattatccttgcagtccctcaagttagatatttcttcaaaaatacaaagcttgtcagcaagggcaaaggcccggaggcacaaatgagttttgcttattcaagggagaaccagaaagaagccagtatacctggtgaatgttaatcaaggaagaaaatattaggatatgaagayagagaaataagtgaataccattctaaatgcaagaagacattgggaaggagagggagaagtatgcctcactcaaattctttggataccctctgaaacccctaatatatttctgtgcttttagaggacttcatttgctccagggataagacagacttcataccacctccacatgaatgtttttttggataaaaaagaattggattataagagactgtgaaaggaaaataaaatctcaggaacccaaactcactatgccaag

SEQ ID NO: 109936 - DNA, 590 bp, Homo sapiens
tatatacagctgtgaacatgcttagttgaatctctggatggaatatttttatagggaacaaaaattcgccataagcttactacctattttcatttttcttccccataataaaacagtgggaagaaaggagattataaaacattaatggtcctttttaaaaagttgagtaaacagcatctgtaattattttgcagagaaatgctcctaattgaaagaaaatcattctattagcacacatacctgcggctgcacaaatggtctattacttgctgaagaatttaatgctgatacaaggctgaatctccagtttatctcyttaaagaatgaccacttgaaaattctgccttagttttgcctctgttgcttactgagttatctcagagtgatcatggcagggtaccaaaggggaagtatagttttactacaatatttgtctctgcagactttatagtcctgggttattttctggatcaaagagaaataaaaatcactctcttctcaaaataatcagaatccagttaccccagtatcagatcacaaaattttctttaagatcttaaagcacagccatactagtcatcacaggagga

SEQ ID NO: 109937 - DNA, 568 bp, Homo sapiens
tataagattcattcatcatccatgggaaaatcatatttcaggctaaattaggagaatgatgtatttctagtcattcactctccataaactgaaagaaaaatagtcagaaaaattcattgtcaagttttctcttgcaaatggttgtgtgcagaaaaaattrtcacaggtacattttggtaaggctatttccttgagattttgagttctgaaacaaatgtcatccttcacttcattggaagtaagccttaaaaaatactgcatcatgcttaccatgcttctgttattttggtgtttcaagattcagacacatcaaaattgtagatttttaaacaaaacacaaaccttactacaacatcaaaccttattctataagttggaagtgtactataaatgatatttaaaagtcctcaaactttttttcaatttcaaaagtaaaaacattttcatttaaatatttggaaataatctgcccctttctgtatctttcaccttcctgtcccacatgatgaagacgttaacaatatggtttggtcacatcagcctccctgatagacttgaattacattgt

SEQ ID NO: 109938 - DNA, 513 bp, Homo sapiens
acaactctcctcagaacagctgccaaatttgccagtggtgctatttcctaggctgaggcaagcagggtagcatttctcgcttttaggaaccagaattgctcctttgttttttaagcttgaggtaaaaggctttcctcacatttatatgagcactaaaaccaaatccctccagccagaatgctatcacatttgcaagacctgccatttccctggcagttccatttatcagaatcagggaggtaaaccggaagctgtctgtgtgggtgcccagtgaggtcactgacacgccaaacattggatgaggtcacaatttaatctcttgctttttgatgctccgytttcaggtgccacgcacttgggagctctggcctacaaattgtgccttaaccgcgcttaaagagtattgtgtgttttactctgagactttcatcaactctgaatgaactacacatagtaatgattggaggagttcccaagaaacacgcaacactggtgaaggccttcccaaacatt

SEQ ID NO: 109939 - DNA, 588 bp, Homo sapiens
ttcttattcagcatctcagctgcacaggtttccacacagaaatgagcaggtaaaaatggttagagcttcataatgagtcaacattaacataattactttccatttcatctattacagtacactgtttgactctctcatttcttttcatttcaatcattcctttagaacacccacaaggccctgttaaagaaatgagactttagaggctgcattatagaaactgaggtgaactaaacagttttgtaattttcccttagaaataaaatgatcaaacattccacactaacataaatggtgtaattttgtactaatacagtatttctttacatttcttaaaacagtgtatacaattagataatgacatgaragtatttattgtggcatcatgaaaatgttactataaaataactattctgttttgttttataacaaacagaagttaatcttcctaatgtgtattgactatcacagttatctcaggggccacatgcttactatagttctgctgccactgctgaaaacattgctgaatatccctgttttgattctgaagaaattaccttcagggacagtttaccacccaaataa

SEQ ID NO: 109940 - DNA, 616 bp, Homo sapiens
actagtttagaatggttccactgattttcatccaatttaacgaacatgtattaagcatattttacatgtcaaggttagtgcttgttaggggcttaaaagaagaagcaaacaagattattgccccgaaggagctttcagcttaattgaaagaaagattaataggttaattacatacctataaaggttatgatgagtgaaagcatggaataggagaaagtaggggaagagatggagtcaagaatatatggaggagatagcacctgataaatcttgaagggtgaatgtgtgattagttgaatgagaaggagagatcagggagaactgtaaaagatgaaatttcaagacactgagaacaatattaaaaacatgctatttttaaaaaaattatactactttacagtcccataaatttgggagtgagccaacttactccaataaagatcctgagatattccatcttgaatcaagaaatyaacccataccgaggattcatgaaactctgtgcatttggctatacatggtgaatttaaactttggagccttttcaactgtaatcttttgtttaactactctcctctcatctatcttgaaaccattctctcttgattacagccaa

SEQ ID NO: 109941 - DNA, 616 bp, Homo sapiens
actagtttagaatggttccactgattttcatccaatttaacgaacatgtattaagcatattttacatgtcaaggttagtgcttgttaggggcttaaaagaagaagcaaacaagattattgccccgaaggagctttcagcttaattgaaagaaagattaataggttaattacatacctataaaggttatgatgagtgaaagcatggaataggagaaagtaggggaagagatggagtcaagaatatatggaggagatagcacctgataaatcttgaagggtgaatgtgtgattagttgaatgagaaggagagatcagggagaactgtaaaagatgaaatttcaagacactgagaacaatattaaaaacatgctatttttaaaaaaattatactactttacagtcccataaatttgggagtgagccaacttactccaataaagatcctgagatattccatcttgaatcaagaaattaacccataccraggattcatgaaactctgtgcatttggctatacatggtgaatttaaactttggagccttttcaactgtaatcttttgtttaactactctcctctcatctatcttgaaaccattctctcttgattacagccaa

SEQ ID NO: 109942 - DNA, 623 bp, Homo sapiens
ggttgtgctataaattttttcacatattcctactattgcaatagctctgtacttcttaaatttttctataattttaagattgcgttggtcagattctatgtaataaaaaaaaatggtcttgtatctgatttccacagggactgagcagtgtatttgagccatgttaattgagttaatgacatccattaagtttatgaaagaatttttaaaattgaatacagaaatgaaaagaaactaaaagtcttcttcaacatacttgacttgtaattctcagtgcttcaagtatgaagttgggagtaataggaaataaaaagcatcaccaaacgagatgcagcaatccttcaatctggtagtactgagccactagaaaggaattacactgaggtgtgccctatccaggtaaaaccttttggaaaatgttctgtaaatttcaattcaaaattctgtgtcaactttaaccataatgtggggaaccttggtggattaatgatgaatttcaacaattcatttgtctccacagaggtcgggctgtgcttggttgkaatttctactgcccttcagaaactccataaatatgaccaaaaacaccacaggaaaaatatgtgtttcctcattgaagattg

SEQ ID NO: 109943 - DNA, 580 bp, Homo sapiens
agttaatcccctctcctatgattctattgtaacagaaatccaaaaggaaaagcaaatattcccacacagtatgacagtgtaatactatcttggtttttaaatttctcaaaaatacatatttactattcatgcatcagtaaattctttttaagtgactagttggtgatgacattttgagaagcgttgagaacttgaaagtgtccaaaatgagcatctcccattcccttaatgaacttaaaatgtaggaaagacatcagcattaaacattttctcacataaacacatgactatagtaagcaataaagggtatggagggaaaagttaaaagcacagtgcaagaacataacatgttaagcagctttttccccatgtctacacccagcatggatgtgcagaggagtcgtcctakaaatggcacggactaacaatttcacagctccaacatgggcagagctgcccactgttttgcttgcatcaaggttcgttgttgtgttagtcaggaaccatagctggggcaccatgctgcctgatagccagggatggtcccttcctggctcacagtattgtctatgattggcca

SEQ ID NO: 109944 - DNA, 604 bp, Homo sapiens
gatgaatcatgattgttcttctctttgccatatgaccctgcttttttgaaataggtgaaaagttttcagaaaagttttgctttcctgattaaagggacrgattgctggagctcttccttcctccttctttccccttggacacagatgtggcatctggagcttcagcaaccattttgcatttattaggtaataagtatgaataggcaaagcaagcctgctaaggatagtagaacagaaagattaaaagacacatagtctttgactgtattacacagcagctgaaccaacaacacacttctaaatgggaggggcagaaagtgggtattgtttaaacctgggttacgtttcatgttattcacaaataaaacattcataattaataatattcatccccaaatagacatatacctaaattacaatataaaatagatttaatagattttaaagcccctctattttatttagttgtatatttaagtgtattatatcagtgatccaatgtaagtggacagaactgtgtcaattgcggtggccggcacctgtaagtcccagctacttgggaggctgaggcaggagactggcgtgaacccgggaggtggagctc

SEQ ID NO: 109945 - DNA, 604 bp, Homo sapiens
gatgaatcatgattgttcttctctttgccatatgaccctgcttttttgaaataggtgaaaagttttcagaaaagttttgctttcctgattaaagggacggattgctggagctcttccttcctccttctttccccttggacacagatgtggcatctggagcttcagcaaccattttgcatttattaggtaataagtatgaataggcaaagcaagcctgctaaggatagtagaacagaaagattaaaagacacatagtctttgactgtattacacagcagctgaaccaacaacacacttctaaatgggaggggcagaaagtgggtattgtttaaacctgggttacgttycatgttattcacaaataaaacattcataattaataatattcatccccaaatagacatatacctaaattacaatataaaatagatttaatagattttaaagcccctctattttatttagttgtatatttaagtgtattatatcagtgatccaatgtaagtggacagaactgtgtcaattgcggtggccggcacctgtaagtcccagctacttgggaggctgaggcaggagactggcgtgaacccgggaggtggagctc

SEQ ID NO: 109946 - DNA, 571 bp, Homo sapiens
ccaattaaaaatgagcaaagaggctgggcacagtggctcatgcctgtaatctcagcactttgggaggccaaggcgggtggattacctgaggtcaggagtttgagaccagcctggccaacatggcgaaaccccatctctactaaaaatacaaaaaattagccaggcatggttgcaggcacctctaatcccagctactcaggaggctgaggcaggagaatcgcttgaacccaggaagtggaggctgtagtgagctgagattgagccactgcacaccagcctgggtgacagagtgagacttcgtctcaaaaaccaaccaacgaacaaaaaaaagaacaaagaacttcaatagacatttgtccaatgacatacagatgaccaagaggtatatgaaaagatgtttatcatcactaaccatcaaggaaatacaaatcaaaaccatataagatatcaayttacacttgttacaatggccgttttcaaaaaaacaaacaaacaaaaggtaaaaggtagcaagtgttggcaaagacatggagaaatgagactttcgtatattgttagtgggaatgcaaaa

SEQ ID NO: 109947 - DNA, 603 bp, Homo sapiens
atattatttatctcattttatttaatttacattttcccaatgaataaggagaccaagcacattttcatatgcttcttggaatagttgaatgtcttaatttttgaggtcttttgaagttggtttattgaaatacagtgacatacagaagcattcgcttatttttctattggttttttttttaattgactgataggaatatacacatataacatatatattcttttttggttttttgagacgaagtttcactcttgttgcccaggccggagtgcaatggctaaatctcggctcactgcaacctccaactcctggttcaagcgagtctcctgcctcagcctcttaagtagctgggattacaggtgcctgccaccacgtgcagctaattttttgtatttttagtagagtcaaggtttcaccatgttggccaggctggtcttgaacttttgacctcaggtgatccacccaccttgacctcccaaagtgtggggattacaggtgtgagccactgcacccaacctacatgtattttatatatatatatattctgaayttgaatttttatgtatacaacatacatatagcaaatatcttcatccacgtaat

SEQ ID NO: 109948 - DNA, 606 bp, Homo sapiens
gcctgtagactgctgacttctcatccccaaaaatggagacaagaagacaatggaatagtaagtactaaaaaaaaaaattatcaatctagaatatatgtattcaaagaagccatctttcaagaacaagggttaaatcatttttaaaggaaaacaaaaaataataatatttagtgccaagaaaccaaaattttcacttcaaaaagaagaaaagcaagcttcaaaagaggcaggagattaaaggaaggatagcaaggggaaaaaagtaaatatggataaatataaacaatcttagaatgtggaaaggaataaaattatgccttatttgtgatgttaaacaagaactaaaataaacatcatttttatcatttgagggcaagcagcataaaacattctatagttctttaattgtgcaagaagataaactttagatttgtttaaagttaaatatacatgtgaaaacttccagcgtaactkctagaagaagagaaagtaatacctttaatattagtcaccagaaaaatagaatatggtaaatctcgattcacagatggcacaaaaggagataaattatagacacagaaatttcaaacaaaaataaaacacatt

SEQ ID NO: 109949 - DNA, 608 bp, Homo sapiens
aaggattgtccaattgtccaagcctccaccaaagagtgatttctgccatatttgagtcagtgctgtagcagcatcggtcagaacatagccattagcaggaactgtcacaaatgtgggggcagcaacatggtaagagagagtctcccttcagcagcagtagttccttggggtctccataaacatagcctcctatcaggttggcttacagattgccatagtgtttacagattgtcctgaaagtgaaatgtcatgtgagtgggatcctggggtgcagctcttgaaatgaattcaatataaaaaattaaagtgatgtaagatcttagtacaagtcaaaagctatgcagaattgtagatgaaaggatgttagtactgtaaattatgttatcacagatggggaacatttatatcaatcattagggctagaggatgaatttatatagggttaattgatgagccacattaaaaaaaaactaatgtrgataatagatgagtagagaatagtacccctgatgtttgggcgtgcaactgtcctctgggtcatagtaggtaacagtgaggaaattatttttaactgtctgtgtaagaaaatgctgagtaccttttcctct

SEQ ID NO: 109950 - DNA, 566 bp, Homo sapiens
gagacacttgtagggcatccaactagagattataagtaattagcctcataaatcagaagttcagaatagaatgttgggctggagataaagagtttggaatctttcctactccatttcatttttcacattgcttttaaaattctcttttaaacacagatctaactatatgagactattaactataactattaactattaactataacacctatttaaaatccaattgttgcctcstcagtattttcataatacagttgaaactctaacatggtggtgtacaaatacctctaacatctagtccttaccaaactttctggactaacacctcaatttctacttatatttcagtcggatacaatttctgtctgttcactgaacccaaagtttattcttgcctccttgtgcttttaatatgtactgtttcttctactcagaatgctttgccccccctcttttcaacctgaataactcctattcgaccttcaataccttagttccaatgctatctcccctgagccttttccattgctctcgtcttttcataaatatttctaaagcaatgtttc

SEQ ID NO: 109951 - DNA, 566 bp, Homo sapiens
gagacacttgtagggcatccaactagagattataagtaattagcctcataaatcagaagttcagaatagaatgttgggctggagataaagagtttggaatctttcctactccatttcatttttcacattgcttttaaaattctcttttaaacacagatctaactatatgagactattaactataactattaactattaactataacacctatttaaaatccaattgttgcctcgtcagtattttcataatacagttgaaactctaacatggtggtgtacaaatacctctaacatctagtccttaccaaactttctggactaacacctcaatttctacttatatttcagtcggatacaatttctgtctgttcactgaacccaaagtttattcttgcctccttgtgcttttaatatgtactgtttcttctactcagaatgctttgcccccyctcttttcaacctgaataactcctattcgaccttcaataccttagttccaatgctatctcccctgagccttttccattgctctcgtcttttcataaatatttctaaagcaatgtttc

SEQ ID NO: 109952 - DNA, 610 bp, Homo sapiens
agtttaggtaagtattctatgtgtacttgaaaactatttgaattctgcagttgttggctgtaattttctgtatttgtcaattagatcaatgtagctagtggaggtgttcagacttcctgcattcctactgagtgttttgtctgcttattctgctggttattgagaggggggatgtgctaaaatctccaatgatgagagtagatttaaattctatcaatttttctttataatttttawaactatgttttttagatgtgcaaaaatttgggattgttatgtcctcctgttgaattgatcttttagcttatgaaatatccttcctttgctctcatagtattttttccttaactatccttaaagaaatataatttgtgtgatagtaatacagcgatatcagctttcttccactgtttgcccagtatactttccccttcttttcctttttaacctatccacttctttatgtttaaagtgtgtctcttgtaaatagtatacgataggtcttttattatctagtctaataatctttgcttttaatcatagcattaaggccacatgcatttaatgcaattactaatatagttgggttaaatttcataatgttgcttct

SEQ ID NO: 109953 - DNA, 608 bp, Homo sapiens
ttgaaaactatttgaattctgcagttgttggctgtaattttctgtatttgtcaattagatcaatgtagctagtggaggtgttcagacttcctgcattcctactgagtgttttgtctgcttattctgctggttattgagaggggggatgtgctaaaatctccaatgatgagagtagatttaaattctatcaatttttctttataatttttaaaactatgttttttagatgtgcaaaaatttgggattgttatgtcctcctgttgaattgatcttttagcttatgaaatatccttcctttkctctcatagtattttttccttaactatccttaaagaaatataatttgtgtgatagtaatacagcgatatcagctttcttccactgtttgcccagtatactttccccttcttttcctttttaacctatccacttctttatgtttaaagtgtgtctcttgtaaatagtatacgataggtcttttattatctagtctaataatctttgcttttaatcatagcattaaggccacatgcatttaatgcaattactaatatagttgggttaaatttcataatgttgcttcttgtttcccatttattctacttgtt

SEQ ID NO: 109954 - DNA, 608 bp, Homo sapiens
ttgaaaactatttgaattctgcagttgttggctgtaattttctgtatttgtcaattagatcaatgtagctagtggaggtgttcagacttcctgcattcctactgagtgttttgtctgcttattctgctggttattgagaggggggatgtgctaaaatctccaatgatgagagtagatttaaattctatcaatttttctttataatttttaaaactatgttttttagatgtgcaaaaatttgggattgttatgtcctcctgttgaattgatcttttagcttatgaaatatccttcctttgctctcatagtattttttycttaactatccttaaagaaatataatttgtgtgatagtaatacagcgatatcagctttcttccactgtttgcccagtatactttccccttcttttcctttttaacctatccacttctttatgtttaaagtgtgtctcttgtaaatagtatacgataggtcttttattatctagtctaataatctttgcttttaatcatagcattaaggccacatgcatttaatgcaattactaatatagttgggttaaatttcataatgttgcttcttgtttcccatttattctacttgtt

SEQ ID NO: 109955 - DNA, 610 bp, Homo sapiens
agtttaggtaagtattctatgtgtacttgaaaactatttgaattctgcagttgttggctgtaattttctgtatttgtcaattagatcaatgtagctagtggaggtgttcagacttcctgcattcctactgagtgttttgtctgcttattctgctggttattgagaggggggatgtgctaaaatctccaatgatgagagtagatttaaattctatcaatttttctttataatttttaaaactatgttttttagatgtgcaaaaatttgggattgttatgtcctcctgttgaattgatcttttagcttatgaaatatccttcctttgctctcatagtattttttccttaactatccttaaagaaatataatttgtgtgatagtaatacagcgatatcagctttcttccactgtttgcccagtatactttccccttcttttcctttttaacctatccacttctttatgtttaaagtgtgtctcttgtaaatagtatacgataggtcttttattatctagtctaataatctttgcttttaatcatagcattaaggccrcatgcatttaatgcaattactaatatagttgggttaaatttcataatgttgcttct

SEQ ID NO: 109956 - DNA, 270 bp, Homo sapiens
cctgcttttggggcctgcctctgctgccaactcgctgtgtgaccttgggtaacgtggccgccctctctgtaactgagagcacaggattaggcaggctttgaggctctgaggtgaccctgctccccctcaccccgtcatgctctgtgccttccacggcctgcctcctggccctgctcgggccgtgtccttctggaatgcccttcttgctgccttgtgggcagtcakactgactcgaatccagcaggacttaactgaccttcccagggaatg

SEQ ID NO: 109957 - DNA, 642 bp, Homo sapiens
aatttacaggctttcacagtcacttcttgatcattccacacaagagtcctacaacgcggtyaggacggcttttttacagatgaggaaactgaggcccagagaagttaatgtgtggggggccacctcagccagttagaatcagagctgggcttcgaatcagggtcccagccccccagcacagtgccctgcccctgcccacacctggaagtcatgagtgtgtcctcctagtccagcagctcttagtgcaggagcctatgggtgctttgcaggctggaatcaggtcagcccttgctctatcccattaagcacggaacaggcagccatgggtccctgtgtgagtgtggctcgatgtcccttagccccttcctgttatggtggctataaaagccagcatgtttgtcacagatttggaagaaaacagcaaagcataaagaagcaatttgaaattgctcattcattctgctatccaggatggcaaccttgatacatgtgtgtatttccttccagccctttttctgtgtaatttaccaaattgagatcacagcatctatatggttctgtagccagcttttgtccactagactacagtggtgagcatgttccaatatccttgattagtctttgaagcctggcattcaatgg

SEQ ID NO: 109958 - DNA, 645 bp, Homo sapiens
aaccaacacaggatggtgcttgattaaagtagacacatagcacaatggaatagaatagagaacccagaaacatatctacacacctacagtgaactcatttttgacaaaggtgccaagaacatacactgggaaaaagacagtcttttctataaatagtcctgggaaaactggacatccatatgcagaataatgaaactagacccctatctctcaccatataaaaaataaaataaaaatggatgaaagactgaaatctaacacttcacactatgaaactactacaagaaaacactggggaaaatctccaggacattagtctgtgcaaaaatttcttgagtaataccccaaagcaaaaatgaagaaatggtatcacatcaagttaaaaagcttctgcagagaaaagaatgcaatcaacaaaataaagagacaacccacagaatgggagaatatttgcaaactacccatctgacaagggattaataaccagactatataaggggctcaaacaactctataggaaaaaaaaagcaaactaataatgttttcaaaatacaggcaaaagatctgaatakacatttctcaaaggaagacatatacatggaaaacaggcatatgaaaaggtgttcaacatcattggtcaccaga

SEQ ID NO: 109959 - DNA, 506 bp, Homo sapiens
taacaggcatatcaaaagcagtcaatacctcaattacatctacaagctccgctttttgagctgaagtatacggtgtctggaaaactttaccttttgatccagaataagaagctttaccattactagacccatctgtgaaacaacgaaaacgcttagcaggctgcaggttgtttactgcaggaattgtaaatgcaaaccgttcacagtcttgctcagctaaaagggtagtaaagaaacagtcttttaaatctgtgactattaaaggccaattttttggaattatagtaggagaaggcaatcctggctgttatgtttccataggttgtatttctgaattgatggctcttaagtcagttaacattctccatttacctgattttttcttaattatgaaaactggagaattccaaggggaaaattttggagstatgtgcccattttctaattgttcagtaactaatttctctaaagcatccagtttctctttgcttagcagccattattct

SEQ ID NO: 109960 - DNA, 403 bp, Homo sapiens
gctcctcacactcagaatttgaagttagttttttacactcatcctcctcttcctcatctgaatctgcctcatcatctgtttgaaatggctcaagggctgcctttattagtgcccacactgaccatatataaactggaatttctgctccatctttatatgcctwttaaaaatctcttccaattctctcccattcatccaacttcatagtccctttgctctggaaaccatgggcaaaactgctttactgtactaaagagtgataacaaattctaagtactaaatttcactccccatctttgtatgtccgcgggtgtcttttgatgatgtgtcctctgctttcatatgctctagccttccttcacggggtctttgtcaccccatgttgggcaccaggaatgttggg

SEQ ID NO: 109961 - DNA, 545 bp, Homo sapiens
ctcctcacactcagaatttgaagttagttttttacactcatcctcctcttcctcatctgaatctgcctcatcatctgtttgaaatggctcaagggctgcctttattagtgcccacactgaccatatataaactggaatttctgctccatctttatatgccttttaaaaatctcttccaattctctcccattcatccaacttcatagtccctttgctctggaaaccatgggcaaaactgctttactgtactaaagagtrataacaaattctaagtactaaatttcactccccatctttgtatgtccgcgggtgtcttttgatgatgtgtcctctgctttcatatgctctagccttccttcacggggtctttgtcaccccatgttgggcaccaggaatgttggggtgatcagacccaacactaggtcatgggggtgatgaagtccggcagagtcaaaggaatgagaaaaagacagtttgagagagaaagtgggcccaggagaccatcacgagtgtggagtctgcaaagtccccaagctctgggagcc

SEQ ID NO: 109962 - DNA, 545 bp, Homo sapiens
ctcctcacactcagaatttgaagttagttttttacactcatcctcctcttcctcatctgaatctgcctcatcatctgtttgaaatggctcaagggctgcctttattagtgcccacactgaccatatataaactggaatttctgctccatctttatatgccttttaaaaatctcttccaattctctcccattcatccaacttcatagtccctttgctctggaaaccatgggcaaaactgctttactgtactaaagagtgataacaaattctaagtactaamtttcactccccatctttgtatgtccgcgggtgtcttttgatgatgtgtcctctgctttcatatgctctagccttccttcacggggtctttgtcaccccatgttgggcaccaggaatgttggggtgatcagacccaacactaggtcatgggggtgatgaagtccggcagagtcaaaggaatgagaaaaagacagtttgagagagaaagtgggcccaggagaccatcacgagtgtggagtctgcaaagtccccaagctctgggagcc

SEQ ID NO: 109963 - DNA, 545 bp, Homo sapiens
ctcctcacactcagaatttgaagttagttttttacactcatcctcctcttcctcatctgaatctgcctcatcatctgtttgaaatggctcaagggctgcctttattagtgcccacactgaccatatataaactggaatttctgctccatctttatatgccttttaaaaatctcttccaattctctcccattcatccaacttcatagtccctttgctctggaaaccatgggcaaaactgctttactgtactaaagagtgataacaaattctaagtactaaatttcactccccatctttgtatgtccgcgggtgtcttttgatgatgtgtcctctgctttcatatgctctagccttccttcacggggtctttgtcaccccatgttgggcaccaggaatgttggggtgatcagacccaacactaggtcatgggggtgatgaagtccggcagagtcaaaggaatgagaaaaagacagtttgagagagaaagtgggcccaggagaccatcacgagtrtggagtctgcaaagtccccaagctctgggagcc

SEQ ID NO: 109964 - DNA, 277 bp, Homo sapiens
tgattcacaaatccaagcctatcaaatacatcataaataagttacacgtttaattttttttgaaattagggatcatkatatgaaagttatcagaaacaaaactgtcactaatgtttaaaaagagaagaaaaaacctgaacaaatagattcagagaaggccttgaagagagggttctcatgcttctaggcctgataaaaactattacaaaataccacaaaaaccacaaccttgcacaaaggccatagcaaccttacacaaaatacacttctgtgagga

SEQ ID NO: 109965 - DNA, 334 bp, Homo sapiens
tacggtggttcctcaaaaaaattaagaaagtagaactaccatatgatctagtagtctcacttcaggttatttatctgaaagaatggagattgggatgattctcaggctcattgcagcattatttacactaattaaaatgtggaaataaggttaatgtctattggcagatgaaaagataaagaaaatgtggtatattcatacaacggaatattattcagctttaaaacaagaaakcccggcaatatgcaacatggatgaacctagaggacattaatgctaagtaaagtaaatcagtcacagaaggacaaactgtatgattccacttgtataaagt

SEQ ID NO: 109966 - DNA, 511 bp, Homo sapiens
tatttttttaattgggatcttagaaattctgttgttgagttrtgggatattaagcttttatcagatacacattttgattttatcagatacatattttctcacatattatgggttgtcttttcactcccttgatagtatcctttgatgcataaagggttttttattttgattaaatctaattttcgtgtattttcttttgttatctgtgcttttctgtcatatttcaaaatacacttaaaactcaaaggtcataaaggtttaccgtgtgttttcttctaagagttacatatttttagtccttacatttaagtcttttattaatttagaattaatttttgtatatactgcaaggtaggggtctaacttctctcttgtacactgacatccagctgttgaagagagtgttctttcctcccttgactagacttggccaccttgttgaacagtcattgaccatatatgtgaggactaacttgtaggatctcaaatctgttctgttgtattggtctga

SEQ ID NO: 109967 - DNA, 511 bp, Homo sapiens
tatttttttaattgggatcttagaaattctgttgttgagttgtgggatattaagcttttatcrgatacacattttgattttatcagatacatattttctcacatattatgggttgtcttttcactcccttgatagtatcctttgatgcataaagggttttttattttgattaaatctaattttcgtgtattttcttttgttatctgtgcttttctgtcatatttcaaaatacacttaaaactcaaaggtcataaaggtttaccgtgtgttttcttctaagagttacatatttttagtccttacatttaagtcttttattaatttagaattaatttttgtatatactgcaaggtaggggtctaacttctctcttgtacactgacatccagctgttgaagagagtgttctttcctcccttgactagacttggccaccttgttgaacagtcattgaccatatatgtgaggactaacttgtaggatctcaaatctgttctgttgtattggtctga

SEQ ID NO: 109968 - DNA, 598 bp, Homo sapiens
gttgttgagttgtgggatattaagcttttatcagatacacaytttgattttatcagatacatattttctcacatattatgggttgtcttttcactcccttgatagtatcctttgatgcataaagggttttttattttgattaaatctaattttcgtgtattttcttttgttatctgtgcttttctgtcatatttcaaaatacacttaaaactcaaaggtcataaaggtttaccgtgtgttttcttctaagagttacatatttttagtccttacatttaagtcttttattaatttagaattaatttttgtatatactgcaaggtaggggtctaacttctctcttgtacactgacatccagctgttgaagagagtgttctttcctcccttgactagacttggccaccttgttgaacagtcattgaccatatatgtgaggactaacttgtaggatctcaaatctgttctgttgtattggtctgaaagtctattggtcttattccagtaccacactctcttgattactgtagatttgtagtaggctgtgaaactgaaaaatgtgagttttccaatgttctttttcaagactgttttgtctgt

SEQ ID NO: 109969 - DNA, 529 bp, Homo sapiens
ttttctcacatattatgggttgtcttttcactcccttgatagtatcctttgatgcataaagggttttttattttgattaaatctaattttcgtgtattttcttttgttatctgtgcttttctgtcatatttcaaaatacacttaaaactcaaaggtcataaaggtttaccgtgtgttttcttctaaragttacatatttttagtccttacatttaagtcttttattaatttagaattaatttttgtatatactgcaaggtaggggtctaacttctctcttgtacactgacatccagctgttgaagagagtgttctttcctcccttgactagacttggccaccttgttgaacagtcattgaccatatatgtgaggactaacttgtaggatctcaaatctgttctgttgtattggtctgaaagtctattggtcttattccagtaccacactctcttgattactgtagatttgtagtaggctgtgaaactgaaaaatgtgagttttccaatgttctttttcaagactgtttt

SEQ ID NO: 109970 - DNA, 576 bp, Homo sapiens
tttttattttgattaaatctaattttcgtgtattttcttttgttatctgtgcttttctgtcatatttcaaaatacacttaaaactcaaaggtcataaaggtttaccgtgtgttttcttctaagagttacatatttttagtccttacatttaagtcttttattaatttagaattaatttttgtatatactgcaaggtaggggtctaacttctctcttgtrcactgacatccagctgttgaagagagtgttctttcctcccttgactagacttggccaccttgttgaacagtcattgaccatatatgtgaggactaacttgtaggatctcaaatctgttctgttgtattggtctgaaagtctattggtcttattccagtaccacactctcttgattactgtagatttgtagtaggctgtgaaactgaaaaatgtgagttttccaatgttctttttcaagactgttttgtctgtcagatcctttgaatttttgtatgattttagaatgagtttctttgtttctgcaaaaatgcctttgggattttgacggtattgcattgaatctgtagagtacttcag

SEQ ID NO: 109971 - DNA, 598 bp, Homo sapiens
gttgttgagttgtgggatattaagcttttatcagatacacattttgattttatcagatacatattttctcacatattatgggttgtcttttcactcccttgatagtatcctttgatgcataaagggttttttattttgattaaatctaattttcgtgtattttcttttgttatctgtgcttttctgtcatatttcaaaatacacttaaaactcaaaggtcataaaggtttaccgtgtgttttcttctaagagttacatatttttagtccttacatttaagtcttttattaatttagaattaatttttgtatatactgcaaggtaggggtctaacttctctcttgtacactgacatccagctgttgaagagagtgttctttcctcccttgactagacttggccaccttrttgaacagtcattgaccatatatgtgaggactaacttgtaggatctcaaatctgttctgttgtattggtctgaaagtctattggtcttattccagtaccacactctcttgattactgtagatttgtagtaggctgtgaaactgaaaaatgtgagttttccaatgttctttttcaagactgttttgtctgt

SEQ ID NO: 109972 - DNA, 598 bp, Homo sapiens
gttgttgagttgtgggatattaagcttttatcagatacacattttgattttatcagatacatattttctcacatattatgggttgtcttttcactcccttgatagtatcctttgatgcataaagggttttttattttgattaaatctaattttcgtgtattttcttttgttatctgtgcttttctgtcatatttcaaaatacacttaaaactcaaaggtcataaaggtttaccgtgtgttttcttctaagagttacatatttttagtccttacatttaagtcttttattaatttagaattaatttttgtatatactgcaaggtaggggtctaacttctctcttgtacactgacatccagctgttgaagagagtgttctttcctcccttgactagacttggccaccttgttgaacagtcattgaccatatatgtgaggactaacttgtaggatctcaaatctgttctgttgtattggtctgaaagtctattrgtcttattccagtaccacactctcttgattactgtagatttgtagtaggctgtgaaactgaaaaatgtgagttttccaatgttctttttcaagactgttttgtctgt

SEQ ID NO: 109973 - DNA, 489 bp, Homo sapiens
tactcctgtaatccttttgtatttctgtaaagttggtagtaatggctctgctttcatttattattttaataattagtcttccatcttttgctcagtcaatatagtgaaaggcttgatctttcaaagaatctacattttttcattctactgctctccaaccttctattttattgatttatgctctaattatgctctttattatttctttccttctgctagctttggatttagtcttccacctggatttattttgggagtgatattgatgtaacttcmtggaaataatactagatagaaagttagcggatagattctctatctgatgagagtttggggcaagtcgagtaccaggttaccaagttttatttttttctctgacccaaaaaacaatttggcagccggtgagaaactctcacagctctggatgtgagtttaggacactgcatttctaccattcaatttcttactacttttttgcacagggatcat

SEQ ID NO: 109974 - DNA, 229 bp, Homo sapiens
gctgtaccattttacattccaaaaagcaatgcatacagcttccaatttctctatagcmttgctgacagttaatattttctgtttatgtattgtatttttatagtgtttgaaattaatctgaggctttttgctgataccaaaatattaggaaaggttttccaaaaataatactgcttattataaaggattttacgtgttacttgatgccctgtgatctgttttctaagta

SEQ ID NO: 109975 - DNA, 563 bp, Homo sapiens
tgttcctgtgattctgacatcatcagcctctgcacctctgtattcccttctgccacatgttgcctgctctccatgactttggtaagagcttccttgtgtatctggatgatgtccaagatgtaggtcttgtgtccctgagacagcactaacaggcccatggctgggtcggggtcctgcctggactgattggcaaagagctcactgacaatgtggaagatgctctttcttaaagcctgtcaccactcattggctgtgaagttgacctgagagccctgttgtccatcttcttggtgaagcacttgaagccgtcaatcttgctctcccactcctaaaggttgagtgtcactctgagggagggctcagggccaggaagaatttggcactcaccatctcatccttctcagccttcctcttkccctgtctccaggctgtctcttcagtgctggtggggtacatcaggaagtgacaaaaaatgtggcactgtgcctgcacccagacgctggttgtgtggttcatctaccagattgggccctttctgcacttgaacatagatccacttcacc

SEQ ID NO: 109976 - DNA, 378 bp, Homo sapiens
tgagggacaaacattcagaccccaagagcagtgttctgaaatcctatgttaagggaaacattgagaccccagcatgaatgttctggaatcctatgtgagggacaaacattcagaccacagcaggagtgttctggaatcctatawgaggtataaacattcagaccctcatagcagtgttctggaatcctatgtgagggagaagcattcagagcacagcaggagtgctctgaaatcctatgttagggacaaacattcagaacctcgtaacattgtgctgggaacctatgtgagggacagacatttagaccctcgcagcagtgttctggaatcccatgtgagggtcaaacattcagatcctcgcagtagtgttctggaatt

SEQ ID NO: 109977 - DNA, 379 bp, Homo sapiens
tgagggacaaacattcagaccccaagagcagtgttctgaaatcctatgttaagggaaacattgagaccccagcatgaatgttctggaatcctatgtgagggacaaacattcagaccacagcaggagtgttctggaatcctataagaggtataaacattcagaccctcatagcagtgttctggaatcctatgtgagggagaagcattcagagcacagcaggagtgctctgraatcctatgttagggacaaacattcagaacctcgtaacattgtgctgggaacctatgtgagggacagacatttagaccctcgcagcagtgttctggaatcccatgtgagggtcaaacattcagatcctcgcagtagtgttctggaattc

SEQ ID NO: 109978 - DNA, 579 bp, Homo sapiens
ctaataacgaggccttatgtcaccagatgcccctgactgggaccctagtgagtagaccccactgaaccggcaccaaatgctgagatccccgctgaccaggtcaccctgtagaccggtgctacaaaagtcaccactgaccaagtcctctctgaccaggacamtacagattaggtcccactgacaaggctgccctgaccagggccccactgacaagggcctcactgatgaggacacgcccaccagggtctgctgactaagtctcatgtgcccagtcctccactgaatagcaccccttgacctggtcaccagtgccccagcccatgctgaccaggccagcactaagccccagctgaccaggtctccactgatcaagccccacagcccaggtttgcactgaccagacaccaaacaactggcagccaataggtccccactcaccaaaacccccactactagaccccactaatgagaccctctctaagcagacccctgctgaccacgatcccactaaatagtcctcactgacctaggtccactgaccaggcccacactgatcaggcccctcctaaccacaccgga

SEQ ID NO: 109979 - DNA, 579 bp, Homo sapiens
ctaataacgaggccttatgtcaccagatgcccctgactgggaccctagtgagtagaccccactgaaccggcaccaaatgctgagatccccgctgaccaggtcaccctgtagaccggtgctacaaaagtcaccactgaccaagtcctctctgaccaggacaatacagattaggtcccactgacaaggctgccctgaccagggccccactgacaagggcctcactgatgaggacacgcccaccagggtctgctgactaagtctcatgtgcccagtcctccactgaatagcaccccttgacctggtcaccagtgccccagcccatgctgaccaggccagcactaagccccagctgaccaggtctccactgatcaagccccacagcccaggtttgcactgaccagacaccaaacaactggcagccaataggtccccactcaccaaaacccccactactagaccccactaatgagaccctctctaagcagaccyctgctgaccacgatcccactaaatagtcctcactgacctaggtccactgaccaggcccacactgatcaggcccctcctaaccacaccgga

SEQ ID NO: 109980 - DNA, 489 bp, Homo sapiens
ctttcccacaagactttagaccccatgaaagtggatattgttgttcatcattttatctctaatgcctggcacctactatgtgattgatgtataatttttgcataaataaataagtaaataaataactgcttgcctgaatgcatccatgttatgcaacaggactacgggctgtatggtaatgaaagcaaaaaaaaataagtacatgttgcacactgacatcatcctatgctcagcaatacctgccattgaatctaagcttctgtgagattcaatatggttgactgaatatcattttttgtgctcaaaaaagtttaagccatcacttgctctacatgagaggtacacaaaccatgcactgattgaaaatatagatgaagtagccattttaagacaaaamaaactgagctgatagagctgaaaaactcacttcaagaatttcataatactttcacaagtattaacagcagaatagatcaagctaaggaaaga

SEQ ID NO: 109981 - DNA, 606 bp, Homo sapiens
cccaaggagaatctgagctcagacaggcctaaccgtggctccacctgatggtccttccctaccaatgctggtagctgaagacaaaggtcataatctcgtgggagttctaaggccttgcccaccacctgatcctcccttatactaccacagctgatcctctcttgaaagcaccacctcctggcaggaggccaaccagtacaaaactagtgcattaaacaactacaactaaggagcctcacagagtccagtttactctcttgccacctccactggagaaagtgcacgtrtccacagctaagagaactgaagatggttcatatcacaggactctgcagacaccccccagtaccagcccagagcatggtagccctgctgggtggctagatccagaaaataaataaaaattaatacagttcagctctcaaaaagatatatccctaggaaaaaggggagagtattacatcaagggagcaccccagaggacaaaagaatctgaaaaccagcctcaaatctcagatcttccttcagacatagcctacccaaatgacaaggaaccagaagaataattctggtaagataaaacaagttctttagcaaccccccaag

SEQ ID NO: 109982 - DNA, 563 bp, Homo sapiens
tgattttaaactttgaatacagcacaactttgagttgttcacatttttaagaggtgcacaagtttccctgacatcacttagcaactayctgcagtagttgtgccttaacactctcagtttcacatggtaatatagaagaccaacaaacactagttttgttccttccaagagagtttaccaaaatactttttagaaatagctgtgtttcactgttcacggggcggtcaagctgtgctgcaggacagaatataaaatgagtgcggccaaggttaacaagcagatgaatgccacccagggaagagacctgcatgatttggggtcactgagaaccgaagacatgtacactaggctccagtggtatggtacagctatttatttacagaaaaagaagaaaagcagtgcaagactttgtttccccatggccagagaatccactccatagccgatgtggttagtgtggctgcaggtccctcactttgtactgcactaaagggaccatgacctcttccccttgggtctgaaatatagaaagctgggggagtgccaaaggatcactgaagttt

SEQ ID NO: 109983 - DNA, 563 bp, Homo sapiens
tgattttaaactttgaatacagcacaactttgagttgttcacatttttaagaggtgcacaagtttccctgacatcacttagcaactacctgcagtagttgtgccttaacactctcagtttcacatggtaatatagaagaccaacaaacactagttttgttccttccaagagagtttaccaaaatactttttagaaatagctgtgtttcactgttcacggggcggtcaagctgtgctgcaggacagaatataaaatgagtgyggccaaggttaacaagcagatgaatgccacccagggaagagacctgcatgatttggggtcactgagaaccgaagacatgtacactaggctccagtggtatggtacagctatttatttacagaaaaagaagaaaagcagtgcaagactttgtttccccatggccagagaatccactccatagccgatgtggttagtgtggctgcaggtccctcactttgtactgcactaaagggaccatgacctcttccccttgggtctgaaatatagaaagctgggggagtgccaaaggatcactgaagttt

SEQ ID NO: 109984 - DNA, 581 bp, Homo sapiens
aaaagttctattatatcaaaactgaatcaaaagttaagaaaaaggtcatgcacagctgttttgattgtaattgcattayttttttttaaatttaaaatataattgttaggactaatcatccttatattgttatttactacatagttctgtaaaagtagtgttttattatatttttggtagttgatttttctttcctctagcaactttatttcaatttcctgtacatatttgagtttgtgccccctgttttatagcatcacaatggaagtgctactctgctggagtgaggaaattctatttggagtatgggacaaggtactgatttcccactgtagtaggataatggtttcttaaatatacaagtcttgttgaataggaggggagaaatgtgattcaacagataaaccacgggtatttataatcagggtgtggttaccaaaaagtctgatcctaaggtgtggcagaccaagtgccaggcagactcttgggaagcatcaaggaccacccagttccctaactcaaggagcccactgcatttacaatcaacaaacacaatttatgctcgtatgattttggcctac

SEQ ID NO: 109985 - DNA, 581 bp, Homo sapiens
aaaagttctattatatcaaaactgaatcaaaagttaagaaaaaggtcatgcacagctgttttgattgtaattgcattacttttttttaaatttaaaatataattgttaggactaatcatccttatattgttatttactacatagttctgtaaaagtagtgttttattatatttttggtagttgatttttctttcctctagcaactttatttmaatttcctgtacatatttgagtttgtgccccctgttttatagcatcacaatggaagtgctactctgctggagtgaggaaattctatttggagtatgggacaaggtactgatttcccactgtagtaggataatggtttcttaaatatacaagtcttgttgaataggaggggagaaatgtgattcaacagataaaccacgggtatttataatcagggtgtggttaccaaaaagtctgatcctaaggtgtggcagaccaagtgccaggcagactcttgggaagcatcaaggaccacccagttccctaactcaaggagcccactgcatttacaatcaacaaacacaatttatgctcgtatgattttggcctac

SEQ ID NO: 109986 - DNA, 222 bp, Homo sapiens
cctgcttcggctcatgcttggtgcgctgcatccactgtcttgcacccactgtccgacactccccagtgagatgaacccattacctcagttggaaatgcagaaatcacccatcttctgcgtctctcatgctgggagctgtagactggagccaagatggccgaataggaacagctccagaattactattgttkaaatgtccacattacccaaagcaatgtacag

SEQ ID NO: 109987 - DNA, 559 bp, Homo sapiens
tggaagaagtctctctctttgctcttgtcccctccccaaaggtaggctggagtwgcttgtgaataagttcaatacttgagttgggaacaggggtactgtttcttggctcttctgcttccaagggtggggctttctgaatgctcctcatactctctccatggcagctgaattttcccttgtatgtgtagcggtaaggtggtttggggagggaacagatttcctgccacattactctccccagcattgtgttttgtgcctatttcacagtgacagcttatccccagtctaaacctacactgcctagtgagtctctctctgtcttctcttgcactgtccccaagctttctcatgagcacccagtggaggaaattggaaaagagtgagtacaaattcccccaaatcctattgtgttagaggctcccagctcacataagggctttaacaaatagctaaaatctgagttgttttctgattgtctgcctgtatagcagctaccgtttcttcccctggtctgacaaatgtcagttaacatcctcacatcctttggaatttacttcac

SEQ ID NO: 109988 - DNA, 530 bp, Homo sapiens
agcaaatggagccatttgcccttggggccaagctcattttaccaatcacaaaatacaaaaatacaaaaaataaaaaagaacaaaagactttgtgttaaatatttttaaaatggttaactgtgtttaaaatgattaaaattatttgagtgaggagaggtgaatatttcagaaccctcaaagcacaagtcctttgaayttatttatttagctttgtagagttttgtgctttcagcaatttataggtatagaatcacatacatggctgctcatgcaaacatgcacacacacatgcaaacaaggcatcacacacctagagtcacagaaccaatatattctatatattctctcactttcctggaactacaaccatgggaacaaattcttttacgtagggctccagcatcataggagaactgggggaacttggcatgggttattgtccctctgtggattccatactatggaacatcaagatggtgatataggtctcccttgcccttccttattatgggtgttgtctgttggagttt

SEQ ID NO: 109989 - DNA, 598 bp, Homo sapiens
aagaaatggtgataattggagcaaacttggaagcctggttttgacgatggcaatgccaacatcattccctcagtgctaaatctctcattccaggcttttacttcagagaaaaattagcccatatttaggccacagtatttgatgattcaattgtaatggcaaattgacctgtggcccacgtagtgcattttaaaaattaaatattttctattacgtatacctgatttgtaaaattaagtaaaaataataacgaaacacatatccatctatatatctttctaattatttaaaaacatagaaaaaaagttgtgatatgcatgtttcataaacctatcaaacaatacaaagtaaataacaattaacattcataygacaagtcctttccagatatgcactccagctagaaaaataaatagaagaatcaagactccatataatgttttcccttttgtttagatttcagtaagatattttagaattatgcctctagacatataacctgtgttttgctcattttctaactatttttactgatagatgacatattttatattgataatttatttaaatcaaaagctgtgtagcttacaaaaaattg

SEQ ID NO: 109990 - DNA, 630 bp, Homo sapiens
ttattaaatgtttttgattaaatatttaattcttgggaattacttaccacattgttgaagaatctttgttagtttctttttggaatcattattattgcattatttaacataatattgaccttcacaaacccatttaaaattaaatagccatatgttttattgtatattaggtgattcattaaaaaatctcagtaaggtctttttatattttcacaggtctcatgaagtgaaggtcaaaagattgtttaataattattggatgagatgctatgtattagtccattttcatactgctataaagaactgcccgagacygggtaatttatagaggaaaaaggtttaattgactcacagttcagcatggccggggaggcctcaggaaacttacaatcatggcggaaggtgaaggcgaagcaaggtaccctcttcataaggcaggaggaaggagaagtgcccagtgaaggggaaagagccccttataaaaccatcagatctcgtgagaactcactcactatcccaagaacatcatgggggaaactgcccctatgattgcactacttccacctggtctctcccttaacatgtggggattatggggattacaattcaaaatgagatttgggtggggat

SEQ ID NO: 109991 - DNA, 570 bp, Homo sapiens
gtgagtccatttcatctcatctcagcagtatctttaactttacaatattaatctatgtataactcctctatataattatattaatgttttaattaaataagaaattatcaaaaggctttactggaactctgatgaaatatataaagagctattgatccaaatcsaatttaatatagaagaaagaagaaagaagcaacataggataactaatggatagttgcaatttgaataaattgaattgttttaaagatggggaagcattattgagaattaatggcaaaatcaaattatagaaaaatttaaaatatgtatgttagatcacttaaatccatccataatgagcagattttaattaagcacttactatgcatacaccaagtaataagttaagcactttctatctccaagcctggctacagaattgcagggaaaatgggaacagagggagtatactagacaacacagaaggcagaggagaggagccagtgttacggagccatgtgctgtttgactcaaaacatatgcctcccctcacctctaaccaggcaagcataggagacagagtccctg

SEQ ID NO: 109992 - DNA, 570 bp, Homo sapiens
gtgagtccatttcatctcatctcagcagtatctttaactttacaatattaatctatgtataactcctctatataattatattaatgttttaattaaataagaaattatcaaaaggctttactggaactctgatgaaatatataaagagctattgatccaaatccaatttaatatagaagaaagaagaaagaagcaacataggataactaatggatagttgcaatttgaataaattgaattgttttaaagatggggaagcattattgagaattaatggcaaaatcaaattatagaaaaatttaaaatatgtatgttagatcacttaaatccatccataatgagcwgattttaattaagcacttactatgcatacaccaagtaataagttaagcactttctatctccaagcctggctacagaattgcagggaaaatgggaacagagggagtatactagacaacacagaaggcagaggagaggagccagtgttacggagccatgtgctgtttgactcaaaacatatgcctcccctcacctctaaccaggcaagcataggagacagagtccctg

SEQ ID NO: 109993 - DNA, 483 bp, Homo sapiens
accataaggataaagacctttatgatgattcatttccacttaatgaatagtaaacatattatctcttccttatgattttcctaagaaaattttattttctctagcttacttcattgtgagaatacaatatataatacatacaacatacaaaatatgtattgactgcttatgttataggtaaggcttctggtcaacaataggctattagtagctaagtttaaggggaagcaaaargtatacataggttttcttgatttttccattgaccattgcttatcataaatgcctttcagaagaactgggttggcctgtcaactctttacacaagtacctctgatcctctttaaaatctccatgttacttgaggaaaaacggaagctacaaaagtcaaacgataaaggaattattctcttcattcccaagatgtgttacatatggtggcagtggggggtggggaagtggggaaagagagaaagcgtgcag

SEQ ID NO: 109994 - DNA, 524 bp, Homo sapiens
gagacttgcttctttccctcaaaaaaatgccaaattgttgcatgtcaataatccctttcctttcatggctaaatagtttttccattgtatagttgtaccacagtttgtttatctagtcactcattaaattagattgtccccattttcagtcattatgagcagagtagatagaaatattaatgtacacaggttttgtgtgaacataaaatatcagttaagtaaatagaaatggaatggatgagtcatatgttttttatatgtatacatrtatgtatacatatatatatctatatgtttaaacttataagaagttgctagattgttttccagagtgtatgtactattttatatttccagaagcaatgtatgggacttctagctgctctgcatcctcagcaacacttagtatttttatttcagccattccaataggttatgtaagaacattgcattttggttttaatttctatttttctaatgggtagtgatgatgactatcttatttgcttatttgtcactcatat

SEQ ID NO: 109995 - DNA, 524 bp, Homo sapiens
gagacttgcttctttccctcaaaaaaatgccaaattgttgcatgtcaataatccctttcctttcatggctaaatagtttttccattgtatagttgtaccacagtttgtttatctagtcactcattaaattagattgtccccattttcagtcattatgagcagagtagatagaaatattaatgtacacaggttttgtgtgaacataaaatatcagttaagtaaatagaaatggaatggatgagtcatatgttttttatatgtatacatgtatgtatacatatatatatctatatgtttaaacttataagaagttgctagattgttttccagagtgtatgtactattttatatttccagaagcaatgtatgggacttctagctgctctgcatcctcagcaacacttagtattttyatttcagccattccaataggttatgtaagaacattgcattttggttttaatttctatttttctaatgggtagtgatgatgactatcttatttgcttatttgtcactcatat

SEQ ID NO: 109996 - DNA, 638 bp, Homo sapiens
tttattgagaatacattattaaaccaaatgtacmttaaatgagcaggaaaaaaaaagaaaattcatgcaaggtaaaagaagtaattagaaatttgagggtcagctgacctactcaaatctatagtgaaaacttacaacagaaattcccaatctttacacttccagtgaccccggtactactttttccccctcccctttccacccccatttggatttcatatcttattttccaaacaagcagcatttcaagtaacaacctgtgtaaccttcacacagggatatgcaggacttctcttactctttcgggcaacccagattaggaagcaatgttagaaatccattttgcttctgcaacggttatccaaactcttttaaacattaaacctgtgctttcactcataaacattctcatttctaagcaaacaggccacaatttcacaattaggaaataaaattccttttaaggaaaaaaaaatctgctttcttaactatatgcctgacttccttctacaagataaagcactgattcaattctctgaatatattgccttagcaaaacaaacatatacaaaaagcagacaggccaatgaaaccttatttcctccaatataaattcattttacccttcaaatgctaaa

SEQ ID NO: 109997 - DNA, 606 bp, Homo sapiens
tgcactttcccccttccagcagcagctgctgcttgccttggcagatacatccagcatctgcagagagctggacatggctggagactctacgattccttgagtgctcttccagctacctgccactcacacactgactcccctcggatctcaattagaacctgacatatatatttatttatatatactgctcaaaggaagttgttctaaatgaagtagttgctttaaaggaagtaaacattgagaaaaattagatcccttgctttatatcaaattaagtatattctaagatgtttagtgttttttttctactatgggaaaaataggcccccacacaatattttatcaataatgtcaattatatacaaacacctcaaatataacactgttgccaaaagtgcctgaractcagatcttagcaagcattatgggtagtttagaggggaaaattggggctaaattacaagacttctaccccagggattcaaaggtatacagtttctattattccttcataaaatatatgtgtattttagatattttttctcttcattgaagcaaaaagtcactcaactatgcaggtttatgcaggtataatttaccttagaa

SEQ ID NO: 109998 - DNA, 561 bp, Homo sapiens
ccaatgtcagaccaatcactgatcaaaaagaaatattcttagataagccctcattttaaggtttctccagctttaaaatcatagagttaactattcagttatgtagccatacagtttacatcagttaatcaaacatttagcgaacataagtatgtttatgaagcattaactgaatgatacagaggaatttattccaaaatccagtgttttccaagcaacgaaacatgggacagagccattccattaaaaaaaagtatccattgactcaaggtaaartgagaaatatgaggaaaatataatactttgattatttttgtaagcagatatgttcaaactaatggaaacattaacaagggtctgatttttttgtcaatgaagaaaaatattgaacctctaaacacagtattagtacaacaaaacacaaaaattggaatagcatttaaattaaatacatgtgaaaggaaaaatacctatcctgctgaattcgtctggctccaactaaatcacacattgaattgtaatcctcaatattgggaagagacctggtgggaggtgtttgga

SEQ ID NO: 109999 - DNA, 521 bp, Homo sapiens
aagaaaacgtaaatactacaggaaaaagattttatgactaagatctcaaaagcacaagcaacaaaaacaaaaatagataaattggactattttaagttaaaaagcttctggacagcaaagaaacaaccaatataacrgagagacaatataaagttaaatgggagaaaatatttctgaactactcatctgacaagaaactgatatccagaatatacaaggaaatcaaaaaactcaacagcaaaaaacccaacaacaataaacaatctcattaaaaagtgagcaaaggacatgaatagacatttctcaaaagacatacaaatggccaataggtatatgaaaaaaatgctctatgaaaaaaatgcacaacatcactaatcagggaaatgaaaatcaaaactacaatgagatattatcttaccccagttggcatgactgctatcaaaaagacaaacaaaaaacagataatggcaaggatacagagaaaagggaactcttacacactgttggtgggaatgtaaatt

SEQ ID NO: 110000 - DNA, 585 bp, Homo sapiens
ttttaaaaccatcagatctcatgagacttattcactatcacaagaacagtgaaggttccaattacctcccaccgggttcctctcatgacacatgggaattgtgggagttacaattcaaaatgagatttgggtggggacacagccaaaccatatcatactgttttattgaagtgacgatatatttctctctgacatttccctaatcaacggataagataatatgatcaaaattattttactgttccttactttgagtaagtgagcaatgatgctccctgcaggtcatcttatttttcacatactaataaacaatttctttaacaattgattctagaaatttactaagtatcaacygtgaggttgtcatttccagtagttactagtaccttgattttggaaattcgagcagttctcctaatattcttgatttcttttaatataaatgttcctagatggtatataaatgttctttcattaatctgttataaaattaataaggacttggatacttgagcatattaaaactactttgtctttctcattacattcttacctctaatgaactgctactgcttttttcccatt

SEQ ID NO: 110001 - DNA, 661 bp, Homo sapiens
agctaacatgtgcgatatggttttgttgtgtccccactcaactctcatcttgaattgtagcttccataattcctttgtgttgtgggagggacccggtgggagaaaattaaatcatgggagcagtttcccccatactgttctcttggtagttaataaatctcatgagatttgatgattttataaggggttttccctttcacttgtctcygattctctcttgtctgctgccatgtaagacatgccttttgccttccaccatgattgtgaggcctccttagccacatggaactgtgagtccattaaatattttttttctttataaattacccagtctcaagtatgtctttatcagcagcataaaaacagactaatacaatatgttatgcatttatctgtgcctggcttttttctgtatacctaattaatataaccttatgaggtcataggtattacaagtgtacagttttgctgaaatgattaggtacagatgtgtttaaaaaattagaggttttaagcattcagaaaaataatacagtgcatatattatagatatatatcacccccagaagggtctgggggcagcacaacacaatcaaacagattaacatttctatgaagaaacttgtaaatgttcacactacatgagaaaatattgctataa

SEQ ID NO: 110002 - DNA, 661 bp, Homo sapiens
agctaacatgtgcgatatggttttgttgtgtccccactcaactctcatcttgaattgtagcttccataattcctttgtgttgtgggagggacccggtgggagaaaattaaatcatgggagcagtttcccccatactgttctcttggtagttaataaatctcatgagatttgatgattttataaggggttttccctttcacttgtctctgattctctcttgtctgctgccatgtaagacatgccttttgccttccaccatgattgtgaggcctccttagccacatggaactgtgagtccattaaatattttttttctttataaattacccagtctcaagtatgtctttatcagcagcataaaaacagactaatacaatatgttatgcatttatctgtgcctggcttttttctgtatacctaattaatataaccttatgaggtcataggtattacaagtgtacagttttgctgaaatgattaggtacagatgtgtttaaaaaattagaggttttaagcattcagaaaaataatacagtgcatatattataratatatatcacccccagaagggtctgggggcagcacaacacaatcaaacagattaacatttctatgaagaaacttgtaaatgttcacactacatgagaaaatattgctataa

SEQ ID NO: 110003 - DNA, 533 bp, Homo sapiens
ttaagtatgactatttcaattctcagagcaactcattgcagagatttataatgttttatagctcatgaaactttattccccgcaacctgcccactagcaattttaattccttccatccctggggatttcccctttgacactgttaaatcccttgagttagtaatgtttgcctcctttttcttaaaacttgaaagactggtgcccctttttcttgttatctgcttactttaaaatctctttcaaactctcttatgcttccacaatccccctaaaataactttcttgatggtgaccastaacctccttattactacttcaaaaggcctcataattctttttctaacatctaggattaaatttcagttctatcttttactagttatatgacctttgtcaatccattaaaattatatgaatctcagatttttacttctcagattggttgtaaagagaagactctaaaacatttctgaaagcacccaatataataaatgggatttttctttctcactctgttcattttgtcttccttt

SEQ ID NO: 110004 - DNA, 568 bp, Homo sapiens
aagccagggagccaagtggtctagctcagcagatcccacactcacagatyccagcaagctaaaatctactggcttgaaattcttgctgccagcagagcagtctgaagttgacctgggatgcttgagcttggtagggggaggggtgtctgcctttactggggctggtatagatggttttcccctcacagtgtaaacaaagccacctggaagtttgaactgggcagagcccaccgcagcttggcaaagctgctgcagccagactgcctctctagattccttctttctgggcagggcatctctgaaagaaagacagcggccccagtcaggggcttatagataaaactcccatctccctgagacagagcacctgggggaaggggcagcagtgagtgccgcttcagcagacttaaacactcctgcttctcagctctgaagagagcagtggatctcccagcacagagtttgagctctgctaagggacagactgcctcctcaagtgggtccctgatccccatgcctcctgactgggagacacctcccagtaggggtcaacagacacctcatacag

SEQ ID NO: 110005 - DNA, 548 bp, Homo sapiens
cattaatgtgagtttactgtcacttctttgtcttgctttgagcaaagtttatgctttgagcataaactaccttgtcctatcaatttatttgcattaaaaattaaaaccttttctggccaggcaccgtggctcatgcctataatcacagcagtttaggaggccgaggcgggcagatcacctgaggtcagcagttcaagaccagcctggccaacatggkgaaaccctgtctctactaaaaatactaaaattgccaggccatgggggtgggcgcctgtaatcccagctacttgggaggctgaagcaggagaatcatttgaatgcaagaagtggaggttgcagtaagctgagattgggccactgctccccagtctgggcgatagagcagattccatttcaaaaacaaaacaaaacaaaaacgttttctaaagataaaattatacatacttgtaggaaatttagaaaataaagaaaatgataaggaagaaaaaaagaactgcttataattccaccactgataatatctaggggtttgcagtcataaaatgtag

SEQ ID NO: 110006 - DNA, 589 bp, Homo sapiens
aagttcccccagtgtagtgatgaccattacccaacacagtgatgtccagactatcacatagaagaggtccacacctgtggtcataagtggtttgggtcttagactggcacaaaccagaggtcagcaggtggaggatgggccaactgacagaggcagagactgtggggctctaatcactgctgtgctataaagttcttatgaccattcagtgcaaaccactcaatctcattggattccaattcctttacttatttatttatttattttgagacggagtttcgctcttgttgcccaggctggagtgcaatggcgcaatcttggctcaccgcaacctcttactcctggttttaatcaattctcctgcctcagccaccggagtagctgggattacaggcatgcgccaccacgcctggctaattctgtatttttagtagagacggggtttttccatgttggtctcgaactcccgactgcaggtgatccacctgccttggcctcccaaagtgttgggattacaggcgtgagccactgtttytggccccaattcctttatttcataagcatatttaatatgagagaaattgaattc

SEQ ID NO: 110007 - DNA, 539 bp, Homo sapiens
tgaggggcgggtttcccccatactgttcttgtgatagtgagttctcatgagatctgatgatcatataagcaccttgcatttcccctgcttgctcttctctctcctgctgccatgtgaagaagatctttgcttcctcttcgccttctgccatgattgtgggtttcctgaggcctcctccagccatgtggaactgagaatcaattaaacctcttttctttatgttacccagtctcaggtatttctttataccatgtaaaaactggctaataccggctgtatagagtgctaggacakgtaggcagttcttacagaactgctgtgcaaattgcttcttgcacaaatcaagaggggaagaaagatgggagaatcacaatcttctctgtagttttgttttttttaacattgataacaactgggaaaagaacaattgccaattaaaatctctgtgtgattctataagaatctcttatgataactcgcttgagatatcccataataggagatcatcatatttgaggagagtgaattggagtagaatt

SEQ ID NO: 110008 - DNA, 539 bp, Homo sapiens
tgaggggcgggtttcccccatactgttcttgtgatagtgagttctcatgagatctgatgatcatataagcaccttgcatttcccctgcttgctcttctctctcctgctgccatgtgaagaagatctttgcttcctcttcgccttctgccatgattgtgggtttcctgaggcctcctccagccatgtggaactgagaatcaattaaacctcttttctttatgttacccagtctcaggtatttctttataccatgtaaaaactggctaataccggctgtatagagtgctaggacatgtaggcagttcttacagaactgctgtgcaaattgcttcttgcacaaatcaagaggggaagaaagatgggagaatcacaatcttctctgtagttttgtttttwttaacattgataacaactgggaaaagaacaattgccaattaaaatctctgtgtgattctataagaatctcttatgataactcgcttgagatatcccataataggagatcatcatatttgaggagagtgaattggagtagaatt

SEQ ID NO: 110009 - DNA, 580 bp, Homo sapiens
tgttatctgttcatttcacttgtttcttttttatcttccctctttttctgccttctctggtttcgattgagcattttatatgccttgattatatcttcatggcatattaattctacttctttttaatacttttatgtggttgcactagagtttgcaaagtacatttaaaacraatctaaattcacttgcaagtaacatgtgaggggcagtgcaggcaccttgtaatagagcattcctagttcctccctccctacccttataatgttgttgtctttcatttcacttatccatatgctataatcacccaatacattattgttatttttgcttcgaactaacgattatctgttagatggattaacaagaagaaaaaaggaatctattttacttttacttatttcttttcttatgcttttccttcatgtggatccaagtttcagacctgtgtcatttcccttctccctcaggattttaatattttcttgttggggaggtatattgatgataaattctctcagctttgtttgagaaaatttttatttccctcttacttttgatggataatttcactagatataga

SEQ ID NO: 110010 - DNA, 627 bp, Homo sapiens
ttacagatgaggaaattgaggatcagaaaagttaaatgctttactgtaggtctttcagatagtgagagtttggactgaagcctaggatttctgattcaaagctggtacctctctgctaattattcttacyaaggagaactctctctaattagcctaataatttgaacagcctcaaatatatattaggaaagagcacattgagcttctgaaagcaccagaatacaagtcgggagatctaggttgaatgcgtggtttcggtgttggcaaatcatttactctctctgggtttaagggttgttcattaagggttcttacattctaagactaaattctatcattgtaaagcaaatacaaaaatgtttaacatgtgaaaacatttctgatatgatgcttttaaaaatagcctctaaaatgcattttaaaacctactgtgagataacttccacctaaaatgtcaagaatctccaatctagcctaggcctggaccacctgtcacccctaggagaatctacttttgagaatctactttgctgtaggccccgatttggcagacagaacttagccaaatgtgagtatctgaagtggaattccaaatatggatatctttttctaagagtatgctgttca

SEQ ID NO: 110011 - DNA, 627 bp, Homo sapiens
ttacagatgaggaaattgaggatcagaaaagttaaatgctttactgtaggtctttcagatagtgagagtttggactgaagcctaggatttctgattcaaagctggtacctctctgctaattattcttaccaaggagaactctctctaattagcctaataatttgaacagcctcaaatatatattaggaaagagcacattgagcttctgaaagcaccagaatacaagtcgggagatctaggttgaatgcgtggtttcggtgttggcaaatcatttactctctctgggtttaagggttgttcattaagggttcttacattctaagactaaattctatcattgtaaagcaaatacaaaaatgtttaacatgtgaaaacatttctgatatgatgcttttaaaaatagcctctaaawtgcattttaaaacctactgtgagataacttccacctaaaatgtcaagaatctccaatctagcctaggcctggaccacctgtcacccctaggagaatctacttttgagaatctactttgctgtaggccccgatttggcagacagaacttagccaaatgtgagtatctgaagtggaattccaaatatggatatctttttctaagagtatgctgttca

SEQ ID NO: 110012 - DNA, 543 bp, Homo sapiens
ttttgggagacctcagtgaacactcctagtctgcctcccctgcattagttctctcctcagaaactccagtttttktctgggcagccgtgtgattttgagtatgtgattccacccacaccaccatgttttaccagggcaaaacagtgacccaggctaagccaaaaaactcatatgtcaaccggccacaggattggctcaaggttgttaatgttattcaagcaatcgtactgcatatcaagacttccatcaggaatgctagaaaagatactctctctcttcccagctcacatagggaagtatatttctgagagctactggtaaccattttggcatcacgaaattagctaaccttagaatgaagctgataccatggaaggaatagcagagacacagaaaaaaaaaaaaactgggttttggtggtattttggacctgctggatcaagtctcatgaaattgtagatttgcctcttatattttttcttttttattttaagttaaacctctcagtctcctttattgtttaagccagtttcattggttttt

SEQ ID NO: 110013 - DNA, 414 bp, Homo sapiens
taatatggcttggaaaaaaggagctccactttttcagcactgccacttytaagccacaaaacctaggggagaaaactgatctcacttccccttactttcctcacctgtacagtgaagggttttcaaggtcttctccagaacaatattctaagaatgctttgcaaaattaaatatgcatttattgataatttactatgtggaaaggcatcatgttatctcataggatacagaaatgcaaaaacagtaagtactttcaaaaaacacttatcatcaggagccagtgtatgaaccttcaaaaagttttaagtcataaactgtttccctttacaagtggccattctgatgcagggcaggggagcccccaaactggggcttagcctggcagggttcttggcttcactccaaaaagaattc

SEQ ID NO: 110014 - DNA, 564 bp, Homo sapiens
gtgtacaagacactgttctaagtactttacatgaactatctaatttaaacctcatgataactctatgagataagtactttatataattttctccatttttccagatcaggaggcagagagaggtcatggaacttctgcaaatcccacagcagagccagaatctgaacccagatgttcacgttcttaaccactatttaatgttgctttttagactccccagagtttaaaagcccacctccacttcccaacctgagcatgaattgccccctcacataaatggatcactggtcattttctgactgctccttagggttgtcacttctttcctttagctcagctctttccttttccaaagatgctccagacacctactcamcctgcaagatcctgatcaagttctgtctcccttgcagcctctttctgcttttataacccctaacatagctgagctctctcttctgtactctccctgaatcctttattctgtaatcctgatgtaagtgtgtgtatgtgtgtgtgtgcgtgttccccctgagagcagatcccatgtcttttcagttttgc

SEQ ID NO: 110015 - DNA, 313 bp, Homo sapiens
ccaaaatattttctagatatgcactcttcacattaatctgtagaagcacagaggttgtctggcacttatagatctgtttccacaggcacaatatcaaagacccagaaaagctttctgatccttccagaaaatagtaatatctcaggatgctgtgaaagagagagcctgggttgaaagttagaagcctggatagggtttttcatggctctgacccttgttractgtagaattaggagtattcctctttcatatgcccccaaaactccacaccattgtcagatgctgtcacattgcacatgcaatgaactggtcc

SEQ ID NO: 110016 - DNA, 634 bp, Homo sapiens
tgcacagtgaaatttaggaggcagagtctcctttaaagggttttgaccctttgactgatctgccactgattaataccccagttttctagagtaaagtaaatatctggattttcttttcacaacaaattgtgggtagagatccacctgattcacctgatacctctgctttgttcttaatccatcttggaatgaaacatctgactgcttctgaaatgcccagatttattgcaaaggwggttcccaagtcacttattatttttttgtttggctttgaagcatgatcaaaagtgtgactatttctttggtcaaaagaaatctcctggcttcagatactcttagagcagagcttagtgtttggaatgagaaaggaaaaaatgactatcagagcatcagcttatgaagcaagtatccttagaatgcttaaggttttgaagggcaattctgataaatatagtctcattgtttgtgctggggaaggagcatggcctcttagaactgtagaattctacagaatcattttacaagtgaagaacctgaggcccacagagagagaaagcattgggaaatatgtttatggatttgacccaacactcctgtttagggaagatacatccagatggccactcctataccc

SEQ ID NO: 110017 - DNA, 429 bp, Homo sapiens
gaattcccttcagagatcaaatttaagaatgccttctgggttcaattttaaaaactccaaaatttctaaagcaaaaggaaggaaacctcaaacatattttaaataacagatgtttgtttttactgacaccctgccgtttattttctgggtgggctgtaagaaaactagggtatggacaagacacagaggagcaaagcaagtccgactcactctgcagaagtgtcctctttgaaactgcagccgggatctgggcataggtccaaagcaaacatttgagatttttcaggagcagacacttttctgaggaggactcctgcttgtctgctactcscaggacaaccaaaatacatcattatcaatttcttaacaattcatcgagcaggctctatgagggctggggcactggctattgggaccctgctcaaaaaa

SEQ ID NO: 110018 - DNA, 573 bp, Homo sapiens
ataaagattttcaaatggtcacatagatgtatatttattgacatggaaagatgtttataatacattattaaaggacatcttatctatattattaatattgattaaatatttttatatatgagcattataataytatagggcatagggcaatagagtataatttgagagcatatcattaatgtgttaacagtggcttgtcactgactaggtgggtagtattatgggtcctaaatttttttcttttttttcatatttgcattacctacatttctaaacaatgaatatgtatagtttgttttgttttgtgagacaaggccttgctcctttgcccaggctgaagtgcagtggcataatcatagctcactgcagcctcgaactcctgggctcaagcaatcctctcacctcagtctcccgagtagccagaactacaggcacatgacaccacacttgactaataataaaaacataatataaattttctaaattacattttagctttttgcttgcttgcgatctggttactattaagttctggttttattacaaatacttaagactatattattatgctgt

SEQ ID NO: 110019 - DNA, 633 bp, Homo sapiens
gtttaacagaataagaaatggccaaagtttgaacctaaataagtacaattttgcatcctcataaggagtgtagtaacctccaaagatctgtgattatggtctattatagtagcagctaactggtccaaaactaagagatgatagaaatcagaagagcagcttcctggtagggtagctgagtacaagagatgtttctgggataatggaaatgctctatcttgactggggtgggtcttggctgcacagttgtacatatttgtcaaaacccaacaaactaaacatttaagatctcttcgtttcactgtatgtaamtttcacctttaaacaactgaatacaagatgaaaaactttaaaaattaaactaaatagaatgagcctatacaaatcaactttaattgcaaaaatacattcttatagtaaaaaaaaaaaaaacaacaatattacacatgaaaatttccttttatttcccccctctctcccaatctaatttcctcagagttaaccactattaaaaggggggtatgttacagcttccagatgtttttttacatgtaaataaatatacataaatccacagttgtgtacttttattaactgacaaaaaaagtaattatcccaagtatagcaatttgc

SEQ ID NO: 110020 - DNA, 483 bp, Homo sapiens
ggaattcgagaccagtctgggtaacatactgagacccccatgtctacaatttttttttttttgagacagagtctcgctctgtcacccacactagagtgcagtggcatgacctyggctcacagcacttctgcctcctgggttcaagcgattctcctgcctcagcctcccaagtagctgggattacagatgaacaccaccatatctggctaatttttgtatttttagtagagacagggtttcaccatgtcagccaggatggtcgcgaactcctgaccccaagcaatccacctgcctcagcctacgaaagtgctgggattacaggcatgagccactgtgcccagcccaaaaaaatatttttaattgaaaaaaaaaaagttctaagaaggtaagactatgactaagaatgccatattttaaactggagttttcattttaaaaatgcataaaagaactagagttgcgtgatacaataattatttagca

SEQ ID NO: 110021 - DNA, 537 bp, Homo sapiens
ggccaaaatcatatgcaaaagtgctcatcatcactaatcatcagagaagtgcaaattaaaaccacaatgagatactatctcccaccagtcaggatgggtatgttaaaaagcaagcaagcaaacaaacaaacaaatagacaataacaacaaaaaacaaagaaacagatattggcaagactgctgagaaaacagacacaaaaatggttggtgggaaggtaagttagtctagccattatggagaagagtttggagattcctcaaagaactaagagttgaactaccattcaacccagcaatcccattactgggtatacgcccaaaggaaaagaaatcattctacccaaaagacacatgtactcatatgttcattccagcagtattcacawtagcaaaaacatggaatcaacccaggtgccaatcaatggtagattggataaagaaaatgtggtacatgtatgctatggaacactatgccactatataaaagaaaaaaatcatgttctttgtagcaacatgaatgcagctggaagctgtttt

SEQ ID NO: 110022 - DNA, 399 bp, Homo sapiens
aacaaaaaggtaatgccttaagaatcaaagaaatgaacaatatttttcaaaccaattagagattggggctactcccaraaaagaaatctcccattactattcacagtaggacaactggtaagcagaagcttgctttctaatgacagctattaaatgctgttagcattgaggcttggtacagcagtagtttccaaataactgtaggatggagaggaacttgccagaacaatagaagaaaaacattcaagagcaagaatgactccatggggtccatgatagaaactcaggacctgctgaggctcagtaaggtttgtgcagaggaacttggcattctagtaaaacacacattggcacctgcatgcctctgccatgttccagtctgcatattccttaaggaca

SEQ ID NO: 110023 - DNA, 394 bp, Homo sapiens
taatgccttaagaatcaaagaaatgaacaatatttttcaaaccaattagagattggggctactcccagaaaagaaatctcccattactattcacagtaggacaactggtaagcagaagcttgctttctaatgacagctattaaatgctgttagcattgaggcttggtacagcagtagtttccaaataactgtagratggagaggaacttgccagaacaatagaagaaaaacattcaagagcaagaatgactccatggggtccatgatagaaactcaggacctgctgaggctcagtaaggtttgtgcagaggaacttggcattctagtaaaacacacattggcacctgcatgcctctgccatgttccagtctgcatattccttaaggacaagttc

SEQ ID NO: 110024 - DNA, 573 bp, Homo sapiens
cagtttctttgcctagcttcagctctgagaatcctagcctggtttagagagctgagccttcccattttatcagaataaacctgcagttacttgcactgttccaggaagcaaaagaatagagaattaagagtaaataatgagctctggagtcaagctgcctgggttcatatcctggtttcaacactaaagagctgtaagtttggtcaaatagcctttgcgatttcagtttacttagctataaagtaaaatgagagtagtgcctattgcacaacatttttgtgagaattaaaggaaataacatgggtaaagcacctggcacaatgcctggcttgttgtaagggctcagaaatagtagctcttattattattggaagaaccaatttaaatcccagggattccctgagcaacatggttaatatcccacgtgtcctccctgtaaaatgggtgttctttagctactgctgcgtcacaaagtaacacaacttagtggcttagagcaactcacatttatgatctcacagtttctgtggtccaggagtctggtgcctacytgggtcacctgccaggctgcag

SEQ ID NO: 110025 - DNA, 409 bp, Homo sapiens
  misc_feature (1)...(409): n = A,T,C or G
nnnnnnnnnnnnnnnnnnnnnnnnnnnnnnnnnnnnnnnntttgcttggatcaaacaaccagttaaccctgacaggtctgattcttgggctagagctctgagtcagggctggcaagttctagtttttgggcaaaattgagccagctgcctctttttgtatcacctgcaagttaagaatagggtttacattttcaaatagctgggaggagaaaatcacaggagcattttatgatacatgagagttacatgagattcaaattccagcatccataaataactttttcgtggaacatagccaaactgatttgcttcatcagtggctgtttgcgctttgcaatgggaggagtcagtcgctgtggcacagacagyatggcctcgaaagcctaaagtatttcagcccctctgctgg

SEQ ID NO: 110026 - DNA, 607 bp, Homo sapiens
aattatttactgtttctccaaaccagtggggaaaatggcagagcaagggtcaaagacctgtggtttctctgcttctggcccatctctaccaatggtcctgcacagccccatcagggaaattatttgtaacttctttcagcaagtccacataaaatagctgaaagacaaagaggacataatatttgacatatagggaggtttggagacatcattgtgaaagctatatctaggaacccctttattcctgcttttccccttcccaaatttcctcaaagtctcctgtaactgacaaatcaaagttgtaggcccrcatcaatgtagggatgctaaaactagaactcccaaattaagatggattcaatgaaaggaacagaaatcatcccaagttaatagcatcccaggagatacaatagcaaaacctctctggagaagaacatccccaatttaagctctcattattcccacagatgaggatcaactaaataagaactcaaaatcaaggatcaccaaatccacaaggaaacaaatatgataatgaaaaccaagtgataataaatttagaacccttagaactacagttcacaaaattattgattacagaatagaa

SEQ ID NO: 110027 - DNA, 650 bp, Homo sapiens
ctacattttacaatttatatattatacccccttttaaatttacatattataccttttgaaatttatatattatatcctttttgtccaagcatatttcaacacagctgtccatactttgttgaacctaagcacaaaaatgaacagtttccgttgtatcactgggtcttcattctgaaggctcccatttcacataaaactatgattaaatacatttgtgtgtcttttctcccattattctgccttttgtggattgatttcyccacaaaacttctgagggtaaagaggaagtttttcattggcccctacgatggcaatggccttcacacatttacagcagttcctgggagcatgccttgcatagccttgaacatcctttaggaaactgctatttctccttgtcctctgcacgaggccctcttctggagaggacttctgagctgagttgtgtcctcttggcagtgcccactgtcaggcttcttgtctgctgtgtatgataccattgctgtttctatttatacttaaacacatattaatttatttaccttctcacctttgggtgtttatagcaaaaatacacttaataaaatcataaagcatgaattagaatgcaaatgttatcaccagagaaatatgttatggtaggaatttaa

SEQ ID NO: 110028 - DNA, 528 bp, Homo sapiens
tttttcccctaaaatattccatctttaacgcggaagcttctaatgtcagggaaatctatgcgttttgagtcatgatatggctataatagatcatcaatttcttttgtcattgaatttagtaaagaggtaataaaagagaaaattagatacttaagaatttgaccattttttaagctctaggaaaaaatgtcttaccttttcccattttaacccttgccccaccactactcaactatgctgtttctttttcttccatggctgtcctttactaggaagtctcagaattcagttatcagaattcttttctcactaatgcttgacagagtttttgttatgttccttcccaggacttcttttccctctcagataatagaatgcyttgcaatctaagaaaacaaataatttgtgttgagaaaaggacagaacttctatacttggcaaaaagaggcagtttaaaattccaaaaagatttttcctgatgaggccaatttgaaagaaggacatttatactccgtgcaaacagttgac

SEQ ID NO: 110029 - DNA, 444 bp, Homo sapiens
aaaatgggagacagttttgcccgacacaggtcccagcttgactttcccttggcctagtgattttggggtcccaagattcatttttcttttacaatatgttaatcatagcatgtatgttaattgttttaattttgtgtctcttctgacttatctattttctgtcagtttctaagagaagtgtgttaatatctctaactagaaatgtacatttgtctacttcttttaagttgtgttattttaacttaatgtattataggctatgttatttggtgattacaattttcagattgttatatccttatttagaattgaccattataaaccatcttttttgatacctaacaatacttcttyccttaaaatgtacttatctaatattggtagagtcgtgatctttcttttgataagtgtttacataataaatcttctgtttggttttttttt

SEQ ID NO: 110030 - DNA, 487 bp, Homo sapiens
tttcaacttcattatgtaaacacaggacctcatttgggaatgcagcctcatgagtataggctgttcctcagactccctgcagatccaatgagtgcactgcttggcatttgctttccatttgccacccatctcacctttatctcccaggctggtcctgttgatgttagtgacaatgtagcaattatgcaacaagcattgtacatacattatttcatctaaccgtctgttgtaataatactgtccatgttattatccctattttacagatataaaaactgtaactgagagaaagaggttaatacattgacagaggttgcagagtaacagtcagaatttgtacccaagtccacycattgtcaaaactcacatgatatactatactatattgcctccaagtatgagcaaaggaagttacgctccttgacttttcactactttataaagctgttgggaacaggccccccaaaatctggccataagctggccc

SEQ ID NO: 110031 - DNA, 487 bp, Homo sapiens
tttcaacttcattatgtaaacacaggacctcatttgggaatgcagcctcatgagtataggctgttcctcagactccctgcagatccaatgagtgcactgcttggcatttgctttccatttgccacccatctcacctttatctcccaggctggtcctgttgatgttagtgacaatgtagcaattatgcaacaagcattgtacatacattatttcatctaaccgtctgttgtaataatactgtccatgttattatccctattttacagatataaaaactgtaactgagagaaagaggttaatacattgacagaggttgcagagtaacagtcagaatttgtacccaagtccactcattgtcaaaactcacatgatatactatactatattgcctccaagtatgagcaaaggaagttacgctccttgacttttcacyactttataaagctgttgggaacaggccccccaaaatctggccataagctggccc

SEQ ID NO: 110032 - DNA, 562 bp, Homo sapiens
atggcagacaggttaagcaacttcccctgctttgtggcatggcaatacaggtgcaaagacaccaggttgaaagagggacaataatgttgttttgctcttttccttccttctacaatatcttggaagtgtagtcagcaaccttcttacccacttgtttacccaaattagtccaaaatactggtagtggctggttgtggctggaacctctctcagccttaccttctctaagtccagggacaaccagctgcaggaagcgggcttcaaaggagagagccaggagtttcttacacatttccgagccttgaacttcagtggccctgcccttttatgtttacatgcccctagtcttgctcatatccctaaatctgggatgtcccatttgaattctattgctttccttcttgttctcattaaggctggaggggtcatttctctagggagcctttttagatgctcacatccrgattttgctaatcctttcattctgtgattataagctgaggcttctattgagtgggcctgaaaatctgcagtagaagcatatctggaaggccgtaatcaa

SEQ ID NO: 110033 - DNA, 481 bp, Homo sapiens
gaaacatcaggaagcaaacgagctgaaagccagggtttaggaaagtacctaatatcttccaacagatctcaagtggacatacttacacatgaagaagcataggcatcttgggttaagtttgggaagctgaggtttaaatctcatctcctttaccaataaatccaagtgcatttttttcacttctcaatgtcatacttccctttatgaaacatgggactattattccttgattttatgtttctatctcaaaagccagcattcaagcagtgaaatatgaaatgaccgtcctttggctgcctagaattggtcaggcaaggtaaytgctgttaaagaaaaagggtcctcccataattcccaggagcccctactttcccctgtgttaaggccctctcttaacttagtcatcactccacccaacccttgaggaggaggcatcaaacaaatgattcaaaacattttctttcaaaaataataataaaac

SEQ ID NO: 110034 - DNA, 589 bp, Homo sapiens
atccccaacggctcaagagaagaagccaagacaccaggtatctttggtctccgtaattacccgccgtgcactgacaggacaggaaaggattcgccattaaaagccgcgttttaaaacagaaatgaagctcatatttcaggagaaagaaggagttccgtttcagagttggttagaatgagatgctaaaggacattgaaatggaaatttcaacagaccactagagatgcataactgcagcttgagagaggagtaagggctggagacccagaggggaagtcgtccacagcaggggatcagttgagactctgaggtgttcatggcccagaggcagcagcaacaatgaggctttggagctagattactcatggattcaaattctggcagcactatttacttggcatatgattttagacaaagtacttaacccctctctgccccagttttctcatctgtaaaatggagatagtaataggactttacttttgargattaaaggagtgaaagcacataaagttaagctagaggagtgcctggcacatataaatgttagctagtacgtttctcttgttagtctcaatattaaaagttt

SEQ ID NO: 110035 - DNA, 587 bp, Homo sapiens
agtattttgaactgatttagctggttcttttggtatttttcacttatttctaaataacatgattataatactacttcttggtttctcacttttattgatttacaaaagcaaagaatgaagatttatcagggktgtccaatcttttggcttccctgggccacactggaataagaagaattgtcttgggccatacataagatacactaacactaacgatagctgatgagctaaaaaaaaaaaaatcacaaaataaactcacaatattttaagaaagtttatgaatttacgttgggctacattcaaagccgtccttggcagcatgcaacctgtgggcagagggttgaacaagtttgatttagatctcttttgccatccactccccccaccaaaacactctctagtctccaccttctcaatatagttacattgttattagtttggttatatcaaaatcatttcacattattgagattgtttatattctattaatagctgagctaggttgtatgctctgtttttttcttttctgtacagctttttgtttctgttagatgttgtattttctttttacttgcttgaatatatgt

SEQ ID NO: 110036 - DNA, 553 bp, Homo sapiens
ataggctggtggagaaatgcatcttactgtaaagggtctggaactctagaatctgcatggtaaaaaggaggattcttgtaagatatagcagattctctattgaggctgtcccgaccmtgtagaattcctgcacctcctgtgattgcagggggtgtgttctggtgcctgcagctgtacctttcctatggcctcacgaggatcttttgagcttggagaggtgggcttcttggtgctgtataactcttattttaaacacagatggagtgaaggggaaaaaggattatcacttattttataggttatagctttctcttctcagtgttatctgtgtacattctgtacagagaataataattctgtatcaatactgtacattctgaactgattaaaggccacagataccgtcttgaccaactgccagatttacacaggaccttgaatttagtgacacttgaagcttacttcttgaataaaatgaagtgtggactctataggattttgatggctctccaatttattatggaaggttcagatgataagaatgttctatctc

SEQ ID NO: 110037 - DNA, 553 bp, Homo sapiens
ataggctggtggagaaatgcatcttactgtaaagggtctggaactctagaatctgcatggtaaaaaggaggattcttgtaagatatagcagattctctattgaggctgtcccgaccctgtagaattcctgcacctcctgtgattgcagggggtgtgttctggtgcctgcagctgtacctttcctatggcctcacgaggatcttttgagcttggagaggtgggcttcttggtgctgtataactcttattttaaacacagayggagtgaaggggaaaaaggattatcacttattttataggttatagctttctcttctcagtgttatctgtgtacattctgtacagagaataataattctgtatcaatactgtacattctgaactgattaaaggccacagataccgtcttgaccaactgccagatttacacaggaccttgaatttagtgacacttgaagcttacttcttgaataaaatgaagtgtggactctataggattttgatggctctccaatttattatggaaggttcagatgataagaatgttctatctc

SEQ ID NO: 110038 - DNA, 570 bp, Homo sapiens
tctaagtggaaggagctgaagcacaaaatgtaattcaaagagtttacttgagccacagtgaggacagctgcctggaagaaacagacccaaatatccttggatgtgaactccctttggagctttgcaacaagcagttacttaaaggcaaaaaagggtccagaagtgtgatgacgcaaagaggtttgtcacaaattctcattggcttatggaaataacatttattagtgactggctacacactgttacactattatggggtgtggattatartgtctggtgtggccttattggttaatttatagctactgtggcaacagcaagcagcctagatgaacacacagctcaaagaggagaaggacagaactgctgtgtcatttgaatatctctctgggcctgattatttcaaaggacttgcatttctcacatgaaagttattttcttttctcaatgtccataaatgagaataaatagacgtaaaatagatcttttcgaggatgaagtaaatggaatgaaaaacaaaacccaagctgaccagaaatcatagagggaagaaaaggttataaatatatg

SEQ ID NO: 110039 - DNA, 570 bp, Homo sapiens
tctaagtggaaggagctgaagcacaaaatgtaattcaaagagtttacttgagccacagtgaggacagctgcctggaagaaacagacccaaatatccttggatgtgaactccctttggagctttgcaacaagcagttacttaaaggcaaaaaagggtccagaagtgtgatgacgcaaagaggtttgtcacaaattctcattggcttatggaaataacatttattagtgactggctacacactgttacactattatggggtgtggattataatgtctggtgtggccttattggttaatttatagctactgtggcaacagcaagcagcctagatgaacacacagctcaaagaggagmaggacagaactgctgtgtcatttgaatatctctctgggcctgattatttcaaaggacttgcatttctcacatgaaagttattttcttttctcaatgtccataaatgagaataaatagacgtaaaatagatcttttcgaggatgaagtaaatggaatgaaaaacaaaacccaagctgaccagaaatcatagagggaagaaaaggttataaatatatg

SEQ ID NO: 110040 - DNA, 570 bp, Homo sapiens
tctaagtggaaggagctgaagcacaaaatgtaattcaaagagtttacttgagccacagtgaggacagctgcctggaagaaacagacccaaatatccttggatgtgaactccctttggagctttgcaacaagcagttacttaaaggcaaaaaagggtccagaagtgtgatgacgcaaagaggtttgtcacaaattctcattggcttatggaaataacatttattagtgactggctacacactgttacactattatggggtgtggattataatgtctggtgtggccttattggttaatttatagctactgtggcaacagcaagcagcctagatgaacacacagctcaaagaggagaaggacagaactgctgtgtcatttgaatatctctctgggcctgattatttcaaaggacttgcatttctcacatgaaagttattttcttttctcaatgtccataaatgagaataaatagacrtaaaatagatcttttcgaggatgaagtaaatggaatgaaaaacaaaacccaagctgaccagaaatcatagagggaagaaaaggttataaatatatg

SEQ ID NO: 110041 - DNA, 605 bp, Homo sapiens
tctgctcttgtcagacaattaaggggtctttgaatacttcagccctaataatttgcttcctaacatacatattgcagtgcttatctaattttaaatattcttttgtttcaacacctaattttctattttgatctatctttatgtttacaatatattttgctctgtgttcattctttgatttcagaacttcaatctttctgaagcgtgttttcagagtttcctttgagtttctttagtggaattctgctggtggtgttttgttttttgtctctaaatatgtgatttagccataggttgatgaatatttttcttggttgagaatttcagaatggcattattattcttaacaaataatattgtttattttacmtttcatgctttcagatttcaatatgattaaaggtaatttgatttttctagtgctaattgaaatatttttcccttcctgattgtttactatttctctaggagatatgtagatgtaggtttatctccatcgtagcttgcttagcatgcatagaagttttgaatatgtggattagtgtcttacaaaactctagagaactttcagccaaaataccatcacatattgtcccttccccgtt

SEQ ID NO: 110042 - DNA, 364 bp, Homo sapiens
aaagggtaaggtaatttttggagtgatcatataattttgtaatctaccaaaaacaaacataataaatgggcagataagtaaagttcayggattggaaagttcaatattgcaaagttctcccaaaaatgacctatcaatttaatcccagtggaaattccaatcagttttgtgaaggctgctaagtcaactctaaaatggccaagaatagacaagatcaccggagaggaagcagggaggtggacacaaatatcttctgattgatgagtgaaatcattagaaggccagcaaaaatacaagtaagccagaatttctaaagcaccacaaaagaacactagttagtagtgcataaaggtatctcctaaat

SEQ ID NO: 110043 - DNA, 364 bp, Homo sapiens
aaagggtaaggtaatttttggagtgatcatataattttgtaatctaccaaaaacaaacataataaatgggcagataagtaaagttcatggattggaaagttcaatattgcaaagktctcccaaaaatgacctatcaatttaatcccagtggaaattccaatcagttttgtgaaggctgctaagtcaactctaaaatggccaagaatagacaagatcaccggagaggaagcagggaggtggacacaaatatcttctgattgatgagtgaaatcattagaaggccagcaaaaatacaagtaagccagaatttctaaagcaccacaaaagaacactagttagtagtgcataaaggtatctcctaaat

SEQ ID NO: 110044 - DNA, 364 bp, Homo sapiens
aaagggtaaggtaatttttggagtgatcatataattttgtaatctaccaaaaacaaacataataaatgggcagataagtaaagttcatggattggaaagttcaatattgcaaagttctcccaaaaatgacctatcaatttaatcccagtggaaattccaatcagttttgtgaaggctgctaagtcaactctaaaatggccaagaatagacaagatcaccggagaggaagcagggaggtggacacaaatatcttctgattgatgagtgaaatcattagaaggccagcaaaaatacaagtaagccagaatttctaaagcaccacaaaagaacactagttagtagwgcataaaggtatctcctaaat

SEQ ID NO: 110045 - DNA, 352 bp, Homo sapiens
aggaattaatattgattgtagcatgagtaaaatctatcttctactcatcatgaaaagtcacagtcgttttgtttaaagactccagaattattatrggcagaaacaagcaggttccacacctatttggtgaaacgaggaatcaggaatgagcattcccaagagaatacaattacaaaagtaaaatcacctagagtttttgggctgcttaaaaaacccagaaagaagtgccaaatgggaaaataatcaaattcagtggaaaaactcacttgaaggtatcatggtcagctgggtttccacccctttgttgcacttcaaatcctgtgtattccacaaagacttgctcctttctaaa

SEQ ID NO: 110046 - DNA, 352 bp, Homo sapiens
aggaattaatattgattgtagcatgagtaaaatctatcttctactcatcatgaaaagtcacagtcgttttgtttaaagactccagaattattataggcagaaacaagcaggttmcacacctatttggtgaaacgaggaatcaggaatgagcattcccaagagaatacaattacaaaagtaaaatcacctagagtttttgggctgcttaaaaaacccagaaagaagtgccaaatgggaaaataatcaaattcagtggaaaaactcacttgaaggtatcatggtcagctgggtttccacccctttgttgcacttcaaatcctgtgtattccacaaagacttgctcctttctaaa

SEQ ID NO: 110047 - DNA, 352 bp, Homo sapiens
aggaattaatattgattgtagcatgagtaaaatctatcttctactcatcatgaaaagtcacagtcgttttgtttaaagactccagaattattataggcagaaacaagcaggttccacacctatttggtgaaaygaggaatcaggaatgagcattcccaagagaatacaattacaaaagtaaaatcacctagagtttttgggctgcttaaaaaacccagaaagaagtgccaaatgggaaaataatcaaattcagtggaaaaactcacttgaaggtatcatggtcagctgggtttccacccctttgttgcacttcaaatcctgtgtattccacaaagacttgctcctttctaaa

SEQ ID NO: 110048 - DNA, 352 bp, Homo sapiens
aggaattaatattgattgtagcatgagtaaaatctatcttctactcatcatgaaaagtcacagtcgttttgtttaaagactccagaattattataggcagaaacaagcaggttccacacctatttggtgaaacgaggaatcaggaatgagcattcccaagagaatacaattacaaaagtaaaatcacctagagtttttgggctgcttaaaaaacccagaaagaagtgccaaatgrgaaaataatcaaattcagtggaaaaactcacttgaaggtatcatggtcagctgggtttccacccctttgttgcacttcaaatcctgtgtattccacaaagacttgctcctttctaaa

SEQ ID NO: 110049 - DNA, 659 bp, Homo sapiens
acatatatctatcagttttgtattttcaagaaatatttgccttaaaatgaacttcattagaatatgtgttctcccacagagccaaggaaagtaagttagacacaggatctggaagtctacctgtgtgatgtaattacattgaaaacattccacaaataatgcagaaatgtatcattgtgacccaaaatattctctaaattttctcaaagcaatgtggccacatctattatcttttactatgactagtcatcattccatgcatttgaacattacctcacccatttgcagcctcctatctctgcaattaattatggctaacattctcagcagtccaaacatcttgcaagtgacagcttgaaaaggcctaycagaatgatgttcactctgccacctgactagcttgtcttccatctagacattgcagtatgtagaagagtgcttttagtattataaatttgatccaacacgtgttcaattagatgaaatcttaaatattgcactacatgtgaattgggaaaatgttaatttgcttctgtagttttaagtgtattctcagaggcagatgaagacatattacatcactgagttcaagaaataaagtaaatagaagaaaaaaggtgttattttagtttggttatgtttatatttgaagttttctt

SEQ ID NO: 110050 - DNA, 592 bp, Homo sapiens
gttcagctctgaggttcttagaaactaaagtaaaaaagtatgaccagtttctgaagtcaagataaaatcatacaatctttaacttagaaaattatcttctgtgttgtgtcctaagcataaacaaatgtaaggacttgccctgacactctgtaagtagttccactccaatacgccctgcagaaatatttcctggcaagaacagcaagtcagaagccttttcagcatggcaaggagggagagagactatgctattaaaaaaaaaaaaaaaaagatgaggaggaacaatagcaccttagacaagtgagaagtttcaaaagagacatataaggagagcagttgcaattataaggagmaaaatatggaatgatgaaaaaagatactttaaagaaagttttcctcagtactttgcaatgcgcttgccaccttctgaagaaagctggctccttctggaaccttagggtatttggactcatgctttggaatggggtgaccatctacatcaagctaacttaaattcaaatttgtgtgcataggataagaataattgggttaaataaaattcacttttaatctaaaatgtcattcattagtt

SEQ ID NO: 110051 - DNA, 563 bp, Homo sapiens
ctctccccttgcccaaactctagttgggatcctctaagccacctctcagcctcagcyttcagtgttcatcctagtctgacccacatctctcaggtttaggaagaaacttgcaaagaatcccccactctcagtactgatcacctttgatatctgatcaaatttgttatctcccaccaccctccagatgatttctgatcagtctggcctgccttcagtaagaatcctgttcgatctgtttaacccaaatcccctttgcccctgatatttcctcttagtatccccagttgagccaattttcaaccattaaaaaaatcttggacaaaattaagttcagataggttccagagtgcttatgttcagttcttggctttctgaagacctggcatatcctctttaaattgcctcaatataagaaaatacaaaatggaaagaagtagacattagaaattggaaaaatggagaaatacaggaatgaacataagtttctatttcaagtaattaggtaaattgtaagatgtttatatttaactttttctcattagctttagccccttgaatctttg

SEQ ID NO: 110052 - DNA, 563 bp, Homo sapiens
ctctccccttgcccaaactctagttgggatcctctaagccacctctcagcctcagctttcagtgttcatcctagtctgrcccacatctctcaggtttaggaagaaacttgcaaagaatcccccactctcagtactgatcacctttgatatctgatcaaatttgttatctcccaccaccctccagatgatttctgatcagtctggcctgccttcagtaagaatcctgttcgatctgtttaacccaaatcccctttgcccctgatatttcctcttagtatccccagttgagccaattttcaaccattaaaaaaatcttggacaaaattaagttcagataggttccagagtgcttatgttcagttcttggctttctgaagacctggcatatcctctttaaattgcctcaatataagaaaatacaaaatggaaagaagtagacattagaaattggaaaaatggagaaatacaggaatgaacataagtttctatttcaagtaattaggtaaattgtaagatgtttatatttaactttttctcattagctttagccccttgaatctttg

SEQ ID NO: 110053 - DNA, 563 bp, Homo sapiens
ctctccccttgcccaaactctagttgggatcctctaagccacctctcagcctcagctttcagtgttcatcctagtctgacccacatctctcaggtttaggaagaaacttgcaaagaatcccccactctcagtactgatcacctttgatatctgatcaaatttgttatctcccaccaccctccagatgatttctgatcagtctggcctgccttcartaagaatcctgttcgatctgtttaacccaaatcccctttgcccctgatatttcctcttagtatccccagttgagccaattttcaaccattaaaaaaatcttggacaaaattaagttcagataggttccagagtgcttatgttcagttcttggctttctgaagacctggcatatcctctttaaattgcctcaatataagaaaatacaaaatggaaagaagtagacattagaaattggaaaaatggagaaatacaggaatgaacataagtttctatttcaagtaattaggtaaattgtaagatgtttatatttaactttttctcattagctttagccccttgaatctttg

SEQ ID NO: 110054 - DNA, 563 bp, Homo sapiens
ctctccccttgcccaaactctagttgggatcctctaagccacctctcagcctcagctttcagtgttcatcctagtctgacccacatctctcaggtttaggaagaaacttgcaaagaatcccccactctcagtactgatcacctttgatatctgatcaaatttgttatctcccaccaccctccagatgatttctgatcagtctggcctgccttcagtaagaatcctgttcgatctgtttaacccaaatcccctttgcccctgatatttcctcttagtatccccagttgagccaattttcaaccattaaaaaaatcttggacaaaattaagttcagataggttccagagtgcttatgttcagttcttggctttctgaagacctggcatatcctctttaaattgcctcaatayaagaaaatacaaaatggaaagaagtagacattagaaattggaaaaatggagaaatacaggaatgaacataagtttctatttcaagtaattaggtaaattgtaagatgtttatatttaactttttctcattagctttagccccttgaatctttg

SEQ ID NO: 110055 - DNA, 550 bp, Homo sapiens
atttgtacttttgaaaagttcctctggctgctgtggggaaaggcttgagtagaygcagggtgggagaagcataaccagcagtagactcttgtagcaggttaggtgagagatggtggtggccacgagtgggctgctagtggtggaagtgacaagaagcagaaggatcggagacaaaacttgaagataaaaagtcttgaatttgctgatgatttgcattgacgaggtgttgggggagaggactgaaggagcagaggagagtgacaagggactggatgccatttataaggatggggaagactgggatgaaaccggttaagggagaaattttaaccatggcaaaattaagaggggttttatgtgagaaaatggaaatgctaaggaggaagttgaaaatcctgctaatttggagatctttgattaaaactagaaataagaatgtgggaagcatcaacttgcaagatgccctcattgtagataacaccatttaggatctaggctcaagccctgggaaactccagggctttggaagtcaaatagaggaagaacacgt

SEQ ID NO: 110056 - DNA, 550 bp, Homo sapiens
atttgtacttttgaaaagttcctctggctgctgtggggaaaggcttgagtagatgcagggtgggagaagcwtaaccagcagtagactcttgtagcaggttaggtgagagatggtggtggccacgagtgggctgctagtggtggaagtgacaagaagcagaaggatcggagacaaaacttgaagataaaaagtcttgaatttgctgatgatttgcattgacgaggtgttgggggagaggactgaaggagcagaggagagtgacaagggactggatgccatttataaggatggggaagactgggatgaaaccggttaagggagaaattttaaccatggcaaaattaagaggggttttatgtgagaaaatggaaatgctaaggaggaagttgaaaatcctgctaatttggagatctttgattaaaactagaaataagaatgtgggaagcatcaacttgcaagatgccctcattgtagataacaccatttaggatctaggctcaagccctgggaaactccagggctttggaagtcaaatagaggaagaacacgt

SEQ ID NO: 110057 - DNA, 550 bp, Homo sapiens
atttgtacttttgaaaagttcctctggctgctgtggggaaaggcttgagtagatgcagggtgggagaagcataaccagcagtagactcttgtagcaggttaggtgagagatggtggtggccacgagtgggctgctagtggtggaagtgacaagaagcagaaggatcggagacaaaacttgaagataaaaagtcttgaatttgctgatgatttgcattgacgaggtgttgggggagaggactgaaggagcagaggagagtgacaagggactggatgccatttataaggatggggaagactgggatgaaaccggttaagggagaaattttaamcatggcaaaattaagaggggttttatgtgagaaaatggaaatgctaaggaggaagttgaaaatcctgctaatttggagatctttgattaaaactagaaataagaatgtgggaagcatcaacttgcaagatgccctcattgtagataacaccatttaggatctaggctcaagccctgggaaactccagggctttggaagtcaaatagaggaagaacacgt

SEQ ID NO: 110058 - DNA, 550 bp, Homo sapiens
atttgtacttttgaaaagttcctctggctgctgtggggaaaggcttgagtagatgcagggtgggagaagcataaccagcagtagactcttgtagcaggttaggtgagagatggtggtggccacgagtgggctgctagtggtggaagtgacaagaagcagaaggatcggagacaaaacttgaagataaaaagtcttgaatttgctgatgatttgcattgacgaggtgttgggggagaggactgaaggagcagaggagagtgacaagggactggatgccatttataaggatggggaagactgggatgaaaccggttaagggagaaattttaaccatggcaaaattaagaggggttttatgtgagaaaatggaaatgctaagraggaagttgaaaatcctgctaatttggagatctttgattaaaactagaaataagaatgtgggaagcatcaacttgcaagatgccctcattgtagataacaccatttaggatctaggctcaagccctgggaaactccagggctttggaagtcaaatagaggaagaacacgt

SEQ ID NO: 110059 - DNA, 626 bp, Homo sapiens
aagcaagtagaagctaatgcaaacagaggaactgccagctctctgtggcactctagctctctctgtcagtatttggttggcaatgtagacatagtggatgagtgcaattacatatgttaggctcattctgaaatgcaggagcattttagattttcatgtagaagcctgacaagcaaactacatctaggatatactttgataactttgagttgagagccaaattttttgaaggtaaaccatctcyctgttttaaagtagtgtttaaaattataaaaattttaatacatctgtaatataaaatatttagatataactactacaagtgcaaatgaattttttttttctacttctgcattcaacttttctcttctcccttcagggaaaacacttttgtgtaaaggcctccaaaatatatgtagaggcgtatgtatgttaaaaacatgtatacatataatgcataaccaaaaaaatgaaatatcctaaacatatggacctgaaaattgcttataataaatttgaactgaacatataggcataaatgtggttcagaagtgtccagttgaagcaacttcactttgttaggtcaacaaaagttggggacaccaagatctactcctctgattttg

SEQ ID NO: 110060 - DNA, 626 bp, Homo sapiens
aagcaagtagaagctaatgcaaacagaggaactgccagctctctgtggcactctagctctctctgtcagtatttggttggcaatgtagacatagtggatgagtgcaattacatatgttaggctcattctgaaatgcaggagcattttagattttcatgtagaagcctgacaagcaaactacatctaggatatactttgataactttgagttgagagccaaattttttgaaggtaaaccatctccctgttttaaagtagtgtttaaaattataaaaattttaatacatctgtaatataaaatatttagatataamtactacaagtgcaaatgaattttttttttctacttctgcattcaacttttctcttctcccttcagggaaaacacttttgtgtaaaggcctccaaaatatatgtagaggcgtatgtatgttaaaaacatgtatacatataatgcataaccaaaaaaatgaaatatcctaaacatatggacctgaaaattgcttataataaatttgaactgaacatataggcataaatgtggttcagaagtgtccagttgaagcaacttcactttgttaggtcaacaaaagttggggacaccaagatctactcctctgattttg

SEQ ID NO: 110061 - DNA, 626 bp, Homo sapiens
aagcaagtagaagctaatgcaaacagaggaactgccagctctctgtggcactctagctctctctgtcagtatttggttggcaatgtagacatagtggatgagtgcaattacatatgttaggctcattctgaaatgcaggagcattttagattttcatgtagaagcctgacaagcaaactacatctaggatatactttgataactttgagttgagagccaaattttttgaaggtaaaccatctccctgttttaaagtagtgtttaaaattataaaaattttaatacatctgtaatataaaatatttagatataactactacaagtgcaaatgaattttttttttctacttctgcattcaacttttctcttctcccttcagggaaaacacttttgtgtaaaggcctccaaaatatatgtagaggygtatgtatgttaaaaacatgtatacatataatgcataaccaaaaaaatgaaatatcctaaacatatggacctgaaaattgcttataataaatttgaactgaacatataggcataaatgtggttcagaagtgtccagttgaagcaacttcactttgttaggtcaacaaaagttggggacaccaagatctactcctctgattttg

SEQ ID NO: 110062 - DNA, 626 bp, Homo sapiens
aagcaagtagaagctaatgcaaacagaggaactgccagctctctgtggcactctagctctctctgtcagtatttggttggcaatgtagacatagtggatgagtgcaattacatatgttaggctcattctgaaatgcaggagcattttagattttcatgtagaagcctgacaagcaaactacatctaggatatactttgataactttgagttgagagccaaattttttgaaggtaaaccatctccctgttttaaagtagtgtttaaaattataaaaattttaatacatctgtaatataaaatatttagatataactactacaagtgcaaatgaattttttttttctacttctgcattcaacttttctcttctcccttcagggaaaacacttttgtgtaaaggcctccaaaatatatgtagaggcgtatgtatgttaaaaacatgtatacatataatgcataaccaaamaaatgaaatatcctaaacatatggacctgaaaattgcttataataaatttgaactgaacatataggcataaatgtggttcagaagtgtccagttgaagcaacttcactttgttaggtcaacaaaagttggggacaccaagatctactcctctgattttg

SEQ ID NO: 110063 - DNA, 595 bp, Homo sapiens
aagttattacataaaatatttgctagtagttaacaaatatatttgtaatacacatataaataaagcctcataacatgatagtaagcaaatatcaatcttaaaattttttaaataaaagagcaactatattacatactgactttttagagagggttggcatagaaagataaggagtcaaagaggaaggtaagaaaagagaaasgatgagaaagtaaatatacaagaaaacgtaaccagaggctcaaaaaaaaaaaaaaaaaaagcaaagtaggacagtaaaataaacattttgacctatttatatgatttttaagttcaaaataacttgctatgagattttcatcattaactgacatttagattagagaaaatatacatgaagcaagcatcaccccaggtaatacaacagctccgattccacttttcagctttgacctgcctcggccacctcgccccgacagtcctgcacctcgaggtctccgctttcctggaaatccagacccatggccctatgtaacagattaggaaaagtcaacattctgtgacagcccaaaataatttttaaatccaaatgccactgagataaaacatttta

SEQ ID NO: 110064 - DNA, 595 bp, Homo sapiens
aagttattacataaaatatttgctagtagttaacaaatatatttgtaatacacatataaataaagcctcataacatgatagtaagcaaatatcaatcttaaaattttttaaataaaagagcaactatattacatactgactttttagagagggttggcatagaaagataaggagtcaaagaggaaggtaagaaaagagaaaggatgagaaagtaaatatacaagaaaacgtaaccagaggctcaaaaaaaaaaaaaaaaaaagcaaagtaggacagtaaaataaacattttgacctatttatatgayttttaagttcaaaataacttgctatgagattttcatcattaactgacatttagattagagaaaatatacatgaagcaagcatcaccccaggtaatacaacagctccgattccacttttcagctttgacctgcctcggccacctcgccccgacagtcctgcacctcgaggtctccgctttcctggaaatccagacccatggccctatgtaacagattaggaaaagtcaacattctgtgacagcccaaaataatttttaaatccaaatgccactgagataaaacatttta

SEQ ID NO: 110065 - DNA, 595 bp, Homo sapiens
aagttattacataaaatatttgctagtagttaacaaatatatttgtaatacacatataaataaagcctcataacatgatagtaagcaaatatcaatcttaaaattttttaaataaaagagcaactatattacatactgactttttagagagggttggcatagaaagataaggagtcaaagaggaaggtaagaaaagagaaaggatgagaaagtaaatatacaagaaaacgtaaccagaggctcaaaaaaaaaaaaaaaaaaagcaaagtaggacagtaaaataaacattttgacctatttatatgatttttaagttcaaaataacttgctatgagattttcatcattaactgacatttagattagagaaaatatacatgaagcaagcmtcaccccaggtaatacaacagctccgattccacttttcagctttgacctgcctcggccacctcgccccgacagtcctgcacctcgaggtctccgctttcctggaaatccagacccatggccctatgtaacagattaggaaaagtcaacattctgtgacagcccaaaataatttttaaatccaaatgccactgagataaaacatttta

SEQ ID NO: 110066 - DNA, 595 bp, Homo sapiens
aagttattacataaaatatttgctagtagttaacaaatatatttgtaatacacatataaataaagcctcataacatgatagtaagcaaatatcaatcttaaaattttttaaataaaagagcaactatattacatactgactttttagagagggttggcatagaaagataaggagtcaaagaggaaggtaagaaaagagaaaggatgagaaagtaaatatacaagaaaacgtaaccagaggctcaaaaaaaaaaaaaaaaaaagcaaagtaggacagtaaaataaacattttgacctatttatatgatttttaagttcaaaataacttgctatgagattttcatcattaactgacatttagattagagaaaatatacatgaagcaagcatcaccccaggyaatacaacagctccgattccacttttcagctttgacctgcctcggccacctcgccccgacagtcctgcacctcgaggtctccgctttcctggaaatccagacccatggccctatgtaacagattaggaaaagtcaacattctgtgacagcccaaaataatttttaaatccaaatgccactgagataaaacatttta

SEQ ID NO: 110067 - DNA, 600 bp, Homo sapiens
cgtccctgggttggaagcatattctgtactgctacatcagcatgaaagtttatttttgctagtgtgtaacagtattcttcctgtcattaaaattaagtcagtttccttcactattcaacagttctcttatgaactcaacatttctacctcattcaccattgtatttagaggaaaatttattattattgttattacktttatttttgagacaagaacttgatccgtcactcaggttggagtgcagtggtgtgatcacagctcactgcagcctagaactcttgggctcaagtgatcctcctgcttctgcctcccaaagtgccaggattacaggagtaagccaaagcgtccagccaggaaaaattatttgaggattacaggaaagctgacaaaaggctttgtgaaagctttgctttaaataatctgaataataaatacttgaaatggaaataatttatctgacttcttacacaagaaataaacctatgggaaaatgtgttaaattccctgataatttcagacattaagtaccagagtatggtgttccctgccccctcacccttgttcgtactaattaattactccttgaaaaaacctggcacc

SEQ ID NO: 110068 - DNA, 476 bp, Homo sapiens
caggaagctgcctgggtttaaaaatttcccgacctcctgaaatgtctggggaccaggaaggtgggctcactgtattatgggtactccaagcctcctaggatatggcagttgagaaaatagatgtgtaaaactcagcaacataaaaggtcaaagccagcaactaaggaattttagracagcaaaaacaaatgcaaacatatggaaatttaggacaaattgcttcaaggaaggcaaaataagctaatcactaacagtgatttaaacatttaagtataacaaataacttaaatgattgctgctacagagacatcactacaatgaaacattaaaaattaaggtttatatgacatcaacattgactcatgaactgcaattactgcaccaaaaagtaaataaaagtcaatcacactttaagaattaacactagaagaaagtattggggggttatttttcttctaacaactatcactctactt

SEQ ID NO: 110069 - DNA, 476 bp, Homo sapiens
caggaagctgcctgggtttaaaaatttcccgacctcctgaaatgtctggggaccaggaaggtgggctcactgtattatgggtactccaagcctcctaggatatggcagttgagaaaatagatgtgtaaaactcagcaacataaaaggtcaaagccagcaactaaggaattttagaacagcaaaaacaaatgcaaacrtatggaaatttaggacaaattgcttcaaggaaggcaaaataagctaatcactaacagtgatttaaacatttaagtataacaaataacttaaatgattgctgctacagagacatcactacaatgaaacattaaaaattaaggtttatatgacatcaacattgactcatgaactgcaattactgcaccaaaaagtaaataaaagtcaatcacactttaagaattaacactagaagaaagtattggggggttatttttcttctaacaactatcactctactt

SEQ ID NO: 110070 - DNA, 641 bp, Homo sapiens
cactttacaaagttaatagaaaaaatatatgctaattggaaggagaggcttctgattgaggataaagtggaaattttcacatactgctaattacactttaatggagtaagaaaaaaagaattggaaatagtaccctataaaacttctgaaatgaaattacagtttctctctctctctctctttttttttttttttcttgagacggagtttcgctcttgttgcccaggcgagagtgcaatggcgctatctcagcacactgcaaccttcacctcccrggtttaagtgattcttttgcctcagcctcccaagtagctgggattacaggcatgcaccaccatgcccagctaattttttgtatttttagtgacccaccacgcctggctgtctcctctttttagaattaggagaactgatttttttcagtgctaaactggcactgtcctatgttttcaagaaagcaatatggtgaaacgaaagagcctggatagcatgttttgttagctggcgtctagttctttaagttccatgagtctattgtgtcttctttacatctcaaaaagaagagagaagaaacctgcatctaattactgaagcagtttcattcagcaaatgtaattgcatcgcaggcacatctcaaatta

SEQ ID NO: 110071 - DNA, 641 bp, Homo sapiens
cactttacaaagttaatagaaaaaatatatgctaattggaaggagaggcttctgattgaggataaagtggaaattttcacatactgctaattacactttaatggagtaagaaaaaaagaattggaaatagtaccctataaaacttctgaaatgaaattacagtttctctctctctctctctttttttttttttttcttgagacggagtttcgctcttgttgcccaggcgagagtgcaatggcgctatctcagcacactgcaaccttcacctcccgggtttaagtgattcttttgcctcagcctcccaagtagctgggattacaggcatgcaccaccatgcccagctaattttttgtatttttagtgacccaccacgcctggctgtctcctctttttagaattaggagaactgatttttttcagtgctaaactggcactgtcctatgttttcaagaaagcaatatggtgaaacraaagagcctggatagcatgttttgttagctggcgtctagttctttaagttccatgagtctattgtgtcttctttacatctcaaaaagaagagagaagaaacctgcatctaattactgaagcagtttcattcagcaaatgtaattgcatcgcaggcacatctcaaatta

SEQ ID NO: 110072 - DNA, 641 bp, Homo sapiens
cactttacaaagttaatagaaaaaatatatgctaattggaaggagaggcttctgattgaggataaagtggaaattttcacatactgctaattacactttaatggagtaagaaaaaaagaattggaaatagtaccctataaaacttctgaaatgaaattacagtttctctctctctctctctttttttttttttttcttgagacggagtttcgctcttgttgcccaggcgagagtgcaatggcgctatctcagcacactgcaaccttcacctcccgggtttaagtgattcttttgcctcagcctcccaagtagctgggattacaggcatgcaccaccatgcccagctaattttttgtatttttagtgacccaccacgcctggctgtctcctctttttagaattaggagaactgatttttttcagtgctaaactggcactgtcctatgttttcaagaaagcaatatggtgaaacgraagagcctggatagcatgttttgttagctggcgtctagttctttaagttccatgagtctattgtgtcttctttacatctcaaaaagaagagagaagaaacctgcatctaattactgaagcagtttcattcagcaaatgtaattgcatcgcaggcacatctcaaatta

SEQ ID NO: 110073 - DNA, 641 bp, Homo sapiens
cactttacaaagttaatagaaaaaatatatgctaattggaaggagaggcttctgattgaggataaagtggaaattttcacatactgctaattacactttaatggagtaagaaaaaaagaattggaaatagtaccctataaaacttctgaaatgaaattacagtttctctctctctctctctttttttttttttttcttgagacggagtttcgctcttgttgcccaggcgagagtgcaatggcgctatctcagcacactgcaaccttcacctcccgggtttaagtgattcttttgcctcagcctcccaagtagctgggattacaggcatgcaccaccatgcccagctaattttttgtatttttagtgacccaccacgcctggctgtctcctctttttagaattaggagaactgatttttttcagtgctaaactggcactgtcctatgttttcaagaaagcaatatggtgaaacgaaagagyctggatagcatgttttgttagctggcgtctagttctttaagttccatgagtctattgtgtcttctttacatctcaaaaagaagagagaagaaacctgcatctaattactgaagcagtttcattcagcaaatgtaattgcatcgcaggcacatctcaaatta

SEQ ID NO: 110074 - DNA, 571 bp, Homo sapiens
aattagagtatctaatcatatctgcaaaagaaaaattgaatygggggaaggttatatttaaggttatatttaatatctgagggcttttcgtcattggaatttattaatgttcaaggaaacctggaaagttttctaacacattaaaggagctttaattataagttccaaattcttcttagaagaagagaaccagcaggcccagacatttttactggtgagttctatcaaatgttttcaagaaatggattatttccattttataaaaacaactccagaataaaaaaaggtccatttgttcgttcattttatgaggccagtacaaccttgataccaatgttatatgagaaatgtgtaagacaggaaaattacatgccaactttcctcatgaacctaacggcaaacattttaaattaaaagttagcaaattaagtttagaagtctataaaaaatatagtatgaaaattgtgtttgttccatgaatgcaaggatttctaacaatagaaaaaaaaaactatgtataattcatcacattaacaagttaaaggaggaaaagcaaatcatcattgtagga

SEQ ID NO: 110075 - DNA, 571 bp, Homo sapiens
aattagagtatctaatcatatctgcaaaagaaaaattgaattgggggaaggttatatttaaggttatatttaatatctgagggcttttcgtcattggaatttattaatgttcaaggaaacctggaaagttttctaacacattaaaggagctttaattataagttccaaattcttcttagaagaagagaaccagcaggcccagacatttttactggtgagttctatcaaatgttttcaagaaatggattatttccattttataaaaacaactccagaataaaaaaaggtccatttgttcgttcatttyatgaggccagtacaaccttgataccaatgttatatgagaaatgtgtaagacaggaaaattacatgccaactttcctcatgaacctaacggcaaacattttaaattaaaagttagcaaattaagtttagaagtctataaaaaatatagtatgaaaattgtgtttgttccatgaatgcaaggatttctaacaatagaaaaaaaaaactatgtataattcatcacattaacaagttaaaggaggaaaagcaaatcatcattgtagga

SEQ ID NO: 110076 - DNA, 571 bp, Homo sapiens
aattagagtatctaatcatatctgcaaaagaaaaattgaattgggggaaggttatatttaaggttatatttaatatctgagggcttttcgtcattggaatttattaatgttcaaggaaacctggaaagttttctaacacattaaaggagctttaattataagttccaaattcttcttagaagaagagaaccagcaggcccagacatttttactggtgagttctatcaaatgttttcaagaaatggattatttccattttataaaaacaactccagaataaaaaaaggtccatttgttcgttcattttatgaggccagtacaaccttgataccaatrttatatgagaaatgtgtaagacaggaaaattacatgccaactttcctcatgaacctaacggcaaacattttaaattaaaagttagcaaattaagtttagaagtctataaaaaatatagtatgaaaattgtgtttgttccatgaatgcaaggatttctaacaatagaaaaaaaaaactatgtataattcatcacattaacaagttaaaggaggaaaagcaaatcatcattgtagga

SEQ ID NO: 110077 - DNA, 570 bp, Homo sapiens
atttattaatgttcaaggaaacctggaaagttttctaacacattaaaggagctttaattataagttccaaattcttcttagaagaagagaaccagcaggcccagacatttttactggtgagttctatcaaatgttttcaagaaatggattatttccattttataaaaacaactccagaataaaaaaaggtccatttgttcgttcattttatgaggccagtacaaccttgataccaatgttatatgagaaatgtgtaagacaggaaaattacatgccaactttcctcatgaacctaacggcaaacattttaaattaaaagttagcaaattaagtttagaagtctataaaaaatatagtatgaaaattgtgtttgttccatgaatgcaaggatttctaacaatagaaaaaaaaaactatgtataattcatcacattaacaagttaaaggaggaaaagcaaatcatcattgtagragaggcaaaaagtgaattcaataaaataaaatatttaactttgacaaatcttgtttagcaaacaagaaatagaagagctttcagtgtttgcttataaa

SEQ ID NO: 110078 - DNA, 618 bp, Homo sapiens
ttctggatgggggatttttgttgctaaaatcgggacagtaggggacatattgggactgtggaaaaaccctacagggatttatttcctaactatgaatttctatcttggtctagagacgactgttctcataaataggtagaatagatgtggtatttctggaatgagatttaacatctttacgtagcttgccctattaaaagtagacaaatgcttgtgagagaatatcatatacttttgaaagctaatgtcttaactaattcgctgtgagcaaagctcttgaagactgtgatgtaacagagattcctaggtatcagtgaagatacggagatgaaaaagggaagttgaaaaaagaagctgagagataagcatggaaatcattttccaaactcatttttccaatctscattttcctgtattgagaagtgaaaatatgttttctagagataaagttctagaaatgaactctgacatagatattttaaaacccatttcagaaacaaaataatatgtgaacctagagtagttgtaatttatgtccttttgtctgtctttatcctgtagttaagtttcccttgggatctctttgggaaaatggagtactgcattttacaaggcagg

SEQ ID NO: 110079 - DNA, 520 bp, Homo sapiens
gcagtgatgtgatcatagcttaatgcagcctctctstcctgggctcaagcaatcctcccacctcagcttccagagtacctggggctacagctgtgtgccaccacgcccagctaaaggacttgaattttcttacatatcttggccctatagagtggttctcaaccttggctgcacatgtctattacctgagaaaagttttaaataacctaatactcaggtcacaccctagactttaggggtgagacaagcattaatattttttaacactcttagaattaagagccactaatattgtagcactgcaattcctataaagagaacagatgtgagtagatttgttacagtattgttgtattcatctgttttcatgctgctgataaagacatacctgagacccggcaatttacaaaagaaagaggtttaatggacttacagttccacatgggtggggaggcctcacaatcatggtggaggacaaagaggagcaagtcacatcttacatggatggcagcaggcaaag

SEQ ID NO: 110080 - DNA, 558 bp, Homo sapiens
ttttattttgtttttaattgacataataattgcacatgtttatggggtacagtgtggtgctttagtgcatgtgtacattgygtaatggtcaaatttaaaaattaaatgtattgatagaaaaagtgtttggatatttgtatcctaaatgctaacagtgatgatatctggaatgtggaactgctggtaatttttccctttttcttttagagatttttgtacttatttttaataataaacatatactaattttataataaaaataacaatgaagtcctttccattttgaaaaattaattccaatagaaaaatactgtactcgagccactttccagggttttcttattcttagtgctggtataaggtaccagtgatattatattttcagatatgtttggcttttctgccttatggttgaagatgagcttaggaagtattgctgcctaattttcaggcttttgagccaatgcttggtgcacaaaaagcaccacatcaactttaaacagaatattctgcttctttagactgtatttcctactttttatagtatttattagcgcc

SEQ ID NO: 110081 - DNA, 490 bp, Homo sapiens
tctgtggtggggggctgggggagggatagcattaggagatatacctaatgtaaaagatgagttaatgggtgcagcacaccaacatggcacatgtatacatatgtaacaaacctgcacgttgtgcacatgtaccctagaacttaaagtataataaaaaaaattaaaatattctgcagtcacagtgactgtcttggcttctcttaatttatgaggacttttgtcttatagactcttttttttwaaaaaagatggggtcttgctatgttgtccatgctggagtgcagtggctattcacaggcttgatcattgcatactacagtctggaactcctggactcaagtctcccagtggctgggaatacaggtgagtgcctaccacacctagcctgatttacagatttttgacatctattatagttaaatgtattttcagcatttgcatattaaaggaataatattgatgcttaacttcattagtgatcagggaattc

SEQ ID NO: 110082 - DNA, 483 bp, Homo sapiens
agtacctatccgtcttccaccatttgctttagtttcagttcctgtatcatggaacggtctatgtcataaaagaagtcaaaagtagtcttgaataatcaaagttcttttgccagattgttgaatgccaatttgttttctggcactgctkttcctatgtcttcttcctcattatctggcactggttaggaagcactcatctccatgaagtcatcttttgttaattcctctggtgtggtgtgtattagctcttaaattcctccaagatccatatcttgcaacccttcactccacacctttttttcccttcatatccatacttctttccatggttttctctaaattgggtttgtcgtaattctgtagctatgcacaacatctggacacaaattgtacttttgtccagcaggaatttattgttttgagtttcatggttttctatatcaactgatgacatcttgaaaggtgtaagcctcccagacttcc

SEQ ID NO: 110083 - DNA, 441 bp, Homo sapiens
tatacagacttcaatgctgagttttatatcttaggaagttactccacctgacagaagctcaatttcccctgatttaggaaggcgatgctaatgggtattgcataggtgtaagtataaaaatgtatttaagagaatcccacaagcttggtataaggcagaaaataaatagatgcgacatgaataagtagtttattacatttgtatgctrcctgcggactagaggaagcaagaaacacagccactatgcttgattagcattatagagatggtacgatgatggttgccagaagctgggggaaggaggaaatggggaagtattgtttaatgggtatagagtttcagttttacaagatgaaacgaattatggagatggatggtagggacggctgcacaatgttatgactatatttagtaccactgaactgtacacttaaaatggtt

SEQ ID NO: 110084 - DNA, 441 bp, Homo sapiens
tatacagacttcaatgctgagttttatatcttaggaagttactccacctgacagaagctcaatttcccctgatttaggaaggcgatgctaatgggtattgcataggtgtaagtataaaaatgtatttaagagaatcccacaagcttggtataaggcagaaaataaatagatgcgacatgaataagtagtttattacatttgtatgctacctgcggactagaggaagcaagaaacacagccactatgcttgattagcattatagagatggtacgatgatggttgccagaagctgggggraggaggaaatggggaagtattgtttaatgggtatagagtttcagttttacaagatgaaacgaattatggagatggatggtagggacggctgcacaatgttatgactatatttagtaccactgaactgtacacttaaaatggtt

SEQ ID NO: 110085 - DNA, 441 bp, Homo sapiens
tatacagacttcaatgctgagttttatatcttaggaagttactccacctgacagaagctcaatttcccctgatttaggaaggcgatgctaatgggtattgcataggtgtaagtataaaaatgtatttaagagaatcccacaagcttggtataaggcagaaaataaatagatgcgacatgaataagtagtttattacatttgtatgctacctgcggactagaggaagcaagaaacacagccactatgcttgattagcattatagagatggtacgatgatggttgccagaagctgggggaaggaggaaatggggaagtattgtttaatgggtatagagtttcagttttacaagatgaaacgaattatggagatggatggtagggacggctgsacaatgttatgactatatttagtaccactgaactgtacacttaaaatggtt

SEQ ID NO: 110086 - DNA, 359 bp, Homo sapiens
acttctttaacgactttctatagtgtacgtctgctgacaaattttctcagcatttgtttatctataaggatctctatttcacttaactaaggttatttttgttgggtatgtattctaggttgactgtttctttaagcactttsaagatacttaaaagacggaattctattgtcttctggcttctgttgtttttcatgaactgtcagatatcttcttatcattgtcaaatatcttcttatcacatttagtatgtcttttctctctggctattcttatgatgttatctttatatttgattctcaccagattgattatgatgtttcttggtgatatgacttggctgtgtcccaacccacatc

SEQ ID NO: 110087 - DNA, 644 bp, Homo sapiens
ttatttttgttgggtatgtattctaggttgactgtttctttaagcactttgaagatacttaaaagacggaattctattgtcttctggcttctgttgtttttcatgaactgtcagatatcttcttatcattgtcaaatatcttcttatcacatttagtatgtcttttctctctggctattcttatgawgttatctttatatttgattctcaccagattgattatgatgtttcttggtgatatgacttggctgtgtcccaacccacatctcatttgaattctcatgtgttgtgggagggacctgatgggaggtaattgaatcatgtgggcaggcctttcccatgctgttcttgtgatagtgaataagactcatgaaatctgtttaaaagatgagagtttccctgcccaagctctctatcattgcctgctgccacccatgtgagacgtgacttgctcctccttactttccgctatgattatgaggcctccccagccatgtggaactgtgagtcaattaaacatctttcttttgtaaatcacccagtgtcaggtatgtcttattggcagcatgaaaatggtctaatacagtaaattagtaccagtagagttgggcactctgaaatgatacctgaaaatatggaagtga

SEQ ID NO: 110088 - DNA, 644 bp, Homo sapiens
ttatttttgttgggtatgtattctaggttgactgtttctttaagcactttgaagatacttaaaagacggaattctattgtcttctggcttctgttgtttttcatgaactgtcagatatcttcttatcattgtcaaatatcttcttatcacatttagtatgtcttttctctctggctattcttatgatgttatctttatatttgattctcaccagattgattatgatgtttcttggtgatatgacttggctgtgtcccaacccacatctcatttgaattctcatgtgttgtgggagggacctgatgggaggtaattgaatcatgtgggcaggcctttcccatgctgttcttgtgatagtgaataagactcatgaaatctgtttaaaagatgagagtttccctgcccaagctctctatcattgcctgctgccacccatgtgagacgtgacttgctcctccttactttccgctatgattatgaggcctccccagccatgtggaactgtgagtcaattaaacmtctttcttttgtaaatcacccagtgtcaggtatgtcttattggcagcatgaaaatggtctaatacagtaaattagtaccagtagagttgggcactctgaaatgatacctgaaaatatggaagtga

SEQ ID NO: 110089 - DNA, 643 bp, Homo sapiens
acaaattgtgttgagcatcttttcacatccccagtggccatttgtatgtcttctttggaaaatgaatctggaggacattatgctaagtgaaataagctggtcacacaaggacaagtactgcatgattccacttatattagatatctaaaatagtcaaaaacataaaagtgcagaatacaatagtggttaccagaggctgggaggtgtggaaagtggggagctattgttcaatgtgtataaagtttcagttatgctagatgaatamgttctagagatcttctgtacattatagtgcttattgttaacagcatgctattgtgaactttaaaatttaagaaggtaaatttcatgttaagtgttcttaccacaaaaaaatgacacttcaggaggtgttgaatatgtctattactttgattatggagatggtagcatgggtgtttgcacacatccaaattcatcaagttgtacaaattaaatatgtgcaattctttgtatacaaattatacctcaacaaagctgttaaaaacatttaaaaacagcaccatacctgtggagatgtaaacaaacagaaaaaaaggaaaataaggggtatgacaattcaccaagcttttaaaaattgcatgttccatatcataatttatat

SEQ ID NO: 110090 - DNA, 603 bp, Homo sapiens
catttttatttacccaactctctctcgctccctctctcttcatgaaactatagctccttgatgtttgaaagcaagtgttagcaatcagctttcccagggtgcacaggacaatggtttgattatgtaagtgccaataaggtctggcgaaggagtaaacacaaaaggaggtgttatttattgatgtattgatttatgtatattccttttgctatgactgtttcccacagcagggattaacacagtaagattgctgaactgctacagggacattttttgttttgtattttcacaacctatgcaaggaaactttagggactttgagtgatggacaaccccctatcagatatcatcagcctgaaacatccttatcttggcattaaattagaaggaaccccagaccctgcgtaccagaattgttagaatcacagtctcagtaaagaaccaactcctgatcacttctctaaaggaaagttctagaagtctgcacactctgcagtcactttcamttctatccaagtgtacacttagaactctagaaaacactacggacagtcttcagccaggtaaagcctaaaaccagcaaagaacagggagagtgaggga

SEQ ID NO: 110091 - DNA, 634 bp, Homo sapiens
tcttaaatgattttatgtttctataataaaatgcaatgcaaattgtaaaatgcaatatctaacttggtgagatcaggggaaatagctagtaatttkcttggtaagtgaagcagaacattaaatgacttattatcagattttatattgtattgagaatctgtgccataaatcttactatatttgaattataatggtggacaaatcactttctacgacttctgtatcatagtaaaggaaccgtgattatccttcattgattcaagaatgatatctatttgtcacttttgacatgacatagctgagttatattaggatataataagctccttctaaccattttgaatgtcggcatcaggggaatttaaaaaaaatgaaaaataaaattccagtcaatagtaaggacagtgataagaagcttgaaggactttttaaaaaatataaagtagggtaatatattgtgattctttcagagttcacatcaaatgtatttgtgtgtgtgtataacaattttgttaaagctgcaggtcttaagatgaaaaaaactaaagagtgtactctgaagtataaattagatatacattcatggaaaagatagaccctctttatggatgagaatattaaatgttgtaaagat

SEQ ID NO: 110092 - DNA, 589 bp, Homo sapiens
  misc_feature (1)...(589): n = A,T,C or G
nnnnnnnnttcaccaagctgtgggaggtggaagcaaaaaaactgctgggcaccacttccttccactcactgaactatgggagagaaaaagctgtaacactgagaactaaagtgacatgcttaagacatttcagctggctcacagaaaaccagaacttttttcacctactttaatcctaccagttgggtaaatactgcctaattctaaacttcgagagaaaacacataagattacacaggtaactaagatatgtttataagaagctatcttcatctttcaagatgaactgataaaggtcataatgttgtaaagattgaagttaaaattatatatgtataaattatatgtatatatatgcaccttatatatatgcagagacccatatgtatatatgcaccttacagtttactatgcttagaaaacaactgtctgcctaatttgtagctgtagcagcattttataaatgtgagaaaaccaaccttgaattaaatgcrcattataagaggggacagctgggactgcccctgtggcagcctggagccctctgggagctgggagatggcaagcccacaagagaagaagaggcagc

SEQ ID NO: 110093 - DNA, 556 bp, Homo sapiens
tacttggctttctgcaactggtatttaagttagaaattttgtttgaaaactaactttagtagtgaaatttcctacattactagacattaacaaaatatcataaactgggtggtttataaacaacagaaatttatctctcacagttctggaggctaggaagtttaaagatcaaggaaccagcagatttggtgcctagtgaggatcatgctcctagactaccatctttttgctatgactgcatagtggaagcagggaggggtctctctggggtctctcctttataagggcactaatcycattcacgagggcagaaaggacttaggctctatctcctaatgtcctcactttggggttaggagttcaacatatgaattttggggggaaacaaacattgagattatagcagtattattatacattcaatttgttatttgctgattttgctccaagcagcttcctcaccatcaaatcactagctatgcatccatcatcattgctcctccatgtctcctatttaacttctcttctttgaaattctcttccactttccatctta

SEQ ID NO: 110094 - DNA, 556 bp, Homo sapiens
tacttggctttctgcaactggtatttaagttagaaattttgtttgaaaactaactttagtagtgaaatttcctacattactagacattaacaaaatatcataaactgggtggtttataaacaacagaaatttatctctcacagttctggaggctaggaagtttaaagatcaaggaaccagcagatttggtgcctagtgaggatcatgctcctagactaccatctttttgctatgactgcatagtggaagcagggaggggtctctctggggtctctcctttataagggcactaatcccattcacgagggcagaaaggacttaggctctatctcctaatgtcctcacttwggggttaggagttcaacatatgaattttggggggaaacaaacattgagattatagcagtattattatacattcaatttgttatttgctgattttgctccaagcagcttcctcaccatcaaatcactagctatgcatccatcatcattgctcctccatgtctcctatttaacttctcttctttgaaattctcttccactttccatctta

SEQ ID NO: 110095 - DNA, 489 bp, Homo sapiens
tagggattttattctaaagaattagtcagaaaaatagaaamaagtttgtaaatagcaagaatggcttcttctcttccaactgaatgagaatccaaggagggcagaaggacaagcaatacagtatgttaaatgaaatgcagtttacagtgaaaaccgatggagtgcatctagtgtcataatttggattgctcagtaaggaactagtttggtgtcacttctataaagatgtattagccaatggatcgcatagaaaatgcattatcttccattcttaaggaactgtttttagagtctgttttgtgtttatgcccattttaaaatgttttctatttgtggatttcatatataatgatttatcatagtaataaaaaagatgggagttcaaagcatgaaatcatattaggatagctctctgatgactgatatgacagaaagatgagactgatgtttcattctgtaaagcactatcatgacttagctatgaaacaa

SEQ ID NO: 110096 - DNA, 489 bp, Homo sapiens
tagggattttattctaaagaattagtcagaaaaatagaaacaagtttgtaaatagcaagaatggcttcttctcttccaastgaatgagaatccaaggagggcagaaggacaagcaatacagtatgttaaatgaaatgcagtttacagtgaaaaccgatggagtgcatctagtgtcataatttggattgctcagtaaggaactagtttggtgtcacttctataaagatgtattagccaatggatcgcatagaaaatgcattatcttccattcttaaggaactgtttttagagtctgttttgtgtttatgcccattttaaaatgttttctatttgtggatttcatatataatgatttatcatagtaataaaaaagatgggagttcaaagcatgaaatcatattaggatagctctctgatgactgatatgacagaaagatgagactgatgtttcattctgtaaagcactatcatgacttagctatgaaacaa

SEQ ID NO: 110097 - DNA, 489 bp, Homo sapiens
tagggattttattctaaagaattagtcagaaaaatagaaacaagtttgtaaatagcaagaatggcttcttctcttccaactgaatgagaatccaaggagggcagaaggacaagcaatacastatgttaaatgaaatgcagtttacagtgaaaaccgatggagtgcatctagtgtcataatttggattgctcagtaaggaactagtttggtgtcacttctataaagatgtattagccaatggatcgcatagaaaatgcattatcttccattcttaaggaactgtttttagagtctgttttgtgtttatgcccattttaaaatgttttctatttgtggatttcatatataatgatttatcatagtaataaaaaagatgggagttcaaagcatgaaatcatattaggatagctctctgatgactgatatgacagaaagatgagactgatgtttcattctgtaaagcactatcatgacttagctatgaaacaa

SEQ ID NO: 110098 - DNA, 489 bp, Homo sapiens
tagggattttattctaaagaattagtcagaaaaatagaaacaagtttgtaaatagcaagaatggcttcttctcttccaactgaatgagaatccaaggagggcagaaggacaagcaatacagtatgttaaatgaaatgcagtttacagtgaaaaccgatggagtgcatctagtgtcataatttggattgctcagtaaggaactagtttggtgtcacttctataaagatgtattagccaatggatygcatagaaaatgcattatcttccattcttaaggaactgtttttagagtctgttttgtgtttatgcccattttaaaatgttttctatttgtggatttcatatataatgatttatcatagtaataaaaaagatgggagttcaaagcatgaaatcatattaggatagctctctgatgactgatatgacagaaagatgagactgatgtttcattctgtaaagcactatcatgacttagctatgaaacaa

SEQ ID NO: 110099 - DNA, 589 bp, Homo sapiens
tatccctgatttttccatctggttttactgtggaaaatggctgcaatatgtaaagataagtgtgctaaaacagtgttactgtaaagaaactttgtgaataagtcacgcaataaagtgaaagctggaaaaagtatgcctcttaaccatgaagaacaatagcatgtcatatctgagtgtagacctcgtgaatggataatctatttccactagatgtcacaaatacagactcatcattaccagcagcttagaggcaaagtactgaactgtcaattcttcttctaagtgcccactagggacataaaatagttaatgtcattagttaatgaatttgtttgtaatgctcgaaagaaatctaaagatgacccactaactacaaaatagtctaattaactttgttgttcatcacaactacatcaaacaggcttgtattctggcttctataatacacagattttaatatatgggctcactttcatacagatatttgcagtaaatcagtaagatctgcattccaatrcattgcctcaaccaagcaagaggattcattttaatgatctcccactgtgccctgttattaagtttcactaag

SEQ ID NO: 110100 - DNA, 564 bp, Homo sapiens
tgcattcctgttgtcccgaccaaaagataccttttccaaaaccaccctggccctccacacaccttgccctgtacccataaaaaccccaagctcccctggcaaaggggcagagtggctcggcagagaaggagagaagaagcatctgaacattgagaggagaagaggcagctgaacattggggactatggttcatccccagccaaactccaggggaagattatcttcttgctccatcccctttccagctccccatcctattaagagtcactgccattgctcaataaaactctctgcatacaccacccttcaatccatttgtgtgacctgattcttcctggattctggacaagaattcgggacacactgggtgcgggaacccaaaaagtctgtcacactgagtcttcactgagtgtttaacrcttaagctgtgtgcagtggcaaagctaaaagagaattgtttgtaccacacaccctctggggctccagaggtcatggacaaccctagatattgtcgcaggccggtacagggttcattcctgccagcacccaaaggcacttgcccca

SEQ ID NO: 110101 - DNA, 606 bp, Homo sapiens
taaaaagatatatatatatattatcatggtaatctgtacataacatagaatttaccattttaaccctttctaagtgtacaactcagtgacattaagtgcattcacattactgtgcagccatgaccaccattcatctccagaacgttttcttcttcccaaattgaaactctgtatccattaaacaatgactcttcttctcccctgcccccagcccctgccaaccaccattctacttgctgtctstatgattttgactactctaggtacctcaaataagtgcaatcatacagtatttgtgtttttgtgactggcttatttcatttagtataacgtcttcaagggtcaaccacgttgtgcatgtgtcaaaatggccttccttttcaagactgaataatattgtgttgtatgtacataccgcatcttgtttatccattcatcagtctatggacatttgggttctttccacctttaggcaattgagaataatgctgctatgaacaatgttgtacatatatctgtttgagttcagagcccttgctttgcattattgcacttaattgctacccaatgtggtctcatagccaatatttactaggaagtgtttta

SEQ ID NO: 110102 - DNA, 606 bp, Homo sapiens
taaaaagatatatatatatattatcatggtaatctgtacataacatagaatttaccattttaaccctttctaagtgtacaactcagtgacattaagtgcattcacattactgtgcagccatgaccaccattcatctccagaacgttttcttcttcccaaattgaaactctgtatccattaaacaatgactcttcttctcccctgcccccagcccctgccaaccaccattctacttgctgtctctatgattttgactactctaggtacctcaaataagtgcaatcatacagtatttgtgtttttgtgactggcttatttcatttagtataacgtcttcaagggtcaaccacrttgtgcatgtgtcaaaatggccttccttttcaagactgaataatattgtgttgtatgtacataccgcatcttgtttatccattcatcagtctatggacatttgggttctttccacctttaggcaattgagaataatgctgctatgaacaatgttgtacatatatctgtttgagttcagagcccttgctttgcattattgcacttaattgctacccaatgtggtctcatagccaatatttactaggaagtgtttta

SEQ ID NO: 110103 - DNA, 606 bp, Homo sapiens
taaaaagatatatatatatattatcatggtaatctgtacataacatagaatttaccattttaaccctttctaagtgtacaactcagtgacattaagtgcattcacattactgtgcagccatgaccaccattcatctccagaacgttttcttcttcccaaattgaaactctgtatccattaaacaatgactcttcttctcccctgcccccagcccctgccaaccaccattctacttgctgtctctatgattttgactactctaggtacctcaaataagtgcaatcatacagtatttgtgtttttgtgactggcttatttcatttagtataacgtcttcaagggtcaaccacgttgtgcatgtgtcaaaatggccttccttttcaagactgaataatattgtgttgtatgtacataccgcatcttgtttatccattcatcagtctatggacatttgggttctttccacctttaggcaattgagaataatgctgctatgaacaatgttgtacatatatctgtttgagttcagagcccttgctttgmattattgcacttaattgctacccaatgtggtctcatagccaatatttactaggaagtgtttta

SEQ ID NO: 110104 - DNA, 626 bp, Homo sapiens
aagctgagtaattggctggagtaaaatgagcactttcaaatactcagctctttcaggaaacaaaacgactgcataattgtctaaaactgcagtctgacaacctgaaaaccactgcacctctatttaatttacattccaggaaaactcagtcaaagatccaattacaatgtattaccttggatggaatttgaatactatatatgctcrttgcactttccaattagtagtcaacaagcatgttatttttaccccattatatattcgtctaataacaacttcccatttggtgcaccaacagttctggttggtaccggagggggagcaagacacaaatctgaaccatttagggagtttctctaaacacgttttatgaaaccctacccttaaagcctatatgccatgcacaataccaaccttatggacattcgccttgtaatcggtgaaccgaggctggccgcctgccaaggtgtaggcattaccctctctaaacacactgatcctctgagcagacagcttaggggagcacatctggggcctggggactttcccagacccataaacaccatccattgtttcaagagactcttgcagaaaactgtgagggtattcctcctttggtgactcta

SEQ ID NO: 110105 - DNA, 626 bp, Homo sapiens
aagctgagtaattggctggagtaaaatgagcactttcaaatactcagctctttcaggaaacaaaacgactgcataattgtctaaaactgcagtctgacaacctgaaaaccactgcacctctatttaatttacattccaggaaaactcagtcaaagatccaattacaatgtattaccttggatggaatttgaatactatatatgctcgttgcactttccaattagtagtcaacaagcatgttatttttaccccattatatattcgtctaataacaacttcccatttggtgcaccaacagttctggttggtaccggagggggagcaagacacaaatctgaaccatttagggagtttctctaaacacgttttatgaaaccctacccttaaagcctatatgccatgcacaataccaaccttatggacattcgccttgtaatcggtgaaccgaggctggccgcctgccaaggtgtaggcattaccctctctaaacacactgatcctctgagcagacagcttaggggagcacatctggggcctggggacttycccagacccataaacaccatccattgtttcaagagactcttgcagaaaactgtgagggtattcctcctttggtgactcta

SEQ ID NO: 110106 - DNA, 634 bp, Homo sapiens
gtttatttttcttcattattattaacaataagatgctattaaaatgtcacatttatttaatgatttgaattctgttatttaaattttacatgtttagcatcaataatctaatgagaaactaactctgttatctcaatgaygtattattaatagttattattaaattctgtattataaggaaatcaaggctacatgacaataattcattacacactaaaatatttaataaagtaaaatagctttataagcattttcccagacacaatatgtacgaagaaatgtgcagattatatgtctcattgttgctaattcttttcagtagagtcagctgcttattttcctcttctgcaattagcatttgtaagtatatgctgtttatttgagatattttaaataactattaaaacttcagaatttctatatttccttagagctgtaaaatttaaagtgtgttatttagaatgattaccacatttaacccaagtttaaaaaatttaacacgtcactggatgaaatgtaaaattagtgatgtgtacaaataaaatctaaaaactccataatttaaaggtattatatctttaattgtatcttaaatcatattctaatacatttgtgttttattattctttaagag

SEQ ID NO: 110107 - DNA, 609 bp, Homo sapiens
  misc_feature (1)...(609): n = A,T,C or G
nnnnnnnnngaagtctgacacagatggagtgccccaaaattctcttttaagtgtgcaggtgaaaattcctagatctgagaatcggtgaccgatttgaatagcttcaatcgagaaaaatttcctgacttgacacagtcatagtctagttgaatgcacagraagtcatgtctcattgagaaaggatgatataaccccccacagcaatatgtcttctccgtgtcttctcaaaagagatcagaggtcatttaaccgaaatggcattatcaagacttatagaggtctttttggccttagtttatacatatacatttcgttggctataaaacaacactgtgctacttgaacagagaaaggtgctaattaaaggcagtaattacaaatgcagttctgacttagattttaagtgaacgttctattttcaggatttgaatcttctattggttccctgacctagaaagactgtgtctgaaaatgtcacaggtttcactcccattattaatacttgtgagaaactggtacatgtgtatttccctctggcataacactaaccccttaaatattctgagtaattttgagcatgccataataaacactagaaattgaaaggat

SEQ ID NO: 110108 - DNA, 607 bp, Homo sapiens
tataagcagccttctgtgaaatgtttgctttaactaataatttgaaataagtgtcataaacctttttgattctccaattctgatttcaaacacaatagttcattttagattyaacttaatagttttcttttacaatagctatgtttaagaagctttttatagatttataccagtaacatactttttctattggattgttggttttcttctcatatattcttatttaacttatatattctcctttcaacttagcaacattaaggtcatgtcatcaaaccatatcactctttaactgttgatctacagatccccttgtagcagtacttttagttatctcagtaatatttccacaacaaacaccctgccaattatcttgactatttcaacatgcttatctatacctgagcttctcagttccttaacctacttttaataaatcttctcatacacattaccacccatcgccatgcttgtgaatcagtgtctcaaccattgttttgatataatgatctcctcagcaattaggggacccagttggaaccacggtacctgtagtatctgaacagtctgctctggggctctttaagagaatggtctaagcagagca

SEQ ID NO: 110109 - DNA, 607 bp, Homo sapiens
tataagcagccttctgtgaaatgtttgctttaactaataatttgaaataagtgtcataaacctttttgattctccaattctgatttcaaacacaatagttcattttagatttaacttaatagttttcttttacaatagctatgtttaagaagctttttatagatttataccagtaacatactttttctattggattgttggttttcttctcatatattcttatttaacttatatattctcctttcaacttagcaacattaaggtcatgtcatcaaaccatatcactctttaactgttgatctacagatccccttgtagcagtacttttagttatctcagtaatatttccacaacaaacaccctgccaattatcttgactatttcaacatgcttatctatacctgagcttctcagttccttaacctacttttaataaatcttctcatacacattaccacccatcgccatgcttgtgaatcagtgtctcaaccattgttttgatataatgatctcctcagcaattaggggacccagttggaaccacggtacctgtagtatctgaasagtctgctctggggctctttaagagaatggtctaagcagagca

SEQ ID NO: 110110 - DNA, 607 bp, Homo sapiens
attagcacgatttttaacagactgtcttatctggcaatgcaaattcttgagcatagtttttcttctttaaatttccttcaactattatttgtcttattgattttttgaatctatgcacatagtataattctccatttatttataccctatttaattcttctcagctatgtattttagttcccactagagacattatatgcatacttcaatagctttattgctattgttgtgcttttgtatatttagttttccatttgtaacgttggtatacagatatactattaatatttaacattgatttcaaatcctagattttactcacttcacttattaacttcaacaggttttcaatacatatttttactatatttgaaagcactcwtctataattaaaaatttaattatccataattatttgaaaaatataagttgtatttcagtatttcttattttagttgtattaaaccatgtacaaataattatacatctcaatatattttcacaaataaacagatgataataagatgcacagagacttatgtaattttttagtcttcctcttagggaattttttttccaatattttgtcattgagtatatttgctat

SEQ ID NO: 110111 - DNA, 553 bp, Homo sapiens
ctttaatttctctcagtttttgctataatatataaccttccacttgttatatgagaacactataattttaagaggtatcttgcagattctatcattttatttataaccttccacttgttatatgagaacactataattttaagaggtatcttgcagattctatcattttattttgcttttactcttttttttcttaagattctggaaacattttcccaatgcttttcctaactgcttacacaaccacttaatatatggctttccatgtcttaaaaataagtactcttctgaccaaactgamcttccaccatgcatggaggacatgggtgtgaacctgaggcccaacccaactgtataaggtttagtgcatgttatagtccttttcccatcctcctacttccccttgccatatttataatacaaaaattgggcaaaaatacatagcttattatttaactttgttttttaaagtctttttttctacgcacacacacacagagaaatgaaataggaataatgttaatataagaaattccagagggtcaaggaaagg

SEQ ID NO: 110112 - DNA, 624 bp, Homo sapiens
tgaagtgtgttttttttttttcaggccacagatcatcaggtcttgtttttgttatccattcagccaatctatgtcttttgattggagagtttaatccatttccatttaatgttattattgataagaaagagcttactcctgccatttcattgttttctgtttcatttctttcttgttttctcctctgtagtttcttttccttctttcgttccttcctgtcttccttttaatgaaggtgactttctctggtggtataatttaatttctttctttttattttttgtgtatctgtggtatgttttttgatttgtgattaccatgaggcytgatatcttataacccattattttaagccgataacaacttagcactgctttcattaacaaacaaactaacaagcaaaaagaaagctaataagaactccacactttaatcttgttccctactttttaacttttcattgtttctatttatatcttactgtctggtctatgtcttgaaaagttgttgtagttatgatttttggttgatctattttttagtctttctacttaagatgagaccacagttacggtggtataatattctgtgtttttctgtttacttactattaccactaagttt

SEQ ID NO: 110113 - DNA, 624 bp, Homo sapiens
tgaagtgtgttttttttttttcaggccacagatcatcaggtcttgtttttgttatccattcagccaatctatgtcttttgattggagagtttaatccatttccatttaatgttattattgataagaaagagcttactcctgccatttcattgttttctgtttcatttctttcttgttttctcctctgtagtttcttttccttctttcgttccttcctgtcttccttttaatgaaggtgactttctctggtggtataatttaatttctttctttttattttttgtgtatctgtggtatgttttttgatttgtgattaccatgaggcttgatatcttataacccattattttaagcygataacaacttagcactgctttcattaacaaacaaactaacaagcaaaaagaaagctaataagaactccacactttaatcttgttccctactttttaacttttcattgtttctatttatatcttactgtctggtctatgtcttgaaaagttgttgtagttatgatttttggttgatctattttttagtctttctacttaagatgagaccacagttacggtggtataatattctgtgtttttctgtttacttactattaccactaagttt

SEQ ID NO: 110114 - DNA, 624 bp, Homo sapiens
tgaagtgtgttttttttttttcaggccacagatcatcaggtcttgtttttgttatccattcagccaatctatgtcttttgattggagagtttaatccatttccatttaatgttattattgataagaaagagcttactcctgccatttcattgttttctgtttcatttctttcttgttttctcctctgtagtttcttttccttctttcgttccttcctgtcttccttttaatgaaggtgactttctctggtggtataatttaatttctttctttttattttttgtgtatctgtggtatgttttttgatttgtgattaccatgaggcttgatatcttataacccattattttaagccgataacaacttagcactgctttcattaacaaacaaactaacaagcaaaaagaaagctaataagaactccacactttaatcttgttccctactttttaacttttcattgtttctatttatatcttamtgtctggtctatgtcttgaaaagttgttgtagttatgatttttggttgatctattttttagtctttctacttaagatgagaccacagttacggtggtataatattctgtgtttttctgtttacttactattaccactaagttt

SEQ ID NO: 110115 - DNA, 611 bp, Homo sapiens
tttactaatgctaatactttagaatgtatctcttccgttttatataagaaatctggggctctggacgctactttgggctcagacaacttatgaaaacagaacacacagtcttaaaatagaatgtagacctaaaacacctaaaaacacttamctttgtaagattgtaacaaaaattaatacaaatggagttgatagctctaatgtagtggtggacccaaaagccatattagtactagcaaaagggcagaattcacacagtatcatagttgttctgcaagagctttggcacctagtcatgtccaaagcagatataaaactccctcagccacctgaaggacagtgttgcagcaattcatcaaaaagaaaaaccacaggcccttctttccttccattcgatttaactggtcttcattttccacagtagtaaacgttctagatgcctcttgtagacctcaaagtatgggaaaggaagcttctagtcaaaggttttttatcttaagatactataaatgatgctaatttttagtccacttgaaatatgtaagttgtgctataacaaatcattctgtcacgtgaccactttccatgtagttgaactgatcgagaaagta

SEQ ID NO: 110116 - DNA, 601 bp, Homo sapiens
atggccggctgcaccaggggaggtgattaagaaaagacaacccctgtcccgcctgctccatcctgcccacatgcctggagccacaragccagcctgccagacctgtgtaggcattgctgggcgtaggcttggtgtggccctatcccaaaagtcagtcagccagctcgccttgccaatcgcactgagttcggagctgtgctggaaaggactggctggtgtggagagaaaggcggcttccatgtggcctgcaggggctggacagcaggcagtgccaactgggagaatgacgatgccaatccatagcctagagttctgtgacaagggccactttgaagagaactcactagaaaatcaaggaggaaatccccagccaagacgatataaaaatatagcatccctaagcaggtgccactgtgtgcagtgaacctccatcttctccacggccctgcccggtcatcacagctagcccattttatagaccaaggacactgttttaggcagtttttgcatcactataaaggaatacctgagactcagtaatttataaagaaaaggagttgaattcgctcatggttctcaggctgtatgggaagcatggtgc

SEQ ID NO: 110117 - DNA, 631 bp, Homo sapiens
ctttcctcttctagataagacaaccatatcatttccaagcaattcctsttttatttcttccttttcaatctttacatctcacatttctatattatcagcttttcctaggaactccacaaaaatgtgaaataccacctatcagattgccaaaaatgcaaaaatctagcaaatgtaagcattgatgaggacataaaagatcagtaagaaggctgttaatgggagggtaaattttaaaaatacgtttaagatgcataaataccaaattctagaatatggtgatatatagagagaggtcttcaaatctatataatgtttcaagtcctaaaaaagttctcagaatatagtaatatgaaattctaacgcatgacacaacatgaataaaacatctgaaaactgaaaaacatcgttgaaagaaattaaagaagacttgaataactggacaaacatctcatgttcatgaattagaagacttaatattaagatggcaatatcctccaaagtaatctacagattcaacacaatctccataaggatctcagacgaattctttgtaaaaattgtcaagttgattctaaaatccatatggaattgcaaggataaccagaatagctaaaacaataaagaaaaagaa

SEQ ID NO: 110118 - DNA, 502 bp, Homo sapiens
atgtaaatgactgcttgggtggtgcttaaaacaggaatcagagatttaaataaaagggattaagttataaataatctctcaaagtagcaggtggctggaaaaaaaatgtaagagaaaacaaagacaatatcatagagattttaaaatctgcagttatgctagagaagagaagaaaagctacattgagggctgggtggcaggaaagaaagagattcagggggttataattcagtgttgacctgttgtgacaaaggactgagaatggagtttcctcatttgtaaaacttgttattcacatttgtaaaatgtgagatttacctgtaagatctttaaaaacacctagcatgtaaaagtactggttacatgttagtatgggtggatcaggttttggtggggccatttatataatttgggagagtatgatgaaaaatacaagaataaaaaattacaaattcagaattatatacatttstgttatttgtattaaacatgaaaaatcaca

SEQ ID NO: 110119 - DNA, 573 bp, Homo sapiens
aatagactttttattagaagccattgaaccaaaaggacagtgggatagtatcttcattgttttgcaagaaaaagactatcaaccaagaattctatatctagctaatttaccattcaaaatggatagattaagacattttcagataaataaaaactgacagaattcattgctagcaaatctaccctttaagaaatacttaagggaggtcttcagggtgaaagggcatttgatggtaattcaaattcatacaaagaaataaaatgtaccagtaaaagtaattataccatgattatgaaagtcagtataaatttattttaatggkatcttttttcttctatttattttagaggatagctttataaatccacaaataattataaattttttttcattgatttataatctaatgatgaaattcataaggaggatgaaattagagcaaggatttgtataatgttgaaaatatgttagtattaattcaaactagattcttttgagatgctaattatattccccaaggagaataaccagaaaaatgaccacagagttataaaagaaacacgaaaatttaag

SEQ ID NO: 110120 - DNA, 573 bp, Homo sapiens
aatagactttttattagaagccattgaaccaaaaggacagtgggatagtatcttcattgttttgcaagaaaaagactatcaaccaagaattctatatctagctaatttaccattcaaaatggatagattaagacattttcagataaataaaaactgacagaattcattgctagcaaatctaccctttaagaaatacttaagggaggtcttcagggtgaaagggcatttgatggtaattcaaattcatacaaagaaataaaatgtaccagtaaaagtaattataccatgattatgaaagtcagtataaatttattttaatgggatcttttttcttctatttattttagwggatagctttataaatccacaaataattataaattttttttcattgatttataatctaatgatgaaattcataaggaggatgaaattagagcaaggatttgtataatgttgaaaatatgttagtattaattcaaactagattcttttgagatgctaattatattccccaaggagaataaccagaaaaatgaccacagagttataaaagaaacacgaaaatttaag

SEQ ID NO: 110121 - DNA, 566 bp, Homo sapiens
ttttcaattattatatattcaaattcccataagatataatttatggttcttcatggactgttcattattgaacttgtaaatacaattcatttcttcagctaatagcaaacaatgggatataaataatggcacacagcaatccctgaaagatactatttcttaacttattaatatatagagagatttttcccagtattcaagctactacttgtttcatgttggtactttcagaactcagatgcaatgtggtgaaatttattctttagttcatccatttatttcattatgcaatatataatgagcagtaataggcattggagcaattgttagatataagaactgtaaaacaaatagaaagttccaaagggtatatagcacagtggagtatatagcacagtgaagtgagttatcwctgtgttacaagctaataggtatcacactatattaacagctaacatttattgagcattaagcagttacgtgtattaactcatttattccgtgtaacaacccaaaaaggtggacctttttattatgctccttagcatacaaatatgtgagtcata

SEQ ID NO: 110122 - DNA, 566 bp, Homo sapiens
ttttcaattattatatattcaaattcccataagatataatttatggttcttcatggactgttcattattgaacttgtaaatacaattcatttcttcagctaatagcaaacaatgggatataaataatggcacacagcaatccctgaaagatactatttcttaacttattaatatatagagagatttttcccagtattcaagctactacttgtttcatgttggtactttcagaactcagatgcaatgtggtgaaatttattctttagttcatccatttatttcattatgcaatatataatgagcagtaataggcattggagcaattgttagatataagaactgtaaaacaaatagaaagttccaaagggtatatagcacagtggagtatatagcacagtgaagtgagttatctctgtgttacaagctaataggtatcacactatattaacagctaacatttattgagcattaagcagttacgtgtattaactcatttattccktgtaacaacccaaaaaggtggacctttttattatgctccttagcatacaaatatgtgagtcata

SEQ ID NO: 110123 - DNA, 566 bp, Homo sapiens
ttttcaattattatatattcaaattcccataagatataatttatggttcttcatggactgttcattattgaacttgtaaatacaattcatttcttcagctaatagcaaacaatgggatataaataatggcacacagcaatccctgaaagatactatttcttaacttattaatatatagagagatttttcccagtattcaagctactacttgtttcatgttggtactttcagaactcagatgcaatgtggtgaaatttattctttagttcatccatttatttcattatgcaatatataatgagcagtaataggcattggagcaattgttagatataagaactgtaaaacaaatagaaagttccaaagggtatatagcacagtggagtatatagcacagtgaagtgagttatctctgtgttacaagctaataggtatcacactatattaacagctaacatttattgagcattaagcagttacgtgtattaactcatttattccgtgtaacaacccaaaaaggtggacctttttattatgmtccttagcatacaaatatgtgagtcata

SEQ ID NO: 110124 - DNA, 600 bp, Homo sapiens
gatttatattaacaggaatgtagtaataaagtgtcatcttagtctgtttaggttgctaaaacaaaataacataaactgggtattaaacaacaaagatggatttggttacaaaaacagaaaagtattgcttacaattctagaagctaggaggtgtaagatgaagaaaccaccagattcagtgtstggtgagcaccaactttcttgttcacagatagtatcttcccactgtgtcctcacatggcagaagggaactttgggatgtcttttataagggagctaatcccagtcacctcccaaaggccccacctcataataccatcactttggaggctaagatttcacatatggatttcagggaacacaaacatcggaccataacaaatattctattctcaaagaaaaaaatttctagataaaaccaaaattaaatatttttactggtattgaaaaagattttaatatgcaattatctatcagtttgtgtctgtccaaaatttatgtcataacccctatgacctcaaaatatgaacttatttggaaatatggtcattgcagatataattagtgatgttaggataaggtcacagtggagtacaaagg

SEQ ID NO: 110125 - DNA, 552 bp, Homo sapiens
ctgcagttaacaagacagagcccctatctcatagagttaaattgtggtagaaaagacagaatacaragtaaatatatctctttaagtagtggtaatagctattaagaaaagccttgtaagggatgaggtaacaactggtggtggttgacaggatgagcagaaaagcccattataaagtagaaatatctccacaaaaaaataattttgcaaggaagctttcaatgtggagatttggagacaatatattctgacagacaaaacaaaaatgcagatgttaaagccttggggtggactaaacttgcacatttaaacaaacagcaagaaggctggcatggctgcagaagagttagcaaaaggagagtcgggtaggaggtaggagtagaggcaagggccaaattgtgtacatttttgaggacatatcaggatgttacactgtatttccaaacacttaggtcaactcattgaaaattttttcactgggggaaaaataacatgatttgttgttgctgctgctgctgctgcataaaaaggctgtacgtgggacaaaagtag

SEQ ID NO: 110126 - DNA, 552 bp, Homo sapiens
ctgcagttaacaagacagagcccctatctcatagagttaaattgtggtagaaaagacagaatacagagtaaatatatctctttaagtagtggtaatagctattaagaaaagccttgtaagggatgaggtaacaactggtggtggttgacaggatgagcagaaaagmccattataaagtagaaatatctccacaaaaaaataattttgcaaggaagctttcaatgtggagatttggagacaatatattctgacagacaaaacaaaaatgcagatgttaaagccttggggtggactaaacttgcacatttaaacaaacagcaagaaggctggcatggctgcagaagagttagcaaaaggagagtcgggtaggaggtaggagtagaggcaagggccaaattgtgtacatttttgaggacatatcaggatgttacactgtatttccaaacacttaggtcaactcattgaaaattttttcactgggggaaaaataacatgatttgttgttgctgctgctgctgctgcataaaaaggctgtacgtgggacaaaagtag

SEQ ID NO: 110127 - DNA, 552 bp, Homo sapiens
ctgcagttaacaagacagagcccctatctcatagagttaaattgtggtagaaaagacagaatacagagtaaatatatctctttaagtagtggtaatagctattaagaaaagccttgtaagggatgaggtaacaactggtggtggttgacaggatgagcagaaaagcccattataaagtagaaatatctccacaaaaaaataattttgcaaggaagctttcaatgtggagatttggagacaatatattctgacagacaaaacaaaaatgcagatgttaaagccttggggtggactaaacttgmacatttaaacaaacagcaagaaggctggcatggctgcagaagagttagcaaaaggagagtcgggtaggaggtaggagtagaggcaagggccaaattgtgtacatttttgaggacatatcaggatgttacactgtatttccaaacacttaggtcaactcattgaaaattttttcactgggggaaaaataacatgatttgttgttgctgctgctgctgctgcataaaaaggctgtacgtgggacaaaagtag

SEQ ID NO: 110128 - DNA, 524 bp, Homo sapiens
tgggctgttcaatatagaagtctctaataacatgtgagtgttaaatataaaataattaaaataagaataaaaatgcaggtcctcagttgcactagctacattgtatgggctcaaaagctatatatggctagtggctaccatatcaaacagcatagatatagaatgttatcctcataggaagctgcattggatagcactgctttaaggaaagatcattctttgttgaaattttagttctgtaattgacatatcaacataaagtgtgagtagattagatttgcagataaaaactggatttacagattcaattttctcgaatattttaaacstaaaaaaatgcttttatacaaggcctgttctctctttttgaataaaattctataccaaatttcacaacacaaagatttgtgtgaatatttgggagagggactttgtctgcatgtacaattgtgtgtacatattaatgcttaaaggtaacgtattcagatttttaaatatcattttacaggtcaagtcagaagtag

SEQ ID NO: 110129 - DNA, 578 bp, Homo sapiens
aattgattttacccccgctaacagattgtgattcatacattatgtaacactgctcaagttgatttgcagttttgttcattcttttattttattaattcaacatataattatttagcacagtagttcaattttcattctgggcagtacaaatctgaatgaaacaatgatttgttcagaggaacatagaatctacttgagcagtctgttaaaagtgaaaatactattgacaagagacatgacattgaagattttcaagtggaggtattgtgattatacctatactaggaaatcaattctggtgttgacataaatgttgcataggtagtggggagaaatcagaatctagtataccagtttagggctgttgcagttaagtcaagaaacattatgtgaacccaaatttaaatgttataatagcattagataagtgagagttgagagatgacaatataaaatacatgtaggatatagactcagtaagatgcagtaatagggtgrtatcagcataagaatgctctcgtgcagtggaggatgcatgtaacatcatttacttaacaaggggaaaaagtgagagaaag

SEQ ID NO: 110130 - DNA, 607 bp, Homo sapiens
agtgttaccacataggttagccaaatatttgtgaaatgtttmacattatagacactttcaattctattactttaagtttgtacacatgatctttaaacataatcaacatacgcttaaataatttactttacacatgatcaagatatgcttaaataattcattttatagcacagacacagtattgtatgtatgaaaataattcctaagttatcaaattaatttaatgtttatttatttatttattttgagataaggtttcgctatttttgtccaggctggtcttgaactcatgggctcaagcattcctcctccttcggtctcccaaagtgctgggattataggcatgagccaccacacccagcctctaaattctcaattttaatgagctcatgcaagtttatgtggtttatatctataggatgtttaaattagaaaagtgtttctgctatatacttgaaaatgctatgaaactatagttaatgaatctccttaacttagtaaataataacaccatctgctaggttgcttaacctaaaaacccaatagttacattaatttctctttctttcattttacctcagtcactcaatcaacaagtcctctgtta

SEQ ID NO: 110131 - DNA, 607 bp, Homo sapiens
agtgttaccacataggttagccaaatatttgtgaaatgtttcacattatagacactttcaattctattactttaagtttgtamacatgatctttaaacataatcaacatacgcttaaataatttactttacacatgatcaagatatgcttaaataattcattttatagcacagacacagtattgtatgtatgaaaataattcctaagttatcaaattaatttaatgtttatttatttatttattttgagataaggtttcgctatttttgtccaggctggtcttgaactcatgggctcaagcattcctcctccttcggtctcccaaagtgctgggattataggcatgagccaccacacccagcctctaaattctcaattttaatgagctcatgcaagtttatgtggtttatatctataggatgtttaaattagaaaagtgtttctgctatatacttgaaaatgctatgaaactatagttaatgaatctccttaacttagtaaataataacaccatctgctaggttgcttaacctaaaaacccaatagttacattaatttctctttctttcattttacctcagtcactcaatcaacaagtcctctgtta

SEQ ID NO: 110132 - DNA, 607 bp, Homo sapiens
agtgttaccacataggttagccaaatatttgtgaaatgtttcacattatagacactttcaattctattactttaagtttgtacacatgatctttaaacataatcaacatacgcttaaataatttactttamacatgatcaagatatgcttaaataattcattttatagcacagacacagtattgtatgtatgaaaataattcctaagttatcaaattaatttaatgtttatttatttatttattttgagataaggtttcgctatttttgtccaggctggtcttgaactcatgggctcaagcattcctcctccttcggtctcccaaagtgctgggattataggcatgagccaccacacccagcctctaaattctcaattttaatgagctcatgcaagtttatgtggtttatatctataggatgtttaaattagaaaagtgtttctgctatatacttgaaaatgctatgaaactatagttaatgaatctccttaacttagtaaataataacaccatctgctaggttgcttaacctaaaaacccaatagttacattaatttctctttctttcattttacctcagtcactcaatcaacaagtcctctgtta

SEQ ID NO: 110133 - DNA, 607 bp, Homo sapiens
agtgttaccacataggttagccaaatatttgtgaaatgtttcacattatagacactttcaattctattactttaagtttgtacacatgatctttaaacataatcaacatacgcttaaataatttactttacacatgatcaagatatgcttaaataattcattttatagcacagamacagtattgtatgtatgaaaataattcctaagttatcaaattaatttaatgtttatttatttatttattttgagataaggtttcgctatttttgtccaggctggtcttgaactcatgggctcaagcattcctcctccttcggtctcccaaagtgctgggattataggcatgagccaccacacccagcctctaaattctcaattttaatgagctcatgcaagtttatgtggtttatatctataggatgtttaaattagaaaagtgtttctgctatatacttgaaaatgctatgaaactatagttaatgaatctccttaacttagtaaataataacaccatctgctaggttgcttaacctaaaaacccaatagttacattaatttctctttctttcattttacctcagtcactcaatcaacaagtcctctgtta

SEQ ID NO: 110134 - DNA, 589 bp, Homo sapiens
atgcaaatctatttgttgtagtcagagaagaaacatttagtaggtgttaggagagatcctttaaaaatatagtaagtcaattacgacatggttacccatgctgtcaacaaattaaccaatgatttggtttgctttctgtttgtttttcattcaagtttattaaagcctgttttgcatacaagaagagtacatatatttaagtacacagttctatgagttggtttactttcatgttgatgttttttgcaaaatgccttctacaggaaataattctaatcattatgtgtttttatttggatcttgtgtttgtacttggatctatatatcatccatttaaatattagtaagctaataaattagtatttgatgtgagagaagcattacttcactttcctataaaagaaatatgcttcaaggagtatgtaaatcctcaatgtgctttggaagttagtattttaagactttcttaaagttaccaaatgtttgtattttaaattactyggaacagtgtctgatacaatgcaagtgcttaacaaatgatggctctttgtaatgatagattaaactttcacagcaactgtgtgagtta

SEQ ID NO: 110135 - DNA, 420 bp, Homo sapiens
ataagctaatcttttttttttttttttttttttgagacagagtctctctgcgatgcccaggctggagtgcaatggcacaatttcggctcactgcaacctctgcttcctgggttcaagcacttctcctgcctcagcctaccgagtagctgggattacaggcatgtgccaccatgcccggctaattttgtatttttagtaaagacggggtttctccgtgttggccaggctggtttcaaactcccaacctcaggtgatctgcccgctttggcctcccaaaattgctgggattatagatgtaagccmccgtgcccggcccaatatgctgatatttaacctagaaataatactgaagtgtttcatatatactgatgtattaggtatggataaagctcctgtgaaaagagactctccaaaaactac

SEQ ID NO: 110136 - DNA, 561 bp, Homo sapiens
tattgtcattggagggttatatcttccactgatttcagactcacataagcagagtcttaaatctgtttctctttgtccctagaaagaagtgttgcatgtaatagttatacaattaatggttcagagtctggaatctcactgaattcttagaatgaagtaagaaagaattttcccagatagtcaacctgggtatttacctccacttgaaactacattcaaaggtggtcttttcttatacataatcaaggtgatttggtccctccctaaaacctacaggtcagatagcaaggttaccacttttttggttttttctcatttaatactattctacttttctttgattgcccaggcatccagaataaacaggaaattttctattccttattttttctaagttattttctcagtgaaatacatgacttatggcttagtatatcctaatgtttacatagtagatataytaatacatagtatatcctaatgtttgaactttaaatgatcaaatttagaaattttgttttttacctttgtttttatctccacagcccagtgagagtcaaa

SEQ ID NO: 110137 - DNA, 556 bp, Homo sapiens
tgggtttctgggaagaataaaccagaaatggaggggtggaccaagatggcctaatgaaagcctccactgatagtcccccacaacaggaacaccaaattygaccactatctacacagaaaaggaccttcccaagaaccaaaaattaggtaagcaatcacagtacctggttttaacttcatatcactgaaagaggcactgaagagggtaggaaagacagtcttgaatctctgacacaacccttccctcatctgttgcagtggtcatatggcaggaagagagtctcagtccttgcaggagggaggagggagcatgcagtgcctgtgggactgttcattggactcagtgcttccctgggtcacagcacaaaacaaaaccgggcttaagtcagctgatacttgcccacagaaggaaaatgagaccagctctagttagaagggaatcactcattccagcagttgaaaattgagttttggcaagccttgccatcgctggctaaagtactctgtggttctaaataaacttgaaaggcagcctaggccacagaagctgcaatttc

SEQ ID NO: 110138 - DNA, 556 bp, Homo sapiens
tgggtttctgggaagaataaaccagaaatggaggggtggaccaagatggcctaatgaaagcctccactgatagtcccccacaacaggaacaccaaattcgaccactatctacacagaaaaggaccttcccaagaaccaaaaattaggtaagcaatcacagtacctggttttaacttcatatcactgaaagaggcactgaagagggtaggaaagacagtcttgaatctctgacacaacccttccctcatctgttgcagtggtcatatggcaggaagagagtctcagtccttgcaggagggaggagggagcatgcagtgcctgtgggactgttcattggactcagtgcttccctgggtcacagcacaaaacaaaaccgggcttaagtcagctgatacttgcccacagaaggaaaatgagaccagctctagttagaagggaatcactcattccagcagttgaaaattgagttttggcaagccttgccatcrctggctaaagtactctgtggttctaaataaacttgaaaggcagcctaggccacagaagctgcaatttc

SEQ ID NO: 110139 - DNA, 547 bp, Homo sapiens
gcatttcgtggtttgagtgtcatcttagctgcactacactagaacagcaggtagacttctaaggattttgactctagtccctgtttcctggactatagctctggacccacctggggcctgagggaactggctgtcctgaaaggaagaatacagacctggctggctttgctacctgctgatgtcagagccccaggttcttgagcaaacaaacataggtggtagcaagggagaggttagagcaggcctggcaygagacccagtgctgtgcatacagtggagctctaatacatatggcagaagaattttcagtggaaactttacaggccaggagagagtggcatgacatatataaagtgctgaaggaaaacacttttaacctagaatagtatatctggtgaaaatatccttcagacatgaaagaggaatagagactttcccagacaaacaaaacctgagggatttcatcaacaccagacctgtcttacaagaaatgctaaagggaattctttgatctgaaagaaaaggacattaatgaggaataagaaat

SEQ ID NO: 110140 - DNA, 547 bp, Homo sapiens
gcatttcgtggtttgagtgtcatcttagctgcactacactagaacagcaggtagacttctaaggattttgactctagtccctgtttcctggactatagctctggacccacctggggcctgagggaactggctgtcctgaaaggaagaatacagacctggctggctttgctacctgctgatgtcagagccccaggttcttgagcaaacaaacataggtggtagcaagggagaggttagagcaggcctggcacgagayccagtgctgtgcatacagtggagctctaatacatatggcagaagaattttcagtggaaactttacaggccaggagagagtggcatgacatatataaagtgctgaaggaaaacacttttaacctagaatagtatatctggtgaaaatatccttcagacatgaaagaggaatagagactttcccagacaaacaaaacctgagggatttcatcaacaccagacctgtcttacaagaaatgctaaagggaattctttgatctgaaagaaaaggacattaatgaggaataagaaat

SEQ ID NO: 110141 - DNA, 547 bp, Homo sapiens
gcatttcgtggtttgagtgtcatcttagctgcactacactagaacagcaggtagacttctaaggattttgactctagtccctgtttcctggactatagctctggacccacctggggcctgagggaactggctgtcctgaaaggaagaatacagacctggctggctttgctacctgctgatgtcagagccccaggttcttgagcaaacaaacataggtggtagcaagggagaggttagagcaggcctggcacgagacccagtgctgtgcatacagtggagctctaatacatatggcagaagaattttcagtggaaactttacaggccaggagagagtggcatgacatatataaagtgctgaaggaaaacacttttaacctagaatagtatatctggtgaaaatatccttcagacatgaaagaggaatagagactttcccagacaaacaaaacctgagggatttcatcaacaccagacctgtcttacaagaaatgctaaagggaattctttgatytgaaagaaaaggacattaatgaggaataagaaat

SEQ ID NO: 110142 - DNA, 566 bp, Homo sapiens
tggggaatggcggacctcaccatcctgaatggaaggacataggcctggctggctttgccacctgctgattatagagccccagggccttgagtgaacagaggcagtagccagggagtggttagagcaggcmttgggcaagacccagagctgtgcttgcttcaggtctgacccagcatggtcatagtggtggtagccacagaggtgcttgtgtcactccatccccagctttaggtggctcagaacagagagagagagactctatgtttgggagaatgtaagagaagagaacaagagtctctgcctggtaatccagagaattctatcagatcttgtccaagaccatcaaggcagtacctctatgagcccacaggaaccacagcattactgactcgcggtgcccactaaagcatatgcaccttagaccacaatacccaagtcctttccaatatctggaaagccttcccaagaaggacaggtacaaataagcccagacagtgaagatgatatggtttggctgtgtcctcgcccaaatattgtcttgaattggagctcccataattcccata

SEQ ID NO: 110143 - DNA, 572 bp, Homo sapiens
tcttgtggcccagtcatctagcttttcccttcttcagagatcttagtcactcttcttttccgtagtctcctttgttgataagaaacagaggtagtgctcaattcatgatagttcattgagtgaccaactgaatgaatgaaggaagaaatagccttccaaggtgtctcctgttcatactactcttactgtgtatctacacttgcatctctatgactggagacattcactcaacaaaaaacccaaactgaacttataawcatatcctccctgttttttccccagtttttgtgccatgaattatactaggagacttagggagtttacttgatgtagtctgactgaattttgccaaaaaaactatgtcttagcctgcactttatgcactttttagaagtaatagaagctcaggtaagttaagtgttctttctaaggtgtcaaagctgctaagtgggaaagcccaaattgagaagcagatacttttagattttaagtgtgatttttttcctctgtaccagctcagttattctgcctgttcttttgcactttagcccattcattcatacaccaaatat

SEQ ID NO: 110144 - DNA, 596 bp, Homo sapiens
agtaaatttaaaactccccgttactttaggatcacacatctcctagggtaattgcaggagtgattgggaaagagcagtctactctgaggaggtcagatggagaccaagtgaatcctgtaaaatacaagtartgtcatatgacaaaaacgcaaatccaacactactaagtcttggatttcttctttgtttccttgattaattttcttgcttcgctccaaaaatcatagcataaagcaaattattgttctacctattgctttccactttactcatctttcatctggtgtctgtgtgattatgtctccattagagactgagacctgttattacctattaaatcccttcattccaggatgtggaactaattagataagtttcagattgttgaatttagtggttattttagaggtaattagatcgttaaatttaacacttgtagctccacatgatgatggagtgcaaatatctatttattcataaatatccataggcagggatcagaaccaacattgagaagacccactccctccaaacaagacgaccaagaaaacaaattgattctactaccttggatttattaaacttgctgagcaaag

SEQ ID NO: 110145 - DNA, 596 bp, Homo sapiens
agtaaatttaaaactccccgttactttaggatcacacatctcctagggtaattgcaggagtgattgggaaagagcagtctactctgaggaggtcagatggagaccaagtgaatcctgtaaaatacaagtaatgtcatatgacaaaaaygcaaatccaacactactaagtcttggatttcttctttgtttccttgattaattttcttgcttcgctccaaaaatcatagcataaagcaaattattgttctacctattgctttccactttactcatctttcatctggtgtctgtgtgattatgtctccattagagactgagacctgttattacctattaaatcccttcattccaggatgtggaactaattagataagtttcagattgttgaatttagtggttattttagaggtaattagatcgttaaatttaacacttgtagctccacatgatgatggagtgcaaatatctatttattcataaatatccataggcagggatcagaaccaacattgagaagacccactccctccaaacaagacgaccaagaaaacaaattgattctactaccttggatttattaaacttgctgagcaaag

SEQ ID NO: 110146 - DNA, 560 bp, Homo sapiens
cagagcaagtaagtaaagaggaggtttggaattagatatttggtgtatgaatgaatgggctaaagtgcgaaagaacaggcagaataactgagctggtacagaggaaaaaaatcacacttaaaatctaaaagtatctgcttctcaatttgggctttcccacttagcagctttgacaccttagaaagaacacttaacttacctgagcttctattacttctaaaaagtgcataaagtgcaggctaagacatagtttttttggcaaaattcagtcagactacatcaagtaaactccctaagtctcctagtataattcatggcacaaaaactggggaaaaaacagggaggatatgwttataagttcagtttgggttttttgttgagtgaatgtctccagtcatagagatgcaagtgtagatacacagtaagagtagtatgaacaggagacaccttggaaggctatttcttccttcattcattcagttggtcactcaatgaactatcatgaattgagcactacctctgtttcttatcaacaaaggagactacggaaaagaagagtg

SEQ ID NO: 110147 - DNA, 568 bp, Homo sapiens
ttgcagtctttcctcagattgggttttttttttttgggtgcaaacccaagtaaggctctccaatgaatgcttttgccatacktaagacaaatatacaatttttcaccagtatggcttctctgatgggtaagtcagagttttgttagaagcttttttcacacttgctggggcttctccccagggtgggttttctgaggtccaatgagatgttcatactgtctgcagcacaactgacactgaaggcatttaaaaagttgttctccggtgtgaattctcttacaacgagaagggctgagcattagtagaaagctctctcacactcagtgcatttctaaggtttcccacttgtatgaatcctcttgtgagtgatcaaacttgagctcagacggtaagttttcaaaacctctgggcatctgtagatttctcgttggagtgaggatgaagtgttctgttagggcagctctctgggcaaagaatttctcatatttccaattgcaggctctctggtccccactgaattctgagctctgagcaaagtctgagatttgtcctcatcttaatgagttct

SEQ ID NO: 110148 - DNA, 568 bp, Homo sapiens
ttgcagtctttcctcagattgggttttttttttttgggtgcaaacccaagtaaggctctccaatgaatgcttttgccatacttaagacaaatatacaatttttcaccagtatggcttctctgatgggtaagtcagagttttgttagaagcttttttcacacttgctggggcttctccccagggtgggttttctgaggtccaatgagatgttcatactgtctgcagcacaactgacactgaaggcatttaaaaagttgttctccggtgtgaattctcttacaacgagaagggctgagcattagtagaaagctctctcacactcagtgcatttctaaggtttcccacttgtatgaatcctcttgtgagtgatcaaayttgagctcagacggtaagttttcaaaacctctgggcatctgtagatttctcgttggagtgaggatgaagtgttctgttagggcagctctctgggcaaagaatttctcatatttccaattgcaggctctctggtccccactgaattctgagctctgagcaaagtctgagatttgtcctcatcttaatgagttct

SEQ ID NO: 110149 - DNA, 583 bp, Homo sapiens
aaatttgtttgcctttaccatatataatcacaagaagccttgaaatactatactagacttctcatgttttgtgtgtggkttgtgtgtgtgtgtgtgtgtgtgtgtgtgtgtgtgagagagagagagagagagagaaagttggtgatttttcggctattcacttcttttcagtatcagtgagctatggtaggaaccagtttgggagcagctgtttgattgtggaaagtctttacagagaaagttattctactttcttgcagatcaatacttaaatttttaatacaaaaagaaaatatagtttattcaactactttttgaaaaacaatctacatataccattagtgattaatgccaaatagtaaggctttcatggtttaaggaacactttctgcctttcgtatttctgtttcagtcatttttttcccctgcggtcgttatttaactcccagtgtagttgagaatcagctgaccatatctacttcatataaaacttttgtacatttgaaaattattcttaagtgtttgattggcctccatttttccagaaaaaaattatatctagtttttaaaacattttatctta

SEQ ID NO: 110150 - DNA, 184 bp, Homo sapiens
agaaagtacacattttagaactataaaatctcctcacaatgaggtatactctgaaaaatttcaaggaaccttgactctgtctctcagtcagttcagttacatcaactatccccaaacccartactctctgtccaacctcttctggatcatttgcaactctcaggcctaaatcaggtttgaattc

SEQ ID NO: 110151 - DNA, 571 bp, Homo sapiens
ctgcagtaatgatattacagttacagggtaaccaaacaatactcttgaattctttcatcagcaaagctgaaagtaatcctaatccaggtagccactctagtaaatgcaatcacctcagatacattcgtatgtataatatacgtgtaggtctgtgtatgtgtgtgcagttagttatgttaccaaattgtcatctcatattcattgagaatagggtatactcattaattaatcaacaaaagcctttgaaattcttagacaatggyagttactatagtggctacttggattagaattacagtgggtgttttggggtgttttaacttttcttttaagttcaggggtacatatgcaggatgtgcagatgtattacatagttaaacatgtatcatgggggtttgttgtatcaattacttcatcacccaagtattaagcctagtatcaattagttattttttctcatcctccttctcctctcaccctcctccctccaatagcccccatatgtgttgttctcctctgtgttcaagtgttcttttaccttataaatgaataaataagttgttttgcttgg

SEQ ID NO: 110152 - DNA, 557 bp, Homo sapiens
atatattttcgctattttttgcacatttcctctagtgtcaacttattttacatttcactagaatctaatttggcagcatattccacataatacaattgtaatatttatgtagaaattgagtgatcttaatccaagactgactactatatatagtatacacacacagcaaatatatttatataccacatatatacttatctatttaatatatggtatatactatatatatttatatatatrtgtgtgtatgtatccttaggacctataaaaatgggtttagaaagatgaggcttttttacttttatctttaatcatgaaaatttgcaatcccattagtataccttaaaaagtatcaaattatcttgaaaattataaatatgaactattgagataggtatttgagattcatgaagcttcaacaataagcaatgtgttctaataccaaggaattatgatatgattttctcaaatttgtggtcattttattaaagttactaatattctattatatattatatcccagacatgttatactttcagacaaaataaagatgtaa

SEQ ID NO: 110153 - DNA, 607 bp, Homo sapiens
tatgtcttggccctatgtgaagtattttggggaatctgctgttggtgtgcccagcctgtgcatactactttattaccctttgtggggaagtctgagctatgtagaaaagatacatggaagctgaaggggatagtggaagggtatttttcccttagggatgttggataaattgtgtgttgttcacctgtgttttgactgcaatatgtcatatgaggtcaagtgtggagttttccacttatggcactcaagcactcaaaaagttttggatttttaagcatttcaaatttttggayttggaatgcttaaactatgtgtgtatgtatatctctgtgtgtgtgtgtgtgtgtgtctgtgtctgagagagagagagagagagaggagattacaaggaatttgctcatgtgactatgaagatggacaagtcccaagatctacagagtgagccagcaagctggagaccaaggagagtgaatggcttaatttctctgagtcttaaggtccctacaaatcaggagagtagatggtgtagttcctatttggaggctggtaggctcagggcccaggaagagcttgtattagtccattctcacgttgctgcaaagatact

SEQ ID NO: 110154 - DNA, 609 bp, Homo sapiens
atataatgcagttccaaaatattgactggattatttttatagaatcaacttctcctttgaaatgctttaggttttaatccattcttaattatctatttcttcagctattttgaagtcctttattgccagctgtgacatctggatcattctagagtctacttctattgattaatgtatctcttaattatctgtcacttttttcacttcctagcatatttaataatttttttctgttatgctaatattgtagataacatactgtagagacattgcgttaagatgtcttctatagagaaatgccaattaaaatgtgtaaattctcttaagtcttgattttagtcctcattaaaccacatctcttttagyttctccattatttctacagtttattctctcctagagcacagctataatttataggtactaggctttcaagggtcttacttgaagggtgtgtgcactttatgctaaaatccaaaattttcttaaaatctctgcttgtaggtttttttttcccagataccttagaatctcagtataagtacaatgtagaagctggctaaagactctaatttttgcaaagatttttggtgctcctttacagctcct

SEQ ID NO: 110155 - DNA, 609 bp, Homo sapiens
atataatgcagttccaaaatattgactggattatttttatagaatcaacttctcctttgaaatgctttaggttttaatccattcttaattatctatttcttcagctattttgaagtcctttattgccagctgtgacatctggatcattctagagtctacttctattgattaatgtatctcttaattatctgtcacttttttcacttcctagcatatttaataatttttttctgttatgctaatattgtagataacatactgtagagacattgcgttaagatgtcttctatagagaaatgccaattaaaatgtgtaaattctcttaagtcttgattttagtcctcattaaaccacatctcttttagcttctccattatttctacagtttattctctcctagagcacagctataatttataggtactaggctttcaagggtcttacttgaagggtgtgtgcactttatgctaaaatccaaaattttcttaaaatctctgcttgtaggtttttttttcccagataccttagaatctcagtataagtacaatgtagaagctggctaaagactytaatttttgcaaagatttttggtgctcctttacagctcct

SEQ ID NO: 110156 - DNA, 354 bp, Homo sapiens
gatatttgaggactaaattagggacatttctccagattagtgtctcataaaatttgccaaatgttagacatagagtctctgcaaaagcattatcttgagaaacaacctttgaatattcaaatggtttttcttgagaagtaagaaggatatgggctcagttggttgaacagacactttttctgtactcagctaattgcacacaacattttacatgaagcaaattaggaatcttctgttatcagttggacccgtactgcattataataagccattactgtkgagttagcccagtactacatttcttaccaagttcagcttagagtatacacaataaggatctacctgaagattata

SEQ ID NO: 110157 - DNA, 354 bp, Homo sapiens
gatatttgaggactaaattagggacatttctccagattagtgtctcataaaatttgccaaatgttagacatagagtctctgcaaaagcattatcttgagaaacaacctttgaatattcaaatggtttttcttgagaagtaagaaggatatgggctcagttggttgaacagacactttttctgtactcagctaattgcacacaacattttacatgaagcaaattaggaatcttctgttatcagttggacccgtactgcattataataagccattactgtggagttagcccagtactacatttcttaccaagttcagcttagagtatacamaataaggatctacctgaagattata

SEQ ID NO: 110158 - DNA, 620 bp, Homo sapiens
gggaagtaaggtataagggtcacaaatcagggcaagataatagatccattgtgctttctgtgtcttattagtgactttgcaaggctggcagtggcagtgtgtgctatgaaccatatttatgttttcctgaaggcagtgttgatcacccagtctggctgggagctctgtgtgataaaggattcgtgcccacagtggactaggggtaaggtccttattgtctgtctttcccctgaagtgctggatatgggttttgaacacaataggcactgatcgttggtggtaatggccatcaattagtagactctggtgattttagccaacaccttgtttctaagactttgttccactgctcagtccaggcagattcgtgaatctgcctatccagatcaccttctgaacttgaagtctattatctatgataacctgtgaaatttgctttatcctgctagtgtttctcaatgacagcactatggttaatttgggtcayacagttcttgggtgggtgggactgtctcagtgcttgccttgtaacatccagagtctcatgccactaaatgccagtatcaactgtcattgtgagaagcaaacctatcctcagacatttatagacgtcctacctc

SEQ ID NO: 110159 - DNA, 556 bp, Homo sapiens
caactttttttttaatgaaacamtttaaatatacacaatgtttttactgcaaaagcttaaaatgagttttagcaatagtagattaggctaatcagaacagaagtatttatgcagcatattcaattaaaatattagcagcatcataactaataacagcagacatttctatcagcactcagagaatatggtaaataggtattttatgttgaaagatattataaataacaaacataataaagaattcttccctccaaaattgtgtggtataataactgggttatgttggaagagcacaacgtcatgtttttagatagaaatagtctaaaaaattggctttatatttttaaatgcctggaagcagtgaacagagggacgggttcagtttatgaaaacttgagatataattctgtcttgggagagcaaagaaggggcagaatcatagccttggaagggaaattgatggatggagaaccctatggatactcacatctgttgaattcctgctcttttccctttgggtgcaatgtattcaatagtgcattcgagtcacatccac

SEQ ID NO: 110160 - DNA, 547 bp, Homo sapiens
caactttttttttaatgaaacaatttaaatatacaaaatgtttttactgcaaaagcttaaaatgagttttagcaatagtagattaggctaatcagaacagaagtatttatgcagcatattcaattaaaatattagcagcatcataactaataacagcagacatttctatcagcactcagagaatatggtaaataggtattttatgttgaaagatattataaataacamacataataaagaattcttccctccaaaattgtgtggtataataactgggttatgttggaagagcacaacgtcatgtttttagatagaaatagtctaaaaaattggctttatatttttaaatgcctggaagcagcgaacagcagggacgggttcagtttatgaaaacttgagatataattctgtcttgggagagcaaagaaggggcacaatcatatccttggaagggaaattgatggatggagaaccctatggatactcacatctgttgaattcctgctcttttccctttgggtgcactgtattcaatagtgcattcgag

SEQ ID NO: 110161 - DNA, 581 bp, Homo sapiens
gcaaaacatagtcattcaaacagtgaatgaatgaatggataaattttgaaggtatatatatataatgtttattaatttataaatctataataatcagtaaaatacatgtattttatgataaacatgaaatatatagaatatrgtaaatatatatatttatttactttgattttatagaaaacatatgtgctatatgactttgtggaagaaataagagatacattgagtcttacatcacgaagagtagaattaatgctagtttagaatccaaatcagttttattaccaatatgtatcacaagtagagacataagaaagcatactatttagaaatagagataaaagatgttcatagggataagtatggattataattatatagcacttgaagtgctatacaaaacagttgtaagtacaattgtttttatttgaagttctttttaacagtaaatgcttcaagatgtgtttgcacttgcaaagcattatgcacatgtgaacacgtgggatttaagctcaacaagcatttatatttgatgattatatttgatcatcattatatttgatgactcttgcaatccaaac

SEQ ID NO: 110162 - DNA, 615 bp, Homo sapiens
ggtgggtctggctttcccagtcaactgactcaaatgttaatcttctttggcaacaccctcacagacacacccaggatcaatactttgcatycttcagttcaatcaagttgacactcagtattaaccatcatgagtccacctttcatcaacttgaatccatatacatttcctgagatcatacataatcttcaaataaagacaataataaggtttataattacacctaacataatacaactatccttcctacaaccagaaatgcaccaatccccaacccaaatactattacataaagttaacgatacttaaatgctgatgtgaagtcaataaatcttatgtcacataaggaatggaggaaaaggcatttgccaagtcagtgactgcataccaggtaccaggagatgtgttaatttgctcaagcaatgaaaccacatctggtacagcagctacaattggagtcaccacttggttaaacttacgataatccactgtcattttccaagatccatctgtcttctgcacaggccaaatgggagagttgaacacaggtgtggtgtggaatcaccacccctgcgtctttcaagtccttgatggtggtacttatctccgcaatac

SEQ ID NO: 110163 - DNA, 565 bp, Homo sapiens
attagatggtgcccacccagattaagggtgggtctggttttcccagcccactggctcaaatgttaatctcctttggaaacaccttcacagacatactcaggatcaatactttgcactcttcaatccaatcaagctgacactcagtattaaccatcacacactgtgatgaacaaagtactgcttacaatttcctagaaagcaaagttgaaggagggaaaccctatgagcrtgtagacaagggaggcccattacttatgattgccctgggcatcattaaggagctcattcatctttctgcactactgttatcagcaagactttgggttatgaccacagaaacaagtacatgagaggtgtacagaattcaacctgatgacatttactgtatgtaaatgtctaccagacagggaaaatgtgaaaagaatactgaatatagaattctgcccacacaaatcaggtaataaatttaagagactatgaaagaatgccatatgtatacaaaggatccagtggaatagaagtaaaaatgtttttaaagccagacaggaaaacattcaaatgcatt

SEQ ID NO: 110164 - DNA, 404 bp, Homo sapiens
ccttaaatcaacttttttttgtacaatggagtctcaccagccattaatgagacgaaatcaaagattcatccccacacagaatccctagataggtaaggaattcctttctatatgtctcaagtccatcttatttygatttttaacttttgtttctttaatacaagccgccaacttctagcttgtaactggttttccaagaaccacctttgtccactaaaaattccttttgcatcctaaacagaataatctttctcaaagtgcaaatctgcaccttagaatattcaacacttttccctccctcatccttctcttgcttggaaacattcatcggcttcctcttgctcttaggataaagaccaaaaagcaaagaccgaaatccttgacatgacttattgactaccatt

SEQ ID NO: 110165 - DNA, 404 bp, Homo sapiens
ccttaaatcaacttttttttgtacaatggagtctcaccagccattaatgagacgaaatcaaagattcatccccacacagaatccctagataggtaaggaattcctttctatatgtctcaagtccatcttatttcgatttttaacttttgtttctttaatacaagccgccaacttctagcttgtaactggttttccaagaaccacctttgtccactaaaaattccttttgcatcctaaacagaataatctttctcaaagtgcaaatctgcaccttagaatattcaacacttttccctccctcatccttctcttgcttggaaacattcatcggcttcctcttgctcttaggataaagrccaaaaagcaaagaccgaaatccttgacatgacttattgactaccatt

SEQ ID NO: 110166 - DNA, 576 bp, Homo sapiens
gcatattctccactaattttgtccatgtgacctttggattttgtaatgaagaaagcaaggagaaaatgttttgatggyactgccttttattgattggcatgaggcagtaaatgtatttggaatccaggggcaacaggtcaagttcctagtacagaagtggtaatggtcctggcagttgcaataaagtcagtgtcttggcatgacgcactcagtggcaccagtgtcagccttgtcatcagatcggtcgttggcctggtgtgcgtgttgttcctggaagctaaactttaagtccatctttgcatcccttcccaagactctatgagtaacctaatatattctgagaagccgttattcagcttaaagtgatcagaaagacttctgttgttcccaactgagaatttgcccaatacgtatacttttaaaaatacactcaagtccttctgaactaaagaggatgtgttaatatttctgcatgcatgttggatgtgtttttattaaaaactgataaagatattagatttttctttgcttttttatattaaactccctgttatttaaatcatttttgagaagtag

SEQ ID NO: 110167 - DNA, 569 bp, Homo sapiens
tttttcatgtctcatttcagttagtagcatattctccactaattttgtccatgtgacctttggattttgtaatgaagaaagcaaggagaaaatgttttgatggcactgccttttattgattggcatgaggcagtaaatgtatttggaatccaggggcaacaggtcaagttcctagtacagaagtggtaatggtcctggcagttgcaataaagtcagtgtcttggcatgacgcactcagtggcaccagtgtcagccttgtcatcagatcggtcgttggcctggtgtgcgtgttgttcctggaagctaaactttaagtccatctttgcatcccttcccaagactctatgagtracctaatatattctgagaagccgttattcagcttaaagtgatcagaaagacttctgttgttcccaactgagaatttgcccaatacgtatacttttaaaaatacactcaagtccttctgaactaaagaggatgtgttaatatttctgcatgcatgttggatgtgtttttattaaaaactgataaagatattagatttttctttgcttttttatattaaa

SEQ ID NO: 110168 - DNA, 576 bp, Homo sapiens
gcatattctccactaattttgtccatgtgacctttggattttgtaatgaagaaagcaaggagaaaatgttttgatggcactgccttttattgattggcatgaggcagtaaatgtatttggaatccaggggcaacaggtcaagttcctagtacagaagtggtaatggtcctggcagttgcaataaagtcagtgtcttggcatgacgcactcagtggcaccagtgtcagccttgtcatcagatcggtcgttggcctggtgtgcgtgttgttcctggaagctaaactttaagtccatctttgcatcccttcccaagactctatgagtaacctaatatattctgagaagccgttattcagcttaaagtgatcagaaagacttctgttgttcccaactgagaatttgcccaatacgtatacttttaaaaatacactcaagtccttctgaactaaagaggatgtgttaatatttctgcatgcatgttggatgtgtttttattaaaaactgataaagawattagatttttctttgcttttttatattaaactccctgttatttaaatcatttttgagaagtag

SEQ ID NO: 110169 - DNA, 535 bp, Homo sapiens
gagaattgaaggtttgcctcagacaggaaatggaacttagtgggtagttaagtagtaggagacagctttgcaagatgaagaattaaaaagtcttcatgtcaggaagctgacataaagcctttagtctccaagaaaaagatcatccactctggaaaccttatttccataggtgggatgaagttgagatgctagcccagaaaataggtgaaggaattaggtgttaacaaagaggggaaacctctcatgcagkactaagatgaaggtatattttggagcaattcctatcggatcttaaattaattgttgaaattagacaaattatcttataataaaatcaaatgtagtgattttcaagtggagcacatcttacatcaaggatatgtgtgctatatttggtagtcaaaattatgaagtgctgcgccatagggttttagtagaaaaaagccagggttcctaaatactttgcaatatggagaaaacaaacaattatcccatccaaaatgcaatcaatgtctcattgaaaaacaatgatgca

SEQ ID NO: 110170 - DNA, 535 bp, Homo sapiens
gagaattgaaggtttgcctcagacaggaaatggaacttagtgggtagttaagtagtaggagacagctttgcaagatgaagaattaaaaagtcttcatgtcaggaagctgacataaagcctttagtctccaagaaaaagatcatccactctggaaaccttatttccataggtgggatgaagttgagatgctagcccagaaaataggtgaaggaattaggtgttaacaaagaggggaaacctctcatgcaggactaagatgaaggtatattttggagcaattcctatcggatcttaaattaattgttgaaattagacaaattatcttataataaaatcaaatgtagtgattttcargtggagcacatcttacatcaaggatatgtgtgctatatttggtagtcaaaattatgaagtgctgcgccatagggttttagtagaaaaaagccagggttcctaaatactttgcaatatggagaaaacaaacaattatcccatccaaaatgcaatcaatgtctcattgaaaaacaatgatgca

SEQ ID NO: 110171 - DNA, 576 bp, Homo sapiens
aagactttgtgaaaggaacagtttttgagtgccccttgatgtcccagaccttccaaagaaaacaaacaacgacccttggattattgttacctcatcggcttgtgcatattggtatcctctctggccagggaagtcaccacccaacatcttaaagtagtaccgtgctcctggtatatttggttcctgtgtgtgaaatgcttgtttctactacacatgggaggtgacaaaacaaaatgttaaaaaataattatttgtcctatattgttaatcatcaaaaatttacataatgaactgtgtaaaattaattaaaattattgtaatgaaactatagttgctttatttacattataaaataaatattaacatttatgatatataggtagcaaacatgactcaaaataattgtattcattattagtagaattttgaaataaggtttattgttactctttgctttgtacarttgcatagtatttcagatttctgaaagtcacaaggtcaggctagtcatctcctcctgctgggttttaagctgaaactataaaataatcacaaacattacactgtattacctaa

SEQ ID NO: 110172 - DNA, 595 bp, Homo sapiens
gacaaattcacaagtttacaatttatagctaaaaaatcttacactactcaacaaaaagtataattttccaagaggaccaagccattgtttctttttattgttgaaatgtacattttgatttgtagattaatgtactgtaaactgcaaattactatatctggttgtaaatcaggtgtaatgttaggcactttcttttgcatcaagaaaaatatactctcactagttatgttcaatatgattttgtcacctgtattcccagttttctgcaaatggtagatttaagaccatatatgagtaaaactttacctaagttaatcacattgtaatattttaatagtaagcttgtaatgtttgaaattctagaccaatatttggtaacaagaatatacaagagcaagaatctaaatttcacactatgagagaatattcagccatcactctcaacagtggttttttytaatgacttaaaagtatgtcattggctttgaaacctagagaatatggactatattgtgaagtaaaggaacccaattcatttgttaatgaatgaatgcacgcagaataaatttattttaaaaatcaaggaagaaggaaa

SEQ ID NO: 110173 - DNA, 627 bp, Homo sapiens
agaccaataataactcagtctcaattatccaacagataaatctcctaaagttcatccaaagatgaatataactcaaaatatgtgttatttttctaaagttgtttactcaaagtcgagggcagaaaaatatttgaagtttttagtgcaagcacaagtattccaatcggtattacaggtctcrcttttgtttttcaaacatgtatctaattgattaaaatacaaagacatggttctcctttaagaaacaagtagggagcatttcttatatttacatttgacctatagtttacaaaccaaagactaaagttaaaatactgtaagtccattaaactcctaatggatatgtttattccccaacccctgccactaaaatttattgcgatttgtcttatgattataaagtgagaagcgttcattatagacagtattgaaaacatgtaggaagtaattccaaaacctagaaggaatactattttttcatatataggacatactttcagtgttttctctatatgtctctctatgtacatttctatgcaaatataaaattataccttgtatattttgtaactatttttaatggagaatatgtagtgatcatatccttatgtcatatattagtaggcg

SEQ ID NO: 110174 - DNA, 583 bp, Homo sapiens
ggaattactagaggagaacgcagagtgggacagggctgaaaaattatctattgggtactatactcactacctgggtgatgcgaycattcataacccaaacctcagcatcgggcaataaacccatataataaacgtgcatatgtaccccctaaatctaaaataaaagttgaaattataagaaaaactactgttgattacatagacagaacttagtatccaagtattatatttttagttttggaatcatttttaataattaggcagtgttaaacattattgatgattattattgttccttacataaacttccatgattctttcaggcaccagaatttttaccatttttcttctttatgtattaactgtaagatagtataaaaaagataggaatccctatgtcagagaaggcagcctgcagcacaatctggaagactaggtgactatttctgctatttagaaccacctgtctcctcaatatactatttttctaaacccaggaagacttcttcatgacaacttttgactgaatgaagttgaaatccctatatttgaagccaaactttctgacaataaaatatacttt

SEQ ID NO: 110175 - DNA, 602 bp, Homo sapiens
acctctaataatagtgccttttctgtactgaccatgtcaccatctccaattccccagaattttgtttgtccaattgttcggaagcattcactaattcttcagtayaattcagagctttcttttctaaattttcaacattttcacatgataaatgaaaaaacaaaactaaaagttatgaagctgaagtcatgtacaaagttgtatcaatttctatcagatataatctgtatgcctgtagacatactgcctcaattttctggctttaatacttttatctctagggagatgatgatgaaattccatgaattatcagatcgttttgctatttatgatatctaaaggaagatgtatatcacactttttattggcatggaatgtgttatcgtataggatatctacctcaaaaggataatgaatttatactttctccttactagtgtattattcatgagaatgttacttagccaagttacataagatctataatcctccattttcacttctaaaaaatgtggaagaaaaacagctatttcataaagttagcatatagactaactgaaataatgcatgcaaaatttctagtataatatctgacacatagt

SEQ ID NO: 110176 - DNA, 572 bp, Homo sapiens
aagttttgtagctggacacaatgccactccccaaaaatcagggttttgctacaattgaaaaagaaaagaatggatttggggtgggcaataaactttcaccaaggttaaactgggttatgggctctcttggggattatttttttagatatctgatgatctaactctttactgaggccttaatttcatttcagtttgttacatctaaggttttaattttatttaaatgtttctgattgatttctgatattgctatattccaccagatttttaagagtggtgctccaaggataggtgatttgcaaactcactgtttacatttacagtcgattttctctttattgttttgaaaaatatttttcagacctattttgttaatagctaccccctaaacttatatagtgcttttggcaaaataaatcatttatttcatacatagtcttccatacagtaatttttatctcattatgttaaatactattgccacaacaagtttgctgaatttttgtgtaatytatctttccaaagcttaaatgatttatagtacttcaacaactatgattattaacttggcc

SEQ ID NO: 110177 - DNA, 567 bp, Homo sapiens
cttaatgggattccctgtggccaaatttaggagaaattaaatatcgatataaataatgataataaaggtaatggattataacccactgaataaaaaatcattgtgtccataccaatattattaaataataaacataaatgtgaggaatctcatatttaaagtataaagccaataattaaatgtagaagaaatgatcgcattwgcaaaccactatttgacaactatcacgataatacttgatttatataagaatcatcaaaggacaattactggtgtaatatttgagtatcaggattttgcctaatatcaaagtaactttccatgaaataatcaattaatcaaaagaaacaaattgtaatttttcattggaggaggctgtagagccacatttatcaagtgatcaaaattaacttcactggcagtgggtcaaattgaaaccatgtgttacatggcaggatgcaaggagaaaaacatgacttccatgatattcctgccaaagatatatgatctgaatccatttatgaagaacttcacacaaatccaaattaatggacctactaaaaatac

SEQ ID NO: 110178 - DNA, 581 bp, Homo sapiens
agaaaatatcaactaataagttaatattttcttattagggagtaaaatatttggtgaaaccctttggctagtctttgctggtgtcctgaaatttacagccactgtcatcaataaaaggatcaaaatatcatctggtctagtaaggggagccacctctaatttcctataacaactttcttagtgtaatgtctggtacacaatatgcctgtaataaatggtagtagttattagtagttccacagaaaatttatcttaagtttatgaacyttctgctattaaattatgatgtttataatgcattcataattttttatggcttatttcccagctaagtcagagggaaattttaatgagctagttaaatctagattctttgttcattgtatgatgttttcattttgtacatatgtgcttgcttgcttatatcatggttgattttgaaatcaaactatactgactgaaaatgaatacataaataactctttaagactacaccatcaaatatttattaaaggtaaaatatacgtagggctaatggttagttaaagaagacatttacaaaatgtttttctataggtatt

SEQ ID NO: 110179 - DNA, 425 bp, Homo sapiens
aggaattcatatgtggaaacattcatacattccaaagccgagaataacactgtgtttatggagaaattcatctccttggaaagtatcgttcttatctggtttgaagacaaaaaaagacataccgtaggcccctaacaaccactagttcattgttgtaatataattgttatgtaacaactggktgctctggtgagaatttatacccaagtaactttatgaaattcatagatttgggacagaaagataacaaaaataacaaccaaagaaagcaatgactagtatcctcttaaaacttaatctttacagtatccctgtgaggaagtcatcaaagagaatatgcccagtagagccatcacagaggccgacccactcaactacattaactggtgtcatgagtttcacactctaacacacatgtgcccagc

SEQ ID NO: 110180 - DNA, 600 bp, Homo sapiens
tactgtgaaccattattaatttttaaggtataatatggtactgtgatgattgtgttaaaatatttattttttaaagatgcattttgaaatatatacagaagaaataatatgacttctggaacttacttcaaaaaaaatgggagaagcgaagtatatacatggggaatatatgaaataagattggccatgagctgatcattgttgaagctatgtgatggactcttgaaagtttattataccattttgtccacttttttgtatgcattttccataataaaamtttttaaaaagtgatgtgtcttgtctatttttagtgtcatttttgtgttcatactctcatagaattcaaagcaaacaaatcttccaaatgatcgatatattggattaattgattttctgttttctgcattgtcaattaacattcatttcttaattttcttgtgtgtgtagaagatagttctgatcactttaagattgacgccaacaatggtgaaataagaacaaccacaatactttcgtatgattatagaccttcctacagaatgagtgtcattgccactgaccagggagtgcctcctcttcaaggacaggcagttgtta

SEQ ID NO: 110181 - DNA, 600 bp, Homo sapiens
tactgtgaaccattattaatttttaaggtataatatggtactgtgatgattgtgttaaaatatttattttttaaagatgcattttgaaatatatacagaagaaataatatgacttctggaacttacttcaaaaaaaatgggagaagcgaagtatatacatggggaatatatgaaataagattggccatgagctgatcattgttgaagctatgtgatggactcttgaaagtttattataccattttgtccacttttttgtatgcattttccataataaaaatttttaaaaagtgatgtgtcttgtctatttttagtgtcatttttgtgttcatactctcatagaattcaaagcaaacaaatcttccaaatgatcgatatattggattaattgattttctgttttctgcattgtcaattaacattcatttcttaattttcttgtgtgtgtagaagatagttctgatcactttaagattgacgccaacartggtgaaataagaacaaccacaatactttcgtatgattatagaccttcctacagaatgagtgtcattgccactgaccagggagtgcctcctcttcaaggacaggcagttgtta

SEQ ID NO: 110182 - DNA, 547 bp, Homo sapiens
gcaacaggtatcaaacacagagtaatcaacagagagtgtgtgtcaactcagtcagcatcctggaataaattttaatttaaaaatacttaccaatttgggaggctgaggcacaagaattgcttgaacctgggaggtgaagttgcagtgagccatcgcgccactgcactccagcctgggtgacagagtgagactctgtcttaaamaaacaaacaaacaaacaaacaaacaaacaaacttaccaattatgtgatattcaacagctctgttattgccagcatccatatcagaggctaaaaccgtatagacaacctctggttcctggttttccagaacctcaatgtcataactggaaacaataaactctggtgcgtgatcgttttcatcttcaacagtgcagaggattgttgtggtgctggacaatgaagggaatcccccatctcgtactagtactgacacagaacacaaagacggtatgaattgtggcctttgattcatacctaaaatatgttgttctaactagacaatgtcaggctaaccaggtagcact

SEQ ID NO: 110183 - DNA, 576 bp, Homo sapiens
gaagctttccccttagtgattttatttaaaaaaatataaaatatcttaatctatatttagatttgaataatccataagattaataaattgtgtactcattttattatctgaagaktgtgactttgatgaactttatttgataaagtggtttggagccatgatggaagctctgagatgttagtatatatctacatacactttataaaaacttagtgaattaacacatctccacatgaaaatgacatatgaaatggccatttcatatgagaatgaaatctggaatcttctcaaaagctgataggcttgaacatactatttctcccccacaggtggtaagttaatagtaagggccatttagttctttcaaaatagataaatgagtaaattctaaaaaaaaaaaaaaaaatcctccacaaataaaaacagattttattctttaggaggataaatgaacagattaggaaaggttatgaaatttacagtttcatttgatcataagctctctaagctaccttttatgttaatacttgtccagtgcaaatgtcactaccttttcagacagtttaaaaaatgctt

SEQ ID NO: 110184 - DNA, 576 bp, Homo sapiens
gaagctttccccttagtgattttatttaaaaaaatataaaatatcttaatctatatttagatttgaataatccataagattaataaattgtgtactcattttattatctgaagagtgtgactttgatgaactttatttgataaagtggtttggagccatgatggaagctctgagatgttagtatatatctacatacactttataaaaacttagtgaattaacacatctcmacatgaaaatgacatatgaaatggccatttcatatgagaatgaaatctggaatcttctcaaaagctgataggcttgaacatactatttctcccccacaggtggtaagttaatagtaagggccatttagttctttcaaaatagataaatgagtaaattctaaaaaaaaaaaaaaaaatcctccacaaataaaaacagattttattctttaggaggataaatgaacagattaggaaaggttatgaaatttacagtttcatttgatcataagctctctaagctaccttttatgttaatacttgtccagtgcaaatgtcactaccttttcagacagtttaaaaaatgctt

SEQ ID NO: 110185 - DNA, 576 bp, Homo sapiens
gaagctttccccttagtgattttatttaaaaaaatataaaatatcttaatctatatttagatttgaataatccataagattaataaattgtgtactcattttattatctgaagagtgtgactttgatgaactttatttgataaagtggtttggagccatgatggaagctctgagatgttagtatatatctacatacactttataaaaacttagtgaattaacacatctccacatgaaaatgacatatgaaatggccatttcatatgagaatgaaatctggaatcttctcaaaagctgataggcttgaacatactatttctccmccacaggtggtaagttaatagtaagggccatttagttctttcaaaatagataaatgagtaaattctaaaaaaaaaaaaaaaaatcctccacaaataaaaacagattttattctttaggaggataaatgaacagattaggaaaggttatgaaatttacagtttcatttgatcataagctctctaagctaccttttatgttaatacttgtccagtgcaaatgtcactaccttttcagacagtttaaaaaatgctt

SEQ ID NO: 110186 - DNA, 576 bp, Homo sapiens
gaagctttccccttagtgattttatttaaaaaaatataaaatatcttaatctatatttagatttgaataatccataagattaataaattgtgtactcattttattatctgaagagtgtgactttgatgaactttatttgataaagtggtttggagccatgatggaagctctgagatgttagtatatatctacatacactttataaaaacttagtgaattaacacatctccacatgaaaatgacatatgaaatggccatttcatatgagaatgaaatctggaatcttctcaaaagctgataggcttgaacatactatttctcccccacaggtggtaagttaatagtaagggccatttagttctttcaaaatagataaatgagtaaatwctaaaaaaaaaaaaaaaaatcctccacaaataaaaacagattttattctttaggaggataaatgaacagattaggaaaggttatgaaatttacagtttcatttgatcataagctctctaagctaccttttatgttaatacttgtccagtgcaaatgtcactaccttttcagacagtttaaaaaatgctt

SEQ ID NO: 110187 - DNA, 617 bp, Homo sapiens
ggaaattagcatgtttttgtttgttctatttgatgaaatagaacctgcttagtagaagaagaaaactcttctaagaaaggctttgaccttgtaggggtggcaacatctcagaaaatgccctctttttgtgcacatatactatttgggaaccaggcaacctatttctagttccagctttgactctaaccatctctgtggcactgggctggttacatcaaatgttctgggctctacttcccccgtaagagggaaattaggagttaaatggtttctaaaatccctttcagttatatgggtttataatgtcaaggatgtgtctgacattgttttatttttactccatatgatgtcttctctgtttaagttgactcatactcatttctttgcttagggcttccagcccttatatgttacagatccaacaatgatagatggacactctgcagtcctgagggtctgttacatctggagcacttctgggagcctacaataaaaggatgagggggagtgacacaaaaagagcactakctgactggtaaagggacaaggtgcaaaggggtgaaacaattaataacttttcttgcagcaataattgccatgcgggcaagatgttggaa

SEQ ID NO: 110188 - DNA, 397 bp, Homo sapiens
atatgtctcttttctttaacactgctgcaactcaactaagcgggtatccccacctccagaaggtcccctttgtggatgatctggttttgaatggctcttcctaaagagtggggcagctgtgcaagtttttcctacttgcataaaaacaaaattgacttctaatgaattctccggaaaatgaatgtttctccttgagataactggggtcttggggattcagcacagtcaacctgacacaaaacgcagactgaggtagagggtaggaaaaaaagraagaggaggagcagctcttagtgcgcgttggctctctgtgggcattttggtcacacttgggtgcctcagcagccaagcctcacctccatcttcctccacctcatccctcctgtgacaatagtgc

SEQ ID NO: 110189 - DNA, 474 bp, Homo sapiens
tcccataatcccgacatgtcatgggaggaaccaggttgagacagttgaatcatggggtcagtttctcctatcctattcttgtgggagtgagttctcatgagatctgatggttttattaggagctcttctccccatcactcatttttcttcttcctgccatcatgtgaataaggacatgtttgcgtccccattctgccatcattgtaagtttcctcaggcctccccagccatgtggaactgtgagtcaattgaacctcttttctttataaattacccagtctcacgtagtcctttatagcagcatgagaatggactgatacactttctaagccatgaagtctataaacatgaaagtcattacattgtaaatgctgcgrtcaccagaaagagattcatctattagcaaaatggtaagataagcaaaggagtgtttgtggggcagatcccaagcaactctgagggattctgagagta

SEQ ID NO: 110190 - DNA, 638 bp, Homo sapiens
ttggatttcacagcctccagaagtgtcagcaataagtttcagttgattataaattactcagtmtatggtattgtgttttagcagcctgaacagattaagacaataacaaagccctattctttgctacttagagtgtgtggccacataccaaccacttgagggctggtcataaatgcagaatttcaggccacaccccagatatgttgaatcagaatctgcattttaacaaaatacttaggtgatttgtacgcacttgaagtttgcacagcagtgctacggaagaaaatataataagaagacaagcatccaggcaggttttgatgacaggtcatttaaatttctacactatgagccttctatctaggagccattgatatagagagatgtaaggagaatcactttcaagactaagggaaataaatgtattgttaacagaatacaacttaattggtatcaggataatgcctattagaatccaaagatttagccccattgttagactttagtttctccatttgtaaaatgaggctagcagttacctcattggattgcacataagaataaatgacataaaaaacaaggcaaagcaaaatggcagaatagaagactccaccaagttttccttccacaagaacacc

SEQ ID NO: 110191 - DNA, 638 bp, Homo sapiens
ttggatttcacagcctccagaagtgtcagcaataagtttcagttgattataaattactcagtatatggtattgtgttttagcagcctgaacagattaagacaataacaaagccctattctttgctacttaragtgtgtggccacataccaaccacttgagggctggtcataaatgcagaatttcaggccacaccccagatatgttgaatcagaatctgcattttaacaaaatacttaggtgatttgtacgcacttgaagtttgcacagcagtgctacggaagaaaatataataagaagacaagcatccaggcaggttttgatgacaggtcatttaaatttctacactatgagccttctatctaggagccattgatatagagagatgtaaggagaatcactttcaagactaagggaaataaatgtattgttaacagaatacaacttaattggtatcaggataatgcctattagaatccaaagatttagccccattgttagactttagtttctccatttgtaaaatgaggctagcagttacctcattggattgcacataagaataaatgacataaaaaacaaggcaaagcaaaatggcagaatagaagactccaccaagttttccttccacaagaacacc

SEQ ID NO: 110192 - DNA, 638 bp, Homo sapiens
ttggatttcacagcctccagaagtgtcagcaataagtttcagttgattataaattactcagtatatggtattgtgttttagcagcctgaacagattaagacaataacaaagccctattctttgctacttagagtgtgtggccacataccaaccacttgagggctggtcataaatgcagaatttcaggccacaccccagatatgttgaatcagaatctgcattttaacaaaatacttaggtgatttgtacgcacttgaagtttgcacagcagtgctacggaagaaaatawaataagaagacaagcatccaggcaggttttgatgacaggtcatttaaatttctacactatgagccttctatctaggagccattgatatagagagatgtaaggagaatcactttcaagactaagggaaataaatgtattgttaacagaatacaacttaattggtatcaggataatgcctattagaatccaaagatttagccccattgttagactttagtttctccatttgtaaaatgaggctagcagttacctcattggattgcacataagaataaatgacataaaaaacaaggcaaagcaaaatggcagaatagaagactccaccaagttttccttccacaagaacacc

SEQ ID NO: 110193 - DNA, 638 bp, Homo sapiens
ttggatttcacagcctccagaagtgtcagcaataagtttcagttgattataaattactcagtatatggtattgtgttttagcagcctgaacagattaagacaataacaaagccctattctttgctacttagagtgtgtggccacataccaaccacttgagggctggtcataaatgcagaatttcaggccacaccccagatatgttgaatcagaatctgcattttaacaaaatacttaggtgatttgtacgcacttgaagtttgcacagcagtgctacggaagaaaatataataagaagacaagcatccaggcaggttttgatgacaggtcatttaaatttctacactatgagccttctatctaggagccattgatatagagagatgtaaggagaatcacttycaagactaagggaaataaatgtattgttaacagaatacaacttaattggtatcaggataatgcctattagaatccaaagatttagccccattgttagactttagtttctccatttgtaaaatgaggctagcagttacctcattggattgcacataagaataaatgacataaaaaacaaggcaaagcaaaatggcagaatagaagactccaccaagttttccttccacaagaacacc

SEQ ID NO: 110194 - DNA, 552 bp, Homo sapiens
aaggggaaagtgagacaggaaagcacagacacccagtagagggtatgttacagatcagagttctgctgtgggtgactgaggctctatccctcagggggaccctggcacagtgcagggcacacctcagaatctatcatctgtgcaaaggagcaaggatgctgtaggatgtttgtccaccaagtccctgtcagtcaccggatggtggctgctttggagcattatctctccagtgtgagggagaaacgttgctaatctctctccttgccatcatgtttcaggatgtggttaacccaaactgagagctcttaaagtcctggtctacccagattaggaattagaagttagtgaattttgcccagctcctaagtacgtatcctcttttatcagaaagcagtgtaatcaagttctggaaaagcacagtacatttgggctttggcctcccattccccgttaagacaccacggcactagscctgtccttcctgatctgccaaaggcgacatgtttgcctgaccctgcctgactatgcagacacctatgtcatcccgacaga

SEQ ID NO: 110195 - DNA, 595 bp, Homo sapiens
aattaacagcacacacaggataaaaatgagtgagacaaaagaaaaaaagtgattagcatggagctctaaactgataatagacccagtcaggtccagaaaacatcaggaatattaataccaataagttgaaaaagcacagcaaggtggaggaaggggaagtagcatattatcaagctcaagaaaatgtgatgaacattggaatgtaatggtgtggataaggaggactctcacctgggagccagtccccatcctcaaggaagcaaactgaacctaattgaactgaaccaaaccaaagcaacataaactaaaataaaataatcagcctgtgaggggtatctrttagcacatgccacttatggaaatccaaaaaaatcatctttcaccggcaaccatatgacattaagtaagattcaactttggggaaagaaaataaatgaagtataaaatagctttttctttaaatggcaaataggaaacctcttttattttccaatttattggtttgctctcttcaaataagacagattttactaacagagtaaatcttaaagaataaaaatcaagcaattagtgaaaattggagttcagctacatg

SEQ ID NO: 110196 - DNA, 552 bp, Homo sapiens
atgtaactatattaattaggactgttttaagagtctgtacatcataactacttaatcaggagttacttcagagaagagaaaatataattttatatagttcaaatagctgggcctttatattatctctacactgctttgggctctggttgtygctttgaggaggccaaggccaaggtgtcctgagcctgtttccaaaaggaagtgttcactgtggcaccacagaatgcccaatggccatccatgacacatatgcctcagtagccatcaaagccaaaactcagaatgatatctcaattattttatagtgcttaccccaaacctcttgggataagacctgtatcatttggtccctgtttgaatttcctgactatcaaaccagggaccccactctcatctttctgtttattttcttgttttttttttacttggaataattggtttgtttgaaatgaagtagtaggaaaaattacagtaatgtctgcttgatgatcaaactaatattccatgaacagtttaagactcagcacattttaagcttgtttttttccccaa

SEQ ID NO: 110197 - DNA, 552 bp, Homo sapiens
atgtaactatattaattaggactgttttaagagtctgtacatcataactacttaatcaggagttacttcagagaagagaaaatataattttatatagttcaaatagctgggcctttatattatctctacactgctttgggctctggttgttgctttgaggaggycaaggccaaggtgtcctgagcctgtttccaaaaggaagtgttcactgtggcaccacagaatgcccaatggccatccatgacacatatgcctcagtagccatcaaagccaaaactcagaatgatatctcaattattttatagtgcttaccccaaacctcttgggataagacctgtatcatttggtccctgtttgaatttcctgactatcaaaccagggaccccactctcatctttctgtttattttcttgttttttttttacttggaataattggtttgtttgaaatgaagtagtaggaaaaattacagtaatgtctgcttgatgatcaaactaatattccatgaacagtttaagactcagcacattttaagcttgtttttttccccaa

SEQ ID NO: 110198 - DNA, 528 bp, Homo sapiens
aataaagcaacactgttcatccctgggaagcaaaatatacattatttaaatgaaatccttctctagaatgacactggaagtgatggactytgaccatgtggctgtgctgattagaatccacaagtcagggttaactgcgattccaaatcctacaggttgtcatcttgtgaacactctaataccagttgatgggcagtattataacttccattccagtatcatcaaccagtgaaatatagcagtctttctaagtatctatatccctccacaactgggctattcagagttgactgtctccttccctctgactattttccaaagagtattctcaccattacctctttatcaccattgagcttgggctttaataactgagtttttattcaagttctgccatgtactgactgtgtgacattaaacaagtggcctaacttcctttggcctcagtttcctcctgtgtaaaatgaggtcgggcagattgtctgcaaaggtagctgccagtcattccacccactcctctatacacac

SEQ ID NO: 110199 - DNA, 566 bp, Homo sapiens
aaagaatctaggaaggtgctcactgcaggctaggatcaggtttgcagaacttaggtagcatatttcatagataaaagagaattgacagcttcttcagtaagccagttgttaattagtgttcaatgatgccatatcaaaatatgmactttcagataattgctttctaagtgcttcccttaaaaactgatttaaatttgcatgatactgggtgctgctggaaggccattaaactgaaaaaaaaaaacccaaaaatacatacaaaaaaattttaaaaaaatacactcttaaaacatcaagctgcatttaaatttatcaccaagtccttttaaactcagtgcgttgaataagtctcagtgtttacctatgaggtttcttgcctcaggtttcatagctgttaaaacgagaagggatatttcctcttttacttactttgtaatatgatttgagacgaccagtcaatgaatctcttagttggagaaatgaaagtactaaaggattacataccagacagacttggagagcaccacaggaaggaggaaaaggaaagggaaggaaatgagattaag

SEQ ID NO: 110200 - DNA, 566 bp, Homo sapiens
aaagaatctaggaaggtgctcactgcaggctaggatcaggtttgcagaacttaggtagcatatttcatagataaaagagaattgacagcttcttcagtaagccagttgttaattagtgttcaatgatgccatatcaaaatatgaactttcagataattgctttctaagtgctwcccttaaaaactgatttaaatttgcatgatactgggtgctgctggaaggccattaaactgaaaaaaaaaaacccaaaaatacatacaaaaaaattttaaaaaaatacactcttaaaacatcaagctgcatttaaatttatcaccaagtccttttaaactcagtgcgttgaataagtctcagtgtttacctatgaggtttcttgcctcaggtttcatagctgttaaaacgagaagggatatttcctcttttacttactttgtaatatgatttgagacgaccagtcaatgaatctcttagttggagaaatgaaagtactaaaggattacataccagacagacttggagagcaccacaggaaggaggaaaaggaaagggaaggaaatgagattaag

SEQ ID NO: 110201 - DNA, 404 bp, Homo sapiens
gcaatactcagtccacaaaggtrtgatcaccaaataattaacagaacaattaggactacttcttaagtataattttgcaagcaatacttgatgagtgtgggattttctttttttttggtaatgtgaggtgtttaaaatgtacctccatcaggttaagaggacatttgtgatttttctctctactctgaccacacacacatttctagtgggattttttttttgtctaagtgaaagtatgcattcatttgttcactccttgcacattatcctaataacaattctgtccaggcactgttgtaggcactgaagagacaaagatgagtaaacaaagcccctgccctcttggagctcactttctcataggaaaacagataataaacagaatacactaacaaaataatatt

SEQ ID NO: 110202 - DNA, 478 bp, Homo sapiens
  misc_feature (1)...(478): n = A,T,C or G
nnnnnnnnnnnnnnaatcttagtttgtggaaggaggatacccaactaagatatggtagactctctccctctctctctctctctctctctctctctctctctctctmtatatatatatatatatatatatatatatatatacacatatattcttcaaatatatacacgcttcactcatatatatatatgtgtgtgtgtatatatatatatatatatctatatacctcatttttaaaaactactattactattttatgactataccttaatttacttaggcagtgcacttgatggaaatttcatatacaataattcagaaagatcttagtttcatgaatctctattcactgagcaagttgcctgctttcctcctttcacacttggggtttaaatactgtgtctaatgtcatttagtgggtcagtgggggcacatgcccagatatgctccatcaatagcttagtccagtctctcagatatg

SEQ ID NO: 110203 - DNA, 478 bp, Homo sapiens
  misc_feature (1)...(478): n = A,T,C or G
nnnnnnnnnnnnnnaatcttagtttgtggaaggaggatacccaactaagatatggtagactctctccctctctctctctctctctctctctctctctctctctctatatatatatatatatatatatatatatatatatwcacatatattcttcaaatatatacacgcttcactcatatatatatatgtgtgtgtgtatatatatatatatatatctatatacctcatttttaaaaactactattactattttatgactataccttaatttacttaggcagtgcacttgatggaaatttcatatacaataattcagaaagatcttagtttcatgaatctctattcactgagcaagttgcctgctttcctcctttcacacttggggtttaaatactgtgtctaatgtcatttagtgggtcagtgggggcacatgcccagatatgctccatcaatagcttagtccagtctctcagatatg

SEQ ID NO: 110204 - DNA, 536 bp, Homo sapiens
atggaatattctctcttgctgagcagagacaatgaggtttatgtctgttctttcctagtagactgtgaggaagagaggttgcatgtgctactaatatgttctcataagtatatttaatttagccttagttttcaaatcaatttccctgttaaaactacatattaaataggacacatttttctccccacraaatcaacacctataattatgttcattaatacaattcagtgtgatcccaaaggattcgcattgttaattatgtctaaaagcacttccataaacatcaaaagaacaataaaaagtacaagcaatgtcaataagaacagaaactatatattatttccaaactatccttcctttcttcttcctccctcaaaatctacttttttaaaaagcctactccagaccacaataattcaggtggcttttgaagtatataagtgacaacaaataaatatttgtagagaacaacaataacagatgtttctcttccctgtccaatgttacctttgggccttggcttacaaaactaaatt

SEQ ID NO: 110205 - DNA, 550 bp, Homo sapiens
tctccccagcagacgtgtcatgtgggacttttgatattgcaccacctagcagccacagtaaaataagtagaggggattggaccacataagtaagatgaggatagagctcccctgaataaactgggaattggaaaccagaatgtctgcccaggttccaaaggattccccttcctgtggttcctaggacatagaccatttcttttggatattgtcacacttaacttcagtgttatgtctcttttctttaacactgctgcaactcaactaagccggtatccccacctccagaaggtcacccttctggatgatctggttttgaatggctcttcctgaagagtggggcagctgtgcaagtttttcctacttgcataaaaacaaaattgacttctaatgaattctccggaaaatgaatgcttctccttgagataactggggtcttggggattcagaacagtcaacctgacacaaaacgcagactgaggtcgagggtaggaraaaaaggaagaggaggagcagctcttagtgcacgttggctctctgtgggcatttt

SEQ ID NO: 110206 - DNA, 559 bp, Homo sapiens
cccgccctctttcgtgtcttggtgctggctgctgtctttggccaggtaagctcatggtctgggctcctggggtccactcactgggcctccacactgcctgcaggtaggggagcctttgggccaggactatccttggctccccttccaggtggtgggttcaaagaccattcctgggttccaccaccgccaagcctcratggtcacaggaactgctggggctttctaggttaagacccttgcctatcctggtgttcctccctgcagtagggggctgcaggggtcagcctcagtctctgccttgggagcctgccttaccttgcctgaactcaagcgatctgcctgccttggactcccaaagtgctgcaattataggcgtgagccactgcacccagcccagccttgactttgaaatatatgttgtacatccagacagcagtgaactctgggggaacaccaaagatgaggagaatgagagaagagatacctccaattaaaggagttaggaagagatgcttgaacttatgttttaaaaagtcaatgcaggttgggcacagtggct

SEQ ID NO: 110207 - DNA, 605 bp, Homo sapiens
agacccagtggtagtggctcaggggtgcttgtgtcactccttccccagctccaggcagctcagcacagacagggagagactctacttgtttgggagaaagtaagggaagagaacaaaagtctatccttggtaatccagagaattcttctgtatcttctccaagaccaccaacgtggtatctctgcaagtctgaaagaaccatagcattactaggcttggggtaccctctaatgcccatatgactgcagtaaccaaaaacttagatcataacacccaagtccgtttgaatacctagaaaggctttccaagaaggatgggtacaaacaagcccagattgtgatgactacagtaaatacctaactcttcaatgccagacactgatgaacatccataagcattaagactatctaggaaaacatgacatcaccaaactaaccaaataaggcaccagagaccaatcccggagagacagrtatataagacctttcagacagagaatacaaaaataggttttgaggaaattcaaagaaaatcaagataacatggagaaggaattcagaattctattggataaatttaacaaagatgttgaaataattaacaag

SEQ ID NO: 110208 - DNA, 535 bp, Homo sapiens
tgtaatctcagctactcaggaggctaaggttggagaactgcttgaacctgagaggcagaggctgcagagagccgagatcattccactgcactccagcctgggcaacagagtgagtgagactctgtctcaaaaaaaaaaaattttaagaaagcattcaggaaccataatttcatgcaacaaacaaaataaggcaccaggaaacaaccctaaagtgakggagatgtgtgatgtctcagagaattcaaaagagctgttttaaggaaactcaatgaacttcaataaaacacaggggaagaatccaggaatttatcagagaaacatgagagattaaacaaactgaaatcctggagctgaaaaatacgatgaacaaaatgaatgcagtagagaatatcaacagcagaatctatcagatacaaaaatctgagcttgaagacaagctatttgaaaacacatagctggaggagaaacaattaaaaaaagggtaaaagggaatgaagaagtttacagaacaatgcaacagtatcaaaagagcaaa

SEQ ID NO: 110209 - DNA, 492 bp, Homo sapiens
tgtggcatccttcagagcgttgaaagaaaacttgaacaaccagaycagttctatctgattttggttcttgtgttacattcagcctaaattcaaattccagaaggagagagattatctggccgagctcaagttgcctaacaaactcttgggtcgggcttttaaaatgttctttcaaagactaaacgctgtgggggtaggatggcttttcaaaggagaatcgaagtactgatacggggagcagggggtggggagggggaagaaggcacagatgttgcgccaattggaacaacgtgtttgctacaatttctaaatgctacattgcagattgcagagagattggatgacaggcttcacctgaagagatagagatcaggacctgggaatccatgtgttaaaaagttcttgggtaattctgatggatagctgggtttagaagccagtgtaaggcaatatgtataaaagctctgaaaccagaatgactgagtttgaatt

SEQ ID NO: 110210 - DNA, 529 bp, Homo sapiens
catttgcttttgaaagaagagaaataatggctctgttctgctcggctcaccagcggtcagagtttaaggttatctctcttattccccgaacaattgctgttatcctgttcttttttcaaggtgctcagatttcatattgcacaaacacacatgctgtacaattggtgcagttaatgcaattatcacatagtcctgaggcgacatacatcctcctcggctgacaggattaagagattaaagtaaagacaggcataggaaatcataagggtattgactggggaagtgataagtgtccatgaaatctttacaatttatgtttagagattgcagtaaagacaggcataagaaattacaaaagtattaatttggggaactaataaatgtccataaaatcttcacaattcacgttcttctgccatggtttcagccggtctctctgtttggggtccctgacttccctcaacacctgtctttctattctcttaatctcctttacttttgaargataagttcgttggatacagaattc

SEQ ID NO: 110211 - DNA, 602 bp, Homo sapiens
cacacatcacaaagcgttttcacagatagcttattattagttttaatggtaaagtatttgggtttttagtataagcctcattgggctcagaaatgtcccttcacagattctacaaaaagagactttccaacttggtgaatcaatgcacaaattccatttggtgagatgaatctacatttctctaagcattttcacaaatagcttgtttctggtatttatcacaggatattcggtttttcactattagccacaaaaaccttggaaatattcctttgtagattscacaaaaagagtttttccaacatggtgaatcaaaatacaggttcaattctgcgagatgaatccacccatcacaaaacactttcacagatagcttgtttctacttttcatcacgggatattcggtttttcacaataggctttaatgggctcagaaatatcctctcatagatactgcaaaaaagagtgtttcaagcctggtgtagcaaaacacaagtataactctctgagatggatccacacatcaaaaagcattttaacagatagcttgtttctagtttttatctcaggatattcggttttttaatacaggtattacaggg

SEQ ID NO: 110212 - DNA, 602 bp, Homo sapiens
cacacatcacaaagcgttttcacagatagcttattattagttttaatggtaaagtatttgggtttttagtataagcctcattgggctcagaaatgtcccttcacagattctacaaaaagagactttccaacttggtgaatcaatgcacaaattccatttggtgagatgaatctacatttctctaagcattttcacaaatagcttgtttctggtatttatcacaggatattcggtttttcactattagccacaaaaaccttggaaatattcctttgtagattccacaaaaagagtttttccaacatggtgaatcaaaatacaggttcaattctgcgagatgaatccaccmatcacaaaacactttcacagatagcttgtttctacttttcatcacgggatattcggtttttcacaataggctttaatgggctcagaaatatcctctcatagatactgcaaaaaagagtgtttcaagcctggtgtagcaaaacacaagtataactctctgagatggatccacacatcaaaaagcattttaacagatagcttgtttctagtttttatctcaggatattcggttttttaatacaggtattacaggg

SEQ ID NO: 110213 - DNA, 602 bp, Homo sapiens
cacacatcacaaagcgttttcacagatagcttattattagttttaatggtaaagtatttgggtttttagtataagcctcattgggctcagaaatgtcccttcacagattctacaaaaagagactttccaacttggtgaatcaatgcacaaattccatttggtgagatgaatctacatttctctaagcattttcacaaatagcttgtttctggtatttatcacaggatattcggtttttcactattagccacaaaaaccttggaaatattcctttgtagattccacaaaaagagtttttccaacatggtgaatcaaaatacaggttcaattctgcgagatgaatccacccatcacaaaacactttcacagatagcttgtttctacttttcatcacgggatattcggtttttcacaataggctttaatgggctcagaaatatcctctcatagatactgcaaaaaagagtgtttcaagcctggtgtagcaaaacacaagtataactctctgagatggatccacacatcaaaaagcattttaacagatagcttgtttctagtttttatctcaggatattyggttttttaatacaggtattacaggg

SEQ ID NO: 110214 - DNA, 556 bp, Homo sapiens
acagcatatcagaatctctgygatgcagttaaggcagtgttgagagggaaatttatagcactacatgtccacatcaaaaagctagaaagatgtgaaatcaacaacctaacatcataactaaagtaactaaaccaagagcaaacaccaaagctagcagaagacaagaaataaccaagatcagagcaacccacacaaaaagacaaccttacacagaaagaactgaaggagacagagacacgaaaaactcttcaaaaaaatcaacaaatccaagagccagttttttgaaaaaaataacgaaatagatggctagctagactaatagaagaatcaaatagacacaatcagaaatgacaaggggatatcaccactgactccaaagaaatacaaataaccatcagaaaaatactataaacacttctatgcaaataaactggaaaatctagaagaaatggatagattgctggacacatacaccctcccaagattgaaccaggaaggaattgaatccctgaatagaccaataacaagttctgaaattgaggcagtaataaatagc

SEQ ID NO: 110215 - DNA, 399 bp, Homo sapiens
aggtcattttacttcttttagaaaccatttgaagttttaatgacttaaaatctaaattggaactattatttccacattagtgcctacaaaaccctttccacatatctacatggaaaaaaaaatcaacaaaattcatttaccaagtatcagctttattctcagcattacattcttattgattaaaaaacaaaagcaaaacccttaagcctaccattcctggggttgttttgttgttgctgctgctattgtttttaatttgaggaagggtagaaaaggccaaaaaaaaaaaaaaaatagaaacagtacttaratccaatgttgatacagatgaacatttaagtcggtaaattttctagtaaagaatattctgccagatgaataggatctcattcattcact

SEQ ID NO: 110216 - DNA, 597 bp, Homo sapiens
tttctcaatccccaccatttttctcacccaccttgacatgtaatccatagaaaaaagaaagtgaaagttgggaaaaggaaaattagagacaatggccttctgcccattcctgccccccaccccaagggaattactaaaaccctacatttgaacatgaaacaaactgtaaacaacttttaaagtcagtaaaacmgatgggctaggaaagagtagctctccagaatattaagagaacatttacaactgaaatactatctttcacataagaaattgaaactatgtcacaaacactaacttgttaaagtgactcataatacctcttaaaagtcacaagggcctcaaaactagctataaatttcactattctcacatataccaccacccccgtcttttatactgacccactaagacaggtaacaatgttatttatgtatctacagtgctttccattaagtgagcaagaactttccatttaaggatgaccttgccacatccctaaggaattgtgaggattgtgcaactcaggtttagcaagtgagccattaaacttaattctcattcaaacttagtttgaatgacctttgtttctattctgta

SEQ ID NO: 110217 - DNA, 597 bp, Homo sapiens
tttctcaatccccaccatttttctcacccaccttgacatgtaatccatagaaaaaagaaagtgaaagttgggaaaaggaaaattagagacaatggccttctgcccattcctgccccccaccccaagggaattactaaaaccctacatttgaacatgaaacaaactgtaaacaacttttaaagtcagtaaaaccgakgggctaggaaagagtagctctccagaatattaagagaacatttacaactgaaatactatctttcacataagaaattgaaactatgtcacaaacactaacttgttaaagtgactcataatacctcttaaaagtcacaagggcctcaaaactagctataaatttcactattctcacatataccaccacccccgtcttttatactgacccactaagacaggtaacaatgttatttatgtatctacagtgctttccattaagtgagcaagaactttccatttaaggatgaccttgccacatccctaaggaattgtgaggattgtgcaactcaggtttagcaagtgagccattaaacttaattctcattcaaacttagtttgaatgacctttgtttctattctgta

SEQ ID NO: 110218 - DNA, 239 bp, Homo sapiens
tgggctggctgcggtggctgggttggctggctggctgggctggctgggctggctgggctggctggctggcttggctggctgggctggctggctggcttgawtggcttggctggcttggctcgcatggctggctggctggcttggcaggctggctggtttagctgtcttgggtggctgggtggctggctggcttggctggcttggctggatgggctggctggctggcctggctggctggc

SEQ ID NO: 110219 - DNA, 567 bp, Homo sapiens
aggatttttaggtgatataggcagaaaggacggcaagtttttataactttctctaaatgaactttctaaatgcctgagtattaaaagatagcatgtctataaatcacaatgtatatattactgtatgacctaggaccaatcaaaaccgttacctctgataacattatattgtgcccagtataaaatagatataataatacctcaaacttaaatccrggcattgtcattgaatatcttaagaatatgcaacaaaggtgcttttaaaaatacaagctagtgattgtaccaaatttgtaaatcacataggatagtgggtcattttaagaatattagttatttcaatctataaacgtggatgtctttccttttttgtgttttctttaatttctttcattaatatttgtcatttttgttgtcgaaatcttttacttccttggttaaatttatttctaagtacatttttgtagctattgtaaaaggaattgctttcttaatttcttgtttcagctagtttattatcaatatatagaaatgctactgatttttgtatgttgatttatatcctgc

SEQ ID NO: 110220 - DNA, 541 bp, Homo sapiens
ctgagtcctgccaggatcattcacctttcaaggtarggagccagttccagacctgggtttgtgcagctccaagctcccccgtctttctacaatgctagatttagactatagcaatctagcaagtgtggccacacaatggtcaagttggatttagatgatgttccctataaatccattctcctctcccgtgtaagcaaggcaaagtactccaggccatggggagtccctgaagactcgatgaactgcagtggccacatcaggaggttgcaggttgaccagaactcaccgacacagcaggagagcagcttggaacctgcaacctagccaaaacctagtgccttggattgggggagaaaacaggcagccattcctctctctctgctggctagaggggattctggcttttcctgccagagccacccctttccctcctcctaaagttgatggtggttctttaaggaaagggagaagtgcacggtgtgatagggcaggaagagaagaaaatggaggagaggaggggactttcccataagcaggcaga

SEQ ID NO: 110221 - DNA, 541 bp, Homo sapiens
ctgagtcctgccaggatcattcacctttcaaggtagggagccagttccagacctgggtttgtgcagctccaagctcccccgtctttctacaatgctagatttagactatagcaatctagcaagtgtggccacacaatggtcaagttggatttagatgatgttccctataaatccattctcctctcccgtgtaagcaaggcaaagtactccaggccatggggagtccctgaagactcgatgaactgcagtggccacatcaggaggttgcaggttgaccagaactcrccgacacagcaggagagcagcttggaacctgcaacctagccaaaacctagtgccttggattgggggagaaaacaggcagccattcctctctctctgctggctagaggggattctggcttttcctgccagagccacccctttccctcctcctaaagttgatggtggttctttaaggaaagggagaagtgcacggtgtgatagggcaggaagagaagaaaatggaggagaggaggggactttcccataagcaggcaga

SEQ ID NO: 110222 - DNA, 541 bp, Homo sapiens
ctgagtcctgccaggatcattcacctttcaaggtagggagccagttccagacctgggtttgtgcagctccaagctcccccgtctttctacaatgctagatttagactatagcaatctagcaagtgtggccacacaatggtcaagttggatttagatgatgttccctataaatccattctcctctcccgtgtaagcaaggcaaagtactccaggccatggggagtccctgaagactcgatgaactgcagtggccacatcaggaggttgcaggttgaccagaactcaccgacacagcaggagagcagcttggaacctgcaacctagccaaaacctagtgccttggaytgggggagaaaacaggcagccattcctctctctctgctggctagaggggattctggcttttcctgccagagccacccctttccctcctcctaaagttgatggtggttctttaaggaaagggagaagtgcacggtgtgatagggcaggaagagaagaaaatggaggagaggaggggactttcccataagcaggcaga

SEQ ID NO: 110223 - DNA, 652 bp, Homo sapiens
agagttgcttgctggagttgtgagaaactgaaaagtcatgaggaaacagatactttgcagcctctatagattcccatatgtctattttacccctttaaaagaagggactatggtttgtttgaagctttttggggttagtactttttatagcctacagaatgtggccaaaagattctctgatgagtgtctgagacaaaggcagcagaactgtttttgtgttgtcatggtaaatatattacatgctacaggaaaataaagcccaggctcatgcaaaaagtaaaaaaagaagagcaagactagaggcaaaatgatagtctacctgcttctcccacccaagaagcttctggtccagtggataattayagaaggaagcccttttctcatgtacaagtatgggtactggaaaggcaagggacagccaaggagaggctcctgtgacagcagtgtgcatgcttggcttcaagagtctaaagttaaagaatactcaaaagtctgtactgtggcctgaaggaatcggcactgtcaacccagtgcaagtttttgagactggcaggcttgtgttggagctgagctccacctaggatgccagctgatcacccctctggtgctgaagagagaagaggcaagactctagaagagaatataggacagg

SEQ ID NO: 110224 - DNA, 401 bp, Homo sapiens
gaattcatcttgtcaactcagaatcctttagtatctgtgtccagaggaggatttgcctccactctaagggctttgggtttgtctgggaagggcttatttttcacttgctttcttaggtaggaaatcagggtgggagatctcagtcagcatcaatgccttccttcctgtggatctggatgtcttttaatgcactcatgagcctagtgtgaagcctggccacagagatcctgagaattgtactcaagagagtttgagcttcagatgtcatgggtgctccctgttctagagataatggtgtaaagtgacacagacacascatgtgctggctggaggacagataaaaataacaaatagtcttaattgagtacagtgattcaattttgcaagacaggcagcagcta

SEQ ID NO: 110225 - DNA, 582 bp, Homo sapiens
ggctttgttggaaatgggaatatcttcacacacaaactagccagaagcattctcagaaacttctttgtgatgtgtgcgttgaacccagagagataaactttcctttgatmgagcagttttgaaacgtgtttttgtaagatctgcaagcggataattggcttcgctttgtgtcctttggtggaaacgggaatatcttctaataaaatctagacagaaatattctcagaatcttctttgtgatgtgggcattcaactaacacagttgaacatttcttttcacagaacagttttgaaacactcttttgaacaattgcaggtgaatctttggagcgctttgaagcctttgttggaaataggaatatttcacacatcaaactagccagaagcattctcagaaacttctttgtgatgtgtgcgttgaacccagagagatgaacctttcctttgatagagctgttttgaaacgtgtttttctaacatctgcaagcggataattggcttcgcgttgtgtcctttggtggaaacgggaatatcttctaataaaaactagacagaaatattctcagaatcttctttgtgatg

SEQ ID NO: 110226 - DNA, 582 bp, Homo sapiens
ggctttgttggaaatgggaatatcttcacacacaaactagccagaagcattctcagaaacttctttgtgatgtgtgcgttgaacccagagagataaactttcctttgatagagcagttttgaaacgtgtttttgtaagatctgcaagcggataattggcttcgctttgtgtcctttggtggaaacgggaatatcttctaataaaawctagacagaaatattctcagaatcttctttgtgatgtgggcattcaactaacacagttgaacatttcttttcacagaacagttttgaaacactcttttgaacaattgcaggtgaatctttggagcgctttgaagcctttgttggaaataggaatatttcacacatcaaactagccagaagcattctcagaaacttctttgtgatgtgtgcgttgaacccagagagatgaacctttcctttgatagagctgttttgaaacgtgtttttctaacatctgcaagcggataattggcttcgcgttgtgtcctttggtggaaacgggaatatcttctaataaaaactagacagaaatattctcagaatcttctttgtgatg

SEQ ID NO: 110227 - DNA, 549 bp, Homo sapiens
agacttccagataacccagcgccaggcagcgtgcggcgtggagagcgggtggaatggacaggaacgcgcactccctgaggctccgttccagcccatccgtcacctgcggggcaccagagacagatgccggctctccagccaaagggtgggcacaggttcctttaaaatcgaaagaccctactcccaggtaaaaagatgtcaaatcattccttagcccagacggaattcagcacccaaagggttacacgtggctgccgggctccggcgcaggagagggcgcctcggcactcccagtaattcaattagtcaggtttctaraaggtggggcgggggagggggtaggaggcgtggggaagggagattaggaaaacgcctctttctcgtggagcaaaccaatccggttggagtaaagagagaggaaaaacccccaatctgtaagcaaacagtaggccgttccctgactggttgctccagctatccccccaccgcgctcccacccttcccaagtaaactgcttggaaggaggaaaaaaaaaaaaaaaaaaaaaaa

SEQ ID NO: 110228 - DNA, 606 bp, Homo sapiens
atcatttatggggagtgaggggaacaaatggtgcctgaacttataggaatgaagaagatttggcataatcttcatggagagaggaataaagggttaagaaataaattgctgagcagcagtgaatgtccaaccaggaagggtagatagcacagatgtgtaataagcatctgcaggatgtttgatgtaatgacagcaaaacttctgataaattcttcatttgccttgatgataatttcgtttttcagatgtagaggaatggatcaggggattagtaatctcttcttaattctgatcaacaagaaggggaaaatattgccaataatgggaactgtgatcattttacctgaatgtgtgtaacacagataatctggatattagaaaagtcagtgctgkaaagttctatgagctccacaacgtatgcacacaagaaggcaagaaggggccataaccatggtaaatatgaaagagaagcaaaaatgtatttaaaaagtaacacaaagacccagctaagaataaatttgggcagacatgacaacaggagcataagggaaaataatttaaggaaattgacagtatatctcttatatcagtgatatgatgtggtca

SEQ ID NO: 110229 - DNA, 573 bp, Homo sapiens
gctgggtgtgtttaaagacagaagggtctggtgcggtggcacacgcctgtagtaccagctgctcaggctgaggtaggatgattgcttgagcccaggagttctgagcttttgtgtgctatgccaattgggtgtctgcactcagtttggcgtcaatatggtgacctcatgtgggtggaggatcaccaggttgcctaaggaggagtgaaccagtccaggtcagaaatggagcaggtcaaagctccagtgctggttaatagtgggatggtgcctgtaagtagccactgcatcccaacttgagcacacagcatacccggtgtctttttttttttttwaaaaaagaagagctccagggtatgttttagaataggaaagaatgggggagaaaagaaagggaggaaatttaatttggattatagtaatcactcaagagtaaacccaaaatgcatttttcacataattacctggctttagtacaaggaatccatggatttgtgttatcaaagacttttcatttacctgcatttcatttcctgccacattctgatcccacccattttcccaccacaggctgat

SEQ ID NO: 110230 - DNA, 475 bp, Homo sapiens
tacattataacactggatcaactgtacttcatataaattcctcaaatgaaattccctttcttagtcttacctcaaaacattgacttgttccttcctactgccttggaaatacaagcttccatcttgtaagccagcctccttactttccactgagttacgtctcaacttcttggaaatgtgcacctttttcaggatgtaactactgatgctactgctactactactcttaacaactgcatatgaccctcacttactrtactttacctggctcttgagagacatgacctcaacttttctcattccacagatgtgggatttgagacccaaagaagtgaagtaacctgcccaagtttacacagcttggagtagaacccgagtttctatggactccagagctcatgagttcaccacttttctgtgcctcctaactctgtaagtatttggcactcttcaactccagattgctcttgaattc

SEQ ID NO: 110231 - DNA, 452 bp, Homo sapiens
tagcatcaggaagaagtcatgggctttgacattagataacgcactatttcatttagattttcactttctcttagatattaaatgtttttaataacatcataaaaggtattatttttacatttctataattcattgttggtcctatatagaaatgcagttaaaaaaaaaacctgactttttatctagtgatcttgctacaacctytcattaattctttttttctattgattttttctttttttattatactttaagttttaaggtatgtgtgcacaacgtgcaggttagttacatacgtatacatgtgccatgttggtgtgctgcacccagtaactcatcatctaacactaggtatatctcccaatgctatccctcccccctcccccaaccccacaacaggccccagtgtgtgatgttccccttcctgtgtccatgtgttctcattgttcaat

SEQ ID NO: 110232 - DNA, 573 bp, Homo sapiens
ttggttcttgcggccccagcaggcatatctggaccagattaggtacccgttcaaaacggtgccgcattcatcagtcacctgagatgggccctgaatgatttgttttttccttcccctggarcgttaggtttactgtgtttactccctgatgagaaaacgggaggcaaacaagcaggtggagtatgcccagcacccacccccgggtgtgcacagtgtggaaaacaggcatatttttaggtgaagtacagggagaacacacgggaatgctcagcccctgagcaacaggtttgtctctccaaaaagcgctcttcagaaaggccagggaaatgtctgtctccttcgttgaaagtggtgtcctgtcatccgttaccacgctattgagggcggagaaaaaccttctttgtttgctaagtgtcctcataacaaacatgacctacacagtgcagaataatcagactccggtaacagataccttgttacaggacagagatttctgaaccttaaagttgagaaataaataaattgcacaaaatagacagcctgtcattttctaggttaacttgagcaagatga

SEQ ID NO: 110233 - DNA, 530 bp, Homo sapiens
gaattcgattaattcaatgagctgcctctgggtacttccaaacttggtgacagtagtcacctgccagctgcggtgaccatggcctgacaaggcaaggtaactagatgaccaaaagttttgagaatctatgtctacaccactctagtggacaagtaaaccaaccagctgacattctaagattggttaagaaagatgaatattaactaaggtcttaggagtaattgctgcaggaggagctatagcttattccactagacttctggtatcacaacatttttagacattatgatcagctgttacttcaaagcatccataacagagtagactagtatagagcataggcagatttgcatggtacaaggggtagccacaagtcaaataggagcactgcccatttattcttggtcagttgaatctggttgagctgcagtagtcacttttcatgcacactttyactgaaaccactctacctcaaggtcttttgtgactgcttgtgatgatggtccttctatagtgctatgcaaaccagt

SEQ ID NO: 110234 - DNA, 432 bp, Homo sapiens
gtgtttgagtaaatatatctggcatttggtatgcagatatttatctaggaatttatttttctacagtcaaagtattttaaaaagtttttagatgacaagaccttgtttttttgccatataatcacagaaattgtaaattataaggtaacatgtcagttttgcctgtaaggatttatatatacatatatatatatatatatatayacacacacacacacacacacacacatatatataacagtaataggtgatcatggtataccatagaaacacacacacacacacacacacacatatatatatatttatttatttatttatttatttatttatttatggagtaccatgatcacctattactgtgattgtatcatgctaattataaaatgaggttaacaagtagtgggtgccctatgtattttggtgaaatct

SEQ ID NO: 110235 - DNA, 612 bp, Homo sapiens
tggatgctaggcttaatacttaggtgatgggttgayaggtgcatcaaccacatggcacacatttacctatgtaacaacctgcacatcctgcacatgtatcccagaacttaacataataatatatgtattcaaacatatctacatatttagagcaaccgactgttctagatgtagcaatcatccatttctgaccgggacacctttagagaatattattaggtagcctagttttgtatattgcatagtaatgagatatatttttgataagttagaagtgaaccaaagactaaaataaattagatcaactgaggcatttgaaattctataataaacaataataattatagaaaatttacaatatatttatctgttttgcatggtatttctaaaataacctctgaaaagcacagaaatttatttgtagaaatgagcagttgtatacaccctaaactaatatacgaaatagtgctatatatttatatttaatttcttgtattaatgtatttataataactttctcctaatccataaaagataagaaaaataaagaagtaccactatattttcatgtcatattggtttatccccttcatatattgcatactattatgt

SEQ ID NO: 110236 - DNA, 555 bp, Homo sapiens
caatctaatcaagttgatattcagtattaaccatcacaactagggaagaayattagcaatcacctggtccaacaccttgattttatggaccaggaagcttagtcctagaaaaaacatggtcatgttgcagaagaattcagtggcaggattggaagaggacccgaacagtccacatcaatgctgcctgcaggagaaaccaggcaaaggggtgaagaggtgcttttctgtcatctttgggacagcaggcagggccagttttaagtggttttgttcagcctctccacagaatgcatgagaaaatgggctcagttctagcagaagtcctagcagtagcagggtaatgtctagcagagtaaccctgggcaagtcacttagcctctctgactcaatttgtaaattgagataatgatagtgcctatttcatttttgtgaaaattaaatgagcatgtgtaacatgcttagaaaagtatatggcaagtagctatcatttatcacatgttcatgattgtcaatattattattgttatcattgcaataagtttcctaatgttagcc

SEQ ID NO: 110237 - DNA, 534 bp, Homo sapiens
gggtacatcaatgatagagggacagaggttaagccacatcgatttgaaagctgatattggacccttgcaatgagctctctgagcatccacatcttggacagccctgaaggtagacgtgcatccaggaaayagtagtggctgccctgtgtttgtgttcagagcctggtgctaggtggtatttgttaataggagaggaaacacctggggtcacatcaaggaaaagacggacaggggtagattggtagctgaagaggtggccatcctttctcagagctaccgtgttcaattcagggatgccttggtaattctgccccctgccttccaccaggagtgtgtgcagctctgtgcctgtgtccagcacaccctatgtgctaaagtttcctaaccttagcgggggtatgaactgtttgcccaggaatgaatggagatgtgatgtgaactatattttgtcccaaacaagaagagaaatctcagcacaagagaaacaaattatctcacaaataagtgaatctattctagtaattgagcagaact

SEQ ID NO: 110238 - DNA, 534 bp, Homo sapiens
gggtacatcaatgatagagggacagaggttaagccacatcgatttgaaagctgatattggacccttgcaatgagctctctgagcatccacatcttggacagccctgaaggtagacgtgcatccaggaaatagtagtggctgccctgtgtttgtgttcagagcctggtgctaggtggtatttgttaataggagaggaaacacctrgggtcacatcaaggaaaagacggacaggggtagattggtagctgaagaggtggccatcctttctcagagctaccgtgttcaattcagggatgccttggtaattctgccccctgccttccaccaggagtgtgtgcagctctgtgcctgtgtccagcacaccctatgtgctaaagtttcctaaccttagcgggggtatgaactgtttgcccaggaatgaatggagatgtgatgtgaactatattttgtcccaaacaagaagagaaatctcagcacaagagaaacaaattatctcacaaataagtgaatctattctagtaattgagcagaact

SEQ ID NO: 110239 - DNA, 534 bp, Homo sapiens
gggtacatcaatgatagagggacagaggttaagccacatcgatttgaaagctgatattggacccttgcaatgagctctctgagcatccacatcttggacagccctgaaggtagacgtgcatccaggaaatagtagtggctgccctgtgtttgtgttcagagcctggtgctaggtggtatttgttaataggagaggaaacacctggggtcacatcaaggaaaagacggacaggggtagattggtagctgaagaggtggccatcctttctcagagcyaccgtgttcaattcagggatgccttggtaattctgccccctgccttccaccaggagtgtgtgcagctctgtgcctgtgtccagcacaccctatgtgctaaagtttcctaaccttagcgggggtatgaactgtttgcccaggaatgaatggagatgtgatgtgaactatattttgtcccaaacaagaagagaaatctcagcacaagagaaacaaattatctcacaaataagtgaatctattctagtaattgagcagaact

SEQ ID NO: 110240 - DNA, 549 bp, Homo sapiens
cttagggtttgaaaaccacttcgttcccactggcagctgcaggcgaagctttctctcagtggggtcattgttttttttcccaaaattgagctgagatccatttaatgcaccatgaaaactaacttaattaggaatcaaattcattcttttgtgagaccagcggtaagcgtccaacactccctccgctgccgcccccacgtttttctgcgttttttgctaagccgcctctgctgaagtccgtgrctccagggcagccgcccctccaccgctgcccacctgcccctgacttctctctctctctctctctctccattttaagcaaccgaggcgcactctggttttgcaagtctgacattctttacgtcgccttcccggaaaaatttgtccagggctggcgtccggccgaggcggtgcatctgacgcccgggagaagcagagcgcgtttcttttggcgtggacctgggacccccgcgggttccaggggcggcacgccttggggtcggcattgggacctggctgcgaggcagctcggcggccaggaaggcgccg

SEQ ID NO: 110241 - DNA, 558 bp, Homo sapiens
cttaatttccaagtctctcgggattttttccagatattttcttgttgatttctaacttaattccattgtggtcggggaacatattctggacatttagtcttttgcaatgtattacaactgttttatgttccagcatatggtctgtcttgacgaatgtttcacatacagtcacaaagagtgagttttctacacttgctgagtgagtattctatatgttctattaggtcaagtggtcgctagtgttgttccaatcttttatatttttactgatttcttttgcctacttcgatcaactacygagaggattttaacatctccaattatgatggttgatttcttggtttctccttttttactataaaattttgctttatgatattttcaagctctgttattaagtatatacacatttaactattcacatgggttaatatacatacacatgtatatttattaattataacattaacaaatattaatgttttattaattaatgtgcaattttaatgtattaattataacattataataatatataattatacaagtatataatat

SEQ ID NO: 110242 - DNA, 632 bp, Homo sapiens
gaacttatgcatgtaaccagaaaccacctgttcccccaatactattaaaattaaatttaaaaggcctagagacagaaataccattcgacacagtaaccccattactgggtatatacctgaaggaatataaattcttctattataaggacacatgcatgtgtatgttcattgcagtactattcacaatagcaaagacatggaatcaacctamatgcccatcaatgatagactgaataaagaaaatgtgtcacatatacaccatggaatactatgcagacacaaaaaggaatgagattatgtcctttgtagggacatggatggaactggagcccattattcttagcaaactaatgcaggaacagaaaatcaaacaccgcatattctcacttataagtgatagctaaatgatgagcactcatggacacatataagggaacaacacacactggggcctattggagggcggaggatgggaagagggagaggatcaggaaaaataactaagggatattaggtttaataccttggtgacaaaataatctgtacaacaaaccccatttacctatgtaacaaacctgcacatcctgcacatgtacccctgaacttaagaagaagttaaaaataaaaagaaa

SEQ ID NO: 110243 - DNA, 586 bp, Homo sapiens
atcatcacagctcatttagtggtcatgcctctttcactcccttgaatttagattagttcctcctttcttgagcttgatttttttttaatgaaaacagtttagttattttgtataattccctcccaagtaggtctttcaactattttaccttaaatggattcagattagccatttttggcagaaacaacatagaacacagaacaacaacagaacatagaagtgatgttccattcttagcatcatattaggargcacatgatgtctgatatggcttggctgtgtccccaccaaaatatcatcttgaatggtagctcccataattcctatgtgggaggtaactgaatcatgggggcgggtctttcccatgctgttctcataataatgaataattctcacaagatctgatggtcttataaagagcagttcctctgcacaggctctcctgcctgcggccatgtaagaagtgcctttgcttctcattcaccttctgtcataattgtgaggcctccctagccaggtggaactgtgagtcaattaaacctctttccttcataaattatccagtcttgggtatgtctttattagc

SEQ ID NO: 110244 - DNA, 586 bp, Homo sapiens
atcatcacagctcatttagtggtcatgcctctttcactcccttgaatttagattagttcctcctttcttgagcttgatttttttttaatgaaaacagtttagttattttgtataattccctcccaagtaggtctttcaactattttaccttaaatggattcagattagccatttttggcagaaacaacatagaacacagaacaacaacagaacatagaagtgatgttccattcttagcatcatattaggaggcacatgatgtctgatatggcttggctgtgtccccaccaaaatatcatcttgaatggtagctcccataattcctatgtgggaggtaactgaatcatgggggcgggtctttcccatgctgttctcataataatgaataattctcacaagatctgatggtcttataaagagcagttcctctgcacaggctctcctgcctgyggccatgtaagaagtgcctttgcttctcattcaccttctgtcataattgtgaggcctccctagccaggtggaactgtgagtcaattaaacctctttccttcataaattatccagtcttgggtatgtctttattagc

SEQ ID NO: 110245 - DNA, 579 bp, Homo sapiens
tggtcaaaccctaactctgcatgtgatggggcctttccgagctgaataagtttagatgaggttgtgagggtcaggtctccatgatgggatgagtgtccttataaaaaagacactagatacgcatggatatatagtagacactggagatatataatagacattggagactaccaaaggtggaagggtgtgcagggggtgagggttgaaaaatcacctactgggtacagtgttcactgttcaagtgatggggagaagcccagattccaccactgtgtgatgtatgcacacaagaaatctgtacttgtaccccctaaatctatggaaatttaaaaagcatataaaaagacatgggaaagcttgctctcactctgtctcacgtccctgtgaggacacagcaagaaggctgccatccrcaatccaggaagagagccctcaccaacacccaaccatgctggcaccttgatattggacttcccagcctccagaactgtgagaccataaatttctgttgtttacgctcctcagttcatggtgttttgttatggcagcccaagcagaataagatagccatgaatagag

SEQ ID NO: 110246 - DNA, 565 bp, Homo sapiens
aacaatcgctgagtcttggtcaatcccagaggccatacttcaaccagtcatatactgctgagtgttcaaactgtgttcaaataaggcaaacgtccagctgttaccaatccagctgtttggtacctcacttccaatttctgtatatcactttactattttggtctataaatttgttctcatcacgaggcacatctggaggcacctctctgaatgtgctgattctgggggctgcccaattcacaaatcattcattgctcaattgaagtcctttaaatttaatgtggctgaagtttttcttttaacacaagtaatgagtgacacatgttggtgattggatagatatccattaagactggtagaatggaatgaagtagagcctagaaacaggaaattgtgccaccatttctccagccaggctgagtgggcaggaatgtctgtggacaccatattgctggcccagtgactggaagctcaggatgtcccggaggctctggcacctcccaactgcaccagccaatgcagccagcactcctgtcacygtgcataccacacactcgtttggaca

SEQ ID NO: 110247 - DNA, 558 bp, Homo sapiens
gagaaacatctttgtgaggtttgccttcaactcacagagctggacctctcttttgagtgaccagtcttgaatctctctttttgtacaatctgcaagtggatatttggagcgatttgaggcctacatttgaaaatcaaatatcttcccttaaaaactacacagaaacattctcagaaattgtttgtcatgtgtgctttcaaattaccaagttgaacctatcttgtgattgagcagtattgaatctctctttttgtggaatcggcaagtggatatttttagccctttgcggactgtggtggaaaaggaattatcttcaaatccattctacacagaagcattcagacaaacttctctgkgatgagtgcattggtcacacagaattgaacctttcctttgattgagcaattctgaaacactcttttagagggtctgcaagtggacattttagagctttggggcaattgtggaaaagtaaatatcttcacataaaaactacacggaagcattctgagaaacttctttggaggtgtgcattcaactcacagagttgaacctatc

SEQ ID NO: 110248 - DNA, 390 bp, Homo sapiens
aacacttgggttgtctctcctttttagatattatgaataaaactgctattaacattcacgtacaaatttgtgtgtggacatctatttttatttctcttaggtgcaaacctaggagtagaattactggaccatatgagaactacatttgacattttgaggaacagtcaaactgttttccaaggcagctacaccattgtactttcccacccaccagctgtcwtgagtgttctcatttctacactctcgacagcagtgattttgggaacaaatttctacatcaagtaccagctgctgcaatccagagttctctacccatccacaaacatttcaaagagaactttatttgggttgtctgtccaaaggaagaattctccatcggggatgatgccc

SEQ ID NO: 110249 - DNA, 685 bp, Homo sapiens
gcctctccgtggggctccaaaacactgctgcatttacccaaggagagaaatctccccagtagaacctcagccccctgaaggagacaggcagtctttcccttgtgtccccttgcctgcatctgtgataaccctcatagcctccttaattgaacttttgctttgccttttgttaaaatgtcttgtggttggcaaaagggcccagtctttggaattggatggagatgattgttaatcttactcttcctggactagctgtgcaaccttggtaagttcattttattctctttgagccttacattcttcatctgagaaacagggaagaataataaatatatctagttattgtgaaaattctagagataaataaatcattaccgtgaagatcctggtgcattacaggggatcaggaaagagragttgttgataatattcatatcctacttttaaactggggaaacttcagccagcctgaaaatctaaaaatattttttagatatagcagatatagcagaaaatctaaaaaattttctatgaagctctttctgatacttttgaaagtgtttgttccctcctctacacatatataccatgccatatctccattgcagaacttctgccttaagtctctgtttcccagattccaactgtggttggataatcaacgtctgcagcagtagctggcaca

SEQ ID NO: 110250 - DNA, 603 bp, Homo sapiens
ggcttcttcttaggccctggaggagattttgtgaactgtgatctccatctgtaggtctatggcatctctggaccccacttcctcactcaatccattcaaggttgcctgacatatagagatcagtcagggatcctacattttatgggacgattggtacctggagtgtgttcaaggcagcaaccagaaagatgagagtcaaacacagatgaaagaatcagagagttgaataaaattaacttaagaaacctggaagtatgaacattttaaatacatatactctttgactctcagaatttcastcctaggaattcatcctaaggaataatcacataagtgctcagagataaatgtacaaggatatttatggaagcattgttttttcaaaaaaaaatatgtggggggttgaaaacaatcaaaattttcatcaatagaaaactatgaagatatccatacaatggaatataattcagcaaacgatgaatttgacataatacagacattaaaaaggacaaatttgagaactttcaaaaactgatgttggggtgtaaattggtacagaaaagtggcaatttcactcctaggtatataactaagaagtgtgtc

SEQ ID NO: 110251 - DNA, 603 bp, Homo sapiens
ggcttcttcttaggccctggaggagattttgtgaactgtgatctccatctgtaggtctatggcatctctggaccccacttcctcactcaatccattcaaggttgcctgacatatagagatcagtcagggatcctacattttatgggacgattggtacctggagtgtgttcaaggcagcaaccagaaagatgagagtcaaacacagatgaaagaatcagagagttgaataaaattaacttaagaaacctggaagtatgaacattttaaatacatatactctttgactctcagaatttcactcctaggaattcatcctaaggaataatcacataagtgctcagagataaatgtacaaggatatttatggaagcattgttttttcaaaaaawaatatgtggggggttgaaaacaatcaaaattttcatcaatagaaaactatgaagatatccatacaatggaatataattcagcaaacgatgaatttgacataatacagacattaaaaaggacaaatttgagaactttcaaaaactgatgttggggtgtaaattggtacagaaaagtggcaatttcactcctaggtatataactaagaagtgtgtc

SEQ ID NO: 110252 - DNA, 527 bp, Homo sapiens
gaaaacgctgcatatccctaccccaccaccaggcggcagcattaacatcagctcaagtgcttgtatttggattgcagtttcttcaaaatttggaatgaggatattttgctttccatagctcaggtatatgattaaaataaatcaaatatatatttcattcactttacatatttaaattgagataartatatcttatgtaagcctgctgtttttgttttttattgcttgttttgtattagtttttcccagggattttccctatttaggtgttgtgctcatgggtgctacacacatatgcacatccagctcactagaaattcatttcggatgaatacatgtgtcagaaattgacctcagaaaggggacacacacctcctgttccagagaggcagaaagaggctttttaccttcaacaattggcatgaataacaagggtgtattatggttaccttcagaacagagaatcagtcaatcagcccacacatttattgagtgttcaacttcaaataaatcccaactttagaaac

SEQ ID NO: 110253 - DNA, 514 bp, Homo sapiens
ctgcctctgctttagtcaacataagacaagtgaagaccttcattgtcccttatcccacctcgcctcagccagtccacattttagagtcttcctttgcaacacctgtattaggcaggactctgtggagagataccaaagctttagctatcttaggtataaaggagctttatcgaaaggatactatgtagtctcaccaaagtgctcataatacaggggtatatttgagttttgagggatttcaamgacactgggactctcactttttatatcccttcttttatctaaattatctatttgccttcatatcatctactggcttcctcttaaaaaaatggaataattcagtcaacaaatctgggcctgtttcatgactttctctactagagagggcctgaatctttcttttggtagttccagttgaaacactgttattttgcctaaattgagtcaggtgactatcacgtgatcaattaactataggaacagggttagaaccacaaaacacagagaagaa

SEQ ID NO: 110254 - DNA, 582 bp, Homo sapiens
atagtttaaaaaccctttaaaacttcaggaactttctaagaaacaaccagaggagcaatcccaaccaaaccaaaccaaataaaatcagaacatctgtgttctattataatttattcccagaaaagtggttgcctcatctgtactgaatataaaggggtctcctggctggttcttcagagaattaaaaagttctacttctagatgacctgaagggaaggtcagtagagttgatgaggttattttaagacatattaatataaagtaatttggaaatattcagaagaagatgacaaggacaaccccaggttgtagaggagaggactgggttggacattcagattgcattattacatgagctttaaatgtcttgttagtactgttaaaattttttatgcatttgggtagatttgcctacagtatactatcactataactagtatatttattcaattaatttccaagtgcaaatrgtgataacacagccattttatcagggataaacatattatttaaagaacacacaccttaacctaatcatttgagttaatcattactcctgaattcctattacttgttatgctg

SEQ ID NO: 110255 - DNA, 553 bp, Homo sapiens
gctatttgccaggtgttttcacatttatgatctcatgtaattgacatatatttgctgaccttcatcaatttgtaccactaagctggctattttaagagttcaaaaggcatgtaaagaggtagtatggcatgagtaattctatacaaatttaaagcaaaacaatatggttattaaaaagagcttggggccaggctcggtggctcacgcctgtaatcctagcactttgggaggcttgaggtcaggagtttgagaccagcctgacaacatggtgaaaccctgtctctactaaaatacaaaacattagatgggcatagtggcacactcctgtaatcacagctacttgggaggctgaggcaggagaatcccttgagcccaggaggcagaggttgcagtgagccgaaattgtgccactgcactccagcctaggcgacagagtgagaccctgtctaaaaaataaaaaataaaaataaaaaagagyttcggctctggaataaagcatgtgtgtttgccaatgctggctctaccacagatgaacataaatttgtgcaatttc

SEQ ID NO: 110256 - DNA, 599 bp, Homo sapiens
agccacttaacatgcagataattgaatgatttttcatctagatttttttcaagtttgctagagtagagtggaagtgtatgtctgatgctggtcagtatacagctgatcctagaatagagggccctcctaccaatggaaaaggattgcttctgtaggaagaattttgaattttcataacattttctgaacacctattccccacacaatcttccattctttagagatatgttacatttccaaatggcatttattcatgtattcttttattcgttcttcaaaacattacaggatgcyccttataaatcattcactgtttgagtcacacaaaaattaataaaagggcctctgccctcaggaggcttacactcttagaggtcagatgtgaaaaataatcacaacacatacaatgcttcaataatacacttatatgctaagttcagtattaacaagaggtagcctaggataaaggttttggagtcaggttgccagggtcaaatccgtctttctatttatttactttgtgaccttaggcaagttacttaacctttctgtacctcattttccttggctataaaatgggaataatagtactgccaata

SEQ ID NO: 110257 - DNA, 482 bp, Homo sapiens
ataattcttatgccaaagtggcatattttggggtggcatattctgatgccctcgactgcttactgtaatgggcacaagactggatcattggtcttttatcctttttagagatgtttatcaattcctaattattgtttgaagggattgagtctaatgyagaagggaatgatgctgtttaaccagggcaaaaatttctgagaaagcagaagagcagaatccatcaatagcttataaaggtagtgtattgtaatggatagtgaagcaaaccctgaagggaaagattcatgttcaactcccagttcagtacagtcagccctctggatccatgggttttgtatccatggattcaacaaaatgcaggtaaaaaaattatgaaaaaaaagacaattaaaaatacagcaaaaaagatacaaatacaaatatatatagcatttacattatattgggtattgtaaataatctagagatgaattaaagaattc

SEQ ID NO: 110258 - DNA, 525 bp, Homo sapiens
gtcctgcaagtcctacaaactgcaggtgtcaacttgtctgttaggatttggttaaactgctttacctcccattccatatattgtgaaaactcatcattctctacctatcgatctgggttctcttggggtacctgagggtctggtcctgaattctttctactgtatcgttggtttctgcttggagtttttcctcatgtatacattatcaatcaacataaagcaaactctgtaaaatatttaaagaggtttattctgagctaatgtaagtgaccgtggcatggagaccagtctcaggaggtcctgaaaaagtgtgcttgaggtgctcagggtggtcaggttacagtttggttttatacattttagggagacagaagttacaagcaaaggcataaattaatacagttcagtcccaaaaggcggggcacctcgaaggggcaggggcatgggggkgtaattcaagggtcataggtggattcaaaaattctatgattggccattggttgaaagagttaaactaaagacacg

SEQ ID NO: 110259 - DNA, 525 bp, Homo sapiens
gtcctgcaagtcctacaaactgcaggtgtcaacttgtctgttaggatttggttaaactgctttacctcccattccatatattgtgaaaactcatcattctctacctatcgatctgggttctcttggggtacctgagggtctggtcctgaattctttctactgtatcgttggtttctgcttggagtttttcctcatgtatacattatcaatcaacataaagcaaactctgtaaaatatttaaagaggtttattctgagctaatgtaagtgaccgtggcatggagaccagtctcaggaggtcctgaaaaagtgtgcttgaggtgctcagggtggtcaggttacagtttggttttatacattttagggagacagaagttacaagcaaaggcataaattaatacagttcagtcccaaaaggcggggcacctcgaaggggcaggggcatgggggtgtaaytcaagggtcataggtggattcaaaaattctatgattggccattggttgaaagagttaaactaaagacacg

SEQ ID NO: 110260 - DNA, 605 bp, Homo sapiens
ctactgcactgccacatgagcaatagagttctgtctcaaataaataaataaataaataaataaaataataaataaataatattcataacctcttgagtctgcaattctacatctaagattttatcatgagagcttatttctacatgtggatctgacacagttatatggatttactgcagtgccttttgtaaggatgatacattgaaaacaaacaaatgcagtgccttttgtaaggatgatacattgaaaagaagactagctaaatatcagggtactcacagaggagatattatgcagctattaaaaaggagatatatttatttatctttctacatatctgtctttatatgtcctatgattctatgtgtgcatgcatgcatatctgtgctgctctcaaacaatattttagatatgttcagtaaagtaaataaagtgtaaacagttgtagattattctctaactggagaaaatacacatacatatgtttgtacatgcacatactatatatatttgtatagataaaaacaactagtaayactagctgattacaggtaggtggactgaataccaaggggacaagtgtaagaaagagaattacctcttac

SEQ ID NO: 110261 - DNA, 515 bp, Homo sapiens
ttttgttcaaagctattcaacaggtctctaggaagttccaaactttccctcattttcctgtctccttctgagccctccaaactgttctatctcctgcctgatacccagttccaaagtcatttccacattttcgggtatcttttcagcagtgccctactgtacyggcaccaatttacagtattagttcgttttcatgctgctgataaagacataccttagtgagccatttatgaaagaaagaggtttaatggacttacagttccgtgtggctagggaggcctcacaatcatggcagaaggtgaaaagcatgcctcacttggcagcagacaagagaagagagcttgtacagggaaacacccacttttaaaaccatcagatctcatgagacccactcaccaccatgagaacagcatgggaaagacccacccccataatccaaccacctctcactaggtccctcccacaacacatcggaattgtgggagttacaattcaagttaagatttgggtggggc

SEQ ID NO: 110262 - DNA, 597 bp, Homo sapiens
tcctctgacaattggttggctggattttctctttcttggtttataaacttattttactgaagcacatttttcactacttcctgagaaagaattccttgtttgtacaaatgcatctttattctgacctcacacttgattgaaagtttgatttggcrtagaattctaggatgaaaaaatactttttctcattgtttggaaagcacagttctactaccttctagcttctgtgataacattgaaaataagactcacattcctttgtattttatattttttggtgttattgttttataaatgaatttttcttctatctctctaagaatgttaattacagggtttttttcttaaagttttctcctcttacctgcattgtctctgtgttctctgtgttccctgctcctgcttactgtgttttccatgttctgttgaagtcttacttatattgtctgtagatccttgacgttctatttatactccagaaagaaatggaagactttggggctacagatggaattattgactggtgaacttcccaatgtgatcaagcagcaagccttatttatgtgtggtaactcaagtatcagaaagaaaatgaga

SEQ ID NO: 110263 - DNA, 599 bp, Homo sapiens
atttttctttctttggtcaagttcatggccacaattatattttctactgagaaatgatttactagtctgacaaagacttcaaatatcttttttgtgactcttattatttattcttctatagctgaaaaaatatcagaaakgttcttatgtttagaagatgtaaatttccctgaggtttcacagcaaggatggaaataatagcttctttctaacataatagcattgtgatgtttcattataactataatttggggtaaatttacaaaaaaaaaaaaaaaaccacgagaaagctaaacggaatgtactgtctttatctattaatccttccatactttctgcaaaagatattttgaagtctctccagtctttctcttcatttctcttcaaatggcattagatttatgtagaaggaaaatagatcagaaagactcatgtatttttggtgttttctaaatgcacaacacaccgtgattttactattgaagaattgcaatgcaaatgtacttactggttctaaggcttttgatgcataaagatcctggaagctacttctactacaagagattatctaagaaataataaaaatacaatggaaagcc

SEQ ID NO: 110264 - DNA, 602 bp, Homo sapiens
accaaatgaatacataaactgatggagatacccagtgttccagttttcacacctggtcagtctctgcattgtaattaacaaaatgagaaagggcatgtttaagcaactagactgtggcacccttgaatattagaagttagacgtggtgttcaatgttaacctgtttcataaagttgtcagaaataaaaaagcttcattcagtaagctgcatgactgctgctcaaaactgcatgcatttttaattgagttttttgtttttyctttttgcaaaatgaaaataagaaacatactagagataatattttattgcatcagtaagtctttgtttttttaagagttttctagattaccataacaattttgcttagaaatactgcataatagagctttggacatttgaaactttttttcaaaaccttatacatttggacttacaatccacactgatcctataactaacgtccaaactgcaggacgtaattttctttctcttaaaataagacttataaaccatctgaaatagctctggacctcaaataatatttaacaggcaatcatataagaattaaaagaaaatgaataggaaatatatcattagtagt

SEQ ID NO: 110265 - DNA, 586 bp, Homo sapiens
ttgctttcatgtcttggctgttatatgmacagtgctgctgtgcacattcgtgtacaagtctttgggtggatatattttttgtttatttaaaattaatgaatagaataatagttatctgctatttaagtgtttttaattttgattttattatgtgacaatgtaatatagtggagagaagctctggacagagttgcaggagcataggtttcacaggctactttcttgttttgtggccttaggatggcaaatctgtgtctccagattttagtttccttatctacaacatggaaaggttagactaaatgatctcttatgatttataaatctgttaatttctatattattttgagcagattacttctctgtgcctcagctttttcatgtgagaacactgggttattaatagaatcatatataagtattaatatgaggatgaaagaatattcttcggaatataataaaagtatcaggataaggctgggactgttatttttctggatcaagaatgccttagtgggaatgctttcacggtggcctcagtggagttactgggagtaaactggtaaaccagtaattagtggaggaa

SEQ ID NO: 110266 - DNA, 547 bp, Homo sapiens
gatgcacatttgggttgctttcatgtcttggctgttatatgcacagtgctgctgtgmacattcgtgtacaagtctttgggtggatatattttttgtttatttaaaattaatgaatagaataatagttatctgctatttaagtgtttttaattttgattttattatgtgacaatgtaatatagtggagagaagctctggacagagttgcaggagcataggtttcacaggctactttcttgttttgtggccttaggatggcaaatctgtgtctccagattttagtttccttatctacaacatggaaaggttagactaaatgatctcttatgatttataaatctgttaatttctatattattttgagcagattacttctctgtgcctcagctttttcatgtgagaacactgggttattaatagaatcatatataagtattaatatgaggatgaaagaatattcttcggaatataataaaagtatcaggataaggctgggactgttatttttctggatcaagaatgccttagtgggaatgctttcacggtg

SEQ ID NO: 110267 - DNA, 460 bp, Homo sapiens
tgctggctcactcctccacaacagctcgctgctcctgcaatatgaaaagtgtgttccacttcaggtctttgtccatgctatttcctctatgtggaatgcccttcgccttatacataggagtgctccctcagtttatttaagattctattcaaatattccctcttcagagaggccttccctgtctaccctacataaagtggcatcatctgactcagtctctttcactgctgtatttttcttcatagcatttatcaccatgggctgttacgtttgcttaactgcttattgtctaactcttcaagtagaatataaaataataaagataataacmccttcccaatggcaggtaccttatctatcttgtcacccctatatttccagtgtttatgacaaatatctcacatatataatagaacacatgctataaatatttgttaaataaatgaatcctcattactaa

SEQ ID NO: 110268 - DNA, 549 bp, Homo sapiens
attgtctaactcttcaagtagaatataaaataataaagataataaccccttcccaatggcaggtaccttatctatcttgtcacccctatatttccagtgtttatgacaaatatctcacatatataatagaacacatgctataaatatttgttaaataaatgaatcctcattactaagtagatctcattctcttaattttacaggagagtaatttgagcttcagagaaacaaagtcacttgtctaagataacagagttaaaaagtcattgagctgaatagaaaccacctctgtctgactctaaagttctactacactacttcrtatgctctgaacctgggttcaatacattctttccgaaaggtccagataataagttattccaagctttgcaggccataatgtctctattgctaccactcggttctgtcaggatagtataaaagcagccacacaccacacaatatataaatgaatgggaatggctgaactccaataaaactttataaattcaagggcccaacctctgttctagaccataaattgcagca

SEQ ID NO: 110269 - DNA, 536 bp, Homo sapiens
gtttgtttagattcctcatggcctctttgtgcagcattccttccctccaggtatatatggcaggatccctctgaaatgaggtcttatgacttcatttcaggggaggtaggccagaattcttttatggccagctctcagggaggaaggatgggatatggtcagagagtgaccatscttgcttctgctattttctcagtttctgaggtgctaggttttggggtagcattttttgcaccccgacactaaggaggtatgtaaaataagttccaatacatgtatgtgctaggcaatggcctacctgtttctcagggctttttccaatacactatgcagcaatcttatttctttgcgtttataatctgtttcttcctcttccatatttaaagaccaaaaagcaaaaaaaacaaaagaaaacaacacttttctaggtgaaccttgtaaagaattaacattaataacttagtaaggtcatttatgaaaaaagaaaaaaagaattaacgttaatatgttgatcatttaatggtaagagactctaa

SEQ ID NO: 110270 - DNA, 536 bp, Homo sapiens
gtttgtttagattcctcatggcctctttgtgcagcattccttccctccaggtatatatggcaggatccctctgaaatgaggtcttatgacttcatttcaggggaggtaggccagaattcttttatggccagctctcagggaggaaggatgggatatggtcagagagtgaccatccttgcttctgctattttctcartttctgaggtgctaggttttggggtagcattttttgcaccccgacactaaggaggtatgtaaaataagttccaatacatgtatgtgctaggcaatggcctacctgtttctcagggctttttccaatacactatgcagcaatcttatttctttgcgtttataatctgtttcttcctcttccatatttaaagaccaaaaagcaaaaaaaacaaaagaaaacaacacttttctaggtgaaccttgtaaagaattaacattaataacttagtaaggtcatttatgaaaaaagaaaaaaagaattaacgttaatatgttgatcatttaatggtaagagactctaa

SEQ ID NO: 110271 - DNA, 536 bp, Homo sapiens
gtttgtttagattcctcatggcctctttgtgcagcattccttccctccaggtatatatggcaggatccctctgaaatgaggtcttatgacttcatttcaggggaggtaggccagaattcttttatggccagctctcagggaggaaggatgggatatggtcagagagtgaccatccttgcttctgctattttctcagtttctgaggtgctaggttttggggtagcattttttgcaccccgacactaaggaggtatgtaaaataagttccaatacatgtatgtgctaggcaatggcctacctgtttctcagggctttttccaatacactatgcagcaatcttatttctttgcgtttataatctgtttcttcctcttccatatttaaagaccaaaaagcaaaaaaaacaaaasaaaacaacacttttctaggtgaaccttgtaaagaattaacattaataacttagtaaggtcatttatgaaaaaagaaaaaaagaattaacgttaatatgttgatcatttaatggtaagagactctaa

SEQ ID NO: 110272 - DNA, 599 bp, Homo sapiens
ggagactgggtaaagatcacaagggaactttctgtattatttcttgcttcatgtgactctaaatatatctcaaataaaaacattaataaaaatgaggggttatacatccatataaaatattaataaacatgcatagagatctgagaaattatccagtaagccagaaattaaaaacatgggaaatattaaggatgatttgagtaacatgactattaggaggaggaggtccacacatattcctaatgaggaaatatacagaaaatatttgctgaccgtaatcagccacataaactagrtcaacccttttactaaaaataatgaggaagtttgtacttttttaaaaaaagtagaaaacacaacttatttaacaagataataagtaatttcttagttagaaggagaaggaagtttagaaagtagagcccatatttgtggcttatttcctctgtggtcgtttgcctgtcaaagatacatggcagagagtttgagaaactaggagtacacttttttttttttcattatacgttaagttctagggtacatgtgcacaacgtgcaggtttgttacatatgtatacatgagccatgttggtgtgctgc

SEQ ID NO: 110273 - DNA, 497 bp, Homo sapiens
tttgactatgacagtctccagtgtccaatgacttttggaagtatctgcgtcttctgattctttcagactcatttacccttcccttttacgtatwacttgtttttttctaatcaactttcttttatcattactgccaattttgtgaattcaaaacatgtgtccaagtacttactatatatcacagtttattttgaataatagagcatgtaatataagacaattaaataaggccagggttgccaaaattgatgaatatgttcaagacaaaaggttcatgggggaaatgaaatgtatagtaagctctttgtctcatgaaattcatattgtttgttacctggtcacttaagtccaagtaacaaacaatatgagaatatgaatatggagaagctcaatgcctgctgtattatttaaatcatattttcatcttgacagtaaatgtaagtagttcctggtctaatgtccattttatagcagttttcacccactgttctattcac

SEQ ID NO: 110274 - DNA, 497 bp, Homo sapiens
tttgactatgacagtctccagtgtccaatgacttttggaagtatctgcgtcttctgattctttcagactcatttacccttcccttttacgtattacttgtttttttctratcaactttcttttatcattactgccaattttgtgaattcaaaacatgtgtccaagtacttactatatatcacagtttattttgaataatagagcatgtaatataagacaattaaataaggccagggttgccaaaattgatgaatatgttcaagacaaaaggttcatgggggaaatgaaatgtatagtaagctctttgtctcatgaaattcatattgtttgttacctggtcacttaagtccaagtaacaaacaatatgagaatatgaatatggagaagctcaatgcctgctgtattatttaaatcatattttcatcttgacagtaaatgtaagtagttcctggtctaatgtccattttatagcagttttcacccactgttctattcac

SEQ ID NO: 110275 - DNA, 561 bp, Homo sapiens
tttttaaatgaaagtattaatgtactaactagggtttgttagttgcaagagataaaaaaaaactaaggttttacttaagagaaaaaaagaggaaattatttatacaatattgggttgctcacataatggattactatgtcaggatattttggctagaaacaaacacggcaaccaagataggaatcagccaatttaaagcatctagagagcaactgatacttaaccrtatttctcagtattattactaagataagtatataaatcacagttcttcttgaacaattcttcttataattcaaaaatacataaaaataattcagttggcagaatttagataaccacatccaccttttcactctatcatggcaggatgagaatggatttaatagtgggactatctggcagactttagggttttgtgctagcaaaatagaacactttgatttatcaccctacaaagatgataggcaatgaattggatgcagtaccccaccttaaaaatgaacaaaaaatgatattagaataaaaaataaaaatattcactcttttgacatttattga

SEQ ID NO: 110276 - DNA, 561 bp, Homo sapiens
tttttaaatgaaagtattaatgtactaactagggtttgttagttgcaagagataaaaaaaaactaaggttttacttaagagaaaaaaagaggaaattatttatacaatattgggttgctcacataatggattactatgtcaggatattttggctagaaacaaacacggcaaccaagataggaatcagccaatttaaagcatctagagagcaactgatacttaaccatatttctcagtattattactaagataagtatataaatcacagttcttcttgaacaattcttcttataattcaaaaatacataaaaataattcagttggcagaatttagataaccacatccaccttttcactctatcatggcaggatgagaatggatttaatagtgggactatctggcagactttagggttttgtgctrgcaaaatagaacactttgatttatcaccctacaaagatgataggcaatgaattggatgcagtaccccaccttaaaaatgaacaaaaaatgatattagaataaaaaataaaaatattcactcttttgacatttattga

SEQ ID NO: 110277 - DNA, 595 bp, Homo sapiens
tctgtttatttattgtctatgtgtctggtttttgtcatacccgttggctaatttgagtctataataattatcatgtgatgaatcaatgtaaatatttaatattgacacctgaaagatcatagaattttytaaaaattaaaattcctattttgcatagaaatatggggagatatgaggtaagagaaagttaaagttgaaaggaactgccaagatgaaaacctgatgggtaacttttttaaaagcagcatgaatgtatactatcttcctgatttcctaaaagtccttgaggaaatgttatggcataaatcactttgttctagatccagaataataaaaggccttttatctagagtaaaaattaactgctttctgttgtaaattccattattgtaagcatccagtgtcccttcccgctaatgaaaataaaattaacattttccaggtaaacagcatttctcttacatgtgttgaaaaagtcaaataatcttgtcacaatttttttttcatcaagcattttacttaaaggtttctaatctttcttaataacccttagagtttaattttgatcttctccagttctagcattttgtattag

SEQ ID NO: 110278 - DNA, 595 bp, Homo sapiens
tctgtttatttattgtctatgtgtctggtttttgtcatacccgttggctaatttgagtctataataattatcatgtgatgaatcaatgtaaatatttaatattgacacctgaaagatcatagaattttttaaaaattaaaattcctattttgcatagaaatatggggagatatgaggtaagagaaagttaaagttgaaaggaactgccaagatgaaaacctgatgggtaacttttttaaaagcagcatgaatgtatactatcttcctgatttcctaaaagtccttgaggaaatgttatggcataaatcactttgttctagatccagaataataaaaggccttttatctagagtaaaaattaactgctttctgttgtaaattccattattgtaagcatccagtgtcccttccygctaatgaaaataaaattaacattttccaggtaaacagcatttctcttacatgtgttgaaaaagtcaaataatcttgtcacaatttttttttcatcaagcattttacttaaaggtttctaatctttcttaataacccttagagtttaattttgatcttctccagttctagcattttgtattag

SEQ ID NO: 110279 - DNA, 595 bp, Homo sapiens
tctgtttatttattgtctatgtgtctggtttttgtcatacccgttggctaatttgagtctataataattatcatgtgatgaatcaatgtaaatatttaatattgacacctgaaagatcatagaattttttaaaaattaaaattcctattttgcatagaaatatggggagatatgaggtaagagaaagttaaagttgaaaggaactgccaagatgaaaacctgatgggtaacttttttaaaagcagcatgaatgtatactatcttcctgatttcctaaaagtccttgaggaaatgttatggcataaatcactttgttctagatccagaataataaaaggccttttatctagagtaaaaattaactgctttctgttgtaaattccattattgtaagcatccagtgtcccttcccgctaatgaaaataaaattaacrttttccaggtaaacagcatttctcttacatgtgttgaaaaagtcaaataatcttgtcacaatttttttttcatcaagcattttacttaaaggtttctaatctttcttaataacccttagagtttaattttgatcttctccagttctagcattttgtattag

SEQ ID NO: 110280 - DNA, 588 bp, Homo sapiens
ggcgatgggagtgagaccctgtctccaaaaaaaaaaaaaaagaatccaaaatcaaaatgtatcctctgcattttacagaattacaaatttcttaatgcattctcaaatccattggagatactaaatttaatgtgcttagtaggtaaaccttaattgctcatacaattaaaataattttatgttgcaaaatattaagaatgtctagaacagtttttcaaatgttgtctaatatctgtaatacttcataacaatttatcctggcatgaaagcaataaagttgtaaaaaatgagagttgatttatttttaagcccataaatattgtctttctttacagtgtagtaacaagatcccaactggcttggacataagtattcaataaatatttgcagcatgatttatctctaattataaattttatgtgctaaatgaagtgaaatagaaattttgagaatgctgaattaattatacaaacagagcagaaaataatgtggcttttaaagtgtaattgtgataaytggcctttcatttgacatttttaagctgacctggcaatgctgagatcatccacaaatatttattcagtgccc

SEQ ID NO: 110281 - DNA, 440 bp, Homo sapiens
tttccaacacacgataatatcaaggaattcattaattctcagttaatttaaatttgattttcaaatccaattagaactatgaacttccctttctgaagtcaaaaagaacaattaaaatatatgcataattttaagtcagatttgagacagcctcctcttttcaaatacatgtatgatcatgtaatcaagatattagtctatctttttctttagggttctactgaatatttatttattcattcagtcagtcaacaaatactcaattagcacctgtcagtatcaggcactctgctaggtaccagtgatagaaaggggaacagggacaggttctgctcttgaacagccaaagcaggtgcttacgtaagtctacctgagcattttggcagcttagaacatamgattctcaagattcatcatagaatcagcttttgctatgttgc

SEQ ID NO: 110282 - DNA, 440 bp, Homo sapiens
tttccaacacacgataatatcaaggaattcattaattctcagttaatttaaatttgattttcaaatccaattagaactatgaacttccctttctgaagtcaaaaagaacaattaaaatatatgcataattttaagtcagatttgagacagcctcctcttttcaaatacatgtatgatcatgtaatcaagatattagtctatctttttctttagggttctactgaatatttatttattcattcagtcagtcaacaaatactcaattagcacctgtcagtatcaggcactctgctaggtaccagtgatagaaaggggaacagggacaggttctgctcttgaacagccaaagcaggtgcttacgtaagtctacctgagcattttggcagcttagaacataasattctcaagattcatcatagaatcagcttttgctatgttgc

SEQ ID NO: 110283 - DNA, 524 bp, Homo sapiens
acaccggggccataccactgaaatgagacaacatatctcactgtatgtgaacaaaaagattgctgtttcagcttattctggctaaatgattcatgaaggaaccctaaccaaaataaaatagcaactcaaggtcttcttggtaaagaaaataaaactattgcaaagtataaacaaaagtagagattgycacttaaaaaaatcgattaaatcatttactttcaaaggcatatttcaaaatcttttgtcataaaaaatatagcagaaaggaagtgatacaggcaaaatgatcttatatttgtcaagactaactgctcaaatttagtctattattacaaaatcagttttaaataagattaaaatatgaaggtcacaataatgttacagtaaacatgaatttcattcttttattttaaaatttaaagactatctttctatttctgatttactcttcttattagtatgttgagttgtacttttagaatcaaagataatccaagaactcagctgtataattagatgcaaac

SEQ ID NO: 110284 - DNA, 640 bp, Homo sapiens
tgtaatgaaaacaaaggagcaccagcatattctttttcactctgtcaaatatcaaaaccttagaatacaaatgagtttacaccaatgataaaaggcaatttcatgtggacagaataaattatggacaattatgcacataaaaattaatttcaatatgatttcaattcattttaaattaataatttaagatgacttatccttatttttgcagaataaaaatgatttatgataaaactacaaagctgctggaatgtacatgaagatattgaaaagttgttcgctcacacgaaggtaattgtcaatacgtagtattaattstctaccacttttattcaatataatacagtggttgggtttggtagggaaatccagtgactttatgtataagtataaatagtttcatgtttttatagcttaaaagaatgtttccatactgctcagactcacccaggagtctctcatcagataaaggataaatgttttcagtgagattttgaaaggatttgtgaagattacttacagagtgatcttcagtctctgacagggattttacagggaccactcagacagattgatggatattttctgcagttgaggggacacagaaacctagtacccaggcaaggtgaagtggcctgtg

SEQ ID NO: 110285 - DNA, 608 bp, Homo sapiens
ttacttggtaaaagaagaaaaggacggtattatttgaggggcactaatagttattgagggyctactttggactgagatctttacttaatttttagacactgttgaatgtgcagacagtgggaggtaagtgtgctgtatgatgagcactggtggaacaaagatgatgaccaagccactgcccttgtcctcgaagcatttacaactgtagcggggagtggacaaggaaagttataacatgatctaaatcccacaagaatattagtccatgctgtcttagtcttttcaggatgctataacaaaataccataaactgggtagattttgaacaacaaattttacagttgtggaggctggaaagtccaagatcaaggcactggcagagttggtgtctggtgagggcccatttcatggttcatagaaggtgccttctccctctgtcctcacatggtaaaaaggacagagaagctgtggggagtctcttttataagggcactaattccattaatgagggctctgccctcttgatctaatcacctcccaaaggccccacctcctaataccatcactttagtgatcaggttttcaacataagaattttgttgggatac

SEQ ID NO: 110286 - DNA, 608 bp, Homo sapiens
ttacttggtaaaagaagaaaaggacggtattatttgaggggcactaatagttattgagggtctactttggactgagatctttacttaatttttagacactgttgaatgtgcagacagtgggaggtaagtgtgctgtatgatgagcactggtggaacaaagatgatgaccaagccactgcccttgtcctcgaagcatttacaactgtagcggggagtggacaaggaaagttataacatgatctaaatcccacaagaatattagtccatgctgtcttagtcttttcaggatgctataacaaaataccataaactgggtagattttgaacaacaaattttacagttgtggaggctggaaagtccaagatcaaggcactggcagagttggtgtctggtgagggcccatttcatgrttcatagaaggtgccttctccctctgtcctcacatggtaaaaaggacagagaagctgtggggagtctcttttataagggcactaattccattaatgagggctctgccctcttgatctaatcacctcccaaaggccccacctcctaataccatcactttagtgatcaggttttcaacataagaattttgttgggatac

SEQ ID NO: 110287 - DNA, 615 bp, Homo sapiens
ctcctgtgtcacactgcatgccagaaaaaaatayagccaagattttcaaagggaggattgatgggacttgacaaatgaccagatgaagagacttaaaatagagaactcccagttcattctaaaatccttggatctatgcagctgaggaaatattgctaccagcttggacaaattaggctatagacctagaaaatatttttactgcatataagaaggtgtgacctcagctgcttagcattttgagcctcagtaagaccagaagattctcattctcttattagcatcttgttatggcccaactccatatctaaaacaaagcaaatattttgcacataggatataacagtctgcttaaattacatgcagaggataatactgtctcaactgacacttgtgattaattctactaaggacttgctttagaaggtttttggcagaacattctaagctgacagttcacaaaagacaaggacttcattgtttacaacaacaaatatgggaacaataatgagattgcacatctttcctcattttcctggatctgtttaagaagaatgtttgaataacattacagtatgtccatatcttgacaattttatggattttatggaagta

SEQ ID NO: 110288 - DNA, 545 bp, Homo sapiens
cttttatcagtaaaaacttcccgtatcttgggaagataaggactgaggagatctcataatgtctttaaaatctgatatgatttttttgagttataaatataarctattaaacatctactttataccaggcttaaagcatcatttcattcattctcataaaaacactagaagtatacatgattatttctaattcctatttatagttgaagcaactgaggctcagtcagtaattactcaaagagggcacactgtgatccctgtcagtctctctgaatttatagctgctgatcctaaccattccacttcaagttaatatagtttgcctggaatcacaaaagaaatgttattttggtaatttttcaaatgaggaaaaagtacacattgtgtgacatctcaaaatctttacacatttcgctttaattcatttactcaaaattatctagtgcctaggataaactctttttgacagattgcaaaaatgagaaacctatgtaattatgactttaattagtttattatctgttaatcataatttatacgtaaaa

SEQ ID NO: 110289 - DNA, 642 bp, Homo sapiens
aagaacttagaatttaagtaactgaagaggaacatatcaaccaaggctgcttggcctttattttaaagattctttagattacctgcacattctctaagatataagtccaggacaggaattctgtctgctcaggaaaatgctcagaatatttttcagctagattatatggactcattgacaacagcagaaaagtctcgacttgggcatagtagactatttgaatgctttgcactcgttccacatactgatgtaaaaacttacttgaactctttcaggtatttaartgaccatttattgaaataaacgtgaaagtttgatagcaaaaaccagtcagacgaagtctgtccttgtataatataaatagccaagaccataataaagaccagaaacacttgtacatccttaatgtgtttctaagaaggtcattgtgagcaaccctgcacacttttcaattctgaatggactttatcaatattccacacatttggcctgaatcagtggctccttcttttaactggggcattcctagacatggtgttataaagtagagagtggaaaggtaaagtcatcatagcatggttatctgtctggacaaggtcagaagtcagaaataggcaaagaaaatgttagaactgtgagcag

SEQ ID NO: 110290 - DNA, 603 bp, Homo sapiens
tcacccgttacagaagcatgtggttatcgctgatacaagacttttcatgtttaaaaccacagaactctttcaggtgtgatggctttgctgcttttgtaccaygctggaagcataaaaatctttaccaaagctgggagccccaggcccagcctccatatgccgcatatgcagccatctcctctgagatttggctctctctccagttgcagtcacaactccatgtgaacaaatagaacgggagttttcaccaatccctccactccctgttagtcctttaaaaacagtcaacgtgtctgtctacctgagtgtaactagatacacaaattaaaatcataataagctacccacccctgtgctacaatcccctttatacaggttgttttttctgccaagtttctatgtagttgccaatggctgggcatttatctcttggcacccaattttcctgccactgcctttccccataagcacacataacctagtaatctgcttatttggctctagcctcatccgcctgcacatctaatcttcaccttcctaaaacctcttctgacactagcttctctgatttgcattctgactctcattacctcatttagtcag

SEQ ID NO: 110291 - DNA, 451 bp, Homo sapiens
aaatggaagcagcaagaggaagttaacgtttatatgcatgggccataaaaaatgtatccttctttatttcaaattggcaacaaaacaaggagaataagaatttatatatatatgtaggtcacatactattttatttaatttacacagaacatagcatatcayatgcatctctgcttaatattttaaacctctaattatttagaattgaaaccagaatgtaaatgtccaaaggattagttttctcccagctctcaccaatgattatctggaacaactgcaaaatctgtgtagatctcagcctaagatctatttatactacacacacacacacacacacacctctacatatattatatattatatacattatgcatgttacatgtaatatatatgatttatacctaatattagtgacaactcagttaaaatatttagttaaccatactactcc

SEQ ID NO: 110292 - DNA, 515 bp, Homo sapiens
gtttttgttttttttttttggcagcggaagcaaaaagagatgaaatgttacatcaccttttttatrataaggaaaatactgatgtgtactgtccaaccctccaatcttgaaagaattttgcttcctgagttttaaattggtaaaatccataacagtgtgatctgtcagttgtgacagaaataatacatatatatgttatatatatatatatatatgccattgaagctggcagttttatccagcactgtcctgggaagaaaaagaaaaatttgtttttgaatgaaaaagaaatgcatgtttctggctggaataatgtactaggtcctaggttctataagaaatttctctttaaattattcatccctcttggctctgcttcttatgtttcctcagcaaatctaaatacggcaggaaaagcagaccccagatggaggacattggcattccagcttacgagtcagactctgaggagcttgataagagtgagtcagcctccctgagtctgatcaacttgg

SEQ ID NO: 110293 - DNA, 515 bp, Homo sapiens
gtttttgttttttttttttggcagcggaagcaaaaagagatgaaatgttacatcaccttttttatgataaggaaaatactgatgtgtactgtccaaccctccaatcttgaaagaattttgcttcctgagttttaaattggtaaaatccataacagtgtgatctgtcagttgtgacagaaataatacatatatatgttwtatatatatatatatatgccattgaagctggcagttttatccagcactgtcctgggaagaaaaagaaaaatttgtttttgaatgaaaaagaaatgcatgtttctggctggaataatgtactaggtcctaggttctataagaaatttctctttaaattattcatccctcttggctctgcttcttatgtttcctcagcaaatctaaatacggcaggaaaagcagaccccagatggaggacattggcattccagcttacgagtcagactctgaggagcttgataagagtgagtcagcctccctgagtctgatcaacttgg

SEQ ID NO: 110294 - DNA, 498 bp, Homo sapiens
gtttctgttgaaaagaacactattagcctgagggggtttccattgtaggttacttgccccttctctctagttttcctttcttcttcttttgtttttactttgaccttggaaaacctgatgactgtgtgttttggagatgatcatcttgtgtagtattcacaaggcttctctgcctttccggaatttgaatattgtcctctctagtgaggttgggcaaattttcttagatgatatcctgaaatgtgttttccaagttgtctactttctctctctctctttccgggaagtcaatgagtcacaaatttgtgtttttgttttgtttttttacgtaatcacgtatttcttggrggttttgttcatgcttctttattgtttcctctttatttttgtctgactgagttgttttggacaatcagtcttcgagctctgagatttttttcctcagcttgtttaattctgctattaatacttgcaatttcattctgaaagtattgacgt

SEQ ID NO: 110295 - DNA, 559 bp, Homo sapiens
gagtctgtcactaccaggcaatttgcctctacagggaaggttctcacctggttaacatccatcagatcagacccaaatattccttcttcaggaaacttccatgagacactcagattaatccagatctcaatagactttataaccttcattcataccaatcaccattattgcaatcttatttttattggtataattatttgattgatatctagcttcatgagactgtagctccatgaggacaaggaattgttttagttttgacctcacttatcacctagttcagtgcttaacatcatctagctcagtgttcaataaataattgttgaatgaaatgtctttgccatctaatggccamatatgactatttcaattaatattaattaaaattaattaaaatttagtttctcagtcacacaagccacatgtcatgtactggacagccacaggtggctacctctagatagtacaatgcagttctagaatgtttccttagtcacagaaagctctgttggacaatgctgcttaagctgttggcatcttgttcatgtccaatacggtc

SEQ ID NO: 110296 - DNA, 619 bp, Homo sapiens
tggtaaaacccccagtctccattttctatctagcctggccctgtgttaatctttcacccagacttcttaatccatacatccactgggagaaaagcgtgttagaacaaattgaggaagcctgagagcgtctcctcactttctggctgcccttcagcaaatagggttctgctagggacagaagcatgcactctatctcctatttggagttggctgtaggaaagaatctgcacacataggcaaactgcaactctagcacacagctctggtttggttccaactgaagtcagttgtcccatatcctctgattgcaacacattgtagggaaaccatcagtgctcttcactcagatgttgtcagccaagactgatcccaaaataaccatgatggtcccagagggtgaatggaacccacacttcccttggttttccagtgacatttaggaaagttttcctccagcttcaaaaggtaacttatctaagcaatgacyggagcgacttcaaattaattaatgttcatagttattaacaccataattaaaaagttggtcatttgttccattaatatgatattaatgacactggtgattcataacatgaatcccaatctatatttgcatccc

SEQ ID NO: 110297 - DNA, 597 bp, Homo sapiens
atctgacgggctcagctttaaagatcatgaaaaagagatggaaagaagggcatgtaaccacagaatcaaatgggaaaatggtacagaggtgcccagaaaatcaatagaggaagttctaaggggatcacccttgctggtttatgccttcatccaattgtttagcaacatcgattgaacatctggctctaccaggaactgaacaaagactttccctcaagtgtgagcttgagcgttaggttcttcagttccttctgattccctgtgatccagctcgtgcttattgtctttattttctgagtcttgcctctatggcccccctcctctctgaaagcaaggccacttgagtcgtgcctttctgaatgaagtcaatgtctgtgccagtcaatgcacaattgtcgcttatgaccttcctgargtttcctgtttcctcctaatacattagaagaacaaatcaataaagtctgtgtcccagtaccttgggtaactgccatcttcatggttacatcactatccagggtgactgtgaagcagtggggcgcttaaccccaggagcagtgggaggactgggttgggctcattggagtctcacacagggat

SEQ ID NO: 110298 - DNA, 251 bp, Homo sapiens
taaaattgttccctttttaacacatccacacaaatatctcttattttttgatttttaaattatggccattcttgtaggagtaaagtggcatcacactgtggctttgatttgtatttccctgatcataagtgatgttgagcatttttcatgtttgttgtccatttgtatatcttcttttgagaattgtctattcatgtccgtagcccactctttgatgagattawttgttttattcttgctgatttgaattc

SEQ ID NO: 110299 - DNA, 560 bp, Homo sapiens
tttctgtaaggatctgtttagctccactttgtacttgcatttttaatgtactatacgatatataaggcaagactcttaacgcaaagttctccaggactttccattgagaacctttgtgtatctgccaaggccctgaccatgggtggatgttgaagcctaatccttgccttatcagcacttagagagctttcataatcttccagcttagtttcttagtttcctaccccaagacgyttcacaattcagtgacgagcttcatgggaaaactggctgcatgtctttctcacctctcaatcactttcttctcatcacaatctttcactttcagtctttagtttttctctccagctccacatgaccactttatcctcttaatcatatgtccctgagccccacaggaccaccaagactgctcctgatcttgtatcctgagcagctgtgatccactgctggccggaacttggattcccagctcttgccttgtgtccagaatcagcaaagaaattccctcagaaggaaagtggctttaggatgtcagtttactgctttgggtttatccc

SEQ ID NO: 110300 - DNA, 560 bp, Homo sapiens
tttctgtaaggatctgtttagctccactttgtacttgcatttttaatgtactatacgatatataaggcaagactcttaacgcaaagttctccaggactttccattgagaacctttgtgtatctgccaaggccctgaccatgggtggatgttgaagcctaatccttgccttatcagcacttagagagctttcataatcttccagcttagtttcttagtttcctaccccaagacgtttcacaattcagtgacgagcttcatgggaaaactggctgcatgtctttctcacctctcaatcactttcttctcatcacaatctttcactttcagtctttagtttttctctccagctccacatgaccactttatcctcttaatcmtatgtccctgagccccacaggaccaccaagactgctcctgatcttgtatcctgagcagctgtgatccactgctggccggaacttggattcccagctcttgccttgtgtccagaatcagcaaagaaattccctcagaaggaaagtggctttaggatgtcagtttactgctttgggtttatccc

SEQ ID NO: 110301 - DNA, 564 bp, Homo sapiens
tctaaaagttgaattctaaacttcataccaaaatagggtacggggaaaaaaaaagtggttctcttgagtcaactaagagtataaatatataaattctaatgtagaaattgggatttagtcacatattttaagtatataattatgaaacaccaaactacttataacactgaattttgactagggatttctaggcacaaaatgcattatccagttaattgagcaaagaactaacaggactgccaagttatattaggcaatttcatagtactgaaagggcaatttaaaatttcactgcttaaactgaattataaattataactaaaaagtgttagcctgcccatttcaaggtctttttactrtcaaatcattgtttttcacacattaaagataaatgtgaataaaattgacttatattcaagaaactgtaatttgtaaaatatatatgtctataagatcatgtttctatttacaagtatctgtaaaagtgatataaaaagacatggttacatatttgcacaaaataaataataaagttaaaaaagatgtagaggccttataagtact

SEQ ID NO: 110302 - DNA, 564 bp, Homo sapiens
tctaaaagttgaattctaaacttcataccaaaatagggtacggggaaaaaaaaagtggttctcttgagtcaactaagagtataaatatataaattctaatgtagaaattgggatttagtcacatattttaagtatataattatgaaacaccaaactacttataacactgaattttgactagggatttctaggcacaaaatgcattatccagttaattgagcaaagaactaacaggactgccaagttatattaggcaatttcatagtactgaaagggcaatttaaaatttcactgcttaaactgaattataaattataactaaaaagtgttagcctgcccatttcaaggtctttttactatcaaatcattgtttttcacacattaaagataaatgtgaataaaattgacttatattcaagaaactgtaatttgtaaaatatatatgtctataagaycatgtttctatttacaagtatctgtaaaagtgatataaaaagacatggttacatatttgcacaaaataaataataaagttaaaaaagatgtagaggccttataagtact

SEQ ID NO: 110303 - DNA, 498 bp, Homo sapiens
atttttataaagaccttgcattttacttaaacaacactatcccactacaatcagagagaaatagaagttgagaaagaaggggacaagttttaggaatgtggtaaaggatgacctggagcacaggatggaatgagacagcacagcagtccgaaatgggtaatggctcaaagatagagtgaggattccttttcatccttttagaataaataaaattgaatttgaaaatgtaacagtaaggtttgttaaaaatctcccaaatcaataataatattacattcttttctccttgtctagactgargcttttcttagctctgaatctgggcaaacaccattctctcttctaagaacttaattcttttttgcctttaccttcttagaccccatacctacactgtaaggtataagaagatatcaattgtattcagagggttgcattttctaaatagagtaggcaatcaatagatatttgttgaattgcctctagtgggatgccctt

SEQ ID NO: 110304 - DNA, 557 bp, Homo sapiens
aataggactactattcaattcagcaatcccactacagggtataaacctaaatggaactaaatcaccatatcaraaagacacctgccatcaaatgtgtatcgaagcactattcacaatagcaaaaatatgcaatcaatgttaagtgtccatcaatggatgactgaataaagaaaatgtggtatatattacacacacacacacacacacacgtgtgtgtgtacgtgcatagtggaatactagttacccataaaaatgaatgaaatcatgtcttttgcagcaacagtgatggaaatggaggctattttcataagggaaacaactcaaacagaaagtcatgttctcacttataaataggagctaaataatgcatatacatggacataaagggcggaataatagacactggagtctctgaaaagtggggtgatgggagggggtgaaggatgagaaattacttaataggtacaatgtaccctattcaggtgatggttacactaaaagctcagacttcaccactatgcatatatattcatgtaacaaaattccagttgtagctg

SEQ ID NO: 110305 - DNA, 557 bp, Homo sapiens
aataggactactattcaattcagcaatcccactacagggtataaacctaaatggaactaaatcaccatatcagaaagacacctgccatcaaatgtgtatcgaagcactattcacaatagcaaaaatatgcaatcaatgttaagtgtccatcaatggatgactgaataaagaaaatgtggtatatattacacacacacacacacacacacgtgtgtgtgtacgtgcatagtggaatactagttacccataaaaatgaatgaaatcatgtcttttgcagcaacagtgatggaaatggaggctattttcataagggaaacaactcaaacagaaagtcatgttctcacttataaataggagctaaataatgcatatacayggacataaagggcggaataatagacactggagtctctgaaaagtggggtgatgggagggggtgaaggatgagaaattacttaataggtacaatgtaccctattcaggtgatggttacactaaaagctcagacttcaccactatgcatatatattcatgtaacaaaattccagttgtagctg

SEQ ID NO: 110306 - DNA, 633 bp, Homo sapiens
tataaattggtgaatagaataacaattatttgcaaggtataagaaagaaatgacagaggtatgttgtgatttcagagtatttggagagcataaaaatgatatttctaaaacctagaagataccaccatgagaaaacgagtgatgctgtagcattgaatcaggtactgccgagaaattatcctccttatcagccccaaacagtttgttcctatttaattagatgaaattgctcttcagagtttcgagaatgaaagaatatgggaaatcaaggaacgattatttctatatgccagaatataaaactacaatttgaaatatattttcttgctatagcataacatatttratgctttatataattactaagtgtataaataatttttgtgaaccacttgatcttttcaaaacattaaagcagaatttcttttacaaagatgctgtttgtaatgcattgttaaaaatgagaatttgcctcatttttctttttctttttaaagtagatttgcctaattattcttttctttttaaggtagacccgttagagaagctctgctgaaagcaaagtaaacctatacatgacctttttaataatagtattaattataatcacactctgtcttgatttaatgcagt

SEQ ID NO: 110307 - DNA, 608 bp, Homo sapiens
ttcagaaacctgtaagaaaagactcaaatatatgggtccatcagtcctgacaagtgtgtagcrgattacacatcttgtttgcttttagctcatcattattgttttatgcaacttagactagactttttgtttttgacaggaagtaagttagaactaggaaagttaacctaatggatgcaaagacaataattgtagtctgcaattagtgactaaatatcattcactgattgtcacataagattgatcttgggtttttgcaggagactgatattgttgaacttgtgaatgaaatattcattgttctcccgttcatgaacaatatggccaaaactctaataaactttttcagataattactacttagcacagaccaggggctatctggcaacatagattttcaagctttccttatttgtttttgaataactgaagaaaaatagctaaatttgaagggaataccacttcattgtctcataattcagaggttgccaaatcatgaccattgaagtgcttatatctatataatttattattttcttctttcttatgcataagtcctgcaaccttagatatagtcataataatatagatagacaagtgtacttgct

SEQ ID NO: 110308 - DNA, 608 bp, Homo sapiens
ttcagaaacctgtaagaaaagactcaaatatatgggtccatcagtcctgacaagtgtgtagcggattacacatcttgtttgcttttagctcatcattattgttttatgcaacttagactagactttttgtttttgacaggaagtaagttagaactaggaaagttaacctaatggatgcaaagacaataattgtagtctgcaattagtgactaaatatcattcactgattgtcacataagattgatcttgggtttttgcaggagactgatattgttgaacttgtgaatgaaatattcattgttctcccgttcatgaacaatatggccaaaactctaataaactttttcagataattactacttagcacagaccaggggctatctggcaacatagattttcaagctttccttatttgtttttgaataactgaagaaaaatagctaaatttgaagggaataccacttcattgtctcataattcagaggttgccaaatcatgaccattgaagtgcttatatctatataatttattattttcttctttcttatgcataagtcctgcaaccttagatrtagtcataataatatagatagacaagtgtacttgct

SEQ ID NO: 110309 - DNA, 649 bp, Homo sapiens
gattacccaggtacgtccaatctaattattcaagttcttaaaagcattctttcctgctgcagaaaataaaagagacatcagtgtgtgaatgacgactttctgttgctgacttggaagacagaggaattgggtcatgagccraggaaggtgggcagcttctaaaaggcggaaaaggtgagtaaactgattttcccctagaacctccagaaatggagacaactttgccaagaccttgattttaccccaatgagacccatgtcagacttttgtgctataaaactgtgaaataatacatttgtgctgtttaattgccaagtttgtggtaaattattacagcagcaataaaacactaacaaaccattacaataaactagatgtgttattggagaagaaatagaaagcaggtcagtgaaacataagataatttagaaatagatccccatttatataaacattgagtgtttgtcaaggtggccattctattcaatgcagaaggggaaatgggaaataggttattaattgaggtgatacaagttctatctggaagaaaataaaacagaatccttatcttggacaatgaataaggaataactcctcatggattttagcttttgtggaaaaagtgagtaaaatcttaagaactaggaga

SEQ ID NO: 110310 - DNA, 608 bp, Homo sapiens
tgatgaaatgctctggcaaattaagttaatacagcattttaatgtagtaattcagcacactggcaagtgctgattcatttccggcccattactttaataactattattctaacacagttcagtacccaaatagtcccaatgaacacacttcagagaaagagtcagttggttcaagtgatatactagaagaggccagagttcatgccagccaggataatggtattaattgamacagataaaatattagggagcaaagaaagaagaaataaaattctatttggagttttaaatgctcaagaggaccagcacaaagacacagagcacgtggcaggaggctggaaaagcatctgtttggcaaagagcccatggagaagaaaagatcccagtgagatgcccctgtggtgggtagggtgaggatacaacagtgccctaactcgtgggcttcccacagttcgggggcatttctacagctttgcctcaccacagacagcctcccacagtgtgtatagtaggagttaaaatgactccacaattccgtttcttttggggattctttattttgacaatgtgtaatactgggcagtcaaaacgataagaaaaagacctat

SEQ ID NO: 110311 - DNA, 608 bp, Homo sapiens
tgatgaaatgctctggcaaattaagttaatacagcattttaatgtagtaattcagcacactggcaagtgctgattcatttccggcccattactttaataactattattctaacacagttcagtacccaaatagtcccaatgaacacacttcagagaaagagtcagttggttcaagtgatatactagaagaggccagagttcatgccagccaggataatggtattaattgacacagataaaatattagggagcaaagaaagaagaaataaaatwctatttggagttttaaatgctcaagaggaccagcacaaagacacagagcacgtggcaggaggctggaaaagcatctgtttggcaaagagcccatggagaagaaaagatcccagtgagatgcccctgtggtgggtagggtgaggatacaacagtgccctaactcgtgggcttcccacagttcgggggcatttctacagctttgcctcaccacagacagcctcccacagtgtgtatagtaggagttaaaatgactccacaattccgtttcttttggggattctttattttgacaatgtgtaatactgggcagtcaaaacgataagaaaaagacctat

SEQ ID NO: 110312 - DNA, 265 bp, Homo sapiens
aatttgggcgtaagaatagtacctacctcacaggggctccacaagktttaaaaaagataatgcatataaagtactcaacaaagtgcttgcctatgcaataacaatgatgatgatagtaatagtaataatactgctttgacaaacccggcttctacatgaaaaccattctaatcagtatattctggctcacagtctgtttatgaaaggcttaattcacagaattatgttcacatccaggtacaacttctataaagtgacagctctt

SEQ ID NO: 110313 - DNA, 542 bp, Homo sapiens
ttccaagaacagaacttgtgattaggtcattcatcaattactttttaacagatcatcctttcaatgttgtgctaatgacactggtacattaattcttgtgtctagccacttttattaaatttacctattatttttataaatatgatgactatcattgatttgtgaatgttaaacctagcttgctttcattcattgaatagacccaaytcatcatgatttattattctttcttgtatttatttttctttcttatatttcctgttgggttttggtattaaaaaatgttagttttgggtatcaggtttactacccttataaacaacctaaaaggttttcacttctacctttgttgggaagaattcaccagtaaacacatttggttctggagtttattttgttgggtttttagtaataagctcaatttcattaataaagatagtaccattctgatttactgcttcttgtgtcaattttagtaatctatgtttttctaataatttgctcatttttaagcccaaattctctaacttattggtgaagtt

SEQ ID NO: 110314 - DNA, 582 bp, Homo sapiens
cctattgttctttcagttgctgttcctccctcaaagatagccctaaatcttgataagcatttttcagcttctactttctatttcatcagtatgtataatccataaagaaaataacaacttcagcttttctaaacatttgtattcatcctcttctatgctccaagacctgggttttgataatatctgtaattcttatattttggttacaaatttttaaaaatatgattttaaaagttccttgcacctcttgtttttaaaagtatctattccraacagttgcattacactctagaagtatactgtcacccttgttttgatgtagttctaggtttttatctgttgcttttctctagcatattttatggctaaggtctttctcctttttggatatacacatataattgttttatttggttggagtatataattaatattgttaataaaagttataattttgccagtatattttctgaatccttgagcaacttaagaaatgcttagtttgacttcatgtgtaaatgataatttggcttgttaaagcattaaagcttcactgtattctttttagaacaatatagatac

SEQ ID NO: 110315 - DNA, 539 bp, Homo sapiens
cccttctttgttgattcagaagcatgacgatttcaatgtggctgggtggcagtcttaacttccagtttgatggaatcattgttgggtctcctggcagaagtatttctccttttggaactaagaccttcaggcaagcagagcataaggtcacaggaacaggaggtaaaaacttgtatagttattactgggtataatagtgagtggtgccacttctatttttacttcttgattcctagactcatgaagcctggctatgggagaaagagcaccatatatcagatcctgattcagagcatatacagcctgctggagaatgttgcctcagcttagcaaagtagggctactkagctggtgctatagttgagtcttcaaatggcccctccgtcattactttagggcaagtgcttcaagatggtgaggaacatgataaaaccaatgaagtccatgaacataagcccatcgccacacttctttgctatgaagtgagtatcttggtcaaaagcagtgctgcgtggaatactatgatggtggataagaca

SEQ ID NO: 110316 - DNA, 538 bp, Homo sapiens
agtactatttataaatttctcacgaaagcgatcaagagaaaagcaggaaagccacaaatcagcataattagaaatgaaaaagaaacgtaactatagataagttacaacttatgttaatactatgaacaatctttccaatacatttgaaaacatgtgaaatgtaagatcttctaaaaaaaaagtttaattaccaaaatgactaaaaaacaaatacattctgaatagataagcaaccattaaataattttaatcagcagtcaaaaaatctttcccaaccaactacacagaataattgtattaaatccacgaaacccccaatctctatttttaacaaatatttttcaagaaaaaaatgtaagaaaagcattcctttttataacatcattaaaaccatatgccaaatcagtctatgacagtgcaaaaatwattttaaaacccaactcatttataagcataaatgcaagcataatacaatagtagtaaatcaaatccaatactgtataaaaataattcatcatgaatgagttggatttatatt

SEQ ID NO: 110317 - DNA, 455 bp, Homo sapiens
caatcaatcagtgtgttgtctgatttccacatcatatagtttattcctttttcttccctatgctaccaataaacagtctgtagggagagattttaagaccgtgacatccaaatatctgctctttgtcaactctgcccttagatttgacattattgatgattcttttgcactcagccttcactctgatgatcaaactgatgatttttttctagatkcagcagtccttctgcttttactagttagcacttgacattctactgtagaattcccctttctcctatttattatttgtttgtttatttttatggcatgaactcgtggattcacacctttttttttttttttttttttttgaaactaagtcttgcttttgttacccaggctggagtgcaatggcacaatctcggctcaccacaacctccacctcccaggttcaaacgattctcctgtctaaa

SEQ ID NO: 110318 - DNA, 589 bp, Homo sapiens
agagttggggtagttgagagcagatgacataaactttgcaattgtattaatattgaaaaacacacaaacgttggcagattttcagaaatgaacagagcccartgtggctagagaaaatgagtgatagataggtagctagaaatgagaaagaagaagtaagcaggaatggatactaaaggatcttatatggatgtaggaggaagtaattttaatttattttaatgtattgataataaattaaaatttttcttctttatatatttattcttatttctaaaaacagctttattgagagagaattgacacaacatacaatacactcatctgaagggtacaactcaatggttttatatcatgtttataggttatcaaaatgatctaatttaaaaatattttcattactccccaaaaaaccctgcacctactagcaagcactcttcattcccctcaatccttctctcctcaccaggtctagaccaccacgaatatactaatctactttttgtgcctatggatttttctcagacattttgtttaaattgaatcatataatatgtggtctgttgtgactggcttctttcacttagca

SEQ ID NO: 110319 - DNA, 589 bp, Homo sapiens
agagttggggtagttgagagcagatgacataaactttgcaattgtattaatattgaaaaacacacaaacgttggcagattttcagaaatgaacagagcccagtgtggctagagaaaatgagtgatagataggtagctagaaatgagaaagaagaagtaagcaggratggatactaaaggatcttatatggatgtaggaggaagtaattttaatttattttaatgtattgataataaattaaaatttttcttctttatatatttattcttatttctaaaaacagctttattgagagagaattgacacaacatacaatacactcatctgaagggtacaactcaatggttttatatcatgtttataggttatcaaaatgatctaatttaaaaatattttcattactccccaaaaaaccctgcacctactagcaagcactcttcattcccctcaatccttctctcctcaccaggtctagaccaccacgaatatactaatctactttttgtgcctatggatttttctcagacattttgtttaaattgaatcatataatatgtggtctgttgtgactggcttctttcacttagca

SEQ ID NO: 110320 - DNA, 589 bp, Homo sapiens
agagttggggtagttgagagcagatgacataaactttgcaattgtattaatattgaaaaacacacaaacgttggcagattttcagaaatgaacagagcccagtgtggctagagaaaatgagtgatagataggtagctagaaatgagaaagaagaagtaagcaggaatrgatactaaaggatcttatatggatgtaggaggaagtaattttaatttattttaatgtattgataataaattaaaatttttcttctttatatatttattcttatttctaaaaacagctttattgagagagaattgacacaacatacaatacactcatctgaagggtacaactcaatggttttatatcatgtttataggttatcaaaatgatctaatttaaaaatattttcattactccccaaaaaaccctgcacctactagcaagcactcttcattcccctcaatccttctctcctcaccaggtctagaccaccacgaatatactaatctactttttgtgcctatggatttttctcagacattttgtttaaattgaatcatataatatgtggtctgttgtgactggcttctttcacttagca

SEQ ID NO: 110321 - DNA, 483 bp, Homo sapiens
ttgaatgaaaaaaaattacttaatattggtttactcactttagatatgtttttatatttcattgtttaagggagacttataatttaattcaaagggatyttaaagggtagtgataatgatagtaatgatggataataattttgaactagtttccagacactttgctaagtgctttacgtgaactatctctttcaatgcaacaacaatttgaagtagagcaatgtattaatttttgatagatcacatagatctgggatctaattcatattttagaatagttgagttttcagcctccaataagaaatcagatctgggtttattaatgttactttattagagagatctctgtaactttcacagcttatcttttgacacatggtaggcacaggctaatctacctgtggccaatgtaatatgactgcattctgtttatcatttttgagtgggtaagtttaagagccagtgtgtgggctacttaattac

SEQ ID NO: 110322 - DNA, 592 bp, Homo sapiens
agggagaagataatttaaattgctggttaattaatttatttcccctgccccacagaaaatggccacactaccagcttccccggttttccagcttgcagatgacctattgtgtggtctgtcagtttccataatcctgtgaggcaattcccctaataaattccctctttatctatctatctatctatctatctatctatctatctatcatctatctatcatctacctgtatctatctatctaccttctttctatctgtwtatattggttctttctctaaagaaccctgactaatgcagtctagttggaataaaatttcagaatatcagcttttaatgtaaatttaagtaattttaaagagctttttttggtaaaaattgtcatataagagctataaatctagcattatttaaatcttaggatatctgaatttgaaggtgcctataaaattatctagaaatgcaaccaaaggtcaggatagaattgagctgttttaccttgcaaaacacaacaaatctttggacaaatatttcatttcaaactttatccttttcaatttaaagttgtatcagtttgctctttgaagatgcctctt

SEQ ID NO: 110323 - DNA, 549 bp, Homo sapiens
gagtcctcattcctgagtccttgaggtatcaaagaggcacagctttctgtagtaaacaaggcatggtgacttttttctttttatcacaaattataggaagggcagtcataatataacaatatatttccctgatgtattgcaaaatttagtaaaactgttgcttcaattttttttttctgatagtcacctaactctcacagcctcatatgataatactaattgctaatacctattragaacttactatcttaccatgtgccaaacactgttttaaattatttccatgaattgtcttgtttactccaaatccaaattctttgaggcaggcactattattttcactccctgaccctttttataaacggagaaaatgaatctcaggaaggggaaacagcttacttcaggtcacattcttttccagtggcaatgccaagattggaacccaggtggtctgactcctgagcctgcaggaaaagaaagaggtggctgcatagggggcagattagagttccagtcattgcagtctactcagaattgctctactaagct

SEQ ID NO: 110324 - DNA, 641 bp, Homo sapiens
tttataatttccctctgaaaaattgtgattaagtcattttatctaacttcattcctaaagaggccaatatacgattaattgtgttcagtgatggataaatccattttgttttcctttgagccctatcaactcagtggctgaaattaaaatgaaccagaacgtcacttggagaatgtgaaacatagatttaaattttcccttcatatgaaaatgtgagttgaaatacgattattgtggtataaatcaaataatatgctttgtaattatgagatttcattgtggctggtttgtgtatgtttccccaacccaaagagattattgagttctctaaaaataaactctgggacagttattctaatgatgagataaatactttgagattcaatgtagtttgaagaatgaactgtcagcccagtccgaaaaaatgataggaaagacgtggtgttccagtgcatagaaccattagacaatggtccaagttaartgtaagatccagaatttcattcaagaagaagtgatttgtgaatcagccattactggtatttagtttgacagcacagatttgttcacagtgaggttctcagataagttattcacgcaacaaaggaggtaggttacctaataagagcccaatgcattca

SEQ ID NO: 110325 - DNA, 641 bp, Homo sapiens
tttataatttccctctgaaaaattgtgattaagtcattttatctaacttcattcctaaagaggccaatatacgattaattgtgttcagtgatggataaatccattttgttttcctttgagccctatcaactcagtggctgaaattaaaatgaaccagaacgtcacttggagaatgtgaaacatagatttaaattttcccttcatatgaaaatgtgagttgaaatacgattattgtggtataaatcaaataatatgctttgtaattatgagatttcattgtggctggtttgtgtatgtttccccaacccaaagagattattgagttctctaaaaataaactctgggacagttattctaatgatgagataaatactttgagattcaatgtagtttgaagaatgaactgtcagcccagtccgaaaaaatgataggaaagacgtggtgttccagtgcatagaaccattagacaatggtccaagttaaatgtaagatccagaatttcattcaagaagaagtgatttgtgaatcagccattactggtatttagtttgacagcacrgatttgttcacagtgaggttctcagataagttattcacgcaacaaaggaggtaggttacctaataagagcccaatgcattca

SEQ ID NO: 110326 - DNA, 611 bp, Homo sapiens
ccccagcaagtaaactgcaaactcacaatggtgtttactgaagtgcactatttttagaaaaggcaagtctaatagaagttggctttgagagccatttgatccagcctttcatcactatgaggtggagacgactttggcaagccctgagctgggagaaatcaccaccagggcttccactgcacgaacctccgcccttgtgaccaaacatagccttgctgtttcaggaaggtttgcataaaaagggattgattttcatttgattctgcagatggactccckgagctagcctggtggaaaggaagagaataaaaagggcaaaaaaaattctttggcagttctggccagcttccaaatgcttcaagctgccagcacaactggcttaatctgcttctttagagctgaagacatgcttaactttcaaggccagaaactcaagacttaatgagggataatctaaaattctgaatctttttttctggtaagaaacaaaaacaaaagagaaaaaaaacaagctaccattcttggactcttctgcatttaaaaatttttaattgcaggaatggtggtcattctcatttaaaaccatttttaaaatagtaaatatgcacaac

SEQ ID NO: 110327 - DNA, 611 bp, Homo sapiens
ccccagcaagtaaactgcaaactcacaatggtgtttactgaagtgcactatttttagaaaaggcaagtctaatagaagttggctttgagagccatttgatccagcctttcatcactatgaggtggagacgactttggcaagccctgagctgggagaaatcaccaccagggcttccactgcacgaacctccgcccttgtgaccaaacatagccttgctgtttcaggaaggtttgcataaaaagggattgattttcatttgattctgcagatggactcccggagctagcctggtggaaaggaagagaataaaaagggcaaaaaaaattctttggcagttctggccagcttccaaatgcttcaagctgccagcacaactggcttaatctgcttctttagagctgaagacatgcttaactttcaaggccagaaactcaagacttaatgagggataatctaaaattctgaatctttttttctsgtaagaaacaaaaacaaaagagaaaaaaaacaagctaccattcttggactcttctgcatttaaaaatttttaattgcaggaatggtggtcattctcatttaaaaccatttttaaaatagtaaatatgcacaac

SEQ ID NO: 110328 - DNA, 609 bp, Homo sapiens
gtttgcccttcccctgagctctcccctgccttcagttgcagatgtggggagtgtctgtaagatactacattgttttgtatgggcataacaaagaccaaaatgaaaacattcttggaacccagtcctctcagcaggtcagaaatacccaagttatattaaaatggagtctaaactcaccaagaagacaatcgatgcttatagttttttgttaactatctctctgttggcttctaggcagctattttaattccatttcattaccttctccaaagagtctctagaggcgtaagcccttgattgccaagatatttgaaaaaatattgtgttacaaaaaatcattcttacagtggggcatgtacagtaggtcctaggaggaaaaawatggtgggtcctttaatgatgctctagataactggataaacagattgcattggctggggaatgtgccctggataatgatgaagaggataaataatttcaacagaagacttacttctactgtaattgaattgtggactttaaatcaaactgtgagaaactgctttcacaattaaatgagagttttatgcccttatgttttgacaggaatattaatttttgctgcgcaaa

SEQ ID NO: 110329 - DNA, 471 bp, Homo sapiens
actacttctagcactaactatctctgggttycttgggaaatgctctgagatcaagatgtatacatagggagtttactgaggagtagtttttgcaacaacacttaatagggaataaggaaaacataattggtcagatggagaagttagtgcacttgcaatagaggttttagatgattccatggagtttggagctgggatggcccttcagaattgtgccaaatctaggtggggttgatctttgtacttgccgtggtttgaatgcttcctctaaaactcatgttgaatttaactgccattgtaacagtattaagaggtggggcctctaagaagtgaggttatgagggctctactgtcatgaatggattaatgctgttatcactggtgtgggttagttactgtgagacctgttataaaagtgagtttggcccactttcgtctctctgtcttgccttcttgcttttgccttttgcc

SEQ ID NO: 110330 - DNA, 626 bp, Homo sapiens
gatgctggtctttctctgggtaatccttggtcgagaatactctccccaattggcctgggttgccagggaagagagtattagaaactgctttgacagtatcattaatatcatcattttacagacaaggaaacagaagcttagaaatggtaagttgatcaatgtcataagaggtaacctgacctgaccataagacctgaccrtaagagatcaggtcttccacttcacccaagtgaagccaggcttcccaaggcacagctcagcacctgcggagccacattgcagtgagttacagcaccatccacttactgcctagaaccagcattttgttccagaaacataggtctgggttgcccagaccacactccctcttcctcttggtgattttctttcatttcttcccaccacctggccccaggtgggtccactcgtgtccatcagatgtgttctaataaatagttaaatactaaactctcttcttccggaagcgtccttggttccttctacatatatgtgtagattcatatatgtaaaaaaagtatgaaaaaggatctttcatcaatttacttatcagcttcttctaaacccatgctgtttccaagctgcatatccaataataaaaagtccct

SEQ ID NO: 110331 - DNA, 626 bp, Homo sapiens
gatgctggtctttctctgggtaatccttggtcgagaatactctccccaattggcctgggttgccagggaagagagtattagaaactgctttgacagtatcattaatatcatcattttacagacaaggaaacagaagcttagaaatggtaagttgatcaatgtcataagaggtaacctgacctgaccataagacctgaccataagagatcaggtcttccacttcacccaagtgaagccaggcttcccaaggcacagctcagcacctgcggagccacattgcagtgagttacagcaccatccacttactgcctagaaccagcattttgttccagaaacataggtctgggttgcccagaccacaytccctcttcctcttggtgattttctttcatttcttcccaccacctggccccaggtgggtccactcgtgtccatcagatgtgttctaataaatagttaaatactaaactctcttcttccggaagcgtccttggttccttctacatatatgtgtagattcatatatgtaaaaaaagtatgaaaaaggatctttcatcaatttacttatcagcttcttctaaacccatgctgtttccaagctgcatatccaataataaaaagtccct

SEQ ID NO: 110332 - DNA, 622 bp, Homo sapiens
ctgtgtcactcatgctggagtgcactggtggtgccatcttggcttactacaacctctgctttccaggctcaagctatcctcctaacttaacctcctaagttgctgggactataggcatgtgtcaccacacccagctaatttttgtatttttcatacagacagggttttgccaagttgcccaggctggatcattgacattttaagaaatgtgtgcatgtctgtaaaaggggaggtcagtttgggatcctccctcatggatgatgtgggtttgattacctaaggaaactggcttatctctcttatgggtggtcgcataatattcaggaggtggtactgactaggctyactcaatgattgactgggtgaagcaggaaggaagaggggagctatccaggtagacaggtttcctccagagcaagagttggccgacctcagccaacaggtcaaatctcacctgctgtcagcatttattaactttttattttgaaatgatttaagacgcagctgccacttgtgttataaataaagttttattggaatattacaactcttacttgtttacatattgtccatggctgctttcatgctacaatgacagaattgaataattgcaataagaact

SEQ ID NO: 110333 - DNA, 622 bp, Homo sapiens
ctgtgtcactcatgctggagtgcactggtggtgccatcttggcttactacaacctctgctttccaggctcaagctatcctcctaacttaacctcctaagttgctgggactataggcatgtgtcaccacacccagctaatttttgtatttttcatacagacagggttttgccaagttgcccaggctggatcattgacattttaagaaatgtgtgcatgtctgtaaaaggggaggtcagtttgggatcctccctcatggatgatgtgggtttgattacctaaggaaactggcttatctctcttatgggtggtcgcataatattcaggaggtggtactgactaggctcactcaatgattgactgggtgaagcaggaaggaagaggggagctatccaggtagacaggyttcctccagagcaagagttggccgacctcagccaacaggtcaaatctcacctgctgtcagcatttattaactttttattttgaaatgatttaagacgcagctgccacttgtgttataaataaagttttattggaatattacaactcttacttgtttacatattgtccatggctgctttcatgctacaatgacagaattgaataattgcaataagaact

SEQ ID NO: 110334 - DNA, 592 bp, Homo sapiens
gatacaagcttatatgtgatacatggatgaacattttaagttttcatagttatatttattttaaagtctattaggaaaaaaatataawcatcacatcaaatatgtgatttctttgatattattgattaagatgaggctacatttaattgaataagtgagcttacttgaaggaagagaataagtaagtaatagtacaggtggtataggattatggccaacatgattgacatttgggaaaatgggcaaagtgacctccacaggccctcctggctctgacattctagcattccttctcctccccatcttttctcttgtttcctctctgtggtcatgtcctcctcagcggagagggcattacaatgtgtactttcagattcaaaacagtggccttgacatgcgtgaggtctgtgctcggtgtgtccccttggccctccctacgagagctttactttggtcagggagcagctctgttttcccaccttcagtttctgatgaggtacatgaaacccacaggaagcaaaccaaagtgaaagcaagaaaaacaaggcttggcagagagcggctatccgcacttcacttggaattagagaag

SEQ ID NO: 110335 - DNA, 592 bp, Homo sapiens
gatacaagcttatatgtgatacatggatgaacattttaagttttcatagttatatttattttaaagtctattaggaaaaaaatataaacatcacatcaaatatgtgatttcwttgatattattgattaagatgaggctacatttaattgaataagtgagcttacttgaaggaagagaataagtaagtaatagtacaggtggtataggattatggccaacatgattgacatttgggaaaatgggcaaagtgacctccacaggccctcctggctctgacattctagcattccttctcctccccatcttttctcttgtttcctctctgtggtcatgtcctcctcagcggagagggcattacaatgtgtactttcagattcaaaacagtggccttgacatgcgtgaggtctgtgctcggtgtgtccccttggccctccctacgagagctttactttggtcagggagcagctctgttttcccaccttcagtttctgatgaggtacatgaaacccacaggaagcaaaccaaagtgaaagcaagaaaaacaaggcttggcagagagcggctatccgcacttcacttggaattagagaag

SEQ ID NO: 110336 - DNA, 592 bp, Homo sapiens
gatacaagcttatatgtgatacatggatgaacattttaagttttcatagttatatttattttaaagtctattaggaaaaaaatataaacatcacatcaaatatgtgatttctttgatattattgattaagatgaggctacatttaattgaataagtgagcttacttgaaggaagagaataagtaagtaatagtacaggtggtataggattatggccaacatgattgacatttgggaaaatgggcaaagtgacctccacaggccctcctggctctgacattctagcattccttctcctccccatcttttctcttgtttcctctctgtggtcatgtcctcctcagcggagagggcattacaatgtgtactttcagattcaaaacagtggccttgacatgcgtgaggtctgtgctcggtgtgtccccytggccctccctacgagagctttactttggtcagggagcagctctgttttcccaccttcagtttctgatgaggtacatgaaacccacaggaagcaaaccaaagtgaaagcaagaaaaacaaggcttggcagagagcggctatccgcacttcacttggaattagagaag

SEQ ID NO: 110337 - DNA, 620 bp, Homo sapiens
cctagtgggacctgcatcacacattgagaaagactgatagttcattggattctaggcttgtttttttatcagtggaaatactttagaattttaatggacctgaatctgtccaacagataactgctccaaagaaagctggccagggttgttggaggaaacattgtgagcaatctcagcacagtaagatttgttgcacatcagcagcacttcctgctccttgaccttgtgggccaggaacttctggaagccactgggcagcatatgctttgtttttttgttgctcccataagtaatgttgggcatcaagatctggagcttgaaccttctatgaaccctgttgtcactacctctgggtttctgccagtcacgcttaattttgacatatcagtctgaccggtgcccgatgaatttcttggttctctttttgactattttgggcttcacaaggggtatgaaggtggccatgatgctgaggaggagatggctgccgcctccataggcagtgccaaggaagagagaacatatytactttcttaatgttggacttgcactgggtgtccacagttgatgaagtgtggcatgccatggtggacagaccttgggcatctggggcaggcaaa

SEQ ID NO: 110338 - DNA, 505 bp, Homo sapiens
agaattcaaacaactcagtagtaagaaaaaaaaaaaaacctgattgaaaaatgggcaaaggacttgaatagacatttctcaaaagaagacatacaagtggccaataagtacatgaaaaaatgctcagcatcactaataattagggaaatgcaaactaaaaccacagtaagatgtcactttacaccttttagaacggcttttataaaaagataaaagatacgtgtttgagaagatgcaaagaaaaggtgctattttacgttgttggtgcaaatgtaaattagtatagccatcatgaaaaacagtatggaagttcttcaaaaaactaaaaatagaactaaattatgttctagtcatcctacttctaggtatatagccaaaaaaatgaaatcartatgtgcaaggtatatctgcactcccatgttcattgcagcaatatttgcagtagccaatatatggcataaacctaagtatccaacaattgaacagactttttaaaatgcagtat

SEQ ID NO: 110339 - DNA, 626 bp, Homo sapiens
cactgtttattttttctgtagcatgggctccacaggcaatccagataattagctgggctctctgattgtgtgggcccagggcgggccccacagtagatcacggttattggctaggttttctgtctgggcagagctgtagactatgctccaatgtttggtggggtttctgtttgagctctttggtcaagagtggctagaagctatgctttgaaagtagtggggttactggcttagctcacagcctgagtcaagcctgcactctaaagctggaccagggtactggctaccaacccaagctggtcagaactgttgattgtgattcctgatatgatgatgccatggctcarctgtgtgggtggttgaagcatctgacttttctcactgtttatacaatgcttctagcaaaaatgtggtgccattaccaagacccagtgctggctgttgtaagccttgtccctgttctttgtttctagctgacaaaaggtagtctagccctgctgatttcacagatttctttgtaaggcaagacagaagtaggcctcccaggaagttcctcagaatgctgaagaagctgaatgtatgccttgggctctctttgttctactggaggaaatgtgggcctaggc

SEQ ID NO: 110340 - DNA, 632 bp, Homo sapiens
tttgtagtacttgtttaaattttaagttccaccagacttctggtagttttgaaatgtcctagaattagataagtaaaacacagctcgcactgtgactctattagcatcattgaatgaaaacaacacaggaccagatgaacagagggaaaataactgatggaaaaatgtggaatttgaagaagagtaaacagtttatcactagtacttamacatgtattgtatgactgagtgaagaaaaaagtagctgaacatagcttttttctattttattttattttttactctcatatatagtgattatgaagagaaatacttgtaagttaagttatatacctaattcaggtagtcctgaacatatatgttgtttttatatgatctcagaaggcatacacacatagaattaagtaatactaacttatcttacattgaggttccctccacttaaccacatcacattgtaagatgaagaagacaaagctagcaattaaaatagaatgtatgtgtgtgtgtgtgtgtgtgtgtgtgtatatatatatatatatatatgtatgaacattatattctaatgttcatacccaatacatgatcctaagagtaaaagctatacttcacaaacatttgggattgtaaat

SEQ ID NO: 110341 - DNA, 618 bp, Homo sapiens
attcagactaaccctgcttatttctgtgaaccaactagtgatctctagcttcagctcaaaagaaataggagggatgagtaatgcaaaaatctggatcaagattctaatgctgggcacatattggaattggctagcagctccatccccctaagtcttagcaggcatgactatagctttcagctatgtgggcatggcagcagcttcaggatatttttctggagctgtcctcaccctgttatttcgttttgacaacttctaaatctaataacctgatttgtcttctcttgccttcaggccatcaagcaccagataatcctcagtgagtgatacatccccttaatattcaagagccacccttctgtagggggccgatagaatgccccatcagtgggacaagacagaggtgaaatcctgcccctctctcccttggmcctggctagatactgcttttaccatcccatggagtcacactgccctgacaggtaacaagagcctaaggcccacagaacaaccaccacggtccctctgtcagcagggggcagttacagaagactgaccttcatccattttccccaaagaattggggtcttggactcctgacgtgtgaaatgttatagt

SEQ ID NO: 110342 - DNA, 590 bp, Homo sapiens
tacaatatattgaatttttacaatatgtgggtgacagagtgagactctgtcaaaaaaaaaaaaagaaaaatattaagtacttactttctagatccataaagatttccataggcattagagtcattaccactctgctcctggttatcaatagtaaaattagattggtaaaaatcagagtcaaattgtgccaagtttgacatcctgaaaaataagagtatgtttttaataagttcatgagtcaataaaacttagtttgagatatttacaaasatcaaatgacaatgtgattatggctgaattcctatcagaaaaaaagatgtcctttgaatggggtcaataaagtattgggggaagggtatagaaatatatgctagaaagttatttacagaatgtgttatcttcaactactttttctgaagttttcgcaccctggactgtggcttttaataacttgactttaattcatctgaaagaactaatcttctccaaatatcttattcttagtaatttaagagaaaaagcttaaaacttaggacacatctagaaggatttccctaaaacgatgttcttcattttaagcaggcgcacac

SEQ ID NO: 110343 - DNA, 590 bp, Homo sapiens
tacaatatattgaatttttacaatatgtgggtgacagagtgagactctgtcaaaaaaaaaaaaagaaaaatattaagtacttactttctagatccataaagatttccataggcattagagtcattaccactctgctcctggttatcaatagtaaaattagattggtaaaaatcagagtcaaattgtgccaagtttgacatcctgaaaaataagagtatgtttttaataagttcatgagtcaataaaacttagtttgagatatttacaaacatcaaatgacaatgtgattatggctgaattcctatcagaaaaaaagatgtcctttgaatggggtcaataaagtattgggggaagggtatagaaatatatgctagaaagttatttacagaatgtgttatcttcaactactttttctgaagttttcgcaccctggactgtggcttttaataacttgactttaattcatctgaaagaactaatcttctccaaatatcttattcttagtaatttaagagaaaaagcttaaaacttaggacacatctagaaggatttccctaaaacgatgttyttcattttaagcaggcgcacac

SEQ ID NO: 110344 - DNA, 616 bp, Homo sapiens
aggttgtttgttaccagtgtttatcatgtaattactttattctggcaatctgtattgcaatttaatgcacatctgcattaattcagagaagaatagaacgcattgttttccgttatttttaatgcatttttatcagtattctttaaatgctctttttgttagtaccacataagatttgttcctgatcatctgccttttaaagaccgtgctgcttctattttataagcctgaaactacagccctgaatattacagagacacatgaaaatgggcataaaattctgttgcactgcatgaatgaattttaaagagctcaatatgttctatggcaagcaaagaaaagaaaattaaaggattttgcttcattaatamtatcataattatctttgacttttaatttggctatttcttctgaatttccactttttttttcctgccaagactttgtctttacagaaaacattgcattctagcagagttattgctgaattcttattaagtttttagtttggcaatatgttttgttagcaaaaatataatttacacctgagattatgaaagttgatatgagcagtaattgagttgtacattcttagtaaccatattattataatagt

SEQ ID NO: 110345 - DNA, 562 bp, Homo sapiens
aaacactattgtgatcatcaaagtgagcacagagtttattgatttgccaggcaagagaacacacaccagagaagaattgaaggagcagttttctgagggaaaaactttaggcagtattatgyaatagggatgtagtgagagtttgtgatggttatgctaatgaatacttgatgtttgctttctggataggactaccagtccgtaagtccgtacaaggttagttaaaacaagccccactgttcacctgttaagaaagagtgaagctcacacttccattgtaattttagcatgtgaggttttgacccttttttgttgttgttagctgtgtacagaatgtgtaatcttttttctttgtgtgtgtgtgtgtgtgttgtttgtgtgtttttcttttttctccttggctaattcttggcagggatctttctggaggaaaagctggggccagccatggcaggagaggtatggaatctgccacgtgaggcctgctgtttgcctgccagcccaacttcctgttgcttgcccctaccctctgcgcctttgcctgtcctcaggccgctggaac

SEQ ID NO: 110346 - DNA, 517 bp, Homo sapiens
tgattacaaccttttattcaagagcatgtctaaaagcttagcaataactaagattcatattagtaacctggaggccctaaaacattcttctatgtgattaataaaagattaattataatgtttatgtagttttctgttaactaggtagcaaaagtaacagtaacatgaggagtaataatagtaatagcaacagcagcttacatttattgagaaagatgtgttcatcattgtcctagtctttatatcaattatgttgactaatacaaccttatgaagtagagataagaaaaataggtggtaagtggtataaggtaggtgttcaaggtgacataagtaataagtggtgaaagttaagtgttcaaggtcagacagatggcaagtggtagcaattacatgtccaaggtcacaaaggtattaactggtagaggttttktgcccaaggtcacatagacgctaagaagttagttattcaagttgaaataaaggtaaaggttattttctctactgtggaacaggt

SEQ ID NO: 110347 - DNA, 557 bp, Homo sapiens
aaggcaagaaataactaagatcagggcagaactgaaggagacagagacacaaaagacccttcaaaaaatcaatgaatccaggaggtggttttttgaaaagacaacaacattgatagaccgctagcaagactaacaaagaataaaagagagaagaatcaaatagatgcaataaaaaatgataaaggggatatcaccaccgatcccacagagatacaaactaccatcagagaatactataaacaccttcacacaaataaactagaaaatctagaagaaatggataaattcctggacacatacaccctcccaagactaaascaggaagaaactgaatctctgaatagaccaataacaggctctgaaattcaggcaataatttacagcctaccaaccagaaaaagtccaggaccagacagattcacagccgaattctaccagagatacagagatgagctggtaccattccttctgaaactatttcaatcaatagaaaaagaaggaatcctccctaactcattttatgaggccagcatcatcctgattccaaagcctggcag

SEQ ID NO: 110348 - DNA, 541 bp, Homo sapiens
ttgacataaagcagtaacctccagaggacttgggccttggggaaagaacttgcaaatgacaagagaataactgttcttcctcctaaaggggtgctaactcaaaaaaagaaggtaggtgggatcyttaaaaaaacaccgagtgaggccccatgcaggcagacaaactgcttcaaaagccaccaaaaaacttagccctggagtataacagggacaaaaagtatatggtaagtcataaagagctggcagagtccaggttccaattactgttggtcccagcaatgtgccagcagatgggaagagttggaagtaatctgagctggtagggtaaaaacaaataaatctcaggggatatttgcaagagagcctgcgtatttgcttccatgctaatgcaagagccacaggtacatgactaacagggattatgtatttaagaagtcatgtggcatgtgaggtgaaagtaaagaagaggcagagatggatggtcttgtggtgcacacggccatttcagaatacgcatggagaacaggtcgtgggggttttg

SEQ ID NO: 110349 - DNA, 541 bp, Homo sapiens
ttgacataaagcagtaacctccagaggacttgggccttggggaaagaacttgcaaatgacaagagaataactgttcttcctcctaaaggggtgctaactcaaaaaaagaaggtaggtgggatccttaaaaaaacaccgagtgaggccccatgcaggcagacaaactgcttcaaaagccaccaaaaaacttagccctggagtataacagggacaaaaagtatatggtaagycataaagagctggcagagtccaggttccaattactgttggtcccagcaatgtgccagcagatgggaagagttggaagtaatctgagctggtagggtaaaaacaaataaatctcaggggatatttgcaagagagcctgcgtatttgcttccatgctaatgcaagagccacaggtacatgactaacagggattatgtatttaagaagtcatgtggcatgtgaggtgaaagtaaagaagaggcagagatggatggtcttgtggtgcacacggccatttcagaatacgcatggagaacaggtcgtgggggttttg

SEQ ID NO: 110350 - DNA, 612 bp, Homo sapiens
aatccacacacaatgaattcattttcaacaaagttgtcgagaacatactctgtggaaaagacagtctcttcaataaatggttctgggaaaactgaatgtccatatgcagaagaaagaaactagacccctctctctcacagtgcataaaaaccaagtcaaaatggattaaagacttaaatctaagacataaaactatgaaaccactacaggaaaaaattggggaaaagctccaggacattggtctgggcaaaaagttcttgaataataccccacaaacacaggcaaccaaagtaaacatgsacaaatgggctcataccaagtcacaaagcttctgcatagcaaaggaaacaatcatgaaagtgaagagacaacctacagaatgggagagagtatttgcaaactacccatctggacaagggattaataaccagaatatataaggagctcaaacaactctacaggagaaaaaaatcttgtaatctgatcagaacataggcaaaagatttgaatagacatttctcaaaagaagacttacaaatgacaaatatatgaaaaggtgctcaatatcatcgatcatcagagaaatgcaaatcaaaactgcaatgagatatc

SEQ ID NO: 110351 - DNA, 620 bp, Homo sapiens
ggagccatgtgttgaattacctaatagatatgaagtcgtgttaggtgcagaaaaaaacaaataaatataaattaataagacaaactccacatgagacatcagggaaaacacagtcttcaaaatacttctatggacaggtaataatatatccttatagaaaataaatgatatccctgaggccacatttaataaatgaaaagtccaagaaaaccagacctgtccatgtccacaaacctgtatttggcaactcaattaccaacacccaaagaaatacataagtaggatgaatctgttctagtttactcaatagaaatcttctggcgggaaaaaacaaacaaaactatatttctttatttctgattaaatacataggtaacaggaagtaataaattttttgtccagatatccaaatagtgggatttgaaaaagtagctaatagattaattagcrgtgaagttcctaaagaagataagtgaggtttattttgacatccatttaagtttgtttattttttattgttttttttcctctttttttttccttttggtttgttttctgagaatggtgttggggtagctcagtttcagtttaaaagaaagaaagcaccagacaggcaagga

SEQ ID NO: 110352 - DNA, 620 bp, Homo sapiens
ggagccatgtgttgaattacctaatagatatgaagtcgtgttaggtgcagaaaaaaacaaataaatataaattaataagacaaactccacatgagacatcagggaaaacacagtcttcaaaatacttctatggacaggtaataatatatccttatagaaaataaatgatatccctgaggccacatttaataaatgaaaagtccaagaaaaccagacctgtccatgtccacaaacctgtatttggcaactcaattaccaacacccaaagaaatacataagtaggatgaatctgttctagtttactcaatagaaatcttctggcgggaaaaaacaaacaaaactatatttctttatttctgattaaatacataggtaacaggaagtaataaattttttgtccagatatccaaatagtgggatttgaaaaagtagctaatagattaattagcggtgaagttcctaaagaagataagtgaggtttattttgacatccatttaagtttgtttattttttattgttttttttcctctttttttttccttttggtttrttttctgagaatggtgttggggtagctcagtttcagtttaaaagaaagaaagcaccagacaggcaagga

SEQ ID NO: 110353 - DNA, 572 bp, Homo sapiens
tatatgtataaagaaatatataaacagttggatatttatatttatatttaaacagcaaaaaagagtacctaaattgtttgagacatatgaagaaaagacataagaaaaaaggccaaggaattatgatagaatatgtctgatatctaggtctaaaaagtcagatacatgaaatacttaaccaataatttaaagactcacagtgcttcctgcctggatcctggcacatctgtggctctggaattcttatatgtcctgcacatgatggttcactctacacctgctttttgggtaaagaaaatgagccatttttatactttgcttattatcatattactagccttgttatccataaccacatcagagtctcctgcaacttcactctacttttctcatgtagttctttattattcatacaaagcatactttttatagcagaatttaatactagaatatatacgtttgtgtgtgtatacatatatagtatatttatgtatatatatatatagtatcctgtgtgaagaaaaaawtttttcttcaattaaaatacttatttttctgaatacaatgaccct

SEQ ID NO: 110354 - DNA, 534 bp, Homo sapiens
ttgtttgctaatatttgcctcagataacatgcaataattattctgcactcaactgaccaaaactctctctaaatgttttgttaagaacacagtcaacaccaaggtaaagaagattaaataggaccctgccttgattgagagagagactgagtcggggtagagacagaaacagagcagaaaaagataaaggagagacacaaacagagatgtagaacaatgagacagagagagacattgagccagagaaactcagrgacagagaagaagagggagacaaagagacaaagataaaagcaaaggcacaaagactaagaaagagtgagacagagacagaaagacagatagagagatggaaaggctgacagagagtagcattaattttatgagaaacaggtgtatttaggtagccactctaagtagagtcaaatttactccatttgcatttggaatctgtagatcgttttcagcaaattcaagcaccttctagttgccttcttttaaactgatacacaaactattttataatcaagcata

SEQ ID NO: 110355 - DNA, 646 bp, Homo sapiens
aattagattctggttctggttacccttgggcaagatactccctgggtttcatatgtcacctgcaaaattgaagaataacatctcatagaygctttgcaaagacaatgaatgtaaagcaaaaagcacagaccctgtctcatgacaacactcaaaatgtagctgctattattgttattgctattatcattatcactattagcaccattattatcatgccagtactctgaattgtgttgtataatctagaagttctttcttaaagtttctttttccccctctcaaactttgattcacattatgtacatatatatatataaatttgcttttgaaaaataacctatctatatatatatatataatatagatatatacatggtatacaatatagatatctacttgctttttgaagaataatctaaaataggggaatctaatatattcttatatctatgtgtatagatatatagagatagatgtctataggtagatatttgctttttgaaaactatgtatatctatatctatagatctatatctctatagatgtatatatgctttattcaaattggaatatagttgaatttgggtacatgctaagcactggatgtctaatgacttacttgttagacatcactttataagtttt

SEQ ID NO: 110356 - DNA, 646 bp, Homo sapiens
aattagattctggttctggttacccttgggcaagatactccctgggtttcatatgtcacctgcaaaattgaagaataacatctcatagatgctttgcaaagacaatgaatrtaaagcaaaaagcacagaccctgtctcatgacaacactcaaaatgtagctgctattattgttattgctattatcattatcactattagcaccattattatcatgccagtactctgaattgtgttgtataatctagaagttctttcttaaagtttctttttccccctctcaaactttgattcacattatgtacatatatatatataaatttgcttttgaaaaataacctatctatatatatatatataatatagatatatacatggtatacaatatagatatctacttgctttttgaagaataatctaaaataggggaatctaatatattcttatatctatgtgtatagatatatagagatagatgtctataggtagatatttgctttttgaaaactatgtatatctatatctatagatctatatctctatagatgtatatatgctttattcaaattggaatatagttgaatttgggtacatgctaagcactggatgtctaatgacttacttgttagacatcactttataagtttt

SEQ ID NO: 110357 - DNA, 639 bp, Homo sapiens
gaccaaatcaccatgattgagggagaaggtgatataagatgagaccagccaggtagacatacagcaagtcaagcagagtcttgcagrctggatttgactcattgcacagggcaaaatcattaaaggattaagtaggagaatgacacaaatttatgtttgtaaaacaaaactctatttggcaaataatggatttggtcatggaggaaaaataaagaatgggtaaagaagatattgcagtaaactagccaagttatgatggtacattggattagaaattttaattgttgagatacaaagaagtgaaagtatttaatctatattttataaataaaaatgacagaatttgacaaataggttgaatgtggctaggagggaaagagcaacaatatagatgattccaagttttctgacttaaacaactaggcaggtattcttaccatttactaagatgcagaaaactggggggaaattgttgagtgagattggggggtgttaagaattagtaatcaaaatttgaatttagtcttctaaagtttgataaattctagtggttggatacataattttatagagctaagaggggtgtttggggctgaaaatacatatttaagggtcaccagcatatatgtaacatttaag

SEQ ID NO: 110358 - DNA, 598 bp, Homo sapiens
agggttcggatcgttggtaagatctgaacccaccatgttgtttatttctatactgtttggccaaagatatcattaccagactatagttgagttgctgagcctgaagaggcacgagtgacttcaattagaccctgggaccagccattcaaaaacaacacatctctaagtgcctatagtgatagacagtagggtacaatgctggagagacataccaaataataattataattattttagtgtgggcagctatataataaaatatcataaactgagtggcttataaacaacagaaatttatttcccacagttctgaaagctgggaagtcccaaattaaggaactggtagatttggtgtctggtgagggccattttcttgatgcattttcacatgcaaaagggatgcgggagctctccggggtctcttttatgagagcactcattgcatttatgaggactccatcctcatgacctaatcacctaccaaagtccctacctcctaataccatcaccttggggttagggttttaacatatgaattttaggggaatgtttatagygatcataataatagataaaacaattgctttaatggtaatag

SEQ ID NO: 110359 - DNA, 597 bp, Homo sapiens
gttgaattgggacatggaagatgagagagagccagtcatgcaaagagccaggattagggagagaaaggggagaacattccaggcaggaggtaacagcaggtgcaacatccctaagtcagaaaaatttttagtttgttgcagaaacagtaaaattgcactggagggaaggagagtggtgtgagaaaacattaaagagtcagacaatgaatcaggtcatacagggtcttgtatgcaatttggattttcttctaaatgcactggaaaactattgaagagttttaagctgtggaattgcatgaccaattaggagtctactgcagtgtttcaagtaaggtgtgatagaagcttggatttaaataatccccaattctttctaatcacatagggttgtgctattttattamatttactaagaaataataatgttcagctagtttttaaatgttcaattctactttttttaagagacatagtcacaccgtcatccaggctagcgtgcagtggtgcgatttttctcactgcggcatcaaactcctgggctcatgtgatccttccaccttagcctcctgagtgcctgggactaaaggcacatgccac

SEQ ID NO: 110360 - DNA, 411 bp, Homo sapiens
tctacacatgtattagggcatcacggactaacactgaattagcaagattgaaggaaacatagatgggtccccactctaaattttcttctgtctttaaagatctaaggaactctagaaattagcataaccatgaggcagtaaatgattattagctgtgatgtgtgatagggataagtttataggcggtcagaggaaagaaaagatctccagggttatcagcatgaccaatttataaatgacttaatttggacactcactctgctactttgccatctgctttaaaagaatttcccttcattatgtacaacacctgatcatggggttgtgcctatattaayggatgccttttcttttaggaaagcctcatgtgctccatcttaagtcgagctccagagtcattcgatgttcatt

SEQ ID NO: 110361 - DNA, 440 bp, Homo sapiens
ggggttgacatcagcagtagactaatgcaaggatgaaattaggctttcacttgaacaggatttccctgtaaaattaacgacagattgtttggaaagctaagttttccctcttactgtgaatatgcttttgcgttgttttaaaatgtttgagtcatcattttggctaaaataaatgayatatggtaacttggaattctattttataatatcaagtgctttgaacctctaacgtatttaacaggcttcccaaaatcaaacttcagtttcaaaattgtctttcctggtccctggaacatccaaaagagaagaaaactggattttttgaaatgtttagttatatggtatttccaaagttatatttaatcttctttaggttatattttagtgaataatattaatatgtttcaaaattatatgagatttctaaaattctaatgtct

SEQ ID NO: 110362 - DNA, 429 bp, Homo sapiens
ggtgaattcgaagattttctgattggcatttgasaactggctaaaataatttatctaaagaccggaatcaatagacaggagtgtacgggttaagataaggtgttttagagaccgaggttcttatgcagatgaagcttgcaggtagcaggcttcactgagaatagattgtaaatgatttttatcagacataaaaaggaaaaaggacttggaatcaggaaaaatcaggaaaaagacttggaaagacaacgggattctctacaaaatggagattttccccacagaaacagctttgtagggccatttcaaaatatgtcaaagaaatgtatttttttggtgaaatactttttctttcaaggcctgctatctgtcatgttgatatcttattgctacgaagagtctgttttgtcattcttaagtctctactttaat

SEQ ID NO: 110363 - DNA, 425 bp, Homo sapiens
tctgattggcatttgagaactggctaaaataatttatctaaagaccggaatcaatagacaggagtgtacgggttaagataaggtgttttagagaccgaggttcttatgcagatgaagcttgcagrtagcaggcttcactgagaatagattgtaaatgatttttatcagacataaaaaggaaaaaggacttggaatcaggaaaaatcaggaaaaagacttggaaagacaacgggattctctacaaaatggagattttccccacagaaacagctttgtagggccatttcaaaatatgtcaaagaaatgtatttttttggtgaaatactttttctttcaaggcctgctatctgtcatgttgatatcttattgctacgaagagtctgttttgtcattcttaagtctctactttaatgttaacactgttc

SEQ ID NO: 110364 - DNA, 278 bp, Homo sapiens
attttaaaactcacactgccttagaattttaccatcaatgaaagagagggtcactayaggtcctaagaagagaagtgacatgctcttttatgtaaaaatgatgactgtggatattgtgttggtaactgactgtaaggggacacttttagaaaaagtcccctctttagatattgactttatccaagaggaaaacagtagtaattcacacgtcagtagacatggtgagaagtagtagattctagatattataaagtctttgagtttaagcaaccagagga

SEQ ID NO: 110365 - DNA, 278 bp, Homo sapiens
attttaaaactcacactgccttagaattttaccatcaatgaaagagagggtcactataggtcctaagaagagaagtgacaygctcttttatgtaaaaatgatgactgtggatattgtgttggtaactgactgtaaggggacacttttagaaaaagtcccctctttagatattgactttatccaagaggaaaacagtagtaattcacacgtcagtagacatggtgagaagtagtagattctagatattataaagtctttgagtttaagcaaccagagga

SEQ ID NO: 110366 - DNA, 278 bp, Homo sapiens
attttaaaactcacactgccttagaattttaccatcaatgaaagagagggtcactataggtcctaagaagagaagtgacatgctcttttatgtaaaaatgatgactgtggatattgtgttggtaactgactgtaaggggacacttttagaaaaagtcccctctttagatattgactttatccaagaggaaaacagtagtaattcacacstcagtagacatggtgagaagtagtagattctagatattataaagtctttgagtttaagcaaccagagga

SEQ ID NO: 110367 - DNA, 596 bp, Homo sapiens
gatgttgctaaacatcctgcaacatacaaggcaatctttccaacaccccatcccaaacatagaattatctggctcagtttgtccatagtaccagagaaaagaccctgctctattaatatgcaggatgagtaatgtgtaattttagatactggcgttaagtatatgtagtactgggagtctgcatgcatttcctcttgattgttatttatctatctatttatttatttattgacacaggaaacaaggtcatcacctggcattgagattgaagaaaagtatgtgagggctgtgaaatgaggaaagaatccataagttaatcttacataagaggaagaaggcaatggctaacaaaagaaaaatgggcttgtttggccgcattaaaggcacatttgcttttcaaggttgtggttttaaagagataacaatcagcacaatttggttgtgtgtttttctcccactgcagtttgggtataaaagcaattgcaaaattgatggagacatgcatgaaactaaggmtatagttttgctacgtcagtcatgtttagtagatagaaacttatttgatgaccaagggtggcacaaaatgtttaaaagac

SEQ ID NO: 110368 - DNA, 540 bp, Homo sapiens
aatttgagattccatcctctcaattttaattgactgccttagttgaattcaattattcgtattataagaacagaagtcagcctgtgcgacagactccgtctcaaaaaaaaaaagaacagaagtaaactatattcagcgtaagaagtgtgaataagtttaaaaaatacattaacacatatattagcatttttactgaattaaaaaaatacagcaatagaataatgagataaagttttgttgtagagtcgtgatagtggaccctgtgaataaaatacaacaacttaamcaagtgggagcaaaacattttatgattcttatgatagaaatatactaacaagttctaattttctttgtgcctatatagatgaacatcaaaatcacagctattttagctgataccattaaaaattaataaatattgaatctgatcattttaatggaaatgatatatgtttagaaatttggaagaataaaaagaaaaataccaaggtggacatgattaggtttgtaatacttaacttctgggatatttgaacaatg

SEQ ID NO: 110369 - DNA, 585 bp, Homo sapiens
gaaatagtaatatgagtaccaaaaaagctatttttwtacttaataatattatttgttatttgaaactctatatgaaacatgtatcgtatgacccctacatatagtgatattttataaaaagttactacaacaaaatgcccaataagttcttcaattaaatattgctctatgcatacttagttctatggactgcacctgatatggaaacaccaaggtataattctaattaagaaagtaaagaacaacaaatatgttggatattataactctagctcagtaatttttaaataatacttttttctttctatatgcattcaaaaattcctctagtatttacatgtcaaagggggttgaaattaagtacaaatatcttaaattgttaaacttttcctaatattaagagattttatggttgaacatcagaggttgatggatatacttggctatgacaagattatgtaagatttttatatgcaaaataccaaatgccagatgttctttatctctgttagatgaaaaacaaatacaaatgaggtcaagtactcaatgtgcatagtgtgacatttaaaaatatttctatcacac

SEQ ID NO: 110370 - DNA, 585 bp, Homo sapiens
gaaatagtaatatgagtaccaaaaaagctatttttttacttaataatattatttgttatttgaaactctatatgaaacatgtatcgtatgacccctacatatagtgatattttataaaaagttactacaacaaaatgcccaataagttcttcaattaaatattgctctatgcatacttagttctatggactgcacctgatatggaaacaccaaggtataattctaattaagaaagtaaagaacaacaaatatgttggatattataactctagctcagtaatttttaaataatacttttttctttctatatgcattcaaaaattcctctagtatttacatgtcaaagggggttgaaattaagtacaaatatcttaaattgttaaacttttcctaatattaagagattttatgkttgaacatcagaggttgatggatatacttggctatgacaagattatgtaagatttttatatgcaaaataccaaatgccagatgttctttatctctgttagatgaaaaacaaatacaaatgaggtcaagtactcaatgtgcatagtgtgacatttaaaaatatttctatcacac

SEQ ID NO: 110371 - DNA, 518 bp, Homo sapiens
aaattgctcttttaattcatgacatagattaactatactttaaactataagcagattgtacttatttcacatatgttctttcaatttgaaatctcaaagtattgaagagggaagaagtagaaaattattcaaattatatggtctaatcaaatgttattctactactgatctaatattgatatatcaggttctcacagttaaaattataatttgacaaagttattaatagttaatcttctcaagatttaagtatcaagtaagctcagaaaaacaatattgtattttttaatatttggaaaggaatagagatacaaaagtaatgaagtgatatgaataatgctattatgtctcactttatgaatatggacatagaycagctgttttagataataaaaaatgcacttccatttcaaaaatgtaattctaaaagtaatatttatatgtaatattcagaaaactaatatggttgttaaatatgattgaaatttccaagtagcaaccatagatcatgcataacc

SEQ ID NO: 110372 - DNA, 449 bp, Homo sapiens
ttgcctgtgcttgtgggatattactcaaaaaatctttgcttagtccaatctcctggagacttttcccaatgttttcttgtagtagatttatagtttgaagtctttaatttttaaatcctttttgatttgatttgcaagtgtcaagatataggggcctagtttcattcttctgcacatggatatcctgttttcccagaatcatttgttgaagagactgtcttttccccagtgtatattcttggtacctttgtgaaaaatgagttcacggtagttgtctggatttgtttctaggttatatattctgtttaattggtctatattactgtttttatgccagtaccatgttgttttgtttactgtagctctgtartataatttgaagtcaggtaatgtgatttcttcagtttacttagaatagctttggctattcaacgtcttttgtgttttca

SEQ ID NO: 110373 - DNA, 607 bp, Homo sapiens
ccaggttggcctcagactgctgtgctggcagggagaatttcaagccagggtaccttagcttgctgggctctgtgggggtgggacccactgagccagaccacttggctccctggcttcagccccctttccaggggagtgaatggttctgtctcactggcattccagctgtcactggggtatgaaaaaaaacctcctgcagttagctcagtgtctgcctagatggctgcccagtattgtgcttgaaacccggggccctgctggcataggcactggagggaatctcttggtctgygggttgcaaagactgtgggaaaagcacagtatctgggccagagtgcactgttcctcacagcatggtccctcacggcttcccttggctagggaagggaaatcccccaactccttgtgcttcccaggtgaggcggtgccccaccctgctttggcttgccctctgtgggctgcacccactgtccaacaaatcccaatgagatgaacggggtacctcagttggaaatgcagaaatcacccaccttctgcatcgatctcactgggagctgcagcttggagctgttcctattcagccatcttgccagctgatctaccagga

SEQ ID NO: 110374 - DNA, 573 bp, Homo sapiens
atgttttagtttgatttagattgtttgttatttagagctaaatgcaycataattaatacaaacacactttggggataaacttgcccttgtgggtcttatgctttaaagttcatagtctagacaaaaagagagtattactcgtaaagtgactggcctacaaacacacccttatgtagaagaagaattggatacaagtgttacaatccatgcttccatatggcacatataacacctttaatatctttaaaccactgtcattttttaaagtttctttaaacatcttggattggatagtactaagtaaggtgatacctttcctcccttggtaaattataattaaacagatacctgaaatattccctttcccatggtgttttcccctagtggcactcctgtgtcctttccactgaatgcctggagcggtcattaaccttatagcttgcctgagcattttgagaatagggatcacgttttaattctttatgtacctttagcttttagaaaaatgcctcaaattcagtggactatcaacaaatgtattctaaaggaatgattcaaggaattaataaaaaa

SEQ ID NO: 110375 - DNA, 653 bp, Homo sapiens
gcaggtgaccatcccaggagatagatggaaggctccagcatgcttcatttatagtatctctgggccaattatttttctgggtcaagaattggtaagtacagttgactcttgaacaacaaggttttgaactgccaacaccactcatactaggatttttttaaaaataagatattatagttagccctccctgagggcaggttctgcatctacaaccaaatacggatagaaaatactgtattggcaggatgtgaaaccccgcaaataccagggctgacttttcatatccacagttctgcactgcagaccttgggacttggatacacccagattttggttaccacagggattctggaaccagtctcccccagtagctatggacattattattataggattgtaagatattagaattattttatattkggggatgtcaattttataatgagtaataccaattaaattacatcatttcctggctcgttctgaattctataccaagcttagcatctactctgtctctttctacttcatggggattttacccagattaatcaaaattgtattttaatcctgaattatttaaatttgagaactttttaaaaattggtgacactaccagtacgtgttgatgcaaggacttaaattaaagaaga

SEQ ID NO: 110376 - DNA, 469 bp, Homo sapiens
actattttttgctttccctaatttaacctacaaatatgaaatttcaatattaaaaatcgtttcccaagatctccatctcctaaagtttaaatcattacacagtcttcagtctctttcctaagttattttgactgttacatatgttctgctttctgctcttgctccctagaggttattattattattttaatttgtagtaagtttcctctacttcrtgacaatattcgcctgggagagttctttactaggaatttacttttaatatctcttcctccttctcctcttttcctttattcttcctttaattctttctgaaaataaatgaattttcctaaaccagccattggaaaggatatttgtgtagtaaggaagagcctggggacaaattcaatgctaactggcattatttttttagcacctggatttctgtgttagttcctttagtctttcattcttaccaaacaatgga

SEQ ID NO: 110377 - DNA, 469 bp, Homo sapiens
actattttttgctttccctaatttaacctacaaatatgaaatttcaatattaaaaatcgtttcccaagatctccatctcctaaagtttaaatcattacacagtcttcagtctctttcctaagttattttgactgttacatatgttctgctttctgctcttgctccctagaggttattattattattttaatttgtagtaagtttcctctacttcatgacaatattcgcctgggagagttctttactaggaatttacttttaatatctcttcctccttctcctcttttcctttattcttcctttaattctttctgaaaataaaygaattttcctaaaccagccattggaaaggatatttgtgtagtaaggaagagcctggggacaaattcaatgctaactggcattatttttttagcacctggatttctgtgttagttcctttagtctttcattcttaccaaacaatgga

SEQ ID NO: 110378 - DNA, 578 bp, Homo sapiens
tttaagtggcactgtgtgggtcagaagcactctcaaggtgtccttatcctttttgcatttcccccaatcttttcattggaatgtgatttgaaaggaattagagtagtcctcctgtactaatttttattgctcactgcagggctacagggatgtttactctacacagtatgcctcttccctgatgcccttcatatctttttttttttttttgagatggagttttgctcttgttgcccaggctggagtgcaatggcaccgtcttggctcaccacaaactctgcctcctgggttcaagcaattctcctgcctcagcctcctgactagctkggactacaggcatgtgccaccacacccagctaatttttgtatttttagtagagatggtgattcaccatgttggccagtgtggtcttgatgtcttgacctcgtgatccacacacctcgacctcccaaagtgctgggatcacaggtgtgagccactgttcctggcctcttcatctcttttttttttcttttttttttttttgagacagggtctcactctgtcactcaggctggagtgcagtggcatgatcatg

SEQ ID NO: 110379 - DNA, 578 bp, Homo sapiens
tttaagtggcactgtgtgggtcagaagcactctcaaggtgtccttatcctttttgcatttcccccaatcttttcattggaatgtgatttgaaaggaattagagtagtcctcctgtactaatttttattgctcactgcagggctacagggatgtttactctacacagtatgcctcttccctgatgcccttcatatctttttttttttttttgagatggagttttgctcttgttgcccaggctggagtgcaatggcaccgtcttggctcaccacaaactctgcctcctgggttcaagcaattctcctgcctcagcctcctgactagcttggactacaggcatgtgccaccacamccagctaatttttgtatttttagtagagatggtgattcaccatgttggccagtgtggtcttgatgtcttgacctcgtgatccacacacctcgacctcccaaagtgctgggatcacaggtgtgagccactgttcctggcctcttcatctcttttttttttcttttttttttttttgagacagggtctcactctgtcactcaggctggagtgcagtggcatgatcatg

SEQ ID NO: 110380 - DNA, 256 bp, Homo sapiens
ctgggcatggagaagagaagggctcgctgcaccataatctatgtccagaaagggcagaatggctcatgctactgaaccagatgagggagtactctgaattcttggaaatctccctgagtatgaargaaaaagggcctccttgcattaggatcaatacacacgaagggttgggtgggtcacgatgctgatctaggtgagcaggtactccaaatatctggaagtcagcttgaacatggagccccaccctgacccgccc

SEQ ID NO: 110381 - DNA, 256 bp, Homo sapiens
ctgggcatggagaagagaagggctcgctgcaccataatctatgtccagaaagggcagaatggctcatgctactgaaccagatgagggagtactctgaattcttggaaatctccctgagtatgaaagaaaaagggcctccttgcattaggatcaatacacasgaagggttgggtgggtcacgatgctgatctaggtgagcaggtactccaaatatctggaagtcagcttgaacatggagccccaccctgacccgccc

SEQ ID NO: 110382 - DNA, 593 bp, Homo sapiens
cacttagaaacatccaatctactaccctgaaaaaatgaaaacacttttctaacatattatctctgcacctttcacttacctgcrccaatacatgcttttgttgcttacatcagttggtgttggggttttggtttatttgaatccaaaagagcttagagctcttttgtcaatgggattttcacatagactttgataactctcagattgtggcatccttagatatccttggtatagggagctggatggctgttgttgtagaatggataaggtaagttgcacttgtagctgtctcatatgtcatttactaataagtaccaccgtctttgatacagtacaacttttataagtcaagataccttaaccacaatagtaaatttctaaatagatgcattgttaattaatgtcatagatggtctttctccatgtatatatcagttcacttaagactataaacttgagaccagatcggatgaaactataactgttcttccatgcaaatctctgtggcttctctgtaaaggaatgccttttacaactgtacactgggtgaaataactgtatggaatcttactcaggcttcaaatggttctcac

SEQ ID NO: 110383 - DNA, 593 bp, Homo sapiens
cacttagaaacatccaatctactaccctgaaaaaatgaaaacacttttctaacatattatctctgcacctttcacttacctgcgccaatacatgcttttgttgcttacatcagttggtgttggggttttggtttatttgaatccaaaagagcttagagctcttttgtcaatgggattttcacatagactttgataactctcagattgtggcatccttagatatccttggtmtagggagctggatggctgttgttgtagaatggataaggtaagttgcacttgtagctgtctcatatgtcatttactaataagtaccaccgtctttgatacagtacaacttttataagtcaagataccttaaccacaatagtaaatttctaaatagatgcattgttaattaatgtcatagatggtctttctccatgtatatatcagttcacttaagactataaacttgagaccagatcggatgaaactataactgttcttccatgcaaatctctgtggcttctctgtaaaggaatgccttttacaactgtacactgggtgaaataactgtatggaatcttactcaggcttcaaatggttctcac

SEQ ID NO: 110384 - DNA, 593 bp, Homo sapiens
cacttagaaacatccaatctactaccctgaaaaaatgaaaacacttttctaacatattatctctgcacctttcacttacctgcgccaatacatgcttttgttgcttacatcagttggtgttggggttttggtttatttgaatccaaaagagcttagagctcttttgtcaatgggattttcacatagactttgataactctcagattgtggcatccttagatatccttggtatagggagctggatggctgttgttgtagaatggataaggtaagttgcacttgtagctgtctcatatgtcatttactaataagtaccaccgtctttgatacagtacaacttttataagtcaagataccttaaccacaatagtaaatttctaaatagatgcattgttaattaatgtcatagatggtctttctccatgtatatatcagttcacttaagactataaacttgagaccagatcggatgaaactataactgttcttycatgcaaatctctgtggcttctctgtaaaggaatgccttttacaactgtacactgggtgaaataactgtatggaatcttactcaggcttcaaatggttctcac

SEQ ID NO: 110385 - DNA, 637 bp, Homo sapiens
tgcttgctgtaagccaggcactctgcacagccctttatacatatcatctcatttaatactcacagcaattttcagaggcaaatactattatcatctctgtttcatagatacagaaattaaggctcagggcagctgaacaacttcccaaagaccatacatctagtaggtaaagaaactgagcttatgctgcacagaggaaaaaagcctccctccttggttctctccttggagatggctaaagaagttgtattctcagcctgtcatcttgctagccgaaagatcacaaactctttgggtctcagcttccatgtttgcaggatagatgctccaatgtccaccctgatatgctcatcgatgtgtccctcattcacccatcttcgagcatttactttcactgtttcacatcttgcctataagagttgatgatagctctcaaacaacataaagtatgtcacattcatctttatacctagagttcctaggccactattctaaacactttaaatgtattaaatcatttattcctcatgataccatgagaaaggtattctttttatccccacttayttcagacttaaggaggttatttgacaccagtcacaattacattaatggtgtcagatagatttgaacatag

SEQ ID NO: 110386 - DNA, 574 bp, Homo sapiens
actttttaaactatcagatctcgagaacttactatcacaagaacagcaarggggatatcctcccccatgattcaatcacctcctaccaggcccctcccccaatttgacatgagatttgggtggtaccacaaaaccaaaccatatcaggtggcctgaaagatctctgaaatgcctttgaagccttttccccattctcttgaatattggcagttatctttctttcagtcatgctaatctctctagcaagtggttgcaccacagctctcctgaattcttcccatgaaaacaggctttccttctctaccacatggataggctatgaattttccaaatttttatgctctacttcccttttacatataagttccaactttaagtcgtgccttttcttccacatctgattgtcagctgttagaagcagctatgtgacttcttgaatgctttgttgcctagaaatttcttccacctgataccctaagtcatcactcttaagttcaaacttccacaaaaccgtaggacatggacacaatgcagccaagtcctttgctagggagttctcaataagtttctcatg

SEQ ID NO: 110387 - DNA, 574 bp, Homo sapiens
actttttaaactatcagatctcgagaacttactatcacaagaacagcaagggggatatcctcccccatgattcaatcacctcctaccaggcccctcccccaatttgacatgagatttgggtggtaccacaaaaccaaaccatatcaggtggcctgaaagatctctgaaatgcctttgaagccttttccccattctcttgaatattggcagttatctttctttcagtcatgctaatctctctagcaagtggttgcaccacagctctcytgaattcttcccatgaaaacaggctttccttctctaccacatggataggctatgaattttccaaatttttatgctctacttcccttttacatataagttccaactttaagtcgtgccttttcttccacatctgattgtcagctgttagaagcagctatgtgacttcttgaatgctttgttgcctagaaatttcttccacctgataccctaagtcatcactcttaagttcaaacttccacaaaaccgtaggacatggacacaatgcagccaagtcctttgctagggagttctcaataagtttctcatg

SEQ ID NO: 110388 - DNA, 574 bp, Homo sapiens
actttttaaactatcagatctcgagaacttactatcacaagaacagcaagggggatatcctcccccatgattcaatcacctcctaccaggcccctcccccaatttgacatgagatttgggtggtaccacaaaaccaaaccatatcaggtggcctgaaagatctctgaaatgcctttgaagccttttccccattctcttgaatattggcagttatctttctttcagtcatgctaatctctctagcaagtggttgcaccacagctctcctgaattcttcccatgaaaacaggctttccttctctaccacatggataggctatgaattttccaaatttttatgctctacttcccttttacatataagttccaactttaagtcrtgccttttcttccacatctgattgtcagctgttagaagcagctatgtgacttcttgaatgctttgttgcctagaaatttcttccacctgataccctaagtcatcactcttaagttcaaacttccacaaaaccgtaggacatggacacaatgcagccaagtcctttgctagggagttctcaataagtttctcatg

SEQ ID NO: 110389 - DNA, 588 bp, Homo sapiens
aaagaagaagagggggcaatgtgaccagagagacaggaattggaatgatgcagccacaaaccaaggaatgccagcagccatcagaggctgaaagaggcaagctctctcctcaagcctcctgtgtgtgcagccttgctgacatcttgattccatcccactgatactgatcttaaatgtttggtcttcagaactgtgagagagtacatttctgttgttcaagccaccaagtttgtggtcatttatcatggcagtcacaagaaacggatccagtcttcataattgatgattattttatctacttatttgtttacttatgttttccctttttggtttgtaaacaatgtaagagcagggactacatctgtgactagtgctcaccattatatggccagtactctgctgtttgtaagagatcaataaatattttgaaggaayggattaatttctctttttcaataaggtgctgctgtttaaaagactagacaagataacctgtacattatgtataagcatgttcacaatatgtattaaatgtagcatgtgaagcagtgtgctaaacattacaaatgcattaaaggcctttaattt

SEQ ID NO: 110390 - DNA, 532 bp, Homo sapiens
tgggattccacaatccaaatgactaagtaatcagaaaaattatttgatacccttttttttttctttttctcgactacaaggagacaggctcagtcgtgaatcccacccaggctcacatggctccagttctggagtcmgggtcacctatcaattttgtgcatgggtgcacaggacaggatttgggatctagggcactcataagaagctggttctcttgctcttataaccatgccacagttgtgccatacagaaagagaaaaggtatatgaaagttattaagggagtttcaccaatagttaattatattaatctattaacatgtaaatgctcctctccaatttcagctaagataccggtacatgggcattgaggatggcatctgcagaagaaagtggattttttttttttaattatagagaaacgtgttgaccaacaaggagaaatccgtatggtactgtgagagaacagctcccttgtcacagatcgggcaggcagcagttgctagctaggactggggcttatgtaagacact

SEQ ID NO: 110391 - DNA, 596 bp, Homo sapiens
gatttgcacccattatctcgtaaaaatcctaaatgtgtgatgcctcttcaggatcagaaatatatttaaaatcaaattcatcatcgttttttctaaactttcccctcttcttgcttcccttcactacccacccctgctatgagtaccaatttacctcaataactttgattccatatgcctttggcttctctctttcctgtactctgtgtcattgaatactgccaccaaatccctttgattgttcctgtctctgatcaaatgtctcttctctttcctatcctgcaaaatgtagttctggcccttattacttcctgtctagacaattacaataaattccagtcaattttccacttsagcccaacctaaacaataacactacttctgtcttaatcttaaaaccttcagtggctccccattgactaaagaatgcacccaaaacccttaccttgtattcaagtccttcaccactgcagccccagccaaaccctttctccatgacattttttgtttgactggtttttttattgttattgttattttttaaacaacccccaggtaattgcaggaaatttgtgcagaaaattatgacaaatgat

SEQ ID NO: 110392 - DNA, 596 bp, Homo sapiens
gatttgcacccattatctcgtaaaaatcctaaatgtgtgatgcctcttcaggatcagaaatatatttaaaatcaaattcatcatcgttttttctaaactttcccctcttcttgcttcccttcactacccacccctgctatgagtaccaatttacctcaataactttgattccatatgcctttggcttctctctttcctgtactctgtgtcattgaatactgccaccaaatccctttgattgttcctgtctctgatcaaatgtctcttctctttcctatcctgcaaaatgtagttctggcccttattacttcctgtctagacaattacaataaattccagtcaattttccacttgagcccaacctaaacaataacactacttctgtcttaatcttaaaaccttcagtggctccccattgactaaagaatrcacccaaaacccttaccttgtattcaagtccttcaccactgcagccccagccaaaccctttctccatgacattttttgtttgactggtttttttattgttattgttattttttaaacaacccccaggtaattgcaggaaatttgtgcagaaaattatgacaaatgat

SEQ ID NO: 110393 - DNA, 517 bp, Homo sapiens
ctgcccttctggtaccaagaagagtgtgtcccaacctctaaagagcaggcaagatccytcctagtccatgaattattagccactgttgcaataaactcatagcactgggaaatgttaccgaggatctctgaagctcggatctcatgcccagctaatcttttattttttgactttttgtaaagacagtgggtttcactatgttgtccaggctggtcttgaactcctagactcaaacattccacccgccttggcctcccaaagtactgggattacaggcgtaatcctcttcccggactcattattgaaaatttcaccaagaagctttgaaagctgtgtgacagtgttatgcatcattcgcaagacacagatgtttccaatacacacctcttacgcatgttcaaaatgaaccactttggctgtgcgcagtgactcacacctgtaatcccagcactttgggaggcagaggcattggattatctgaggtcaggagtttgagaccatcctggccaacatggta

SEQ ID NO: 110394 - DNA, 517 bp, Homo sapiens
ctgcccttctggtaccaagaagagtgtgtcccaacctctaaagagcaggcaagatccctcctagtccatgaattattagccactgttgcaataaactcatagcactgggaaatgttaccgaggatctctgaagctcggatctcatgcccagctaatcttttattttttgactttttgtaaagacagtgggtttcactatgttgtccaggctggtcttgaactcctagactcaaacattccacccgccttggcctcccaaagtactgggattacaggcgtaatcctcttccsggactcattattgaaaatttcaccaagaagctttgaaagctgtgtgacagtgttatgcatcattcgcaagacacagatgtttccaatacacacctcttacgcatgttcaaaatgaaccactttggctgtgcgcagtgactcacacctgtaatcccagcactttgggaggcagaggcattggattatctgaggtcaggagtttgagaccatcctggccaacatggta

SEQ ID NO: 110395 - DNA, 517 bp, Homo sapiens
ctgcccttctggtaccaagaagagtgtgtcccaacctctaaagagcaggcaagatccctcctagtccatgaattattagccactgttgcaataaactcatagcactgggaaatgttaccgaggatctctgaagctcggatctcatgcccagctaatcttttattttttgactttttgtaaagacagtgggtttcactatgttgtccaggctggtcttgaactcctagactcaaacattccacccgccttggcctcccaaagtactgggattacaggcgtaatcctcttcccggactcattattgaaaatttcaccaagaagctttgaaagctgtgtgacagtgttatgcatcattcgcaagacacagrtgtttccaatacacacctcttacgcatgttcaaaatgaaccactttggctgtgcgcagtgactcacacctgtaatcccagcactttgggaggcagaggcattggattatctgaggtcaggagtttgagaccatcctggccaacatggta

SEQ ID NO: 110396 - DNA, 557 bp, Homo sapiens
ggttataaaaaaaatacatttcaaagcttttaatattagctgaagcctaatcctcaatgttgcatatcaccaaccaagcactttgatttaggtatcaatgaccagctacactggacaggtatgctggcttcattcagggtcacagtgctagccatgtcatcttgaaggcaggagtcatctcttccctgtctagccacgtgtrtttcattaatgaggaatagtgggtaggtcctttcttcacatgcctctctattattttgatttttcaagcacattttctataggaagtaggttttattttttttttttgaaggttttaagatttgttttgtaaataaatggaaaagcagttacctccttcacccaaaattccatataaccatatctgtcctgtgattttttggctgaggattttctttttttcaaacttcatgtgtttcccagcttctgctcctttctattggaagcctgaatttatccaagtatccatcttttactgactgcatttacaggaagctgatcttagtgagttatggtgatactgtccccatggttat

SEQ ID NO: 110397 - DNA, 614 bp, Homo sapiens
cttggggtttaatacaaaaatctgacatattccagtcacactgtaactgaaaaagatattccaagctcatgagcctgtctcccatccaaatgacagtttgtctaagatcattaatttggtttgccaatttttgatctatttggttctgagaattccacaattttgaggaattcttttgccaattatttacatattctgcagtttgaacagagaagtgtaaagcaattccagcagccacagcagtagctgtgactgcaataagacccaaaatcactgcaatcaaagtaaaaaagaatcttttggatctagttagaactccttttaatacttctattaaaatatggacagatggggaagcctcccactgtcagtccatggacataggkttccacatgccctctcttgccctcaccagcagaatacggtgctgccaatcaaaagtcgaatcaatgcaagtaaacaatctacagttttcacaggttatagtttgggaatctggtttaataactatgtttcctacaactagcatataagggggttttacacaactttgcaaaggaattgtcagattggaatttaggttaatagtataatatggcttatgatctcttgtt

SEQ ID NO: 110398 - DNA, 579 bp, Homo sapiens
agctggtattggttgtaaaattacaaggaactgccatgcctcaagatctccctgttttctggctttatcaatratttcatgcagtgtactaccttgtccactaggtggtgatgtaggactaaacaccgctgggttgctggtgaggtgccgtgctgtgtggcacgggacacacagcttgaggtctgtattgaacctccggagacggcccatactgaagctcagctggcggccagtattgataaactaccggtggttgggtcttattttctaccagctgatattgtggatactgtatctgaattggcatggccgggatagagactctatccttttctacatgatattctcttggggtttgcacttgtctaacctgcatttgaggttgtaatgttacaggcatgtgaaccgctggaggaggagttgatggccattgtggtttaggctctggtagccccaataattctggacctccttccaccagttttgatgattcaggatatattacctcctgtaactgattgtagtcaacattttgcgttgactgagccattacagactctgttacattttacaatgtga

SEQ ID NO: 110399 - DNA, 579 bp, Homo sapiens
agctggtattggttgtaaaattacaaggaactgccatgcctcaagatctccctgttttctggctttatcaataatttcatgcagtgtactaccttgtccactaggtggtgatgtaggactaaacaccgctgggttgctggtgaggtgccgtgctrtgtggcacgggacacacagcttgaggtctgtattgaacctccggagacggcccatactgaagctcagctggcggccagtattgataaactaccggtggttgggtcttattttctaccagctgatattgtggatactgtatctgaattggcatggccgggatagagactctatccttttctacatgatattctcttggggtttgcacttgtctaacctgcatttgaggttgtaatgttacaggcatgtgaaccgctggaggaggagttgatggccattgtggtttaggctctggtagccccaataattctggacctccttccaccagttttgatgattcaggatatattacctcctgtaactgattgtagtcaacattttgcgttgactgagccattacagactctgttacattttacaatgtga

SEQ ID NO: 110400 - DNA, 579 bp, Homo sapiens
agctggtattggttgtaaaattacaaggaactgccatgcctcaagatctccctgttttctggctttatcaataatttcatgcagtgtactaccttgtccactaggtggtgatgtaggactaaacaccgctgggttgctggtgaggtgccgtgctgtgtggcacgggacacacagcttgaggtctgtattgaaccyccggagacggcccatactgaagctcagctggcggccagtattgataaactaccggtggttgggtcttattttctaccagctgatattgtggatactgtatctgaattggcatggccgggatagagactctatccttttctacatgatattctcttggggtttgcacttgtctaacctgcatttgaggttgtaatgttacaggcatgtgaaccgctggaggaggagttgatggccattgtggtttaggctctggtagccccaataattctggacctccttccaccagttttgatgattcaggatatattacctcctgtaactgattgtagtcaacattttgcgttgactgagccattacagactctgttacattttacaatgtga

SEQ ID NO: 110401 - DNA, 579 bp, Homo sapiens
agctggtattggttgtaaaattacaaggaactgccatgcctcaagatctccctgttttctggctttatcaataatttcatgcagtgtactaccttgtccactaggtggtgatgtaggactaaacaccgctgggttgctggtgaggtgccgtgctgtgtggcacgggacacacagcttgaggtctgtattgaacctccggagacggcccatactgaagctcagctggcggccagtattgataaactaccggtggttgggtcttattttctaccagctgatattgtggatactgtatctgaattggcatggccgggatagagactctatccttttctacatgatattctcttggggtttgcacttgtctaacctgcatttgaggttgtaatgttacaggcatgtgaaccrctggaggaggagttgatggccattgtggtttaggctctggtagccccaataattctggacctccttccaccagttttgatgattcaggatatattacctcctgtaactgattgtagtcaacattttgcgttgactgagccattacagactctgttacattttacaatgtga

SEQ ID NO: 110402 - DNA, 463 bp, Homo sapiens
cataggaacctgatggtcctgtaataaagtcatgtcaaaattacaaatggaagtgagggtggagctggtcagggttgagctgggtttttaatgggaacctgggagtgaascaagacttgctgaacatgttgggggttattgagtgggtgtaagaggaatctatctaacattgcactgatgcccttttggttttaatccttatgaccaagtatgagtctttcaaaacaatttgtataatcctccttatttttcctttcaaacccttcaacttcctttatctccccaaataatctcgcatctattgccacttctttgcttacttcataataaacttttttttttacagagtcttcttctctgttaagtagaccatatatgttgttgccacacaagatgagtaacctggttctatggacagaaagggtcaaaaggatcccattcctcaacagctgggagtgatgta

SEQ ID NO: 110403 - DNA, 463 bp, Homo sapiens
cataggaacctgatggtcctgtaataaagtcatgtcaaaattacaaatggaagtgagggtggagctggtcagggttgagctgggtttttaatgggaacctgggagtgaaccaagacttgctgaacatgttgggggttattgagtgggtgtaagaggaatctatctaacattgcactgatgcccttttggttttaatccttatgaccaagtatgagtctttcaaaacaatttgtataatcctccttatttttcctttcaaamccttcaacttcctttatctccccaaataatctcgcatctattgccacttctttgcttacttcataataaacttttttttttacagagtcttcttctctgttaagtagaccatatatgttgttgccacacaagatgagtaacctggttctatggacagaaagggtcaaaaggatcccattcctcaacagctgggagtgatgta

SEQ ID NO: 110404 - DNA, 463 bp, Homo sapiens
cataggaacctgatggtcctgtaataaagtcatgtcaaaattacaaatggaagtgagggtggagctggtcagggttgagctgggtttttaatgggaacctgggagtgaaccaagacttgctgaacatgttgggggttattgagtgggtgtaagaggaatctatctaacattgcactgatgcccttttggttttaatccttatgaccaagtatgagtctttcaaaacaatttgtataatcctccttatttttcctttcaaacccttcaacttcctttatctccccaaataatctcgcatctattgccacttctttgcttacttcataataaacttttttttttacagagtcttcttctctgttaagtasaccatatatgttgttgccacacaagatgagtaacctggttctatggacagaaagggtcaaaaggatcccattcctcaacagctgggagtgatgta

SEQ ID NO: 110405 - DNA, 463 bp, Homo sapiens
cataggaacctgatggtcctgtaataaagtcatgtcaaaattacaaatggaagtgagggtggagctggtcagggttgagctgggtttttaatgggaacctgggagtgaaccaagacttgctgaacatgttgggggttattgagtgggtgtaagaggaatctatctaacattgcactgatgcccttttggttttaatccttatgaccaagtatgagtctttcaaaacaatttgtataatcctccttatttttcctttcaaacccttcaacttcctttatctccccaaataatctcgcatctattgccacttctttgcttacttcataataaacttttttttttacagagtcttcttctctgttaagtagaccatatatgttgttgccacacaagatgartaacctggttctatggacagaaagggtcaaaaggatcccattcctcaacagctgggagtgatgta

SEQ ID NO: 110406 - DNA, 593 bp, Homo sapiens
ggttctgtgctccctttaggatgtacctaagacctaggttttagtttccaagtgtccagaagaaagcgtttgacatacccatccaaataggcaggcattcaacagcagtattgatctgcctccaggtcataaaatgacctgttgccacagtcagggcagtagtcagtacagaacaagatcctcttggggggtgccttaagtccctcactctgttcatcagctcagccctaatttgagcaaatctgctccagcagagagtaccatcagcaccataactctcycggggggcaggatacagctccacacataagtttttgagtatgattgtgtggctcagcaggttctccagggtggccatgcagatgggatttccacagaagctgaaggtgttgagctcaaagcagcggctcagggcaggcaggatggcgttgacttgggagtctatgatgccacagtcatctaaatccaggtactcaagggtggctgcaactttttctaggagaatttggagaggcacaagactataattggtcagtctgatgccactcaggtccagggtctttagttgactgatactcgggcactgggataga

SEQ ID NO: 110407 - DNA, 593 bp, Homo sapiens
ggttctgtgctccctttaggatgtacctaagacctaggttttagtttccaagtgtccagaagaaagcgtttgacatacccatccaaataggcaggcattcaacagcagtattgatctgcctccaggtcataaaatgacctgttgccacagtcagggcagtagtcagtacagaacaagatcctcttggggggtgccttaagtccctcactctgttcatcagctcagccctaatttgagcaaatctgctccagcagagagtaccatcagcaccataactctctcggggggcaggatacagctccacacataagtttttgagtatgattgtgtggctcagcaggttctccagggtggccatgcagatgggatttccacagaagctgaaggtgttgagctcaaagcagcggctcagggcaggcargatggcgttgacttgggagtctatgatgccacagtcatctaaatccaggtactcaagggtggctgcaactttttctaggagaatttggagaggcacaagactataattggtcagtctgatgccactcaggtccagggtctttagttgactgatactcgggcactgggataga

SEQ ID NO: 110408 - DNA, 571 bp, Homo sapiens
gcttcaatttcaaaaacatttacttacgggtctttctatgctttgcattcaataattcaactcaacacaaaatgctggcgtcattctcatcttttaaaggaatgataggcatgcgtccagctacatgataaacacagacttgtattaaatttatttatatttgaagtttgactataagttgcagtagtctrcataactaagaatctctattactctaaacacccatattttcagatgttggttttcatattcaatgtttcaagactgaaggtacaagtgaaattattatcaaaatatgatccatgcacacctgcattagaatcacatatgatatttgttaaattctgagttttggagaacttactcagacctaatgcatcgtaatgcaggccatgaatatcttgacacagaataaataacaattgagaactgcatttcagaaaagtttcttagctgattcttttgtttcacaacttctctctagtacaagagcccagctcccctctccagctccattagagcctctgggatctattccaccatcagaataacaacaacaacaatgataata

SEQ ID NO: 110409 - DNA, 533 bp, Homo sapiens
tattttaacagaactttggtcttagatgtaggatgagaaagcatcaaaaactgaactggaaacatttacatgtacagtgtcagcaagtgttcatgatattsaccaagaaagttgggattaacagactaaatttcacttggtcagagcatatttgtaaacctttaaaatccaatgaagacacgttcaaacaaggaaattgcaaaaataaattctcatctataggtaggcaaaaaataaaatatgatcttcaattaactcaggcactctgtaggtgaagatctgcagtattgcactccagccaaaatttcaagctagtaaaaatcattgttaaagaagattttatatgtagcttctttttttttttttaatgtgagtaagggagacataataagcttgtatactaatggtattacaagagttggaggtaggataaaataatgttgggtcagttatttcttagtgcttacaaaatgggtaaaagtttatgtaaataaaatggcttgccttgcctagattatacagtaggtttgtgc

SEQ ID NO: 110410 - DNA, 533 bp, Homo sapiens
tattttaacagaactttggtcttagatgtaggatgagaaagcatcaaaaactgaactggaaacatttacatgtacagtgtcagcaagtgttcatgatattgaccaagaaagttgggattaacagactaaatttcacttggtcagagcatatttgtaaacctttaaaatccaatgaagacacgttcaaacaaggaaattgcaaaaataaattctcatctataggtaggcaaaaaataaaatatgatcttcaattaactcaggcactctgtaggtgaagatctgcagtattgcactccagccaaaatttcaagctagtaaaaatcattgttaaagaagattttatatgtagcttcttttttttttttwaatgtgagtaagggagacataataagcttgtatactaatggtattacaagagttggaggtaggataaaataatgttgggtcagttatttcttagtgcttacaaaatgggtaaaagtttatgtaaataaaatggcttgccttgcctagattatacagtaggtttgtgc

SEQ ID NO: 110411 - DNA, 630 bp, Homo sapiens
ctgcacagtgccttgggactcaacagactacacatctccacatccctggagccacagtgacatcctcaacatgtagctaccactgctgctgactgctgccacttgggccaaagcatgagccaccggcagggaccctcccctgccaagcagccaagtagggggattactgttcatgaacaagtgcctcgaggaacaaatgccaccttctgcacctgccacctgaggctgaatcacatactcaccagctgtctgcctacagctgctgaaagcaaacctgccctccccagcagcagggccacacccatgacctccataaccagggcctgggcatcaccccagaccagacractacagccagcacctatatgtaccaccagggagcctgaggacaggtcttcctggcctagctttgcccccaccagtgcccaagcacactaactatggacttggggatcaccgtgcaccattcaccatctttggcacttgagcactcttcctggggctcaggcagcctgatgctacccccacagctggcactcccctgcatatgccatctgtgggcccagggactggtctgcccagctcatcacagccagcaccaatattaacatggactgggagccagagagt

SEQ ID NO: 110412 - DNA, 676 bp, Homo sapiens
tttaataaaacttggaagatacatgattaatttaattattatcaacacagatttcttagaattaaataagagaatggtgttaaagttaacttttctctctggtggtctttgtgtttctccttttctaaagcaaggtccttagggaaaaaagaagtaaagggaaggaagaaaaggctttataaacgtaaagataaccgtattttcccacagaggtcatccagtgaaatgataattttaaaattcttttttttttcttttacttgaggcttttgtgcctgatagagatcttttrttaattttaactaagtagtgaccacagggcaagtaagaacaatataagaagcaaagataaaaatcttttatattcccacaaatatttatcattttcttttgcagtgcactatacttgttattaagaaagttataatgaagaaatgagaattagtttctttttttatagactttttctggggactaggacacagatatattaacaaatgatatgaatatagagtaaatatcacatcaaaatagacatatgttcagaatgccataagaacataggagaaaaacataaaatctaatctggcaaggaggccatgatgagtgaatcgacatttgactgaatctggccgtttctatatatggtgcccagccccattattgaaaaataatg

SEQ ID NO: 110413 - DNA, 676 bp, Homo sapiens
tttaataaaacttggaagatacatgattaatttaattattatcaacacagatttcttagaattaaataagagaatggtgttaaagttaacttttctctctggtggtctttgtgtttctccttttctaaagcaaggtccttagggaaaaaagaagtaaagggaaggaagaaaaggctttataaacgtaaagataaccgtattttcccacagaggtcatccagtgaaatgataattttaaaattcttttttttttcttttacttgaggcttttgtgcctgatagagatcttttattaattttaactaagtagtgaccacarggcaagtaagaacaatataagaagcaaagataaaaatcttttatattcccacaaatatttatcattttcttttgcagtgcactatacttgttattaagaaagttataatgaagaaatgagaattagtttctttttttatagactttttctggggactaggacacagatatattaacaaatgatatgaatatagagtaaatatcacatcaaaatagacatatgttcagaatgccataagaacataggagaaaaacataaaatctaatctggcaaggaggccatgatgagtgaatcgacatttgactgaatctggccgtttctatatatggtgcccagccccattattgaaaaataatg

SEQ ID NO: 110414 - DNA, 633 bp, Homo sapiens
gtttaattttattgaaagcattttctacatgtatttagatgatcatacgctttttgtttttaattctgttaatgtggtgaatcacatttattgatttgcttattttgaactagccttgcatcccaggaataaagcctatttaatcatgaggaaataatctttttatgtgctgctaagtttagtatgctagaatttcgttgaggatttttgtatatattttcatcaagggtattggcttttagttttcttttttcattgtgtcttttccagattttgatattagagtaacactggctttgtagaatgagtcaygggggagtttcttcttctccaagatttggaatagtttcagtagaatagataacagctcttctttgaacatctggtagaatttggctataaatccatctgatccagggcttattttgttggtagatttttaatcacttattcaatttcagaactcaatagtgatccattcagggttttattcttcctcattcaaacttgtgagattgtgtgtttccagcaatttgtccacttcctctagattttctagttgatgtgcatagaggtattcataatagtctttgaggatgttttatatttctgtggaatcagttgtaatgtcac

SEQ ID NO: 110415 - DNA, 645 bp, Homo sapiens
gcaagtttgtgcaacaatttaatgacacattttaaatttaaaaaaaaaaaagaaaaaaaaacttggtgcaaacctggaaatttgtaaatatagaataggacgcaggctttaattactagtgaattgttaaataaatctgtttggtttagttttggttattctaaattctattctaaaaagaatttcttgtattattttccaagagcttataataaagtaccccttcaagtgtaataatacagacacgtctaatcgaagtgagccagctcaccatctgctcacagttctgctacttaagcagtgataacactaaaaacagtctgccagagtttcagttatgcaaataaaataaatggtgggactcagactatcctagctttgcattaatttgtrtgtcttcagaatgacaccaaagtagaaacagttcttctgtgtattatgtcaaaggaatatattttataaaagctctctgtcaagtggaaaattagtttcaagatataaacagtttttgtgcttaagtttactaaactaataaattttaatcatgataattacaacaataatatacataaataaggtacgtacagcttattcctcctttaatttgcttaggggagggctttatgtacctgagaggaaaaaata

SEQ ID NO: 110416 - DNA, 657 bp, Homo sapiens
tattttttaactaaaattacttggtatattatgaattattcaattgttctatatttaattcctaaaaatacatgtgagaactcaatctcatccaaatatatactgtttggaaaaaaacaacaatactaatatagaatgtccaaaatctaagaattaactaggtatttcaaagccaaaaagtttcctgttcaacataaattgagcatataaacttacattaatttttttcctaatttttaaagaaaactttaatgaacgtaagaacatttgtttttattttttggtagtaaagtaaatctgtaaatgaaaactaaccataattgatttagaggcttatcattaatgatcattagttagaggctgatcatcaaagtctaacatacgtgaaatgtgactgtgcagctatgcagttgataatttattattataagagagaaagaaggacctggaaaaaaaattatttcccaaattttccaaactggtctctagtgaagcttgagcaagtaatatacattgcagcggatatttatccattgaatgtgaatttaaattttggaaaatgtacaaagaatttagagtsaggactgtgcatacaatgatagaactatagatacattcatcagatacgaagtgtgactttgagttatttaaattgaa

SEQ ID NO: 110417 - DNA, 551 bp, Homo sapiens
attttttaaagcaacatatagatatataacccatattttgagatgtacatcctcttattgtttctagtatctgatcaaaaattttcatccaattagaggtaatatatactttttgcagataaaaatattgcagacagaaaattcctttttgttgttttatattttctaaaatctacagtgctttccaactcacaaaagagtcagtaaatctaagatatctctatgacctctgaatatgtatctctcaacactggctgaaatattttacaacttttggtgtttgatatgattggaaacagtcatgtttagttgttctgtagtgacggagttatcacacactaacttaattgcttagcaatcgcttgttgaaactgtaggggaagaayagcacatttttattcaacatagttcttagttggaaggaaaccagtaacaacaggtaaattagcaagagaaaaacaaacagaagtttattaacatgtatatttcatatatacatgaatatacccaagaaataagtcattccttctctaagagatggctttgaattc

SEQ ID NO: 110418 - DNA, 573 bp, Homo sapiens
aattcctatcacctagggacatcatagctgtaaaactataccacacacaattatgtacactacataatacttgataatgaaaacaaatgactgttaccatttatatactatagtttttatctatataaaaactatatctatatggttatatatatataaccatatatataaccatatagatatagatataactatatacagttatatatagttatatatatagctatatatgatrtatacatttatctatataaaaactatagtataaaaactatagtttttatactatatgactgttaccatttattatactatagtttttatcattattttagggtatcctaattgtacttattttttaaaagttagctgtaggcaaagaaaggctttcatgaggtattcctgaagaagaaactgtcatcataggaggtgacagctctatgcatgataatgccctaatgacattccagtggacaagatttagagatgaataacagttataataattattctgaccctgcataggcctaggctaaggtgcgtgtttgtgtgttaatttataacaaaaaagtt

SEQ ID NO: 110419 - DNA, 602 bp, Homo sapiens
gtggaaaagtacaatagagaaagcgaaaattgcattagagggtctccacagcagaattaataaaacaaagtaaagaatcagtgcactcaaagataggctatttgaaacaaacaggagagaaaaagtaaaaataaataaataattaattaaaaaggaacaatatatgctgataccaatgagatatatggggtggtataaaaagagaaaatgtaagggtcattggccttaaagaaagaatagaataacaaaaatggctaaaaagctaaatcaaagtaataataacagaaaatgtgtccaacctagagaaagacataaacctccaggcagaggaaggtaaaaaatcaccaagcaaatgccatgcgaataagactactccaaagcatataataatcaaactctagaaggtccaggacaaagggaaaatattaaaagaaccaggaaaaaagaagaaaatgacacataatggggcttcattacctctaacaacagacctctcattggaaactttacgggctagaagatttgagyaacacattcaaagtgctgaggggaacgatgacaacaaaatgcaacttccaactgagaatattttacgcagcaaa

SEQ ID NO: 110420 - DNA, 591 bp, Homo sapiens
attttgagtgaattttttatatggtattatctcacacatgctagaatcactattataaaaaaataggaatataagttttggtgaggatgtagagaaagggaaactcttgtacaccgttggtgggtatataaattagtaaatccattatgtgaaataaggaagtttctcaaaaamctaaaaatagaattatcatatgaaccagaaactcaactactaggtatgtcaaaggaattgtattagtctattttcattcacatataaagaaatacctgagactgggtaatttataaagaaaaataagtttaatggactcacagtttcacatggctggggaggcctcataaacatgatgaaaagtaaagaaggaacaatggcaagtcttacatgacagcagaaaaaagaacatgtacagaactgctctttataaaaccatcagaactcgtgagacttactcattatcatgagaacaggatggcataaacctgcccgcatgattcaattatttcccaccagttccctctcaaaacatgtggggattatgggagctacaattcaagatgagatttgggtggaggcacagccaaaccatat

SEQ ID NO: 110421 - DNA, 591 bp, Homo sapiens
attttgagtgaattttttatatggtattatctcacacatgctagaatcactattataaaaaaataggaatataagttttggtgaggatgtagagaaagggaaactcttgtacaccgttggtgggtatataaattagtaaatccattatgtgaaataaggaagtttctcaaaaaactaaaaatagaattatcatatgaaccagaaactcaactactaggtatgtcaaaggaattktattagtctattttcattcacatataaagaaatacctgagactgggtaatttataaagaaaaataagtttaatggactcacagtttcacatggctggggaggcctcataaacatgatgaaaagtaaagaaggaacaatggcaagtcttacatgacagcagaaaaaagaacatgtacagaactgctctttataaaaccatcagaactcgtgagacttactcattatcatgagaacaggatggcataaacctgcccgcatgattcaattatttcccaccagttccctctcaaaacatgtggggattatgggagctacaattcaagatgagatttgggtggaggcacagccaaaccatat

SEQ ID NO: 110422 - DNA, 591 bp, Homo sapiens
attttgagtgaattttttatatggtattatctcacacatgctagaatcactattataaaaaaataggaatataagttttggtgaggatgtagagaaagggaaactcttgtacaccgttggtgggtatataaattagtaaatccattatgtgaaataaggaagtttctcaaaaaactaaaaatagaattatcatatgaaccagaaactcaactactaggtatgtcaaaggaattgtattagtctattttcatwcacatataaagaaatacctgagactgggtaatttataaagaaaaataagtttaatggactcacagtttcacatggctggggaggcctcataaacatgatgaaaagtaaagaaggaacaatggcaagtcttacatgacagcagaaaaaagaacatgtacagaactgctctttataaaaccatcagaactcgtgagacttactcattatcatgagaacaggatggcataaacctgcccgcatgattcaattatttcccaccagttccctctcaaaacatgtggggattatgggagctacaattcaagatgagatttgggtggaggcacagccaaaccatat

SEQ ID NO: 110423 - DNA, 591 bp, Homo sapiens
attttgagtgaattttttatatggtattatctcacacatgctagaatcactattataaaaaaataggaatataagttttggtgaggatgtagagaaagggaaactcttgtacaccgttggtgggtatataaattagtaaatccattatgtgaaataaggaagtttctcaaaaaactaaaaatagaattatcatatgaaccagaaactcaactactaggtatgtcaaaggaattgtattagtctattttcattcacatataaagaaatacctgagactgggtaatttataaagaaaaataagtttaatggactcacagtttcacatggctggggaggcctcataaacatgatgaaaagtaaagaaggaacaatggcaagtcttacatgacagcagaaaaaagarcatgtacagaactgctctttataaaaccatcagaactcgtgagacttactcattatcatgagaacaggatggcataaacctgcccgcatgattcaattatttcccaccagttccctctcaaaacatgtggggattatgggagctacaattcaagatgagatttgggtggaggcacagccaaaccatat

SEQ ID NO: 110424 - DNA, 568 bp, Homo sapiens
aagcacttgaatcattcccaaggatatgccatatgtgaggtaacaaaacaagtcacaaaacattcaaataaattgaaataatatcaagtgtcttctctgaccataatgtaataaaactggaattttggaaactatacaaacacatggaaattacacagtatgtttctgaatgaccagtgggtcaatgataaattaagaagattaaaaacctcttgaaacaaatgaaaataaaatcacaatatatcaaaacctatgtaatatagcaaaagcagtactargagggaagtttatagctataagtaactgcatcaaaaattaggaaacttcaagtaaacaacctaataaagcactttaaggaactagaaaagcaagaacaagccaaaccccaaattagcatatgaaaaaacatcagagcagaaataaataaaatttaaatgaagaaaacaatgcacaagatcaatgaaataaaagttggtttagaaaagacaaaattttaaaaaagatctttagtcagactaagaaaaaaaaagagaagacccaagtaaattaaatcagaaatgaaaaagaa

SEQ ID NO: 110425 - DNA, 498 bp, Homo sapiens
aaaatacaaaaattagctgggcgtggtggcgtgcacctgtaatcccagctacttgggaggctgaggcaggagaatcacttgaacctgggaggcargaggtagcagtgagccaagatcacgccactgcactccggcgtgggcaacagagtgagactccatctcaaaaaaaaaaaaagtttaaaaattagccaggcgtggtggtgcacaactgtagtcccagctactcaggaagctgaggcaggaggatcgcttgagcccaggagttcaaggctgcagggagctatgatcgcaccactgcactccagcctgggtgacagagggagaccctgtctctgaaaaaagggggtaaaaaaaggattggggaccatgagttctgtgccatgcttgaggcctggatgagccacgcctgaggagctgggctgggtggccacggggaggctgtgctgggaccgagtccagcccccgcttcccgctcccgtggccaggagctgatccgca

SEQ ID NO: 110426 - DNA, 544 bp, Homo sapiens
cagcccaccgcctcccccgcctcggctccaattcaggaccgatctccacgcccctgccccttgccccttcagggactcagaccgccagcctcgagagcrggggactgccacgggctcaggatgtcgcatccctccagacccggagcgcacgccggtctccccgccagcccccatcggcctcccctggcctccccgagggatgcctgcacctgccgggacgaagcggccccgctgcccgcgaacgcgtccgggagacaaagagccgcgtcccgggcccgacccctcccccagccgggcctggcccgtcccagcctctccacctgctcgcgtcggctcacctccgcctccgcctccggcctcctcacagagtcgcctggggtggggcccgggccggagcgacgcgttggcgccagccgagagaggcgaggggagggggctgcgggctgcggcgccgggggagccgagccggtcccgcccctcggccgcgggcgggagagccgggggcgcgcgctcgatccggacccgggagcgcggccggcggaag

SEQ ID NO: 110427 - DNA, 615 bp, Homo sapiens
caccacaatggaaataaacagtgattcataaaagaattaaaaggtggataagaatgtaacatttcatctcacaattaaagaaatgacaattaaaatagtgattttaaaatactatattcagcctagtgttaataaagacatggggaaatgcgccttttcttacactatttgagggagaaattatctggaacataacttggcgatgcataacaaaagtccttaaaatatccagtgctgactcagcaactttatttcaggattactttttttccctaggaaattgccaaagacagtagcacagaatcactaattatacattgttctagttgggaacacaaatgtgaaatcaagtttccaggactggaatcccagctgcaatacttatttttcactttaggtatattattttgtgcctcagttccctcatctgtaaaactgggggagaacaaaatacctaccccgtaaggttgttgaggcttaggtgaaataatgcatataaacatcttaaactcataatctgagacagcaaacactcaataaatttyacttattgttattagtgaaaactggtaacaacttaaatatctaacaattagaaaactttaaataaattgt

SEQ ID NO: 110428 - DNA, 590 bp, Homo sapiens
cataattgaactacttctaaagcttgtctttaatacagttatgattatgtggccacatctttcttagtttttttattacctgtaatctggctataataatgctaaatattgaagtataagtatatttattacagtaacagctattgtgtgttgactgcttgctatggacaaagcagtaagacagcactttccatacattatcttttagaatcttcttgctaatccctgaaaataataattaaagygcagaaagtccaataaattacccaaggtcatgtttctactgactgaaggagctgtggttgaaaactaggtttatcagacccccaaatcagtgcttagagcagctgtgctcactaccttcacacacagaaacacacacacatacacagacacacacacacagacacacacacacactaagcaaaactactgaacactctttgccatcattctgctgctatttagacttaaaacaaaaatctaattaagaacaagcaggagaaaacattttacaccaaactgaagctggaagcaaatttaagtctgacaataccaaggtttggcaaggatattcaaaagcctcataa

SEQ ID NO: 110429 - DNA, 664 bp, Homo sapiens
ctcttgtgatctcatttaacttaatcactctatctccaaatacagtcacactctgaggttaggatttcaacatacgaattttgggggacataattcagcccatagcacctcccatacatgataagagggtatggcaggcagactgatgtgggggatgggattaggaggtgatacaaacagtgggaagtcttttgtcttgaggctgctagccctctataaattagaaagatgaggtaacttataataagtcatctgctcaaagtcttcaacacttgtaaaaacaaatcttataaagctgattttactgctaatacactgtgctttttaaaaggaaaccactgtatatgagactgtgtttgatgcagaagscattgatccacatatggtgtttaaatatcttttgatttaagtgcatttcacctatttagatattaaactatgtgaatgaattacttattcttttataaaatgagactgggtcctaaggcatactattttagggccaggcaggtaaataaatgactgtaaggggtcagataaaacagcaaattcaatcatcaatggcagctaatacttgggggacatggctgtcactcagctccatcaaattactgggaagaggccttgtgttgccataattttgatacttcaaaaggaagataga

SEQ ID NO: 110430 - DNA, 603 bp, Homo sapiens
ttttaaaaacacagattgaatgagattattatcatggagagctcamgctgtcgttctttatcatttcagcagtttataaaagcaatttttaatacttcaacaggtaacaattcaattaaaccatcttattaaaaagcacaaggaaactatgtgctccattatcttcatagttgtgtgcatatatttcaggtaaaatgtggtaactttttaattaatttgtggaggagcaatgagttaaggagtcaataaattacagattaacaaaccaaagttagaaaataagctggtcttcaaatctcacatgcagcagaagagaaaaagcgacaaatatgggcaatgacacagctatcgggcagatgttgtcaaggtataaagcacaagacaggctgagctcacatgaaaaattcactactcatatacttctctccctataattctcactggctataaagcaagatgtggaggaggtaatagtgctttgctcaacttttatttattttcatgtactctaagatggtaaccaaatattcctatggcctgagatcctaagatacaaataaagcatctctgaaaatcagtggctgaaattatatgccatgtttt

SEQ ID NO: 110431 - DNA, 569 bp, Homo sapiens
gttttcaagatcagtattataccctaaccatgagtagaaaagcttataatctaatgaawccaaaggaaaaggattagtaagggttttaaaaaactttgagactgcaggtcattccaccctttggtgacttgaatgtaacagaaaattcatttctgaggtcagagggcagataatgcccacaagtagaaagaagtttggatggattacttttaaagtatataattacataaacatcaattgtctattatgtgtaggtattgggaacctagggacaaacccagagctgcataagatcaaacaagcacaattcatgggatttattcataagatgactttatttttacgtcctaccactctcttaaatttattgccctcttaaatttaagcatgggcaagtgcttcccttagatgaaagctcagacagtttgaagccttttctgatgagtattaggccatgcaaattattaaatctaagaatataaatgtctgtttccatgtgatagtcacataatagttgatttaaagttgaagctgccgcttctccagtttatttttgctgtagaaggtaa

SEQ ID NO: 110432 - DNA, 636 bp, Homo sapiens
ctcccagcagtttgcttttttctatttatatgttgaggcaattgcctttcatgttggaggctttgctaagatatctggcagtctctgcttgtctgcttatattcttaagagtgggaggctaaaaagctgatgaaaagctctatgtgcatgagtggttgtctatggacattgcatctcaccgcaaggtgatatagctaggctggttcatcgggaaaaccccagtgtcagtgtttttaaggttggtgcttttgggctggttggattcactatagaaaaatcctcccatacccagcatgtaagatatacaaccgcctgcccactttgtgctggttaagtgtaggaagagggcttgaggagatggctggtagtctcaacgttcctagttacatagactctcatttaatttccatatttttaatattgaatttcgtcttgccctatgaagaaattcctttgtcccctttttgggtaattccaaattatgtacagtttttgtaaactaatagctgctgctgaccacaaaattgaacaggtctctcttcctactttgaggtaataggcacatayaatcttaactaactagaagcctctccttctagattttgagttcaaaattagtgacacaggatgtgggga

SEQ ID NO: 110433 - DNA, 566 bp, Homo sapiens
gctgctgaccacaaaattgaacaggtctctcttcctactttgaggtaataggcacatacaatcttaactaactagaagcctctccttctagattttgagttcaaaattagtgacacaggatgtggggatgcttgggatcatatttgtaactgtgttgggcaggtctgattagttttttgatgtgaatatttttctgtagttcttgctatagtgtcatttagaacgttgcagatttatgcctgtattcaaagaatggcctcccaggatttgattaattttgtgagccccttagagcctgccaataaattctgtttgccaaagattaccagcatcagcttctattgcttgaaatgaaggatcctaactgatacaactgctacttctcaagtgagatggcaccaaatgatagcacatataatacytaagttccagttccacctggttattatatagcttatatgtggtcacattgtgccaaaatacatgtaccattggtgtaaaaattatactgtgcctatgcaaattttgtaatcgataaaaatggatggaattgattaagaacaaaa

SEQ ID NO: 110434 - DNA, 623 bp, Homo sapiens
aattggacctcacttcacataaattccrgtttttgttgaaatcctctgattcaatagcaaaacaaaacaaaagtccctcttctgcttgctaactagattaacttgggctagttcctgattttctctgaacttcacctgcctcatttttaaataggaaaataatacctgttctttcctatctcaaaaggttgttgtcagaatccaatgaggtaattatgtacgtgacagcagtttataaactgaaaagcacttttaaaaaaaattagcctgatgttcaaataggcatagacaacattctctgtgtaatgttgtcttgtagcaattcagtgattcttacaaaagcaaatacttacatggaaaaatattcaccctcaccatgaaaaaagaaatgtactttcaaacaacaaaagataacattttttaaatttaatttattaaaaggaccatttagaaaataaggttacccagtgccaatgagactggtttgaaattgggactcattcaatgcaggtaagatggtaataatagtttagtcaaataatttgacaatatgtctattgagtctttaaacatttcataccttttacccactcatttcattcaccaagaatcactacaattgc

SEQ ID NO: 110435 - DNA, 369 bp, Homo sapiens
aaaaatattcagaatgcagaaacttaatgcatctatgacaacctaattttgttataagtcattagtcactcaatgagcaagcacctttttaaaattattacagcagctggtaccttttgactttttttttttaattaatggagttggggtgttggtatgttgccaggctggtcttgaactactggcctcaaactatcctcctccctcagccacccaagtgctgggattacagrcatgagccaccatgattggccagaacaagcgcatattaatcacctaccatgagccaagcactatgttgtactctggtgatgaaaagacaaagataaatactgttcttatccttgaagagttaatgagcttttggag

SEQ ID NO: 110436 - DNA, 577 bp, Homo sapiens
gatctctacctgtatcttcacatggctctctctctctccctctgtgtgtgtgtgtgtgtgtgtgtgtgtgtgtgtgtgtgtgtgtgtstgtctgtctgtctgtctgtgtccagatttcccttttatagggacatgagtcatattggattagggtccaacctaatgacctcatcttaacttacattaactcaaattagagttcttggtgcccttctcccatatcctttccccagctgcaacctgttaatcttttggtccttacctttttagtaagtggcactaccacccacacagccaaaagcttggcttcttttgattctaccatttccctcaactcatcctcatacatctgcaatccttcagcttgtcttattgcatatctctacatgtatttccaatttatcaatatcttttcgttttcacactcctgctcagtatgaacaacataatttctcaccttcagtagcttcctaacttccacccttgccttgctctcatcagtctttttaaagagaaaccaaatttctacacacactggaagatgggggtcctctttccttgcttaatgcagccatga

SEQ ID NO: 110437 - DNA, 419 bp, Homo sapiens
gaattcagcatttgaggtcccttgttaattgacaagtgactagatctcagagcgcagaatgatggcttctcagctatactccccatagtacaatgttttggtgataagcttacctatagtctcactatcgtcaacctcaaactgacaccaagcagactgaagaattaggttaactggaatccaatctattgtttttgactgactgtttggaaagccagagaattgagtgcagaggactagctgcgtattaaaggcagaaactccacatttgtgcttagcaatcatttaccacttatctgggtgactcaaggttgacaatgaatttttaaatgtatttgtattcatatgtattaattttttaaattcatgtktattaactggcaagatcattcctcagtttccccttcactttatggcat

SEQ ID NO: 110438 - DNA, 586 bp, Homo sapiens
taagtgaggtaatgtgtatagagtgcctaacacagtgcctagacacaagtgctggctaccattttcatcatcatttccatcatcatcactattgccctttaccctctgagaggttgtcagagggtagagaagggaaacaaagaacaagtagtattatcttggtttgtagctgaggacrctgggaccccaaaagtcaaagtgattgacctgaactcccactgtagatttctgggacatctgggatttaaaaacataatagtaccaatcccttatgtcaataaaccatcctaccatttacaacttctttttataggcattagctcatttaccgcagcctgagacttgagtgattttgcccccattttttaatagattttattttttagagcagttttaagttcacaataaaattgagcagaaaatacagcaagttgggagctgaacaatgggaacacatggacacagggaggggagcaacacacactggggcctgccagccaggaaggggaaggagagcatcaggaagactagctaatgcatacggggcttaatacttaggtgatggcttgataggtgcagcaaacca

SEQ ID NO: 110439 - DNA, 606 bp, Homo sapiens
ctgttctgttctatgtctcctagaaccaacaatgtgtgcccatgtttcctgtgtgggttcacttaccacatgtccctaacagctgcctctgctgaacgtctatcatggggatgaggggcagtgtggtggtgctaggagcacagctctatctaggggtggaccaacggggtttgagtcctcactctgccccctttccatctaggagtcctttggcaagtyacaactctctgagcttccagttccttggctggttcgaggaggacaacaatggccctacctgaggtgatcagcagaatatgttccaagatactcattaactgcctggcaccgtgacgagcacagaccacattcatttctttccctgtattgtgaatatgagttaaggctctgcctctcctcctctgggctggaagcctgctcttccacataaaggaattccaggagctggaggtaaggggtgaaatggtttcccaaatgggattaagagccagcagattcggtctgagttcttcttctgctacttagcagataagacctgcctcaggtgagttgcttaacttttctgagtctacaagaagtgcctacatcacagcaaatgctcaatag

SEQ ID NO: 110440 - DNA, 617 bp, Homo sapiens
accacatgtccctaacagctgcctctgctgaacgtctatcatggggatgaggggcagtgtggtggtgctaggagcacagctctatctaggggtggaccaacggggtttgagtcctcactctgccccctttccatctaggagtcctttggcaagttacaactctctgagcttccagttccttggctggttcgaggaggacaacaatggccctacctgaggtgatcagcagaayatgttccaagatactcattaactgcctggcaccgtgacgagcacagaccacattcatttctttccctgtattgtgaatatgagttaaggctctgcctctcctcctctgggctggaagcctgctcttccacataaaggaattccaggagctggaggtaaggggtgaaatggtttcccaaatgggattaagagccagcagattcggtctgagttcttcttctgctacttagcagataagacctgcctcaggtgagttgcttaacttttctgagtctacaagaagtgcctacatcacagcaaatgctcaatagtggtcacaggtgaggaggatgaggatgaggatgaagtgagtcattctgagcccttcctgcttctttcctctccac

SEQ ID NO: 110441 - DNA, 617 bp, Homo sapiens
accacatgtccctaacagctgcctctgctgaacgtctatcatggggatgaggggcagtgtggtggtgctaggagcacagctctatctaggggtggaccaacggggtttgagtcctcactctgccccctttccatctaggagtcctttggcaagttacaactctctgagcttccagttccttggctggttcgaggaggacaacaatggccctacctgaggtgatcagcagaatatgttccaagatactcattaactgcctggcaccgtgacgagcacagaccacattcatttctttccctgtattgtgaatatgagttaaggctctgcctctcctcctctgggctggaagcctgctcttccacataaaggaattcyaggagctggaggtaaggggtgaaatggtttcccaaatgggattaagagccagcagattcggtctgagttcttcttctgctacttagcagataagacctgcctcaggtgagttgcttaacttttctgagtctacaagaagtgcctacatcacagcaaatgctcaatagtggtcacaggtgaggaggatgaggatgaggatgaagtgagtcattctgagcccttcctgcttctttcctctccac

SEQ ID NO: 110442 - DNA, 553 bp, Homo sapiens
atccaggtggatcctggatgccatcatgagtgtccttgtgggagagaggtaagattacagagacacacaggggagaaggtgtgtgaccctggaggcagagactggagtgatgtggccaccagccacgggagccggcaacccccagaagaggcaaggaatgggttttctcctagagcatctgtagggagtacagtcctgctgacaccttgatgtgggacatctggcctctggaatggtgagagaatacatttctgttgttttcagccacctagtttgtgggcatttgttacagcagccataggacactgttctaagcactgtgcagcaatggctccacagatgccttctctgccatttcccagagaatgtggggaacagggagcgagaggggagccaacgtccaccaagtccagttgggggctacaccrcttcaggagctctcaccaggggcattgcttttcatccccataacaatatctatcggaagaaatcattatccccattttgagggtgaggaaactgaggctcaggaggacaagagactcatgcccat

SEQ ID NO: 110443 - DNA, 561 bp, Homo sapiens
agaagtagataactaatatacccacgtactaatgactgacaatgagaagccatgaggtctacagacttgccaggttgaagtggttaaagctgtggcttcttcctcctgaagtggcctggcgggaccagctaccacaagtgggaattgcaatgatgataatgattatgcagccaactttgatggtgagagggaggagaacaggaggatcaattagtgaatatttcacaatttgttgcaatcccactcccaacctcaaaagaaaaatcccaagatgtgatcatttcacttggactatctctagacgtccccaagatagagcagtcggtttggtttttgagaactgtggccagctgggaaatgtacctctgatattttctcctttcctcagctgtctcttccatcggctgcctcttccttctttctttcccctggtttcattggcattacactcccccaataaagctttaacccagcttttgcctccactactctatttcaggtaacctmcctgcagcaaatatattacttaattatacttctaaaagtacaagttcatgtgga

SEQ ID NO: 110444 - DNA, 556 bp, Homo sapiens
agtaatgtgaaaaattatatttaaaaatggcaataacaaaagcaatcatatatcaagtttcaaataaaagatatttagtttttccttagtagacacttaattacattgaatgatgaaaatatattggctatgtataaattagagaaaaaccaagggacaaagaaggatgacctgaaaatgagaaactgtgccagtcgctgcatagaggatgtgaaatatctatggtcttgatcttacggagacttggagatgtagcgagtagtaaattatacctaatcggaataatttgtgagaaaattcagaaaaactaattcaagcaaattaacattttgaaagtgtgaatgattcataggattattatactaaactacatcttggttccaaccgcrtaagtcaatattatatttatacatttacatacacaaacaatagcctgctagggcatattctcagggtgatcttgaaattttttaagcaaattttgttgacagatataaaataatcttaaagcagtgtttatttgagaataaatattctaaactgcaatttaccattg

SEQ ID NO: 110445 - DNA, 623 bp, Homo sapiens
agtacaggctcaataaatgagacacaggtgaatttttattggcgacaagtcactgtgcaggtgcagcagttatattcccatgtctgctctatgcactctaaaaagcactgtctgtggggcagcttccccagtggctaacaggaaagtatgggaaaagacattttgccgcctcatggcgtggatagctagctagctgattagctggttatcaactccccggatttcctcagcacctgtcattagtggcacattgtaggccctcagatttttgtttaagtcatctggagccatctaattctgcttttaagaagcatgtgagcaagaaagattctttctaacacagggcatcaaatgaagttcaaacatggccttggcatgggtgacagattataggtggatttcagttacctgataggagttgagaatgatggaatctacatggtggcagatttactctcacckccctgactgttggcagagaagggcctgcctctggctggtccaatctaatatggaaggagaggatgagctgttcttcagaggctacagggtttgaataaatgcagccataaatcccagaagcagttgcatgtattagcttagacataggtcttggaggcaca

SEQ ID NO: 110446 - DNA, 537 bp, Homo sapiens
tgcattcactgagcacattccttcatctcaactgtttgtttattcatttaaaatgtaaagttggcttaatacacaagamcaaaaagtttctttaaaaaccacctctcatttaaggaccaatttgatgatcacctccacactgctgcctttgctgactaaaaatagattaggcccacagagctttgtacattttattaaagcatttatatgagtcatcacatttaattctatattaacactctgcctcctcagatggaacacaaacgcctggtacatggatgctacaatgaaaagaatatgggtgctgaaatcagagagaatcatccaaggtcagaattgaaagtgacagaattaagttaattaaccttgtaagccttcttttcttcatctgccaattggagatgataataatgtctacttactagaagtcatgtgaggagaaattaagaaaatacatggaaaatattaacacagttctcgtcactcaacaaagctgaaatgtgaaagtatttttactagtctcatctccctgatgcc

SEQ ID NO: 110447 - DNA, 605 bp, Homo sapiens
taaaaacccttctgccacttgcccaagtctccctcagacattcaaggttagatatatgcacgattgttaaataagttacaaaagacttcttgggatatttcatcactttaagatgttttcctcctctgcaattccttaatcataataataattatcattactaatgtcataatgataaaaacaaaagcagagctgctattatcaagttacaagaaytttgctaaaagctttgtatttattatcccaattaattttcacaacagccctgtgaaatatggactatcagtatttccattaagaggatgagagaactcaaactctattcatcatcaagttcttaactacttattttcttcttagtcctgaatctctccaactcctgatgtccagccaatcagtcctccactgtatttggtttggcaactctggtgctgattttaagcatgttctaggtcataattgctcaaaatctctgactcccctaacacgatccagcccaaagtctaggctggtcctctgggttggtattttgctaacctgccccatctccacacctgggaatgtctgaaagctcaagtcttattagggtcatttttaaaaagccc

SEQ ID NO: 110448 - DNA, 605 bp, Homo sapiens
taaaaacccttctgccacttgcccaagtctccctcagacattcaaggttagatatatgcacgattgttaaataagttacaaaagacttcttgggatatttcatcactttaagatgttttcctcctctgcaattccttaatcataataataattatcattactaatgtcataatgataaaaacaaaagcagagctgctattatcaagttacaagaactttgctaaaagctttgtatttattatcccaattaattttcacaacagccctgtgaaatatggactatcagtatttccattaagaggatgagagaactcaaactctattcatcatcaagttcttaactacttattttcttcttagtcctgaatctctccaactcctkatgtccagccaatcagtcctccactgtatttggtttggcaactctggtgctgattttaagcatgttctaggtcataattgctcaaaatctctgactcccctaacacgatccagcccaaagtctaggctggtcctctgggttggtattttgctaacctgccccatctccacacctgggaatgtctgaaagctcaagtcttattagggtcatttttaaaaagccc

SEQ ID NO: 110449 - DNA, 687 bp, Homo sapiens
tttgtttgcttgctttttggcttatgactttttttcctttgtaacagaagtgatgccatcattcattctgaatccagcatccccttgaattaagataaagtctgaggccacctttgtgacatggagttatgcagaggggcctatatgtcaactaaaaatccctacttcctttctcagtctaaaagaactagctaaaaactgtataagaattccatccatttactccattccagtcacagagcaaattccaaacctgggcaactttgtgcttgctaattgactttattcagtatcttgatctaaaggttgactgaaggtggagaagaaaaaaatacgaatttatacaaatgacttaactgcatgtaatacaacacgaggcacaagcaagctcagcatacaccaggtgcatcgcagatgggggagtattccttattgctaataaattcaagtgcatgtcttcagtggaaaaagtaaaaatgcaggccccattagtattaatgtagttacttacctcacatctatacagastttttttttgcattatcccaaagctggtagtcatagcatgcacattttgcatcattttcatagaccctcttgtcttcccacacacatctatgaaatgtccactcactcagaatttaattattataatgcatttgtctcttaacaagtaatccagtacct

SEQ ID NO: 110450 - DNA, 615 bp, Homo sapiens
agctcccagatgatgtcaatgctgatgaattgtatgttcaacaacaagatttgagaccactccaggtatttccttcttgtgaaactggctatgtgatgtttcattaaatgagataggcttggatcaggggaagatactgactgcctccactactggacacattcawtgggaggcacacaagtcaagagttagaaattggattgctcttttagaaatgaggctaaagctgtacttaaagaattggaaattactaaaggagagaatcaaggcaaaatttaagtggataagacttcacagaaaaaaaggaattaaaaagagtcaaaaatagtatattaccgaagacctggaacaaaatgggcacttaataattacttgttgaaggaacaaatgaatgtgcccctatttaaaaggcaaataaaaaaaaaaaaaggagaacaatgggtgactgagaaggagcagtcaagaaggccaaatgacagctgagtcacagaagacataagagagaagccttttgctgaatgctgaatagggaatgcatactgtgagatgtcgctgtgagtttgcatggtctttctaagatgttgtagtgggtgatgtggcatgccacccagatgc

SEQ ID NO: 110451 - DNA, 615 bp, Homo sapiens
agctcccagatgatgtcaatgctgatgaattgtatgttcaacaacaagatttgagaccactccaggtatttccttcttgtgaaactggctatgtgatgtttcattaaatgagataggcttggatcaggggaagatactgactgcctccactactggacacattcaatgkgaggcacacaagtcaagagttagaaattggattgctcttttagaaatgaggctaaagctgtacttaaagaattggaaattactaaaggagagaatcaaggcaaaatttaagtggataagacttcacagaaaaaaaggaattaaaaagagtcaaaaatagtatattaccgaagacctggaacaaaatgggcacttaataattacttgttgaaggaacaaatgaatgtgcccctatttaaaaggcaaataaaaaaaaaaaaaggagaacaatgggtgactgagaaggagcagtcaagaaggccaaatgacagctgagtcacagaagacataagagagaagccttttgctgaatgctgaatagggaatgcatactgtgagatgtcgctgtgagtttgcatggtctttctaagatgttgtagtgggtgatgtggcatgccacccagatgc

SEQ ID NO: 110452 - DNA, 598 bp, Homo sapiens
aattgtaccatagtgttcattgatacaatcatagcattgtctatttttctcttcatatttatatgggggggagggcgctggatgcaaaagttgaagatcgtgatgctatgatgttagttttccttagctgattttgagggtttttaaaaataaagcaaggttgactaacctacggccacgggaacaggaccatggttaagcaaccatatagaaagctttgttgaaagaaagtatggcatcttgtaccactgccctgactgtcacaactcctaaccttgccattgcctgcctccccctccccttctccttaagagacaatttctgcaggtggcaggtgagcaagcccaggagaatgctgcaatcttgggggtggttttatttatttcttttttgccaaatagagtgtggattcatttyaggggctagctaagccaagaggcagtggtttgggcttgttgtttgtaacaagaaaatgatccacaccactcccccgattcccgggtgcagaattgtaactcggggttgggcctctatatggagtgaccaaaatgccaaaattgtccatctgcctctgagtagggcaatggaaataccaaac

SEQ ID NO: 110453 - DNA, 554 bp, Homo sapiens
tatataacaaaagctcatagtattatatttacccaaccatatggctggaatttgatccagcttgatcaagcctttcattttcttggaggaccaaaagtaacagaactagacacttaggccatattgcaaagaatattttctttcaattacataatgaatctctcagtttgagaaaataaggaaggatgtccgtgttctactgaaatcactcacatctggtcgggtgcggtggctcatgcctgtaatcccagcactttgggaggccaaggtgggtggatcacctgasgtcaggagttcaagaccagcctggccaacatggcgaaaccccgtctctactaaaaatacaaaaaattagctgggcgtggtggcgggcgcctgtaatcccagctactcgggagcctgaggcaggaaaatcgcttgaacccaggaggcggaggttgcggtgagtcgagatcacaccaccgcactccagcctgggcgacaagagcgaaactctgtctcaaaaaaaaaaaaaaaaaaagaaatcactcacatcctgttatcctttgatatct

SEQ ID NO: 110454 - DNA, 543 bp, Homo sapiens
gtcatttgttccatttcctaggaagcagagctcttttgataatatattgccaaattttaggcctgcttcctaagtgctgctcaacattaaagagatgcttttgaatatcaatttactgtcaaccatagctgatctcactagataatttcctttgtataagaagtcctcaattttttacaccttacatatcaccttcatctgaaaacctgggtcctcaccatgattgaaaacaaacaaacaaacaaacttgctgtaattttgtrttagtctgttttcacactgctgaacaggacctacccaagactgggcaatttacgaaggaaagaggtttaatggagaactcagttccacatggttggggaggcctcacaatcatggcagaaggcaaacaggagcaactcacatcttatgtggatggcagcaggcaaagagagcttgtgcaggaaaattctcccttataataaccatcacatctcgtgagacttactcactatcatgagaacagcacaggaaagacttgcctccatggttcaattacctccc

SEQ ID NO: 110455 - DNA, 618 bp, Homo sapiens
tctgcacatgcatatgtatgtgatcccacagaactgggcagagatggggctgggaaggaagagggacaggcatggactgaaaggtggttctcctcattctgccaagttctattttagagctcagaggaatattatttaaagctaaaccttaattttcaggttactttaaaggaatatttgccaacttaggaggatagaacatgttttatttaacagcttgtcagctagatttcaaaggtttaaatatttagacacatgctatgtgggcctccatttgtattcttatgcataggcctgcagtttcagtgtcaggtatttattttacaggtactgaaatggatcaagtaagtgacttctcttacttctctttctccttctacacaacagcaatatacagccttaaccaaacaggtttaacaacaaattgtacccaggtgtattagtttattctcatgctgctaataaaagatattactaagactgggtaatttataaaggaaacagatttaatggactcacagtkccacatggctggggaggcctcacaatcacggcagaaggtgaaggaagagcaaagtcacatcttacatggtggcaggcaaaagagtttgtacagag

SEQ ID NO: 110456 - DNA, 530 bp, Homo sapiens
cacgtcttaatgactactgaagttatactgtataaaccgaaatcaaattatgcaatctaatggagaggatatattggatgtgtatcattatttatgtctctatcatcacacatgtttttgtcaaacagatccccgagccatttaaatgcatttgaagtccaacagattgcattatcttgtataggaaaatttctatttcaaagattagtaatttatctttttaaaattataaaaagtagatatttatatattaatttttagtatggccaaaagagttttatggtgcttgtctgctatagtgatgtgttagcaagaatttttttttcatgaatggaatataattttctaattttcttattaaatcccagtaagaaactgaaggcttaytattggacaattgtaagaactgtaatttaaatgggaaatttcactatcaagtactcaatgctattttgtgttaaccattgtgatatacattgctttaagtgcttttatagcacttcatttgtcttagtaaggctaaagagagc

SEQ ID NO: 110457 - DNA, 616 bp, Homo sapiens
aacccaattttgtaatattacacaataattttttgaacacctactaaatgccaagtaatgttctattactgggaattacaggaaataacaaaagttcttaatttcacaaggcttgcattctatatttrttacaataagcaaatgaacaaccagtgataaggtaaggtactaggtgctaagaagaaaaaataaatccaaataaggggatagaagataatggactggtaggtgttatttgtggtaggttggctagggaagccccctctataaatggacttggagtagatgcctgaagaaggtgaggaagggagctatgagaatatctggacaatcaatgttctaggaatagagaagaactaatgcaaagccctggggtgcaaaggacttagagtgtgagataatgtggaggccagtgtggtcagatcagaatgaatgagaaaaataggagagagagagaagaagcaatgggtagaatgaagaagttaggtgaccaaaaatactggggaagggcatcatcaattccttttagaggtttcttcattttctcctgtcctaaatagattaagctggtggtgttttacagagtgtgcacacttctccttatattacatattgg

SEQ ID NO: 110458 - DNA, 527 bp, Homo sapiens
agaagctacttgtaggcaactgggaaatactgccttgttgcttttcatagggtagcaaaagtggacattttcttatggtactaaccagatttagcagatttggtaagctctcttctccaagatgtacccagtggcttgggaacaagattcccaatgctgtttgataggagagggctggcttaattggaacctgtccagtaaagggtcatctgtaacagtatccattttagacccaaggtttccaaagaatagttccacaggtatagacattgtagaaaagggtcaatatgtttagatactctgagttagataagatttctttcctgtagtgtttctcagaacctttaggaygacaaaggcatgaattgtgaaaccaccaagaaggaataaattatggctcatttcttaaatatatttggccacagaaacttcttttcaaggtaagtcttgagtgtaatatattttgaaacaggtgcttaaataaatgctgtgggtggtcagctctctagaactataacaggcagaga

SEQ ID NO: 110459 - DNA, 527 bp, Homo sapiens
agaagctacttgtaggcaactgggaaatactgccttgttgcttttcatagggtagcaaaagtggacattttcttatggtactaaccagatttagcagatttggtaagctctcttctccaagatgtacccagtggcttgggaacaagattcccaatgctgtttgataggagagggctggcttaattggaacctgtccagtaaagggtcatctgtaacagtatccattttagacccaaggtttccaaagaatagttccacaggtatagacattgtagaaaagggtcaatatgtttagatactctgagttagataagatttctttcctgtagtgtttctcagaacctttaggacgacaaaggcatgrattgtgaaaccaccaagaaggaataaattatggctcatttcttaaatatatttggccacagaaacttcttttcaaggtaagtcttgagtgtaatatattttgaaacaggtgcttaaataaatgctgtgggtggtcagctctctagaactataacaggcagaga

SEQ ID NO: 110460 - DNA, 576 bp, Homo sapiens
gaacatcagagttcattaccttcacatagtgaaggtaaattgtatttcatatatctgtatgtgtgtttatgtagatacatacatatgcatatataggcaggtagaytgataaaaataaatactttagaaaaatggggtcatatcataccttctattaatatgttaattataaaaatattatttaactttgttttaatatgacataagaaaaaaatgcaactgaagaatttctaaaggtcacataaatgtttcattactataagagttattttctaaaaactaaaaaatgattttaaagaatattaaaattttagtcattttttattacgaatttcttttttagacactatcaattgtctccaaactctgaaagctaaagatattagaagtcctatatatcttccagtttccctccctactcccctcaattttggatagttcttggattcatctttctttaaatgtcccttcccctcctccctgtctcccctttttcttccttcccctcccgcttcctggttcaggtccaatattgttaacagtaaaataaccccttcccctattcccctcctcctt

SEQ ID NO: 110461 - DNA, 610 bp, Homo sapiens
agtgatctacattcctttgtgtatatagccagtaatggggttgttgggtcaaatagtagctgtgaacacttttgggactgtggttaggccagatgtcatggttcaaatgatgttagacattaaatgttgtacgcattttaaatcttcagatcttataaagttttaataatttctgtagttttattgaaaacattgacactgcttatttgagtcatggattgttatatccatctggaargacagtcacccctgatagaacacagcattttctgttagtcagcataatacaggtttttagagtattactcatggggttggaagtttgattttattcagaaatatttttaagagatggtgtcttactatgatgcccaggctggactcaaactcttagtctcaattcagagattctaatatccctcacatagggttttgaaccctgaaaattggtaaaagtatacttctatggtataaaccaatatattatacggtggaatttcactgtgatttgctaatacctgacatacaatatgctgtttagtctcttgaatagagactagtctcatccttatattttgtcatttttttgtggaacatacacaaaaattca

SEQ ID NO: 110462 - DNA, 529 bp, Homo sapiens
actgatttaattcagagctcattattggtctattcagggattcaacttcttcctggttcagtcttgggaggatgtatrtgtccaggaatttattcatttcttctagattttctagtttatgtgcatagaggtattcataatattttctgatggttgtttgtatttctctggggtcagtggtaatatatttgctttttcatttctgattgtatttatttggatcctctctcttttcttctttattagtctagctagtggtagaggtattttattaattttctcaaaaaatgcctcctgtattcattgatattttaaatggcttttcatgtgtcagtcttcttcagttcagctctaatttcggttatttcttgtcttctgctagctctgggattggtttgctcttggtttcctactttttgttgtggtgttgggttgttaacttgagatctttctttatgatatggactttaagagctctaaatctatcttaacactgctttagctgtgtcccagagattcttgcatgttg

SEQ ID NO: 110463 - DNA, 592 bp, Homo sapiens
gtgttctgctgttgttggatgaagaaatctatagatgtgaattttttctggttcacttgtggtggtggtgaattcaactatgtcctttctgattttctgcctgctggatctattcatttctaatataagggtgttgaagtctccaaccataataatggattcatctatttctctttgcagttctgtcagtttttgcttaatgtattttgatgctctgttattaggcacgtagataaagattattatgtcttcttggagaattgacttctttatcattgtgcaatgtctctctttatccttggtaactttcatgcattgtagcctgccctgtctgaaataatatagccactgtcttagtttattttatgtttctataacagaatacctgacactaggtaatttataaagaaaacaggtttatttagctcatggttctacaasatgggaagtacaagaagcatagcagcagcatctgctggctttgggtgagggctttctgtgtaaaagttttttgtgctgtgccataacacgatggagaatgtcagtggggaagctgacacataggaagaggcaaaacccaagaggcatcctg

SEQ ID NO: 110464 - DNA, 605 bp, Homo sapiens
ttgattatgtttttccaggttcactttcttccttgggatgtcacagaactgaactctatcagaaatatgctagggcatgttttattctcttctgcatcytctgtcagaaacagccaacaagtgccattttcaagtcgctacagatctcacctagacccttggaaatatcaggttctgctggattctgatcaagagtgcccacgcagtaacttagaatctgaccagcatgccaggactcacatctagctcttcccaaaggcacacgtgggcagggattctcaaatcatctggggatgtcgataaaccacagatgctgactcagtgagtgtggggtgaggactgacactcttaatttccaaaagctcccaggtgccactgtgggtctttgggactgcattttgaatggaaaggtgctagggtatttttaatgacatcctaacgaaattatgccattagggatttaactgtgtattccacagctttactttccttttcaatttaacctctttagttcaacaatgtaacacttgtggaactccacaaattaggatgcaaaatgaacaagaaaagggatttagttttaactgagatgtcccttcacaaga

SEQ ID NO: 110465 - DNA, 605 bp, Homo sapiens
ttgattatgtttttccaggttcactttcttccttgggatgtcacagaactgaactctatcagaaatatgctagggcatgttttattctcttctgcatcctctgtcagaaacagccaacaagtgccattttcaagtcgctacagatctcacctagacccttggaaatatcaggttctgctggattctgatcaagagtgcccacgcagtaacttagaatctgaccagcatkccaggactcacatctagctcttcccaaaggcacacgtgggcagggattctcaaatcatctggggatgtcgataaaccacagatgctgactcagtgagtgtggggtgaggactgacactcttaatttccaaaagctcccaggtgccactgtgggtctttgggactgcattttgaatggaaaggtgctagggtatttttaatgacatcctaacgaaattatgccattagggatttaactgtgtattccacagctttactttccttttcaatttaacctctttagttcaacaatgtaacacttgtggaactccacaaattaggatgcaaaatgaacaagaaaagggatttagttttaactgagatgtcccttcacaaga

SEQ ID NO: 110466 - DNA, 605 bp, Homo sapiens
ttgattatgtttttccaggttcactttcttccttgggatgtcacagaactgaactctatcagaaatatgctagggcatgttttattctcttctgcatcctctgtcagaaacagccaacaagtgccattttcaagtcgctacagatctcacctagacccttggaaatatcaggttctgctggattctgatcaagagtgcccacgcagtaacttagaatctgaccagcatgccaggactcacatctagctcttcccaaaggcacacgtgggcagggattctcaaatcatctggggatgtcgataaaccacagatgytgactcagtgagtgtggggtgaggactgacactcttaatttccaaaagctcccaggtgccactgtgggtctttgggactgcattttgaatggaaaggtgctagggtatttttaatgacatcctaacgaaattatgccattagggatttaactgtgtattccacagctttactttccttttcaatttaacctctttagttcaacaatgtaacacttgtggaactccacaaattaggatgcaaaatgaacaagaaaagggatttagttttaactgagatgtcccttcacaaga

SEQ ID NO: 110467 - DNA, 281 bp, Homo sapiens
tttgctttcttattccaaacctgtatacaaggttgatttacataaactatcatgaagaaagtttttaataatttccactttagcctaacatctggtaactgtattaatcagttattgctaccatactgctgtataacaagttaaactaaaactcactgccttgagacatttgttgtttgcttatgggttggtgagttgtctggagcttgayctaagcaaggcttggattcgtgctgtagattggattcaagtacaggccaagtttttccttctgaggctca

SEQ ID NO: 110468 - DNA, 281 bp, Homo sapiens
tttgctttcttattccaaacctgtatacaaggttgatttacataaactatcatgaagaaagtttttaataatttccactttagcctaacatctggtaactgtattaatcagttattgctaccatactgctgtataacaagttaaactaaaactcactgccttgagacatttgttgtttgcttatgggttggtgagttgtctggagcttgatctaagcaaggcttggattcrtgctgtagattggattcaagtacaggccaagtttttccttctgaggctca

SEQ ID NO: 110469 - DNA, 635 bp, Homo sapiens
ttggtggttgaatgaaggcacgtttgaagaatgggatcttgctgaagaaactgcatcatcaaatggttaccatcttccccttaaagctagttgagctatgaatgggtggaaggcttccacccttttgaccaattctgaaagctgggtggcctccctagaaatgatcactgactctggcaaaaataagataaagggaataaactcacaaaacaaagatacccctgtcctccaaagcctccataatgtatcagccccatgtgagatccaaaccagtttggaagtaaatgtaagaaagtactagaaaatctaagatttgccatcttgatgcagaacaacaaagtgcttgtccagttggcttttgtttctcttgtctcatcctgcttagaactgatgagcttctggggagtttctttaatcagctccgaaaggctgtgaacttgtttattcccatatcagtgcagcaagatggagtcagttaaatttagcttaaacattaagtaccattcaaatacktctttctcttaactatacaaatcctgcagaaaataagattttcatgtcttaattgtgatacctaaagtgtcttttattctcagcatgcttgagatagcaaagtaattttcgagctgaatgtg

SEQ ID NO: 110470 - DNA, 464 bp, Homo sapiens
gctatgattatccccattttatgggcatgaccaagaggggtaataataatagcagctaatgttacagagggtttcccatgtgccaggcaatgctctcattgcttttgtatattagactacatccacctcataataatcccaggaagcaggccatatttatcccctattcgagagaaaaagatactcaagtaaagacagagtaattgacttgacataacacagttggcaagaggtagatcrgcgatttcaaccctgacagtccagccttgaagcccattctgtaatatagtctgtgtggcccccaatgtatatgaaaagtggaaacgtctactctgttctgctggaggagatattagggctagaccatgcccagcgcctccttagcaccttctctctttgtcccattgggaagagggagtctatctgactgcagaccaggggagaaggaggtaagcaggagcact

SEQ ID NO: 110471 - DNA, 580 bp, Homo sapiens
agcacatttggacaattttcaaacagatgaaagtaaagactgttcttttacaaggtatatgcagatcattatgcttggacatgggatagacaagtttaagaatcaagactgcacctatctagcatctaggacgacaaaaaatagcccatgatttgaagtaaggagtttaaatagataggttttagaatgcaagacaatgytacactttcaaaactatttgctttcaaatgtaattgtttactgttaatttggtataatgttttaagcaacattaatgttataagcaacatgatgagaaatatggtttggctttgtgtccccacccaaatctcatcttgtagctcccatatttcccatgtgttgtgggaggaccatgtgggaaatgattattcatgggatcaagtctttcccattcttttctcatgatagtgtatgggtctcatgagatctgacgactttaaaaatcggagtctccctgcacaagctctcttttttgcctgccaccacccatgtaagatatgacttgctcgtttttctcttccaccataattgtgaggcttccccagccatgtggaactgt

SEQ ID NO: 110472 - DNA, 580 bp, Homo sapiens
agcacatttggacaattttcaaacagatgaaagtaaagactgttcttttacaaggtatatgcagatcattatgcttggacatgggatagacaagtttaagaatcaagactgcacctatctagcatctaggacgacaaaaaatagcccatgatttgaagtaaggagtttaaatagataggttttagaatgcaagacaatgctacactttcaaaactatttgctttcaaatgtaattgtttactgttaatttggtataatgttttaagcaacattaatgttataagcaacatgatgagaaatatggtttggctttgtgtccccrcccaaatctcatcttgtagctcccatatttcccatgtgttgtgggaggaccatgtgggaaatgattattcatgggatcaagtctttcccattcttttctcatgatagtgtatgggtctcatgagatctgacgactttaaaaatcggagtctccctgcacaagctctcttttttgcctgccaccacccatgtaagatatgacttgctcgtttttctcttccaccataattgtgaggcttccccagccatgtggaactgt

SEQ ID NO: 110473 - DNA, 586 bp, Homo sapiens
ggggcttgttgtcccgggagaacatgggcagtccgatgtgctgtgacagacacgtgggtcacgccgggcagcctggacctccccaccccactccaggtgtcctgggacctcatgctacccagagggttcttgtgtcacccacctcccatgtggggggacctggtagaggggctcctggcccagctccgatgatgaccctgtctgttttctgcactgactctcatccatctctgggcctccctccccatctgaacagtgaggggcttagcctgcacacctctcaggtcccatggttccctaatgctctcaactgcctaccactcagtctcatcacaccgtgcccttgcctcattctggagagacccttcctgctctgttcaccagtcaagatcctactcatcattcaaggtcaagtttaataggcagtgtcaagtgcttcctctgccaggtgctcaggaactcagaggtcaggaactcagacrtgaccaggagcttcggtggtttcaggacagaactcaattatgggattaagtaattaagtagttaacagcagttgtggtaagtgctggacaaggaagtacaggaa

SEQ ID NO: 110474 - DNA, 589 bp, Homo sapiens
aatctttcttttctcatacttagaacttatttcatttctgtttatatttttatcagttaatattccctatatggctatgagtttctcaaagataagaatgccttattcatgtaacacaaatgaccatagatttccactcttctttactacatattacttgcttagtggtgttttgttgtcatttatattcttttttacatattagggagtttatggatgttgtctcatttagttctcaaagagctttatgagctaggtaatattttccacaactcaagaagaaatggaggctcagaaatgtaggtaacttgtctaaggtcctacagctaacatgaatcagacacaagatttgcacccagtttgaatcacagcccatgttcatatycactatgctacatggcttctttttatttgtttatctgcatatatttaggaggtataagtgcagatttcttacttgcatatattgtatagtggtaaagcctgggcttttagtatacccatcacctaaatagtgaatattgtacccaataggtatttattttaaccctcatttccctccaaaccttttgtggactccagtgtctat

SEQ ID NO: 110475 - DNA, 589 bp, Homo sapiens
aatctttcttttctcatacttagaacttatttcatttctgtttatatttttatcagttaatattccctatatggctatgagtttctcaaagataagaatgccttattcatgtaacacaaatgaccatagatttccactcttctttactacatattacttgcttagtggtgttttgttgtcatttatattcttttttacatattagggagtttatggatgttgtctcatttagttctcaaagagctttatgagctaggtaatattttccacaactcaagaagaaatggaggctcagaaatgtaggtaacttgtctaaggtcctacagctaacatgaatcagacacaagatttgcacccagtttgaatcacagcccatgttcatattcactatgctacatggcttctttttatttgtttatytgcatatatttaggaggtataagtgcagatttcttacttgcatatattgtatagtggtaaagcctgggcttttagtatacccatcacctaaatagtgaatattgtacccaataggtatttattttaaccctcatttccctccaaaccttttgtggactccagtgtctat

SEQ ID NO: 110476 - DNA, 619 bp, Homo sapiens
tgaaaatgtcattccattctcttctagcctggaggttttctgctaaaaagtccactgttagtctgatgggatttcctttataggtgactatatgcttttctctttttaattttaaaaatcttttattcactttgactttagacatttcaaatatagtatgctgtggtgaattccttttwgaatgtatttgactggggattggtgggccttctatgtctggatttctgactctcttgcaagacatgggaagttttcattgattattttcttaaatagattttctgagctttttattctctctttcccctagggaatatcaataatttgtaactctgattgttttatgtgattccagatgtcttgaagactttgttctttttttttttttttttttttttttttgcctgcttggattagttttaaaaaaactgtctttaagttctgagattatttcttcttcttgctctggtctataattaaagcttttgaatgtcttttgtatttctttcaatgaatttatttccagaatttctgcttttgttttcctaaagttatctatcttcttggtaaatttcttacttatattctgaattgattttctgatttctttgtattggtt

SEQ ID NO: 110477 - DNA, 619 bp, Homo sapiens
tgaaaatgtcattccattctcttctagcctggaggttttctgctaaaaagtccactgttagtctgatgggatttcctttataggtgactatatgcttttctctttttaattttaaaaatcttttattcactttgactttagacatttcaaatatagtatgctgtggtgaattcctttttgaatrtatttgactggggattggtgggccttctatgtctggatttctgactctcttgcaagacatgggaagttttcattgattattttcttaaatagattttctgagctttttattctctctttcccctagggaatatcaataatttgtaactctgattgttttatgtgattccagatgtcttgaagactttgttctttttttttttttttttttttttttttgcctgcttggattagttttaaaaaaactgtctttaagttctgagattatttcttcttcttgctctggtctataattaaagcttttgaatgtcttttgtatttctttcaatgaatttatttccagaatttctgcttttgttttcctaaagttatctatcttcttggtaaatttcttacttatattctgaattgattttctgatttctttgtattggtt

SEQ ID NO: 110478 - DNA, 476 bp, Homo sapiens
tagaccaggggcacaatgctgccagtctccttgctaaagcatagcaacatgatctttgctccagttcccagtaacttccttatctccatctgagtccttttcagctggaacttcactgtccatatcactatcatcattttggtcacaaccattcaatgagtctccaggacattccaaactttccctcattttcctgtcttcttctgagccctcaagttgttcraccctctgcccattatccaattccaaggtcacttccccattttcagggatctttatagcaatgccccacttctctggtaccaattctcggtattagtccattcttgcactgctataaagaactacctgagactggctaatttatgaagacaagaggtctaattgactcacagtcccacaagctatataggaagcatggctggggaggcctcagaaaacctacgatcatggtggaaggcaaagaggaagcaagc

SEQ ID NO: 110479 - DNA, 608 bp, Homo sapiens
agctggaagtcaggactgctgtgaagcgggatttaataggatctggtggtacagccttgtaataagagacacctagtgctgcttctctcctctctccacccaaatcctggcatcctcaagaaaccatgatgcttgtggatactacacacttcttagttgaggtgaagtgcacagggtgatgagaagagtgtcctggctgatgggaaccagggttcacagccccatggagacatctcttttcctgaaaagaagtatgctatttacaaagtctagtaatacctgattgagtcttgtgcttagcycctgaggccaatgatcagcaagaggatagagttggcagcttggcatctagcaacggcccagatatgctcagcccaaagaattgtttctgaaagcccacttagctacattcgtcagtcttttgactgacctctgcacagtttccagcgactggcattaactgcaaagcaccctgtgggtagacttgacaagccaaatctccagttgcactatctctgcatgtttaaattgccttaggtaatatttcctcctgacattctagatctgacaaagctttgtagaggaaacttctccttcagtattacaag

SEQ ID NO: 110480 - DNA, 562 bp, Homo sapiens
agaattcttatgcatgggagattcatctattctcccaaatgtatttctttttttcaattgttggtattattggatataggtatcagtatatatttattttatactttggatcaaaaacccaatattacttgwtctaatctgttgatcaatatgttccatctttggtcactggaagctctttcggtgtccccgtgcccttttgcctgcctccatcagttttgtatacacatatgcatgtgtatgtgtgtttagcactttctactttttgtcactgccagatgttcctggtcatgttgcatatttcctaccccagtcttagatcagccatttctataagaacttctcaatccttttgtgggaacatggaattagaaaccaagacctgagtgtcaggtgtgcttgttgcaactgggttatcattgcttttagatccctcacttgacaaagcaaggaaatatatgtgcatatattaacaaatgtatatatacacatctattaatattagtatatgcaaccatctgtgtgtgtgtgtgtatatatatatgtatatatacatatatat

SEQ ID NO: 110481 - DNA, 450 bp, Homo sapiens
aaaaattctattgacatttttcacagaaatagtgaaaaaaagaatccaacattcacgtagaaccatagaagactcacaatagcaaaagcaatcttgagcaaaaggaacaaagctggaagcccaatactacccaatttcaaaatatactacaaagcttagtagtcaaaatgccatggcactgacttaagaacaaacatcttaaccaatagaacctaatagagagtccagaaataaatctatgcattgaacrtcaattgattttcaacagagctgccaagaaaacacagtggggaaaggacaatctctttaataaactgtattgagaaaactagatatccacatgctgaataatgaaattagacccttacctcacactgtacacaaaaatcaactcaaaatagattaaaaacaaagttgtagtataggaaactattaaatcattggaaaaaa

SEQ ID NO: 110482 - DNA, 594 bp, Homo sapiens
tgaaattagacccttacctcacactgtacacaaaaatcaactcaaaatagattaaaaacaaagttgtagtataggaaactattaaatcattggaaaaaacataggggaaatgcttcttgatattggttcaggagataattttttagatatgattccaaaatcacaagcattaaaactgaatataagcaaatgggaatacattaagctaaaaatacttttgcacagcaaaagaaacaatcagcacagtgcagagacaacctctgaaatggaagaaaatatttgcatactagacatctgataaggggttgatatccaaaatatacaaggaaaccaaacaactcaatagcaacaaaacaggtaacckggttttaaatatgggcaaatgatctgagtagatatttctcaaaagaagtcagacaaatggctacaagtatacaaataaatgctcaacattactaataaagaggcaaatgcaaattaaaactacaatgagatatctcctcactcctgttagaatggctatgatcaaaaagacaacaatgacaagtgttggcaaggatgtgaagaaaaagtaactcttgcacactgttggtg

SEQ ID NO: 110483 - DNA, 567 bp, Homo sapiens
tatacagaacaatatataaaaacaattcaattagataatgggtggaatacatggcagacatttcactgacaagaataggcagatggcaaataaacacttgaaaaggtgttcaacatcactagccattagaaaaatataaataaaaaccacaattagatatcactataaacatatccaaatggaaaaataataaaccaagcaaatgctggtgaggataaagaaaaactggattatkctttgctgggggaatgtaaaattgaatatccactctggaaaatcatttggcaatttcttataaaactaaacatgcaatttacatatagcccagaaattgctttgcacttgcgccacagaaataaaaatttagcacttgcaaaaaatacaggaatgttcacaatggctttattcctaatagcccacaaccgaaaacagtccagatgcccttcaatgtgtgaatggttaaacataccatgttacatccataccgtgaatttctacttaactatttagccataaaaagaacagactgttaaaaccacagtaactttaatggatttcaagggaatt

SEQ ID NO: 110484 - DNA, 607 bp, Homo sapiens
ctcattatccctatttacagaaggagaaattgaggtttggggaaatttagacttgccttttgggtcactcagctaaaacgtagtggaccccaatagtacttcatatcttttcatgccaaactctgtcttttgcttttatatcatatgtctctgttgtacctatctttcagttttaaagattctcttaacctactggttctccctccaggaggtcttccgggtttcctagatcctttttggcttcagttygtagttgcattatcttagtctttaaattacaggaattgctcaggtacggtacattttcacatccagaccactagttccatgcttttcccactcacagatgatgcatacttagaacatttgaggtcatattgcacagaccttttaaagagaagtatcagtgagtttttaaaaatctatgtctttatctcctgcaggtggttgtggggggagggcacgtaattgagagttaattgattgcgtgttttccccactagagtttcattaccatcctacacttctattatatgggtcttgaggatcaagacttccaaggccatcgatgattcaccaaattaatacagaccagagctagtaatca

SEQ ID NO: 110485 - DNA, 607 bp, Homo sapiens
ctcattatccctatttacagaaggagaaattgaggtttggggaaatttagacttgccttttgggtcactcagctaaaacgtagtggaccccaatagtacttcatatcttttcatgccaaactctgtcttttgcttttatatcatatgtctctgttgtacctatctttcagttttaaagattctcttaacctactggttctccctccaggaggtcttccgggtttcctagatcctttttggcttcagttcgtagttgcattatcttagtctttaaattacaggaattgctcaggtacggtacattttcacatccagaccactagttccatgcttttcccactcacagatgatgcatacttagaacatttgaggtcatattgcacagaccttttaaagagaagtatcagtgagtttttaaaaatctatgtctttatctcctgcaggtggttgtggggggagggcacgtaattgagagttaattgattgcgtgttttccccactagagtttcattaccatcctacacttctattatatgggtcttgaggatcaagacttccaaggccatcgatgattcamcaaattaatacagaccagagctagtaatca

SEQ ID NO: 110486 - DNA, 514 bp, Homo sapiens
accctctgaaggaagtggactgctccttcaggacccaggagaccctaccaaaatggcgagtgccccaatggcagaagtgggaaagggagaccctcctctccagaatatacacccccactagagaagctgaccatctgtttgcaggagaagtttccaactttacttggaactgagtcaattcagagagctgagcaaaatacaggggtagaggaggcagcagaattccctgggagctcactgggtcctgtagcaggccattcctgcctgccaccacagggwtacaacaggagaggagcagggagtaaaactacacagggagaaggaaatctctagctgaacttcataaaagttttaaccgggtgagaaacctcctggccagatctcaggggagggtgcgattctggtgtgcagactccacagattgggtaagaaccaagcccttttcttttgcagctgggaggtgggtagcctggggcaggttttcaagcccatctcactctccacctggaaatag

SEQ ID NO: 110487 - DNA, 604 bp, Homo sapiens
tacatggcatatttggctcttctgtatacattcagatgcatgtgcagatgtccagagggaaaaggctcttctcattgttccactaggaaatgtcagagaggtgctcagttcccttatagattcgaaaaggagtttaagtaggcttcattctatgaagtctggggacaggagaggtctaaagggaaagaaacagcctttcttacctcttcttcataattcttttttaaaaaaactgtgggattatggaagagatagttgggttgaaaaccaaaacctcacacttgttaagcagaaaacttttgataaatattaagaayaaattatctgcaaatattatgtaacaatacttctgttccatgggaatattcatttgctatatttactcttctattttctgtctctcttttttcagatgtgtaattctcagtctacctgacatgtccttgaagaagtcccaagaaaataaaattattgtaatttaaataagccccaccataaagaacctttccttcaacagctctcccaaactcttgctatccttctggtagcctgaaagacttaaacacatataacaaaacacttaactttccatctcaggggaata

SEQ ID NO: 110488 - DNA, 594 bp, Homo sapiens
tgaattctaccggccaaaactgagttttaagttctatgtgtttccatcttttctgttacttcctagggagtttttaggggagttaagagatgtygtttaacagttggccaaccagtttcaattcaaaccaaaatttaagtaaatattttgaagacagtgaaaatacaaaattgaacacacaatttcatgcacattaaaatgcacagaaaaaaagactagaatgaaatagaatgaagagttttctccttaaatgtttaatatatttatgactgtattatatttatagtaggtaaagaaaaatacactataattttaaatatatagggttttttctaaagatctccttttgaagcaaataattcttagtgggagataggggaaactataaatgttgcttgggattacttgtgttatttataagatttccttaacagcaggatttatagggtttaaaggttaggtaaactttgattaaagctgttaactaaatgaacaatatttataagtttcctcttctatgattattgtgaagatgtgaattatgatcaaatcccttataatattcacggcatttgtaaggtttctctcctgcat

SEQ ID NO: 110489 - DNA, 570 bp, Homo sapiens
gagaaaattaaagaatcaatgtagtgtaatgggactctgataaaagttggagaatatacaaaaagcaaggaagtaaaaattgaaaggataggaagatgcatttagctattgatttatccaattttatactcatggcaggatagttctaagtaataaagaccagagtatgagcaaggaagtagattgtttgctgatggtcattagagataagaaagtcaaaggtctatcagtctgggttgctggaaggggtgtctgtgtcagtgttgaagyaacctattaaaagactgtcaggatttggggtgaaaagcaacaatgtgaagcaagtaactgaagtttttattggcctagtacaattactttagtgttggtcattcacagtacattaggctctctgagggcaggtatttgtgtatctcgcacataggagatagtaaatatgtgttgaaaaaatgaatgcgcaatagcttaatatattacagcatcaagaacagtatagctaaatggcatagactagtaagaaatatttttgcatgagagaaaatactaggaagtggaagggaggtacaagta

SEQ ID NO: 110490 - DNA, 570 bp, Homo sapiens
gagaaaattaaagaatcaatgtagtgtaatgggactctgataaaagttggagaatatacaaaaagcaaggaagtaaaaattgaaaggataggaagatgcatttagctattgatttatccaattttatactcatggcaggatagttctaagtaataaagaccagagtatgagcaaggaagtagattgtttgctgatggtcattagagataagaaagtcaaaggtctatcagtctgggttgctggaaggggtgtctgtgtcagtgttgaagcaacctattaaaagactgtcaggatttggggtgaaaagcaacaatgtgaagcaagtaactgaagtttttattggcctagtacaattactttagtgttggtcattcacagtacattaggctctctgagggcaggtatttgtgtatctcgcacataggagatagtaaatatgtgttgaaaaaatgaatgcgcaatagcttaatatattacarcatcaagaacagtatagctaaatggcatagactagtaagaaatatttttgcatgagagaaaatactaggaagtggaagggaggtacaagta

SEQ ID NO: 110491 - DNA, 574 bp, Homo sapiens
ctaataatacttattgcaagagcatcctgaagtagtctcgggctaggtaattcatctagttcatcctcttcrtttcaggaaagtggatttcctagcctattcaagcagctatcacaaaataccccaagcagggtgtggcttagaaacagcagaacttgacttctcaccattctggagaccgagaagtccaagatgaaaatgtatttggtgtctgctgaggggtcactctccaacttcaatagcacctccttgtcaagtcctcgaatagtggaaggggtgagagagctctgtggcgtctcttttatcagggcactcatcccattcaggagggttctgccctcatgccctcatcacctcccaaaggccccacctcctaatcttgggggttaggattttgacacgtgggaaacaaaaacatttgcccatagcaggctgctgggacagaatacagttcaggggctgcaagtccaaagccaggtgccagcaaagtcaaagtccaaaggcaaatgaacccagcagggctaatctccagcaaagcttctctgcttggcttgcagaggccagcttctggctg

SEQ ID NO: 110492 - DNA, 574 bp, Homo sapiens
ctaataatacttattgcaagagcatcctgaagtagtctcgggctaggtaattcatctagttcatcctcttcatttcaggaaagtggatttcctagcctattcaagcagctatcacaaaataccccaagcagggtgtggcttagaaacagcagaacttgacttctcaccattctggagaccgagaagtccaagatgaaaatgtatttggtgtctgctgaggggtcactctccaacttcaatagcacctccttgtcaagtcctcgaatagtggaaggggtgagagagctctgtggsgtctcttttatcagggcactcatcccattcaggagggttctgccctcatgccctcatcacctcccaaaggccccacctcctaatcttgggggttaggattttgacacgtgggaaacaaaaacatttgcccatagcaggctgctgggacagaatacagttcaggggctgcaagtccaaagccaggtgccagcaaagtcaaagtccaaaggcaaatgaacccagcagggctaatctccagcaaagcttctctgcttggcttgcagaggccagcttctggctg

SEQ ID NO: 110493 - DNA, 514 bp, Homo sapiens
tgatttatgatgcgagatttgattcttcatgtcatcttgccaacacagccgctgcagttgtcttgttactccagctctttacccagcatactgtttgccagttgaatgttattcaagccagaagtttggcaaaacactttggtacaataaaaatatatttaagaatttaacattttggctttttattrtagtattgagtagggaatgggaaattagccaatgataggactactagggtctacattcgaaagaacttttatagcacaatcttttggtaacttatttggttgaggacgtactaaatacaaataatcatgtgggaatttggtgagctatggtaatgaatatgacgtgagatgacttcagaggagtttgcagttccgtagtagagacagacacgtgtagaaaatcctgtattggtcttcttccttgttgaccgtagtgctttcagtggggtgcatctcattagaacgttgtgattgggacatacaagtggaaggtttctttaatgtct

SEQ ID NO: 110494 - DNA, 575 bp, Homo sapiens
cacatacgacaataaggggaagagaggagctaaagatgattcttagctttggatcctacaactgggtgctaaaaaggggggtcactgaactaaaatgaaagatcaaggtttagtttgagacatgttaagtttgaaaggtgaggtgtcaagtaggttattgcatgtaatatctggagctgagaaatttgctacaaatgtgtttgagcatagttggcatatagatggtatttaaagccttgagaggaaagactatattgatggtatttaaagccatttaagggatattgatggtaattaaagcttatgaaagttcttctaagacaaaagaaaacagagagcccagaatcatcatttagaatactagtatcaaaggaggttggagtcggcagagagctgggaggaaaactagaagagtgagacattagccaagtcaaatacaggagtgtttcaggaagagagtggtcagttacattgcttgccactgagagtcaagtataaagcctgagtttatgtatggaaagkatccatctgttggtcaatactctgaatttaaaaggacgcacaccaaggcacat

SEQ ID NO: 110495 - DNA, 503 bp, Homo sapiens
acaagccacatacaaagagttgggtttaggatagcataagacttctctaggggaataaaagctaaaatacaaatatacgatgtcttcaaaattccaagagaaaattatttacaacatataattatactcaagtaaaattgggagaaaaatctatttagacatgcaagatttcaaaaaacctcccatatgtcctttttcaggaagctactgaaggatgctgtcctgcagaaygagagtataatcacataatccaaaaaatgggataagaaaaaaagaagtgaaggaaattcagagtagtgataagagaagttccaggatgacatctctgtagcagccttagaggatattcgttcccaactgcagtagcagaattgagggctctaggagagatgtcttgtggggaaaatatggttgataaactacttgatatgatttacatattgaatggagttttagaaagaaaaaaaaatttgaggctgaatgaataacaggcacacagagga

SEQ ID NO: 110496 - DNA, 607 bp, Homo sapiens
tcaaatcaataaaaaatgtccccacaattttccaaaacattatcccaggggtgggactgcttctattgaaaactattgacataaagcatgatttcatatcactgaaaggtttaaatttttactttgcatatagtagcaaggtttaaaaaatctcgtgaatgaatgggatacaaaaagtaaattttcataaaacagtaatttccatgatgctagtacaatgaatagatttctttgctaagtccaagttgaagagatcaggctaggacagcaaatatgggcagctgcatcttttaccaggtgtaaatagggagacatgtttattttctcttgttctgccaacatgaattaagcatctcctagccatgaggtctatgctgaggctgcgggatccacagtgacatacaacaggctwcccacacggcagttacaccaggaagggacaaagtattgaaaaagaaatggaatgtattcagcagtttggcagttaacagagctcataaaaaatgactttcccttaagacagtttttactgggttgtgtttttattgaaaatcctagtttttctcctgagagaatcattctgctggagcaacaagcagaaacaaag

SEQ ID NO: 110497 - DNA, 599 bp, Homo sapiens
ctgacactctaagttgccaacccaacaaacatttccaaacctctcttcttgccagagaacctctcactcaaaagaatgaaaaagccagatacttgctttcctggcctgtctttcaactggagtaatcatatgacctaactttgatataggaaattcacagggaaatctcctcagagtactttatggcaagattttccttcctgaccaaagcagagaacatgcaaggagaagtatattttttcattctgccccatgttctgccattgaaagtgatcatgtgaggatactcagaactgcaacaattaacttgtgaccatgagaagaaaacctgcagaacagccaagacatagatccatggacccatagaccatggaactacggtatcaaccctggatctacctgtgagtatcttcagaacttttgttaagtaaatggtaaatgtcttatggtttaagccacagctaattgatttttctattacttgtagcagaacatatcttaattgacttagccacctacctagtagygtcgcttcatctgtggccaaaggcacgggatcaagacttttaatttccaggtcaagctgtatttaacaagct

SEQ ID NO: 110498 - DNA, 629 bp, Homo sapiens
gataagggcccaggaacgggtcatgcagagcctgttcaagtgagtctcctgttacacagagtacatcttggtgtggcaggagcatgtgcaactcagtagcaaaagcttgacttcagtccccatcataacgtactactcttctttcatttattcactaaaaatgttttgagtgcctacatgccaagtgtgtgctttccatcctcaatccatccaattttagacctccccaccctacccctgtagaagaaatgctatctttgacttatcttgggcatttaatagagaatccatcttctaaacttatttatttgattcctctccttgaagtatttgcatttttcaaagaagcccaagagaaagaagcccaatgcagagagtcacaagttcaaatgcctrcagagaccacaaatgcaaatacgcataatgcaataggtagtgacggaaattgggtgattggagatctcccatccccaatcagattcagccaacaattgatggataggagaagaccccatgtagccaaattttctcatatttcaagacaagtcaaaactgtattttttgtgaaactcctcaatgttaggtgctggtaactaattcaaacttttaaatagatacctcattagcca

SEQ ID NO: 110499 - DNA, 588 bp, Homo sapiens
gaagggcctgagacaccgcagacctgagacccatagcaactcggaggtggtgaataaaatagcctccaataaaactacatggcaaaaaatgagaaagaaacagaatgraaagaataaaaagttgaagaggcagagcctgaataatttgtggtggaaaaagtactagatcgacgtgtagtgaatgggaaagtggaatattttctgaagtggaagggatttacagatgctgacaatacttgggaatctgaagaaaatttacattgtccagagttgattgaagcatttcttaattctcaaaaagctggcaaagaaaaagttggtacaaaaagaaaatctttatctgacagtgaatctgatgacagcaaatcaaagaagaaaagagaagctgctgacaaaccaagaggatttgccagaggtcgtgatcctgaaagagtaattggtgccacagacggcagtggggaattgatgtttctcatgaaatggaaagattcagatgaggcagactcagtgctggcctcaaaagaggcgaatatgaagtatcttcaaattataattgctttttatgaagagagactaacttggcatggt

SEQ ID NO: 110500 - DNA, 608 bp, Homo sapiens
taccttttattaaactcgatgtcctttactcatctcaattagtgatcccatgaattcctaatttagtatctctccttctctccataagactttaataaattatacatcttctttttaatttagaaacttcaggcattctctttctagctactaaacctggtactcttccctaagccaataraagagtcctctttgttcaatgatgccctctagcaatactctccttacaagctaattatagcagtgttacctagtgtgacatctaggcccagtataagctaggaataagttccacagtggatagataacatatttgacatcacacattatattttttggcaaaagaatgctacctgaatattttcctcagttgttccacagcttggcatgactcccagctcttacttccccgtgttgaatgtggttctcaaagactggccccaagaccagcagaatcaacttcagcatcagcatcacctggtagctttcaataaaatgaaaataggttctacttgaaaactactgaatcagtatccctggaggtgaggcctagtgatctgttctagcaatccctccaggtaattttcatgaatgctaaagtttacaag

SEQ ID NO: 110501 - DNA, 610 bp, Homo sapiens
ttggctttaaaatgtttgtttatggcccattaatgtctattattattggtgggaaaattccagttttcctctgaatgaaaaagtcatcatgctgttaataacttgtttggaattatataccatagataacaataaattctttctctacatttgaataataaagtgtaaagatttaacagtctttcagaggctgtgaaaattatagtaaaatactactaaaacattcccaatacattaggacataatttttgcacaaaagataacattctagaaaaagtttcaatttttatgcaaacacatgagatgtagaataggctatacagctctcacacatgagggagagaaactgatgacagtgccacctcacatgcctccaaaggctgtgatctgactccagcctcctataagagaattataacaaattttttaatgcagtaaaatagaataaaaaaatgtttgcaaagcaaaactgggcgtacatgtaggtgtatggctcaaataatcagaaagtcacaaygggacattcatatatgacagcatataaacttaatgaaaaaagtttttaataatgagtgggaactagtctagggctgaactaggtaaatgaggt

SEQ ID NO: 110502 - DNA, 573 bp, Homo sapiens
cagactcctaaatgccctacttccaggctttagctcctggagagtgtttttaggcccaccttgggccagaaggaagcctgttaccctgaaaaaacagactgagtcctggaagaagtcaccactttatgactaaagagcccttgggtcttgaataaacaccagtgatatccaggctacagtcaccacaaatctgggtcagttatggccgtgggcagagattctgcttcaggaaaggacagggataagtaaagaggattctgtcttgcaacctgagtattagctcaaccccagtaaaagaaagcaccaagccaattcctaaagtccctgataccagtccctagctcatggagggcatttttagacccaccttgggccagaagggaacctgctgcactgaaggaaaagacttagtcctggcaggattcatcacccgctgacagaggccttgggccttgaacaaactcagyagtatccaaggaatagtcacaacaggccttaggcaagaaccagcttgtttcaggtatgacgaggcacagtcccagctgtggtggccatgggaatgcttgtgtcacc

SEQ ID NO: 110503 - DNA, 574 bp, Homo sapiens
gaaatagggttggtggcacccctaggactttctattccttgtgtttcagactcagaatattgagtgtgtgtgtggcaggcactttgctatgtgcttttyatccatccgtcttatgtacttcttttcaatgatcttcagaggtagcagaatgagcatccttacctgttacatgaggaaactgaggcttagaaagataagtgacttcctcaaatccacaaaaccaagaagctagggtttggactcaggtcttcccatgcccagaatctgagcatctcactactatgctaggctcagagaggccacatcttgagatggtttaatagaaatattcattagaggaaagtggataaatgaatagctacatatttatacggatgaatgctctacagatatgaaaataaattcatgtctccattcttggataaatccccaagatttgaggctaagtggaagaacaaagcaaattattagcttatatctacagtagcatacagtttaaaacgtgcaatatattcataattctatttgttgtatataaacacattcctgtttggtcatgcatatatgtggacat

SEQ ID NO: 110504 - DNA, 574 bp, Homo sapiens
gaaatagggttggtggcacccctaggactttctattccttgtgtttcagactcagaatattgagtgtgtgtgtggcaggcactttgctatgtgctttttatccatccgtcttatgtacttcttttcaatgatcttcagaggtagcagaatgagcatccttacctgttacatgaggaaactgaggcttagaaagataagtgacttcctcaaatccacaaaaccaagaagctagggtttggactcaggtcttcccatgcccagaatctgagcatctcactactatgctaggctcagagaggccacatcttgagatggtttaatagaaatawtcattagaggaaagtggataaatgaatagctacatatttatacggatgaatgctctacagatatgaaaataaattcatgtctccattcttggataaatccccaagatttgaggctaagtggaagaacaaagcaaattattagcttatatctacagtagcatacagtttaaaacgtgcaatatattcataattctatttgttgtatataaacacattcctgtttggtcatgcatatatgtggacat

SEQ ID NO: 110505 - DNA, 572 bp, Homo sapiens
cgtgcatgtgtctttatggtagaatgatttgtatttcttttggtatatactcaatagtaggattgatgagttgaatggcacttctgctttgagttctttgagaaattgccacactgctttccacaatggctgaactaccttacattcccaccatcactgtataatcattcccttttctccacaacctcactagcatctcttattttttgagtttttaataatagccattctcattggtgtgagatggtatctcattgtgattttgatttgcatttctctaatgattagtgatgttgagcattttgtcatatgctttctggccacatrtatgccctcctttgaaagtgtccattcatgtactttgtgtacgtttaaatgggattgtttgtttttcacttgttgatttttttaagttcaccaaatgcactgtgctggggttctgtgatagtccctaattgctgtgcaccctcccaagcctgagagcagcaggagggagggttgcgagacagcaaaaaggtggactgcctctctctttgggagcttcatgccagagaagtgtagagctgctccca

SEQ ID NO: 110506 - DNA, 597 bp, Homo sapiens
aagtcacactaaattatttttgaaattctgacaactttattataaaccttttgtcaatttatattcacctaattcacttgttcttaacaattgtgcttcagttcctccttaaacacaactatgagtggatttatagctttaagacattcattatacatctcagtaatagcaagcttgtttcacyagtaactttaggtttaaaaactgtatctgtacattgtaattaatgctgacaattctgaaaatatttgtttttattttcccaacaaattttaaaactagctttatctgccaaagattatttcatcacataagccaaaaggcaattgagtttctgtttttctgagagaattcttagtttaaacacttatgttttctctgtaagccaattaagtagagcggtttatgaattttggtagaaaaaaattatacatacacacacagacacacacacgtagaaaaatacagacagaggaagaacttacaacttgcattaagaattgttatttgcctggcttgcaaatagttttactccctctttcagactatctgtcttttaatgatctgttcaattggcccatagataagtgttaagtt

SEQ ID NO: 110507 - DNA, 597 bp, Homo sapiens
aagtcacactaaattatttttgaaattctgacaactttattataaaccttttgtcaatttatattcacctaattcacttgttcttaacaattgtgcttcagttcctccttaaacacaactatgagtggatttatagctttaagacattcattatacatctcagtaatagcaagcttgtttcaccagtaactttaggtttaaaaactgtatctgtacattgtaattaatgctgacaattctgaaaatatttgtttttaytttcccaacaaattttaaaactagctttatctgccaaagattatttcatcacataagccaaaaggcaattgagtttctgtttttctgagagaattcttagtttaaacacttatgttttctctgtaagccaattaagtagagcggtttatgaattttggtagaaaaaaattatacatacacacacagacacacacacgtagaaaaatacagacagaggaagaacttacaacttgcattaagaattgttatttgcctggcttgcaaatagttttactccctctttcagactatctgtcttttaatgatctgttcaattggcccatagataagtgttaagtt

SEQ ID NO: 110508 - DNA, 597 bp, Homo sapiens
aagtcacactaaattatttttgaaattctgacaactttattataaaccttttgtcaatttatattcacctaattcacttgttcttaacaattgtgcttcagttcctccttaaacacaactatgagtggatttatagctttaagacattcattatacatctcagtaatagcaagcttgtttcaccagtaactttaggtttaaaaactgtatctgtacattgtaattaatgctgacaattctgaaaatatttgtttttattttsccaacaaattttaaaactagctttatctgccaaagattatttcatcacataagccaaaaggcaattgagtttctgtttttctgagagaattcttagtttaaacacttatgttttctctgtaagccaattaagtagagcggtttatgaattttggtagaaaaaaattatacatacacacacagacacacacacgtagaaaaatacagacagaggaagaacttacaacttgcattaagaattgttatttgcctggcttgcaaatagttttactccctctttcagactatctgtcttttaatgatctgttcaattggcccatagataagtgttaagtt

SEQ ID NO: 110509 - DNA, 597 bp, Homo sapiens
aagtcacactaaattatttttgaaattctgacaactttattataaaccttttgtcaatttatattcacctaattcacttgttcttaacaattgtgcttcagttcctccttaaacacaactatgagtggatttatagctttaagacattcattatacatctcagtaatagcaagcttgtttcaccagtaactttaggtttaaaaactgtatctgtacattgtaattaatgctgacaattctgaaaatatttgtttttattttcccaacaaattttaaaactagctttatctgccaaagattatttcatcacataagccaaaaggcaattgagtttctgtttttctgagagaattcttastttaaacacttatgttttctctgtaagccaattaagtagagcggtttatgaattttggtagaaaaaaattatacatacacacacagacacacacacgtagaaaaatacagacagaggaagaacttacaacttgcattaagaattgttatttgcctggcttgcaaatagttttactccctctttcagactatctgtcttttaatgatctgttcaattggcccatagataagtgttaagtt

SEQ ID NO: 110510 - DNA, 567 bp, Homo sapiens
ggtagttgaaagactatgaatataaagacttatattttctctgtgttgcagtagcaaagtcatctgcagagagagagaagtgagaagggagaagagagtgtcagaaattagaggattgtagagattgaaaaagttatgtcaggcacaattgaaaacccrgtttccaatggtgatcattgtcttaaaatattatgtttgttttcttgcatgacattcttcagcagcagtcatggactgagaaatatgcagaaatcagatagttgagttcatctagagaagaggttgcaatgtgcttctaaaaaggacaaaaccaaaagcaaccgagagagagagagagagagaaagagagagagaaaaatgaagatgtgaaaggggataggtcaaaactcagtaattttttttaagcaaagggccagatagtaaatatttttattttgtgagccatattgtctctgtaggaagtactcagttctcccatgttctgcaaaagcaaccatggacaataagaaaatgtggctgcgttccaataagaatttatttaaaaaataggtgatggattgtatttag

SEQ ID NO: 110511 - DNA, 567 bp, Homo sapiens
ggtagttgaaagactatgaatataaagacttatattttctctgtgttgcagtagcaaagtcatctgcagagagagagaagtgagaagggagaagagagtgtcagaaattagaggattgtagagattgaaaaagttatgtcaggcacaattgaaaacccagtttccaatggtgatcatygtcttaaaatattatgtttgttttcttgcatgacattcttcagcagcagtcatggactgagaaatatgcagaaatcagatagttgagttcatctagagaagaggttgcaatgtgcttctaaaaaggacaaaaccaaaagcaaccgagagagagagagagagagaaagagagagagaaaaatgaagatgtgaaaggggataggtcaaaactcagtaattttttttaagcaaagggccagatagtaaatatttttattttgtgagccatattgtctctgtaggaagtactcagttctcccatgttctgcaaaagcaaccatggacaataagaaaatgtggctgcgttccaataagaatttatttaaaaaataggtgatggattgtatttag

SEQ ID NO: 110512 - DNA, 626 bp, Homo sapiens
gaagctttaatgttactattaagtaggtagggaaattgccaatattataaacgcagatttccagcctctcyttttaatgctttcagaatgattccagaagaaccttgaaaatgttgagtatttatatttattttatgcccttttattgtgatttttttaataaataagttttttttggtaaatactggaagttaatattctatagtttagaaaagcaattttgaacactcaactagtgagcccatataaaactacataacagcacagaatatagtaaaataataatataatgaactgggagacaaactaggcactttgtcacagtttttcaaggaagatacaatttcaataccaatgaaataaactcccacaaattgatttttctttgtgtgcactcatcagtgtaaatacaattaagtaataaagcctgtacttgttcaggaaagatgttttctattcatagtctgatatctgggtgctttggtttctgataatttgttatgtaaaaaccctgcaaatttaaaaaaaaaaaatcagcagctccaagttcatgggcccttatcacagaggatttaaaacctgtgcattttctttaaactgagaatattattacattttttaatcca

SEQ ID NO: 110513 - DNA, 579 bp, Homo sapiens
ctggagggacccatggatcccaaccatggaccttgttcccccrgtatgaaccatgaaccagttgaatctgaatgcaaagatggaatgaggaccactagaagcagggagctctcttcttccccatgctagcctttccttaaaagtttcttttgttttttgttaccatttctatgttcgtctcttcattcagtctagtaatgacggtctcaagtagtaaccgtggcagtcagccacacttaaatcttaatgcttttgaattctagaaggaactcaaaaagagacaagtcagtcatagtagtaatacacggagaatgaattgtgaaatctaagagactgaatatcatgtcaagcataagctttttcaaagcaattaaattgggcttttaatgacattacttagactttccagacaaaatgtgtaacaatacagctaattttaataaaatgactttgaaatccccaaactcaaatataatctcatgaagtaattgtttgtgataacgccttaatatgttttataccatcattatgaaaaacagtgcaagagaaaggagaaaaaattctttattgtgagttaaa

SEQ ID NO: 110514 - DNA, 579 bp, Homo sapiens
ctggagggacccatggatcccaaccatggaccttgttcccccagtatgaaccatgaaccagttgaatctgaatgcaaagatggaatgaggaccactagaagcagggagctctcttcttccccatgctagcctttccttaaaagtttcttttgttttttgttaccatttctatgttcgtctcttcattcagtctagtaatgacggtctcaagtagtaaccgtggcagtcagccacacttaaatcttaatgcttttgaattctagaaggaactcaaaaagagacaagtcagtcatagtagtaatacayggagaatgaattgtgaaatctaagagactgaatatcatgtcaagcataagctttttcaaagcaattaaattgggcttttaatgacattacttagactttccagacaaaatgtgtaacaatacagctaattttaataaaatgactttgaaatccccaaactcaaatataatctcatgaagtaattgtttgtgataacgccttaatatgttttataccatcattatgaaaaacagtgcaagagaaaggagaaaaaattctttattgtgagttaaa

SEQ ID NO: 110515 - DNA, 579 bp, Homo sapiens
ctggagggacccatggatcccaaccatggaccttgttcccccagtatgaaccatgaaccagttgaatctgaatgcaaagatggaatgaggaccactagaagcagggagctctcttcttccccatgctagcctttccttaaaagtttcttttgttttttgttaccatttctatgttcgtctcttcattcagtctagtaatgacggtctcaagtagtaaccgtggcagtcagccacacttaaatcttaatgcttttgaattctagaaggaactcaaaaagagacaagtcagtcatagtagtaatacacggagaatgaattgtgaaatctaagagactgaatatcatgtcaagcataagctttttcaaagcaattaaaytgggcttttaatgacattacttagactttccagacaaaatgtgtaacaatacagctaattttaataaaatgactttgaaatccccaaactcaaatataatctcatgaagtaattgtttgtgataacgccttaatatgttttataccatcattatgaaaaacagtgcaagagaaaggagaaaaaattctttattgtgagttaaa

SEQ ID NO: 110516 - DNA, 552 bp, Homo sapiens
ccccatgctagcctttccttaaaagtttcttttgttttttgttaccatttctatgttcgtctcttcattcagtctagtaatgacggtctcaagtagtaaccgtggcagtcagccacacttaaatcttaatgcttttgaattctagaaggaactcaaaaagagacaagtcagtcatagtagtaatacacggagaatgaattgtgaaatctaagagactgaatatcatgtcaagcataagctttttcaaagcaattaaattgggcttttaatgacattacttagactttccagacaaaatgtgtaacaatacagctaattttaataaaatgactttgaaatccccaaactcaaatataatctcatgaagtaattgtttgtgataacrccttaatatgttttataccatcattatgaaaaacagtgcaagagaaaggagaaaaaattctttattgtgagttaaaaactttgaaacctaaatcaatcatttttattgtttcaagaaatatttccccacggctactttagtagcaaaatcaaagtcaggagcccagg

SEQ ID NO: 110517 - DNA, 558 bp, Homo sapiens
tgttatctatgtctacatgcttctgtccatttcttcatagtttgtttttaaataatatgcttctaccattctcttaaagctattttaattttttagcttgaatataaattggttgatactggctgcaaattatttttggtattctaatttgtctatttttctttttcttgaaatggaataaataagcttcacacacacacacacacacacacacacacacacacacaaccctaaacaaaaaaaaaatcacacagcaccagcaaactactaggatttactgtaggataaaagctctrcatggccctgcatacaaactttctgcatacttctgcaaatttttatgcattactcaatccattaaaaatcaccttggaagaaattgcaaacacaatagaaactaaatgagatagtcacagagaacaacaaaaatagtaatttaagctcccatacaacatcaagggtgttcagtctatttttggttcttcgggttctctttaaaattgaattgagtttgtatatgcatatgtatgtaggagtggaggatggaattaattatcc

SEQ ID NO: 110518 - DNA, 564 bp, Homo sapiens
tttttactcaatttttaagtggtatttgtaaataacatattatttttgtgagtgttgctcatgttcaagagctcacagttgaactgaccacttgtttcatggataaaatcatgcaagtgcaaacagtctttctagtgttatttctgctgacacacctcgtatactgcttaattatgcgagggtaattagactcctagatatgaggccaagcaaggggtgcctttatggtctaataacgggcagacaaaaaaagttattgtgtttgttgacaatagccamatattcgtaggtcatttcagatgtattttgaagaatacacatcctagccattaaaagagtttggttttgtttgttgtttgtttttttaatctggaacacaagctattatttaccttcggaaaataactattaggtatacgcttagtacctggttgaataaataatctgtacaacaaaccccgttacacgagtttacctataaaaccttcacatgtacccctgaacctaaaataaagttaaaaaaagaaaatcatttataggcaaaaaaaatctcaggtaccctat

SEQ ID NO: 110519 - DNA, 572 bp, Homo sapiens
agaattcaaattccaaggctatgtgtacctgacaataccagacaggtcaaaacatagccaccaacttgactaagagaattaaccatttaaggcaaaatatcacsaggttttcccctctttccacatccttccttctttatgccctcttcttaagcattgctgtttcccatgtatccaacttcctactaaacccatataattggacaatacatctcaatacagttacaaaacccaactcattatttcctccccaaccttccccacaatgggtgggtgtttttgatctcagtgaaggtcaccacccctgaccagtctctctccccatgcagtgcctcagctccagaactagtttaccacaatggactctaatgagttttcctgtcactcaattctcttctctacactactagagttatctttctagtatttgaatctaattatgtttcttctttacttaaaaatccatcagtaagaaaacaaggagcagaaactttaaacattcctaaataccctcatactacttgcttcccactttccactacaccctccattcccattgttcccaataatca

SEQ ID NO: 110520 - DNA, 522 bp, Homo sapiens
atattacttttggatcttttccagattaaacataaattgctttattttgtcattacttccttttacataatttcaaattgctttcaaaggcggcaatttytgatagctatttctacctatactactcaagtaggacatcctcctccacgtaagctgaacagacgttgacaatccagctgtcatagaaactgactatttttgtgctttcatagaatacatcaagacttttttccgaactatttaagaaaataacattctgaacagcttctggtggtaaaaaaaaaaaaaaaaaaaaaaaaaaaaagtcacataggatgccaaactcatctctatacctacaaagctgactcaaggaaaaaacctgtttgttttggttggtgaagcaacagtatcagtaaacgctttgcaaaaagattcaggcaactgagctctccagcactacatggaacttctgtgattaaatagaatctctggcagcaaagcagaggtaacaattgatccattaatctattcaattaaaag

SEQ ID NO: 110521 - DNA, 522 bp, Homo sapiens
atattacttttggatcttttccagattaaacataaattgctttattttgtcattacttccttttacataatttcaaattgctttcaaaggcggcaatttctgatagctatttctacctatactactcaagtaggacatcctcctccacgtaagctgaacagacgttgacaatccagctgtcatagaaactgactatttttgtgctttcatagaatacatcaagacttttttccgaactatttaagaaaataacattytgaacagcttctggtggtaaaaaaaaaaaaaaaaaaaaaaaaaaaaagtcacataggatgccaaactcatctctatacctacaaagctgactcaaggaaaaaacctgtttgttttggttggtgaagcaacagtatcagtaaacgctttgcaaaaagattcaggcaactgagctctccagcactacatggaacttctgtgattaaatagaatctctggcagcaaagcagaggtaacaattgatccattaatctattcaattaaaag

SEQ ID NO: 110522 - DNA, 467 bp, Homo sapiens
ctcagctagaggacactcccttgacaaaaaaaaaaaaaaaaaggaaaaaggacttgagaaatcattgaatcaagaccttccttgctcagttcaattgatttgcctaaagtcataaaaacagtaacttagtcgcaaagatgtaataaggaaaaatcttcctacttgaattaaggattcctccaaggaggcagcrtgatactgttttaagagcacagggcattaagtataaccaccttggtttacattctatttctcaattacaagctaccaccaagttaacttttaggggtttcagtttccacaatgctaccttacagcattatttggagagctgcataagacaatccacatgatattcatgttactgcaccttgtgcaagttaagtacatgttagcaattattattattattattcggtggtctaggaaatccaaatttgtctggtccagaaacaaacaaattgtcc

SEQ ID NO: 110523 - DNA, 622 bp, Homo sapiens
actggtatattttgagtaattcctcatcaaatgctgtatactttagaactgatacatagaattacagagattagattgaagacgagaactccaattaattgtaaatatgctctttccaaaacacaccctttatgtactgaaaacaagaagagcaacacatttgtcaaagaggggaaaatgtataagcacagacatgttcacttatggacaaacacatagctctaatttgtctaaatttatagcactacttgacactgatcagcaatacaaacacctgaaaatttttcataaattaaattttcataaaccatataccattggaagccaaaaaatattcacaatttccttttctgtgataaagaaaagtcatattaggtataaaaaagatttaaagttaatgacaaaaggtttgtttgtttgtttgtttttgagacagagtgtcgytctgtcacccaggctggagtgcagtggtgcaatctcggctcactgcaacctccgctcactgcaacctccgcctcccaggttcaagtgattctccttcctcagcctcctcagtagcttagaagatattttttaactgtcaagaaacaaagctatccaaaatgtattttcctggaaacac

SEQ ID NO: 110524 - DNA, 574 bp, Homo sapiens
catcaaaaatctacaacttaaccagttttataattatatgattatattattaaaataataacttctgacatgttaccttaaatgtwtgctttctaaatcaaacttctgagtttaaagctctctataaatgtaaatcattgactcaaggaaaaatatctgtattttaaagaattccacaagagtagccttggattgcaaacacagtgtatcaagggaaggttgtcatgtgtacagataaatactcaaggccatttgttttacatatctatcatacttactggtgaacaccaaggacttcccaatcatttccaacatcctggggtcccattaagctttgcattgtacctggacagacttctattaatttgcacagaagtgaccaacccacctgaaaacaagaaagacatatattcacatgttttaaagaatgttaatagagcatactcagtcaaacatgaatctcttcaatcttagtggaatagatgcttatctcacttgtaaacaatggttatacaacaaaatgataccctaaaatgcttacccagaaacaaaagcaagccgtattcttaggata

SEQ ID NO: 110525 - DNA, 574 bp, Homo sapiens
catcaaaaatctacaacttaaccagttttataattatatgattatattattaaaataataacttctgacatgttaccttaaatgtatgctttctaaatcaaacttctgagtttaaagctctctataaatgtaaatcattgactcaaggaaaaatatctgtattttaaagaattccacargagtagccttggattgcaaacacagtgtatcaagggaaggttgtcatgtgtacagataaatactcaaggccatttgttttacatatctatcatacttactggtgaacaccaaggacttcccaatcatttccaacatcctggggtcccattaagctttgcattgtacctggacagacttctattaatttgcacagaagtgaccaacccacctgaaaacaagaaagacatatattcacatgttttaaagaatgttaatagagcatactcagtcaaacatgaatctcttcaatcttagtggaatagatgcttatctcacttgtaaacaatggttatacaacaaaatgataccctaaaatgcttacccagaaacaaaagcaagccgtattcttaggata

SEQ ID NO: 110526 - DNA, 574 bp, Homo sapiens
catcaaaaatctacaacttaaccagttttataattatatgattatattattaaaataataacttctgacatgttaccttaaatgtatgctttctaaatcaaacttctgagtttaaagctctctataaatgtaaatcattgactcaaggaaaaatatctgtattttaaagaattccacaagagtagccttggattgcaaacacagtgtatcaagggaaggttgtcatgtgtacarataaatactcaaggccatttgttttacatatctatcatacttactggtgaacaccaaggacttcccaatcatttccaacatcctggggtcccattaagctttgcattgtacctggacagacttctattaatttgcacagaagtgaccaacccacctgaaaacaagaaagacatatattcacatgttttaaagaatgttaatagagcatactcagtcaaacatgaatctcttcaatcttagtggaatagatgcttatctcacttgtaaacaatggttatacaacaaaatgataccctaaaatgcttacccagaaacaaaagcaagccgtattcttaggata

SEQ ID NO: 110527 - DNA, 551 bp, Homo sapiens
ctgtccgggtgtcccagctccccatagaggccttagacaaatctgagactgttattcaggaggcaacagaggcaacacagggaaaaaagcaggcaccacaacaaccaggtaacctggtgcacaagccaaggtaggagaattggactataagtactgccttggtggttggacattttcggaggttgagcatgtgtgactgagatgtatcctagatacaaagcgagtgcagagtcccaawccgcagttccgttctcctgcaagtaattctcagggtgtgcaagaaacctccaggagggagtgttgagtacacagggaaacgctcagacacagagactgactgaaaatgggaaacagaaattctaggcctaggggacaaaggaaagagggagctaaagactccctctgacattcccatggatagtcctttggggagaatgctacaggttttgagggacaacccttgaaccagggacaaggaaaagcaaaagataataaagctttgctgttttatctggcccaaagactccattcataatccttcagtcttttgg

SEQ ID NO: 110528 - DNA, 582 bp, Homo sapiens
ggatgggggctaaaggtgggttcctgaggcgtgcccaggctctggcccgggcagcaggggtgaggcaggggctcagctcctcctgggcctgggygatgcggcgtgcgaagcggctgcgatcccgagcaagctgctcccaggggccctggcgggcggcctggcgccggccctgcccagacagccaggaaatggacagtgaccttctcggagaagcgcacctgcgggcagacatggggacacaggcaggagatgcacacagccacgggaatccggatggggagggcggggaagagagagagagaagcaaacaaaaattagttattacacaaaaatgctttctatctggctagtcacttgcctgtcactgtcacgggattctctatctgactcactgaaggaagaggtggtttcctggggctgctgtgagccacagctgctccctcctcccccaggggcctggcctcttacaagggattgcgtgacagcgtacacagccttctccatggagatgacatgcaaccctctgcaacatacagggacccagaagtctcggcccccagcccccttcctctctaagactca

SEQ ID NO: 110529 - DNA, 644 bp, Homo sapiens
atcttgttacttttacatgagtttaccctcagtgctgtgtgatgtttaaagctgggaagatctataaaataagaattaaaagaagatgaactcaaataaagtatattctattattgacatgtttttctcttttctacacagaaaatgttttcagactgctcatttctatgtggaagacagcagttcacctcgagtggtccctaatgaaagtatycctattattcctattccgggtaagtaagacactgctcttatttccaatgggctaattgtttttctcttttattctcagttttatgtgataaaacaacaaaatattttatagccttttaaagcttgcccagtataagaaattctctttagaagaacaaataactgagttaatgtagtatacagtcataggcaggaaagggaagtacagtagaaaaaagggaaaaaccgtacaaaaacattcttagtatctacttggactaaatttcatttgcataggcaatttgtgcttatatttttaaatcacaatttgtgacacatttttttaaaggtgatatttttctaagattctttcctctaaaataatgtatcttaatgttcaaagttttggttcttacgatggttgtgtggaaatagaggaatacattactggt

SEQ ID NO: 110530 - DNA, 648 bp, Homo sapiens
tggatttgcacaatagcgtgcatatactttttcctcttgctttacctacaatatgtgttgaccactggaaaattcctggcagcctttctcccctctgacctgatttgtctgacacagactcagttgtttggtagctgtgtaactgaaatccatttttgaagagttaaatggtgaaatacttactgggctgtttttccatttctattttcttttaccactggattaggaatcagaaaacctaggtccaccctgaaatctttgttcagtgccttcacctctctgaaccttagtttccagaatctgtaaattaattaggatgcctrttctccttgccttttgaggtaactgtcaagacaacagtagatgatatttgtaaaagcactttggaaaccatacattaagcgaaacgtgtaagctgttgcaactttccttcccaaatcatggtactggtaatcccagcagtcatggagagagagcatttgcatgactctcatgttaaaattgtgtccctgacaccgaactacatccactaggtgtgccctaccttgaatcactcttctttgatataggctttagaactttcaattcactaggatcctctgaatatgccttgcaacacctttgagtaggtatattagaccagaaatt

SEQ ID NO: 110531 - DNA, 591 bp, Homo sapiens
ttcttatttataaaattaaaggaaaacaaggaaggggctcatcctttaaattactaatataagagcccccccatgcttactcatcccacaagaaggcagcaaaatatttacttaaaaaaacttaktattatcatctgtgcaacacattgcaaagcttacatttctgatggcaaagaaaatattgagttctagtatattgtttttataattaggtcaacagacctatttgtatgcatgctgaatcagaggaactgttacatttcatctagccagctggaaaaagcaaatatttgaaggaagaaaaacggaaaatgtacatatttaaaattaagtcttactcaaatgcctgagcctggcttgagggtggtaaattatttcattattacttagaatgatgatccagggcccaggtatggctattagtgaggaactgaggtttaggttacctgtgtagcttcaaggataaagtcatggatgataatttgttcttcattagagaggcacagtctgtctttgctgataagggtgacggtaaaggcctcacagttcatggattcttctcgacttggccagtacacaaactcatcttct

SEQ ID NO: 110532 - DNA, 584 bp, Homo sapiens
ttgttcccaattcctgagccaaaatttgtcaatgccttcagcaatgacttcctaaaatgtttttgactgcaasccacattaagaaatctatttcaactgtgacttgccacaaacagacatatagaaagatatataaataaaacaagttttgtctttcaaataggaccactgggccgggtgtggaggctcatgcctgtaatcccagcactttttaatcccagcactttgggaggctgaggcaggcagattacctgagctcaggatttcgtgaccatcctggccaacatggtgaaaccccgtctctactaaaaatacaaaaattaggtgggtgtggtggcatgtgcctgtaatcccagctactcaggaagctgaggtgggagaatagcttgaacctgggaggtggaggtttcagtgagccaagatcgcaccactgcagcaagactccatctcaaaaacaaaaacaaacaaacaaacgaaaaccaaaacaaaaacctgtaaaaagatttttaagaagagtcaatttgggaaactggaatacagattagatatcacattaaatcaaataataattcttaattttttaa

SEQ ID NO: 110533 - DNA, 490 bp, Homo sapiens
ttataggctgatgagtttctccaggttttggatgtgactgcttcctacgacagttttctagtaacccactggttacccccttttcttatgaggtcagacactgggctgtatactattttgtattatcctttcatctgctaagcacacggtacaatctgtgagctgtgtatcaaatgaataatgtaagatttgaacagttgcttccaggagcctaaagtttcttagtagccttaatcctcagcattctgatttttatccacacacccttctcatagctttcccttccagtgcttccagaaactgacccttctagtgacgtctgctacrgttgttttggaaacctaaatgggaaaggtaaacataaattcctgaactcaggatatatctaagacctcacagagtccccttatcctctttctgtctagtgggggaagttggcatatgcagaaaccatccagccttcagtgatacacaatgaaaactagaattc

SEQ ID NO: 110534 - DNA, 520 bp, Homo sapiens
acttaattaacatatatttcactaacatcaaacaagtcattttcttagattcacagataaaatactcatttgtcaaataacttagtagaaccttgagaagaagataacaatggcttcaaatatttktgacaatgctgttaagcaacaaacaataatcagtacatacacgaattagaatatttttagtttcgtgaataaatctgagctacgatttacatttttaagggcatcaaaaaatttatagacatcatgtaatttaggtggacccaaatacggtttttttcaaaatacaggcattcttatttatatttttattatatgtttttgaaaataaatcatgtaattgttggccatattgaaaacatctcatgccagagtaataaataagaaagcactgtctctcaggttaaggaaattaaaagatagtgcagaggtaaattaaggaataaaagaagatttagaaaaagcaaatgatagccaaatgtgagtccagacacttactaacgacatcaatttcaaa

SEQ ID NO: 110535 - DNA, 593 bp, Homo sapiens
agttctagcagaagcaagacaacagcttaggtttccagactcccagatcaaactcctctgtactattcaggggaaagggcaaagtggagagaacataggatgtctaggccaaggaggacaatggaatcacagrtaccataggtggaaccaaggagacttcttgaggaaatggcaatgtagtatcccaaaccctgtgaaatgacatcaacagatgggactacctagcagcaggtaaaagctgccaattagaacaaaagtgtcacacaattaagaagaaaagtaatgattcaacctgttaactatataaacaagcaaaccaaaaactatgcagccataaaaaagaacaaaatcatgctctttgcagcaatatagatgtagctgcaggccattatcctaagcaaactaatgcagaaacagaaagccaagcacatattctcactgtaagtgggagctaagcatgaggtacacgtggacataaggatgagaacaacagacactggggactactgaagtggggagacagagagcagaggaaaggtctgcaaaactacctactgagtactatgctcacttcctgatggtttcaatcataa

SEQ ID NO: 110536 - DNA, 568 bp, Homo sapiens
tggtgagccaaagggagatgataggatgttcctgacgcaaagcttgtgatttgttctagcacattgttagaaatctgtgcaaataaaaacaaaaatattgtaagaccaatattctaaataatcttttactaagataaatcatttttactttttaagacagttgaatctatacatgattctactttgacgaaagtcaaaacgtgtttctatagaaactataaaactatgtacaaagaaaatgatttcttcataactacaattttaaaaaatacaaaaagttgtcattcagacctaaatcttaagtattctaatggtagaacaactacaaatattaatttttagacacaaccatttgaatatcaatggatttgtaaagcaaaacagatgtgttttcttctcaatktcgtagtattttatttcaatcatcaacagatttctcatcaattgcaatataggaccaaactctaataacctaactatttcattagctattactttatatgtcaccgattattatcataaggacaaaaaaagtacataataaaaattaatccttcgaggaaggcaa

SEQ ID NO: 110537 - DNA, 600 bp, Homo sapiens
caaaatgctgggctgttaccagaaggcagggaagtggacctaggctggccatatgtccttcacatgacctcttttgccctttacttttctataaagatttctgtttttataaaagtcattcctaaaaaaaaagaaaakaaaggaaaatggtgctgtctccacagacaaaggctgctctcagtacttctatgcagagcatctgtctctccactacccgctggagatttctgcagcctcagggaggctgatgtgtcacttcaagctggtggccatagtgggctacctgattcgtctctcaatcaagtccatccaaatcgaagccgacaactgtgtcactgactccctgaccatttacgactcccttttgcccatccggagcagcatcttgtacaggtacgatgcaggtactcttcttggtgggtaaaaatatttttcacaacctctgttttacagtatctgtgttccccctggatttttttttaaaaacagtttttgtgtgcacacatgaggtcaatggctgacccgtgccctatttagtatcccctatactttagtaccctcgccagagcctatcagtctcaatgtttgttttcccttata

SEQ ID NO: 110538 - DNA, 599 bp, Homo sapiens
cttgggtaatcctgaagatcagtttagcttgcaaatcaccaggcaacacctataactctcaaayttgcctgaagatatgaatcacccaggaagcttattaaaaatatggactcccagaatttaccaaatcattctctcaggagaatgacctcaaaatgcatattttaaaagagatgcccccctgcaaactcccataaataatccaagaagcttgggaaagcaggctgtgtatggccattttttatacttgcacaattttgaaggctttgtcattaggcagatatgacacttggttgtgatacgactagttttcttttcttgtttataaatttatttcatttatcttattgttatttagagacaggggttccctctgttgcccaggctggagtgcagtggtgcaatcataggtcactgcagcctgaaactcctgggctcaagcagtcttcctgcctcagcctcccaaagtgttgaaattaccgttgtgagccactgtgcccagccttttgttgttttatacttcgtgcacatcacagagcttccttaacctcagcgcttttttatgcacttaaatttttgacccccagttgcagaaatca

SEQ ID NO: 110539 - DNA, 494 bp, Homo sapiens
tccagtcaggattactttttcctccttccccattatagcctcaatttccttaggctaactgctcagcaaggtgtctagttagcacaattagagcttttcctttttagatgaaaagtacttgataatgtgaagggctggcattttaaatcctgagggtaaagaagcatcaaatgaatctgataggatttcagccagcccacaagcctagtgaagaactggccctttaggaaaggatggggctgagagagctttcctggtattgcttgggagcagattctgctcctacttaggcagcaataaacacatcccgggtcgttgttgtgatttagggataaaatagtycctcattttcaaagcacagctccgtcacaggcttacaccttcacaaaagatttgtaaagatttgttttctttacaaatctctattttaattaaataccaaaatgcagtatctttaaagccttgggggcacgttctatagtatttatccaaca

SEQ ID NO: 110540 - DNA, 637 bp, Homo sapiens
ggtggagaaagaaaaagcagtttactaagattttttttaaaaaagcataaatgccctatctagcaccagagggagagatagatagataggtaatagagatagatagatagatagatagatagatgatagatagatagatagatagatagatagatagatagatagatgatagagatagatagataatagagatagataatagagatagatatagatagatagatacatagatagatagatagatagatagatagatagatagatagatagatagatatttcgtatacatttgcactctggtttgcttatacaactgaaatataatagagttgtcccttagtatctgtggaggattggttccaggaaccctacagataccaaaattctcagatactgaagtatmttatataaaattgtgtagtatttgcgtgtaatctatgcacatcctctatatactttaaatcatctctagattacttataatacctaatacaattatattctatataaatagttgttatattgtattgttttttatttgtgttattgtttattgttgtattttattgtgtctgtttgtaaaatgttttgatctgtgattggtttaatccacggatgccaaacctgcagatacaga

SEQ ID NO: 110541 - DNA, 430 bp, Homo sapiens
caattcttagtgagacactacaagaatatggatgtcacttgaggcaggtctaagggtttggttttgttctacatcatggatgacaagtccatggcctttgtgcttaattgatggtgacaatctttcccatgaatccttcccaagcccacytcccaggcggtcactaccaatttattggggttaaaggaaagttacccttatgttacccttatttcctatccttgctctggattctggagactagctggtcccagaggaaaccaaaagcaaatcaattttccctgaaagatgttctcaatctagtagaccactcagggcccagggctggggaatgaggtccccaaggtttacttttgtggcatttgtggcctggattccccttgctttcagactcctggtggtctccccgtctgatgctggcagcttcttc

SEQ ID NO: 110542 - DNA, 430 bp, Homo sapiens
caattcttagtgagacactacaagaatatggatgtcacttgaggcaggtctaagggtttggttttgttctacatcatggatgacaagtccatggcctttgtgcttaattgatggtgacaatctttcccatgaatccttcccaagcccacttcccaggyggtcactaccaatttattggggttaaaggaaagttacccttatgttacccttatttcctatccttgctctggattctggagactagctggtcccagaggaaaccaaaagcaaatcaattttccctgaaagatgttctcaatctagtagaccactcagggcccagggctggggaatgaggtccccaaggtttacttttgtggcatttgtggcctggattccccttgctttcagactcctggtggtctccccgtctgatgctggcagcttcttc

SEQ ID NO: 110543 - DNA, 638 bp, Homo sapiens
tgatgtgtcccagagattcttgtatgttgtatcattgtccttattcgttttgaagaacttcttgatttctgcctgaatttcattatttacccagaagtcattcaggagcagattattcaattttcatgtgattgyagggttttgagtgaatttcttggtcttgatttctaatttgattgtgctgtgctccaagagattgttatgattttagttattttgcattttctgaggaatgtttgttttactttctattatgtgatcaattttagagtatgtgccatgtgatgatgataagaatgtgtattctgttcttattgggtggaaagttctgtagataactatgaggtccatttggtccagttctgagttaagattctgaatatcttcattaatttcctgtctcaatgatctgtccaatattgtcagtgggtgttaaagtctcccaatattattgtgtgggagtctaagtctctttgaaggtctctaagaacttgttttataaatctggtgcttctgtgttgggtgtatacatatttaggatagttagatctccttgttgaattgaaccatttaccattctgtaatgcccttttttgtcttttttgatctttgtcggtttaaagtctgttttgtctgaa

SEQ ID NO: 110544 - DNA, 608 bp, Homo sapiens
  misc_feature (1)...(608): n = A,T,C or G
ggtccaatattatacattatttctactgtgaaattttacagctgttcaaaatttcttgcaccaatcctacagttaatatacttctgattttcatcttttcagcatttatacaagtcttcacttttatgactcttatcgtctcttactcctatattctctctgccatcctgaaaaagaagtctgagaagggtagaagcaaagccttctctacttgcagtgcccatctgctctctgtctctttgttctacggcaccctcttcttcatgtatgtgagttctaggtctggatcagctgcagatcaggccaaaatgtattctttattttacacaataataattcctttactaaatmcttttatttacagcctaaggaacaaagaggttatagatgccctgagaagaatcatgaagaaataaatagttgtcagacaacattcaaaccatttcttctttatattctgctgaagaaaaccccaagtcctgtagattaggactagtggtcagggtggtccctgagctctgtgtaaggatctcagcttcatattatgtttactggantatggatccagtgaaggtttggtaacgttacccaaaatcagcttatttaga

SEQ ID NO: 110545 - DNA, 539 bp, Homo sapiens
gggtagggaaaatcttttgagactttagtgctgggatggctgctaacttattcttggtttgtggtagtgaaaattttttgaggtaaattttgggggacaaatctcatcaatggaatttagatgattagcttcaaagctctacaattaaccaaartgaattaataaaaaaggcaaacggaaaatagctatatttcttgattgttatcagtgatattagcacaatggaaattctatcaggagaacacaaaaagatagacttgacttataagaggtgaggaaaatatgaaaatagaagatgagctgtaacatgttttgctggaaatctggcagagattatatttactggtcaactagaggtcacttagtgtgaccactgacttttcaagaggtgtgaggacaaggccagatgaccatagaaactaggaggtactgttaaataattgaagcgttttgccaacagataaacactggaaacctgatgaggttttgttagtctggatgctcagactgtgtgttcagggaagtaatattttaaaggt

SEQ ID NO: 110546 - DNA, 578 bp, Homo sapiens
ggaacacaatatatagagataccagcaagaggcagagagtgcaacaataaggaccaaggtaaaactttgaggataatgtgatgctgtcatagtaggtaccagagttacattaaattacaaattggaaaatatgaaagtaagaatgccctgtagaaatgtcacctctacacaagtgtcttattggatttgatgttatgtgaatagagaaattcgtcattgcctgctgatttctaatcaggtattaattgagcatgtctgtacccatttctaatttgacatacaaatgagaacctttagaattgtgcaaattttcctctgcagtgagaattaagcaaaaccagatctcaggaggacaatgacaaatttctgctttgattaaaaagatagtagaaacaggaatattaatccccatcaactaattatataaaagtcttgtctggtctctaaggaaaaagacagttcatgaagactaaccatagactactgaggactaaataagatccttcttctgatgatctctgtgccatgaayggcaaaagtcattcaagaagtatagcaaactaaaggtgactggctgc

SEQ ID NO: 110547 - DNA, 576 bp, Homo sapiens
ctcccttcatgggtaatcacggacctgcagttgccttctggctttgggaagacttaacaagatcatatgtgcttacttggatcacctctccytcagtagatttggacagagccagatgttcactctgtgagtaactgttgacctgcaattgctttccaatctgggctgaactaacgtgagcaccagaacttagctgggttatttttctgtcattaagattggacattgggcaagaccagatgttccacccatgggaaatcacagacctacagttgcctcacgacctatggaagagcacctgggctgtgtggagaagatggatagggatttgaccctagaaaacccatggaacatgtttcctgcagcataatactgtggctggcttctctggtgtggcacctctgttggctggaatacagaggaaccaccaatatctctgttttgtcaatgtgagtcccacccatgttctttgtttctaactgaacccaggtggcctggccctgccagattcccaatgtttcctgtgggacaagactgaagtaaacctcctgtaaaggttcccagaatggtggagaa

SEQ ID NO: 110548 - DNA, 571 bp, Homo sapiens
ccatctactctgtttccagagtctatataatatgaaagttttgggagatagaacagcctgtgattgtgaggatgttggggaaacatctgaggaaagccaggtttttgttagtgtaagaggataaaagaaaggctcacaaaacaattcgaagtaaaagattttctgatgattagttttagagaggcccaggagagtttcaggagccagggaggttttggagatatggagggtgtggtgtttgaaatgtttgtgtcccttcaacaktcatgttgaaacttaatccccaatgcaatagtattgcactggggtcttgagttggtgattaggtcataagagtcaaccctcatgaatggtgttagtgctttcataaaagggcttgagggagtctgtttggccactttttggacctccactatgtatgaagacacatagaaggtgtcatccataagaaacagccctcctcagacaccaaattggctggcatcttgatcttggatttcccagcttccagaactgtgagtaataaatttctattatttataaattacccagtctaaggtattttgttata

SEQ ID NO: 110549 - DNA, 597 bp, Homo sapiens
gaattctgtttaaacatgttataatgagctagcacaagtttatttttgtgaggaaattgtttgggattcatgaatagttttttatagtacatattttccataaacgtttttgaagtcccctcatgtaagaccaaactgagggtcaggctgcttattcttgtggcccaataatgagatgcagatgaactgggaaagaagagattttatttctgcaaccaggtacagggagtaggcctggaaaatattgccagatcaactcaaaattacaaagttttccagagcttatataccttctaagctatatgcctacgtgcaagcatgcattcatctaaagacataagtgattaacttcttctaatctgtaactaagatctgagtcctgaagaccttcctctggagcytcagtaaatctacttaatccaaatgtgtccaggtgctggagtgattacccttgttttgtctcctgctaaatcatggaggtttgggcatttccttagacctttagacctcccccctcccccgccaataaacttgtttgtggaggtctggggagtttcttcaggcccccaataaaacttgtttaatcctaagtgggtc

SEQ ID NO: 110550 - DNA, 605 bp, Homo sapiens
tttaaaaatatgcacccctgggacccacctcctgacatagagtttttgatttaaaaagcctgggctcagaaatctgtctgctgaagaagggccccaggtgattcagctacagagagtccttggactgagttttgacaaacacattatttgtatttatagttttatttatatttcataacaaatattgtgtatatttaaggtatacaacatgatgttttaatatatatatatagtaaagctgygagtggtggttcacacctatcattccaagaattttggaagccaaggcgggagcatcagttgaacccaggagttcaggactaacctggacaacacagagagagtgctttctccactgaaaaaaaaaattaaccaggcctggtggcatgtgcttggggtcccagctatgctggaggctgaggggagtttgaggctgcagtgagccgtgatcatgccactgcagcctgggtaacagagaccctatctcaaggggaaacaaacaaacaaacaaactatatatatattcccaaaaggggaacaaatccattactttacatagttacctactttttcccttgtgacaagaacagctataatgtactcat

SEQ ID NO: 110551 - DNA, 605 bp, Homo sapiens
tatctttgcttttgttgtattttctttcgggtacttgstcatgaattctgcctaagccactgtctagaagagcttttctgatgttatctgctagaatttttatggtttcagatattagatttaagtctttgatccatcctgaggtgatttttgtatatgatgagacatgaggatccagttacattcttctacatgtggcttgccaattatcccagcatcatttgttgaatagggtgtcctttcctcactatatgttttggcttgctttgtcgaagatcagttggctgctggtatttggctttctttctgggttctctatttggttgcattgacctatgtgcctatttttataccagtatcatgctgtttggtaactaacgccttgtagttagtttgaagtcaggtaatgcaatacctccaaatttattctttttgcttagtgttgctttggctatgtgggctcttttttggttccatatgaatttcaggatttttttttagttcgtgaagaatgatgatggtattattttttatgggaatttcattgaatttatagactgcctttgtcagtatggccattttcacaatgtcgattctacttatcc

SEQ ID NO: 110552 - DNA, 656 bp, Homo sapiens
catgaaacaaacaaaaatagttctaatattatttttcagttcttttgtgatacagactgaaataatcaatgctggcccagaacatgagacatgcctcagtagacccagaaagagtgaaaagaagaatgaatgcgtttattctgggagcaggaattctgtagtgtagatgtttaggtacaactatccaaccagctactaatccaatgaatgctacttttatccagccagtgtttctccatctggtccatcagcccatcataagagtctgtcaaatgccttgctgaaatgcagataaatgtcaggatatattttacatcttcctttatgtgaacgtgcttcactattcctccagtgctatgggaaccccatggagaacaagaaaagtcaaccattaaggttaagcaactgagcaaacaaagatgtgttcctctaagsctgactgtttgtcaaaagtgttgttaaaatattgccttgtcacaactaaccaagtgtggtctagcaaaaagacacatagggctggatacagtggcaccgtgaattcccatatgagctctgtcactgctagctcaatcatttattggactcattcttctcaacaacacagaaacgggtgaggaaatcaatcagtgaattttattcattcaatcagccaacat

SEQ ID NO: 110553 - DNA, 464 bp, Homo sapiens
acacagcaattacagtgattctttacaaacccattggataatatgacttctctttttaaacattcctatggcttcctgtcatacagataaaaacctaaagtctttaacatggtttacagttccctgtgtggtctgtttcctactattctcccccttgttttttctaatctgtcttcactgtgctgggcctctgagctgtttcttaaacataccaacagtactgccttctcaggcctttgcatttgcatttcattgctcctcccctggtctgaaaagcctttgccctggacacctaccttgctccctttctcactttattccagttgctgatcaaatatcatctcaacaagtaggyctttcattacctcacatttaaagtaggctttctatctctctctttctccatattcttcctatttatttatttatttatatttccatggctttaggagtacacatggttt

SEQ ID NO: 110554 - DNA, 517 bp, Homo sapiens
tagcactcatatcctgaggatctaatatggaagttagaaattctttgcactatcatcatttttttaagacttatattctcagtaagagttagccaaatcacaatggaaagaatgataatctggggtcagagttcaaaaggactaaacattaaagaacaaaggtgagactgagagaaaataggtagaagctgagggctggagaatcagtactaggagccaggggggtctcctaagacatgtttagtgttttgggttttaagaactatgaaaaacccgctgcaaagctttaagctttgcaaacaattgaccaaaacagcattatggttgtagtgtggaaaactgattggaaggaggatttctagagccatgactgttaaggggatgcttaaggaatccagatgtgatttcatygtgacctccgttatgttttggggaatgtagatgaagagaagttaaacagatgaaaaagatacctcgaatggagaattagcaggacactattactgattgtatgtga

SEQ ID NO: 110555 - DNA, 369 bp, Homo sapiens
ctaaacccatattattttttacttagaatagaaacatgtatattacataaaatcattaacaatatttgctgtaacctatttgtttttcagtgtggaagaaggagtttccatacttaattataatggattattttataatattccatgtagtcttggacagtctttttttttaaaaaaaaatatatatatatatgaactttggggccaggcacggtggctcacatctgtaatcccagcactttggaagtcctcggcaggcagacgacttgaggttaggagttcaagaccagcatggctaacatggkgaaatcccgtgtctactaaaaatacaaaaattagctgggcttggtggtgcccacctgtagtccc

SEQ ID NO: 110556 - DNA, 674 bp, Homo sapiens
agctgtaatcatcttggccaagagacctcagcatttttttttctgcaaaggcccatgattcatcataaaaaaatcagaaactggccaaaataaatggtacaaatattcgtcagggaaaacagctatgtaactaattgtagattcaatttttcaattggtgttctttctataaattgtgtccttccaaaaattacccccaaccaaaaaaaaacccacttttcacttaagacattttgttcatgatatcttgtatctttaataaaaatgcacatgtattcacatcaatgctgaatgactaatacccagagtctacgaaattgcgcctctaaaaggacatatgtatcactgtcatcctgtatcttgtcctcacattggcttagaaagataaatacatctgatgattattgtactgcttaatgactttctaggttcataagaaatttcatagattaggtaaaaaaattgaatactaagwcaagatcttctagttttaacaaaagaagactaaagatgaagggcaatttgcaagctggtgaatgtttgtggctcataaatttaacccccaaattgtcgtgttgtttttttcttttctttctttctttctttttgcatagaaaacccatatagaacttaacaaatttacaaaaagacctcatatatagagtgtgagctaa

SEQ ID NO: 110557 - DNA, 612 bp, Homo sapiens
ggaaggatataggttttcatttccttttcacaacaggccctgtctgccgttgccatgtattgaaattttcctttctctttagcagagagggtcttccacttctctgagtgcttcttagaaaactctgagaaatcgactgaagcatctgtgtgctcctcctggcaaatttgcacaaagaatgcatatgatgacattttgtctcttggcttctgaggttttcctttgcctatgtttggttatttttcctcagtgaggcatggagtcatctagtgcctgaccagctctcacttgttctagcactttctctatggatctcaaattatggtaatggctctttaacttttaaaaaaaatttgttgtacgcagattattgcctcaggtgaagtggaacagtcaatactgaaacttaaggaaaaagttgcctgtctgtctaaggcagacattgatggttaactattgttaacaatattractattgcacagaatctaccatggcctgcaaggaggaagtctaaggtaattctaccatccatgacaaccctggccagtgagttggggccgcccttaatgcctcccagggctaacgtggtgtttagtgcattttgtgtgtgt

SEQ ID NO: 110558 - DNA, 533 bp, Homo sapiens
tacaaatgaactgatacatttaaagacaaaaagataagtaagagccatataagaaggaaggcgatcatttcattagaaaactaatgggaggttatgactgtacttgaagatctgttccatttgttacatcttggcagcaagggcaaaaatggaaaatgttatttgtagataatgtaacttatattatgtaatgatgctaatagttaatatctatacgaaaggttgaggtagtgcctagaacaaagtaagttgctcaataagtgtctcttcctgcttctccttaaagagcctttttttttttttttttacgcaaattccagcttaggggtaatatcmctttctaaagcagaaattattttctgctgggagttgttcctagacacaatttgctccttattgaataaataaataattcctattttgtaaagtaaaattcacaaaatgagcgataaattctttataaccataaatttctcaaaagattagacaaaaagtgaggaaggaaaagaaacgaggaaaggggaggagaaatg

SEQ ID NO: 110559 - DNA, 533 bp, Homo sapiens
ttgtacttcccagccaccaaaattgtgataagtaaaattctatttttgtaaattacccagtctcaggtattttgttatagcagcatgaacaaattaagatagaaattgtatagttttagaagatgtgtatggctgagaagttgataaagtgtggacttatgttggttaatttttggtgtcaacttgactagattgagggatactcagaaagctggtaaagcattattcctacgtaagactgtagggtgtcttgaaaagagattggcatttgaatcagtggactaagtaaggaagatcttccttcactcaatatgggcagacatcatgcagtcagcaaagggccagcatagaacaaaaaagtatgagataggcaaatttcctctctctgattctctttctctctgattctctctctctctctctctctctctctctctctctcwctctctctctgtttctcttttctggagctgagatacgcatcttctcctgtccttggacatcagaactccaagtcctctggcctttggact

SEQ ID NO: 110560 - DNA, 533 bp, Homo sapiens
ttgtacttcccagccaccaaaattgtgataagtaaaattctatttttgtaaattacccagtctcaggtattttgttatagcagcatgaacaaattaagatagaaattgtatagttttagaagatgtgtatggctgagaagttgataaagtgtggacttatgttggttaatttttggtgtcaacttgactagattgagggatactcagaaagctggtaaagcattattcctacgtaagactgtagggtgtcttgaaaagagattggcatttgaatcagtggactaagtaaggaagatcttccttcactcaatatgggcagacatcatgcagtcagcaaagggccagcatagaacaaaaaagtatgagataggcaaatttcctctctctgattctctttctctctgattctctctctctctctctctctctctctctctctctcacwctctctctgtttctcttttctggagctgagatacgcatcttctcctgtccttggacatcagaactccaagtcctctggcctttggact

SEQ ID NO: 110561 - DNA, 527 bp, Homo sapiens
tgatataccttcagaatataatttaaaacagaacaaagtaaactaaactaaactaaaataaaataaaatgaaataaaaacaaacaaaaaacaaaaacaggatcactaattttaggtgaaagaagaggggtggtaggaggcagtgtttgaacattcatttcctcgtcttcataggagcyattcatctactgcctgcaactgagatatttagctaaaaagaaaaaaatgacttaacaacttaaattttgtggtgatcatttaaaatttaatttagatgaatgttttaggtcatggtatttttttgatgaagaaacaattactaaaaatttaacaacaattcatttcattttaatgcagcattgttcacttttaaattttaaattaaaataaaatagcatgtcataattttgaaaatgaaaatagcaagtacaattctattttaataatattagtttgatctcaatctagttatctatacctctatgtttctttatgaatggagatgtctggaattaaggtaacaaattt

SEQ ID NO: 110562 - DNA, 602 bp, Homo sapiens
tgattttctatattttttgttgttttatctatttggtatgtaaattgtttgcaagtgaatcagctgagatttcatttagtaatttaacaaatgtttgttgatcatctactacattctaggcattgttaggccttaagaatagagatgataccatatagtggacatcatcacagagattaaaatctagttaaaagatataggagtgaacaggtaataatgaggtagtgttaacaagtcatcttatattctggatgcacaaaagaagggcagtccagtctgggttgagggaagaagcaatcaggaagggcttccaggataaagcattgtcttgaaggataaacaagaattggccagataaagtggttgaatgcctgagattggcataagaastttcaagtaggagtaattgtagctctatttctaataggttgctatgaaatagaaaaagaaatgatgggatatagtcagagaagaatgtttggattctttcctctgggtattaggagtggggaaatcacataaggagatttgtattttagaacgtttgcctactaaataagactccatttgggcagaaatgttcaacattgcactcataaaaa

SEQ ID NO: 110563 - DNA, 597 bp, Homo sapiens
accccttggcttccagtctgtgaagggatagggtgggagacatggctatctcttccattagacaaggattctgacaaatgcaatgctagagagtctccacttcattctgtgaaatacagtaggaatgtggtccattctggattttatgagatgttggtgagataagagtatgacctgtcggtatggcaagagattaggcaaaagattacttaggttctaattaaggcatatttccagacatctcaatggttacaacagggatggaggctgacagartcaactcagggaggaaagagagagagagaaaaagaaagtaaactaagcaagtaagtgaaatacaaacctgggtacaccgagaaatccataaatttgactagcttacttcaaagttccttgactacttctgtgtcaggaaggatagcactcagaaattaagttgattacaggaatctaacattacattgactgacgcctgagtctgtgactgtgaaatttgtttatctctttggctagccctgggcattgcatggagtgctcactccacaaacactggttgagaggttgagtgggtgcaagaatgtagggagtataagtaag

SEQ ID NO: 110564 - DNA, 558 bp, Homo sapiens
accccttggcttccagtctgtgaagggatagggtgggagacatggctatctcttccattagacaaggattctgacaaatgcaatgctagagagtctccacttcattctgtgaaatacagtaggaatgtggtccattctggattttatgagatgttggtgagataagagtatgacctgtcggtatggcaagagattaggcaaaagattacttaggttctaattaaggcatatttccagacatctcaatggttacaacagggatggaggctgacagagtcaactcagggaggaaagagagagagagaaaaagaaagtaaactaagcaagtaagtgaaatacaaacctgggtacaccgagaaatccataaatttgactagcttacttcaaagttccttgactacttctgtgtcaggaaggayagcactcagaaattaagttgattacaggaatctaacattacattgactgacgcctgagtctgtgactgtgaaatttgtttatctctttggctagccctgggcattgcatggagtgctcactccacaaacactggttgag

SEQ ID NO: 110565 - DNA, 639 bp, Homo sapiens
agtggaacctcaacatccaaaagcaggcttggataagaggcagtgtattgctttacagtaatggaattattgtaaccaaaggattttgttgttgtttgttcttgttgttgttatgctcaagtttaatttttatacttattttttaaagaaagaattcttcaagcccagaaagcacgttaacttttcattatgaaattactcactgactcagtcaagagagcattgttatcagttatccttttgtattcatcaaggttctccacagaaacagaaccaatattatatatatagatatatcaaaagagaggtattatgaggagttggctcatgaaattacagaggctgagaagtcctacaaactgctatctgcaagccagaggcccaggaaagycaatggcgtagttctggtccaaactcaaaggcctaagaaccagaggagccaatgttccatgtcctagcttgagtccaaaggctcaagaaccaggagtaccaatgtccaaggccaggagaagatggatgtcccagctcagagtaaattcactcttcctctgcctttttatctaacctggctcttagcagatgagatgatcaccacaaacattggtgagagggatccttttttttccttttctaatttta

SEQ ID NO: 110566 - DNA, 639 bp, Homo sapiens
agtggaacctcaacatccaaaagcaggcttggataagaggcagtgtattgctttacagtaatggaattattgtaaccaaaggattttgttgttgtttgttcttgttgttgttatgctcaagtttaatttttatacttattttttaaagaaagaattcttcaagcccagaaagcacgttaacttttcattatgaaattactcactgactcagtcaagagagcattgttatcagttatccttttgtattcatcaaggttctccacagaaacagaaccaatattatatatatagatatatcaaaagagaggtattatgaggagttggctcatgaaattacagaggctgagaagtcctacaaactgctatctgcaagccagaggcccaggaaagtcaatggcgtagttctggtccaaactcaaaggcctaagaaccagaggagccaatgttccatgtcctagcttgagtccaaaggctcaagaaccaggagtaccaatgtccaaggccaggagaagatggatgtcccagctcagagtaaattcactcttcctctgcctttttatctaacctggctcttagcagatgagatgatcaccacmaacattggtgagagggatccttttttttccttttctaatttta

SEQ ID NO: 110567 - DNA, 668 bp, Homo sapiens
gttttggtatcagaacccttccctttttggcttagtaactgctcctctcctactccagttgattttttgggaaaacttccagtcacagttccctactcctgactctgcagtcagagagaggcatacatttcctaggcatgggcagtgatggtgtcccatccctaggcactctgatctgtccaagcaacagtgtgtgactgcagttaggtccatcarattctgaggttaggattttaaaatatgcttatatggaagacagaggcattctctttcttttaggatttctaaactgaaatgacgaatacctgggtcttcctctggctgttatattggtttcttatggcattaggaaataaataccacaaactgggtggcttctaaaatagaaatttattctctcgtagttctggaggctagaagttcaaaatgaaggtgtcagcagggtggtgctctgaaggttgcagaagaggattcttctttgtatcttccagcttggtgggttcccttcgatctttagcatttcttgacttctagatgcatcactccaatatctgccttcattgtcacatggccatcttcttcccggatgtctctttgtccaaaatttccctcttcttagaagaataccagtcactgaattagggcccatcctaagttagtatgatctc

SEQ ID NO: 110568 - DNA, 581 bp, Homo sapiens
ccagaattatgaaaaatggcttggggtrtgtgtgtgttggggggatgtagggaggatatcaggagagtatcagaataatttggggacctttgagaaaaaattatacacatctccccaaaattcttctatcctccatccccttttgagaaccactgttaatgatgatgatgtatatctgctagttcactcatgctgtgcagaaaaaatattaataatttctgacctagagagttatttcatcagttggaagaactagttcaatgtgaagtgcattatttttgaacttctgtttttaaactgtttgctctattaaatatattttacaaatgacatctccaaattcaaaggaaatatgttacataaatgaggaagaacatatttgttcattcataatgtaacaataaataacagataggagagtaaaatcactccttttctttggctaagggagctgctagttttactcatcgtccccaaagacagtactagttggaattgcagttggttgaattgaatcagtaagaatttaagaactgtgagataagctattgaggagagttacggatttgctttcatttcta

SEQ ID NO: 110569 - DNA, 581 bp, Homo sapiens
ccagaattatgaaaaatggcttggggtatgtgtgtgttggggggatgtagggaggatatcaggagagtatcagaataatttggggacctttgagaaaaaattatacacatctccccaaaattcttctatcctccatccccttttgagaaccactgttaatgatgatgatgtatatctgctagttcactcatgctgtgcagaaaaaatattaataatttctgacctagagagttatttcatcagttggaagaactagttcaatgtgaagtgcattatttttgaayttctgtttttaaactgtttgctctattaaatatattttacaaatgacatctccaaattcaaaggaaatatgttacataaatgaggaagaacatatttgttcattcataatgtaacaataaataacagataggagagtaaaatcactccttttctttggctaagggagctgctagttttactcatcgtccccaaagacagtactagttggaattgcagttggttgaattgaatcagtaagaatttaagaactgtgagataagctattgaggagagttacggatttgctttcatttcta

SEQ ID NO: 110570 - DNA, 597 bp, Homo sapiens
ttccccgctgtaatattttataattatgtgattgtgtaaacgaggtgaaacttttcataacattttatattggaatgctcatttgttcattgagttccctctgtcggttacrtattttccccctctcctctgcctgagaaattacattgttcaagactcaggaacaaagaaaagaactgatatattttgaatattatctttgtactagataacatgataaattgggtgaccatgtgcctaggtttatgccccttgtcctggtgtaatttttaatagtatcttcttatattctcaaatggatcctcgtttggacgatgaattatatgatgatcagggctttagccaaaattacttaatttaaccctcacagcaattctgtgaggtggatgttattacccctacttttcaaatgaaaaactatcacttggaaaatattaaggaatttaaagtttcattgcttataagtgactgagtaattttatcctggtgttctgacttcagatgtgttcagtgtaccttgatgctcagatcaagtgtcactgtttatggaaaactgttgccaacccaatcctccacattgtttctcctagagacccg

SEQ ID NO: 110571 - DNA, 597 bp, Homo sapiens
ttccccgctgtaatattttataattatgtgattgtgtaaacgaggtgaaacttttcataacattttatattggaatgctcatttgttcattgagttccctctgtcggttacgtattttccccctctcctctgcctgagaaattacattgttcaagactcaggaacaaagaaaagaactgatatattttgaatattatctttgtactagataacatgataaattgggtgaccatgtgcctaggtttatgccccttgtcctggtgtaatttttaatagtatcttcttatattctcaaatggatcctcgtttggacgatgaattatatgatgatcagggctttagccaaaattacttaatttaaccctcacagcaattctgtgaggtggatgttattacccctacttttcaaatgaaaaactatcacttggaaaatattaaggaatttaaagtttcattgcttataagtgactgagtaattttatcctggtgttctgacttcagatgtgttcagtgtaccttgatgctcagatcaagtgtcactgtttatggaaaactgttgccracccaatcctccacattgtttctcctagagacccg

SEQ ID NO: 110572 - DNA, 621 bp, Homo sapiens
ctggctttgtttcctttcccagtccttgtgcatctttggttctgattctggtttgctttcccagttggtgacagcagtgaagaggaatacaattttcttgtctgcccattctgtaatctctgtcatgtaaagatcaagatttattctctgacaagtaaggaatgatagatcatctttttaatggtattttacttgtttgtgattgggtttgttttggtcttttgtttgtctcacttttgcaagataaaacagccttttgagacctgggctgtcctctcatcaatgggtagtttatttttcttttctttgtctctcctaaaagttctatgaattggattttctacaaagaaggaagttcycaggaccttgatggaaaggattataccaagtgcttctactcactgatacttcaagtaacagacttatgtatattcaagaagcagcagaaaaccagatttgagctgatgagagaactgattgtgattatttgtttggaaaaatttaagtatagttttaagttttatgagataagcactgtctctttcatcttgatctactgctatcccttcatttaaagatattaacacatgtttaggtgatatgttattctcactaacccct

SEQ ID NO: 110573 - DNA, 593 bp, Homo sapiens
atgcagcctgccacctatttttgtaaaagaagttttacagaacccagccacactctttcatgtatacattgtctatggctgttttcacaccatgatggcacagttgtttagtgtgacagagatcatatgacctgcaaagctgaagttatttattatttggctctttaacaagaaaaagtttgccaattcctgttttaccagattaaaatattgttttctatttttactaaatatcttttatcattaataaatattgaatattgtcaaaygagattcatacattttgtgcattgagataagatgatggtatagtgaattaaattgtcattctcgtgttaaactaaacttatattcctggaagaaactctcctttgttaaaatgtactattttaaaaacatattattggatttactttgttactattttgttaagagtttttgcatctttgtttatagttagattgatctgaattttctcttactgtttctttgggttttggtatcaaagttatgccatcctcttagaatgagcataaattatatttggatagctagccaatggagccatttgtgcctggtgtttagttgtggga

SEQ ID NO: 110574 - DNA, 582 bp, Homo sapiens
gaattgaataatctttgaatgtgtgtgctacacgtgtgtgtgcatgacttgaaagaaaatgtagtcatccttttgcctttttccaaattttggatatttttttccttagcagtcccacattataatcataaataatctctaaaaataattcttgatctccaaaaaaaaaaaaaaaaaaacctggtctttggcccggttcatttacaaagatataacargagtataaactaatatacttagtttatgtcaccttatagtatggtcagcaaatacagagattagagtgctaagcaactaccaagaccagaaaattctgcagatttcttaagaaaccaagattgtattttgaataggctctctacagaagtttagaaacattgtattaacaaaattttaagcatatgcagaagtaaagttgatcctgtaataaatacccctgtacttgtttcccagcttcaataattatcaacccttggctcatcttattttttctatagttgccctctcaacactaaattaatttaaaattttcttatatctttattgaagtataataaaatacataggtttattttaagcctt

SEQ ID NO: 110575 - DNA, 629 bp, Homo sapiens
ttgctgactctttttgttatctgtatttttttaaagactagttctcactatgtttcccagtctggccttaaactcctgggctcaagggctcctcctgcctcagcctcctgagagctgggactacaggagtgcaccactgcatctggctatttgctgactccttaatggtatagtgcaagttgctgaagaaacaatcagaaagaaactgctaaattgttaaaaagtagatattttggcagtctggggaaaaattaatttgggttataggrtctgtctataaagaagggcactgataaaaacctcaggctttctgctgataccactgaaggactaaactcttggataaaggtgaaactgaaactgggactcaattggatcaaggtgattttcccgtgcttcaactaccttctagaagaaaattaaaatctctctgaaagaataaagcataagccagagcttctagaaatatttatacaaatgtccagcattcatttaacaattaccaagaagccagaaaacagaatcatgagactaaaaattggggtgagtgggttgacaatataaaggtaacccagatagtgacattattaagaaaaagcttaaaatatcaataattaatatgctcacga

SEQ ID NO: 110576 - DNA, 674 bp, Homo sapiens
caactgttttcctctcactgagtcacacgtgtcccaactttggctgaaactcaaactatcctcagtaaactgggtttgggatttcataaaataaaaatgtaagaattaatacatatattgattatgagttaaacagtgatgggatccatctgtaaggtagagatgaagagccaagtgctttatctacttaaaaggaaaaacaaaaacaaaaaccttaaagagctgagtggggtgggggggaaagcaggcatgtcagaggttgggaaccattgttttactctgcatatgattatctcagagactgctagcatactatatagtatcatgtcttctacacycctaagacgtaatgttttagaaagatcattgaacatttctagctactctcttttttaaccttgctctcttttaaccctatttccttcattagtactttacagatcatgaactaactgtggaaatctgacttttaaactgacctgcccttcccatcattctcttcagctcacatgtattttcctaactattggaaattaaagtctgatgtatagacatctggtagaatttgcaagtcaaaaggggggaggtagttatttttaaaatataagcgatttcaatatattttgaaatatgcagtttttacatgcacgatttcaatattgaaagtttcaggg

SEQ ID NO: 110577 - DNA, 376 bp, Homo sapiens
tgatccttgttgtgccaccaattgtagcttaacttctggcaagatgtgtaacttctctgaacccatatcacacacacacacacacacacacacacacacacacacacacacatatatatatatctatatagttatatatagatatatatatagatakagatatagatatagatatatatagtgagagcatggactcactctccattccagctctaatattgcaagctattattcttctacatcttaggtattcttcctctgaaacttaacaggacacacatggaatgatgtgtattctcttagtgatcacctctgtaaattgattgaacttggtttaagaacttgggagtatccttttaacattttctcttgcttt

SEQ ID NO: 110578 - DNA, 376 bp, Homo sapiens
tgatccttgttgtgccaccaattgtagcttaacttctggcaagatgtgtaacttctctgaacccatatcacacacacacacacacacacacacacacacacacacacacacatatatatatatctatatagttatatatagatatatatatagatatagatatagatatagatatatatagtgagagcatggactcactctccattccagctytaatattgcaagctattattcttctacatcttaggtattcttcctctgaaacttaacaggacacacatggaatgatgtgtattctcttagtgatcacctctgtaaattgattgaacttggtttaagaacttgggagtatccttttaacattttctcttgcttt

SEQ ID NO: 110579 - DNA, 609 bp, Homo sapiens
caaatgataagacagcaaaatagcctcattgctgagatgcagaaaatttgagtggtctggataaaagaccaactaggtcacaacattcccctaagccaaagcctgaattagagcaaggccctaactctcttcatttctatgaaggatgagaggtgaggaagctgcaaaagaaaagtttaaagctagaagagattggttcaggaggcttaagaaaagaagccaccttcaaaacagaaaagtgctaggtgaagcaccaagtactgatggaggagctgcagcaagttatccaaaagatccagctaagaaaattagtaaaggtggctgcactaaacaacagattttcagtgttgaaaatgaaacagctttctattggaagaagatgttacccaggactttcataactagatagaagtcaatgcttggcttcaaagcatcaaagttcaggctaactcttgttaggaactaatgcagctggtaacatcamgttgaagccaatggtcattgatcaatctgaaaatcgtagagccccaaagtattatgctaaattgactctgcctatgctctataagtagaactataaaggctagaggacagcatatctgtctgcag

SEQ ID NO: 110580 - DNA, 504 bp, Homo sapiens
gtatgaactgaagctcttcctaaataattacctcttttagttctctgcaagtgcaatttgacagctaatagattgcctcaatggattttcgtcttccatcatgtttctatggcatgcaaagccaaaacacttaaagatcatgggcaacagactaaattaaatttacctttttctcattttgttattgtgtcacaaaaaacaagttctgaagacttgtctggaggaacttgactataagttcaaataaaatttttaaaaaagaaaccatttatttcatacatrtattttctagtttcctatcaaaggcaatacctcccctgtagttgctgctgcatgtgccaagtaagttttcccacttgctgcatcctagcttgccaaaaggagcacttcttttcctttgcaacttcactgaatttccttttgtatattattttatttctaggatgatgtttacaaagcatattatcattttctttgttttacttatttatttttgctcctgat

SEQ ID NO: 110581 - DNA, 668 bp, Homo sapiens
  misc_feature (1)...(668): n = A,T,C or G
tgatgcatttatctttgatccacttaatatattacattgtctctttntattttccagttgaattacattacattgtctcttttttattttctagctctttttattttgcatgtcatgaggctcaaataaagtcataagattactaagtggtagagctagaattaaaacttgaatcttgtaagttgtagaccagttcatttatccatgatacaaatatttacttagtatctacataaaatctagaaacatagtcaatattattttgtcatgcattacatgtaatatgaataagctttatttaaatatatgactgtgttttttattttttggctgccctgtgctttgtgccaagayttagggttgtagcaatgaacaagacatgtgatatccttcctgtcacagaattcgctttcttgaggcaggaattgataagcaaattaaaacagtaacatagtttcactgtgtgaagaaaatgaaagagggtattagagagtgaattgggtacttgaagcagggtggtcatttccaagaaggcccttctggagagccagcatttgagctaagacctgaataaaaaataggtacctttcctgaaaacttatgggaaaagagcattccatgcaggagaactagtagatgcaaagatcttgaggtaggaattaatttgg

SEQ ID NO: 110582 - DNA, 621 bp, Homo sapiens
ctacaccatctccctcagcaatsaaatccatggccaaaactttaactagtatccataaaagaatgatactcaaacctgtatcttctgcccttagatatctcttagacatcagacctgtataccaaaatgatcaaaaacagtccagctggatatttcattactacctgtacatgttcataaccagactcatgaactccttctccaatcctccacatcatcttcaatttcctaacttggaaaactacctactcatggaatcagaaacttagaaggaatcaccttcaacttctccctcaaccttactcttcacattcaatttgctcctaaatctcattgttcccacttcgtaaatattccttaaatctgtgctttctctcccggtccttagttccttatcctgcctttgtaatctctcatgtggaccactgcaacagcctcctggagtctccttgtctcgggcgttaaccatccccagttcatagtagtatcccagagttattgtgatgaacacaactctgatcatatcactttcctgctcaaaattcttcagtgactaccacacattgaaaggatccagtctaagttatttaaagatacttatcaatgccctttgtgtactgg

SEQ ID NO: 110583 - DNA, 621 bp, Homo sapiens
ctacaccatctccctcagcaatgaaatccatggccaaaactttaactagtatccataaaagaatgatactcaaacctgtatcttctgcccttagatatctcttagacatcagacctgtataccaaaatgatcaaaaacagtccagctggatatytcattactacctgtacatgttcataaccagactcatgaactccttctccaatcctccacatcatcttcaatttcctaacttggaaaactacctactcatggaatcagaaacttagaaggaatcaccttcaacttctccctcaaccttactcttcacattcaatttgctcctaaatctcattgttcccacttcgtaaatattccttaaatctgtgctttctctcccggtccttagttccttatcctgcctttgtaatctctcatgtggaccactgcaacagcctcctggagtctccttgtctcgggcgttaaccatccccagttcatagtagtatcccagagttattgtgatgaacacaactctgatcatatcactttcctgctcaaaattcttcagtgactaccacacattgaaaggatccagtctaagttatttaaagatacttatcaatgccctttgtgtactgg

SEQ ID NO: 110584 - DNA, 621 bp, Homo sapiens
ctacaccatctccctcagcaatgaaatccatggccaaaactttaactagtatccataaaagaatgatactcaaacctgtatcttctgcccttagatatctcttagacatcagacctgtataccaaaatgatcaaaaacagtccagctggatatttcattactacctgtacatgttcataaccagactcatgaactccttctccaatcctccacatcatcttcaatttcctaacttggaaaactacctactcatggaatcagaaacttagaaggaatcaccttcaacttctccctcaaccttactcttcacattcaatttgctcctaaatctcattgttcccacttcstaaatattccttaaatctgtgctttctctcccggtccttagttccttatcctgcctttgtaatctctcatgtggaccactgcaacagcctcctggagtctccttgtctcgggcgttaaccatccccagttcatagtagtatcccagagttattgtgatgaacacaactctgatcatatcactttcctgctcaaaattcttcagtgactaccacacattgaaaggatccagtctaagttatttaaagatacttatcaatgccctttgtgtactgg

SEQ ID NO: 110585 - DNA, 660 bp, Homo sapiens
tgcatccagctcactattagaaacaggtttgggagttgagaattcccaaatgcttcctcatgaacaacaaaagaaaaaagtcgctcattcctttggtcttgcastttattctcatgggtactttatgaactataacttacaagtagggttttccctctttaatcatagaactacaaagtattcacattagaatgattttaaagatcatctatttgtaccctatcagttggcaggtaagattgttccccttaaaataaactattttggcctagtttatccagataatgagtgacataatgtatctcaaattctggctttctgcctgtaaacttctatttttattttacttcttctttcttccttaaaaattattataattctcactaaaacccattattttaagagctgtatataataaggatttataataaagattaatgtcagaatacatggacacaaaatgataccaccacacttttcccatttccctaatctaaacttccaatgtcatcataaatttctttctgtgtaaacagaatacttaattcccgctttccaaactaccctaatatttctaagtatatcttaattctattaagaataatgaaagacagtaagacttcatcgatatttattatgaggcacaaatagatcatactc

SEQ ID NO: 110586 - DNA, 633 bp, Homo sapiens
gtcagattgctcatattgggggtttggggggaacctcttaacaaattgtgaaaaagcagagattgtataagccgtgtaaacttaaagttactttgcttcttcgattcttaatctatgaaaactaggtaaggtctacctcaccagttactgagacggtttatacagaggatatatatgaaagagtattatacaaactgtaaagtagtatgacattatatttgtcatgtatataccagtacgggtttcacgtagtatactatctctatacatcgaacattttctctaattatgaatgtcaatatttttaagacgtcaaagactagcaaaaaaatgggatagtttgagagcccagagaggcttttcccttgccacagaaataggtakctgtcttgtgtatctggaagtctaacatcatcctacgccaattccagcacaaagaatgccatagttagcaaggcaggattttttccactgttaggctggtatatctcaatgtatctattgttacctaaaacccagagctgctttctctaagtcattgaattttctatagtcacactatgaaagatgatatgaaatagccagaattttttcattaacaagtagagaaaccctacttaaattgacctaagc

SEQ ID NO: 110587 - DNA, 434 bp, Homo sapiens
aaaataaaagtagaaatcaatcccaaggagacctctcaaaaccctactattacatagaaattaaacaacttgcttctgaatgactgttgggtaaacaacaaaattatggcagtaatgaaaaaaattctatgarataaatgaaaacaaagacacaacatacaaaaatatctggtatacagtgaaagcagtgttaagagaaagtttatagtgctaaatgtctacctcaagaagttagaaagaactcaagttaacaatctaacatgatacctagaggaactagaaaaacaagagtaaactaactccaaaactctaagaagaaaccgaatgactaaaagcagagcataactgaacaaaattaagaccccaaaatctatacaaagaatcaacaaaaccaaaagttgacttttaaaaggataaacaagatcaatagaaca

SEQ ID NO: 110588 - DNA, 563 bp, Homo sapiens
tgataccaacattttaggtgctgataaagatacttcaacattataaatgtcacagaagaaaactaagttctctaagagttagatcattggattatactcccatctctccctcttcctcatatgtataacttatttataagtttctaatgtaatttatacttagcctttaaggttttactttatcaagttctcccaaaagctgaagtttatgcagtgtaagattctgcccagtatgatagcatgctttgcagaatcatgtaatacatatttcttatcttatggatctcacaattatgttgtaataataatatacacaaaaaggctgaaactctagataggatatttagagaattctgtacttatatttgttagaaatgttttagtctacaaataacagaaaaccaaactgccagggacttaaatgataaagataattattgctcatttatgaagaagtctgggcagggcacggtggctcaygcctgtaatcccagcactttgagaggctgaggcaggcggatcacgatgtcaagagatcgaaaccatcctggtcaaaatggtga

SEQ ID NO: 110589 - DNA, 570 bp, Homo sapiens
ttggtatgaggctgaaatgcataagagagcaagacggaaattgtcaaaagaatatattcatgtttctgttgttgttattgatgatggcaacaaagttatgtcattatcataagtcactggcttcataaggtagctgtttgttttcactgaagtaacaaccattttgaagaagcatctcaggttgttttctagaaggctgtttttatttttgtttttgagacgrtctcactctgtcaacccaggccggagggcagtggcatgatctcagctcattgcaacctctgcctcccaggttcaagcgattcttgtgccttagccccccaagtagctgggattacaggcatgcaccaccacaccagttaattttcgtttctttttttttttttttttttgtagagacagggtttcaccatgtagaagtctgtttttaaagacttgccggaaactgctggtatgtgctctcctctatcgtttaaggatttcagaccatcaatacaactatgtaatgcagcatttatcatgtctctgctaccagaaagtaagttgaaattcaatggtacaaataattta

SEQ ID NO: 110590 - DNA, 455 bp, Homo sapiens
agctgtggtgggatccccacagttcaaacttcccagtggctttgtttacagtgtgagggaaaaacctcctgctcaagccttagtaatggcattcatccctccccctgcctagctcaagcatcccaggtctacttcagacagctgtgctggcagcgasaatttctagccaggagatcttagcttgctgggctacgtgggggtgggatccactgagctagaccacttagctctctggctttacacccttttcaggggagtgaatggttctgtcttgctggcattccaggtaccactgtggtatgaaaaaaaaaaaaacaaaaaaaaaacaaaaaaagaaacctgcagctagctcggtgtctgccttatcagctgcccagttttgtgcttgaaacccagggccctgatggtgtaggcacctgagggaatctcatggtctgcaggttgtgaagaccatg

SEQ ID NO: 110591 - DNA, 455 bp, Homo sapiens
agctgtggtgggatccccacagttcaaacttcccagtggctttgtttacagtgtgagggaaaaacctcctgctcaagccttagtaatggcattcatccctccccctgcctagctcaagcatcccaggtctacttcagacagctgtgctggcagcgacaatttctagccaggagatcttagcttgctgggctacgtgggggtgggatccactgagctagaccacttagctctctggctttacacccttttcaggggagtgaatggttctgtcttgctggcattccaggtaccactgtggtatgaaaaaaaaaaaaamaaaaaaaaaacaaaaaaagaaacctgcagctagctcggtgtctgccttatcagctgcccagttttgtgcttgaaacccagggccctgatggtgtaggcacctgagggaatctcatggtctgcaggttgtgaagaccatg

SEQ ID NO: 110592 - DNA, 602 bp, Homo sapiens
accagtgccctatcttcccatggttgagctggtatccaaggtgcaagacaaagtccttctcaatcttctctctygtctcctcaagtagaaggaaaaggtctcctttgcaggcatgagctgttcaatctggggttaggaaatgtggggatgccaacccttccttagctgccctggctggtgtctcagtatgccatgtgtcctcacaatgcactgtctcttggcctagttcagcaccaagactcgcctacaagttgcagaccttacggtctagactgccttttgtgcttacttagagacaaatatctgcctttcatgtttacttagagacaaagagcactgtagccctcagggctacttgagtggaactcaagttccactcgctgtgatccaaaattccactctgggtaggcctagtttaaatgctccttctgtgggtgagcatcagccatcagtctgtttttcctttctgatctaacagaaaagaactgagtttagggcctgacaatttctgtgttctctcccttacagcattcagagatgaccgccacagcactttgctgctgctgggggtgggggaggaataacatctcatttcatgactg

SEQ ID NO: 110593 - DNA, 532 bp, Homo sapiens
gtccttctcaatcttctctctcgtctcctcaagtagaaggaaaaggtctcctttgcaggcatgagctgttcaatctggggttaggaaatgtggggatgccaacccttccttagctgccctggctggtgtctcagtatgccatgtgtcctcacaatgcactgtctcttggcctagttcagcaccaagactcgcctacaagttgcagaccttacggtctagactgccttttgtgcttacttagagacaaatatctgcctttcaygtttacttagagacaaagagcactgtagccctcagggctacttgagtggaactcaagttccactcgctgtgatccaaaattccactctgggtaggcctagtttaaatgctccttctgtgggtgagcatcagccatcagtctgtttttcctttctgatctaacagaaaagaactgagtttagggcctgacaatttctgtgttctctcccttacagcattcagagatgaccgccacagcactttgctgctgctgggggtgggggaggaataa

SEQ ID NO: 110594 - DNA, 602 bp, Homo sapiens
aaccactttaatatctttatgttcctcataacatcacattttataccttaaattatgcaaaataaaatttatttaaaaataaagaaatcagaatgaaacaaaaccacaaaatacataagatgtgcatattcctttctatagacaattagttttggaatgaagaatgtgattaataatatttttaatcaaaaatgagtcttctactatgatccactgagacaatcaagcattgtatcataattttatcaatagatttgatattaagaataggatagcacagaatatttaattatcaagaccactttagatacatcaaaacagtaaaatctggctagctaaattcagtgaatttgaattagtaaatgtctatgtaacaggttcttttaaaaaaagttttgcttctttaatattttcaagaaagagaaagaatatttwaaaatgtatctactaaataaatgatcattactatactaagtattgatggtacaaatttgaatcaaatatggaaacttatttcctgggccttctagagtagaagagaagatgagtgaaatacaatgaatgaaataaaaatgacaaaggataaaagtgacatcagagaa

SEQ ID NO: 110595 - DNA, 641 bp, Homo sapiens
gcttttactgaagctagtattactacacagaaattacccaggtaggcaaaaagatttaaatatgtggagggttttaacctcttgggaatttcctttcatacagccattaaactagaagatttttctttcttcaaaactaagcgattaggtggacaaatcaacaacagtcatttgcccagaaaatatctaccatcacctcttcaccattacagcattatcttctcaggggcgactatgtcacctcatatcagagacttcgctcaagtcattgggatattttatagatggtgaatcactctgtcacccccatgcaactccccagggagaagatgtgtgaggtttaaaaagaaaaaacaaaggaaagaacaggaaggaatatgacttcactttccttttttctctttaaatctccarttttttaatatcaaaaatattgtgtgaagatgttgtgtatatgcctttgacagaagtagcagacaatgaagatacacaagagcacagactacaaaatacttaatgctaacttactacttgttttatagactcttccaataacatttaggtcttacttggagaagccctattaattttcttctatattttcttactgtttttattttacttacctttgccccttcatc

SEQ ID NO: 110596 - DNA, 565 bp, Homo sapiens
aaacttagaaaatctggccaaaatgagcatttccttattagatctccatctactgtcaacagcataatagcagataatatttcttggtggatttttatgcaccaacatctgttgaaagtataatggaatttttttctcaagacattgatatgattagacctaatattgtaaaccacctactaacccaggaagtaaaagagtataaaggaattttcctggtctcacttgaagaaaacttatatcccaagaggaaaatgtaaaaaaattcagcagattgcatctttattcttagttttctctaacatgarcatcattaatttagtttacaaatttgaccttcatccgtttaggaatgtgccgcaggtgccatttgaatttttgatagtatttttagcttttgatcccctctgcagtgagagggaagtgaaacagcttgcttagagctgttctataaatctgtggtaccagcatatccttttgatttacctttcattgcttaaatttctttgccaatgaggacttttgctttataacaacagtttcaggagttttgtcaggcaacaat

SEQ ID NO: 110597 - DNA, 588 bp, Homo sapiens
gctccctactgaatgttgagcatggagatgccaagaggaatatgctagggctgaaaaatggcttatactgtagaccctattcagaggacaagagaaagagtgtgtggaagagcgtgagacaaaaagagagaaataagtaagaaatgggagtggtgaaagttacgaatgtacagtaatgcagaaactaatttatatgcttggccagatggggctaaataaatataacttggaaatgatgtagaatattaccaaaaatttggctaaactacttgaaatgcaattagcagtcattttactctgtgaccaggtttctttcattatctgaaacktatttttcttagaataaggttaatatttgtagaagcattagtacattaaaacatagcacttgggacttctatgcattattaatgcctctcatccttctcccaacttctaacttgccttcatacctagctaatgtaaagaaagagccagaaggttcaaaactaatcatttttgtacctgcaacaaagaaaccaatgtgggtgttaacaataattgaatgcttaatgatttataattagtaattgttctctcatcatcttc

SEQ ID NO: 110598 - DNA, 598 bp, Homo sapiens
ggatcccttccttacaccttttacaaaaattaattcaagatggattaaagacttaaacgttagacctaaaaccataaaaaccctagaagaaaacctaggcattaccattcaggacataggcacaggcaaggacttcatgtctaattagttctctgatgaaccgacttcaatctatatattttgctttgattttccccaacttggtgtataagtacaactgctcttctctgaaagcaaatgttagtaatgatattataaaattattatgacctttcagtccattccctttaattaaaattttaagggctgggaaaactcaccagaatgtttcctctatattatatttattaataatttatatagttaaaatatgccttgttttttgtcagctacccttggacacaatttttctgaaattgtaaaataagtggaaatgtaaaggttatctttaccaagtgacaaaaaatgtattagatgtattastataagatatttgaaatgtagagctgtgttaatgatgtaacatcttatgttaaaaaaggagacatctaaggtataaccatatgtttaagttactcatgagattccttttaaggat

SEQ ID NO: 110599 - DNA, 601 bp, Homo sapiens
cagtaggtctagggtagggcttgaacttctgcagttctagcaagtttctaggtaatggcggtgcaccttgtccacagatcacacttccagtaacaaaatggcctttctttttatttgtttaagagtttgattccagaaagaatggtcactacaaagatagggataaagctattttctacccagtgttcttccaggtaacattagataggctctaatcctaaggaactaaagaagacctaagtcaatcagaagcatcctaacataattgttgtgttgatgagcagctctgcatccttaacagcaactgctacacagccaacaagctctcatgcatgtctcacagctccctgaattagattccaaagaccatctgcctatgccacaactggggatgactttccgtctgtacttagtatttctctgccttgcaataaytgccaagcatccaagaagcttcagagccattaaagacagaaacacacacgactcattttctagagacctatgataaaagacaatagagctagcattatacaatgcagcatggtatgaagacatctttctaatgcagagcaggatttgtttagttttaaagccaagt

SEQ ID NO: 110600 - DNA, 598 bp, Homo sapiens
cagctccacccttgtggctttgcagggtacagctctgcagttgccttcatgggttggggttgagtgcctgtggcttttccaagcacatggtgcaagctgttggtggatctacctttctggggtctggaggatggtggccttcttctcacaactctactaggcagtgcttcagtggggatctgtgtgggggctccaatcccacatttcccttccacactgccctagctgaggttcgccatgagggctctacccctggagcagaattctgcctggacatccaggcattccatacatmcctgaaattcaggcagcggttcacaaagctcaacccttgccttctgtgcatctgcagacccaatatcacatggaagccgtcaaagcttgaggcctgcgtcctctgaagcaatggctcgagctgtactttggcaccttttagtgacagctggagctgcagtggctgcgatacacagtacaagtcctgaagctgcacagaggagccaggccctgggcctggcctatgaaaccacttttccctcctgggcctctggacctgtgatgggaggggcttcctcaaagggcttctgacatggcctgaaga

SEQ ID NO: 110601 - DNA, 598 bp, Homo sapiens
cagctccacccttgtggctttgcagggtacagctctgcagttgccttcatgggttggggttgagtgcctgtggcttttccaagcacatggtgcaagctgttggtggatctacctttctggggtctggaggatggtggccttcttctcacaactctactaggcagtgcttcagtggggatctgtgtgggggctccaatcccacatttcccttccacactgccctagctgaggttcgccatgagggctctacccctggagcagaattctgcctggacatccaggcattccatacatacctgaaattcaggcagcggttcacaaagctcaacccttgccttctgtgcatctgcagacccaatatcacatggaagccgtcaaagcttgaggcctgcgtcctctgaagcaatggctygagctgtactttggcaccttttagtgacagctggagctgcagtggctgcgatacacagtacaagtcctgaagctgcacagaggagccaggccctgggcctggcctatgaaaccacttttccctcctgggcctctggacctgtgatgggaggggcttcctcaaagggcttctgacatggcctgaaga

SEQ ID NO: 110602 - DNA, 639 bp, Homo sapiens
ttatatggaaccacaaaggatccagaatagacaaagctatcctgagcaaaaagaataaagctggaggcatcacattacctgacttcaaattatgctacagagctatagtaaccaaaacagcatggcactggcataaaaataggcacatagaccaatggaacagattagagaatctggaaattatacatctacaataaactcatttttgataaaggtgacatgaatatacattggggaaaggacactctcttcagtaaatggtgctgggaaaactagatatccatatgcagaagaatgaaactaactagatgcatatatgttgctatataaaamcaaatcaagttggattaaacacttaaatctaagaccccaaacaatgaaactactgaaataaagtattggggaaactctccccagcaaagatagatctagacaaagatttcttgagtaatatcccacaaacaggctactaacacagaagtggataaatgggatcacatcaaattaaaaagtttctgcacagaaaaaaaatcaacaaagtgaagagacaacctagagaatggtagaaaatatttgcaaactttccatctgacaaaaaattagtacaactgctatgaagaacagttgggagggtttgga

SEQ ID NO: 110603 - DNA, 617 bp, Homo sapiens
tatataatataatatagataatatgtatattgtatatattttttctaacgtgagtttatatcctttcaggtctttattttttttaattcaatgtgacaactcttgactttgaattcgagtgcttagactgtttacatttaaagtaattattgttatggctgaatgtgaatctagcaccatacagtttactttatatattttctttcaacacttttttttcttttttgctttttccctgcttttgatttcactttttatccatcattggcttactactaataactctttgagtgttttgttttattgtggttctacagtttacaataaacattataccactccatttacagtgcaagaattaaaccagtatgtcttcattcttcactcttygatttctttgtgttactatcgtcatacattccaatggtaatttttacatttttaaatatatatttattaattttcccatcaggctgctagctattcatttgttgttaatttataatttttatgttatgagaaggtgctctacacttctctttttcagaattctagaattatggtttgttttctactttaattttaaatttatttctaggagataacaaagatattac

SEQ ID NO: 110604 - DNA, 493 bp, Homo sapiens
gaggttgttgggttgcaggccaccactaaccgacagggkggctttgtgcaaatcagaggaagctcccatcctcatgggaaatgtaggctagggcatgacttggtgagcggagcttggggtggatcagtccacgtcctcctatgccctgtgcccttggcaacgcaggggccatggtggggggtgggtggggggagctgagggcggagggcactgaggagcagggtgagacaggcgtgctgctgctggtgtgccctccactgcactgtgtactggaggtttgagtgccggcgcgaggcagcaggggctccccgcagagggcgccacattgccccgcgctagctctgcgccggctccggcctttccagcaggtggcgggttccactctctgtcctggagactgctgaggccctcgcgggaggtccacgcctgcacgggcctgggggcagaagcgcgtgggcaggacccaggaggacaggcaagccggcagcagaca

SEQ ID NO: 110605 - DNA, 573 bp, Homo sapiens
ctaaaacacaaacgtgatcttgttattgccttactggaaaaccttcagtgacttcttattgctgctctgtaggatcaatcccaaagtgcttaggctacaatacagccccctaaatctggcccctgtcaagctctccagccttatctctgaccaccagaccccaatccaccctcctcaaaacctatcatccagccatatggaattacttaaagttctctgaataggccarcctgtttcttgcccttgagcctttgttaagattgtttcctctcccttgtacacccttctttctaacccttccttcatcctgcccacaatgccccatggtccacctggaaaaaagaaaaaaagctttttttttttttgaaagctcagctcacctctataaaaacttttccatttctaaaaaccttgatcaccaccttccttatatgtctccaatacttgttctcctgtaatcccagtgccaggtacacgtttttagcattaaaaccatgacacttttttgcattaactatttcctaacatatctatgatctaattaagggcagggacaatgccatatttatcctt

SEQ ID NO: 110606 - DNA, 573 bp, Homo sapiens
ctaaaacacaaacgtgatcttgttattgccttactggaaaaccttcagtgacttcttattgctgctctgtaggatcaatcccaaagtgcttaggctacaatacagccccctaaatctggcccctgtcaagctctccagccttatctctgaccaccagaccccaatccaccctcctcaaaacctatcatccagccatatggaattacttaaagttctctgaataggccaacctgtttcttgcccttgagcctttgttaagattgtttcctctcccttgtacacccttctttctaacccttccttcatcctgcccacaatgccccatggtccacctggaaaaaagaaaaaaagctttttttttttttgaaagctcagctcacctctataaaaacttttccatttctaaaaaccttgatyaccaccttccttatatgtctccaatacttgttctcctgtaatcccagtgccaggtacacgtttttagcattaaaaccatgacacttttttgcattaactatttcctaacatatctatgatctaattaagggcagggacaatgccatatttatcctt

SEQ ID NO: 110607 - DNA, 358 bp, Homo sapiens
gaattctcaaaactcaacagtagaaaaacaatccaatgaagaaaacagcaaaagacatgaacagacgttttaacaaaaagatacaggcaataagattttgttcaacatagtaagccatgagggaaatacaaattaaaaccrcaaggaaatattagtacatacctatcagaatgactacataaaaaaattgacaacaccaaatgctagtgaagatgcaaagaaactgcatcatttgtatactattaatgggaatgtaaaatggtacagccactctggaagagaatgggtaaatggtgcggtacatccatatcatggaatactactcagaaatgaaaaaataagctactgacacactgaa

SEQ ID NO: 110608 - DNA, 598 bp, Homo sapiens
taaaatgcccttaagaggcagctttgtccaagtggcacttttaacatttatttttacttttaataatcatgtgtattatatttttatggctcaatggcactatatgtttgaagaattttagaacattaatatccaatgttacctaagtctagctgtggacttcatgcatgaaacaccattccagcacagaagcactcctagcttgaatatcctcrgtattgaggaacttactatcacaccgggcagccactctatctttgaataaagatagaatgagtaaagttgataagaaaagaaattcttaccttcacatcaatcaaagatctgtattcttacaatatccctgaaattattctgtaagcaggcctgaaagaattacgtggcaacatatgttgctaggctggttcgttgggttttggcaaagtcctcagtgtttgtcagcatttctatgtgagagaactggctacatagtctatcttggagctaatatcatacttgggtcactaaacatatgtatgaaattttgagaattgtttcttaatttttcagttttaaaatctaatgcaaacctgtatttcagaaaaaaagtattgcttga

SEQ ID NO: 110609 - DNA, 615 bp, Homo sapiens
cttcaagcctatatacaatgtaaagtagtattttatggtttgtaagtattagaatacggtttaccaacaaggatcttacatagcccccttcctaacttcataatctgtttcttgaaactgtaggagttgttttttttttttcctcatgtaactctactaatcaggtttgttttatgaaagcatttactttttataaggtctgtggagtcaaggtatttgctctgaatgctyggtatgattgttgttgcatgctagcttgctttctatgtaaattgatgatggtagaattgtcataataatctaaccataattctttcttcctttttctccttgcctactgtgcttgcttttcccttgtatgtattttgcttacttttttttatagacttagtattacaagtttgagatatataatatagaaaatttaataagaattttataataaaatgtatatgtaaacctaactaagtaaatatactaattcttagtgggggagaaaggtactaccttaccctactcttcaaaatcactactggtgatggggggatattgatatattcctaaagaggaggcttttttaatggttaaaattaatttatctaggaatagaaaata

SEQ ID NO: 110610 - DNA, 615 bp, Homo sapiens
cttcaagcctatatacaatgtaaagtagtattttatggtttgtaagtattagaatacggtttaccaacaaggatcttacatagcccccttcctaacttcataatctgtttcttgaaactgtaggagttgttttttttttttcctcatgtaactctactaatcaggtttgttttatgaaagcatttactttttataaggtctgtggagtcaaggtatttgctctgaatgcttggtatgattgttgttgcatgctagcttgctttctatgtaaattgatgatggtagaattgtcataataatctaaccwtaattctttcttcctttttctccttgcctactgtgcttgcttttcccttgtatgtattttgcttacttttttttatagacttagtattacaagtttgagatatataatatagaaaatttaataagaattttataataaaatgtatatgtaaacctaactaagtaaatatactaattcttagtgggggagaaaggtactaccttaccctactcttcaaaatcactactggtgatggggggatattgatatattcctaaagaggaggcttttttaatggttaaaattaatttatctaggaatagaaaata

SEQ ID NO: 110611 - DNA, 596 bp, Homo sapiens
ggtaggtgtgattgctggaactgtgatactattttatcactatgaggcaaaacatatagaaaagaaaagctaaaacctgatggtaggaaagcgtaacacacaaaagagcctgaaacctgtgatgacatcattgagttactgcaccagtactagcaacagtctactgccagtcttcttcttatctgaaggaaccaaatccctatttatttaaatcatatatagtatgttattctgctacttcccaacagaatcaaaacaatagatttagaaatgtctggcctatggaatattgtgggacaggtgaccctccaatcaaaakaaatgtcagaaatggactgaagtgtcagaaatgccagaatagcccatgatattctgggaagtgagcacatatgctacctcaagtgttcctgtttttttttttttatcgatagctggtatgaatagaactgcctctattaaaagatggttatacttaacataggaagtatggatagatattagaaaaaagaaaggaaacataaatgaaggacaaatgaaaatttacatggaaagaagaatttctttgggaagctggaaatttttgacaaaaagtctcc

SEQ ID NO: 110612 - DNA, 582 bp, Homo sapiens
ggtaatggctgtcttgtgaaccttcattagcttccttatatgtgtccgttacccatcaagtctctgggcaacatgttatgccttgaagttgcttgttcttgcagctgctgttgaagtctggtgtcacagctagagcctctgaccttgaggtccccaattcttttttcccctcaaccaggacccaagcctccattaatttaccatttcctcatttttaattccccctggtgcatctgaaaccaagctagtttttaaacaaggatttattagaagtgcaactttagtaataataaaygagaatatcacaagtaacacataaatagttagaatgtagaagaaaaagacattaaagcgtatttatattagaagtccaaattaaagagaacaaaacttaaagaggtatctaatagcagttatgcctcttacctaaattctgccttaattgttaatcacttcctgttttcttccaggtcccttatcttaggagctgcctgttctaaagataactgactgtcataatatcttagccttttaggaagatttccccttcatacagtgtatcatcagaatatcataattcaa

SEQ ID NO: 110613 - DNA, 586 bp, Homo sapiens
ttgataaaatcagcatagaaatttgaagaggagcatagataaaacacaacacaaagaaccagaagatctgggttgctgattgacttttcttgtctttaaaacaaaaaaatttraactcctcatttatggtctttggtttcccaagtgatcatgcataggtctatagccatgctgttatgaatttgatatcaaataattaaagatcctttttccaattgatagatatgctggaaattattttctcacattctgaataacattccagattgctctagtgataactgctggctataccacatagaatttcaccaacaatcacagatagggaaggattccaattaaaaaaatatataatggtggcaaaacataagataaaagcttagatgtcacaggaattgataaattacatctgtaggtttattatacaaattatgactattttggcacagtttatttattaagaccaagttaggtgatcatggggtaaaaaaaggaaaatcatccactttattgaatcatttaaaaattacaggaattgaaataataataaaaataaagcttaacatgaaattaaacaataacagct

SEQ ID NO: 110614 - DNA, 567 bp, Homo sapiens
actatgtggtacagcccaaactcttattgaagaggtctctgagcccctgataaccatatccttcttaggttggtgttgtagtatttgtacactcagagttgctattaggcaaggggatacacaaggtgcccaagtggatcacctgacttgcacatatatctctcttgatcacattaygtaacaacaaccctatatctacctgaggatcagagtgaagtactgtcaaaatcgtgactctttgtcttgcttgctagtctctggatatgaggaatccacagtgcccaaccaggaaccatatctcatatttccacggaacccttgaagtatccctttgctacagggtgctctctttggaggccaggaccgataaccttacagagctcagagttgtggggtcaagaagctcaactctacaagtgggccactgacaattatagtaagaggggtcactcctgcttctaccatatggtttctggactgatgtattctccctattaagaaggtctctgattcagtgtgcataatgcttcctgaaagtcagcaccacatcctcaaagagtactgcct

SEQ ID NO: 110615 - DNA, 567 bp, Homo sapiens
actatgtggtacagcccaaactcttattgaagaggtctctgagcccctgataaccatatccttcttaggttggtgttgtagtatttgtacactcagagttgctattaggcaaggggatacacaaggtgcccaagtggatcacctgacttgcacatatatctctcttgatcacattatgtaacaacaaccctatatctacctgaggatcagagtgaagtactgtcaaaatcgtgactctttgtcttgcttgctagtctctggatatgaggaatccacagtgcccaaccaggaaccatatctcatatttccayggaacccttgaagtatccctttgctacagggtgctctctttggaggccaggaccgataaccttacagagctcagagttgtggggtcaagaagctcaactctacaagtgggccactgacaattatagtaagaggggtcactcctgcttctaccatatggtttctggactgatgtattctccctattaagaaggtctctgattcagtgtgcataatgcttcctgaaagtcagcaccacatcctcaaagagtactgcct

SEQ ID NO: 110616 - DNA, 524 bp, Homo sapiens
catgagggaaattcctggcatcttaatttaagtatattactttggctgcaagtcaaagttawcattattaggatttctggcatcagaacaatcacttgtaattctttctggaagaattttcttggttaagcaatgctaatgaaatcctacttaaaccagctatattctctggcaatttcccatctatgtatgcactgataaatacttggaagattctcattcctcattgatttattgacataaaatcattttggttcactattacaattttcatttcatctacaattaacccattaaatttattattccaattattctttactcctggcaccttatgttactataactgttattttatactattattaacacctaaatctatgatactgaaaagggtaataataaatttacagtagttatttccacatcaccttagtttgggacatattattgtttacaactttacgttactacagtaatcttgctgtataagtatctgtgtacaagttctttattttttacgg

SEQ ID NO: 110617 - DNA, 524 bp, Homo sapiens
catgagggaaattcctggcatcttaatttaagtatattactttggctgcaagtcaaagttatcattattaggatttctggcatcagaacaatcacttgtaattctttctggaagaattttcttggttaagcaatgctaatgaaatcctactyaaaccagctatattctctggcaatttcccatctatgtatgcactgataaatacttggaagattctcattcctcattgatttattgacataaaatcattttggttcactattacaattttcatttcatctacaattaacccattaaatttattattccaattattctttactcctggcaccttatgttactataactgttattttatactattattaacacctaaatctatgatactgaaaagggtaataataaatttacagtagttatttccacatcaccttagtttgggacatattattgtttacaactttacgttactacagtaatcttgctgtataagtatctgtgtacaagttctttattttttacgg

SEQ ID NO: 110618 - DNA, 555 bp, Homo sapiens
ttcatattgttatttccaatttaaagattaaagggttttcrtataacttattttatatgtgtatgtcttttctcttactttgaaatcttggtttccaataacatgaacataattacttcctttatcctaataggtacgtatatgtgtatatgtctatgtatgtatgtatgtaggtatgtatgtgtgtatgtttctatctgtaaaacaggaaaaatacccacctaatggagcttaagatttctttatgagtattttttgtccttagggtatttaatcaaattactgttacttaaaataatgtttctctatgtggttatgccatcaacttcatatacaattattttatttcaatttgtcttcgatttttaaggatggttttcttcttctgatttaattttgtttttaaattatgtaaaatattttcttggtttcagagtcaaatctatgaacattgagaggtctattttgcctctctgtcccctcccccttattattttactccccttatagataatgcttttatttttccattactttttttttttttttttggag

SEQ ID NO: 110619 - DNA, 555 bp, Homo sapiens
ttcatattgttatttccaatttaaagattaaagggttttcgtataacttattttatatgtgtatgtcttttctcttactttgaaatcttggtttccaataacatgaacataattacttcctttatcctaataggtacgtatatgtgtatatgtctatgtatgtatgtatgtaggtatgtatgtgtgtatgtttctatctrtaaaacaggaaaaatacccacctaatggagcttaagatttctttatgagtattttttgtccttagggtatttaatcaaattactgttacttaaaataatgtttctctatgtggttatgccatcaacttcatatacaattattttatttcaatttgtcttcgatttttaaggatggttttcttcttctgatttaattttgtttttaaattatgtaaaatattttcttggtttcagagtcaaatctatgaacattgagaggtctattttgcctctctgtcccctcccccttattattttactccccttatagataatgcttttatttttccattactttttttttttttttttggag

SEQ ID NO: 110620 - DNA, 555 bp, Homo sapiens
ttcatattgttatttccaatttaaagattaaagggttttcgtataacttattttatatgtgtatgtcttttctcttactttgaaatcttggtttccaataacatgaacataattacttcctttatcctaataggtacgtatatgtgtatatgtctatgtatgtatgtatgtaggtatgtatgtgtgtatgtttctatctgtaaaacaggaaaaatacccacctaatggagcttaagatttctttatgagyattttttgtccttagggtatttaatcaaattactgttacttaaaataatgtttctctatgtggttatgccatcaacttcatatacaattattttatttcaatttgtcttcgatttttaaggatggttttcttcttctgatttaattttgtttttaaattatgtaaaatattttcttggtttcagagtcaaatctatgaacattgagaggtctattttgcctctctgtcccctcccccttattattttactccccttatagataatgcttttatttttccattactttttttttttttttttggag

SEQ ID NO: 110621 - DNA, 498 bp, Homo sapiens
tcgctcctgctggaactctagggctgtttttctgccaatattcttttaactgttggaaagaagagcagtaatactcatgagaaccgtcagcccctacagccacatcctcctttacagtttttacaaaatacacttacacactatctgatttaatgacaccaacaactgtacaaggtgttgtcacactcatttagtgactgagaaggattgatatcatggctagaaaaaaaaaaagaaaaaggcaatactggmactttgaaactcagtcttctgactccaagctctgaggttttgccaagaatcagcagctgccagggaccaaaaccagaggcagaggtagaaaagtaaacattaagtaggcaggaactgtatgccatgtggtttagagtcatacatcctcacacgtctgttagtgtgaagaagtgcaccagtacctctcaaacttttatatcaatgtgtcctcacggcagaaggcagcctttctcttaaatcagaatt

SEQ ID NO: 110622 - DNA, 581 bp, Homo sapiens
tccttttccttgaatggaaaacactttaaaaaataatagaaacattattataaactaatatatgtgagatacttagttgaaacaaaaaggagttttagtagacggtattatactatctttgaaaatcaaggagaagtttatgaaacttaaaatgtgtacaaactgcagtgcaatctactgttcgtgaatgtcaatgtattatcaggaaacgtgyctatacaatcacagagttatattttctcacagacttctttacaaagtgaaatatgtttttgtacctctgggtttctgttcgggacatattttgtgcaatatttatgtgattgtgcctatgcatgatgaatgaatgcatttcagttatatattgcctaaatcgtaacttgatgatgcttgggaaagactcaacagttaaaacttcatgaagttctaatgtctgtgttccaaaacacatcacattgttaggatgcagggagataggtgtgtgtgcctcctgcggtggggatttctagttactagatcatctccatttttagcatttggcatcctcatgatacttctataaatatgacattaacaggaga

SEQ ID NO: 110623 - DNA, 581 bp, Homo sapiens
tccttttccttgaatggaaaacactttaaaaaataatagaaacattattataaactaatatatgtgagatacttagttgaaacaaaaaggagttttagtagacggtattatactatctttgaaaatcaaggagaagtttatgaaacttaaaatgtgtacaaactgcagtgcaatctactgttcgtgaatgtcaatgtattatcaggaaacgtgtctatacaatcacagagttatattttctcacagacttctttacaaagtgaaatatgtttttgtayctctgggtttctgttcgggacatattttgtgcaatatttatgtgattgtgcctatgcatgatgaatgaatgcatttcagttatatattgcctaaatcgtaacttgatgatgcttgggaaagactcaacagttaaaacttcatgaagttctaatgtctgtgttccaaaacacatcacattgttaggatgcagggagataggtgtgtgtgcctcctgcggtggggatttctagttactagatcatctccatttttagcatttggcatcctcatgatacttctataaatatgacattaacaggaga

SEQ ID NO: 110624 - DNA, 581 bp, Homo sapiens
tccttttccttgaatggaaaacactttaaaaaataatagaaacattattataaactaatatatgtgagatacttagttgaaacaaaaaggagttttagtagacggtattatactatctttgaaaatcaaggagaagtttatgaaacttaaaatgtgtacaaactgcagtgcaatctactgttcgtgaatgtcaatgtattatcaggaaacgtgtctatacaatcacagagttatattttctcacagacttctttacaaagtgaaatatgtttttgtacctctgggtttctgttcgggacatattttgtgcaatatttatgtgattgtgcctatgcatgatgaatgaatgcatttcagttatrtattgcctaaatcgtaacttgatgatgcttgggaaagactcaacagttaaaacttcatgaagttctaatgtctgtgttccaaaacacatcacattgttaggatgcagggagataggtgtgtgtgcctcctgcggtggggatttctagttactagatcatctccatttttagcatttggcatcctcatgatacttctataaatatgacattaacaggaga

SEQ ID NO: 110625 - DNA, 510 bp, Homo sapiens
gttataaggtgcatgcacttttaggatttttacgccatattcataaatttgacccccttaatctccggtgacattctttgttgtgaagtcaccttggtctgactactctcctttcttctgatttggtgtttgcgtggtgtgtttgccaggtttagcttttttcactttcaaactttgtgtatgtgtaaagtagatttctttcaggtatcatttaattaggtcttgcttctttattcaccctgacaacctctgttttttatttggaatctttagactacttgggtttaaatctatcatctctggcgttttcagttacatctttcacttgtcactgcccactctcaaatggtattacactgcctgagccgcggggcagtgctctgactgtagcttcctgcttctsacatgttcttggttggtagtgttgctgtgtcatgtccaagtgaaacatggtataaaccccacaatatgatgtttttgtttttgctttaaataggcaattacattttt

SEQ ID NO: 110626 - DNA, 506 bp, Homo sapiens
agggcccctgtgggcagaagcacaagtgaagaaatttagtaaggctgcagaggccaacgttctggcctcataaagcccttttccaaaacagctgcccacagctgcccagagctatgttctgcaataaattggcccactgccctggaaatggaggggctgagggctggggcacaggggccagggtcggcaggaggagaaggaagaaaggcattcctggaggagtgaaaagagtctctctctgccctctcaagcctcagtttccccaggtgtaaagtacagagaatccccctcccccacattgcacagcaatggtaaggaggagacagtatcgtggagggtcctaggcgaggcctgtcacggagtgtgttcttggtaggtycccccccaagatgttaatataacgtgcgttcttggtaggtccccctcgaaagtccagcacaaccaccattcccagtttctgctgtcatacagcctacccccacccctccccagcccccagactgcaa

SEQ ID NO: 110627 - DNA, 506 bp, Homo sapiens
agggcccctgtgggcagaagcacaagtgaagaaatttagtaaggctgcagaggccaacgttctggcctcataaagcccttttccaaaacagctgcccacagctgcccagagctatgttctgcaataaattggcccactgccctggaaatggaggggctgagggctggggcacaggggccagggtcggcaggaggagaaggaagaaaggcattcctggaggagtgaaaagagtctctctctgccctctcaagcctcagtttccccaggtgtaaagtacagagaatccccctcccccacattgcacagcaatggtaaggaggagacagtatcgtggagggtcctaggcgaggcctgtcacggagtgtgttcttggtaggttcccccccmagatgttaatataacgtgcgttcttggtaggtccccctcgaaagtccagcacaaccaccattcccagtttctgctgtcatacagcctacccccacccctccccagcccccagactgcaa

SEQ ID NO: 110628 - DNA, 648 bp, Homo sapiens
caaaactcttggctgacaattattttgtttcaggaggctaaaactgggacttcaatcccttctggcttgtaaggtttctgctgagaagtctgctgttaatcttactggttttcctctataggttatctgatgcttttgtctcacatctcttaagattctttccttcatcttgactttagataacctgatggctatgtgcctaggtgatgatctttttctgatgaatttcccaggtgttctttcagcttattgtatttgaatttctatatctctagcaaggccagggaattttccctcaattattccctccaataagttttccaaacttttagatttctctttttcctcaggaatgctgatcacttktaggtttggctgtttaatgtaatcccaaatttcctggaaacttcgttcattttttaaaattcttctttctgtgtctttgtctgattgggttaattcaaaatcctggtcttccagctctaaagttctttcttctacttgttctactctactgttgacactttccagtgcattttgtatttccctaagtgtgtctttcatttccagaagttgtgaatgttttttctttatgatatctatttatctggagaagttttcatccataccctgtatttgttaaaaatc

SEQ ID NO: 110629 - DNA, 648 bp, Homo sapiens
caaaactcttggctgacaattattttgtttcaggaggctaaaactgggacttcaatcccttctggcttgtaaggtttctgctgagaagtctgctgttaatcttactggttttcctctataggttatctgatgcttttgtctcacatctcttaagattctttccttcatcttgactttagataacctgatggctatgtgcctaggtgatgatctttttctgatgaatttcccaggtgttctttcagcttattgtatttgaatttctatatctctagcaaggccagggaattttccctcaattattccctccaataagttttccaaacttttagatttctctttttcctcaggaatgctgatcacttttaggtttggctgtttaatgtaatcccaaatttcytggaaacttcgttcattttttaaaattcttctttctgtgtctttgtctgattgggttaattcaaaatcctggtcttccagctctaaagttctttcttctacttgttctactctactgttgacactttccagtgcattttgtatttccctaagtgtgtctttcatttccagaagttgtgaatgttttttctttatgatatctatttatctggagaagttttcatccataccctgtatttgttaaaaatc

SEQ ID NO: 110630 - DNA, 648 bp, Homo sapiens
caaaactcttggctgacaattattttgtttcaggaggctaaaactgggacttcaatcccttctggcttgtaaggtttctgctgagaagtctgctgttaatcttactggttttcctctataggttatctgatgcttttgtctcacatctcttaagattctttccttcatcttgactttagataacctgatggctatgtgcctaggtgatgatctttttctgatgaatttcccaggtgttctttcagcttattgtatttgaatttctatatctctagcaaggccagggaattttccctcaattattccctccaataagttttccaaacttttagatttctctttttcctcaggaatgctgatcacttttaggtttggctgtttaatgtaatcccaaatttcctggaaacttcgttcattttttaaaattcttctttctgtgtctttgtctgattgggttaattcaaaatcctggtcttccagctctaaagttctttcttctacttgttctactctactgttgacactttccagtgcattttgtatttccctaagtgtgtctttcatttccagaagttgtgaatgytttttctttatgatatctatttatctggagaagttttcatccataccctgtatttgttaaaaatc

SEQ ID NO: 110631 - DNA, 574 bp, Homo sapiens
cagcccccatgattcaattacctcccctgggtccctcccacaacacgtgggaattctgggagctacaattcaagttgagatttgggtgaggatacagccaaaccatatcaacttwcttgttggcagaatgattaggatgaggcctcatgcttagcctgccaacatagcactcatttcttaggagaacaaagtaccataggttgggctcctgatagaaagcctgttgagttttgccatttaataaaatagagtgcacagtgtaatttgtacaatgtcaaacttcaaagaacaatttataacaataatgtttctatttacagcgtgccactaaggaagggacaataaaatgtaaagtttgacagtgtctactgattgatattaaggtcagaaggggggaatatttctattctcagcattttattgtcagttggcacaacagagggcagaatacaatcaactttgcattcttttcaaaattcaaggctttggaaaggacagtattctagatgttatatttacccaagggaaactggagtgtaaaaacagaaacaatttaaaactgcatgtttctagt

SEQ ID NO: 110632 - DNA, 580 bp, Homo sapiens
cttgccatgtaacttaacatattcacaggttccagagtttaggatatgaacatctttggggagtctttactttgcctaccacaatacctaaagtcatatattgaatccttaggaccagatgtatttygaagttcagaatttttaggatttaaagataacactctcagcagtgtctgcaacagcatcctatattcaagcacattaatctttctgcaggaaatgtatgaatattcaccccaagtgaaaaaataaagactataaatagcctcatgtcagttgaggtcaggctttgtcaccaaatgagttcagttcaggtcagaattttgttgccaaatgagctataaaaaaaacttgggttttgaactttggggattacaaaagtgcagatagtgtgtacatgcataaaatatgattggaaatatgcaacaatattaatactcatcctatgttctaaatatttcttagtcttgatttctggcttcttttcttaactttcaagtgaacaccactcaaaacctacatactagtccaaaaaagccataaatacattttgcctggttttgaacttttaaaaattgga

SEQ ID NO: 110633 - DNA, 580 bp, Homo sapiens
cttgccatgtaacttaacatattcacaggttccagagtttaggatatgaacatctttggggagtctttactttgcctaccacaatacctaaagtcatatattgaatccttaggaccagatgtattttgaagttcagaatttttaggatttaaagataacactctcagcagtgtctgcaacagcatcctatattcaagcacattaatctttctgcaggaaatgtatgaatattcaccccaagtgaaaaaataaagactataaatagcctcatgtcagttgaggtcargctttgtcaccaaatgagttcagttcaggtcagaattttgttgccaaatgagctataaaaaaaacttgggttttgaactttggggattacaaaagtgcagatagtgtgtacatgcataaaatatgattggaaatatgcaacaatattaatactcatcctatgttctaaatatttcttagtcttgatttctggcttcttttcttaactttcaagtgaacaccactcaaaacctacatactagtccaaaaaagccataaatacattttgcctggttttgaacttttaaaaattgga

SEQ ID NO: 110634 - DNA, 451 bp, Homo sapiens
ttgtaatggttttgacgcttattgtaatagtcttgaacaaagtcttctttgcctgtttacatcaggtgcaattttattttacagttgaagtgtgacattcattcatagagataaatattggctatctgtatttactttgtaaaaagtatttacttttgtgttaaagacagagaaatgttgagcatgtaatcttcatttgagacaataatttctattacctgagatggaagtttctgggattccagtgattccacttgataccacagtggttcctgcaaaggaaaatgagggcaaattcatatcagccacagcccttattcctatcctcagagataaacatgaggaagagaaagcaaatcagatgactttctgggycagtgctgcagctagcccacagggcaccttgtgaattacagacacacaaataactcctctggccagatgagaattc

SEQ ID NO: 110635 - DNA, 169 bp, Homo sapiens
actttacaatatgtctcacaagagaacatttactctgacttaaatttctaagataagcctctataggaatamcatctgtttcttaaacaaaatttaattatcatggcatttgccacactgaagcaaaatttttaaaggaaattcaaataaattctttaatttaagtgtg

SEQ ID NO: 110636 - DNA, 169 bp, Homo sapiens
actttacaatatgtctcacaagagaacatttactctgacttaaatttctaagataagcctctataggaataacatctgtttcttaaacaaaatttaattatcatggyatttgccacactgaagcaaaatttttaaaggaaattcaaataaattctttaatttaagtgtg

SEQ ID NO: 110637 - DNA, 601 bp, Homo sapiens
tctggtggaatttctgggaaaaccctcaaacctggaagttatgtctcaggtaagtcaccacataccaggacatcctggagggagccacttaggtaatacagttgacccagcatgcttttctttttcttttcttttcttttttttttcttttgagatagggtctcactctgttgcccaggctggagtacaggggcatgatcttggctcactgcagccttgacctcctaggctcaggtgatcctgccacctcagcctcccaggtagctgggactacaggctattttttgtagagatggggtttcattaygttgtccagtctggtctcaaactcctggactcaagtgatctgccagccttggcttcccaaagtgctggaattataggtgtgagtcaccacacccaaccgtcagcatgttcttactttttccctttcttttctttctcagaggctacaactgctacagggactcctggagcaggaccgtcaggaggtgagtgttctcattccaagactttgggttctgttgattcattgtttgggattgcagcttaaaacagaagaatacgaaggttgaggacacattttacacaaggccaagtc

SEQ ID NO: 110638 - DNA, 601 bp, Homo sapiens
tctggtggaatttctgggaaaaccctcaaacctggaagttatgtctcaggtaagtcaccacataccaggacatcctggagggagccacttaggtaatacagttgacccagcatgcttttctttttcttttcttttcttttttttttcttttgagatagggtctcactctgttgcccaggctggagtacaggggcatgatcttggctcactgcagccttgacctcctaggctcaggtgatcctgccacctcagcctcccaggtagctgggactacaggctattttttgtagagatggggtttcattacgttgtccagtctggtctcaaactcctggactcaagtgatctgccagccttggcttcccaaagtgctggaattataggtgtgagtcaccacacccaaccrtcagcatgttcttactttttccctttcttttctttctcagaggctacaactgctacagggactcctggagcaggaccgtcaggaggtgagtgttctcattccaagactttgggttctgttgattcattgtttgggattgcagcttaaaacagaagaatacgaaggttgaggacacattttacacaaggccaagtc

SEQ ID NO: 110639 - DNA, 581 bp, Homo sapiens
ttggctctcagcccttaacccactgcaaggacggagcacatgggatgaagtgctggtgttcaaggagaattgcatgctcttcaagactatayacacatatacacatatatacatacatctgtttgccaccagctgagggactaggaaacacacagcttagtgcaactggagaattacagtgaataatagtgacagattgtaaagacaggcacctttattttactgactcagcaattgtggcctggaggagctgagtgtctggcccacagctacacaataagtaatagagccaggtgccagactcccattccagtgctcttgccatccctcccctccacctaagtctatacagggatggctgaagagaaagtgactctgcagatatgtttaatatgggaacagtagcattcagcagagtggcatgggggcagccctgagaaacctgtctgcaaagatagtatttctctagaggccatgtctcaatatagcagccacacagaagcaaattcatgagcgggcaaatatttgtcccctcttatgactgaacttatgccactgttttcacaggactattaatacat

SEQ ID NO: 110640 - DNA, 581 bp, Homo sapiens
ttggctctcagcccttaacccactgcaaggacggagcacatgggatgaagtgctggtgttcaaggagaattgcatgctcttcaagactatacacacatatacacatatatacatacatctgtttgccacsagctgagggactaggaaacacacagcttagtgcaactggagaattacagtgaataatagtgacagattgtaaagacaggcacctttattttactgactcagcaattgtggcctggaggagctgagtgtctggcccacagctacacaataagtaatagagccaggtgccagactcccattccagtgctcttgccatccctcccctccacctaagtctatacagggatggctgaagagaaagtgactctgcagatatgtttaatatgggaacagtagcattcagcagagtggcatgggggcagccctgagaaacctgtctgcaaagatagtatttctctagaggccatgtctcaatatagcagccacacagaagcaaattcatgagcgggcaaatatttgtcccctcttatgactgaacttatgccactgttttcacaggactattaatacat

SEQ ID NO: 110641 - DNA, 581 bp, Homo sapiens
ttggctctcagcccttaacccactgcaaggacggagcacatgggatgaagtgctggtgttcaaggagaattgcatgctcttcaagactatacacacatatacacatatatacatacatctgtttgccaccagctgagggactaggaaacacacagcttagtgcaactggagaattacagtgaataatagtgacagattgtaaagacaggcacctttattttactgactcagcaattgtggcctggaggagctgagtgtctggcccacagctacacaataagtaatagagccaggtgccagactcccattccagtgctcttgccatccctcccctccacctaagtctatacagggatggctgaagagaaagtgactctgcagatatgtttaatatgggaacagtagcattcagcagagtggcatgggggcagccctgagaaacctgtctgcaaagatagtatttctctagaggccatgtctcaatatagcagccacacagaagcaaattcatgagcgggcaaatatttgtcccctcttatgastgaacttatgccactgttttcacaggactattaatacat

SEQ ID NO: 110642 - DNA, 643 bp, Homo sapiens
agagcaaagcaagaataaactctgctgacatttttggaacactttttctgaaaaaatattcatataacatgatccaattctttctttacttttgattttgcaagaaaaagaggtttatttttgtgaatatattggaaggattcattattttttcccaaagttctctcctattctttgtttttccaaacataccttcatcattttccttgttaacactctcttccttcattgtcaggtgacctatttctgcctgagtcttgtttgtcatattccaccagctcagctccatcactttcaataacttcataaaattctacaacttcagccagatttgcaagtttgtttcacaaatamataatatttgccttgtaatacggaatcttcacgtcagcaaggaatggactaacaaagaggaattccagagaagcagatatacacaagagatctctgaatagaggtcaattttataagaggtcaattaattagagaatatgataatgttttgacaacttccctacacagctcataacaacctggtcttggataccaacgccctttgtacttacccgttcaggcagatgagatggaaatggaatcaaactctactacacacaaatgacgtcacgagagataaaaagatggg

SEQ ID NO: 110643 - DNA, 568 bp, Homo sapiens
ttcctgggcaacgttgggattcttttgaacaccaggcagctaggtaaccccactgctcctcccatccttgtaatcctttgtcatgctcaagatataaatccctctttcatctacctctccaatattctcattctcatacggctttctcattcctttcccctgagctgattacctatggctcctctccctcccaaattttgtgctctgacattaataataaatgttccttgataaatagtattctttaccttcacgaactttcccagcctctctttgttgtaagtggatctcaatgtgtggatataaacaaacacccccacctcactcccacatacactgctatcaaagtgatctttcaaaaaacaaatttgatcatgcttaaaatgttcccatgagtcccyataatgttcatgataaaattcacatcgttatttatcagagaccatcatgacctggataaaggtgtcttgttgccttatctataaaatacgggaaaaatagggttaatgtgcagatcacatgagttaataagcaaagtgcttagagcaggtcttggcatatagaaaac

SEQ ID NO: 110644 - DNA, 586 bp, Homo sapiens
ttttctacaatgttgagttcacttatcttctccctacattcttgactataaattgaaaaatattagcaattactaaaagcatattttgctagatccatgtattagtcctttttcaaactggtataaagaactgcctgagactgggtgacttataaaggaaagaggtttacttgactcacagttcagcatggctagggaggcctcaggaaacttacagtcatggtggaagataaaggagaagcaaggcaccttcttcacaaggcagcaggaaggataagtgccgagccaagggggaagagccccttataaaaccatcagmtctcatgagaactcactcactatcatgagaacagcatggaggaaatggccccatgattcaatgacctccacctggtctctcccttgacatgagggaattatggggattacagggattacaattcaagatgagatttgggtggggacacaaagcctaaccatataaatttatttatttaatatcctagctccaatattatcttgggagaagagatcaaaaaacaaaaggaatcatatgttattcacagaaaagcaatggtccacttat

SEQ ID NO: 110645 - DNA, 586 bp, Homo sapiens
ttttctacaatgttgagttcacttatcttctccctacattcttgactataaattgaaaaatattagcaattactaaaagcatattttgctagatccatgtattagtcctttttcaaactggtataaagaactgcctgagactgggtgacttataaaggaaagaggtttacttgactcacagttcagcatggctagggaggcctcaggaaacttacagtcatggtggaagataaaggagaagcaaggcaccttcttcacaaggcagcaggaaggataagtgccgagccaagggggaagagccccttataaaaccatcagctctcatgagaactcactcactatcatgagaacagcatggaggaaatggccccatgattcaatgacctccacctggtctctcccttgacatgagggaattatggggattacagggattacaattcaagatgagatttggktggggacacaaagcctaaccatataaatttatttatttaatatcctagctccaatattatcttgggagaagagatcaaaaaacaaaaggaatcatatgttattcacagaaaagcaatggtccacttat

SEQ ID NO: 110646 - DNA, 579 bp, Homo sapiens
gttgacctgtgtatcacctagaatcatcctctagaccatgagcagcatgtgttaacacattttaggcaatcttgctcccatatacactagaaagtggcttcccgggatatgaaactcaacaggtttctgaaacttggctccacatggctacagtctaaacagttttgctataaatatagtctgttttgacctacaatggcaatcatatatggttcaaactaatatagccccacatgccatatggaatttatatgtatacatatgtacattttgtttatttctgttgacttatttataaatgcacacctagggtgwatttatacatagctggggcttttcaaataatatttaagtaataaacctagttggtattaaatggcataggaaaaaaaagaagagagttccagaaaacttgtatttattatatctctattaacttgtaatgctggtaaagaatataaaagggttgacaaagatccacaatctcaggccaggctggtaggtttgtggattctaattacacatgacttaaccgcaaaggctctgaacttccctaatgtgaactattgccatagggag

SEQ ID NO: 110647 - DNA, 579 bp, Homo sapiens
gttgacctgtgtatcacctagaatcatcctctagaccatgagcagcatgtgttaacacattttaggcaatcttgctcccatatacactagaaagtggcttcccgggatatgaaactcaacaggtttctgaaacttggctccacatggctacagtctaaacagttttgctataaatatagtctgttttgacctacaatggcaatcatatatggttcaaactaatatagccccacatgccatatggaatttatatgtatacatatgtacattttgtttatttctgttgacttatttataaatgcacacctagggtgaatttatacatagctggggcttttcaaataatatttaagtaataaacctagttggtattaaatggcataggaaaaaaaagaaragagttccagaaaacttgtatttattatatctctattaacttgtaatgctggtaaagaatataaaagggttgacaaagatccacaatctcaggccaggctggtaggtttgtggattctaattacacatgacttaaccgcaaaggctctgaacttccctaatgtgaactattgccatagggag

SEQ ID NO: 110648 - DNA, 383 bp, Homo sapiens
ctctgctcctcctcctcttgtggagggcctgacawcaggcaggctcgcctgcagttatccggaggcctaaccgtctccctgtgatgctgtgcttcagtggtcacgctcctagtccgccttcatgtttcatcctgtacacctggctctgccttctagatagcagtagtaaattagtaaaaatactaatagtccctgatatgcggaaataatggcataagctgtctttctctctgtctcctctccctctctgcctcggctgccaggcagggaagggccccctgtccagtggacacgtgacccacgtgaccttacctatcattggaggtgactcacattctttaccctgccccttctgccttgtatccaataaataacagcgcagc

SEQ ID NO: 110649 - DNA, 643 bp, Homo sapiens
ttcccaaactaaggcccttttcagaaagtatttaatgagaaaacagaagcctcacatttttacagcatagaatctagactggattttagaggctactgtcactcagcctgatcagcatgaatctatccttgtatcaagtgttccttgagatctttgaatctaaaaccttttaaaatttgtataagttattctaaagtgagaaaataaatagaatagaatacattcttttaggttgataccaaagtaatcatggtttttgcactactttcaatggcaaaaacttactttgcatcaagctcatagtagaacattacagagagataaaataaatctttctcatctcgcctttggtgacatcacactttaaaaataggtatgagcaggagcccaaaggaggaatttcagttaggctaatcggcttacaagtagaatgtcttccaggattcaagaacttttggcaaacattagttagcacattcttactaaaaggtaaaaaccttttttttctttgtcaggttttaaatgacacttgagagggaaactctccaaaccatagccaaaagcaggttaatcyaacttcccccagccagctcaagatcaatgaaaaagttagccctgaggagttcaggatgttaattgtgaa

SEQ ID NO: 110650 - DNA, 562 bp, Homo sapiens
agcacttgggcctgtgagagctccaaatcactgtatctaaagcagcctcaaggctgaggtcagtcctctaagatgggctgccctgacagaagcaaatctgccagatttattgtgtctcatggcccaccagtcctggaacaaaagtttaaaggtgaaatatgtttttctctttctttttaaaatgcttttttatgtgaatcaaaacaaaaacaaatctctgagcagagatcataagtggaatgtaaaacatcacatttgggctcgcaagacttaagtgtctgcctgttaaatttgaagaaaaggaaggagttgcctggtccaggagcctagagagaacatgagaaagttgctggtttcttgctgaagacaaacacccattcagtgagataytgtggaagtcccttagtcttaacttgttagtctgttaattgggaatggcagaagaagtgaattactctgtggaattttgtgaaaatgaatccactgctgctaaaaggaaaattatctacttttcaaacactcatattattaaaataaatacattatgtttgaagtcgcatat

SEQ ID NO: 110651 - DNA, 362 bp, Homo sapiens
aaacacttgtgaaagagagaaaacagctcctgttttataactcttttgtaayacaaagtttgtttccaaaggttttctggaagtttcttgattgaatctttgattgtggataccacagtgattaatttaccaagccggaaaatgtgggaagtaattttgggttcagttcagagtgggatctaacacaacactttgaaccaatattaaaatgcagaaatctcttttagatattgaaaaagaaaaacaaatatatatatattaaagtccctgcttttaaggcctaaaggagaatgtagtagaaacactgacatgtgtaatttttgtgaattgcttaggaacagaattagatttaaaaaggaatt

SEQ ID NO: 110652 - DNA, 586 bp, Homo sapiens
aatcaagacagatgcaagttacttttatcagtccattacttcaggtaaacaagcattccattctttgacagaacattaaactgttatgttctttttgatggagtgctgatttgttcaaaacacttgtgaaagagagaaaacagctcctgttttataactcttttgtaatacaaagtttgtttccaaaggttttctggaagtttcttgattgaatctttgattgtggataccacagtgattaatttaccaagccggaaaatgtgggaagtaattttgggttcagttcagagtgggatctaacacaacactttgaaccaatattaaaatgcagaaatctcttttagatattgaaaaagaaaaacaaatatatatatattaaagtccctgcttttaaggcctaaaggagaatgtagtagaaacactgacatgtgtaatttttgtgaattgcttaggaacagaattagatttaaaaaggaattccttttgcacttttccctgaagatttgtgtcctagcatttgaggagtaatacaggaaagtcagaacaagaacttactgacagcrcaggagatccatgtcctaaattc

SEQ ID NO: 110653 - DNA, 436 bp, Homo sapiens
tatatactgctcatttagtaaagccaaattattcaaccttgaggtttttcgaggccctaattgtttttctccagttatgtagtagattttgtttcatctacagacaggagcaccaatctaccaacatttacttattgtacaaatagggagccacataaatgtgcaaggacactgccaagtgctgaaaacagtccctgccctctggtgagaataaacaaaggaggaaagaataactgttcactatggaaccacagtaaagagtagcttcagacgcttaattccgaatttcagaacaygcctttcttcttattgtaataagagcccatcatctggcacagtatgaggagttcctttagatgatgaccaaacagaatctgggacccaattcctgaaccaactggtattctccataatctaaaaattagaatcagaattc

SEQ ID NO: 110654 - DNA, 615 bp, Homo sapiens
catttaccctgatgtgattattacacattatatgcctgtatcaaaatatctcatgtacctcataaatatatacatctactatgtacccacaaaaaattaaaaattttaaaattaaaaaaaaagaaatgacttctggctttcttctcacctagtcacttggccagaccccaaacgagtttaacttcctctttgagagtaaaccatcactgtcgggaggagaaccaggaatctaactgagcccgaaactacaactaagtcataatcactgcccagttcaaaattctcattgtttcaaagtcaaaccagtgtttaaggttggcacttacacatttcagcttagagcttccatttgcattttgcacaaatattatgcataggtgagagaaragaatatgatacaggctaatccaatagctaattagcaacacctgcaccaaagcaatattagcatcttgctattaggttactgtttgcattacaggataagtgattatacctgtcaaactatgacagaacttgcttcatttttcagttcgtgtataaatttaaatgccatttttaatagcccccccaaaaatttagatgtgacattttactatttttgaatttcagtaa

SEQ ID NO: 110655 - DNA, 398 bp, Homo sapiens
taccaaaaatacaaaaattagccaggcatggtggcacacacctatagttccagctactcaggaggctgaggtaggaggmttgctcgatctggggaggtcgaggctgcagtgagctgcgatggcatgacaggactccagcctgggtgacagagtgagaacctgtctcaaaaaacaaacaaacaaaaaaaaagaacatgtcagtgggcatggctatgtggtggatgtattagtagtcaggttctccagagagacagaactaaatcagtaggctatgtacaaatatagagaaagagagagattttaaggaattggcaggacgttcagtgaagagttgacgttgccgtctgaagtcgaaaatccacagatgggattcctctgctacggtctggaagagaatt

SEQ ID NO: 110656 - DNA, 398 bp, Homo sapiens
taccaaaaatacaaaaattagccaggcatggtggcacacacctatagttccagctactcaggaggctgaggtaggaggcttgctcratctggggaggtcgaggctgcagtgagctgcgatggcatgacaggactccagcctgggtgacagagtgagaacctgtctcaaaaaacaaacaaacaaaaaaaaagaacatgtcagtgggcatggctatgtggtggatgtattagtagtcaggttctccagagagacagaactaaatcagtaggctatgtacaaatatagagaaagagagagattttaaggaattggcaggacgttcagtgaagagttgacgttgccgtctgaagtcgaaaatccacagatgggattcctctgctacggtctggaagagaatt

SEQ ID NO: 110657 - DNA, 398 bp, Homo sapiens
taccaaaaatacaaaaattagccaggcatggtggcacacacctatagttccagctactcaggaggctgaggtaggaggcttgctcgatctggggaggtcgaggctgcagtgagctgcgatggcatgacaggactccagcctgggtgacagagtgagaacctgtctcaaaaaacaaacaaacaaaaaaaaagaacatgtcagtgggcatggctatgtggtggatgtattagtagtcaggttctccagagagacagaactaaatcagtaggctatgtacaaatatagagaaagagagagattttaagsaattggcaggacgttcagtgaagagttgacgttgccgtctgaagtcgaaaatccacagatgggattcctctgctacggtctggaagagaatt

SEQ ID NO: 110658 - DNA, 461 bp, Homo sapiens
ggaattcttaggcttcaggcacagtgggtttcccgagtggccaactgcaaaggggagagcctggccttggagcccgagtgtgcccggctccccgatgctctgctcacaccctsctgctgccagagtcccggggctgcccagcctctccccaggacatgctgaaacagtggcatcccaagccttccgtggatggatggcaaataggcagggctggggtccagggctgggcgggctgttgagatagaagctaggaccaccgcagggctagatgctccgcctcccgccaccctcctatcagggacgctccccctgcaagactgtcctgggacgggagactgacagtcctgggctcatcacaaatggtactgatccctgacaaaggagcctcatcctgatgtctgacaaaggcacctcacccatcagcaaatggcagtggggggcgtggccagggacacccccca

SEQ ID NO: 110659 - DNA, 673 bp, Homo sapiens
tgaatcgttccagtaatttataaagagaaaagcctaactgggttaagtgtgattttaataataatgagtcttaagaattggtttcttcgatccatccaaaaatgtccttaaaagctctaaattcttatcacttctccctaccccacccttcaggtaagaacttagagctttcaaggaagtttttgtccttagtgtccatagtgtatccattggaccagtattgcgagcaatacatggcccaaactttcaattttggtaaagtgccattggtcacagaatacttaaattgtttcagggaaatttagatgtttaaattcaacttcacaagaacgttaacactgagtgatccaacagttattmtggttgaccaaagacccattgctcaatgttaacaattgggagaaatgggtgtggtagtaaaattccagttctctgagctggatggatattcaccagaaaaggcatttatttctccataacgcagcaaaagcaggatctcattgtttaactgtctacttcaattggagattacagggaacagactgatagcaatttaactatactaaggcccaggttatgagatctcgaaaatgaagttatcttgttatctatctgacattctttacttacaaactttagtactataccaatggactatcacataaaagtgatg

SEQ ID NO: 110660 - DNA, 585 bp, Homo sapiens
ttctcaaatatcagccatctccccacagctattctgcctttttctcaaagtatctgtcctgccggatgattctagaattcagaaactcacatcgtatrtgctaaaattaagaagtcatattccaagaaagataataacttctttattagtgggcaattgtctgtgtacctgacaatgcatcagcgacatccatggaagagccactaggtggccacatagctaacaaaattcttgttagctagaaaactgctccaggctgctgctgtcccttttccaggtagcactaggctgtcaaaatcatgactttaagtaaatttcttaaggaatttgatcaattccattcttgatgattccagatggaaatcttggtgaattgtttcaaacactgctttcgtctctggcagagttgtggatggaaataggcaaacaggaaccatatccctaaaacgaaaggggaactgggttctcagctagaaagctttgaatggagattttagactggaaggataaatcttctttactctcagttatgaagcccaatcttcttgacattggcatttggataaaccccaaaaaacccagggt

SEQ ID NO: 110661 - DNA, 638 bp, Homo sapiens
acagccatatgtgagaattcaagttgctttacattttcaacaacagttagtattgtcagttttttcaaattttagtcattcaactgtatatataatgttatctcatcgtaattttaactttcattgccttgatgacttaatgtcattgagcgcagttttgaatgcttattggcacaaatgtgttgcaatcatttgcttgtctttaatgagttatttgtyctattattgaatgattgcagttctttacatattcctgatacaagttctttgttagatagacacactacacaaatattcccaggctattgttttttcctgttcattttcttaatgttgtctttccaagaagtttttgatgaagtctaaataatttttttcttttgtgtcttattttctctgtactaagaaatctttgcatctctttggttgctaagattttctcctatattttcttccagaattgtattgttttagctcttacattagatttatgatgcatttccagctaatttttatgcaagatgttagatatggtttaatgttcatcttttccatacctatgtccagtaattctagcaccattaattgaaaaaagtatccttccctcattgaattactttcatacatttgcaaaaata

SEQ ID NO: 110662 - DNA, 531 bp, Homo sapiens
taggatatttatcttagctcattctagctgctgtaacaaaatatcacaaatgaatgggtaagaaacaatagaaagttatttctcggaggctaggaaatccaagattaagtcyttagcagattcggtgtctggtgaagccctgtctggctcacagttgacaccttcttgctgtgtcctgacccggtagaaggggcatggatctcattcaaacctcttttataagggcattaatcccacttatgagggctctgcccccatgacttactcaccttccaaagacttcacctcctagtgtcatcaccttgaagttagttttataccttcgacatatgaattttgaagaggtaaaaatcataataacattagttcatagtttttaactatttataagaatgagcttctataaattgaacaatgactatcaccatgccacaaagaaagaatttcaaatgttagagctagagatacttaaaaagtcactttcttgggtttcttatacaattaaggaaactgaggtacagaggagagaag

SEQ ID NO: 110663 - DNA, 613 bp, Homo sapiens
tcatgatagtcatgctttattgttttacttttataccattttttaccccagaggcaatagagagtcatgatatctgctacaagatgaatacaaaaggaaataaatttggatactgcaaaaacaaggaaaacagatttcttccctgtgaggagaagtaagtgccctgtggaaaaaaagtaatttgccttcttacagcactttgtcaaaatcagaatggctcctgtccccagayctgttaatctctttttactgagaccgggagaagagggaaataagaaggaaatcttggtgtcctgattaaaattatgctaattcaaattactaataaaaaaatattcccctgtaaacttaagccagtattgacttgtgaggttcacagggaaatccaaaggaaatatgatcattttacattttttacggactcatctcagttcccagggccaagactttgctcagtggttttctctgcccattacagcctccttaacttggcaagaaacctggatctagaaaaagagtgaccgggaggctccattgccagcctagtctcaaaagttgtatttctagttccaagtttgaatattctgcctttccttcagagatgtcagatgtg

SEQ ID NO: 110664 - DNA, 542 bp, Homo sapiens
ggccctacgtgtttgataaatatgagctccaaactgtactccaaactatctaagaataaaaaagtaaacaagaaaagtaaacaggatttatatgagactcacagtgtctataaagaacaaacataccatcatggaagacagcaaaaccacataaacacaacaaaatcagccaagtgaataaaaattaatggttaagactgagctgtacataccatcatgggagacagcaaaaccacataaacacaacaaaatcagcctagtgaataaaaataaaaaagactgagmacagctctttttgcttctgagacctaaaatttgtactcaggatggtgttgctgttgtatccaactagagaacctgtctgtaccttttgcttgattccccaccctgggagcccctcagtacttcatggctacagactcttggctgcctgccctaaccacactgcagtcacacacacagtcataaataaaccccagcaggaagcgagacataggctcaaattagaacaccctctcaaccttttcatcaataactttcag

SEQ ID NO: 110665 - DNA, 568 bp, Homo sapiens
agaaacgtggagccatgggcagaggaaagcaaaacagagtcatttagaaagctttaggtgagatctgagggtgaataatgaatmagaacgtgtgcatctggtgagaaaggaattgatttgagagagaagagcaaactatagtggaccatcaaatggcaattcaagagttaaagtactgaaccaaaacagatattaaagatgctttattattacatattcccccaaaggatgatgggaatctgcacaatttacagaatttacactatgataaatatggacttgacaatccggaaaatctgattagtgattaatagcccaagttattttaaactcatgggtcatgatcattcagaaaggagaaaattgcctctcttgttgccttccactttaattccaactaggaagaatcgtttagcagcctttgttatgcagcttataaatatcttttgaaaaacaggacagcatcaaagcagtatcattctgacactgcatgacatcacattcagctggtaccaaacaggacagacagagtcctacagtcccaaaccaggacccagagtttccaggg

SEQ ID NO: 110666 - DNA, 493 bp, Homo sapiens
tctatgtgtatgtttcatatcacaagtaaaggttttcttttctttctttcctattctttagttcctatgataagtcaatgaatggagcactacttaacaaattgttctaaatttcaaagggaaagtattagtatattttggtaaaatggctaccattgtgaactattgtcaagttaacttgaatcaataatgatgccatatccaaataagaatggttattatactgtttgttgtaaagtttcactcaataaaattttattgtggaaaatctctataatacaaaaattttaaatcaacattagagyagattacttcatttcatttatgacagcactaaaatatgcaataggattatgatgttaaattcctgtggctggatttcaatgctgttcattatctggctccacctcgcctcccatcacccataaacttcatttcagactattccacagtggaatactaggttagttttacctacacaactatgtgctct

SEQ ID NO: 110667 - DNA, 566 bp, Homo sapiens
aaactcattttatgagaccagcattactccgataccaaagtcagacaaagacacaagaaaagaaaatcacaggccaatgtctttgatgaccacagatgcaaaaatattcaataaaatactggcaaaccatatataatcatacataaaaggatcattcaccatgatcaagtgggatttgtccccactcratgcaaggatattgccacatacacaaatcaataaatgtggtacactacattaacagaatggaaatgggaaaaaaaacatataatcatctcaatagatgaataagtggcatttgaaaaaaataaaatcctttcattataaaaactctcaacaaattagatatagaagaactgtttctcaacacaataaaagctatatatggcaagtccacagataacattatgctcaaggaagaaaaggtgaaggcttttcctctaagatcaggaacaaaacaaagttgctcattctcgccagttttgttcaacgtaataccggaggtcctagccagagcaattaagcaagagaagaaataaaaggcatttaaataggaaaggaagtaa

SEQ ID NO: 110668 - DNA, 566 bp, Homo sapiens
aaactcattttatgagaccagcattactccgataccaaagtcagacaaagacacaagaaaagaaaatcacaggccaatgtctttgatgaccacagatgcaaaaatattcaataaaatactggcaaaccatatataatcatacataaaaggatcattcaccatgatcaagtgggatttgtccccactcaatgcaaggatattgccacatacacaaatcaataaatgtggtacactacattaacagaatggaaatgggaaaaaaaacatataatcatctcaatagatgaataagtggcatttgaaaaaaataaaatcctttcattataaaaactctcaacaaattagatatagaagaactgtttctcaacacaataaaagctatatatggcaagtccacagataacattatgctcaaggaagaaaaggtgaaggcttttcctctaagatcaggaacaaaacaaagttgctcattctcgccagttttgttcaacstaataccggaggtcctagccagagcaattaagcaagagaagaaataaaaggcatttaaataggaaaggaagtaa

SEQ ID NO: 110669 - DNA, 537 bp, Homo sapiens
atctccctgggacaaagaacctggggaaaggggcagccatgggcccagctccagcagacttaaatgttcgtgcctgtcagctctgaagagagcagcagatctcccagcatagcactcaagctctgctaagggtcagactgactcctcaagcaggtccctgacctstgtgcctcctgagtgggagacgcctctcagcaggggtcaacagacacctcatacagtagagctctggctggtatgctggcagatgcccctctgagatgaagcttccagagaaaggagcagtcagtgcagcctccagtggtgaaacccaggcaaatagggtgtggagtggacctccagcaaaccccagcagacctgcagcagaggggcctgactgttaaaaggaaaactaagaaacagaaagcaataacatcaacatcaacaaaaaggacacctacacaaaaaaccccatctgaaggtcaccaacatcaaagatcaaaggtagaaaaatccatgaagatgaggaaaaaaatagcacaaaaatgctgaaagttc

SEQ ID NO: 110670 - DNA, 537 bp, Homo sapiens
atctccctgggacaaagaacctggggaaaggggcagccatgggcccagctccagcagacttaaatgttcgtgcctgtcagctctgaagagagcagcagatctcccagcatagcactcaagctctgctaagggtcagactgactcctcaagcaggtccctgacctgtgtgcctcctgagtgggagacgcctctcagcaggggtcaacagacacctcatacagtagagctctggctggtatgctggcagatgcccctctgagatgaagcttccagagaaaggagcagtcagtgcagcctccagtggtgaaacccaggcaaatagggtstggagtggacctccagcaaaccccagcagacctgcagcagaggggcctgactgttaaaaggaaaactaagaaacagaaagcaataacatcaacatcaacaaaaaggacacctacacaaaaaaccccatctgaaggtcaccaacatcaaagatcaaaggtagaaaaatccatgaagatgaggaaaaaaatagcacaaaaatgctgaaagttc

SEQ ID NO: 110671 - DNA, 604 bp, Homo sapiens
gggtatctaatagaaaacacatgagttgtaatatcacctgtttagctttatgtttagttacatttttaattgtttcaacatgttgaatttttatggcttatactttttaaagttaaaacatactacaaataaaaactgtcagagtgtgtcatgctgacmgttgcattcatttattcgttctctaccatctattcagaaaagcaaaattttcctgatatttttgcacagttagggcatgaaacagtagccattgatgacacagaaaatattaagagctgctcaattaacacaccttaaaatgctgtcctacaattccatattttattagaaccacattaatataccttgaaagtatgtctgcgtaagtcaacaatctaataaggactaaaatcaaaagctttcaatataaattaaatatatttaaatatgtaaattttattgataggacctccttaacacaataaactcattgtttgcatccaggttgacagttgaaactttagtctttggaattgactgtaacaatcatgtaacattttaaagtataaactgcacaaaagaagggctatcttttcatgcatcttatttgagaaacctggcaaga

SEQ ID NO: 110672 - DNA, 604 bp, Homo sapiens
gggtatctaatagaaaacacatgagttgtaatatcacctgtttagctttatgtttagttacatttttaattgtttcaacatgttgaatttttatggcttatactttttaaagttaaaacatactacaaataaaaactgtcagagtgtgtcatgctgacagttgcattcatttattcgttctctrccatctattcagaaaagcaaaattttcctgatatttttgcacagttagggcatgaaacagtagccattgatgacacagaaaatattaagagctgctcaattaacacaccttaaaatgctgtcctacaattccatattttattagaaccacattaatataccttgaaagtatgtctgcgtaagtcaacaatctaataaggactaaaatcaaaagctttcaatataaattaaatatatttaaatatgtaaattttattgataggacctccttaacacaataaactcattgtttgcatccaggttgacagttgaaactttagtctttggaattgactgtaacaatcatgtaacattttaaagtataaactgcacaaaagaagggctatcttttcatgcatcttatttgagaaacctggcaaga

SEQ ID NO: 110673 - DNA, 628 bp, Homo sapiens
gatttcaaaccactacaattggacttgaactatactttagaccaaatggacccaacacccatgtgcagaacattccatgcaacagcaacagattacacatttttgtcaagtcatttaaaaacaagaattttaatttttacgagtcaaaaccatattatttttaataatatttcactgataggaatcatagtaatctttttacatcaaaagtcaagtaaacaaaagacataatattgattatattgagccttttaaatcactattctgagctctacaggcacacaacatcacatgtttaaagctatctcaccaaggcttatagatatattgtttattaatccctattagaaaatgttcatcaaaaataacatttttattgtatctcatatacttttctgttgtaaaaattacaggcacaacttactttaaatgattctgatctgcatgaattttagttaccatggtttgtttaaataaycctagttcctaacaagataattcaattttcagttattatggtctatttactgtgagtaagaaagtaaagtgcaaaattttctgctagctcctcagtacacaatctccaagcaaataatagatgtatataatgatctgtgaccagttgagt

SEQ ID NO: 110674 - DNA, 519 bp, Homo sapiens
gtttggttaaatccaagtgtgtaaataatattttacaattacatatgatcttgtgaatatcaatatgactatttgagtatttaaaagagataaccttcatatgatgataaacattttgttttatttatagccacaaatcttaatttactgatgagtcaaatttgagaaaatccataaagaaatgcaagcttcttataaaatgcagctaytgagagagatgccagaactcttctctagattttcagtgtttttcaccaacacgactaccttatctctgccaaaaggaaataaaccaaactttaattatttttgaatatgagaatgaaaaaaagtaattcaaattccacccaaatgaaacactgcaatttatttgagtggggcttacataaggttacttcaattaatgaaagttaggttgagcaaagaaatgtttaactatttatgggttcataattttctgcatcaaactgtaaagcacagaaaacttaattttggttatgaagtgttatataaatattc

SEQ ID NO: 110675 - DNA, 519 bp, Homo sapiens
gtttggttaaatccaagtgtgtaaataatattttacaattacatatgatcttgtgaatatcaatatgactatttgagtatttaaaagagataaccttcatatgatgataaacattttgttttatttatagccacaaatcttaatttactgatgagtcaaatttgagaaaatccataaagaaatgcaagcttcttataaaatgcagctactgagagagatgccagaactcttctctagattttcagtgtttttcaccaacacgactaccttatctctgccaaaaggaaataaaccaaactttaattatttttgaatatgagaatgaaaaaaagtaattcaaattccacccaaatgaaacactgcaatttatttgagtggggcttacataaggttacttcaattaatgaaagttaggttgagcaaagaaatgtttaactatttatgggttcataattttctgcatcaaactrtaaagcacagaaaacttaattttggttatgaagtgttatataaatattc

SEQ ID NO: 110676 - DNA, 593 bp, Homo sapiens
tcttttgtcataattatctgaggaaacacgatatgatatataaaagagattaacatttttacctaggatgtgacccatataacggaagcgtgccttgttgttttcaagaacaataattacagtgaatgtgatttagttggaaaagaaaagcatacaaattcattccaaagaagagagcttataacatgatgtcaatatgtaagtcaactcattttgatgctgccctgtaatctagatattgtttccattgaaaaaataggtttaagaaaagattgttgtcaaataaacgtgtttgatgtgttattatacctcttaaaacttttacaagtacttccttgaactgaaaaatacaaaacctttatacattaaataaaagtatcatgtgatttgctccaaacttgtatttrtagttctattaaatagtatccttgtctaagagaccaaaaaagaaaaaaaaaagacagaacaaagatgccactctgcaaaatctgagaataaaggtaaaacatcttttccattgcctatggtattgaaaccaagaaatataaggttgatattttttccagttctcctcaaatgccattatcatatca

SEQ ID NO: 110677 - DNA, 504 bp, Homo sapiens
actactttataggattattaaaattaagactaaatgattaagtattttttaattagtgtactatttttagagcagttttaggtttacagcaaaattgagcagaaagtacacagttyccatttactttctgtccccaaacaattacaatcactctcgctgttgacatggggcaccatacattttttacagtcaatgagccaaacatccagatgataatgatgcattacccaaaggccatagtttacattaaggttcactcttgtgttgtgcattctatgggtattgataaatgtataatgacatagatccaccattgtagtgttgtacagaatagtttcactgccctaaaagtcctttgtgctttcaccattcatctcgaacccctggcaacaattaatctttttactgtctccacagttttgtcttttccaggatgtcgtatagttggaatcctacagtgatacagccttttcagattggcttctttctgttaatactatacta

SEQ ID NO: 110678 - DNA, 615 bp, Homo sapiens
tcagtatttacaatcatcttctttatttgttttgaatcttcaaatcctgattgtttacccagcaggtccattggccctctctgacctctcctttcccatgggtgtgctggtgactgtcagtcttctagagctatactgctgtccagccctgctccatattactttgtgtcttcccgattcctgtttgtatcatcagcctctgacccacaacttgagcatcccaaatccttgggcctatcttgtgctccatttgactgtctccttcttacacctggacttgacctacttgaagaaaattttcaaggggtagagaatttctcctcgagatcaatattttgttttaactctaagcctaggtactcrgattcaatcaggtcttcttcttttgttaatggatctaaagtgcaattgtattatttataatccttggccatgcaatgtatcattggtccatggattacactttttcaaattttcaaaaagtgattacaattaatttgaaataatgtcataaacatccatgaatccacagttaaggaagaacattaacaataactgtatagggtcctcttgcatttatttttcttatgtaaccccatctcaagtaaccaccat

SEQ ID NO: 110679 - DNA, 615 bp, Homo sapiens
tcagtatttacaatcatcttctttatttgttttgaatcttcaaatcctgattgtttacccagcaggtccattggccctctctgacctctcctttcccatgggtgtgctggtgactgtcagtcttctagagctatactgctgtccagccctgctccatattactttgtgtcttcccgattcctgtttgtatcatcagcctctgacccacaacttgagcatcccaaatccttgggcctatcttgtgctccatttgactgtctccttcttacacctggacttgacctacttgaagaaaattttcaaggggtagagaatttctcctcgagatcaatattttgttttaactctaagcctaggtactcggatycaatcaggtcttcttcttttgttaatggatctaaagtgcaattgtattatttataatccttggccatgcaatgtatcattggtccatggattacactttttcaaattttcaaaaagtgattacaattaatttgaaataatgtcataaacatccatgaatccacagttaaggaagaacattaacaataactgtatagggtcctcttgcatttatttttcttatgtaaccccatctcaagtaaccaccat

SEQ ID NO: 110680 - DNA, 451 bp, Homo sapiens
  misc_feature (1)...(451): n = A,T,C or G
nnnnnnnnnnnnnnnnnnnnnnnnnnnnnnnnnnnnnnnnagcctgttcttggtagtgagaccatactggtcattcacagctggcctctgttctgactggttagagttcatactggtgtctgttctgactggtcaggcttttttctttttgctgtgtgtatgtgtgtgtgtctattctgtttcctagmaacatcttgctagttttaaatgttttgaatattgctctcttactcagtatgtaaattttagaacgttgcttaaacatttttgtgcctgagtttcctcatcttgttgccagaggccaggaggccctgcgggattggagtagaggaggctactaatttggtgactggcataggaggatggatgggaggcagcacaggaaattagacagccctgtacattgctgctgcgatagaccatcagccatgtaacccaaggccaatccagt

SEQ ID NO: 110681 - DNA, 489 bp, Homo sapiens
ccaaaccaaaacaaaatgtcawaattttaatttaccagcaaacctaggttgcttctgtgaaatgatctcatttgctgagttttaaaattgactaaatttcccaatttccaaatgaaaatatttagttatcttgtcttgctatgtgtttttggttaatatgatgattaatttttggtctattacttaacatattccatgattgttgatatggattataaggactcacaaaatagttttcagatgtctttaatttttttacttagtgtagatcctataaatggattaggagtattctattaactcccatgtattcagaaatcgaattggagtggtaaattctgtttgaagtaacaagggatatcaaaggaaaaaaataattttgtgactatgtcttctatacgtgaatttttcaggcatccttatcaatggcttatactaaagacattttctggatcatgggtgacacacagaagacatgcggataagtgg

SEQ ID NO: 110682 - DNA, 489 bp, Homo sapiens
ccaaaccaaaacaaaatgtcaaaattttaatttaccagcaaacctaggttgcttctgtgaaatgatctcatttgctgagttttaaaattgactaaatttcccaatttccaaatgaaaatatttagttatcttgtcttgctatgtgtttttggttaatatgatgattaatttttggtctattacttaayatattccatgattgttgatatggattataaggactcacaaaatagttttcagatgtctttaatttttttacttagtgtagatcctataaatggattaggagtattctattaactcccatgtattcagaaatcgaattggagtggtaaattctgtttgaagtaacaagggatatcaaaggaaaaaaataattttgtgactatgtcttctatacgtgaatttttcaggcatccttatcaatggcttatactaaagacattttctggatcatgggtgacacacagaagacatgcggataagtgg

SEQ ID NO: 110683 - DNA, 412 bp, Homo sapiens
gctgagcacagctgcagggctggctcrtctcagtaactcagcacacgggcgcagtatccccagagtcccaggtcagaccagggcagcacagatttaccttgaaagagtacacttctcattggtggccatacggttacagagcatatgtttggagtgaattttcaaaattttaaatcaacctaagactagattaaataatatatttatacttgtattaggagtgtataggaaagcatcatttttggcagaaaatttacaataaagttatagagtgtggggctgtcagaaatttcagttagtctcaaaggaattcgatgagtgtaaaagtatttagtgctataataacaatgtctctgtcagtgtgaaattgcttcttttttgaaatgaatataaaaagaatttatcagaagca

SEQ ID NO: 110684 - DNA, 412 bp, Homo sapiens
gctgagcacagctgcagggctggctcgtctcagtaactcagcacacgggcgcagtatccccagagtcccaggtcagaccagggcagcacagatttaccttgaaagagtacacttctcattggtggccatayggttacagagcatatgtttggagtgaattttcaaaattttaaatcaacctaagactagattaaataatatatttatacttgtattaggagtgtataggaaagcatcatttttggcagaaaatttacaataaagttatagagtgtggggctgtcagaaatttcagttagtctcaaaggaattcgatgagtgtaaaagtatttagtgctataataacaatgtctctgtcagtgtgaaattgcttcttttttgaaatgaatataaaaagaatttatcagaagca

SEQ ID NO: 110685 - DNA, 412 bp, Homo sapiens
gctgagcacagctgcagggctggctcgtctcagtaactcagcacacgggcgcagtatccccagagtcccaggtcagaccagggcagcacagatttaccttgaaagagtacacttctcattggtggccatacggttacagagcatatgtttggagtgaattttcaaaattttaaatcaacctaagactagattaaataatatatttatacttgtattaggagtgtataggaaagcatcatttttggcagaaaatttacaataaagttatagagtgtggggctgtcagaaatttcagttagtctcaaaggaattygatgagtgtaaaagtatttagtgctataataacaatgtctctgtcagtgtgaaattgcttcttttttgaaatgaatataaaaagaatttatcagaagca

SEQ ID NO: 110686 - DNA, 581 bp, Homo sapiens
tctcaggttttttctaggtcgatcgcctcgtaaatctgccttgtgatatttttattctatcttaggggaagaccattgtgtggatgacgagggttgtttgtggaatgaataatacacccactaaagacatcattgtcgtaatatttggaatctatgatcattacttatgaatatgtcaaaaataacttggcagacatggttgagaattttggggtcaggagagtatcctgaattatctgggtgagaccatcataatcacaagggtccttataatagggaaggaggaaggtaacagccagaggggacctgggacaacggacagggaaactggagtgatggaggaaggggccatgctgytaggaatgtgggaacatcagaaagatggaatgctcgatattggattctctctcgaagcctagaatgaatagagccctattactccttgattttacttcattgagacttctgacctccagaaatgtaagataatacacttgtgttatgtggagcagtaaggttgtggtaatttgttacagcagcaacaggaaaccaatgcaaggggaaggggtgtgttttacttc

SEQ ID NO: 110687 - DNA, 602 bp, Homo sapiens
atgttggtgtgctgcacccattaactcgtcatttacattaggtgtacctcctaatgctatccctcaccgctccccccaccccacgacaggccctggtgtgtgatgttccccttcctgtgtccatgtgttctcattgttcaattcccacctgtgagtgagaacatgcagtgattggtttctttgtccttgtgatagtttgctgagaatgatggtttccagcttcatccatgtccctacaaaggacatgaactcatccttttttatggctgcaagcgaggactgagtcagagagatggggatggcagaggagacaaaatgtggtcagggccgtgtaagatgtgaccctgctgccatatctgaaagaaargctgttggtgtttgtaaaggctttgggcaaattgtgctttgtagacaaaactgtagaagggtctgggtttaagcttagtgtcagcgtgatgaggactagaggtcgcagtgagcttgtgttaagaaatccaccctgcacttctggctttgtctctttcctggttttataggtggtgggtgcctctatggaatgaacgtggctctgtggaaggaacatagttaaggtcagacagacc

SEQ ID NO: 110688 - DNA, 602 bp, Homo sapiens
atgttggtgtgctgcacccattaactcgtcatttacattaggtgtacctcctaatgctatccctcaccgctccccccaccccacgacaggccctggtgtgtgatgttccccttcctgtgtccatgtgttctcattgttcaattcccacctgtgagtgagaacatgcagtgattggtttctttgtccttgtgatagtttgctgagaatgatggtttccagcttcatccatgtccctacaaaggacatgaactcatccttttttatggctgcaagcgaggactgagtcagagagatggggatggcagaggagacaaaatgtggtcagggccgtgtaagatgtgaccctgctgccatatctgaaagaaaagctgttggtgtttgtaaaggctttgggcaaattgtgctttgtagacaaaactgtagaagggtctgggtttaagcttagtgtcagcgtgatgaggastagaggtcgcagtgagcttgtgttaagaaatccaccctgcacttctggctttgtctctttcctggttttataggtggtgggtgcctctatggaatgaacgtggctctgtggaaggaacatagttaaggtcagacagacc

SEQ ID NO: 110689 - DNA, 602 bp, Homo sapiens
atgttggtgtgctgcacccattaactcgtcatttacattaggtgtacctcctaatgctatccctcaccgctccccccaccccacgacaggccctggtgtgtgatgttccccttcctgtgtccatgtgttctcattgttcaattcccacctgtgagtgagaacatgcagtgattggtttctttgtccttgtgatagtttgctgagaatgatggtttccagcttcatccatgtccctacaaaggacatgaactcatccttttttatggctgcaagcgaggactgagtcagagagatggggatggcagaggagacaaaatgtggtcagggccgtgtaagatgtgaccctgctgccatatctgaaagaaaagctgttggtgtttgtaaaggctttgggcaaattgtgctttgtagacaaaactgtagaagggtctgggtttaagcttagtgtcagcgtgatgaggactagaggtcgcagtgagcttgtgttaagaaatccaccctgcacttctggctttgtctctttyctggttttataggtggtgggtgcctctatggaatgaacgtggctctgtggaaggaacatagttaaggtcagacagacc

SEQ ID NO: 110690 - DNA, 602 bp, Homo sapiens
atgttggtgtgctgcacccattaactcgtcatttacattaggtgtacctcctaatgctatccctcaccgctccccccaccccacgacaggccctggtgtgtgatgttccccttcctgtgtccatgtgttctcattgttcaattcccacctgtgagtgagaacatgcagtgattggtttctttgtccttgtgatagtttgctgagaatgatggtttccagcttcatccatgtccctacaaaggacatgaactcatccttttttatggctgcaagcgaggactgagtcagagagatggggatggcagaggagacaaaatgtggtcagggccgtgtaagatgtgaccctgctgccatatctgaaagaaaagctgttggtgtttgtaaaggctttgggcaaattgtgctttgtagacaaaactgtagaagggtctgggtttaagcttagtgtcagcgtgatgaggactagaggtcgcagtgagcttgtgttaagaaatccaccctgcacttctggctttgtctctttcctggttttataggtggtgggtkcctctatggaatgaacgtggctctgtggaaggaacatagttaaggtcagacagacc

SEQ ID NO: 110691 - DNA, 580 bp, Homo sapiens
cactgcaatctctgtctctgtgttcacactgccttctccacttcagtctatgctaaatgtctctctacctcttgtttttttttaggacacttgagtttgcatttaagtcccagttgattaatctaagaccatctccctgtttcargctccttaatttacacctgcaaaagctgttttcccaaatgagatacatgcatagtcttcttggaatgaaacctcactatttggggatgatactcagtactacaccattacataaccaggtctcagtgttagtcctgtacatacatcacaatctctctctctctctctctctctctctctctctccacacaccctggcttcctccttttctcaatgtcatcaatctcttcaattccttaagtgtatccagtgatacctataaacaaataagtatctgagaaaagtctcaatcactttagaaatttatttggtcaaagttaaagaaatatcagtgaaacagcctcaggaggtcttgagaatgtgtgtcaaaggtcgtcgggctacaggttggttttacacgttttagggagacataagatatcaatcaatacgtgta

SEQ ID NO: 110692 - DNA, 580 bp, Homo sapiens
cactgcaatctctgtctctgtgttcacactgccttctccacttcagtctatgctaaatgtctctctacctcttgtttttttttaggacacttgagtttgcatttaagtcccagttgattaatctaagaccatctccctgtttcaggctccttaatttacacctgcaaaagctgttttcccaaatgagatacatgcatagtcttcttggaatgaaacctcactatttggggatgatactcaktactacaccattacataaccaggtctcagtgttagtcctgtacatacatcacaatctctctctctctctctctctctctctctctctccacacaccctggcttcctccttttctcaatgtcatcaatctcttcaattccttaagtgtatccagtgatacctataaacaaataagtatctgagaaaagtctcaatcactttagaaatttatttggtcaaagttaaagaaatatcagtgaaacagcctcaggaggtcttgagaatgtgtgtcaaaggtcgtcgggctacaggttggttttacacgttttagggagacataagatatcaatcaatacgtgta

SEQ ID NO: 110693 - DNA, 580 bp, Homo sapiens
cactgcaatctctgtctctgtgttcacactgccttctccacttcagtctatgctaaatgtctctctacctcttgtttttttttaggacacttgagtttgcatttaagtcccagttgattaatctaagaccatctccctgtttcaggctccttaatttacacctgcaaaagctgttttcccaaatgagatacatgcatagtcttcttggaatgaaacctcactatttggggatgatactcagtactacaccattacataaccaggtctcagtgttagtcctgtacatacatcacaatctctctctctctctctctctctctctctctctccacacaccctggcttcctccttttctcaatgtcatmaatctcttcaattccttaagtgtatccagtgatacctataaacaaataagtatctgagaaaagtctcaatcactttagaaatttatttggtcaaagttaaagaaatatcagtgaaacagcctcaggaggtcttgagaatgtgtgtcaaaggtcgtcgggctacaggttggttttacacgttttagggagacataagatatcaatcaatacgtgta

SEQ ID NO: 110694 - DNA, 580 bp, Homo sapiens
cactgcaatctctgtctctgtgttcacactgccttctccacttcagtctatgctaaatgtctctctacctcttgtttttttttaggacacttgagtttgcatttaagtcccagttgattaatctaagaccatctccctgtttcaggctccttaatttacacctgcaaaagctgttttcccaaatgagatacatgcatagtcttcttggaatgaaacctcactatttggggatgatactcagtactacaccattacataaccaggtctcagtgttagtcctgtacatacatcacaatctctctctctctctctctctctctctctctctccacacaccctggcttcctccttttctcaatgtcatcaatctcttcaattccttaagtgtatccagtgatacctataaacaaataagtatctgagaaaagtctcaatcactttagaaatttatttggtcaaagttaaagaaatatcagtgaaacagcctcaggaggtcttgagaaygtgtgtcaaaggtcgtcgggctacaggttggttttacacgttttagggagacataagatatcaatcaatacgtgta

SEQ ID NO: 110695 - DNA, 595 bp, Homo sapiens
attctagctaaaggagttgatcagaagcagcagttgaaagcaccaactaaaccagctggggttagttcactgtcattctctcagaaccatctcttctctgaacaaaacaagtacaagagttcattgtgaatctgcattctccttgcctattttaaggttttgatgttgacactaatttgtgaaatccctcctgtggtgtgatatttcgttttccttgctttttgttaggacaagaatgcttcagctcttaatttaaaattatgtttctccctcctaggttgagcgaacttagaatgcattctctgacatatccaagttttygttaatatgaatttggggaaaaaagcatacttaattagctaagacttcttattctaggcttgaccctgtgttcgacatctattgaatttgtagttgcatgggctgctctctgacactggttactgacctggaagctatattaacgttaggggaggtggtgtatgagcattagaggtatccttgcaaggaaggacttgtcttatctcaatacgtcttttttttttgcgcacaagaaagtcagtgtttgagtcttctaaaatcttcctatttccaa

SEQ ID NO: 110696 - DNA, 595 bp, Homo sapiens
attctagctaaaggagttgatcagaagcagcagttgaaagcaccaactaaaccagctggggttagttcactgtcattctctcagaaccatctcttctctgaacaaaacaagtacaagagttcattgtgaatctgcattctccttgcctattttaaggttttgatgttgacactaatttgtgaaatccctcctgtggtgtgatatttcgttttccttgctttttgttaggacaagaatgcttcagctcttaatttaaaattatgtttctccctcctaggttgagcgaacttagaatgcattctctgacatatccaagtttttgttaatatgaatttggggaaaaaagcatacttaattagctaagacttcttattctaggcttgaccctgtgttcgacatctattgaatttgtagttgcatgggctgctctctgacactggttactgacctggaagctatattaacgttaggggaggtggtgtatgrgcattagaggtatccttgcaaggaaggacttgtcttatctcaatacgtcttttttttttgcgcacaagaaagtcagtgtttgagtcttctaaaatcttcctatttccaa

SEQ ID NO: 110697 - DNA, 500 bp, Homo sapiens
aaactaacctcaaagtcatgactttatytttatagcaacgaggttgccaagaactgagtcaaaatgtgagggaaaacaagcacctgcaaggagaaagaggacagatgcacttacataggacagatgcaaatagacaccactatgacaagtaaagctggaataatcaataaattcctaaagacaaagtggggctggtcagattgggagacggctgacagctgcagaagttgggaaagatccatcatcttgaaaactttttctccacaaacccactgtgatctctcaagcaattggtaaggaatccaagagagtctgtatatgacacagatcagggagagcagaacacttgggaggtgaccaggtcttgggggccgagcccttatgaatcggattagtgcctttataaaagaagctcaatggagttcttgtgtgccttccactatgtgaggacatagaaagaaggcaccatctatgaaccatgaaatgggctctcatcaaca

SEQ ID NO: 110698 - DNA, 500 bp, Homo sapiens
aaactaacctcaaagtcatgactttatttttatagcaaygaggttgccaagaactgagtcaaaatgtgagggaaaacaagcacctgcaaggagaaagaggacagatgcacttacataggacagatgcaaatagacaccactatgacaagtaaagctggaataatcaataaattcctaaagacaaagtggggctggtcagattgggagacggctgacagctgcagaagttgggaaagatccatcatcttgaaaactttttctccacaaacccactgtgatctctcaagcaattggtaaggaatccaagagagtctgtatatgacacagatcagggagagcagaacacttgggaggtgaccaggtcttgggggccgagcccttatgaatcggattagtgcctttataaaagaagctcaatggagttcttgtgtgccttccactatgtgaggacatagaaagaaggcaccatctatgaaccatgaaatgggctctcatcaaca

SEQ ID NO: 110699 - DNA, 425 bp, Homo sapiens
taacagaaaccctattaagcatgaagctttatggagtaaacacaaatccagtggtgaatgatacacactccagttctgtttgttgtcttggaacaatacrgtttagaggtgactggcgggtgaggagaacatatgcgagttcaccaaagagaaaagctgaatgaggcaatgcctcttcctgaccatatctcttactcagataactatataatttattgtccagtaaagggtatattaaaaaatcatattaaaagtcatgcagtgaagttgtccagggaaatcaagacttaacagtctcactctgacaataatgaacagggggattccctcaagatagactaggacatgaccccacactggcaggtagtagtaccagaaaagaacccatggaaaatctttaccttatgcttgaggtagggaccagg

SEQ ID NO: 110700 - DNA, 425 bp, Homo sapiens
taacagaaaccctattaagcatgaagctttatggagtaaacacaaatccagtggtgaatgatacacactccagttctgtttgttgtcttggaacaatacggtttagaggtgactggcgggtgaggagaacatatgcgagttcaccaaagagaaaagctgaatgaggcaatgcctcttcctgaccatatctcttactcagataactatataatttattgyccagtaaagggtatattaaaaaatcatattaaaagtcatgcagtgaagttgtccagggaaatcaagacttaacagtctcactctgacaataatgaacagggggattccctcaagatagactaggacatgaccccacactggcaggtagtagtaccagaaaagaacccatggaaaatctttaccttatgcttgaggtagggaccagg

SEQ ID NO: 110701 - DNA, 425 bp, Homo sapiens
taacagaaaccctattaagcatgaagctttatggagtaaacacaaatccagtggtgaatgatacacactccagttctgtttgttgtcttggaacaatacggtttagaggtgactggcgggtgaggagaacatatgcgagttcaccaaagagaaaagctgaatgaggcaatgcctcttcctgaccatatctcttactcagataactatataatttattgtccagtaaagggtatattaaaaaatcatattaaaagtcatgcagtgaagttgtccagggaawtcaagacttaacagtctcactctgacaataatgaacagggggattccctcaagatagactaggacatgaccccacactggcaggtagtagtaccagaaaagaacccatggaaaatctttaccttatgcttgaggtagggaccagg

SEQ ID NO: 110702 - DNA, 447 bp, Homo sapiens
agggaatctgaacccagctaccatatgagagagttcaacttatgttcaatgtgaatgccatggcaatattaaaaggtaagaattcgctccatacgtgcttgaggtaaataggagaaacctagaatttatgtaaacagtgagaagattggatgcsttttccatcacatattttaatactagcagcatattatatatgtcaatccatcaggcattcagaaatacatgcttatgaaaattttttgcaccatcagacaaaagacaagggtagaagacatttgtaaccctataaacactagtaaattaaaaacagaagggacctttatgtcctaacatatctgcgttgtgaaaggctgccctgtgaaatacgggatttcttaaacatattttaaaaatcataggtgtcaatattttttagaaatccatttaaattttctcttgctattttac

SEQ ID NO: 110703 - DNA, 567 bp, Homo sapiens
catctcataaatcacttccattataattcagtatcacctgatatctttgcattaagatagaaagttactgtcaacaacaacaagaaaagagctttcctgggtgtcaccctggatcaattcattatgcagaacatagaatgttttagctaggccgtatacagaggcaaataattagcgttctatctataaactgtatctaaaaggtacacaatgcccacggctctggaatagaactgacccaacacacacattataaacttcccaaatcccaagggaattacaggtatggggaattttacagcacagttgaattatagtgtcaggcctttaaagaggaagagataagtacaagaaaagatggcaagagaagctatccctgtctattgaagccagattactgctacttttttatgatacatagtttataactggagtaatttgactttgtaactatatctaacatatagctttttacaccataaaawtttttttaaagtataacagttttccactaaattgtacatagtactcacaccgagacagttctctcagtgcatgaatgattct

SEQ ID NO: 110704 - DNA, 622 bp, Homo sapiens
ctttgtctgcaaacaaacaaaaaaataaaaccgttaaatacctgatatcttacccatattatcagaacaataacactaagagcaataagaggcccttaattgggcattatgacagaacctgattaatattcaaattcttcaacccatccaataatataagttccataattaccaactgtatgttttccctgtctctactgtaaagttttcttctgttctatagtaaatactattaaagaaagtataatttattytaaaaataaagtttagacacaaattgaattcatcacacagaaagccaagactgtcaaatggaacactacataacacacagcaataattttagtctagatgtatacttttgcaaaataattagcttatgtagatgcctgaacatttctattcctcctttctctcataagttgctaaaattttatggggttttctataatagcctaatcaataataaataatataactagtgaagtccaatatactttcatatacatttatggaggcaagataatttgtttacacaaaataaaatatagcacatatatcgatataacaatatgccagttttgaatcagtgcttcacaaatgccataggaaaaaaataatc

SEQ ID NO: 110705 - DNA, 576 bp, Homo sapiens
cctcacataaaatgtatcaaaatctacctttctatctctttatcactctctgagctaaagttctacaatttgtataagaaaacaaagaaggaaacctttgtgacattgagttaggaaaagatttcttaaacaagacaaaaaactgaatcatacaaaaaaatcagtgaggcagacttcaaaaagttagtcttttgtaattcttttctttataagaaaatgagaaggtaagccacagattggaggacaaattayaaaatctatatctgacaaaagtcttcgaaaaagttttctcttcaaaagaaacccaaacttggaaaaacacaaatgtttttcgtctgataaatggataaacaattgtagtacaaaatattgttacagtgaaacaacgtagatgaatctcaaaatattagtctaatatgagagactatagtgtaatatttatagctttattgacatgaaattctagaaaatgagacccacagttaaaaaaaaataatggtttacagagagtcagagaaagacatgaattgtaaatatttcaatctatatctttatcttggtgatggcaaagagttt

SEQ ID NO: 110706 - DNA, 576 bp, Homo sapiens
cctcacataaaatgtatcaaaatctacctttctatctctttatcactctctgagctaaagttctacaatttgtataagaaaacaaagaaggaaacctttgtgacattgagttaggaaaagatttcttaaacaagacaaaaaactgaatcatacaaaaaaatcagtgaggcagacttcaaaaagttagtcttttgtaattcttttctttataagaaaatgagaaggtaagccacagattggaggacaaattacaaaatctatatctgacaaaagtcttcgaaaaagttttctyttcaaaagaaacccaaacttggaaaaacacaaatgtttttcgtctgataaatggataaacaattgtagtacaaaatattgttacagtgaaacaacgtagatgaatctcaaaatattagtctaatatgagagactatagtgtaatatttatagctttattgacatgaaattctagaaaatgagacccacagttaaaaaaaaataatggtttacagagagtcagagaaagacatgaattgtaaatatttcaatctatatctttatcttggtgatggcaaagagttt

SEQ ID NO: 110707 - DNA, 558 bp, Homo sapiens
acaactggattaaaattcagaaatcccattacaaatcatgtcattttccaggatattgtaccacctctgtcaataaaacagataattttcttcctcacattttcagataagycaaggtataaagcacagaagtatagatcacagagtttgtgttttcctattgtgtttatttttcatttcaacctcatttcagtcaatgtaactgctcttatgaaatatacaataaaatgattgtttattttattgagttatgaaaatttcaactaactaaatgcaaaaatgaaaaatgttatttatagttatatccataactataaatatgttaaaaaaataaaatattaaatttcagccaaagggaaaatcttgaatattttaaagaagaaatctaacaaaatgatgtactatgctgaaaaaatacttaatagaaaaaatacaaatattaaatatgtgaatatccttatttaatattgtctttccaagttccattttttaataagaaactataagtaatttgttgaccttactgcatatctccttcctctttgacgtggggataat

SEQ ID NO: 110708 - DNA, 451 bp, Homo sapiens
ctgtatctgattctgcattcagcctgttgtgatatcacctgtgaggtagtgtccagaaaacatcactgtacacacttgaaaaagacaaatagcatcttagtattattaggaaaacagttttatccaaaaaatcctttaaaggggcctccggagactcctaaaggggtctgcagaggccttcaggttatggtttgagcctgctggagtcgtagttaagaggatggatttcagagttggactggctaggcatgagccctcttcastatatgatagttatttttcttggagaaagttgcttaacacttgtaaagctcaaatatcccatctatgaaatggacttaataactattttgagatttaaaatatacatttgtcaaatgtaactcactaatactaaaaaatcaataattgtttgttcttattaaacaatgcaagtatctatcgaagtgga

SEQ ID NO: 110709 - DNA, 557 bp, Homo sapiens
tgtcactgacttcaaccttttttacaggccaaaaaataaagagcatataatttgttaaaagacatgtacytctcttaaactctgagcagacaatgttgacaaattacatgttgacttattttaaaagtcctcatttaaagctgaatcacatttaaaggtttcagaggacctgccctatatcttttcaggtcagaatagctgtaaaagtaggggttctcctgatggatgattttatttttgtatatcactaaagcacaggtataaatagatactaatgattttttagaatccttgatggcttctaacatgctctacatattaattatctaatcattctaagctctttgatttttctcaggaggaggttgctgcaggatgtcaaagattttacagcttgaggctgtggacacattaaatagatacaaagcatggatcacatgtgagaagcaaagttgtcacaatggtgtataataattacgctagcaatactgcattaatccaggttccttagaagtttaatataaatactatatatcacacaattgtattgccattcc

SEQ ID NO: 110710 - DNA, 557 bp, Homo sapiens
tgtcactgacttcaaccttttttacaggccaaaaaataaagagcatataatttgttaaaagacatgtacttctcttaaactctgagcagacaatgttgacaaattacatgttgacytattttaaaagtcctcatttaaagctgaatcacatttaaaggtttcagaggacctgccctatatcttttcaggtcagaatagctgtaaaagtaggggttctcctgatggatgattttatttttgtatatcactaaagcacaggtataaatagatactaatgattttttagaatccttgatggcttctaacatgctctacatattaattatctaatcattctaagctctttgatttttctcaggaggaggttgctgcaggatgtcaaagattttacagcttgaggctgtggacacattaaatagatacaaagcatggatcacatgtgagaagcaaagttgtcacaatggtgtataataattacgctagcaatactgcattaatccaggttccttagaagtttaatataaatactatatatcacacaattgtattgccattcc

SEQ ID NO: 110711 - DNA, 552 bp, Homo sapiens
gtgtacacttttagtttcatcaaattggatctggctgaaaaaaataaataaawaaaaataaataaataaataaataaaacagcagctttggcgcccaacatagaaaattcagtccaggaccagagatgtaaacacctatggctttgctaactacaagtggcagatttggttacaaacagtcaggaaaaatcgagtttgtggtcctggttcagggcaagaaacggcccaaccagaaatttaatggggagattctgaaaactgagggaaccatagatagaaggagtgaggtaagttctccacagtccccaggctgacagaaactctgcttgcatgagagagatcaaagagggtcctgcaaatcatgagctccaaaggagatttcggaacaggctacagcatcacatgcattccagcccgcatcctgtccaattagcagatgaaagccttgtgggcttgtggtgctggagcataacctccatccacagccgtaactgatgactaaactatgcaaagggttgaccatgggtgatgcagactgaaaactacaataag

SEQ ID NO: 110712 - DNA, 505 bp, Homo sapiens
ccacacacagttcatgcaaaatgcttgagagcaaaaatacacaatgaaaatgagcaagttgatttctttacaatttttttaattgccagtttatatccagcttccccctcaaaaaaaggaaaacataatctggggaaaggtcagtgatctatatattaaattatgattcttgatataattaaaatatgtcctctgttctaaaaagagattttagttacctatttctgcctccacctgtctaaatctataaaatattcaatgaaarctaaccttgaggtttataacaaatagtgacagtcaatatattggcagagcctgacaataatgtgccctcacaaattatctgtcctgaagctgaacttaaaattcaattaatggatgacataaattttgttccctaaactggaataaaactgatgacctaaaacaaggtagaaagatccactgtctcttttccatgatctgtctctggataaaacactaatctacatcacttcaaaatggt

SEQ ID NO: 110713 - DNA, 543 bp, Homo sapiens
ttagttacctatttctgcctccacctgtctaaatctataaaatattcaatgaaagctaaccttgaggtttataacaaatagtgacagtcaatatattggcagagcctgacaataatgtgccctcacaaattatctgtcctgaagctgaacttaaaattcaattaatggatgacataaattttgttccctaaactggaataaaactgatgacctaaaacaaggtagaaagatccactgtctcttttccatgatctgtctctggataaaasactaatctacatcacttcaaaatggtagtcttgattcctcagcatggatccaacttaggaaggtcctattgatttcctttaccctaaattggtacaggaaagcccccacaatatttgaaatgtatgaaagctaaatgtacagaagtcaaatagcaaagatgtatgttcttattgagaatacttttcccagaaagattaaaatattaacaattataaaatcccattattttcactctataggtcctaccttattcaggtccacataaactagcaa

SEQ ID NO: 110714 - DNA, 543 bp, Homo sapiens
ttagttacctatttctgcctccacctgtctaaatctataaaatattcaatgaaagctaaccttgaggtttataacaaatagtgacagtcaatatattggcagagcctgacaataatgtgccctcacaaattatctgtcctgaagctgaacttaaaattcaattaatggatgacataaattttgttccctaaactggaataaaactgatgacctaaaacaaggtagaaagatccactgtctcttttccatgatctgtctctggataaaacactaatctacatcacttcaaaatggtagtcttgattcctcagcmtggatccaacttaggaaggtcctattgatttcctttaccctaaattggtacaggaaagcccccacaatatttgaaatgtatgaaagctaaatgtacagaagtcaaatagcaaagatgtatgttcttattgagaatacttttcccagaaagattaaaatattaacaattataaaatcccattattttcactctataggtcctaccttattcaggtccacataaactagcaa

SEQ ID NO: 110715 - DNA, 543 bp, Homo sapiens
ttagttacctatttctgcctccacctgtctaaatctataaaatattcaatgaaagctaaccttgaggtttataacaaatagtgacagtcaatatattggcagagcctgacaataatgtgccctcacaaattatctgtcctgaagctgaacttaaaattcaattaatggatgacataaattttgttccctaaactggaataaaactgatgacctaaaacaaggtagaaagatccactgtctcttttccatgatctgtctctggataaaacactaatctacatcacttcaaaatggtagtcttgattcctcagcatggatccaacttaggaaggtcctattgmtttcctttaccctaaattggtacaggaaagcccccacaatatttgaaatgtatgaaagctaaatgtacagaagtcaaatagcaaagatgtatgttcttattgagaatacttttcccagaaagattaaaatattaacaattataaaatcccattattttcactctataggtcctaccttattcaggtccacataaactagcaa

SEQ ID NO: 110716 - DNA, 504 bp, Homo sapiens
gtggtttccttagttgtagctatttgctctggcctacgtataacaagscccaaattcacctgccattttacctcccacagaaagaaccactggaaagatcactcctttaagagcttatccacattcagagagaagctgaataaacactggggaggtatggcaggctgtcgggcaatattatctgatgtgaaaaaatatatagaaagaaaactatcaatgcccttttactaccagaatgttctaatgcttgcccatctccctagtaggagaaaaaaattttttcacctcgcataaagcaaaactcccttgtcatctctcatgacagaatctagttgtaggtgagtcatgtcatcataatacaggctgttgtcaacctcatccctcaaaggaagaggatcagtgaggaacttatgtatttacctaatagcattcactgcctggtcttatttccaaccgaaggtaagtatgaaagactttgtgattccagttttataaatcacaacc

SEQ ID NO: 110717 - DNA, 504 bp, Homo sapiens
gtggtttccttagttgtagctatttgctctggcctacgtataacaagccccaaattcacctgccattttacctcccacagaaagaaccactggaaagatcactcckttaagagcttatccacattcagagagaagctgaataaacactggggaggtatggcaggctgtcgggcaatattatctgatgtgaaaaaatatatagaaagaaaactatcaatgcccttttactaccagaatgttctaatgcttgcccatctccctagtaggagaaaaaaattttttcacctcgcataaagcaaaactcccttgtcatctctcatgacagaatctagttgtaggtgagtcatgtcatcataatacaggctgttgtcaacctcatccctcaaaggaagaggatcagtgaggaacttatgtatttacctaatagcattcactgcctggtcttatttccaaccgaaggtaagtatgaaagactttgtgattccagttttataaatcacaacc

SEQ ID NO: 110718 - DNA, 504 bp, Homo sapiens
gtggtttccttagttgtagctatttgctctggcctacgtataacaagccccaaattcacctgccattttacctcccacagaaagaaccactggaaagatcactcctttaagagcttatccacattcagagagaagctgaataaacactggggaggtatggcaggctgycgggcaatattatctgatgtgaaaaaatatatagaaagaaaactatcaatgcccttttactaccagaatgttctaatgcttgcccatctccctagtaggagaaaaaaattttttcacctcgcataaagcaaaactcccttgtcatctctcatgacagaatctagttgtaggtgagtcatgtcatcataatacaggctgttgtcaacctcatccctcaaaggaagaggatcagtgaggaacttatgtatttacctaatagcattcactgcctggtcttatttccaaccgaaggtaagtatgaaagactttgtgattccagttttataaatcacaacc

SEQ ID NO: 110719 - DNA, 504 bp, Homo sapiens
gtggtttccttagttgtagctatttgctctggcctacgtataacaagccccaaattcacctgccattttacctcccacagaaagaaccactggaaagatcactcctttaagagcttatccacattcagagagaagctgaataaacactggggaggtatggcaggctgtcgggcaatattatctgatgtgaaaaaatatatagaaagaaaactatcaatgcccttttactaccagaatgttctaatgcttgcccatctccctagtaggagaaaaaaatttttkcacctcgcataaagcaaaactcccttgtcatctctcatgacagaatctagttgtaggtgagtcatgtcatcataatacaggctgttgtcaacctcatccctcaaaggaagaggatcagtgaggaacttatgtatttacctaatagcattcactgcctggtcttatttccaaccgaaggtaagtatgaaagactttgtgattccagttttataaatcacaacc

SEQ ID NO: 110720 - DNA, 592 bp, Homo sapiens
caaacattttaagttgacagaagatataaaatgttcactatcaaaatgtcgcaactgataaaaatgttctcaaatatttctgtctcaaacttgcattgttcattaaggaagcaaaataggtgggacatacacagcaacaacatccctcaaaaaacaccttggctcattcctataagccaggcagcaaatacatcatccttacatatgttaattaccttccaatttcaaattctcaactgtgaaataaagggccattttatttggctgcttcyagttcaatatgactgtttttattaaaacatctctaacttgaaaaatatttggtgttttctaaaaaactgcaaattgccacaaatggccagataatttggaataaacaccctacagaaaaaaatatatattcaagttgcataagtcactttgagcaatcctttgaggatatttcatttatatctaaatgaaccacaggtttagctggcttttccggaaaaccagaagcaaataatgtatgattataatgaaaaccatctcaagtaattttgaaatgaagtaccacatgtcttatgctgtcccttccatgcacttgacaaaa

SEQ ID NO: 110721 - DNA, 592 bp, Homo sapiens
caaacattttaagttgacagaagatataaaatgttcactatcaaaatgtcgcaactgataaaaatgttctcaaatatttctgtctcaaacttgcattgttcattaaggaagcaaaataggtgggacatacacagcaacaacatccctcaaaaaacaccttggctcattcctataagccaggcagcaaatacatcatccttacatatgttaattaccttccaatttcaaattctcaactgtgaaataaagggccattttatttggctgcttctagttcaatatgactgtttttattaaaacatctctaacttgaaaaatatttggtgttttctaaaaaactgcaaattgccacaaatggccagataatttggaataaacaccctacagaaaaaaatatatattcaagttgcataagtcactttgagcaatcctttgaggatatttcatttatatctaaatgaaccacaggtttagctggcttttcyggaaaaccagaagcaaataatgtatgattataatgaaaaccatctcaagtaattttgaaatgaagtaccacatgtcttatgctgtcccttccatgcacttgacaaaa

SEQ ID NO: 110722 - DNA, 592 bp, Homo sapiens
caaacattttaagttgacagaagatataaaatgttcactatcaaaatgtcgcaactgataaaaatgttctcaaatatttctgtctcaaacttgcattgttcattaaggaagcaaaataggtgggacatacacagcaacaacatccctcaaaaaacaccttggctcattcctataagccaggcagcaaatacatcatccttacatatgttaattaccttccaatttcaaattctcaactgtgaaataaagggccattttatttggctgcttctagttcaatatgactgtttttattaaaacatctctaacttgaaaaatatttggtgttttctaaaaaactgcaaattgccacaaatggccagataatttggaataaacaccctacagaaaaaaatatatattcaagttgcataagtcactttgagcaatcctttgaggatatttcatttatatctaaatgaaccacaggtttagctggcttttccggaaaaccagaagcaaataatgtatgattataatgaaaaccatctcaagyaattttgaaatgaagtaccacatgtcttatgctgtcccttccatgcacttgacaaaa

SEQ ID NO: 110723 - DNA, 438 bp, Homo sapiens
cccatgttcataggcaaccastgatttattttctgtcattgtagttttgcctaatctggaccttttatagaaatagaattgtacaatgtgtgatcttttgtaatttgcttttttttctcttagcagaatgttttcaaatttctatcatgttatagtgtgtatcaggatttctttccttttgtagctgagtaatagtttatgtttatccattcattagttgatggacatttgtgttgtttttgagtattcaccatcatgagtcaggctgttatgaacactcgtacgtaagttttagtgtgaacatatatttttatttctcttggatttacactcaggagtgaaattgttgcattatgtgattactatacatttagtctttgagaaactgccacgttgtttttaaagtggttacactggtcaggcacagtggctcacacc

SEQ ID NO: 110724 - DNA, 438 bp, Homo sapiens
cccatgttcataggcaaccagtgatttattttctgtcattgtagttttgcctaatctggaccttttatagaaatagaattgtacaatgtgtgatcttttgtaatttgcttttttttctcttagcagaatgttttcaaatttctwtcatgttatagtgtgtatcaggatttctttccttttgtagctgagtaatagtttatgtttatccattcattagttgatggacatttgtgttgtttttgagtattcaccatcatgagtcaggctgttatgaacactcgtacgtaagttttagtgtgaacatatatttttatttctcttggatttacactcaggagtgaaattgttgcattatgtgattactatacatttagtctttgagaaactgccacgttgtttttaaagtggttacactggtcaggcacagtggctcacacc

SEQ ID NO: 110725 - DNA, 621 bp, Homo sapiens
tattacagtaagatttcattaaatgtaggagacataaaatataagaatcatcactttgcaaatatcatagtaataattgttgcaagaaagaaccttggaggratgctaagattagtggtgaatatatgttgggaaagaacatatttgcataatatgaaagtatcttcccacaagataattatagaatagtaacttcaaagtggagatgtcaacttagccaagtgatcaaagttaacattactaataataagataaatgaacttcatgtaacttcttatatgatgcactgagtaggacaaaacatcaattctatggtattcttagacaaaatgtataactttagtcctaaccgtgagaaaacatcagactaactgaaattgaggagggacattctacaaaataactgccagtattcatcaaaagcattttagaaagactgaggaattctccagagacatggaggcatgttatctaagtgcaatggagaacatgcattgtatcatgaaccagagatggacaacagtaggatatgtacaataacaccccaacatttgaacattaaacaaaatacttcagaaaaacccattggccaagaaaagtttcacacacaaaaaaaatagt

SEQ ID NO: 110726 - DNA, 621 bp, Homo sapiens
tattacagtaagatttcattaaatgtaggagacataaaatataagaatcatcactttgcaaatatcatagtaataattgttgcaagaaagaaccttggagggatgctaagattagtggtgaatatatgttgggaaagaacatatttgcataatatgaaagtatcttcccacaagataattatagaatagtaacttcaaagtggagatgtcaacttagccaagtgatcaaagttaacattactaataataagataaatgaacttcatgtaayttcttatatgatgcactgagtaggacaaaacatcaattctatggtattcttagacaaaatgtataactttagtcctaaccgtgagaaaacatcagactaactgaaattgaggagggacattctacaaaataactgccagtattcatcaaaagcattttagaaagactgaggaattctccagagacatggaggcatgttatctaagtgcaatggagaacatgcattgtatcatgaaccagagatggacaacagtaggatatgtacaataacaccccaacatttgaacattaaacaaaatacttcagaaaaacccattggccaagaaaagtttcacacacaaaaaaaatagt

SEQ ID NO: 110727 - DNA, 621 bp, Homo sapiens
tattacagtaagatttcattaaatgtaggagacataaaatataagaatcatcactttgcaaatatcatagtaataattgttgcaagaaagaaccttggagggatgctaagattagtggtgaatatatgttgggaaagaacatatttgcataatatgaaagtatcttcccacaagataattatagaatagtaacttcaaagtggagatgtcaacttagccaagtgatcaaagttaacattactaataataagataaatgaacttcatgtaacttcttatatgatgcactgagtaggacaaaacatcaattctatggtattcttagacaaaatgtataactttagtcctaaccgtgagaaaacatcagactaactgaaattgaggagggacattctacaaaataactgccagtattcatcaaaagyattttagaaagactgaggaattctccagagacatggaggcatgttatctaagtgcaatggagaacatgcattgtatcatgaaccagagatggacaacagtaggatatgtacaataacaccccaacatttgaacattaaacaaaatacttcagaaaaacccattggccaagaaaagtttcacacacaaaaaaaatagt

SEQ ID NO: 110728 - DNA, 621 bp, Homo sapiens
tattacagtaagatttcattaaatgtaggagacataaaatataagaatcatcactttgcaaatatcatagtaataattgttgcaagaaagaaccttggagggatgctaagattagtggtgaatatatgttgggaaagaacatatttgcataatatgaaagtatcttcccacaagataattatagaatagtaacttcaaagtggagatgtcaacttagccaagtgatcaaagttaacattactaataataagataaatgaacttcatgtaacttcttatatgatgcactgagtaggacaaaacatcaattctatggtattcttagacaaaatgtataactttagtcctaaccgtgagaaaacatcagactaactgaaattgaggagggacattctacaaaataactgccagtattcatcaaaagcattttagaaagactgaggaattctccagagacawggaggcatgttatctaagtgcaatggagaacatgcattgtatcatgaaccagagatggacaacagtaggatatgtacaataacaccccaacatttgaacattaaacaaaatacttcagaaaaacccattggccaagaaaagtttcacacacaaaaaaaatagt

SEQ ID NO: 110729 - DNA, 254 bp, Homo sapiens
gctgtaccattttacattccataaagcaatgcatacagcttccaatttctatatagcattgctgacagttaatattttctgtttatgtattgtatttttatagtgtttgaaattaatctgaggcttttyactgataccaaaatattaggaaaggttttccaaaaataatgctgcttattatagaggattttacgtgttacttgatgccctgtgatctgttttctaagtaagaagaggaacttcttggctgggca

SEQ ID NO: 110730 - DNA, 254 bp, Homo sapiens
gctgtaccattttacattccataaagcaatgcatacagcttccaatttctatatagcattgctgacagttaatattttctgtttatgtattgtatttttatagtgtttgaaattaatctgaggcttttcrctgataccaaaatattaggaaaggttttccaaaaataatgctgcttattatagaggattttacgtgttacttgatgccctgtgatctgttttctaagtaagaagaggaacttcttggctgggca

SEQ ID NO: 110731 - DNA, 254 bp, Homo sapiens
gctgtaccattttacattccataaagcaatgcatacagcttccaatttctatatagcattgctgacagttaatattttctgtttatgtattgtatttttatagtgtttgaaattaatctgaggcttttcactgataccaaaatattaggaaaggttttccaaaaataatgctgcttattataraggattttacgtgttacttgatgccctgtgatctgttttctaagtaagaagaggaacttcttggctgggca

SEQ ID NO: 110732 - DNA, 349 bp, Homo sapiens
tttcagaacactgctcctggggtctgaaagtttgtccctcacataggattccagaactctcctgctgtggtctgaaagtttgtaccgcacataggattccagaacactgctgctgtggtcggaatgtttttctgtcacataggattccagaacactgcggctgggttctgaatgtttgtccctcacataggatttyagaacgctgctacgagggtctgattgttggtccctcacataggattcctgaacactgctgctgggctctgaatgtttgtccctcacattggattgcagaacactactgctatggtctgaacgtttgtccgtcacataggattccagaacgctc

SEQ ID NO: 110733 - DNA, 349 bp, Homo sapiens
tttcagaacactgctcctggggtctgaaagtttgtccctcacataggattccagaactctcctgctgtggtctgaaagtttgtaccgcacataggattccagaacactgctgctgtggtcggaatgtttttctgtcacataggattccagaacactgcggctgggttctgaatgtttgtccctcacataggatttcagaacrctgctacgagggtctgattgttggtccctcacataggattcctgaacactgctgctgggctctgaatgtttgtccctcacattggattgcagaacactactgctatggtctgaacgtttgtccgtcacataggattccagaacgctc

SEQ ID NO: 110734 - DNA, 633 bp, Homo sapiens
ctggtcaggtaagtttgagaaacattgtacactatatatatttcattgagattcgaaatagtgcattaaaattctgagaattcctgccaaagaaatgttacatgtaggaaaattcagataataaacttcattgaggccctaaagacattttacataaaatcattataaacattctgaagtactgcaaaatacagttggatataggcctgtttttccaatttattacttgatgttactggtgtacactgaaagagacatgaggctaggaaacacaaggagacagaaaatgtcactctttgcccaggagaactggcacaagagaaatttctgttttaagatataaaaaatatgcaaaaaktatccgagaaaatgcttaaaaggctaggatattttagcttgtaattgaaagacataaccttggtcaaaataattgaacacctgggaaataagcacttgtttcttaactccttttgaaaattgcattttcaaattgcataaagagatttctgttctggctctatgaaaaaagcttgcagaaggcaaattatccaatcaaaatcaactggataagccagattgaacttaaaaagaaatctgttcaaagacctcagagagtttctgaagcagccagga

SEQ ID NO: 110735 - DNA, 535 bp, Homo sapiens
cttgtttaccctcagtttccgaaattgtaaaacttctgcatgtctcctagttttataacaggagatatgcaggagttgttgcaaactcagatgctttcaaagccacaaaagcatgtaaggaaatttagtggctcaaaaacacaagaaagacttaggactacaataactagagttcgcaaacctggtctaaaggctttcagcattcaaactcaagttttagaaacaaacagtatgtatttttaggtctctagtttttgcttgtagactagagaatctcttaatccttttctgcccaggtactctttgaacatgaattcctgggatagtagatatcataggctgrccaatttatcatgttagtcccagcatctgtcaaagtgcctgggacacagtagttgcaaattataatttgttgagtggctggcaattttcctttaaactttaactttacggagttaaatctttgttttgttattttgaggccattccttcatttgacagctcttggctttcatctgtttaatcattttcctta

SEQ ID NO: 110736 - DNA, 596 bp, Homo sapiens
tctgaagccagcataactttaatccccaaacctgacaaaattataatgcgaaaaagaactttgtaagtcaattgcacttgagtatatataataattccgattaaaattttaagtaaaatctaataattcataagagagtaaaatgcttcataaaaaagtagggtttatttcacaaattcaagagtagataagtagctggaaatttctaatacaattcattattgaggactgagagtgtctgtgtcagcatgatttggatgaaactagaccatctatgtcaacacgacctggctatttgtttcagaaaaaccttgcctaggaaagaactacaaactaaaaaataattttatattttttttaataaaattcttccagagctatttatcaaagacctgggtcttctgacctgggttgtttacctactaaatgacattctacttatcaaacttgcttcaaggcctttactttgctatgtctaccagtctaaaaactattgtatctgaaaacttgcccaatcttaatcagtcctctactttgaaagmgctactttaaaccactgagcccagacaccaaagacctataaatataccaattct

SEQ ID NO: 110737 - DNA, 580 bp, Homo sapiens
tgtcagccttggtttctttctccctattgagttcctttctctccagttccatctcagaggtaaggtgcatcccttgactctccacaggagagtatagattgttagccattggatggatgggtgaatggatgggtagttgggtggccaggtgagtagatacataggacactcaggcactagcctgtttactgctctgaggctagtaagtatggtttgggaggccaaggagacagttacttaccactggttttatgtacatcataatgttctttgagtaatccagtcttctttcacgtagggtactrttcagggccatccaaggctgcccttcaagtagggagctttgacatcttctaaatcaaaccttgtattcatgctttcagctcctcacattttgcatttatccactgcatgaaaagtcaaacattgcagtttgtgatgcattccagtgcacgtggcattggtgtcctgccttttctcttccctgggacactccaacacagttatacgtagtatagtgttaggaagggttacctggtgctttattttctcactggttggtctttgttgtgttattctg

SEQ ID NO: 110738 - DNA, 603 bp, Homo sapiens
gaggcagaaccatccagttctccacctccaccccctcgccacagacctttcctttgaaaatggaattggaattgctgtgtgtactagtctgttttcacactgctgatacagacatacctgagactgggcaatttacaaaaggaagaggtttattggactcacagttccacatggccggggagacctcacatcatggtggaaggcaaggcggagcaagtcacatcttacgtggatggcagcaggcaaagagagagcttgtgcagataaactccccctcataaaaccatcagatcttgtaagacttacttgccatcacgcgaacagcatgggaaaggcctgcccccatgattcagttacctcccaccaggtagctcccacaacatgtgagaattcaagatgagatttaggtggggacacagccaaaccatatcactgtgcrtacctcgtttgggtggtcatctactttctgccgtaggtgtctttcagatatgtccgttctgcagttagctagtctccttctcacttggatcttggctgtttgaatccctgcccgagtaaggaactgtgtatttagcacaactgcatctcatcctcggcctgcag

SEQ ID NO: 110739 - DNA, 498 bp, Homo sapiens
acgcgaacagcatgggaaaggcctgcccccatgattcagttacctcccaccaggtagctcccacaacatgtgagaattcaagatgagatttaggtggggacacagccaaaccatatcactgtgcgtacctcgtttgggtggtcatctactttctgccgtaggtgtctttcagatatgtccgttctgcagttagctagtctccttctcacttggatcttggctgtttgaatccctgccygagtaaggaactgtgtatttagcacaactgcatctcatcctcggcctgcagctcctgtctctcaatggtattcttcacctggccatttgattctataataacttcatatggggggtgtgtgtttctgagctatctaatctggctgtcactaaatacatatgcataattactaccgcatatcagacactgttcttagaaaattcttgctttgggagaatctccaggcatcttgaaagacatgactcatttcccacactgcc

SEQ ID NO: 110740 - DNA, 541 bp, Homo sapiens
aaaaaaaaaaaggatggttttctgttggttttgtcctttcctttgtcacatgtcttaaaggttttaattttatcattgctatagggaaatcttaattgcatataatagttccttgtatgaatattccataacttatccaaccctctagtgttgaggctttaggtttaaatgttgccgcartgtagaatctggtgtccagaaaggtttatttctttagggtatatccgaaaaatgagtcaaagagtcccttcgaggccttgacagatactgtcaaatggctgtgagaagcatcgcttcaagcagcaatgtgttcctctgtccaatcctttatttcagactggccaaagtacacaccacctgtgtgtaccaaagtcatctctcactctaaactgctgctggcgaatcctaccctttacacccaaacaggctccatggctgtttattccactgtggccaatggaggtctagtcttccaggctagaaccctcagtttcttctctctcatcaggtccccttccccaaatcccacatatgcacacac

SEQ ID NO: 110741 - DNA, 541 bp, Homo sapiens
aaaaaaaaaaaggatggttttctgttggttttgtcctttcctttgtcacatgtcttaaaggttttaattttatcattgctatagggaaatcttaattgcatataatagttccttgtatgaatattccataacttatccaaccctctagtgttgaggctttaggtttaaatgttgccgcaatgtagaatctggtgtccagaaaggtttatttctttagggtatatccgaaaaatgagtcaaagagtcccttcgaggccttgacagatactgtcaaatggctgtgagaagcatcgcttcaagcagcaatgtgttcctctgtccaatcctttatttcagactggccaaagtacacaccacctgtgtgtaccaaagtcatctctcactctaaactgctgctggygaatcctaccctttacacccaaacaggctccatggctgtttattccactgtggccaatggaggtctagtcttccaggctagaaccctcagtttcttctctctcatcaggtccccttccccaaatcccacatatgcacacac

SEQ ID NO: 110742 - DNA, 557 bp, Homo sapiens
gaattcaaccctgagtcctttcactcaagtcaagttaatacttaatccagatatagagggttcagtgcaggagggcaaggacggggtrtgtgtgtgtgtgtgtgtgtgtgtgtgtgtgtgtgtgtgtgtgtgtgttttcctatctacataccatcccaaaacaaatgtccatttgctgaggactctttgaaaattgatctcaaaggaatctaaagagaaaccaggactgcagtcctatgtgtggaatgctgccactttctgctcttcttacagtgaaggggttttctactgggtcaacatcctctttgaaatttataccaagaaaaatatacacatattaaacagcagcagcaatttacagtaaaacagaaaattccactcagggcagaaaacaaccagaaacatataacatttcaaagctctggaagtgggagttcacatgcttaaatcattgcttcattgccagttttactgcagcaacagccttccctctgacaatcatgtcagtattaccaaacctttaaaacattcacttggagttcaatctgttgcccata

SEQ ID NO: 110743 - DNA, 534 bp, Homo sapiens
ctggtctatgacttgtctttatcttatctcgagtgtgtctttcacagagcagaagtttttagttttaatgagatccagcttatcaaatatttcttttgtggatcatgcctttggcattatatctaawaactcatagccatacccaagtttatttagatgtttctcttatgtcatctcctaaaagtttcatagttttgaattttacttttaatccaatgattcattttgagtgacttgtagtgaaggttgtaagatctgcatcttaattcattttgtttgtttcttgttattttggcataagaatatccttttgtcctagcaccatttgctgaaaacattttgttttccccttgtattgcctttatccctttgtcaaaaatcagttcactacatttgtgattatctattttttggactctccattctgatcctttgatctagtagcctgttctattgccaaatacttcactgacttggttaccctagcagtttagtaagtcttgaagtcagatagtgtcagttttctgattttgt

SEQ ID NO: 110744 - DNA, 534 bp, Homo sapiens
ctggtctatgacttgtctttatcttatctcgagtgtgtctttcacagagcagaagtttttagttttaatgagatccagcttatcaaatatttcttttgtggatcatgcctttggcattatatctaaaaactcatagccatacccaagtttatttagatgtttctcttatgtcatctcctaaaagtttcatagttttgaattttacttttaatccaatgattcattttgagtgamttgtagtgaaggttgtaagatctgcatcttaattcattttgtttgtttcttgttattttggcataagaatatccttttgtcctagcaccatttgctgaaaacattttgttttccccttgtattgcctttatccctttgtcaaaaatcagttcactacatttgtgattatctattttttggactctccattctgatcctttgatctagtagcctgttctattgccaaatacttcactgacttggttaccctagcagtttagtaagtcttgaagtcagatagtgtcagttttctgattttgt

SEQ ID NO: 110745 - DNA, 534 bp, Homo sapiens
ctggtctatgacttgtctttatcttatctcgagtgtgtctttcacagagcagaagtttttagttttaatgagatccagcttatcaaatatttcttttgtggatcatgcctttggcattatatctaaaaactcatagccatacccaagtttatttagatgtttctcttatgtcatctcctaaaagtttcatagttttgaattttacttttaatccaatgattcattttgagtgacttgtagtgaaggttgtaagatctgcatcttaattcattttgtttgtttcttgttattttggcataagaatatccttttgtcctagcaccatttgctgaaaacattttgtttyccccttgtattgcctttatccctttgtcaaaaatcagttcactacatttgtgattatctattttttggactctccattctgatcctttgatctagtagcctgttctattgccaaatacttcactgacttggttaccctagcagtttagtaagtcttgaagtcagatagtgtcagttttctgattttgt

SEQ ID NO: 110746 - DNA, 534 bp, Homo sapiens
ctggtctatgacttgtctttatcttatctcgagtgtgtctttcacagagcagaagtttttagttttaatgagatccagcttatcaaatatttcttttgtggatcatgcctttggcattatatctaaaaactcatagccatacccaagtttatttagatgtttctcttatgtcatctcctaaaagtttcatagttttgaattttacttttaatccaatgattcattttgagtgacttgtagtgaaggttgtaagatctgcatcttaattcattttgtttgtttcttgttattttggcataagaatatccttttgtcctagcaccatttgctgaaaacattttgttttccccttgtattgcctttatccctttgtcaaaaatcagttcactacatttgtgattatctattttttggactctccattctgatcctttgatctagtagcctgttytattgccaaatacttcactgacttggttaccctagcagtttagtaagtcttgaagtcagatagtgtcagttttctgattttgt

SEQ ID NO: 110747 - DNA, 565 bp, Homo sapiens
tagatgcttattgaatgcttattgaatgggcaaacactggaaccattccccctgagaactggaacaaggtacagatgcccattctcaccactccccctgagaactggaacaaggtacagatgccctttctcaccactccttttcactgtatcactggaagtcctagccaaagcgttcaagcaagataaatacataaaaggcatccaaataagaaaataagtctaattatctgtcttcactgactatatgattttgtacctagaaaaccctaaagactgccaaaaggctactagaactaatagaggatattagcaaggttttaggatacaaaacgaatgtaaaaaaaaatcagtaacatttctctatgtcaataatgtcttggctgagactcaaataaggaacacagtcccayttacaatagccacaaataaaataaaatggggaatagagttaatcaagaaggcgaaagagctctgcaaggagaactacaaaacactgctgaaagaaatcagatatgacacaaacaaatggaaaaacaccccatgctcatggatgggaagaatcg

SEQ ID NO: 110748 - DNA, 442 bp, Homo sapiens
acttcagtgccccctatgtcttaaagtgaaagaaaagttgcacgtctctcactttaaatcaaaagctacaaataagttcagcaagaaaggcatgccagaagtcaagataggccaaaagctagacctcytgtgccaattagccaaggtatgaactcataggaaaaattcttaaaggaaattaaaagtgctactctaatgaacacacaaataagaaaggagaacagccttattgctggtatagagaaagttttagtggtctggatagaagttcaaaacagccataatattcctttaaaccaagcttaattcaaagcaaggtccttactctcttcaattatgcaagggctaacggaagtagggaagctgcagaagaaaagtttgaaaatagcagagattgattcactctgctagcttcaaactttaagaggttaaagaaaagaag

SEQ ID NO: 110749 - DNA, 442 bp, Homo sapiens
acttcagtgccccctatgtcttaaagtgaaagaaaagttgcacgtctctcactttaaatcaaaagctacaaataagttcagcaagaaaggcatgccagaagtcaagataggccaaaagctagacctcttgtgccaattagccaaggtatgaactcataggaaaaattcttaaaggaaattaaaagtgctactctaatgaacacacaaataagaaaggagaacagccttattgctggtatagagaaagttttagtggtctggatagaagttcaaaacagccataatattcctttaaaccaagcttaattcaaagcaaggtccttactctcttcaattaygcaagggctaacggaagtagggaagctgcagaagaaaagtttgaaaatagcagagattgattcactctgctagcttcaaactttaagaggttaaagaaaagaag

SEQ ID NO: 110750 - DNA, 442 bp, Homo sapiens
acttcagtgccccctatgtcttaaagtgaaagaaaagttgcacgtctctcactttaaatcaaaagctacaaataagttcagcaagaaaggcatgccagaagtcaagataggccaaaagctagacctcttgtgccaattagccaaggtatgaactcataggaaaaattcttaaaggaaattaaaagtgctactctaatgaacacacaaataagaaaggagaacagccttattgctggtatagagaaagttttagtggtctggatagaagttcaaaacagccataatattcctttaaaccaagcttaattcaaagcaaggtccttactctcttcaattatrcaagggctaacggaagtagggaagctgcagaagaaaagtttgaaaatagcagagattgattcactctgctagcttcaaactttaagaggttaaagaaaagaag

SEQ ID NO: 110751 - DNA, 580 bp, Homo sapiens
gttctcatagcattctgtatttattttcatacttctttcatggcttatattgtacgatttgtgtgaatatttaattttttctactaatctgtaatctccatgatggcgtgcattgaatttattttactcatcattttattcccagkgcttattatagttcttgacatattgtaggtgctcattcattcattaatagctgcaaagagcataattgaaaaatctacttttgttttcatttaaaggatttacttaaaatacatccctagatgtagaatttttctcaaaaagtctgtgcattgaaattttaatagaaagtgccttttttttttttttgagatggagtctcgctctgatgtaccaaaccagactcagaccaagtattgttttgagacaatcaattcaatgggcttaagggatcactgaagccacagtatggatgcataaggcacaaaagctaaccatattttcaagtgctcagtagcacatggggttaatggctactgtactggccagcatatctctagatactactcagatatttactgtagcaagtatgtctggaaaaaataagaactgtgtg

SEQ ID NO: 110752 - DNA, 617 bp, Homo sapiens
ataaaaggaaggatatgagtgatttcagtgcatcctgatatttttatacagtacatctgttatgaaaagattttctcctaaatacatgtttcaggtacaaatcaaaggaaatcattttttctttgatcaactctttctaaaatgaacagaaaatgggagtaaatttaagaattcaattttcactgaaaacacacagtaagttatcagtaagaatagagttacttactgcctatattatctacagcacaagcaatataatgtactgtattttatctccagttttatctatctgccaaaattcaaaaaaatctgcraaacttattctccaacttgatgtgctgcttctgtctgtagcactaataacatgctgtttgttctgcttgaaacctcctcatagatttgaacattctctgtacagctcatctttccaaacatgttatacttactttatatttatcaaagcatcacatttatactctttcattgaaatggcttgattatccatttccaccaaccgaacataaaatctgttaagctacagatgttatctttcttgcataatttagtatcctacaaatgtaactaatagtgtatgctcaaaaatatttgatgaacca

SEQ ID NO: 110753 - DNA, 617 bp, Homo sapiens
ataaaaggaaggatatgagtgatttcagtgcatcctgatatttttatacagtacatctgttatgaaaagattttctcctaaatacatgtttcaggtacaaatcaaaggaaatcattttttctttgatcaactctttctaaaatgaacagaaaatgggagtaaatttaagaattcaattttcactgaaaacacacagtaagttatcagtaagaatagagttacttactgcctatattatctacagcacaagcaatataatgtactgtattttatctccagttttatctatctgccaaaattcaaaaaaatctgcaaaacttattctccaacttgatgtgctgcttctgtctgtagcactaataacatgctgtttgttctgcttgaaacctcctcatagatttgaacattctctgtacagctcatctttccaaacatgttatacttactttatatttatcaragcatcacatttatactctttcattgaaatggcttgattatccatttccaccaaccgaacataaaatctgttaagctacagatgttatctttcttgcataatttagtatcctacaaatgtaactaatagtgtatgctcaaaaatatttgatgaacca

SEQ ID NO: 110754 - DNA, 590 bp, Homo sapiens
ttgaatcagataatcaatggatttttaaatatgaatatgtctccaatattgcaattattaaaagtttatctaaaaatcaaatttaaatgaatgtcctatatcttacagacctagatcacgtagctttcattctataacaattagcactaaactcttcttcttgcagcttccaactggttcttaacctctgaaattaatttttatatttctaaattgcttaattgaatagttatgctatggtcctgttccatatctagatacctcccaagtattctggttgcttttgaactgcagccttgctaatttttcttactattctttcaagtaatcaaaattcawtttttggactcactgggttagcctgatgtcaaatatatactgatagaattttttgaagtggactgaccttctgctagcctgccttgcatgatactgctcactcctggattctgtgtcaccatgtttcaacaccaccatgttctggtcaatggacagtagtagatgcatgtagatgttgctatgcattcagaaactgctccataaaatagatatactttcttccttcccctatatcttgcattacagagttt

SEQ ID NO: 110755 - DNA, 590 bp, Homo sapiens
ttgaatcagataatcaatggatttttaaatatgaatatgtctccaatattgcaattattaaaagtttatctaaaaatcaaatttaaatgaatgtcctatatcttacagacctagatcacgtagctttcattctataacaattagcactaaactcttcttcttgcagcttccaactggttcttaacctctgaaattaatttttatatttctaaattgcttaattgaatagttatgctatggtcctgttccatatctagatacctcccaagtattctggttgcttttgaactgcagccttgctaatttttcttactattctttcaagtaatcaaaattcaatttttggactcactgggttagcctgatgtcaaatatatactgatagaattttttgaagtggactgaccttctgctagcctgccttgcatgatactgctcactcctggattctgygtcaccatgtttcaacaccaccatgttctggtcaatggacagtagtagatgcatgtagatgttgctatgcattcagaaactgctccataaaatagatatactttcttccttcccctatatcttgcattacagagttt

SEQ ID NO: 110756 - DNA, 590 bp, Homo sapiens
ttgaatcagataatcaatggatttttaaatatgaatatgtctccaatattgcaattattaaaagtttatctaaaaatcaaatttaaatgaatgtcctatatcttacagacctagatcacgtagctttcattctataacaattagcactaaactcttcttcttgcagcttccaactggttcttaacctctgaaattaatttttatatttctaaattgcttaattgaatagttatgctatggtcctgttccatatctagatacctcccaagtattctggttgcttttgaactgcagccttgctaatttttcttactattctttcaagtaatcaaaattcaatttttggactcactgggttagcctgatgtcaaatatatactgatagaattttttgaagtggactgaccttctgctagcctgccttgcatgatactgctcactcctggattctgtgtcaccatgtttcaacaccaccatgttctggtcaatggacagtagyagatgcatgtagatgttgctatgcattcagaaactgctccataaaatagatatactttcttccttcccctatatcttgcattacagagttt

SEQ ID NO: 110757 - DNA, 642 bp, Homo sapiens
agtaatctaaattggagctcaaaggaaaaagactggagaaaaagaacagagccttgagaaccttagaacaatgccaaatggtctgatgcacatgtaactgaagtcccagtagaacagaagagaatcgaaaagaaaaattatttgaaaaaatagtgtctgaaaaacctccaaatttgatccaaaacattagcctgtagatccaggaagctcagctaacccaaatcaggatacactttaaaaaaaaattcataggcatattatggccacacttctaaaaagyaaagacaaagagagactcttgaaagtagccaatataaaaagatattatatactgggggaaagatgttatatacacaggaacaaggatgggaaaaggtataaatgatgactaatttttaattagagattcaacaattaaaaattaattataattagaacataaaaagctttcacacaattctattgatataaaaacatgcataactaacaatattttaaatttattccattacatcttcttataattttatttcagtggctttgagaaatcccagagtagaaaactttcagagtggttttattgttaactaaaactaaaagcacttccttttattctgtgtagaaaggggagaaaagatggta

SEQ ID NO: 110758 - DNA, 642 bp, Homo sapiens
agtaatctaaattggagctcaaaggaaaaagactggagaaaaagaacagagccttgagaaccttagaacaatgccaaatggtctgatgcacatgtaactgaagtcccagtagaacagaagagaatcgaaaagaaaaattatttgaaaaaatagtgtctgaaaaacctccaaatttgatccaaaacattagcctgtagatccaggaagctcagctaacccaaatcaggatacactttaaaaaaaaattcataggcatattatggccacacttctaaaaagtaaagacaaagagagactcttgaaagtagccaatataaaaagatattatatactgggggaaagatgttatatacacaggaacaaggatgggaaaaggtataaatgatgactaatttttaattagagattcaacaattaaaaattaattataattagaacayaaaaagctttcacacaattctattgatataaaaacatgcataactaacaatattttaaatttattccattacatcttcttataattttatttcagtggctttgagaaatcccagagtagaaaactttcagagtggttttattgttaactaaaactaaaagcacttccttttattctgtgtagaaaggggagaaaagatggta

SEQ ID NO: 110759 - DNA, 412 bp, Homo sapiens
tgacttcaccactccttctatcaaggagtgaaatctgtttccccacaccttgaatctagctggccttgcagcttgctttgaccrctagaatgcagcagaaatgatgttctgggatttttgagcctataccttaagcagccttgtagcttctgcttctgcttttgggacccagcaattatgtaaaagctactctactggaaagagaagccaagtgaggagagaggcccctgaggatgggagaccataaaagagagaggacagacacacagagaagaacagagtacgtaccacggccagcagccagcaccaaggcccagactccagagtgaagctacttttttttttttttttttaatactttaagttctagggtacatgtgcaggtttgttacatatgtatacatgtgccatg

SEQ ID NO: 110760 - DNA, 593 bp, Homo sapiens
tctagctggccttgcagcttgctttgaccgctagaatgcagcagaaatgatgttctgggatttttgagcctataccttaagcagccttgtagcttctgcttctgcttttgggacccagcaattatgtaaaagctactctactggaaagagaagccaagtgaggagagaggcccctgaggatgggagaccataaaagagagaggacagacacacagagaagaacagagtacgtrccacggccagcagccagcaccaaggcccagactccagagtgaagctacttttttttttttttttttaatactttaagttctagggtacatgtgcaggtttgttacatatgtatacatgtgccatgttggtgtgctgcacccatgctattttggatcctccagctccagttgagctttcctggctgaaaccatgtggaacaaaaagataagccttctacactgagttctgcatagattcctgatccacagggtcatcaacaaatggtggttgctttaagccactgttttgtgatagtcatgcagcagtagatgactgaaataatactttcagttgaaaatcttaacaaggtatgcactgca

SEQ ID NO: 110761 - DNA, 613 bp, Homo sapiens
tccttaatgtgatccacaagatgtgaccagttgtcacattcatcatgaagaacaatagtatacttatagtttgttaaagccaaggaaaattcttagggttaaatgtcaataaaccctgtctctaaatggcctcaagtgaagtcaagatatagccaatgttctgttcttatgtccaagacagagaggyaaatcagatcattatcaaatcaattcaaatctatcttgcttggaagtatcacattttagctgcctatcttggtcttcgttctacctggtgctgaaaagaggcatccatattcttaaagcatagcttccattctatctcagatccttactcaactgatacagagaaaaatccataaaggaatgaagaaaaagtgtgtataggatataaatacttggagttacctggttatttcctaaggtaatagaagcctctctgtatttccaaaaaagcctcagaaaaaaaatatatattgctaaatgtttattacagtgctgccattctctgatttttataataaaaatggcaagatcattctagatgagtagattagatctattttttacctactcacaaaataaaaagtctgtctgcttagtggaaaggccc

SEQ ID NO: 110762 - DNA, 647 bp, Homo sapiens
ctgagaggtgctggcatgattctcttttaaggagaaaagagacttcaaaagagacagttttataaatgttttkattcccaatgtctgacctactgcctgataagttaatattaaggaatacatggtaaaatattcttaagcataattcttgagtccctccaatcctgtggttattatttatattctaccattctttttcaaagtttggaaagctctaatgtgggattatccatattgtaaagaacagccaaatagtactgctacattcctgcataggaactggacgtttactccaccctccctccccctggagtgtttatgacaactggccatcctgtgtcctaaagaacagttatccctgacttaactcttatttccctattacctcattggttccagtaaacacacatcagtatttaggagtatctttatcaataacaatggctacgtcctggaaagatcgttttattttgactcttgagtgtactacatgagatatgggttagaagctgcctggacatcaacatgtgctatttcacaattccattattcttattttgttttctcatgtgcagcaagaagcagcagatgctagaagtggccatccactcctcacctgtgcaagattgccctgcctattctaatat

SEQ ID NO: 110763 - DNA, 599 bp, Homo sapiens
gagtattgataatcctaatagcctgcattttcctttagcagtggctcacacctgtaatcccagcacttcggtaggccaaggcaggaggatcacttgaggtcaggagttcaagactagactgaacactgagaccatatctctagaaaaatattaaaaattagctggatatggtggtacacagctgtagtcctaactaccccggaagctgagatgggaagatagctttaacccaggagtttgaggctgcgctgagaggtgattgtgccactgcactgtagcctgggtgatagagtgagatgctctcttttaaataaatgataataaggcagtaaatatttggcatcaactattagtctctctaaagcaaggcattgggtaagcccttggccttggccagctgagtgcatctgtcttggatctttccaatctacctctatctttgtggcagctctttgttgtttctgctgctctrcatctgaacccaggatgggcaacaccctttctcatcagccactttattagattagagctgatgttcacattggaaagagttcttatttttatgtcagtctaattgatctgacctaataggaagatga

SEQ ID NO: 110764 - DNA, 528 bp, Homo sapiens
atcattgtcagcaggcatttgctctacatttttacattgaaattattttaggaaatttttcaaaattattagaatgacctgaaatgacagtcatcttaactttgggattataacagcaarcagtattagatagtttccacattgctgaaatgtaactttaagttcataaattgagctgggtctgctagattttcagtttgggaaatataattttctttagaatattaagagatatttatttatttatttattttatttatttatttttaatttttatttccttttttaaaattttttattttattttattattattatactttaagttttagggtacatgtgcacaatgtgcaggttacttacatatgtatacatgtgccatgctggtgtgctgcacccattaactcgtcatttagtattaggtatatctcctaatgctctctttgtataaataaaccaatgcaatattttttctgggtccaacaacttccaagttttctgacactacagaatatagacacttatgcc

SEQ ID NO: 110765 - DNA, 430 bp, Homo sapiens
tctctcttgcttcgatcctgagatgagtgttgagtaccaaatggctccaagccaggctgaaacatgacctagacacagatgctggaattttcctagcatgctttaaagaaacgagtatggtggctgtactagtcagttctcacactgctataaagaaatgcccaagactgggtaatttataaaagaagtttaaytgactcacagctcaacatgcctggggaggcctcaggaaacttacattcatggcggaaggggaagcaggcatgtcttacaaggtggcaggagagagagagcaagcatgagcgcaagaggaactgtcaaacacctataaaaccatcagatgtggtgagaacatactcatcatgagaacagcatgggggaaactgccccccatgatccaatcatctcctgccaggtccctcccttgaca

SEQ ID NO: 110766 - DNA, 564 bp, Homo sapiens
tttcacatatactacctctataattatatatttaagacaactttatgaggtgtatacctttttcgccatttacagataatgaaactgaaaatctgagaatataagtagctgacccaaagctcacagctaatattggcagagccaagatacatacccaggctggtatttttgccccttactaaactatggtgccttgttcaatctatcagctctgtgagttttctgggcaattgatttaattctttgctgacctttgcccggtagaccatctggttgtgttcctagggctccttttctgactgagctcccacagctccaggcctctgcaatattcttccctctgcttgaaatccctttcctgtcttggtcattgggagaatgttagtgttcctcaaatctacctccacaggaccctgtgtgtgactctaataaggctggcatctgtcgtgctgtactgtccttttttgtatacatgtctgtctctttagcatatgaagtygcaagtttcatgaaggcctttttagaccatgcctgatgtggcagatattcagtaatggttggata

SEQ ID NO: 110767 - DNA, 575 bp, Homo sapiens
cctaagtgagagacatggccaagctcagcttccagggtagagaaatagacctcttcttgatgggattgatgggaggaactgcaaatgattggkacttgttttggccaatctataatacctatatgggagtctataattcccaaagtgccatgatgctaagtaacctccaaggacgtggaaagagcactgacaggtgtcagaagagagtctagtgcctgtgctgccaattttttttttcctgtggagccttagaaaagtcaactcaccttctctaccccactccagatgcaggaactgaagcacatgcaaactgttaagctcagtaatcgctaaggtcccttccagtactccaattttatctttttttccacagcagaggagtcaggttcaaagtacacattatggtaactaaaaacatactcgagtgtgttgttttatggcagtgcaggggcacctcctgaccagccaaaccctgaggcaggactcggaacgaaccaggcagttgccagtgccaagggccagcgcagctgtggccacttccctctcctttcaagtttgactcgggtgagtgggag

SEQ ID NO: 110768 - DNA, 610 bp, Homo sapiens
cacctgtgtcttaaaaaccataaaactccaaactcatctatacattggaattaaaatagcctcttttccaaatttcagctagcaaaattctggttgaattgattaaagctttctcaagtttttcccctgctttcctagtgccttaaacatattgatctatattgggcctggggtgaggaggatagaaacgttgtgaagccacccaagggggagatctgagcaaagcaaccatgagaacaggcttagggtggtggtaaagcaatggatttcccaataactctagatcctagatgtcccatagttcttacctattgaattaatgacatttgttgtttgaaatagagcctaaaattaagtggtcattgcctagatttgagcttcaaatcagacttgttctgaattcaagcaaaggcgaatgaagcttttattttcgattttatttttattttttaaagagaaaaagrtttcatcaatttcaaaagcttctcggtttatatcaagatccaagagtggttaggttagatgttaaagatattaccaaaagctatggagcaggaaaagggggagacaattggcaggagggaaatttctggcagacagaaaggggaaa

SEQ ID NO: 110769 - DNA, 608 bp, Homo sapiens
attcacttctgtggtattccagccaaaaataaaaaacttgaggcctagtcaaaaagatacattggacaaagccaagttgagtaatatattacaaaatggcctgtaatctttaaaaatattaaaatcataaaagccatggaaggactgaggaactgttccaaactgaaggagaccacagagacgtgataactaaaagcaacatataactttgacctggattcttttgctctaaagaacattattgggacatkggcaaaacttgaatgaggtctctggatgaagaatatacgggagttctttgtaccattcttgcgactttcctgtaagttcaaaatagtctcaaaatataaaatattttgttaaacccttcttaagttgttttataaatatcaacagatttttcaaaaatcaaaaataaggtcaaaaggtaaatgacaaactgaaggtttgcgaacaaggggagactgacattaggaagaaacacaaatgctcctgatgacattacttgggatcaaccctttgcaaaggaatactgaataggattaaccataactccaactcagtatggctgtagctgtcgccccaaacttaaagtggaatgttgtcag

SEQ ID NO: 110770 - DNA, 608 bp, Homo sapiens
attcacttctgtggtattccagccaaaaataaaaaacttgaggcctagtcaaaaagatacattggacaaagccaagttgagtaatatattacaaaatggcctgtaatctttaaaaatattaaaatcataaaagccatggaaggactgaggaactgttccaaactgaaggagaccacagagacgtgataactaaaagcaacatataactttgacctggattcttttgctctaaagaacattattgggacattggcaaaacttgaatgaggtctctggatgaagaatatacgggagttctttgtaccattcttgcgactttcctgtaagttcaaaatagtctcaaaatataaaatattttgttaaacccttcttaagttgttttataaatatcaacagatttytcaaaaatcaaaaataaggtcaaaaggtaaatgacaaactgaaggtttgcgaacaaggggagactgacattaggaagaaacacaaatgctcctgatgacattacttgggatcaaccctttgcaaaggaatactgaataggattaaccataactccaactcagtatggctgtagctgtcgccccaaacttaaagtggaatgttgtcag

SEQ ID NO: 110771 - DNA, 618 bp, Homo sapiens
tgaaaattccttaaaaaggcaataaaatattgtctattcaccagtaggtaggtacttctacatctttgaaaaggaagttacatctcttagattaaatagtcatttccctgtttttaaaagaaattttaaagaaacttaatcacagaactttactagcctagaacacctggtttcatttttgtctactctaaatttttttaatcaacatgtacacattttcagaaataatgtaaactagacatgaaaagttactattgtttttacatcaattattttattattcaattagggatcctcatattttcaggacactgtgtgttggtgtgatgtacatagtttaaatgtgtccccaccaacagcatagtataaactagaatccagtactgaataaaatatgtttcraaaagtccaaagataggttgttttataactattctgattatttatattcaaggtcaattttgtagtttgctaagatttaaactatataacataaggaagtctgagatagattgtaaaacctcactttcttcctacctgggaatcttgaaggctttatggcagtatggtctggcagactgtatataaacagatcataaatcacagctggggagaatt

SEQ ID NO: 110772 - DNA, 618 bp, Homo sapiens
tgaaaattccttaaaaaggcaataaaatattgtctattcaccagtaggtaggtacttctacatctttgaaaaggaagttacatctcttagattaaatagtcatttccctgtttttaaaagaaattttaaagaaacttaatcacagaactttactagcctagaacacctggtttcatttttgtctactctaaatttttttaatcaacatgtacacattttcagaaataatgtaaactagacatgaaaagttactattgtttttacatcaattattttattattcaattagggatcctcatattttcaggacactgtgtgttggtgtgatgtacatagtttaaatgtgtccccaccaacagcatagtataaactagaatccagtactgaataaaatatgtttcgaaaagtccaaagataggttsttttataactattctgattatttatattcaaggtcaattttgtagtttgctaagatttaaactatataacataaggaagtctgagatagattgtaaaacctcactttcttcctacctgggaatcttgaaggctttatggcagtatggtctggcagactgtatataaacagatcataaatcacagctggggagaatt

SEQ ID NO: 110773 - DNA, 567 bp, Homo sapiens
cacaaataaagtgggagggaaaggagagagacatcgctgacgtataagttaattgaaggtagaggagctctcttgggctttcatgtagccatacgagcttgaaacattcrctatttttgctctgaataatgctactgaattcaccatacttgtgacatttttgtaagaattaacattaaaaattactggaaagctaccaattgtactattgtttttcaagagcactaaaatctgacaaaagaaaaaaagagtatattttgttataaaagaaaagctttcaatatccaaattatattgttcatataattcagatctgtgtatatatatatacatacacacacacatatatatatggctccaaagagaggaaaatatggtcacatggaattcccatgctttattgacatatttgtttatgaatccagagattccttagttcatccatttagtgaatacatattccgtcgtgacaaaggctatgtaagttgtctgcaatttcgtcttctgaaagagcatattcaaatcataaactttttctgtaaataagtatacattgaactactgttt

SEQ ID NO: 110774 - DNA, 567 bp, Homo sapiens
cacaaataaagtgggagggaaaggagagagacatcgctgacgtataagttaattgaaggtagaggagctctcttgggctttcatgtagccatacgagcttgaaacattcgctatttttgctctgaataatgctactgaattcaccatacttgtgacatttttgtaagaattaacattaaaaattactggaaagctaccaattgtactattgtttttcaagarcactaaaatctgacaaaagaaaaaaagagtatattttgttataaaagaaaagctttcaatatccaaattatattgttcatataattcagatctgtgtatatatatatacatacacacacacatatatatatggctccaaagagaggaaaatatggtcacatggaattcccatgctttattgacatatttgtttatgaatccagagattccttagttcatccatttagtgaatacatattccgtcgtgacaaaggctatgtaagttgtctgcaatttcgtcttctgaaagagcatattcaaatcataaactttttctgtaaataagtatacattgaactactgttt

SEQ ID NO: 110775 - DNA, 567 bp, Homo sapiens
cacaaataaagtgggagggaaaggagagagacatcgctgacgtataagttaattgaaggtagaggagctctcttgggctttcatgtagccatacgagcttgaaacattcgctatttttgctctgaataatgctactgaattcaccatacttgtgacatttttgtaagaattaacattaaaaattactggaaagctaccaattgtactattgtttttcaagagcactaaaatctgacaaaagaaaaaaagagtatattttgttataaaagaaaagctttcaatatccaaattatattgttcatataattcagatctgtrtatatatatatacatacacacacacatatatatatggctccaaagagaggaaaatatggtcacatggaattcccatgctttattgacatatttgtttatgaatccagagattccttagttcatccatttagtgaatacatattccgtcgtgacaaaggctatgtaagttgtctgcaatttcgtcttctgaaagagcatattcaaatcataaactttttctgtaaataagtatacattgaactactgttt

SEQ ID NO: 110776 - DNA, 567 bp, Homo sapiens
cacaaataaagtgggagggaaaggagagagacatcgctgacgtataagttaattgaaggtagaggagctctcttgggctttcatgtagccatacgagcttgaaacattcgctatttttgctctgaataatgctactgaattcaccatacttgtgacatttttgtaagaattaacattaaaaattactggaaagctaccaattgtactattgtttttcaagagcactaaaatctgacaaaagaaaaaaagagtatattttgttataaaagaaaagctttcaatatccaaattatattgttcatataattcagatctgtgtatatatatatacatacacacacacatatatatatggctccaaagagaggaaaatatggtcacatggawttcccatgctttattgacatatttgtttatgaatccagagattccttagttcatccatttagtgaatacatattccgtcgtgacaaaggctatgtaagttgtctgcaatttcgtcttctgaaagagcatattcaaatcataaactttttctgtaaataagtatacattgaactactgttt

SEQ ID NO: 110777 - DNA, 586 bp, Homo sapiens
gaggaaagctctagagaaaggcaacatctttttactaaaatatctaagtggttatgaacagaatattagtagaaatgtggatagtaaaggtaattctgatgaatccttagatggaaatgaggaacaagttgttgaacaatagaggaaagaatattcttgttataatgtggcaaagattatgccactttataacaaaagtggctgattgtgttcatgttctggagttttctagaaggtaaaactttaaacaatgaaattgratatttggctgagaaaatatctaagcaaagtgttaatggttcagcttggcttctcttgactgccaatgatttaaacatggaattgttaattgattggaaatcgggaccaggcacagtggctcacaactgtaatcccagtactttgggaggccgagctgagcagatcacaaggtcaggagttcgaagccagtctggccaatgggaaatctgtctctactaaaaatacaaaaattaactgggtgtggtggcacacacctatagtcttaactactctggaggccgaagcaggagaatcgcttgaacccaggaggcagaggttgcagtga

SEQ ID NO: 110778 - DNA, 620 bp, Homo sapiens
tctgaatgtgtgtgtgtaaataaaagtgtgtatgtatatatatacacatacatayatatatatatatatatatatatatatatatatatatatatatatgtcctagtattccaaattgatttcaaatgagtgattaacgcattgagatacgaagacatggaggggaaaatgtttaattactgctaagacacccagtaacattgttttgttaaaggaaaaactcattcataaatttgacatgacaacctatgtatctatttattgaaaatgcagaccaaaaatattggttttgcatttatgtgagaaagaaacaaaagttaaatcatgtgtctttgcactaaaggtggtatttagtgatagtaaagatctttttattccaaatatgttgcatgtctttgattttcatcttttctctaaattgtggatacaagacaactattatgtttatgttgatactacctttaagggttttaaaaagatataccaaaattatcatttcacattccacatctatcattataaagataagagttcaagaataatgtagacatttgtggtaatcaaacggtgaacccaatatgagttggtgtactattaatagtttgaagacttgtagaaaa

SEQ ID NO: 110779 - DNA, 615 bp, Homo sapiens
gctcggcagggttgcttcctactggcaactcagggaagttgagtttatgagtatgtattattttttattatgtgtagtgtagtactttaataattattaaaarttaaatcattcacaaatgttggtcatttttcttactggtaacaaaagttttgtgacatatcttacagcaatatagttaagaactgatgcccttgattagcaattttaaaaaccggaggcttatcctagcctgtcttattttcctagacttgtgtggaaatgatttgaagatgatggcccataacagcacatttctgtaaagcctgtgcttcgaaccctagagtggtctgggagatgaagattaagaccttgttatccatctcttaaggaaaataccatcagaggaaaatgcaaatcttattataggtcatcactagaatgaggattgtaatttatagaaattggggtttaattatgagaaatagttctgttcttggctctcgtttacttctatttggagttgttttgttgattcttctctattctcttctcttccttttcttgaatggaaaggaacttggaaaactcatgccctgtccttgggcttgtcagaggaaacttggaatgtcattg

SEQ ID NO: 110780 - DNA, 615 bp, Homo sapiens
gctcggcagggttgcttcctactggcaactcagggaagttgagtttatgagtatgtattattttttattatgtgtagtgtagtactttaataattattaaaagttaaatcattcacaaatgttggtcatttttcttactggtaacaaaagttttgtgacatatcttacagcaatatagttaagaactgatgcccttgattagcaattttaaaaaccggaggcttatcctagcctgtcttattttcctagacttgtgtggaaatgatttgaagatgatggcccataacagcacatttctgtaaagcctgtgcttcgaaccctagagtggtctgggagatgaagattaagaccttgttatccatctcttaaggaaaataccatcagaggaaaatgcaaatcttattataggtcatcactagaatgaggattgtaatttatagaaattggggtttaattatgagaaatagttctgttcttggctctcgtttacttctatttggagwtgttttgttgattcttctctattctcttctcttccttttcttgaatggaaaggaacttggaaaactcatgccctgtccttgggcttgtcagaggaaacttggaatgtcattg

SEQ ID NO: 110781 - DNA, 527 bp, Homo sapiens
ttcgaaactcaagtcaggacacctctcagtttggcctcactgctcaagattgagctgaattcatgaccataattcaagcattcagattcatgggctgttttgtgggttttgctatctcttattttgtttttgcacatcttacccactgaaacgttgggctgcaaaaatttgatcactatgtaggcaatgctggatactgggctgttatttacayatttgtatcaccttttatttcataagatagcattgtcagagtaatttagtatttcaacataatcaacaagtaaaattaatgagaatgatcttactttgagtatttgtgtcatttctaaaatggtcctttttctttttttggatgcatattcatgctcttcattattgaatatttctccttcttcgctatttaagatactgaaataaagacatattctattaaaatattttttcagggagatcttcatttggcttttcttttgtaaaaggatacaaatacttcaaagtgacagactgtgggcttgaaatcacag

SEQ ID NO: 110782 - DNA, 527 bp, Homo sapiens
ttcgaaactcaagtcaggacacctctcagtttggcctcactgctcaagattgagctgaattcatgaccataattcaagcattcagattcatgggctgttttgtgggttttgctatctcttattttgtttttgcacatcttacccactgaaacgttgggctgcaaaaatttgatcactatgtaggcaatgctggatactgggctgttatttacacatttgtatcaccttttatttcataagatagcaytgtcagagtaatttagtatttcaacataatcaacaagtaaaattaatgagaatgatcttactttgagtatttgtgtcatttctaaaatggtcctttttctttttttggatgcatattcatgctcttcattattgaatatttctccttcttcgctatttaagatactgaaataaagacatattctattaaaatattttttcagggagatcttcatttggcttttcttttgtaaaaggatacaaatacttcaaagtgacagactgtgggcttgaaatcacag

SEQ ID NO: 110783 - DNA, 527 bp, Homo sapiens
ttcgaaactcaagtcaggacacctctcagtttggcctcactgctcaagattgagctgaattcatgaccataattcaagcattcagattcatgggctgttttgtgggttttgctatctcttattttgtttttgcacatcttacccactgaaacgttgggctgcaaaaatttgatcactatgtaggcaatgctggatactgggctgttatttacacatttgtatcaccttttatttcataagatagcattgtcagagtaatttagtatttcaacataatcaacaagtaaaattaatgagaatgatcttactttgagtatttgtgtcatttctaaaatggtcctttttctttttttggatgcatattcatgctcttcattattgartatttctccttcttcgctatttaagatactgaaataaagacatattctattaaaatattttttcagggagatcttcatttggcttttcttttgtaaaaggatacaaatacttcaaagtgacagactgtgggcttgaaatcacag

SEQ ID NO: 110784 - DNA, 527 bp, Homo sapiens
ttcgaaactcaagtcaggacacctctcagtttggcctcactgctcaagattgagctgaattcatgaccataattcaagcattcagattcatgggctgttttgtgggttttgctatctcttattttgtttttgcacatcttacccactgaaacgttgggctgcaaaaatttgatcactatgtaggcaatgctggatactgggctgttatttacacatttgtatcaccttttatttcataagatagcattgtcagagtaatttagtatttcaacataatcaacaagtaaaattaatgagaatgatcttactttgagtatttgtgtcatttctaaaatggtcctttttctttttttggatgcatattcatgctcttcattattgaatatttctccwtcttcgctatttaagatactgaaataaagacatattctattaaaatattttttcagggagatcttcatttggcttttcttttgtaaaaggatacaaatacttcaaagtgacagactgtgggcttgaaatcacag

SEQ ID NO: 110785 - DNA, 483 bp, Homo sapiens
ggctgtgccagaaagtccaccagatgaggccgcaaacctatcaaagggcatcagacactctgtgcacagggtacacaaaacaatgcctcccacattctgtgacttcctgcgtgtgccacttggaccaccacactccctacctgcaccatcttacctggacagactaaatctcagccacctcatgactaggatattaacatggcttccagttctataaattcctcccccttaagaatgcatgtctgtaaaatcagaaatgatgaaaactggacttgtgagtggctttgtagtagggattacaggtccagaatagaataggttcagtaacatatttaagatatttaagggaaaaaatataagccaaagatttaacatctaaatagtgactatcmagggtaaaagtcacacatattttttatgagtacacacaaacacaggaagtacggtgaccaggagctgagggatgacccactaaagaataag

SEQ ID NO: 110786 - DNA, 608 bp, Homo sapiens
tactgtgttaggtattataagtaatctagagattatttaaagtatatggcataggcctaggttctttggaaatatgatgccatttgtatataagggacttgaccattgtggattttggaatgatagggaggccctggaactaatcctccacagatgccaagggatgactgtactaggattctattacacatctttccaaatattagacaacctaatgtgattttgtaaatttttgtatgagatgtagagtagtagcttttaaaataatacttacattttggcccacttatctagttcttcttcaagatatgttttaaccatttttggttgaaggccaagagaatttcccaagaaatagatggcattttcatctttattcactaatgataaatcaactgaaacagaagaaatgtcaaaaaaaaaaaaaataaaagctttttcagtatggtattgttaagccagtacaaataattaatacaatmaactctaagaaggataaaaagtaattaaaaattactcccaaggatgacatcaggtcctctaaaaaataattaacttttgcatttacatttaaaatataatttaaacctatagaggctattatgagg

SEQ ID NO: 110787 - DNA, 433 bp, Homo sapiens
ccagtaaaggaagatgcaaataaatccaaaattaatgtacatacataagtaaaatacaaagtaatataaaacttatcacactaccaaagaggcataattttccagttgatttaggactgaacacatgcatgtaactacttttttttytaaaacctccccaaaaaattttgaatggaatagaaaaaaaaattacaaagtctaaactgcagaggacaaaatagaatgccaaaggagatgataataatatctggggagttggctcgctgatagacaagtggtaattgcctttctcaaaaaaaaaaaaaaaaaaaaaaaaaagtaaaccaaatcctaatctcccaatggcaaaaaaataaaaagccagctgctttaccctgctaatcacctgaccatgaaaagagccaaattctgtaaaatatttgaagagtaaatt

SEQ ID NO: 110788 - DNA, 551 bp, Homo sapiens
gacttcagcctggcccagggtcaagcccggtggacctggagacacatgattgcctatgtagaaaatctgacggaacctacaaaaaagctagcagaactaataagtgaatttagtaagattgcaagacaaaaatcaaatacaaaaatcaattttattttaatatgctatagtaacaacccccccaaaaactaacattaaaaacagtattatttagaatagcmctaaatatgaaatacttagagataaatctgacaaaacatgtgaaagacctcaacctacaccaataacaaaatacgttgttgagaaaaattaaataaaacctaaataagtagagagcaatatgttgtttgtgagttagaagatgcaacgttattaagatgtaattctccctgaattaacagagtcaataggatcccaatcaaaatgtcagcagactttttttaagagaaaaattgtaagttaattttaaaattcaaaagacctagagtaaaatttaaaagacctatagtagccaaaacagctttaaaaaaaaaaaaaaaaaaaacaaagaa

SEQ ID NO: 110789 - DNA, 551 bp, Homo sapiens
gacttcagcctggcccagggtcaagcccggtggacctggagacacatgattgcctatgtagaaaatctgacggaacctacaaaaaagctagcagaactaataagtgaatttagtaagattgcaagacaaaaatcaaatacaaaaatcaattttattttaatatgctatagtaacaacccccccaaaaactaacattaaaaacagtattatttagaatagccctaaatatgaaatacttagagataaatctgacaaaacatgtgaaagacctcaacctacaccaataacaaaatacgttgttgagaaaaattaaataaaacctaaataagtagagagcaatatgttgtttgtgagttagaagatgcaacgttattaagatgtaattctccctgaattaacagagtcaataggatcccaatcaaaatgtcagcagactttttttaagagaaaaattgtaagttaattytaaaattcaaaagacctagagtaaaatttaaaagacctatagtagccaaaacagctttaaaaaaaaaaaaaaaaaaaacaaagaa

SEQ ID NO: 110790 - DNA, 551 bp, Homo sapiens
gacttcagcctggcccagggtcaagcccggtggacctggagacacatgattgcctatgtagaaaatctgacggaacctacaaaaaagctagcagaactaataagtgaatttagtaagattgcaagacaaaaatcaaatacaaaaatcaattttattttaatatgctatagtaacaacccccccaaaaactaacattaaaaacagtattatttagaatagccctaaatatgaaatacttagagataaatctgacaaaacatgtgaaagacctcaacctacaccaataacaaaatacgttgttgagaaaaattaaataaaacctaaataagtagagagcaatatgttgtttgtgagttagaagatgcaacgttattaagatgtaattctccctgaattaacagagtcaataggatcccaatcaaaatgtcagcagactttttttaagagaaaaattgtaagttaattttaaaattcaaaagacctagagtaaaatttraaagacctatagtagccaaaacagctttaaaaaaaaaaaaaaaaaaaacaaagaa

SEQ ID NO: 110791 - DNA, 581 bp, Homo sapiens
gacacatgcaaagggatggcaatgtgagggcacagggagaaaacagccatttgcgagccaaggagagaagcctcaggagaaaccaaccctaccagcaccttgatcttggacttccagcctccaggactttgagaaaatacacttctgtcatttaagctgcctagtctgaggcatttgcagcagcagccccagttgactaatgtgggtccctctctgctcaaccctggagccacaagaaaaccttgacccacgaatgccacagaggkctctctcatcagcactttcctcaggaagttctctgctgacagtggatgtctgggtagagcaaggaacaagctgcctttccagagacagaggtcttaggaatgctgtttgggggactggccaaagtctttagcctgggaacagatggaggttgattaacatttggcatgtgggtccctcaaggggaaaacctttcatgtgaacaagagatggctcttggaagagagaagtgtgagccttgaattcctctttcagacatgcctgtcactaaatcccacacccatctggcttcaggttctcaacatataaattctaga

SEQ ID NO: 110792 - DNA, 356 bp, Homo sapiens
ctccagcctgggtggcagagtgagactccggctcaaaaaaaaaaaaaaaaaaaagaatagatatatagctatgtaactaaatatctcagactaggtaccttggagacacgctctgagcctgagattgcatgcaggtttattgggaggtgctctcaggatatttaactctaaggaagtgaagagagcaggattggacagagggagaagctgaactgcaatataattgcaactgagccctcagcccatcctacagtggcccctgcagttgagagraaccttcagagctgtccaaattgaggcagaaacggcagggtctttatatccgggcatcagccaggtggtgatccctcgccgtt

SEQ ID NO: 110793 - DNA, 356 bp, Homo sapiens
ctccagcctgggtggcagagtgagactccggctcaaaaaaaaaaaaaaaaaaaagaatagatatatagctatgtaactaaatatctcagactaggtaccttggagacacgctctgagcctgagattgcatgcaggtttattgggaggtgctctcaggatatttaactctaaggaagtgaagagagcaggattggacagagggagaagctgaactgcaatataattgcaactgagccctcagcccatcctacagtggcccctgcagttgagaggaaccttcagagctgtccaaattgaggcagaaacggcagggtctttatatccgggcatcagccmggtggtgatccctcgccgtt

SEQ ID NO: 110794 - DNA, 526 bp, Homo sapiens
ccccccgtactctgttaggaagaccgtcacccagctgatctgggcccccacatcctggaagtagagtgtggccatggcgcccacgggcatcttctgcagaacatcttcatcattcagggacttgcccttggggtccaggcggagggactggtgggcagggtaccactgcagaggggtcttggtgaagaggttcttgatctctgcagtggtggtgtggggctccaccttgtccaggaaacacagcttctcccctgtctttgcgtgcagaatctccacctcttagtgcttcatggctgtctcccacggcggctactgctccatggctgctgctgcctaactgcgcggcacagcacagggtcccgccgttcggggtccctgacttcccgcarcactatataccaagtggcattatgtgatcttcttcatagaggtcccaaaacatattgccttgtatatttggccttttgatagtttacttgtactttcttaattttttttttgccgtctcaggattaactttatactc

SEQ ID NO: 110795 - DNA, 518 bp, Homo sapiens
tgagagataggaagtcatttgctagtttcatacagagaaaaaacaggatctgaccattgttttaacatgatctctctggctatgctgcctggaacacagtgaagaagatcaaggtgaaacaaggacatcattcaagaggtcatttaaataattattgtcttggaccaagattttagtatgaaggtagtaaaattggtaagattctgaatatattttcaggatacagctgtcagagtttgctgatggattagtcattgagtayaaaaacaaagtgaagagtgaagaatatctctaagaatcatggcctgagcaataaaataatagtattaccattttctcagatgggaaacaaaacgagagtcctatttaggagaatatcagtcccccagttttggacattaaaagtgattattacccatatcatagccacacactttctcctgggttctcactcaggaacacaggcaaacattactgacttctagtgagaagccttgagtcaactaatagaggaattc

SEQ ID NO: 110796 - DNA, 471 bp, Homo sapiens
gccatgtctgcaagacttcagacagatggattgaatggagaagaaggggttagagatggagkttcagaatggcctgaattatgcctcgcccctgcctcccaccccacctaaaaaatttatgtttaagtcctaacacccaggacttcagaatgtgactatatttggagacagggtctccaaagggttaatcaaagtgaaatgaggtcatcagcgtggaccttcatccaacctgactggtgtcatataagaagaggagattaggacacaaatgcggagaccacatgaagaaacagagaagacggccacttacaaacaaaggagagaggcctcagaagaaaccagtgctgccaacacctttatcttggactttgagcctcgcctctagaacagtgagaaaataagtttgtgttgtttaagtcaccccggtctgtggtatttgcgatggcagccctaccaaactaatatgacccc

SEQ ID NO: 110797 - DNA, 542 bp, Homo sapiens
cgcctgcctgattccaggcgtcaccaccaacccgggggccgcgaggctgggatcaggcaccccggagccgcttgcctgtggccgggctgctctccccctctacgcccaagcaccaccatcgccgcgctgcgctttccgccgacctcccagagcgtcccgatgtcgccggcggccagaccatgcgcgagacagcccaggcgccagagrcctccatcccctgccagggctctggactctccaggcggccaccctctcgctgggactccaggccttccccaggctcttgagctcccgagcttccaacacctggggcccgcttaggacggggtgtgctccgaggcgtcagggcccagggcccacggtcctggggtcccctccggtcctccgccttgccgcggaaaaattattttggattcctcaccgcccctcctgcaaggccccctcttgccccacacacccagagccgccagggctgcccaggggcgaacagccggcccagccccacaggccctttttctcacaatgctcacaccatcgtcgct

SEQ ID NO: 110798 - DNA, 542 bp, Homo sapiens
cgcctgcctgattccaggcgtcaccaccaacccgggggccgcgaggctgggatcaggcaccccggagccgcttgcctgtggccgggctgctctccccctctacgcccaagcaccaccatcgccgcgctgcgctttccgccgacctcccagagcgtcccgatgtcgccggcggccagaccatgcgcgagacagcccaggcgccagagacctccatcccctgccagggctctggactctccaggcggccaccctctcgctgggactccaggccttccccaggctcttgagctcccgagcttccaacacctggggcccgcttaggacggggtgtgctccgaggcgtcagggcccagggcccacggtcctggggtcccctccggtcctccgccttgccgcggaaaaattattttggattcctcrccgcccctcctgcaaggccccctcttgccccacacacccagagccgccagggctgcccaggggcgaacagccggcccagccccacaggccctttttctcacaatgctcacaccatcgtcgct

SEQ ID NO: 110799 - DNA, 651 bp, Homo sapiens
agtgccctatcttagtaattttttcaaaaaaccttgattaagtgatcttttgaacagtttttcatgtctcaatttctttcaattcagctctgattttagttatttcttgtcttctataagctttgtggttgagttctccttgcttctctaattctttcagttgtgatgttaggttgttaatttgagatatttctaattttttgatatgggcattacttcttatgccctactctaaattttgktcttctagaaaactcagaactatgctttctaaaccaattcaaactttctcagtgaatcaacctggactccctgaggccaagttagcaattttccattacacttggttctctttctctgtaagaatatctaatgcaacaattcaagtgtttctttccctcctggtaatgcggggaactccttttggctgagaccaagacttaaaaccttgttctttcaacattaatgaagatctatttagaaagcctccatttttgcagaaaagatatataaacaccaatgaaaatcaatatgaaattatatgacatacaattatattgtggaaagactgaataaataagtgaactaagctctaagaaaaaaagatgatgatataaaatgatatagaagtaaaaacctgggctggtatag

SEQ ID NO: 110800 - DNA, 651 bp, Homo sapiens
agtgccctatcttagtaattttttcaaaaaaccttgattaagtgatcttttgaacagtttttcatgtctcaatttctttcaattcagctctgattttagttatttcttgtcttctataagctttgtggttgagttctccttgcttctctaattctttcagttgtgatgttaggttgttaatttgagatatttctaattttttgatatgggcattacttcttatgccctactctaaattttgttcttctagaaaactcagaactatgctttctaaaccaattcaaactttctcagtgaatcaacctggactccctgaggccaagttagcaattttccattacacktggttctctttctctgtaagaatatctaatgcaacaattcaagtgtttctttccctcctggtaatgcggggaactccttttggctgagaccaagacttaaaaccttgttctttcaacattaatgaagatctatttagaaagcctccatttttgcagaaaagatatataaacaccaatgaaaatcaatatgaaattatatgacatacaattatattgtggaaagactgaataaataagtgaactaagctctaagaaaaaaagatgatgatataaaatgatatagaagtaaaaacctgggctggtatag

SEQ ID NO: 110801 - DNA, 651 bp, Homo sapiens
agtgccctatcttagtaattttttcaaaaaaccttgattaagtgatcttttgaacagtttttcatgtctcaatttctttcaattcagctctgattttagttatttcttgtcttctataagctttgtggttgagttctccttgcttctctaattctttcagttgtgatgttaggttgttaatttgagatatttctaattttttgatatgggcattacttcttatgccctactctaaattttgttcttctagaaaactcagaactatgctttctaaaccaattcaaactttctcagtgaatcaacctggactccctgaggccaagttagcaattttccattacacttggttctctttctctgtaagaatatctaatgcaacaatkcaagtgtttctttccctcctggtaatgcggggaactccttttggctgagaccaagacttaaaaccttgttctttcaacattaatgaagatctatttagaaagcctccatttttgcagaaaagatatataaacaccaatgaaaatcaatatgaaattatatgacatacaattatattgtggaaagactgaataaataagtgaactaagctctaagaaaaaaagatgatgatataaaatgatatagaagtaaaaacctgggctggtatag

SEQ ID NO: 110802 - DNA, 396 bp, Homo sapiens
ggcatcttgtactatatattcaactatgtatccctagtacctagcacagtcctggcatatagtttgctactaaacttttacagaatgaaggaattatcttgtatccaggttccaagttttaaggtgattcttcastaaaaaaaagtattacagttcacaaataatctacttccctttttacaaatgggatcaattttaatcttatctcctaataacattactttcatttactctgatctaaatatactgtcctaagagagcaataagaaagagagttgaagctggagtttgaagaattgtacatggtcctgtgataccctaccttgttttaacctgagtgactctctcctagcggagagagagccggacagactccattttagtttcttcacgtgc

SEQ ID NO: 110803 - DNA, 592 bp, Homo sapiens
tcccacataccgtaaaatgaggaaatgcatagaagcagatgtaactgaagaagacagcagaagcaacaaggagggacaaccaggacctaggagggcaccatgccagagacgcctggaccccatgctaggctcagtgcctgttatrctcttgggagccagcactttccctctccatcacatggcatacttgccattatttgttgtgtaaaatattgtccttagttttcacctttcctaggagacacaggcagagcctgtgacactacagcttctggcacacagtaggtaggtgcatcacaaacatctgctgagttcacacactcttgccttctcaaaacttcttgtcaagtcttcagtgaaaaggaattgctgattgagcaagaattaaacttctagagactcctggatccactgaagtttgagacaaggtgagatttgtttactgtcatattcctagctcataacatattgtagtcacttaaaaaagtttgttgaataagtgagtaaattgattcatacgtcatacttagctatatattttctgagtagaattgataaagttaatagtttaagtctagtataattttgcttt

SEQ ID NO: 110804 - DNA, 220 bp, Homo sapiens
agaaccagactgtactcagctgacatctgccaatggaaggagcatgtgtattggccctagaaagaggaaaacytcccatcctagtgttgggagcttgagtttttacaagtcttgccatcatgagttgacgtgctattggactctaagagaacttaaggggcagtctaggccacaaggacttcaattattaggcaagtcttattccaagctgggctcagag

SEQ ID NO: 110805 - DNA, 220 bp, Homo sapiens
agaaccagactgtactcagctgacatctgccaatggaaggagcatgtgtattggccctagaaagaggaaaacctcccatcctagtgttgggagcttgagtttttacaagtcttgccatcatgagttgacgtgctattggactctaagagaacttaaggggcagyctaggccacaaggacttcaattattaggcaagtcttattccaagctgggctcagag

SEQ ID NO: 110806 - DNA, 220 bp, Homo sapiens
agaaccagactgtactcagctgacatctgccaatggaaggagcatgtgtattggccctagaaagaggaaaacctcccatcctagtgttgggagcttgagtttttacaagtcttgccatcatgagttgacgtgctattggactctaagagaacttaaggggcagtctaggccacaaggacttcaattattaggcaagtcwtattccaagctgggctcagag

SEQ ID NO: 110807 - DNA, 586 bp, Homo sapiens
gatttggctgtgtccccactcatcttaacttgtggttcccataatccccatgtgttgtgggaaggacccagtgggaggtaattgaatcatgggggcggttacttccatgctgctgttctcataatggtgagtgagttctcacgagaactgatggttttataagggccttttctccgtttgctcagcacttctcctttctgccatcatgtgaaggaggacatgtttgcttccccttctgccatgattttaagtttcctgaggcctccccagccatgctgaactgtgagtcaattaaagctcccttttacaaattacccagtctcgggtatgcctttattagcagcgtgagaacggactaatacaattcttcygatgaatatattcttctcattgataaatgcttgatgtaaatgcttaatttttcctctagctgccttcaagatttttctcattgtctgtggttttcagcaatttggataccttacatatcatttttgtgaatcttccacagagatcagtggacacatgtggcacaaagaacatgtgaattaagaatgcactcctgaataacatattttacatatgt

SEQ ID NO: 110808 - DNA, 549 bp, Homo sapiens
aaaagaaaaaaacaacatcttcctagaaactgattgcataaaggtaagaggaaacgagaaaacaaaactgagacatcacaggcagtggggatgtatgaccttcttatggcagagtttagcagaggatgggtccccaagactgaaagatgtcagtaagcacttagcaatggtgacagtgagagtcacacccactacacaccctactctctaaggtcaattcagcaggctggcagggatgtttactattttattttatttattttattttaaatcttaagcctgtatttttagtagaggtggggtttcatcatgttggccaggctggtcttgaactcctgacctccttgaactcctgtaatcccagctacttgggaggctgaagcaggagaatcgcttgaacctgggaggtrgagatacatttttcctgctgcccactcttcaccctgctgcagtcccctttctcctgagcacatgtctggttatagctctggcctttcaagactatagctcctgctgactggtgacttacaggtgtgcatatctcgtgac

SEQ ID NO: 110809 - DNA, 583 bp, Homo sapiens
gatgttccaggaactattctaagggcatcaagtgctgttcttgtcacaggcaaagaaagccccaaagggaaggtgtctcttccggcggtgcctgccccacctccaagcctggcacctttcaaaatttatcttaggacatttccgrcaggtgttgctcttcttcagctttgtcctggcataattttgtctcccaggaggcttcattttcttccttcattgatcctacatgtgctgtagctaacaggaattcctcagagctcgtagcctttggatagcgtggtttcacggttgtcaacactgatatgtttatctatactttgagcttcgtgtagttttcattaggattttgtgaaatgcacaggatgatgtaggctagaatgataggttcaattagctatgttccttgatgatttcacagtaagttatatttaaataaccaaactattcagatttatgcttctatgataagagatttcagtatttttgaatcaaaccattttaagggttttttttttaatgaaacttatttacttaaaatgattacataactctccccttgcatgccacattttaggcaaaatta

SEQ ID NO: 110810 - DNA, 583 bp, Homo sapiens
gatgttccaggaactattctaagggcatcaagtgctgttcttgtcacaggcaaagaaagccccaaagggaaggtgtctcttccggcggtgcctgccccacctccaagcctggcacctttcaaaatttatcttaggacatttccgacaggtgttgctcttcttcagctttgtcctggcataattttgtctcccaggagscttcattttcttccttcattgatcctacatgtgctgtagctaacaggaattcctcagagctcgtagcctttggatagcgtggtttcacggttgtcaacactgatatgtttatctatactttgagcttcgtgtagttttcattaggattttgtgaaatgcacaggatgatgtaggctagaatgataggttcaattagctatgttccttgatgatttcacagtaagttatatttaaataaccaaactattcagatttatgcttctatgataagagatttcagtatttttgaatcaaaccattttaagggttttttttttaatgaaacttatttacttaaaatgattacataactctccccttgcatgccacattttaggcaaaatta

SEQ ID NO: 110811 - DNA, 583 bp, Homo sapiens
gatgttccaggaactattctaagggcatcaagtgctgttcttgtcacaggcaaagaaagccccaaagggaaggtgtctcttccggcggtgcctgccccacctccaagcctggcacctttcaaaatttatcttaggacatttccgacaggtgttgctcttcttcagctttgtcctggcataattttgtctcccaggaggcttcattttcttccttcattgatcctacatgtgctgtagctaacaggaattcctcagagctcgtagcctttggatagcgtggtttcacggttgtcaacactgatatgtttatctatactttgagcttcgtgtagttttcattaggattttgtgaaatgcacaggatgatgtaggctagaatgataggttcaattagctatgttccttgatgatttcacagtaagttatatttaaataaccaaactattcagatttatgcttctatgataagagatttcagtatttttgaatcaaaccattttaagggtttttttttwaatgaaacttatttacttaaaatgattacataactctccccttgcatgccacattttaggcaaaatta
